United States Patent Application Publication US 2005/0244851 A1 - sequence listing, part 63

SEQ ID NO: 2448424 - DNA, 25 bp, Homo sapien
cactgagttgactgattattgcgga

SEQ ID NO: 2448425 - DNA, 25 bp, Homo sapien
tattgcggagcttgaatccagggct

SEQ ID NO: 2448426 - DNA, 25 bp, Homo sapien
ttgcggagcttgaatccagggctac

SEQ ID NO: 2448427 - DNA, 25 bp, Homo sapien
tcaggggaccccactggactcttac

SEQ ID NO: 2448428 - DNA, 25 bp, Homo sapien
ggaatcaggggaccccactggactc

SEQ ID NO: 2448429 - DNA, 25 bp, Homo sapien
cagctggaatcaggggaccccactg

SEQ ID NO: 2448430 - DNA, 25 bp, Homo sapien
atcaggggaccccactggactctta

SEQ ID NO: 2448431 - DNA, 25 bp, Homo sapien
aacccaagcttctgtactcgatgta

SEQ ID NO: 2448432 - DNA, 25 bp, Homo sapien
ttctcctccttcgatgtgcgaacgt

SEQ ID NO: 2448433 - DNA, 25 bp, Homo sapien
gatgtgcgaacgtgcccaaagcaca

SEQ ID NO: 2448434 - DNA, 25 bp, Homo sapien
ccttcgatgtgcgaacgtgcccaaa

SEQ ID NO: 2448435 - DNA, 25 bp, Homo sapien
ccaggtcatgccagccccatcttac

SEQ ID NO: 2448436 - DNA, 25 bp, Homo sapien
gtcctcctcccaggtcatgccagcc

SEQ ID NO: 2448437 - DNA, 25 bp, Homo sapien
gcattctaagtcacccccacagccc

SEQ ID NO: 2448438 - DNA, 25 bp, Homo sapien
cccacagccctctgatgccagtcct

SEQ ID NO: 2448439 - DNA, 25 bp, Homo sapien
cagcctggagctgtcttcccacact

SEQ ID NO: 2448440 - DNA, 25 bp, Homo sapien
gcctggagctgtcttcccacactct

SEQ ID NO: 2448441 - DNA, 25 bp, Homo sapien
cttccttaggtggttggtctcatct

SEQ ID NO: 2448442 - DNA, 25 bp, Homo sapien
taggtggttggtctcatcttgtagc

SEQ ID NO: 2448443 - DNA, 25 bp, Homo sapien
gctcatagagggcttcccaacccag

SEQ ID NO: 2448444 - DNA, 25 bp, Homo sapien
tccttgaagccgctgtgtgactccg

SEQ ID NO: 2448445 - DNA, 25 bp, Homo sapien
gtgtgactccgccctctgctcatag

SEQ ID NO: 2448446 - DNA, 25 bp, Homo sapien
tgaagccgctgtgtgactccgccct

SEQ ID NO: 2448447 - DNA, 25 bp, Homo sapien
gttcctccaactgcattgcgctctt

SEQ ID NO: 2448448 - DNA, 25 bp, Homo sapien
ttcctccaactgcattgcgctcttg

SEQ ID NO: 2448449 - DNA, 25 bp, Homo sapien
tcttcttggaggggtcggagattac

SEQ ID NO: 2448450 - DNA, 25 bp, Homo sapien
atcttcttggaggggtcggagatta

SEQ ID NO: 2448451 - DNA, 25 bp, Homo sapien
catgtggtggctggcttccagattc

SEQ ID NO: 2448452 - DNA, 25 bp, Homo sapien
ggcatgagggcatgtggtggctggc

SEQ ID NO: 2448453 - DNA, 25 bp, Homo sapien
ctgggcatgagggcatgtggtggct

SEQ ID NO: 2448454 - DNA, 25 bp, Homo sapien
gcatgagggcatgtggtggctggct

SEQ ID NO: 2448455 - DNA, 25 bp, Homo sapien
tgctgctgccgcagacttggagcct

SEQ ID NO: 2448456 - DNA, 25 bp, Homo sapien
ttgctgctgccgcagacttggagcc

SEQ ID NO: 2448457 - DNA, 25 bp, Homo sapien
ggctcctagagcggtacacaggtac

SEQ ID NO: 2448458 - DNA, 25 bp, Homo sapien
cctgtaccaacagcttctccaccca

SEQ ID NO: 2448459 - DNA, 25 bp, Homo sapien
tgcagcctctcctgtaccaacagct

SEQ ID NO: 2448460 - DNA, 25 bp, Homo sapien
aagaatggcatgcagcatctcctgc

SEQ ID NO: 2448461 - DNA, 25 bp, Homo sapien
ttctcggcagcccaaaaagaatggc

SEQ ID NO: 2448462 - DNA, 25 bp, Homo sapien
tgcaagcacacgactgtgagagtgt

SEQ ID NO: 2448463 - DNA, 25 bp, Homo sapien
agtgtaagaatggcacccaggcctc

SEQ ID NO: 2448464 - DNA, 25 bp, Homo sapien
cctcagctaggacagaagcagctgg

SEQ ID NO: 2448465 - DNA, 25 bp, Homo sapien
tggaccacaggagtagaggccaggc

SEQ ID NO: 2448466 - DNA, 25 bp, Homo sapien
gtgcatggcacttccatcttggtgg

SEQ ID NO: 2448467 - DNA, 25 bp, Homo sapien
tggcacttccatcttggtgggtttt

SEQ ID NO: 2448468 - DNA, 25 bp, Homo sapien
tgcatggcacttccatcttggtggg

SEQ ID NO: 2448469 - DNA, 25 bp, Homo sapien
catggcacttccatcttggtgggtt

SEQ ID NO: 2448470 - DNA, 25 bp, Homo sapien
tgccacccaggaaagccgggaagag

SEQ ID NO: 2448471 - DNA, 25 bp, Homo sapien
ctggcagtgccacccaggaaagccg

SEQ ID NO: 2448472 - DNA, 25 bp, Homo sapien
gcagtgccacccaggaaagccggga

SEQ ID NO: 2448473 - DNA, 25 bp, Homo sapien
tccaggctggcagtgccacccagga

SEQ ID NO: 2448474 - DNA, 25 bp, Homo sapien
ggcctccctgtggagcactgagacc

SEQ ID NO: 2448475 - DNA, 25 bp, Homo sapien
ctccctgtggagcactgagaccagg

SEQ ID NO: 2448476 - DNA, 25 bp, Homo sapien
ctctggcctccctgtggagcactga

SEQ ID NO: 2448477 - DNA, 25 bp, Homo sapien
ctggggagccggtgacccagttctc

SEQ ID NO: 2448478 - DNA, 25 bp, Homo sapien
cctctcgccccagtcgctgcgccct

SEQ ID NO: 2448479 - DNA, 25 bp, Homo sapien
acctctcgccccagtcgctgcgccc

SEQ ID NO: 2448480 - DNA, 25 bp, Homo sapien
ccttacgctcgggttttatgttgct

SEQ ID NO: 2448481 - DNA, 25 bp, Homo sapien
gcctgacttattactggatgccagt

SEQ ID NO: 2448482 - DNA, 25 bp, Homo sapien
gactttcagcgatttctaccttacg

SEQ ID NO: 2448483 - DNA, 25 bp, Homo sapien
tggcaaagcctgacttattactgga

SEQ ID NO: 2448484 - DNA, 25 bp, Homo sapien
ccgttcctgtctgcaccaggtggcc

SEQ ID NO: 2448485 - DNA, 25 bp, Homo sapien
gcctcccgttcctgtctgcaccagg

SEQ ID NO: 2448486 - DNA, 25 bp, Homo sapien
ctatggagtacagtccagccctgac

SEQ ID NO: 2448487 - DNA, 25 bp, Homo sapien
tggagtacagtccagccctgacagc

SEQ ID NO: 2448488 - DNA, 25 bp, Homo sapien
tgcgggaatgatcccactttgccag

SEQ ID NO: 2448489 - DNA, 25 bp, Homo sapien
ccgaatctgttatctgggtcatgtg

SEQ ID NO: 2448490 - DNA, 25 bp, Homo sapien
tccagtggcagtggtaacagggtcc

SEQ ID NO: 2448491 - DNA, 25 bp, Homo sapien
tgccagttaaatggaatggtcttcc

SEQ ID NO: 2448492 - DNA, 25 bp, Homo sapien
tgacatgtgcctctcagcggttcca

SEQ ID NO: 2448493 - DNA, 25 bp, Homo sapien
tgcctctcagcggttccagcatcag

SEQ ID NO: 2448494 - DNA, 25 bp, Homo sapien
ccgcacctgcatgacatgtgcctct

SEQ ID NO: 2448495 - DNA, 25 bp, Homo sapien
atgtgcctctcagcggttccagcat

SEQ ID NO: 2448496 - DNA, 25 bp, Homo sapien
tcctcgcatcaggtgcaagggcaca

SEQ ID NO: 2448497 - DNA, 25 bp, Homo sapien
agtcttggccggccgctctcctgtg

SEQ ID NO: 2448498 - DNA, 25 bp, Homo sapien
aagtgagaggtactgcagccgccag

SEQ ID NO: 2448499 - DNA, 25 bp, Homo sapien
tgtctgtcctagtcctcgcatcagg

SEQ ID NO: 2448500 - DNA, 25 bp, Homo sapien
ctccaggcctgttctgccagaaaca

SEQ ID NO: 2448501 - DNA, 25 bp, Homo sapien
agagtgatgcctgcccgggccctgc

SEQ ID NO: 2448502 - DNA, 25 bp, Homo sapien
agagagtgatgcctgcccgggccct

SEQ ID NO: 2448503 - DNA, 25 bp, Homo sapien
ggcctgttctgccagaaacacccac

SEQ ID NO: 2448504 - DNA, 25 bp, Homo sapien
gtgggatgcaggcattgaatcatga

SEQ ID NO: 2448505 - DNA, 25 bp, Homo sapien
tggaacctgtttgtgtgggatgcag

SEQ ID NO: 2448506 - DNA, 25 bp, Homo sapien
tgcaggcattgaatcatgaacacgc

SEQ ID NO: 2448507 - DNA, 25 bp, Homo sapien
cattgaatcatgaacacgccaggtt

SEQ ID NO: 2448508 - DNA, 25 bp, Homo sapien
ggggtgtggagcattctcccttcca

SEQ ID NO: 2448509 - DNA, 25 bp, Homo sapien
ggtgtggagcattctcccttccagg

SEQ ID NO: 2448510 - DNA, 25 bp, Homo sapien
ccagcctctattggggggtgtggag

SEQ ID NO: 2448511 - DNA, 25 bp, Homo sapien
caccagcctctattggggggtgtgg

SEQ ID NO: 2448512 - DNA, 25 bp, Homo sapien
tggagaagccagtatggggcaagac

SEQ ID NO: 2448513 - DNA, 25 bp, Homo sapien
agaagccagtatggggcaagacccg

SEQ ID NO: 2448514 - DNA, 25 bp, Homo sapien
gacacatggccaatggtggcctcca

SEQ ID NO: 2448515 - DNA, 25 bp, Homo sapien
gagaagccagtatggggcaagaccc

SEQ ID NO: 2448516 - DNA, 25 bp, Homo sapien
gggagggacggaaccacatctgtat

SEQ ID NO: 2448517 - DNA, 25 bp, Homo sapien
gtgttccattcctgcccatgggcac

SEQ ID NO: 2448518 - DNA, 25 bp, Homo sapien
ggacggaaccacatctgtatcaggc

SEQ ID NO: 2448519 - DNA, 25 bp, Homo sapien
gccctggtgcacttggataaaatca

SEQ ID NO: 2448520 - DNA, 25 bp, Homo sapien
tgtgcctgcattgggttagggccct

SEQ ID NO: 2448521 - DNA, 25 bp, Homo sapien
gggatggcgcacacacgtctttcac

SEQ ID NO: 2448522 - DNA, 25 bp, Homo sapien
tgctcccaccgagtggaaacctgcc

SEQ ID NO: 2448523 - DNA, 25 bp, Homo sapien
ccgatcccagaaccagacgggtcgt

SEQ ID NO: 2448524 - DNA, 25 bp, Homo sapien
ctcctgttggggacaaggctgctag

SEQ ID NO: 2448525 - DNA, 25 bp, Homo sapien
tcctgacacccacactgccactgtc

SEQ ID NO: 2448526 - DNA, 25 bp, Homo sapien
tccagagatgccacatgatgggcct

SEQ ID NO: 2448527 - DNA, 25 bp, Homo sapien
gagatgccacatgatgggcctcctg

SEQ ID NO: 2448528 - DNA, 25 bp, Homo sapien
gggttggctccatgaacttcacagt

SEQ ID NO: 2448529 - DNA, 25 bp, Homo sapien
gtatggtcacctgccaatccccatg

SEQ ID NO: 2448530 - DNA, 25 bp, Homo sapien
ggctccatgaacttcacagtatggt

SEQ ID NO: 2448531 - DNA, 25 bp, Homo sapien
tgaacttcacagtatggtcacctgc

SEQ ID NO: 2448532 - DNA, 25 bp, Homo sapien
agtataattgccactgctacatctg

SEQ ID NO: 2448533 - DNA, 25 bp, Homo sapien
gcaagtataattgccactgctacat

SEQ ID NO: 2448534 - DNA, 25 bp, Homo sapien
tagcacaagcaagtataattgccac

SEQ ID NO: 2448535 - DNA, 25 bp, Homo sapien
caagcaagtataattgccactgcta

SEQ ID NO: 2448536 - DNA, 25 bp, Homo sapien
tcagaaagttgaagcaggaagatca

SEQ ID NO: 2448537 - DNA, 25 bp, Homo sapien
agctactcagaaagttgaagcagga

SEQ ID NO: 2448538 - DNA, 25 bp, Homo sapien
gctactcagaaagttgaagcaggaa

SEQ ID NO: 2448539 - DNA, 25 bp, Homo sapien
tactcagaaagttgaagcaggaaga

SEQ ID NO: 2448540 - DNA, 25 bp, Homo sapien
cacgctgacctctctcagtgtggga

SEQ ID NO: 2448541 - DNA, 25 bp, Homo sapien
ctcacgctgacctctctcagtgtgg

SEQ ID NO: 2448542 - DNA, 25 bp, Homo sapien
cgctgacctctctcagtgtgggagg

SEQ ID NO: 2448543 - DNA, 25 bp, Homo sapien
ggtgtgaggcaagggctcacgctga

SEQ ID NO: 2448544 - DNA, 25 bp, Homo sapien
cctgttgaggaaggggctcacactg

SEQ ID NO: 2448545 - DNA, 25 bp, Homo sapien
gcctgttgaggaaggggctcacact

SEQ ID NO: 2448546 - DNA, 25 bp, Homo sapien
ggtggcctgttgaggaaggggctca

SEQ ID NO: 2448547 - DNA, 25 bp, Homo sapien
tggcctgttgaggaaggggctcaca

SEQ ID NO: 2448548 - DNA, 25 bp, Homo sapien
agaggctgacttgaggaggcccgtc

SEQ ID NO: 2448549 - DNA, 25 bp, Homo sapien
gctgacttgaggaggcccgtcctct

SEQ ID NO: 2448550 - DNA, 25 bp, Homo sapien
ctgacttgaggaggcccgtcctctg

SEQ ID NO: 2448551 - DNA, 25 bp, Homo sapien
aggctgacttgaggaggcccgtcct

SEQ ID NO: 2448552 - DNA, 25 bp, Homo sapien
cttcggaaagttgtgggcctaccag

SEQ ID NO: 2448553 - DNA, 25 bp, Homo sapien
tgtgggcctaccagggcccctggga

SEQ ID NO: 2448554 - DNA, 25 bp, Homo sapien
tggggagcttggcttcggaaagttg

SEQ ID NO: 2448555 - DNA, 25 bp, Homo sapien
agacgttgttgggaggccggagtcg

SEQ ID NO: 2448556 - DNA, 25 bp, Homo sapien
tgccattggagggtaggagctgagc

SEQ ID NO: 2448557 - DNA, 25 bp, Homo sapien
ctgcagatgccattggagggtagga

SEQ ID NO: 2448558 - DNA, 25 bp, Homo sapien
gcagatgccattggagggtaggagc

SEQ ID NO: 2448559 - DNA, 25 bp, Homo sapien
gatgccattggagggtaggagctga

SEQ ID NO: 2448560 - DNA, 25 bp, Homo sapien
tcctggagaggccaacttcgggacg

SEQ ID NO: 2448561 - DNA, 25 bp, Homo sapien
ggccttcagaggctaccaggaggcc

SEQ ID NO: 2448562 - DNA, 25 bp, Homo sapien
gatttgggccttcagaggctaccag

SEQ ID NO: 2448563 - DNA, 25 bp, Homo sapien
gacgatttgggccttcagaggctac

SEQ ID NO: 2448564 - DNA, 25 bp, Homo sapien
ctgtgaggccaaggccgggcccgtg

SEQ ID NO: 2448565 - DNA, 25 bp, Homo sapien
cgctgtgaggccaaggccgggcccg

SEQ ID NO: 2448566 - DNA, 25 bp, Homo sapien
gtccgctgtgaggccaaggccgggc

SEQ ID NO: 2448567 - DNA, 25 bp, Homo sapien
tgtgaggccaaggccgggcccgtgc

SEQ ID NO: 2448568 - DNA, 25 bp, Homo sapien
ctgcaggtgaaacagatgctggtgg

SEQ ID NO: 2448569 - DNA, 25 bp, Homo sapien
tgctgcatgggtcccagaggctgga

SEQ ID NO: 2448570 - DNA, 25 bp, Homo sapien
caagggcaggatgttctgcacacaa

SEQ ID NO: 2448571 - DNA, 25 bp, Homo sapien
gtgaaacagatgctggtggtggctg

SEQ ID NO: 2448572 - DNA, 25 bp, Homo sapien
tgggactgatgactgcatgatcttc

SEQ ID NO: 2448573 - DNA, 25 bp, Homo sapien
gggactgatgactgcatgatcttct

SEQ ID NO: 2448574 - DNA, 25 bp, Homo sapien
gcctctgcctgagagtcacatgagg

SEQ ID NO: 2448575 - DNA, 25 bp, Homo sapien
tgcctctgcctgagagtcacatgag

SEQ ID NO: 2448576 - DNA, 25 bp, Homo sapien
ccactgcctctgcctgagagtcaca

SEQ ID NO: 2448577 - DNA, 25 bp, Homo sapien
actgcctctgcctgagagtcacatg

SEQ ID NO: 2448578 - DNA, 25 bp, Homo sapien
tggctttagcaccactgacactgat

SEQ ID NO: 2448579 - DNA, 25 bp, Homo sapien
aggaatagggtgtgatgatgtcatt

SEQ ID NO: 2448580 - DNA, 25 bp, Homo sapien
tgacactgatctcaagttcaaggag

SEQ ID NO: 2448581 - DNA, 25 bp, Homo sapien
tgctgatgatggctttagcaccact

SEQ ID NO: 2448582 - DNA, 25 bp, Homo sapien
acatagcgagtgacaaggagcacac

SEQ ID NO: 2448583 - DNA, 25 bp, Homo sapien
tgagctggtcattcccagcacatgg

SEQ ID NO: 2448584 - DNA, 25 bp, Homo sapien
tcattcccagcacatggccagtgag

SEQ ID NO: 2448585 - DNA, 25 bp, Homo sapien
gccagtgaggacatagcgagtgaca

SEQ ID NO: 2448586 - DNA, 25 bp, Homo sapien
aggcagaaataccatgaactggcct

SEQ ID NO: 2448587 - DNA, 25 bp, Homo sapien
taacaaaggctcgtgggagtggagc

SEQ ID NO: 2448588 - DNA, 25 bp, Homo sapien
agggcccgcaaccccacacactttg

SEQ ID NO: 2448589 - DNA, 25 bp, Homo sapien
cctgctgaatcattttaagatgctc

SEQ ID NO: 2448590 - DNA, 25 bp, Homo sapien
atctcctcctgctgaatcattttaa

SEQ ID NO: 2448591 - DNA, 25 bp, Homo sapien
gctgaatcattttaagatgctcgaa

SEQ ID NO: 2448592 - DNA, 25 bp, Homo sapien
cctcctgctgaatcattttaagatg

SEQ ID NO: 2448593 - DNA, 25 bp, Homo sapien
tcaaaaatggcttaagcctgcaaca

SEQ ID NO: 2448594 - DNA, 25 bp, Homo sapien
aaaaatggcttaagcctgcaacatg

SEQ ID NO: 2448595 - DNA, 25 bp, Homo sapien
tggcttaagcctgcaacatgtttct

SEQ ID NO: 2448596 - DNA, 25 bp, Homo sapien
taacaaggtgatagtcagttcttca

SEQ ID NO: 2448597 - DNA, 25 bp, Homo sapien
cattcagttcaagatgatgactcag

SEQ ID NO: 2448598 - DNA, 25 bp, Homo sapien
tcatactgccagaattgcaggcaat

SEQ ID NO: 2448599 - DNA, 25 bp, Homo sapien
ggcaatttatcaaagtcccctaatc

SEQ ID NO: 2448600 - DNA, 25 bp, Homo sapien
gaaattaatatgcagttcatactgc

SEQ ID NO: 2448601 - DNA, 25 bp, Homo sapien
ctggatacaggtcttgataggtctc

SEQ ID NO: 2448602 - DNA, 25 bp, Homo sapien
ggtcttgataggtctcttgatgtca

SEQ ID NO: 2448603 - DNA, 25 bp, Homo sapien
gatacaggtcttgataggtctcttg

SEQ ID NO: 2448604 - DNA, 25 bp, Homo sapien
tacaggtcttgataggtctcttgat

SEQ ID NO: 2448605 - DNA, 25 bp, Homo sapien
tggacgacagaccaagagtccagcc

SEQ ID NO: 2448606 - DNA, 25 bp, Homo sapien
ggttatagtgagtagtgatggcatc

SEQ ID NO: 2448607 - DNA, 25 bp, Homo sapien
cgtgccctctatcctggacgacaga

SEQ ID NO: 2448608 - DNA, 25 bp, Homo sapien
tagtgagtagtgatggcatccgtgc

SEQ ID NO: 2448609 - DNA, 25 bp, Homo sapien
cacagccatagataacctcctcagc

SEQ ID NO: 2448610 - DNA, 25 bp, Homo sapien
agccatagataacctcctcagccat

SEQ ID NO: 2448611 - DNA, 25 bp, Homo sapien
tcaaaatgcgaagcatggagttccc

SEQ ID NO: 2448612 - DNA, 25 bp, Homo sapien
tttgaagcgctcaggccagtcatag

SEQ ID NO: 2448613 - DNA, 25 bp, Homo sapien
taaggcaccctgactttttgaagcg

SEQ ID NO: 2448614 - DNA, 25 bp, Homo sapien
gatttgcttcattgccctctcatgg

SEQ ID NO: 2448615 - DNA, 25 bp, Homo sapien
aacaaaactgcccatgtcggtcctc

SEQ ID NO: 2448616 - DNA, 25 bp, Homo sapien
taaacaaaactgcccatgtcggtcc

SEQ ID NO: 2448617 - DNA, 25 bp, Homo sapien
acatgctactgcctagagcttgtct

SEQ ID NO: 2448618 - DNA, 25 bp, Homo sapien
cataaacaaaactgcccatgtcggt

SEQ ID NO: 2448619 - DNA, 25 bp, Homo sapien
caggctctcgaccttagcgccattt

SEQ ID NO: 2448620 - DNA, 25 bp, Homo sapien
aacgctcaggctgaagcgccaaaga

SEQ ID NO: 2448621 - DNA, 25 bp, Homo sapien
tcaggctctcgaccttagcgccatt

SEQ ID NO: 2448622 - DNA, 25 bp, Homo sapien
aagcgaacgctcaggctgaagcgcc

SEQ ID NO: 2448623 - DNA, 25 bp, Homo sapien
atgggcaatgagaaccttcaaacag

SEQ ID NO: 2448624 - DNA, 25 bp, Homo sapien
aacaagatgtctgtatctctgccac

SEQ ID NO: 2448625 - DNA, 25 bp, Homo sapien
agatggtcgatgctccctgagattg

SEQ ID NO: 2448626 - DNA, 25 bp, Homo sapien
tggagatggtcgatgctccctgaga

SEQ ID NO: 2448627 - DNA, 25 bp, Homo sapien
aagaatgtttgcattcagaacaaga

SEQ ID NO: 2448628 - DNA, 25 bp, Homo sapien
ggttgctgctcttgcgaatgccaca

SEQ ID NO: 2448629 - DNA, 25 bp, Homo sapien
gctgaatgtcaggttgctgctcttg

SEQ ID NO: 2448630 - DNA, 25 bp, Homo sapien
tgctcttgcgaatgccacactgtgc

SEQ ID NO: 2448631 - DNA, 25 bp, Homo sapien
ttgcgaatgccacactgtgctaagc

SEQ ID NO: 2448632 - DNA, 25 bp, Homo sapien
tgatttttcttgaggattcttccct

SEQ ID NO: 2448633 - DNA, 25 bp, Homo sapien
gagaaaaacacaattgagctcctga

SEQ ID NO: 2448634 - DNA, 25 bp, Homo sapien
actgagaaaaacacaattgagctcc

SEQ ID NO: 2448635 - DNA, 25 bp, Homo sapien
gaaaaacacaattgagctcctgaat

SEQ ID NO: 2448636 - DNA, 25 bp, Homo sapien
tgagaaaaacacaattgagctcctg

SEQ ID NO: 2448637 - DNA, 25 bp, Homo sapien
cataatgaggaaggatttcagattc

SEQ ID NO: 2448638 - DNA, 25 bp, Homo sapien
cccataatgaggaaggatttcagat

SEQ ID NO: 2448639 - DNA, 25 bp, Homo sapien
ttcttctcaatgtgcttcaaagctc

SEQ ID NO: 2448640 - DNA, 25 bp, Homo sapien
cagattcttctcaatgtgcttcaaa

SEQ ID NO: 2448641 - DNA, 25 bp, Homo sapien
cccagaatgtccagtgaaaatcttg

SEQ ID NO: 2448642 - DNA, 25 bp, Homo sapien
gttcaccttgactcacattggaaaa

SEQ ID NO: 2448643 - DNA, 25 bp, Homo sapien
ggttcaccttgactcacattggaaa

SEQ ID NO: 2448644 - DNA, 25 bp, Homo sapien
aactccagggtgcgcactgggtagt

SEQ ID NO: 2448645 - DNA, 25 bp, Homo sapien
tccagggtgcgcactgggtagtggc

SEQ ID NO: 2448646 - DNA, 25 bp, Homo sapien
ggaactccagggtgcgcactgggta

SEQ ID NO: 2448647 - DNA, 25 bp, Homo sapien
cagggtgcgcactgggtagtggcct

SEQ ID NO: 2448648 - DNA, 25 bp, Homo sapien
gatcccccagccttttgaaccacaa

SEQ ID NO: 2448649 - DNA, 25 bp, Homo sapien
cccccagccttttgaaccacaagct

SEQ ID NO: 2448650 - DNA, 25 bp, Homo sapien
tcccccagccttttgaaccacaagc

SEQ ID NO: 2448651 - DNA, 25 bp, Homo sapien
atcccccagccttttgaaccacaag

SEQ ID NO: 2448652 - DNA, 25 bp, Homo sapien
cctcacccactaggtatttccacaa

SEQ ID NO: 2448653 - DNA, 25 bp, Homo sapien
agcctaggtgctctgtcatgttccc

SEQ ID NO: 2448654 - DNA, 25 bp, Homo sapien
gctctgtcatgttcccggtccttga

SEQ ID NO: 2448655 - DNA, 25 bp, Homo sapien
ccacgtggtaggtcagcctaggtgc

SEQ ID NO: 2448656 - DNA, 25 bp, Homo sapien
ggatgtaaccattactgaaaccaga

SEQ ID NO: 2448657 - DNA, 25 bp, Homo sapien
aatgatgacagaagttgagagctgc

SEQ ID NO: 2448658 - DNA, 25 bp, Homo sapien
ccagggccaatggttcctccagagc

SEQ ID NO: 2448659 - DNA, 25 bp, Homo sapien
ttctggcatcaatcttacatctgac

SEQ ID NO: 2448660 - DNA, 25 bp, Homo sapien
ttttgcaccaggattaagtgaagat

SEQ ID NO: 2448661 - DNA, 25 bp, Homo sapien
gaaagcttttttgcaccaggattaa

SEQ ID NO: 2448662 - DNA, 25 bp, Homo sapien
gcttttttgcaccaggattaagtga

SEQ ID NO: 2448663 - DNA, 25 bp, Homo sapien
aaagaaagcttttttgcaccaggat

SEQ ID NO: 2448664 - DNA, 25 bp, Homo sapien
ttcacagactgcctcacacaatggg

SEQ ID NO: 2448665 - DNA, 25 bp, Homo sapien
tcagggagtctgtcgcattcctcac

SEQ ID NO: 2448666 - DNA, 25 bp, Homo sapien
ctctacagctttcctcatgagggtg

SEQ ID NO: 2448667 - DNA, 25 bp, Homo sapien
tcactgacttcaccacgtgaattct

SEQ ID NO: 2448668 - DNA, 25 bp, Homo sapien
tctaggaaacatagcctgggagtca

SEQ ID NO: 2448669 - DNA, 25 bp, Homo sapien
gatgatatcggttatgtcgcaactg

SEQ ID NO: 2448670 - DNA, 25 bp, Homo sapien
tggaatacggtggatcaatgcgatc

SEQ ID NO: 2448671 - DNA, 25 bp, Homo sapien
tgggagtcatttgtcctagtaaccc

SEQ ID NO: 2448672 - DNA, 25 bp, Homo sapien
gcctctaaggaataactgactgcca

SEQ ID NO: 2448673 - DNA, 25 bp, Homo sapien
cacactaccataggctgagacaatg

SEQ ID NO: 2448674 - DNA, 25 bp, Homo sapien
cctatgcaaactggtgaaaaccctg

SEQ ID NO: 2448675 - DNA, 25 bp, Homo sapien
gacaatggcccctttcactggagac

SEQ ID NO: 2448676 - DNA, 25 bp, Homo sapien
tgaatcatgtcactaccttttcttt

SEQ ID NO: 2448677 - DNA, 25 bp, Homo sapien
ttgaatcatgtcactaccttttctt

SEQ ID NO: 2448678 - DNA, 25 bp, Homo sapien
gtgttctcagtcttgaatcatgtca

SEQ ID NO: 2448679 - DNA, 25 bp, Homo sapien
ctgtgttctcagtcttgaatcatgt

SEQ ID NO: 2448680 - DNA, 25 bp, Homo sapien
tacttcaagatatgtcataatgttc

SEQ ID NO: 2448681 - DNA, 25 bp, Homo sapien
taggttttgtactccgtcgtatgtc

SEQ ID NO: 2448682 - DNA, 25 bp, Homo sapien
tgtcacaattcattctgcggtcagg

SEQ ID NO: 2448683 - DNA, 25 bp, Homo sapien
taggagacgagcgtcacacttccag

SEQ ID NO: 2448684 - DNA, 25 bp, Homo sapien
ctgggtccagatttaagagtcgtga

SEQ ID NO: 2448685 - DNA, 25 bp, Homo sapien
tcacctgtaaacagagagcaaggag

SEQ ID NO: 2448686 - DNA, 25 bp, Homo sapien
catcttgcatatgacctgggtccag

SEQ ID NO: 2448687 - DNA, 25 bp, Homo sapien
ggtgatcacccgaggtatatttcca

SEQ ID NO: 2448688 - DNA, 25 bp, Homo sapien
tcagcagggcactaaccgaaaagtc

SEQ ID NO: 2448689 - DNA, 25 bp, Homo sapien
cagaaaactttggtgccagtcccag

SEQ ID NO: 2448690 - DNA, 25 bp, Homo sapien
cagctgggtgtgcatacaatactca

SEQ ID NO: 2448691 - DNA, 25 bp, Homo sapien
tctgaggaccctctacaacaggaga

SEQ ID NO: 2448692 - DNA, 25 bp, Homo sapien
tgggccctgttatgcaactctctac

SEQ ID NO: 2448693 - DNA, 25 bp, Homo sapien
gatttaacctattgcactaagccta

SEQ ID NO: 2448694 - DNA, 25 bp, Homo sapien
tatgtcatacatgagagccaaagca

SEQ ID NO: 2448695 - DNA, 25 bp, Homo sapien
caactggttgtgtaagcgagagtca

SEQ ID NO: 2448696 - DNA, 25 bp, Homo sapien
tgctggagagtgtccacacaggaga

SEQ ID NO: 2448697 - DNA, 25 bp, Homo sapien
taacaatgcctcctattgaaagggc

SEQ ID NO: 2448698 - DNA, 25 bp, Homo sapien
taggcccaggtcgttggcataatgt

SEQ ID NO: 2448699 - DNA, 25 bp, Homo sapien
ccacaaaatttggtcataggcccag

SEQ ID NO: 2448700 - DNA, 25 bp, Homo sapien
tacgcatgacctaggcagaagagta

SEQ ID NO: 2448701 - DNA, 25 bp, Homo sapien
gtcatatcattacgggactgggcca

SEQ ID NO: 2448702 - DNA, 25 bp, Homo sapien
tctggcacaagcaggagagtcatat

SEQ ID NO: 2448703 - DNA, 25 bp, Homo sapien
gggccaagcaatatgccctaattcc

SEQ ID NO: 2448704 - DNA, 25 bp, Homo sapien
tgggtgttgagccaattatacagtg

SEQ ID NO: 2448705 - DNA, 25 bp, Homo sapien
atgctggtccagtgatacaatataa

SEQ ID NO: 2448706 - DNA, 25 bp, Homo sapien
tgggcatagtcagaagtgtcagctt

SEQ ID NO: 2448707 - DNA, 25 bp, Homo sapien
gttgagccaattatacagtgtagta

SEQ ID NO: 2448708 - DNA, 25 bp, Homo sapien
tctcaggtaaatggaacaatatcac

SEQ ID NO: 2448709 - DNA, 25 bp, Homo sapien
ggtctcaggtaaatggaacaatatc

SEQ ID NO: 2448710 - DNA, 25 bp, Homo sapien
taggctttttatctggtctcaggta

SEQ ID NO: 2448711 - DNA, 25 bp, Homo sapien
ctggtctcaggtaaatggaacaata

SEQ ID NO: 2448712 - DNA, 25 bp, Homo sapien
taatgatcctgtcctgcacgtgtcc

SEQ ID NO: 2448713 - DNA, 25 bp, Homo sapien
gagagtaatgatcctgtcctgcacg

SEQ ID NO: 2448714 - DNA, 25 bp, Homo sapien
cagggatgagagtaatgatcctgtc

SEQ ID NO: 2448715 - DNA, 25 bp, Homo sapien
atcctgtcctgcacgtgtcctggct

SEQ ID NO: 2448716 - DNA, 25 bp, Homo sapien
tgtcaagcaatatgtcatgatgccc

SEQ ID NO: 2448717 - DNA, 25 bp, Homo sapien
catcacttaggttctttgtcaagca

SEQ ID NO: 2448718 - DNA, 25 bp, Homo sapien
cacattcccattttttagcaaccta

SEQ ID NO: 2448719 - DNA, 25 bp, Homo sapien
gaagcaaggtatttctcacattccc

SEQ ID NO: 2448720 - DNA, 25 bp, Homo sapien
gctgggcctagtcagaagagtcact

SEQ ID NO: 2448721 - DNA, 25 bp, Homo sapien
cactgagccagtgatacagcataat

SEQ ID NO: 2448722 - DNA, 25 bp, Homo sapien
cacccgggtacagtttcacataata

SEQ ID NO: 2448723 - DNA, 25 bp, Homo sapien
cataatctcatttgtatgctgggcc

SEQ ID NO: 2448724 - DNA, 25 bp, Homo sapien
gtgatggtcccagtgacatatgtaa

SEQ ID NO: 2448725 - DNA, 25 bp, Homo sapien
gggtgatggtcccagtgacatatgt

SEQ ID NO: 2448726 - DNA, 25 bp, Homo sapien
cagagccacgatggatgttatctat

SEQ ID NO: 2448727 - DNA, 25 bp, Homo sapien
gaaggcagagccacgatggatgtta

SEQ ID NO: 2448728 - DNA, 25 bp, Homo sapien
taaagaggagagttgcattacccag

SEQ ID NO: 2448729 - DNA, 25 bp, Homo sapien
gcagtcagcgttatgtcacaattct

SEQ ID NO: 2448730 - DNA, 25 bp, Homo sapien
atatgtgataatcccttgttttggc

SEQ ID NO: 2448731 - DNA, 25 bp, Homo sapien
gggtgctggactccgcaatatgtga

SEQ ID NO: 2448732 - DNA, 25 bp, Homo sapien
tagtcgcgtcagctgggtgtgaatc

SEQ ID NO: 2448733 - DNA, 25 bp, Homo sapien
tattattgcatggtatctgaagctg

SEQ ID NO: 2448734 - DNA, 25 bp, Homo sapien
tcttgtgagagaatgatagtcgcgt

SEQ ID NO: 2448735 - DNA, 25 bp, Homo sapien
ttttctatgatacgctgggagtgtc

SEQ ID NO: 2448736 - DNA, 25 bp, Homo sapien
aaataaataaaacagtgacatgtcc

SEQ ID NO: 2448737 - DNA, 25 bp, Homo sapien
ataaataaaacagtgacatgtccat

SEQ ID NO: 2448738 - DNA, 25 bp, Homo sapien
aataaataaaacagtgacatgtcca

SEQ ID NO: 2448739 - DNA, 25 bp, Homo sapien
gtttgccacatttgttttgctatga

SEQ ID NO: 2448740 - DNA, 25 bp, Homo sapien
tgttttgctatgagtagatgacaga

SEQ ID NO: 2448741 - DNA, 25 bp, Homo sapien
ccacatttgttttgctatgagtaga

SEQ ID NO: 2448742 - DNA, 25 bp, Homo sapien
ttgttttgctatgagtagatgacag

SEQ ID NO: 2448743 - DNA, 25 bp, Homo sapien
ttaatgaaggtttaggagcaggtga

SEQ ID NO: 2448744 - DNA, 25 bp, Homo sapien
tttaatgaaggtttaggagcaggtg

SEQ ID NO: 2448745 - DNA, 25 bp, Homo sapien
taatgaaggtttaggagcaggtgaa

SEQ ID NO: 2448746 - DNA, 25 bp, Homo sapien
tgagctcaatgtttggccgcatttt

SEQ ID NO: 2448747 - DNA, 25 bp, Homo sapien
gaatgagctcaatgtttggccgcat

SEQ ID NO: 2448748 - DNA, 25 bp, Homo sapien
agaatgagctcaatgtttggccgca

SEQ ID NO: 2448749 - DNA, 25 bp, Homo sapien
aatgagctcaatgtttggccgcatt

SEQ ID NO: 2448750 - DNA, 25 bp, Homo sapien
taacctaaacgctgaggcagaaatg

SEQ ID NO: 2448751 - DNA, 25 bp, Homo sapien
cagccacataacctaaacgctgagg

SEQ ID NO: 2448752 - DNA, 25 bp, Homo sapien
taaacgctgaggcagaaatgttccc

SEQ ID NO: 2448753 - DNA, 25 bp, Homo sapien
gcatgacagccacataacctaaacg

SEQ ID NO: 2448754 - DNA, 25 bp, Homo sapien
tcacacgctcagaaaagtttgcaaa

SEQ ID NO: 2448755 - DNA, 25 bp, Homo sapien
gtttcgcattccacataagttctcg

SEQ ID NO: 2448756 - DNA, 25 bp, Homo sapien
agtttgcaaataagtttcgcattcc

SEQ ID NO: 2448757 - DNA, 25 bp, Homo sapien
taagttctcgtttcctgtatgtaag

SEQ ID NO: 2448758 - DNA, 25 bp, Homo sapien
ttgataaagcccatcataactgctt

SEQ ID NO: 2448759 - DNA, 25 bp, Homo sapien
gctttctgcacatgggaattaccca

SEQ ID NO: 2448760 - DNA, 25 bp, Homo sapien
ccagcaatagctctacagtaaaata

SEQ ID NO: 2448761 - DNA, 25 bp, Homo sapien
tataaaccattaaggtcacagctac

SEQ ID NO: 2448762 - DNA, 25 bp, Homo sapien
gttcagtgaagtttgagcacaactc

SEQ ID NO: 2448763 - DNA, 25 bp, Homo sapien
gctttgccttatttattaggttgac

SEQ ID NO: 2448764 - DNA, 25 bp, Homo sapien
cattcttcacattttcagcacttgt

SEQ ID NO: 2448765 - DNA, 25 bp, Homo sapien
attttcagcacttgtctccaccaaa

SEQ ID NO: 2448766 - DNA, 25 bp, Homo sapien
ttaaactcaaatttatgttcggcaa

SEQ ID NO: 2448767 - DNA, 25 bp, Homo sapien
tatgttcggcaaggtttgagaaata

SEQ ID NO: 2448768 - DNA, 25 bp, Homo sapien
aaactcaaatttatgttcggcaagg

SEQ ID NO: 2448769 - DNA, 25 bp, Homo sapien
caaatttatgttcggcaaggtttga

SEQ ID NO: 2448770 - DNA, 25 bp, Homo sapien
taaggtctgagaagcacttaaagga

SEQ ID NO: 2448771 - DNA, 25 bp, Homo sapien
ggtctgagaagcacttaaaggattt

SEQ ID NO: 2448772 - DNA, 25 bp, Homo sapien
tctcttataattagtaaggtctgag

SEQ ID NO: 2448773 - DNA, 25 bp, Homo sapien
aattctcttataattagtaaggtct

SEQ ID NO: 2448774 - DNA, 25 bp, Homo sapien
aagaactacataatagctcttccat

SEQ ID NO: 2448775 - DNA, 25 bp, Homo sapien
aaagaactacataatagctcttcca

SEQ ID NO: 2448776 - DNA, 25 bp, Homo sapien
caaagaactacataatagctcttcc

SEQ ID NO: 2448777 - DNA, 25 bp, Homo sapien
agttatcttatgtctgatgaggtgt

SEQ ID NO: 2448778 - DNA, 25 bp, Homo sapien
tctctgatgttgaacccaaaatgag

SEQ ID NO: 2448779 - DNA, 25 bp, Homo sapien
ggagcttctctctatatgagttatc

SEQ ID NO: 2448780 - DNA, 25 bp, Homo sapien
cgtattggttcagtataaagtctct

SEQ ID NO: 2448781 - DNA, 25 bp, Homo sapien
tgtgcactacttctctcactaaatg

SEQ ID NO: 2448782 - DNA, 25 bp, Homo sapien
gggtgaatacggttaacatgtgtca

SEQ ID NO: 2448783 - DNA, 25 bp, Homo sapien
gactggatagacttgtgcactactt

SEQ ID NO: 2448784 - DNA, 25 bp, Homo sapien
cagccatttcaagtttgactggata

SEQ ID NO: 2448785 - DNA, 25 bp, Homo sapien
tctctagatgagcatccgtttatct

SEQ ID NO: 2448786 - DNA, 25 bp, Homo sapien
gtctctagatgagcatccgtttatc

SEQ ID NO: 2448787 - DNA, 25 bp, Homo sapien
ctctagatgagcatccgtttatctt

SEQ ID NO: 2448788 - DNA, 25 bp, Homo sapien
gattgtgaccacgatgtttctctta

SEQ ID NO: 2448789 - DNA, 25 bp, Homo sapien
tttgagggcattgaaaaatgctccc

SEQ ID NO: 2448790 - DNA, 25 bp, Homo sapien
tgatttccaagtgttcgctgcttat

SEQ ID NO: 2448791 - DNA, 25 bp, Homo sapien
tcctggtacaccactgattgtgcat

SEQ ID NO: 2448792 - DNA, 25 bp, Homo sapien
tggccagccgtaccctcttcccaaa

SEQ ID NO: 2448793 - DNA, 25 bp, Homo sapien
gccagccgtaccctcttcccaaaga

SEQ ID NO: 2448794 - DNA, 25 bp, Homo sapien
ctgctggtcaaatcatcagcccttt

SEQ ID NO: 2448795 - DNA, 25 bp, Homo sapien
tgaggaatggtagccaggaaactgc

SEQ ID NO: 2448796 - DNA, 25 bp, Homo sapien
tgttgggaagcttggttcctcctgg

SEQ ID NO: 2448797 - DNA, 25 bp, Homo sapien
tcatgttgggaagcttggttcctcc

SEQ ID NO: 2448798 - DNA, 25 bp, Homo sapien
tattcagatgggacgtgcttgggag

SEQ ID NO: 2448799 - DNA, 25 bp, Homo sapien
ctgtttaagatttacacatagtttc

SEQ ID NO: 2448800 - DNA, 25 bp, Homo sapien
tttaagatttacacatagtttccag

SEQ ID NO: 2448801 - DNA, 25 bp, Homo sapien
gtattcagatgggacgtgcttggga

SEQ ID NO: 2448802 - DNA, 25 bp, Homo sapien
cgactctaatttgaacggattctcc

SEQ ID NO: 2448803 - DNA, 25 bp, Homo sapien
tatgtgtagcactaaccacactgaa

SEQ ID NO: 2448804 - DNA, 25 bp, Homo sapien
cttcaggtgcctgatggttcagatc

SEQ ID NO: 2448805 - DNA, 25 bp, Homo sapien
actgaaatgcctcgacactacctcg

SEQ ID NO: 2448806 - DNA, 25 bp, Homo sapien
gcctgctggcagtatgttttctaac

SEQ ID NO: 2448807 - DNA, 25 bp, Homo sapien
catacaggatgagccttgggcctgc

SEQ ID NO: 2448808 - DNA, 25 bp, Homo sapien
tactcctaatgcaacaggaagttgt

SEQ ID NO: 2448809 - DNA, 25 bp, Homo sapien
tgcatttgcattgaatccagaagat

SEQ ID NO: 2448810 - DNA, 25 bp, Homo sapien
tacttcttttgcaaagtgtaggaag

SEQ ID NO: 2448811 - DNA, 25 bp, Homo sapien
tcttttgcaaagtgtaggaaggtgt

SEQ ID NO: 2448812 - DNA, 25 bp, Homo sapien
ccagactgcctgatcagttttgacc

SEQ ID NO: 2448813 - DNA, 25 bp, Homo sapien
tccagactgcctgatcagttttgac

SEQ ID NO: 2448814 - DNA, 25 bp, Homo sapien
gagcgccagctgagatccacaagct

SEQ ID NO: 2448815 - DNA, 25 bp, Homo sapien
ttgcaagtctatagcaatgagcagc

SEQ ID NO: 2448816 - DNA, 25 bp, Homo sapien
caatgagcagcagagcgccagctga

SEQ ID NO: 2448817 - DNA, 25 bp, Homo sapien
cacaagctgaacctggtccccaggg

SEQ ID NO: 2448818 - DNA, 25 bp, Homo sapien
gatgccggttcactaggtcttttcc

SEQ ID NO: 2448819 - DNA, 25 bp, Homo sapien
tgcatgccaggaattccacatgaaa

SEQ ID NO: 2448820 - DNA, 25 bp, Homo sapien
acatgaaacttcaagataccggttc

SEQ ID NO: 2448821 - DNA, 25 bp, Homo sapien
acatgaaacttcaagatgccggttc

SEQ ID NO: 2448822 - DNA, 25 bp, Homo sapien
tgattgggatagtagttaggataac

SEQ ID NO: 2448823 - DNA, 25 bp, Homo sapien
ctgggtatataaccttctcaatgag

SEQ ID NO: 2448824 - DNA, 25 bp, Homo sapien
tccttgaaatgctaaacttaatggc

SEQ ID NO: 2448825 - DNA, 25 bp, Homo sapien
catatgtatgtccaatttgattggg

SEQ ID NO: 2448826 - DNA, 25 bp, Homo sapien
actgtgagcgattactgaatctggg

SEQ ID NO: 2448827 - DNA, 25 bp, Homo sapien
gaagtacagacaaagccataacatc

SEQ ID NO: 2448828 - DNA, 25 bp, Homo sapien
tatataaaccgcttgagtttctggc

SEQ ID NO: 2448829 - DNA, 25 bp, Homo sapien
agttctgcggttgtctctaatttcg

SEQ ID NO: 2448830 - DNA, 25 bp, Homo sapien
gaagtacagacaaagccataacatc

SEQ ID NO: 2448831 - DNA, 25 bp, Homo sapien
actgtgagcgattactgaatctggg

SEQ ID NO: 2448832 - DNA, 25 bp, Homo sapien
tatataaaccgcttgagtttctggc

SEQ ID NO: 2448833 - DNA, 25 bp, Homo sapien
agttctgcggttgtctctaatttcg

SEQ ID NO: 2448834 - DNA, 25 bp, Homo sapien
gtgttccagcggacttcaccagcag

SEQ ID NO: 2448835 - DNA, 25 bp, Homo sapien
tttggctcctttgaccactcgaagc

SEQ ID NO: 2448836 - DNA, 25 bp, Homo sapien
aagccccacagcgtgttccagcgga

SEQ ID NO: 2448837 - DNA, 25 bp, Homo sapien
tccttgagcctgtcgggagctgctg

SEQ ID NO: 2448838 - DNA, 25 bp, Homo sapien
caagtgtgcctatacaaacgtagcc

SEQ ID NO: 2448839 - DNA, 25 bp, Homo sapien
taatgtcaccgtttaaaatgtagct

SEQ ID NO: 2448840 - DNA, 25 bp, Homo sapien
aagccgtaggctttaggagcacaga

SEQ ID NO: 2448841 - DNA, 25 bp, Homo sapien
aaataataatagacgctcagggcag

SEQ ID NO: 2448842 - DNA, 25 bp, Homo sapien
gatcagcatgctgtccctgacccat

SEQ ID NO: 2448843 - DNA, 25 bp, Homo sapien
tgacccatgttgcaacggacagtgt

SEQ ID NO: 2448844 - DNA, 25 bp, Homo sapien
caaaataccgctgacataaggcatt

SEQ ID NO: 2448845 - DNA, 25 bp, Homo sapien
tgacactcctcacaaaataccgctg

SEQ ID NO: 2448846 - DNA, 25 bp, Homo sapien
tgaagtggaacttcaaagaggcacc

SEQ ID NO: 2448847 - DNA, 25 bp, Homo sapien
actgaagtggaacttcaaagaggca

SEQ ID NO: 2448848 - DNA, 25 bp, Homo sapien
agaggcaccaataccgctgcacctt

SEQ ID NO: 2448849 - DNA, 25 bp, Homo sapien
aataccgctgcacctttgcctgagg

SEQ ID NO: 2448850 - DNA, 25 bp, Homo sapien
tcccagttgctttgaaactgctttt

SEQ ID NO: 2448851 - DNA, 25 bp, Homo sapien
tctgctggtgaagtccgctggaaca

SEQ ID NO: 2448852 - DNA, 25 bp, Homo sapien
ctcggaggtagaaccgccaggctga

SEQ ID NO: 2448853 - DNA, 25 bp, Homo sapien
gagccaaaggctaaggtgtaaggaa

SEQ ID NO: 2448854 - DNA, 25 bp, Homo sapien
gcgcaggccgactgaggcatggact

SEQ ID NO: 2448855 - DNA, 25 bp, Homo sapien
cccacccagtagtacaaggaccagg

SEQ ID NO: 2448856 - DNA, 25 bp, Homo sapien
cacttcctgaagaagttccggccct

SEQ ID NO: 2448857 - DNA, 25 bp, Homo sapien
cagtagtacaaggaccaggagggaa

SEQ ID NO: 2448858 - DNA, 25 bp, Homo sapien
tccggccctcccaatccaaggaggc

SEQ ID NO: 2448859 - DNA, 25 bp, Homo sapien
ctcgttttctgcaacgtacttcact

SEQ ID NO: 2448860 - DNA, 25 bp, Homo sapien
tcgttttctgcaacgtacttcactt

SEQ ID NO: 2448861 - DNA, 25 bp, Homo sapien
tctgcaacgtacttcacttttacca

SEQ ID NO: 2448862 - DNA, 25 bp, Homo sapien
ttttctgcaacgtacttcactttta

SEQ ID NO: 2448863 - DNA, 25 bp, Homo sapien
cttctggtaacacccagccttggct

SEQ ID NO: 2448864 - DNA, 25 bp, Homo sapien
ccttctggtaacacccagccttggc

SEQ ID NO: 2448865 - DNA, 25 bp, Homo sapien
accgtatctaccaaagcagcttcca

SEQ ID NO: 2448866 - DNA, 25 bp, Homo sapien
cgtatctaccaaagcagcttccaat

SEQ ID NO: 2448867 - DNA, 25 bp, Homo sapien
ttcactgaaccgtatctaccaaagc

SEQ ID NO: 2448868 - DNA, 25 bp, Homo sapien
tcactgaaccgtatctaccaaagca

SEQ ID NO: 2448869 - DNA, 25 bp, Homo sapien
tcctactatcttctggacatccacg

SEQ ID NO: 2448870 - DNA, 25 bp, Homo sapien
ctactatcttctggacatccacgtc

SEQ ID NO: 2448871 - DNA, 25 bp, Homo sapien
attaacaaacgaaacaaatccatag

SEQ ID NO: 2448872 - DNA, 25 bp, Homo sapien
cacgtcattaacaaacgaaacaaat

SEQ ID NO: 2448873 - DNA, 25 bp, Homo sapien
agctttttaccatggaaatgtatct

SEQ ID NO: 2448874 - DNA, 25 bp, Homo sapien
gattgcagggcccagcttcagcttt

SEQ ID NO: 2448875 - DNA, 25 bp, Homo sapien
gcttcagctttttaccatggaaatg

SEQ ID NO: 2448876 - DNA, 25 bp, Homo sapien
ttttaccatggaaatgtatctgtga

SEQ ID NO: 2448877 - DNA, 25 bp, Homo sapien
ggtggaggaggaggattaactacca

SEQ ID NO: 2448878 - DNA, 25 bp, Homo sapien
gtggaggaggaggattaactaccaa

SEQ ID NO: 2448879 - DNA, 25 bp, Homo sapien
tggaggaggaggattaactaccaaa

SEQ ID NO: 2448880 - DNA, 25 bp, Homo sapien
agtgtttggattccgccagacgttc

SEQ ID NO: 2448881 - DNA, 25 bp, Homo sapien
ttcagtgtttggattccgccagacg

SEQ ID NO: 2448882 - DNA, 25 bp, Homo sapien
gttacaggattcggcgtgatttggg

SEQ ID NO: 2448883 - DNA, 25 bp, Homo sapien
ttggattccgccagacgttctgaaa

SEQ ID NO: 2448884 - DNA, 25 bp, Homo sapien
ggtgagtttggataaggagaataag

SEQ ID NO: 2448885 - DNA, 25 bp, Homo sapien
gtgagtttggataaggagaataagc

SEQ ID NO: 2448886 - DNA, 25 bp, Homo sapien
ctggtgagtttggataaggagaata

SEQ ID NO: 2448887 - DNA, 25 bp, Homo sapien
tggtgagtttggataaggagaataa

SEQ ID NO: 2448888 - DNA, 25 bp, Homo sapien
attatacacaggcaactgataccca

SEQ ID NO: 2448889 - DNA, 25 bp, Homo sapien
tatacacaggcaactgatacccagt

SEQ ID NO: 2448890 - DNA, 25 bp, Homo sapien
acaggcaactgatacccagtgatga

SEQ ID NO: 2448891 - DNA, 25 bp, Homo sapien
tacacaggcaactgatacccagtga

SEQ ID NO: 2448892 - DNA, 25 bp, Homo sapien
tgttaccacagatacgattatcggt

SEQ ID NO: 2448893 - DNA, 25 bp, Homo sapien
ttctgcaaatggcattgtggaactc

SEQ ID NO: 2448894 - DNA, 25 bp, Homo sapien
tcgtatcgttgaaaagagacccaga

SEQ ID NO: 2448895 - DNA, 25 bp, Homo sapien
gagaagtctttatcatgaagcagca

SEQ ID NO: 2448896 - DNA, 25 bp, Homo sapien
ttatctgaagtacagcataactcct

SEQ ID NO: 2448897 - DNA, 25 bp, Homo sapien
agtacagcataactcctttgctccc

SEQ ID NO: 2448898 - DNA, 25 bp, Homo sapien
ctgaagtacagcataactcctttgc

SEQ ID NO: 2448899 - DNA, 25 bp, Homo sapien
gaagtacagcataactcctttgctc

SEQ ID NO: 2448900 - DNA, 25 bp, Homo sapien
tagtgatgccgtgaactgctgaatt

SEQ ID NO: 2448901 - DNA, 25 bp, Homo sapien
agtgatgccgtgaactgctgaattt

SEQ ID NO: 2448902 - DNA, 25 bp, Homo sapien
ctagtgatgccgtgaactgctgaat

SEQ ID NO: 2448903 - DNA, 25 bp, Homo sapien
ctcgttttctgcaacgtacttcact

SEQ ID NO: 2448904 - DNA, 25 bp, Homo sapien
tctgcaacgtacttcacttttacca

SEQ ID NO: 2448905 - DNA, 25 bp, Homo sapien
ttttctgcaacgtacttcactttta

SEQ ID NO: 2448906 - DNA, 25 bp, Homo sapien
tcgttttctgcaacgtacttcactt

SEQ ID NO: 2448907 - DNA, 25 bp, Homo sapien
cttctggtaacacccagccttggct

SEQ ID NO: 2448908 - DNA, 25 bp, Homo sapien
ccttctggtaacacccagccttggc

SEQ ID NO: 2448909 - DNA, 25 bp, Homo sapien
ttcactgaaccgtatctaccaaagc

SEQ ID NO: 2448910 - DNA, 25 bp, Homo sapien
cgtatctaccaaagcagcttccaat

SEQ ID NO: 2448911 - DNA, 25 bp, Homo sapien
accgtatctaccaaagcagcttcca

SEQ ID NO: 2448912 - DNA, 25 bp, Homo sapien
tcactgaaccgtatctaccaaagca

SEQ ID NO: 2448913 - DNA, 25 bp, Homo sapien
ctactatcttctggacatccacgtc

SEQ ID NO: 2448914 - DNA, 25 bp, Homo sapien
tcctactatcttctggacatccacg

SEQ ID NO: 2448915 - DNA, 25 bp, Homo sapien
attaacaaacgaaacaaatccatag

SEQ ID NO: 2448916 - DNA, 25 bp, Homo sapien
cacgtcattaacaaacgaaacaaat

SEQ ID NO: 2448917 - DNA, 25 bp, Homo sapien
ttttaccatggaaatgtatctgtga

SEQ ID NO: 2448918 - DNA, 25 bp, Homo sapien
gattgcagggcccagcttcagcttt

SEQ ID NO: 2448919 - DNA, 25 bp, Homo sapien
agctttttaccatggaaatgtatct

SEQ ID NO: 2448920 - DNA, 25 bp, Homo sapien
gcttcagctttttaccatggaaatg

SEQ ID NO: 2448921 - DNA, 25 bp, Homo sapien
ggtggaggaggaggattaactacca

SEQ ID NO: 2448922 - DNA, 25 bp, Homo sapien
gtggaggaggaggattaactaccaa

SEQ ID NO: 2448923 - DNA, 25 bp, Homo sapien
tggaggaggaggattaactaccaaa

SEQ ID NO: 2448924 - DNA, 25 bp, Homo sapien
gttacaggattcggcgtgatttggg

SEQ ID NO: 2448925 - DNA, 25 bp, Homo sapien
agtgtttggattccgccagacgttc

SEQ ID NO: 2448926 - DNA, 25 bp, Homo sapien
ttggattccgccagacgttctgaaa

SEQ ID NO: 2448927 - DNA, 25 bp, Homo sapien
ttcagtgtttggattccgccagacg

SEQ ID NO: 2448928 - DNA, 25 bp, Homo sapien
ggtgagtttggataaggagaataag

SEQ ID NO: 2448929 - DNA, 25 bp, Homo sapien
gtgagtttggataaggagaataagc

SEQ ID NO: 2448930 - DNA, 25 bp, Homo sapien
ctggtgagtttggataaggagaata

SEQ ID NO: 2448931 - DNA, 25 bp, Homo sapien
tggtgagtttggataaggagaataa

SEQ ID NO: 2448932 - DNA, 25 bp, Homo sapien
attatacacaggcaactgataccca

SEQ ID NO: 2448933 - DNA, 25 bp, Homo sapien
tatacacaggcaactgatacccagt

SEQ ID NO: 2448934 - DNA, 25 bp, Homo sapien
tacacaggcaactgatacccagtga

SEQ ID NO: 2448935 - DNA, 25 bp, Homo sapien
acaggcaactgatacccagtgatga

SEQ ID NO: 2448936 - DNA, 25 bp, Homo sapien
tgttaccacagatacgattatcggt

SEQ ID NO: 2448937 - DNA, 25 bp, Homo sapien
gagaagtctttatcatgaagcagca

SEQ ID NO: 2448938 - DNA, 25 bp, Homo sapien
ttctgcaaatggcattgtggaactc

SEQ ID NO: 2448939 - DNA, 25 bp, Homo sapien
tcgtatcgttgaaaagagacccaga

SEQ ID NO: 2448940 - DNA, 25 bp, Homo sapien
gaagtacagcataactcctttgctc

SEQ ID NO: 2448941 - DNA, 25 bp, Homo sapien
agtacagcataactcctttgctccc

SEQ ID NO: 2448942 - DNA, 25 bp, Homo sapien
ttatctgaagtacagcataactcct

SEQ ID NO: 2448943 - DNA, 25 bp, Homo sapien
ctgaagtacagcataactcctttgc

SEQ ID NO: 2448944 - DNA, 25 bp, Homo sapien
agtgatgccgtgaactgctgaattt

SEQ ID NO: 2448945 - DNA, 25 bp, Homo sapien
ctagtgatgccgtgaactgctgaat

SEQ ID NO: 2448946 - DNA, 25 bp, Homo sapien
tagtgatgccgtgaactgctgaatt

SEQ ID NO: 2448947 - DNA, 25 bp, Homo sapien
ctcgttttctgcaacgtacttcact

SEQ ID NO: 2448948 - DNA, 25 bp, Homo sapien
tctgcaacgtacttcacttttacca

SEQ ID NO: 2448949 - DNA, 25 bp, Homo sapien
ttttctgcaacgtacttcactttta

SEQ ID NO: 2448950 - DNA, 25 bp, Homo sapien
tcgttttctgcaacgtacttcactt

SEQ ID NO: 2448951 - DNA, 25 bp, Homo sapien
ctgcagctgatgaagactgggtgct

SEQ ID NO: 2448952 - DNA, 25 bp, Homo sapien
tggcctctctggagatggttgagtt

SEQ ID NO: 2448953 - DNA, 25 bp, Homo sapien
gtttggagtctcaggatttgcagca

SEQ ID NO: 2448954 - DNA, 25 bp, Homo sapien
atgaagactgggtgctggcctctct

SEQ ID NO: 2448955 - DNA, 25 bp, Homo sapien
cttctggtaacacccagccttggct

SEQ ID NO: 2448956 - DNA, 25 bp, Homo sapien
ccttctggtaacacccagccttggc

SEQ ID NO: 2448957 - DNA, 25 bp, Homo sapien
accgtatctaccaaagcagcttcca

SEQ ID NO: 2448958 - DNA, 25 bp, Homo sapien
ttcactgaaccgtatctaccaaagc

SEQ ID NO: 2448959 - DNA, 25 bp, Homo sapien
cgtatctaccaaagcagcttccaat

SEQ ID NO: 2448960 - DNA, 25 bp, Homo sapien
tcactgaaccgtatctaccaaagca

SEQ ID NO: 2448961 - DNA, 25 bp, Homo sapien
tcctactatcttctggacatccacg

SEQ ID NO: 2448962 - DNA, 25 bp, Homo sapien
attaacaaacgaaacaaatccatag

SEQ ID NO: 2448963 - DNA, 25 bp, Homo sapien
cacgtcattaacaaacgaaacaaat

SEQ ID NO: 2448964 - DNA, 25 bp, Homo sapien
ctactatcttctggacatccacgtc

SEQ ID NO: 2448965 - DNA, 25 bp, Homo sapien
gattgcagggcccagcttcagcttt

SEQ ID NO: 2448966 - DNA, 25 bp, Homo sapien
agctttttaccatggaaatgtatct

SEQ ID NO: 2448967 - DNA, 25 bp, Homo sapien
gcttcagctttttaccatggaaatg

SEQ ID NO: 2448968 - DNA, 25 bp, Homo sapien
ttttaccatggaaatgtatctgtga

SEQ ID NO: 2448969 - DNA, 25 bp, Homo sapien
ggtggaggaggaggattaactacca

SEQ ID NO: 2448970 - DNA, 25 bp, Homo sapien
gtggaggaggaggattaactaccaa

SEQ ID NO: 2448971 - DNA, 25 bp, Homo sapien
tggaggaggaggattaactaccaaa

SEQ ID NO: 2448972 - DNA, 25 bp, Homo sapien
gttacaggattcggcgtgatttggg

SEQ ID NO: 2448973 - DNA, 25 bp, Homo sapien
ttggattccgccagacgttctgaaa

SEQ ID NO: 2448974 - DNA, 25 bp, Homo sapien
ttcagtgtttggattccgccagacg

SEQ ID NO: 2448975 - DNA, 25 bp, Homo sapien
agtgtttggattccgccagacgttc

SEQ ID NO: 2448976 - DNA, 25 bp, Homo sapien
gacctggtgaatgtggataagcaga

SEQ ID NO: 2448977 - DNA, 25 bp, Homo sapien
aggaacaacataactcctttgcgcc

SEQ ID NO: 2448978 - DNA, 25 bp, Homo sapien
ggaggaacaacataactcctttgcg

SEQ ID NO: 2448979 - DNA, 25 bp, Homo sapien
ggaacaacataactcctttgcgccc

SEQ ID NO: 2448980 - DNA, 25 bp, Homo sapien
gaggaacaacataactcctttgcgc

SEQ ID NO: 2448981 - DNA, 25 bp, Homo sapien
ctgaatcgggataagtaggatattc

SEQ ID NO: 2448982 - DNA, 25 bp, Homo sapien
agtggtgacctgaaatgctgaatcg

SEQ ID NO: 2448983 - DNA, 25 bp, Homo sapien
gaaatgctgaatcgggataagtagg

SEQ ID NO: 2448984 - DNA, 25 bp, Homo sapien
gacctgaaatgctgaatcgggataa

SEQ ID NO: 2448985 - DNA, 25 bp, Homo sapien
ccagcagtgacctgaaatggtgatc

SEQ ID NO: 2448986 - DNA, 25 bp, Homo sapien
gatatccagcagtgacctgaaatgg

SEQ ID NO: 2448987 - DNA, 25 bp, Homo sapien
gtgacctgaaatggtgatcttggat

SEQ ID NO: 2448988 - DNA, 25 bp, Homo sapien
tatacaggcaactgatatccagcag

SEQ ID NO: 2448989 - DNA, 25 bp, Homo sapien
tatccagtggcgacttgaaatggtg

SEQ ID NO: 2448990 - DNA, 25 bp, Homo sapien
actgatatccagtggcgacttgaaa

SEQ ID NO: 2448991 - DNA, 25 bp, Homo sapien
ggaactgatatccagtggcgacttg

SEQ ID NO: 2448992 - DNA, 25 bp, Homo sapien
cttgaaatggtgaatttggataagc

SEQ ID NO: 2448993 - DNA, 25 bp, Homo sapien
tgatatccagcagtgacctgaaatg

SEQ ID NO: 2448994 - DNA, 25 bp, Homo sapien
tgacctgaaatggtgaacttggata

SEQ ID NO: 2448995 - DNA, 25 bp, Homo sapien
tatacaggcaactgatatccagcag

SEQ ID NO: 2448996 - DNA, 25 bp, Homo sapien
ggtgaacttggataagcaggaaatg

SEQ ID NO: 2448997 - DNA, 25 bp, Homo sapien
actgatatccagtggcgacttgaaa

SEQ ID NO: 2448998 - DNA, 25 bp, Homo sapien
ggaactgatatccagtggcgacttg

SEQ ID NO: 2448999 - DNA, 25 bp, Homo sapien
cttgaaatggtgaatttggataagc

SEQ ID NO: 2449000 - DNA, 25 bp, Homo sapien
tatccagtggcgacttgaaatggtg

SEQ ID NO: 2449001 - DNA, 25 bp, Homo sapien
tatacaggcaactgatatccagtgg

SEQ ID NO: 2449002 - DNA, 25 bp, Homo sapien
ctggtgaatttggataagcaggaaa

SEQ ID NO: 2449003 - DNA, 25 bp, Homo sapien
tgataattgtatacaggcaactgat

SEQ ID NO: 2449004 - DNA, 25 bp, Homo sapien
cagtggtgacctgaactggtgaatt

SEQ ID NO: 2449005 - DNA, 25 bp, Homo sapien
tatccagtggcgacttgaaatggtg

SEQ ID NO: 2449006 - DNA, 25 bp, Homo sapien
actgatatccagtggcgacttgaaa

SEQ ID NO: 2449007 - DNA, 25 bp, Homo sapien
cttgaaatggtgaatttggataagc

SEQ ID NO: 2449008 - DNA, 25 bp, Homo sapien
ggaactgatatccagtggcgacttg

SEQ ID NO: 2449009 - DNA, 25 bp, Homo sapien
tgataattgtatacaggcaactgat

SEQ ID NO: 2449010 - DNA, 25 bp, Homo sapien
tatacaggcaactgatatccagtgg

SEQ ID NO: 2449011 - DNA, 25 bp, Homo sapien
ctggtgaatttggataagcaggaaa

SEQ ID NO: 2449012 - DNA, 25 bp, Homo sapien
cagtggtgacctgaactggtgaatt

SEQ ID NO: 2449013 - DNA, 25 bp, Homo sapien
cagtggtgacctgaaatggtgaact

SEQ ID NO: 2449014 - DNA, 25 bp, Homo sapien
tgacctgaaatggtgaacttggata

SEQ ID NO: 2449015 - DNA, 25 bp, Homo sapien
tatacaggcaactgatatccagtgg

SEQ ID NO: 2449016 - DNA, 25 bp, Homo sapien
gtgaacttggataagcaggaaatgc

SEQ ID NO: 2449017 - DNA, 25 bp, Homo sapien
cagtggtgacctgaaatggtgaact

SEQ ID NO: 2449018 - DNA, 25 bp, Homo sapien
tgacctgaaatggtgaacttggata

SEQ ID NO: 2449019 - DNA, 25 bp, Homo sapien
gtgaacttggataagcaggaaatgc

SEQ ID NO: 2449020 - DNA, 25 bp, Homo sapien
tatacaggcaactgatatccagtgg

SEQ ID NO: 2449021 - DNA, 25 bp, Homo sapien
cagtggtgacctgaaatggtgaact

SEQ ID NO: 2449022 - DNA, 25 bp, Homo sapien
tgacctgaaatggtgaacttggata

SEQ ID NO: 2449023 - DNA, 25 bp, Homo sapien
tatacaggcaactgatatccagtgg

SEQ ID NO: 2449024 - DNA, 25 bp, Homo sapien
gtgaacttggataagcaggaaatgc

SEQ ID NO: 2449025 - DNA, 25 bp, Homo sapien
cagtggtgacctgaaatggtgaact

SEQ ID NO: 2449026 - DNA, 25 bp, Homo sapien
tatacaggcaactgatatccagtgg

SEQ ID NO: 2449027 - DNA, 25 bp, Homo sapien
tgacctgaaatggtgaacttggata

SEQ ID NO: 2449028 - DNA, 25 bp, Homo sapien
gtgaacttggataagcaggaaatgc

SEQ ID NO: 2449029 - DNA, 25 bp, Homo sapien
tgacctgaaatggtgaacttggata

SEQ ID NO: 2449030 - DNA, 25 bp, Homo sapien
cagtggtgacctgaaatggtgaact

SEQ ID NO: 2449031 - DNA, 25 bp, Homo sapien
tatacaggcaactgatatccagtgg

SEQ ID NO: 2449032 - DNA, 25 bp, Homo sapien
gtgaacttggataagcaggaaatgc

SEQ ID NO: 2449033 - DNA, 25 bp, Homo sapien
gaaagaaatatcattcccaatgtaa

SEQ ID NO: 2449034 - DNA, 25 bp, Homo sapien
aattagaaagaaatatcattcccaa

SEQ ID NO: 2449035 - DNA, 25 bp, Homo sapien
agaaatatcattcccaatgtaacaa

SEQ ID NO: 2449036 - DNA, 25 bp, Homo sapien
tatcattcccaatgtaacaaaaata

SEQ ID NO: 2449037 - DNA, 25 bp, Homo sapien
tggaactgatatccagtggtgacct

SEQ ID NO: 2449038 - DNA, 25 bp, Homo sapien
aattgtatacatggaactgatatcc

SEQ ID NO: 2449039 - DNA, 25 bp, Homo sapien
tatacatggaactgatatccagtgg

SEQ ID NO: 2449040 - DNA, 25 bp, Homo sapien
ctggtaattgtatacatggaactga

SEQ ID NO: 2449041 - DNA, 25 bp, Homo sapien
ctcctttgctccccaacagggcact

SEQ ID NO: 2449042 - DNA, 25 bp, Homo sapien
ccccaacagggcactgcggtggcat

SEQ ID NO: 2449043 - DNA, 25 bp, Homo sapien
ttgctccccaacagggcactgcggt

SEQ ID NO: 2449044 - DNA, 25 bp, Homo sapien
tgctccccaacagggcactgcggtg

SEQ ID NO: 2449045 - DNA, 25 bp, Homo sapien
taattacatacaggcaactgacacc

SEQ ID NO: 2449046 - DNA, 25 bp, Homo sapien
aattacatacaggcaactgacaccc

SEQ ID NO: 2449047 - DNA, 25 bp, Homo sapien
catacaggcaactgacacccagtgg

SEQ ID NO: 2449048 - DNA, 25 bp, Homo sapien
attacatacaggcaactgacaccca

SEQ ID NO: 2449049 - DNA, 25 bp, Homo sapien
tttgtatgcttcggtccacagattt

SEQ ID NO: 2449050 - DNA, 25 bp, Homo sapien
ttctctggattaaacagacaagata

SEQ ID NO: 2449051 - DNA, 25 bp, Homo sapien
cagtcatcttgagtaacaacggaat

SEQ ID NO: 2449052 - DNA, 25 bp, Homo sapien
tcatcttgagtaacaacggaattta

SEQ ID NO: 2449053 - DNA, 25 bp, Homo sapien
gaagcagtcatcttgagtaacaacg

SEQ ID NO: 2449054 - DNA, 25 bp, Homo sapien
agcagtcatcttgagtaacaacgga

SEQ ID NO: 2449055 - DNA, 25 bp, Homo sapien
ccaaacttcttctaaagcgatgcac

SEQ ID NO: 2449056 - DNA, 25 bp, Homo sapien
gatccaacagatttaaatactgcca

SEQ ID NO: 2449057 - DNA, 25 bp, Homo sapien
atagctgagaggatccaacagattt

SEQ ID NO: 2449058 - DNA, 25 bp, Homo sapien
gccaaacttcttctaaagcgatgca

SEQ ID NO: 2449059 - DNA, 25 bp, Homo sapien
ttgagaaatcatagaccccagtggg

SEQ ID NO: 2449060 - DNA, 25 bp, Homo sapien
cattgctaccattccacggcttggc

SEQ ID NO: 2449061 - DNA, 25 bp, Homo sapien
gcaaacctcctgaaagactagtaaa

SEQ ID NO: 2449062 - DNA, 25 bp, Homo sapien
taaagactgtatccttcggattccg

SEQ ID NO: 2449063 - DNA, 25 bp, Homo sapien
aggaatttccatccgcaacccagcc

SEQ ID NO: 2449064 - DNA, 25 bp, Homo sapien
caggagtttgccagaggccaggaga

SEQ ID NO: 2449065 - DNA, 25 bp, Homo sapien
gtaccaggaatttccatccgcaacc

SEQ ID NO: 2449066 - DNA, 25 bp, Homo sapien
agggtaccaggaatttccatccgca

SEQ ID NO: 2449067 - DNA, 25 bp, Homo sapien
caatgctccatgtctgtggggaggt

SEQ ID NO: 2449068 - DNA, 25 bp, Homo sapien
tcaatgctccatgtctgtggggagg

SEQ ID NO: 2449069 - DNA, 25 bp, Homo sapien
ccatgtctgtggggaggttagtggg

SEQ ID NO: 2449070 - DNA, 25 bp, Homo sapien
tgtctgtggggaggttagtgggaat

SEQ ID NO: 2449071 - DNA, 25 bp, Homo sapien
tgaactgaaccgagagattcttcag

SEQ ID NO: 2449072 - DNA, 25 bp, Homo sapien
cctcttagggccctgaactgaaccg

SEQ ID NO: 2449073 - DNA, 25 bp, Homo sapien
tgcaggggagaaccctcttagggcc

SEQ ID NO: 2449074 - DNA, 25 bp, Homo sapien
tacttggagcttcaggggtggcact

SEQ ID NO: 2449075 - DNA, 25 bp, Homo sapien
acattttctgacagtgtgattgtga

SEQ ID NO: 2449076 - DNA, 25 bp, Homo sapien
ttctgacagtgtgattgtgatatac

SEQ ID NO: 2449077 - DNA, 25 bp, Homo sapien
ctttgacattttctgacagtgtgat

SEQ ID NO: 2449078 - DNA, 25 bp, Homo sapien
ctgacagtgtgattgtgatatacat

SEQ ID NO: 2449079 - DNA, 25 bp, Homo sapien
tatcttcttgcattccagattctct

SEQ ID NO: 2449080 - DNA, 25 bp, Homo sapien
ttactaatgttgaagtccatgttag

SEQ ID NO: 2449081 - DNA, 25 bp, Homo sapien
atttacttgtaatcttgcagaagca

SEQ ID NO: 2449082 - DNA, 25 bp, Homo sapien
cactttcaggcactctctttaatca

SEQ ID NO: 2449083 - DNA, 25 bp, Homo sapien
ctaagaaaatttcaattaaagtctg

SEQ ID NO: 2449084 - DNA, 25 bp, Homo sapien
taagaaaatttcaattaaagtctgc

SEQ ID NO: 2449085 - DNA, 25 bp, Homo sapien
aagaaaatttcaattaaagtctgca

SEQ ID NO: 2449086 - DNA, 25 bp, Homo sapien
agaaaatttcaattaaagtctgcat

SEQ ID NO: 2449087 - DNA, 25 bp, Homo sapien
tttgcaattgtaggatctatttcca

SEQ ID NO: 2449088 - DNA, 25 bp, Homo sapien
tctttgcaattgtaggatctatttc

SEQ ID NO: 2449089 - DNA, 25 bp, Homo sapien
ctttgcaattgtaggatctatttcc

SEQ ID NO: 2449090 - DNA, 25 bp, Homo sapien
ttgcaattgtaggatctatttccaa

SEQ ID NO: 2449091 - DNA, 25 bp, Homo sapien
agcaagttctgagaattctcttaga

SEQ ID NO: 2449092 - DNA, 25 bp, Homo sapien
ttctcttagaattagtaaggtctga

SEQ ID NO: 2449093 - DNA, 25 bp, Homo sapien
ttctgagaattctcttagaattagt

SEQ ID NO: 2449094 - DNA, 25 bp, Homo sapien
ctgagaattctcttagaattagtaa

SEQ ID NO: 2449095 - DNA, 25 bp, Homo sapien
ataaattctcttatgtttactaacg

SEQ ID NO: 2449096 - DNA, 25 bp, Homo sapien
agtataaattctcttatgtttacta

SEQ ID NO: 2449097 - DNA, 25 bp, Homo sapien
tctacaggtgtagggtttccctcca

SEQ ID NO: 2449098 - DNA, 25 bp, Homo sapien
tttccctccagtataaattctctta

SEQ ID NO: 2449099 - DNA, 25 bp, Homo sapien
tcagatttgtaagggctgtcttcta

SEQ ID NO: 2449100 - DNA, 25 bp, Homo sapien
catgcttcagatttgtaagggctgt

SEQ ID NO: 2449101 - DNA, 25 bp, Homo sapien
tgtaagggctgtcttctatatgaat

SEQ ID NO: 2449102 - DNA, 25 bp, Homo sapien
taagggctgtcttctatatgaatta

SEQ ID NO: 2449103 - DNA, 25 bp, Homo sapien
caaagtctttgggttacacacacag

SEQ ID NO: 2449104 - DNA, 25 bp, Homo sapien
gacatgtgtgatgtcccggatcacc

SEQ ID NO: 2449105 - DNA, 25 bp, Homo sapien
tgtgagccttgtatgcacacctagc

SEQ ID NO: 2449106 - DNA, 25 bp, Homo sapien
cacacagaatctaagcagggcacag

SEQ ID NO: 2449107 - DNA, 25 bp, Homo sapien
gtttctaaacggaggccaccaatga

SEQ ID NO: 2449108 - DNA, 25 bp, Homo sapien
atcatggtatccataatctctagat

SEQ ID NO: 2449109 - DNA, 25 bp, Homo sapien
atggtatccataatctctagatggt

SEQ ID NO: 2449110 - DNA, 25 bp, Homo sapien
cgtaatcatggtatccataatctct

SEQ ID NO: 2449111 - DNA, 25 bp, Homo sapien
gtaatcatggtatccataatctcta

SEQ ID NO: 2449112 - DNA, 25 bp, Homo sapien
ccccataacttgagctactgtatcc

SEQ ID NO: 2449113 - DNA, 25 bp, Homo sapien
gccccataacttgagctactgtatc

SEQ ID NO: 2449114 - DNA, 25 bp, Homo sapien
ctatccacagaaggtagattccttc

SEQ ID NO: 2449115 - DNA, 25 bp, Homo sapien
cagaaggtagattccttcattcctt

SEQ ID NO: 2449116 - DNA, 25 bp, Homo sapien
ttcttcctctggattgtttttctga

SEQ ID NO: 2449117 - DNA, 25 bp, Homo sapien
cagttaaagagattggtgctctaac

SEQ ID NO: 2449118 - DNA, 25 bp, Homo sapien
taacttcacgaaaatacaggaggca

SEQ ID NO: 2449119 - DNA, 25 bp, Homo sapien
cattttggatatctctgaacagcag

SEQ ID NO: 2449120 - DNA, 25 bp, Homo sapien
ttctctacaaacaaactacttctgg

SEQ ID NO: 2449121 - DNA, 25 bp, Homo sapien
tagagtcggcttctaaagcgtctgt

SEQ ID NO: 2449122 - DNA, 25 bp, Homo sapien
ggtccattctgtagagatttgcttc

SEQ ID NO: 2449123 - DNA, 25 bp, Homo sapien
ctagaacagtgagtggtccattctg

SEQ ID NO: 2449124 - DNA, 25 bp, Homo sapien
tctcaggcactgatgataagactgt

SEQ ID NO: 2449125 - DNA, 25 bp, Homo sapien
aaagcagatgcagtttggaatatag

SEQ ID NO: 2449126 - DNA, 25 bp, Homo sapien
ctaaagcagatgcagtttggaatat

SEQ ID NO: 2449127 - DNA, 25 bp, Homo sapien
gcagatgcagtttggaatatagtcc

SEQ ID NO: 2449128 - DNA, 25 bp, Homo sapien
agatgcagtttggaatatagtccta

SEQ ID NO: 2449129 - DNA, 25 bp, Homo sapien
ggcgcttcagcctgagcgttcgctt

SEQ ID NO: 2449130 - DNA, 25 bp, Homo sapien
tttggcgcttcagcctgagcgttcg

SEQ ID NO: 2449131 - DNA, 25 bp, Homo sapien
tctttggcgcttcagcctgagcgtt

SEQ ID NO: 2449132 - DNA, 25 bp, Homo sapien
cttctttggcgcttcagcctgagcg

SEQ ID NO: 2449133 - DNA, 25 bp, Homo sapien
agtcagtttggggactgatcctcca

SEQ ID NO: 2449134 - DNA, 25 bp, Homo sapien
ttctcctttgtgactcccctgccat

SEQ ID NO: 2449135 - DNA, 25 bp, Homo sapien
tcacagtcagtttggggactgatcc

SEQ ID NO: 2449136 - DNA, 25 bp, Homo sapien
tccctgtcacagtcagtttggggac

SEQ ID NO: 2449137 - DNA, 25 bp, Homo sapien
agactctttcttattctgggcctct

SEQ ID NO: 2449138 - DNA, 25 bp, Homo sapien
ctttcttattctgggcctctgctgt

SEQ ID NO: 2449139 - DNA, 25 bp, Homo sapien
gactctttcttattctgggcctctg

SEQ ID NO: 2449140 - DNA, 25 bp, Homo sapien
tcttattctgggcctctgctgttac

SEQ ID NO: 2449141 - DNA, 25 bp, Homo sapien
agactcccaatctgaggtccaatgc

SEQ ID NO: 2449142 - DNA, 25 bp, Homo sapien
tcccaatctgaggtccaatgctctc

SEQ ID NO: 2449143 - DNA, 25 bp, Homo sapien
tcagactcccaatctgaggtccaat

SEQ ID NO: 2449144 - DNA, 25 bp, Homo sapien
gactcccaatctgaggtccaatgct

SEQ ID NO: 2449145 - DNA, 25 bp, Homo sapien
tccgcagtgcatggtctggcatccc

SEQ ID NO: 2449146 - DNA, 25 bp, Homo sapien
tgctaaggtggaaggcatccgcagt

SEQ ID NO: 2449147 - DNA, 25 bp, Homo sapien
cagtggtgatgtcttccctttgatg

SEQ ID NO: 2449148 - DNA, 25 bp, Homo sapien
tagcccactagtgctaaggtggaag

SEQ ID NO: 2449149 - DNA, 25 bp, Homo sapien
ctcagtggtatcatctgactcagct

SEQ ID NO: 2449150 - DNA, 25 bp, Homo sapien
ggtctctatagtggcatctccaaca

SEQ ID NO: 2449151 - DNA, 25 bp, Homo sapien
tctggattgctaagaccagggtctc

SEQ ID NO: 2449152 - DNA, 25 bp, Homo sapien
catgcccctcagtggtatcatctga

SEQ ID NO: 2449153 - DNA, 25 bp, Homo sapien
cccctgattttgagtgtgaatgggt

SEQ ID NO: 2449154 - DNA, 25 bp, Homo sapien
attccccctgattttgagtgtgaat

SEQ ID NO: 2449155 - DNA, 25 bp, Homo sapien
ccctgattttgagtgtgaatgggta

SEQ ID NO: 2449156 - DNA, 25 bp, Homo sapien
tccccctgattttgagtgtgaatgg

SEQ ID NO: 2449157 - DNA, 25 bp, Homo sapien
ggccattgagaattgacagcatcag

SEQ ID NO: 2449158 - DNA, 25 bp, Homo sapien
tcttctggccattgagaattgacag

SEQ ID NO: 2449159 - DNA, 25 bp, Homo sapien
tctggccattgagaattgacagcat

SEQ ID NO: 2449160 - DNA, 25 bp, Homo sapien
tggccattgagaattgacagcatca

SEQ ID NO: 2449161 - DNA, 25 bp, Homo sapien
gcttggctcccaggttgattctttc

SEQ ID NO: 2449162 - DNA, 25 bp, Homo sapien
tgtccttgattgtccttggatggct

SEQ ID NO: 2449163 - DNA, 25 bp, Homo sapien
ggctttgttccctccttgtcgagta

SEQ ID NO: 2449164 - DNA, 25 bp, Homo sapien
gagcaggtctcccttaaattcattt

SEQ ID NO: 2449165 - DNA, 25 bp, Homo sapien
agctttaaaacatatgctctgggcg

SEQ ID NO: 2449166 - DNA, 25 bp, Homo sapien
ccactgtcagtgtcattgtctaatg

SEQ ID NO: 2449167 - DNA, 25 bp, Homo sapien
atcttcagtgcatttcccactgtca

SEQ ID NO: 2449168 - DNA, 25 bp, Homo sapien
gagggctttgccattcatcatcttc

SEQ ID NO: 2449169 - DNA, 25 bp, Homo sapien
ctaatgctgtttgcatccacacagc

SEQ ID NO: 2449170 - DNA, 25 bp, Homo sapien
attctgaaagccttatcattctgca

SEQ ID NO: 2449171 - DNA, 25 bp, Homo sapien
ttctgaaagccttatcattctgcat

SEQ ID NO: 2449172 - DNA, 25 bp, Homo sapien
tattctgaaagccttatcattctgc

SEQ ID NO: 2449173 - DNA, 25 bp, Homo sapien
ggggaacatggccacagagtgacct

SEQ ID NO: 2449174 - DNA, 25 bp, Homo sapien
ggaacatggccacagagtgaccttc

SEQ ID NO: 2449175 - DNA, 25 bp, Homo sapien
gtaccaggggaacatggccacagag

SEQ ID NO: 2449176 - DNA, 25 bp, Homo sapien
atggagtaccaggggaacatggcca

SEQ ID NO: 2449177 - DNA, 25 bp, Homo sapien
gtggatgctcgtgagcaacagctgc

SEQ ID NO: 2449178 - DNA, 25 bp, Homo sapien
ctggtggatgctcgtgagcaacagc

SEQ ID NO: 2449179 - DNA, 25 bp, Homo sapien
tggcaggttgctgggcctcgtgtgg

SEQ ID NO: 2449180 - DNA, 25 bp, Homo sapien
agctgccaacttggcaggttgtttt

SEQ ID NO: 2449181 - DNA, 25 bp, Homo sapien
gggagatgagcttttaccaggttcc

SEQ ID NO: 2449182 - DNA, 25 bp, Homo sapien
cctcctccatggtgggagatgagct

SEQ ID NO: 2449183 - DNA, 25 bp, Homo sapien
agatgagcttttaccaggttccacc

SEQ ID NO: 2449184 - DNA, 25 bp, Homo sapien
tcctccatggtgggagatgagcttt

SEQ ID NO: 2449185 - DNA, 25 bp, Homo sapien
atgaccgccactcatgggacaccgg

SEQ ID NO: 2449186 - DNA, 25 bp, Homo sapien
accgccactcatgggacaccggatg

SEQ ID NO: 2449187 - DNA, 25 bp, Homo sapien
agatgagccctgttccttgtgcagg

SEQ ID NO: 2449188 - DNA, 25 bp, Homo sapien
tgagccctgttccttgtgcagggca

SEQ ID NO: 2449189 - DNA, 25 bp, Homo sapien
ctggaaggccagttcatggtatttc

SEQ ID NO: 2449190 - DNA, 25 bp, Homo sapien
ggaaggccagttcatggtatttctg

SEQ ID NO: 2449191 - DNA, 25 bp, Homo sapien
gaaggccagttcatggtatttctgc

SEQ ID NO: 2449192 - DNA, 25 bp, Homo sapien
aggccagttcatggtatttctgcct

SEQ ID NO: 2449193 - DNA, 25 bp, Homo sapien
ccagtctctgacatgctccactccc

SEQ ID NO: 2449194 - DNA, 25 bp, Homo sapien
acatgctccactcccacgagccttt

SEQ ID NO: 2449195 - DNA, 25 bp, Homo sapien
cagtgccagtctctgacatgctcca

SEQ ID NO: 2449196 - DNA, 25 bp, Homo sapien
catgctccactcccacgagcctttg

SEQ ID NO: 2449197 - DNA, 25 bp, Homo sapien
aggcatccctgggtccacatcccca

SEQ ID NO: 2449198 - DNA, 25 bp, Homo sapien
ggaaggcatccctgggtccacatcc

SEQ ID NO: 2449199 - DNA, 25 bp, Homo sapien
cttggaaggcatccctgggtccaca

SEQ ID NO: 2449200 - DNA, 25 bp, Homo sapien
gcatccctgggtccacatccccagg

SEQ ID NO: 2449201 - DNA, 25 bp, Homo sapien
cagaaggtggaaggatccattggga

SEQ ID NO: 2449202 - DNA, 25 bp, Homo sapien
tggaaggatccattgggaggaaaca

SEQ ID NO: 2449203 - DNA, 25 bp, Homo sapien
aaggtggaaggatccattgggagga

SEQ ID NO: 2449204 - DNA, 25 bp, Homo sapien
ggtggaaggatccattgggaggaaa

SEQ ID NO: 2449205 - DNA, 25 bp, Homo sapien
tgtggtggggtcctccagtgtggga

SEQ ID NO: 2449206 - DNA, 25 bp, Homo sapien
gggtcctccagtgtgggatccatgt

SEQ ID NO: 2449207 - DNA, 25 bp, Homo sapien
atcttctcatcttgcatttgggtgt

SEQ ID NO: 2449208 - DNA, 25 bp, Homo sapien
tctcatcttgcatttgggtgtggtg

SEQ ID NO: 2449209 - DNA, 25 bp, Homo sapien
aagatgtgtacatagtgggcctgga

SEQ ID NO: 2449210 - DNA, 25 bp, Homo sapien
gaggggaagatgtgtacatagtggg

SEQ ID NO: 2449211 - DNA, 25 bp, Homo sapien
ggaagatgtgtacatagtgggcctg

SEQ ID NO: 2449212 - DNA, 25 bp, Homo sapien
ttggaggggaagatgtgtacatagt

SEQ ID NO: 2449213 - DNA, 25 bp, Homo sapien
gagtcagggcaggggcagaacaaac

SEQ ID NO: 2449214 - DNA, 25 bp, Homo sapien
ggagtcagggcaggggcagaacaaa

SEQ ID NO: 2449215 - DNA, 25 bp, Homo sapien
ctgggagtcagggcaggggcagaac

SEQ ID NO: 2449216 - DNA, 25 bp, Homo sapien
tgggagtcagggcaggggcagaaca

SEQ ID NO: 2449217 - DNA, 25 bp, Homo sapien
ccagggcagcgtcaagagtctgagc

SEQ ID NO: 2449218 - DNA, 25 bp, Homo sapien
gccagggcagcgtcaagagtctgag

SEQ ID NO: 2449219 - DNA, 25 bp, Homo sapien
agaagatcatgcagtcatcagtccc

SEQ ID NO: 2449220 - DNA, 25 bp, Homo sapien
gaagatcatgcagtcatcagtccca

SEQ ID NO: 2449221 - DNA, 25 bp, Homo sapien
tgggatcttctttggggtcgcctac

SEQ ID NO: 2449222 - DNA, 25 bp, Homo sapien
tctcaggttgtactgtgagtcctgg

SEQ ID NO: 2449223 - DNA, 25 bp, Homo sapien
cctgggatcttctttggggtcgcct

SEQ ID NO: 2449224 - DNA, 25 bp, Homo sapien
atcttctttggggtcgcctacctgc

SEQ ID NO: 2449225 - DNA, 25 bp, Homo sapien
ctgtgaaggtcccacaattcatgga

SEQ ID NO: 2449226 - DNA, 25 bp, Homo sapien
tcccacaattcatggaatgtacagg

SEQ ID NO: 2449227 - DNA, 25 bp, Homo sapien
caattcatggaatgtacaggggctc

SEQ ID NO: 2449228 - DNA, 25 bp, Homo sapien
gaaactgcccagctttcccctggca

SEQ ID NO: 2449229 - DNA, 25 bp, Homo sapien
aaaaatatcgcccatgatcaacgtg

SEQ ID NO: 2449230 - DNA, 25 bp, Homo sapien
acaatgaaaaatatcgcccatgatc

SEQ ID NO: 2449231 - DNA, 25 bp, Homo sapien
aatgaaaaatatcgcccatgatcaa

SEQ ID NO: 2449232 - DNA, 25 bp, Homo sapien
atatcgcccatgatcaacgtgttct

SEQ ID NO: 2449233 - DNA, 25 bp, Homo sapien
cctggtagcctctgaaggcccaaat

SEQ ID NO: 2449234 - DNA, 25 bp, Homo sapien
ctggtagcctctgaaggcccaaatc

SEQ ID NO: 2449235 - DNA, 25 bp, Homo sapien
aagcccacggaggaagcacaagagg

SEQ ID NO: 2449236 - DNA, 25 bp, Homo sapien
tgtgatgtggcccactaaagcccac

SEQ ID NO: 2449237 - DNA, 25 bp, Homo sapien
gagagcttgtgaatgtgctgctcac

SEQ ID NO: 2449238 - DNA, 25 bp, Homo sapien
atgtcaggcacttgtgatgtggccc

SEQ ID NO: 2449239 - DNA, 25 bp, Homo sapien
ccatctgaattctccaagctgcaaa

SEQ ID NO: 2449240 - DNA, 25 bp, Homo sapien
catctgaattctccaagctgcaaaa

SEQ ID NO: 2449241 - DNA, 25 bp, Homo sapien
ccaagacagaatgccatggggattg

SEQ ID NO: 2449242 - DNA, 25 bp, Homo sapien
cacaggccccatgagatctctgagg

SEQ ID NO: 2449243 - DNA, 25 bp, Homo sapien
gattggcaggtgaccatactgtgaa

SEQ ID NO: 2449244 - DNA, 25 bp, Homo sapien
gtgaagttcatggagccaaccctct

SEQ ID NO: 2449245 - DNA, 25 bp, Homo sapien
acactctgtgttaggccacagtctc

SEQ ID NO: 2449246 - DNA, 25 bp, Homo sapien
gcgagtccacttgtgcttctggagg

SEQ ID NO: 2449247 - DNA, 25 bp, Homo sapien
tgaacactctgtgttaggccacagt

SEQ ID NO: 2449248 - DNA, 25 bp, Homo sapien
ggcctctgcgagtccacttgtgctt

SEQ ID NO: 2449249 - DNA, 25 bp, Homo sapien
cacctggatgccctgacctgtgggt

SEQ ID NO: 2449250 - DNA, 25 bp, Homo sapien
agagcggccggccaagactgcggct

SEQ ID NO: 2449251 - DNA, 25 bp, Homo sapien
gcatcactctctgtgaggactctgc

SEQ ID NO: 2449252 - DNA, 25 bp, Homo sapien
tgtgaggactctgcctcagagagcc

SEQ ID NO: 2449253 - DNA, 25 bp, Homo sapien
acatgtcatgcaggtgcgggagcct

SEQ ID NO: 2449254 - DNA, 25 bp, Homo sapien
gcacatgtcatgcaggtgcgggagc

SEQ ID NO: 2449255 - DNA, 25 bp, Homo sapien
aggcacatgtcatgcaggtgcggga

SEQ ID NO: 2449256 - DNA, 25 bp, Homo sapien
gaggcacatgtcatgcaggtgcggg

SEQ ID NO: 2449257 - DNA, 25 bp, Homo sapien
ccaggtggtcacaggagaggaggct

SEQ ID NO: 2449258 - DNA, 25 bp, Homo sapien
ctgtggcaggccctccctctgtctc

SEQ ID NO: 2449259 - DNA, 25 bp, Homo sapien
cagctgagccgccaggtggtcacag

SEQ ID NO: 2449260 - DNA, 25 bp, Homo sapien
ctgtcagctgagccgccaggtggtc

SEQ ID NO: 2449261 - DNA, 25 bp, Homo sapien
tcttgcagggagtggttctcccacc

SEQ ID NO: 2449262 - DNA, 25 bp, Homo sapien
cagcacggttggcagtgttctcagc

SEQ ID NO: 2449263 - DNA, 25 bp, Homo sapien
ccatcagcacagagcgggctctttg

SEQ ID NO: 2449264 - DNA, 25 bp, Homo sapien
gctccagtgaccagggtgacctgag

SEQ ID NO: 2449265 - DNA, 25 bp, Homo sapien
tcacccacggtcatcccagggcagg

SEQ ID NO: 2449266 - DNA, 25 bp, Homo sapien
acccacggtcatcccagggcagggt

SEQ ID NO: 2449267 - DNA, 25 bp, Homo sapien
agggcagggttgtggagggccacag

SEQ ID NO: 2449268 - DNA, 25 bp, Homo sapien
ggcagggttgtggagggccacagcc

SEQ ID NO: 2449269 - DNA, 25 bp, Homo sapien
ctgtactccataggcaccatggcag

SEQ ID NO: 2449270 - DNA, 25 bp, Homo sapien
cagctctgacttttctctaacccgt

SEQ ID NO: 2449271 - DNA, 25 bp, Homo sapien
tctctgctttctctccaactgccag

SEQ ID NO: 2449272 - DNA, 25 bp, Homo sapien
agctctgacttttctctaacccgtt

SEQ ID NO: 2449273 - DNA, 25 bp, Homo sapien
ctaacccgttttctctctgctttct

SEQ ID NO: 2449274 - DNA, 25 bp, Homo sapien
gttccttctctatcaggtctggtgg

SEQ ID NO: 2449275 - DNA, 25 bp, Homo sapien
ctctggcgaccactccagccagcca

SEQ ID NO: 2449276 - DNA, 25 bp, Homo sapien
ggcctctggcgaccactccagccag

SEQ ID NO: 2449277 - DNA, 25 bp, Homo sapien
ccttctctatcaggtctggtggctg

SEQ ID NO: 2449278 - DNA, 25 bp, Homo sapien
aacacagcagcgaccagggaagagg

SEQ ID NO: 2449279 - DNA, 25 bp, Homo sapien
ctgccgcatccagggtacaatgcgc

SEQ ID NO: 2449280 - DNA, 25 bp, Homo sapien
cagacattccaaaactgatgtcaga

SEQ ID NO: 2449281 - DNA, 25 bp, Homo sapien
caaattgttgttcttatcatcttcc

SEQ ID NO: 2449282 - DNA, 25 bp, Homo sapien
agatttagctcatcagagtctacaa

SEQ ID NO: 2449283 - DNA, 25 bp, Homo sapien
gagtctacaaaccatattggtgaag

SEQ ID NO: 2449284 - DNA, 25 bp, Homo sapien
tggttgatctggcatggcaacatcc

SEQ ID NO: 2449285 - DNA, 25 bp, Homo sapien
gttgatctggcatggcaacatccag

SEQ ID NO: 2449286 - DNA, 25 bp, Homo sapien
gatctggcatggcaacatccaggtg

SEQ ID NO: 2449287 - DNA, 25 bp, Homo sapien
ttgatctggcatggcaacatccagg

SEQ ID NO: 2449288 - DNA, 25 bp, Homo sapien
ttgcggcagcaggaggggagggcag

SEQ ID NO: 2449289 - DNA, 25 bp, Homo sapien
tgcggcagcaggaggggagggcaga

SEQ ID NO: 2449290 - DNA, 25 bp, Homo sapien
cggcagcaggaggggagggcagagt

SEQ ID NO: 2449291 - DNA, 25 bp, Homo sapien
cttgcggcagcaggaggggagggca

SEQ ID NO: 2449292 - DNA, 25 bp, Homo sapien
gacatcagtgcgatgccggagtcgc

SEQ ID NO: 2449293 - DNA, 25 bp, Homo sapien
acatcagtgcgatgccggagtcgcc

SEQ ID NO: 2449294 - DNA, 25 bp, Homo sapien
gtgcgatgccggagtcgccactcca

SEQ ID NO: 2449295 - DNA, 25 bp, Homo sapien
gccggagtcgccactccatgatggg

SEQ ID NO: 2449296 - DNA, 25 bp, Homo sapien
cctgttagctcctgctggaatgcca

SEQ ID NO: 2449297 - DNA, 25 bp, Homo sapien
tgtcagggctactgccattgatttt

SEQ ID NO: 2449298 - DNA, 25 bp, Homo sapien
gttagctcctgctggaatgccaggg

SEQ ID NO: 2449299 - DNA, 25 bp, Homo sapien
gctgtgtcagggctactgccattga

SEQ ID NO: 2449300 - DNA, 25 bp, Homo sapien
tgatgcatggccttccccgtagata

SEQ ID NO: 2449301 - DNA, 25 bp, Homo sapien
atgatgcatggccttccccgtagat

SEQ ID NO: 2449302 - DNA, 25 bp, Homo sapien
agcagatgatgcatggccttccccg

SEQ ID NO: 2449303 - DNA, 25 bp, Homo sapien
cagatgatgcatggccttccccgta

SEQ ID NO: 2449304 - DNA, 25 bp, Homo sapien
ctggcagaggggcaacaagcccctg

SEQ ID NO: 2449305 - DNA, 25 bp, Homo sapien
ggctggtggagggtgtgggttgtct

SEQ ID NO: 2449306 - DNA, 25 bp, Homo sapien
tggtggagggtgtgggttgtctcag

SEQ ID NO: 2449307 - DNA, 25 bp, Homo sapien
agttggaggaagattgtggggaggg

SEQ ID NO: 2449308 - DNA, 25 bp, Homo sapien
aatcattagggctggtggagggtgt

SEQ ID NO: 2449309 - DNA, 25 bp, Homo sapien
agtgcagggccactgctagttctcg

SEQ ID NO: 2449310 - DNA, 25 bp, Homo sapien
gcagggccactgctagttctcggta

SEQ ID NO: 2449311 - DNA, 25 bp, Homo sapien
gagcttgagtgcagggccactgcta

SEQ ID NO: 2449312 - DNA, 25 bp, Homo sapien
tgagtgcagggccactgctagttct

SEQ ID NO: 2449313 - DNA, 25 bp, Homo sapien
caggagactcaacatctgattgttt

SEQ ID NO: 2449314 - DNA, 25 bp, Homo sapien
ctgctgcttgtagagggcttcccac

SEQ ID NO: 2449315 - DNA, 25 bp, Homo sapien
gggctcggcctgctgcttgtagagg

SEQ ID NO: 2449316 - DNA, 25 bp, Homo sapien
tcctcaaagctgctgtggggctcgg

SEQ ID NO: 2449317 - DNA, 25 bp, Homo sapien
cttgtagagggcttcccactccagc

SEQ ID NO: 2449318 - DNA, 25 bp, Homo sapien
gcagtgcactcttgttctcattatt

SEQ ID NO: 2449319 - DNA, 25 bp, Homo sapien
tttacttgccgctccaactgcagtg

SEQ ID NO: 2449320 - DNA, 25 bp, Homo sapien
tacttgccgctccaactgcagtgca

SEQ ID NO: 2449321 - DNA, 25 bp, Homo sapien
ctgcagtgcactcttgttctcatta

SEQ ID NO: 2449322 - DNA, 25 bp, Homo sapien
ccaaccattattagatgggtcagag

SEQ ID NO: 2449323 - DNA, 25 bp, Homo sapien
tcccaaccattattagatgggtcag

SEQ ID NO: 2449324 - DNA, 25 bp, Homo sapien
caaccattattagatgggtcagagg

SEQ ID NO: 2449325 - DNA, 25 bp, Homo sapien
accattattagatgggtcagaggtt

SEQ ID NO: 2449326 - DNA, 25 bp, Homo sapien
catgtggtggctggcttccagattc

SEQ ID NO: 2449327 - DNA, 25 bp, Homo sapien
ggcatgagggcatgtggtggctggc

SEQ ID NO: 2449328 - DNA, 25 bp, Homo sapien
gcatgagggcatgtggtggctggct

SEQ ID NO: 2449329 - DNA, 25 bp, Homo sapien
ctgggcatgagggcatgtggtggct

SEQ ID NO: 2449330 - DNA, 25 bp, Homo sapien
ctgctactaagcgaccacgaactgc

SEQ ID NO: 2449331 - DNA, 25 bp, Homo sapien
tgctactaagcgaccacgaactgct

SEQ ID NO: 2449332 - DNA, 25 bp, Homo sapien
gctactaagcgaccacgaactgctg

SEQ ID NO: 2449333 - DNA, 25 bp, Homo sapien
actgggctttagctgctgtttctgc

SEQ ID NO: 2449334 - DNA, 25 bp, Homo sapien
ctgctggctggtagcttccaggttc

SEQ ID NO: 2449335 - DNA, 25 bp, Homo sapien
ctcaactgggctttagctgctgttt

SEQ ID NO: 2449336 - DNA, 25 bp, Homo sapien
tgctggctggtagcttccaggttct

SEQ ID NO: 2449337 - DNA, 25 bp, Homo sapien
tcttcctctgagtggtctcccatac

SEQ ID NO: 2449338 - DNA, 25 bp, Homo sapien
tcctcttcctctgagtggtctccca

SEQ ID NO: 2449339 - DNA, 25 bp, Homo sapien
tctcctcttcctctgagtggtctcc

SEQ ID NO: 2449340 - DNA, 25 bp, Homo sapien
ctttcctcctggggctctctcctct

SEQ ID NO: 2449341 - DNA, 25 bp, Homo sapien
cttaggcaacccgatggccccgctc

SEQ ID NO: 2449342 - DNA, 25 bp, Homo sapien
cgaacttagtacggacacccagttg

SEQ ID NO: 2449343 - DNA, 25 bp, Homo sapien
atccttaggcaacccgatggccccg

SEQ ID NO: 2449344 - DNA, 25 bp, Homo sapien
aggcaacccgatggccccgctccca

SEQ ID NO: 2449345 - DNA, 25 bp, Homo sapien
ggaatgttcagcatgggccgaggtg

SEQ ID NO: 2449346 - DNA, 25 bp, Homo sapien
gaggtgcctcctcctcattgtccag

SEQ ID NO: 2449347 - DNA, 25 bp, Homo sapien
cattgtccagatgtcctcctccata

SEQ ID NO: 2449348 - DNA, 25 bp, Homo sapien
ctggaatgttcagcatgggccgagg

SEQ ID NO: 2449349 - DNA, 25 bp, Homo sapien
atggcctcccggctctccaggtccc

SEQ ID NO: 2449350 - DNA, 25 bp, Homo sapien
catggcctcccggctctccaggtcc

SEQ ID NO: 2449351 - DNA, 25 bp, Homo sapien
agtgggtgtccccacacacagattc

SEQ ID NO: 2449352 - DNA, 25 bp, Homo sapien
cacacgctttgctcctcctgggcac

SEQ ID NO: 2449353 - DNA, 25 bp, Homo sapien
gcctctggctttttctgggatgagg

SEQ ID NO: 2449354 - DNA, 25 bp, Homo sapien
ggctggcagcacacgctttgctcct

SEQ ID NO: 2449355 - DNA, 25 bp, Homo sapien
cttgttggcccatgccaggactact

SEQ ID NO: 2449356 - DNA, 25 bp, Homo sapien
gttggcccatgccaggactactcac

SEQ ID NO: 2449357 - DNA, 25 bp, Homo sapien
ccttgttggcccatgccaggactac

SEQ ID NO: 2449358 - DNA, 25 bp, Homo sapien
ttgttggcccatgccaggactactc

SEQ ID NO: 2449359 - DNA, 25 bp, Homo sapien
ggtccatcttctccttccataaagt

SEQ ID NO: 2449360 - DNA, 25 bp, Homo sapien
tcaggtccatcttctccttccataa

SEQ ID NO: 2449361 - DNA, 25 bp, Homo sapien
aggtccatcttctccttccataaag

SEQ ID NO: 2449362 - DNA, 25 bp, Homo sapien
tccatcttctccttccataaagttg

SEQ ID NO: 2449363 - DNA, 25 bp, Homo sapien
gtggatgaactgaagctctagtttc

SEQ ID NO: 2449364 - DNA, 25 bp, Homo sapien
cctgagaggtggatgaactgaagct

SEQ ID NO: 2449365 - DNA, 25 bp, Homo sapien
aactgaagctctagtttctccacca

SEQ ID NO: 2449366 - DNA, 25 bp, Homo sapien
gaggtggatgaactgaagctctagt

SEQ ID NO: 2449367 - DNA, 25 bp, Homo sapien
agcctgacgatgtcctcctctccca

SEQ ID NO: 2449368 - DNA, 25 bp, Homo sapien
cggtgccagcaccgacattcactcc

SEQ ID NO: 2449369 - DNA, 25 bp, Homo sapien
gtgccagcaccgacattcactccca

SEQ ID NO: 2449370 - DNA, 25 bp, Homo sapien
ggtgccagcaccgacattcactccc

SEQ ID NO: 2449371 - DNA, 25 bp, Homo sapien
tgccagcaccgacattcactcccac

SEQ ID NO: 2449372 - DNA, 25 bp, Homo sapien
gctagcatgcgactgaaggcaggga

SEQ ID NO: 2449373 - DNA, 25 bp, Homo sapien
gtaccatgatagctgctagcatgcg

SEQ ID NO: 2449374 - DNA, 25 bp, Homo sapien
tgatagctgctagcatgcgactgaa

SEQ ID NO: 2449375 - DNA, 25 bp, Homo sapien
ccatgatagctgctagcatgcgact

SEQ ID NO: 2449376 - DNA, 25 bp, Homo sapien
ctgggagtgctgagagccaaatcca

SEQ ID NO: 2449377 - DNA, 25 bp, Homo sapien
ctgtcgtgtggtctgagtcatgctg

SEQ ID NO: 2449378 - DNA, 25 bp, Homo sapien
gtcatgctgccagggcagggatcca

SEQ ID NO: 2449379 - DNA, 25 bp, Homo sapien
tcccagcctgggagtgctgagagcc

SEQ ID NO: 2449380 - DNA, 25 bp, Homo sapien
taggcatacgttgtgaggaactgga

SEQ ID NO: 2449381 - DNA, 25 bp, Homo sapien
gcttcaatgcagtccggggcatgac

SEQ ID NO: 2449382 - DNA, 25 bp, Homo sapien
ctggcttcaatgcagtccggggcat

SEQ ID NO: 2449383 - DNA, 25 bp, Homo sapien
gagataggcatacgttgtgaggaac

SEQ ID NO: 2449384 - DNA, 25 bp, Homo sapien
tcgccttgacccagcactgttggac

SEQ ID NO: 2449385 - DNA, 25 bp, Homo sapien
ctcctcgccttgacccagcactgtt

SEQ ID NO: 2449386 - DNA, 25 bp, Homo sapien
cttgacccagcactgttggacccat

SEQ ID NO: 2449387 - DNA, 25 bp, Homo sapien
ggagtccagagcatgcgcccgcttc

SEQ ID NO: 2449388 - DNA, 25 bp, Homo sapien
aggctagctgactgagggcgatcat

SEQ ID NO: 2449389 - DNA, 25 bp, Homo sapien
cggtccaggggagcaggctagctga

SEQ ID NO: 2449390 - DNA, 25 bp, Homo sapien
agcaggctagctgactgagggcgat

SEQ ID NO: 2449391 - DNA, 25 bp, Homo sapien
tccaggggagcaggctagctgactg

SEQ ID NO: 2449392 - DNA, 25 bp, Homo sapien
aaaacctgactgaagaacgaggcat

SEQ ID NO: 2449393 - DNA, 25 bp, Homo sapien
ctgaacatgcgggaacaaggaaaac

SEQ ID NO: 2449394 - DNA, 25 bp, Homo sapien
ggaaaacctgactgaagaacgaggc

SEQ ID NO: 2449395 - DNA, 25 bp, Homo sapien
aaggaaaacctgactgaagaacgag

SEQ ID NO: 2449396 - DNA, 25 bp, Homo sapien
catccagggtacaatgcgcctttcc

SEQ ID NO: 2449397 - DNA, 25 bp, Homo sapien
gcatccagggtacaatgcgcctttc

SEQ ID NO: 2449398 - DNA, 25 bp, Homo sapien
gagtccacagaccttatcggtgaag

SEQ ID NO: 2449399 - DNA, 25 bp, Homo sapien
cgaactgctgttgtccttagtatct

SEQ ID NO: 2449400 - DNA, 25 bp, Homo sapien
ttggctcatcagagtccacagacct

SEQ ID NO: 2449401 - DNA, 25 bp, Homo sapien
actgctgttgtccttagtatcttct

SEQ ID NO: 2449402 - DNA, 25 bp, Homo sapien
tggtggggcggtggggggcagttga

SEQ ID NO: 2449403 - DNA, 25 bp, Homo sapien
tggggcggtggggggcagttgaaga

SEQ ID NO: 2449404 - DNA, 25 bp, Homo sapien
gaaactctgacagcgctgcttccct

SEQ ID NO: 2449405 - DNA, 25 bp, Homo sapien
ctttggaaactctgacagcgctgct

SEQ ID NO: 2449406 - DNA, 25 bp, Homo sapien
tggaaactctgacagcgctgcttcc

SEQ ID NO: 2449407 - DNA, 25 bp, Homo sapien
gctggagcgcatagccagggaggcc

SEQ ID NO: 2449408 - DNA, 25 bp, Homo sapien
ggaggtctctatgccctaagggcag

SEQ ID NO: 2449409 - DNA, 25 bp, Homo sapien
gaggagttggaggtctctatgccct

SEQ ID NO: 2449410 - DNA, 25 bp, Homo sapien
ttggaggtctctatgccctaagggc

SEQ ID NO: 2449411 - DNA, 25 bp, Homo sapien
tctctatgccctaagggcagccagc

SEQ ID NO: 2449412 - DNA, 25 bp, Homo sapien
tgccagttctgacttgcatcccctg

SEQ ID NO: 2449413 - DNA, 25 bp, Homo sapien
cctctgccagttctgacttgcatcc

SEQ ID NO: 2449414 - DNA, 25 bp, Homo sapien
ccagttctgacttgcatcccctggg

SEQ ID NO: 2449415 - DNA, 25 bp, Homo sapien
agttctgacttgcatcccctgggcc

SEQ ID NO: 2449416 - DNA, 25 bp, Homo sapien
ggagctgtggtcaaggctcagattc

SEQ ID NO: 2449417 - DNA, 25 bp, Homo sapien
gagagggagctgtggtcaaggctca

SEQ ID NO: 2449418 - DNA, 25 bp, Homo sapien
agagagggagctgtggtcaaggctc

SEQ ID NO: 2449419 - DNA, 25 bp, Homo sapien
gagggagctgtggtcaaggctcaga

SEQ ID NO: 2449420 - DNA, 25 bp, Homo sapien
agtcacctccaggtggttctcacca

SEQ ID NO: 2449421 - DNA, 25 bp, Homo sapien
caggtggttctcaccaaagaaggaa

SEQ ID NO: 2449422 - DNA, 25 bp, Homo sapien
aggtggttctcaccaaagaaggaag

SEQ ID NO: 2449423 - DNA, 25 bp, Homo sapien
ctccaggtggttctcaccaaagaag

SEQ ID NO: 2449424 - DNA, 25 bp, Homo sapien
agggccacatcgtcactggtggaaa

SEQ ID NO: 2449425 - DNA, 25 bp, Homo sapien
cagggttcctttgttctgagtgccc

SEQ ID NO: 2449426 - DNA, 25 bp, Homo sapien
ggtctgcacgtcagccacaagcaca

SEQ ID NO: 2449427 - DNA, 25 bp, Homo sapien
gtcactggtggaaaactcttcagca

SEQ ID NO: 2449428 - DNA, 25 bp, Homo sapien
ctgaggactcctcggttcaaagtac

SEQ ID NO: 2449429 - DNA, 25 bp, Homo sapien
cagctgaggactcctcggttcaaag

SEQ ID NO: 2449430 - DNA, 25 bp, Homo sapien
gctgaggactcctcggttcaaagta

SEQ ID NO: 2449431 - DNA, 25 bp, Homo sapien
ggcagctgaggactcctcggttcaa

SEQ ID NO: 2449432 - DNA, 25 bp, Homo sapien
cagctccccaagaaggagactgtca

SEQ ID NO: 2449433 - DNA, 25 bp, Homo sapien
agctccccaagaaggagactgtcac

SEQ ID NO: 2449434 - DNA, 25 bp, Homo sapien
aggcttcccgaagcccccacctctg

SEQ ID NO: 2449435 - DNA, 25 bp, Homo sapien
catgcatggctcagctagatccatg

SEQ ID NO: 2449436 - DNA, 25 bp, Homo sapien
acatgccaccactcggctgtgccac

SEQ ID NO: 2449437 - DNA, 25 bp, Homo sapien
tgcatggctcagctagatccatgga

SEQ ID NO: 2449438 - DNA, 25 bp, Homo sapien
agcatgcatggctcagctagatcca

SEQ ID NO: 2449439 - DNA, 25 bp, Homo sapien
ggcaggaggtcagtttggcccctcc

SEQ ID NO: 2449440 - DNA, 25 bp, Homo sapien
gcatgaaggcatgggcacccaagcc

SEQ ID NO: 2449441 - DNA, 25 bp, Homo sapien
ggaggtcagtttggcccctccgcag

SEQ ID NO: 2449442 - DNA, 25 bp, Homo sapien
atgggcacccaagccatcaccaaca

SEQ ID NO: 2449443 - DNA, 25 bp, Homo sapien
cacatgggaagatgatacggggtgg

SEQ ID NO: 2449444 - DNA, 25 bp, Homo sapien
ccacatgggaagatgatacggggtg

SEQ ID NO: 2449445 - DNA, 25 bp, Homo sapien
gcagagtccaggtcataggcctgga

SEQ ID NO: 2449446 - DNA, 25 bp, Homo sapien
agtccaggtcataggcctggaaaac

SEQ ID NO: 2449447 - DNA, 25 bp, Homo sapien
aggcagagtccaggtcataggcctg

SEQ ID NO: 2449448 - DNA, 25 bp, Homo sapien
cagagtccaggtcataggcctggaa

SEQ ID NO: 2449449 - DNA, 25 bp, Homo sapien
ttcacggtgtcctcggcatagtgct

SEQ ID NO: 2449450 - DNA, 25 bp, Homo sapien
gttcttcacggtgtcctcggcatag

SEQ ID NO: 2449451 - DNA, 25 bp, Homo sapien
tcttcacggtgtcctcggcatagtg

SEQ ID NO: 2449452 - DNA, 25 bp, Homo sapien
tcctgctggtggaatgactgtgtgg

SEQ ID NO: 2449453 - DNA, 25 bp, Homo sapien
gggcctctgctgggtgttgagtgtg

SEQ ID NO: 2449454 - DNA, 25 bp, Homo sapien
gggtgttgagtgtgcagtggccgca

SEQ ID NO: 2449455 - DNA, 25 bp, Homo sapien
ggtgttgagtgtgcagtggccgcag

SEQ ID NO: 2449456 - DNA, 25 bp, Homo sapien
aagccctgaccatctgacagtgtcg

SEQ ID NO: 2449457 - DNA, 25 bp, Homo sapien
cctgaccatctgacagtgtcgtgcc

SEQ ID NO: 2449458 - DNA, 25 bp, Homo sapien
gccctgaccatctgacagtgtcgtg

SEQ ID NO: 2449459 - DNA, 25 bp, Homo sapien
gaccatctgacagtgtcgtgccctg

SEQ ID NO: 2449460 - DNA, 25 bp, Homo sapien
gttgtgtggagtcagcagctgccac

SEQ ID NO: 2449461 - DNA, 25 bp, Homo sapien
ggctgcatgggctcatccgtggcca

SEQ ID NO: 2449462 - DNA, 25 bp, Homo sapien
tgggctcatccgtggccatgatact

SEQ ID NO: 2449463 - DNA, 25 bp, Homo sapien
gcatgggctcatccgtggccatgat

SEQ ID NO: 2449464 - DNA, 25 bp, Homo sapien
catccgtggccatgatactgccaga

SEQ ID NO: 2449465 - DNA, 25 bp, Homo sapien
tgtggtagtggacctcatccccact

SEQ ID NO: 2449466 - DNA, 25 bp, Homo sapien
cctggtctccttgagggaccttgag

SEQ ID NO: 2449467 - DNA, 25 bp, Homo sapien
tctccttgagggaccttgaggccgg

SEQ ID NO: 2449468 - DNA, 25 bp, Homo sapien
tccccactgcggatgtcgaggttgg

SEQ ID NO: 2449469 - DNA, 25 bp, Homo sapien
aggtccttctgggcgaaggctgtgc

SEQ ID NO: 2449470 - DNA, 25 bp, Homo sapien
attgtggccaaagagaacggcccca

SEQ ID NO: 2449471 - DNA, 25 bp, Homo sapien
ctgccattgtggccaaagagaacgg

SEQ ID NO: 2449472 - DNA, 25 bp, Homo sapien
gccattgtggccaaagagaacggcc

SEQ ID NO: 2449473 - DNA, 25 bp, Homo sapien
tgtggccaaagagaacggccccaac

SEQ ID NO: 2449474 - DNA, 25 bp, Homo sapien
gtgcaccgtgtgcactgtctgtgtg

SEQ ID NO: 2449475 - DNA, 25 bp, Homo sapien
tgcaccgtgtgcactgtctgtgtgc

SEQ ID NO: 2449476 - DNA, 25 bp, Homo sapien
cttcttgtgccaggccagcttcagt

SEQ ID NO: 2449477 - DNA, 25 bp, Homo sapien
atgtagatcttcttgtgccaggcca

SEQ ID NO: 2449478 - DNA, 25 bp, Homo sapien
tcttcttgtgccaggccagcttcag

SEQ ID NO: 2449479 - DNA, 25 bp, Homo sapien
aggaagatgtagatcttcttgtgcc

SEQ ID NO: 2449480 - DNA, 25 bp, Homo sapien
gccccacgctcagatgcagaccaga

SEQ ID NO: 2449481 - DNA, 25 bp, Homo sapien
ggccccacgctcagatgcagaccag

SEQ ID NO: 2449482 - DNA, 25 bp, Homo sapien
gtgggccccacgctcagatgcagac

SEQ ID NO: 2449483 - DNA, 25 bp, Homo sapien
cgtgggccccacgctcagatgcaga

SEQ ID NO: 2449484 - DNA, 25 bp, Homo sapien
tgctcacgcagtctcctggtgggag

SEQ ID NO: 2449485 - DNA, 25 bp, Homo sapien
gctctgccctgctatggaacaactc

SEQ ID NO: 2449486 - DNA, 25 bp, Homo sapien
cccaggacggcccacaaagagtctg

SEQ ID NO: 2449487 - DNA, 25 bp, Homo sapien
ggtgggagcatcaggtgtgctgcct

SEQ ID NO: 2449488 - DNA, 25 bp, Homo sapien
gcacagcatcttgtcgcgctgctgt

SEQ ID NO: 2449489 - DNA, 25 bp, Homo sapien
cacagcatcttgtcgcgctgctgtg

SEQ ID NO: 2449490 - DNA, 25 bp, Homo sapien
tgcacagcatcttgtcgcgctgctg

SEQ ID NO: 2449491 - DNA, 25 bp, Homo sapien
gggccagtccctggtacctgtgttc

SEQ ID NO: 2449492 - DNA, 25 bp, Homo sapien
agcgtgccactaagccctgggcact

SEQ ID NO: 2449493 - DNA, 25 bp, Homo sapien
tcctcagggacactctgcacctgca

SEQ ID NO: 2449494 - DNA, 25 bp, Homo sapien
aaccaccccatgagggagcgtgcca

SEQ ID NO: 2449495 - DNA, 25 bp, Homo sapien
ctagggacatggcagggtctgggca

SEQ ID NO: 2449496 - DNA, 25 bp, Homo sapien
catcctggggctggacttgggtgac

SEQ ID NO: 2449497 - DNA, 25 bp, Homo sapien
gtctgggcatcctggggctggactt

SEQ ID NO: 2449498 - DNA, 25 bp, Homo sapien
agggacatggcagggtctgggcatc

SEQ ID NO: 2449499 - DNA, 25 bp, Homo sapien
agcccttggccacacgtggctctgg

SEQ ID NO: 2449500 - DNA, 25 bp, Homo sapien
ggcggccaggtctgatgctctggaa

SEQ ID NO: 2449501 - DNA, 25 bp, Homo sapien
caaaaacgaccacttccaggagtca

SEQ ID NO: 2449502 - DNA, 25 bp, Homo sapien
agtcccatttccatcccggccacgc

SEQ ID NO: 2449503 - DNA, 25 bp, Homo sapien
ctgccttgaagaaactctcccagac

SEQ ID NO: 2449504 - DNA, 25 bp, Homo sapien
aagaaactctcccagactgcccttt

SEQ ID NO: 2449505 - DNA, 25 bp, Homo sapien
cttgaagaaactctcccagactgcc

SEQ ID NO: 2449506 - DNA, 25 bp, Homo sapien
gccttgaagaaactctcccagactg

SEQ ID NO: 2449507 - DNA, 25 bp, Homo sapien
actaatgtccggctgtcatttctcc

SEQ ID NO: 2449508 - DNA, 25 bp, Homo sapien
atactctttggactttgaaggttct

SEQ ID NO: 2449509 - DNA, 25 bp, Homo sapien
ttgctcactaatgtccggctgtcat

SEQ ID NO: 2449510 - DNA, 25 bp, Homo sapien
gctcactaatgtccggctgtcattt

SEQ ID NO: 2449511 - DNA, 25 bp, Homo sapien
cttctgtggtccccatgtcttccaa

SEQ ID NO: 2449512 - DNA, 25 bp, Homo sapien
caaaatggtggatctataagggacg

SEQ ID NO: 2449513 - DNA, 25 bp, Homo sapien
ggacggctggctggagtgaatgcca

SEQ ID NO: 2449514 - DNA, 25 bp, Homo sapien
tgtggtccccatgtcttccaaccca

SEQ ID NO: 2449515 - DNA, 25 bp, Homo sapien
gcacccaggcaatccacccatccac

SEQ ID NO: 2449516 - DNA, 25 bp, Homo sapien
gctggcgtctctcatggcacccagg

SEQ ID NO: 2449517 - DNA, 25 bp, Homo sapien
acacgctggcgtctctcatggcacc

SEQ ID NO: 2449518 - DNA, 25 bp, Homo sapien
acacacgctggcgtctctcatggca

SEQ ID NO: 2449519 - DNA, 25 bp, Homo sapien
ggagggcgtagctgtgggcatggca

SEQ ID NO: 2449520 - DNA, 25 bp, Homo sapien
tgcgctgcagaagctgtgggagggc

SEQ ID NO: 2449521 - DNA, 25 bp, Homo sapien
cagagtatgggtgcgctgcagaagc

SEQ ID NO: 2449522 - DNA, 25 bp, Homo sapien
gctggtgaggcgagtgcagagtatg

SEQ ID NO: 2449523 - DNA, 25 bp, Homo sapien
gaaagcagagagaaaacgggttaga

SEQ ID NO: 2449524 - DNA, 25 bp, Homo sapien
tcagctggtagttggagagaaagca

SEQ ID NO: 2449525 - DNA, 25 bp, Homo sapien
gcagagagaaaacgggttagagaaa

SEQ ID NO: 2449526 - DNA, 25 bp, Homo sapien
aagcagagagaaaacgggttagaga

SEQ ID NO: 2449527 - DNA, 25 bp, Homo sapien
ggtccacaagactccgcaagcacag

SEQ ID NO: 2449528 - DNA, 25 bp, Homo sapien
gcgggggctagctgtccgcaggcca

SEQ ID NO: 2449529 - DNA, 25 bp, Homo sapien
ggctagctgtccgcaggccacgcat

SEQ ID NO: 2449530 - DNA, 25 bp, Homo sapien
tgctggtccacaagactccgcaagc

SEQ ID NO: 2449531 - DNA, 25 bp, Homo sapien
ggccacacagctgcctgcacagcac

SEQ ID NO: 2449532 - DNA, 25 bp, Homo sapien
acacagctgcctgcacagcaccgcc

SEQ ID NO: 2449533 - DNA, 25 bp, Homo sapien
acagctgcctgcacagcaccgccat

SEQ ID NO: 2449534 - DNA, 25 bp, Homo sapien
tcaggccacacagctgcctgcacag

SEQ ID NO: 2449535 - DNA, 25 bp, Homo sapien
gaaggcagatacctgcgcccaaggg

SEQ ID NO: 2449536 - DNA, 25 bp, Homo sapien
agggaaggcagatacctgcgcccaa

SEQ ID NO: 2449537 - DNA, 25 bp, Homo sapien
gcagggaaggcagatacctgcgccc

SEQ ID NO: 2449538 - DNA, 25 bp, Homo sapien
aggcagatacctgcgcccaagggca

SEQ ID NO: 2449539 - DNA, 25 bp, Homo sapien
agatgagaccaaccacctaaggaag

SEQ ID NO: 2449540 - DNA, 25 bp, Homo sapien
aatcagatgttgagtctcctgaaca

SEQ ID NO: 2449541 - DNA, 25 bp, Homo sapien
aacaatcagatgttgagtctcctga

SEQ ID NO: 2449542 - DNA, 25 bp, Homo sapien
gaaaacaatcagatgttgagtctcc

SEQ ID NO: 2449543 - DNA, 25 bp, Homo sapien
ggattttcaaacactcagctgacta

SEQ ID NO: 2449544 - DNA, 25 bp, Homo sapien
taactgtggtgctgatactacggaa

SEQ ID NO: 2449545 - DNA, 25 bp, Homo sapien
tctcatggacctatggagttggctg

SEQ ID NO: 2449546 - DNA, 25 bp, Homo sapien
cattttgagtttccccacacagtaa

SEQ ID NO: 2449547 - DNA, 25 bp, Homo sapien
tctcgctatgagtttcagttctgcg

SEQ ID NO: 2449548 - DNA, 25 bp, Homo sapien
cgctatgagtttcagttctgcgtaa

SEQ ID NO: 2449549 - DNA, 25 bp, Homo sapien
attacctctcgctatgagtttcagt

SEQ ID NO: 2449550 - DNA, 25 bp, Homo sapien
gagtttcagttctgcgtaagatttg

SEQ ID NO: 2449551 - DNA, 25 bp, Homo sapien
tctgtctacttcattcgcttcttgc

SEQ ID NO: 2449552 - DNA, 25 bp, Homo sapien
gccatctcgatcagttttcaattcc

SEQ ID NO: 2449553 - DNA, 25 bp, Homo sapien
cttcattcgcttcttgccagtacaa

SEQ ID NO: 2449554 - DNA, 25 bp, Homo sapien
ttgccagtacaatttgccatctcga

SEQ ID NO: 2449555 - DNA, 25 bp, Homo sapien
agtgtcttcttgtgagtatcatgca

SEQ ID NO: 2449556 - DNA, 25 bp, Homo sapien
tgcagtgtcttcttgtgagtatcat

SEQ ID NO: 2449557 - DNA, 25 bp, Homo sapien
tggaatgcagtgtcttcttgtgagt

SEQ ID NO: 2449558 - DNA, 25 bp, Homo sapien
aatgcagtgtcttcttgtgagtatc

SEQ ID NO: 2449559 - DNA, 25 bp, Homo sapien
ttaaatacatcatcgtgaggatgag

SEQ ID NO: 2449560 - DNA, 25 bp, Homo sapien
tgtttaatgctagtttgtcttcaca

SEQ ID NO: 2449561 - DNA, 25 bp, Homo sapien
catcatcgtgaggatgagccttact

SEQ ID NO: 2449562 - DNA, 25 bp, Homo sapien
aatacatcatcgtgaggatgagcct

SEQ ID NO: 2449563 - DNA, 25 bp, Homo sapien
caatgtataagaagtaagaactgcc

SEQ ID NO: 2449564 - DNA, 25 bp, Homo sapien
atttccaagaggtaggtcacccact

SEQ ID NO: 2449565 - DNA, 25 bp, Homo sapien
caagaggtaggtcacccactaccat

SEQ ID NO: 2449566 - DNA, 25 bp, Homo sapien
tccaagaggtaggtcacccactacc

SEQ ID NO: 2449567 - DNA, 25 bp, Homo sapien
ggaagccgtaactgagccagacctc

SEQ ID NO: 2449568 - DNA, 25 bp, Homo sapien
tgctctctattccacaatgtcctgc

SEQ ID NO: 2449569 - DNA, 25 bp, Homo sapien
tgggtcttgctctctattccacaat

SEQ ID NO: 2449570 - DNA, 25 bp, Homo sapien
tctgataaagccctgatgatcttcc

SEQ ID NO: 2449571 - DNA, 25 bp, Homo sapien
cattggctgccgattggcccattaa

SEQ ID NO: 2449572 - DNA, 25 bp, Homo sapien
gcccaactttcactcttgcaactaa

SEQ ID NO: 2449573 - DNA, 25 bp, Homo sapien
tggtctctgccaccgtcagtaacat

SEQ ID NO: 2449574 - DNA, 25 bp, Homo sapien
ttctgctaggcctatgatgaggtac

SEQ ID NO: 2449575 - DNA, 25 bp, Homo sapien
gcacatctgggtgaatctgtcctct

SEQ ID NO: 2449576 - DNA, 25 bp, Homo sapien
ataggcacatctgggtgaatctgtc

SEQ ID NO: 2449577 - DNA, 25 bp, Homo sapien
ttataggcacatctgggtgaatctg

SEQ ID NO: 2449578 - DNA, 25 bp, Homo sapien
aggcacatctgggtgaatctgtcct

SEQ ID NO: 2449579 - DNA, 25 bp, Homo sapien
cctcaggtgagagtagctaaatcca

SEQ ID NO: 2449580 - DNA, 25 bp, Homo sapien
ctcaggtgagagtagctaaatccac

SEQ ID NO: 2449581 - DNA, 25 bp, Homo sapien
ggtgggacagcttgggctttgtctc

SEQ ID NO: 2449582 - DNA, 25 bp, Homo sapien
tgggacagcttgggctttgtctcat

SEQ ID NO: 2449583 - DNA, 25 bp, Homo sapien
ctggtgggacagcttgggctttgtc

SEQ ID NO: 2449584 - DNA, 25 bp, Homo sapien
gtgggacagcttgggctttgtctca

SEQ ID NO: 2449585 - DNA, 25 bp, Homo sapien
aattgtgcgaaatagcagctatgcc

SEQ ID NO: 2449586 - DNA, 25 bp, Homo sapien
ctggtgtagtgaaaattgtgcgaaa

SEQ ID NO: 2449587 - DNA, 25 bp, Homo sapien
agcagctatgccatgtgcctgaacc

SEQ ID NO: 2449588 - DNA, 25 bp, Homo sapien
gctatgccatgtgcctgaacctctc

SEQ ID NO: 2449589 - DNA, 25 bp, Homo sapien
gaaagacacgggattggaacagttg

SEQ ID NO: 2449590 - DNA, 25 bp, Homo sapien
tccacatagacacttctttctgcct

SEQ ID NO: 2449591 - DNA, 25 bp, Homo sapien
caccaggttctgtgtatggatgaac

SEQ ID NO: 2449592 - DNA, 25 bp, Homo sapien
tgctgtgccacctttgtttcagttg

SEQ ID NO: 2449593 - DNA, 25 bp, Homo sapien
atactgtgtattcccatttttatcc

SEQ ID NO: 2449594 - DNA, 25 bp, Homo sapien
tgtcatcctgtttgtcataaccttt

SEQ ID NO: 2449595 - DNA, 25 bp, Homo sapien
tttccaccgaaccaaatactgtgta

SEQ ID NO: 2449596 - DNA, 25 bp, Homo sapien
atttttatcctgtcttttgtcaaca

SEQ ID NO: 2449597 - DNA, 25 bp, Homo sapien
accctttcgggtagctgaacctgtg

SEQ ID NO: 2449598 - DNA, 25 bp, Homo sapien
gctgatctgctgcaatagggtccag

SEQ ID NO: 2449599 - DNA, 25 bp, Homo sapien
caaaagacacttccagctgcactga

SEQ ID NO: 2449600 - DNA, 25 bp, Homo sapien
tctgcagcagcgctattcagagcat

SEQ ID NO: 2449601 - DNA, 25 bp, Homo sapien
gagggccttacattcttccagtaca

SEQ ID NO: 2449602 - DNA, 25 bp, Homo sapien
ggcctgttccaactccaacttaata

SEQ ID NO: 2449603 - DNA, 25 bp, Homo sapien
caacttaatattacagcgaacgagg

SEQ ID NO: 2449604 - DNA, 25 bp, Homo sapien
gctgtcagctttcgcccagcaatta

SEQ ID NO: 2449605 - DNA, 25 bp, Homo sapien
catggattctatcccttgggctgag

SEQ ID NO: 2449606 - DNA, 25 bp, Homo sapien
tttaacatggattctatcccttggg

SEQ ID NO: 2449607 - DNA, 25 bp, Homo sapien
taacatggattctatcccttgggct

SEQ ID NO: 2449608 - DNA, 25 bp, Homo sapien
acatggattctatcccttgggctga

SEQ ID NO: 2449609 - DNA, 25 bp, Homo sapien
ctcatcaattttattttcaacatac

SEQ ID NO: 2449610 - DNA, 25 bp, Homo sapien
aactcatcaattttattttcaacat

SEQ ID NO: 2449611 - DNA, 25 bp, Homo sapien
aaactcatcaattttattttcaaca

SEQ ID NO: 2449612 - DNA, 25 bp, Homo sapien
taaaactcatcaattttattttcaa

SEQ ID NO: 2449613 - DNA, 25 bp, Homo sapien
gttactccttgtaaagctacagtgc

SEQ ID NO: 2449614 - DNA, 25 bp, Homo sapien
ccaagccttagctatgggtgaaatt

SEQ ID NO: 2449615 - DNA, 25 bp, Homo sapien
gattagggcatcttgcaactcatga

SEQ ID NO: 2449616 - DNA, 25 bp, Homo sapien
ccttagttcttgtgtcctgagcaga

SEQ ID NO: 2449617 - DNA, 25 bp, Homo sapien
aggctgctttatatcccaacagagg

SEQ ID NO: 2449618 - DNA, 25 bp, Homo sapien
attctgtgtctttctgggagggaag

SEQ ID NO: 2449619 - DNA, 25 bp, Homo sapien
accatctctgatcattctgtgtctt

SEQ ID NO: 2449620 - DNA, 25 bp, Homo sapien
agggaaggctgctttatatcccaac

SEQ ID NO: 2449621 - DNA, 25 bp, Homo sapien
ccataattcactaatgtggtgtaac

SEQ ID NO: 2449622 - DNA, 25 bp, Homo sapien
ccaccaattctagtcatgtgttcag

SEQ ID NO: 2449623 - DNA, 25 bp, Homo sapien
gcacattccacacattagaacctgg

SEQ ID NO: 2449624 - DNA, 25 bp, Homo sapien
gaaaatcaagcgatatctcaccacc

SEQ ID NO: 2449625 - DNA, 25 bp, Homo sapien
gaagccgtcagttttttcatagtaa

SEQ ID NO: 2449626 - DNA, 25 bp, Homo sapien
gagaaagcagacgttgaaattacag

SEQ ID NO: 2449627 - DNA, 25 bp, Homo sapien
aaggcacttaatctccatgtatcag

SEQ ID NO: 2449628 - DNA, 25 bp, Homo sapien
tcatagtaaaggcacttaatctcca

SEQ ID NO: 2449629 - DNA, 25 bp, Homo sapien
gaacccccatatgagcacatgatga

SEQ ID NO: 2449630 - DNA, 25 bp, Homo sapien
gtctatagtcccatgaacaaaggcg

SEQ ID NO: 2449631 - DNA, 25 bp, Homo sapien
caagtaggacgggcttgtacaggct

SEQ ID NO: 2449632 - DNA, 25 bp, Homo sapien
acaaaggcgagcttgccaatgacag

SEQ ID NO: 2449633 - DNA, 25 bp, Homo sapien
ctgtcttgagaataccaaaatagta

SEQ ID NO: 2449634 - DNA, 25 bp, Homo sapien
gaaatgagcaagagtaaatattcct

SEQ ID NO: 2449635 - DNA, 25 bp, Homo sapien
agtccccagggtcatcaatgtggcc

SEQ ID NO: 2449636 - DNA, 25 bp, Homo sapien
gccatttgatctcatcaccaggaaa

SEQ ID NO: 2449637 - DNA, 25 bp, Homo sapien
gaaggattcaccagagtccccaggg

SEQ ID NO: 2449638 - DNA, 25 bp, Homo sapien
actggattatcatggtggccaacaa

SEQ ID NO: 2449639 - DNA, 25 bp, Homo sapien
aattacaaagtagaagctcctagac

SEQ ID NO: 2449640 - DNA, 25 bp, Homo sapien
caaaaactggattatcatggtggcc

SEQ ID NO: 2449641 - DNA, 25 bp, Homo sapien
cagctggcaaaacctccctttcaaa

SEQ ID NO: 2449642 - DNA, 25 bp, Homo sapien
tggcaacatgttctcgagacaagcc

SEQ ID NO: 2449643 - DNA, 25 bp, Homo sapien
ggcaacatgttctcgagacaagcct

SEQ ID NO: 2449644 - DNA, 25 bp, Homo sapien
aatggcaacatgttctcgagacaag

SEQ ID NO: 2449645 - DNA, 25 bp, Homo sapien
atggcaacatgttctcgagacaagc

SEQ ID NO: 2449646 - DNA, 25 bp, Homo sapien
tcggcacatccatagtgcaatagat

SEQ ID NO: 2449647 - DNA, 25 bp, Homo sapien
ccatagtgcaatagatcagtcttgc

SEQ ID NO: 2449648 - DNA, 25 bp, Homo sapien
tcaggggtcggcacatccatagtgc

SEQ ID NO: 2449649 - DNA, 25 bp, Homo sapien
acatccatagtgcaatagatcagtc

SEQ ID NO: 2449650 - DNA, 25 bp, Homo sapien
gctcatctaaggaatcttgattatc

SEQ ID NO: 2449651 - DNA, 25 bp, Homo sapien
catctaaggaatcttgattatctgg

SEQ ID NO: 2449652 - DNA, 25 bp, Homo sapien
aatgtggcatcttctgttgaagagg

SEQ ID NO: 2449653 - DNA, 25 bp, Homo sapien
gaggacataatgtggcatcttctgt

SEQ ID NO: 2449654 - DNA, 25 bp, Homo sapien
aaataaggacatgttgatccccatt

SEQ ID NO: 2449655 - DNA, 25 bp, Homo sapien
gttgatccccatttgaagaatcttc

SEQ ID NO: 2449656 - DNA, 25 bp, Homo sapien
aacaggacatcatgatgtagtccct

SEQ ID NO: 2449657 - DNA, 25 bp, Homo sapien
tctgcaggatgattgggaggtcatt

SEQ ID NO: 2449658 - DNA, 25 bp, Homo sapien
tcctttttctatgcaatgagcttct

SEQ ID NO: 2449659 - DNA, 25 bp, Homo sapien
actgtactgtggcatgtatatctgc

SEQ ID NO: 2449660 - DNA, 25 bp, Homo sapien
gtactgtggcatgtatatctgcctt

SEQ ID NO: 2449661 - DNA, 25 bp, Homo sapien
tgtactgtggcatgtatatctgcct

SEQ ID NO: 2449662 - DNA, 25 bp, Homo sapien
tggacttggttgcttgtgatttatg

SEQ ID NO: 2449663 - DNA, 25 bp, Homo sapien
ttggttgcttgtgatttatgttgtc

SEQ ID NO: 2449664 - DNA, 25 bp, Homo sapien
ttgcttgtgatttatgttgtctcat

SEQ ID NO: 2449665 - DNA, 25 bp, Homo sapien
ctttggacttggttgcttgtgattt

SEQ ID NO: 2449666 - DNA, 25 bp, Homo sapien
agcattgcagttggggtagctttac

SEQ ID NO: 2449667 - DNA, 25 bp, Homo sapien
tagaatcttcatatgggatgttcac

SEQ ID NO: 2449668 - DNA, 25 bp, Homo sapien
tcatccaagcattgcagttggggta

SEQ ID NO: 2449669 - DNA, 25 bp, Homo sapien
tttagtagaatcttcatatgggatg

SEQ ID NO: 2449670 - DNA, 25 bp, Homo sapien
gtttaactgtaatgtctaagaaata

SEQ ID NO: 2449671 - DNA, 25 bp, Homo sapien
gatgttgttgtcttccctgcatcaa

SEQ ID NO: 2449672 - DNA, 25 bp, Homo sapien
caagaattaattgatgttgttgtct

SEQ ID NO: 2449673 - DNA, 25 bp, Homo sapien
tccctgcatcaaaagtttaactgta

SEQ ID NO: 2449674 - DNA, 25 bp, Homo sapien
tggacttggttgcttgtgatttatg

SEQ ID NO: 2449675 - DNA, 25 bp, Homo sapien
ttggttgcttgtgatttatgttgtt

SEQ ID NO: 2449676 - DNA, 25 bp, Homo sapien
ttgcttgtgatttatgttgtttcat

SEQ ID NO: 2449677 - DNA, 25 bp, Homo sapien
ctttggacttggttgcttgtgattt

SEQ ID NO: 2449678 - DNA, 25 bp, Homo sapien
caccaaggaacgcaataccacgaca

SEQ ID NO: 2449679 - DNA, 25 bp, Homo sapien
caaggaacgcaataccacgacacgg

SEQ ID NO: 2449680 - DNA, 25 bp, Homo sapien
acgcaataccacgacacggatgaat

SEQ ID NO: 2449681 - DNA, 25 bp, Homo sapien
gaacgcaataccacgacacggatga

SEQ ID NO: 2449682 - DNA, 25 bp, Homo sapien
gaaagggtaggctcctcagtttcag

SEQ ID NO: 2449683 - DNA, 25 bp, Homo sapien
atgccagagccattacacatgagat

SEQ ID NO: 2449684 - DNA, 25 bp, Homo sapien
tacatgattaatagaaagggtaggc

SEQ ID NO: 2449685 - DNA, 25 bp, Homo sapien
ccagagccattacacatgagattac

SEQ ID NO: 2449686 - DNA, 25 bp, Homo sapien
atatgctagcatggttaaaataagc

SEQ ID NO: 2449687 - DNA, 25 bp, Homo sapien
cagcatatgctagcatggttaaaat

SEQ ID NO: 2449688 - DNA, 25 bp, Homo sapien
ggcagcatatgctagcatggttaaa

SEQ ID NO: 2449689 - DNA, 25 bp, Homo sapien
gcatatgctagcatggttaaaataa

SEQ ID NO: 2449690 - DNA, 25 bp, Homo sapien
gccctcagaaataatgctgcatatc

SEQ ID NO: 2449691 - DNA, 25 bp, Homo sapien
aaataatgctgcatatctacaacta

SEQ ID NO: 2449692 - DNA, 25 bp, Homo sapien
tctgatctttgacaaacctgacaaa

SEQ ID NO: 2449693 - DNA, 25 bp, Homo sapien
tcagaaataatgctgcatatctaca

SEQ ID NO: 2449694 - DNA, 25 bp, Homo sapien
ctggcagtcagtggatttcaaatgt

SEQ ID NO: 2449695 - DNA, 25 bp, Homo sapien
aatgttcttgtctcctggaaagtcc

SEQ ID NO: 2449696 - DNA, 25 bp, Homo sapien
atggtccttgagtggtccattttat

SEQ ID NO: 2449697 - DNA, 25 bp, Homo sapien
ccaagcccagtggttctgatggtcc

SEQ ID NO: 2449698 - DNA, 25 bp, Homo sapien
tcatggtcgtgcccatactggtaca

SEQ ID NO: 2449699 - DNA, 25 bp, Homo sapien
gtcgtgcccatactggtacatctcg

SEQ ID NO: 2449700 - DNA, 25 bp, Homo sapien
tggtcgtgcccatactggtacatct

SEQ ID NO: 2449701 - DNA, 25 bp, Homo sapien
gtgcccatactggtacatctcgcca

SEQ ID NO: 2449702 - DNA, 25 bp, Homo sapien
ttcagttgcagccatagaggactct

SEQ ID NO: 2449703 - DNA, 25 bp, Homo sapien
accaactgccgagcctggaaggaaa

SEQ ID NO: 2449704 - DNA, 25 bp, Homo sapien
tgttactgcaagcaaccagtgggca

SEQ ID NO: 2449705 - DNA, 25 bp, Homo sapien
aggcctcagccatgattcagttgca

SEQ ID NO: 2449706 - DNA, 25 bp, Homo sapien
cgccaagctgccatattaaacacaa

SEQ ID NO: 2449707 - DNA, 25 bp, Homo sapien
aaacagaggtgttcgggatggcttc

SEQ ID NO: 2449708 - DNA, 25 bp, Homo sapien
tagggaaggccataactgttgcatc

SEQ ID NO: 2449709 - DNA, 25 bp, Homo sapien
catcaaccagtgcagggtttgttta

SEQ ID NO: 2449710 - DNA, 25 bp, Homo sapien
tgtcaacaatagtttcaacctcaaa

SEQ ID NO: 2449711 - DNA, 25 bp, Homo sapien
ttccttgtcttttgtcaacaatagt

SEQ ID NO: 2449712 - DNA, 25 bp, Homo sapien
caacaatagtttcaacctcaaactc

SEQ ID NO: 2449713 - DNA, 25 bp, Homo sapien
tttccttgtcttttgtcaacaatag

SEQ ID NO: 2449714 - DNA, 25 bp, Homo sapien
gcttgtcataagctttccacttaac

SEQ ID NO: 2449715 - DNA, 25 bp, Homo sapien
actgcttgtcataagctttccactt

SEQ ID NO: 2449716 - DNA, 25 bp, Homo sapien
atactgcttgtcataagctttccac

SEQ ID NO: 2449717 - DNA, 25 bp, Homo sapien
tgcttgtcataagctttccacttaa

SEQ ID NO: 2449718 - DNA, 25 bp, Homo sapien
cactagcatgttaggagagttctta

SEQ ID NO: 2449719 - DNA, 25 bp, Homo sapien
gccagtcactagcatgttaggagag

SEQ ID NO: 2449720 - DNA, 25 bp, Homo sapien
gatctggaagttcctctagtatggt

SEQ ID NO: 2449721 - DNA, 25 bp, Homo sapien
tggatttgtggtgtttgccagtcac

SEQ ID NO: 2449722 - DNA, 25 bp, Homo sapien
cacagttttcttgttaaagggactg

SEQ ID NO: 2449723 - DNA, 25 bp, Homo sapien
gactgtgaggtgcaaatgtcttcat

SEQ ID NO: 2449724 - DNA, 25 bp, Homo sapien
taaagggactgtgaggtgcaaatgt

SEQ ID NO: 2449725 - DNA, 25 bp, Homo sapien
cttgttaaagggactgtgaggtgca

SEQ ID NO: 2449726 - DNA, 25 bp, Homo sapien
agaacctgataaagtcctgatgggc

SEQ ID NO: 2449727 - DNA, 25 bp, Homo sapien
ctgataaagtcctgatgggcttccc

SEQ ID NO: 2449728 - DNA, 25 bp, Homo sapien
tgttctgcaccagaacctgataaag

SEQ ID NO: 2449729 - DNA, 25 bp, Homo sapien
cagatctaccataaaggggtccagt

SEQ ID NO: 2449730 - DNA, 25 bp, Homo sapien
cctgtggccaaggaagcagtaagtg

SEQ ID NO: 2449731 - DNA, 25 bp, Homo sapien
ccagacatctgagacattagcaggt

SEQ ID NO: 2449732 - DNA, 25 bp, Homo sapien
tttttggtagctgagcctgtggcca

SEQ ID NO: 2449733 - DNA, 25 bp, Homo sapien
tctgggtcctgttctctattccaac

SEQ ID NO: 2449734 - DNA, 25 bp, Homo sapien
ggccattgactgatacaacaatagg

SEQ ID NO: 2449735 - DNA, 25 bp, Homo sapien
agggccattgactgatacaacaata

SEQ ID NO: 2449736 - DNA, 25 bp, Homo sapien
ctagtccagtgacagggccattgac

SEQ ID NO: 2449737 - DNA, 25 bp, Homo sapien
agtccagtgacagggccattgactg

SEQ ID NO: 2449738 - DNA, 25 bp, Homo sapien
gcttcacccatcatttttgaaaatg

SEQ ID NO: 2449739 - DNA, 25 bp, Homo sapien
gaaaatgtaacagtagaacagccat

SEQ ID NO: 2449740 - DNA, 25 bp, Homo sapien
ctggactgtgtccaaaagctgcata

SEQ ID NO: 2449741 - DNA, 25 bp, Homo sapien
aagctgcataagaggtttggaacca

SEQ ID NO: 2449742 - DNA, 25 bp, Homo sapien
ccagtgatcttttttccgtcgttca

SEQ ID NO: 2449743 - DNA, 25 bp, Homo sapien
tcctctatcccccaggtaacctgta

SEQ ID NO: 2449744 - DNA, 25 bp, Homo sapien
ccagagaccagtgatcttttttccg

SEQ ID NO: 2449745 - DNA, 25 bp, Homo sapien
gagaccagtgatcttttttccgtcg

SEQ ID NO: 2449746 - DNA, 25 bp, Homo sapien
tctgaggccagggattccccctcat

SEQ ID NO: 2449747 - DNA, 25 bp, Homo sapien
ctctgaggccagggattccccctca

SEQ ID NO: 2449748 - DNA, 25 bp, Homo sapien
tctctgaggccagggattccccctc

SEQ ID NO: 2449749 - DNA, 25 bp, Homo sapien
gtctctgaggccagggattccccct

SEQ ID NO: 2449750 - DNA, 25 bp, Homo sapien
gaatgtgtattcatggtcttctcga

SEQ ID NO: 2449751 - DNA, 25 bp, Homo sapien
ctccaaggaacacttgtcccagagg

SEQ ID NO: 2449752 - DNA, 25 bp, Homo sapien
tgttgctttaaataagggcctttga

SEQ ID NO: 2449753 - DNA, 25 bp, Homo sapien
catggtcttctcgatttttctgttg

SEQ ID NO: 2449754 - DNA, 25 bp, Homo sapien
tctgcacaagcattgaagcagcagt

SEQ ID NO: 2449755 - DNA, 25 bp, Homo sapien
cttcttctgcacaagcattgaagca

SEQ ID NO: 2449756 - DNA, 25 bp, Homo sapien
tcttctgcacaagcattgaagcagc

SEQ ID NO: 2449757 - DNA, 25 bp, Homo sapien
ttctgcacaagcattgaagcagcag

SEQ ID NO: 2449758 - DNA, 25 bp, Homo sapien
caaaaagtggattatcatggtggcc

SEQ ID NO: 2449759 - DNA, 25 bp, Homo sapien
ccagctcgcaaaaactccatttcaa

SEQ ID NO: 2449760 - DNA, 25 bp, Homo sapien
caaagtagaagctcctagacatggt

SEQ ID NO: 2449761 - DNA, 25 bp, Homo sapien
gccttcccagctcgcaaaaactcca

SEQ ID NO: 2449762 - DNA, 25 bp, Homo sapien
tcacgtcaaaaatctatgggctggt

SEQ ID NO: 2449763 - DNA, 25 bp, Homo sapien
atgttctcgagccaagcctggtttc

SEQ ID NO: 2449764 - DNA, 25 bp, Homo sapien
aaaaaaggtgtcatcatctctggta

SEQ ID NO: 2449765 - DNA, 25 bp, Homo sapien
tctgaataataacatgttctcgagc

SEQ ID NO: 2449766 - DNA, 25 bp, Homo sapien
tctcgtctatgaggtcaagagcagc

SEQ ID NO: 2449767 - DNA, 25 bp, Homo sapien
cagttattggacttgtccacacttt

SEQ ID NO: 2449768 - DNA, 25 bp, Homo sapien
tgttctcgtctatgaggtcaagagc

SEQ ID NO: 2449769 - DNA, 25 bp, Homo sapien
cacatgttctcgtctatgaggtcaa

SEQ ID NO: 2449770 - DNA, 25 bp, Homo sapien
gtggtacccagtgaaaggtggtgtc

SEQ ID NO: 2449771 - DNA, 25 bp, Homo sapien
tggtacccagtgaaaggtggtgtct

SEQ ID NO: 2449772 - DNA, 25 bp, Homo sapien
agtagcaaagtggtaagtagagaaa

SEQ ID NO: 2449773 - DNA, 25 bp, Homo sapien
tagagtagcaaagtggtaagtagag

SEQ ID NO: 2449774 - DNA, 25 bp, Homo sapien
tcaggtagagtagcaaagtggtaag

SEQ ID NO: 2449775 - DNA, 25 bp, Homo sapien
caggtagagtagcaaagtggtaagt

SEQ ID NO: 2449776 - DNA, 25 bp, Homo sapien
gagtgcaataaatcagcctttccct

SEQ ID NO: 2449777 - DNA, 25 bp, Homo sapien
caataaatcagcctttccctgagaa

SEQ ID NO: 2449778 - DNA, 25 bp, Homo sapien
cagtccttcgcttccacaaattatg

SEQ ID NO: 2449779 - DNA, 25 bp, Homo sapien
catctggagtgcaataaatcagcct

SEQ ID NO: 2449780 - DNA, 25 bp, Homo sapien
ttaacaccaagatgatagtcctgtc

SEQ ID NO: 2449781 - DNA, 25 bp, Homo sapien
caaaacttcacaagggataagccca

SEQ ID NO: 2449782 - DNA, 25 bp, Homo sapien
tggctgacatcgactaaaacaaaac

SEQ ID NO: 2449783 - DNA, 25 bp, Homo sapien
tagtcctgtcttcaggtagtatgaa

SEQ ID NO: 2449784 - DNA, 25 bp, Homo sapien
gaatggccgcatacacaagtggtaa

SEQ ID NO: 2449785 - DNA, 25 bp, Homo sapien
caagtggtaagaaggaacatgtcat

SEQ ID NO: 2449786 - DNA, 25 bp, Homo sapien
caaggaacaccgtatcatgacagat

SEQ ID NO: 2449787 - DNA, 25 bp, Homo sapien
tatcgcttgtagcttaatgtcagga

SEQ ID NO: 2449788 - DNA, 25 bp, Homo sapien
tcctctatcccccaggtaacctgta

SEQ ID NO: 2449789 - DNA, 25 bp, Homo sapien
ccagtgatcttttttccgtcgttca

SEQ ID NO: 2449790 - DNA, 25 bp, Homo sapien
gagaccagtgatcttttttccgtcg

SEQ ID NO: 2449791 - DNA, 25 bp, Homo sapien
ccagagaccagtgatcttttttccg

SEQ ID NO: 2449792 - DNA, 25 bp, Homo sapien
ctctgaggccagggattccccctca

SEQ ID NO: 2449793 - DNA, 25 bp, Homo sapien
tctctgaggccagggattccccctc

SEQ ID NO: 2449794 - DNA, 25 bp, Homo sapien
gtctctgaggccagggattccccct

SEQ ID NO: 2449795 - DNA, 25 bp, Homo sapien
tctgaggccagggattccccctcat

SEQ ID NO: 2449796 - DNA, 25 bp, Homo sapien
tctgcacaagcattgaagcagcagt

SEQ ID NO: 2449797 - DNA, 25 bp, Homo sapien
cttcttctgcacaagcattgaagca

SEQ ID NO: 2449798 - DNA, 25 bp, Homo sapien
tcttctgcacaagcattgaagcagc

SEQ ID NO: 2449799 - DNA, 25 bp, Homo sapien
ttctgcacaagcattgaagcagcag

SEQ ID NO: 2449800 - DNA, 25 bp, Homo sapien
ccagctcgcaaaaactccatttcaa

SEQ ID NO: 2449801 - DNA, 25 bp, Homo sapien
caaaaagtggattatcatggtggcc

SEQ ID NO: 2449802 - DNA, 25 bp, Homo sapien
caaagtagaagctcctagacatggt

SEQ ID NO: 2449803 - DNA, 25 bp, Homo sapien
gccttcccagctcgcaaaaactcca

SEQ ID NO: 2449804 - DNA, 25 bp, Homo sapien
aaaaaaggtgtcatcatctctggta

SEQ ID NO: 2449805 - DNA, 25 bp, Homo sapien
tctgaataataacatgttctcgagc

SEQ ID NO: 2449806 - DNA, 25 bp, Homo sapien
atgttctcgagccaagcctggtttc

SEQ ID NO: 2449807 - DNA, 25 bp, Homo sapien
aatctatgggctggtttactctgaa

SEQ ID NO: 2449808 - DNA, 25 bp, Homo sapien
cagttattggacttgtccacacttt

SEQ ID NO: 2449809 - DNA, 25 bp, Homo sapien
tgttctcgtctatgaggtcaagagc

SEQ ID NO: 2449810 - DNA, 25 bp, Homo sapien
tctcgtctatgaggtcaagagcagc

SEQ ID NO: 2449811 - DNA, 25 bp, Homo sapien
cacatgttctcgtctatgaggtcaa

SEQ ID NO: 2449812 - DNA, 25 bp, Homo sapien
gtggtacccagtgaaaggtggtgtc

SEQ ID NO: 2449813 - DNA, 25 bp, Homo sapien
tggtacccagtgaaaggtggtgtct

SEQ ID NO: 2449814 - DNA, 25 bp, Homo sapien
tagagtagcaaagtggtaagtagag

SEQ ID NO: 2449815 - DNA, 25 bp, Homo sapien
tcaggtagagtagcaaagtggtaag

SEQ ID NO: 2449816 - DNA, 25 bp, Homo sapien
caggtagagtagcaaagtggtaagt

SEQ ID NO: 2449817 - DNA, 25 bp, Homo sapien
agtagcaaagtggtaagtagagaaa

SEQ ID NO: 2449818 - DNA, 25 bp, Homo sapien
caataaatcagcctttccctgagaa

SEQ ID NO: 2449819 - DNA, 25 bp, Homo sapien
cagtccttcgcttccacaaattatg

SEQ ID NO: 2449820 - DNA, 25 bp, Homo sapien
gagtgcaataaatcagcctttccct

SEQ ID NO: 2449821 - DNA, 25 bp, Homo sapien
catctggagtgcaataaatcagcct

SEQ ID NO: 2449822 - DNA, 25 bp, Homo sapien
caaaacttcacaagggataagccca

SEQ ID NO: 2449823 - DNA, 25 bp, Homo sapien
ttaacaccaagatgatagtcctgtc

SEQ ID NO: 2449824 - DNA, 25 bp, Homo sapien
tggctgacatcgactaaaacaaaac

SEQ ID NO: 2449825 - DNA, 25 bp, Homo sapien
tagtcctgtcttcaggtagtatgaa

SEQ ID NO: 2449826 - DNA, 25 bp, Homo sapien
gaatggccgcatacacaagtggtaa

SEQ ID NO: 2449827 - DNA, 25 bp, Homo sapien
caagtggtaagaaggaacatgtcat

SEQ ID NO: 2449828 - DNA, 25 bp, Homo sapien
caaggaacaccgtatcatgacagat

SEQ ID NO: 2449829 - DNA, 25 bp, Homo sapien
tatcgcttgtagcttaatgtcagga

SEQ ID NO: 2449830 - DNA, 25 bp, Homo sapien
cctcctcagaaaacgcaatgccctt

SEQ ID NO: 2449831 - DNA, 25 bp, Homo sapien
cctcagaaaacgcaatgcccttttc

SEQ ID NO: 2449832 - DNA, 25 bp, Homo sapien
gaaaacgcaatgcccttttctgcag

SEQ ID NO: 2449833 - DNA, 25 bp, Homo sapien
caagccctcctcagaaaacgcaatg

SEQ ID NO: 2449834 - DNA, 25 bp, Homo sapien
ccttgagtggtctcttgggattgtt

SEQ ID NO: 2449835 - DNA, 25 bp, Homo sapien
cttgggattgttgaggcccatttta

SEQ ID NO: 2449836 - DNA, 25 bp, Homo sapien
tcttgggattgttgaggcccatttt

SEQ ID NO: 2449837 - DNA, 25 bp, Homo sapien
tgtccttgagtggtctcttgggatt

SEQ ID NO: 2449838 - DNA, 25 bp, Homo sapien
aaagtagaaagccaagcccagtggc

SEQ ID NO: 2449839 - DNA, 25 bp, Homo sapien
ctggcagtcagtgccattcaaattg

SEQ ID NO: 2449840 - DNA, 25 bp, Homo sapien
ccattcaaattgtcttgtctccagg

SEQ ID NO: 2449841 - DNA, 25 bp, Homo sapien
gtcagtgccattcaaattgtcttgt

SEQ ID NO: 2449842 - DNA, 25 bp, Homo sapien
tccccgtagtctcagagaagtataa

SEQ ID NO: 2449843 - DNA, 25 bp, Homo sapien
ctcaagacctctgttcaaggaaagt

SEQ ID NO: 2449844 - DNA, 25 bp, Homo sapien
agaacacatgctccccgtagtctca

SEQ ID NO: 2449845 - DNA, 25 bp, Homo sapien
ctggcctcaagacctctgttcaagg

SEQ ID NO: 2449846 - DNA, 25 bp, Homo sapien
agaacatcgccatgccaaggaagca

SEQ ID NO: 2449847 - DNA, 25 bp, Homo sapien
gaacatcgccatgccaaggaagcag

SEQ ID NO: 2449848 - DNA, 25 bp, Homo sapien
aagaacatcgccatgccaaggaagc

SEQ ID NO: 2449849 - DNA, 25 bp, Homo sapien
caaatttagtgagggaatcagagcc

SEQ ID NO: 2449850 - DNA, 25 bp, Homo sapien
gatgcagacctaccatgacatgatg

SEQ ID NO: 2449851 - DNA, 25 bp, Homo sapien
taagaagttattgccctggagggtg

SEQ ID NO: 2449852 - DNA, 25 bp, Homo sapien
gagtacttgaacatatgcccaggcc

SEQ ID NO: 2449853 - DNA, 25 bp, Homo sapien
ccccccacagtccggaagtgcctgg

SEQ ID NO: 2449854 - DNA, 25 bp, Homo sapien
ccacagtccggaagtgcctggggcc

SEQ ID NO: 2449855 - DNA, 25 bp, Homo sapien
cacagtccggaagtgcctggggcct

SEQ ID NO: 2449856 - DNA, 25 bp, Homo sapien
ccccacagtccggaagtgcctgggg

SEQ ID NO: 2449857 - DNA, 25 bp, Homo sapien
catggtaaacatggtgaaaccccgt

SEQ ID NO: 2449858 - DNA, 25 bp, Homo sapien
tcagcatggtaaacatggtgaaacc

SEQ ID NO: 2449859 - DNA, 25 bp, Homo sapien
cagcatggtaaacatggtgaaaccc

SEQ ID NO: 2449860 - DNA, 25 bp, Homo sapien
agcatggtaaacatggtgaaacccc

SEQ ID NO: 2449861 - DNA, 25 bp, Homo sapien
aatccaggcggtcatctcacgaagt

SEQ ID NO: 2449862 - DNA, 25 bp, Homo sapien
tgcaggctcagtgcatcagctccgt

SEQ ID NO: 2449863 - DNA, 25 bp, Homo sapien
ggtgggttaatccaggcggtcatct

SEQ ID NO: 2449864 - DNA, 25 bp, Homo sapien
tcacgaagtggaagtgagatacagc

SEQ ID NO: 2449865 - DNA, 25 bp, Homo sapien
catgaacgtggccacagatgtcccc

SEQ ID NO: 2449866 - DNA, 25 bp, Homo sapien
tgagaaggaagctctgtccgaggca

SEQ ID NO: 2449867 - DNA, 25 bp, Homo sapien
gaacgtggccacagatgtccccaag

SEQ ID NO: 2449868 - DNA, 25 bp, Homo sapien
cacggcctctctcgagtgtcctgag

SEQ ID NO: 2449869 - DNA, 25 bp, Homo sapien
tttatcctcatggtggacccgaccc

SEQ ID NO: 2449870 - DNA, 25 bp, Homo sapien
aggttttatcctcatggtggacccg

SEQ ID NO: 2449871 - DNA, 25 bp, Homo sapien
ggttttatcctcatggtggacccga

SEQ ID NO: 2449872 - DNA, 25 bp, Homo sapien
cgaccccaggtgtcccaaagccgcg

SEQ ID NO: 2449873 - DNA, 25 bp, Homo sapien
cagaaacaagcccagatcatctgca

SEQ ID NO: 2449874 - DNA, 25 bp, Homo sapien
tgcaaaccacactttggtagctgtg

SEQ ID NO: 2449875 - DNA, 25 bp, Homo sapien
tgacaatgcgtggtcactgcctcac

SEQ ID NO: 2449876 - DNA, 25 bp, Homo sapien
gtcttttcctcacttggccgccaga

SEQ ID NO: 2449877 - DNA, 25 bp, Homo sapien
tgtgatttggtttaggctaacaaaa

SEQ ID NO: 2449878 - DNA, 25 bp, Homo sapien
taccattaaatttcccaagatgatg

SEQ ID NO: 2449879 - DNA, 25 bp, Homo sapien
caagatgatgggtgaagcataggcc

SEQ ID NO: 2449880 - DNA, 25 bp, Homo sapien
aactgcttctatgacctttggacag

SEQ ID NO: 2449881 - DNA, 25 bp, Homo sapien
tttgaacgatcatcgagttcatcac

SEQ ID NO: 2449882 - DNA, 25 bp, Homo sapien
tttctcatctttgaacgatcatcga

SEQ ID NO: 2449883 - DNA, 25 bp, Homo sapien
tcatctttgaacgatcatcgagttc

SEQ ID NO: 2449884 - DNA, 25 bp, Homo sapien
tctttgaacgatcatcgagttcatc

SEQ ID NO: 2449885 - DNA, 25 bp, Homo sapien
tacagatcaacataggaaagtactt

SEQ ID NO: 2449886 - DNA, 25 bp, Homo sapien
tcctactgtacttgttcggggtcta

SEQ ID NO: 2449887 - DNA, 25 bp, Homo sapien
acagatcaacataggaaagtacttt

SEQ ID NO: 2449888 - DNA, 25 bp, Homo sapien
ctgttagaagacagtatcatgagaa

SEQ ID NO: 2449889 - DNA, 25 bp, Homo sapien
tgttagaagacagtatcatgagaat

SEQ ID NO: 2449890 - DNA, 25 bp, Homo sapien
tagaagacagtatcatgagaatgtg

SEQ ID NO: 2449891 - DNA, 25 bp, Homo sapien
aagacagtatcatgagaatgtggat

SEQ ID NO: 2449892 - DNA, 25 bp, Homo sapien
ttgcttggatatcttcacaagcctg

SEQ ID NO: 2449893 - DNA, 25 bp, Homo sapien
tacgacttgatatcttgcagttcct

SEQ ID NO: 2449894 - DNA, 25 bp, Homo sapien
tccttctttgcttggatatcttcac

SEQ ID NO: 2449895 - DNA, 25 bp, Homo sapien
tcacaagcctgcattgtgttggcat

SEQ ID NO: 2449896 - DNA, 25 bp, Homo sapien
tggcatccatgtaagccagttagaa

SEQ ID NO: 2449897 - DNA, 25 bp, Homo sapien
tgtaagaagtgagttactcctttta

SEQ ID NO: 2449898 - DNA, 25 bp, Homo sapien
gcatccatgtaagccagttagaaga

SEQ ID NO: 2449899 - DNA, 25 bp, Homo sapien
gaagtgagttactccttttagagaa

SEQ ID NO: 2449900 - DNA, 25 bp, Homo sapien
catggttctgctgcttgtggtacaa

SEQ ID NO: 2449901 - DNA, 25 bp, Homo sapien
taaacaaaggtgtgctaagcagagc

SEQ ID NO: 2449902 - DNA, 25 bp, Homo sapien
ggtacaagcactgtccaagatataa

SEQ ID NO: 2449903 - DNA, 25 bp, Homo sapien
aattctggttgagcccaaggtttca

SEQ ID NO: 2449904 - DNA, 25 bp, Homo sapien
ctgctcgagaatgaggttgagtaac

SEQ ID NO: 2449905 - DNA, 25 bp, Homo sapien
cgagaatgaggttgagtaacattta

SEQ ID NO: 2449906 - DNA, 25 bp, Homo sapien
ctcgagaatgaggttgagtaacatt

SEQ ID NO: 2449907 - DNA, 25 bp, Homo sapien
tgctcgagaatgaggttgagtaaca

SEQ ID NO: 2449908 - DNA, 25 bp, Homo sapien
gagtaagtccatggtctgattgcag

SEQ ID NO: 2449909 - DNA, 25 bp, Homo sapien
cacttgggtccatggccaaactgca

SEQ ID NO: 2449910 - DNA, 25 bp, Homo sapien
tactaagttgattctgggtccagga

SEQ ID NO: 2449911 - DNA, 25 bp, Homo sapien
ggaccaaagtgcgaacatatcctct

SEQ ID NO: 2449912 - DNA, 25 bp, Homo sapien
ctgaatacctaagaggttgttgttc

SEQ ID NO: 2449913 - DNA, 25 bp, Homo sapien
atacctaagaggttgttgttcaggc

SEQ ID NO: 2449914 - DNA, 25 bp, Homo sapien
gaatacctaagaggttgttgttcag

SEQ ID NO: 2449915 - DNA, 25 bp, Homo sapien
ttctgaatacctaagaggttgttgt

SEQ ID NO: 2449916 - DNA, 25 bp, Homo sapien
catctagctgtgctaatgatccact

SEQ ID NO: 2449917 - DNA, 25 bp, Homo sapien
acatctagctgtgctaatgatccac

SEQ ID NO: 2449918 - DNA, 25 bp, Homo sapien
cacatctagctgtgctaatgatcca

SEQ ID NO: 2449919 - DNA, 25 bp, Homo sapien
atctagctgtgctaatgatccactg

SEQ ID NO: 2449920 - DNA, 25 bp, Homo sapien
cacccagaaagtgagttcattcagc

SEQ ID NO: 2449921 - DNA, 25 bp, Homo sapien
ccaaaattgggcacaagtgctgact

SEQ ID NO: 2449922 - DNA, 25 bp, Homo sapien
ggtgccgtttttgcacaattccagg

SEQ ID NO: 2449923 - DNA, 25 bp, Homo sapien
tcattcagcttgagccaaaattggg

SEQ ID NO: 2449924 - DNA, 25 bp, Homo sapien
gactgaatgggacatagaagcagag

SEQ ID NO: 2449925 - DNA, 25 bp, Homo sapien
gcttgtaccagggagcatagctaga

SEQ ID NO: 2449926 - DNA, 25 bp, Homo sapien
tagaagcagaggtagtcatgggccc

SEQ ID NO: 2449927 - DNA, 25 bp, Homo sapien
tcatgggcccttgcttgtaccaggg

SEQ ID NO: 2449928 - DNA, 25 bp, Homo sapien
aagagctgccaactatggaaccact

SEQ ID NO: 2449929 - DNA, 25 bp, Homo sapien
gaatccaagagctgccaactatgga

SEQ ID NO: 2449930 - DNA, 25 bp, Homo sapien
tccaagagctgccaactatggaacc

SEQ ID NO: 2449931 - DNA, 25 bp, Homo sapien
agaatccaagagctgccaactatgg

SEQ ID NO: 2449932 - DNA, 25 bp, Homo sapien
tatgtggcctagagagccagcattc

SEQ ID NO: 2449933 - DNA, 25 bp, Homo sapien
gatagcccaagagtgataagagcca

SEQ ID NO: 2449934 - DNA, 25 bp, Homo sapien
tcgtggaggagtagcaattccagaa

SEQ ID NO: 2449935 - DNA, 25 bp, Homo sapien
ctggtgtaacaatatgtggcctaga

SEQ ID NO: 2449936 - DNA, 25 bp, Homo sapien
acgctaataagaaaaataaccactg

SEQ ID NO: 2449937 - DNA, 25 bp, Homo sapien
cgctaataagaaaaataaccactga

SEQ ID NO: 2449938 - DNA, 25 bp, Homo sapien
gctaataagaaaaataaccactgac

SEQ ID NO: 2449939 - DNA, 25 bp, Homo sapien
catcacttgcgcctaacatttctgg

SEQ ID NO: 2449940 - DNA, 25 bp, Homo sapien
gctttcatcacttgcgcctaacatt

SEQ ID NO: 2449941 - DNA, 25 bp, Homo sapien
ggaagctttcatcacttgcgcctaa

SEQ ID NO: 2449942 - DNA, 25 bp, Homo sapien
ttgcgcctaacatttctggattgtc

SEQ ID NO: 2449943 - DNA, 25 bp, Homo sapien
aacacatggtgctcaagacttgggc

SEQ ID NO: 2449944 - DNA, 25 bp, Homo sapien
gatttgcaggttaggctgctgagcc

SEQ ID NO: 2449945 - DNA, 25 bp, Homo sapien
cctgctgagctacatgatggatttg

SEQ ID NO: 2449946 - DNA, 25 bp, Homo sapien
aatctgtgggagtggtccagtgcct

SEQ ID NO: 2449947 - DNA, 25 bp, Homo sapien
gccagagccatgtcttcgcagctgc

SEQ ID NO: 2449948 - DNA, 25 bp, Homo sapien
agagccatgtcttcgcagctgctaa

SEQ ID NO: 2449949 - DNA, 25 bp, Homo sapien
gggcgcctaggtcccaggagcaggg

SEQ ID NO: 2449950 - DNA, 25 bp, Homo sapien
ggtgggcgcctaggtcccaggagca

SEQ ID NO: 2449951 - DNA, 25 bp, Homo sapien
ggtaggcgtctcctgaggagcccct

SEQ ID NO: 2449952 - DNA, 25 bp, Homo sapien
tgccaattattgcaagagcggtagg

SEQ ID NO: 2449953 - DNA, 25 bp, Homo sapien
tgggcatctgccaattattgcaaga

SEQ ID NO: 2449954 - DNA, 25 bp, Homo sapien
ttgcaagagcggtaggcgtctcctg

SEQ ID NO: 2449955 - DNA, 25 bp, Homo sapien
aagcaccttttcattggcttctcta

SEQ ID NO: 2449956 - DNA, 25 bp, Homo sapien
caaaaggggaccatgttttgcaaat

SEQ ID NO: 2449957 - DNA, 25 bp, Homo sapien
gttttgcaaatacttctttaagcac

SEQ ID NO: 2449958 - DNA, 25 bp, Homo sapien
gaaaagcttgccatgacaatctgct

SEQ ID NO: 2449959 - DNA, 25 bp, Homo sapien
atctctggacttactggttcgacct

SEQ ID NO: 2449960 - DNA, 25 bp, Homo sapien
ccacaaaatctctggacttactggt

SEQ ID NO: 2449961 - DNA, 25 bp, Homo sapien
taatgaccacaaaatctctggactt

SEQ ID NO: 2449962 - DNA, 25 bp, Homo sapien
gacttactggttcgaccttttatca

SEQ ID NO: 2449963 - DNA, 25 bp, Homo sapien
caccacttggaaaagatggtttctt

SEQ ID NO: 2449964 - DNA, 25 bp, Homo sapien
tctttgcttgttctacttttatttc

SEQ ID NO: 2449965 - DNA, 25 bp, Homo sapien
ttggaaaagatggtttctttgcttg

SEQ ID NO: 2449966 - DNA, 25 bp, Homo sapien
ccacttggaaaagatggtttctttg

SEQ ID NO: 2449967 - DNA, 25 bp, Homo sapien
gggcagccacggtcttgttcctcca

SEQ ID NO: 2449968 - DNA, 25 bp, Homo sapien
tgtgagggcagccacggtcttgttc

SEQ ID NO: 2449969 - DNA, 25 bp, Homo sapien
agggcagccacggtcttgttcctcc

SEQ ID NO: 2449970 - DNA, 25 bp, Homo sapien
tgagggcagccacggtcttgttcct

SEQ ID NO: 2449971 - DNA, 25 bp, Homo sapien
tatggttccatctttatattttaga

SEQ ID NO: 2449972 - DNA, 25 bp, Homo sapien
ggaaattttgatatcttcaaactta

SEQ ID NO: 2449973 - DNA, 25 bp, Homo sapien
ataaaattgggaaattttgatatct

SEQ ID NO: 2449974 - DNA, 25 bp, Homo sapien
tctttcagtcctatggttccatctt

SEQ ID NO: 2449975 - DNA, 25 bp, Homo sapien
gtgttgagatcaagagcgtatccac

SEQ ID NO: 2449976 - DNA, 25 bp, Homo sapien
ttggtgacatacggtcatttctcca

SEQ ID NO: 2449977 - DNA, 25 bp, Homo sapien
tggtgacatacggtcatttctccag

SEQ ID NO: 2449978 - DNA, 25 bp, Homo sapien
cttggtgacatacggtcatttctcc

SEQ ID NO: 2449979 - DNA, 25 bp, Homo sapien
ggtgacatacggtcatttctccagg

SEQ ID NO: 2449980 - DNA, 25 bp, Homo sapien
atgcatagtctctagacagtggagc

SEQ ID NO: 2449981 - DNA, 25 bp, Homo sapien
aaatgttcatcccaactagaatgac

SEQ ID NO: 2449982 - DNA, 25 bp, Homo sapien
tcctctagagaaatgttcatcccaa

SEQ ID NO: 2449983 - DNA, 25 bp, Homo sapien
ctatatcctctagagaaatgttcat

SEQ ID NO: 2449984 - DNA, 25 bp, Homo sapien
tgatctctaacatcacctcaccaca

SEQ ID NO: 2449985 - DNA, 25 bp, Homo sapien
tctctaacatcacctcaccacagcc

SEQ ID NO: 2449986 - DNA, 25 bp, Homo sapien
atctctaacatcacctcaccacagc

SEQ ID NO: 2449987 - DNA, 25 bp, Homo sapien
gatctctaacatcacctcaccacag

SEQ ID NO: 2449988 - DNA, 25 bp, Homo sapien
ccataagacaacagaggcactcctg

SEQ ID NO: 2449989 - DNA, 25 bp, Homo sapien
gacaacagaggcactcctgcagatg

SEQ ID NO: 2449990 - DNA, 25 bp, Homo sapien
ttccaccataagacaacagaggcac

SEQ ID NO: 2449991 - DNA, 25 bp, Homo sapien
caacagaggcactcctgcagatggt

SEQ ID NO: 2449992 - DNA, 25 bp, Homo sapien
tgaaaatccaagttggtaacttctc

SEQ ID NO: 2449993 - DNA, 25 bp, Homo sapien
caatagttgggtagtttgacttctt

SEQ ID NO: 2449994 - DNA, 25 bp, Homo sapien
gaaggaaaatttagaagctcagtat

SEQ ID NO: 2449995 - DNA, 25 bp, Homo sapien
cagggcaatagttgggtagtttgac

SEQ ID NO: 2449996 - DNA, 25 bp, Homo sapien
aagtcagggcaatagttgggtagtt

SEQ ID NO: 2449997 - DNA, 25 bp, Homo sapien
agctgagcaattcactctgccacag

SEQ ID NO: 2449998 - DNA, 25 bp, Homo sapien
ctagaaacccagcaccagctgagca

SEQ ID NO: 2449999 - DNA, 25 bp, Homo sapien
aacccagcaccagctgagcaattca

SEQ ID NO: 2450000 - DNA, 25 bp, Homo sapien
gcaccagctgagcaattcactctgc

SEQ ID NO: 2450001 - DNA, 25 bp, Homo sapien
ctttcccagcagcaggataatggga

SEQ ID NO: 2450002 - DNA, 25 bp, Homo sapien
tttcccagcagcaggataatgggaa

SEQ ID NO: 2450003 - DNA, 25 bp, Homo sapien
agcaggataatgggaagggaaagag

SEQ ID NO: 2450004 - DNA, 25 bp, Homo sapien
agcagcaggataatgggaagggaaa

SEQ ID NO: 2450005 - DNA, 25 bp, Homo sapien
acccagtgggtgtcttgccctgatg

SEQ ID NO: 2450006 - DNA, 25 bp, Homo sapien
cttcaggacagggataaaaatgcat

SEQ ID NO: 2450007 - DNA, 25 bp, Homo sapien
tgcagaaccacaggcttaacgactt

SEQ ID NO: 2450008 - DNA, 25 bp, Homo sapien
taagcttatggtcatgagtggtccc

SEQ ID NO: 2450009 - DNA, 25 bp, Homo sapien
tccgctggttggctgaccgtgacca

SEQ ID NO: 2450010 - DNA, 25 bp, Homo sapien
gaagaccccagcttcaggcaggaca

SEQ ID NO: 2450011 - DNA, 25 bp, Homo sapien
tgtttctagagtcatgcagcagaag

SEQ ID NO: 2450012 - DNA, 25 bp, Homo sapien
tctctactgtagtccagtgtttcta

SEQ ID NO: 2450013 - DNA, 25 bp, Homo sapien
ccagaggcagattgtgccgcacacc

SEQ ID NO: 2450014 - DNA, 25 bp, Homo sapien
gccgcacacccagatgtcggcaggt

SEQ ID NO: 2450015 - DNA, 25 bp, Homo sapien
ggcaggtttcagaaaccatgaggaa

SEQ ID NO: 2450016 - DNA, 25 bp, Homo sapien
tctggaggctccttgaccagaggca

SEQ ID NO: 2450017 - DNA, 25 bp, Homo sapien
agtagggcagcttgcttgagggtga

SEQ ID NO: 2450018 - DNA, 25 bp, Homo sapien
gtagggcagcttgcttgagggtgac

SEQ ID NO: 2450019 - DNA, 25 bp, Homo sapien
ccagccggccacagagtcgctggag

SEQ ID NO: 2450020 - DNA, 25 bp, Homo sapien
ttctaggccagagccatatctttgt

SEQ ID NO: 2450021 - DNA, 25 bp, Homo sapien
gaagctttgtcagaagtgtctgcct

SEQ ID NO: 2450022 - DNA, 25 bp, Homo sapien
atatctttgtaactgcccattcggg

SEQ ID NO: 2450023 - DNA, 25 bp, Homo sapien
aattatgccgaaacatagtcattcc

SEQ ID NO: 2450024 - DNA, 25 bp, Homo sapien
cagcagtaattatgccgaaacatag

SEQ ID NO: 2450025 - DNA, 25 bp, Homo sapien
atgacagcagtaattatgccgaaac

SEQ ID NO: 2450026 - DNA, 25 bp, Homo sapien
gaaacatagtcattcccgcagtttg

SEQ ID NO: 2450027 - DNA, 25 bp, Homo sapien
cactgctgttagaaaagcagtctca

SEQ ID NO: 2450028 - DNA, 25 bp, Homo sapien
agcagtctcatttacattgttgaaa

SEQ ID NO: 2450029 - DNA, 25 bp, Homo sapien
agttcaattagagccatcactgctg

SEQ ID NO: 2450030 - DNA, 25 bp, Homo sapien
tttgtaaagatttatgaagttcaat

SEQ ID NO: 2450031 - DNA, 25 bp, Homo sapien
ttcatgtctgggcatcccattaacc

SEQ ID NO: 2450032 - DNA, 25 bp, Homo sapien
tcatgtctgggcatcccattaaccc

SEQ ID NO: 2450033 - DNA, 25 bp, Homo sapien
agcaagacggtaagttcaattgcca

SEQ ID NO: 2450034 - DNA, 25 bp, Homo sapien
aagcaggaaagcaagacggtaagtt

SEQ ID NO: 2450035 - DNA, 25 bp, Homo sapien
tgaggctgacgagtctgggagttgt

SEQ ID NO: 2450036 - DNA, 25 bp, Homo sapien
ctggcagcctgtccttataagcaac

SEQ ID NO: 2450037 - DNA, 25 bp, Homo sapien
cccgcaggacgtcactgaagagcat

SEQ ID NO: 2450038 - DNA, 25 bp, Homo sapien
ttgtgagaagatgacccgcaggacg

SEQ ID NO: 2450039 - DNA, 25 bp, Homo sapien
caggagctggcaatcaacagcgagt

SEQ ID NO: 2450040 - DNA, 25 bp, Homo sapien
agcatgctctctgccggtggcatca

SEQ ID NO: 2450041 - DNA, 25 bp, Homo sapien
taacaagtacatgcacagaggaagc

SEQ ID NO: 2450042 - DNA, 25 bp, Homo sapien
taggacagttccagaagttagcggg

SEQ ID NO: 2450043 - DNA, 25 bp, Homo sapien
gcccaagggaccagtttgattgtaa

SEQ ID NO: 2450044 - DNA, 25 bp, Homo sapien
aaggcccaagggaccagtttgattg

SEQ ID NO: 2450045 - DNA, 25 bp, Homo sapien
ggcccaagggaccagtttgattgta

SEQ ID NO: 2450046 - DNA, 25 bp, Homo sapien
aggcccaagggaccagtttgattgt

SEQ ID NO: 2450047 - DNA, 25 bp, Homo sapien
tagaatcctcttctctgggagaagc

SEQ ID NO: 2450048 - DNA, 25 bp, Homo sapien
aatcctcttctctgggagaagcttc

SEQ ID NO: 2450049 - DNA, 25 bp, Homo sapien
ctcttagaatcctcttctctgggag

SEQ ID NO: 2450050 - DNA, 25 bp, Homo sapien
tcttagaatcctcttctctgggaga

SEQ ID NO: 2450051 - DNA, 25 bp, Homo sapien
catcaacagtcaatattctgagaac

SEQ ID NO: 2450052 - DNA, 25 bp, Homo sapien
tggcttgttcatcaacagtcaatat

SEQ ID NO: 2450053 - DNA, 25 bp, Homo sapien
aaaatttgaagggtccttgctgcag

SEQ ID NO: 2450054 - DNA, 25 bp, Homo sapien
gcagccacactcacatcattggctt

SEQ ID NO: 2450055 - DNA, 25 bp, Homo sapien
cagaccatgattaggtttgcagtac

SEQ ID NO: 2450056 - DNA, 25 bp, Homo sapien
tcagaccatgattaggtttgcagta

SEQ ID NO: 2450057 - DNA, 25 bp, Homo sapien
aaattaccatgtagtggaatttggt

SEQ ID NO: 2450058 - DNA, 25 bp, Homo sapien
taccatgtagtggaatttggtatat

SEQ ID NO: 2450059 - DNA, 25 bp, Homo sapien
catgtagtggaatttggtatatggc

SEQ ID NO: 2450060 - DNA, 25 bp, Homo sapien
cagtataaattaccatgtagtggaa

SEQ ID NO: 2450061 - DNA, 25 bp, Homo sapien
tgtagccttgcaattgcactactgt

SEQ ID NO: 2450062 - DNA, 25 bp, Homo sapien
gagtcttgtagccttgcaattgcac

SEQ ID NO: 2450063 - DNA, 25 bp, Homo sapien
ctactgagtcttgtagccttgcaat

SEQ ID NO: 2450064 - DNA, 25 bp, Homo sapien
agccttgcaattgcactactgtctg

SEQ ID NO: 2450065 - DNA, 25 bp, Homo sapien
agattattttgagcaactttatgac

SEQ ID NO: 2450066 - DNA, 25 bp, Homo sapien
actataggtgtaaacaaatagtatt

SEQ ID NO: 2450067 - DNA, 25 bp, Homo sapien
tattttgagcaactttatgacaata

SEQ ID NO: 2450068 - DNA, 25 bp, Homo sapien
tgatctagagaaaaactataggtgt

SEQ ID NO: 2450069 - DNA, 25 bp, Homo sapien
gcaacatgtacaacaaatgagctgc

SEQ ID NO: 2450070 - DNA, 25 bp, Homo sapien
agcaacatgtacaacaaatgagctg

SEQ ID NO: 2450071 - DNA, 25 bp, Homo sapien
aacatgtacaacaaatgagctgcat

SEQ ID NO: 2450072 - DNA, 25 bp, Homo sapien
caacatgtacaacaaatgagctgca

SEQ ID NO: 2450073 - DNA, 25 bp, Homo sapien
caaacaaaaacagatcagaggcagt

SEQ ID NO: 2450074 - DNA, 25 bp, Homo sapien
tccaccttgactgcagtgttctagg

SEQ ID NO: 2450075 - DNA, 25 bp, Homo sapien
tctcaaaggcatcttacatgctagt

SEQ ID NO: 2450076 - DNA, 25 bp, Homo sapien
ttttggcaacaatagggagagggaa

SEQ ID NO: 2450077 - DNA, 25 bp, Homo sapien
aatgcacagtagttcaggatcaccc

SEQ ID NO: 2450078 - DNA, 25 bp, Homo sapien
tccatgaggttgaacaatgcacagt

SEQ ID NO: 2450079 - DNA, 25 bp, Homo sapien
gagcatgagagtcagtggagattcc

SEQ ID NO: 2450080 - DNA, 25 bp, Homo sapien
tttgccaagcactataaagggagag

SEQ ID NO: 2450081 - DNA, 25 bp, Homo sapien
aagcctgaaatggttctcctagcat

SEQ ID NO: 2450082 - DNA, 25 bp, Homo sapien
agaaagcctgaaatggttctcctag

SEQ ID NO: 2450083 - DNA, 25 bp, Homo sapien
aaagcctgaaatggttctcctagca

SEQ ID NO: 2450084 - DNA, 25 bp, Homo sapien
gaaagcctgaaatggttctcctagc

SEQ ID NO: 2450085 - DNA, 25 bp, Homo sapien
gcattgtgccaattcccctgattct

SEQ ID NO: 2450086 - DNA, 25 bp, Homo sapien
ttgttatcagcaacagtttgttggg

SEQ ID NO: 2450087 - DNA, 25 bp, Homo sapien
gcacttctctgataactcagcattg

SEQ ID NO: 2450088 - DNA, 25 bp, Homo sapien
aacatcatgtgtttagagggataaa

SEQ ID NO: 2450089 - DNA, 25 bp, Homo sapien
cttatgtaggggccatgccaatctc

SEQ ID NO: 2450090 - DNA, 25 bp, Homo sapien
gtatatgtactgccgaagttagcat

SEQ ID NO: 2450091 - DNA, 25 bp, Homo sapien
catccttatgtaggggccatgccaa

SEQ ID NO: 2450092 - DNA, 25 bp, Homo sapien
ttgcttgtcatccttatgtaggggc

SEQ ID NO: 2450093 - DNA, 25 bp, Homo sapien
ttctctcgtgtcttctaccatgtag

SEQ ID NO: 2450094 - DNA, 25 bp, Homo sapien
gaaaattgtaactgtatactgtact

SEQ ID NO: 2450095 - DNA, 25 bp, Homo sapien
gtactgcttagggttatataactgc

SEQ ID NO: 2450096 - DNA, 25 bp, Homo sapien
ggcatctgactcattggacagaaaa

SEQ ID NO: 2450097 - DNA, 25 bp, Homo sapien
gacagggggcgtttctcattttcat

SEQ ID NO: 2450098 - DNA, 25 bp, Homo sapien
gagacagggggcgtttctcattttc

SEQ ID NO: 2450099 - DNA, 25 bp, Homo sapien
caaaggagacagggggcgtttctca

SEQ ID NO: 2450100 - DNA, 25 bp, Homo sapien
aggagacagggggcgtttctcattt

SEQ ID NO: 2450101 - DNA, 25 bp, Homo sapien
tgctttggttactgattccagagct

SEQ ID NO: 2450102 - DNA, 25 bp, Homo sapien
ttactctgaacttgagtgtatccct

SEQ ID NO: 2450103 - DNA, 25 bp, Homo sapien
ttggttactgattccagagcttttc

SEQ ID NO: 2450104 - DNA, 25 bp, Homo sapien
ctctgaacttgagtgtatccctttg

SEQ ID NO: 2450105 - DNA, 25 bp, Homo sapien
ctagtggagagatttatagaatggt

SEQ ID NO: 2450106 - DNA, 25 bp, Homo sapien
agtggagagatttatagaatggttt

SEQ ID NO: 2450107 - DNA, 25 bp, Homo sapien
atttatagaatggttttgatatgac

SEQ ID NO: 2450108 - DNA, 25 bp, Homo sapien
agatttatagaatggttttgatatg

SEQ ID NO: 2450109 - DNA, 25 bp, Homo sapien
tttccagcccagggctgctgttacc

SEQ ID NO: 2450110 - DNA, 25 bp, Homo sapien
ctggagtttccagcccagggctgct

SEQ ID NO: 2450111 - DNA, 25 bp, Homo sapien
ggagtttccagcccagggctgctgt

SEQ ID NO: 2450112 - DNA, 25 bp, Homo sapien
agtttccagcccagggctgctgtta

SEQ ID NO: 2450113 - DNA, 25 bp, Homo sapien
tcttcttagtgctggcaatggtcat

SEQ ID NO: 2450114 - DNA, 25 bp, Homo sapien
tcttagtgctggcaatggtcatttt

SEQ ID NO: 2450115 - DNA, 25 bp, Homo sapien
ttagtgctggcaatggtcatttttg

SEQ ID NO: 2450116 - DNA, 25 bp, Homo sapien
cttcttagtgctggcaatggtcatt

SEQ ID NO: 2450117 - DNA, 25 bp, Homo sapien
ctgggcactgtgttggacctggcca

SEQ ID NO: 2450118 - DNA, 25 bp, Homo sapien
tgggcactgtgttggacctggccat

SEQ ID NO: 2450119 - DNA, 25 bp, Homo sapien
cctgtgtgtggaggcgtccggaaca

SEQ ID NO: 2450120 - DNA, 25 bp, Homo sapien
gttcctgggcctgtgcgctctgggt

SEQ ID NO: 2450121 - DNA, 25 bp, Homo sapien
cctgtgcgctctgggtctgtgcctt

SEQ ID NO: 2450122 - DNA, 25 bp, Homo sapien
agggccctgtgtgtggaggcgtccg

SEQ ID NO: 2450123 - DNA, 25 bp, Homo sapien
ccagctcgtagacttccataatcgt

SEQ ID NO: 2450124 - DNA, 25 bp, Homo sapien
cactccagctcgtagacttccataa

SEQ ID NO: 2450125 - DNA, 25 bp, Homo sapien
agctcgtagacttccataatcgtcg

SEQ ID NO: 2450126 - DNA, 25 bp, Homo sapien
gtatttctcagctcgccttctgggg

SEQ ID NO: 2450127 - DNA, 25 bp, Homo sapien
catcatgatacgtcgacagaaggta

SEQ ID NO: 2450128 - DNA, 25 bp, Homo sapien
tattggcatcatgatacgtcgacag

SEQ ID NO: 2450129 - DNA, 25 bp, Homo sapien
tctcttattggcatcatgatacgtc

SEQ ID NO: 2450130 - DNA, 25 bp, Homo sapien
tgatacgtcgacagaaggtagttca

SEQ ID NO: 2450131 - DNA, 25 bp, Homo sapien
ctggttggacagtggcacaggccaa

SEQ ID NO: 2450132 - DNA, 25 bp, Homo sapien
ggcacaggccaaatgtagggcagtc

SEQ ID NO: 2450133 - DNA, 25 bp, Homo sapien
gtggcacaggccaaatgtagggcag

SEQ ID NO: 2450134 - DNA, 25 bp, Homo sapien
ttctggttggacagtggcacaggcc

SEQ ID NO: 2450135 - DNA, 25 bp, Homo sapien
tcacatcttgtggacacaagcagaa

SEQ ID NO: 2450136 - DNA, 25 bp, Homo sapien
ctcacatcttgtggacacaagcaga

SEQ ID NO: 2450137 - DNA, 25 bp, Homo sapien
cacatcttgtggacacaagcagaaa

SEQ ID NO: 2450138 - DNA, 25 bp, Homo sapien
acatcttgtggacacaagcagaaat

SEQ ID NO: 2450139 - DNA, 25 bp, Homo sapien
ttcttcaatatttgtaccatgtaaa

SEQ ID NO: 2450140 - DNA, 25 bp, Homo sapien
tggcagcagaatagttgcaaaagcc

SEQ ID NO: 2450141 - DNA, 25 bp, Homo sapien
ccatttggcagcagaatagttgcaa

SEQ ID NO: 2450142 - DNA, 25 bp, Homo sapien
gatcggcgccatttggcagcagaat

SEQ ID NO: 2450143 - DNA, 25 bp, Homo sapien
gataataacattggttgacccatac

SEQ ID NO: 2450144 - DNA, 25 bp, Homo sapien
gtttgataataacattggttgaccc

SEQ ID NO: 2450145 - DNA, 25 bp, Homo sapien
cacatagtttgataataacattggt

SEQ ID NO: 2450146 - DNA, 25 bp, Homo sapien
tagtttgataataacattggttgac

SEQ ID NO: 2450147 - DNA, 25 bp, Homo sapien
aatctttgcttctgtcacagcattt

SEQ ID NO: 2450148 - DNA, 25 bp, Homo sapien
aacacttcccagttccaagaatctt

SEQ ID NO: 2450149 - DNA, 25 bp, Homo sapien
tttgcttctgtcacagcatttacca

SEQ ID NO: 2450150 - DNA, 25 bp, Homo sapien
ttcaaacacttcccagttccaagaa

SEQ ID NO: 2450151 - DNA, 25 bp, Homo sapien
ccaccattatcagttttcttagacg

SEQ ID NO: 2450152 - DNA, 25 bp, Homo sapien
ccattatcagttttcttagacgcac

SEQ ID NO: 2450153 - DNA, 25 bp, Homo sapien
attatcagttttcttagacgcacag

SEQ ID NO: 2450154 - DNA, 25 bp, Homo sapien
caccattatcagttttcttagacgc

SEQ ID NO: 2450155 - DNA, 25 bp, Homo sapien
gcagtctgtccatacacatcttgag

SEQ ID NO: 2450156 - DNA, 25 bp, Homo sapien
ccagccccaatggcataatcttctg

SEQ ID NO: 2450157 - DNA, 25 bp, Homo sapien
aatcttctgcagtctgtccatacac

SEQ ID NO: 2450158 - DNA, 25 bp, Homo sapien
ttcccagccccaatggcataatctt

SEQ ID NO: 2450159 - DNA, 25 bp, Homo sapien
cttcaaggctgcttgtttctgagaa

SEQ ID NO: 2450160 - DNA, 25 bp, Homo sapien
caaggctgcttgtttctgagaagac

SEQ ID NO: 2450161 - DNA, 25 bp, Homo sapien
tcaaggctgcttgtttctgagaaga

SEQ ID NO: 2450162 - DNA, 25 bp, Homo sapien
aaggctgcttgtttctgagaagaca

SEQ ID NO: 2450163 - DNA, 25 bp, Homo sapien
gctataggagatactggtatattct

SEQ ID NO: 2450164 - DNA, 25 bp, Homo sapien
gaaatgctataggagatactggtat

SEQ ID NO: 2450165 - DNA, 25 bp, Homo sapien
ctctgaaatgctataggagatactg

SEQ ID NO: 2450166 - DNA, 25 bp, Homo sapien
tgctataggagatactggtatattc

SEQ ID NO: 2450167 - DNA, 25 bp, Homo sapien
atactccaacattttgatcctcctc

SEQ ID NO: 2450168 - DNA, 25 bp, Homo sapien
ttgatcctcctcacaagatccttct

SEQ ID NO: 2450169 - DNA, 25 bp, Homo sapien
cttttctgtttaagagcatactcca

SEQ ID NO: 2450170 - DNA, 25 bp, Homo sapien
tgtttaagagcatactccaacattt

SEQ ID NO: 2450171 - DNA, 25 bp, Homo sapien
ctaggtctttatctcgtattgagaa

SEQ ID NO: 2450172 - DNA, 25 bp, Homo sapien
tctaggtctttatctcgtattgaga

SEQ ID NO: 2450173 - DNA, 25 bp, Homo sapien
taggtctttatctcgtattgagaat

SEQ ID NO: 2450174 - DNA, 25 bp, Homo sapien
ctctaggtctttatctcgtattgag

SEQ ID NO: 2450175 - DNA, 25 bp, Homo sapien
ttcagagccattgccagtcagaaga

SEQ ID NO: 2450176 - DNA, 25 bp, Homo sapien
gtcagaagagcctggtctgtgttca

SEQ ID NO: 2450177 - DNA, 25 bp, Homo sapien
gaagagcctggtctgtgttcagctg

SEQ ID NO: 2450178 - DNA, 25 bp, Homo sapien
tatagaccagactgctttcagagcc

SEQ ID NO: 2450179 - DNA, 25 bp, Homo sapien
taagtccttctgtcacttctttact

SEQ ID NO: 2450180 - DNA, 25 bp, Homo sapien
aaagtaactgcaggtctgagtcaag

SEQ ID NO: 2450181 - DNA, 25 bp, Homo sapien
gtaaagtaactgcaggtctgagtca

SEQ ID NO: 2450182 - DNA, 25 bp, Homo sapien
ttttgtgtggaggtagtcagccctc

SEQ ID NO: 2450183 - DNA, 25 bp, Homo sapien
ctcttattccactaaatgtgctgcc

SEQ ID NO: 2450184 - DNA, 25 bp, Homo sapien
tcatacttgcctgtgggttcacacc

SEQ ID NO: 2450185 - DNA, 25 bp, Homo sapien
attcatacttgcctgtgggttcaca

SEQ ID NO: 2450186 - DNA, 25 bp, Homo sapien
atacttgcctgtgggttcacacctg

SEQ ID NO: 2450187 - DNA, 25 bp, Homo sapien
ttgcctgtgggttcacacctgataa

SEQ ID NO: 2450188 - DNA, 25 bp, Homo sapien
cgctcagtgatgactcccaccaggt

SEQ ID NO: 2450189 - DNA, 25 bp, Homo sapien
gggccgcgctcagtgatgactccca

SEQ ID NO: 2450190 - DNA, 25 bp, Homo sapien
tcccaccaggtcattcggatcggga

SEQ ID NO: 2450191 - DNA, 25 bp, Homo sapien
gtgatgactcccaccaggtcattcg

SEQ ID NO: 2450192 - DNA, 25 bp, Homo sapien
acaggtgcctcctttgttgctcctt

SEQ ID NO: 2450193 - DNA, 25 bp, Homo sapien
ttcacaggtgcctcctttgttgctc

SEQ ID NO: 2450194 - DNA, 25 bp, Homo sapien
tctttcacaggtgcctcctttgttg

SEQ ID NO: 2450195 - DNA, 25 bp, Homo sapien
ttctttcacaggtgcctcctttgtt

SEQ ID NO: 2450196 - DNA, 25 bp, Homo sapien
cccttgatccacactactagtagag

SEQ ID NO: 2450197 - DNA, 25 bp, Homo sapien
ggaatacttccagggctattatgtc

SEQ ID NO: 2450198 - DNA, 25 bp, Homo sapien
tagcagaagacatcaagcaagggct

SEQ ID NO: 2450199 - DNA, 25 bp, Homo sapien
tatgggctcaggcatagtggcagcc

SEQ ID NO: 2450200 - DNA, 25 bp, Homo sapien
tcattcacttccaatcacctcctca

SEQ ID NO: 2450201 - DNA, 25 bp, Homo sapien
cattcacttccaatcacctcctcac

SEQ ID NO: 2450202 - DNA, 25 bp, Homo sapien
tgcctccatcagtgatgactgccat

SEQ ID NO: 2450203 - DNA, 25 bp, Homo sapien
tcagtgatgactgccattggctcat

SEQ ID NO: 2450204 - DNA, 25 bp, Homo sapien
gactgccattggctcatttggatgg

SEQ ID NO: 2450205 - DNA, 25 bp, Homo sapien
tccttgatgcctccatcagtgatga

SEQ ID NO: 2450206 - DNA, 25 bp, Homo sapien
caggtgtctcctcggttgtgccttt

SEQ ID NO: 2450207 - DNA, 25 bp, Homo sapien
tcggttgtgcctttaaattcatttg

SEQ ID NO: 2450208 - DNA, 25 bp, Homo sapien
tttcgcaggtgtctcctcggttgtg

SEQ ID NO: 2450209 - DNA, 25 bp, Homo sapien
tctcctcggttgtgcctttaaattc

SEQ ID NO: 2450210 - DNA, 25 bp, Homo sapien
gacaccagggctgctcctttaaatt

SEQ ID NO: 2450211 - DNA, 25 bp, Homo sapien
cttttactgataggtgacaccaggg

SEQ ID NO: 2450212 - DNA, 25 bp, Homo sapien
tcctttaaattcacctgtgtgtggg

SEQ ID NO: 2450213 - DNA, 25 bp, Homo sapien
ttttactgataggtgacaccagggc

SEQ ID NO: 2450214 - DNA, 25 bp, Homo sapien
cttggagagttaaggctgatataga

SEQ ID NO: 2450215 - DNA, 25 bp, Homo sapien
ggatcaattgtccaaaagaggtgaa

SEQ ID NO: 2450216 - DNA, 25 bp, Homo sapien
agttgccattcccttactacaagaa

SEQ ID NO: 2450217 - DNA, 25 bp, Homo sapien
tacaagaacctctgatcccacacag

SEQ ID NO: 2450218 - DNA, 25 bp, Homo sapien
taagtcggcaaggaggggagtgaca

SEQ ID NO: 2450219 - DNA, 25 bp, Homo sapien
cagtaaggccaggaaaactccaaat

SEQ ID NO: 2450220 - DNA, 25 bp, Homo sapien
gggagtgacatccagtaaggccagg

SEQ ID NO: 2450221 - DNA, 25 bp, Homo sapien
ctgtcagtgaaaattaagtcggcaa

SEQ ID NO: 2450222 - DNA, 25 bp, Homo sapien
gaaatagaatgatactccaaaggaa

SEQ ID NO: 2450223 - DNA, 25 bp, Homo sapien
tagaatgatactccaaaggaatata

SEQ ID NO: 2450224 - DNA, 25 bp, Homo sapien
ctagagaaatagaatgatactccaa

SEQ ID NO: 2450225 - DNA, 25 bp, Homo sapien
agagaaatagaatgatactccaaag

SEQ ID NO: 2450226 - DNA, 25 bp, Homo sapien
caaatactcgaagaagaacatccat

SEQ ID NO: 2450227 - DNA, 25 bp, Homo sapien
tcgaagaagaacatccatgagaaaa

SEQ ID NO: 2450228 - DNA, 25 bp, Homo sapien
tctacaaatactcgaagaagaacat

SEQ ID NO: 2450229 - DNA, 25 bp, Homo sapien
gaacatccatgagaaaaaataaggc

SEQ ID NO: 2450230 - DNA, 25 bp, Homo sapien
ggaatattcctaagcaacttaatgt

SEQ ID NO: 2450231 - DNA, 25 bp, Homo sapien
gggaatattcctaagcaacttaatg

SEQ ID NO: 2450232 - DNA, 25 bp, Homo sapien
gaatattcctaagcaacttaatgtc

SEQ ID NO: 2450233 - DNA, 25 bp, Homo sapien
aatattcctaagcaacttaatgtca

SEQ ID NO: 2450234 - DNA, 25 bp, Homo sapien
tagaaagactgccttccaaaagatg

SEQ ID NO: 2450235 - DNA, 25 bp, Homo sapien
gaaagactgccttccaaaagatgga

SEQ ID NO: 2450236 - DNA, 25 bp, Homo sapien
tttctatagaaagactgccttccaa

SEQ ID NO: 2450237 - DNA, 25 bp, Homo sapien
tatagaaagactgccttccaaaaga

SEQ ID NO: 2450238 - DNA, 25 bp, Homo sapien
agaaaaattttcttgcctttctcag

SEQ ID NO: 2450239 - DNA, 25 bp, Homo sapien
tcttgcctttctcagaatcagccat

SEQ ID NO: 2450240 - DNA, 25 bp, Homo sapien
ttttcttgcctttctcagaatcagc

SEQ ID NO: 2450241 - DNA, 25 bp, Homo sapien
gaaaaattttcttgcctttctcaga

SEQ ID NO: 2450242 - DNA, 25 bp, Homo sapien
ttgcttcccttttccacagtgtggc

SEQ ID NO: 2450243 - DNA, 25 bp, Homo sapien
cttgtgcttgcttcccttttccaca

SEQ ID NO: 2450244 - DNA, 25 bp, Homo sapien
gtttaggcccagtcttgtgcttgct

SEQ ID NO: 2450245 - DNA, 25 bp, Homo sapien
tttaggcccagtcttgtgcttgctt

SEQ ID NO: 2450246 - DNA, 25 bp, Homo sapien
tccaatggactgacatgtcctccac

SEQ ID NO: 2450247 - DNA, 25 bp, Homo sapien
gataatccaatggactgacatgtcc

SEQ ID NO: 2450248 - DNA, 25 bp, Homo sapien
caatctctatgttaagataatccaa

SEQ ID NO: 2450249 - DNA, 25 bp, Homo sapien
taatccaatggactgacatgtcctc

SEQ ID NO: 2450250 - DNA, 25 bp, Homo sapien
agccctcacatttcacctcgtagtg

SEQ ID NO: 2450251 - DNA, 25 bp, Homo sapien
aagccctcacatttcacctcgtagt

SEQ ID NO: 2450252 - DNA, 25 bp, Homo sapien
caagccctcacatttcacctcgtag

SEQ ID NO: 2450253 - DNA, 25 bp, Homo sapien
ctgctttgcttattcgctgttgttc

SEQ ID NO: 2450254 - DNA, 25 bp, Homo sapien
tcaaaatgtaaccctgcaactttat

SEQ ID NO: 2450255 - DNA, 25 bp, Homo sapien
gcttattcgctgttgttcaaaatgt

SEQ ID NO: 2450256 - DNA, 25 bp, Homo sapien
tatgaaattgtaatgtctgctttgc

SEQ ID NO: 2450257 - DNA, 25 bp, Homo sapien
gatagcggcatggatgtttcttatc

SEQ ID NO: 2450258 - DNA, 25 bp, Homo sapien
gtagactcgatagcggcatggatgt

SEQ ID NO: 2450259 - DNA, 25 bp, Homo sapien
ttgtagactcgatagcggcatggat

SEQ ID NO: 2450260 - DNA, 25 bp, Homo sapien
actcgatagcggcatggatgtttct

SEQ ID NO: 2450261 - DNA, 25 bp, Homo sapien
ctattatagaagtgcttaggatcat

SEQ ID NO: 2450262 - DNA, 25 bp, Homo sapien
caaaaataaataataggtatgtcat

SEQ ID NO: 2450263 - DNA, 25 bp, Homo sapien
cataagctctttcaccaaaaataaa

SEQ ID NO: 2450264 - DNA, 25 bp, Homo sapien
tagaagtgcttaggatcataagctc

SEQ ID NO: 2450265 - DNA, 25 bp, Homo sapien
acattatgatcatcaatcatgattc

SEQ ID NO: 2450266 - DNA, 25 bp, Homo sapien
tatgatcatcaatcatgattctacc

SEQ ID NO: 2450267 - DNA, 25 bp, Homo sapien
tgtagagtggggacattatgatcat

SEQ ID NO: 2450268 - DNA, 25 bp, Homo sapien
gatcatcaatcatgattctaccaac

SEQ ID NO: 2450269 - DNA, 25 bp, Homo sapien
cagtgaattgctaccatgttttcaa

SEQ ID NO: 2450270 - DNA, 25 bp, Homo sapien
tcctttacagtgaattgctaccatg

SEQ ID NO: 2450271 - DNA, 25 bp, Homo sapien
ttacagtgaattgctaccatgtttt

SEQ ID NO: 2450272 - DNA, 25 bp, Homo sapien
gtgaattgctaccatgttttcaaga

SEQ ID NO: 2450273 - DNA, 25 bp, Homo sapien
tgagaaggagtttctactccctgaa

SEQ ID NO: 2450274 - DNA, 25 bp, Homo sapien
tactccctgaaatttttttgctgtg

SEQ ID NO: 2450275 - DNA, 25 bp, Homo sapien
tttctccaaaataataccagctttc

SEQ ID NO: 2450276 - DNA, 25 bp, Homo sapien
tgctgtgggttttatctctttgcct

SEQ ID NO: 2450277 - DNA, 25 bp, Homo sapien
tgcctgatcaccaaaggagaagagt

SEQ ID NO: 2450278 - DNA, 25 bp, Homo sapien
gctgctgcctgatcaccaaaggaga

SEQ ID NO: 2450279 - DNA, 25 bp, Homo sapien
ggaccaaggcctgttgcagggcacc

SEQ ID NO: 2450280 - DNA, 25 bp, Homo sapien
cctgttgcagggcacccaactgctg

SEQ ID NO: 2450281 - DNA, 25 bp, Homo sapien
catcaattaatactttgccttgtaa

SEQ ID NO: 2450282 - DNA, 25 bp, Homo sapien
atacatcaattaatactttgccttg

SEQ ID NO: 2450283 - DNA, 25 bp, Homo sapien
ctttgccttgtaatgtcatgcaata

SEQ ID NO: 2450284 - DNA, 25 bp, Homo sapien
taatactttgccttgtaatgtcatg

SEQ ID NO: 2450285 - DNA, 25 bp, Homo sapien
tattctgaataaaagatgtgtggca

SEQ ID NO: 2450286 - DNA, 25 bp, Homo sapien
aaaaatgaacaattgtcatagtatt

SEQ ID NO: 2450287 - DNA, 25 bp, Homo sapien
tctgaataaaagatgtgtggcacca

SEQ ID NO: 2450288 - DNA, 25 bp, Homo sapien
acaattgtcatagtatttaggaaga

SEQ ID NO: 2450289 - DNA, 25 bp, Homo sapien
agatatatagatacttcatcaagga

SEQ ID NO: 2450290 - DNA, 25 bp, Homo sapien
aaaaagatatatagatacttcatca

SEQ ID NO: 2450291 - DNA, 25 bp, Homo sapien
aaagatatatagatacttcatcaag

SEQ ID NO: 2450292 - DNA, 25 bp, Homo sapien
gatatatagatacttcatcaaggaa

SEQ ID NO: 2450293 - DNA, 25 bp, Homo sapien
aggaagcttttcaagtaagctacct

SEQ ID NO: 2450294 - DNA, 25 bp, Homo sapien
tacaaaagcagaagttaccaaagat

SEQ ID NO: 2450295 - DNA, 25 bp, Homo sapien
ccccatgtctgtgtgtaattaaagg

SEQ ID NO: 2450296 - DNA, 25 bp, Homo sapien
ttaatgctcgcaatgaaagagagtg

SEQ ID NO: 2450297 - DNA, 25 bp, Homo sapien
gaaggttgctgccttccgtgcccac

SEQ ID NO: 2450298 - DNA, 25 bp, Homo sapien
ctcttggctcctggaaggttgctgc

SEQ ID NO: 2450299 - DNA, 25 bp, Homo sapien
ggttgctgccttccgtgcccaccat

SEQ ID NO: 2450300 - DNA, 25 bp, Homo sapien
tggctcctggaaggttgctgccttc

SEQ ID NO: 2450301 - DNA, 25 bp, Homo sapien
caggtgttcttgagataaaatacca

SEQ ID NO: 2450302 - DNA, 25 bp, Homo sapien
taggccctgtccctttgatgttaag

SEQ ID NO: 2450303 - DNA, 25 bp, Homo sapien
tggcctctggaaacgtcacatcagg

SEQ ID NO: 2450304 - DNA, 25 bp, Homo sapien
ttgcctctggcttgcggtatatcca

SEQ ID NO: 2450305 - DNA, 25 bp, Homo sapien
tgccccagaagaccgtgtagacagt

SEQ ID NO: 2450306 - DNA, 25 bp, Homo sapien
caactgaattcggttccgtgtgcat

SEQ ID NO: 2450307 - DNA, 25 bp, Homo sapien
tttgaaacccaatcgcagctgcagg

SEQ ID NO: 2450308 - DNA, 25 bp, Homo sapien
gttccgtgtgcatagcagtgttggc

SEQ ID NO: 2450309 - DNA, 25 bp, Homo sapien
ctctagaagtgatgagctttacatg

SEQ ID NO: 2450310 - DNA, 25 bp, Homo sapien
ttctcttttatcatcccttctcctt

SEQ ID NO: 2450311 - DNA, 25 bp, Homo sapien
ttttatcatcccttctccttctgca

SEQ ID NO: 2450312 - DNA, 25 bp, Homo sapien
tccttctgcatttgttttttaaata

SEQ ID NO: 2450313 - DNA, 25 bp, Homo sapien
ctcttttatcatcccttctccttct

SEQ ID NO: 2450314 - DNA, 25 bp, Homo sapien
tacgtagagtctcaagctgtctgat

SEQ ID NO: 2450315 - DNA, 25 bp, Homo sapien
gtctttcttcctctacgtagagtct

SEQ ID NO: 2450316 - DNA, 25 bp, Homo sapien
gcttcactgtattgctccctattat

SEQ ID NO: 2450317 - DNA, 25 bp, Homo sapien
tcactgtattgctccctattatcca

SEQ ID NO: 2450318 - DNA, 25 bp, Homo sapien
gggtcataaggatcatatctcatga

SEQ ID NO: 2450319 - DNA, 25 bp, Homo sapien
aaggatcatatctcatgatcaagga

SEQ ID NO: 2450320 - DNA, 25 bp, Homo sapien
aagggtcataaggatcatatctcat

SEQ ID NO: 2450321 - DNA, 25 bp, Homo sapien
cataaggatcatatctcatgatcaa

SEQ ID NO: 2450322 - DNA, 25 bp, Homo sapien
ctggaaaggaatggactcaaattga

SEQ ID NO: 2450323 - DNA, 25 bp, Homo sapien
caaattgaaagggctcgaaaggaat

SEQ ID NO: 2450324 - DNA, 25 bp, Homo sapien
attgaaagggctcgaaaggaatgga

SEQ ID NO: 2450325 - DNA, 25 bp, Homo sapien
ctcaaattgaaagggctcgaaagga

SEQ ID NO: 2450326 - DNA, 25 bp, Homo sapien
tggaatcgaaccacaaggaatggac

SEQ ID NO: 2450327 - DNA, 25 bp, Homo sapien
aatcgtatggaatggcatcaaacgg

SEQ ID NO: 2450328 - DNA, 25 bp, Homo sapien
gcaatggaatctaatgaaacggaaa

SEQ ID NO: 2450329 - DNA, 25 bp, Homo sapien
cagccacggaatggaatgcactcga

SEQ ID NO: 2450330 - DNA, 25 bp, Homo sapien
ctggaaaggaatggactcaaattga

SEQ ID NO: 2450331 - DNA, 25 bp, Homo sapien
caaattgaaagggctcgaaaggaat

SEQ ID NO: 2450332 - DNA, 25 bp, Homo sapien
attgaaagggctcgaaaggaatgga

SEQ ID NO: 2450333 - DNA, 25 bp, Homo sapien
ctcaaattgaaagggctcgaaagga

SEQ ID NO: 2450334 - DNA, 25 bp, Homo sapien
caaattgaaagggctcgaaaggaat

SEQ ID NO: 2450335 - DNA, 25 bp, Homo sapien
attgaaagggctcgaaaggaatgga

SEQ ID NO: 2450336 - DNA, 25 bp, Homo sapien
ctggaaaggaatggactcaaattga

SEQ ID NO: 2450337 - DNA, 25 bp, Homo sapien
ctcaaattgaaagggctcgaaagga

SEQ ID NO: 2450338 - DNA, 25 bp, Homo sapien
ctggaaaggaatggactcaaattga

SEQ ID NO: 2450339 - DNA, 25 bp, Homo sapien
caaattgaaagggctcgaaaggaat

SEQ ID NO: 2450340 - DNA, 25 bp, Homo sapien
attgaaagggctcgaaaggaatgga

SEQ ID NO: 2450341 - DNA, 25 bp, Homo sapien
ctcaaattgaaagggctcgaaagga

SEQ ID NO: 2450342 - DNA, 25 bp, Homo sapien
ctggaaaggaatggactcaaattga

SEQ ID NO: 2450343 - DNA, 25 bp, Homo sapien
caaattgaaagggctcgaaaggaat

SEQ ID NO: 2450344 - DNA, 25 bp, Homo sapien
attgaaagggctcgaaaggaatgga

SEQ ID NO: 2450345 - DNA, 25 bp, Homo sapien
ctcaaattgaaagggctcgaaagga

SEQ ID NO: 2450346 - DNA, 25 bp, Homo sapien
gtatgcagtagaagagaatagaatg

SEQ ID NO: 2450347 - DNA, 25 bp, Homo sapien
aattgtatgcagtagaagagaatag

SEQ ID NO: 2450348 - DNA, 25 bp, Homo sapien
aatggaatgggaacgaatggagtga

SEQ ID NO: 2450349 - DNA, 25 bp, Homo sapien
gaaattgtatgcagtagaagagaat

SEQ ID NO: 2450350 - DNA, 25 bp, Homo sapien
aattgtatgcagtagaagagaatag

SEQ ID NO: 2450351 - DNA, 25 bp, Homo sapien
gtatgcagtagaagagaatagaatg

SEQ ID NO: 2450352 - DNA, 25 bp, Homo sapien
aatggaatgggaacgaatggagtga

SEQ ID NO: 2450353 - DNA, 25 bp, Homo sapien
gaaattgtatgcagtagaagagaat

SEQ ID NO: 2450354 - DNA, 25 bp, Homo sapien
ctggaaaggaatggactcaaattga

SEQ ID NO: 2450355 - DNA, 25 bp, Homo sapien
caaattgaaagggctcgaaaggaat

SEQ ID NO: 2450356 - DNA, 25 bp, Homo sapien
attgaaagggctcgaaaggaatgga

SEQ ID NO: 2450357 - DNA, 25 bp, Homo sapien
ctcaaattgaaagggctcgaaagga

SEQ ID NO: 2450358 - DNA, 25 bp, Homo sapien
ctggaaaggaatggactcaaattga

SEQ ID NO: 2450359 - DNA, 25 bp, Homo sapien
caaattgaaagggctcgaaaggaat

SEQ ID NO: 2450360 - DNA, 25 bp, Homo sapien
attgaaagggctcgaaaggaatgga

SEQ ID NO: 2450361 - DNA, 25 bp, Homo sapien
ctcaaattgaaagggctcgaaagga

SEQ ID NO: 2450362 - DNA, 25 bp, Homo sapien
ctggaaaggaatggactcaaattga

SEQ ID NO: 2450363 - DNA, 25 bp, Homo sapien
attgaaagggctcgaaaggaatgga

SEQ ID NO: 2450364 - DNA, 25 bp, Homo sapien
caaattgaaagggctcgaaaggaat

SEQ ID NO: 2450365 - DNA, 25 bp, Homo sapien
ctcaaattgaaagggctcgaaagga

SEQ ID NO: 2450366 - DNA, 25 bp, Homo sapien
caaattgaaagggctcgaaaggaat

SEQ ID NO: 2450367 - DNA, 25 bp, Homo sapien
attgaaagggctcgaaaggaatgga

SEQ ID NO: 2450368 - DNA, 25 bp, Homo sapien
ctggaaaggaatggactcaaattga

SEQ ID NO: 2450369 - DNA, 25 bp, Homo sapien
ctcaaattgaaagggctcgaaagga

SEQ ID NO: 2450370 - DNA, 25 bp, Homo sapien
aatggactgcaatagaaaggattcg

SEQ ID NO: 2450371 - DNA, 25 bp, Homo sapien
tggactgcaatagaaaggattcgaa

SEQ ID NO: 2450372 - DNA, 25 bp, Homo sapien
gactgcaatagaaaggattcgaatg

SEQ ID NO: 2450373 - DNA, 25 bp, Homo sapien
tggaatggactgcaatagaaaggat

SEQ ID NO: 2450374 - DNA, 25 bp, Homo sapien
atggaattgaatggaacggaataga

SEQ ID NO: 2450375 - DNA, 25 bp, Homo sapien
gaatggaattgaatggaacggaata

SEQ ID NO: 2450376 - DNA, 25 bp, Homo sapien
aatggaattgaatggaacggaatag

SEQ ID NO: 2450377 - DNA, 25 bp, Homo sapien
caaattgaaagggctcgaaaggaat

SEQ ID NO: 2450378 - DNA, 25 bp, Homo sapien
attgaaagggctcgaaaggaatgga

SEQ ID NO: 2450379 - DNA, 25 bp, Homo sapien
ctggaaaggaatggactcaaattga

SEQ ID NO: 2450380 - DNA, 25 bp, Homo sapien
ctcaaattgaaagggctcgaaagga

SEQ ID NO: 2450381 - DNA, 25 bp, Homo sapien
aattgtatgcagtagaagagaatag

SEQ ID NO: 2450382 - DNA, 25 bp, Homo sapien
aatggaatgggaacgaatggagtga

SEQ ID NO: 2450383 - DNA, 25 bp, Homo sapien
gtatgcagtagaagagaatagaatg

SEQ ID NO: 2450384 - DNA, 25 bp, Homo sapien
gaaattgtatgcagtagaagagaat

SEQ ID NO: 2450385 - DNA, 25 bp, Homo sapien
aattgtatgcagtagaagagaatag

SEQ ID NO: 2450386 - DNA, 25 bp, Homo sapien
gtatgcagtagaagagaatagaatg

SEQ ID NO: 2450387 - DNA, 25 bp, Homo sapien
aatggaatgggaacgaatggagtga

SEQ ID NO: 2450388 - DNA, 25 bp, Homo sapien
gaaattgtatgcagtagaagagaat

SEQ ID NO: 2450389 - DNA, 25 bp, Homo sapien
tggaatcgaaccacaaggaatggac

SEQ ID NO: 2450390 - DNA, 25 bp, Homo sapien
cagccacggaatggaatgcactcga

SEQ ID NO: 2450391 - DNA, 25 bp, Homo sapien
gcaatggaatctaatgaaacggaaa

SEQ ID NO: 2450392 - DNA, 25 bp, Homo sapien
aatcgtatggaatggcatcaaacgg

SEQ ID NO: 2450393 - DNA, 25 bp, Homo sapien
attgaaagggctcgaaaggaatgga

SEQ ID NO: 2450394 - DNA, 25 bp, Homo sapien
caaattgaaagggctcgaaaggaat

SEQ ID NO: 2450395 - DNA, 25 bp, Homo sapien
ctggaaaggaatggactcaaattga

SEQ ID NO: 2450396 - DNA, 25 bp, Homo sapien
ctcaaattgaaagggctcgaaagga

SEQ ID NO: 2450397 - DNA, 25 bp, Homo sapien
gtatgcagtagaagagaatagaatg

SEQ ID NO: 2450398 - DNA, 25 bp, Homo sapien
aattgtatgcagtagaagagaatag

SEQ ID NO: 2450399 - DNA, 25 bp, Homo sapien
aatggaatgggaacgaatggagtga

SEQ ID NO: 2450400 - DNA, 25 bp, Homo sapien
gaaattgtatgcagtagaagagaat

SEQ ID NO: 2450401 - DNA, 25 bp, Homo sapien
ctcaaattgaaagggctcgaaagga

SEQ ID NO: 2450402 - DNA, 25 bp, Homo sapien
ctggaaaggaatggactcaaattga

SEQ ID NO: 2450403 - DNA, 25 bp, Homo sapien
attgaaagggctcgaaaggaatgga

SEQ ID NO: 2450404 - DNA, 25 bp, Homo sapien
caaattgaaagggctcgaaaggaat

SEQ ID NO: 2450405 - DNA, 25 bp, Homo sapien
ctggaaaggaatggactcaaattga

SEQ ID NO: 2450406 - DNA, 25 bp, Homo sapien
caaattgaaagggctcgaaaggaat

SEQ ID NO: 2450407 - DNA, 25 bp, Homo sapien
attgaaagggctcgaaaggaatgga

SEQ ID NO: 2450408 - DNA, 25 bp, Homo sapien
ctcaaattgaaagggctcgaaagga

SEQ ID NO: 2450409 - DNA, 25 bp, Homo sapien
ctggaaaggaatggactcaaattga

SEQ ID NO: 2450410 - DNA, 25 bp, Homo sapien
attgaaagggctcgaaaggaatgga

SEQ ID NO: 2450411 - DNA, 25 bp, Homo sapien
caaattgaaagggctcgaaaggaat

SEQ ID NO: 2450412 - DNA, 25 bp, Homo sapien
ctcaaattgaaagggctcgaaagga

SEQ ID NO: 2450413 - DNA, 25 bp, Homo sapien
caaattgaaagggctcgaaaggaat

SEQ ID NO: 2450414 - DNA, 25 bp, Homo sapien
attgaaagggctcgaaaggaatgga

SEQ ID NO: 2450415 - DNA, 25 bp, Homo sapien
ctggaaaggaatggactcaaattga

SEQ ID NO: 2450416 - DNA, 25 bp, Homo sapien
ctcaaattgaaagggctcgaaagga

SEQ ID NO: 2450417 - DNA, 25 bp, Homo sapien
tgaagatgttggttcattgaggaga

SEQ ID NO: 2450418 - DNA, 25 bp, Homo sapien
ctgaagatgttggttcattgaggag

SEQ ID NO: 2450419 - DNA, 25 bp, Homo sapien
gaagatgttggttcattgaggagag

SEQ ID NO: 2450420 - DNA, 25 bp, Homo sapien
tctgaagatgttggttcattgagga

SEQ ID NO: 2450421 - DNA, 25 bp, Homo sapien
tgaaatagagaggaatggaatggga

SEQ ID NO: 2450422 - DNA, 25 bp, Homo sapien
aatgcaatggaatggtggaaagaaa

SEQ ID NO: 2450423 - DNA, 25 bp, Homo sapien
aatggtggaaagaaatgtgagctga

SEQ ID NO: 2450424 - DNA, 25 bp, Homo sapien
tgacagagtgacatcctttggaaag

SEQ ID NO: 2450425 - DNA, 25 bp, Homo sapien
aaatatagtggaatagaatgggatg

SEQ ID NO: 2450426 - DNA, 25 bp, Homo sapien
cagtgcagaggtatgtcacaagcct

SEQ ID NO: 2450427 - DNA, 25 bp, Homo sapien
ggatatgtcacaaagcaccctgtag

SEQ ID NO: 2450428 - DNA, 25 bp, Homo sapien
gatcctagacaagagttacatcacc

SEQ ID NO: 2450429 - DNA, 25 bp, Homo sapien
cacaagcctcctgtaggcagagcct

SEQ ID NO: 2450430 - DNA, 25 bp, Homo sapien
caagtgttacatcacctcagtgatc

SEQ ID NO: 2450431 - DNA, 25 bp, Homo sapien
cagtgatcagtgtagagatatgtcc

SEQ ID NO: 2450432 - DNA, 25 bp, Homo sapien
tacatcacctcagtgatcagtgtag

SEQ ID NO: 2450433 - DNA, 25 bp, Homo sapien
agatatgtcccaatgcccctgtagg

SEQ ID NO: 2450434 - DNA, 25 bp, Homo sapien
gaccaaagcacagatgtgacaaaga

SEQ ID NO: 2450435 - DNA, 25 bp, Homo sapien
caaagaattccttgttcacacagtt

SEQ ID NO: 2450436 - DNA, 25 bp, Homo sapien
ccaaagcacagatgtgacaaagaat

SEQ ID NO: 2450437 - DNA, 25 bp, Homo sapien
ctgaccaaagcacagatgtgacaaa

SEQ ID NO: 2450438 - DNA, 25 bp, Homo sapien
ttccggcattcactactatttctcg

SEQ ID NO: 2450439 - DNA, 25 bp, Homo sapien
cacgcccacgatgactggatgaatt

SEQ ID NO: 2450440 - DNA, 25 bp, Homo sapien
actatttctcgttgggttgctctcg

SEQ ID NO: 2450441 - DNA, 25 bp, Homo sapien
cacgatgactggatgaattgcttgc

SEQ ID NO: 2450442 - DNA, 25 bp, Homo sapien
tgttcccaagtgtatcaaaatgatt

SEQ ID NO: 2450443 - DNA, 25 bp, Homo sapien
ccttgttcccaagtgtatcaaaatg

SEQ ID NO: 2450444 - DNA, 25 bp, Homo sapien
tgtccttgttcccaagtgtatcaaa

SEQ ID NO: 2450445 - DNA, 25 bp, Homo sapien
ttcccaagtgtatcaaaatgattac

SEQ ID NO: 2450446 - DNA, 25 bp, Homo sapien
taaccagtccctgtagactgaaggg

SEQ ID NO: 2450447 - DNA, 25 bp, Homo sapien
tagactgaagggactcaagtgacaa

SEQ ID NO: 2450448 - DNA, 25 bp, Homo sapien
aaaagctgtaaccagtccctgtaga

SEQ ID NO: 2450449 - DNA, 25 bp, Homo sapien
tgaagggactcaagtgacaagatgg

SEQ ID NO: 2450450 - DNA, 25 bp, Homo sapien
cagttcagatgtgagagacgcttct

SEQ ID NO: 2450451 - DNA, 25 bp, Homo sapien
caacttgcccactcagcatgcagtt

SEQ ID NO: 2450452 - DNA, 25 bp, Homo sapien
acaggagccggtactgtcttcaatc

SEQ ID NO: 2450453 - DNA, 25 bp, Homo sapien
gtgagagacgcttctctgtacagga

SEQ ID NO: 2450454 - DNA, 25 bp, Homo sapien
gcagagcatctgaaactgagaaaat

SEQ ID NO: 2450455 - DNA, 25 bp, Homo sapien
gattacaaacagcttgtgaaactta

SEQ ID NO: 2450456 - DNA, 25 bp, Homo sapien
tatttttgattacaaacagcttgtg

SEQ ID NO: 2450457 - DNA, 25 bp, Homo sapien
agcttgtgaaacttaatactgtttt

SEQ ID NO: 2450458 - DNA, 25 bp, Homo sapien
ctacagtaacgttaactcgcactaa

SEQ ID NO: 2450459 - DNA, 25 bp, Homo sapien
acaactacagtaacgttaactcgca

SEQ ID NO: 2450460 - DNA, 25 bp, Homo sapien
ttaactcgcactaaaacaaaggata

SEQ ID NO: 2450461 - DNA, 25 bp, Homo sapien
aactacagtaacgttaactcgcact

SEQ ID NO: 2450462 - DNA, 25 bp, Homo sapien
tttctttatgtatcacttctaatat

SEQ ID NO: 2450463 - DNA, 25 bp, Homo sapien
ttctttatgtatcacttctaatatt

SEQ ID NO: 2450464 - DNA, 25 bp, Homo sapien
tttgttgtctatgctctgtttttgt

SEQ ID NO: 2450465 - DNA, 25 bp, Homo sapien
tgaaggttccagttgtttcccatcc

SEQ ID NO: 2450466 - DNA, 25 bp, Homo sapien
tactttaatttgatctctgtctggg

SEQ ID NO: 2450467 - DNA, 25 bp, Homo sapien
ttgcagtggctgtatcagtttacaa

SEQ ID NO: 2450468 - DNA, 25 bp, Homo sapien
tctgtctgggagtgcaagtgcttta

SEQ ID NO: 2450469 - DNA, 25 bp, Homo sapien
gcccaatttgttctcgaatgcctgg

SEQ ID NO: 2450470 - DNA, 25 bp, Homo sapien
cagttgtggcattcaagtattacag

SEQ ID NO: 2450471 - DNA, 25 bp, Homo sapien
gatttgtatccaaggagatttcacc

SEQ ID NO: 2450472 - DNA, 25 bp, Homo sapien
cctactgtcagcgataatggaagca

SEQ ID NO: 2450473 - DNA, 25 bp, Homo sapien
ttctgttatggaaagactctggtac

SEQ ID NO: 2450474 - DNA, 25 bp, Homo sapien
ctgttatggaaagactctggtacat

SEQ ID NO: 2450475 - DNA, 25 bp, Homo sapien
attctgttatggaaagactctggta

SEQ ID NO: 2450476 - DNA, 25 bp, Homo sapien
tctgttatggaaagactctggtaca

SEQ ID NO: 2450477 - DNA, 25 bp, Homo sapien
gcaagatgccttgagtcttagactg

SEQ ID NO: 2450478 - DNA, 25 bp, Homo sapien
tgaagtctcagagtcgcaagatgcc

SEQ ID NO: 2450479 - DNA, 25 bp, Homo sapien
gagtcgcaagatgccttgagtctta

SEQ ID NO: 2450480 - DNA, 25 bp, Homo sapien
gccttgagtcttagactgtcttcca

SEQ ID NO: 2450481 - DNA, 25 bp, Homo sapien
gttacagtgtttgtgcagtcatgca

SEQ ID NO: 2450482 - DNA, 25 bp, Homo sapien
tttcaaatgtgtctgaatacagagc

SEQ ID NO: 2450483 - DNA, 25 bp, Homo sapien
taacgctcgctcttattcctggtcc

SEQ ID NO: 2450484 - DNA, 25 bp, Homo sapien
tcatgcagtttggacttgagccaag

SEQ ID NO: 2450485 - DNA, 25 bp, Homo sapien
gaatgaaaactccttcactggcagg

SEQ ID NO: 2450486 - DNA, 25 bp, Homo sapien
gacgtatttcccaaagaaagctcag

SEQ ID NO: 2450487 - DNA, 25 bp, Homo sapien
gcgagtcaaacctgtagtggcatat

SEQ ID NO: 2450488 - DNA, 25 bp, Homo sapien
gccccatctggctcaaaggatctct

SEQ ID NO: 2450489 - DNA, 25 bp, Homo sapien
gagcccttgtagttacatggatttc

SEQ ID NO: 2450490 - DNA, 25 bp, Homo sapien
cacttatggtgataaagaggagccc

SEQ ID NO: 2450491 - DNA, 25 bp, Homo sapien
ctctgagtggttttaagtcagggtg

SEQ ID NO: 2450492 - DNA, 25 bp, Homo sapien
tttagctctgagtggttttaagtca

SEQ ID NO: 2450493 - DNA, 25 bp, Homo sapien
tagagcgcagctgttcaataggcag

SEQ ID NO: 2450494 - DNA, 25 bp, Homo sapien
cattgctagcatgagtagagcgcag

SEQ ID NO: 2450495 - DNA, 25 bp, Homo sapien
ggtagccagagaccaatcagacttg

SEQ ID NO: 2450496 - DNA, 25 bp, Homo sapien
ggccgttccacgtagtcattgctag

SEQ ID NO: 2450497 - DNA, 25 bp, Homo sapien
tgccctgcagattgctcagcttctc

SEQ ID NO: 2450498 - DNA, 25 bp, Homo sapien
ctgctccaggttgggttcggatgat

SEQ ID NO: 2450499 - DNA, 25 bp, Homo sapien
ggtgagggtgtaatgctggccaaga

SEQ ID NO: 2450500 - DNA, 25 bp, Homo sapien
tgaagaggtgctcactagggtgccc

SEQ ID NO: 2450501 - DNA, 25 bp, Homo sapien
caagtgccataatcgaggaggctct

SEQ ID NO: 2450502 - DNA, 25 bp, Homo sapien
cagcagagacaagtgccataatcga

SEQ ID NO: 2450503 - DNA, 25 bp, Homo sapien
caaaggcagcgctggttgcacagcc

SEQ ID NO: 2450504 - DNA, 25 bp, Homo sapien
tgcaggggacgcacttgcagcgccc

SEQ ID NO: 2450505 - DNA, 25 bp, Homo sapien
gaactaggcccacaagagcagggct

SEQ ID NO: 2450506 - DNA, 25 bp, Homo sapien
cctggtcgccggaggctatcatagc

SEQ ID NO: 2450507 - DNA, 25 bp, Homo sapien
tgttggtgtgcctcttgcagcggca

SEQ ID NO: 2450508 - DNA, 25 bp, Homo sapien
tcttcatcatcagtggagcagtggt

SEQ ID NO: 2450509 - DNA, 25 bp, Homo sapien
ctgggccttggggaagggtgcacta

SEQ ID NO: 2450510 - DNA, 25 bp, Homo sapien
ttcctgggccttggggaagggtgca

SEQ ID NO: 2450511 - DNA, 25 bp, Homo sapien
tgggccttggggaagggtgcactac

SEQ ID NO: 2450512 - DNA, 25 bp, Homo sapien
cctgggccttggggaagggtgcact

SEQ ID NO: 2450513 - DNA, 25 bp, Homo sapien
tttggctagtttatcactcctcccc

SEQ ID NO: 2450514 - DNA, 25 bp, Homo sapien
aagagaggccctaactttggctagt

SEQ ID NO: 2450515 - DNA, 25 bp, Homo sapien
ggagaaaagctctggatccaccttg

SEQ ID NO: 2450516 - DNA, 25 bp, Homo sapien
gatgaggcctatgctttgctgttgg

SEQ ID NO: 2450517 - DNA, 25 bp, Homo sapien
aaagactgaagaggagtgggataga

SEQ ID NO: 2450518 - DNA, 25 bp, Homo sapien
gatgtacttggtcattcccctgaca

SEQ ID NO: 2450519 - DNA, 25 bp, Homo sapien
actgaagaggagtgggatagatact

SEQ ID NO: 2450520 - DNA, 25 bp, Homo sapien
ccatatatcacctgaatttgccatg

SEQ ID NO: 2450521 - DNA, 25 bp, Homo sapien
tattaacgcctgagccatgcagtct

SEQ ID NO: 2450522 - DNA, 25 bp, Homo sapien
aacagagtgacgatcagagcctgca

SEQ ID NO: 2450523 - DNA, 25 bp, Homo sapien
tataagataacttcgcctcatgcgc

SEQ ID NO: 2450524 - DNA, 25 bp, Homo sapien
taattagctacccaccatgcactgg

SEQ ID NO: 2450525 - DNA, 25 bp, Homo sapien
gcacagtgtgtgcagcaaagagtag

SEQ ID NO: 2450526 - DNA, 25 bp, Homo sapien
gatacagcttggttagggcttcttt

SEQ ID NO: 2450527 - DNA, 25 bp, Homo sapien
tgcaatggcgaagatacagcttggt

SEQ ID NO: 2450528 - DNA, 25 bp, Homo sapien
caaagagtagatgcaatggcgaaga

SEQ ID NO: 2450529 - DNA, 25 bp, Homo sapien
tagcttgccaaggaacagaccgtgg

SEQ ID NO: 2450530 - DNA, 25 bp, Homo sapien
tggacacaagtgaaagccctgactc

SEQ ID NO: 2450531 - DNA, 25 bp, Homo sapien
taactcctaggttgcaggtggacca

SEQ ID NO: 2450532 - DNA, 25 bp, Homo sapien
gcagatgcagtccatatcaggccaa

SEQ ID NO: 2450533 - DNA, 25 bp, Homo sapien
tataacttggattgtaatgacagca

SEQ ID NO: 2450534 - DNA, 25 bp, Homo sapien
catatgggagcaaacatatataact

SEQ ID NO: 2450535 - DNA, 25 bp, Homo sapien
attagtcagtgtcattcccaaaatg

SEQ ID NO: 2450536 - DNA, 25 bp, Homo sapien
tgacagcaagattcctaacattagt

SEQ ID NO: 2450537 - DNA, 25 bp, Homo sapien
caaaaggattgccaggttagtttgg

SEQ ID NO: 2450538 - DNA, 25 bp, Homo sapien
ctggtatggtcaaaaggattgccag

SEQ ID NO: 2450539 - DNA, 25 bp, Homo sapien
ccaggttagtttgggaatgacaatg

SEQ ID NO: 2450540 - DNA, 25 bp, Homo sapien
ttgccaggttagtttgggaatgaca

SEQ ID NO: 2450541 - DNA, 25 bp, Homo sapien
tttaccatcagagggatgactatta

SEQ ID NO: 2450542 - DNA, 25 bp, Homo sapien
ttagttcttcaaggacctgggagct

SEQ ID NO: 2450543 - DNA, 25 bp, Homo sapien
tagttcttcaaggacctgggagctt

SEQ ID NO: 2450544 - DNA, 25 bp, Homo sapien
ttttaccatcagagggatgactatt

SEQ ID NO: 2450545 - DNA, 25 bp, Homo sapien
taccacttctgtgttcagcagttta

SEQ ID NO: 2450546 - DNA, 25 bp, Homo sapien
ttaccacttctgtgttcagcagttt

SEQ ID NO: 2450547 - DNA, 25 bp, Homo sapien
accacttctgtgttcagcagtttag

SEQ ID NO: 2450548 - DNA, 25 bp, Homo sapien
attaccacttctgtgttcagcagtt

SEQ ID NO: 2450549 - DNA, 25 bp, Homo sapien
tacgagttccattgaaaccctgggc

SEQ ID NO: 2450550 - DNA, 25 bp, Homo sapien
taagccttggtgtgcgaatccccat

SEQ ID NO: 2450551 - DNA, 25 bp, Homo sapien
gacttggtcactaactcacggtgtg

SEQ ID NO: 2450552 - DNA, 25 bp, Homo sapien
tcctcagatgctccaagtcagaaag

SEQ ID NO: 2450553 - DNA, 25 bp, Homo sapien
gcagatgtggcccaaaacattgagg

SEQ ID NO: 2450554 - DNA, 25 bp, Homo sapien
tgtggcccaaaacattgaggactgc

SEQ ID NO: 2450555 - DNA, 25 bp, Homo sapien
ccaaaacattgaggactgcagggta

SEQ ID NO: 2450556 - DNA, 25 bp, Homo sapien
aaacattgaggactgcagggtaaag

SEQ ID NO: 2450557 - DNA, 25 bp, Homo sapien
ctgctagcttttgagtttctttgct

SEQ ID NO: 2450558 - DNA, 25 bp, Homo sapien
tgatgttaggtgtcgattttagatc

SEQ ID NO: 2450559 - DNA, 25 bp, Homo sapien
ctacacactgtttaaatgtgtccca

SEQ ID NO: 2450560 - DNA, 25 bp, Homo sapien
agcttttgagtttctttgctcttgc

SEQ ID NO: 2450561 - DNA, 25 bp, Homo sapien
ctttaagcgaggaaaatttgtgacg

SEQ ID NO: 2450562 - DNA, 25 bp, Homo sapien
cctatgatgacctgatcagaaaagt

SEQ ID NO: 2450563 - DNA, 25 bp, Homo sapien
gttctaaatgttgcacagtgctttc

SEQ ID NO: 2450564 - DNA, 25 bp, Homo sapien
gaaaatttgtgacgaccttgtatgt

SEQ ID NO: 2450565 - DNA, 25 bp, Homo sapien
cagtgggtttgactcgattcaaagc

SEQ ID NO: 2450566 - DNA, 25 bp, Homo sapien
tcattaagccttttcaccaagggta

SEQ ID NO: 2450567 - DNA, 25 bp, Homo sapien
cccaaatggagcagcatattgtatg

SEQ ID NO: 2450568 - DNA, 25 bp, Homo sapien
tgtggtaccaccctcttgctgaaag

SEQ ID NO: 2450569 - DNA, 25 bp, Homo sapien
aatcatatgtgtgacaaaaactgac

SEQ ID NO: 2450570 - DNA, 25 bp, Homo sapien
caatcatatgtgtgacaaaaactga

SEQ ID NO: 2450571 - DNA, 25 bp, Homo sapien
tcaatcatatgtgtgacaaaaactg

SEQ ID NO: 2450572 - DNA, 25 bp, Homo sapien
caccaagagattctgtagcagtgct

SEQ ID NO: 2450573 - DNA, 25 bp, Homo sapien
tggaagggatctgggctctccacca

SEQ ID NO: 2450574 - DNA, 25 bp, Homo sapien
caagagattctgtagcagtgctggc

SEQ ID NO: 2450575 - DNA, 25 bp, Homo sapien
tctgggctctccaccaagagattct

SEQ ID NO: 2450576 - DNA, 25 bp, Homo sapien
agtggactcgaggaccgctaccttt

SEQ ID NO: 2450577 - DNA, 25 bp, Homo sapien
cttctgaatgcgaggtcgtggcccg

SEQ ID NO: 2450578 - DNA, 25 bp, Homo sapien
cctttagatgctgaacgtgacttct

SEQ ID NO: 2450579 - DNA, 25 bp, Homo sapien
ctctgggaaggcgtcctccccgttg

SEQ ID NO: 2450580 - DNA, 25 bp, Homo sapien
gcagagcttgaagcgagccggggac

SEQ ID NO: 2450581 - DNA, 25 bp, Homo sapien
cagagcttgaagcgagccggggaca

SEQ ID NO: 2450582 - DNA, 25 bp, Homo sapien
gagcttgaagcgagccggggacagg

SEQ ID NO: 2450583 - DNA, 25 bp, Homo sapien
agagcttgaagcgagccggggacag

SEQ ID NO: 2450584 - DNA, 25 bp, Homo sapien
catggagcacgcattccacagcaaa

SEQ ID NO: 2450585 - DNA, 25 bp, Homo sapien
tggttgaccaaagcgaacagttcca

SEQ ID NO: 2450586 - DNA, 25 bp, Homo sapien
cataaagtgtttgcttctgcgctcc

SEQ ID NO: 2450587 - DNA, 25 bp, Homo sapien
tgagatttgcctcccacgctcttgg

SEQ ID NO: 2450588 - DNA, 25 bp, Homo sapien
gatctgtttctctgcgcatatactg

SEQ ID NO: 2450589 - DNA, 25 bp, Homo sapien
tcatcaatcactttaataatgagaa

SEQ ID NO: 2450590 - DNA, 25 bp, Homo sapien
tgaaaggtgctggatctgtttctct

SEQ ID NO: 2450591 - DNA, 25 bp, Homo sapien
gcgcatatactgatctttgtcatca

SEQ ID NO: 2450592 - DNA, 25 bp, Homo sapien
atgaagcgccccgtctacgcgtggc

SEQ ID NO: 2450593 - DNA, 25 bp, Homo sapien
gggacggagggacgcgggtcagtgc

SEQ ID NO: 2450594 - DNA, 25 bp, Homo sapien
gacgccgctgacttccgcatgaagc

SEQ ID NO: 2450595 - DNA, 25 bp, Homo sapien
gtcagtgcagggtcgccaactgccc

SEQ ID NO: 2450596 - DNA, 25 bp, Homo sapien
caggaagtttcctccacaccaagca

SEQ ID NO: 2450597 - DNA, 25 bp, Homo sapien
atagtggtccccctggcaacaacag

SEQ ID NO: 2450598 - DNA, 25 bp, Homo sapien
aggaagtttcctccacaccaagcat

SEQ ID NO: 2450599 - DNA, 25 bp, Homo sapien
tggcaaggatagtggtccccctggc

SEQ ID NO: 2450600 - DNA, 25 bp, Homo sapien
ttttcagaaggtatcttagccagaa

SEQ ID NO: 2450601 - DNA, 25 bp, Homo sapien
catgtgagtacgttagtttgttatt

SEQ ID NO: 2450602 - DNA, 25 bp, Homo sapien
ttgccatgtgagtacgttagtttgt

SEQ ID NO: 2450603 - DNA, 25 bp, Homo sapien
agaaggtatcttagccagaatctgc

SEQ ID NO: 2450604 - DNA, 25 bp, Homo sapien
acaaagatatacaatcctgtcttgg

SEQ ID NO: 2450605 - DNA, 25 bp, Homo sapien
tacaaagatatacaatcctgtcttg

SEQ ID NO: 2450606 - DNA, 25 bp, Homo sapien
agaactcgctattcatggcatatgg

SEQ ID NO: 2450607 - DNA, 25 bp, Homo sapien
tgctgtctgtgctcttgaaccgtaa

SEQ ID NO: 2450608 - DNA, 25 bp, Homo sapien
cagctgtgcagctaagacacttgag

SEQ ID NO: 2450609 - DNA, 25 bp, Homo sapien
ccgtaagtagtctggaacctcttct

SEQ ID NO: 2450610 - DNA, 25 bp, Homo sapien
gttcatccacttgggcttgagtctc

SEQ ID NO: 2450611 - DNA, 25 bp, Homo sapien
tgagtctccatcactttgtctaggc

SEQ ID NO: 2450612 - DNA, 25 bp, Homo sapien
catcactttgtctaggcccttattc

SEQ ID NO: 2450613 - DNA, 25 bp, Homo sapien
cacttgggcttgagtctccatcact

SEQ ID NO: 2450614 - DNA, 25 bp, Homo sapien
aataattccaatctttctcctcgct

SEQ ID NO: 2450615 - DNA, 25 bp, Homo sapien
tctgttttgtcaatcaataattcca

SEQ ID NO: 2450616 - DNA, 25 bp, Homo sapien
aattccaatctttctcctcgctgag

SEQ ID NO: 2450617 - DNA, 25 bp, Homo sapien
ctttctcctcgctgagctaccagat

SEQ ID NO: 2450618 - DNA, 25 bp, Homo sapien
tagtttctccactttacatcagact

SEQ ID NO: 2450619 - DNA, 25 bp, Homo sapien
catccatagtttctccactttacat

SEQ ID NO: 2450620 - DNA, 25 bp, Homo sapien
tacatcagactccatattatcagat

SEQ ID NO: 2450621 - DNA, 25 bp, Homo sapien
ttacatcagactccatattatcaga

SEQ ID NO: 2450622 - DNA, 25 bp, Homo sapien
tacggaaccatagtataagcagctc

SEQ ID NO: 2450623 - DNA, 25 bp, Homo sapien
gattcatactgggtcacaaacggct

SEQ ID NO: 2450624 - DNA, 25 bp, Homo sapien
ccttaaaatgctctgaagtgggtac

SEQ ID NO: 2450625 - DNA, 25 bp, Homo sapien
tacaatccagctgtcagtcacaacg

SEQ ID NO: 2450626 - DNA, 25 bp, Homo sapien
tatactgtcaagataccaatgtccc

SEQ ID NO: 2450627 - DNA, 25 bp, Homo sapien
aaagcagagatatgtcacgttcatg

SEQ ID NO: 2450628 - DNA, 25 bp, Homo sapien
tacacaatacaaaagcatgatattc

SEQ ID NO: 2450629 - DNA, 25 bp, Homo sapien
catggaccgaaaaactctatactgt

SEQ ID NO: 2450630 - DNA, 25 bp, Homo sapien
tacacaggacagaaacagcagattg

SEQ ID NO: 2450631 - DNA, 25 bp, Homo sapien
agtatgcacatgttaaggagacaca

SEQ ID NO: 2450632 - DNA, 25 bp, Homo sapien
ctcaaggtagaggaaagtatgcaca

SEQ ID NO: 2450633 - DNA, 25 bp, Homo sapien
cagcagattgcgaactgcagaagaa

SEQ ID NO: 2450634 - DNA, 25 bp, Homo sapien
taaggtgacggagctaacggataaa

SEQ ID NO: 2450635 - DNA, 25 bp, Homo sapien
aatcgaaggtctgtggaaaccccat

SEQ ID NO: 2450636 - DNA, 25 bp, Homo sapien
taaactgtgcctatataaggtgacg

SEQ ID NO: 2450637 - DNA, 25 bp, Homo sapien
ttctaacagcatgtggtcgcctcat

SEQ ID NO: 2450638 - DNA, 25 bp, Homo sapien
gaatatctgggaataagcctcccca

SEQ ID NO: 2450639 - DNA, 25 bp, Homo sapien
catccaacacgggacaagaatatct

SEQ ID NO: 2450640 - DNA, 25 bp, Homo sapien
acgtctttccatccaacacgggaca

SEQ ID NO: 2450641 - DNA, 25 bp, Homo sapien
taaacttatatctaaaatgctgatc

SEQ ID NO: 2450642 - DNA, 25 bp, Homo sapien
ggaaaactgatcaagcaaatccagg

SEQ ID NO: 2450643 - DNA, 25 bp, Homo sapien
catttcagacctccaagcttttgtt

SEQ ID NO: 2450644 - DNA, 25 bp, Homo sapien
ctaaaaggacctacccaccatgtgg

SEQ ID NO: 2450645 - DNA, 25 bp, Homo sapien
gagaaggatcaataatcaagggact

SEQ ID NO: 2450646 - DNA, 25 bp, Homo sapien
catggctcgagcaagatttctgctg

SEQ ID NO: 2450647 - DNA, 25 bp, Homo sapien
gatgataatagtgagcttgaggttc

SEQ ID NO: 2450648 - DNA, 25 bp, Homo sapien
tcttcatacacatggctcgagcaag

SEQ ID NO: 2450649 - DNA, 25 bp, Homo sapien
gagcttgaggttcttcatacacatg

SEQ ID NO: 2450650 - DNA, 25 bp, Homo sapien
cttggccatgtaaatccaccacaga

SEQ ID NO: 2450651 - DNA, 25 bp, Homo sapien
cagcttggccatgtaaatccaccac

SEQ ID NO: 2450652 - DNA, 25 bp, Homo sapien
acacagcttggccatgtaaatccac

SEQ ID NO: 2450653 - DNA, 25 bp, Homo sapien
ttcacacagcttggccatgtaaatc

SEQ ID NO: 2450654 - DNA, 25 bp, Homo sapien
catatccttggttaatggtaacttc

SEQ ID NO: 2450655 - DNA, 25 bp, Homo sapien
ccttgttctctcatatccttggtta

SEQ ID NO: 2450656 - DNA, 25 bp, Homo sapien
ctctcatatccttggttaatggtaa

SEQ ID NO: 2450657 - DNA, 25 bp, Homo sapien
gttctctcatatccttggttaatgg

SEQ ID NO: 2450658 - DNA, 25 bp, Homo sapien
ctaatgggctagcaaaatgttcccc

SEQ ID NO: 2450659 - DNA, 25 bp, Homo sapien
cctggaggcatggaacaagatttta

SEQ ID NO: 2450660 - DNA, 25 bp, Homo sapien
tagatagctcataagactagcggcg

SEQ ID NO: 2450661 - DNA, 25 bp, Homo sapien
gctcttagaaggaagcagcaccaac

SEQ ID NO: 2450662 - DNA, 25 bp, Homo sapien
tattctattagcgacacgattgccc

SEQ ID NO: 2450663 - DNA, 25 bp, Homo sapien
caagtgggcctaagatctatgtcaa

SEQ ID NO: 2450664 - DNA, 25 bp, Homo sapien
aaaccctggagttgactgctgaccg

SEQ ID NO: 2450665 - DNA, 25 bp, Homo sapien
gaagaacaggtaccatgagccagat

SEQ ID NO: 2450666 - DNA, 25 bp, Homo sapien
ctgcctatgctcatgtggctcagcc

SEQ ID NO: 2450667 - DNA, 25 bp, Homo sapien
gatgccaccctttaagctcaggacc

SEQ ID NO: 2450668 - DNA, 25 bp, Homo sapien
tgtttcctctaactccagggcgatg

SEQ ID NO: 2450669 - DNA, 25 bp, Homo sapien
cacagcttcaccatttggggccagg

SEQ ID NO: 2450670 - DNA, 25 bp, Homo sapien
gcagtacaggatgctcaggcgctca

SEQ ID NO: 2450671 - DNA, 25 bp, Homo sapien
tgcccataggctgcggtctgcggtc

SEQ ID NO: 2450672 - DNA, 25 bp, Homo sapien
cgctcacgatttagtggtgcccata

SEQ ID NO: 2450673 - DNA, 25 bp, Homo sapien
gcggtccccgtgaatctctgaaaat

SEQ ID NO: 2450674 - DNA, 25 bp, Homo sapien
acctgagaacaaagcttggtcctca

SEQ ID NO: 2450675 - DNA, 25 bp, Homo sapien
aacctgagaacaaagcttggtcctc

SEQ ID NO: 2450676 - DNA, 25 bp, Homo sapien
gaggagaaggagatttgggtcctcc

SEQ ID NO: 2450677 - DNA, 25 bp, Homo sapien
tgttccttagccacagagggtctcc

SEQ ID NO: 2450678 - DNA, 25 bp, Homo sapien
cccaggtgttccttagccacagagg

SEQ ID NO: 2450679 - DNA, 25 bp, Homo sapien
tgaatcagaatctccgctacactcc

SEQ ID NO: 2450680 - DNA, 25 bp, Homo sapien
tatcaagtttagatctccatcctgg

SEQ ID NO: 2450681 - DNA, 25 bp, Homo sapien
taattcaccactgaacagtatcaag

SEQ ID NO: 2450682 - DNA, 25 bp, Homo sapien
tctccgctacactccgagttgtgga

SEQ ID NO: 2450683 - DNA, 25 bp, Homo sapien
gcaaagaccctcagcctgattcagg

SEQ ID NO: 2450684 - DNA, 25 bp, Homo sapien
gatttgtcacccaactatctctggg

SEQ ID NO: 2450685 - DNA, 25 bp, Homo sapien
cagcagttggtgacgtgagctttgc

SEQ ID NO: 2450686 - DNA, 25 bp, Homo sapien
ccccaacctggaggtgatttgtcac

SEQ ID NO: 2450687 - DNA, 25 bp, Homo sapien
tgcccttgcttctggacggtgttca

SEQ ID NO: 2450688 - DNA, 25 bp, Homo sapien
ggctgcccttgcttctggacggtgt

SEQ ID NO: 2450689 - DNA, 25 bp, Homo sapien
cagaggctgcccttgcttctggacg

SEQ ID NO: 2450690 - DNA, 25 bp, Homo sapien
gaggctgcccttgcttctggacggt

SEQ ID NO: 2450691 - DNA, 25 bp, Homo sapien
agcacagtgggaatccccaatgctg

SEQ ID NO: 2450692 - DNA, 25 bp, Homo sapien
cagcacagtgggaatccccaatgct

SEQ ID NO: 2450693 - DNA, 25 bp, Homo sapien
actcacctaatacagagcaggccac

SEQ ID NO: 2450694 - DNA, 25 bp, Homo sapien
gcacactctccaagttgccctcaca

SEQ ID NO: 2450695 - DNA, 25 bp, Homo sapien
tttcctgaacactcacctaatacag

SEQ ID NO: 2450696 - DNA, 25 bp, Homo sapien
gttgccctcacaccagttactgcat

SEQ ID NO: 2450697 - DNA, 25 bp, Homo sapien
tgctttataaatggggtggagctgc

SEQ ID NO: 2450698 - DNA, 25 bp, Homo sapien
accacagtgctttataaatggggtg

SEQ ID NO: 2450699 - DNA, 25 bp, Homo sapien
gcgaggcaccactcagcacatgccc

SEQ ID NO: 2450700 - DNA, 25 bp, Homo sapien
ctgcgaggcaccactcagcacatgc

SEQ ID NO: 2450701 - DNA, 25 bp, Homo sapien
gcctgtgaacttcccgagggcagtg

SEQ ID NO: 2450702 - DNA, 25 bp, Homo sapien
ccagcttccacataagcctgtgaac

SEQ ID NO: 2450703 - DNA, 25 bp, Homo sapien
cagcttccacataagcctgtgaact

SEQ ID NO: 2450704 - DNA, 25 bp, Homo sapien
aaggcagtcagcctgctcttgggat

SEQ ID NO: 2450705 - DNA, 25 bp, Homo sapien
aggcagtcagcctgctcttgggata

SEQ ID NO: 2450706 - DNA, 25 bp, Homo sapien
agcagtgtctgtccgttcttgcagc

SEQ ID NO: 2450707 - DNA, 25 bp, Homo sapien
cctttcctagaatggagcgtgcagc

SEQ ID NO: 2450708 - DNA, 25 bp, Homo sapien
ttcctagaatggagcgtgcagcctg

SEQ ID NO: 2450709 - DNA, 25 bp, Homo sapien
ctagaatggagcgtgcagcctggaa

SEQ ID NO: 2450710 - DNA, 25 bp, Homo sapien
tagaatggagcgtgcagcctggaac

SEQ ID NO: 2450711 - DNA, 25 bp, Homo sapien
accccatttgcaactccagatggta

SEQ ID NO: 2450712 - DNA, 25 bp, Homo sapien
cccggatgctggagcgtgaggcctg

SEQ ID NO: 2450713 - DNA, 25 bp, Homo sapien
actccagatggtacaccgatagccc

SEQ ID NO: 2450714 - DNA, 25 bp, Homo sapien
ctgggtgtcaggaagtgcttgggtg

SEQ ID NO: 2450715 - DNA, 25 bp, Homo sapien
gcaacagatggcactttctgaactc

SEQ ID NO: 2450716 - DNA, 25 bp, Homo sapien
cccagaaaggtggacgagggtggca

SEQ ID NO: 2450717 - DNA, 25 bp, Homo sapien
agcagggtatccatgcaacagatgg

SEQ ID NO: 2450718 - DNA, 25 bp, Homo sapien
aataaagacccatccaactgttctg

SEQ ID NO: 2450719 - DNA, 25 bp, Homo sapien
gcctcagggcctcactctccaaggt

SEQ ID NO: 2450720 - DNA, 25 bp, Homo sapien
gtctcgcctcagggcctcactctcc

SEQ ID NO: 2450721 - DNA, 25 bp, Homo sapien
tcagggcctcactctccaaggtcca

SEQ ID NO: 2450722 - DNA, 25 bp, Homo sapien
agggcctcactctccaaggtccagc

SEQ ID NO: 2450723 - DNA, 25 bp, Homo sapien
cttgtccttcccctgtgacagagac

SEQ ID NO: 2450724 - DNA, 25 bp, Homo sapien
cagacacaggtgcagatgcagatgc

SEQ ID NO: 2450725 - DNA, 25 bp, Homo sapien
ttcccctgtgacagagactcccaag

SEQ ID NO: 2450726 - DNA, 25 bp, Homo sapien
gtgcagatgcagatgcaggccagga

SEQ ID NO: 2450727 - DNA, 25 bp, Homo sapien
ggcaggtgaaggttctagaccttgg

SEQ ID NO: 2450728 - DNA, 25 bp, Homo sapien
aggcaggtgaaggttctagaccttg

SEQ ID NO: 2450729 - DNA, 25 bp, Homo sapien
caggtgaaggttctagaccttggcc

SEQ ID NO: 2450730 - DNA, 25 bp, Homo sapien
ctggggcagaccagtggcaatcgat

SEQ ID NO: 2450731 - DNA, 25 bp, Homo sapien
tggggcagaccagtggcaatcgatc

SEQ ID NO: 2450732 - DNA, 25 bp, Homo sapien
ctggtgaagaggagccaggggctgg

SEQ ID NO: 2450733 - DNA, 25 bp, Homo sapien
aggagccaggggctggagccctgtc

SEQ ID NO: 2450734 - DNA, 25 bp, Homo sapien
gagccaggggctggagccctgtccc

SEQ ID NO: 2450735 - DNA, 25 bp, Homo sapien
gccaggggctggagccctgtcccag

SEQ ID NO: 2450736 - DNA, 25 bp, Homo sapien
gtcctggcatagctgcttcaatcct

SEQ ID NO: 2450737 - DNA, 25 bp, Homo sapien
ctgctacactgtcctggcatagctg

SEQ ID NO: 2450738 - DNA, 25 bp, Homo sapien
gatgcacttatgtgtgccgccagga

SEQ ID NO: 2450739 - DNA, 25 bp, Homo sapien
gcaagatgcacttatgtgtgccgcc

SEQ ID NO: 2450740 - DNA, 25 bp, Homo sapien
aagatgcacttatgtgtgccgccag

SEQ ID NO: 2450741 - DNA, 25 bp, Homo sapien
ccgcaagatgcacttatgtgtgccg

SEQ ID NO: 2450742 - DNA, 25 bp, Homo sapien
attgtcagatggcacgagcactgcc

SEQ ID NO: 2450743 - DNA, 25 bp, Homo sapien
aattgtcagatggcacgagcactgc

SEQ ID NO: 2450744 - DNA, 25 bp, Homo sapien
aagtcagagggcgggtccagcttaa

SEQ ID NO: 2450745 - DNA, 25 bp, Homo sapien
ctgcaagtcagagggcgggtccagc

SEQ ID NO: 2450746 - DNA, 25 bp, Homo sapien
tgcaagtcagagggcgggtccagct

SEQ ID NO: 2450747 - DNA, 25 bp, Homo sapien
caagtcagagggcgggtccagctta

SEQ ID NO: 2450748 - DNA, 25 bp, Homo sapien
ccaggtcaggatgcagtggccagaa

SEQ ID NO: 2450749 - DNA, 25 bp, Homo sapien
cattggctccaaggcaggactgatg

SEQ ID NO: 2450750 - DNA, 25 bp, Homo sapien
tgagaagtgtggtcattggctccaa

SEQ ID NO: 2450751 - DNA, 25 bp, Homo sapien
tgcagtggccagaactgatgttgct

SEQ ID NO: 2450752 - DNA, 25 bp, Homo sapien
cctgtataacgctcctcctctacca

SEQ ID NO: 2450753 - DNA, 25 bp, Homo sapien
ggcctgtataacgctcctcctctac

SEQ ID NO: 2450754 - DNA, 25 bp, Homo sapien
gcctgtataacgctcctcctctacc

SEQ ID NO: 2450755 - DNA, 25 bp, Homo sapien
cttgtctctggggagcctggaagca

SEQ ID NO: 2450756 - DNA, 25 bp, Homo sapien
tctctggggagcctggaagcacaca

SEQ ID NO: 2450757 - DNA, 25 bp, Homo sapien
gggagcctggaagcacacaggctgg

SEQ ID NO: 2450758 - DNA, 25 bp, Homo sapien
tggggagcctggaagcacacaggct

SEQ ID NO: 2450759 - DNA, 25 bp, Homo sapien
caaggtgggtcataaagtccctggg

SEQ ID NO: 2450760 - DNA, 25 bp, Homo sapien
tcataaagtccctgggccatctcag

SEQ ID NO: 2450761 - DNA, 25 bp, Homo sapien
ggtgggtcataaagtccctgggcca

SEQ ID NO: 2450762 - DNA, 25 bp, Homo sapien
gggtcataaagtccctgggccatct

SEQ ID NO: 2450763 - DNA, 25 bp, Homo sapien
caaaggtgcgccctttagtgccctg

SEQ ID NO: 2450764 - DNA, 25 bp, Homo sapien
cttgtgtgaaccacactcctgggcc

SEQ ID NO: 2450765 - DNA, 25 bp, Homo sapien
ctttagtgccctgggccaaagtgga

SEQ ID NO: 2450766 - DNA, 25 bp, Homo sapien
gctgaaggaccttgtgatgggcctt

SEQ ID NO: 2450767 - DNA, 25 bp, Homo sapien
tgggcgacagcttgaacaggaggta

SEQ ID NO: 2450768 - DNA, 25 bp, Homo sapien
gcgacagcttgaacaggaggtaggt

SEQ ID NO: 2450769 - DNA, 25 bp, Homo sapien
ggcgacagcttgaacaggaggtagg

SEQ ID NO: 2450770 - DNA, 25 bp, Homo sapien
ctgggcgacagcttgaacaggaggt

SEQ ID NO: 2450771 - DNA, 25 bp, Homo sapien
agaacatcgctggagagggcacgtt

SEQ ID NO: 2450772 - DNA, 25 bp, Homo sapien
cacgttctggtagaagattctcttc

SEQ ID NO: 2450773 - DNA, 25 bp, Homo sapien
gagggcacgttctggtagaagattc

SEQ ID NO: 2450774 - DNA, 25 bp, Homo sapien
ctggaagaacatcgctggagagggc

SEQ ID NO: 2450775 - DNA, 25 bp, Homo sapien
gacagacaccttcgcagaaggagga

SEQ ID NO: 2450776 - DNA, 25 bp, Homo sapien
cagacaccttcgcagaaggaggagg

SEQ ID NO: 2450777 - DNA, 25 bp, Homo sapien
aggacagacaccttcgcagaaggag

SEQ ID NO: 2450778 - DNA, 25 bp, Homo sapien
agacaccttcgcagaaggaggaggt

SEQ ID NO: 2450779 - DNA, 25 bp, Homo sapien
tcaacagcacaccggccccgtgggc

SEQ ID NO: 2450780 - DNA, 25 bp, Homo sapien
caacagcacaccggccccgtgggcc

SEQ ID NO: 2450781 - DNA, 25 bp, Homo sapien
ctctgagctcaggttccccgggagc

SEQ ID NO: 2450782 - DNA, 25 bp, Homo sapien
tctgagctcaggttccccgggagcc

SEQ ID NO: 2450783 - DNA, 25 bp, Homo sapien
ctgagctcaggttccccgggagcct

SEQ ID NO: 2450784 - DNA, 25 bp, Homo sapien
tgagctcaggttccccgggagcctg

SEQ ID NO: 2450785 - DNA, 25 bp, Homo sapien
atagcagcccaaggcacagtagttg

SEQ ID NO: 2450786 - DNA, 25 bp, Homo sapien
tgggggagccggcctagtcagggac

SEQ ID NO: 2450787 - DNA, 25 bp, Homo sapien
gcagcccaaggcacagtagttgttg

SEQ ID NO: 2450788 - DNA, 25 bp, Homo sapien
catagcagcccaaggcacagtagtt

SEQ ID NO: 2450789 - DNA, 25 bp, Homo sapien
cttctcaggaggttcagtctcagac

SEQ ID NO: 2450790 - DNA, 25 bp, Homo sapien
cagacaagggctccagaaacttcag

SEQ ID NO: 2450791 - DNA, 25 bp, Homo sapien
aaatggacatgatgcatctggcgag

SEQ ID NO: 2450792 - DNA, 25 bp, Homo sapien
catgatgcatctggcgagtcaggga

SEQ ID NO: 2450793 - DNA, 25 bp, Homo sapien
tctcagagaggtcagggataaagaa

SEQ ID NO: 2450794 - DNA, 25 bp, Homo sapien
atgagggcagaacagctgagagacc

SEQ ID NO: 2450795 - DNA, 25 bp, Homo sapien
gggtatgagggcagaacagctgaga

SEQ ID NO: 2450796 - DNA, 25 bp, Homo sapien
ttaagggtatgagggcagaacagct

SEQ ID NO: 2450797 - DNA, 25 bp, Homo sapien
ctttaagggtatgagggcagaacag

SEQ ID NO: 2450798 - DNA, 25 bp, Homo sapien
ctgtgtccactgggcccaggctggc

SEQ ID NO: 2450799 - DNA, 25 bp, Homo sapien
tgtgtccactgggcccaggctggcc

SEQ ID NO: 2450800 - DNA, 25 bp, Homo sapien
gagcctacaccatgctatctctaga

SEQ ID NO: 2450801 - DNA, 25 bp, Homo sapien
tgctatctctagagcccggaaagcc

SEQ ID NO: 2450802 - DNA, 25 bp, Homo sapien
ctctagaaaggtgcctcagtaaggc

SEQ ID NO: 2450803 - DNA, 25 bp, Homo sapien
ggaacagccatcaagccccttttaa

SEQ ID NO: 2450804 - DNA, 25 bp, Homo sapien
gactgtctggaagctccaggctcag

SEQ ID NO: 2450805 - DNA, 25 bp, Homo sapien
ctgactgtctggaagctccaggctc

SEQ ID NO: 2450806 - DNA, 25 bp, Homo sapien
cagcactgactgtctggaagctcca

SEQ ID NO: 2450807 - DNA, 25 bp, Homo sapien
gcactgactgtctggaagctccagg

SEQ ID NO: 2450808 - DNA, 25 bp, Homo sapien
gctcctccacaagcccaccccatga

SEQ ID NO: 2450809 - DNA, 25 bp, Homo sapien
gtgagacaacaaatctctgtggttc

SEQ ID NO: 2450810 - DNA, 25 bp, Homo sapien
gtggttctaagctaaccattttgtg

SEQ ID NO: 2450811 - DNA, 25 bp, Homo sapien
ttctaagctaaccattttgtggcac

SEQ ID NO: 2450812 - DNA, 25 bp, Homo sapien
ccatgagaacggcaaactcacttgg

SEQ ID NO: 2450813 - DNA, 25 bp, Homo sapien
gaaaggggcagtaatttccagctgt

SEQ ID NO: 2450814 - DNA, 25 bp, Homo sapien
ggcaaactcacttggcaccagtggg

SEQ ID NO: 2450815 - DNA, 25 bp, Homo sapien
gggcagtaatttccagctgttacca

SEQ ID NO: 2450816 - DNA, 25 bp, Homo sapien
aaagatacattctggggcctgcctc

SEQ ID NO: 2450817 - DNA, 25 bp, Homo sapien
tctgctgaggctccccacaaaaccc

SEQ ID NO: 2450818 - DNA, 25 bp, Homo sapien
tcccactctctggatgctaaagata

SEQ ID NO: 2450819 - DNA, 25 bp, Homo sapien
cactctctggatgctaaagatacat

SEQ ID NO: 2450820 - DNA, 25 bp, Homo sapien
agatgccctcgtgaggtcggggacc

SEQ ID NO: 2450821 - DNA, 25 bp, Homo sapien
gagatgccctcgtgaggtcggggac

SEQ ID NO: 2450822 - DNA, 25 bp, Homo sapien
agagatgccctcgtgaggtcgggga

SEQ ID NO: 2450823 - DNA, 25 bp, Homo sapien
cagagatgccctcgtgaggtcgggg

SEQ ID NO: 2450824 - DNA, 25 bp, Homo sapien
acgtccgcgatgaggacatctctgg

SEQ ID NO: 2450825 - DNA, 25 bp, Homo sapien
gccacgtccgcgatgaggacatctc

SEQ ID NO: 2450826 - DNA, 25 bp, Homo sapien
tggggctgcatctccgggacacctg

SEQ ID NO: 2450827 - DNA, 25 bp, Homo sapien
cacgtccgcgatgaggacatctctg

SEQ ID NO: 2450828 - DNA, 25 bp, Homo sapien
ccaggaggggccatggcttcgagac

SEQ ID NO: 2450829 - DNA, 25 bp, Homo sapien
aggaggggccatggcttcgagacac

SEQ ID NO: 2450830 - DNA, 25 bp, Homo sapien
caggaggggccatggcttcgagaca

SEQ ID NO: 2450831 - DNA, 25 bp, Homo sapien
cagtagaactgcgtctgatccgtac

SEQ ID NO: 2450832 - DNA, 25 bp, Homo sapien
ctgatccgtacagcggcatccctgg

SEQ ID NO: 2450833 - DNA, 25 bp, Homo sapien
ccggagcgccacagtagaactgcgt

SEQ ID NO: 2450834 - DNA, 25 bp, Homo sapien
aggactgtgaggacggagttttctc

SEQ ID NO: 2450835 - DNA, 25 bp, Homo sapien
cggctgccattagggggcccggcca

SEQ ID NO: 2450836 - DNA, 25 bp, Homo sapien
tccacggctgccattagggggcccg

SEQ ID NO: 2450837 - DNA, 25 bp, Homo sapien
gctgccattagggggcccggccaaa

SEQ ID NO: 2450838 - DNA, 25 bp, Homo sapien
ctccacggctgccattagggggccc

SEQ ID NO: 2450839 - DNA, 25 bp, Homo sapien
aaaatcacggcatggaaaaatccaa

SEQ ID NO: 2450840 - DNA, 25 bp, Homo sapien
cactcaagcggcttaagtgttccat

SEQ ID NO: 2450841 - DNA, 25 bp, Homo sapien
gggtctgccctgattactcctggct

SEQ ID NO: 2450842 - DNA, 25 bp, Homo sapien
tccaccaacgttagaaggccttggc

SEQ ID NO: 2450843 - DNA, 25 bp, Homo sapien
tagaatccgacccaataagccaaag

SEQ ID NO: 2450844 - DNA, 25 bp, Homo sapien
agggccacactccacgtgcagagca

SEQ ID NO: 2450845 - DNA, 25 bp, Homo sapien
gcctcagcattcaccgggcacgagc

SEQ ID NO: 2450846 - DNA, 25 bp, Homo sapien
aaggcagaggcgtgactggggttca

SEQ ID NO: 2450847 - DNA, 25 bp, Homo sapien
ttcaccgggcacgagcgagcctgtg

SEQ ID NO: 2450848 - DNA, 25 bp, Homo sapien
tgttccccagatgtgccaagtgcat

SEQ ID NO: 2450849 - DNA, 25 bp, Homo sapien
tccatgttctttggccgcagcaagg

SEQ ID NO: 2450850 - DNA, 25 bp, Homo sapien
caagtgtctgatgctttaaggcaca

SEQ ID NO: 2450851 - DNA, 25 bp, Homo sapien
caaagttaactctgatgcgtgtgta

SEQ ID NO: 2450852 - DNA, 25 bp, Homo sapien
tccagggggcctctacaaggataat

SEQ ID NO: 2450853 - DNA, 25 bp, Homo sapien
atccagggggcctctacaaggataa

SEQ ID NO: 2450854 - DNA, 25 bp, Homo sapien
ctgccatggagaagatcacagaggc

SEQ ID NO: 2450855 - DNA, 25 bp, Homo sapien
tcctgcttctaacagcagagctgcc

SEQ ID NO: 2450856 - DNA, 25 bp, Homo sapien
tgcacacctcctgcttctaacagca

SEQ ID NO: 2450857 - DNA, 25 bp, Homo sapien
ccatggagaagatcacagaggctgg

SEQ ID NO: 2450858 - DNA, 25 bp, Homo sapien
aggagaccttctctccaatggcctg

SEQ ID NO: 2450859 - DNA, 25 bp, Homo sapien
gcccttgatcttctcaatcttggcc

SEQ ID NO: 2450860 - DNA, 25 bp, Homo sapien
tgggccaaggagaccttctctccaa

SEQ ID NO: 2450861 - DNA, 25 bp, Homo sapien
tcaatcttggcctgggccaaggaga

SEQ ID NO: 2450862 - DNA, 25 bp, Homo sapien
aggctcagagggctaggattgcttg

SEQ ID NO: 2450863 - DNA, 25 bp, Homo sapien
aatggagggactgcccagtagcctc

SEQ ID NO: 2450864 - DNA, 25 bp, Homo sapien
agttggaagcctgggcgagaagaaa

SEQ ID NO: 2450865 - DNA, 25 bp, Homo sapien
gaaatggagggactgcccagtagcc

SEQ ID NO: 2450866 - DNA, 25 bp, Homo sapien
cagggcccgctcgtccagggggcgg

SEQ ID NO: 2450867 - DNA, 25 bp, Homo sapien
ggagccatattcctgcaggcgctct

SEQ ID NO: 2450868 - DNA, 25 bp, Homo sapien
agggtcctgggcgcccgtgaagatg

SEQ ID NO: 2450869 - DNA, 25 bp, Homo sapien
cggtgcttgctctggatcctgtggc

SEQ ID NO: 2450870 - DNA, 25 bp, Homo sapien
agtccctcttctgcatcgtcctcgg

SEQ ID NO: 2450871 - DNA, 25 bp, Homo sapien
ttggtgctcacgcacacaggaaagt

SEQ ID NO: 2450872 - DNA, 25 bp, Homo sapien
tggtgctcacgcacacaggaaagtc

SEQ ID NO: 2450873 - DNA, 25 bp, Homo sapien
aaggagctgacagagctgatgttgc

SEQ ID NO: 2450874 - DNA, 25 bp, Homo sapien
ctgggtccccactaagccaggccgg

SEQ ID NO: 2450875 - DNA, 25 bp, Homo sapien
gccctgggtccccactaagccaggc

SEQ ID NO: 2450876 - DNA, 25 bp, Homo sapien
tgccctgggtccccactaagccagg

SEQ ID NO: 2450877 - DNA, 25 bp, Homo sapien
tgagcccatgttcctctcccacatc

SEQ ID NO: 2450878 - DNA, 25 bp, Homo sapien
gtcaggcaagctgacacccgctgtc

SEQ ID NO: 2450879 - DNA, 25 bp, Homo sapien
acatgggggtcaggcaagctgacac

SEQ ID NO: 2450880 - DNA, 25 bp, Homo sapien
ggggtcaggcaagctgacacccgct

SEQ ID NO: 2450881 - DNA, 25 bp, Homo sapien
gatggacaagggggcatcaaacagc

SEQ ID NO: 2450882 - DNA, 25 bp, Homo sapien
atggacaagggggcatcaaacagct

SEQ ID NO: 2450883 - DNA, 25 bp, Homo sapien
tgatggacaagggggcatcaaacag

SEQ ID NO: 2450884 - DNA, 25 bp, Homo sapien
tggacaagggggcatcaaacagctt

SEQ ID NO: 2450885 - DNA, 25 bp, Homo sapien
ggctcggctacctcagtgtggaagg

SEQ ID NO: 2450886 - DNA, 25 bp, Homo sapien
gtggtgttagtaccccatcttgtag

SEQ ID NO: 2450887 - DNA, 25 bp, Homo sapien
ggtggtgttagtaccccatcttgta

SEQ ID NO: 2450888 - DNA, 25 bp, Homo sapien
ctacaggggccgcggttgagggtgg

SEQ ID NO: 2450889 - DNA, 25 bp, Homo sapien
ctgaaggagacgcgctgctgctgcc

SEQ ID NO: 2450890 - DNA, 25 bp, Homo sapien
ctgccgtcgtcctgcctggcgcctt

SEQ ID NO: 2450891 - DNA, 25 bp, Homo sapien
ccgtcgtcctgcctggcgccttggc

SEQ ID NO: 2450892 - DNA, 25 bp, Homo sapien
tgctgctgccgtcgtcctgcctggc

SEQ ID NO: 2450893 - DNA, 25 bp, Homo sapien
gaagtccagagctctacagtttgaa

SEQ ID NO: 2450894 - DNA, 25 bp, Homo sapien
aatccacccgagtgcactgagcacg

SEQ ID NO: 2450895 - DNA, 25 bp, Homo sapien
tgagcacgccagaaatcaggtggcc

SEQ ID NO: 2450896 - DNA, 25 bp, Homo sapien
cctctgccctagaagtgagaagtcc

SEQ ID NO: 2450897 - DNA, 25 bp, Homo sapien
cttctccagctttcgctccttcatg

SEQ ID NO: 2450898 - DNA, 25 bp, Homo sapien
ttctccagctttcgctccttcatgc

SEQ ID NO: 2450899 - DNA, 25 bp, Homo sapien
ggcggatggactctagcagagtggc

SEQ ID NO: 2450900 - DNA, 25 bp, Homo sapien
ccagctttcgctccttcatgctgcg

SEQ ID NO: 2450901 - DNA, 25 bp, Homo sapien
gctcaaaaccatagtgcccagggca

SEQ ID NO: 2450902 - DNA, 25 bp, Homo sapien
gcaaaagcagcgctgggtacaagct

SEQ ID NO: 2450903 - DNA, 25 bp, Homo sapien
tgaccattgccttggaccgctcttg

SEQ ID NO: 2450904 - DNA, 25 bp, Homo sapien
gtgtctgcgttcacagcaggcatca

SEQ ID NO: 2450905 - DNA, 25 bp, Homo sapien
ttgaagagatccgacatcaagtgcc

SEQ ID NO: 2450906 - DNA, 25 bp, Homo sapien
tgaagagatccgacatcaagtgccc

SEQ ID NO: 2450907 - DNA, 25 bp, Homo sapien
aagagatccgacatcaagtgcccac

SEQ ID NO: 2450908 - DNA, 25 bp, Homo sapien
tgttgaagagatccgacatcaagtg

SEQ ID NO: 2450909 - DNA, 25 bp, Homo sapien
cagcccccggagacttaaatacagg

SEQ ID NO: 2450910 - DNA, 25 bp, Homo sapien
ccagcccccggagacttaaatacag

SEQ ID NO: 2450911 - DNA, 25 bp, Homo sapien
cctgtggctgttgcggtgggggcac

SEQ ID NO: 2450912 - DNA, 25 bp, Homo sapien
gcacaggagggatggagtctgacac

SEQ ID NO: 2450913 - DNA, 25 bp, Homo sapien
tgacacgcgggcaaaggctcctccg

SEQ ID NO: 2450914 - DNA, 25 bp, Homo sapien
caggagggatggagtctgacacgcg

SEQ ID NO: 2450915 - DNA, 25 bp, Homo sapien
aagaacacagtggcgcaggctgggt

SEQ ID NO: 2450916 - DNA, 25 bp, Homo sapien
agttctttattgattggtgtgccgt

SEQ ID NO: 2450917 - DNA, 25 bp, Homo sapien
tattgattggtgtgccgttttctct

SEQ ID NO: 2450918 - DNA, 25 bp, Homo sapien
ctttattgattggtgtgccgttttc

SEQ ID NO: 2450919 - DNA, 25 bp, Homo sapien
ctctcaaccacttgagcaaactcca

SEQ ID NO: 2450920 - DNA, 25 bp, Homo sapien
ccccaacaccagcaattgtgccaag

SEQ ID NO: 2450921 - DNA, 25 bp, Homo sapien
accccaacaccagcaattgtgccaa

SEQ ID NO: 2450922 - DNA, 25 bp, Homo sapien
cctccctctcaaccacttgagcaaa

SEQ ID NO: 2450923 - DNA, 25 bp, Homo sapien
acagccttgcctggatttctatctc

SEQ ID NO: 2450924 - DNA, 25 bp, Homo sapien
cttggtgccagttcctccaagttga

SEQ ID NO: 2450925 - DNA, 25 bp, Homo sapien
gccagttcctccaagttgatggcac

SEQ ID NO: 2450926 - DNA, 25 bp, Homo sapien
ggatttctatctccctggcttggtg

SEQ ID NO: 2450927 - DNA, 25 bp, Homo sapien
gagtccagagtgttgccaggaccca

SEQ ID NO: 2450928 - DNA, 25 bp, Homo sapien
gtgtggagtccagagtgttgccagg

SEQ ID NO: 2450929 - DNA, 25 bp, Homo sapien
tggagtccagagtgttgccaggacc

SEQ ID NO: 2450930 - DNA, 25 bp, Homo sapien
gtccagagtgttgccaggacccagg

SEQ ID NO: 2450931 - DNA, 25 bp, Homo sapien
gagccctcgtggaggtcaaagccac

SEQ ID NO: 2450932 - DNA, 25 bp, Homo sapien
ctggagacggtgtttgtcatgggcc

SEQ ID NO: 2450933 - DNA, 25 bp, Homo sapien
ttctcactgccttttgtctgcccag

SEQ ID NO: 2450934 - DNA, 25 bp, Homo sapien
tgctgtgtggaagttcactcctgcc

SEQ ID NO: 2450935 - DNA, 25 bp, Homo sapien
tgcatgaaggctgtcaaccagtcca

SEQ ID NO: 2450936 - DNA, 25 bp, Homo sapien
agtccataggcaagcctggctgcct

SEQ ID NO: 2450937 - DNA, 25 bp, Homo sapien
tgtcaaccagtccataggcaagcct

SEQ ID NO: 2450938 - DNA, 25 bp, Homo sapien
tggagaacctgtgcatgaaggctgt

SEQ ID NO: 2450939 - DNA, 25 bp, Homo sapien
tggagaggcttcgatgcccctccac

SEQ ID NO: 2450940 - DNA, 25 bp, Homo sapien
tagggctctactgggccggcgtctc

SEQ ID NO: 2450941 - DNA, 25 bp, Homo sapien
ctagggctctactgggccggcgtct

SEQ ID NO: 2450942 - DNA, 25 bp, Homo sapien
gtctcctggagaggcttcgatgccc

SEQ ID NO: 2450943 - DNA, 25 bp, Homo sapien
tgactgctcagaccagccggctgga

SEQ ID NO: 2450944 - DNA, 25 bp, Homo sapien
tctgctgccatcggagcccaaagcc

SEQ ID NO: 2450945 - DNA, 25 bp, Homo sapien
ctgtgactgctcagaccagccggct

SEQ ID NO: 2450946 - DNA, 25 bp, Homo sapien
actgctcagaccagccggctggagg

SEQ ID NO: 2450947 - DNA, 25 bp, Homo sapien
gtcttgatctgcaggtgtctgactt

SEQ ID NO: 2450948 - DNA, 25 bp, Homo sapien
tgctgtggtcttgatctgcaggtgt

SEQ ID NO: 2450949 - DNA, 25 bp, Homo sapien
ctgtgccagggtgcaagctgagcac

SEQ ID NO: 2450950 - DNA, 25 bp, Homo sapien
tgtgccagggtgcaagctgagcact

SEQ ID NO: 2450951 - DNA, 25 bp, Homo sapien
tggaagctcagcaaagaacggatct

SEQ ID NO: 2450952 - DNA, 25 bp, Homo sapien
gaaaaagaagtatcctccagtgagc

SEQ ID NO: 2450953 - DNA, 25 bp, Homo sapien
gaacggatctatgcctgcacacagg

SEQ ID NO: 2450954 - DNA, 25 bp, Homo sapien
gagatgaggcctcccgatattgtcc

SEQ ID NO: 2450955 - DNA, 25 bp, Homo sapien
atccgtgcggcaccgcgaaggtacg

SEQ ID NO: 2450956 - DNA, 25 bp, Homo sapien
tgacaaaacattaaaacgagatggg

SEQ ID NO: 2450957 - DNA, 25 bp, Homo sapien
tgtcttccctgcaacgttctcgtgg

SEQ ID NO: 2450958 - DNA, 25 bp, Homo sapien
cgtgggtgccgtattgacaaaacat

SEQ ID NO: 2450959 - DNA, 25 bp, Homo sapien
tcagtcccggatgttggtgaagaca

SEQ ID NO: 2450960 - DNA, 25 bp, Homo sapien
agattatccccggacgttggcgaga

SEQ ID NO: 2450961 - DNA, 25 bp, Homo sapien
tctgcatgtttggtgaatgttgatg

SEQ ID NO: 2450962 - DNA, 25 bp, Homo sapien
aagacaaggtcattctggatgttga

SEQ ID NO: 2450963 - DNA, 25 bp, Homo sapien
cgtcgggttcacagcgggcaataaa

SEQ ID NO: 2450964 - DNA, 25 bp, Homo sapien
ttcttcaaagtcagctcggttgtgg

SEQ ID NO: 2450965 - DNA, 25 bp, Homo sapien
cattcccgcagcagcgtcgggttca

SEQ ID NO: 2450966 - DNA, 25 bp, Homo sapien
taaaggcagccgttcttcaaagtca

SEQ ID NO: 2450967 - DNA, 25 bp, Homo sapien
cccatgctcagtgccattggctcaa

SEQ ID NO: 2450968 - DNA, 25 bp, Homo sapien
aggcccctctggtgacgtgagccac

SEQ ID NO: 2450969 - DNA, 25 bp, Homo sapien
tctggtgacgtgagccacccgggca

SEQ ID NO: 2450970 - DNA, 25 bp, Homo sapien
ccattggctcaaaggtgcagcagga

SEQ ID NO: 2450971 - DNA, 25 bp, Homo sapien
tctgtcgttggcttcaaggtcggcg

SEQ ID NO: 2450972 - DNA, 25 bp, Homo sapien
gaacgcccgtgtggatttgcagacg

SEQ ID NO: 2450973 - DNA, 25 bp, Homo sapien
gcggcgtctgaaccgcctctaaggg

SEQ ID NO: 2450974 - DNA, 25 bp, Homo sapien
ttcttccctgcgtggaaacaacagg

SEQ ID NO: 2450975 - DNA, 25 bp, Homo sapien
gactcagcttcggagacacaattct

SEQ ID NO: 2450976 - DNA, 25 bp, Homo sapien
gtaagactcagcttcggagacacaa

SEQ ID NO: 2450977 - DNA, 25 bp, Homo sapien
ttctctggtaaaggggtaagactca

SEQ ID NO: 2450978 - DNA, 25 bp, Homo sapien
tctcggcaaggacaggggaaaacag

SEQ ID NO: 2450979 - DNA, 25 bp, Homo sapien
gagaccacagtccacatcacaccag

SEQ ID NO: 2450980 - DNA, 25 bp, Homo sapien
gtccctcagcccacgtgatgtcctc

SEQ ID NO: 2450981 - DNA, 25 bp, Homo sapien
gaagggccgggcactgtgacctccg

SEQ ID NO: 2450982 - DNA, 25 bp, Homo sapien
gaggcacggacgacacgtccctcag

SEQ ID NO: 2450983 - DNA, 25 bp, Homo sapien
gggaggagccacttccaccgacgga

SEQ ID NO: 2450984 - DNA, 25 bp, Homo sapien
gtttgctggccaaggcgctcagagc

SEQ ID NO: 2450985 - DNA, 25 bp, Homo sapien
gatcgcaggcgtgggctgcgctggg

SEQ ID NO: 2450986 - DNA, 25 bp, Homo sapien
tgcaggcttgggactgccggcccca

SEQ ID NO: 2450987 - DNA, 25 bp, Homo sapien
aaactacctgggtgcgtgatgggca

SEQ ID NO: 2450988 - DNA, 25 bp, Homo sapien
tccgagtccctggagaagatgacgc

SEQ ID NO: 2450989 - DNA, 25 bp, Homo sapien
gaacctgcagtacgttctggcgcac

SEQ ID NO: 2450990 - DNA, 25 bp, Homo sapien
ggttcacggtgcaccaacatcatcg

SEQ ID NO: 2450991 - DNA, 25 bp, Homo sapien
cctcaagaacgttatggagtccatg

SEQ ID NO: 2450992 - DNA, 25 bp, Homo sapien
gttcaagttcccagccagccaatgg

SEQ ID NO: 2450993 - DNA, 25 bp, Homo sapien
tgctacggtgaaatgaaggtgcccc

SEQ ID NO: 2450994 - DNA, 25 bp, Homo sapien
caggccccgcggagatgaagaattt

SEQ ID NO: 2450995 - DNA, 25 bp, Homo sapien
aatgcagccaagacacctctggcag

SEQ ID NO: 2450996 - DNA, 25 bp, Homo sapien
aatgttaattcaggaggccgggtgc

SEQ ID NO: 2450997 - DNA, 25 bp, Homo sapien
gatagcacgccagaagcatctttag

SEQ ID NO: 2450998 - DNA, 25 bp, Homo sapien
gcagctttcaggatagcacgccaga

SEQ ID NO: 2450999 - DNA, 25 bp, Homo sapien
agtgacactcattccgtctaaaaaa

SEQ ID NO: 2451000 - DNA, 25 bp, Homo sapien
cctgaccgacatggtgaaaatacaa

SEQ ID NO: 2451001 - DNA, 25 bp, Homo sapien
gacagagtgacactcattccgtcta

SEQ ID NO: 2451002 - DNA, 25 bp, Homo sapien
cagagtgacactcattccgtctaaa

SEQ ID NO: 2451003 - DNA, 25 bp, Homo sapien
tcatttccccgacaccaccatggga

SEQ ID NO: 2451004 - DNA, 25 bp, Homo sapien
cccgacaccaccatgggaaacgaga

SEQ ID NO: 2451005 - DNA, 25 bp, Homo sapien
ctacttttgtggaagggttctctgt

SEQ ID NO: 2451006 - DNA, 25 bp, Homo sapien
tgggaaacgagaccatctgtgaaca

SEQ ID NO: 2451007 - DNA, 25 bp, Homo sapien
tggaattgtgtggatgctcaggctt

SEQ ID NO: 2451008 - DNA, 25 bp, Homo sapien
gcaccgagggcccactggaattgtg

SEQ ID NO: 2451009 - DNA, 25 bp, Homo sapien
agacgggtgcagaaccagacaagga

SEQ ID NO: 2451010 - DNA, 25 bp, Homo sapien
gaaacattccgagggaaagcagttc

SEQ ID NO: 2451011 - DNA, 25 bp, Homo sapien
gatgatgaccctcacgtcggccgcc

SEQ ID NO: 2451012 - DNA, 25 bp, Homo sapien
tcatcctggaaagagcttccggaat

SEQ ID NO: 2451013 - DNA, 25 bp, Homo sapien
gcttccggaatttgccgtaggctga

SEQ ID NO: 2451014 - DNA, 25 bp, Homo sapien
tgccgtaggctgagttgctgatgat

SEQ ID NO: 2451015 - DNA, 25 bp, Homo sapien
aactgtggcctccttatacagccag

SEQ ID NO: 2451016 - DNA, 25 bp, Homo sapien
gaactgtggcctccttatacagcca

SEQ ID NO: 2451017 - DNA, 25 bp, Homo sapien
gagcttgctttcttattggtaggga

SEQ ID NO: 2451018 - DNA, 25 bp, Homo sapien
cacggcatccagctggagcttgctt

SEQ ID NO: 2451019 - DNA, 25 bp, Homo sapien
cctgtgccacggcatccagctggag

SEQ ID NO: 2451020 - DNA, 25 bp, Homo sapien
ggagcttgctttcttattggtaggg

SEQ ID NO: 2451021 - DNA, 25 bp, Homo sapien
tacattttggctgtcaagcacagat

SEQ ID NO: 2451022 - DNA, 25 bp, Homo sapien
gaaatgtacattttggctgtcaagc

SEQ ID NO: 2451023 - DNA, 25 bp, Homo sapien
cataattaggcacctgttgtatcca

SEQ ID NO: 2451024 - DNA, 25 bp, Homo sapien
tttcactgtcagcataattaggcac

SEQ ID NO: 2451025 - DNA, 25 bp, Homo sapien
gatgcaaacccattcatctcgtctg

SEQ ID NO: 2451026 - DNA, 25 bp, Homo sapien
tctcaagcgcagattaggcacctct

SEQ ID NO: 2451027 - DNA, 25 bp, Homo sapien
ttgtgcacccacgaagagcccgttt

SEQ ID NO: 2451028 - DNA, 25 bp, Homo sapien
gtcaagcacagattaggcacccgtt

SEQ ID NO: 2451029 - DNA, 25 bp, Homo sapien
cacacggagagtgaggatctgtctc

SEQ ID NO: 2451030 - DNA, 25 bp, Homo sapien
aaaccgccgcatcgagctcagcttt

SEQ ID NO: 2451031 - DNA, 25 bp, Homo sapien
gcagacacgggcacgacgttcggtt

SEQ ID NO: 2451032 - DNA, 25 bp, Homo sapien
atctgtctccccgtcgccttcaaaa

SEQ ID NO: 2451033 - DNA, 25 bp, Homo sapien
tgttgtgaacctccaccatggagtc

SEQ ID NO: 2451034 - DNA, 25 bp, Homo sapien
tgacgtccctcacgtgcaagatgag

SEQ ID NO: 2451035 - DNA, 25 bp, Homo sapien
ggacagaacgctgcatttctggagc

SEQ ID NO: 2451036 - DNA, 25 bp, Homo sapien
ggcacgaggtccaccttgttgtgaa

SEQ ID NO: 2451037 - DNA, 25 bp, Homo sapien
gcagcagctccgcacccccagaccc

SEQ ID NO: 2451038 - DNA, 25 bp, Homo sapien
cagacccacacgcaagggggtgcca

SEQ ID NO: 2451039 - DNA, 25 bp, Homo sapien
ccaaccttccaagccacaggcagca

SEQ ID NO: 2451040 - DNA, 25 bp, Homo sapien
acaggcagcagctccgcacccccag

SEQ ID NO: 2451041 - DNA, 25 bp, Homo sapien
gccgtagcctgaatgtgacaatctc

SEQ ID NO: 2451042 - DNA, 25 bp, Homo sapien
cacttggaaagtctacggtacggat

SEQ ID NO: 2451043 - DNA, 25 bp, Homo sapien
cataatttattgtcgggaggagtcg

SEQ ID NO: 2451044 - DNA, 25 bp, Homo sapien
gaattaagatctctgcggatgcagc

SEQ ID NO: 2451045 - DNA, 25 bp, Homo sapien
tcctatttctacacgggctcacggc

SEQ ID NO: 2451046 - DNA, 25 bp, Homo sapien
aggcagttgttgttccggccccgag

SEQ ID NO: 2451047 - DNA, 25 bp, Homo sapien
tcaggcacataagccgggagaggac

SEQ ID NO: 2451048 - DNA, 25 bp, Homo sapien
ggtgcacccgggaacacgcttatgt

SEQ ID NO: 2451049 - DNA, 25 bp, Homo sapien
atggtgtccacgtacaggacggtca

SEQ ID NO: 2451050 - DNA, 25 bp, Homo sapien
ccacgtcttccagggtggcggagaa

SEQ ID NO: 2451051 - DNA, 25 bp, Homo sapien
tcagtgccttgatcagcgtggtctt

SEQ ID NO: 2451052 - DNA, 25 bp, Homo sapien
ctggatggcggcatcgcccgtcagt

SEQ ID NO: 2451053 - DNA, 25 bp, Homo sapien
tgggacaaagccaccgtcgctgttc

SEQ ID NO: 2451054 - DNA, 25 bp, Homo sapien
gtagatgacatcctcaccttggctg

SEQ ID NO: 2451055 - DNA, 25 bp, Homo sapien
tggatatagatacggcagtggtgcc

SEQ ID NO: 2451056 - DNA, 25 bp, Homo sapien
tcctgggtgagctctcacagcagct

SEQ ID NO: 2451057 - DNA, 25 bp, Homo sapien
tgccctcccccgggcgagtcctcac

SEQ ID NO: 2451058 - DNA, 25 bp, Homo sapien
gcccctcccctgggcgcgtgctcac

SEQ ID NO: 2451059 - DNA, 25 bp, Homo sapien
gagatcacggggaactcccgcctcg

SEQ ID NO: 2451060 - DNA, 25 bp, Homo sapien
ctcttcttgcgaagcctgtccaagg

SEQ ID NO: 2451061 - DNA, 25 bp, Homo sapien
gcagttggtgtaccccaccacggag

SEQ ID NO: 2451062 - DNA, 25 bp, Homo sapien
aggtgcctcttcttgcgaagcctgt

SEQ ID NO: 2451063 - DNA, 25 bp, Homo sapien
gccccgacacgtcctgttccatgag

SEQ ID NO: 2451064 - DNA, 25 bp, Homo sapien
ccacgccgggaaaggcacaagtgcg

SEQ ID NO: 2451065 - DNA, 25 bp, Homo sapien
aagtgcgggcggtgccgcggagggt

SEQ ID NO: 2451066 - DNA, 25 bp, Homo sapien
acgggatctcgcctccgggtgtcca

SEQ ID NO: 2451067 - DNA, 25 bp, Homo sapien
ccgactcctcggtacaggtgggcga

SEQ ID NO: 2451068 - DNA, 25 bp, Homo sapien
tacaggtgggcgacgtcccttttca

SEQ ID NO: 2451069 - DNA, 25 bp, Homo sapien
atgatgtagcgcgagccgactcctc

SEQ ID NO: 2451070 - DNA, 25 bp, Homo sapien
ctgaccccatgatgtagcgcgagcc

SEQ ID NO: 2451071 - DNA, 25 bp, Homo sapien
acactgtgagtgacgcgtgtcccgg

SEQ ID NO: 2451072 - DNA, 25 bp, Homo sapien
tctgcggacgctgtctccctcccgg

SEQ ID NO: 2451073 - DNA, 25 bp, Homo sapien
gtgtgggaacgggagtggctcggtc

SEQ ID NO: 2451074 - DNA, 25 bp, Homo sapien
aggagccgctgttgcggccccgctc

SEQ ID NO: 2451075 - DNA, 25 bp, Homo sapien
tctgagtcataaaggcctcccgctc

SEQ ID NO: 2451076 - DNA, 25 bp, Homo sapien
ccgggagccgtgtcttctctaggaa

SEQ ID NO: 2451077 - DNA, 25 bp, Homo sapien
tctgctgtagccacgcagcagcgtc

SEQ ID NO: 2451078 - DNA, 25 bp, Homo sapien
tcttgccgggtgcgtggccttgtct

SEQ ID NO: 2451079 - DNA, 25 bp, Homo sapien
ctgacccttcgcagacccaggtggg

SEQ ID NO: 2451080 - DNA, 25 bp, Homo sapien
gggtcacgggaccaccctgtgcgtc

SEQ ID NO: 2451081 - DNA, 25 bp, Homo sapien
tccttcacagcgacggctgccggtg

SEQ ID NO: 2451082 - DNA, 25 bp, Homo sapien
gggttgttcccatggtcaccacctg

SEQ ID NO: 2451083 - DNA, 25 bp, Homo sapien
tgtgggaacccgtcccattcacgcg

SEQ ID NO: 2451084 - DNA, 25 bp, Homo sapien
gtttatcattccgtacaaacgcact

SEQ ID NO: 2451085 - DNA, 25 bp, Homo sapien
gttgtgcgcacacggaccctttcca

SEQ ID NO: 2451086 - DNA, 25 bp, Homo sapien
gcggcaatcaacacgcttctgtgaa

SEQ ID NO: 2451087 - DNA, 25 bp, Homo sapien
cccggtggtggcacgtggggagcgg

SEQ ID NO: 2451088 - DNA, 25 bp, Homo sapien
gccccgcggcggcgttctcgcgggc

SEQ ID NO: 2451089 - DNA, 25 bp, Homo sapien
tactcgtacaggtccacggcgccca

SEQ ID NO: 2451090 - DNA, 25 bp, Homo sapien
actcgtacaggtccacggcgcccag

SEQ ID NO: 2451091 - DNA, 25 bp, Homo sapien
ggatggcgaagacgtggccagcagc

SEQ ID NO: 2451092 - DNA, 25 bp, Homo sapien
gaggacgccggctccacgaatgctc

SEQ ID NO: 2451093 - DNA, 25 bp, Homo sapien
tggcgaagacgtggccagcagcgcg

SEQ ID NO: 2451094 - DNA, 25 bp, Homo sapien
cctggctgaggacgccggctccacg

SEQ ID NO: 2451095 - DNA, 25 bp, Homo sapien
tacaactgggtcgtggtgtccacac

SEQ ID NO: 2451096 - DNA, 25 bp, Homo sapien
ccccgggcgtgagctacacacagag

SEQ ID NO: 2451097 - DNA, 25 bp, Homo sapien
cgagctgcacgggacctgtgtttac

SEQ ID NO: 2451098 - DNA, 25 bp, Homo sapien
caggaccacagtttagacacattct

SEQ ID NO: 2451099 - DNA, 25 bp, Homo sapien
tggcactgagctccccgcggtcacc

SEQ ID NO: 2451100 - DNA, 25 bp, Homo sapien
tgaaggcagtcgaccccagcgtgct

SEQ ID NO: 2451101 - DNA, 25 bp, Homo sapien
ctggctgtgccgcagacacaaagcc

SEQ ID NO: 2451102 - DNA, 25 bp, Homo sapien
caaagccgggcagccgtgggggtgg

SEQ ID NO: 2451103 - DNA, 25 bp, Homo sapien
ggctgtgccgcagacacaaagccgg

SEQ ID NO: 2451104 - DNA, 25 bp, Homo sapien
gagcaggggttaaaatgcacgtcca

SEQ ID NO: 2451105 - DNA, 25 bp, Homo sapien
tgccttagggtgtccgacaggagaa

SEQ ID NO: 2451106 - DNA, 25 bp, Homo sapien
aaaatgcacgtccatggaacccatg

SEQ ID NO: 2451107 - DNA, 25 bp, Homo sapien
aacaatgaccacgaggaggacggac

SEQ ID NO: 2451108 - DNA, 25 bp, Homo sapien
tgcgtgaggggagacgtcccccagg

SEQ ID NO: 2451109 - DNA, 25 bp, Homo sapien
gctgcgtgaggggagacgtccccca

SEQ ID NO: 2451110 - DNA, 25 bp, Homo sapien
gcgtgaggggagacgtcccccagga

SEQ ID NO: 2451111 - DNA, 25 bp, Homo sapien
cgctgcgtgaggggagacgtccccc

SEQ ID NO: 2451112 - DNA, 25 bp, Homo sapien
ggaacggacagacgcgtgcagcagt

SEQ ID NO: 2451113 - DNA, 25 bp, Homo sapien
ggagcccgcacacggcacagtcacg

SEQ ID NO: 2451114 - DNA, 25 bp, Homo sapien
ctctgccgcgggaacggacagacgc

SEQ ID NO: 2451115 - DNA, 25 bp, Homo sapien
cgaggcaacgctgcggcctgcaaag

SEQ ID NO: 2451116 - DNA, 25 bp, Homo sapien
ggctctcccgcagtctcctcggcca

SEQ ID NO: 2451117 - DNA, 25 bp, Homo sapien
agggctctcccgcagtctcctcggc

SEQ ID NO: 2451118 - DNA, 25 bp, Homo sapien
gtcctcccagggctctcccgcagtc

SEQ ID NO: 2451119 - DNA, 25 bp, Homo sapien
tcccagggctctcccgcagtctcct

SEQ ID NO: 2451120 - DNA, 25 bp, Homo sapien
acttctcccagtccgagagctcggg

SEQ ID NO: 2451121 - DNA, 25 bp, Homo sapien
tgtcgtactcctcggccgcgtactt

SEQ ID NO: 2451122 - DNA, 25 bp, Homo sapien
caggatgtcgtactcctcggccgcg

SEQ ID NO: 2451123 - DNA, 25 bp, Homo sapien
gcgtacttctcccagtccgagagct

SEQ ID NO: 2451124 - DNA, 25 bp, Homo sapien
tgtcgaagaagacgttagccagctt

SEQ ID NO: 2451125 - DNA, 25 bp, Homo sapien
tagccagcttgcagcgcttcaggtc

SEQ ID NO: 2451126 - DNA, 25 bp, Homo sapien
ggtcgaggtacttctcgatgttgaa

SEQ ID NO: 2451127 - DNA, 25 bp, Homo sapien
tttctgctcgtggtcgaggtacttc

SEQ ID NO: 2451128 - DNA, 25 bp, Homo sapien
tagaagtactcgagctcgaacatgg

SEQ ID NO: 2451129 - DNA, 25 bp, Homo sapien
ccaggtccagcatctggcagaggca

SEQ ID NO: 2451130 - DNA, 25 bp, Homo sapien
tcggcactgctcctcgtagaagtac

SEQ ID NO: 2451131 - DNA, 25 bp, Homo sapien
ttcagtcctcggcttgaccaggtcc

SEQ ID NO: 2451132 - DNA, 25 bp, Homo sapien
atcaaaaaccagacaaagtcggcat

SEQ ID NO: 2451133 - DNA, 25 bp, Homo sapien
gacaaagtcggcatagctgatcttc

SEQ ID NO: 2451134 - DNA, 25 bp, Homo sapien
aaccagacaaagtcggcatagctga

SEQ ID NO: 2451135 - DNA, 25 bp, Homo sapien
gtcggcatagctgatcttcccttcc

SEQ ID NO: 2451136 - DNA, 25 bp, Homo sapien
ccaggatggagagacgaagatgcat

SEQ ID NO: 2451137 - DNA, 25 bp, Homo sapien
tcaggagtgcaccttcgttactgct

SEQ ID NO: 2451138 - DNA, 25 bp, Homo sapien
gacttcgcgtgacagtcttgtgcca

SEQ ID NO: 2451139 - DNA, 25 bp, Homo sapien
cactagggattcacgtgacagagac

SEQ ID NO: 2451140 - DNA, 25 bp, Homo sapien
cgtcaggcgcctgagccgtacgtac

SEQ ID NO: 2451141 - DNA, 25 bp, Homo sapien
atggctgccgtcaggcgcctgagcc

SEQ ID NO: 2451142 - DNA, 25 bp, Homo sapien
gcaatggctgccgtcaggcgcctga

SEQ ID NO: 2451143 - DNA, 25 bp, Homo sapien
tcctcgcaggggcaatggctgccgt

SEQ ID NO: 2451144 - DNA, 25 bp, Homo sapien
tgtgactgctcctgagaagatcctg

SEQ ID NO: 2451145 - DNA, 25 bp, Homo sapien
gtgtgactgctcctgagaagatcct

SEQ ID NO: 2451146 - DNA, 25 bp, Homo sapien
cgtgtgactgctcctgagaagatcc

SEQ ID NO: 2451147 - DNA, 25 bp, Homo sapien
ggaccgaaaagctgagaggacgcct

SEQ ID NO: 2451148 - DNA, 25 bp, Homo sapien
gatgcccctgcacggcccatcctag

SEQ ID NO: 2451149 - DNA, 25 bp, Homo sapien
aaaagctgagaggacgcctgggtct

SEQ ID NO: 2451150 - DNA, 25 bp, Homo sapien
aaaggaatgcggttgatgggcagcc

SEQ ID NO: 2451151 - DNA, 25 bp, Homo sapien
gagcagaatattcaggcctcaaagg

SEQ ID NO: 2451152 - DNA, 25 bp, Homo sapien
gctttcccgtcgagcagagccaagt

SEQ ID NO: 2451153 - DNA, 25 bp, Homo sapien
gaaatccacagagcgcaaagctgac

SEQ ID NO: 2451154 - DNA, 25 bp, Homo sapien
caagaccgacttgtaaagagcagaa

SEQ ID NO: 2451155 - DNA, 25 bp, Homo sapien
gtcagcttgggccacgagaaggtcc

SEQ ID NO: 2451156 - DNA, 25 bp, Homo sapien
ttcaggccgcagtgcgtgagaaaca

SEQ ID NO: 2451157 - DNA, 25 bp, Homo sapien
agtgcgtgagaaacagcgcagcccg

SEQ ID NO: 2451158 - DNA, 25 bp, Homo sapien
cggtgtccctgggacgcacgagcca

SEQ ID NO: 2451159 - DNA, 25 bp, Homo sapien
tcgtccgcgtcgatgagcaggtcgt

SEQ ID NO: 2451160 - DNA, 25 bp, Homo sapien
cagtagatgacgtagaaatgctcgt

SEQ ID NO: 2451161 - DNA, 25 bp, Homo sapien
ggtcagctggttgatgtccgcctcc

SEQ ID NO: 2451162 - DNA, 25 bp, Homo sapien
tcgtacgagaagaattcggtcagct

SEQ ID NO: 2451163 - DNA, 25 bp, Homo sapien
agcgcggggcctctgcggggatgcc

SEQ ID NO: 2451164 - DNA, 25 bp, Homo sapien
gcggggatgccccaagtccgcctgg

SEQ ID NO: 2451165 - DNA, 25 bp, Homo sapien
tgcggggatgccccaagtccgcctg

SEQ ID NO: 2451166 - DNA, 25 bp, Homo sapien
cggcgtagaagatccgctggatgac

SEQ ID NO: 2451167 - DNA, 25 bp, Homo sapien
cgcagctcggcgcaggtgatcctgc

SEQ ID NO: 2451168 - DNA, 25 bp, Homo sapien
tgatcctgccggaccaggaccggtt

SEQ ID NO: 2451169 - DNA, 25 bp, Homo sapien
caggaccggttcacggcgtagaaga

SEQ ID NO: 2451170 - DNA, 25 bp, Homo sapien
tcgccccgcacggagaccgggagcc

SEQ ID NO: 2451171 - DNA, 25 bp, Homo sapien
agtgcggtgggtgcgcagagacccc

SEQ ID NO: 2451172 - DNA, 25 bp, Homo sapien
tctggccggggacgccccggagcta

SEQ ID NO: 2451173 - DNA, 25 bp, Homo sapien
tgcgggggcgctgtcagtgcggtgg

SEQ ID NO: 2451174 - DNA, 25 bp, Homo sapien
cgcgccccgcgctggaaccgacggc

SEQ ID NO: 2451175 - DNA, 25 bp, Homo sapien
gcgccccgcgctggaaccgacggcc

SEQ ID NO: 2451176 - DNA, 25 bp, Homo sapien
cttcaggaacgacagccccgggtgc

SEQ ID NO: 2451177 - DNA, 25 bp, Homo sapien
gtgatgtagcgcgagtggaactcgg

SEQ ID NO: 2451178 - DNA, 25 bp, Homo sapien
gcgagtggaactcggacgcctcctt

SEQ ID NO: 2451179 - DNA, 25 bp, Homo sapien
agccccgggtgcgtgttcaccacgt

SEQ ID NO: 2451180 - DNA, 25 bp, Homo sapien
ctgcgggtgggaagacacgaggcgc

SEQ ID NO: 2451181 - DNA, 25 bp, Homo sapien
agacgccggccctcccgtgaggtgt

SEQ ID NO: 2451182 - DNA, 25 bp, Homo sapien
acacgaggcgcgtggtgtagacgcc

SEQ ID NO: 2451183 - DNA, 25 bp, Homo sapien
tcccgtgaggtgtgcggtgtggacg

SEQ ID NO: 2451184 - DNA, 25 bp, Homo sapien
catgagcagatggacgaacttggcc

SEQ ID NO: 2451185 - DNA, 25 bp, Homo sapien
caccaggtagttgcagccggggctc

SEQ ID NO: 2451186 - DNA, 25 bp, Homo sapien
gatggacgaacttggccgcgtcgtc

SEQ ID NO: 2451187 - DNA, 25 bp, Homo sapien
ttggccgcgtcgtcgtggcagttct

SEQ ID NO: 2451188 - DNA, 25 bp, Homo sapien
ccttccagtagagggggcagccgca

SEQ ID NO: 2451189 - DNA, 25 bp, Homo sapien
ggcgccatagaagagcggccccttc

SEQ ID NO: 2451190 - DNA, 25 bp, Homo sapien
tctccacatggcgacgaacttgtgg

SEQ ID NO: 2451191 - DNA, 25 bp, Homo sapien
aacttgtggacggacacggagcccg

SEQ ID NO: 2451192 - DNA, 25 bp, Homo sapien
agcagggcctggacgccggcgctcc

SEQ ID NO: 2451193 - DNA, 25 bp, Homo sapien
gcagggcctggacgccggcgctcct

SEQ ID NO: 2451194 - DNA, 25 bp, Homo sapien
agcacgctcagcgcggcctgtctgg

SEQ ID NO: 2451195 - DNA, 25 bp, Homo sapien
cgctcagcgcggcctgtctgggcat

SEQ ID NO: 2451196 - DNA, 25 bp, Homo sapien
cacagcacgctcagcgcggcctgtc

SEQ ID NO: 2451197 - DNA, 25 bp, Homo sapien
gcgcctgaccgacgccgcccagaga

SEQ ID NO: 2451198 - DNA, 25 bp, Homo sapien
tctggaaatcaagcggcacgtacta

SEQ ID NO: 2451199 - DNA, 25 bp, Homo sapien
gcactgtaaccagaggcggctgcat

SEQ ID NO: 2451200 - DNA, 25 bp, Homo sapien
tctcatggaatgtgtgggacgcacc

SEQ ID NO: 2451201 - DNA, 25 bp, Homo sapien
ggttcacagccttaaatacacgcgt

SEQ ID NO: 2451202 - DNA, 25 bp, Homo sapien
acgcagcgggaaggcgccgtcgatg

SEQ ID NO: 2451203 - DNA, 25 bp, Homo sapien
ctgccacaccgagatcttccagcct

SEQ ID NO: 2451204 - DNA, 25 bp, Homo sapien
ggcgccgtcgatgaaccaggcacca

SEQ ID NO: 2451205 - DNA, 25 bp, Homo sapien
cgtgaggacgcagcgggaaggcgcc

SEQ ID NO: 2451206 - DNA, 25 bp, Homo sapien
gagcgtctacagtcgcacagggcac

SEQ ID NO: 2451207 - DNA, 25 bp, Homo sapien
ggcagacaaagtcccgagcgtctac

SEQ ID NO: 2451208 - DNA, 25 bp, Homo sapien
gttcagcacgcgttcctcggcgggt

SEQ ID NO: 2451209 - DNA, 25 bp, Homo sapien
aaggcccacgtgatggtgctgctga

SEQ ID NO: 2451210 - DNA, 25 bp, Homo sapien
agggttctgccgccacagcgcaggt

SEQ ID NO: 2451211 - DNA, 25 bp, Homo sapien
ccacagcgcaggtggattaagtcgc

SEQ ID NO: 2451212 - DNA, 25 bp, Homo sapien
cgcaggtggattaagtcgcgacagc

SEQ ID NO: 2451213 - DNA, 25 bp, Homo sapien
ggtggattaagtcgcgacagcgcac

SEQ ID NO: 2451214 - DNA, 25 bp, Homo sapien
tgcagggccgggtcggtgcgtgcag

SEQ ID NO: 2451215 - DNA, 25 bp, Homo sapien
gcctgtggaggtgtctctcggactc

SEQ ID NO: 2451216 - DNA, 25 bp, Homo sapien
tctgcccacagtcacggtgggtgct

SEQ ID NO: 2451217 - DNA, 25 bp, Homo sapien
gggtgctcgagcaccatgctctccg

SEQ ID NO: 2451218 - DNA, 25 bp, Homo sapien
cttagacggccaccaaggccagtgc

SEQ ID NO: 2451219 - DNA, 25 bp, Homo sapien
agcgaggtgacaccgagaactgagt

SEQ ID NO: 2451220 - DNA, 25 bp, Homo sapien
ctgtgcgtggaagcgaggtgacacc

SEQ ID NO: 2451221 - DNA, 25 bp, Homo sapien
accaaggccagtgccgctgtgcgtg

SEQ ID NO: 2451222 - DNA, 25 bp, Homo sapien
atgtaccgtgcaccgaggctctggg

SEQ ID NO: 2451223 - DNA, 25 bp, Homo sapien
acatgtaccgtgcaccgaggctctg

SEQ ID NO: 2451224 - DNA, 25 bp, Homo sapien
gggctcacatgtaccgtgcaccgag

SEQ ID NO: 2451225 - DNA, 25 bp, Homo sapien
ggctcacatgtaccgtgcaccgagg

SEQ ID NO: 2451226 - DNA, 25 bp, Homo sapien
tggagggtaggaggctggagatgcg

SEQ ID NO: 2451227 - DNA, 25 bp, Homo sapien
agatgcgggcacaggtccctggaaa

SEQ ID NO: 2451228 - DNA, 25 bp, Homo sapien
gcacaggtccctggaaacacaacca

SEQ ID NO: 2451229 - DNA, 25 bp, Homo sapien
ggtaggaggctggagatgcgggcac

SEQ ID NO: 2451230 - DNA, 25 bp, Homo sapien
cagacacgcatctctggtgtaggcc

SEQ ID NO: 2451231 - DNA, 25 bp, Homo sapien
ccatctgtgggcgtccaggcggtca

SEQ ID NO: 2451232 - DNA, 25 bp, Homo sapien
gccttgccttggtaacggacagaca

SEQ ID NO: 2451233 - DNA, 25 bp, Homo sapien
taaactgagtgtgctccatctgtgg

SEQ ID NO: 2451234 - DNA, 25 bp, Homo sapien
ttggccaccaggcccatgtcatcca

SEQ ID NO: 2451235 - DNA, 25 bp, Homo sapien
tggccaccaggcccatgtcatccat

SEQ ID NO: 2451236 - DNA, 25 bp, Homo sapien
cttggccaccaggcccatgtcatcc

SEQ ID NO: 2451237 - DNA, 25 bp, Homo sapien
ctgatgacggcatccacgttgacgg

SEQ ID NO: 2451238 - DNA, 25 bp, Homo sapien
ggaaccgggcgaaggtgctctcgat

SEQ ID NO: 2451239 - DNA, 25 bp, Homo sapien
gggaaccgggcgaaggtgctctcga

SEQ ID NO: 2451240 - DNA, 25 bp, Homo sapien
atgacggcatccacgttgacggagt

SEQ ID NO: 2451241 - DNA, 25 bp, Homo sapien
agtagaaggtcggaatgctttggct

SEQ ID NO: 2451242 - DNA, 25 bp, Homo sapien
agaaggtcggaatgctttggctcgt

SEQ ID NO: 2451243 - DNA, 25 bp, Homo sapien
tcggaatgctttggctcgtggccgg

SEQ ID NO: 2451244 - DNA, 25 bp, Homo sapien
ggaagtagaaggtcggaatgctttg

SEQ ID NO: 2451245 - DNA, 25 bp, Homo sapien
tggcggctctgcgccactgagcccc

SEQ ID NO: 2451246 - DNA, 25 bp, Homo sapien
aagaggaggcaaaacgcagggtcct

SEQ ID NO: 2451247 - DNA, 25 bp, Homo sapien
cagaacgcgtcaccttcagtgggaa

SEQ ID NO: 2451248 - DNA, 25 bp, Homo sapien
gaatgaaagtagcagccttcacctg

SEQ ID NO: 2451249 - DNA, 25 bp, Homo sapien
gaactgacggctacagccgactctc

SEQ ID NO: 2451250 - DNA, 25 bp, Homo sapien
ggaccggacaccacgatcaaagcca

SEQ ID NO: 2451251 - DNA, 25 bp, Homo sapien
gcagcaggaccggacaccacgatca

SEQ ID NO: 2451252 - DNA, 25 bp, Homo sapien
gggccggcggaagggacgctcagta

SEQ ID NO: 2451253 - DNA, 25 bp, Homo sapien
ggacgctcagtacgggctgcaacgc

SEQ ID NO: 2451254 - DNA, 25 bp, Homo sapien
gccatgcgtggtgccgtgtagggtc

SEQ ID NO: 2451255 - DNA, 25 bp, Homo sapien
agttccaagtacagcggggctgccg

SEQ ID NO: 2451256 - DNA, 25 bp, Homo sapien
gacggcgctttcagccatgcgtggt

SEQ ID NO: 2451257 - DNA, 25 bp, Homo sapien
gggtctgtgcgtccacccgaaggac

SEQ ID NO: 2451258 - DNA, 25 bp, Homo sapien
tcacacgggagcctccccggaccca

SEQ ID NO: 2451259 - DNA, 25 bp, Homo sapien
ccacggcgtgaacgcatgctgttcc

SEQ ID NO: 2451260 - DNA, 25 bp, Homo sapien
tcgcacagtcagaagatcaagctca

SEQ ID NO: 2451261 - DNA, 25 bp, Homo sapien
atgctgttccgttcccaaggccggc

SEQ ID NO: 2451262 - DNA, 25 bp, Homo sapien
gtgtaacacgccatcgtcacacggg

SEQ ID NO: 2451263 - DNA, 25 bp, Homo sapien
ggtcctggcgcagcgagcgctcgcg

SEQ ID NO: 2451264 - DNA, 25 bp, Homo sapien
ttcagccgcttcttgaaccgagagg

SEQ ID NO: 2451265 - DNA, 25 bp, Homo sapien
cacgaagtcgcagccgcgggccagt

SEQ ID NO: 2451266 - DNA, 25 bp, Homo sapien
ttcttgaaccgagagggcagcacga

SEQ ID NO: 2451267 - DNA, 25 bp, Homo sapien
gaatacagctaagctgcagtgggca

SEQ ID NO: 2451268 - DNA, 25 bp, Homo sapien
tgctcactgtgataactgcgcttgt

SEQ ID NO: 2451269 - DNA, 25 bp, Homo sapien
aggagacaggataccttcgggctga

SEQ ID NO: 2451270 - DNA, 25 bp, Homo sapien
cgggcaactttaaatgagggtgagc

SEQ ID NO: 2451271 - DNA, 25 bp, Homo sapien
agaggtgcggcccagtaacccatga

SEQ ID NO: 2451272 - DNA, 25 bp, Homo sapien
accaggagacgatttaaacaagtgc

SEQ ID NO: 2451273 - DNA, 25 bp, Homo sapien
aacccatgatgtggggcacaaactc

SEQ ID NO: 2451274 - DNA, 25 bp, Homo sapien
accaccaggagacgatttaaacaag

SEQ ID NO: 2451275 - DNA, 25 bp, Homo sapien
cttgcgtcctgtcccgatgcagaac

SEQ ID NO: 2451276 - DNA, 25 bp, Homo sapien
ctggagccctcgaaccacctctgga

SEQ ID NO: 2451277 - DNA, 25 bp, Homo sapien
tcgaaccacctctggatgcagtccc

SEQ ID NO: 2451278 - DNA, 25 bp, Homo sapien
accacctctggatgcagtcccactg

SEQ ID NO: 2451279 - DNA, 25 bp, Homo sapien
tatgcagggacgggccgtccacacc

SEQ ID NO: 2451280 - DNA, 25 bp, Homo sapien
gggccatccactaccgtgtacaggg

SEQ ID NO: 2451281 - DNA, 25 bp, Homo sapien
cagggctgtccacactcgacagagc

SEQ ID NO: 2451282 - DNA, 25 bp, Homo sapien
cactaccgtgtacagggacgggccg

SEQ ID NO: 2451283 - DNA, 25 bp, Homo sapien
ctctgctgtcgggacacaatcttac

SEQ ID NO: 2451284 - DNA, 25 bp, Homo sapien
tcttaccatcaacctctaaaggctc

SEQ ID NO: 2451285 - DNA, 25 bp, Homo sapien
atctgggccgatgaagcccctcacg

SEQ ID NO: 2451286 - DNA, 25 bp, Homo sapien
caacattgccatctgggccgatgaa

SEQ ID NO: 2451287 - DNA, 25 bp, Homo sapien
caggaattccagagcactctaggta

SEQ ID NO: 2451288 - DNA, 25 bp, Homo sapien
atcaccttctatgaaataaatggcg

SEQ ID NO: 2451289 - DNA, 25 bp, Homo sapien
tctcacctgcggtgtataatcacct

SEQ ID NO: 2451290 - DNA, 25 bp, Homo sapien
tacaggtacattagccagaggctgc

SEQ ID NO: 2451291 - DNA, 25 bp, Homo sapien
accttcatcttcaggaccggctgca

SEQ ID NO: 2451292 - DNA, 25 bp, Homo sapien
gctgcagcactttgccgggcggcat

SEQ ID NO: 2451293 - DNA, 25 bp, Homo sapien
cggatctacgggtgcctcgaacgtg

SEQ ID NO: 2451294 - DNA, 25 bp, Homo sapien
ttgatccggcgcaggcagtcctgca

SEQ ID NO: 2451295 - DNA, 25 bp, Homo sapien
tgctcagggcagcttcaaaacgggc

SEQ ID NO: 2451296 - DNA, 25 bp, Homo sapien
cgacgatgtcatcacgaggcgacgc

SEQ ID NO: 2451297 - DNA, 25 bp, Homo sapien
ggaccgacctcggtgatgcgagcac

SEQ ID NO: 2451298 - DNA, 25 bp, Homo sapien
ccgagctctttctgcgtttaggatt

SEQ ID NO: 2451299 - DNA, 25 bp, Homo sapien
tggtttcagagcacaagtggtgttt

SEQ ID NO: 2451300 - DNA, 25 bp, Homo sapien
ctgtggtttcagagcacaagtggtg

SEQ ID NO: 2451301 - DNA, 25 bp, Homo sapien
tcagagcacaagtggtgttttatgg

SEQ ID NO: 2451302 - DNA, 25 bp, Homo sapien
tgcaccgtttttccgggtccaggca

SEQ ID NO: 2451303 - DNA, 25 bp, Homo sapien
cagttgttagtgagacggatgcctc

SEQ ID NO: 2451304 - DNA, 25 bp, Homo sapien
ttgagaacgtttctgttgacttgcc

SEQ ID NO: 2451305 - DNA, 25 bp, Homo sapien
catttgtacctgtttgcacgcagca

SEQ ID NO: 2451306 - DNA, 25 bp, Homo sapien
tccgtggatgacgtgggaagctctc

SEQ ID NO: 2451307 - DNA, 25 bp, Homo sapien
tcactcgatcgtgggcctgctgagt

SEQ ID NO: 2451308 - DNA, 25 bp, Homo sapien
tgtgcccgtcactcgatcgtgggcc

SEQ ID NO: 2451309 - DNA, 25 bp, Homo sapien
tgcccgtcactcgatcgtgggcctg

SEQ ID NO: 2451310 - DNA, 25 bp, Homo sapien
ccgtcactcgatcgtgggcctgctg

SEQ ID NO: 2451311 - DNA, 25 bp, Homo sapien
gccgcgcaggagcttgtcctcctga

SEQ ID NO: 2451312 - DNA, 25 bp, Homo sapien
aggagcttgtcctcctgacttggag

SEQ ID NO: 2451313 - DNA, 25 bp, Homo sapien
gagcggccacgcaggccgcgcagga

SEQ ID NO: 2451314 - DNA, 25 bp, Homo sapien
caggccgcgcaggagcttgtcctcc

SEQ ID NO: 2451315 - DNA, 25 bp, Homo sapien
cgtaaaggctggcaggtccttcctc

SEQ ID NO: 2451316 - DNA, 25 bp, Homo sapien
gtgctggggcggcaaagcgtaaagg

SEQ ID NO: 2451317 - DNA, 25 bp, Homo sapien
ctggggcggcaaagcgtaaaggctg

SEQ ID NO: 2451318 - DNA, 25 bp, Homo sapien
ccacctgcgtgctggggcggcaaag

SEQ ID NO: 2451319 - DNA, 25 bp, Homo sapien
tcggcccctgggaccacattgtgaa

SEQ ID NO: 2451320 - DNA, 25 bp, Homo sapien
ctgcaacggaataggtcggcccctg

SEQ ID NO: 2451321 - DNA, 25 bp, Homo sapien
ggtccccagcgcagacattgaacct

SEQ ID NO: 2451322 - DNA, 25 bp, Homo sapien
tctctgggcaatgacggtgcaacct

SEQ ID NO: 2451323 - DNA, 25 bp, Homo sapien
ccgacggcgcccagagcgaccttca

SEQ ID NO: 2451324 - DNA, 25 bp, Homo sapien
cgacggcgcccagagcgaccttcat

SEQ ID NO: 2451325 - DNA, 25 bp, Homo sapien
gtcaccctgactcgtcaacctgcaa

SEQ ID NO: 2451326 - DNA, 25 bp, Homo sapien
aacctgcaaaaacggcccaggacag

SEQ ID NO: 2451327 - DNA, 25 bp, Homo sapien
gacccgaggctgttgtccggtcgta

SEQ ID NO: 2451328 - DNA, 25 bp, Homo sapien
tgttggcggtgtagacgcgggtccc

SEQ ID NO: 2451329 - DNA, 25 bp, Homo sapien
ggctacttcggaactgacgtcgtga

SEQ ID NO: 2451330 - DNA, 25 bp, Homo sapien
gagtgagcaatggtctagcccagga

SEQ ID NO: 2451331 - DNA, 25 bp, Homo sapien
aacagaagctgtcgggagtgagcaa

SEQ ID NO: 2451332 - DNA, 25 bp, Homo sapien
cctttgctcgactgtgtttctgacg

SEQ ID NO: 2451333 - DNA, 25 bp, Homo sapien
ctgggtgctgcagggtgctaactct

SEQ ID NO: 2451334 - DNA, 25 bp, Homo sapien
gctaactctcttgatgaggccgtcc

SEQ ID NO: 2451335 - DNA, 25 bp, Homo sapien
ctgatgtttgggactggaggactct

SEQ ID NO: 2451336 - DNA, 25 bp, Homo sapien
ccgtcctgggtactgtagggtactg

SEQ ID NO: 2451337 - DNA, 25 bp, Homo sapien
caggctggagtgcggtggtgccatc

SEQ ID NO: 2451338 - DNA, 25 bp, Homo sapien
ttgagacaaagtcgtgctcttgtcg

SEQ ID NO: 2451339 - DNA, 25 bp, Homo sapien
gagacaaagtcgtgctcttgtcgcc

SEQ ID NO: 2451340 - DNA, 25 bp, Homo sapien
tgagacaaagtcgtgctcttgtcgc

SEQ ID NO: 2451341 - DNA, 25 bp, Homo sapien
gccgacctgggatgacaccttgggc

SEQ ID NO: 2451342 - DNA, 25 bp, Homo sapien
tgaaactcgggagcttttggcggcc

SEQ ID NO: 2451343 - DNA, 25 bp, Homo sapien
tcccgttcaccggtcaagacgctga

SEQ ID NO: 2451344 - DNA, 25 bp, Homo sapien
tgcttgagccgaaatgtcaccagct

SEQ ID NO: 2451345 - DNA, 25 bp, Homo sapien
attcagcaatctttgtattaattac

SEQ ID NO: 2451346 - DNA, 25 bp, Homo sapien
gccttaagataaatagatgagagtt

SEQ ID NO: 2451347 - DNA, 25 bp, Homo sapien
tataaaatcacagcgatcgtctgcc

SEQ ID NO: 2451348 - DNA, 25 bp, Homo sapien
ctccgcataggtacgctttgattgg

SEQ ID NO: 2451349 - DNA, 25 bp, Homo sapien
gattgggagcgctttcttataaaat

SEQ ID NO: 2451350 - DNA, 25 bp, Homo sapien
agcgccgtgagaggcacctgtgtct

SEQ ID NO: 2451351 - DNA, 25 bp, Homo sapien
gctgtcagcgccgtgagaggcacct

SEQ ID NO: 2451352 - DNA, 25 bp, Homo sapien
tgtgtctccccgagctgaggacgga

SEQ ID NO: 2451353 - DNA, 25 bp, Homo sapien
agctgaggacggatgacatttgtac

SEQ ID NO: 2451354 - DNA, 25 bp, Homo sapien
ctacaggtttgtatacggtcctggg

SEQ ID NO: 2451355 - DNA, 25 bp, Homo sapien
acaggtttgtatacggtcctgggag

SEQ ID NO: 2451356 - DNA, 25 bp, Homo sapien
tacaggtttgtatacggtcctggga

SEQ ID NO: 2451357 - DNA, 25 bp, Homo sapien
gcgtcaaagggcaaagcttccccat

SEQ ID NO: 2451358 - DNA, 25 bp, Homo sapien
caagggcgtcaaagggcaaagcttc

SEQ ID NO: 2451359 - DNA, 25 bp, Homo sapien
tcaggacagcacgatgatctcaagg

SEQ ID NO: 2451360 - DNA, 25 bp, Homo sapien
ggacagcacgatgatctcaagggcg

SEQ ID NO: 2451361 - DNA, 25 bp, Homo sapien
tgtacccaccatgggtcgaaggtgg

SEQ ID NO: 2451362 - DNA, 25 bp, Homo sapien
caaggcacacggagttcacattgta

SEQ ID NO: 2451363 - DNA, 25 bp, Homo sapien
ccaaggcacacggagttcacattgt

SEQ ID NO: 2451364 - DNA, 25 bp, Homo sapien
gtcgaaggtgggcgtctgattcctc

SEQ ID NO: 2451365 - DNA, 25 bp, Homo sapien
gctctgaagttttcctctcggtggt

SEQ ID NO: 2451366 - DNA, 25 bp, Homo sapien
ctgctctgaagttttcctctcggtg

SEQ ID NO: 2451367 - DNA, 25 bp, Homo sapien
tctgaagttttcctctcggtggtac

SEQ ID NO: 2451368 - DNA, 25 bp, Homo sapien
tgctctgaagttttcctctcggtgg

SEQ ID NO: 2451369 - DNA, 25 bp, Homo sapien
cttggattgtgcgtctccatccgat

SEQ ID NO: 2451370 - DNA, 25 bp, Homo sapien
cctcttggattgtgcgtctccatcc

SEQ ID NO: 2451371 - DNA, 25 bp, Homo sapien
ttggattgtgcgtctccatccgatg

SEQ ID NO: 2451372 - DNA, 25 bp, Homo sapien
ttctccaggccttttgccggtggag

SEQ ID NO: 2451373 - DNA, 25 bp, Homo sapien
gtagataatttcagctcccccattg

SEQ ID NO: 2451374 - DNA, 25 bp, Homo sapien
tggaaggtcctcagcgttagaggga

SEQ ID NO: 2451375 - DNA, 25 bp, Homo sapien
ggaagtaggcattgagtagataatt

SEQ ID NO: 2451376 - DNA, 25 bp, Homo sapien
tcctcagcgttagagggactgtttc

SEQ ID NO: 2451377 - DNA, 25 bp, Homo sapien
gtctccttgtgcctcggaagagaat

SEQ ID NO: 2451378 - DNA, 25 bp, Homo sapien
aagcccaggtggacagtgtctcctt

SEQ ID NO: 2451379 - DNA, 25 bp, Homo sapien
gagaaagatagcagtggccccctgc

SEQ ID NO: 2451380 - DNA, 25 bp, Homo sapien
gagaatgcccgggtcacaagcccag

SEQ ID NO: 2451381 - DNA, 25 bp, Homo sapien
gatcctcccatccttgttcgtcctg

SEQ ID NO: 2451382 - DNA, 25 bp, Homo sapien
gtcactgtcggctccgcaggatcct

SEQ ID NO: 2451383 - DNA, 25 bp, Homo sapien
caggagcagacacgccgtggtgggc

SEQ ID NO: 2451384 - DNA, 25 bp, Homo sapien
ctgggcttgcgggatgagtctgtca

SEQ ID NO: 2451385 - DNA, 25 bp, Homo sapien
cagaagtcctttccccgaggaggag

SEQ ID NO: 2451386 - DNA, 25 bp, Homo sapien
tctcttctgagactgtggtaccggc

SEQ ID NO: 2451387 - DNA, 25 bp, Homo sapien
acctgtgggccctcactgctctctt

SEQ ID NO: 2451388 - DNA, 25 bp, Homo sapien
cttctgagactgtggtaccggccat

SEQ ID NO: 2451389 - DNA, 25 bp, Homo sapien
tcttctgagactgtggtaccggcca

SEQ ID NO: 2451390 - DNA, 25 bp, Homo sapien
aacctgctcacagatatacccggtc

SEQ ID NO: 2451391 - DNA, 25 bp, Homo sapien
cctttcggaaattggtgtattgtct

SEQ ID NO: 2451392 - DNA, 25 bp, Homo sapien
cagatatacccggtcccagatatgc

SEQ ID NO: 2451393 - DNA, 25 bp, Homo sapien
ttggtgtattgtctttggaaaatga

SEQ ID NO: 2451394 - DNA, 25 bp, Homo sapien
atcatgcgaacgtctccaccaggta

SEQ ID NO: 2451395 - DNA, 25 bp, Homo sapien
ggaaagtcccacatcatgcgaacgt

SEQ ID NO: 2451396 - DNA, 25 bp, Homo sapien
tcagagcatccccaaagtggcttcc

SEQ ID NO: 2451397 - DNA, 25 bp, Homo sapien
cagagcatccccaaagtggcttcct

SEQ ID NO: 2451398 - DNA, 25 bp, Homo sapien
gaatgccttaacctggggaggccga

SEQ ID NO: 2451399 - DNA, 25 bp, Homo sapien
ggcaggtggatcacctgaggttggg

SEQ ID NO: 2451400 - DNA, 25 bp, Homo sapien
ggttgggagttccagatcagcctga

SEQ ID NO: 2451401 - DNA, 25 bp, Homo sapien
caacctgtaggttagaatgccttaa

SEQ ID NO: 2451402 - DNA, 25 bp, Homo sapien
ctctgagatgtgctttggagattcc

SEQ ID NO: 2451403 - DNA, 25 bp, Homo sapien
gcactggagactctgacgtgtgctt

SEQ ID NO: 2451404 - DNA, 25 bp, Homo sapien
aggtgtgcattggagactctgacgt

SEQ ID NO: 2451405 - DNA, 25 bp, Homo sapien
ctctgacgtgggcattggagactga

SEQ ID NO: 2451406 - DNA, 25 bp, Homo sapien
aattgcacctgatgaaatggacgta

SEQ ID NO: 2451407 - DNA, 25 bp, Homo sapien
gcaaggatgtctcgattttcaaagc

SEQ ID NO: 2451408 - DNA, 25 bp, Homo sapien
tgtccatggccatcaagcggccagg

SEQ ID NO: 2451409 - DNA, 25 bp, Homo sapien
taaccccttagctttgtctggccag

SEQ ID NO: 2451410 - DNA, 25 bp, Homo sapien
gctgaatcattccaaagggaaccgg

SEQ ID NO: 2451411 - DNA, 25 bp, Homo sapien
taggcaaagctcagcgaagtgggct

SEQ ID NO: 2451412 - DNA, 25 bp, Homo sapien
tctccgaggcgttgggtgaaattca

SEQ ID NO: 2451413 - DNA, 25 bp, Homo sapien
aagccgtaccgtagtctctccgagg

SEQ ID NO: 2451414 - DNA, 25 bp, Homo sapien
tgaggcaagactagtccccatgtcc

SEQ ID NO: 2451415 - DNA, 25 bp, Homo sapien
gcgttaatgaggcaagactagtccc

SEQ ID NO: 2451416 - DNA, 25 bp, Homo sapien
gacacagaggcgttaatgaggcaag

SEQ ID NO: 2451417 - DNA, 25 bp, Homo sapien
tcagggcctttgctgcggccgctgc

SEQ ID NO: 2451418 - DNA, 25 bp, Homo sapien
cattaggtcccaggatgtggctgca

SEQ ID NO: 2451419 - DNA, 25 bp, Homo sapien
tgtgtagacggccaaaataaataac

SEQ ID NO: 2451420 - DNA, 25 bp, Homo sapien
cattggaccctgctgtgtagagagc

SEQ ID NO: 2451421 - DNA, 25 bp, Homo sapien
agctacatctgagcctgctgcatgg

SEQ ID NO: 2451422 - DNA, 25 bp, Homo sapien
accgacagacgaaccactgggctct

SEQ ID NO: 2451423 - DNA, 25 bp, Homo sapien
tgttggcaggcggtgaccgacagac

SEQ ID NO: 2451424 - DNA, 25 bp, Homo sapien
gcggtgaccgacagacgaaccactg

SEQ ID NO: 2451425 - DNA, 25 bp, Homo sapien
caggcggtgaccgacagacgaacca

SEQ ID NO: 2451426 - DNA, 25 bp, Homo sapien
catagctcagcataaaactcgacgg

SEQ ID NO: 2451427 - DNA, 25 bp, Homo sapien
tagctcagcataaaactcgacggaa

SEQ ID NO: 2451428 - DNA, 25 bp, Homo sapien
tcatagctcagcataaaactcgacg

SEQ ID NO: 2451429 - DNA, 25 bp, Homo sapien
agctcagcataaaactcgacggaac

SEQ ID NO: 2451430 - DNA, 25 bp, Homo sapien
agtctccacggcatgacggcgcggc

SEQ ID NO: 2451431 - DNA, 25 bp, Homo sapien
ccggaaaaagccgacagtctccacg

SEQ ID NO: 2451432 - DNA, 25 bp, Homo sapien
gcggccgcagctgaataaactcggg

SEQ ID NO: 2451433 - DNA, 25 bp, Homo sapien
gggcggccaaccctgctgcatagac

SEQ ID NO: 2451434 - DNA, 25 bp, Homo sapien
caggatggagctggatttgagtctg

SEQ ID NO: 2451435 - DNA, 25 bp, Homo sapien
tggatttgagtctgctgcgtagatg

SEQ ID NO: 2451436 - DNA, 25 bp, Homo sapien
tcccaggatggagctggatttgagt

SEQ ID NO: 2451437 - DNA, 25 bp, Homo sapien
tttgagtctgctgcgtagatgacca

SEQ ID NO: 2451438 - DNA, 25 bp, Homo sapien
ctcccagggtacaggaacactgtct

SEQ ID NO: 2451439 - DNA, 25 bp, Homo sapien
atcacacagtccgacactaatttcc

SEQ ID NO: 2451440 - DNA, 25 bp, Homo sapien
gaggtgactttgctcatcacacagt

SEQ ID NO: 2451441 - DNA, 25 bp, Homo sapien
tcacgatacaatctggttcggccat

SEQ ID NO: 2451442 - DNA, 25 bp, Homo sapien
ctgttggatgggggccaattcctta

SEQ ID NO: 2451443 - DNA, 25 bp, Homo sapien
tcagactcctagttccttcacgtat

SEQ ID NO: 2451444 - DNA, 25 bp, Homo sapien
gactcctagttccttcacgtattca

SEQ ID NO: 2451445 - DNA, 25 bp, Homo sapien
cagactcctagttccttcacgtatt

SEQ ID NO: 2451446 - DNA, 25 bp, Homo sapien
ggcttcggagcacgcgttgatagtc

SEQ ID NO: 2451447 - DNA, 25 bp, Homo sapien
cacgcgttgatagtcctgatttttg

SEQ ID NO: 2451448 - DNA, 25 bp, Homo sapien
tccccagtaggtgtggttccttctg

SEQ ID NO: 2451449 - DNA, 25 bp, Homo sapien
caggccacagtgcaacccagggctt

SEQ ID NO: 2451450 - DNA, 25 bp, Homo sapien
aatttcacaaggtaaagtcatcgct

SEQ ID NO: 2451451 - DNA, 25 bp, Homo sapien
catcgcttaaggcaggaacaagcca

SEQ ID NO: 2451452 - DNA, 25 bp, Homo sapien
gcaggtgacacaaggtgctcattga

SEQ ID NO: 2451453 - DNA, 25 bp, Homo sapien
ggcatgcgcctatatgtgtctgtag

SEQ ID NO: 2451454 - DNA, 25 bp, Homo sapien
tggcttatccagaaggagtttgaat

SEQ ID NO: 2451455 - DNA, 25 bp, Homo sapien
tttagggaagcagaaccctaggcca

SEQ ID NO: 2451456 - DNA, 25 bp, Homo sapien
gattcaaagattagacgattgcctt

SEQ ID NO: 2451457 - DNA, 25 bp, Homo sapien
aatgacttctgtgggtggcttatcc

SEQ ID NO: 2451458 - DNA, 25 bp, Homo sapien
tgtgttcacagctggttgccaccga

SEQ ID NO: 2451459 - DNA, 25 bp, Homo sapien
gttgccacggatgcctggtgtacag

SEQ ID NO: 2451460 - DNA, 25 bp, Homo sapien
ttttctcaggtgaatacccaacagt

SEQ ID NO: 2451461 - DNA, 25 bp, Homo sapien
caacagtcaagttatcccagtccat

SEQ ID NO: 2451462 - DNA, 25 bp, Homo sapien
tgactcgttgctggatgctaaacag

SEQ ID NO: 2451463 - DNA, 25 bp, Homo sapien
atgctaaacaggtggtcccccgaga

SEQ ID NO: 2451464 - DNA, 25 bp, Homo sapien
agaggctccagcatgactcgttgct

SEQ ID NO: 2451465 - DNA, 25 bp, Homo sapien
cagcatgactcgttgctggatgcta

SEQ ID NO: 2451466 - DNA, 25 bp, Homo sapien
gctgcaaaccccaatgaggggcagg

SEQ ID NO: 2451467 - DNA, 25 bp, Homo sapien
gctgagctgcaaaccccaatgaggg

SEQ ID NO: 2451468 - DNA, 25 bp, Homo sapien
gcaaaccccaatgaggggcaggtgc

SEQ ID NO: 2451469 - DNA, 25 bp, Homo sapien
aggtgctcccggagacctgcttccc

SEQ ID NO: 2451470 - DNA, 25 bp, Homo sapien
gacataactcgtcttcctctgcaga

SEQ ID NO: 2451471 - DNA, 25 bp, Homo sapien
caacccttctggacataactcgtct

SEQ ID NO: 2451472 - DNA, 25 bp, Homo sapien
ttttgccgtccaagcatccaccggt

SEQ ID NO: 2451473 - DNA, 25 bp, Homo sapien
tcctctgcagattggaacagatgat

SEQ ID NO: 2451474 - DNA, 25 bp, Homo sapien
aattgttttagttccacagagcagc

SEQ ID NO: 2451475 - DNA, 25 bp, Homo sapien
aaagtgtcacccaaacccaggagat

SEQ ID NO: 2451476 - DNA, 25 bp, Homo sapien
cagccacgggtgcaccgtctgtgta

SEQ ID NO: 2451477 - DNA, 25 bp, Homo sapien
tatctctgtcagtgatgcaatccaa

SEQ ID NO: 2451478 - DNA, 25 bp, Homo sapien
atgctgaaagctccatacaccttcc

SEQ ID NO: 2451479 - DNA, 25 bp, Homo sapien
cgaggaaggcccattcgagtggcct

SEQ ID NO: 2451480 - DNA, 25 bp, Homo sapien
tgaaagctccatacaccttccctgt

SEQ ID NO: 2451481 - DNA, 25 bp, Homo sapien
tcgagtggcctgtaaaaatgctgaa

SEQ ID NO: 2451482 - DNA, 25 bp, Homo sapien
gaaaaatcgtgttgtcatctctgca

SEQ ID NO: 2451483 - DNA, 25 bp, Homo sapien
caagaatgacattatatagcatccc

SEQ ID NO: 2451484 - DNA, 25 bp, Homo sapien
gaaacgacctgtttccaagaatgac

SEQ ID NO: 2451485 - DNA, 25 bp, Homo sapien
catctctgcaccgtacaaggacaga

SEQ ID NO: 2451486 - DNA, 25 bp, Homo sapien
tggaggtgatgaaagcctccctggg

SEQ ID NO: 2451487 - DNA, 25 bp, Homo sapien
ggtgatgaaagcctccctggggaca

SEQ ID NO: 2451488 - DNA, 25 bp, Homo sapien
tgatgaaagcctccctggggacaaa

SEQ ID NO: 2451489 - DNA, 25 bp, Homo sapien
ggacttggaggtgatgaaagcctcc

SEQ ID NO: 2451490 - DNA, 25 bp, Homo sapien
cacttctctaatatcaagcttcagc

SEQ ID NO: 2451491 - DNA, 25 bp, Homo sapien
tcacttctctaatatcaagcttcag

SEQ ID NO: 2451492 - DNA, 25 bp, Homo sapien
cttctctaatatcaagcttcagcaa

SEQ ID NO: 2451493 - DNA, 25 bp, Homo sapien
cttcacttctctaatatcaagcttc

SEQ ID NO: 2451494 - DNA, 25 bp, Homo sapien
aatggaagggttgattcctcctgga

SEQ ID NO: 2451495 - DNA, 25 bp, Homo sapien
caaaaggaggaactgactctctttg

SEQ ID NO: 2451496 - DNA, 25 bp, Homo sapien
cctcctggaggcgtcgagggagatg

SEQ ID NO: 2451497 - DNA, 25 bp, Homo sapien
ttgaccaacgtcacatgatagcaac

SEQ ID NO: 2451498 - DNA, 25 bp, Homo sapien
ctgacgatgtttgatttccgaattc

SEQ ID NO: 2451499 - DNA, 25 bp, Homo sapien
gatgtttgatttccgaattccttta

SEQ ID NO: 2451500 - DNA, 25 bp, Homo sapien
ttccgaattcctttaatttcagcaa

SEQ ID NO: 2451501 - DNA, 25 bp, Homo sapien
tgatttccgaattcctttaatttca

SEQ ID NO: 2451502 - DNA, 25 bp, Homo sapien
gctgtgtcctccagtaagatgggaa

SEQ ID NO: 2451503 - DNA, 25 bp, Homo sapien
tctgattttcgactgatgtatttcc

SEQ ID NO: 2451504 - DNA, 25 bp, Homo sapien
taagatgggaactcggtgagaacag

SEQ ID NO: 2451505 - DNA, 25 bp, Homo sapien
gagattgtatctgattttcgactga

SEQ ID NO: 2451506 - DNA, 25 bp, Homo sapien
ccgcggggtcgagctgtctctccag

SEQ ID NO: 2451507 - DNA, 25 bp, Homo sapien
tgtccccgcggaagttctgttccag

SEQ ID NO: 2451508 - DNA, 25 bp, Homo sapien
cggggtcgagctgtctctccagaag

SEQ ID NO: 2451509 - DNA, 25 bp, Homo sapien
ccagaagctgcgcttggtcaggact

SEQ ID NO: 2451510 - DNA, 25 bp, Homo sapien
ggatcagacgcccaggacgcagcag

SEQ ID NO: 2451511 - DNA, 25 bp, Homo sapien
agcccgagtccgcacagggtttgcg

SEQ ID NO: 2451512 - DNA, 25 bp, Homo sapien
gtttccgcgcgtctctttctactgc

SEQ ID NO: 2451513 - DNA, 25 bp, Homo sapien
gtggacaggcgggtaggagcggatc

SEQ ID NO: 2451514 - DNA, 25 bp, Homo sapien
ctcggacagcgtcttgaattggcaa

SEQ ID NO: 2451515 - DNA, 25 bp, Homo sapien
gactggagctgcggcctctcggaca

SEQ ID NO: 2451516 - DNA, 25 bp, Homo sapien
tgtggggtagaaaaagctctcgtct

SEQ ID NO: 2451517 - DNA, 25 bp, Homo sapien
tgaattggcaacgaaaaacgtgtgg

SEQ ID NO: 2451518 - DNA, 25 bp, Homo sapien
ttcacgttgcgctgtgtagactcct

SEQ ID NO: 2451519 - DNA, 25 bp, Homo sapien
tgcagcccggtaggacccactttgg

SEQ ID NO: 2451520 - DNA, 25 bp, Homo sapien
tccgtgttgggttcaagagcaagtt

SEQ ID NO: 2451521 - DNA, 25 bp, Homo sapien
gaaaagccagttccgaaagctgggc

SEQ ID NO: 2451522 - DNA, 25 bp, Homo sapien
cctgttctctggacgaatcatttct

SEQ ID NO: 2451523 - DNA, 25 bp, Homo sapien
aggacgcctgttctctggacgaatc

SEQ ID NO: 2451524 - DNA, 25 bp, Homo sapien
tgactgccttgtgggtcaaggtgca

SEQ ID NO: 2451525 - DNA, 25 bp, Homo sapien
cgccttggcggaggacgcctgttct

SEQ ID NO: 2451526 - DNA, 25 bp, Homo sapien
ctgatgttccccccgccgcccttcg

SEQ ID NO: 2451527 - DNA, 25 bp, Homo sapien
ccccgccgcccttcgggctgcccat

SEQ ID NO: 2451528 - DNA, 25 bp, Homo sapien
taaagagatgggacagattctgtgc

SEQ ID NO: 2451529 - DNA, 25 bp, Homo sapien
tctccagcgccgtggataaagagat

SEQ ID NO: 2451530 - DNA, 25 bp, Homo sapien
tcagtcgccgcagttgagcaaaaaa

SEQ ID NO: 2451531 - DNA, 25 bp, Homo sapien
ttgccaagagttagaaaaatgcacc

SEQ ID NO: 2451532 - DNA, 25 bp, Homo sapien
ggtcccatttccttggaagcctgag

SEQ ID NO: 2451533 - DNA, 25 bp, Homo sapien
tggtgcgacgggcttggtgtctccc

SEQ ID NO: 2451534 - DNA, 25 bp, Homo sapien
tgtcgtaggaatggcctctccatcc

SEQ ID NO: 2451535 - DNA, 25 bp, Homo sapien
tttgggccgctccaaagacgccctg

SEQ ID NO: 2451536 - DNA, 25 bp, Homo sapien
tcgagtgtaaatttgacatcgcgtt

SEQ ID NO: 2451537 - DNA, 25 bp, Homo sapien
gagtgtaaatttgacatcgcgttgc

SEQ ID NO: 2451538 - DNA, 25 bp, Homo sapien
tgtaaatttgacatcgcgttgcatt

SEQ ID NO: 2451539 - DNA, 25 bp, Homo sapien
tatgtcgagtgtaaatttgacatcg

SEQ ID NO: 2451540 - DNA, 25 bp, Homo sapien
cggtgtgacgggtggcgtggatgac

SEQ ID NO: 2451541 - DNA, 25 bp, Homo sapien
atgcagttaagagagccggccagcc

SEQ ID NO: 2451542 - DNA, 25 bp, Homo sapien
aatgcagttaagagagccggccagc

SEQ ID NO: 2451543 - DNA, 25 bp, Homo sapien
ctcccgatggcggtgtgacgggtgg

SEQ ID NO: 2451544 - DNA, 25 bp, Homo sapien
tctgcacggagcagcgttcggcttc

SEQ ID NO: 2451545 - DNA, 25 bp, Homo sapien
cagcgttcggcttcacatttttgcc

SEQ ID NO: 2451546 - DNA, 25 bp, Homo sapien
tgatgagcttggaccgcgttgccac

SEQ ID NO: 2451547 - DNA, 25 bp, Homo sapien
caccggttcgaatggcctttgccag

SEQ ID NO: 2451548 - DNA, 25 bp, Homo sapien
agtgcaatggatccatcttggctca

SEQ ID NO: 2451549 - DNA, 25 bp, Homo sapien
ctggagtgcaatggatccatcttgg

SEQ ID NO: 2451550 - DNA, 25 bp, Homo sapien
ctgcaacctgtgcctcctgggttca

SEQ ID NO: 2451551 - DNA, 25 bp, Homo sapien
tgtgcctcctgggttcacgccattc

SEQ ID NO: 2451552 - DNA, 25 bp, Homo sapien
gtggatttgttgcttttccatcttc

SEQ ID NO: 2451553 - DNA, 25 bp, Homo sapien
ttttccatcttctctgcggctgaca

SEQ ID NO: 2451554 - DNA, 25 bp, Homo sapien
tcttctctgcggctgacactcttac

SEQ ID NO: 2451555 - DNA, 25 bp, Homo sapien
tggcttctccggctgtggatttgtt

SEQ ID NO: 2451556 - DNA, 25 bp, Homo sapien
gagaatttcggttgcctcccagagc

SEQ ID NO: 2451557 - DNA, 25 bp, Homo sapien
gcatcgtggctctctgtgaggaaga

SEQ ID NO: 2451558 - DNA, 25 bp, Homo sapien
agctgcagccggaagacgcaaggac

SEQ ID NO: 2451559 - DNA, 25 bp, Homo sapien
acgcaaggaccaacgaaaacatttg

SEQ ID NO: 2451560 - DNA, 25 bp, Homo sapien
aacaggtcgtgttgatacggttgcc

SEQ ID NO: 2451561 - DNA, 25 bp, Homo sapien
tacggttgcctcgtgaggacccatc

SEQ ID NO: 2451562 - DNA, 25 bp, Homo sapien
gctaacactgacaactcgtggcaag

SEQ ID NO: 2451563 - DNA, 25 bp, Homo sapien
taagagcacacagcaccgtctttct

SEQ ID NO: 2451564 - DNA, 25 bp, Homo sapien
cacagctcgtagagtgagaacacgg

SEQ ID NO: 2451565 - DNA, 25 bp, Homo sapien
cattgaatgcattgatgacctgtcc

SEQ ID NO: 2451566 - DNA, 25 bp, Homo sapien
gatgacctgtccatgacaaaatcct

SEQ ID NO: 2451567 - DNA, 25 bp, Homo sapien
cagtagcattggatagagtcacagc

SEQ ID NO: 2451568 - DNA, 25 bp, Homo sapien
cctttgcttgatgggtctttcagga

SEQ ID NO: 2451569 - DNA, 25 bp, Homo sapien
tttctgtacaaagccgggacgcaca

SEQ ID NO: 2451570 - DNA, 25 bp, Homo sapien
gaaacagaggctgcaacattctagt

SEQ ID NO: 2451571 - DNA, 25 bp, Homo sapien
taacaaacacctgtctattgaggag

SEQ ID NO: 2451572 - DNA, 25 bp, Homo sapien
ggtggtcctacctggcttcgtggct

SEQ ID NO: 2451573 - DNA, 25 bp, Homo sapien
ttctgggttcttgggacagtcggct

SEQ ID NO: 2451574 - DNA, 25 bp, Homo sapien
ttcttgggacagtcggcttctggtg

SEQ ID NO: 2451575 - DNA, 25 bp, Homo sapien
gcttctggtggtcctacctggcttc

SEQ ID NO: 2451576 - DNA, 25 bp, Homo sapien
cataaaccggattccaaagtcgtgg

SEQ ID NO: 2451577 - DNA, 25 bp, Homo sapien
gtctcatggaagaaccattttactt

SEQ ID NO: 2451578 - DNA, 25 bp, Homo sapien
ccataaaccggattccaaagtcgtg

SEQ ID NO: 2451579 - DNA, 25 bp, Homo sapien
tcatggaagaaccattttacttcat

SEQ ID NO: 2451580 - DNA, 25 bp, Homo sapien
tctgtctttgcagctattaaggatt

SEQ ID NO: 2451581 - DNA, 25 bp, Homo sapien
tttgcagctattaaggatttagact

SEQ ID NO: 2451582 - DNA, 25 bp, Homo sapien
gctattaaggatttagacttcttaa

SEQ ID NO: 2451583 - DNA, 25 bp, Homo sapien
gcagctattaaggatttagacttct

SEQ ID NO: 2451584 - DNA, 25 bp, Homo sapien
agacctggatgtttaccaagcctgc

SEQ ID NO: 2451585 - DNA, 25 bp, Homo sapien
cctggatgtttaccaagcctgccat

SEQ ID NO: 2451586 - DNA, 25 bp, Homo sapien
gacctggatgtttaccaagcctgcc

SEQ ID NO: 2451587 - DNA, 25 bp, Homo sapien
tttatcagaacaatagcagggaaag

SEQ ID NO: 2451588 - DNA, 25 bp, Homo sapien
tttgccatgaagtggaactctgggt

SEQ ID NO: 2451589 - DNA, 25 bp, Homo sapien
gaacatgtaacgtctgtgttggcca

SEQ ID NO: 2451590 - DNA, 25 bp, Homo sapien
gaagtggaactctgggtcgcagaac

SEQ ID NO: 2451591 - DNA, 25 bp, Homo sapien
tctgggtcgcagaacatgtaacgtc

SEQ ID NO: 2451592 - DNA, 25 bp, Homo sapien
attggaggaaaggaattttgatcat

SEQ ID NO: 2451593 - DNA, 25 bp, Homo sapien
ctccacagagagaaattttcttttt

SEQ ID NO: 2451594 - DNA, 25 bp, Homo sapien
aattggaggaaaggaattttgatca

SEQ ID NO: 2451595 - DNA, 25 bp, Homo sapien
tccacagagagaaattttcttttta

SEQ ID NO: 2451596 - DNA, 25 bp, Homo sapien
ccacgtaggtggtggtcgtagcttc

SEQ ID NO: 2451597 - DNA, 25 bp, Homo sapien
gtagcttctgttctcatcagcttga

SEQ ID NO: 2451598 - DNA, 25 bp, Homo sapien
ccaggtacgagtgcccacgtaggtg

SEQ ID NO: 2451599 - DNA, 25 bp, Homo sapien
tcatcatgtcccaggtacgagtgcc

SEQ ID NO: 2451600 - DNA, 25 bp, Homo sapien
acggcttccctttgatgtcagggtt

SEQ ID NO: 2451601 - DNA, 25 bp, Homo sapien
ggcttccctttgatgtcagggtttc

SEQ ID NO: 2451602 - DNA, 25 bp, Homo sapien
tacggcttccctttgatgtcagggt

SEQ ID NO: 2451603 - DNA, 25 bp, Homo sapien
ttacggcttccctttgatgtcaggg

SEQ ID NO: 2451604 - DNA, 25 bp, Homo sapien
caaagtgcagggctgggacgtttca

SEQ ID NO: 2451605 - DNA, 25 bp, Homo sapien
gaagactctgtttcccgggctgctc

SEQ ID NO: 2451606 - DNA, 25 bp, Homo sapien
cactgcggttaactattttcacatg

SEQ ID NO: 2451607 - DNA, 25 bp, Homo sapien
cgggctgctccgtggaaaacttaat

SEQ ID NO: 2451608 - DNA, 25 bp, Homo sapien
cctggcggttagagctcacggagat

SEQ ID NO: 2451609 - DNA, 25 bp, Homo sapien
caattagatgcttcgtaaacctgct

SEQ ID NO: 2451610 - DNA, 25 bp, Homo sapien
gacgtcttgcaacggcctggcggtt

SEQ ID NO: 2451611 - DNA, 25 bp, Homo sapien
gcaggctgccttatgtccgggacgt

SEQ ID NO: 2451612 - DNA, 25 bp, Homo sapien
gagttcatgaagtagaaagggtgtc

SEQ ID NO: 2451613 - DNA, 25 bp, Homo sapien
atgaagtagaaagggtgtcaccagc

SEQ ID NO: 2451614 - DNA, 25 bp, Homo sapien
agaaagggtgtcaccagcccacagc

SEQ ID NO: 2451615 - DNA, 25 bp, Homo sapien
gcttccttgctgtgatgagttcatg

SEQ ID NO: 2451616 - DNA, 25 bp, Homo sapien
ctgcacaggaccaggacttcaatgc

SEQ ID NO: 2451617 - DNA, 25 bp, Homo sapien
tgcacaggaccaggacttcaatgca

SEQ ID NO: 2451618 - DNA, 25 bp, Homo sapien
cacaggaccaggacttcaatgcact

SEQ ID NO: 2451619 - DNA, 25 bp, Homo sapien
gcacaggaccaggacttcaatgcac

SEQ ID NO: 2451620 - DNA, 25 bp, Homo sapien
caggatgaggacctcaatacacttg

SEQ ID NO: 2451621 - DNA, 25 bp, Homo sapien
tgaggacctcaatacacttgtccac

SEQ ID NO: 2451622 - DNA, 25 bp, Homo sapien
gacctcaatacacttgtccactctt

SEQ ID NO: 2451623 - DNA, 25 bp, Homo sapien
gagcctgcacaggatgaggacctca

SEQ ID NO: 2451624 - DNA, 25 bp, Homo sapien
tcaggacctcaatacacttgacctg

SEQ ID NO: 2451625 - DNA, 25 bp, Homo sapien
cacaggatcaggacctcaatacact

SEQ ID NO: 2451626 - DNA, 25 bp, Homo sapien
gacctcaatacacttgacctgtcct

SEQ ID NO: 2451627 - DNA, 25 bp, Homo sapien
cagagcctccacaggatcaggacct

SEQ ID NO: 2451628 - DNA, 25 bp, Homo sapien
ccagatatggggatgtagcaaactt

SEQ ID NO: 2451629 - DNA, 25 bp, Homo sapien
ttccccgggacatggaataaatcca

SEQ ID NO: 2451630 - DNA, 25 bp, Homo sapien
tctgtttcttccccgggacatggaa

SEQ ID NO: 2451631 - DNA, 25 bp, Homo sapien
aataaatccaccctggactttgagc

SEQ ID NO: 2451632 - DNA, 25 bp, Homo sapien
gcgggggtcagacgaagccggcttc

SEQ ID NO: 2451633 - DNA, 25 bp, Homo sapien
cacagggcgggggtcagacgaagcc

SEQ ID NO: 2451634 - DNA, 25 bp, Homo sapien
gggtcagacgaagccggcttctgta

SEQ ID NO: 2451635 - DNA, 25 bp, Homo sapien
acagggcgggggtcagacgaagccg

SEQ ID NO: 2451636 - DNA, 25 bp, Homo sapien
tgtgtgctgcgttgaaggtgaacac

SEQ ID NO: 2451637 - DNA, 25 bp, Homo sapien
tctgaaacgacggtgtgtgtgctgc

SEQ ID NO: 2451638 - DNA, 25 bp, Homo sapien
tctgtctctgaaacgacggtgtgtg

SEQ ID NO: 2451639 - DNA, 25 bp, Homo sapien
atcgtctgtctctgaaacgacggtg

SEQ ID NO: 2451640 - DNA, 25 bp, Homo sapien
catggttaattttccgcagcgagcc

SEQ ID NO: 2451641 - DNA, 25 bp, Homo sapien
cataaactgcaggaagtctcgggct

SEQ ID NO: 2451642 - DNA, 25 bp, Homo sapien
gcagcgagcccagaacgtcggagcc

SEQ ID NO: 2451643 - DNA, 25 bp, Homo sapien
agaatgcagatgagagactcatggt

SEQ ID NO: 2451644 - DNA, 25 bp, Homo sapien
caacccagggggtcttcaccaatag

SEQ ID NO: 2451645 - DNA, 25 bp, Homo sapien
cagggggtcttcaccaataggacac

SEQ ID NO: 2451646 - DNA, 25 bp, Homo sapien
tggccaacccagggggtcttcacca

SEQ ID NO: 2451647 - DNA, 25 bp, Homo sapien
ggtcttcaccaataggacaccgcat

SEQ ID NO: 2451648 - DNA, 25 bp, Homo sapien
ttgaaccgtgcacggcggcactgcc

SEQ ID NO: 2451649 - DNA, 25 bp, Homo sapien
tcggggtctccccaagaggctgttg

SEQ ID NO: 2451650 - DNA, 25 bp, Homo sapien
ctccccaagaggctgttgatgtctg

SEQ ID NO: 2451651 - DNA, 25 bp, Homo sapien
gttttgaactcccaacctgctgatc

SEQ ID NO: 2451652 - DNA, 25 bp, Homo sapien
attttataaatcaacgcctagaaag

SEQ ID NO: 2451653 - DNA, 25 bp, Homo sapien
tttcggaacaggtgctaccagccac

SEQ ID NO: 2451654 - DNA, 25 bp, Homo sapien
catgtccagaatctttcggaacagg

SEQ ID NO: 2451655 - DNA, 25 bp, Homo sapien
gcctagaaagtttagcatgtccaga

SEQ ID NO: 2451656 - DNA, 25 bp, Homo sapien
ccgggctgatgtggattcagccaaa

SEQ ID NO: 2451657 - DNA, 25 bp, Homo sapien
ctgatctgaactccgggctgatgtg

SEQ ID NO: 2451658 - DNA, 25 bp, Homo sapien
atgacaaagagctccgcggtgattt

SEQ ID NO: 2451659 - DNA, 25 bp, Homo sapien
cattcaatccattacgcggctccct

SEQ ID NO: 2451660 - DNA, 25 bp, Homo sapien
tggaggtgccccatgaagttggtaa

SEQ ID NO: 2451661 - DNA, 25 bp, Homo sapien
cccatgaagttggtaattcaaggcc

SEQ ID NO: 2451662 - DNA, 25 bp, Homo sapien
caggctcatggtggatatcaggaaa

SEQ ID NO: 2451663 - DNA, 25 bp, Homo sapien
gttggtaattcaaggccaggctcat

SEQ ID NO: 2451664 - DNA, 25 bp, Homo sapien
gacaaaagcttggaacgaagctggt

SEQ ID NO: 2451665 - DNA, 25 bp, Homo sapien
tgggttggaaggtccaatccgtgca

SEQ ID NO: 2451666 - DNA, 25 bp, Homo sapien
aatccgtgcaacttcagacaaaagc

SEQ ID NO: 2451667 - DNA, 25 bp, Homo sapien
gcttggaacgaagctggttcaccat

SEQ ID NO: 2451668 - DNA, 25 bp, Homo sapien
tggcccagaggactcacagcacggg

SEQ ID NO: 2451669 - DNA, 25 bp, Homo sapien
caaacatgaaaccagtgagcgctcc

SEQ ID NO: 2451670 - DNA, 25 bp, Homo sapien
tcttcttgccggctccgccagatta

SEQ ID NO: 2451671 - DNA, 25 bp, Homo sapien
tccgccagattacagccagaattcc

SEQ ID NO: 2451672 - DNA, 25 bp, Homo sapien
agacaccccttctaaacctgcaggg

SEQ ID NO: 2451673 - DNA, 25 bp, Homo sapien
ctgaagcaaatggacgtggcatccg

SEQ ID NO: 2451674 - DNA, 25 bp, Homo sapien
tgaagcaaatggacgtggcatccgc

SEQ ID NO: 2451675 - DNA, 25 bp, Homo sapien
ctgaagcaaatggacgtggcatcct

SEQ ID NO: 2451676 - DNA, 25 bp, Homo sapien
ttccctcgtagcttctgggctcaga

SEQ ID NO: 2451677 - DNA, 25 bp, Homo sapien
tttccctcgtagcttctgggctcag

SEQ ID NO: 2451678 - DNA, 25 bp, Homo sapien
ctttccctcgtagcttctgggctca

SEQ ID NO: 2451679 - DNA, 25 bp, Homo sapien
cactttccctcgtagcttctgggct

SEQ ID NO: 2451680 - DNA, 25 bp, Homo sapien
caactcccgcatctccccttagggc

SEQ ID NO: 2451681 - DNA, 25 bp, Homo sapien
actcccgcatctccccttagggcgg

SEQ ID NO: 2451682 - DNA, 25 bp, Homo sapien
cccaactcccgcatctccccttagg

SEQ ID NO: 2451683 - DNA, 25 bp, Homo sapien
cgcatctccccttagggcgggtttg

SEQ ID NO: 2451684 - DNA, 25 bp, Homo sapien
gaacacggggtgtcatcggtagaac

SEQ ID NO: 2451685 - DNA, 25 bp, Homo sapien
ctgaagtcactccggtttagtagaa

SEQ ID NO: 2451686 - DNA, 25 bp, Homo sapien
tgtcatcggtagaactttgtccata

SEQ ID NO: 2451687 - DNA, 25 bp, Homo sapien
gggtgtcatcggtagaactttgtcc

SEQ ID NO: 2451688 - DNA, 25 bp, Homo sapien
acattcatgtaaggtttcccaatga

SEQ ID NO: 2451689 - DNA, 25 bp, Homo sapien
cattcatgtaaggtttcccaatgag

SEQ ID NO: 2451690 - DNA, 25 bp, Homo sapien
attcatgtaaggtttcccaatgagt

SEQ ID NO: 2451691 - DNA, 25 bp, Homo sapien
cacattcatgtaaggtttcccaatg

SEQ ID NO: 2451692 - DNA, 25 bp, Homo sapien
tcgagtttcccttcagacaggagga

SEQ ID NO: 2451693 - DNA, 25 bp, Homo sapien
cagccaacaaaatggtaacgacaag

SEQ ID NO: 2451694 - DNA, 25 bp, Homo sapien
tctgctgtctgtaaagtcggggcgt

SEQ ID NO: 2451695 - DNA, 25 bp, Homo sapien
ggaggaaggcgccagcaacagccaa

SEQ ID NO: 2451696 - DNA, 25 bp, Homo sapien
gaaaattgcctctgcatgttacaaa

SEQ ID NO: 2451697 - DNA, 25 bp, Homo sapien
gaaggctgaggtgcctatggacttg

SEQ ID NO: 2451698 - DNA, 25 bp, Homo sapien
aagggacagaaaattgcctctgcat

SEQ ID NO: 2451699 - DNA, 25 bp, Homo sapien
acgtgaaaggcagaaaacgccatcc

SEQ ID NO: 2451700 - DNA, 25 bp, Homo sapien
aagcccaaacccagataacagacag

SEQ ID NO: 2451701 - DNA, 25 bp, Homo sapien
caggaagtgatacggtgaagcccaa

SEQ ID NO: 2451702 - DNA, 25 bp, Homo sapien
caggttctcaggaagtgatacggtg

SEQ ID NO: 2451703 - DNA, 25 bp, Homo sapien
aacccagataacagacagacgccat

SEQ ID NO: 2451704 - DNA, 25 bp, Homo sapien
gtggccttccactgtacgataattc

SEQ ID NO: 2451705 - DNA, 25 bp, Homo sapien
tatgatgagaagtcggttctctgtg

SEQ ID NO: 2451706 - DNA, 25 bp, Homo sapien
ttccagaaccacacgatggcatgac

SEQ ID NO: 2451707 - DNA, 25 bp, Homo sapien
agaggctatgatgagaagtcggttc

SEQ ID NO: 2451708 - DNA, 25 bp, Homo sapien
atagataaatggagacagacaatag

SEQ ID NO: 2451709 - DNA, 25 bp, Homo sapien
ctacataggtgattgatagacaata

SEQ ID NO: 2451710 - DNA, 25 bp, Homo sapien
gagagattgcagataggtagataag

SEQ ID NO: 2451711 - DNA, 25 bp, Homo sapien
taatgaaaggaagatgataggtgat

SEQ ID NO: 2451712 - DNA, 25 bp, Homo sapien
ggcatcctcaagcaaaaggtttctg

SEQ ID NO: 2451713 - DNA, 25 bp, Homo sapien
ccagtatgctctggtgaccttcggg

SEQ ID NO: 2451714 - DNA, 25 bp, Homo sapien
ggagagagactacccttcacatctg

SEQ ID NO: 2451715 - DNA, 25 bp, Homo sapien
tgtgttatgtgcttctacagcctcc

SEQ ID NO: 2451716 - DNA, 25 bp, Homo sapien
tcaggtcctaatggaattcaaccgg

SEQ ID NO: 2451717 - DNA, 25 bp, Homo sapien
ccggcgctggctccgttgattttct

SEQ ID NO: 2451718 - DNA, 25 bp, Homo sapien
gacaggattcaggtgagaattccaa

SEQ ID NO: 2451719 - DNA, 25 bp, Homo sapien
gaattcaaccggactggattcacgt

SEQ ID NO: 2451720 - DNA, 25 bp, Homo sapien
cctggtgccctttgatctctgcaga

SEQ ID NO: 2451721 - DNA, 25 bp, Homo sapien
ccctggtgccctttgatctctgcag

SEQ ID NO: 2451722 - DNA, 25 bp, Homo sapien
tgccctttgatctctgcagattcct

SEQ ID NO: 2451723 - DNA, 25 bp, Homo sapien
ggtgccctttgatctctgcagattc

SEQ ID NO: 2451724 - DNA, 25 bp, Homo sapien
gcttggtggcgaagacacgcggagt

SEQ ID NO: 2451725 - DNA, 25 bp, Homo sapien
gtggcgaagacacgcggagtggcca

SEQ ID NO: 2451726 - DNA, 25 bp, Homo sapien
cttggtggcgaagacacgcggagtg

SEQ ID NO: 2451727 - DNA, 25 bp, Homo sapien
tggtggcgaagacacgcggagtggc

SEQ ID NO: 2451728 - DNA, 25 bp, Homo sapien
gaattccaaggaatagacattctgg

SEQ ID NO: 2451729 - DNA, 25 bp, Homo sapien
cctgctccggtgttaatattttggg

SEQ ID NO: 2451730 - DNA, 25 bp, Homo sapien
cattctggtagatgctacattcgtg

SEQ ID NO: 2451731 - DNA, 25 bp, Homo sapien
tagatgctacattcgtgccctgctc

SEQ ID NO: 2451732 - DNA, 25 bp, Homo sapien
aattaatgagcgttttgccccgata

SEQ ID NO: 2451733 - DNA, 25 bp, Homo sapien
tctttctcaaattaatgagcgtttt

SEQ ID NO: 2451734 - DNA, 25 bp, Homo sapien
ttctcaaattaatgagcgttttgcc

SEQ ID NO: 2451735 - DNA, 25 bp, Homo sapien
tcaaattaatgagcgttttgccccg

SEQ ID NO: 2451736 - DNA, 25 bp, Homo sapien
ccgcgtccctcggaagacgatgctg

SEQ ID NO: 2451737 - DNA, 25 bp, Homo sapien
agacgatgctgaaatcccgttgtgt

SEQ ID NO: 2451738 - DNA, 25 bp, Homo sapien
cctcggaagacgatgctgaaatccc

SEQ ID NO: 2451739 - DNA, 25 bp, Homo sapien
ggaagacgatgctgaaatcccgttg

SEQ ID NO: 2451740 - DNA, 25 bp, Homo sapien
tgtagccttcttacgcacggcggtc

SEQ ID NO: 2451741 - DNA, 25 bp, Homo sapien
gctgtagccttcttacgcacggcgg

SEQ ID NO: 2451742 - DNA, 25 bp, Homo sapien
ggctgtagccttcttacgcacggcg

SEQ ID NO: 2451743 - DNA, 25 bp, Homo sapien
gtagccttcttacgcacggcggtca

SEQ ID NO: 2451744 - DNA, 25 bp, Homo sapien
ctttaaaacgattgaactgtgtcat

SEQ ID NO: 2451745 - DNA, 25 bp, Homo sapien
gattgaactgtgtcattttgccttt

SEQ ID NO: 2451746 - DNA, 25 bp, Homo sapien
actttaaaacgattgaactgtgtca

SEQ ID NO: 2451747 - DNA, 25 bp, Homo sapien
aaacgattgaactgtgtcattttgc

SEQ ID NO: 2451748 - DNA, 25 bp, Homo sapien
cctcctttgagtgcacggtccatca

SEQ ID NO: 2451749 - DNA, 25 bp, Homo sapien
ttctgccaggcctgtcggacgtacc

SEQ ID NO: 2451750 - DNA, 25 bp, Homo sapien
aataacatctgtagtcgcgaccggt

SEQ ID NO: 2451751 - DNA, 25 bp, Homo sapien
aaagcagacgtaggccacccgggca

SEQ ID NO: 2451752 - DNA, 25 bp, Homo sapien
gtagcctgaagctacatcagggctc

SEQ ID NO: 2451753 - DNA, 25 bp, Homo sapien
aggtagcctgaagctacatcagggc

SEQ ID NO: 2451754 - DNA, 25 bp, Homo sapien
ggtagcctgaagctacatcagggct

SEQ ID NO: 2451755 - DNA, 25 bp, Homo sapien
ggtcatgttgaaccgggacgtcatc

SEQ ID NO: 2451756 - DNA, 25 bp, Homo sapien
tcccagtgatggctcgtcacggctg

SEQ ID NO: 2451757 - DNA, 25 bp, Homo sapien
gatggctcgtcacggctgatatctg

SEQ ID NO: 2451758 - DNA, 25 bp, Homo sapien
cggctgatatctgccccagtggtca

SEQ ID NO: 2451759 - DNA, 25 bp, Homo sapien
aggcccatgaagtagtgactaatgt

SEQ ID NO: 2451760 - DNA, 25 bp, Homo sapien
ccatgaagtagtgactaatgtccac

SEQ ID NO: 2451761 - DNA, 25 bp, Homo sapien
gaagtagtgactaatgtccactctg

SEQ ID NO: 2451762 - DNA, 25 bp, Homo sapien
tagtgactaatgtccactctgaaat

SEQ ID NO: 2451763 - DNA, 25 bp, Homo sapien
agttggccttcacctccaagatgac

SEQ ID NO: 2451764 - DNA, 25 bp, Homo sapien
actgccaagttgagtggcctccacc

SEQ ID NO: 2451765 - DNA, 25 bp, Homo sapien
tctacctccaagctggctctaacct

SEQ ID NO: 2451766 - DNA, 25 bp, Homo sapien
cctccactgccaagttgagtggcct

SEQ ID NO: 2451767 - DNA, 25 bp, Homo sapien
gtcctgggagcacgcccaagcccga

SEQ ID NO: 2451768 - DNA, 25 bp, Homo sapien
cgcccaagcccgaggttggacttgg

SEQ ID NO: 2451769 - DNA, 25 bp, Homo sapien
agccaagccagccaagatctccggg

SEQ ID NO: 2451770 - DNA, 25 bp, Homo sapien
gagcacgcccaagcccgaggttgga

SEQ ID NO: 2451771 - DNA, 25 bp, Homo sapien
tggtaaggaatattccttctcccca

SEQ ID NO: 2451772 - DNA, 25 bp, Homo sapien
tcacgtctcctcaattcctcccagc

SEQ ID NO: 2451773 - DNA, 25 bp, Homo sapien
cgctgtgatgataggtctgtggtaa

SEQ ID NO: 2451774 - DNA, 25 bp, Homo sapien
ccagccatttgtgccgctgtgatga

SEQ ID NO: 2451775 - DNA, 25 bp, Homo sapien
gaacaggcattcctcgtagtacttc

SEQ ID NO: 2451776 - DNA, 25 bp, Homo sapien
ctggaacaggcattcctcgtagtac

SEQ ID NO: 2451777 - DNA, 25 bp, Homo sapien
gcattcctcgtagtacttctgtttg

SEQ ID NO: 2451778 - DNA, 25 bp, Homo sapien
tcctcgtagtacttctgtttgctac

SEQ ID NO: 2451779 - DNA, 25 bp, Homo sapien
ctctaggaatggagtggagaaatca

SEQ ID NO: 2451780 - DNA, 25 bp, Homo sapien
tctaggaatggagtggagaaatcac

SEQ ID NO: 2451781 - DNA, 25 bp, Homo sapien
gtctttctgggtagtgccttcactc

SEQ ID NO: 2451782 - DNA, 25 bp, Homo sapien
tgggtagtgccttcactcctctctg

SEQ ID NO: 2451783 - DNA, 25 bp, Homo sapien
tttctgggtagtgccttcactcctc

SEQ ID NO: 2451784 - DNA, 25 bp, Homo sapien
ctacgtctttctgggtagtgccttc

SEQ ID NO: 2451785 - DNA, 25 bp, Homo sapien
tggtcccagtcgtgactcccattga

SEQ ID NO: 2451786 - DNA, 25 bp, Homo sapien
ccaacagcgtttaaggtcaccgtca

SEQ ID NO: 2451787 - DNA, 25 bp, Homo sapien
ggatcattgatgcttaccacgtggg

SEQ ID NO: 2451788 - DNA, 25 bp, Homo sapien
cgtgggtttccaacatagactgtgg

SEQ ID NO: 2451789 - DNA, 25 bp, Homo sapien
caagttcagcttgacaattacaaag

SEQ ID NO: 2451790 - DNA, 25 bp, Homo sapien
gatgttgtattcgtgacaatgagtg

SEQ ID NO: 2451791 - DNA, 25 bp, Homo sapien
ttcatagggtgagaccgtcaggcgc

SEQ ID NO: 2451792 - DNA, 25 bp, Homo sapien
aatgagtgtttcatagggtgagacc

SEQ ID NO: 2451793 - DNA, 25 bp, Homo sapien
gttctatggtccaacgtggacggca

SEQ ID NO: 2451794 - DNA, 25 bp, Homo sapien
ttagtggtggcttttgcgttcactc

SEQ ID NO: 2451795 - DNA, 25 bp, Homo sapien
gcttttgcgttcactctgacagcgg

SEQ ID NO: 2451796 - DNA, 25 bp, Homo sapien
tgacagcggttctatggtccaacgt

SEQ ID NO: 2451797 - DNA, 25 bp, Homo sapien
taaatataatgtggtccagccacac

SEQ ID NO: 2451798 - DNA, 25 bp, Homo sapien
gccctcatacccatctatagacgaa

SEQ ID NO: 2451799 - DNA, 25 bp, Homo sapien
aatataatgtggtccagccacacag

SEQ ID NO: 2451800 - DNA, 25 bp, Homo sapien
gagaaatataatgtggtccagccac

SEQ ID NO: 2451801 - DNA, 25 bp, Homo sapien
acccccatctatagatgaagggaga

SEQ ID NO: 2451802 - DNA, 25 bp, Homo sapien
tacccccatctatagatgaagggag

SEQ ID NO: 2451803 - DNA, 25 bp, Homo sapien
catacccccatctatagatgaaggg

SEQ ID NO: 2451804 - DNA, 25 bp, Homo sapien
ctcatacccccatctatagatgaag

SEQ ID NO: 2451805 - DNA, 25 bp, Homo sapien
atgtgggtgaatgctgaggacatca

SEQ ID NO: 2451806 - DNA, 25 bp, Homo sapien
aggctctgccacaggtggcaatgtg

SEQ ID NO: 2451807 - DNA, 25 bp, Homo sapien
ctctgccacaggtggcaatgtgggt

SEQ ID NO: 2451808 - DNA, 25 bp, Homo sapien
acaggtggcaatgtgggtgaatgct

SEQ ID NO: 2451809 - DNA, 25 bp, Homo sapien
cgggtctttaatgggtctggagtct

SEQ ID NO: 2451810 - DNA, 25 bp, Homo sapien
agtctccttttggggtcgtgacaat

SEQ ID NO: 2451811 - DNA, 25 bp, Homo sapien
ttattccctatgtccagatacaggc

SEQ ID NO: 2451812 - DNA, 25 bp, Homo sapien
tccatttattccctatgtccagata

SEQ ID NO: 2451813 - DNA, 25 bp, Homo sapien
tagaggcatgcacacatatagaccc

SEQ ID NO: 2451814 - DNA, 25 bp, Homo sapien
catgcagtcctgcaaatgtgcaaac

SEQ ID NO: 2451815 - DNA, 25 bp, Homo sapien
tgacttctacatgcgcaaaggcgca

SEQ ID NO: 2451816 - DNA, 25 bp, Homo sapien
gacaagggcgagtctccatcaggaa

SEQ ID NO: 2451817 - DNA, 25 bp, Homo sapien
ctctggaaggggcaagcgtccttca

SEQ ID NO: 2451818 - DNA, 25 bp, Homo sapien
agtccccgctgcctgactctcgttt

SEQ ID NO: 2451819 - DNA, 25 bp, Homo sapien
cgctgcctgactctcgtttctcctc

SEQ ID NO: 2451820 - DNA, 25 bp, Homo sapien
tcattacccgcaacccagtttcaca

SEQ ID NO: 2451821 - DNA, 25 bp, Homo sapien
tctattactgcagggtttcacttta

SEQ ID NO: 2451822 - DNA, 25 bp, Homo sapien
ttcattggtttttacagtctattac

SEQ ID NO: 2451823 - DNA, 25 bp, Homo sapien
tggagtgtaatagcgtgaccatggc

SEQ ID NO: 2451824 - DNA, 25 bp, Homo sapien
gacacagagtttcattctggtcgcc

SEQ ID NO: 2451825 - DNA, 25 bp, Homo sapien
gctataagaatacacaagtaggccg

SEQ ID NO: 2451826 - DNA, 25 bp, Homo sapien
gattgctataagaatacacaagtag

SEQ ID NO: 2451827 - DNA, 25 bp, Homo sapien
ttgctataagaatacacaagtaggc

SEQ ID NO: 2451828 - DNA, 25 bp, Homo sapien
tataagaatacacaagtaggccggg

SEQ ID NO: 2451829 - DNA, 25 bp, Homo sapien
gccagtttggagcaatttccttatg

SEQ ID NO: 2451830 - DNA, 25 bp, Homo sapien
aagtgaccaactacaccgtccgagt

SEQ ID NO: 2451831 - DNA, 25 bp, Homo sapien
tccttatgtgaagtgaccaactaca

SEQ ID NO: 2451832 - DNA, 25 bp, Homo sapien
tagctattgccagtttggagcaatt

SEQ ID NO: 2451833 - DNA, 25 bp, Homo sapien
cgatttcagcttaccgcaaactccg

SEQ ID NO: 2451834 - DNA, 25 bp, Homo sapien
gtttttctgtgatggagtcttgttc

SEQ ID NO: 2451835 - DNA, 25 bp, Homo sapien
tgcgatttcagcttaccgcaaactc

SEQ ID NO: 2451836 - DNA, 25 bp, Homo sapien
ggtgcgatttcagcttaccgcaaac

SEQ ID NO: 2451837 - DNA, 25 bp, Homo sapien
tttggctgtaaaagtgctccttggg

SEQ ID NO: 2451838 - DNA, 25 bp, Homo sapien
gtgggtttggctgtaaaagtgctcc

SEQ ID NO: 2451839 - DNA, 25 bp, Homo sapien
tcctgggttgcagggatataagcag

SEQ ID NO: 2451840 - DNA, 25 bp, Homo sapien
caactgtcttgaaatggcaaaattt

SEQ ID NO: 2451841 - DNA, 25 bp, Homo sapien
tgtggtgagccattgagctccagcc

SEQ ID NO: 2451842 - DNA, 25 bp, Homo sapien
tggtgagccattgagctccagcctg

SEQ ID NO: 2451843 - DNA, 25 bp, Homo sapien
ttgtggtgagccattgagctccagc

SEQ ID NO: 2451844 - DNA, 25 bp, Homo sapien
ggttgtggtgagccattgagctcca

SEQ ID NO: 2451845 - DNA, 25 bp, Homo sapien
tcttcactacaaaacggatgctcag

SEQ ID NO: 2451846 - DNA, 25 bp, Homo sapien
gaacgttgccaagtaggtgtgcccg

SEQ ID NO: 2451847 - DNA, 25 bp, Homo sapien
gatgctcagggaacacgtatcgggt

SEQ ID NO: 2451848 - DNA, 25 bp, Homo sapien
cgcagcaggcgtcaacagtacgagt

SEQ ID NO: 2451849 - DNA, 25 bp, Homo sapien
ggtcaaagtgtaggagtctgcatct

SEQ ID NO: 2451850 - DNA, 25 bp, Homo sapien
tgataacgtcacagaaggcatggat

SEQ ID NO: 2451851 - DNA, 25 bp, Homo sapien
tatttttggtaagtcgcactctggg

SEQ ID NO: 2451852 - DNA, 25 bp, Homo sapien
cttgaaacgggcaacaatctcctct

SEQ ID NO: 2451853 - DNA, 25 bp, Homo sapien
tatttattgagccactctggctctg

SEQ ID NO: 2451854 - DNA, 25 bp, Homo sapien
tggatcagttgaacataaatattga

SEQ ID NO: 2451855 - DNA, 25 bp, Homo sapien
gattcaatgcaagcttcccagatat

SEQ ID NO: 2451856 - DNA, 25 bp, Homo sapien
tttgatccacagttcgttggatcag

SEQ ID NO: 2451857 - DNA, 25 bp, Homo sapien
gggtcttgtttgtccaccggcctca

SEQ ID NO: 2451858 - DNA, 25 bp, Homo sapien
tgtctgtggctacccctgagtgcat

SEQ ID NO: 2451859 - DNA, 25 bp, Homo sapien
tacctagttcgctggcctggcatag

SEQ ID NO: 2451860 - DNA, 25 bp, Homo sapien
cgtagctagtctgatgttgcacccc

SEQ ID NO: 2451861 - DNA, 25 bp, Homo sapien
caaacaaaccttttggtcaggtgct

SEQ ID NO: 2451862 - DNA, 25 bp, Homo sapien
aacaaaccttttggtcaggtgctat

SEQ ID NO: 2451863 - DNA, 25 bp, Homo sapien
tggtctctgtctcccccctccccat

SEQ ID NO: 2451864 - DNA, 25 bp, Homo sapien
tgtctctgtaaccttctccatttct

SEQ ID NO: 2451865 - DNA, 25 bp, Homo sapien
tctctctccccgttcccatctctct

SEQ ID NO: 2451866 - DNA, 25 bp, Homo sapien
tctcctggtctctgtctcccccctc

SEQ ID NO: 2451867 - DNA, 25 bp, Homo sapien
tgcccggcccctctctttatctttc

SEQ ID NO: 2451868 - DNA, 25 bp, Homo sapien
tctctttatctttctagctctctcc

SEQ ID NO: 2451869 - DNA, 25 bp, Homo sapien
tatctttctagctctctccctgtct

SEQ ID NO: 2451870 - DNA, 25 bp, Homo sapien
ctttatctttctagctctctccctg

SEQ ID NO: 2451871 - DNA, 25 bp, Homo sapien
ctctctcccttcccctctctgtctc

SEQ ID NO: 2451872 - DNA, 25 bp, Homo sapien
tgtctctctctcccttcccctctgt

SEQ ID NO: 2451873 - DNA, 25 bp, Homo sapien
tctcccttcccctctctgtctctct

SEQ ID NO: 2451874 - DNA, 25 bp, Homo sapien
ctctctcccttcccctctgtctctc

SEQ ID NO: 2451875 - DNA, 25 bp, Homo sapien
tgggccttgtaataaagaccgaggc

SEQ ID NO: 2451876 - DNA, 25 bp, Homo sapien
gggctgggaggtccggaagtcgctc

SEQ ID NO: 2451877 - DNA, 25 bp, Homo sapien
gggatccctggtggtctttccgctc

SEQ ID NO: 2451878 - DNA, 25 bp, Homo sapien
aagtcgctcccggtcctggtactca

SEQ ID NO: 2451879 - DNA, 25 bp, Homo sapien
ccgtgtcccgagcaccaggcagaca

SEQ ID NO: 2451880 - DNA, 25 bp, Homo sapien
gagggcgtccgcgagcgtcgcttgt

SEQ ID NO: 2451881 - DNA, 25 bp, Homo sapien
atctgcagaaggtgagccctcgagg

SEQ ID NO: 2451882 - DNA, 25 bp, Homo sapien
ctggcggacgtcgctgctgatcgcg

SEQ ID NO: 2451883 - DNA, 25 bp, Homo sapien
gcgagcgtcgcttgtttccagtgtg

SEQ ID NO: 2451884 - DNA, 25 bp, Homo sapien
tacctgtgtccctaagagaaaggaa

SEQ ID NO: 2451885 - DNA, 25 bp, Homo sapien
ttttagtgatacctgtgtccctaag

SEQ ID NO: 2451886 - DNA, 25 bp, Homo sapien
caagtttttagtgatacctgtgtcc

SEQ ID NO: 2451887 - DNA, 25 bp, Homo sapien
ttcaacaagtttttagtgatacctg

SEQ ID NO: 2451888 - DNA, 25 bp, Homo sapien
cttcccggttgaaggttcaagcgat

SEQ ID NO: 2451889 - DNA, 25 bp, Homo sapien
gcagatctgagatgggacaggcccc

SEQ ID NO: 2451890 - DNA, 25 bp, Homo sapien
cacagagcagatctgagatgggaca

SEQ ID NO: 2451891 - DNA, 25 bp, Homo sapien
gcagttttgttcgttgccccggctg

SEQ ID NO: 2451892 - DNA, 25 bp, Homo sapien
cgcacgcagcccaggaatggacatt

SEQ ID NO: 2451893 - DNA, 25 bp, Homo sapien
cctgcacagactggctgctggacct

SEQ ID NO: 2451894 - DNA, 25 bp, Homo sapien
aatggacattcctaacgggtggtgg

SEQ ID NO: 2451895 - DNA, 25 bp, Homo sapien
tgtctggtgactgaagtacaggtcg

SEQ ID NO: 2451896 - DNA, 25 bp, Homo sapien
actggtcccggtctctggattcagc

SEQ ID NO: 2451897 - DNA, 25 bp, Homo sapien
actcactggtcccggtctctggatt

SEQ ID NO: 2451898 - DNA, 25 bp, Homo sapien
tcactggtcccggtctctggattca

SEQ ID NO: 2451899 - DNA, 25 bp, Homo sapien
tgtgtttatttcatgataaagtgat

SEQ ID NO: 2451900 - DNA, 25 bp, Homo sapien
gctaatttttatattagccggtctc

SEQ ID NO: 2451901 - DNA, 25 bp, Homo sapien
taatttttatattagccggtctcga

SEQ ID NO: 2451902 - DNA, 25 bp, Homo sapien
tcttttttcagaccgagtctcggtc

SEQ ID NO: 2451903 - DNA, 25 bp, Homo sapien
tgcctcagcctctcgaatagctgag

SEQ ID NO: 2451904 - DNA, 25 bp, Homo sapien
tagagtctgcctttcgggccaggag

SEQ ID NO: 2451905 - DNA, 25 bp, Homo sapien
gagttgagccgttaccacaccattg

SEQ ID NO: 2451906 - DNA, 25 bp, Homo sapien
gtcacgtgaccaagacgagggctca

SEQ ID NO: 2451907 - DNA, 25 bp, Homo sapien
taaaatctattaagtgccgggcgcg

SEQ ID NO: 2451908 - DNA, 25 bp, Homo sapien
tggccctgccgtgcgctgacaccaa

SEQ ID NO: 2451909 - DNA, 25 bp, Homo sapien
cgggagagccggctctggaacccca

SEQ ID NO: 2451910 - DNA, 25 bp, Homo sapien
aaccccagggctgtagtctctgtgg

SEQ ID NO: 2451911 - DNA, 25 bp, Homo sapien
gctgtagtctctgtggccctgccgt

SEQ ID NO: 2451912 - DNA, 25 bp, Homo sapien
ctccagcatttatcagggagcccgg

SEQ ID NO: 2451913 - DNA, 25 bp, Homo sapien
agaaggcgccatctagaagccagga

SEQ ID NO: 2451914 - DNA, 25 bp, Homo sapien
gagactgaatctaccataccttggt

SEQ ID NO: 2451915 - DNA, 25 bp, Homo sapien
agcactgcagaccaggaacgtgggc

SEQ ID NO: 2451916 - DNA, 25 bp, Homo sapien
tgtttattgttttgcagcaggaggc

SEQ ID NO: 2451917 - DNA, 25 bp, Homo sapien
cccaacatagaacatactcgccagt

SEQ ID NO: 2451918 - DNA, 25 bp, Homo sapien
tgttttgcagcaggaggcccaacat

SEQ ID NO: 2451919 - DNA, 25 bp, Homo sapien
gccagtactcggctgtgcaaaacag

SEQ ID NO: 2451920 - DNA, 25 bp, Homo sapien
aatttctcgaaggttgatggtccgc

SEQ ID NO: 2451921 - DNA, 25 bp, Homo sapien
gatcaagacacggaatcggctgccg

SEQ ID NO: 2451922 - DNA, 25 bp, Homo sapien
aatacttagaacacgacttggctcc

SEQ ID NO: 2451923 - DNA, 25 bp, Homo sapien
ggatgcggctgggaaaaagacaact

SEQ ID NO: 2451924 - DNA, 25 bp, Homo sapien
gacgttggaccacgcacccttgaag

SEQ ID NO: 2451925 - DNA, 25 bp, Homo sapien
gcaggacgttggaccacgcaccctt

SEQ ID NO: 2451926 - DNA, 25 bp, Homo sapien
ccatgccccgcaggacgttggacca

SEQ ID NO: 2451927 - DNA, 25 bp, Homo sapien
ggaccagcacgaaggcgccccccat

SEQ ID NO: 2451928 - DNA, 25 bp, Homo sapien
gggcctagggcaaggagcttggttc

SEQ ID NO: 2451929 - DNA, 25 bp, Homo sapien
ctcccacgggcctagggcaaggagc

SEQ ID NO: 2451930 - DNA, 25 bp, Homo sapien
cccacgggcctagggcaaggagctt

SEQ ID NO: 2451931 - DNA, 25 bp, Homo sapien
gcctagggcaaggagcttggttccc

SEQ ID NO: 2451932 - DNA, 25 bp, Homo sapien
tgcgcccggactgcatcatcatgcg

SEQ ID NO: 2451933 - DNA, 25 bp, Homo sapien
gactgcatcatcatgcgccgccgca

SEQ ID NO: 2451934 - DNA, 25 bp, Homo sapien
cccggactgcatcatcatgcgccgc

SEQ ID NO: 2451935 - DNA, 25 bp, Homo sapien
ttgcgcccggactgcatcatcatgc

SEQ ID NO: 2451936 - DNA, 25 bp, Homo sapien
caccacgccggccacggccgtcacg

SEQ ID NO: 2451937 - DNA, 25 bp, Homo sapien
aggacaccacgccggccacggccgt

SEQ ID NO: 2451938 - DNA, 25 bp, Homo sapien
ggtaggacaccacgccggccacggc

SEQ ID NO: 2451939 - DNA, 25 bp, Homo sapien
atcatccagctcaccacgatgtgcg

SEQ ID NO: 2451940 - DNA, 25 bp, Homo sapien
ctgcgcgggaacggcacgtcaccgt

SEQ ID NO: 2451941 - DNA, 25 bp, Homo sapien
gggaacggcacgtcaccgtctccag

SEQ ID NO: 2451942 - DNA, 25 bp, Homo sapien
gcgggaacggcacgtcaccgtctcc

SEQ ID NO: 2451943 - DNA, 25 bp, Homo sapien
gcgcgggaacggcacgtcaccgtct

SEQ ID NO: 2451944 - DNA, 25 bp, Homo sapien
gccccctccacgtggctgctcagtg

SEQ ID NO: 2451945 - DNA, 25 bp, Homo sapien
cccctgaggtggtgccgagctcttc

SEQ ID NO: 2451946 - DNA, 25 bp, Homo sapien
agctgacgtttacaacacgagaggt

SEQ ID NO: 2451947 - DNA, 25 bp, Homo sapien
cgagctcttccgagaccaccagtgc

SEQ ID NO: 2451948 - DNA, 25 bp, Homo sapien
cccagcaagacagtcccagaggccg

SEQ ID NO: 2451949 - DNA, 25 bp, Homo sapien
cggagcccagcaagacagtcccaga

SEQ ID NO: 2451950 - DNA, 25 bp, Homo sapien
agcccagcaagacagtcccagaggc

SEQ ID NO: 2451951 - DNA, 25 bp, Homo sapien
gagcccagcaagacagtcccagagg

SEQ ID NO: 2451952 - DNA, 25 bp, Homo sapien
acttcgcgatggcagccacacgtac

SEQ ID NO: 2451953 - DNA, 25 bp, Homo sapien
tgttgagcccgtctctgggacttcg

SEQ ID NO: 2451954 - DNA, 25 bp, Homo sapien
ggaacgtctgtgtgttgagcccgtc

SEQ ID NO: 2451955 - DNA, 25 bp, Homo sapien
aagacggcgtctccaagtccaggag

SEQ ID NO: 2451956 - DNA, 25 bp, Homo sapien
ttctggcgaaatccagcgggtacac

SEQ ID NO: 2451957 - DNA, 25 bp, Homo sapien
taggccgcccggtagatgatgatgc

SEQ ID NO: 2451958 - DNA, 25 bp, Homo sapien
atcgtacacgccgaagtaggccgcc

SEQ ID NO: 2451959 - DNA, 25 bp, Homo sapien
gcgggtacacgaagcagagggaggt

SEQ ID NO: 2451960 - DNA, 25 bp, Homo sapien
cgatctgcttgctggcgtgctggac

SEQ ID NO: 2451961 - DNA, 25 bp, Homo sapien
tgtactgcttgtcggcggcgatctg

SEQ ID NO: 2451962 - DNA, 25 bp, Homo sapien
cttgtcggcggcgatctgcttgctg

SEQ ID NO: 2451963 - DNA, 25 bp, Homo sapien
ggcggcgatctgcttgctggcgtgc

SEQ ID NO: 2451964 - DNA, 25 bp, Homo sapien
atggagtcttgctacgatgaccaag

SEQ ID NO: 2451965 - DNA, 25 bp, Homo sapien
gctacgatgaccaagctgctctcaa

SEQ ID NO: 2451966 - DNA, 25 bp, Homo sapien
ctcttgaagcgctgggacatcccgc

SEQ ID NO: 2451967 - DNA, 25 bp, Homo sapien
tgggcctcttgaagcgctgggacat

SEQ ID NO: 2451968 - DNA, 25 bp, Homo sapien
ggagcggccgcgcccgcgtccccac

SEQ ID NO: 2451969 - DNA, 25 bp, Homo sapien
cggagcggccgcgcccgcgtcccca

SEQ ID NO: 2451970 - DNA, 25 bp, Homo sapien
ctagtccccggagcggccgcgcccg

SEQ ID NO: 2451971 - DNA, 25 bp, Homo sapien
tccccggagcggccgcgcccgcgtc

SEQ ID NO: 2451972 - DNA, 25 bp, Homo sapien
gatgcctccggccaagaagtctttg

SEQ ID NO: 2451973 - DNA, 25 bp, Homo sapien
gcggcgatgcctccggccaagaagt

SEQ ID NO: 2451974 - DNA, 25 bp, Homo sapien
ttgacccgctcgatcggagccacgg

SEQ ID NO: 2451975 - DNA, 25 bp, Homo sapien
ccaagaagtctttggcgaaggagat

SEQ ID NO: 2451976 - DNA, 25 bp, Homo sapien
ctgatgcccagttcgctccgagtgc

SEQ ID NO: 2451977 - DNA, 25 bp, Homo sapien
ggttccgcggcagccttgaccttgt

SEQ ID NO: 2451978 - DNA, 25 bp, Homo sapien
gatgtgcgacatgtggtgccccgac

SEQ ID NO: 2451979 - DNA, 25 bp, Homo sapien
gtgcgtcgtccgctttctcccggag

SEQ ID NO: 2451980 - DNA, 25 bp, Homo sapien
tggataattggatgggtaatgggtg

SEQ ID NO: 2451981 - DNA, 25 bp, Homo sapien
gataattggatgggtaatgggtggg

SEQ ID NO: 2451982 - DNA, 25 bp, Homo sapien
ataattggatgggtaatgggtgggt

SEQ ID NO: 2451983 - DNA, 25 bp, Homo sapien
ggataattggatgggtaatgggtgg

SEQ ID NO: 2451984 - DNA, 25 bp, Homo sapien
tggatagatggatgtgctcactcag

SEQ ID NO: 2451985 - DNA, 25 bp, Homo sapien
gcgctcgatcggcaaatgcttctgg

SEQ ID NO: 2451986 - DNA, 25 bp, Homo sapien
gatggatgtgctcactcagcaaatg

SEQ ID NO: 2451987 - DNA, 25 bp, Homo sapien
tggatggatgcgctcgatcggcaaa

SEQ ID NO: 2451988 - DNA, 25 bp, Homo sapien
cttttgctttctttattcagtcacg

SEQ ID NO: 2451989 - DNA, 25 bp, Homo sapien
tatgtgactgtcctatggtacttgg

SEQ ID NO: 2451990 - DNA, 25 bp, Homo sapien
actacacgctcctatgtgactgtcc

SEQ ID NO: 2451991 - DNA, 25 bp, Homo sapien
cacgctcctatgtgactgtcctatg

SEQ ID NO: 2451992 - DNA, 25 bp, Homo sapien
gctcctatgtgactgtcctatggta

SEQ ID NO: 2451993 - DNA, 25 bp, Homo sapien
ctataatgaacatgctgcctgggct

SEQ ID NO: 2451994 - DNA, 25 bp, Homo sapien
caggacaccccccaagtgcaccacc

SEQ ID NO: 2451995 - DNA, 25 bp, Homo sapien
acaccccccaagtgcaccacctgca

SEQ ID NO: 2451996 - DNA, 25 bp, Homo sapien
cctgcacctggtggaagccgtgcag

SEQ ID NO: 2451997 - DNA, 25 bp, Homo sapien
ctgcacctggtggaagccgtgcagc

SEQ ID NO: 2451998 - DNA, 25 bp, Homo sapien
tgcaccagcatgttcagtgactgca

SEQ ID NO: 2451999 - DNA, 25 bp, Homo sapien
gactgcatcagggcgcgctgcgcca

SEQ ID NO: 2452000 - DNA, 25 bp, Homo sapien
agtgactgcatcagggcgcgctgcg

SEQ ID NO: 2452001 - DNA, 25 bp, Homo sapien
gtgactgcatcagggcgcgctgcgc

SEQ ID NO: 2452002 - DNA, 25 bp, Homo sapien
aacaggagctcagaacggtgagcag

SEQ ID NO: 2452003 - DNA, 25 bp, Homo sapien
acaggagctcagaacggtgagcaga

SEQ ID NO: 2452004 - DNA, 25 bp, Homo sapien
agtcatgcaggatccggcacaggac

SEQ ID NO: 2452005 - DNA, 25 bp, Homo sapien
ctctcggcgaccctgctgagtaact

SEQ ID NO: 2452006 - DNA, 25 bp, Homo sapien
actttgtcgtctggccagtcatgca

SEQ ID NO: 2452007 - DNA, 25 bp, Homo sapien
cacaggacgtacagctcagcgctgg

SEQ ID NO: 2452008 - DNA, 25 bp, Homo sapien
aagaagcagtcctccccggacagat

SEQ ID NO: 2452009 - DNA, 25 bp, Homo sapien
aagacaaaacgagatacgtccgtca

SEQ ID NO: 2452010 - DNA, 25 bp, Homo sapien
tacgtccgtcaggtatggaagaagc

SEQ ID NO: 2452011 - DNA, 25 bp, Homo sapien
ggtatggaagaagcagtcctccccg

SEQ ID NO: 2452012 - DNA, 25 bp, Homo sapien
tcggcaccgtggatgcccatgaatg

SEQ ID NO: 2452013 - DNA, 25 bp, Homo sapien
taaggccacactgtgacggctctcg

SEQ ID NO: 2452014 - DNA, 25 bp, Homo sapien
tctcggctacttgcactgatgataa

SEQ ID NO: 2452015 - DNA, 25 bp, Homo sapien
catgaatgctgatctcggctgttcc

SEQ ID NO: 2452016 - DNA, 25 bp, Homo sapien
agtgggcggccagctcgataatgtc

SEQ ID NO: 2452017 - DNA, 25 bp, Homo sapien
tggatctgcactgcctgcggtccgg

SEQ ID NO: 2452018 - DNA, 25 bp, Homo sapien
tctgggaggtcaaacacagtcacct

SEQ ID NO: 2452019 - DNA, 25 bp, Homo sapien
atacgagggtactcacgggccagct

SEQ ID NO: 2452020 - DNA, 25 bp, Homo sapien
gagaagcgggacagattgaaggccg

SEQ ID NO: 2452021 - DNA, 25 bp, Homo sapien
ggacagattgaaggccgtggccacc

SEQ ID NO: 2452022 - DNA, 25 bp, Homo sapien
gtgcatggcccgcatgaacctcagc

SEQ ID NO: 2452023 - DNA, 25 bp, Homo sapien
tggcacgcagtcagcttcgtcatgc

SEQ ID NO: 2452024 - DNA, 25 bp, Homo sapien
catccgatgccaggtagacgttcgc

SEQ ID NO: 2452025 - DNA, 25 bp, Homo sapien
aagccgtgcagagagtattcgccat

SEQ ID NO: 2452026 - DNA, 25 bp, Homo sapien
tggtttgttccctctcggatggcaa

SEQ ID NO: 2452027 - DNA, 25 bp, Homo sapien
tgtaaagaggttccatgtgaggtca

SEQ ID NO: 2452028 - DNA, 25 bp, Homo sapien
gaaatggggacagtcgtgtgacctc

SEQ ID NO: 2452029 - DNA, 25 bp, Homo sapien
ggagaaatggggacagtcgtgtgac

SEQ ID NO: 2452030 - DNA, 25 bp, Homo sapien
agaaatggggacagtcgtgtgacct

SEQ ID NO: 2452031 - DNA, 25 bp, Homo sapien
ctggagaaatggggacagtcgtgtg

SEQ ID NO: 2452032 - DNA, 25 bp, Homo sapien
gcttctcctatgtgctcgcggctgc

SEQ ID NO: 2452033 - DNA, 25 bp, Homo sapien
gatacagcccctttgagactagagc

SEQ ID NO: 2452034 - DNA, 25 bp, Homo sapien
ttctcaacctttcgggaaaagcagc

SEQ ID NO: 2452035 - DNA, 25 bp, Homo sapien
tagagcccataaggaggtcacgctt

SEQ ID NO: 2452036 - DNA, 25 bp, Homo sapien
ttcagtttgcaagcggtgagcaggc

SEQ ID NO: 2452037 - DNA, 25 bp, Homo sapien
tgctggcaatatccgcagccttctg

SEQ ID NO: 2452038 - DNA, 25 bp, Homo sapien
acgcagaggcgtccactttgctggc

SEQ ID NO: 2452039 - DNA, 25 bp, Homo sapien
tcttttaacaaatcgaacaccttca

SEQ ID NO: 2452040 - DNA, 25 bp, Homo sapien
gcagggtctcccgagtcctgtgaca

SEQ ID NO: 2452041 - DNA, 25 bp, Homo sapien
ccgggatggagtcgtgcttgacact

SEQ ID NO: 2452042 - DNA, 25 bp, Homo sapien
gcataaagccctcaatcagctccag

SEQ ID NO: 2452043 - DNA, 25 bp, Homo sapien
tccacgtcactgaggtcttcgaagg

SEQ ID NO: 2452044 - DNA, 25 bp, Homo sapien
cagaagtggttcagcgggaatccca

SEQ ID NO: 2452045 - DNA, 25 bp, Homo sapien
ctggatcccgtagccgccagctttg

SEQ ID NO: 2452046 - DNA, 25 bp, Homo sapien
gtgtacggactccaccagcatgccg

SEQ ID NO: 2452047 - DNA, 25 bp, Homo sapien
cacgttcagaaagtccccgtgtacg

SEQ ID NO: 2452048 - DNA, 25 bp, Homo sapien
gttaattgcagccagcgtcctgggc

SEQ ID NO: 2452049 - DNA, 25 bp, Homo sapien
tttgagcctccatgggtcagtgtgg

SEQ ID NO: 2452050 - DNA, 25 bp, Homo sapien
gacaccccacgtgtgagggtggcca

SEQ ID NO: 2452051 - DNA, 25 bp, Homo sapien
tattcgtgttaattgcagccagcgt

SEQ ID NO: 2452052 - DNA, 25 bp, Homo sapien
gacagctccgagaacttcaccttcg

SEQ ID NO: 2452053 - DNA, 25 bp, Homo sapien
tgggctccccgctgtggacgtattc

SEQ ID NO: 2452054 - DNA, 25 bp, Homo sapien
cgagaccctggtgtccagctgatgg

SEQ ID NO: 2452055 - DNA, 25 bp, Homo sapien
tcaccttcgtttcctcgtagaattc

SEQ ID NO: 2452056 - DNA, 25 bp, Homo sapien
gcgacacctgtgaacacgctgtgtt

SEQ ID NO: 2452057 - DNA, 25 bp, Homo sapien
ctggagcagtggacgatcgcgacac

SEQ ID NO: 2452058 - DNA, 25 bp, Homo sapien
gatcgcgacacctgtgaacacgctg

SEQ ID NO: 2452059 - DNA, 25 bp, Homo sapien
gtggacgatcgcgacacctgtgaac

SEQ ID NO: 2452060 - DNA, 25 bp, Homo sapien
gggagctacaaagcgagtttctcaa

SEQ ID NO: 2452061 - DNA, 25 bp, Homo sapien
tgtaagacaacaacgggtgaccacg

SEQ ID NO: 2452062 - DNA, 25 bp, Homo sapien
gcagcgaggcgtccttaatcctgga

SEQ ID NO: 2452063 - DNA, 25 bp, Homo sapien
accatgctgtgacccgtgggagcta

SEQ ID NO: 2452064 - DNA, 25 bp, Homo sapien
tgtccaccggcttctccagaatcag

SEQ ID NO: 2452065 - DNA, 25 bp, Homo sapien
aggcgtcctgcttgtccaccggctt

SEQ ID NO: 2452066 - DNA, 25 bp, Homo sapien
catcctgtaggcgtcctgcttgtcc

SEQ ID NO: 2452067 - DNA, 25 bp, Homo sapien
cgggacagcatcctgtaggcgtcct

SEQ ID NO: 2452068 - DNA, 25 bp, Homo sapien
cacgatcgtgtccgctccaatgacc

SEQ ID NO: 2452069 - DNA, 25 bp, Homo sapien
gatcgtgtccgctccaatgaccacg

SEQ ID NO: 2452070 - DNA, 25 bp, Homo sapien
gtgtccgctccaatgaccacgtcgg

SEQ ID NO: 2452071 - DNA, 25 bp, Homo sapien
tgtccgctccaatgaccacgtcggg

SEQ ID NO: 2452072 - DNA, 25 bp, Homo sapien
tacgggcgtgaaagagcaccgcagg

SEQ ID NO: 2452073 - DNA, 25 bp, Homo sapien
gtcggtacgggcgtgaaagagcacc

SEQ ID NO: 2452074 - DNA, 25 bp, Homo sapien
cagattccggtttaccggtgacgtg

SEQ ID NO: 2452075 - DNA, 25 bp, Homo sapien
gccgtgggtctcacagagaagtttt

SEQ ID NO: 2452076 - DNA, 25 bp, Homo sapien
gtatcacaacacatagtaatggatg

SEQ ID NO: 2452077 - DNA, 25 bp, Homo sapien
tatcacacagtaacatattaattct

SEQ ID NO: 2452078 - DNA, 25 bp, Homo sapien
tattcaaacatagtaacaagctaca

SEQ ID NO: 2452079 - DNA, 25 bp, Homo sapien
aatggatgttaattctatatcgtaa

SEQ ID NO: 2452080 - DNA, 25 bp, Homo sapien
tagcaatagctaagctgtgccacca

SEQ ID NO: 2452081 - DNA, 25 bp, Homo sapien
tgatactgtatcaattgcgagaaat

SEQ ID NO: 2452082 - DNA, 25 bp, Homo sapien
attaggttactgcaatagtgcatta

SEQ ID NO: 2452083 - DNA, 25 bp, Homo sapien
tgtatatttaccacccgcaaatccc

SEQ ID NO: 2452084 - DNA, 25 bp, Homo sapien
gcaaaggaattttcataagggccga

SEQ ID NO: 2452085 - DNA, 25 bp, Homo sapien
cagcaaaggaattttcataagggcc

SEQ ID NO: 2452086 - DNA, 25 bp, Homo sapien
cacagcaaaggaattttcataaggg

SEQ ID NO: 2452087 - DNA, 25 bp, Homo sapien
gaattttcataagggccgaagggca

SEQ ID NO: 2452088 - DNA, 25 bp, Homo sapien
ggaggggaccacctcaaacctgaga

SEQ ID NO: 2452089 - DNA, 25 bp, Homo sapien
ttggcggtctccatggcgtacccat

SEQ ID NO: 2452090 - DNA, 25 bp, Homo sapien
ggcgtacccatacggagtagcgaag

SEQ ID NO: 2452091 - DNA, 25 bp, Homo sapien
ggagtagcgaaggaggctttgtcca

SEQ ID NO: 2452092 - DNA, 25 bp, Homo sapien
tcttggctctcgagggaagagattg

SEQ ID NO: 2452093 - DNA, 25 bp, Homo sapien
ggaggtattgactcgggccttgaac

SEQ ID NO: 2452094 - DNA, 25 bp, Homo sapien
ttgactcgggccttgaacccacgag

SEQ ID NO: 2452095 - DNA, 25 bp, Homo sapien
ccaacagtgtccgaggattcccaga

SEQ ID NO: 2452096 - DNA, 25 bp, Homo sapien
aggaaattcaggaaaaacgccagca

SEQ ID NO: 2452097 - DNA, 25 bp, Homo sapien
tgaaggttggggcagagtacaaaac

SEQ ID NO: 2452098 - DNA, 25 bp, Homo sapien
caacctgcccacaggaaattcagga

SEQ ID NO: 2452099 - DNA, 25 bp, Homo sapien
gggcagagtacaaaacccaacctgc

SEQ ID NO: 2452100 - DNA, 25 bp, Homo sapien
cacaccgccatcgtggacacacact

SEQ ID NO: 2452101 - DNA, 25 bp, Homo sapien
ccgtcgtcgtggacacacaccgccg

SEQ ID NO: 2452102 - DNA, 25 bp, Homo sapien
tcgtcgtggacacacaccgccgtcg

SEQ ID NO: 2452103 - DNA, 25 bp, Homo sapien
ccgtcgtggacacacgccgccatct

SEQ ID NO: 2452104 - DNA, 25 bp, Homo sapien
gggcaccaggaaacacttcccatac

SEQ ID NO: 2452105 - DNA, 25 bp, Homo sapien
ccaggaaacacttcccataccccag

SEQ ID NO: 2452106 - DNA, 25 bp, Homo sapien
catgggggcaccaggaaacacttcc

SEQ ID NO: 2452107 - DNA, 25 bp, Homo sapien
tcatgggggcaccaggaaacacttc

SEQ ID NO: 2452108 - DNA, 25 bp, Homo sapien
gcttcccaatcaccgggcacagcac

SEQ ID NO: 2452109 - DNA, 25 bp, Homo sapien
cacgcgcttgtgcagcagcttccca

SEQ ID NO: 2452110 - DNA, 25 bp, Homo sapien
gctgaggatctcctgacggcgtggg

SEQ ID NO: 2452111 - DNA, 25 bp, Homo sapien
tcctgacggcgtggggaggcgctgg

SEQ ID NO: 2452112 - DNA, 25 bp, Homo sapien
ggagcccgcggtgcgcgcagcgcgg

SEQ ID NO: 2452113 - DNA, 25 bp, Homo sapien
tccgcacttctgagcccggagcccg

SEQ ID NO: 2452114 - DNA, 25 bp, Homo sapien
gagccgggcgtccgcacttctgagc

SEQ ID NO: 2452115 - DNA, 25 bp, Homo sapien
cgggagccgggcgtccgcacttctg

SEQ ID NO: 2452116 - DNA, 25 bp, Homo sapien
gaatggtctttctcgcccaagagag

SEQ ID NO: 2452117 - DNA, 25 bp, Homo sapien
tgtaaatgcagtatggcctcgcctt

SEQ ID NO: 2452118 - DNA, 25 bp, Homo sapien
gagagcctgggatccaattccacgt

SEQ ID NO: 2452119 - DNA, 25 bp, Homo sapien
tccaaacggtctcatgggtcaggcc

SEQ ID NO: 2452120 - DNA, 25 bp, Homo sapien
taaacagaaatttcggcgtgcaccg

SEQ ID NO: 2452121 - DNA, 25 bp, Homo sapien
cagtgcccctgagtgaaataaacag

SEQ ID NO: 2452122 - DNA, 25 bp, Homo sapien
caggcgctcctctgaaagaagaatt

SEQ ID NO: 2452123 - DNA, 25 bp, Homo sapien
agaagaattccaaccacagcaacca

SEQ ID NO: 2452124 - DNA, 25 bp, Homo sapien
agttcgcccacggaggatatccaga

SEQ ID NO: 2452125 - DNA, 25 bp, Homo sapien
tctctaccctgagtgaagcctggag

SEQ ID NO: 2452126 - DNA, 25 bp, Homo sapien
cacaactaagggacgatgtcagcag

SEQ ID NO: 2452127 - DNA, 25 bp, Homo sapien
gctggttgaatatccaccctcgggt

SEQ ID NO: 2452128 - DNA, 25 bp, Homo sapien
tcagaacacactctcctgcctctgg

SEQ ID NO: 2452129 - DNA, 25 bp, Homo sapien
cactctcctgcctctggaggccggg

SEQ ID NO: 2452130 - DNA, 25 bp, Homo sapien
tccctccatcccttcagggtgcgca

SEQ ID NO: 2452131 - DNA, 25 bp, Homo sapien
ccctccatcccttcagggtgcgcac

SEQ ID NO: 2452132 - DNA, 25 bp, Homo sapien
tccacttgaggacgtcgaagcaggt

SEQ ID NO: 2452133 - DNA, 25 bp, Homo sapien
taacaagccacggtgatcacgaacg

SEQ ID NO: 2452134 - DNA, 25 bp, Homo sapien
tacatgtttgcgtaaaaggccacgg

SEQ ID NO: 2452135 - DNA, 25 bp, Homo sapien
gaatacccagtggtggcggttgcaa

SEQ ID NO: 2452136 - DNA, 25 bp, Homo sapien
agctggctttaaaatggcccggagt

SEQ ID NO: 2452137 - DNA, 25 bp, Homo sapien
cgccggtccgtgcccaggtgtgaaa

SEQ ID NO: 2452138 - DNA, 25 bp, Homo sapien
caactgctctacaaacagcttcctc

SEQ ID NO: 2452139 - DNA, 25 bp, Homo sapien
tgctctacaaacagcttcctcaagc

SEQ ID NO: 2452140 - DNA, 25 bp, Homo sapien
cagatctgttgccatttcgagtctg

SEQ ID NO: 2452141 - DNA, 25 bp, Homo sapien
ggtctggggatccagcaagcagcct

SEQ ID NO: 2452142 - DNA, 25 bp, Homo sapien
tctgttgccatttcgagtctgtgcc

SEQ ID NO: 2452143 - DNA, 25 bp, Homo sapien
ggatccagcaagcagcctcttggca

SEQ ID NO: 2452144 - DNA, 25 bp, Homo sapien
caacggttgttcttggcggtgtctg

SEQ ID NO: 2452145 - DNA, 25 bp, Homo sapien
aggtggctgtccagaaatttctggg

SEQ ID NO: 2452146 - DNA, 25 bp, Homo sapien
cacaggcttgcggtttgggccccgc

SEQ ID NO: 2452147 - DNA, 25 bp, Homo sapien
tagaaaatcagcacaacggttgttc

SEQ ID NO: 2452148 - DNA, 25 bp, Homo sapien
gggttgggatgagaaatagacaaaa

SEQ ID NO: 2452149 - DNA, 25 bp, Homo sapien
gacagacccttttttgccagctatt

SEQ ID NO: 2452150 - DNA, 25 bp, Homo sapien
cagctattgtcttctggctataacc

SEQ ID NO: 2452151 - DNA, 25 bp, Homo sapien
cagcagggattgcatgccggtgaca

SEQ ID NO: 2452152 - DNA, 25 bp, Homo sapien
gatagacaagggcaacactcattct

SEQ ID NO: 2452153 - DNA, 25 bp, Homo sapien
agctgatagacaagggcaacactca

SEQ ID NO: 2452154 - DNA, 25 bp, Homo sapien
cactcattctcacaccctcatcaac

SEQ ID NO: 2452155 - DNA, 25 bp, Homo sapien
gacaagggcaacactcattctcaca

SEQ ID NO: 2452156 - DNA, 25 bp, Homo sapien
ttctgcaaaggcagcggccgcgttt

SEQ ID NO: 2452157 - DNA, 25 bp, Homo sapien
cagacgccccgtggagattttgatc

SEQ ID NO: 2452158 - DNA, 25 bp, Homo sapien
gagatttgcatgctgtcctccgcag

SEQ ID NO: 2452159 - DNA, 25 bp, Homo sapien
tcattctcagagtatatagcacggg

SEQ ID NO: 2452160 - DNA, 25 bp, Homo sapien
tctgtggtcactatggctgatttga

SEQ ID NO: 2452161 - DNA, 25 bp, Homo sapien
tgtctgtggtcactatggctgattt

SEQ ID NO: 2452162 - DNA, 25 bp, Homo sapien
caagccttccctgtctgtggtcact

SEQ ID NO: 2452163 - DNA, 25 bp, Homo sapien
tggtcactatggctgatttgagctt

SEQ ID NO: 2452164 - DNA, 25 bp, Homo sapien
tatgccagtttccttggtacagtgg

SEQ ID NO: 2452165 - DNA, 25 bp, Homo sapien
cagtttccttggtacagtggtctac

SEQ ID NO: 2452166 - DNA, 25 bp, Homo sapien
gctgtcaggcacagatgatgtgctt

SEQ ID NO: 2452167 - DNA, 25 bp, Homo sapien
ggtgtttcccctgctcgctgtcagg

SEQ ID NO: 2452168 - DNA, 25 bp, Homo sapien
tggccctgcagaaagctgtgtcccc

SEQ ID NO: 2452169 - DNA, 25 bp, Homo sapien
gctgtgtccccacagcggtgggacc

SEQ ID NO: 2452170 - DNA, 25 bp, Homo sapien
aagctgtgtccccacagcggtggga

SEQ ID NO: 2452171 - DNA, 25 bp, Homo sapien
tgtgtccccacagcggtgggaccaa

SEQ ID NO: 2452172 - DNA, 25 bp, Homo sapien
agcacagtcttgagtgacaccttca

SEQ ID NO: 2452173 - DNA, 25 bp, Homo sapien
tgcacccagcacagtcttgagtgac

SEQ ID NO: 2452174 - DNA, 25 bp, Homo sapien
agatatctccttgccctagctcctg

SEQ ID NO: 2452175 - DNA, 25 bp, Homo sapien
ggaagtctgcatttcattccagccc

SEQ ID NO: 2452176 - DNA, 25 bp, Homo sapien
tctgagcagccgtcaagctaggcag

SEQ ID NO: 2452177 - DNA, 25 bp, Homo sapien
cgcaccttgagacagacaccagcag

SEQ ID NO: 2452178 - DNA, 25 bp, Homo sapien
ctatgggagtgagctccgcacagga

SEQ ID NO: 2452179 - DNA, 25 bp, Homo sapien
gagggcagacgtcctgggtgatgct

SEQ ID NO: 2452180 - DNA, 25 bp, Homo sapien
agagcctggaatgacgcggccacaa

SEQ ID NO: 2452181 - DNA, 25 bp, Homo sapien
gagcacggacctgagacattttgat

SEQ ID NO: 2452182 - DNA, 25 bp, Homo sapien
taaatccaatgacaggtgccctggt

SEQ ID NO: 2452183 - DNA, 25 bp, Homo sapien
ggccacgtggagacggagacagagc

SEQ ID NO: 2452184 - DNA, 25 bp, Homo sapien
ccaccaggctatagatggagatgtc

SEQ ID NO: 2452185 - DNA, 25 bp, Homo sapien
tgacgacatcaccatgagctccgtg

SEQ ID NO: 2452186 - DNA, 25 bp, Homo sapien
ccaggaggctaattgggtagacaaa

SEQ ID NO: 2452187 - DNA, 25 bp, Homo sapien
cacgttgaccagaatcttgacgaca

SEQ ID NO: 2452188 - DNA, 25 bp, Homo sapien
gagtccctgcagtactggcgacata

SEQ ID NO: 2452189 - DNA, 25 bp, Homo sapien
aaatcatcactgagccagaaaagct

SEQ ID NO: 2452190 - DNA, 25 bp, Homo sapien
gaaaagctgtcgctcatatccccgg

SEQ ID NO: 2452191 - DNA, 25 bp, Homo sapien
atatccccggtgaccgccgacggtg

SEQ ID NO: 2452192 - DNA, 25 bp, Homo sapien
tgttgtgtggattgctaaactgagg

SEQ ID NO: 2452193 - DNA, 25 bp, Homo sapien
ctgttgtgtggattgctaaactgag

SEQ ID NO: 2452194 - DNA, 25 bp, Homo sapien
ttcaccccgtatggcgtgtgcctga

SEQ ID NO: 2452195 - DNA, 25 bp, Homo sapien
ctctttcaccccgtatggcgtgtgc

SEQ ID NO: 2452196 - DNA, 25 bp, Homo sapien
tttcaccccgtatggcgtgtgcctg

SEQ ID NO: 2452197 - DNA, 25 bp, Homo sapien
ccccgtatggcgtgtgcctgatgac

SEQ ID NO: 2452198 - DNA, 25 bp, Homo sapien
ctagggcaggtcacataagattcct

SEQ ID NO: 2452199 - DNA, 25 bp, Homo sapien
gaaaaatccagcaatggcctagggc

SEQ ID NO: 2452200 - DNA, 25 bp, Homo sapien
gattcctcacaacagactctgatgt

SEQ ID NO: 2452201 - DNA, 25 bp, Homo sapien
ggtcacataagattcctcacaacag

SEQ ID NO: 2452202 - DNA, 25 bp, Homo sapien
atgtctacggatggccagctgggtc

SEQ ID NO: 2452203 - DNA, 25 bp, Homo sapien
gagcattgccttcaacggcatgtct

SEQ ID NO: 2452204 - DNA, 25 bp, Homo sapien
gggctccagacacgattctcttagc

SEQ ID NO: 2452205 - DNA, 25 bp, Homo sapien
tccattctcttgacggcactgagca

SEQ ID NO: 2452206 - DNA, 25 bp, Homo sapien
gcaataaacatagacccgtgaagat

SEQ ID NO: 2452207 - DNA, 25 bp, Homo sapien
aaacatagacccgtgaagattatta

SEQ ID NO: 2452208 - DNA, 25 bp, Homo sapien
tgcaataaacatagacccgtgaaga

SEQ ID NO: 2452209 - DNA, 25 bp, Homo sapien
tagacccgtgaagattattacaatt

SEQ ID NO: 2452210 - DNA, 25 bp, Homo sapien
aatcacctccctggtttctaatatt

SEQ ID NO: 2452211 - DNA, 25 bp, Homo sapien
tctgatctccaataatatctctgat

SEQ ID NO: 2452212 - DNA, 25 bp, Homo sapien
ttctaatattgtctctaatccccaa

SEQ ID NO: 2452213 - DNA, 25 bp, Homo sapien
catctttctgattccaatattctct

SEQ ID NO: 2452214 - DNA, 25 bp, Homo sapien
tcctcggtctctaataatctctctg

SEQ ID NO: 2452215 - DNA, 25 bp, Homo sapien
cttcttaaccccaataatgtccctg

SEQ ID NO: 2452216 - DNA, 25 bp, Homo sapien
cctggtttccaacattatctctggt

SEQ ID NO: 2452217 - DNA, 25 bp, Homo sapien
ggtcccaagtattctctctgatccc

SEQ ID NO: 2452218 - DNA, 25 bp, Homo sapien
ggagattccatcagagctactgctg

SEQ ID NO: 2452219 - DNA, 25 bp, Homo sapien
tgctgcacaactgccccttgaggag

SEQ ID NO: 2452220 - DNA, 25 bp, Homo sapien
aatgtgcgtggatttgagtctcctc

SEQ ID NO: 2452221 - DNA, 25 bp, Homo sapien
gtcagcaccgtgtgaactcaaagtc

SEQ ID NO: 2452222 - DNA, 25 bp, Homo sapien
ttctcccctaagtgacgaagcggct

SEQ ID NO: 2452223 - DNA, 25 bp, Homo sapien
tttttgggaacagagccacgtgacc

SEQ ID NO: 2452224 - DNA, 25 bp, Homo sapien
gtaaatgggttacgtgcagcagccg

SEQ ID NO: 2452225 - DNA, 25 bp, Homo sapien
tcaagtgggctatgcaaggaggaac

SEQ ID NO: 2452226 - DNA, 25 bp, Homo sapien
ccgtggtcactcaaagtgcttgaga

SEQ ID NO: 2452227 - DNA, 25 bp, Homo sapien
ggtaacaggatgcaacgcttaagtc

SEQ ID NO: 2452228 - DNA, 25 bp, Homo sapien
gcggcagacggctgcccttccagtt

SEQ ID NO: 2452229 - DNA, 25 bp, Homo sapien
aagtcgacggccgtgcctcagagcc

SEQ ID NO: 2452230 - DNA, 25 bp, Homo sapien
caaccttgcaaaggcggccgcttcg

SEQ ID NO: 2452231 - DNA, 25 bp, Homo sapien
agcaaccttgcaaaggcggccgctt

SEQ ID NO: 2452232 - DNA, 25 bp, Homo sapien
tccagcaaccttgcaaaggcggccg

SEQ ID NO: 2452233 - DNA, 25 bp, Homo sapien
ctgtccagcaaccttgcaaaggcgg

SEQ ID NO: 2452234 - DNA, 25 bp, Homo sapien
ggcacgactgtctccgaatgcaaat

SEQ ID NO: 2452235 - DNA, 25 bp, Homo sapien
accacggttgcgactcaggcttagg

SEQ ID NO: 2452236 - DNA, 25 bp, Homo sapien
tgtaactgtctgaacactcatgtgc

SEQ ID NO: 2452237 - DNA, 25 bp, Homo sapien
tgagcccactggagtaacgtcgctg

SEQ ID NO: 2452238 - DNA, 25 bp, Homo sapien
ccaagtgttgctcaaataagtggag

SEQ ID NO: 2452239 - DNA, 25 bp, Homo sapien
aaatgggctcttcacggcgaaagct

SEQ ID NO: 2452240 - DNA, 25 bp, Homo sapien
gaggttgtaggaatatttggacacc

SEQ ID NO: 2452241 - DNA, 25 bp, Homo sapien
tcttcacggcgaaagctgtgatctt

SEQ ID NO: 2452242 - DNA, 25 bp, Homo sapien
caggatgtgttcatgtcccgggaga

SEQ ID NO: 2452243 - DNA, 25 bp, Homo sapien
gatgccagctgaaccccagtgggtt

SEQ ID NO: 2452244 - DNA, 25 bp, Homo sapien
gatctgagctgatccgaggatgcca

SEQ ID NO: 2452245 - DNA, 25 bp, Homo sapien
tgttgttgacccgtaagttcctggc

SEQ ID NO: 2452246 - DNA, 25 bp, Homo sapien
cgggctgaacattaacctggtacat

SEQ ID NO: 2452247 - DNA, 25 bp, Homo sapien
gggacgattcctcagactgacgggc

SEQ ID NO: 2452248 - DNA, 25 bp, Homo sapien
cagactgacgggctgaacattaacc

SEQ ID NO: 2452249 - DNA, 25 bp, Homo sapien
cgattcctcagactgacgggctgaa

SEQ ID NO: 2452250 - DNA, 25 bp, Homo sapien
tttgtaatcacattataaattgtca

SEQ ID NO: 2452251 - DNA, 25 bp, Homo sapien
tgtaatcacattataaattgtcatt

SEQ ID NO: 2452252 - DNA, 25 bp, Homo sapien
tattttgtaatcacattataaattg

SEQ ID NO: 2452253 - DNA, 25 bp, Homo sapien
acctggcctcatttattattttgta

SEQ ID NO: 2452254 - DNA, 25 bp, Homo sapien
cctggaacaggtaatgacgggcacg

SEQ ID NO: 2452255 - DNA, 25 bp, Homo sapien
ggaaaattgcacagaccgacagtcg

SEQ ID NO: 2452256 - DNA, 25 bp, Homo sapien
tcagaacaggacaagtgcaaccggg

SEQ ID NO: 2452257 - DNA, 25 bp, Homo sapien
gatagctttaatgcggccggtcctc

SEQ ID NO: 2452258 - DNA, 25 bp, Homo sapien
gcagctgatgtaacccggcttcctt

SEQ ID NO: 2452259 - DNA, 25 bp, Homo sapien
tccggaagagcgagaaccggtgcct

SEQ ID NO: 2452260 - DNA, 25 bp, Homo sapien
gggccatggcaacatgtggaccatt

SEQ ID NO: 2452261 - DNA, 25 bp, Homo sapien
cggcttccttcgctccaagattgca

SEQ ID NO: 2452262 - DNA, 25 bp, Homo sapien
catccagaagagatttctctggaag

SEQ ID NO: 2452263 - DNA, 25 bp, Homo sapien
ccacatccagaagagatttctctgg

SEQ ID NO: 2452264 - DNA, 25 bp, Homo sapien
atggaagcaattgtcctgatggcca

SEQ ID NO: 2452265 - DNA, 25 bp, Homo sapien
ctttgccttgaatggaagcaattgt

SEQ ID NO: 2452266 - DNA, 25 bp, Homo sapien
tccggggatccggtgagatgcgggg

SEQ ID NO: 2452267 - DNA, 25 bp, Homo sapien
gcttccggggatccggtgagatgcg

SEQ ID NO: 2452268 - DNA, 25 bp, Homo sapien
ccagcttccggggatccggtgagat

SEQ ID NO: 2452269 - DNA, 25 bp, Homo sapien
ggggatccggtgagatgcggggcat

SEQ ID NO: 2452270 - DNA, 25 bp, Homo sapien
gggcgtgccggccacttcacttttc

SEQ ID NO: 2452271 - DNA, 25 bp, Homo sapien
aacctgacatttcattcaccgcagc

SEQ ID NO: 2452272 - DNA, 25 bp, Homo sapien
cagcaacgttcatgaggctttctgg

SEQ ID NO: 2452273 - DNA, 25 bp, Homo sapien
tttcatttccagcaacgttcatgag

SEQ ID NO: 2452274 - DNA, 25 bp, Homo sapien
tccgcaggtgtctaggacagccaaa

SEQ ID NO: 2452275 - DNA, 25 bp, Homo sapien
gactgattgtcaggtcacccctgtg

SEQ ID NO: 2452276 - DNA, 25 bp, Homo sapien
gtattgttttccacgccactgacgc

SEQ ID NO: 2452277 - DNA, 25 bp, Homo sapien
ttccagactttcaggcgtccgcagg

SEQ ID NO: 2452278 - DNA, 25 bp, Homo sapien
tctgatgttcacttcaagagatggt

SEQ ID NO: 2452279 - DNA, 25 bp, Homo sapien
gatcctctcataagcttcacacgca

SEQ ID NO: 2452280 - DNA, 25 bp, Homo sapien
ttcacttcaagagatggtggacact

SEQ ID NO: 2452281 - DNA, 25 bp, Homo sapien
cagctgcatagtttctgctattctg

SEQ ID NO: 2452282 - DNA, 25 bp, Homo sapien
ttaatttctgctctggggtgttgga

SEQ ID NO: 2452283 - DNA, 25 bp, Homo sapien
tcagattaatttctgctctggggtg

SEQ ID NO: 2452284 - DNA, 25 bp, Homo sapien
cttatatacagacagttttttgctg

SEQ ID NO: 2452285 - DNA, 25 bp, Homo sapien
tatatacagacagttttttgctgct

SEQ ID NO: 2452286 - DNA, 25 bp, Homo sapien
ggggtggctgggagtatccagcctt

SEQ ID NO: 2452287 - DNA, 25 bp, Homo sapien
ggtggctgggagtatccagcctttt

SEQ ID NO: 2452288 - DNA, 25 bp, Homo sapien
cctgcatacttcatcctgtatctgg

SEQ ID NO: 2452289 - DNA, 25 bp, Homo sapien
ctgcatacttcatcctgtatctggt

SEQ ID NO: 2452290 - DNA, 25 bp, Homo sapien
gggagatcttgcacatccaagagag

SEQ ID NO: 2452291 - DNA, 25 bp, Homo sapien
cacgttttggggctgttgaaggcac

SEQ ID NO: 2452292 - DNA, 25 bp, Homo sapien
gcacatccaagagaggagcaggtac

SEQ ID NO: 2452293 - DNA, 25 bp, Homo sapien
cttcagtgtttgcatggggagatct

SEQ ID NO: 2452294 - DNA, 25 bp, Homo sapien
aagtctcggacagggaccttctgca

SEQ ID NO: 2452295 - DNA, 25 bp, Homo sapien
tccaggatcggtatttgaagtctcg

SEQ ID NO: 2452296 - DNA, 25 bp, Homo sapien
cgtgccgcaggtacgaatctctggt

SEQ ID NO: 2452297 - DNA, 25 bp, Homo sapien
tgtgagacatcctcagggaacagca

SEQ ID NO: 2452298 - DNA, 25 bp, Homo sapien
aagcaccgtcgtttctcaggacgca

SEQ ID NO: 2452299 - DNA, 25 bp, Homo sapien
taatttctccggttagtgttgattc

SEQ ID NO: 2452300 - DNA, 25 bp, Homo sapien
tagtgttgattcgtgctgttaacat

SEQ ID NO: 2452301 - DNA, 25 bp, Homo sapien
caggacgcaccatcccatcattttt

SEQ ID NO: 2452302 - DNA, 25 bp, Homo sapien
ttgcccgtgccagatgcccttcggg

SEQ ID NO: 2452303 - DNA, 25 bp, Homo sapien
tctgctttgcttggagtagcacagg

SEQ ID NO: 2452304 - DNA, 25 bp, Homo sapien
gcttggagtagcacaggagcttgat

SEQ ID NO: 2452305 - DNA, 25 bp, Homo sapien
ccttcgggggacagtctgcgtctgc

SEQ ID NO: 2452306 - DNA, 25 bp, Homo sapien
gacactgaagttggcagctgaactt

SEQ ID NO: 2452307 - DNA, 25 bp, Homo sapien
catttgctacatagctggacactga

SEQ ID NO: 2452308 - DNA, 25 bp, Homo sapien
tataggtggcatttgctacatagct

SEQ ID NO: 2452309 - DNA, 25 bp, Homo sapien
ggacactgaagttggcagctgaact

SEQ ID NO: 2452310 - DNA, 25 bp, Homo sapien
cagcatgtcaatgtagcgtggaaag

SEQ ID NO: 2452311 - DNA, 25 bp, Homo sapien
catgtcaatgtagcgtggaaagtgg

SEQ ID NO: 2452312 - DNA, 25 bp, Homo sapien
atcagcagcatgtcaatgtagcgtg

SEQ ID NO: 2452313 - DNA, 25 bp, Homo sapien
cagcagcatgtcaatgtagcgtgga

SEQ ID NO: 2452314 - DNA, 25 bp, Homo sapien
tcacggctgccactgcaaactttcg

SEQ ID NO: 2452315 - DNA, 25 bp, Homo sapien
aaatttgccacgtctgacttgaagg

SEQ ID NO: 2452316 - DNA, 25 bp, Homo sapien
gaagaccccctttctgactcatctg

SEQ ID NO: 2452317 - DNA, 25 bp, Homo sapien
caaactttcgtatggatagaagacc

SEQ ID NO: 2452318 - DNA, 25 bp, Homo sapien
tggacgatgacttttgagcagcttt

SEQ ID NO: 2452319 - DNA, 25 bp, Homo sapien
cctgggtattggctctggacgatga

SEQ ID NO: 2452320 - DNA, 25 bp, Homo sapien
tattggctctggacgatgacttttg

SEQ ID NO: 2452321 - DNA, 25 bp, Homo sapien
taaccatggaaacggggaagccagc

SEQ ID NO: 2452322 - DNA, 25 bp, Homo sapien
gctccgtggaagaggacgcgtcctg

SEQ ID NO: 2452323 - DNA, 25 bp, Homo sapien
tccgtggaagaggacgcgtcctgtg

SEQ ID NO: 2452324 - DNA, 25 bp, Homo sapien
cgtggaagaggacgcgtcctgtgcc

SEQ ID NO: 2452325 - DNA, 25 bp, Homo sapien
tggaagaggacgcgtcctgtgcctc

SEQ ID NO: 2452326 - DNA, 25 bp, Homo sapien
gctctgggtataatcagtccctgct

SEQ ID NO: 2452327 - DNA, 25 bp, Homo sapien
tgggtataatcagtccctgctccaa

SEQ ID NO: 2452328 - DNA, 25 bp, Homo sapien
cttgacattggctgttgtgatgctc

SEQ ID NO: 2452329 - DNA, 25 bp, Homo sapien
ggctgttgtgatgctctgggtataa

SEQ ID NO: 2452330 - DNA, 25 bp, Homo sapien
actcagggctttcttggaagcatag

SEQ ID NO: 2452331 - DNA, 25 bp, Homo sapien
tcttggaagcatagggagttgctcc

SEQ ID NO: 2452332 - DNA, 25 bp, Homo sapien
tggagctagccatctcactcagggc

SEQ ID NO: 2452333 - DNA, 25 bp, Homo sapien
tctctgcatccacatagttggagct

SEQ ID NO: 2452334 - DNA, 25 bp, Homo sapien
agggttaagcatgattttccaaatg

SEQ ID NO: 2452335 - DNA, 25 bp, Homo sapien
aaagcttcaaaagataccttatgca

SEQ ID NO: 2452336 - DNA, 25 bp, Homo sapien
tcttcgttgccactaggaggtggtg

SEQ ID NO: 2452337 - DNA, 25 bp, Homo sapien
tttgagttgacttgccaagaagacc

SEQ ID NO: 2452338 - DNA, 25 bp, Homo sapien
actgatggccattgctggtggcctt

SEQ ID NO: 2452339 - DNA, 25 bp, Homo sapien
ctgatggccattgctggtggccttg

SEQ ID NO: 2452340 - DNA, 25 bp, Homo sapien
cactgatggccattgctggtggcct

SEQ ID NO: 2452341 - DNA, 25 bp, Homo sapien
tctgagaacatcaggctctttttct

SEQ ID NO: 2452342 - DNA, 25 bp, Homo sapien
tagcctgaatcaggctggatgtcag

SEQ ID NO: 2452343 - DNA, 25 bp, Homo sapien
ctttgatctccagcctagcctgaat

SEQ ID NO: 2452344 - DNA, 25 bp, Homo sapien
ctctgagaacatcaggctctttttc

SEQ ID NO: 2452345 - DNA, 25 bp, Homo sapien
cattcgtcttgtaaatgcagaggtc

SEQ ID NO: 2452346 - DNA, 25 bp, Homo sapien
tgagatccgtctacaagagcgcaga

SEQ ID NO: 2452347 - DNA, 25 bp, Homo sapien
gagcgcagaaacttaacagctgtag

SEQ ID NO: 2452348 - DNA, 25 bp, Homo sapien
caattcgatgcacatttggaaacat

SEQ ID NO: 2452349 - DNA, 25 bp, Homo sapien
ctgcccatgatagtctcatgggtgg

SEQ ID NO: 2452350 - DNA, 25 bp, Homo sapien
tagtctcatgggtggcctggtccat

SEQ ID NO: 2452351 - DNA, 25 bp, Homo sapien
tcatgggtggcctggtccatgctcc

SEQ ID NO: 2452352 - DNA, 25 bp, Homo sapien
tgatagtctcatgggtggcctggtc

SEQ ID NO: 2452353 - DNA, 25 bp, Homo sapien
tcagaacgactctgcccgtggatga

SEQ ID NO: 2452354 - DNA, 25 bp, Homo sapien
tctcttggctcccatgagatacgcc

SEQ ID NO: 2452355 - DNA, 25 bp, Homo sapien
catgagatacgcctctgggtttcag

SEQ ID NO: 2452356 - DNA, 25 bp, Homo sapien
gggaactcttatcagcattgtcaaa

SEQ ID NO: 2452357 - DNA, 25 bp, Homo sapien
tcggcagcccgctgggtttttccat

SEQ ID NO: 2452358 - DNA, 25 bp, Homo sapien
atcttgggtcttcgctgtcgaattc

SEQ ID NO: 2452359 - DNA, 25 bp, Homo sapien
gtatcttgggtcttcgctgtcgaat

SEQ ID NO: 2452360 - DNA, 25 bp, Homo sapien
agtatcttgggtcttcgctgtcgaa

SEQ ID NO: 2452361 - DNA, 25 bp, Homo sapien
gaagtatcttgggtcttcgctgtcg

SEQ ID NO: 2452362 - DNA, 25 bp, Homo sapien
catccccagggtgggattgaaatcc

SEQ ID NO: 2452363 - DNA, 25 bp, Homo sapien
cacattctccacaatctggattttt

SEQ ID NO: 2452364 - DNA, 25 bp, Homo sapien
accacgcctggtccctgtgttttct

SEQ ID NO: 2452365 - DNA, 25 bp, Homo sapien
tgtttttgaaagcatcacacgatgt

SEQ ID NO: 2452366 - DNA, 25 bp, Homo sapien
gcgcctggccgacactgtttttgaa

SEQ ID NO: 2452367 - DNA, 25 bp, Homo sapien
tctttatctgctgtctcatcctgtt

SEQ ID NO: 2452368 - DNA, 25 bp, Homo sapien
agagcttgctctccgacaggagcca

SEQ ID NO: 2452369 - DNA, 25 bp, Homo sapien
ttctcagcactctgcggatttagtc

SEQ ID NO: 2452370 - DNA, 25 bp, Homo sapien
ggatttagtctaaagagcttgcaga

SEQ ID NO: 2452371 - DNA, 25 bp, Homo sapien
agaagagcttgctctccgacaggag

SEQ ID NO: 2452372 - DNA, 25 bp, Homo sapien
tttcttgtggccgaaatgaagtgaa

SEQ ID NO: 2452373 - DNA, 25 bp, Homo sapien
tctcccaagttagcttcaatagata

SEQ ID NO: 2452374 - DNA, 25 bp, Homo sapien
gaaggcagccatttttcggaaaatg

SEQ ID NO: 2452375 - DNA, 25 bp, Homo sapien
tgtgattatcgcttccatcccattc

SEQ ID NO: 2452376 - DNA, 25 bp, Homo sapien
ggtatcttagctacatagggcacaa

SEQ ID NO: 2452377 - DNA, 25 bp, Homo sapien
atagggctgagtctgtgcatacggc

SEQ ID NO: 2452378 - DNA, 25 bp, Homo sapien
aaccacctgcgtttctaagggagca

SEQ ID NO: 2452379 - DNA, 25 bp, Homo sapien
cacacaggcatcttcgtagcttgag

SEQ ID NO: 2452380 - DNA, 25 bp, Homo sapien
taaggtctgcacaactattgcacag

SEQ ID NO: 2452381 - DNA, 25 bp, Homo sapien
tcactgctacgtggaatctaaaaaa

SEQ ID NO: 2452382 - DNA, 25 bp, Homo sapien
cacagcacggtgacataattaataa

SEQ ID NO: 2452383 - DNA, 25 bp, Homo sapien
gaagagcacatggtctcactgctac

SEQ ID NO: 2452384 - DNA, 25 bp, Homo sapien
cagtaagggttcaagtgtaagaagc

SEQ ID NO: 2452385 - DNA, 25 bp, Homo sapien
gaaagagtgagagaggcgggcagtc

SEQ ID NO: 2452386 - DNA, 25 bp, Homo sapien
tgacaatggtatcctgcagggtgga

SEQ ID NO: 2452387 - DNA, 25 bp, Homo sapien
tttaaaataagaatgtcggtgcgcc

SEQ ID NO: 2452388 - DNA, 25 bp, Homo sapien
aattgaacactctcaggcaagcgca

SEQ ID NO: 2452389 - DNA, 25 bp, Homo sapien
ttaaatccgatacgcacagttcagg

SEQ ID NO: 2452390 - DNA, 25 bp, Homo sapien
tagctggtatatgactcctgcctga

SEQ ID NO: 2452391 - DNA, 25 bp, Homo sapien
gagattagcctgaaaacccagaagg

SEQ ID NO: 2452392 - DNA, 25 bp, Homo sapien
ggctgttattcagcatcccgcagca

SEQ ID NO: 2452393 - DNA, 25 bp, Homo sapien
cccgcagcattgttttgtggatgca

SEQ ID NO: 2452394 - DNA, 25 bp, Homo sapien
ctccagcagggagttgacaggcaca

SEQ ID NO: 2452395 - DNA, 25 bp, Homo sapien
tgtggatgcactctggctacaattc

SEQ ID NO: 2452396 - DNA, 25 bp, Homo sapien
gccaacaatatggatattatttaag

SEQ ID NO: 2452397 - DNA, 25 bp, Homo sapien
tctgctcttaagcaatttcatttaa

SEQ ID NO: 2452398 - DNA, 25 bp, Homo sapien
gtttcggcaatgagagtctggtgcc

SEQ ID NO: 2452399 - DNA, 25 bp, Homo sapien
aaacatttatctgctcttaagcaat

SEQ ID NO: 2452400 - DNA, 25 bp, Homo sapien
ggacttggagctgccctttgaaaaa

SEQ ID NO: 2452401 - DNA, 25 bp, Homo sapien
cttgttttacggttccatctggact

SEQ ID NO: 2452402 - DNA, 25 bp, Homo sapien
aagccacagctgctgtgtcaagtct

SEQ ID NO: 2452403 - DNA, 25 bp, Homo sapien
tgctgtgtcaagtctggtgaacgtg

SEQ ID NO: 2452404 - DNA, 25 bp, Homo sapien
tgatgatgaagaccagtagacacct

SEQ ID NO: 2452405 - DNA, 25 bp, Homo sapien
aaattctaggtgtcttcttgcccca

SEQ ID NO: 2452406 - DNA, 25 bp, Homo sapien
tgaggtagattgtctcgggagccac

SEQ ID NO: 2452407 - DNA, 25 bp, Homo sapien
tctacccaatccgaaagtctacagg

SEQ ID NO: 2452408 - DNA, 25 bp, Homo sapien
cagcagcaagtgtaccatttgaagg

SEQ ID NO: 2452409 - DNA, 25 bp, Homo sapien
gctccagattgatggttgaatgcct

SEQ ID NO: 2452410 - DNA, 25 bp, Homo sapien
tttaacggcctcataagaatgcaga

SEQ ID NO: 2452411 - DNA, 25 bp, Homo sapien
tgaatgccttcaggacagcagcaag

SEQ ID NO: 2452412 - DNA, 25 bp, Homo sapien
gataccctttacagaggcgagcaag

SEQ ID NO: 2452413 - DNA, 25 bp, Homo sapien
cgtcactatagcgacacggtcaggt

SEQ ID NO: 2452414 - DNA, 25 bp, Homo sapien
gacggactgcgatcctgtctcagaa

SEQ ID NO: 2452415 - DNA, 25 bp, Homo sapien
taacatgcatgccaagtctcgccag

SEQ ID NO: 2452416 - DNA, 25 bp, Homo sapien
gcaatcatggctcgctgaagcctcg

SEQ ID NO: 2452417 - DNA, 25 bp, Homo sapien
ggactcaaatgatcctcctgcctca

SEQ ID NO: 2452418 - DNA, 25 bp, Homo sapien
ctcctggactcaaatgatcctcctg

SEQ ID NO: 2452419 - DNA, 25 bp, Homo sapien
aatcatggctcgctgaagcctcgac

SEQ ID NO: 2452420 - DNA, 25 bp, Homo sapien
ataaagactgcaaaccggccacgtg

SEQ ID NO: 2452421 - DNA, 25 bp, Homo sapien
cttaaagtaagattgacagcaaagc

SEQ ID NO: 2452422 - DNA, 25 bp, Homo sapien
tctaggagtattggactgcagagga

SEQ ID NO: 2452423 - DNA, 25 bp, Homo sapien
cagctggagcttcatatagttacac

SEQ ID NO: 2452424 - DNA, 25 bp, Homo sapien
gaaggccgcactctcagcttgccta

SEQ ID NO: 2452425 - DNA, 25 bp, Homo sapien
ctcgaacatcaagaccccagggtct

SEQ ID NO: 2452426 - DNA, 25 bp, Homo sapien
agtggcgggatctctagccttcatc

SEQ ID NO: 2452427 - DNA, 25 bp, Homo sapien
tcgtgtgagtcaattatcctagtaa

SEQ ID NO: 2452428 - DNA, 25 bp, Homo sapien
ttggaggctgccgagagctatgaac

SEQ ID NO: 2452429 - DNA, 25 bp, Homo sapien
aactaggtgaggtgatataggtcag

SEQ ID NO: 2452430 - DNA, 25 bp, Homo sapien
aataaattccaagatctatcacacc

SEQ ID NO: 2452431 - DNA, 25 bp, Homo sapien
catcgcgtctttcacaatgactaaa

SEQ ID NO: 2452432 - DNA, 25 bp, Homo sapien
tccatggtgcctagctttagccagt

SEQ ID NO: 2452433 - DNA, 25 bp, Homo sapien
gggtaccacgacttagcatccactg

SEQ ID NO: 2452434 - DNA, 25 bp, Homo sapien
gacaatgtgcgggacgccaaaaacc

SEQ ID NO: 2452435 - DNA, 25 bp, Homo sapien
ggcaggacttcacgacaccaacgtt

SEQ ID NO: 2452436 - DNA, 25 bp, Homo sapien
gaatgggtaccacaacttactgtcc

SEQ ID NO: 2452437 - DNA, 25 bp, Homo sapien
tggatcaagaatgaaaggcgccgcc

SEQ ID NO: 2452438 - DNA, 25 bp, Homo sapien
tcaggaacgtggcacagtcagctcg

SEQ ID NO: 2452439 - DNA, 25 bp, Homo sapien
gttacagggacaacacgtgggacgc

SEQ ID NO: 2452440 - DNA, 25 bp, Homo sapien
ggacttttagggctgagacaccgaa

SEQ ID NO: 2452441 - DNA, 25 bp, Homo sapien
taaaccggctcaggacgtaaggata

SEQ ID NO: 2452442 - DNA, 25 bp, Homo sapien
caatgctacagaatggagcccacgg

SEQ ID NO: 2452443 - DNA, 25 bp, Homo sapien
cccagcttgtcttcacggaggcaga

SEQ ID NO: 2452444 - DNA, 25 bp, Homo sapien
catgatgatcgggaaaggctccttc

SEQ ID NO: 2452445 - DNA, 25 bp, Homo sapien
caagcagaagcgttggcagttccca

SEQ ID NO: 2452446 - DNA, 25 bp, Homo sapien
caagaggtccctgcttgcacgagaa

SEQ ID NO: 2452447 - DNA, 25 bp, Homo sapien
tatctgtgaaggaaggaacagctcc

SEQ ID NO: 2452448 - DNA, 25 bp, Homo sapien
aagaaaccgccgctgacgccatccc

SEQ ID NO: 2452449 - DNA, 25 bp, Homo sapien
gctgtccctaatgccaaagaaaccg

SEQ ID NO: 2452450 - DNA, 25 bp, Homo sapien
ccactccgggcgttctcatacagaa

SEQ ID NO: 2452451 - DNA, 25 bp, Homo sapien
agctgctgtccctaatgccaaagaa

SEQ ID NO: 2452452 - DNA, 25 bp, Homo sapien
gaagacctcatagagcactcgcgtg

SEQ ID NO: 2452453 - DNA, 25 bp, Homo sapien
tgggtacagcccctcgcagatgagg

SEQ ID NO: 2452454 - DNA, 25 bp, Homo sapien
tagagatgtacttccggctgggcag

SEQ ID NO: 2452455 - DNA, 25 bp, Homo sapien
cgttgaggccaagcaccttctggga

SEQ ID NO: 2452456 - DNA, 25 bp, Homo sapien
cctgctggacggctgctcatgcgtg

SEQ ID NO: 2452457 - DNA, 25 bp, Homo sapien
tgcctgctggacggctgctcatgcg

SEQ ID NO: 2452458 - DNA, 25 bp, Homo sapien
gcctgctggacggctgctcatgcgt

SEQ ID NO: 2452459 - DNA, 25 bp, Homo sapien
caaaatgcccattgtgtccagtcac

SEQ ID NO: 2452460 - DNA, 25 bp, Homo sapien
gatctgtaagcacgtctgaagaagc

SEQ ID NO: 2452461 - DNA, 25 bp, Homo sapien
gaagaagcatggatttctcaatccc

SEQ ID NO: 2452462 - DNA, 25 bp, Homo sapien
tcacaggtgcatccgtgatctgtaa

SEQ ID NO: 2452463 - DNA, 25 bp, Homo sapien
gggctgcttggttggagcccgaccc

SEQ ID NO: 2452464 - DNA, 25 bp, Homo sapien
gtcactggccgaccgcaggcggcag

SEQ ID NO: 2452465 - DNA, 25 bp, Homo sapien
ggccatggcccggaggtgtcagggt

SEQ ID NO: 2452466 - DNA, 25 bp, Homo sapien
cagagccgcctgatgtcttgggcgc

SEQ ID NO: 2452467 - DNA, 25 bp, Homo sapien
ccgcgccgcagacaatggcgacatg

SEQ ID NO: 2452468 - DNA, 25 bp, Homo sapien
acaatggcgacatggctgccccggc

SEQ ID NO: 2452469 - DNA, 25 bp, Homo sapien
agctgcgccaggatcaccgcggcgc

SEQ ID NO: 2452470 - DNA, 25 bp, Homo sapien
gcgcctaccgcgtagacccgcaggg

SEQ ID NO: 2452471 - DNA, 25 bp, Homo sapien
gcagaaatattttgacatcctaaaa

SEQ ID NO: 2452472 - DNA, 25 bp, Homo sapien
gacatatagcagaagcaaggaacca

SEQ ID NO: 2452473 - DNA, 25 bp, Homo sapien
gatatgtccctgagggtggacctca

SEQ ID NO: 2452474 - DNA, 25 bp, Homo sapien
acatatagcagaagcaaggaaccag

SEQ ID NO: 2452475 - DNA, 25 bp, Homo sapien
acaacagagatatgtccctgagggt

SEQ ID NO: 2452476 - DNA, 25 bp, Homo sapien
tcattgactcttagatcggctctcc

SEQ ID NO: 2452477 - DNA, 25 bp, Homo sapien
tttgtttcagaattggagcagtaac

SEQ ID NO: 2452478 - DNA, 25 bp, Homo sapien
tcagaattggagcagtaaccccttt

SEQ ID NO: 2452479 - DNA, 25 bp, Homo sapien
ctcttagatcggctctcctgttcca

SEQ ID NO: 2452480 - DNA, 25 bp, Homo sapien
tgcccaagatcaaaaccagtaggct

SEQ ID NO: 2452481 - DNA, 25 bp, Homo sapien
ccatgcccaagatcaaaaccagtag

SEQ ID NO: 2452482 - DNA, 25 bp, Homo sapien
catgcccaagatcaaaaccagtagg

SEQ ID NO: 2452483 - DNA, 25 bp, Homo sapien
tccatgcccaagatcaaaaccagta

SEQ ID NO: 2452484 - DNA, 25 bp, Homo sapien
ggcatccaagcttgacttcttgatc

SEQ ID NO: 2452485 - DNA, 25 bp, Homo sapien
cactttaccattggcatccaagctt

SEQ ID NO: 2452486 - DNA, 25 bp, Homo sapien
tgatcttcaagtgacatgctttctg

SEQ ID NO: 2452487 - DNA, 25 bp, Homo sapien
agcttgacttcttgatcttcaagtg

SEQ ID NO: 2452488 - DNA, 25 bp, Homo sapien
tgcctttattctttcttctccaaaa

SEQ ID NO: 2452489 - DNA, 25 bp, Homo sapien
tctgcctttattctttcttctccaa

SEQ ID NO: 2452490 - DNA, 25 bp, Homo sapien
ttctgcctttattctttcttctcca

SEQ ID NO: 2452491 - DNA, 25 bp, Homo sapien
tattctttcttctccaaaattccca

SEQ ID NO: 2452492 - DNA, 25 bp, Homo sapien
gcagagagtccttcacggctgctgg

SEQ ID NO: 2452493 - DNA, 25 bp, Homo sapien
tgacaacactgaggtgccacacatc

SEQ ID NO: 2452494 - DNA, 25 bp, Homo sapien
tgctgtctgtcaaggacattcagag

SEQ ID NO: 2452495 - DNA, 25 bp, Homo sapien
tcaccagggtgcatacagacaggat

SEQ ID NO: 2452496 - DNA, 25 bp, Homo sapien
caagtgatgagattgagaatgtgcc

SEQ ID NO: 2452497 - DNA, 25 bp, Homo sapien
agtgatgagattgagaatgtgcctt

SEQ ID NO: 2452498 - DNA, 25 bp, Homo sapien
tcacaagtgatgagattgagaatgt

SEQ ID NO: 2452499 - DNA, 25 bp, Homo sapien
tgatgagattgagaatgtgccttac

SEQ ID NO: 2452500 - DNA, 25 bp, Homo sapien
tagggcgatgctgttcttccaagac

SEQ ID NO: 2452501 - DNA, 25 bp, Homo sapien
acatcccgtaggtctggcggtcacg

SEQ ID NO: 2452502 - DNA, 25 bp, Homo sapien
gcaaagtgcctagtctgtatctgta

SEQ ID NO: 2452503 - DNA, 25 bp, Homo sapien
ggcggtcacgaatgcgagatttgct

SEQ ID NO: 2452504 - DNA, 25 bp, Homo sapien
gaatatttggggtcacttggcaaca

SEQ ID NO: 2452505 - DNA, 25 bp, Homo sapien
caacaatgatgatggggaatcctct

SEQ ID NO: 2452506 - DNA, 25 bp, Homo sapien
aggataggaatatttggggtcactt

SEQ ID NO: 2452507 - DNA, 25 bp, Homo sapien
tttggggtcacttggcaacaatgat

SEQ ID NO: 2452508 - DNA, 25 bp, Homo sapien
gagtctgtatgaagctggcagcatg

SEQ ID NO: 2452509 - DNA, 25 bp, Homo sapien
ctgtatgaagctggcagcatggatt

SEQ ID NO: 2452510 - DNA, 25 bp, Homo sapien
tatgaagctggcagcatggattgca

SEQ ID NO: 2452511 - DNA, 25 bp, Homo sapien
agtctgtatgaagctggcagcatgg

SEQ ID NO: 2452512 - DNA, 25 bp, Homo sapien
gttacccagtgatggcttggcagga

SEQ ID NO: 2452513 - DNA, 25 bp, Homo sapien
tggagtcctggcctactggtagctt

SEQ ID NO: 2452514 - DNA, 25 bp, Homo sapien
gatgctcttacaactccttggcttg

SEQ ID NO: 2452515 - DNA, 25 bp, Homo sapien
gttcttcagagaagggccaagctgt

SEQ ID NO: 2452516 - DNA, 25 bp, Homo sapien
catgcaggcaaactgaagactccac

SEQ ID NO: 2452517 - DNA, 25 bp, Homo sapien
tgcaggcaaactgaagactccacag

SEQ ID NO: 2452518 - DNA, 25 bp, Homo sapien
ggcaaactgaagactccacagccac

SEQ ID NO: 2452519 - DNA, 25 bp, Homo sapien
ctggcatgcaggcaaactgaagact

SEQ ID NO: 2452520 - DNA, 25 bp, Homo sapien
tgtctttccatgagactgacgccca

SEQ ID NO: 2452521 - DNA, 25 bp, Homo sapien
gggttgccaccttcacaaaagcatc

SEQ ID NO: 2452522 - DNA, 25 bp, Homo sapien
tactgcaagaggtgtaaacataccc

SEQ ID NO: 2452523 - DNA, 25 bp, Homo sapien
gagagtactctttcggctggcctta

SEQ ID NO: 2452524 - DNA, 25 bp, Homo sapien
tgtttaagcttccaagtttgcggtc

SEQ ID NO: 2452525 - DNA, 25 bp, Homo sapien
cacagagggacgaccctgtgtgtac

SEQ ID NO: 2452526 - DNA, 25 bp, Homo sapien
tcaagccttgaatgaaaccatactc

SEQ ID NO: 2452527 - DNA, 25 bp, Homo sapien
tgtgggagaatcaatgcctgttgct

SEQ ID NO: 2452528 - DNA, 25 bp, Homo sapien
tgtttcccattgctccctagaggtg

SEQ ID NO: 2452529 - DNA, 25 bp, Homo sapien
cagtgtgagaaaggcaaaccgcctt

SEQ ID NO: 2452530 - DNA, 25 bp, Homo sapien
aacttgcccggcacacttggtgtag

SEQ ID NO: 2452531 - DNA, 25 bp, Homo sapien
tggccgtggataacgctcactctgt

SEQ ID NO: 2452532 - DNA, 25 bp, Homo sapien
ctagggacccgatagcgcctggtgt

SEQ ID NO: 2452533 - DNA, 25 bp, Homo sapien
gcctggtgtgccatagcgcattgga

SEQ ID NO: 2452534 - DNA, 25 bp, Homo sapien
tccatggaggttatagggaacttga

SEQ ID NO: 2452535 - DNA, 25 bp, Homo sapien
cgggagcgcctatgcgccttggacc

SEQ ID NO: 2452536 - DNA, 25 bp, Homo sapien
tctctgcacgcgcatctgccgcttc

SEQ ID NO: 2452537 - DNA, 25 bp, Homo sapien
gctccgtgaatcctcgggttcagtc

SEQ ID NO: 2452538 - DNA, 25 bp, Homo sapien
aaagcgcccgcacgagcgcactcac

SEQ ID NO: 2452539 - DNA, 25 bp, Homo sapien
ttcagtcccgcgtccggattccgcg

SEQ ID NO: 2452540 - DNA, 25 bp, Homo sapien
gatgccgtggtcacagtccacatcg

SEQ ID NO: 2452541 - DNA, 25 bp, Homo sapien
tcagatgccgtggtcacagtccaca

SEQ ID NO: 2452542 - DNA, 25 bp, Homo sapien
cacagtccacatcgcggcagatgta

SEQ ID NO: 2452543 - DNA, 25 bp, Homo sapien
cgtggtcacagtccacatcgcggca

SEQ ID NO: 2452544 - DNA, 25 bp, Homo sapien
cagaggatcacgtagaggatgagga

SEQ ID NO: 2452545 - DNA, 25 bp, Homo sapien
gatgaggaggatggcgaagatgaag

SEQ ID NO: 2452546 - DNA, 25 bp, Homo sapien
tcaccggcgagatgagagactgcat

SEQ ID NO: 2452547 - DNA, 25 bp, Homo sapien
agggccaccaggatcgccttggtca

SEQ ID NO: 2452548 - DNA, 25 bp, Homo sapien
catggattcagatgacgaaaacaac

SEQ ID NO: 2452549 - DNA, 25 bp, Homo sapien
gggaacacaacgttggccatgcatt

SEQ ID NO: 2452550 - DNA, 25 bp, Homo sapien
gaaatgtgcacaaactctcacagtg

SEQ ID NO: 2452551 - DNA, 25 bp, Homo sapien
taaaatagcagagtgggagccagtc

SEQ ID NO: 2452552 - DNA, 25 bp, Homo sapien
catgatggcgctgaagaatgatgat

SEQ ID NO: 2452553 - DNA, 25 bp, Homo sapien
tgtgcggacctgaccaaattctcag

SEQ ID NO: 2452554 - DNA, 25 bp, Homo sapien
gctgtttcggaagactatgtgatag

SEQ ID NO: 2452555 - DNA, 25 bp, Homo sapien
ttgactggctgtttcggaagactat

SEQ ID NO: 2452556 - DNA, 25 bp, Homo sapien
gcagggaatatgctgcctgcctctg

SEQ ID NO: 2452557 - DNA, 25 bp, Homo sapien
tctgaggttttcaccgaggctgggt

SEQ ID NO: 2452558 - DNA, 25 bp, Homo sapien
agttaatgcttatctgactgcgcca

SEQ ID NO: 2452559 - DNA, 25 bp, Homo sapien
gagggagctgtgatttagttaatgc

SEQ ID NO: 2452560 - DNA, 25 bp, Homo sapien
agtgtaagacttagggacccctgag

SEQ ID NO: 2452561 - DNA, 25 bp, Homo sapien
atagccgacatcacatttcccaggg

SEQ ID NO: 2452562 - DNA, 25 bp, Homo sapien
gaagggtcacaggaattttggcaca

SEQ ID NO: 2452563 - DNA, 25 bp, Homo sapien
gagagggaaccgcaataatagccga

SEQ ID NO: 2452564 - DNA, 25 bp, Homo sapien
tttgcaggccccttagaagtgttgc

SEQ ID NO: 2452565 - DNA, 25 bp, Homo sapien
taagggtaatgacaaccactttcag

SEQ ID NO: 2452566 - DNA, 25 bp, Homo sapien
tgcaaacaaagtgctcacgctatat

SEQ ID NO: 2452567 - DNA, 25 bp, Homo sapien
taccattttgagcatgtaactgaaa

SEQ ID NO: 2452568 - DNA, 25 bp, Homo sapien
tcaggccagtgactgcaatgagagc

SEQ ID NO: 2452569 - DNA, 25 bp, Homo sapien
actcagggtcatcccaccggaagag

SEQ ID NO: 2452570 - DNA, 25 bp, Homo sapien
tgagaccgtgattttaccgcaaagc

SEQ ID NO: 2452571 - DNA, 25 bp, Homo sapien
caatgggtggtgtattcggctcttc

SEQ ID NO: 2452572 - DNA, 25 bp, Homo sapien
tgtggtttccgttatcactggtcaa

SEQ ID NO: 2452573 - DNA, 25 bp, Homo sapien
aagaacagcctacaacatgtggttt

SEQ ID NO: 2452574 - DNA, 25 bp, Homo sapien
cataaattaaaccttaccattatag

SEQ ID NO: 2452575 - DNA, 25 bp, Homo sapien
caactatggctgaaaatactaagat

SEQ ID NO: 2452576 - DNA, 25 bp, Homo sapien
gggaagccataaactcagtaatgaa

SEQ ID NO: 2452577 - DNA, 25 bp, Homo sapien
gaagccataaactcagtaatgaact

SEQ ID NO: 2452578 - DNA, 25 bp, Homo sapien
cataaactcagtaatgaactagact

SEQ ID NO: 2452579 - DNA, 25 bp, Homo sapien
gccataaactcagtaatgaactaga

SEQ ID NO: 2452580 - DNA, 25 bp, Homo sapien
ggtcactttcaccttaccctcatgg

SEQ ID NO: 2452581 - DNA, 25 bp, Homo sapien
acctcggaaggactctctgacctta

SEQ ID NO: 2452582 - DNA, 25 bp, Homo sapien
ggttcttctttagcataggccataa

SEQ ID NO: 2452583 - DNA, 25 bp, Homo sapien
gaccttaccctgaagcaggtcaggg

SEQ ID NO: 2452584 - DNA, 25 bp, Homo sapien
gccaacatggtaagagtcgcttgaa

SEQ ID NO: 2452585 - DNA, 25 bp, Homo sapien
tttgtccaatagtcatacttctcca

SEQ ID NO: 2452586 - DNA, 25 bp, Homo sapien
cattcctgtaacgtttttgtccaat

SEQ ID NO: 2452587 - DNA, 25 bp, Homo sapien
aaaagtaagcatatcacatctgtaa

SEQ ID NO: 2452588 - DNA, 25 bp, Homo sapien
gccccatcatgtcaacaggtttaga

SEQ ID NO: 2452589 - DNA, 25 bp, Homo sapien
gctgctccgtggatgtgctgcaact

SEQ ID NO: 2452590 - DNA, 25 bp, Homo sapien
tcagaatggtcaggaatagagccca

SEQ ID NO: 2452591 - DNA, 25 bp, Homo sapien
ctgccattacgacaggccacaggca

SEQ ID NO: 2452592 - DNA, 25 bp, Homo sapien
tccggtccatgccaatgcgcaattt

SEQ ID NO: 2452593 - DNA, 25 bp, Homo sapien
tgcgtccggtccatgccaatgcgca

SEQ ID NO: 2452594 - DNA, 25 bp, Homo sapien
gtcttcttgcgtccggtccatgcca

SEQ ID NO: 2452595 - DNA, 25 bp, Homo sapien
ggtccatgccaatgcgcaatttcat

SEQ ID NO: 2452596 - DNA, 25 bp, Homo sapien
gggccccatagttttccgagcagag

SEQ ID NO: 2452597 - DNA, 25 bp, Homo sapien
ccccatagttttccgagcagaggag

SEQ ID NO: 2452598 - DNA, 25 bp, Homo sapien
gggatcgccctgagcgccccgtgag

SEQ ID NO: 2452599 - DNA, 25 bp, Homo sapien
ccatagttttccgagcagaggagca

SEQ ID NO: 2452600 - DNA, 25 bp, Homo sapien
cagcggtttctcttggctccaggta

SEQ ID NO: 2452601 - DNA, 25 bp, Homo sapien
gggtttcactttgctctagttggcg

SEQ ID NO: 2452602 - DNA, 25 bp, Homo sapien
tctagttggcggcatcctggcgacg

SEQ ID NO: 2452603 - DNA, 25 bp, Homo sapien
tagagagggagggacccgcactttc

SEQ ID NO: 2452604 - DNA, 25 bp, Homo sapien
ctgagaagggaaggagggcgtcccg

SEQ ID NO: 2452605 - DNA, 25 bp, Homo sapien
tctgtcaatgggtttctaaagtgtt

SEQ ID NO: 2452606 - DNA, 25 bp, Homo sapien
caccatgccggcctgagctttttct

SEQ ID NO: 2452607 - DNA, 25 bp, Homo sapien
tgtggatatcctgctttttgtaact

SEQ ID NO: 2452608 - DNA, 25 bp, Homo sapien
tgctattgtcccttctcttcagaga

SEQ ID NO: 2452609 - DNA, 25 bp, Homo sapien
acggtctgccttgctgaaggtgttg

SEQ ID NO: 2452610 - DNA, 25 bp, Homo sapien
tcttacggtctgccttgctgaaggt

SEQ ID NO: 2452611 - DNA, 25 bp, Homo sapien
ttacggtctgccttgctgaaggtgt

SEQ ID NO: 2452612 - DNA, 25 bp, Homo sapien
tacggtctgccttgctgaaggtgtt

SEQ ID NO: 2452613 - DNA, 25 bp, Homo sapien
cagagctttactatgaacagaccga

SEQ ID NO: 2452614 - DNA, 25 bp, Homo sapien
gagtaactcgttaaagtctcctctg

SEQ ID NO: 2452615 - DNA, 25 bp, Homo sapien
gattcagagtcccaactgggtccag

SEQ ID NO: 2452616 - DNA, 25 bp, Homo sapien
gacttagcagatgcctttggtgagg

SEQ ID NO: 2452617 - DNA, 25 bp, Homo sapien
gataatagcacttcctggttcacag

SEQ ID NO: 2452618 - DNA, 25 bp, Homo sapien
tgtagcacttcttagtttgagggac

SEQ ID NO: 2452619 - DNA, 25 bp, Homo sapien
cataacgacatttggaaccgtctag

SEQ ID NO: 2452620 - DNA, 25 bp, Homo sapien
tagaacttcctaatttgcagggaca

SEQ ID NO: 2452621 - DNA, 25 bp, Homo sapien
gatgaagttctaaccacagtgccat

SEQ ID NO: 2452622 - DNA, 25 bp, Homo sapien
cattccttggtgttacgcgtgtctc

SEQ ID NO: 2452623 - DNA, 25 bp, Homo sapien
gctctgaatgctcttagaaggcacc

SEQ ID NO: 2452624 - DNA, 25 bp, Homo sapien
ttattgagaaatgccagccgtcatc

SEQ ID NO: 2452625 - DNA, 25 bp, Homo sapien
gcggtacagggtcccattagcaggt

SEQ ID NO: 2452626 - DNA, 25 bp, Homo sapien
caacagttcagcaccgtggtgcggt

SEQ ID NO: 2452627 - DNA, 25 bp, Homo sapien
tacagggtcccattagcaggtctca

SEQ ID NO: 2452628 - DNA, 25 bp, Homo sapien
caccgtggtgcggtacagggtccca

SEQ ID NO: 2452629 - DNA, 25 bp, Homo sapien
cggtgccagcctccgtcatagtttc

SEQ ID NO: 2452630 - DNA, 25 bp, Homo sapien
ccacaacagtaatcttgactcaact

SEQ ID NO: 2452631 - DNA, 25 bp, Homo sapien
tgtctaagccaagtttagccgaaga

SEQ ID NO: 2452632 - DNA, 25 bp, Homo sapien
tcagctcctcatcctgtgtctaagc

SEQ ID NO: 2452633 - DNA, 25 bp, Homo sapien
taagaagggcatgcacacaagtaac

SEQ ID NO: 2452634 - DNA, 25 bp, Homo sapien
tcagaagaggatagaatgggttgcc

SEQ ID NO: 2452635 - DNA, 25 bp, Homo sapien
gaagacttgtaggagcgctgtgacc

SEQ ID NO: 2452636 - DNA, 25 bp, Homo sapien
gcacacgggccaagttaatcatgga

SEQ ID NO: 2452637 - DNA, 25 bp, Homo sapien
aatgtgcaggtgtcctgatctgacc

SEQ ID NO: 2452638 - DNA, 25 bp, Homo sapien
gtgacgagaacctgcaaacagaatg

SEQ ID NO: 2452639 - DNA, 25 bp, Homo sapien
taaaattcggttcattgatttgccg

SEQ ID NO: 2452640 - DNA, 25 bp, Homo sapien
gatttgccggtgacgagaacctgca

SEQ ID NO: 2452641 - DNA, 25 bp, Homo sapien
tatttgctaagtcaatgtttattgg

SEQ ID NO: 2452642 - DNA, 25 bp, Homo sapien
atttgctaagtcaatgtttattgga

SEQ ID NO: 2452643 - DNA, 25 bp, Homo sapien
tctgtaacactctatttgctaagtc

SEQ ID NO: 2452644 - DNA, 25 bp, Homo sapien
ttgctaagtcaatgtttattggata

SEQ ID NO: 2452645 - DNA, 25 bp, Homo sapien
cttggggggtgatcactcagtttcc

SEQ ID NO: 2452646 - DNA, 25 bp, Homo sapien
tagccttggggggtgatcactcagt

SEQ ID NO: 2452647 - DNA, 25 bp, Homo sapien
cacgttagccttggggggtgatcac

SEQ ID NO: 2452648 - DNA, 25 bp, Homo sapien
tccacgttagccttggggggtgatc

SEQ ID NO: 2452649 - DNA, 25 bp, Homo sapien
ttcacatttgtagccccggaggtcg

SEQ ID NO: 2452650 - DNA, 25 bp, Homo sapien
taccctgtcccggaaacatctggag

SEQ ID NO: 2452651 - DNA, 25 bp, Homo sapien
tgcagagaggctgaatgccgtaaac

SEQ ID NO: 2452652 - DNA, 25 bp, Homo sapien
ttccgccttgccctgatgagccatt

SEQ ID NO: 2452653 - DNA, 25 bp, Homo sapien
tgttgtggaactggacacacttccg

SEQ ID NO: 2452654 - DNA, 25 bp, Homo sapien
gcttttcttcagtgcgccagagatg

SEQ ID NO: 2452655 - DNA, 25 bp, Homo sapien
gatggccagccacgttgaagtagca

SEQ ID NO: 2452656 - DNA, 25 bp, Homo sapien
gccaggtgcttcctgacggttgaga

SEQ ID NO: 2452657 - DNA, 25 bp, Homo sapien
gtgggaggtgcccttagtcttacag

SEQ ID NO: 2452658 - DNA, 25 bp, Homo sapien
ggaggtgcccttagtcttacagcct

SEQ ID NO: 2452659 - DNA, 25 bp, Homo sapien
cttcttggcccttgggaacaaccat

SEQ ID NO: 2452660 - DNA, 25 bp, Homo sapien
ggtgcccttagtcttacagcctcca

SEQ ID NO: 2452661 - DNA, 25 bp, Homo sapien
gaatttcaacttggtccaggcaaca

SEQ ID NO: 2452662 - DNA, 25 bp, Homo sapien
caggagaaaatcatgtgcaggcaga

SEQ ID NO: 2452663 - DNA, 25 bp, Homo sapien
tctaatgagatcctggtcaagctga

SEQ ID NO: 2452664 - DNA, 25 bp, Homo sapien
gatgactttgacttaggagatgctg

SEQ ID NO: 2452665 - DNA, 25 bp, Homo sapien
gaaatgttcagccatctctgtggga

SEQ ID NO: 2452666 - DNA, 25 bp, Homo sapien
gctgccccgtagaggttcggtcctc

SEQ ID NO: 2452667 - DNA, 25 bp, Homo sapien
ttcggtcctcggagaagagttcagg

SEQ ID NO: 2452668 - DNA, 25 bp, Homo sapien
cctgctctgtagaatcactacaggg

SEQ ID NO: 2452669 - DNA, 25 bp, Homo sapien
ccaaaccttcccattgcagacgttg

SEQ ID NO: 2452670 - DNA, 25 bp, Homo sapien
gtagagtgtaagaagcaggacccca

SEQ ID NO: 2452671 - DNA, 25 bp, Homo sapien
ttgaccccaaaccttcccattgcag

SEQ ID NO: 2452672 - DNA, 25 bp, Homo sapien
ccccgtagagtgtaagaagcaggac

SEQ ID NO: 2452673 - DNA, 25 bp, Homo sapien
tgcaaatcggtcagctcaggcgtct

SEQ ID NO: 2452674 - DNA, 25 bp, Homo sapien
tcaatcacgatgctgtgtgcttcct

SEQ ID NO: 2452675 - DNA, 25 bp, Homo sapien
tgcaccgtgcgtgtctcaatcacga

SEQ ID NO: 2452676 - DNA, 25 bp, Homo sapien
tatcattctcggcatgcttcctttg

SEQ ID NO: 2452677 - DNA, 25 bp, Homo sapien
gcaacctcgcgggttcaagcaattc

SEQ ID NO: 2452678 - DNA, 25 bp, Homo sapien
ggcagtggtgcaatcttggctcact

SEQ ID NO: 2452679 - DNA, 25 bp, Homo sapien
cgctctatcgcccagaatggagggc

SEQ ID NO: 2452680 - DNA, 25 bp, Homo sapien
tgacctcaggtggttcccccccgca

SEQ ID NO: 2452681 - DNA, 25 bp, Homo sapien
tgctgggcggatgatgtttactaac

SEQ ID NO: 2452682 - DNA, 25 bp, Homo sapien
cccatgggatgtgaaaggctggcca

SEQ ID NO: 2452683 - DNA, 25 bp, Homo sapien
tgtccatcgagcacgtctgaaaccc

SEQ ID NO: 2452684 - DNA, 25 bp, Homo sapien
ggaggccttctgttcacggcggatt

SEQ ID NO: 2452685 - DNA, 25 bp, Homo sapien
ggtactccctacatccagatactgt

SEQ ID NO: 2452686 - DNA, 25 bp, Homo sapien
gcctgcttccagatactcctctgta

SEQ ID NO: 2452687 - DNA, 25 bp, Homo sapien
ctctgtatccagatactcctctaaa

SEQ ID NO: 2452688 - DNA, 25 bp, Homo sapien
cctaagatgtacaagatgtaccgca

SEQ ID NO: 2452689 - DNA, 25 bp, Homo sapien
gatgtgtacattaaccccacactgg

SEQ ID NO: 2452690 - DNA, 25 bp, Homo sapien
aaaatgcctcttggaagtcactgag

SEQ ID NO: 2452691 - DNA, 25 bp, Homo sapien
tcctgaacaaccgtctctgctgaaa

SEQ ID NO: 2452692 - DNA, 25 bp, Homo sapien
accattgtgaaagcaggagtcatca

SEQ ID NO: 2452693 - DNA, 25 bp, Homo sapien
tgcctacactggtcccacaggtttt

SEQ ID NO: 2452694 - DNA, 25 bp, Homo sapien
caagtgtgccggcttccagaagcct

SEQ ID NO: 2452695 - DNA, 25 bp, Homo sapien
ctggctccgacacacgactgagtgt

SEQ ID NO: 2452696 - DNA, 25 bp, Homo sapien
gatgcccattggtgcttgggaacca

SEQ ID NO: 2452697 - DNA, 25 bp, Homo sapien
gagaggccgggtctcacaatccgct

SEQ ID NO: 2452698 - DNA, 25 bp, Homo sapien
agaggccgggtctcacaatccgctt

SEQ ID NO: 2452699 - DNA, 25 bp, Homo sapien
ggccgggtctcacaatccgcttggc

SEQ ID NO: 2452700 - DNA, 25 bp, Homo sapien
aggccgggtctcacaatccgcttgg

SEQ ID NO: 2452701 - DNA, 25 bp, Homo sapien
taatgcacgcccgaggtaagaggca

SEQ ID NO: 2452702 - DNA, 25 bp, Homo sapien
tgtgttttctaatgcacgcccgagg

SEQ ID NO: 2452703 - DNA, 25 bp, Homo sapien
gggacttccctgtcttgcgttcctg

SEQ ID NO: 2452704 - DNA, 25 bp, Homo sapien
ccctgtcttgcgttcctgtgttttc

SEQ ID NO: 2452705 - DNA, 25 bp, Homo sapien
gacgacaaaatacttcgatctctgc

SEQ ID NO: 2452706 - DNA, 25 bp, Homo sapien
cattccttcctcttcgacgacaaaa

SEQ ID NO: 2452707 - DNA, 25 bp, Homo sapien
aatacttcgatctctgcagacaccg

SEQ ID NO: 2452708 - DNA, 25 bp, Homo sapien
tcattccttcctcttcgacgacaaa

SEQ ID NO: 2452709 - DNA, 25 bp, Homo sapien
tctaggtaggtctttgtagccaatg

SEQ ID NO: 2452710 - DNA, 25 bp, Homo sapien
gtaggtctttgtagccaatgttacc

SEQ ID NO: 2452711 - DNA, 25 bp, Homo sapien
gtaagttatcgtaaaaaggagcatc

SEQ ID NO: 2452712 - DNA, 25 bp, Homo sapien
ctaaacataagaaagtgagggctgt

SEQ ID NO: 2452713 - DNA, 25 bp, Homo sapien
ggtaagtggcctagctggtgctcca

SEQ ID NO: 2452714 - DNA, 25 bp, Homo sapien
ttgtccagtggctgtagcggtcccg

SEQ ID NO: 2452715 - DNA, 25 bp, Homo sapien
tgtccagttgcacttcgctgcagag

SEQ ID NO: 2452716 - DNA, 25 bp, Homo sapien
cagcatcttcgccttccgacgaggt

SEQ ID NO: 2452717 - DNA, 25 bp, Homo sapien
catcttgcgcctctgatcgcgagac

SEQ ID NO: 2452718 - DNA, 25 bp, Homo sapien
gatctctgagtttcgcattctggga

SEQ ID NO: 2452719 - DNA, 25 bp, Homo sapien
tcgcgagaccacacgatgaatgcgt

SEQ ID NO: 2452720 - DNA, 25 bp, Homo sapien
cattctgggattctctagagccatc

SEQ ID NO: 2452721 - DNA, 25 bp, Homo sapien
cccgtttcacactgatacttagagt

SEQ ID NO: 2452722 - DNA, 25 bp, Homo sapien
agagcttctccggagagcgggaata

SEQ ID NO: 2452723 - DNA, 25 bp, Homo sapien
gatacttagagttacagctttcagt

SEQ ID NO: 2452724 - DNA, 25 bp, Homo sapien
tgcacagctggactgtaatcatcgc

SEQ ID NO: 2452725 - DNA, 25 bp, Homo sapien
acatagcagaagcatatgattgcat

SEQ ID NO: 2452726 - DNA, 25 bp, Homo sapien
taacatagcagaagcatatgattgc

SEQ ID NO: 2452727 - DNA, 25 bp, Homo sapien
cttaacatagcagaagcatatgatt

SEQ ID NO: 2452728 - DNA, 25 bp, Homo sapien
aacatagcagaagcatatgattgca

SEQ ID NO: 2452729 - DNA, 25 bp, Homo sapien
tgtcaaaaacaaggagagtgcgaca

SEQ ID NO: 2452730 - DNA, 25 bp, Homo sapien
caaaattgaaaggtgccagagttcg

SEQ ID NO: 2452731 - DNA, 25 bp, Homo sapien
tccaaaactcacttctaccagattc

SEQ ID NO: 2452732 - DNA, 25 bp, Homo sapien
gaaacttgcatttctccgccctcaa

SEQ ID NO: 2452733 - DNA, 25 bp, Homo sapien
ggaacctctggagcgggactttgac

SEQ ID NO: 2452734 - DNA, 25 bp, Homo sapien
gactttgaccgcttcctcggaacca

SEQ ID NO: 2452735 - DNA, 25 bp, Homo sapien
caaccaagaagaggaacctctggag

SEQ ID NO: 2452736 - DNA, 25 bp, Homo sapien
gttccgggagtgacaaccaagaaga

SEQ ID NO: 2452737 - DNA, 25 bp, Homo sapien
ggagttttaagactcagatgcccct

SEQ ID NO: 2452738 - DNA, 25 bp, Homo sapien
gcttaagactgtggagacattccag

SEQ ID NO: 2452739 - DNA, 25 bp, Homo sapien
cagaccatggtttgtgtagagtgac

SEQ ID NO: 2452740 - DNA, 25 bp, Homo sapien
tgactatttcacctcttcgaaggag

SEQ ID NO: 2452741 - DNA, 25 bp, Homo sapien
gcttgttcatgatggcaatactcct

SEQ ID NO: 2452742 - DNA, 25 bp, Homo sapien
tatctctgggctagtgtgtctctgg

SEQ ID NO: 2452743 - DNA, 25 bp, Homo sapien
tttgccattaggctgctgtcctttg

SEQ ID NO: 2452744 - DNA, 25 bp, Homo sapien
ggagcactttctcttacaaactgta

SEQ ID NO: 2452745 - DNA, 25 bp, Homo sapien
gggaggtactaataacataatccta

SEQ ID NO: 2452746 - DNA, 25 bp, Homo sapien
cataatcctaataacataacctttt

SEQ ID NO: 2452747 - DNA, 25 bp, Homo sapien
ccttttccggcacattttgtataca

SEQ ID NO: 2452748 - DNA, 25 bp, Homo sapien
tgaactaccttttggataactactg

SEQ ID NO: 2452749 - DNA, 25 bp, Homo sapien
gaggactatcaattggaaatatgtc

SEQ ID NO: 2452750 - DNA, 25 bp, Homo sapien
tccagagttgcccattgaggactat

SEQ ID NO: 2452751 - DNA, 25 bp, Homo sapien
gggctctttgttaccaccgctccag

SEQ ID NO: 2452752 - DNA, 25 bp, Homo sapien
tagcagttcttagtagtggtagagt

SEQ ID NO: 2452753 - DNA, 25 bp, Homo sapien
aatcagtatgggagatcatcagctc

SEQ ID NO: 2452754 - DNA, 25 bp, Homo sapien
tttagcctgtgataaaggaccagag

SEQ ID NO: 2452755 - DNA, 25 bp, Homo sapien
ttaatatagtttttcccaagagcac

SEQ ID NO: 2452756 - DNA, 25 bp, Homo sapien
tctctgaccgaggaaatgctggaaa

SEQ ID NO: 2452757 - DNA, 25 bp, Homo sapien
atactgtgcagattgatttagggac

SEQ ID NO: 2452758 - DNA, 25 bp, Homo sapien
tgatgctcgaaccatccgctaccca

SEQ ID NO: 2452759 - DNA, 25 bp, Homo sapien
ccagatcctgtcatcaaggtgaacg

SEQ ID NO: 2452760 - DNA, 25 bp, Homo sapien
ttagggactggcaagataatcaact

SEQ ID NO: 2452761 - DNA, 25 bp, Homo sapien
tatattagatggttatgtcccgcaa

SEQ ID NO: 2452762 - DNA, 25 bp, Homo sapien
tagcattcgtttacagtgacaagag

SEQ ID NO: 2452763 - DNA, 25 bp, Homo sapien
ttagctagccatccagttaaaggcc

SEQ ID NO: 2452764 - DNA, 25 bp, Homo sapien
cattgaaagactggattagctagcc

SEQ ID NO: 2452765 - DNA, 25 bp, Homo sapien
gattggtggagccaacctcggtcgt

SEQ ID NO: 2452766 - DNA, 25 bp, Homo sapien
acctcggtcgtgttggtgtgatcac

SEQ ID NO: 2452767 - DNA, 25 bp, Homo sapien
gccaacctcggtcgtgttggtgtga

SEQ ID NO: 2452768 - DNA, 25 bp, Homo sapien
tgtatggtgattggtggagccaacc

SEQ ID NO: 2452769 - DNA, 25 bp, Homo sapien
cacaaactgtgtaacgtggcctttt

SEQ ID NO: 2452770 - DNA, 25 bp, Homo sapien
actgtgtaacgtggcctttttatca

SEQ ID NO: 2452771 - DNA, 25 bp, Homo sapien
ggttctgggataattggctagccac

SEQ ID NO: 2452772 - DNA, 25 bp, Homo sapien
aagtggggaatggacactcttttca

SEQ ID NO: 2452773 - DNA, 25 bp, Homo sapien
gtggggaatggacactcttttcaac

SEQ ID NO: 2452774 - DNA, 25 bp, Homo sapien
gctagccacatgtaggagaatgaaa

SEQ ID NO: 2452775 - DNA, 25 bp, Homo sapien
tgagaacttcaccttaacatctttg

SEQ ID NO: 2452776 - DNA, 25 bp, Homo sapien
accttaacatctttgaagtgcttca

SEQ ID NO: 2452777 - DNA, 25 bp, Homo sapien
aaactcataggttggccagcatctg

SEQ ID NO: 2452778 - DNA, 25 bp, Homo sapien
aactcataggttggccagcatctga

SEQ ID NO: 2452779 - DNA, 25 bp, Homo sapien
ggagctgggccgctttttgtcagct

SEQ ID NO: 2452780 - DNA, 25 bp, Homo sapien
gtgacgtgctgacggcgggcccgtg

SEQ ID NO: 2452781 - DNA, 25 bp, Homo sapien
ctgggccgctttttgtcagctccga

SEQ ID NO: 2452782 - DNA, 25 bp, Homo sapien
tctcccgggcggtgacgtgacgtgc

SEQ ID NO: 2452783 - DNA, 25 bp, Homo sapien
aacagggcgtgctcgttcccttggc

SEQ ID NO: 2452784 - DNA, 25 bp, Homo sapien
tgattatccagttgccctgagcggc

SEQ ID NO: 2452785 - DNA, 25 bp, Homo sapien
cccgtttgtccggaaggcagttgat

SEQ ID NO: 2452786 - DNA, 25 bp, Homo sapien
aattcggttatgatccttgaggcgg

SEQ ID NO: 2452787 - DNA, 25 bp, Homo sapien
gatgaatttgaattgcagccacaag

SEQ ID NO: 2452788 - DNA, 25 bp, Homo sapien
tgaatttgaattgcagccacaagag

SEQ ID NO: 2452789 - DNA, 25 bp, Homo sapien
aagatgaatttgaattgcagccaca

SEQ ID NO: 2452790 - DNA, 25 bp, Homo sapien
aatttgaattgcagccacaagagcc

SEQ ID NO: 2452791 - DNA, 25 bp, Homo sapien
tgtggattctgacataactgtgcat

SEQ ID NO: 2452792 - DNA, 25 bp, Homo sapien
ctacacacatggatggtgatcagat

SEQ ID NO: 2452793 - DNA, 25 bp, Homo sapien
aatacaagaagcagtttttgtttct

SEQ ID NO: 2452794 - DNA, 25 bp, Homo sapien
gatcagattgttgtggaaatacaag

SEQ ID NO: 2452795 - DNA, 25 bp, Homo sapien
tatactgtaccaggagtgagaggga

SEQ ID NO: 2452796 - DNA, 25 bp, Homo sapien
tacattgttcaaaggcctaattagg

SEQ ID NO: 2452797 - DNA, 25 bp, Homo sapien
gcctatacgcaagaaaaagcacagc

SEQ ID NO: 2452798 - DNA, 25 bp, Homo sapien
caagggatccatgtttagacacaag

SEQ ID NO: 2452799 - DNA, 25 bp, Homo sapien
atgttgtacagccattgtgacaaag

SEQ ID NO: 2452800 - DNA, 25 bp, Homo sapien
cggctcactgatgttgtacagccat

SEQ ID NO: 2452801 - DNA, 25 bp, Homo sapien
gttgtacagccattgtgacaaagtt

SEQ ID NO: 2452802 - DNA, 25 bp, Homo sapien
gacttcggctcactgatgttgtaca

SEQ ID NO: 2452803 - DNA, 25 bp, Homo sapien
tgttcttgaaaacttcagtttgtat

SEQ ID NO: 2452804 - DNA, 25 bp, Homo sapien
gtatttgagaatcctttaaatctcc

SEQ ID NO: 2452805 - DNA, 25 bp, Homo sapien
atttttactgtccttcatgatcctg

SEQ ID NO: 2452806 - DNA, 25 bp, Homo sapien
ttgagaatcctttaaatctccttcc

SEQ ID NO: 2452807 - DNA, 25 bp, Homo sapien
tttagccttctgagacttttgggaa

SEQ ID NO: 2452808 - DNA, 25 bp, Homo sapien
gatatacacatcaactgtctgtctc

SEQ ID NO: 2452809 - DNA, 25 bp, Homo sapien
tttgggaagaactgaggaccttgcc

SEQ ID NO: 2452810 - DNA, 25 bp, Homo sapien
tgacccagaggatagttagaataag

SEQ ID NO: 2452811 - DNA, 25 bp, Homo sapien
tcaaattcagggagacagtatgtag

SEQ ID NO: 2452812 - DNA, 25 bp, Homo sapien
gagtatgcacaactgcaaaaggtgg

SEQ ID NO: 2452813 - DNA, 25 bp, Homo sapien
tgattctgtctatatgaagtccctg

SEQ ID NO: 2452814 - DNA, 25 bp, Homo sapien
gacatatgctacaactggacttaca

SEQ ID NO: 2452815 - DNA, 25 bp, Homo sapien
gatgaatctgtccataggtttagat

SEQ ID NO: 2452816 - DNA, 25 bp, Homo sapien
ttagcctcacttagggtttccaaga

SEQ ID NO: 2452817 - DNA, 25 bp, Homo sapien
tcacttagggtttccaagatgaatc

SEQ ID NO: 2452818 - DNA, 25 bp, Homo sapien
aatctgtccataggtttagattcac

SEQ ID NO: 2452819 - DNA, 25 bp, Homo sapien
gaaggtaaagcttgttgtttcttgc

SEQ ID NO: 2452820 - DNA, 25 bp, Homo sapien
aagtccagctacagctgtgataaca

SEQ ID NO: 2452821 - DNA, 25 bp, Homo sapien
ctactgtgaaggtaaagcttgttgt

SEQ ID NO: 2452822 - DNA, 25 bp, Homo sapien
tccagctacagctgtgataacatta

SEQ ID NO: 2452823 - DNA, 25 bp, Homo sapien
agggacaagagaaacaagttcttat

SEQ ID NO: 2452824 - DNA, 25 bp, Homo sapien
cagggacaagagaaacaagttctta

SEQ ID NO: 2452825 - DNA, 25 bp, Homo sapien
gaaacttgaaactcctacccatggc

SEQ ID NO: 2452826 - DNA, 25 bp, Homo sapien
tgtgacctgcgcttctgttcttgag

SEQ ID NO: 2452827 - DNA, 25 bp, Homo sapien
tacacacaatgtaattctgggccaa

SEQ ID NO: 2452828 - DNA, 25 bp, Homo sapien
gcagttctctgtagagttgttttcc

SEQ ID NO: 2452829 - DNA, 25 bp, Homo sapien
tgcttgtttcctctccatgaggcct

SEQ ID NO: 2452830 - DNA, 25 bp, Homo sapien
ttgtttcctctccatgaggccttac

SEQ ID NO: 2452831 - DNA, 25 bp, Homo sapien
cctgtgcttgtttcctctccatgag

SEQ ID NO: 2452832 - DNA, 25 bp, Homo sapien
tgtgcttgtttcctctccatgaggc

SEQ ID NO: 2452833 - DNA, 25 bp, Homo sapien
ctgtgggtttctccctattagcgtt

SEQ ID NO: 2452834 - DNA, 25 bp, Homo sapien
tttgcctgtgggtttctccctatta

SEQ ID NO: 2452835 - DNA, 25 bp, Homo sapien
gcctgtgggtttctccctattagcg

SEQ ID NO: 2452836 - DNA, 25 bp, Homo sapien
tgggtttctccctattagcgttcat

SEQ ID NO: 2452837 - DNA, 25 bp, Homo sapien
ctagtattagtttctagcacccgtt

SEQ ID NO: 2452838 - DNA, 25 bp, Homo sapien
tgtgacccaccccaactgtctagta

SEQ ID NO: 2452839 - DNA, 25 bp, Homo sapien
gacccaccccaactgtctagtatta

SEQ ID NO: 2452840 - DNA, 25 bp, Homo sapien
caactgtctagtattagtttctagc

SEQ ID NO: 2452841 - DNA, 25 bp, Homo sapien
tcttctcctgttgtaccttcaaccc

SEQ ID NO: 2452842 - DNA, 25 bp, Homo sapien
gggctagggcaggtcccagtccatc

SEQ ID NO: 2452843 - DNA, 25 bp, Homo sapien
gtaccttcaacccactctgctgaaa

SEQ ID NO: 2452844 - DNA, 25 bp, Homo sapien
tggtggcttatcagggtggctcaca

SEQ ID NO: 2452845 - DNA, 25 bp, Homo sapien
gtgcctgccacatgttttgctaatg

SEQ ID NO: 2452846 - DNA, 25 bp, Homo sapien
tgtgttaattaggtcgtttgtgttc

SEQ ID NO: 2452847 - DNA, 25 bp, Homo sapien
tcagttcactaatagcatatgttgc

SEQ ID NO: 2452848 - DNA, 25 bp, Homo sapien
tatcaggtatgtcctttgaaaagat

SEQ ID NO: 2452849 - DNA, 25 bp, Homo sapien
ttatgccctagctaaagcttcttca

SEQ ID NO: 2452850 - DNA, 25 bp, Homo sapien
tatgccctagctaaagcttcttcaa

SEQ ID NO: 2452851 - DNA, 25 bp, Homo sapien
acctgagagatcagtagggaggaca

SEQ ID NO: 2452852 - DNA, 25 bp, Homo sapien
ctgagagatcagtagggaggacaac

SEQ ID NO: 2452853 - DNA, 25 bp, Homo sapien
gagagatcagtagggaggacaacat

SEQ ID NO: 2452854 - DNA, 25 bp, Homo sapien
aggacctgagagatcagtagggagg

SEQ ID NO: 2452855 - DNA, 25 bp, Homo sapien
gatgcaaagttctgcggccggcttg

SEQ ID NO: 2452856 - DNA, 25 bp, Homo sapien
tattattccattttcgcactgccaa

SEQ ID NO: 2452857 - DNA, 25 bp, Homo sapien
acagcgcccaagtcacctcttaaag

SEQ ID NO: 2452858 - DNA, 25 bp, Homo sapien
aaatttcgcatatccctctgagacc

SEQ ID NO: 2452859 - DNA, 25 bp, Homo sapien
actgagtacggggatgtgacccaca

SEQ ID NO: 2452860 - DNA, 25 bp, Homo sapien
gtgacccacatcaaatgtaatcatg

SEQ ID NO: 2452861 - DNA, 25 bp, Homo sapien
gcattgttttcactgagtacgggga

SEQ ID NO: 2452862 - DNA, 25 bp, Homo sapien
aatcatgatgatggctgattttctc

SEQ ID NO: 2452863 - DNA, 25 bp, Homo sapien
ctctgttcaaagcccacctgaatgt

SEQ ID NO: 2452864 - DNA, 25 bp, Homo sapien
ttcagttctctgttcaaagcccacc

SEQ ID NO: 2452865 - DNA, 25 bp, Homo sapien
attcagttctctgttcaaagcccac

SEQ ID NO: 2452866 - DNA, 25 bp, Homo sapien
tcagttctctgttcaaagcccacct

SEQ ID NO: 2452867 - DNA, 25 bp, Homo sapien
gcatttcttttgttagatgttccag

SEQ ID NO: 2452868 - DNA, 25 bp, Homo sapien
tcttttgttagatgttccaggccat

SEQ ID NO: 2452869 - DNA, 25 bp, Homo sapien
acagactgtggcagggagacgtccc

SEQ ID NO: 2452870 - DNA, 25 bp, Homo sapien
cactggtactgtgcttgcatttctt

SEQ ID NO: 2452871 - DNA, 25 bp, Homo sapien
tcttttgttagatgttccaggccat

SEQ ID NO: 2452872 - DNA, 25 bp, Homo sapien
acagactgtggcagggagacgtccc

SEQ ID NO: 2452873 - DNA, 25 bp, Homo sapien
gcatttcttttgttagatgttccag

SEQ ID NO: 2452874 - DNA, 25 bp, Homo sapien
cactggtactgtgcttgcatttctt

SEQ ID NO: 2452875 - DNA, 25 bp, Homo sapien
tataaatggactaaattctgcaatt

SEQ ID NO: 2452876 - DNA, 25 bp, Homo sapien
ttaaatataaatggactaaattctg

SEQ ID NO: 2452877 - DNA, 25 bp, Homo sapien
taaatataaatggactaaattctgc

SEQ ID NO: 2452878 - DNA, 25 bp, Homo sapien
aatataaatggactaaattctgcaa

SEQ ID NO: 2452879 - DNA, 25 bp, Homo sapien
aggatctctggtcctggttccctgg

SEQ ID NO: 2452880 - DNA, 25 bp, Homo sapien
ggttccctgggctctgaagagttta

SEQ ID NO: 2452881 - DNA, 25 bp, Homo sapien
cattagtctcaggatctctggtcct

SEQ ID NO: 2452882 - DNA, 25 bp, Homo sapien
tttcaacattagtctcaggatctct

SEQ ID NO: 2452883 - DNA, 25 bp, Homo sapien
ttttcactaatgtcaaattgaatgg

SEQ ID NO: 2452884 - DNA, 25 bp, Homo sapien
catggttttcactaatgtcaaattg

SEQ ID NO: 2452885 - DNA, 25 bp, Homo sapien
ctaatgtcaaattgaatggtaagat

SEQ ID NO: 2452886 - DNA, 25 bp, Homo sapien
aatgtcaaattgaatggtaagatgt

SEQ ID NO: 2452887 - DNA, 25 bp, Homo sapien
atttctttacagagctgtgtcatgc

SEQ ID NO: 2452888 - DNA, 25 bp, Homo sapien
aaggaaatcctaagaaggtgcattt

SEQ ID NO: 2452889 - DNA, 25 bp, Homo sapien
ggagtgtgctggatgtctctataat

SEQ ID NO: 2452890 - DNA, 25 bp, Homo sapien
tggagtgtgctggatgtctctataa

SEQ ID NO: 2452891 - DNA, 25 bp, Homo sapien
gagtgtgctggatgtctctataatt

SEQ ID NO: 2452892 - DNA, 25 bp, Homo sapien
aatggagtgtgctggatgtctctat

SEQ ID NO: 2452893 - DNA, 25 bp, Homo sapien
ctacaaggaacccgtccctgaaatg

SEQ ID NO: 2452894 - DNA, 25 bp, Homo sapien
acaaggaacccgtccctgaaatgat

SEQ ID NO: 2452895 - DNA, 25 bp, Homo sapien
tacaaggaacccgtccctgaaatga

SEQ ID NO: 2452896 - DNA, 25 bp, Homo sapien
caaggaacccgtccctgaaatgatt

SEQ ID NO: 2452897 - DNA, 25 bp, Homo sapien
gcagtttgacacatacccaaagaag

SEQ ID NO: 2452898 - DNA, 25 bp, Homo sapien
tgacacatacccaaagaagatccat

SEQ ID NO: 2452899 - DNA, 25 bp, Homo sapien
gatttagcagtttgacacataccca

SEQ ID NO: 2452900 - DNA, 25 bp, Homo sapien
cacttggatggatttagcagtttga

SEQ ID NO: 2452901 - DNA, 25 bp, Homo sapien
catgggctcacgagtgggatcctct

SEQ ID NO: 2452902 - DNA, 25 bp, Homo sapien
cacacctctatggttgggagccaag

SEQ ID NO: 2452903 - DNA, 25 bp, Homo sapien
agagttttgttcctgagcccctagc

SEQ ID NO: 2452904 - DNA, 25 bp, Homo sapien
tggagggaaactcactcatcagggc

SEQ ID NO: 2452905 - DNA, 25 bp, Homo sapien
tatgagctgatttactgtaagggac

SEQ ID NO: 2452906 - DNA, 25 bp, Homo sapien
tacataagaatatgagctgatttac

SEQ ID NO: 2452907 - DNA, 25 bp, Homo sapien
taagcagcaaaatagacctcataca

SEQ ID NO: 2452908 - DNA, 25 bp, Homo sapien
gacatgactaatccagggtccatct

SEQ ID NO: 2452909 - DNA, 25 bp, Homo sapien
tcatcttgggttaggccaagctgat

SEQ ID NO: 2452910 - DNA, 25 bp, Homo sapien
cttgggttaggccaagctgatgtat

SEQ ID NO: 2452911 - DNA, 25 bp, Homo sapien
tgggttaggccaagctgatgtatga

SEQ ID NO: 2452912 - DNA, 25 bp, Homo sapien
gggttaggccaagctgatgtatgaa

SEQ ID NO: 2452913 - DNA, 25 bp, Homo sapien
cacagctttggtgtttgtagaaaag

SEQ ID NO: 2452914 - DNA, 25 bp, Homo sapien
catctgagcatgaatgtggaatgaa

SEQ ID NO: 2452915 - DNA, 25 bp, Homo sapien
caccactactgctatattcttcatt

SEQ ID NO: 2452916 - DNA, 25 bp, Homo sapien
gaatcctttacgcttctttcactca

SEQ ID NO: 2452917 - DNA, 25 bp, Homo sapien
tcctctgtgttcctcacaagtgaaa

SEQ ID NO: 2452918 - DNA, 25 bp, Homo sapien
tgcttttcctctgtgttcctcacaa

SEQ ID NO: 2452919 - DNA, 25 bp, Homo sapien
tttcctctgtgttcctcacaagtga

SEQ ID NO: 2452920 - DNA, 25 bp, Homo sapien
gcttttcctctgtgttcctcacaag

SEQ ID NO: 2452921 - DNA, 25 bp, Homo sapien
cttttttgatcaagtttatgaattt

SEQ ID NO: 2452922 - DNA, 25 bp, Homo sapien
atgaatttttaatgatcttgctcca

SEQ ID NO: 2452923 - DNA, 25 bp, Homo sapien
tttttaatgatcttgctccacccag

SEQ ID NO: 2452924 - DNA, 25 bp, Homo sapien
atcttgctccacccagaacagtcat

SEQ ID NO: 2452925 - DNA, 25 bp, Homo sapien
ccatctcacatgcactgacacagag

SEQ ID NO: 2452926 - DNA, 25 bp, Homo sapien
taagtctcttgaggatatattgtca

SEQ ID NO: 2452927 - DNA, 25 bp, Homo sapien
ttcaaaattctggaacctggaatat

SEQ ID NO: 2452928 - DNA, 25 bp, Homo sapien
tagttcacagactctttcaaaattc

SEQ ID NO: 2452929 - DNA, 25 bp, Homo sapien
caaaattctggaacctggaatataa

SEQ ID NO: 2452930 - DNA, 25 bp, Homo sapien
catagccagcaattagtggagcaag

SEQ ID NO: 2452931 - DNA, 25 bp, Homo sapien
tagtaaagggatgaaaataagaaca

SEQ ID NO: 2452932 - DNA, 25 bp, Homo sapien
ggaaatcaggatgatagtgcactat

SEQ ID NO: 2452933 - DNA, 25 bp, Homo sapien
actggtatttcagttgaagagctag

SEQ ID NO: 2452934 - DNA, 25 bp, Homo sapien
ataattaggcaccaaagctcttgca

SEQ ID NO: 2452935 - DNA, 25 bp, Homo sapien
gatgtggctcttgtgtccaccactc

SEQ ID NO: 2452936 - DNA, 25 bp, Homo sapien
tagacataattaggcaccaaagctc

SEQ ID NO: 2452937 - DNA, 25 bp, Homo sapien
tgctagcactgatgtggctcttgtg

SEQ ID NO: 2452938 - DNA, 25 bp, Homo sapien
cagttatcttccctgtccatcttat

SEQ ID NO: 2452939 - DNA, 25 bp, Homo sapien
ttcacattctattctcaggctgtgt

SEQ ID NO: 2452940 - DNA, 25 bp, Homo sapien
caggctgtgtacttggttttcataa

SEQ ID NO: 2452941 - DNA, 25 bp, Homo sapien
agttatcttccctgtccatcttata

SEQ ID NO: 2452942 - DNA, 25 bp, Homo sapien
taatcgatatacttctgggttttgt

SEQ ID NO: 2452943 - DNA, 25 bp, Homo sapien
ttttacatcgttgtcatgtttgcac

SEQ ID NO: 2452944 - DNA, 25 bp, Homo sapien
cattttacatcgttgtcatgtttgc

SEQ ID NO: 2452945 - DNA, 25 bp, Homo sapien
tttacatcgttgtcatgtttgcaca

SEQ ID NO: 2452946 - DNA, 25 bp, Homo sapien
tcattttacatcgttgtcatgtttg

SEQ ID NO: 2452947 - DNA, 25 bp, Homo sapien
gacacttagaactttgtactagtaa

SEQ ID NO: 2452948 - DNA, 25 bp, Homo sapien
caccaagtatgacggcgaacttctt

SEQ ID NO: 2452949 - DNA, 25 bp, Homo sapien
tcaaaacatccaccaagtatgacgg

SEQ ID NO: 2452950 - DNA, 25 bp, Homo sapien
tagtaaaggtgacatgatatggcca

SEQ ID NO: 2452951 - DNA, 25 bp, Homo sapien
tcaaaatgattcaggcagttaagct

SEQ ID NO: 2452952 - DNA, 25 bp, Homo sapien
gattcaggcagttaagctgaattga

SEQ ID NO: 2452953 - DNA, 25 bp, Homo sapien
tgaattgagatcagttctgtctccc

SEQ ID NO: 2452954 - DNA, 25 bp, Homo sapien
gcagttaagctgaattgagatcagt

SEQ ID NO: 2452955 - DNA, 25 bp, Homo sapien
tgttatctttgccagggggcattct

SEQ ID NO: 2452956 - DNA, 25 bp, Homo sapien
ttatctttgccagggggcattctaa

SEQ ID NO: 2452957 - DNA, 25 bp, Homo sapien
catgttatctttgccagggggcatt

SEQ ID NO: 2452958 - DNA, 25 bp, Homo sapien
tgcatgttatctttgccagggggca

SEQ ID NO: 2452959 - DNA, 25 bp, Homo sapien
tgctgactgcaactgttgcacattt

SEQ ID NO: 2452960 - DNA, 25 bp, Homo sapien
ggcgtacaggcaaactgctgactgc

SEQ ID NO: 2452961 - DNA, 25 bp, Homo sapien
tcaaagagcattgactggcgtacag

SEQ ID NO: 2452962 - DNA, 25 bp, Homo sapien
gcattgactggcgtacaggcaaact

SEQ ID NO: 2452963 - DNA, 25 bp, Homo sapien
aattctgtccaaagatacaactcta

SEQ ID NO: 2452964 - DNA, 25 bp, Homo sapien
gataattgatcctcacacagtacag

SEQ ID NO: 2452965 - DNA, 25 bp, Homo sapien
cattcttgcagtaaactatcgtgga

SEQ ID NO: 2452966 - DNA, 25 bp, Homo sapien
cacacggtttttccattcttgcagt

SEQ ID NO: 2452967 - DNA, 25 bp, Homo sapien
cattggttcctttagaatatatact

SEQ ID NO: 2452968 - DNA, 25 bp, Homo sapien
ttgctgccagtgacttcacataatg

SEQ ID NO: 2452969 - DNA, 25 bp, Homo sapien
gtttctcgttcatttactctgtctc

SEQ ID NO: 2452970 - DNA, 25 bp, Homo sapien
tgtgtttctcgttcatttactctgt

SEQ ID NO: 2452971 - DNA, 25 bp, Homo sapien
cttgattgctgccagtgacttcaca

SEQ ID NO: 2452972 - DNA, 25 bp, Homo sapien
ttgataaaaggccaagacccgtcag

SEQ ID NO: 2452973 - DNA, 25 bp, Homo sapien
gataaaaggccaagacccgtcagtg

SEQ ID NO: 2452974 - DNA, 25 bp, Homo sapien
tgataaaaggccaagacccgtcagt

SEQ ID NO: 2452975 - DNA, 25 bp, Homo sapien
gctcagtactaaacttctgcagtag

SEQ ID NO: 2452976 - DNA, 25 bp, Homo sapien
aactgctgaagtttacttctagtct

SEQ ID NO: 2452977 - DNA, 25 bp, Homo sapien
ggtaacccagtgtcatagaagtcac

SEQ ID NO: 2452978 - DNA, 25 bp, Homo sapien
tgaagtttacttctagtctgaaagg

SEQ ID NO: 2452979 - DNA, 25 bp, Homo sapien
gaagaaattggggataacatcagaa

SEQ ID NO: 2452980 - DNA, 25 bp, Homo sapien
agtatcgcgtatcccgcagatacgc

SEQ ID NO: 2452981 - DNA, 25 bp, Homo sapien
ttttatcagtatcgcgtatcccgca

SEQ ID NO: 2452982 - DNA, 25 bp, Homo sapien
tatcagtatcgcgtatcccgcagat

SEQ ID NO: 2452983 - DNA, 25 bp, Homo sapien
ttggggcctcaaactccaaagccat

SEQ ID NO: 2452984 - DNA, 25 bp, Homo sapien
tttggggcctcaaactccaaagcca

SEQ ID NO: 2452985 - DNA, 25 bp, Homo sapien
tttctcatttttgttacttccacaa

SEQ ID NO: 2452986 - DNA, 25 bp, Homo sapien
catttttgttacttccacaattatt

SEQ ID NO: 2452987 - DNA, 25 bp, Homo sapien
tattttaaacagtcttcacttctga

SEQ ID NO: 2452988 - DNA, 25 bp, Homo sapien
attttaaacagtcttcacttctgac

SEQ ID NO: 2452989 - DNA, 25 bp, Homo sapien
ttattttaaacagtcttcacttctg

SEQ ID NO: 2452990 - DNA, 25 bp, Homo sapien
cagaacaggtagctcttgactttct

SEQ ID NO: 2452991 - DNA, 25 bp, Homo sapien
aacaggtagctcttgactttctgat

SEQ ID NO: 2452992 - DNA, 25 bp, Homo sapien
tctgatcctctctggtttttctgac

SEQ ID NO: 2452993 - DNA, 25 bp, Homo sapien
gactttctgatcctctctggttttt

SEQ ID NO: 2452994 - DNA, 25 bp, Homo sapien
caggcagtgttaaatagcttaccaa

SEQ ID NO: 2452995 - DNA, 25 bp, Homo sapien
gacagagagtcaagtaataggccca

SEQ ID NO: 2452996 - DNA, 25 bp, Homo sapien
taaacaatggatgatttggacctca

SEQ ID NO: 2452997 - DNA, 25 bp, Homo sapien
ggccagtatcccagttgaacatcga

SEQ ID NO: 2452998 - DNA, 25 bp, Homo sapien
gtttttctgatatctaccaactgta

SEQ ID NO: 2452999 - DNA, 25 bp, Homo sapien
tatttgtgatagatgtttttctgat

SEQ ID NO: 2453000 - DNA, 25 bp, Homo sapien
tatctaccaactgtaatcataggga

SEQ ID NO: 2453001 - DNA, 25 bp, Homo sapien
caactgtaatcatagggacttgttc

SEQ ID NO: 2453002 - DNA, 25 bp, Homo sapien
tcaaccattaatgaagtaatggttg

SEQ ID NO: 2453003 - DNA, 25 bp, Homo sapien
caaccattaatgaagtaatggttga

SEQ ID NO: 2453004 - DNA, 25 bp, Homo sapien
aaccattaatgaagtaatggttgaa

SEQ ID NO: 2453005 - DNA, 25 bp, Homo sapien
tcattggcaattatgtgctgcttta

SEQ ID NO: 2453006 - DNA, 25 bp, Homo sapien
gcaattatgtgctgctttaaggcac

SEQ ID NO: 2453007 - DNA, 25 bp, Homo sapien
tgtggtaagatacaattatggaatc

SEQ ID NO: 2453008 - DNA, 25 bp, Homo sapien
tcatttgaaggttgtggtaagatac

SEQ ID NO: 2453009 - DNA, 25 bp, Homo sapien
ttcagtgtctgccactggaagttct

SEQ ID NO: 2453010 - DNA, 25 bp, Homo sapien
gaagttcttcaccttcaggtgtttc

SEQ ID NO: 2453011 - DNA, 25 bp, Homo sapien
attttcagtgtctgccactggaagt

SEQ ID NO: 2453012 - DNA, 25 bp, Homo sapien
tcagtgtctgccactggaagttctt

SEQ ID NO: 2453013 - DNA, 25 bp, Homo sapien
catgggcactatatgtcctcttgcc

SEQ ID NO: 2453014 - DNA, 25 bp, Homo sapien
ctccatgggcactatatgtcctctt

SEQ ID NO: 2453015 - DNA, 25 bp, Homo sapien
tcctcttgccaaccatgccaacttt

SEQ ID NO: 2453016 - DNA, 25 bp, Homo sapien
catgccaacttttggggcaagtggg

SEQ ID NO: 2453017 - DNA, 25 bp, Homo sapien
tgggtccaattcgtcttcaaagaac

SEQ ID NO: 2453018 - DNA, 25 bp, Homo sapien
cagcaccttgaatgggtccaattcg

SEQ ID NO: 2453019 - DNA, 25 bp, Homo sapien
gaatgggtccaattcgtcttcaaag

SEQ ID NO: 2453020 - DNA, 25 bp, Homo sapien
cttgaatgggtccaattcgtcttca

SEQ ID NO: 2453021 - DNA, 25 bp, Homo sapien
aagtcagtaaaacataggctctctg

SEQ ID NO: 2453022 - DNA, 25 bp, Homo sapien
gattatgctgcaaatctttccaagc

SEQ ID NO: 2453023 - DNA, 25 bp, Homo sapien
gaggctgtctagagtacacagggaa

SEQ ID NO: 2453024 - DNA, 25 bp, Homo sapien
ctctctgattatgctgcaaatcttt

SEQ ID NO: 2453025 - DNA, 25 bp, Homo sapien
tatctgtctttagctgactagtaca

SEQ ID NO: 2453026 - DNA, 25 bp, Homo sapien
caggtaaataagtatagtacgtgat

SEQ ID NO: 2453027 - DNA, 25 bp, Homo sapien
gcacagttatatttggtatgagatg

SEQ ID NO: 2453028 - DNA, 25 bp, Homo sapien
cagattatactgagaagtatacaca

SEQ ID NO: 2453029 - DNA, 25 bp, Homo sapien
gcagaaatacataagcccaatggct

SEQ ID NO: 2453030 - DNA, 25 bp, Homo sapien
aatacataagcccaatggcttaatg

SEQ ID NO: 2453031 - DNA, 25 bp, Homo sapien
tgcctcatttacttccaatatcaaa

SEQ ID NO: 2453032 - DNA, 25 bp, Homo sapien
tacataagcccaatggcttaatgcc

SEQ ID NO: 2453033 - DNA, 25 bp, Homo sapien
tgttaccattctccaggtcattcat

SEQ ID NO: 2453034 - DNA, 25 bp, Homo sapien
aattgttaccattctccaggtcatt

SEQ ID NO: 2453035 - DNA, 25 bp, Homo sapien
ttgttaccattctccaggtcattca

SEQ ID NO: 2453036 - DNA, 25 bp, Homo sapien
taattgttaccattctccaggtcat

SEQ ID NO: 2453037 - DNA, 25 bp, Homo sapien
ggatcatgaccctcagcgaagcagg

SEQ ID NO: 2453038 - DNA, 25 bp, Homo sapien
tagcaacgggtactacagtgtcccc

SEQ ID NO: 2453039 - DNA, 25 bp, Homo sapien
cttggagtaaaacgcagatctggtc

SEQ ID NO: 2453040 - DNA, 25 bp, Homo sapien
tggtcgatccactacaagaacactg

SEQ ID NO: 2453041 - DNA, 25 bp, Homo sapien
tataaaaggaatagttgagaccagc

SEQ ID NO: 2453042 - DNA, 25 bp, Homo sapien
ttttgcaattgagaataatcctgga

SEQ ID NO: 2453043 - DNA, 25 bp, Homo sapien
gaatagttgagaccagctgcatttt

SEQ ID NO: 2453044 - DNA, 25 bp, Homo sapien
gattcaccattttctaccctatgtg

SEQ ID NO: 2453045 - DNA, 25 bp, Homo sapien
taaaacagtagctgatacctatgtc

SEQ ID NO: 2453046 - DNA, 25 bp, Homo sapien
ggattagtccaggattcttgaaaaa

SEQ ID NO: 2453047 - DNA, 25 bp, Homo sapien
gctcagagtagtgtgggattagtcc

SEQ ID NO: 2453048 - DNA, 25 bp, Homo sapien
tacctatgtcctgaagagatggcca

SEQ ID NO: 2453049 - DNA, 25 bp, Homo sapien
ttagcgctgcaaccaggaaacaacc

SEQ ID NO: 2453050 - DNA, 25 bp, Homo sapien
gaacgctgagcacacctgagaacat

SEQ ID NO: 2453051 - DNA, 25 bp, Homo sapien
cgctgcaaccaggaaacaacctgag

SEQ ID NO: 2453052 - DNA, 25 bp, Homo sapien
ctgaggagcatgcagagaattccga

SEQ ID NO: 2453053 - DNA, 25 bp, Homo sapien
ttccctttcatgacgtatagctggc

SEQ ID NO: 2453054 - DNA, 25 bp, Homo sapien
tatagctggcagcaaacttaaagtt

SEQ ID NO: 2453055 - DNA, 25 bp, Homo sapien
cctttgatgaaaagcttccctttca

SEQ ID NO: 2453056 - DNA, 25 bp, Homo sapien
tgttttggtttggacgcaggtgaga

SEQ ID NO: 2453057 - DNA, 25 bp, Homo sapien
agctttctttagcctctctgtgcat

SEQ ID NO: 2453058 - DNA, 25 bp, Homo sapien
ctgaagctttctttagcctctctgt

SEQ ID NO: 2453059 - DNA, 25 bp, Homo sapien
gaagctttctttagcctctctgtgc

SEQ ID NO: 2453060 - DNA, 25 bp, Homo sapien
aagctttctttagcctctctgtgca

SEQ ID NO: 2453061 - DNA, 25 bp, Homo sapien
taggaagctgcattaactccttacg

SEQ ID NO: 2453062 - DNA, 25 bp, Homo sapien
cattaactccttacgtccacttagg

SEQ ID NO: 2453063 - DNA, 25 bp, Homo sapien
tcaaatgcctctgctacattaagtt

SEQ ID NO: 2453064 - DNA, 25 bp, Homo sapien
cgtccacttagggaacatacatcaa

SEQ ID NO: 2453065 - DNA, 25 bp, Homo sapien
catccaataaactcggtgagagcca

SEQ ID NO: 2453066 - DNA, 25 bp, Homo sapien
atccaataaactcggtgagagccat

SEQ ID NO: 2453067 - DNA, 25 bp, Homo sapien
aaaacatccaataaactcggtgaga

SEQ ID NO: 2453068 - DNA, 25 bp, Homo sapien
aacatccaataaactcggtgagagc

SEQ ID NO: 2453069 - DNA, 25 bp, Homo sapien
aagcttgtggccaccagcattgacg

SEQ ID NO: 2453070 - DNA, 25 bp, Homo sapien
ccagcattgacgttcttgccatcca

SEQ ID NO: 2453071 - DNA, 25 bp, Homo sapien
ggtctgagtgtatcctaaacctatc

SEQ ID NO: 2453072 - DNA, 25 bp, Homo sapien
cagtttgatacctggctttagggtc

SEQ ID NO: 2453073 - DNA, 25 bp, Homo sapien
tctatgttgcagtccagggtaatgt

SEQ ID NO: 2453074 - DNA, 25 bp, Homo sapien
tgttgcagtccagggtaatgtgctc

SEQ ID NO: 2453075 - DNA, 25 bp, Homo sapien
tgtcgaaatctatgttgcagtccag

SEQ ID NO: 2453076 - DNA, 25 bp, Homo sapien
gaaatctatgttgcagtccagggta

SEQ ID NO: 2453077 - DNA, 25 bp, Homo sapien
gaatgattatactactcactgtgaa

SEQ ID NO: 2453078 - DNA, 25 bp, Homo sapien
tagatccggaactcaatacaatcgc

SEQ ID NO: 2453079 - DNA, 25 bp, Homo sapien
gtgaataagctcagctgtccaaggc

SEQ ID NO: 2453080 - DNA, 25 bp, Homo sapien
cttagggttcttccaaagagaatga

SEQ ID NO: 2453081 - DNA, 25 bp, Homo sapien
tgctttcagcggatgaacagaaatt

SEQ ID NO: 2453082 - DNA, 25 bp, Homo sapien
gctgctatgactatcactgttttga

SEQ ID NO: 2453083 - DNA, 25 bp, Homo sapien
ctagtgctttcagcggatgaacaga

SEQ ID NO: 2453084 - DNA, 25 bp, Homo sapien
aagctgctatgactatcactgtttt

SEQ ID NO: 2453085 - DNA, 25 bp, Homo sapien
ctaaatgatctttgcctttctaact

SEQ ID NO: 2453086 - DNA, 25 bp, Homo sapien
tgttgttctttgcatttaagttatg

SEQ ID NO: 2453087 - DNA, 25 bp, Homo sapien
tgttgttgttctttgcatttaagtt

SEQ ID NO: 2453088 - DNA, 25 bp, Homo sapien
ccctcatactttttgatttcatggg

SEQ ID NO: 2453089 - DNA, 25 bp, Homo sapien
tgttctttgcatttaagttatgcat

SEQ ID NO: 2453090 - DNA, 25 bp, Homo sapien
tatggatttgttgtcagacttcctg

SEQ ID NO: 2453091 - DNA, 25 bp, Homo sapien
agtatggatttgttgtcagacttcc

SEQ ID NO: 2453092 - DNA, 25 bp, Homo sapien
ggatttgttgtcagacttcctgtct

SEQ ID NO: 2453093 - DNA, 25 bp, Homo sapien
tacaatgataacagaaggctgtgaa

SEQ ID NO: 2453094 - DNA, 25 bp, Homo sapien
tgctcctcagcacccccgagattga

SEQ ID NO: 2453095 - DNA, 25 bp, Homo sapien
aaaatgacaagtctatcccttggct

SEQ ID NO: 2453096 - DNA, 25 bp, Homo sapien
tgacaagtctatcccttggctccct

SEQ ID NO: 2453097 - DNA, 25 bp, Homo sapien
cagcacccccgagattgagccctgg

SEQ ID NO: 2453098 - DNA, 25 bp, Homo sapien
cctctggccagcaggtcagttgtaa

SEQ ID NO: 2453099 - DNA, 25 bp, Homo sapien
aactctgctagagccagaatgaaac

SEQ ID NO: 2453100 - DNA, 25 bp, Homo sapien
cagttgtaatcaaaactctgctaga

SEQ ID NO: 2453101 - DNA, 25 bp, Homo sapien
cgtccacctcgactgattctgtgga

SEQ ID NO: 2453102 - DNA, 25 bp, Homo sapien
gatcacgtcttgctccttttggtcc

SEQ ID NO: 2453103 - DNA, 25 bp, Homo sapien
tggtccatatctccatgcatggcgg

SEQ ID NO: 2453104 - DNA, 25 bp, Homo sapien
atcacgtcttgctccttttggtcca

SEQ ID NO: 2453105 - DNA, 25 bp, Homo sapien
tccatatctccatgcatggcggaga

SEQ ID NO: 2453106 - DNA, 25 bp, Homo sapien
ttgagcgattacattataacccctg

SEQ ID NO: 2453107 - DNA, 25 bp, Homo sapien
gagcgattacattataacccctgat

SEQ ID NO: 2453108 - DNA, 25 bp, Homo sapien
gcgattacattataacccctgatac

SEQ ID NO: 2453109 - DNA, 25 bp, Homo sapien
gcttgagcgattacattataacccc

SEQ ID NO: 2453110 - DNA, 25 bp, Homo sapien
ctggatcaggaatcctggctcacag

SEQ ID NO: 2453111 - DNA, 25 bp, Homo sapien
tggatcaggaatcctggctcacaga

SEQ ID NO: 2453112 - DNA, 25 bp, Homo sapien
taacagatgtgtcgattgtgtagac

SEQ ID NO: 2453113 - DNA, 25 bp, Homo sapien
attccaatttttgaatgggccttct

SEQ ID NO: 2453114 - DNA, 25 bp, Homo sapien
actaacagatgtgtcgattgtgtag

SEQ ID NO: 2453115 - DNA, 25 bp, Homo sapien
ttccaatttttgaatgggccttctg

SEQ ID NO: 2453116 - DNA, 25 bp, Homo sapien
cttctactattcctctggtgatcat

SEQ ID NO: 2453117 - DNA, 25 bp, Homo sapien
tcttctactattcctctggtgatca

SEQ ID NO: 2453118 - DNA, 25 bp, Homo sapien
attgtttatcttctactattcctct

SEQ ID NO: 2453119 - DNA, 25 bp, Homo sapien
aattgtttatcttctactattcctc

SEQ ID NO: 2453120 - DNA, 25 bp, Homo sapien
aatctgaaagtaatgtgctctaggc

SEQ ID NO: 2453121 - DNA, 25 bp, Homo sapien
gcttgcatctataatcaggaatctg

SEQ ID NO: 2453122 - DNA, 25 bp, Homo sapien
tctcgaatgggctttgcatgcacag

SEQ ID NO: 2453123 - DNA, 25 bp, Homo sapien
tcaaggcgtttgaaggaaatcgaaa

SEQ ID NO: 2453124 - DNA, 25 bp, Homo sapien
tatatccacctggacctttcctcat

SEQ ID NO: 2453125 - DNA, 25 bp, Homo sapien
gaagattatatccacctggaccttt

SEQ ID NO: 2453126 - DNA, 25 bp, Homo sapien
gaggctaatgaatgatgatgtttga

SEQ ID NO: 2453127 - DNA, 25 bp, Homo sapien
gactatgaggctaatgaatgatgat

SEQ ID NO: 2453128 - DNA, 25 bp, Homo sapien
tatggaagaggtttgttcacactga

SEQ ID NO: 2453129 - DNA, 25 bp, Homo sapien
gaagaggtttgttcacactgactta

SEQ ID NO: 2453130 - DNA, 25 bp, Homo sapien
gaggtttgttcacactgacttactg

SEQ ID NO: 2453131 - DNA, 25 bp, Homo sapien
ttgggtatggaagaggtttgttcac

SEQ ID NO: 2453132 - DNA, 25 bp, Homo sapien
tcatttggagaataagctatttcca

SEQ ID NO: 2453133 - DNA, 25 bp, Homo sapien
taagctatttccagttgccctacaa

SEQ ID NO: 2453134 - DNA, 25 bp, Homo sapien
tggagaataagctatttccagttgc

SEQ ID NO: 2453135 - DNA, 25 bp, Homo sapien
tgccctacaactgaaacgataattt

SEQ ID NO: 2453136 - DNA, 25 bp, Homo sapien
ggaatcaggagaagtctaaaaccga

SEQ ID NO: 2453137 - DNA, 25 bp, Homo sapien
gaacttgatgttcctctctttagga

SEQ ID NO: 2453138 - DNA, 25 bp, Homo sapien
gagttcacatcaagaatgcatcata

SEQ ID NO: 2453139 - DNA, 25 bp, Homo sapien
gttgttcttaataatcccagaggat

SEQ ID NO: 2453140 - DNA, 25 bp, Homo sapien
cacagagctgagacgtacagtccag

SEQ ID NO: 2453141 - DNA, 25 bp, Homo sapien
tcaccacacagtccgccgaggttgg

SEQ ID NO: 2453142 - DNA, 25 bp, Homo sapien
gtggtcaccacacagtccgccgagg

SEQ ID NO: 2453143 - DNA, 25 bp, Homo sapien
ggtcaccacacagtccgccgaggtt

SEQ ID NO: 2453144 - DNA, 25 bp, Homo sapien
tcccttcagatggtgcagctcatcg

SEQ ID NO: 2453145 - DNA, 25 bp, Homo sapien
caggagtaatgaggccgtgctgaac

SEQ ID NO: 2453146 - DNA, 25 bp, Homo sapien
tcagatggtgcagctcatcgggatc

SEQ ID NO: 2453147 - DNA, 25 bp, Homo sapien
aggcccgctactcccttcagatggt

SEQ ID NO: 2453148 - DNA, 25 bp, Homo sapien
tatgtgaatttaaagaaagggtagc

SEQ ID NO: 2453149 - DNA, 25 bp, Homo sapien
tcatagatctcaaggaagttgctgg

SEQ ID NO: 2453150 - DNA, 25 bp, Homo sapien
gctcatagatctcaaggaagttgct

SEQ ID NO: 2453151 - DNA, 25 bp, Homo sapien
acagtctgcccgttgctcatagatc

SEQ ID NO: 2453152 - DNA, 25 bp, Homo sapien
ctgggggaccggtaggcgtcattca

SEQ ID NO: 2453153 - DNA, 25 bp, Homo sapien
tttctttgtttcaagttgtaatcaa

SEQ ID NO: 2453154 - DNA, 25 bp, Homo sapien
ttgtaatcaaagcttgtatataaga

SEQ ID NO: 2453155 - DNA, 25 bp, Homo sapien
ttttctttgtttcaagttgtaatca

SEQ ID NO: 2453156 - DNA, 25 bp, Homo sapien
atcaaagcttgtatataagattact

SEQ ID NO: 2453157 - DNA, 25 bp, Homo sapien
cacccgttcaatgtatgtagcatat

SEQ ID NO: 2453158 - DNA, 25 bp, Homo sapien
ctttccgttcacggatatttttgcg

SEQ ID NO: 2453159 - DNA, 25 bp, Homo sapien
cgttcacggatatttttgcggtctt

SEQ ID NO: 2453160 - DNA, 25 bp, Homo sapien
cgttcaatgtatgtagcatatttct

SEQ ID NO: 2453161 - DNA, 25 bp, Homo sapien
aaccttgactactttgccaatttgt

SEQ ID NO: 2453162 - DNA, 25 bp, Homo sapien
tgactactttgccaatttgttgacc

SEQ ID NO: 2453163 - DNA, 25 bp, Homo sapien
ttgacctttatagtgtcctcgtaca

SEQ ID NO: 2453164 - DNA, 25 bp, Homo sapien
ttgttgacctttatagtgtcctcgt

SEQ ID NO: 2453165 - DNA, 25 bp, Homo sapien
cggacccatggagagacacctcgga

SEQ ID NO: 2453166 - DNA, 25 bp, Homo sapien
gctgtatgtagtagaggatcttcac

SEQ ID NO: 2453167 - DNA, 25 bp, Homo sapien
gagacacctcggagatttacagcca

SEQ ID NO: 2453168 - DNA, 25 bp, Homo sapien
gatcttcacttagtgcctgagtggc

SEQ ID NO: 2453169 - DNA, 25 bp, Homo sapien
cgctcccttcaggtacacaggataa

SEQ ID NO: 2453170 - DNA, 25 bp, Homo sapien
tgtgcagagcctccgaaatttggca

SEQ ID NO: 2453171 - DNA, 25 bp, Homo sapien
caagagagtgaaaagtctatcagcc

SEQ ID NO: 2453172 - DNA, 25 bp, Homo sapien
tgtaactgcagcatagcccaaccta

SEQ ID NO: 2453173 - DNA, 25 bp, Homo sapien
ctcaatgctactggaatccatgttt

SEQ ID NO: 2453174 - DNA, 25 bp, Homo sapien
aatgctactggaatccatgttttgc

SEQ ID NO: 2453175 - DNA, 25 bp, Homo sapien
ctactggaatccatgttttgcatct

SEQ ID NO: 2453176 - DNA, 25 bp, Homo sapien
tgctactggaatccatgttttgcat

SEQ ID NO: 2453177 - DNA, 25 bp, Homo sapien
ggacctctaggacctgggttgatct

SEQ ID NO: 2453178 - DNA, 25 bp, Homo sapien
tagctcccaagggacctctaggacc

SEQ ID NO: 2453179 - DNA, 25 bp, Homo sapien
ctcccaagggacctctaggacctgg

SEQ ID NO: 2453180 - DNA, 25 bp, Homo sapien
cctctaggacctgggttgatcttcc

SEQ ID NO: 2453181 - DNA, 25 bp, Homo sapien
gcttccatgtccctttcagtctctg

SEQ ID NO: 2453182 - DNA, 25 bp, Homo sapien
ctgcttctaaagatgccttgacttt

SEQ ID NO: 2453183 - DNA, 25 bp, Homo sapien
gggcccatgactacctctgcttcca

SEQ ID NO: 2453184 - DNA, 25 bp, Homo sapien
ccacttccatttggccacacttcat

SEQ ID NO: 2453185 - DNA, 25 bp, Homo sapien
catgacagacctgggagaaacattc

SEQ ID NO: 2453186 - DNA, 25 bp, Homo sapien
tgtagacttagatgggcctcaggtg

SEQ ID NO: 2453187 - DNA, 25 bp, Homo sapien
cctggaggaagctctaaaatacatg

SEQ ID NO: 2453188 - DNA, 25 bp, Homo sapien
tgaaggtccccagccattttgcaat

SEQ ID NO: 2453189 - DNA, 25 bp, Homo sapien
gtcatgttcagccaaacaggtgaaa

SEQ ID NO: 2453190 - DNA, 25 bp, Homo sapien
cctaccaaaacccgggcagtcatgt

SEQ ID NO: 2453191 - DNA, 25 bp, Homo sapien
ttcatgatcccagaacaactggact

SEQ ID NO: 2453192 - DNA, 25 bp, Homo sapien
acaggtgaaaaagctcaggtaggag

SEQ ID NO: 2453193 - DNA, 25 bp, Homo sapien
atcacttcattgtggaaataaaggc

SEQ ID NO: 2453194 - DNA, 25 bp, Homo sapien
ataaaggctgtgacaaaaggaaatc

SEQ ID NO: 2453195 - DNA, 25 bp, Homo sapien
tcattgtggaaataaaggctgtgac

SEQ ID NO: 2453196 - DNA, 25 bp, Homo sapien
ttgtggaaataaaggctgtgacaaa

SEQ ID NO: 2453197 - DNA, 25 bp, Homo sapien
gattcagtgggcaagcctcctgacg

SEQ ID NO: 2453198 - DNA, 25 bp, Homo sapien
caggtcaacatctggtgtgccaaac

SEQ ID NO: 2453199 - DNA, 25 bp, Homo sapien
catttggcctgtcacgctccgatgt

SEQ ID NO: 2453200 - DNA, 25 bp, Homo sapien
caatctacatctggtcaaggagtct

SEQ ID NO: 2453201 - DNA, 25 bp, Homo sapien
ggtcggcagccccatgtaccgctaa

SEQ ID NO: 2453202 - DNA, 25 bp, Homo sapien
ccatgtaccgctaacccgagtctta

SEQ ID NO: 2453203 - DNA, 25 bp, Homo sapien
gtggaggtcggcagccccatgtacc

SEQ ID NO: 2453204 - DNA, 25 bp, Homo sapien
taccgctaacccgagtcttaagcac

SEQ ID NO: 2453205 - DNA, 25 bp, Homo sapien
cccccacgaagcccgatgcccatcc

SEQ ID NO: 2453206 - DNA, 25 bp, Homo sapien
cccacgaagcccgatgcccatcccc

SEQ ID NO: 2453207 - DNA, 25 bp, Homo sapien
ccaggccacaggggcattcacggag

SEQ ID NO: 2453208 - DNA, 25 bp, Homo sapien
acgaagcccgatgcccatcccctgc

SEQ ID NO: 2453209 - DNA, 25 bp, Homo sapien
tgccaaggaatgtcgaagaaggtcc

SEQ ID NO: 2453210 - DNA, 25 bp, Homo sapien
ctcagcaatcgtgccgtaacctggg

SEQ ID NO: 2453211 - DNA, 25 bp, Homo sapien
gctgcagaatatagagccacaggcc

SEQ ID NO: 2453212 - DNA, 25 bp, Homo sapien
tcctttgccatgatgccccatagct

SEQ ID NO: 2453213 - DNA, 25 bp, Homo sapien
ggaaactcgggctttcacctgcatg

SEQ ID NO: 2453214 - DNA, 25 bp, Homo sapien
tcgggctttcacctgcatgacccta

SEQ ID NO: 2453215 - DNA, 25 bp, Homo sapien
gaaactcgggctttcacctgcatga

SEQ ID NO: 2453216 - DNA, 25 bp, Homo sapien
aactcgggctttcacctgcatgacc

SEQ ID NO: 2453217 - DNA, 25 bp, Homo sapien
tgatctgagagtttgccacttgact

SEQ ID NO: 2453218 - DNA, 25 bp, Homo sapien
gagtttgccacttgactgcagcctg

SEQ ID NO: 2453219 - DNA, 25 bp, Homo sapien
gcaggcagaggaatcctttgaagct

SEQ ID NO: 2453220 - DNA, 25 bp, Homo sapien
tcagcaggcagaggaatcctttgaa

SEQ ID NO: 2453221 - DNA, 25 bp, Homo sapien
tccagattccgtgtgaggtggacta

SEQ ID NO: 2453222 - DNA, 25 bp, Homo sapien
gtcctccagattccgtgtgaggtgg

SEQ ID NO: 2453223 - DNA, 25 bp, Homo sapien
ggtcctccagattccgtgtgaggtg

SEQ ID NO: 2453224 - DNA, 25 bp, Homo sapien
ccagattccgtgtgaggtggactaa

SEQ ID NO: 2453225 - DNA, 25 bp, Homo sapien
ccatgatgccccacggcgaacccca

SEQ ID NO: 2453226 - DNA, 25 bp, Homo sapien
gatagaactgcaatggattgagcca

SEQ ID NO: 2453227 - DNA, 25 bp, Homo sapien
catgggatagaactgcaatggattg

SEQ ID NO: 2453228 - DNA, 25 bp, Homo sapien
gaccaaggaatgaccagctaggtcc

SEQ ID NO: 2453229 - DNA, 25 bp, Homo sapien
ttcgtgatcccagaaccgctggact

SEQ ID NO: 2453230 - DNA, 25 bp, Homo sapien
ccttcgtgatcccagaaccgctgga

SEQ ID NO: 2453231 - DNA, 25 bp, Homo sapien
cttcgtgatcccagaaccgctggac

SEQ ID NO: 2453232 - DNA, 25 bp, Homo sapien
gaccttcgtgatcccagaaccgctg

SEQ ID NO: 2453233 - DNA, 25 bp, Homo sapien
acagtgctccttcatgatgatttca

SEQ ID NO: 2453234 - DNA, 25 bp, Homo sapien
atcatcctgccaccggtaaccggga

SEQ ID NO: 2453235 - DNA, 25 bp, Homo sapien
ggaaatcatcctgccaccggtaacc

SEQ ID NO: 2453236 - DNA, 25 bp, Homo sapien
aaggaaatcatcctgccaccggtaa

SEQ ID NO: 2453237 - DNA, 25 bp, Homo sapien
aaatcatcctgccaccggtaaccgg

SEQ ID NO: 2453238 - DNA, 25 bp, Homo sapien
cctcgtgacgccttgcaatttcgca

SEQ ID NO: 2453239 - DNA, 25 bp, Homo sapien
gtcacccttcattgttggccctcta

SEQ ID NO: 2453240 - DNA, 25 bp, Homo sapien
ggattgggtgggcaagcctcgtgac

SEQ ID NO: 2453241 - DNA, 25 bp, Homo sapien
caatttcgcaagaacacagacaatg

SEQ ID NO: 2453242 - DNA, 25 bp, Homo sapien
gaccatagacgggacgcagaaaaag

SEQ ID NO: 2453243 - DNA, 25 bp, Homo sapien
agaaaaagtgggcaggtggttgcag

SEQ ID NO: 2453244 - DNA, 25 bp, Homo sapien
ccatagacgggacgcagaaaaagtg

SEQ ID NO: 2453245 - DNA, 25 bp, Homo sapien
gctgaccatagacgggacgcagaaa

SEQ ID NO: 2453246 - DNA, 25 bp, Homo sapien
taatggcatacagattccccgtcct

SEQ ID NO: 2453247 - DNA, 25 bp, Homo sapien
tcaatggctggtaatggcatacaga

SEQ ID NO: 2453248 - DNA, 25 bp, Homo sapien
gtggttcaatggctggtaatggcat

SEQ ID NO: 2453249 - DNA, 25 bp, Homo sapien
gctggtaatggcatacagattcccc

SEQ ID NO: 2453250 - DNA, 25 bp, Homo sapien
ctgcgattctcccttgtcagtgctg

SEQ ID NO: 2453251 - DNA, 25 bp, Homo sapien
ctgtgcgcaaagggaccttggcgct

SEQ ID NO: 2453252 - DNA, 25 bp, Homo sapien
gcgctgcgattctcccttgtcagtg

SEQ ID NO: 2453253 - DNA, 25 bp, Homo sapien
caaagggaccttggcgctgcgattc

SEQ ID NO: 2453254 - DNA, 25 bp, Homo sapien
ctgctacaagcgagctgccctcaca

SEQ ID NO: 2453255 - DNA, 25 bp, Homo sapien
tgctacaagcgagctgccctcacag

SEQ ID NO: 2453256 - DNA, 25 bp, Homo sapien
gccatcccaaatcggcagccgcaag

SEQ ID NO: 2453257 - DNA, 25 bp, Homo sapien
tgcccgccatcccaaatcggcagcc

SEQ ID NO: 2453258 - DNA, 25 bp, Homo sapien
cccaaatcggcagccgcaaggatat

SEQ ID NO: 2453259 - DNA, 25 bp, Homo sapien
catcccaaatcggcagccgcaagga

SEQ ID NO: 2453260 - DNA, 25 bp, Homo sapien
tgccaccccacgtcgggctccacct

SEQ ID NO: 2453261 - DNA, 25 bp, Homo sapien
gtccattgacggccccggtgtgctc

SEQ ID NO: 2453262 - DNA, 25 bp, Homo sapien
tgacggccccggtgtgctcggtcca

SEQ ID NO: 2453263 - DNA, 25 bp, Homo sapien
cattgacggccccggtgtgctcggt

SEQ ID NO: 2453264 - DNA, 25 bp, Homo sapien
tccagcctgaacacggttttctcct

SEQ ID NO: 2453265 - DNA, 25 bp, Homo sapien
tgcctccagcctgaacacggttttc

SEQ ID NO: 2453266 - DNA, 25 bp, Homo sapien
cagcctgaacacggttttctcctgg

SEQ ID NO: 2453267 - DNA, 25 bp, Homo sapien
ctgaacacggttttctcctgggtgc

SEQ ID NO: 2453268 - DNA, 25 bp, Homo sapien
cagcgcacaacagcgtgcgcgcagg

SEQ ID NO: 2453269 - DNA, 25 bp, Homo sapien
gcaccgcaaccgctgctgcgggtgc

SEQ ID NO: 2453270 - DNA, 25 bp, Homo sapien
gaggacctccgctggacccgcagat

SEQ ID NO: 2453271 - DNA, 25 bp, Homo sapien
gtcaaggcagcgcacaacagcgtgc

SEQ ID NO: 2453272 - DNA, 25 bp, Homo sapien
accacttgttctcaggatggctgag

SEQ ID NO: 2453273 - DNA, 25 bp, Homo sapien
taccacttgttctcaggatggctga

SEQ ID NO: 2453274 - DNA, 25 bp, Homo sapien
agtctcgtctcccaacttttcagag

SEQ ID NO: 2453275 - DNA, 25 bp, Homo sapien
ctaaagcaacactttgacactctca

SEQ ID NO: 2453276 - DNA, 25 bp, Homo sapien
gtctcgtctcccaacttttcagagc

SEQ ID NO: 2453277 - DNA, 25 bp, Homo sapien
gcaacactttgacactctcatccat

SEQ ID NO: 2453278 - DNA, 25 bp, Homo sapien
ctttgtcagtgacgtagaatttatc

SEQ ID NO: 2453279 - DNA, 25 bp, Homo sapien
tcaggccttcttcaagaccttgatt

SEQ ID NO: 2453280 - DNA, 25 bp, Homo sapien
tttatctgattctttccactcaggc

SEQ ID NO: 2453281 - DNA, 25 bp, Homo sapien
tctgattctttccactcaggccttc

SEQ ID NO: 2453282 - DNA, 25 bp, Homo sapien
tctcctgagaaaaggtattcctggc

SEQ ID NO: 2453283 - DNA, 25 bp, Homo sapien
actgaaaatgatgcaacactggccc

SEQ ID NO: 2453284 - DNA, 25 bp, Homo sapien
gaaaaggtattcctggctcgggcat

SEQ ID NO: 2453285 - DNA, 25 bp, Homo sapien
ggtattcctggctcgggcattaacc

SEQ ID NO: 2453286 - DNA, 25 bp, Homo sapien
cctgggccaccaccttcgtctccgc

SEQ ID NO: 2453287 - DNA, 25 bp, Homo sapien
gactttccttcaggcatataggaag

SEQ ID NO: 2453288 - DNA, 25 bp, Homo sapien
gttgaaaatatggtggctgcttcag

SEQ ID NO: 2453289 - DNA, 25 bp, Homo sapien
ctttccttcaggcatataggaagga

SEQ ID NO: 2453290 - DNA, 25 bp, Homo sapien
ttccttcaggcatataggaaggacc

SEQ ID NO: 2453291 - DNA, 25 bp, Homo sapien
gattgggtccagattgaaatccagg

SEQ ID NO: 2453292 - DNA, 25 bp, Homo sapien
gttgacactcaaccgggaaacattg

SEQ ID NO: 2453293 - DNA, 25 bp, Homo sapien
tgcttaagaggtttttgtccaggat

SEQ ID NO: 2453294 - DNA, 25 bp, Homo sapien
taatggactcttcaggaaatgttga

SEQ ID NO: 2453295 - DNA, 25 bp, Homo sapien
tatcagttgcagaatgtgtctcgtg

SEQ ID NO: 2453296 - DNA, 25 bp, Homo sapien
gaatgtgtctcgtgtctgactgtat

SEQ ID NO: 2453297 - DNA, 25 bp, Homo sapien
tctcgtgtctgactgtattggtttc

SEQ ID NO: 2453298 - DNA, 25 bp, Homo sapien
tccattgctctattttatcagttgc

SEQ ID NO: 2453299 - DNA, 25 bp, Homo sapien
ctgaaaccaagcactcagagtatta

SEQ ID NO: 2453300 - DNA, 25 bp, Homo sapien
aagcactcagagtattaatgtcagg

SEQ ID NO: 2453301 - DNA, 25 bp, Homo sapien
agcactcagagtattaatgtcaggc

SEQ ID NO: 2453302 - DNA, 25 bp, Homo sapien
aaaccaagcactcagagtattaatg

SEQ ID NO: 2453303 - DNA, 25 bp, Homo sapien
cagaggacttgggactgaacattca

SEQ ID NO: 2453304 - DNA, 25 bp, Homo sapien
gactgtgtcagtctcatcctgtaac

SEQ ID NO: 2453305 - DNA, 25 bp, Homo sapien
ttacaattagagacttagactgcat

SEQ ID NO: 2453306 - DNA, 25 bp, Homo sapien
cattcagactctgtccagatattta

SEQ ID NO: 2453307 - DNA, 25 bp, Homo sapien
tgttgtgactgtatctgctaacatc

SEQ ID NO: 2453308 - DNA, 25 bp, Homo sapien
actgtatctgctaacatcttggtcc

SEQ ID NO: 2453309 - DNA, 25 bp, Homo sapien
tgggtccacgatctaactttaacac

SEQ ID NO: 2453310 - DNA, 25 bp, Homo sapien
tggtccaagagtttactattggagt

SEQ ID NO: 2453311 - DNA, 25 bp, Homo sapien
agcaggagaaatccgggattgtacc

SEQ ID NO: 2453312 - DNA, 25 bp, Homo sapien
cagcaggagaaatccgggattgtac

SEQ ID NO: 2453313 - DNA, 25 bp, Homo sapien
caaatttccttgatcaaatacatga

SEQ ID NO: 2453314 - DNA, 25 bp, Homo sapien
catttgcttgtgcatgggagccgat

SEQ ID NO: 2453315 - DNA, 25 bp, Homo sapien
tatttgatagccactaacacaacac

SEQ ID NO: 2453316 - DNA, 25 bp, Homo sapien
tcttaatgcctgaacgcgggtacta

SEQ ID NO: 2453317 - DNA, 25 bp, Homo sapien
tgctttatgattatgaaaccactat

SEQ ID NO: 2453318 - DNA, 25 bp, Homo sapien
gataagcaatattgtgttcctggaa

SEQ ID NO: 2453319 - DNA, 25 bp, Homo sapien
tatgattatgaaaccactatagcac

SEQ ID NO: 2453320 - DNA, 25 bp, Homo sapien
aagctcagttgataagcaatattgt

SEQ ID NO: 2453321 - DNA, 25 bp, Homo sapien
gggtgtcttcgtcaagagactgtca

SEQ ID NO: 2453322 - DNA, 25 bp, Homo sapien
cactcagggtgtcttcgtcaagaga

SEQ ID NO: 2453323 - DNA, 25 bp, Homo sapien
cttaattcagcactcagggtgtctt

SEQ ID NO: 2453324 - DNA, 25 bp, Homo sapien
tcagcactcagggtgtcttcgtcaa

SEQ ID NO: 2453325 - DNA, 25 bp, Homo sapien
tcaggtccccttcagatcatctcca

SEQ ID NO: 2453326 - DNA, 25 bp, Homo sapien
tcagatcatctccatgatcaggccc

SEQ ID NO: 2453327 - DNA, 25 bp, Homo sapien
aggtccccttcagatcatctccatg

SEQ ID NO: 2453328 - DNA, 25 bp, Homo sapien
ccttcagatcatctccatgatcagg

SEQ ID NO: 2453329 - DNA, 25 bp, Homo sapien
tagtacatgacgctgtttagaagga

SEQ ID NO: 2453330 - DNA, 25 bp, Homo sapien
ggtattaaagcccacaaatcggcag

SEQ ID NO: 2453331 - DNA, 25 bp, Homo sapien
atacctgaacactgagccattgtct

SEQ ID NO: 2453332 - DNA, 25 bp, Homo sapien
gcacattggaatactcatacctgaa

SEQ ID NO: 2453333 - DNA, 25 bp, Homo sapien
tgggctgtaccaagaagtcacagca

SEQ ID NO: 2453334 - DNA, 25 bp, Homo sapien
tggtgggctgtaccaagaagtcaca

SEQ ID NO: 2453335 - DNA, 25 bp, Homo sapien
gggctgtaccaagaagtcacagcag

SEQ ID NO: 2453336 - DNA, 25 bp, Homo sapien
ggtgggctgtaccaagaagtcacag

SEQ ID NO: 2453337 - DNA, 25 bp, Homo sapien
cgaacgggtctctcactcatgtaga

SEQ ID NO: 2453338 - DNA, 25 bp, Homo sapien
gatggaattatacccgagaccccag

SEQ ID NO: 2453339 - DNA, 25 bp, Homo sapien
tgtgataaccaagtgcagtaccgta

SEQ ID NO: 2453340 - DNA, 25 bp, Homo sapien
aattattgaccatggagccccttca

SEQ ID NO: 2453341 - DNA, 25 bp, Homo sapien
cctcacaacgtgaagcagctgctca

SEQ ID NO: 2453342 - DNA, 25 bp, Homo sapien
ggatgatggaggattgccccctcac

SEQ ID NO: 2453343 - DNA, 25 bp, Homo sapien
tgaattcaaggttaattcaaggagc

SEQ ID NO: 2453344 - DNA, 25 bp, Homo sapien
ttgacttcaggacaataaaacattc

SEQ ID NO: 2453345 - DNA, 25 bp, Homo sapien
tttccatgaactggggaatgttgag

SEQ ID NO: 2453346 - DNA, 25 bp, Homo sapien
caatagaatcccatgaggatcattt

SEQ ID NO: 2453347 - DNA, 25 bp, Homo sapien
gaatgttgagtttagaagacgttga

SEQ ID NO: 2453348 - DNA, 25 bp, Homo sapien
tgttgagtttagaagacgttgagcc

SEQ ID NO: 2453349 - DNA, 25 bp, Homo sapien
taataggcccggtagagatgaatga

SEQ ID NO: 2453350 - DNA, 25 bp, Homo sapien
cccctgatgatgtgaagcaccaact

SEQ ID NO: 2453351 - DNA, 25 bp, Homo sapien
actcctctgggaatcaaattcgagg

SEQ ID NO: 2453352 - DNA, 25 bp, Homo sapien
agatgaatgatagtgtctctccttg

SEQ ID NO: 2453353 - DNA, 25 bp, Homo sapien
caggctttcgtgatgggctgtcaga

SEQ ID NO: 2453354 - DNA, 25 bp, Homo sapien
cattgtgatgctagctggagcccat

SEQ ID NO: 2453355 - DNA, 25 bp, Homo sapien
ctccacggagttcttatccacaaag

SEQ ID NO: 2453356 - DNA, 25 bp, Homo sapien
tgtgtctaagagtatgcaggctttc

SEQ ID NO: 2453357 - DNA, 25 bp, Homo sapien
cactgtctcccttcatcctggtcct

SEQ ID NO: 2453358 - DNA, 25 bp, Homo sapien
atggctgggctcttgacctcactgt

SEQ ID NO: 2453359 - DNA, 25 bp, Homo sapien
tgagaacccagaagtgggtgtcagt

SEQ ID NO: 2453360 - DNA, 25 bp, Homo sapien
tcatcctggtccttgcagggcctct

SEQ ID NO: 2453361 - DNA, 25 bp, Homo sapien
tatagtgactcaaactggagcacca

SEQ ID NO: 2453362 - DNA, 25 bp, Homo sapien
tcaggacatgaagcacctacttggc

SEQ ID NO: 2453363 - DNA, 25 bp, Homo sapien
ggttttgtgaaagaatcatgcccca

SEQ ID NO: 2453364 - DNA, 25 bp, Homo sapien
ttgctggtgaaggtacgggacccca

SEQ ID NO: 2453365 - DNA, 25 bp, Homo sapien
tttgcttgacgtatcttccagctgg

SEQ ID NO: 2453366 - DNA, 25 bp, Homo sapien
tctcccctaggatcgtgggactatc

SEQ ID NO: 2453367 - DNA, 25 bp, Homo sapien
ttcctggggtttgcttgacgtatct

SEQ ID NO: 2453368 - DNA, 25 bp, Homo sapien
tgctctcccctaggatcgtgggact

SEQ ID NO: 2453369 - DNA, 25 bp, Homo sapien
cagtgatagcatcatacgtgtgacc

SEQ ID NO: 2453370 - DNA, 25 bp, Homo sapien
tgtgtgcaagatcaggtctcatggg

SEQ ID NO: 2453371 - DNA, 25 bp, Homo sapien
tgatccggttccactagaggaggag

SEQ ID NO: 2453372 - DNA, 25 bp, Homo sapien
tctcatggggattggaaggttgtct

SEQ ID NO: 2453373 - DNA, 25 bp, Homo sapien
tcacaagattgtatcctcactcctc

SEQ ID NO: 2453374 - DNA, 25 bp, Homo sapien
ggctcatactctatgtcccagaatg

SEQ ID NO: 2453375 - DNA, 25 bp, Homo sapien
tcctctctgaccttattgtggctca

SEQ ID NO: 2453376 - DNA, 25 bp, Homo sapien
ttgcaggcaaagttgctggacccag

SEQ ID NO: 2453377 - DNA, 25 bp, Homo sapien
cctaagcacacaatggcacacacac

SEQ ID NO: 2453378 - DNA, 25 bp, Homo sapien
tggtagctcctgagtttggttggtt

SEQ ID NO: 2453379 - DNA, 25 bp, Homo sapien
attatccacagtcctttaagcagac

SEQ ID NO: 2453380 - DNA, 25 bp, Homo sapien
gacatccaacactcacaacattttc

SEQ ID NO: 2453381 - DNA, 25 bp, Homo sapien
tgactttaagcacctgctcggctgg

SEQ ID NO: 2453382 - DNA, 25 bp, Homo sapien
tgttgactttaagcacctgctcggc

SEQ ID NO: 2453383 - DNA, 25 bp, Homo sapien
gtgtcccctgttgactttaagcacc

SEQ ID NO: 2453384 - DNA, 25 bp, Homo sapien
aaatggagtgtcccctgttgacttt

SEQ ID NO: 2453385 - DNA, 25 bp, Homo sapien
tcttgggtatgacgtgctgctcttc

SEQ ID NO: 2453386 - DNA, 25 bp, Homo sapien
gggttagcgtgaaacactgagagat

SEQ ID NO: 2453387 - DNA, 25 bp, Homo sapien
ttggtcttgggtatgacgtgctgct

SEQ ID NO: 2453388 - DNA, 25 bp, Homo sapien
cagagaagactgctagtgtctctcc

SEQ ID NO: 2453389 - DNA, 25 bp, Homo sapien
ttgatgttccttcgggctggctcac

SEQ ID NO: 2453390 - DNA, 25 bp, Homo sapien
gaactctccttgatgttccttcggg

SEQ ID NO: 2453391 - DNA, 25 bp, Homo sapien
cttagggatttcacggttcattcct

SEQ ID NO: 2453392 - DNA, 25 bp, Homo sapien
tcacggttcattcctggaactctcc

SEQ ID NO: 2453393 - DNA, 25 bp, Homo sapien
agaatcatggcactgtcctgtgtat

SEQ ID NO: 2453394 - DNA, 25 bp, Homo sapien
ctagaatcatggcactgtcctgtgt

SEQ ID NO: 2453395 - DNA, 25 bp, Homo sapien
ctactagaatcatggcactgtcctg

SEQ ID NO: 2453396 - DNA, 25 bp, Homo sapien
tactagaatcatggcactgtcctgt

SEQ ID NO: 2453397 - DNA, 25 bp, Homo sapien
cattatcctgtggatacaagccaag

SEQ ID NO: 2453398 - DNA, 25 bp, Homo sapien
tatcagtgaatacctggacaacctc

SEQ ID NO: 2453399 - DNA, 25 bp, Homo sapien
catgggaccaagatgagtcttcagc

SEQ ID NO: 2453400 - DNA, 25 bp, Homo sapien
tctgtgcatagaggatgttacttcc

SEQ ID NO: 2453401 - DNA, 25 bp, Homo sapien
tctaagtctccaattgtaaacatct

SEQ ID NO: 2453402 - DNA, 25 bp, Homo sapien
tgttgctgatacactcacactgtgt

SEQ ID NO: 2453403 - DNA, 25 bp, Homo sapien
taaatgccttgacaaatcctgttgc

SEQ ID NO: 2453404 - DNA, 25 bp, Homo sapien
ggcagtaaatgccttgacaaatcct

SEQ ID NO: 2453405 - DNA, 25 bp, Homo sapien
acacagcctgtaactccatcattaa

SEQ ID NO: 2453406 - DNA, 25 bp, Homo sapien
gtggacatatgatgaatcttcagca

SEQ ID NO: 2453407 - DNA, 25 bp, Homo sapien
tatctgatatacttacatcgtggac

SEQ ID NO: 2453408 - DNA, 25 bp, Homo sapien
tctgatatacttacatcgtggacat

SEQ ID NO: 2453409 - DNA, 25 bp, Homo sapien
acatcgtggacatatgatgaatctt

SEQ ID NO: 2453410 - DNA, 25 bp, Homo sapien
cccgaatgtaatcattggtactcat

SEQ ID NO: 2453411 - DNA, 25 bp, Homo sapien
ccccgaatgtaatcattggtactca

SEQ ID NO: 2453412 - DNA, 25 bp, Homo sapien
acccccgaatgtaatcattggtact

SEQ ID NO: 2453413 - DNA, 25 bp, Homo sapien
cccccgaatgtaatcattggtactc

SEQ ID NO: 2453414 - DNA, 25 bp, Homo sapien
tctttccttgaaatgcgatttggtt

SEQ ID NO: 2453415 - DNA, 25 bp, Homo sapien
tttccttgaaatgcgatttggtttc

SEQ ID NO: 2453416 - DNA, 25 bp, Homo sapien
tccttgaaatgcgatttggtttctt

SEQ ID NO: 2453417 - DNA, 25 bp, Homo sapien
cttgaaatgcgatttggtttcttct

SEQ ID NO: 2453418 - DNA, 25 bp, Homo sapien
aaggaaaatctggattcaaggtgtc

SEQ ID NO: 2453419 - DNA, 25 bp, Homo sapien
caaggtgtcagtaatggtagtagtc

SEQ ID NO: 2453420 - DNA, 25 bp, Homo sapien
gaaaatctggattcaaggtgtcagt

SEQ ID NO: 2453421 - DNA, 25 bp, Homo sapien
tctggattcaaggtgtcagtaatgg

SEQ ID NO: 2453422 - DNA, 25 bp, Homo sapien
ggtgtgtggaaatgctgctaatttt

SEQ ID NO: 2453423 - DNA, 25 bp, Homo sapien
cacctctttagtgagctgtattcta

SEQ ID NO: 2453424 - DNA, 25 bp, Homo sapien
tgactcttgacctggatgttgttgg

SEQ ID NO: 2453425 - DNA, 25 bp, Homo sapien
tattatgttcttgacctgactcttg

SEQ ID NO: 2453426 - DNA, 25 bp, Homo sapien
tattgagatggccatatgttttatg

SEQ ID NO: 2453427 - DNA, 25 bp, Homo sapien
gagtgggcatcctcaccttatttca

SEQ ID NO: 2453428 - DNA, 25 bp, Homo sapien
cagatatgttcttgcaatgcctagt

SEQ ID NO: 2453429 - DNA, 25 bp, Homo sapien
ttcccaagaggaatgattccagcta

SEQ ID NO: 2453430 - DNA, 25 bp, Homo sapien
aaggaaaatctggattcaaggtgtc

SEQ ID NO: 2453431 - DNA, 25 bp, Homo sapien
caaggtgtcagtaatggtagtagtc

SEQ ID NO: 2453432 - DNA, 25 bp, Homo sapien
tctggattcaaggtgtcagtaatgg

SEQ ID NO: 2453433 - DNA, 25 bp, Homo sapien
gaaaatctggattcaaggtgtcagt

SEQ ID NO: 2453434 - DNA, 25 bp, Homo sapien
tgactcttgacctggatgttgttgg

SEQ ID NO: 2453435 - DNA, 25 bp, Homo sapien
ggtgtgtggaaatgctgctaatttt

SEQ ID NO: 2453436 - DNA, 25 bp, Homo sapien
cacctctttagtgagctgtattcta

SEQ ID NO: 2453437 - DNA, 25 bp, Homo sapien
tattatgttcttgacctgactcttg

SEQ ID NO: 2453438 - DNA, 25 bp, Homo sapien
tattgagatggccatatgttttatg

SEQ ID NO: 2453439 - DNA, 25 bp, Homo sapien
gagtgggcatcctcaccttatttca

SEQ ID NO: 2453440 - DNA, 25 bp, Homo sapien
cagatatgttcttgcaatgcctagt

SEQ ID NO: 2453441 - DNA, 25 bp, Homo sapien
ttcccaagaggaatgattccagcta

SEQ ID NO: 2453442 - DNA, 25 bp, Homo sapien
tttgtctgtgttattatctacaagc

SEQ ID NO: 2453443 - DNA, 25 bp, Homo sapien
gtctgtgttattatctacaagcaaa

SEQ ID NO: 2453444 - DNA, 25 bp, Homo sapien
ctagtctttgtctgtgttattatct

SEQ ID NO: 2453445 - DNA, 25 bp, Homo sapien
tgtgttattatctacaagcaaaatc

SEQ ID NO: 2453446 - DNA, 25 bp, Homo sapien
cactaggcaattaggttgattccct

SEQ ID NO: 2453447 - DNA, 25 bp, Homo sapien
tgcagtaaacataggtgtgcagacg

SEQ ID NO: 2453448 - DNA, 25 bp, Homo sapien
ttttttacagctacatatacagcaa

SEQ ID NO: 2453449 - DNA, 25 bp, Homo sapien
gcagacgtgtttctgatatacttcg

SEQ ID NO: 2453450 - DNA, 25 bp, Homo sapien
tgggatcccatcagagccctctttc

SEQ ID NO: 2453451 - DNA, 25 bp, Homo sapien
agaagaagaccttcgctggagccca

SEQ ID NO: 2453452 - DNA, 25 bp, Homo sapien
tatgacatgatgactgcacaacgat

SEQ ID NO: 2453453 - DNA, 25 bp, Homo sapien
cgatattcaatgaagggcagaggtc

SEQ ID NO: 2453454 - DNA, 25 bp, Homo sapien
tcaaggtttagcctccaccaatcct

SEQ ID NO: 2453455 - DNA, 25 bp, Homo sapien
caccaatccttgtgtccccatgaca

SEQ ID NO: 2453456 - DNA, 25 bp, Homo sapien
caatccttgtgtccccatgacacca

SEQ ID NO: 2453457 - DNA, 25 bp, Homo sapien
tttagcctccaccaatccttgtgtc

SEQ ID NO: 2453458 - DNA, 25 bp, Homo sapien
ctggtcgatttgctctcctgttacc

SEQ ID NO: 2453459 - DNA, 25 bp, Homo sapien
cgatttgctctcctgttaccctcag

SEQ ID NO: 2453460 - DNA, 25 bp, Homo sapien
gtcgatttgctctcctgttaccctc

SEQ ID NO: 2453461 - DNA, 25 bp, Homo sapien
agaggggtgaactgagaatgaaggc

SEQ ID NO: 2453462 - DNA, 25 bp, Homo sapien
gtcatccctgaaagcaactaaagtg

SEQ ID NO: 2453463 - DNA, 25 bp, Homo sapien
aaagcaactaaagtgtttacttcag

SEQ ID NO: 2453464 - DNA, 25 bp, Homo sapien
atccctgaaagcaactaaagtgttt

SEQ ID NO: 2453465 - DNA, 25 bp, Homo sapien
ttattgtctactattggtacatttt

SEQ ID NO: 2453466 - DNA, 25 bp, Homo sapien
agtcatggattgctggccaggaaca

SEQ ID NO: 2453467 - DNA, 25 bp, Homo sapien
ggattgctggccaggaacaggcatc

SEQ ID NO: 2453468 - DNA, 25 bp, Homo sapien
ggcatcagtgcttgctggcggaccc

SEQ ID NO: 2453469 - DNA, 25 bp, Homo sapien
atcagtgcttgctggcggaccctgg

SEQ ID NO: 2453470 - DNA, 25 bp, Homo sapien
gtggtcttatcatgctctggtacca

SEQ ID NO: 2453471 - DNA, 25 bp, Homo sapien
ggtggtcttatcatgctctggtacc

SEQ ID NO: 2453472 - DNA, 25 bp, Homo sapien
tggtggtcttatcatgctctggtac

SEQ ID NO: 2453473 - DNA, 25 bp, Homo sapien
tggtcttatcatgctctggtaccac

SEQ ID NO: 2453474 - DNA, 25 bp, Homo sapien
caatcctgtcaacattgatagcctg

SEQ ID NO: 2453475 - DNA, 25 bp, Homo sapien
taaagcaatcctgtcaacattgata

SEQ ID NO: 2453476 - DNA, 25 bp, Homo sapien
agcaatcctgtcaacattgatagcc

SEQ ID NO: 2453477 - DNA, 25 bp, Homo sapien
aatcctgtcaacattgatagcctga

SEQ ID NO: 2453478 - DNA, 25 bp, Homo sapien
tcatagctgaagttgatataaccag

SEQ ID NO: 2453479 - DNA, 25 bp, Homo sapien
agttgatataaccagggtgcccagg

SEQ ID NO: 2453480 - DNA, 25 bp, Homo sapien
tagctgaagttgatataaccagggt

SEQ ID NO: 2453481 - DNA, 25 bp, Homo sapien
ctgaagttgatataaccagggtgcc

SEQ ID NO: 2453482 - DNA, 25 bp, Homo sapien
aggcaaacaaaatccaggtccccat

SEQ ID NO: 2453483 - DNA, 25 bp, Homo sapien
cacaaggcaggcaaacaaaatccag

SEQ ID NO: 2453484 - DNA, 25 bp, Homo sapien
ggcatggcaaaagctgctcccacaa

SEQ ID NO: 2453485 - DNA, 25 bp, Homo sapien
gctcccacaaggcaggcaaacaaaa

SEQ ID NO: 2453486 - DNA, 25 bp, Homo sapien
tattcagagaaactttctttgtgct

SEQ ID NO: 2453487 - DNA, 25 bp, Homo sapien
gctacacagggaggcttggtcctct

SEQ ID NO: 2453488 - DNA, 25 bp, Homo sapien
tcagagaaactttctttgtgctaca

SEQ ID NO: 2453489 - DNA, 25 bp, Homo sapien
ttctttgtgctacacagggaggctt

SEQ ID NO: 2453490 - DNA, 25 bp, Homo sapien
tggcttttacgccagtttgtcccta

SEQ ID NO: 2453491 - DNA, 25 bp, Homo sapien
tacaccctcggacaggtgacgggag

SEQ ID NO: 2453492 - DNA, 25 bp, Homo sapien
tgcctgtcccctttttcgagatggg

SEQ ID NO: 2453493 - DNA, 25 bp, Homo sapien
tgtcttctaagacgattttgacgga

SEQ ID NO: 2453494 - DNA, 25 bp, Homo sapien
gccacgaactcctggagacgcaggg

SEQ ID NO: 2453495 - DNA, 25 bp, Homo sapien
cacagttgcgctgctagcgacgagg

SEQ ID NO: 2453496 - DNA, 25 bp, Homo sapien
gcaaacttttgcgtacggcgctgac

SEQ ID NO: 2453497 - DNA, 25 bp, Homo sapien
cccagctgttaccgcagcacttgga

SEQ ID NO: 2453498 - DNA, 25 bp, Homo sapien
cagtggtaccttctctcacggaggg

SEQ ID NO: 2453499 - DNA, 25 bp, Homo sapien
ccgctttcgggagtcagtgatcgcc

SEQ ID NO: 2453500 - DNA, 25 bp, Homo sapien
agggcctggacttcacgtacatcga

SEQ ID NO: 2453501 - DNA, 25 bp, Homo sapien
tttctgagtcgcaaaaccgtcaagg

SEQ ID NO: 2453502 - DNA, 25 bp, Homo sapien
tgctggataggaggacacttccact

SEQ ID NO: 2453503 - DNA, 25 bp, Homo sapien
gataggaggacacttccactagaac

SEQ ID NO: 2453504 - DNA, 25 bp, Homo sapien
tggataggaggacacttccactaga

SEQ ID NO: 2453505 - DNA, 25 bp, Homo sapien
tcctgctggataggaggacacttcc

SEQ ID NO: 2453506 - DNA, 25 bp, Homo sapien
ctgggagtccggattctggtgcttt

SEQ ID NO: 2453507 - DNA, 25 bp, Homo sapien
ttctgctgggagtccggattctggt

SEQ ID NO: 2453508 - DNA, 25 bp, Homo sapien
tttgctccgaagcagtgcccgtggg

SEQ ID NO: 2453509 - DNA, 25 bp, Homo sapien
tcagtgaggagaccatcattgtgct

SEQ ID NO: 2453510 - DNA, 25 bp, Homo sapien
ttgagtcagagatggcactcgagtt

SEQ ID NO: 2453511 - DNA, 25 bp, Homo sapien
cagagatggcactcgagtttttccc

SEQ ID NO: 2453512 - DNA, 25 bp, Homo sapien
gagatggcactcgagtttttcccca

SEQ ID NO: 2453513 - DNA, 25 bp, Homo sapien
gtcagagatggcactcgagtttttc

SEQ ID NO: 2453514 - DNA, 25 bp, Homo sapien
gagaagctgttaacctgtgttttac

SEQ ID NO: 2453515 - DNA, 25 bp, Homo sapien
agaagctgttaacctgtgttttact

SEQ ID NO: 2453516 - DNA, 25 bp, Homo sapien
agctgttaacctgtgttttactttg

SEQ ID NO: 2453517 - DNA, 25 bp, Homo sapien
ctgagaagctgttaacctgtgtttt

SEQ ID NO: 2453518 - DNA, 25 bp, Homo sapien
tgagatgtggtatggaacggattcc

SEQ ID NO: 2453519 - DNA, 25 bp, Homo sapien
tttcaggttcttcacttatgagatg

SEQ ID NO: 2453520 - DNA, 25 bp, Homo sapien
atgtggtatggaacggattccagga

SEQ ID NO: 2453521 - DNA, 25 bp, Homo sapien
tcacttatgagatgtggtatggaac

SEQ ID NO: 2453522 - DNA, 25 bp, Homo sapien
agttaggctgtcttctgtggtcttc

SEQ ID NO: 2453523 - DNA, 25 bp, Homo sapien
cagcagcaagagttaggctgtcttc

SEQ ID NO: 2453524 - DNA, 25 bp, Homo sapien
ggaagcttgcatttcccaaggggct

SEQ ID NO: 2453525 - DNA, 25 bp, Homo sapien
cttttggatggagtcagaaggtccc

SEQ ID NO: 2453526 - DNA, 25 bp, Homo sapien
ttgcagctcagggtagctttgggtc

SEQ ID NO: 2453527 - DNA, 25 bp, Homo sapien
aatgttggctgagcgctgctggcct

SEQ ID NO: 2453528 - DNA, 25 bp, Homo sapien
caaccacttggtgtgcgtgggctgt

SEQ ID NO: 2453529 - DNA, 25 bp, Homo sapien
ggaatgctgtgtacatggccgctgt

SEQ ID NO: 2453530 - DNA, 25 bp, Homo sapien
gcccatgagcataaaacagcgtcgt

SEQ ID NO: 2453531 - DNA, 25 bp, Homo sapien
tggcccatgagcataaaacagcgtc

SEQ ID NO: 2453532 - DNA, 25 bp, Homo sapien
gtgatttcatgctctaaactgcctt

SEQ ID NO: 2453533 - DNA, 25 bp, Homo sapien
ccatgagcataaaacagcgtcgttg

SEQ ID NO: 2453534 - DNA, 25 bp, Homo sapien
agcagctatggaagcatcccaggaa

SEQ ID NO: 2453535 - DNA, 25 bp, Homo sapien
tgcacttgtattctgaaagcaccac

SEQ ID NO: 2453536 - DNA, 25 bp, Homo sapien
tgatgttgccctcatgcacttgcgg

SEQ ID NO: 2453537 - DNA, 25 bp, Homo sapien
tgactgtcccaacgacagctggcag

SEQ ID NO: 2453538 - DNA, 25 bp, Homo sapien
gactcacggcatgtaaacaagttcc

SEQ ID NO: 2453539 - DNA, 25 bp, Homo sapien
gatgaaggccaaagagactcacggc

SEQ ID NO: 2453540 - DNA, 25 bp, Homo sapien
atgctgcttgctggtcccgagggtc

SEQ ID NO: 2453541 - DNA, 25 bp, Homo sapien
tgcatgtgcacggagacagagccat

SEQ ID NO: 2453542 - DNA, 25 bp, Homo sapien
gggttcccatatccagtaatcttac

SEQ ID NO: 2453543 - DNA, 25 bp, Homo sapien
atcttactgcaactggcattcctcc

SEQ ID NO: 2453544 - DNA, 25 bp, Homo sapien
taagttctgggttcccatatccagt

SEQ ID NO: 2453545 - DNA, 25 bp, Homo sapien
taatcttactgcaactggcattcct

SEQ ID NO: 2453546 - DNA, 25 bp, Homo sapien
agtgatggacaagttctccagagtc

SEQ ID NO: 2453547 - DNA, 25 bp, Homo sapien
aggtgcagtgatggacaagttctcc

SEQ ID NO: 2453548 - DNA, 25 bp, Homo sapien
agtcaccgagcttgtggcctgagtc

SEQ ID NO: 2453549 - DNA, 25 bp, Homo sapien
caccgagcttgtggcctgagtcctg

SEQ ID NO: 2453550 - DNA, 25 bp, Homo sapien
tgacagagcatcctggtttgcacac

SEQ ID NO: 2453551 - DNA, 25 bp, Homo sapien
agacgtgaatgtcgcccaggtctgc

SEQ ID NO: 2453552 - DNA, 25 bp, Homo sapien
cacagtttccatgggcagacgtgaa

SEQ ID NO: 2453553 - DNA, 25 bp, Homo sapien
gagtgacagagcatcctggtttgca

SEQ ID NO: 2453554 - DNA, 25 bp, Homo sapien
tccttcagcagtgcagttggtgtaa

SEQ ID NO: 2453555 - DNA, 25 bp, Homo sapien
cttcagcagtgcagttggtgtaact

SEQ ID NO: 2453556 - DNA, 25 bp, Homo sapien
tcagcagtgcagttggtgtaacttt

SEQ ID NO: 2453557 - DNA, 25 bp, Homo sapien
ccctccttcagcagtgcagttggtg

SEQ ID NO: 2453558 - DNA, 25 bp, Homo sapien
tgaggttgggctctccataaggagt

SEQ ID NO: 2453559 - DNA, 25 bp, Homo sapien
cagcaacttcacaactggtgcaggt

SEQ ID NO: 2453560 - DNA, 25 bp, Homo sapien
cataaggagtatgtagcagatgacc

SEQ ID NO: 2453561 - DNA, 25 bp, Homo sapien
gagtttctgcccaagtggagaccaa

SEQ ID NO: 2453562 - DNA, 25 bp, Homo sapien
gggtaacctccaggactgtccaaga

SEQ ID NO: 2453563 - DNA, 25 bp, Homo sapien
ccaagatggcgtagcccatctcagt

SEQ ID NO: 2453564 - DNA, 25 bp, Homo sapien
gatggcgtagcccatctcagtgcct

SEQ ID NO: 2453565 - DNA, 25 bp, Homo sapien
gtaacctccaggactgtccaagatg

SEQ ID NO: 2453566 - DNA, 25 bp, Homo sapien
tgcggacaggaagggttccgtaaca

SEQ ID NO: 2453567 - DNA, 25 bp, Homo sapien
tgtctaatgcagaaagatctgactt

SEQ ID NO: 2453568 - DNA, 25 bp, Homo sapien
gggatgtctaatgcagaaagatctg

SEQ ID NO: 2453569 - DNA, 25 bp, Homo sapien
ccagacatgcagacctggggagtaa

SEQ ID NO: 2453570 - DNA, 25 bp, Homo sapien
taaggggggatgtctaatgcagaaa

SEQ ID NO: 2453571 - DNA, 25 bp, Homo sapien
cctgcagctgcatgtcagtaatggg

SEQ ID NO: 2453572 - DNA, 25 bp, Homo sapien
ccatgtcttgggcactttgctgatc

SEQ ID NO: 2453573 - DNA, 25 bp, Homo sapien
tccaggaagccattgacctgcagct

SEQ ID NO: 2453574 - DNA, 25 bp, Homo sapien
tcctgagatgcttcatcttgctcat

SEQ ID NO: 2453575 - DNA, 25 bp, Homo sapien
atttccagtgcctctcaggacatgg

SEQ ID NO: 2453576 - DNA, 25 bp, Homo sapien
tgcctctcaggacatggtccagcat

SEQ ID NO: 2453577 - DNA, 25 bp, Homo sapien
cagtgcctctcaggacatggtccag

SEQ ID NO: 2453578 - DNA, 25 bp, Homo sapien
ttccagtgcctctcaggacatggtc

SEQ ID NO: 2453579 - DNA, 25 bp, Homo sapien
tagcaagggcgaaaaggtatcaaag

SEQ ID NO: 2453580 - DNA, 25 bp, Homo sapien
cagtgttgcagtctgctgcgtgtgt

SEQ ID NO: 2453581 - DNA, 25 bp, Homo sapien
gcgtgtgttccaggagtgagacagg

SEQ ID NO: 2453582 - DNA, 25 bp, Homo sapien
agacagggtgttattgtgagggtgg

SEQ ID NO: 2453583 - DNA, 25 bp, Homo sapien
tgacccctcatgacaatgtaggacg

SEQ ID NO: 2453584 - DNA, 25 bp, Homo sapien
tcaaatgtaagggtccgcttgttac

SEQ ID NO: 2453585 - DNA, 25 bp, Homo sapien
tcttaagaaataggtcatggagcca

SEQ ID NO: 2453586 - DNA, 25 bp, Homo sapien
ggtaggacattacaggctgaaaccc

SEQ ID NO: 2453587 - DNA, 25 bp, Homo sapien
cacttgcagtatggatttcaaatgt

SEQ ID NO: 2453588 - DNA, 25 bp, Homo sapien
ttcacttgcagtatggatttcaaat

SEQ ID NO: 2453589 - DNA, 25 bp, Homo sapien
cttgcagtatggatttcaaatgtgc

SEQ ID NO: 2453590 - DNA, 25 bp, Homo sapien
gcagtatggatttcaaatgtgctgg

SEQ ID NO: 2453591 - DNA, 25 bp, Homo sapien
gggcaggtacctggtaacacagtgg

SEQ ID NO: 2453592 - DNA, 25 bp, Homo sapien
ggtaagggtaccacagagaacacaa

SEQ ID NO: 2453593 - DNA, 25 bp, Homo sapien
gagaagcatccataaaccaccattt

SEQ ID NO: 2453594 - DNA, 25 bp, Homo sapien
taaaagcagtacctatgttccccaa

SEQ ID NO: 2453595 - DNA, 25 bp, Homo sapien
caaagggtctgaatttggtcagtca

SEQ ID NO: 2453596 - DNA, 25 bp, Homo sapien
acactttctgctcccgactgaagtt

SEQ ID NO: 2453597 - DNA, 25 bp, Homo sapien
tctgctcccgactgaagttgtaagt

SEQ ID NO: 2453598 - DNA, 25 bp, Homo sapien
ctgaagttgtaagtctaggacttcc

SEQ ID NO: 2453599 - DNA, 25 bp, Homo sapien
tcaatctcctcgtctgcatactggg

SEQ ID NO: 2453600 - DNA, 25 bp, Homo sapien
ctcctctgagagagcttgccttcct

SEQ ID NO: 2453601 - DNA, 25 bp, Homo sapien
cattccccagccatccagagagttg

SEQ ID NO: 2453602 - DNA, 25 bp, Homo sapien
ctgagagagcttgccttcctgggtg

SEQ ID NO: 2453603 - DNA, 25 bp, Homo sapien
cccagccatccagagagttgtggag

SEQ ID NO: 2453604 - DNA, 25 bp, Homo sapien
tctgcagacagatctagggcaggtc

SEQ ID NO: 2453605 - DNA, 25 bp, Homo sapien
gcaggtcttcgaagggacagtttga

SEQ ID NO: 2453606 - DNA, 25 bp, Homo sapien
gaattgtgaagtctgccttttccta

SEQ ID NO: 2453607 - DNA, 25 bp, Homo sapien
gacagtttgaaagaggaattgtgaa

SEQ ID NO: 2453608 - DNA, 25 bp, Homo sapien
taagacaattaagaggaacccagcc

SEQ ID NO: 2453609 - DNA, 25 bp, Homo sapien
aaacacctgtctttgcaaaccaagc

SEQ ID NO: 2453610 - DNA, 25 bp, Homo sapien
aacacctgtctttgcaaaccaagca

SEQ ID NO: 2453611 - DNA, 25 bp, Homo sapien
gcttttccagtgtacaataagacaa

SEQ ID NO: 2453612 - DNA, 25 bp, Homo sapien
aagattggtaatgacatcagaaacc

SEQ ID NO: 2453613 - DNA, 25 bp, Homo sapien
ccatgttgcaaagggaagcctccag

SEQ ID NO: 2453614 - DNA, 25 bp, Homo sapien
gatcttcagtacagctcagttccca

SEQ ID NO: 2453615 - DNA, 25 bp, Homo sapien
agtgaaggagttgtttgatgaatgc

SEQ ID NO: 2453616 - DNA, 25 bp, Homo sapien
tcttattgaatctggccatttaggg

SEQ ID NO: 2453617 - DNA, 25 bp, Homo sapien
gatggaggtgactcctcctgacctc

SEQ ID NO: 2453618 - DNA, 25 bp, Homo sapien
tctgcaggttcctcgtacatttctg

SEQ ID NO: 2453619 - DNA, 25 bp, Homo sapien
aggttcctcgtacatttctgctctc

SEQ ID NO: 2453620 - DNA, 25 bp, Homo sapien
caagctacgtatgcatgaggaattt

SEQ ID NO: 2453621 - DNA, 25 bp, Homo sapien
aagacatccttagcattggctcagg

SEQ ID NO: 2453622 - DNA, 25 bp, Homo sapien
ttctgggtcatcagatactgacatg

SEQ ID NO: 2453623 - DNA, 25 bp, Homo sapien
caggcccagtgagggctgaactcaa

SEQ ID NO: 2453624 - DNA, 25 bp, Homo sapien
aatataactgaactcatgaagacgt

SEQ ID NO: 2453625 - DNA, 25 bp, Homo sapien
gaactcatgaagacgtattcactga

SEQ ID NO: 2453626 - DNA, 25 bp, Homo sapien
tcatgaagacgtattcactgagcat

SEQ ID NO: 2453627 - DNA, 25 bp, Homo sapien
taactgaactcatgaagacgtattc

SEQ ID NO: 2453628 - DNA, 25 bp, Homo sapien
ttagccatgtcagttcctgaattcc

SEQ ID NO: 2453629 - DNA, 25 bp, Homo sapien
gccatgtcagttcctgaattcctca

SEQ ID NO: 2453630 - DNA, 25 bp, Homo sapien
tagccatgtcagttcctgaattcct

SEQ ID NO: 2453631 - DNA, 25 bp, Homo sapien
ccatgtcagttcctgaattcctcat

SEQ ID NO: 2453632 - DNA, 25 bp, Homo sapien
cagcggggcgcgctcacgcctggtg

SEQ ID NO: 2453633 - DNA, 25 bp, Homo sapien
ccagctgcccgacgcttcgtggggg

SEQ ID NO: 2453634 - DNA, 25 bp, Homo sapien
agcggggcgcgctcacgcctggtgc

SEQ ID NO: 2453635 - DNA, 25 bp, Homo sapien
ccgacgcttcgtggggggctgaggc

SEQ ID NO: 2453636 - DNA, 25 bp, Homo sapien
taacatgtcctgacaccgcctgtgc

SEQ ID NO: 2453637 - DNA, 25 bp, Homo sapien
tggatccggacacgcgctggtttat

SEQ ID NO: 2453638 - DNA, 25 bp, Homo sapien
agttcacagtgcgtttggatccgga

SEQ ID NO: 2453639 - DNA, 25 bp, Homo sapien
tgaacttaacctcgaatgggcagct

SEQ ID NO: 2453640 - DNA, 25 bp, Homo sapien
ccagtgcttgtttctcatgggtatc

SEQ ID NO: 2453641 - DNA, 25 bp, Homo sapien
gtgcttgtttctcatgggtatcccc

SEQ ID NO: 2453642 - DNA, 25 bp, Homo sapien
tctcatgggtatcccccatgttagc

SEQ ID NO: 2453643 - DNA, 25 bp, Homo sapien
ttctcatgggtatcccccatgttag

SEQ ID NO: 2453644 - DNA, 25 bp, Homo sapien
tgtgtgcgggtaaacttggcagacc

SEQ ID NO: 2453645 - DNA, 25 bp, Homo sapien
aaagaatgaaaccagtgcaaccaat

SEQ ID NO: 2453646 - DNA, 25 bp, Homo sapien
cacgttgcatttctcgggtgggcat

SEQ ID NO: 2453647 - DNA, 25 bp, Homo sapien
agtgttttcacgttgcatttctcgg

SEQ ID NO: 2453648 - DNA, 25 bp, Homo sapien
gcttccctattaggatcttaagtga

SEQ ID NO: 2453649 - DNA, 25 bp, Homo sapien
gttttcctggcatctccgattctgt

SEQ ID NO: 2453650 - DNA, 25 bp, Homo sapien
gctgtgttgggtaacacaggatgat

SEQ ID NO: 2453651 - DNA, 25 bp, Homo sapien
gatcttaagtgaaagtccagttggc

SEQ ID NO: 2453652 - DNA, 25 bp, Homo sapien
caggtgcgaggatggaaattccttc

SEQ ID NO: 2453653 - DNA, 25 bp, Homo sapien
cacctttagcgaagatgtaaatgat

SEQ ID NO: 2453654 - DNA, 25 bp, Homo sapien
cctgtctgaacacctttagcgaaga

SEQ ID NO: 2453655 - DNA, 25 bp, Homo sapien
actcaggtgcgaggatggaaattcc

SEQ ID NO: 2453656 - DNA, 25 bp, Homo sapien
attggtgcatcctgttttgttagca

SEQ ID NO: 2453657 - DNA, 25 bp, Homo sapien
ttttgttagcacctggaatgcccat

SEQ ID NO: 2453658 - DNA, 25 bp, Homo sapien
tctcccattgaattggtgcatcctg

SEQ ID NO: 2453659 - DNA, 25 bp, Homo sapien
ctgttttgttagcacctggaatgcc

SEQ ID NO: 2453660 - DNA, 25 bp, Homo sapien
tattagcatctatggaccttgagaa

SEQ ID NO: 2453661 - DNA, 25 bp, Homo sapien
tatcctaacatctgtctgtatgcac

SEQ ID NO: 2453662 - DNA, 25 bp, Homo sapien
gcatctgtctatcacatatattagc

SEQ ID NO: 2453663 - DNA, 25 bp, Homo sapien
tgtatgcacaccttagcatctgtct

SEQ ID NO: 2453664 - DNA, 25 bp, Homo sapien
cctcctgagttgctgggatgatagg

SEQ ID NO: 2453665 - DNA, 25 bp, Homo sapien
tcctgagttgctgggatgataggtg

SEQ ID NO: 2453666 - DNA, 25 bp, Homo sapien
ctgagttgctgggatgataggtgcg

SEQ ID NO: 2453667 - DNA, 25 bp, Homo sapien
tgagttgctgggatgataggtgcgt

SEQ ID NO: 2453668 - DNA, 25 bp, Homo sapien
gagtttcttggtggcgaatgcaccc

SEQ ID NO: 2453669 - DNA, 25 bp, Homo sapien
ggctactggctacgttgagttgagt

SEQ ID NO: 2453670 - DNA, 25 bp, Homo sapien
ggaccaggttgttttgaatatgccc

SEQ ID NO: 2453671 - DNA, 25 bp, Homo sapien
cccatcctaaccagaggtcctttgt

SEQ ID NO: 2453672 - DNA, 25 bp, Homo sapien
tctcatcccgtgcttctcgtctgat

SEQ ID NO: 2453673 - DNA, 25 bp, Homo sapien
tctcgtctgatgattccctggtctt

SEQ ID NO: 2453674 - DNA, 25 bp, Homo sapien
ccagtttcctctcatcccgtgcttc

SEQ ID NO: 2453675 - DNA, 25 bp, Homo sapien
tcccgtgcttctcgtctgatgattc

SEQ ID NO: 2453676 - DNA, 25 bp, Homo sapien
tgctcctgcacctgtcaccatcgca

SEQ ID NO: 2453677 - DNA, 25 bp, Homo sapien
cctgcacctgtcaccatcgcacttt

SEQ ID NO: 2453678 - DNA, 25 bp, Homo sapien
cctgctcctgcacctgtcaccatcg

SEQ ID NO: 2453679 - DNA, 25 bp, Homo sapien
ttgcttggcacctcttcattcgggg

SEQ ID NO: 2453680 - DNA, 25 bp, Homo sapien
tgctgtcccacatttaattgataac

SEQ ID NO: 2453681 - DNA, 25 bp, Homo sapien
ttctgtttcatggaacctatgttta

SEQ ID NO: 2453682 - DNA, 25 bp, Homo sapien
tttcatggaacctatgtttatttct

SEQ ID NO: 2453683 - DNA, 25 bp, Homo sapien
tgtcccacatttaattgataacaac

SEQ ID NO: 2453684 - DNA, 25 bp, Homo sapien
ttcctgccctgtcaaaattctgtac

SEQ ID NO: 2453685 - DNA, 25 bp, Homo sapien
tttttcgtctttggtccggaatgca

SEQ ID NO: 2453686 - DNA, 25 bp, Homo sapien
acaaaacactaacagctttgcttgc

SEQ ID NO: 2453687 - DNA, 25 bp, Homo sapien
gagcagaatgactggatttgtttct

SEQ ID NO: 2453688 - DNA, 25 bp, Homo sapien
ttcaatacctgtctgggaaacacct

SEQ ID NO: 2453689 - DNA, 25 bp, Homo sapien
gttcaatacctgtctgggaaacacc

SEQ ID NO: 2453690 - DNA, 25 bp, Homo sapien
atagttgacccgggtgggcattcca

SEQ ID NO: 2453691 - DNA, 25 bp, Homo sapien
tagttgacccgggtgggcattccaa

SEQ ID NO: 2453692 - DNA, 25 bp, Homo sapien
tgacccgggtgggcattccaaaatg

SEQ ID NO: 2453693 - DNA, 25 bp, Homo sapien
ggtaagattgcacgcttcatcccct

SEQ ID NO: 2453694 - DNA, 25 bp, Homo sapien
tttcataggcattgataaagccagg

SEQ ID NO: 2453695 - DNA, 25 bp, Homo sapien
aacatatctatagccagcgatgggc

SEQ ID NO: 2453696 - DNA, 25 bp, Homo sapien
aagggaaatgccaccggcctgcttt

SEQ ID NO: 2453697 - DNA, 25 bp, Homo sapien
gtgggatttgaagcttttccacagt

SEQ ID NO: 2453698 - DNA, 25 bp, Homo sapien
aggtgggatttgaagcttttccaca

SEQ ID NO: 2453699 - DNA, 25 bp, Homo sapien
ggtgggatttgaagcttttccacag

SEQ ID NO: 2453700 - DNA, 25 bp, Homo sapien
cttgttgccaacgtgcttctggggc

SEQ ID NO: 2453701 - DNA, 25 bp, Homo sapien
ttgttgccaacgtgcttctggggcc

SEQ ID NO: 2453702 - DNA, 25 bp, Homo sapien
ttctggggcccctgtgactgctgcc

SEQ ID NO: 2453703 - DNA, 25 bp, Homo sapien
gggcccctgtgactgctgccggatg

SEQ ID NO: 2453704 - DNA, 25 bp, Homo sapien
ggcagagtgccttggcaggtttgtg

SEQ ID NO: 2453705 - DNA, 25 bp, Homo sapien
cagaactgggaaccccgcggagtga

SEQ ID NO: 2453706 - DNA, 25 bp, Homo sapien
cttggcgagccagaactgggaaccc

SEQ ID NO: 2453707 - DNA, 25 bp, Homo sapien
agccagaactgggaaccccgcggag

SEQ ID NO: 2453708 - DNA, 25 bp, Homo sapien
cccgcggagtgaccccaccttctca

SEQ ID NO: 2453709 - DNA, 25 bp, Homo sapien
gaatttgctgattgtaaaactccct

SEQ ID NO: 2453710 - DNA, 25 bp, Homo sapien
tagacatcacaacacgaacaccaga

SEQ ID NO: 2453711 - DNA, 25 bp, Homo sapien
ggtgctgttgccatcctgatctctc

SEQ ID NO: 2453712 - DNA, 25 bp, Homo sapien
tacagtgagagcaccatagacatca

SEQ ID NO: 2453713 - DNA, 25 bp, Homo sapien
tattagggatggcaattctgctccc

SEQ ID NO: 2453714 - DNA, 25 bp, Homo sapien
ccttggctctattagggatggcaat

SEQ ID NO: 2453715 - DNA, 25 bp, Homo sapien
gctctattagggatggcaattctgc

SEQ ID NO: 2453716 - DNA, 25 bp, Homo sapien
ttggctctattagggatggcaattc

SEQ ID NO: 2453717 - DNA, 25 bp, Homo sapien
cctgacatagacactgggatacaca

SEQ ID NO: 2453718 - DNA, 25 bp, Homo sapien
ttcctgacatagacactgggataca

SEQ ID NO: 2453719 - DNA, 25 bp, Homo sapien
tcctgacatagacactgggatacac

SEQ ID NO: 2453720 - DNA, 25 bp, Homo sapien
ctgacatagacactgggatacacat

SEQ ID NO: 2453721 - DNA, 25 bp, Homo sapien
aacattttagagacttggcaacaca

SEQ ID NO: 2453722 - DNA, 25 bp, Homo sapien
tcggaaacgttctcaaacacagcta

SEQ ID NO: 2453723 - DNA, 25 bp, Homo sapien
acaaaaccgagggaactgctgaaca

SEQ ID NO: 2453724 - DNA, 25 bp, Homo sapien
tttgctgaaaaagacgctcctcgag

SEQ ID NO: 2453725 - DNA, 25 bp, Homo sapien
catactgtggtcctgcatgcacctg

SEQ ID NO: 2453726 - DNA, 25 bp, Homo sapien
cctggctaatgggccaaccctcaaa

SEQ ID NO: 2453727 - DNA, 25 bp, Homo sapien
ctaagccacgcatgaggtaacccat

SEQ ID NO: 2453728 - DNA, 25 bp, Homo sapien
tcaaagctgctgaaacgccagccta

SEQ ID NO: 2453729 - DNA, 25 bp, Homo sapien
catcattgcatgggcctttctaata

SEQ ID NO: 2453730 - DNA, 25 bp, Homo sapien
ctttctaatattatctgtatcatcc

SEQ ID NO: 2453731 - DNA, 25 bp, Homo sapien
cattgcatgggcctttctaatatta

SEQ ID NO: 2453732 - DNA, 25 bp, Homo sapien
tttctaatattatctgtatcatccc

SEQ ID NO: 2453733 - DNA, 25 bp, Homo sapien
tctccgggctgatgaaagagtgaag

SEQ ID NO: 2453734 - DNA, 25 bp, Homo sapien
ccatgttaggggttctgcattgtaa

SEQ ID NO: 2453735 - DNA, 25 bp, Homo sapien
tcaggccataaaagctggtgtccat

SEQ ID NO: 2453736 - DNA, 25 bp, Homo sapien
gcattgtaaactgcagtacacattg

SEQ ID NO: 2453737 - DNA, 25 bp, Homo sapien
taacatgggaaagggtcttctgctc

SEQ ID NO: 2453738 - DNA, 25 bp, Homo sapien
tctgctccttgtgggtccttctcct

SEQ ID NO: 2453739 - DNA, 25 bp, Homo sapien
ttctgctccttgtgggtccttctcc

SEQ ID NO: 2453740 - DNA, 25 bp, Homo sapien
tcacagacttctgtggccacaaata

SEQ ID NO: 2453741 - DNA, 25 bp, Homo sapien
ggtgcacagacagtcctatggccaa

SEQ ID NO: 2453742 - DNA, 25 bp, Homo sapien
cctggtgcacagacagtcctatggc

SEQ ID NO: 2453743 - DNA, 25 bp, Homo sapien
gtgcacagacagtcctatggccaac

SEQ ID NO: 2453744 - DNA, 25 bp, Homo sapien
tggtgcacagacagtcctatggcca

SEQ ID NO: 2453745 - DNA, 25 bp, Homo sapien
caatgacgaaaggtgaagcttcagt

SEQ ID NO: 2453746 - DNA, 25 bp, Homo sapien
ggtgaagcttcagttgttcatagac

SEQ ID NO: 2453747 - DNA, 25 bp, Homo sapien
ggatccttctgggacaatgacgaaa

SEQ ID NO: 2453748 - DNA, 25 bp, Homo sapien
tgttcatagacttcccatatctcat

SEQ ID NO: 2453749 - DNA, 25 bp, Homo sapien
cagtgttggccacttcattgggtac

SEQ ID NO: 2453750 - DNA, 25 bp, Homo sapien
gggtctacatgacctaccacacaga

SEQ ID NO: 2453751 - DNA, 25 bp, Homo sapien
atgatttaaagcctcgccaccccaa

SEQ ID NO: 2453752 - DNA, 25 bp, Homo sapien
tggtggacaaacaacctgactgatg

SEQ ID NO: 2453753 - DNA, 25 bp, Homo sapien
tgtcagattcaggagttgcaaaccc

SEQ ID NO: 2453754 - DNA, 25 bp, Homo sapien
cccacatgtcagattcaggagttgc

SEQ ID NO: 2453755 - DNA, 25 bp, Homo sapien
caggagttgcaaacccttgcaagtc

SEQ ID NO: 2453756 - DNA, 25 bp, Homo sapien
gattcaggagttgcaaacccttgca

SEQ ID NO: 2453757 - DNA, 25 bp, Homo sapien
gaggtctgcagtttgtctggtcttc

SEQ ID NO: 2453758 - DNA, 25 bp, Homo sapien
cacataatttcttgcagaaatggct

SEQ ID NO: 2453759 - DNA, 25 bp, Homo sapien
tgggcattggaaaatccgcacataa

SEQ ID NO: 2453760 - DNA, 25 bp, Homo sapien
tagctgtgaccacatgcgtatggta

SEQ ID NO: 2453761 - DNA, 25 bp, Homo sapien
tgagtggggtctacctcaagctggt

SEQ ID NO: 2453762 - DNA, 25 bp, Homo sapien
gtcctcctgcaaaagactccaaagg

SEQ ID NO: 2453763 - DNA, 25 bp, Homo sapien
ggggtctacctcaagctggtatggc

SEQ ID NO: 2453764 - DNA, 25 bp, Homo sapien
cgttagtactttgtaatgtgcttga

SEQ ID NO: 2453765 - DNA, 25 bp, Homo sapien
ggctgtgcttcagaacgggaaagct

SEQ ID NO: 2453766 - DNA, 25 bp, Homo sapien
cagaaccccacgtttgccggggctg

SEQ ID NO: 2453767 - DNA, 25 bp, Homo sapien
tcctgaatcatctcccaggcaagct

SEQ ID NO: 2453768 - DNA, 25 bp, Homo sapien
ctgattcctgaatcatctcccaggc

SEQ ID NO: 2453769 - DNA, 25 bp, Homo sapien
ccaaggtattctgaggtcatttcct

SEQ ID NO: 2453770 - DNA, 25 bp, Homo sapien
agcctcgtccctggcagtagacaga

SEQ ID NO: 2453771 - DNA, 25 bp, Homo sapien
tccgttgagactccggcaggaagcc

SEQ ID NO: 2453772 - DNA, 25 bp, Homo sapien
ccacagtccgttgagactccggcag

SEQ ID NO: 2453773 - DNA, 25 bp, Homo sapien
cagtccgttgagactccggcaggaa

SEQ ID NO: 2453774 - DNA, 25 bp, Homo sapien
tactcgaaagcaatagcagaaatta

SEQ ID NO: 2453775 - DNA, 25 bp, Homo sapien
aaaatgtggcaatgaagtatttgag

SEQ ID NO: 2453776 - DNA, 25 bp, Homo sapien
gttagtatcattatcatagtactcg

SEQ ID NO: 2453777 - DNA, 25 bp, Homo sapien
tgggcccttcaattgttctttgtta

SEQ ID NO: 2453778 - DNA, 25 bp, Homo sapien
cccgctatctcaacgttctctgagg

SEQ ID NO: 2453779 - DNA, 25 bp, Homo sapien
tgagcttccccgctatctcaacgtt

SEQ ID NO: 2453780 - DNA, 25 bp, Homo sapien
attctgagcttccccgctatctcaa

SEQ ID NO: 2453781 - DNA, 25 bp, Homo sapien
agcttctttcttaccagaaacacca

SEQ ID NO: 2453782 - DNA, 25 bp, Homo sapien
ctttgggtccctggtttcagccaga

SEQ ID NO: 2453783 - DNA, 25 bp, Homo sapien
tcagccagatcttcactgtaggatt

SEQ ID NO: 2453784 - DNA, 25 bp, Homo sapien
ccagatcttcactgtaggatttctg

SEQ ID NO: 2453785 - DNA, 25 bp, Homo sapien
tcttcactgtaggatttctggatca

SEQ ID NO: 2453786 - DNA, 25 bp, Homo sapien
agtcaacgttgaagtaagtaccatt

SEQ ID NO: 2453787 - DNA, 25 bp, Homo sapien
ctctgcaaagtcaacgttgaagtaa

SEQ ID NO: 2453788 - DNA, 25 bp, Homo sapien
gtaccattctctgccagtattacta

SEQ ID NO: 2453789 - DNA, 25 bp, Homo sapien
aagtaccattctctgccagtattac

SEQ ID NO: 2453790 - DNA, 25 bp, Homo sapien
cttgagtaactctctgacttttgcc

SEQ ID NO: 2453791 - DNA, 25 bp, Homo sapien
ccttgagtaactctctgacttttgc

SEQ ID NO: 2453792 - DNA, 25 bp, Homo sapien
taatatgttcgactacatttaaaca

SEQ ID NO: 2453793 - DNA, 25 bp, Homo sapien
aataatatgttcgactacatttaaa

SEQ ID NO: 2453794 - DNA, 25 bp, Homo sapien
ataatatgttcgactacatttaaac

SEQ ID NO: 2453795 - DNA, 25 bp, Homo sapien
atagccctcaccgtagccaccacaa

SEQ ID NO: 2453796 - DNA, 25 bp, Homo sapien
ctaccatagccctcaccgtagccac

SEQ ID NO: 2453797 - DNA, 25 bp, Homo sapien
ctcaccgtagccaccacaatcacta

SEQ ID NO: 2453798 - DNA, 25 bp, Homo sapien
aatgatctctaccatagccctcacc

SEQ ID NO: 2453799 - DNA, 25 bp, Homo sapien
gagcgaccataatcacgatatgcat

SEQ ID NO: 2453800 - DNA, 25 bp, Homo sapien
cccgactagagcgaccataatcacg

SEQ ID NO: 2453801 - DNA, 25 bp, Homo sapien
aatgttcatcccgactagagcgacc

SEQ ID NO: 2453802 - DNA, 25 bp, Homo sapien
gactagagcgaccataatcacgata

SEQ ID NO: 2453803 - DNA, 25 bp, Homo sapien
tgcaaagggtctggagatttgctgc

SEQ ID NO: 2453804 - DNA, 25 bp, Homo sapien
ggtctggagatttgctgcttcaatc

SEQ ID NO: 2453805 - DNA, 25 bp, Homo sapien
aagggtctggagatttgctgcttca

SEQ ID NO: 2453806 - DNA, 25 bp, Homo sapien
caaatgcaaagggtctggagatttg

SEQ ID NO: 2453807 - DNA, 25 bp, Homo sapien
tggtaggtgtctcccgaggtgcccc

SEQ ID NO: 2453808 - DNA, 25 bp, Homo sapien
cggcggtgggcttcagccaattatt

SEQ ID NO: 2453809 - DNA, 25 bp, Homo sapien
cttcagccaattattgtgagggtgg

SEQ ID NO: 2453810 - DNA, 25 bp, Homo sapien
ccaatcattgccacggcggtgggct

SEQ ID NO: 2453811 - DNA, 25 bp, Homo sapien
tcaatacagcttgtgcagggcggcg

SEQ ID NO: 2453812 - DNA, 25 bp, Homo sapien
ggtggattcaggcacacgcggactg

SEQ ID NO: 2453813 - DNA, 25 bp, Homo sapien
catccttccgtggttataagcatca

SEQ ID NO: 2453814 - DNA, 25 bp, Homo sapien
cagggcggcggtggattcaggcaca

SEQ ID NO: 2453815 - DNA, 25 bp, Homo sapien
tcctccttgaggatggtgtactcac

SEQ ID NO: 2453816 - DNA, 25 bp, Homo sapien
ttccatgcttcctccttgaggatgg

SEQ ID NO: 2453817 - DNA, 25 bp, Homo sapien
ctaggcaaatacaggctccgagttc

SEQ ID NO: 2453818 - DNA, 25 bp, Homo sapien
taggcaaatacaggctccgagttcc

SEQ ID NO: 2453819 - DNA, 25 bp, Homo sapien
cagcagtggccgtggtgcctactag

SEQ ID NO: 2453820 - DNA, 25 bp, Homo sapien
cagagggtccctcaagtgcagcagt

SEQ ID NO: 2453821 - DNA, 25 bp, Homo sapien
tgcctactagcagggctctggaagc

SEQ ID NO: 2453822 - DNA, 25 bp, Homo sapien
tttgcagtgccttctggcgcagagg

SEQ ID NO: 2453823 - DNA, 25 bp, Homo sapien
aagctgccaattcaggatggctggc

SEQ ID NO: 2453824 - DNA, 25 bp, Homo sapien
ccatatccttgaagctgccaattca

SEQ ID NO: 2453825 - DNA, 25 bp, Homo sapien
gggcaccgagctcccgggagcaggg

SEQ ID NO: 2453826 - DNA, 25 bp, Homo sapien
tgggcaccgagctcccgggagcagg

SEQ ID NO: 2453827 - DNA, 25 bp, Homo sapien
caaaggacggttcataaacggcaga

SEQ ID NO: 2453828 - DNA, 25 bp, Homo sapien
gttcataaacggcagaaagttgaag

SEQ ID NO: 2453829 - DNA, 25 bp, Homo sapien
tgaagagcagcgcaaaggacggttc

SEQ ID NO: 2453830 - DNA, 25 bp, Homo sapien
tgaaggacatgtttcactgggaaag

SEQ ID NO: 2453831 - DNA, 25 bp, Homo sapien
ccgcgcacaccagacagaaacagag

SEQ ID NO: 2453832 - DNA, 25 bp, Homo sapien
catagccgtgacagtgccgcgcaca

SEQ ID NO: 2453833 - DNA, 25 bp, Homo sapien
gccaataagaccaccatagccgtga

SEQ ID NO: 2453834 - DNA, 25 bp, Homo sapien
ggcctgcctccattcgccaataaga

SEQ ID NO: 2453835 - DNA, 25 bp, Homo sapien
ccctgcagtctagtggtcgtgggat

SEQ ID NO: 2453836 - DNA, 25 bp, Homo sapien
cctgcagtctagtggtcgtgggatc

SEQ ID NO: 2453837 - DNA, 25 bp, Homo sapien
cagctgtaggcagtacagctcctac

SEQ ID NO: 2453838 - DNA, 25 bp, Homo sapien
agcctccagctgtaggcagtacagc

SEQ ID NO: 2453839 - DNA, 25 bp, Homo sapien
gactgcccaggttctagcaggatta

SEQ ID NO: 2453840 - DNA, 25 bp, Homo sapien
ctgcagtccggcagatcatcagcca

SEQ ID NO: 2453841 - DNA, 25 bp, Homo sapien
agtccggcagatcatcagccagggc

SEQ ID NO: 2453842 - DNA, 25 bp, Homo sapien
aatctcttgcagtacttccggagag

SEQ ID NO: 2453843 - DNA, 25 bp, Homo sapien
cttgcagtacttccggagagaggga

SEQ ID NO: 2453844 - DNA, 25 bp, Homo sapien
tgagagactgattgtcccagaaaag

SEQ ID NO: 2453845 - DNA, 25 bp, Homo sapien
tcccagaaaaggattatgcattcac

SEQ ID NO: 2453846 - DNA, 25 bp, Homo sapien
ttgatgggacccctcgtactgagag

SEQ ID NO: 2453847 - DNA, 25 bp, Homo sapien
ttcttctcacattgatgggacccct

SEQ ID NO: 2453848 - DNA, 25 bp, Homo sapien
tggctttatccttatgtagtattgc

SEQ ID NO: 2453849 - DNA, 25 bp, Homo sapien
ctttatccttatgtagtattgcagg

SEQ ID NO: 2453850 - DNA, 25 bp, Homo sapien
gatggctttatccttatgtagtatt

SEQ ID NO: 2453851 - DNA, 25 bp, Homo sapien
gctttatccttatgtagtattgcag

SEQ ID NO: 2453852 - DNA, 25 bp, Homo sapien
ccgctgttgtagtgtctgtggccac

SEQ ID NO: 2453853 - DNA, 25 bp, Homo sapien
tgaataagttaaggccgctgttgta

SEQ ID NO: 2453854 - DNA, 25 bp, Homo sapien
ttaaggccgctgttgtagtgtctgt

SEQ ID NO: 2453855 - DNA, 25 bp, Homo sapien
cttcataatcctcataccactgaat

SEQ ID NO: 2453856 - DNA, 25 bp, Homo sapien
gggggcgtcagaaagaacaacatga

SEQ ID NO: 2453857 - DNA, 25 bp, Homo sapien
tctggaagtagggggcgtcagaaag

SEQ ID NO: 2453858 - DNA, 25 bp, Homo sapien
gacgttcacgagatattcctcggta

SEQ ID NO: 2453859 - DNA, 25 bp, Homo sapien
ctgtgacgttcacgagatattcctc

SEQ ID NO: 2453860 - DNA, 25 bp, Homo sapien
cacagagctgcctgtatgttactta

SEQ ID NO: 2453861 - DNA, 25 bp, Homo sapien
tagtcacgtcgacacagagctgcct

SEQ ID NO: 2453862 - DNA, 25 bp, Homo sapien
ccaaatagtcacgtcgacacagagc

SEQ ID NO: 2453863 - DNA, 25 bp, Homo sapien
cagagctgcctgtatgttacttaca

SEQ ID NO: 2453864 - DNA, 25 bp, Homo sapien
ggtgggacttgcacctctcctccat

SEQ ID NO: 2453865 - DNA, 25 bp, Homo sapien
gccttcttagctcgggcattaaccg

SEQ ID NO: 2453866 - DNA, 25 bp, Homo sapien
gagaaaacgccttcttagctcgggc

SEQ ID NO: 2453867 - DNA, 25 bp, Homo sapien
tgctctgaatgatgtcgcctctccg

SEQ ID NO: 2453868 - DNA, 25 bp, Homo sapien
ccagcagggttggccatagacggcc

SEQ ID NO: 2453869 - DNA, 25 bp, Homo sapien
tagacggcctgcgtgcacgctattg

SEQ ID NO: 2453870 - DNA, 25 bp, Homo sapien
tcctgtgtggagttgacactgctgg

SEQ ID NO: 2453871 - DNA, 25 bp, Homo sapien
tgtgcactgccttgccaacccatag

SEQ ID NO: 2453872 - DNA, 25 bp, Homo sapien
ggtgtgggaatatgttcttagcagc

SEQ ID NO: 2453873 - DNA, 25 bp, Homo sapien
gcttgaggcctgtgggtcttttggg

SEQ ID NO: 2453874 - DNA, 25 bp, Homo sapien
ccacatgggtgtgggaatatgttct

SEQ ID NO: 2453875 - DNA, 25 bp, Homo sapien
tgggaatatgttcttagcagcttga

SEQ ID NO: 2453876 - DNA, 25 bp, Homo sapien
tgggagtcgcggtgagggctgcggt

SEQ ID NO: 2453877 - DNA, 25 bp, Homo sapien
aacatgagtgcctgggttttcgcag

SEQ ID NO: 2453878 - DNA, 25 bp, Homo sapien
tgagtgcctgggttttcgcaggatt

SEQ ID NO: 2453879 - DNA, 25 bp, Homo sapien
cctgggttttcgcaggattgctgag

SEQ ID NO: 2453880 - DNA, 25 bp, Homo sapien
gctgtgagaacccacaagctgctaa

SEQ ID NO: 2453881 - DNA, 25 bp, Homo sapien
ctgtgagaacccacaagctgctaac

SEQ ID NO: 2453882 - DNA, 25 bp, Homo sapien
tgtgagaacccacaagctgctaact

SEQ ID NO: 2453883 - DNA, 25 bp, Homo sapien
agctgtgagaacccacaagctgcta

SEQ ID NO: 2453884 - DNA, 25 bp, Homo sapien
tagtgtggccgaatggaattgggag

SEQ ID NO: 2453885 - DNA, 25 bp, Homo sapien
gagatgtagtgtggccgaatggaat

SEQ ID NO: 2453886 - DNA, 25 bp, Homo sapien
tgtagtgtggccgaatggaattggg

SEQ ID NO: 2453887 - DNA, 25 bp, Homo sapien
tggaattgggagtggaggtaaaagc

SEQ ID NO: 2453888 - DNA, 25 bp, Homo sapien
tttgctatagatggcacaacaaagg

SEQ ID NO: 2453889 - DNA, 25 bp, Homo sapien
ggtgcacttggctgaagacataggg

SEQ ID NO: 2453890 - DNA, 25 bp, Homo sapien
ctttttgctatagatggcacaacaa

SEQ ID NO: 2453891 - DNA, 25 bp, Homo sapien
ctatagatggcacaacaaaggtgct

SEQ ID NO: 2453892 - DNA, 25 bp, Homo sapien
gactcccagccgttgggaaacatga

SEQ ID NO: 2453893 - DNA, 25 bp, Homo sapien
atttctgactcccagccgttgggaa

SEQ ID NO: 2453894 - DNA, 25 bp, Homo sapien
ttgggaaacatgaggacatggccag

SEQ ID NO: 2453895 - DNA, 25 bp, Homo sapien
ccagccgttgggaaacatgaggaca

SEQ ID NO: 2453896 - DNA, 25 bp, Homo sapien
agggccaaaatataccaacttcagt

SEQ ID NO: 2453897 - DNA, 25 bp, Homo sapien
cagggccaaaatataccaacttcag

SEQ ID NO: 2453898 - DNA, 25 bp, Homo sapien
tcaggacttctagcccctatgctaa

SEQ ID NO: 2453899 - DNA, 25 bp, Homo sapien
cctcaggacttctagcccctatgct

SEQ ID NO: 2453900 - DNA, 25 bp, Homo sapien
gacttctagcccctatgctaaccag

SEQ ID NO: 2453901 - DNA, 25 bp, Homo sapien
ttccctcaggacttctagcccctat

SEQ ID NO: 2453902 - DNA, 25 bp, Homo sapien
tgccgaaaaatttgtcccaagtgct

SEQ ID NO: 2453903 - DNA, 25 bp, Homo sapien
gggtaaaccaataacatgctccagt

SEQ ID NO: 2453904 - DNA, 25 bp, Homo sapien
tcaagtaagataactatgggtaaac

SEQ ID NO: 2453905 - DNA, 25 bp, Homo sapien
gacagtctgttatcaaatagccttg

SEQ ID NO: 2453906 - DNA, 25 bp, Homo sapien
cttctgagtaatattccaggagtcc

SEQ ID NO: 2453907 - DNA, 25 bp, Homo sapien
taacttctgagtaatattccaggag

SEQ ID NO: 2453908 - DNA, 25 bp, Homo sapien
tgagtaatattccaggagtccatct

SEQ ID NO: 2453909 - DNA, 25 bp, Homo sapien
tttttaacttctgagtaatattcca

SEQ ID NO: 2453910 - DNA, 25 bp, Homo sapien
cttctctttcccctgacaggcttcc

SEQ ID NO: 2453911 - DNA, 25 bp, Homo sapien
aaggggaaatatggatggtagattt

SEQ ID NO: 2453912 - DNA, 25 bp, Homo sapien
ttcctggagaaaggggaaatatgga

SEQ ID NO: 2453913 - DNA, 25 bp, Homo sapien
atttcctggagaaaggggaaatatg

SEQ ID NO: 2453914 - DNA, 25 bp, Homo sapien
gagaaaggggaaatatggatggtag

SEQ ID NO: 2453915 - DNA, 25 bp, Homo sapien
gcagtagacaccggagcactgctgc

SEQ ID NO: 2453916 - DNA, 25 bp, Homo sapien
gggaatggtactgaggcataacacc

SEQ ID NO: 2453917 - DNA, 25 bp, Homo sapien
ggccctggcttgcagcctcctggat

SEQ ID NO: 2453918 - DNA, 25 bp, Homo sapien
tactgaggcataacaccaatgaatt

SEQ ID NO: 2453919 - DNA, 25 bp, Homo sapien
caccaatgaatttcaggccctggct

SEQ ID NO: 2453920 - DNA, 25 bp, Homo sapien
ttgtcctaagatccctggcagggct

SEQ ID NO: 2453921 - DNA, 25 bp, Homo sapien
gaagagtttgttctacccttctcaa

SEQ ID NO: 2453922 - DNA, 25 bp, Homo sapien
tatactcagtttgaggaaccacagc

SEQ ID NO: 2453923 - DNA, 25 bp, Homo sapien
gggataactgaggtactctgaagag

SEQ ID NO: 2453924 - DNA, 25 bp, Homo sapien
aatagcagtctgtggagaggcctac

SEQ ID NO: 2453925 - DNA, 25 bp, Homo sapien
cacatggtctgctagaactttgcca

SEQ ID NO: 2453926 - DNA, 25 bp, Homo sapien
tcaagagttggaacccatgtcccct

SEQ ID NO: 2453927 - DNA, 25 bp, Homo sapien
gaaatggagattaggtgcctctgcc

SEQ ID NO: 2453928 - DNA, 25 bp, Homo sapien
tagatcctttatacatgagcgactg

SEQ ID NO: 2453929 - DNA, 25 bp, Homo sapien
atctggctcccggtctatgggcctt

SEQ ID NO: 2453930 - DNA, 25 bp, Homo sapien
gatcctttatacatgagcgactgct

SEQ ID NO: 2453931 - DNA, 25 bp, Homo sapien
gctcccggtctatgggccttagatc

SEQ ID NO: 2453932 - DNA, 25 bp, Homo sapien
ggtctaaggaggaacagcaatctaa

SEQ ID NO: 2453933 - DNA, 25 bp, Homo sapien
tctaaggaggaacagcaatctaatt

SEQ ID NO: 2453934 - DNA, 25 bp, Homo sapien
gtggtctaaggaggaacagcaatct

SEQ ID NO: 2453935 - DNA, 25 bp, Homo sapien
taaggaggaacagcaatctaattcc

SEQ ID NO: 2453936 - DNA, 25 bp, Homo sapien
ttcaaaactgtgcgcattcaggaga

SEQ ID NO: 2453937 - DNA, 25 bp, Homo sapien
gttcaaaactgtgcgcattcaggag

SEQ ID NO: 2453938 - DNA, 25 bp, Homo sapien
gccaagccatgaagtcagcactctg

SEQ ID NO: 2453939 - DNA, 25 bp, Homo sapien
tgaggacagatgctggctgccaagc

SEQ ID NO: 2453940 - DNA, 25 bp, Homo sapien
aagtcagcactctgtgatggtgcag

SEQ ID NO: 2453941 - DNA, 25 bp, Homo sapien
gcagctgtggcctcatagaagaaga

SEQ ID NO: 2453942 - DNA, 25 bp, Homo sapien
tagatgagtaatataaactcttgta

SEQ ID NO: 2453943 - DNA, 25 bp, Homo sapien
atagatgagtaatataaactcttgt

SEQ ID NO: 2453944 - DNA, 25 bp, Homo sapien
gatgagtaatataaactcttgtatt

SEQ ID NO: 2453945 - DNA, 25 bp, Homo sapien
agatgagtaatataaactcttgtat

SEQ ID NO: 2453946 - DNA, 25 bp, Homo sapien
tcccaatgggttcactgttagaaac

SEQ ID NO: 2453947 - DNA, 25 bp, Homo sapien
cttcccaatgggttcactgttagaa

SEQ ID NO: 2453948 - DNA, 25 bp, Homo sapien
caatgggttcactgttagaaacagc

SEQ ID NO: 2453949 - DNA, 25 bp, Homo sapien
cccaatgggttcactgttagaaaca

SEQ ID NO: 2453950 - DNA, 25 bp, Homo sapien
gagtgaaatgttcattaaggtcatc

SEQ ID NO: 2453951 - DNA, 25 bp, Homo sapien
caggagtgaaatgttcattaaggtc

SEQ ID NO: 2453952 - DNA, 25 bp, Homo sapien
aaatgttcattaaggtcatcaggca

SEQ ID NO: 2453953 - DNA, 25 bp, Homo sapien
gtccaggagtgaaatgttcattaag

SEQ ID NO: 2453954 - DNA, 25 bp, Homo sapien
aggggtgtcttctcctgtccatggg

SEQ ID NO: 2453955 - DNA, 25 bp, Homo sapien
ccctaaagatatgctccaggggtgt

SEQ ID NO: 2453956 - DNA, 25 bp, Homo sapien
cttgatgaggatggccctaaagata

SEQ ID NO: 2453957 - DNA, 25 bp, Homo sapien
caggggtgtcttctcctgtccatgg

SEQ ID NO: 2453958 - DNA, 25 bp, Homo sapien
cacagggaggtcagccttactgttg

SEQ ID NO: 2453959 - DNA, 25 bp, Homo sapien
cagagagaagccctgttggtacagc

SEQ ID NO: 2453960 - DNA, 25 bp, Homo sapien
tcagccttactgttgaggatccagg

SEQ ID NO: 2453961 - DNA, 25 bp, Homo sapien
caggagttgggtgggcaggtcacac

SEQ ID NO: 2453962 - DNA, 25 bp, Homo sapien
cactaatgattggattctggccagg

SEQ ID NO: 2453963 - DNA, 25 bp, Homo sapien
tccaaatcacccaaagacactaatg

SEQ ID NO: 2453964 - DNA, 25 bp, Homo sapien
ggaggcctaggaagacgcatcgctt

SEQ ID NO: 2453965 - DNA, 25 bp, Homo sapien
caaacgtacttcataagcagactgt

SEQ ID NO: 2453966 - DNA, 25 bp, Homo sapien
atttatttccatagaggaaatacat

SEQ ID NO: 2453967 - DNA, 25 bp, Homo sapien
ctcctagacatttatttccatagag

SEQ ID NO: 2453968 - DNA, 25 bp, Homo sapien
gacatttatttccatagaggaaata

SEQ ID NO: 2453969 - DNA, 25 bp, Homo sapien
agacatttatttccatagaggaaat

SEQ ID NO: 2453970 - DNA, 25 bp, Homo sapien
gagtcaaatcaccaggatgccgatt

SEQ ID NO: 2453971 - DNA, 25 bp, Homo sapien
ccaggatgccgattttagtgattta

SEQ ID NO: 2453972 - DNA, 25 bp, Homo sapien
aatcaccaggatgccgattttagtg

SEQ ID NO: 2453973 - DNA, 25 bp, Homo sapien
gaagagtcaaatcaccaggatgccg

SEQ ID NO: 2453974 - DNA, 25 bp, Homo sapien
actgtatcccaatataagcttgatc

SEQ ID NO: 2453975 - DNA, 25 bp, Homo sapien
gcatgctttgatccgaaactaggta

SEQ ID NO: 2453976 - DNA, 25 bp, Homo sapien
tttgatccgaaactaggtacatgtc

SEQ ID NO: 2453977 - DNA, 25 bp, Homo sapien
atataagcttgatcagcatgctttg

SEQ ID NO: 2453978 - DNA, 25 bp, Homo sapien
caggtacaagagtcatcataaggcc

SEQ ID NO: 2453979 - DNA, 25 bp, Homo sapien
aatgatggtgccagacgtatgtcac

SEQ ID NO: 2453980 - DNA, 25 bp, Homo sapien
cacacaggtgcttggcaaaggcaaa

SEQ ID NO: 2453981 - DNA, 25 bp, Homo sapien
tacagcagcatccagtctgaagagt

SEQ ID NO: 2453982 - DNA, 25 bp, Homo sapien
cttgttcatctctcttggtattcca

SEQ ID NO: 2453983 - DNA, 25 bp, Homo sapien
taaacttgcatctgatcatgatgtg

SEQ ID NO: 2453984 - DNA, 25 bp, Homo sapien
aaatctgcgtccaatgaaaagagac

SEQ ID NO: 2453985 - DNA, 25 bp, Homo sapien
cctgacattaaacttgcatctgatc

SEQ ID NO: 2453986 - DNA, 25 bp, Homo sapien
tgggctgtgtaccaaggaattaaca

SEQ ID NO: 2453987 - DNA, 25 bp, Homo sapien
tggccacggtgctgaactctttggt

SEQ ID NO: 2453988 - DNA, 25 bp, Homo sapien
tgtaccaaggaattaacaggcccac

SEQ ID NO: 2453989 - DNA, 25 bp, Homo sapien
tctgatttgggctgtgtaccaagga

SEQ ID NO: 2453990 - DNA, 25 bp, Homo sapien
atgtcttcctgggttggcaaggggc

SEQ ID NO: 2453991 - DNA, 25 bp, Homo sapien
tcttcctgggttggcaaggggcaca

SEQ ID NO: 2453992 - DNA, 25 bp, Homo sapien
cctgggttggcaaggggcacatgct

SEQ ID NO: 2453993 - DNA, 25 bp, Homo sapien
ctgggttggcaaggggcacatgctc

SEQ ID NO: 2453994 - DNA, 25 bp, Homo sapien
gattggtatggtctgataagcactt

SEQ ID NO: 2453995 - DNA, 25 bp, Homo sapien
tgaattattttgtggctagtaaggg

SEQ ID NO: 2453996 - DNA, 25 bp, Homo sapien
aattatcttatgattggtatggtct

SEQ ID NO: 2453997 - DNA, 25 bp, Homo sapien
ttggtatggtctgataagcacttaa

SEQ ID NO: 2453998 - DNA, 25 bp, Homo sapien
gaattattttatgtttataaggaga

SEQ ID NO: 2453999 - DNA, 25 bp, Homo sapien
aattattttatgtttataaggagag

SEQ ID NO: 2454000 - DNA, 25 bp, Homo sapien
attttatgtttataaggagagataa

SEQ ID NO: 2454001 - DNA, 25 bp, Homo sapien
ttattttatgtttataaggagagat

SEQ ID NO: 2454002 - DNA, 25 bp, Homo sapien
ccatgttcattgtatttgtagagtt

SEQ ID NO: 2454003 - DNA, 25 bp, Homo sapien
tccatgttcattgtatttgtagagt

SEQ ID NO: 2454004 - DNA, 25 bp, Homo sapien
ccacttataggctttattacattct

SEQ ID NO: 2454005 - DNA, 25 bp, Homo sapien
gtctgagaaccacttataggcttta

SEQ ID NO: 2454006 - DNA, 25 bp, Homo sapien
actatcgattggctttgttacattc

SEQ ID NO: 2454007 - DNA, 25 bp, Homo sapien
gaagttctgagaactatcgattggc

SEQ ID NO: 2454008 - DNA, 25 bp, Homo sapien
tctgagaactatcgattggctttgt

SEQ ID NO: 2454009 - DNA, 25 bp, Homo sapien
tgttcatgaagttctgagaactatc

SEQ ID NO: 2454010 - DNA, 25 bp, Homo sapien
ctatgaaggtcatatcttccatatt

SEQ ID NO: 2454011 - DNA, 25 bp, Homo sapien
aactatgaaggtcatatcttccata

SEQ ID NO: 2454012 - DNA, 25 bp, Homo sapien
ttaaactatgaaggtcatatcttcc

SEQ ID NO: 2454013 - DNA, 25 bp, Homo sapien
taggttggcaggttttgctgtgggt

SEQ ID NO: 2454014 - DNA, 25 bp, Homo sapien
gatatgtcgatgtatattcggtggc

SEQ ID NO: 2454015 - DNA, 25 bp, Homo sapien
tgggccaaagatatgtcgatgtata

SEQ ID NO: 2454016 - DNA, 25 bp, Homo sapien
ataatgggccaaagatatgtcgatg

SEQ ID NO: 2454017 - DNA, 25 bp, Homo sapien
gatgtatattcggtggctctgtcat

SEQ ID NO: 2454018 - DNA, 25 bp, Homo sapien
attatcttatgtccaatgagctgtg

SEQ ID NO: 2454019 - DNA, 25 bp, Homo sapien
gaggagcatgtaaatgtttgccacg

SEQ ID NO: 2454020 - DNA, 25 bp, Homo sapien
ggttgaggagcatgtaaatgtttgc

SEQ ID NO: 2454021 - DNA, 25 bp, Homo sapien
catgtaaatgtttgccacgttcttt

SEQ ID NO: 2454022 - DNA, 25 bp, Homo sapien
gagcatgtaaatgtttgccacgttc

SEQ ID NO: 2454023 - DNA, 25 bp, Homo sapien
ttttatgttcagtaaggcttgaaaa

SEQ ID NO: 2454024 - DNA, 25 bp, Homo sapien
cttttatgttcagtaaggcttgaaa

SEQ ID NO: 2454025 - DNA, 25 bp, Homo sapien
gtaggattatttgcaatatgaatta

SEQ ID NO: 2454026 - DNA, 25 bp, Homo sapien
ttgtaggattatttgcaatatgaat

SEQ ID NO: 2454027 - DNA, 25 bp, Homo sapien
ggattatttgcaatatgaattatct

SEQ ID NO: 2454028 - DNA, 25 bp, Homo sapien
tttgtaggattatttgcaatatgaa

SEQ ID NO: 2454029 - DNA, 25 bp, Homo sapien
cattcttcacatttgtagcatttct

SEQ ID NO: 2454030 - DNA, 25 bp, Homo sapien
ctacagtctttgccacattcttcac

SEQ ID NO: 2454031 - DNA, 25 bp, Homo sapien
cttcacatttgtagcatttctctcc

SEQ ID NO: 2454032 - DNA, 25 bp, Homo sapien
ttcttcacatttgtagcatttctct

SEQ ID NO: 2454033 - DNA, 25 bp, Homo sapien
tttcttttgtggtctgtcaatatct

SEQ ID NO: 2454034 - DNA, 25 bp, Homo sapien
tgaaaatcagtaaagtcacagcttt

SEQ ID NO: 2454035 - DNA, 25 bp, Homo sapien
ttcttttgtggtctgtcaatatctc

SEQ ID NO: 2454036 - DNA, 25 bp, Homo sapien
tcttttgtggtctgtcaatatctct

SEQ ID NO: 2454037 - DNA, 25 bp, Homo sapien
aaataaactggtggcacttatgtcc

SEQ ID NO: 2454038 - DNA, 25 bp, Homo sapien
taaataaactggtggcacttatgtc

SEQ ID NO: 2454039 - DNA, 25 bp, Homo sapien
ataaactggtggcacttatgtccat

SEQ ID NO: 2454040 - DNA, 25 bp, Homo sapien
aataaactggtggcacttatgtcca

SEQ ID NO: 2454041 - DNA, 25 bp, Homo sapien
cttcacatttgtaagctctcttcca

SEQ ID NO: 2454042 - DNA, 25 bp, Homo sapien
tacacagatgtaaggtttctctaca

SEQ ID NO: 2454043 - DNA, 25 bp, Homo sapien
tttgccacatctacacagatgtaag

SEQ ID NO: 2454044 - DNA, 25 bp, Homo sapien
tcttccatatgaatacttttgttgt

SEQ ID NO: 2454045 - DNA, 25 bp, Homo sapien
aagtctttctacagtgcaatttctc

SEQ ID NO: 2454046 - DNA, 25 bp, Homo sapien
gcatttgtcaagtctttctacagtg

SEQ ID NO: 2454047 - DNA, 25 bp, Homo sapien
gaagcatctaaaggcattgctacat

SEQ ID NO: 2454048 - DNA, 25 bp, Homo sapien
tgtcaagtctttctacagtgcaatt

SEQ ID NO: 2454049 - DNA, 25 bp, Homo sapien
taaggtttgagaaatttttattgca

SEQ ID NO: 2454050 - DNA, 25 bp, Homo sapien
gtttgagaaatttttattgcatttg

SEQ ID NO: 2454051 - DNA, 25 bp, Homo sapien
tgagaaatttttattgcatttgcca

SEQ ID NO: 2454052 - DNA, 25 bp, Homo sapien
aggtttgagaaatttttattgcatt

SEQ ID NO: 2454053 - DNA, 25 bp, Homo sapien
catatgtattacattgacagggttt

SEQ ID NO: 2454054 - DNA, 25 bp, Homo sapien
cagggtttgctatgggtagttgaca

SEQ ID NO: 2454055 - DNA, 25 bp, Homo sapien
ggtttgctatgggtagttgacaaac

SEQ ID NO: 2454056 - DNA, 25 bp, Homo sapien
tatgtattacattgacagggtttgc

SEQ ID NO: 2454057 - DNA, 25 bp, Homo sapien
cactgtaatcagtgttcaggcggga

SEQ ID NO: 2454058 - DNA, 25 bp, Homo sapien
ccagcaatatgttatgatctcttct

SEQ ID NO: 2454059 - DNA, 25 bp, Homo sapien
agcaatatgttatgatctcttctga

SEQ ID NO: 2454060 - DNA, 25 bp, Homo sapien
atccagcaatatgttatgatctctt

SEQ ID NO: 2454061 - DNA, 25 bp, Homo sapien
cattattcagcctttgatctggcct

SEQ ID NO: 2454062 - DNA, 25 bp, Homo sapien
gcctcacatatatgctgcaatgcct

SEQ ID NO: 2454063 - DNA, 25 bp, Homo sapien
ttgatctggcctcacatatatgctg

SEQ ID NO: 2454064 - DNA, 25 bp, Homo sapien
tcagcctttgatctggcctcacata

SEQ ID NO: 2454065 - DNA, 25 bp, Homo sapien
agatgtcacaatccatcttctgggc

SEQ ID NO: 2454066 - DNA, 25 bp, Homo sapien
gtgagatgtcacaatccatcttctg

SEQ ID NO: 2454067 - DNA, 25 bp, Homo sapien
gagatgtcacaatccatcttctggg

SEQ ID NO: 2454068 - DNA, 25 bp, Homo sapien
ccagtgagatgtcacaatccatctt

SEQ ID NO: 2454069 - DNA, 25 bp, Homo sapien
tgcttaggtgcaacagaactgtctg

SEQ ID NO: 2454070 - DNA, 25 bp, Homo sapien
tctgtccccagatgatgttaccctt

SEQ ID NO: 2454071 - DNA, 25 bp, Homo sapien
tagtggttagctcatgcggtcttca

SEQ ID NO: 2454072 - DNA, 25 bp, Homo sapien
tattgctaagcccaacacctaggtg

SEQ ID NO: 2454073 - DNA, 25 bp, Homo sapien
catttgttagatatcccagcatgag

SEQ ID NO: 2454074 - DNA, 25 bp, Homo sapien
gagaacaacctataggctacattcc

SEQ ID NO: 2454075 - DNA, 25 bp, Homo sapien
catgagctctcttatattcagtaac

SEQ ID NO: 2454076 - DNA, 25 bp, Homo sapien
gaagcaactatagtcttcatcacat

SEQ ID NO: 2454077 - DNA, 25 bp, Homo sapien
tgagaacaacctacagtctttgcca

SEQ ID NO: 2454078 - DNA, 25 bp, Homo sapien
aacaacctacagtctttgccacatt

SEQ ID NO: 2454079 - DNA, 25 bp, Homo sapien
ctgtatagtaatatctgagaacaac

SEQ ID NO: 2454080 - DNA, 25 bp, Homo sapien
gagaacaacctacagtctttgccac

SEQ ID NO: 2454081 - DNA, 25 bp, Homo sapien
atcttatatgtcatgctccagcaat

SEQ ID NO: 2454082 - DNA, 25 bp, Homo sapien
gaatcttatatgtcatgctccagca

SEQ ID NO: 2454083 - DNA, 25 bp, Homo sapien
ttatatgtcatgctccagcaatatc

SEQ ID NO: 2454084 - DNA, 25 bp, Homo sapien
aatcttatatgtcatgctccagcaa

SEQ ID NO: 2454085 - DNA, 25 bp, Homo sapien
ctttaccgtggtacatgtccgacat

SEQ ID NO: 2454086 - DNA, 25 bp, Homo sapien
cctttaccgtggtacatgtccgaca

SEQ ID NO: 2454087 - DNA, 25 bp, Homo sapien
tccctttaccgtggtacatgtccga

SEQ ID NO: 2454088 - DNA, 25 bp, Homo sapien
gcaggcaagttgtaggagatggaga

SEQ ID NO: 2454089 - DNA, 25 bp, Homo sapien
gttgtaggagatggagatagggtgc

SEQ ID NO: 2454090 - DNA, 25 bp, Homo sapien
caggcaagttgtaggagatggagat

SEQ ID NO: 2454091 - DNA, 25 bp, Homo sapien
caagttgtaggagatggagataggg

SEQ ID NO: 2454092 - DNA, 25 bp, Homo sapien
gaaaaatcaaaatccattgagtctc

SEQ ID NO: 2454093 - DNA, 25 bp, Homo sapien
gagtctccatcaataagctcatagg

SEQ ID NO: 2454094 - DNA, 25 bp, Homo sapien
gcagtggaaacactgctggccctgt

SEQ ID NO: 2454095 - DNA, 25 bp, Homo sapien
gccctgtcctggtgaaggacagaaa

SEQ ID NO: 2454096 - DNA, 25 bp, Homo sapien
tcccagagggcataactgagaagtc

SEQ ID NO: 2454097 - DNA, 25 bp, Homo sapien
cccagagggcataactgagaagtca

SEQ ID NO: 2454098 - DNA, 25 bp, Homo sapien
tctaccagggcatcttcgatttctg

SEQ ID NO: 2454099 - DNA, 25 bp, Homo sapien
taacatactcgctggtggtccttca

SEQ ID NO: 2454100 - DNA, 25 bp, Homo sapien
gcccggcctggacgaggctatctac

SEQ ID NO: 2454101 - DNA, 25 bp, Homo sapien
tgcccgcggctgaggtggaatcttt

SEQ ID NO: 2454102 - DNA, 25 bp, Homo sapien
cccaggccagaggcatacggggtca

SEQ ID NO: 2454103 - DNA, 25 bp, Homo sapien
ggcatacggggtcagccagaaggca

SEQ ID NO: 2454104 - DNA, 25 bp, Homo sapien
cagaggcatacggggtcagccagaa

SEQ ID NO: 2454105 - DNA, 25 bp, Homo sapien
caggccagaggcatacggggtcagc

SEQ ID NO: 2454106 - DNA, 25 bp, Homo sapien
tagtaaggcaggttgcttgcgggtg

SEQ ID NO: 2454107 - DNA, 25 bp, Homo sapien
tcgatagtaaggcaggttgcttgcg

SEQ ID NO: 2454108 - DNA, 25 bp, Homo sapien
gtaaggcaggttgcttgcgggtgcc

SEQ ID NO: 2454109 - DNA, 25 bp, Homo sapien
ctgtcgatagtaaggcaggttgctt

SEQ ID NO: 2454110 - DNA, 25 bp, Homo sapien
atagcggcgccaaggacccttcacg

SEQ ID NO: 2454111 - DNA, 25 bp, Homo sapien
atgccagccagtgaaccactcccac

SEQ ID NO: 2454112 - DNA, 25 bp, Homo sapien
gcagaaagttgaagggcacgttttc

SEQ ID NO: 2454113 - DNA, 25 bp, Homo sapien
aaggaagaatagcggcgccaaggac

SEQ ID NO: 2454114 - DNA, 25 bp, Homo sapien
agaaacaaggtgctcaaggtgggtt

SEQ ID NO: 2454115 - DNA, 25 bp, Homo sapien
aacaaggtgctcaaggtgggttcct

SEQ ID NO: 2454116 - DNA, 25 bp, Homo sapien
tgggttcctgttgtactgggctgct

SEQ ID NO: 2454117 - DNA, 25 bp, Homo sapien
tgctcaaggtgggttcctgttgtac

SEQ ID NO: 2454118 - DNA, 25 bp, Homo sapien
tatataacctccgttgcgcacacgc

SEQ ID NO: 2454119 - DNA, 25 bp, Homo sapien
cgctgcacccaaagagctgtaggcc

SEQ ID NO: 2454120 - DNA, 25 bp, Homo sapien
ctgagcatatataacctccgttgcg

SEQ ID NO: 2454121 - DNA, 25 bp, Homo sapien
tgcctcgctgcacccaaagagctgt

SEQ ID NO: 2454122 - DNA, 25 bp, Homo sapien
gccacgtgcagctcaggaactctga

SEQ ID NO: 2454123 - DNA, 25 bp, Homo sapien
cggacagaaacaagaccaccagtgg

SEQ ID NO: 2454124 - DNA, 25 bp, Homo sapien
gacgctctcagcaaagactgtccag

SEQ ID NO: 2454125 - DNA, 25 bp, Homo sapien
tgtgctccccgctctttgttggcag

SEQ ID NO: 2454126 - DNA, 25 bp, Homo sapien
agattatgccgcacacccagatgtc

SEQ ID NO: 2454127 - DNA, 25 bp, Homo sapien
gtcggccgggttcagaaaccatgag

SEQ ID NO: 2454128 - DNA, 25 bp, Homo sapien
ctgaccagaggcagattatgccgca

SEQ ID NO: 2454129 - DNA, 25 bp, Homo sapien
ggccgggttcagaaaccatgaggaa

SEQ ID NO: 2454130 - DNA, 25 bp, Homo sapien
caggtggaggaactcggccatccca

SEQ ID NO: 2454131 - DNA, 25 bp, Homo sapien
cccaggtaccggcagcaggatgatt

SEQ ID NO: 2454132 - DNA, 25 bp, Homo sapien
taaggagaatcgcattggcatcctc

SEQ ID NO: 2454133 - DNA, 25 bp, Homo sapien
tgaagtaatcgttaaggagaatcgc

SEQ ID NO: 2454134 - DNA, 25 bp, Homo sapien
gctttggtaatccagcttcagaacc

SEQ ID NO: 2454135 - DNA, 25 bp, Homo sapien
gccgccggctttggtaatccagctt

SEQ ID NO: 2454136 - DNA, 25 bp, Homo sapien
ccggctttggtaatccagcttcaga

SEQ ID NO: 2454137 - DNA, 25 bp, Homo sapien
gagctggcaagcaggtcgccgccgg

SEQ ID NO: 2454138 - DNA, 25 bp, Homo sapien
tttgggattcgctgtgcggaaatct

SEQ ID NO: 2454139 - DNA, 25 bp, Homo sapien
ctagagagtgtccggcccatgagag

SEQ ID NO: 2454140 - DNA, 25 bp, Homo sapien
gcactagagagtgtccggcccatga

SEQ ID NO: 2454141 - DNA, 25 bp, Homo sapien
ttgggattcgctgtgcggaaatctc

SEQ ID NO: 2454142 - DNA, 25 bp, Homo sapien
ccccatcatctcctgtagatgccac

SEQ ID NO: 2454143 - DNA, 25 bp, Homo sapien
tcagatcgactttccccatcatctc

SEQ ID NO: 2454144 - DNA, 25 bp, Homo sapien
catctcctgtagatgccacatatct

SEQ ID NO: 2454145 - DNA, 25 bp, Homo sapien
gcttcggtctcctttttcagatcga

SEQ ID NO: 2454146 - DNA, 25 bp, Homo sapien
tgccaatgtgctcacgaccacagga

SEQ ID NO: 2454147 - DNA, 25 bp, Homo sapien
ctgccaatgtgctcacgaccacagg

SEQ ID NO: 2454148 - DNA, 25 bp, Homo sapien
tctgccaatgtgctcacgaccacag

SEQ ID NO: 2454149 - DNA, 25 bp, Homo sapien
gatctctaccacaagcctcaccata

SEQ ID NO: 2454150 - DNA, 25 bp, Homo sapien
tccaccttggtgttcagaatgatct

SEQ ID NO: 2454151 - DNA, 25 bp, Homo sapien
tgtaagaacttccaccttggtgttc

SEQ ID NO: 2454152 - DNA, 25 bp, Homo sapien
agaacttccaccttggtgttcagaa

SEQ ID NO: 2454153 - DNA, 25 bp, Homo sapien
acaagtacgtttagattggcacacc

SEQ ID NO: 2454154 - DNA, 25 bp, Homo sapien
agtacgtttagattggcacaccggg

SEQ ID NO: 2454155 - DNA, 25 bp, Homo sapien
agaaactgaacaagtacgtttagat

SEQ ID NO: 2454156 - DNA, 25 bp, Homo sapien
actgaacaagtacgtttagattggc

SEQ ID NO: 2454157 - DNA, 25 bp, Homo sapien
acttttattgcttttccatccaaag

SEQ ID NO: 2454158 - DNA, 25 bp, Homo sapien
actttgaaaagatggtttcttggct

SEQ ID NO: 2454159 - DNA, 25 bp, Homo sapien
caccactttgaaaagatggtttctt

SEQ ID NO: 2454160 - DNA, 25 bp, Homo sapien
ttcttggcttgttctacttttattg

SEQ ID NO: 2454161 - DNA, 25 bp, Homo sapien
ccaaaatattttccccagatttgtg

SEQ ID NO: 2454162 - DNA, 25 bp, Homo sapien
aaaatattttccccagatttgtgca

SEQ ID NO: 2454163 - DNA, 25 bp, Homo sapien
aaatattttccccagatttgtgcat

SEQ ID NO: 2454164 - DNA, 25 bp, Homo sapien
cttgaaacttcttttgttatttctg

SEQ ID NO: 2454165 - DNA, 25 bp, Homo sapien
aatgcaaagtctctggacttgctct

SEQ ID NO: 2454166 - DNA, 25 bp, Homo sapien
ataataaatgcaaagtctctggact

SEQ ID NO: 2454167 - DNA, 25 bp, Homo sapien
aagtctctggacttgctctttgatc

SEQ ID NO: 2454168 - DNA, 25 bp, Homo sapien
gaaataataaatgcaaagtctctgg

SEQ ID NO: 2454169 - DNA, 25 bp, Homo sapien
tttccaatatggtaccatgtttccc

SEQ ID NO: 2454170 - DNA, 25 bp, Homo sapien
aagcttgttggatgatctgcttcta

SEQ ID NO: 2454171 - DNA, 25 bp, Homo sapien
gcttgttggatgatctgcttctacc

SEQ ID NO: 2454172 - DNA, 25 bp, Homo sapien
ttgttggatgatctgcttctaccat

SEQ ID NO: 2454173 - DNA, 25 bp, Homo sapien
aaaagcttgttggatgatctgcttc

SEQ ID NO: 2454174 - DNA, 25 bp, Homo sapien
gaggtgggccaatcatttcgagggc

SEQ ID NO: 2454175 - DNA, 25 bp, Homo sapien
ctgccaatcattgcgagggcgctgg

SEQ ID NO: 2454176 - DNA, 25 bp, Homo sapien
ggcggttggtgtctcccctgtcgcc

SEQ ID NO: 2454177 - DNA, 25 bp, Homo sapien
cagctgccaatcattgcgagggcgc

SEQ ID NO: 2454178 - DNA, 25 bp, Homo sapien
agcagcacaaacgacgcttcacgca

SEQ ID NO: 2454179 - DNA, 25 bp, Homo sapien
aacagcagcacaaacgacgcttcac

SEQ ID NO: 2454180 - DNA, 25 bp, Homo sapien
ggtgtctgcgtccaacaggctcacc

SEQ ID NO: 2454181 - DNA, 25 bp, Homo sapien
agccatggaaccacgctcccggtgt

SEQ ID NO: 2454182 - DNA, 25 bp, Homo sapien
cccaggttctggaaggattgctgaa

SEQ ID NO: 2454183 - DNA, 25 bp, Homo sapien
catggctacccaggttctggaagga

SEQ ID NO: 2454184 - DNA, 25 bp, Homo sapien
tacccaggttctggaaggattgctg

SEQ ID NO: 2454185 - DNA, 25 bp, Homo sapien
gctacccaggttctggaaggattgc

SEQ ID NO: 2454186 - DNA, 25 bp, Homo sapien
caagtgctaagagctgaatgggagt

SEQ ID NO: 2454187 - DNA, 25 bp, Homo sapien
cagggtgcctcaggtccagaatcaa

SEQ ID NO: 2454188 - DNA, 25 bp, Homo sapien
aggagtagtaatgccagggcatttc

SEQ ID NO: 2454189 - DNA, 25 bp, Homo sapien
ttcagatagcccaagtgctaagagc

SEQ ID NO: 2454190 - DNA, 25 bp, Homo sapien
tagcaccggggcaagagactgcgga

SEQ ID NO: 2454191 - DNA, 25 bp, Homo sapien
caatgagagacttagcaccggggca

SEQ ID NO: 2454192 - DNA, 25 bp, Homo sapien
accgaggcttagctgccttgccgcg

SEQ ID NO: 2454193 - DNA, 25 bp, Homo sapien
ggctcgcgaccagcagcctgccatg

SEQ ID NO: 2454194 - DNA, 25 bp, Homo sapien
aaggtttgtgagtgcaccaatcgac

SEQ ID NO: 2454195 - DNA, 25 bp, Homo sapien
cagggattgtgaatacaccaattgg

SEQ ID NO: 2454196 - DNA, 25 bp, Homo sapien
tcagcaacctgtgtttagctcaagg

SEQ ID NO: 2454197 - DNA, 25 bp, Homo sapien
tctagctgctctggtagggccttgg

SEQ ID NO: 2454198 - DNA, 25 bp, Homo sapien
tacaaagcggtttggtgatggttta

SEQ ID NO: 2454199 - DNA, 25 bp, Homo sapien
acctgaatctgatacaaagcggttt

SEQ ID NO: 2454200 - DNA, 25 bp, Homo sapien
gaatctgatacaaagcggtttggtg

SEQ ID NO: 2454201 - DNA, 25 bp, Homo sapien
aagcggtttggtgatggtttaatca

SEQ ID NO: 2454202 - DNA, 25 bp, Homo sapien
ctcacatggactataactatgacta

SEQ ID NO: 2454203 - DNA, 25 bp, Homo sapien
atgaaaaccatcgttgtacttcaac

SEQ ID NO: 2454204 - DNA, 25 bp, Homo sapien
tgaaaaccatcgttgtacttcaact

SEQ ID NO: 2454205 - DNA, 25 bp, Homo sapien
ttattctcacatggactataactat

SEQ ID NO: 2454206 - DNA, 25 bp, Homo sapien
tttctacttcaccgtcaactcccaa

SEQ ID NO: 2454207 - DNA, 25 bp, Homo sapien
catttctacttcaccgtcaactccc

SEQ ID NO: 2454208 - DNA, 25 bp, Homo sapien
agcatttctacttcaccgtcaactc

SEQ ID NO: 2454209 - DNA, 25 bp, Homo sapien
tctacttcaccgtcaactcccaaag

SEQ ID NO: 2454210 - DNA, 25 bp, Homo sapien
tctgtgctacctattacaccacgtc

SEQ ID NO: 2454211 - DNA, 25 bp, Homo sapien
tgaacctgcacctgagaatccaaaa

SEQ ID NO: 2454212 - DNA, 25 bp, Homo sapien
atataggaattgaacctgcacctga

SEQ ID NO: 2454213 - DNA, 25 bp, Homo sapien
gaattgaacctgcacctgagaatcc

SEQ ID NO: 2454214 - DNA, 25 bp, Homo sapien
aaaatgcaaagctccatcgtactca

SEQ ID NO: 2454215 - DNA, 25 bp, Homo sapien
agctccatcgtactcataatcttca

SEQ ID NO: 2454216 - DNA, 25 bp, Homo sapien
caaagctccatcgtactcataatct

SEQ ID NO: 2454217 - DNA, 25 bp, Homo sapien
tgcaaagctccatcgtactcataat

SEQ ID NO: 2454218 - DNA, 25 bp, Homo sapien
acattagttgcatatgtaagggttt

SEQ ID NO: 2454219 - DNA, 25 bp, Homo sapien
cacattagttgcatatgtaagggtt

SEQ ID NO: 2454220 - DNA, 25 bp, Homo sapien
tatagattttgttacattcttcaca

SEQ ID NO: 2454221 - DNA, 25 bp, Homo sapien
ctatagattttgttacattcttcac

SEQ ID NO: 2454222 - DNA, 25 bp, Homo sapien
gtataaattatcttatgtttagcaa

SEQ ID NO: 2454223 - DNA, 25 bp, Homo sapien
taaattatcttatgtttagcaaggt

SEQ ID NO: 2454224 - DNA, 25 bp, Homo sapien
gcatttgtaggatttatttccagaa

SEQ ID NO: 2454225 - DNA, 25 bp, Homo sapien
tctgagaagcatttaaagacttttc

SEQ ID NO: 2454226 - DNA, 25 bp, Homo sapien
ggagcaggttaaggttttgctacat

SEQ ID NO: 2454227 - DNA, 25 bp, Homo sapien
tgaggagcaggttaaggttttgcta

SEQ ID NO: 2454228 - DNA, 25 bp, Homo sapien
ttgaggtctttttacagtctttgtc

SEQ ID NO: 2454229 - DNA, 25 bp, Homo sapien
gaggtctttttacagtctttgtcac

SEQ ID NO: 2454230 - DNA, 25 bp, Homo sapien
cttatattcaggaaggtttgaggtc

SEQ ID NO: 2454231 - DNA, 25 bp, Homo sapien
ggtctttttacagtctttgtcacat

SEQ ID NO: 2454232 - DNA, 25 bp, Homo sapien
ccagtatgtattatttgtatagtaa

SEQ ID NO: 2454233 - DNA, 25 bp, Homo sapien
agtatgtattatttgtatagtaaaa

SEQ ID NO: 2454234 - DNA, 25 bp, Homo sapien
tccagtatgtattatttgtatagta

SEQ ID NO: 2454235 - DNA, 25 bp, Homo sapien
ctccagtatgtattatttgtatagt

SEQ ID NO: 2454236 - DNA, 25 bp, Homo sapien
tttattacattgacaggctttgctc

SEQ ID NO: 2454237 - DNA, 25 bp, Homo sapien
actattaaggtcacagtttttacat

SEQ ID NO: 2454238 - DNA, 25 bp, Homo sapien
tctgtctcttgtagttattcacact

SEQ ID NO: 2454239 - DNA, 25 bp, Homo sapien
tcacactttggctgtatttctttaa

SEQ ID NO: 2454240 - DNA, 25 bp, Homo sapien
tgaaagagttgtacagtcttggagg

SEQ ID NO: 2454241 - DNA, 25 bp, Homo sapien
aaagagttgtacagtcttggaggtc

SEQ ID NO: 2454242 - DNA, 25 bp, Homo sapien
agagttgtacagtcttggaggtcca

SEQ ID NO: 2454243 - DNA, 25 bp, Homo sapien
gagttgtacagtcttggaggtccag

SEQ ID NO: 2454244 - DNA, 25 bp, Homo sapien
ctgttcctgtccgttgagtcctgcc

SEQ ID NO: 2454245 - DNA, 25 bp, Homo sapien
gtcatctgtaccagacctttctcta

SEQ ID NO: 2454246 - DNA, 25 bp, Homo sapien
ctgtaccagacctttctctacctgc

SEQ ID NO: 2454247 - DNA, 25 bp, Homo sapien
ttgcattatctcactcctgggtaag

SEQ ID NO: 2454248 - DNA, 25 bp, Homo sapien
cattatctcactcctgggtaaggtg

SEQ ID NO: 2454249 - DNA, 25 bp, Homo sapien
ttatctcactcctgggtaaggtggc

SEQ ID NO: 2454250 - DNA, 25 bp, Homo sapien
tatctcactcctgggtaaggtggca

SEQ ID NO: 2454251 - DNA, 25 bp, Homo sapien
tgagcttggcggctgggaaggaaca

SEQ ID NO: 2454252 - DNA, 25 bp, Homo sapien
tgcttcttccccgaatgcctgcctt

SEQ ID NO: 2454253 - DNA, 25 bp, Homo sapien
gctggacactgtctgatgcacaagg

SEQ ID NO: 2454254 - DNA, 25 bp, Homo sapien
gaacagcgatcccaaaaccctgtgg

SEQ ID NO: 2454255 - DNA, 25 bp, Homo sapien
gatgcacaaggattcccgaacagcg

SEQ ID NO: 2454256 - DNA, 25 bp, Homo sapien
cctgactgatggactgggtgactgt

SEQ ID NO: 2454257 - DNA, 25 bp, Homo sapien
tggaaaggggtccatgactggtcat

SEQ ID NO: 2454258 - DNA, 25 bp, Homo sapien
agacagaggccctgactgatggact

SEQ ID NO: 2454259 - DNA, 25 bp, Homo sapien
tggtagtacttcaggggattgagac

SEQ ID NO: 2454260 - DNA, 25 bp, Homo sapien
ctttcccatgacacacctcagcggt

SEQ ID NO: 2454261 - DNA, 25 bp, Homo sapien
tttcccatgacacacctcagcggtg

SEQ ID NO: 2454262 - DNA, 25 bp, Homo sapien
ccatgacacacctcagcggtgccca

SEQ ID NO: 2454263 - DNA, 25 bp, Homo sapien
tcccatgacacacctcagcggtgcc

SEQ ID NO: 2454264 - DNA, 25 bp, Homo sapien
ggaaatatgcgtgtgataaaaggaa

SEQ ID NO: 2454265 - DNA, 25 bp, Homo sapien
ttcattgtggaaatatgcgtgtgat

SEQ ID NO: 2454266 - DNA, 25 bp, Homo sapien
gtggaaatatgcgtgtgataaaagg

SEQ ID NO: 2454267 - DNA, 25 bp, Homo sapien
cattgtggaaatatgcgtgtgataa

SEQ ID NO: 2454268 - DNA, 25 bp, Homo sapien
agccacccaagcctgatctgcaaat

SEQ ID NO: 2454269 - DNA, 25 bp, Homo sapien
tgatctgcaaatcgatcatggagct

SEQ ID NO: 2454270 - DNA, 25 bp, Homo sapien
gttttctgaaccctgccgacatctg

SEQ ID NO: 2454271 - DNA, 25 bp, Homo sapien
aatcgatcatggagcttacttagca

SEQ ID NO: 2454272 - DNA, 25 bp, Homo sapien
tctgcgggagtctgccctcagatcc

SEQ ID NO: 2454273 - DNA, 25 bp, Homo sapien
gtctgccctcagatccccttgttgt

SEQ ID NO: 2454274 - DNA, 25 bp, Homo sapien
ggagtctgccctcagatccccttgt

SEQ ID NO: 2454275 - DNA, 25 bp, Homo sapien
ctatctgcgggagtctgccctcaga

SEQ ID NO: 2454276 - DNA, 25 bp, Homo sapien
tctcctctccaaagggtgactctgt

SEQ ID NO: 2454277 - DNA, 25 bp, Homo sapien
gaaggacctcaagcatatctgttgc

SEQ ID NO: 2454278 - DNA, 25 bp, Homo sapien
gactctgtgcttaataccctggctg

SEQ ID NO: 2454279 - DNA, 25 bp, Homo sapien
tgctctcagacatcccgaatgggca

SEQ ID NO: 2454280 - DNA, 25 bp, Homo sapien
ggaccccactaccaagatgactgga

SEQ ID NO: 2454281 - DNA, 25 bp, Homo sapien
ggccggctttgactgtaccattttc

SEQ ID NO: 2454282 - DNA, 25 bp, Homo sapien
ccagagtctgcctcacaaatgtgca

SEQ ID NO: 2454283 - DNA, 25 bp, Homo sapien
agggtcctgcagtaggttatcacag

SEQ ID NO: 2454284 - DNA, 25 bp, Homo sapien
gacttccgttcccagctgagctggt

SEQ ID NO: 2454285 - DNA, 25 bp, Homo sapien
tcgacttccgttcccagctgagctg

SEQ ID NO: 2454286 - DNA, 25 bp, Homo sapien
agggatcacacctgcattgtcttgg

SEQ ID NO: 2454287 - DNA, 25 bp, Homo sapien
cacttcatgagggatcacacctgca

SEQ ID NO: 2454288 - DNA, 25 bp, Homo sapien
ctgggtctggttcaatggcttttgc

SEQ ID NO: 2454289 - DNA, 25 bp, Homo sapien
tttctctgggtctggttcaatggct

SEQ ID NO: 2454290 - DNA, 25 bp, Homo sapien
tctgggtctggttcaatggcttttg

SEQ ID NO: 2454291 - DNA, 25 bp, Homo sapien
tctctgggtctggttcaatggcttt

SEQ ID NO: 2454292 - DNA, 25 bp, Homo sapien
tgggatccatgggacagtccccatg

SEQ ID NO: 2454293 - DNA, 25 bp, Homo sapien
ggatccatgggacagtccccatgga

SEQ ID NO: 2454294 - DNA, 25 bp, Homo sapien
gggatccatgggacagtccccatgg

SEQ ID NO: 2454295 - DNA, 25 bp, Homo sapien
gtgggatccatgggacagtccccat

SEQ ID NO: 2454296 - DNA, 25 bp, Homo sapien
cctttgctatggttgctccctttcc

SEQ ID NO: 2454297 - DNA, 25 bp, Homo sapien
gacttgcctttgctatggttgctcc

SEQ ID NO: 2454298 - DNA, 25 bp, Homo sapien
cttcgacttgcctttgctatggttg

SEQ ID NO: 2454299 - DNA, 25 bp, Homo sapien
ttgcctttgctatggttgctccctt

SEQ ID NO: 2454300 - DNA, 25 bp, Homo sapien
tggagatgcctttgtcacatttcct

SEQ ID NO: 2454301 - DNA, 25 bp, Homo sapien
gagatgcctttgtcacatttcctgc

SEQ ID NO: 2454302 - DNA, 25 bp, Homo sapien
ttggagatgcctttgtcacatttcc

SEQ ID NO: 2454303 - DNA, 25 bp, Homo sapien
cttggagatgcctttgtcacatttc

SEQ ID NO: 2454304 - DNA, 25 bp, Homo sapien
ggcctgatacttgtcagcgtccaaa

SEQ ID NO: 2454305 - DNA, 25 bp, Homo sapien
tgatacttgtcagcgtccaaatcac

SEQ ID NO: 2454306 - DNA, 25 bp, Homo sapien
atgaatctgcgtgaattgggaggtg

SEQ ID NO: 2454307 - DNA, 25 bp, Homo sapien
tctttgaatcatgaatctgcgtgaa

SEQ ID NO: 2454308 - DNA, 25 bp, Homo sapien
tcttctttgtgggatccgcggaatc

SEQ ID NO: 2454309 - DNA, 25 bp, Homo sapien
gaatgcctatgccataatctgaggg

SEQ ID NO: 2454310 - DNA, 25 bp, Homo sapien
caaaagtcccttcagcttggcggaa

SEQ ID NO: 2454311 - DNA, 25 bp, Homo sapien
tcagcttggcggaaaaggggacctc

SEQ ID NO: 2454312 - DNA, 25 bp, Homo sapien
tcccaaccctttggtgtcctgtctg

SEQ ID NO: 2454313 - DNA, 25 bp, Homo sapien
tggttctgcttgacctgcagggctt

SEQ ID NO: 2454314 - DNA, 25 bp, Homo sapien
tggtgtcctgtctgtgtggttctgc

SEQ ID NO: 2454315 - DNA, 25 bp, Homo sapien
catttttctgcagatcatgaatcca

SEQ ID NO: 2454316 - DNA, 25 bp, Homo sapien
ggtgattatgttcctgcaactttac

SEQ ID NO: 2454317 - DNA, 25 bp, Homo sapien
gcttcaagttgtgatggggcactcc

SEQ ID NO: 2454318 - DNA, 25 bp, Homo sapien
gggcactccttcgtcatcttgtaat

SEQ ID NO: 2454319 - DNA, 25 bp, Homo sapien
attaaggtaagataaggatgaggac

SEQ ID NO: 2454320 - DNA, 25 bp, Homo sapien
gattagaccaacatgcaaggaacat

SEQ ID NO: 2454321 - DNA, 25 bp, Homo sapien
ttcatacccagaggcaaataggcat

SEQ ID NO: 2454322 - DNA, 25 bp, Homo sapien
tgggatgttgtctccacgctttcct

SEQ ID NO: 2454323 - DNA, 25 bp, Homo sapien
catggcccggtgttcaggtgtgatt

SEQ ID NO: 2454324 - DNA, 25 bp, Homo sapien
cagtttccagccatgacctcacagt

SEQ ID NO: 2454325 - DNA, 25 bp, Homo sapien
ctcttgggattcaattcttgcacac

SEQ ID NO: 2454326 - DNA, 25 bp, Homo sapien
ctatattcctatcctcttgggattc

SEQ ID NO: 2454327 - DNA, 25 bp, Homo sapien
gatgatacacatggtgcttccaact

SEQ ID NO: 2454328 - DNA, 25 bp, Homo sapien
taattgcgcaagaatggcccagtgt

SEQ ID NO: 2454329 - DNA, 25 bp, Homo sapien
cccagtgttcagtgggattgtccaa

SEQ ID NO: 2454330 - DNA, 25 bp, Homo sapien
gctaaaggaacatttggagtgccaa

SEQ ID NO: 2454331 - DNA, 25 bp, Homo sapien
catgactcctgcctttttgagagag

SEQ ID NO: 2454332 - DNA, 25 bp, Homo sapien
tgaggcttccaatcaccacagatgt

SEQ ID NO: 2454333 - DNA, 25 bp, Homo sapien
tacacccatgggaagccagtttgat

SEQ ID NO: 2454334 - DNA, 25 bp, Homo sapien
gtgtgaaaacactgcttccgcttgg

SEQ ID NO: 2454335 - DNA, 25 bp, Homo sapien
catggggtcttattcttgcacagag

SEQ ID NO: 2454336 - DNA, 25 bp, Homo sapien
acctcacagtcaggaaacgtcttct

SEQ ID NO: 2454337 - DNA, 25 bp, Homo sapien
ccccatggggtcttattcttgcaca

SEQ ID NO: 2454338 - DNA, 25 bp, Homo sapien
tcaggaaacgtcttctcctccagca

SEQ ID NO: 2454339 - DNA, 25 bp, Homo sapien
cgttatgaggggtcaattttctatc

SEQ ID NO: 2454340 - DNA, 25 bp, Homo sapien
caggtgctttgcgttatgaggggtc

SEQ ID NO: 2454341 - DNA, 25 bp, Homo sapien
attttctatcttcctgggatttcat

SEQ ID NO: 2454342 - DNA, 25 bp, Homo sapien
ttctatcttcctgggatttcattat

SEQ ID NO: 2454343 - DNA, 25 bp, Homo sapien
tgctgggtccacattatcccacaac

SEQ ID NO: 2454344 - DNA, 25 bp, Homo sapien
gcactactgaacaccctttcaggtt

SEQ ID NO: 2454345 - DNA, 25 bp, Homo sapien
cattatcccacaacagcactactga

SEQ ID NO: 2454346 - DNA, 25 bp, Homo sapien
ggtttgctatcaccatggatgtctg

SEQ ID NO: 2454347 - DNA, 25 bp, Homo sapien
gagaattttatggtcccgcagtgga

SEQ ID NO: 2454348 - DNA, 25 bp, Homo sapien
cagcaggtcccaaccacagagatgt

SEQ ID NO: 2454349 - DNA, 25 bp, Homo sapien
gtttagaaatgcgtcctccagcagg

SEQ ID NO: 2454350 - DNA, 25 bp, Homo sapien
cagtggactattgcaggcagccttt

SEQ ID NO: 2454351 - DNA, 25 bp, Homo sapien
gacaggcaggcagtctctcccaggt

SEQ ID NO: 2454352 - DNA, 25 bp, Homo sapien
aggcaggcagtctctcccaggtggg

SEQ ID NO: 2454353 - DNA, 25 bp, Homo sapien
ctgacaggcaggcagtctctcccag

SEQ ID NO: 2454354 - DNA, 25 bp, Homo sapien
acaggcaggcagtctctcccaggtg

SEQ ID NO: 2454355 - DNA, 25 bp, Homo sapien
aggtgcttcataaggtgagtagaca

SEQ ID NO: 2454356 - DNA, 25 bp, Homo sapien
ggtgagtagacactcctctatcatc

SEQ ID NO: 2454357 - DNA, 25 bp, Homo sapien
aaggtgagtagacactcctctatca

SEQ ID NO: 2454358 - DNA, 25 bp, Homo sapien
gcaggtgcttcataaggtgagtaga

SEQ ID NO: 2454359 - DNA, 25 bp, Homo sapien
atgggatgtaacctccatacttgcc

SEQ ID NO: 2454360 - DNA, 25 bp, Homo sapien
gcatgggatgtaacctccatacttg

SEQ ID NO: 2454361 - DNA, 25 bp, Homo sapien
gatgctgcatgggatgtaacctcca

SEQ ID NO: 2454362 - DNA, 25 bp, Homo sapien
tgcattgatgctgcatgggatgtaa

SEQ ID NO: 2454363 - DNA, 25 bp, Homo sapien
agggaggcagtgaggtcaagagcct

SEQ ID NO: 2454364 - DNA, 25 bp, Homo sapien
gcagtgaggtcaagagcctggccat

SEQ ID NO: 2454365 - DNA, 25 bp, Homo sapien
aggcagtgaggtcaagagcctggcc

SEQ ID NO: 2454366 - DNA, 25 bp, Homo sapien
ggaggcagtgaggtcaagagcctgg

SEQ ID NO: 2454367 - DNA, 25 bp, Homo sapien
ggaggatcacaccacatccaagacc

SEQ ID NO: 2454368 - DNA, 25 bp, Homo sapien
ccaggttccaaatcacctcctcctg

SEQ ID NO: 2454369 - DNA, 25 bp, Homo sapien
gaggatcacaccacatccaagacca

SEQ ID NO: 2454370 - DNA, 25 bp, Homo sapien
aggaagcctggctgagtaccaccag

SEQ ID NO: 2454371 - DNA, 25 bp, Homo sapien
tgcatcatattgaggttccattctg

SEQ ID NO: 2454372 - DNA, 25 bp, Homo sapien
cattctggtttagatggtgtgagca

SEQ ID NO: 2454373 - DNA, 25 bp, Homo sapien
gatacagtatggtgaggagtggatg

SEQ ID NO: 2454374 - DNA, 25 bp, Homo sapien
caataacatcagataggagtgagga

SEQ ID NO: 2454375 - DNA, 25 bp, Homo sapien
cagtagggacttcaaataggcttgc

SEQ ID NO: 2454376 - DNA, 25 bp, Homo sapien
tctggcttctggctgataatctagg

SEQ ID NO: 2454377 - DNA, 25 bp, Homo sapien
ggcttgctgagctctagattgtacg

SEQ ID NO: 2454378 - DNA, 25 bp, Homo sapien
ccagggatttcatgaagcagtaggg

SEQ ID NO: 2454379 - DNA, 25 bp, Homo sapien
tggacttgcatttattggtaatact

SEQ ID NO: 2454380 - DNA, 25 bp, Homo sapien
tctgcacctgtgaggggccctttca

SEQ ID NO: 2454381 - DNA, 25 bp, Homo sapien
ggccctttcaaggtgtgagaatact

SEQ ID NO: 2454382 - DNA, 25 bp, Homo sapien
gtgtgagaatactgctggaccttgg

SEQ ID NO: 2454383 - DNA, 25 bp, Homo sapien
tcaaattcagttcccagatgagcag

SEQ ID NO: 2454384 - DNA, 25 bp, Homo sapien
gttcccagatgagcaggtgctccat

SEQ ID NO: 2454385 - DNA, 25 bp, Homo sapien
ctcaaattcagttcccagatgagca

SEQ ID NO: 2454386 - DNA, 25 bp, Homo sapien
tcagttcccagatgagcaggtgctc

SEQ ID NO: 2454387 - DNA, 25 bp, Homo sapien
ctctgacagccgggcaccagagctg

SEQ ID NO: 2454388 - DNA, 25 bp, Homo sapien
ccagagctggctttatgaatgctca

SEQ ID NO: 2454389 - DNA, 25 bp, Homo sapien
ttccactgcttaggcactgacagct

SEQ ID NO: 2454390 - DNA, 25 bp, Homo sapien
attttccactgcttaggcactgaca

SEQ ID NO: 2454391 - DNA, 25 bp, Homo sapien
tgatgtagtcccatgatcccaggac

SEQ ID NO: 2454392 - DNA, 25 bp, Homo sapien
catgatgtagtcccatgatcccagg

SEQ ID NO: 2454393 - DNA, 25 bp, Homo sapien
gtagtcccatgatcccaggacaggg

SEQ ID NO: 2454394 - DNA, 25 bp, Homo sapien
tgtagtcccatgatcccaggacagg

SEQ ID NO: 2454395 - DNA, 25 bp, Homo sapien
ggatccacaggataatcccatgatc

SEQ ID NO: 2454396 - DNA, 25 bp, Homo sapien
ctgtcttttttgtgggatccacagg

SEQ ID NO: 2454397 - DNA, 25 bp, Homo sapien
ttgtgggatccacaggataatccca

SEQ ID NO: 2454398 - DNA, 25 bp, Homo sapien
cttttttgtgggatccacaggataa

SEQ ID NO: 2454399 - DNA, 25 bp, Homo sapien
gatcacctcactgtctcgaaaggcc

SEQ ID NO: 2454400 - DNA, 25 bp, Homo sapien
tttccagtgatcacctcactgtctc

SEQ ID NO: 2454401 - DNA, 25 bp, Homo sapien
ccagtgatcacctcactgtctcgaa

SEQ ID NO: 2454402 - DNA, 25 bp, Homo sapien
gtgatcacctcactgtctcgaaagg

SEQ ID NO: 2454403 - DNA, 25 bp, Homo sapien
tctgtggtatccaagggatagtcct

SEQ ID NO: 2454404 - DNA, 25 bp, Homo sapien
tggtatccaagggatagtcctctga

SEQ ID NO: 2454405 - DNA, 25 bp, Homo sapien
tgtggtatccaagggatagtcctct

SEQ ID NO: 2454406 - DNA, 25 bp, Homo sapien
gtatccaagggatagtcctctgatc

SEQ ID NO: 2454407 - DNA, 25 bp, Homo sapien
ctttcagcggcttgtctttgtggct

SEQ ID NO: 2454408 - DNA, 25 bp, Homo sapien
gacccaacaacaaccaccagactat

SEQ ID NO: 2454409 - DNA, 25 bp, Homo sapien
ctctttcaggtatggaggcagaaca

SEQ ID NO: 2454410 - DNA, 25 bp, Homo sapien
taagattccatcacccaaagaccca

SEQ ID NO: 2454411 - DNA, 25 bp, Homo sapien
gactatattccgatacccatggaac

SEQ ID NO: 2454412 - DNA, 25 bp, Homo sapien
tgtgagtaacaatagggacagatgg

SEQ ID NO: 2454413 - DNA, 25 bp, Homo sapien
tcatagagtgtgagtaacaataggg

SEQ ID NO: 2454414 - DNA, 25 bp, Homo sapien
tagagtgtgagtaacaatagggaca

SEQ ID NO: 2454415 - DNA, 25 bp, Homo sapien
aggtgaagggggtcctgcagtttca

SEQ ID NO: 2454416 - DNA, 25 bp, Homo sapien
tgtttctggcttttcctggtaatat

SEQ ID NO: 2454417 - DNA, 25 bp, Homo sapien
gtaatatatcccctgttatgtttca

SEQ ID NO: 2454418 - DNA, 25 bp, Homo sapien
tcagaggtctgcatgattctggtaa

SEQ ID NO: 2454419 - DNA, 25 bp, Homo sapien
ttctcattgtggaaaggctctttca

SEQ ID NO: 2454420 - DNA, 25 bp, Homo sapien
agtttccagcgaccaactcagtctc

SEQ ID NO: 2454421 - DNA, 25 bp, Homo sapien
acattccattccctaatggacccaa

SEQ ID NO: 2454422 - DNA, 25 bp, Homo sapien
ttccagcgaccaactcagtctcaaa

SEQ ID NO: 2454423 - DNA, 25 bp, Homo sapien
ttccattccctaatggacccaattc

SEQ ID NO: 2454424 - DNA, 25 bp, Homo sapien
gcggtctcagacatgttgacattca

SEQ ID NO: 2454425 - DNA, 25 bp, Homo sapien
cagaagcggtctcagacatgttgac

SEQ ID NO: 2454426 - DNA, 25 bp, Homo sapien
aattcagaagcggtctcagacatgt

SEQ ID NO: 2454427 - DNA, 25 bp, Homo sapien
cagtgaattcagaagcggtctcaga

SEQ ID NO: 2454428 - DNA, 25 bp, Homo sapien
ttcctgtagcataagaagcaggcca

SEQ ID NO: 2454429 - DNA, 25 bp, Homo sapien
ggctctgtttcattgcatctgcaca

SEQ ID NO: 2454430 - DNA, 25 bp, Homo sapien
tcctacttctatggcagaactgcat

SEQ ID NO: 2454431 - DNA, 25 bp, Homo sapien
ggattttgcctggtaacctaggctc

SEQ ID NO: 2454432 - DNA, 25 bp, Homo sapien
tctttgaacatttctggcactccag

SEQ ID NO: 2454433 - DNA, 25 bp, Homo sapien
ttcaagaggctggttgtcatccaga

SEQ ID NO: 2454434 - DNA, 25 bp, Homo sapien
cactccagcacaagttaactctttc

SEQ ID NO: 2454435 - DNA, 25 bp, Homo sapien
tctgatctgacaggatctttgaaca

SEQ ID NO: 2454436 - DNA, 25 bp, Homo sapien
cccatgagaggcccatttgaggtgt

SEQ ID NO: 2454437 - DNA, 25 bp, Homo sapien
ttaatgaggggttcacattgtccca

SEQ ID NO: 2454438 - DNA, 25 bp, Homo sapien
ctttaatgaggggttcacattgtcc

SEQ ID NO: 2454439 - DNA, 25 bp, Homo sapien
gaggcccatttgaggtgtgagaaca

SEQ ID NO: 2454440 - DNA, 25 bp, Homo sapien
tgtgtcttggcggagaaggcaactt

SEQ ID NO: 2454441 - DNA, 25 bp, Homo sapien
aactttcgtggagatgcgttggcag

SEQ ID NO: 2454442 - DNA, 25 bp, Homo sapien
tgcaggattctctggatagtctcat

SEQ ID NO: 2454443 - DNA, 25 bp, Homo sapien
cgttggcagtggactgtcgcctgtc

SEQ ID NO: 2454444 - DNA, 25 bp, Homo sapien
cccgaggtgcgagaacattgctcca

SEQ ID NO: 2454445 - DNA, 25 bp, Homo sapien
ccacagaagtcctctgagacacagt

SEQ ID NO: 2454446 - DNA, 25 bp, Homo sapien
agtctcaacatcatcagcacccatg

SEQ ID NO: 2454447 - DNA, 25 bp, Homo sapien
tctggcttgcaattgccacagaagt

SEQ ID NO: 2454448 - DNA, 25 bp, Homo sapien
tttccagtgaacacctcagaggctg

SEQ ID NO: 2454449 - DNA, 25 bp, Homo sapien
cactgttgcctagagacaaatgcct

SEQ ID NO: 2454450 - DNA, 25 bp, Homo sapien
gcatagagtcgcaatgaatggcact

SEQ ID NO: 2454451 - DNA, 25 bp, Homo sapien
gataccagaccggttcatgaatgtg

SEQ ID NO: 2454452 - DNA, 25 bp, Homo sapien
cttcctgtccaaaggagccactctt

SEQ ID NO: 2454453 - DNA, 25 bp, Homo sapien
agattccagtgggatctgaccccag

SEQ ID NO: 2454454 - DNA, 25 bp, Homo sapien
aacagcaagctgtctgaatctctac

SEQ ID NO: 2454455 - DNA, 25 bp, Homo sapien
tgaccccagagacaacccgaaggga

SEQ ID NO: 2454456 - DNA, 25 bp, Homo sapien
catctcaaaacacttcagattccag

SEQ ID NO: 2454457 - DNA, 25 bp, Homo sapien
gaaggtgcatatggtgcagactcct

SEQ ID NO: 2454458 - DNA, 25 bp, Homo sapien
gatggtcccgtggtcctaggagaca

SEQ ID NO: 2454459 - DNA, 25 bp, Homo sapien
taggagacatcagacttgaaccagc

SEQ ID NO: 2454460 - DNA, 25 bp, Homo sapien
aatgccacttttgcctaacgacaag

SEQ ID NO: 2454461 - DNA, 25 bp, Homo sapien
tcaaaccccgatccaaataggagtg

SEQ ID NO: 2454462 - DNA, 25 bp, Homo sapien
ggagttcaaactgtggccatcctgg

SEQ ID NO: 2454463 - DNA, 25 bp, Homo sapien
tcgggtggaagttctacaaagtgca

SEQ ID NO: 2454464 - DNA, 25 bp, Homo sapien
cagatttgagagctttcaaaccccg

SEQ ID NO: 2454465 - DNA, 25 bp, Homo sapien
cactgacaacctcagagtctcaaaa

SEQ ID NO: 2454466 - DNA, 25 bp, Homo sapien
tctttccgaaatggggtcagaagag

SEQ ID NO: 2454467 - DNA, 25 bp, Homo sapien
aatccccatgggaactgattcctcc

SEQ ID NO: 2454468 - DNA, 25 bp, Homo sapien
ttccactgacaacctcagagtctca

SEQ ID NO: 2454469 - DNA, 25 bp, Homo sapien
attaccagatgagcagattcttcaa

SEQ ID NO: 2454470 - DNA, 25 bp, Homo sapien
gattaccagatgagcagattcttca

SEQ ID NO: 2454471 - DNA, 25 bp, Homo sapien
caaacagtgcatacaatggcccggt

SEQ ID NO: 2454472 - DNA, 25 bp, Homo sapien
aaacttgggtgatcatggcaaactc

SEQ ID NO: 2454473 - DNA, 25 bp, Homo sapien
caaactcttggtttgagggatttca

SEQ ID NO: 2454474 - DNA, 25 bp, Homo sapien
cggtgttcaggtgaaagtactccaa

SEQ ID NO: 2454475 - DNA, 25 bp, Homo sapien
gcctagtgacaagtctctgctgctt

SEQ ID NO: 2454476 - DNA, 25 bp, Homo sapien
gaagtgagttctggctatcttcacc

SEQ ID NO: 2454477 - DNA, 25 bp, Homo sapien
cagtggggaactctttcctgtcttc

SEQ ID NO: 2454478 - DNA, 25 bp, Homo sapien
ccataaatgccaacttgcctagtga

SEQ ID NO: 2454479 - DNA, 25 bp, Homo sapien
catcattttttctgcggattatgaa

SEQ ID NO: 2454480 - DNA, 25 bp, Homo sapien
ttgggcaggagcttcatatcatgag

SEQ ID NO: 2454481 - DNA, 25 bp, Homo sapien
tcaaattaggtttccagttgggcag

SEQ ID NO: 2454482 - DNA, 25 bp, Homo sapien
ctcaaattaggtttccagttgggca

SEQ ID NO: 2454483 - DNA, 25 bp, Homo sapien
caaattaggtttccagttgggcagg

SEQ ID NO: 2454484 - DNA, 25 bp, Homo sapien
cgtcttgtgatttgattgtgggaca

SEQ ID NO: 2454485 - DNA, 25 bp, Homo sapien
caagttgtgaggtgccactcctcca

SEQ ID NO: 2454486 - DNA, 25 bp, Homo sapien
tgtgcccagccaaacaggtgcttca

SEQ ID NO: 2454487 - DNA, 25 bp, Homo sapien
ggtaaattgggttctgcaccttcac

SEQ ID NO: 2454488 - DNA, 25 bp, Homo sapien
aactgcatcaccaaattcccttcat

SEQ ID NO: 2454489 - DNA, 25 bp, Homo sapien
caatgtccctcaatagcaatactgg

SEQ ID NO: 2454490 - DNA, 25 bp, Homo sapien
caggaaactttgaacgttgcttcga

SEQ ID NO: 2454491 - DNA, 25 bp, Homo sapien
ccaggagtctttagggtcctctgac

SEQ ID NO: 2454492 - DNA, 25 bp, Homo sapien
cagttcgaggtgtgagaataatgct

SEQ ID NO: 2454493 - DNA, 25 bp, Homo sapien
gaattcagtttacagcagggcaggt

SEQ ID NO: 2454494 - DNA, 25 bp, Homo sapien
cagtttacagcagggcaggtgcttc

SEQ ID NO: 2454495 - DNA, 25 bp, Homo sapien
ttacagcagggcaggtgcttcacat

SEQ ID NO: 2454496 - DNA, 25 bp, Homo sapien
cttgaattcagtttacagcagggca

SEQ ID NO: 2454497 - DNA, 25 bp, Homo sapien
ggtagaggagaattccttagatgtg

SEQ ID NO: 2454498 - DNA, 25 bp, Homo sapien
tttgtgggatttaagtgattgtctc

SEQ ID NO: 2454499 - DNA, 25 bp, Homo sapien
tggcctttggctctcgactgtcttt

SEQ ID NO: 2454500 - DNA, 25 bp, Homo sapien
gggatttaagtgattgtctcatcat

SEQ ID NO: 2454501 - DNA, 25 bp, Homo sapien
cttaggagagaacataagtgaaaca

SEQ ID NO: 2454502 - DNA, 25 bp, Homo sapien
taggagagaacataagtgaaacagc

SEQ ID NO: 2454503 - DNA, 25 bp, Homo sapien
ttaggagagaacataagtgaaacag

SEQ ID NO: 2454504 - DNA, 25 bp, Homo sapien
tcatgtagtgaggggtcactcctcc

SEQ ID NO: 2454505 - DNA, 25 bp, Homo sapien
tgcttcatgtagtgaggggtcactc

SEQ ID NO: 2454506 - DNA, 25 bp, Homo sapien
gggtcactcctccgtttgtgttgag

SEQ ID NO: 2454507 - DNA, 25 bp, Homo sapien
gcttcatgtagtgaggggtcactcc

SEQ ID NO: 2454508 - DNA, 25 bp, Homo sapien
cccatgacactgaatgtgcttctga

SEQ ID NO: 2454509 - DNA, 25 bp, Homo sapien
cctggcgttcagttgggaatactcc

SEQ ID NO: 2454510 - DNA, 25 bp, Homo sapien
taaggaacgtttgaagtgcaagttg

SEQ ID NO: 2454511 - DNA, 25 bp, Homo sapien
gcaagttggagctttcctggcaaac

SEQ ID NO: 2454512 - DNA, 25 bp, Homo sapien
ggaaacacctcactgtcttgaaaca

SEQ ID NO: 2454513 - DNA, 25 bp, Homo sapien
ctgggaaacacctcactgtcttgaa

SEQ ID NO: 2454514 - DNA, 25 bp, Homo sapien
tgggaaacacctcactgtcttgaaa

SEQ ID NO: 2454515 - DNA, 25 bp, Homo sapien
gggaaacacctcactgtcttgaaac

SEQ ID NO: 2454516 - DNA, 25 bp, Homo sapien
cttctccatcatcttgatatttcat

SEQ ID NO: 2454517 - DNA, 25 bp, Homo sapien
tagggagggggcacttctccatcat

SEQ ID NO: 2454518 - DNA, 25 bp, Homo sapien
gtgcttcatgtagggagggggcact

SEQ ID NO: 2454519 - DNA, 25 bp, Homo sapien
ttcatgtagggagggggcacttctc

SEQ ID NO: 2454520 - DNA, 25 bp, Homo sapien
agaggagcagtttccagcagccacc

SEQ ID NO: 2454521 - DNA, 25 bp, Homo sapien
agtcagaggagcagtttccagcagc

SEQ ID NO: 2454522 - DNA, 25 bp, Homo sapien
tcaattcttgcacagagtatctttc

SEQ ID NO: 2454523 - DNA, 25 bp, Homo sapien
gagtatctttccagaatgaagtcag

SEQ ID NO: 2454524 - DNA, 25 bp, Homo sapien
tgagacttttatggctccactctga

SEQ ID NO: 2454525 - DNA, 25 bp, Homo sapien
tccatcggaaactgaccacggagac

SEQ ID NO: 2454526 - DNA, 25 bp, Homo sapien
caataccagacaagcactgcctgta

SEQ ID NO: 2454527 - DNA, 25 bp, Homo sapien
tctgagttttcatagggagcctttc

SEQ ID NO: 2454528 - DNA, 25 bp, Homo sapien
tctcctccatcgccttgtgttttca

SEQ ID NO: 2454529 - DNA, 25 bp, Homo sapien
ttgctctgtggcaaatccagggaga

SEQ ID NO: 2454530 - DNA, 25 bp, Homo sapien
ttcagttcccatgcaagcaggtcct

SEQ ID NO: 2454531 - DNA, 25 bp, Homo sapien
caaatccagggagagacaatagcag

SEQ ID NO: 2454532 - DNA, 25 bp, Homo sapien
cagcaataaggtcagatggggtaag

SEQ ID NO: 2454533 - DNA, 25 bp, Homo sapien
tgtgggacataaagtgtgagcagca

SEQ ID NO: 2454534 - DNA, 25 bp, Homo sapien
ataaggtcagatggggtaaggatac

SEQ ID NO: 2454535 - DNA, 25 bp, Homo sapien
caataaggtcagatggggtaaggat

SEQ ID NO: 2454536 - DNA, 25 bp, Homo sapien
cctgcttctataggagggctgcatg

SEQ ID NO: 2454537 - DNA, 25 bp, Homo sapien
ctcctgcttctataggagggctgca

SEQ ID NO: 2454538 - DNA, 25 bp, Homo sapien
tctcctgcttctataggagggctgc

SEQ ID NO: 2454539 - DNA, 25 bp, Homo sapien
tgcttctataggagggctgcatgat

SEQ ID NO: 2454540 - DNA, 25 bp, Homo sapien
aatccccatggaccagattctggta

SEQ ID NO: 2454541 - DNA, 25 bp, Homo sapien
acagccttcttcatgagtggagtca

SEQ ID NO: 2454542 - DNA, 25 bp, Homo sapien
cccgcacaatgtcgaaaagccttct

SEQ ID NO: 2454543 - DNA, 25 bp, Homo sapien
gaccaaaccacaggatggccgatgt

SEQ ID NO: 2454544 - DNA, 25 bp, Homo sapien
ctgacggctctgacagccggatgct

SEQ ID NO: 2454545 - DNA, 25 bp, Homo sapien
ggctgacggctctgacagccggatg

SEQ ID NO: 2454546 - DNA, 25 bp, Homo sapien
acggctctgacagccggatgctcaa

SEQ ID NO: 2454547 - DNA, 25 bp, Homo sapien
gacggctctgacagccggatgctca

SEQ ID NO: 2454548 - DNA, 25 bp, Homo sapien
tgcctagtaaaaagtccctgcagct

SEQ ID NO: 2454549 - DNA, 25 bp, Homo sapien
cagtctctggtcacgaggcctgatt

SEQ ID NO: 2454550 - DNA, 25 bp, Homo sapien
gagctctgtctagcgacacaatgaa

SEQ ID NO: 2454551 - DNA, 25 bp, Homo sapien
tgaatgcgcatgcaccagtctctgg

SEQ ID NO: 2454552 - DNA, 25 bp, Homo sapien
tgtggtatccatgggaatgtcccat

SEQ ID NO: 2454553 - DNA, 25 bp, Homo sapien
ggtatccatgggaatgtcccatgat

SEQ ID NO: 2454554 - DNA, 25 bp, Homo sapien
tggtatccatgggaatgtcccatga

SEQ ID NO: 2454555 - DNA, 25 bp, Homo sapien
ctgtggtatccatgggaatgtccca

SEQ ID NO: 2454556 - DNA, 25 bp, Homo sapien
aggaggagtgcctctattgtcttgg

SEQ ID NO: 2454557 - DNA, 25 bp, Homo sapien
aattcagtatcccaccgagcaggtg

SEQ ID NO: 2454558 - DNA, 25 bp, Homo sapien
gtcataaaggggtgaagatacagtc

SEQ ID NO: 2454559 - DNA, 25 bp, Homo sapien
tgtcatgaggaggagtgcctctatt

SEQ ID NO: 2454560 - DNA, 25 bp, Homo sapien
gatagaggtgaggatacaatctggt

SEQ ID NO: 2454561 - DNA, 25 bp, Homo sapien
tgagaaatagatggggtccctcaac

SEQ ID NO: 2454562 - DNA, 25 bp, Homo sapien
tggtgagaaatagatggggtccctc

SEQ ID NO: 2454563 - DNA, 25 bp, Homo sapien
atacaatctggtgagaaatagatgg

SEQ ID NO: 2454564 - DNA, 25 bp, Homo sapien
tcaagctagccatatttttccttgc

SEQ ID NO: 2454565 - DNA, 25 bp, Homo sapien
ttgttctttcaagctagccatattt

SEQ ID NO: 2454566 - DNA, 25 bp, Homo sapien
aagctagccatatttttccttgcta

SEQ ID NO: 2454567 - DNA, 25 bp, Homo sapien
tctttcaagctagccatatttttcc

SEQ ID NO: 2454568 - DNA, 25 bp, Homo sapien
cctctcaacggcactactgaacacc

SEQ ID NO: 2454569 - DNA, 25 bp, Homo sapien
agaccctatctcaaccctacctgca

SEQ ID NO: 2454570 - DNA, 25 bp, Homo sapien
gaccctatctcaaccctacctgcat

SEQ ID NO: 2454571 - DNA, 25 bp, Homo sapien
gtgcctctcaacggcactactgaac

SEQ ID NO: 2454572 - DNA, 25 bp, Homo sapien
agtgagtacgagttgtgagaaatct

SEQ ID NO: 2454573 - DNA, 25 bp, Homo sapien
ctgtgagaagtgagtacgagttgtg

SEQ ID NO: 2454574 - DNA, 25 bp, Homo sapien
agaagtgagtacgagttgtgagaaa

SEQ ID NO: 2454575 - DNA, 25 bp, Homo sapien
gctccttgtaggatttgcctttgtc

SEQ ID NO: 2454576 - DNA, 25 bp, Homo sapien
gattccagtatccaaacacttctca

SEQ ID NO: 2454577 - DNA, 25 bp, Homo sapien
tatgattccagtatccaaacacttc

SEQ ID NO: 2454578 - DNA, 25 bp, Homo sapien
caggtatgattccagtatccaaaca

SEQ ID NO: 2454579 - DNA, 25 bp, Homo sapien
gggtctcaggtatgattccagtatc

SEQ ID NO: 2454580 - DNA, 25 bp, Homo sapien
gtatcgaaacacctcttcttgcatg

SEQ ID NO: 2454581 - DNA, 25 bp, Homo sapien
cagatgacattcctatccccgtgga

SEQ ID NO: 2454582 - DNA, 25 bp, Homo sapien
tttttgcacatagagtcttctggaa

SEQ ID NO: 2454583 - DNA, 25 bp, Homo sapien
tatccccgtggaagcagatttttgc

SEQ ID NO: 2454584 - DNA, 25 bp, Homo sapien
tctgtgggatcgaaggaattgttcc

SEQ ID NO: 2454585 - DNA, 25 bp, Homo sapien
tgggatcgaaggaattgttccacga

SEQ ID NO: 2454586 - DNA, 25 bp, Homo sapien
cttctctgtgggatcgaaggaattg

SEQ ID NO: 2454587 - DNA, 25 bp, Homo sapien
ggatcgaaggaattgttccacgatc

SEQ ID NO: 2454588 - DNA, 25 bp, Homo sapien
cagctgcatccacgaattcccttaa

SEQ ID NO: 2454589 - DNA, 25 bp, Homo sapien
ccagctgcatccacgaattccctta

SEQ ID NO: 2454590 - DNA, 25 bp, Homo sapien
gaccttctttgttttatcataggca

SEQ ID NO: 2454591 - DNA, 25 bp, Homo sapien
accttctttgttttatcataggcag

SEQ ID NO: 2454592 - DNA, 25 bp, Homo sapien
ccttctttgttttatcataggcagt

SEQ ID NO: 2454593 - DNA, 25 bp, Homo sapien
gaagagcggtttccagcaatcactt

SEQ ID NO: 2454594 - DNA, 25 bp, Homo sapien
ttctccactggacccgactgcaggg

SEQ ID NO: 2454595 - DNA, 25 bp, Homo sapien
ccagcaatcacttcacagtcctgaa

SEQ ID NO: 2454596 - DNA, 25 bp, Homo sapien
ttagaagagcggtttccagcaatca

SEQ ID NO: 2454597 - DNA, 25 bp, Homo sapien
tgcttcaagtcacgagggggcactc

SEQ ID NO: 2454598 - DNA, 25 bp, Homo sapien
cacgagggggcactcctgcatcatt

SEQ ID NO: 2454599 - DNA, 25 bp, Homo sapien
tgagcaggtgcttcaagtcacgagg

SEQ ID NO: 2454600 - DNA, 25 bp, Homo sapien
ttcaagtcacgagggggcactcctg

SEQ ID NO: 2454601 - DNA, 25 bp, Homo sapien
ctacggtagagaatgcaagcagcaa

SEQ ID NO: 2454602 - DNA, 25 bp, Homo sapien
ctgcaaaaatctgaagatatatgac

SEQ ID NO: 2454603 - DNA, 25 bp, Homo sapien
tgaggggtggatgctgtcccacctt

SEQ ID NO: 2454604 - DNA, 25 bp, Homo sapien
gatatatgacacagaacgtgcttcc

SEQ ID NO: 2454605 - DNA, 25 bp, Homo sapien
tccatgctaaacgtttcccagttca

SEQ ID NO: 2454606 - DNA, 25 bp, Homo sapien
atgtcttccatgctaaacgtttccc

SEQ ID NO: 2454607 - DNA, 25 bp, Homo sapien
atgttgctcattgacctagctttct

SEQ ID NO: 2454608 - DNA, 25 bp, Homo sapien
tcttccatgctaaacgtttcccagt

SEQ ID NO: 2454609 - DNA, 25 bp, Homo sapien
tgacattcaccatgacagcactgtg

SEQ ID NO: 2454610 - DNA, 25 bp, Homo sapien
aaaagagaggtgacagtccatggcc

SEQ ID NO: 2454611 - DNA, 25 bp, Homo sapien
tggccaatgctcatccatggaggtc

SEQ ID NO: 2454612 - DNA, 25 bp, Homo sapien
aaagaatcatacaggcagagtcagc

SEQ ID NO: 2454613 - DNA, 25 bp, Homo sapien
tgaaaacgagctgcattgtgctgga

SEQ ID NO: 2454614 - DNA, 25 bp, Homo sapien
cgagactgtgagttggccaatggaa

SEQ ID NO: 2454615 - DNA, 25 bp, Homo sapien
cagccatcttcgtggtcggacagca

SEQ ID NO: 2454616 - DNA, 25 bp, Homo sapien
tcatgggtgcagacgaaattcagac

SEQ ID NO: 2454617 - DNA, 25 bp, Homo sapien
cttgagacagactcgggctcctggc

SEQ ID NO: 2454618 - DNA, 25 bp, Homo sapien
tgagacagactcgggctcctggctc

SEQ ID NO: 2454619 - DNA, 25 bp, Homo sapien
tcttgagacagactcgggctcctgg

SEQ ID NO: 2454620 - DNA, 25 bp, Homo sapien
ttgagacagactcgggctcctggct

SEQ ID NO: 2454621 - DNA, 25 bp, Homo sapien
ttcattttgggcctccgaggggctc

SEQ ID NO: 2454622 - DNA, 25 bp, Homo sapien
gtgtcagtgaatgatagccgggccc

SEQ ID NO: 2454623 - DNA, 25 bp, Homo sapien
tcagtgaatgatagccgggcccttg

SEQ ID NO: 2454624 - DNA, 25 bp, Homo sapien
ctaagatccccaaaagtgggtgtca

SEQ ID NO: 2454625 - DNA, 25 bp, Homo sapien
gattcatgatccacagaagaataga

SEQ ID NO: 2454626 - DNA, 25 bp, Homo sapien
gacatcattgggtctaaacctgcct

SEQ ID NO: 2454627 - DNA, 25 bp, Homo sapien
gacgcaactgcttggctggaactga

SEQ ID NO: 2454628 - DNA, 25 bp, Homo sapien
aaagagtgccttttcacgacgtgac

SEQ ID NO: 2454629 - DNA, 25 bp, Homo sapien
gcaagccttccaattcactgcgtat

SEQ ID NO: 2454630 - DNA, 25 bp, Homo sapien
tctgtgtggttttgcagaaagcccc

SEQ ID NO: 2454631 - DNA, 25 bp, Homo sapien
taagccagctccacttacaggcatg

SEQ ID NO: 2454632 - DNA, 25 bp, Homo sapien
aaagaagtgttgaagtgcgttagcc

SEQ ID NO: 2454633 - DNA, 25 bp, Homo sapien
tgcagccctccaatagaggtaggag

SEQ ID NO: 2454634 - DNA, 25 bp, Homo sapien
tttcaaatgtatcacagctgccagg

SEQ ID NO: 2454635 - DNA, 25 bp, Homo sapien
gtggaagacgttgatccagacccac

SEQ ID NO: 2454636 - DNA, 25 bp, Homo sapien
tggcagctgtaactggaattaacag

SEQ ID NO: 2454637 - DNA, 25 bp, Homo sapien
gctgggccattaaccttactgcctc

SEQ ID NO: 2454638 - DNA, 25 bp, Homo sapien
gttggttctgaaaaactgctcttct

SEQ ID NO: 2454639 - DNA, 25 bp, Homo sapien
caaattggagaagtactctcacacc

SEQ ID NO: 2454640 - DNA, 25 bp, Homo sapien
ggtctctctcagataggcaggaaac

SEQ ID NO: 2454641 - DNA, 25 bp, Homo sapien
aagtgtatccagtagtgctgttgag

SEQ ID NO: 2454642 - DNA, 25 bp, Homo sapien
gtgcagatgaggttgatacactgtc

SEQ ID NO: 2454643 - DNA, 25 bp, Homo sapien
tgaaaagtgtatccagtagtgctgt

SEQ ID NO: 2454644 - DNA, 25 bp, Homo sapien
gatgaggttgatacactgtctcaga

SEQ ID NO: 2454645 - DNA, 25 bp, Homo sapien
gtggaagtcgttgagccagacccag

SEQ ID NO: 2454646 - DNA, 25 bp, Homo sapien
ggaagtcgttgagccagacccagga

SEQ ID NO: 2454647 - DNA, 25 bp, Homo sapien
cccatgagggtcattttttgtgaac

SEQ ID NO: 2454648 - DNA, 25 bp, Homo sapien
aacatttagtgtggaagtcgttgag

SEQ ID NO: 2454649 - DNA, 25 bp, Homo sapien
agtcgcatccaacaaaagcccagtg

SEQ ID NO: 2454650 - DNA, 25 bp, Homo sapien
gctgagaggcagtcgcatccaacaa

SEQ ID NO: 2454651 - DNA, 25 bp, Homo sapien
aaatccctgacagctacataatctg

SEQ ID NO: 2454652 - DNA, 25 bp, Homo sapien
atccctgacagctacataatctgtg

SEQ ID NO: 2454653 - DNA, 25 bp, Homo sapien
ctgctggcatctgtaatgggaatct

SEQ ID NO: 2454654 - DNA, 25 bp, Homo sapien
atggttttagatgtatcaaagcagc

SEQ ID NO: 2454655 - DNA, 25 bp, Homo sapien
tctatggttttagatgtatcaaagc

SEQ ID NO: 2454656 - DNA, 25 bp, Homo sapien
catctgtaatgggaatctatggttt

SEQ ID NO: 2454657 - DNA, 25 bp, Homo sapien
ttagtgtgcaagacattcccaggaa

SEQ ID NO: 2454658 - DNA, 25 bp, Homo sapien
gtgtcccctgatgactttaagctct

SEQ ID NO: 2454659 - DNA, 25 bp, Homo sapien
cactctctgccagaatgaaacccca

SEQ ID NO: 2454660 - DNA, 25 bp, Homo sapien
acactctctgccagaatgaaacccc

SEQ ID NO: 2454661 - DNA, 25 bp, Homo sapien
ttattgttccttcgggtcatcttgg

SEQ ID NO: 2454662 - DNA, 25 bp, Homo sapien
agagactgtgagatggtcgctggaa

SEQ ID NO: 2454663 - DNA, 25 bp, Homo sapien
gtgagatggtcgctggaaactgctc

SEQ ID NO: 2454664 - DNA, 25 bp, Homo sapien
cctggcgaaggaggaagtatttaga

SEQ ID NO: 2454665 - DNA, 25 bp, Homo sapien
tcaaagtgcaaagccccagtttgca

SEQ ID NO: 2454666 - DNA, 25 bp, Homo sapien
catggcacgttggaaaactcccact

SEQ ID NO: 2454667 - DNA, 25 bp, Homo sapien
aagccctcaaagtgcaaagccccag

SEQ ID NO: 2454668 - DNA, 25 bp, Homo sapien
tgcagtccatatgttcatggcacgt

SEQ ID NO: 2454669 - DNA, 25 bp, Homo sapien
ataggattttgaaatcctcttccag

SEQ ID NO: 2454670 - DNA, 25 bp, Homo sapien
tcctttataggattttgaaatcctc

SEQ ID NO: 2454671 - DNA, 25 bp, Homo sapien
tcttccagaatccttttcccaataa

SEQ ID NO: 2454672 - DNA, 25 bp, Homo sapien
ttataggattttgaaatcctcttcc

SEQ ID NO: 2454673 - DNA, 25 bp, Homo sapien
taggttatttattagtaatgactcc

SEQ ID NO: 2454674 - DNA, 25 bp, Homo sapien
aattgaataggctggagctgacact

SEQ ID NO: 2454675 - DNA, 25 bp, Homo sapien
ggagctgacactggatccactttga

SEQ ID NO: 2454676 - DNA, 25 bp, Homo sapien
aaattgaaattgaataggctggagc

SEQ ID NO: 2454677 - DNA, 25 bp, Homo sapien
aaattgcctccgattttcagcctgg

SEQ ID NO: 2454678 - DNA, 25 bp, Homo sapien
ctgggtccaggtagggccagaaact

SEQ ID NO: 2454679 - DNA, 25 bp, Homo sapien
cttctgtggataatcaccaagctgc

SEQ ID NO: 2454680 - DNA, 25 bp, Homo sapien
cacagggctaggatggtcaaaagta

SEQ ID NO: 2454681 - DNA, 25 bp, Homo sapien
tgatgttgttgcctagtttctctga

SEQ ID NO: 2454682 - DNA, 25 bp, Homo sapien
tgttgcagaatgatgttgttgccta

SEQ ID NO: 2454683 - DNA, 25 bp, Homo sapien
ctagtttctctgaaacagcacctct

SEQ ID NO: 2454684 - DNA, 25 bp, Homo sapien
tcaaccacggctggttgttgcagaa

SEQ ID NO: 2454685 - DNA, 25 bp, Homo sapien
aatccgctttagtcgcctttttcag

SEQ ID NO: 2454686 - DNA, 25 bp, Homo sapien
caagaataaaaatcgccatagctcc

SEQ ID NO: 2454687 - DNA, 25 bp, Homo sapien
ccttgagcaactttcctgacttctg

SEQ ID NO: 2454688 - DNA, 25 bp, Homo sapien
tagtcgcctttttcagattgacttt

SEQ ID NO: 2454689 - DNA, 25 bp, Homo sapien
agacatccaaggccctcgctcaggt

SEQ ID NO: 2454690 - DNA, 25 bp, Homo sapien
atccaaggccctcgctcaggtggtg

SEQ ID NO: 2454691 - DNA, 25 bp, Homo sapien
acatccaaggccctcgctcaggtgg

SEQ ID NO: 2454692 - DNA, 25 bp, Homo sapien
ccaaggccctcgctcaggtggtgca

SEQ ID NO: 2454693 - DNA, 25 bp, Homo sapien
ctctcttcaaggttaatttatgtga

SEQ ID NO: 2454694 - DNA, 25 bp, Homo sapien
taaagtaatgtagttttgtaagatg

SEQ ID NO: 2454695 - DNA, 25 bp, Homo sapien
tttctctcttcaaggttaatttatg

SEQ ID NO: 2454696 - DNA, 25 bp, Homo sapien
tgtaagatggaaaatttccttcttc

SEQ ID NO: 2454697 - DNA, 25 bp, Homo sapien
gactattcctgttacaagatgattc

SEQ ID NO: 2454698 - DNA, 25 bp, Homo sapien
ctgactattcctgttacaagatgat

SEQ ID NO: 2454699 - DNA, 25 bp, Homo sapien
tgactattcctgttacaagatgatt

SEQ ID NO: 2454700 - DNA, 25 bp, Homo sapien
gctttcatcagttcccacgtctaca

SEQ ID NO: 2454701 - DNA, 25 bp, Homo sapien
cgtctacatactccaacatgttttt

SEQ ID NO: 2454702 - DNA, 25 bp, Homo sapien
agctttcatcagttcccacgtctac

SEQ ID NO: 2454703 - DNA, 25 bp, Homo sapien
ccacgtctacatactccaacatgtt

SEQ ID NO: 2454704 - DNA, 25 bp, Homo sapien
aattgaacaataacataactctagg

SEQ ID NO: 2454705 - DNA, 25 bp, Homo sapien
aactctaggtctgaatactgtaagg

SEQ ID NO: 2454706 - DNA, 25 bp, Homo sapien
ttttgttatataaggcttggccagt

SEQ ID NO: 2454707 - DNA, 25 bp, Homo sapien
aaagccagcaattgaacaataacat

SEQ ID NO: 2454708 - DNA, 25 bp, Homo sapien
tgtccccagcattctaagctgagac

SEQ ID NO: 2454709 - DNA, 25 bp, Homo sapien
cctatcaatggaaatcttaataact

SEQ ID NO: 2454710 - DNA, 25 bp, Homo sapien
cttaataacttagtaactggctcac

SEQ ID NO: 2454711 - DNA, 25 bp, Homo sapien
tctaagctgagacctatcaatggaa

SEQ ID NO: 2454712 - DNA, 25 bp, Homo sapien
tcggccaggaagcttagttctgttt

SEQ ID NO: 2454713 - DNA, 25 bp, Homo sapien
tgttttcagatgatgggtcatattt

SEQ ID NO: 2454714 - DNA, 25 bp, Homo sapien
cggccaggaagcttagttctgtttt

SEQ ID NO: 2454715 - DNA, 25 bp, Homo sapien
atcggccaggaagcttagttctgtt

SEQ ID NO: 2454716 - DNA, 25 bp, Homo sapien
gagcatggactatggccgacaggat

SEQ ID NO: 2454717 - DNA, 25 bp, Homo sapien
gactatggccgacaggattagtatc

SEQ ID NO: 2454718 - DNA, 25 bp, Homo sapien
tatggccgacaggattagtatcttc

SEQ ID NO: 2454719 - DNA, 25 bp, Homo sapien
tatagttcagagcatggactatggc

SEQ ID NO: 2454720 - DNA, 25 bp, Homo sapien
gatatcaacagcctttcccctggtg

SEQ ID NO: 2454721 - DNA, 25 bp, Homo sapien
tcccctggtggcacaagtctttgtg

SEQ ID NO: 2454722 - DNA, 25 bp, Homo sapien
tgataatgaatatacccgtgtgaga

SEQ ID NO: 2454723 - DNA, 25 bp, Homo sapien
caggtgttggcatcatgataatgaa

SEQ ID NO: 2454724 - DNA, 25 bp, Homo sapien
acagtaaatccatgcacagagactg

SEQ ID NO: 2454725 - DNA, 25 bp, Homo sapien
catggacacagcctacaccttctgt

SEQ ID NO: 2454726 - DNA, 25 bp, Homo sapien
cagcctacaccttctgtaatcgtac

SEQ ID NO: 2454727 - DNA, 25 bp, Homo sapien
ccaacagtaaatccatgcacagaga

SEQ ID NO: 2454728 - DNA, 25 bp, Homo sapien
cagaattaacctcaggatatccatg

SEQ ID NO: 2454729 - DNA, 25 bp, Homo sapien
agaacatccatagccgataccatca

SEQ ID NO: 2454730 - DNA, 25 bp, Homo sapien
tatggaaaggggcagaattaacctc

SEQ ID NO: 2454731 - DNA, 25 bp, Homo sapien
cctggagaacatccatagccgatac

SEQ ID NO: 2454732 - DNA, 25 bp, Homo sapien
taaaatcaacaatccctgcacatac

SEQ ID NO: 2454733 - DNA, 25 bp, Homo sapien
ctaaaatcaacaatccctgcacata

SEQ ID NO: 2454734 - DNA, 25 bp, Homo sapien
actaaaatcaacaatccctgcacat

SEQ ID NO: 2454735 - DNA, 25 bp, Homo sapien
acatccacggaggtagtctaaaact

SEQ ID NO: 2454736 - DNA, 25 bp, Homo sapien
ctacttgatagagtgacatcattgg

SEQ ID NO: 2454737 - DNA, 25 bp, Homo sapien
gtttgtgtagcagtacatccacgga

SEQ ID NO: 2454738 - DNA, 25 bp, Homo sapien
actctacttgatagagtgacatcat

SEQ ID NO: 2454739 - DNA, 25 bp, Homo sapien
aaattaccagtgatcagtttctggt

SEQ ID NO: 2454740 - DNA, 25 bp, Homo sapien
gccaggagagaggatctaactgata

SEQ ID NO: 2454741 - DNA, 25 bp, Homo sapien
agacacagataaaattaccagtgat

SEQ ID NO: 2454742 - DNA, 25 bp, Homo sapien
cagtgatcagtttctggttacaacc

SEQ ID NO: 2454743 - DNA, 25 bp, Homo sapien
tcactcctgaccgaggatgccaaca

SEQ ID NO: 2454744 - DNA, 25 bp, Homo sapien
gggccccatggggacttcaaccaga

SEQ ID NO: 2454745 - DNA, 25 bp, Homo sapien
ctctccctcttagatacccctgggc

SEQ ID NO: 2454746 - DNA, 25 bp, Homo sapien
gggacttcaaccagacccagatgcc

SEQ ID NO: 2454747 - DNA, 25 bp, Homo sapien
tctccctcttagatacccctgggcc

SEQ ID NO: 2454748 - DNA, 25 bp, Homo sapien
gatccaggctccgcagcataacctg

SEQ ID NO: 2454749 - DNA, 25 bp, Homo sapien
aggacttcatcatttatgatctcag

SEQ ID NO: 2454750 - DNA, 25 bp, Homo sapien
tcccgctgatccaggctccgcagca

SEQ ID NO: 2454751 - DNA, 25 bp, Homo sapien
atttatgatctcagcccatatctgg

SEQ ID NO: 2454752 - DNA, 25 bp, Homo sapien
ggagccaacggatgatttgggtggg

SEQ ID NO: 2454753 - DNA, 25 bp, Homo sapien
gagccaacggatgatttgggtgggg

SEQ ID NO: 2454754 - DNA, 25 bp, Homo sapien
agccaacggatgatttgggtggggg

SEQ ID NO: 2454755 - DNA, 25 bp, Homo sapien
gccaacggatgatttgggtggggga

SEQ ID NO: 2454756 - DNA, 25 bp, Homo sapien
atccaccagtagcacacctcttccc

SEQ ID NO: 2454757 - DNA, 25 bp, Homo sapien
tgccctgtggtttgaggcatttaca

SEQ ID NO: 2454758 - DNA, 25 bp, Homo sapien
tgcaaatgatggacctccagcgagt

SEQ ID NO: 2454759 - DNA, 25 bp, Homo sapien
acctctgccgtgatgtcatccacca

SEQ ID NO: 2454760 - DNA, 25 bp, Homo sapien
tcgggagacgcctacagcccttgca

SEQ ID NO: 2454761 - DNA, 25 bp, Homo sapien
ccttgcaataattggccgacgccca

SEQ ID NO: 2454762 - DNA, 25 bp, Homo sapien
gggagatttccaggcatggcttctg

SEQ ID NO: 2454763 - DNA, 25 bp, Homo sapien
gctcaggccagttccgaggatcttt

SEQ ID NO: 2454764 - DNA, 25 bp, Homo sapien
cccatctgtgcagagaccttccaga

SEQ ID NO: 2454765 - DNA, 25 bp, Homo sapien
cttgatagtcactaacacagcacat

SEQ ID NO: 2454766 - DNA, 25 bp, Homo sapien
gaatacttgatagtcactaacacag

SEQ ID NO: 2454767 - DNA, 25 bp, Homo sapien
cccttgatctctgaacatgtatata

SEQ ID NO: 2454768 - DNA, 25 bp, Homo sapien
ttgcttgtgtatgggaaccagtgca

SEQ ID NO: 2454769 - DNA, 25 bp, Homo sapien
tgcaccttgaaacagcggctgggga

SEQ ID NO: 2454770 - DNA, 25 bp, Homo sapien
cggctggggaaccaggagtaacact

SEQ ID NO: 2454771 - DNA, 25 bp, Homo sapien
tctgctggtcagtctctgcaccttg

SEQ ID NO: 2454772 - DNA, 25 bp, Homo sapien
cccaggttaaggaggatgtcagcca

SEQ ID NO: 2454773 - DNA, 25 bp, Homo sapien
gagtcctcactgagcctcccgtgag

SEQ ID NO: 2454774 - DNA, 25 bp, Homo sapien
gttgttgacagtgtctgcgggtggc

SEQ ID NO: 2454775 - DNA, 25 bp, Homo sapien
gtgtctgcgggtggccatgtactag

SEQ ID NO: 2454776 - DNA, 25 bp, Homo sapien
ccctgggttgttgacagtgtctgcg

SEQ ID NO: 2454777 - DNA, 25 bp, Homo sapien
gaggcagagaaggaacagtcatggg

SEQ ID NO: 2454778 - DNA, 25 bp, Homo sapien
tcatggggcactggctgttccagag

SEQ ID NO: 2454779 - DNA, 25 bp, Homo sapien
gcagagaaggaacagtcatggggca

SEQ ID NO: 2454780 - DNA, 25 bp, Homo sapien
atggggcactggctgttccagagtc

SEQ ID NO: 2454781 - DNA, 25 bp, Homo sapien
tcccaaagctccacgggttcaattg

SEQ ID NO: 2454782 - DNA, 25 bp, Homo sapien
catagggattcctgaatagcaaatc

SEQ ID NO: 2454783 - DNA, 25 bp, Homo sapien
aattgcttcttctctgaatacctgc

SEQ ID NO: 2454784 - DNA, 25 bp, Homo sapien
catgggctggacatgctctggtgca

SEQ ID NO: 2454785 - DNA, 25 bp, Homo sapien
caaacacacaggaagacacatacag

SEQ ID NO: 2454786 - DNA, 25 bp, Homo sapien
ttccccgaccaaacacacaggaaga

SEQ ID NO: 2454787 - DNA, 25 bp, Homo sapien
gaccaaacacacaggaagacacata

SEQ ID NO: 2454788 - DNA, 25 bp, Homo sapien
cttccccgaccaaacacacaggaag

SEQ ID NO: 2454789 - DNA, 25 bp, Homo sapien
gtctacaccaatactaaagtggacc

SEQ ID NO: 2454790 - DNA, 25 bp, Homo sapien
ctaaagtggaccttaatgctcagcc

SEQ ID NO: 2454791 - DNA, 25 bp, Homo sapien
ccacactcacactggtacgattgaa

SEQ ID NO: 2454792 - DNA, 25 bp, Homo sapien
ctggtacgattgaaactggctgtct

SEQ ID NO: 2454793 - DNA, 25 bp, Homo sapien
tctgagggcctaactccttccagta

SEQ ID NO: 2454794 - DNA, 25 bp, Homo sapien
tctctgagggcctaactccttccag

SEQ ID NO: 2454795 - DNA, 25 bp, Homo sapien
gagggcctaactccttccagtagtg

SEQ ID NO: 2454796 - DNA, 25 bp, Homo sapien
ttccctctctgagggcctaactcct

SEQ ID NO: 2454797 - DNA, 25 bp, Homo sapien
gaaaactttgtcctgccgccagtac

SEQ ID NO: 2454798 - DNA, 25 bp, Homo sapien
gccagtaccctggatggctgtttct

SEQ ID NO: 2454799 - DNA, 25 bp, Homo sapien
agtaccctggatggctgtttcttca

SEQ ID NO: 2454800 - DNA, 25 bp, Homo sapien
gccgccagtaccctggatggctgtt

SEQ ID NO: 2454801 - DNA, 25 bp, Homo sapien
cactgtagcagatgtggtggtcttg

SEQ ID NO: 2454802 - DNA, 25 bp, Homo sapien
ttgtgggcgggtagagggaggccca

SEQ ID NO: 2454803 - DNA, 25 bp, Homo sapien
tctctgtccagcgtgggggcactgt

SEQ ID NO: 2454804 - DNA, 25 bp, Homo sapien
tggcactctgcattggtggtcctgt

SEQ ID NO: 2454805 - DNA, 25 bp, Homo sapien
gcctccaaattcaacggggtgcctc

SEQ ID NO: 2454806 - DNA, 25 bp, Homo sapien
tcccactgactacgacctgtacttt

SEQ ID NO: 2454807 - DNA, 25 bp, Homo sapien
tctcctcccacgagggcacctccac

SEQ ID NO: 2454808 - DNA, 25 bp, Homo sapien
aacacctggaccaccgccatgatgt

SEQ ID NO: 2454809 - DNA, 25 bp, Homo sapien
cttcaaggcactgacatccaagcat

SEQ ID NO: 2454810 - DNA, 25 bp, Homo sapien
atggttcctgggctctcataaaaat

SEQ ID NO: 2454811 - DNA, 25 bp, Homo sapien
catggttcctgggctctcataaaaa

SEQ ID NO: 2454812 - DNA, 25 bp, Homo sapien
ggcatggttcctgggctctcataaa

SEQ ID NO: 2454813 - DNA, 25 bp, Homo sapien
gcatggttcctgggctctcataaaa

SEQ ID NO: 2454814 - DNA, 25 bp, Homo sapien
aataaggcctcagttaaaacagaag

SEQ ID NO: 2454815 - DNA, 25 bp, Homo sapien
taaggcctcagttaaaacagaagac

SEQ ID NO: 2454816 - DNA, 25 bp, Homo sapien
ggcctcagttaaaacagaagacaga

SEQ ID NO: 2454817 - DNA, 25 bp, Homo sapien
caaataaggcctcagttaaaacaga

SEQ ID NO: 2454818 - DNA, 25 bp, Homo sapien
aacacctctaatatcaggagcaagg

SEQ ID NO: 2454819 - DNA, 25 bp, Homo sapien
acacctctaatatcaggagcaaggg

SEQ ID NO: 2454820 - DNA, 25 bp, Homo sapien
cctctaatatcaggagcaagggata

SEQ ID NO: 2454821 - DNA, 25 bp, Homo sapien
cacctctaatatcaggagcaaggga

SEQ ID NO: 2454822 - DNA, 25 bp, Homo sapien
cccttgctatcaggaagggtgaggc

SEQ ID NO: 2454823 - DNA, 25 bp, Homo sapien
cttgctatcaggaagggtgaggctt

SEQ ID NO: 2454824 - DNA, 25 bp, Homo sapien
ttcccttgctatcaggaagggtgag

SEQ ID NO: 2454825 - DNA, 25 bp, Homo sapien
cttgcctgggaaggatcccccgctt

SEQ ID NO: 2454826 - DNA, 25 bp, Homo sapien
tgcttcctatccacccagctgaggt

SEQ ID NO: 2454827 - DNA, 25 bp, Homo sapien
agggcaagacaccaactgagtggaa

SEQ ID NO: 2454828 - DNA, 25 bp, Homo sapien
gctctcctgggaccactgatactgg

SEQ ID NO: 2454829 - DNA, 25 bp, Homo sapien
tgtcctgaagagacactgcctggct

SEQ ID NO: 2454830 - DNA, 25 bp, Homo sapien
tccacctactgacccatgcccactt

SEQ ID NO: 2454831 - DNA, 25 bp, Homo sapien
ccacctactgacccatgcccacttg

SEQ ID NO: 2454832 - DNA, 25 bp, Homo sapien
gcaaatacaaagcccggcaggttcc

SEQ ID NO: 2454833 - DNA, 25 bp, Homo sapien
aatacaaagcccggcaggttccatt

SEQ ID NO: 2454834 - DNA, 25 bp, Homo sapien
caaatacaaagcccggcaggttcca

SEQ ID NO: 2454835 - DNA, 25 bp, Homo sapien
aaatacaaagcccggcaggttccat

SEQ ID NO: 2454836 - DNA, 25 bp, Homo sapien
tcatttcaagttcatgacatctcct

SEQ ID NO: 2454837 - DNA, 25 bp, Homo sapien
tctaggtagctcatgccagccatcc

SEQ ID NO: 2454838 - DNA, 25 bp, Homo sapien
ggtagctcatgccagccatcctttc

SEQ ID NO: 2454839 - DNA, 25 bp, Homo sapien
gacatctcctctaggtagctcatgc

SEQ ID NO: 2454840 - DNA, 25 bp, Homo sapien
gaagttggatcaccaaacccagcag

SEQ ID NO: 2454841 - DNA, 25 bp, Homo sapien
cacactcatactggtacaagggaaa

SEQ ID NO: 2454842 - DNA, 25 bp, Homo sapien
atcagatgggacttaatgttcagcc

SEQ ID NO: 2454843 - DNA, 25 bp, Homo sapien
tgcaggctagaatgtgcccacactc

SEQ ID NO: 2454844 - DNA, 25 bp, Homo sapien
gggaaaggggtctatgactgatcat

SEQ ID NO: 2454845 - DNA, 25 bp, Homo sapien
ccctgggtgatatactgggtgactg

SEQ ID NO: 2454846 - DNA, 25 bp, Homo sapien
ggccctgggtgatatactgggtgac

SEQ ID NO: 2454847 - DNA, 25 bp, Homo sapien
gaggccctgggtgatatactgggtg

SEQ ID NO: 2454848 - DNA, 25 bp, Homo sapien
ctcccacttctattgtaaggcggca

SEQ ID NO: 2454849 - DNA, 25 bp, Homo sapien
cttctattgtaaggcggcatgattc

SEQ ID NO: 2454850 - DNA, 25 bp, Homo sapien
cccacttctattgtaaggcggcatg

SEQ ID NO: 2454851 - DNA, 25 bp, Homo sapien
cacttctattgtaaggcggcatgat

SEQ ID NO: 2454852 - DNA, 25 bp, Homo sapien
cctgcgtctggctcaacgatttcca

SEQ ID NO: 2454853 - DNA, 25 bp, Homo sapien
ttccatgttcctcgttggcatagga

SEQ ID NO: 2454854 - DNA, 25 bp, Homo sapien
tggcataggatttcctgcgtctggc

SEQ ID NO: 2454855 - DNA, 25 bp, Homo sapien
ccatgttcctcgttggcataggatt

SEQ ID NO: 2454856 - DNA, 25 bp, Homo sapien
gtttcattaaatctagctccttggg

SEQ ID NO: 2454857 - DNA, 25 bp, Homo sapien
acttccagtaggctcactgtgctcc

SEQ ID NO: 2454858 - DNA, 25 bp, Homo sapien
aggctctgtttcattaaatctagct

SEQ ID NO: 2454859 - DNA, 25 bp, Homo sapien
gggacttccagtaggctcactgtgc

SEQ ID NO: 2454860 - DNA, 25 bp, Homo sapien
tcaagggtggaaatcgccacagaca

SEQ ID NO: 2454861 - DNA, 25 bp, Homo sapien
caagggtggaaatcgccacagacag

SEQ ID NO: 2454862 - DNA, 25 bp, Homo sapien
aaagaatgtcagcgttgcctagcaa

SEQ ID NO: 2454863 - DNA, 25 bp, Homo sapien
catgatcctatgagggggcacatgt

SEQ ID NO: 2454864 - DNA, 25 bp, Homo sapien
agagaaggagatctgcttggaggtg

SEQ ID NO: 2454865 - DNA, 25 bp, Homo sapien
ttctggctagcctcacaaagaatgt

SEQ ID NO: 2454866 - DNA, 25 bp, Homo sapien
catcttgaggacaaagctgggagac

SEQ ID NO: 2454867 - DNA, 25 bp, Homo sapien
tcttgaggacaaagctgggagacac

SEQ ID NO: 2454868 - DNA, 25 bp, Homo sapien
tcatcttgaggacaaagctgggaga

SEQ ID NO: 2454869 - DNA, 25 bp, Homo sapien
ttgaggacaaagctgggagacacac

SEQ ID NO: 2454870 - DNA, 25 bp, Homo sapien
acatcttcttgtgatgttatcctgg

SEQ ID NO: 2454871 - DNA, 25 bp, Homo sapien
cttccatggaggtgcgtcagcagtg

SEQ ID NO: 2454872 - DNA, 25 bp, Homo sapien
gagacttccatggaggtgcgtcagc

SEQ ID NO: 2454873 - DNA, 25 bp, Homo sapien
agataaagagacttccatggaggtg

SEQ ID NO: 2454874 - DNA, 25 bp, Homo sapien
taaagagacttccatggaggtgcgt

SEQ ID NO: 2454875 - DNA, 25 bp, Homo sapien
ttcaggtcccagtcaagcagttgct

SEQ ID NO: 2454876 - DNA, 25 bp, Homo sapien
aataatccatcgtcttgggttttca

SEQ ID NO: 2454877 - DNA, 25 bp, Homo sapien
tgagggggcaataatccatcgtctt

SEQ ID NO: 2454878 - DNA, 25 bp, Homo sapien
gggcaataatccatcgtcttgggtt

SEQ ID NO: 2454879 - DNA, 25 bp, Homo sapien
cagcaataaggtcagacaggggtga

SEQ ID NO: 2454880 - DNA, 25 bp, Homo sapien
agcagcaataaggtcagacaggggt

SEQ ID NO: 2454881 - DNA, 25 bp, Homo sapien
gtgagcagcaataaggtcagacagg

SEQ ID NO: 2454882 - DNA, 25 bp, Homo sapien
ttttggacatagagtgtgagcagca

SEQ ID NO: 2454883 - DNA, 25 bp, Homo sapien
caggccagctccgactgtaccattt

SEQ ID NO: 2454884 - DNA, 25 bp, Homo sapien
gaggcaggccaaacctgccggtgac

SEQ ID NO: 2454885 - DNA, 25 bp, Homo sapien
tatctccccgtgcaataaaagccac

SEQ ID NO: 2454886 - DNA, 25 bp, Homo sapien
gtgaccaaggtatctccccgtgcaa

SEQ ID NO: 2454887 - DNA, 25 bp, Homo sapien
tgccggtgaccaaggtatctccccg

SEQ ID NO: 2454888 - DNA, 25 bp, Homo sapien
catctctgtcgtctggtcccctgga

SEQ ID NO: 2454889 - DNA, 25 bp, Homo sapien
cccttgggccatctctgtcgtctgg

SEQ ID NO: 2454890 - DNA, 25 bp, Homo sapien
tctgtcgtctggtcccctggaggag

SEQ ID NO: 2454891 - DNA, 25 bp, Homo sapien
tgggccatctctgtcgtctggtccc

SEQ ID NO: 2454892 - DNA, 25 bp, Homo sapien
tgcccttcatcccgaacctcacagg

SEQ ID NO: 2454893 - DNA, 25 bp, Homo sapien
gcccttcatcccgaacctcacaggg

SEQ ID NO: 2454894 - DNA, 25 bp, Homo sapien
gctgcccttcatcccgaacctcaca

SEQ ID NO: 2454895 - DNA, 25 bp, Homo sapien
cccttcatcccgaacctcacagggg

SEQ ID NO: 2454896 - DNA, 25 bp, Homo sapien
tccttgcccgttggaatactctcat

SEQ ID NO: 2454897 - DNA, 25 bp, Homo sapien
gcccgttggaatactctcatgtgaa

SEQ ID NO: 2454898 - DNA, 25 bp, Homo sapien
ttgcccgttggaatactctcatgtg

SEQ ID NO: 2454899 - DNA, 25 bp, Homo sapien
cgttggaatactctcatgtgaacac

SEQ ID NO: 2454900 - DNA, 25 bp, Homo sapien
actgtatgtcctaggatgaaatccc

SEQ ID NO: 2454901 - DNA, 25 bp, Homo sapien
gagtctaccctcatcacgtgaagca

SEQ ID NO: 2454902 - DNA, 25 bp, Homo sapien
cccaacatgatggaggagtctaccc

SEQ ID NO: 2454903 - DNA, 25 bp, Homo sapien
caagctctcctgtgaactgaattcg

SEQ ID NO: 2454904 - DNA, 25 bp, Homo sapien
tcttttggaacattagggatattga

SEQ ID NO: 2454905 - DNA, 25 bp, Homo sapien
gtctgtcctcccctaggatcatgga

SEQ ID NO: 2454906 - DNA, 25 bp, Homo sapien
cattagggatattgaagattcttcc

SEQ ID NO: 2454907 - DNA, 25 bp, Homo sapien
tctgtcctcccctaggatcatggaa

SEQ ID NO: 2454908 - DNA, 25 bp, Homo sapien
agtccaaacgttctccgcatgtaga

SEQ ID NO: 2454909 - DNA, 25 bp, Homo sapien
aaacgttctccgcatgtagaagtac

SEQ ID NO: 2454910 - DNA, 25 bp, Homo sapien
tctccgcatgtagaagtactcccac

SEQ ID NO: 2454911 - DNA, 25 bp, Homo sapien
gcagtccaaacgttctccgcatgta

SEQ ID NO: 2454912 - DNA, 25 bp, Homo sapien
ccagaggcgggtgtccgcgaacgac

SEQ ID NO: 2454913 - DNA, 25 bp, Homo sapien
cagaggcgggtgtccgcgaacgacg

SEQ ID NO: 2454914 - DNA, 25 bp, Homo sapien
gaggcgggtgtccgcgaacgacggc

SEQ ID NO: 2454915 - DNA, 25 bp, Homo sapien
agaggcgggtgtccgcgaacgacgg

SEQ ID NO: 2454916 - DNA, 25 bp, Homo sapien
tggggctctcttgggtagtgaaggg

SEQ ID NO: 2454917 - DNA, 25 bp, Homo sapien
aagattcctgaagtaaaagagtcac

SEQ ID NO: 2454918 - DNA, 25 bp, Homo sapien
tgaagtaaaagagtcaccagagcca

SEQ ID NO: 2454919 - DNA, 25 bp, Homo sapien
cctgaagtaaaagagtcaccagagc

SEQ ID NO: 2454920 - DNA, 25 bp, Homo sapien
tgaagattcctgaagtaaaagagtc

SEQ ID NO: 2454921 - DNA, 25 bp, Homo sapien
aggctttgaggaagactgccagcct

SEQ ID NO: 2454922 - DNA, 25 bp, Homo sapien
gggctgtcatcaacaagtagactag

SEQ ID NO: 2454923 - DNA, 25 bp, Homo sapien
ggggctgtcatcaacaagtagacta

SEQ ID NO: 2454924 - DNA, 25 bp, Homo sapien
agatgcacagatcatattggatctt

SEQ ID NO: 2454925 - DNA, 25 bp, Homo sapien
catattggatcttggggctgtcatc

SEQ ID NO: 2454926 - DNA, 25 bp, Homo sapien
ttaatattacagctagcaagggcct

SEQ ID NO: 2454927 - DNA, 25 bp, Homo sapien
caaactccatcttaatattacagct

SEQ ID NO: 2454928 - DNA, 25 bp, Homo sapien
tacagctagcaagggccttacattc

SEQ ID NO: 2454929 - DNA, 25 bp, Homo sapien
catcttaatattacagctagcaagg

SEQ ID NO: 2454930 - DNA, 25 bp, Homo sapien
tcattagcccaaatcaagtgacaaa

SEQ ID NO: 2454931 - DNA, 25 bp, Homo sapien
ctgtcattagcccaaatcaagtgac

SEQ ID NO: 2454932 - DNA, 25 bp, Homo sapien
tcaagtgacaaagaggcagtatgga

SEQ ID NO: 2454933 - DNA, 25 bp, Homo sapien
tttgaaaccaaagctgtcattagcc

SEQ ID NO: 2454934 - DNA, 25 bp, Homo sapien
gctgaacagcacaagtttgctatca

SEQ ID NO: 2454935 - DNA, 25 bp, Homo sapien
tgtgctgaacagcacaagtttgcta

SEQ ID NO: 2454936 - DNA, 25 bp, Homo sapien
tgctgaacagcacaagtttgctatc

SEQ ID NO: 2454937 - DNA, 25 bp, Homo sapien
gaacagcacaagtttgctatcatct

SEQ ID NO: 2454938 - DNA, 25 bp, Homo sapien
ctgcattcagtgtgttttctcctgt

SEQ ID NO: 2454939 - DNA, 25 bp, Homo sapien
gcattcagtgtgttttctcctgtca

SEQ ID NO: 2454940 - DNA, 25 bp, Homo sapien
attcagtgtgttttctcctgtcaat

SEQ ID NO: 2454941 - DNA, 25 bp, Homo sapien
tacttctgcattcagtgtgttttct

SEQ ID NO: 2454942 - DNA, 25 bp, Homo sapien
gttaaagacatagaaacatttttca

SEQ ID NO: 2454943 - DNA, 25 bp, Homo sapien
ttaaagacatagaaacatttttcac

SEQ ID NO: 2454944 - DNA, 25 bp, Homo sapien
tcatctgttaaagacatagaaacat

SEQ ID NO: 2454945 - DNA, 25 bp, Homo sapien
tctgttaaagacatagaaacatttt

SEQ ID NO: 2454946 - DNA, 25 bp, Homo sapien
ttccactgaaccaaatactctgtct

SEQ ID NO: 2454947 - DNA, 25 bp, Homo sapien
tgaaccaaatactctgtcttctctt

SEQ ID NO: 2454948 - DNA, 25 bp, Homo sapien
cactgaaccaaatactctgtcttct

SEQ ID NO: 2454949 - DNA, 25 bp, Homo sapien
tccactgaaccaaatactctgtctt

SEQ ID NO: 2454950 - DNA, 25 bp, Homo sapien
ctttatcatcttctattttcaattc

SEQ ID NO: 2454951 - DNA, 25 bp, Homo sapien
ttatcatcttctattttcaattctg

SEQ ID NO: 2454952 - DNA, 25 bp, Homo sapien
tttatcatcttctattttcaattct

SEQ ID NO: 2454953 - DNA, 25 bp, Homo sapien
caaatttataccagtgatctgagtc

SEQ ID NO: 2454954 - DNA, 25 bp, Homo sapien
cagtgatctgagtcattggctacca

SEQ ID NO: 2454955 - DNA, 25 bp, Homo sapien
taccagtgatctgagtcattggcta

SEQ ID NO: 2454956 - DNA, 25 bp, Homo sapien
tataccagtgatctgagtcattggc

SEQ ID NO: 2454957 - DNA, 25 bp, Homo sapien
aaggagaacatgcataaacctcaac

SEQ ID NO: 2454958 - DNA, 25 bp, Homo sapien
tgaaacccatttgagtgacccaggt

SEQ ID NO: 2454959 - DNA, 25 bp, Homo sapien
ccatttgagtgacccaggtcatttt

SEQ ID NO: 2454960 - DNA, 25 bp, Homo sapien
aatttgttgtaaaaggagaacatgc

SEQ ID NO: 2454961 - DNA, 25 bp, Homo sapien
gctggcctgcggcatcaaataaagg

SEQ ID NO: 2454962 - DNA, 25 bp, Homo sapien
aaggtctgaaaagggtgctcgcgcg

SEQ ID NO: 2454963 - DNA, 25 bp, Homo sapien
cagagttcagattgttctgcgccca

SEQ ID NO: 2454964 - DNA, 25 bp, Homo sapien
gaggaactgcaagacccacgtggtc

SEQ ID NO: 2454965 - DNA, 25 bp, Homo sapien
tgagccttggcttcgctatgtgtcc

SEQ ID NO: 2454966 - DNA, 25 bp, Homo sapien
ccttgggtagcgctgcatgagattg

SEQ ID NO: 2454967 - DNA, 25 bp, Homo sapien
cctctcatcccacaggaggctgctc

SEQ ID NO: 2454968 - DNA, 25 bp, Homo sapien
gcatgagattgagccacaggccctg

SEQ ID NO: 2454969 - DNA, 25 bp, Homo sapien
ttgaatttggttcacagtagagcag

SEQ ID NO: 2454970 - DNA, 25 bp, Homo sapien
tggagatggatgtgcttcaaaacca

SEQ ID NO: 2454971 - DNA, 25 bp, Homo sapien
ttctccgtggtcaggtccccctgga

SEQ ID NO: 2454972 - DNA, 25 bp, Homo sapien
ccagaatcaggtcccgtgaagtttg

SEQ ID NO: 2454973 - DNA, 25 bp, Homo sapien
gatggatgtgcttcaaaaccatgag

SEQ ID NO: 2454974 - DNA, 25 bp, Homo sapien
tactcccacgtgaacatcgagccat

SEQ ID NO: 2454975 - DNA, 25 bp, Homo sapien
tggagtactcccacgtgaacatcga

SEQ ID NO: 2454976 - DNA, 25 bp, Homo sapien
gagtactcccacgtgaacatcgagc

SEQ ID NO: 2454977 - DNA, 25 bp, Homo sapien
gtactcccacgtgaacatcgagcca

SEQ ID NO: 2454978 - DNA, 25 bp, Homo sapien
gaggaggtatttcgagactgtgagg

SEQ ID NO: 2454979 - DNA, 25 bp, Homo sapien
ggattggaagagtctgatgagttgt

SEQ ID NO: 2454980 - DNA, 25 bp, Homo sapien
tcagagttgaaaggtgctgggcact

SEQ ID NO: 2454981 - DNA, 25 bp, Homo sapien
tggaatcatacctaagacctcagag

SEQ ID NO: 2454982 - DNA, 25 bp, Homo sapien
tggtggacaacgtcatggtggtggt

SEQ ID NO: 2454983 - DNA, 25 bp, Homo sapien
cctggccagccacagattcgctgga

SEQ ID NO: 2454984 - DNA, 25 bp, Homo sapien
cagccagggtacagagctcgaaggc

SEQ ID NO: 2454985 - DNA, 25 bp, Homo sapien
gaggcaccccattcaaattggaggt

SEQ ID NO: 2454986 - DNA, 25 bp, Homo sapien
tgcctcccccgcctggatggcacag

SEQ ID NO: 2454987 - DNA, 25 bp, Homo sapien
cacatctttgcagctgcccattcgg

SEQ ID NO: 2454988 - DNA, 25 bp, Homo sapien
ggtgcctcccccgcctggatggcac

SEQ ID NO: 2454989 - DNA, 25 bp, Homo sapien
tgcagctgcccattcggaatgactg

SEQ ID NO: 2454990 - DNA, 25 bp, Homo sapien
aaacacaaggtgcttcagactcagg

SEQ ID NO: 2454991 - DNA, 25 bp, Homo sapien
caggttcacggtgcacggggctgct

SEQ ID NO: 2454992 - DNA, 25 bp, Homo sapien
gtgcttcagactcaggttcacggtg

SEQ ID NO: 2454993 - DNA, 25 bp, Homo sapien
accagctccccagataggctttctt

SEQ ID NO: 2454994 - DNA, 25 bp, Homo sapien
gtgacacacatggagaactcaaggc

SEQ ID NO: 2454995 - DNA, 25 bp, Homo sapien
acatggagaactcaaggctcaggga

SEQ ID NO: 2454996 - DNA, 25 bp, Homo sapien
tcatatttcagaattggggaacctg

SEQ ID NO: 2454997 - DNA, 25 bp, Homo sapien
ggcagaaaagcccatcagggaactg

SEQ ID NO: 2454998 - DNA, 25 bp, Homo sapien
ccagtgtgggtatgggcacgttcca

SEQ ID NO: 2454999 - DNA, 25 bp, Homo sapien
gggcacgttccagtttgcgtgtcca

SEQ ID NO: 2455000 - DNA, 25 bp, Homo sapien
ccagtttccctcgtaccagtgtggg

SEQ ID NO: 2455001 - DNA, 25 bp, Homo sapien
gcctgtgtgtctacgctgatgcacg

SEQ ID NO: 2455002 - DNA, 25 bp, Homo sapien
ggattcgctattcgggaatccctgt

SEQ ID NO: 2455003 - DNA, 25 bp, Homo sapien
ttcgctattcgggaatccctgtgca

SEQ ID NO: 2455004 - DNA, 25 bp, Homo sapien
agggctttgggattcgctattcggg

SEQ ID NO: 2455005 - DNA, 25 bp, Homo sapien
ctttgggattcgctattcgggaatc

SEQ ID NO: 2455006 - DNA, 25 bp, Homo sapien
ccatatgcttcacgaggagcaggga

SEQ ID NO: 2455007 - DNA, 25 bp, Homo sapien
atatgcttcacgaggagcagggagc

SEQ ID NO: 2455008 - DNA, 25 bp, Homo sapien
tgcttcacgaggagcagggagcacc

SEQ ID NO: 2455009 - DNA, 25 bp, Homo sapien
gagctaccatatgcttcacgaggag

SEQ ID NO: 2455010 - DNA, 25 bp, Homo sapien
caataatgaaaatcaccacagctcc

SEQ ID NO: 2455011 - DNA, 25 bp, Homo sapien
gaaaatcaccacagctcctggagta

SEQ ID NO: 2455012 - DNA, 25 bp, Homo sapien
aaatcaccacagctcctggagtaac

SEQ ID NO: 2455013 - DNA, 25 bp, Homo sapien
acagctcctggagtaactctcccaa

SEQ ID NO: 2455014 - DNA, 25 bp, Homo sapien
tcatggcatgtgcttccgccataag

SEQ ID NO: 2455015 - DNA, 25 bp, Homo sapien
aatcatggcatgtgcttccgccata

SEQ ID NO: 2455016 - DNA, 25 bp, Homo sapien
atggcatgtgcttccgccataagac

SEQ ID NO: 2455017 - DNA, 25 bp, Homo sapien
ataatcatggcatgtgcttccgcca

SEQ ID NO: 2455018 - DNA, 25 bp, Homo sapien
atctctaccacgggcctcaccgtag

SEQ ID NO: 2455019 - DNA, 25 bp, Homo sapien
ctaccacgggcctcaccgtagccat

SEQ ID NO: 2455020 - DNA, 25 bp, Homo sapien
gggcctcaccgtagccatcatggta

SEQ ID NO: 2455021 - DNA, 25 bp, Homo sapien
acgggcctcaccgtagccatcatgg

SEQ ID NO: 2455022 - DNA, 25 bp, Homo sapien
tcccaactaggatgaccataatcac

SEQ ID NO: 2455023 - DNA, 25 bp, Homo sapien
tcatcccaactaggatgaccataat

SEQ ID NO: 2455024 - DNA, 25 bp, Homo sapien
gaatgttcatcccaactaggatgac

SEQ ID NO: 2455025 - DNA, 25 bp, Homo sapien
tgttcatcccaactaggatgaccat

SEQ ID NO: 2455026 - DNA, 25 bp, Homo sapien
ggtatgcatagtctctaggtggtgg

SEQ ID NO: 2455027 - DNA, 25 bp, Homo sapien
ggagcataatccctggtttctcggg

SEQ ID NO: 2455028 - DNA, 25 bp, Homo sapien
atgcatagtctctaggtggtggagc

SEQ ID NO: 2455029 - DNA, 25 bp, Homo sapien
agcataatccctggtttctcgggaa

SEQ ID NO: 2455030 - DNA, 25 bp, Homo sapien
gtctccagataatggagcataatcc

SEQ ID NO: 2455031 - DNA, 25 bp, Homo sapien
ctccagataatggagcataatccct

SEQ ID NO: 2455032 - DNA, 25 bp, Homo sapien
catagtctccagataatggagcata

SEQ ID NO: 2455033 - DNA, 25 bp, Homo sapien
tgcatagtctccagataatggagca

SEQ ID NO: 2455034 - DNA, 25 bp, Homo sapien
ggtatgcatagcctctagatggtgg

SEQ ID NO: 2455035 - DNA, 25 bp, Homo sapien
tcacggtatgcatagcctctagatg

SEQ ID NO: 2455036 - DNA, 25 bp, Homo sapien
acggtatgcatagcctctagatggt

SEQ ID NO: 2455037 - DNA, 25 bp, Homo sapien
aatcacggtatgcatagcctctaga

SEQ ID NO: 2455038 - DNA, 25 bp, Homo sapien
aatgttcatgccgacgagaatgacc

SEQ ID NO: 2455039 - DNA, 25 bp, Homo sapien
aataatgttcatgccgacgagaatg

SEQ ID NO: 2455040 - DNA, 25 bp, Homo sapien
agaataatgttcatgccgacgagaa

SEQ ID NO: 2455041 - DNA, 25 bp, Homo sapien
taatgttcatgccgacgagaatgac

SEQ ID NO: 2455042 - DNA, 25 bp, Homo sapien
ggagcataatccctagtttctcggg

SEQ ID NO: 2455043 - DNA, 25 bp, Homo sapien
ggtatgcgtagcctctagatggtgg

SEQ ID NO: 2455044 - DNA, 25 bp, Homo sapien
tatgcgtagcctctagatggtggag

SEQ ID NO: 2455045 - DNA, 25 bp, Homo sapien
agcataatccctagtttctcgggaa

SEQ ID NO: 2455046 - DNA, 25 bp, Homo sapien
gagattgtcactctgcatggaggaa

SEQ ID NO: 2455047 - DNA, 25 bp, Homo sapien
atcatctcttggtgatatatgatca

SEQ ID NO: 2455048 - DNA, 25 bp, Homo sapien
gattgtcactctgcatggaggaact

SEQ ID NO: 2455049 - DNA, 25 bp, Homo sapien
ggtgatatatgatcatttctccagg

SEQ ID NO: 2455050 - DNA, 25 bp, Homo sapien
gagtcccctagaataactcatcttg

SEQ ID NO: 2455051 - DNA, 25 bp, Homo sapien
cttgagatcaggagtgtatccacca

SEQ ID NO: 2455052 - DNA, 25 bp, Homo sapien
gatggacgtcttttaactggaatga

SEQ ID NO: 2455053 - DNA, 25 bp, Homo sapien
taactggaatgagtcccctagaata

SEQ ID NO: 2455054 - DNA, 25 bp, Homo sapien
catgtgagggaagccaccctcctgt

SEQ ID NO: 2455055 - DNA, 25 bp, Homo sapien
tgagggaagccaccctcctgttcct

SEQ ID NO: 2455056 - DNA, 25 bp, Homo sapien
cttcatgtgagggaagccaccctcc

SEQ ID NO: 2455057 - DNA, 25 bp, Homo sapien
tgtgagggaagccaccctcctgttc

SEQ ID NO: 2455058 - DNA, 25 bp, Homo sapien
acttttattgcttttccatccaaag

SEQ ID NO: 2455059 - DNA, 25 bp, Homo sapien
actttgaaaagatggtttcttggct

SEQ ID NO: 2455060 - DNA, 25 bp, Homo sapien
caccactttgaaaagatggtttctt

SEQ ID NO: 2455061 - DNA, 25 bp, Homo sapien
ttcttggcttgttctacttttattg

SEQ ID NO: 2455062 - DNA, 25 bp, Homo sapien
atattttccccagatttgcccatgg

SEQ ID NO: 2455063 - DNA, 25 bp, Homo sapien
ttttgttatttctgggatcaaaata

SEQ ID NO: 2455064 - DNA, 25 bp, Homo sapien
ttccccagatttgcccatggctgct

SEQ ID NO: 2455065 - DNA, 25 bp, Homo sapien
ttttccccagatttgcccatggctg

SEQ ID NO: 2455066 - DNA, 25 bp, Homo sapien
tggatttgctggttcgatcctttat

SEQ ID NO: 2455067 - DNA, 25 bp, Homo sapien
tttgctggttcgatcctttatcaaa

SEQ ID NO: 2455068 - DNA, 25 bp, Homo sapien
gatttgctggttcgatcctttatca

SEQ ID NO: 2455069 - DNA, 25 bp, Homo sapien
tgctggttcgatcctttatcaaaag

SEQ ID NO: 2455070 - DNA, 25 bp, Homo sapien
gaccatatttcccaaacactgcttt

SEQ ID NO: 2455071 - DNA, 25 bp, Homo sapien
gaaaagcttgccaggatgatctgcc

SEQ ID NO: 2455072 - DNA, 25 bp, Homo sapien
cttctgatatgggaccatatttccc

SEQ ID NO: 2455073 - DNA, 25 bp, Homo sapien
tcttctcattggtctctctattgag

SEQ ID NO: 2455074 - DNA, 25 bp, Homo sapien
agctccatcatctcgctgtaactct

SEQ ID NO: 2455075 - DNA, 25 bp, Homo sapien
gctccatcatctcgctgtaactctt

SEQ ID NO: 2455076 - DNA, 25 bp, Homo sapien
tctctgagaattacatagtcttagt

SEQ ID NO: 2455077 - DNA, 25 bp, Homo sapien
cgtaagtaaccttcaatcgtccagt

SEQ ID NO: 2455078 - DNA, 25 bp, Homo sapien
cacaggttgtgtgtcctctctgaga

SEQ ID NO: 2455079 - DNA, 25 bp, Homo sapien
ttttcttcaattcacgccagtttct

SEQ ID NO: 2455080 - DNA, 25 bp, Homo sapien
atcatcctgccaccggtaaccggga

SEQ ID NO: 2455081 - DNA, 25 bp, Homo sapien
aaggaaatcatcctgccaccggtaa

SEQ ID NO: 2455082 - DNA, 25 bp, Homo sapien
gtgctccttcatgatgatttcactg

SEQ ID NO: 2455083 - DNA, 25 bp, Homo sapien
acagtgctccttcatgatgatttca

SEQ ID NO: 2455084 - DNA, 25 bp, Homo sapien
cctcgtgacgccttgcaatttcgca

SEQ ID NO: 2455085 - DNA, 25 bp, Homo sapien
gtcacccttcattgttggccctcta

SEQ ID NO: 2455086 - DNA, 25 bp, Homo sapien
ggattgggtgggcaagcctcgtgac

SEQ ID NO: 2455087 - DNA, 25 bp, Homo sapien
caatttcgcaagaacacagacaatg

SEQ ID NO: 2455088 - DNA, 25 bp, Homo sapien
tgtcttctgggcaactgtatgtctc

SEQ ID NO: 2455089 - DNA, 25 bp, Homo sapien
atcattgcacacacggacgccatgg

SEQ ID NO: 2455090 - DNA, 25 bp, Homo sapien
cacaaatgagtcttcgcagccttcg

SEQ ID NO: 2455091 - DNA, 25 bp, Homo sapien
tatcgtttcacatctgacactggag

SEQ ID NO: 2455092 - DNA, 25 bp, Homo sapien
ctatgtgtgtcctaactccaggacc

SEQ ID NO: 2455093 - DNA, 25 bp, Homo sapien
ggacccacaggcctgtcaaccccca

SEQ ID NO: 2455094 - DNA, 25 bp, Homo sapien
tatgtgtgtcctaactccaggaccc

SEQ ID NO: 2455095 - DNA, 25 bp, Homo sapien
acaggcctgtcaacccccagccctg

SEQ ID NO: 2455096 - DNA, 25 bp, Homo sapien
tgccaaggaatgtcgaagaaggtcc

SEQ ID NO: 2455097 - DNA, 25 bp, Homo sapien
gaatgtcgaagaaggtcctttgcca

SEQ ID NO: 2455098 - DNA, 25 bp, Homo sapien
tgggtagtgctgcagaatatagagc

SEQ ID NO: 2455099 - DNA, 25 bp, Homo sapien
ctgcagaatatagagccacaggccc

SEQ ID NO: 2455100 - DNA, 25 bp, Homo sapien
ctcagcaatcgtgccgtaacctggg

SEQ ID NO: 2455101 - DNA, 25 bp, Homo sapien
cccacctcagcaatcgtgccgtaac

SEQ ID NO: 2455102 - DNA, 25 bp, Homo sapien
aatcgtgccgtaacctgggccctca

SEQ ID NO: 2455103 - DNA, 25 bp, Homo sapien
agcaatcgtgccgtaacctgggccc

SEQ ID NO: 2455104 - DNA, 25 bp, Homo sapien
tcaacctgaccaggaccttagcgcc

SEQ ID NO: 2455105 - DNA, 25 bp, Homo sapien
gacctcaacctgaccaggaccttag

SEQ ID NO: 2455106 - DNA, 25 bp, Homo sapien
aaggacctcaacctgaccaggacct

SEQ ID NO: 2455107 - DNA, 25 bp, Homo sapien
tgaccaggaccttagcgccctcccc

SEQ ID NO: 2455108 - DNA, 25 bp, Homo sapien
tactgcaaacaaggcactgacatgg

SEQ ID NO: 2455109 - DNA, 25 bp, Homo sapien
tcaaggtgcgatcaacaagagtgtc

SEQ ID NO: 2455110 - DNA, 25 bp, Homo sapien
cgtggctggacgtctcaaaatctct

SEQ ID NO: 2455111 - DNA, 25 bp, Homo sapien
taatggctcaaactactggaaagac

SEQ ID NO: 2455112 - DNA, 25 bp, Homo sapien
tagatctaagtttaagaagttggaa

SEQ ID NO: 2455113 - DNA, 25 bp, Homo sapien
gatctaagtttaagaagttggaata

SEQ ID NO: 2455114 - DNA, 25 bp, Homo sapien
ttagatctaagtttaagaagttgga

SEQ ID NO: 2455115 - DNA, 25 bp, Homo sapien
ctattagatctaagtttaagaagtt

SEQ ID NO: 2455116 - DNA, 25 bp, Homo sapien
gaattttttataactgtctgcatgt

SEQ ID NO: 2455117 - DNA, 25 bp, Homo sapien
ccaggcacagaattttttataactg

SEQ ID NO: 2455118 - DNA, 25 bp, Homo sapien
aagcagcatcagcaggcagaggaat

SEQ ID NO: 2455119 - DNA, 25 bp, Homo sapien
atgttctcctcatgtgggggaaaag

SEQ ID NO: 2455120 - DNA, 25 bp, Homo sapien
gagtttgccacttgactgcagcctg

SEQ ID NO: 2455121 - DNA, 25 bp, Homo sapien
atctgagagtttgccacttgactgc

SEQ ID NO: 2455122 - DNA, 25 bp, Homo sapien
gagagtttgccacttgactgcagcc

SEQ ID NO: 2455123 - DNA, 25 bp, Homo sapien
gtgatctgagagtttgccacttgac

SEQ ID NO: 2455124 - DNA, 25 bp, Homo sapien
tccagattccgtgtgaggtggacta

SEQ ID NO: 2455125 - DNA, 25 bp, Homo sapien
gtcctccagattccgtgtgaggtgg

SEQ ID NO: 2455126 - DNA, 25 bp, Homo sapien
ggtcctccagattccgtgtgaggtg

SEQ ID NO: 2455127 - DNA, 25 bp, Homo sapien
ccagattccgtgtgaggtggactaa

SEQ ID NO: 2455128 - DNA, 25 bp, Homo sapien
aaggtgccccgatcctgaaatgtgg

SEQ ID NO: 2455129 - DNA, 25 bp, Homo sapien
tcccggatccttgggttctccatgt

SEQ ID NO: 2455130 - DNA, 25 bp, Homo sapien
ggtgttacatgtccctgatgggcct

SEQ ID NO: 2455131 - DNA, 25 bp, Homo sapien
aacccacggattgcctgggattgct

SEQ ID NO: 2455132 - DNA, 25 bp, Homo sapien
ccatgatgccccacggcgaacccca

SEQ ID NO: 2455133 - DNA, 25 bp, Homo sapien
gatagaactgcaatggattgagcca

SEQ ID NO: 2455134 - DNA, 25 bp, Homo sapien
catgggatagaactgcaatggattg

SEQ ID NO: 2455135 - DNA, 25 bp, Homo sapien
gaccaaggaatgaccagctaggtcc

SEQ ID NO: 2455136 - DNA, 25 bp, Homo sapien
ccttcgtgatcccagaaccgctgga

SEQ ID NO: 2455137 - DNA, 25 bp, Homo sapien
cttcgtgatcccagaaccgctggac

SEQ ID NO: 2455138 - DNA, 25 bp, Homo sapien
gaccttcgtgatcccagaaccgctg

SEQ ID NO: 2455139 - DNA, 25 bp, Homo sapien
ttcgtgatcccagaaccgctggact

SEQ ID NO: 2455140 - DNA, 25 bp, Homo sapien
atcatcctgccaccggtaaccggga

SEQ ID NO: 2455141 - DNA, 25 bp, Homo sapien
gtgctccttcatgatgatttcactg

SEQ ID NO: 2455142 - DNA, 25 bp, Homo sapien
acagtgctccttcatgatgatttca

SEQ ID NO: 2455143 - DNA, 25 bp, Homo sapien
aaggaaatcatcctgccaccggtaa

SEQ ID NO: 2455144 - DNA, 25 bp, Homo sapien
cctcgtgacgccttgcaatttcgca

SEQ ID NO: 2455145 - DNA, 25 bp, Homo sapien
gtcacccttcattgttggccctcta

SEQ ID NO: 2455146 - DNA, 25 bp, Homo sapien
ggattgggtgggcaagcctcgtgac

SEQ ID NO: 2455147 - DNA, 25 bp, Homo sapien
caatttcgcaagaacacagacaatg

SEQ ID NO: 2455148 - DNA, 25 bp, Homo sapien
tccttcgaatttgggctgtgcgcaa

SEQ ID NO: 2455149 - DNA, 25 bp, Homo sapien
taatggcatacagattccccgtcct

SEQ ID NO: 2455150 - DNA, 25 bp, Homo sapien
gtggttcaatggctggtaatggcat

SEQ ID NO: 2455151 - DNA, 25 bp, Homo sapien
gctgtgcgcaaagggaccttggcgc

SEQ ID NO: 2455152 - DNA, 25 bp, Homo sapien
ctgctacaagcgagctgccctcaca

SEQ ID NO: 2455153 - DNA, 25 bp, Homo sapien
tgctacaagcgagctgccctcacag

SEQ ID NO: 2455154 - DNA, 25 bp, Homo sapien
gccatcccaaatcggcagccgcaag

SEQ ID NO: 2455155 - DNA, 25 bp, Homo sapien
tgcccgccatcccaaatcggcagcc

SEQ ID NO: 2455156 - DNA, 25 bp, Homo sapien
cccaaatcggcagccgcaaggatat

SEQ ID NO: 2455157 - DNA, 25 bp, Homo sapien
catcccaaatcggcagccgcaagga

SEQ ID NO: 2455158 - DNA, 25 bp, Homo sapien
gtccattgacggccccggtgtgctc

SEQ ID NO: 2455159 - DNA, 25 bp, Homo sapien
tgacggccccggtgtgctcggtcca

SEQ ID NO: 2455160 - DNA, 25 bp, Homo sapien
tgccaccccacgtcgggctccacct

SEQ ID NO: 2455161 - DNA, 25 bp, Homo sapien
cattgacggccccggtgtgctcggt

SEQ ID NO: 2455162 - DNA, 25 bp, Homo sapien
tatcgtttcacatctgacactggag

SEQ ID NO: 2455163 - DNA, 25 bp, Homo sapien
tgtcttctgggcaactgtatgtctc

SEQ ID NO: 2455164 - DNA, 25 bp, Homo sapien
atcattgcacacacggacgccatgg

SEQ ID NO: 2455165 - DNA, 25 bp, Homo sapien
cacaaatgagtcttcgcagccttcg

SEQ ID NO: 2455166 - DNA, 25 bp, Homo sapien
tgccaaggaatgtcgaagaaggtcc

SEQ ID NO: 2455167 - DNA, 25 bp, Homo sapien
ctcagcaatcgtgccgtaacctggg

SEQ ID NO: 2455168 - DNA, 25 bp, Homo sapien
tcctttgccatgatgccccatagct

SEQ ID NO: 2455169 - DNA, 25 bp, Homo sapien
gctgcagaatatagagccacaggcc

SEQ ID NO: 2455170 - DNA, 25 bp, Homo sapien
ggaaactcgggctttcacctgcatg

SEQ ID NO: 2455171 - DNA, 25 bp, Homo sapien
tcgggctttcacctgcatgacccta

SEQ ID NO: 2455172 - DNA, 25 bp, Homo sapien
aactcgggctttcacctgcatgacc

SEQ ID NO: 2455173 - DNA, 25 bp, Homo sapien
gaaactcgggctttcacctgcatga

SEQ ID NO: 2455174 - DNA, 25 bp, Homo sapien
aatcaacaattaaagggaatacatc

SEQ ID NO: 2455175 - DNA, 25 bp, Homo sapien
caaatgatatatggaacttcctcag

SEQ ID NO: 2455176 - DNA, 25 bp, Homo sapien
ccatggagactatcaattttatgaa

SEQ ID NO: 2455177 - DNA, 25 bp, Homo sapien
gacatgcaagcaagtaataaagtga

SEQ ID NO: 2455178 - DNA, 25 bp, Homo sapien
agcctggtctacagagcgagagtac

SEQ ID NO: 2455179 - DNA, 25 bp, Homo sapien
gcctggtctacagagcgagagtacc

SEQ ID NO: 2455180 - DNA, 25 bp, Homo sapien
aagcagcatcagcaggcagaggaat

SEQ ID NO: 2455181 - DNA, 25 bp, Homo sapien
ccaggcacagaattttttataactg

SEQ ID NO: 2455182 - DNA, 25 bp, Homo sapien
ttataactgtctgcatgttctcctc

SEQ ID NO: 2455183 - DNA, 25 bp, Homo sapien
gagagtttgccacttgactgcagcc

SEQ ID NO: 2455184 - DNA, 25 bp, Homo sapien
tccagattccgtgtgaggtggacta

SEQ ID NO: 2455185 - DNA, 25 bp, Homo sapien
ggtcctccagattccgtgtgaggtg

SEQ ID NO: 2455186 - DNA, 25 bp, Homo sapien
gtcctccagattccgtgtgaggtgg

SEQ ID NO: 2455187 - DNA, 25 bp, Homo sapien
ccagattccgtgtgaggtggactaa

SEQ ID NO: 2455188 - DNA, 25 bp, Homo sapien
ccatgatgccccacggcgaacccca

SEQ ID NO: 2455189 - DNA, 25 bp, Homo sapien
gatagaactgcaatggattgagcca

SEQ ID NO: 2455190 - DNA, 25 bp, Homo sapien
gaccaaggaatgaccagctaggtcc

SEQ ID NO: 2455191 - DNA, 25 bp, Homo sapien
catgggatagaactgcaatggattg

SEQ ID NO: 2455192 - DNA, 25 bp, Homo sapien
ccttcgtgatcccagaaccgctgga

SEQ ID NO: 2455193 - DNA, 25 bp, Homo sapien
cttcgtgatcccagaaccgctggac

SEQ ID NO: 2455194 - DNA, 25 bp, Homo sapien
gaccttcgtgatcccagaaccgctg

SEQ ID NO: 2455195 - DNA, 25 bp, Homo sapien
ttcgtgatcccagaaccgctggact

SEQ ID NO: 2455196 - DNA, 25 bp, Homo sapien
aaggaaatcatcctgccaccggtaa

SEQ ID NO: 2455197 - DNA, 25 bp, Homo sapien
gtgctccttcatgatgatttcactg

SEQ ID NO: 2455198 - DNA, 25 bp, Homo sapien
acagtgctccttcatgatgatttca

SEQ ID NO: 2455199 - DNA, 25 bp, Homo sapien
atcatcctgccaccggtaaccggga

SEQ ID NO: 2455200 - DNA, 25 bp, Homo sapien
cctcgtgacgccttgcaatttcgca

SEQ ID NO: 2455201 - DNA, 25 bp, Homo sapien
gtcacccttcattgttggccctcta

SEQ ID NO: 2455202 - DNA, 25 bp, Homo sapien
ggattgggtgggcaagcctcgtgac

SEQ ID NO: 2455203 - DNA, 25 bp, Homo sapien
caatttcgcaagaacacagacaatg

SEQ ID NO: 2455204 - DNA, 25 bp, Homo sapien
taatggcatacagattccccgtcct

SEQ ID NO: 2455205 - DNA, 25 bp, Homo sapien
gctgtgcgcaaagggaccttggcgc

SEQ ID NO: 2455206 - DNA, 25 bp, Homo sapien
gtggttcaatggctggtaatggcat

SEQ ID NO: 2455207 - DNA, 25 bp, Homo sapien
tccttcgaatttgggctgtgcgcaa

SEQ ID NO: 2455208 - DNA, 25 bp, Homo sapien
gccatcccaaatcggcagccgcaag

SEQ ID NO: 2455209 - DNA, 25 bp, Homo sapien
tgcccgccatcccaaatcggcagcc

SEQ ID NO: 2455210 - DNA, 25 bp, Homo sapien
cccaaatcggcagccgcaaggatat

SEQ ID NO: 2455211 - DNA, 25 bp, Homo sapien
catcccaaatcggcagccgcaagga

SEQ ID NO: 2455212 - DNA, 25 bp, Homo sapien
tgccaccccacgtcgggctccacct

SEQ ID NO: 2455213 - DNA, 25 bp, Homo sapien
gtccattgacggccccggtgtgctc

SEQ ID NO: 2455214 - DNA, 25 bp, Homo sapien
tgacggccccggtgtgctcggtcca

SEQ ID NO: 2455215 - DNA, 25 bp, Homo sapien
cattgacggccccggtgtgctcggt

SEQ ID NO: 2455216 - DNA, 25 bp, Homo sapien
tgccaaggaatgtcgaagaaggtcc

SEQ ID NO: 2455217 - DNA, 25 bp, Homo sapien
ctcagcaatcgtgccgtaacctggg

SEQ ID NO: 2455218 - DNA, 25 bp, Homo sapien
tcctttgccatgatgccccatagct

SEQ ID NO: 2455219 - DNA, 25 bp, Homo sapien
gctgcagaatatagagccacaggcc

SEQ ID NO: 2455220 - DNA, 25 bp, Homo sapien
ggaaactcgggctttcacctgcatg

SEQ ID NO: 2455221 - DNA, 25 bp, Homo sapien
tcgggctttcacctgcatgacccta

SEQ ID NO: 2455222 - DNA, 25 bp, Homo sapien
gaaactcgggctttcacctgcatga

SEQ ID NO: 2455223 - DNA, 25 bp, Homo sapien
aactcgggctttcacctgcatgacc

SEQ ID NO: 2455224 - DNA, 25 bp, Homo sapien
aatcaacaattaaagggaatacatc

SEQ ID NO: 2455225 - DNA, 25 bp, Homo sapien
caaatgatatatggaacttcctcag

SEQ ID NO: 2455226 - DNA, 25 bp, Homo sapien
ccatggagactatcaattttatgaa

SEQ ID NO: 2455227 - DNA, 25 bp, Homo sapien
gacatgcaagcaagtaataaagtga

SEQ ID NO: 2455228 - DNA, 25 bp, Homo sapien
gagtttgccacttgactgcagcctg

SEQ ID NO: 2455229 - DNA, 25 bp, Homo sapien
gcaggcagaggaatcctttgaagct

SEQ ID NO: 2455230 - DNA, 25 bp, Homo sapien
tgatctgagagtttgccacttgact

SEQ ID NO: 2455231 - DNA, 25 bp, Homo sapien
tcagcaggcagaggaatcctttgaa

SEQ ID NO: 2455232 - DNA, 25 bp, Homo sapien
tccagattccgtgtgaggtggacta

SEQ ID NO: 2455233 - DNA, 25 bp, Homo sapien
gtcctccagattccgtgtgaggtgg

SEQ ID NO: 2455234 - DNA, 25 bp, Homo sapien
ggtcctccagattccgtgtgaggtg

SEQ ID NO: 2455235 - DNA, 25 bp, Homo sapien
ccagattccgtgtgaggtggactaa

SEQ ID NO: 2455236 - DNA, 25 bp, Homo sapien
ccatgatgccccacggcgaacccca

SEQ ID NO: 2455237 - DNA, 25 bp, Homo sapien
gatagaactgcaatggattgagcca

SEQ ID NO: 2455238 - DNA, 25 bp, Homo sapien
gaccaaggaatgaccagctaggtcc

SEQ ID NO: 2455239 - DNA, 25 bp, Homo sapien
catgggatagaactgcaatggattg

SEQ ID NO: 2455240 - DNA, 25 bp, Homo sapien
ccttcgtgatcccagaaccgctgga

SEQ ID NO: 2455241 - DNA, 25 bp, Homo sapien
cttcgtgatcccagaaccgctggac

SEQ ID NO: 2455242 - DNA, 25 bp, Homo sapien
gaccttcgtgatcccagaaccgctg

SEQ ID NO: 2455243 - DNA, 25 bp, Homo sapien
ttcgtgatcccagaaccgctggact

SEQ ID NO: 2455244 - DNA, 25 bp, Homo sapien
atcatcctgccaccggtaaccggga

SEQ ID NO: 2455245 - DNA, 25 bp, Homo sapien
aaggaaatcatcctgccaccggtaa

SEQ ID NO: 2455246 - DNA, 25 bp, Homo sapien
gtgctccttcatgatgatttcactg

SEQ ID NO: 2455247 - DNA, 25 bp, Homo sapien
acagtgctccttcatgatgatttca

SEQ ID NO: 2455248 - DNA, 25 bp, Homo sapien
cctcgtgacgccttgcaatttcgca

SEQ ID NO: 2455249 - DNA, 25 bp, Homo sapien
gtcacccttcattgttggccctcta

SEQ ID NO: 2455250 - DNA, 25 bp, Homo sapien
ggattgggtgggcaagcctcgtgac

SEQ ID NO: 2455251 - DNA, 25 bp, Homo sapien
caatttcgcaagaacacagacaatg

SEQ ID NO: 2455252 - DNA, 25 bp, Homo sapien
gctgtgcgcaaagggaccttggcgc

SEQ ID NO: 2455253 - DNA, 25 bp, Homo sapien
taatggcatacagattccccgtcct

SEQ ID NO: 2455254 - DNA, 25 bp, Homo sapien
tccttcgaatttgggctgtgcgcaa

SEQ ID NO: 2455255 - DNA, 25 bp, Homo sapien
gtggttcaatggctggtaatggcat

SEQ ID NO: 2455256 - DNA, 25 bp, Homo sapien
tcccaaatcggcagccgcaaggata

SEQ ID NO: 2455257 - DNA, 25 bp, Homo sapien
cccaaatcggcagccgcaaggatat

SEQ ID NO: 2455258 - DNA, 25 bp, Homo sapien
cggagcccagctccaagtgaaggac

SEQ ID NO: 2455259 - DNA, 25 bp, Homo sapien
ctggggcattcacggagcccagctc

SEQ ID NO: 2455260 - DNA, 25 bp, Homo sapien
cacggagcccagctccaagtgaagg

SEQ ID NO: 2455261 - DNA, 25 bp, Homo sapien
ttcacggagcccagctccaagtgaa

SEQ ID NO: 2455262 - DNA, 25 bp, Homo sapien
gtccattgacggccccggtgtgctc

SEQ ID NO: 2455263 - DNA, 25 bp, Homo sapien
tgacggccccggtgtgctcggtcca

SEQ ID NO: 2455264 - DNA, 25 bp, Homo sapien
tgccaccccacgtcgggctccacct

SEQ ID NO: 2455265 - DNA, 25 bp, Homo sapien
cattgacggccccggtgtgctcggt

SEQ ID NO: 2455266 - DNA, 25 bp, Homo sapien
tgtcttctgggcaactgtatgtctc

SEQ ID NO: 2455267 - DNA, 25 bp, Homo sapien
atcattgcacacacggacgccatgg

SEQ ID NO: 2455268 - DNA, 25 bp, Homo sapien
cacaaatgagtcttcgcagccttcg

SEQ ID NO: 2455269 - DNA, 25 bp, Homo sapien
tatcgtttcacatctgacactggag

SEQ ID NO: 2455270 - DNA, 25 bp, Homo sapien
gctgcagaatatagagccacaggcc

SEQ ID NO: 2455271 - DNA, 25 bp, Homo sapien
ctcagcaatcgtgccgtaacctggg

SEQ ID NO: 2455272 - DNA, 25 bp, Homo sapien
tgccaaggaatgtcgaagaaggtcc

SEQ ID NO: 2455273 - DNA, 25 bp, Homo sapien
tcctttgccatgatgccccatagct

SEQ ID NO: 2455274 - DNA, 25 bp, Homo sapien
ggaaactcgggctttcacctgcatg

SEQ ID NO: 2455275 - DNA, 25 bp, Homo sapien
tcgggctttcacctgcatgacccta

SEQ ID NO: 2455276 - DNA, 25 bp, Homo sapien
aactcgggctttcacctgcatgacc

SEQ ID NO: 2455277 - DNA, 25 bp, Homo sapien
gaaactcgggctttcacctgcatga

SEQ ID NO: 2455278 - DNA, 25 bp, Homo sapien
gagtttgccacttgactgcagcctg

SEQ ID NO: 2455279 - DNA, 25 bp, Homo sapien
gcaggcagaggaatcctttgaagct

SEQ ID NO: 2455280 - DNA, 25 bp, Homo sapien
tgatctgagagtttgccacttgact

SEQ ID NO: 2455281 - DNA, 25 bp, Homo sapien
tcagcaggcagaggaatcctttgaa

SEQ ID NO: 2455282 - DNA, 25 bp, Homo sapien
tccagattccgtgtgaggtggacta

SEQ ID NO: 2455283 - DNA, 25 bp, Homo sapien
gtcctccagattccgtgtgaggtgg

SEQ ID NO: 2455284 - DNA, 25 bp, Homo sapien
ggtcctccagattccgtgtgaggtg

SEQ ID NO: 2455285 - DNA, 25 bp, Homo sapien
ccagattccgtgtgaggtggactaa

SEQ ID NO: 2455286 - DNA, 25 bp, Homo sapien
ccttcgtgatcccagaaccgctgga

SEQ ID NO: 2455287 - DNA, 25 bp, Homo sapien
cttcgtgatcccagaaccgctggac

SEQ ID NO: 2455288 - DNA, 25 bp, Homo sapien
gaccttcgtgatcccagaaccgctg

SEQ ID NO: 2455289 - DNA, 25 bp, Homo sapien
ttcgtgatcccagaaccgctggact

SEQ ID NO: 2455290 - DNA, 25 bp, Homo sapien
atcatcctgccaccggtaaccggga

SEQ ID NO: 2455291 - DNA, 25 bp, Homo sapien
aaggaaatcatcctgccaccggtaa

SEQ ID NO: 2455292 - DNA, 25 bp, Homo sapien
gtgctccttcatgatgatttcactg

SEQ ID NO: 2455293 - DNA, 25 bp, Homo sapien
acagtgctccttcatgatgatttca

SEQ ID NO: 2455294 - DNA, 25 bp, Homo sapien
acgccgacatctcgtgtgccaaaca

SEQ ID NO: 2455295 - DNA, 25 bp, Homo sapien
gccgacatctcgtgtgccaaacaat

SEQ ID NO: 2455296 - DNA, 25 bp, Homo sapien
caaatccatcacgtagcaaagcagg

SEQ ID NO: 2455297 - DNA, 25 bp, Homo sapien
gcaggacttccgcatgctttccgac

SEQ ID NO: 2455298 - DNA, 25 bp, Homo sapien
ggcgaggagcaacgccacaactgtg

SEQ ID NO: 2455299 - DNA, 25 bp, Homo sapien
ggagcaacgccacaactgtggtggt

SEQ ID NO: 2455300 - DNA, 25 bp, Homo sapien
ctggcgaggagcaacgccacaactg

SEQ ID NO: 2455301 - DNA, 25 bp, Homo sapien
gaggagcaacgccacaactgtggtg

SEQ ID NO: 2455302 - DNA, 25 bp, Homo sapien
tccttcgaatttgggctgtgcgcaa

SEQ ID NO: 2455303 - DNA, 25 bp, Homo sapien
taatggcatacagattccccgtcct

SEQ ID NO: 2455304 - DNA, 25 bp, Homo sapien
gctcccagggctgctacaagcgagc

SEQ ID NO: 2455305 - DNA, 25 bp, Homo sapien
ggttcaatggctggtaatggcatac

SEQ ID NO: 2455306 - DNA, 25 bp, Homo sapien
tgccaccccacgtcgggctccacct

SEQ ID NO: 2455307 - DNA, 25 bp, Homo sapien
gtccattgacggccccggtgtgctc

SEQ ID NO: 2455308 - DNA, 25 bp, Homo sapien
tgacggccccggtgtgctcggtcca

SEQ ID NO: 2455309 - DNA, 25 bp, Homo sapien
cattgacggccccggtgtgctcggt

SEQ ID NO: 2455310 - DNA, 25 bp, Homo sapien
ctggcctgcctaacgaagagagatg

SEQ ID NO: 2455311 - DNA, 25 bp, Homo sapien
ttcctgtgttcatgacacatagaga

SEQ ID NO: 2455312 - DNA, 25 bp, Homo sapien
tggcctgcctaacgaagagagatgt

SEQ ID NO: 2455313 - DNA, 25 bp, Homo sapien
ggcctgcctaacgaagagagatgtt

SEQ ID NO: 2455314 - DNA, 25 bp, Homo sapien
tatcgtttcacatctgacactggag

SEQ ID NO: 2455315 - DNA, 25 bp, Homo sapien
tgtcttctgggcaactgtatgtctc

SEQ ID NO: 2455316 - DNA, 25 bp, Homo sapien
atcattgcacacacggacgccatgg

SEQ ID NO: 2455317 - DNA, 25 bp, Homo sapien
cacaaatgagtcttcgcagccttcg

SEQ ID NO: 2455318 - DNA, 25 bp, Homo sapien
agcaatcgtgccgtaacctgggccc

SEQ ID NO: 2455319 - DNA, 25 bp, Homo sapien
tgccaaggaatgtcgaagaaggtcc

SEQ ID NO: 2455320 - DNA, 25 bp, Homo sapien
gctgcagaatatagagccacaggcc

SEQ ID NO: 2455321 - DNA, 25 bp, Homo sapien
tgggtagtgctgcagaatatagagc

SEQ ID NO: 2455322 - DNA, 25 bp, Homo sapien
ggaaactcgggctttcacctgcatg

SEQ ID NO: 2455323 - DNA, 25 bp, Homo sapien
tcgggctttcacctgcatgacccta

SEQ ID NO: 2455324 - DNA, 25 bp, Homo sapien
gaaactcgggctttcacctgcatga

SEQ ID NO: 2455325 - DNA, 25 bp, Homo sapien
aactcgggctttcacctgcatgacc

SEQ ID NO: 2455326 - DNA, 25 bp, Homo sapien
aatcaacaattaaagggaatacatc

SEQ ID NO: 2455327 - DNA, 25 bp, Homo sapien
caaatgatatatggaacttcctcag

SEQ ID NO: 2455328 - DNA, 25 bp, Homo sapien
ccatggagactatcaattttatgaa

SEQ ID NO: 2455329 - DNA, 25 bp, Homo sapien
gacatgcaagcaagtaataaagtga

SEQ ID NO: 2455330 - DNA, 25 bp, Homo sapien
catttcaattaatccaatactgtta

SEQ ID NO: 2455331 - DNA, 25 bp, Homo sapien
atccaatactgttaactgctggtag

SEQ ID NO: 2455332 - DNA, 25 bp, Homo sapien
tactgttaactgctggtagcttcat

SEQ ID NO: 2455333 - DNA, 25 bp, Homo sapien
gccaaaaaactctgtccaccttcat

SEQ ID NO: 2455334 - DNA, 25 bp, Homo sapien
agcctggtctacagagcgagagtac

SEQ ID NO: 2455335 - DNA, 25 bp, Homo sapien
gcctggtctacagagcgagagtacc

SEQ ID NO: 2455336 - DNA, 25 bp, Homo sapien
ccaggcacagaattttttataactg

SEQ ID NO: 2455337 - DNA, 25 bp, Homo sapien
aagcagcatcagcaggcagaggaat

SEQ ID NO: 2455338 - DNA, 25 bp, Homo sapien
ttataactgtctgcatgttctcctc

SEQ ID NO: 2455339 - DNA, 25 bp, Homo sapien
gagagtttgccacttgactgcagcc

SEQ ID NO: 2455340 - DNA, 25 bp, Homo sapien
tccagattccgtgtgaggtggacta

SEQ ID NO: 2455341 - DNA, 25 bp, Homo sapien
gtcctccagattccgtgtgaggtgg

SEQ ID NO: 2455342 - DNA, 25 bp, Homo sapien
ggtcctccagattccgtgtgaggtg

SEQ ID NO: 2455343 - DNA, 25 bp, Homo sapien
ccagattccgtgtgaggtggactaa

SEQ ID NO: 2455344 - DNA, 25 bp, Homo sapien
ccatgatgccccacggcgaacccca

SEQ ID NO: 2455345 - DNA, 25 bp, Homo sapien
gatagaactgcaatggattgagcca

SEQ ID NO: 2455346 - DNA, 25 bp, Homo sapien
catgggatagaactgcaatggattg

SEQ ID NO: 2455347 - DNA, 25 bp, Homo sapien
gaccaaggaatgaccagctaggtcc

SEQ ID NO: 2455348 - DNA, 25 bp, Homo sapien
ccttcgtgatcccagaaccgctgga

SEQ ID NO: 2455349 - DNA, 25 bp, Homo sapien
cttcgtgatcccagaaccgctggac

SEQ ID NO: 2455350 - DNA, 25 bp, Homo sapien
gaccttcgtgatcccagaaccgctg

SEQ ID NO: 2455351 - DNA, 25 bp, Homo sapien
ttcgtgatcccagaaccgctggact

SEQ ID NO: 2455352 - DNA, 25 bp, Homo sapien
atcatcctgccaccggtaaccggga

SEQ ID NO: 2455353 - DNA, 25 bp, Homo sapien
aaggaaatcatcctgccaccggtaa

SEQ ID NO: 2455354 - DNA, 25 bp, Homo sapien
acagtgctccttcatgatgatttca

SEQ ID NO: 2455355 - DNA, 25 bp, Homo sapien
gtgctccttcatgatgatttcactg

SEQ ID NO: 2455356 - DNA, 25 bp, Homo sapien
cctcgtgacgccttgcaatttcgca

SEQ ID NO: 2455357 - DNA, 25 bp, Homo sapien
gtcacccttcattgttggccctcta

SEQ ID NO: 2455358 - DNA, 25 bp, Homo sapien
ggattgggtgggcaagcctcgtgac

SEQ ID NO: 2455359 - DNA, 25 bp, Homo sapien
caatttcgcaagaacacagacaatg

SEQ ID NO: 2455360 - DNA, 25 bp, Homo sapien
ggaggcaacgcacaactgtggtggt

SEQ ID NO: 2455361 - DNA, 25 bp, Homo sapien
tggagtgggtggaccccggccaaga

SEQ ID NO: 2455362 - DNA, 25 bp, Homo sapien
ctggcgaggaggcaacgcacaactg

SEQ ID NO: 2455363 - DNA, 25 bp, Homo sapien
cgaggaggcaacgcacaactgtggt

SEQ ID NO: 2455364 - DNA, 25 bp, Homo sapien
gctgtgcgcaaagggaccttggcgc

SEQ ID NO: 2455365 - DNA, 25 bp, Homo sapien
tccttcgaatttgggctgtgcgcaa

SEQ ID NO: 2455366 - DNA, 25 bp, Homo sapien
taatggcatacagattccccgtcct

SEQ ID NO: 2455367 - DNA, 25 bp, Homo sapien
gtggttcaatggctggtaatggcat

SEQ ID NO: 2455368 - DNA, 25 bp, Homo sapien
ctgctacaagcgagctgccctcaca

SEQ ID NO: 2455369 - DNA, 25 bp, Homo sapien
tgctacaagcgagctgccctcacag

SEQ ID NO: 2455370 - DNA, 25 bp, Homo sapien
gccatcccaaatcggcagccgcaag

SEQ ID NO: 2455371 - DNA, 25 bp, Homo sapien
catcccaaatcggcagccgcaagga

SEQ ID NO: 2455372 - DNA, 25 bp, Homo sapien
tgcccgccatcccaaatcggcagcc

SEQ ID NO: 2455373 - DNA, 25 bp, Homo sapien
cccaaatcggcagccgcaaggatat

SEQ ID NO: 2455374 - DNA, 25 bp, Homo sapien
gtccattgacggccccggtgtgctc

SEQ ID NO: 2455375 - DNA, 25 bp, Homo sapien
tgacggccccggtgtgctcggtcca

SEQ ID NO: 2455376 - DNA, 25 bp, Homo sapien
tgccaccccacgtcgggctccacct

SEQ ID NO: 2455377 - DNA, 25 bp, Homo sapien
cattgacggccccggtgtgctcggt

SEQ ID NO: 2455378 - DNA, 25 bp, Homo sapien
ctatgtgtgtcctaactccaggacc

SEQ ID NO: 2455379 - DNA, 25 bp, Homo sapien
ggacccacaggcctgtcaaccccca

SEQ ID NO: 2455380 - DNA, 25 bp, Homo sapien
tatgtgtgtcctaactccaggaccc

SEQ ID NO: 2455381 - DNA, 25 bp, Homo sapien
acaggcctgtcaacccccagccctg

SEQ ID NO: 2455382 - DNA, 25 bp, Homo sapien
tgccaaggaatgtcgaagaaggtcc

SEQ ID NO: 2455383 - DNA, 25 bp, Homo sapien
ctgcagaatatagagccacaggccc

SEQ ID NO: 2455384 - DNA, 25 bp, Homo sapien
gaatgtcgaagaaggtcctttgcca

SEQ ID NO: 2455385 - DNA, 25 bp, Homo sapien
tgggtagtgctgcagaatatagagc

SEQ ID NO: 2455386 - DNA, 25 bp, Homo sapien
agcaatcgtgccgtaacctgggccc

SEQ ID NO: 2455387 - DNA, 25 bp, Homo sapien
ctcagcaatcgtgccgtaacctggg

SEQ ID NO: 2455388 - DNA, 25 bp, Homo sapien
cccacctcagcaatcgtgccgtaac

SEQ ID NO: 2455389 - DNA, 25 bp, Homo sapien
aatcgtgccgtaacctgggccctca

SEQ ID NO: 2455390 - DNA, 25 bp, Homo sapien
ggaaactcgggctttcacctgcatg

SEQ ID NO: 2455391 - DNA, 25 bp, Homo sapien
tcgggctttcacctgcatgacccta

SEQ ID NO: 2455392 - DNA, 25 bp, Homo sapien
gaaactcgggctttcacctgcatga

SEQ ID NO: 2455393 - DNA, 25 bp, Homo sapien
aactcgggctttcacctgcatgacc

SEQ ID NO: 2455394 - DNA, 25 bp, Homo sapien
gattccaccggactgtatcttcaca

SEQ ID NO: 2455395 - DNA, 25 bp, Homo sapien
gtttaatagccgactctcccagtgg

SEQ ID NO: 2455396 - DNA, 25 bp, Homo sapien
ccattcctatttccaagctcaagga

SEQ ID NO: 2455397 - DNA, 25 bp, Homo sapien
tgaaacataagtaaacccattccta

SEQ ID NO: 2455398 - DNA, 25 bp, Homo sapien
tccagattccgtgtgaggtggacta

SEQ ID NO: 2455399 - DNA, 25 bp, Homo sapien
ggtcctccagattccgtgtgaggtg

SEQ ID NO: 2455400 - DNA, 25 bp, Homo sapien
gtcctccagattccgtgtgaggtgg

SEQ ID NO: 2455401 - DNA, 25 bp, Homo sapien
ccagattccgtgtgaggtggactaa

SEQ ID NO: 2455402 - DNA, 25 bp, Homo sapien
taggaggtgtactgcctgcatctgg

SEQ ID NO: 2455403 - DNA, 25 bp, Homo sapien
aaaaccaaggcagtcatgttcagcc

SEQ ID NO: 2455404 - DNA, 25 bp, Homo sapien
aggtaggaggtgtactgcctgcatc

SEQ ID NO: 2455405 - DNA, 25 bp, Homo sapien
ttcagccaaacagctgaataagctc

SEQ ID NO: 2455406 - DNA, 25 bp, Homo sapien
acagtgctccttcatgatgatttca

SEQ ID NO: 2455407 - DNA, 25 bp, Homo sapien
aaaggaaatcatcctgccaccagta

SEQ ID NO: 2455408 - DNA, 25 bp, Homo sapien
atgaaaggaaatcatcctgccacca

SEQ ID NO: 2455409 - DNA, 25 bp, Homo sapien
aggaaatcatcctgccaccagtaac

SEQ ID NO: 2455410 - DNA, 25 bp, Homo sapien
gaaaggaaatcatcctgccaccagt

SEQ ID NO: 2455411 - DNA, 25 bp, Homo sapien
gccgacatctcgtgtgccaaacaat

SEQ ID NO: 2455412 - DNA, 25 bp, Homo sapien
acgccgacatctcgtgtgccaaaca

SEQ ID NO: 2455413 - DNA, 25 bp, Homo sapien
gcaggacttccgcatgctttccgac

SEQ ID NO: 2455414 - DNA, 25 bp, Homo sapien
caaatccatcacgtagcaaagcagg

SEQ ID NO: 2455415 - DNA, 25 bp, Homo sapien
gattgggtgggcaagcctcgtgacg

SEQ ID NO: 2455416 - DNA, 25 bp, Homo sapien
aggattgggtgggcaagcctcgtga

SEQ ID NO: 2455417 - DNA, 25 bp, Homo sapien
attgggtgggcaagcctcgtgacgc

SEQ ID NO: 2455418 - DNA, 25 bp, Homo sapien
ggattgggtgggcaagcctcgtgac

SEQ ID NO: 2455419 - DNA, 25 bp, Homo sapien
aatttcgcaagaacacagacaatgt

SEQ ID NO: 2455420 - DNA, 25 bp, Homo sapien
cttgcaatttcgcaagaacacagac

SEQ ID NO: 2455421 - DNA, 25 bp, Homo sapien
gcaatttcgcaagaacacagacaat

SEQ ID NO: 2455422 - DNA, 25 bp, Homo sapien
tgcaatttcgcaagaacacagacaa

SEQ ID NO: 2455423 - DNA, 25 bp, Homo sapien
tgccctgaggtggtcggcaacccca

SEQ ID NO: 2455424 - DNA, 25 bp, Homo sapien
acctgccctgaggtggtcggcaacc

SEQ ID NO: 2455425 - DNA, 25 bp, Homo sapien
ggtcggcaaccccatgcaccatgaa

SEQ ID NO: 2455426 - DNA, 25 bp, Homo sapien
tgaggtggtcggcaaccccatgcac

SEQ ID NO: 2455427 - DNA, 25 bp, Homo sapien
cctgaagcccaatgactatcccttg

SEQ ID NO: 2455428 - DNA, 25 bp, Homo sapien
gaagcccaatgactatcccttgctg

SEQ ID NO: 2455429 - DNA, 25 bp, Homo sapien
aatgcccccctgaagcccaatgact

SEQ ID NO: 2455430 - DNA, 25 bp, Homo sapien
tcctccccgcaaccagccccaatgc

SEQ ID NO: 2455431 - DNA, 25 bp, Homo sapien
tgccaccccacgtcgggctccacct

SEQ ID NO: 2455432 - DNA, 25 bp, Homo sapien
caccccacgtcgggctccacctcaa

SEQ ID NO: 2455433 - DNA, 25 bp, Homo sapien
ccaccccacgtcgggctccacctca

SEQ ID NO: 2455434 - DNA, 25 bp, Homo sapien
gccaccccacgtcgggctccacctc

SEQ ID NO: 2455435 - DNA, 25 bp, Homo sapien
ccgggcctgcgcagcctagcccagc

SEQ ID NO: 2455436 - DNA, 25 bp, Homo sapien
cgggcctgcgcagcctagcccagcc

SEQ ID NO: 2455437 - DNA, 25 bp, Homo sapien
cccccgggcctgcgcagcctagccc

SEQ ID NO: 2455438 - DNA, 25 bp, Homo sapien
cccgggcctgcgcagcctagcccag

SEQ ID NO: 2455439 - DNA, 25 bp, Homo sapien
tgagttggataagtggctgaaagct

SEQ ID NO: 2455440 - DNA, 25 bp, Homo sapien
cactttgcctgtgagttggataagt

SEQ ID NO: 2455441 - DNA, 25 bp, Homo sapien
tttgcctgtgagttggataagtggc

SEQ ID NO: 2455442 - DNA, 25 bp, Homo sapien
tcactttgcctgtgagttggataag

SEQ ID NO: 2455443 - DNA, 25 bp, Homo sapien
ttagaccaatatctctgatgaacat

SEQ ID NO: 2455444 - DNA, 25 bp, Homo sapien
gaccaatatctctgatgaacatcaa

SEQ ID NO: 2455445 - DNA, 25 bp, Homo sapien
tatctctgatgaacatcaatgcaaa

SEQ ID NO: 2455446 - DNA, 25 bp, Homo sapien
aatatctctgatgaacatcaatgca

SEQ ID NO: 2455447 - DNA, 25 bp, Homo sapien
aactctccgacttctgctatatcta

SEQ ID NO: 2455448 - DNA, 25 bp, Homo sapien
aatcaccacagtgtcttgagtaact

SEQ ID NO: 2455449 - DNA, 25 bp, Homo sapien
agtaactctccgacttctgctatat

SEQ ID NO: 2455450 - DNA, 25 bp, Homo sapien
gtaactctccgacttctgctatatc

SEQ ID NO: 2455451 - DNA, 25 bp, Homo sapien
ggcctcaccatagccatcctgatca

SEQ ID NO: 2455452 - DNA, 25 bp, Homo sapien
cacgggcctcaccatagccatcctg

SEQ ID NO: 2455453 - DNA, 25 bp, Homo sapien
cgggcctcaccatagccatcctgat

SEQ ID NO: 2455454 - DNA, 25 bp, Homo sapien
accacgggcctcaccatagccatcc

SEQ ID NO: 2455455 - DNA, 25 bp, Homo sapien
catagtctctaagtggtggagcata

SEQ ID NO: 2455456 - DNA, 25 bp, Homo sapien
tggagcataatccctggtttctggg

SEQ ID NO: 2455457 - DNA, 25 bp, Homo sapien
aatcatggtatgcatagtctctaag

SEQ ID NO: 2455458 - DNA, 25 bp, Homo sapien
agcataatccctggtttctggggaa

SEQ ID NO: 2455459 - DNA, 25 bp, Homo sapien
ttggtgacatatggttatttgccag

SEQ ID NO: 2455460 - DNA, 25 bp, Homo sapien
cttggtgacatatggttatttgcca

SEQ ID NO: 2455461 - DNA, 25 bp, Homo sapien
tctcttggtgacatatggttatttg

SEQ ID NO: 2455462 - DNA, 25 bp, Homo sapien
tcttggtgacatatggttatttgcc

SEQ ID NO: 2455463 - DNA, 25 bp, Homo sapien
gcctcaatccaatcacttcgtcgat

SEQ ID NO: 2455464 - DNA, 25 bp, Homo sapien
agaatacttctaggagcttttagaa

SEQ ID NO: 2455465 - DNA, 25 bp, Homo sapien
gaatgtcagcctcaatccaatcact

SEQ ID NO: 2455466 - DNA, 25 bp, Homo sapien
attaagatgaatctgctagcaacac

SEQ ID NO: 2455467 - DNA, 25 bp, Homo sapien
actattgcttcttgtcacaggagca

SEQ ID NO: 2455468 - DNA, 25 bp, Homo sapien
tccgactattgcttcttgtcacagg

SEQ ID NO: 2455469 - DNA, 25 bp, Homo sapien
cgactattgcttcttgtcacaggag

SEQ ID NO: 2455470 - DNA, 25 bp, Homo sapien
cttcttgtcacaggagcagattttg

SEQ ID NO: 2455471 - DNA, 25 bp, Homo sapien
ctacttttattgcctttccatcaaa

SEQ ID NO: 2455472 - DNA, 25 bp, Homo sapien
cactttgaaaagatagtttttggct

SEQ ID NO: 2455473 - DNA, 25 bp, Homo sapien
tctgtttcttgaaggtggtggtctc

SEQ ID NO: 2455474 - DNA, 25 bp, Homo sapien
cttttattgcctttccatcaaaaga

SEQ ID NO: 2455475 - DNA, 25 bp, Homo sapien
tcatatctttggcagcattcttagc

SEQ ID NO: 2455476 - DNA, 25 bp, Homo sapien
ctttccattcatatctttggcagca

SEQ ID NO: 2455477 - DNA, 25 bp, Homo sapien
tccattcatatctttggcagcattc

SEQ ID NO: 2455478 - DNA, 25 bp, Homo sapien
atatctttggcagcattcttagcat

SEQ ID NO: 2455479 - DNA, 25 bp, Homo sapien
tgcacttttctcaaaaataataaac

SEQ ID NO: 2455480 - DNA, 25 bp, Homo sapien
ctgcacttttctcaaaaataataaa

SEQ ID NO: 2455481 - DNA, 25 bp, Homo sapien
ttctcaaaaataataaacacaaagc

SEQ ID NO: 2455482 - DNA, 25 bp, Homo sapien
gcacttttctcaaaaataataaaca

SEQ ID NO: 2455483 - DNA, 25 bp, Homo sapien
agaccctgttttgcaaatactgctt

SEQ ID NO: 2455484 - DNA, 25 bp, Homo sapien
tatgagaccctgttttgcaaatact

SEQ ID NO: 2455485 - DNA, 25 bp, Homo sapien
cttcagatatgagaccctgttttgc

SEQ ID NO: 2455486 - DNA, 25 bp, Homo sapien
agatatgagaccctgttttgcaaat

SEQ ID NO: 2455487 - DNA, 25 bp, Homo sapien
gtgcccgctggtccttctgccgctc

SEQ ID NO: 2455488 - DNA, 25 bp, Homo sapien
tctcctgcttcaaggttgcctcctc

SEQ ID NO: 2455489 - DNA, 25 bp, Homo sapien
ccctctgcgcctcgggcagagtgaa

SEQ ID NO: 2455490 - DNA, 25 bp, Homo sapien
gaagacggtgcaccctgaagacggt

SEQ ID NO: 2455491 - DNA, 25 bp, Homo sapien
tgtgcagcccgacccatagcacagg

SEQ ID NO: 2455492 - DNA, 25 bp, Homo sapien
acccatagcacaggaaccctgcgct

SEQ ID NO: 2455493 - DNA, 25 bp, Homo sapien
atagcacaggaaccctgcgctgccc

SEQ ID NO: 2455494 - DNA, 25 bp, Homo sapien
gaaccctgcgctgccctttctgtag

SEQ ID NO: 2455495 - DNA, 25 bp, Homo sapien
gagaagccctcagagctagtgccag

SEQ ID NO: 2455496 - DNA, 25 bp, Homo sapien
tttggaaatgctggcatgtgagccc

SEQ ID NO: 2455497 - DNA, 25 bp, Homo sapien
tgagccctgtgccctaactgacatc

SEQ ID NO: 2455498 - DNA, 25 bp, Homo sapien
ctgggcggcaccaaccaaggctggc

SEQ ID NO: 2455499 - DNA, 25 bp, Homo sapien
gtagatggtacggaatattgcagat

SEQ ID NO: 2455500 - DNA, 25 bp, Homo sapien
gatggtacggaatattgcagatccg

SEQ ID NO: 2455501 - DNA, 25 bp, Homo sapien
aatattgcagatccggagaattctc

SEQ ID NO: 2455502 - DNA, 25 bp, Homo sapien
tacggaatattgcagatccggagaa

SEQ ID NO: 2455503 - DNA, 25 bp, Homo sapien
ctggggcgagggcagcgggagtggc

SEQ ID NO: 2455504 - DNA, 25 bp, Homo sapien
agccagcattctgaactattcaggt

SEQ ID NO: 2455505 - DNA, 25 bp, Homo sapien
ccagcattctgaactattcaggttc

SEQ ID NO: 2455506 - DNA, 25 bp, Homo sapien
gccagcattctgaactattcaggtt

SEQ ID NO: 2455507 - DNA, 25 bp, Homo sapien
caatgccaggtcattccttgctgcc

SEQ ID NO: 2455508 - DNA, 25 bp, Homo sapien
gagtagcaatgccaggtcattcctt

SEQ ID NO: 2455509 - DNA, 25 bp, Homo sapien
gtagcaatgccaggtcattccttgc

SEQ ID NO: 2455510 - DNA, 25 bp, Homo sapien
gaggagtagcaatgccaggtcattc

SEQ ID NO: 2455511 - DNA, 25 bp, Homo sapien
tttgagccttactctgaggctgtgg

SEQ ID NO: 2455512 - DNA, 25 bp, Homo sapien
gcacccaagtgtccttttggtgtag

SEQ ID NO: 2455513 - DNA, 25 bp, Homo sapien
cccaagtgtccttttggtgtagatg

SEQ ID NO: 2455514 - DNA, 25 bp, Homo sapien
ttgcacccaagtgtccttttggtgt

SEQ ID NO: 2455515 - DNA, 25 bp, Homo sapien
ccaagtgtccttttggtgtagatgg

SEQ ID NO: 2455516 - DNA, 25 bp, Homo sapien
tcaatattttgaaggagggccagaa

SEQ ID NO: 2455517 - DNA, 25 bp, Homo sapien
gacgctcaggtgctgtttttgcaga

SEQ ID NO: 2455518 - DNA, 25 bp, Homo sapien
aaaggtgctgccagttcaccctgca

SEQ ID NO: 2455519 - DNA, 25 bp, Homo sapien
gaatttgtcaccttacagccaggct

SEQ ID NO: 2455520 - DNA, 25 bp, Homo sapien
cagagaagaggtgtttgtgtttgct

SEQ ID NO: 2455521 - DNA, 25 bp, Homo sapien
gtgtttgcttgttttcaaacctagc

SEQ ID NO: 2455522 - DNA, 25 bp, Homo sapien
ctgatagaaaacagagaagaggtgt

SEQ ID NO: 2455523 - DNA, 25 bp, Homo sapien
gaaaacagagaagaggtgtttgtgt

SEQ ID NO: 2455524 - DNA, 25 bp, Homo sapien
ggcttcatccgggtagtaactctgt

SEQ ID NO: 2455525 - DNA, 25 bp, Homo sapien
ctgtgagaataaagttgagtaccat

SEQ ID NO: 2455526 - DNA, 25 bp, Homo sapien
atccgggtagtaactctgtgagaat

SEQ ID NO: 2455527 - DNA, 25 bp, Homo sapien
gtctgaaacccagcactcagagtat

SEQ ID NO: 2455528 - DNA, 25 bp, Homo sapien
ttcagtccagatccatagttttact

SEQ ID NO: 2455529 - DNA, 25 bp, Homo sapien
actgtagcagcttcagaaatgatct

SEQ ID NO: 2455530 - DNA, 25 bp, Homo sapien
ctgtagcagcttcagaaatgatctg

SEQ ID NO: 2455531 - DNA, 25 bp, Homo sapien
ggtggattgtgcctgtttcagtcca

SEQ ID NO: 2455532 - DNA, 25 bp, Homo sapien
tcttggtccaagataagaaattatt

SEQ ID NO: 2455533 - DNA, 25 bp, Homo sapien
caaggatgtaattcttgagacactc

SEQ ID NO: 2455534 - DNA, 25 bp, Homo sapien
gcatccattgtgttaatacagtagc

SEQ ID NO: 2455535 - DNA, 25 bp, Homo sapien
gagtttcagattgtgtccaaggatg

SEQ ID NO: 2455536 - DNA, 25 bp, Homo sapien
ccaggggtcaattacaccaatgtct

SEQ ID NO: 2455537 - DNA, 25 bp, Homo sapien
cccagagtctaaatgcataagcttc

SEQ ID NO: 2455538 - DNA, 25 bp, Homo sapien
ttgtacccaggggtcaattacacca

SEQ ID NO: 2455539 - DNA, 25 bp, Homo sapien
gggtcaattacaccaatgtctttct

SEQ ID NO: 2455540 - DNA, 25 bp, Homo sapien
tgtggattgtgtcccgcaagtgcac

SEQ ID NO: 2455541 - DNA, 25 bp, Homo sapien
caactccagcacaatgtactggaca

SEQ ID NO: 2455542 - DNA, 25 bp, Homo sapien
tcaactccagcacaatgtactggac

SEQ ID NO: 2455543 - DNA, 25 bp, Homo sapien
aactccagcacaatgtactggacac

SEQ ID NO: 2455544 - DNA, 25 bp, Homo sapien
acctcatctgcaaccatgtgaggcc

SEQ ID NO: 2455545 - DNA, 25 bp, Homo sapien
atctgcaaccatgtgaggccagtca

SEQ ID NO: 2455546 - DNA, 25 bp, Homo sapien
gaggacactgcatcaccttggactt

SEQ ID NO: 2455547 - DNA, 25 bp, Homo sapien
tgaggacactgcatcaccttggact

SEQ ID NO: 2455548 - DNA, 25 bp, Homo sapien
agtttctggcgatgacctcacagtc

SEQ ID NO: 2455549 - DNA, 25 bp, Homo sapien
gacaatattccagacccgtgggacc

SEQ ID NO: 2455550 - DNA, 25 bp, Homo sapien
agataagtttctggcgatgacctca

SEQ ID NO: 2455551 - DNA, 25 bp, Homo sapien
agcctctttctgaaatggaggcaga

SEQ ID NO: 2455552 - DNA, 25 bp, Homo sapien
tgggcctgcctgacaatgtgcatac

SEQ ID NO: 2455553 - DNA, 25 bp, Homo sapien
ttaagcccattgacagctctgaaag

SEQ ID NO: 2455554 - DNA, 25 bp, Homo sapien
gagatgccccaaagaggccttgagg

SEQ ID NO: 2455555 - DNA, 25 bp, Homo sapien
acagctctgaaagccgggcatctgg

SEQ ID NO: 2455556 - DNA, 25 bp, Homo sapien
tcctctattttcttgggatttcatc

SEQ ID NO: 2455557 - DNA, 25 bp, Homo sapien
tgatgctgggtatgatatggcctcc

SEQ ID NO: 2455558 - DNA, 25 bp, Homo sapien
gaaacagaaggtgcttcaaactcca

SEQ ID NO: 2455559 - DNA, 25 bp, Homo sapien
tttcatacccggagccaaatgggag

SEQ ID NO: 2455560 - DNA, 25 bp, Homo sapien
ttcagatgggagtacttcacagtgc

SEQ ID NO: 2455561 - DNA, 25 bp, Homo sapien
ctgtgagtggccagtccaaggcctg

SEQ ID NO: 2455562 - DNA, 25 bp, Homo sapien
tattccaatgtccacgggacataat

SEQ ID NO: 2455563 - DNA, 25 bp, Homo sapien
tgtgagtggccagtccaaggcctga

SEQ ID NO: 2455564 - DNA, 25 bp, Homo sapien
cgggacataattctttcacacagcc

SEQ ID NO: 2455565 - DNA, 25 bp, Homo sapien
accacctcacagtattgatattctt

SEQ ID NO: 2455566 - DNA, 25 bp, Homo sapien
ccacctcacagtattgatattcttc

SEQ ID NO: 2455567 - DNA, 25 bp, Homo sapien
cacctcacagtattgatattcttcc

SEQ ID NO: 2455568 - DNA, 25 bp, Homo sapien
cctcacagtattgatattcttcctc

SEQ ID NO: 2455569 - DNA, 25 bp, Homo sapien
gcttgggctgtgttttctttattga

SEQ ID NO: 2455570 - DNA, 25 bp, Homo sapien
ggtctgcttgggctgtgttttcttt

SEQ ID NO: 2455571 - DNA, 25 bp, Homo sapien
tttggtggactgtttgttgggtctg

SEQ ID NO: 2455572 - DNA, 25 bp, Homo sapien
tggtggactgtttgttgggtctgct

SEQ ID NO: 2455573 - DNA, 25 bp, Homo sapien
cctaggaggtgcttcatgctgtgag

SEQ ID NO: 2455574 - DNA, 25 bp, Homo sapien
aatctggtgagaagtgaatgggtcc

SEQ ID NO: 2455575 - DNA, 25 bp, Homo sapien
tcaggtagggtggaggatccaatct

SEQ ID NO: 2455576 - DNA, 25 bp, Homo sapien
cttgaattcggttgacagcctagga

SEQ ID NO: 2455577 - DNA, 25 bp, Homo sapien
gggagcacactagcagtcttgtcca

SEQ ID NO: 2455578 - DNA, 25 bp, Homo sapien
gcaggaaacccagggagcacactag

SEQ ID NO: 2455579 - DNA, 25 bp, Homo sapien
ctctcccagagattcattgtcctgc

SEQ ID NO: 2455580 - DNA, 25 bp, Homo sapien
ctcccagagattcattgtcctgcag

SEQ ID NO: 2455581 - DNA, 25 bp, Homo sapien
gcttcacgtcgtgagaaggcaccct

SEQ ID NO: 2455582 - DNA, 25 bp, Homo sapien
ggttcccagccagctaggtgcttca

SEQ ID NO: 2455583 - DNA, 25 bp, Homo sapien
acaattccgtgaggtttggcggaga

SEQ ID NO: 2455584 - DNA, 25 bp, Homo sapien
tcacaattccgtgaggtttggcgga

SEQ ID NO: 2455585 - DNA, 25 bp, Homo sapien
caattccgtgaggtttggcggagaa

SEQ ID NO: 2455586 - DNA, 25 bp, Homo sapien
cacaattccgtgaggtttggcggag

SEQ ID NO: 2455587 - DNA, 25 bp, Homo sapien
tctgcctgcaaataaagctactctt

SEQ ID NO: 2455588 - DNA, 25 bp, Homo sapien
ctctgcctgcaaataaagctactct

SEQ ID NO: 2455589 - DNA, 25 bp, Homo sapien
cctctgcctgcaaataaagctactc

SEQ ID NO: 2455590 - DNA, 25 bp, Homo sapien
caaatgcacatgcacgcctcagggc

SEQ ID NO: 2455591 - DNA, 25 bp, Homo sapien
tcaaatgcacatgcacgcctcaggg

SEQ ID NO: 2455592 - DNA, 25 bp, Homo sapien
aaatgcacatgcacgcctcagggca

SEQ ID NO: 2455593 - DNA, 25 bp, Homo sapien
aatgcacatgcacgcctcagggcac

SEQ ID NO: 2455594 - DNA, 25 bp, Homo sapien
tggctagcatcacaatgaatgtcac

SEQ ID NO: 2455595 - DNA, 25 bp, Homo sapien
tatgagctctggctagcatcacaat

SEQ ID NO: 2455596 - DNA, 25 bp, Homo sapien
agctctggctagcatcacaatgaat

SEQ ID NO: 2455597 - DNA, 25 bp, Homo sapien
ctctggctagcatcacaatgaatgt

SEQ ID NO: 2455598 - DNA, 25 bp, Homo sapien
atagagatcagtcctggctgcgtgg

SEQ ID NO: 2455599 - DNA, 25 bp, Homo sapien
tacatagagatcagtcctggctgcg

SEQ ID NO: 2455600 - DNA, 25 bp, Homo sapien
cattacatagagatcagtcctggct

SEQ ID NO: 2455601 - DNA, 25 bp, Homo sapien
gagggatccacaggatacatccata

SEQ ID NO: 2455602 - DNA, 25 bp, Homo sapien
gcaggtacttcctgtcgtcagggtt

SEQ ID NO: 2455603 - DNA, 25 bp, Homo sapien
attttgttcataggtgagcaggtac

SEQ ID NO: 2455604 - DNA, 25 bp, Homo sapien
gttcataggtgagcaggtacttcct

SEQ ID NO: 2455605 - DNA, 25 bp, Homo sapien
tgtcgtcagggttcactcctccatc

SEQ ID NO: 2455606 - DNA, 25 bp, Homo sapien
ttttcaggtttgcaatcgccacaga

SEQ ID NO: 2455607 - DNA, 25 bp, Homo sapien
gtaggagagggcatacataagccag

SEQ ID NO: 2455608 - DNA, 25 bp, Homo sapien
aggattgtcccatgagagtaggaga

SEQ ID NO: 2455609 - DNA, 25 bp, Homo sapien
acaggattgtcccatgagagtagga

SEQ ID NO: 2455610 - DNA, 25 bp, Homo sapien
taggagagggcatacataagccagc

SEQ ID NO: 2455611 - DNA, 25 bp, Homo sapien
atacagggggagacactagcagtcc

SEQ ID NO: 2455612 - DNA, 25 bp, Homo sapien
agtcctctccacagggccacttgaa

SEQ ID NO: 2455613 - DNA, 25 bp, Homo sapien
tctccacagggccacttgaacttac

SEQ ID NO: 2455614 - DNA, 25 bp, Homo sapien
tcctgcagcaaatacagggggagac

SEQ ID NO: 2455615 - DNA, 25 bp, Homo sapien
cttcacataatgagggggcactcct

SEQ ID NO: 2455616 - DNA, 25 bp, Homo sapien
tatcctgggacctagagtgtgagta

SEQ ID NO: 2455617 - DNA, 25 bp, Homo sapien
gtcagatacaggtgagtatacaatc

SEQ ID NO: 2455618 - DNA, 25 bp, Homo sapien
taaggtcagatacaggtgagtatac

SEQ ID NO: 2455619 - DNA, 25 bp, Homo sapien
cagtgtttaaagcacgtgtttccaa

SEQ ID NO: 2455620 - DNA, 25 bp, Homo sapien
ataaagacagtgtttaaagcacgtg

SEQ ID NO: 2455621 - DNA, 25 bp, Homo sapien
tttaaagcacgtgtttccaacttca

SEQ ID NO: 2455622 - DNA, 25 bp, Homo sapien
agacagtgtttaaagcacgtgtttc

SEQ ID NO: 2455623 - DNA, 25 bp, Homo sapien
ccacttctatcgaatggctgcataa

SEQ ID NO: 2455624 - DNA, 25 bp, Homo sapien
cctagagtttcctgtgactggttca

SEQ ID NO: 2455625 - DNA, 25 bp, Homo sapien
gagaatgatcttcatgggactccat

SEQ ID NO: 2455626 - DNA, 25 bp, Homo sapien
gactggttcaacaacttccacactt

SEQ ID NO: 2455627 - DNA, 25 bp, Homo sapien
ccattggaggccagtccaatgcgtg

SEQ ID NO: 2455628 - DNA, 25 bp, Homo sapien
gaggccagtccaatgcgtgaggaca

SEQ ID NO: 2455629 - DNA, 25 bp, Homo sapien
cagtccaatgcgtgaggacactgct

SEQ ID NO: 2455630 - DNA, 25 bp, Homo sapien
attggaggccagtccaatgcgtgag

SEQ ID NO: 2455631 - DNA, 25 bp, Homo sapien
ctatattgcaatccccatgtgacct

SEQ ID NO: 2455632 - DNA, 25 bp, Homo sapien
tcatgagtctgcagtggattgggaa

SEQ ID NO: 2455633 - DNA, 25 bp, Homo sapien
tctgcagtggattgggaagcatgcc

SEQ ID NO: 2455634 - DNA, 25 bp, Homo sapien
cagtggattgggaagcatgccaaaa

SEQ ID NO: 2455635 - DNA, 25 bp, Homo sapien
tcattcatgagtctgcagtggattg

SEQ ID NO: 2455636 - DNA, 25 bp, Homo sapien
attgtcatgttttaatgagtgggac

SEQ ID NO: 2455637 - DNA, 25 bp, Homo sapien
tgagtgggacgctttgatagtttta

SEQ ID NO: 2455638 - DNA, 25 bp, Homo sapien
catgttttaatgagtgggacgcttt

SEQ ID NO: 2455639 - DNA, 25 bp, Homo sapien
taatgagtgggacgctttgatagtt

SEQ ID NO: 2455640 - DNA, 25 bp, Homo sapien
ttcttccacttctatcagaggcctg

SEQ ID NO: 2455641 - DNA, 25 bp, Homo sapien
ccacttctatcagaggcctgcgtga

SEQ ID NO: 2455642 - DNA, 25 bp, Homo sapien
tattcttccacttctatcagaggcc

SEQ ID NO: 2455643 - DNA, 25 bp, Homo sapien
cttccacttctatcagaggcctgcg

SEQ ID NO: 2455644 - DNA, 25 bp, Homo sapien
aaaagattggctattctggctgcac

SEQ ID NO: 2455645 - DNA, 25 bp, Homo sapien
catagattattaagtggccagggat

SEQ ID NO: 2455646 - DNA, 25 bp, Homo sapien
cattttcctggtaatctagcctctg

SEQ ID NO: 2455647 - DNA, 25 bp, Homo sapien
cagattggactgcttttcaccatag

SEQ ID NO: 2455648 - DNA, 25 bp, Homo sapien
gattatatgccaatccccgctggac

SEQ ID NO: 2455649 - DNA, 25 bp, Homo sapien
tcaccaagatggactggagagtcca

SEQ ID NO: 2455650 - DNA, 25 bp, Homo sapien
tggcatgacccgatcaccaagatgg

SEQ ID NO: 2455651 - DNA, 25 bp, Homo sapien
ggtctttcctgaatggagtcacaag

SEQ ID NO: 2455652 - DNA, 25 bp, Homo sapien
gagtctagaccttttgggtaaggca

SEQ ID NO: 2455653 - DNA, 25 bp, Homo sapien
tgaccatggagactgcccaaaaggg

SEQ ID NO: 2455654 - DNA, 25 bp, Homo sapien
gacagaggagcagattgcagcgacc

SEQ ID NO: 2455655 - DNA, 25 bp, Homo sapien
agagagcagactcttacacacagtc

SEQ ID NO: 2455656 - DNA, 25 bp, Homo sapien
tgaaagcccagtccaagatatgaga

SEQ ID NO: 2455657 - DNA, 25 bp, Homo sapien
tgctcctgtctttcacaatgagccc

SEQ ID NO: 2455658 - DNA, 25 bp, Homo sapien
ccttgttgttgctcctgtctttcac

SEQ ID NO: 2455659 - DNA, 25 bp, Homo sapien
agaccctgtctcaacttcaccttca

SEQ ID NO: 2455660 - DNA, 25 bp, Homo sapien
tccaaccacagagatgacccgaagg

SEQ ID NO: 2455661 - DNA, 25 bp, Homo sapien
atccaaccacagagatgacccgaag

SEQ ID NO: 2455662 - DNA, 25 bp, Homo sapien
accatgtagatcacaagacgtggtc

SEQ ID NO: 2455663 - DNA, 25 bp, Homo sapien
ggaatgcttcatactccagtgggac

SEQ ID NO: 2455664 - DNA, 25 bp, Homo sapien
cagtgggacccgaccatgtagatca

SEQ ID NO: 2455665 - DNA, 25 bp, Homo sapien
tccccttgggaccagattcttgcat

SEQ ID NO: 2455666 - DNA, 25 bp, Homo sapien
gtgtgcatgagccatcctcgcaaat

SEQ ID NO: 2455667 - DNA, 25 bp, Homo sapien
ggcacaaggccttagctttgagctc

SEQ ID NO: 2455668 - DNA, 25 bp, Homo sapien
caaatgcatattcgctagtgtcagg

SEQ ID NO: 2455669 - DNA, 25 bp, Homo sapien
catcctcgcaaatgcatattcgcta

SEQ ID NO: 2455670 - DNA, 25 bp, Homo sapien
catgaatgtcatagttgcctaagtc

SEQ ID NO: 2455671 - DNA, 25 bp, Homo sapien
tgtggatcctcgagatagtcccatg

SEQ ID NO: 2455672 - DNA, 25 bp, Homo sapien
gaggtgtggatcctcgagatagtcc

SEQ ID NO: 2455673 - DNA, 25 bp, Homo sapien
ggtgtggatcctcgagatagtccca

SEQ ID NO: 2455674 - DNA, 25 bp, Homo sapien
cagggctccatctccgttatttttc

SEQ ID NO: 2455675 - DNA, 25 bp, Homo sapien
gcgcatcacactccaaagcaaatat

SEQ ID NO: 2455676 - DNA, 25 bp, Homo sapien
tccgttatttttccgtggagtatga

SEQ ID NO: 2455677 - DNA, 25 bp, Homo sapien
ttctcagtgaattaggagacagcgc

SEQ ID NO: 2455678 - DNA, 25 bp, Homo sapien
tttgccttttgcagagggccccatc

SEQ ID NO: 2455679 - DNA, 25 bp, Homo sapien
tgccttttgcagagggccccatcaa

SEQ ID NO: 2455680 - DNA, 25 bp, Homo sapien
ttgccttttgcagagggccccatca

SEQ ID NO: 2455681 - DNA, 25 bp, Homo sapien
tcacagtctggaaatgcctctccct

SEQ ID NO: 2455682 - DNA, 25 bp, Homo sapien
tgggaatggattcagaagagcagtt

SEQ ID NO: 2455683 - DNA, 25 bp, Homo sapien
cagacaattttccaatcaccatggg

SEQ ID NO: 2455684 - DNA, 25 bp, Homo sapien
atcaccatgggacccatttctggca

SEQ ID NO: 2455685 - DNA, 25 bp, Homo sapien
gaaaccacaggatagtcccatgagc

SEQ ID NO: 2455686 - DNA, 25 bp, Homo sapien
ggaaaccacaggatagtcccatgag

SEQ ID NO: 2455687 - DNA, 25 bp, Homo sapien
gtggagctgcgtggttggtgaactc

SEQ ID NO: 2455688 - DNA, 25 bp, Homo sapien
gctgcgtggttggtgaactcttgcc

SEQ ID NO: 2455689 - DNA, 25 bp, Homo sapien
ttctggtatttcaggtataagtcca

SEQ ID NO: 2455690 - DNA, 25 bp, Homo sapien
atgaatgagtgcagagaggtcaagt

SEQ ID NO: 2455691 - DNA, 25 bp, Homo sapien
caaagactgctcaacatctcaccag

SEQ ID NO: 2455692 - DNA, 25 bp, Homo sapien
ggtataagtccatcatccaaagact

SEQ ID NO: 2455693 - DNA, 25 bp, Homo sapien
aaaaatttggagtgcaaattgtggc

SEQ ID NO: 2455694 - DNA, 25 bp, Homo sapien
caccagcaaaaagggtgaaaataga

SEQ ID NO: 2455695 - DNA, 25 bp, Homo sapien
ccaacctgcaggaaaaatttggagt

SEQ ID NO: 2455696 - DNA, 25 bp, Homo sapien
gccaatctggaaaactcctggtttg

SEQ ID NO: 2455697 - DNA, 25 bp, Homo sapien
ctgtagtcaaatggaagtggaatag

SEQ ID NO: 2455698 - DNA, 25 bp, Homo sapien
gtcctcattggtgtagggcttcctg

SEQ ID NO: 2455699 - DNA, 25 bp, Homo sapien
tcaacatcttccacactaaactctt

SEQ ID NO: 2455700 - DNA, 25 bp, Homo sapien
tcaaatggaagtggaatagattgat

SEQ ID NO: 2455701 - DNA, 25 bp, Homo sapien
tttttgtggccagtctatgtggctc

SEQ ID NO: 2455702 - DNA, 25 bp, Homo sapien
tttgtggccagtctatgtggctctg

SEQ ID NO: 2455703 - DNA, 25 bp, Homo sapien
tggcagctgagataccccggcatcc

SEQ ID NO: 2455704 - DNA, 25 bp, Homo sapien
tccacagtgaattcaatggcagctg

SEQ ID NO: 2455705 - DNA, 25 bp, Homo sapien
aaagaccatttggagtgcaaattga

SEQ ID NO: 2455706 - DNA, 25 bp, Homo sapien
gaccatttggagtgcaaattgaggc

SEQ ID NO: 2455707 - DNA, 25 bp, Homo sapien
cacagtaaaagaccatttggagtgc

SEQ ID NO: 2455708 - DNA, 25 bp, Homo sapien
gtactccacagtaaaagaccatttg

SEQ ID NO: 2455709 - DNA, 25 bp, Homo sapien
gagaaacctgacaacggagatggcc

SEQ ID NO: 2455710 - DNA, 25 bp, Homo sapien
agaaacctgacaacggagatggccc

SEQ ID NO: 2455711 - DNA, 25 bp, Homo sapien
gactcttaatatcccacagtggatt

SEQ ID NO: 2455712 - DNA, 25 bp, Homo sapien
aggttgagactcttaatatcccaca

SEQ ID NO: 2455713 - DNA, 25 bp, Homo sapien
ctcgaattcaatcagatgcttcaca

SEQ ID NO: 2455714 - DNA, 25 bp, Homo sapien
ttttttctggaacagagagtgtgag

SEQ ID NO: 2455715 - DNA, 25 bp, Homo sapien
ggcaactcctccatcgttttgggat

SEQ ID NO: 2455716 - DNA, 25 bp, Homo sapien
cagcaaaaagaacagttaggggtga

SEQ ID NO: 2455717 - DNA, 25 bp, Homo sapien
gagtgtgagcagcaaaaagaacagt

SEQ ID NO: 2455718 - DNA, 25 bp, Homo sapien
gaagcataatgggagggcaatcgat

SEQ ID NO: 2455719 - DNA, 25 bp, Homo sapien
tcctttagttgcaaaagcagtccac

SEQ ID NO: 2455720 - DNA, 25 bp, Homo sapien
gttgcaaaagcagtccacacaatcc

SEQ ID NO: 2455721 - DNA, 25 bp, Homo sapien
caatcgatagatactgggtggcatg

SEQ ID NO: 2455722 - DNA, 25 bp, Homo sapien
gggctgctgggatccatattcttta

SEQ ID NO: 2455723 - DNA, 25 bp, Homo sapien
ttgggctgctgggatccatattctt

SEQ ID NO: 2455724 - DNA, 25 bp, Homo sapien
acttgggctgctgggatccatattc

SEQ ID NO: 2455725 - DNA, 25 bp, Homo sapien
ctacttgggctgctgggatccatat

SEQ ID NO: 2455726 - DNA, 25 bp, Homo sapien
ggctgagaaacaccactgtccaaat

SEQ ID NO: 2455727 - DNA, 25 bp, Homo sapien
caagctggctgagaaacaccactgt

SEQ ID NO: 2455728 - DNA, 25 bp, Homo sapien
tgaattggcaagctggctgagaaac

SEQ ID NO: 2455729 - DNA, 25 bp, Homo sapien
catgaatctgcagtgaattggcaag

SEQ ID NO: 2455730 - DNA, 25 bp, Homo sapien
cattcatctctaccgggcctattaa

SEQ ID NO: 2455731 - DNA, 25 bp, Homo sapien
cagaaatataccagtgtttaattgt

SEQ ID NO: 2455732 - DNA, 25 bp, Homo sapien
ccagtgtttaattgtctttcagcca

SEQ ID NO: 2455733 - DNA, 25 bp, Homo sapien
ttcagccaatccaaggagagacact

SEQ ID NO: 2455734 - DNA, 25 bp, Homo sapien
ccagaggagttggtgcttcacatca

SEQ ID NO: 2455735 - DNA, 25 bp, Homo sapien
ctcgaatttgattcccagaggagtt

SEQ ID NO: 2455736 - DNA, 25 bp, Homo sapien
ggtgcttcacatcatcagggggaac

SEQ ID NO: 2455737 - DNA, 25 bp, Homo sapien
cagggggaacttctccattgtcttg

SEQ ID NO: 2455738 - DNA, 25 bp, Homo sapien
gcaataaggtaataaggtcagatag

SEQ ID NO: 2455739 - DNA, 25 bp, Homo sapien
ctttgaacagcaataaggtaataag

SEQ ID NO: 2455740 - DNA, 25 bp, Homo sapien
tcagataggggtggggatacccctc

SEQ ID NO: 2455741 - DNA, 25 bp, Homo sapien
aggggtggatgccatgctgtacctt

SEQ ID NO: 2455742 - DNA, 25 bp, Homo sapien
ggacatttggagtacaaactggggc

SEQ ID NO: 2455743 - DNA, 25 bp, Homo sapien
tggagtacaaactggggccaagttg

SEQ ID NO: 2455744 - DNA, 25 bp, Homo sapien
aggggacatttggagtacaaactgg

SEQ ID NO: 2455745 - DNA, 25 bp, Homo sapien
gttgtgagggggcaatcctccatca

SEQ ID NO: 2455746 - DNA, 25 bp, Homo sapien
taaccttgaattcagtttccagctg

SEQ ID NO: 2455747 - DNA, 25 bp, Homo sapien
tgagcagctgcttcacgttgtgagg

SEQ ID NO: 2455748 - DNA, 25 bp, Homo sapien
cagtcatgttgcagagctccttgaa

SEQ ID NO: 2455749 - DNA, 25 bp, Homo sapien
caaaaatgactttgcataggctggc

SEQ ID NO: 2455750 - DNA, 25 bp, Homo sapien
cagttctcaggaggcttttggttcc

SEQ ID NO: 2455751 - DNA, 25 bp, Homo sapien
ttccagcttgtggttcgtggtctca

SEQ ID NO: 2455752 - DNA, 25 bp, Homo sapien
gatgggaatgtctctaaatacagat

SEQ ID NO: 2455753 - DNA, 25 bp, Homo sapien
ccgttcgacatgtaagaatactgct

SEQ ID NO: 2455754 - DNA, 25 bp, Homo sapien
tttcaacatcatctacatgagtgag

SEQ ID NO: 2455755 - DNA, 25 bp, Homo sapien
tagtggacatgattgtcagacttgc

SEQ ID NO: 2455756 - DNA, 25 bp, Homo sapien
aacagcattagtggacatgattgtc

SEQ ID NO: 2455757 - DNA, 25 bp, Homo sapien
agtcttcagagaccacctcagtttg

SEQ ID NO: 2455758 - DNA, 25 bp, Homo sapien
cagtggttcccagccatggagtcat

SEQ ID NO: 2455759 - DNA, 25 bp, Homo sapien
cttcagagaccacctcagtttggaa

SEQ ID NO: 2455760 - DNA, 25 bp, Homo sapien
ccttcagtggttcccagccatggag

SEQ ID NO: 2455761 - DNA, 25 bp, Homo sapien
gggccctgactttgcaaattttaca

SEQ ID NO: 2455762 - DNA, 25 bp, Homo sapien
cttctccagcgggaaccaatcatgg

SEQ ID NO: 2455763 - DNA, 25 bp, Homo sapien
tacagtccagccgttggttttcgca

SEQ ID NO: 2455764 - DNA, 25 bp, Homo sapien
ggttttcgcaggcagactttgtcct

SEQ ID NO: 2455765 - DNA, 25 bp, Homo sapien
ggaggtgcaccggcattggaaccac

SEQ ID NO: 2455766 - DNA, 25 bp, Homo sapien
atagtctcatgatcatggcagaagg

SEQ ID NO: 2455767 - DNA, 25 bp, Homo sapien
ggcattggaaccacacctgtcttct

SEQ ID NO: 2455768 - DNA, 25 bp, Homo sapien
ccacaaatagtctcatgatcatggc

SEQ ID NO: 2455769 - DNA, 25 bp, Homo sapien
ctagaaaagggcagatgagagccag

SEQ ID NO: 2455770 - DNA, 25 bp, Homo sapien
tagaaaagggcagatgagagccaga

SEQ ID NO: 2455771 - DNA, 25 bp, Homo sapien
ccttcatacatgagccaaatgggag

SEQ ID NO: 2455772 - DNA, 25 bp, Homo sapien
aaagtgacactcacagacctgtgtg

SEQ ID NO: 2455773 - DNA, 25 bp, Homo sapien
tcatgtcatgaggaagatcttgtcc

SEQ ID NO: 2455774 - DNA, 25 bp, Homo sapien
cagtgttttattgacctgagtccaa

SEQ ID NO: 2455775 - DNA, 25 bp, Homo sapien
gagttagaagagcagtttccagcga

SEQ ID NO: 2455776 - DNA, 25 bp, Homo sapien
cctctttcgctaatggagttagaag

SEQ ID NO: 2455777 - DNA, 25 bp, Homo sapien
tagaagagcagtttccagcgaccac

SEQ ID NO: 2455778 - DNA, 25 bp, Homo sapien
aagagcagtttccagcgaccacctc

SEQ ID NO: 2455779 - DNA, 25 bp, Homo sapien
agtcgcgaaacacctcttcctccag

SEQ ID NO: 2455780 - DNA, 25 bp, Homo sapien
gcgaaacacctcttcctccagcgcg

SEQ ID NO: 2455781 - DNA, 25 bp, Homo sapien
cgaaacacctcttcctccagcgcga

SEQ ID NO: 2455782 - DNA, 25 bp, Homo sapien
tcgcgaaacacctcttcctccagcg

SEQ ID NO: 2455783 - DNA, 25 bp, Homo sapien
ctgaacaaggaaatggctagcaggg

SEQ ID NO: 2455784 - DNA, 25 bp, Homo sapien
aggaaatggctagcagggtccctga

SEQ ID NO: 2455785 - DNA, 25 bp, Homo sapien
gtcctgcagcgggtttttatagtca

SEQ ID NO: 2455786 - DNA, 25 bp, Homo sapien
ctgcagcgggtttttatagtcagcc

SEQ ID NO: 2455787 - DNA, 25 bp, Homo sapien
gagctctgtctagcatcacaataaa

SEQ ID NO: 2455788 - DNA, 25 bp, Homo sapien
gtgagctctgtctagcatcacaata

SEQ ID NO: 2455789 - DNA, 25 bp, Homo sapien
ggtctgattgtgagctctgtctagc

SEQ ID NO: 2455790 - DNA, 25 bp, Homo sapien
ctctgtctagcatcacaataaatgt

SEQ ID NO: 2455791 - DNA, 25 bp, Homo sapien
ctccgtggagaagtgtcagcggtgt

SEQ ID NO: 2455792 - DNA, 25 bp, Homo sapien
tggagaagtgtcagcggtgtcttct

SEQ ID NO: 2455793 - DNA, 25 bp, Homo sapien
gaagtgtcagcggtgtcttctcgtc

SEQ ID NO: 2455794 - DNA, 25 bp, Homo sapien
aagtgtcagcggtgtcttctcgtct

SEQ ID NO: 2455795 - DNA, 25 bp, Homo sapien
ctggtggaggatttcgagtgttgga

SEQ ID NO: 2455796 - DNA, 25 bp, Homo sapien
ggatttcgagtgttggatgtctgca

SEQ ID NO: 2455797 - DNA, 25 bp, Homo sapien
tctggtggaggatttcgagtgttgg

SEQ ID NO: 2455798 - DNA, 25 bp, Homo sapien
tggaggatttcgagtgttggatgtc

SEQ ID NO: 2455799 - DNA, 25 bp, Homo sapien
actgctgccttgtgacaatgccctg

SEQ ID NO: 2455800 - DNA, 25 bp, Homo sapien
gagacctccttggagatgcatcggc

SEQ ID NO: 2455801 - DNA, 25 bp, Homo sapien
tctgatgagtgcctgagcctgcctc

SEQ ID NO: 2455802 - DNA, 25 bp, Homo sapien
gagtgtgagtgctggctagcatcac

SEQ ID NO: 2455803 - DNA, 25 bp, Homo sapien
ctgtggtgttcatgggattgtccca

SEQ ID NO: 2455804 - DNA, 25 bp, Homo sapien
ctgacttctctgtggtgttcatggg

SEQ ID NO: 2455805 - DNA, 25 bp, Homo sapien
cttctctgtggtgttcatgggattg

SEQ ID NO: 2455806 - DNA, 25 bp, Homo sapien
tctgtggtgttcatgggattgtccc

SEQ ID NO: 2455807 - DNA, 25 bp, Homo sapien
gagtgtcaacagcaatgatgtcaga

SEQ ID NO: 2455808 - DNA, 25 bp, Homo sapien
ccaataattcatgtcttaggtcggg

SEQ ID NO: 2455809 - DNA, 25 bp, Homo sapien
tcgattcccagccaagccaataatt

SEQ ID NO: 2455810 - DNA, 25 bp, Homo sapien
tcatcctggtgcatagagtgtcaac

SEQ ID NO: 2455811 - DNA, 25 bp, Homo sapien
atgagggttccacattgcccctcat

SEQ ID NO: 2455812 - DNA, 25 bp, Homo sapien
tgagggttccacattgcccctcatc

SEQ ID NO: 2455813 - DNA, 25 bp, Homo sapien
gaacagccagtttaaggtgtgagaa

SEQ ID NO: 2455814 - DNA, 25 bp, Homo sapien
cacatcatgagggttactcctcctt

SEQ ID NO: 2455815 - DNA, 25 bp, Homo sapien
aggtgaacacgtgcttcacatcatg

SEQ ID NO: 2455816 - DNA, 25 bp, Homo sapien
acatcatgagggttactcctccttt

SEQ ID NO: 2455817 - DNA, 25 bp, Homo sapien
caggtgaacacgtgcttcacatcat

SEQ ID NO: 2455818 - DNA, 25 bp, Homo sapien
tcagacagggtggggatacaatctt

SEQ ID NO: 2455819 - DNA, 25 bp, Homo sapien
cagacagggtggggatacaatcttg

SEQ ID NO: 2455820 - DNA, 25 bp, Homo sapien
agacagggtggggatacaatcttgt

SEQ ID NO: 2455821 - DNA, 25 bp, Homo sapien
acagggtggggatacaatcttgtga

SEQ ID NO: 2455822 - DNA, 25 bp, Homo sapien
ctttttcatgtttcctgccttttgc

SEQ ID NO: 2455823 - DNA, 25 bp, Homo sapien
catgtttcctgccttttgcagagag

SEQ ID NO: 2455824 - DNA, 25 bp, Homo sapien
ttttcatgtttcctgccttttgcag

SEQ ID NO: 2455825 - DNA, 25 bp, Homo sapien
ttcatgtttcctgccttttgcagag

SEQ ID NO: 2455826 - DNA, 25 bp, Homo sapien
tatattccaatttagatgggtcctg

SEQ ID NO: 2455827 - DNA, 25 bp, Homo sapien
tcctgattcttgcacaaaggctctt

SEQ ID NO: 2455828 - DNA, 25 bp, Homo sapien
cctcctccagtggtacccaaagatg

SEQ ID NO: 2455829 - DNA, 25 bp, Homo sapien
gtcttgaaacgcgtcctcctccagt

SEQ ID NO: 2455830 - DNA, 25 bp, Homo sapien
gtaaagcctgccagtatgccctggg

SEQ ID NO: 2455831 - DNA, 25 bp, Homo sapien
caggtaaagcctgccagtatgccct

SEQ ID NO: 2455832 - DNA, 25 bp, Homo sapien
ggtaaagcctgccagtatgccctgg

SEQ ID NO: 2455833 - DNA, 25 bp, Homo sapien
tcccaggtaaagcctgccagtatgc

SEQ ID NO: 2455834 - DNA, 25 bp, Homo sapien
taagcagccataacatcggataggg

SEQ ID NO: 2455835 - DNA, 25 bp, Homo sapien
cattcccttagttgaagaagcagtc

SEQ ID NO: 2455836 - DNA, 25 bp, Homo sapien
tttgggacacagagtataagcagcc

SEQ ID NO: 2455837 - DNA, 25 bp, Homo sapien
aattcagtccccagcttagcaagtg

SEQ ID NO: 2455838 - DNA, 25 bp, Homo sapien
ggcagccttttttctcgctaccagg

SEQ ID NO: 2455839 - DNA, 25 bp, Homo sapien
gtcccacagtgggatttcacaggca

SEQ ID NO: 2455840 - DNA, 25 bp, Homo sapien
gaggtccccacttatggtcccacag

SEQ ID NO: 2455841 - DNA, 25 bp, Homo sapien
gatcagctcacattcttgaaacgcc

SEQ ID NO: 2455842 - DNA, 25 bp, Homo sapien
gaagaacgacatagtgtcaggcact

SEQ ID NO: 2455843 - DNA, 25 bp, Homo sapien
gggaatatcggatatgtgtgcatgt

SEQ ID NO: 2455844 - DNA, 25 bp, Homo sapien
aagtgttgggaatatcggatatgtg

SEQ ID NO: 2455845 - DNA, 25 bp, Homo sapien
aggtaaggcttcctgaagaacgaca

SEQ ID NO: 2455846 - DNA, 25 bp, Homo sapien
cattgtcctgcagcctaaccatgga

SEQ ID NO: 2455847 - DNA, 25 bp, Homo sapien
gcctaaccatggagacactagcagt

SEQ ID NO: 2455848 - DNA, 25 bp, Homo sapien
tgtcctgcagcctaaccatggagac

SEQ ID NO: 2455849 - DNA, 25 bp, Homo sapien
tgcagcctaaccatggagacactag

SEQ ID NO: 2455850 - DNA, 25 bp, Homo sapien
aaggaataagttcagataagggtga

SEQ ID NO: 2455851 - DNA, 25 bp, Homo sapien
gtcatgagggggtattccttcatca

SEQ ID NO: 2455852 - DNA, 25 bp, Homo sapien
taagggtgaggataaaatctggtga

SEQ ID NO: 2455853 - DNA, 25 bp, Homo sapien
ttcagataagggtgaggataaaatc

SEQ ID NO: 2455854 - DNA, 25 bp, Homo sapien
tgtgttcccaggggtggctctctct

SEQ ID NO: 2455855 - DNA, 25 bp, Homo sapien
gttcccaggggtggctctctcttca

SEQ ID NO: 2455856 - DNA, 25 bp, Homo sapien
tcccaggggtggctctctcttcagt

SEQ ID NO: 2455857 - DNA, 25 bp, Homo sapien
cccaggggtggctctctcttcagtg

SEQ ID NO: 2455858 - DNA, 25 bp, Homo sapien
tcaacatggaacctgatacttgcac

SEQ ID NO: 2455859 - DNA, 25 bp, Homo sapien
gacaccagaatatactccaatcaac

SEQ ID NO: 2455860 - DNA, 25 bp, Homo sapien
tacaagacaccagaatatactccaa

SEQ ID NO: 2455861 - DNA, 25 bp, Homo sapien
tactccaatcaacatggaacctgat

SEQ ID NO: 2455862 - DNA, 25 bp, Homo sapien
gaaccatacaggatcaggagctgct

SEQ ID NO: 2455863 - DNA, 25 bp, Homo sapien
tgtgtccctagggttgctctctccc

SEQ ID NO: 2455864 - DNA, 25 bp, Homo sapien
tgcagaaccatacaggatcaggagc

SEQ ID NO: 2455865 - DNA, 25 bp, Homo sapien
tcctgcagaaccatacaggatcagg

SEQ ID NO: 2455866 - DNA, 25 bp, Homo sapien
ttagagttgactttgtcgtggttcc

SEQ ID NO: 2455867 - DNA, 25 bp, Homo sapien
cttagagttgactttgtcgtggttc

SEQ ID NO: 2455868 - DNA, 25 bp, Homo sapien
ggttgatacagtcaaggtcctgcag

SEQ ID NO: 2455869 - DNA, 25 bp, Homo sapien
ggctgacagctttgacagcccagtg

SEQ ID NO: 2455870 - DNA, 25 bp, Homo sapien
ccaaaggggtgttgaggttgataca

SEQ ID NO: 2455871 - DNA, 25 bp, Homo sapien
ctgacagctttgacagcccagtgcc

SEQ ID NO: 2455872 - DNA, 25 bp, Homo sapien
agggaaggacttttgcctatcttct

SEQ ID NO: 2455873 - DNA, 25 bp, Homo sapien
tggaattcatgtgatactcccatga

SEQ ID NO: 2455874 - DNA, 25 bp, Homo sapien
ctggaattcatgtgatactcccatg

SEQ ID NO: 2455875 - DNA, 25 bp, Homo sapien
gaattcatgtgatactcccatgatg

SEQ ID NO: 2455876 - DNA, 25 bp, Homo sapien
caatagcactactggacaggttttt

SEQ ID NO: 2455877 - DNA, 25 bp, Homo sapien
tctttgctttcgaggggaatccaca

SEQ ID NO: 2455878 - DNA, 25 bp, Homo sapien
ctggacaggtttttcaggcttggcc

SEQ ID NO: 2455879 - DNA, 25 bp, Homo sapien
tagcactactggacaggtttttcag

SEQ ID NO: 2455880 - DNA, 25 bp, Homo sapien
gaaggcatctgagacactttctcac

SEQ ID NO: 2455881 - DNA, 25 bp, Homo sapien
acagaaggcatctgagacactttct

SEQ ID NO: 2455882 - DNA, 25 bp, Homo sapien
cacagaaggcatctgagacactttc

SEQ ID NO: 2455883 - DNA, 25 bp, Homo sapien
cagaaggcatctgagacactttctc

SEQ ID NO: 2455884 - DNA, 25 bp, Homo sapien
gcatgagaagccagtctgagatgtg

SEQ ID NO: 2455885 - DNA, 25 bp, Homo sapien
catgcatgagaagccagtctgagat

SEQ ID NO: 2455886 - DNA, 25 bp, Homo sapien
gcatgcatgagaagccagtctgaga

SEQ ID NO: 2455887 - DNA, 25 bp, Homo sapien
ctgcatgcatgagaagccagtctga

SEQ ID NO: 2455888 - DNA, 25 bp, Homo sapien
actatattgcaatgcccctggggcc

SEQ ID NO: 2455889 - DNA, 25 bp, Homo sapien
caggtatgtctctatcacttaaaga

SEQ ID NO: 2455890 - DNA, 25 bp, Homo sapien
ctatattgcaatgcccctggggcct

SEQ ID NO: 2455891 - DNA, 25 bp, Homo sapien
tttcaggtatgtctctatcacttaa

SEQ ID NO: 2455892 - DNA, 25 bp, Homo sapien
tcttgagttgcagggctcgatgttc

SEQ ID NO: 2455893 - DNA, 25 bp, Homo sapien
ctcttcttgagttgcagggctcgat

SEQ ID NO: 2455894 - DNA, 25 bp, Homo sapien
gagttgcagggctcgatgttcttta

SEQ ID NO: 2455895 - DNA, 25 bp, Homo sapien
cagggctcgatgttctttatgtttc

SEQ ID NO: 2455896 - DNA, 25 bp, Homo sapien
tgttcccagctgagcaggtccttca

SEQ ID NO: 2455897 - DNA, 25 bp, Homo sapien
gttcccagctgagcaggtccttcat

SEQ ID NO: 2455898 - DNA, 25 bp, Homo sapien
ttctgttcccagctgagcaggtcct

SEQ ID NO: 2455899 - DNA, 25 bp, Homo sapien
ctcccattctgttcccagctgagca

SEQ ID NO: 2455900 - DNA, 25 bp, Homo sapien
ttgtgagggggctctctttcattgc

SEQ ID NO: 2455901 - DNA, 25 bp, Homo sapien
gttgtgagggggctctctttcattg

SEQ ID NO: 2455902 - DNA, 25 bp, Homo sapien
atgaggaatctacagtggctcttga

SEQ ID NO: 2455903 - DNA, 25 bp, Homo sapien
gaggaatctacagtggctcttgatg

SEQ ID NO: 2455904 - DNA, 25 bp, Homo sapien
tgaggaatctacagtggctcttgat

SEQ ID NO: 2455905 - DNA, 25 bp, Homo sapien
tctgcaactgtgagaagccaatcag

SEQ ID NO: 2455906 - DNA, 25 bp, Homo sapien
cacagacggcctttgagacactgac

SEQ ID NO: 2455907 - DNA, 25 bp, Homo sapien
cttggtcttgccgttgtcatggtta

SEQ ID NO: 2455908 - DNA, 25 bp, Homo sapien
caatcagaggtgtgagaacacagct

SEQ ID NO: 2455909 - DNA, 25 bp, Homo sapien
tttcactgccaaagatttcaaggag

SEQ ID NO: 2455910 - DNA, 25 bp, Homo sapien
gctttgactccaacacaaggcagct

SEQ ID NO: 2455911 - DNA, 25 bp, Homo sapien
tcattctagcagttgagccttgatt

SEQ ID NO: 2455912 - DNA, 25 bp, Homo sapien
gaggctgggttttttgcaaattgga

SEQ ID NO: 2455913 - DNA, 25 bp, Homo sapien
gagagtccgaggtgtaagaacactg

SEQ ID NO: 2455914 - DNA, 25 bp, Homo sapien
agagtccgaggtgtaagaacactgc

SEQ ID NO: 2455915 - DNA, 25 bp, Homo sapien
gagtccgaggtgtaagaacactgct

SEQ ID NO: 2455916 - DNA, 25 bp, Homo sapien
ccgaggtgtaagaacactgcttcat

SEQ ID NO: 2455917 - DNA, 25 bp, Homo sapien
gacaggactgcaagggccaaaatga

SEQ ID NO: 2455918 - DNA, 25 bp, Homo sapien
agggaagcatcaaggtcgaaggcat

SEQ ID NO: 2455919 - DNA, 25 bp, Homo sapien
tgaagggaagcatcaaggtcgaagg

SEQ ID NO: 2455920 - DNA, 25 bp, Homo sapien
ctgagacaggactgcaagggccaaa

SEQ ID NO: 2455921 - DNA, 25 bp, Homo sapien
ctgcagtgaattgggatgctggctc

SEQ ID NO: 2455922 - DNA, 25 bp, Homo sapien
cattttgttggcctgtctgtggctc

SEQ ID NO: 2455923 - DNA, 25 bp, Homo sapien
cctgccggaatccaaattactctca

SEQ ID NO: 2455924 - DNA, 25 bp, Homo sapien
tggctcagacctgccggaatccaaa

SEQ ID NO: 2455925 - DNA, 25 bp, Homo sapien
ccagctatagctgctaacaaggaaa

SEQ ID NO: 2455926 - DNA, 25 bp, Homo sapien
gaatccattgtgtgattgtttcctt

SEQ ID NO: 2455927 - DNA, 25 bp, Homo sapien
aactataaattccagctatagctgc

SEQ ID NO: 2455928 - DNA, 25 bp, Homo sapien
tgggaatccattgtgtgattgtttc

SEQ ID NO: 2455929 - DNA, 25 bp, Homo sapien
agaacactgctccacaatgaacttg

SEQ ID NO: 2455930 - DNA, 25 bp, Homo sapien
caggattgccatttccacagatggc

SEQ ID NO: 2455931 - DNA, 25 bp, Homo sapien
actgctccacaatgaacttgccttt

SEQ ID NO: 2455932 - DNA, 25 bp, Homo sapien
gtgagaagccagactgaggtgtgag

SEQ ID NO: 2455933 - DNA, 25 bp, Homo sapien
ttctctggattatgattcagatccc

SEQ ID NO: 2455934 - DNA, 25 bp, Homo sapien
tttttctctggattatgattcagat

SEQ ID NO: 2455935 - DNA, 25 bp, Homo sapien
tggttctgcttaagctgcagggccc

SEQ ID NO: 2455936 - DNA, 25 bp, Homo sapien
taagcaggggcttcatatcgtgagg

SEQ ID NO: 2455937 - DNA, 25 bp, Homo sapien
tctcccacttccgttgaagggttgc

SEQ ID NO: 2455938 - DNA, 25 bp, Homo sapien
ttaatgtctggatagctttgatgct

SEQ ID NO: 2455939 - DNA, 25 bp, Homo sapien
catgttttaatgtctggatagcttt

SEQ ID NO: 2455940 - DNA, 25 bp, Homo sapien
caaccgccaacaaggaaacacttct

SEQ ID NO: 2455941 - DNA, 25 bp, Homo sapien
aagagcatattccagcgataacctc

SEQ ID NO: 2455942 - DNA, 25 bp, Homo sapien
tccagcgataacctcacagtcatga

SEQ ID NO: 2455943 - DNA, 25 bp, Homo sapien
gactatattctaatccacgtgggac

SEQ ID NO: 2455944 - DNA, 25 bp, Homo sapien
cagactatattctaatccacgtggg

SEQ ID NO: 2455945 - DNA, 25 bp, Homo sapien
ggcacttctccatcgtctttggatt

SEQ ID NO: 2455946 - DNA, 25 bp, Homo sapien
gggcacttctccatcgtctttggat

SEQ ID NO: 2455947 - DNA, 25 bp, Homo sapien
cattgcccctcaacaacaatattgg

SEQ ID NO: 2455948 - DNA, 25 bp, Homo sapien
caactcattctgtcaggagagcctt

SEQ ID NO: 2455949 - DNA, 25 bp, Homo sapien
gtttgatgtatgagaacactgttcc

SEQ ID NO: 2455950 - DNA, 25 bp, Homo sapien
caccctggacttgcctttgttgtgg

SEQ ID NO: 2455951 - DNA, 25 bp, Homo sapien
cggactggcctctcttgggtgcaga

SEQ ID NO: 2455952 - DNA, 25 bp, Homo sapien
ggactggcctctcttgggtgcagat

SEQ ID NO: 2455953 - DNA, 25 bp, Homo sapien
tcggactggcctctcttgggtgcag

SEQ ID NO: 2455954 - DNA, 25 bp, Homo sapien
ctcggactggcctctcttgggtgca

SEQ ID NO: 2455955 - DNA, 25 bp, Homo sapien
aatgttcgatgcttcttgtcagagg

SEQ ID NO: 2455956 - DNA, 25 bp, Homo sapien
catccagcaacaacccactgaagga

SEQ ID NO: 2455957 - DNA, 25 bp, Homo sapien
cctgagagaacgagctgccttgtgc

SEQ ID NO: 2455958 - DNA, 25 bp, Homo sapien
tgctgttgatggacaatgtggaatc

SEQ ID NO: 2455959 - DNA, 25 bp, Homo sapien
gattttgaaaatcccttccagaatc

SEQ ID NO: 2455960 - DNA, 25 bp, Homo sapien
cttccatggagaacctgaaagctag

SEQ ID NO: 2455961 - DNA, 25 bp, Homo sapien
gagtttaaaatgttgtggtgcttcc

SEQ ID NO: 2455962 - DNA, 25 bp, Homo sapien
gaacctgaaagctagagtaagccaa

SEQ ID NO: 2455963 - DNA, 25 bp, Homo sapien
gctagagtaagccaagggttggatt

SEQ ID NO: 2455964 - DNA, 25 bp, Homo sapien
ctgaaatgcatctctgtaagaactt

SEQ ID NO: 2455965 - DNA, 25 bp, Homo sapien
cataactctgaaatgcatctctgta

SEQ ID NO: 2455966 - DNA, 25 bp, Homo sapien
aaatgcatctctgtaagaacttcca

SEQ ID NO: 2455967 - DNA, 25 bp, Homo sapien
ataactctgaaatgcatctctgtaa

SEQ ID NO: 2455968 - DNA, 25 bp, Homo sapien
tttcctgtagaggaatgttcatcct

SEQ ID NO: 2455969 - DNA, 25 bp, Homo sapien
gaggaatgttcatcctgactagaat

SEQ ID NO: 2455970 - DNA, 25 bp, Homo sapien
ctatttcctgtagaggaatgttcat

SEQ ID NO: 2455971 - DNA, 25 bp, Homo sapien
cctgtagaggaatgttcatcctgac

SEQ ID NO: 2455972 - DNA, 25 bp, Homo sapien
gtggaccgcttttaactggaatgtg

SEQ ID NO: 2455973 - DNA, 25 bp, Homo sapien
acagcaggagcagattttgtaggag

SEQ ID NO: 2455974 - DNA, 25 bp, Homo sapien
gaccgcttttaactggaatgtgccc

SEQ ID NO: 2455975 - DNA, 25 bp, Homo sapien
gcaggagcagattttgtaggaggag

SEQ ID NO: 2455976 - DNA, 25 bp, Homo sapien
tcccaatggtacaatcccggatttc

SEQ ID NO: 2455977 - DNA, 25 bp, Homo sapien
tacagctgaatgctggagtacccca

SEQ ID NO: 2455978 - DNA, 25 bp, Homo sapien
acgggatcatcctggtacagctgaa

SEQ ID NO: 2455979 - DNA, 25 bp, Homo sapien
gatattaaacctatagcctggaatt

SEQ ID NO: 2455980 - DNA, 25 bp, Homo sapien
ttaatccagtctcattgtggaccat

SEQ ID NO: 2455981 - DNA, 25 bp, Homo sapien
caatatagtgataagatacctgttc

SEQ ID NO: 2455982 - DNA, 25 bp, Homo sapien
gataagatacctgttccagactcaa

SEQ ID NO: 2455983 - DNA, 25 bp, Homo sapien
tagtgataagatacctgttccagac

SEQ ID NO: 2455984 - DNA, 25 bp, Homo sapien
taagatcctggaaccaacctgaaac

SEQ ID NO: 2455985 - DNA, 25 bp, Homo sapien
ttccctgtacagtggcctgtcttat

SEQ ID NO: 2455986 - DNA, 25 bp, Homo sapien
agattccctgtacagtggcctgtct

SEQ ID NO: 2455987 - DNA, 25 bp, Homo sapien
cagaaaatagaacatttcctcacac

SEQ ID NO: 2455988 - DNA, 25 bp, Homo sapien
ctccagattccctgtacagtggcct

SEQ ID NO: 2455989 - DNA, 25 bp, Homo sapien
cccatgatgccccaccacggacccc

SEQ ID NO: 2455990 - DNA, 25 bp, Homo sapien
ccatgatgccccaccacggacccca

SEQ ID NO: 2455991 - DNA, 25 bp, Homo sapien
catgatgccccaccacggaccccac

SEQ ID NO: 2455992 - DNA, 25 bp, Homo sapien
gaggccaaggaatgagcagcaaggt

SEQ ID NO: 2455993 - DNA, 25 bp, Homo sapien
aggcaatgttctgcctacagctgga

SEQ ID NO: 2455994 - DNA, 25 bp, Homo sapien
taggcaatgttctgcctacagctgg

SEQ ID NO: 2455995 - DNA, 25 bp, Homo sapien
gtaggcaatgttctgcctacagctg

SEQ ID NO: 2455996 - DNA, 25 bp, Homo sapien
aaaggaaatttcatccagccgccgg

SEQ ID NO: 2455997 - DNA, 25 bp, Homo sapien
ccaggatgccaaagaagtattcctt

SEQ ID NO: 2455998 - DNA, 25 bp, Homo sapien
gatgccaaagaagtattccttaatg

SEQ ID NO: 2455999 - DNA, 25 bp, Homo sapien
cgccggtaaccaggatgactgagtt

SEQ ID NO: 2456000 - DNA, 25 bp, Homo sapien
gaccatttcatctagctgggctgaa

SEQ ID NO: 2456001 - DNA, 25 bp, Homo sapien
aacgggaccatttcatctagctggg

SEQ ID NO: 2456002 - DNA, 25 bp, Homo sapien
catttcatctagctgggctgaagtg

SEQ ID NO: 2456003 - DNA, 25 bp, Homo sapien
gactcaacgggaccatttcatctag

SEQ ID NO: 2456004 - DNA, 25 bp, Homo sapien
cgtggtgacaccctgcaattttgca

SEQ ID NO: 2456005 - DNA, 25 bp, Homo sapien
aagaaggcaacaccacgactgtggt

SEQ ID NO: 2456006 - DNA, 25 bp, Homo sapien
ccctctcttgttgatcccctgtctt

SEQ ID NO: 2456007 - DNA, 25 bp, Homo sapien
tccagatgattggttgggcaagcgt

SEQ ID NO: 2456008 - DNA, 25 bp, Homo sapien
aaactcgagtctttagcaccttgtg

SEQ ID NO: 2456009 - DNA, 25 bp, Homo sapien
agccccatgcaccacaaactcgagt

SEQ ID NO: 2456010 - DNA, 25 bp, Homo sapien
ccatgcaccacaaactcgagtcttt

SEQ ID NO: 2456011 - DNA, 25 bp, Homo sapien
gcaccacaaactcgagtctttagca

SEQ ID NO: 2456012 - DNA, 25 bp, Homo sapien
tttcaaggccgcctccttgctctgt

SEQ ID NO: 2456013 - DNA, 25 bp, Homo sapien
cacctccttctcagccattatgtct

SEQ ID NO: 2456014 - DNA, 25 bp, Homo sapien
tacacattggtctcctccttaacca

SEQ ID NO: 2456015 - DNA, 25 bp, Homo sapien
tcagcaccgcctcctctttcaaggc

SEQ ID NO: 2456016 - DNA, 25 bp, Homo sapien
cgcagatcgccgcacttgacctggg

SEQ ID NO: 2456017 - DNA, 25 bp, Homo sapien
tgctgagaacctagtcccacaggta

SEQ ID NO: 2456018 - DNA, 25 bp, Homo sapien
tagacgcaggtttcctgaaaagccc

SEQ ID NO: 2456019 - DNA, 25 bp, Homo sapien
tagtcccacaggtacgtagacgcag

SEQ ID NO: 2456020 - DNA, 25 bp, Homo sapien
atatcgacggccaacctggcggctg

SEQ ID NO: 2456021 - DNA, 25 bp, Homo sapien
gatatcgacggccaacctggcggct

SEQ ID NO: 2456022 - DNA, 25 bp, Homo sapien
attgtgtgcacgcaggatatcgacg

SEQ ID NO: 2456023 - DNA, 25 bp, Homo sapien
gtgtgcacgcaggatatcgacggcc

SEQ ID NO: 2456024 - DNA, 25 bp, Homo sapien
acaggcggtggtctgtgggagtccg

SEQ ID NO: 2456025 - DNA, 25 bp, Homo sapien
tgtgctgctgttagacaacataatg

SEQ ID NO: 2456026 - DNA, 25 bp, Homo sapien
tagacaacataatggcggagacgaa

SEQ ID NO: 2456027 - DNA, 25 bp, Homo sapien
gagtccggagaagggcactgtcttc

SEQ ID NO: 2456028 - DNA, 25 bp, Homo sapien
ggaggaggaccaacgggcacagcct

SEQ ID NO: 2456029 - DNA, 25 bp, Homo sapien
tgcaggaggaggaccaacgggcaca

SEQ ID NO: 2456030 - DNA, 25 bp, Homo sapien
gaggaggaccaacgggcacagcctg

SEQ ID NO: 2456031 - DNA, 25 bp, Homo sapien
ggtactatcttcctgcatgcagcgg

SEQ ID NO: 2456032 - DNA, 25 bp, Homo sapien
gctgagcatcagacgtttggggcat

SEQ ID NO: 2456033 - DNA, 25 bp, Homo sapien
gaaacgtgggttgccacggacacat

SEQ ID NO: 2456034 - DNA, 25 bp, Homo sapien
taaaaagccggagcagaggcgggta

SEQ ID NO: 2456035 - DNA, 25 bp, Homo sapien
gaagcgagttctcaccagaacaggt

SEQ ID NO: 2456036 - DNA, 25 bp, Homo sapien
gcgagttctcaccagaacaggtttt

SEQ ID NO: 2456037 - DNA, 25 bp, Homo sapien
agcgagttctcaccagaacaggttt

SEQ ID NO: 2456038 - DNA, 25 bp, Homo sapien
cagaagcgagttctcaccagaacag

SEQ ID NO: 2456039 - DNA, 25 bp, Homo sapien
tgcctttgggtgctcttaggccttc

SEQ ID NO: 2456040 - DNA, 25 bp, Homo sapien
cctgcctttgggtgctcttaggcct

SEQ ID NO: 2456041 - DNA, 25 bp, Homo sapien
gcctttgggtgctcttaggccttct

SEQ ID NO: 2456042 - DNA, 25 bp, Homo sapien
ctttgggtgctcttaggccttcttc

SEQ ID NO: 2456043 - DNA, 25 bp, Homo sapien
ggcatctgcaatgaggagcgcctcc

SEQ ID NO: 2456044 - DNA, 25 bp, Homo sapien
agcgcctccccgcatggtagaggga

SEQ ID NO: 2456045 - DNA, 25 bp, Homo sapien
cttcagttggttgatttactgtgac

SEQ ID NO: 2456046 - DNA, 25 bp, Homo sapien
cactaaggagtattgcattggcatc

SEQ ID NO: 2456047 - DNA, 25 bp, Homo sapien
tcagtttgggatcaaccagggctct

SEQ ID NO: 2456048 - DNA, 25 bp, Homo sapien
cagtttgggatcaaccagggctctc

SEQ ID NO: 2456049 - DNA, 25 bp, Homo sapien
ggttcagtttgggatcaaccagggc

SEQ ID NO: 2456050 - DNA, 25 bp, Homo sapien
ctggggttcagtttgggatcaacca

SEQ ID NO: 2456051 - DNA, 25 bp, Homo sapien
acgctcccctgacatgcttggtccc

SEQ ID NO: 2456052 - DNA, 25 bp, Homo sapien
tttggatgacaccacgctcccctga

SEQ ID NO: 2456053 - DNA, 25 bp, Homo sapien
ccaggcctgctacgtcccgtttgga

SEQ ID NO: 2456054 - DNA, 25 bp, Homo sapien
tacgtcccgtttggatgacaccacg

SEQ ID NO: 2456055 - DNA, 25 bp, Homo sapien
agttccaacttaacggctcatctga

SEQ ID NO: 2456056 - DNA, 25 bp, Homo sapien
caacttaacggctcatctgaaatct

SEQ ID NO: 2456057 - DNA, 25 bp, Homo sapien
ctccagttccaacttaacggctcat

SEQ ID NO: 2456058 - DNA, 25 bp, Homo sapien
ggtttgtgccacagttccgtacata

SEQ ID NO: 2456059 - DNA, 25 bp, Homo sapien
cagactggtgacccaagcagctggg

SEQ ID NO: 2456060 - DNA, 25 bp, Homo sapien
ctggtgacccaagcagctgggaaca

SEQ ID NO: 2456061 - DNA, 25 bp, Homo sapien
gtgacccaagcagctgggaacacac

SEQ ID NO: 2456062 - DNA, 25 bp, Homo sapien
tcagactggtgacccaagcagctgg

SEQ ID NO: 2456063 - DNA, 25 bp, Homo sapien
cagggtcattcctaatgtttcccag

SEQ ID NO: 2456064 - DNA, 25 bp, Homo sapien
ggtcattcctaatgtttcccagtga

SEQ ID NO: 2456065 - DNA, 25 bp, Homo sapien
attcctaatgtttcccagtgaggac

SEQ ID NO: 2456066 - DNA, 25 bp, Homo sapien
tcattcctaatgtttcccagtgagg

SEQ ID NO: 2456067 - DNA, 25 bp, Homo sapien
tccccagcgatagggctcaacatca

SEQ ID NO: 2456068 - DNA, 25 bp, Homo sapien
ggtgtccccagcgatagggctcaac

SEQ ID NO: 2456069 - DNA, 25 bp, Homo sapien
gtggtgtccccagcgatagggctca

SEQ ID NO: 2456070 - DNA, 25 bp, Homo sapien
agcgatagggctcaacatcataatc

SEQ ID NO: 2456071 - DNA, 25 bp, Homo sapien
gatgttcacgagatattccttggta

SEQ ID NO: 2456072 - DNA, 25 bp, Homo sapien
tgttcacgagatattccttggtaat

SEQ ID NO: 2456073 - DNA, 25 bp, Homo sapien
tcacgagatattccttggtaatcac

SEQ ID NO: 2456074 - DNA, 25 bp, Homo sapien
gtgatgttcacgagatattccttgg

SEQ ID NO: 2456075 - DNA, 25 bp, Homo sapien
gagatgaatgggatgcttcacttct

SEQ ID NO: 2456076 - DNA, 25 bp, Homo sapien
tcttgcagagatgaatgggatgctt

SEQ ID NO: 2456077 - DNA, 25 bp, Homo sapien
gggttactccaaaagaacaacatga

SEQ ID NO: 2456078 - DNA, 25 bp, Homo sapien
gaacaacatgatcttgcagagatga

SEQ ID NO: 2456079 - DNA, 25 bp, Homo sapien
tccaggctgaccatgtagctcagca

SEQ ID NO: 2456080 - DNA, 25 bp, Homo sapien
ctccaggctgaccatgtagctcagc

SEQ ID NO: 2456081 - DNA, 25 bp, Homo sapien
ccaggctgaccatgtagctcagcat

SEQ ID NO: 2456082 - DNA, 25 bp, Homo sapien
agaaaaacgtattctggtctgaact

SEQ ID NO: 2456083 - DNA, 25 bp, Homo sapien
catatcgacgatgagctgcccatcg

SEQ ID NO: 2456084 - DNA, 25 bp, Homo sapien
gttctccaaagagtcatatcgacga

SEQ ID NO: 2456085 - DNA, 25 bp, Homo sapien
ccaaagagtcatatcgacgatgagc

SEQ ID NO: 2456086 - DNA, 25 bp, Homo sapien
gagtcatatcgacgatgagctgccc

SEQ ID NO: 2456087 - DNA, 25 bp, Homo sapien
cacctctcaactggaaaggcagaaa

SEQ ID NO: 2456088 - DNA, 25 bp, Homo sapien
atgacggcgcctctgcggtctaggt

SEQ ID NO: 2456089 - DNA, 25 bp, Homo sapien
gatgacggcgcctctgcggtctagg

SEQ ID NO: 2456090 - DNA, 25 bp, Homo sapien
ctctggcgagaaaaggccttcctgg

SEQ ID NO: 2456091 - DNA, 25 bp, Homo sapien
gaaaaggccttcctggcttgggcat

SEQ ID NO: 2456092 - DNA, 25 bp, Homo sapien
aggccttcctggcttgggcattaac

SEQ ID NO: 2456093 - DNA, 25 bp, Homo sapien
aaaggccttcctggcttgggcatta

SEQ ID NO: 2456094 - DNA, 25 bp, Homo sapien
tctgccattatgtcatccaacagct

SEQ ID NO: 2456095 - DNA, 25 bp, Homo sapien
gcaaagccgcctgctcactctccac

SEQ ID NO: 2456096 - DNA, 25 bp, Homo sapien
agctcctccagggcggactctggga

SEQ ID NO: 2456097 - DNA, 25 bp, Homo sapien
atcctgaaggcggtgccctcctcgg

SEQ ID NO: 2456098 - DNA, 25 bp, Homo sapien
taggcgtccgggcacacgcgggctg

SEQ ID NO: 2456099 - DNA, 25 bp, Homo sapien
tcctcagtgtggcaagccatgaaca

SEQ ID NO: 2456100 - DNA, 25 bp, Homo sapien
ctccgagaagcccttggaacttgtg

SEQ ID NO: 2456101 - DNA, 25 bp, Homo sapien
acttgtgccgggtagctaggcgtcc

SEQ ID NO: 2456102 - DNA, 25 bp, Homo sapien
tgtactctcgcaggtcgaggcaaat

SEQ ID NO: 2456103 - DNA, 25 bp, Homo sapien
ttcgtctgcactgtaggctagaacc

SEQ ID NO: 2456104 - DNA, 25 bp, Homo sapien
taggctagaaccctggcatgtactc

SEQ ID NO: 2456105 - DNA, 25 bp, Homo sapien
ctggcatgtactctcgcaggtcgag

SEQ ID NO: 2456106 - DNA, 25 bp, Homo sapien
ttgcagctgccgattccagatggct

SEQ ID NO: 2456107 - DNA, 25 bp, Homo sapien
catcaatggactcgctggaggtcct

SEQ ID NO: 2456108 - DNA, 25 bp, Homo sapien
ttcacttggaggtagactccgtgaa

SEQ ID NO: 2456109 - DNA, 25 bp, Homo sapien
gactccgtgaatgcccctgtggcct

SEQ ID NO: 2456110 - DNA, 25 bp, Homo sapien
aacagaggatcaacatcggagcgtg

SEQ ID NO: 2456111 - DNA, 25 bp, Homo sapien
gctcttgcagaattgcaggcgtcag

SEQ ID NO: 2456112 - DNA, 25 bp, Homo sapien
aattgcaggcgtcaggaggcttgcc

SEQ ID NO: 2456113 - DNA, 25 bp, Homo sapien
aacatcggagcgtgacaggccaaat

SEQ ID NO: 2456114 - DNA, 25 bp, Homo sapien
ccgggttttggtaggattgctgagg

SEQ ID NO: 2456115 - DNA, 25 bp, Homo sapien
ctgcccgggttttggtaggattgct

SEQ ID NO: 2456116 - DNA, 25 bp, Homo sapien
atgactgcccgggttttggtaggat

SEQ ID NO: 2456117 - DNA, 25 bp, Homo sapien
acatgactgcccgggttttggtagg

SEQ ID NO: 2456118 - DNA, 25 bp, Homo sapien
ttgctgctccactcaccaaccagaa

SEQ ID NO: 2456119 - DNA, 25 bp, Homo sapien
gattcttcagacagccggagtgctg

SEQ ID NO: 2456120 - DNA, 25 bp, Homo sapien
ccggagtgctgagagccgaatggga

SEQ ID NO: 2456121 - DNA, 25 bp, Homo sapien
tgctgctccactcaccaaccagaat

SEQ ID NO: 2456122 - DNA, 25 bp, Homo sapien
cagctatgagaacccatgagctgct

SEQ ID NO: 2456123 - DNA, 25 bp, Homo sapien
gctgctaactatggacccgctgtag

SEQ ID NO: 2456124 - DNA, 25 bp, Homo sapien
gtgggcagctatgagaacccatgag

SEQ ID NO: 2456125 - DNA, 25 bp, Homo sapien
tatggacccgctgtagacctgactg

SEQ ID NO: 2456126 - DNA, 25 bp, Homo sapien
gagatgaagtgtggccaaatggaag

SEQ ID NO: 2456127 - DNA, 25 bp, Homo sapien
agatgaagtgtggccaaatggaagt

SEQ ID NO: 2456128 - DNA, 25 bp, Homo sapien
cagcttggggcacaattgggcacaa

SEQ ID NO: 2456129 - DNA, 25 bp, Homo sapien
ctgtcttggcctctacacaaaaagt

SEQ ID NO: 2456130 - DNA, 25 bp, Homo sapien
gtcttggcctctacacaaaaagtga

SEQ ID NO: 2456131 - DNA, 25 bp, Homo sapien
agtgaattcattcagcttggggcac

SEQ ID NO: 2456132 - DNA, 25 bp, Homo sapien
tgactaagccccactggactagggc

SEQ ID NO: 2456133 - DNA, 25 bp, Homo sapien
gactaagccccactggactagggcc

SEQ ID NO: 2456134 - DNA, 25 bp, Homo sapien
actaagccccactggactagggcca

SEQ ID NO: 2456135 - DNA, 25 bp, Homo sapien
taagccccactggactagggccagg

SEQ ID NO: 2456136 - DNA, 25 bp, Homo sapien
gacaggtatctcagttaacaaagtg

SEQ ID NO: 2456137 - DNA, 25 bp, Homo sapien
tataagctcgcttggttggagagaa

SEQ ID NO: 2456138 - DNA, 25 bp, Homo sapien
gtttcaggttggatccaggttctca

SEQ ID NO: 2456139 - DNA, 25 bp, Homo sapien
cgtttagacaaggagccaaagtgac

SEQ ID NO: 2456140 - DNA, 25 bp, Homo sapien
tataagcaaggtccacggtttgact

SEQ ID NO: 2456141 - DNA, 25 bp, Homo sapien
catgtctgctttggctacaggtagt

SEQ ID NO: 2456142 - DNA, 25 bp, Homo sapien
tgggccagaaacttagtaggaagct

SEQ ID NO: 2456143 - DNA, 25 bp, Homo sapien
cagaccggattaaagcgtgaattat

SEQ ID NO: 2456144 - DNA, 25 bp, Homo sapien
cagtttggaccagggagagactttc

SEQ ID NO: 2456145 - DNA, 25 bp, Homo sapien
ccaacttcagtttggaccagggaga

SEQ ID NO: 2456146 - DNA, 25 bp, Homo sapien
tctcagcattggttcggtatgtagc

SEQ ID NO: 2456147 - DNA, 25 bp, Homo sapien
cattggttcggtatgtagcagctct

SEQ ID NO: 2456148 - DNA, 25 bp, Homo sapien
ctgtaagtgagatgtgactgtatca

SEQ ID NO: 2456149 - DNA, 25 bp, Homo sapien
taagtgagatgtgactgtatcaatt

SEQ ID NO: 2456150 - DNA, 25 bp, Homo sapien
gtgagatgtgactgtatcaatttca

SEQ ID NO: 2456151 - DNA, 25 bp, Homo sapien
tgagatgtgactgtatcaatttcag

SEQ ID NO: 2456152 - DNA, 25 bp, Homo sapien
ggtccagggatgaatttcagagtat

SEQ ID NO: 2456153 - DNA, 25 bp, Homo sapien
actgtttgagaataaggttgagtac

SEQ ID NO: 2456154 - DNA, 25 bp, Homo sapien
taggctctgtcaagggaattaaggc

SEQ ID NO: 2456155 - DNA, 25 bp, Homo sapien
tatcagatacaaaacgtgtccagag

SEQ ID NO: 2456156 - DNA, 25 bp, Homo sapien
cagtatgaccggatcagtttcagac

SEQ ID NO: 2456157 - DNA, 25 bp, Homo sapien
tgttggagtttcacacagtgggact

SEQ ID NO: 2456158 - DNA, 25 bp, Homo sapien
gatctgtttctggtcgggtccaatg

SEQ ID NO: 2456159 - DNA, 25 bp, Homo sapien
tgggcccaatacctaattggatctg

SEQ ID NO: 2456160 - DNA, 25 bp, Homo sapien
tcagtctgcgttctgggccacaata

SEQ ID NO: 2456161 - DNA, 25 bp, Homo sapien
ccagtttgggcccaatacctaattg

SEQ ID NO: 2456162 - DNA, 25 bp, Homo sapien
gaggcaaagaacaggaataccttgc

SEQ ID NO: 2456163 - DNA, 25 bp, Homo sapien
aggcaaagaacaggaataccttgct

SEQ ID NO: 2456164 - DNA, 25 bp, Homo sapien
agaggcaaagaacaggaataccttg

SEQ ID NO: 2456165 - DNA, 25 bp, Homo sapien
gttctccctgtagccagaattatac

SEQ ID NO: 2456166 - DNA, 25 bp, Homo sapien
tatactctgcgtaaaaccaaaagga

SEQ ID NO: 2456167 - DNA, 25 bp, Homo sapien
aaaggatttgtctttgatctcaatt

SEQ ID NO: 2456168 - DNA, 25 bp, Homo sapien
tctttgatctcaattaagtgtttta

SEQ ID NO: 2456169 - DNA, 25 bp, Homo sapien
ggtattgatgggacatatttcaaaa

SEQ ID NO: 2456170 - DNA, 25 bp, Homo sapien
gggacgcaaggctggttcaatatac

SEQ ID NO: 2456171 - DNA, 25 bp, Homo sapien
cagcatataaacagagccaaagaca

SEQ ID NO: 2456172 - DNA, 25 bp, Homo sapien
gacgcaaggctggttcaatatacgc

SEQ ID NO: 2456173 - DNA, 25 bp, Homo sapien
tccctttactgtcagacatgtccga

SEQ ID NO: 2456174 - DNA, 25 bp, Homo sapien
ctttactgtcagacatgtccgacat

SEQ ID NO: 2456175 - DNA, 25 bp, Homo sapien
cctttactgtcagacatgtccgaca

SEQ ID NO: 2456176 - DNA, 25 bp, Homo sapien
cttccctttactgtcagacatgtcc

SEQ ID NO: 2456177 - DNA, 25 bp, Homo sapien
ttacttcagacttgtgagagcttct

SEQ ID NO: 2456178 - DNA, 25 bp, Homo sapien
ttctttcctttgagagtactggctg

SEQ ID NO: 2456179 - DNA, 25 bp, Homo sapien
cctttgagagtactggctggtgcca

SEQ ID NO: 2456180 - DNA, 25 bp, Homo sapien
tacttcagacttgtgagagcttctt

SEQ ID NO: 2456181 - DNA, 25 bp, Homo sapien
accataggcctcacagtagccatca

SEQ ID NO: 2456182 - DNA, 25 bp, Homo sapien
taatctctaccataggcctcacagt

SEQ ID NO: 2456183 - DNA, 25 bp, Homo sapien
tgttcagaataatctctaccatagg

SEQ ID NO: 2456184 - DNA, 25 bp, Homo sapien
taggcctcacagtagccatcacggt

SEQ ID NO: 2456185 - DNA, 25 bp, Homo sapien
agcataatccctggtttctccggaa

SEQ ID NO: 2456186 - DNA, 25 bp, Homo sapien
cctctagaggaatgttcatcctgaa

SEQ ID NO: 2456187 - DNA, 25 bp, Homo sapien
atgcatagtctctaggtggtggagc

SEQ ID NO: 2456188 - DNA, 25 bp, Homo sapien
tcatcctgaatagaatgaccataat

SEQ ID NO: 2456189 - DNA, 25 bp, Homo sapien
tgaagatggaactttttagctggaa

SEQ ID NO: 2456190 - DNA, 25 bp, Homo sapien
cataccactgttgcttcttgccaca

SEQ ID NO: 2456191 - DNA, 25 bp, Homo sapien
ctccacgtcttgaagatggaacttt

SEQ ID NO: 2456192 - DNA, 25 bp, Homo sapien
tggaactttttagctggaatgggtc

SEQ ID NO: 2456193 - DNA, 25 bp, Homo sapien
ctcgaagaagctggtggtctccgtc

SEQ ID NO: 2456194 - DNA, 25 bp, Homo sapien
caccctcttgttcctccactgcttc

SEQ ID NO: 2456195 - DNA, 25 bp, Homo sapien
tcatgtgagggaagccaccctcttg

SEQ ID NO: 2456196 - DNA, 25 bp, Homo sapien
ggtctccgtctaccaccactttgaa

SEQ ID NO: 2456197 - DNA, 25 bp, Homo sapien
ttttgttatttctgggctcaaaata

SEQ ID NO: 2456198 - DNA, 25 bp, Homo sapien
ttcttttgttatttctgggctcaaa

SEQ ID NO: 2456199 - DNA, 25 bp, Homo sapien
tatttctgggctcaaaatattttcc

SEQ ID NO: 2456200 - DNA, 25 bp, Homo sapien
ttctgggctcaaaatattttcccca

SEQ ID NO: 2456201 - DNA, 25 bp, Homo sapien
ctccagtaacctgcatcgttatctg

SEQ ID NO: 2456202 - DNA, 25 bp, Homo sapien
cctgcatcgttatctgacatgtggt

SEQ ID NO: 2456203 - DNA, 25 bp, Homo sapien
tgcatcgttatctgacatgtggttg

SEQ ID NO: 2456204 - DNA, 25 bp, Homo sapien
gtaacctgcatcgttatctgacatg

SEQ ID NO: 2456205 - DNA, 25 bp, Homo sapien
gaaggtcccagttttaggcagggca

SEQ ID NO: 2456206 - DNA, 25 bp, Homo sapien
gggtcttgcagattgttccttgaca

SEQ ID NO: 2456207 - DNA, 25 bp, Homo sapien
gttgactgacggtgggtattgccca

SEQ ID NO: 2456208 - DNA, 25 bp, Homo sapien
gatgtgtcatgtaaaagggtcttgc

SEQ ID NO: 2456209 - DNA, 25 bp, Homo sapien
tttgcatgtttgtgttttcccatag

SEQ ID NO: 2456210 - DNA, 25 bp, Homo sapien
tgcatgtttgtgttttcccatagtc

SEQ ID NO: 2456211 - DNA, 25 bp, Homo sapien
catgtttgtgttttcccatagtcac

SEQ ID NO: 2456212 - DNA, 25 bp, Homo sapien
ttttgcatgtttgtgttttcccata

SEQ ID NO: 2456213 - DNA, 25 bp, Homo sapien
ccctcttcctgtctgcgtttttttg

SEQ ID NO: 2456214 - DNA, 25 bp, Homo sapien
tgcgtttttttgtgcctggatctgt

SEQ ID NO: 2456215 - DNA, 25 bp, Homo sapien
tcctgtctgcgtttttttgtgcctg

SEQ ID NO: 2456216 - DNA, 25 bp, Homo sapien
caagtttaacccctcttcctgtctg

SEQ ID NO: 2456217 - DNA, 25 bp, Homo sapien
gtcgtgtgcataagaccatactgag

SEQ ID NO: 2456218 - DNA, 25 bp, Homo sapien
catcctgcatactgtagtaactttg

SEQ ID NO: 2456219 - DNA, 25 bp, Homo sapien
ccatactgagtactgacatcctgca

SEQ ID NO: 2456220 - DNA, 25 bp, Homo sapien
ttcaggtaaagcctgatgctccatc

SEQ ID NO: 2456221 - DNA, 25 bp, Homo sapien
gagaaacacaaacgcatgtcaaaat

SEQ ID NO: 2456222 - DNA, 25 bp, Homo sapien
tgtgccacaggtccttacataggat

SEQ ID NO: 2456223 - DNA, 25 bp, Homo sapien
gggattgtgccacaggtccttacat

SEQ ID NO: 2456224 - DNA, 25 bp, Homo sapien
ggcttcatcctcttgtagtattgca

SEQ ID NO: 2456225 - DNA, 25 bp, Homo sapien
tgcaggggattgtgccacaggtcct

SEQ ID NO: 2456226 - DNA, 25 bp, Homo sapien
cctcatcagggctcagactggtgac

SEQ ID NO: 2456227 - DNA, 25 bp, Homo sapien
ctgtcaggggaatcaattgggaaag

SEQ ID NO: 2456228 - DNA, 25 bp, Homo sapien
catcagggctcagactggtgaccta

SEQ ID NO: 2456229 - DNA, 25 bp, Homo sapien
gaatcaattgggaaaggcctcatca

SEQ ID NO: 2456230 - DNA, 25 bp, Homo sapien
ttcctgatgtttcccggtgaggatg

SEQ ID NO: 2456231 - DNA, 25 bp, Homo sapien
tcccggtgaggatgcacctcagcaa

SEQ ID NO: 2456232 - DNA, 25 bp, Homo sapien
gaggatgcacctcagcaatcctatt

SEQ ID NO: 2456233 - DNA, 25 bp, Homo sapien
tgatgtttcccggtgaggatgcacc

SEQ ID NO: 2456234 - DNA, 25 bp, Homo sapien
ctggatcacattggcaattatccac

SEQ ID NO: 2456235 - DNA, 25 bp, Homo sapien
tctggatactactgaattggagtgg

SEQ ID NO: 2456236 - DNA, 25 bp, Homo sapien
cataatctggatactactgaattgg

SEQ ID NO: 2456237 - DNA, 25 bp, Homo sapien
cacattggcaattatccacccatca

SEQ ID NO: 2456238 - DNA, 25 bp, Homo sapien
ctgtgacattcccaagatattcctt

SEQ ID NO: 2456239 - DNA, 25 bp, Homo sapien
actgatcagggctgatatcaagagg

SEQ ID NO: 2456240 - DNA, 25 bp, Homo sapien
tcagggctgatatcaagaggtggtt

SEQ ID NO: 2456241 - DNA, 25 bp, Homo sapien
gctgatatcaagaggtggtttgcca

SEQ ID NO: 2456242 - DNA, 25 bp, Homo sapien
tatcaagaggtggtttgccatctgc

SEQ ID NO: 2456243 - DNA, 25 bp, Homo sapien
cctcttgggctcatggagtgcatat

SEQ ID NO: 2456244 - DNA, 25 bp, Homo sapien
cgtctgaggagtggcagaatatgct

SEQ ID NO: 2456245 - DNA, 25 bp, Homo sapien
gaatatgcttataaccgaagacgcc

SEQ ID NO: 2456246 - DNA, 25 bp, Homo sapien
gagtgcatataattctgaggctgac

SEQ ID NO: 2456247 - DNA, 25 bp, Homo sapien
ttgattgagcattaggaaacacttt

SEQ ID NO: 2456248 - DNA, 25 bp, Homo sapien
tccatcgtcgcttgtcccaaggaag

SEQ ID NO: 2456249 - DNA, 25 bp, Homo sapien
ggctgcccgagtcgaacagctggcc

SEQ ID NO: 2456250 - DNA, 25 bp, Homo sapien
ggcccactcaggacaagatgtgctc

SEQ ID NO: 2456251 - DNA, 25 bp, Homo sapien
aatgcccactccatcgtcgcttgtc

SEQ ID NO: 2456252 - DNA, 25 bp, Homo sapien
taatgccgagcatgctcacagtgca

SEQ ID NO: 2456253 - DNA, 25 bp, Homo sapien
tgtcttcttgatgcggtaggctctg

SEQ ID NO: 2456254 - DNA, 25 bp, Homo sapien
ggtctctcttgtgtcctcgagaatg

SEQ ID NO: 2456255 - DNA, 25 bp, Homo sapien
ggatttcacacgaagttagtggcag

SEQ ID NO: 2456256 - DNA, 25 bp, Homo sapien
tgtggagcacggaaaagtggaagta

SEQ ID NO: 2456257 - DNA, 25 bp, Homo sapien
cgttgtggagcacggaaaagtggaa

SEQ ID NO: 2456258 - DNA, 25 bp, Homo sapien
tgcgttgtggagcacggaaaagtgg

SEQ ID NO: 2456259 - DNA, 25 bp, Homo sapien
tatgcgttgtggagcacggaaaagt

SEQ ID NO: 2456260 - DNA, 25 bp, Homo sapien
gtcaagatcccatgtgttcagggtg

SEQ ID NO: 2456261 - DNA, 25 bp, Homo sapien
cagcactcagtattcacagggggtc

SEQ ID NO: 2456262 - DNA, 25 bp, Homo sapien
tccaagatcagtcaagatcccatgt

SEQ ID NO: 2456263 - DNA, 25 bp, Homo sapien
cacagggggtctcgcatccaagtac

SEQ ID NO: 2456264 - DNA, 25 bp, Homo sapien
cggccagaccacgtgcaggaccgcc

SEQ ID NO: 2456265 - DNA, 25 bp, Homo sapien
tgcggccagaccacgtgcaggaccg

SEQ ID NO: 2456266 - DNA, 25 bp, Homo sapien
gccagaccacgtgcaggaccgccat

SEQ ID NO: 2456267 - DNA, 25 bp, Homo sapien
cctgcggccagaccacgtgcaggac

SEQ ID NO: 2456268 - DNA, 25 bp, Homo sapien
tcccctgcccaggttccaggcacac

SEQ ID NO: 2456269 - DNA, 25 bp, Homo sapien
cagtcccctgcccaggttccaggca

SEQ ID NO: 2456270 - DNA, 25 bp, Homo sapien
agtcccctgcccaggttccaggcac

SEQ ID NO: 2456271 - DNA, 25 bp, Homo sapien
tcagtcccctgcccaggttccaggc

SEQ ID NO: 2456272 - DNA, 25 bp, Homo sapien
acacatcgggctggctcaggactgc

SEQ ID NO: 2456273 - DNA, 25 bp, Homo sapien
tggctcaggactgcacgtgctctga

SEQ ID NO: 2456274 - DNA, 25 bp, Homo sapien
ggactgcacgtgctctgaggcatca

SEQ ID NO: 2456275 - DNA, 25 bp, Homo sapien
caacacatcgggctggctcaggact

SEQ ID NO: 2456276 - DNA, 25 bp, Homo sapien
tcgcttgtcccgacgaggacctgac

SEQ ID NO: 2456277 - DNA, 25 bp, Homo sapien
tatcgcttgtcccgacgaggacctg

SEQ ID NO: 2456278 - DNA, 25 bp, Homo sapien
atcgcttgtcccgacgaggacctga

SEQ ID NO: 2456279 - DNA, 25 bp, Homo sapien
agcatgtccacgcagtgaggcctgg

SEQ ID NO: 2456280 - DNA, 25 bp, Homo sapien
tgcagcggcgctagatgaatgaata

SEQ ID NO: 2456281 - DNA, 25 bp, Homo sapien
ccaggtgcacagacacggatttcct

SEQ ID NO: 2456282 - DNA, 25 bp, Homo sapien
ccccggcttggacgattgcagcggc

SEQ ID NO: 2456283 - DNA, 25 bp, Homo sapien
ctgcgacctcaggaacgcgcgcctg

SEQ ID NO: 2456284 - DNA, 25 bp, Homo sapien
tcccgcccgggttgtagccaggctc

SEQ ID NO: 2456285 - DNA, 25 bp, Homo sapien
cggctgtgctgcagtcgcggatctt

SEQ ID NO: 2456286 - DNA, 25 bp, Homo sapien
ctggtgggctgctgcgagtcggaag

SEQ ID NO: 2456287 - DNA, 25 bp, Homo sapien
acgcgtgggctgtcaagggggagca

SEQ ID NO: 2456288 - DNA, 25 bp, Homo sapien
ctgggacgcgtgggctgtcaagggg

SEQ ID NO: 2456289 - DNA, 25 bp, Homo sapien
cgggggcggggttgtgaagcactga

SEQ ID NO: 2456290 - DNA, 25 bp, Homo sapien
cgtgggctgtcaagggggagcagag

SEQ ID NO: 2456291 - DNA, 25 bp, Homo sapien
caacagatcagaggcaagcgggtgc

SEQ ID NO: 2456292 - DNA, 25 bp, Homo sapien
ccaaggtacctgctattaccaggcg

SEQ ID NO: 2456293 - DNA, 25 bp, Homo sapien
agcccaaggtacctgctattaccag

SEQ ID NO: 2456294 - DNA, 25 bp, Homo sapien
caaggtacctgctattaccaggcgg

SEQ ID NO: 2456295 - DNA, 25 bp, Homo sapien
cctgcccaggattccggctctcggg

SEQ ID NO: 2456296 - DNA, 25 bp, Homo sapien
gtcaccggcggccagacctggcgca

SEQ ID NO: 2456297 - DNA, 25 bp, Homo sapien
gccgtgctgttgctggcgggcgcca

SEQ ID NO: 2456298 - DNA, 25 bp, Homo sapien
tggcgcaggaccaacgtggcgccgc

SEQ ID NO: 2456299 - DNA, 25 bp, Homo sapien
cccagctccggagcttccaccacat

SEQ ID NO: 2456300 - DNA, 25 bp, Homo sapien
ctccagctccccagctccggagctt

SEQ ID NO: 2456301 - DNA, 25 bp, Homo sapien
tccccagctccggagcttccaccac

SEQ ID NO: 2456302 - DNA, 25 bp, Homo sapien
agctccccagctccggagcttccac

SEQ ID NO: 2456303 - DNA, 25 bp, Homo sapien
acagccaggtcagcacagggcgaag

SEQ ID NO: 2456304 - DNA, 25 bp, Homo sapien
cacagccaggtcagcacagggcgaa

SEQ ID NO: 2456305 - DNA, 25 bp, Homo sapien
gcacagccaggtcagcacagggcga

SEQ ID NO: 2456306 - DNA, 25 bp, Homo sapien
caagcttcaccaggctatgtgcagg

SEQ ID NO: 2456307 - DNA, 25 bp, Homo sapien
catggacatgcacactaggtattaa

SEQ ID NO: 2456308 - DNA, 25 bp, Homo sapien
tgcaggccttggaccagaacatcag

SEQ ID NO: 2456309 - DNA, 25 bp, Homo sapien
tttcaggagagtaagtatggacagc

SEQ ID NO: 2456310 - DNA, 25 bp, Homo sapien
tctgcagagaaagatacaggcactt

SEQ ID NO: 2456311 - DNA, 25 bp, Homo sapien
taagaagccttgatgtgaaacaaat

SEQ ID NO: 2456312 - DNA, 25 bp, Homo sapien
gagagcgtgtctgttcacctggcca

SEQ ID NO: 2456313 - DNA, 25 bp, Homo sapien
aaaggctagtattctaactccctgc

SEQ ID NO: 2456314 - DNA, 25 bp, Homo sapien
cttgctgagctaaggagagaaaatc

SEQ ID NO: 2456315 - DNA, 25 bp, Homo sapien
tgctgagctaaggagagaaaatcgc

SEQ ID NO: 2456316 - DNA, 25 bp, Homo sapien
ggatgagggatatctgtggggatgc

SEQ ID NO: 2456317 - DNA, 25 bp, Homo sapien
ttgctgagctaaggagagaaaatcg

SEQ ID NO: 2456318 - DNA, 25 bp, Homo sapien
caggaggtgggcttgtgcccgtgtc

SEQ ID NO: 2456319 - DNA, 25 bp, Homo sapien
tagctccttgtctggatacccgcag

SEQ ID NO: 2456320 - DNA, 25 bp, Homo sapien
gtggcaggatcttcatacaggaggt

SEQ ID NO: 2456321 - DNA, 25 bp, Homo sapien
ccaaagagccatcctgtggcaggat

SEQ ID NO: 2456322 - DNA, 25 bp, Homo sapien
tgagtataagaacacactgtgttgt

SEQ ID NO: 2456323 - DNA, 25 bp, Homo sapien
gaagaagagaacatgctagagtcca

SEQ ID NO: 2456324 - DNA, 25 bp, Homo sapien
tgccatagctgaagagcaaacccaa

SEQ ID NO: 2456325 - DNA, 25 bp, Homo sapien
gttggataggatttaaagcaagtca

SEQ ID NO: 2456326 - DNA, 25 bp, Homo sapien
ggagaaccactactggccaagcatt

SEQ ID NO: 2456327 - DNA, 25 bp, Homo sapien
cagcctcctctgctacaattgcatt

SEQ ID NO: 2456328 - DNA, 25 bp, Homo sapien
aggacgatgtggagaaccactactg

SEQ ID NO: 2456329 - DNA, 25 bp, Homo sapien
tcctctgctacaattgcatttctgg

SEQ ID NO: 2456330 - DNA, 25 bp, Homo sapien
tgtgggggtccgcagctgcaatacc

SEQ ID NO: 2456331 - DNA, 25 bp, Homo sapien
agctgcaataccaccaggcggcagc

SEQ ID NO: 2456332 - DNA, 25 bp, Homo sapien
aacttccttgtgggggtccgcagct

SEQ ID NO: 2456333 - DNA, 25 bp, Homo sapien
tgcaataccaccaggcggcagcatc

SEQ ID NO: 2456334 - DNA, 25 bp, Homo sapien
atgtcccacagtcgccagccaaggc

SEQ ID NO: 2456335 - DNA, 25 bp, Homo sapien
attcatcaagctccgcctcatctgt

SEQ ID NO: 2456336 - DNA, 25 bp, Homo sapien
gcgaaggcgcggatttcctgccctc

SEQ ID NO: 2456337 - DNA, 25 bp, Homo sapien
ctggggcagcatgtcccacagtcgc

SEQ ID NO: 2456338 - DNA, 25 bp, Homo sapien
ctgaggggaaggacattgtcttcac

SEQ ID NO: 2456339 - DNA, 25 bp, Homo sapien
tgaggggaaggacattgtcttcacc

SEQ ID NO: 2456340 - DNA, 25 bp, Homo sapien
gctagaggtaacagtcaacatggtt

SEQ ID NO: 2456341 - DNA, 25 bp, Homo sapien
catggttacactttcgggggccaga

SEQ ID NO: 2456342 - DNA, 25 bp, Homo sapien
gcttttccacgattcgctagaggta

SEQ ID NO: 2456343 - DNA, 25 bp, Homo sapien
tcatgtcctgatgacggattcctgt

SEQ ID NO: 2456344 - DNA, 25 bp, Homo sapien
ctcctttctgtggagtctctcgccg

SEQ ID NO: 2456345 - DNA, 25 bp, Homo sapien
tcctttctgtggagtctctcgccgg

SEQ ID NO: 2456346 - DNA, 25 bp, Homo sapien
ctttctgtggagtctctcgccggac

SEQ ID NO: 2456347 - DNA, 25 bp, Homo sapien
cctttctgtggagtctctcgccgga

SEQ ID NO: 2456348 - DNA, 25 bp, Homo sapien
cagtagctccgttgctaggaaaggt

SEQ ID NO: 2456349 - DNA, 25 bp, Homo sapien
ctcagggatcctagacaagtcagct

SEQ ID NO: 2456350 - DNA, 25 bp, Homo sapien
aggttcaccgcgaaagagggagcca

SEQ ID NO: 2456351 - DNA, 25 bp, Homo sapien
caggtttccataccgagccagaggt

SEQ ID NO: 2456352 - DNA, 25 bp, Homo sapien
cgcgagctgcggaggtagatgtgcc

SEQ ID NO: 2456353 - DNA, 25 bp, Homo sapien
tcggattcatgttcccacgtgccct

SEQ ID NO: 2456354 - DNA, 25 bp, Homo sapien
agaggcctccatgggcgcgagctgc

SEQ ID NO: 2456355 - DNA, 25 bp, Homo sapien
cacgtgccctggtgacctgtggacc

SEQ ID NO: 2456356 - DNA, 25 bp, Homo sapien
tgccgcggcaagttgggagattcct

SEQ ID NO: 2456357 - DNA, 25 bp, Homo sapien
cacccaggtgactgagggtaggaca

SEQ ID NO: 2456358 - DNA, 25 bp, Homo sapien
gccatctgttcggatgcggaggtca

SEQ ID NO: 2456359 - DNA, 25 bp, Homo sapien
taggacagtgccacttccgaaggag

SEQ ID NO: 2456360 - DNA, 25 bp, Homo sapien
gccacgttgcacaggccgtgtgcgt

SEQ ID NO: 2456361 - DNA, 25 bp, Homo sapien
ccccggtgggccacgttgcacaggc

SEQ ID NO: 2456362 - DNA, 25 bp, Homo sapien
tgacacccccggtgggccacgttgc

SEQ ID NO: 2456363 - DNA, 25 bp, Homo sapien
tgggccacgttgcacaggccgtgtg

SEQ ID NO: 2456364 - DNA, 25 bp, Homo sapien
ttgagttttccaggccctctccgtg

SEQ ID NO: 2456365 - DNA, 25 bp, Homo sapien
gatttcagggagaaaccaccctgga

SEQ ID NO: 2456366 - DNA, 25 bp, Homo sapien
tagtgtggaactgaacctccatgat

SEQ ID NO: 2456367 - DNA, 25 bp, Homo sapien
tcgctgttgccgtgatagtctcaca

SEQ ID NO: 2456368 - DNA, 25 bp, Homo sapien
tatggggagtctccacttatggcct

SEQ ID NO: 2456369 - DNA, 25 bp, Homo sapien
aagtgaagacacggtgctgcttttc

SEQ ID NO: 2456370 - DNA, 25 bp, Homo sapien
aaagtgaagacacggtgctgctttt

SEQ ID NO: 2456371 - DNA, 25 bp, Homo sapien
caatatggggagtctccacttatgg

SEQ ID NO: 2456372 - DNA, 25 bp, Homo sapien
tccagcacagccaagtgttcttcct

SEQ ID NO: 2456373 - DNA, 25 bp, Homo sapien
cagcacagccaagtgttcttcctgg

SEQ ID NO: 2456374 - DNA, 25 bp, Homo sapien
aggaatggttctagcggagtgggct

SEQ ID NO: 2456375 - DNA, 25 bp, Homo sapien
ttctagcggagtgggctcttccacg

SEQ ID NO: 2456376 - DNA, 25 bp, Homo sapien
tggccttgaaacttcccccgtcaca

SEQ ID NO: 2456377 - DNA, 25 bp, Homo sapien
ctgggctctcctacttttgttgctc

SEQ ID NO: 2456378 - DNA, 25 bp, Homo sapien
gaaatgaacatctcttgtaaaattg

SEQ ID NO: 2456379 - DNA, 25 bp, Homo sapien
ccgtcacatccaccatctagttgtt

SEQ ID NO: 2456380 - DNA, 25 bp, Homo sapien
gaaccgcgttgacactcctttcgaa

SEQ ID NO: 2456381 - DNA, 25 bp, Homo sapien
atggactggatcaccccggactgtg

SEQ ID NO: 2456382 - DNA, 25 bp, Homo sapien
tccagagagctctgaggccgatgcc

SEQ ID NO: 2456383 - DNA, 25 bp, Homo sapien
tatgcgagaggacagatgcggcttc

SEQ ID NO: 2456384 - DNA, 25 bp, Homo sapien
gatgccttccatcgccttgggcttc

SEQ ID NO: 2456385 - DNA, 25 bp, Homo sapien
agaagctgttgcaggcacaacccct

SEQ ID NO: 2456386 - DNA, 25 bp, Homo sapien
gagctgatgccttccatcgccttgg

SEQ ID NO: 2456387 - DNA, 25 bp, Homo sapien
gctgatgccttccatcgccttgggc

SEQ ID NO: 2456388 - DNA, 25 bp, Homo sapien
ctggacctgagtcagggggtttccg

SEQ ID NO: 2456389 - DNA, 25 bp, Homo sapien
caggttccgatgattcttcttctgt

SEQ ID NO: 2456390 - DNA, 25 bp, Homo sapien
ggttccgatgattcttcttctgtag

SEQ ID NO: 2456391 - DNA, 25 bp, Homo sapien
tcccaggttccgatgattcttcttc

SEQ ID NO: 2456392 - DNA, 25 bp, Homo sapien
gcccgactccagggagactcttggg

SEQ ID NO: 2456393 - DNA, 25 bp, Homo sapien
ctgccgtcctcagctaaagtccaaa

SEQ ID NO: 2456394 - DNA, 25 bp, Homo sapien
gggcccgactccagggagactcttg

SEQ ID NO: 2456395 - DNA, 25 bp, Homo sapien
tgccgtcctcagctaaagtccaaag

SEQ ID NO: 2456396 - DNA, 25 bp, Homo sapien
cacccgtgggacaccgccgctttat

SEQ ID NO: 2456397 - DNA, 25 bp, Homo sapien
cgggcacccgtgggacaccgccgct

SEQ ID NO: 2456398 - DNA, 25 bp, Homo sapien
cgtgggacaccgccgctttatcacc

SEQ ID NO: 2456399 - DNA, 25 bp, Homo sapien
ggacaccgccgctttatcacctcct

SEQ ID NO: 2456400 - DNA, 25 bp, Homo sapien
ctgtaacccaggcacacacgctgga

SEQ ID NO: 2456401 - DNA, 25 bp, Homo sapien
ggcacacacgctggaggttataaaa

SEQ ID NO: 2456402 - DNA, 25 bp, Homo sapien
acccaggcacacacgctggaggtta

SEQ ID NO: 2456403 - DNA, 25 bp, Homo sapien
caggcacacacgctggaggttataa

SEQ ID NO: 2456404 - DNA, 25 bp, Homo sapien
gtattaaacacagtgataatgataa

SEQ ID NO: 2456405 - DNA, 25 bp, Homo sapien
aaaggtattaaacacagtgataatg

SEQ ID NO: 2456406 - DNA, 25 bp, Homo sapien
gttttttaagaatgcgcctcttgca

SEQ ID NO: 2456407 - DNA, 25 bp, Homo sapien
ttaagaatgcgcctcttgcaaaata

SEQ ID NO: 2456408 - DNA, 25 bp, Homo sapien
ttctgagttgatggaagagtccatt

SEQ ID NO: 2456409 - DNA, 25 bp, Homo sapien
acttttttgatgcagtgcatttggg

SEQ ID NO: 2456410 - DNA, 25 bp, Homo sapien
cttctgagttgatggaagagtccat

SEQ ID NO: 2456411 - DNA, 25 bp, Homo sapien
aaagagttgtgaacttttttgatgc

SEQ ID NO: 2456412 - DNA, 25 bp, Homo sapien
ctgtttgtgaaagaattggagttac

SEQ ID NO: 2456413 - DNA, 25 bp, Homo sapien
tagggaccaggactttctgtttgtg

SEQ ID NO: 2456414 - DNA, 25 bp, Homo sapien
ggaccaggactttctgtttgtgaaa

SEQ ID NO: 2456415 - DNA, 25 bp, Homo sapien
cttgtttagggaccaggactttctg

SEQ ID NO: 2456416 - DNA, 25 bp, Homo sapien
agaaaggtctcaggctgtttgtgac

SEQ ID NO: 2456417 - DNA, 25 bp, Homo sapien
taagaaaggtctcaggctgtttgtg

SEQ ID NO: 2456418 - DNA, 25 bp, Homo sapien
gaaaggtctcaggctgtttgtgaca

SEQ ID NO: 2456419 - DNA, 25 bp, Homo sapien
gtaagaaaggtctcaggctgtttgt

SEQ ID NO: 2456420 - DNA, 25 bp, Homo sapien
tttcacataatgattcaagggatac

SEQ ID NO: 2456421 - DNA, 25 bp, Homo sapien
tatttcacataatgattcaagggat

SEQ ID NO: 2456422 - DNA, 25 bp, Homo sapien
atttcacataatgattcaagggata

SEQ ID NO: 2456423 - DNA, 25 bp, Homo sapien
ctatttcacataatgattcaaggga

SEQ ID NO: 2456424 - DNA, 25 bp, Homo sapien
tttggtagtattctgatcctttgac

SEQ ID NO: 2456425 - DNA, 25 bp, Homo sapien
ttggtagtattctgatcctttgaca

SEQ ID NO: 2456426 - DNA, 25 bp, Homo sapien
aactgtgtactttgaagagactata

SEQ ID NO: 2456427 - DNA, 25 bp, Homo sapien
ttagtgcttcccatatagcaggctg

SEQ ID NO: 2456428 - DNA, 25 bp, Homo sapien
gactatatgcgttataggcctttcc

SEQ ID NO: 2456429 - DNA, 25 bp, Homo sapien
cattctgcggggaaaaccccatcta

SEQ ID NO: 2456430 - DNA, 25 bp, Homo sapien
aaaaattacagaatacagcacttat

SEQ ID NO: 2456431 - DNA, 25 bp, Homo sapien
gactggtgccgatgaccgtgtttgc

SEQ ID NO: 2456432 - DNA, 25 bp, Homo sapien
tctctgcgttatggtagcgctgcca

SEQ ID NO: 2456433 - DNA, 25 bp, Homo sapien
gaaagccttctgtagcgatccaaga

SEQ ID NO: 2456434 - DNA, 25 bp, Homo sapien
aaatgagcaacgtggccctggcgtt

SEQ ID NO: 2456435 - DNA, 25 bp, Homo sapien
cctcgcggtccctggtgtttcctgt

SEQ ID NO: 2456436 - DNA, 25 bp, Homo sapien
ctttgttcgtgtccccgggtgtgca

SEQ ID NO: 2456437 - DNA, 25 bp, Homo sapien
ccatggtcgcgttttcctggtggcc

SEQ ID NO: 2456438 - DNA, 25 bp, Homo sapien
gagggacctccctcgtgtctgtggt

SEQ ID NO: 2456439 - DNA, 25 bp, Homo sapien
ggaggccgctggtggtgagaccctg

SEQ ID NO: 2456440 - DNA, 25 bp, Homo sapien
tggtaccgcgcagggtcgccttcgt

SEQ ID NO: 2456441 - DNA, 25 bp, Homo sapien
gaaggccagtcgaccactcctggta

SEQ ID NO: 2456442 - DNA, 25 bp, Homo sapien
tgggcactgcagtccgcctgtggtt

SEQ ID NO: 2456443 - DNA, 25 bp, Homo sapien
agctgccacgcacgggtcgggtggt

SEQ ID NO: 2456444 - DNA, 25 bp, Homo sapien
ggtggtctgcctcctcgcacgttgg

SEQ ID NO: 2456445 - DNA, 25 bp, Homo sapien
cctcgcacgttggtgcgaagggttc

SEQ ID NO: 2456446 - DNA, 25 bp, Homo sapien
gccacgcacgggtcgggtggtctgc

SEQ ID NO: 2456447 - DNA, 25 bp, Homo sapien
ttctaaatctaatacatgccaaagg

SEQ ID NO: 2456448 - DNA, 25 bp, Homo sapien
atacatgccaaagggcgctgacccc

SEQ ID NO: 2456449 - DNA, 25 bp, Homo sapien
taaatctaatacatgccaaagggcg

SEQ ID NO: 2456450 - DNA, 25 bp, Homo sapien
tctaatacatgccaaagggcgctga

SEQ ID NO: 2456451 - DNA, 25 bp, Homo sapien
gcctaccacggtgaccatgggtgat

SEQ ID NO: 2456452 - DNA, 25 bp, Homo sapien
ctaccacggtgaccatgggtgatgg

SEQ ID NO: 2456453 - DNA, 25 bp, Homo sapien
ggtgaccatgggtgatggggaatca

SEQ ID NO: 2456454 - DNA, 25 bp, Homo sapien
acggtgaccatgggtgatggggaat

SEQ ID NO: 2456455 - DNA, 25 bp, Homo sapien
attcttggactggtgcagttcggac

SEQ ID NO: 2456456 - DNA, 25 bp, Homo sapien
gaatgttttcattaaccaagaacga

SEQ ID NO: 2456457 - DNA, 25 bp, Homo sapien
cgaaagtcggagtttcgaagacgat

SEQ ID NO: 2456458 - DNA, 25 bp, Homo sapien
cggagtttcgaagacgatcagatac

SEQ ID NO: 2456459 - DNA, 25 bp, Homo sapien
cattaaccaagaacgaaagtcggag

SEQ ID NO: 2456460 - DNA, 25 bp, Homo sapien
atgccaactggtgatgcagcggtgt

SEQ ID NO: 2456461 - DNA, 25 bp, Homo sapien
gcagcggtgttatttccatgacccg

SEQ ID NO: 2456462 - DNA, 25 bp, Homo sapien
ccaactggtgatgcagcggtgttat

SEQ ID NO: 2456463 - DNA, 25 bp, Homo sapien
ggtgatgcagcggtgttatttccat

SEQ ID NO: 2456464 - DNA, 25 bp, Homo sapien
attgataggtctttcttgattccat

SEQ ID NO: 2456465 - DNA, 25 bp, Homo sapien
ttgataggtctttcttgattccatg

SEQ ID NO: 2456466 - DNA, 25 bp, Homo sapien
tggggctgcacgcacgctacagtga

SEQ ID NO: 2456467 - DNA, 25 bp, Homo sapien
ggcatttagccacccgagattgaga

SEQ ID NO: 2456468 - DNA, 25 bp, Homo sapien
ttagccacccgagattgagaaataa

SEQ ID NO: 2456469 - DNA, 25 bp, Homo sapien
agggataagtggcatttagccaccc

SEQ ID NO: 2456470 - DNA, 25 bp, Homo sapien
cttcttggccgactgtgttccccat

SEQ ID NO: 2456471 - DNA, 25 bp, Homo sapien
ttggccgactgtgttccccatgcgg

SEQ ID NO: 2456472 - DNA, 25 bp, Homo sapien
gactgtgttccccatgcggcacgtg

SEQ ID NO: 2456473 - DNA, 25 bp, Homo sapien
tccccatgcggcacgtgtgctggcg

SEQ ID NO: 2456474 - DNA, 25 bp, Homo sapien
ggccaggttcgcatcgctgccactg

SEQ ID NO: 2456475 - DNA, 25 bp, Homo sapien
ccccacatgtgtgtcggcgggcgtg

SEQ ID NO: 2456476 - DNA, 25 bp, Homo sapien
tgccaccatcatcgcatctgccaca

SEQ ID NO: 2456477 - DNA, 25 bp, Homo sapien
tcacgacgagttgtgggtctctgtg

SEQ ID NO: 2456478 - DNA, 25 bp, Homo sapien
tgctgtcgcatgtgtgccacgcatg

SEQ ID NO: 2456479 - DNA, 25 bp, Homo sapien
gctgcacttgcatgtcgccgctgat

SEQ ID NO: 2456480 - DNA, 25 bp, Homo sapien
gctgtacacagtggccatcgtgctg

SEQ ID NO: 2456481 - DNA, 25 bp, Homo sapien
tgccacgcatgtggcgtatgccctg

SEQ ID NO: 2456482 - DNA, 25 bp, Homo sapien
gggtggatggtcctgtgccatcatt

SEQ ID NO: 2456483 - DNA, 25 bp, Homo sapien
catcattgtcgttgcgcatcatcgg

SEQ ID NO: 2456484 - DNA, 25 bp, Homo sapien
ttgtcgttgcgcatcatcggtggtg

SEQ ID NO: 2456485 - DNA, 25 bp, Homo sapien
ggtcctgtgccatcattgtcgttgc

SEQ ID NO: 2456486 - DNA, 25 bp, Homo sapien
gttcgtttgcccctggtgatggtcc

SEQ ID NO: 2456487 - DNA, 25 bp, Homo sapien
ggcgccccgtccagagctttgatgt

SEQ ID NO: 2456488 - DNA, 25 bp, Homo sapien
gctacagtgtcatatgccatcaggt

SEQ ID NO: 2456489 - DNA, 25 bp, Homo sapien
aagcggcccatctggcagcgttcat

SEQ ID NO: 2456490 - DNA, 25 bp, Homo sapien
tcgaatggaatttgttcgaatagaa

SEQ ID NO: 2456491 - DNA, 25 bp, Homo sapien
cgaatggaatttgttcgaatagaat

SEQ ID NO: 2456492 - DNA, 25 bp, Homo sapien
tggaatttgttcgaatagaatggaa

SEQ ID NO: 2456493 - DNA, 25 bp, Homo sapien
ctcgaatggaatttgttcgaataga

SEQ ID NO: 2456494 - DNA, 25 bp, Homo sapien
atggactcgaatgtaatgggttgca

SEQ ID NO: 2456495 - DNA, 25 bp, Homo sapien
gaatggactcgaatgtaatgggttg

SEQ ID NO: 2456496 - DNA, 25 bp, Homo sapien
aatggactcgaatgtaatgggttgc

SEQ ID NO: 2456497 - DNA, 25 bp, Homo sapien
tgtaattgattcgagtgacttggaa

SEQ ID NO: 2456498 - DNA, 25 bp, Homo sapien
caatgtaattgattcgagtgacttg

SEQ ID NO: 2456499 - DNA, 25 bp, Homo sapien
gattcgagtgacttggaatcgaatg

SEQ ID NO: 2456500 - DNA, 25 bp, Homo sapien
aattgattcgagtgacttggaatcg

SEQ ID NO: 2456501 - DNA, 25 bp, Homo sapien
gctctaggagagcatcactgagtta

SEQ ID NO: 2456502 - DNA, 25 bp, Homo sapien
tttgtccatggaaaccttagaggcc

SEQ ID NO: 2456503 - DNA, 25 bp, Homo sapien
cctagtcacagggataacattgaaa

SEQ ID NO: 2456504 - DNA, 25 bp, Homo sapien
ggcccaaagattagactcctagtca

SEQ ID NO: 2456505 - DNA, 25 bp, Homo sapien
atcaaaacctggtggcagattaact

SEQ ID NO: 2456506 - DNA, 25 bp, Homo sapien
catgtgcctggaaagcctggattct

SEQ ID NO: 2456507 - DNA, 25 bp, Homo sapien
tgtaaagacgccactgtaagccctg

SEQ ID NO: 2456508 - DNA, 25 bp, Homo sapien
cgaagaggctcgatgcaattgttac

SEQ ID NO: 2456509 - DNA, 25 bp, Homo sapien
gaagagaatacccaccagtgtgcac

SEQ ID NO: 2456510 - DNA, 25 bp, Homo sapien
gagcgggagtaacccatggcagcct

SEQ ID NO: 2456511 - DNA, 25 bp, Homo sapien
cagctgccgtgagacatggaattgg

SEQ ID NO: 2456512 - DNA, 25 bp, Homo sapien
ctctgagaagacaccatgcagcgtc

SEQ ID NO: 2456513 - DNA, 25 bp, Homo sapien
cagtttctgggtatcactttcatct

SEQ ID NO: 2456514 - DNA, 25 bp, Homo sapien
ggagatgtgggcttgtgagtcccct

SEQ ID NO: 2456515 - DNA, 25 bp, Homo sapien
cttggaccgcagtgggagatgtggg

SEQ ID NO: 2456516 - DNA, 25 bp, Homo sapien
tgggagatgtgggcttgtgagtccc

SEQ ID NO: 2456517 - DNA, 25 bp, Homo sapien
agtgggagatgtgggcttgtgagtc

SEQ ID NO: 2456518 - DNA, 25 bp, Homo sapien
ccacggatgttcagcactgctttca

SEQ ID NO: 2456519 - DNA, 25 bp, Homo sapien
gccaccatgatgctcttcccatgag

SEQ ID NO: 2456520 - DNA, 25 bp, Homo sapien
gctttcaggtacatgatagactcat

SEQ ID NO: 2456521 - DNA, 25 bp, Homo sapien
tgatagactcatgggaagtgttggt

SEQ ID NO: 2456522 - DNA, 25 bp, Homo sapien
aaggaccaggcataaccagcataga

SEQ ID NO: 2456523 - DNA, 25 bp, Homo sapien
caaaggaccaggcataaccagcata

SEQ ID NO: 2456524 - DNA, 25 bp, Homo sapien
tgacagcaaaggaccaggcataacc

SEQ ID NO: 2456525 - DNA, 25 bp, Homo sapien
agcaaaggaccaggcataaccagca

SEQ ID NO: 2456526 - DNA, 25 bp, Homo sapien
cagcaatagccaccccgtgtcagaa

SEQ ID NO: 2456527 - DNA, 25 bp, Homo sapien
ccgtgtcagaagaagatgtgcttct

SEQ ID NO: 2456528 - DNA, 25 bp, Homo sapien
aggtggaccatctcgtttttctgct

SEQ ID NO: 2456529 - DNA, 25 bp, Homo sapien
ttgtgggaggtggaccatctcgttt

SEQ ID NO: 2456530 - DNA, 25 bp, Homo sapien
gaactgcatctgtctgacgaccaag

SEQ ID NO: 2456531 - DNA, 25 bp, Homo sapien
ttctgcgcagggctaggaactgcat

SEQ ID NO: 2456532 - DNA, 25 bp, Homo sapien
taggaactgcatctgtctgacgacc

SEQ ID NO: 2456533 - DNA, 25 bp, Homo sapien
cagggctaggaactgcatctgtctg

SEQ ID NO: 2456534 - DNA, 25 bp, Homo sapien
tgggaccctttatcagtttgggtgc

SEQ ID NO: 2456535 - DNA, 25 bp, Homo sapien
aggactgggaccctttatcagtttg

SEQ ID NO: 2456536 - DNA, 25 bp, Homo sapien
cctttatcagtttgggtgcttcagc

SEQ ID NO: 2456537 - DNA, 25 bp, Homo sapien
ttatcagtttgggtgcttcagcttt

SEQ ID NO: 2456538 - DNA, 25 bp, Homo sapien
ttggtgtcaccatgtttcagctgcc

SEQ ID NO: 2456539 - DNA, 25 bp, Homo sapien
cttggtgtcaccatgtttcagctgc

SEQ ID NO: 2456540 - DNA, 25 bp, Homo sapien
tggtgtcaccatgtttcagctgccc

SEQ ID NO: 2456541 - DNA, 25 bp, Homo sapien
gctgctgcagtacttggtccttgca

SEQ ID NO: 2456542 - DNA, 25 bp, Homo sapien
cctcaagttccaagctttccttctc

SEQ ID NO: 2456543 - DNA, 25 bp, Homo sapien
caattccattaaattctgtgcggtc

SEQ ID NO: 2456544 - DNA, 25 bp, Homo sapien
tcaacctaggcggcctctgtgcagg

SEQ ID NO: 2456545 - DNA, 25 bp, Homo sapien
gcccattgaggtagaggcagacagt

SEQ ID NO: 2456546 - DNA, 25 bp, Homo sapien
gggcctgaagcatcacgtgcatatt

SEQ ID NO: 2456547 - DNA, 25 bp, Homo sapien
cggacggggcggaattccagcaact

SEQ ID NO: 2456548 - DNA, 25 bp, Homo sapien
ctatgggcgcgaactccaccagctc

SEQ ID NO: 2456549 - DNA, 25 bp, Homo sapien
ctgggacctgcccttagctgagcat

SEQ ID NO: 2456550 - DNA, 25 bp, Homo sapien
gccacccggcctatgggcgcgaact

SEQ ID NO: 2456551 - DNA, 25 bp, Homo sapien
ttgccaatatgtctccaaatgtgtg

SEQ ID NO: 2456552 - DNA, 25 bp, Homo sapien
gctccccttagtcagagttggtttc

SEQ ID NO: 2456553 - DNA, 25 bp, Homo sapien
gccaatatgtctccaaatgtgtgct

SEQ ID NO: 2456554 - DNA, 25 bp, Homo sapien
ttcctgtaagtcctgtttggctccc

SEQ ID NO: 2456555 - DNA, 25 bp, Homo sapien
aacaatgtagccaaatccacctgtg

SEQ ID NO: 2456556 - DNA, 25 bp, Homo sapien
atccacctgtgtaaagaaacaatgt

SEQ ID NO: 2456557 - DNA, 25 bp, Homo sapien
acctgtgtaaagaaacaatgtagcc

SEQ ID NO: 2456558 - DNA, 25 bp, Homo sapien
caatgtagccaaatccacctgtgta

SEQ ID NO: 2456559 - DNA, 25 bp, Homo sapien
gaacagagtcacacctaatgcaccc

SEQ ID NO: 2456560 - DNA, 25 bp, Homo sapien
tctattccagcatagaacagagtca

SEQ ID NO: 2456561 - DNA, 25 bp, Homo sapien
ccttgtgtttaatgcgttgctttca

SEQ ID NO: 2456562 - DNA, 25 bp, Homo sapien
cacccacagaacagcgccttgtgtt

SEQ ID NO: 2456563 - DNA, 25 bp, Homo sapien
tctcgatgagaaaatgtaccgctca

SEQ ID NO: 2456564 - DNA, 25 bp, Homo sapien
aaagggatacatctctcgatgagaa

SEQ ID NO: 2456565 - DNA, 25 bp, Homo sapien
catctctcgatgagaaaatgtaccg

SEQ ID NO: 2456566 - DNA, 25 bp, Homo sapien
gaaaatgtaccgctcatgatgtcac

SEQ ID NO: 2456567 - DNA, 25 bp, Homo sapien
ggaaccaacaccgatcaacaataat

SEQ ID NO: 2456568 - DNA, 25 bp, Homo sapien
taatgggatcagacactgggcactc

SEQ ID NO: 2456569 - DNA, 25 bp, Homo sapien
gggcactcaccttgtagttccagca

SEQ ID NO: 2456570 - DNA, 25 bp, Homo sapien
acagagagggcgtaaggaaccaaca

SEQ ID NO: 2456571 - DNA, 25 bp, Homo sapien
cactcttctcggagctctctaattc

SEQ ID NO: 2456572 - DNA, 25 bp, Homo sapien
cctacttcctgaattgcccgtggaa

SEQ ID NO: 2456573 - DNA, 25 bp, Homo sapien
tcttctcggagctctctaattctct

SEQ ID NO: 2456574 - DNA, 25 bp, Homo sapien
aattgcccgtggaatctcaaaattc

SEQ ID NO: 2456575 - DNA, 25 bp, Homo sapien
cctgagtggaagcagggtctaactt

SEQ ID NO: 2456576 - DNA, 25 bp, Homo sapien
ctaacttagtatgatagcgagagat

SEQ ID NO: 2456577 - DNA, 25 bp, Homo sapien
tggaagcagggtctaacttagtatg

SEQ ID NO: 2456578 - DNA, 25 bp, Homo sapien
cagggtctaacttagtatgatagcg

SEQ ID NO: 2456579 - DNA, 25 bp, Homo sapien
tgagtttctgtgcgtgagaacacac

SEQ ID NO: 2456580 - DNA, 25 bp, Homo sapien
tgtgtgagtttctgtgcgtgagaac

SEQ ID NO: 2456581 - DNA, 25 bp, Homo sapien
atgtgtgagtttctgtgcgtgagaa

SEQ ID NO: 2456582 - DNA, 25 bp, Homo sapien
tgtgagtttctgtgcgtgagaacac

SEQ ID NO: 2456583 - DNA, 25 bp, Homo sapien
ggtacagctcagtatcataatctgt

SEQ ID NO: 2456584 - DNA, 25 bp, Homo sapien
ccggtacagctcagtatcataatct

SEQ ID NO: 2456585 - DNA, 25 bp, Homo sapien
cggtacagctcagtatcataatctg

SEQ ID NO: 2456586 - DNA, 25 bp, Homo sapien
tacagctcagtatcataatctgttt

SEQ ID NO: 2456587 - DNA, 25 bp, Homo sapien
tgacatctaagtggtctctctgcat

SEQ ID NO: 2456588 - DNA, 25 bp, Homo sapien
gttgacatctaagtggtctctctgc

SEQ ID NO: 2456589 - DNA, 25 bp, Homo sapien
tgcagttgacatctaagtggtctct

SEQ ID NO: 2456590 - DNA, 25 bp, Homo sapien
tttttgcagttgacatctaagtggt

SEQ ID NO: 2456591 - DNA, 25 bp, Homo sapien
gcctgcatgtgggacgcagttttat

SEQ ID NO: 2456592 - DNA, 25 bp, Homo sapien
ggggccagaccacattgtaggacat

SEQ ID NO: 2456593 - DNA, 25 bp, Homo sapien
agagctgggcttgctactggagcca

SEQ ID NO: 2456594 - DNA, 25 bp, Homo sapien
cacaaaggacgaggtagacattctg

SEQ ID NO: 2456595 - DNA, 25 bp, Homo sapien
cacttgctagagaaacagtcgctgt

SEQ ID NO: 2456596 - DNA, 25 bp, Homo sapien
catgttcagcggatcatggctgtct

SEQ ID NO: 2456597 - DNA, 25 bp, Homo sapien
tcttcttcccttttcccttgtctca

SEQ ID NO: 2456598 - DNA, 25 bp, Homo sapien
ttcttcccttttcccttgtctcaca

SEQ ID NO: 2456599 - DNA, 25 bp, Homo sapien
cattgctgtcttcttcccttttccc

SEQ ID NO: 2456600 - DNA, 25 bp, Homo sapien
ttcccttttcccttgtctcacacat

SEQ ID NO: 2456601 - DNA, 25 bp, Homo sapien
aggccagccacgagacacctgagaa

SEQ ID NO: 2456602 - DNA, 25 bp, Homo sapien
ccagccacgagacacctgagaaaca

SEQ ID NO: 2456603 - DNA, 25 bp, Homo sapien
ctgagaaacatagcagaagctgcag

SEQ ID NO: 2456604 - DNA, 25 bp, Homo sapien
ggccagccacgagacacctgagaaa

SEQ ID NO: 2456605 - DNA, 25 bp, Homo sapien
cactcttcctgattcatggtgaagg

SEQ ID NO: 2456606 - DNA, 25 bp, Homo sapien
gtaaatgagcatagtaaaggatgat

SEQ ID NO: 2456607 - DNA, 25 bp, Homo sapien
cttcctgattcatggtgaaggcctc

SEQ ID NO: 2456608 - DNA, 25 bp, Homo sapien
agtaaaggatgatgccagctagggt

SEQ ID NO: 2456609 - DNA, 25 bp, Homo sapien
caggtccttagtctttgtgtagaga

SEQ ID NO: 2456610 - DNA, 25 bp, Homo sapien
aggtccttagtctttgtgtagagac

SEQ ID NO: 2456611 - DNA, 25 bp, Homo sapien
gtattccatcagatcattgcagcca

SEQ ID NO: 2456612 - DNA, 25 bp, Homo sapien
ctggaggtgcttatggtacttgtgt

SEQ ID NO: 2456613 - DNA, 25 bp, Homo sapien
gcttatggtacttgtgtttctccag

SEQ ID NO: 2456614 - DNA, 25 bp, Homo sapien
cattgagccagtagtagaactcggg

SEQ ID NO: 2456615 - DNA, 25 bp, Homo sapien
gggccagtgagcaggtgagctcaaa

SEQ ID NO: 2456616 - DNA, 25 bp, Homo sapien
ccagtgagcaggtgagctcaaactg

SEQ ID NO: 2456617 - DNA, 25 bp, Homo sapien
agtgagcaggtgagctcaaactgga

SEQ ID NO: 2456618 - DNA, 25 bp, Homo sapien
ggccagtgagcaggtgagctcaaac

SEQ ID NO: 2456619 - DNA, 25 bp, Homo sapien
ttcccatgatgccataggatacgta

SEQ ID NO: 2456620 - DNA, 25 bp, Homo sapien
ctgatcgttctcctttcccatgatg

SEQ ID NO: 2456621 - DNA, 25 bp, Homo sapien
cctttcccatgatgccataggatac

SEQ ID NO: 2456622 - DNA, 25 bp, Homo sapien
tcccatgatgccataggatacgtac

SEQ ID NO: 2456623 - DNA, 25 bp, Homo sapien
ttgtgggcgatgcagagcctagcca

SEQ ID NO: 2456624 - DNA, 25 bp, Homo sapien
gcagagcctagccagagaggtgccc

SEQ ID NO: 2456625 - DNA, 25 bp, Homo sapien
gcgatgcagagcctagccagagagg

SEQ ID NO: 2456626 - DNA, 25 bp, Homo sapien
tagtagtcctcatacagggcgctgg

SEQ ID NO: 2456627 - DNA, 25 bp, Homo sapien
ccacacaagcatgcaggaggtgtcc

SEQ ID NO: 2456628 - DNA, 25 bp, Homo sapien
aggtaggcaatgacaacatgtcctt

SEQ ID NO: 2456629 - DNA, 25 bp, Homo sapien
tgtgggccagaaccatggatccttt

SEQ ID NO: 2456630 - DNA, 25 bp, Homo sapien
taggcaatgacaacatgtccttgtt

SEQ ID NO: 2456631 - DNA, 25 bp, Homo sapien
tcatttcaagcaagaagacgttctc

SEQ ID NO: 2456632 - DNA, 25 bp, Homo sapien
agagccctgggtccttgcactatta

SEQ ID NO: 2456633 - DNA, 25 bp, Homo sapien
tgcactattatctggaattgtttct

SEQ ID NO: 2456634 - DNA, 25 bp, Homo sapien
cgaggactgtgtcattgggtgttta

SEQ ID NO: 2456635 - DNA, 25 bp, Homo sapien
catcttgattctcatatccagtgtg

SEQ ID NO: 2456636 - DNA, 25 bp, Homo sapien
atcttgattctcatatccagtgtgt

SEQ ID NO: 2456637 - DNA, 25 bp, Homo sapien
tgattctcatatccagtgtgtctat

SEQ ID NO: 2456638 - DNA, 25 bp, Homo sapien
cacagagatagttgaaacaacataa

SEQ ID NO: 2456639 - DNA, 25 bp, Homo sapien
cagagatagttgaaacaacataaat

SEQ ID NO: 2456640 - DNA, 25 bp, Homo sapien
tagttgaaacaacataaatcaaagt

SEQ ID NO: 2456641 - DNA, 25 bp, Homo sapien
gagatagttgaaacaacataaatca

SEQ ID NO: 2456642 - DNA, 25 bp, Homo sapien
ccaagctgggtcaggctcgttcact

SEQ ID NO: 2456643 - DNA, 25 bp, Homo sapien
agaaggctgtgtctgtgagttccac

SEQ ID NO: 2456644 - DNA, 25 bp, Homo sapien
ttcttggtgctgctggtccgggtaa

SEQ ID NO: 2456645 - DNA, 25 bp, Homo sapien
cacagtagtagataaacagctttca

SEQ ID NO: 2456646 - DNA, 25 bp, Homo sapien
cctgggctgcaagtttccctatctc

SEQ ID NO: 2456647 - DNA, 25 bp, Homo sapien
agggatgatggctccccagtggtaa

SEQ ID NO: 2456648 - DNA, 25 bp, Homo sapien
tctgctgttggtcaaaggcttgcaa

SEQ ID NO: 2456649 - DNA, 25 bp, Homo sapien
aagatcttatgactgaggcagaggg

SEQ ID NO: 2456650 - DNA, 25 bp, Homo sapien
tgcttaggcgttctccaagcgcgga

SEQ ID NO: 2456651 - DNA, 25 bp, Homo sapien
gaaacgttgccagcgctgcttaggc

SEQ ID NO: 2456652 - DNA, 25 bp, Homo sapien
aggaaacgctgtctgacccggagaa

SEQ ID NO: 2456653 - DNA, 25 bp, Homo sapien
ggtcccgggacttctctctgacata

SEQ ID NO: 2456654 - DNA, 25 bp, Homo sapien
agtgggtgaggcatacgcacccggg

SEQ ID NO: 2456655 - DNA, 25 bp, Homo sapien
gagtgggtgaggcatacgcacccgg

SEQ ID NO: 2456656 - DNA, 25 bp, Homo sapien
gtgggtgaggcatacgcacccgggc

SEQ ID NO: 2456657 - DNA, 25 bp, Homo sapien
ggagtgggtgaggcatacgcacccg

SEQ ID NO: 2456658 - DNA, 25 bp, Homo sapien
tccgccttccaggaaagcgcgtagt

SEQ ID NO: 2456659 - DNA, 25 bp, Homo sapien
cgccttccaggaaagcgcgtagttc

SEQ ID NO: 2456660 - DNA, 25 bp, Homo sapien
catccgccttccaggaaagcgcgta

SEQ ID NO: 2456661 - DNA, 25 bp, Homo sapien
ccttccaggaaagcgcgtagttcac

SEQ ID NO: 2456662 - DNA, 25 bp, Homo sapien
gacgcaacccaacgtactctggaag

SEQ ID NO: 2456663 - DNA, 25 bp, Homo sapien
gtcagtttgttccagccctcagagg

SEQ ID NO: 2456664 - DNA, 25 bp, Homo sapien
tctgacgagagagaaaagtccgagg

SEQ ID NO: 2456665 - DNA, 25 bp, Homo sapien
gcaaagctaccagtgcaccatcagt

SEQ ID NO: 2456666 - DNA, 25 bp, Homo sapien
tacctcaggtatccgagaatcaggc

SEQ ID NO: 2456667 - DNA, 25 bp, Homo sapien
gcgaggtccactgcacgttccgatc

SEQ ID NO: 2456668 - DNA, 25 bp, Homo sapien
catctcttcgttgttctacctcagg

SEQ ID NO: 2456669 - DNA, 25 bp, Homo sapien
ttgtgcctgctacgtccccagcgag

SEQ ID NO: 2456670 - DNA, 25 bp, Homo sapien
gatcgacgcgcttttcaggtaggca

SEQ ID NO: 2456671 - DNA, 25 bp, Homo sapien
tcctcgcagaggacggacgtcaggt

SEQ ID NO: 2456672 - DNA, 25 bp, Homo sapien
tggtggccccaacgaatataagtcc

SEQ ID NO: 2456673 - DNA, 25 bp, Homo sapien
cgtggcttcctgtaaatcgctgggc

SEQ ID NO: 2456674 - DNA, 25 bp, Homo sapien
ttacttgtgctggatatcaacagag

SEQ ID NO: 2456675 - DNA, 25 bp, Homo sapien
tacttgtgctggatatcaacagagc

SEQ ID NO: 2456676 - DNA, 25 bp, Homo sapien
tctccaaagtccgatacctgcccca

SEQ ID NO: 2456677 - DNA, 25 bp, Homo sapien
tcttctccaaagtccgatacctgcc

SEQ ID NO: 2456678 - DNA, 25 bp, Homo sapien
acaagtcacctgataggagctctgc

SEQ ID NO: 2456679 - DNA, 25 bp, Homo sapien
caaagtccgatacctgccccattgc

SEQ ID NO: 2456680 - DNA, 25 bp, Homo sapien
caggaagtagatcaggaaaacgggt

SEQ ID NO: 2456681 - DNA, 25 bp, Homo sapien
agtagatcaggaaaacgggtgccag

SEQ ID NO: 2456682 - DNA, 25 bp, Homo sapien
ggatatacaggaagtagatcaggaa

SEQ ID NO: 2456683 - DNA, 25 bp, Homo sapien
tatacaggaagtagatcaggaaaac

SEQ ID NO: 2456684 - DNA, 25 bp, Homo sapien
tttggcttccaaataggaatccagc

SEQ ID NO: 2456685 - DNA, 25 bp, Homo sapien
tccagcacggctgaacccagcagag

SEQ ID NO: 2456686 - DNA, 25 bp, Homo sapien
tccaaataggaatccagcacggctg

SEQ ID NO: 2456687 - DNA, 25 bp, Homo sapien
gagcccaactgagctgtagttgacc

SEQ ID NO: 2456688 - DNA, 25 bp, Homo sapien
cagaacaagcctcatgaagttaatc

SEQ ID NO: 2456689 - DNA, 25 bp, Homo sapien
ttatgaacaatcagaacaagcctca

SEQ ID NO: 2456690 - DNA, 25 bp, Homo sapien
tcatttgctatgatgatgggtccag

SEQ ID NO: 2456691 - DNA, 25 bp, Homo sapien
gtcatttgctatgatgatgggtcca

SEQ ID NO: 2456692 - DNA, 25 bp, Homo sapien
cataaggatgcatctcggggaccct

SEQ ID NO: 2456693 - DNA, 25 bp, Homo sapien
cctggaggtactcagccataaggat

SEQ ID NO: 2456694 - DNA, 25 bp, Homo sapien
ccagggggaaagagtggcaatgaca

SEQ ID NO: 2456695 - DNA, 25 bp, Homo sapien
atgacaagttggcactggctaggag

SEQ ID NO: 2456696 - DNA, 25 bp, Homo sapien
tcttgtacacttcggcaagccatcc

SEQ ID NO: 2456697 - DNA, 25 bp, Homo sapien
tcatgtcttgtacacttcggcaagc

SEQ ID NO: 2456698 - DNA, 25 bp, Homo sapien
atttgcttattactaaactctccag

SEQ ID NO: 2456699 - DNA, 25 bp, Homo sapien
tacttttgctattcatgactatgat

SEQ ID NO: 2456700 - DNA, 25 bp, Homo sapien
gcttattactaaactctccaggtcc

SEQ ID NO: 2456701 - DNA, 25 bp, Homo sapien
tattactaaactctccaggtccagt

SEQ ID NO: 2456702 - DNA, 25 bp, Homo sapien
cagctgaagtactgcaacagagact

SEQ ID NO: 2456703 - DNA, 25 bp, Homo sapien
cagtaatactgcgttggcaagtcaa

SEQ ID NO: 2456704 - DNA, 25 bp, Homo sapien
tgttggtgagctcatcatcaaagcc

SEQ ID NO: 2456705 - DNA, 25 bp, Homo sapien
agccacttgatagaagcctccagca

SEQ ID NO: 2456706 - DNA, 25 bp, Homo sapien
ggcctccagcaatcccctgactctg

SEQ ID NO: 2456707 - DNA, 25 bp, Homo sapien
ataaacactattttgatatctttca

SEQ ID NO: 2456708 - DNA, 25 bp, Homo sapien
tggcctcccagaatactaggaccac

SEQ ID NO: 2456709 - DNA, 25 bp, Homo sapien
cctccagcaatcccctgactctggc

SEQ ID NO: 2456710 - DNA, 25 bp, Homo sapien
ggtattaagggctttgaggcgtaca

SEQ ID NO: 2456711 - DNA, 25 bp, Homo sapien
caatgaggtattaagggctttgagg

SEQ ID NO: 2456712 - DNA, 25 bp, Homo sapien
tttgaggcgtacagaacagaaagcc

SEQ ID NO: 2456713 - DNA, 25 bp, Homo sapien
taagggctttgaggcgtacagaaca

SEQ ID NO: 2456714 - DNA, 25 bp, Homo sapien
aggatgatgtagtcatctttgtcca

SEQ ID NO: 2456715 - DNA, 25 bp, Homo sapien
ggatctttgcttctgggttgaaaat

SEQ ID NO: 2456716 - DNA, 25 bp, Homo sapien
aatctttgatttatgggttaggatg

SEQ ID NO: 2456717 - DNA, 25 bp, Homo sapien
tctgggttgaaaatctttgatttat

SEQ ID NO: 2456718 - DNA, 25 bp, Homo sapien
tttttacaatttgtgaacactcatc

SEQ ID NO: 2456719 - DNA, 25 bp, Homo sapien
catgtttcatggaagtttttacaat

SEQ ID NO: 2456720 - DNA, 25 bp, Homo sapien
ttcatggaagtttttacaatttgtg

SEQ ID NO: 2456721 - DNA, 25 bp, Homo sapien
cctgttcatgtttcatggaagtttt

SEQ ID NO: 2456722 - DNA, 25 bp, Homo sapien
ttgatctgctgaatcctgttcctcc

SEQ ID NO: 2456723 - DNA, 25 bp, Homo sapien
tgctggcttcagactatcacagatg

SEQ ID NO: 2456724 - DNA, 25 bp, Homo sapien
tccttggaagctactggagtctgca

SEQ ID NO: 2456725 - DNA, 25 bp, Homo sapien
tggagtctgcataaacacccctaag

SEQ ID NO: 2456726 - DNA, 25 bp, Homo sapien
gttcctgccctgtgtagaacacatg

SEQ ID NO: 2456727 - DNA, 25 bp, Homo sapien
ccctgtgtagaacacatgtcctgtg

SEQ ID NO: 2456728 - DNA, 25 bp, Homo sapien
gaacacatgtcctgtgtctcccctt

SEQ ID NO: 2456729 - DNA, 25 bp, Homo sapien
ttcccctgtggaatatacactttct

SEQ ID NO: 2456730 - DNA, 25 bp, Homo sapien
gtgaaggacacacttcctgttaccc

SEQ ID NO: 2456731 - DNA, 25 bp, Homo sapien
tgtgaaggacacacttcctgttacc

SEQ ID NO: 2456732 - DNA, 25 bp, Homo sapien
ctgtgaaggacacacttcctgttac

SEQ ID NO: 2456733 - DNA, 25 bp, Homo sapien
tgaaggacacacttcctgttaccct

SEQ ID NO: 2456734 - DNA, 25 bp, Homo sapien
tctgtgcaggatactcttcctgtgc

SEQ ID NO: 2456735 - DNA, 25 bp, Homo sapien
ctgtgcaggatactcttcctgtgcc

SEQ ID NO: 2456736 - DNA, 25 bp, Homo sapien
tttctgcttatcctttgtgcaggac

SEQ ID NO: 2456737 - DNA, 25 bp, Homo sapien
gttcttcaactctgcaggacacact

SEQ ID NO: 2456738 - DNA, 25 bp, Homo sapien
atatttcctgttactctcttgagac

SEQ ID NO: 2456739 - DNA, 25 bp, Homo sapien
gtgcataaaatatttcctgttactc

SEQ ID NO: 2456740 - DNA, 25 bp, Homo sapien
tatcctgtgcataaaatatttcctg

SEQ ID NO: 2456741 - DNA, 25 bp, Homo sapien
tacttgttactctccttagagagac

SEQ ID NO: 2456742 - DNA, 25 bp, Homo sapien
tgcaggacacactacttgttactct

SEQ ID NO: 2456743 - DNA, 25 bp, Homo sapien
cttttactcccctgagacagaaaca

SEQ ID NO: 2456744 - DNA, 25 bp, Homo sapien
gtgctggactcacttccttttactc

SEQ ID NO: 2456745 - DNA, 25 bp, Homo sapien
gtgaagaacacacttctggtttctc

SEQ ID NO: 2456746 - DNA, 25 bp, Homo sapien
tgtgtctcccttgtacaggacaact

SEQ ID NO: 2456747 - DNA, 25 bp, Homo sapien
aacttcatgtttatcctctgtgcag

SEQ ID NO: 2456748 - DNA, 25 bp, Homo sapien
taatctcctaagacagacacactac

SEQ ID NO: 2456749 - DNA, 25 bp, Homo sapien
tattttttccattggtgtagatgtg

SEQ ID NO: 2456750 - DNA, 25 bp, Homo sapien
aaaaattgtatttcgtgtgctgctc

SEQ ID NO: 2456751 - DNA, 25 bp, Homo sapien
cattggtgtagatgtggacctggaa

SEQ ID NO: 2456752 - DNA, 25 bp, Homo sapien
atgtggacctggaactctcctcctt

SEQ ID NO: 2456753 - DNA, 25 bp, Homo sapien
ctgaagcattaaaggtgtctggtga

SEQ ID NO: 2456754 - DNA, 25 bp, Homo sapien
tgaagcattaaaggtgtctggtgag

SEQ ID NO: 2456755 - DNA, 25 bp, Homo sapien
ttggtcccataaggcaggaaccatt

SEQ ID NO: 2456756 - DNA, 25 bp, Homo sapien
tggcatcaaattctgtcttggtttc

SEQ ID NO: 2456757 - DNA, 25 bp, Homo sapien
ggcatcaaattctgtcttggtttca

SEQ ID NO: 2456758 - DNA, 25 bp, Homo sapien
gcatcaaattctgtcttggtttcat

SEQ ID NO: 2456759 - DNA, 25 bp, Homo sapien
ttacagcttgcctgacttgtcctct

SEQ ID NO: 2456760 - DNA, 25 bp, Homo sapien
ggcataataaaattgtcccatgaaa

SEQ ID NO: 2456761 - DNA, 25 bp, Homo sapien
attgtcccatgaaattcctcccctc

SEQ ID NO: 2456762 - DNA, 25 bp, Homo sapien
acagcttgcctgacttgtcctcttc

SEQ ID NO: 2456763 - DNA, 25 bp, Homo sapien
cctggtactaatgaagtaggaaata

SEQ ID NO: 2456764 - DNA, 25 bp, Homo sapien
aacacttctcctggtactaatgaag

SEQ ID NO: 2456765 - DNA, 25 bp, Homo sapien
tatttctactgccaaacacttctcc

SEQ ID NO: 2456766 - DNA, 25 bp, Homo sapien
ctctatttctactgccaaacacttc

SEQ ID NO: 2456767 - DNA, 25 bp, Homo sapien
tgtgctgagtcagtcgcacgccttc

SEQ ID NO: 2456768 - DNA, 25 bp, Homo sapien
tgagtcagtcgcacgccttccctgg

SEQ ID NO: 2456769 - DNA, 25 bp, Homo sapien
gagatgtgctgagtcagtcgcacgc

SEQ ID NO: 2456770 - DNA, 25 bp, Homo sapien
gcagagatgtgctgagtcagtcgca

SEQ ID NO: 2456771 - DNA, 25 bp, Homo sapien
tcaggataatattaggcttgttgtc

SEQ ID NO: 2456772 - DNA, 25 bp, Homo sapien
caggataatattaggcttgttgtca

SEQ ID NO: 2456773 - DNA, 25 bp, Homo sapien
atcaggataatattaggcttgttgt

SEQ ID NO: 2456774 - DNA, 25 bp, Homo sapien
tcttcaggtaaaagtacttggagag

SEQ ID NO: 2456775 - DNA, 25 bp, Homo sapien
ttcaggtaaaagtacttggagagga

SEQ ID NO: 2456776 - DNA, 25 bp, Homo sapien
cttcaggtaaaagtacttggagagg

SEQ ID NO: 2456777 - DNA, 25 bp, Homo sapien
gatgaccaagtgtcctagtaatgtc

SEQ ID NO: 2456778 - DNA, 25 bp, Homo sapien
gaccaagtgtcctagtaatgtcaga

SEQ ID NO: 2456779 - DNA, 25 bp, Homo sapien
caagtgtcctagtaatgtcagagtt

SEQ ID NO: 2456780 - DNA, 25 bp, Homo sapien
agatgaccaagtgtcctagtaatgt

SEQ ID NO: 2456781 - DNA, 25 bp, Homo sapien
cagtgtcagtcgtggctattaaaaa

SEQ ID NO: 2456782 - DNA, 25 bp, Homo sapien
tcacagacaacaagcttaatgtatc

SEQ ID NO: 2456783 - DNA, 25 bp, Homo sapien
tcaataaagtgtcacagacaacaag

SEQ ID NO: 2456784 - DNA, 25 bp, Homo sapien
agcagagaggatcagtgtcagtcgt

SEQ ID NO: 2456785 - DNA, 25 bp, Homo sapien
ttttccatccacatcttggccacag

SEQ ID NO: 2456786 - DNA, 25 bp, Homo sapien
agggtcctcttgccccaagcttagg

SEQ ID NO: 2456787 - DNA, 25 bp, Homo sapien
cctcttgccccaagcttaggcacat

SEQ ID NO: 2456788 - DNA, 25 bp, Homo sapien
ggccacagggctcttctacagggtc

SEQ ID NO: 2456789 - DNA, 25 bp, Homo sapien
tcaatccacgcatttcccattaagg

SEQ ID NO: 2456790 - DNA, 25 bp, Homo sapien
ttcccattaaggctctgaaacttgt

SEQ ID NO: 2456791 - DNA, 25 bp, Homo sapien
gttttcttcaatccacgcatttccc

SEQ ID NO: 2456792 - DNA, 25 bp, Homo sapien
acgcatttcccattaaggctctgaa

SEQ ID NO: 2456793 - DNA, 25 bp, Homo sapien
caaaatattgccgtgagttttggaa

SEQ ID NO: 2456794 - DNA, 25 bp, Homo sapien
gaaggaagtgtttgcccccatcaac

SEQ ID NO: 2456795 - DNA, 25 bp, Homo sapien
catcaacgcattgccagctctctgg

SEQ ID NO: 2456796 - DNA, 25 bp, Homo sapien
aaatctcttctcagacatcttccag

SEQ ID NO: 2456797 - DNA, 25 bp, Homo sapien
cttcccatgtgggaacgtcgctgat

SEQ ID NO: 2456798 - DNA, 25 bp, Homo sapien
gggaacgtcgctgatgaagactctg

SEQ ID NO: 2456799 - DNA, 25 bp, Homo sapien
acagtcctctgaatatgtggctttt

SEQ ID NO: 2456800 - DNA, 25 bp, Homo sapien
aggttaatggtaggaggcttcccat

SEQ ID NO: 2456801 - DNA, 25 bp, Homo sapien
ggcagctactgcgatccttatagaa

SEQ ID NO: 2456802 - DNA, 25 bp, Homo sapien
gaagataatattccgggtgccacac

SEQ ID NO: 2456803 - DNA, 25 bp, Homo sapien
gaagatgccaacaagctagccctag

SEQ ID NO: 2456804 - DNA, 25 bp, Homo sapien
ggctgtcccactctagaatgctaaa

SEQ ID NO: 2456805 - DNA, 25 bp, Homo sapien
gaaggtggctgtcattcattgcaaa

SEQ ID NO: 2456806 - DNA, 25 bp, Homo sapien
tttttgcaaccctacacgaccatgg

SEQ ID NO: 2456807 - DNA, 25 bp, Homo sapien
caacagataggcagaccaagaggct

SEQ ID NO: 2456808 - DNA, 25 bp, Homo sapien
cattgcaaagggcactaaatcagga

SEQ ID NO: 2456809 - DNA, 25 bp, Homo sapien
cacctgatgggacaaaaggataaga

SEQ ID NO: 2456810 - DNA, 25 bp, Homo sapien
tgactgcagctgaacaacacctgat

SEQ ID NO: 2456811 - DNA, 25 bp, Homo sapien
tctgaagatctaccatgaatcacag

SEQ ID NO: 2456812 - DNA, 25 bp, Homo sapien
aaagatcaacccatgactgcagctg

SEQ ID NO: 2456813 - DNA, 25 bp, Homo sapien
gaacactcgtttgcgccaaactgcg

SEQ ID NO: 2456814 - DNA, 25 bp, Homo sapien
cagagatgctccacggcttattctc

SEQ ID NO: 2456815 - DNA, 25 bp, Homo sapien
tattctcaacagaacactcgtttgc

SEQ ID NO: 2456816 - DNA, 25 bp, Homo sapien
gccaaactgcgtcttttcaaactgc

SEQ ID NO: 2456817 - DNA, 25 bp, Homo sapien
tgatgtctcgctttgctactcaggc

SEQ ID NO: 2456818 - DNA, 25 bp, Homo sapien
tgatgcccgggcaggtctctaagtc

SEQ ID NO: 2456819 - DNA, 25 bp, Homo sapien
tcactcaggccgtagtgaaactgca

SEQ ID NO: 2456820 - DNA, 25 bp, Homo sapien
aatgagccacaatgcgcagcctaat

SEQ ID NO: 2456821 - DNA, 25 bp, Homo sapien
ctgaccactggtttggtagacgtgg

SEQ ID NO: 2456822 - DNA, 25 bp, Homo sapien
aggaaactgaccactggtttggtag

SEQ ID NO: 2456823 - DNA, 25 bp, Homo sapien
agacgtgggcgtggctttgagattc

SEQ ID NO: 2456824 - DNA, 25 bp, Homo sapien
gattcccccatgctgcgatgtgggg

SEQ ID NO: 2456825 - DNA, 25 bp, Homo sapien
cacttgaatgccctgaacctacttt

SEQ ID NO: 2456826 - DNA, 25 bp, Homo sapien
tgaatgccctgaacctactttttcc

SEQ ID NO: 2456827 - DNA, 25 bp, Homo sapien
ttgaaccacttgaatgccctgaacc

SEQ ID NO: 2456828 - DNA, 25 bp, Homo sapien
ttacaggcgtgcatcccctcgccag

SEQ ID NO: 2456829 - DNA, 25 bp, Homo sapien
tgtccacactcttgaccttgatggc

SEQ ID NO: 2456830 - DNA, 25 bp, Homo sapien
tttgaagccaaagtccccaatggag

SEQ ID NO: 2456831 - DNA, 25 bp, Homo sapien
agatcttcagcatccactggggaga

SEQ ID NO: 2456832 - DNA, 25 bp, Homo sapien
gttcctggcccatagagtcgccttt

SEQ ID NO: 2456833 - DNA, 25 bp, Homo sapien
gatgatatcttgcaccttttggaga

SEQ ID NO: 2456834 - DNA, 25 bp, Homo sapien
gagaaaaagggttctgccaatccag

SEQ ID NO: 2456835 - DNA, 25 bp, Homo sapien
ccagtaattagggtagttagtcata

SEQ ID NO: 2456836 - DNA, 25 bp, Homo sapien
gattgggatgagctctcagtccaag

SEQ ID NO: 2456837 - DNA, 25 bp, Homo sapien
ccagcaagccgccttgaaatgccta

SEQ ID NO: 2456838 - DNA, 25 bp, Homo sapien
cagcaagccgccttgaaatgcctac

SEQ ID NO: 2456839 - DNA, 25 bp, Homo sapien
cccagcaagccgccttgaaatgcct

SEQ ID NO: 2456840 - DNA, 25 bp, Homo sapien
tctgaagacgtgtgaacctaaaact

SEQ ID NO: 2456841 - DNA, 25 bp, Homo sapien
tcctgtgccaaattgtagatagtca

SEQ ID NO: 2456842 - DNA, 25 bp, Homo sapien
ccggtgctactgtttttatgcttgc

SEQ ID NO: 2456843 - DNA, 25 bp, Homo sapien
tccagggaatctttgccggtgctac

SEQ ID NO: 2456844 - DNA, 25 bp, Homo sapien
atctaggcattggggatctcggttg

SEQ ID NO: 2456845 - DNA, 25 bp, Homo sapien
gatctaggcattggggatctcggtt

SEQ ID NO: 2456846 - DNA, 25 bp, Homo sapien
tgatctaggcattggggatctcggt

SEQ ID NO: 2456847 - DNA, 25 bp, Homo sapien
cagagcgcttgagtggtgctcacat

SEQ ID NO: 2456848 - DNA, 25 bp, Homo sapien
gcgcttgagtggtgctcacatgctt

SEQ ID NO: 2456849 - DNA, 25 bp, Homo sapien
cgcttgagtggtgctcacatgcttt

SEQ ID NO: 2456850 - DNA, 25 bp, Homo sapien
gagcgcttgagtggtgctcacatgc

SEQ ID NO: 2456851 - DNA, 25 bp, Homo sapien
agcgaagggagatggggatggggcc

SEQ ID NO: 2456852 - DNA, 25 bp, Homo sapien
gcgaagggagatggggatggggcca

SEQ ID NO: 2456853 - DNA, 25 bp, Homo sapien
aagtcctgagctcaatcaatcttac

SEQ ID NO: 2456854 - DNA, 25 bp, Homo sapien
tttgtatgttttgcatgttttgcca

SEQ ID NO: 2456855 - DNA, 25 bp, Homo sapien
gagctcaatcaatcttactgcctcg

SEQ ID NO: 2456856 - DNA, 25 bp, Homo sapien
gccttgccctcccagtctcaggcga

SEQ ID NO: 2456857 - DNA, 25 bp, Homo sapien
caggacaggtacgtggcaataaggc

SEQ ID NO: 2456858 - DNA, 25 bp, Homo sapien
tacgtggcaataaggctgcgtgttc

SEQ ID NO: 2456859 - DNA, 25 bp, Homo sapien
aggcggcaaggtgccccaggacagg

SEQ ID NO: 2456860 - DNA, 25 bp, Homo sapien
gtgccccaggacaggtacgtggcaa

SEQ ID NO: 2456861 - DNA, 25 bp, Homo sapien
gagcacacatgattagcagacagat

SEQ ID NO: 2456862 - DNA, 25 bp, Homo sapien
gcagacagatagaggtagacagatg

SEQ ID NO: 2456863 - DNA, 25 bp, Homo sapien
tagacagatgattagataggtacat

SEQ ID NO: 2456864 - DNA, 25 bp, Homo sapien
catgattagcagacagatagaggta

SEQ ID NO: 2456865 - DNA, 25 bp, Homo sapien
tatagaaaggtagtagatcaacgct

SEQ ID NO: 2456866 - DNA, 25 bp, Homo sapien
cccaattgtgccgtttaaaatatct

SEQ ID NO: 2456867 - DNA, 25 bp, Homo sapien
cagataatagggagacacagcatag

SEQ ID NO: 2456868 - DNA, 25 bp, Homo sapien
tgatggataggtaaacaagagacag

SEQ ID NO: 2456869 - DNA, 25 bp, Homo sapien
ccgcagtgtcgaagcattggcagac

SEQ ID NO: 2456870 - DNA, 25 bp, Homo sapien
aagcaacatcttgtggaagctgtgg

SEQ ID NO: 2456871 - DNA, 25 bp, Homo sapien
tccaagcacctgtaccacgccatga

SEQ ID NO: 2456872 - DNA, 25 bp, Homo sapien
agttttccacaagcaacatcttgtg

SEQ ID NO: 2456873 - DNA, 25 bp, Homo sapien
taggttttgtcccatcagggtacat

SEQ ID NO: 2456874 - DNA, 25 bp, Homo sapien
agacttcttggttttagctttcaag

SEQ ID NO: 2456875 - DNA, 25 bp, Homo sapien
aaaggaagatccaccaatgcgcctg

SEQ ID NO: 2456876 - DNA, 25 bp, Homo sapien
gagttcctcattggaatcggacaag

SEQ ID NO: 2456877 - DNA, 25 bp, Homo sapien
tgtgagccctgacggtgccgctgca

SEQ ID NO: 2456878 - DNA, 25 bp, Homo sapien
tcaagactgctgtgagccctgacgg

SEQ ID NO: 2456879 - DNA, 25 bp, Homo sapien
agactgctgtgagccctgacggtgc

SEQ ID NO: 2456880 - DNA, 25 bp, Homo sapien
gcatggtcgtgcaagtctgtcatcc

SEQ ID NO: 2456881 - DNA, 25 bp, Homo sapien
ctccccgccccacgactggctccag

SEQ ID NO: 2456882 - DNA, 25 bp, Homo sapien
tccccgccccacgactggctccagt

SEQ ID NO: 2456883 - DNA, 25 bp, Homo sapien
agttattgtcaaatagaaggtttct

SEQ ID NO: 2456884 - DNA, 25 bp, Homo sapien
ttattgtcaaatagaaggtttctat

SEQ ID NO: 2456885 - DNA, 25 bp, Homo sapien
gttattgtcaaatagaaggtttcta

SEQ ID NO: 2456886 - DNA, 25 bp, Homo sapien
tattgtcaaatagaaggtttctatt

SEQ ID NO: 2456887 - DNA, 25 bp, Homo sapien
ttcttcaatacttccagtgttatta

SEQ ID NO: 2456888 - DNA, 25 bp, Homo sapien
ggatcaagcgcttcttcaatacttc

SEQ ID NO: 2456889 - DNA, 25 bp, Homo sapien
ctagaaggatcaagcgcttcttcaa

SEQ ID NO: 2456890 - DNA, 25 bp, Homo sapien
aaggatcaagcgcttcttcaatact

SEQ ID NO: 2456891 - DNA, 25 bp, Homo sapien
aaatagccaagcatgcgggcacata

SEQ ID NO: 2456892 - DNA, 25 bp, Homo sapien
tgcgggcacatacttgtggtcccag

SEQ ID NO: 2456893 - DNA, 25 bp, Homo sapien
atagccaagcatgcgggcacatact

SEQ ID NO: 2456894 - DNA, 25 bp, Homo sapien
caagcatgcgggcacatacttgtgg

SEQ ID NO: 2456895 - DNA, 25 bp, Homo sapien
caggctggacacctgaggagtgatc

SEQ ID NO: 2456896 - DNA, 25 bp, Homo sapien
ggctggacacctgaggagtgatcaa

SEQ ID NO: 2456897 - DNA, 25 bp, Homo sapien
gctggacacctgaggagtgatcaac

SEQ ID NO: 2456898 - DNA, 25 bp, Homo sapien
gcaggctggacacctgaggagtgat

SEQ ID NO: 2456899 - DNA, 25 bp, Homo sapien
tgacaaggccatagtcacctcctct

SEQ ID NO: 2456900 - DNA, 25 bp, Homo sapien
acagcaggggtgacaaggccatagt

SEQ ID NO: 2456901 - DNA, 25 bp, Homo sapien
caccagagttacactcctgagggac

SEQ ID NO: 2456902 - DNA, 25 bp, Homo sapien
aacagaaacaccagagttacactcc

SEQ ID NO: 2456903 - DNA, 25 bp, Homo sapien
tccagcctgggtgacagagtgagac

SEQ ID NO: 2456904 - DNA, 25 bp, Homo sapien
tgagctgtgattgtaccactctact

SEQ ID NO: 2456905 - DNA, 25 bp, Homo sapien
gctgtgattgtaccactctactcca

SEQ ID NO: 2456906 - DNA, 25 bp, Homo sapien
ccagcctgggtgacagagtgagacc

SEQ ID NO: 2456907 - DNA, 25 bp, Homo sapien
tgatcaagtcgtggtgcggcgccac

SEQ ID NO: 2456908 - DNA, 25 bp, Homo sapien
agggagtttccacttcatgtgccag

SEQ ID NO: 2456909 - DNA, 25 bp, Homo sapien
tgccagtgcggcagactttcagcaa

SEQ ID NO: 2456910 - DNA, 25 bp, Homo sapien
tacactacagcccacaaaaaggaga

SEQ ID NO: 2456911 - DNA, 25 bp, Homo sapien
aaatcctcgtcacgaacccgcagaa

SEQ ID NO: 2456912 - DNA, 25 bp, Homo sapien
aacagaggcgccgtctttgggaagc

SEQ ID NO: 2456913 - DNA, 25 bp, Homo sapien
gacatggtccgtggcgccgcacgca

SEQ ID NO: 2456914 - DNA, 25 bp, Homo sapien
aggcgcagtgggtggaaataaatcc

SEQ ID NO: 2456915 - DNA, 25 bp, Homo sapien
ttagctaacggttgatactgcccat

SEQ ID NO: 2456916 - DNA, 25 bp, Homo sapien
acggttgatactgcccattcaccag

SEQ ID NO: 2456917 - DNA, 25 bp, Homo sapien
gctaacggttgatactgcccattca

SEQ ID NO: 2456918 - DNA, 25 bp, Homo sapien
taacggttgatactgcccattcacc

SEQ ID NO: 2456919 - DNA, 25 bp, Homo sapien
cgtaggaatgggcacccctttctgg

SEQ ID NO: 2456920 - DNA, 25 bp, Homo sapien
aaagcaaacaccgtaggaatgggca

SEQ ID NO: 2456921 - DNA, 25 bp, Homo sapien
gcaaacaccgtaggaatgggcaccc

SEQ ID NO: 2456922 - DNA, 25 bp, Homo sapien
ctaaagcaaacaccgtaggaatggg

SEQ ID NO: 2456923 - DNA, 25 bp, Homo sapien
ctaacctggtggtctttctttgtca

SEQ ID NO: 2456924 - DNA, 25 bp, Homo sapien
tgtcaccattgcatccttccctggt

SEQ ID NO: 2456925 - DNA, 25 bp, Homo sapien
ctctgctaacctggtggtctttctt

SEQ ID NO: 2456926 - DNA, 25 bp, Homo sapien
ttctttgtcaccattgcatccttcc

SEQ ID NO: 2456927 - DNA, 25 bp, Homo sapien
ttagttatttgcaaatggacagttt

SEQ ID NO: 2456928 - DNA, 25 bp, Homo sapien
gttatttgcaaatggacagttttgc

SEQ ID NO: 2456929 - DNA, 25 bp, Homo sapien
atttgcaaatggacagttttgcctc

SEQ ID NO: 2456930 - DNA, 25 bp, Homo sapien
ttgcaaatggacagttttgcctcac

SEQ ID NO: 2456931 - DNA, 25 bp, Homo sapien
ttccgtaagtatttccataacaaga

SEQ ID NO: 2456932 - DNA, 25 bp, Homo sapien
ataacaagagttgggtctatagccc

SEQ ID NO: 2456933 - DNA, 25 bp, Homo sapien
tctgtaagacataattctttttccg

SEQ ID NO: 2456934 - DNA, 25 bp, Homo sapien
tgtaagacataattctttttccgta

SEQ ID NO: 2456935 - DNA, 25 bp, Homo sapien
tgtttactgtttacactggtggctg

SEQ ID NO: 2456936 - DNA, 25 bp, Homo sapien
tgaaggtgcattagatgtgcatccc

SEQ ID NO: 2456937 - DNA, 25 bp, Homo sapien
gcaagatgctcttaaaggctgcaga

SEQ ID NO: 2456938 - DNA, 25 bp, Homo sapien
caatggctctcccaaggctagggaa

SEQ ID NO: 2456939 - DNA, 25 bp, Homo sapien
gcacaggcatcctcaaaaacaagcg

SEQ ID NO: 2456940 - DNA, 25 bp, Homo sapien
gggagcacaggcatcctcaaaaaca

SEQ ID NO: 2456941 - DNA, 25 bp, Homo sapien
gagcacaggcatcctcaaaaacaag

SEQ ID NO: 2456942 - DNA, 25 bp, Homo sapien
aaggggagcacaggcatcctcaaaa

SEQ ID NO: 2456943 - DNA, 25 bp, Homo sapien
gctgtgcctcatgcacgcctgatgc

SEQ ID NO: 2456944 - DNA, 25 bp, Homo sapien
tgtgcctcatgcacgcctgatgctc

SEQ ID NO: 2456945 - DNA, 25 bp, Homo sapien
cctcatgcacgcctgatgctcttgg

SEQ ID NO: 2456946 - DNA, 25 bp, Homo sapien
gtgcctcatgcacgcctgatgctct

SEQ ID NO: 2456947 - DNA, 25 bp, Homo sapien
cagggctatctgctatattccggca

SEQ ID NO: 2456948 - DNA, 25 bp, Homo sapien
atctgctatattccggcagttttgc

SEQ ID NO: 2456949 - DNA, 25 bp, Homo sapien
ggctatctgctatattccggcagtt

SEQ ID NO: 2456950 - DNA, 25 bp, Homo sapien
ccacagggctatctgctatattccg

SEQ ID NO: 2456951 - DNA, 25 bp, Homo sapien
gggcaccgtgcgtgttgccgaactt

SEQ ID NO: 2456952 - DNA, 25 bp, Homo sapien
cgaacttgttataactggagtagcc

SEQ ID NO: 2456953 - DNA, 25 bp, Homo sapien
tgttgccgaacttgttataactgga

SEQ ID NO: 2456954 - DNA, 25 bp, Homo sapien
tgcgtgttgccgaacttgttataac

SEQ ID NO: 2456955 - DNA, 25 bp, Homo sapien
ttgggaatggcaacaagtcgtgtga

SEQ ID NO: 2456956 - DNA, 25 bp, Homo sapien
ggtttcctgcaggtgttggtctgtc

SEQ ID NO: 2456957 - DNA, 25 bp, Homo sapien
ctgcaggtgttggtctgtccagctc

SEQ ID NO: 2456958 - DNA, 25 bp, Homo sapien
aatggcaacaagtcgtgtgaacgtg

SEQ ID NO: 2456959 - DNA, 25 bp, Homo sapien
tgcacaaattcaacgtgtcgcatgt

SEQ ID NO: 2456960 - DNA, 25 bp, Homo sapien
gcctgtagtctacccgtgaccaact

SEQ ID NO: 2456961 - DNA, 25 bp, Homo sapien
ttcatcccctgcactagcctgtagt

SEQ ID NO: 2456962 - DNA, 25 bp, Homo sapien
tcaacgtgtcgcatgtggagaggct

SEQ ID NO: 2456963 - DNA, 25 bp, Homo sapien
ctgttgccagaattgctggggttga

SEQ ID NO: 2456964 - DNA, 25 bp, Homo sapien
ctccactgttgccagaattgctggg

SEQ ID NO: 2456965 - DNA, 25 bp, Homo sapien
cactgttgccagaattgctggggtt

SEQ ID NO: 2456966 - DNA, 25 bp, Homo sapien
gccagaattgctggggttgagggca

SEQ ID NO: 2456967 - DNA, 25 bp, Homo sapien
aatgatatctttcggggaaatacca

SEQ ID NO: 2456968 - DNA, 25 bp, Homo sapien
gttgggaaacaacaggatgatttca

SEQ ID NO: 2456969 - DNA, 25 bp, Homo sapien
aaataatgatatctttcggggaaat

SEQ ID NO: 2456970 - DNA, 25 bp, Homo sapien
ttgggaaacaacaggatgatttcag

SEQ ID NO: 2456971 - DNA, 25 bp, Homo sapien
tttcttatgaacaatggtgccacca

SEQ ID NO: 2456972 - DNA, 25 bp, Homo sapien
atcagcagcaccatcgcccaagtgt

SEQ ID NO: 2456973 - DNA, 25 bp, Homo sapien
gtcactggtgagcatttcatgttct

SEQ ID NO: 2456974 - DNA, 25 bp, Homo sapien
gtgtcccgcgatgatgtcactggtg

SEQ ID NO: 2456975 - DNA, 25 bp, Homo sapien
taaatgcaatatgcattgaagtgtc

SEQ ID NO: 2456976 - DNA, 25 bp, Homo sapien
gagaaaataaatgcaatatgcattg

SEQ ID NO: 2456977 - DNA, 25 bp, Homo sapien
aaatgcaatatgcattgaagtgtca

SEQ ID NO: 2456978 - DNA, 25 bp, Homo sapien
aaataaatgcaatatgcattgaagt

SEQ ID NO: 2456979 - DNA, 25 bp, Homo sapien
gaagcacaaacaaaggccataaatg

SEQ ID NO: 2456980 - DNA, 25 bp, Homo sapien
ctggaagcacaaacaaaggccataa

SEQ ID NO: 2456981 - DNA, 25 bp, Homo sapien
tggaagcacaaacaaaggccataaa

SEQ ID NO: 2456982 - DNA, 25 bp, Homo sapien
agcacaaacaaaggccataaatgcc

SEQ ID NO: 2456983 - DNA, 25 bp, Homo sapien
gagtgtgtaaaggtttgtctcaagg

SEQ ID NO: 2456984 - DNA, 25 bp, Homo sapien
gtgtaaaggtttgtctcaaggtgtc

SEQ ID NO: 2456985 - DNA, 25 bp, Homo sapien
gtaaaggtttgtctcaaggtgtctg

SEQ ID NO: 2456986 - DNA, 25 bp, Homo sapien
gtgtgtaaaggtttgtctcaaggtg

SEQ ID NO: 2456987 - DNA, 25 bp, Homo sapien
tcaacaagggcgtctgctaagtctc

SEQ ID NO: 2456988 - DNA, 25 bp, Homo sapien
ggtcaacaagggcgtctgctaagtc

SEQ ID NO: 2456989 - DNA, 25 bp, Homo sapien
cagggtcaacaagggcgtctgctaa

SEQ ID NO: 2456990 - DNA, 25 bp, Homo sapien
aacaagggcgtctgctaagtctctt

SEQ ID NO: 2456991 - DNA, 25 bp, Homo sapien
tggtgcatgatctgctcctcggaac

SEQ ID NO: 2456992 - DNA, 25 bp, Homo sapien
gcatgatctgctcctcggaacccat

SEQ ID NO: 2456993 - DNA, 25 bp, Homo sapien
gagcaggccgccctggtgcatgatc

SEQ ID NO: 2456994 - DNA, 25 bp, Homo sapien
gctgcagacaccagagctgagcagg

SEQ ID NO: 2456995 - DNA, 25 bp, Homo sapien
tattatgcagttgcagattgaagct

SEQ ID NO: 2456996 - DNA, 25 bp, Homo sapien
tcttgacttcccagtgaccatatta

SEQ ID NO: 2456997 - DNA, 25 bp, Homo sapien
ccagtgaccatattatgcagttgca

SEQ ID NO: 2456998 - DNA, 25 bp, Homo sapien
ggtcaaccaactggcccgttcttga

SEQ ID NO: 2456999 - DNA, 25 bp, Homo sapien
atccatcgggggaatccccaggagc

SEQ ID NO: 2457000 - DNA, 25 bp, Homo sapien
tccatcgggggaatccccaggagct

SEQ ID NO: 2457001 - DNA, 25 bp, Homo sapien
tgatgccctcgagctgcactggagg

SEQ ID NO: 2457002 - DNA, 25 bp, Homo sapien
tgtcgtggtctgttgctattctctc

SEQ ID NO: 2457003 - DNA, 25 bp, Homo sapien
gagcttgtcctaccactcagtgcta

SEQ ID NO: 2457004 - DNA, 25 bp, Homo sapien
aagggatggcaggttctagcttagc

SEQ ID NO: 2457005 - DNA, 25 bp, Homo sapien
ttgctaggagcaagtttcttacaac

SEQ ID NO: 2457006 - DNA, 25 bp, Homo sapien
tcttacaacatgcacaccctcttgg

SEQ ID NO: 2457007 - DNA, 25 bp, Homo sapien
agagtctgcacattgagggacagca

SEQ ID NO: 2457008 - DNA, 25 bp, Homo sapien
gcattcgtcttgctaggagcaagtt

SEQ ID NO: 2457009 - DNA, 25 bp, Homo sapien
agctgctacttgaaactctggcagc

SEQ ID NO: 2457010 - DNA, 25 bp, Homo sapien
tgctacttgaaactctggcagccag

SEQ ID NO: 2457011 - DNA, 25 bp, Homo sapien
gaaactctggcagccagtaacgggc

SEQ ID NO: 2457012 - DNA, 25 bp, Homo sapien
tacttgaaactctggcagccagtaa

SEQ ID NO: 2457013 - DNA, 25 bp, Homo sapien
ggaacacaatgagcaggtccgcttt

SEQ ID NO: 2457014 - DNA, 25 bp, Homo sapien
tacaggtagatcagccctttccagg

SEQ ID NO: 2457015 - DNA, 25 bp, Homo sapien
caatgagcaggtccgctttctgtcc

SEQ ID NO: 2457016 - DNA, 25 bp, Homo sapien
cagttacctctaaggtacaggtaga

SEQ ID NO: 2457017 - DNA, 25 bp, Homo sapien
acgagcgcccgtgccgtttgcggtc

SEQ ID NO: 2457018 - DNA, 25 bp, Homo sapien
gaaccaccgatcactgtttggcaca

SEQ ID NO: 2457019 - DNA, 25 bp, Homo sapien
tcccgaaccacctgcactgtttggc

SEQ ID NO: 2457020 - DNA, 25 bp, Homo sapien
gagcctcgtggactgtttggcacaa

SEQ ID NO: 2457021 - DNA, 25 bp, Homo sapien
gtccccgagcttccgtgcactgtta

SEQ ID NO: 2457022 - DNA, 25 bp, Homo sapien
cgtgagcctcctgcacggtttggca

SEQ ID NO: 2457023 - DNA, 25 bp, Homo sapien
gcccgtgttgtgtgcggtccccgat

SEQ ID NO: 2457024 - DNA, 25 bp, Homo sapien
tgcactgttaggcacgagcgcgcaa

SEQ ID NO: 2457025 - DNA, 25 bp, Homo sapien
ctggggagtctcgacagcctggacc

SEQ ID NO: 2457026 - DNA, 25 bp, Homo sapien
agcctggacccctctgggcgcctct

SEQ ID NO: 2457027 - DNA, 25 bp, Homo sapien
cacaccttgtccaaggccgaagcct

SEQ ID NO: 2457028 - DNA, 25 bp, Homo sapien
gtgactctgcctatggctccttctc

SEQ ID NO: 2457029 - DNA, 25 bp, Homo sapien
tcagcccaagggttctctggatgcc

SEQ ID NO: 2457030 - DNA, 25 bp, Homo sapien
acacagtctgggttgtcccacagga

SEQ ID NO: 2457031 - DNA, 25 bp, Homo sapien
cagccggcttcacatgggcagacat

SEQ ID NO: 2457032 - DNA, 25 bp, Homo sapien
tacagtgactacagcccactctgtg

SEQ ID NO: 2457033 - DNA, 25 bp, Homo sapien
ccagaaattgtgatagccgggccca

SEQ ID NO: 2457034 - DNA, 25 bp, Homo sapien
gagagtctcattgaccacagtgctg

SEQ ID NO: 2457035 - DNA, 25 bp, Homo sapien
tatgctccacgtggatgagggacag

SEQ ID NO: 2457036 - DNA, 25 bp, Homo sapien
gatgagtccttctgtgataccccag

SEQ ID NO: 2457037 - DNA, 25 bp, Homo sapien
tcagttagggcaggaaccagccatt

SEQ ID NO: 2457038 - DNA, 25 bp, Homo sapien
tcttatgtgattcttcacttgcttc

SEQ ID NO: 2457039 - DNA, 25 bp, Homo sapien
tatgtgattcttcacttgcttcagg

SEQ ID NO: 2457040 - DNA, 25 bp, Homo sapien
acttcttatgtgattcttcacttgc

SEQ ID NO: 2457041 - DNA, 25 bp, Homo sapien
tcacttcactatctgtgtttaggag

SEQ ID NO: 2457042 - DNA, 25 bp, Homo sapien
aagaatttctagtttgagaagatgc

SEQ ID NO: 2457043 - DNA, 25 bp, Homo sapien
tcactgtcaaaaagggcctcagatt

SEQ ID NO: 2457044 - DNA, 25 bp, Homo sapien
caataagaatttctagtttgagaag

SEQ ID NO: 2457045 - DNA, 25 bp, Homo sapien
acataatcttcatcttcttcataca

SEQ ID NO: 2457046 - DNA, 25 bp, Homo sapien
ctggttaatatgacataatcttcat

SEQ ID NO: 2457047 - DNA, 25 bp, Homo sapien
cataatcttcatcttcttcatacat

SEQ ID NO: 2457048 - DNA, 25 bp, Homo sapien
gttaatatgacataatcttcatctt

SEQ ID NO: 2457049 - DNA, 25 bp, Homo sapien
gtgctaggtgagtacaaaaatggac

SEQ ID NO: 2457050 - DNA, 25 bp, Homo sapien
tcttgctcttttcacgttggctgga

SEQ ID NO: 2457051 - DNA, 25 bp, Homo sapien
ggaaaaccaaggatagcaatacatg

SEQ ID NO: 2457052 - DNA, 25 bp, Homo sapien
aagcgatctgcccatgtcgacttcc

SEQ ID NO: 2457053 - DNA, 25 bp, Homo sapien
cagtagtgcaagtggaaccgtcaga

SEQ ID NO: 2457054 - DNA, 25 bp, Homo sapien
cacacgatgcgagaagtggtggccc

SEQ ID NO: 2457055 - DNA, 25 bp, Homo sapien
aaaagctgctctatgaattcccagg

SEQ ID NO: 2457056 - DNA, 25 bp, Homo sapien
tatcggccagagcagagattaacga

SEQ ID NO: 2457057 - DNA, 25 bp, Homo sapien
gccatattgaagaggacgggtctaa

SEQ ID NO: 2457058 - DNA, 25 bp, Homo sapien
tggagtccgtgtaagctcggcgaca

SEQ ID NO: 2457059 - DNA, 25 bp, Homo sapien
ccgttgtggactgactttgatgctc

SEQ ID NO: 2457060 - DNA, 25 bp, Homo sapien
tacttgggacgtttacctgagcgct

SEQ ID NO: 2457061 - DNA, 25 bp, Homo sapien
tcagggccaacttaccttgcattct

SEQ ID NO: 2457062 - DNA, 25 bp, Homo sapien
caagttagaaactgttcagggccaa

SEQ ID NO: 2457063 - DNA, 25 bp, Homo sapien
gctttcaggacctacccatatagga

SEQ ID NO: 2457064 - DNA, 25 bp, Homo sapien
gctcaagggataagtcaagttagaa

SEQ ID NO: 2457065 - DNA, 25 bp, Homo sapien
tacagtgcacaagggctttggattc

SEQ ID NO: 2457066 - DNA, 25 bp, Homo sapien
tcctcaagcacaacaggattgtagg

SEQ ID NO: 2457067 - DNA, 25 bp, Homo sapien
tgaaccataaccttctgagtgaaag

SEQ ID NO: 2457068 - DNA, 25 bp, Homo sapien
tgagtgaaaggtgtcgtccaaaacg

SEQ ID NO: 2457069 - DNA, 25 bp, Homo sapien
tgctgatgtggctcaacagggtcca

SEQ ID NO: 2457070 - DNA, 25 bp, Homo sapien
aatggatcgattaatagcaatgtac

SEQ ID NO: 2457071 - DNA, 25 bp, Homo sapien
agacatctgaggcattagtgggtag

SEQ ID NO: 2457072 - DNA, 25 bp, Homo sapien
gctccatgggctattaatggatcga

SEQ ID NO: 2457073 - DNA, 25 bp, Homo sapien
gaagttctacctattctggccagta

SEQ ID NO: 2457074 - DNA, 25 bp, Homo sapien
ttaaaatcgtgaatatattgcccac

SEQ ID NO: 2457075 - DNA, 25 bp, Homo sapien
gctaatcgctagcatcttaaaagag

SEQ ID NO: 2457076 - DNA, 25 bp, Homo sapien
tttggcattgtttgaagaagttcta

SEQ ID NO: 2457077 - DNA, 25 bp, Homo sapien
agtgtcatccttgttgtcatagcct

SEQ ID NO: 2457078 - DNA, 25 bp, Homo sapien
tgttgtcatagcctttccaccaaac

SEQ ID NO: 2457079 - DNA, 25 bp, Homo sapien
ctttccaccaaaccaaataatctgt

SEQ ID NO: 2457080 - DNA, 25 bp, Homo sapien
gttgtcatagcctttccaccaaacc

SEQ ID NO: 2457081 - DNA, 25 bp, Homo sapien
tccctggtgggccagctcgggcttg

SEQ ID NO: 2457082 - DNA, 25 bp, Homo sapien
gggccagctcgggcttggggccatg

SEQ ID NO: 2457083 - DNA, 25 bp, Homo sapien
cctggtgggccagctcgggcttggg

SEQ ID NO: 2457084 - DNA, 25 bp, Homo sapien
ctcgggcttggggccatggtcccat

SEQ ID NO: 2457085 - DNA, 25 bp, Homo sapien
atcctctgattatcaatgcgggtct

SEQ ID NO: 2457086 - DNA, 25 bp, Homo sapien
tcaatgcgggtctttagttcatgac

SEQ ID NO: 2457087 - DNA, 25 bp, Homo sapien
tctgattatcaatgcgggtctttag

SEQ ID NO: 2457088 - DNA, 25 bp, Homo sapien
ctttagttcatgactagtgacttct

SEQ ID NO: 2457089 - DNA, 25 bp, Homo sapien
cagaactgttcgtcagttggcacag

SEQ ID NO: 2457090 - DNA, 25 bp, Homo sapien
ggcacaggagcagttctttttaatg

SEQ ID NO: 2457091 - DNA, 25 bp, Homo sapien
cattcttaacatgagagacattcag

SEQ ID NO: 2457092 - DNA, 25 bp, Homo sapien
ttcagaaagttactacgatagcttt

SEQ ID NO: 2457093 - DNA, 25 bp, Homo sapien
tacatacagataggcgtagcaatag

SEQ ID NO: 2457094 - DNA, 25 bp, Homo sapien
cataggtatctagcagttggtatct

SEQ ID NO: 2457095 - DNA, 25 bp, Homo sapien
ccccaataatgtaggtgtctaacgg

SEQ ID NO: 2457096 - DNA, 25 bp, Homo sapien
tgtctaacggttggtacctagagct

SEQ ID NO: 2457097 - DNA, 25 bp, Homo sapien
tgcaccaagatgtctgactgaattc

SEQ ID NO: 2457098 - DNA, 25 bp, Homo sapien
ctcctgatcccggtgaagtgtacat

SEQ ID NO: 2457099 - DNA, 25 bp, Homo sapien
gatacagcctatcctatactattta

SEQ ID NO: 2457100 - DNA, 25 bp, Homo sapien
tttaattaagatctaagctcctgct

SEQ ID NO: 2457101 - DNA, 25 bp, Homo sapien
ggaaaccacatgtaacttagccaga

SEQ ID NO: 2457102 - DNA, 25 bp, Homo sapien
cttgcagtacattaccagctgtgat

SEQ ID NO: 2457103 - DNA, 25 bp, Homo sapien
gataattcaagggagctcaaagtca

SEQ ID NO: 2457104 - DNA, 25 bp, Homo sapien
caaagaagctaatatggaaaccaca

SEQ ID NO: 2457105 - DNA, 25 bp, Homo sapien
actcttcccctcctgctttagtgcc

SEQ ID NO: 2457106 - DNA, 25 bp, Homo sapien
ttagtgccaccccaaactgcattta

SEQ ID NO: 2457107 - DNA, 25 bp, Homo sapien
actttagacaacttactactttgat

SEQ ID NO: 2457108 - DNA, 25 bp, Homo sapien
ctttagtgccaccccaaactgcatt

SEQ ID NO: 2457109 - DNA, 25 bp, Homo sapien
tcagccagcagtattcttcagtaaa

SEQ ID NO: 2457110 - DNA, 25 bp, Homo sapien
gaaacacttctgaacactgatagga

SEQ ID NO: 2457111 - DNA, 25 bp, Homo sapien
taatcattgaacctcgagtcactgt

SEQ ID NO: 2457112 - DNA, 25 bp, Homo sapien
taacattcggttttatcagccagca

SEQ ID NO: 2457113 - DNA, 25 bp, Homo sapien
gagaaatgaggctgcaattttgagg

SEQ ID NO: 2457114 - DNA, 25 bp, Homo sapien
gggctttggtgtactcagatgatgt

SEQ ID NO: 2457115 - DNA, 25 bp, Homo sapien
caggtatagacttttcaggagggag

SEQ ID NO: 2457116 - DNA, 25 bp, Homo sapien
aatgttgaggaacagtgtgggcttt

SEQ ID NO: 2457117 - DNA, 25 bp, Homo sapien
ttaatggtgtctagagcccctcttt

SEQ ID NO: 2457118 - DNA, 25 bp, Homo sapien
gtgtctagagcccctctttgacttc

SEQ ID NO: 2457119 - DNA, 25 bp, Homo sapien
atggtgtctagagcccctctttgac

SEQ ID NO: 2457120 - DNA, 25 bp, Homo sapien
taatggtgtctagagcccctctttg

SEQ ID NO: 2457121 - DNA, 25 bp, Homo sapien
tccataatgtaagagggagcccagt

SEQ ID NO: 2457122 - DNA, 25 bp, Homo sapien
ttcatgcaccagctgtccataatgt

SEQ ID NO: 2457123 - DNA, 25 bp, Homo sapien
cacgtcttgatgagagattcagtaa

SEQ ID NO: 2457124 - DNA, 25 bp, Homo sapien
gagggagcccagttcacgtcttgat

SEQ ID NO: 2457125 - DNA, 25 bp, Homo sapien
ttaaagaacagcttagcttccctct

SEQ ID NO: 2457126 - DNA, 25 bp, Homo sapien
taaagaacagcttagcttccctctg

SEQ ID NO: 2457127 - DNA, 25 bp, Homo sapien
gaggttaaagaacagcttagcttcc

SEQ ID NO: 2457128 - DNA, 25 bp, Homo sapien
gttaaagaacagcttagcttccctc

SEQ ID NO: 2457129 - DNA, 25 bp, Homo sapien
cttgaaacaacttgcaaaatctttt

SEQ ID NO: 2457130 - DNA, 25 bp, Homo sapien
ttttcttgaaacaacttgcaaaatc

SEQ ID NO: 2457131 - DNA, 25 bp, Homo sapien
tgcaaaatcttttatcatcactttg

SEQ ID NO: 2457132 - DNA, 25 bp, Homo sapien
caaaatcttttatcatcactttgca

SEQ ID NO: 2457133 - DNA, 25 bp, Homo sapien
gaagttgttgagtcacaggtgcctg

SEQ ID NO: 2457134 - DNA, 25 bp, Homo sapien
tggtgaagcactgtatatagcaggt

SEQ ID NO: 2457135 - DNA, 25 bp, Homo sapien
tcagtcccgaagtgattggtgaaac

SEQ ID NO: 2457136 - DNA, 25 bp, Homo sapien
ggtgcaagcatcatccctgacaggg

SEQ ID NO: 2457137 - DNA, 25 bp, Homo sapien
ttgttgttaggtcttccaggctgca

SEQ ID NO: 2457138 - DNA, 25 bp, Homo sapien
gtccctgtgcccacaattttgtttg

SEQ ID NO: 2457139 - DNA, 25 bp, Homo sapien
aaaatgaccctcaatcactgtccct

SEQ ID NO: 2457140 - DNA, 25 bp, Homo sapien
ttagcaaaatgaccctcaatcactg

SEQ ID NO: 2457141 - DNA, 25 bp, Homo sapien
cagtgtcattcaccagtttttgtga

SEQ ID NO: 2457142 - DNA, 25 bp, Homo sapien
gcctcaacaactccttgaccacaga

SEQ ID NO: 2457143 - DNA, 25 bp, Homo sapien
cattcaccagtttttgtgaagcaaa

SEQ ID NO: 2457144 - DNA, 25 bp, Homo sapien
ccacagacatgtcgctgtgtttcca

SEQ ID NO: 2457145 - DNA, 25 bp, Homo sapien
acagaggagatggtgtcatgacagc

SEQ ID NO: 2457146 - DNA, 25 bp, Homo sapien
cagaggagatggtgtcatgacagcc

SEQ ID NO: 2457147 - DNA, 25 bp, Homo sapien
gtcatgacagcctgaatgatttctg

SEQ ID NO: 2457148 - DNA, 25 bp, Homo sapien
gatggtgtcatgacagcctgaatga

SEQ ID NO: 2457149 - DNA, 25 bp, Homo sapien
taagttacattatcctcagggttgc

SEQ ID NO: 2457150 - DNA, 25 bp, Homo sapien
tattattttgactattgggaggata

SEQ ID NO: 2457151 - DNA, 25 bp, Homo sapien
gagaatacagcacactagggatact

SEQ ID NO: 2457152 - DNA, 25 bp, Homo sapien
caaagaatgcactggatagagtcta

SEQ ID NO: 2457153 - DNA, 25 bp, Homo sapien
ggaaaaaggacttaccaaatcatgc

SEQ ID NO: 2457154 - DNA, 25 bp, Homo sapien
aaggacttaccaaatcatgcccttc

SEQ ID NO: 2457155 - DNA, 25 bp, Homo sapien
aaaaggacttaccaaatcatgccct

SEQ ID NO: 2457156 - DNA, 25 bp, Homo sapien
ggacttaccaaatcatgcccttcta

SEQ ID NO: 2457157 - DNA, 25 bp, Homo sapien
gaacatcaaggaaatcttttgcacc

SEQ ID NO: 2457158 - DNA, 25 bp, Homo sapien
catcaaggaaatcttttgcaccaag

SEQ ID NO: 2457159 - DNA, 25 bp, Homo sapien
tcaaggaaatcttttgcaccaagat

SEQ ID NO: 2457160 - DNA, 25 bp, Homo sapien
aggaacatcaaggaaatcttttgca

SEQ ID NO: 2457161 - DNA, 25 bp, Homo sapien
ttaaactcttcagcgtagcctcttt

SEQ ID NO: 2457162 - DNA, 25 bp, Homo sapien
tatttaaactcttcagcgtagcctc

SEQ ID NO: 2457163 - DNA, 25 bp, Homo sapien
atttaaactcttcagcgtagcctct

SEQ ID NO: 2457164 - DNA, 25 bp, Homo sapien
aactcttcagcgtagcctctttaac

SEQ ID NO: 2457165 - DNA, 25 bp, Homo sapien
ttgggtggtacaactgggccatgtt

SEQ ID NO: 2457166 - DNA, 25 bp, Homo sapien
gtacaactgggccatgttttatgtt

SEQ ID NO: 2457167 - DNA, 25 bp, Homo sapien
ttcatggcttttggatcaaagttgc

SEQ ID NO: 2457168 - DNA, 25 bp, Homo sapien
tgggccatgttttatgttgtcataa

SEQ ID NO: 2457169 - DNA, 25 bp, Homo sapien
tcagcctttaatagctctagctccc

SEQ ID NO: 2457170 - DNA, 25 bp, Homo sapien
ttccatatcattaacttcagccttt

SEQ ID NO: 2457171 - DNA, 25 bp, Homo sapien
catctgtgcatcacgtcatgttcca

SEQ ID NO: 2457172 - DNA, 25 bp, Homo sapien
cacagtagtgcagctgacccttatt

SEQ ID NO: 2457173 - DNA, 25 bp, Homo sapien
gaggtcctgattaggtggcacaaag

SEQ ID NO: 2457174 - DNA, 25 bp, Homo sapien
tcctgattaggtggcacaaagatgt

SEQ ID NO: 2457175 - DNA, 25 bp, Homo sapien
ggaggtcctgattaggtggcacaaa

SEQ ID NO: 2457176 - DNA, 25 bp, Homo sapien
ggtcctgattaggtggcacaaagat

SEQ ID NO: 2457177 - DNA, 25 bp, Homo sapien
gaagggtgaagaacattgagaccta

SEQ ID NO: 2457178 - DNA, 25 bp, Homo sapien
gaagaacattgagacctaggtggtg

SEQ ID NO: 2457179 - DNA, 25 bp, Homo sapien
gaaggctgtacttgatgatgaggaa

SEQ ID NO: 2457180 - DNA, 25 bp, Homo sapien
ggagaatactgagatgtctggtagt

SEQ ID NO: 2457181 - DNA, 25 bp, Homo sapien
tggccctgtagtgaggactaccatg

SEQ ID NO: 2457182 - DNA, 25 bp, Homo sapien
gcagtggccctgtagtgaggactac

SEQ ID NO: 2457183 - DNA, 25 bp, Homo sapien
ctgtagtgaggactaccatggcata

SEQ ID NO: 2457184 - DNA, 25 bp, Homo sapien
gaggcagtggccctgtagtgaggac

SEQ ID NO: 2457185 - DNA, 25 bp, Homo sapien
tgtgcctcacacaaatagaagcagg

SEQ ID NO: 2457186 - DNA, 25 bp, Homo sapien
tgcttggaatttgtaaacctcttgg

SEQ ID NO: 2457187 - DNA, 25 bp, Homo sapien
ctgtaacaggtgtgcctcacacaaa

SEQ ID NO: 2457188 - DNA, 25 bp, Homo sapien
gagaaccattgtattgcttggaatt

SEQ ID NO: 2457189 - DNA, 25 bp, Homo sapien
atttgcatggaaaatgactgttgag

SEQ ID NO: 2457190 - DNA, 25 bp, Homo sapien
tgaagaaggaatacctgcattgctg

SEQ ID NO: 2457191 - DNA, 25 bp, Homo sapien
gtgtagatcaatatgcccatcactt

SEQ ID NO: 2457192 - DNA, 25 bp, Homo sapien
ggtgtagatcaatatgcccatcact

SEQ ID NO: 2457193 - DNA, 25 bp, Homo sapien
tgtagatcaatatgcccatcacttg

SEQ ID NO: 2457194 - DNA, 25 bp, Homo sapien
gtagatcaatatgcccatcacttga

SEQ ID NO: 2457195 - DNA, 25 bp, Homo sapien
cagcgtttgtccactattaagttga

SEQ ID NO: 2457196 - DNA, 25 bp, Homo sapien
ggcttggcaacaggcatcaagatta

SEQ ID NO: 2457197 - DNA, 25 bp, Homo sapien
tcatcttgttatctggactatggta

SEQ ID NO: 2457198 - DNA, 25 bp, Homo sapien
tctcctgggtgataactacgagaag

SEQ ID NO: 2457199 - DNA, 25 bp, Homo sapien
tataaagtgcaaaaagagacacact

SEQ ID NO: 2457200 - DNA, 25 bp, Homo sapien
catcatgtggatacttatgcatagt

SEQ ID NO: 2457201 - DNA, 25 bp, Homo sapien
gagaacctgctttagagacagatac

SEQ ID NO: 2457202 - DNA, 25 bp, Homo sapien
tatgcatagtagaaagagaacctgc

SEQ ID NO: 2457203 - DNA, 25 bp, Homo sapien
actgctcatattggaaggtcctacg

SEQ ID NO: 2457204 - DNA, 25 bp, Homo sapien
ttaactgctcatattggaaggtcct

SEQ ID NO: 2457205 - DNA, 25 bp, Homo sapien
catattggaaggtcctacggttgtt

SEQ ID NO: 2457206 - DNA, 25 bp, Homo sapien
tgctcatattggaaggtcctacggt

SEQ ID NO: 2457207 - DNA, 25 bp, Homo sapien
cattttggaaacaacatggttgaaa

SEQ ID NO: 2457208 - DNA, 25 bp, Homo sapien
tattattgcttcactgctaagtttg

SEQ ID NO: 2457209 - DNA, 25 bp, Homo sapien
tctatagtgatcagaaaatatatct

SEQ ID NO: 2457210 - DNA, 25 bp, Homo sapien
gggtattaaagtctactgctattat

SEQ ID NO: 2457211 - DNA, 25 bp, Homo sapien
cagccattcattgtgatgtctcctc

SEQ ID NO: 2457212 - DNA, 25 bp, Homo sapien
agtgaatgccgactggtccatgggt

SEQ ID NO: 2457213 - DNA, 25 bp, Homo sapien
tctctggatgcaggtcttctggtca

SEQ ID NO: 2457214 - DNA, 25 bp, Homo sapien
aatagccctggatcaggaagctcct

SEQ ID NO: 2457215 - DNA, 25 bp, Homo sapien
gacagaatagccctggatcaggaag

SEQ ID NO: 2457216 - DNA, 25 bp, Homo sapien
ccaaagttcagagtgggccaagaag

SEQ ID NO: 2457217 - DNA, 25 bp, Homo sapien
gcacccaggatgtatatatcaagga

SEQ ID NO: 2457218 - DNA, 25 bp, Homo sapien
gcctttcatggcacccaggatgtat

SEQ ID NO: 2457219 - DNA, 25 bp, Homo sapien
ctggcaggccagttcccacccttca

SEQ ID NO: 2457220 - DNA, 25 bp, Homo sapien
cactaaatgcgtgtatagaaagaga

SEQ ID NO: 2457221 - DNA, 25 bp, Homo sapien
caaagtcaaaccaaagtggaaatcg

SEQ ID NO: 2457222 - DNA, 25 bp, Homo sapien
caccacttgggaattaaacagttct

SEQ ID NO: 2457223 - DNA, 25 bp, Homo sapien
gctattagctgtgaaaagggagtta

SEQ ID NO: 2457224 - DNA, 25 bp, Homo sapien
acttctttcttgcagactgtacaca

SEQ ID NO: 2457225 - DNA, 25 bp, Homo sapien
tgatcagaggatattaaataaacag

SEQ ID NO: 2457226 - DNA, 25 bp, Homo sapien
gaatgagttctgcatgatcagagga

SEQ ID NO: 2457227 - DNA, 25 bp, Homo sapien
tgaactaatgaatgagttctgcatg

SEQ ID NO: 2457228 - DNA, 25 bp, Homo sapien
gaaactcgatccctttacttaatga

SEQ ID NO: 2457229 - DNA, 25 bp, Homo sapien
tgggcacagagtgcaatcctagcac

SEQ ID NO: 2457230 - DNA, 25 bp, Homo sapien
gacacatagatcactggaagcaaat

SEQ ID NO: 2457231 - DNA, 25 bp, Homo sapien
tctttagtaaacagtggtgggagaa

SEQ ID NO: 2457232 - DNA, 25 bp, Homo sapien
taacctgttacttacattgcaagca

SEQ ID NO: 2457233 - DNA, 25 bp, Homo sapien
taatgaagatagtgaagcactggca

SEQ ID NO: 2457234 - DNA, 25 bp, Homo sapien
taaggttttctgtagccctagacaa

SEQ ID NO: 2457235 - DNA, 25 bp, Homo sapien
tcctggagcttagacacaaaatgta

SEQ ID NO: 2457236 - DNA, 25 bp, Homo sapien
tgatcttttagctcgttttccctcc

SEQ ID NO: 2457237 - DNA, 25 bp, Homo sapien
tgcactaacccgaagagatctcttt

SEQ ID NO: 2457238 - DNA, 25 bp, Homo sapien
tcttttcagaataatatagacatgg

SEQ ID NO: 2457239 - DNA, 25 bp, Homo sapien
acagcaaccttgcactaacccgaag

SEQ ID NO: 2457240 - DNA, 25 bp, Homo sapien
gcaaatttttcatatgaaatacaag

SEQ ID NO: 2457241 - DNA, 25 bp, Homo sapien
caaatgagttaatattaaattagca

SEQ ID NO: 2457242 - DNA, 25 bp, Homo sapien
gacaagtattattatcaaatgagtt

SEQ ID NO: 2457243 - DNA, 25 bp, Homo sapien
ggtagaaaagacaagtattattatc

SEQ ID NO: 2457244 - DNA, 25 bp, Homo sapien
tctgaagtacagctggatcagcatg

SEQ ID NO: 2457245 - DNA, 25 bp, Homo sapien
caaaccatgttgtacaagcaggaca

SEQ ID NO: 2457246 - DNA, 25 bp, Homo sapien
gatcagcatgttaagtcctgaagca

SEQ ID NO: 2457247 - DNA, 25 bp, Homo sapien
gacatactattcttggaaggttgca

SEQ ID NO: 2457248 - DNA, 25 bp, Homo sapien
tcaagatgaggatgataatgaaaga

SEQ ID NO: 2457249 - DNA, 25 bp, Homo sapien
caagatgaggatgataatgaaagag

SEQ ID NO: 2457250 - DNA, 25 bp, Homo sapien
aagatgaggatgataatgaaagagc

SEQ ID NO: 2457251 - DNA, 25 bp, Homo sapien
gctatcaggcaaactcttctggaat

SEQ ID NO: 2457252 - DNA, 25 bp, Homo sapien
gctccatcaagtagtgctatcaggc

SEQ ID NO: 2457253 - DNA, 25 bp, Homo sapien
aagagtgcggcgctattacctccat

SEQ ID NO: 2457254 - DNA, 25 bp, Homo sapien
aaatgccacagctagatgacactga

SEQ ID NO: 2457255 - DNA, 25 bp, Homo sapien
cataaacttggattaggtcctccat

SEQ ID NO: 2457256 - DNA, 25 bp, Homo sapien
gatcataaacttggattaggtcctc

SEQ ID NO: 2457257 - DNA, 25 bp, Homo sapien
aaattgatcataaacttggattagg

SEQ ID NO: 2457258 - DNA, 25 bp, Homo sapien
tagtgtaaattgatcataaacttgg

SEQ ID NO: 2457259 - DNA, 25 bp, Homo sapien
caatcatggcaatgtactatgtagg

SEQ ID NO: 2457260 - DNA, 25 bp, Homo sapien
tgtactgttcgagcaccacaaaatt

SEQ ID NO: 2457261 - DNA, 25 bp, Homo sapien
actatgtaggttttttgagtattgc

SEQ ID NO: 2457262 - DNA, 25 bp, Homo sapien
tttgcttgtttttcgtgcacaatca

SEQ ID NO: 2457263 - DNA, 25 bp, Homo sapien
caaatgctacagtaatgagctggtt

SEQ ID NO: 2457264 - DNA, 25 bp, Homo sapien
aaatgctacagtaatgagctggttc

SEQ ID NO: 2457265 - DNA, 25 bp, Homo sapien
acaaatgctacagtaatgagctggt

SEQ ID NO: 2457266 - DNA, 25 bp, Homo sapien
ggattcgattttcttcctgatttag

SEQ ID NO: 2457267 - DNA, 25 bp, Homo sapien
tcctgctgtgaagttcccgccttag

SEQ ID NO: 2457268 - DNA, 25 bp, Homo sapien
ggtggctcacgctttcagaaagaat

SEQ ID NO: 2457269 - DNA, 25 bp, Homo sapien
gcatttctatgggatcagcggtgat

SEQ ID NO: 2457270 - DNA, 25 bp, Homo sapien
gagtgttaacatacatacagtaagc

SEQ ID NO: 2457271 - DNA, 25 bp, Homo sapien
tacaaacagtatggctctagtgtct

SEQ ID NO: 2457272 - DNA, 25 bp, Homo sapien
tattttcctgggcaattgatgcaca

SEQ ID NO: 2457273 - DNA, 25 bp, Homo sapien
tgtgattatgtgatgcagcaaggca

SEQ ID NO: 2457274 - DNA, 25 bp, Homo sapien
cagagggcacgctatgaggcagcta

SEQ ID NO: 2457275 - DNA, 25 bp, Homo sapien
tgttatgaccggaatgacagctgac

SEQ ID NO: 2457276 - DNA, 25 bp, Homo sapien
gatatttctcaggtctacacacgga

SEQ ID NO: 2457277 - DNA, 25 bp, Homo sapien
caaggccctcaggtatgtaagtgtg

SEQ ID NO: 2457278 - DNA, 25 bp, Homo sapien
cctctctaaattgtaataaacacaa

SEQ ID NO: 2457279 - DNA, 25 bp, Homo sapien
ctctctaaattgtaataaacacaag

SEQ ID NO: 2457280 - DNA, 25 bp, Homo sapien
tcctctctaaattgtaataaacaca

SEQ ID NO: 2457281 - DNA, 25 bp, Homo sapien
acttctggactgctgatatcattta

SEQ ID NO: 2457282 - DNA, 25 bp, Homo sapien
tatttacatcttattacattttgcc

SEQ ID NO: 2457283 - DNA, 25 bp, Homo sapien
aatactgaatggctaccaatacccc

SEQ ID NO: 2457284 - DNA, 25 bp, Homo sapien
ttgccaagacttctggactgctgat

SEQ ID NO: 2457285 - DNA, 25 bp, Homo sapien
tccactgccaatttatactggcagg

SEQ ID NO: 2457286 - DNA, 25 bp, Homo sapien
ccgttccactgccaatttatactgg

SEQ ID NO: 2457287 - DNA, 25 bp, Homo sapien
taccgttccactgccaatttatact

SEQ ID NO: 2457288 - DNA, 25 bp, Homo sapien
gttccactgccaatttatactggca

SEQ ID NO: 2457289 - DNA, 25 bp, Homo sapien
caacagcttgaacccaatgcacagt

SEQ ID NO: 2457290 - DNA, 25 bp, Homo sapien
caccccaataatcttcaggtacaac

SEQ ID NO: 2457291 - DNA, 25 bp, Homo sapien
ataatcttcaggtacaacaaaccat

SEQ ID NO: 2457292 - DNA, 25 bp, Homo sapien
aaaccattcacaatctcctggacca

SEQ ID NO: 2457293 - DNA, 25 bp, Homo sapien
aaccattcacaatctcctggaccaa

SEQ ID NO: 2457294 - DNA, 25 bp, Homo sapien
tgtgaaacttttaggataataaatc

SEQ ID NO: 2457295 - DNA, 25 bp, Homo sapien
ctgtgaaacttttaggataataaat

SEQ ID NO: 2457296 - DNA, 25 bp, Homo sapien
gtgaaacttttaggataataaatca

SEQ ID NO: 2457297 - DNA, 25 bp, Homo sapien
tgaaacttttaggataataaatcat

SEQ ID NO: 2457298 - DNA, 25 bp, Homo sapien
tggtgtccgactccctggaactttc

SEQ ID NO: 2457299 - DNA, 25 bp, Homo sapien
ctggtgtccgactccctggaacttt

SEQ ID NO: 2457300 - DNA, 25 bp, Homo sapien
tgtattcatgcccagaatggtatgc

SEQ ID NO: 2457301 - DNA, 25 bp, Homo sapien
tgctgacaccacacgcgcaaaagca

SEQ ID NO: 2457302 - DNA, 25 bp, Homo sapien
caccacacgcgcaaaagcaggaagt

SEQ ID NO: 2457303 - DNA, 25 bp, Homo sapien
aatggtatgcccaacatgggttaga

SEQ ID NO: 2457304 - DNA, 25 bp, Homo sapien
ttgttatcagagaggtcaatgttgg

SEQ ID NO: 2457305 - DNA, 25 bp, Homo sapien
gttatcagagaggtcaatgttggtc

SEQ ID NO: 2457306 - DNA, 25 bp, Homo sapien
ttttgttatcagagaggtcaatgtt

SEQ ID NO: 2457307 - DNA, 25 bp, Homo sapien
tatcagagaggtcaatgttggtccc

SEQ ID NO: 2457308 - DNA, 25 bp, Homo sapien
tgtggattcgttatctgaatgatct

SEQ ID NO: 2457309 - DNA, 25 bp, Homo sapien
tctgaagatgtggattcgttatctg

SEQ ID NO: 2457310 - DNA, 25 bp, Homo sapien
ggattcgttatctgaatgatctttg

SEQ ID NO: 2457311 - DNA, 25 bp, Homo sapien
gaagatgtggattcgttatctgaat

SEQ ID NO: 2457312 - DNA, 25 bp, Homo sapien
acaagtggcagccaaaaaatgggaa

SEQ ID NO: 2457313 - DNA, 25 bp, Homo sapien
catacaagtggcagccaaaaaatgg

SEQ ID NO: 2457314 - DNA, 25 bp, Homo sapien
tacaagtggcagccaaaaaatggga

SEQ ID NO: 2457315 - DNA, 25 bp, Homo sapien
atacaagtggcagccaaaaaatggg

SEQ ID NO: 2457316 - DNA, 25 bp, Homo sapien
ccaaaaggacagagcaatggctgta

SEQ ID NO: 2457317 - DNA, 25 bp, Homo sapien
aaagtccacctttttgcaagccagg

SEQ ID NO: 2457318 - DNA, 25 bp, Homo sapien
tgattttggctactatagggctttg

SEQ ID NO: 2457319 - DNA, 25 bp, Homo sapien
tggtatagagcaattatcagcctga

SEQ ID NO: 2457320 - DNA, 25 bp, Homo sapien
gacattacaggcacatgataccatg

SEQ ID NO: 2457321 - DNA, 25 bp, Homo sapien
tacatactgtaattttgcttacatt

SEQ ID NO: 2457322 - DNA, 25 bp, Homo sapien
catactgtaattttgcttacatttt

SEQ ID NO: 2457323 - DNA, 25 bp, Homo sapien
acatactgtaattttgcttacattt

SEQ ID NO: 2457324 - DNA, 25 bp, Homo sapien
ggatgctgaggcaagcagaccacct

SEQ ID NO: 2457325 - DNA, 25 bp, Homo sapien
cacctgaggtcaggagttcaagaca

SEQ ID NO: 2457326 - DNA, 25 bp, Homo sapien
aattagttgggcatgatggcaggtg

SEQ ID NO: 2457327 - DNA, 25 bp, Homo sapien
agcctggccaacatggtgaaaccct

SEQ ID NO: 2457328 - DNA, 25 bp, Homo sapien
aaggaggaagcctggtattgtgcgt

SEQ ID NO: 2457329 - DNA, 25 bp, Homo sapien
agcctggtattgtgcgtatttggca

SEQ ID NO: 2457330 - DNA, 25 bp, Homo sapien
ttgtgcgtatttggcaattgtagta

SEQ ID NO: 2457331 - DNA, 25 bp, Homo sapien
tattgtgcgtatttggcaattgtag

SEQ ID NO: 2457332 - DNA, 25 bp, Homo sapien
attgttagcttctaccaaagttttg

SEQ ID NO: 2457333 - DNA, 25 bp, Homo sapien
gttcattgttagcttctaccaaagt

SEQ ID NO: 2457334 - DNA, 25 bp, Homo sapien
atgttcattgttagcttctaccaaa

SEQ ID NO: 2457335 - DNA, 25 bp, Homo sapien
tcattgttagcttctaccaaagttt

SEQ ID NO: 2457336 - DNA, 25 bp, Homo sapien
ctccagcaaggccacgtattactgt

SEQ ID NO: 2457337 - DNA, 25 bp, Homo sapien
cagcaaggccacgtattactgtaac

SEQ ID NO: 2457338 - DNA, 25 bp, Homo sapien
caaggccacgtattactgtaacagg

SEQ ID NO: 2457339 - DNA, 25 bp, Homo sapien
caaaattgatgtaatggaggaaaga

SEQ ID NO: 2457340 - DNA, 25 bp, Homo sapien
gcagctattagacaagccattttta

SEQ ID NO: 2457341 - DNA, 25 bp, Homo sapien
gctattagacaagccatttttacct

SEQ ID NO: 2457342 - DNA, 25 bp, Homo sapien
tgcagctattagacaagccattttt

SEQ ID NO: 2457343 - DNA, 25 bp, Homo sapien
aaatgcagctattagacaagccatt

SEQ ID NO: 2457344 - DNA, 25 bp, Homo sapien
ttgtgaagaattttcccacactaac

SEQ ID NO: 2457345 - DNA, 25 bp, Homo sapien
tagatctgtggctagctaaaggcag

SEQ ID NO: 2457346 - DNA, 25 bp, Homo sapien
tgaactggggcatatagacactgac

SEQ ID NO: 2457347 - DNA, 25 bp, Homo sapien
taagatctgagaagtagatctgtgg

SEQ ID NO: 2457348 - DNA, 25 bp, Homo sapien
tccattgactgtgtgtaatccactg

SEQ ID NO: 2457349 - DNA, 25 bp, Homo sapien
ttagatgtgtctccagtatgcctgc

SEQ ID NO: 2457350 - DNA, 25 bp, Homo sapien
tgggctgacccagtggaaaacagag

SEQ ID NO: 2457351 - DNA, 25 bp, Homo sapien
gaaagtcccttgacatcagcacagc

SEQ ID NO: 2457352 - DNA, 25 bp, Homo sapien
tgctagttgcctggtgatactgggc

SEQ ID NO: 2457353 - DNA, 25 bp, Homo sapien
agctccactggacaaaagtttttca

SEQ ID NO: 2457354 - DNA, 25 bp, Homo sapien
aagtttttcaacacaagcagggcga

SEQ ID NO: 2457355 - DNA, 25 bp, Homo sapien
gatgaatcagttatggccccgttat

SEQ ID NO: 2457356 - DNA, 25 bp, Homo sapien
gcaccatgtggttgtcgattagaga

SEQ ID NO: 2457357 - DNA, 25 bp, Homo sapien
tatctctatttgctcgcagttgttc

SEQ ID NO: 2457358 - DNA, 25 bp, Homo sapien
attatctctatttgctcgcagttgt

SEQ ID NO: 2457359 - DNA, 25 bp, Homo sapien
ctttctaactgttccagctgatgct

SEQ ID NO: 2457360 - DNA, 25 bp, Homo sapien
aactgactttctaactgttccagct

SEQ ID NO: 2457361 - DNA, 25 bp, Homo sapien
tgtggtgtcaaacacaacgaataaa

SEQ ID NO: 2457362 - DNA, 25 bp, Homo sapien
tcaaacacaacgaataaacttgctg

SEQ ID NO: 2457363 - DNA, 25 bp, Homo sapien
cgaataaacttgctgtactggatga

SEQ ID NO: 2457364 - DNA, 25 bp, Homo sapien
aagactctggccaccattccagtta

SEQ ID NO: 2457365 - DNA, 25 bp, Homo sapien
ttcttcttggcaggactggacaggc

SEQ ID NO: 2457366 - DNA, 25 bp, Homo sapien
catgtgtagtgacaaggattgctgt

SEQ ID NO: 2457367 - DNA, 25 bp, Homo sapien
tggtgtttgactgtggtttaataca

SEQ ID NO: 2457368 - DNA, 25 bp, Homo sapien
ggccttctacttggctagaagtaat

SEQ ID NO: 2457369 - DNA, 25 bp, Homo sapien
taaacttgattactgaagagtgaaa

SEQ ID NO: 2457370 - DNA, 25 bp, Homo sapien
aagtcaatcctttgtttagtgaaat

SEQ ID NO: 2457371 - DNA, 25 bp, Homo sapien
ggcacctacagaacataacccaact

SEQ ID NO: 2457372 - DNA, 25 bp, Homo sapien
tctctattttaaagtcaatcctttg

SEQ ID NO: 2457373 - DNA, 25 bp, Homo sapien
tagactactttgtggaaggttacac

SEQ ID NO: 2457374 - DNA, 25 bp, Homo sapien
tgcggggattggtaggctccatgcc

SEQ ID NO: 2457375 - DNA, 25 bp, Homo sapien
catgcctcctcaatactaggaagta

SEQ ID NO: 2457376 - DNA, 25 bp, Homo sapien
tattctgtagactactttgtggaag

SEQ ID NO: 2457377 - DNA, 25 bp, Homo sapien
aattcttgcagcaagcgtagaggta

SEQ ID NO: 2457378 - DNA, 25 bp, Homo sapien
cttgcagcaagcgtagaggtattac

SEQ ID NO: 2457379 - DNA, 25 bp, Homo sapien
taattcttgcagcaagcgtagaggt

SEQ ID NO: 2457380 - DNA, 25 bp, Homo sapien
ttcttgcagcaagcgtagaggtatt

SEQ ID NO: 2457381 - DNA, 25 bp, Homo sapien
catcttgaggttgattgcaggattc

SEQ ID NO: 2457382 - DNA, 25 bp, Homo sapien
ttaatggcatcttgaggttgattgc

SEQ ID NO: 2457383 - DNA, 25 bp, Homo sapien
tggcatcttgaggttgattgcagga

SEQ ID NO: 2457384 - DNA, 25 bp, Homo sapien
gcatttaatggcatcttgaggttga

SEQ ID NO: 2457385 - DNA, 25 bp, Homo sapien
tatgcctgtaaagcatccataggct

SEQ ID NO: 2457386 - DNA, 25 bp, Homo sapien
ggctgattttgctgctgatacaaca

SEQ ID NO: 2457387 - DNA, 25 bp, Homo sapien
gcccatggtccaattgtacagcaca

SEQ ID NO: 2457388 - DNA, 25 bp, Homo sapien
gtacagcacaaatatatgcctgtaa

SEQ ID NO: 2457389 - DNA, 25 bp, Homo sapien
gatataaaggcatcctgaactttcc

SEQ ID NO: 2457390 - DNA, 25 bp, Homo sapien
gtaagatataaaggcatcctgaact

SEQ ID NO: 2457391 - DNA, 25 bp, Homo sapien
cctgaactttcccaatacttgaata

SEQ ID NO: 2457392 - DNA, 25 bp, Homo sapien
aaaggcatcctgaactttcccaata

SEQ ID NO: 2457393 - DNA, 25 bp, Homo sapien
tttgtctcctactagatccatatta

SEQ ID NO: 2457394 - DNA, 25 bp, Homo sapien
tcctactagatccatattatgatgc

SEQ ID NO: 2457395 - DNA, 25 bp, Homo sapien
gaaaataccacgattggccagaatt

SEQ ID NO: 2457396 - DNA, 25 bp, Homo sapien
agatccatattatgatgcatccaac

SEQ ID NO: 2457397 - DNA, 25 bp, Homo sapien
taatagctgctttcggacttttacc

SEQ ID NO: 2457398 - DNA, 25 bp, Homo sapien
tccgcctctcaacaatgtactggga

SEQ ID NO: 2457399 - DNA, 25 bp, Homo sapien
tacacagtgtgtgccgcagattttt

SEQ ID NO: 2457400 - DNA, 25 bp, Homo sapien
gagccataagagtggtacacagtgt

SEQ ID NO: 2457401 - DNA, 25 bp, Homo sapien
actgttgcaatacagttgcttttac

SEQ ID NO: 2457402 - DNA, 25 bp, Homo sapien
ctaactgttgcaatacagttgcttt

SEQ ID NO: 2457403 - DNA, 25 bp, Homo sapien
aactgttgcaatacagttgctttta

SEQ ID NO: 2457404 - DNA, 25 bp, Homo sapien
taactgttgcaatacagttgctttt

SEQ ID NO: 2457405 - DNA, 25 bp, Homo sapien
catatgcctcctttgcagaatgata

SEQ ID NO: 2457406 - DNA, 25 bp, Homo sapien
cctcctttgcagaatgatacttcct

SEQ ID NO: 2457407 - DNA, 25 bp, Homo sapien
tatgcctcctttgcagaatgatact

SEQ ID NO: 2457408 - DNA, 25 bp, Homo sapien
tgcctcctttgcagaatgatacttc

SEQ ID NO: 2457409 - DNA, 25 bp, Homo sapien
cattaaatataacaaggtgtaacca

SEQ ID NO: 2457410 - DNA, 25 bp, Homo sapien
taaagctacaggagtattctatcag

SEQ ID NO: 2457411 - DNA, 25 bp, Homo sapien
cagccatgtttcagattacagcaaa

SEQ ID NO: 2457412 - DNA, 25 bp, Homo sapien
aagtacagaatcaaaacagtgctta

SEQ ID NO: 2457413 - DNA, 25 bp, Homo sapien
tagaactcctacaatttgacaacca

SEQ ID NO: 2457414 - DNA, 25 bp, Homo sapien
taagaatggtacaaatactgtgcaa

SEQ ID NO: 2457415 - DNA, 25 bp, Homo sapien
tctcagcaattccactagatacata

SEQ ID NO: 2457416 - DNA, 25 bp, Homo sapien
gaacccttgtgtattgccattaaga

SEQ ID NO: 2457417 - DNA, 25 bp, Homo sapien
ccaaaagaagtaacaatagatgatg

SEQ ID NO: 2457418 - DNA, 25 bp, Homo sapien
gaaaactaacatagatgttactgca

SEQ ID NO: 2457419 - DNA, 25 bp, Homo sapien
ggcttaaggagatttactatgttaa

SEQ ID NO: 2457420 - DNA, 25 bp, Homo sapien
aagtaggcttaaggagatttactat

SEQ ID NO: 2457421 - DNA, 25 bp, Homo sapien
taaagccatcctaagatatgaggtg

SEQ ID NO: 2457422 - DNA, 25 bp, Homo sapien
tactaagcagtgtgtcatatacctg

SEQ ID NO: 2457423 - DNA, 25 bp, Homo sapien
tgtaatctccacaaatacccacgtg

SEQ ID NO: 2457424 - DNA, 25 bp, Homo sapien
actgatgtagttaggctttgtgccc

SEQ ID NO: 2457425 - DNA, 25 bp, Homo sapien
tagtactatgtggaacaggagtact

SEQ ID NO: 2457426 - DNA, 25 bp, Homo sapien
tctatctcttcatcataactaactg

SEQ ID NO: 2457427 - DNA, 25 bp, Homo sapien
tcttcatcataactaactgctctgg

SEQ ID NO: 2457428 - DNA, 25 bp, Homo sapien
actatgtggaacaggagtactaaaa

SEQ ID NO: 2457429 - DNA, 25 bp, Homo sapien
gctagcagtcctagttactccaggg

SEQ ID NO: 2457430 - DNA, 25 bp, Homo sapien
aaaataaactggcttggaatgctag

SEQ ID NO: 2457431 - DNA, 25 bp, Homo sapien
tgaagcgtgaggatcactttgtccc

SEQ ID NO: 2457432 - DNA, 25 bp, Homo sapien
aaattgtccccttaatgcactccag

SEQ ID NO: 2457433 - DNA, 25 bp, Homo sapien
tataatacccacaactcaaatcgtc

SEQ ID NO: 2457434 - DNA, 25 bp, Homo sapien
tttcatctaaagcataggtgactgt

SEQ ID NO: 2457435 - DNA, 25 bp, Homo sapien
caaacagccttgaactaatggtaac

SEQ ID NO: 2457436 - DNA, 25 bp, Homo sapien
tgcagggttacatgaaagcttctaa

SEQ ID NO: 2457437 - DNA, 25 bp, Homo sapien
gggtttcatacaaatgggcaatatg

SEQ ID NO: 2457438 - DNA, 25 bp, Homo sapien
tacaaatgggcaatatgaaattgaa

SEQ ID NO: 2457439 - DNA, 25 bp, Homo sapien
gtttcatacaaatgggcaatatgaa

SEQ ID NO: 2457440 - DNA, 25 bp, Homo sapien
ctgggtttcatacaaatgggcaata

SEQ ID NO: 2457441 - DNA, 25 bp, Homo sapien
tattcaattatagactcaaataggt

SEQ ID NO: 2457442 - DNA, 25 bp, Homo sapien
taactaggtatactcagtatggcaa

SEQ ID NO: 2457443 - DNA, 25 bp, Homo sapien
tcagtatggcaatattcaattatag

SEQ ID NO: 2457444 - DNA, 25 bp, Homo sapien
gactcaaataggtaaaaaattgaca

SEQ ID NO: 2457445 - DNA, 25 bp, Homo sapien
tctgaatcaggcacatgccttctca

SEQ ID NO: 2457446 - DNA, 25 bp, Homo sapien
gaaaacatagacaccataaagggag

SEQ ID NO: 2457447 - DNA, 25 bp, Homo sapien
caagcttacggtatgtgcaaatcct

SEQ ID NO: 2457448 - DNA, 25 bp, Homo sapien
gctctgtgacataccaatcatttct

SEQ ID NO: 2457449 - DNA, 25 bp, Homo sapien
tggattacagtcaatcaaggctaac

SEQ ID NO: 2457450 - DNA, 25 bp, Homo sapien
catggattacagtcaatcaaggcta

SEQ ID NO: 2457451 - DNA, 25 bp, Homo sapien
atggattacagtcaatcaaggctaa

SEQ ID NO: 2457452 - DNA, 25 bp, Homo sapien
tattggcctaattcagactggatgg

SEQ ID NO: 2457453 - DNA, 25 bp, Homo sapien
cagggaccttagctttgcagttgaa

SEQ ID NO: 2457454 - DNA, 25 bp, Homo sapien
tggtgccgaagaccccatgacagtt

SEQ ID NO: 2457455 - DNA, 25 bp, Homo sapien
gcagcccatattgtacactcctgag

SEQ ID NO: 2457456 - DNA, 25 bp, Homo sapien
tctctggccaaggttgcaggtaatt

SEQ ID NO: 2457457 - DNA, 25 bp, Homo sapien
aaccgccgaatctcaggttcaaggg

SEQ ID NO: 2457458 - DNA, 25 bp, Homo sapien
tgcaggtaattgacctcagaaaaca

SEQ ID NO: 2457459 - DNA, 25 bp, Homo sapien
agctcactggaaccgccgaatctca

SEQ ID NO: 2457460 - DNA, 25 bp, Homo sapien
tgaaagtacaagatgtccagcacag

SEQ ID NO: 2457461 - DNA, 25 bp, Homo sapien
taggacctgcatggataagtaaaag

SEQ ID NO: 2457462 - DNA, 25 bp, Homo sapien
gatctaaccacctacaaatggatgc

SEQ ID NO: 2457463 - DNA, 25 bp, Homo sapien
gacaggtaactacatgcctactaag

SEQ ID NO: 2457464 - DNA, 25 bp, Homo sapien
gaatttccttggctcgacaaaagct

SEQ ID NO: 2457465 - DNA, 25 bp, Homo sapien
tgaatttccttggctcgacaaaagc

SEQ ID NO: 2457466 - DNA, 25 bp, Homo sapien
tttccttggctcgacaaaagctggg

SEQ ID NO: 2457467 - DNA, 25 bp, Homo sapien
agcccaagtcgtaaatgaatttcct

SEQ ID NO: 2457468 - DNA, 25 bp, Homo sapien
gcattgtagtagaagtagaccaaac

SEQ ID NO: 2457469 - DNA, 25 bp, Homo sapien
cattgtagtagaagtagaccaaacc

SEQ ID NO: 2457470 - DNA, 25 bp, Homo sapien
atgcattgtagtagaagtagaccaa

SEQ ID NO: 2457471 - DNA, 25 bp, Homo sapien
tgcattgtagtagaagtagaccaaa

SEQ ID NO: 2457472 - DNA, 25 bp, Homo sapien
tctggagtatcaacaaagagatgag

SEQ ID NO: 2457473 - DNA, 25 bp, Homo sapien
tgtcagcagaacaagccaaaagctt

SEQ ID NO: 2457474 - DNA, 25 bp, Homo sapien
ggaactggtactccggattcttctg

SEQ ID NO: 2457475 - DNA, 25 bp, Homo sapien
acaatttcccagcagagcagtgtca

SEQ ID NO: 2457476 - DNA, 25 bp, Homo sapien
gcttagtgccacgttaatggaggga

SEQ ID NO: 2457477 - DNA, 25 bp, Homo sapien
cactcaagtaattcatgaaagccag

SEQ ID NO: 2457478 - DNA, 25 bp, Homo sapien
ttatattaggaatcaacacatggcc

SEQ ID NO: 2457479 - DNA, 25 bp, Homo sapien
aaatgtattttgagtatgatctgcc

SEQ ID NO: 2457480 - DNA, 25 bp, Homo sapien
ttccagtagtcagcctgtaaactgt

SEQ ID NO: 2457481 - DNA, 25 bp, Homo sapien
cttccagtagtcagcctgtaaactg

SEQ ID NO: 2457482 - DNA, 25 bp, Homo sapien
gtaaactgtaatatctctgatatgc

SEQ ID NO: 2457483 - DNA, 25 bp, Homo sapien
agcctgtaaactgtaatatctctga

SEQ ID NO: 2457484 - DNA, 25 bp, Homo sapien
aaaataattattagccaaatcatat

SEQ ID NO: 2457485 - DNA, 25 bp, Homo sapien
ctttaagggacatgcaggttgtagc

SEQ ID NO: 2457486 - DNA, 25 bp, Homo sapien
cagcttgtttacatagtcatggaca

SEQ ID NO: 2457487 - DNA, 25 bp, Homo sapien
gctatgggcattcatgaacaagtgt

SEQ ID NO: 2457488 - DNA, 25 bp, Homo sapien
gaagtacacactataattctctggc

SEQ ID NO: 2457489 - DNA, 25 bp, Homo sapien
gacctaattggcaaaagaagtcaga

SEQ ID NO: 2457490 - DNA, 25 bp, Homo sapien
tcagcttttaagattaaagattcgt

SEQ ID NO: 2457491 - DNA, 25 bp, Homo sapien
ttaaagattcgtagcagcgaacagc

SEQ ID NO: 2457492 - DNA, 25 bp, Homo sapien
gaataatcttccaacaagaggttga

SEQ ID NO: 2457493 - DNA, 25 bp, Homo sapien
tacttacacttaggacaccagggat

SEQ ID NO: 2457494 - DNA, 25 bp, Homo sapien
aaagatggcgcgattgttgtaccgt

SEQ ID NO: 2457495 - DNA, 25 bp, Homo sapien
gcaacaattcacgtgggagtaacta

SEQ ID NO: 2457496 - DNA, 25 bp, Homo sapien
taagcaacatgaagctacgtcagcg

SEQ ID NO: 2457497 - DNA, 25 bp, Homo sapien
gccttggtagagcaaagtgcggacc

SEQ ID NO: 2457498 - DNA, 25 bp, Homo sapien
ttttccgaccccttggccatggagc

SEQ ID NO: 2457499 - DNA, 25 bp, Homo sapien
taaatactggctgggcggtaaggaa

SEQ ID NO: 2457500 - DNA, 25 bp, Homo sapien
catgtggtgtagacccggtttagcc

SEQ ID NO: 2457501 - DNA, 25 bp, Homo sapien
tcttcatgaagcctcacgaacccga

SEQ ID NO: 2457502 - DNA, 25 bp, Homo sapien
ttgcctagtagggtcttcgttctgg

SEQ ID NO: 2457503 - DNA, 25 bp, Homo sapien
aagcctcacgaacccgaagagacgg

SEQ ID NO: 2457504 - DNA, 25 bp, Homo sapien
tagtagggtcttcgttctggcgcca

SEQ ID NO: 2457505 - DNA, 25 bp, Homo sapien
atcaacgtgggcaagctgcgtccag

SEQ ID NO: 2457506 - DNA, 25 bp, Homo sapien
agtgacttgctccttcccgagtcca

SEQ ID NO: 2457507 - DNA, 25 bp, Homo sapien
gacagcgacagattggtgagtgcca

SEQ ID NO: 2457508 - DNA, 25 bp, Homo sapien
aggccttcccggagagtatcgccag

SEQ ID NO: 2457509 - DNA, 25 bp, Homo sapien
tccatgccaccaagcgcctcccttt

SEQ ID NO: 2457510 - DNA, 25 bp, Homo sapien
cgcggctcgcttttccttccgccat

SEQ ID NO: 2457511 - DNA, 25 bp, Homo sapien
tccctttcctcgactgtcaggctaa

SEQ ID NO: 2457512 - DNA, 25 bp, Homo sapien
ctgtcaggctaacagactcctcttc

SEQ ID NO: 2457513 - DNA, 25 bp, Homo sapien
caccgaaggcaacagcggcggtagt

SEQ ID NO: 2457514 - DNA, 25 bp, Homo sapien
gcctcatcaccgaaggcaacagcgg

SEQ ID NO: 2457515 - DNA, 25 bp, Homo sapien
ctttgcctcatcaccgaaggcaaca

SEQ ID NO: 2457516 - DNA, 25 bp, Homo sapien
gcaacagcggcggtagtgagcgaca

SEQ ID NO: 2457517 - DNA, 25 bp, Homo sapien
acaaatttccaagtcccacgacgat

SEQ ID NO: 2457518 - DNA, 25 bp, Homo sapien
caaatttccaagtcccacgacgata

SEQ ID NO: 2457519 - DNA, 25 bp, Homo sapien
caacaaatttccaagtcccacgacg

SEQ ID NO: 2457520 - DNA, 25 bp, Homo sapien
cttaatcgagtagttgaaaagacgc

SEQ ID NO: 2457521 - DNA, 25 bp, Homo sapien
gactgtgacgccaattttatcgcct

SEQ ID NO: 2457522 - DNA, 25 bp, Homo sapien
ccttcaatcgctgcttgagactgtg

SEQ ID NO: 2457523 - DNA, 25 bp, Homo sapien
gacgccaattttatcgcctcctcag

SEQ ID NO: 2457524 - DNA, 25 bp, Homo sapien
cggctacctggatcacatctgggaa

SEQ ID NO: 2457525 - DNA, 25 bp, Homo sapien
tgtaattgtgtcacgggcgaacccc

SEQ ID NO: 2457526 - DNA, 25 bp, Homo sapien
cttagttgtagccaatctaggcgac

SEQ ID NO: 2457527 - DNA, 25 bp, Homo sapien
aagacttaagctaccgaagcacggg

SEQ ID NO: 2457528 - DNA, 25 bp, Homo sapien
caaggacctaggaacatgacagagg

SEQ ID NO: 2457529 - DNA, 25 bp, Homo sapien
ttcgccaaggacctaggaacatgac

SEQ ID NO: 2457530 - DNA, 25 bp, Homo sapien
cagccagttcgccaaggacctagga

SEQ ID NO: 2457531 - DNA, 25 bp, Homo sapien
cagttcgccaaggacctaggaacat

SEQ ID NO: 2457532 - DNA, 25 bp, Homo sapien
cctgtaggttgtgctagttaaatgc

SEQ ID NO: 2457533 - DNA, 25 bp, Homo sapien
tgatggtcacgtctatggagaaaag

SEQ ID NO: 2457534 - DNA, 25 bp, Homo sapien
tagtctctgggatggaacaacctgt

SEQ ID NO: 2457535 - DNA, 25 bp, Homo sapien
ttgcagttgcgatacgcttgaaggg

SEQ ID NO: 2457536 - DNA, 25 bp, Homo sapien
acccacggggcgcaaatgcgaaaag

SEQ ID NO: 2457537 - DNA, 25 bp, Homo sapien
gggcgcaaatgcgaaaagaggacac

SEQ ID NO: 2457538 - DNA, 25 bp, Homo sapien
cccacggggcgcaaatgcgaaaaga

SEQ ID NO: 2457539 - DNA, 25 bp, Homo sapien
cgcaaatgcgaaaagaggacaccat

SEQ ID NO: 2457540 - DNA, 25 bp, Homo sapien
ccttgcgaatgcgagaccttgcggg

SEQ ID NO: 2457541 - DNA, 25 bp, Homo sapien
actgtcacaagccttgcgaatgcga

SEQ ID NO: 2457542 - DNA, 25 bp, Homo sapien
gagtccgtaatgaggctcccactgt

SEQ ID NO: 2457543 - DNA, 25 bp, Homo sapien
aagctgcgcaggccctaaaccttca

SEQ ID NO: 2457544 - DNA, 25 bp, Homo sapien
gacttttggccctaaggccttgtca

SEQ ID NO: 2457545 - DNA, 25 bp, Homo sapien
gtcacctccataggctggttctttg

SEQ ID NO: 2457546 - DNA, 25 bp, Homo sapien
acctccataggctggttctttgccc

SEQ ID NO: 2457547 - DNA, 25 bp, Homo sapien
caagacttttggccctaaggccttg

SEQ ID NO: 2457548 - DNA, 25 bp, Homo sapien
agagaaggcataatatcttatgacc

SEQ ID NO: 2457549 - DNA, 25 bp, Homo sapien
tctccactgaccaagtctaaagaga

SEQ ID NO: 2457550 - DNA, 25 bp, Homo sapien
cctagggaatcaacgtggcaactgc

SEQ ID NO: 2457551 - DNA, 25 bp, Homo sapien
tatgacctcagtcggtaagccaggc

SEQ ID NO: 2457552 - DNA, 25 bp, Homo sapien
tctttaactccaaataaagaaggca

SEQ ID NO: 2457553 - DNA, 25 bp, Homo sapien
ctttaactccaaataaagaaggcat

SEQ ID NO: 2457554 - DNA, 25 bp, Homo sapien
aattttagggttagcctgcatcatc

SEQ ID NO: 2457555 - DNA, 25 bp, Homo sapien
cacaattttagggttagcctgcatc

SEQ ID NO: 2457556 - DNA, 25 bp, Homo sapien
tgccacaattttagggttagcctgc

SEQ ID NO: 2457557 - DNA, 25 bp, Homo sapien
ttatgccacaattttagggttagcc

SEQ ID NO: 2457558 - DNA, 25 bp, Homo sapien
aagccgtggtcactatcaatatcag

SEQ ID NO: 2457559 - DNA, 25 bp, Homo sapien
cgtggtcactatcaatatcagtggg

SEQ ID NO: 2457560 - DNA, 25 bp, Homo sapien
gctgctgtactccttttatggtatt

SEQ ID NO: 2457561 - DNA, 25 bp, Homo sapien
cagaaaagtaaaagccgtggtcact

SEQ ID NO: 2457562 - DNA, 25 bp, Homo sapien
tagcaatcacacttagctccctgac

SEQ ID NO: 2457563 - DNA, 25 bp, Homo sapien
tttctccggactgtagcaatcacac

SEQ ID NO: 2457564 - DNA, 25 bp, Homo sapien
ggactgtagcaatcacacttagctc

SEQ ID NO: 2457565 - DNA, 25 bp, Homo sapien
tccggactgtagcaatcacacttag

SEQ ID NO: 2457566 - DNA, 25 bp, Homo sapien
catattgtctatgacaacacttggg

SEQ ID NO: 2457567 - DNA, 25 bp, Homo sapien
gagtaagaagcatcttgggtgtcca

SEQ ID NO: 2457568 - DNA, 25 bp, Homo sapien
tataataaaactacccatattgtct

SEQ ID NO: 2457569 - DNA, 25 bp, Homo sapien
cttgggacggagtaagaagcatctt

SEQ ID NO: 2457570 - DNA, 25 bp, Homo sapien
tagttccttatgattcccaagcata

SEQ ID NO: 2457571 - DNA, 25 bp, Homo sapien
tatgattcccaagcataacacttga

SEQ ID NO: 2457572 - DNA, 25 bp, Homo sapien
cttttagttccttatgattcccaag

SEQ ID NO: 2457573 - DNA, 25 bp, Homo sapien
aagcataacacttgataactcagcc

SEQ ID NO: 2457574 - DNA, 25 bp, Homo sapien
catccaccgctggaacactcatggg

SEQ ID NO: 2457575 - DNA, 25 bp, Homo sapien
gagagagaacaacatccaccgctgg

SEQ ID NO: 2457576 - DNA, 25 bp, Homo sapien
ttctgctgaagcatggttgacactg

SEQ ID NO: 2457577 - DNA, 25 bp, Homo sapien
ctgctgaagcatggttgacactggt

SEQ ID NO: 2457578 - DNA, 25 bp, Homo sapien
taagacaccagaatcaacagaggcc

SEQ ID NO: 2457579 - DNA, 25 bp, Homo sapien
agacaccagaatcaacagaggccat

SEQ ID NO: 2457580 - DNA, 25 bp, Homo sapien
gtaagacaccagaatcaacagaggc

SEQ ID NO: 2457581 - DNA, 25 bp, Homo sapien
aagacaccagaatcaacagaggcca

SEQ ID NO: 2457582 - DNA, 25 bp, Homo sapien
gatggtccctgtgttgtgtttttct

SEQ ID NO: 2457583 - DNA, 25 bp, Homo sapien
tcaggcaggatggtccctgtgttgt

SEQ ID NO: 2457584 - DNA, 25 bp, Homo sapien
gaatttagcaatgtatgtgtgatct

SEQ ID NO: 2457585 - DNA, 25 bp, Homo sapien
ccttgagtattatggaatttagcaa

SEQ ID NO: 2457586 - DNA, 25 bp, Homo sapien
ttggaagtcccggcaggagctaaca

SEQ ID NO: 2457587 - DNA, 25 bp, Homo sapien
tcaaattccacataaggagaactgt

SEQ ID NO: 2457588 - DNA, 25 bp, Homo sapien
gactaattctgcatcaaattccaca

SEQ ID NO: 2457589 - DNA, 25 bp, Homo sapien
cataaggagaactgtttgcagggag

SEQ ID NO: 2457590 - DNA, 25 bp, Homo sapien
tgcaaatgactaattctgcatcaaa

SEQ ID NO: 2457591 - DNA, 25 bp, Homo sapien
caagatgccatgttgatgcttgcat

SEQ ID NO: 2457592 - DNA, 25 bp, Homo sapien
tccttcctgcctgtttgcaagatgc

SEQ ID NO: 2457593 - DNA, 25 bp, Homo sapien
ttgccttacgtattttttgcaggta

SEQ ID NO: 2457594 - DNA, 25 bp, Homo sapien
ctttagtcccaggaccaattgatga

SEQ ID NO: 2457595 - DNA, 25 bp, Homo sapien
cagtaggaacagcttgggttggtca

SEQ ID NO: 2457596 - DNA, 25 bp, Homo sapien
tggcagtcccagtaggaacagcttg

SEQ ID NO: 2457597 - DNA, 25 bp, Homo sapien
gagtggggtgaacatggcagtccca

SEQ ID NO: 2457598 - DNA, 25 bp, Homo sapien
cagtcccagtaggaacagcttgggt

SEQ ID NO: 2457599 - DNA, 25 bp, Homo sapien
caggtatcgtccaggtgtcacccag

SEQ ID NO: 2457600 - DNA, 25 bp, Homo sapien
tccagatgttaccagtaatgagccc

SEQ ID NO: 2457601 - DNA, 25 bp, Homo sapien
aggcagcacacaggcgagtgttccc

SEQ ID NO: 2457602 - DNA, 25 bp, Homo sapien
cagtaatgagccctggttagggatc

SEQ ID NO: 2457603 - DNA, 25 bp, Homo sapien
tgagttcctcaaatacaccctgttg

SEQ ID NO: 2457604 - DNA, 25 bp, Homo sapien
atttgcggccgcctgcgttgaaagc

SEQ ID NO: 2457605 - DNA, 25 bp, Homo sapien
gaaagctgcgaagttgacagtgagt

SEQ ID NO: 2457606 - DNA, 25 bp, Homo sapien
tgtgagttcctcaaatacaccctgt

SEQ ID NO: 2457607 - DNA, 25 bp, Homo sapien
caagacatgcatacttccagaggca

SEQ ID NO: 2457608 - DNA, 25 bp, Homo sapien
tccagaaagatactaaactgttcaa

SEQ ID NO: 2457609 - DNA, 25 bp, Homo sapien
taactgctcagaggcccggactctc

SEQ ID NO: 2457610 - DNA, 25 bp, Homo sapien
tgtgtaagcttgttgaacttcggcc

SEQ ID NO: 2457611 - DNA, 25 bp, Homo sapien
gaagaacttctgtcaatcacggacg

SEQ ID NO: 2457612 - DNA, 25 bp, Homo sapien
gaacttctgtcaatcacggacgcat

SEQ ID NO: 2457613 - DNA, 25 bp, Homo sapien
acttctgtcaatcacggacgcatct

SEQ ID NO: 2457614 - DNA, 25 bp, Homo sapien
tcacggacgcatctggagacaagtg

SEQ ID NO: 2457615 - DNA, 25 bp, Homo sapien
tgtgattttgcatggccagactcgg

SEQ ID NO: 2457616 - DNA, 25 bp, Homo sapien
gcatggccagactcggtgtcaggta

SEQ ID NO: 2457617 - DNA, 25 bp, Homo sapien
gccagactcggtgtcaggtacagaa

SEQ ID NO: 2457618 - DNA, 25 bp, Homo sapien
tgtcaggtacagaaaggatggtcat

SEQ ID NO: 2457619 - DNA, 25 bp, Homo sapien
tataaatagtggttagctggcccat

SEQ ID NO: 2457620 - DNA, 25 bp, Homo sapien
catagttgttagaaaacctcacggg

SEQ ID NO: 2457621 - DNA, 25 bp, Homo sapien
ggtccaagactgaacacaactgaag

SEQ ID NO: 2457622 - DNA, 25 bp, Homo sapien
ggaattcccagcagtataacccttg

SEQ ID NO: 2457623 - DNA, 25 bp, Homo sapien
tggttaattggaatgagagagaact

SEQ ID NO: 2457624 - DNA, 25 bp, Homo sapien
ggctctaaatggttaattggaatga

SEQ ID NO: 2457625 - DNA, 25 bp, Homo sapien
ttaattggaatgagagagaactcct

SEQ ID NO: 2457626 - DNA, 25 bp, Homo sapien
ctttgatgtggctctaaatggttaa

SEQ ID NO: 2457627 - DNA, 25 bp, Homo sapien
atgtgtgtctttgttcttgttggtt

SEQ ID NO: 2457628 - DNA, 25 bp, Homo sapien
ggtatgtgtgtctttgttcttgttg

SEQ ID NO: 2457629 - DNA, 25 bp, Homo sapien
tatgtgtgtctttgttcttgttggt

SEQ ID NO: 2457630 - DNA, 25 bp, Homo sapien
gtatgtgtgtctttgttcttgttgg

SEQ ID NO: 2457631 - DNA, 25 bp, Homo sapien
catcaacatgggaagcaccctgctg

SEQ ID NO: 2457632 - DNA, 25 bp, Homo sapien
agctgggcctaaacttagttgctgc

SEQ ID NO: 2457633 - DNA, 25 bp, Homo sapien
tggcagctgggcctaaacttagttg

SEQ ID NO: 2457634 - DNA, 25 bp, Homo sapien
acatgggaagcaccctgctggtgag

SEQ ID NO: 2457635 - DNA, 25 bp, Homo sapien
gataggggagtagatgggcgcccct

SEQ ID NO: 2457636 - DNA, 25 bp, Homo sapien
gagataggggagtagatgggcgccc

SEQ ID NO: 2457637 - DNA, 25 bp, Homo sapien
taggggagtagatgggcgcccctta

SEQ ID NO: 2457638 - DNA, 25 bp, Homo sapien
ggagataggggagtagatgggcgcc

SEQ ID NO: 2457639 - DNA, 25 bp, Homo sapien
tccgcctcaggtgccgtcacggccg

SEQ ID NO: 2457640 - DNA, 25 bp, Homo sapien
tcctccggcggcagctcgtgctgag

SEQ ID NO: 2457641 - DNA, 25 bp, Homo sapien
gggtcgtgctgggtcccctcgctca

SEQ ID NO: 2457642 - DNA, 25 bp, Homo sapien
catctttgtcgcagcccctttcttc

SEQ ID NO: 2457643 - DNA, 25 bp, Homo sapien
acagggacgtgtcctcagaagcggt

SEQ ID NO: 2457644 - DNA, 25 bp, Homo sapien
ggaacagggacgtgtcctcagaagc

SEQ ID NO: 2457645 - DNA, 25 bp, Homo sapien
gggacgtgtcctcagaagcggtggg

SEQ ID NO: 2457646 - DNA, 25 bp, Homo sapien
aacagggacgtgtcctcagaagcgg

SEQ ID NO: 2457647 - DNA, 25 bp, Homo sapien
tcccgaggctctcggctttggactc

SEQ ID NO: 2457648 - DNA, 25 bp, Homo sapien
ggtcccgaggctctcggctttggac

SEQ ID NO: 2457649 - DNA, 25 bp, Homo sapien
gaggtcccgaggctctcggctttgg

SEQ ID NO: 2457650 - DNA, 25 bp, Homo sapien
tggccttggccggaggtcccgaggc

SEQ ID NO: 2457651 - DNA, 25 bp, Homo sapien
cgcagctcaacgtctcgcaacggtc

SEQ ID NO: 2457652 - DNA, 25 bp, Homo sapien
gcagctcaacgtctcgcaacggtcg

SEQ ID NO: 2457653 - DNA, 25 bp, Homo sapien
ccgcagctcaacgtctcgcaacggt

SEQ ID NO: 2457654 - DNA, 25 bp, Homo sapien
tcacaggtgtaggtagtgcgttctt

SEQ ID NO: 2457655 - DNA, 25 bp, Homo sapien
ggtatggtccagtccacgctggctc

SEQ ID NO: 2457656 - DNA, 25 bp, Homo sapien
gagaacttggtatggtccagtccac

SEQ ID NO: 2457657 - DNA, 25 bp, Homo sapien
gaacttggtatggtccagtccacgc

SEQ ID NO: 2457658 - DNA, 25 bp, Homo sapien
ttggtatggtccagtccacgctggc

SEQ ID NO: 2457659 - DNA, 25 bp, Homo sapien
catgcaatgtcctgcctaacatgtt

SEQ ID NO: 2457660 - DNA, 25 bp, Homo sapien
caatgtcctgcctaacatgttgacg

SEQ ID NO: 2457661 - DNA, 25 bp, Homo sapien
catgttgacgtaaataaggtccatg

SEQ ID NO: 2457662 - DNA, 25 bp, Homo sapien
cctgcctaacatgttgacgtaaata

SEQ ID NO: 2457663 - DNA, 25 bp, Homo sapien
cctgggctcatagagtccttttatt

SEQ ID NO: 2457664 - DNA, 25 bp, Homo sapien
agtgccgggcattaatatttcttga

SEQ ID NO: 2457665 - DNA, 25 bp, Homo sapien
cacagtaacgtataacctgggctca

SEQ ID NO: 2457666 - DNA, 25 bp, Homo sapien
tatcaattgacattgcacagtaacg

SEQ ID NO: 2457667 - DNA, 25 bp, Homo sapien
tggtggataagtttatgaaggtgtc

SEQ ID NO: 2457668 - DNA, 25 bp, Homo sapien
gtggataagtttatgaaggtgtcac

SEQ ID NO: 2457669 - DNA, 25 bp, Homo sapien
ggataagtttatgaaggtgtcactt

SEQ ID NO: 2457670 - DNA, 25 bp, Homo sapien
gatggtggataagtttatgaaggtg

SEQ ID NO: 2457671 - DNA, 25 bp, Homo sapien
gcttgttccctctgtgtggggtttg

SEQ ID NO: 2457672 - DNA, 25 bp, Homo sapien
ccctctgtgtggggtttgtctccat

SEQ ID NO: 2457673 - DNA, 25 bp, Homo sapien
ttccctctgtgtggggtttgtctcc

SEQ ID NO: 2457674 - DNA, 25 bp, Homo sapien
ttgttccctctgtgtggggtttgtc

SEQ ID NO: 2457675 - DNA, 25 bp, Homo sapien
tatagcaggatccatatcaccacgc

SEQ ID NO: 2457676 - DNA, 25 bp, Homo sapien
aaatgtcatcattacacatggcaca

SEQ ID NO: 2457677 - DNA, 25 bp, Homo sapien
tatcaccacgcataatgattttcag

SEQ ID NO: 2457678 - DNA, 25 bp, Homo sapien
tgtcgtggcagttcagataaagctc

SEQ ID NO: 2457679 - DNA, 25 bp, Homo sapien
tctccacatagtggcattcacacat

SEQ ID NO: 2457680 - DNA, 25 bp, Homo sapien
tctgttttccggctgtctctctcca

SEQ ID NO: 2457681 - DNA, 25 bp, Homo sapien
ctctctccacatagtggcattcaca

SEQ ID NO: 2457682 - DNA, 25 bp, Homo sapien
cattcacacatgacctttttcatct

SEQ ID NO: 2457683 - DNA, 25 bp, Homo sapien
caattaaacagcaggaaatgcacag

SEQ ID NO: 2457684 - DNA, 25 bp, Homo sapien
tgtgattgagtactttggacaggaa

SEQ ID NO: 2457685 - DNA, 25 bp, Homo sapien
tgagtactttggacaggaagagagt

SEQ ID NO: 2457686 - DNA, 25 bp, Homo sapien
attaaacagcaggaaatgcacaggc

SEQ ID NO: 2457687 - DNA, 25 bp, Homo sapien
gccgtacaaccactcttgactttgt

SEQ ID NO: 2457688 - DNA, 25 bp, Homo sapien
ctgggcattcaaagccgtacaacca

SEQ ID NO: 2457689 - DNA, 25 bp, Homo sapien
gcattcaaagccgtacaaccactct

SEQ ID NO: 2457690 - DNA, 25 bp, Homo sapien
caaagccgtacaaccactcttgact

SEQ ID NO: 2457691 - DNA, 25 bp, Homo sapien
tggagtaagaaccatctgtttctga

SEQ ID NO: 2457692 - DNA, 25 bp, Homo sapien
cttggagtaagaaccatctgtttct

SEQ ID NO: 2457693 - DNA, 25 bp, Homo sapien
ttggagtaagaaccatctgtttctg

SEQ ID NO: 2457694 - DNA, 25 bp, Homo sapien
ggagtaagaaccatctgtttctgaa

SEQ ID NO: 2457695 - DNA, 25 bp, Homo sapien
tctgattctactcctttctcttcag

SEQ ID NO: 2457696 - DNA, 25 bp, Homo sapien
tctactcctttctcttcagtgcata

SEQ ID NO: 2457697 - DNA, 25 bp, Homo sapien
tatcttttaaagactcagattctga

SEQ ID NO: 2457698 - DNA, 25 bp, Homo sapien
aaagactcagattctgattctactc

SEQ ID NO: 2457699 - DNA, 25 bp, Homo sapien
tctgcagtcactcgaacagtcatct

SEQ ID NO: 2457700 - DNA, 25 bp, Homo sapien
cttagggaacagtcatctgcagtca

SEQ ID NO: 2457701 - DNA, 25 bp, Homo sapien
ttgtgctacacttgaaaactcctgg

SEQ ID NO: 2457702 - DNA, 25 bp, Homo sapien
gattctgacttaagggttggaaaca

SEQ ID NO: 2457703 - DNA, 25 bp, Homo sapien
gaaaaatattgtatagtcttccact

SEQ ID NO: 2457704 - DNA, 25 bp, Homo sapien
agtgttgaagatatatgcactttca

SEQ ID NO: 2457705 - DNA, 25 bp, Homo sapien
taatgtgaaatctggcactgccatg

SEQ ID NO: 2457706 - DNA, 25 bp, Homo sapien
aaacagctgtatgagtgttgaagat

SEQ ID NO: 2457707 - DNA, 25 bp, Homo sapien
atattccatcttggtacgccacatt

SEQ ID NO: 2457708 - DNA, 25 bp, Homo sapien
atctccattacatattccatcttgg

SEQ ID NO: 2457709 - DNA, 25 bp, Homo sapien
aatctccattacatattccatcttg

SEQ ID NO: 2457710 - DNA, 25 bp, Homo sapien
aaatctccattacatattccatctt

SEQ ID NO: 2457711 - DNA, 25 bp, Homo sapien
aagctccaaagctcttgctgtagct

SEQ ID NO: 2457712 - DNA, 25 bp, Homo sapien
gctccaaagctcttgctgtagctca

SEQ ID NO: 2457713 - DNA, 25 bp, Homo sapien
agctccaaagctcttgctgtagctc

SEQ ID NO: 2457714 - DNA, 25 bp, Homo sapien
tgcatactggacatagtcaagggtg

SEQ ID NO: 2457715 - DNA, 25 bp, Homo sapien
gaaaacagttgaaaagagttgcctg

SEQ ID NO: 2457716 - DNA, 25 bp, Homo sapien
ttctggactagagccaatgaactcc

SEQ ID NO: 2457717 - DNA, 25 bp, Homo sapien
tctgtgtgtatctgagcttctcggt

SEQ ID NO: 2457718 - DNA, 25 bp, Homo sapien
aggtggactggggttttgatgaggc

SEQ ID NO: 2457719 - DNA, 25 bp, Homo sapien
ctttctgtagcagtcagcagggcta

SEQ ID NO: 2457720 - DNA, 25 bp, Homo sapien
gactggggttttgatgaggcattct

SEQ ID NO: 2457721 - DNA, 25 bp, Homo sapien
tgaggcattctgctttctgtagcag

SEQ ID NO: 2457722 - DNA, 25 bp, Homo sapien
agttcagcagctcgctgtgaatgag

SEQ ID NO: 2457723 - DNA, 25 bp, Homo sapien
cctggagtccttgttttctgcagtt

SEQ ID NO: 2457724 - DNA, 25 bp, Homo sapien
ttcagcagctcgctgtgaatgagct

SEQ ID NO: 2457725 - DNA, 25 bp, Homo sapien
cagcagctcgctgtgaatgagctga

SEQ ID NO: 2457726 - DNA, 25 bp, Homo sapien
aattaattactgtaaaattggccat

SEQ ID NO: 2457727 - DNA, 25 bp, Homo sapien
tggtatttgaaggtacatacacccc

SEQ ID NO: 2457728 - DNA, 25 bp, Homo sapien
gctcatgtttcacccgaaccaccag

SEQ ID NO: 2457729 - DNA, 25 bp, Homo sapien
agtggtgtgcactgctcatgtttca

SEQ ID NO: 2457730 - DNA, 25 bp, Homo sapien
cagtgaaggattggaaggcgacgaa

SEQ ID NO: 2457731 - DNA, 25 bp, Homo sapien
tcttagcctgagttgccccacagag

SEQ ID NO: 2457732 - DNA, 25 bp, Homo sapien
cctggacccctttagtgcttactgg

SEQ ID NO: 2457733 - DNA, 25 bp, Homo sapien
tactgaagacctggacatgtggctt

SEQ ID NO: 2457734 - DNA, 25 bp, Homo sapien
cctggaatctatgtgatttcacctg

SEQ ID NO: 2457735 - DNA, 25 bp, Homo sapien
tattataaggatagtcggacaccca

SEQ ID NO: 2457736 - DNA, 25 bp, Homo sapien
gagtgtggaagttttaattgtccca

SEQ ID NO: 2457737 - DNA, 25 bp, Homo sapien
gtacagtacatgaaaccacttcgca

SEQ ID NO: 2457738 - DNA, 25 bp, Homo sapien
gatagttgccattccacagtgtcgg

SEQ ID NO: 2457739 - DNA, 25 bp, Homo sapien
tcatcctgtgggatctatgcccaag

SEQ ID NO: 2457740 - DNA, 25 bp, Homo sapien
tgtgggatctatgcccaaggattca

SEQ ID NO: 2457741 - DNA, 25 bp, Homo sapien
gatctatgcccaaggattcagaaga

SEQ ID NO: 2457742 - DNA, 25 bp, Homo sapien
ctatgcccaaggattcagaagaagc

SEQ ID NO: 2457743 - DNA, 25 bp, Homo sapien
cttgatatgtttgaatccttgttcc

SEQ ID NO: 2457744 - DNA, 25 bp, Homo sapien
cgttgcacccttagaactgctataa

SEQ ID NO: 2457745 - DNA, 25 bp, Homo sapien
cccttagaactgctataaaagacct

SEQ ID NO: 2457746 - DNA, 25 bp, Homo sapien
gctataaaagaccttgatatgtttg

SEQ ID NO: 2457747 - DNA, 25 bp, Homo sapien
cattgaagtggatagatgaaaatga

SEQ ID NO: 2457748 - DNA, 25 bp, Homo sapien
ttctgaaactggcagggcctgcaaa

SEQ ID NO: 2457749 - DNA, 25 bp, Homo sapien
ggcacagaggcacatccaactgaag

SEQ ID NO: 2457750 - DNA, 25 bp, Homo sapien
ctccccaaattgcatcctgggcttt

SEQ ID NO: 2457751 - DNA, 25 bp, Homo sapien
tctctagtattcctaagtcagtctc

SEQ ID NO: 2457752 - DNA, 25 bp, Homo sapien
cacttttatctctgtgcattgtctc

SEQ ID NO: 2457753 - DNA, 25 bp, Homo sapien
tgtgcattgtctctagtattcctaa

SEQ ID NO: 2457754 - DNA, 25 bp, Homo sapien
tttgaaagtaacacacttttatctc

SEQ ID NO: 2457755 - DNA, 25 bp, Homo sapien
gcactgtgacatcatcgtggcctgg

SEQ ID NO: 2457756 - DNA, 25 bp, Homo sapien
ggtcagagatgcatccaagccttgg

SEQ ID NO: 2457757 - DNA, 25 bp, Homo sapien
cttgtaccagttgggaggtcagaga

SEQ ID NO: 2457758 - DNA, 25 bp, Homo sapien
gatatcatagacatgcataaccagg

SEQ ID NO: 2457759 - DNA, 25 bp, Homo sapien
aatcgagatttcagcgttgtaacaa

SEQ ID NO: 2457760 - DNA, 25 bp, Homo sapien
ttctgttgatgacataagtccacaa

SEQ ID NO: 2457761 - DNA, 25 bp, Homo sapien
agtccacaatccaatgtacttttaa

SEQ ID NO: 2457762 - DNA, 25 bp, Homo sapien
aaatatattggaatcacaaatcgag

SEQ ID NO: 2457763 - DNA, 25 bp, Homo sapien
tgtggccacaggttgatgcctggaa

SEQ ID NO: 2457764 - DNA, 25 bp, Homo sapien
caggttgatgcctggaagtcggtca

SEQ ID NO: 2457765 - DNA, 25 bp, Homo sapien
aagtcggtcaggagggtgctgtcct

SEQ ID NO: 2457766 - DNA, 25 bp, Homo sapien
ccacaggttgatgcctggaagtcgg

SEQ ID NO: 2457767 - DNA, 25 bp, Homo sapien
agagtttcgacacacaggttctcca

SEQ ID NO: 2457768 - DNA, 25 bp, Homo sapien
aggccccaccagagcagctagatac

SEQ ID NO: 2457769 - DNA, 25 bp, Homo sapien
ggccccaccagagcagctagataca

SEQ ID NO: 2457770 - DNA, 25 bp, Homo sapien
acagagtttcgacacacaggttctc

SEQ ID NO: 2457771 - DNA, 25 bp, Homo sapien
attttgagtcccatgttgtttgctt

SEQ ID NO: 2457772 - DNA, 25 bp, Homo sapien
ttgagtcccatgttgtttgcttggg

SEQ ID NO: 2457773 - DNA, 25 bp, Homo sapien
taatctacttattttgagtcccatg

SEQ ID NO: 2457774 - DNA, 25 bp, Homo sapien
tctacttattttgagtcccatgttg

SEQ ID NO: 2457775 - DNA, 25 bp, Homo sapien
ttgttgtcgttgaggacagtagata

SEQ ID NO: 2457776 - DNA, 25 bp, Homo sapien
tgttgtcgttgaggacagtagatat

SEQ ID NO: 2457777 - DNA, 25 bp, Homo sapien
gtaggatgtggcttacaaggcaatc

SEQ ID NO: 2457778 - DNA, 25 bp, Homo sapien
tctgtcatggagtggtagaaaccca

SEQ ID NO: 2457779 - DNA, 25 bp, Homo sapien
tatccaatggccagtcaaaagccca

SEQ ID NO: 2457780 - DNA, 25 bp, Homo sapien
caaggcaatctcacaagaagtatga

SEQ ID NO: 2457781 - DNA, 25 bp, Homo sapien
gcaatcaggatctgaagtgacaggt

SEQ ID NO: 2457782 - DNA, 25 bp, Homo sapien
cttctccaggggcttaagaaagacg

SEQ ID NO: 2457783 - DNA, 25 bp, Homo sapien
agaaagacgatgaagagctttgcat

SEQ ID NO: 2457784 - DNA, 25 bp, Homo sapien
catgaaaaatggcttctccaggggc

SEQ ID NO: 2457785 - DNA, 25 bp, Homo sapien
gcttaagaaagacgatgaagagctt

SEQ ID NO: 2457786 - DNA, 25 bp, Homo sapien
gactaacataggaccagtgtaggga

SEQ ID NO: 2457787 - DNA, 25 bp, Homo sapien
tgtcagccactgagtgaccatagat

SEQ ID NO: 2457788 - DNA, 25 bp, Homo sapien
ttttgataggactaacataggacca

SEQ ID NO: 2457789 - DNA, 25 bp, Homo sapien
gtgaccatagatggatttgcagttg

SEQ ID NO: 2457790 - DNA, 25 bp, Homo sapien
ctttggaaaatgcaaatgtagtcat

SEQ ID NO: 2457791 - DNA, 25 bp, Homo sapien
tctctttggaaaatgcaaatgtagt

SEQ ID NO: 2457792 - DNA, 25 bp, Homo sapien
cttcagtgactaagttctctttgga

SEQ ID NO: 2457793 - DNA, 25 bp, Homo sapien
ttcagtgactaagttctctttggaa

SEQ ID NO: 2457794 - DNA, 25 bp, Homo sapien
tgtgacaacctgaactgtggttgct

SEQ ID NO: 2457795 - DNA, 25 bp, Homo sapien
atgtgacaacctgaactgtggttgc

SEQ ID NO: 2457796 - DNA, 25 bp, Homo sapien
gagtatcctcaattcgtgcatgcat

SEQ ID NO: 2457797 - DNA, 25 bp, Homo sapien
gaaacagcagagtatcctcaattcg

SEQ ID NO: 2457798 - DNA, 25 bp, Homo sapien
gactggcctaccagaaacagcagag

SEQ ID NO: 2457799 - DNA, 25 bp, Homo sapien
tatccccagactggcctaccagaaa

SEQ ID NO: 2457800 - DNA, 25 bp, Homo sapien
tgtgtaagtggagactccatgtctt

SEQ ID NO: 2457801 - DNA, 25 bp, Homo sapien
cacagtaaacgggagtctcttagca

SEQ ID NO: 2457802 - DNA, 25 bp, Homo sapien
ctgctctgtgtaagtggagactcca

SEQ ID NO: 2457803 - DNA, 25 bp, Homo sapien
tctcttagcacatctgacagaactt

SEQ ID NO: 2457804 - DNA, 25 bp, Homo sapien
ttttctatgtagtgcacatttggct

SEQ ID NO: 2457805 - DNA, 25 bp, Homo sapien
atagctaacatgtccaaccctccag

SEQ ID NO: 2457806 - DNA, 25 bp, Homo sapien
ggaccaaggagcacttttttctatg

SEQ ID NO: 2457807 - DNA, 25 bp, Homo sapien
ccagggaagagtctctttgtagagg

SEQ ID NO: 2457808 - DNA, 25 bp, Homo sapien
aacagtccagaagtgttattctgtc

SEQ ID NO: 2457809 - DNA, 25 bp, Homo sapien
actgacatgacaggaaaaggcccaa

SEQ ID NO: 2457810 - DNA, 25 bp, Homo sapien
tgcttcgaaacttcagctgaaactg

SEQ ID NO: 2457811 - DNA, 25 bp, Homo sapien
tatgacttggatttttgcttcgaaa

SEQ ID NO: 2457812 - DNA, 25 bp, Homo sapien
attagcactgatggatgtaatcttc

SEQ ID NO: 2457813 - DNA, 25 bp, Homo sapien
gcttcttgatcattgagctgaccca

SEQ ID NO: 2457814 - DNA, 25 bp, Homo sapien
cattgcttcttgatcattgagctga

SEQ ID NO: 2457815 - DNA, 25 bp, Homo sapien
accattgcttcttgatcattgagct

SEQ ID NO: 2457816 - DNA, 25 bp, Homo sapien
ttgcttcttgatcattgagctgacc

SEQ ID NO: 2457817 - DNA, 25 bp, Homo sapien
tttccctcttaacatcttgtggctg

SEQ ID NO: 2457818 - DNA, 25 bp, Homo sapien
tcttaacatcttgtggctgcttccc

SEQ ID NO: 2457819 - DNA, 25 bp, Homo sapien
ggaatgtttccctcttaacatcttg

SEQ ID NO: 2457820 - DNA, 25 bp, Homo sapien
tgaaacttataattcttttcaggaa

SEQ ID NO: 2457821 - DNA, 25 bp, Homo sapien
ctgagatgcatggtactgaaatggc

SEQ ID NO: 2457822 - DNA, 25 bp, Homo sapien
ccaaagccttggatgatagtacata

SEQ ID NO: 2457823 - DNA, 25 bp, Homo sapien
tcttccctctgttgataatgagcag

SEQ ID NO: 2457824 - DNA, 25 bp, Homo sapien
tgagcagtcagacacagtggttttc

SEQ ID NO: 2457825 - DNA, 25 bp, Homo sapien
tacatagaagtttcttcagcagcaa

SEQ ID NO: 2457826 - DNA, 25 bp, Homo sapien
catcaacttcattccctgatggcat

SEQ ID NO: 2457827 - DNA, 25 bp, Homo sapien
tgacttcgactgtaaagaatacaag

SEQ ID NO: 2457828 - DNA, 25 bp, Homo sapien
cgactgtaaagaatacaagagtgaa

SEQ ID NO: 2457829 - DNA, 25 bp, Homo sapien
tttcatgatctatatggttttcttt

SEQ ID NO: 2457830 - DNA, 25 bp, Homo sapien
agtttgacttcgactgtaaagaata

SEQ ID NO: 2457831 - DNA, 25 bp, Homo sapien
cagtgtatcctctccgcaaatgatg

SEQ ID NO: 2457832 - DNA, 25 bp, Homo sapien
cttcctttttcttaatgctgacaaa

SEQ ID NO: 2457833 - DNA, 25 bp, Homo sapien
gtatcctctccgcaaatgatgcctt

SEQ ID NO: 2457834 - DNA, 25 bp, Homo sapien
tcctttttcttaatgctgacaaaga

SEQ ID NO: 2457835 - DNA, 25 bp, Homo sapien
taagaatatgcaggggcctgacctg

SEQ ID NO: 2457836 - DNA, 25 bp, Homo sapien
tgtaagaatatgcaggggcctgacc

SEQ ID NO: 2457837 - DNA, 25 bp, Homo sapien
aagaatatgcaggggcctgacctgt

SEQ ID NO: 2457838 - DNA, 25 bp, Homo sapien
ctgtgtaagaatatgcaggggcctg

SEQ ID NO: 2457839 - DNA, 25 bp, Homo sapien
cgttgaaaagggaggcaagcataag

SEQ ID NO: 2457840 - DNA, 25 bp, Homo sapien
caagcataagactgggccaaatctc

SEQ ID NO: 2457841 - DNA, 25 bp, Homo sapien
ggcaagcataagactgggccaaatc

SEQ ID NO: 2457842 - DNA, 25 bp, Homo sapien
gaggcaagcataagactgggccaaa

SEQ ID NO: 2457843 - DNA, 25 bp, Homo sapien
ggtctctttgggtgaaagactacat

SEQ ID NO: 2457844 - DNA, 25 bp, Homo sapien
ctttgggtgaaagactacattttct

SEQ ID NO: 2457845 - DNA, 25 bp, Homo sapien
tctttgggtgaaagactacattttc

SEQ ID NO: 2457846 - DNA, 25 bp, Homo sapien
tctctttgggtgaaagactacattt

SEQ ID NO: 2457847 - DNA, 25 bp, Homo sapien
gggaagagagggttgatgattccag

SEQ ID NO: 2457848 - DNA, 25 bp, Homo sapien
gaaggaatgcaatgtttggagcatc

SEQ ID NO: 2457849 - DNA, 25 bp, Homo sapien
cagaaggaatgcaatgtttggagca

SEQ ID NO: 2457850 - DNA, 25 bp, Homo sapien
ggaatgcaatgtttggagcatcctg

SEQ ID NO: 2457851 - DNA, 25 bp, Homo sapien
acgtgcattaggactctttgaactg

SEQ ID NO: 2457852 - DNA, 25 bp, Homo sapien
cattaggactctttgaactgtgcta

SEQ ID NO: 2457853 - DNA, 25 bp, Homo sapien
gactctttgaactgtgctaccactg

SEQ ID NO: 2457854 - DNA, 25 bp, Homo sapien
tcaataaacgtgcattaggactctt

SEQ ID NO: 2457855 - DNA, 25 bp, Homo sapien
ctttcaaacacgcttcaaagcagct

SEQ ID NO: 2457856 - DNA, 25 bp, Homo sapien
tttcaaacacgcttcaaagcagctt

SEQ ID NO: 2457857 - DNA, 25 bp, Homo sapien
cattctttcaaacacgcttcaaagc

SEQ ID NO: 2457858 - DNA, 25 bp, Homo sapien
ttctttcaaacacgcttcaaagcag

SEQ ID NO: 2457859 - DNA, 25 bp, Homo sapien
tccagcagctctttagattttattg

SEQ ID NO: 2457860 - DNA, 25 bp, Homo sapien
cagcagctctttagattttattgac

SEQ ID NO: 2457861 - DNA, 25 bp, Homo sapien
ccttataggagatattgattccaca

SEQ ID NO: 2457862 - DNA, 25 bp, Homo sapien
attcaaagcttccttataggagata

SEQ ID NO: 2457863 - DNA, 25 bp, Homo sapien
tctagagactttctggcaagcacag

SEQ ID NO: 2457864 - DNA, 25 bp, Homo sapien
tacagcaatatcaagtgcaataaca

SEQ ID NO: 2457865 - DNA, 25 bp, Homo sapien
tccctgaagtgttggaagaggacat

SEQ ID NO: 2457866 - DNA, 25 bp, Homo sapien
cattgactgttttattgtccctgaa

SEQ ID NO: 2457867 - DNA, 25 bp, Homo sapien
gaagcaggtcatcagtataaggcat

SEQ ID NO: 2457868 - DNA, 25 bp, Homo sapien
tatagctttacagaacaatattcaa

SEQ ID NO: 2457869 - DNA, 25 bp, Homo sapien
cctttgctaccatcatagagacaat

SEQ ID NO: 2457870 - DNA, 25 bp, Homo sapien
caatgggtacttgaaagacagcaaa

SEQ ID NO: 2457871 - DNA, 25 bp, Homo sapien
accattcattccttgtatcttcaaa

SEQ ID NO: 2457872 - DNA, 25 bp, Homo sapien
ttcattccttgtatcttcaaatcca

SEQ ID NO: 2457873 - DNA, 25 bp, Homo sapien
aaaccattcattccttgtatcttca

SEQ ID NO: 2457874 - DNA, 25 bp, Homo sapien
cattcattccttgtatcttcaaatc

SEQ ID NO: 2457875 - DNA, 25 bp, Homo sapien
cgggaactttgcaaggtctcttaca

SEQ ID NO: 2457876 - DNA, 25 bp, Homo sapien
tccataacgggaactttgcaaggtc

SEQ ID NO: 2457877 - DNA, 25 bp, Homo sapien
tgcttcctactccataacgggaact

SEQ ID NO: 2457878 - DNA, 25 bp, Homo sapien
aactttgcaaggtctcttacatgca

SEQ ID NO: 2457879 - DNA, 25 bp, Homo sapien
tcatcagggatttttagccaacagt

SEQ ID NO: 2457880 - DNA, 25 bp, Homo sapien
caggaagcttttcaatgggatgttc

SEQ ID NO: 2457881 - DNA, 25 bp, Homo sapien
ttccccaggaagcttttcaatggga

SEQ ID NO: 2457882 - DNA, 25 bp, Homo sapien
aagcttttcaatgggatgttctctg

SEQ ID NO: 2457883 - DNA, 25 bp, Homo sapien
cgttaatttgatggtaagctatact

SEQ ID NO: 2457884 - DNA, 25 bp, Homo sapien
ttaatttgatggtaagctatactac

SEQ ID NO: 2457885 - DNA, 25 bp, Homo sapien
tttcgttaatttgatggtaagctat

SEQ ID NO: 2457886 - DNA, 25 bp, Homo sapien
tcgttaatttgatggtaagctatac

SEQ ID NO: 2457887 - DNA, 25 bp, Homo sapien
aagctgcttggttctaatgaggccg

SEQ ID NO: 2457888 - DNA, 25 bp, Homo sapien
gctgcttggttctaatgaggccgag

SEQ ID NO: 2457889 - DNA, 25 bp, Homo sapien
gcttggttctaatgaggccgaggcc

SEQ ID NO: 2457890 - DNA, 25 bp, Homo sapien
ttggttctaatgaggccgaggccat

SEQ ID NO: 2457891 - DNA, 25 bp, Homo sapien
tgcaacaaaatggactattaacacc

SEQ ID NO: 2457892 - DNA, 25 bp, Homo sapien
aacaccatctgttcgttgtggcaga

SEQ ID NO: 2457893 - DNA, 25 bp, Homo sapien
gttcccatcagtctagacccagcag

SEQ ID NO: 2457894 - DNA, 25 bp, Homo sapien
aatggctggcatcaaatgttcaagg

SEQ ID NO: 2457895 - DNA, 25 bp, Homo sapien
cagacattagttgagaaaatgtaac

SEQ ID NO: 2457896 - DNA, 25 bp, Homo sapien
tccatgttggttgtgctatctcggt

SEQ ID NO: 2457897 - DNA, 25 bp, Homo sapien
tttcaatgggaaagttcatagtgtt

SEQ ID NO: 2457898 - DNA, 25 bp, Homo sapien
gactctgaggatgaaacttcaaaat

SEQ ID NO: 2457899 - DNA, 25 bp, Homo sapien
agtgtttcctaaaacacgataatgg

SEQ ID NO: 2457900 - DNA, 25 bp, Homo sapien
tcctaaaacacgataatggaaaggc

SEQ ID NO: 2457901 - DNA, 25 bp, Homo sapien
tgtttcctaaaacacgataatggaa

SEQ ID NO: 2457902 - DNA, 25 bp, Homo sapien
aaacacgataatggaaaggctgcat

SEQ ID NO: 2457903 - DNA, 25 bp, Homo sapien
ttccccattgagtgcaatcaacagc

SEQ ID NO: 2457904 - DNA, 25 bp, Homo sapien
tccccattgagtgcaatcaacagcc

SEQ ID NO: 2457905 - DNA, 25 bp, Homo sapien
cccattgagtgcaatcaacagccat

SEQ ID NO: 2457906 - DNA, 25 bp, Homo sapien
ggttccccattgagtgcaatcaaca

SEQ ID NO: 2457907 - DNA, 25 bp, Homo sapien
tgaattagctctgtgggtaccaaat

SEQ ID NO: 2457908 - DNA, 25 bp, Homo sapien
caccacaccctaggcctgggagtta

SEQ ID NO: 2457909 - DNA, 25 bp, Homo sapien
tggcacaccagctccagtaagggag

SEQ ID NO: 2457910 - DNA, 25 bp, Homo sapien
tcagggagcttggttttagagacat

SEQ ID NO: 2457911 - DNA, 25 bp, Homo sapien
gaagccccaagagaattaagtacat

SEQ ID NO: 2457912 - DNA, 25 bp, Homo sapien
acaagcctcttttggtgaagcccca

SEQ ID NO: 2457913 - DNA, 25 bp, Homo sapien
aatttaatgtaatactgctcttcag

SEQ ID NO: 2457914 - DNA, 25 bp, Homo sapien
taagtacatggagcttaatttaatg

SEQ ID NO: 2457915 - DNA, 25 bp, Homo sapien
aggcccgattttctcctggaagacg

SEQ ID NO: 2457916 - DNA, 25 bp, Homo sapien
tttctcctggaagacgggtaagtca

SEQ ID NO: 2457917 - DNA, 25 bp, Homo sapien
gtggcaggcccgattttctcctgga

SEQ ID NO: 2457918 - DNA, 25 bp, Homo sapien
gaagacgggtaagtcatcacagctg

SEQ ID NO: 2457919 - DNA, 25 bp, Homo sapien
atagtgcagtccatgagagtagatc

SEQ ID NO: 2457920 - DNA, 25 bp, Homo sapien
catccatagtgcagtccatgagagt

SEQ ID NO: 2457921 - DNA, 25 bp, Homo sapien
cttatcatccatagtgcagtccatg

SEQ ID NO: 2457922 - DNA, 25 bp, Homo sapien
ctctaagctcttatcatccatagtg

SEQ ID NO: 2457923 - DNA, 25 bp, Homo sapien
tcccaaatcgccacgactgccacca

SEQ ID NO: 2457924 - DNA, 25 bp, Homo sapien
cacgactgccaccaactatatcata

SEQ ID NO: 2457925 - DNA, 25 bp, Homo sapien
ctcccaaatcgccacgactgccacc

SEQ ID NO: 2457926 - DNA, 25 bp, Homo sapien
cgactgccaccaactatatcatata

SEQ ID NO: 2457927 - DNA, 25 bp, Homo sapien
cctggagttgagattagggacctct

SEQ ID NO: 2457928 - DNA, 25 bp, Homo sapien
tctttctctcctggagttgagatta

SEQ ID NO: 2457929 - DNA, 25 bp, Homo sapien
tctcctggagttgagattagggacc

SEQ ID NO: 2457930 - DNA, 25 bp, Homo sapien
gagttgagattagggacctctttac

SEQ ID NO: 2457931 - DNA, 25 bp, Homo sapien
tccctggacatagacacttttcctt

SEQ ID NO: 2457932 - DNA, 25 bp, Homo sapien
tgtgtctcctttaaactccaggttc

SEQ ID NO: 2457933 - DNA, 25 bp, Homo sapien
ttccttgttgctattgatgattgtt

SEQ ID NO: 2457934 - DNA, 25 bp, Homo sapien
gatgattgtttcagggacaacacca

SEQ ID NO: 2457935 - DNA, 25 bp, Homo sapien
gaaaccaaatgcacaacgaaagtaa

SEQ ID NO: 2457936 - DNA, 25 bp, Homo sapien
tctgcctccagagtataggtatatt

SEQ ID NO: 2457937 - DNA, 25 bp, Homo sapien
gctgaagccatatgttctgaaacca

SEQ ID NO: 2457938 - DNA, 25 bp, Homo sapien
caatgctgttgtgtttgctgaagcc

SEQ ID NO: 2457939 - DNA, 25 bp, Homo sapien
gctgctcttggtcacacagggaagg

SEQ ID NO: 2457940 - DNA, 25 bp, Homo sapien
gttccctatccaaagtggcatcaag

SEQ ID NO: 2457941 - DNA, 25 bp, Homo sapien
gctcttggtcacacagggaaggccc

SEQ ID NO: 2457942 - DNA, 25 bp, Homo sapien
tatccaaagtggcatcaaggagatg

SEQ ID NO: 2457943 - DNA, 25 bp, Homo sapien
atattgcatgaagtacatcctgttt

SEQ ID NO: 2457944 - DNA, 25 bp, Homo sapien
aatattgcatgaagtacatcctgtt

SEQ ID NO: 2457945 - DNA, 25 bp, Homo sapien
tattgcatgaagtacatcctgtttc

SEQ ID NO: 2457946 - DNA, 25 bp, Homo sapien
caatattgcatgaagtacatcctgt

SEQ ID NO: 2457947 - DNA, 25 bp, Homo sapien
tgggaatataggttttctttgccaa

SEQ ID NO: 2457948 - DNA, 25 bp, Homo sapien
ctatacctgggaatataggttttct

SEQ ID NO: 2457949 - DNA, 25 bp, Homo sapien
gaatataggttttctttgccaatag

SEQ ID NO: 2457950 - DNA, 25 bp, Homo sapien
atataggttttctttgccaatagtt

SEQ ID NO: 2457951 - DNA, 25 bp, Homo sapien
gcacctaattaatctggtgacagct

SEQ ID NO: 2457952 - DNA, 25 bp, Homo sapien
cctaaggcaattaactaagagattc

SEQ ID NO: 2457953 - DNA, 25 bp, Homo sapien
cagctatggcatactaaattcccta

SEQ ID NO: 2457954 - DNA, 25 bp, Homo sapien
ccttgaactctggagggatgctgcc

SEQ ID NO: 2457955 - DNA, 25 bp, Homo sapien
aacatactgtgatcaactctgggac

SEQ ID NO: 2457956 - DNA, 25 bp, Homo sapien
gaatgcaagtgccaacatactgtga

SEQ ID NO: 2457957 - DNA, 25 bp, Homo sapien
tcagttcataagtacagcgctgaat

SEQ ID NO: 2457958 - DNA, 25 bp, Homo sapien
tcctgtatggaatgcaccaccttca

SEQ ID NO: 2457959 - DNA, 25 bp, Homo sapien
gaagatctccttgtggcggcttgtc

SEQ ID NO: 2457960 - DNA, 25 bp, Homo sapien
gtctggcttgccacgctgcactttg

SEQ ID NO: 2457961 - DNA, 25 bp, Homo sapien
gggtcatctcccagcacagtctggg

SEQ ID NO: 2457962 - DNA, 25 bp, Homo sapien
cctcttggcgcaagctaggaagatg

SEQ ID NO: 2457963 - DNA, 25 bp, Homo sapien
gccagcgcaaaggggatgccttttt

SEQ ID NO: 2457964 - DNA, 25 bp, Homo sapien
ggccagcgcaaaggggatgcctttt

SEQ ID NO: 2457965 - DNA, 25 bp, Homo sapien
ccagcgcaaaggggatgcctttttt

SEQ ID NO: 2457966 - DNA, 25 bp, Homo sapien
ctgctgggcctctttattaaatgtg

SEQ ID NO: 2457967 - DNA, 25 bp, Homo sapien
caggtagcaggtccaggaaatgact

SEQ ID NO: 2457968 - DNA, 25 bp, Homo sapien
tattggcggttgagcagtgcatttc

SEQ ID NO: 2457969 - DNA, 25 bp, Homo sapien
gcagggactcgctgaaccatacttt

SEQ ID NO: 2457970 - DNA, 25 bp, Homo sapien
ggcttcctaaggaaacatcagtgcc

SEQ ID NO: 2457971 - DNA, 25 bp, Homo sapien
gaggcttcctaaggaaacatcagtg

SEQ ID NO: 2457972 - DNA, 25 bp, Homo sapien
tgtgaggcttcctaaggaaacatca

SEQ ID NO: 2457973 - DNA, 25 bp, Homo sapien
gttgtgaggcttcctaaggaaacat

SEQ ID NO: 2457974 - DNA, 25 bp, Homo sapien
gaagctgctgctgtgcgaatagctg

SEQ ID NO: 2457975 - DNA, 25 bp, Homo sapien
agtcattaatggacagtcagaggcc

SEQ ID NO: 2457976 - DNA, 25 bp, Homo sapien
cctgagtgagttgaccaggaaagca

SEQ ID NO: 2457977 - DNA, 25 bp, Homo sapien
tgagcattcagtcattaatggacag

SEQ ID NO: 2457978 - DNA, 25 bp, Homo sapien
ttaacaagcctgaagtgaacaatat

SEQ ID NO: 2457979 - DNA, 25 bp, Homo sapien
cagttaacaagcctgaagtgaacaa

SEQ ID NO: 2457980 - DNA, 25 bp, Homo sapien
acaagcctgaagtgaacaatattgt

SEQ ID NO: 2457981 - DNA, 25 bp, Homo sapien
tcagttaacaagcctgaagtgaaca

SEQ ID NO: 2457982 - DNA, 25 bp, Homo sapien
aaaccatcctgcaaacagcaaggca

SEQ ID NO: 2457983 - DNA, 25 bp, Homo sapien
caaaccatcctgcaaacagcaaggc

SEQ ID NO: 2457984 - DNA, 25 bp, Homo sapien
ccaaaccatcctgcaaacagcaagg

SEQ ID NO: 2457985 - DNA, 25 bp, Homo sapien
tctcatcatagtgatcacatatttc

SEQ ID NO: 2457986 - DNA, 25 bp, Homo sapien
caagatgggtatctgtgctgcctct

SEQ ID NO: 2457987 - DNA, 25 bp, Homo sapien
tgcaagatgggtatctgtgctgcct

SEQ ID NO: 2457988 - DNA, 25 bp, Homo sapien
gagctgcaagatgggtatctgtgct

SEQ ID NO: 2457989 - DNA, 25 bp, Homo sapien
gcattagcaggatgtagtctaccct

SEQ ID NO: 2457990 - DNA, 25 bp, Homo sapien
ctgtcctagatttagcacggaaacc

SEQ ID NO: 2457991 - DNA, 25 bp, Homo sapien
taccctgaatctgtacagctgtacc

SEQ ID NO: 2457992 - DNA, 25 bp, Homo sapien
agcacggaaaccttcccatggggtg

SEQ ID NO: 2457993 - DNA, 25 bp, Homo sapien
gcacttgcctagtgaaccagctctt

SEQ ID NO: 2457994 - DNA, 25 bp, Homo sapien
ttgggctttttggtgtccactgccc

SEQ ID NO: 2457995 - DNA, 25 bp, Homo sapien
ttgcctctttatggataccctggct

SEQ ID NO: 2457996 - DNA, 25 bp, Homo sapien
gataccctggctttgactgctacca

SEQ ID NO: 2457997 - DNA, 25 bp, Homo sapien
caacctgcatggagatatatgtctg

SEQ ID NO: 2457998 - DNA, 25 bp, Homo sapien
ggaaaaattttgatccctgggatca

SEQ ID NO: 2457999 - DNA, 25 bp, Homo sapien
gatatatgtctgtatcagggaaaaa

SEQ ID NO: 2458000 - DNA, 25 bp, Homo sapien
tagtcacaccaacctgcatggagat

SEQ ID NO: 2458001 - DNA, 25 bp, Homo sapien
gttgcgatcattctcagacctgagg

SEQ ID NO: 2458002 - DNA, 25 bp, Homo sapien
catccatggaggacacgttgtagga

SEQ ID NO: 2458003 - DNA, 25 bp, Homo sapien
cgttgtaggacccaacattgctcag

SEQ ID NO: 2458004 - DNA, 25 bp, Homo sapien
ttttgctgccatccccaagagagtg

SEQ ID NO: 2458005 - DNA, 25 bp, Homo sapien
actacgtgaagaatgaagaagcccc

SEQ ID NO: 2458006 - DNA, 25 bp, Homo sapien
cgtgaagaatgaagaagccccagga

SEQ ID NO: 2458007 - DNA, 25 bp, Homo sapien
tgaagaagccccaggagccgatgca

SEQ ID NO: 2458008 - DNA, 25 bp, Homo sapien
aagaagccccaggagccgatgcaat

SEQ ID NO: 2458009 - DNA, 25 bp, Homo sapien
caggctctatgatgggtacgagata

SEQ ID NO: 2458010 - DNA, 25 bp, Homo sapien
tatgatgggtacgagataaaatctg

SEQ ID NO: 2458011 - DNA, 25 bp, Homo sapien
tgggtacgagataaaatctgaattc

SEQ ID NO: 2458012 - DNA, 25 bp, Homo sapien
gctctatgatgggtacgagataaaa

SEQ ID NO: 2458013 - DNA, 25 bp, Homo sapien
gggtttgctcgtccaggtctcacag

SEQ ID NO: 2458014 - DNA, 25 bp, Homo sapien
gagcatcggaagtgactctgcaaag

SEQ ID NO: 2458015 - DNA, 25 bp, Homo sapien
tgtcacagcgcatgtgcatgccaac

SEQ ID NO: 2458016 - DNA, 25 bp, Homo sapien
cagtgaactggcctgtcacagcgca

SEQ ID NO: 2458017 - DNA, 25 bp, Homo sapien
gagcttcttccactgatggaggtga

SEQ ID NO: 2458018 - DNA, 25 bp, Homo sapien
gaggagcttcttccactgatggagg

SEQ ID NO: 2458019 - DNA, 25 bp, Homo sapien
caggaggagcttcttccactgatgg

SEQ ID NO: 2458020 - DNA, 25 bp, Homo sapien
gcttcttccactgatggaggtgagg

SEQ ID NO: 2458021 - DNA, 25 bp, Homo sapien
gaggagcagagcatggtccgtcctt

SEQ ID NO: 2458022 - DNA, 25 bp, Homo sapien
agcatggtccgtccttgcaggaaga

SEQ ID NO: 2458023 - DNA, 25 bp, Homo sapien
gagcagagcatggtccgtccttgca

SEQ ID NO: 2458024 - DNA, 25 bp, Homo sapien
gcagagcatggtccgtccttgcagg

SEQ ID NO: 2458025 - DNA, 25 bp, Homo sapien
tgacatggtggtcagtgccactgga

SEQ ID NO: 2458026 - DNA, 25 bp, Homo sapien
gacaagttcagtcacttctgtgcca

SEQ ID NO: 2458027 - DNA, 25 bp, Homo sapien
aagggagcattcagccttgacatgg

SEQ ID NO: 2458028 - DNA, 25 bp, Homo sapien
ttcccaactcctggaatgggatggg

SEQ ID NO: 2458029 - DNA, 25 bp, Homo sapien
aaataaacctccaaggagcgtgcgc

SEQ ID NO: 2458030 - DNA, 25 bp, Homo sapien
gaaataaacctccaaggagcgtgcg

SEQ ID NO: 2458031 - DNA, 25 bp, Homo sapien
atagaaataaacctccaaggagcgt

SEQ ID NO: 2458032 - DNA, 25 bp, Homo sapien
ataaacctccaaggagcgtgcgcat

SEQ ID NO: 2458033 - DNA, 25 bp, Homo sapien
gaaggagatgatccattagtaacac

SEQ ID NO: 2458034 - DNA, 25 bp, Homo sapien
ctgggaaggagatgatccattagta

SEQ ID NO: 2458035 - DNA, 25 bp, Homo sapien
gatgatccattagtaacactctcag

SEQ ID NO: 2458036 - DNA, 25 bp, Homo sapien
ccattagtaacactctcagtctgtg

SEQ ID NO: 2458037 - DNA, 25 bp, Homo sapien
agccagggaagagattctgccatac

SEQ ID NO: 2458038 - DNA, 25 bp, Homo sapien
ctctgacaggtgttgctggaaagcc

SEQ ID NO: 2458039 - DNA, 25 bp, Homo sapien
gattctgccatactgtgtgcactgg

SEQ ID NO: 2458040 - DNA, 25 bp, Homo sapien
tcactctgacaggtgttgctggaaa

SEQ ID NO: 2458041 - DNA, 25 bp, Homo sapien
ttctttccgtgagaagctgagagcc

SEQ ID NO: 2458042 - DNA, 25 bp, Homo sapien
tccgtgagaagctgagagccatgca

SEQ ID NO: 2458043 - DNA, 25 bp, Homo sapien
tgagagccatgcagcatcaaggccg

SEQ ID NO: 2458044 - DNA, 25 bp, Homo sapien
caaggccgaacatcatcctggtcat

SEQ ID NO: 2458045 - DNA, 25 bp, Homo sapien
caggtaacctaactgcattgcaggg

SEQ ID NO: 2458046 - DNA, 25 bp, Homo sapien
gactggccggtagcctgtctgatca

SEQ ID NO: 2458047 - DNA, 25 bp, Homo sapien
tttgggacagcttctcacctccagg

SEQ ID NO: 2458048 - DNA, 25 bp, Homo sapien
ggaggacttcccaccaatgagatta

SEQ ID NO: 2458049 - DNA, 25 bp, Homo sapien
ttctcttcctagcagctctgatcct

SEQ ID NO: 2458050 - DNA, 25 bp, Homo sapien
tctgtgattacttccagtccctgaa

SEQ ID NO: 2458051 - DNA, 25 bp, Homo sapien
gatcattcagcagcccatgtcctat

SEQ ID NO: 2458052 - DNA, 25 bp, Homo sapien
cttcatcatgaggaactaccagatc

SEQ ID NO: 2458053 - DNA, 25 bp, Homo sapien
gtatggtgaaggatgttgtgcaatt

SEQ ID NO: 2458054 - DNA, 25 bp, Homo sapien
aaatggtatggtgaaggatgttgtg

SEQ ID NO: 2458055 - DNA, 25 bp, Homo sapien
tatggtgaaggatgttgtgcaattc

SEQ ID NO: 2458056 - DNA, 25 bp, Homo sapien
tggtatggtgaaggatgttgtgcaa

SEQ ID NO: 2458057 - DNA, 25 bp, Homo sapien
gtttgataaacaggagcatagccat

SEQ ID NO: 2458058 - DNA, 25 bp, Homo sapien
gagctttactgtgtttgataaacag

SEQ ID NO: 2458059 - DNA, 25 bp, Homo sapien
ctggtgtgcgagctttactgtgttt

SEQ ID NO: 2458060 - DNA, 25 bp, Homo sapien
gtgcgagctttactgtgtttgataa

SEQ ID NO: 2458061 - DNA, 25 bp, Homo sapien
tatgctgcatagtcacacaggagat

SEQ ID NO: 2458062 - DNA, 25 bp, Homo sapien
gttatatgctgcatagtcacacagg

SEQ ID NO: 2458063 - DNA, 25 bp, Homo sapien
tatatgctgcatagtcacacaggag

SEQ ID NO: 2458064 - DNA, 25 bp, Homo sapien
atgctgcatagtcacacaggagatg

SEQ ID NO: 2458065 - DNA, 25 bp, Homo sapien
aattctctaacatactgtggctcca

SEQ ID NO: 2458066 - DNA, 25 bp, Homo sapien
aaattctctaacatactgtggctcc

SEQ ID NO: 2458067 - DNA, 25 bp, Homo sapien
attctctaacatactgtggctccat

SEQ ID NO: 2458068 - DNA, 25 bp, Homo sapien
gctaggatgacaattacagtgcttc

SEQ ID NO: 2458069 - DNA, 25 bp, Homo sapien
taagcagtagtatgtcctcttttct

SEQ ID NO: 2458070 - DNA, 25 bp, Homo sapien
tagagaggctcatatgtaagtcatc

SEQ ID NO: 2458071 - DNA, 25 bp, Homo sapien
cagtgcttccatctaagcagtagta

SEQ ID NO: 2458072 - DNA, 25 bp, Homo sapien
gtttgggactggttatcacattggg

SEQ ID NO: 2458073 - DNA, 25 bp, Homo sapien
gaatatgcaagctgtgtttgggact

SEQ ID NO: 2458074 - DNA, 25 bp, Homo sapien
gaagtaagttttaggttgagagatg

SEQ ID NO: 2458075 - DNA, 25 bp, Homo sapien
tgtgcagagtattgagctgtgaata

SEQ ID NO: 2458076 - DNA, 25 bp, Homo sapien
tgccggcaaaagtaaacacggagtc

SEQ ID NO: 2458077 - DNA, 25 bp, Homo sapien
ccagcaaggactttgccggcaaaag

SEQ ID NO: 2458078 - DNA, 25 bp, Homo sapien
ctccagcaaggactttgccggcaaa

SEQ ID NO: 2458079 - DNA, 25 bp, Homo sapien
gcaaaagtaaacacggagtctgtgg

SEQ ID NO: 2458080 - DNA, 25 bp, Homo sapien
catgttcccgcaccctggataggta

SEQ ID NO: 2458081 - DNA, 25 bp, Homo sapien
gacgcaatcctgaactctttctgga

SEQ ID NO: 2458082 - DNA, 25 bp, Homo sapien
gagaggatacttcattttgcacttg

SEQ ID NO: 2458083 - DNA, 25 bp, Homo sapien
gatatacttggatcagcctggtggg

SEQ ID NO: 2458084 - DNA, 25 bp, Homo sapien
cagtgtgtgaccatactttgctttg

SEQ ID NO: 2458085 - DNA, 25 bp, Homo sapien
gcttcatgcaacctatgccatggga

SEQ ID NO: 2458086 - DNA, 25 bp, Homo sapien
ggtgctgtgttattcacccacctga

SEQ ID NO: 2458087 - DNA, 25 bp, Homo sapien
gcagctctgcttgatagaggccaac

SEQ ID NO: 2458088 - DNA, 25 bp, Homo sapien
gactgactttcgcagcctaaagatg

SEQ ID NO: 2458089 - DNA, 25 bp, Homo sapien
ctgactgactttcgcagcctaaaga

SEQ ID NO: 2458090 - DNA, 25 bp, Homo sapien
actgactttcgcagcctaaagatga

SEQ ID NO: 2458091 - DNA, 25 bp, Homo sapien
ctgactttcgcagcctaaagatgat

SEQ ID NO: 2458092 - DNA, 25 bp, Homo sapien
tatgcttcatagtttctcctttaag

SEQ ID NO: 2458093 - DNA, 25 bp, Homo sapien
ctaataaggcggtgaaatcacacca

SEQ ID NO: 2458094 - DNA, 25 bp, Homo sapien
tcctttaagtctgggcagtttcctc

SEQ ID NO: 2458095 - DNA, 25 bp, Homo sapien
gaaatcacaccagttttatgcttca

SEQ ID NO: 2458096 - DNA, 25 bp, Homo sapien
gaacaatacactaatactgtggaag

SEQ ID NO: 2458097 - DNA, 25 bp, Homo sapien
taatcgaacaatacactaatactgt

SEQ ID NO: 2458098 - DNA, 25 bp, Homo sapien
agttgtaatctgtttaatcgaacaa

SEQ ID NO: 2458099 - DNA, 25 bp, Homo sapien
tctgtttaatcgaacaatacactaa

SEQ ID NO: 2458100 - DNA, 25 bp, Homo sapien
tggggaaaggcctgattataaccca

SEQ ID NO: 2458101 - DNA, 25 bp, Homo sapien
tcaggataatctccaattgagtagg

SEQ ID NO: 2458102 - DNA, 25 bp, Homo sapien
gaccagggtcttcgatctctaaaac

SEQ ID NO: 2458103 - DNA, 25 bp, Homo sapien
agtagccaccacaacagaccagggt

SEQ ID NO: 2458104 - DNA, 25 bp, Homo sapien
cagcaatggcaggtcaaatacttcc

SEQ ID NO: 2458105 - DNA, 25 bp, Homo sapien
aggcctttctatcacaatgaatttt

SEQ ID NO: 2458106 - DNA, 25 bp, Homo sapien
ctcaacagcctcataagtcaggtga

SEQ ID NO: 2458107 - DNA, 25 bp, Homo sapien
aagtcaggtgagattcaggatctgc

SEQ ID NO: 2458108 - DNA, 25 bp, Homo sapien
caatctgccctttgataggcctttc

SEQ ID NO: 2458109 - DNA, 25 bp, Homo sapien
tggaggcagttctccgagtgaaaga

SEQ ID NO: 2458110 - DNA, 25 bp, Homo sapien
ggcagttctccgagtgaaagagatc

SEQ ID NO: 2458111 - DNA, 25 bp, Homo sapien
gttctccgagtgaaagagatccttc

SEQ ID NO: 2458112 - DNA, 25 bp, Homo sapien
agagcttggaggcagttctccgagt

SEQ ID NO: 2458113 - DNA, 25 bp, Homo sapien
tgccagtgggaccctcaatttggct

SEQ ID NO: 2458114 - DNA, 25 bp, Homo sapien
gtgggaccctcaatttggctctccc

SEQ ID NO: 2458115 - DNA, 25 bp, Homo sapien
agtgggaccctcaatttggctctcc

SEQ ID NO: 2458116 - DNA, 25 bp, Homo sapien
ctgccagtgggaccctcaatttggc

SEQ ID NO: 2458117 - DNA, 25 bp, Homo sapien
tgctcaactccctctggcactgcca

SEQ ID NO: 2458118 - DNA, 25 bp, Homo sapien
gctcaactccctctggcactgccat

SEQ ID NO: 2458119 - DNA, 25 bp, Homo sapien
atgctcaactccctctggcactgcc

SEQ ID NO: 2458120 - DNA, 25 bp, Homo sapien
ggatattatccaggagactttcccc

SEQ ID NO: 2458121 - DNA, 25 bp, Homo sapien
tattatccaggagactttccccaat

SEQ ID NO: 2458122 - DNA, 25 bp, Homo sapien
agaccaaatctacatctgattggtg

SEQ ID NO: 2458123 - DNA, 25 bp, Homo sapien
tgatggggagaatggaaacaagttg

SEQ ID NO: 2458124 - DNA, 25 bp, Homo sapien
tgtgcgaccacttttgccgaagctc

SEQ ID NO: 2458125 - DNA, 25 bp, Homo sapien
taatgtgtgcgaccacttttgccga

SEQ ID NO: 2458126 - DNA, 25 bp, Homo sapien
tttaatgtgtgcgaccacttttgcc

SEQ ID NO: 2458127 - DNA, 25 bp, Homo sapien
cactttttaatgtgtgcgaccactt

SEQ ID NO: 2458128 - DNA, 25 bp, Homo sapien
gattgagagatgcatagaatatggt

SEQ ID NO: 2458129 - DNA, 25 bp, Homo sapien
taggaagttggagactattgcacat

SEQ ID NO: 2458130 - DNA, 25 bp, Homo sapien
ccacaggtagactatgattgagaga

SEQ ID NO: 2458131 - DNA, 25 bp, Homo sapien
caagtctagagtaaggattaggaag

SEQ ID NO: 2458132 - DNA, 25 bp, Homo sapien
agcacttcaagtctacctgcttttc

SEQ ID NO: 2458133 - DNA, 25 bp, Homo sapien
ctgacagttgttggtgggtaagaaa

SEQ ID NO: 2458134 - DNA, 25 bp, Homo sapien
gcctgacagttgttggtgggtaaga

SEQ ID NO: 2458135 - DNA, 25 bp, Homo sapien
tggcctgacagttgttggtgggtaa

SEQ ID NO: 2458136 - DNA, 25 bp, Homo sapien
ccgtagagaattggaaatgtgagaa

SEQ ID NO: 2458137 - DNA, 25 bp, Homo sapien
gaaatgtgagaacttcttaatgtaa

SEQ ID NO: 2458138 - DNA, 25 bp, Homo sapien
aattaaagcattcatgtaagccgta

SEQ ID NO: 2458139 - DNA, 25 bp, Homo sapien
tcttccagtcagctgtagaaattaa

SEQ ID NO: 2458140 - DNA, 25 bp, Homo sapien
tttaatttctggaagatcaaaacca

SEQ ID NO: 2458141 - DNA, 25 bp, Homo sapien
gagaacagccatgtaacagattcaa

SEQ ID NO: 2458142 - DNA, 25 bp, Homo sapien
atttctggaagatcaaaaccatcat

SEQ ID NO: 2458143 - DNA, 25 bp, Homo sapien
taatttctggaagatcaaaaccatc

SEQ ID NO: 2458144 - DNA, 25 bp, Homo sapien
accagcaaacagggaagtactgtca

SEQ ID NO: 2458145 - DNA, 25 bp, Homo sapien
tacaggaacctaacataacaaacac

SEQ ID NO: 2458146 - DNA, 25 bp, Homo sapien
acagggaagtactgtcattgttaaa

SEQ ID NO: 2458147 - DNA, 25 bp, Homo sapien
gatacaggaacctaacataacaaac

SEQ ID NO: 2458148 - DNA, 25 bp, Homo sapien
gaatccagctctaaattaaggaagg

SEQ ID NO: 2458149 - DNA, 25 bp, Homo sapien
ggaaggaagccaatagtgcctggtt

SEQ ID NO: 2458150 - DNA, 25 bp, Homo sapien
tagcttttctgcattattcagagag

SEQ ID NO: 2458151 - DNA, 25 bp, Homo sapien
gagctggatcttgaagaatccagct

SEQ ID NO: 2458152 - DNA, 25 bp, Homo sapien
tggtgtggataagcgtatcctgggc

SEQ ID NO: 2458153 - DNA, 25 bp, Homo sapien
gtggataagcgtatcctgggcacca

SEQ ID NO: 2458154 - DNA, 25 bp, Homo sapien
ctggtgtggataagcgtatcctggg

SEQ ID NO: 2458155 - DNA, 25 bp, Homo sapien
gtgtggataagcgtatcctgggcac

SEQ ID NO: 2458156 - DNA, 25 bp, Homo sapien
ttcttccagccttcccacttgtatt

SEQ ID NO: 2458157 - DNA, 25 bp, Homo sapien
ttataagggcatgattttcttccag

SEQ ID NO: 2458158 - DNA, 25 bp, Homo sapien
cagccttcccacttgtattaaacca

SEQ ID NO: 2458159 - DNA, 25 bp, Homo sapien
attataagggcatgattttcttcca

SEQ ID NO: 2458160 - DNA, 25 bp, Homo sapien
tttctgggctatcaaggtgtagggc

SEQ ID NO: 2458161 - DNA, 25 bp, Homo sapien
tctgggctatcaaggtgtagggcag

SEQ ID NO: 2458162 - DNA, 25 bp, Homo sapien
agtttctgggctatcaaggtgtagg

SEQ ID NO: 2458163 - DNA, 25 bp, Homo sapien
ttctgggctatcaaggtgtagggca

SEQ ID NO: 2458164 - DNA, 25 bp, Homo sapien
gaaagattcatatcagttgcttttg

SEQ ID NO: 2458165 - DNA, 25 bp, Homo sapien
aagattcatatcagttgcttttgga

SEQ ID NO: 2458166 - DNA, 25 bp, Homo sapien
tatggaaagattcatatcagttgct

SEQ ID NO: 2458167 - DNA, 25 bp, Homo sapien
aagctatggaaagattcatatcagt

SEQ ID NO: 2458168 - DNA, 25 bp, Homo sapien
tcaccgatatgattttattcggaac

SEQ ID NO: 2458169 - DNA, 25 bp, Homo sapien
ttcggaacttcccataagcacctct

SEQ ID NO: 2458170 - DNA, 25 bp, Homo sapien
ttttattcggaacttcccataagca

SEQ ID NO: 2458171 - DNA, 25 bp, Homo sapien
gatatgattttattcggaacttccc

SEQ ID NO: 2458172 - DNA, 25 bp, Homo sapien
aagggagacatccagtaatgcgtga

SEQ ID NO: 2458173 - DNA, 25 bp, Homo sapien
ctaccacttgggtgaattaagttgc

SEQ ID NO: 2458174 - DNA, 25 bp, Homo sapien
gagtacgtcttctgccctgaattct

SEQ ID NO: 2458175 - DNA, 25 bp, Homo sapien
tctgctaccacttgggtgaattaag

SEQ ID NO: 2458176 - DNA, 25 bp, Homo sapien
tggagttggctttgtgttgggaaag

SEQ ID NO: 2458177 - DNA, 25 bp, Homo sapien
gagttggctttgtgttgggaaagag

SEQ ID NO: 2458178 - DNA, 25 bp, Homo sapien
ggagttggctttgtgttgggaaaga

SEQ ID NO: 2458179 - DNA, 25 bp, Homo sapien
tctgtttgtacagcctccaagtgca

SEQ ID NO: 2458180 - DNA, 25 bp, Homo sapien
aggtgtgttctactgtgcttcctca

SEQ ID NO: 2458181 - DNA, 25 bp, Homo sapien
gccaggtgtgttctactgtgcttcc

SEQ ID NO: 2458182 - DNA, 25 bp, Homo sapien
tcaagatctgtttgtacagcctcca

SEQ ID NO: 2458183 - DNA, 25 bp, Homo sapien
gtatccataatactcatcaagatgt

SEQ ID NO: 2458184 - DNA, 25 bp, Homo sapien
taagtttaacacaaggtagtatcca

SEQ ID NO: 2458185 - DNA, 25 bp, Homo sapien
tagaaagctatatagcttacataag

SEQ ID NO: 2458186 - DNA, 25 bp, Homo sapien
tatttggtcatctctaactgtgtaa

SEQ ID NO: 2458187 - DNA, 25 bp, Homo sapien
tcacacagagttggtgccatgggat

SEQ ID NO: 2458188 - DNA, 25 bp, Homo sapien
tgccagcctctggaatttaccagtc

SEQ ID NO: 2458189 - DNA, 25 bp, Homo sapien
tattgttgcccctccagtattggtg

SEQ ID NO: 2458190 - DNA, 25 bp, Homo sapien
agtctctgtacttcttgcatgccca

SEQ ID NO: 2458191 - DNA, 25 bp, Homo sapien
tgggtaccctcctgtggaacatgat

SEQ ID NO: 2458192 - DNA, 25 bp, Homo sapien
actccacatgcttgggatcacattg

SEQ ID NO: 2458193 - DNA, 25 bp, Homo sapien
cctcctgtggaacatgattttctcc

SEQ ID NO: 2458194 - DNA, 25 bp, Homo sapien
tgggatcacattgggtaccctcctg

SEQ ID NO: 2458195 - DNA, 25 bp, Homo sapien
ccaaagagtataactgctcatatca

SEQ ID NO: 2458196 - DNA, 25 bp, Homo sapien
cagatgatatgaaaatacttacttc

SEQ ID NO: 2458197 - DNA, 25 bp, Homo sapien
cattgtatcattataccagcaaata

SEQ ID NO: 2458198 - DNA, 25 bp, Homo sapien
gcaacatctagtccattgcagatga

SEQ ID NO: 2458199 - DNA, 25 bp, Homo sapien
tcaatttgtagataatcggatgatc

SEQ ID NO: 2458200 - DNA, 25 bp, Homo sapien
gattctggagttatgaaattgtgtg

SEQ ID NO: 2458201 - DNA, 25 bp, Homo sapien
tgtcttcaatttgtagataatcgga

SEQ ID NO: 2458202 - DNA, 25 bp, Homo sapien
tagataatcggatgatctttccggg

SEQ ID NO: 2458203 - DNA, 25 bp, Homo sapien
caacatgcttctctgcgtatatgat

SEQ ID NO: 2458204 - DNA, 25 bp, Homo sapien
ccctttgcacatgggatccaacatg

SEQ ID NO: 2458205 - DNA, 25 bp, Homo sapien
gtcagcatccctttgcacatgggat

SEQ ID NO: 2458206 - DNA, 25 bp, Homo sapien
tgcgtatatgattcgtcttctatca

SEQ ID NO: 2458207 - DNA, 25 bp, Homo sapien
gaaattggtcctaagaataacatta

SEQ ID NO: 2458208 - DNA, 25 bp, Homo sapien
ggacagaaattggtcctaagaataa

SEQ ID NO: 2458209 - DNA, 25 bp, Homo sapien
tgaggacagaaattggtcctaagaa

SEQ ID NO: 2458210 - DNA, 25 bp, Homo sapien
cagaaattggtcctaagaataacat

SEQ ID NO: 2458211 - DNA, 25 bp, Homo sapien
tcatgcaaacacatcagtgactgag

SEQ ID NO: 2458212 - DNA, 25 bp, Homo sapien
tgcaaacacatcagtgactgagagg

SEQ ID NO: 2458213 - DNA, 25 bp, Homo sapien
agtgactgagaggaaatcagcttct

SEQ ID NO: 2458214 - DNA, 25 bp, Homo sapien
gactgagaggaaatcagcttctaga

SEQ ID NO: 2458215 - DNA, 25 bp, Homo sapien
attactcttccttagcttaaattca

SEQ ID NO: 2458216 - DNA, 25 bp, Homo sapien
attttctgtctcatgctcagcaggc

SEQ ID NO: 2458217 - DNA, 25 bp, Homo sapien
tactcttccttagcttaaattcaat

SEQ ID NO: 2458218 - DNA, 25 bp, Homo sapien
tttctgtctcatgctcagcaggctt

SEQ ID NO: 2458219 - DNA, 25 bp, Homo sapien
tgtacgtggactttttcacaactgg

SEQ ID NO: 2458220 - DNA, 25 bp, Homo sapien
tcagtactgaacactgtacgtggac

SEQ ID NO: 2458221 - DNA, 25 bp, Homo sapien
cacaactgggtggtaatgagtctga

SEQ ID NO: 2458222 - DNA, 25 bp, Homo sapien
tatctatccatttcataatgtggtc

SEQ ID NO: 2458223 - DNA, 25 bp, Homo sapien
cccttaacaggaaccacatatattt

SEQ ID NO: 2458224 - DNA, 25 bp, Homo sapien
cccccttaacaggaaccacatatat

SEQ ID NO: 2458225 - DNA, 25 bp, Homo sapien
ctgcactgttctgattttcaaatat

SEQ ID NO: 2458226 - DNA, 25 bp, Homo sapien
cttaacaggaaccacatatatttcc

SEQ ID NO: 2458227 - DNA, 25 bp, Homo sapien
atgacatgaatttcaagagctacta

SEQ ID NO: 2458228 - DNA, 25 bp, Homo sapien
catgacatgaatttcaagagctact

SEQ ID NO: 2458229 - DNA, 25 bp, Homo sapien
tgacatgaatttcaagagctactat

SEQ ID NO: 2458230 - DNA, 25 bp, Homo sapien
tctggcatatggcaccaacaatgag

SEQ ID NO: 2458231 - DNA, 25 bp, Homo sapien
caccaacaatgagggatgaaacact

SEQ ID NO: 2458232 - DNA, 25 bp, Homo sapien
gttgtctgtctctggcatatggcac

SEQ ID NO: 2458233 - DNA, 25 bp, Homo sapien
acatgaaagcacacagtactgactg

SEQ ID NO: 2458234 - DNA, 25 bp, Homo sapien
tgctgggatcatactaatttttcct

SEQ ID NO: 2458235 - DNA, 25 bp, Homo sapien
acactctgcaagatattatccagga

SEQ ID NO: 2458236 - DNA, 25 bp, Homo sapien
tacccaatctagcaaggcaggccaa

SEQ ID NO: 2458237 - DNA, 25 bp, Homo sapien
acttacccaatctagcaaggcaggc

SEQ ID NO: 2458238 - DNA, 25 bp, Homo sapien
gagaactccacaaagatactcctag

SEQ ID NO: 2458239 - DNA, 25 bp, Homo sapien
caatttcacgtggaatctccttgat

SEQ ID NO: 2458240 - DNA, 25 bp, Homo sapien
ttcacgtggaatctccttgatactc

SEQ ID NO: 2458241 - DNA, 25 bp, Homo sapien
tcaatcaatttcacgtggaatctcc

SEQ ID NO: 2458242 - DNA, 25 bp, Homo sapien
atcaatttcacgtggaatctccttg

SEQ ID NO: 2458243 - DNA, 25 bp, Homo sapien
tgtctatgtctatgtttataaccat

SEQ ID NO: 2458244 - DNA, 25 bp, Homo sapien
cattttccatgtcaatgtctatgtc

SEQ ID NO: 2458245 - DNA, 25 bp, Homo sapien
aatgtctatgtctatgtttataacc

SEQ ID NO: 2458246 - DNA, 25 bp, Homo sapien
atcattttccatgtcaatgtctatg

SEQ ID NO: 2458247 - DNA, 25 bp, Homo sapien
tacgcagagaagcatgttggatccc

SEQ ID NO: 2458248 - DNA, 25 bp, Homo sapien
agcatgttggatcccatgtgcaaag

SEQ ID NO: 2458249 - DNA, 25 bp, Homo sapien
gaagacgaatcatatacgcagagaa

SEQ ID NO: 2458250 - DNA, 25 bp, Homo sapien
taatgatggcccatgatagaagacg

SEQ ID NO: 2458251 - DNA, 25 bp, Homo sapien
aggtggagattcttgttcaaattcc

SEQ ID NO: 2458252 - DNA, 25 bp, Homo sapien
caggtggagattcttgttcaaattc

SEQ ID NO: 2458253 - DNA, 25 bp, Homo sapien
ggtggagattcttgttcaaattcca

SEQ ID NO: 2458254 - DNA, 25 bp, Homo sapien
cttttttagggtctgactcattgat

SEQ ID NO: 2458255 - DNA, 25 bp, Homo sapien
tagggtctgactcattgattgtttt

SEQ ID NO: 2458256 - DNA, 25 bp, Homo sapien
ttttagggtctgactcattgattgt

SEQ ID NO: 2458257 - DNA, 25 bp, Homo sapien
gggtctgactcattgattgttttga

SEQ ID NO: 2458258 - DNA, 25 bp, Homo sapien
ctagatgtcatcagtatgttcagca

SEQ ID NO: 2458259 - DNA, 25 bp, Homo sapien
atcagtatgttcagcagagttatct

SEQ ID NO: 2458260 - DNA, 25 bp, Homo sapien
catcagtatgttcagcagagttatc

SEQ ID NO: 2458261 - DNA, 25 bp, Homo sapien
gatgtcatcagtatgttcagcagag

SEQ ID NO: 2458262 - DNA, 25 bp, Homo sapien
atgtagagagtattcatcattatcc

SEQ ID NO: 2458263 - DNA, 25 bp, Homo sapien
atatgtagagagtattcatcattat

SEQ ID NO: 2458264 - DNA, 25 bp, Homo sapien
tagaatatgtagagagtattcatca

SEQ ID NO: 2458265 - DNA, 25 bp, Homo sapien
cactagaatatgtagagagtattca

SEQ ID NO: 2458266 - DNA, 25 bp, Homo sapien
ttcacctccattatagcattcaatc

SEQ ID NO: 2458267 - DNA, 25 bp, Homo sapien
cattcaatccaatggatataacttg

SEQ ID NO: 2458268 - DNA, 25 bp, Homo sapien
tcatcaactgccatgaaaatggtgt

SEQ ID NO: 2458269 - DNA, 25 bp, Homo sapien
aaagtgaagatgagtgtttcacctc

SEQ ID NO: 2458270 - DNA, 25 bp, Homo sapien
ttttctcttggaggtctaccatcag

SEQ ID NO: 2458271 - DNA, 25 bp, Homo sapien
tggaggtctaccatcaggagttccc

SEQ ID NO: 2458272 - DNA, 25 bp, Homo sapien
gatcatgtaatcttagatcattgta

SEQ ID NO: 2458273 - DNA, 25 bp, Homo sapien
cctgggaatgtatcctaagatcatg

SEQ ID NO: 2458274 - DNA, 25 bp, Homo sapien
ctatgtccataggaaagggtttcga

SEQ ID NO: 2458275 - DNA, 25 bp, Homo sapien
tctagaatgataaaggtaaaaggaa

SEQ ID NO: 2458276 - DNA, 25 bp, Homo sapien
tgcgtggaaacactatgtccatagg

SEQ ID NO: 2458277 - DNA, 25 bp, Homo sapien
gctacattttgcgtggaaacactat

SEQ ID NO: 2458278 - DNA, 25 bp, Homo sapien
tccagcaggcgtggggtttctcctg

SEQ ID NO: 2458279 - DNA, 25 bp, Homo sapien
gcgtggggtttctcctgaagacaag

SEQ ID NO: 2458280 - DNA, 25 bp, Homo sapien
gagcccaagatgttgtctgtcttgg

SEQ ID NO: 2458281 - DNA, 25 bp, Homo sapien
agagcccaagatgttgtctgtcttg

SEQ ID NO: 2458282 - DNA, 25 bp, Homo sapien
gtggatattcgttttgccaaagcaa

SEQ ID NO: 2458283 - DNA, 25 bp, Homo sapien
tgctttgtggatattcgttttgcca

SEQ ID NO: 2458284 - DNA, 25 bp, Homo sapien
ttgtggatattcgttttgccaaagc

SEQ ID NO: 2458285 - DNA, 25 bp, Homo sapien
gatattcgttttgccaaagcaaatc

SEQ ID NO: 2458286 - DNA, 25 bp, Homo sapien
tggccccatgtgtcttctctgggca

SEQ ID NO: 2458287 - DNA, 25 bp, Homo sapien
cttttgcaataggaagtggctgccc

SEQ ID NO: 2458288 - DNA, 25 bp, Homo sapien
tgccctgtggccccatgtgtcttct

SEQ ID NO: 2458289 - DNA, 25 bp, Homo sapien
ccctgtggccccatgtgtcttctct

SEQ ID NO: 2458290 - DNA, 25 bp, Homo sapien
gaatgggtctctagatgcgtggtgc

SEQ ID NO: 2458291 - DNA, 25 bp, Homo sapien
cagatgatgaatgggtctctagatg

SEQ ID NO: 2458292 - DNA, 25 bp, Homo sapien
tcatatgtttctggtcatggctttg

SEQ ID NO: 2458293 - DNA, 25 bp, Homo sapien
atgaatgggtctctagatgcgtggt

SEQ ID NO: 2458294 - DNA, 25 bp, Homo sapien
gctctacctggattggtaatgatat

SEQ ID NO: 2458295 - DNA, 25 bp, Homo sapien
tgctctacctggattggtaatgata

SEQ ID NO: 2458296 - DNA, 25 bp, Homo sapien
ttgctctacctggattggtaatgat

SEQ ID NO: 2458297 - DNA, 25 bp, Homo sapien
cctaccccacaacaagcctctgtgt

SEQ ID NO: 2458298 - DNA, 25 bp, Homo sapien
tgtgccttcgagactcctgctcctc

SEQ ID NO: 2458299 - DNA, 25 bp, Homo sapien
ttgcctggctgtgccttcgagactc

SEQ ID NO: 2458300 - DNA, 25 bp, Homo sapien
ctggctgtgccttcgagactcctgc

SEQ ID NO: 2458301 - DNA, 25 bp, Homo sapien
ctgtgccttcgagactcctgctcct

SEQ ID NO: 2458302 - DNA, 25 bp, Homo sapien
actgaaagcattcctctgtgtggga

SEQ ID NO: 2458303 - DNA, 25 bp, Homo sapien
gttgtctaggcttggtttggcctcc

SEQ ID NO: 2458304 - DNA, 25 bp, Homo sapien
aaactgtggaaatggaacgttcaga

SEQ ID NO: 2458305 - DNA, 25 bp, Homo sapien
tggccatgcgtagaccagtccggtt

SEQ ID NO: 2458306 - DNA, 25 bp, Homo sapien
gtctggataatggtatggggtccct

SEQ ID NO: 2458307 - DNA, 25 bp, Homo sapien
tatggtgaatctagtctggaattcc

SEQ ID NO: 2458308 - DNA, 25 bp, Homo sapien
ggtatggggtcccttccaccatggc

SEQ ID NO: 2458309 - DNA, 25 bp, Homo sapien
gtggtctggataatggtatggggtc

SEQ ID NO: 2458310 - DNA, 25 bp, Homo sapien
caagtgattcccaatatctttgccg

SEQ ID NO: 2458311 - DNA, 25 bp, Homo sapien
tacatcagcctcaaatgccggccta

SEQ ID NO: 2458312 - DNA, 25 bp, Homo sapien
tatctttgccgtctctgtactacat

SEQ ID NO: 2458313 - DNA, 25 bp, Homo sapien
tgtaacttccaagtgattcccaata

SEQ ID NO: 2458314 - DNA, 25 bp, Homo sapien
tatgctgtcatcaggtaacccatca

SEQ ID NO: 2458315 - DNA, 25 bp, Homo sapien
catgtacagccagcgtgactgtggc

SEQ ID NO: 2458316 - DNA, 25 bp, Homo sapien
gctctataggcttgtatgccaggag

SEQ ID NO: 2458317 - DNA, 25 bp, Homo sapien
caagtgagtcttggcctgaatgggt

SEQ ID NO: 2458318 - DNA, 25 bp, Homo sapien
gcttctttctcgacctctgttataa

SEQ ID NO: 2458319 - DNA, 25 bp, Homo sapien
ttctcgacctctgttataacacctt

SEQ ID NO: 2458320 - DNA, 25 bp, Homo sapien
ggcttctttctcgacctctgttata

SEQ ID NO: 2458321 - DNA, 25 bp, Homo sapien
tctttctcgacctctgttataacac

SEQ ID NO: 2458322 - DNA, 25 bp, Homo sapien
catgttggagagacagctgtaattt

SEQ ID NO: 2458323 - DNA, 25 bp, Homo sapien
tctaaatttccctggcatgttggag

SEQ ID NO: 2458324 - DNA, 25 bp, Homo sapien
tgaggtcttccaagatgatatagga

SEQ ID NO: 2458325 - DNA, 25 bp, Homo sapien
gagagacagctgtaattttccatga

SEQ ID NO: 2458326 - DNA, 25 bp, Homo sapien
aagaaacatacaggtgcatttgtct

SEQ ID NO: 2458327 - DNA, 25 bp, Homo sapien
ccaagaaacatacaggtgcatttgt

SEQ ID NO: 2458328 - DNA, 25 bp, Homo sapien
caagaaacatacaggtgcatttgtc

SEQ ID NO: 2458329 - DNA, 25 bp, Homo sapien
aattcttctctcacaatgaggtctt

SEQ ID NO: 2458330 - DNA, 25 bp, Homo sapien
tatccagggttttactgatggagag

SEQ ID NO: 2458331 - DNA, 25 bp, Homo sapien
aaattcttctctcacaatgaggtct

SEQ ID NO: 2458332 - DNA, 25 bp, Homo sapien
ccagggttttactgatggagagctt

SEQ ID NO: 2458333 - DNA, 25 bp, Homo sapien
ccaatttggaagtagggagttggct

SEQ ID NO: 2458334 - DNA, 25 bp, Homo sapien
gcgtaacaggtaccacaaggagaca

SEQ ID NO: 2458335 - DNA, 25 bp, Homo sapien
tgaaaagtgaaccacagagactccc

SEQ ID NO: 2458336 - DNA, 25 bp, Homo sapien
tgcatttgctggcaagttggcgtaa

SEQ ID NO: 2458337 - DNA, 25 bp, Homo sapien
aagcatgctggcatgtgtttgctca

SEQ ID NO: 2458338 - DNA, 25 bp, Homo sapien
caaatatccaaagcatgctggcatg

SEQ ID NO: 2458339 - DNA, 25 bp, Homo sapien
tcatcttctccacttggtcctccat

SEQ ID NO: 2458340 - DNA, 25 bp, Homo sapien
gctggcatgtgtttgctcatcttct

SEQ ID NO: 2458341 - DNA, 25 bp, Homo sapien
cctctgaacacttgatctggactga

SEQ ID NO: 2458342 - DNA, 25 bp, Homo sapien
gcttctaaaaatacgggcatctgtc

SEQ ID NO: 2458343 - DNA, 25 bp, Homo sapien
cagtgccacatgaagtcctctgaac

SEQ ID NO: 2458344 - DNA, 25 bp, Homo sapien
ccagagcaatggtctcagtgccaca

SEQ ID NO: 2458345 - DNA, 25 bp, Homo sapien
atgcattcataagctcaagtttctg

SEQ ID NO: 2458346 - DNA, 25 bp, Homo sapien
catgcattcataagctcaagtttct

SEQ ID NO: 2458347 - DNA, 25 bp, Homo sapien
ggatgtaaattttcagcagcatgat

SEQ ID NO: 2458348 - DNA, 25 bp, Homo sapien
aagagggtgtctatgaggatgtaaa

SEQ ID NO: 2458349 - DNA, 25 bp, Homo sapien
ccattttattacaggatggaaagag

SEQ ID NO: 2458350 - DNA, 25 bp, Homo sapien
cagcatgatttcttttgagagtccc

SEQ ID NO: 2458351 - DNA, 25 bp, Homo sapien
aaaaatatagttggttgactgccaa

SEQ ID NO: 2458352 - DNA, 25 bp, Homo sapien
ggtaatgtagtgagggaatcctttc

SEQ ID NO: 2458353 - DNA, 25 bp, Homo sapien
ctaaatgtcaaagcaatggctgttc

SEQ ID NO: 2458354 - DNA, 25 bp, Homo sapien
tgttggattctggtgctaaatgtca

SEQ ID NO: 2458355 - DNA, 25 bp, Homo sapien
cttcactaacaaagcatgacgtcgt

SEQ ID NO: 2458356 - DNA, 25 bp, Homo sapien
gacgtcgttgcgtctttgccgccat

SEQ ID NO: 2458357 - DNA, 25 bp, Homo sapien
ctaacaaagcatgacgtcgttgcgt

SEQ ID NO: 2458358 - DNA, 25 bp, Homo sapien
aagcatgacgtcgttgcgtctttgc

SEQ ID NO: 2458359 - DNA, 25 bp, Homo sapien
gtctgcatattgtatttccgtgaaa

SEQ ID NO: 2458360 - DNA, 25 bp, Homo sapien
aaatagtctgcatattgtatttccg

SEQ ID NO: 2458361 - DNA, 25 bp, Homo sapien
aatgagctcccctttgacattcagg

SEQ ID NO: 2458362 - DNA, 25 bp, Homo sapien
ccgtgaaatcttgtgtttggagatg

SEQ ID NO: 2458363 - DNA, 25 bp, Homo sapien
ttcaatttcctcttcgctctcactg

SEQ ID NO: 2458364 - DNA, 25 bp, Homo sapien
gcagtagtgtgaaggtttcatccca

SEQ ID NO: 2458365 - DNA, 25 bp, Homo sapien
cccaacagtagtataggaagcttcc

SEQ ID NO: 2458366 - DNA, 25 bp, Homo sapien
tctgtagtagtatgggaaagttcca

SEQ ID NO: 2458367 - DNA, 25 bp, Homo sapien
ccatcagtagggtggaaagattcta

SEQ ID NO: 2458368 - DNA, 25 bp, Homo sapien
gaagaccagtgtcatgtttcttctt

SEQ ID NO: 2458369 - DNA, 25 bp, Homo sapien
atttgaagaccagtgtcatgtttct

SEQ ID NO: 2458370 - DNA, 25 bp, Homo sapien
cattcatttgtgatagacaccttaa

SEQ ID NO: 2458371 - DNA, 25 bp, Homo sapien
gatagacaccttaatttttagtatc

SEQ ID NO: 2458372 - DNA, 25 bp, Homo sapien
ttcatgaatgttccatgaccacaca

SEQ ID NO: 2458373 - DNA, 25 bp, Homo sapien
tcatgaattcatgaatgttccatga

SEQ ID NO: 2458374 - DNA, 25 bp, Homo sapien
gaattcatgaatgttccatgaccac

SEQ ID NO: 2458375 - DNA, 25 bp, Homo sapien
tcatgaatgttccatgaccacacac

SEQ ID NO: 2458376 - DNA, 25 bp, Homo sapien
tgttagtctccacaatgaagtttgc

SEQ ID NO: 2458377 - DNA, 25 bp, Homo sapien
atttttctaaaccactcagcttgtt

SEQ ID NO: 2458378 - DNA, 25 bp, Homo sapien
caatgtgatccaaacacgacagcat

SEQ ID NO: 2458379 - DNA, 25 bp, Homo sapien
aagtttgcatggcacaatgtgatcc

SEQ ID NO: 2458380 - DNA, 25 bp, Homo sapien
gtttcatccctgagcatgctacact

SEQ ID NO: 2458381 - DNA, 25 bp, Homo sapien
tgtctcctctgtaagggccacactt

SEQ ID NO: 2458382 - DNA, 25 bp, Homo sapien
tcccctgtgaggacaacacttctgt

SEQ ID NO: 2458383 - DNA, 25 bp, Homo sapien
agtgtctctattgtgcataccacgc

SEQ ID NO: 2458384 - DNA, 25 bp, Homo sapien
tgtgtgggacatacttcctgtgtct

SEQ ID NO: 2458385 - DNA, 25 bp, Homo sapien
tgtgggacatacttcctgtgtctct

SEQ ID NO: 2458386 - DNA, 25 bp, Homo sapien
ccctgtgtgggacatacttcctgtg

SEQ ID NO: 2458387 - DNA, 25 bp, Homo sapien
tttcccctgtgtgggacatacttcc

SEQ ID NO: 2458388 - DNA, 25 bp, Homo sapien
ggcaggacacgctttctgttactct

SEQ ID NO: 2458389 - DNA, 25 bp, Homo sapien
ttctcccctaggcaggacacgcttt

SEQ ID NO: 2458390 - DNA, 25 bp, Homo sapien
cctgtgcaggataaacttcttgtgt

SEQ ID NO: 2458391 - DNA, 25 bp, Homo sapien
cacatatatggctttccccctgtgc

SEQ ID NO: 2458392 - DNA, 25 bp, Homo sapien
ctgcacagtggagacacagggagca

SEQ ID NO: 2458393 - DNA, 25 bp, Homo sapien
tgcacagtggagacacagggagcat

SEQ ID NO: 2458394 - DNA, 25 bp, Homo sapien
acagtggagacacagggagcatgtc

SEQ ID NO: 2458395 - DNA, 25 bp, Homo sapien
cacagtggagacacagggagcatgt

SEQ ID NO: 2458396 - DNA, 25 bp, Homo sapien
agtgtgtcccacacaagagagacac

SEQ ID NO: 2458397 - DNA, 25 bp, Homo sapien
agaagtgtgtcccacacaagagaga

SEQ ID NO: 2458398 - DNA, 25 bp, Homo sapien
tgtgtcccacacaagagagacacag

SEQ ID NO: 2458399 - DNA, 25 bp, Homo sapien
caagaagtgtgtcctatgtagggga

SEQ ID NO: 2458400 - DNA, 25 bp, Homo sapien
gtcatgtgggcgcatttctttcaca

SEQ ID NO: 2458401 - DNA, 25 bp, Homo sapien
gagatactgcagtcatgtgggcgca

SEQ ID NO: 2458402 - DNA, 25 bp, Homo sapien
ctgcagtcatgtgggcgcatttctt

SEQ ID NO: 2458403 - DNA, 25 bp, Homo sapien
ctgagatactgcagtcatgtgggcg

SEQ ID NO: 2458404 - DNA, 25 bp, Homo sapien
tttcctgtctgtgtaggacacactt

SEQ ID NO: 2458405 - DNA, 25 bp, Homo sapien
tgtctcccctgtacgtgccacactt

SEQ ID NO: 2458406 - DNA, 25 bp, Homo sapien
tcctgtctgtgtaggacacacttcc

SEQ ID NO: 2458407 - DNA, 25 bp, Homo sapien
tgtgtctcccctgtacgtgccacac

SEQ ID NO: 2458408 - DNA, 25 bp, Homo sapien
cctttctcctctgtgtagcacacac

SEQ ID NO: 2458409 - DNA, 25 bp, Homo sapien
ccctttctcctctgtgtagcacaca

SEQ ID NO: 2458410 - DNA, 25 bp, Homo sapien
cttttgctcccctgtgcagcacatt

SEQ ID NO: 2458411 - DNA, 25 bp, Homo sapien
ctctcctgtgtggaacatacttcct

SEQ ID NO: 2458412 - DNA, 25 bp, Homo sapien
cctgtgcagcacatttcctgttcct

SEQ ID NO: 2458413 - DNA, 25 bp, Homo sapien
cctgttcctcctctttcatgacgta

SEQ ID NO: 2458414 - DNA, 25 bp, Homo sapien
gacaccttcctgtgtctttcccgtg

SEQ ID NO: 2458415 - DNA, 25 bp, Homo sapien
ttcctgagtcttccctgtgcatgcc

SEQ ID NO: 2458416 - DNA, 25 bp, Homo sapien
ccttcctgtgtctttcccgtgagag

SEQ ID NO: 2458417 - DNA, 25 bp, Homo sapien
tgagtcttccctgtgcatgccactc

SEQ ID NO: 2458418 - DNA, 25 bp, Homo sapien
gacacacttcttgttactcccatgt

SEQ ID NO: 2458419 - DNA, 25 bp, Homo sapien
tgtctgttcctccactatgcaggac

SEQ ID NO: 2458420 - DNA, 25 bp, Homo sapien
tccttgttgcagcatacactgtctg

SEQ ID NO: 2458421 - DNA, 25 bp, Homo sapien
tcccatgtgcctgacacactttctg

SEQ ID NO: 2458422 - DNA, 25 bp, Homo sapien
tttcccatgtgcctgaaatacttcc

SEQ ID NO: 2458423 - DNA, 25 bp, Homo sapien
tctgttgtgcatgccacacttcctg

SEQ ID NO: 2458424 - DNA, 25 bp, Homo sapien
ggagcatacactttttgttcttcct

SEQ ID NO: 2458425 - DNA, 25 bp, Homo sapien
cctgttttggctctgtggagcatac

SEQ ID NO: 2458426 - DNA, 25 bp, Homo sapien
gtttcatctcagaacaggccacact

SEQ ID NO: 2458427 - DNA, 25 bp, Homo sapien
atttcttccatgtgcaggacacact

SEQ ID NO: 2458428 - DNA, 25 bp, Homo sapien
ttctgtttctctgctatgcccaaca

SEQ ID NO: 2458429 - DNA, 25 bp, Homo sapien
tgtttttcccctgtgtagcacacac

SEQ ID NO: 2458430 - DNA, 25 bp, Homo sapien
cttgtgcccgacacagttcctgttt

SEQ ID NO: 2458431 - DNA, 25 bp, Homo sapien
tcctgtttctcccttgtacctgatg

SEQ ID NO: 2458432 - DNA, 25 bp, Homo sapien
tgtttctcccttgtacctgatgtcc

SEQ ID NO: 2458433 - DNA, 25 bp, Homo sapien
tcccttgtgcccgacacagttcctg

SEQ ID NO: 2458434 - DNA, 25 bp, Homo sapien
cttctttgaactggccatacttcct

SEQ ID NO: 2458435 - DNA, 25 bp, Homo sapien
ctttgaactggccatacttcctgtt

SEQ ID NO: 2458436 - DNA, 25 bp, Homo sapien
tgaactggccatacttcctgttctt

SEQ ID NO: 2458437 - DNA, 25 bp, Homo sapien
tttgaactggccatacttcctgttc

SEQ ID NO: 2458438 - DNA, 25 bp, Homo sapien
ggacacagttcctctttctaccctg

SEQ ID NO: 2458439 - DNA, 25 bp, Homo sapien
gtgcccaacatacttcctgcttctt

SEQ ID NO: 2458440 - DNA, 25 bp, Homo sapien
tctgtacaactatttcctgtgtctt

SEQ ID NO: 2458441 - DNA, 25 bp, Homo sapien
tcttctgtctgtacaactatttcct

SEQ ID NO: 2458442 - DNA, 25 bp, Homo sapien
cggaagattttttaccatgtcctgt

SEQ ID NO: 2458443 - DNA, 25 bp, Homo sapien
ctggatcccacaggcagctccctcc

SEQ ID NO: 2458444 - DNA, 25 bp, Homo sapien
ggatcccacaggcagctccctcctc

SEQ ID NO: 2458445 - DNA, 25 bp, Homo sapien
tcccacaggcagctccctcctccat

SEQ ID NO: 2458446 - DNA, 25 bp, Homo sapien
atcccacaggcagctccctcctcca

SEQ ID NO: 2458447 - DNA, 25 bp, Homo sapien
ctgagtcatacaaggcttctgggcc

SEQ ID NO: 2458448 - DNA, 25 bp, Homo sapien
gctgcacctcggtctgcagctctct

SEQ ID NO: 2458449 - DNA, 25 bp, Homo sapien
gctgtttctgagtcatacaaggctt

SEQ ID NO: 2458450 - DNA, 25 bp, Homo sapien
tttggtgcccacagtgggtctagga

SEQ ID NO: 2458451 - DNA, 25 bp, Homo sapien
tgcccctcatttttcttccgtggaa

SEQ ID NO: 2458452 - DNA, 25 bp, Homo sapien
atttgcccctcatttttcttccgtg

SEQ ID NO: 2458453 - DNA, 25 bp, Homo sapien
ctttctctccccattgtacttcatt

SEQ ID NO: 2458454 - DNA, 25 bp, Homo sapien
tcttccgtggaattttatttgctga

SEQ ID NO: 2458455 - DNA, 25 bp, Homo sapien
gcccattttgtcttatgcattacca

SEQ ID NO: 2458456 - DNA, 25 bp, Homo sapien
ccgtgaggattctgaaatgaattcc

SEQ ID NO: 2458457 - DNA, 25 bp, Homo sapien
tgtcttatgcattaccaccgtgagg

SEQ ID NO: 2458458 - DNA, 25 bp, Homo sapien
gcattaccaccgtgaggattctgaa

SEQ ID NO: 2458459 - DNA, 25 bp, Homo sapien
ctatgcaatgatcagagatttcctg

SEQ ID NO: 2458460 - DNA, 25 bp, Homo sapien
ttatagaccgagagcaagctagcca

SEQ ID NO: 2458461 - DNA, 25 bp, Homo sapien
ttagattgcactcatgtccttgacc

SEQ ID NO: 2458462 - DNA, 25 bp, Homo sapien
cagagatttcctgatatatttagaa

SEQ ID NO: 2458463 - DNA, 25 bp, Homo sapien
tgtttaccagattctgagacttcca

SEQ ID NO: 2458464 - DNA, 25 bp, Homo sapien
ctgtttaccagattctgagacttcc

SEQ ID NO: 2458465 - DNA, 25 bp, Homo sapien
ccacacgttgaagaattatgacatc

SEQ ID NO: 2458466 - DNA, 25 bp, Homo sapien
cactattatctcgtgcacatgttga

SEQ ID NO: 2458467 - DNA, 25 bp, Homo sapien
tcgtgcacatgttgaccacacgttg

SEQ ID NO: 2458468 - DNA, 25 bp, Homo sapien
gcatcttgcactattatctcgtgca

SEQ ID NO: 2458469 - DNA, 25 bp, Homo sapien
gacagatttgtaagtgtccatttcc

SEQ ID NO: 2458470 - DNA, 25 bp, Homo sapien
gctaggttagtatggacagatttgt

SEQ ID NO: 2458471 - DNA, 25 bp, Homo sapien
gagactcagagctggctaggttagt

SEQ ID NO: 2458472 - DNA, 25 bp, Homo sapien
cagagctggctaggttagtatggac

SEQ ID NO: 2458473 - DNA, 25 bp, Homo sapien
cacatatagtatcttttcccaattt

SEQ ID NO: 2458474 - DNA, 25 bp, Homo sapien
accacatatagtatcttttcccaat

SEQ ID NO: 2458475 - DNA, 25 bp, Homo sapien
tttccatctcttcaccctgattatt

SEQ ID NO: 2458476 - DNA, 25 bp, Homo sapien
tgattattatcttcaccaggtttca

SEQ ID NO: 2458477 - DNA, 25 bp, Homo sapien
ggaccctgttgtggaaagtgtcctg

SEQ ID NO: 2458478 - DNA, 25 bp, Homo sapien
gaccctgttgtggaaagtgtcctga

SEQ ID NO: 2458479 - DNA, 25 bp, Homo sapien
tcccactgatgtaattggatggtgg

SEQ ID NO: 2458480 - DNA, 25 bp, Homo sapien
cctgagtgtgagtcaaggagtggcc

SEQ ID NO: 2458481 - DNA, 25 bp, Homo sapien
ggccatcccactgatgtaattggat

SEQ ID NO: 2458482 - DNA, 25 bp, Homo sapien
gagtcaaggagtggccatcccactg

SEQ ID NO: 2458483 - DNA, 25 bp, Homo sapien
cacatcatagtatctagaggaggct

SEQ ID NO: 2458484 - DNA, 25 bp, Homo sapien
gaaaatcatcgattagacctatgag

SEQ ID NO: 2458485 - DNA, 25 bp, Homo sapien
ccaaattgagatgatgtactaggac

SEQ ID NO: 2458486 - DNA, 25 bp, Homo sapien
ctaggactgtggatagagcacatgt

SEQ ID NO: 2458487 - DNA, 25 bp, Homo sapien
gaggccaacaaaagtccgcagaagc

SEQ ID NO: 2458488 - DNA, 25 bp, Homo sapien
cagaggccaacaaaagtccgcagaa

SEQ ID NO: 2458489 - DNA, 25 bp, Homo sapien
gacatttcccgaactacagaggcca

SEQ ID NO: 2458490 - DNA, 25 bp, Homo sapien
atgtatgacatttcccgaactacag

SEQ ID NO: 2458491 - DNA, 25 bp, Homo sapien
tcggcaactgcgtgtcagctttggg

SEQ ID NO: 2458492 - DNA, 25 bp, Homo sapien
gattcacgcagaggaataaggacat

SEQ ID NO: 2458493 - DNA, 25 bp, Homo sapien
gacatccttcggcaactgcgtgtca

SEQ ID NO: 2458494 - DNA, 25 bp, Homo sapien
cctctgggattcacgcagaggaata

SEQ ID NO: 2458495 - DNA, 25 bp, Homo sapien
cagcattcatccaagggcctttccg

SEQ ID NO: 2458496 - DNA, 25 bp, Homo sapien
ccatgcaggggggtactggactgct

SEQ ID NO: 2458497 - DNA, 25 bp, Homo sapien
actgctggggtccaagggtccaggc

SEQ ID NO: 2458498 - DNA, 25 bp, Homo sapien
agggcctttccgcaacttgggccat

SEQ ID NO: 2458499 - DNA, 25 bp, Homo sapien
tcctcagccttggcatcctggtact

SEQ ID NO: 2458500 - DNA, 25 bp, Homo sapien
ctcctcctcagccttggcatcctgg

SEQ ID NO: 2458501 - DNA, 25 bp, Homo sapien
tcctcctcagcacactcctcaaact

SEQ ID NO: 2458502 - DNA, 25 bp, Homo sapien
acctcctcctcagcacactcctcaa

SEQ ID NO: 2458503 - DNA, 25 bp, Homo sapien
aacaatgctgttgcccatgaaggtg

SEQ ID NO: 2458504 - DNA, 25 bp, Homo sapien
tttcctggataacaatgctgttgcc

SEQ ID NO: 2458505 - DNA, 25 bp, Homo sapien
tgcccatgaaggtggccaacatttt

SEQ ID NO: 2458506 - DNA, 25 bp, Homo sapien
catgaaggtggccaacatttttagc

SEQ ID NO: 2458507 - DNA, 25 bp, Homo sapien
cagatggctgtttttacgttgtggg

SEQ ID NO: 2458508 - DNA, 25 bp, Homo sapien
gtgggggagccagtcagcaaagtag

SEQ ID NO: 2458509 - DNA, 25 bp, Homo sapien
ctggggtgggatgtgacagatggct

SEQ ID NO: 2458510 - DNA, 25 bp, Homo sapien
tggggtgggatgtgacagatggctg

SEQ ID NO: 2458511 - DNA, 25 bp, Homo sapien
gcagccatcatattcttagcataaa

SEQ ID NO: 2458512 - DNA, 25 bp, Homo sapien
agccatcatattcttagcataaaac

SEQ ID NO: 2458513 - DNA, 25 bp, Homo sapien
aggggcagccatcatattcttagca

SEQ ID NO: 2458514 - DNA, 25 bp, Homo sapien
gggcagccatcatattcttagcata

SEQ ID NO: 2458515 - DNA, 25 bp, Homo sapien
tcagccacagtcagggcctggtaat

SEQ ID NO: 2458516 - DNA, 25 bp, Homo sapien
acagtcagggcctggtaatgctggc

SEQ ID NO: 2458517 - DNA, 25 bp, Homo sapien
cagccacagtcagggcctggtaatg

SEQ ID NO: 2458518 - DNA, 25 bp, Homo sapien
gccacagtcagggcctggtaatgct

SEQ ID NO: 2458519 - DNA, 25 bp, Homo sapien
tgttcacagacagcttctgtaggtc

SEQ ID NO: 2458520 - DNA, 25 bp, Homo sapien
catgttcacagacagcttctgtagg

SEQ ID NO: 2458521 - DNA, 25 bp, Homo sapien
ttctgtaggtcagcattcagctgac

SEQ ID NO: 2458522 - DNA, 25 bp, Homo sapien
ttcacagacagcttctgtaggtcag

SEQ ID NO: 2458523 - DNA, 25 bp, Homo sapien
ctgggaagcccaggcacatggtgac

SEQ ID NO: 2458524 - DNA, 25 bp, Homo sapien
ggaagcccaggcacatggtgacccc

SEQ ID NO: 2458525 - DNA, 25 bp, Homo sapien
aagcccaggcacatggtgaccccac

SEQ ID NO: 2458526 - DNA, 25 bp, Homo sapien
gggaagcccaggcacatggtgaccc

SEQ ID NO: 2458527 - DNA, 25 bp, Homo sapien
agcagataacaggtggttcatgtca

SEQ ID NO: 2458528 - DNA, 25 bp, Homo sapien
tagcagataacaggtggttcatgtc

SEQ ID NO: 2458529 - DNA, 25 bp, Homo sapien
tgacagggtggcattgtagagttcc

SEQ ID NO: 2458530 - DNA, 25 bp, Homo sapien
acagggtggcattgtagagttccac

SEQ ID NO: 2458531 - DNA, 25 bp, Homo sapien
gacagggtggcattgtagagttcca

SEQ ID NO: 2458532 - DNA, 25 bp, Homo sapien
ggtacccatcccagatgcagttccc

SEQ ID NO: 2458533 - DNA, 25 bp, Homo sapien
gtacccatcccagatgcagttcccc

SEQ ID NO: 2458534 - DNA, 25 bp, Homo sapien
tggccttgtttcaagccccacactg

SEQ ID NO: 2458535 - DNA, 25 bp, Homo sapien
ggccttgtttcaagccccacactga

SEQ ID NO: 2458536 - DNA, 25 bp, Homo sapien
caaagatgaggttgtcggcctgaag

SEQ ID NO: 2458537 - DNA, 25 bp, Homo sapien
aagatgaggttgtcggcctgaagat

SEQ ID NO: 2458538 - DNA, 25 bp, Homo sapien
tgaggttgtcggcctgaagatgagc

SEQ ID NO: 2458539 - DNA, 25 bp, Homo sapien
gaggttgtcggcctgaagatgagcc

SEQ ID NO: 2458540 - DNA, 25 bp, Homo sapien
ggcctcgttgtagtacacgttgatg

SEQ ID NO: 2458541 - DNA, 25 bp, Homo sapien
cgctggcctcgttgtagtacacgtt

SEQ ID NO: 2458542 - DNA, 25 bp, Homo sapien
gctggcctcgttgtagtacacgttg

SEQ ID NO: 2458543 - DNA, 25 bp, Homo sapien
cctcgttgtagtacacgttgatgcg

SEQ ID NO: 2458544 - DNA, 25 bp, Homo sapien
tgccagcggagtcaatgggatgttc

SEQ ID NO: 2458545 - DNA, 25 bp, Homo sapien
acagctgcaggttgctctccccgtg

SEQ ID NO: 2458546 - DNA, 25 bp, Homo sapien
agcggagtcaatgggatgttcatca

SEQ ID NO: 2458547 - DNA, 25 bp, Homo sapien
ctacagctgcaggttgctctccccg

SEQ ID NO: 2458548 - DNA, 25 bp, Homo sapien
tgcgtccccggcagggagcccaggg

SEQ ID NO: 2458549 - DNA, 25 bp, Homo sapien
cccaggggctgcaattcaggggcac

SEQ ID NO: 2458550 - DNA, 25 bp, Homo sapien
ggagcccaggggctgcaattcaggg

SEQ ID NO: 2458551 - DNA, 25 bp, Homo sapien
gagcccaggggctgcaattcagggg

SEQ ID NO: 2458552 - DNA, 25 bp, Homo sapien
ggccacccagtaggccggagctggg

SEQ ID NO: 2458553 - DNA, 25 bp, Homo sapien
tggccacccagtaggccggagctgg

SEQ ID NO: 2458554 - DNA, 25 bp, Homo sapien
gccgggtctgcgtgagcgcaatctc

SEQ ID NO: 2458555 - DNA, 25 bp, Homo sapien
aatctaaagcataggctcacaaaaa

SEQ ID NO: 2458556 - DNA, 25 bp, Homo sapien
gcaagatatgattctttattgttat

SEQ ID NO: 2458557 - DNA, 25 bp, Homo sapien
tagatacaactagataaatagagaa

SEQ ID NO: 2458558 - DNA, 25 bp, Homo sapien
cataggctcacaaaaatctgggatt

SEQ ID NO: 2458559 - DNA, 25 bp, Homo sapien
ttcctcaccaccagcagtgatggcg

SEQ ID NO: 2458560 - DNA, 25 bp, Homo sapien
gatggcgtggtgcagagatcaactc

SEQ ID NO: 2458561 - DNA, 25 bp, Homo sapien
cactgaaagaggcaccatttcctca

SEQ ID NO: 2458562 - DNA, 25 bp, Homo sapien
cagtgatggcgtggtgcagagatca

SEQ ID NO: 2458563 - DNA, 25 bp, Homo sapien
gaaagatagctacgaataaccccac

SEQ ID NO: 2458564 - DNA, 25 bp, Homo sapien
gaacatctgctagcattgtcaccat

SEQ ID NO: 2458565 - DNA, 25 bp, Homo sapien
ccccacacagtgaagtctacaatta

SEQ ID NO: 2458566 - DNA, 25 bp, Homo sapien
gctgcatgccaaagttttaatgtcc

SEQ ID NO: 2458567 - DNA, 25 bp, Homo sapien
cttcgccagtcacgaggcaatccgt

SEQ ID NO: 2458568 - DNA, 25 bp, Homo sapien
gcaccgtcttcgtgtcaactccagt

SEQ ID NO: 2458569 - DNA, 25 bp, Homo sapien
gattcccattggcaccgtcttcgtg

SEQ ID NO: 2458570 - DNA, 25 bp, Homo sapien
cattgccttcgccagtcacgaggca

SEQ ID NO: 2458571 - DNA, 25 bp, Homo sapien
gagggaaggacgcactctccaaatc

SEQ ID NO: 2458572 - DNA, 25 bp, Homo sapien
tcccaccagagggaaggacgcactc

SEQ ID NO: 2458573 - DNA, 25 bp, Homo sapien
aggacgcactctccaaatctcggtg

SEQ ID NO: 2458574 - DNA, 25 bp, Homo sapien
gcctcggcccggtcggcacgctctg

SEQ ID NO: 2458575 - DNA, 25 bp, Homo sapien
gccatgtccttgtccggacaagcga

SEQ ID NO: 2458576 - DNA, 25 bp, Homo sapien
catgggccatgtccttgtccggaca

SEQ ID NO: 2458577 - DNA, 25 bp, Homo sapien
tggccatgggccatgtccttgtccg

SEQ ID NO: 2458578 - DNA, 25 bp, Homo sapien
tgggccatgtccttgtccggacaag

SEQ ID NO: 2458579 - DNA, 25 bp, Homo sapien
ggcccatggggctaggccacctgtt

SEQ ID NO: 2458580 - DNA, 25 bp, Homo sapien
aggccacctgttcacccttgagcag

SEQ ID NO: 2458581 - DNA, 25 bp, Homo sapien
ctgttagggacgttgtaagagaaag

SEQ ID NO: 2458582 - DNA, 25 bp, Homo sapien
gggctaggccacctgttcacccttg

SEQ ID NO: 2458583 - DNA, 25 bp, Homo sapien
acctcctcgtacaccgccgggcagc

SEQ ID NO: 2458584 - DNA, 25 bp, Homo sapien
ctcctcgtacaccgccgggcagcag

SEQ ID NO: 2458585 - DNA, 25 bp, Homo sapien
tcctcgtacaccgccgggcagcagc

SEQ ID NO: 2458586 - DNA, 25 bp, Homo sapien
cctcctcgtacaccgccgggcagca

SEQ ID NO: 2458587 - DNA, 25 bp, Homo sapien
gggtgtccccatgagcacggcatgc

SEQ ID NO: 2458588 - DNA, 25 bp, Homo sapien
tcaaggactccacgacttcccaaat

SEQ ID NO: 2458589 - DNA, 25 bp, Homo sapien
cctattaagattggcgtcctgttcc

SEQ ID NO: 2458590 - DNA, 25 bp, Homo sapien
tttcttgacgctttctggtgcccct

SEQ ID NO: 2458591 - DNA, 25 bp, Homo sapien
gagttgtggcatgctgttcgaccag

SEQ ID NO: 2458592 - DNA, 25 bp, Homo sapien
tgagtcaaaagacaacccgtggcgc

SEQ ID NO: 2458593 - DNA, 25 bp, Homo sapien
cccgtggcgcatgagagtttgaaga

SEQ ID NO: 2458594 - DNA, 25 bp, Homo sapien
tacgtccttgtggatctcgggccaa

SEQ ID NO: 2458595 - DNA, 25 bp, Homo sapien
catttctgtgttttaggtgcatccg

SEQ ID NO: 2458596 - DNA, 25 bp, Homo sapien
agaatcatttctgtgttttaggtgc

SEQ ID NO: 2458597 - DNA, 25 bp, Homo sapien
atcatttctgtgttttaggtgcatc

SEQ ID NO: 2458598 - DNA, 25 bp, Homo sapien
gaatcatttctgtgttttaggtgca

SEQ ID NO: 2458599 - DNA, 25 bp, Homo sapien
ccatgaggccagaagctgacatcct

SEQ ID NO: 2458600 - DNA, 25 bp, Homo sapien
tcttacgtgtacagtctcatgatag

SEQ ID NO: 2458601 - DNA, 25 bp, Homo sapien
atttaaacaagccagccaagcgccc

SEQ ID NO: 2458602 - DNA, 25 bp, Homo sapien
gactcttcagtccagagtccatgag

SEQ ID NO: 2458603 - DNA, 25 bp, Homo sapien
ccatgccaccgccttggcgacagaa

SEQ ID NO: 2458604 - DNA, 25 bp, Homo sapien
tgccaccgccttggcgacagaagga

SEQ ID NO: 2458605 - DNA, 25 bp, Homo sapien
gagaccatgccaccgccttggcgac

SEQ ID NO: 2458606 - DNA, 25 bp, Homo sapien
ccgagaccatgccaccgccttggcg

SEQ ID NO: 2458607 - DNA, 25 bp, Homo sapien
tagtggatgcaggtggtagtgctgc

SEQ ID NO: 2458608 - DNA, 25 bp, Homo sapien
ctagtggatgcaggtggtagtgctg

SEQ ID NO: 2458609 - DNA, 25 bp, Homo sapien
gtggatgcaggtggtagtgctgctg

SEQ ID NO: 2458610 - DNA, 25 bp, Homo sapien
agtggatgcaggtggtagtgctgct

SEQ ID NO: 2458611 - DNA, 25 bp, Homo sapien
ccagggctcgcggaaggacccagtt

SEQ ID NO: 2458612 - DNA, 25 bp, Homo sapien
ccagcgctcgccgatgacatcttat

SEQ ID NO: 2458613 - DNA, 25 bp, Homo sapien
agttgacggtcaagtccagcgctcg

SEQ ID NO: 2458614 - DNA, 25 bp, Homo sapien
gatgacatcttatggacccagggct

SEQ ID NO: 2458615 - DNA, 25 bp, Homo sapien
acaccaagccggcccacctttgctg

SEQ ID NO: 2458616 - DNA, 25 bp, Homo sapien
cacaccaagccggcccacctttgct

SEQ ID NO: 2458617 - DNA, 25 bp, Homo sapien
cagtgactggttcatatcccatcgc

SEQ ID NO: 2458618 - DNA, 25 bp, Homo sapien
gtgactggttcatatcccatcgccg

SEQ ID NO: 2458619 - DNA, 25 bp, Homo sapien
tgactggttcatatcccatcgccgc

SEQ ID NO: 2458620 - DNA, 25 bp, Homo sapien
gactggttcatatcccatcgccgcg

SEQ ID NO: 2458621 - DNA, 25 bp, Homo sapien
atcggccaccactgggcacgcgtga

SEQ ID NO: 2458622 - DNA, 25 bp, Homo sapien
caccactgggcacgcgtgaacacta

SEQ ID NO: 2458623 - DNA, 25 bp, Homo sapien
cccatcggccaccactgggcacgcg

SEQ ID NO: 2458624 - DNA, 25 bp, Homo sapien
gccaccactgggcacgcgtgaacac

SEQ ID NO: 2458625 - DNA, 25 bp, Homo sapien
ggctcggtgaatccaatctcagccc

SEQ ID NO: 2458626 - DNA, 25 bp, Homo sapien
ctcggacaaccactcctgagtcatt

SEQ ID NO: 2458627 - DNA, 25 bp, Homo sapien
tcaccaggctcggtgaatccaatct

SEQ ID NO: 2458628 - DNA, 25 bp, Homo sapien
tcggacaaccactcctgagtcattc

SEQ ID NO: 2458629 - DNA, 25 bp, Homo sapien
gaggaggtggaatcggagaggtgga

SEQ ID NO: 2458630 - DNA, 25 bp, Homo sapien
tggaggagttcccagcggggtgcga

SEQ ID NO: 2458631 - DNA, 25 bp, Homo sapien
gaggaggaggtggaatcggagaggt

SEQ ID NO: 2458632 - DNA, 25 bp, Homo sapien
tcccagcggggtgcgaggaggaggt

SEQ ID NO: 2458633 - DNA, 25 bp, Homo sapien
agagccttgtgtggaggtctgactt

SEQ ID NO: 2458634 - DNA, 25 bp, Homo sapien
cagagagccttgtgtggaggtctga

SEQ ID NO: 2458635 - DNA, 25 bp, Homo sapien
tgctctgctccatggaaaaccctga

SEQ ID NO: 2458636 - DNA, 25 bp, Homo sapien
gctctgctccatggaaaaccctgac

SEQ ID NO: 2458637 - DNA, 25 bp, Homo sapien
tctgcaccggatcccggtttccgga

SEQ ID NO: 2458638 - DNA, 25 bp, Homo sapien
cggtttccggagcacggcaggacat

SEQ ID NO: 2458639 - DNA, 25 bp, Homo sapien
ccggtttccggagcacggcaggaca

SEQ ID NO: 2458640 - DNA, 25 bp, Homo sapien
gccaacaaaggttccgtggcgctgc

SEQ ID NO: 2458641 - DNA, 25 bp, Homo sapien
cagtctgccttgtccttcgcaaaga

SEQ ID NO: 2458642 - DNA, 25 bp, Homo sapien
tagagtccttcagtcctaatcccgc

SEQ ID NO: 2458643 - DNA, 25 bp, Homo sapien
ggcgctgccttatcattcctcatgg

SEQ ID NO: 2458644 - DNA, 25 bp, Homo sapien
gatgcatcgcaaagggccctgagaa

SEQ ID NO: 2458645 - DNA, 25 bp, Homo sapien
gcagttccaggagagtagaaggtct

SEQ ID NO: 2458646 - DNA, 25 bp, Homo sapien
tgagaaccaggggaatatgcaacac

SEQ ID NO: 2458647 - DNA, 25 bp, Homo sapien
gtagaaggtctagcaagaatgccca

SEQ ID NO: 2458648 - DNA, 25 bp, Homo sapien
aatttggaggagagtagtgggccct

SEQ ID NO: 2458649 - DNA, 25 bp, Homo sapien
caatgggagcctcgcgaatttggag

SEQ ID NO: 2458650 - DNA, 25 bp, Homo sapien
gacaatgggagcctcgcgaatttgg

SEQ ID NO: 2458651 - DNA, 25 bp, Homo sapien
acaatgggagcctcgcgaatttgga

SEQ ID NO: 2458652 - DNA, 25 bp, Homo sapien
tcttccatcccaatatatttccgtc

SEQ ID NO: 2458653 - DNA, 25 bp, Homo sapien
cttccatcccaatatatttccgtca

SEQ ID NO: 2458654 - DNA, 25 bp, Homo sapien
ttccatcccaatatatttccgtcat

SEQ ID NO: 2458655 - DNA, 25 bp, Homo sapien
aatgctttctgttggtgcggtcagg

SEQ ID NO: 2458656 - DNA, 25 bp, Homo sapien
gttggtgcggtcagggagaagtgct

SEQ ID NO: 2458657 - DNA, 25 bp, Homo sapien
gctgtccctctaatactagagcagt

SEQ ID NO: 2458658 - DNA, 25 bp, Homo sapien
gggagaagtgctgtccctctaatac

SEQ ID NO: 2458659 - DNA, 25 bp, Homo sapien
tttcaaatttggtggagatgactca

SEQ ID NO: 2458660 - DNA, 25 bp, Homo sapien
caggaaacaagttgactctgaaaat

SEQ ID NO: 2458661 - DNA, 25 bp, Homo sapien
aggaaacaagttgactctgaaaatg

SEQ ID NO: 2458662 - DNA, 25 bp, Homo sapien
cacggccatccgttcgtttagtccg

SEQ ID NO: 2458663 - DNA, 25 bp, Homo sapien
tgacgcgaggtgagtacctctcctt

SEQ ID NO: 2458664 - DNA, 25 bp, Homo sapien
actccagtccaatttggctgacgcg

SEQ ID NO: 2458665 - DNA, 25 bp, Homo sapien
ctacacggccatccgttcgtttagt

SEQ ID NO: 2458666 - DNA, 25 bp, Homo sapien
ccacgtggtctgagtgaacccagaa

SEQ ID NO: 2458667 - DNA, 25 bp, Homo sapien
tcttacttccttttttctctgctgc

SEQ ID NO: 2458668 - DNA, 25 bp, Homo sapien
tacttccttttttctctgctgccat

SEQ ID NO: 2458669 - DNA, 25 bp, Homo sapien
gccatcttacttccttttttctctg

SEQ ID NO: 2458670 - DNA, 25 bp, Homo sapien
cgccatcttacttccttttttctct

SEQ ID NO: 2458671 - DNA, 25 bp, Homo sapien
agagcttctgcgttggccagtcctc

SEQ ID NO: 2458672 - DNA, 25 bp, Homo sapien
gagcttctgcgttggccagtcctca

SEQ ID NO: 2458673 - DNA, 25 bp, Homo sapien
gcagagcttctgcgttggccagtcc

SEQ ID NO: 2458674 - DNA, 25 bp, Homo sapien
tggatccaagggtcagctgtggtga

SEQ ID NO: 2458675 - DNA, 25 bp, Homo sapien
ccaagggtcagctgtggtgaaacct

SEQ ID NO: 2458676 - DNA, 25 bp, Homo sapien
tccaagggtcagctgtggtgaaacc

SEQ ID NO: 2458677 - DNA, 25 bp, Homo sapien
gatccaagggtcagctgtggtgaaa

SEQ ID NO: 2458678 - DNA, 25 bp, Homo sapien
cactcaggccgttcttgcagagcag

SEQ ID NO: 2458679 - DNA, 25 bp, Homo sapien
gcagccactcaggccgttcttgcag

SEQ ID NO: 2458680 - DNA, 25 bp, Homo sapien
gccactcaggccgttcttgcagagc

SEQ ID NO: 2458681 - DNA, 25 bp, Homo sapien
tcagtcactaggggctgtaggcact

SEQ ID NO: 2458682 - DNA, 25 bp, Homo sapien
tttttccagacggaggagaagtctc

SEQ ID NO: 2458683 - DNA, 25 bp, Homo sapien
tgttacctccctatggacagcctca

SEQ ID NO: 2458684 - DNA, 25 bp, Homo sapien
ttacctccctatggacagcctcaaa

SEQ ID NO: 2458685 - DNA, 25 bp, Homo sapien
cttttgttacctccctatggacagc

SEQ ID NO: 2458686 - DNA, 25 bp, Homo sapien
ggagagagggagatacagagctgac

SEQ ID NO: 2458687 - DNA, 25 bp, Homo sapien
aggagagagggagatacagagctga

SEQ ID NO: 2458688 - DNA, 25 bp, Homo sapien
ctgccctgaggtcagatagaagcaa

SEQ ID NO: 2458689 - DNA, 25 bp, Homo sapien
gatagaagcaaatggccaccacttc

SEQ ID NO: 2458690 - DNA, 25 bp, Homo sapien
ggatcttcttgccctgagaagctgc

SEQ ID NO: 2458691 - DNA, 25 bp, Homo sapien
caagaacctggacataggcttcttc

SEQ ID NO: 2458692 - DNA, 25 bp, Homo sapien
ttctttcatggcatgacaaagtgtt

SEQ ID NO: 2458693 - DNA, 25 bp, Homo sapien
ctttcatggcatgacaaagtgtttt

SEQ ID NO: 2458694 - DNA, 25 bp, Homo sapien
tctttcatggcatgacaaagtgttt

SEQ ID NO: 2458695 - DNA, 25 bp, Homo sapien
ccagaacaagtgacataccaggagc

SEQ ID NO: 2458696 - DNA, 25 bp, Homo sapien
caagtgacataccaggagcctgtgg

SEQ ID NO: 2458697 - DNA, 25 bp, Homo sapien
cagaacaagtgacataccaggagcc

SEQ ID NO: 2458698 - DNA, 25 bp, Homo sapien
gaacaagtgacataccaggagcctg

SEQ ID NO: 2458699 - DNA, 25 bp, Homo sapien
agtgatggggcccttcgggtccttg

SEQ ID NO: 2458700 - DNA, 25 bp, Homo sapien
cagtgatggggcccttcgggtcctt

SEQ ID NO: 2458701 - DNA, 25 bp, Homo sapien
gatgcagtgatggggcccttcgggt

SEQ ID NO: 2458702 - DNA, 25 bp, Homo sapien
tgcagtgatggggcccttcgggtcc

SEQ ID NO: 2458703 - DNA, 25 bp, Homo sapien
atgaggtccccttgcatcttgcagt

SEQ ID NO: 2458704 - DNA, 25 bp, Homo sapien
tgaggtccccttgcatcttgcagtt

SEQ ID NO: 2458705 - DNA, 25 bp, Homo sapien
agatgtactcaggtggcaaacagtc

SEQ ID NO: 2458706 - DNA, 25 bp, Homo sapien
gagacacaatggtccctcttgggac

SEQ ID NO: 2458707 - DNA, 25 bp, Homo sapien
tctggagacacaatggtccctcttg

SEQ ID NO: 2458708 - DNA, 25 bp, Homo sapien
tcaggtggcaaacagtcaatgaggc

SEQ ID NO: 2458709 - DNA, 25 bp, Homo sapien
gttggaaaaccacacttggcaaaga

SEQ ID NO: 2458710 - DNA, 25 bp, Homo sapien
ttggaaaaccacacttggcaaagaa

SEQ ID NO: 2458711 - DNA, 25 bp, Homo sapien
acttgcatcgatatcaggactgaaa

SEQ ID NO: 2458712 - DNA, 25 bp, Homo sapien
tggcaaagaacttgcatcgatatca

SEQ ID NO: 2458713 - DNA, 25 bp, Homo sapien
tgaacagcacatgggtcagaactaa

SEQ ID NO: 2458714 - DNA, 25 bp, Homo sapien
tagcctgtatgaagtgcattttccc

SEQ ID NO: 2458715 - DNA, 25 bp, Homo sapien
agttctccaaaaaagtcctcagtgt

SEQ ID NO: 2458716 - DNA, 25 bp, Homo sapien
actatagctacaagaaatcctcgtg

SEQ ID NO: 2458717 - DNA, 25 bp, Homo sapien
gacactgagtgcaagaacctggaga

SEQ ID NO: 2458718 - DNA, 25 bp, Homo sapien
agcttctgacactgagtgcaagaac

SEQ ID NO: 2458719 - DNA, 25 bp, Homo sapien
cactgagtgcaagaacctggagaag

SEQ ID NO: 2458720 - DNA, 25 bp, Homo sapien
tctgacactgagtgcaagaacctgg

SEQ ID NO: 2458721 - DNA, 25 bp, Homo sapien
tgacaacctgcacctgtcaggaaaa

SEQ ID NO: 2458722 - DNA, 25 bp, Homo sapien
caaagcctgacaacctgcacctgtc

SEQ ID NO: 2458723 - DNA, 25 bp, Homo sapien
agagttccaaagcctgacaacctgc

SEQ ID NO: 2458724 - DNA, 25 bp, Homo sapien
gacaacctgcacctgtcaggaaaag

SEQ ID NO: 2458725 - DNA, 25 bp, Homo sapien
tcccaagtcagatgcacggaatccc

SEQ ID NO: 2458726 - DNA, 25 bp, Homo sapien
cccaagtcagatgcacggaatccca

SEQ ID NO: 2458727 - DNA, 25 bp, Homo sapien
cagaaacgtaggctgtgtcctctgt

SEQ ID NO: 2458728 - DNA, 25 bp, Homo sapien
cctagcctccatccgcacacccgtg

SEQ ID NO: 2458729 - DNA, 25 bp, Homo sapien
agatcccatgggcagaaacgtaggc

SEQ ID NO: 2458730 - DNA, 25 bp, Homo sapien
catgggcagaaacgtaggctgtgtc

SEQ ID NO: 2458731 - DNA, 25 bp, Homo sapien
tagtcgtgggaattgcctgggagtt

SEQ ID NO: 2458732 - DNA, 25 bp, Homo sapien
ctagtcgtgggaattgcctgggagt

SEQ ID NO: 2458733 - DNA, 25 bp, Homo sapien
tcgtgggaattgcctgggagttctc

SEQ ID NO: 2458734 - DNA, 25 bp, Homo sapien
agtcgtgggaattgcctgggagttc

SEQ ID NO: 2458735 - DNA, 25 bp, Homo sapien
ggtgtgcctcttccgcactccatcc

SEQ ID NO: 2458736 - DNA, 25 bp, Homo sapien
ctcattattcgtttcttttccgtgc

SEQ ID NO: 2458737 - DNA, 25 bp, Homo sapien
tttcttttccgtgccgactgacact

SEQ ID NO: 2458738 - DNA, 25 bp, Homo sapien
ttcgtttcttttccgtgccgactga

SEQ ID NO: 2458739 - DNA, 25 bp, Homo sapien
acccgtgtggacaagcggacaggca

SEQ ID NO: 2458740 - DNA, 25 bp, Homo sapien
caggcgggaccgactgcagttatga

SEQ ID NO: 2458741 - DNA, 25 bp, Homo sapien
cgggaccgactgcagttatgagttt

SEQ ID NO: 2458742 - DNA, 25 bp, Homo sapien
gccgatgggatagagcttgacccgt

SEQ ID NO: 2458743 - DNA, 25 bp, Homo sapien
tgcaagtgagtgttgctgctgccgc

SEQ ID NO: 2458744 - DNA, 25 bp, Homo sapien
aaatctgcaagtgagtgttgctgct

SEQ ID NO: 2458745 - DNA, 25 bp, Homo sapien
tctaaaaatctgcaagtgagtgttg

SEQ ID NO: 2458746 - DNA, 25 bp, Homo sapien
tctgcaagtgagtgttgctgctgcc

SEQ ID NO: 2458747 - DNA, 25 bp, Homo sapien
gaagatgtggagagtagggtagaga

SEQ ID NO: 2458748 - DNA, 25 bp, Homo sapien
ctggcaggtgatgagttccctagac

SEQ ID NO: 2458749 - DNA, 25 bp, Homo sapien
aaccacgtcccatgtctccagcaca

SEQ ID NO: 2458750 - DNA, 25 bp, Homo sapien
tgagttccctagactttgaccaacc

SEQ ID NO: 2458751 - DNA, 25 bp, Homo sapien
acagtaccccccaccagcatacacg

SEQ ID NO: 2458752 - DNA, 25 bp, Homo sapien
gagcctgacacgctccttatgtgag

SEQ ID NO: 2458753 - DNA, 25 bp, Homo sapien
tgtgagtgtctggatcatcgttcat

SEQ ID NO: 2458754 - DNA, 25 bp, Homo sapien
gaggttacaaaaccacacggtatga

SEQ ID NO: 2458755 - DNA, 25 bp, Homo sapien
cacacggtatgagtagagcctgaca

SEQ ID NO: 2458756 - DNA, 25 bp, Homo sapien
catctttatcactaactgttttttc

SEQ ID NO: 2458757 - DNA, 25 bp, Homo sapien
tctttatcactaactgttttttcaa

SEQ ID NO: 2458758 - DNA, 25 bp, Homo sapien
atcatctttatcactaactgttttt

SEQ ID NO: 2458759 - DNA, 25 bp, Homo sapien
tcatctttatcactaactgtttttt

SEQ ID NO: 2458760 - DNA, 25 bp, Homo sapien
tgtaagatttcaacattgctaccca

SEQ ID NO: 2458761 - DNA, 25 bp, Homo sapien
aattgcagttttgtgtaagatttca

SEQ ID NO: 2458762 - DNA, 25 bp, Homo sapien
gttttgtgtaagatttcaacattgc

SEQ ID NO: 2458763 - DNA, 25 bp, Homo sapien
tctgaattgcagttttgtgtaagat

SEQ ID NO: 2458764 - DNA, 25 bp, Homo sapien
gaacagccttctctgttagcagttc

SEQ ID NO: 2458765 - DNA, 25 bp, Homo sapien
gctgctgctgcaagtagctcaaaac

SEQ ID NO: 2458766 - DNA, 25 bp, Homo sapien
taatgggtgacttacagactagaac

SEQ ID NO: 2458767 - DNA, 25 bp, Homo sapien
gctttgtctacgtaatatgtttcag

SEQ ID NO: 2458768 - DNA, 25 bp, Homo sapien
gggttgcagtgtcctacgattgcac

SEQ ID NO: 2458769 - DNA, 25 bp, Homo sapien
ccagccaaagagatagtgtgagatt

SEQ ID NO: 2458770 - DNA, 25 bp, Homo sapien
tctggagcttgagacaagtgtggcc

SEQ ID NO: 2458771 - DNA, 25 bp, Homo sapien
caagtgtggccaatatgctaaaaat

SEQ ID NO: 2458772 - DNA, 25 bp, Homo sapien
taatttattgcgtttgttgtagtct

SEQ ID NO: 2458773 - DNA, 25 bp, Homo sapien
gaaggcttcgaaattgaaatctgca

SEQ ID NO: 2458774 - DNA, 25 bp, Homo sapien
gagtgaagaagcacttgtgtgctaa

SEQ ID NO: 2458775 - DNA, 25 bp, Homo sapien
caggccctggttcctaattctggga

SEQ ID NO: 2458776 - DNA, 25 bp, Homo sapien
gcaattccacgaacagccaacagaa

SEQ ID NO: 2458777 - DNA, 25 bp, Homo sapien
gggtctggcttggttactgcttcca

SEQ ID NO: 2458778 - DNA, 25 bp, Homo sapien
tggttacaggcctagccagcaaaga

SEQ ID NO: 2458779 - DNA, 25 bp, Homo sapien
gaaaatgccagtagactcggagaca

SEQ ID NO: 2458780 - DNA, 25 bp, Homo sapien
gtgggccaaagctgcggccactctt

SEQ ID NO: 2458781 - DNA, 25 bp, Homo sapien
tgggccaaagctgcggccactcttg

SEQ ID NO: 2458782 - DNA, 25 bp, Homo sapien
tcatcttcatggtggacgcgacccc

SEQ ID NO: 2458783 - DNA, 25 bp, Homo sapien
catcttcatggtggacgcgacccca

SEQ ID NO: 2458784 - DNA, 25 bp, Homo sapien
gatgaaggaggcttagtcttcacta

SEQ ID NO: 2458785 - DNA, 25 bp, Homo sapien
aaggaggcttagtcttcactacgaa

SEQ ID NO: 2458786 - DNA, 25 bp, Homo sapien
gcttagtcttcactacgaacgtgcc

SEQ ID NO: 2458787 - DNA, 25 bp, Homo sapien
ggaggcttagtcttcactacgaacg

SEQ ID NO: 2458788 - DNA, 25 bp, Homo sapien
ctatccgaggcactgtgaggacacc

SEQ ID NO: 2458789 - DNA, 25 bp, Homo sapien
cagagagtttgtttgcgggctctgc

SEQ ID NO: 2458790 - DNA, 25 bp, Homo sapien
gctctgcatgctcagtgcgtaggct

SEQ ID NO: 2458791 - DNA, 25 bp, Homo sapien
tcagtgcgtaggctccgtgcaccct

SEQ ID NO: 2458792 - DNA, 25 bp, Homo sapien
agagaaatgagtctttaagttcctt

SEQ ID NO: 2458793 - DNA, 25 bp, Homo sapien
tccagagaaatgagtctttaagttc

SEQ ID NO: 2458794 - DNA, 25 bp, Homo sapien
ctccagagaaatgagtctttaagtt

SEQ ID NO: 2458795 - DNA, 25 bp, Homo sapien
ccagagaaatgagtctttaagttcc

SEQ ID NO: 2458796 - DNA, 25 bp, Homo sapien
tgctcaagcagagttcagaatgcat

SEQ ID NO: 2458797 - DNA, 25 bp, Homo sapien
tctgctcaagcagagttcagaatgc

SEQ ID NO: 2458798 - DNA, 25 bp, Homo sapien
cctctgctcaagcagagttcagaat

SEQ ID NO: 2458799 - DNA, 25 bp, Homo sapien
gacctctgctcaagcagagttcaga

SEQ ID NO: 2458800 - DNA, 25 bp, Homo sapien
gggactagggtgaggtgcacatggt

SEQ ID NO: 2458801 - DNA, 25 bp, Homo sapien
ctggttgttaacaggtagttcaggg

SEQ ID NO: 2458802 - DNA, 25 bp, Homo sapien
cctacggtgttctggcaaaaaacat

SEQ ID NO: 2458803 - DNA, 25 bp, Homo sapien
gacagcctacggtgttctggcaaaa

SEQ ID NO: 2458804 - DNA, 25 bp, Homo sapien
ggcaagtgacagcctacggtgttct

SEQ ID NO: 2458805 - DNA, 25 bp, Homo sapien
agtgacagcctacggtgttctggca

SEQ ID NO: 2458806 - DNA, 25 bp, Homo sapien
ccgtattggtgtataggtctttgcg

SEQ ID NO: 2458807 - DNA, 25 bp, Homo sapien
aaccgatccacactgagaacttgcg

SEQ ID NO: 2458808 - DNA, 25 bp, Homo sapien
gagttcaggatggagcaaccgatcc

SEQ ID NO: 2458809 - DNA, 25 bp, Homo sapien
tgccaccggatagtaccgtattggt

SEQ ID NO: 2458810 - DNA, 25 bp, Homo sapien
tcttcttgaggtactcagtcaagtc

SEQ ID NO: 2458811 - DNA, 25 bp, Homo sapien
ggatcttcttgaggtactcagtcaa

SEQ ID NO: 2458812 - DNA, 25 bp, Homo sapien
tttcccgctgggctgtgttggtgaa

SEQ ID NO: 2458813 - DNA, 25 bp, Homo sapien
ttcttgaggtactcagtcaagtccc

SEQ ID NO: 2458814 - DNA, 25 bp, Homo sapien
tgggtgaccctgtgtccacagtcca

SEQ ID NO: 2458815 - DNA, 25 bp, Homo sapien
gtgaccctgtgtccacagtccatga

SEQ ID NO: 2458816 - DNA, 25 bp, Homo sapien
gggtgaccctgtgtccacagtccat

SEQ ID NO: 2458817 - DNA, 25 bp, Homo sapien
ggtgaccctgtgtccacagtccatg

SEQ ID NO: 2458818 - DNA, 25 bp, Homo sapien
actccggggccccatgcagctcatt

SEQ ID NO: 2458819 - DNA, 25 bp, Homo sapien
ctactccggggccccatgcagctca

SEQ ID NO: 2458820 - DNA, 25 bp, Homo sapien
tactccggggccccatgcagctcat

SEQ ID NO: 2458821 - DNA, 25 bp, Homo sapien
cgtcagaatgctgcgcttgctctgg

SEQ ID NO: 2458822 - DNA, 25 bp, Homo sapien
tacttcagcgtcagaatgctgcgct

SEQ ID NO: 2458823 - DNA, 25 bp, Homo sapien
tcagcgtcagaatgctgcgcttgct

SEQ ID NO: 2458824 - DNA, 25 bp, Homo sapien
gggtacttcagcgtcagaatgctgc

SEQ ID NO: 2458825 - DNA, 25 bp, Homo sapien
tggcttggggagcatcgtcccctgc

SEQ ID NO: 2458826 - DNA, 25 bp, Homo sapien
atggcttggggagcatcgtcccctg

SEQ ID NO: 2458827 - DNA, 25 bp, Homo sapien
ggcttggggagcatcgtcccctgca

SEQ ID NO: 2458828 - DNA, 25 bp, Homo sapien
catcacgccctggtgtccggggaac

SEQ ID NO: 2458829 - DNA, 25 bp, Homo sapien
tgcaaatactgacagaagcggagct

SEQ ID NO: 2458830 - DNA, 25 bp, Homo sapien
tggcaatactttgcccgaccacctt

SEQ ID NO: 2458831 - DNA, 25 bp, Homo sapien
tgatgaactacacggcaattattga

SEQ ID NO: 2458832 - DNA, 25 bp, Homo sapien
ttattgagtcacaacacttcggtaa

SEQ ID NO: 2458833 - DNA, 25 bp, Homo sapien
tatactagcatgattaagataagca

SEQ ID NO: 2458834 - DNA, 25 bp, Homo sapien
actagcatgattaagataagcatcc

SEQ ID NO: 2458835 - DNA, 25 bp, Homo sapien
cctcgtgtctcttatcaattcctca

SEQ ID NO: 2458836 - DNA, 25 bp, Homo sapien
tctgtagtgtaggattgtatgtccc

SEQ ID NO: 2458837 - DNA, 25 bp, Homo sapien
gattaatagaaagtgtaagctcccc

SEQ ID NO: 2458838 - DNA, 25 bp, Homo sapien
aaagtcgttgccagtgcggatggcc

SEQ ID NO: 2458839 - DNA, 25 bp, Homo sapien
gagataatcaccaacgaatgccata

SEQ ID NO: 2458840 - DNA, 25 bp, Homo sapien
tgcagtgaatggcacctacacaact

SEQ ID NO: 2458841 - DNA, 25 bp, Homo sapien
gctgtggagttcaagtaaattctgg

SEQ ID NO: 2458842 - DNA, 25 bp, Homo sapien
tatctgacgttacaaggtgtgacag

SEQ ID NO: 2458843 - DNA, 25 bp, Homo sapien
tgtgacagcacctagaaagaagtct

SEQ ID NO: 2458844 - DNA, 25 bp, Homo sapien
gaatacaaggtactagagaagcaga

SEQ ID NO: 2458845 - DNA, 25 bp, Homo sapien
catctaaagcatcgtggtcaactgg

SEQ ID NO: 2458846 - DNA, 25 bp, Homo sapien
gcatcgtggtcaactggctccaaat

SEQ ID NO: 2458847 - DNA, 25 bp, Homo sapien
tagagcctgttgaatgaggatataa

SEQ ID NO: 2458848 - DNA, 25 bp, Homo sapien
ggtcttatgcccatctaaagcatcg

SEQ ID NO: 2458849 - DNA, 25 bp, Homo sapien
atctagagtgcaacatatcggcctt

SEQ ID NO: 2458850 - DNA, 25 bp, Homo sapien
cacttccaccaattatgcatttgag

SEQ ID NO: 2458851 - DNA, 25 bp, Homo sapien
ttcacttccaccaattatgcatttg

SEQ ID NO: 2458852 - DNA, 25 bp, Homo sapien
agtgcaacatatcggcctttccctg

SEQ ID NO: 2458853 - DNA, 25 bp, Homo sapien
gcataataagtctcatatgtgacat

SEQ ID NO: 2458854 - DNA, 25 bp, Homo sapien
aagcataataagtctcatatgtgac

SEQ ID NO: 2458855 - DNA, 25 bp, Homo sapien
atgccatgaagcataataagtctca

SEQ ID NO: 2458856 - DNA, 25 bp, Homo sapien
gccatgaagcataataagtctcata

SEQ ID NO: 2458857 - DNA, 25 bp, Homo sapien
ctggtttatcatggtggccaacaat

SEQ ID NO: 2458858 - DNA, 25 bp, Homo sapien
aattacaaagtagaagctcctagac

SEQ ID NO: 2458859 - DNA, 25 bp, Homo sapien
aaaactggtttatcatggtggccaa

SEQ ID NO: 2458860 - DNA, 25 bp, Homo sapien
caaaaactggtttatcatggtggcc

SEQ ID NO: 2458861 - DNA, 25 bp, Homo sapien
gagaaaggcagcctatctcatgaag

SEQ ID NO: 2458862 - DNA, 25 bp, Homo sapien
tctcctgtgtagtgatggtaagcag

SEQ ID NO: 2458863 - DNA, 25 bp, Homo sapien
ctggatctcctgtgtagtgatggta

SEQ ID NO: 2458864 - DNA, 25 bp, Homo sapien
gcctatctcatgaagattccctgga

SEQ ID NO: 2458865 - DNA, 25 bp, Homo sapien
tccctggactgggctttgtccctgg

SEQ ID NO: 2458866 - DNA, 25 bp, Homo sapien
gactgggctttgtccctgggcccaa

SEQ ID NO: 2458867 - DNA, 25 bp, Homo sapien
tggactgggctttgtccctgggccc

SEQ ID NO: 2458868 - DNA, 25 bp, Homo sapien
cctggactgggctttgtccctgggc

SEQ ID NO: 2458869 - DNA, 25 bp, Homo sapien
gtctcttataattgtgtgtctctga

SEQ ID NO: 2458870 - DNA, 25 bp, Homo sapien
taggagaatgatcgtcagtggattt

SEQ ID NO: 2458871 - DNA, 25 bp, Homo sapien
tttatgctaaaagataagtctctta

SEQ ID NO: 2458872 - DNA, 25 bp, Homo sapien
agtttaggagaatgatcgtcagtgg

SEQ ID NO: 2458873 - DNA, 25 bp, Homo sapien
ctcatcaattttattttcaacatac

SEQ ID NO: 2458874 - DNA, 25 bp, Homo sapien
aaactcatcaattttattttcaaca

SEQ ID NO: 2458875 - DNA, 25 bp, Homo sapien
aactcatcaattttattttcaacat

SEQ ID NO: 2458876 - DNA, 25 bp, Homo sapien
taaaactcatcaattttattttcaa

SEQ ID NO: 2458877 - DNA, 25 bp, Homo sapien
catggattctatcccttgggctgag

SEQ ID NO: 2458878 - DNA, 25 bp, Homo sapien
tttaacatggattctatcccttggg

SEQ ID NO: 2458879 - DNA, 25 bp, Homo sapien
acatggattctatcccttgggctga

SEQ ID NO: 2458880 - DNA, 25 bp, Homo sapien
taacatggattctatcccttgggct

SEQ ID NO: 2458881 - DNA, 25 bp, Homo sapien
caacttaatattacagcgaacgagg

SEQ ID NO: 2458882 - DNA, 25 bp, Homo sapien
gagggccttacattcttccagtaca

SEQ ID NO: 2458883 - DNA, 25 bp, Homo sapien
ggcctgttccaactccaacttaata

SEQ ID NO: 2458884 - DNA, 25 bp, Homo sapien
gctgtcagctttcgcccagcaatta

SEQ ID NO: 2458885 - DNA, 25 bp, Homo sapien
accctttcgggtagctgaacctgtg

SEQ ID NO: 2458886 - DNA, 25 bp, Homo sapien
gctgatctgctgcaatagggtccag

SEQ ID NO: 2458887 - DNA, 25 bp, Homo sapien
caaaagacacttccagctgcactga

SEQ ID NO: 2458888 - DNA, 25 bp, Homo sapien
tctgcagcagcgctattcagagcat

SEQ ID NO: 2458889 - DNA, 25 bp, Homo sapien
atactgtgtattcccatttttatcc

SEQ ID NO: 2458890 - DNA, 25 bp, Homo sapien
tttccaccgaaccaaatactgtgta

SEQ ID NO: 2458891 - DNA, 25 bp, Homo sapien
tgtcatcctgtttgtcataaccttt

SEQ ID NO: 2458892 - DNA, 25 bp, Homo sapien
atttttatcctgtcttttgtcaaca

SEQ ID NO: 2458893 - DNA, 25 bp, Homo sapien
aattgtgcgaaatagcagctatgcc

SEQ ID NO: 2458894 - DNA, 25 bp, Homo sapien
agctatgccatgtgcctgaacctct

SEQ ID NO: 2458895 - DNA, 25 bp, Homo sapien
tgtttcagttgcgtctccacataga

SEQ ID NO: 2458896 - DNA, 25 bp, Homo sapien
gaaagacacgggattggaacagttg

SEQ ID NO: 2458897 - DNA, 25 bp, Homo sapien
cctcaggtgagagtagctaaatcca

SEQ ID NO: 2458898 - DNA, 25 bp, Homo sapien
ctcaggtgagagtagctaaatccac

SEQ ID NO: 2458899 - DNA, 25 bp, Homo sapien
gcacatctgggtgaatctgtcctct

SEQ ID NO: 2458900 - DNA, 25 bp, Homo sapien
gcaatatctctgtatgtgctggcac

SEQ ID NO: 2458901 - DNA, 25 bp, Homo sapien
ataggcacatctgggtgaatctgtc

SEQ ID NO: 2458902 - DNA, 25 bp, Homo sapien
ttataggcacatctgggtgaatctg

SEQ ID NO: 2458903 - DNA, 25 bp, Homo sapien
ctttcactcttgcaactaatgtatg

SEQ ID NO: 2458904 - DNA, 25 bp, Homo sapien
gcctatgatgaggtacatcttctgg

SEQ ID NO: 2458905 - DNA, 25 bp, Homo sapien
ttctgctaggcctatgatgaggtac

SEQ ID NO: 2458906 - DNA, 25 bp, Homo sapien
ctggtctctgccaccgtcagtaaca

SEQ ID NO: 2458907 - DNA, 25 bp, Homo sapien
ccactataccttttttggtagctga

SEQ ID NO: 2458908 - DNA, 25 bp, Homo sapien
cttttttggtagctgagtctgcagc

SEQ ID NO: 2458909 - DNA, 25 bp, Homo sapien
ttttggtagctgagtctgcagccat

SEQ ID NO: 2458910 - DNA, 25 bp, Homo sapien
accactataccttttttggtagctg

SEQ ID NO: 2458911 - DNA, 25 bp, Homo sapien
caagatgtaggtcacccactaccat

SEQ ID NO: 2458912 - DNA, 25 bp, Homo sapien
caatgtataagaagtaagaactgcc

SEQ ID NO: 2458913 - DNA, 25 bp, Homo sapien
atttccaagatgtaggtcacccact

SEQ ID NO: 2458914 - DNA, 25 bp, Homo sapien
ggcatttccaagatgtaggtcaccc

SEQ ID NO: 2458915 - DNA, 25 bp, Homo sapien
aaatctcagactttggactattgag

SEQ ID NO: 2458916 - DNA, 25 bp, Homo sapien
gatttcagatgtacttagggcctgt

SEQ ID NO: 2458917 - DNA, 25 bp, Homo sapien
gctttaatttttgcaggctcatagg

SEQ ID NO: 2458918 - DNA, 25 bp, Homo sapien
tcatcctggagccttaaatttttag

SEQ ID NO: 2458919 - DNA, 25 bp, Homo sapien
tgtttaatgctagtttgtcttcaca

SEQ ID NO: 2458920 - DNA, 25 bp, Homo sapien
ttaaatacatcatcgtgaggatgag

SEQ ID NO: 2458921 - DNA, 25 bp, Homo sapien
aatacatcatcgtgaggatgagcct

SEQ ID NO: 2458922 - DNA, 25 bp, Homo sapien
catcatcgtgaggatgagccttact

SEQ ID NO: 2458923 - DNA, 25 bp, Homo sapien
tctcgctatgagtttcagttctgcg

SEQ ID NO: 2458924 - DNA, 25 bp, Homo sapien
cgctatgagtttcagttctgcgtaa

SEQ ID NO: 2458925 - DNA, 25 bp, Homo sapien
attacctctcgctatgagtttcagt

SEQ ID NO: 2458926 - DNA, 25 bp, Homo sapien
gagtttcagttctgcgtaagatttg

SEQ ID NO: 2458927 - DNA, 25 bp, Homo sapien
ctgtcttgagaataccaaaatagta

SEQ ID NO: 2458928 - DNA, 25 bp, Homo sapien
ccagacgtggtgtgtcaggttgcca

SEQ ID NO: 2458929 - DNA, 25 bp, Homo sapien
tgcttctaatcagcaaaggccctga

SEQ ID NO: 2458930 - DNA, 25 bp, Homo sapien
ggtggtccagctgcttttacagaca

SEQ ID NO: 2458931 - DNA, 25 bp, Homo sapien
gaaaggtaattgttggtcagctgct

SEQ ID NO: 2458932 - DNA, 25 bp, Homo sapien
aatagtggccgtcccaatatgaccg

SEQ ID NO: 2458933 - DNA, 25 bp, Homo sapien
aagttaaactgctctggttccaggg

SEQ ID NO: 2458934 - DNA, 25 bp, Homo sapien
caaaggagaacttaccaatggcagc

SEQ ID NO: 2458935 - DNA, 25 bp, Homo sapien
tgccgcatatgagaatacgtgtctg

SEQ ID NO: 2458936 - DNA, 25 bp, Homo sapien
tgctgagaagaacgctgctctcccc

SEQ ID NO: 2458937 - DNA, 25 bp, Homo sapien
tgctctccccctcaagcagcatgcg

SEQ ID NO: 2458938 - DNA, 25 bp, Homo sapien
gcagctgtcccacagcaaggcgttg

SEQ ID NO: 2458939 - DNA, 25 bp, Homo sapien
caaggcgttgttgctctggtctgtg

SEQ ID NO: 2458940 - DNA, 25 bp, Homo sapien
aaggcagatggtccccacagtcaaa

SEQ ID NO: 2458941 - DNA, 25 bp, Homo sapien
cagatggtccccacagtcaaagtca

SEQ ID NO: 2458942 - DNA, 25 bp, Homo sapien
tcatgttaacctgaaagcctgtttc

SEQ ID NO: 2458943 - DNA, 25 bp, Homo sapien
ccttttggtgacagactcgagatcc

SEQ ID NO: 2458944 - DNA, 25 bp, Homo sapien
tcttgcaagtaaacagcttttcctg

SEQ ID NO: 2458945 - DNA, 25 bp, Homo sapien
ctcttgcaagtaaacagcttttcct

SEQ ID NO: 2458946 - DNA, 25 bp, Homo sapien
cctcttgcaagtaaacagcttttcc

SEQ ID NO: 2458947 - DNA, 25 bp, Homo sapien
ctcttcaatcactcgactagttcta

SEQ ID NO: 2458948 - DNA, 25 bp, Homo sapien
tctggaacgccatggagaggtaaac

SEQ ID NO: 2458949 - DNA, 25 bp, Homo sapien
gctccctcttctggtaatctggaac

SEQ ID NO: 2458950 - DNA, 25 bp, Homo sapien
cctcttctggtaatctggaacgcca

SEQ ID NO: 2458951 - DNA, 25 bp, Homo sapien
cgccatggagaggtaaactacattg

SEQ ID NO: 2458952 - DNA, 25 bp, Homo sapien
tcttcatgagataggctgcctttct

SEQ ID NO: 2458953 - DNA, 25 bp, Homo sapien
tgcctttctcaaggacattgaatta

SEQ ID NO: 2458954 - DNA, 25 bp, Homo sapien
ccttgagtcaatccagtaacagctg

SEQ ID NO: 2458955 - DNA, 25 bp, Homo sapien
atttgtaaataccacctcttggtgc

SEQ ID NO: 2458956 - DNA, 25 bp, Homo sapien
tattttcagtcttggccacagtccc

SEQ ID NO: 2458957 - DNA, 25 bp, Homo sapien
gggaccttgttccatcaattgtaac

SEQ ID NO: 2458958 - DNA, 25 bp, Homo sapien
tatatgcttaggataagcatctgcc

SEQ ID NO: 2458959 - DNA, 25 bp, Homo sapien
tctgccagttgatcaccaataagct

SEQ ID NO: 2458960 - DNA, 25 bp, Homo sapien
gcttaggataagcatctgccagttg

SEQ ID NO: 2458961 - DNA, 25 bp, Homo sapien
gttgatcaccaataagctgaaggtt

SEQ ID NO: 2458962 - DNA, 25 bp, Homo sapien
aggtcaaattaggacacagaagcat

SEQ ID NO: 2458963 - DNA, 25 bp, Homo sapien
caggtcaaattaggacacagaagca

SEQ ID NO: 2458964 - DNA, 25 bp, Homo sapien
aagtaacaggtcaaattaggacaca

SEQ ID NO: 2458965 - DNA, 25 bp, Homo sapien
taacaggtcaaattaggacacagaa

SEQ ID NO: 2458966 - DNA, 25 bp, Homo sapien
caccccgatccttcaacgtttggtg

SEQ ID NO: 2458967 - DNA, 25 bp, Homo sapien
tcttgactcaacacgtcagacatga

SEQ ID NO: 2458968 - DNA, 25 bp, Homo sapien
aacacgtcagacatgaggagcaagt

SEQ ID NO: 2458969 - DNA, 25 bp, Homo sapien
gatccttcaacgtttggtgtagctt

SEQ ID NO: 2458970 - DNA, 25 bp, Homo sapien
tgagtcagtaggcgccagcttcctc

SEQ ID NO: 2458971 - DNA, 25 bp, Homo sapien
tgaggaacaagcgtgctgaacactc

SEQ ID NO: 2458972 - DNA, 25 bp, Homo sapien
ttcgccgttctgaggcatggacgag

SEQ ID NO: 2458973 - DNA, 25 bp, Homo sapien
tcactctcacaatcccaagtaggtt

SEQ ID NO: 2458974 - DNA, 25 bp, Homo sapien
caggagccacatatttaagaccatg

SEQ ID NO: 2458975 - DNA, 25 bp, Homo sapien
gctgggaaggcagaatccaaagtgc

SEQ ID NO: 2458976 - DNA, 25 bp, Homo sapien
gttggccaccatgataaaccagttt

SEQ ID NO: 2458977 - DNA, 25 bp, Homo sapien
taagaccatgtctaggagcttctac

SEQ ID NO: 2458978 - DNA, 25 bp, Homo sapien
tatgaaagactgtatggagcaacat

SEQ ID NO: 2458979 - DNA, 25 bp, Homo sapien
ttctgactgatcctgctgccacgct

SEQ ID NO: 2458980 - DNA, 25 bp, Homo sapien
actgtggggcatcatctatggttct

SEQ ID NO: 2458981 - DNA, 25 bp, Homo sapien
gcatctagctggatatatgaaagac

SEQ ID NO: 2458982 - DNA, 25 bp, Homo sapien
agtaaagctaccgtgaccgcgatgt

SEQ ID NO: 2458983 - DNA, 25 bp, Homo sapien
ccgtgaccgcgatgtttggatgaca

SEQ ID NO: 2458984 - DNA, 25 bp, Homo sapien
aagctaccgtgaccgcgatgtttgg

SEQ ID NO: 2458985 - DNA, 25 bp, Homo sapien
gaccgcgatgtttggatgacataat

SEQ ID NO: 2458986 - DNA, 25 bp, Homo sapien
cattttccatgaatagtgaattata

SEQ ID NO: 2458987 - DNA, 25 bp, Homo sapien
gacaagaagagtttgaattagcagc

SEQ ID NO: 2458988 - DNA, 25 bp, Homo sapien
ttggatttgatacagaactatactg

SEQ ID NO: 2458989 - DNA, 25 bp, Homo sapien
tacagaactatactggattcactga

SEQ ID NO: 2458990 - DNA, 25 bp, Homo sapien
tctttaatagcattgctgatgacat

SEQ ID NO: 2458991 - DNA, 25 bp, Homo sapien
gcactggcaacgactttgctgccat

SEQ ID NO: 2458992 - DNA, 25 bp, Homo sapien
aatatactggccatccgcactggca

SEQ ID NO: 2458993 - DNA, 25 bp, Homo sapien
tatcagttgtgtaggtgccattcac

SEQ ID NO: 2458994 - DNA, 25 bp, Homo sapien
taggtctccctggacttcaagcagg

SEQ ID NO: 2458995 - DNA, 25 bp, Homo sapien
tctgacgctgaagtaccccatcaag

SEQ ID NO: 2458996 - DNA, 25 bp, Homo sapien
gcccagcgggaaatcatgcgcgata

SEQ ID NO: 2458997 - DNA, 25 bp, Homo sapien
tagaagaagagatcgctgcgctcgt

SEQ ID NO: 2458998 - DNA, 25 bp, Homo sapien
ttcccgtgcatggaatcttgccgca

SEQ ID NO: 2458999 - DNA, 25 bp, Homo sapien
cgtgcatggaatcttgccgcatcca

SEQ ID NO: 2459000 - DNA, 25 bp, Homo sapien
tgccgcatccaccagaccaccatca

SEQ ID NO: 2459001 - DNA, 25 bp, Homo sapien
gccttccttcccgtgcatggaatct

SEQ ID NO: 2459002 - DNA, 25 bp, Homo sapien
gattaagatcattgcacccccagag

SEQ ID NO: 2459003 - DNA, 25 bp, Homo sapien
gcgcaagttctcagtgtggatcggt

SEQ ID NO: 2459004 - DNA, 25 bp, Homo sapien
ccccagagcgcaagttctcagtgtg

SEQ ID NO: 2459005 - DNA, 25 bp, Homo sapien
tctcagtgtggatcggttgctccat

SEQ ID NO: 2459006 - DNA, 25 bp, Homo sapien
tcctgaaccagttgcgtctgccctg

SEQ ID NO: 2459007 - DNA, 25 bp, Homo sapien
atgttttttgccagaacaccgtagg

SEQ ID NO: 2459008 - DNA, 25 bp, Homo sapien
tttgccagaacaccgtaggctgtca

SEQ ID NO: 2459009 - DNA, 25 bp, Homo sapien
gccctgcctgtctgttagggctgga

SEQ ID NO: 2459010 - DNA, 25 bp, Homo sapien
ctgctgggaagaaggctgggcctca

SEQ ID NO: 2459011 - DNA, 25 bp, Homo sapien
gagtcccacaaaacttcttcttcca

SEQ ID NO: 2459012 - DNA, 25 bp, Homo sapien
gcctcagagtcccacaaaacttctt

SEQ ID NO: 2459013 - DNA, 25 bp, Homo sapien
ccacaaaacttcttcttccatctga

SEQ ID NO: 2459014 - DNA, 25 bp, Homo sapien
tccatggctgcacctgagtcgtggc

SEQ ID NO: 2459015 - DNA, 25 bp, Homo sapien
tacagtaacatgctggaccactcca

SEQ ID NO: 2459016 - DNA, 25 bp, Homo sapien
cctcaagggcgccaggtcaatgaga

SEQ ID NO: 2459017 - DNA, 25 bp, Homo sapien
gcaatttgtgatatcctgggatcca

SEQ ID NO: 2459018 - DNA, 25 bp, Homo sapien
caggagtggccgttgctacaagaca

SEQ ID NO: 2459019 - DNA, 25 bp, Homo sapien
gaataaagacgtctcctcaggaccc

SEQ ID NO: 2459020 - DNA, 25 bp, Homo sapien
gggtcgcgtccaccatgaagatgaa

SEQ ID NO: 2459021 - DNA, 25 bp, Homo sapien
tacaagacatctggtgctacgacca

SEQ ID NO: 2459022 - DNA, 25 bp, Homo sapien
tcaagacacctgagagaccaggtct

SEQ ID NO: 2459023 - DNA, 25 bp, Homo sapien
gctttctcccaccaatcaacattac

SEQ ID NO: 2459024 - DNA, 25 bp, Homo sapien
tgtggcacatgcctcccatgctttc

SEQ ID NO: 2459025 - DNA, 25 bp, Homo sapien
cctgagagaccaggtctgtggcaca

SEQ ID NO: 2459026 - DNA, 25 bp, Homo sapien
ttggccgatgcttcatccatcatct

SEQ ID NO: 2459027 - DNA, 25 bp, Homo sapien
cttggccgatgcttcatccatcatc

SEQ ID NO: 2459028 - DNA, 25 bp, Homo sapien
tcatcttgtgaaatttaatggtaaa

SEQ ID NO: 2459029 - DNA, 25 bp, Homo sapien
ccatcatcttgtgaaatttaatggt

SEQ ID NO: 2459030 - DNA, 25 bp, Homo sapien
aaccaagccagacccctgagacatt

SEQ ID NO: 2459031 - DNA, 25 bp, Homo sapien
gtgggtgtatcttgcacctgttttc

SEQ ID NO: 2459032 - DNA, 25 bp, Homo sapien
caggacataatacagccctgaaggg

SEQ ID NO: 2459033 - DNA, 25 bp, Homo sapien
ccatggaagcagtaaccaagccaga

SEQ ID NO: 2459034 - DNA, 25 bp, Homo sapien
ttgtcatctaatctgggaaacccca

SEQ ID NO: 2459035 - DNA, 25 bp, Homo sapien
caggctttggaactctggtgagtcc

SEQ ID NO: 2459036 - DNA, 25 bp, Homo sapien
tctggcccaccataaccatgtgttt

SEQ ID NO: 2459037 - DNA, 25 bp, Homo sapien
tccttgatacctgtgcccatttggc

SEQ ID NO: 2459038 - DNA, 25 bp, Homo sapien
ttaagagcctgaacccatctgctgc

SEQ ID NO: 2459039 - DNA, 25 bp, Homo sapien
ttcagcagggctgactaaagctgct

SEQ ID NO: 2459040 - DNA, 25 bp, Homo sapien
ccttcagcagggctgactaaagctg

SEQ ID NO: 2459041 - DNA, 25 bp, Homo sapien
ctagagcagcttaagagcctgaacc

SEQ ID NO: 2459042 - DNA, 25 bp, Homo sapien
cagactcatgactgtagctctggtg

SEQ ID NO: 2459043 - DNA, 25 bp, Homo sapien
gtttaccagactcatgactgtagct

SEQ ID NO: 2459044 - DNA, 25 bp, Homo sapien
ctgtcgtttaccagactcatgactg

SEQ ID NO: 2459045 - DNA, 25 bp, Homo sapien
agactcatgactgtagctctggtga

SEQ ID NO: 2459046 - DNA, 25 bp, Homo sapien
aagtcggataaacatgtgacagtgg

SEQ ID NO: 2459047 - DNA, 25 bp, Homo sapien
agttgaagctgggtggcaagctctt

SEQ ID NO: 2459048 - DNA, 25 bp, Homo sapien
gttttaagcgtcctggcaatgcgga

SEQ ID NO: 2459049 - DNA, 25 bp, Homo sapien
tcagtacgagttaatgcctcatgga

SEQ ID NO: 2459050 - DNA, 25 bp, Homo sapien
ctttgatcatacaggaagcaaagtg

SEQ ID NO: 2459051 - DNA, 25 bp, Homo sapien
gtgcagggtttttttctagctgggc

SEQ ID NO: 2459052 - DNA, 25 bp, Homo sapien
catacaggaagcaaagtgcagggtt

SEQ ID NO: 2459053 - DNA, 25 bp, Homo sapien
ttgatcatacaggaagcaaagtgca

SEQ ID NO: 2459054 - DNA, 25 bp, Homo sapien
gttggagcctgtcatgcagagaatt

SEQ ID NO: 2459055 - DNA, 25 bp, Homo sapien
tgttggagcctgtcatgcagagaat

SEQ ID NO: 2459056 - DNA, 25 bp, Homo sapien
ggagcctgtcatgcagagaattcat

SEQ ID NO: 2459057 - DNA, 25 bp, Homo sapien
gatctgtgactaaatcctgaagaat

SEQ ID NO: 2459058 - DNA, 25 bp, Homo sapien
tttggatctgtgactaaatcctgaa

SEQ ID NO: 2459059 - DNA, 25 bp, Homo sapien
ctaaatcctgaagaattgtctgagc

SEQ ID NO: 2459060 - DNA, 25 bp, Homo sapien
tgactaaatcctgaagaattgtctg

SEQ ID NO: 2459061 - DNA, 25 bp, Homo sapien
tactatcgtgttgtgtcggcctcgg

SEQ ID NO: 2459062 - DNA, 25 bp, Homo sapien
cagactgcccgagacaaaatggtgg

SEQ ID NO: 2459063 - DNA, 25 bp, Homo sapien
ggtccctcccactcgataagagatg

SEQ ID NO: 2459064 - DNA, 25 bp, Homo sapien
caccacggtgtttgcaagtgcatcc

SEQ ID NO: 2459065 - DNA, 25 bp, Homo sapien
ccagagatcaggtgtctcagggcgg

SEQ ID NO: 2459066 - DNA, 25 bp, Homo sapien
atcaggtgtctcagggcggtaaggc

SEQ ID NO: 2459067 - DNA, 25 bp, Homo sapien
gagatcaggtgtctcagggcggtaa

SEQ ID NO: 2459068 - DNA, 25 bp, Homo sapien
ccctgcttagcgtcacaggccagag

SEQ ID NO: 2459069 - DNA, 25 bp, Homo sapien
cgaggtcagacgagactggacaggg

SEQ ID NO: 2459070 - DNA, 25 bp, Homo sapien
gcacccaacattcctgggcgtcctc

SEQ ID NO: 2459071 - DNA, 25 bp, Homo sapien
cagacgagactggacagggtgatat

SEQ ID NO: 2459072 - DNA, 25 bp, Homo sapien
ggtcagacgagactggacagggtga

SEQ ID NO: 2459073 - DNA, 25 bp, Homo sapien
agccatatgacaagaatggcccaag

SEQ ID NO: 2459074 - DNA, 25 bp, Homo sapien
agcactccactagggaaatctgagc

SEQ ID NO: 2459075 - DNA, 25 bp, Homo sapien
ttccccatctggcaagtacacgctg

SEQ ID NO: 2459076 - DNA, 25 bp, Homo sapien
cacgctgtgaacaaagtcttcagag

SEQ ID NO: 2459077 - DNA, 25 bp, Homo sapien
ggtggaactctacaatgccaccctg

SEQ ID NO: 2459078 - DNA, 25 bp, Homo sapien
gtggaactctacaatgccaccctgt

SEQ ID NO: 2459079 - DNA, 25 bp, Homo sapien
tggaactctacaatgccaccctgtc

SEQ ID NO: 2459080 - DNA, 25 bp, Homo sapien
tagatgcccttagttgtcctgcaag

SEQ ID NO: 2459081 - DNA, 25 bp, Homo sapien
gtaacaagcattcggctggctccag

SEQ ID NO: 2459082 - DNA, 25 bp, Homo sapien
catgaacgtatggatgccctgggac

SEQ ID NO: 2459083 - DNA, 25 bp, Homo sapien
tgggcagctatgtgatgggaaacct

SEQ ID NO: 2459084 - DNA, 25 bp, Homo sapien
gtcctttagcctggcagagtctcca

SEQ ID NO: 2459085 - DNA, 25 bp, Homo sapien
atgctctctggaaaggtggttaata

SEQ ID NO: 2459086 - DNA, 25 bp, Homo sapien
aaggtggttaatacacactgtctgc

SEQ ID NO: 2459087 - DNA, 25 bp, Homo sapien
ggataggtcctttagcctggcagag

SEQ ID NO: 2459088 - DNA, 25 bp, Homo sapien
gcagccaaatggcaacaggcaagca

SEQ ID NO: 2459089 - DNA, 25 bp, Homo sapien
ggagagtgcctcatcttgaaagaag

SEQ ID NO: 2459090 - DNA, 25 bp, Homo sapien
tgtcagggaaaacaggtgaggcccc

SEQ ID NO: 2459091 - DNA, 25 bp, Homo sapien
tcattgaatgttggcaatggccttt

SEQ ID NO: 2459092 - DNA, 25 bp, Homo sapien
ggggaaggacatcaagtctacaggc

SEQ ID NO: 2459093 - DNA, 25 bp, Homo sapien
ggaaggacatcaagtctacaggcag

SEQ ID NO: 2459094 - DNA, 25 bp, Homo sapien
ccaagtatctggagacccccttcca

SEQ ID NO: 2459095 - DNA, 25 bp, Homo sapien
aaggacatcaagtctacaggcagca

SEQ ID NO: 2459096 - DNA, 25 bp, Homo sapien
tgcagaagtctgagtagttacaccc

SEQ ID NO: 2459097 - DNA, 25 bp, Homo sapien
ttctgcatgcagaagtctgagtagt

SEQ ID NO: 2459098 - DNA, 25 bp, Homo sapien
cctggtgcatccataagtgtttctc

SEQ ID NO: 2459099 - DNA, 25 bp, Homo sapien
tgaagctctagacaagtttgggctt

SEQ ID NO: 2459100 - DNA, 25 bp, Homo sapien
cacagctgtgggtagaagctgggag

SEQ ID NO: 2459101 - DNA, 25 bp, Homo sapien
gagcacagctgtgggtagaagctgg

SEQ ID NO: 2459102 - DNA, 25 bp, Homo sapien
cagctgtgggtagaagctgggagag

SEQ ID NO: 2459103 - DNA, 25 bp, Homo sapien
ctggagcacagctgtgggtagaagc

SEQ ID NO: 2459104 - DNA, 25 bp, Homo sapien
aggaggcagaacgagtctcagggca

SEQ ID NO: 2459105 - DNA, 25 bp, Homo sapien
aagaggaggcagaacgagtctcagg

SEQ ID NO: 2459106 - DNA, 25 bp, Homo sapien
gaggaggcagaacgagtctcagggc

SEQ ID NO: 2459107 - DNA, 25 bp, Homo sapien
gaggcagaacgagtctcagggcagc

SEQ ID NO: 2459108 - DNA, 25 bp, Homo sapien
catccaacctgtacaggacaccatg

SEQ ID NO: 2459109 - DNA, 25 bp, Homo sapien
tccaagagcaccacatcagattaac

SEQ ID NO: 2459110 - DNA, 25 bp, Homo sapien
cagctgtaagaaaagggagtctttg

SEQ ID NO: 2459111 - DNA, 25 bp, Homo sapien
gcacctgactcaggcaagcttctcc

SEQ ID NO: 2459112 - DNA, 25 bp, Homo sapien
agctgtttggctgccccggtttctg

SEQ ID NO: 2459113 - DNA, 25 bp, Homo sapien
ggccacctggtgtgacattcagttt

SEQ ID NO: 2459114 - DNA, 25 bp, Homo sapien
cttcacagaaatgctggccacctgg

SEQ ID NO: 2459115 - DNA, 25 bp, Homo sapien
tctgccagctgtttggctgccccgg

SEQ ID NO: 2459116 - DNA, 25 bp, Homo sapien
cacagggtaaaggtcatactgcttc

SEQ ID NO: 2459117 - DNA, 25 bp, Homo sapien
cgcctggttaatgagagcctgaaat

SEQ ID NO: 2459118 - DNA, 25 bp, Homo sapien
tgaaataattgaaccgggtcacagg

SEQ ID NO: 2459119 - DNA, 25 bp, Homo sapien
agaggagctcgcctggttaatgaga

SEQ ID NO: 2459120 - DNA, 25 bp, Homo sapien
catgctggcattctgatcttcaact

SEQ ID NO: 2459121 - DNA, 25 bp, Homo sapien
tctgatcttcaacttctgtcctcca

SEQ ID NO: 2459122 - DNA, 25 bp, Homo sapien
gctcgaccatgctggcattctgatc

SEQ ID NO: 2459123 - DNA, 25 bp, Homo sapien
tagagctcgaccatgctggcattct

SEQ ID NO: 2459124 - DNA, 25 bp, Homo sapien
tcttgcataattgtgcacagctaaa

SEQ ID NO: 2459125 - DNA, 25 bp, Homo sapien
cagggatagtgagcagtcagtagcc

SEQ ID NO: 2459126 - DNA, 25 bp, Homo sapien
cagctaaagagttgacacgcaggga

SEQ ID NO: 2459127 - DNA, 25 bp, Homo sapien
gagggctgttcttgcataattgtgc

SEQ ID NO: 2459128 - DNA, 25 bp, Homo sapien
tagaagcagatttaagaaccaaaac

SEQ ID NO: 2459129 - DNA, 25 bp, Homo sapien
tgtagaagcagatttaagaaccaaa

SEQ ID NO: 2459130 - DNA, 25 bp, Homo sapien
tttgtagaagcagatttaagaacca

SEQ ID NO: 2459131 - DNA, 25 bp, Homo sapien
ttttgtagaagcagatttaagaacc

SEQ ID NO: 2459132 - DNA, 25 bp, Homo sapien
tgctctggtctgtactgaggagaag

SEQ ID NO: 2459133 - DNA, 25 bp, Homo sapien
tcagaaaaggcggactcatgctccc

SEQ ID NO: 2459134 - DNA, 25 bp, Homo sapien
gagctgaacccgatggtgctcccag

SEQ ID NO: 2459135 - DNA, 25 bp, Homo sapien
agctgtagccctcgggcaacacgag

SEQ ID NO: 2459136 - DNA, 25 bp, Homo sapien
gacccccatggtcaaggtgaggcag

SEQ ID NO: 2459137 - DNA, 25 bp, Homo sapien
agccgtgcgcccccttctggctgaa

SEQ ID NO: 2459138 - DNA, 25 bp, Homo sapien
caagacccccatggtcaaggtgagg

SEQ ID NO: 2459139 - DNA, 25 bp, Homo sapien
gtgaggcagccgtgcgcccccttct

SEQ ID NO: 2459140 - DNA, 25 bp, Homo sapien
catcttcagtcgattaattctaatg

SEQ ID NO: 2459141 - DNA, 25 bp, Homo sapien
cttcagtcgattaattctaatgatg

SEQ ID NO: 2459142 - DNA, 25 bp, Homo sapien
tcatcttcagtcgattaattctaat

SEQ ID NO: 2459143 - DNA, 25 bp, Homo sapien
tttcatcttcagtcgattaattcta

SEQ ID NO: 2459144 - DNA, 25 bp, Homo sapien
ttcccctaggttaccagccacttgc

SEQ ID NO: 2459145 - DNA, 25 bp, Homo sapien
ttaaataggctgcatttctcaagga

SEQ ID NO: 2459146 - DNA, 25 bp, Homo sapien
tccaattaaataggctgcatttctc

SEQ ID NO: 2459147 - DNA, 25 bp, Homo sapien
tctccaattaaataggctgcatttc

SEQ ID NO: 2459148 - DNA, 25 bp, Homo sapien
agaatctccaattaaataggctgca

SEQ ID NO: 2459149 - DNA, 25 bp, Homo sapien
tctctcttatattcatttagctttg

SEQ ID NO: 2459150 - DNA, 25 bp, Homo sapien
cttttgacacatttctgccagaagt

SEQ ID NO: 2459151 - DNA, 25 bp, Homo sapien
tttctctcttatattcatttagctt

SEQ ID NO: 2459152 - DNA, 25 bp, Homo sapien
ctgccagaagttgcttttctatttc

SEQ ID NO: 2459153 - DNA, 25 bp, Homo sapien
tcatctagctttttgggcagctcat

SEQ ID NO: 2459154 - DNA, 25 bp, Homo sapien
cagtacacccacattcatcaacatt

SEQ ID NO: 2459155 - DNA, 25 bp, Homo sapien
tactttgagtgtgcccagtacaccc

SEQ ID NO: 2459156 - DNA, 25 bp, Homo sapien
gaacagataaatctaaatccgatac

SEQ ID NO: 2459157 - DNA, 25 bp, Homo sapien
tttagccttttgattctatactcac

SEQ ID NO: 2459158 - DNA, 25 bp, Homo sapien
gccttttgattctatactcactgat

SEQ ID NO: 2459159 - DNA, 25 bp, Homo sapien
ttctatactcactgatgtctggtcc

SEQ ID NO: 2459160 - DNA, 25 bp, Homo sapien
ttgattctatactcactgatgtctg

SEQ ID NO: 2459161 - DNA, 25 bp, Homo sapien
tgctgcagatatcttcaccttgatg

SEQ ID NO: 2459162 - DNA, 25 bp, Homo sapien
catattgctgcagatatcttcacct

SEQ ID NO: 2459163 - DNA, 25 bp, Homo sapien
ccatattgctgcagatatcttcacc

SEQ ID NO: 2459164 - DNA, 25 bp, Homo sapien
tattgctgcagatatcttcaccttg

SEQ ID NO: 2459165 - DNA, 25 bp, Homo sapien
agtaaagctaccctgactgcgatgc

SEQ ID NO: 2459166 - DNA, 25 bp, Homo sapien
cagcatgctgagaatggacacagtg

SEQ ID NO: 2459167 - DNA, 25 bp, Homo sapien
gcatgctgagaatggacacagtgtt

SEQ ID NO: 2459168 - DNA, 25 bp, Homo sapien
agaatggacacagtgtttgaagaga

SEQ ID NO: 2459169 - DNA, 25 bp, Homo sapien
catgctgagaatggacacagtgttt

SEQ ID NO: 2459170 - DNA, 25 bp, Homo sapien
gacaaagtattgccaggacatacag

SEQ ID NO: 2459171 - DNA, 25 bp, Homo sapien
gtgatcagacaaagtattgccagga

SEQ ID NO: 2459172 - DNA, 25 bp, Homo sapien
tgatcagacaaagtattgccaggac

SEQ ID NO: 2459173 - DNA, 25 bp, Homo sapien
caaagtattgccaggacatacagaa

SEQ ID NO: 2459174 - DNA, 25 bp, Homo sapien
gacagcatgtccagtaccttggggg

SEQ ID NO: 2459175 - DNA, 25 bp, Homo sapien
acagcatgtccagtaccttgggggc

SEQ ID NO: 2459176 - DNA, 25 bp, Homo sapien
catgtccagtaccttgggggcccct

SEQ ID NO: 2459177 - DNA, 25 bp, Homo sapien
agcatgtccagtaccttgggggccc

SEQ ID NO: 2459178 - DNA, 25 bp, Homo sapien
gcagcacttgtgaagggatgtctct

SEQ ID NO: 2459179 - DNA, 25 bp, Homo sapien
catgcttttggcagcacttgtgaag

SEQ ID NO: 2459180 - DNA, 25 bp, Homo sapien
tgtgaagggatgtctctcaaattga

SEQ ID NO: 2459181 - DNA, 25 bp, Homo sapien
taggtaaaatatgtgcatgcttttg

SEQ ID NO: 2459182 - DNA, 25 bp, Homo sapien
caatactttccttctcagcaaaatg

SEQ ID NO: 2459183 - DNA, 25 bp, Homo sapien
atactttccttctcagcaaaatgac

SEQ ID NO: 2459184 - DNA, 25 bp, Homo sapien
ctcaatactttccttctcagcaaaa

SEQ ID NO: 2459185 - DNA, 25 bp, Homo sapien
aatactttccttctcagcaaaatga

SEQ ID NO: 2459186 - DNA, 25 bp, Homo sapien
cattgttgttgatgttcgtgcatgt

SEQ ID NO: 2459187 - DNA, 25 bp, Homo sapien
tttaccataaatttttgactctgaa

SEQ ID NO: 2459188 - DNA, 25 bp, Homo sapien
gtgcatgttcgccttttaccataaa

SEQ ID NO: 2459189 - DNA, 25 bp, Homo sapien
gatgttcgtgcatgttcgcctttta

SEQ ID NO: 2459190 - DNA, 25 bp, Homo sapien
taaggtctgacaagattcaccatgc

SEQ ID NO: 2459191 - DNA, 25 bp, Homo sapien
gaaagaactagctgtatccttacca

SEQ ID NO: 2459192 - DNA, 25 bp, Homo sapien
gtagcaggtccttgtctgaaagaac

SEQ ID NO: 2459193 - DNA, 25 bp, Homo sapien
tttggtgtcacaggctaaggtctga

SEQ ID NO: 2459194 - DNA, 25 bp, Homo sapien
tgtacgtaagttagtctcccaaatg

SEQ ID NO: 2459195 - DNA, 25 bp, Homo sapien
tttgccaaagatccttaggttccaa

SEQ ID NO: 2459196 - DNA, 25 bp, Homo sapien
tagaagctggactgcccatcaacac

SEQ ID NO: 2459197 - DNA, 25 bp, Homo sapien
aagatgaggaatgcaagctgggtat

SEQ ID NO: 2459198 - DNA, 25 bp, Homo sapien
ctcccaccctcactttggtgactct

SEQ ID NO: 2459199 - DNA, 25 bp, Homo sapien
aagagtagccaggtgtccttcagtg

SEQ ID NO: 2459200 - DNA, 25 bp, Homo sapien
ttaagagtagccaggtgtccttcag

SEQ ID NO: 2459201 - DNA, 25 bp, Homo sapien
ccaccctcactttggtgactctttg

SEQ ID NO: 2459202 - DNA, 25 bp, Homo sapien
agtaaccagcgctggcacattccca

SEQ ID NO: 2459203 - DNA, 25 bp, Homo sapien
cagtaaccagcgctggcacattccc

SEQ ID NO: 2459204 - DNA, 25 bp, Homo sapien
ccagtaaccagcgctggcacattcc

SEQ ID NO: 2459205 - DNA, 25 bp, Homo sapien
ctgtggtcatctgcactaggcattc

SEQ ID NO: 2459206 - DNA, 25 bp, Homo sapien
tgtggtcatctgcactaggcattcc

SEQ ID NO: 2459207 - DNA, 25 bp, Homo sapien
ggctgggctatggctgtatcttcct

SEQ ID NO: 2459208 - DNA, 25 bp, Homo sapien
ctgttggagacccaaatgaaatttc

SEQ ID NO: 2459209 - DNA, 25 bp, Homo sapien
gctgttggagacccaaatgaaattt

SEQ ID NO: 2459210 - DNA, 25 bp, Homo sapien
tttcttatgtgcacagaagccccag

SEQ ID NO: 2459211 - DNA, 25 bp, Homo sapien
catggcaacttggtcctgtcacagg

SEQ ID NO: 2459212 - DNA, 25 bp, Homo sapien
gaggatccagcgcacagtttctgca

SEQ ID NO: 2459213 - DNA, 25 bp, Homo sapien
caaggttagagtatagggcccatcc

SEQ ID NO: 2459214 - DNA, 25 bp, Homo sapien
gacacccttcctaaataattgttga

SEQ ID NO: 2459215 - DNA, 25 bp, Homo sapien
tctagctctcgggagcaaagtgaaa

SEQ ID NO: 2459216 - DNA, 25 bp, Homo sapien
gaatacctgccatacacttgggaag

SEQ ID NO: 2459217 - DNA, 25 bp, Homo sapien
aagccatgcccacagatactaggat

SEQ ID NO: 2459218 - DNA, 25 bp, Homo sapien
tctggtgaccatctatgaaagagaa

SEQ ID NO: 2459219 - DNA, 25 bp, Homo sapien
cattcatgaaaaacaccgtaagaca

SEQ ID NO: 2459220 - DNA, 25 bp, Homo sapien
tcaacacagttagggaaaacatgtg

SEQ ID NO: 2459221 - DNA, 25 bp, Homo sapien
tgggtcctactgactaactacagaa

SEQ ID NO: 2459222 - DNA, 25 bp, Homo sapien
cctcctactgttaacagacttgaag

SEQ ID NO: 2459223 - DNA, 25 bp, Homo sapien
tgttagcaatggtaaactccgtgca

SEQ ID NO: 2459224 - DNA, 25 bp, Homo sapien
tatcctcaagagttaaatgtcagct

SEQ ID NO: 2459225 - DNA, 25 bp, Homo sapien
ccagacattaggtgactataggtac

SEQ ID NO: 2459226 - DNA, 25 bp, Homo sapien
tatgctgggaaaaacgacgtctcgt

SEQ ID NO: 2459227 - DNA, 25 bp, Homo sapien
gatcaattgtaaaggaggagccctg

SEQ ID NO: 2459228 - DNA, 25 bp, Homo sapien
caagatcaaggcactaataggtcca

SEQ ID NO: 2459229 - DNA, 25 bp, Homo sapien
gtctcgttgtaaagatcacagccca

SEQ ID NO: 2459230 - DNA, 25 bp, Homo sapien
catcatattgaaattagaagctggg

SEQ ID NO: 2459231 - DNA, 25 bp, Homo sapien
aaattagaagctggggagcaaacct

SEQ ID NO: 2459232 - DNA, 25 bp, Homo sapien
tcatctggttcgtcatgagaaaagc

SEQ ID NO: 2459233 - DNA, 25 bp, Homo sapien
gagcaaacctggttaccaagagtca

SEQ ID NO: 2459234 - DNA, 25 bp, Homo sapien
ctgcttggcttttgtttgacacgtg

SEQ ID NO: 2459235 - DNA, 25 bp, Homo sapien
gcttggcttttgtttgacacgtgac

SEQ ID NO: 2459236 - DNA, 25 bp, Homo sapien
aaaataaagagtagctgcccgtatc

SEQ ID NO: 2459237 - DNA, 25 bp, Homo sapien
agctgcccgtatcagattgttcaaa

SEQ ID NO: 2459238 - DNA, 25 bp, Homo sapien
tcatcatgaccgactccaagtgaca

SEQ ID NO: 2459239 - DNA, 25 bp, Homo sapien
ctttaggatcctgactgagccactg

SEQ ID NO: 2459240 - DNA, 25 bp, Homo sapien
ctcataaaggtgctcaagtctgttc

SEQ ID NO: 2459241 - DNA, 25 bp, Homo sapien
tgagttgtactcatcccagggtgac

SEQ ID NO: 2459242 - DNA, 25 bp, Homo sapien
tcacatccacagttctgacagtttc

SEQ ID NO: 2459243 - DNA, 25 bp, Homo sapien
cctcacatccacagttctgacagtt

SEQ ID NO: 2459244 - DNA, 25 bp, Homo sapien
tgccctcacatccacagttctgaca

SEQ ID NO: 2459245 - DNA, 25 bp, Homo sapien
ctgccctcacatccacagttctgac

SEQ ID NO: 2459246 - DNA, 25 bp, Homo sapien
ggtattgatatgagatgggcacagc

SEQ ID NO: 2459247 - DNA, 25 bp, Homo sapien
gtattgatatgagatgggcacagca

SEQ ID NO: 2459248 - DNA, 25 bp, Homo sapien
gctgcagcagcacccacaagaggca

SEQ ID NO: 2459249 - DNA, 25 bp, Homo sapien
ttgggtattgatatgagatgggcac

SEQ ID NO: 2459250 - DNA, 25 bp, Homo sapien
catgagacatatctccagaagagaa

SEQ ID NO: 2459251 - DNA, 25 bp, Homo sapien
tatgcgtacacatgagacatatctc

SEQ ID NO: 2459252 - DNA, 25 bp, Homo sapien
ctccagatatgcgtacacatgagac

SEQ ID NO: 2459253 - DNA, 25 bp, Homo sapien
tacacatgagacatatctccagaag

SEQ ID NO: 2459254 - DNA, 25 bp, Homo sapien
tcaagatgcccgggcacgtttcctg

SEQ ID NO: 2459255 - DNA, 25 bp, Homo sapien
aagatgcccgggcacgtttcctgca

SEQ ID NO: 2459256 - DNA, 25 bp, Homo sapien
agatgcccgggcacgtttcctgcat

SEQ ID NO: 2459257 - DNA, 25 bp, Homo sapien
ttcaagatgcccgggcacgtttcct

SEQ ID NO: 2459258 - DNA, 25 bp, Homo sapien
catgaggcacaaatggttttcccat

SEQ ID NO: 2459259 - DNA, 25 bp, Homo sapien
gcatgaggcacaaatggttttccca

SEQ ID NO: 2459260 - DNA, 25 bp, Homo sapien
tgcatgaggcacaaatggttttccc

SEQ ID NO: 2459261 - DNA, 25 bp, Homo sapien
ctgcatgaggcacaaatggttttcc

SEQ ID NO: 2459262 - DNA, 25 bp, Homo sapien
gtgagacagtctaaggcagggccac

SEQ ID NO: 2459263 - DNA, 25 bp, Homo sapien
gagacagtctaaggcagggccacag

SEQ ID NO: 2459264 - DNA, 25 bp, Homo sapien
aagtgagacagtctaaggcagggcc

SEQ ID NO: 2459265 - DNA, 25 bp, Homo sapien
caaagtgagacagtctaaggcaggg

SEQ ID NO: 2459266 - DNA, 25 bp, Homo sapien
aatccttagaagttagcttgtccgc

SEQ ID NO: 2459267 - DNA, 25 bp, Homo sapien
tttaccttgaagttcaatctgtctc

SEQ ID NO: 2459268 - DNA, 25 bp, Homo sapien
gatgagtcgaattactcataatcct

SEQ ID NO: 2459269 - DNA, 25 bp, Homo sapien
gaagttcaatctgtctctgggaaag

SEQ ID NO: 2459270 - DNA, 25 bp, Homo sapien
aaataacagcaaagcaatgagtagc

SEQ ID NO: 2459271 - DNA, 25 bp, Homo sapien
ggttagaagagattcatacccaggg

SEQ ID NO: 2459272 - DNA, 25 bp, Homo sapien
taactcagtagcagtatgcctggtc

SEQ ID NO: 2459273 - DNA, 25 bp, Homo sapien
tcatacgtgtcttgtcacatttttc

SEQ ID NO: 2459274 - DNA, 25 bp, Homo sapien
ggctgtgcgtagactagttatcttc

SEQ ID NO: 2459275 - DNA, 25 bp, Homo sapien
tcatctttagtcttgtgtggattcg

SEQ ID NO: 2459276 - DNA, 25 bp, Homo sapien
ttcgtcggcttttggagggaccaga

SEQ ID NO: 2459277 - DNA, 25 bp, Homo sapien
gactagttatcttctggagtgtgat

SEQ ID NO: 2459278 - DNA, 25 bp, Homo sapien
tgttgaaaaggtgtaaataagtgct

SEQ ID NO: 2459279 - DNA, 25 bp, Homo sapien
cttttcagtcctcattggaaaacct

SEQ ID NO: 2459280 - DNA, 25 bp, Homo sapien
aaaacaatagcacctgacatgggac

SEQ ID NO: 2459281 - DNA, 25 bp, Homo sapien
tcaactataattgctaaactcttgt

SEQ ID NO: 2459282 - DNA, 25 bp, Homo sapien
tctatactgccaaatggtctgcaaa

SEQ ID NO: 2459283 - DNA, 25 bp, Homo sapien
ttctatactgccaaatggtctgcaa

SEQ ID NO: 2459284 - DNA, 25 bp, Homo sapien
tatactgccaaatggtctgcaaaat

SEQ ID NO: 2459285 - DNA, 25 bp, Homo sapien
tactgccaaatggtctgcaaaatta

SEQ ID NO: 2459286 - DNA, 25 bp, Homo sapien
gataccttgaaaccacctacaggca

SEQ ID NO: 2459287 - DNA, 25 bp, Homo sapien
caatcagcaagcagagggcaaggga

SEQ ID NO: 2459288 - DNA, 25 bp, Homo sapien
cagagggcaagggataccttgaaac

SEQ ID NO: 2459289 - DNA, 25 bp, Homo sapien
aaacccaatcagcaagcagagggca

SEQ ID NO: 2459290 - DNA, 25 bp, Homo sapien
atcaagtaagttaggctctgcaaag

SEQ ID NO: 2459291 - DNA, 25 bp, Homo sapien
aataggctgccattctcacatcaag

SEQ ID NO: 2459292 - DNA, 25 bp, Homo sapien
gcttcccttcaccatgcaagataag

SEQ ID NO: 2459293 - DNA, 25 bp, Homo sapien
gcaagataagcccagaatctgcagt

SEQ ID NO: 2459294 - DNA, 25 bp, Homo sapien
attcctcctggtgtagcagtcactt

SEQ ID NO: 2459295 - DNA, 25 bp, Homo sapien
ttcctcctggtgtagcagtcacttg

SEQ ID NO: 2459296 - DNA, 25 bp, Homo sapien
tggagaacaaagcaggcggtgagtg

SEQ ID NO: 2459297 - DNA, 25 bp, Homo sapien
tgatacaggagttgctccatacggt

SEQ ID NO: 2459298 - DNA, 25 bp, Homo sapien
tctagacaaaagagccatagattgt

SEQ ID NO: 2459299 - DNA, 25 bp, Homo sapien
agtggagataagctgctgcagagcc

SEQ ID NO: 2459300 - DNA, 25 bp, Homo sapien
tgttcttctagtttgtgaacccaaa

SEQ ID NO: 2459301 - DNA, 25 bp, Homo sapien
ggatatgtcctgcagtgttgaatgc

SEQ ID NO: 2459302 - DNA, 25 bp, Homo sapien
actaaaaatgtcaggatatgtcctg

SEQ ID NO: 2459303 - DNA, 25 bp, Homo sapien
gttccatgttcttctagtttgtgaa

SEQ ID NO: 2459304 - DNA, 25 bp, Homo sapien
tctcatctatgaggttgacagcagc

SEQ ID NO: 2459305 - DNA, 25 bp, Homo sapien
gaactcgttcagatcatgattattg

SEQ ID NO: 2459306 - DNA, 25 bp, Homo sapien
gaactacgaactcgttcagatcatg

SEQ ID NO: 2459307 - DNA, 25 bp, Homo sapien
gacagcagcatgaactacgaactcg

SEQ ID NO: 2459308 - DNA, 25 bp, Homo sapien
tcaatcctgaaggattaggagaaaa

SEQ ID NO: 2459309 - DNA, 25 bp, Homo sapien
tgaaggattaggagaaaactgtgaa

SEQ ID NO: 2459310 - DNA, 25 bp, Homo sapien
ttacaatgatcatcaatcctgaagg

SEQ ID NO: 2459311 - DNA, 25 bp, Homo sapien
tttctttacaatgatcatcaatcct

SEQ ID NO: 2459312 - DNA, 25 bp, Homo sapien
tggtgctgcttttgagcttcctgtg

SEQ ID NO: 2459313 - DNA, 25 bp, Homo sapien
ctggtgctgcttttgagcttcctgt

SEQ ID NO: 2459314 - DNA, 25 bp, Homo sapien
ttttgagcttcctgtgcattgccat

SEQ ID NO: 2459315 - DNA, 25 bp, Homo sapien
tgcttttgagcttcctgtgcattgc

SEQ ID NO: 2459316 - DNA, 25 bp, Homo sapien
agggaagcatgcatgcacaacccat

SEQ ID NO: 2459317 - DNA, 25 bp, Homo sapien
tagggagggaagcatgcatgcacaa

SEQ ID NO: 2459318 - DNA, 25 bp, Homo sapien
gagggaagcatgcatgcacaaccca

SEQ ID NO: 2459319 - DNA, 25 bp, Homo sapien
gggagggaagcatgcatgcacaacc

SEQ ID NO: 2459320 - DNA, 25 bp, Homo sapien
taactgggaggtccttcctcgtgtc

SEQ ID NO: 2459321 - DNA, 25 bp, Homo sapien
caaagcatgcaaggattcaaaggcc

SEQ ID NO: 2459322 - DNA, 25 bp, Homo sapien
gcatgccagggctacattggccaaa

SEQ ID NO: 2459323 - DNA, 25 bp, Homo sapien
gctacctgatttaccaagttgtgtg

SEQ ID NO: 2459324 - DNA, 25 bp, Homo sapien
gctggagagtccttctttacttaaa

SEQ ID NO: 2459325 - DNA, 25 bp, Homo sapien
tctaaaatatgatttcgacatgtgt

SEQ ID NO: 2459326 - DNA, 25 bp, Homo sapien
tcacctttccactgtcaatggatgc

SEQ ID NO: 2459327 - DNA, 25 bp, Homo sapien
tatctcagttcagactgaccacctt

SEQ ID NO: 2459328 - DNA, 25 bp, Homo sapien
tcaatcagcggctgaagccatcatt

SEQ ID NO: 2459329 - DNA, 25 bp, Homo sapien
gaaaagagtatccttgagagaattc

SEQ ID NO: 2459330 - DNA, 25 bp, Homo sapien
aagtatggaaagaatgtagctgtgt

SEQ ID NO: 2459331 - DNA, 25 bp, Homo sapien
caggtaaacttttgttaagctgctg

SEQ ID NO: 2459332 - DNA, 25 bp, Homo sapien
gatgcggacaagctaacttctaagg

SEQ ID NO: 2459333 - DNA, 25 bp, Homo sapien
cagaaggacttttgccacctgacgc

SEQ ID NO: 2459334 - DNA, 25 bp, Homo sapien
cacagcataacatagttacagggag

SEQ ID NO: 2459335 - DNA, 25 bp, Homo sapien
cccagagacagattgaacttcaagg

SEQ ID NO: 2459336 - DNA, 25 bp, Homo sapien
ttaaatgtaagttgcaacataaata

SEQ ID NO: 2459337 - DNA, 25 bp, Homo sapien
gagtaattcgactcatcttttaaat

SEQ ID NO: 2459338 - DNA, 25 bp, Homo sapien
tacctgttttcataagttgaagatc

SEQ ID NO: 2459339 - DNA, 25 bp, Homo sapien
tatgagtaattcgactcatctttta

SEQ ID NO: 2459340 - DNA, 25 bp, Homo sapien
caggaaggctccctatagacatgct

SEQ ID NO: 2459341 - DNA, 25 bp, Homo sapien
gagctcaagaaaggtggttcaggaa

SEQ ID NO: 2459342 - DNA, 25 bp, Homo sapien
tctgccacataatcagagctcaaga

SEQ ID NO: 2459343 - DNA, 25 bp, Homo sapien
aaggctccctatagacatgcttcaa

SEQ ID NO: 2459344 - DNA, 25 bp, Homo sapien
ctgaaactggatatattgtagttcc

SEQ ID NO: 2459345 - DNA, 25 bp, Homo sapien
actgaaactggatatattgtagttc

SEQ ID NO: 2459346 - DNA, 25 bp, Homo sapien
ttactgaaactggatatattgtagt

SEQ ID NO: 2459347 - DNA, 25 bp, Homo sapien
tgaaactggatatattgtagttcct

SEQ ID NO: 2459348 - DNA, 25 bp, Homo sapien
gcatttatgtgagggagaaagtaca

SEQ ID NO: 2459349 - DNA, 25 bp, Homo sapien
tgactcaagatgaagaacgtccgtg

SEQ ID NO: 2459350 - DNA, 25 bp, Homo sapien
gctttatatatatcacgcacggata

SEQ ID NO: 2459351 - DNA, 25 bp, Homo sapien
gctccatccttcagtcttatgtttg

SEQ ID NO: 2459352 - DNA, 25 bp, Homo sapien
tacgtatatggttagatggcaccac

SEQ ID NO: 2459353 - DNA, 25 bp, Homo sapien
gaatcttgtcagaccttagcctgtg

SEQ ID NO: 2459354 - DNA, 25 bp, Homo sapien
tcctgaggaatctggctgtccaaat

SEQ ID NO: 2459355 - DNA, 25 bp, Homo sapien
ggctggagcgcaaaagcaggatctc

SEQ ID NO: 2459356 - DNA, 25 bp, Homo sapien
tgaatgctgcttccgaaaagttgtg

SEQ ID NO: 2459357 - DNA, 25 bp, Homo sapien
aatgctgcttccgaaaagttgtgca

SEQ ID NO: 2459358 - DNA, 25 bp, Homo sapien
tgctgcttccgaaaagttgtgcagc

SEQ ID NO: 2459359 - DNA, 25 bp, Homo sapien
gtgaatgctgcttccgaaaagttgt

SEQ ID NO: 2459360 - DNA, 25 bp, Homo sapien
aagggcatggctgaaagtgatgttc

SEQ ID NO: 2459361 - DNA, 25 bp, Homo sapien
tccaaatagactgtggtgaaacaca

SEQ ID NO: 2459362 - DNA, 25 bp, Homo sapien
gatgttctccgaatgttgctccaaa

SEQ ID NO: 2459363 - DNA, 25 bp, Homo sapien
ccttgttaccagatggtaaagggca

SEQ ID NO: 2459364 - DNA, 25 bp, Homo sapien
tgttagtctctgttgtcattcataa

SEQ ID NO: 2459365 - DNA, 25 bp, Homo sapien
aaatgttagtctctgttgtcattca

SEQ ID NO: 2459366 - DNA, 25 bp, Homo sapien
tgtaaatgttagtctctgttgtcat

SEQ ID NO: 2459367 - DNA, 25 bp, Homo sapien
aatgtaaatgttagtctctgttgtc

SEQ ID NO: 2459368 - DNA, 25 bp, Homo sapien
cagaggatatcgtgtgggaacagca

SEQ ID NO: 2459369 - DNA, 25 bp, Homo sapien
caatgtggccccttgcttgcatgta

SEQ ID NO: 2459370 - DNA, 25 bp, Homo sapien
ggagcctcattgactgataccagag

SEQ ID NO: 2459371 - DNA, 25 bp, Homo sapien
tcagcgatcgtaggcatttgcaacc

SEQ ID NO: 2459372 - DNA, 25 bp, Homo sapien
cactcttactaaaagttggggatag

SEQ ID NO: 2459373 - DNA, 25 bp, Homo sapien
tgaaatcttcgttgaataaagtaga

SEQ ID NO: 2459374 - DNA, 25 bp, Homo sapien
ggatagccacgcttgaaatttggat

SEQ ID NO: 2459375 - DNA, 25 bp, Homo sapien
ttttaacaccaattcttctcttcac

SEQ ID NO: 2459376 - DNA, 25 bp, Homo sapien
ctaaaaggttaacgctcaagctgaa

SEQ ID NO: 2459377 - DNA, 25 bp, Homo sapien
tgttaagccctcaagtgaaaacatg

SEQ ID NO: 2459378 - DNA, 25 bp, Homo sapien
caaaagctggtcttactgcatgtat

SEQ ID NO: 2459379 - DNA, 25 bp, Homo sapien
tgaaaaaccactcaagttgttaagc

SEQ ID NO: 2459380 - DNA, 25 bp, Homo sapien
aaaggttgagctgtcgaacaaaact

SEQ ID NO: 2459381 - DNA, 25 bp, Homo sapien
gaacaaaacttttgatagcatcagt

SEQ ID NO: 2459382 - DNA, 25 bp, Homo sapien
cttgcttaagacagacgattctttc

SEQ ID NO: 2459383 - DNA, 25 bp, Homo sapien
ggtggctagaaaggcagatctttga

SEQ ID NO: 2459384 - DNA, 25 bp, Homo sapien
actgtgtaacttggactttctaaca

SEQ ID NO: 2459385 - DNA, 25 bp, Homo sapien
ggactttctaacaaggatccttgtg

SEQ ID NO: 2459386 - DNA, 25 bp, Homo sapien
taacttggactttctaacaaggatc

SEQ ID NO: 2459387 - DNA, 25 bp, Homo sapien
caaactgtgtaacttggactttcta

SEQ ID NO: 2459388 - DNA, 25 bp, Homo sapien
acacttatctagaccatcacaatgg

SEQ ID NO: 2459389 - DNA, 25 bp, Homo sapien
ttatctactcttccggcctgcatgg

SEQ ID NO: 2459390 - DNA, 25 bp, Homo sapien
tctttatctactcttccggcctgca

SEQ ID NO: 2459391 - DNA, 25 bp, Homo sapien
gcttcagaaggcctaagcatgtaca

SEQ ID NO: 2459392 - DNA, 25 bp, Homo sapien
atttataccaggaatcgcagtcatc

SEQ ID NO: 2459393 - DNA, 25 bp, Homo sapien
tttataccaggaatcgcagtcatca

SEQ ID NO: 2459394 - DNA, 25 bp, Homo sapien
ttataccaggaatcgcagtcatcat

SEQ ID NO: 2459395 - DNA, 25 bp, Homo sapien
ttactctttctgttgaatcaactga

SEQ ID NO: 2459396 - DNA, 25 bp, Homo sapien
atcaactgattttctgacttgaaat

SEQ ID NO: 2459397 - DNA, 25 bp, Homo sapien
ctttgcaatgcatgctgctgtgtaa

SEQ ID NO: 2459398 - DNA, 25 bp, Homo sapien
tattctgttccagctttgcaatgca

SEQ ID NO: 2459399 - DNA, 25 bp, Homo sapien
taaaaggcgaacatgcacgaacatc

SEQ ID NO: 2459400 - DNA, 25 bp, Homo sapien
ttatggtaaaaggcgaacatgcacg

SEQ ID NO: 2459401 - DNA, 25 bp, Homo sapien
ggcgaacatgcacgaacatcaacaa

SEQ ID NO: 2459402 - DNA, 25 bp, Homo sapien
catgcacgaacatcaacaacaatga

SEQ ID NO: 2459403 - DNA, 25 bp, Homo sapien
cagacctgcaccatggctattttca

SEQ ID NO: 2459404 - DNA, 25 bp, Homo sapien
tgtaacttgaaagcccagacctgca

SEQ ID NO: 2459405 - DNA, 25 bp, Homo sapien
tgtacatcttcatgcgtttgattga

SEQ ID NO: 2459406 - DNA, 25 bp, Homo sapien
ttttcaagttgtgcgtcctttctgg

SEQ ID NO: 2459407 - DNA, 25 bp, Homo sapien
gatgcgactccagatgtccccaagc

SEQ ID NO: 2459408 - DNA, 25 bp, Homo sapien
tcctcatggtggatgcgactccaga

SEQ ID NO: 2459409 - DNA, 25 bp, Homo sapien
catggtggatgcgactccagatgtc

SEQ ID NO: 2459410 - DNA, 25 bp, Homo sapien
tggtggatgcgactccagatgtccc

SEQ ID NO: 2459411 - DNA, 25 bp, Homo sapien
tgaagtctctttccatggtgtcccc

SEQ ID NO: 2459412 - DNA, 25 bp, Homo sapien
tggtagaacatgcacattcctgtgt

SEQ ID NO: 2459413 - DNA, 25 bp, Homo sapien
tatctccagtattccatcagcgggc

SEQ ID NO: 2459414 - DNA, 25 bp, Homo sapien
gaaagtatcggagttactggcagca

SEQ ID NO: 2459415 - DNA, 25 bp, Homo sapien
ctcactataggtcctaaaggaagaa

SEQ ID NO: 2459416 - DNA, 25 bp, Homo sapien
tcactataggtcctaaaggaagaat

SEQ ID NO: 2459417 - DNA, 25 bp, Homo sapien
aggtcctaaaggaagaatgcgccaa

SEQ ID NO: 2459418 - DNA, 25 bp, Homo sapien
tataggtcctaaaggaagaatgcgc

SEQ ID NO: 2459419 - DNA, 25 bp, Homo sapien
catatacaaagcataggcgcctcac

SEQ ID NO: 2459420 - DNA, 25 bp, Homo sapien
aacactgtgtccattctcagcatgc

SEQ ID NO: 2459421 - DNA, 25 bp, Homo sapien
gcagagaacgctgaaaggaaaactc

SEQ ID NO: 2459422 - DNA, 25 bp, Homo sapien
gaatccagtatagctcagtatcaaa

SEQ ID NO: 2459423 - DNA, 25 bp, Homo sapien
ctggttttgatctacttgtggcact

SEQ ID NO: 2459424 - DNA, 25 bp, Homo sapien
tttgatctacttgtggcactagcta

SEQ ID NO: 2459425 - DNA, 25 bp, Homo sapien
ggttttgatctacttgtggcactag

SEQ ID NO: 2459426 - DNA, 25 bp, Homo sapien
tgatctacttgtggcactagctatg

SEQ ID NO: 2459427 - DNA, 25 bp, Homo sapien
tctggtaccatagtccgtgttaccc

SEQ ID NO: 2459428 - DNA, 25 bp, Homo sapien
acttggttaacagccactattggaa

SEQ ID NO: 2459429 - DNA, 25 bp, Homo sapien
aattggaatgtaagttctggtacca

SEQ ID NO: 2459430 - DNA, 25 bp, Homo sapien
gcatcgcagtcagggtagctttact

SEQ ID NO: 2459431 - DNA, 25 bp, Homo sapien
gtactgtggcatgtatatctgcctt

SEQ ID NO: 2459432 - DNA, 25 bp, Homo sapien
tcctttttctatgcaatgagcttct

SEQ ID NO: 2459433 - DNA, 25 bp, Homo sapien
actgtactgtggcatgtatatctgc

SEQ ID NO: 2459434 - DNA, 25 bp, Homo sapien
tgtactgtggcatgtatatctgcct

SEQ ID NO: 2459435 - DNA, 25 bp, Homo sapien
agcaggtagtagggaattttctagc

SEQ ID NO: 2459436 - DNA, 25 bp, Homo sapien
gagcaggtagtagggaattttctag

SEQ ID NO: 2459437 - DNA, 25 bp, Homo sapien
caggtagtagggaattttctagcat

SEQ ID NO: 2459438 - DNA, 25 bp, Homo sapien
gcaggtagtagggaattttctagca

SEQ ID NO: 2459439 - DNA, 25 bp, Homo sapien
ttgtgactgggtagcaaagcagtca

SEQ ID NO: 2459440 - DNA, 25 bp, Homo sapien
ttcaaaatactgtggattctgataa

SEQ ID NO: 2459441 - DNA, 25 bp, Homo sapien
aattgtgactgggtagcaaagcagt

SEQ ID NO: 2459442 - DNA, 25 bp, Homo sapien
tcttggcacactggtaattcaaaat

SEQ ID NO: 2459443 - DNA, 25 bp, Homo sapien
aaagtgcaaacacagtcattacttc

SEQ ID NO: 2459444 - DNA, 25 bp, Homo sapien
gcaaacacagtcattacttccacaa

SEQ ID NO: 2459445 - DNA, 25 bp, Homo sapien
agaatgcaatagatcagccttgccc

SEQ ID NO: 2459446 - DNA, 25 bp, Homo sapien
catccagaatgcaatagatcagcct

SEQ ID NO: 2459447 - DNA, 25 bp, Homo sapien
tccagtatcaagatgcggcagattc

SEQ ID NO: 2459448 - DNA, 25 bp, Homo sapien
taggagtgctcatcccattcatgag

SEQ ID NO: 2459449 - DNA, 25 bp, Homo sapien
acactgtggaaggagcaagcgagct

SEQ ID NO: 2459450 - DNA, 25 bp, Homo sapien
tctcattcatagacagagccttccc

SEQ ID NO: 2459451 - DNA, 25 bp, Homo sapien
ttccccaaaaccacaaccttgcagc

SEQ ID NO: 2459452 - DNA, 25 bp, Homo sapien
gcttccttgcaaaactgtaacttcc

SEQ ID NO: 2459453 - DNA, 25 bp, Homo sapien
tgcagcttccttgcaaaactgtaac

SEQ ID NO: 2459454 - DNA, 25 bp, Homo sapien
cgtcttgcagcttccttgcaaaact

SEQ ID NO: 2459455 - DNA, 25 bp, Homo sapien
cacttaaccctgatgacccttgatg

SEQ ID NO: 2459456 - DNA, 25 bp, Homo sapien
ggcagtgtcctctacttagctccaa

SEQ ID NO: 2459457 - DNA, 25 bp, Homo sapien
ggacttttcatgtgtctaagtttca

SEQ ID NO: 2459458 - DNA, 25 bp, Homo sapien
ataattgtaattggaccagagtttc

SEQ ID NO: 2459459 - DNA, 25 bp, Homo sapien
tgatttggagatttaaagagtagct

SEQ ID NO: 2459460 - DNA, 25 bp, Homo sapien
ctgtagggcatgttgtacaactttt

SEQ ID NO: 2459461 - DNA, 25 bp, Homo sapien
ttccatcttccaatcatctcttcgg

SEQ ID NO: 2459462 - DNA, 25 bp, Homo sapien
atcatctcttcggaacatgctgtgg

SEQ ID NO: 2459463 - DNA, 25 bp, Homo sapien
catatatgtctttagcaatgggagt

SEQ ID NO: 2459464 - DNA, 25 bp, Homo sapien
tctttcctgtgaacaaatatcctga

SEQ ID NO: 2459465 - DNA, 25 bp, Homo sapien
tgtgaaccatagtaacaaacagaaa

SEQ ID NO: 2459466 - DNA, 25 bp, Homo sapien
tcctgaaatgtcattgggaagaaca

SEQ ID NO: 2459467 - DNA, 25 bp, Homo sapien
catcaggaagtgaataaaccagcat

SEQ ID NO: 2459468 - DNA, 25 bp, Homo sapien
gatgcgataattcctaaaaagcctg

SEQ ID NO: 2459469 - DNA, 25 bp, Homo sapien
catggatctttctgttagaactgca

SEQ ID NO: 2459470 - DNA, 25 bp, Homo sapien
cataaacactcgtgggaagttagag

SEQ ID NO: 2459471 - DNA, 25 bp, Homo sapien
aaaacctcctgcacatgcctggagc

SEQ ID NO: 2459472 - DNA, 25 bp, Homo sapien
caaaaaacctcctgcacatgcctgg

SEQ ID NO: 2459473 - DNA, 25 bp, Homo sapien
gacatagtcagcatgcaacaaaatg

SEQ ID NO: 2459474 - DNA, 25 bp, Homo sapien
tgcctggagcaagaagggttgcttt

SEQ ID NO: 2459475 - DNA, 25 bp, Homo sapien
tttttcagcatatctggggggatat

SEQ ID NO: 2459476 - DNA, 25 bp, Homo sapien
tcactttttcagcatatctgggggg

SEQ ID NO: 2459477 - DNA, 25 bp, Homo sapien
cactttttcagcatatctgggggga

SEQ ID NO: 2459478 - DNA, 25 bp, Homo sapien
actttttcagcatatctggggggat

SEQ ID NO: 2459479 - DNA, 25 bp, Homo sapien
gaaggcttggcccagaatcttgtcc

SEQ ID NO: 2459480 - DNA, 25 bp, Homo sapien
aagtaagatactaaggcctgcccag

SEQ ID NO: 2459481 - DNA, 25 bp, Homo sapien
tagcctacagccagttacagaaatg

SEQ ID NO: 2459482 - DNA, 25 bp, Homo sapien
ctccacagtggagggtaggcctgaa

SEQ ID NO: 2459483 - DNA, 25 bp, Homo sapien
tatacgtgaaatcataaggtgccag

SEQ ID NO: 2459484 - DNA, 25 bp, Homo sapien
ttctcaggtttgctacagagggagc

SEQ ID NO: 2459485 - DNA, 25 bp, Homo sapien
cccagtctaagatcgaagcgtgctt

SEQ ID NO: 2459486 - DNA, 25 bp, Homo sapien
tcatcaataggaagcactgaggact

SEQ ID NO: 2459487 - DNA, 25 bp, Homo sapien
gctttcaatttatctctgtgtttgc

SEQ ID NO: 2459488 - DNA, 25 bp, Homo sapien
gcccgacccagtggctcattccttt

SEQ ID NO: 2459489 - DNA, 25 bp, Homo sapien
tgtgtttgcccgacccagtggctca

SEQ ID NO: 2459490 - DNA, 25 bp, Homo sapien
gtttgcccgacccagtggctcattc

SEQ ID NO: 2459491 - DNA, 25 bp, Homo sapien
tttgaagcataaaacagtgccagct

SEQ ID NO: 2459492 - DNA, 25 bp, Homo sapien
tacccaggcattcatagactaagac

SEQ ID NO: 2459493 - DNA, 25 bp, Homo sapien
tcactgtagtccaaaagggaatgct

SEQ ID NO: 2459494 - DNA, 25 bp, Homo sapien
tttcattcttgaccctacccaggca

SEQ ID NO: 2459495 - DNA, 25 bp, Homo sapien
gggactaaacatgcatgccaccaag

SEQ ID NO: 2459496 - DNA, 25 bp, Homo sapien
gtgtagctgggactaaacatgcatg

SEQ ID NO: 2459497 - DNA, 25 bp, Homo sapien
tcctgggctcaagtattccttcagc

SEQ ID NO: 2459498 - DNA, 25 bp, Homo sapien
ggctcaagtattccttcagcctcag

SEQ ID NO: 2459499 - DNA, 25 bp, Homo sapien
cttcttgtggtaaggggagccagga

SEQ ID NO: 2459500 - DNA, 25 bp, Homo sapien
ccaggaacagctgagtaaaaactac

SEQ ID NO: 2459501 - DNA, 25 bp, Homo sapien
gaacagctgagtaaaaactacagat

SEQ ID NO: 2459502 - DNA, 25 bp, Homo sapien
caggaacagctgagtaaaaactaca

SEQ ID NO: 2459503 - DNA, 25 bp, Homo sapien
ggtgcgactgtgtctcattgcagcc

SEQ ID NO: 2459504 - DNA, 25 bp, Homo sapien
gaaaaacttagatatctagccatct

SEQ ID NO: 2459505 - DNA, 25 bp, Homo sapien
gtgtagtggtgcgactgtgtctcat

SEQ ID NO: 2459506 - DNA, 25 bp, Homo sapien
tatttgtcctgaaaaacttagatat

SEQ ID NO: 2459507 - DNA, 25 bp, Homo sapien
gtaatacacacctgtctttggaaga

SEQ ID NO: 2459508 - DNA, 25 bp, Homo sapien
acaaaatatgcgttagttgactctc

SEQ ID NO: 2459509 - DNA, 25 bp, Homo sapien
tacgatgatccactactacttgata

SEQ ID NO: 2459510 - DNA, 25 bp, Homo sapien
ctgcattggaggtcctgagacagca

SEQ ID NO: 2459511 - DNA, 25 bp, Homo sapien
ccgagtcagactggaaggtaagtct

SEQ ID NO: 2459512 - DNA, 25 bp, Homo sapien
tatgttttatagagcatgacacccc

SEQ ID NO: 2459513 - DNA, 25 bp, Homo sapien
catgtaatgttacacccgagtcaga

SEQ ID NO: 2459514 - DNA, 25 bp, Homo sapien
gagggcctggaagatctagttttgt

SEQ ID NO: 2459515 - DNA, 25 bp, Homo sapien
ggacagatgtccaggtaaagggcaa

SEQ ID NO: 2459516 - DNA, 25 bp, Homo sapien
agggcaatagttctaacacaatgag

SEQ ID NO: 2459517 - DNA, 25 bp, Homo sapien
gagaatcctagtagttaaggctcct

SEQ ID NO: 2459518 - DNA, 25 bp, Homo sapien
gcaatagtaagtggattttaaggac

SEQ ID NO: 2459519 - DNA, 25 bp, Homo sapien
gactcttctaaagtaatctccttag

SEQ ID NO: 2459520 - DNA, 25 bp, Homo sapien
gagctatccgcatactcgtaggtgc

SEQ ID NO: 2459521 - DNA, 25 bp, Homo sapien
ggtgctgttctgacttctggaaaca

SEQ ID NO: 2459522 - DNA, 25 bp, Homo sapien
tgtttaaatccgtgaaagtacacag

SEQ ID NO: 2459523 - DNA, 25 bp, Homo sapien
ttccaacttgcacacaaaacatact

SEQ ID NO: 2459524 - DNA, 25 bp, Homo sapien
cccaaggctccaactggacatggct

SEQ ID NO: 2459525 - DNA, 25 bp, Homo sapien
catttatttccaacttgcacacaaa

SEQ ID NO: 2459526 - DNA, 25 bp, Homo sapien
gctccatattgaccccttttttgtc

SEQ ID NO: 2459527 - DNA, 25 bp, Homo sapien
gacagtgcagcccatgctcatagcc

SEQ ID NO: 2459528 - DNA, 25 bp, Homo sapien
tgggagttcacccaagccctctgtg

SEQ ID NO: 2459529 - DNA, 25 bp, Homo sapien
ggtcactgcacccttccaaagctga

SEQ ID NO: 2459530 - DNA, 25 bp, Homo sapien
tatggaagttggagacgggctcatc

SEQ ID NO: 2459531 - DNA, 25 bp, Homo sapien
tctcagaagatcctgaaaatgacca

SEQ ID NO: 2459532 - DNA, 25 bp, Homo sapien
gaagatcctgaaaatgaccaatgat

SEQ ID NO: 2459533 - DNA, 25 bp, Homo sapien
agatcctgaaaatgaccaatgataa

SEQ ID NO: 2459534 - DNA, 25 bp, Homo sapien
cagaagatcctgaaaatgaccaatg

SEQ ID NO: 2459535 - DNA, 25 bp, Homo sapien
ttttgctcagagagttagccaaaag

SEQ ID NO: 2459536 - DNA, 25 bp, Homo sapien
gctcagagagttagccaaaagaaag

SEQ ID NO: 2459537 - DNA, 25 bp, Homo sapien
gagttttgctcagagagttagccaa

SEQ ID NO: 2459538 - DNA, 25 bp, Homo sapien
ttgctcagagagttagccaaaagaa

SEQ ID NO: 2459539 - DNA, 25 bp, Homo sapien
gaatcaaagcgtaaatacacaaaca

SEQ ID NO: 2459540 - DNA, 25 bp, Homo sapien
aaatcaattccataagaagttacta

SEQ ID NO: 2459541 - DNA, 25 bp, Homo sapien
gaagttactatgaatcaaagcgtaa

SEQ ID NO: 2459542 - DNA, 25 bp, Homo sapien
ttacagtttgtgttcaatgcaaatc

SEQ ID NO: 2459543 - DNA, 25 bp, Homo sapien
tggaacatctaagcatcagtgtgtg

SEQ ID NO: 2459544 - DNA, 25 bp, Homo sapien
gactttggtcatcaagactactgtg

SEQ ID NO: 2459545 - DNA, 25 bp, Homo sapien
cacagtagcttcaaaacggttcgat

SEQ ID NO: 2459546 - DNA, 25 bp, Homo sapien
tactgtggccatattagattactgg

SEQ ID NO: 2459547 - DNA, 25 bp, Homo sapien
tgagcccgggaggcaaatggtacac

SEQ ID NO: 2459548 - DNA, 25 bp, Homo sapien
caaatggtacactgatctgagatca

SEQ ID NO: 2459549 - DNA, 25 bp, Homo sapien
ggcaaatggtacactgatctgagat

SEQ ID NO: 2459550 - DNA, 25 bp, Homo sapien
ccgggaggcaaatggtacactgatc

SEQ ID NO: 2459551 - DNA, 25 bp, Homo sapien
tatatcggcattaaataagtgctgc

SEQ ID NO: 2459552 - DNA, 25 bp, Homo sapien
tacagtaacacctggaagttccttc

SEQ ID NO: 2459553 - DNA, 25 bp, Homo sapien
tccttctcatgtacatataaataga

SEQ ID NO: 2459554 - DNA, 25 bp, Homo sapien
tatggccttatagaattaatgaacc

SEQ ID NO: 2459555 - DNA, 25 bp, Homo sapien
tgtacatgaaactccagcagattta

SEQ ID NO: 2459556 - DNA, 25 bp, Homo sapien
taagtgtccatatttctcaagccac

SEQ ID NO: 2459557 - DNA, 25 bp, Homo sapien
tcatctagtcaaacctctcacatgt

SEQ ID NO: 2459558 - DNA, 25 bp, Homo sapien
ttttcaaggtagtattaagtgtcca

SEQ ID NO: 2459559 - DNA, 25 bp, Homo sapien
tagaagacgtttcttggcctgagtc

SEQ ID NO: 2459560 - DNA, 25 bp, Homo sapien
cttccagacgccatttggattgggt

SEQ ID NO: 2459561 - DNA, 25 bp, Homo sapien
tgccacattggacttccagacgcca

SEQ ID NO: 2459562 - DNA, 25 bp, Homo sapien
tagattcgatgaagacctgtttttc

SEQ ID NO: 2459563 - DNA, 25 bp, Homo sapien
agagtagagatgcagaagagagagt

SEQ ID NO: 2459564 - DNA, 25 bp, Homo sapien
ttaagagtagagatgcagaagagag

SEQ ID NO: 2459565 - DNA, 25 bp, Homo sapien
taagagtagagatgcagaagagaga

SEQ ID NO: 2459566 - DNA, 25 bp, Homo sapien
gtagagatgcagaagagagagtgag

SEQ ID NO: 2459567 - DNA, 25 bp, Homo sapien
cagtgttggaagtactctgggagga

SEQ ID NO: 2459568 - DNA, 25 bp, Homo sapien
gaataaatctgcgtgggtaggagca

SEQ ID NO: 2459569 - DNA, 25 bp, Homo sapien
gatttggggccaacccagtgttgga

SEQ ID NO: 2459570 - DNA, 25 bp, Homo sapien
gaggagttacttgaagttccagttg

SEQ ID NO: 2459571 - DNA, 25 bp, Homo sapien
tgtcccggtccggagcgatctgcgc

SEQ ID NO: 2459572 - DNA, 25 bp, Homo sapien
tgcgcggcgcgtctagcaggatgct

SEQ ID NO: 2459573 - DNA, 25 bp, Homo sapien
ggtcggcgctcctcgcaggcggtgt

SEQ ID NO: 2459574 - DNA, 25 bp, Homo sapien
tccccgaagcccttgctttgttctg

SEQ ID NO: 2459575 - DNA, 25 bp, Homo sapien
caatcagggaaaaaacggctggcca

SEQ ID NO: 2459576 - DNA, 25 bp, Homo sapien
tcaatgttcaagatgcacgcagatg

SEQ ID NO: 2459577 - DNA, 25 bp, Homo sapien
tccatttcattaggcccggaggagc

SEQ ID NO: 2459578 - DNA, 25 bp, Homo sapien
tgaggtcgagggcaacaacttggtc

SEQ ID NO: 2459579 - DNA, 25 bp, Homo sapien
gaatgggcatcgctggctttctaac

SEQ ID NO: 2459580 - DNA, 25 bp, Homo sapien
tcagaccggctggacatgcagtggt

SEQ ID NO: 2459581 - DNA, 25 bp, Homo sapien
gaagtagcagtcatccatcgcaaag

SEQ ID NO: 2459582 - DNA, 25 bp, Homo sapien
gaagtctgccctctgacggtcggat

SEQ ID NO: 2459583 - DNA, 25 bp, Homo sapien
ggcattgaatctctaaatcaccttc

SEQ ID NO: 2459584 - DNA, 25 bp, Homo sapien
atctctaaatcaccttcggcagtat

SEQ ID NO: 2459585 - DNA, 25 bp, Homo sapien
gcattgaatctctaaatcaccttcg

SEQ ID NO: 2459586 - DNA, 25 bp, Homo sapien
tctaaatcaccttcggcagtatggc

SEQ ID NO: 2459587 - DNA, 25 bp, Homo sapien
tggtcacacagtagaacagctcctg

SEQ ID NO: 2459588 - DNA, 25 bp, Homo sapien
cagaggcactaggtccaggttctcc

SEQ ID NO: 2459589 - DNA, 25 bp, Homo sapien
tcctttttactttcagctggaacag

SEQ ID NO: 2459590 - DNA, 25 bp, Homo sapien
tggaaagggagatgacctgtcctcc

SEQ ID NO: 2459591 - DNA, 25 bp, Homo sapien
cgtgagttcctactgacattgccaa

SEQ ID NO: 2459592 - DNA, 25 bp, Homo sapien
tggcaacatgaacctagtagacttt

SEQ ID NO: 2459593 - DNA, 25 bp, Homo sapien
gaatcctgattttcaagaactcggg

SEQ ID NO: 2459594 - DNA, 25 bp, Homo sapien
tactgtactggacattgtttcgagg

SEQ ID NO: 2459595 - DNA, 25 bp, Homo sapien
tcacaaatttgcattttattcttgt

SEQ ID NO: 2459596 - DNA, 25 bp, Homo sapien
atttgcattttattcttgtgcaggg

SEQ ID NO: 2459597 - DNA, 25 bp, Homo sapien
caaatttgcattttattcttgtgca

SEQ ID NO: 2459598 - DNA, 25 bp, Homo sapien
tttgcattttattcttgtgcagggg

SEQ ID NO: 2459599 - DNA, 25 bp, Homo sapien
tgcacccagctcctgtcagtcttaa

SEQ ID NO: 2459600 - DNA, 25 bp, Homo sapien
ccagctcctgtcagtcttaaaacaa

SEQ ID NO: 2459601 - DNA, 25 bp, Homo sapien
cacccagctcctgtcagtcttaaaa

SEQ ID NO: 2459602 - DNA, 25 bp, Homo sapien
gctcctgtcagtcttaaaacaaaca

SEQ ID NO: 2459603 - DNA, 25 bp, Homo sapien
taaggaacgaagcaaataagaaatc

SEQ ID NO: 2459604 - DNA, 25 bp, Homo sapien
cacataaggtgactcacagctctaa

SEQ ID NO: 2459605 - DNA, 25 bp, Homo sapien
gaaggcctcgaaatcaataatctga

SEQ ID NO: 2459606 - DNA, 25 bp, Homo sapien
tgttatgtgtgccagtattcctagc

SEQ ID NO: 2459607 - DNA, 25 bp, Homo sapien
caaggctagatgtgatataccagac

SEQ ID NO: 2459608 - DNA, 25 bp, Homo sapien
tcgtggtcacctacccaacaatggg

SEQ ID NO: 2459609 - DNA, 25 bp, Homo sapien
tggtcccacctaacagcatgaaagg

SEQ ID NO: 2459610 - DNA, 25 bp, Homo sapien
caatactggcaaacgatggcttcaa

SEQ ID NO: 2459611 - DNA, 25 bp, Homo sapien
cacacatcggatacataggtcctga

SEQ ID NO: 2459612 - DNA, 25 bp, Homo sapien
attatcatccccgtaactggagtgc

SEQ ID NO: 2459613 - DNA, 25 bp, Homo sapien
ggttgctgccttttgtatcctgagc

SEQ ID NO: 2459614 - DNA, 25 bp, Homo sapien
atgaaatatgatgcccggccacccc

SEQ ID NO: 2459615 - DNA, 25 bp, Homo sapien
tagagcggaactgcatgacccaaaa

SEQ ID NO: 2459616 - DNA, 25 bp, Homo sapien
catgtgaagggtttactagagcgga

SEQ ID NO: 2459617 - DNA, 25 bp, Homo sapien
gcaacaggtagatgtgtacaccaag

SEQ ID NO: 2459618 - DNA, 25 bp, Homo sapien
ggcactgcctgactggagtataact

SEQ ID NO: 2459619 - DNA, 25 bp, Homo sapien
catgatctttactcacccataagtg

SEQ ID NO: 2459620 - DNA, 25 bp, Homo sapien
ttaacatcaagaagtgtttcctccc

SEQ ID NO: 2459621 - DNA, 25 bp, Homo sapien
aagttggcttatctattctactgcc

SEQ ID NO: 2459622 - DNA, 25 bp, Homo sapien
tctcccaatctatagctcgtgtttc

SEQ ID NO: 2459623 - DNA, 25 bp, Homo sapien
tagcaaagcattggacacaatagat

SEQ ID NO: 2459624 - DNA, 25 bp, Homo sapien
cacaatagattgaaggtatttggac

SEQ ID NO: 2459625 - DNA, 25 bp, Homo sapien
ggtatttggaccatccgcaggttac

SEQ ID NO: 2459626 - DNA, 25 bp, Homo sapien
tgataaggtgggctcacaatgaggc

SEQ ID NO: 2459627 - DNA, 25 bp, Homo sapien
accacaagcgggcagggtgcaccta

SEQ ID NO: 2459628 - DNA, 25 bp, Homo sapien
catcgccgcagtacgtgaggatgct

SEQ ID NO: 2459629 - DNA, 25 bp, Homo sapien
gcacctactcacaagagcaagccag

SEQ ID NO: 2459630 - DNA, 25 bp, Homo sapien
ggatgctttaagaggttgctagccc

SEQ ID NO: 2459631 - DNA, 25 bp, Homo sapien
agaggaatgtaattacaggtgagcc

SEQ ID NO: 2459632 - DNA, 25 bp, Homo sapien
aattgttataaagttttgtgccgca

SEQ ID NO: 2459633 - DNA, 25 bp, Homo sapien
aggaatgtaattacaggtgagcccc

SEQ ID NO: 2459634 - DNA, 25 bp, Homo sapien
tgttataaagttttgtgccgcaaaa

SEQ ID NO: 2459635 - DNA, 25 bp, Homo sapien
gaggttcttattcccgatccacgtg

SEQ ID NO: 2459636 - DNA, 25 bp, Homo sapien
caggtaatcgaaaaacgttgtgcta

SEQ ID NO: 2459637 - DNA, 25 bp, Homo sapien
taatttaaagatagtgtacgggtga

SEQ ID NO: 2459638 - DNA, 25 bp, Homo sapien
ccccttacatttggagcaatagtga

SEQ ID NO: 2459639 - DNA, 25 bp, Homo sapien
ggtcgggccggcacttgcccttgtc

SEQ ID NO: 2459640 - DNA, 25 bp, Homo sapien
taggtcgggccggcacttgcccttg

SEQ ID NO: 2459641 - DNA, 25 bp, Homo sapien
aggtcgggccggcacttgcccttgt

SEQ ID NO: 2459642 - DNA, 25 bp, Homo sapien
ctaggtcgggccggcacttgccctt

SEQ ID NO: 2459643 - DNA, 25 bp, Homo sapien
tccactggaacaatagtttcccttg

SEQ ID NO: 2459644 - DNA, 25 bp, Homo sapien
tcggcgcgtaaatcaccgacatcct

SEQ ID NO: 2459645 - DNA, 25 bp, Homo sapien
ctacagctcggcgcgtaaatcaccg

SEQ ID NO: 2459646 - DNA, 25 bp, Homo sapien
gcgtaaatcaccgacatcctcgcag

SEQ ID NO: 2459647 - DNA, 25 bp, Homo sapien
gagccgagtgtccatcttgcgcatc

SEQ ID NO: 2459648 - DNA, 25 bp, Homo sapien
ggacgaaggaggagccgagtgtcca

SEQ ID NO: 2459649 - DNA, 25 bp, Homo sapien
gagtgtccatcttgcgcatctggcc

SEQ ID NO: 2459650 - DNA, 25 bp, Homo sapien
gaaggaggagccgagtgtccatctt

SEQ ID NO: 2459651 - DNA, 25 bp, Homo sapien
agtcaactcctagcctgtctctctt

SEQ ID NO: 2459652 - DNA, 25 bp, Homo sapien
aggccaacaggcagtcaactcctag

SEQ ID NO: 2459653 - DNA, 25 bp, Homo sapien
ctctcttcccttggctcatccctga

SEQ ID NO: 2459654 - DNA, 25 bp, Homo sapien
ccaccagagccagtaggccaacagg

SEQ ID NO: 2459655 - DNA, 25 bp, Homo sapien
agaattgattcggtgtcagagtgga

SEQ ID NO: 2459656 - DNA, 25 bp, Homo sapien
tgccctctcagaattgattcggtgt

SEQ ID NO: 2459657 - DNA, 25 bp, Homo sapien
gagctgcttgtggtgcagctggtag

SEQ ID NO: 2459658 - DNA, 25 bp, Homo sapien
ctggtagtggataaccagagccagc

SEQ ID NO: 2459659 - DNA, 25 bp, Homo sapien
aggagctacctaggcacaccgacat

SEQ ID NO: 2459660 - DNA, 25 bp, Homo sapien
aaggaggtgagagacgccagaatgg

SEQ ID NO: 2459661 - DNA, 25 bp, Homo sapien
gccagactagtgtcctcccatgcag

SEQ ID NO: 2459662 - DNA, 25 bp, Homo sapien
tacacataaaactcgttcatgcacc

SEQ ID NO: 2459663 - DNA, 25 bp, Homo sapien
caagcaattccctaaactcagtagg

SEQ ID NO: 2459664 - DNA, 25 bp, Homo sapien
ctaaactcagtaggcatttctccct

SEQ ID NO: 2459665 - DNA, 25 bp, Homo sapien
ggatgattgtcttctcccaagcagc

SEQ ID NO: 2459666 - DNA, 25 bp, Homo sapien
ctttcccaagcccacggatgattgt

SEQ ID NO: 2459667 - DNA, 25 bp, Homo sapien
tgctttgggtgtgactgaattctcc

SEQ ID NO: 2459668 - DNA, 25 bp, Homo sapien
tttgggtgtgactgaattctcctga

SEQ ID NO: 2459669 - DNA, 25 bp, Homo sapien
tcctgctttgggtgtgactgaattc

SEQ ID NO: 2459670 - DNA, 25 bp, Homo sapien
ctcctgctttgggtgtgactgaatt

SEQ ID NO: 2459671 - DNA, 25 bp, Homo sapien
tgggtgggcaaatagatagattggt

SEQ ID NO: 2459672 - DNA, 25 bp, Homo sapien
ttaggcggtgattgaatgggtacca

SEQ ID NO: 2459673 - DNA, 25 bp, Homo sapien
ggtaccaggggagatgtaaatgaat

SEQ ID NO: 2459674 - DNA, 25 bp, Homo sapien
tggtggttgggtaaatggacgaatg

SEQ ID NO: 2459675 - DNA, 25 bp, Homo sapien
cattggtccatctgtgagggtgcac

SEQ ID NO: 2459676 - DNA, 25 bp, Homo sapien
agggtgcacccttctatagaagtaa

SEQ ID NO: 2459677 - DNA, 25 bp, Homo sapien
attggtccatctgtgagggtgcacc

SEQ ID NO: 2459678 - DNA, 25 bp, Homo sapien
cacccttctatagaagtaaactgcc

SEQ ID NO: 2459679 - DNA, 25 bp, Homo sapien
cgccactttctcccttccccaggtg

SEQ ID NO: 2459680 - DNA, 25 bp, Homo sapien
ctccccagacaagctttcccgccat

SEQ ID NO: 2459681 - DNA, 25 bp, Homo sapien
ttctccccagacaagctttcccgcc

SEQ ID NO: 2459682 - DNA, 25 bp, Homo sapien
tctccccagacaagctttcccgcca

SEQ ID NO: 2459683 - DNA, 25 bp, Homo sapien
ctccccaaacaacaccttctccctg

SEQ ID NO: 2459684 - DNA, 25 bp, Homo sapien
ccccaaacaacaccttctccctgca

SEQ ID NO: 2459685 - DNA, 25 bp, Homo sapien
tgcccaggcagttccctccccaaac

SEQ ID NO: 2459686 - DNA, 25 bp, Homo sapien
cttacctttgcccaggcagttccct

SEQ ID NO: 2459687 - DNA, 25 bp, Homo sapien
tgcttttcgagtgtgtgtatccagc

SEQ ID NO: 2459688 - DNA, 25 bp, Homo sapien
tctcagggagcctgatctcttgctt

SEQ ID NO: 2459689 - DNA, 25 bp, Homo sapien
cacaatccttgcactggtggagccg

SEQ ID NO: 2459690 - DNA, 25 bp, Homo sapien
cacataatttatatagcaggtgctg

SEQ ID NO: 2459691 - DNA, 25 bp, Homo sapien
tatcatagcctcaacaaagtgccca

SEQ ID NO: 2459692 - DNA, 25 bp, Homo sapien
ggagagcacatgcaaccccatctgt

SEQ ID NO: 2459693 - DNA, 25 bp, Homo sapien
tgacaaagaacaggagtggcacact

SEQ ID NO: 2459694 - DNA, 25 bp, Homo sapien
tagtgaaagaagacccctctgctac

SEQ ID NO: 2459695 - DNA, 25 bp, Homo sapien
ccagcaggcttttaagtgaaaactg

SEQ ID NO: 2459696 - DNA, 25 bp, Homo sapien
gaaatgtgaaagacctaagataacc

SEQ ID NO: 2459697 - DNA, 25 bp, Homo sapien
aagcattgctaaggaaagcacagtc

SEQ ID NO: 2459698 - DNA, 25 bp, Homo sapien
cagtccacctaaatcaatggaagga

SEQ ID NO: 2459699 - DNA, 25 bp, Homo sapien
aatgctactggtgctgtggcacgcc

SEQ ID NO: 2459700 - DNA, 25 bp, Homo sapien
aatgggaagctgtcataccctcgga

SEQ ID NO: 2459701 - DNA, 25 bp, Homo sapien
gagcgatggctaccacctacacatg

SEQ ID NO: 2459702 - DNA, 25 bp, Homo sapien
catagcagcacatcttagggttcag

SEQ ID NO: 2459703 - DNA, 25 bp, Homo sapien
taactgactccaagagtgcagcatc

SEQ ID NO: 2459704 - DNA, 25 bp, Homo sapien
gcaacttcaacttttggggctcaag

SEQ ID NO: 2459705 - DNA, 25 bp, Homo sapien
ccctagataaaacaaacgtgacctg

SEQ ID NO: 2459706 - DNA, 25 bp, Homo sapien
ggcagcagtcccatcagtagtaact

SEQ ID NO: 2459707 - DNA, 25 bp, Homo sapien
agtcaactgaatgcatctttctccc

SEQ ID NO: 2459708 - DNA, 25 bp, Homo sapien
gtcaactgaatgcatctttctccca

SEQ ID NO: 2459709 - DNA, 25 bp, Homo sapien
tcaactgaatgcatctttctcccag

SEQ ID NO: 2459710 - DNA, 25 bp, Homo sapien
tctgtcaccgtggctggaacgcagt

SEQ ID NO: 2459711 - DNA, 25 bp, Homo sapien
ggcacaatctcgactcactgtaacc

SEQ ID NO: 2459712 - DNA, 25 bp, Homo sapien
ccaggtaagcaattctccaacctca

SEQ ID NO: 2459713 - DNA, 25 bp, Homo sapien
gctctgtcaccgtggctggaacgca

SEQ ID NO: 2459714 - DNA, 25 bp, Homo sapien
tgcactccatagtgagccacacagt

SEQ ID NO: 2459715 - DNA, 25 bp, Homo sapien
ccaaaaactatggtacctggctcaa

SEQ ID NO: 2459716 - DNA, 25 bp, Homo sapien
catctgcatgggagacagcgataga

SEQ ID NO: 2459717 - DNA, 25 bp, Homo sapien
caaggcagccagaatgacgcaggat

SEQ ID NO: 2459718 - DNA, 25 bp, Homo sapien
ttccttaagggcaagagctgctgtt

SEQ ID NO: 2459719 - DNA, 25 bp, Homo sapien
attgttccttaagggcaagagctgc

SEQ ID NO: 2459720 - DNA, 25 bp, Homo sapien
gagctgctgttgaagccgccaccgc

SEQ ID NO: 2459721 - DNA, 25 bp, Homo sapien
tgttccttaagggcaagagctgctg

SEQ ID NO: 2459722 - DNA, 25 bp, Homo sapien
atgcagcccgtggcggcgtttcccc

SEQ ID NO: 2459723 - DNA, 25 bp, Homo sapien
tgggattcgaagactggacggctcc

SEQ ID NO: 2459724 - DNA, 25 bp, Homo sapien
gcggcgctaccgcagcgggaaggcg

SEQ ID NO: 2459725 - DNA, 25 bp, Homo sapien
cggcggcgctaccgcagcgggaagg

SEQ ID NO: 2459726 - DNA, 25 bp, Homo sapien
ggccgaattgcgggcaggcggtatg

SEQ ID NO: 2459727 - DNA, 25 bp, Homo sapien
tggccgaattgcgggcaggcggtat

SEQ ID NO: 2459728 - DNA, 25 bp, Homo sapien
ctggccgaattgcgggcaggcggta

SEQ ID NO: 2459729 - DNA, 25 bp, Homo sapien
cacctgttgcggaggactactgagg

SEQ ID NO: 2459730 - DNA, 25 bp, Homo sapien
ggctgcgcggcacctgttgcggagg

SEQ ID NO: 2459731 - DNA, 25 bp, Homo sapien
cgcggcacctgttgcggaggactac

SEQ ID NO: 2459732 - DNA, 25 bp, Homo sapien
ctactgagggggcatctggccgcaa

SEQ ID NO: 2459733 - DNA, 25 bp, Homo sapien
gaggcgcctccccaactgaagatct

SEQ ID NO: 2459734 - DNA, 25 bp, Homo sapien
tgaagatctcggtccatctcagggt

SEQ ID NO: 2459735 - DNA, 25 bp, Homo sapien
agggtggcctctgactctccgaccc

SEQ ID NO: 2459736 - DNA, 25 bp, Homo sapien
ctgactctccgacccggcgctggtg

SEQ ID NO: 2459737 - DNA, 25 bp, Homo sapien
ggaagacgtgcgttaaagggctgaa

SEQ ID NO: 2459738 - DNA, 25 bp, Homo sapien
cagggactgagcaagttatgcggtc

SEQ ID NO: 2459739 - DNA, 25 bp, Homo sapien
gggagggacggaactgacagtctct

SEQ ID NO: 2459740 - DNA, 25 bp, Homo sapien
accccttatccgtcacagccattgg

SEQ ID NO: 2459741 - DNA, 25 bp, Homo sapien
tcagcgatgtgacacccatcctccc

SEQ ID NO: 2459742 - DNA, 25 bp, Homo sapien
atcctcccatggctagtggctgatg

SEQ ID NO: 2459743 - DNA, 25 bp, Homo sapien
catggctagtggctgatgttctgcc

SEQ ID NO: 2459744 - DNA, 25 bp, Homo sapien
gtgacacccatcctcccatggctag

SEQ ID NO: 2459745 - DNA, 25 bp, Homo sapien
ctagggagttgtcagggatatcctc

SEQ ID NO: 2459746 - DNA, 25 bp, Homo sapien
agggagttgtcagggatatcctcat

SEQ ID NO: 2459747 - DNA, 25 bp, Homo sapien
tagggagttgtcagggatatcctca

SEQ ID NO: 2459748 - DNA, 25 bp, Homo sapien
ccacccagcaggtacccttccttct

SEQ ID NO: 2459749 - DNA, 25 bp, Homo sapien
caaaaactcattggccaaacctctt

SEQ ID NO: 2459750 - DNA, 25 bp, Homo sapien
cagttcccaaaaactcattggccaa

SEQ ID NO: 2459751 - DNA, 25 bp, Homo sapien
ccaaaaactcattggccaaacctct

SEQ ID NO: 2459752 - DNA, 25 bp, Homo sapien
ttacagttcccaaaaactcattggc

SEQ ID NO: 2459753 - DNA, 25 bp, Homo sapien
cttgaggtaattctaactgctgtgg

SEQ ID NO: 2459754 - DNA, 25 bp, Homo sapien
tgtttagtactggtgaagattatca

SEQ ID NO: 2459755 - DNA, 25 bp, Homo sapien
gtttagtactggtgaagattatcat

SEQ ID NO: 2459756 - DNA, 25 bp, Homo sapien
tacatagccaccaattgttgaggta

SEQ ID NO: 2459757 - DNA, 25 bp, Homo sapien
gattgtgcagtctctcggttaaggt

SEQ ID NO: 2459758 - DNA, 25 bp, Homo sapien
tctctcggttaaggtggttaagcaa

SEQ ID NO: 2459759 - DNA, 25 bp, Homo sapien
cccattgttaggcagtttgtaattc

SEQ ID NO: 2459760 - DNA, 25 bp, Homo sapien
atattccggtatgattctacccatg

SEQ ID NO: 2459761 - DNA, 25 bp, Homo sapien
tgttagggctgcttttaagtatggt

SEQ ID NO: 2459762 - DNA, 25 bp, Homo sapien
cattgacatcaactatgtggtctac

SEQ ID NO: 2459763 - DNA, 25 bp, Homo sapien
taagtatggtaaagtgaatattgtc

SEQ ID NO: 2459764 - DNA, 25 bp, Homo sapien
cctagtctcaatggtctttatattt

SEQ ID NO: 2459765 - DNA, 25 bp, Homo sapien
gtctcaatggtctttatatttgggc

SEQ ID NO: 2459766 - DNA, 25 bp, Homo sapien
tagtctcaatggtctttatatttgg

SEQ ID NO: 2459767 - DNA, 25 bp, Homo sapien
tttgggcatgattttgcagcggctg

SEQ ID NO: 2459768 - DNA, 25 bp, Homo sapien
tatacccaatagcatatacctggca

SEQ ID NO: 2459769 - DNA, 25 bp, Homo sapien
caataggtaggtaggtgaggctctt

SEQ ID NO: 2459770 - DNA, 25 bp, Homo sapien
tacctggcataagaagatacgcagc

SEQ ID NO: 2459771 - DNA, 25 bp, Homo sapien
aaattaacgaagcatgtttacacag

SEQ ID NO: 2459772 - DNA, 25 bp, Homo sapien
tcttctagctagagggtttatctta

SEQ ID NO: 2459773 - DNA, 25 bp, Homo sapien
catatgtaataatgtccctcctcca

SEQ ID NO: 2459774 - DNA, 25 bp, Homo sapien
caaggatgaacactagaacacacag

SEQ ID NO: 2459775 - DNA, 25 bp, Homo sapien
aagacatctttctaaatcttctagc

SEQ ID NO: 2459776 - DNA, 25 bp, Homo sapien
ggagttcatttgtacattctagtaa

SEQ ID NO: 2459777 - DNA, 25 bp, Homo sapien
taagcattccagagaggagccaagg

SEQ ID NO: 2459778 - DNA, 25 bp, Homo sapien
gttgctttccagattgaaggcttcc

SEQ ID NO: 2459779 - DNA, 25 bp, Homo sapien
gagccaaggagaatctggagttcat

SEQ ID NO: 2459780 - DNA, 25 bp, Homo sapien
gaaaactccagcgaaatatgcagga

SEQ ID NO: 2459781 - DNA, 25 bp, Homo sapien
aactccagcgaaatatgcaggatga

SEQ ID NO: 2459782 - DNA, 25 bp, Homo sapien
ccagcgaaatatgcaggatgacatt

SEQ ID NO: 2459783 - DNA, 25 bp, Homo sapien
gtggaaaactccagcgaaatatgca

SEQ ID NO: 2459784 - DNA, 25 bp, Homo sapien
tgaaagcaataaccagttttgtggt

SEQ ID NO: 2459785 - DNA, 25 bp, Homo sapien
ctgaaagcaataaccagttttgtgg

SEQ ID NO: 2459786 - DNA, 25 bp, Homo sapien
ctgatgagggtaactctggattcat

SEQ ID NO: 2459787 - DNA, 25 bp, Homo sapien
gatgagggtaactctggattcatct

SEQ ID NO: 2459788 - DNA, 25 bp, Homo sapien
tctggattcatctggttatcagaca

SEQ ID NO: 2459789 - DNA, 25 bp, Homo sapien
ggttatcagacatttgtagaagaac

SEQ ID NO: 2459790 - DNA, 25 bp, Homo sapien
ttttcagtgacatagcagccatgct

SEQ ID NO: 2459791 - DNA, 25 bp, Homo sapien
aattttcagtgacatagcagccatg

SEQ ID NO: 2459792 - DNA, 25 bp, Homo sapien
tcagtgacatagcagccatgctcac

SEQ ID NO: 2459793 - DNA, 25 bp, Homo sapien
ctaattttcagtgacatagcagcca

SEQ ID NO: 2459794 - DNA, 25 bp, Homo sapien
tcaaacacatcactgcaagcctcat

SEQ ID NO: 2459795 - DNA, 25 bp, Homo sapien
aaacattggattcccctccattatc

SEQ ID NO: 2459796 - DNA, 25 bp, Homo sapien
cacagacagagctgccgtagaactc

SEQ ID NO: 2459797 - DNA, 25 bp, Homo sapien
gcaaccctgtaggtcatttaagtaa

SEQ ID NO: 2459798 - DNA, 25 bp, Homo sapien
gctattcagcttactgtcactgcaa

SEQ ID NO: 2459799 - DNA, 25 bp, Homo sapien
gaactcccaagagctattcagctta

SEQ ID NO: 2459800 - DNA, 25 bp, Homo sapien
cataactttgctgtgggtcattttc

SEQ ID NO: 2459801 - DNA, 25 bp, Homo sapien
aaagtggggccagcgccataggaaa

SEQ ID NO: 2459802 - DNA, 25 bp, Homo sapien
ggaggcggacaatttccaaacaatc

SEQ ID NO: 2459803 - DNA, 25 bp, Homo sapien
ggaggaggcggacaatttccaaaca

SEQ ID NO: 2459804 - DNA, 25 bp, Homo sapien
tactcaggaatctgaagtagaagga

SEQ ID NO: 2459805 - DNA, 25 bp, Homo sapien
caggaatctgaagtagaaggatcac

SEQ ID NO: 2459806 - DNA, 25 bp, Homo sapien
ctcaggaatctgaagtagaaggatc

SEQ ID NO: 2459807 - DNA, 25 bp, Homo sapien
ctactcaggaatctgaagtagaagg

SEQ ID NO: 2459808 - DNA, 25 bp, Homo sapien
agaaatctaaagcaacgatgacagc

SEQ ID NO: 2459809 - DNA, 25 bp, Homo sapien
gatgacagccatccttacataaaca

SEQ ID NO: 2459810 - DNA, 25 bp, Homo sapien
gccatccttacataaacaatctcaa

SEQ ID NO: 2459811 - DNA, 25 bp, Homo sapien
tctaaagcaacgatgacagccatcc

SEQ ID NO: 2459812 - DNA, 25 bp, Homo sapien
ggtacaggcgtcacatccatcagtt

SEQ ID NO: 2459813 - DNA, 25 bp, Homo sapien
tgttgattggtacaggcgtcacatc

SEQ ID NO: 2459814 - DNA, 25 bp, Homo sapien
gttgaagctgttgattggtacaggc

SEQ ID NO: 2459815 - DNA, 25 bp, Homo sapien
ggcctaaagatgtatagatgtggaa

SEQ ID NO: 2459816 - DNA, 25 bp, Homo sapien
taggagtgctcaccaggacactcac

SEQ ID NO: 2459817 - DNA, 25 bp, Homo sapien
ccactatcccatcccagctagcaag

SEQ ID NO: 2459818 - DNA, 25 bp, Homo sapien
ctctaggagtgctcaccaggacact

SEQ ID NO: 2459819 - DNA, 25 bp, Homo sapien
tatcccatcccagctagcaagccct

SEQ ID NO: 2459820 - DNA, 25 bp, Homo sapien
catgctgcctgctgcaggagagtct

SEQ ID NO: 2459821 - DNA, 25 bp, Homo sapien
tcatagccaagccatgctgcctgct

SEQ ID NO: 2459822 - DNA, 25 bp, Homo sapien
gctgcctgctgcaggagagtctcac

SEQ ID NO: 2459823 - DNA, 25 bp, Homo sapien
ctcatagccaagccatgctgcctgc

SEQ ID NO: 2459824 - DNA, 25 bp, Homo sapien
gcctatcgacaataattctccttgc

SEQ ID NO: 2459825 - DNA, 25 bp, Homo sapien
catgcctatcgacaataattctcct

SEQ ID NO: 2459826 - DNA, 25 bp, Homo sapien
agcatgcctatcgacaataattctc

SEQ ID NO: 2459827 - DNA, 25 bp, Homo sapien
tgcctatcgacaataattctccttg

SEQ ID NO: 2459828 - DNA, 25 bp, Homo sapien
gggaagctggtagcaactcttgcaa

SEQ ID NO: 2459829 - DNA, 25 bp, Homo sapien
agatcatagttggaactgggttcaa

SEQ ID NO: 2459830 - DNA, 25 bp, Homo sapien
ctgggcgagattggttggtttcctg

SEQ ID NO: 2459831 - DNA, 25 bp, Homo sapien
tggaactgggttcaagttgctttct

SEQ ID NO: 2459832 - DNA, 25 bp, Homo sapien
gtttccaattttatcaccatcaagg

SEQ ID NO: 2459833 - DNA, 25 bp, Homo sapien
gaagacttcccctctaagacaggga

SEQ ID NO: 2459834 - DNA, 25 bp, Homo sapien
ttccttcctgggaggtggaatatca

SEQ ID NO: 2459835 - DNA, 25 bp, Homo sapien
ttcctgtaagacaaacctgcatggg

SEQ ID NO: 2459836 - DNA, 25 bp, Homo sapien
ggtatcttgccatcagcattctcaa

SEQ ID NO: 2459837 - DNA, 25 bp, Homo sapien
tgccatcagcattctcaacgtagca

SEQ ID NO: 2459838 - DNA, 25 bp, Homo sapien
aaacaagtgccaagaggtatcttgc

SEQ ID NO: 2459839 - DNA, 25 bp, Homo sapien
caagtgccaagaggtatcttgccat

SEQ ID NO: 2459840 - DNA, 25 bp, Homo sapien
ttccctgttagcaggaacccctgcc

SEQ ID NO: 2459841 - DNA, 25 bp, Homo sapien
cctgttagcaggaacccctgcctca

SEQ ID NO: 2459842 - DNA, 25 bp, Homo sapien
ccctgttagcaggaacccctgcctc

SEQ ID NO: 2459843 - DNA, 25 bp, Homo sapien
tccctgttagcaggaacccctgcct

SEQ ID NO: 2459844 - DNA, 25 bp, Homo sapien
tggctgcttgcattgttggataaaa

SEQ ID NO: 2459845 - DNA, 25 bp, Homo sapien
tgtgcacagcatgtctgtcttaatg

SEQ ID NO: 2459846 - DNA, 25 bp, Homo sapien
tatgcagcttgagtgagtcggcttt

SEQ ID NO: 2459847 - DNA, 25 bp, Homo sapien
cagcctcaacaatggtatgcagctt

SEQ ID NO: 2459848 - DNA, 25 bp, Homo sapien
tctgcccttttcttgctgagtttct

SEQ ID NO: 2459849 - DNA, 25 bp, Homo sapien
tcttcgttgtcactgggtttaagaa

SEQ ID NO: 2459850 - DNA, 25 bp, Homo sapien
aagaaattcttccaaccagcttctg

SEQ ID NO: 2459851 - DNA, 25 bp, Homo sapien
ctttgacctctgcccttttcttgct

SEQ ID NO: 2459852 - DNA, 25 bp, Homo sapien
tatcacaatcccaggcagtgacctc

SEQ ID NO: 2459853 - DNA, 25 bp, Homo sapien
ctgttctctaaggtgcatcaaatgg

SEQ ID NO: 2459854 - DNA, 25 bp, Homo sapien
ctgccttgcagactaggtttgttct

SEQ ID NO: 2459855 - DNA, 25 bp, Homo sapien
caaatggtgtttcttaggatgtagc

SEQ ID NO: 2459856 - DNA, 25 bp, Homo sapien
tccatagctacctggtcggcagctg

SEQ ID NO: 2459857 - DNA, 25 bp, Homo sapien
ttgctgtcacttgagactttgtgtt

SEQ ID NO: 2459858 - DNA, 25 bp, Homo sapien
tggcaacttctctgcagtagtctct

SEQ ID NO: 2459859 - DNA, 25 bp, Homo sapien
agtagtctctgtctggttgctgtca

SEQ ID NO: 2459860 - DNA, 25 bp, Homo sapien
tgtttgtttccaggactatgcttgc

SEQ ID NO: 2459861 - DNA, 25 bp, Homo sapien
ctttaaaggaattgtgctgtttgtt

SEQ ID NO: 2459862 - DNA, 25 bp, Homo sapien
ctgtttgtttccaggactatgcttg

SEQ ID NO: 2459863 - DNA, 25 bp, Homo sapien
tctgagtcagctgtgctgaatttgt

SEQ ID NO: 2459864 - DNA, 25 bp, Homo sapien
ggctggcaatatcctcctccagaag

SEQ ID NO: 2459865 - DNA, 25 bp, Homo sapien
gaatttgtatggcttggcgtccttg

SEQ ID NO: 2459866 - DNA, 25 bp, Homo sapien
gctggcaatatcctcctccagaaga

SEQ ID NO: 2459867 - DNA, 25 bp, Homo sapien
aactgtaactacaggtaaagttgct

SEQ ID NO: 2459868 - DNA, 25 bp, Homo sapien
actgtaactacaggtaaagttgcta

SEQ ID NO: 2459869 - DNA, 25 bp, Homo sapien
ctgtaactacaggtaaagttgctaa

SEQ ID NO: 2459870 - DNA, 25 bp, Homo sapien
gcaatgcccgttgctcccaactgag

SEQ ID NO: 2459871 - DNA, 25 bp, Homo sapien
atgcccgttgctcccaactgagctg

SEQ ID NO: 2459872 - DNA, 25 bp, Homo sapien
ctgcaatgcccgttgctcccaactg

SEQ ID NO: 2459873 - DNA, 25 bp, Homo sapien
aatgcccgttgctcccaactgagct

SEQ ID NO: 2459874 - DNA, 25 bp, Homo sapien
cctgctgaggtggtgactctcttta

SEQ ID NO: 2459875 - DNA, 25 bp, Homo sapien
cagttcagtagtaacacacttgagt

SEQ ID NO: 2459876 - DNA, 25 bp, Homo sapien
gccatgcaacctgctgaggtggtga

SEQ ID NO: 2459877 - DNA, 25 bp, Homo sapien
cacttgagtcggtcagccatgcaac

SEQ ID NO: 2459878 - DNA, 25 bp, Homo sapien
gaagtttgccatcacttgatttggc

SEQ ID NO: 2459879 - DNA, 25 bp, Homo sapien
ttggtgtaagtagagattatgtcca

SEQ ID NO: 2459880 - DNA, 25 bp, Homo sapien
tccatctttggtgtaagtagagatt

SEQ ID NO: 2459881 - DNA, 25 bp, Homo sapien
ttggtttcagaagtttgccatcact

SEQ ID NO: 2459882 - DNA, 25 bp, Homo sapien
ctggagtccgtttgagagcataagc

SEQ ID NO: 2459883 - DNA, 25 bp, Homo sapien
caggctctttcatgggaatgggatc

SEQ ID NO: 2459884 - DNA, 25 bp, Homo sapien
ttcatgcaagtcaccaatgtgcccc

SEQ ID NO: 2459885 - DNA, 25 bp, Homo sapien
ccaaaagttacagcatgaccatcac

SEQ ID NO: 2459886 - DNA, 25 bp, Homo sapien
tggccaacacttttcattatgaagc

SEQ ID NO: 2459887 - DNA, 25 bp, Homo sapien
ggtttggacacatttgcatcagttt

SEQ ID NO: 2459888 - DNA, 25 bp, Homo sapien
tgggtttggacacatttgcatcagt

SEQ ID NO: 2459889 - DNA, 25 bp, Homo sapien
ctggccaacacttttcattatgaag

SEQ ID NO: 2459890 - DNA, 25 bp, Homo sapien
ttatcacttctgataataatcttac

SEQ ID NO: 2459891 - DNA, 25 bp, Homo sapien
gctttgcttgacaggcacggttgga

SEQ ID NO: 2459892 - DNA, 25 bp, Homo sapien
catgggcaccacataaggcagtcta

SEQ ID NO: 2459893 - DNA, 25 bp, Homo sapien
gaggttggcccacttgctgaatgat

SEQ ID NO: 2459894 - DNA, 25 bp, Homo sapien
gaaacgctgtactgctagcttccag

SEQ ID NO: 2459895 - DNA, 25 bp, Homo sapien
actgaccccaaaacattagggatca

SEQ ID NO: 2459896 - DNA, 25 bp, Homo sapien
ctggtaatatagagttaatatagag

SEQ ID NO: 2459897 - DNA, 25 bp, Homo sapien
ttagggatcatagttcctttgccat

SEQ ID NO: 2459898 - DNA, 25 bp, Homo sapien
gctgttgtattatcatccagtccat

SEQ ID NO: 2459899 - DNA, 25 bp, Homo sapien
ggtactacccaggatgatggatcag

SEQ ID NO: 2459900 - DNA, 25 bp, Homo sapien
ctatagatagcacagccatttctta

SEQ ID NO: 2459901 - DNA, 25 bp, Homo sapien
gatggatcagtgctaataaattcag

SEQ ID NO: 2459902 - DNA, 25 bp, Homo sapien
ttcttggcctgggtactacccagga

SEQ ID NO: 2459903 - DNA, 25 bp, Homo sapien
gagcggtagagatcctggcataatg

SEQ ID NO: 2459904 - DNA, 25 bp, Homo sapien
ggcataatgctcatggaactcagag

SEQ ID NO: 2459905 - DNA, 25 bp, Homo sapien
gagaatatgtctgcaacagcctggg

SEQ ID NO: 2459906 - DNA, 25 bp, Homo sapien
gacaactctactggcttatttgaga

SEQ ID NO: 2459907 - DNA, 25 bp, Homo sapien
gggaggcacagaacacgagagttgt

SEQ ID NO: 2459908 - DNA, 25 bp, Homo sapien
gcacagaacacgagagttgtatcgc

SEQ ID NO: 2459909 - DNA, 25 bp, Homo sapien
ggcacagaacacgagagttgtatcg

SEQ ID NO: 2459910 - DNA, 25 bp, Homo sapien
gaggcacagaacacgagagttgtat

SEQ ID NO: 2459911 - DNA, 25 bp, Homo sapien
caaatggcaccctggttgtttcctg

SEQ ID NO: 2459912 - DNA, 25 bp, Homo sapien
ggactgatggccatcctccgtggta

SEQ ID NO: 2459913 - DNA, 25 bp, Homo sapien
tagcaactgccttggcaaatggcac

SEQ ID NO: 2459914 - DNA, 25 bp, Homo sapien
cctgttctgaatatgaggataggtg

SEQ ID NO: 2459915 - DNA, 25 bp, Homo sapien
ctgcacagcggaagagaggtggaat

SEQ ID NO: 2459916 - DNA, 25 bp, Homo sapien
gattgacccagggtagctgcaggta

SEQ ID NO: 2459917 - DNA, 25 bp, Homo sapien
tgagcatcatagatgttgcaaggcc

SEQ ID NO: 2459918 - DNA, 25 bp, Homo sapien
ggtaggcctgtccaagccaagtgtt

SEQ ID NO: 2459919 - DNA, 25 bp, Homo sapien
gactgctgaggtagccagaacatgt

SEQ ID NO: 2459920 - DNA, 25 bp, Homo sapien
tccactatctcaggtatatttagtt

SEQ ID NO: 2459921 - DNA, 25 bp, Homo sapien
agcaaaatcttccactatctcaggt

SEQ ID NO: 2459922 - DNA, 25 bp, Homo sapien
tcttccactatctcaggtatattta

SEQ ID NO: 2459923 - DNA, 25 bp, Homo sapien
tatctcaggtatatttagtttgaac

SEQ ID NO: 2459924 - DNA, 25 bp, Homo sapien
ctgtcttattttcaggatgcctgag

SEQ ID NO: 2459925 - DNA, 25 bp, Homo sapien
cacttgaatccgaagtgctgaaaga

SEQ ID NO: 2459926 - DNA, 25 bp, Homo sapien
tccttgctgccaacattgttctgtc

SEQ ID NO: 2459927 - DNA, 25 bp, Homo sapien
catttgtataccaggatgcactatg

SEQ ID NO: 2459928 - DNA, 25 bp, Homo sapien
tggccttggcaatccaacttatttt

SEQ ID NO: 2459929 - DNA, 25 bp, Homo sapien
cacacaccaattggccttggcaatc

SEQ ID NO: 2459930 - DNA, 25 bp, Homo sapien
agtcccatacgggtcagcttcacca

SEQ ID NO: 2459931 - DNA, 25 bp, Homo sapien
cttaatggcagttcaaaacaagtcc

SEQ ID NO: 2459932 - DNA, 25 bp, Homo sapien
caccagagacatcataagcaaaaga

SEQ ID NO: 2459933 - DNA, 25 bp, Homo sapien
gatttctgtgcagtttatcagccct

SEQ ID NO: 2459934 - DNA, 25 bp, Homo sapien
aaagcgatcttctaccaaccgagcc

SEQ ID NO: 2459935 - DNA, 25 bp, Homo sapien
ttgcctacaaatccgaccgtccagt

SEQ ID NO: 2459936 - DNA, 25 bp, Homo sapien
agcccgggagctcggtgtcagaatt

SEQ ID NO: 2459937 - DNA, 25 bp, Homo sapien
tggtcctcgtagagtaggaggattc

SEQ ID NO: 2459938 - DNA, 25 bp, Homo sapien
tcttgccagcttaaatcctgctatg

SEQ ID NO: 2459939 - DNA, 25 bp, Homo sapien
attgaggcccagccagcagccaaca

SEQ ID NO: 2459940 - DNA, 25 bp, Homo sapien
gaaagtcctggtgatcctggggttc

SEQ ID NO: 2459941 - DNA, 25 bp, Homo sapien
aggcgtaaacgcacaaaagcccttg

SEQ ID NO: 2459942 - DNA, 25 bp, Homo sapien
caggtacgtcactttgccctctgtt

SEQ ID NO: 2459943 - DNA, 25 bp, Homo sapien
gaataaatttgaagaattgagggcc

SEQ ID NO: 2459944 - DNA, 25 bp, Homo sapien
gaattgagggccatccacattcagg

SEQ ID NO: 2459945 - DNA, 25 bp, Homo sapien
gccatccacattcaggtacgtcact

SEQ ID NO: 2459946 - DNA, 25 bp, Homo sapien
tcatgatacatctctggtcgttggg

SEQ ID NO: 2459947 - DNA, 25 bp, Homo sapien
catctctggtcgttgggttcctttt

SEQ ID NO: 2459948 - DNA, 25 bp, Homo sapien
gcttcatgatacatctctggtcgtt

SEQ ID NO: 2459949 - DNA, 25 bp, Homo sapien
gatacatctctggtcgttgggttcc

SEQ ID NO: 2459950 - DNA, 25 bp, Homo sapien
ctgtgcatatgtgggtgcgtgtgtg

SEQ ID NO: 2459951 - DNA, 25 bp, Homo sapien
gtgtgtgttcattggtctccttctc

SEQ ID NO: 2459952 - DNA, 25 bp, Homo sapien
atatgtgggtgcgtgtgtgttcatt

SEQ ID NO: 2459953 - DNA, 25 bp, Homo sapien
gtgttcattggtctccttctcttcc

SEQ ID NO: 2459954 - DNA, 25 bp, Homo sapien
ttgatcatagccaagtattcaggtt

SEQ ID NO: 2459955 - DNA, 25 bp, Homo sapien
gatcatagccaagtattcaggttga

SEQ ID NO: 2459956 - DNA, 25 bp, Homo sapien
tagccaagtattcaggttgaagatt

SEQ ID NO: 2459957 - DNA, 25 bp, Homo sapien
catagccaagtattcaggttgaaga

SEQ ID NO: 2459958 - DNA, 25 bp, Homo sapien
ttcagtgcctaaatggatttcgaac

SEQ ID NO: 2459959 - DNA, 25 bp, Homo sapien
agcaactctgcaagcccttcagtgc

SEQ ID NO: 2459960 - DNA, 25 bp, Homo sapien
agccgcgagtctctctgacagcaca

SEQ ID NO: 2459961 - DNA, 25 bp, Homo sapien
tagctcagccgcgagtctctctgac

SEQ ID NO: 2459962 - DNA, 25 bp, Homo sapien
tgctgcgaaggctctcctaattccc

SEQ ID NO: 2459963 - DNA, 25 bp, Homo sapien
ctagggcgcggtcgtttgcatccat

SEQ ID NO: 2459964 - DNA, 25 bp, Homo sapien
cttcgctagagaagcctagggcgcg

SEQ ID NO: 2459965 - DNA, 25 bp, Homo sapien
gcgccttgcctctggggcttcgcta

SEQ ID NO: 2459966 - DNA, 25 bp, Homo sapien
tggtgcagaggttcactcccagtac

SEQ ID NO: 2459967 - DNA, 25 bp, Homo sapien
cttcaggagtttccggccagcctag

SEQ ID NO: 2459968 - DNA, 25 bp, Homo sapien
cttccagaactaaaggcaaagacag

SEQ ID NO: 2459969 - DNA, 25 bp, Homo sapien
ggcaacatccaagaccctttttcta

SEQ ID NO: 2459970 - DNA, 25 bp, Homo sapien
tatagtcaaatggatcatgaggaac

SEQ ID NO: 2459971 - DNA, 25 bp, Homo sapien
ggagttacagataccagccagtagc

SEQ ID NO: 2459972 - DNA, 25 bp, Homo sapien
aaatggatcatgaggaacgcaggga

SEQ ID NO: 2459973 - DNA, 25 bp, Homo sapien
cagccagtagctaaacaaactttct

SEQ ID NO: 2459974 - DNA, 25 bp, Homo sapien
gatcacaaggttgatgactgacacc

SEQ ID NO: 2459975 - DNA, 25 bp, Homo sapien
tgatcacaaggttgatgactgacac

SEQ ID NO: 2459976 - DNA, 25 bp, Homo sapien
atcacaaggttgatgactgacacca

SEQ ID NO: 2459977 - DNA, 25 bp, Homo sapien
tgaggtaggatgatgaccggagcca

SEQ ID NO: 2459978 - DNA, 25 bp, Homo sapien
ctgaggtaggatgatgaccggagcc

SEQ ID NO: 2459979 - DNA, 25 bp, Homo sapien
gaggtaggatgatgaccggagccag

SEQ ID NO: 2459980 - DNA, 25 bp, Homo sapien
aggtaggatgatgaccggagccagg

SEQ ID NO: 2459981 - DNA, 25 bp, Homo sapien
cacctagggagacaggcattgtacc

SEQ ID NO: 2459982 - DNA, 25 bp, Homo sapien
taagattatagtgccagccctgggc

SEQ ID NO: 2459983 - DNA, 25 bp, Homo sapien
gacgttaagggtgaaagccatctcc

SEQ ID NO: 2459984 - DNA, 25 bp, Homo sapien
taggcctggtctctgatctggtcgc

SEQ ID NO: 2459985 - DNA, 25 bp, Homo sapien
aaacagggcagaacgcaactcagct

SEQ ID NO: 2459986 - DNA, 25 bp, Homo sapien
taagtccatgagcttccgtgagggt

SEQ ID NO: 2459987 - DNA, 25 bp, Homo sapien
tcacgtgtggtacttggcatgcagc

SEQ ID NO: 2459988 - DNA, 25 bp, Homo sapien
ttttgctgcggaagtcacctcgtgg

SEQ ID NO: 2459989 - DNA, 25 bp, Homo sapien
cagaggacctcgatctaaattgggc

SEQ ID NO: 2459990 - DNA, 25 bp, Homo sapien
gccagaggacctcgatctaaattgg

SEQ ID NO: 2459991 - DNA, 25 bp, Homo sapien
gatgccagaggacctcgatctaaat

SEQ ID NO: 2459992 - DNA, 25 bp, Homo sapien
aggacctcgatctaaattgggcacc

SEQ ID NO: 2459993 - DNA, 25 bp, Homo sapien
cttgggaagctgaggagagagaatg

SEQ ID NO: 2459994 - DNA, 25 bp, Homo sapien
cacaaggtcaggatatggagacgat

SEQ ID NO: 2459995 - DNA, 25 bp, Homo sapien
aaggtcaggatatggagacgatcct

SEQ ID NO: 2459996 - DNA, 25 bp, Homo sapien
ggaagctgaggagagagaatggcgt

SEQ ID NO: 2459997 - DNA, 25 bp, Homo sapien
catagaacctccatgtgtggaggga

SEQ ID NO: 2459998 - DNA, 25 bp, Homo sapien
aagtacattattttcagctagcatt

SEQ ID NO: 2459999 - DNA, 25 bp, Homo sapien
gagggatttcctaatgagtctattg

SEQ ID NO: 2460000 - DNA, 25 bp, Homo sapien
tgtatgtacaatagcacttaatgac

SEQ ID NO: 2460001 - DNA, 25 bp, Homo sapien
gcagcagttagagggttgtgctctt

SEQ ID NO: 2460002 - DNA, 25 bp, Homo sapien
cccacgtctgatagggtgggacatg

SEQ ID NO: 2460003 - DNA, 25 bp, Homo sapien
tagatgccagacttcaacaaacagc

SEQ ID NO: 2460004 - DNA, 25 bp, Homo sapien
cataaggaattacgacaacagcttg

SEQ ID NO: 2460005 - DNA, 25 bp, Homo sapien
cagaacacggtcttgggtggttaca

SEQ ID NO: 2460006 - DNA, 25 bp, Homo sapien
tatcagagttgtttgacctaaggtc

SEQ ID NO: 2460007 - DNA, 25 bp, Homo sapien
ttagtttcctgctggctaccttgcc

SEQ ID NO: 2460008 - DNA, 25 bp, Homo sapien
tgcagaagtggcctaaaaatgaaga

SEQ ID NO: 2460009 - DNA, 25 bp, Homo sapien
caaaacagcgtacgttagccagact

SEQ ID NO: 2460010 - DNA, 25 bp, Homo sapien
gaagagaatcgtgggaccctgcgac

SEQ ID NO: 2460011 - DNA, 25 bp, Homo sapien
aatatggcgccactaacgagacact

SEQ ID NO: 2460012 - DNA, 25 bp, Homo sapien
tagacttaacaacacacagagactg

SEQ ID NO: 2460013 - DNA, 25 bp, Homo sapien
cagatgtcaagaccataaaatgaga

SEQ ID NO: 2460014 - DNA, 25 bp, Homo sapien
cgggcagacgactagcactggactc

SEQ ID NO: 2460015 - DNA, 25 bp, Homo sapien
ctcataccatataggaaaatcaatg

SEQ ID NO: 2460016 - DNA, 25 bp, Homo sapien
gaagaacttgatacccacgggcaga

SEQ ID NO: 2460017 - DNA, 25 bp, Homo sapien
tatgtttacaacgtgaactgtgagc

SEQ ID NO: 2460018 - DNA, 25 bp, Homo sapien
tccgaaattctggtgcagcactcct

SEQ ID NO: 2460019 - DNA, 25 bp, Homo sapien
ccttggctctattagctgtggctga

SEQ ID NO: 2460020 - DNA, 25 bp, Homo sapien
ctgaaatgggcccaggtatggcgca

SEQ ID NO: 2460021 - DNA, 25 bp, Homo sapien
cataatgaaaaagagagctggtgac

SEQ ID NO: 2460022 - DNA, 25 bp, Homo sapien
gcacatgcaagtccagccaacagat

SEQ ID NO: 2460023 - DNA, 25 bp, Homo sapien
aaaattacgttgacccatgctactg

SEQ ID NO: 2460024 - DNA, 25 bp, Homo sapien
taggtcatcaccaagcatagctttg

SEQ ID NO: 2460025 - DNA, 25 bp, Homo sapien
taaaggtacgcacttgggcttcctc

SEQ ID NO: 2460026 - DNA, 25 bp, Homo sapien
ccaggccaggagatagtaggattta

SEQ ID NO: 2460027 - DNA, 25 bp, Homo sapien
tagcaggaatgttgctggcaagaca

SEQ ID NO: 2460028 - DNA, 25 bp, Homo sapien
tggcaagacacttctgagcatcggg

SEQ ID NO: 2460029 - DNA, 25 bp, Homo sapien
tgtagcaaaggcattaaagaaggac

SEQ ID NO: 2460030 - DNA, 25 bp, Homo sapien
gaagagcctgaatccttgtgttgta

SEQ ID NO: 2460031 - DNA, 25 bp, Homo sapien
ttttgactgaagctcctgttgaaca

SEQ ID NO: 2460032 - DNA, 25 bp, Homo sapien
caggaacatattttcacggtctgct

SEQ ID NO: 2460033 - DNA, 25 bp, Homo sapien
ggctccttgtccgactcccttgatg

SEQ ID NO: 2460034 - DNA, 25 bp, Homo sapien
ccttgtccgactcccttgatgttca

SEQ ID NO: 2460035 - DNA, 25 bp, Homo sapien
ccggctccttgtccgactcccttga

SEQ ID NO: 2460036 - DNA, 25 bp, Homo sapien
tccttgtccgactcccttgatgttc

SEQ ID NO: 2460037 - DNA, 25 bp, Homo sapien
caactgcggcaacagtgaggacagt

SEQ ID NO: 2460038 - DNA, 25 bp, Homo sapien
ccagaagtgtgcgaattctgtccag

SEQ ID NO: 2460039 - DNA, 25 bp, Homo sapien
aggggagcccggattgcctcaggca

SEQ ID NO: 2460040 - DNA, 25 bp, Homo sapien
gtgtgcgaattctgtccaggtctgg

SEQ ID NO: 2460041 - DNA, 25 bp, Homo sapien
caaatacatgggtcactcagttatg

SEQ ID NO: 2460042 - DNA, 25 bp, Homo sapien
tcagttatgtttagccaacagccta

SEQ ID NO: 2460043 - DNA, 25 bp, Homo sapien
acagactgggttagaggccactctt

SEQ ID NO: 2460044 - DNA, 25 bp, Homo sapien
tatgtttagccaacagcctacccaa

SEQ ID NO: 2460045 - DNA, 25 bp, Homo sapien
tggagccatgttctcaggactggtc

SEQ ID NO: 2460046 - DNA, 25 bp, Homo sapien
gttctcaggactggtcacactgtct

SEQ ID NO: 2460047 - DNA, 25 bp, Homo sapien
tctccattctccagcagcccttgga

SEQ ID NO: 2460048 - DNA, 25 bp, Homo sapien
gccctttcctggagccatgttctca

SEQ ID NO: 2460049 - DNA, 25 bp, Homo sapien
cagctgtcgcaacagagcagtcaca

SEQ ID NO: 2460050 - DNA, 25 bp, Homo sapien
tctgtgagacactgaagggcctcac

SEQ ID NO: 2460051 - DNA, 25 bp, Homo sapien
tctggtctgggtttggcctgtagct

SEQ ID NO: 2460052 - DNA, 25 bp, Homo sapien
gaagtgtagactgaggcctcctctg

SEQ ID NO: 2460053 - DNA, 25 bp, Homo sapien
gtggccgtcgtgagcgcatacacag

SEQ ID NO: 2460054 - DNA, 25 bp, Homo sapien
ccaccaggctagcagtggagatgaa

SEQ ID NO: 2460055 - DNA, 25 bp, Homo sapien
gcagggcaaccagcaaggctaggat

SEQ ID NO: 2460056 - DNA, 25 bp, Homo sapien
gctaggattgtctctaggcgtggcc

SEQ ID NO: 2460057 - DNA, 25 bp, Homo sapien
atagaagtcggagaagaggccatga

SEQ ID NO: 2460058 - DNA, 25 bp, Homo sapien
cacacagatagaagtcggagaagag

SEQ ID NO: 2460059 - DNA, 25 bp, Homo sapien
acacacacagatagaagtcggagaa

SEQ ID NO: 2460060 - DNA, 25 bp, Homo sapien
acagatagaagtcggagaagaggcc

SEQ ID NO: 2460061 - DNA, 25 bp, Homo sapien
gtgtcacactggtacaaccccagcg

SEQ ID NO: 2460062 - DNA, 25 bp, Homo sapien
agcagctctgtgtcacactggtaca

SEQ ID NO: 2460063 - DNA, 25 bp, Homo sapien
gctctgtgtcacactggtacaaccc

SEQ ID NO: 2460064 - DNA, 25 bp, Homo sapien
gtctgagccagcgtctgcacacggg

SEQ ID NO: 2460065 - DNA, 25 bp, Homo sapien
cttgagaaaggtcttggaggccttc

SEQ ID NO: 2460066 - DNA, 25 bp, Homo sapien
cttcttgagaaaggtcttggaggcc

SEQ ID NO: 2460067 - DNA, 25 bp, Homo sapien
ctcaagcagtgtgtagcaagaattc

SEQ ID NO: 2460068 - DNA, 25 bp, Homo sapien
ctctccaggaatgtgctgtcaatac

SEQ ID NO: 2460069 - DNA, 25 bp, Homo sapien
atctagacaggggtagtggtcacca

SEQ ID NO: 2460070 - DNA, 25 bp, Homo sapien
gcaggtcccggcccacagccaccag

SEQ ID NO: 2460071 - DNA, 25 bp, Homo sapien
caggccctccaagtcatctagacag

SEQ ID NO: 2460072 - DNA, 25 bp, Homo sapien
agctctagctgtctcagctcttcca

SEQ ID NO: 2460073 - DNA, 25 bp, Homo sapien
cacatcagcaatccaagcttgtgcc

SEQ ID NO: 2460074 - DNA, 25 bp, Homo sapien
ggatgttttctgtctcacgaattat

SEQ ID NO: 2460075 - DNA, 25 bp, Homo sapien
caatccaagcttgtgccttagtcag

SEQ ID NO: 2460076 - DNA, 25 bp, Homo sapien
cacgaattatggcttccaatgtggc

SEQ ID NO: 2460077 - DNA, 25 bp, Homo sapien
tgaggaactctctaacattgcaggg

SEQ ID NO: 2460078 - DNA, 25 bp, Homo sapien
gagtttagtagatgcccaactggga

SEQ ID NO: 2460079 - DNA, 25 bp, Homo sapien
catagaaatacttagggtcacccca

SEQ ID NO: 2460080 - DNA, 25 bp, Homo sapien
gatatgtcatgccaatcctttagag

SEQ ID NO: 2460081 - DNA, 25 bp, Homo sapien
tcttcccagcgctctgcaatggtca

SEQ ID NO: 2460082 - DNA, 25 bp, Homo sapien
tcagtagttcttgcagctcagcccg

SEQ ID NO: 2460083 - DNA, 25 bp, Homo sapien
ggaggctatcttggcacccataacc

SEQ ID NO: 2460084 - DNA, 25 bp, Homo sapien
tcagcccgggccttgtccacagaag

SEQ ID NO: 2460085 - DNA, 25 bp, Homo sapien
gatgggcttcaggcacctctacacc

SEQ ID NO: 2460086 - DNA, 25 bp, Homo sapien
tcatctagccattgcgcctgctcca

SEQ ID NO: 2460087 - DNA, 25 bp, Homo sapien
tgcatgatgaccagagagcccctgt

SEQ ID NO: 2460088 - DNA, 25 bp, Homo sapien
cgcaatagccctggactagagggca

SEQ ID NO: 2460089 - DNA, 25 bp, Homo sapien
tagtaagctttctaagactctggtg

SEQ ID NO: 2460090 - DNA, 25 bp, Homo sapien
tctgataataacaaaggccctctgt

SEQ ID NO: 2460091 - DNA, 25 bp, Homo sapien
tggtatgggaacacatatctccgcc

SEQ ID NO: 2460092 - DNA, 25 bp, Homo sapien
caagagccagtgtcttatgtaggcc

SEQ ID NO: 2460093 - DNA, 25 bp, Homo sapien
cccaatctgatgcatggcacagggc

SEQ ID NO: 2460094 - DNA, 25 bp, Homo sapien
tccccaatctgatgcatggcacagg

SEQ ID NO: 2460095 - DNA, 25 bp, Homo sapien
ccccaatctgatgcatggcacaggg

SEQ ID NO: 2460096 - DNA, 25 bp, Homo sapien
ccaatctgatgcatggcacagggca

SEQ ID NO: 2460097 - DNA, 25 bp, Homo sapien
ctgctcaagaaggacccggagttca

SEQ ID NO: 2460098 - DNA, 25 bp, Homo sapien
ggacccggagttcagtcaaggtcag

SEQ ID NO: 2460099 - DNA, 25 bp, Homo sapien
aagaaggacccggagttcagtcaag

SEQ ID NO: 2460100 - DNA, 25 bp, Homo sapien
gctcaagaaggacccggagttcagt

SEQ ID NO: 2460101 - DNA, 25 bp, Homo sapien
tcatatttcagtaatacccacaaag

SEQ ID NO: 2460102 - DNA, 25 bp, Homo sapien
ttcatatttcagtaatacccacaaa

SEQ ID NO: 2460103 - DNA, 25 bp, Homo sapien
ggaacacctcgtaatgtcacatttc

SEQ ID NO: 2460104 - DNA, 25 bp, Homo sapien
ccagaaggaacacctcgtaatgtca

SEQ ID NO: 2460105 - DNA, 25 bp, Homo sapien
catcgtagcagttgtaaagtagcaa

SEQ ID NO: 2460106 - DNA, 25 bp, Homo sapien
tattctgacccttaaacctaatgac

SEQ ID NO: 2460107 - DNA, 25 bp, Homo sapien
tgtatacccttgctttagagtcttg

SEQ ID NO: 2460108 - DNA, 25 bp, Homo sapien
cacatgtatgatagtgggcctgtaa

SEQ ID NO: 2460109 - DNA, 25 bp, Homo sapien
cattctcttaccagtcggttcctca

SEQ ID NO: 2460110 - DNA, 25 bp, Homo sapien
gtcacagcatccaggtttatgtaag

SEQ ID NO: 2460111 - DNA, 25 bp, Homo sapien
acagtatcacgctgtgcaggtttgc

SEQ ID NO: 2460112 - DNA, 25 bp, Homo sapien
taagtagacggtgcgtatgcagcaa

SEQ ID NO: 2460113 - DNA, 25 bp, Homo sapien
gattgtgtgtttatagtctatccat

SEQ ID NO: 2460114 - DNA, 25 bp, Homo sapien
caggattgtgtgtttatagtctatc

SEQ ID NO: 2460115 - DNA, 25 bp, Homo sapien
tgtgtttatagtctatccatttttg

SEQ ID NO: 2460116 - DNA, 25 bp, Homo sapien
gtgtttatagtctatccatttttgt

SEQ ID NO: 2460117 - DNA, 25 bp, Homo sapien
ttaggaaacctcctctcacgagcct

SEQ ID NO: 2460118 - DNA, 25 bp, Homo sapien
agcaatacaagcctccacctcactc

SEQ ID NO: 2460119 - DNA, 25 bp, Homo sapien
ttcagtcgctgaagcagctcactat

SEQ ID NO: 2460120 - DNA, 25 bp, Homo sapien
tccagtgcccttagctcttcaaagc

SEQ ID NO: 2460121 - DNA, 25 bp, Homo sapien
caggtaggcagtgttagcagaaaag

SEQ ID NO: 2460122 - DNA, 25 bp, Homo sapien
ctggagagtgtaagttgcaacaggt

SEQ ID NO: 2460123 - DNA, 25 bp, Homo sapien
tgtaagttgcaacaggtaggcagtg

SEQ ID NO: 2460124 - DNA, 25 bp, Homo sapien
gttgcaacaggtaggcagtgttagc

SEQ ID NO: 2460125 - DNA, 25 bp, Homo sapien
gttccttccatttcctgtcactcac

SEQ ID NO: 2460126 - DNA, 25 bp, Homo sapien
agggttccttccatttcctgtcact

SEQ ID NO: 2460127 - DNA, 25 bp, Homo sapien
caagggttccttccatttcctgtca

SEQ ID NO: 2460128 - DNA, 25 bp, Homo sapien
ggttccttccatttcctgtcactca

SEQ ID NO: 2460129 - DNA, 25 bp, Homo sapien
agactcagcccgaatcttcagttta

SEQ ID NO: 2460130 - DNA, 25 bp, Homo sapien
gaatcttcagtttatgcagcatggt

SEQ ID NO: 2460131 - DNA, 25 bp, Homo sapien
aagactcagcccgaatcttcagttt

SEQ ID NO: 2460132 - DNA, 25 bp, Homo sapien
aaaagactcagcccgaatcttcagt

SEQ ID NO: 2460133 - DNA, 25 bp, Homo sapien
tgacaagaagcacgtggtcttgcac

SEQ ID NO: 2460134 - DNA, 25 bp, Homo sapien
gcacgtggtcttgcacttgatgcac

SEQ ID NO: 2460135 - DNA, 25 bp, Homo sapien
gaagcacgtggtcttgcacttgatg

SEQ ID NO: 2460136 - DNA, 25 bp, Homo sapien
aagaagcacgtggtcttgcacttga

SEQ ID NO: 2460137 - DNA, 25 bp, Homo sapien
tgtggactcaaccttgtaaggaaag

SEQ ID NO: 2460138 - DNA, 25 bp, Homo sapien
tgagccctgatgtggactcaacctt

SEQ ID NO: 2460139 - DNA, 25 bp, Homo sapien
tagggttgtggacaccccacctcag

SEQ ID NO: 2460140 - DNA, 25 bp, Homo sapien
taggagtagggttgtggacacccca

SEQ ID NO: 2460141 - DNA, 25 bp, Homo sapien
gattgagatccaacgtctctgggaa

SEQ ID NO: 2460142 - DNA, 25 bp, Homo sapien
tctccttgtgcacagctactgctag

SEQ ID NO: 2460143 - DNA, 25 bp, Homo sapien
tgagctcctcgtgggagaagacaca

SEQ ID NO: 2460144 - DNA, 25 bp, Homo sapien
tttcgtagacgtcgctcctcctgaa

SEQ ID NO: 2460145 - DNA, 25 bp, Homo sapien
tgcaggcccactgcatgctcactca

SEQ ID NO: 2460146 - DNA, 25 bp, Homo sapien
gcaggcccactgcatgctcactcac

SEQ ID NO: 2460147 - DNA, 25 bp, Homo sapien
gcacgaggaaaagtgatgacaaact

SEQ ID NO: 2460148 - DNA, 25 bp, Homo sapien
attgtagccttggttaaaaccactg

SEQ ID NO: 2460149 - DNA, 25 bp, Homo sapien
aaaagtgatgacaaactcccctgca

SEQ ID NO: 2460150 - DNA, 25 bp, Homo sapien
aaaaccactgtggtaagcacgagga

SEQ ID NO: 2460151 - DNA, 25 bp, Homo sapien
acttgaagtcagcaagggaaggcaa

SEQ ID NO: 2460152 - DNA, 25 bp, Homo sapien
gcctaatctccatagcaaaatggat

SEQ ID NO: 2460153 - DNA, 25 bp, Homo sapien
tgctaagcctaatctccatagcaaa

SEQ ID NO: 2460154 - DNA, 25 bp, Homo sapien
gctaacggtactgatctgcaacttg

SEQ ID NO: 2460155 - DNA, 25 bp, Homo sapien
ctgccagggagggtacaccatacca

SEQ ID NO: 2460156 - DNA, 25 bp, Homo sapien
ggagggtacaccataccaggtcttc

SEQ ID NO: 2460157 - DNA, 25 bp, Homo sapien
cacaccatgggacatcaaagtgttg

SEQ ID NO: 2460158 - DNA, 25 bp, Homo sapien
tcatgagagtgacaagctggtgtag

SEQ ID NO: 2460159 - DNA, 25 bp, Homo sapien
tcacgtagacagaagacacgtcaag

SEQ ID NO: 2460160 - DNA, 25 bp, Homo sapien
ctcacgtagacagaagacacgtcaa

SEQ ID NO: 2460161 - DNA, 25 bp, Homo sapien
cacgtagacagaagacacgtcaagt

SEQ ID NO: 2460162 - DNA, 25 bp, Homo sapien
ctatatacatcgttgcatatgaggg

SEQ ID NO: 2460163 - DNA, 25 bp, Homo sapien
tatacatcgttgcatatgagggcag

SEQ ID NO: 2460164 - DNA, 25 bp, Homo sapien
cgttgcatatgagggcagtcttgat

SEQ ID NO: 2460165 - DNA, 25 bp, Homo sapien
catatgagggcagtcttgatatcca

SEQ ID NO: 2460166 - DNA, 25 bp, Homo sapien
tgcagatagttaatagagtaactcc

SEQ ID NO: 2460167 - DNA, 25 bp, Homo sapien
gcagatagttaatagagtaactcca

SEQ ID NO: 2460168 - DNA, 25 bp, Homo sapien
atgcagatagttaatagagtaactc

SEQ ID NO: 2460169 - DNA, 25 bp, Homo sapien
gagatgtctgcattgatgtgacaga

SEQ ID NO: 2460170 - DNA, 25 bp, Homo sapien
gacagagaacagactgatctagcac

SEQ ID NO: 2460171 - DNA, 25 bp, Homo sapien
tctgcattgatgtgacagagaacag

SEQ ID NO: 2460172 - DNA, 25 bp, Homo sapien
gaacagactgatctagcactggcat

SEQ ID NO: 2460173 - DNA, 25 bp, Homo sapien
attcaggttccaaccactggtcgca

SEQ ID NO: 2460174 - DNA, 25 bp, Homo sapien
ggttccaaccactggtcgcatactc

SEQ ID NO: 2460175 - DNA, 25 bp, Homo sapien
tcaggttccaaccactggtcgcata

SEQ ID NO: 2460176 - DNA, 25 bp, Homo sapien
acattcaggttccaaccactggtcg

SEQ ID NO: 2460177 - DNA, 25 bp, Homo sapien
tgagtagggagtaggatacgatgag

SEQ ID NO: 2460178 - DNA, 25 bp, Homo sapien
agtaggatacgatgaggagaggcaa

SEQ ID NO: 2460179 - DNA, 25 bp, Homo sapien
tagggagtaggatacgatgaggaga

SEQ ID NO: 2460180 - DNA, 25 bp, Homo sapien
agagtgagtagggagtaggatacga

SEQ ID NO: 2460181 - DNA, 25 bp, Homo sapien
caactgtgtcttagaacatgctgcc

SEQ ID NO: 2460182 - DNA, 25 bp, Homo sapien
gctccatggaaaataatagcccaga

SEQ ID NO: 2460183 - DNA, 25 bp, Homo sapien
gatgctaaggcctccgtaaaaatgg

SEQ ID NO: 2460184 - DNA, 25 bp, Homo sapien
taactaaaagggcttagtactgcca

SEQ ID NO: 2460185 - DNA, 25 bp, Homo sapien
caacagcaacgaaaaacactaatta

SEQ ID NO: 2460186 - DNA, 25 bp, Homo sapien
agttctcagaatatgctataataac

SEQ ID NO: 2460187 - DNA, 25 bp, Homo sapien
gctataataactaggtgttgaagat

SEQ ID NO: 2460188 - DNA, 25 bp, Homo sapien
gaagtatgagcagaaaaaggttttc

SEQ ID NO: 2460189 - DNA, 25 bp, Homo sapien
tgttaacatgaactaccaaccgtat

SEQ ID NO: 2460190 - DNA, 25 bp, Homo sapien
taacatgaactaccaaccgtattac

SEQ ID NO: 2460191 - DNA, 25 bp, Homo sapien
taatgttaacatgaactaccaaccg

SEQ ID NO: 2460192 - DNA, 25 bp, Homo sapien
ctagttaatgttaacatgaactacc

SEQ ID NO: 2460193 - DNA, 25 bp, Homo sapien
aactgtcacgtcttcctcaatgctg

SEQ ID NO: 2460194 - DNA, 25 bp, Homo sapien
gaatatcagctccatattcaactgt

SEQ ID NO: 2460195 - DNA, 25 bp, Homo sapien
cctcaggagataagttttgtttgct

SEQ ID NO: 2460196 - DNA, 25 bp, Homo sapien
cttctcctcaggagataagttttgt

SEQ ID NO: 2460197 - DNA, 25 bp, Homo sapien
tgaagtagtcggacttgaaggaatc

SEQ ID NO: 2460198 - DNA, 25 bp, Homo sapien
aaaactctgcaaactgtactcctgg

SEQ ID NO: 2460199 - DNA, 25 bp, Homo sapien
gggtagcctgttcaaatccaaaagc

SEQ ID NO: 2460200 - DNA, 25 bp, Homo sapien
ggaatcagccatttcaccaaaactc

SEQ ID NO: 2460201 - DNA, 25 bp, Homo sapien
agcaagacaaagggaataaagatcc

SEQ ID NO: 2460202 - DNA, 25 bp, Homo sapien
gcaagacaaagggaataaagatcca

SEQ ID NO: 2460203 - DNA, 25 bp, Homo sapien
caagacaaagggaataaagatccaa

SEQ ID NO: 2460204 - DNA, 25 bp, Homo sapien
aagcatctgtgacagacagatctta

SEQ ID NO: 2460205 - DNA, 25 bp, Homo sapien
agcatctgtgacagacagatcttac

SEQ ID NO: 2460206 - DNA, 25 bp, Homo sapien
aaagcatctgtgacagacagatctt

SEQ ID NO: 2460207 - DNA, 25 bp, Homo sapien
ttcaggaaggggtggtaacaagcag

SEQ ID NO: 2460208 - DNA, 25 bp, Homo sapien
ggtaacaagcagaagatgtggtaat

SEQ ID NO: 2460209 - DNA, 25 bp, Homo sapien
tggtaacaagcagaagatgtggtaa

SEQ ID NO: 2460210 - DNA, 25 bp, Homo sapien
tttgagagtctggaggaatttgcca

SEQ ID NO: 2460211 - DNA, 25 bp, Homo sapien
tcaatataatcttgacggttcaaag

SEQ ID NO: 2460212 - DNA, 25 bp, Homo sapien
tgtaaacatacaagggacaaaagta

SEQ ID NO: 2460213 - DNA, 25 bp, Homo sapien
ccgtctcttcagataaaagggctca

SEQ ID NO: 2460214 - DNA, 25 bp, Homo sapien
gcactgctgtgattctttcgaagtt

SEQ ID NO: 2460215 - DNA, 25 bp, Homo sapien
tgctgtgattctttcgaagttgcat

SEQ ID NO: 2460216 - DNA, 25 bp, Homo sapien
actgctgtgattctttcgaagttgc

SEQ ID NO: 2460217 - DNA, 25 bp, Homo sapien
ggcactgctgtgattctttcgaagt

SEQ ID NO: 2460218 - DNA, 25 bp, Homo sapien
gctcatccttcaccgtaacagttgg

SEQ ID NO: 2460219 - DNA, 25 bp, Homo sapien
gcaatgttgatgacacgttcccacc

SEQ ID NO: 2460220 - DNA, 25 bp, Homo sapien
gttgtcttagtgcagggctctaggc

SEQ ID NO: 2460221 - DNA, 25 bp, Homo sapien
ctcaagtgctgcttgagcaatgttg

SEQ ID NO: 2460222 - DNA, 25 bp, Homo sapien
tatgcacagtcttatccttatcctt

SEQ ID NO: 2460223 - DNA, 25 bp, Homo sapien
gcccatatatctgtaacttctttag

SEQ ID NO: 2460224 - DNA, 25 bp, Homo sapien
cataaggcccaagcccatcattttg

SEQ ID NO: 2460225 - DNA, 25 bp, Homo sapien
ttatccttagccataaggcccaagc

SEQ ID NO: 2460226 - DNA, 25 bp, Homo sapien
tataaaccaaacaatcccgagtcca

SEQ ID NO: 2460227 - DNA, 25 bp, Homo sapien
taccttgtgggctagggagaccagc

SEQ ID NO: 2460228 - DNA, 25 bp, Homo sapien
tattcccacggcaatttctggaagc

SEQ ID NO: 2460229 - DNA, 25 bp, Homo sapien
tctggaagcagaaacgtatattgca

SEQ ID NO: 2460230 - DNA, 25 bp, Homo sapien
tcaggctgtagcctttttgcccgtc

SEQ ID NO: 2460231 - DNA, 25 bp, Homo sapien
tgtcaaacgggtgtgtgttacattg

SEQ ID NO: 2460232 - DNA, 25 bp, Homo sapien
acctcattgtcaaacgggtgtgtgt

SEQ ID NO: 2460233 - DNA, 25 bp, Homo sapien
gtcgactgtagctgctgaactttga

SEQ ID NO: 2460234 - DNA, 25 bp, Homo sapien
taaataatgcgttcgtaatgtgatc

SEQ ID NO: 2460235 - DNA, 25 bp, Homo sapien
tcgtagcagggagccaatgtttttg

SEQ ID NO: 2460236 - DNA, 25 bp, Homo sapien
ggagacgctgggcaactcgagccca

SEQ ID NO: 2460237 - DNA, 25 bp, Homo sapien
tggcttcatagccaccttcctcaat

SEQ ID NO: 2460238 - DNA, 25 bp, Homo sapien
aagatccttgaggcaaggctttttg

SEQ ID NO: 2460239 - DNA, 25 bp, Homo sapien
acagaagatccttgaggcaaggctt

SEQ ID NO: 2460240 - DNA, 25 bp, Homo sapien
cacagaagatccttgaggcaaggct

SEQ ID NO: 2460241 - DNA, 25 bp, Homo sapien
agatccttgaggcaaggctttttgt

SEQ ID NO: 2460242 - DNA, 25 bp, Homo sapien
ttaaagaggagccttgaatttccca

SEQ ID NO: 2460243 - DNA, 25 bp, Homo sapien
tgcaatctgatccaaatagttcaat

SEQ ID NO: 2460244 - DNA, 25 bp, Homo sapien
gaattttgcaatctgatccaaatag

SEQ ID NO: 2460245 - DNA, 25 bp, Homo sapien
caagatcttccgctccacattggga

SEQ ID NO: 2460246 - DNA, 25 bp, Homo sapien
tggacgcgaggagtaaatctgaaat

SEQ ID NO: 2460247 - DNA, 25 bp, Homo sapien
tgaaattgtcaacttctactgcaaa

SEQ ID NO: 2460248 - DNA, 25 bp, Homo sapien
aatctgaaattgtcaacttctactg

SEQ ID NO: 2460249 - DNA, 25 bp, Homo sapien
tccagttcatttagcctttggacgc

SEQ ID NO: 2460250 - DNA, 25 bp, Homo sapien
gtagccaagcgggtcttggaattca

SEQ ID NO: 2460251 - DNA, 25 bp, Homo sapien
tatgggccttattttcgcaatgtag

SEQ ID NO: 2460252 - DNA, 25 bp, Homo sapien
ccagacttctctgctatgggcctta

SEQ ID NO: 2460253 - DNA, 25 bp, Homo sapien
tggaattcagcccagctaggctcaa

SEQ ID NO: 2460254 - DNA, 25 bp, Homo sapien
gggatcctagttttacagccaccat

SEQ ID NO: 2460255 - DNA, 25 bp, Homo sapien
tcgtcagggatcctagttttacagc

SEQ ID NO: 2460256 - DNA, 25 bp, Homo sapien
caatcgtcagggatcctagttttac

SEQ ID NO: 2460257 - DNA, 25 bp, Homo sapien
cagggatcctagttttacagccacc

SEQ ID NO: 2460258 - DNA, 25 bp, Homo sapien
tgcagtgtggtacgagccgtctcac

SEQ ID NO: 2460259 - DNA, 25 bp, Homo sapien
ggcgctatttccaaacctgtgagac

SEQ ID NO: 2460260 - DNA, 25 bp, Homo sapien
gacgcaagagcgattttaccagagg

SEQ ID NO: 2460261 - DNA, 25 bp, Homo sapien
tgagaccttccgcacctgagataaa

SEQ ID NO: 2460262 - DNA, 25 bp, Homo sapien
aggacaaaccgccggcgatatccgt

SEQ ID NO: 2460263 - DNA, 25 bp, Homo sapien
tcctgccaggacaaaccgccggcga

SEQ ID NO: 2460264 - DNA, 25 bp, Homo sapien
tgccaggacaaaccgccggcgatat

SEQ ID NO: 2460265 - DNA, 25 bp, Homo sapien
caaaccgccggcgatatccgttcat

SEQ ID NO: 2460266 - DNA, 25 bp, Homo sapien
cccccactctcttctcatttgtggc

SEQ ID NO: 2460267 - DNA, 25 bp, Homo sapien
ttctgctgagagatcctttgttagt

SEQ ID NO: 2460268 - DNA, 25 bp, Homo sapien
tctgatgggcttccccttgtaagta

SEQ ID NO: 2460269 - DNA, 25 bp, Homo sapien
tctcatttgtggcatttctgctgag

SEQ ID NO: 2460270 - DNA, 25 bp, Homo sapien
ttccctagtgaagattgttgatgag

SEQ ID NO: 2460271 - DNA, 25 bp, Homo sapien
gtttccctagtgaagattgttgatg

SEQ ID NO: 2460272 - DNA, 25 bp, Homo sapien
gatgtttccctagtgaagattgttg

SEQ ID NO: 2460273 - DNA, 25 bp, Homo sapien
gtgatgtttccctagtgaagattgt

SEQ ID NO: 2460274 - DNA, 25 bp, Homo sapien
gtatcagctatcacaggctcttggc

SEQ ID NO: 2460275 - DNA, 25 bp, Homo sapien
cacaggttgctttcttgtagcaggt

SEQ ID NO: 2460276 - DNA, 25 bp, Homo sapien
ttgtagcaggttagaataaggagac

SEQ ID NO: 2460277 - DNA, 25 bp, Homo sapien
cctcaaaatattttgttgtgaaagt

SEQ ID NO: 2460278 - DNA, 25 bp, Homo sapien
aagttgcggtgggaacaaaattcat

SEQ ID NO: 2460279 - DNA, 25 bp, Homo sapien
tgcggtgggaacaaaattcataagg

SEQ ID NO: 2460280 - DNA, 25 bp, Homo sapien
caaaattcataaggtagccatttgg

SEQ ID NO: 2460281 - DNA, 25 bp, Homo sapien
tgggaacaaaattcataaggtagcc

SEQ ID NO: 2460282 - DNA, 25 bp, Homo sapien
gatgtgtaacaatcaatctggttac

SEQ ID NO: 2460283 - DNA, 25 bp, Homo sapien
cccaaatctttgatagatgtgtaac

SEQ ID NO: 2460284 - DNA, 25 bp, Homo sapien
tgatagatgtgtaacaatcaatctg

SEQ ID NO: 2460285 - DNA, 25 bp, Homo sapien
tctttgatagatgtgtaacaatcaa

SEQ ID NO: 2460286 - DNA, 25 bp, Homo sapien
tattgtaagtaggtggacacatctc

SEQ ID NO: 2460287 - DNA, 25 bp, Homo sapien
gacacatctcgtatagtatgggcat

SEQ ID NO: 2460288 - DNA, 25 bp, Homo sapien
taattcccagtgctattagccaagg

SEQ ID NO: 2460289 - DNA, 25 bp, Homo sapien
cctgagctgccaaggagtcaaggga

SEQ ID NO: 2460290 - DNA, 25 bp, Homo sapien
ctgtgatatggaaaatcaccatggg

SEQ ID NO: 2460291 - DNA, 25 bp, Homo sapien
gttgactgtgatatggaaaatcacc

SEQ ID NO: 2460292 - DNA, 25 bp, Homo sapien
gactgtgatatggaaaatcaccatg

SEQ ID NO: 2460293 - DNA, 25 bp, Homo sapien
tgttgactgtgatatggaaaatcac

SEQ ID NO: 2460294 - DNA, 25 bp, Homo sapien
gtctcacatttatctccagacatca

SEQ ID NO: 2460295 - DNA, 25 bp, Homo sapien
atcaccaaacagtgtgagaagccca

SEQ ID NO: 2460296 - DNA, 25 bp, Homo sapien
ccagacatcaccaaacagtgtgaga

SEQ ID NO: 2460297 - DNA, 25 bp, Homo sapien
gacatcaccaaacagtgtgagaagc

SEQ ID NO: 2460298 - DNA, 25 bp, Homo sapien
ccatacagaatctctattttggttg

SEQ ID NO: 2460299 - DNA, 25 bp, Homo sapien
aagataccatacagaatctctattt

SEQ ID NO: 2460300 - DNA, 25 bp, Homo sapien
gtggcttgcagtgctaactccatat

SEQ ID NO: 2460301 - DNA, 25 bp, Homo sapien
cagaatctctattttggttgtgcag

SEQ ID NO: 2460302 - DNA, 25 bp, Homo sapien
acactgaattcagcccctaaagcca

SEQ ID NO: 2460303 - DNA, 25 bp, Homo sapien
tgattacactgaattcagcccctaa

SEQ ID NO: 2460304 - DNA, 25 bp, Homo sapien
ttacactgaattcagcccctaaagc

SEQ ID NO: 2460305 - DNA, 25 bp, Homo sapien
ttctgtatccttgattacactgaat

SEQ ID NO: 2460306 - DNA, 25 bp, Homo sapien
ctccacgaatttacaggcttcaaca

SEQ ID NO: 2460307 - DNA, 25 bp, Homo sapien
tcatgactgacaccctccacgaatt

SEQ ID NO: 2460308 - DNA, 25 bp, Homo sapien
ggcttcaacatttttggtgtcattg

SEQ ID NO: 2460309 - DNA, 25 bp, Homo sapien
gaatgcttcccttctgtggctatga

SEQ ID NO: 2460310 - DNA, 25 bp, Homo sapien
cacctatcaattcccagttggttgc

SEQ ID NO: 2460311 - DNA, 25 bp, Homo sapien
ggtaagcactttgttgtttatgggc

SEQ ID NO: 2460312 - DNA, 25 bp, Homo sapien
agattatggtaagcactttgttgtt

SEQ ID NO: 2460313 - DNA, 25 bp, Homo sapien
tccacctatcaattcccagttggtt

SEQ ID NO: 2460314 - DNA, 25 bp, Homo sapien
gaccctgaatccagatgtaataacc

SEQ ID NO: 2460315 - DNA, 25 bp, Homo sapien
tttgtgaggtgcaaatagaaaatgg

SEQ ID NO: 2460316 - DNA, 25 bp, Homo sapien
gatgtaataacctctggaactctga

SEQ ID NO: 2460317 - DNA, 25 bp, Homo sapien
gaactctgaggagttaacctctgct

SEQ ID NO: 2460318 - DNA, 25 bp, Homo sapien
ctccatgttgtgatcacctttcact

SEQ ID NO: 2460319 - DNA, 25 bp, Homo sapien
tcatactcctcaaatgcaggcctaa

SEQ ID NO: 2460320 - DNA, 25 bp, Homo sapien
ggcctctttgagtccaatgtgatca

SEQ ID NO: 2460321 - DNA, 25 bp, Homo sapien
tcacccatgtaatgatgctcctcac

SEQ ID NO: 2460322 - DNA, 25 bp, Homo sapien
tctgaggaagtttcagccagaataa

SEQ ID NO: 2460323 - DNA, 25 bp, Homo sapien
gccatgcagaagctcacaacctact

SEQ ID NO: 2460324 - DNA, 25 bp, Homo sapien
gaagtttcagccagaataagaaaaa

SEQ ID NO: 2460325 - DNA, 25 bp, Homo sapien
gaggaagtttcagccagaataagaa

SEQ ID NO: 2460326 - DNA, 25 bp, Homo sapien
tatgtcaaacataaaccatctggaa

SEQ ID NO: 2460327 - DNA, 25 bp, Homo sapien
tactacccggactagtctactgatt

SEQ ID NO: 2460328 - DNA, 25 bp, Homo sapien
cacatgaattgactaaagttgctag

SEQ ID NO: 2460329 - DNA, 25 bp, Homo sapien
aaatcggtcgaatttctatatgtca

SEQ ID NO: 2460330 - DNA, 25 bp, Homo sapien
tttaagacctcaatctacgaagcta

SEQ ID NO: 2460331 - DNA, 25 bp, Homo sapien
gacaaaactgataacactaagttga

SEQ ID NO: 2460332 - DNA, 25 bp, Homo sapien
aatgaagacacagctgacagaatga

SEQ ID NO: 2460333 - DNA, 25 bp, Homo sapien
ttctgcagagcaaaacaatatcaaa

SEQ ID NO: 2460334 - DNA, 25 bp, Homo sapien
caactaatctttaatgaggatccca

SEQ ID NO: 2460335 - DNA, 25 bp, Homo sapien
tgtcataccaccctaaaataatttg

SEQ ID NO: 2460336 - DNA, 25 bp, Homo sapien
gactagagcatcatagtttccaatt

SEQ ID NO: 2460337 - DNA, 25 bp, Homo sapien
tggcacagaataaagagtctcagaa

SEQ ID NO: 2460338 - DNA, 25 bp, Homo sapien
ccacaggacctaggttgtttttgca

SEQ ID NO: 2460339 - DNA, 25 bp, Homo sapien
tggcaaaatgcataccagagaaagt

SEQ ID NO: 2460340 - DNA, 25 bp, Homo sapien
gtgcacacaaggctccatgacaatg

SEQ ID NO: 2460341 - DNA, 25 bp, Homo sapien
taacatgtagtcctctggcatagtg

SEQ ID NO: 2460342 - DNA, 25 bp, Homo sapien
tagcttaagactggtggtcatccaa

SEQ ID NO: 2460343 - DNA, 25 bp, Homo sapien
tatggcaatggacctaggtcaggac

SEQ ID NO: 2460344 - DNA, 25 bp, Homo sapien
gacaatgggagcttcagatgatggc

SEQ ID NO: 2460345 - DNA, 25 bp, Homo sapien
ttagatgtacctcttcaggaagggc

SEQ ID NO: 2460346 - DNA, 25 bp, Homo sapien
tatcgagtaggaaaacacaaagtcc

SEQ ID NO: 2460347 - DNA, 25 bp, Homo sapien
cacaccgtaggtggcctcaatttag

SEQ ID NO: 2460348 - DNA, 25 bp, Homo sapien
aatcaagtggcgatgcctttctgta

SEQ ID NO: 2460349 - DNA, 25 bp, Homo sapien
cagtgtactggaaaaaagcatctat

SEQ ID NO: 2460350 - DNA, 25 bp, Homo sapien
ccccatttcatgtttttatcagttt

SEQ ID NO: 2460351 - DNA, 25 bp, Homo sapien
tcccccatttcatgtttttatcagt

SEQ ID NO: 2460352 - DNA, 25 bp, Homo sapien
tcatgtttttatcagttttgtcaaa

SEQ ID NO: 2460353 - DNA, 25 bp, Homo sapien
tttcccccatttcatgtttttatca

SEQ ID NO: 2460354 - DNA, 25 bp, Homo sapien
tgtgtgaagcagctgcaaccatccc

SEQ ID NO: 2460355 - DNA, 25 bp, Homo sapien
tggttgttttactctgcagacggga

SEQ ID NO: 2460356 - DNA, 25 bp, Homo sapien
gcagacgggaactttgcattcttgc

SEQ ID NO: 2460357 - DNA, 25 bp, Homo sapien
catttatcctgtggactgtctgctg

SEQ ID NO: 2460358 - DNA, 25 bp, Homo sapien
tatgtttgcaggcattgattaagcc

SEQ ID NO: 2460359 - DNA, 25 bp, Homo sapien
tatacttgcggctttcaggatggaa

SEQ ID NO: 2460360 - DNA, 25 bp, Homo sapien
gagtgttccaatctgccatgtcaac

SEQ ID NO: 2460361 - DNA, 25 bp, Homo sapien
tacttgcctgttggttggatcttct

SEQ ID NO: 2460362 - DNA, 25 bp, Homo sapien
cttctggaaataacagttgtggcca

SEQ ID NO: 2460363 - DNA, 25 bp, Homo sapien
acttctggaaataacagttgtggcc

SEQ ID NO: 2460364 - DNA, 25 bp, Homo sapien
ttctggaaataacagttgtggccat

SEQ ID NO: 2460365 - DNA, 25 bp, Homo sapien
caggtaggcagactttcagtctctg

SEQ ID NO: 2460366 - DNA, 25 bp, Homo sapien
tccacttctagattcgctattgtgt

SEQ ID NO: 2460367 - DNA, 25 bp, Homo sapien
tctcacacttccacttctagattcg

SEQ ID NO: 2460368 - DNA, 25 bp, Homo sapien
tattcccagacatcttaacagctgc

SEQ ID NO: 2460369 - DNA, 25 bp, Homo sapien
gtagtgcaatctccagtggtcttca

SEQ ID NO: 2460370 - DNA, 25 bp, Homo sapien
agtagtgcaatctccagtggtcttc

SEQ ID NO: 2460371 - DNA, 25 bp, Homo sapien
ttgtggcttgggcaattcttcttaa

SEQ ID NO: 2460372 - DNA, 25 bp, Homo sapien
cactggtaacaggtagcaatcagtg

SEQ ID NO: 2460373 - DNA, 25 bp, Homo sapien
aggtagcaatcagtggaagttcctg

SEQ ID NO: 2460374 - DNA, 25 bp, Homo sapien
ctggactctgcaagtctgcaaagca

SEQ ID NO: 2460375 - DNA, 25 bp, Homo sapien
gaagtcagccaggaacccaccggaa

SEQ ID NO: 2460376 - DNA, 25 bp, Homo sapien
ttgaagtcagccaggaacccaccgg

SEQ ID NO: 2460377 - DNA, 25 bp, Homo sapien
agtcagccaggaacccaccggaagg

SEQ ID NO: 2460378 - DNA, 25 bp, Homo sapien
cttgaagtcagccaggaacccaccg

SEQ ID NO: 2460379 - DNA, 25 bp, Homo sapien
ccatgaaatgaagcaaccttacact

SEQ ID NO: 2460380 - DNA, 25 bp, Homo sapien
catgaaatgaagcaaccttacactt

SEQ ID NO: 2460381 - DNA, 25 bp, Homo sapien
tatacttgaagtatatactttatac

SEQ ID NO: 2460382 - DNA, 25 bp, Homo sapien
gaaatgaagcaaccttacactttat

SEQ ID NO: 2460383 - DNA, 25 bp, Homo sapien
tataagtctaatggaatgtatgcaa

SEQ ID NO: 2460384 - DNA, 25 bp, Homo sapien
aaactttggtaagataacaactgct

SEQ ID NO: 2460385 - DNA, 25 bp, Homo sapien
tcagggagcctgtagaggaatccca

SEQ ID NO: 2460386 - DNA, 25 bp, Homo sapien
tctctactgagggtcccaggataat

SEQ ID NO: 2460387 - DNA, 25 bp, Homo sapien
gaaaccatttctgtcagttgttgag

SEQ ID NO: 2460388 - DNA, 25 bp, Homo sapien
tgtgttgaaggaagtaaggtaaaga

SEQ ID NO: 2460389 - DNA, 25 bp, Homo sapien
agctgtcactcctaggtgccctcat

SEQ ID NO: 2460390 - DNA, 25 bp, Homo sapien
catcaaagagtcagccaggcataag

SEQ ID NO: 2460391 - DNA, 25 bp, Homo sapien
caaaccattagctagaccagctaag

SEQ ID NO: 2460392 - DNA, 25 bp, Homo sapien
gacaagtgggtcaataaaattagta

SEQ ID NO: 2460393 - DNA, 25 bp, Homo sapien
tggagcattctcaagcataaagtgt

SEQ ID NO: 2460394 - DNA, 25 bp, Homo sapien
ggaaacattatagattactgcagaa

SEQ ID NO: 2460395 - DNA, 25 bp, Homo sapien
tgcatctggtattcatgaaatccca

SEQ ID NO: 2460396 - DNA, 25 bp, Homo sapien
tccacttaggataacagtagtttac

SEQ ID NO: 2460397 - DNA, 25 bp, Homo sapien
ccctttaggtttgcttgtagaatgc

SEQ ID NO: 2460398 - DNA, 25 bp, Homo sapien
ccttcaggtgattgttgattgttcc

SEQ ID NO: 2460399 - DNA, 25 bp, Homo sapien
ggaataggtgtggtgaaggcctttg

SEQ ID NO: 2460400 - DNA, 25 bp, Homo sapien
tgtctttgttctcatcggttcaaag

SEQ ID NO: 2460401 - DNA, 25 bp, Homo sapien
taggtgtggtgaaggcctttgacaa

SEQ ID NO: 2460402 - DNA, 25 bp, Homo sapien
ttctcatcggttcaaagaacatttt

SEQ ID NO: 2460403 - DNA, 25 bp, Homo sapien
gtcttttggagttaccaatcctgct

SEQ ID NO: 2460404 - DNA, 25 bp, Homo sapien
agagaggggctggattctatttaca

SEQ ID NO: 2460405 - DNA, 25 bp, Homo sapien
ttttggagttaccaatcctgctctg

SEQ ID NO: 2460406 - DNA, 25 bp, Homo sapien
agaggggctggattctatttacata

SEQ ID NO: 2460407 - DNA, 25 bp, Homo sapien
taaatctgtaggacacagctggacc

SEQ ID NO: 2460408 - DNA, 25 bp, Homo sapien
gacctgattctccaatggcttcata

SEQ ID NO: 2460409 - DNA, 25 bp, Homo sapien
cagtgcatccaaagtgagggtataa

SEQ ID NO: 2460410 - DNA, 25 bp, Homo sapien
tcaagattcacagtgcatccaaagt

SEQ ID NO: 2460411 - DNA, 25 bp, Homo sapien
gagtatcaggacagctcagggaccc

SEQ ID NO: 2460412 - DNA, 25 bp, Homo sapien
tagggataccaggaagcagttggac

SEQ ID NO: 2460413 - DNA, 25 bp, Homo sapien
aaagcttagcacacgattctgggta

SEQ ID NO: 2460414 - DNA, 25 bp, Homo sapien
ttactgctgacatgggctatggcca

SEQ ID NO: 2460415 - DNA, 25 bp, Homo sapien
gaaagtcttttgataatgcttcccc

SEQ ID NO: 2460416 - DNA, 25 bp, Homo sapien
cacattaactgggtagactggctgc

SEQ ID NO: 2460417 - DNA, 25 bp, Homo sapien
agaacccttgatgcagtactgtcca

SEQ ID NO: 2460418 - DNA, 25 bp, Homo sapien
ggatcctccaaagcaaacaagtatg

SEQ ID NO: 2460419 - DNA, 25 bp, Homo sapien
taccaaggcagataacttgttcaac

SEQ ID NO: 2460420 - DNA, 25 bp, Homo sapien
caatcagttttaggatgcaaaagca

SEQ ID NO: 2460421 - DNA, 25 bp, Homo sapien
gagccaggtactagacttattaaac

SEQ ID NO: 2460422 - DNA, 25 bp, Homo sapien
gactgagaagcacaatacagtctct

SEQ ID NO: 2460423 - DNA, 25 bp, Homo sapien
tgtttactaatgaacataaaccact

SEQ ID NO: 2460424 - DNA, 25 bp, Homo sapien
cttttattaaagtgaaatctctaca

SEQ ID NO: 2460425 - DNA, 25 bp, Homo sapien
tcctaagctgttaatcactgtttac

SEQ ID NO: 2460426 - DNA, 25 bp, Homo sapien
aattgcagtgtttgaccttaaaagt

SEQ ID NO: 2460427 - DNA, 25 bp, Homo sapien
tgatattttggtataagacgttttg

SEQ ID NO: 2460428 - DNA, 25 bp, Homo sapien
tgcagttaaaatgcttggtgggttg

SEQ ID NO: 2460429 - DNA, 25 bp, Homo sapien
gggtggtactaaacagctgttctga

SEQ ID NO: 2460430 - DNA, 25 bp, Homo sapien
gaaggtggtcccctcttagtgagac

SEQ ID NO: 2460431 - DNA, 25 bp, Homo sapien
cagccctagggcacactggaagcat

SEQ ID NO: 2460432 - DNA, 25 bp, Homo sapien
tatgagatgtgcaccctgtttatgg

SEQ ID NO: 2460433 - DNA, 25 bp, Homo sapien
atgagatgtgcaccctgtttatgga

SEQ ID NO: 2460434 - DNA, 25 bp, Homo sapien
ctatgagatgtgcaccctgtttatg

SEQ ID NO: 2460435 - DNA, 25 bp, Homo sapien
ctggactgctggtggcagtggcagc

SEQ ID NO: 2460436 - DNA, 25 bp, Homo sapien
ctgctggtggcagtggcagcattag

SEQ ID NO: 2460437 - DNA, 25 bp, Homo sapien
gctggtggcagtggcagcattagcc

SEQ ID NO: 2460438 - DNA, 25 bp, Homo sapien
tggtggcagtggcagcattagccat

SEQ ID NO: 2460439 - DNA, 25 bp, Homo sapien
cactgttgtgctgcgtaagttggcc

SEQ ID NO: 2460440 - DNA, 25 bp, Homo sapien
tggtagccagttaggataagaagcc

SEQ ID NO: 2460441 - DNA, 25 bp, Homo sapien
gatgaatcagctatcacaggcattt

SEQ ID NO: 2460442 - DNA, 25 bp, Homo sapien
tatgagctggcctggaattagaggc

SEQ ID NO: 2460443 - DNA, 25 bp, Homo sapien
cattagccccgaagaactgttctgt

SEQ ID NO: 2460444 - DNA, 25 bp, Homo sapien
cagatggttccaccattagccccga

SEQ ID NO: 2460445 - DNA, 25 bp, Homo sapien
ttctgtatcgaagttacgatgtggt

SEQ ID NO: 2460446 - DNA, 25 bp, Homo sapien
tcaaaatgtctggttggaaaagcag

SEQ ID NO: 2460447 - DNA, 25 bp, Homo sapien
aacactttggattgtttcaggtgaa

SEQ ID NO: 2460448 - DNA, 25 bp, Homo sapien
ccatttgcttgcgttgcaggtgcta

SEQ ID NO: 2460449 - DNA, 25 bp, Homo sapien
tcaggtgaattagcaattctctggc

SEQ ID NO: 2460450 - DNA, 25 bp, Homo sapien
tctggctgacaatagacttccttgt

SEQ ID NO: 2460451 - DNA, 25 bp, Homo sapien
gcaactaaagtagatacataagggt

SEQ ID NO: 2460452 - DNA, 25 bp, Homo sapien
ctctaaagtgcttcttgttggcatt

SEQ ID NO: 2460453 - DNA, 25 bp, Homo sapien
ctgctctaaagtgcttcttgttggc

SEQ ID NO: 2460454 - DNA, 25 bp, Homo sapien
cattttcagcaactaaagtagatac

SEQ ID NO: 2460455 - DNA, 25 bp, Homo sapien
aaatttggaatatgatagaactgta

SEQ ID NO: 2460456 - DNA, 25 bp, Homo sapien
aatttggaatatgatagaactgtaa

SEQ ID NO: 2460457 - DNA, 25 bp, Homo sapien
taaaagttgaggacagccatgttta

SEQ ID NO: 2460458 - DNA, 25 bp, Homo sapien
aaaagttgaggacagccatgtttaa

SEQ ID NO: 2460459 - DNA, 25 bp, Homo sapien
ggcagcatttgcggaacaattccct

SEQ ID NO: 2460460 - DNA, 25 bp, Homo sapien
agcatttgcggaacaattccctcgc

SEQ ID NO: 2460461 - DNA, 25 bp, Homo sapien
tgggcagcatttgcggaacaattcc

SEQ ID NO: 2460462 - DNA, 25 bp, Homo sapien
atgggcagcatttgcggaacaattc

SEQ ID NO: 2460463 - DNA, 25 bp, Homo sapien
gtgagcattcaccactggcctagaa

SEQ ID NO: 2460464 - DNA, 25 bp, Homo sapien
aaagggcctgtgaataaaccgtatg

SEQ ID NO: 2460465 - DNA, 25 bp, Homo sapien
gaataaaccgtatggaaacgctgga

SEQ ID NO: 2460466 - DNA, 25 bp, Homo sapien
taagtgagcattcaccactggccta

SEQ ID NO: 2460467 - DNA, 25 bp, Homo sapien
tccggacgcgctgctttggatgtcg

SEQ ID NO: 2460468 - DNA, 25 bp, Homo sapien
ctctggcgccatggcaaatgcgcct

SEQ ID NO: 2460469 - DNA, 25 bp, Homo sapien
tttccggacgcgctgctttggatgt

SEQ ID NO: 2460470 - DNA, 25 bp, Homo sapien
tgcgcctctttcaacgggatttccg

SEQ ID NO: 2460471 - DNA, 25 bp, Homo sapien
cctttctctctgcctgcccgtaacg

SEQ ID NO: 2460472 - DNA, 25 bp, Homo sapien
ttctctctgcctgcccgtaacgttt

SEQ ID NO: 2460473 - DNA, 25 bp, Homo sapien
ctctctgcctgcccgtaacgttttt

SEQ ID NO: 2460474 - DNA, 25 bp, Homo sapien
tttctctctgcctgcccgtaacgtt

SEQ ID NO: 2460475 - DNA, 25 bp, Homo sapien
acttcaggccacctggtcatatacg

SEQ ID NO: 2460476 - DNA, 25 bp, Homo sapien
tcaggccacctggtcatatacgtgc

SEQ ID NO: 2460477 - DNA, 25 bp, Homo sapien
gccacctggtcatatacgtgcaagt

SEQ ID NO: 2460478 - DNA, 25 bp, Homo sapien
caggccacctggtcatatacgtgca

SEQ ID NO: 2460479 - DNA, 25 bp, Homo sapien
aaagctgtgctgcaaaaagtagggt

SEQ ID NO: 2460480 - DNA, 25 bp, Homo sapien
taagagagacttaagagtggtggtg

SEQ ID NO: 2460481 - DNA, 25 bp, Homo sapien
cccagtgtggaagatcctgcaggca

SEQ ID NO: 2460482 - DNA, 25 bp, Homo sapien
agacagcagtcagggtactacagat

SEQ ID NO: 2460483 - DNA, 25 bp, Homo sapien
cctccacttgagagtcacctgaagt

SEQ ID NO: 2460484 - DNA, 25 bp, Homo sapien
cctgaagttgggcatctgtgatggt

SEQ ID NO: 2460485 - DNA, 25 bp, Homo sapien
tcacctgaagttgggcatctgtgat

SEQ ID NO: 2460486 - DNA, 25 bp, Homo sapien
ctccacttgagagtcacctgaagtt

SEQ ID NO: 2460487 - DNA, 25 bp, Homo sapien
tcttcagtcgctaagctgagcagat

SEQ ID NO: 2460488 - DNA, 25 bp, Homo sapien
aatcttcagtcgctaagctgagcag

SEQ ID NO: 2460489 - DNA, 25 bp, Homo sapien
taatcttcagtcgctaagctgagca

SEQ ID NO: 2460490 - DNA, 25 bp, Homo sapien
atcttcagtcgctaagctgagcaga

SEQ ID NO: 2460491 - DNA, 25 bp, Homo sapien
ggtcataggtggatcgttctcacag

SEQ ID NO: 2460492 - DNA, 25 bp, Homo sapien
gtcagtctgaggacctgaggtcata

SEQ ID NO: 2460493 - DNA, 25 bp, Homo sapien
cagtctgaggacctgaggtcatagg

SEQ ID NO: 2460494 - DNA, 25 bp, Homo sapien
tggtcagtctgaggacctgaggtca

SEQ ID NO: 2460495 - DNA, 25 bp, Homo sapien
cacaaccttctagcatgggcattat

SEQ ID NO: 2460496 - DNA, 25 bp, Homo sapien
acaaccttctagcatgggcattatg

SEQ ID NO: 2460497 - DNA, 25 bp, Homo sapien
aaccttctagcatgggcattatggc

SEQ ID NO: 2460498 - DNA, 25 bp, Homo sapien
accttctagcatgggcattatggcc

SEQ ID NO: 2460499 - DNA, 25 bp, Homo sapien
aaatatctttgtcctactgttgtga

SEQ ID NO: 2460500 - DNA, 25 bp, Homo sapien
tctgcagaacaattgcaagtcacat

SEQ ID NO: 2460501 - DNA, 25 bp, Homo sapien
tcattatagtgagaattatgtactt

SEQ ID NO: 2460502 - DNA, 25 bp, Homo sapien
ttttatttgtgcctgtcataaatgg

SEQ ID NO: 2460503 - DNA, 25 bp, Homo sapien
ttccctgccgatgtcctactgattg

SEQ ID NO: 2460504 - DNA, 25 bp, Homo sapien
tgggtggtgaccactctagatagga

SEQ ID NO: 2460505 - DNA, 25 bp, Homo sapien
tgctctcctttagctaaacacaaag

SEQ ID NO: 2460506 - DNA, 25 bp, Homo sapien
tctatttaacagagggctgaatgct

SEQ ID NO: 2460507 - DNA, 25 bp, Homo sapien
gtcccctccttctacagctgtgaat

SEQ ID NO: 2460508 - DNA, 25 bp, Homo sapien
cccctccttctacagctgtgaattc

SEQ ID NO: 2460509 - DNA, 25 bp, Homo sapien
tgtcccctccttctacagctgtgaa

SEQ ID NO: 2460510 - DNA, 25 bp, Homo sapien
catgtcccctccttctacagctgtg

SEQ ID NO: 2460511 - DNA, 25 bp, Homo sapien
aacccacgaggcggaagttgcaatg

SEQ ID NO: 2460512 - DNA, 25 bp, Homo sapien
tgagatcacgctattgcactctagc

SEQ ID NO: 2460513 - DNA, 25 bp, Homo sapien
aaggagattcacttgaacccacgag

SEQ ID NO: 2460514 - DNA, 25 bp, Homo sapien
aggaaggagattcacttgaacccac

SEQ ID NO: 2460515 - DNA, 25 bp, Homo sapien
ttagcagcttagtcctcttccctgc

SEQ ID NO: 2460516 - DNA, 25 bp, Homo sapien
tcttagcactctcaatggattcctc

SEQ ID NO: 2460517 - DNA, 25 bp, Homo sapien
tggattcctccaccatgatctactc

SEQ ID NO: 2460518 - DNA, 25 bp, Homo sapien
ttcagaggggtactagtctttgcct

SEQ ID NO: 2460519 - DNA, 25 bp, Homo sapien
taatttgagacctcttcagtggctc

SEQ ID NO: 2460520 - DNA, 25 bp, Homo sapien
tcagtggctctgtgatacaaagtta

SEQ ID NO: 2460521 - DNA, 25 bp, Homo sapien
ccatactgccatagagtgatggagg

SEQ ID NO: 2460522 - DNA, 25 bp, Homo sapien
gatattccttcagcataccatactg

SEQ ID NO: 2460523 - DNA, 25 bp, Homo sapien
gcatccagaaaaagtgtgagcacca

SEQ ID NO: 2460524 - DNA, 25 bp, Homo sapien
caactctgtggactagcatccagaa

SEQ ID NO: 2460525 - DNA, 25 bp, Homo sapien
atttagggtgtaccccaactctgtg

SEQ ID NO: 2460526 - DNA, 25 bp, Homo sapien
tcttaaggcaggcagtacacgaggc

SEQ ID NO: 2460527 - DNA, 25 bp, Homo sapien
caatcatcactaggtatctggcaga

SEQ ID NO: 2460528 - DNA, 25 bp, Homo sapien
tagcattctggtaagtagagcctcc

SEQ ID NO: 2460529 - DNA, 25 bp, Homo sapien
gatcagcaactcctaacattatggg

SEQ ID NO: 2460530 - DNA, 25 bp, Homo sapien
tcctcaagctgataccaagaatggt

SEQ ID NO: 2460531 - DNA, 25 bp, Homo sapien
cacatttactcatctgaggaagact

SEQ ID NO: 2460532 - DNA, 25 bp, Homo sapien
tgacttggttccatcgcaagatcag

SEQ ID NO: 2460533 - DNA, 25 bp, Homo sapien
tgtagactgtccagcctctggagtg

SEQ ID NO: 2460534 - DNA, 25 bp, Homo sapien
caattttggccaactgtggtggacc

SEQ ID NO: 2460535 - DNA, 25 bp, Homo sapien
gaagttctcctgtcagtgcctagga

SEQ ID NO: 2460536 - DNA, 25 bp, Homo sapien
ttgaagaatgcacgcagctcctgga

SEQ ID NO: 2460537 - DNA, 25 bp, Homo sapien
tggaattgtcctgtagcccctttgc

SEQ ID NO: 2460538 - DNA, 25 bp, Homo sapien
tgctgttagggaagggcaccgggat

SEQ ID NO: 2460539 - DNA, 25 bp, Homo sapien
ttcgctgtaggatttctggttcatt

SEQ ID NO: 2460540 - DNA, 25 bp, Homo sapien
gagttggaagactcttgatgtgacc

SEQ ID NO: 2460541 - DNA, 25 bp, Homo sapien
tggttcatttctgagactctcatgc

SEQ ID NO: 2460542 - DNA, 25 bp, Homo sapien
cttgatgtgacctttgggcccctgg

SEQ ID NO: 2460543 - DNA, 25 bp, Homo sapien
tttttcagacaagagggtcaagctc

SEQ ID NO: 2460544 - DNA, 25 bp, Homo sapien
tttcagacaagagggtcaagctcag

SEQ ID NO: 2460545 - DNA, 25 bp, Homo sapien
ttttcagacaagagggtcaagctca

SEQ ID NO: 2460546 - DNA, 25 bp, Homo sapien
tcagacaagagggtcaagctcagca

SEQ ID NO: 2460547 - DNA, 25 bp, Homo sapien
cgaccggcctcggtgggtgatgttc

SEQ ID NO: 2460548 - DNA, 25 bp, Homo sapien
cccgcgaccggcctcggtgggtgat

SEQ ID NO: 2460549 - DNA, 25 bp, Homo sapien
aacatagggatacatgttccatgtt

SEQ ID NO: 2460550 - DNA, 25 bp, Homo sapien
taacatagggatacatgttccatgt

SEQ ID NO: 2460551 - DNA, 25 bp, Homo sapien
tgctgctgtggacgatatcgtggca

SEQ ID NO: 2460552 - DNA, 25 bp, Homo sapien
cagtgtaccccgttcaaattggagg

SEQ ID NO: 2460553 - DNA, 25 bp, Homo sapien
agacgtggagcggacagtgtacccc

SEQ ID NO: 2460554 - DNA, 25 bp, Homo sapien
ccaggtggtggtcgaggagaagtcc

SEQ ID NO: 2460555 - DNA, 25 bp, Homo sapien
tccccagccagtaacagactcgttg

SEQ ID NO: 2460556 - DNA, 25 bp, Homo sapien
actcgttggaactccgtgaatgccc

SEQ ID NO: 2460557 - DNA, 25 bp, Homo sapien
cccggcctccggagagagcaatgag

SEQ ID NO: 2460558 - DNA, 25 bp, Homo sapien
caatgaggacaggttgtgcggctcc

SEQ ID NO: 2460559 - DNA, 25 bp, Homo sapien
tttcctgccttggctcacacgtggg

SEQ ID NO: 2460560 - DNA, 25 bp, Homo sapien
tgtaagggttacttctggtgcccca

SEQ ID NO: 2460561 - DNA, 25 bp, Homo sapien
gctgtaagggttacttctggtgccc

SEQ ID NO: 2460562 - DNA, 25 bp, Homo sapien
ggctgtaagggttacttctggtgcc

SEQ ID NO: 2460563 - DNA, 25 bp, Homo sapien
ttcttgagtaactttcttgacttct

SEQ ID NO: 2460564 - DNA, 25 bp, Homo sapien
tcacgacgagcagggtgaaccctac

SEQ ID NO: 2460565 - DNA, 25 bp, Homo sapien
cagtgtgctcatgaccacaaaagta

SEQ ID NO: 2460566 - DNA, 25 bp, Homo sapien
aagtaaaaatcaccgcagcttcttg

SEQ ID NO: 2460567 - DNA, 25 bp, Homo sapien
gtattgttataatcagggtggctgc

SEQ ID NO: 2460568 - DNA, 25 bp, Homo sapien
cgtgtattgttataatcagggtggc

SEQ ID NO: 2460569 - DNA, 25 bp, Homo sapien
tcgtgtattgttataatcagggtgg

SEQ ID NO: 2460570 - DNA, 25 bp, Homo sapien
ctatgtatctcgtgtattgttataa

SEQ ID NO: 2460571 - DNA, 25 bp, Homo sapien
gatctctaccacgggtttcgtcgta

SEQ ID NO: 2460572 - DNA, 25 bp, Homo sapien
cacgggtttcgtcgtagccaccact

SEQ ID NO: 2460573 - DNA, 25 bp, Homo sapien
tctaccacgggtttcgtcgtagcca

SEQ ID NO: 2460574 - DNA, 25 bp, Homo sapien
ggtttcgtcgtagccaccactatca

SEQ ID NO: 2460575 - DNA, 25 bp, Homo sapien
ttatcacagtatgcatagcctctag

SEQ ID NO: 2460576 - DNA, 25 bp, Homo sapien
gttcatcccgactagagtgaccatt

SEQ ID NO: 2460577 - DNA, 25 bp, Homo sapien
cgactagagtgaccattatcacagt

SEQ ID NO: 2460578 - DNA, 25 bp, Homo sapien
tatcacagtatgcatagcctctaga

SEQ ID NO: 2460579 - DNA, 25 bp, Homo sapien
taatcatgatatgcatagtctctag

SEQ ID NO: 2460580 - DNA, 25 bp, Homo sapien
tatcctccagagtaatgttcatccc

SEQ ID NO: 2460581 - DNA, 25 bp, Homo sapien
taatgttcatcccaactagaatgac

SEQ ID NO: 2460582 - DNA, 25 bp, Homo sapien
cctccagagtaatgttcatcccaac

SEQ ID NO: 2460583 - DNA, 25 bp, Homo sapien
tagaatattattaataagggactct

SEQ ID NO: 2460584 - DNA, 25 bp, Homo sapien
gaatattattaataagggactctac

SEQ ID NO: 2460585 - DNA, 25 bp, Homo sapien
agaagagagttagaatattattaat

SEQ ID NO: 2460586 - DNA, 25 bp, Homo sapien
ttaactgaagaagagagttagaata

SEQ ID NO: 2460587 - DNA, 25 bp, Homo sapien
tttgctggttcgatcctttatcaaa

SEQ ID NO: 2460588 - DNA, 25 bp, Homo sapien
gatttgctggttcgatcctttatca

SEQ ID NO: 2460589 - DNA, 25 bp, Homo sapien
tgctggttcgatcctttatcaaaag

SEQ ID NO: 2460590 - DNA, 25 bp, Homo sapien
tggatttgctggttcgatcctttat

SEQ ID NO: 2460591 - DNA, 25 bp, Homo sapien
gatatgggaccatgtttctcaaata

SEQ ID NO: 2460592 - DNA, 25 bp, Homo sapien
cttctgatatgggaccatgtttctc

SEQ ID NO: 2460593 - DNA, 25 bp, Homo sapien
tctcaaatactgctttaagcatctt

SEQ ID NO: 2460594 - DNA, 25 bp, Homo sapien
aagcttgcccggatgatctgcttct

SEQ ID NO: 2460595 - DNA, 25 bp, Homo sapien
tcctcagtaaggagtgcctcccagc

SEQ ID NO: 2460596 - DNA, 25 bp, Homo sapien
tcgttcaggagtattgccttggact

SEQ ID NO: 2460597 - DNA, 25 bp, Homo sapien
tccacaatgaagttatcgttcagga

SEQ ID NO: 2460598 - DNA, 25 bp, Homo sapien
catcccaggtaccgacggtaggacg

SEQ ID NO: 2460599 - DNA, 25 bp, Homo sapien
acactttctacctgagcttctacgg

SEQ ID NO: 2460600 - DNA, 25 bp, Homo sapien
ttctacggtcggttggctgaccatg

SEQ ID NO: 2460601 - DNA, 25 bp, Homo sapien
cagctgcaggcgctacactttctac

SEQ ID NO: 2460602 - DNA, 25 bp, Homo sapien
tacctgagcttctacggtcggttgg

SEQ ID NO: 2460603 - DNA, 25 bp, Homo sapien
tggcctctggggaactgactttgag

SEQ ID NO: 2460604 - DNA, 25 bp, Homo sapien
acatcatgggaaagaaccttgcctt

SEQ ID NO: 2460605 - DNA, 25 bp, Homo sapien
tctggggaactgactttgagccatg

SEQ ID NO: 2460606 - DNA, 25 bp, Homo sapien
catcatgggaaagaaccttgccttg

SEQ ID NO: 2460607 - DNA, 25 bp, Homo sapien
cccacttctgcagtaccccagatca

SEQ ID NO: 2460608 - DNA, 25 bp, Homo sapien
acccacttctgcagtaccccagatc

SEQ ID NO: 2460609 - DNA, 25 bp, Homo sapien
acttctgcagtaccccagatcatca

SEQ ID NO: 2460610 - DNA, 25 bp, Homo sapien
gcaattacgctgaaaaatagtcatt

SEQ ID NO: 2460611 - DNA, 25 bp, Homo sapien
gatgacagcagcaattacgctgaaa

SEQ ID NO: 2460612 - DNA, 25 bp, Homo sapien
gtaagatgacagcagcaattacgct

SEQ ID NO: 2460613 - DNA, 25 bp, Homo sapien
gaaaaatagtcattcccatagtttg

SEQ ID NO: 2460614 - DNA, 25 bp, Homo sapien
cctctagaggaatgttcatcctgac

SEQ ID NO: 2460615 - DNA, 25 bp, Homo sapien
tcacagtatgcatagcctctaggtg

SEQ ID NO: 2460616 - DNA, 25 bp, Homo sapien
aatcacagtatgcatagcctctagg

SEQ ID NO: 2460617 - DNA, 25 bp, Homo sapien
acagtatgcatagcctctaggtggt

SEQ ID NO: 2460618 - DNA, 25 bp, Homo sapien
ttggcctcccatccaactattgctt

SEQ ID NO: 2460619 - DNA, 25 bp, Homo sapien
cctcccatccaactattgcttctta

SEQ ID NO: 2460620 - DNA, 25 bp, Homo sapien
ggcctcccatccaactattgcttct

SEQ ID NO: 2460621 - DNA, 25 bp, Homo sapien
cttggcctcccatccaactattgct

SEQ ID NO: 2460622 - DNA, 25 bp, Homo sapien
gagcagattttttcagaggagggac

SEQ ID NO: 2460623 - DNA, 25 bp, Homo sapien
agcagattttttcagaggagggact

SEQ ID NO: 2460624 - DNA, 25 bp, Homo sapien
ggacaatgtccatagccaataccat

SEQ ID NO: 2460625 - DNA, 25 bp, Homo sapien
ccatgggccccagatgaatcttcag

SEQ ID NO: 2460626 - DNA, 25 bp, Homo sapien
catcacactatggaaccgggctgaa

SEQ ID NO: 2460627 - DNA, 25 bp, Homo sapien
tggacacagcctgtatatgacacag

SEQ ID NO: 2460628 - DNA, 25 bp, Homo sapien
gtagtttactggacagaatctgtag

SEQ ID NO: 2460629 - DNA, 25 bp, Homo sapien
cagtagtttactggacagaatctgt

SEQ ID NO: 2460630 - DNA, 25 bp, Homo sapien
cagcagtagtttactggacagaatc

SEQ ID NO: 2460631 - DNA, 25 bp, Homo sapien
cttcagcagtagtttactggacaga

SEQ ID NO: 2460632 - DNA, 25 bp, Homo sapien
tcgaatccggcaggtaccccgagtc

SEQ ID NO: 2460633 - DNA, 25 bp, Homo sapien
caccagctggcggttacctcgaatc

SEQ ID NO: 2460634 - DNA, 25 bp, Homo sapien
cccgcgttggccaccagatgttggg

SEQ ID NO: 2460635 - DNA, 25 bp, Homo sapien
gcggttacctcgaatccggcaggta

SEQ ID NO: 2460636 - DNA, 25 bp, Homo sapien
tagcagtcaattcgtggatagaggc

SEQ ID NO: 2460637 - DNA, 25 bp, Homo sapien
tggacccagcctgtatctctagcag

SEQ ID NO: 2460638 - DNA, 25 bp, Homo sapien
tctgacacatacataggattgatcc

SEQ ID NO: 2460639 - DNA, 25 bp, Homo sapien
cattaattgcatggatactgcctgt

SEQ ID NO: 2460640 - DNA, 25 bp, Homo sapien
tccacacagccagtttctgacaaaa

SEQ ID NO: 2460641 - DNA, 25 bp, Homo sapien
gccagtttctgacaaaattatactg

SEQ ID NO: 2460642 - DNA, 25 bp, Homo sapien
aaattatactgtggctgcaggccca

SEQ ID NO: 2460643 - DNA, 25 bp, Homo sapien
tgcaggcccagtctccagtaggaat

SEQ ID NO: 2460644 - DNA, 25 bp, Homo sapien
acacagactgtatctgatatactta

SEQ ID NO: 2460645 - DNA, 25 bp, Homo sapien
gacacagactgtatctgatatactt

SEQ ID NO: 2460646 - DNA, 25 bp, Homo sapien
ggagcattgcacaaagccctatgtc

SEQ ID NO: 2460647 - DNA, 25 bp, Homo sapien
cagggagtgacatggcttagccatg

SEQ ID NO: 2460648 - DNA, 25 bp, Homo sapien
tatgtcttcagccaagtgcaccctt

SEQ ID NO: 2460649 - DNA, 25 bp, Homo sapien
gagcacctttggtgtgccagcgaca

SEQ ID NO: 2460650 - DNA, 25 bp, Homo sapien
tgcttccatgtccctttcagtctct

SEQ ID NO: 2460651 - DNA, 25 bp, Homo sapien
ctctgcttccatgtccctttcagtc

SEQ ID NO: 2460652 - DNA, 25 bp, Homo sapien
tctgcttccatgtccctttcagtct

SEQ ID NO: 2460653 - DNA, 25 bp, Homo sapien
cttccatgtccctttcagtctctac

SEQ ID NO: 2460654 - DNA, 25 bp, Homo sapien
ctctacaaatgccttggcttttacc

SEQ ID NO: 2460655 - DNA, 25 bp, Homo sapien
actgccagtgcttttcggccacact

SEQ ID NO: 2460656 - DNA, 25 bp, Homo sapien
ttttacctccactgccagtgctttt

SEQ ID NO: 2460657 - DNA, 25 bp, Homo sapien
aatgccttggcttttacctccactg

SEQ ID NO: 2460658 - DNA, 25 bp, Homo sapien
agactcgacctcagaaatcccgcca

SEQ ID NO: 2460659 - DNA, 25 bp, Homo sapien
ctcgacctcagaaatcccgccaaaa

SEQ ID NO: 2460660 - DNA, 25 bp, Homo sapien
actcgacctcagaaatcccgccaaa

SEQ ID NO: 2460661 - DNA, 25 bp, Homo sapien
tcgacctcagaaatcccgccaaaac

SEQ ID NO: 2460662 - DNA, 25 bp, Homo sapien
cttcctgcggccagtaacctggatg

SEQ ID NO: 2460663 - DNA, 25 bp, Homo sapien
gcggccagtaacctggatggctgtg

SEQ ID NO: 2460664 - DNA, 25 bp, Homo sapien
cggccagtaacctggatggctgtgt

SEQ ID NO: 2460665 - DNA, 25 bp, Homo sapien
ttcctgcggccagtaacctggatgg

SEQ ID NO: 2460666 - DNA, 25 bp, Homo sapien
ttgctctgtgccccggctgtcttct

SEQ ID NO: 2460667 - DNA, 25 bp, Homo sapien
ccaaggtcgcgtccttgctctgtgc

SEQ ID NO: 2460668 - DNA, 25 bp, Homo sapien
tccaaggtcgcgtccttgctctgtg

SEQ ID NO: 2460669 - DNA, 25 bp, Homo sapien
cactcagggcaactcagattgggaa

SEQ ID NO: 2460670 - DNA, 25 bp, Homo sapien
taccagcgcatttggagctcatgca

SEQ ID NO: 2460671 - DNA, 25 bp, Homo sapien
tgtctacaatggaccggcatgccgt

SEQ ID NO: 2460672 - DNA, 25 bp, Homo sapien
gatgccaggtctagtttcggagcta

SEQ ID NO: 2460673 - DNA, 25 bp, Homo sapien
ctatgtgtcctagctccaggaccca

SEQ ID NO: 2460674 - DNA, 25 bp, Homo sapien
tatgtgtcctagctccaggacccac

SEQ ID NO: 2460675 - DNA, 25 bp, Homo sapien
ttctaggggactcattccagttaaa

SEQ ID NO: 2460676 - DNA, 25 bp, Homo sapien
tctaggggactcattccagttaaaa

SEQ ID NO: 2460677 - DNA, 25 bp, Homo sapien
catcttcaagaagtggaggtcctcc

SEQ ID NO: 2460678 - DNA, 25 bp, Homo sapien
taggggactcattccagttaaaaga

SEQ ID NO: 2460679 - DNA, 25 bp, Homo sapien
cttttccagggtattagcattcatg

SEQ ID NO: 2460680 - DNA, 25 bp, Homo sapien
aagagtctcgatgatttgacttttc

SEQ ID NO: 2460681 - DNA, 25 bp, Homo sapien
ttagaagagtctcgatgatttgact

SEQ ID NO: 2460682 - DNA, 25 bp, Homo sapien
acttttccagggtattagcattcat

SEQ ID NO: 2460683 - DNA, 25 bp, Homo sapien
ggaagcctgggatcattgtaacaaa

SEQ ID NO: 2460684 - DNA, 25 bp, Homo sapien
tgggacagcccatcagggaagacat

SEQ ID NO: 2460685 - DNA, 25 bp, Homo sapien
gattccctgtgtagcggcctctctt

SEQ ID NO: 2460686 - DNA, 25 bp, Homo sapien
aaactgagccccaagtggtagccgg

SEQ ID NO: 2460687 - DNA, 25 bp, Homo sapien
tcaggtaggagctgtacggcctgca

SEQ ID NO: 2460688 - DNA, 25 bp, Homo sapien
gcagtggaatgagacatcccgtatc

SEQ ID NO: 2460689 - DNA, 25 bp, Homo sapien
acaaccactagactgcagtggaatg

SEQ ID NO: 2460690 - DNA, 25 bp, Homo sapien
ccttcatgatcccacaaccactaga

SEQ ID NO: 2460691 - DNA, 25 bp, Homo sapien
cattgtggaagtagagactgtgata

SEQ ID NO: 2460692 - DNA, 25 bp, Homo sapien
tgtggaagtagagactgtgataaaa

SEQ ID NO: 2460693 - DNA, 25 bp, Homo sapien
ggaagtagagactgtgataaaagga

SEQ ID NO: 2460694 - DNA, 25 bp, Homo sapien
tggaagtagagactgtgataaaagg

SEQ ID NO: 2460695 - DNA, 25 bp, Homo sapien
tgtgtgaggcgactacttgctcggc

SEQ ID NO: 2460696 - DNA, 25 bp, Homo sapien
tgacctgttagctggggtgaagcat

SEQ ID NO: 2460697 - DNA, 25 bp, Homo sapien
cgactacttgctcggcgtttctgag

SEQ ID NO: 2460698 - DNA, 25 bp, Homo sapien
tgaggcgactacttgctcggcgttt

SEQ ID NO: 2460699 - DNA, 25 bp, Homo sapien
ggggtgcacgtgtccaccccaggca

SEQ ID NO: 2460700 - DNA, 25 bp, Homo sapien
ctgaggggtgcacgtgtccacccca

SEQ ID NO: 2460701 - DNA, 25 bp, Homo sapien
gaggggtgcacgtgtccaccccagg

SEQ ID NO: 2460702 - DNA, 25 bp, Homo sapien
ggtgcacgtgtccaccccaggcaac

SEQ ID NO: 2460703 - DNA, 25 bp, Homo sapien
gcctgggacattcacgtagccgagc

SEQ ID NO: 2460704 - DNA, 25 bp, Homo sapien
gacattcacgtagccgagctccaag

SEQ ID NO: 2460705 - DNA, 25 bp, Homo sapien
ggacattcacgtagccgagctccaa

SEQ ID NO: 2460706 - DNA, 25 bp, Homo sapien
tgggacattcacgtagccgagctcc

SEQ ID NO: 2460707 - DNA, 25 bp, Homo sapien
gcacccgtcaactctgggggcaact

SEQ ID NO: 2460708 - DNA, 25 bp, Homo sapien
ccggcacccgtcaactctgggggca

SEQ ID NO: 2460709 - DNA, 25 bp, Homo sapien
caactctgggggcaactccaggaga

SEQ ID NO: 2460710 - DNA, 25 bp, Homo sapien
tgggggcaactccaggagaggcctg

SEQ ID NO: 2460711 - DNA, 25 bp, Homo sapien
gatgccaaggccctggcttccagag

SEQ ID NO: 2460712 - DNA, 25 bp, Homo sapien
ggatgccaaggccctggcttccaga

SEQ ID NO: 2460713 - DNA, 25 bp, Homo sapien
ccgcggcccgccacgtggcacaagc

SEQ ID NO: 2460714 - DNA, 25 bp, Homo sapien
tccaccgcggcccgccacgtggcac

SEQ ID NO: 2460715 - DNA, 25 bp, Homo sapien
tcgcgtgtgccttaatccaccgcgg

SEQ ID NO: 2460716 - DNA, 25 bp, Homo sapien
ccacaattgcaaagggctcacagtt

SEQ ID NO: 2460717 - DNA, 25 bp, Homo sapien
ttctaggggactcattccagttaaa

SEQ ID NO: 2460718 - DNA, 25 bp, Homo sapien
tctaggggactcattccagttaaaa

SEQ ID NO: 2460719 - DNA, 25 bp, Homo sapien
taggggactcattccagttaaaaga

SEQ ID NO: 2460720 - DNA, 25 bp, Homo sapien
catcttcaagaagtggaggtcctcc

SEQ ID NO: 2460721 - DNA, 25 bp, Homo sapien
cttttccagggtattagcattcatg

SEQ ID NO: 2460722 - DNA, 25 bp, Homo sapien
acttttccagggtattagcattcat

SEQ ID NO: 2460723 - DNA, 25 bp, Homo sapien
aagagtctcgatgatttgacttttc

SEQ ID NO: 2460724 - DNA, 25 bp, Homo sapien
ttagaagagtctcgatgatttgact

SEQ ID NO: 2460725 - DNA, 25 bp, Homo sapien
ggaagcctgggatcattgtaacaaa

SEQ ID NO: 2460726 - DNA, 25 bp, Homo sapien
tgggacagcccatcagggaagacat

SEQ ID NO: 2460727 - DNA, 25 bp, Homo sapien
gattccctgtgtagcggcctctctt

SEQ ID NO: 2460728 - DNA, 25 bp, Homo sapien
aaactgagccccaagtggtagccgg

SEQ ID NO: 2460729 - DNA, 25 bp, Homo sapien
ccttcatgatcccacaaccactaga

SEQ ID NO: 2460730 - DNA, 25 bp, Homo sapien
tcaggtaggagctgtacggcctgca

SEQ ID NO: 2460731 - DNA, 25 bp, Homo sapien
gcagtggaatgagacatcccgtatc

SEQ ID NO: 2460732 - DNA, 25 bp, Homo sapien
acaaccactagactgcagtggaatg

SEQ ID NO: 2460733 - DNA, 25 bp, Homo sapien
tgctgccggtacccggaagagttgc

SEQ ID NO: 2460734 - DNA, 25 bp, Homo sapien
ctgctgccggtacccggaagagttg

SEQ ID NO: 2460735 - DNA, 25 bp, Homo sapien
cctgctgccggtacccggaagagtt

SEQ ID NO: 2460736 - DNA, 25 bp, Homo sapien
ctgccggtacccggaagagttgctt

SEQ ID NO: 2460737 - DNA, 25 bp, Homo sapien
tgaggcgactacttgctcggcgttt

SEQ ID NO: 2460738 - DNA, 25 bp, Homo sapien
tgtgtgaggcgactacttgctcggc

SEQ ID NO: 2460739 - DNA, 25 bp, Homo sapien
tgacctgttagctggggtgaagcat

SEQ ID NO: 2460740 - DNA, 25 bp, Homo sapien
cgactacttgctcggcgtttctgag

SEQ ID NO: 2460741 - DNA, 25 bp, Homo sapien
ctgaggggtgcacgtgtccacccca

SEQ ID NO: 2460742 - DNA, 25 bp, Homo sapien
ggggtgcacgtgtccaccccaggca

SEQ ID NO: 2460743 - DNA, 25 bp, Homo sapien
gaggggtgcacgtgtccaccccagg

SEQ ID NO: 2460744 - DNA, 25 bp, Homo sapien
ggtgcacgtgtccaccccaggcaac

SEQ ID NO: 2460745 - DNA, 25 bp, Homo sapien
taagctgccctcctatccgcatgag

SEQ ID NO: 2460746 - DNA, 25 bp, Homo sapien
atgagcctgttctcagttccccttg

SEQ ID NO: 2460747 - DNA, 25 bp, Homo sapien
ctgaatcctggctgaccgccagtgc

SEQ ID NO: 2460748 - DNA, 25 bp, Homo sapien
ctgttctcagttccccttgttgtcc

SEQ ID NO: 2460749 - DNA, 25 bp, Homo sapien
gcacccgtcaactctgggggcaact

SEQ ID NO: 2460750 - DNA, 25 bp, Homo sapien
ccggcacccgtcaactctgggggca

SEQ ID NO: 2460751 - DNA, 25 bp, Homo sapien
tgggggcaactccaggagaggcctg

SEQ ID NO: 2460752 - DNA, 25 bp, Homo sapien
caactctgggggcaactccaggaga

SEQ ID NO: 2460753 - DNA, 25 bp, Homo sapien
gatgccaaggccctggcttccagag

SEQ ID NO: 2460754 - DNA, 25 bp, Homo sapien
ggatgccaaggccctggcttccaga

SEQ ID NO: 2460755 - DNA, 25 bp, Homo sapien
tcgcgtgtgccttaatccaccgcgg

SEQ ID NO: 2460756 - DNA, 25 bp, Homo sapien
ccgcggcccgccacgtggcacaagc

SEQ ID NO: 2460757 - DNA, 25 bp, Homo sapien
tccaccgcggcccgccacgtggcac

SEQ ID NO: 2460758 - DNA, 25 bp, Homo sapien
ccacaattgcaaagggctcacagtt

SEQ ID NO: 2460759 - DNA, 25 bp, Homo sapien
cttttccagggtattagcattcatg

SEQ ID NO: 2460760 - DNA, 25 bp, Homo sapien
aagagtctcgatgatttgacttttc

SEQ ID NO: 2460761 - DNA, 25 bp, Homo sapien
ttagaagagtctcgatgatttgact

SEQ ID NO: 2460762 - DNA, 25 bp, Homo sapien
acttttccagggtattagcattcat

SEQ ID NO: 2460763 - DNA, 25 bp, Homo sapien
ggccctgccggacccacatgctgtc

SEQ ID NO: 2460764 - DNA, 25 bp, Homo sapien
tgccggacccacatgctgtcctctc

SEQ ID NO: 2460765 - DNA, 25 bp, Homo sapien
gactcaggccctgccggacccacat

SEQ ID NO: 2460766 - DNA, 25 bp, Homo sapien
ttagggagaatgccaccctccctgg

SEQ ID NO: 2460767 - DNA, 25 bp, Homo sapien
cagggattcccgaatagcgaatccc

SEQ ID NO: 2460768 - DNA, 25 bp, Homo sapien
ttcccgaatagcgaatcccaaagcc

SEQ ID NO: 2460769 - DNA, 25 bp, Homo sapien
cacagggattcccgaatagcgaatc

SEQ ID NO: 2460770 - DNA, 25 bp, Homo sapien
tgcacagggattcccgaatagcgaa

SEQ ID NO: 2460771 - DNA, 25 bp, Homo sapien
tcaggtcatagttcaaagccagttc

SEQ ID NO: 2460772 - DNA, 25 bp, Homo sapien
tcatagttcaaagccagttcccaag

SEQ ID NO: 2460773 - DNA, 25 bp, Homo sapien
ctctctgaggacctaatccttaggt

SEQ ID NO: 2460774 - DNA, 25 bp, Homo sapien
cctaatccttaggtagtgctgcagg

SEQ ID NO: 2460775 - DNA, 25 bp, Homo sapien
ctgagtggtcacagtcagccaacta

SEQ ID NO: 2460776 - DNA, 25 bp, Homo sapien
tgagtggtcacagtcagccaactag

SEQ ID NO: 2460777 - DNA, 25 bp, Homo sapien
gatgtgaacacgatattccttaatg

SEQ ID NO: 2460778 - DNA, 25 bp, Homo sapien
ttaatgatcactttattgtggaaat

SEQ ID NO: 2460779 - DNA, 25 bp, Homo sapien
caaggatgtgaacacgatattcctt

SEQ ID NO: 2460780 - DNA, 25 bp, Homo sapien
tgtgaacacgatattccttaatgat

SEQ ID NO: 2460781 - DNA, 25 bp, Homo sapien
tgtttggcagggctatcccaaaacc

SEQ ID NO: 2460782 - DNA, 25 bp, Homo sapien
tccatcctgtagcttacttagcagg

SEQ ID NO: 2460783 - DNA, 25 bp, Homo sapien
tggtttctgaactctgccgacatgt

SEQ ID NO: 2460784 - DNA, 25 bp, Homo sapien
ccgacatgtaggtgtgctgcacaat

SEQ ID NO: 2460785 - DNA, 25 bp, Homo sapien
tggtggtcttgtgggagggtggagg

SEQ ID NO: 2460786 - DNA, 25 bp, Homo sapien
gttgtggtggtcttgtgggagggtg

SEQ ID NO: 2460787 - DNA, 25 bp, Homo sapien
gtagtggttgtggtggtcttgtggg

SEQ ID NO: 2460788 - DNA, 25 bp, Homo sapien
ggtagtggttgtggtggtcttgtgg

SEQ ID NO: 2460789 - DNA, 25 bp, Homo sapien
ccacgtccagataagtatatcctta

SEQ ID NO: 2460790 - DNA, 25 bp, Homo sapien
actgtccactccacgtccagataag

SEQ ID NO: 2460791 - DNA, 25 bp, Homo sapien
gaccatgccatgatgttgtccacca

SEQ ID NO: 2460792 - DNA, 25 bp, Homo sapien
ccaagagtgccttcgaactctgcgc

SEQ ID NO: 2460793 - DNA, 25 bp, Homo sapien
gtatatttaaagaatttgtacatgg

SEQ ID NO: 2460794 - DNA, 25 bp, Homo sapien
tgtatatttaaagaatttgtacatg

SEQ ID NO: 2460795 - DNA, 25 bp, Homo sapien
tttgtatatttaaagaatttgtaca

SEQ ID NO: 2460796 - DNA, 25 bp, Homo sapien
ttgtatatttaaagaatttgtacat

SEQ ID NO: 2460797 - DNA, 25 bp, Homo sapien
agcagcaataaggtccgataaggaa

SEQ ID NO: 2460798 - DNA, 25 bp, Homo sapien
gcagcaataaggtccgataaggaaa

SEQ ID NO: 2460799 - DNA, 25 bp, Homo sapien
cagcaataaggtccgataaggaaaa

SEQ ID NO: 2460800 - DNA, 25 bp, Homo sapien
tcaaccttgcatttgcctatgtcgt

SEQ ID NO: 2460801 - DNA, 25 bp, Homo sapien
agacagaagagccatctccagcgac

SEQ ID NO: 2460802 - DNA, 25 bp, Homo sapien
cagactctttcaggagtggagacag

SEQ ID NO: 2460803 - DNA, 25 bp, Homo sapien
cacagactctttcaggagtggagac

SEQ ID NO: 2460804 - DNA, 25 bp, Homo sapien
agactctattccaatccccgtcgga

SEQ ID NO: 2460805 - DNA, 25 bp, Homo sapien
tcacataggggtgagcatacaatct

SEQ ID NO: 2460806 - DNA, 25 bp, Homo sapien
gttcacataggggtgagcatacaat

SEQ ID NO: 2460807 - DNA, 25 bp, Homo sapien
acataggggtgagcatacaatctgg

SEQ ID NO: 2460808 - DNA, 25 bp, Homo sapien
taagttcacataggggtgagcatac

SEQ ID NO: 2460809 - DNA, 25 bp, Homo sapien
caaatgcatctctgcattcccttaa

SEQ ID NO: 2460810 - DNA, 25 bp, Homo sapien
gtgtgcaccatgaccctgtgttcac

SEQ ID NO: 2460811 - DNA, 25 bp, Homo sapien
ttcccttaattgcaccagcagtgtg

SEQ ID NO: 2460812 - DNA, 25 bp, Homo sapien
taattgcaccagcagtgtgcaccat

SEQ ID NO: 2460813 - DNA, 25 bp, Homo sapien
ctgggagtactccaacgtgcaggga

SEQ ID NO: 2460814 - DNA, 25 bp, Homo sapien
tccaacgtgcagggaacatttggtg

SEQ ID NO: 2460815 - DNA, 25 bp, Homo sapien
acgtgcagggaacatttggtgtgca

SEQ ID NO: 2460816 - DNA, 25 bp, Homo sapien
caacgtgcagggaacatttggtgtg

SEQ ID NO: 2460817 - DNA, 25 bp, Homo sapien
aaatgggagtgagatgcattgacgc

SEQ ID NO: 2460818 - DNA, 25 bp, Homo sapien
gagatgcattgacgctgggtgggat

SEQ ID NO: 2460819 - DNA, 25 bp, Homo sapien
ccatagccaaatgggagtgagatgc

SEQ ID NO: 2460820 - DNA, 25 bp, Homo sapien
cattcccatagccaaatgggagtga

SEQ ID NO: 2460821 - DNA, 25 bp, Homo sapien
atatattccaaacttcacgggacct

SEQ ID NO: 2460822 - DNA, 25 bp, Homo sapien
aatacagcctctttcggagaaagag

SEQ ID NO: 2460823 - DNA, 25 bp, Homo sapien
gagaaagcctgaacgtgctttgagg

SEQ ID NO: 2460824 - DNA, 25 bp, Homo sapien
aaagcctgaacgtgctttgaggttg

SEQ ID NO: 2460825 - DNA, 25 bp, Homo sapien
tgccgcgttgcatgtttctgttaca

SEQ ID NO: 2460826 - DNA, 25 bp, Homo sapien
tctgttacagtgttgtgactcttgg

SEQ ID NO: 2460827 - DNA, 25 bp, Homo sapien
cacagcttcaggatctgccgcgttg

SEQ ID NO: 2460828 - DNA, 25 bp, Homo sapien
cactggagttgctctctctcgggta

SEQ ID NO: 2460829 - DNA, 25 bp, Homo sapien
gggcactccatcatcctggtatttc

SEQ ID NO: 2460830 - DNA, 25 bp, Homo sapien
gagggggcactccatcatcctggta

SEQ ID NO: 2460831 - DNA, 25 bp, Homo sapien
gggggcactccatcatcctggtatt

SEQ ID NO: 2460832 - DNA, 25 bp, Homo sapien
gcactccatcatcctggtatttcat

SEQ ID NO: 2460833 - DNA, 25 bp, Homo sapien
atggtagctacgatggtggtaatcc

SEQ ID NO: 2460834 - DNA, 25 bp, Homo sapien
ctacgatggtggtaatccccttggt

SEQ ID NO: 2460835 - DNA, 25 bp, Homo sapien
tagctacgatggtggtaatcccctt

SEQ ID NO: 2460836 - DNA, 25 bp, Homo sapien
ggtagctacgatggtggtaatcccc

SEQ ID NO: 2460837 - DNA, 25 bp, Homo sapien
agctgtcatcacgggcctcatagcg

SEQ ID NO: 2460838 - DNA, 25 bp, Homo sapien
atagcggtcacagctatagctgctg

SEQ ID NO: 2460839 - DNA, 25 bp, Homo sapien
gtcatcacgggcctcatagcggtca

SEQ ID NO: 2460840 - DNA, 25 bp, Homo sapien
acgggcctcatagcggtcacagcta

SEQ ID NO: 2460841 - DNA, 25 bp, Homo sapien
ggttcttgcttatctgagagagccc

SEQ ID NO: 2460842 - DNA, 25 bp, Homo sapien
gtgcattggcggtggactctcccct

SEQ ID NO: 2460843 - DNA, 25 bp, Homo sapien
ctcggaggtgcattggcggtggact

SEQ ID NO: 2460844 - DNA, 25 bp, Homo sapien
tgcattggcggtggactctcccctg

SEQ ID NO: 2460845 - DNA, 25 bp, Homo sapien
ctgctcggaggtgcattggcggtgg

SEQ ID NO: 2460846 - DNA, 25 bp, Homo sapien
cagccttgaagaaatatcaaccatg

SEQ ID NO: 2460847 - DNA, 25 bp, Homo sapien
gatacaatctgctgaatggagaatg

SEQ ID NO: 2460848 - DNA, 25 bp, Homo sapien
ttcacatcatgagggatgcacttct

SEQ ID NO: 2460849 - DNA, 25 bp, Homo sapien
tctgctgaatggagaatgggttcca

SEQ ID NO: 2460850 - DNA, 25 bp, Homo sapien
tcccagctgcgcacatgcttcacat

SEQ ID NO: 2460851 - DNA, 25 bp, Homo sapien
atgggatagtcccgtgatcccagga

SEQ ID NO: 2460852 - DNA, 25 bp, Homo sapien
tgggatagtcccgtgatcccaggag

SEQ ID NO: 2460853 - DNA, 25 bp, Homo sapien
catgggatagtcccgtgatcccagg

SEQ ID NO: 2460854 - DNA, 25 bp, Homo sapien
ccatgggatagtcccgtgatcccag

SEQ ID NO: 2460855 - DNA, 25 bp, Homo sapien
attcaggtcccagccaagcagttgg

SEQ ID NO: 2460856 - DNA, 25 bp, Homo sapien
gttggttcacatcataagggggcaa

SEQ ID NO: 2460857 - DNA, 25 bp, Homo sapien
gccaagcagttggttcacatcataa

SEQ ID NO: 2460858 - DNA, 25 bp, Homo sapien
gggcaatactccatcgtcttgggtt

SEQ ID NO: 2460859 - DNA, 25 bp, Homo sapien
gtgagcaacaataaggtcagacagg

SEQ ID NO: 2460860 - DNA, 25 bp, Homo sapien
tttgggacatagagtgtgagcaaca

SEQ ID NO: 2460861 - DNA, 25 bp, Homo sapien
ggtcagacaggggtgaggatacaat

SEQ ID NO: 2460862 - DNA, 25 bp, Homo sapien
taaggtcagacaggggtgaggatac

SEQ ID NO: 2460863 - DNA, 25 bp, Homo sapien
tgggaattggatgagatcccacaac

SEQ ID NO: 2460864 - DNA, 25 bp, Homo sapien
ggaattggatgagatcccacaactt

SEQ ID NO: 2460865 - DNA, 25 bp, Homo sapien
attggatgagatcccacaacttcaa

SEQ ID NO: 2460866 - DNA, 25 bp, Homo sapien
ctggtgggaattggatgagatccca

SEQ ID NO: 2460867 - DNA, 25 bp, Homo sapien
gacagactatatgccaatcaccatg

SEQ ID NO: 2460868 - DNA, 25 bp, Homo sapien
cagacagactatatgccaatcacca

SEQ ID NO: 2460869 - DNA, 25 bp, Homo sapien
agacagactatatgccaatcaccat

SEQ ID NO: 2460870 - DNA, 25 bp, Homo sapien
agcctctttcaggaatagagccaga

SEQ ID NO: 2460871 - DNA, 25 bp, Homo sapien
ccagaagagtagtttccagcgacca

SEQ ID NO: 2460872 - DNA, 25 bp, Homo sapien
accacctcacagtcctgaagtgcct

SEQ ID NO: 2460873 - DNA, 25 bp, Homo sapien
ccacctcacagtcctgaagtgcctc

SEQ ID NO: 2460874 - DNA, 25 bp, Homo sapien
tttggctctgcttgggctctggggc

SEQ ID NO: 2460875 - DNA, 25 bp, Homo sapien
ctgtttggctctgcttgggctctgg

SEQ ID NO: 2460876 - DNA, 25 bp, Homo sapien
ttggctctgcttgggctctggggct

SEQ ID NO: 2460877 - DNA, 25 bp, Homo sapien
gctctgcttgggctctggggctcca

SEQ ID NO: 2460878 - DNA, 25 bp, Homo sapien
tcccatgggacttgattcttacaca

SEQ ID NO: 2460879 - DNA, 25 bp, Homo sapien
acagcctctttcagccatggagtga

SEQ ID NO: 2460880 - DNA, 25 bp, Homo sapien
gtttcccgcgtcctcctcacagtct

SEQ ID NO: 2460881 - DNA, 25 bp, Homo sapien
tgagaaaagcagtttcccgcgtcct

SEQ ID NO: 2460882 - DNA, 25 bp, Homo sapien
aaagctctcaaatcgggagtgtacc

SEQ ID NO: 2460883 - DNA, 25 bp, Homo sapien
tcgggagtgtaccaggatggcctca

SEQ ID NO: 2460884 - DNA, 25 bp, Homo sapien
gaatactctcacctgaacaccgggc

SEQ ID NO: 2460885 - DNA, 25 bp, Homo sapien
tgttggaatactctcacctgaacac

SEQ ID NO: 2460886 - DNA, 25 bp, Homo sapien
ttagaaattcttcaactgagaggcc

SEQ ID NO: 2460887 - DNA, 25 bp, Homo sapien
cctgttgacgtatgtggccttttcc

SEQ ID NO: 2460888 - DNA, 25 bp, Homo sapien
catccaatcaattagaagaccctca

SEQ ID NO: 2460889 - DNA, 25 bp, Homo sapien
aattcttcaactgagaggccatcca

SEQ ID NO: 2460890 - DNA, 25 bp, Homo sapien
tctcctattggaactgtatatgtga

SEQ ID NO: 2460891 - DNA, 25 bp, Homo sapien
ggcattgttatctgacgtatggttg

SEQ ID NO: 2460892 - DNA, 25 bp, Homo sapien
ttcttcatctcctattggaactgta

SEQ ID NO: 2460893 - DNA, 25 bp, Homo sapien
agtaatgggcattgttatctgacgt

SEQ ID NO: 2460894 - DNA, 25 bp, Homo sapien
acagtccggttgttctagggtcatg

SEQ ID NO: 2460895 - DNA, 25 bp, Homo sapien
ctccactacagtccggttgttctag

SEQ ID NO: 2460896 - DNA, 25 bp, Homo sapien
gactgatggtgattgaccagggtat

SEQ ID NO: 2460897 - DNA, 25 bp, Homo sapien
ctggttgactgatggtgattgacca

SEQ ID NO: 2460898 - DNA, 25 bp, Homo sapien
aacaagagtgttacattcctttagc

SEQ ID NO: 2460899 - DNA, 25 bp, Homo sapien
tagggcatcttggagctaattatgt

SEQ ID NO: 2460900 - DNA, 25 bp, Homo sapien
gggtgaaagttgcagcccaagacac

SEQ ID NO: 2460901 - DNA, 25 bp, Homo sapien
gcaagctccttaatagggatcctaa

SEQ ID NO: 2460902 - DNA, 25 bp, Homo sapien
catgctgtcggctttcaccaaccaa

SEQ ID NO: 2460903 - DNA, 25 bp, Homo sapien
cccagtggccatattcagagaattc

SEQ ID NO: 2460904 - DNA, 25 bp, Homo sapien
tgcctgggctactggctggtacaat

SEQ ID NO: 2460905 - DNA, 25 bp, Homo sapien
ggaaatgtgatggtagaacagcccc

SEQ ID NO: 2460906 - DNA, 25 bp, Homo sapien
tagttgatagcaacatctggtgaag

SEQ ID NO: 2460907 - DNA, 25 bp, Homo sapien
agttgatagcaacatctggtgaagc

SEQ ID NO: 2460908 - DNA, 25 bp, Homo sapien
atctagttgatagcaacatctggtg

SEQ ID NO: 2460909 - DNA, 25 bp, Homo sapien
atctggtgaagccatcctctttcct

SEQ ID NO: 2460910 - DNA, 25 bp, Homo sapien
aatacatccttttgataaaaggctg

SEQ ID NO: 2460911 - DNA, 25 bp, Homo sapien
cattaattccagtgtaccttcctta

SEQ ID NO: 2460912 - DNA, 25 bp, Homo sapien
ccttccttattacctgagcctgtgg

SEQ ID NO: 2460913 - DNA, 25 bp, Homo sapien
ggaagtagtaattgagccagacagc

SEQ ID NO: 2460914 - DNA, 25 bp, Homo sapien
tgcaccaagatctgctaaagctctg

SEQ ID NO: 2460915 - DNA, 25 bp, Homo sapien
cattttcctaacgttctggctggca

SEQ ID NO: 2460916 - DNA, 25 bp, Homo sapien
tgcgaatctggtgcaacagggtcca

SEQ ID NO: 2460917 - DNA, 25 bp, Homo sapien
tacatttaccgcagttcacgaggtc

SEQ ID NO: 2460918 - DNA, 25 bp, Homo sapien
aagttggcgttcgtagacctggaag

SEQ ID NO: 2460919 - DNA, 25 bp, Homo sapien
tctaaagcagccgatgttgaacacg

SEQ ID NO: 2460920 - DNA, 25 bp, Homo sapien
cagaaaaggtggcatcacctgcacc

SEQ ID NO: 2460921 - DNA, 25 bp, Homo sapien
aacgcaggtctcgtcctctaaagca

SEQ ID NO: 2460922 - DNA, 25 bp, Homo sapien
cgatgttgaacacgtgggagcctcc

SEQ ID NO: 2460923 - DNA, 25 bp, Homo sapien
tcatgtgtcccgtactggctgctgg

SEQ ID NO: 2460924 - DNA, 25 bp, Homo sapien
atgtgtcccgtactggctgctggca

SEQ ID NO: 2460925 - DNA, 25 bp, Homo sapien
tgtcccgtactggctgctggcagaa

SEQ ID NO: 2460926 - DNA, 25 bp, Homo sapien
tgtgtcccgtactggctgctggcag

SEQ ID NO: 2460927 - DNA, 25 bp, Homo sapien
gcccattaaacaccacaatattttc

SEQ ID NO: 2460928 - DNA, 25 bp, Homo sapien
tggtttacttccaagaatctatttg

SEQ ID NO: 2460929 - DNA, 25 bp, Homo sapien
tttacttctcattataggcaatttc

SEQ ID NO: 2460930 - DNA, 25 bp, Homo sapien
catcgagtacccatccttggtttac

SEQ ID NO: 2460931 - DNA, 25 bp, Homo sapien
tcacttatagggtgtctggtcaaca

SEQ ID NO: 2460932 - DNA, 25 bp, Homo sapien
cagtacattagttctagtgatgtgg

SEQ ID NO: 2460933 - DNA, 25 bp, Homo sapien
tcagtacattagttctagtgatgtg

SEQ ID NO: 2460934 - DNA, 25 bp, Homo sapien
cttcaatcagtacattagttctagt

SEQ ID NO: 2460935 - DNA, 25 bp, Homo sapien
caatcagtacattagttctagtgat

SEQ ID NO: 2460936 - DNA, 25 bp, Homo sapien
cagattgtgcttgacaagcattatc

SEQ ID NO: 2460937 - DNA, 25 bp, Homo sapien
ttgtgcttgacaagcattatcaaaa

SEQ ID NO: 2460938 - DNA, 25 bp, Homo sapien
gattgtgcttgacaagcattatcaa

SEQ ID NO: 2460939 - DNA, 25 bp, Homo sapien
tcagattgtgcttgacaagcattat

SEQ ID NO: 2460940 - DNA, 25 bp, Homo sapien
catgtttctgcccaatttgctcttc

SEQ ID NO: 2460941 - DNA, 25 bp, Homo sapien
aatcttgatatgctgagggtaagcc

SEQ ID NO: 2460942 - DNA, 25 bp, Homo sapien
cttttgacatgtttctgcccaattt

SEQ ID NO: 2460943 - DNA, 25 bp, Homo sapien
tcttgatatgctgagggtaagcctc

SEQ ID NO: 2460944 - DNA, 25 bp, Homo sapien
ccgtgtagaagatccaaatgggccc

SEQ ID NO: 2460945 - DNA, 25 bp, Homo sapien
gctccgggagctgcctaatgaatgc

SEQ ID NO: 2460946 - DNA, 25 bp, Homo sapien
gggaccggattcttgtacatagcct

SEQ ID NO: 2460947 - DNA, 25 bp, Homo sapien
aatgcacgtgcgctagtctcagggc

SEQ ID NO: 2460948 - DNA, 25 bp, Homo sapien
tgagcaggtgtttcacaacatgaag

SEQ ID NO: 2460949 - DNA, 25 bp, Homo sapien
ctgagcaggtgtttcacaacatgaa

SEQ ID NO: 2460950 - DNA, 25 bp, Homo sapien
agtggccctgaggtggagatttcta

SEQ ID NO: 2460951 - DNA, 25 bp, Homo sapien
gtacacaacctgaagtggccctgag

SEQ ID NO: 2460952 - DNA, 25 bp, Homo sapien
tcctccagtgggaccggtccacgta

SEQ ID NO: 2460953 - DNA, 25 bp, Homo sapien
cggtccacgtacacaacctgaagtg

SEQ ID NO: 2460954 - DNA, 25 bp, Homo sapien
ggatgcaagggatattcccatgacg

SEQ ID NO: 2460955 - DNA, 25 bp, Homo sapien
gggatgcaagggatattcccatgac

SEQ ID NO: 2460956 - DNA, 25 bp, Homo sapien
gacagcctagcgtgggcgcctccat

SEQ ID NO: 2460957 - DNA, 25 bp, Homo sapien
gacatctctgacagcctagcgtggg

SEQ ID NO: 2460958 - DNA, 25 bp, Homo sapien
gacccgaccacagagatgactcgaa

SEQ ID NO: 2460959 - DNA, 25 bp, Homo sapien
gactttttcccgatatcaggcaggc

SEQ ID NO: 2460960 - DNA, 25 bp, Homo sapien
ggatccacaggatgttctggttatc

SEQ ID NO: 2460961 - DNA, 25 bp, Homo sapien
aaggaggccaccgtagatgtgtact

SEQ ID NO: 2460962 - DNA, 25 bp, Homo sapien
tactggaagtacactttcacctgtc

SEQ ID NO: 2460963 - DNA, 25 bp, Homo sapien
caccgtagatgtgtactggaagtac

SEQ ID NO: 2460964 - DNA, 25 bp, Homo sapien
tgggatccaggggacagtcccatga

SEQ ID NO: 2460965 - DNA, 25 bp, Homo sapien
tctctgtgggatccaggggacagtc

SEQ ID NO: 2460966 - DNA, 25 bp, Homo sapien
gtcttctctgtgggatccaggggac

SEQ ID NO: 2460967 - DNA, 25 bp, Homo sapien
ggatccaggggacagtcccatgatc

SEQ ID NO: 2460968 - DNA, 25 bp, Homo sapien
ctgtatggctctgcttgggctgcag

SEQ ID NO: 2460969 - DNA, 25 bp, Homo sapien
gcttgggctgcagggctttgttttc

SEQ ID NO: 2460970 - DNA, 25 bp, Homo sapien
ttgggctgcagggctttgttttctt

SEQ ID NO: 2460971 - DNA, 25 bp, Homo sapien
ctgcttgggctgcagggctttgttt

SEQ ID NO: 2460972 - DNA, 25 bp, Homo sapien
cagtattaggtgattaggatgccag

SEQ ID NO: 2460973 - DNA, 25 bp, Homo sapien
gctaccagaatgttaggacactcaa

SEQ ID NO: 2460974 - DNA, 25 bp, Homo sapien
gcagcccaagcagagtcacacatat

SEQ ID NO: 2460975 - DNA, 25 bp, Homo sapien
aaaacatagaacactgcagcccaag

SEQ ID NO: 2460976 - DNA, 25 bp, Homo sapien
gagagagagcaactccagtgaacac

SEQ ID NO: 2460977 - DNA, 25 bp, Homo sapien
ctgagagagagcaactccagtgaac

SEQ ID NO: 2460978 - DNA, 25 bp, Homo sapien
tgagagagagcaactccagtgaaca

SEQ ID NO: 2460979 - DNA, 25 bp, Homo sapien
caaggggcacacggggacaaccagg

SEQ ID NO: 2460980 - DNA, 25 bp, Homo sapien
ggcacacggggacaaccaggaggca

SEQ ID NO: 2460981 - DNA, 25 bp, Homo sapien
gcccacagctgagatgtaagctttg

SEQ ID NO: 2460982 - DNA, 25 bp, Homo sapien
ccacagctgagatgtaagctttggc

SEQ ID NO: 2460983 - DNA, 25 bp, Homo sapien
ataggagccccatggacccttcact

SEQ ID NO: 2460984 - DNA, 25 bp, Homo sapien
aaacttgaagggcatgtttccatga

SEQ ID NO: 2460985 - DNA, 25 bp, Homo sapien
ttgaagggcatgtttccatgagaaa

SEQ ID NO: 2460986 - DNA, 25 bp, Homo sapien
agcagaaacttgaagggcatgtttc

SEQ ID NO: 2460987 - DNA, 25 bp, Homo sapien
ggattcgctattcgggaatccctgt

SEQ ID NO: 2460988 - DNA, 25 bp, Homo sapien
ttcgctattcgggaatccctgtgca

SEQ ID NO: 2460989 - DNA, 25 bp, Homo sapien
agggctttgggattcgctattcggg

SEQ ID NO: 2460990 - DNA, 25 bp, Homo sapien
ctttgggattcgctattcgggaatc

SEQ ID NO: 2460991 - DNA, 25 bp, Homo sapien
tggaggcacagcaccagctgaggga

SEQ ID NO: 2460992 - DNA, 25 bp, Homo sapien
gctgagggattcactctgccacagc

SEQ ID NO: 2460993 - DNA, 25 bp, Homo sapien
ctgagggattcactctgccacagct

SEQ ID NO: 2460994 - DNA, 25 bp, Homo sapien
cacagcaccagctgagggattcact

SEQ ID NO: 2460995 - DNA, 25 bp, Homo sapien
ttcagtaatatgcaggtaacaatgc

SEQ ID NO: 2460996 - DNA, 25 bp, Homo sapien
gatattacatctaaacacttttcaa

SEQ ID NO: 2460997 - DNA, 25 bp, Homo sapien
caaacaaggattggtatgcaataac

SEQ ID NO: 2460998 - DNA, 25 bp, Homo sapien
ctctctccacaaaaccaacatgttt

SEQ ID NO: 2460999 - DNA, 25 bp, Homo sapien
ccaccatctactatagatgccacat

SEQ ID NO: 2461000 - DNA, 25 bp, Homo sapien
acgaggatcagggagcaccctaccc

SEQ ID NO: 2461001 - DNA, 25 bp, Homo sapien
tatctgctcgagtctcctttttcag

SEQ ID NO: 2461002 - DNA, 25 bp, Homo sapien
gatcagggagcaccctacccagaga

SEQ ID NO: 2461003 - DNA, 25 bp, Homo sapien
gtattactatatgcgtggcaggtgc

SEQ ID NO: 2461004 - DNA, 25 bp, Homo sapien
tctcgtgtattactatatgcgtggc

SEQ ID NO: 2461005 - DNA, 25 bp, Homo sapien
cgtgtattactatatgcgtggcagg

SEQ ID NO: 2461006 - DNA, 25 bp, Homo sapien
ctatctcgtgtattactatatgcgt

SEQ ID NO: 2461007 - DNA, 25 bp, Homo sapien
ctaccaagggcctcaccgtagccat

SEQ ID NO: 2461008 - DNA, 25 bp, Homo sapien
gatctctaccaagggcctcaccgta

SEQ ID NO: 2461009 - DNA, 25 bp, Homo sapien
aagggcctcaccgtagccatcatga

SEQ ID NO: 2461010 - DNA, 25 bp, Homo sapien
ggcctcaccgtagccatcatgataa

SEQ ID NO: 2461011 - DNA, 25 bp, Homo sapien
catagtctctatgtggtggagcata

SEQ ID NO: 2461012 - DNA, 25 bp, Homo sapien
tggtttctcgggaacttggatgatt

SEQ ID NO: 2461013 - DNA, 25 bp, Homo sapien
cctggtttctcgggaacttggatga

SEQ ID NO: 2461014 - DNA, 25 bp, Homo sapien
gcataatccctggtttctcgggaac

SEQ ID NO: 2461015 - DNA, 25 bp, Homo sapien
ataactttcatgtcgacgagaatga

SEQ ID NO: 2461016 - DNA, 25 bp, Homo sapien
gaataactttcatgtcgacgagaat

SEQ ID NO: 2461017 - DNA, 25 bp, Homo sapien
aataactttcatgtcgacgagaatg

SEQ ID NO: 2461018 - DNA, 25 bp, Homo sapien
taactttcatgtcgacgagaatgac

SEQ ID NO: 2461019 - DNA, 25 bp, Homo sapien
tatccatggcctctagatggtggag

SEQ ID NO: 2461020 - DNA, 25 bp, Homo sapien
cataatcacggtatccatggcctct

SEQ ID NO: 2461021 - DNA, 25 bp, Homo sapien
cacggtatccatggcctctagatgg

SEQ ID NO: 2461022 - DNA, 25 bp, Homo sapien
ggtggagcatactccctagtttctc

SEQ ID NO: 2461023 - DNA, 25 bp, Homo sapien
tagaataactttcatcccgacgaga

SEQ ID NO: 2461024 - DNA, 25 bp, Homo sapien
tcctctagaataactttcatcccga

SEQ ID NO: 2461025 - DNA, 25 bp, Homo sapien
tgtatcctctagaataactttcatc

SEQ ID NO: 2461026 - DNA, 25 bp, Homo sapien
aactttcatcccgacgagaatgacc

SEQ ID NO: 2461027 - DNA, 25 bp, Homo sapien
tagaggaatgttcatcccgattaga

SEQ ID NO: 2461028 - DNA, 25 bp, Homo sapien
tctagaggaatgttcatcccgatta

SEQ ID NO: 2461029 - DNA, 25 bp, Homo sapien
gaggaatgttcatcccgattagaat

SEQ ID NO: 2461030 - DNA, 25 bp, Homo sapien
aggaatgttcatcccgattagaatg

SEQ ID NO: 2461031 - DNA, 25 bp, Homo sapien
cattatcacggtatgcatagcctct

SEQ ID NO: 2461032 - DNA, 25 bp, Homo sapien
ggtatgcatagcctctagatggtgg

SEQ ID NO: 2461033 - DNA, 25 bp, Homo sapien
ggagcataatccctcgtttcttggc

SEQ ID NO: 2461034 - DNA, 25 bp, Homo sapien
agcataatccctcgtttcttggcaa

SEQ ID NO: 2461035 - DNA, 25 bp, Homo sapien
tccaggaagatattgtcgctctgcg

SEQ ID NO: 2461036 - DNA, 25 bp, Homo sapien
tcttgttgacatgcgatcatttctc

SEQ ID NO: 2461037 - DNA, 25 bp, Homo sapien
ccatcatgtcttgttgacatgcgat

SEQ ID NO: 2461038 - DNA, 25 bp, Homo sapien
gctctgcgtggaggaactccataat

SEQ ID NO: 2461039 - DNA, 25 bp, Homo sapien
gaatgagtcccctagaataactcat

SEQ ID NO: 2461040 - DNA, 25 bp, Homo sapien
actggaatgagtcccctagaataac

SEQ ID NO: 2461041 - DNA, 25 bp, Homo sapien
ctcttttaactggaatgagtcccct

SEQ ID NO: 2461042 - DNA, 25 bp, Homo sapien
taactggaatgagtcccctagaata

SEQ ID NO: 2461043 - DNA, 25 bp, Homo sapien
tgagatcaggagtgtatccaccatc

SEQ ID NO: 2461044 - DNA, 25 bp, Homo sapien
cttgagatcaggagtgtatccacca

SEQ ID NO: 2461045 - DNA, 25 bp, Homo sapien
gagatcaggagtgtatccaccatca

SEQ ID NO: 2461046 - DNA, 25 bp, Homo sapien
agatcaggagtgtatccaccatcat

SEQ ID NO: 2461047 - DNA, 25 bp, Homo sapien
ttaagaaatttcaatatcgtcaaac

SEQ ID NO: 2461048 - DNA, 25 bp, Homo sapien
tttctttcagtcctatggttccatc

SEQ ID NO: 2461049 - DNA, 25 bp, Homo sapien
taagaaatttcaatatcgtcaaact

SEQ ID NO: 2461050 - DNA, 25 bp, Homo sapien
ctatggttccatctttatattttaa

SEQ ID NO: 2461051 - DNA, 25 bp, Homo sapien
ccaggtgcccttcttgtgagggaag

SEQ ID NO: 2461052 - DNA, 25 bp, Homo sapien
aagccaccctcttgttcctccacgg

SEQ ID NO: 2461053 - DNA, 25 bp, Homo sapien
ccctcttgttcctccacggcttcct

SEQ ID NO: 2461054 - DNA, 25 bp, Homo sapien
aggtgcccttcttgtgagggaagcc

SEQ ID NO: 2461055 - DNA, 25 bp, Homo sapien
cccacggctgcttccttcccagtgt

SEQ ID NO: 2461056 - DNA, 25 bp, Homo sapien
tttccccagatttgcccacggctgc

SEQ ID NO: 2461057 - DNA, 25 bp, Homo sapien
ttctgggctcaaaatattttcccca

SEQ ID NO: 2461058 - DNA, 25 bp, Homo sapien
atattttccccagatttgcccacgg

SEQ ID NO: 2461059 - DNA, 25 bp, Homo sapien
tttgctggttcgatcctttatcaaa

SEQ ID NO: 2461060 - DNA, 25 bp, Homo sapien
gatttgctggttcgatcctttatca

SEQ ID NO: 2461061 - DNA, 25 bp, Homo sapien
tggatttgctggttcgatcctttat

SEQ ID NO: 2461062 - DNA, 25 bp, Homo sapien
tgctggttcgatcctttatcaaaag

SEQ ID NO: 2461063 - DNA, 25 bp, Homo sapien
aagcttgccaggatgatctgcttct

SEQ ID NO: 2461064 - DNA, 25 bp, Homo sapien
cttctgatatgggaccatgtttccc

SEQ ID NO: 2461065 - DNA, 25 bp, Homo sapien
ccaaatactgctttaagcatcttct

SEQ ID NO: 2461066 - DNA, 25 bp, Homo sapien
ctgatatgggaccatgtttcccaaa

SEQ ID NO: 2461067 - DNA, 25 bp, Homo sapien
gcttcggaacaccacagggccaact

SEQ ID NO: 2461068 - DNA, 25 bp, Homo sapien
aaagagcctgaggttcgcctggccc

SEQ ID NO: 2461069 - DNA, 25 bp, Homo sapien
ctcaggccgtacgtaaccggcttcg

SEQ ID NO: 2461070 - DNA, 25 bp, Homo sapien
gccaactgcgggagggacagctgga

SEQ ID NO: 2461071 - DNA, 25 bp, Homo sapien
gatcagggagcaccctacccagaga

SEQ ID NO: 2461072 - DNA, 25 bp, Homo sapien
ccaccatctactatagatgccacat

SEQ ID NO: 2461073 - DNA, 25 bp, Homo sapien
acgaggatcagggagcaccctaccc

SEQ ID NO: 2461074 - DNA, 25 bp, Homo sapien
tatctgctcgagtctcctttttcag

SEQ ID NO: 2461075 - DNA, 25 bp, Homo sapien
ctatctcgtgtattactatatgcgt

SEQ ID NO: 2461076 - DNA, 25 bp, Homo sapien
gtattactatatgcgtggcaggtgc

SEQ ID NO: 2461077 - DNA, 25 bp, Homo sapien
tctcgtgtattactatatgcgtggc

SEQ ID NO: 2461078 - DNA, 25 bp, Homo sapien
cgtgtattactatatgcgtggcagg

SEQ ID NO: 2461079 - DNA, 25 bp, Homo sapien
ctaccaagggcctcaccgtagccat

SEQ ID NO: 2461080 - DNA, 25 bp, Homo sapien
gatctctaccaagggcctcaccgta

SEQ ID NO: 2461081 - DNA, 25 bp, Homo sapien
aagggcctcaccgtagccatcatga

SEQ ID NO: 2461082 - DNA, 25 bp, Homo sapien
ggcctcaccgtagccatcatgataa

SEQ ID NO: 2461083 - DNA, 25 bp, Homo sapien
catagtctctatgtggtggagcata

SEQ ID NO: 2461084 - DNA, 25 bp, Homo sapien
tggtttctcgggaacttggatgatt

SEQ ID NO: 2461085 - DNA, 25 bp, Homo sapien
cctggtttctcgggaacttggatga

SEQ ID NO: 2461086 - DNA, 25 bp, Homo sapien
gcataatccctggtttctcgggaac

SEQ ID NO: 2461087 - DNA, 25 bp, Homo sapien
cataatcacggtatccatggcctct

SEQ ID NO: 2461088 - DNA, 25 bp, Homo sapien
cacggtatccatggcctctagatgg

SEQ ID NO: 2461089 - DNA, 25 bp, Homo sapien
tatccatggcctctagatggtggag

SEQ ID NO: 2461090 - DNA, 25 bp, Homo sapien
ggtggagcatactccctagtttctc

SEQ ID NO: 2461091 - DNA, 25 bp, Homo sapien
tagaataactttcatcccgacgaga

SEQ ID NO: 2461092 - DNA, 25 bp, Homo sapien
tcctctagaataactttcatcccga

SEQ ID NO: 2461093 - DNA, 25 bp, Homo sapien
aataactttcatcccgacgagaatg

SEQ ID NO: 2461094 - DNA, 25 bp, Homo sapien
tgtatcctctagaataactttcatc

SEQ ID NO: 2461095 - DNA, 25 bp, Homo sapien
aatcacggtatgcatggcctctaga

SEQ ID NO: 2461096 - DNA, 25 bp, Homo sapien
gagcataatccctagtttctcggga

SEQ ID NO: 2461097 - DNA, 25 bp, Homo sapien
ggcctctagatggtggagcataatc

SEQ ID NO: 2461098 - DNA, 25 bp, Homo sapien
cataatcacggtatgcatggcctct

SEQ ID NO: 2461099 - DNA, 25 bp, Homo sapien
cccgattagaatgaccattatcacg

SEQ ID NO: 2461100 - DNA, 25 bp, Homo sapien
aatccctcgtttcttggcaacttgg

SEQ ID NO: 2461101 - DNA, 25 bp, Homo sapien
gcataatccctcgtttcttggcaac

SEQ ID NO: 2461102 - DNA, 25 bp, Homo sapien
ccgattagaatgaccattatcacgg

SEQ ID NO: 2461103 - DNA, 25 bp, Homo sapien
tccaggaagatattgtcgctctgcg

SEQ ID NO: 2461104 - DNA, 25 bp, Homo sapien
tcttgttgacatgcgatcatttctc

SEQ ID NO: 2461105 - DNA, 25 bp, Homo sapien
ccatcatgtcttgttgacatgcgat

SEQ ID NO: 2461106 - DNA, 25 bp, Homo sapien
gctctgcgtggaggaactccataat

SEQ ID NO: 2461107 - DNA, 25 bp, Homo sapien
gaatgagtcccctagaataactcat

SEQ ID NO: 2461108 - DNA, 25 bp, Homo sapien
actggaatgagtcccctagaataac

SEQ ID NO: 2461109 - DNA, 25 bp, Homo sapien
ctcttttaactggaatgagtcccct

SEQ ID NO: 2461110 - DNA, 25 bp, Homo sapien
taactggaatgagtcccctagaata

SEQ ID NO: 2461111 - DNA, 25 bp, Homo sapien
tgagatcaggagtgtatccaccatc

SEQ ID NO: 2461112 - DNA, 25 bp, Homo sapien
agatcaggagtgtatccaccatcat

SEQ ID NO: 2461113 - DNA, 25 bp, Homo sapien
cttgagatcaggagtgtatccacca

SEQ ID NO: 2461114 - DNA, 25 bp, Homo sapien
gagatcaggagtgtatccaccatca

SEQ ID NO: 2461115 - DNA, 25 bp, Homo sapien
ttaagaaatttcaatatcgtcaaac

SEQ ID NO: 2461116 - DNA, 25 bp, Homo sapien
tttctttcagtcctatggttccatc

SEQ ID NO: 2461117 - DNA, 25 bp, Homo sapien
taagaaatttcaatatcgtcaaact

SEQ ID NO: 2461118 - DNA, 25 bp, Homo sapien
ctatggttccatctttatattttaa

SEQ ID NO: 2461119 - DNA, 25 bp, Homo sapien
aggtgcccttcttgtgagggaagcc

SEQ ID NO: 2461120 - DNA, 25 bp, Homo sapien
ccaggtgcccttcttgtgagggaag

SEQ ID NO: 2461121 - DNA, 25 bp, Homo sapien
aagccaccctcttgttcctccacgg

SEQ ID NO: 2461122 - DNA, 25 bp, Homo sapien
ccctcttgttcctccacggcttcct

SEQ ID NO: 2461123 - DNA, 25 bp, Homo sapien
ttctgggctcaaaatattttcccca

SEQ ID NO: 2461124 - DNA, 25 bp, Homo sapien
cccacggctgcttccttcccagtgt

SEQ ID NO: 2461125 - DNA, 25 bp, Homo sapien
tttccccagatttgcccacggctgc

SEQ ID NO: 2461126 - DNA, 25 bp, Homo sapien
atattttccccagatttgcccacgg

SEQ ID NO: 2461127 - DNA, 25 bp, Homo sapien
tggatttgctggttcgatcctttat

SEQ ID NO: 2461128 - DNA, 25 bp, Homo sapien
tttgctggttcgatcctttatcaaa

SEQ ID NO: 2461129 - DNA, 25 bp, Homo sapien
gatttgctggttcgatcctttatca

SEQ ID NO: 2461130 - DNA, 25 bp, Homo sapien
tgctggttcgatcctttatcaaaag

SEQ ID NO: 2461131 - DNA, 25 bp, Homo sapien
cttctgatatgggaccatgtttccc

SEQ ID NO: 2461132 - DNA, 25 bp, Homo sapien
ccaaatactgctttaagcatcttct

SEQ ID NO: 2461133 - DNA, 25 bp, Homo sapien
ctgatatgggaccatgtttcccaaa

SEQ ID NO: 2461134 - DNA, 25 bp, Homo sapien
aagcttgccaggatgatctgcttct

SEQ ID NO: 2461135 - DNA, 25 bp, Homo sapien
ctcaggccgtacgtaaccggcttcg

SEQ ID NO: 2461136 - DNA, 25 bp, Homo sapien
aaagagcctgaggttcgcctggccc

SEQ ID NO: 2461137 - DNA, 25 bp, Homo sapien
gccaactgcgggagggacagctgga

SEQ ID NO: 2461138 - DNA, 25 bp, Homo sapien
gcttcggaacaccacagggccaact

SEQ ID NO: 2461139 - DNA, 25 bp, Homo sapien
caacagaggcactcctgcagatggt

SEQ ID NO: 2461140 - DNA, 25 bp, Homo sapien
gacaacagaggcactcctgcagatg

SEQ ID NO: 2461141 - DNA, 25 bp, Homo sapien
ccataagacaacagaggcactcctg

SEQ ID NO: 2461142 - DNA, 25 bp, Homo sapien
ttccaccataagacaacagaggcac

SEQ ID NO: 2461143 - DNA, 25 bp, Homo sapien
tgatctctaacatcacctcaccaca

SEQ ID NO: 2461144 - DNA, 25 bp, Homo sapien
atctctaacatcacctcaccacagc

SEQ ID NO: 2461145 - DNA, 25 bp, Homo sapien
gatctctaacatcacctcaccacag

SEQ ID NO: 2461146 - DNA, 25 bp, Homo sapien
tctctaacatcacctcaccacagcc

SEQ ID NO: 2461147 - DNA, 25 bp, Homo sapien
tatatcctctagagaaatgttcatc

SEQ ID NO: 2461148 - DNA, 25 bp, Homo sapien
atgcatagtctctagacagtggagc

SEQ ID NO: 2461149 - DNA, 25 bp, Homo sapien
tcatggtatgcatagtctctagaca

SEQ ID NO: 2461150 - DNA, 25 bp, Homo sapien
gagaaatgttcatcccaactagaat

SEQ ID NO: 2461151 - DNA, 25 bp, Homo sapien
tggtgacatacggtcatttctccag

SEQ ID NO: 2461152 - DNA, 25 bp, Homo sapien
cttggtgacatacggtcatttctcc

SEQ ID NO: 2461153 - DNA, 25 bp, Homo sapien
ggtgacatacggtcatttctccagg

SEQ ID NO: 2461154 - DNA, 25 bp, Homo sapien
ttggtgacatacggtcatttctcca

SEQ ID NO: 2461155 - DNA, 25 bp, Homo sapien
gtgttgagatcaagagcgtatccac

SEQ ID NO: 2461156 - DNA, 25 bp, Homo sapien
tatggttccatctttatattttaga

SEQ ID NO: 2461157 - DNA, 25 bp, Homo sapien
ggaaattttgatatcttcaaactta

SEQ ID NO: 2461158 - DNA, 25 bp, Homo sapien
ataaaattgggaaattttgatatct

SEQ ID NO: 2461159 - DNA, 25 bp, Homo sapien
tctttcagtcctatggttccatctt

SEQ ID NO: 2461160 - DNA, 25 bp, Homo sapien
agggcagccacggtcttgttcctcc

SEQ ID NO: 2461161 - DNA, 25 bp, Homo sapien
gggcagccacggtcttgttcctcca

SEQ ID NO: 2461162 - DNA, 25 bp, Homo sapien
tgtgagggcagccacggtcttgttc

SEQ ID NO: 2461163 - DNA, 25 bp, Homo sapien
tgagggcagccacggtcttgttcct

SEQ ID NO: 2461164 - DNA, 25 bp, Homo sapien
atctctggacttactggttcgacct

SEQ ID NO: 2461165 - DNA, 25 bp, Homo sapien
ccacaaaatctctggacttactggt

SEQ ID NO: 2461166 - DNA, 25 bp, Homo sapien
gacttactggttcgaccttttatca

SEQ ID NO: 2461167 - DNA, 25 bp, Homo sapien
taatgaccacaaaatctctggactt

SEQ ID NO: 2461168 - DNA, 25 bp, Homo sapien
aagcaccttttcattggcttctcta

SEQ ID NO: 2461169 - DNA, 25 bp, Homo sapien
gttttgcaaatacttctttaagcac

SEQ ID NO: 2461170 - DNA, 25 bp, Homo sapien
caaaaggggaccatgttttgcaaat

SEQ ID NO: 2461171 - DNA, 25 bp, Homo sapien
gaaaagcttgccatgacaatctgct

SEQ ID NO: 2461172 - DNA, 25 bp, Homo sapien
ggtaggcgtctcctgaggagcccct

SEQ ID NO: 2461173 - DNA, 25 bp, Homo sapien
tgccaattattgcaagagcggtagg

SEQ ID NO: 2461174 - DNA, 25 bp, Homo sapien
ttgcaagagcggtaggcgtctcctg

SEQ ID NO: 2461175 - DNA, 25 bp, Homo sapien
tgggcatctgccaattattgcaaga

SEQ ID NO: 2461176 - DNA, 25 bp, Homo sapien
ggtgggcgcctaggtcccaggagca

SEQ ID NO: 2461177 - DNA, 25 bp, Homo sapien
agagccatgtcttcgcagctgctaa

SEQ ID NO: 2461178 - DNA, 25 bp, Homo sapien
gggcgcctaggtcccaggagcaggg

SEQ ID NO: 2461179 - DNA, 25 bp, Homo sapien
gccagagccatgtcttcgcagctgc

SEQ ID NO: 2461180 - DNA, 25 bp, Homo sapien
aacacatggtgctcaagacttgggc

SEQ ID NO: 2461181 - DNA, 25 bp, Homo sapien
gatttgcaggttaggctgctgagcc

SEQ ID NO: 2461182 - DNA, 25 bp, Homo sapien
cctgctgagctacatgatggatttg

SEQ ID NO: 2461183 - DNA, 25 bp, Homo sapien
aatctgtgggagtggtccagtgcct

SEQ ID NO: 2461184 - DNA, 25 bp, Homo sapien
ttgtgcctaacatttctggattgtc

SEQ ID NO: 2461185 - DNA, 25 bp, Homo sapien
ggaagctttcatcacttgtgcctaa

SEQ ID NO: 2461186 - DNA, 25 bp, Homo sapien
atttctggattgtcattggtccctc

SEQ ID NO: 2461187 - DNA, 25 bp, Homo sapien
catcacttgtgcctaacatttctgg

SEQ ID NO: 2461188 - DNA, 25 bp, Homo sapien
tatgtggcctagagagccagcattc

SEQ ID NO: 2461189 - DNA, 25 bp, Homo sapien
tcgtggaggagtagcaattccagaa

SEQ ID NO: 2461190 - DNA, 25 bp, Homo sapien
gatagcccaagagtgataagagcca

SEQ ID NO: 2461191 - DNA, 25 bp, Homo sapien
ctggtgtaacaatatgtggcctaga

SEQ ID NO: 2461192 - DNA, 25 bp, Homo sapien
aagagctgccaactatggaaccact

SEQ ID NO: 2461193 - DNA, 25 bp, Homo sapien
gaatccaagagctgccaactatgga

SEQ ID NO: 2461194 - DNA, 25 bp, Homo sapien
tccaagagctgccaactatggaacc

SEQ ID NO: 2461195 - DNA, 25 bp, Homo sapien
agaatccaagagctgccaactatgg

SEQ ID NO: 2461196 - DNA, 25 bp, Homo sapien
gactgaatgggacatagaagcagag

SEQ ID NO: 2461197 - DNA, 25 bp, Homo sapien
tagaagcagaggtagtcatgggccc

SEQ ID NO: 2461198 - DNA, 25 bp, Homo sapien
tcatgggcccttgcttgtaccaggg

SEQ ID NO: 2461199 - DNA, 25 bp, Homo sapien
gcttgtaccagggagcatagctaga

SEQ ID NO: 2461200 - DNA, 25 bp, Homo sapien
ccaaaattgggcacaagtgctgact

SEQ ID NO: 2461201 - DNA, 25 bp, Homo sapien
cacccagaaagtgagttcattcagc

SEQ ID NO: 2461202 - DNA, 25 bp, Homo sapien
ggtgccgtttttgcacaattccagg

SEQ ID NO: 2461203 - DNA, 25 bp, Homo sapien
tcattcagcttgagccaaaattggg

SEQ ID NO: 2461204 - DNA, 25 bp, Homo sapien
gccaacagtcatatagttgtatatt

SEQ ID NO: 2461205 - DNA, 25 bp, Homo sapien
gatcaacccaggtcctagaggtccc

SEQ ID NO: 2461206 - DNA, 25 bp, Homo sapien
tgctccaggcgtataggaaggaacc

SEQ ID NO: 2461207 - DNA, 25 bp, Homo sapien
ctgggttgaaaatgtagtggttgct

SEQ ID NO: 2461208 - DNA, 25 bp, Homo sapien
ctgaatacctaagaggttgttgttc

SEQ ID NO: 2461209 - DNA, 25 bp, Homo sapien
gaatacctaagaggttgttgttcag

SEQ ID NO: 2461210 - DNA, 25 bp, Homo sapien
ttctgaatacctaagaggttgttgt

SEQ ID NO: 2461211 - DNA, 25 bp, Homo sapien
atacctaagaggttgttgttcaggc

SEQ ID NO: 2461212 - DNA, 25 bp, Homo sapien
aataagatgaacttcagactggatc

SEQ ID NO: 2461213 - DNA, 25 bp, Homo sapien
ttaagcaagatccatggtttgacta

SEQ ID NO: 2461214 - DNA, 25 bp, Homo sapien
gatccagtgtctgctcgggttacag

SEQ ID NO: 2461215 - DNA, 25 bp, Homo sapien
cgggttacaggcagtatccaagata

SEQ ID NO: 2461216 - DNA, 25 bp, Homo sapien
caggtagtacctgctcgagaatgag

SEQ ID NO: 2461217 - DNA, 25 bp, Homo sapien
cacttgggtccatggccaaactgca

SEQ ID NO: 2461218 - DNA, 25 bp, Homo sapien
ggaccaaagtgcgaacatatcctct

SEQ ID NO: 2461219 - DNA, 25 bp, Homo sapien
tactaagttgattctgggtccagga

SEQ ID NO: 2461220 - DNA, 25 bp, Homo sapien
catggttctgctgcttgtggtacaa

SEQ ID NO: 2461221 - DNA, 25 bp, Homo sapien
taaacaaaggtgtgctaagcagagc

SEQ ID NO: 2461222 - DNA, 25 bp, Homo sapien
ggtacaagcactgtccaagatataa

SEQ ID NO: 2461223 - DNA, 25 bp, Homo sapien
aattctggttgagcccaaggtttca

SEQ ID NO: 2461224 - DNA, 25 bp, Homo sapien
gtggccatttgatctggtcatctgg

SEQ ID NO: 2461225 - DNA, 25 bp, Homo sapien
aaatgcactgtgctgccattggatg

SEQ ID NO: 2461226 - DNA, 25 bp, Homo sapien
tttgatctggtcatctgggaagtaa

SEQ ID NO: 2461227 - DNA, 25 bp, Homo sapien
gatggagtcatggaaatgaacaaag

SEQ ID NO: 2461228 - DNA, 25 bp, Homo sapien
gctttgaggaagattgtcatcctca

SEQ ID NO: 2461229 - DNA, 25 bp, Homo sapien
ctttgaggaagattgtcatcctcac

SEQ ID NO: 2461230 - DNA, 25 bp, Homo sapien
ccttctttgcttgggtatcttcaca

SEQ ID NO: 2461231 - DNA, 25 bp, Homo sapien
tacgacttgatatcttgcagttcct

SEQ ID NO: 2461232 - DNA, 25 bp, Homo sapien
tcacaagcctgcattgtgttggcat

SEQ ID NO: 2461233 - DNA, 25 bp, Homo sapien
gggtatcttcacaagcctgcattgt

SEQ ID NO: 2461234 - DNA, 25 bp, Homo sapien
ctgttagaagacagtatcatgagaa

SEQ ID NO: 2461235 - DNA, 25 bp, Homo sapien
tgttagaagacagtatcatgagaat

SEQ ID NO: 2461236 - DNA, 25 bp, Homo sapien
aagacagtatcatgagaatgtggat

SEQ ID NO: 2461237 - DNA, 25 bp, Homo sapien
tagaagacagtatcatgagaatgtg

SEQ ID NO: 2461238 - DNA, 25 bp, Homo sapien
tcgttatctcatgggacaggctcat

SEQ ID NO: 2461239 - DNA, 25 bp, Homo sapien
tccttctgaacaattgtgcagctgg

SEQ ID NO: 2461240 - DNA, 25 bp, Homo sapien
tcagcccatcgtggttccactcagc

SEQ ID NO: 2461241 - DNA, 25 bp, Homo sapien
cagaaacaagcccagatcatctgca

SEQ ID NO: 2461242 - DNA, 25 bp, Homo sapien
tgcaaaccacactttggtagctgtg

SEQ ID NO: 2461243 - DNA, 25 bp, Homo sapien
gaaaaatgagttattaaagcatgaa

SEQ ID NO: 2461244 - DNA, 25 bp, Homo sapien
cttttcctcacttggccgccagatg

SEQ ID NO: 2461245 - DNA, 25 bp, Homo sapien
gtcttttcctcacttggccgccaga

SEQ ID NO: 2461246 - DNA, 25 bp, Homo sapien
atgtactctcctgggagggtcctga

SEQ ID NO: 2461247 - DNA, 25 bp, Homo sapien
atgccatgtactctcctgggagggt

SEQ ID NO: 2461248 - DNA, 25 bp, Homo sapien
aggttttatcctcatggtggacccg

SEQ ID NO: 2461249 - DNA, 25 bp, Homo sapien
tttatcctcatggtggacccgaccc

SEQ ID NO: 2461250 - DNA, 25 bp, Homo sapien
ggttttatcctcatggtggacccga

SEQ ID NO: 2461251 - DNA, 25 bp, Homo sapien
cgaccccaggtgtcccaaagccgcg

SEQ ID NO: 2461252 - DNA, 25 bp, Homo sapien
catgaacgtggccacagatgtcccc

SEQ ID NO: 2461253 - DNA, 25 bp, Homo sapien
tgagaaggaagctctgtccgaggca

SEQ ID NO: 2461254 - DNA, 25 bp, Homo sapien
gaacgtggccacagatgtccccaag

SEQ ID NO: 2461255 - DNA, 25 bp, Homo sapien
cacggcctctctcgagtgtcctgag

SEQ ID NO: 2461256 - DNA, 25 bp, Homo sapien
aatccaggcggtcatctcacgaagt

SEQ ID NO: 2461257 - DNA, 25 bp, Homo sapien
tgcaggctcagtgcatcagctccgt

SEQ ID NO: 2461258 - DNA, 25 bp, Homo sapien
ggtgggttaatccaggcggtcatct

SEQ ID NO: 2461259 - DNA, 25 bp, Homo sapien
tcacgaagtggaagtgagatacagc

SEQ ID NO: 2461260 - DNA, 25 bp, Homo sapien
tcagcatggtaaacacggtgaaacc

SEQ ID NO: 2461261 - DNA, 25 bp, Homo sapien
cagcatggtaaacacggtgaaaccc

SEQ ID NO: 2461262 - DNA, 25 bp, Homo sapien
ccccccacagtccggaagtgcctgg

SEQ ID NO: 2461263 - DNA, 25 bp, Homo sapien
ccacagtccggaagtgcctggggcc

SEQ ID NO: 2461264 - DNA, 25 bp, Homo sapien
cacagtccggaagtgcctggggcct

SEQ ID NO: 2461265 - DNA, 25 bp, Homo sapien
ccccacagtccggaagtgcctgggg

SEQ ID NO: 2461266 - DNA, 25 bp, Homo sapien
caaatttagtgagggaatcagagcc

SEQ ID NO: 2461267 - DNA, 25 bp, Homo sapien
gatgcagacctaccatgacatgatg

SEQ ID NO: 2461268 - DNA, 25 bp, Homo sapien
taagaagttattgccctggagggtg

SEQ ID NO: 2461269 - DNA, 25 bp, Homo sapien
gagtacttgaacatatgcccaggcc

SEQ ID NO: 2461270 - DNA, 25 bp, Homo sapien
gaacatcgccatgccaaggaagcag

SEQ ID NO: 2461271 - DNA, 25 bp, Homo sapien
aagaacatcgccatgccaaggaagc

SEQ ID NO: 2461272 - DNA, 25 bp, Homo sapien
agaacatcgccatgccaaggaagca

SEQ ID NO: 2461273 - DNA, 25 bp, Homo sapien
tccccgtagtctcagagaagtataa

SEQ ID NO: 2461274 - DNA, 25 bp, Homo sapien
ctcaagacctctgttcaaggaaagt

SEQ ID NO: 2461275 - DNA, 25 bp, Homo sapien
agaacacatgctccccgtagtctca

SEQ ID NO: 2461276 - DNA, 25 bp, Homo sapien
ctggcctcaagacctctgttcaagg

SEQ ID NO: 2461277 - DNA, 25 bp, Homo sapien
aaagtagaaagccaagcccagtggc

SEQ ID NO: 2461278 - DNA, 25 bp, Homo sapien
ctggcagtcagtgccattcaaattg

SEQ ID NO: 2461279 - DNA, 25 bp, Homo sapien
ccattcaaattgtcttgtctccagg

SEQ ID NO: 2461280 - DNA, 25 bp, Homo sapien
gtcagtgccattcaaattgtcttgt

SEQ ID NO: 2461281 - DNA, 25 bp, Homo sapien
ccttgagtggtctcttgggattgtt

SEQ ID NO: 2461282 - DNA, 25 bp, Homo sapien
cttgggattgttgaggcccatttta

SEQ ID NO: 2461283 - DNA, 25 bp, Homo sapien
tcttgggattgttgaggcccatttt

SEQ ID NO: 2461284 - DNA, 25 bp, Homo sapien
tgtccttgagtggtctcttgggatt

SEQ ID NO: 2461285 - DNA, 25 bp, Homo sapien
cctcagaaaacgcaatgcccttttc

SEQ ID NO: 2461286 - DNA, 25 bp, Homo sapien
cctcctcagaaaacgcaatgccctt

SEQ ID NO: 2461287 - DNA, 25 bp, Homo sapien
gaaaacgcaatgcccttttctgcag

SEQ ID NO: 2461288 - DNA, 25 bp, Homo sapien
caagccctcctcagaaaacgcaatg

SEQ ID NO: 2461289 - DNA, 25 bp, Homo sapien
ctgagtccttagaggtgggtgtcag

SEQ ID NO: 2461290 - DNA, 25 bp, Homo sapien
gactgacctcggactgtgcagataa

SEQ ID NO: 2461291 - DNA, 25 bp, Homo sapien
ctcagactgacctcggactgtgcag

SEQ ID NO: 2461292 - DNA, 25 bp, Homo sapien
cagataaggttgagacagtgaaaca

SEQ ID NO: 2461293 - DNA, 25 bp, Homo sapien
cggactgtgcagataaggttgagac

SEQ ID NO: 2461294 - DNA, 25 bp, Homo sapien
gaggaattctccttcacgacgtgaa

SEQ ID NO: 2461295 - DNA, 25 bp, Homo sapien
ggctgaaggacgataaaacactggg

SEQ ID NO: 2461296 - DNA, 25 bp, Homo sapien
gaatgaaatctcacgatgatagagg

SEQ ID NO: 2461297 - DNA, 25 bp, Homo sapien
tgaagcagttgcttggctgggaact

SEQ ID NO: 2461298 - DNA, 25 bp, Homo sapien
aattattgaccttagagccccttcg

SEQ ID NO: 2461299 - DNA, 25 bp, Homo sapien
cccttcgggatgactctgtggctga

SEQ ID NO: 2461300 - DNA, 25 bp, Homo sapien
ggtagattcaagtgcctggctgtca

SEQ ID NO: 2461301 - DNA, 25 bp, Homo sapien
gataatcaactgtcagaccctaaaa

SEQ ID NO: 2461302 - DNA, 25 bp, Homo sapien
aattgctagtctgacaaaggtgtcc

SEQ ID NO: 2461303 - DNA, 25 bp, Homo sapien
ctgtggaaattgctagtctgacaaa

SEQ ID NO: 2461304 - DNA, 25 bp, Homo sapien
aaggtgtccagtaatgctgttgagg

SEQ ID NO: 2461305 - DNA, 25 bp, Homo sapien
tgacaaaggtgtccagtaatgctgt

SEQ ID NO: 2461306 - DNA, 25 bp, Homo sapien
cttgcagtgactggagatcatgacg

SEQ ID NO: 2461307 - DNA, 25 bp, Homo sapien
agtgactggagatcatgacgctgca

SEQ ID NO: 2461308 - DNA, 25 bp, Homo sapien
gactggagatcatgacgctgcactc

SEQ ID NO: 2461309 - DNA, 25 bp, Homo sapien
ccagcccaggcaacggagtgcaact

SEQ ID NO: 2461310 - DNA, 25 bp, Homo sapien
acatgactggtagtgccgtttttgg

SEQ ID NO: 2461311 - DNA, 25 bp, Homo sapien
tttgggttggctgtaggacaataaa

SEQ ID NO: 2461312 - DNA, 25 bp, Homo sapien
aaaccatcctccagcaatcatgcag

SEQ ID NO: 2461313 - DNA, 25 bp, Homo sapien
catctggaaacctaattcgaggtta

SEQ ID NO: 2461314 - DNA, 25 bp, Homo sapien
tttccatgaactgggaatggttgag

SEQ ID NO: 2461315 - DNA, 25 bp, Homo sapien
gacattgagccagaccaaggaaact

SEQ ID NO: 2461316 - DNA, 25 bp, Homo sapien
caagggaatcccatgagggtcattt

SEQ ID NO: 2461317 - DNA, 25 bp, Homo sapien
catgaactgggaatggttgagtttg

SEQ ID NO: 2461318 - DNA, 25 bp, Homo sapien
tagcctcatgggactatcacgggaa

SEQ ID NO: 2461319 - DNA, 25 bp, Homo sapien
ttcgttgtgatgctaacccgagccc

SEQ ID NO: 2461320 - DNA, 25 bp, Homo sapien
taagagtatgcagacttgggcgacg

SEQ ID NO: 2461321 - DNA, 25 bp, Homo sapien
agttcttctccgcaaagccgcagag

SEQ ID NO: 2461322 - DNA, 25 bp, Homo sapien
tggaggagttgcccttcatgacatg

SEQ ID NO: 2461323 - DNA, 25 bp, Homo sapien
atggaggagttgcccttcatgacat

SEQ ID NO: 2461324 - DNA, 25 bp, Homo sapien
gaggagttgcccttcatgacatgta

SEQ ID NO: 2461325 - DNA, 25 bp, Homo sapien
ggaggagttgcccttcatgacatgt

SEQ ID NO: 2461326 - DNA, 25 bp, Homo sapien
tgaagaaccgctcagctgggagcca

SEQ ID NO: 2461327 - DNA, 25 bp, Homo sapien
ggaggagtgccccatcatgacatga

SEQ ID NO: 2461328 - DNA, 25 bp, Homo sapien
ggatgatatcccaagacaaaggagg

SEQ ID NO: 2461329 - DNA, 25 bp, Homo sapien
tgggacacaggacaatgaaacactg

SEQ ID NO: 2461330 - DNA, 25 bp, Homo sapien
taagcagaagtgacttacaggcgca

SEQ ID NO: 2461331 - DNA, 25 bp, Homo sapien
tagcttctgacgctgcatggttttg

SEQ ID NO: 2461332 - DNA, 25 bp, Homo sapien
tgctagatccccttttgggagacag

SEQ ID NO: 2461333 - DNA, 25 bp, Homo sapien
catgcaggctgtaactagaaatcac

SEQ ID NO: 2461334 - DNA, 25 bp, Homo sapien
tcctgaggcaggtacaggcacctag

SEQ ID NO: 2461335 - DNA, 25 bp, Homo sapien
ggactggtgtcctgagactagtgca

SEQ ID NO: 2461336 - DNA, 25 bp, Homo sapien
tgctagccagagctcacaatgagga

SEQ ID NO: 2461337 - DNA, 25 bp, Homo sapien
tcctcaagaggcaggaacttgtctc

SEQ ID NO: 2461338 - DNA, 25 bp, Homo sapien
tggtgatggcaagcctgaaactggt

SEQ ID NO: 2461339 - DNA, 25 bp, Homo sapien
actggtgaacagtagtgcagttgag

SEQ ID NO: 2461340 - DNA, 25 bp, Homo sapien
tggcaagcctgaaactggtgaacag

SEQ ID NO: 2461341 - DNA, 25 bp, Homo sapien
gaggttcagacaatatctcagatgc

SEQ ID NO: 2461342 - DNA, 25 bp, Homo sapien
agtggatttccatgagggtcttcct

SEQ ID NO: 2461343 - DNA, 25 bp, Homo sapien
ggatttccatgagggtcttcctctg

SEQ ID NO: 2461344 - DNA, 25 bp, Homo sapien
tccatgagggtcttcctctgtgaac

SEQ ID NO: 2461345 - DNA, 25 bp, Homo sapien
tggaagacgtggattcagacccaga

SEQ ID NO: 2461346 - DNA, 25 bp, Homo sapien
tctcaaggcgatgttggagtgccca

SEQ ID NO: 2461347 - DNA, 25 bp, Homo sapien
catatacgaggtaaagtcaagcggc

SEQ ID NO: 2461348 - DNA, 25 bp, Homo sapien
catgaaacacgtgctcagctgtgac

SEQ ID NO: 2461349 - DNA, 25 bp, Homo sapien
tcaagcggctttgcagacagtactg

SEQ ID NO: 2461350 - DNA, 25 bp, Homo sapien
gaggatctttctccgtgaaatggaa

SEQ ID NO: 2461351 - DNA, 25 bp, Homo sapien
cgtgagtttgcttggattgctccaa

SEQ ID NO: 2461352 - DNA, 25 bp, Homo sapien
aaaccctaatccaatgaagaacacg

SEQ ID NO: 2461353 - DNA, 25 bp, Homo sapien
cacggatgtcaatataggaagaggc

SEQ ID NO: 2461354 - DNA, 25 bp, Homo sapien
agcgtcattccgttgcactcccgtt

SEQ ID NO: 2461355 - DNA, 25 bp, Homo sapien
gcactcccgtttgactctgggtatg

SEQ ID NO: 2461356 - DNA, 25 bp, Homo sapien
ccctagaccgatgagaaaaatggaa

SEQ ID NO: 2461357 - DNA, 25 bp, Homo sapien
cattgagccaaactcaggaaaccct

SEQ ID NO: 2461358 - DNA, 25 bp, Homo sapien
ggcctcttcttgatgctactacagg

SEQ ID NO: 2461359 - DNA, 25 bp, Homo sapien
ctctacaatgtctagacacatctga

SEQ ID NO: 2461360 - DNA, 25 bp, Homo sapien
cttcttgatgctactacaggctggc

SEQ ID NO: 2461361 - DNA, 25 bp, Homo sapien
tctggatcctgagaaatattgtggt

SEQ ID NO: 2461362 - DNA, 25 bp, Homo sapien
tatctgatgttatggctgctcaaag

SEQ ID NO: 2461363 - DNA, 25 bp, Homo sapien
tgctcaaagtatctgtcccaaaatg

SEQ ID NO: 2461364 - DNA, 25 bp, Homo sapien
gagtgacgtgaaggtcctgctcagc

SEQ ID NO: 2461365 - DNA, 25 bp, Homo sapien
gccagcctctcaatttacagcggat

SEQ ID NO: 2461366 - DNA, 25 bp, Homo sapien
ttaggattgttagggaattcacgga

SEQ ID NO: 2461367 - DNA, 25 bp, Homo sapien
gaagagaccacagtccaccatgatg

SEQ ID NO: 2461368 - DNA, 25 bp, Homo sapien
tcacggattattcctgcggctctgc

SEQ ID NO: 2461369 - DNA, 25 bp, Homo sapien
tcctaggatcatgggactctcccga

SEQ ID NO: 2461370 - DNA, 25 bp, Homo sapien
gtctacagtctcctaggatcagagg

SEQ ID NO: 2461371 - DNA, 25 bp, Homo sapien
tctacagtctcctaggatcagagga

SEQ ID NO: 2461372 - DNA, 25 bp, Homo sapien
tgtctacagtctcctaggatcagag

SEQ ID NO: 2461373 - DNA, 25 bp, Homo sapien
ctacagtctcctaggatcagaggaa

SEQ ID NO: 2461374 - DNA, 25 bp, Homo sapien
ctctctccacaaaaccaacatgttt

SEQ ID NO: 2461375 - DNA, 25 bp, Homo sapien
ttcagtaatatgcaggtaacaatgc

SEQ ID NO: 2461376 - DNA, 25 bp, Homo sapien
gatattacatctaaacacttttcaa

SEQ ID NO: 2461377 - DNA, 25 bp, Homo sapien
caaacaaggattggtatgcaataac

SEQ ID NO: 2461378 - DNA, 25 bp, Homo sapien
gtattactatatgcgtggcaggtgc

SEQ ID NO: 2461379 - DNA, 25 bp, Homo sapien
aggatcagggagcaccctacccaga

SEQ ID NO: 2461380 - DNA, 25 bp, Homo sapien
tatctgctcgagtctcctttttcag

SEQ ID NO: 2461381 - DNA, 25 bp, Homo sapien
ttctgcaaacatgctcacgatcaca

SEQ ID NO: 2461382 - DNA, 25 bp, Homo sapien
ctaccaagggcctcaccgtagccat

SEQ ID NO: 2461383 - DNA, 25 bp, Homo sapien
gatctctaccaagggcctcaccgta

SEQ ID NO: 2461384 - DNA, 25 bp, Homo sapien
aagggcctcaccgtagccatcatga

SEQ ID NO: 2461385 - DNA, 25 bp, Homo sapien
ggcctcaccgtagccatcatgataa

SEQ ID NO: 2461386 - DNA, 25 bp, Homo sapien
catagtctctatgtggtggagcata

SEQ ID NO: 2461387 - DNA, 25 bp, Homo sapien
tatgcatagtctctatgtggtggag

SEQ ID NO: 2461388 - DNA, 25 bp, Homo sapien
tggtttctcgggaacttggatgatt

SEQ ID NO: 2461389 - DNA, 25 bp, Homo sapien
gcataatccctggtttctcgggaac

SEQ ID NO: 2461390 - DNA, 25 bp, Homo sapien
taactttcatgtcgacgagaatgac

SEQ ID NO: 2461391 - DNA, 25 bp, Homo sapien
gaataactttcatgtcgacgagaat

SEQ ID NO: 2461392 - DNA, 25 bp, Homo sapien
ctagaataactttcatgtcgacgag

SEQ ID NO: 2461393 - DNA, 25 bp, Homo sapien
tatatcctctagaataactttcatg

SEQ ID NO: 2461394 - DNA, 25 bp, Homo sapien
cacggtatccatggcctctagatgg

SEQ ID NO: 2461395 - DNA, 25 bp, Homo sapien
cataatcacggtatccatggcctct

SEQ ID NO: 2461396 - DNA, 25 bp, Homo sapien
tatccatggcctctagatggtggag

SEQ ID NO: 2461397 - DNA, 25 bp, Homo sapien
ggtggagcatactccctagtttctc

SEQ ID NO: 2461398 - DNA, 25 bp, Homo sapien
gtatcctctagaataactttcatcc

SEQ ID NO: 2461399 - DNA, 25 bp, Homo sapien
tagaggaatgttcatcccgattaga

SEQ ID NO: 2461400 - DNA, 25 bp, Homo sapien
tctagaggaatgttcatcccgatta

SEQ ID NO: 2461401 - DNA, 25 bp, Homo sapien
gaggaatgttcatcccgattagaat

SEQ ID NO: 2461402 - DNA, 25 bp, Homo sapien
aggaatgttcatcccgattagaatg

SEQ ID NO: 2461403 - DNA, 25 bp, Homo sapien
ggtatgcatagcctctagatggtgg

SEQ ID NO: 2461404 - DNA, 25 bp, Homo sapien
ggagcataatccctcgtttcttggc

SEQ ID NO: 2461405 - DNA, 25 bp, Homo sapien
agcataatccctcgtttcttggcaa

SEQ ID NO: 2461406 - DNA, 25 bp, Homo sapien
cattatcacggtatgcatagcctct

SEQ ID NO: 2461407 - DNA, 25 bp, Homo sapien
tccaggaagatattgtcgctctgcg

SEQ ID NO: 2461408 - DNA, 25 bp, Homo sapien
tcttgttgacatgcgatcatttctc

SEQ ID NO: 2461409 - DNA, 25 bp, Homo sapien
gctctgcgtggaggaactccataat

SEQ ID NO: 2461410 - DNA, 25 bp, Homo sapien
ccatcatgtcttgttgacatgcgat

SEQ ID NO: 2461411 - DNA, 25 bp, Homo sapien
cttgagatcaggagtgtatccacca

SEQ ID NO: 2461412 - DNA, 25 bp, Homo sapien
aatgagtcccctagaataactcatc

SEQ ID NO: 2461413 - DNA, 25 bp, Homo sapien
taactggaatgagtcccctagaata

SEQ ID NO: 2461414 - DNA, 25 bp, Homo sapien
agtcccctagaataactcatcttga

SEQ ID NO: 2461415 - DNA, 25 bp, Homo sapien
caccctcttgttcctccactgcttc

SEQ ID NO: 2461416 - DNA, 25 bp, Homo sapien
ttctgtttctcgaagaagctggtgg

SEQ ID NO: 2461417 - DNA, 25 bp, Homo sapien
ccaggtgcccttcatgtgagggaag

SEQ ID NO: 2461418 - DNA, 25 bp, Homo sapien
tcatgtgagggaagccaccctcttg

SEQ ID NO: 2461419 - DNA, 25 bp, Homo sapien
cccacggctgcttccttcccagtgt

SEQ ID NO: 2461420 - DNA, 25 bp, Homo sapien
tttccccagatttgcccacggctgc

SEQ ID NO: 2461421 - DNA, 25 bp, Homo sapien
ttctgggctcaaaatattttcccca

SEQ ID NO: 2461422 - DNA, 25 bp, Homo sapien
atattttccccagatttgcccacgg

SEQ ID NO: 2461423 - DNA, 25 bp, Homo sapien
tttgctggttcgatcctttatcaaa

SEQ ID NO: 2461424 - DNA, 25 bp, Homo sapien
gatttgctggttcgatcctttatca

SEQ ID NO: 2461425 - DNA, 25 bp, Homo sapien
tgctggttcgatcctttatcaaaag

SEQ ID NO: 2461426 - DNA, 25 bp, Homo sapien
tggatttgctggttcgatcctttat

SEQ ID NO: 2461427 - DNA, 25 bp, Homo sapien
ccaaatactgctttaagcatcttct

SEQ ID NO: 2461428 - DNA, 25 bp, Homo sapien
aagcttgccaggatgatctgcttct

SEQ ID NO: 2461429 - DNA, 25 bp, Homo sapien
cttctgatatgggaccatgtttccc

SEQ ID NO: 2461430 - DNA, 25 bp, Homo sapien
ctgatatgggaccatgtttcccaaa

SEQ ID NO: 2461431 - DNA, 25 bp, Homo sapien
aaagagcctgaggttcgcctggccc

SEQ ID NO: 2461432 - DNA, 25 bp, Homo sapien
gccaactgcgggagggacagctgga

SEQ ID NO: 2461433 - DNA, 25 bp, Homo sapien
gcttcggaacaccacagggccaact

SEQ ID NO: 2461434 - DNA, 25 bp, Homo sapien
ctcaggccgtacgtaaccggcttcg

SEQ ID NO: 2461435 - DNA, 25 bp, Homo sapien
ctttactatcggacgtgcccgacat

SEQ ID NO: 2461436 - DNA, 25 bp, Homo sapien
tccctttactatcggacgtgcccga

SEQ ID NO: 2461437 - DNA, 25 bp, Homo sapien
tcttccctttactatcggacgtgcc

SEQ ID NO: 2461438 - DNA, 25 bp, Homo sapien
ttcttccctttactatcggacgtgc

SEQ ID NO: 2461439 - DNA, 25 bp, Homo sapien
tcattgaaggtccagttattccctt

SEQ ID NO: 2461440 - DNA, 25 bp, Homo sapien
ttattccaactcattgaaggtccag

SEQ ID NO: 2461441 - DNA, 25 bp, Homo sapien
ccaactcattgaaggtccagttatt

SEQ ID NO: 2461442 - DNA, 25 bp, Homo sapien
tgaaggtccagttattcccttctac

SEQ ID NO: 2461443 - DNA, 25 bp, Homo sapien
tcttcttcttctctaatctctacag

SEQ ID NO: 2461444 - DNA, 25 bp, Homo sapien
cttcttcttctctaatctctacagt

SEQ ID NO: 2461445 - DNA, 25 bp, Homo sapien
tctctacagtgtcaccttgactgag

SEQ ID NO: 2461446 - DNA, 25 bp, Homo sapien
ctaatctctacagtgtcaccttgac

SEQ ID NO: 2461447 - DNA, 25 bp, Homo sapien
catgaggatggcacagaggccatca

SEQ ID NO: 2461448 - DNA, 25 bp, Homo sapien
gaggatggcacagaggccatcagcc

SEQ ID NO: 2461449 - DNA, 25 bp, Homo sapien
cacatctttgcagctgcccattcag

SEQ ID NO: 2461450 - DNA, 25 bp, Homo sapien
agccacatctttgcagctgcccatt

SEQ ID NO: 2461451 - DNA, 25 bp, Homo sapien
gcaaggggcacaaggggtcagccag

SEQ ID NO: 2461452 - DNA, 25 bp, Homo sapien
agcaaggggcacaaggggtcagcca

SEQ ID NO: 2461453 - DNA, 25 bp, Homo sapien
aggccactgcggggcatcatgggaa

SEQ ID NO: 2461454 - DNA, 25 bp, Homo sapien
aggattgctgaggtgtaggccactg

SEQ ID NO: 2461455 - DNA, 25 bp, Homo sapien
ggtgtaggccactgcggggcatcat

SEQ ID NO: 2461456 - DNA, 25 bp, Homo sapien
gtaggccactgcggggcatcatggg

SEQ ID NO: 2461457 - DNA, 25 bp, Homo sapien
cagtcccccagatcatcattcaggg

SEQ ID NO: 2461458 - DNA, 25 bp, Homo sapien
ggaattggctttggaccacgacctg

SEQ ID NO: 2461459 - DNA, 25 bp, Homo sapien
tgacaagtcacggatgcctttcccc

SEQ ID NO: 2461460 - DNA, 25 bp, Homo sapien
ccacagcactactggagggagttag

SEQ ID NO: 2461461 - DNA, 25 bp, Homo sapien
cagtcctatcatgttgtgtttcaga

SEQ ID NO: 2461462 - DNA, 25 bp, Homo sapien
atgctgcgctggcactgagacattt

SEQ ID NO: 2461463 - DNA, 25 bp, Homo sapien
agtcctatcatgttgtgtttcagag

SEQ ID NO: 2461464 - DNA, 25 bp, Homo sapien
tcccactgtagacgatcaattaaat

SEQ ID NO: 2461465 - DNA, 25 bp, Homo sapien
aaaaataaatcccactgtagacgat

SEQ ID NO: 2461466 - DNA, 25 bp, Homo sapien
gtagacgatcaattaaatggcaggg

SEQ ID NO: 2461467 - DNA, 25 bp, Homo sapien
aagtctttttcatgatgggggaaag

SEQ ID NO: 2461468 - DNA, 25 bp, Homo sapien
tgtggctgagcattaaggttcatct

SEQ ID NO: 2461469 - DNA, 25 bp, Homo sapien
tggctgagcattaaggttcatctga

SEQ ID NO: 2461470 - DNA, 25 bp, Homo sapien
gaatgtggctgagcattaaggttca

SEQ ID NO: 2461471 - DNA, 25 bp, Homo sapien
atgtggctgagcattaaggttcatc

SEQ ID NO: 2461472 - DNA, 25 bp, Homo sapien
gcgtgtgcacgttccagcctgcatg

SEQ ID NO: 2461473 - DNA, 25 bp, Homo sapien
gtgtgcacgttccagcctgcatgtt

SEQ ID NO: 2461474 - DNA, 25 bp, Homo sapien
ctggtaccaatgtgagcgtgtgcac

SEQ ID NO: 2461475 - DNA, 25 bp, Homo sapien
gagcgtgtgcacgttccagcctgca

SEQ ID NO: 2461476 - DNA, 25 bp, Homo sapien
accactgggtttgacaatccaactt

SEQ ID NO: 2461477 - DNA, 25 bp, Homo sapien
tccaacttcaggacccgtgaagcct

SEQ ID NO: 2461478 - DNA, 25 bp, Homo sapien
tgtgtacctttgtttggccagaggt

SEQ ID NO: 2461479 - DNA, 25 bp, Homo sapien
cccttgtgtacctttgtttggccag

SEQ ID NO: 2461480 - DNA, 25 bp, Homo sapien
gggagacacgaagagtcctcacagt

SEQ ID NO: 2461481 - DNA, 25 bp, Homo sapien
ctggggagacacgaagagtcctcac

SEQ ID NO: 2461482 - DNA, 25 bp, Homo sapien
ggaaaagagtggctgggcgaactac

SEQ ID NO: 2461483 - DNA, 25 bp, Homo sapien
ggtaggaggaaaagagtggctgggc

SEQ ID NO: 2461484 - DNA, 25 bp, Homo sapien
tgtcatggacctgaaatgacatccg

SEQ ID NO: 2461485 - DNA, 25 bp, Homo sapien
ctgaaatgacatccggagggaaata

SEQ ID NO: 2461486 - DNA, 25 bp, Homo sapien
catggacctgaaatgacatccggag

SEQ ID NO: 2461487 - DNA, 25 bp, Homo sapien
gacctgaaatgacatccggagggaa

SEQ ID NO: 2461488 - DNA, 25 bp, Homo sapien
aaggcaggcattcagggaagaagca

SEQ ID NO: 2461489 - DNA, 25 bp, Homo sapien
ggaagaagcaacagaacctgcaggg

SEQ ID NO: 2461490 - DNA, 25 bp, Homo sapien
gggattcactgtctgggaatccctg

SEQ ID NO: 2461491 - DNA, 25 bp, Homo sapien
tgtgtcttcctgtgtgttcggtcgg

SEQ ID NO: 2461492 - DNA, 25 bp, Homo sapien
tgcggggtcgggtagatgggacact

SEQ ID NO: 2461493 - DNA, 25 bp, Homo sapien
ccccaagagggcacgggtctgtaag

SEQ ID NO: 2461494 - DNA, 25 bp, Homo sapien
tccccaagagggcacgggtctgtaa

SEQ ID NO: 2461495 - DNA, 25 bp, Homo sapien
gctgcggggtcgggtagatgggaca

SEQ ID NO: 2461496 - DNA, 25 bp, Homo sapien
aggtcctggtgagcaacggcctaac

SEQ ID NO: 2461497 - DNA, 25 bp, Homo sapien
caacggcctaacaggccagtgacac

SEQ ID NO: 2461498 - DNA, 25 bp, Homo sapien
taagccacgtaggagctcaggagag

SEQ ID NO: 2461499 - DNA, 25 bp, Homo sapien
cactaagccacgtaggagctcagga

SEQ ID NO: 2461500 - DNA, 25 bp, Homo sapien
atgaccttcgccccgcacatcctct

SEQ ID NO: 2461501 - DNA, 25 bp, Homo sapien
accttcgccccgcacatcctctcca

SEQ ID NO: 2461502 - DNA, 25 bp, Homo sapien
tgaccttcgccccgcacatcctctc

SEQ ID NO: 2461503 - DNA, 25 bp, Homo sapien
gaccttcgccccgcacatcctctcc

SEQ ID NO: 2461504 - DNA, 25 bp, Homo sapien
tccatagaaatagaagagcggcaca

SEQ ID NO: 2461505 - DNA, 25 bp, Homo sapien
agaccttgatcctgggcgcctatga

SEQ ID NO: 2461506 - DNA, 25 bp, Homo sapien
gaagcattactcctggtgccctagc

SEQ ID NO: 2461507 - DNA, 25 bp, Homo sapien
tatgttgggtaaaacgcatccagca

SEQ ID NO: 2461508 - DNA, 25 bp, Homo sapien
ctgggcagtcacagtcagccaatgg

SEQ ID NO: 2461509 - DNA, 25 bp, Homo sapien
cagccaatgggctgaagaagctcag

SEQ ID NO: 2461510 - DNA, 25 bp, Homo sapien
cacagtcagccaatgggctgaagaa

SEQ ID NO: 2461511 - DNA, 25 bp, Homo sapien
ccagaacctgggcagtcacagtcag

SEQ ID NO: 2461512 - DNA, 25 bp, Homo sapien
tgcaatactcctgaatggtcacttc

SEQ ID NO: 2461513 - DNA, 25 bp, Homo sapien
caatgcaatactcctgaatggtcac

SEQ ID NO: 2461514 - DNA, 25 bp, Homo sapien
acttgatcctgccaccggtacctgg

SEQ ID NO: 2461515 - DNA, 25 bp, Homo sapien
tgaaaggaaaacttgatcctgccac

SEQ ID NO: 2461516 - DNA, 25 bp, Homo sapien
gccaacatctgggtctgccgcacga

SEQ ID NO: 2461517 - DNA, 25 bp, Homo sapien
tgggtctgccgcacgatctgcctct

SEQ ID NO: 2461518 - DNA, 25 bp, Homo sapien
acatctgggtctgccgcacgatctg

SEQ ID NO: 2461519 - DNA, 25 bp, Homo sapien
gggtctgccgcacgatctgcctctg

SEQ ID NO: 2461520 - DNA, 25 bp, Homo sapien
tttgcaagagcacggagagtgtggg

SEQ ID NO: 2461521 - DNA, 25 bp, Homo sapien
ggcgctggggggcacctttgcggct

SEQ ID NO: 2461522 - DNA, 25 bp, Homo sapien
cgctggggggcacctttgcggctgt

SEQ ID NO: 2461523 - DNA, 25 bp, Homo sapien
ctggggggcacctttgcggctgtgg

SEQ ID NO: 2461524 - DNA, 25 bp, Homo sapien
tggcgctggggggcacctttgcggc

SEQ ID NO: 2461525 - DNA, 25 bp, Homo sapien
aggaggcaggcccagacagtctact

SEQ ID NO: 2461526 - DNA, 25 bp, Homo sapien
tggcggcgggtggaggaggcaggcc

SEQ ID NO: 2461527 - DNA, 25 bp, Homo sapien
gtggaggaggcaggcccagacagtc

SEQ ID NO: 2461528 - DNA, 25 bp, Homo sapien
gaggaggcaggcccagacagtctac

SEQ ID NO: 2461529 - DNA, 25 bp, Homo sapien
tctttgtgtgcagcgctggcagagg

SEQ ID NO: 2461530 - DNA, 25 bp, Homo sapien
catctttgtgtgcagcgctggcaga

SEQ ID NO: 2461531 - DNA, 25 bp, Homo sapien
atctttgtgtgcagcgctggcagag

SEQ ID NO: 2461532 - DNA, 25 bp, Homo sapien
gcccgcaggggacacggaattttgc

SEQ ID NO: 2461533 - DNA, 25 bp, Homo sapien
cacggaattttgctgcccttctatc

SEQ ID NO: 2461534 - DNA, 25 bp, Homo sapien
atgagtctgtccttggttcctctca

SEQ ID NO: 2461535 - DNA, 25 bp, Homo sapien
ttggttcctctcattgtcccccata

SEQ ID NO: 2461536 - DNA, 25 bp, Homo sapien
agccggggatgtcccgcggcctggg

SEQ ID NO: 2461537 - DNA, 25 bp, Homo sapien
atgtcccgcggcctggggcatttac

SEQ ID NO: 2461538 - DNA, 25 bp, Homo sapien
gaagccggggatgtcccgcggcctg

SEQ ID NO: 2461539 - DNA, 25 bp, Homo sapien
cagaagccggggatgtcccgcggcc

SEQ ID NO: 2461540 - DNA, 25 bp, Homo sapien
cgagcccagctccacgtgaaggacg

SEQ ID NO: 2461541 - DNA, 25 bp, Homo sapien
gacgtccagcgagtccgttgccggc

SEQ ID NO: 2461542 - DNA, 25 bp, Homo sapien
gagcccagctccacgtgaaggacgt

SEQ ID NO: 2461543 - DNA, 25 bp, Homo sapien
agcgagtccgttgccggcgggggca

SEQ ID NO: 2461544 - DNA, 25 bp, Homo sapien
ccatgatgtcatcccccactggcat

SEQ ID NO: 2461545 - DNA, 25 bp, Homo sapien
ggcctgctgggcctcctgctgccgc

SEQ ID NO: 2461546 - DNA, 25 bp, Homo sapien
cctgctgccgctccacattggcctc

SEQ ID NO: 2461547 - DNA, 25 bp, Homo sapien
ctagggccaaggccaggctgggcct

SEQ ID NO: 2461548 - DNA, 25 bp, Homo sapien
agctcgccccactcgcaatgcggcc

SEQ ID NO: 2461549 - DNA, 25 bp, Homo sapien
tgcacacgggtcatcggattggcga

SEQ ID NO: 2461550 - DNA, 25 bp, Homo sapien
cgcaatgcggcccagacacccagca

SEQ ID NO: 2461551 - DNA, 25 bp, Homo sapien
tgcccttgcgggagcctctgcgcca

SEQ ID NO: 2461552 - DNA, 25 bp, Homo sapien
tttgaccgtcctaaccctgtgtgct

SEQ ID NO: 2461553 - DNA, 25 bp, Homo sapien
gcagcagcttgatgactatccacag

SEQ ID NO: 2461554 - DNA, 25 bp, Homo sapien
tcagctgccatacttttgaccgtcc

SEQ ID NO: 2461555 - DNA, 25 bp, Homo sapien
gactgccatatccaaccctgatttt

SEQ ID NO: 2461556 - DNA, 25 bp, Homo sapien
cctcattcccttgccatgcgggagg

SEQ ID NO: 2461557 - DNA, 25 bp, Homo sapien
cctgggctgggaaggatcccctcat

SEQ ID NO: 2461558 - DNA, 25 bp, Homo sapien
gctgggaaggatcccctcattccct

SEQ ID NO: 2461559 - DNA, 25 bp, Homo sapien
tgggctgggaaggatcccctcattc

SEQ ID NO: 2461560 - DNA, 25 bp, Homo sapien
gaaagaacacccgtggggcactggc

SEQ ID NO: 2461561 - DNA, 25 bp, Homo sapien
gctggaaagaacacccgtggggcac

SEQ ID NO: 2461562 - DNA, 25 bp, Homo sapien
ctggaaagaacacccgtggggcact

SEQ ID NO: 2461563 - DNA, 25 bp, Homo sapien
tggaaagaacacccgtggggcactg

SEQ ID NO: 2461564 - DNA, 25 bp, Homo sapien
actcaggccttgctgggcccacatg

SEQ ID NO: 2461565 - DNA, 25 bp, Homo sapien
attgcttcttccctgaatgtaccga

SEQ ID NO: 2461566 - DNA, 25 bp, Homo sapien
cctcttggggagaatgccaacttcc

SEQ ID NO: 2461567 - DNA, 25 bp, Homo sapien
catgggctggaaactctctggtgca

SEQ ID NO: 2461568 - DNA, 25 bp, Homo sapien
aagacaaagacagctgctaggtttc

SEQ ID NO: 2461569 - DNA, 25 bp, Homo sapien
cacacaggaagacaaagacagctgc

SEQ ID NO: 2461570 - DNA, 25 bp, Homo sapien
gacaaagacagctgctaggtttcat

SEQ ID NO: 2461571 - DNA, 25 bp, Homo sapien
ggaagacaaagacagctgctaggtt

SEQ ID NO: 2461572 - DNA, 25 bp, Homo sapien
atactcaggtaggccttaatgctca

SEQ ID NO: 2461573 - DNA, 25 bp, Homo sapien
tactcaggtaggccttaatgctcag

SEQ ID NO: 2461574 - DNA, 25 bp, Homo sapien
gtctacaccaatactcaggtaggcc

SEQ ID NO: 2461575 - DNA, 25 bp, Homo sapien
tacaccaatactcaggtaggcctta

SEQ ID NO: 2461576 - DNA, 25 bp, Homo sapien
ctttcctttcgctggcacccagtgt

SEQ ID NO: 2461577 - DNA, 25 bp, Homo sapien
gtctcctttcctttcgctggcaccc

SEQ ID NO: 2461578 - DNA, 25 bp, Homo sapien
cttctttccaggtgtctcctttcct

SEQ ID NO: 2461579 - DNA, 25 bp, Homo sapien
cttcttctttccaggtgtctccttt

SEQ ID NO: 2461580 - DNA, 25 bp, Homo sapien
tgcactcacatttctgggcccaaaa

SEQ ID NO: 2461581 - DNA, 25 bp, Homo sapien
cttgcactcacatttctgggcccaa

SEQ ID NO: 2461582 - DNA, 25 bp, Homo sapien
ctttccaagatctcttgcactcaca

SEQ ID NO: 2461583 - DNA, 25 bp, Homo sapien
actcacatttctgggcccaaaacat

SEQ ID NO: 2461584 - DNA, 25 bp, Homo sapien
gaataactctcgagaagtccaaaaa

SEQ ID NO: 2461585 - DNA, 25 bp, Homo sapien
aagctgtttttggagcatgaattgc

SEQ ID NO: 2461586 - DNA, 25 bp, Homo sapien
tgctatttgtgagatgtacgccggg

SEQ ID NO: 2461587 - DNA, 25 bp, Homo sapien
tggtgatagcataaagagtattggg

SEQ ID NO: 2461588 - DNA, 25 bp, Homo sapien
tgaaaggcttgccaggcctatctgc

SEQ ID NO: 2461589 - DNA, 25 bp, Homo sapien
aaaggcttgccaggcctatctgctt

SEQ ID NO: 2461590 - DNA, 25 bp, Homo sapien
ggcttgccaggcctatctgcttcta

SEQ ID NO: 2461591 - DNA, 25 bp, Homo sapien
caatgaaaggcttgccaggcctatc

SEQ ID NO: 2461592 - DNA, 25 bp, Homo sapien
tgactaagccccacttggaccattc

SEQ ID NO: 2461593 - DNA, 25 bp, Homo sapien
ctaggtagggtatggcatggtcagt

SEQ ID NO: 2461594 - DNA, 25 bp, Homo sapien
cttgggagctaggtagggtatggca

SEQ ID NO: 2461595 - DNA, 25 bp, Homo sapien
tgagcttgggcagaatcccgaagat

SEQ ID NO: 2461596 - DNA, 25 bp, Homo sapien
tcaggtaggagctgtacggcctgca

SEQ ID NO: 2461597 - DNA, 25 bp, Homo sapien
gcagctggaggcttgaccttcatga

SEQ ID NO: 2461598 - DNA, 25 bp, Homo sapien
cttgaccttcatgatcccacaacca

SEQ ID NO: 2461599 - DNA, 25 bp, Homo sapien
gaggcttgaccttcatgatcccaca

SEQ ID NO: 2461600 - DNA, 25 bp, Homo sapien
gactgcagtggaatgagacatcccg

SEQ ID NO: 2461601 - DNA, 25 bp, Homo sapien
ctgcagtggaatgagacatcccgta

SEQ ID NO: 2461602 - DNA, 25 bp, Homo sapien
gcagtggaatgagacatcccgtatc

SEQ ID NO: 2461603 - DNA, 25 bp, Homo sapien
ctagactgcagtggaatgagacatc

SEQ ID NO: 2461604 - DNA, 25 bp, Homo sapien
tgctgccggtacccggaagagttgc

SEQ ID NO: 2461605 - DNA, 25 bp, Homo sapien
ctgctgccggtacccggaagagttg

SEQ ID NO: 2461606 - DNA, 25 bp, Homo sapien
ctgccggtacccggaagagttgctt

SEQ ID NO: 2461607 - DNA, 25 bp, Homo sapien
cctgctgccggtacccggaagagtt

SEQ ID NO: 2461608 - DNA, 25 bp, Homo sapien
tgaggtgacctgttagctggggtga

SEQ ID NO: 2461609 - DNA, 25 bp, Homo sapien
tgacctgttagctggggtgaagcat

SEQ ID NO: 2461610 - DNA, 25 bp, Homo sapien
gctggggtgaggtgacctgttagct

SEQ ID NO: 2461611 - DNA, 25 bp, Homo sapien
ctctcattgagacacccccgggtcc

SEQ ID NO: 2461612 - DNA, 25 bp, Homo sapien
tgaggcgactacttgctcggcgttt

SEQ ID NO: 2461613 - DNA, 25 bp, Homo sapien
tgtgtgaggcgactacttgctcggc

SEQ ID NO: 2461614 - DNA, 25 bp, Homo sapien
ggcgactacttgctcggcgtttctg

SEQ ID NO: 2461615 - DNA, 25 bp, Homo sapien
cgactacttgctcggcgtttctgag

SEQ ID NO: 2461616 - DNA, 25 bp, Homo sapien
ctgaggggtgcacgtgtccacccca

SEQ ID NO: 2461617 - DNA, 25 bp, Homo sapien
gaggggtgcacgtgtccaccccagg

SEQ ID NO: 2461618 - DNA, 25 bp, Homo sapien
ggtgcacgtgtccaccccaggcaac

SEQ ID NO: 2461619 - DNA, 25 bp, Homo sapien
ggggtgcacgtgtccaccccaggca

SEQ ID NO: 2461620 - DNA, 25 bp, Homo sapien
gcctgggacattcacgtagccgagc

SEQ ID NO: 2461621 - DNA, 25 bp, Homo sapien
ggacattcacgtagccgagctccaa

SEQ ID NO: 2461622 - DNA, 25 bp, Homo sapien
cggcacccgtcaactctgggggcaa

SEQ ID NO: 2461623 - DNA, 25 bp, Homo sapien
caactctgggggcaactccaggaga

SEQ ID NO: 2461624 - DNA, 25 bp, Homo sapien
ggatgccaaggccctggcttccaga

SEQ ID NO: 2461625 - DNA, 25 bp, Homo sapien
gatgccaaggccctggcttccagag

SEQ ID NO: 2461626 - DNA, 25 bp, Homo sapien
tgtggattgtatcccgcatgttcac

SEQ ID NO: 2461627 - DNA, 25 bp, Homo sapien
gaaaagaggatagaacctggtgagg

SEQ ID NO: 2461628 - DNA, 25 bp, Homo sapien
aggtgtggattgtatcccgcatgtt

SEQ ID NO: 2461629 - DNA, 25 bp, Homo sapien
aaaagaggatagaacctggtgaggt

SEQ ID NO: 2461630 - DNA, 25 bp, Homo sapien
tttcaggattgccatcgccaagcct

SEQ ID NO: 2461631 - DNA, 25 bp, Homo sapien
cagcagcactactggacatactttt

SEQ ID NO: 2461632 - DNA, 25 bp, Homo sapien
gattgccatcgccaagccttttggt

SEQ ID NO: 2461633 - DNA, 25 bp, Homo sapien
ccatcgccaagccttttggtggtgt

SEQ ID NO: 2461634 - DNA, 25 bp, Homo sapien
ataggtgattcatgtcttaaaggaa

SEQ ID NO: 2461635 - DNA, 25 bp, Homo sapien
gttcccagctgaataggtgattcat

SEQ ID NO: 2461636 - DNA, 25 bp, Homo sapien
gaaaactcctccagcgtcttgggat

SEQ ID NO: 2461637 - DNA, 25 bp, Homo sapien
tgtcttaaaggaaaactcctccagc

SEQ ID NO: 2461638 - DNA, 25 bp, Homo sapien
accagacaatatcccaaacccatgg

SEQ ID NO: 2461639 - DNA, 25 bp, Homo sapien
tgaaccctcaacaacacaccagaca

SEQ ID NO: 2461640 - DNA, 25 bp, Homo sapien
ttctatcactcaatgaaccctcaac

SEQ ID NO: 2461641 - DNA, 25 bp, Homo sapien
ccctttctgaaacggagccagaaga

SEQ ID NO: 2461642 - DNA, 25 bp, Homo sapien
catgagagggcagttctccatcatc

SEQ ID NO: 2461643 - DNA, 25 bp, Homo sapien
ttcacatcatgagagggcagttctc

SEQ ID NO: 2461644 - DNA, 25 bp, Homo sapien
gcttcacatcatgagagggcagttc

SEQ ID NO: 2461645 - DNA, 25 bp, Homo sapien
cctctgctgagcacatgcttcacat

SEQ ID NO: 2461646 - DNA, 25 bp, Homo sapien
agaggctcaggatgaagggaggcag

SEQ ID NO: 2461647 - DNA, 25 bp, Homo sapien
ggctcaggatgaagggaggcagtga

SEQ ID NO: 2461648 - DNA, 25 bp, Homo sapien
agagcccctcagaggctcaggatga

SEQ ID NO: 2461649 - DNA, 25 bp, Homo sapien
gctcaggatgaagggaggcagtgac

SEQ ID NO: 2461650 - DNA, 25 bp, Homo sapien
atctccacctgacccgattcttgca

SEQ ID NO: 2461651 - DNA, 25 bp, Homo sapien
gaaagaaccgtcaacaacacatcag

SEQ ID NO: 2461652 - DNA, 25 bp, Homo sapien
cacatcagactttattccaatctcc

SEQ ID NO: 2461653 - DNA, 25 bp, Homo sapien
tgacaccagcccatggggcttcagg

SEQ ID NO: 2461654 - DNA, 25 bp, Homo sapien
gctggcatccaaataaactcccact

SEQ ID NO: 2461655 - DNA, 25 bp, Homo sapien
acaccacaccgaaaaacaggcatct

SEQ ID NO: 2461656 - DNA, 25 bp, Homo sapien
tcatgaatccacagttgggagcttg

SEQ ID NO: 2461657 - DNA, 25 bp, Homo sapien
ggagcacaccacaccgaaaaacagg

SEQ ID NO: 2461658 - DNA, 25 bp, Homo sapien
tcacatcgttgtggggaactccttc

SEQ ID NO: 2461659 - DNA, 25 bp, Homo sapien
gcttcacatcgttgtggggaactcc

SEQ ID NO: 2461660 - DNA, 25 bp, Homo sapien
cgttgtggggaactccttcatagtt

SEQ ID NO: 2461661 - DNA, 25 bp, Homo sapien
tgaggaggtgcttcacatcgttgtg

SEQ ID NO: 2461662 - DNA, 25 bp, Homo sapien
aaaaccatgaattcctgttacagcc

SEQ ID NO: 2461663 - DNA, 25 bp, Homo sapien
tggatattcctctgatcctaggaga

SEQ ID NO: 2461664 - DNA, 25 bp, Homo sapien
tgggggtggactctcccctatcttc

SEQ ID NO: 2461665 - DNA, 25 bp, Homo sapien
ctatcttctccgtaggatcccctgg

SEQ ID NO: 2461666 - DNA, 25 bp, Homo sapien
tctccgtaggatcccctggatattc

SEQ ID NO: 2461667 - DNA, 25 bp, Homo sapien
taggacatatagtgtgagaatcaat

SEQ ID NO: 2461668 - DNA, 25 bp, Homo sapien
gatttcattgtaggacatatagtgt

SEQ ID NO: 2461669 - DNA, 25 bp, Homo sapien
tatagtgtgagaatcaataaggtca

SEQ ID NO: 2461670 - DNA, 25 bp, Homo sapien
tcattgtaggacatatagtgtgaga

SEQ ID NO: 2461671 - DNA, 25 bp, Homo sapien
gcaaggaagattgggagtgcaaatt

SEQ ID NO: 2461672 - DNA, 25 bp, Homo sapien
ttcaagtgggagtcctccaacatgc

SEQ ID NO: 2461673 - DNA, 25 bp, Homo sapien
ccaaatgaaagtggaatcgattgat

SEQ ID NO: 2461674 - DNA, 25 bp, Homo sapien
accaaggcccgctgttcaagtggga

SEQ ID NO: 2461675 - DNA, 25 bp, Homo sapien
cacagagtacgagcagtaataaggt

SEQ ID NO: 2461676 - DNA, 25 bp, Homo sapien
gaacacgtgcttttcatcacaatgg

SEQ ID NO: 2461677 - DNA, 25 bp, Homo sapien
gtcacataggtttgaagatacagtc

SEQ ID NO: 2461678 - DNA, 25 bp, Homo sapien
ggtggttggagtcatgcatattcgc

SEQ ID NO: 2461679 - DNA, 25 bp, Homo sapien
acttcatattcagttcctagctgag

SEQ ID NO: 2461680 - DNA, 25 bp, Homo sapien
catcccatggagaaacactagcagt

SEQ ID NO: 2461681 - DNA, 25 bp, Homo sapien
ggaccttcacgtcactccttcattg

SEQ ID NO: 2461682 - DNA, 25 bp, Homo sapien
tagctgagcaggaccttcacgtcac

SEQ ID NO: 2461683 - DNA, 25 bp, Homo sapien
tgggacagatactttgagcagccat

SEQ ID NO: 2461684 - DNA, 25 bp, Homo sapien
tttgggacagatactttgagcagcc

SEQ ID NO: 2461685 - DNA, 25 bp, Homo sapien
ttttgggacagatactttgagcagc

SEQ ID NO: 2461686 - DNA, 25 bp, Homo sapien
gacagatactttgagcagccataac

SEQ ID NO: 2461687 - DNA, 25 bp, Homo sapien
tgtgggagtccacttagagctgtga

SEQ ID NO: 2461688 - DNA, 25 bp, Homo sapien
ccatttcaccaagagcccctgcaag

SEQ ID NO: 2461689 - DNA, 25 bp, Homo sapien
ctccatttcaccaagagcccctgca

SEQ ID NO: 2461690 - DNA, 25 bp, Homo sapien
gggagtccacttagagctgtgagaa

SEQ ID NO: 2461691 - DNA, 25 bp, Homo sapien
atcacagtctagacatctcctcctc

SEQ ID NO: 2461692 - DNA, 25 bp, Homo sapien
agacaacattccagtccccctggga

SEQ ID NO: 2461693 - DNA, 25 bp, Homo sapien
accccatcacagtctagacatctcc

SEQ ID NO: 2461694 - DNA, 25 bp, Homo sapien
gtccccctgggactcaattcttgca

SEQ ID NO: 2461695 - DNA, 25 bp, Homo sapien
ctgagaaggagacctctgtggaggt

SEQ ID NO: 2461696 - DNA, 25 bp, Homo sapien
gcttggctgagaaggagacctctgt

SEQ ID NO: 2461697 - DNA, 25 bp, Homo sapien
catgaatgccacaattccctgaggc

SEQ ID NO: 2461698 - DNA, 25 bp, Homo sapien
gccacaattccctgaggcttggctg

SEQ ID NO: 2461699 - DNA, 25 bp, Homo sapien
gggatacacaggatagtctcatgat

SEQ ID NO: 2461700 - DNA, 25 bp, Homo sapien
gtgggatacacaggatagtctcatg

SEQ ID NO: 2461701 - DNA, 25 bp, Homo sapien
cagccaaggaatcttgcctgtcttc

SEQ ID NO: 2461702 - DNA, 25 bp, Homo sapien
gcctgtcttctttgtgggatacaca

SEQ ID NO: 2461703 - DNA, 25 bp, Homo sapien
tgtcacccttacacagctacaagtc

SEQ ID NO: 2461704 - DNA, 25 bp, Homo sapien
gcatgagctagtctccaggcaccag

SEQ ID NO: 2461705 - DNA, 25 bp, Homo sapien
tgccttgtggtggactcttgcttgt

SEQ ID NO: 2461706 - DNA, 25 bp, Homo sapien
catgccctcaaatgcgcatgagcta

SEQ ID NO: 2461707 - DNA, 25 bp, Homo sapien
tgatttctaggtagatcccactgtg

SEQ ID NO: 2461708 - DNA, 25 bp, Homo sapien
ttctaggtagatcccactgtgtttg

SEQ ID NO: 2461709 - DNA, 25 bp, Homo sapien
ggtagatcccactgtgtttgccggg

SEQ ID NO: 2461710 - DNA, 25 bp, Homo sapien
taggtagatcccactgtgtttgccg

SEQ ID NO: 2461711 - DNA, 25 bp, Homo sapien
caattttggttcatagccgagcaga

SEQ ID NO: 2461712 - DNA, 25 bp, Homo sapien
attttggttcatagccgagcagata

SEQ ID NO: 2461713 - DNA, 25 bp, Homo sapien
ctcaattttggttcatagccgagca

SEQ ID NO: 2461714 - DNA, 25 bp, Homo sapien
atcaggattcactcctccatcacct

SEQ ID NO: 2461715 - DNA, 25 bp, Homo sapien
gtcagatagcgtgaggatacaatct

SEQ ID NO: 2461716 - DNA, 25 bp, Homo sapien
taaggtcagatagcgtgaggataca

SEQ ID NO: 2461717 - DNA, 25 bp, Homo sapien
cctgggacatacagtgtgagtagca

SEQ ID NO: 2461718 - DNA, 25 bp, Homo sapien
gatgaggggtggatggggtcccaca

SEQ ID NO: 2461719 - DNA, 25 bp, Homo sapien
cagatgacacaaaacgtgcttcaaa

SEQ ID NO: 2461720 - DNA, 25 bp, Homo sapien
tgacacaaaacgtgcttcaaacagc

SEQ ID NO: 2461721 - DNA, 25 bp, Homo sapien
gatgacacaaaacgtgcttcaaaca

SEQ ID NO: 2461722 - DNA, 25 bp, Homo sapien
gacacaaaacgtgcttcaaacagca

SEQ ID NO: 2461723 - DNA, 25 bp, Homo sapien
ttttaggtcctctgataagaatcac

SEQ ID NO: 2461724 - DNA, 25 bp, Homo sapien
cagagattttagagggcaaaaggga

SEQ ID NO: 2461725 - DNA, 25 bp, Homo sapien
caaaagggacttcgggcaggctcct

SEQ ID NO: 2461726 - DNA, 25 bp, Homo sapien
ccaggttatgggtcgttgccttatt

SEQ ID NO: 2461727 - DNA, 25 bp, Homo sapien
tgtgcccgttggaggccagtctgag

SEQ ID NO: 2461728 - DNA, 25 bp, Homo sapien
tcacagtgaatctcaacggcactaa

SEQ ID NO: 2461729 - DNA, 25 bp, Homo sapien
tggactccagcacaaagcatcgcat

SEQ ID NO: 2461730 - DNA, 25 bp, Homo sapien
gctttcatgggtaattcacagtgaa

SEQ ID NO: 2461731 - DNA, 25 bp, Homo sapien
tggctgctgcatagtgagaagtccc

SEQ ID NO: 2461732 - DNA, 25 bp, Homo sapien
ctgagcctgcttcacgaatgcacat

SEQ ID NO: 2461733 - DNA, 25 bp, Homo sapien
aatgcacatacactagtctcagggc

SEQ ID NO: 2461734 - DNA, 25 bp, Homo sapien
tgtgagatacatggcatagtcccat

SEQ ID NO: 2461735 - DNA, 25 bp, Homo sapien
ctaggagagggcagacttcagccag

SEQ ID NO: 2461736 - DNA, 25 bp, Homo sapien
taggagagggcagacttcagccagc

SEQ ID NO: 2461737 - DNA, 25 bp, Homo sapien
caagcagtccatacaatggcccgat

SEQ ID NO: 2461738 - DNA, 25 bp, Homo sapien
tgggagtactccaacacgccaaaaa

SEQ ID NO: 2461739 - DNA, 25 bp, Homo sapien
attcgcacattcctttaattgcaca

SEQ ID NO: 2461740 - DNA, 25 bp, Homo sapien
ggtgcttccaacaccattcgcacat

SEQ ID NO: 2461741 - DNA, 25 bp, Homo sapien
caaagcgacatgaccctgtatcttg

SEQ ID NO: 2461742 - DNA, 25 bp, Homo sapien
gacctccatggacgtgcatcggtgg

SEQ ID NO: 2461743 - DNA, 25 bp, Homo sapien
cattggctagtctcaaggcaccagt

SEQ ID NO: 2461744 - DNA, 25 bp, Homo sapien
tctggctagcttcacaatgaacatc

SEQ ID NO: 2461745 - DNA, 25 bp, Homo sapien
gacatccgtgttcttcattggatta

SEQ ID NO: 2461746 - DNA, 25 bp, Homo sapien
tcttcctatattgacatccgtgttc

SEQ ID NO: 2461747 - DNA, 25 bp, Homo sapien
ctcttcctatattgacatccgtgtt

SEQ ID NO: 2461748 - DNA, 25 bp, Homo sapien
tgttcttcattggattagggttttc

SEQ ID NO: 2461749 - DNA, 25 bp, Homo sapien
tgcagtctgcttataacaatgtggc

SEQ ID NO: 2461750 - DNA, 25 bp, Homo sapien
tccagcctgcctagacattgtaggg

SEQ ID NO: 2461751 - DNA, 25 bp, Homo sapien
gagggcatatgtgagccagcctgaa

SEQ ID NO: 2461752 - DNA, 25 bp, Homo sapien
tgtggctaacacactacagcatctc

SEQ ID NO: 2461753 - DNA, 25 bp, Homo sapien
tgccaacatgtgctggcatccaaat

SEQ ID NO: 2461754 - DNA, 25 bp, Homo sapien
tggactgggaggcatgccaacatgt

SEQ ID NO: 2461755 - DNA, 25 bp, Homo sapien
ggaggcatgccaacatgtgctggca

SEQ ID NO: 2461756 - DNA, 25 bp, Homo sapien
aacatgtgctggcatccaaataaca

SEQ ID NO: 2461757 - DNA, 25 bp, Homo sapien
ggaacggattcttgcatatagatct

SEQ ID NO: 2461758 - DNA, 25 bp, Homo sapien
tccctgctggaacggattcttgcat

SEQ ID NO: 2461759 - DNA, 25 bp, Homo sapien
tatagatctttcttgaatggagtca

SEQ ID NO: 2461760 - DNA, 25 bp, Homo sapien
ctatattccaatccctgctggaacg

SEQ ID NO: 2461761 - DNA, 25 bp, Homo sapien
ggaatccatgacataacccacattc

SEQ ID NO: 2461762 - DNA, 25 bp, Homo sapien
tgtggaatccatgacataacccaca

SEQ ID NO: 2461763 - DNA, 25 bp, Homo sapien
gtggaatccatgacataacccacat

SEQ ID NO: 2461764 - DNA, 25 bp, Homo sapien
tggaatccatgacataacccacatt

SEQ ID NO: 2461765 - DNA, 25 bp, Homo sapien
gaagagacatcaagcacagccccag

SEQ ID NO: 2461766 - DNA, 25 bp, Homo sapien
gcttgaagagacatcaagcacagcc

SEQ ID NO: 2461767 - DNA, 25 bp, Homo sapien
ttgaagagacatcaagcacagcccc

SEQ ID NO: 2461768 - DNA, 25 bp, Homo sapien
gggcagacgtgagccagcttgaaga

SEQ ID NO: 2461769 - DNA, 25 bp, Homo sapien
acagctgagcacgtgtttcatgtcg

SEQ ID NO: 2461770 - DNA, 25 bp, Homo sapien
gtgggcactccaacatcgccttgag

SEQ ID NO: 2461771 - DNA, 25 bp, Homo sapien
tcatgtcgtgagtgggcactccaac

SEQ ID NO: 2461772 - DNA, 25 bp, Homo sapien
tccaacatcgccttgagatttcatc

SEQ ID NO: 2461773 - DNA, 25 bp, Homo sapien
ataagttcaggtagggttgaggata

SEQ ID NO: 2461774 - DNA, 25 bp, Homo sapien
gttcaggtagggttgaggatacaat

SEQ ID NO: 2461775 - DNA, 25 bp, Homo sapien
agttcaggtagggttgaggatacaa

SEQ ID NO: 2461776 - DNA, 25 bp, Homo sapien
taagttcaggtagggttgaggatac

SEQ ID NO: 2461777 - DNA, 25 bp, Homo sapien
tcattggatcttgccggattggact

SEQ ID NO: 2461778 - DNA, 25 bp, Homo sapien
tcttcgctgtggagtggatctttca

SEQ ID NO: 2461779 - DNA, 25 bp, Homo sapien
gattcctgtaggaggatatgcaggc

SEQ ID NO: 2461780 - DNA, 25 bp, Homo sapien
ggattggactgcctctcactacaga

SEQ ID NO: 2461781 - DNA, 25 bp, Homo sapien
atccccatgggaatggaatcttgca

SEQ ID NO: 2461782 - DNA, 25 bp, Homo sapien
cccatgggaatggaatcttgcacac

SEQ ID NO: 2461783 - DNA, 25 bp, Homo sapien
catgggaatggaatcttgcacacag

SEQ ID NO: 2461784 - DNA, 25 bp, Homo sapien
caatccccatgggaatggaatcttg

SEQ ID NO: 2461785 - DNA, 25 bp, Homo sapien
tttcgatctggcagtgggttatcac

SEQ ID NO: 2461786 - DNA, 25 bp, Homo sapien
tcagagactgccaaaatggccctat

SEQ ID NO: 2461787 - DNA, 25 bp, Homo sapien
ggtctagactttttcgatctggcag

SEQ ID NO: 2461788 - DNA, 25 bp, Homo sapien
caaaatggccctatggtctagactt

SEQ ID NO: 2461789 - DNA, 25 bp, Homo sapien
cagaaggtgctttcagcctcatcgc

SEQ ID NO: 2461790 - DNA, 25 bp, Homo sapien
tgttcagttggaagtactccaacgg

SEQ ID NO: 2461791 - DNA, 25 bp, Homo sapien
cctcatcgcgtagtgttcagttgga

SEQ ID NO: 2461792 - DNA, 25 bp, Homo sapien
ccaacgggcagggaacatttgaatt

SEQ ID NO: 2461793 - DNA, 25 bp, Homo sapien
tggccaacccacagagagacaatag

SEQ ID NO: 2461794 - DNA, 25 bp, Homo sapien
gtggccaacccacagagagacaata

SEQ ID NO: 2461795 - DNA, 25 bp, Homo sapien
tcacttgcacgctaaaggtttcccc

SEQ ID NO: 2461796 - DNA, 25 bp, Homo sapien
gactggaaaggactgatgctgaatg

SEQ ID NO: 2461797 - DNA, 25 bp, Homo sapien
tgttccttgtcagcctatggtttcc

SEQ ID NO: 2461798 - DNA, 25 bp, Homo sapien
tcctgagtctggcttaatcacttgc

SEQ ID NO: 2461799 - DNA, 25 bp, Homo sapien
atgaaaagggactttgggtaggctg

SEQ ID NO: 2461800 - DNA, 25 bp, Homo sapien
ggatgcaagctcaaggcaagtcatt

SEQ ID NO: 2461801 - DNA, 25 bp, Homo sapien
gaatcattgaacattgcttggatgc

SEQ ID NO: 2461802 - DNA, 25 bp, Homo sapien
tgcactactgttcaccagtttcagg

SEQ ID NO: 2461803 - DNA, 25 bp, Homo sapien
gtttttggatactctgactggaatc

SEQ ID NO: 2461804 - DNA, 25 bp, Homo sapien
agaccagatcgaggtgagaacactg

SEQ ID NO: 2461805 - DNA, 25 bp, Homo sapien
tgagagaccagatcgaggtgagaac

SEQ ID NO: 2461806 - DNA, 25 bp, Homo sapien
cacccatgagagaccagatcgaggt

SEQ ID NO: 2461807 - DNA, 25 bp, Homo sapien
ctgcacccatgagagaccagatcga

SEQ ID NO: 2461808 - DNA, 25 bp, Homo sapien
attgcccctcaaccacactactgga

SEQ ID NO: 2461809 - DNA, 25 bp, Homo sapien
gatacacttttcaggattgcaatct

SEQ ID NO: 2461810 - DNA, 25 bp, Homo sapien
caggtgatgcttgatgtttcttggc

SEQ ID NO: 2461811 - DNA, 25 bp, Homo sapien
tttcaggattgcaatctccacaggt

SEQ ID NO: 2461812 - DNA, 25 bp, Homo sapien
agtcttgaaatggctctgcctccag

SEQ ID NO: 2461813 - DNA, 25 bp, Homo sapien
gtcttgaaatggctctgcctccagt

SEQ ID NO: 2461814 - DNA, 25 bp, Homo sapien
gcgtataagggccctaaggttgaga

SEQ ID NO: 2461815 - DNA, 25 bp, Homo sapien
acagcgtataagggccctaaggttg

SEQ ID NO: 2461816 - DNA, 25 bp, Homo sapien
cagcgtataagggccctaaggttga

SEQ ID NO: 2461817 - DNA, 25 bp, Homo sapien
tgaccatggagacagcgtataaggg

SEQ ID NO: 2461818 - DNA, 25 bp, Homo sapien
taaccagaaacagcctctgagactc

SEQ ID NO: 2461819 - DNA, 25 bp, Homo sapien
tgccataaccagaaacagcctctga

SEQ ID NO: 2461820 - DNA, 25 bp, Homo sapien
gatttgccataaccagaaacagcct

SEQ ID NO: 2461821 - DNA, 25 bp, Homo sapien
ccagaaacagcctctgagactctgt

SEQ ID NO: 2461822 - DNA, 25 bp, Homo sapien
tttggacttgcctttgtcgtggttc

SEQ ID NO: 2461823 - DNA, 25 bp, Homo sapien
tgtcgtggttcctgcctttcacaga

SEQ ID NO: 2461824 - DNA, 25 bp, Homo sapien
cgtggttcctgcctttcacagagag

SEQ ID NO: 2461825 - DNA, 25 bp, Homo sapien
ggttcctgcctttcacagagagccc

SEQ ID NO: 2461826 - DNA, 25 bp, Homo sapien
cttgaattcgatcacgtgcttcatg

SEQ ID NO: 2461827 - DNA, 25 bp, Homo sapien
catgaaggggtccacttccattgtc

SEQ ID NO: 2461828 - DNA, 25 bp, Homo sapien
attcgatcacgtgcttcatgtcatg

SEQ ID NO: 2461829 - DNA, 25 bp, Homo sapien
tcatgtcatgaaggggtccacttcc

SEQ ID NO: 2461830 - DNA, 25 bp, Homo sapien
aggtcagatgcggtgagtataaaac

SEQ ID NO: 2461831 - DNA, 25 bp, Homo sapien
cggtgagtataaaacctgctgaggg

SEQ ID NO: 2461832 - DNA, 25 bp, Homo sapien
gatgcggtgagtataaaacctgctg

SEQ ID NO: 2461833 - DNA, 25 bp, Homo sapien
cagatgcggtgagtataaaacctgc

SEQ ID NO: 2461834 - DNA, 25 bp, Homo sapien
cagctgtccacaccatgacctggtt

SEQ ID NO: 2461835 - DNA, 25 bp, Homo sapien
caagtactccaacctaccaggaact

SEQ ID NO: 2461836 - DNA, 25 bp, Homo sapien
gctgtccacaccatgacctggtttc

SEQ ID NO: 2461837 - DNA, 25 bp, Homo sapien
ctggtgcaagtactccaacctacca

SEQ ID NO: 2461838 - DNA, 25 bp, Homo sapien
ggctgcgctgcaggtttgggtcgtt

SEQ ID NO: 2461839 - DNA, 25 bp, Homo sapien
cgctgcaggtttgggtcgttatctc

SEQ ID NO: 2461840 - DNA, 25 bp, Homo sapien
tgcgctgcaggtttgggtcgttatc

SEQ ID NO: 2461841 - DNA, 25 bp, Homo sapien
tgcaggtttgggtcgttatctcatt

SEQ ID NO: 2461842 - DNA, 25 bp, Homo sapien
gagacacggtctcaattttatctgc

SEQ ID NO: 2461843 - DNA, 25 bp, Homo sapien
gaatccatagtttccctcaatagca

SEQ ID NO: 2461844 - DNA, 25 bp, Homo sapien
actggacagttttgtcaggcttgcc

SEQ ID NO: 2461845 - DNA, 25 bp, Homo sapien
gagaggccagcccaaagtactgctc

SEQ ID NO: 2461846 - DNA, 25 bp, Homo sapien
catggtattcgattctggcacacag

SEQ ID NO: 2461847 - DNA, 25 bp, Homo sapien
ccatggtattcgattctggcacaca

SEQ ID NO: 2461848 - DNA, 25 bp, Homo sapien
ccccatggtattcgattctggcaca

SEQ ID NO: 2461849 - DNA, 25 bp, Homo sapien
ttccccatggtattcgattctggca

SEQ ID NO: 2461850 - DNA, 25 bp, Homo sapien
agttttgaaacacctcctcctccag

SEQ ID NO: 2461851 - DNA, 25 bp, Homo sapien
ttttgaaacacctcctcctccagca

SEQ ID NO: 2461852 - DNA, 25 bp, Homo sapien
ttgaaacacctcctcctccagcagg

SEQ ID NO: 2461853 - DNA, 25 bp, Homo sapien
gaaacacctcctcctccagcaggac

SEQ ID NO: 2461854 - DNA, 25 bp, Homo sapien
gagacctttgtagaggttcgtcaat

SEQ ID NO: 2461855 - DNA, 25 bp, Homo sapien
cctttgtagaggttcgtcaatggtg

SEQ ID NO: 2461856 - DNA, 25 bp, Homo sapien
gagaaggagacctttgtagaggttc

SEQ ID NO: 2461857 - DNA, 25 bp, Homo sapien
ttgtagaggttcgtcaatggtggac

SEQ ID NO: 2461858 - DNA, 25 bp, Homo sapien
tcattaattgcacaagcaatccaca

SEQ ID NO: 2461859 - DNA, 25 bp, Homo sapien
tttcattaattgcacaagcaatcca

SEQ ID NO: 2461860 - DNA, 25 bp, Homo sapien
ttcattaattgcacaagcaatccac

SEQ ID NO: 2461861 - DNA, 25 bp, Homo sapien
ctgcaatgtgcaaggagtattggga

SEQ ID NO: 2461862 - DNA, 25 bp, Homo sapien
tgcaaggagtattgggagtgccaat

SEQ ID NO: 2461863 - DNA, 25 bp, Homo sapien
ttctgcaatgtgcaaggagtattgg

SEQ ID NO: 2461864 - DNA, 25 bp, Homo sapien
tattgggagtgccaattgggaccat

SEQ ID NO: 2461865 - DNA, 25 bp, Homo sapien
gctggcaagctcttgatttgaggcc

SEQ ID NO: 2461866 - DNA, 25 bp, Homo sapien
ggcaagctcttgatttgaggccttt

SEQ ID NO: 2461867 - DNA, 25 bp, Homo sapien
tggcaagctcttgatttgaggcctt

SEQ ID NO: 2461868 - DNA, 25 bp, Homo sapien
gcaagctcttgatttgaggcctttc

SEQ ID NO: 2461869 - DNA, 25 bp, Homo sapien
ggaatgttctgatgttgggtgggat

SEQ ID NO: 2461870 - DNA, 25 bp, Homo sapien
tgggatgtggtctccacatttgcct

SEQ ID NO: 2461871 - DNA, 25 bp, Homo sapien
ctacacggagccaaaagggagtgga

SEQ ID NO: 2461872 - DNA, 25 bp, Homo sapien
ggtgggatgtggtctccacatttgc

SEQ ID NO: 2461873 - DNA, 25 bp, Homo sapien
ctacatgtcatgaagggcaactcct

SEQ ID NO: 2461874 - DNA, 25 bp, Homo sapien
acatgtcatgaagggcaactcctcc

SEQ ID NO: 2461875 - DNA, 25 bp, Homo sapien
gagagcaggttctacatgtcatgaa

SEQ ID NO: 2461876 - DNA, 25 bp, Homo sapien
tcccaggagagcaggttctacatgt

SEQ ID NO: 2461877 - DNA, 25 bp, Homo sapien
aagcgtaatgggagggcgacggata

SEQ ID NO: 2461878 - DNA, 25 bp, Homo sapien
ctgaagcgtaatgggagggcgacgg

SEQ ID NO: 2461879 - DNA, 25 bp, Homo sapien
gcaaactggggccattctgacaaag

SEQ ID NO: 2461880 - DNA, 25 bp, Homo sapien
ggccattctgacaaagtcctgattt

SEQ ID NO: 2461881 - DNA, 25 bp, Homo sapien
attcggttctgagcgggtgcttcac

SEQ ID NO: 2461882 - DNA, 25 bp, Homo sapien
tgcggccaacccagtgatagacact

SEQ ID NO: 2461883 - DNA, 25 bp, Homo sapien
tagacactagtattgtccacagggc

SEQ ID NO: 2461884 - DNA, 25 bp, Homo sapien
gcttcaccttgtacggaggcactaa

SEQ ID NO: 2461885 - DNA, 25 bp, Homo sapien
tcaacagcattactggacacctttg

SEQ ID NO: 2461886 - DNA, 25 bp, Homo sapien
tggacacctttgtcagactagcaat

SEQ ID NO: 2461887 - DNA, 25 bp, Homo sapien
aacagcattactggacacctttgtc

SEQ ID NO: 2461888 - DNA, 25 bp, Homo sapien
tttgtcagactagcaatttccacag

SEQ ID NO: 2461889 - DNA, 25 bp, Homo sapien
actatattccaatctccgtgggacc

SEQ ID NO: 2461890 - DNA, 25 bp, Homo sapien
gactatattccaatctccgtgggac

SEQ ID NO: 2461891 - DNA, 25 bp, Homo sapien
tatattccaatctccgtgggacctg

SEQ ID NO: 2461892 - DNA, 25 bp, Homo sapien
cagactatattccaatctccgtggg

SEQ ID NO: 2461893 - DNA, 25 bp, Homo sapien
ttttcagtgaccatctcagtttgga

SEQ ID NO: 2461894 - DNA, 25 bp, Homo sapien
cagtgggtctcagccacagagtcat

SEQ ID NO: 2461895 - DNA, 25 bp, Homo sapien
cttcagtgggtctcagccacagagt

SEQ ID NO: 2461896 - DNA, 25 bp, Homo sapien
tcagtgggtctcagccacagagtca

SEQ ID NO: 2461897 - DNA, 25 bp, Homo sapien
ttcagtgggtctcagccacagagtc

SEQ ID NO: 2461898 - DNA, 25 bp, Homo sapien
cagtccacgccatggcctgatgttg

SEQ ID NO: 2461899 - DNA, 25 bp, Homo sapien
agcagtccacgccatggcctgatgt

SEQ ID NO: 2461900 - DNA, 25 bp, Homo sapien
agtccacgccatggcctgatgttga

SEQ ID NO: 2461901 - DNA, 25 bp, Homo sapien
ccacgccatggcctgatgttgaggt

SEQ ID NO: 2461902 - DNA, 25 bp, Homo sapien
aaccaagatttcctgttacagctgc

SEQ ID NO: 2461903 - DNA, 25 bp, Homo sapien
aaaccaagatttcctgttacagctg

SEQ ID NO: 2461904 - DNA, 25 bp, Homo sapien
ccaagatttcctgttacagctgcca

SEQ ID NO: 2461905 - DNA, 25 bp, Homo sapien
taaaaccaagatttcctgttacagc

SEQ ID NO: 2461906 - DNA, 25 bp, Homo sapien
tgttctaccacttctatcgggggat

SEQ ID NO: 2461907 - DNA, 25 bp, Homo sapien
taccacttctatcgggggatgcaag

SEQ ID NO: 2461908 - DNA, 25 bp, Homo sapien
ttgttctaccacttctatcggggga

SEQ ID NO: 2461909 - DNA, 25 bp, Homo sapien
tctaccacttctatcgggggatgca

SEQ ID NO: 2461910 - DNA, 25 bp, Homo sapien
gatatgattctatcacccaaaaaat

SEQ ID NO: 2461911 - DNA, 25 bp, Homo sapien
gggtctcagatatgattctatcacc

SEQ ID NO: 2461912 - DNA, 25 bp, Homo sapien
atcacccaaaaaatcctcaacaact

SEQ ID NO: 2461913 - DNA, 25 bp, Homo sapien
ctttggggtctcagatatgattcta

SEQ ID NO: 2461914 - DNA, 25 bp, Homo sapien
cagacaatactccaatcctcatggg

SEQ ID NO: 2461915 - DNA, 25 bp, Homo sapien
atactccaatcctcatgggacctga

SEQ ID NO: 2461916 - DNA, 25 bp, Homo sapien
tactccaatcctcatgggacctgat

SEQ ID NO: 2461917 - DNA, 25 bp, Homo sapien
agacaatactccaatcctcatggga

SEQ ID NO: 2461918 - DNA, 25 bp, Homo sapien
tggcccagtgttctggtgggagtac

SEQ ID NO: 2461919 - DNA, 25 bp, Homo sapien
catggcccagtgttctggtgggagt

SEQ ID NO: 2461920 - DNA, 25 bp, Homo sapien
cccagtgttctggtgggagtacttt

SEQ ID NO: 2461921 - DNA, 25 bp, Homo sapien
cagtgttctggtgggagtactttaa

SEQ ID NO: 2461922 - DNA, 25 bp, Homo sapien
gcgaccacatcgcagtcgcgaaaca

SEQ ID NO: 2461923 - DNA, 25 bp, Homo sapien
tcgcagtcgcgaaacacctcttcct

SEQ ID NO: 2461924 - DNA, 25 bp, Homo sapien
cctctttcgctaatggagttagaag

SEQ ID NO: 2461925 - DNA, 25 bp, Homo sapien
gtttccagcgaccacatcgcagtcg

SEQ ID NO: 2461926 - DNA, 25 bp, Homo sapien
gagcgtcagctgtgtcttctcgtct

SEQ ID NO: 2461927 - DNA, 25 bp, Homo sapien
cgttgcctagcaagaagtatctgca

SEQ ID NO: 2461928 - DNA, 25 bp, Homo sapien
tagcatcgctataaatgtcaccgtt

SEQ ID NO: 2461929 - DNA, 25 bp, Homo sapien
acctccgtggaggagcgtcagctgt

SEQ ID NO: 2461930 - DNA, 25 bp, Homo sapien
tgcatagtgaaagaccagtctgagg

SEQ ID NO: 2461931 - DNA, 25 bp, Homo sapien
cacaccagaaacagacatcttgcag

SEQ ID NO: 2461932 - DNA, 25 bp, Homo sapien
acagtccgaggtcagtctgaggtaa

SEQ ID NO: 2461933 - DNA, 25 bp, Homo sapien
gagaataaccacaactgcatagtga

SEQ ID NO: 2461934 - DNA, 25 bp, Homo sapien
aaccctcaacaacacaacagatcat

SEQ ID NO: 2461935 - DNA, 25 bp, Homo sapien
gaaccctcaacaacacaacagatca

SEQ ID NO: 2461936 - DNA, 25 bp, Homo sapien
ctctaaggactcaggtatgattgta

SEQ ID NO: 2461937 - DNA, 25 bp, Homo sapien
tctaaggactcaggtatgattgtat

SEQ ID NO: 2461938 - DNA, 25 bp, Homo sapien
ttccaattcttatgggaccagatta

SEQ ID NO: 2461939 - DNA, 25 bp, Homo sapien
tatgggaccagattattgcacacag

SEQ ID NO: 2461940 - DNA, 25 bp, Homo sapien
cttatgggaccagattattgcacac

SEQ ID NO: 2461941 - DNA, 25 bp, Homo sapien
aattcttatgggaccagattattgc

SEQ ID NO: 2461942 - DNA, 25 bp, Homo sapien
gcatagacactagcagtcctgtcca

SEQ ID NO: 2461943 - DNA, 25 bp, Homo sapien
ccaggcatagacactagcagtcctg

SEQ ID NO: 2461944 - DNA, 25 bp, Homo sapien
gacactagcagtcctgtccactggg

SEQ ID NO: 2461945 - DNA, 25 bp, Homo sapien
tgtccactgggcactttgaattaac

SEQ ID NO: 2461946 - DNA, 25 bp, Homo sapien
caggtgattcacatcttgtggtggg

SEQ ID NO: 2461947 - DNA, 25 bp, Homo sapien
gtgtagccatcacacttgcgtcttc

SEQ ID NO: 2461948 - DNA, 25 bp, Homo sapien
agtgtagccatcacacttgcgtctt

SEQ ID NO: 2461949 - DNA, 25 bp, Homo sapien
tgtagccatcacacttgcgtcttct

SEQ ID NO: 2461950 - DNA, 25 bp, Homo sapien
gagtgtagccatcacacttgcgtct

SEQ ID NO: 2461951 - DNA, 25 bp, Homo sapien
gaaggatgtacctcagagtcccaca

SEQ ID NO: 2461952 - DNA, 25 bp, Homo sapien
gaagagagaagatgcaacccgtttc

SEQ ID NO: 2461953 - DNA, 25 bp, Homo sapien
cccttctctttgtcgtgaagagaga

SEQ ID NO: 2461954 - DNA, 25 bp, Homo sapien
cttggcatggcgatgttcttcctcc

SEQ ID NO: 2461955 - DNA, 25 bp, Homo sapien
tgcttccttggcatggcgatgttct

SEQ ID NO: 2461956 - DNA, 25 bp, Homo sapien
gggcaataacttcttagcataccgc

SEQ ID NO: 2461957 - DNA, 25 bp, Homo sapien
gctccttctttatgtgctggctctg

SEQ ID NO: 2461958 - DNA, 25 bp, Homo sapien
actaaatttgccctttgtgccccat

SEQ ID NO: 2461959 - DNA, 25 bp, Homo sapien
tttacacttggaatcaccagctcct

SEQ ID NO: 2461960 - DNA, 25 bp, Homo sapien
catggcttttgtcaggatttgatac

SEQ ID NO: 2461961 - DNA, 25 bp, Homo sapien
ctatacaaagtcagatttcatggct

SEQ ID NO: 2461962 - DNA, 25 bp, Homo sapien
caaagtcagatttcatggcttttgt

SEQ ID NO: 2461963 - DNA, 25 bp, Homo sapien
cagatttcatggcttttgtcaggat

SEQ ID NO: 2461964 - DNA, 25 bp, Homo sapien
aatcccttccagacctaatatttat

SEQ ID NO: 2461965 - DNA, 25 bp, Homo sapien
attctgaatccatatcctcagcatg

SEQ ID NO: 2461966 - DNA, 25 bp, Homo sapien
tggctgaacaaatcccttccagacc

SEQ ID NO: 2461967 - DNA, 25 bp, Homo sapien
tgtttcaccacagtccagttggagc

SEQ ID NO: 2461968 - DNA, 25 bp, Homo sapien
cagtaactagccctggcacattcac

SEQ ID NO: 2461969 - DNA, 25 bp, Homo sapien
ctgtggtcatctgcaccaggcattc

SEQ ID NO: 2461970 - DNA, 25 bp, Homo sapien
tgtggtcatctgcaccaggcattcc

SEQ ID NO: 2461971 - DNA, 25 bp, Homo sapien
gctgttggagaccaaactgaaattc

SEQ ID NO: 2461972 - DNA, 25 bp, Homo sapien
tctggggtctgactatggctgtagc

SEQ ID NO: 2461973 - DNA, 25 bp, Homo sapien
gggtctgactatggctgtagcttcc

SEQ ID NO: 2461974 - DNA, 25 bp, Homo sapien
ttggagaccaaactgaaattccaac

SEQ ID NO: 2461975 - DNA, 25 bp, Homo sapien
tatttcaacaaattgtctgttccct

SEQ ID NO: 2461976 - DNA, 25 bp, Homo sapien
ctgcttcttgaaaatatacacatac

SEQ ID NO: 2461977 - DNA, 25 bp, Homo sapien
tgtttctatctcttccagggaaggc

SEQ ID NO: 2461978 - DNA, 25 bp, Homo sapien
cagggaaggcccatatttcaacaaa

SEQ ID NO: 2461979 - DNA, 25 bp, Homo sapien
ttcccaggtctgtgacaaatggctg

SEQ ID NO: 2461980 - DNA, 25 bp, Homo sapien
cccaggtctgtgacaaatggctgcc

SEQ ID NO: 2461981 - DNA, 25 bp, Homo sapien
tggctgccggtcaaaactccctctt

SEQ ID NO: 2461982 - DNA, 25 bp, Homo sapien
aaatggctgccggtcaaaactccct

SEQ ID NO: 2461983 - DNA, 25 bp, Homo sapien
tcctgaatcacctttcttgagctct

SEQ ID NO: 2461984 - DNA, 25 bp, Homo sapien
ttcctgaatcacctttcttgagctc

SEQ ID NO: 2461985 - DNA, 25 bp, Homo sapien
cctgaatcacctttcttgagctctg

SEQ ID NO: 2461986 - DNA, 25 bp, Homo sapien
tcccttcactcacctcaatgtagtt

SEQ ID NO: 2461987 - DNA, 25 bp, Homo sapien
gattccttttcgggcacctgccact

SEQ ID NO: 2461988 - DNA, 25 bp, Homo sapien
gcttgtaagacaagaagaggacagg

SEQ ID NO: 2461989 - DNA, 25 bp, Homo sapien
tggacactaattgactcccttcact

SEQ ID NO: 2461990 - DNA, 25 bp, Homo sapien
tcttgatccagtttttctagttccc

SEQ ID NO: 2461991 - DNA, 25 bp, Homo sapien
ttgatccagtttttctagttccctc

SEQ ID NO: 2461992 - DNA, 25 bp, Homo sapien
ctttcttgatccagtttttctagtt

SEQ ID NO: 2461993 - DNA, 25 bp, Homo sapien
ttcttgatccagtttttctagttcc

SEQ ID NO: 2461994 - DNA, 25 bp, Homo sapien
ataaagaattgctgcctgtatcaca

SEQ ID NO: 2461995 - DNA, 25 bp, Homo sapien
aaataaagaattgctgcctgtatca

SEQ ID NO: 2461996 - DNA, 25 bp, Homo sapien
aataaagaattgctgcctgtatcac

SEQ ID NO: 2461997 - DNA, 25 bp, Homo sapien
ctgttcattgacttcaggcccccaa

SEQ ID NO: 2461998 - DNA, 25 bp, Homo sapien
gctgggcttttggttgacatgtgac

SEQ ID NO: 2461999 - DNA, 25 bp, Homo sapien
gctgagatgaatacaagtcaccctc

SEQ ID NO: 2462000 - DNA, 25 bp, Homo sapien
gccaagatccggagagactctgctg

SEQ ID NO: 2462001 - DNA, 25 bp, Homo sapien
tactgccaaatggtctgcaaaatta

SEQ ID NO: 2462002 - DNA, 25 bp, Homo sapien
tctatactgccaaatggtctgcaaa

SEQ ID NO: 2462003 - DNA, 25 bp, Homo sapien
ttctatactgccaaatggtctgcaa

SEQ ID NO: 2462004 - DNA, 25 bp, Homo sapien
tatactgccaaatggtctgcaaaat

SEQ ID NO: 2462005 - DNA, 25 bp, Homo sapien
tggtctggagggttggagaggctgt

SEQ ID NO: 2462006 - DNA, 25 bp, Homo sapien
tttggtctggagggttggagaggct

SEQ ID NO: 2462007 - DNA, 25 bp, Homo sapien
ttttggtctggagggttggagaggc

SEQ ID NO: 2462008 - DNA, 25 bp, Homo sapien
ttggtctggagggttggagaggctg

SEQ ID NO: 2462009 - DNA, 25 bp, Homo sapien
tctgtcagaacaaggactggggaac

SEQ ID NO: 2462010 - DNA, 25 bp, Homo sapien
gaacccacatgtaatctgtccagac

SEQ ID NO: 2462011 - DNA, 25 bp, Homo sapien
tggggaacccacatgtaatctgtcc

SEQ ID NO: 2462012 - DNA, 25 bp, Homo sapien
gggaacccacatgtaatctgtccag

SEQ ID NO: 2462013 - DNA, 25 bp, Homo sapien
ctgttgatgacatccccaacatcca

SEQ ID NO: 2462014 - DNA, 25 bp, Homo sapien
tgatgacatccccaacatccaaaat

SEQ ID NO: 2462015 - DNA, 25 bp, Homo sapien
gttgatgacatccccaacatccaaa

SEQ ID NO: 2462016 - DNA, 25 bp, Homo sapien
gatgacatccccaacatccaaaata

SEQ ID NO: 2462017 - DNA, 25 bp, Homo sapien
aatctgcagcagtgaaactctggac

SEQ ID NO: 2462018 - DNA, 25 bp, Homo sapien
aatcatactgtggactattgccaaa

SEQ ID NO: 2462019 - DNA, 25 bp, Homo sapien
aagtcacactttggaaccaagaaga

SEQ ID NO: 2462020 - DNA, 25 bp, Homo sapien
ctgtggactattgccaaatctgcag

SEQ ID NO: 2462021 - DNA, 25 bp, Homo sapien
taaatccctgagcaaaaactatagc

SEQ ID NO: 2462022 - DNA, 25 bp, Homo sapien
gagcctatcgctaagacagtcacaa

SEQ ID NO: 2462023 - DNA, 25 bp, Homo sapien
gatcctcgatgaaatgccaccaaca

SEQ ID NO: 2462024 - DNA, 25 bp, Homo sapien
catagatccaggatagaattccaac

SEQ ID NO: 2462025 - DNA, 25 bp, Homo sapien
tgaaacaataacactgtgaacccac

SEQ ID NO: 2462026 - DNA, 25 bp, Homo sapien
tataatcacattagggacccatgct

SEQ ID NO: 2462027 - DNA, 25 bp, Homo sapien
tctatatgtgatacggtcacaacac

SEQ ID NO: 2462028 - DNA, 25 bp, Homo sapien
gaacccacgttgagtctccagcaat

SEQ ID NO: 2462029 - DNA, 25 bp, Homo sapien
tactttccacagtcgtaccttggac

SEQ ID NO: 2462030 - DNA, 25 bp, Homo sapien
ccaacagtaaatccgttcacagagg

SEQ ID NO: 2462031 - DNA, 25 bp, Homo sapien
atccgttcacagaggctggaacttc

SEQ ID NO: 2462032 - DNA, 25 bp, Homo sapien
ggacacagcctatactttccacagt

SEQ ID NO: 2462033 - DNA, 25 bp, Homo sapien
tctatctccagtagtcaaaccatgg

SEQ ID NO: 2462034 - DNA, 25 bp, Homo sapien
tgtaacccgagcagacactggatcc

SEQ ID NO: 2462035 - DNA, 25 bp, Homo sapien
caaaccatggatcttgcttaaagga

SEQ ID NO: 2462036 - DNA, 25 bp, Homo sapien
gattctggcccaaggttctatctcc

SEQ ID NO: 2462037 - DNA, 25 bp, Homo sapien
taaccgaaaatgatgggcctgggag

SEQ ID NO: 2462038 - DNA, 25 bp, Homo sapien
cggcagaaaggagaaatcacgtcag

SEQ ID NO: 2462039 - DNA, 25 bp, Homo sapien
ctgagcccaatgtggtcctccagat

SEQ ID NO: 2462040 - DNA, 25 bp, Homo sapien
ggagcctgggttcatcgtaaccgaa

SEQ ID NO: 2462041 - DNA, 25 bp, Homo sapien
ttacaaaaggaaaccttcatcctga

SEQ ID NO: 2462042 - DNA, 25 bp, Homo sapien
aaggaaaccttcatcctgatgccag

SEQ ID NO: 2462043 - DNA, 25 bp, Homo sapien
aaaggaaaccttcatcctgatgcca

SEQ ID NO: 2462044 - DNA, 25 bp, Homo sapien
gaaaccttcatcctgatgccagtac

SEQ ID NO: 2462045 - DNA, 25 bp, Homo sapien
ctggggtggctgagttcctccatct

SEQ ID NO: 2462046 - DNA, 25 bp, Homo sapien
ggggtggctgagttcctccatctac

SEQ ID NO: 2462047 - DNA, 25 bp, Homo sapien
tggggtggctgagttcctccatcta

SEQ ID NO: 2462048 - DNA, 25 bp, Homo sapien
gtcatttaccaggagcacgcctctt

SEQ ID NO: 2462049 - DNA, 25 bp, Homo sapien
cttccacttctgtcgtgatgtcatt

SEQ ID NO: 2462050 - DNA, 25 bp, Homo sapien
cacttctgtcgtgatgtcatttacc

SEQ ID NO: 2462051 - DNA, 25 bp, Homo sapien
tcatttaccaggagcacgcctcttc

SEQ ID NO: 2462052 - DNA, 25 bp, Homo sapien
tgcatggttagctgcatacaggagc

SEQ ID NO: 2462053 - DNA, 25 bp, Homo sapien
tccagattccctgcatggttagctg

SEQ ID NO: 2462054 - DNA, 25 bp, Homo sapien
gtcaccatgaggtccagattccctg

SEQ ID NO: 2462055 - DNA, 25 bp, Homo sapien
acagtccgccgcagtcaccatgagg

SEQ ID NO: 2462056 - DNA, 25 bp, Homo sapien
tcttctcagaggaggactaccgcgg

SEQ ID NO: 2462057 - DNA, 25 bp, Homo sapien
gatgcatacgacctgagtgacggga

SEQ ID NO: 2462058 - DNA, 25 bp, Homo sapien
cgaatgggctttctatatgtgggct

SEQ ID NO: 2462059 - DNA, 25 bp, Homo sapien
ggtctctcggcaagactagaaagca

SEQ ID NO: 2462060 - DNA, 25 bp, Homo sapien
actatgatttacacccagtttgtca

SEQ ID NO: 2462061 - DNA, 25 bp, Homo sapien
tactctggcactaaagttgatgtag

SEQ ID NO: 2462062 - DNA, 25 bp, Homo sapien
gtggcacacatctcctttagtttta

SEQ ID NO: 2462063 - DNA, 25 bp, Homo sapien
ttgatgtagggccatcaatcctctg

SEQ ID NO: 2462064 - DNA, 25 bp, Homo sapien
tacactcatcatttcgcagttactt

SEQ ID NO: 2462065 - DNA, 25 bp, Homo sapien
cgcagttactttgtgaaagatcaca

SEQ ID NO: 2462066 - DNA, 25 bp, Homo sapien
cactgtacgtggtataagcaatgga

SEQ ID NO: 2462067 - DNA, 25 bp, Homo sapien
acaggcaaatccagcattctatcct

SEQ ID NO: 2462068 - DNA, 25 bp, Homo sapien
gttagaagagtggagcaatgcagcc

SEQ ID NO: 2462069 - DNA, 25 bp, Homo sapien
cacctctaaaatcaggagtgatgga

SEQ ID NO: 2462070 - DNA, 25 bp, Homo sapien
atttccatggcagaactgtgtttcc

SEQ ID NO: 2462071 - DNA, 25 bp, Homo sapien
gggttaatgggatgcccagacatga

SEQ ID NO: 2462072 - DNA, 25 bp, Homo sapien
tttcttagtttccaggtgtgggagc

SEQ ID NO: 2462073 - DNA, 25 bp, Homo sapien
tcttttgtgcaagtcctttcttagt

SEQ ID NO: 2462074 - DNA, 25 bp, Homo sapien
ttccaggtgtgggagctttgcctgc

SEQ ID NO: 2462075 - DNA, 25 bp, Homo sapien
ccaggtgtgggagctttgcctgcat

SEQ ID NO: 2462076 - DNA, 25 bp, Homo sapien
ctctgtagatcaaccagcgatgcat

SEQ ID NO: 2462077 - DNA, 25 bp, Homo sapien
gaatctggctgggtaaaaccgcatc

SEQ ID NO: 2462078 - DNA, 25 bp, Homo sapien
ctgctctgtagatcaaccagcgatg

SEQ ID NO: 2462079 - DNA, 25 bp, Homo sapien
gtaaaaccgcatcaaagctgctctg

SEQ ID NO: 2462080 - DNA, 25 bp, Homo sapien
tcacgtgttttagatttgtaacctc

SEQ ID NO: 2462081 - DNA, 25 bp, Homo sapien
attgatgaatataagcaagaatcca

SEQ ID NO: 2462082 - DNA, 25 bp, Homo sapien
gttttgaccaatggatgaacattgc

SEQ ID NO: 2462083 - DNA, 25 bp, Homo sapien
caatggatgaacattgctaacattt

SEQ ID NO: 2462084 - DNA, 25 bp, Homo sapien
tccattttgcaagggcaagtgttcc

SEQ ID NO: 2462085 - DNA, 25 bp, Homo sapien
atgatccagaaatcctacagtgaag

SEQ ID NO: 2462086 - DNA, 25 bp, Homo sapien
tactttgggacttataagtggcacc

SEQ ID NO: 2462087 - DNA, 25 bp, Homo sapien
agggacccaaaggtcacgccaggag

SEQ ID NO: 2462088 - DNA, 25 bp, Homo sapien
ttcttcctctggattgtttttctga

SEQ ID NO: 2462089 - DNA, 25 bp, Homo sapien
ccccataacttgagctactgtatcc

SEQ ID NO: 2462090 - DNA, 25 bp, Homo sapien
gccccataacttgagctactgtatc

SEQ ID NO: 2462091 - DNA, 25 bp, Homo sapien
ctatccacagaaggtagattccttc

SEQ ID NO: 2462092 - DNA, 25 bp, Homo sapien
cagaaggtagattccttcattcctt

SEQ ID NO: 2462093 - DNA, 25 bp, Homo sapien
atcatggtatccataatctctagat

SEQ ID NO: 2462094 - DNA, 25 bp, Homo sapien
atggtatccataatctctagatggt

SEQ ID NO: 2462095 - DNA, 25 bp, Homo sapien
cgtaatcatggtatccataatctct

SEQ ID NO: 2462096 - DNA, 25 bp, Homo sapien
gtaatcatggtatccataatctcta

SEQ ID NO: 2462097 - DNA, 25 bp, Homo sapien
gtttctaaacggaggccaccaatga

SEQ ID NO: 2462098 - DNA, 25 bp, Homo sapien
gacatgtgtgatgtcccggatcacc

SEQ ID NO: 2462099 - DNA, 25 bp, Homo sapien
tgtgagccttgtatgcacacctagc

SEQ ID NO: 2462100 - DNA, 25 bp, Homo sapien
cacacagaatctaagcagggcacag

SEQ ID NO: 2462101 - DNA, 25 bp, Homo sapien
caaagtctttgggttacacacacag

SEQ ID NO: 2462102 - DNA, 25 bp, Homo sapien
tcagatttgtaagggctgtcttcta

SEQ ID NO: 2462103 - DNA, 25 bp, Homo sapien
tgtaagggctgtcttctatatgaat

SEQ ID NO: 2462104 - DNA, 25 bp, Homo sapien
catgcttcagatttgtaagggctgt

SEQ ID NO: 2462105 - DNA, 25 bp, Homo sapien
taagggctgtcttctatatgaatta

SEQ ID NO: 2462106 - DNA, 25 bp, Homo sapien
tccagtataaattctcttatgttta

SEQ ID NO: 2462107 - DNA, 25 bp, Homo sapien
tctacaggtgtagggtttccctcca

SEQ ID NO: 2462108 - DNA, 25 bp, Homo sapien
tttccctccagtataaattctctta

SEQ ID NO: 2462109 - DNA, 25 bp, Homo sapien
ccctccagtataaattctcttatgt

SEQ ID NO: 2462110 - DNA, 25 bp, Homo sapien
cccataggctctgtgacattcttca

SEQ ID NO: 2462111 - DNA, 25 bp, Homo sapien
tcttcacatttgtatgatggtttct

SEQ ID NO: 2462112 - DNA, 25 bp, Homo sapien
cccccataggctctgtgacattctt

SEQ ID NO: 2462113 - DNA, 25 bp, Homo sapien
tctctccagtataaattattttatt

SEQ ID NO: 2462114 - DNA, 25 bp, Homo sapien
tgagaattctcttagaattagtaag

SEQ ID NO: 2462115 - DNA, 25 bp, Homo sapien
agcaagttctgagaattctcttaga

SEQ ID NO: 2462116 - DNA, 25 bp, Homo sapien
agaattctcttagaattagtaaggt

SEQ ID NO: 2462117 - DNA, 25 bp, Homo sapien
tctgagaattctcttagaattagta

SEQ ID NO: 2462118 - DNA, 25 bp, Homo sapien
tctttgcaattgtaggatctatttc

SEQ ID NO: 2462119 - DNA, 25 bp, Homo sapien
ctttgcaattgtaggatctatttcc

SEQ ID NO: 2462120 - DNA, 25 bp, Homo sapien
tttgcaattgtaggatctatttcca

SEQ ID NO: 2462121 - DNA, 25 bp, Homo sapien
ttgcaattgtaggatctatttccaa

SEQ ID NO: 2462122 - DNA, 25 bp, Homo sapien
gaagattgggtacacctggaaagct

SEQ ID NO: 2462123 - DNA, 25 bp, Homo sapien
gttcactgaagattgggtacacctg

SEQ ID NO: 2462124 - DNA, 25 bp, Homo sapien
tcactgaagattgggtacacctgga

SEQ ID NO: 2462125 - DNA, 25 bp, Homo sapien
actgaagattgggtacacctggaaa

SEQ ID NO: 2462126 - DNA, 25 bp, Homo sapien
atgttcccaccatatgtctgcagta

SEQ ID NO: 2462127 - DNA, 25 bp, Homo sapien
tgtaaatggttaaggtcacaggttc

SEQ ID NO: 2462128 - DNA, 25 bp, Homo sapien
cccaccatatgtctgcagtaatatg

SEQ ID NO: 2462129 - DNA, 25 bp, Homo sapien
aatggttaaggtcacaggttccata

SEQ ID NO: 2462130 - DNA, 25 bp, Homo sapien
ctaagaaaatttcaattaaagtctg

SEQ ID NO: 2462131 - DNA, 25 bp, Homo sapien
taagaaaatttcaattaaagtctgc

SEQ ID NO: 2462132 - DNA, 25 bp, Homo sapien
aagaaaatttcaattaaagtctgca

SEQ ID NO: 2462133 - DNA, 25 bp, Homo sapien
agaaaatttcaattaaagtctgcat

SEQ ID NO: 2462134 - DNA, 25 bp, Homo sapien
ttactaatgttgaagtccatgttag

SEQ ID NO: 2462135 - DNA, 25 bp, Homo sapien
atttacttgtaatcttgcagaagca

SEQ ID NO: 2462136 - DNA, 25 bp, Homo sapien
cactttcaggcactctctttaatca

SEQ ID NO: 2462137 - DNA, 25 bp, Homo sapien
tatcttcttgcattccagattctct

SEQ ID NO: 2462138 - DNA, 25 bp, Homo sapien
catgaacccactgagaggaacaaac

SEQ ID NO: 2462139 - DNA, 25 bp, Homo sapien
tgcaggggagaaccctcttagggcc

SEQ ID NO: 2462140 - DNA, 25 bp, Homo sapien
tgaactgaaccgagagattcttcag

SEQ ID NO: 2462141 - DNA, 25 bp, Homo sapien
cctcttagggccctgaactgaaccg

SEQ ID NO: 2462142 - DNA, 25 bp, Homo sapien
tacttggagcttcaggggtggcact

SEQ ID NO: 2462143 - DNA, 25 bp, Homo sapien
gtaccaggaatttccatccgcaacc

SEQ ID NO: 2462144 - DNA, 25 bp, Homo sapien
agggtaccaggaatttccatccgca

SEQ ID NO: 2462145 - DNA, 25 bp, Homo sapien
aggaatttccatccgcaacccagcc

SEQ ID NO: 2462146 - DNA, 25 bp, Homo sapien
caggagtttgccagaggccaggaga

SEQ ID NO: 2462147 - DNA, 25 bp, Homo sapien
cattgctaccattccacggcttggc

SEQ ID NO: 2462148 - DNA, 25 bp, Homo sapien
gcaaacctcctgaaagactagtaaa

SEQ ID NO: 2462149 - DNA, 25 bp, Homo sapien
ttgagaaatcatagaccccagtggg

SEQ ID NO: 2462150 - DNA, 25 bp, Homo sapien
taaagactgtatccttcggattccg

SEQ ID NO: 2462151 - DNA, 25 bp, Homo sapien
caagttatacagaaagtttcagtgt

SEQ ID NO: 2462152 - DNA, 25 bp, Homo sapien
taatacaagttatacagaaagtttc

SEQ ID NO: 2462153 - DNA, 25 bp, Homo sapien
tacaagttatacagaaagtttcagt

SEQ ID NO: 2462154 - DNA, 25 bp, Homo sapien
agttatacagaaagtttcagtgtga

SEQ ID NO: 2462155 - DNA, 25 bp, Homo sapien
ccaaacttcttctaaagcgatgcac

SEQ ID NO: 2462156 - DNA, 25 bp, Homo sapien
gatccaacagatttaaatactgcca

SEQ ID NO: 2462157 - DNA, 25 bp, Homo sapien
atagctgagaggatccaacagattt

SEQ ID NO: 2462158 - DNA, 25 bp, Homo sapien
gccaaacttcttctaaagcgatgca

SEQ ID NO: 2462159 - DNA, 25 bp, Homo sapien
gaagcagtcatcttgagtaacaacg

SEQ ID NO: 2462160 - DNA, 25 bp, Homo sapien
cagtcatcttgagtaacaacggaat

SEQ ID NO: 2462161 - DNA, 25 bp, Homo sapien
tcatcttgagtaacaacggaattta

SEQ ID NO: 2462162 - DNA, 25 bp, Homo sapien
agcagtcatcttgagtaacaacgga

SEQ ID NO: 2462163 - DNA, 25 bp, Homo sapien
tttgtatgcttcggtccacagattt

SEQ ID NO: 2462164 - DNA, 25 bp, Homo sapien
ttctctggattaaacagacaagata

SEQ ID NO: 2462165 - DNA, 25 bp, Homo sapien
ccccaacaggccactgcggtagcac

SEQ ID NO: 2462166 - DNA, 25 bp, Homo sapien
cataaccccttttgctccccaacag

SEQ ID NO: 2462167 - DNA, 25 bp, Homo sapien
tgctccccaacaggccactgcggta

SEQ ID NO: 2462168 - DNA, 25 bp, Homo sapien
tccccaacaggccactgcggtagca

SEQ ID NO: 2462169 - DNA, 25 bp, Homo sapien
taattacatacaggcaactgacacc

SEQ ID NO: 2462170 - DNA, 25 bp, Homo sapien
aattacatacaggcaactgacaccc

SEQ ID NO: 2462171 - DNA, 25 bp, Homo sapien
attacatacaggcaactgacaccca

SEQ ID NO: 2462172 - DNA, 25 bp, Homo sapien
catacaggcaactgacacccagtgg

SEQ ID NO: 2462173 - DNA, 25 bp, Homo sapien
ctcctttgctccccaacagggcact

SEQ ID NO: 2462174 - DNA, 25 bp, Homo sapien
ccccaacagggcactgcggtggcat

SEQ ID NO: 2462175 - DNA, 25 bp, Homo sapien
tcctttgctccccaacagggcactg

SEQ ID NO: 2462176 - DNA, 25 bp, Homo sapien
gctccccaacagggcactgcggtgg

SEQ ID NO: 2462177 - DNA, 25 bp, Homo sapien
aattgtatacatggaactgatatcc

SEQ ID NO: 2462178 - DNA, 25 bp, Homo sapien
tatacatggaactgatatccagtgg

SEQ ID NO: 2462179 - DNA, 25 bp, Homo sapien
ctggtaattgtatacatggaactga

SEQ ID NO: 2462180 - DNA, 25 bp, Homo sapien
tggaactgatatccagtggtgacct

SEQ ID NO: 2462181 - DNA, 25 bp, Homo sapien
gaaagaaatatcattcccaatgtaa

SEQ ID NO: 2462182 - DNA, 25 bp, Homo sapien
aattagaaagaaatatcattcccaa

SEQ ID NO: 2462183 - DNA, 25 bp, Homo sapien
agaaatatcattcccaatgtaacaa

SEQ ID NO: 2462184 - DNA, 25 bp, Homo sapien
tatcattcccaatgtaacaaaaata

SEQ ID NO: 2462185 - DNA, 25 bp, Homo sapien
cagtggtgacctgaaatggtgaact

SEQ ID NO: 2462186 - DNA, 25 bp, Homo sapien
gtgaacttggataagcaggaaatgc

SEQ ID NO: 2462187 - DNA, 25 bp, Homo sapien
tggtgacctgaaatggtgaacttgg

SEQ ID NO: 2462188 - DNA, 25 bp, Homo sapien
tatacaggcaactgatatccagtgg

SEQ ID NO: 2462189 - DNA, 25 bp, Homo sapien
tatacaggcaactgatatccagtgg

SEQ ID NO: 2462190 - DNA, 25 bp, Homo sapien
ttgtatacaggcaactgatatccag

SEQ ID NO: 2462191 - DNA, 25 bp, Homo sapien
taattgtatacaggcaactgatatc

SEQ ID NO: 2462192 - DNA, 25 bp, Homo sapien
ctgataattgtatacaggcaactga

SEQ ID NO: 2462193 - DNA, 25 bp, Homo sapien
ctggtgaatttggataagcaggaaa

SEQ ID NO: 2462194 - DNA, 25 bp, Homo sapien
ctgaactggtgaatttggataagca

SEQ ID NO: 2462195 - DNA, 25 bp, Homo sapien
gaactggtgaatttggataagcagg

SEQ ID NO: 2462196 - DNA, 25 bp, Homo sapien
aactggtgaatttggataagcagga

SEQ ID NO: 2462197 - DNA, 25 bp, Homo sapien
tatccagtggcgacttgaaatggtg

SEQ ID NO: 2462198 - DNA, 25 bp, Homo sapien
cttgaaatggtgaatttggataagc

SEQ ID NO: 2462199 - DNA, 25 bp, Homo sapien
actgatatccagtggcgacttgaaa

SEQ ID NO: 2462200 - DNA, 25 bp, Homo sapien
ggaactgatatccagtggcgacttg

SEQ ID NO: 2462201 - DNA, 25 bp, Homo sapien
tgatatccagcagtgacctgaaatg

SEQ ID NO: 2462202 - DNA, 25 bp, Homo sapien
tatacaggcaactgatatccagcag

SEQ ID NO: 2462203 - DNA, 25 bp, Homo sapien
ggtgaacttggataagcaggaaatg

SEQ ID NO: 2462204 - DNA, 25 bp, Homo sapien
tgacctgaaatggtgaacttggata

SEQ ID NO: 2462205 - DNA, 25 bp, Homo sapien
tatccagtggcgacttgaaatggtg

SEQ ID NO: 2462206 - DNA, 25 bp, Homo sapien
cttgaaatggtgaatttggataagc

SEQ ID NO: 2462207 - DNA, 25 bp, Homo sapien
actgatatccagtggcgacttgaaa

SEQ ID NO: 2462208 - DNA, 25 bp, Homo sapien
ggaactgatatccagtggcgacttg

SEQ ID NO: 2462209 - DNA, 25 bp, Homo sapien
ccagcagtgacctgaaatggtgatc

SEQ ID NO: 2462210 - DNA, 25 bp, Homo sapien
gatatccagcagtgacctgaaatgg

SEQ ID NO: 2462211 - DNA, 25 bp, Homo sapien
gtgacctgaaatggtgatcttggat

SEQ ID NO: 2462212 - DNA, 25 bp, Homo sapien
tatacaggcaactgatatccagcag

SEQ ID NO: 2462213 - DNA, 25 bp, Homo sapien
ctgaatcgggataagtaggatattc

SEQ ID NO: 2462214 - DNA, 25 bp, Homo sapien
agtggtgacctgaaatgctgaatcg

SEQ ID NO: 2462215 - DNA, 25 bp, Homo sapien
gaaatgctgaatcgggataagtagg

SEQ ID NO: 2462216 - DNA, 25 bp, Homo sapien
gacctgaaatgctgaatcgggataa

SEQ ID NO: 2462217 - DNA, 25 bp, Homo sapien
gacctggtgaatgtggataagcaga

SEQ ID NO: 2462218 - DNA, 25 bp, Homo sapien
ttcagtgtttggattccgccagacg

SEQ ID NO: 2462219 - DNA, 25 bp, Homo sapien
agtgtttggattccgccagacgttc

SEQ ID NO: 2462220 - DNA, 25 bp, Homo sapien
ttggattccgccagacgttctgaaa

SEQ ID NO: 2462221 - DNA, 25 bp, Homo sapien
gttacaggattcggcgtgatttggg

SEQ ID NO: 2462222 - DNA, 25 bp, Homo sapien
ggtggaggaggaggattaactacca

SEQ ID NO: 2462223 - DNA, 25 bp, Homo sapien
gtggaggaggaggattaactaccaa

SEQ ID NO: 2462224 - DNA, 25 bp, Homo sapien
tggaggaggaggattaactaccaaa

SEQ ID NO: 2462225 - DNA, 25 bp, Homo sapien
gattgcagggcccagcttcagcttt

SEQ ID NO: 2462226 - DNA, 25 bp, Homo sapien
ttttaccatggaaatgtatctgtga

SEQ ID NO: 2462227 - DNA, 25 bp, Homo sapien
gcttcagctttttaccatggaaatg

SEQ ID NO: 2462228 - DNA, 25 bp, Homo sapien
agctttttaccatggaaatgtatct

SEQ ID NO: 2462229 - DNA, 25 bp, Homo sapien
tcctactatcttctggacatccacg

SEQ ID NO: 2462230 - DNA, 25 bp, Homo sapien
ctactatcttctggacatccacgtc

SEQ ID NO: 2462231 - DNA, 25 bp, Homo sapien
cacgtcattaacaaacgaaacaaat

SEQ ID NO: 2462232 - DNA, 25 bp, Homo sapien
attaacaaacgaaacaaatccatag

SEQ ID NO: 2462233 - DNA, 25 bp, Homo sapien
ttcactgaaccgtatctaccaaagc

SEQ ID NO: 2462234 - DNA, 25 bp, Homo sapien
cgtatctaccaaagcagcttccaat

SEQ ID NO: 2462235 - DNA, 25 bp, Homo sapien
accgtatctaccaaagcagcttcca

SEQ ID NO: 2462236 - DNA, 25 bp, Homo sapien
tcactgaaccgtatctaccaaagca

SEQ ID NO: 2462237 - DNA, 25 bp, Homo sapien
cttctggtaacacccagccttggct

SEQ ID NO: 2462238 - DNA, 25 bp, Homo sapien
ccttctggtaacacccagccttggc

SEQ ID NO: 2462239 - DNA, 25 bp, Homo sapien
ctcgttttctgcaacgtacttcact

SEQ ID NO: 2462240 - DNA, 25 bp, Homo sapien
tcgttttctgcaacgtacttcactt

SEQ ID NO: 2462241 - DNA, 25 bp, Homo sapien
tctgcaacgtacttcacttttacca

SEQ ID NO: 2462242 - DNA, 25 bp, Homo sapien
ttttctgcaacgtacttcactttta

SEQ ID NO: 2462243 - DNA, 25 bp, Homo sapien
agtgatgccgtgaactgctgaattt

SEQ ID NO: 2462244 - DNA, 25 bp, Homo sapien
ctagtgatgccgtgaactgctgaat

SEQ ID NO: 2462245 - DNA, 25 bp, Homo sapien
tagtgatgccgtgaactgctgaatt

SEQ ID NO: 2462246 - DNA, 25 bp, Homo sapien
gaagtacagcataactcctttgctc

SEQ ID NO: 2462247 - DNA, 25 bp, Homo sapien
ttatctgaagtacagcataactcct

SEQ ID NO: 2462248 - DNA, 25 bp, Homo sapien
agtacagcataactcctttgctccc

SEQ ID NO: 2462249 - DNA, 25 bp, Homo sapien
ctgaagtacagcataactcctttgc

SEQ ID NO: 2462250 - DNA, 25 bp, Homo sapien
ttctgcaaatggcattgtggaactc

SEQ ID NO: 2462251 - DNA, 25 bp, Homo sapien
tcgtatcgttgaaaagagacccaga

SEQ ID NO: 2462252 - DNA, 25 bp, Homo sapien
tggaactctcaaagatactaattct

SEQ ID NO: 2462253 - DNA, 25 bp, Homo sapien
gaagtctttatcatgaagcagcaag

SEQ ID NO: 2462254 - DNA, 25 bp, Homo sapien
tgacctgacctggtgagtttggata

SEQ ID NO: 2462255 - DNA, 25 bp, Homo sapien
gtgagtttggataaggagaataagc

SEQ ID NO: 2462256 - DNA, 25 bp, Homo sapien
tacacaggcaactgatacccagtga

SEQ ID NO: 2462257 - DNA, 25 bp, Homo sapien
acaggcaactgatacccagtgatga

SEQ ID NO: 2462258 - DNA, 25 bp, Homo sapien
ttcagtgtttggattccgccagacg

SEQ ID NO: 2462259 - DNA, 25 bp, Homo sapien
gttacaggattcggcgtgatttggg

SEQ ID NO: 2462260 - DNA, 25 bp, Homo sapien
ttggattccgccagacgttctgaaa

SEQ ID NO: 2462261 - DNA, 25 bp, Homo sapien
agtgtttggattccgccagacgttc

SEQ ID NO: 2462262 - DNA, 25 bp, Homo sapien
gtggaggaggaggattaactaccaa

SEQ ID NO: 2462263 - DNA, 25 bp, Homo sapien
ggtggaggaggaggattaactacca

SEQ ID NO: 2462264 - DNA, 25 bp, Homo sapien
tggaggaggaggattaactaccaaa

SEQ ID NO: 2462265 - DNA, 25 bp, Homo sapien
ttttaccatggaaatgtatctgtga

SEQ ID NO: 2462266 - DNA, 25 bp, Homo sapien
gcttcagctttttaccatggaaatg

SEQ ID NO: 2462267 - DNA, 25 bp, Homo sapien
agctttttaccatggaaatgtatct

SEQ ID NO: 2462268 - DNA, 25 bp, Homo sapien
gattgcagggcccagcttcagcttt

SEQ ID NO: 2462269 - DNA, 25 bp, Homo sapien
attaacaaacgaaacaaatccatag

SEQ ID NO: 2462270 - DNA, 25 bp, Homo sapien
tcctactatcttctggacatccacg

SEQ ID NO: 2462271 - DNA, 25 bp, Homo sapien
cacgtcattaacaaacgaaacaaat

SEQ ID NO: 2462272 - DNA, 25 bp, Homo sapien
ctactatcttctggacatccacgtc

SEQ ID NO: 2462273 - DNA, 25 bp, Homo sapien
accgtatctaccaaagcagcttcca

SEQ ID NO: 2462274 - DNA, 25 bp, Homo sapien
ttcactgaaccgtatctaccaaagc

SEQ ID NO: 2462275 - DNA, 25 bp, Homo sapien
cgtatctaccaaagcagcttccaat

SEQ ID NO: 2462276 - DNA, 25 bp, Homo sapien
tcactgaaccgtatctaccaaagca

SEQ ID NO: 2462277 - DNA, 25 bp, Homo sapien
ccttctggtaacacccagccttggc

SEQ ID NO: 2462278 - DNA, 25 bp, Homo sapien
cttctggtaacacccagccttggct

SEQ ID NO: 2462279 - DNA, 25 bp, Homo sapien
ctcgttttctgcaacgtacttcact

SEQ ID NO: 2462280 - DNA, 25 bp, Homo sapien
ttttctgcaacgtacttcactttta

SEQ ID NO: 2462281 - DNA, 25 bp, Homo sapien
tctgcaacgtacttcacttttacca

SEQ ID NO: 2462282 - DNA, 25 bp, Homo sapien
tcgttttctgcaacgtacttcactt

SEQ ID NO: 2462283 - DNA, 25 bp, Homo sapien
agtgatgccgtgaactgctgaattt

SEQ ID NO: 2462284 - DNA, 25 bp, Homo sapien
ctagtgatgccgtgaactgctgaat

SEQ ID NO: 2462285 - DNA, 25 bp, Homo sapien
tagtgatgccgtgaactgctgaatt

SEQ ID NO: 2462286 - DNA, 25 bp, Homo sapien
gaagtacagcataactcctttgctc

SEQ ID NO: 2462287 - DNA, 25 bp, Homo sapien
agtacagcataactcctttgctccc

SEQ ID NO: 2462288 - DNA, 25 bp, Homo sapien
ttatctgaagtacagcataactcct

SEQ ID NO: 2462289 - DNA, 25 bp, Homo sapien
ctgaagtacagcataactcctttgc

SEQ ID NO: 2462290 - DNA, 25 bp, Homo sapien
ttctgcaaatggcattgtggaactc

SEQ ID NO: 2462291 - DNA, 25 bp, Homo sapien
tcgtatcgttgaaaagagacccaga

SEQ ID NO: 2462292 - DNA, 25 bp, Homo sapien
tggaactctcaaagatactaattct

SEQ ID NO: 2462293 - DNA, 25 bp, Homo sapien
gaagtctttatcatgaagcagcaag

SEQ ID NO: 2462294 - DNA, 25 bp, Homo sapien
attatacacaggcaactgataccca

SEQ ID NO: 2462295 - DNA, 25 bp, Homo sapien
tatacacaggcaactgatacccagt

SEQ ID NO: 2462296 - DNA, 25 bp, Homo sapien
tacacaggcaactgatacccagtga

SEQ ID NO: 2462297 - DNA, 25 bp, Homo sapien
acaggcaactgatacccagtgatga

SEQ ID NO: 2462298 - DNA, 25 bp, Homo sapien
acctggtgagtttggataaggagaa

SEQ ID NO: 2462299 - DNA, 25 bp, Homo sapien
gtgagtttggataaggagaataagc

SEQ ID NO: 2462300 - DNA, 25 bp, Homo sapien
ctgacctggtgagtttggataagga

SEQ ID NO: 2462301 - DNA, 25 bp, Homo sapien
ctggtgagtttggataaggagaata

SEQ ID NO: 2462302 - DNA, 25 bp, Homo sapien
gttacaggattcggcgtgatttggg

SEQ ID NO: 2462303 - DNA, 25 bp, Homo sapien
ttggattccgccagacgttctgaaa

SEQ ID NO: 2462304 - DNA, 25 bp, Homo sapien
agtgtttggattccgccagacgttc

SEQ ID NO: 2462305 - DNA, 25 bp, Homo sapien
ttcagtgtttggattccgccagacg

SEQ ID NO: 2462306 - DNA, 25 bp, Homo sapien
ggtggaggaggaggattaactacca

SEQ ID NO: 2462307 - DNA, 25 bp, Homo sapien
gtggaggaggaggattaactaccaa

SEQ ID NO: 2462308 - DNA, 25 bp, Homo sapien
tggaggaggaggattaactaccaaa

SEQ ID NO: 2462309 - DNA, 25 bp, Homo sapien
ttttaccatggaaatgtatctgtga

SEQ ID NO: 2462310 - DNA, 25 bp, Homo sapien
gattgcagggcccagcttcagcttt

SEQ ID NO: 2462311 - DNA, 25 bp, Homo sapien
agctttttaccatggaaatgtatct

SEQ ID NO: 2462312 - DNA, 25 bp, Homo sapien
gcttcagctttttaccatggaaatg

SEQ ID NO: 2462313 - DNA, 25 bp, Homo sapien
tcctactatcttctggacatccacg

SEQ ID NO: 2462314 - DNA, 25 bp, Homo sapien
ctactatcttctggacatccacgtc

SEQ ID NO: 2462315 - DNA, 25 bp, Homo sapien
attaacaaacgaaacaaatccatag

SEQ ID NO: 2462316 - DNA, 25 bp, Homo sapien
cacgtcattaacaaacgaaacaaat

SEQ ID NO: 2462317 - DNA, 25 bp, Homo sapien
ttcactgaaccgtatctaccaaagc

SEQ ID NO: 2462318 - DNA, 25 bp, Homo sapien
cgtatctaccaaagcagcttccaat

SEQ ID NO: 2462319 - DNA, 25 bp, Homo sapien
accgtatctaccaaagcagcttcca

SEQ ID NO: 2462320 - DNA, 25 bp, Homo sapien
tcactgaaccgtatctaccaaagca

SEQ ID NO: 2462321 - DNA, 25 bp, Homo sapien
cttctggtaacacccagccttggct

SEQ ID NO: 2462322 - DNA, 25 bp, Homo sapien
ccttctggtaacacccagccttggc

SEQ ID NO: 2462323 - DNA, 25 bp, Homo sapien
ctcgttttctgcaacgtacttcact

SEQ ID NO: 2462324 - DNA, 25 bp, Homo sapien
ttttctgcaacgtacttcactttta

SEQ ID NO: 2462325 - DNA, 25 bp, Homo sapien
tctgcaacgtacttcacttttacca

SEQ ID NO: 2462326 - DNA, 25 bp, Homo sapien
tcgttttctgcaacgtacttcactt

SEQ ID NO: 2462327 - DNA, 25 bp, Homo sapien
cccacccagtagtacaaggaccagg

SEQ ID NO: 2462328 - DNA, 25 bp, Homo sapien
cacttcctgaagaagttccggccct

SEQ ID NO: 2462329 - DNA, 25 bp, Homo sapien
cagtagtacaaggaccaggagggaa

SEQ ID NO: 2462330 - DNA, 25 bp, Homo sapien
tccggccctcccaatccaaggaggc

SEQ ID NO: 2462331 - DNA, 25 bp, Homo sapien
gagcctggtttcacccaccggtgaa

SEQ ID NO: 2462332 - DNA, 25 bp, Homo sapien
gaggccgtggcccttgtaagtgaac

SEQ ID NO: 2462333 - DNA, 25 bp, Homo sapien
tgcctctctgtataggccgcgctgc

SEQ ID NO: 2462334 - DNA, 25 bp, Homo sapien
gggccacggctcctaatgcattcag

SEQ ID NO: 2462335 - DNA, 25 bp, Homo sapien
tggtgaagtccgctggaacacgctg

SEQ ID NO: 2462336 - DNA, 25 bp, Homo sapien
tgctggtgaagtccgctggaacacg

SEQ ID NO: 2462337 - DNA, 25 bp, Homo sapien
tgaagtccgctggaacacgctgtgg

SEQ ID NO: 2462338 - DNA, 25 bp, Homo sapien
gtctgctggtgaagtccgctggaac

SEQ ID NO: 2462339 - DNA, 25 bp, Homo sapien
gagcgcaggccgactgaggcatgga

SEQ ID NO: 2462340 - DNA, 25 bp, Homo sapien
cgcaggccgactgaggcatggactg

SEQ ID NO: 2462341 - DNA, 25 bp, Homo sapien
ctcggaggtagaaccgccaggctga

SEQ ID NO: 2462342 - DNA, 25 bp, Homo sapien
ccctcggaggtagaaccgccaggct

SEQ ID NO: 2462343 - DNA, 25 bp, Homo sapien
tcccagttgctttgaaactgctttt

SEQ ID NO: 2462344 - DNA, 25 bp, Homo sapien
actgaagtggaacttcaaagaggca

SEQ ID NO: 2462345 - DNA, 25 bp, Homo sapien
agaggcaccaataccgctgcacctt

SEQ ID NO: 2462346 - DNA, 25 bp, Homo sapien
tgaagtggaacttcaaagaggcacc

SEQ ID NO: 2462347 - DNA, 25 bp, Homo sapien
aataccgctgcacctttgcctgagg

SEQ ID NO: 2462348 - DNA, 25 bp, Homo sapien
caagagtttgctcagtagtgatgcc

SEQ ID NO: 2462349 - DNA, 25 bp, Homo sapien
tttgctcagtagtgatgcctcctga

SEQ ID NO: 2462350 - DNA, 25 bp, Homo sapien
ttgcaagagtttgctcagtagtgat

SEQ ID NO: 2462351 - DNA, 25 bp, Homo sapien
gagtttgctcagtagtgatgcctcc

SEQ ID NO: 2462352 - DNA, 25 bp, Homo sapien
gatcagcatgctgtccctgacccat

SEQ ID NO: 2462353 - DNA, 25 bp, Homo sapien
caaaataccgctgacataaggcatt

SEQ ID NO: 2462354 - DNA, 25 bp, Homo sapien
tgacccatgttgcaacggacagtgt

SEQ ID NO: 2462355 - DNA, 25 bp, Homo sapien
tgacactcctcacaaaataccgctg

SEQ ID NO: 2462356 - DNA, 25 bp, Homo sapien
caagtgtgcctatacaaacgtagcc

SEQ ID NO: 2462357 - DNA, 25 bp, Homo sapien
taatgtcaccgtttaaaatgtagct

SEQ ID NO: 2462358 - DNA, 25 bp, Homo sapien
aagccgtaggctttaggagcacaga

SEQ ID NO: 2462359 - DNA, 25 bp, Homo sapien
aaataataatagacgctcagggcag

SEQ ID NO: 2462360 - DNA, 25 bp, Homo sapien
aagccccacagcgtgttccagcgga

SEQ ID NO: 2462361 - DNA, 25 bp, Homo sapien
gtgttccagcggacttcaccagcag

SEQ ID NO: 2462362 - DNA, 25 bp, Homo sapien
tttggctcctttgaccactcgaagc

SEQ ID NO: 2462363 - DNA, 25 bp, Homo sapien
tccttgagcctgtcgggagctgctg

SEQ ID NO: 2462364 - DNA, 25 bp, Homo sapien
catatgtatgtccaatttgattggg

SEQ ID NO: 2462365 - DNA, 25 bp, Homo sapien
tgattgggatagtagttaggataac

SEQ ID NO: 2462366 - DNA, 25 bp, Homo sapien
ctgggtatataaccttctcaatgag

SEQ ID NO: 2462367 - DNA, 25 bp, Homo sapien
tccttgaaatgctaaacttaatggc

SEQ ID NO: 2462368 - DNA, 25 bp, Homo sapien
tgcatgccaggaattccacatgaaa

SEQ ID NO: 2462369 - DNA, 25 bp, Homo sapien
gatgccggttcactaggtcttttcc

SEQ ID NO: 2462370 - DNA, 25 bp, Homo sapien
acatgaaacttcaagataccggttc

SEQ ID NO: 2462371 - DNA, 25 bp, Homo sapien
acatgaaacttcaagatgccggttc

SEQ ID NO: 2462372 - DNA, 25 bp, Homo sapien
cacaagctgaacctggtccccaggg

SEQ ID NO: 2462373 - DNA, 25 bp, Homo sapien
gagcgccagctgagatccacaagct

SEQ ID NO: 2462374 - DNA, 25 bp, Homo sapien
caatgagcagcagagcgccagctga

SEQ ID NO: 2462375 - DNA, 25 bp, Homo sapien
ttgcaagtctatagcaatgagcagc

SEQ ID NO: 2462376 - DNA, 25 bp, Homo sapien
tccagactgcctgatcagttttgac

SEQ ID NO: 2462377 - DNA, 25 bp, Homo sapien
tacttcttttgcaaagtgtaggaag

SEQ ID NO: 2462378 - DNA, 25 bp, Homo sapien
tcttttgcaaagtgtaggaaggtgt

SEQ ID NO: 2462379 - DNA, 25 bp, Homo sapien
ccagactgcctgatcagttttgacc

SEQ ID NO: 2462380 - DNA, 25 bp, Homo sapien
tgcatttgcattgaatccagaagat

SEQ ID NO: 2462381 - DNA, 25 bp, Homo sapien
gcctgctggcagtatgttttctaac

SEQ ID NO: 2462382 - DNA, 25 bp, Homo sapien
catacaggatgagccttgggcctgc

SEQ ID NO: 2462383 - DNA, 25 bp, Homo sapien
tactcctaatgcaacaggaagttgt

SEQ ID NO: 2462384 - DNA, 25 bp, Homo sapien
cgactctaatttgaacggattctcc

SEQ ID NO: 2462385 - DNA, 25 bp, Homo sapien
tatgtgtagcactaaccacactgaa

SEQ ID NO: 2462386 - DNA, 25 bp, Homo sapien
cttcaggtgcctgatggttcagatc

SEQ ID NO: 2462387 - DNA, 25 bp, Homo sapien
actgaaatgcctcgacactacctcg

SEQ ID NO: 2462388 - DNA, 25 bp, Homo sapien
tattcagatgggacgtgcttgggag

SEQ ID NO: 2462389 - DNA, 25 bp, Homo sapien
ctgtttaagatttacacatagtttc

SEQ ID NO: 2462390 - DNA, 25 bp, Homo sapien
tttaagatttacacatagtttccag

SEQ ID NO: 2462391 - DNA, 25 bp, Homo sapien
gtattcagatgggacgtgcttggga

SEQ ID NO: 2462392 - DNA, 25 bp, Homo sapien
ctgctggtcaaatcatcagcccttt

SEQ ID NO: 2462393 - DNA, 25 bp, Homo sapien
tgttgggaagcttggttcctcctgg

SEQ ID NO: 2462394 - DNA, 25 bp, Homo sapien
tgaggaatggtagccaggaaactgc

SEQ ID NO: 2462395 - DNA, 25 bp, Homo sapien
tcatgttgggaagcttggttcctcc

SEQ ID NO: 2462396 - DNA, 25 bp, Homo sapien
gccagccgtaccctcttcccaaaga

SEQ ID NO: 2462397 - DNA, 25 bp, Homo sapien
tggccagccgtaccctcttcccaaa

SEQ ID NO: 2462398 - DNA, 25 bp, Homo sapien
gattgtgaccacgatgtttctctta

SEQ ID NO: 2462399 - DNA, 25 bp, Homo sapien
tgatttccaagtgttcgctgcttat

SEQ ID NO: 2462400 - DNA, 25 bp, Homo sapien
tcctggtacaccactgattgtgcat

SEQ ID NO: 2462401 - DNA, 25 bp, Homo sapien
tttgagggcattgaaaaatgctccc

SEQ ID NO: 2462402 - DNA, 25 bp, Homo sapien
cttaccatcagtaacacttgttctg

SEQ ID NO: 2462403 - DNA, 25 bp, Homo sapien
tggccttgttggtgcttgaatctgc

SEQ ID NO: 2462404 - DNA, 25 bp, Homo sapien
accagtgaattaactgtagagtgac

SEQ ID NO: 2462405 - DNA, 25 bp, Homo sapien
ttgaatctgccattcttaccatcag

SEQ ID NO: 2462406 - DNA, 25 bp, Homo sapien
tgaccttcgttctgttatgcaggcc

SEQ ID NO: 2462407 - DNA, 25 bp, Homo sapien
gaggtaacagcctgttttcttggag

SEQ ID NO: 2462408 - DNA, 25 bp, Homo sapien
gtttccacgcatctcttgaccttcg

SEQ ID NO: 2462409 - DNA, 25 bp, Homo sapien
caggcctgctcgaggaggtaacagc

SEQ ID NO: 2462410 - DNA, 25 bp, Homo sapien
acagggaaaggcgtacagagacagc

SEQ ID NO: 2462411 - DNA, 25 bp, Homo sapien
cagggaaaggcgtacagagacagca

SEQ ID NO: 2462412 - DNA, 25 bp, Homo sapien
agggaaaggcgtacagagacagcag

SEQ ID NO: 2462413 - DNA, 25 bp, Homo sapien
gggaaaggcgtacagagacagcaga

SEQ ID NO: 2462414 - DNA, 25 bp, Homo sapien
ctttacattgagttttatctgttgc

SEQ ID NO: 2462415 - DNA, 25 bp, Homo sapien
gcattgtgccaattcccctgattct

SEQ ID NO: 2462416 - DNA, 25 bp, Homo sapien
ttgttatcagcaacagtttgttggg

SEQ ID NO: 2462417 - DNA, 25 bp, Homo sapien
gcacttctctgataactcagcattg

SEQ ID NO: 2462418 - DNA, 25 bp, Homo sapien
aacatcatgtgtttagagggataaa

SEQ ID NO: 2462419 - DNA, 25 bp, Homo sapien
aagcctgaaatggttctcctagcat

SEQ ID NO: 2462420 - DNA, 25 bp, Homo sapien
agaaagcctgaaatggttctcctag

SEQ ID NO: 2462421 - DNA, 25 bp, Homo sapien
gaaagcctgaaatggttctcctagc

SEQ ID NO: 2462422 - DNA, 25 bp, Homo sapien
aaagcctgaaatggttctcctagca

SEQ ID NO: 2462423 - DNA, 25 bp, Homo sapien
aatgcacagtagttcaggatcaccc

SEQ ID NO: 2462424 - DNA, 25 bp, Homo sapien
tccatgaggttgaacaatgcacagt

SEQ ID NO: 2462425 - DNA, 25 bp, Homo sapien
tttgccaagcactataaagggagag

SEQ ID NO: 2462426 - DNA, 25 bp, Homo sapien
gagcatgagagtcagtggagattcc

SEQ ID NO: 2462427 - DNA, 25 bp, Homo sapien
caaacaaaaacagatcagaggcagt

SEQ ID NO: 2462428 - DNA, 25 bp, Homo sapien
tccaccttgactgcagtgttctagg

SEQ ID NO: 2462429 - DNA, 25 bp, Homo sapien
tctcaaaggcatcttacatgctagt

SEQ ID NO: 2462430 - DNA, 25 bp, Homo sapien
ttttggcaacaatagggagagggaa

SEQ ID NO: 2462431 - DNA, 25 bp, Homo sapien
agcaacatgtacaacaaatgagctg

SEQ ID NO: 2462432 - DNA, 25 bp, Homo sapien
aacatgtacaacaaatgagctgcat

SEQ ID NO: 2462433 - DNA, 25 bp, Homo sapien
caacatgtacaacaaatgagctgca

SEQ ID NO: 2462434 - DNA, 25 bp, Homo sapien
gcaacatgtacaacaaatgagctgc

SEQ ID NO: 2462435 - DNA, 25 bp, Homo sapien
agattattttgagcaactttatgac

SEQ ID NO: 2462436 - DNA, 25 bp, Homo sapien
actataggtgtaaacaaatagtatt

SEQ ID NO: 2462437 - DNA, 25 bp, Homo sapien
tgatctagagaaaaactataggtgt

SEQ ID NO: 2462438 - DNA, 25 bp, Homo sapien
tattttgagcaactttatgacaata

SEQ ID NO: 2462439 - DNA, 25 bp, Homo sapien
gagtcttgtagccttgcaattgcac

SEQ ID NO: 2462440 - DNA, 25 bp, Homo sapien
tgtagccttgcaattgcactactgt

SEQ ID NO: 2462441 - DNA, 25 bp, Homo sapien
agccttgcaattgcactactgtctg

SEQ ID NO: 2462442 - DNA, 25 bp, Homo sapien
ctactgagtcttgtagccttgcaat

SEQ ID NO: 2462443 - DNA, 25 bp, Homo sapien
cagtataaattaccatgtagtggaa

SEQ ID NO: 2462444 - DNA, 25 bp, Homo sapien
aaattaccatgtagtggaatttggt

SEQ ID NO: 2462445 - DNA, 25 bp, Homo sapien
taccatgtagtggaatttggtatat

SEQ ID NO: 2462446 - DNA, 25 bp, Homo sapien
catgtagtggaatttggtatatggc

SEQ ID NO: 2462447 - DNA, 25 bp, Homo sapien
tcagaccatgattaggtttgcagta

SEQ ID NO: 2462448 - DNA, 25 bp, Homo sapien
cagaccatgattaggtttgcagtac

SEQ ID NO: 2462449 - DNA, 25 bp, Homo sapien
catcaacagtcaatattctgagaac

SEQ ID NO: 2462450 - DNA, 25 bp, Homo sapien
tggcttgttcatcaacagtcaatat

SEQ ID NO: 2462451 - DNA, 25 bp, Homo sapien
gcagccacactcacatcattggctt

SEQ ID NO: 2462452 - DNA, 25 bp, Homo sapien
aaaatttgaagggtccttgctgcag

SEQ ID NO: 2462453 - DNA, 25 bp, Homo sapien
tagaatcctcttctctgggagaagc

SEQ ID NO: 2462454 - DNA, 25 bp, Homo sapien
aatcctcttctctgggagaagcttc

SEQ ID NO: 2462455 - DNA, 25 bp, Homo sapien
ctcttagaatcctcttctctgggag

SEQ ID NO: 2462456 - DNA, 25 bp, Homo sapien
tcttagaatcctcttctctgggaga

SEQ ID NO: 2462457 - DNA, 25 bp, Homo sapien
gcccaagggaccagtttgattgtaa

SEQ ID NO: 2462458 - DNA, 25 bp, Homo sapien
aaggcccaagggaccagtttgattg

SEQ ID NO: 2462459 - DNA, 25 bp, Homo sapien
ggcccaagggaccagtttgattgta

SEQ ID NO: 2462460 - DNA, 25 bp, Homo sapien
aggcccaagggaccagtttgattgt

SEQ ID NO: 2462461 - DNA, 25 bp, Homo sapien
aaagctatcagtattttatatccca

SEQ ID NO: 2462462 - DNA, 25 bp, Homo sapien
ataggaatattatgtccctccccag

SEQ ID NO: 2462463 - DNA, 25 bp, Homo sapien
taacaagtacatgcacagaggaagc

SEQ ID NO: 2462464 - DNA, 25 bp, Homo sapien
agcatgctctctgccggtggcatca

SEQ ID NO: 2462465 - DNA, 25 bp, Homo sapien
caacagcgagtttggatgttggcaa

SEQ ID NO: 2462466 - DNA, 25 bp, Homo sapien
agcaggagctggcaatcaacagcga

SEQ ID NO: 2462467 - DNA, 25 bp, Homo sapien
taggacagttccagaagttagcggg

SEQ ID NO: 2462468 - DNA, 25 bp, Homo sapien
tctaggacagttccagaagttagcg

SEQ ID NO: 2462469 - DNA, 25 bp, Homo sapien
ttgtgagaagatgacccgcaggacg

SEQ ID NO: 2462470 - DNA, 25 bp, Homo sapien
tgaggctgacgagtctgggagttgt

SEQ ID NO: 2462471 - DNA, 25 bp, Homo sapien
cccgcaggacgtcactgaagagcat

SEQ ID NO: 2462472 - DNA, 25 bp, Homo sapien
ctggcagcctgtccttataagcaac

SEQ ID NO: 2462473 - DNA, 25 bp, Homo sapien
cactgctgttagaaaagcagtctca

SEQ ID NO: 2462474 - DNA, 25 bp, Homo sapien
agcagtctcatttacattgttgaaa

SEQ ID NO: 2462475 - DNA, 25 bp, Homo sapien
agttcaattagagccatcactgctg

SEQ ID NO: 2462476 - DNA, 25 bp, Homo sapien
tttgtaaagatttatgaagttcaat

SEQ ID NO: 2462477 - DNA, 25 bp, Homo sapien
ctgcaggcatggaatcactgtggaa

SEQ ID NO: 2462478 - DNA, 25 bp, Homo sapien
gcatggaatcactgtggaaacatac

SEQ ID NO: 2462479 - DNA, 25 bp, Homo sapien
aatggaaacacagagagcatgtcct

SEQ ID NO: 2462480 - DNA, 25 bp, Homo sapien
ggaaacacagagagcatgtcctgca

SEQ ID NO: 2462481 - DNA, 25 bp, Homo sapien
ctgctgagaaggaaggcgacacaaa

SEQ ID NO: 2462482 - DNA, 25 bp, Homo sapien
ctctgcagtgtcatcccttgactga

SEQ ID NO: 2462483 - DNA, 25 bp, Homo sapien
tctgcagtgtcatcccttgactgag

SEQ ID NO: 2462484 - DNA, 25 bp, Homo sapien
gagaaggaaggcgacacaaactggc

SEQ ID NO: 2462485 - DNA, 25 bp, Homo sapien
gaaacatagtcattcccgcagtttg

SEQ ID NO: 2462486 - DNA, 25 bp, Homo sapien
aattatgccgaaacatagtcattcc

SEQ ID NO: 2462487 - DNA, 25 bp, Homo sapien
cagcagtaattatgccgaaacatag

SEQ ID NO: 2462488 - DNA, 25 bp, Homo sapien
atgacagcagtaattatgccgaaac

SEQ ID NO: 2462489 - DNA, 25 bp, Homo sapien
caataatgtgcaccgttatctgaaa

SEQ ID NO: 2462490 - DNA, 25 bp, Homo sapien
tacctgcaataatgtgcaccgttat

SEQ ID NO: 2462491 - DNA, 25 bp, Homo sapien
tgatacctgcaataatgtgcaccgt

SEQ ID NO: 2462492 - DNA, 25 bp, Homo sapien
cctgcaataatgtgcaccgttatct

SEQ ID NO: 2462493 - DNA, 25 bp, Homo sapien
tgctggtggtggacgacgtcacggc

SEQ ID NO: 2462494 - DNA, 25 bp, Homo sapien
ggctgtaggcaatgggacctccaaa

SEQ ID NO: 2462495 - DNA, 25 bp, Homo sapien
tatccagacgtgaaggtgacagtgc

SEQ ID NO: 2462496 - DNA, 25 bp, Homo sapien
caccctgttgaaattggaggctctg

SEQ ID NO: 2462497 - DNA, 25 bp, Homo sapien
agtagggcagcttgcttgagggtga

SEQ ID NO: 2462498 - DNA, 25 bp, Homo sapien
gtagggcagcttgcttgagggtgac

SEQ ID NO: 2462499 - DNA, 25 bp, Homo sapien
ccagaggcagattgtgccgcacacc

SEQ ID NO: 2462500 - DNA, 25 bp, Homo sapien
gccgcacacccagatgtcggcaggt

SEQ ID NO: 2462501 - DNA, 25 bp, Homo sapien
tctggaggctccttgaccagaggca

SEQ ID NO: 2462502 - DNA, 25 bp, Homo sapien
ggcaggtttcagaaaccatgaggaa

SEQ ID NO: 2462503 - DNA, 25 bp, Homo sapien
gaagaccccagcttcaggcaggaca

SEQ ID NO: 2462504 - DNA, 25 bp, Homo sapien
tccgctggttggctgaccgtgacca

SEQ ID NO: 2462505 - DNA, 25 bp, Homo sapien
tctctactgtagtccagtgtttcta

SEQ ID NO: 2462506 - DNA, 25 bp, Homo sapien
tgtttctagagtcatgcagcagaag

SEQ ID NO: 2462507 - DNA, 25 bp, Homo sapien
acccagtgggtgtcttgccctgatg

SEQ ID NO: 2462508 - DNA, 25 bp, Homo sapien
cttcaggacagggataaaaatgcat

SEQ ID NO: 2462509 - DNA, 25 bp, Homo sapien
tgcagaaccacaggcttaacgactt

SEQ ID NO: 2462510 - DNA, 25 bp, Homo sapien
taagcttatggtcatgagtggtccc

SEQ ID NO: 2462511 - DNA, 25 bp, Homo sapien
ctttcccagcagcaggataatggga

SEQ ID NO: 2462512 - DNA, 25 bp, Homo sapien
tttcccagcagcaggataatgggaa

SEQ ID NO: 2462513 - DNA, 25 bp, Homo sapien
agcaggataatgggaagggaaagag

SEQ ID NO: 2462514 - DNA, 25 bp, Homo sapien
agcagcaggataatgggaagggaaa

SEQ ID NO: 2462515 - DNA, 25 bp, Homo sapien
agctgagcaattcactctgccacag

SEQ ID NO: 2462516 - DNA, 25 bp, Homo sapien
ctagaaacccagcaccagctgagca

SEQ ID NO: 2462517 - DNA, 25 bp, Homo sapien
aacccagcaccagctgagcaattca

SEQ ID NO: 2462518 - DNA, 25 bp, Homo sapien
gcaccagctgagcaattcactctgc

SEQ ID NO: 2462519 - DNA, 25 bp, Homo sapien
caatagttgggtagtttgacttctt

SEQ ID NO: 2462520 - DNA, 25 bp, Homo sapien
cagggcaatagttgggtagtttgac

SEQ ID NO: 2462521 - DNA, 25 bp, Homo sapien
gaaggaaaatttagaagctcagtat

SEQ ID NO: 2462522 - DNA, 25 bp, Homo sapien
aagtcagggcaatagttgggtagtt

SEQ ID NO: 2462523 - DNA, 25 bp, Homo sapien
tgaaaatccaagttggtaacttctc

SEQ ID NO: 2462524 - DNA, 25 bp, Homo sapien
caacagaggcactcctgcagatggt

SEQ ID NO: 2462525 - DNA, 25 bp, Homo sapien
gacaacagaggcactcctgcagatg

SEQ ID NO: 2462526 - DNA, 25 bp, Homo sapien
ccataagacaacagaggcactcctg

SEQ ID NO: 2462527 - DNA, 25 bp, Homo sapien
ttccaccataagacaacagaggcac

SEQ ID NO: 2462528 - DNA, 25 bp, Homo sapien
tgatctctaacatcacctcaccaca

SEQ ID NO: 2462529 - DNA, 25 bp, Homo sapien
atctctaacatcacctcaccacagc

SEQ ID NO: 2462530 - DNA, 25 bp, Homo sapien
gatctctaacatcacctcaccacag

SEQ ID NO: 2462531 - DNA, 25 bp, Homo sapien
tctctaacatcacctcaccacagcc

SEQ ID NO: 2462532 - DNA, 25 bp, Homo sapien
aaatgttcatcccaactagaatgac

SEQ ID NO: 2462533 - DNA, 25 bp, Homo sapien
atgcatagtctctagacagtggagc

SEQ ID NO: 2462534 - DNA, 25 bp, Homo sapien
tcctctagagaaatgttcatcccaa

SEQ ID NO: 2462535 - DNA, 25 bp, Homo sapien
ctatatcctctagagaaatgttcat

SEQ ID NO: 2462536 - DNA, 25 bp, Homo sapien
tggtgacatacggtcatttctccag

SEQ ID NO: 2462537 - DNA, 25 bp, Homo sapien
ggtgacatacggtcatttctccagg

SEQ ID NO: 2462538 - DNA, 25 bp, Homo sapien
cttggtgacatacggtcatttctcc

SEQ ID NO: 2462539 - DNA, 25 bp, Homo sapien
ttggtgacatacggtcatttctcca

SEQ ID NO: 2462540 - DNA, 25 bp, Homo sapien
gtgttgagatcaagagcgtatccac

SEQ ID NO: 2462541 - DNA, 25 bp, Homo sapien
tatggttccatctttatattttaga

SEQ ID NO: 2462542 - DNA, 25 bp, Homo sapien
ggaaattttgatatcttcaaactta

SEQ ID NO: 2462543 - DNA, 25 bp, Homo sapien
ataaaattgggaaattttgatatct

SEQ ID NO: 2462544 - DNA, 25 bp, Homo sapien
tctttcagtcctatggttccatctt

SEQ ID NO: 2462545 - DNA, 25 bp, Homo sapien
gggcagccacggtcttgttcctcca

SEQ ID NO: 2462546 - DNA, 25 bp, Homo sapien
tgtgagggcagccacggtcttgttc

SEQ ID NO: 2462547 - DNA, 25 bp, Homo sapien
agggcagccacggtcttgttcctcc

SEQ ID NO: 2462548 - DNA, 25 bp, Homo sapien
tgagggcagccacggtcttgttcct

SEQ ID NO: 2462549 - DNA, 25 bp, Homo sapien
caccacttggaaaagatggtttctt

SEQ ID NO: 2462550 - DNA, 25 bp, Homo sapien
tctttgcttgttctacttttatttc

SEQ ID NO: 2462551 - DNA, 25 bp, Homo sapien
ttggaaaagatggtttctttgcttg

SEQ ID NO: 2462552 - DNA, 25 bp, Homo sapien
ccacttggaaaagatggtttctttg

SEQ ID NO: 2462553 - DNA, 25 bp, Homo sapien
atctctggacttactggttcgacct

SEQ ID NO: 2462554 - DNA, 25 bp, Homo sapien
ccacaaaatctctggacttactggt

SEQ ID NO: 2462555 - DNA, 25 bp, Homo sapien
taatgaccacaaaatctctggactt

SEQ ID NO: 2462556 - DNA, 25 bp, Homo sapien
gacttactggttcgaccttttatca

SEQ ID NO: 2462557 - DNA, 25 bp, Homo sapien
aagcaccttttcattggcttctcta

SEQ ID NO: 2462558 - DNA, 25 bp, Homo sapien
caaaaggggaccatgttttgcaaat

SEQ ID NO: 2462559 - DNA, 25 bp, Homo sapien
gttttgcaaatacttctttaagcac

SEQ ID NO: 2462560 - DNA, 25 bp, Homo sapien
gaaaagcttgccatgacaatctgct

SEQ ID NO: 2462561 - DNA, 25 bp, Homo sapien
ggtaggcgtctcctgaggagcccct

SEQ ID NO: 2462562 - DNA, 25 bp, Homo sapien
tgggcatctgccaattattgcaaga

SEQ ID NO: 2462563 - DNA, 25 bp, Homo sapien
tgccaattattgcaagagcggtagg

SEQ ID NO: 2462564 - DNA, 25 bp, Homo sapien
ttgcaagagcggtaggcgtctcctg

SEQ ID NO: 2462565 - DNA, 25 bp, Homo sapien
gccagagccatgtcttcgcagctgc

SEQ ID NO: 2462566 - DNA, 25 bp, Homo sapien
ggtgggcgcctaggtcccaggagca

SEQ ID NO: 2462567 - DNA, 25 bp, Homo sapien
agagccatgtcttcgcagctgctaa

SEQ ID NO: 2462568 - DNA, 25 bp, Homo sapien
gggcgcctaggtcccaggagcaggg

SEQ ID NO: 2462569 - DNA, 25 bp, Homo sapien
aacacatggtgctcaagacttgggc

SEQ ID NO: 2462570 - DNA, 25 bp, Homo sapien
gatttgcaggttaggctgctgagcc

SEQ ID NO: 2462571 - DNA, 25 bp, Homo sapien
aatctgtgggagtggtccagtgcct

SEQ ID NO: 2462572 - DNA, 25 bp, Homo sapien
cctgctgagctacatgatggatttg

SEQ ID NO: 2462573 - DNA, 25 bp, Homo sapien
ggaagctttcatcacttgtgcctaa

SEQ ID NO: 2462574 - DNA, 25 bp, Homo sapien
ttgtgcctaacatttctggattgtc

SEQ ID NO: 2462575 - DNA, 25 bp, Homo sapien
atttctggattgtcattggtccctc

SEQ ID NO: 2462576 - DNA, 25 bp, Homo sapien
catcacttgtgcctaacatttctgg

SEQ ID NO: 2462577 - DNA, 25 bp, Homo sapien
tatgtggcctagagagccagcattc

SEQ ID NO: 2462578 - DNA, 25 bp, Homo sapien
gatagcccaagagtgataagagcca

SEQ ID NO: 2462579 - DNA, 25 bp, Homo sapien
tcgtggaggagtagcaattccagaa

SEQ ID NO: 2462580 - DNA, 25 bp, Homo sapien
ctggtgtaacaatatgtggcctaga

SEQ ID NO: 2462581 - DNA, 25 bp, Homo sapien
aagagctgccaactatggaaccact

SEQ ID NO: 2462582 - DNA, 25 bp, Homo sapien
gaatccaagagctgccaactatgga

SEQ ID NO: 2462583 - DNA, 25 bp, Homo sapien
agaatccaagagctgccaactatgg

SEQ ID NO: 2462584 - DNA, 25 bp, Homo sapien
tccaagagctgccaactatggaacc

SEQ ID NO: 2462585 - DNA, 25 bp, Homo sapien
tagaagcagaggtagtcatgggccc

SEQ ID NO: 2462586 - DNA, 25 bp, Homo sapien
gactgaatgggacatagaagcagag

SEQ ID NO: 2462587 - DNA, 25 bp, Homo sapien
gcttgtaccagggagcatagctaga

SEQ ID NO: 2462588 - DNA, 25 bp, Homo sapien
tcatgggcccttgcttgtaccaggg

SEQ ID NO: 2462589 - DNA, 25 bp, Homo sapien
cacccagaaagtgagttcattcagc

SEQ ID NO: 2462590 - DNA, 25 bp, Homo sapien
ccaaaattgggcacaagtgctgact

SEQ ID NO: 2462591 - DNA, 25 bp, Homo sapien
ggtgccgtttttgcacaattccagg

SEQ ID NO: 2462592 - DNA, 25 bp, Homo sapien
tcattcagcttgagccaaaattggg

SEQ ID NO: 2462593 - DNA, 25 bp, Homo sapien
catctagctgtgctaatgatccact

SEQ ID NO: 2462594 - DNA, 25 bp, Homo sapien
acatctagctgtgctaatgatccac

SEQ ID NO: 2462595 - DNA, 25 bp, Homo sapien
cacatctagctgtgctaatgatcca

SEQ ID NO: 2462596 - DNA, 25 bp, Homo sapien
atctagctgtgctaatgatccactg

SEQ ID NO: 2462597 - DNA, 25 bp, Homo sapien
ctgaatacctaagaggttgttgttc

SEQ ID NO: 2462598 - DNA, 25 bp, Homo sapien
atacctaagaggttgttgttcaggc

SEQ ID NO: 2462599 - DNA, 25 bp, Homo sapien
ttctgaatacctaagaggttgttgt

SEQ ID NO: 2462600 - DNA, 25 bp, Homo sapien
gaatacctaagaggttgttgttcag

SEQ ID NO: 2462601 - DNA, 25 bp, Homo sapien
gagtaagtccatggtctgattgcag

SEQ ID NO: 2462602 - DNA, 25 bp, Homo sapien
cacttgggtccatggccaaactgca

SEQ ID NO: 2462603 - DNA, 25 bp, Homo sapien
ggaccaaagtgcgaacatatcctct

SEQ ID NO: 2462604 - DNA, 25 bp, Homo sapien
tactaagttgattctgggtccagga

SEQ ID NO: 2462605 - DNA, 25 bp, Homo sapien
ctgctcgagaatgaggttgagtaac

SEQ ID NO: 2462606 - DNA, 25 bp, Homo sapien
tgctcgagaatgaggttgagtaaca

SEQ ID NO: 2462607 - DNA, 25 bp, Homo sapien
cgagaatgaggttgagtaacattta

SEQ ID NO: 2462608 - DNA, 25 bp, Homo sapien
ctcgagaatgaggttgagtaacatt

SEQ ID NO: 2462609 - DNA, 25 bp, Homo sapien
taaacaaaggtgtgctaagcagagc

SEQ ID NO: 2462610 - DNA, 25 bp, Homo sapien
catggttctgctgcttgtggtacaa

SEQ ID NO: 2462611 - DNA, 25 bp, Homo sapien
ggtacaagcactgtccaagatataa

SEQ ID NO: 2462612 - DNA, 25 bp, Homo sapien
aattctggttgagcccaaggtttca

SEQ ID NO: 2462613 - DNA, 25 bp, Homo sapien
gtggccatttgatctggtcatctgg

SEQ ID NO: 2462614 - DNA, 25 bp, Homo sapien
aaatgcactgtgctgccattggatg

SEQ ID NO: 2462615 - DNA, 25 bp, Homo sapien
tttgatctggtcatctgggaagtaa

SEQ ID NO: 2462616 - DNA, 25 bp, Homo sapien
gatggagtcatggaaatgaacaaag

SEQ ID NO: 2462617 - DNA, 25 bp, Homo sapien
ctttgaggaagattgtcatcctcac

SEQ ID NO: 2462618 - DNA, 25 bp, Homo sapien
gctttgaggaagattgtcatcctca

SEQ ID NO: 2462619 - DNA, 25 bp, Homo sapien
tttctcaaacttgttctgagccttc

SEQ ID NO: 2462620 - DNA, 25 bp, Homo sapien
gtttctcaaacttgttctgagcctt

SEQ ID NO: 2462621 - DNA, 25 bp, Homo sapien
tggtttctcaaacttgttctgagcc

SEQ ID NO: 2462622 - DNA, 25 bp, Homo sapien
tggcatccatgtaagccagttagaa

SEQ ID NO: 2462623 - DNA, 25 bp, Homo sapien
gaagtgagttactccttttagagaa

SEQ ID NO: 2462624 - DNA, 25 bp, Homo sapien
tgtaagaagtgagttactcctttta

SEQ ID NO: 2462625 - DNA, 25 bp, Homo sapien
gcatccatgtaagccagttagaaga

SEQ ID NO: 2462626 - DNA, 25 bp, Homo sapien
tacgacttgatatcttgcagttcct

SEQ ID NO: 2462627 - DNA, 25 bp, Homo sapien
tccttctttgcttggatatcttcac

SEQ ID NO: 2462628 - DNA, 25 bp, Homo sapien
tcacaagcctgcattgtgttggcat

SEQ ID NO: 2462629 - DNA, 25 bp, Homo sapien
ttgcttggatatcttcacaagcctg

SEQ ID NO: 2462630 - DNA, 25 bp, Homo sapien
ctgttagaagacagtatcatgagaa

SEQ ID NO: 2462631 - DNA, 25 bp, Homo sapien
tagaagacagtatcatgagaatgtg

SEQ ID NO: 2462632 - DNA, 25 bp, Homo sapien
tgttagaagacagtatcatgagaat

SEQ ID NO: 2462633 - DNA, 25 bp, Homo sapien
aagacagtatcatgagaatgtggat

SEQ ID NO: 2462634 - DNA, 25 bp, Homo sapien
tcctactgtacttgttcggggtcta

SEQ ID NO: 2462635 - DNA, 25 bp, Homo sapien
tacagatcaacataggaaagtactt

SEQ ID NO: 2462636 - DNA, 25 bp, Homo sapien
acagatcaacataggaaagtacttt

SEQ ID NO: 2462637 - DNA, 25 bp, Homo sapien
cacatcttttttcctttagattcca

SEQ ID NO: 2462638 - DNA, 25 bp, Homo sapien
acatcttttttcctttagattccat

SEQ ID NO: 2462639 - DNA, 25 bp, Homo sapien
tttgaacgatcatcgagttcatcac

SEQ ID NO: 2462640 - DNA, 25 bp, Homo sapien
tttctcatctttgaacgatcatcga

SEQ ID NO: 2462641 - DNA, 25 bp, Homo sapien
tctttgaacgatcatcgagttcatc

SEQ ID NO: 2462642 - DNA, 25 bp, Homo sapien
tcatctttgaacgatcatcgagttc

SEQ ID NO: 2462643 - DNA, 25 bp, Homo sapien
taccattaaatttcccaagatgatg

SEQ ID NO: 2462644 - DNA, 25 bp, Homo sapien
aactgcttctatgacctttggacag

SEQ ID NO: 2462645 - DNA, 25 bp, Homo sapien
caagatgatgggtgaagcataggcc

SEQ ID NO: 2462646 - DNA, 25 bp, Homo sapien
tgtgatttggtttaggctaacaaaa

SEQ ID NO: 2462647 - DNA, 25 bp, Homo sapien
cagaaacaagcccagatcatctgca

SEQ ID NO: 2462648 - DNA, 25 bp, Homo sapien
tgcaaaccacactttggtagctgtg

SEQ ID NO: 2462649 - DNA, 25 bp, Homo sapien
tgacaatgcgtggtcactgcctcac

SEQ ID NO: 2462650 - DNA, 25 bp, Homo sapien
gtcttttcctcacttggccgccaga

SEQ ID NO: 2462651 - DNA, 25 bp, Homo sapien
ggttttatcctcatggtggacccga

SEQ ID NO: 2462652 - DNA, 25 bp, Homo sapien
tttatcctcatggtggacccgaccc

SEQ ID NO: 2462653 - DNA, 25 bp, Homo sapien
aggttttatcctcatggtggacccg

SEQ ID NO: 2462654 - DNA, 25 bp, Homo sapien
cgaccccaggtgtcccaaagccgcg

SEQ ID NO: 2462655 - DNA, 25 bp, Homo sapien
catgaacgtggccacagatgtcccc

SEQ ID NO: 2462656 - DNA, 25 bp, Homo sapien
gaacgtggccacagatgtccccaag

SEQ ID NO: 2462657 - DNA, 25 bp, Homo sapien
tgagaaggaagctctgtccgaggca

SEQ ID NO: 2462658 - DNA, 25 bp, Homo sapien
cacggcctctctcgagtgtcctgag

SEQ ID NO: 2462659 - DNA, 25 bp, Homo sapien
ggtgggttaatccaggcggtcatct

SEQ ID NO: 2462660 - DNA, 25 bp, Homo sapien
aatccaggcggtcatctcacgaagt

SEQ ID NO: 2462661 - DNA, 25 bp, Homo sapien
tgcaggctcagtgcatcagctccgt

SEQ ID NO: 2462662 - DNA, 25 bp, Homo sapien
tcacgaagtggaagtgagatacagc

SEQ ID NO: 2462663 - DNA, 25 bp, Homo sapien
catggtaaacatggtgaaaccccgt

SEQ ID NO: 2462664 - DNA, 25 bp, Homo sapien
tcagcatggtaaacatggtgaaacc

SEQ ID NO: 2462665 - DNA, 25 bp, Homo sapien
cagcatggtaaacatggtgaaaccc

SEQ ID NO: 2462666 - DNA, 25 bp, Homo sapien
agcatggtaaacatggtgaaacccc

SEQ ID NO: 2462667 - DNA, 25 bp, Homo sapien
ccccccacagtccggaagtgcctgg

SEQ ID NO: 2462668 - DNA, 25 bp, Homo sapien
ccacagtccggaagtgcctggggcc

SEQ ID NO: 2462669 - DNA, 25 bp, Homo sapien
cacagtccggaagtgcctggggcct

SEQ ID NO: 2462670 - DNA, 25 bp, Homo sapien
ccccacagtccggaagtgcctgggg

SEQ ID NO: 2462671 - DNA, 25 bp, Homo sapien
gatgcagacctaccatgacatgatg

SEQ ID NO: 2462672 - DNA, 25 bp, Homo sapien
taagaagttattgccctggagggtg

SEQ ID NO: 2462673 - DNA, 25 bp, Homo sapien
gagtacttgaacatatgcccaggcc

SEQ ID NO: 2462674 - DNA, 25 bp, Homo sapien
caaatttagtgagggaatcagagcc

SEQ ID NO: 2462675 - DNA, 25 bp, Homo sapien
gaacatcgccatgccaaggaagcag

SEQ ID NO: 2462676 - DNA, 25 bp, Homo sapien
aagaacatcgccatgccaaggaagc

SEQ ID NO: 2462677 - DNA, 25 bp, Homo sapien
agaacatcgccatgccaaggaagca

SEQ ID NO: 2462678 - DNA, 25 bp, Homo sapien
ctcaagacctctgttcaaggaaagt

SEQ ID NO: 2462679 - DNA, 25 bp, Homo sapien
agaacacatgctccccgtagtctca

SEQ ID NO: 2462680 - DNA, 25 bp, Homo sapien
tccccgtagtctcagagaagtataa

SEQ ID NO: 2462681 - DNA, 25 bp, Homo sapien
ctggcctcaagacctctgttcaagg

SEQ ID NO: 2462682 - DNA, 25 bp, Homo sapien
ctggcagtcagtgccattcaaattg

SEQ ID NO: 2462683 - DNA, 25 bp, Homo sapien
aaagtagaaagccaagcccagtggc

SEQ ID NO: 2462684 - DNA, 25 bp, Homo sapien
ccattcaaattgtcttgtctccagg

SEQ ID NO: 2462685 - DNA, 25 bp, Homo sapien
gtcagtgccattcaaattgtcttgt

SEQ ID NO: 2462686 - DNA, 25 bp, Homo sapien
ccttgagtggtctcttgggattgtt

SEQ ID NO: 2462687 - DNA, 25 bp, Homo sapien
cttgggattgttgaggcccatttta

SEQ ID NO: 2462688 - DNA, 25 bp, Homo sapien
tcttgggattgttgaggcccatttt

SEQ ID NO: 2462689 - DNA, 25 bp, Homo sapien
tgtccttgagtggtctcttgggatt

SEQ ID NO: 2462690 - DNA, 25 bp, Homo sapien
gaaaacgcaatgcccttttctgcag

SEQ ID NO: 2462691 - DNA, 25 bp, Homo sapien
cctcagaaaacgcaatgcccttttc

SEQ ID NO: 2462692 - DNA, 25 bp, Homo sapien
cctcctcagaaaacgcaatgccctt

SEQ ID NO: 2462693 - DNA, 25 bp, Homo sapien
caagccctcctcagaaaacgcaatg

SEQ ID NO: 2462694 - DNA, 25 bp, Homo sapien
gaatggccgcatacacaagtggtaa

SEQ ID NO: 2462695 - DNA, 25 bp, Homo sapien
caagtggtaagaaggaacatgtcat

SEQ ID NO: 2462696 - DNA, 25 bp, Homo sapien
caaggaacaccgtatcatgacagat

SEQ ID NO: 2462697 - DNA, 25 bp, Homo sapien
tatcgcttgtagcttaatgtcagga

SEQ ID NO: 2462698 - DNA, 25 bp, Homo sapien
caaaacttcacaagggataagccca

SEQ ID NO: 2462699 - DNA, 25 bp, Homo sapien
ttaacaccaagatgatagtcctgtc

SEQ ID NO: 2462700 - DNA, 25 bp, Homo sapien
tggctgacatcgactaaaacaaaac

SEQ ID NO: 2462701 - DNA, 25 bp, Homo sapien
tagtcctgtcttcaggtagtatgaa

SEQ ID NO: 2462702 - DNA, 25 bp, Homo sapien
gagtgcaataaatcagcctttccct

SEQ ID NO: 2462703 - DNA, 25 bp, Homo sapien
caataaatcagcctttccctgagaa

SEQ ID NO: 2462704 - DNA, 25 bp, Homo sapien
cagtccttcgcttccacaaattatg

SEQ ID NO: 2462705 - DNA, 25 bp, Homo sapien
catctggagtgcaataaatcagcct

SEQ ID NO: 2462706 - DNA, 25 bp, Homo sapien
agtagcaaagtggtaagtagagaaa

SEQ ID NO: 2462707 - DNA, 25 bp, Homo sapien
tagagtagcaaagtggtaagtagag

SEQ ID NO: 2462708 - DNA, 25 bp, Homo sapien
tcaggtagagtagcaaagtggtaag

SEQ ID NO: 2462709 - DNA, 25 bp, Homo sapien
caggtagagtagcaaagtggtaagt

SEQ ID NO: 2462710 - DNA, 25 bp, Homo sapien
gtggtacccagtgaaaggtggtgtc

SEQ ID NO: 2462711 - DNA, 25 bp, Homo sapien
tggtacccagtgaaaggtggtgtct

SEQ ID NO: 2462712 - DNA, 25 bp, Homo sapien
cagttattggacttgtccacacttt

SEQ ID NO: 2462713 - DNA, 25 bp, Homo sapien
tgttctcgtctatgaggtcaagagc

SEQ ID NO: 2462714 - DNA, 25 bp, Homo sapien
cacatgttctcgtctatgaggtcaa

SEQ ID NO: 2462715 - DNA, 25 bp, Homo sapien
tctcgtctatgaggtcaagagcagc

SEQ ID NO: 2462716 - DNA, 25 bp, Homo sapien
tcacgtcaaaaatctatgggctggt

SEQ ID NO: 2462717 - DNA, 25 bp, Homo sapien
taataacatgttctcgagccaagcc

SEQ ID NO: 2462718 - DNA, 25 bp, Homo sapien
aaaaaaggtgtcatcatctctggta

SEQ ID NO: 2462719 - DNA, 25 bp, Homo sapien
tatgggctggtttactctgaataat

SEQ ID NO: 2462720 - DNA, 25 bp, Homo sapien
ttcccagctcgcaaaaactccattt

SEQ ID NO: 2462721 - DNA, 25 bp, Homo sapien
caaaaagtggattatcatggtggcc

SEQ ID NO: 2462722 - DNA, 25 bp, Homo sapien
ccagctcgcaaaaactccatttcaa

SEQ ID NO: 2462723 - DNA, 25 bp, Homo sapien
gccttcccagctcgcaaaaactcca

SEQ ID NO: 2462724 - DNA, 25 bp, Homo sapien
tctgcacaagcattgaagcagcagt

SEQ ID NO: 2462725 - DNA, 25 bp, Homo sapien
cttcttctgcacaagcattgaagca

SEQ ID NO: 2462726 - DNA, 25 bp, Homo sapien
tcttctgcacaagcattgaagcagc

SEQ ID NO: 2462727 - DNA, 25 bp, Homo sapien
ttctgcacaagcattgaagcagcag

SEQ ID NO: 2462728 - DNA, 25 bp, Homo sapien
catggtcttctcgatttttctgttg

SEQ ID NO: 2462729 - DNA, 25 bp, Homo sapien
gaatgtgtattcatggtcttctcga

SEQ ID NO: 2462730 - DNA, 25 bp, Homo sapien
ctccaaggaacacttgtcccagagg

SEQ ID NO: 2462731 - DNA, 25 bp, Homo sapien
tgttgctttaaataagggcctttga

SEQ ID NO: 2462732 - DNA, 25 bp, Homo sapien
tctgaggccagggattccccctcat

SEQ ID NO: 2462733 - DNA, 25 bp, Homo sapien
ctctgaggccagggattccccctca

SEQ ID NO: 2462734 - DNA, 25 bp, Homo sapien
tctctgaggccagggattccccctc

SEQ ID NO: 2462735 - DNA, 25 bp, Homo sapien
gtctctgaggccagggattccccct

SEQ ID NO: 2462736 - DNA, 25 bp, Homo sapien
tcctctatcccccaggtaacctgta

SEQ ID NO: 2462737 - DNA, 25 bp, Homo sapien
ccagtgatcttttttccgtcgttca

SEQ ID NO: 2462738 - DNA, 25 bp, Homo sapien
gagaccagtgatcttttttccgtcg

SEQ ID NO: 2462739 - DNA, 25 bp, Homo sapien
ccagagaccagtgatcttttttccg

SEQ ID NO: 2462740 - DNA, 25 bp, Homo sapien
gcttcacccatcatttttgaaaatg

SEQ ID NO: 2462741 - DNA, 25 bp, Homo sapien
gaaaatgtaacagtagaacagccat

SEQ ID NO: 2462742 - DNA, 25 bp, Homo sapien
ctggactgtgtccaaaagctgcata

SEQ ID NO: 2462743 - DNA, 25 bp, Homo sapien
aagctgcataagaggtttggaacca

SEQ ID NO: 2462744 - DNA, 25 bp, Homo sapien
ctagtccagtgacagggccattgac

SEQ ID NO: 2462745 - DNA, 25 bp, Homo sapien
agggccattgactgatacaacaata

SEQ ID NO: 2462746 - DNA, 25 bp, Homo sapien
ggccattgactgatacaacaatagg

SEQ ID NO: 2462747 - DNA, 25 bp, Homo sapien
agtccagtgacagggccattgactg

SEQ ID NO: 2462748 - DNA, 25 bp, Homo sapien
cctgtggccaaggaagcagtaagtg

SEQ ID NO: 2462749 - DNA, 25 bp, Homo sapien
ccagacatctgagacattagcaggt

SEQ ID NO: 2462750 - DNA, 25 bp, Homo sapien
tttttggtagctgagcctgtggcca

SEQ ID NO: 2462751 - DNA, 25 bp, Homo sapien
tctgggtcctgttctctattccaac

SEQ ID NO: 2462752 - DNA, 25 bp, Homo sapien
ctgataaagtcctgatgggcttccc

SEQ ID NO: 2462753 - DNA, 25 bp, Homo sapien
tgttctgcaccagaacctgataaag

SEQ ID NO: 2462754 - DNA, 25 bp, Homo sapien
cagatctaccataaaggggtccagt

SEQ ID NO: 2462755 - DNA, 25 bp, Homo sapien
agaacctgataaagtcctgatgggc

SEQ ID NO: 2462756 - DNA, 25 bp, Homo sapien
cacagttttcttgttaaagggactg

SEQ ID NO: 2462757 - DNA, 25 bp, Homo sapien
taaagggactgtgaggtgcaaatgt

SEQ ID NO: 2462758 - DNA, 25 bp, Homo sapien
gactgtgaggtgcaaatgtcttcat

SEQ ID NO: 2462759 - DNA, 25 bp, Homo sapien
cttgttaaagggactgtgaggtgca

SEQ ID NO: 2462760 - DNA, 25 bp, Homo sapien
tggatttgtggtgtttgccagtcac

SEQ ID NO: 2462761 - DNA, 25 bp, Homo sapien
cactagcatgttaggagagttctta

SEQ ID NO: 2462762 - DNA, 25 bp, Homo sapien
gccagtcactagcatgttaggagag

SEQ ID NO: 2462763 - DNA, 25 bp, Homo sapien
gatctggaagttcctctagtatggt

SEQ ID NO: 2462764 - DNA, 25 bp, Homo sapien
gcttgtcataagctttccacttaac

SEQ ID NO: 2462765 - DNA, 25 bp, Homo sapien
actgcttgtcataagctttccactt

SEQ ID NO: 2462766 - DNA, 25 bp, Homo sapien
atactgcttgtcataagctttccac

SEQ ID NO: 2462767 - DNA, 25 bp, Homo sapien
tgcttgtcataagctttccacttaa

SEQ ID NO: 2462768 - DNA, 25 bp, Homo sapien
tgtcaacaatagtttcaacctcaaa

SEQ ID NO: 2462769 - DNA, 25 bp, Homo sapien
ttccttgtcttttgtcaacaatagt

SEQ ID NO: 2462770 - DNA, 25 bp, Homo sapien
caacaatagtttcaacctcaaactc

SEQ ID NO: 2462771 - DNA, 25 bp, Homo sapien
tttccttgtcttttgtcaacaatag

SEQ ID NO: 2462772 - DNA, 25 bp, Homo sapien
gatggtcctaatcagtaaattcagc

SEQ ID NO: 2462773 - DNA, 25 bp, Homo sapien
tgtgtggcacactacctgatgtgtc

SEQ ID NO: 2462774 - DNA, 25 bp, Homo sapien
caaagtcactaccttgatggtccta

SEQ ID NO: 2462775 - DNA, 25 bp, Homo sapien
cacagcattctagcccggtttagaa

SEQ ID NO: 2462776 - DNA, 25 bp, Homo sapien
ttcagttgcagccatagaggactct

SEQ ID NO: 2462777 - DNA, 25 bp, Homo sapien
accaactgccgagcctggaaggaaa

SEQ ID NO: 2462778 - DNA, 25 bp, Homo sapien
aggcctcagccatgattcagttgca

SEQ ID NO: 2462779 - DNA, 25 bp, Homo sapien
tgttactgcaagcaaccagtgggca

SEQ ID NO: 2462780 - DNA, 25 bp, Homo sapien
tcatggtcgtgcccatactggtaca

SEQ ID NO: 2462781 - DNA, 25 bp, Homo sapien
gtcgtgcccatactggtacatctcg

SEQ ID NO: 2462782 - DNA, 25 bp, Homo sapien
tggtcgtgcccatactggtacatct

SEQ ID NO: 2462783 - DNA, 25 bp, Homo sapien
gtgcccatactggtacatctcgcca

SEQ ID NO: 2462784 - DNA, 25 bp, Homo sapien
aatgttcttgtctcctggaaagtcc

SEQ ID NO: 2462785 - DNA, 25 bp, Homo sapien
ccaagcccagtggttctgatggtcc

SEQ ID NO: 2462786 - DNA, 25 bp, Homo sapien
atggtccttgagtggtccattttat

SEQ ID NO: 2462787 - DNA, 25 bp, Homo sapien
ctggcagtcagtggatttcaaatgt

SEQ ID NO: 2462788 - DNA, 25 bp, Homo sapien
aaataatgctgcatatctacaacta

SEQ ID NO: 2462789 - DNA, 25 bp, Homo sapien
tctgatctttgacaaacctgacaaa

SEQ ID NO: 2462790 - DNA, 25 bp, Homo sapien
tcagaaataatgctgcatatctaca

SEQ ID NO: 2462791 - DNA, 25 bp, Homo sapien
gccctcagaaataatgctgcatatc

SEQ ID NO: 2462792 - DNA, 25 bp, Homo sapien
aatataaactggagcatgctcataa

SEQ ID NO: 2462793 - DNA, 25 bp, Homo sapien
atgaaacctgtggtaagtaccaatt

SEQ ID NO: 2462794 - DNA, 25 bp, Homo sapien
atataaactggagcatgctcataag

SEQ ID NO: 2462795 - DNA, 25 bp, Homo sapien
taatataaactggagcatgctcata

SEQ ID NO: 2462796 - DNA, 25 bp, Homo sapien
cagcatatgctagcatggttaaaat

SEQ ID NO: 2462797 - DNA, 25 bp, Homo sapien
ggcagcatatgctagcatggttaaa

SEQ ID NO: 2462798 - DNA, 25 bp, Homo sapien
atatgctagcatggttaaaataagc

SEQ ID NO: 2462799 - DNA, 25 bp, Homo sapien
gcatatgctagcatggttaaaataa

SEQ ID NO: 2462800 - DNA, 25 bp, Homo sapien
atgccagagccattacacatgagat

SEQ ID NO: 2462801 - DNA, 25 bp, Homo sapien
tgccagagccattacacatgagatt

SEQ ID NO: 2462802 - DNA, 25 bp, Homo sapien
gccagagccattacacatgagatta

SEQ ID NO: 2462803 - DNA, 25 bp, Homo sapien
ccagagccattacacatgagattac

SEQ ID NO: 2462804 - DNA, 25 bp, Homo sapien
caccaaggaacgcaataccacgaca

SEQ ID NO: 2462805 - DNA, 25 bp, Homo sapien
gaacgcaataccacgacacggatga

SEQ ID NO: 2462806 - DNA, 25 bp, Homo sapien
acgcaataccacgacacggatgaat

SEQ ID NO: 2462807 - DNA, 25 bp, Homo sapien
caaggaacgcaataccacgacacgg

SEQ ID NO: 2462808 - DNA, 25 bp, Homo sapien
tggacttggttgcttgtgatttatg

SEQ ID NO: 2462809 - DNA, 25 bp, Homo sapien
ctttggacttggttgcttgtgattt

SEQ ID NO: 2462810 - DNA, 25 bp, Homo sapien
ttggttgcttgtgatttatgttgtt

SEQ ID NO: 2462811 - DNA, 25 bp, Homo sapien
ttgcttgtgatttatgttgtttcat

SEQ ID NO: 2462812 - DNA, 25 bp, Homo sapien
gatgttgttgtcttccctgcatcaa

SEQ ID NO: 2462813 - DNA, 25 bp, Homo sapien
caagaattaattgatgttgttgtct

SEQ ID NO: 2462814 - DNA, 25 bp, Homo sapien
tccctgcatcaaaagtttaactgta

SEQ ID NO: 2462815 - DNA, 25 bp, Homo sapien
gtttaactgtaatgtctaagaaata

SEQ ID NO: 2462816 - DNA, 25 bp, Homo sapien
agcattgcagttggggtagctttac

SEQ ID NO: 2462817 - DNA, 25 bp, Homo sapien
tagaatcttcatatgggatgttcac

SEQ ID NO: 2462818 - DNA, 25 bp, Homo sapien
tcatccaagcattgcagttggggta

SEQ ID NO: 2462819 - DNA, 25 bp, Homo sapien
tttagtagaatcttcatatgggatg

SEQ ID NO: 2462820 - DNA, 25 bp, Homo sapien
ttgcttgtgatttatgttgtctcat

SEQ ID NO: 2462821 - DNA, 25 bp, Homo sapien
tggacttggttgcttgtgatttatg

SEQ ID NO: 2462822 - DNA, 25 bp, Homo sapien
ctttggacttggttgcttgtgattt

SEQ ID NO: 2462823 - DNA, 25 bp, Homo sapien
ttggttgcttgtgatttatgttgtc

SEQ ID NO: 2462824 - DNA, 25 bp, Homo sapien
gtactgtggcatgtatatctgcctt

SEQ ID NO: 2462825 - DNA, 25 bp, Homo sapien
tcctttttctatgcaatgagcttct

SEQ ID NO: 2462826 - DNA, 25 bp, Homo sapien
actgtactgtggcatgtatatctgc

SEQ ID NO: 2462827 - DNA, 25 bp, Homo sapien
tgtactgtggcatgtatatctgcct

SEQ ID NO: 2462828 - DNA, 25 bp, Homo sapien
aaataaggacatgttgatccccatt

SEQ ID NO: 2462829 - DNA, 25 bp, Homo sapien
gttgatccccatttgaagaatcttc

SEQ ID NO: 2462830 - DNA, 25 bp, Homo sapien
aacaggacatcatgatgtagtccct

SEQ ID NO: 2462831 - DNA, 25 bp, Homo sapien
tctgcaggatgattgggaggtcatt

SEQ ID NO: 2462832 - DNA, 25 bp, Homo sapien
gctcatctaaggaatcttgattatc

SEQ ID NO: 2462833 - DNA, 25 bp, Homo sapien
catctaaggaatcttgattatctgg

SEQ ID NO: 2462834 - DNA, 25 bp, Homo sapien
aatgtggcatcttctgttgaagagg

SEQ ID NO: 2462835 - DNA, 25 bp, Homo sapien
gaggacataatgtggcatcttctgt

SEQ ID NO: 2462836 - DNA, 25 bp, Homo sapien
tcggcacatccatagtgcaatagat

SEQ ID NO: 2462837 - DNA, 25 bp, Homo sapien
ccatagtgcaatagatcagtcttgc

SEQ ID NO: 2462838 - DNA, 25 bp, Homo sapien
tcaggggtcggcacatccatagtgc

SEQ ID NO: 2462839 - DNA, 25 bp, Homo sapien
acatccatagtgcaatagatcagtc

SEQ ID NO: 2462840 - DNA, 25 bp, Homo sapien
tggcaacatgttctcgagacaagcc

SEQ ID NO: 2462841 - DNA, 25 bp, Homo sapien
ggcaacatgttctcgagacaagcct

SEQ ID NO: 2462842 - DNA, 25 bp, Homo sapien
aatggcaacatgttctcgagacaag

SEQ ID NO: 2462843 - DNA, 25 bp, Homo sapien
atggcaacatgttctcgagacaagc

SEQ ID NO: 2462844 - DNA, 25 bp, Homo sapien
actggattatcatggtggccaacaa

SEQ ID NO: 2462845 - DNA, 25 bp, Homo sapien
aattacaaagtagaagctcctagac

SEQ ID NO: 2462846 - DNA, 25 bp, Homo sapien
caaaaactggattatcatggtggcc

SEQ ID NO: 2462847 - DNA, 25 bp, Homo sapien
cagctggcaaaacctccctttcaaa

SEQ ID NO: 2462848 - DNA, 25 bp, Homo sapien
gaaatgagcaagagtaaatattcct

SEQ ID NO: 2462849 - DNA, 25 bp, Homo sapien
gaaggattcaccagagtccccaggg

SEQ ID NO: 2462850 - DNA, 25 bp, Homo sapien
agtccccagggtcatcaatgtggcc

SEQ ID NO: 2462851 - DNA, 25 bp, Homo sapien
gccatttgatctcatcaccaggaaa

SEQ ID NO: 2462852 - DNA, 25 bp, Homo sapien
ctgtcttgagaataccaaaatagta

SEQ ID NO: 2462853 - DNA, 25 bp, Homo sapien
gaacccccatatgagcacatgatga

SEQ ID NO: 2462854 - DNA, 25 bp, Homo sapien
gtctatagtcccatgaacaaaggcg

SEQ ID NO: 2462855 - DNA, 25 bp, Homo sapien
acaaaggcgagcttgccaatgacag

SEQ ID NO: 2462856 - DNA, 25 bp, Homo sapien
caagtaggacgggcttgtacaggct

SEQ ID NO: 2462857 - DNA, 25 bp, Homo sapien
gagaaagcagacgttgaaattacag

SEQ ID NO: 2462858 - DNA, 25 bp, Homo sapien
aaggcacttaatctccatgtatcag

SEQ ID NO: 2462859 - DNA, 25 bp, Homo sapien
gaagccgtcagttttttcatagtaa

SEQ ID NO: 2462860 - DNA, 25 bp, Homo sapien
tcatagtaaaggcacttaatctcca

SEQ ID NO: 2462861 - DNA, 25 bp, Homo sapien
ccataattcactaatgtggtgtaac

SEQ ID NO: 2462862 - DNA, 25 bp, Homo sapien
gcacattccacacattagaacctgg

SEQ ID NO: 2462863 - DNA, 25 bp, Homo sapien
ccaccaattctagtcatgtgttcag

SEQ ID NO: 2462864 - DNA, 25 bp, Homo sapien
gaaaatcaagcgatatctcaccacc

SEQ ID NO: 2462865 - DNA, 25 bp, Homo sapien
aggctgctttatatcccaacagagg

SEQ ID NO: 2462866 - DNA, 25 bp, Homo sapien
attctgtgtctttctgggagggaag

SEQ ID NO: 2462867 - DNA, 25 bp, Homo sapien
accatctctgatcattctgtgtctt

SEQ ID NO: 2462868 - DNA, 25 bp, Homo sapien
agggaaggctgctttatatcccaac

SEQ ID NO: 2462869 - DNA, 25 bp, Homo sapien
gttactccttgtaaagctacagtgc

SEQ ID NO: 2462870 - DNA, 25 bp, Homo sapien
ccaagccttagctatgggtgaaatt

SEQ ID NO: 2462871 - DNA, 25 bp, Homo sapien
gattagggcatcttgcaactcatga

SEQ ID NO: 2462872 - DNA, 25 bp, Homo sapien
ccttagttcttgtgtcctgagcaga

SEQ ID NO: 2462873 - DNA, 25 bp, Homo sapien
aaactcatcaattttattttcaaca

SEQ ID NO: 2462874 - DNA, 25 bp, Homo sapien
ctcatcaattttattttcaacatac

SEQ ID NO: 2462875 - DNA, 25 bp, Homo sapien
aactcatcaattttattttcaacat

SEQ ID NO: 2462876 - DNA, 25 bp, Homo sapien
taaaactcatcaattttattttcaa

SEQ ID NO: 2462877 - DNA, 25 bp, Homo sapien
catggattctatcccttgggctgag

SEQ ID NO: 2462878 - DNA, 25 bp, Homo sapien
tttaacatggattctatcccttggg

SEQ ID NO: 2462879 - DNA, 25 bp, Homo sapien
acatggattctatcccttgggctga

SEQ ID NO: 2462880 - DNA, 25 bp, Homo sapien
taacatggattctatcccttgggct

SEQ ID NO: 2462881 - DNA, 25 bp, Homo sapien
ggcctgttccaactccaacttaata

SEQ ID NO: 2462882 - DNA, 25 bp, Homo sapien
gagggccttacattcttccagtaca

SEQ ID NO: 2462883 - DNA, 25 bp, Homo sapien
caacttaatattacagcgaacgagg

SEQ ID NO: 2462884 - DNA, 25 bp, Homo sapien
gctgtcagctttcgcccagcaatta

SEQ ID NO: 2462885 - DNA, 25 bp, Homo sapien
accctttcgggtagctgaacctgtg

SEQ ID NO: 2462886 - DNA, 25 bp, Homo sapien
gctgatctgctgcaatagggtccag

SEQ ID NO: 2462887 - DNA, 25 bp, Homo sapien
caaaagacacttccagctgcactga

SEQ ID NO: 2462888 - DNA, 25 bp, Homo sapien
tctgcagcagcgctattcagagcat

SEQ ID NO: 2462889 - DNA, 25 bp, Homo sapien
atactgtgtattcccatttttatcc

SEQ ID NO: 2462890 - DNA, 25 bp, Homo sapien
tgtcatcctgtttgtcataaccttt

SEQ ID NO: 2462891 - DNA, 25 bp, Homo sapien
tttccaccgaaccaaatactgtgta

SEQ ID NO: 2462892 - DNA, 25 bp, Homo sapien
atttttatcctgtcttttgtcaaca

SEQ ID NO: 2462893 - DNA, 25 bp, Homo sapien
tgctgtgccacctttgtttcagttg

SEQ ID NO: 2462894 - DNA, 25 bp, Homo sapien
gaaagacacgggattggaacagttg

SEQ ID NO: 2462895 - DNA, 25 bp, Homo sapien
tccacatagacacttctttctgcct

SEQ ID NO: 2462896 - DNA, 25 bp, Homo sapien
caccaggttctgtgtatggatgaac

SEQ ID NO: 2462897 - DNA, 25 bp, Homo sapien
aattgtgcgaaatagcagctatgcc

SEQ ID NO: 2462898 - DNA, 25 bp, Homo sapien
ctggtgtagtgaaaattgtgcgaaa

SEQ ID NO: 2462899 - DNA, 25 bp, Homo sapien
gctatgccatgtgcctgaacctctc

SEQ ID NO: 2462900 - DNA, 25 bp, Homo sapien
agcagctatgccatgtgcctgaacc

SEQ ID NO: 2462901 - DNA, 25 bp, Homo sapien
ggtgggacagcttgggctttgtctc

SEQ ID NO: 2462902 - DNA, 25 bp, Homo sapien
ctggtgggacagcttgggctttgtc

SEQ ID NO: 2462903 - DNA, 25 bp, Homo sapien
tgggacagcttgggctttgtctcat

SEQ ID NO: 2462904 - DNA, 25 bp, Homo sapien
gtgggacagcttgggctttgtctca

SEQ ID NO: 2462905 - DNA, 25 bp, Homo sapien
cctcaggtgagagtagctaaatcca

SEQ ID NO: 2462906 - DNA, 25 bp, Homo sapien
ctcaggtgagagtagctaaatccac

SEQ ID NO: 2462907 - DNA, 25 bp, Homo sapien
gcacatctgggtgaatctgtcctct

SEQ ID NO: 2462908 - DNA, 25 bp, Homo sapien
ataggcacatctgggtgaatctgtc

SEQ ID NO: 2462909 - DNA, 25 bp, Homo sapien
ttataggcacatctgggtgaatctg

SEQ ID NO: 2462910 - DNA, 25 bp, Homo sapien
aggcacatctgggtgaatctgtcct

SEQ ID NO: 2462911 - DNA, 25 bp, Homo sapien
gcccaactttcactcttgcaactaa

SEQ ID NO: 2462912 - DNA, 25 bp, Homo sapien
cattggctgccgattggcccattaa

SEQ ID NO: 2462913 - DNA, 25 bp, Homo sapien
tggtctctgccaccgtcagtaacat

SEQ ID NO: 2462914 - DNA, 25 bp, Homo sapien
ttctgctaggcctatgatgaggtac

SEQ ID NO: 2462915 - DNA, 25 bp, Homo sapien
ggaagccgtaactgagccagacctc

SEQ ID NO: 2462916 - DNA, 25 bp, Homo sapien
tgctctctattccacaatgtcctgc

SEQ ID NO: 2462917 - DNA, 25 bp, Homo sapien
tctgataaagccctgatgatcttcc

SEQ ID NO: 2462918 - DNA, 25 bp, Homo sapien
tgggtcttgctctctattccacaat

SEQ ID NO: 2462919 - DNA, 25 bp, Homo sapien
tccaagaggtaggtcacccactacc

SEQ ID NO: 2462920 - DNA, 25 bp, Homo sapien
caatgtataagaagtaagaactgcc

SEQ ID NO: 2462921 - DNA, 25 bp, Homo sapien
atttccaagaggtaggtcacccact

SEQ ID NO: 2462922 - DNA, 25 bp, Homo sapien
caagaggtaggtcacccactaccat

SEQ ID NO: 2462923 - DNA, 25 bp, Homo sapien
ttaaatacatcatcgtgaggatgag

SEQ ID NO: 2462924 - DNA, 25 bp, Homo sapien
aatacatcatcgtgaggatgagcct

SEQ ID NO: 2462925 - DNA, 25 bp, Homo sapien
tgtttaatgctagtttgtcttcaca

SEQ ID NO: 2462926 - DNA, 25 bp, Homo sapien
catcatcgtgaggatgagccttact

SEQ ID NO: 2462927 - DNA, 25 bp, Homo sapien
agtgtcttcttgtgagtatcatgca

SEQ ID NO: 2462928 - DNA, 25 bp, Homo sapien
aatgcagtgtcttcttgtgagtatc

SEQ ID NO: 2462929 - DNA, 25 bp, Homo sapien
tggaatgcagtgtcttcttgtgagt

SEQ ID NO: 2462930 - DNA, 25 bp, Homo sapien
tgcagtgtcttcttgtgagtatcat

SEQ ID NO: 2462931 - DNA, 25 bp, Homo sapien
gccatctcgatcagttttcaattcc

SEQ ID NO: 2462932 - DNA, 25 bp, Homo sapien
tctgtctacttcattcgcttcttgc

SEQ ID NO: 2462933 - DNA, 25 bp, Homo sapien
cttcattcgcttcttgccagtacaa

SEQ ID NO: 2462934 - DNA, 25 bp, Homo sapien
ttgccagtacaatttgccatctcga

SEQ ID NO: 2462935 - DNA, 25 bp, Homo sapien
tctcgctatgagtttcagttctgcg

SEQ ID NO: 2462936 - DNA, 25 bp, Homo sapien
cgctatgagtttcagttctgcgtaa

SEQ ID NO: 2462937 - DNA, 25 bp, Homo sapien
attacctctcgctatgagtttcagt

SEQ ID NO: 2462938 - DNA, 25 bp, Homo sapien
gagtttcagttctgcgtaagatttg

SEQ ID NO: 2462939 - DNA, 25 bp, Homo sapien
ggattttcaaacactcagctgacta

SEQ ID NO: 2462940 - DNA, 25 bp, Homo sapien
taactgtggtgctgatactacggaa

SEQ ID NO: 2462941 - DNA, 25 bp, Homo sapien
tctcatggacctatggagttggctg

SEQ ID NO: 2462942 - DNA, 25 bp, Homo sapien
cattttgagtttccccacacagtaa

SEQ ID NO: 2462943 - DNA, 25 bp, Homo sapien
aggcagatacctgcgcccaagggca

SEQ ID NO: 2462944 - DNA, 25 bp, Homo sapien
gaaggcagatacctgcgcccaaggg

SEQ ID NO: 2462945 - DNA, 25 bp, Homo sapien
agggaaggcagatacctgcgcccaa

SEQ ID NO: 2462946 - DNA, 25 bp, Homo sapien
gcagggaaggcagatacctgcgccc

SEQ ID NO: 2462947 - DNA, 25 bp, Homo sapien
acacagctgcctgcacagcaccgcc

SEQ ID NO: 2462948 - DNA, 25 bp, Homo sapien
ggccacacagctgcctgcacagcac

SEQ ID NO: 2462949 - DNA, 25 bp, Homo sapien
acagctgcctgcacagcaccgccat

SEQ ID NO: 2462950 - DNA, 25 bp, Homo sapien
tcaggccacacagctgcctgcacag

SEQ ID NO: 2462951 - DNA, 25 bp, Homo sapien
ggtccacaagactccgcaagcacag

SEQ ID NO: 2462952 - DNA, 25 bp, Homo sapien
ggctagctgtccgcaggccacgcat

SEQ ID NO: 2462953 - DNA, 25 bp, Homo sapien
tgctggtccacaagactccgcaagc

SEQ ID NO: 2462954 - DNA, 25 bp, Homo sapien
gcgggggctagctgtccgcaggcca

SEQ ID NO: 2462955 - DNA, 25 bp, Homo sapien
tgcgctgcagaagctgtgggagggc

SEQ ID NO: 2462956 - DNA, 25 bp, Homo sapien
ggagggcgtagctgtgggcatggca

SEQ ID NO: 2462957 - DNA, 25 bp, Homo sapien
cagagtatgggtgcgctgcagaagc

SEQ ID NO: 2462958 - DNA, 25 bp, Homo sapien
gctggtgaggcgagtgcagagtatg

SEQ ID NO: 2462959 - DNA, 25 bp, Homo sapien
gcacccaggcaatccacccatccac

SEQ ID NO: 2462960 - DNA, 25 bp, Homo sapien
gctggcgtctctcatggcacccagg

SEQ ID NO: 2462961 - DNA, 25 bp, Homo sapien
acacacgctggcgtctctcatggca

SEQ ID NO: 2462962 - DNA, 25 bp, Homo sapien
acacgctggcgtctctcatggcacc

SEQ ID NO: 2462963 - DNA, 25 bp, Homo sapien
cttctgtggtccccatgtcttccaa

SEQ ID NO: 2462964 - DNA, 25 bp, Homo sapien
caaaatggtggatctataagggacg

SEQ ID NO: 2462965 - DNA, 25 bp, Homo sapien
ggacggctggctggagtgaatgcca

SEQ ID NO: 2462966 - DNA, 25 bp, Homo sapien
tgtggtccccatgtcttccaaccca

SEQ ID NO: 2462967 - DNA, 25 bp, Homo sapien
atactctttggactttgaaggttct

SEQ ID NO: 2462968 - DNA, 25 bp, Homo sapien
actaatgtccggctgtcatttctcc

SEQ ID NO: 2462969 - DNA, 25 bp, Homo sapien
gctcactaatgtccggctgtcattt

SEQ ID NO: 2462970 - DNA, 25 bp, Homo sapien
ttgctcactaatgtccggctgtcat

SEQ ID NO: 2462971 - DNA, 25 bp, Homo sapien
ctgccttgaagaaactctcccagac

SEQ ID NO: 2462972 - DNA, 25 bp, Homo sapien
cttgaagaaactctcccagactgcc

SEQ ID NO: 2462973 - DNA, 25 bp, Homo sapien
aagaaactctcccagactgcccttt

SEQ ID NO: 2462974 - DNA, 25 bp, Homo sapien
gccttgaagaaactctcccagactg

SEQ ID NO: 2462975 - DNA, 25 bp, Homo sapien
acatccgggtagctgaaggaaatcc

SEQ ID NO: 2462976 - DNA, 25 bp, Homo sapien
tctcagacctgaggtaggctcccca

SEQ ID NO: 2462977 - DNA, 25 bp, Homo sapien
tcaggacttggaagtggggacatcc

SEQ ID NO: 2462978 - DNA, 25 bp, Homo sapien
atccacacacccagactctcagacc

SEQ ID NO: 2462979 - DNA, 25 bp, Homo sapien
agcccttggccacacgtggctctgg

SEQ ID NO: 2462980 - DNA, 25 bp, Homo sapien
ggcggccaggtctgatgctctggaa

SEQ ID NO: 2462981 - DNA, 25 bp, Homo sapien
agtcccatttccatcccggccacgc

SEQ ID NO: 2462982 - DNA, 25 bp, Homo sapien
caaaaacgaccacttccaggagtca

SEQ ID NO: 2462983 - DNA, 25 bp, Homo sapien
gtctgggcatcctggggctggactt

SEQ ID NO: 2462984 - DNA, 25 bp, Homo sapien
ctagggacatggcagggtctgggca

SEQ ID NO: 2462985 - DNA, 25 bp, Homo sapien
catcctggggctggacttgggtgac

SEQ ID NO: 2462986 - DNA, 25 bp, Homo sapien
agggacatggcagggtctgggcatc

SEQ ID NO: 2462987 - DNA, 25 bp, Homo sapien
agcgtgccactaagccctgggcact

SEQ ID NO: 2462988 - DNA, 25 bp, Homo sapien
gggccagtccctggtacctgtgttc

SEQ ID NO: 2462989 - DNA, 25 bp, Homo sapien
tcctcagggacactctgcacctgca

SEQ ID NO: 2462990 - DNA, 25 bp, Homo sapien
aaccaccccatgagggagcgtgcca

SEQ ID NO: 2462991 - DNA, 25 bp, Homo sapien
cacagcatcttgtcgcgctgctgtg

SEQ ID NO: 2462992 - DNA, 25 bp, Homo sapien
gcacagcatcttgtcgcgctgctgt

SEQ ID NO: 2462993 - DNA, 25 bp, Homo sapien
tgcacagcatcttgtcgcgctgctg

SEQ ID NO: 2462994 - DNA, 25 bp, Homo sapien
gctctgccctgctatggaacaactc

SEQ ID NO: 2462995 - DNA, 25 bp, Homo sapien
cccaggacggcccacaaagagtctg

SEQ ID NO: 2462996 - DNA, 25 bp, Homo sapien
ggtgggagcatcaggtgtgctgcct

SEQ ID NO: 2462997 - DNA, 25 bp, Homo sapien
tgctcacgcagtctcctggtgggag

SEQ ID NO: 2462998 - DNA, 25 bp, Homo sapien
ggccccacgctcagatgcagaccag

SEQ ID NO: 2462999 - DNA, 25 bp, Homo sapien
gccccacgctcagatgcagaccaga

SEQ ID NO: 2463000 - DNA, 25 bp, Homo sapien
gtgggccccacgctcagatgcagac

SEQ ID NO: 2463001 - DNA, 25 bp, Homo sapien
cgtgggccccacgctcagatgcaga

SEQ ID NO: 2463002 - DNA, 25 bp, Homo sapien
cttcttgtgccaggccagcttcagt

SEQ ID NO: 2463003 - DNA, 25 bp, Homo sapien
atgtagatcttcttgtgccaggcca

SEQ ID NO: 2463004 - DNA, 25 bp, Homo sapien
tcttcttgtgccaggccagcttcag

SEQ ID NO: 2463005 - DNA, 25 bp, Homo sapien
aggaagatgtagatcttcttgtgcc

SEQ ID NO: 2463006 - DNA, 25 bp, Homo sapien
gtgcaccgtgtgcactgtctgtgtg

SEQ ID NO: 2463007 - DNA, 25 bp, Homo sapien
tgcaccgtgtgcactgtctgtgtgc

SEQ ID NO: 2463008 - DNA, 25 bp, Homo sapien
attgtggccaaagagaacggcccca

SEQ ID NO: 2463009 - DNA, 25 bp, Homo sapien
tgtggccaaagagaacggccccaac

SEQ ID NO: 2463010 - DNA, 25 bp, Homo sapien
ctgccattgtggccaaagagaacgg

SEQ ID NO: 2463011 - DNA, 25 bp, Homo sapien
gccattgtggccaaagagaacggcc

SEQ ID NO: 2463012 - DNA, 25 bp, Homo sapien
aggtccttctgggcgaaggctgtgc

SEQ ID NO: 2463013 - DNA, 25 bp, Homo sapien
tccccactgcggatgtcgaggttgg

SEQ ID NO: 2463014 - DNA, 25 bp, Homo sapien
tgtggtagtggacctcatccccact

SEQ ID NO: 2463015 - DNA, 25 bp, Homo sapien
cctggtctccttgagggaccttgag

SEQ ID NO: 2463016 - DNA, 25 bp, Homo sapien
tctccttgagggaccttgaggccgg

SEQ ID NO: 2463017 - DNA, 25 bp, Homo sapien
ggctgcatgggctcatccgtggcca

SEQ ID NO: 2463018 - DNA, 25 bp, Homo sapien
tgggctcatccgtggccatgatact

SEQ ID NO: 2463019 - DNA, 25 bp, Homo sapien
gcatgggctcatccgtggccatgat

SEQ ID NO: 2463020 - DNA, 25 bp, Homo sapien
catccgtggccatgatactgccaga

SEQ ID NO: 2463021 - DNA, 25 bp, Homo sapien
gttgtgtggagtcagcagctgccac

SEQ ID NO: 2463022 - DNA, 25 bp, Homo sapien
aagccctgaccatctgacagtgtcg

SEQ ID NO: 2463023 - DNA, 25 bp, Homo sapien
cctgaccatctgacagtgtcgtgcc

SEQ ID NO: 2463024 - DNA, 25 bp, Homo sapien
gccctgaccatctgacagtgtcgtg

SEQ ID NO: 2463025 - DNA, 25 bp, Homo sapien
gaccatctgacagtgtcgtgccctg

SEQ ID NO: 2463026 - DNA, 25 bp, Homo sapien
gggcctctgctgggtgttgagtgtg

SEQ ID NO: 2463027 - DNA, 25 bp, Homo sapien
gggtgttgagtgtgcagtggccgca

SEQ ID NO: 2463028 - DNA, 25 bp, Homo sapien
ggtgttgagtgtgcagtggccgcag

SEQ ID NO: 2463029 - DNA, 25 bp, Homo sapien
ttcacggtgtcctcggcatagtgct

SEQ ID NO: 2463030 - DNA, 25 bp, Homo sapien
gttcttcacggtgtcctcggcatag

SEQ ID NO: 2463031 - DNA, 25 bp, Homo sapien
tcttcacggtgtcctcggcatagtg

SEQ ID NO: 2463032 - DNA, 25 bp, Homo sapien
tcctgctggtggaatgactgtgtgg

SEQ ID NO: 2463033 - DNA, 25 bp, Homo sapien
gcagagtccaggtcataggcctgga

SEQ ID NO: 2463034 - DNA, 25 bp, Homo sapien
agtccaggtcataggcctggaaaac

SEQ ID NO: 2463035 - DNA, 25 bp, Homo sapien
aggcagagtccaggtcataggcctg

SEQ ID NO: 2463036 - DNA, 25 bp, Homo sapien
cagagtccaggtcataggcctggaa

SEQ ID NO: 2463037 - DNA, 25 bp, Homo sapien
ccacatgggaagatgatacggggtg

SEQ ID NO: 2463038 - DNA, 25 bp, Homo sapien
cacatgggaagatgatacggggtgg

SEQ ID NO: 2463039 - DNA, 25 bp, Homo sapien
ggcaggaggtcagtttggcccctcc

SEQ ID NO: 2463040 - DNA, 25 bp, Homo sapien
gcatgaaggcatgggcacccaagcc

SEQ ID NO: 2463041 - DNA, 25 bp, Homo sapien
ggaggtcagtttggcccctccgcag

SEQ ID NO: 2463042 - DNA, 25 bp, Homo sapien
atgggcacccaagccatcaccaaca

SEQ ID NO: 2463043 - DNA, 25 bp, Homo sapien
catgcatggctcagctagatccatg

SEQ ID NO: 2463044 - DNA, 25 bp, Homo sapien
acatgccaccactcggctgtgccac

SEQ ID NO: 2463045 - DNA, 25 bp, Homo sapien
tgcatggctcagctagatccatgga

SEQ ID NO: 2463046 - DNA, 25 bp, Homo sapien
agcatgcatggctcagctagatcca

SEQ ID NO: 2463047 - DNA, 25 bp, Homo sapien
aggcttcccgaagcccccacctctg

SEQ ID NO: 2463048 - DNA, 25 bp, Homo sapien
cagctccccaagaaggagactgtca

SEQ ID NO: 2463049 - DNA, 25 bp, Homo sapien
agctccccaagaaggagactgtcac

SEQ ID NO: 2463050 - DNA, 25 bp, Homo sapien
cagctgaggactcctcggttcaaag

SEQ ID NO: 2463051 - DNA, 25 bp, Homo sapien
ctgaggactcctcggttcaaagtac

SEQ ID NO: 2463052 - DNA, 25 bp, Homo sapien
gctgaggactcctcggttcaaagta

SEQ ID NO: 2463053 - DNA, 25 bp, Homo sapien
ggcagctgaggactcctcggttcaa

SEQ ID NO: 2463054 - DNA, 25 bp, Homo sapien
agggccacatcgtcactggtggaaa

SEQ ID NO: 2463055 - DNA, 25 bp, Homo sapien
cagggttcctttgttctgagtgccc

SEQ ID NO: 2463056 - DNA, 25 bp, Homo sapien
ggtctgcacgtcagccacaagcaca

SEQ ID NO: 2463057 - DNA, 25 bp, Homo sapien
gtcactggtggaaaactcttcagca

SEQ ID NO: 2463058 - DNA, 25 bp, Homo sapien
agtcacctccaggtggttctcacca

SEQ ID NO: 2463059 - DNA, 25 bp, Homo sapien
caggtggttctcaccaaagaaggaa

SEQ ID NO: 2463060 - DNA, 25 bp, Homo sapien
aggtggttctcaccaaagaaggaag

SEQ ID NO: 2463061 - DNA, 25 bp, Homo sapien
ctccaggtggttctcaccaaagaag

SEQ ID NO: 2463062 - DNA, 25 bp, Homo sapien
gagagggagctgtggtcaaggctca

SEQ ID NO: 2463063 - DNA, 25 bp, Homo sapien
agagagggagctgtggtcaaggctc

SEQ ID NO: 2463064 - DNA, 25 bp, Homo sapien
gagggagctgtggtcaaggctcaga

SEQ ID NO: 2463065 - DNA, 25 bp, Homo sapien
ggagctgtggtcaaggctcagattc

SEQ ID NO: 2463066 - DNA, 25 bp, Homo sapien
tgccagttctgacttgcatcccctg

SEQ ID NO: 2463067 - DNA, 25 bp, Homo sapien
agttctgacttgcatcccctgggcc

SEQ ID NO: 2463068 - DNA, 25 bp, Homo sapien
ccagttctgacttgcatcccctggg

SEQ ID NO: 2463069 - DNA, 25 bp, Homo sapien
cctctgccagttctgacttgcatcc

SEQ ID NO: 2463070 - DNA, 25 bp, Homo sapien
ggaggtctctatgccctaagggcag

SEQ ID NO: 2463071 - DNA, 25 bp, Homo sapien
gaggagttggaggtctctatgccct

SEQ ID NO: 2463072 - DNA, 25 bp, Homo sapien
ttggaggtctctatgccctaagggc

SEQ ID NO: 2463073 - DNA, 25 bp, Homo sapien
tctctatgccctaagggcagccagc

SEQ ID NO: 2463074 - DNA, 25 bp, Homo sapien
ctttggaaactctgacagcgctgct

SEQ ID NO: 2463075 - DNA, 25 bp, Homo sapien
tggaaactctgacagcgctgcttcc

SEQ ID NO: 2463076 - DNA, 25 bp, Homo sapien
gaaactctgacagcgctgcttccct

SEQ ID NO: 2463077 - DNA, 25 bp, Homo sapien
gctggagcgcatagccagggaggcc

SEQ ID NO: 2463078 - DNA, 25 bp, Homo sapien
tggtggggcggtggggggcagttga

SEQ ID NO: 2463079 - DNA, 25 bp, Homo sapien
tggggcggtggggggcagttgaaga

SEQ ID NO: 2463080 - DNA, 25 bp, Homo sapien
gagtccacagaccttatcggtgaag

SEQ ID NO: 2463081 - DNA, 25 bp, Homo sapien
cgaactgctgttgtccttagtatct

SEQ ID NO: 2463082 - DNA, 25 bp, Homo sapien
ttggctcatcagagtccacagacct

SEQ ID NO: 2463083 - DNA, 25 bp, Homo sapien
actgctgttgtccttagtatcttct

SEQ ID NO: 2463084 - DNA, 25 bp, Homo sapien
catccagggtacaatgcgcctttcc

SEQ ID NO: 2463085 - DNA, 25 bp, Homo sapien
gcatccagggtacaatgcgcctttc

SEQ ID NO: 2463086 - DNA, 25 bp, Homo sapien
aaaacctgactgaagaacgaggcat

SEQ ID NO: 2463087 - DNA, 25 bp, Homo sapien
aaggaaaacctgactgaagaacgag

SEQ ID NO: 2463088 - DNA, 25 bp, Homo sapien
ggaaaacctgactgaagaacgaggc

SEQ ID NO: 2463089 - DNA, 25 bp, Homo sapien
ctgaacatgcgggaacaaggaaaac

SEQ ID NO: 2463090 - DNA, 25 bp, Homo sapien
cggtccaggggagcaggctagctga

SEQ ID NO: 2463091 - DNA, 25 bp, Homo sapien
agcaggctagctgactgagggcgat

SEQ ID NO: 2463092 - DNA, 25 bp, Homo sapien
aggctagctgactgagggcgatcat

SEQ ID NO: 2463093 - DNA, 25 bp, Homo sapien
tccaggggagcaggctagctgactg

SEQ ID NO: 2463094 - DNA, 25 bp, Homo sapien
tcgccttgacccagcactgttggac

SEQ ID NO: 2463095 - DNA, 25 bp, Homo sapien
cttgacccagcactgttggacccat

SEQ ID NO: 2463096 - DNA, 25 bp, Homo sapien
ctcctcgccttgacccagcactgtt

SEQ ID NO: 2463097 - DNA, 25 bp, Homo sapien
ggagtccagagcatgcgcccgcttc

SEQ ID NO: 2463098 - DNA, 25 bp, Homo sapien
ctggcttcaatgcagtccggggcat

SEQ ID NO: 2463099 - DNA, 25 bp, Homo sapien
gcttcaatgcagtccggggcatgac

SEQ ID NO: 2463100 - DNA, 25 bp, Homo sapien
taggcatacgttgtgaggaactgga

SEQ ID NO: 2463101 - DNA, 25 bp, Homo sapien
gagataggcatacgttgtgaggaac

SEQ ID NO: 2463102 - DNA, 25 bp, Homo sapien
ctgggagtgctgagagccaaatcca

SEQ ID NO: 2463103 - DNA, 25 bp, Homo sapien
ctgtcgtgtggtctgagtcatgctg

SEQ ID NO: 2463104 - DNA, 25 bp, Homo sapien
gtcatgctgccagggcagggatcca

SEQ ID NO: 2463105 - DNA, 25 bp, Homo sapien
tcccagcctgggagtgctgagagcc

SEQ ID NO: 2463106 - DNA, 25 bp, Homo sapien
gctagcatgcgactgaaggcaggga

SEQ ID NO: 2463107 - DNA, 25 bp, Homo sapien
gtaccatgatagctgctagcatgcg

SEQ ID NO: 2463108 - DNA, 25 bp, Homo sapien
tgatagctgctagcatgcgactgaa

SEQ ID NO: 2463109 - DNA, 25 bp, Homo sapien
ccatgatagctgctagcatgcgact

SEQ ID NO: 2463110 - DNA, 25 bp, Homo sapien
gctgcaacacctgcccctgcagctc

SEQ ID NO: 2463111 - DNA, 25 bp, Homo sapien
gcccctgcagctccagcaggttcac

SEQ ID NO: 2463112 - DNA, 25 bp, Homo sapien
ctgcccctgcagctccagcaggttc

SEQ ID NO: 2463113 - DNA, 25 bp, Homo sapien
aagctgcaacacctgcccctgcagc

SEQ ID NO: 2463114 - DNA, 25 bp, Homo sapien
cggtgccagcaccgacattcactcc

SEQ ID NO: 2463115 - DNA, 25 bp, Homo sapien
ggtgccagcaccgacattcactccc

SEQ ID NO: 2463116 - DNA, 25 bp, Homo sapien
tgccagcaccgacattcactcccac

SEQ ID NO: 2463117 - DNA, 25 bp, Homo sapien
gtgccagcaccgacattcactccca

SEQ ID NO: 2463118 - DNA, 25 bp, Homo sapien
agcctgacgatgtcctcctctccca

SEQ ID NO: 2463119 - DNA, 25 bp, Homo sapien
cctgagaggtggatgaactgaagct

SEQ ID NO: 2463120 - DNA, 25 bp, Homo sapien
aactgaagctctagtttctccacca

SEQ ID NO: 2463121 - DNA, 25 bp, Homo sapien
gtggatgaactgaagctctagtttc

SEQ ID NO: 2463122 - DNA, 25 bp, Homo sapien
gaggtggatgaactgaagctctagt

SEQ ID NO: 2463123 - DNA, 25 bp, Homo sapien
tcaggtccatcttctccttccataa

SEQ ID NO: 2463124 - DNA, 25 bp, Homo sapien
aggtccatcttctccttccataaag

SEQ ID NO: 2463125 - DNA, 25 bp, Homo sapien
ggtccatcttctccttccataaagt

SEQ ID NO: 2463126 - DNA, 25 bp, Homo sapien
tccatcttctccttccataaagttg

SEQ ID NO: 2463127 - DNA, 25 bp, Homo sapien
cttgttggcccatgccaggactact

SEQ ID NO: 2463128 - DNA, 25 bp, Homo sapien
ccttgttggcccatgccaggactac

SEQ ID NO: 2463129 - DNA, 25 bp, Homo sapien
gttggcccatgccaggactactcac

SEQ ID NO: 2463130 - DNA, 25 bp, Homo sapien
ttgttggcccatgccaggactactc

SEQ ID NO: 2463131 - DNA, 25 bp, Homo sapien
agtgggtgtccccacacacagattc

SEQ ID NO: 2463132 - DNA, 25 bp, Homo sapien
cacacgctttgctcctcctgggcac

SEQ ID NO: 2463133 - DNA, 25 bp, Homo sapien
gcctctggctttttctgggatgagg

SEQ ID NO: 2463134 - DNA, 25 bp, Homo sapien
ggctggcagcacacgctttgctcct

SEQ ID NO: 2463135 - DNA, 25 bp, Homo sapien
catggcctcccggctctccaggtcc

SEQ ID NO: 2463136 - DNA, 25 bp, Homo sapien
atggcctcccggctctccaggtccc

SEQ ID NO: 2463137 - DNA, 25 bp, Homo sapien
cattgtccagatgtcctcctccata

SEQ ID NO: 2463138 - DNA, 25 bp, Homo sapien
gaggtgcctcctcctcattgtccag

SEQ ID NO: 2463139 - DNA, 25 bp, Homo sapien
ggaatgttcagcatgggccgaggtg

SEQ ID NO: 2463140 - DNA, 25 bp, Homo sapien
ctggaatgttcagcatgggccgagg

SEQ ID NO: 2463141 - DNA, 25 bp, Homo sapien
cttaggcaacccgatggccccgctc

SEQ ID NO: 2463142 - DNA, 25 bp, Homo sapien
cgaacttagtacggacacccagttg

SEQ ID NO: 2463143 - DNA, 25 bp, Homo sapien
atccttaggcaacccgatggccccg

SEQ ID NO: 2463144 - DNA, 25 bp, Homo sapien
aggcaacccgatggccccgctccca

SEQ ID NO: 2463145 - DNA, 25 bp, Homo sapien
tcttcctctgagtggtctcccatac

SEQ ID NO: 2463146 - DNA, 25 bp, Homo sapien
tcctcttcctctgagtggtctccca

SEQ ID NO: 2463147 - DNA, 25 bp, Homo sapien
ctttcctcctggggctctctcctct

SEQ ID NO: 2463148 - DNA, 25 bp, Homo sapien
tctcctcttcctctgagtggtctcc

SEQ ID NO: 2463149 - DNA, 25 bp, Homo sapien
ctcaactgggctttagctgctgttt

SEQ ID NO: 2463150 - DNA, 25 bp, Homo sapien
actgggctttagctgctgtttctgc

SEQ ID NO: 2463151 - DNA, 25 bp, Homo sapien
ctgctggctggtagcttccaggttc

SEQ ID NO: 2463152 - DNA, 25 bp, Homo sapien
tgctggctggtagcttccaggttct

SEQ ID NO: 2463153 - DNA, 25 bp, Homo sapien
ctgctactaagcgaccacgaactgc

SEQ ID NO: 2463154 - DNA, 25 bp, Homo sapien
tgctactaagcgaccacgaactgct

SEQ ID NO: 2463155 - DNA, 25 bp, Homo sapien
gctactaagcgaccacgaactgctg

SEQ ID NO: 2463156 - DNA, 25 bp, Homo sapien
catgtggtggctggcttccagattc

SEQ ID NO: 2463157 - DNA, 25 bp, Homo sapien
ggcatgagggcatgtggtggctggc

SEQ ID NO: 2463158 - DNA, 25 bp, Homo sapien
ctgggcatgagggcatgtggtggct

SEQ ID NO: 2463159 - DNA, 25 bp, Homo sapien
gcatgagggcatgtggtggctggct

SEQ ID NO: 2463160 - DNA, 25 bp, Homo sapien
ccaaccattattagatgggtcagag

SEQ ID NO: 2463161 - DNA, 25 bp, Homo sapien
tcccaaccattattagatgggtcag

SEQ ID NO: 2463162 - DNA, 25 bp, Homo sapien
caaccattattagatgggtcagagg

SEQ ID NO: 2463163 - DNA, 25 bp, Homo sapien
accattattagatgggtcagaggtt

SEQ ID NO: 2463164 - DNA, 25 bp, Homo sapien
tacttgccgctccaactgcagtgca

SEQ ID NO: 2463165 - DNA, 25 bp, Homo sapien
gcagtgcactcttgttctcattatt

SEQ ID NO: 2463166 - DNA, 25 bp, Homo sapien
tttacttgccgctccaactgcagtg

SEQ ID NO: 2463167 - DNA, 25 bp, Homo sapien
ctgcagtgcactcttgttctcatta

SEQ ID NO: 2463168 - DNA, 25 bp, Homo sapien
ctgctgcttgtagagggcttcccac

SEQ ID NO: 2463169 - DNA, 25 bp, Homo sapien
gggctcggcctgctgcttgtagagg

SEQ ID NO: 2463170 - DNA, 25 bp, Homo sapien
tcctcaaagctgctgtggggctcgg

SEQ ID NO: 2463171 - DNA, 25 bp, Homo sapien
cttgtagagggcttcccactccagc

SEQ ID NO: 2463172 - DNA, 25 bp, Homo sapien
caggagactcaacatctgattgttt

SEQ ID NO: 2463173 - DNA, 25 bp, Homo sapien
cagcctggagctgtcttcccacact

SEQ ID NO: 2463174 - DNA, 25 bp, Homo sapien
gcctggagctgtcttcccacactct

SEQ ID NO: 2463175 - DNA, 25 bp, Homo sapien
cttccttaggtggttggtctcatct

SEQ ID NO: 2463176 - DNA, 25 bp, Homo sapien
taggtggttggtctcatcttgtagc

SEQ ID NO: 2463177 - DNA, 25 bp, Homo sapien
gcagggccactgctagttctcggta

SEQ ID NO: 2463178 - DNA, 25 bp, Homo sapien
tgagtgcagggccactgctagttct

SEQ ID NO: 2463179 - DNA, 25 bp, Homo sapien
gagcttgagtgcagggccactgcta

SEQ ID NO: 2463180 - DNA, 25 bp, Homo sapien
agtgcagggccactgctagttctcg

SEQ ID NO: 2463181 - DNA, 25 bp, Homo sapien
ggctggtggagggtgtgggttgtct

SEQ ID NO: 2463182 - DNA, 25 bp, Homo sapien
tggtggagggtgtgggttgtctcag

SEQ ID NO: 2463183 - DNA, 25 bp, Homo sapien
aatcattagggctggtggagggtgt

SEQ ID NO: 2463184 - DNA, 25 bp, Homo sapien
agttggaggaagattgtggggaggg

SEQ ID NO: 2463185 - DNA, 25 bp, Homo sapien
ctggcagaggggcaacaagcccctg

SEQ ID NO: 2463186 - DNA, 25 bp, Homo sapien
tgatgcatggccttccccgtagata

SEQ ID NO: 2463187 - DNA, 25 bp, Homo sapien
atgatgcatggccttccccgtagat

SEQ ID NO: 2463188 - DNA, 25 bp, Homo sapien
agcagatgatgcatggccttccccg

SEQ ID NO: 2463189 - DNA, 25 bp, Homo sapien
cagatgatgcatggccttccccgta

SEQ ID NO: 2463190 - DNA, 25 bp, Homo sapien
cctgttagctcctgctggaatgcca

SEQ ID NO: 2463191 - DNA, 25 bp, Homo sapien
tgtcagggctactgccattgatttt

SEQ ID NO: 2463192 - DNA, 25 bp, Homo sapien
gttagctcctgctggaatgccaggg

SEQ ID NO: 2463193 - DNA, 25 bp, Homo sapien
gctgtgtcagggctactgccattga

SEQ ID NO: 2463194 - DNA, 25 bp, Homo sapien
gacatcagtgcgatgccggagtcgc

SEQ ID NO: 2463195 - DNA, 25 bp, Homo sapien
acatcagtgcgatgccggagtcgcc

SEQ ID NO: 2463196 - DNA, 25 bp, Homo sapien
gtgcgatgccggagtcgccactcca

SEQ ID NO: 2463197 - DNA, 25 bp, Homo sapien
gccggagtcgccactccatgatggg

SEQ ID NO: 2463198 - DNA, 25 bp, Homo sapien
tgcggcagcaggaggggagggcaga

SEQ ID NO: 2463199 - DNA, 25 bp, Homo sapien
ttgcggcagcaggaggggagggcag

SEQ ID NO: 2463200 - DNA, 25 bp, Homo sapien
cggcagcaggaggggagggcagagt

SEQ ID NO: 2463201 - DNA, 25 bp, Homo sapien
cttgcggcagcaggaggggagggca

SEQ ID NO: 2463202 - DNA, 25 bp, Homo sapien
tggttgatctggcatggcaacatcc

SEQ ID NO: 2463203 - DNA, 25 bp, Homo sapien
gatctggcatggcaacatccaggtg

SEQ ID NO: 2463204 - DNA, 25 bp, Homo sapien
gttgatctggcatggcaacatccag

SEQ ID NO: 2463205 - DNA, 25 bp, Homo sapien
ttgatctggcatggcaacatccagg

SEQ ID NO: 2463206 - DNA, 25 bp, Homo sapien
caaattgttgttcttatcatcttcc

SEQ ID NO: 2463207 - DNA, 25 bp, Homo sapien
cagacattccaaaactgatgtcaga

SEQ ID NO: 2463208 - DNA, 25 bp, Homo sapien
agatttagctcatcagagtctacaa

SEQ ID NO: 2463209 - DNA, 25 bp, Homo sapien
gagtctacaaaccatattggtgaag

SEQ ID NO: 2463210 - DNA, 25 bp, Homo sapien
ctgccgcatccagggtacaatgcgc

SEQ ID NO: 2463211 - DNA, 25 bp, Homo sapien
aacacagcagcgaccagggaagagg

SEQ ID NO: 2463212 - DNA, 25 bp, Homo sapien
gttccttctctatcaggtctggtgg

SEQ ID NO: 2463213 - DNA, 25 bp, Homo sapien
ctctggcgaccactccagccagcca

SEQ ID NO: 2463214 - DNA, 25 bp, Homo sapien
ggcctctggcgaccactccagccag

SEQ ID NO: 2463215 - DNA, 25 bp, Homo sapien
ccttctctatcaggtctggtggctg

SEQ ID NO: 2463216 - DNA, 25 bp, Homo sapien
cagctctgacttttctctaacccgt

SEQ ID NO: 2463217 - DNA, 25 bp, Homo sapien
tctctgctttctctccaactgccag

SEQ ID NO: 2463218 - DNA, 25 bp, Homo sapien
agctctgacttttctctaacccgtt

SEQ ID NO: 2463219 - DNA, 25 bp, Homo sapien
ctaacccgttttctctctgctttct

SEQ ID NO: 2463220 - DNA, 25 bp, Homo sapien
ctgtactccataggcaccatggcag

SEQ ID NO: 2463221 - DNA, 25 bp, Homo sapien
tcacccacggtcatcccagggcagg

SEQ ID NO: 2463222 - DNA, 25 bp, Homo sapien
acccacggtcatcccagggcagggt

SEQ ID NO: 2463223 - DNA, 25 bp, Homo sapien
agggcagggttgtggagggccacag

SEQ ID NO: 2463224 - DNA, 25 bp, Homo sapien
ggcagggttgtggagggccacagcc

SEQ ID NO: 2463225 - DNA, 25 bp, Homo sapien
tgtgactctcctgtcagctgagccg

SEQ ID NO: 2463226 - DNA, 25 bp, Homo sapien
tcttgcagggagtggttctcccacc

SEQ ID NO: 2463227 - DNA, 25 bp, Homo sapien
gctccagtgaccagggtgacctgag

SEQ ID NO: 2463228 - DNA, 25 bp, Homo sapien
cagcacggttggcagtgttctcagc

SEQ ID NO: 2463229 - DNA, 25 bp, Homo sapien
gctgacaggatggtaagaaattcca

SEQ ID NO: 2463230 - DNA, 25 bp, Homo sapien
tgctgacaggatggtaagaaattcc

SEQ ID NO: 2463231 - DNA, 25 bp, Homo sapien
ttgctgacaggatggtaagaaattc

SEQ ID NO: 2463232 - DNA, 25 bp, Homo sapien
ccatctgaattctccaagctgcaaa

SEQ ID NO: 2463233 - DNA, 25 bp, Homo sapien
catctgaattctccaagctgcaaaa

SEQ ID NO: 2463234 - DNA, 25 bp, Homo sapien
agtcacctcctcaagtccgtgtgaa

SEQ ID NO: 2463235 - DNA, 25 bp, Homo sapien
tcctcaagtccgtgtgaagcagaag

SEQ ID NO: 2463236 - DNA, 25 bp, Homo sapien
caagtccgtgtgaagcagaagtaaa

SEQ ID NO: 2463237 - DNA, 25 bp, Homo sapien
acctcctcaagtccgtgtgaagcag

SEQ ID NO: 2463238 - DNA, 25 bp, Homo sapien
cctggtagcctctgaaggcccaaat

SEQ ID NO: 2463239 - DNA, 25 bp, Homo sapien
ctggtagcctctgaaggcccaaatc

SEQ ID NO: 2463240 - DNA, 25 bp, Homo sapien
ctgtgaaggtcccacaattcatgga

SEQ ID NO: 2463241 - DNA, 25 bp, Homo sapien
gaaactgcccagctttcccctggca

SEQ ID NO: 2463242 - DNA, 25 bp, Homo sapien
caattcatggaatgtacaggggctc

SEQ ID NO: 2463243 - DNA, 25 bp, Homo sapien
tcccacaattcatggaatgtacagg

SEQ ID NO: 2463244 - DNA, 25 bp, Homo sapien
atcttctttggggtcgcctacctgc

SEQ ID NO: 2463245 - DNA, 25 bp, Homo sapien
tgggatcttctttggggtcgcctac

SEQ ID NO: 2463246 - DNA, 25 bp, Homo sapien
tctcaggttgtactgtgagtcctgg

SEQ ID NO: 2463247 - DNA, 25 bp, Homo sapien
cctgggatcttctttggggtcgcct

SEQ ID NO: 2463248 - DNA, 25 bp, Homo sapien
atcttctcatcttgcatttgggtgt

SEQ ID NO: 2463249 - DNA, 25 bp, Homo sapien
gggtcctccagtgtgggatccatgt

SEQ ID NO: 2463250 - DNA, 25 bp, Homo sapien
tctcatcttgcatttgggtgtggtg

SEQ ID NO: 2463251 - DNA, 25 bp, Homo sapien
tgtggtggggtcctccagtgtggga

SEQ ID NO: 2463252 - DNA, 25 bp, Homo sapien
attgaggaggaagcatccgagtatg

SEQ ID NO: 2463253 - DNA, 25 bp, Homo sapien
aggacagggtgggaccatagacttt

SEQ ID NO: 2463254 - DNA, 25 bp, Homo sapien
tgccaagattgaggaggaagcatcc

SEQ ID NO: 2463255 - DNA, 25 bp, Homo sapien
ggaggacagggtgggaccatagact

SEQ ID NO: 2463256 - DNA, 25 bp, Homo sapien
gatgcagtgccagataccacctgtg

SEQ ID NO: 2463257 - DNA, 25 bp, Homo sapien
ccagataccacctgtgtcagttcct

SEQ ID NO: 2463258 - DNA, 25 bp, Homo sapien
tgatgcagtgccagataccacctgt

SEQ ID NO: 2463259 - DNA, 25 bp, Homo sapien
ataccacctgtgtcagttcctgtag

SEQ ID NO: 2463260 - DNA, 25 bp, Homo sapien
aggccagttcatggtatttctgcct

SEQ ID NO: 2463261 - DNA, 25 bp, Homo sapien
ctggaaggccagttcatggtatttc

SEQ ID NO: 2463262 - DNA, 25 bp, Homo sapien
gaaggccagttcatggtatttctgc

SEQ ID NO: 2463263 - DNA, 25 bp, Homo sapien
ggaaggccagttcatggtatttctg

SEQ ID NO: 2463264 - DNA, 25 bp, Homo sapien
ggtccagttatcctggttggggtga

SEQ ID NO: 2463265 - DNA, 25 bp, Homo sapien
gtccagttatcctggttggggtgac

SEQ ID NO: 2463266 - DNA, 25 bp, Homo sapien
tccagttatcctggttggggtgacc

SEQ ID NO: 2463267 - DNA, 25 bp, Homo sapien
gatgagccctgttccttgtgcaggg

SEQ ID NO: 2463268 - DNA, 25 bp, Homo sapien
ctggtgtgccctgccaggcctggtg

SEQ ID NO: 2463269 - DNA, 25 bp, Homo sapien
atgaccgccactcatgggacaccgg

SEQ ID NO: 2463270 - DNA, 25 bp, Homo sapien
accgccactcatgggacaccggatg

SEQ ID NO: 2463271 - DNA, 25 bp, Homo sapien
gtggatgctcgtgagcaacagctgc

SEQ ID NO: 2463272 - DNA, 25 bp, Homo sapien
gggagatgagcttttaccaggttcc

SEQ ID NO: 2463273 - DNA, 25 bp, Homo sapien
acctggtggatgctcgtgagcaaca

SEQ ID NO: 2463274 - DNA, 25 bp, Homo sapien
cctcctccatggtgggagatgagct

SEQ ID NO: 2463275 - DNA, 25 bp, Homo sapien
ttcctgaagccatttgtaacttact

SEQ ID NO: 2463276 - DNA, 25 bp, Homo sapien
ggcactcttacatatctcatccact

SEQ ID NO: 2463277 - DNA, 25 bp, Homo sapien
ctgaagccatttgtaacttactcta

SEQ ID NO: 2463278 - DNA, 25 bp, Homo sapien
tcaggcactcttacatatctcatcc

SEQ ID NO: 2463279 - DNA, 25 bp, Homo sapien
gagggctttgccattcatcatcttc

SEQ ID NO: 2463280 - DNA, 25 bp, Homo sapien
ccactgtcagtgtcattgtctaatg

SEQ ID NO: 2463281 - DNA, 25 bp, Homo sapien
atcttcagtgcatttcccactgtca

SEQ ID NO: 2463282 - DNA, 25 bp, Homo sapien
ctaatgctgtttgcatccacacagc

SEQ ID NO: 2463283 - DNA, 25 bp, Homo sapien
agctttaaaacatatgctctgggcg

SEQ ID NO: 2463284 - DNA, 25 bp, Homo sapien
gagcaggtctcccttaaattcattt

SEQ ID NO: 2463285 - DNA, 25 bp, Homo sapien
gcttggctcccaggttgattctttc

SEQ ID NO: 2463286 - DNA, 25 bp, Homo sapien
tgtccttgattgtccttggatggct

SEQ ID NO: 2463287 - DNA, 25 bp, Homo sapien
ggctttgttccctccttgtcgagta

SEQ ID NO: 2463288 - DNA, 25 bp, Homo sapien
ggccattgagaattgacagcatcag

SEQ ID NO: 2463289 - DNA, 25 bp, Homo sapien
tcttctggccattgagaattgacag

SEQ ID NO: 2463290 - DNA, 25 bp, Homo sapien
tctggccattgagaattgacagcat

SEQ ID NO: 2463291 - DNA, 25 bp, Homo sapien
tggccattgagaattgacagcatca

SEQ ID NO: 2463292 - DNA, 25 bp, Homo sapien
cccctgattttgagtgtgaatgggt

SEQ ID NO: 2463293 - DNA, 25 bp, Homo sapien
attccccctgattttgagtgtgaat

SEQ ID NO: 2463294 - DNA, 25 bp, Homo sapien
ccctgattttgagtgtgaatgggta

SEQ ID NO: 2463295 - DNA, 25 bp, Homo sapien
tccccctgattttgagtgtgaatgg

SEQ ID NO: 2463296 - DNA, 25 bp, Homo sapien
ctcagtggtatcatctgactcagct

SEQ ID NO: 2463297 - DNA, 25 bp, Homo sapien
catgcccctcagtggtatcatctga

SEQ ID NO: 2463298 - DNA, 25 bp, Homo sapien
tctggattgctaagaccagggtctc

SEQ ID NO: 2463299 - DNA, 25 bp, Homo sapien
ggtctctatagtggcatctccaaca

SEQ ID NO: 2463300 - DNA, 25 bp, Homo sapien
tccgcagtgcatggtctggcatccc

SEQ ID NO: 2463301 - DNA, 25 bp, Homo sapien
tgctaaggtggaaggcatccgcagt

SEQ ID NO: 2463302 - DNA, 25 bp, Homo sapien
cagtggtgatgtcttccctttgatg

SEQ ID NO: 2463303 - DNA, 25 bp, Homo sapien
tagcccactagtgctaaggtggaag

SEQ ID NO: 2463304 - DNA, 25 bp, Homo sapien
agactcccaatctgaggtccaatgc

SEQ ID NO: 2463305 - DNA, 25 bp, Homo sapien
tcagactcccaatctgaggtccaat

SEQ ID NO: 2463306 - DNA, 25 bp, Homo sapien
tcccaatctgaggtccaatgctctc

SEQ ID NO: 2463307 - DNA, 25 bp, Homo sapien
gactcccaatctgaggtccaatgct

SEQ ID NO: 2463308 - DNA, 25 bp, Homo sapien
agactctttcttattctgggcctct

SEQ ID NO: 2463309 - DNA, 25 bp, Homo sapien
gactctttcttattctgggcctctg

SEQ ID NO: 2463310 - DNA, 25 bp, Homo sapien
ctttcttattctgggcctctgctgt

SEQ ID NO: 2463311 - DNA, 25 bp, Homo sapien
tcttattctgggcctctgctgttac

SEQ ID NO: 2463312 - DNA, 25 bp, Homo sapien
ttctcctttgtgactcccctgccat

SEQ ID NO: 2463313 - DNA, 25 bp, Homo sapien
tccctgtcacagtcagtttggggac

SEQ ID NO: 2463314 - DNA, 25 bp, Homo sapien
tcacagtcagtttggggactgatcc

SEQ ID NO: 2463315 - DNA, 25 bp, Homo sapien
agtcagtttggggactgatcctcca

SEQ ID NO: 2463316 - DNA, 25 bp, Homo sapien
ggcgcttcagcctgagcgttcgctt

SEQ ID NO: 2463317 - DNA, 25 bp, Homo sapien
tctttggcgcttcagcctgagcgtt

SEQ ID NO: 2463318 - DNA, 25 bp, Homo sapien
cttctttggcgcttcagcctgagcg

SEQ ID NO: 2463319 - DNA, 25 bp, Homo sapien
tttggcgcttcagcctgagcgttcg

SEQ ID NO: 2463320 - DNA, 25 bp, Homo sapien
aaagcagatgcagtttggaatatag

SEQ ID NO: 2463321 - DNA, 25 bp, Homo sapien
ctaaagcagatgcagtttggaatat

SEQ ID NO: 2463322 - DNA, 25 bp, Homo sapien
gcagatgcagtttggaatatagtcc

SEQ ID NO: 2463323 - DNA, 25 bp, Homo sapien
agatgcagtttggaatatagtccta

SEQ ID NO: 2463324 - DNA, 25 bp, Homo sapien
tagagtcggcttctaaagcgtctgt

SEQ ID NO: 2463325 - DNA, 25 bp, Homo sapien
ggtccattctgtagagatttgcttc

SEQ ID NO: 2463326 - DNA, 25 bp, Homo sapien
ctagaacagtgagtggtccattctg

SEQ ID NO: 2463327 - DNA, 25 bp, Homo sapien
tctcaggcactgatgataagactgt

SEQ ID NO: 2463328 - DNA, 25 bp, Homo sapien
taacttcacgaaaatacaggaggca

SEQ ID NO: 2463329 - DNA, 25 bp, Homo sapien
cattttggatatctctgaacagcag

SEQ ID NO: 2463330 - DNA, 25 bp, Homo sapien
cagttaaagagattggtgctctaac

SEQ ID NO: 2463331 - DNA, 25 bp, Homo sapien
ttctctacaaacaaactacttctgg

SEQ ID NO: 2463332 - DNA, 25 bp, Homo sapien
ttcttcctctggattgtttttctga

SEQ ID NO: 2463333 - DNA, 25 bp, Homo sapien
ccccataacttgagctactgtatcc

SEQ ID NO: 2463334 - DNA, 25 bp, Homo sapien
ctatccacagaaggtagattccttc

SEQ ID NO: 2463335 - DNA, 25 bp, Homo sapien
gccccataacttgagctactgtatc

SEQ ID NO: 2463336 - DNA, 25 bp, Homo sapien
cagaaggtagattccttcattcctt

SEQ ID NO: 2463337 - DNA, 25 bp, Homo sapien
atcatggtatccataatctctagat

SEQ ID NO: 2463338 - DNA, 25 bp, Homo sapien
atggtatccataatctctagatggt

SEQ ID NO: 2463339 - DNA, 25 bp, Homo sapien
cgtaatcatggtatccataatctct

SEQ ID NO: 2463340 - DNA, 25 bp, Homo sapien
gtaatcatggtatccataatctcta

SEQ ID NO: 2463341 - DNA, 25 bp, Homo sapien
caaagtctttgggttacacacacag

SEQ ID NO: 2463342 - DNA, 25 bp, Homo sapien
tgtgagccttgtatgcacacctagc

SEQ ID NO: 2463343 - DNA, 25 bp, Homo sapien
gacatgtgtgatgtcccggatcacc

SEQ ID NO: 2463344 - DNA, 25 bp, Homo sapien
cacacagaatctaagcagggcacag

SEQ ID NO: 2463345 - DNA, 25 bp, Homo sapien
tcagatttgtaagggctgtcttcta

SEQ ID NO: 2463346 - DNA, 25 bp, Homo sapien
catgcttcagatttgtaagggctgt

SEQ ID NO: 2463347 - DNA, 25 bp, Homo sapien
tgtaagggctgtcttctatatgaat

SEQ ID NO: 2463348 - DNA, 25 bp, Homo sapien
taagggctgtcttctatatgaatta

SEQ ID NO: 2463349 - DNA, 25 bp, Homo sapien
tccagtataaattctcttatgttta

SEQ ID NO: 2463350 - DNA, 25 bp, Homo sapien
tctacaggtgtagggtttccctcca

SEQ ID NO: 2463351 - DNA, 25 bp, Homo sapien
tttccctccagtataaattctctta

SEQ ID NO: 2463352 - DNA, 25 bp, Homo sapien
ccctccagtataaattctcttatgt

SEQ ID NO: 2463353 - DNA, 25 bp, Homo sapien
cttatgtttattaaggtctgagaac

SEQ ID NO: 2463354 - DNA, 25 bp, Homo sapien
tgagttatcttatgtttattaaggt

SEQ ID NO: 2463355 - DNA, 25 bp, Homo sapien
cttcagtatgagttatcttatgttt

SEQ ID NO: 2463356 - DNA, 25 bp, Homo sapien
atcttatgtttattaaggtctgaga

SEQ ID NO: 2463357 - DNA, 25 bp, Homo sapien
cccataggctctgtgacattcttca

SEQ ID NO: 2463358 - DNA, 25 bp, Homo sapien
tctctccagtataaattattttatt

SEQ ID NO: 2463359 - DNA, 25 bp, Homo sapien
tcttcacatttgtatgatggtttct

SEQ ID NO: 2463360 - DNA, 25 bp, Homo sapien
cccccataggctctgtgacattctt

SEQ ID NO: 2463361 - DNA, 25 bp, Homo sapien
tgagaattctcttagaattagtaag

SEQ ID NO: 2463362 - DNA, 25 bp, Homo sapien
agcaagttctgagaattctcttaga

SEQ ID NO: 2463363 - DNA, 25 bp, Homo sapien
agaattctcttagaattagtaaggt

SEQ ID NO: 2463364 - DNA, 25 bp, Homo sapien
tctgagaattctcttagaattagta

SEQ ID NO: 2463365 - DNA, 25 bp, Homo sapien
tctttgcaattgtaggatctatttc

SEQ ID NO: 2463366 - DNA, 25 bp, Homo sapien
ctttgcaattgtaggatctatttcc

SEQ ID NO: 2463367 - DNA, 25 bp, Homo sapien
ttgcaattgtaggatctatttccaa

SEQ ID NO: 2463368 - DNA, 25 bp, Homo sapien
tttgcaattgtaggatctatttcca

SEQ ID NO: 2463369 - DNA, 25 bp, Homo sapien
ctaagaaaatttcaattaaagtctg

SEQ ID NO: 2463370 - DNA, 25 bp, Homo sapien
taagaaaatttcaattaaagtctgc

SEQ ID NO: 2463371 - DNA, 25 bp, Homo sapien
aagaaaatttcaattaaagtctgca

SEQ ID NO: 2463372 - DNA, 25 bp, Homo sapien
agaaaatttcaattaaagtctgcat

SEQ ID NO: 2463373 - DNA, 25 bp, Homo sapien
atttacttgtaatcttgcagaagca

SEQ ID NO: 2463374 - DNA, 25 bp, Homo sapien
ttactaatgttgaagtccatgttag

SEQ ID NO: 2463375 - DNA, 25 bp, Homo sapien
tatcttcttgcattccagattctct

SEQ ID NO: 2463376 - DNA, 25 bp, Homo sapien
cactttcaggcactctctttaatca

SEQ ID NO: 2463377 - DNA, 25 bp, Homo sapien
catgaacccactgagaggaacaaac

SEQ ID NO: 2463378 - DNA, 25 bp, Homo sapien
cctcttagggccctgaactgaaccg

SEQ ID NO: 2463379 - DNA, 25 bp, Homo sapien
tgaactgaaccgagagattcttcag

SEQ ID NO: 2463380 - DNA, 25 bp, Homo sapien
tacttggagcttcaggggtggcact

SEQ ID NO: 2463381 - DNA, 25 bp, Homo sapien
tgcaggggagaaccctcttagggcc

SEQ ID NO: 2463382 - DNA, 25 bp, Homo sapien
gtaccaggaatttccatccgcaacc

SEQ ID NO: 2463383 - DNA, 25 bp, Homo sapien
agggtaccaggaatttccatccgca

SEQ ID NO: 2463384 - DNA, 25 bp, Homo sapien
caggagtttgccagaggccaggaga

SEQ ID NO: 2463385 - DNA, 25 bp, Homo sapien
aggaatttccatccgcaacccagcc

SEQ ID NO: 2463386 - DNA, 25 bp, Homo sapien
cattgctaccattccacggcttggc

SEQ ID NO: 2463387 - DNA, 25 bp, Homo sapien
gcaaacctcctgaaagactagtaaa

SEQ ID NO: 2463388 - DNA, 25 bp, Homo sapien
taaagactgtatccttcggattccg

SEQ ID NO: 2463389 - DNA, 25 bp, Homo sapien
ttgagaaatcatagaccccagtggg

SEQ ID NO: 2463390 - DNA, 25 bp, Homo sapien
caagttatacagaaagtttcagtgt

SEQ ID NO: 2463391 - DNA, 25 bp, Homo sapien
taatacaagttatacagaaagtttc

SEQ ID NO: 2463392 - DNA, 25 bp, Homo sapien
tacaagttatacagaaagtttcagt

SEQ ID NO: 2463393 - DNA, 25 bp, Homo sapien
agttatacagaaagtttcagtgtga

SEQ ID NO: 2463394 - DNA, 25 bp, Homo sapien
ccaaacttcttctaaagcgatgcac

SEQ ID NO: 2463395 - DNA, 25 bp, Homo sapien
gatccaacagatttaaatactgcca

SEQ ID NO: 2463396 - DNA, 25 bp, Homo sapien
atagctgagaggatccaacagattt

SEQ ID NO: 2463397 - DNA, 25 bp, Homo sapien
gccaaacttcttctaaagcgatgca

SEQ ID NO: 2463398 - DNA, 25 bp, Homo sapien
gaagcagtcatcttgagtaacaacg

SEQ ID NO: 2463399 - DNA, 25 bp, Homo sapien
tcatcttgagtaacaacggaattta

SEQ ID NO: 2463400 - DNA, 25 bp, Homo sapien
agcagtcatcttgagtaacaacgga

SEQ ID NO: 2463401 - DNA, 25 bp, Homo sapien
cagtcatcttgagtaacaacggaat

SEQ ID NO: 2463402 - DNA, 25 bp, Homo sapien
tttgtatgcttcggtccacagattt

SEQ ID NO: 2463403 - DNA, 25 bp, Homo sapien
ttctctggattaaacagacaagata

SEQ ID NO: 2463404 - DNA, 25 bp, Homo sapien
ccccaacaggccactgcggtagcac

SEQ ID NO: 2463405 - DNA, 25 bp, Homo sapien
tgctccccaacaggccactgcggta

SEQ ID NO: 2463406 - DNA, 25 bp, Homo sapien
cataaccccttttgctccccaacag

SEQ ID NO: 2463407 - DNA, 25 bp, Homo sapien
tccccaacaggccactgcggtagca

SEQ ID NO: 2463408 - DNA, 25 bp, Homo sapien
acatacaggcaactgacacccagtg

SEQ ID NO: 2463409 - DNA, 25 bp, Homo sapien
taattacatacaggcaactgacacc

SEQ ID NO: 2463410 - DNA, 25 bp, Homo sapien
catacaggcaactgacacccagtgg

SEQ ID NO: 2463411 - DNA, 25 bp, Homo sapien
attacatacaggcaactgacaccca

SEQ ID NO: 2463412 - DNA, 25 bp, Homo sapien
ccccaacagggcactgcggtggcat

SEQ ID NO: 2463413 - DNA, 25 bp, Homo sapien
ctcctttgctccccaacagggcact

SEQ ID NO: 2463414 - DNA, 25 bp, Homo sapien
gctccccaacagggcactgcggtgg

SEQ ID NO: 2463415 - DNA, 25 bp, Homo sapien
tcctttgctccccaacagggcactg

SEQ ID NO: 2463416 - DNA, 25 bp, Homo sapien
aattgtatacatggaactgatatcc

SEQ ID NO: 2463417 - DNA, 25 bp, Homo sapien
tatacatggaactgatatccagtgg

SEQ ID NO: 2463418 - DNA, 25 bp, Homo sapien
ctggtaattgtatacatggaactga

SEQ ID NO: 2463419 - DNA, 25 bp, Homo sapien
tggaactgatatccagtggtgacct

SEQ ID NO: 2463420 - DNA, 25 bp, Homo sapien
gaaagaaatatcattcccaatgtaa

SEQ ID NO: 2463421 - DNA, 25 bp, Homo sapien
aattagaaagaaatatcattcccaa

SEQ ID NO: 2463422 - DNA, 25 bp, Homo sapien
agaaatatcattcccaatgtaacaa

SEQ ID NO: 2463423 - DNA, 25 bp, Homo sapien
tatcattcccaatgtaacaaaaata

SEQ ID NO: 2463424 - DNA, 25 bp, Homo sapien
ctgataattgtatacaggcaactga

SEQ ID NO: 2463425 - DNA, 25 bp, Homo sapien
taattgtatacaggcaactgatatc

SEQ ID NO: 2463426 - DNA, 25 bp, Homo sapien
ttgtatacaggcaactgatatccag

SEQ ID NO: 2463427 - DNA, 25 bp, Homo sapien
tatacaggcaactgatatccagtgg

SEQ ID NO: 2463428 - DNA, 25 bp, Homo sapien
ctggtgaatttggataagcaggaaa

SEQ ID NO: 2463429 - DNA, 25 bp, Homo sapien
ctgaactggtgaatttggataagca

SEQ ID NO: 2463430 - DNA, 25 bp, Homo sapien
gaactggtgaatttggataagcagg

SEQ ID NO: 2463431 - DNA, 25 bp, Homo sapien
aactggtgaatttggataagcagga

SEQ ID NO: 2463432 - DNA, 25 bp, Homo sapien
actgatatccagtggcgacttgaaa

SEQ ID NO: 2463433 - DNA, 25 bp, Homo sapien
tatccagtggcgacttgaaatggtg

SEQ ID NO: 2463434 - DNA, 25 bp, Homo sapien
ggaactgatatccagtggcgacttg

SEQ ID NO: 2463435 - DNA, 25 bp, Homo sapien
cttgaaatggtgaatttggataagc

SEQ ID NO: 2463436 - DNA, 25 bp, Homo sapien
tatacaggcaactgatatccagtgg

SEQ ID NO: 2463437 - DNA, 25 bp, Homo sapien
ttgtatacaggcaactgatatccag

SEQ ID NO: 2463438 - DNA, 25 bp, Homo sapien
taattgtatacaggcaactgatatc

SEQ ID NO: 2463439 - DNA, 25 bp, Homo sapien
ctgataattgtatacaggcaactga

SEQ ID NO: 2463440 - DNA, 25 bp, Homo sapien
ctggtgaatttggataagcaggaaa

SEQ ID NO: 2463441 - DNA, 25 bp, Homo sapien
ctgaactggtgaatttggataagca

SEQ ID NO: 2463442 - DNA, 25 bp, Homo sapien
gaactggtgaatttggataagcagg

SEQ ID NO: 2463443 - DNA, 25 bp, Homo sapien
aactggtgaatttggataagcagga

SEQ ID NO: 2463444 - DNA, 25 bp, Homo sapien
tatccagtggcgacttgaaatggtg

SEQ ID NO: 2463445 - DNA, 25 bp, Homo sapien
ggaactgatatccagtggcgacttg

SEQ ID NO: 2463446 - DNA, 25 bp, Homo sapien
cttgaaatggtgaatttggataagc

SEQ ID NO: 2463447 - DNA, 25 bp, Homo sapien
actgatatccagtggcgacttgaaa

SEQ ID NO: 2463448 - DNA, 25 bp, Homo sapien
ttgtatacaggcaactgatatccag

SEQ ID NO: 2463449 - DNA, 25 bp, Homo sapien
tatacaggcaactgatatccagtgg

SEQ ID NO: 2463450 - DNA, 25 bp, Homo sapien
taattgtatacaggcaactgatatc

SEQ ID NO: 2463451 - DNA, 25 bp, Homo sapien
ctgataattgtatacaggcaactga

SEQ ID NO: 2463452 - DNA, 25 bp, Homo sapien
ctggtgaatttggataagcaggaaa

SEQ ID NO: 2463453 - DNA, 25 bp, Homo sapien
ctgaactggtgaatttggataagca

SEQ ID NO: 2463454 - DNA, 25 bp, Homo sapien
gaactggtgaatttggataagcagg

SEQ ID NO: 2463455 - DNA, 25 bp, Homo sapien
aactggtgaatttggataagcagga

SEQ ID NO: 2463456 - DNA, 25 bp, Homo sapien
actgatatccagtggcgacttgaaa

SEQ ID NO: 2463457 - DNA, 25 bp, Homo sapien
tatccagtggcgacttgaaatggtg

SEQ ID NO: 2463458 - DNA, 25 bp, Homo sapien
ggaactgatatccagtggcgacttg

SEQ ID NO: 2463459 - DNA, 25 bp, Homo sapien
cttgaaatggtgaatttggataagc

SEQ ID NO: 2463460 - DNA, 25 bp, Homo sapien
tgacctgaaatggtgatcttggata

SEQ ID NO: 2463461 - DNA, 25 bp, Homo sapien
gacctgaaatggtgatcttggataa

SEQ ID NO: 2463462 - DNA, 25 bp, Homo sapien
ctgaatcgggataagtaggatattc

SEQ ID NO: 2463463 - DNA, 25 bp, Homo sapien
agtggtgacctgaaatgctgaatcg

SEQ ID NO: 2463464 - DNA, 25 bp, Homo sapien
gaaatgctgaatcgggataagtagg

SEQ ID NO: 2463465 - DNA, 25 bp, Homo sapien
gacctgaaatgctgaatcgggataa

SEQ ID NO: 2463466 - DNA, 25 bp, Homo sapien
gacctggtgaatgtggataagcaga

SEQ ID NO: 2463467 - DNA, 25 bp, Homo sapien
ttcagtgtttggattccgccagacg

SEQ ID NO: 2463468 - DNA, 25 bp, Homo sapien
gttacaggattcggcgtgatttggg

SEQ ID NO: 2463469 - DNA, 25 bp, Homo sapien
ttggattccgccagacgttctgaaa

SEQ ID NO: 2463470 - DNA, 25 bp, Homo sapien
agtgtttggattccgccagacgttc

SEQ ID NO: 2463471 - DNA, 25 bp, Homo sapien
gtggaggaggaggattaactaccaa

SEQ ID NO: 2463472 - DNA, 25 bp, Homo sapien
ggtggaggaggaggattaactacca

SEQ ID NO: 2463473 - DNA, 25 bp, Homo sapien
tggaggaggaggattaactaccaaa

SEQ ID NO: 2463474 - DNA, 25 bp, Homo sapien
ttttaccatggaaatgtatctgtga

SEQ ID NO: 2463475 - DNA, 25 bp, Homo sapien
agctttttaccatggaaatgtatct

SEQ ID NO: 2463476 - DNA, 25 bp, Homo sapien
gattgcagggcccagcttcagcttt

SEQ ID NO: 2463477 - DNA, 25 bp, Homo sapien
gcttcagctttttaccatggaaatg

SEQ ID NO: 2463478 - DNA, 25 bp, Homo sapien
ctactatcttctggacatccacgtc

SEQ ID NO: 2463479 - DNA, 25 bp, Homo sapien
tcctactatcttctggacatccacg

SEQ ID NO: 2463480 - DNA, 25 bp, Homo sapien
attaacaaacgaaacaaatccatag

SEQ ID NO: 2463481 - DNA, 25 bp, Homo sapien
cacgtcattaacaaacgaaacaaat

SEQ ID NO: 2463482 - DNA, 25 bp, Homo sapien
ttcactgaaccgtatctaccaaagc

SEQ ID NO: 2463483 - DNA, 25 bp, Homo sapien
tcactgaaccgtatctaccaaagca

SEQ ID NO: 2463484 - DNA, 25 bp, Homo sapien
accgtatctaccaaagcagcttcca

SEQ ID NO: 2463485 - DNA, 25 bp, Homo sapien
cgtatctaccaaagcagcttccaat

SEQ ID NO: 2463486 - DNA, 25 bp, Homo sapien
cttctggtaacacccagccttggct

SEQ ID NO: 2463487 - DNA, 25 bp, Homo sapien
ccttctggtaacacccagccttggc

SEQ ID NO: 2463488 - DNA, 25 bp, Homo sapien
ctcgttttctgcaacgtacttcact

SEQ ID NO: 2463489 - DNA, 25 bp, Homo sapien
tctgcaacgtacttcacttttacca

SEQ ID NO: 2463490 - DNA, 25 bp, Homo sapien
ttttctgcaacgtacttcactttta

SEQ ID NO: 2463491 - DNA, 25 bp, Homo sapien
tcgttttctgcaacgtacttcactt

SEQ ID NO: 2463492 - DNA, 25 bp, Homo sapien
cacttcctgaagaagttccggccct

SEQ ID NO: 2463493 - DNA, 25 bp, Homo sapien
cccacccagtagtacaaggaccagg

SEQ ID NO: 2463494 - DNA, 25 bp, Homo sapien
cagtagtacaaggaccaggagggaa

SEQ ID NO: 2463495 - DNA, 25 bp, Homo sapien
tccggccctcccaatccaaggaggc

SEQ ID NO: 2463496 - DNA, 25 bp, Homo sapien
gggccacggctcctaatgcattcag

SEQ ID NO: 2463497 - DNA, 25 bp, Homo sapien
gagcctggtttcacccaccggtgaa

SEQ ID NO: 2463498 - DNA, 25 bp, Homo sapien
gaggccgtggcccttgtaagtgaac

SEQ ID NO: 2463499 - DNA, 25 bp, Homo sapien
tgcctctctgtataggccgcgctgc

SEQ ID NO: 2463500 - DNA, 25 bp, Homo sapien
catggtggtggcaggcagcagctcc

SEQ ID NO: 2463501 - DNA, 25 bp, Homo sapien
tggcaggcagcagctcccgacaggc

SEQ ID NO: 2463502 - DNA, 25 bp, Homo sapien
tggtggcaggcagcagctcccgaca

SEQ ID NO: 2463503 - DNA, 25 bp, Homo sapien
gtggtggcaggcagcagctcccgac

SEQ ID NO: 2463504 - DNA, 25 bp, Homo sapien
tggtgaagtccgctggaacacgctg

SEQ ID NO: 2463505 - DNA, 25 bp, Homo sapien
tgctggtgaagtccgctggaacacg

SEQ ID NO: 2463506 - DNA, 25 bp, Homo sapien
tgaagtccgctggaacacgctgtgg

SEQ ID NO: 2463507 - DNA, 25 bp, Homo sapien
gtctgctggtgaagtccgctggaac

SEQ ID NO: 2463508 - DNA, 25 bp, Homo sapien
gagcgcaggccgactgaggcatgga

SEQ ID NO: 2463509 - DNA, 25 bp, Homo sapien
ctcggaggtagaaccgccaggctga

SEQ ID NO: 2463510 - DNA, 25 bp, Homo sapien
cgcaggccgactgaggcatggactg

SEQ ID NO: 2463511 - DNA, 25 bp, Homo sapien
ccctcggaggtagaaccgccaggct

SEQ ID NO: 2463512 - DNA, 25 bp, Homo sapien
tcccagttgctttgaaactgctttt

SEQ ID NO: 2463513 - DNA, 25 bp, Homo sapien
actgaagtggaacttcaaagaggca

SEQ ID NO: 2463514 - DNA, 25 bp, Homo sapien
agaggcaccaataccgctgcacctt

SEQ ID NO: 2463515 - DNA, 25 bp, Homo sapien
tgaagtggaacttcaaagaggcacc

SEQ ID NO: 2463516 - DNA, 25 bp, Homo sapien
aataccgctgcacctttgcctgagg

SEQ ID NO: 2463517 - DNA, 25 bp, Homo sapien
caagagtttgctcagtagtgatgcc

SEQ ID NO: 2463518 - DNA, 25 bp, Homo sapien
tttgctcagtagtgatgcctcctga

SEQ ID NO: 2463519 - DNA, 25 bp, Homo sapien
ttgcaagagtttgctcagtagtgat

SEQ ID NO: 2463520 - DNA, 25 bp, Homo sapien
gagtttgctcagtagtgatgcctcc

SEQ ID NO: 2463521 - DNA, 25 bp, Homo sapien
gatcagcatgctgtccctgacccat

SEQ ID NO: 2463522 - DNA, 25 bp, Homo sapien
tgacccatgttgcaacggacagtgt

SEQ ID NO: 2463523 - DNA, 25 bp, Homo sapien
caaaataccgctgacataaggcatt

SEQ ID NO: 2463524 - DNA, 25 bp, Homo sapien
tgacactcctcacaaaataccgctg

SEQ ID NO: 2463525 - DNA, 25 bp, Homo sapien
caagtgtgcctatacaaacgtagcc

SEQ ID NO: 2463526 - DNA, 25 bp, Homo sapien
taatgtcaccgtttaaaatgtagct

SEQ ID NO: 2463527 - DNA, 25 bp, Homo sapien
aagccgtaggctttaggagcacaga

SEQ ID NO: 2463528 - DNA, 25 bp, Homo sapien
aaataataatagacgctcagggcag

SEQ ID NO: 2463529 - DNA, 25 bp, Homo sapien
tccttgagcctgtcgggagctgctg

SEQ ID NO: 2463530 - DNA, 25 bp, Homo sapien
gtgttccagcggacttcaccagcag

SEQ ID NO: 2463531 - DNA, 25 bp, Homo sapien
aagccccacagcgtgttccagcgga

SEQ ID NO: 2463532 - DNA, 25 bp, Homo sapien
tttggctcctttgaccactcgaagc

SEQ ID NO: 2463533 - DNA, 25 bp, Homo sapien
agttctgcggttgtctctaatttcg

SEQ ID NO: 2463534 - DNA, 25 bp, Homo sapien
gaagtacagacaaagccataacatc

SEQ ID NO: 2463535 - DNA, 25 bp, Homo sapien
actgtgagcgattactgaatctggg

SEQ ID NO: 2463536 - DNA, 25 bp, Homo sapien
tatataaaccgcttgagtttctggc

SEQ ID NO: 2463537 - DNA, 25 bp, Homo sapien
tgattgggatagtagttaggataac

SEQ ID NO: 2463538 - DNA, 25 bp, Homo sapien
catatgtatgtccaatttgattggg

SEQ ID NO: 2463539 - DNA, 25 bp, Homo sapien
ctgggtatataaccttctcaatgag

SEQ ID NO: 2463540 - DNA, 25 bp, Homo sapien
tccttgaaatgctaaacttaatggc

SEQ ID NO: 2463541 - DNA, 25 bp, Homo sapien
tgcatgccaggaattccacatgaaa

SEQ ID NO: 2463542 - DNA, 25 bp, Homo sapien
acatgaaacttcaagataccggttc

SEQ ID NO: 2463543 - DNA, 25 bp, Homo sapien
gatgccggttcactaggtcttttcc

SEQ ID NO: 2463544 - DNA, 25 bp, Homo sapien
acatgaaacttcaagatgccggttc

SEQ ID NO: 2463545 - DNA, 25 bp, Homo sapien
caatgagcagcagagcgccagctga

SEQ ID NO: 2463546 - DNA, 25 bp, Homo sapien
cacaagctgaacctggtccccaggg

SEQ ID NO: 2463547 - DNA, 25 bp, Homo sapien
gagcgccagctgagatccacaagct

SEQ ID NO: 2463548 - DNA, 25 bp, Homo sapien
ttgcaagtctatagcaatgagcagc

SEQ ID NO: 2463549 - DNA, 25 bp, Homo sapien
tacttcttttgcaaagtgtaggaag

SEQ ID NO: 2463550 - DNA, 25 bp, Homo sapien
tcttttgcaaagtgtaggaaggtgt

SEQ ID NO: 2463551 - DNA, 25 bp, Homo sapien
tccagactgcctgatcagttttgac

SEQ ID NO: 2463552 - DNA, 25 bp, Homo sapien
ccagactgcctgatcagttttgacc

SEQ ID NO: 2463553 - DNA, 25 bp, Homo sapien
tgcatttgcattgaatccagaagat

SEQ ID NO: 2463554 - DNA, 25 bp, Homo sapien
gcctgctggcagtatgttttctaac

SEQ ID NO: 2463555 - DNA, 25 bp, Homo sapien
catacaggatgagccttgggcctgc

SEQ ID NO: 2463556 - DNA, 25 bp, Homo sapien
tactcctaatgcaacaggaagttgt

SEQ ID NO: 2463557 - DNA, 25 bp, Homo sapien
actgaaatgcctcgacactacctcg

SEQ ID NO: 2463558 - DNA, 25 bp, Homo sapien
cgactctaatttgaacggattctcc

SEQ ID NO: 2463559 - DNA, 25 bp, Homo sapien
tatgtgtagcactaaccacactgaa

SEQ ID NO: 2463560 - DNA, 25 bp, Homo sapien
cttcaggtgcctgatggttcagatc

SEQ ID NO: 2463561 - DNA, 25 bp, Homo sapien
tattcagatgggacgtgcttgggag

SEQ ID NO: 2463562 - DNA, 25 bp, Homo sapien
ctgtttaagatttacacatagtttc

SEQ ID NO: 2463563 - DNA, 25 bp, Homo sapien
tttaagatttacacatagtttccag

SEQ ID NO: 2463564 - DNA, 25 bp, Homo sapien
gtattcagatgggacgtgcttggga

SEQ ID NO: 2463565 - DNA, 25 bp, Homo sapien
ctgctggtcaaatcatcagcccttt

SEQ ID NO: 2463566 - DNA, 25 bp, Homo sapien
tgaggaatggtagccaggaaactgc

SEQ ID NO: 2463567 - DNA, 25 bp, Homo sapien
tgttgggaagcttggttcctcctgg

SEQ ID NO: 2463568 - DNA, 25 bp, Homo sapien
tcatgttgggaagcttggttcctcc

SEQ ID NO: 2463569 - DNA, 25 bp, Homo sapien
tggccagccgtaccctcttcccaaa

SEQ ID NO: 2463570 - DNA, 25 bp, Homo sapien
gccagccgtaccctcttcccaaaga

SEQ ID NO: 2463571 - DNA, 25 bp, Homo sapien
gattgtgaccacgatgtttctctta

SEQ ID NO: 2463572 - DNA, 25 bp, Homo sapien
tttgagggcattgaaaaatgctccc

SEQ ID NO: 2463573 - DNA, 25 bp, Homo sapien
tgatttccaagtgttcgctgcttat

SEQ ID NO: 2463574 - DNA, 25 bp, Homo sapien
tcctggtacaccactgattgtgcat

SEQ ID NO: 2463575 - DNA, 25 bp, Homo sapien
tctctagatgagcatccgtttatct

SEQ ID NO: 2463576 - DNA, 25 bp, Homo sapien
gtctctagatgagcatccgtttatc

SEQ ID NO: 2463577 - DNA, 25 bp, Homo sapien
ctctagatgagcatccgtttatctt

SEQ ID NO: 2463578 - DNA, 25 bp, Homo sapien
tgtgcactacttctctcactaaatg

SEQ ID NO: 2463579 - DNA, 25 bp, Homo sapien
gggtgaatacggttaacatgtgtca

SEQ ID NO: 2463580 - DNA, 25 bp, Homo sapien
gactggatagacttgtgcactactt

SEQ ID NO: 2463581 - DNA, 25 bp, Homo sapien
cagccatttcaagtttgactggata

SEQ ID NO: 2463582 - DNA, 25 bp, Homo sapien
aggtgtgagaatgagctcaatgctt

SEQ ID NO: 2463583 - DNA, 25 bp, Homo sapien
ggagcttctctctatatgagttatc

SEQ ID NO: 2463584 - DNA, 25 bp, Homo sapien
cgtattggttcagtataaagtctct

SEQ ID NO: 2463585 - DNA, 25 bp, Homo sapien
tctgatgttgaacccaaaatgagga

SEQ ID NO: 2463586 - DNA, 25 bp, Homo sapien
aagaactacataatagctcttccat

SEQ ID NO: 2463587 - DNA, 25 bp, Homo sapien
caaagaactacataatagctcttcc

SEQ ID NO: 2463588 - DNA, 25 bp, Homo sapien
aaagaactacataatagctcttcca

SEQ ID NO: 2463589 - DNA, 25 bp, Homo sapien
ggtctgagaagcacttaaaggattt

SEQ ID NO: 2463590 - DNA, 25 bp, Homo sapien
taaggtctgagaagcacttaaagga

SEQ ID NO: 2463591 - DNA, 25 bp, Homo sapien
tctcttataattagtaaggtctgag

SEQ ID NO: 2463592 - DNA, 25 bp, Homo sapien
aattctcttataattagtaaggtct

SEQ ID NO: 2463593 - DNA, 25 bp, Homo sapien
tatgttcggcaaggtttgagaaata

SEQ ID NO: 2463594 - DNA, 25 bp, Homo sapien
ttaaactcaaatttatgttcggcaa

SEQ ID NO: 2463595 - DNA, 25 bp, Homo sapien
caaatttatgttcggcaaggtttga

SEQ ID NO: 2463596 - DNA, 25 bp, Homo sapien
aaactcaaatttatgttcggcaagg

SEQ ID NO: 2463597 - DNA, 25 bp, Homo sapien
gttcagtgaagtttgagcacaactc

SEQ ID NO: 2463598 - DNA, 25 bp, Homo sapien
gctttgccttatttattaggttgac

SEQ ID NO: 2463599 - DNA, 25 bp, Homo sapien
cattcttcacattttcagcacttgt

SEQ ID NO: 2463600 - DNA, 25 bp, Homo sapien
attttcagcacttgtctccaccaaa

SEQ ID NO: 2463601 - DNA, 25 bp, Homo sapien
gctttctgcacatgggaattaccca

SEQ ID NO: 2463602 - DNA, 25 bp, Homo sapien
ttgataaagcccatcataactgctt

SEQ ID NO: 2463603 - DNA, 25 bp, Homo sapien
ccagcaatagctctacagtaaaata

SEQ ID NO: 2463604 - DNA, 25 bp, Homo sapien
tataaaccattaaggtcacagctac

SEQ ID NO: 2463605 - DNA, 25 bp, Homo sapien
tcacacgctcagaaaagtttgcaaa

SEQ ID NO: 2463606 - DNA, 25 bp, Homo sapien
agtttgcaaataagtttcgcattcc

SEQ ID NO: 2463607 - DNA, 25 bp, Homo sapien
gtttcgcattccacataagttctcg

SEQ ID NO: 2463608 - DNA, 25 bp, Homo sapien
taagttctcgtttcctgtatgtaag

SEQ ID NO: 2463609 - DNA, 25 bp, Homo sapien
taacctaaacgctgaggcagaaatg

SEQ ID NO: 2463610 - DNA, 25 bp, Homo sapien
cagccacataacctaaacgctgagg

SEQ ID NO: 2463611 - DNA, 25 bp, Homo sapien
taaacgctgaggcagaaatgttccc

SEQ ID NO: 2463612 - DNA, 25 bp, Homo sapien
gcatgacagccacataacctaaacg

SEQ ID NO: 2463613 - DNA, 25 bp, Homo sapien
tccaggccccttttctaggatggtg

SEQ ID NO: 2463614 - DNA, 25 bp, Homo sapien
tgagctcaatgtttggccgcatttt

SEQ ID NO: 2463615 - DNA, 25 bp, Homo sapien
gaatgagctcaatgtttggccgcat

SEQ ID NO: 2463616 - DNA, 25 bp, Homo sapien
agaatgagctcaatgtttggccgca

SEQ ID NO: 2463617 - DNA, 25 bp, Homo sapien
aatgagctcaatgtttggccgcatt

SEQ ID NO: 2463618 - DNA, 25 bp, Homo sapien
ttaatgaaggtttaggagcaggtga

SEQ ID NO: 2463619 - DNA, 25 bp, Homo sapien
tttaatgaaggtttaggagcaggtg

SEQ ID NO: 2463620 - DNA, 25 bp, Homo sapien
taatgaaggtttaggagcaggtgaa

SEQ ID NO: 2463621 - DNA, 25 bp, Homo sapien
tgttttgctatgagtagatgacaga

SEQ ID NO: 2463622 - DNA, 25 bp, Homo sapien
gtttgccacatttgttttgctatga

SEQ ID NO: 2463623 - DNA, 25 bp, Homo sapien
ccacatttgttttgctatgagtaga

SEQ ID NO: 2463624 - DNA, 25 bp, Homo sapien
ttgttttgctatgagtagatgacag

SEQ ID NO: 2463625 - DNA, 25 bp, Homo sapien
aaataaataaaacagtgacatgtcc

SEQ ID NO: 2463626 - DNA, 25 bp, Homo sapien
ataaataaaacagtgacatgtccat

SEQ ID NO: 2463627 - DNA, 25 bp, Homo sapien
aataaataaaacagtgacatgtcca

SEQ ID NO: 2463628 - DNA, 25 bp, Homo sapien
tagtcgcgtcagctgggtgtgaatc

SEQ ID NO: 2463629 - DNA, 25 bp, Homo sapien
tattattgcatggtatctgaagctg

SEQ ID NO: 2463630 - DNA, 25 bp, Homo sapien
tcttgtgagagaatgatagtcgcgt

SEQ ID NO: 2463631 - DNA, 25 bp, Homo sapien
ttttctatgatacgctgggagtgtc

SEQ ID NO: 2463632 - DNA, 25 bp, Homo sapien
taaagaggagagttgcattacccag

SEQ ID NO: 2463633 - DNA, 25 bp, Homo sapien
gcagtcagcgttatgtcacaattct

SEQ ID NO: 2463634 - DNA, 25 bp, Homo sapien
atatgtgataatcccttgttttggc

SEQ ID NO: 2463635 - DNA, 25 bp, Homo sapien
gggtgctggactccgcaatatgtga

SEQ ID NO: 2463636 - DNA, 25 bp, Homo sapien
gggtgatggtcccagtgacatatgt

SEQ ID NO: 2463637 - DNA, 25 bp, Homo sapien
gaaggcagagccacgatggatgtta

SEQ ID NO: 2463638 - DNA, 25 bp, Homo sapien
cagagccacgatggatgttatctat

SEQ ID NO: 2463639 - DNA, 25 bp, Homo sapien
gtgatggtcccagtgacatatgtaa

SEQ ID NO: 2463640 - DNA, 25 bp, Homo sapien
gctgggcctagtcagaagagtcact

SEQ ID NO: 2463641 - DNA, 25 bp, Homo sapien
cacccgggtacagtttcacataata

SEQ ID NO: 2463642 - DNA, 25 bp, Homo sapien
cataatctcatttgtatgctgggcc

SEQ ID NO: 2463643 - DNA, 25 bp, Homo sapien
cactgagccagtgatacagcataat

SEQ ID NO: 2463644 - DNA, 25 bp, Homo sapien
catcacttaggttctttgtcaagca

SEQ ID NO: 2463645 - DNA, 25 bp, Homo sapien
tgtcaagcaatatgtcatgatgccc

SEQ ID NO: 2463646 - DNA, 25 bp, Homo sapien
cacattcccattttttagcaaccta

SEQ ID NO: 2463647 - DNA, 25 bp, Homo sapien
gaagcaaggtatttctcacattccc

SEQ ID NO: 2463648 - DNA, 25 bp, Homo sapien
taatgatcctgtcctgcacgtgtcc

SEQ ID NO: 2463649 - DNA, 25 bp, Homo sapien
gagagtaatgatcctgtcctgcacg

SEQ ID NO: 2463650 - DNA, 25 bp, Homo sapien
atcctgtcctgcacgtgtcctggct

SEQ ID NO: 2463651 - DNA, 25 bp, Homo sapien
cagggatgagagtaatgatcctgtc

SEQ ID NO: 2463652 - DNA, 25 bp, Homo sapien
tctcaggtaaatggaacaatatcac

SEQ ID NO: 2463653 - DNA, 25 bp, Homo sapien
ggtctcaggtaaatggaacaatatc

SEQ ID NO: 2463654 - DNA, 25 bp, Homo sapien
taggctttttatctggtctcaggta

SEQ ID NO: 2463655 - DNA, 25 bp, Homo sapien
ctggtctcaggtaaatggaacaata

SEQ ID NO: 2463656 - DNA, 25 bp, Homo sapien
tgggtgttgagccaattatacagtg

SEQ ID NO: 2463657 - DNA, 25 bp, Homo sapien
atgctggtccagtgatacaatataa

SEQ ID NO: 2463658 - DNA, 25 bp, Homo sapien
tgggcatagtcagaagtgtcagctt

SEQ ID NO: 2463659 - DNA, 25 bp, Homo sapien
gttgagccaattatacagtgtagta

SEQ ID NO: 2463660 - DNA, 25 bp, Homo sapien
tacgcatgacctaggcagaagagta

SEQ ID NO: 2463661 - DNA, 25 bp, Homo sapien
tctggcacaagcaggagagtcatat

SEQ ID NO: 2463662 - DNA, 25 bp, Homo sapien
gggccaagcaatatgccctaattcc

SEQ ID NO: 2463663 - DNA, 25 bp, Homo sapien
gtcatatcattacgggactgggcca

SEQ ID NO: 2463664 - DNA, 25 bp, Homo sapien
tgctggagagtgtccacacaggaga

SEQ ID NO: 2463665 - DNA, 25 bp, Homo sapien
taacaatgcctcctattgaaagggc

SEQ ID NO: 2463666 - DNA, 25 bp, Homo sapien
taggcccaggtcgttggcataatgt

SEQ ID NO: 2463667 - DNA, 25 bp, Homo sapien
ccacaaaatttggtcataggcccag

SEQ ID NO: 2463668 - DNA, 25 bp, Homo sapien
tcagcagggcactaaccgaaaagtc

SEQ ID NO: 2463669 - DNA, 25 bp, Homo sapien
cagaaaactttggtgccagtcccag

SEQ ID NO: 2463670 - DNA, 25 bp, Homo sapien
cagctgggtgtgcatacaatactca

SEQ ID NO: 2463671 - DNA, 25 bp, Homo sapien
tctgaggaccctctacaacaggaga

SEQ ID NO: 2463672 - DNA, 25 bp, Homo sapien
tcacctgtaaacagagagcaaggag

SEQ ID NO: 2463673 - DNA, 25 bp, Homo sapien
ctgggtccagatttaagagtcgtga

SEQ ID NO: 2463674 - DNA, 25 bp, Homo sapien
catcttgcatatgacctgggtccag

SEQ ID NO: 2463675 - DNA, 25 bp, Homo sapien
ggtgatcacccgaggtatatttcca

SEQ ID NO: 2463676 - DNA, 25 bp, Homo sapien
tacttcaagatatgtcataatgttc

SEQ ID NO: 2463677 - DNA, 25 bp, Homo sapien
taggttttgtactccgtcgtatgtc

SEQ ID NO: 2463678 - DNA, 25 bp, Homo sapien
tgtcacaattcattctgcggtcagg

SEQ ID NO: 2463679 - DNA, 25 bp, Homo sapien
taggagacgagcgtcacacttccag

SEQ ID NO: 2463680 - DNA, 25 bp, Homo sapien
tgaatcatgtcactaccttttcttt

SEQ ID NO: 2463681 - DNA, 25 bp, Homo sapien
gtgttctcagtcttgaatcatgtca

SEQ ID NO: 2463682 - DNA, 25 bp, Homo sapien
ttgaatcatgtcactaccttttctt

SEQ ID NO: 2463683 - DNA, 25 bp, Homo sapien
ctgtgttctcagtcttgaatcatgt

SEQ ID NO: 2463684 - DNA, 25 bp, Homo sapien
cctatgcaaactggtgaaaaccctg

SEQ ID NO: 2463685 - DNA, 25 bp, Homo sapien
gacaatggcccctttcactggagac

SEQ ID NO: 2463686 - DNA, 25 bp, Homo sapien
cacactaccataggctgagacaatg

SEQ ID NO: 2463687 - DNA, 25 bp, Homo sapien
gcctctaaggaataactgactgcca

SEQ ID NO: 2463688 - DNA, 25 bp, Homo sapien
atgtctcaacctttaaacgttactg

SEQ ID NO: 2463689 - DNA, 25 bp, Homo sapien
gatattttcaaggagggaacatggg

SEQ ID NO: 2463690 - DNA, 25 bp, Homo sapien
tctaaactaactcatgggttgtttg

SEQ ID NO: 2463691 - DNA, 25 bp, Homo sapien
tcttactgaccaggagattaacaga

SEQ ID NO: 2463692 - DNA, 25 bp, Homo sapien
tcagggagtctgtcgcattcctcac

SEQ ID NO: 2463693 - DNA, 25 bp, Homo sapien
ctctacagctttcctcatgagggtg

SEQ ID NO: 2463694 - DNA, 25 bp, Homo sapien
tcactgacttcaccacgtgaattct

SEQ ID NO: 2463695 - DNA, 25 bp, Homo sapien
ttcacagactgcctcacacaatggg

SEQ ID NO: 2463696 - DNA, 25 bp, Homo sapien
ttttgcaccaggattaagtgaagat

SEQ ID NO: 2463697 - DNA, 25 bp, Homo sapien
gaaagcttttttgcaccaggattaa

SEQ ID NO: 2463698 - DNA, 25 bp, Homo sapien
gcttttttgcaccaggattaagtga

SEQ ID NO: 2463699 - DNA, 25 bp, Homo sapien
aaagaaagcttttttgcaccaggat

SEQ ID NO: 2463700 - DNA, 25 bp, Homo sapien
ggatgtaaccattactgaaaccaga

SEQ ID NO: 2463701 - DNA, 25 bp, Homo sapien
aatgatgacagaagttgagagctgc

SEQ ID NO: 2463702 - DNA, 25 bp, Homo sapien
ccagggccaatggttcctccagagc

SEQ ID NO: 2463703 - DNA, 25 bp, Homo sapien
ttctggcatcaatcttacatctgac

SEQ ID NO: 2463704 - DNA, 25 bp, Homo sapien
agcctaggtgctctgtcatgttccc

SEQ ID NO: 2463705 - DNA, 25 bp, Homo sapien
ccacgtggtaggtcagcctaggtgc

SEQ ID NO: 2463706 - DNA, 25 bp, Homo sapien
gctctgtcatgttcccggtccttga

SEQ ID NO: 2463707 - DNA, 25 bp, Homo sapien
cctcacccactaggtatttccacaa

SEQ ID NO: 2463708 - DNA, 25 bp, Homo sapien
gatcccccagccttttgaaccacaa

SEQ ID NO: 2463709 - DNA, 25 bp, Homo sapien
cccccagccttttgaaccacaagct

SEQ ID NO: 2463710 - DNA, 25 bp, Homo sapien
tcccccagccttttgaaccacaagc

SEQ ID NO: 2463711 - DNA, 25 bp, Homo sapien
atcccccagccttttgaaccacaag

SEQ ID NO: 2463712 - DNA, 25 bp, Homo sapien
aactccagggtgcgcactgggtagt

SEQ ID NO: 2463713 - DNA, 25 bp, Homo sapien
ggaactccagggtgcgcactgggta

SEQ ID NO: 2463714 - DNA, 25 bp, Homo sapien
tccagggtgcgcactgggtagtggc

SEQ ID NO: 2463715 - DNA, 25 bp, Homo sapien
cagggtgcgcactgggtagtggcct

SEQ ID NO: 2463716 - DNA, 25 bp, Homo sapien
cccagaatgtccagtgaaaatcttg

SEQ ID NO: 2463717 - DNA, 25 bp, Homo sapien
gttcaccttgactcacattggaaaa

SEQ ID NO: 2463718 - DNA, 25 bp, Homo sapien
ggttcaccttgactcacattggaaa

SEQ ID NO: 2463719 - DNA, 25 bp, Homo sapien
cagattcttctcaatgtgcttcaaa

SEQ ID NO: 2463720 - DNA, 25 bp, Homo sapien
cataatgaggaaggatttcagattc

SEQ ID NO: 2463721 - DNA, 25 bp, Homo sapien
cccataatgaggaaggatttcagat

SEQ ID NO: 2463722 - DNA, 25 bp, Homo sapien
ttcttctcaatgtgcttcaaagctc

SEQ ID NO: 2463723 - DNA, 25 bp, Homo sapien
gagaaaaacacaattgagctcctga

SEQ ID NO: 2463724 - DNA, 25 bp, Homo sapien
tgagaaaaacacaattgagctcctg

SEQ ID NO: 2463725 - DNA, 25 bp, Homo sapien
actgagaaaaacacaattgagctcc

SEQ ID NO: 2463726 - DNA, 25 bp, Homo sapien
gaaaaacacaattgagctcctgaat

SEQ ID NO: 2463727 - DNA, 25 bp, Homo sapien
tgatttttcttgaggattcttccct

SEQ ID NO: 2463728 - DNA, 25 bp, Homo sapien
tgctcttgcgaatgccacactgtgc

SEQ ID NO: 2463729 - DNA, 25 bp, Homo sapien
gctgaatgtcaggttgctgctcttg

SEQ ID NO: 2463730 - DNA, 25 bp, Homo sapien
ttgcgaatgccacactgtgctaagc

SEQ ID NO: 2463731 - DNA, 25 bp, Homo sapien
ggttgctgctcttgcgaatgccaca

SEQ ID NO: 2463732 - DNA, 25 bp, Homo sapien
agatggtcgatgctccctgagattg

SEQ ID NO: 2463733 - DNA, 25 bp, Homo sapien
aacaagatgtctgtatctctgccac

SEQ ID NO: 2463734 - DNA, 25 bp, Homo sapien
aagaatgtttgcattcagaacaaga

SEQ ID NO: 2463735 - DNA, 25 bp, Homo sapien
tggagatggtcgatgctccctgaga

SEQ ID NO: 2463736 - DNA, 25 bp, Homo sapien
atgggcaatgagaaccttcaaacag

SEQ ID NO: 2463737 - DNA, 25 bp, Homo sapien
aacgctcaggctgaagcgccaaaga

SEQ ID NO: 2463738 - DNA, 25 bp, Homo sapien
tcaggctctcgaccttagcgccatt

SEQ ID NO: 2463739 - DNA, 25 bp, Homo sapien
caggctctcgaccttagcgccattt

SEQ ID NO: 2463740 - DNA, 25 bp, Homo sapien
aagcgaacgctcaggctgaagcgcc

SEQ ID NO: 2463741 - DNA, 25 bp, Homo sapien
cataaacaaaactgcccatgtcggt

SEQ ID NO: 2463742 - DNA, 25 bp, Homo sapien
aacaaaactgcccatgtcggtcctc

SEQ ID NO: 2463743 - DNA, 25 bp, Homo sapien
taaacaaaactgcccatgtcggtcc

SEQ ID NO: 2463744 - DNA, 25 bp, Homo sapien
acatgctactgcctagagcttgtct

SEQ ID NO: 2463745 - DNA, 25 bp, Homo sapien
tcaaaatgcgaagcatggagttccc

SEQ ID NO: 2463746 - DNA, 25 bp, Homo sapien
tttgaagcgctcaggccagtcatag

SEQ ID NO: 2463747 - DNA, 25 bp, Homo sapien
taaggcaccctgactttttgaagcg

SEQ ID NO: 2463748 - DNA, 25 bp, Homo sapien
gatttgcttcattgccctctcatgg

SEQ ID NO: 2463749 - DNA, 25 bp, Homo sapien
cacagccatagataacctcctcagc

SEQ ID NO: 2463750 - DNA, 25 bp, Homo sapien
agccatagataacctcctcagccat

SEQ ID NO: 2463751 - DNA, 25 bp, Homo sapien
tggacgacagaccaagagtccagcc

SEQ ID NO: 2463752 - DNA, 25 bp, Homo sapien
ggttatagtgagtagtgatggcatc

SEQ ID NO: 2463753 - DNA, 25 bp, Homo sapien
cgtgccctctatcctggacgacaga

SEQ ID NO: 2463754 - DNA, 25 bp, Homo sapien
tagtgagtagtgatggcatccgtgc

SEQ ID NO: 2463755 - DNA, 25 bp, Homo sapien
ctggatacaggtcttgataggtctc

SEQ ID NO: 2463756 - DNA, 25 bp, Homo sapien
gatacaggtcttgataggtctcttg

SEQ ID NO: 2463757 - DNA, 25 bp, Homo sapien
ggtcttgataggtctcttgatgtca

SEQ ID NO: 2463758 - DNA, 25 bp, Homo sapien
tacaggtcttgataggtctcttgat

SEQ ID NO: 2463759 - DNA, 25 bp, Homo sapien
cattcagttcaagatgatgactcag

SEQ ID NO: 2463760 - DNA, 25 bp, Homo sapien
tcatactgccagaattgcaggcaat

SEQ ID NO: 2463761 - DNA, 25 bp, Homo sapien
ggcaatttatcaaagtcccctaatc

SEQ ID NO: 2463762 - DNA, 25 bp, Homo sapien
gaaattaatatgcagttcatactgc

SEQ ID NO: 2463763 - DNA, 25 bp, Homo sapien
cctgctgaatcattttaagatgctc

SEQ ID NO: 2463764 - DNA, 25 bp, Homo sapien
atctcctcctgctgaatcattttaa

SEQ ID NO: 2463765 - DNA, 25 bp, Homo sapien
gctgaatcattttaagatgctcgaa

SEQ ID NO: 2463766 - DNA, 25 bp, Homo sapien
cctcctgctgaatcattttaagatg

SEQ ID NO: 2463767 - DNA, 25 bp, Homo sapien
agggcccgcaaccccacacactttg

SEQ ID NO: 2463768 - DNA, 25 bp, Homo sapien
tactcagaaagttgaagcaggaaga

SEQ ID NO: 2463769 - DNA, 25 bp, Homo sapien
tcagaaagttgaagcaggaagatca

SEQ ID NO: 2463770 - DNA, 25 bp, Homo sapien
agctactcagaaagttgaagcagga

SEQ ID NO: 2463771 - DNA, 25 bp, Homo sapien
gctactcagaaagttgaagcaggaa

SEQ ID NO: 2463772 - DNA, 25 bp, Homo sapien
gtatggtcacctgccaatccccatg

SEQ ID NO: 2463773 - DNA, 25 bp, Homo sapien
gggttggctccatgaacttcacagt

SEQ ID NO: 2463774 - DNA, 25 bp, Homo sapien
ggctccatgaacttcacagtatggt

SEQ ID NO: 2463775 - DNA, 25 bp, Homo sapien
tgaacttcacagtatggtcacctgc

SEQ ID NO: 2463776 - DNA, 25 bp, Homo sapien
gggatggcgcacacacgtctttcac

SEQ ID NO: 2463777 - DNA, 25 bp, Homo sapien
tgctcccaccgagtggaaacctgcc

SEQ ID NO: 2463778 - DNA, 25 bp, Homo sapien
tgtgcctgcattgggttagggccct

SEQ ID NO: 2463779 - DNA, 25 bp, Homo sapien
ccgatcccagaaccagacgggtcgt

SEQ ID NO: 2463780 - DNA, 25 bp, Homo sapien
gggagggacggaaccacatctgtat

SEQ ID NO: 2463781 - DNA, 25 bp, Homo sapien
ggacggaaccacatctgtatcaggc

SEQ ID NO: 2463782 - DNA, 25 bp, Homo sapien
gtgttccattcctgcccatgggcac

SEQ ID NO: 2463783 - DNA, 25 bp, Homo sapien
gccctggtgcacttggataaaatca

SEQ ID NO: 2463784 - DNA, 25 bp, Homo sapien
tggagaagccagtatggggcaagac

SEQ ID NO: 2463785 - DNA, 25 bp, Homo sapien
agaagccagtatggggcaagacccg

SEQ ID NO: 2463786 - DNA, 25 bp, Homo sapien
gagaagccagtatggggcaagaccc

SEQ ID NO: 2463787 - DNA, 25 bp, Homo sapien
gacacatggccaatggtggcctcca

SEQ ID NO: 2463788 - DNA, 25 bp, Homo sapien
ggtgtggagcattctcccttccagg

SEQ ID NO: 2463789 - DNA, 25 bp, Homo sapien
tggaacctgtttgtgtgggatgcag

SEQ ID NO: 2463790 - DNA, 25 bp, Homo sapien
gtgggatgcaggcattgaatcatga

SEQ ID NO: 2463791 - DNA, 25 bp, Homo sapien
cattgaatcatgaacacgccaggtt

SEQ ID NO: 2463792 - DNA, 25 bp, Homo sapien
ctccaggcctgttctgccagaaaca

SEQ ID NO: 2463793 - DNA, 25 bp, Homo sapien
agagtgatgcctgcccgggccctgc

SEQ ID NO: 2463794 - DNA, 25 bp, Homo sapien
agagagtgatgcctgcccgggccct

SEQ ID NO: 2463795 - DNA, 25 bp, Homo sapien
ggcctgttctgccagaaacacccac

SEQ ID NO: 2463796 - DNA, 25 bp, Homo sapien
tcctcgcatcaggtgcaagggcaca

SEQ ID NO: 2463797 - DNA, 25 bp, Homo sapien
agtcttggccggccgctctcctgtg

SEQ ID NO: 2463798 - DNA, 25 bp, Homo sapien
aagtgagaggtactgcagccgccag

SEQ ID NO: 2463799 - DNA, 25 bp, Homo sapien
tgtctgtcctagtcctcgcatcagg

SEQ ID NO: 2463800 - DNA, 25 bp, Homo sapien
ggatagacgtctgcggggcacattc

SEQ ID NO: 2463801 - DNA, 25 bp, Homo sapien
caggatagacgtctgcggggcacat

SEQ ID NO: 2463802 - DNA, 25 bp, Homo sapien
tctccacacccccttgcatgctgct

SEQ ID NO: 2463803 - DNA, 25 bp, Homo sapien
ctgggtggcaggatagacgtctgcg

SEQ ID NO: 2463804 - DNA, 25 bp, Homo sapien
tgcgggaatgatcccactttgccag

SEQ ID NO: 2463805 - DNA, 25 bp, Homo sapien
tccagtggcagtggtaacagggtcc

SEQ ID NO: 2463806 - DNA, 25 bp, Homo sapien
ccgaatctgttatctgggtcatgtg

SEQ ID NO: 2463807 - DNA, 25 bp, Homo sapien
tgccagttaaatggaatggtcttcc

SEQ ID NO: 2463808 - DNA, 25 bp, Homo sapien
gcctcccgttcctgtctgcaccagg

SEQ ID NO: 2463809 - DNA, 25 bp, Homo sapien
ctatggagtacagtccagccctgac

SEQ ID NO: 2463810 - DNA, 25 bp, Homo sapien
ccgttcctgtctgcaccaggtggcc

SEQ ID NO: 2463811 - DNA, 25 bp, Homo sapien
tggagtacagtccagccctgacagc

SEQ ID NO: 2463812 - DNA, 25 bp, Homo sapien
gcctgacttattactggatgccagt

SEQ ID NO: 2463813 - DNA, 25 bp, Homo sapien
ccttacgctcgggttttatgttgct

SEQ ID NO: 2463814 - DNA, 25 bp, Homo sapien
gactttcagcgatttctaccttacg

SEQ ID NO: 2463815 - DNA, 25 bp, Homo sapien
tggcaaagcctgacttattactgga

SEQ ID NO: 2463816 - DNA, 25 bp, Homo sapien
acctctcgccccagtcgctgcgccc

SEQ ID NO: 2463817 - DNA, 25 bp, Homo sapien
cctctcgccccagtcgctgcgccct

SEQ ID NO: 2463818 - DNA, 25 bp, Homo sapien
ctctggcctccctgtggagcactga

SEQ ID NO: 2463819 - DNA, 25 bp, Homo sapien
ctccctgtggagcactgagaccagg

SEQ ID NO: 2463820 - DNA, 25 bp, Homo sapien
ctggggagccggtgacccagttctc

SEQ ID NO: 2463821 - DNA, 25 bp, Homo sapien
ggcctccctgtggagcactgagacc

SEQ ID NO: 2463822 - DNA, 25 bp, Homo sapien
tgccacccaggaaagccgggaagag

SEQ ID NO: 2463823 - DNA, 25 bp, Homo sapien
ctggcagtgccacccaggaaagccg

SEQ ID NO: 2463824 - DNA, 25 bp, Homo sapien
gcagtgccacccaggaaagccggga

SEQ ID NO: 2463825 - DNA, 25 bp, Homo sapien
tccaggctggcagtgccacccagga

SEQ ID NO: 2463826 - DNA, 25 bp, Homo sapien
gtgcatggcacttccatcttggtgg

SEQ ID NO: 2463827 - DNA, 25 bp, Homo sapien
tggcacttccatcttggtgggtttt

SEQ ID NO: 2463828 - DNA, 25 bp, Homo sapien
tgcatggcacttccatcttggtggg

SEQ ID NO: 2463829 - DNA, 25 bp, Homo sapien
catggcacttccatcttggtgggtt

SEQ ID NO: 2463830 - DNA, 25 bp, Homo sapien
tgcaagcacacgactgtgagagtgt

SEQ ID NO: 2463831 - DNA, 25 bp, Homo sapien
agtgtaagaatggcacccaggcctc

SEQ ID NO: 2463832 - DNA, 25 bp, Homo sapien
cctcagctaggacagaagcagctgg

SEQ ID NO: 2463833 - DNA, 25 bp, Homo sapien
tggaccacaggagtagaggccaggc

SEQ ID NO: 2463834 - DNA, 25 bp, Homo sapien
cctgtaccaacagcttctccaccca

SEQ ID NO: 2463835 - DNA, 25 bp, Homo sapien
tgcagcctctcctgtaccaacagct

SEQ ID NO: 2463836 - DNA, 25 bp, Homo sapien
aagaatggcatgcagcatctcctgc

SEQ ID NO: 2463837 - DNA, 25 bp, Homo sapien
ttctcggcagcccaaaaagaatggc

SEQ ID NO: 2463838 - DNA, 25 bp, Homo sapien
gctcctagagcggtacacaggtact

SEQ ID NO: 2463839 - DNA, 25 bp, Homo sapien
ctagagcggtacacaggtactggtc

SEQ ID NO: 2463840 - DNA, 25 bp, Homo sapien
tgctgctgccgcagacttggagcct

SEQ ID NO: 2463841 - DNA, 25 bp, Homo sapien
ttgctgctgccgcagacttggagcc

SEQ ID NO: 2463842 - DNA, 25 bp, Homo sapien
catgtggtggctggcttccagattc

SEQ ID NO: 2463843 - DNA, 25 bp, Homo sapien
ggcatgagggcatgtggtggctggc

SEQ ID NO: 2463844 - DNA, 25 bp, Homo sapien
ctgggcatgagggcatgtggtggct

SEQ ID NO: 2463845 - DNA, 25 bp, Homo sapien
gcatgagggcatgtggtggctggct

SEQ ID NO: 2463846 - DNA, 25 bp, Homo sapien
tcttcttggaggggtcggagattac

SEQ ID NO: 2463847 - DNA, 25 bp, Homo sapien
atcttcttggaggggtcggagatta

SEQ ID NO: 2463848 - DNA, 25 bp, Homo sapien
ttcctccaactgcattgcgctcttg

SEQ ID NO: 2463849 - DNA, 25 bp, Homo sapien
gttcctccaactgcattgcgctctt

SEQ ID NO: 2463850 - DNA, 25 bp, Homo sapien
gctcatagagggcttcccaacccag

SEQ ID NO: 2463851 - DNA, 25 bp, Homo sapien
tccttgaagccgctgtgtgactccg

SEQ ID NO: 2463852 - DNA, 25 bp, Homo sapien
tgaagccgctgtgtgactccgccct

SEQ ID NO: 2463853 - DNA, 25 bp, Homo sapien
gtgtgactccgccctctgctcatag

SEQ ID NO: 2463854 - DNA, 25 bp, Homo sapien
cagcctggagctgtcttcccacact

SEQ ID NO: 2463855 - DNA, 25 bp, Homo sapien
gcctggagctgtcttcccacactct

SEQ ID NO: 2463856 - DNA, 25 bp, Homo sapien
cttccttaggtggttggtctcatct

SEQ ID NO: 2463857 - DNA, 25 bp, Homo sapien
taggtggttggtctcatcttgtagc

SEQ ID NO: 2463858 - DNA, 25 bp, Homo sapien
ccaggtcatgccagccccatcttac

SEQ ID NO: 2463859 - DNA, 25 bp, Homo sapien
gtcctcctcccaggtcatgccagcc

SEQ ID NO: 2463860 - DNA, 25 bp, Homo sapien
gcattctaagtcacccccacagccc

SEQ ID NO: 2463861 - DNA, 25 bp, Homo sapien
cccacagccctctgatgccagtcct

SEQ ID NO: 2463862 - DNA, 25 bp, Homo sapien
ttctcctccttcgatgtgcgaacgt

SEQ ID NO: 2463863 - DNA, 25 bp, Homo sapien
aacccaagcttctgtactcgatgta

SEQ ID NO: 2463864 - DNA, 25 bp, Homo sapien
gatgtgcgaacgtgcccaaagcaca

SEQ ID NO: 2463865 - DNA, 25 bp, Homo sapien
ccttcgatgtgcgaacgtgcccaaa

SEQ ID NO: 2463866 - DNA, 25 bp, Homo sapien
tcaggggaccccactggactcttac

SEQ ID NO: 2463867 - DNA, 25 bp, Homo sapien
ggaatcaggggaccccactggactc

SEQ ID NO: 2463868 - DNA, 25 bp, Homo sapien
cagctggaatcaggggaccccactg

SEQ ID NO: 2463869 - DNA, 25 bp, Homo sapien
atcaggggaccccactggactctta

SEQ ID NO: 2463870 - DNA, 25 bp, Homo sapien
tattgcggagcttgaatccagggct

SEQ ID NO: 2463871 - DNA, 25 bp, Homo sapien
cactgagttgactgattattgcgga

SEQ ID NO: 2463872 - DNA, 25 bp, Homo sapien
ttgcggagcttgaatccagggctac

SEQ ID NO: 2463873 - DNA, 25 bp, Homo sapien
tgaattgatgttttcactgagttga

SEQ ID NO: 2463874 - DNA, 25 bp, Homo sapien
agggccctccctgtagatacctgct

SEQ ID NO: 2463875 - DNA, 25 bp, Homo sapien
gggccctccctgtagatacctgctg

SEQ ID NO: 2463876 - DNA, 25 bp, Homo sapien
tctggaatgccagggctcttcctct

SEQ ID NO: 2463877 - DNA, 25 bp, Homo sapien
tctttttcctgttagctccttctgg

SEQ ID NO: 2463878 - DNA, 25 bp, Homo sapien
tgtcagggctactgccattgatttt

SEQ ID NO: 2463879 - DNA, 25 bp, Homo sapien
gctgtgtcagggctactgccattga

SEQ ID NO: 2463880 - DNA, 25 bp, Homo sapien
catcggcttgatgcccaagttgccg

SEQ ID NO: 2463881 - DNA, 25 bp, Homo sapien
ccaggtcctcggagatgccagtcca

SEQ ID NO: 2463882 - DNA, 25 bp, Homo sapien
gggaggtcgagcttggggcagcaag

SEQ ID NO: 2463883 - DNA, 25 bp, Homo sapien
cacatcggcttgatgcccaagttgc

SEQ ID NO: 2463884 - DNA, 25 bp, Homo sapien
tgtggtgactggcaagggcaaggac

SEQ ID NO: 2463885 - DNA, 25 bp, Homo sapien
cctgtggtgactggcaagggcaagg

SEQ ID NO: 2463886 - DNA, 25 bp, Homo sapien
gctggtgttggggggcctagtctgg

SEQ ID NO: 2463887 - DNA, 25 bp, Homo sapien
ctgtggtgactggcaagggcaagga

SEQ ID NO: 2463888 - DNA, 25 bp, Homo sapien
gctgcagccaatttcccctgttgtg

SEQ ID NO: 2463889 - DNA, 25 bp, Homo sapien
tgcagccaatttcccctgttgtgtg

SEQ ID NO: 2463890 - DNA, 25 bp, Homo sapien
agccaatttcccctgttgtgtgttt

SEQ ID NO: 2463891 - DNA, 25 bp, Homo sapien
ggctgcagccaatttcccctgttgt

SEQ ID NO: 2463892 - DNA, 25 bp, Homo sapien
ctttaccctgactaaaattgcaagc

SEQ ID NO: 2463893 - DNA, 25 bp, Homo sapien
aagctttaccctgactaaaattgca

SEQ ID NO: 2463894 - DNA, 25 bp, Homo sapien
taagctttaccctgactaaaattgc

SEQ ID NO: 2463895 - DNA, 25 bp, Homo sapien
gctttaccctgactaaaattgcaag

SEQ ID NO: 2463896 - DNA, 25 bp, Homo sapien
aaatggaggatcaaatggaaagtta

SEQ ID NO: 2463897 - DNA, 25 bp, Homo sapien
atggaggatcaaatggaaagttatc

SEQ ID NO: 2463898 - DNA, 25 bp, Homo sapien
aatggaggatcaaatggaaagttat

SEQ ID NO: 2463899 - DNA, 25 bp, Homo sapien
tatctgaagcttgcactgacccaga

SEQ ID NO: 2463900 - DNA, 25 bp, Homo sapien
aaatctttcttaagtctatctgaag

SEQ ID NO: 2463901 - DNA, 25 bp, Homo sapien
ctgtataagtccctgaaatctttct

SEQ ID NO: 2463902 - DNA, 25 bp, Homo sapien
ctgtgatctgtataagtccctgaaa

SEQ ID NO: 2463903 - DNA, 25 bp, Homo sapien
tccaacttcttctcactagtaggct

SEQ ID NO: 2463904 - DNA, 25 bp, Homo sapien
tcttctcactagtaggctcttcttt

SEQ ID NO: 2463905 - DNA, 25 bp, Homo sapien
tcactagtaggctcttctttcatct

SEQ ID NO: 2463906 - DNA, 25 bp, Homo sapien
ttctcactagtaggctcttctttca

SEQ ID NO: 2463907 - DNA, 25 bp, Homo sapien
agctctacctttcttccaggttcca

SEQ ID NO: 2463908 - DNA, 25 bp, Homo sapien
ctctacctttcttccaggttccaag

SEQ ID NO: 2463909 - DNA, 25 bp, Homo sapien
aggttccaaggatttcccagacatt

SEQ ID NO: 2463910 - DNA, 25 bp, Homo sapien
caaggatttcccagacattgagcat

SEQ ID NO: 2463911 - DNA, 25 bp, Homo sapien
ctgtcttgagaataccaaaatagta

SEQ ID NO: 2463912 - DNA, 25 bp, Homo sapien
ccttggcccgttccaacatcatttt

SEQ ID NO: 2463913 - DNA, 25 bp, Homo sapien
tctccttggcccgttccaacatcat

SEQ ID NO: 2463914 - DNA, 25 bp, Homo sapien
tggcccgttccaacatcattttaat

SEQ ID NO: 2463915 - DNA, 25 bp, Homo sapien
ttggcccgttccaacatcattttaa

SEQ ID NO: 2463916 - DNA, 25 bp, Homo sapien
gtgtgaaattttcagtccaagacac

SEQ ID NO: 2463917 - DNA, 25 bp, Homo sapien
tttcagtccaagacacataagagac

SEQ ID NO: 2463918 - DNA, 25 bp, Homo sapien
tccaagacacataagagaccaggcc

SEQ ID NO: 2463919 - DNA, 25 bp, Homo sapien
gaggaaagctctttaatttggatca

SEQ ID NO: 2463920 - DNA, 25 bp, Homo sapien
ctattcagggcattctcaatttctt

SEQ ID NO: 2463921 - DNA, 25 bp, Homo sapien
ccctattcagggcattctcaatttc

SEQ ID NO: 2463922 - DNA, 25 bp, Homo sapien
aaccctattcagggcattctcaatt

SEQ ID NO: 2463923 - DNA, 25 bp, Homo sapien
cctattcagggcattctcaatttct

SEQ ID NO: 2463924 - DNA, 25 bp, Homo sapien
tctgacaaatctctgatgggcttct

SEQ ID NO: 2463925 - DNA, 25 bp, Homo sapien
ccgtaaccatggaagtgataattga

SEQ ID NO: 2463926 - DNA, 25 bp, Homo sapien
actgagcccgtaaccatggaagtga

SEQ ID NO: 2463927 - DNA, 25 bp, Homo sapien
gaatctgacaaatctctgatgggct

SEQ ID NO: 2463928 - DNA, 25 bp, Homo sapien
caaattgggagaatcaccctaggtc

SEQ ID NO: 2463929 - DNA, 25 bp, Homo sapien
tgtcacttacgcaatgaaccagaat

SEQ ID NO: 2463930 - DNA, 25 bp, Homo sapien
aaaccaggaggcgagaatgagctga

SEQ ID NO: 2463931 - DNA, 25 bp, Homo sapien
cagaatgtcctgcatgtaccctgga

SEQ ID NO: 2463932 - DNA, 25 bp, Homo sapien
aagcagcatgcgctgaaaacacctg

SEQ ID NO: 2463933 - DNA, 25 bp, Homo sapien
gcagcatgcgctgaaaacacctgca

SEQ ID NO: 2463934 - DNA, 25 bp, Homo sapien
tcaagcagcatgcgctgaaaacacc

SEQ ID NO: 2463935 - DNA, 25 bp, Homo sapien
gcatgcgctgaaaacacctgcactc

SEQ ID NO: 2463936 - DNA, 25 bp, Homo sapien
tcccctgctagcagccggaagaact

SEQ ID NO: 2463937 - DNA, 25 bp, Homo sapien
caaggtgaagcagccgcgtgcgtgc

SEQ ID NO: 2463938 - DNA, 25 bp, Homo sapien
gaaaaggcagactcttgcgtcccct

SEQ ID NO: 2463939 - DNA, 25 bp, Homo sapien
tgcaggacactcatggtcaaggtga

SEQ ID NO: 2463940 - DNA, 25 bp, Homo sapien
tcaaaagcttcaactctctgcttca

SEQ ID NO: 2463941 - DNA, 25 bp, Homo sapien
gcaattcaaaagcttcaactctctg

SEQ ID NO: 2463942 - DNA, 25 bp, Homo sapien
aaagcttcaactctctgcttcagct

SEQ ID NO: 2463943 - DNA, 25 bp, Homo sapien
ctgcaattcaaaagcttcaactctc

SEQ ID NO: 2463944 - DNA, 25 bp, Homo sapien
ttcaattaaattctctgactttctc

SEQ ID NO: 2463945 - DNA, 25 bp, Homo sapien
tcttcaattaaattctctgactttc

SEQ ID NO: 2463946 - DNA, 25 bp, Homo sapien
caattaaattctctgactttctcaa

SEQ ID NO: 2463947 - DNA, 25 bp, Homo sapien
aattaaattctctgactttctcaag

SEQ ID NO: 2463948 - DNA, 25 bp, Homo sapien
atgaatcccgttttcccatcaggac

SEQ ID NO: 2463949 - DNA, 25 bp, Homo sapien
catgaatcccgttttcccatcagga

SEQ ID NO: 2463950 - DNA, 25 bp, Homo sapien
tcatgaatcccgttttcccatcagg

SEQ ID NO: 2463951 - DNA, 25 bp, Homo sapien
acttcctggctggtcatacatgcat

SEQ ID NO: 2463952 - DNA, 25 bp, Homo sapien
caatgtttccagaaaccaggcttgt

SEQ ID NO: 2463953 - DNA, 25 bp, Homo sapien
aaagacgttcagtgacccctagcag

SEQ ID NO: 2463954 - DNA, 25 bp, Homo sapien
aaagcagcaccagaggtgatgacac

SEQ ID NO: 2463955 - DNA, 25 bp, Homo sapien
tgtcatttacaaccactgacgtcat

SEQ ID NO: 2463956 - DNA, 25 bp, Homo sapien
catttacaaccactgacgtcatctg

SEQ ID NO: 2463957 - DNA, 25 bp, Homo sapien
aaccactgacgtcatctgcaccagt

SEQ ID NO: 2463958 - DNA, 25 bp, Homo sapien
ttacaaccactgacgtcatctgcac

SEQ ID NO: 2463959 - DNA, 25 bp, Homo sapien
ttggatctgataccaaattatactg

SEQ ID NO: 2463960 - DNA, 25 bp, Homo sapien
gattttccgtgaatactgaattata

SEQ ID NO: 2463961 - DNA, 25 bp, Homo sapien
ctttttagattttccgtgaatactg

SEQ ID NO: 2463962 - DNA, 25 bp, Homo sapien
tctgataccaaattatactggatgc

SEQ ID NO: 2463963 - DNA, 25 bp, Homo sapien
agtaaagctaccctgactgcgatgc

SEQ ID NO: 2463964 - DNA, 25 bp, Homo sapien
cacaaaggatggcagagttcccggg

SEQ ID NO: 2463965 - DNA, 25 bp, Homo sapien
gagagtgacttatgcaggttaccca

SEQ ID NO: 2463966 - DNA, 25 bp, Homo sapien
ttttgatgacagacccaagatctaa

SEQ ID NO: 2463967 - DNA, 25 bp, Homo sapien
taacaggaacacactctcagcagtc

SEQ ID NO: 2463968 - DNA, 25 bp, Homo sapien
cagtaatgagatcaaatggccacat

SEQ ID NO: 2463969 - DNA, 25 bp, Homo sapien
cttcccaattgctttaccagtaatg

SEQ ID NO: 2463970 - DNA, 25 bp, Homo sapien
aattgctttaccagtaatgagatca

SEQ ID NO: 2463971 - DNA, 25 bp, Homo sapien
aacacaaactccctgtcactcctca

SEQ ID NO: 2463972 - DNA, 25 bp, Homo sapien
ttttggtgaaggttgaccatgcctg

SEQ ID NO: 2463973 - DNA, 25 bp, Homo sapien
cttgttgcaaagtaagggtagtcac

SEQ ID NO: 2463974 - DNA, 25 bp, Homo sapien
tatccacagtcacaagaattttttg

SEQ ID NO: 2463975 - DNA, 25 bp, Homo sapien
ccatgcctgtgttcatcaagtgatc

SEQ ID NO: 2463976 - DNA, 25 bp, Homo sapien
aatcgctcaggttctttccaattac

SEQ ID NO: 2463977 - DNA, 25 bp, Homo sapien
ggaaatcgctcaggttctttccaat

SEQ ID NO: 2463978 - DNA, 25 bp, Homo sapien
aaatcgctcaggttctttccaatta

SEQ ID NO: 2463979 - DNA, 25 bp, Homo sapien
aaggaaatcgctcaggttctttcca

SEQ ID NO: 2463980 - DNA, 25 bp, Homo sapien
ggtgagatataagagggagcagata

SEQ ID NO: 2463981 - DNA, 25 bp, Homo sapien
ttgaagtcccacgagattttctggt

SEQ ID NO: 2463982 - DNA, 25 bp, Homo sapien
tggtgggtgagatataagagggagc

SEQ ID NO: 2463983 - DNA, 25 bp, Homo sapien
attttgaagtcccacgagattttct

SEQ ID NO: 2463984 - DNA, 25 bp, Homo sapien
tgacaaccgtcactgtctgcaccag

SEQ ID NO: 2463985 - DNA, 25 bp, Homo sapien
gacaaccgtcactgtctgcaccagt

SEQ ID NO: 2463986 - DNA, 25 bp, Homo sapien
accgtcactgtctgcaccagttcat

SEQ ID NO: 2463987 - DNA, 25 bp, Homo sapien
ttatgacaaccgtcactgtctgcac

SEQ ID NO: 2463988 - DNA, 25 bp, Homo sapien
ttttggtgaaggttgaccatgcctg

SEQ ID NO: 2463989 - DNA, 25 bp, Homo sapien
cttgttgcaaagtaagggtagtcac

SEQ ID NO: 2463990 - DNA, 25 bp, Homo sapien
tatccacagtcacaagaattttttg

SEQ ID NO: 2463991 - DNA, 25 bp, Homo sapien
ccatgcctgtgttcatcaagtgatc

SEQ ID NO: 2463992 - DNA, 25 bp, Homo sapien
aatcgctcaggttctttccaattac

SEQ ID NO: 2463993 - DNA, 25 bp, Homo sapien
ggaaatcgctcaggttctttccaat

SEQ ID NO: 2463994 - DNA, 25 bp, Homo sapien
aaatcgctcaggttctttccaatta

SEQ ID NO: 2463995 - DNA, 25 bp, Homo sapien
aaggaaatcgctcaggttctttcca

SEQ ID NO: 2463996 - DNA, 25 bp, Homo sapien
ggtgagatataagagggagcagata

SEQ ID NO: 2463997 - DNA, 25 bp, Homo sapien
tggtgggtgagatataagagggagc

SEQ ID NO: 2463998 - DNA, 25 bp, Homo sapien
ttgaagtcccacgagattttctggt

SEQ ID NO: 2463999 - DNA, 25 bp, Homo sapien
attttgaagtcccacgagattttct

SEQ ID NO: 2464000 - DNA, 25 bp, Homo sapien
catggcttttgtcaggatttgatac

SEQ ID NO: 2464001 - DNA, 25 bp, Homo sapien
ctatacaaagtcagatttcatggct

SEQ ID NO: 2464002 - DNA, 25 bp, Homo sapien
cagatttcatggcttttgtcaggat

SEQ ID NO: 2464003 - DNA, 25 bp, Homo sapien
caaagtcagatttcatggcttttgt

SEQ ID NO: 2464004 - DNA, 25 bp, Homo sapien
aatcccttccagacctaatatttat

SEQ ID NO: 2464005 - DNA, 25 bp, Homo sapien
attctgaatccatatcctcagcatg

SEQ ID NO: 2464006 - DNA, 25 bp, Homo sapien
tggctgaacaaatcccttccagacc

SEQ ID NO: 2464007 - DNA, 25 bp, Homo sapien
tgtttcaccacagtccagttggagc

SEQ ID NO: 2464008 - DNA, 25 bp, Homo sapien
tcattctgataaacaaccttcattg

SEQ ID NO: 2464009 - DNA, 25 bp, Homo sapien
gtcacagtgctatagagatattgct

SEQ ID NO: 2464010 - DNA, 25 bp, Homo sapien
ttatttgtggttcaggaataccttc

SEQ ID NO: 2464011 - DNA, 25 bp, Homo sapien
tagttatctgcagtgggaaagtgtc

SEQ ID NO: 2464012 - DNA, 25 bp, Homo sapien
cagtaactagccctggcacattcac

SEQ ID NO: 2464013 - DNA, 25 bp, Homo sapien
ctgtggtcatctgcaccaggcattc

SEQ ID NO: 2464014 - DNA, 25 bp, Homo sapien
tgtggtcatctgcaccaggcattcc

SEQ ID NO: 2464015 - DNA, 25 bp, Homo sapien
ttggagaccaaactgaaattccaac

SEQ ID NO: 2464016 - DNA, 25 bp, Homo sapien
gctgttggagaccaaactgaaattc

SEQ ID NO: 2464017 - DNA, 25 bp, Homo sapien
gggtctgactatggctgtagcttcc

SEQ ID NO: 2464018 - DNA, 25 bp, Homo sapien
tctggggtctgactatggctgtagc

SEQ ID NO: 2464019 - DNA, 25 bp, Homo sapien
ctgcttcttgaaaatatacacatac

SEQ ID NO: 2464020 - DNA, 25 bp, Homo sapien
tatttcaacaaattgtctgttccct

SEQ ID NO: 2464021 - DNA, 25 bp, Homo sapien
cagggaaggcccatatttcaacaaa

SEQ ID NO: 2464022 - DNA, 25 bp, Homo sapien
tgtttctatctcttccagggaaggc

SEQ ID NO: 2464023 - DNA, 25 bp, Homo sapien
ttcccaggtctgtgacaaatggctg

SEQ ID NO: 2464024 - DNA, 25 bp, Homo sapien
tggctgccggtcaaaactccctctt

SEQ ID NO: 2464025 - DNA, 25 bp, Homo sapien
cccaggtctgtgacaaatggctgcc

SEQ ID NO: 2464026 - DNA, 25 bp, Homo sapien
aaatggctgccggtcaaaactccct

SEQ ID NO: 2464027 - DNA, 25 bp, Homo sapien
ttcctgaatcacctttcttgagctc

SEQ ID NO: 2464028 - DNA, 25 bp, Homo sapien
tcctgaatcacctttcttgagctct

SEQ ID NO: 2464029 - DNA, 25 bp, Homo sapien
cctgaatcacctttcttgagctctg

SEQ ID NO: 2464030 - DNA, 25 bp, Homo sapien
tcaaagcaacattctgaagcaaagc

SEQ ID NO: 2464031 - DNA, 25 bp, Homo sapien
gaagccattaatttccctcaagtgt

SEQ ID NO: 2464032 - DNA, 25 bp, Homo sapien
gaagcaaacttggactggcagccat

SEQ ID NO: 2464033 - DNA, 25 bp, Homo sapien
aagtgtcctgcgctttagatttgaa

SEQ ID NO: 2464034 - DNA, 25 bp, Homo sapien
tcccttcactcacctcaatgtagtt

SEQ ID NO: 2464035 - DNA, 25 bp, Homo sapien
tggacactaattgactcccttcact

SEQ ID NO: 2464036 - DNA, 25 bp, Homo sapien
gattccttttcgggcacctgccact

SEQ ID NO: 2464037 - DNA, 25 bp, Homo sapien
gcttgtaagacaagaagaggacagg

SEQ ID NO: 2464038 - DNA, 25 bp, Homo sapien
tcttgatccagtttttctagttccc

SEQ ID NO: 2464039 - DNA, 25 bp, Homo sapien
ttcttgatccagtttttctagttcc

SEQ ID NO: 2464040 - DNA, 25 bp, Homo sapien
ttgatccagtttttctagttccctc

SEQ ID NO: 2464041 - DNA, 25 bp, Homo sapien
ctttcttgatccagtttttctagtt

SEQ ID NO: 2464042 - DNA, 25 bp, Homo sapien
ataaagaattgctgcctgtatcaca

SEQ ID NO: 2464043 - DNA, 25 bp, Homo sapien
aaataaagaattgctgcctgtatca

SEQ ID NO: 2464044 - DNA, 25 bp, Homo sapien
aataaagaattgctgcctgtatcac

SEQ ID NO: 2464045 - DNA, 25 bp, Homo sapien
gctgggcttttggttgacatgtgac

SEQ ID NO: 2464046 - DNA, 25 bp, Homo sapien
ctgttcattgacttcaggcccccaa

SEQ ID NO: 2464047 - DNA, 25 bp, Homo sapien
gccaagatccggagagactctgctg

SEQ ID NO: 2464048 - DNA, 25 bp, Homo sapien
gctgagatgaatacaagtcaccctc

SEQ ID NO: 2464049 - DNA, 25 bp, Homo sapien
tatactgccaaatggtctgcaaaat

SEQ ID NO: 2464050 - DNA, 25 bp, Homo sapien
ttctatactgccaaatggtctgcaa

SEQ ID NO: 2464051 - DNA, 25 bp, Homo sapien
tctatactgccaaatggtctgcaaa

SEQ ID NO: 2464052 - DNA, 25 bp, Homo sapien
tactgccaaatggtctgcaaaatta

SEQ ID NO: 2464053 - DNA, 25 bp, Homo sapien
tggtctggagggttggagaggctgt

SEQ ID NO: 2464054 - DNA, 25 bp, Homo sapien
ttttggtctggagggttggagaggc

SEQ ID NO: 2464055 - DNA, 25 bp, Homo sapien
tttggtctggagggttggagaggct

SEQ ID NO: 2464056 - DNA, 25 bp, Homo sapien
ttggtctggagggttggagaggctg

SEQ ID NO: 2464057 - DNA, 25 bp, Homo sapien
gaacccacatgtaatctgtccagac

SEQ ID NO: 2464058 - DNA, 25 bp, Homo sapien
tggggaacccacatgtaatctgtcc

SEQ ID NO: 2464059 - DNA, 25 bp, Homo sapien
tctgtcagaacaaggactggggaac

SEQ ID NO: 2464060 - DNA, 25 bp, Homo sapien
gggaacccacatgtaatctgtccag

SEQ ID NO: 2464061 - DNA, 25 bp, Homo sapien
ctcctcatgctcagctatgatagca

SEQ ID NO: 2464062 - DNA, 25 bp, Homo sapien
cctcatgctcagctatgatagcatt

SEQ ID NO: 2464063 - DNA, 25 bp, Homo sapien
tcctcatgctcagctatgatagcat

SEQ ID NO: 2464064 - DNA, 25 bp, Homo sapien
tgctttccagtatccacctgaaacc

SEQ ID NO: 2464065 - DNA, 25 bp, Homo sapien
tatccacctgaaacctaatcctgca

SEQ ID NO: 2464066 - DNA, 25 bp, Homo sapien
cttgatccctgagaccgctaatcca

SEQ ID NO: 2464067 - DNA, 25 bp, Homo sapien
ctaatcctgcaattctgtactcttg

SEQ ID NO: 2464068 - DNA, 25 bp, Homo sapien
tccagccttacttcccttgacagag

SEQ ID NO: 2464069 - DNA, 25 bp, Homo sapien
tgacagagcctatcgctaagacagt

SEQ ID NO: 2464070 - DNA, 25 bp, Homo sapien
aatctgcagcagtgaaactctggac

SEQ ID NO: 2464071 - DNA, 25 bp, Homo sapien
taccatggatcctcgatgaaatgcc

SEQ ID NO: 2464072 - DNA, 25 bp, Homo sapien
gaacccacgttgagtctccagcaat

SEQ ID NO: 2464073 - DNA, 25 bp, Homo sapien
tctatatgtgatacggtcacaacac

SEQ ID NO: 2464074 - DNA, 25 bp, Homo sapien
tataatcacattagggacccatgct

SEQ ID NO: 2464075 - DNA, 25 bp, Homo sapien
tgaaacaataacactgtgaacccac

SEQ ID NO: 2464076 - DNA, 25 bp, Homo sapien
tactttccacagtcgtaccttggac

SEQ ID NO: 2464077 - DNA, 25 bp, Homo sapien
atccgttcacagaggctggaacttc

SEQ ID NO: 2464078 - DNA, 25 bp, Homo sapien
ccaacagtaaatccgttcacagagg

SEQ ID NO: 2464079 - DNA, 25 bp, Homo sapien
ggacacagcctatactttccacagt

SEQ ID NO: 2464080 - DNA, 25 bp, Homo sapien
tctatctccagtagtcaaaccatgg

SEQ ID NO: 2464081 - DNA, 25 bp, Homo sapien
tgtaacccgagcagacactggatcc

SEQ ID NO: 2464082 - DNA, 25 bp, Homo sapien
caaaccatggatcttgcttaaagga

SEQ ID NO: 2464083 - DNA, 25 bp, Homo sapien
gattctggcccaaggttctatctcc

SEQ ID NO: 2464084 - DNA, 25 bp, Homo sapien
taaccgaaaatgatgggcctgggag

SEQ ID NO: 2464085 - DNA, 25 bp, Homo sapien
cggcagaaaggagaaatcacgtcag

SEQ ID NO: 2464086 - DNA, 25 bp, Homo sapien
ggagcctgggttcatcgtaaccgaa

SEQ ID NO: 2464087 - DNA, 25 bp, Homo sapien
ctgagcccaatgtggtcctccagat

SEQ ID NO: 2464088 - DNA, 25 bp, Homo sapien
tgggaggcactccttaccaaggatg

SEQ ID NO: 2464089 - DNA, 25 bp, Homo sapien
ttgctgggaggcactccttaccaag

SEQ ID NO: 2464090 - DNA, 25 bp, Homo sapien
gcactccttaccaaggatgccaacg

SEQ ID NO: 2464091 - DNA, 25 bp, Homo sapien
taccaaggatgccaacgcagtactc

SEQ ID NO: 2464092 - DNA, 25 bp, Homo sapien
ggggtggctgagttcctccatctac

SEQ ID NO: 2464093 - DNA, 25 bp, Homo sapien
ctggggtggctgagttcctccatct

SEQ ID NO: 2464094 - DNA, 25 bp, Homo sapien
tggggtggctgagttcctccatcta

SEQ ID NO: 2464095 - DNA, 25 bp, Homo sapien
gcactggaccactcccacagattca

SEQ ID NO: 2464096 - DNA, 25 bp, Homo sapien
tcaggctcagcagcctaacctgcaa

SEQ ID NO: 2464097 - DNA, 25 bp, Homo sapien
actggaccactcccacagattcagg

SEQ ID NO: 2464098 - DNA, 25 bp, Homo sapien
tggaccactcccacagattcaggct

SEQ ID NO: 2464099 - DNA, 25 bp, Homo sapien
gtcatttaccaggagcacgcctctt

SEQ ID NO: 2464100 - DNA, 25 bp, Homo sapien
cttccacttctgtcgtgatgtcatt

SEQ ID NO: 2464101 - DNA, 25 bp, Homo sapien
cacttctgtcgtgatgtcatttacc

SEQ ID NO: 2464102 - DNA, 25 bp, Homo sapien
tcatttaccaggagcacgcctcttc

SEQ ID NO: 2464103 - DNA, 25 bp, Homo sapien
tgcatggttagctgcatacaggagc

SEQ ID NO: 2464104 - DNA, 25 bp, Homo sapien
tccagattccctgcatggttagctg

SEQ ID NO: 2464105 - DNA, 25 bp, Homo sapien
acagtccgccgcagtcaccatgagg

SEQ ID NO: 2464106 - DNA, 25 bp, Homo sapien
gtcaccatgaggtccagattccctg

SEQ ID NO: 2464107 - DNA, 25 bp, Homo sapien
gatgcatacgacctgagtgacggga

SEQ ID NO: 2464108 - DNA, 25 bp, Homo sapien
tcttctcagaggaggactaccgcgg

SEQ ID NO: 2464109 - DNA, 25 bp, Homo sapien
ggtctctcggcaagactagaaagca

SEQ ID NO: 2464110 - DNA, 25 bp, Homo sapien
cgaatgggctttctatatgtgggct

SEQ ID NO: 2464111 - DNA, 25 bp, Homo sapien
aaaattacttcctgtttcagctcag

SEQ ID NO: 2464112 - DNA, 25 bp, Homo sapien
tgtttcagctcagtcaagggatgac

SEQ ID NO: 2464113 - DNA, 25 bp, Homo sapien
tcctgtttcagctcagtcaagggat

SEQ ID NO: 2464114 - DNA, 25 bp, Homo sapien
gtttcagctcagtcaagggatgaca

SEQ ID NO: 2464115 - DNA, 25 bp, Homo sapien
actatgatttacacccagtttgtca

SEQ ID NO: 2464116 - DNA, 25 bp, Homo sapien
tactctggcactaaagttgatgtag

SEQ ID NO: 2464117 - DNA, 25 bp, Homo sapien
gtggcacacatctcctttagtttta

SEQ ID NO: 2464118 - DNA, 25 bp, Homo sapien
ttgatgtagggccatcaatcctctg

SEQ ID NO: 2464119 - DNA, 25 bp, Homo sapien
tacactcatcatttcgcagttactt

SEQ ID NO: 2464120 - DNA, 25 bp, Homo sapien
cactgtacgtggtataagcaatgga

SEQ ID NO: 2464121 - DNA, 25 bp, Homo sapien
acaggcaaatccagcattctatcct

SEQ ID NO: 2464122 - DNA, 25 bp, Homo sapien
cgcagttactttgtgaaagatcaca

SEQ ID NO: 2464123 - DNA, 25 bp, Homo sapien
gttagaagagtggagcaatgcagcc

SEQ ID NO: 2464124 - DNA, 25 bp, Homo sapien
gggttaatgggatgcccagacatga

SEQ ID NO: 2464125 - DNA, 25 bp, Homo sapien
cacctctaaaatcaggagtgatgga

SEQ ID NO: 2464126 - DNA, 25 bp, Homo sapien
atttccatggcagaactgtgtttcc

SEQ ID NO: 2464127 - DNA, 25 bp, Homo sapien
ccaggtgtgggagctttgcctgcat

SEQ ID NO: 2464128 - DNA, 25 bp, Homo sapien
tttcttagtttccaggtgtgggagc

SEQ ID NO: 2464129 - DNA, 25 bp, Homo sapien
ttccaggtgtgggagctttgcctgc

SEQ ID NO: 2464130 - DNA, 25 bp, Homo sapien
tcttttgtgcaagtcctttcttagt

SEQ ID NO: 2464131 - DNA, 25 bp, Homo sapien
ctctgtagatcaaccagcgatgcat

SEQ ID NO: 2464132 - DNA, 25 bp, Homo sapien
gaatctggctgggtaaaaccgcatc

SEQ ID NO: 2464133 - DNA, 25 bp, Homo sapien
ctgctctgtagatcaaccagcgatg

SEQ ID NO: 2464134 - DNA, 25 bp, Homo sapien
gtaaaaccgcatcaaagctgctctg

SEQ ID NO: 2464135 - DNA, 25 bp, Homo sapien
tcacgtgttttagatttgtaacctc

SEQ ID NO: 2464136 - DNA, 25 bp, Homo sapien
gttttgaccaatggatgaacattgc

SEQ ID NO: 2464137 - DNA, 25 bp, Homo sapien
attgatgaatataagcaagaatcca

SEQ ID NO: 2464138 - DNA, 25 bp, Homo sapien
caatggatgaacattgctaacattt

SEQ ID NO: 2464139 - DNA, 25 bp, Homo sapien
caacattgatctcatgaagatgaac

SEQ ID NO: 2464140 - DNA, 25 bp, Homo sapien
gtggtcacagactcacatttaagca

SEQ ID NO: 2464141 - DNA, 25 bp, Homo sapien
acacttattgttctgaatcaacatt

SEQ ID NO: 2464142 - DNA, 25 bp, Homo sapien
tcatagacctgacacttattgttct

SEQ ID NO: 2464143 - DNA, 25 bp, Homo sapien
ttaccattaagtcctccattaagtc

SEQ ID NO: 2464144 - DNA, 25 bp, Homo sapien
ccagtagtcattcggaataataaat

SEQ ID NO: 2464145 - DNA, 25 bp, Homo sapien
taataaatactcgactttcagaaaa

SEQ ID NO: 2464146 - DNA, 25 bp, Homo sapien
ttctttcatgttaacccagtagtca

SEQ ID NO: 2464147 - DNA, 25 bp, Homo sapien
ctctgctggtgccaaaatacccttc

SEQ ID NO: 2464148 - DNA, 25 bp, Homo sapien
caaaccccgctaacttctggaactg

SEQ ID NO: 2464149 - DNA, 25 bp, Homo sapien
taaggcaagtcccgtattttgcttc

SEQ ID NO: 2464150 - DNA, 25 bp, Homo sapien
tcctctgtgcatgtacttgttactc

SEQ ID NO: 2464151 - DNA, 25 bp, Homo sapien
caagtcccgtattttgcttcctctg

SEQ ID NO: 2464152 - DNA, 25 bp, Homo sapien
ggcaagtcccgtattttgcttcctc

SEQ ID NO: 2464153 - DNA, 25 bp, Homo sapien
gaccttgttagcattctcagactcc

SEQ ID NO: 2464154 - DNA, 25 bp, Homo sapien
acaaggaactcctcagtgttatact

SEQ ID NO: 2464155 - DNA, 25 bp, Homo sapien
tactgtctccatgaccttgttagca

SEQ ID NO: 2464156 - DNA, 25 bp, Homo sapien
cagtgttatactgaatgaaaattac

SEQ ID NO: 2464157 - DNA, 25 bp, Homo sapien
tgaagtcttgaatgctacagatgaa

SEQ ID NO: 2464158 - DNA, 25 bp, Homo sapien
aagatcaccattaattcagatggca

SEQ ID NO: 2464159 - DNA, 25 bp, Homo sapien
gaagatcaccattaattcagatggc

SEQ ID NO: 2464160 - DNA, 25 bp, Homo sapien
gatcaccattaattcagatggcaat

SEQ ID NO: 2464161 - DNA, 25 bp, Homo sapien
atgaagatcaccattaattcagatg

SEQ ID NO: 2464162 - DNA, 25 bp, Homo sapien
agtgaattctttacttcgggtatat

SEQ ID NO: 2464163 - DNA, 25 bp, Homo sapien
tgaattctttacttcgggtatataa

SEQ ID NO: 2464164 - DNA, 25 bp, Homo sapien
gtgaattctttacttcgggtatata

SEQ ID NO: 2464165 - DNA, 25 bp, Homo sapien
gaatcagactgagcaaagaagaggg

SEQ ID NO: 2464166 - DNA, 25 bp, Homo sapien
gactgagcaaagaagagggtacttt

SEQ ID NO: 2464167 - DNA, 25 bp, Homo sapien
cctgtaataagtaccaacctgcact

SEQ ID NO: 2464168 - DNA, 25 bp, Homo sapien
tgtaataagtaccaacctgcactcc

SEQ ID NO: 2464169 - DNA, 25 bp, Homo sapien
tcctgtaataagtaccaacctgcac

SEQ ID NO: 2464170 - DNA, 25 bp, Homo sapien
taataagtaccaacctgcactcctg

SEQ ID NO: 2464171 - DNA, 25 bp, Homo sapien
tcctgtggggaatctattccactta

SEQ ID NO: 2464172 - DNA, 25 bp, Homo sapien
taacagaatccgtatttcctgtggg

SEQ ID NO: 2464173 - DNA, 25 bp, Homo sapien
ggggaatctattccacttagctgac

SEQ ID NO: 2464174 - DNA, 25 bp, Homo sapien
ttgataacagaatccgtatttcctg

SEQ ID NO: 2464175 - DNA, 25 bp, Homo sapien
accagcactaccactattgttatca

SEQ ID NO: 2464176 - DNA, 25 bp, Homo sapien
cccctataacaagtggtagctgctg

SEQ ID NO: 2464177 - DNA, 25 bp, Homo sapien
ctacccctataacaagtggtagctg

SEQ ID NO: 2464178 - DNA, 25 bp, Homo sapien
tataacaagtggtagctgctgctct

SEQ ID NO: 2464179 - DNA, 25 bp, Homo sapien
attaagcaatcgagccccagagaga

SEQ ID NO: 2464180 - DNA, 25 bp, Homo sapien
catattaagcaatcgagccccagag

SEQ ID NO: 2464181 - DNA, 25 bp, Homo sapien
aggaaaacgaatcagacttaggatt

SEQ ID NO: 2464182 - DNA, 25 bp, Homo sapien
gaggaaaacgaatcagacttaggat

SEQ ID NO: 2464183 - DNA, 25 bp, Homo sapien
agaaaaccaccaccaatcttgtctg

SEQ ID NO: 2464184 - DNA, 25 bp, Homo sapien
aggagcctcgagtgtcttcagaaaa

SEQ ID NO: 2464185 - DNA, 25 bp, Homo sapien
ctgcagggaagagttggatgtcagg

SEQ ID NO: 2464186 - DNA, 25 bp, Homo sapien
tgcagggaagagttggatgtcaggc

SEQ ID NO: 2464187 - DNA, 25 bp, Homo sapien
ccatgtttctttgacctcttcagag

SEQ ID NO: 2464188 - DNA, 25 bp, Homo sapien
tctttgacctcttcagagccatcag

SEQ ID NO: 2464189 - DNA, 25 bp, Homo sapien
ttgacctcttcagagccatcagttt

SEQ ID NO: 2464190 - DNA, 25 bp, Homo sapien
catgtttctttgacctcttcagagc

SEQ ID NO: 2464191 - DNA, 25 bp, Homo sapien
gtgcctcttcatcgttccttgggcc

SEQ ID NO: 2464192 - DNA, 25 bp, Homo sapien
tcctttgaccagaaattgatgtctg

SEQ ID NO: 2464193 - DNA, 25 bp, Homo sapien
gtctgtgcctcttcatcgttccttg

SEQ ID NO: 2464194 - DNA, 25 bp, Homo sapien
ctgtgcctcttcatcgttccttggg

SEQ ID NO: 2464195 - DNA, 25 bp, Homo sapien
ttagaggactgctcatccaaatctg

SEQ ID NO: 2464196 - DNA, 25 bp, Homo sapien
agaggactgctcatccaaatctgct

SEQ ID NO: 2464197 - DNA, 25 bp, Homo sapien
tcttagaggactgctcatccaaatc

SEQ ID NO: 2464198 - DNA, 25 bp, Homo sapien
cctcttagaggactgctcatccaaa

SEQ ID NO: 2464199 - DNA, 25 bp, Homo sapien
aagaatctgcgggatgtgcactgtg

SEQ ID NO: 2464200 - DNA, 25 bp, Homo sapien
ctttaagaatctgcgggatgtgcac

SEQ ID NO: 2464201 - DNA, 25 bp, Homo sapien
tgtggaggggcctgtgtcttttgaa

SEQ ID NO: 2464202 - DNA, 25 bp, Homo sapien
gaactttaagaatctgcgggatgtg

SEQ ID NO: 2464203 - DNA, 25 bp, Homo sapien
gtgggaactggtgtagagtgagggt

SEQ ID NO: 2464204 - DNA, 25 bp, Homo sapien
gcaggtgggaactggtgtagagtga

SEQ ID NO: 2464205 - DNA, 25 bp, Homo sapien
aggtgggaactggtgtagagtgagg

SEQ ID NO: 2464206 - DNA, 25 bp, Homo sapien
caggtgggaactggtgtagagtgag

SEQ ID NO: 2464207 - DNA, 25 bp, Homo sapien
atgctggcgtggtgggtttgtctgg

SEQ ID NO: 2464208 - DNA, 25 bp, Homo sapien
tgctggcgtggtgggtttgtctggc

SEQ ID NO: 2464209 - DNA, 25 bp, Homo sapien
tggcgtggtgggtttgtctggctga

SEQ ID NO: 2464210 - DNA, 25 bp, Homo sapien
ctggcgtggtgggtttgtctggctg

SEQ ID NO: 2464211 - DNA, 25 bp, Homo sapien
cctcaagcccttcagtgtctgtagg

SEQ ID NO: 2464212 - DNA, 25 bp, Homo sapien
ttaggtctcatgcttctcagggctc

SEQ ID NO: 2464213 - DNA, 25 bp, Homo sapien
ccttcagtgtctgtaggcttctcac

SEQ ID NO: 2464214 - DNA, 25 bp, Homo sapien
aggtctcatgcttctcagggctccc

SEQ ID NO: 2464215 - DNA, 25 bp, Homo sapien
gctgctcctgagcttgcctctctgc

SEQ ID NO: 2464216 - DNA, 25 bp, Homo sapien
gctcctgagcttgcctctctgccct

SEQ ID NO: 2464217 - DNA, 25 bp, Homo sapien
ggctgctcctgagcttgcctctctg

SEQ ID NO: 2464218 - DNA, 25 bp, Homo sapien
tgctcctgagcttgcctctctgccc

SEQ ID NO: 2464219 - DNA, 25 bp, Homo sapien
cgtgtctgccgagcttgtctggagc

SEQ ID NO: 2464220 - DNA, 25 bp, Homo sapien
ttcgtgtctgccgagcttgtctgga

SEQ ID NO: 2464221 - DNA, 25 bp, Homo sapien
gaccttcgtgtctgccgagcttgtc

SEQ ID NO: 2464222 - DNA, 25 bp, Homo sapien
tgtctgccgagcttgtctggagcgt

SEQ ID NO: 2464223 - DNA, 25 bp, Homo sapien
aactctgcttccttatcctgtacag

SEQ ID NO: 2464224 - DNA, 25 bp, Homo sapien
aaaactctgcttccttatcctgtac

SEQ ID NO: 2464225 - DNA, 25 bp, Homo sapien
gtccttaaaactctgcttccttatc

SEQ ID NO: 2464226 - DNA, 25 bp, Homo sapien
cttaaaactctgcttccttatcctg

SEQ ID NO: 2464227 - DNA, 25 bp, Homo sapien
ttctaccgtggttccacccctcaga

SEQ ID NO: 2464228 - DNA, 25 bp, Homo sapien
cctgacagccagtttagcagcagcc

SEQ ID NO: 2464229 - DNA, 25 bp, Homo sapien
agcccaacaaccagttctaccgtgg

SEQ ID NO: 2464230 - DNA, 25 bp, Homo sapien
tagcttgccagctgaacctatgcac

SEQ ID NO: 2464231 - DNA, 25 bp, Homo sapien
tttctgagaagcattgcagccatcc

SEQ ID NO: 2464232 - DNA, 25 bp, Homo sapien
ttctgagaagcattgcagccatcca

SEQ ID NO: 2464233 - DNA, 25 bp, Homo sapien
ttgcagccatccatgaatctgaatg

SEQ ID NO: 2464234 - DNA, 25 bp, Homo sapien
tctgagaagcattgcagccatccat

SEQ ID NO: 2464235 - DNA, 25 bp, Homo sapien
aacgaatagccagaaaggtaagtgg

SEQ ID NO: 2464236 - DNA, 25 bp, Homo sapien
tggaaacgaatagccagaaaggtaa

SEQ ID NO: 2464237 - DNA, 25 bp, Homo sapien
cgtggaaacgaatagccagaaaggt

SEQ ID NO: 2464238 - DNA, 25 bp, Homo sapien
gatgcgtggaaacgaatagccagaa

SEQ ID NO: 2464239 - DNA, 25 bp, Homo sapien
ccttgagctaccctagttgctgcat

SEQ ID NO: 2464240 - DNA, 25 bp, Homo sapien
ttcatctgcccttgagctaccctag

SEQ ID NO: 2464241 - DNA, 25 bp, Homo sapien
gttgctgcatccatccaactgagct

SEQ ID NO: 2464242 - DNA, 25 bp, Homo sapien
aactgagctgtaaatactgcctcac

SEQ ID NO: 2464243 - DNA, 25 bp, Homo sapien
ctcaggcatagccagctggcaaatg

SEQ ID NO: 2464244 - DNA, 25 bp, Homo sapien
tctgtattacgaccagtagattcac

SEQ ID NO: 2464245 - DNA, 25 bp, Homo sapien
agattcacagactcgcctactctca

SEQ ID NO: 2464246 - DNA, 25 bp, Homo sapien
ggactctctgtattacgaccagtag

SEQ ID NO: 2464247 - DNA, 25 bp, Homo sapien
ctgtgttagcataggtggactctct

SEQ ID NO: 2464248 - DNA, 25 bp, Homo sapien
caactcctagaaatcggtctccagc

SEQ ID NO: 2464249 - DNA, 25 bp, Homo sapien
tgtaatcactaggatggcctccaat

SEQ ID NO: 2464250 - DNA, 25 bp, Homo sapien
ctcctagaaatcggtctccagctcc

SEQ ID NO: 2464251 - DNA, 25 bp, Homo sapien
aactcctagaaatcggtctccagct

SEQ ID NO: 2464252 - DNA, 25 bp, Homo sapien
aaagtatgcaaccaagccagtttcc

SEQ ID NO: 2464253 - DNA, 25 bp, Homo sapien
aatcaaagtatgcaaccaagccagt

SEQ ID NO: 2464254 - DNA, 25 bp, Homo sapien
accaaatcaaagtatgcaaccaagc

SEQ ID NO: 2464255 - DNA, 25 bp, Homo sapien
cttctccaaccataccaccaaatca

SEQ ID NO: 2464256 - DNA, 25 bp, Homo sapien
tccagtaatggagagcacaggagta

SEQ ID NO: 2464257 - DNA, 25 bp, Homo sapien
tggcttccacagaggaatctgttcc

SEQ ID NO: 2464258 - DNA, 25 bp, Homo sapien
gttccagtaatggagagcacaggag

SEQ ID NO: 2464259 - DNA, 25 bp, Homo sapien
ttccagtaatggagagcacaggagt

SEQ ID NO: 2464260 - DNA, 25 bp, Homo sapien
gagtcagcctgggatttgtgaggag

SEQ ID NO: 2464261 - DNA, 25 bp, Homo sapien
tgttgagtcagcctgggatttgtga

SEQ ID NO: 2464262 - DNA, 25 bp, Homo sapien
ttgagtcagcctgggatttgtgagg

SEQ ID NO: 2464263 - DNA, 25 bp, Homo sapien
gtcagcctgggatttgtgaggagtc

SEQ ID NO: 2464264 - DNA, 25 bp, Homo sapien
cagtctcagtatgcttagttctccc

SEQ ID NO: 2464265 - DNA, 25 bp, Homo sapien
gacaactgatactctacagtctcag

SEQ ID NO: 2464266 - DNA, 25 bp, Homo sapien
gtggtagtcctcagcctagatttga

SEQ ID NO: 2464267 - DNA, 25 bp, Homo sapien
ctgttccttaattcttggcagtggg

SEQ ID NO: 2464268 - DNA, 25 bp, Homo sapien
ttcttgacaaagagttgggagcaac

SEQ ID NO: 2464269 - DNA, 25 bp, Homo sapien
atgaatacaagatctttgtttcttg

SEQ ID NO: 2464270 - DNA, 25 bp, Homo sapien
atacaagatctttgtttcttgacaa

SEQ ID NO: 2464271 - DNA, 25 bp, Homo sapien
tttgtttcttgacaaagagttggga

SEQ ID NO: 2464272 - DNA, 25 bp, Homo sapien
aaaagctatcatttgtgatgtcaca

SEQ ID NO: 2464273 - DNA, 25 bp, Homo sapien
caaaaagctatcatttgtgatgtca

SEQ ID NO: 2464274 - DNA, 25 bp, Homo sapien
aaaaagctatcatttgtgatgtcac

SEQ ID NO: 2464275 - DNA, 25 bp, Homo sapien
tcttgggacttaggtgtctcctcct

SEQ ID NO: 2464276 - DNA, 25 bp, Homo sapien
ttcttaaagaacccactctgaatct

SEQ ID NO: 2464277 - DNA, 25 bp, Homo sapien
actttattccatgtctccttttcac

SEQ ID NO: 2464278 - DNA, 25 bp, Homo sapien
tcaatgactttattccatgtctcct

SEQ ID NO: 2464279 - DNA, 25 bp, Homo sapien
tgactttattccatgtctccttttc

SEQ ID NO: 2464280 - DNA, 25 bp, Homo sapien
aatgactttattccatgtctccttt

SEQ ID NO: 2464281 - DNA, 25 bp, Homo sapien
aaagggaagaagttgactattggtg

SEQ ID NO: 2464282 - DNA, 25 bp, Homo sapien
gactattggtgaaaaatcagcagta

SEQ ID NO: 2464283 - DNA, 25 bp, Homo sapien
ggaagaagttgactattggtgaaaa

SEQ ID NO: 2464284 - DNA, 25 bp, Homo sapien
gaagttgactattggtgaaaaatca

SEQ ID NO: 2464285 - DNA, 25 bp, Homo sapien
tgatcctgactgctcaacaaagaga

SEQ ID NO: 2464286 - DNA, 25 bp, Homo sapien
cagaatcttcactttaccataccag

SEQ ID NO: 2464287 - DNA, 25 bp, Homo sapien
tataatcaggaaggctgttgctgct

SEQ ID NO: 2464288 - DNA, 25 bp, Homo sapien
aaaatcctagtttcagtgatcctga

SEQ ID NO: 2464289 - DNA, 25 bp, Homo sapien
aaatgctccacgagaccctcatcag

SEQ ID NO: 2464290 - DNA, 25 bp, Homo sapien
ctccaaatgctccacgagaccctca

SEQ ID NO: 2464291 - DNA, 25 bp, Homo sapien
tccaaatgctccacgagaccctcat

SEQ ID NO: 2464292 - DNA, 25 bp, Homo sapien
caaatgctccacgagaccctcatca

SEQ ID NO: 2464293 - DNA, 25 bp, Homo sapien
cagccatcataatcctgaacattga

SEQ ID NO: 2464294 - DNA, 25 bp, Homo sapien
ggagtccagccatcataatcctgaa

SEQ ID NO: 2464295 - DNA, 25 bp, Homo sapien
gaggggagtccagccatcataatcc

SEQ ID NO: 2464296 - DNA, 25 bp, Homo sapien
catcataatcctgaacattgagttc

SEQ ID NO: 2464297 - DNA, 25 bp, Homo sapien
tgaggacttcagagtagcccttggc

SEQ ID NO: 2464298 - DNA, 25 bp, Homo sapien
aggacttcagagtagcccttggcag

SEQ ID NO: 2464299 - DNA, 25 bp, Homo sapien
ctgaggacttcagagtagcccttgg

SEQ ID NO: 2464300 - DNA, 25 bp, Homo sapien
gaggacttcagagtagcccttggca

SEQ ID NO: 2464301 - DNA, 25 bp, Homo sapien
agaaaccagacaccagatagccagg

SEQ ID NO: 2464302 - DNA, 25 bp, Homo sapien
gccaggattactaaagctccactta

SEQ ID NO: 2464303 - DNA, 25 bp, Homo sapien
caggattactaaagctccacttaag

SEQ ID NO: 2464304 - DNA, 25 bp, Homo sapien
cagacaccagatagccaggattact

SEQ ID NO: 2464305 - DNA, 25 bp, Homo sapien
actaaaatcagagcagaactgaagg

SEQ ID NO: 2464306 - DNA, 25 bp, Homo sapien
aaaagctagcagaaggcaagaaata

SEQ ID NO: 2464307 - DNA, 25 bp, Homo sapien
tgaaggaaatagaggcacaaaaaac

SEQ ID NO: 2464308 - DNA, 25 bp, Homo sapien
tagaaaagcaagagcaaacacattc

SEQ ID NO: 2464309 - DNA, 25 bp, Homo sapien
ccagaagaagatccttcatggctgg

SEQ ID NO: 2464310 - DNA, 25 bp, Homo sapien
gaagaagatccttcatggctggctc

SEQ ID NO: 2464311 - DNA, 25 bp, Homo sapien
cagaagaagatccttcatggctggc

SEQ ID NO: 2464312 - DNA, 25 bp, Homo sapien
cactggctccgtgattaatgaaata

SEQ ID NO: 2464313 - DNA, 25 bp, Homo sapien
tctgctatgttgagatagccacaga

SEQ ID NO: 2464314 - DNA, 25 bp, Homo sapien
ctatgttgagatagccacagaaagc

SEQ ID NO: 2464315 - DNA, 25 bp, Homo sapien
tttgtcttgctggtttacattggct

SEQ ID NO: 2464316 - DNA, 25 bp, Homo sapien
gctggtttacattggctctcttctc

SEQ ID NO: 2464317 - DNA, 25 bp, Homo sapien
tctgacttttatagccagtattcat

SEQ ID NO: 2464318 - DNA, 25 bp, Homo sapien
ggccaatctgacttttatagccagt

SEQ ID NO: 2464319 - DNA, 25 bp, Homo sapien
aatctgacttttatagccagtattc

SEQ ID NO: 2464320 - DNA, 25 bp, Homo sapien
ccaatctgacttttatagccagtat

SEQ ID NO: 2464321 - DNA, 25 bp, Homo sapien
ctttagaggtgtctgaaatagagtt

SEQ ID NO: 2464322 - DNA, 25 bp, Homo sapien
cactttagaggtgtctgaaatagag

SEQ ID NO: 2464323 - DNA, 25 bp, Homo sapien
tttagaggtgtctgaaatagagttc

SEQ ID NO: 2464324 - DNA, 25 bp, Homo sapien
tagaggtgtctgaaatagagttcat

SEQ ID NO: 2464325 - DNA, 25 bp, Homo sapien
tcccatgctcattaatacaaaagaa

SEQ ID NO: 2464326 - DNA, 25 bp, Homo sapien
cccatgctcattaatacaaaagaac

SEQ ID NO: 2464327 - DNA, 25 bp, Homo sapien
ctcccatgctcattaatacaaaaga

SEQ ID NO: 2464328 - DNA, 25 bp, Homo sapien
gggccgttatggtgcacgtgctcgc

SEQ ID NO: 2464329 - DNA, 25 bp, Homo sapien
gctcgctggtcctaatggttctctt

SEQ ID NO: 2464330 - DNA, 25 bp, Homo sapien
ccccagaaggcgagctgagaaatac

SEQ ID NO: 2464331 - DNA, 25 bp, Homo sapien
ttcagaggcggtgatccccagaagg

SEQ ID NO: 2464332 - DNA, 25 bp, Homo sapien
gaactaccttctgtcgacgtatcat

SEQ ID NO: 2464333 - DNA, 25 bp, Homo sapien
cctctatggtagtctgcagaaactg

SEQ ID NO: 2464334 - DNA, 25 bp, Homo sapien
acagagctgtcctctatggtagtct

SEQ ID NO: 2464335 - DNA, 25 bp, Homo sapien
aaactgaactaccttctgtcgacgt

SEQ ID NO: 2464336 - DNA, 25 bp, Homo sapien
cattgattcccaagtgtatgagctg

SEQ ID NO: 2464337 - DNA, 25 bp, Homo sapien
cacatttgtcctcatcactcggcat

SEQ ID NO: 2464338 - DNA, 25 bp, Homo sapien
ctgcttcgacattgattcccaagtg

SEQ ID NO: 2464339 - DNA, 25 bp, Homo sapien
ttcccaagtgtatgagctgctgctc

SEQ ID NO: 2464340 - DNA, 25 bp, Homo sapien
ctactctgcctgttctgaagaagca

SEQ ID NO: 2464341 - DNA, 25 bp, Homo sapien
cctggccaaaatattggtctcttaa

SEQ ID NO: 2464342 - DNA, 25 bp, Homo sapien
tgctccctgaactgttaatacccat

SEQ ID NO: 2464343 - DNA, 25 bp, Homo sapien
cttgagttcaggtgtgtctgtagta

SEQ ID NO: 2464344 - DNA, 25 bp, Homo sapien
gaaggaggaagtagctcatacttgg

SEQ ID NO: 2464345 - DNA, 25 bp, Homo sapien
caaactagaatatgagtgatggtgg

SEQ ID NO: 2464346 - DNA, 25 bp, Homo sapien
cagctgctggaatatgcttgtggtt

SEQ ID NO: 2464347 - DNA, 25 bp, Homo sapien
catacttggaggaacaaacagctgc

SEQ ID NO: 2464348 - DNA, 25 bp, Homo sapien
gacagtaagtcctcaaggcatcagc

SEQ ID NO: 2464349 - DNA, 25 bp, Homo sapien
ctctgcaggacccataacctggatg

SEQ ID NO: 2464350 - DNA, 25 bp, Homo sapien
aggggtaagtattccaagctctctg

SEQ ID NO: 2464351 - DNA, 25 bp, Homo sapien
gacccataacctggatgtggacacc

SEQ ID NO: 2464352 - DNA, 25 bp, Homo sapien
cccagaaatccagctctgctttggg

SEQ ID NO: 2464353 - DNA, 25 bp, Homo sapien
tgccccagttcatgtccaaagatgt

SEQ ID NO: 2464354 - DNA, 25 bp, Homo sapien
cagaaatccagctctgctttgggtt

SEQ ID NO: 2464355 - DNA, 25 bp, Homo sapien
tttgggttgccccagttcatgtcca

SEQ ID NO: 2464356 - DNA, 25 bp, Homo sapien
caggaactagccattgatatagaaa

SEQ ID NO: 2464357 - DNA, 25 bp, Homo sapien
ttatttcctaccaaggatgaccagg

SEQ ID NO: 2464358 - DNA, 25 bp, Homo sapien
ggatgaccaggaactagccattgat

SEQ ID NO: 2464359 - DNA, 25 bp, Homo sapien
acttgtttatttcctaccaaggatg

SEQ ID NO: 2464360 - DNA, 25 bp, Homo sapien
ggtggaggtgtcttcgtatcgtatc

SEQ ID NO: 2464361 - DNA, 25 bp, Homo sapien
cttggtggaggtgtcttcgtatcgt

SEQ ID NO: 2464362 - DNA, 25 bp, Homo sapien
tcgtatcgtatcattttctcacctt

SEQ ID NO: 2464363 - DNA, 25 bp, Homo sapien
ggtgtcttcgtatcgtatcattttc

SEQ ID NO: 2464364 - DNA, 25 bp, Homo sapien
cttcctggtatattcgtaggccaaa

SEQ ID NO: 2464365 - DNA, 25 bp, Homo sapien
tccattgtcagggaatgctcgaatc

SEQ ID NO: 2464366 - DNA, 25 bp, Homo sapien
caacttcctggtatattcgtaggcc

SEQ ID NO: 2464367 - DNA, 25 bp, Homo sapien
catcaacttcctggtatattcgtag

SEQ ID NO: 2464368 - DNA, 25 bp, Homo sapien
ctgttttccagatatggaaagaact

SEQ ID NO: 2464369 - DNA, 25 bp, Homo sapien
tataaaggttctgataaatcctgcc

SEQ ID NO: 2464370 - DNA, 25 bp, Homo sapien
tgaattctggatttgttacaatcca

SEQ ID NO: 2464371 - DNA, 25 bp, Homo sapien
gaaagaacttgaattctggatttgt

SEQ ID NO: 2464372 - DNA, 25 bp, Homo sapien
ccagaggcaaatcccgccaactccc

SEQ ID NO: 2464373 - DNA, 25 bp, Homo sapien
ggcaaatcccgccaactccctccac

SEQ ID NO: 2464374 - DNA, 25 bp, Homo sapien
tggatataccgcaagccagaggcaa

SEQ ID NO: 2464375 - DNA, 25 bp, Homo sapien
ctggatataccgcaagccagaggca

SEQ ID NO: 2464376 - DNA, 25 bp, Homo sapien
atggattcatcccacatgtaaagct

SEQ ID NO: 2464377 - DNA, 25 bp, Homo sapien
cctgactcagaaggtgttagcaata

SEQ ID NO: 2464378 - DNA, 25 bp, Homo sapien
tggattcatcccacatgtaaagctc

SEQ ID NO: 2464379 - DNA, 25 bp, Homo sapien
cagtgtggtcactttggcctctaca

SEQ ID NO: 2464380 - DNA, 25 bp, Homo sapien
gtcactttggcctctacaggtggaa

SEQ ID NO: 2464381 - DNA, 25 bp, Homo sapien
ctgcagtgtggtcactttggcctct

SEQ ID NO: 2464382 - DNA, 25 bp, Homo sapien
ggcctctacaggtggaagtcttcat

SEQ ID NO: 2464383 - DNA, 25 bp, Homo sapien
ggcagatagatgggtactgtccttc

SEQ ID NO: 2464384 - DNA, 25 bp, Homo sapien
gggcagatagatgggtactgtcctt

SEQ ID NO: 2464385 - DNA, 25 bp, Homo sapien
gcagatagatgggtactgtccttca

SEQ ID NO: 2464386 - DNA, 25 bp, Homo sapien
tgggcagatagatgggtactgtcct

SEQ ID NO: 2464387 - DNA, 25 bp, Homo sapien
agcagagggatgataagacccaaaa

SEQ ID NO: 2464388 - DNA, 25 bp, Homo sapien
gcagagggatgataagacccaaaac

SEQ ID NO: 2464389 - DNA, 25 bp, Homo sapien
gaatccagctcagggtaggtgccag

SEQ ID NO: 2464390 - DNA, 25 bp, Homo sapien
gcagactgtgtggagctcaatgagc

SEQ ID NO: 2464391 - DNA, 25 bp, Homo sapien
tagaaggcctggtcgtacggcctcc

SEQ ID NO: 2464392 - DNA, 25 bp, Homo sapien
gagcaatgccacagtagggtgcaga

SEQ ID NO: 2464393 - DNA, 25 bp, Homo sapien
ccttggctgaattgagatgcatcaa

SEQ ID NO: 2464394 - DNA, 25 bp, Homo sapien
ttggctgaattgagatgcatcaaac

SEQ ID NO: 2464395 - DNA, 25 bp, Homo sapien
cagggccttggctgaattgagatgc

SEQ ID NO: 2464396 - DNA, 25 bp, Homo sapien
ggccttggctgaattgagatgcatc

SEQ ID NO: 2464397 - DNA, 25 bp, Homo sapien
acacctaagccatcctcttcaaaat

SEQ ID NO: 2464398 - DNA, 25 bp, Homo sapien
gtagtacacctaagccatcctcttc

SEQ ID NO: 2464399 - DNA, 25 bp, Homo sapien
gtacacctaagccatcctcttcaaa

SEQ ID NO: 2464400 - DNA, 25 bp, Homo sapien
acctaagccatcctcttcaaaatct

SEQ ID NO: 2464401 - DNA, 25 bp, Homo sapien
gttcagaaacttttggaatatcagg

SEQ ID NO: 2464402 - DNA, 25 bp, Homo sapien
ccctgccagctcatgtagggcagga

SEQ ID NO: 2464403 - DNA, 25 bp, Homo sapien
gggcaggaagtctacatcttctttg

SEQ ID NO: 2464404 - DNA, 25 bp, Homo sapien
ccagctcatgtagggcaggaagtct

SEQ ID NO: 2464405 - DNA, 25 bp, Homo sapien
agctcgggttgccagcttgtcaatc

SEQ ID NO: 2464406 - DNA, 25 bp, Homo sapien
tagagctcgggttgccagcttgtca

SEQ ID NO: 2464407 - DNA, 25 bp, Homo sapien
tctctgattagagctcgggttgcca

SEQ ID NO: 2464408 - DNA, 25 bp, Homo sapien
ttgtaatctctgattagagctcggg

SEQ ID NO: 2464409 - DNA, 25 bp, Homo sapien
gattggtaaggtcgtcaccaaactc

SEQ ID NO: 2464410 - DNA, 25 bp, Homo sapien
tgattggtaaggtcgtcaccaaact

SEQ ID NO: 2464411 - DNA, 25 bp, Homo sapien
tcaatgattggtaaggtcgtcacca

SEQ ID NO: 2464412 - DNA, 25 bp, Homo sapien
aatgattggtaaggtcgtcaccaaa

SEQ ID NO: 2464413 - DNA, 25 bp, Homo sapien
ggaagcgcagaactctcagcatgag

SEQ ID NO: 2464414 - DNA, 25 bp, Homo sapien
gaagcgcagaactctcagcatgaga

SEQ ID NO: 2464415 - DNA, 25 bp, Homo sapien
tggaagcgcagaactctcagcatga

SEQ ID NO: 2464416 - DNA, 25 bp, Homo sapien
ggtaaatggtgcaagcagtggcaat

SEQ ID NO: 2464417 - DNA, 25 bp, Homo sapien
tgggcaccgcgctgcggaccccact

SEQ ID NO: 2464418 - DNA, 25 bp, Homo sapien
ccgctgcccctgcgaaaggaaaggc

SEQ ID NO: 2464419 - DNA, 25 bp, Homo sapien
tgcccctgcgaaaggaaaggcggcc

SEQ ID NO: 2464420 - DNA, 25 bp, Homo sapien
ctgggcaccgcgctgcggaccccac

SEQ ID NO: 2464421 - DNA, 25 bp, Homo sapien
aaatattcaaatactccggcactac

SEQ ID NO: 2464422 - DNA, 25 bp, Homo sapien
tccggcactacactgggaaaaaatc

SEQ ID NO: 2464423 - DNA, 25 bp, Homo sapien
ctcttttctccaactatgtttggat

SEQ ID NO: 2464424 - DNA, 25 bp, Homo sapien
gaaaaaatccttaggatgtgacgat

SEQ ID NO: 2464425 - DNA, 25 bp, Homo sapien
cttttcctctcctgtatgcacgcag

SEQ ID NO: 2464426 - DNA, 25 bp, Homo sapien
tcctctcctgtatgcacgcagcatg

SEQ ID NO: 2464427 - DNA, 25 bp, Homo sapien
tttcctctcctgtatgcacgcagca

SEQ ID NO: 2464428 - DNA, 25 bp, Homo sapien
tcagcttctaggatgaaattcgtat

SEQ ID NO: 2464429 - DNA, 25 bp, Homo sapien
cactgctcctcggtactctgactgg

SEQ ID NO: 2464430 - DNA, 25 bp, Homo sapien
gtcactgctcctcggtactctgact

SEQ ID NO: 2464431 - DNA, 25 bp, Homo sapien
ctgctcctcggtactctgactgggc

SEQ ID NO: 2464432 - DNA, 25 bp, Homo sapien
actgctcctcggtactctgactggg

SEQ ID NO: 2464433 - DNA, 25 bp, Homo sapien
cccactgatgaccttcaaagcaaca

SEQ ID NO: 2464434 - DNA, 25 bp, Homo sapien
ccactgatgaccttcaaagcaacac

SEQ ID NO: 2464435 - DNA, 25 bp, Homo sapien
cactgatgaccttcaaagcaacaca

SEQ ID NO: 2464436 - DNA, 25 bp, Homo sapien
actgatgaccttcaaagcaacacac

SEQ ID NO: 2464437 - DNA, 25 bp, Homo sapien
gaaagatatattttgcctcaatggg

SEQ ID NO: 2464438 - DNA, 25 bp, Homo sapien
ggaaagatatattttgcctcaatgg

SEQ ID NO: 2464439 - DNA, 25 bp, Homo sapien
tcatgttctgagctttgatgcctcc

SEQ ID NO: 2464440 - DNA, 25 bp, Homo sapien
ctgaattagcagaggcaatatagct

SEQ ID NO: 2464441 - DNA, 25 bp, Homo sapien
cctttcatgttctgagctttgatgc

SEQ ID NO: 2464442 - DNA, 25 bp, Homo sapien
tagctgttgttaagacagctggaaa

SEQ ID NO: 2464443 - DNA, 25 bp, Homo sapien
gctgccttgaggatgtgcgtatggg

SEQ ID NO: 2464444 - DNA, 25 bp, Homo sapien
cctttcaaattctatgatgttgctc

SEQ ID NO: 2464445 - DNA, 25 bp, Homo sapien
gggtggaggtcagctgtatccaaac

SEQ ID NO: 2464446 - DNA, 25 bp, Homo sapien
aggatgtgcgtatgggtaagagtgg

SEQ ID NO: 2464447 - DNA, 25 bp, Homo sapien
aatggaatggaacagagtggagtgg

SEQ ID NO: 2464448 - DNA, 25 bp, Homo sapien
tggaatggaatggaacagagtggag

SEQ ID NO: 2464449 - DNA, 25 bp, Homo sapien
ggaatggaacagagtggagtggagt

SEQ ID NO: 2464450 - DNA, 25 bp, Homo sapien
gaatggaatggaacagagtggagtg

SEQ ID NO: 2464451 - DNA, 25 bp, Homo sapien
ggaatggaatgcaatggagtggagt

SEQ ID NO: 2464452 - DNA, 25 bp, Homo sapien
tggaatggaatgcaatggagtggag

SEQ ID NO: 2464453 - DNA, 25 bp, Homo sapien
agtggaatggagtagagtggaattg

SEQ ID NO: 2464454 - DNA, 25 bp, Homo sapien
gaatgaactagagtggagtggaatg

SEQ ID NO: 2464455 - DNA, 25 bp, Homo sapien
gtgaagtggagtggaatgaactaga

SEQ ID NO: 2464456 - DNA, 25 bp, Homo sapien
gtggaatggagtagagtggaattga

SEQ ID NO: 2464457 - DNA, 25 bp, Homo sapien
ggaatggagtgaagtggaatggagt

SEQ ID NO: 2464458 - DNA, 25 bp, Homo sapien
aatggagtgaagtggaatggagtgg

SEQ ID NO: 2464459 - DNA, 25 bp, Homo sapien
gtggaatggagtgaagtggaatgga

SEQ ID NO: 2464460 - DNA, 25 bp, Homo sapien
tggagtgaagtggaatggagtggaa

SEQ ID NO: 2464461 - DNA, 25 bp, Homo sapien
ggaatggagtggaatggagtggatt

SEQ ID NO: 2464462 - DNA, 25 bp, Homo sapien
gagtcaattcctttcgacacccagc

SEQ ID NO: 2464463 - DNA, 25 bp, Homo sapien
tagttcgattctattcacttccatt

SEQ ID NO: 2464464 - DNA, 25 bp, Homo sapien
tggagtcaattcctttcgacaccca

SEQ ID NO: 2464465 - DNA, 25 bp, Homo sapien
ccattccattcgatttagttcgatt

SEQ ID NO: 2464466 - DNA, 25 bp, Homo sapien
ctgcatacaatttcactccattcgt

SEQ ID NO: 2464467 - DNA, 25 bp, Homo sapien
tgcatacaatttcactccattcgtt

SEQ ID NO: 2464468 - DNA, 25 bp, Homo sapien
catacaatttcactccattcgttcc

SEQ ID NO: 2464469 - DNA, 25 bp, Homo sapien
acaatttcactccattcgttcccat

SEQ ID NO: 2464470 - DNA, 25 bp, Homo sapien
gtagcattccactttattccaggcc

SEQ ID NO: 2464471 - DNA, 25 bp, Homo sapien
tttttattccattcgagaccgtagc

SEQ ID NO: 2464472 - DNA, 25 bp, Homo sapien
tattccaggcctgtccattacacta

SEQ ID NO: 2464473 - DNA, 25 bp, Homo sapien
ttcgattccgtttcattgcattcca

SEQ ID NO: 2464474 - DNA, 25 bp, Homo sapien
tccatgccatttgattgcattgcat

SEQ ID NO: 2464475 - DNA, 25 bp, Homo sapien
catgccatttgattgcattgcattc

SEQ ID NO: 2464476 - DNA, 25 bp, Homo sapien
ttccatgccatttgattgcattgca

SEQ ID NO: 2464477 - DNA, 25 bp, Homo sapien
atgccatttgattgcattgcattcc

SEQ ID NO: 2464478 - DNA, 25 bp, Homo sapien
gtagcattccactttattccaggcc

SEQ ID NO: 2464479 - DNA, 25 bp, Homo sapien
tattccaggcctgtccattacacta

SEQ ID NO: 2464480 - DNA, 25 bp, Homo sapien
tttttattccattcgagaccgtagc

SEQ ID NO: 2464481 - DNA, 25 bp, Homo sapien
tcgattccgtttcattgcattccat

SEQ ID NO: 2464482 - DNA, 25 bp, Homo sapien
gtagcattccactttattccaggcc

SEQ ID NO: 2464483 - DNA, 25 bp, Homo sapien
tttttattccattcgagaccgtagc

SEQ ID NO: 2464484 - DNA, 25 bp, Homo sapien
tattccaggcctgtccattacacta

SEQ ID NO: 2464485 - DNA, 25 bp, Homo sapien
tcgattccgtttcattgcattccat

SEQ ID NO: 2464486 - DNA, 25 bp, Homo sapien
tccagtccattatattcgagtccac

SEQ ID NO: 2464487 - DNA, 25 bp, Homo sapien
caattccttttgagtccgttccata

SEQ ID NO: 2464488 - DNA, 25 bp, Homo sapien
gattccattccgtgaaatttcgttc

SEQ ID NO: 2464489 - DNA, 25 bp, Homo sapien
taatttgagcattcgtgtccattct

SEQ ID NO: 2464490 - DNA, 25 bp, Homo sapien
tttttattccattcgagaccgtagc

SEQ ID NO: 2464491 - DNA, 25 bp, Homo sapien
gtagcattccactttattccaggcc

SEQ ID NO: 2464492 - DNA, 25 bp, Homo sapien
ttcgattccgtttcattgcattcca

SEQ ID NO: 2464493 - DNA, 25 bp, Homo sapien
tattccaggcctgtccattacacta

SEQ ID NO: 2464494 - DNA, 25 bp, Homo sapien
gtagcattccactttattccaggcc

SEQ ID NO: 2464495 - DNA, 25 bp, Homo sapien
tttttattccattcgagaccgtagc

SEQ ID NO: 2464496 - DNA, 25 bp, Homo sapien
tattccaggcctgtccattacacta

SEQ ID NO: 2464497 - DNA, 25 bp, Homo sapien
ttcgattccgtttcattgcattcca

SEQ ID NO: 2464498 - DNA, 25 bp, Homo sapien
ttcgattccgtttcattgcattcca

SEQ ID NO: 2464499 - DNA, 25 bp, Homo sapien
tattccaggcctgtccattacacta

SEQ ID NO: 2464500 - DNA, 25 bp, Homo sapien
tttttattccattcgagaccgtagc

SEQ ID NO: 2464501 - DNA, 25 bp, Homo sapien
gtagcattccactttattccaggcc

SEQ ID NO: 2464502 - DNA, 25 bp, Homo sapien
ccattccattcgatttagttcgatt

SEQ ID NO: 2464503 - DNA, 25 bp, Homo sapien
tagttcgattctattcacttccatt

SEQ ID NO: 2464504 - DNA, 25 bp, Homo sapien
tggagtcaattcctttcgacaccca

SEQ ID NO: 2464505 - DNA, 25 bp, Homo sapien
gagtcaattcctttcgacacccagc

SEQ ID NO: 2464506 - DNA, 25 bp, Homo sapien
gcattccgtttccaatctattcgag

SEQ ID NO: 2464507 - DNA, 25 bp, Homo sapien
tccgtttgattccagtccatccaag

SEQ ID NO: 2464508 - DNA, 25 bp, Homo sapien
ttcgattacattccttttgattccc

SEQ ID NO: 2464509 - DNA, 25 bp, Homo sapien
tacagtccattccaatagattccat

SEQ ID NO: 2464510 - DNA, 25 bp, Homo sapien
gagtcaattcctttcgacacccagc

SEQ ID NO: 2464511 - DNA, 25 bp, Homo sapien
tagttcgattctattcacttccatt

SEQ ID NO: 2464512 - DNA, 25 bp, Homo sapien
tggagtcaattcctttcgacaccca

SEQ ID NO: 2464513 - DNA, 25 bp, Homo sapien
ccattccattcgatttagttcgatt

SEQ ID NO: 2464514 - DNA, 25 bp, Homo sapien
gtagcattccactttattccaggcc

SEQ ID NO: 2464515 - DNA, 25 bp, Homo sapien
tttttattccattcgagaccgtagc

SEQ ID NO: 2464516 - DNA, 25 bp, Homo sapien
tattccaggcctgtccattacacta

SEQ ID NO: 2464517 - DNA, 25 bp, Homo sapien
tcgattccgtttcattgcattccat

SEQ ID NO: 2464518 - DNA, 25 bp, Homo sapien
tccatgccatttgattgcattgcat

SEQ ID NO: 2464519 - DNA, 25 bp, Homo sapien
catgccatttgattgcattgcattc

SEQ ID NO: 2464520 - DNA, 25 bp, Homo sapien
ttccatgccatttgattgcattgca

SEQ ID NO: 2464521 - DNA, 25 bp, Homo sapien
atgccatttgattgcattgcattcc

SEQ ID NO: 2464522 - DNA, 25 bp, Homo sapien
ccattccattcgatttagttcgatt

SEQ ID NO: 2464523 - DNA, 25 bp, Homo sapien
tagttcgattctattcacttccatt

SEQ ID NO: 2464524 - DNA, 25 bp, Homo sapien
gagtcaattcctttcgacacccagc

SEQ ID NO: 2464525 - DNA, 25 bp, Homo sapien
tggagtcaattcctttcgacaccca

SEQ ID NO: 2464526 - DNA, 25 bp, Homo sapien
ctgcatacaatttcactccattcgt

SEQ ID NO: 2464527 - DNA, 25 bp, Homo sapien
catacaatttcactccattcgttcc

SEQ ID NO: 2464528 - DNA, 25 bp, Homo sapien
acaatttcactccattcgttcccat

SEQ ID NO: 2464529 - DNA, 25 bp, Homo sapien
tgcatacaatttcactccattcgtt

SEQ ID NO: 2464530 - DNA, 25 bp, Homo sapien
tccgtttgattccagtccatccaag

SEQ ID NO: 2464531 - DNA, 25 bp, Homo sapien
gcattccgtttccaatctattcgag

SEQ ID NO: 2464532 - DNA, 25 bp, Homo sapien
ttcgattacattccttttgattccc

SEQ ID NO: 2464533 - DNA, 25 bp, Homo sapien
tacagtccattccaatagattccat

SEQ ID NO: 2464534 - DNA, 25 bp, Homo sapien
gtagcattccactttattccaggcc

SEQ ID NO: 2464535 - DNA, 25 bp, Homo sapien
tttttattccattcgagaccgtagc

SEQ ID NO: 2464536 - DNA, 25 bp, Homo sapien
tattccaggcctgtccattacacta

SEQ ID NO: 2464537 - DNA, 25 bp, Homo sapien
tcgattccgtttcattgcattccat

SEQ ID NO: 2464538 - DNA, 25 bp, Homo sapien
tttttattccattcgagaccgtagc

SEQ ID NO: 2464539 - DNA, 25 bp, Homo sapien
gtagcattccactttattccaggcc

SEQ ID NO: 2464540 - DNA, 25 bp, Homo sapien
tattccaggcctgtccattacacta

SEQ ID NO: 2464541 - DNA, 25 bp, Homo sapien
tcgattccgtttcattgcattccat

SEQ ID NO: 2464542 - DNA, 25 bp, Homo sapien
gcattccgtttccaatctattcgag

SEQ ID NO: 2464543 - DNA, 25 bp, Homo sapien
tccgtttgattccagtccatccaag

SEQ ID NO: 2464544 - DNA, 25 bp, Homo sapien
ttcgattacattccttttgattccc

SEQ ID NO: 2464545 - DNA, 25 bp, Homo sapien
tacagtccattccaatagattccat

SEQ ID NO: 2464546 - DNA, 25 bp, Homo sapien
gagtcaattcctttcgacacccagc

SEQ ID NO: 2464547 - DNA, 25 bp, Homo sapien
tagttcgattctattcacttccatt

SEQ ID NO: 2464548 - DNA, 25 bp, Homo sapien
tggagtcaattcctttcgacaccca

SEQ ID NO: 2464549 - DNA, 25 bp, Homo sapien
ccattccattcgatttagttcgatt

SEQ ID NO: 2464550 - DNA, 25 bp, Homo sapien
gagtcaattcctttcgacacccagc

SEQ ID NO: 2464551 - DNA, 25 bp, Homo sapien
tagttcgattctattcacttccatt

SEQ ID NO: 2464552 - DNA, 25 bp, Homo sapien
ccattccattcgatttagttcgatt

SEQ ID NO: 2464553 - DNA, 25 bp, Homo sapien
tggagtcaattcctttcgacaccca

SEQ ID NO: 2464554 - DNA, 25 bp, Homo sapien
gtagcattccactttattccaggcc

SEQ ID NO: 2464555 - DNA, 25 bp, Homo sapien
tcgattccgtttcattgcattccat

SEQ ID NO: 2464556 - DNA, 25 bp, Homo sapien
tattccaggcctgtccattacacta

SEQ ID NO: 2464557 - DNA, 25 bp, Homo sapien
tttttattccattcgagaccgtagc

SEQ ID NO: 2464558 - DNA, 25 bp, Homo sapien
tccagtccattatattcgagtccac

SEQ ID NO: 2464559 - DNA, 25 bp, Homo sapien
gattccattccgtgaaatttcgttc

SEQ ID NO: 2464560 - DNA, 25 bp, Homo sapien
caattccttttgagtccgttccata

SEQ ID NO: 2464561 - DNA, 25 bp, Homo sapien
taatttgagcattcgtgtccattct

SEQ ID NO: 2464562 - DNA, 25 bp, Homo sapien
gcattccgtttccaatctattcgag

SEQ ID NO: 2464563 - DNA, 25 bp, Homo sapien
ttcgattacattccttttgattccc

SEQ ID NO: 2464564 - DNA, 25 bp, Homo sapien
ccctgccagtcgattgcattgcata

SEQ ID NO: 2464565 - DNA, 25 bp, Homo sapien
tacagtccattccaatagattccat

SEQ ID NO: 2464566 - DNA, 25 bp, Homo sapien
gtagcattccactttattccaggcc

SEQ ID NO: 2464567 - DNA, 25 bp, Homo sapien
tcgattccgtttcattgcattccat

SEQ ID NO: 2464568 - DNA, 25 bp, Homo sapien
tattccaggcctgtccattacacta

SEQ ID NO: 2464569 - DNA, 25 bp, Homo sapien
tttttattccattcgagaccgtagc

SEQ ID NO: 2464570 - DNA, 25 bp, Homo sapien
tacagtccattccaatagattccat

SEQ ID NO: 2464571 - DNA, 25 bp, Homo sapien
gcattccgtttccaatctattcgag

SEQ ID NO: 2464572 - DNA, 25 bp, Homo sapien
tccgtttgattccagtccatccaag

SEQ ID NO: 2464573 - DNA, 25 bp, Homo sapien
ttcgattacattccttttgattccc

SEQ ID NO: 2464574 - DNA, 25 bp, Homo sapien
gtagcattccactttattccaggcc

SEQ ID NO: 2464575 - DNA, 25 bp, Homo sapien
tttttattccattcgagaccgtagc

SEQ ID NO: 2464576 - DNA, 25 bp, Homo sapien
ttcgattccgtttcattgcattcca

SEQ ID NO: 2464577 - DNA, 25 bp, Homo sapien
tattccaggcctgtccattacacta

SEQ ID NO: 2464578 - DNA, 25 bp, Homo sapien
aatccattcgagtacattccattaa

SEQ ID NO: 2464579 - DNA, 25 bp, Homo sapien
aacattccattccagtcgaatccat

SEQ ID NO: 2464580 - DNA, 25 bp, Homo sapien
tccgtacgattccattccttttgaa

SEQ ID NO: 2464581 - DNA, 25 bp, Homo sapien
ttaaagttcattacattctaataca

SEQ ID NO: 2464582 - DNA, 25 bp, Homo sapien
tccagaccattccatttgactccat

SEQ ID NO: 2464583 - DNA, 25 bp, Homo sapien
tcctttcgagccctttcaatttgag

SEQ ID NO: 2464584 - DNA, 25 bp, Homo sapien
gcattacattcgtgttcattccatt

SEQ ID NO: 2464585 - DNA, 25 bp, Homo sapien
tccagtccattactatccattccat

SEQ ID NO: 2464586 - DNA, 25 bp, Homo sapien
gaagttatctgtaatcaagttgcca

SEQ ID NO: 2464587 - DNA, 25 bp, Homo sapien
ggaaacagctgtggcaaacgagcct

SEQ ID NO: 2464588 - DNA, 25 bp, Homo sapien
tgtttcataaacacgccctcgttcc

SEQ ID NO: 2464589 - DNA, 25 bp, Homo sapien
caggactcacgacagctgtctgttt

SEQ ID NO: 2464590 - DNA, 25 bp, Homo sapien
gctttgggaaagacacggcttcaac

SEQ ID NO: 2464591 - DNA, 25 bp, Homo sapien
catctggagaccatgtttggtgaac

SEQ ID NO: 2464592 - DNA, 25 bp, Homo sapien
tctggttggctagttcagaatagac

SEQ ID NO: 2464593 - DNA, 25 bp, Homo sapien
ggtgatgttggtatgcacaaacccc

SEQ ID NO: 2464594 - DNA, 25 bp, Homo sapien
aataagtagagacttacacctgcca

SEQ ID NO: 2464595 - DNA, 25 bp, Homo sapien
gcagatactatcttatatcccatga

SEQ ID NO: 2464596 - DNA, 25 bp, Homo sapien
gaggcctgcagatactatcttatat

SEQ ID NO: 2464597 - DNA, 25 bp, Homo sapien
ttaataagtagagacttacacctgc

SEQ ID NO: 2464598 - DNA, 25 bp, Homo sapien
taattttacagtatggtggcaggaa

SEQ ID NO: 2464599 - DNA, 25 bp, Homo sapien
gttcactggctatagctattaaact

SEQ ID NO: 2464600 - DNA, 25 bp, Homo sapien
ggctatagctattaaactatgagga

SEQ ID NO: 2464601 - DNA, 25 bp, Homo sapien
tatgcagtatcccaaatatcagtgc

SEQ ID NO: 2464602 - DNA, 25 bp, Homo sapien
tattgggaatcagggccaaagaaca

SEQ ID NO: 2464603 - DNA, 25 bp, Homo sapien
caaagaacagggcaatacctcatgg

SEQ ID NO: 2464604 - DNA, 25 bp, Homo sapien
gatgtttgctccaagacgaagactt

SEQ ID NO: 2464605 - DNA, 25 bp, Homo sapien
gaaggctatcatattgggaatcagg

SEQ ID NO: 2464606 - DNA, 25 bp, Homo sapien
aggatgtccacagatcagcttttta

SEQ ID NO: 2464607 - DNA, 25 bp, Homo sapien
caatagaatatggatagagctggcc

SEQ ID NO: 2464608 - DNA, 25 bp, Homo sapien
tcaccactgctgaatcaggatgtcc

SEQ ID NO: 2464609 - DNA, 25 bp, Homo sapien
agctttttatctggcacttctaaag

SEQ ID NO: 2464610 - DNA, 25 bp, Homo sapien
tatgcaatggtatcatattcaactg

SEQ ID NO: 2464611 - DNA, 25 bp, Homo sapien
ttccaacttctcagtatgcaatggt

SEQ ID NO: 2464612 - DNA, 25 bp, Homo sapien
cagtatgcaatggtatcatattcaa

SEQ ID NO: 2464613 - DNA, 25 bp, Homo sapien
cttctcagtatgcaatggtatcata

SEQ ID NO: 2464614 - DNA, 25 bp, Homo sapien
ttcatctggatgacgccacttcgcc

SEQ ID NO: 2464615 - DNA, 25 bp, Homo sapien
ttaagagctacagctccgggaaagc

SEQ ID NO: 2464616 - DNA, 25 bp, Homo sapien
cagggaccggatacagagattccta

SEQ ID NO: 2464617 - DNA, 25 bp, Homo sapien
ccacttcgccaagcattaagagcta

SEQ ID NO: 2464618 - DNA, 25 bp, Homo sapien
taatcaacttatagtgctgacagat

SEQ ID NO: 2464619 - DNA, 25 bp, Homo sapien
cactagcatgctgagtaggatagta

SEQ ID NO: 2464620 - DNA, 25 bp, Homo sapien
ctttgtatgtctgacccaagtgcca

SEQ ID NO: 2464621 - DNA, 25 bp, Homo sapien
taggatagtaaatcaggatgctcat

SEQ ID NO: 2464622 - DNA, 25 bp, Homo sapien
tatggcctttcagacatttagcaat

SEQ ID NO: 2464623 - DNA, 25 bp, Homo sapien
accattgaaagacacaatatggcct

SEQ ID NO: 2464624 - DNA, 25 bp, Homo sapien
ttgaaagacacaatatggcctttca

SEQ ID NO: 2464625 - DNA, 25 bp, Homo sapien
taattaacaaaaccattgaaagaca

SEQ ID NO: 2464626 - DNA, 25 bp, Homo sapien
ctctggagaccagcaagggcccaga

SEQ ID NO: 2464627 - DNA, 25 bp, Homo sapien
cagggaccctttttgtgcccacaca

SEQ ID NO: 2464628 - DNA, 25 bp, Homo sapien
tggagaccagcaagggcccagaccc

SEQ ID NO: 2464629 - DNA, 25 bp, Homo sapien
gggaccctttttgtgcccacacatg

SEQ ID NO: 2464630 - DNA, 25 bp, Homo sapien
catctgcaagatcaagtaagatggt

SEQ ID NO: 2464631 - DNA, 25 bp, Homo sapien
gccacatctgcaagatcaagtaaga

SEQ ID NO: 2464632 - DNA, 25 bp, Homo sapien
tctgcaagatcaagtaagatggtga

SEQ ID NO: 2464633 - DNA, 25 bp, Homo sapien
gggccacatctgcaagatcaagtaa

SEQ ID NO: 2464634 - DNA, 25 bp, Homo sapien
ttggggataccgagcaagaagttga

SEQ ID NO: 2464635 - DNA, 25 bp, Homo sapien
accgagcaagaagttgaaaggatgc

SEQ ID NO: 2464636 - DNA, 25 bp, Homo sapien
gataccgagcaagaagttgaaagga

SEQ ID NO: 2464637 - DNA, 25 bp, Homo sapien
gggataccgagcaagaagttgaaag

SEQ ID NO: 2464638 - DNA, 25 bp, Homo sapien
tacggcatttgacgctgtttaccac

SEQ ID NO: 2464639 - DNA, 25 bp, Homo sapien
cttcatgcggaagtcagcggcgtcc

SEQ ID NO: 2464640 - DNA, 25 bp, Homo sapien
tgtttaccacaagagctgtcgaacg

SEQ ID NO: 2464641 - DNA, 25 bp, Homo sapien
tactcccagaatgcagtacggctcc

SEQ ID NO: 2464642 - DNA, 25 bp, Homo sapien
tgtcgacagttccagttgtcgggca

SEQ ID NO: 2464643 - DNA, 25 bp, Homo sapien
ttgggcttctctggtgtcgacagtt

SEQ ID NO: 2464644 - DNA, 25 bp, Homo sapien
aggaccagttttggcgaggtgcgtc

SEQ ID NO: 2464645 - DNA, 25 bp, Homo sapien
cagttccagttgtcgggcaggacca

SEQ ID NO: 2464646 - DNA, 25 bp, Homo sapien
cagtgccttctcttcttccatccat

SEQ ID NO: 2464647 - DNA, 25 bp, Homo sapien
cttgctctcagtgccttctcttctt

SEQ ID NO: 2464648 - DNA, 25 bp, Homo sapien
ctctcagtgccttctcttcttccat

SEQ ID NO: 2464649 - DNA, 25 bp, Homo sapien
tcagtgccttctcttcttccatcca

SEQ ID NO: 2464650 - DNA, 25 bp, Homo sapien
taaatctattaggtgctgttttacc

SEQ ID NO: 2464651 - DNA, 25 bp, Homo sapien
cattctgtactctagtcatgtgagc

SEQ ID NO: 2464652 - DNA, 25 bp, Homo sapien
cagtgtggtttataaagtcttgtat

SEQ ID NO: 2464653 - DNA, 25 bp, Homo sapien
ttcttaggataatgcacagtgtggt

SEQ ID NO: 2464654 - DNA, 25 bp, Homo sapien
tatttgacatagatcttaggcccac

SEQ ID NO: 2464655 - DNA, 25 bp, Homo sapien
ttaaatgacgcacaaactgaagatg

SEQ ID NO: 2464656 - DNA, 25 bp, Homo sapien
atctggctcatggtacctgttcttc

SEQ ID NO: 2464657 - DNA, 25 bp, Homo sapien
tctagcatagcacaaacgtttttcc

SEQ ID NO: 2464658 - DNA, 25 bp, Homo sapien
catatttatgattcagaagatattc

SEQ ID NO: 2464659 - DNA, 25 bp, Homo sapien
cacagccaatgtacgttttctcctc

SEQ ID NO: 2464660 - DNA, 25 bp, Homo sapien
gatgtttgggcgtgttctcttttta

SEQ ID NO: 2464661 - DNA, 25 bp, Homo sapien
tacaacatatttatgattcagaaga

SEQ ID NO: 2464662 - DNA, 25 bp, Homo sapien
tctggacccggcaccagattgaaag

SEQ ID NO: 2464663 - DNA, 25 bp, Homo sapien
agcttcagcaagagataaaacaggg

SEQ ID NO: 2464664 - DNA, 25 bp, Homo sapien
taaaacagggactctggacccggca

SEQ ID NO: 2464665 - DNA, 25 bp, Homo sapien
cagcaagagataaaacagggactct

SEQ ID NO: 2464666 - DNA, 25 bp, Homo sapien
ttcagacaccatacgaggatccgag

SEQ ID NO: 2464667 - DNA, 25 bp, Homo sapien
gaccttcagacaccatacgaggatc

SEQ ID NO: 2464668 - DNA, 25 bp, Homo sapien
ccttcagacaccatacgaggatccg

SEQ ID NO: 2464669 - DNA, 25 bp, Homo sapien
cagacaccatacgaggatccgaggg

SEQ ID NO: 2464670 - DNA, 25 bp, Homo sapien
gttccacaactcaaacaaatattcc

SEQ ID NO: 2464671 - DNA, 25 bp, Homo sapien
cttggggccttgagtccaaatttct

SEQ ID NO: 2464672 - DNA, 25 bp, Homo sapien
aatttctttacattcagcccatatc

SEQ ID NO: 2464673 - DNA, 25 bp, Homo sapien
aacaaatattccttggggccttgag

SEQ ID NO: 2464674 - DNA, 25 bp, Homo sapien
cactgtgttcttaagaggcttccag

SEQ ID NO: 2464675 - DNA, 25 bp, Homo sapien
actgtgttcttaagaggcttccaga

SEQ ID NO: 2464676 - DNA, 25 bp, Homo sapien
tgtgttcttaagaggcttccagaga

SEQ ID NO: 2464677 - DNA, 25 bp, Homo sapien
cagtgggtgaccctttccctgtgtg

SEQ ID NO: 2464678 - DNA, 25 bp, Homo sapien
agccagcccgtgtcacccagccatg

SEQ ID NO: 2464679 - DNA, 25 bp, Homo sapien
acagccagcccgtgtcacccagcca

SEQ ID NO: 2464680 - DNA, 25 bp, Homo sapien
gacagtgggtgaccctttccctgtg

SEQ ID NO: 2464681 - DNA, 25 bp, Homo sapien
aaaccacaatggctggcgttgctga

SEQ ID NO: 2464682 - DNA, 25 bp, Homo sapien
accacaatggctggcgttgctgagt

SEQ ID NO: 2464683 - DNA, 25 bp, Homo sapien
ctgaaaccacaatggctggcgttgc

SEQ ID NO: 2464684 - DNA, 25 bp, Homo sapien
tgaaaccacaatggctggcgttgct

SEQ ID NO: 2464685 - DNA, 25 bp, Homo sapien
ctgaggagcggccaagcagcaggac

SEQ ID NO: 2464686 - DNA, 25 bp, Homo sapien
tgaggagcggccaagcagcaggaca

SEQ ID NO: 2464687 - DNA, 25 bp, Homo sapien
ggccaagcagcaggacaggcagctt

SEQ ID NO: 2464688 - DNA, 25 bp, Homo sapien
caagcagcaggacaggcagcttgcc

SEQ ID NO: 2464689 - DNA, 25 bp, Homo sapien
tggtgctcacgatcccggtggtgac

SEQ ID NO: 2464690 - DNA, 25 bp, Homo sapien
gtccatgtctgagttgcggagcccc

SEQ ID NO: 2464691 - DNA, 25 bp, Homo sapien
gaaaacgggcttccgatggcgacca

SEQ ID NO: 2464692 - DNA, 25 bp, Homo sapien
gctctttgccgcctcgctgggtggt

SEQ ID NO: 2464693 - DNA, 25 bp, Homo sapien
tgttaattccaatcacttcaccgtc

SEQ ID NO: 2464694 - DNA, 25 bp, Homo sapien
tcatgggactccgtgaggaactttt

SEQ ID NO: 2464695 - DNA, 25 bp, Homo sapien
tttggcctgtcggtcatgggactcc

SEQ ID NO: 2464696 - DNA, 25 bp, Homo sapien
tatcagatgggattgcaaaggagat

SEQ ID NO: 2464697 - DNA, 25 bp, Homo sapien
tggtgagacaacaaagggacagcag

SEQ ID NO: 2464698 - DNA, 25 bp, Homo sapien
ctggtgagacaacaaagggacagca

SEQ ID NO: 2464699 - DNA, 25 bp, Homo sapien
tgagacaacaaagggacagcagaag

SEQ ID NO: 2464700 - DNA, 25 bp, Homo sapien
ggtgagacaacaaagggacagcaga

SEQ ID NO: 2464701 - DNA, 25 bp, Homo sapien
cattcggataccaatatacttcttc

SEQ ID NO: 2464702 - DNA, 25 bp, Homo sapien
ctggacgtgagtgacatcattcgga

SEQ ID NO: 2464703 - DNA, 25 bp, Homo sapien
gagtgacatcattcggataccaata

SEQ ID NO: 2464704 - DNA, 25 bp, Homo sapien
gataccaatatacttcttcttggtg

SEQ ID NO: 2464705 - DNA, 25 bp, Homo sapien
ttcccgatgctacttcattataagc

SEQ ID NO: 2464706 - DNA, 25 bp, Homo sapien
cgtgagcaccttctgaagttcaggt

SEQ ID NO: 2464707 - DNA, 25 bp, Homo sapien
aatgacctgtcctctttcccgatgc

SEQ ID NO: 2464708 - DNA, 25 bp, Homo sapien
agaaactgagacgtcttaaggcagc

SEQ ID NO: 2464709 - DNA, 25 bp, Homo sapien
ctgcgctggacctgccctggcattc

SEQ ID NO: 2464710 - DNA, 25 bp, Homo sapien
tgccctggcattcctggagccgcgg

SEQ ID NO: 2464711 - DNA, 25 bp, Homo sapien
ccctggcattcctggagccgcggcc

SEQ ID NO: 2464712 - DNA, 25 bp, Homo sapien
tccctgcgctggacctgccctggca

SEQ ID NO: 2464713 - DNA, 25 bp, Homo sapien
ttcctcacgcaaaactcagctctca

SEQ ID NO: 2464714 - DNA, 25 bp, Homo sapien
caggccttcctcacgcaaaactcag

SEQ ID NO: 2464715 - DNA, 25 bp, Homo sapien
gaaaaagcacccgtgttagtgtgaa

SEQ ID NO: 2464716 - DNA, 25 bp, Homo sapien
cagttcccgtcttctccttaggtct

SEQ ID NO: 2464717 - DNA, 25 bp, Homo sapien
aagtcccggtgccggtccttcagct

SEQ ID NO: 2464718 - DNA, 25 bp, Homo sapien
ctgagatcacgtctgggaagtcccg

SEQ ID NO: 2464719 - DNA, 25 bp, Homo sapien
tacttcaattatatacgctcctgag

SEQ ID NO: 2464720 - DNA, 25 bp, Homo sapien
tgctggggtatcaggaattacttca

SEQ ID NO: 2464721 - DNA, 25 bp, Homo sapien
ttcccttttaatgacgtcgctgaca

SEQ ID NO: 2464722 - DNA, 25 bp, Homo sapien
tgcggaccaccatgttcagggtgct

SEQ ID NO: 2464723 - DNA, 25 bp, Homo sapien
tccattgatgctgattatgacgtcg

SEQ ID NO: 2464724 - DNA, 25 bp, Homo sapien
acatcattggcggagaccacggact

SEQ ID NO: 2464725 - DNA, 25 bp, Homo sapien
ttctgttggccagggagtctccact

SEQ ID NO: 2464726 - DNA, 25 bp, Homo sapien
gcaacttcggccgtttgagaagcca

SEQ ID NO: 2464727 - DNA, 25 bp, Homo sapien
gtgtcctattccagcagcccagagt

SEQ ID NO: 2464728 - DNA, 25 bp, Homo sapien
gactgtctaagcaagaatggcccaa

SEQ ID NO: 2464729 - DNA, 25 bp, Homo sapien
gatctgcaacctgggccaatgcagg

SEQ ID NO: 2464730 - DNA, 25 bp, Homo sapien
acacctgtcttagatctgcaacctg

SEQ ID NO: 2464731 - DNA, 25 bp, Homo sapien
tgtcttagatctgcaacctgggcca

SEQ ID NO: 2464732 - DNA, 25 bp, Homo sapien
tgcaacctgggccaatgcaggatgc

SEQ ID NO: 2464733 - DNA, 25 bp, Homo sapien
gtagcacaccataattgctggtcat

SEQ ID NO: 2464734 - DNA, 25 bp, Homo sapien
gagtagcacaccataattgctggtc

SEQ ID NO: 2464735 - DNA, 25 bp, Homo sapien
ttgagtagcacaccataattgctgg

SEQ ID NO: 2464736 - DNA, 25 bp, Homo sapien
tcattgagtagcacaccataattgc

SEQ ID NO: 2464737 - DNA, 25 bp, Homo sapien
gtacctagctaaaaggaggtgtgtc

SEQ ID NO: 2464738 - DNA, 25 bp, Homo sapien
tgggttcttctcaattgaatagaaa

SEQ ID NO: 2464739 - DNA, 25 bp, Homo sapien
cctctagggtggtatatttctactg

SEQ ID NO: 2464740 - DNA, 25 bp, Homo sapien
gaaaatcctggacatttataggtac

SEQ ID NO: 2464741 - DNA, 25 bp, Homo sapien
gaacttgtccccataaaagacacat

SEQ ID NO: 2464742 - DNA, 25 bp, Homo sapien
acacatttcaaggatgactgtggag

SEQ ID NO: 2464743 - DNA, 25 bp, Homo sapien
gtagatagaacttgtccccataaaa

SEQ ID NO: 2464744 - DNA, 25 bp, Homo sapien
tccccataaaagacacatttcaagg

SEQ ID NO: 2464745 - DNA, 25 bp, Homo sapien
gtctgtagtccttgggatccaccca

SEQ ID NO: 2464746 - DNA, 25 bp, Homo sapien
cgtagtctgtagtccttgggatcca

SEQ ID NO: 2464747 - DNA, 25 bp, Homo sapien
tagtctgtagtccttgggatccacc

SEQ ID NO: 2464748 - DNA, 25 bp, Homo sapien
tctgtagtccttgggatccacccac

SEQ ID NO: 2464749 - DNA, 25 bp, Homo sapien
cttggtgctctcggcccccttgact

SEQ ID NO: 2464750 - DNA, 25 bp, Homo sapien
agccagaagcttttatcttggtgct

SEQ ID NO: 2464751 - DNA, 25 bp, Homo sapien
tatcttggtgctctcggcccccttg

SEQ ID NO: 2464752 - DNA, 25 bp, Homo sapien
tggtgctctcggcccccttgacttg

SEQ ID NO: 2464753 - DNA, 25 bp, Homo sapien
caggtaggactcccttcccaagcaa

SEQ ID NO: 2464754 - DNA, 25 bp, Homo sapien
agcaatgcaagtcacccaagggaat

SEQ ID NO: 2464755 - DNA, 25 bp, Homo sapien
ccagggctgacatggaatagccaca

SEQ ID NO: 2464756 - DNA, 25 bp, Homo sapien
caagccctgaccaaagtgggccccg

SEQ ID NO: 2464757 - DNA, 25 bp, Homo sapien
ggccacattcgtggttgtaccatcc

SEQ ID NO: 2464758 - DNA, 25 bp, Homo sapien
gccacattcgtggttgtaccatccg

SEQ ID NO: 2464759 - DNA, 25 bp, Homo sapien
gtaatattgactcagagttgcagat

SEQ ID NO: 2464760 - DNA, 25 bp, Homo sapien
taatattgactcagagttgcagata

SEQ ID NO: 2464761 - DNA, 25 bp, Homo sapien
aatattgactcagagttgcagatac

SEQ ID NO: 2464762 - DNA, 25 bp, Homo sapien
atattgactcagagttgcagataca

SEQ ID NO: 2464763 - DNA, 25 bp, Homo sapien
gggcacctccgagggaatcagtgaa

SEQ ID NO: 2464764 - DNA, 25 bp, Homo sapien
tccaagggcacctccgagggaatca

SEQ ID NO: 2464765 - DNA, 25 bp, Homo sapien
agttggatccaagggcacctccgag

SEQ ID NO: 2464766 - DNA, 25 bp, Homo sapien
tggatccaagggcacctccgaggga

SEQ ID NO: 2464767 - DNA, 25 bp, Homo sapien
tccagggtcgactccgagggaaatg

SEQ ID NO: 2464768 - DNA, 25 bp, Homo sapien
agggtcgactccgagggaaatggag

SEQ ID NO: 2464769 - DNA, 25 bp, Homo sapien
ctccagggtcgactccgagggaaat

SEQ ID NO: 2464770 - DNA, 25 bp, Homo sapien
gtcgactccgagggaaatggagaac

SEQ ID NO: 2464771 - DNA, 25 bp, Homo sapien
ggttgactccagggttgactccaag

SEQ ID NO: 2464772 - DNA, 25 bp, Homo sapien
ttgactccagggttgactccaagga

SEQ ID NO: 2464773 - DNA, 25 bp, Homo sapien
gactccagggttgactccaaggaaa

SEQ ID NO: 2464774 - DNA, 25 bp, Homo sapien
acggttgactccagggttgactcca

SEQ ID NO: 2464775 - DNA, 25 bp, Homo sapien
ggttgactctgagggaatcagagaa

SEQ ID NO: 2464776 - DNA, 25 bp, Homo sapien
cagttgactccagggttgactctga

SEQ ID NO: 2464777 - DNA, 25 bp, Homo sapien
ttctgctacagttgactccagggtt

SEQ ID NO: 2464778 - DNA, 25 bp, Homo sapien
actccagggttgactctgagggaat

SEQ ID NO: 2464779 - DNA, 25 bp, Homo sapien
gaaggcacagaatttctcttgcaca

SEQ ID NO: 2464780 - DNA, 25 bp, Homo sapien
aggaaggcacagaatttctcttgca

SEQ ID NO: 2464781 - DNA, 25 bp, Homo sapien
ggcacagaatttctcttgcacattc

SEQ ID NO: 2464782 - DNA, 25 bp, Homo sapien
agaggaaggcacagaatttctcttg

SEQ ID NO: 2464783 - DNA, 25 bp, Homo sapien
ctcagggccaaaccagaatcagatc

SEQ ID NO: 2464784 - DNA, 25 bp, Homo sapien
ccacagttatgggagagccagccat

SEQ ID NO: 2464785 - DNA, 25 bp, Homo sapien
cacagttatgggagagccagccatt

SEQ ID NO: 2464786 - DNA, 25 bp, Homo sapien
tggcctgagtgttgactgaggctgg

SEQ ID NO: 2464787 - DNA, 25 bp, Homo sapien
aggtggtgatatcctgacaggccaa

SEQ ID NO: 2464788 - DNA, 25 bp, Homo sapien
gtggtgatatcctgacaggccaact

SEQ ID NO: 2464789 - DNA, 25 bp, Homo sapien
ggtggtgatatcctgacaggccaac

SEQ ID NO: 2464790 - DNA, 25 bp, Homo sapien
ggaacacaagaacccttcatccatc

SEQ ID NO: 2464791 - DNA, 25 bp, Homo sapien
tacaggggaacacaagaacccttca

SEQ ID NO: 2464792 - DNA, 25 bp, Homo sapien
ggggaacacaagaacccttcatcca

SEQ ID NO: 2464793 - DNA, 25 bp, Homo sapien
caggggaacacaagaacccttcatc

SEQ ID NO: 2464794 - DNA, 25 bp, Homo sapien
agcctcagggccaaactggattcag

SEQ ID NO: 2464795 - DNA, 25 bp, Homo sapien
gtataggacctccactcggcctcga

SEQ ID NO: 2464796 - DNA, 25 bp, Homo sapien
gcctcggtataggacctccactcgg

SEQ ID NO: 2464797 - DNA, 25 bp, Homo sapien
cccaggagcctcggtataggacctc

SEQ ID NO: 2464798 - DNA, 25 bp, Homo sapien
gctccacaggtaggactcatgtcct

SEQ ID NO: 2464799 - DNA, 25 bp, Homo sapien
catccaggacaatgggtcctgagcc

SEQ ID NO: 2464800 - DNA, 25 bp, Homo sapien
ctccacaggtaggactcatgtcctg

SEQ ID NO: 2464801 - DNA, 25 bp, Homo sapien
cctgagcagcgcacatcatccagga

SEQ ID NO: 2464802 - DNA, 25 bp, Homo sapien
tgagcagatgacaccagcgtcttca

SEQ ID NO: 2464803 - DNA, 25 bp, Homo sapien
ctgagcagatgacaccagcgtcttc

SEQ ID NO: 2464804 - DNA, 25 bp, Homo sapien
agagtgagcccaagttcttgaaggc

SEQ ID NO: 2464805 - DNA, 25 bp, Homo sapien
tccaccccaagagagtgagcccaag

SEQ ID NO: 2464806 - DNA, 25 bp, Homo sapien
cccaagagagtgagcccaagttctt

SEQ ID NO: 2464807 - DNA, 25 bp, Homo sapien
agagagtgagcccaagttcttgaag

SEQ ID NO: 2464808 - DNA, 25 bp, Homo sapien
taggacatcagacgccattgctgaa

SEQ ID NO: 2464809 - DNA, 25 bp, Homo sapien
aggacatcagacgccattgctgaag

SEQ ID NO: 2464810 - DNA, 25 bp, Homo sapien
ggacatcagacgccattgctgaagc

SEQ ID NO: 2464811 - DNA, 25 bp, Homo sapien
ttgatgcatgtgaggtcggccaagt

SEQ ID NO: 2464812 - DNA, 25 bp, Homo sapien
gatgcatgtgaggtcggccaagtat

SEQ ID NO: 2464813 - DNA, 25 bp, Homo sapien
ctgctgttgatgcatgtgaggtcgg

SEQ ID NO: 2464814 - DNA, 25 bp, Homo sapien
ctgttgatgcatgtgaggtcggcca

SEQ ID NO: 2464815 - DNA, 25 bp, Homo sapien
caggggaacacaagaatccttcatc

SEQ ID NO: 2464816 - DNA, 25 bp, Homo sapien
gggaacacaagaatccttcatccat

SEQ ID NO: 2464817 - DNA, 25 bp, Homo sapien
ctacaggggaacacaagaatccttc

SEQ ID NO: 2464818 - DNA, 25 bp, Homo sapien
tacaggggaacacaagaatccttca

SEQ ID NO: 2464819 - DNA, 25 bp, Homo sapien
gctccacaggtaggactcatagcct

SEQ ID NO: 2464820 - DNA, 25 bp, Homo sapien
tgacagttatgggagagccagccat

SEQ ID NO: 2464821 - DNA, 25 bp, Homo sapien
gcctcagggccaaactggattcagg

SEQ ID NO: 2464822 - DNA, 25 bp, Homo sapien
ccacattggcgtcactggtgtccca

SEQ ID NO: 2464823 - DNA, 25 bp, Homo sapien
cccaagagagggagcccaaggtctt

SEQ ID NO: 2464824 - DNA, 25 bp, Homo sapien
ccaagagagggagcccaaggtcttg

SEQ ID NO: 2464825 - DNA, 25 bp, Homo sapien
ggagcccaaggtcttggaggcccac

SEQ ID NO: 2464826 - DNA, 25 bp, Homo sapien
agagggagcccaaggtcttggaggc

SEQ ID NO: 2464827 - DNA, 25 bp, Homo sapien
ctgggcgtcgaccaggagtgggcag

SEQ ID NO: 2464828 - DNA, 25 bp, Homo sapien
gactgggcgtcgaccaggagtgggc

SEQ ID NO: 2464829 - DNA, 25 bp, Homo sapien
tggactgggcgtcgaccaggagtgg

SEQ ID NO: 2464830 - DNA, 25 bp, Homo sapien
actgggcgtcgaccaggagtgggca

SEQ ID NO: 2464831 - DNA, 25 bp, Homo sapien
tgcaggtaaggtgatggtcggcaac

SEQ ID NO: 2464832 - DNA, 25 bp, Homo sapien
tgtcgatgcaggtaaggtgatggtc

SEQ ID NO: 2464833 - DNA, 25 bp, Homo sapien
ggtaaggtgatggtcggcaacgtgt

SEQ ID NO: 2464834 - DNA, 25 bp, Homo sapien
ctactgtcgatgcaggtaaggtgat

SEQ ID NO: 2464835 - DNA, 25 bp, Homo sapien
tcatccatccctatcatgaggtcaa

SEQ ID NO: 2464836 - DNA, 25 bp, Homo sapien
catccatccctatcatgaggtcaag

SEQ ID NO: 2464837 - DNA, 25 bp, Homo sapien
ggagcctcggtataggacctccact

SEQ ID NO: 2464838 - DNA, 25 bp, Homo sapien
agcctcagggccaaactggattcag

SEQ ID NO: 2464839 - DNA, 25 bp, Homo sapien
gtaggactcattccctgagcagcgc

SEQ ID NO: 2464840 - DNA, 25 bp, Homo sapien
ccacagttatgggagagccagccat

SEQ ID NO: 2464841 - DNA, 25 bp, Homo sapien
agagaggaaaccaaaagtcttggag

SEQ ID NO: 2464842 - DNA, 25 bp, Homo sapien
cttcatcaatccctatcagcaggtc

SEQ ID NO: 2464843 - DNA, 25 bp, Homo sapien
catcaatccctatcagcaggtcaag

SEQ ID NO: 2464844 - DNA, 25 bp, Homo sapien
gaacccttcatcaatccctatcagc

SEQ ID NO: 2464845 - DNA, 25 bp, Homo sapien
tcaatccctatcagcaggtcaagga

SEQ ID NO: 2464846 - DNA, 25 bp, Homo sapien
gcctcagggccaaactggattcagg

SEQ ID NO: 2464847 - DNA, 25 bp, Homo sapien
gctccacaggtaggactcatgtcct

SEQ ID NO: 2464848 - DNA, 25 bp, Homo sapien
tgagccctgaccaaaccgggcattt

SEQ ID NO: 2464849 - DNA, 25 bp, Homo sapien
cacagttgtgggagagccagccatt

SEQ ID NO: 2464850 - DNA, 25 bp, Homo sapien
aaaggttgaaaaagctctgagtgag

SEQ ID NO: 2464851 - DNA, 25 bp, Homo sapien
ggagattagaacataagacctctct

SEQ ID NO: 2464852 - DNA, 25 bp, Homo sapien
tcttcctgggcaaaatctaccccaa

SEQ ID NO: 2464853 - DNA, 25 bp, Homo sapien
ctgggcaaaatctaccccaagagag

SEQ ID NO: 2464854 - DNA, 25 bp, Homo sapien
tggcctgggcgtcgaccgggactgg

SEQ ID NO: 2464855 - DNA, 25 bp, Homo sapien
gcctgggcgtcgaccgggactgggc

SEQ ID NO: 2464856 - DNA, 25 bp, Homo sapien
cctgggcgtcgaccgggactgggca

SEQ ID NO: 2464857 - DNA, 25 bp, Homo sapien
tggaggtaacgtgatggtcgacaac

SEQ ID NO: 2464858 - DNA, 25 bp, Homo sapien
tcgatggaggtaacgtgatggtcga

SEQ ID NO: 2464859 - DNA, 25 bp, Homo sapien
gaggtaacgtgatggtcgacaacgt

SEQ ID NO: 2464860 - DNA, 25 bp, Homo sapien
gatggaggtaacgtgatggtcgaca

SEQ ID NO: 2464861 - DNA, 25 bp, Homo sapien
tccatccctaccatgaggtaaggat

SEQ ID NO: 2464862 - DNA, 25 bp, Homo sapien
taatggccaaggtcgcctggacaag

SEQ ID NO: 2464863 - DNA, 25 bp, Homo sapien
gacaagcagtcacgattgaatacga

SEQ ID NO: 2464864 - DNA, 25 bp, Homo sapien
ctaaggcacgttccacactcagggt

SEQ ID NO: 2464865 - DNA, 25 bp, Homo sapien
tgacacctgtcacttccattcacca

SEQ ID NO: 2464866 - DNA, 25 bp, Homo sapien
agcctcagggtcaaactggattcag

SEQ ID NO: 2464867 - DNA, 25 bp, Homo sapien
ctcagggtcaaactggattcagatc

SEQ ID NO: 2464868 - DNA, 25 bp, Homo sapien
ttccattcaccagcctcagggtcaa

SEQ ID NO: 2464869 - DNA, 25 bp, Homo sapien
cattggcatcattggtatcccagct

SEQ ID NO: 2464870 - DNA, 25 bp, Homo sapien
ctgcctgcagaccacattggcatca

SEQ ID NO: 2464871 - DNA, 25 bp, Homo sapien
ctcggtataggacctctactcggcc

SEQ ID NO: 2464872 - DNA, 25 bp, Homo sapien
ccaggagcctcggtataggacctct

SEQ ID NO: 2464873 - DNA, 25 bp, Homo sapien
ggccacagttgtgggagagccagcc

SEQ ID NO: 2464874 - DNA, 25 bp, Homo sapien
gagccctggccaaaccgggcatttc

SEQ ID NO: 2464875 - DNA, 25 bp, Homo sapien
cacagttgtgggagagccagccatt

SEQ ID NO: 2464876 - DNA, 25 bp, Homo sapien
ctgagccctggccaaaccgggcatt

SEQ ID NO: 2464877 - DNA, 25 bp, Homo sapien
tgaggagatcagaatgtaattagga

SEQ ID NO: 2464878 - DNA, 25 bp, Homo sapien
agatcagaatgtaattaggattttc

SEQ ID NO: 2464879 - DNA, 25 bp, Homo sapien
ctttgagtgaggagatcagaatgta

SEQ ID NO: 2464880 - DNA, 25 bp, Homo sapien
tgagtgaggagatcagaatgtaatt

SEQ ID NO: 2464881 - DNA, 25 bp, Homo sapien
gactgggtgtcggccgggactggga

SEQ ID NO: 2464882 - DNA, 25 bp, Homo sapien
tggactgggtgtcggccgggactgg

SEQ ID NO: 2464883 - DNA, 25 bp, Homo sapien
ctggactgggtgtcggccgggactg

SEQ ID NO: 2464884 - DNA, 25 bp, Homo sapien
aggacatcagacgccattgctgagg

SEQ ID NO: 2464885 - DNA, 25 bp, Homo sapien
taggacatcagacgccattgctgag

SEQ ID NO: 2464886 - DNA, 25 bp, Homo sapien
ggacatcagacgccattgctgaggc

SEQ ID NO: 2464887 - DNA, 25 bp, Homo sapien
ttgatgcatgtgaggtcggccaagt

SEQ ID NO: 2464888 - DNA, 25 bp, Homo sapien
gatgcatgtgaggtcggccaagtat

SEQ ID NO: 2464889 - DNA, 25 bp, Homo sapien
ctgctgttgatgcatgtgaggtcgg

SEQ ID NO: 2464890 - DNA, 25 bp, Homo sapien
ctgttgatgcatgtgaggtcggcca

SEQ ID NO: 2464891 - DNA, 25 bp, Homo sapien
cacccgctcttcagaggtctggatc

SEQ ID NO: 2464892 - DNA, 25 bp, Homo sapien
tgccagtgatggcaaggccttggcc

SEQ ID NO: 2464893 - DNA, 25 bp, Homo sapien
ggtgcagggaccggcactttcaccc

SEQ ID NO: 2464894 - DNA, 25 bp, Homo sapien
tgccttctggcaaattgccagtgat

SEQ ID NO: 2464895 - DNA, 25 bp, Homo sapien
tacaggggaacacaagaatccttca

SEQ ID NO: 2464896 - DNA, 25 bp, Homo sapien
caggggaacacaagaatccttcatc

SEQ ID NO: 2464897 - DNA, 25 bp, Homo sapien
gggaacacaagaatccttcatccat

SEQ ID NO: 2464898 - DNA, 25 bp, Homo sapien
ctacaggggaacacaagaatccttc

SEQ ID NO: 2464899 - DNA, 25 bp, Homo sapien
gctccacaggtaggactcatagcct

SEQ ID NO: 2464900 - DNA, 25 bp, Homo sapien
tgacagttatgggagagccagccat

SEQ ID NO: 2464901 - DNA, 25 bp, Homo sapien
gcctcagggccaaactggattcagg

SEQ ID NO: 2464902 - DNA, 25 bp, Homo sapien
ccacattggcgtcactggtgtccca

SEQ ID NO: 2464903 - DNA, 25 bp, Homo sapien
cccaagagagggagcccaaggtctt

SEQ ID NO: 2464904 - DNA, 25 bp, Homo sapien
ggagcccaaggtcttggaggcccac

SEQ ID NO: 2464905 - DNA, 25 bp, Homo sapien
ccaagagagggagcccaaggtcttg

SEQ ID NO: 2464906 - DNA, 25 bp, Homo sapien
agagggagcccaaggtcttggaggc

SEQ ID NO: 2464907 - DNA, 25 bp, Homo sapien
gactgggcgtcgaccaggagtgggc

SEQ ID NO: 2464908 - DNA, 25 bp, Homo sapien
ctgggcgtcgaccaggagtgggcag

SEQ ID NO: 2464909 - DNA, 25 bp, Homo sapien
tggactgggcgtcgaccaggagtgg

SEQ ID NO: 2464910 - DNA, 25 bp, Homo sapien
actgggcgtcgaccaggagtgggca

SEQ ID NO: 2464911 - DNA, 25 bp, Homo sapien
gcaggcaaggtgatggtcggcaatg

SEQ ID NO: 2464912 - DNA, 25 bp, Homo sapien
ctactgtcgatgcaggcaaggtgat

SEQ ID NO: 2464913 - DNA, 25 bp, Homo sapien
tactgtcgatgcaggcaaggtgatg

SEQ ID NO: 2464914 - DNA, 25 bp, Homo sapien
ggcaaggtgatggtcggcaatgtgt

SEQ ID NO: 2464915 - DNA, 25 bp, Homo sapien
catccatccctatcatgaggtcagg

SEQ ID NO: 2464916 - DNA, 25 bp, Homo sapien
tcatccatccctatcatgaggtcag

SEQ ID NO: 2464917 - DNA, 25 bp, Homo sapien
agcctcagggccaaactggattcag

SEQ ID NO: 2464918 - DNA, 25 bp, Homo sapien
gctccacaggtaagactcgtgtcct

SEQ ID NO: 2464919 - DNA, 25 bp, Homo sapien
cacagttgtgggagagccagccatt

SEQ ID NO: 2464920 - DNA, 25 bp, Homo sapien
gccttggtataggacctccactcgg

SEQ ID NO: 2464921 - DNA, 25 bp, Homo sapien
gatcagaatgtaattaggagtttct

SEQ ID NO: 2464922 - DNA, 25 bp, Homo sapien
gaggagatcagaatgtaattaggag

SEQ ID NO: 2464923 - DNA, 25 bp, Homo sapien
ccaccccaagagagtgatcccaagt

SEQ ID NO: 2464924 - DNA, 25 bp, Homo sapien
caaactccaccccaagagagtgatc

SEQ ID NO: 2464925 - DNA, 25 bp, Homo sapien
tggactaggtgttggccgggactgg

SEQ ID NO: 2464926 - DNA, 25 bp, Homo sapien
ctggactaggtgttggccgggactg

SEQ ID NO: 2464927 - DNA, 25 bp, Homo sapien
gactaggtgttggccgggactggga

SEQ ID NO: 2464928 - DNA, 25 bp, Homo sapien
ctaggtgttggccgggactgggaag

SEQ ID NO: 2464929 - DNA, 25 bp, Homo sapien
ctgctgttgatgcatgtgaggttgg

SEQ ID NO: 2464930 - DNA, 25 bp, Homo sapien
ttgatgcatgtgaggttggccaagt

SEQ ID NO: 2464931 - DNA, 25 bp, Homo sapien
gctgttgatgcatgtgaggttggcc

SEQ ID NO: 2464932 - DNA, 25 bp, Homo sapien
tgttgatgcatgtgaggttggccaa

SEQ ID NO: 2464933 - DNA, 25 bp, Homo sapien
gggaacacaagaacgcttcatccat

SEQ ID NO: 2464934 - DNA, 25 bp, Homo sapien
ggggaacacaagaacgcttcatcca

SEQ ID NO: 2464935 - DNA, 25 bp, Homo sapien
ggagcctcggtataggacctccact

SEQ ID NO: 2464936 - DNA, 25 bp, Homo sapien
agcctcagggccaaactggattcag

SEQ ID NO: 2464937 - DNA, 25 bp, Homo sapien
cacagttgtgggagagccagccatt

SEQ ID NO: 2464938 - DNA, 25 bp, Homo sapien
ggcagctccacagataggactcatg

SEQ ID NO: 2464939 - DNA, 25 bp, Homo sapien
gctgggtgtcggctgggactgggaa

SEQ ID NO: 2464940 - DNA, 25 bp, Homo sapien
ggctgggtgtcggctgggactggga

SEQ ID NO: 2464941 - DNA, 25 bp, Homo sapien
ttgatgcatgtgaggttggccaagt

SEQ ID NO: 2464942 - DNA, 25 bp, Homo sapien
gctgttgatgcatgtgaggttggcc

SEQ ID NO: 2464943 - DNA, 25 bp, Homo sapien
ctgctgttgatgcatgtgaggttgg

SEQ ID NO: 2464944 - DNA, 25 bp, Homo sapien
tgttgatgcatgtgaggttggccaa

SEQ ID NO: 2464945 - DNA, 25 bp, Homo sapien
tgctcttcagagatctggatcccat

SEQ ID NO: 2464946 - DNA, 25 bp, Homo sapien
ctgctcttcagagatctggatccca

SEQ ID NO: 2464947 - DNA, 25 bp, Homo sapien
gctcttcagagatctggatcccatg

SEQ ID NO: 2464948 - DNA, 25 bp, Homo sapien
tcttcagagatctggatcccatggc

SEQ ID NO: 2464949 - DNA, 25 bp, Homo sapien
gggaacacaagaacgcttcatccat

SEQ ID NO: 2464950 - DNA, 25 bp, Homo sapien
ggggaacacaagaacgcttcatcca

SEQ ID NO: 2464951 - DNA, 25 bp, Homo sapien
ctgagcagcgcacatcatccaggac

SEQ ID NO: 2464952 - DNA, 25 bp, Homo sapien
ggagcctcggtataggacctccact

SEQ ID NO: 2464953 - DNA, 25 bp, Homo sapien
agcctcagggccaaactggattcag

SEQ ID NO: 2464954 - DNA, 25 bp, Homo sapien
ggcagctccacagataggactcatg

SEQ ID NO: 2464955 - DNA, 25 bp, Homo sapien
tgagcagatgacaccagcgtcttca

SEQ ID NO: 2464956 - DNA, 25 bp, Homo sapien
tcatgatggccacagttgtgggaga

SEQ ID NO: 2464957 - DNA, 25 bp, Homo sapien
gatgacaccagcgtcttcatgatgg

SEQ ID NO: 2464958 - DNA, 25 bp, Homo sapien
acaccagcgtcttcatgatggccac

SEQ ID NO: 2464959 - DNA, 25 bp, Homo sapien
gctgggtgtcggctgggactgggaa

SEQ ID NO: 2464960 - DNA, 25 bp, Homo sapien
ggctgggtgtcggctgggactggga

SEQ ID NO: 2464961 - DNA, 25 bp, Homo sapien
ttgatgcatgtgaggttggccaagt

SEQ ID NO: 2464962 - DNA, 25 bp, Homo sapien
tgttgatgcatgtgaggttggccaa

SEQ ID NO: 2464963 - DNA, 25 bp, Homo sapien
ctgctgttgatgcatgtgaggttgg

SEQ ID NO: 2464964 - DNA, 25 bp, Homo sapien
gctgttgatgcatgtgaggttggcc

SEQ ID NO: 2464965 - DNA, 25 bp, Homo sapien
tgctcttcagagatctggatcccat

SEQ ID NO: 2464966 - DNA, 25 bp, Homo sapien
ctgctcttcagagatctggatccca

SEQ ID NO: 2464967 - DNA, 25 bp, Homo sapien
gctcttcagagatctggatcccatg

SEQ ID NO: 2464968 - DNA, 25 bp, Homo sapien
tcttcagagatctggatcccatggc

SEQ ID NO: 2464969 - DNA, 25 bp, Homo sapien
gggaacacaagaacgcttcatccat

SEQ ID NO: 2464970 - DNA, 25 bp, Homo sapien
ggggaacacaagaacgcttcatcca

SEQ ID NO: 2464971 - DNA, 25 bp, Homo sapien
ggagcctcggtataggacctccact

SEQ ID NO: 2464972 - DNA, 25 bp, Homo sapien
agcctcagggccaaactggattcag

SEQ ID NO: 2464973 - DNA, 25 bp, Homo sapien
cacagttgtgggagagccagccatt

SEQ ID NO: 2464974 - DNA, 25 bp, Homo sapien
ggcagctccacagataggactcatg

SEQ ID NO: 2464975 - DNA, 25 bp, Homo sapien
gctgggtgtcggctgggactgggaa

SEQ ID NO: 2464976 - DNA, 25 bp, Homo sapien
ggctgggtgtcggctgggactggga

SEQ ID NO: 2464977 - DNA, 25 bp, Homo sapien
ttgatgcatgtgaggttggccaagt

SEQ ID NO: 2464978 - DNA, 25 bp, Homo sapien
ctgctgttgatgcatgtgaggttgg

SEQ ID NO: 2464979 - DNA, 25 bp, Homo sapien
tgttgatgcatgtgaggttggccaa

SEQ ID NO: 2464980 - DNA, 25 bp, Homo sapien
gctgttgatgcatgtgaggttggcc

SEQ ID NO: 2464981 - DNA, 25 bp, Homo sapien
tgctcttcagagatctggatcccat

SEQ ID NO: 2464982 - DNA, 25 bp, Homo sapien
ctgctcttcagagatctggatccca

SEQ ID NO: 2464983 - DNA, 25 bp, Homo sapien
gctcttcagagatctggatcccatg

SEQ ID NO: 2464984 - DNA, 25 bp, Homo sapien
tcttcagagatctggatcccatggc

SEQ ID NO: 2464985 - DNA, 25 bp, Homo sapien
gggaacacaagaacgcttcatccat

SEQ ID NO: 2464986 - DNA, 25 bp, Homo sapien
ggggaacacaagaacgcttcatcca

SEQ ID NO: 2464987 - DNA, 25 bp, Homo sapien
ctcagggccaaactggattcagatc

SEQ ID NO: 2464988 - DNA, 25 bp, Homo sapien
ctgagcagcgcacatcatccaggac

SEQ ID NO: 2464989 - DNA, 25 bp, Homo sapien
ggagcctcggtataggacctccact

SEQ ID NO: 2464990 - DNA, 25 bp, Homo sapien
cacagttgtgggagagccagccatt

SEQ ID NO: 2464991 - DNA, 25 bp, Homo sapien
ggcagctccacagataggactcatg

SEQ ID NO: 2464992 - DNA, 25 bp, Homo sapien
ggctgggtgtcggctgggactggga

SEQ ID NO: 2464993 - DNA, 25 bp, Homo sapien
gctgggtgtcggctgggactgggaa

SEQ ID NO: 2464994 - DNA, 25 bp, Homo sapien
gctgttgatgcacgagaggttggcc

SEQ ID NO: 2464995 - DNA, 25 bp, Homo sapien
ctgctgttgatgcacgagaggttgg

SEQ ID NO: 2464996 - DNA, 25 bp, Homo sapien
tgttgatgcacgagaggttggccaa

SEQ ID NO: 2464997 - DNA, 25 bp, Homo sapien
ttgatgcacgagaggttggccaagt

SEQ ID NO: 2464998 - DNA, 25 bp, Homo sapien
ctgagcagcgcacatcatccaggac

SEQ ID NO: 2464999 - DNA, 25 bp, Homo sapien
caggagccttggtataggacctcca

SEQ ID NO: 2465000 - DNA, 25 bp, Homo sapien
cacagttgtgggagagccagccatt

SEQ ID NO: 2465001 - DNA, 25 bp, Homo sapien
gctccacaggtaagactcgtgtcct

SEQ ID NO: 2465002 - DNA, 25 bp, Homo sapien
agcaaacttcaacttaagagaggga

SEQ ID NO: 2465003 - DNA, 25 bp, Homo sapien
tgagcaaacttcaacttaagagagg

SEQ ID NO: 2465004 - DNA, 25 bp, Homo sapien
cctgagcaaacttcaacttaagaga

SEQ ID NO: 2465005 - DNA, 25 bp, Homo sapien
tcctgagcaaacttcaacttaagag

SEQ ID NO: 2465006 - DNA, 25 bp, Homo sapien
tggcctgggcgttgactgggactga

SEQ ID NO: 2465007 - DNA, 25 bp, Homo sapien
cctgggcgttgactgggactgagca

SEQ ID NO: 2465008 - DNA, 25 bp, Homo sapien
gcctgggcgttgactgggactgagc

SEQ ID NO: 2465009 - DNA, 25 bp, Homo sapien
ctgggcgttgactgggactgagcag

SEQ ID NO: 2465010 - DNA, 25 bp, Homo sapien
ctgtcaatgccggtaagttggtggt

SEQ ID NO: 2465011 - DNA, 25 bp, Homo sapien
tcaatgccggtaagttggtggtcag

SEQ ID NO: 2465012 - DNA, 25 bp, Homo sapien
tgtcaatgccggtaagttggtggtc

SEQ ID NO: 2465013 - DNA, 25 bp, Homo sapien
ctactgtcaatgccggtaagttggt

SEQ ID NO: 2465014 - DNA, 25 bp, Homo sapien
ggggaacacaagaacccttcatcca

SEQ ID NO: 2465015 - DNA, 25 bp, Homo sapien
caggggaacacaagaacccttcatc

SEQ ID NO: 2465016 - DNA, 25 bp, Homo sapien
tacaggggaacacaagaacccttca

SEQ ID NO: 2465017 - DNA, 25 bp, Homo sapien
gggaacacaagaacccttcatccat

SEQ ID NO: 2465018 - DNA, 25 bp, Homo sapien
catccaggacaatgggtcctgagcc

SEQ ID NO: 2465019 - DNA, 25 bp, Homo sapien
tccactcggcctcgacacctgtcac

SEQ ID NO: 2465020 - DNA, 25 bp, Homo sapien
tgagccctggccaaaccgggcattt

SEQ ID NO: 2465021 - DNA, 25 bp, Homo sapien
gtaggactcattccctgagcagcgc

SEQ ID NO: 2465022 - DNA, 25 bp, Homo sapien
tgagcagatgacaccagcgtcttcg

SEQ ID NO: 2465023 - DNA, 25 bp, Homo sapien
cgtcttcgtgatggccacagttgtg

SEQ ID NO: 2465024 - DNA, 25 bp, Homo sapien
acagttgtgggtgagccagcctttg

SEQ ID NO: 2465025 - DNA, 25 bp, Homo sapien
gacaccagcgtcttcgtgatggcca

SEQ ID NO: 2465026 - DNA, 25 bp, Homo sapien
tggccctgacactggtcacctccat

SEQ ID NO: 2465027 - DNA, 25 bp, Homo sapien
ctcagggccaaaccagaattggatt

SEQ ID NO: 2465028 - DNA, 25 bp, Homo sapien
attggtgtcatcatacacggtgccc

SEQ ID NO: 2465029 - DNA, 25 bp, Homo sapien
caggcatttcctgggaatgccacgg

SEQ ID NO: 2465030 - DNA, 25 bp, Homo sapien
catccaggacaatgggtcctgagcc

SEQ ID NO: 2465031 - DNA, 25 bp, Homo sapien
taaaatagaggcccaaggtcttgga

SEQ ID NO: 2465032 - DNA, 25 bp, Homo sapien
tgtcgtagtagaatttatttgggtg

SEQ ID NO: 2465033 - DNA, 25 bp, Homo sapien
ctgtcgtagtagaatttatttgggt

SEQ ID NO: 2465034 - DNA, 25 bp, Homo sapien
gttgtagttgttggatgccaccaat

SEQ ID NO: 2465035 - DNA, 25 bp, Homo sapien
ggttgtagttgttggatgccaccaa

SEQ ID NO: 2465036 - DNA, 25 bp, Homo sapien
ctagagaggagagaggggacatctc

SEQ ID NO: 2465037 - DNA, 25 bp, Homo sapien
tagagaggagagaggggacatctcc

SEQ ID NO: 2465038 - DNA, 25 bp, Homo sapien
agagaggagagaggggacatctcca

SEQ ID NO: 2465039 - DNA, 25 bp, Homo sapien
gagaggagagaggggacatctccat

SEQ ID NO: 2465040 - DNA, 25 bp, Homo sapien
catagaataagaagccaccacaatt

SEQ ID NO: 2465041 - DNA, 25 bp, Homo sapien
aagccaccacaatttgaagagggtc

SEQ ID NO: 2465042 - DNA, 25 bp, Homo sapien
tggcatagaataagaagccaccaca

SEQ ID NO: 2465043 - DNA, 25 bp, Homo sapien
agaataagaagccaccacaatttga

SEQ ID NO: 2465044 - DNA, 25 bp, Homo sapien
cacttagcattgttggggtagtatg

SEQ ID NO: 2465045 - DNA, 25 bp, Homo sapien
agaattcacttctatttcccaaaca

SEQ ID NO: 2465046 - DNA, 25 bp, Homo sapien
ccaggtttatgcgataaccagaatt

SEQ ID NO: 2465047 - DNA, 25 bp, Homo sapien
tatgcgataaccagaattcacttct

SEQ ID NO: 2465048 - DNA, 25 bp, Homo sapien
cacttcgaaagtgaatggtcattcg

SEQ ID NO: 2465049 - DNA, 25 bp, Homo sapien
tgggaaggagttataccaagccaaa

SEQ ID NO: 2465050 - DNA, 25 bp, Homo sapien
aactgcagttatggtgtgcctccaa

SEQ ID NO: 2465051 - DNA, 25 bp, Homo sapien
caggagactgctattcaatgatcca

SEQ ID NO: 2465052 - DNA, 25 bp, Homo sapien
aaagacacattaactgagagatcat

SEQ ID NO: 2465053 - DNA, 25 bp, Homo sapien
caaaggccaagcatcccacaggcct

SEQ ID NO: 2465054 - DNA, 25 bp, Homo sapien
aatgtcccacaacaaacctcaaagg

SEQ ID NO: 2465055 - DNA, 25 bp, Homo sapien
gatcatggccatgtcccacaacaaa

SEQ ID NO: 2465056 - DNA, 25 bp, Homo sapien
tacacgcccggcacatagaccatag

SEQ ID NO: 2465057 - DNA, 25 bp, Homo sapien
cacatagaccataggatgaatttaa

SEQ ID NO: 2465058 - DNA, 25 bp, Homo sapien
taaattgaccaacctcaaggtggca

SEQ ID NO: 2465059 - DNA, 25 bp, Homo sapien
ccggcacatagaccataggatgaat

SEQ ID NO: 2465060 - DNA, 25 bp, Homo sapien
ttccaagggctgaaactgcacgtcc

SEQ ID NO: 2465061 - DNA, 25 bp, Homo sapien
tgagcactctacatcgtccagggtg

SEQ ID NO: 2465062 - DNA, 25 bp, Homo sapien
agagagtggattccgtccctgagca

SEQ ID NO: 2465063 - DNA, 25 bp, Homo sapien
tacagttgtgggagaaccagcctcg

SEQ ID NO: 2465064 - DNA, 25 bp, Homo sapien
ggccttccatggcattgggccatac

SEQ ID NO: 2465065 - DNA, 25 bp, Homo sapien
aggtgaaatgggccttccatggcat

SEQ ID NO: 2465066 - DNA, 25 bp, Homo sapien
gtgaaatgggccttccatggcattg

SEQ ID NO: 2465067 - DNA, 25 bp, Homo sapien
tgggccttccatggcattgggccat

SEQ ID NO: 2465068 - DNA, 25 bp, Homo sapien
tcctaatcttaggtgggtcaggcca

SEQ ID NO: 2465069 - DNA, 25 bp, Homo sapien
gactggagatcctaatcttaggtgg

SEQ ID NO: 2465070 - DNA, 25 bp, Homo sapien
ctcgggactgactggagatcctaat

SEQ ID NO: 2465071 - DNA, 25 bp, Homo sapien
gactgactggagatcctaatcttag

SEQ ID NO: 2465072 - DNA, 25 bp, Homo sapien
tgtttggacgggtgatgttgagaaa

SEQ ID NO: 2465073 - DNA, 25 bp, Homo sapien
ggacgggtgatgttgagaaaaggag

SEQ ID NO: 2465074 - DNA, 25 bp, Homo sapien
tttggacgggtgatgttgagaaaag

SEQ ID NO: 2465075 - DNA, 25 bp, Homo sapien
ttggacgggtgatgttgagaaaagg

SEQ ID NO: 2465076 - DNA, 25 bp, Homo sapien
tggaaaagtcccctgatggttggga

SEQ ID NO: 2465077 - DNA, 25 bp, Homo sapien
gataggaagcctccgcaggaataat

SEQ ID NO: 2465078 - DNA, 25 bp, Homo sapien
cccctgatggttgggataggaagcc

SEQ ID NO: 2465079 - DNA, 25 bp, Homo sapien
aggaagcctccgcaggaataatctg

SEQ ID NO: 2465080 - DNA, 25 bp, Homo sapien
gttttgcacctcaatgtcccacaca

SEQ ID NO: 2465081 - DNA, 25 bp, Homo sapien
tgtttggatagttcccgggatagaa

SEQ ID NO: 2465082 - DNA, 25 bp, Homo sapien
cttggcattgtttggatagttcccg

SEQ ID NO: 2465083 - DNA, 25 bp, Homo sapien
agatcacagtcacacggtagttgtt

SEQ ID NO: 2465084 - DNA, 25 bp, Homo sapien
cattggagggactggagtagtactc

SEQ ID NO: 2465085 - DNA, 25 bp, Homo sapien
tataatcatagttgcagccaccttc

SEQ ID NO: 2465086 - DNA, 25 bp, Homo sapien
catcacaaactcgagcaatgagagg

SEQ ID NO: 2465087 - DNA, 25 bp, Homo sapien
gaagaagtgaaggagcctctggccc

SEQ ID NO: 2465088 - DNA, 25 bp, Homo sapien
caaggattggagatagctcctgctc

SEQ ID NO: 2465089 - DNA, 25 bp, Homo sapien
gacactcgtagtatccattccaggt

SEQ ID NO: 2465090 - DNA, 25 bp, Homo sapien
tgtgaatatcaccaggttcggcgtt

SEQ ID NO: 2465091 - DNA, 25 bp, Homo sapien
cactggcttgcatgtgatttggcag

SEQ ID NO: 2465092 - DNA, 25 bp, Homo sapien
gcaatgtacatggtgtcgacccagg

SEQ ID NO: 2465093 - DNA, 25 bp, Homo sapien
tactggacttcctcgacctggatgg

SEQ ID NO: 2465094 - DNA, 25 bp, Homo sapien
cattggagtatggtgatgccacgca

SEQ ID NO: 2465095 - DNA, 25 bp, Homo sapien
ttcaggtccacgtagtaagggcggc

SEQ ID NO: 2465096 - DNA, 25 bp, Homo sapien
caggtcattctaatggacttccagg

SEQ ID NO: 2465097 - DNA, 25 bp, Homo sapien
cccaccaggccaaacagagaatgta

SEQ ID NO: 2465098 - DNA, 25 bp, Homo sapien
gcatttgccgtaaaaccctgccatt

SEQ ID NO: 2465099 - DNA, 25 bp, Homo sapien
tgtgctccaggtatagccagggtac

SEQ ID NO: 2465100 - DNA, 25 bp, Homo sapien
ccggaagcgggcaatgcgaagagat

SEQ ID NO: 2465101 - DNA, 25 bp, Homo sapien
tcaggaagtggaaggccctgaaccg

SEQ ID NO: 2465102 - DNA, 25 bp, Homo sapien
gagtagggtccgtaggtgtcatccc

SEQ ID NO: 2465103 - DNA, 25 bp, Homo sapien
attttacaacgcaggtacacggagg

SEQ ID NO: 2465104 - DNA, 25 bp, Homo sapien
tcttctcggcgtgggggggtctgca

SEQ ID NO: 2465105 - DNA, 25 bp, Homo sapien
gaggctcctcttctcggcgtggggg

SEQ ID NO: 2465106 - DNA, 25 bp, Homo sapien
ggatgggacccaggacgacgtccac

SEQ ID NO: 2465107 - DNA, 25 bp, Homo sapien
gggtctgcagctggatgggacccag

SEQ ID NO: 2465108 - DNA, 25 bp, Homo sapien
tgtaagtaaccctctcaacagtgct

SEQ ID NO: 2465109 - DNA, 25 bp, Homo sapien
tctgggacgtcaggtctatgggcca

SEQ ID NO: 2465110 - DNA, 25 bp, Homo sapien
tctgattcaactccgtatgaccagg

SEQ ID NO: 2465111 - DNA, 25 bp, Homo sapien
aggtgcagcacaatgtagggctcaa

SEQ ID NO: 2465112 - DNA, 25 bp, Homo sapien
ttctcattctgtatgacaaccaccc

SEQ ID NO: 2465113 - DNA, 25 bp, Homo sapien
tccaggctgcatcctgcatatcctg

SEQ ID NO: 2465114 - DNA, 25 bp, Homo sapien
aagacacacgagttgccccttctca

SEQ ID NO: 2465115 - DNA, 25 bp, Homo sapien
gaaccaacactccaaggacactggg

SEQ ID NO: 2465116 - DNA, 25 bp, Homo sapien
tcgaaggggctggagggcagcctct

SEQ ID NO: 2465117 - DNA, 25 bp, Homo sapien
gaaggggctggagggcagcctctgt

SEQ ID NO: 2465118 - DNA, 25 bp, Homo sapien
aggggctggagggcagcctctgtcc

SEQ ID NO: 2465119 - DNA, 25 bp, Homo sapien
ctgtggttcgaaggggctggagggc

SEQ ID NO: 2465120 - DNA, 25 bp, Homo sapien
atagctccaaggttgttctgcagcg

SEQ ID NO: 2465121 - DNA, 25 bp, Homo sapien
tagctccaaggttgttctgcagcgc

SEQ ID NO: 2465122 - DNA, 25 bp, Homo sapien
gctccaaggttgttctgcagcgccc

SEQ ID NO: 2465123 - DNA, 25 bp, Homo sapien
tccaaggttgttctgcagcgccctc

SEQ ID NO: 2465124 - DNA, 25 bp, Homo sapien
ggggacaagatctcaaggggctgct

SEQ ID NO: 2465125 - DNA, 25 bp, Homo sapien
gccactgcagggatttggatgccag

SEQ ID NO: 2465126 - DNA, 25 bp, Homo sapien
ccactgcagggatttggatgccagg

SEQ ID NO: 2465127 - DNA, 25 bp, Homo sapien
tagccactgcagggatttggatgcc

SEQ ID NO: 2465128 - DNA, 25 bp, Homo sapien
catgctaggacctacacggctcagt

SEQ ID NO: 2465129 - DNA, 25 bp, Homo sapien
tggacttaagatggactgttcctct

SEQ ID NO: 2465130 - DNA, 25 bp, Homo sapien
gcagttttccttaaggttacacaga

SEQ ID NO: 2465131 - DNA, 25 bp, Homo sapien
catgaatttccatagcagcattgct

SEQ ID NO: 2465132 - DNA, 25 bp, Homo sapien
gcaggatctgagtgtgctgcaggat

SEQ ID NO: 2465133 - DNA, 25 bp, Homo sapien
ctggagccaaggctgtccaagctgc

SEQ ID NO: 2465134 - DNA, 25 bp, Homo sapien
tgcaggatctgagtgtgctgcagga

SEQ ID NO: 2465135 - DNA, 25 bp, Homo sapien
ggagccaaggctgtccaagctgcag

SEQ ID NO: 2465136 - DNA, 25 bp, Homo sapien
cagcagtgcccaagcgaaggctctg

SEQ ID NO: 2465137 - DNA, 25 bp, Homo sapien
agcagtgcccaagcgaaggctctgg

SEQ ID NO: 2465138 - DNA, 25 bp, Homo sapien
tcctgtgctgcaagtcctttttcag

SEQ ID NO: 2465139 - DNA, 25 bp, Homo sapien
tgggcaaatggtctaagttctgtat

SEQ ID NO: 2465140 - DNA, 25 bp, Homo sapien
gcccgtgttgggcaaatggtctaag

SEQ ID NO: 2465141 - DNA, 25 bp, Homo sapien
tctcctgtgctgcaagtcctttttc

SEQ ID NO: 2465142 - DNA, 25 bp, Homo sapien
tatatgcagcatgccactcagctgg

SEQ ID NO: 2465143 - DNA, 25 bp, Homo sapien
tctctatatgcagcatgccactcag

SEQ ID NO: 2465144 - DNA, 25 bp, Homo sapien
acatctctatatgcagcatgccact

SEQ ID NO: 2465145 - DNA, 25 bp, Homo sapien
tctatatgcagcatgccactcagct

SEQ ID NO: 2465146 - DNA, 25 bp, Homo sapien
agagcaagttgttgttagggcagct

SEQ ID NO: 2465147 - DNA, 25 bp, Homo sapien
tgggagagcaagttgttgttagggc

SEQ ID NO: 2465148 - DNA, 25 bp, Homo sapien
aagttgttgttagggcagctccaca

SEQ ID NO: 2465149 - DNA, 25 bp, Homo sapien
agcaagttgttgttagggcagctcc

SEQ ID NO: 2465150 - DNA, 25 bp, Homo sapien
gcaaatggagctttaacagttgtgg

SEQ ID NO: 2465151 - DNA, 25 bp, Homo sapien
ggcaaatggagctttaacagttgtg

SEQ ID NO: 2465152 - DNA, 25 bp, Homo sapien
gcgtagttgaagatcctgccatatt

SEQ ID NO: 2465153 - DNA, 25 bp, Homo sapien
tcaactcgatgatccagacgcattc

SEQ ID NO: 2465154 - DNA, 25 bp, Homo sapien
cagacgcattcagttttcggcccag

SEQ ID NO: 2465155 - DNA, 25 bp, Homo sapien
tgaggtctggaatggccaccgtgac

SEQ ID NO: 2465156 - DNA, 25 bp, Homo sapien
tggatgactgggttctctggagtac

SEQ ID NO: 2465157 - DNA, 25 bp, Homo sapien
tgaccaagcgtcaacaaagtaatat

SEQ ID NO: 2465158 - DNA, 25 bp, Homo sapien
ggactcagaccctggaggtccatcc

SEQ ID NO: 2465159 - DNA, 25 bp, Homo sapien
ggtccatccagcacttccacgtatt

SEQ ID NO: 2465160 - DNA, 25 bp, Homo sapien
gacaggcaccattgtacccccagtg

SEQ ID NO: 2465161 - DNA, 25 bp, Homo sapien
tacccccagtgtacagtaaacacag

SEQ ID NO: 2465162 - DNA, 25 bp, Homo sapien
taaatatatattggatagatgaaga

SEQ ID NO: 2465163 - DNA, 25 bp, Homo sapien
tatattggatagatgaagaactcta

SEQ ID NO: 2465164 - DNA, 25 bp, Homo sapien
tctcaactagaaccatggcattctg

SEQ ID NO: 2465165 - DNA, 25 bp, Homo sapien
taaaccagtaatccagtagcagtag

SEQ ID NO: 2465166 - DNA, 25 bp, Homo sapien
tatctcggctctttagctccactgg

SEQ ID NO: 2465167 - DNA, 25 bp, Homo sapien
gcagtagattgtccctcttccctga

SEQ ID NO: 2465168 - DNA, 25 bp, Homo sapien
ggagagagcggcatacagagcaggg

SEQ ID NO: 2465169 - DNA, 25 bp, Homo sapien
tcctgctgctgtgatcggcggcggc

SEQ ID NO: 2465170 - DNA, 25 bp, Homo sapien
gatgcccccagaaaagtcacgactg

SEQ ID NO: 2465171 - DNA, 25 bp, Homo sapien
ggcccaaccacatcaaccgcggcgg

SEQ ID NO: 2465172 - DNA, 25 bp, Homo sapien
ccaggatcgcgatcttccgggactt

SEQ ID NO: 2465173 - DNA, 25 bp, Homo sapien
caaattggccttcaacaaattgaat

SEQ ID NO: 2465174 - DNA, 25 bp, Homo sapien
gatcgtaggagtccacaaattggcc

SEQ ID NO: 2465175 - DNA, 25 bp, Homo sapien
aattgaatcgtcaatgaggatttcc

SEQ ID NO: 2465176 - DNA, 25 bp, Homo sapien
aaagatgatattcttgtccatttac

SEQ ID NO: 2465177 - DNA, 25 bp, Homo sapien
ttgcccggctgtgtctacaagttaa

SEQ ID NO: 2465178 - DNA, 25 bp, Homo sapien
tgtctacaagttaaagatgatattc

SEQ ID NO: 2465179 - DNA, 25 bp, Homo sapien
gatagaatattcatcttgcccggct

SEQ ID NO: 2465180 - DNA, 25 bp, Homo sapien
atgaagacttgccttgtgaagctgc

SEQ ID NO: 2465181 - DNA, 25 bp, Homo sapien
tatagccattaatatctatggagta

SEQ ID NO: 2465182 - DNA, 25 bp, Homo sapien
aagaatatagccattaatatctatg

SEQ ID NO: 2465183 - DNA, 25 bp, Homo sapien
gaatatagccattaatatctatgga

SEQ ID NO: 2465184 - DNA, 25 bp, Homo sapien
ggagctctgacccaaatgatatctt

SEQ ID NO: 2465185 - DNA, 25 bp, Homo sapien
acagactcagagttaacataatctg

SEQ ID NO: 2465186 - DNA, 25 bp, Homo sapien
ttggacagactcagagttaacataa

SEQ ID NO: 2465187 - DNA, 25 bp, Homo sapien
ggggagctctgacccaaatgatatc

SEQ ID NO: 2465188 - DNA, 25 bp, Homo sapien
ttgttgcaattgctcgagggcttca

SEQ ID NO: 2465189 - DNA, 25 bp, Homo sapien
tgctcgagggcttcatcataattat

SEQ ID NO: 2465190 - DNA, 25 bp, Homo sapien
tgagttgtaaccacttgcaaaatca

SEQ ID NO: 2465191 - DNA, 25 bp, Homo sapien
gatcagaaataagaatcctctcatg

SEQ ID NO: 2465192 - DNA, 25 bp, Homo sapien
gctacaatgaatattcaagtgctta

SEQ ID NO: 2465193 - DNA, 25 bp, Homo sapien
ttctacacagcctaccaacatctgt

SEQ ID NO: 2465194 - DNA, 25 bp, Homo sapien
gaatattcaagtgcttatgtctttt

SEQ ID NO: 2465195 - DNA, 25 bp, Homo sapien
cacagcctaccaacatctgtcgttt

SEQ ID NO: 2465196 - DNA, 25 bp, Homo sapien
gattgctgaccaaaataagatattg

SEQ ID NO: 2465197 - DNA, 25 bp, Homo sapien
tctgttacctgggaatactgcgtga

SEQ ID NO: 2465198 - DNA, 25 bp, Homo sapien
gtcacattatcagaactaggtttgt

SEQ ID NO: 2465199 - DNA, 25 bp, Homo sapien
tatgcttgagtacgtgattgattgc

SEQ ID NO: 2465200 - DNA, 25 bp, Homo sapien
aatgttgatcttgggcctgttccac

SEQ ID NO: 2465201 - DNA, 25 bp, Homo sapien
agttgagggtaccaggctgctccag

SEQ ID NO: 2465202 - DNA, 25 bp, Homo sapien
cacaaaggagggtgcacttttttga

SEQ ID NO: 2465203 - DNA, 25 bp, Homo sapien
atgaccaaggcgttgtatgcaattc

SEQ ID NO: 2465204 - DNA, 25 bp, Homo sapien
tctgatatcttcacaaaggagggtg

SEQ ID NO: 2465205 - DNA, 25 bp, Homo sapien
gcgttgtatgcaattctaggttttc

SEQ ID NO: 2465206 - DNA, 25 bp, Homo sapien
acaattcctggctgcgtcctcaaac

SEQ ID NO: 2465207 - DNA, 25 bp, Homo sapien
gctatagcctgagaatctttcatca

SEQ ID NO: 2465208 - DNA, 25 bp, Homo sapien
tcctcaaacaagtggggctatagcc

SEQ ID NO: 2465209 - DNA, 25 bp, Homo sapien
ccaagaacatgcacaattcctggct

SEQ ID NO: 2465210 - DNA, 25 bp, Homo sapien
taaacaggcctctgtgaacaaagcc

SEQ ID NO: 2465211 - DNA, 25 bp, Homo sapien
ttggcatggcttgctaatgaggagc

SEQ ID NO: 2465212 - DNA, 25 bp, Homo sapien
tcagccctcatagctgaacataaag

SEQ ID NO: 2465213 - DNA, 25 bp, Homo sapien
tttaatggcacagttttggcatggc

SEQ ID NO: 2465214 - DNA, 25 bp, Homo sapien
agttttcttgagcattattctccct

SEQ ID NO: 2465215 - DNA, 25 bp, Homo sapien
catagtcaatttaaaggcttcttta

SEQ ID NO: 2465216 - DNA, 25 bp, Homo sapien
tttctccatagtcaatttaaaggct

SEQ ID NO: 2465217 - DNA, 25 bp, Homo sapien
gcttctttaagccttaagccttcaa

SEQ ID NO: 2465218 - DNA, 25 bp, Homo sapien
tgtaagaggaaatgccagctctgaa

SEQ ID NO: 2465219 - DNA, 25 bp, Homo sapien
gctctgaaatctgggctttaattag

SEQ ID NO: 2465220 - DNA, 25 bp, Homo sapien
atctgggctttaattagaaccactc

SEQ ID NO: 2465221 - DNA, 25 bp, Homo sapien
tgaaatctgggctttaattagaacc

SEQ ID NO: 2465222 - DNA, 25 bp, Homo sapien
tttcttcatagtaaatggcaagcag

SEQ ID NO: 2465223 - DNA, 25 bp, Homo sapien
cttcatagtaaatggcaagcagcta

SEQ ID NO: 2465224 - DNA, 25 bp, Homo sapien
taaatggcaagcagctaaaacattg

SEQ ID NO: 2465225 - DNA, 25 bp, Homo sapien
catagtaaatggcaagcagctaaaa

SEQ ID NO: 2465226 - DNA, 25 bp, Homo sapien
agatgaggcctgagtgattccagac

SEQ ID NO: 2465227 - DNA, 25 bp, Homo sapien
tcagatgaggcctgagtgattccag

SEQ ID NO: 2465228 - DNA, 25 bp, Homo sapien
gatgaggcctgagtgattccagacc

SEQ ID NO: 2465229 - DNA, 25 bp, Homo sapien
cagatgaggcctgagtgattccaga

SEQ ID NO: 2465230 - DNA, 25 bp, Homo sapien
ttctacatggatgtaaacattatgt

SEQ ID NO: 2465231 - DNA, 25 bp, Homo sapien
taaacattatgtcttccatcaacgg

SEQ ID NO: 2465232 - DNA, 25 bp, Homo sapien
catcaacggcagtcattaacgctgg

SEQ ID NO: 2465233 - DNA, 25 bp, Homo sapien
gctttgattctacatggatgtaaac

SEQ ID NO: 2465234 - DNA, 25 bp, Homo sapien
acatctgcatcctcataggctcttc

SEQ ID NO: 2465235 - DNA, 25 bp, Homo sapien
catctgcatcctcataggctcttcc

SEQ ID NO: 2465236 - DNA, 25 bp, Homo sapien
tacacaaggttctgcgctgactgcc

SEQ ID NO: 2465237 - DNA, 25 bp, Homo sapien
atacacaaggttctgcgctgactgc

SEQ ID NO: 2465238 - DNA, 25 bp, Homo sapien
ggagaaatcttgttgtaatggatag

SEQ ID NO: 2465239 - DNA, 25 bp, Homo sapien
agaaatcttgttgtaatggatagct

SEQ ID NO: 2465240 - DNA, 25 bp, Homo sapien
gaaatcttgttgtaatggatagctg

SEQ ID NO: 2465241 - DNA, 25 bp, Homo sapien
gagaaatcttgttgtaatggatagc

SEQ ID NO: 2465242 - DNA, 25 bp, Homo sapien
cagagacgggcattggctccatgct

SEQ ID NO: 2465243 - DNA, 25 bp, Homo sapien
agagacgggcattggctccatgctt

SEQ ID NO: 2465244 - DNA, 25 bp, Homo sapien
gagacgggcattggctccatgcttt

SEQ ID NO: 2465245 - DNA, 25 bp, Homo sapien
tcagagacgggcattggctccatgc

SEQ ID NO: 2465246 - DNA, 25 bp, Homo sapien
tatctagtgcaattctctttgtaaa

SEQ ID NO: 2465247 - DNA, 25 bp, Homo sapien
ggcactcaaatcctagacacgaact

SEQ ID NO: 2465248 - DNA, 25 bp, Homo sapien
gagaacagattgctacatgtttgct

SEQ ID NO: 2465249 - DNA, 25 bp, Homo sapien
cattcagtaaggcactcaaatccta

SEQ ID NO: 2465250 - DNA, 25 bp, Homo sapien
ctttttatagaaagacacgcttgtc

SEQ ID NO: 2465251 - DNA, 25 bp, Homo sapien
ctggttgatgtagggattaggtctc

SEQ ID NO: 2465252 - DNA, 25 bp, Homo sapien
tggggattatgttctggttgatgta

SEQ ID NO: 2465253 - DNA, 25 bp, Homo sapien
ggttgatgtagggattaggtctcca

SEQ ID NO: 2465254 - DNA, 25 bp, Homo sapien
ttctggttgatgtagggattaggtc

SEQ ID NO: 2465255 - DNA, 25 bp, Homo sapien
ccgtggggacgtgattaacaggtca

SEQ ID NO: 2465256 - DNA, 25 bp, Homo sapien
gagagccgtggggacgtgattaaca

SEQ ID NO: 2465257 - DNA, 25 bp, Homo sapien
gccgtggggacgtgattaacaggtc

SEQ ID NO: 2465258 - DNA, 25 bp, Homo sapien
gagccgtggggacgtgattaacagg

SEQ ID NO: 2465259 - DNA, 25 bp, Homo sapien
ggctttttgagaatcggctggcatc

SEQ ID NO: 2465260 - DNA, 25 bp, Homo sapien
ggtgctgactgacaaacttcccggg

SEQ ID NO: 2465261 - DNA, 25 bp, Homo sapien
cattgctgcagtaccgtctggcaaa

SEQ ID NO: 2465262 - DNA, 25 bp, Homo sapien
gcatcagggtgctgactgacaaact

SEQ ID NO: 2465263 - DNA, 25 bp, Homo sapien
tgctgtttacattccataagcctgg

SEQ ID NO: 2465264 - DNA, 25 bp, Homo sapien
gagaaaggagctagcccttaccgct

SEQ ID NO: 2465265 - DNA, 25 bp, Homo sapien
ttagtatgccactatgacgccggat

SEQ ID NO: 2465266 - DNA, 25 bp, Homo sapien
tcaagaggtatgtttctcaaagtgg

SEQ ID NO: 2465267 - DNA, 25 bp, Homo sapien
ggtggacaatgcaatgaaccatgct

SEQ ID NO: 2465268 - DNA, 25 bp, Homo sapien
ccattgttgccaaactgacattcca

SEQ ID NO: 2465269 - DNA, 25 bp, Homo sapien
agagctgcttttgggcctcgatgcc

SEQ ID NO: 2465270 - DNA, 25 bp, Homo sapien
aacactacagggcaatggacacagc

SEQ ID NO: 2465271 - DNA, 25 bp, Homo sapien
tgaagccaacgagggaacagttact

SEQ ID NO: 2465272 - DNA, 25 bp, Homo sapien
tgctcggcctcttagctaaaatcag

SEQ ID NO: 2465273 - DNA, 25 bp, Homo sapien
gaatgagtgttggtctgcctcaagc

SEQ ID NO: 2465274 - DNA, 25 bp, Homo sapien
ggaaaagtagttcacagagggccag

SEQ ID NO: 2465275 - DNA, 25 bp, Homo sapien
catttctgttgacaagtgattttca

SEQ ID NO: 2465276 - DNA, 25 bp, Homo sapien
tattttgtgaatataggattacagg

SEQ ID NO: 2465277 - DNA, 25 bp, Homo sapien
ggaacttcagaatggcactccatta

SEQ ID NO: 2465278 - DNA, 25 bp, Homo sapien
ttgtttctcctttgagagtaatgtg

SEQ ID NO: 2465279 - DNA, 25 bp, Homo sapien
tatgtttatgacataagtataaaca

SEQ ID NO: 2465280 - DNA, 25 bp, Homo sapien
tagatttattagagggagcatggcc

SEQ ID NO: 2465281 - DNA, 25 bp, Homo sapien
tagatttaagtcgagctcagtggct

SEQ ID NO: 2465282 - DNA, 25 bp, Homo sapien
tgtgtgtgcaggtttatacacataa

SEQ ID NO: 2465283 - DNA, 25 bp, Homo sapien
ccaaacttaacattcttgtaataga

SEQ ID NO: 2465284 - DNA, 25 bp, Homo sapien
caggtgaatcgctcttctcaagaca

SEQ ID NO: 2465285 - DNA, 25 bp, Homo sapien
gtgtgactgcggaggccagggccat

SEQ ID NO: 2465286 - DNA, 25 bp, Homo sapien
caagctagccaagaggtgaggttca

SEQ ID NO: 2465287 - DNA, 25 bp, Homo sapien
tggtcccgggccgtctttctgaggc

SEQ ID NO: 2465288 - DNA, 25 bp, Homo sapien
aacccagagctgtacaagttcccag

SEQ ID NO: 2465289 - DNA, 25 bp, Homo sapien
tgctggtgggcttgatcaaggcaca

SEQ ID NO: 2465290 - DNA, 25 bp, Homo sapien
gtgaagctctacctgctgcccgatg

SEQ ID NO: 2465291 - DNA, 25 bp, Homo sapien
cccgcagtttgacgagcacttcatc

SEQ ID NO: 2465292 - DNA, 25 bp, Homo sapien
caggggcaacaacaaacatacagac

SEQ ID NO: 2465293 - DNA, 25 bp, Homo sapien
taacatgcgtgtggcttaaactact

SEQ ID NO: 2465294 - DNA, 25 bp, Homo sapien
atctaactcagacccgaggccttgg

SEQ ID NO: 2465295 - DNA, 25 bp, Homo sapien
ccccgaactgtgagataacatgcgt

SEQ ID NO: 2465296 - DNA, 25 bp, Homo sapien
tcaaccggacacaaatgtgggggct

SEQ ID NO: 2465297 - DNA, 25 bp, Homo sapien
tggagtgggagaggttagaaaaggc

SEQ ID NO: 2465298 - DNA, 25 bp, Homo sapien
aaaggaaagggccactagctagcag

SEQ ID NO: 2465299 - DNA, 25 bp, Homo sapien
gagttgatgtgaaatgacctggagt

SEQ ID NO: 2465300 - DNA, 25 bp, Homo sapien
catggaaatacaacttccgcttggc

SEQ ID NO: 2465301 - DNA, 25 bp, Homo sapien
caggcatttgcaggtctttaaactc

SEQ ID NO: 2465302 - DNA, 25 bp, Homo sapien
gccctccttggaagtgcttttgcca

SEQ ID NO: 2465303 - DNA, 25 bp, Homo sapien
tgcagccctccttggaagtgctttt

SEQ ID NO: 2465304 - DNA, 25 bp, Homo sapien
gggcatcactccttgtccaactggc

SEQ ID NO: 2465305 - DNA, 25 bp, Homo sapien
accccagggcatcactccttgtcca

SEQ ID NO: 2465306 - DNA, 25 bp, Homo sapien
caactggcccccttcgtccattcat

SEQ ID NO: 2465307 - DNA, 25 bp, Homo sapien
ccaactggcccccttcgtccattca

SEQ ID NO: 2465308 - DNA, 25 bp, Homo sapien
caggaggtggtttaatccaccccag

SEQ ID NO: 2465309 - DNA, 25 bp, Homo sapien
gataggaacactcagggccaactct

SEQ ID NO: 2465310 - DNA, 25 bp, Homo sapien
tgaacggggcctgataggaacactc

SEQ ID NO: 2465311 - DNA, 25 bp, Homo sapien
gcacaaacccccattgcacagtggg

SEQ ID NO: 2465312 - DNA, 25 bp, Homo sapien
ttgtggccgatgtcccgtggccaat

SEQ ID NO: 2465313 - DNA, 25 bp, Homo sapien
tctcctgccccatttgatgccgaag

SEQ ID NO: 2465314 - DNA, 25 bp, Homo sapien
tgtcccgtggccaatgccaggctgt

SEQ ID NO: 2465315 - DNA, 25 bp, Homo sapien
tgatgccgaagttgctatggttgtg

SEQ ID NO: 2465316 - DNA, 25 bp, Homo sapien
tggccctgccaatcgtgctcatgac

SEQ ID NO: 2465317 - DNA, 25 bp, Homo sapien
gtcactgagtggatctccacctgcc

SEQ ID NO: 2465318 - DNA, 25 bp, Homo sapien
catgccatggaacaagtcactgagt

SEQ ID NO: 2465319 - DNA, 25 bp, Homo sapien
aatcgtgctcatgacatgccatgga

SEQ ID NO: 2465320 - DNA, 25 bp, Homo sapien
tgcagcagtgagataagatgcccac

SEQ ID NO: 2465321 - DNA, 25 bp, Homo sapien
tactgcgtgcccagctgtagggcta

SEQ ID NO: 2465322 - DNA, 25 bp, Homo sapien
tcaatcagacctatcctgcctgaca

SEQ ID NO: 2465323 - DNA, 25 bp, Homo sapien
ggctagggaacatgggattcattca

SEQ ID NO: 2465324 - DNA, 25 bp, Homo sapien
aaggagaggccccatgcatcagctt

SEQ ID NO: 2465325 - DNA, 25 bp, Homo sapien
tttccatgagggactcattcagcat

SEQ ID NO: 2465326 - DNA, 25 bp, Homo sapien
gaggccccatgcatcagctttttcc

SEQ ID NO: 2465327 - DNA, 25 bp, Homo sapien
tgcatcagctttttccatgagggac

SEQ ID NO: 2465328 - DNA, 25 bp, Homo sapien
taacgggcacagttggacaggccaa

SEQ ID NO: 2465329 - DNA, 25 bp, Homo sapien
tggtcagaaccatatgcaaggcagt

SEQ ID NO: 2465330 - DNA, 25 bp, Homo sapien
tgtgggataacagctcttggtcaac

SEQ ID NO: 2465331 - DNA, 25 bp, Homo sapien
tccttggtacagagtgggagctcag

SEQ ID NO: 2465332 - DNA, 25 bp, Homo sapien
gctggcttcatgctctcaggcgggt

SEQ ID NO: 2465333 - DNA, 25 bp, Homo sapien
actgtgtccccgcatctgggtgcta

SEQ ID NO: 2465334 - DNA, 25 bp, Homo sapien
gctcactgacgccactagtttggga

SEQ ID NO: 2465335 - DNA, 25 bp, Homo sapien
catccaggctgagttagaagtctca

SEQ ID NO: 2465336 - DNA, 25 bp, Homo sapien
agtggatcttcaccccatgctgagc

SEQ ID NO: 2465337 - DNA, 25 bp, Homo sapien
ccaggctctgggactaacccagcgg

SEQ ID NO: 2465338 - DNA, 25 bp, Homo sapien
gctctgggactaacccagcgggacc

SEQ ID NO: 2465339 - DNA, 25 bp, Homo sapien
gggccaagtcattggctgaggtcat

SEQ ID NO: 2465340 - DNA, 25 bp, Homo sapien
agtcattggctgaggtcatggtcca

SEQ ID NO: 2465341 - DNA, 25 bp, Homo sapien
ttctggatggccacaccgagcacct

SEQ ID NO: 2465342 - DNA, 25 bp, Homo sapien
caggcgcttccagggacggactggt

SEQ ID NO: 2465343 - DNA, 25 bp, Homo sapien
ccagagttacctctgggaacacatg

SEQ ID NO: 2465344 - DNA, 25 bp, Homo sapien
agctccgtacacctcccatgtcatg

SEQ ID NO: 2465345 - DNA, 25 bp, Homo sapien
gatctgtaaactaaaccgctggcca

SEQ ID NO: 2465346 - DNA, 25 bp, Homo sapien
caagagtctgacgaggcaacatggc

SEQ ID NO: 2465347 - DNA, 25 bp, Homo sapien
cctaggtcaggtcatgtgggcaagc

SEQ ID NO: 2465348 - DNA, 25 bp, Homo sapien
tgttgggacctgcatgtagaagacc

SEQ ID NO: 2465349 - DNA, 25 bp, Homo sapien
gagacctccctctgtaaggagatgc

SEQ ID NO: 2465350 - DNA, 25 bp, Homo sapien
gagagaaagggcctagacccatgta

SEQ ID NO: 2465351 - DNA, 25 bp, Homo sapien
gaagagagactactgtatggagcca

SEQ ID NO: 2465352 - DNA, 25 bp, Homo sapien
tggccaagaccgcaagaagagagac

SEQ ID NO: 2465353 - DNA, 25 bp, Homo sapien
caataaagcagcatccgacttcctg

SEQ ID NO: 2465354 - DNA, 25 bp, Homo sapien
caacagggaacaaatctgagtggag

SEQ ID NO: 2465355 - DNA, 25 bp, Homo sapien
tgtcctacggtatcccaggtgccag

SEQ ID NO: 2465356 - DNA, 25 bp, Homo sapien
ggcttccaccccttcaagaattgaa

SEQ ID NO: 2465357 - DNA, 25 bp, Homo sapien
tcaagagccagccaacagagtaaag

SEQ ID NO: 2465358 - DNA, 25 bp, Homo sapien
tgaaggcagaccaaaggtttgcacc

SEQ ID NO: 2465359 - DNA, 25 bp, Homo sapien
gaggctacgtcggttcttggcttca

SEQ ID NO: 2465360 - DNA, 25 bp, Homo sapien
caccatatttgcacagaggctcaga

SEQ ID NO: 2465361 - DNA, 25 bp, Homo sapien
aaaatgaccgccctggagtcacaca

SEQ ID NO: 2465362 - DNA, 25 bp, Homo sapien
catcttcagtggtaatctgcgggaa

SEQ ID NO: 2465363 - DNA, 25 bp, Homo sapien
caagggcgaggatcagaccttcagt

SEQ ID NO: 2465364 - DNA, 25 bp, Homo sapien
tctgcgggaattccagacaagggcg

SEQ ID NO: 2465365 - DNA, 25 bp, Homo sapien
atgtggacagccgggcctgtccagc

SEQ ID NO: 2465366 - DNA, 25 bp, Homo sapien
cctgtccagcccaaccagagggggc

SEQ ID NO: 2465367 - DNA, 25 bp, Homo sapien
cagagggggccgtggattttgtcca

SEQ ID NO: 2465368 - DNA, 25 bp, Homo sapien
agagggggccgtggattttgtccat

SEQ ID NO: 2465369 - DNA, 25 bp, Homo sapien
aggatttcctcaggtagacacaggg

SEQ ID NO: 2465370 - DNA, 25 bp, Homo sapien
aaccaagcatcgcaactgaaggcca

SEQ ID NO: 2465371 - DNA, 25 bp, Homo sapien
ttggctgagcaggatttcctcaggt

SEQ ID NO: 2465372 - DNA, 25 bp, Homo sapien
caactgaaggccaggtaacacagat

SEQ ID NO: 2465373 - DNA, 25 bp, Homo sapien
gctctaggacgtgctaaatgcccca

SEQ ID NO: 2465374 - DNA, 25 bp, Homo sapien
tcaaagcggagccccaggaatgaac

SEQ ID NO: 2465375 - DNA, 25 bp, Homo sapien
accactcggccttcggaggtgagag

SEQ ID NO: 2465376 - DNA, 25 bp, Homo sapien
agaggcacgaaccaggggaccactg

SEQ ID NO: 2465377 - DNA, 25 bp, Homo sapien
acatttgcccctttgcacggagcct

SEQ ID NO: 2465378 - DNA, 25 bp, Homo sapien
gagccgctgtcctggcaggctttgc

SEQ ID NO: 2465379 - DNA, 25 bp, Homo sapien
gaatgcaccgggtgctcagaggagc

SEQ ID NO: 2465380 - DNA, 25 bp, Homo sapien
ttagcaggaatgcaccgggtgctca

SEQ ID NO: 2465381 - DNA, 25 bp, Homo sapien
gaacattaggacagctttcaggtct

SEQ ID NO: 2465382 - DNA, 25 bp, Homo sapien
gatgtgtgaactcagctaacagagg

SEQ ID NO: 2465383 - DNA, 25 bp, Homo sapien
tgaacattccctttcgtacagcagt

SEQ ID NO: 2465384 - DNA, 25 bp, Homo sapien
gaacattccgtttcagagagcagct

SEQ ID NO: 2465385 - DNA, 25 bp, Homo sapien
aatcttctttgggatatatgcacgc

SEQ ID NO: 2465386 - DNA, 25 bp, Homo sapien
gggatatatgcacgcagctaacaga

SEQ ID NO: 2465387 - DNA, 25 bp, Homo sapien
tctttgggatatatgcacgcagcta

SEQ ID NO: 2465388 - DNA, 25 bp, Homo sapien
tatgcacgcagctaacagagttgaa

SEQ ID NO: 2465389 - DNA, 25 bp, Homo sapien
tatgtgtcgagtgtgtgatgtttat

SEQ ID NO: 2465390 - DNA, 25 bp, Homo sapien
tatataaatgaactctaagtaattg

SEQ ID NO: 2465391 - DNA, 25 bp, Homo sapien
gaactctaagtaattggcttaaaga

SEQ ID NO: 2465392 - DNA, 25 bp, Homo sapien
ggtctaaattaggtaggtcaggctg

SEQ ID NO: 2465393 - DNA, 25 bp, Homo sapien
cactaaaactttatcccatggtcca

SEQ ID NO: 2465394 - DNA, 25 bp, Homo sapien
ccatggtccaatccatgagcttgaa

SEQ ID NO: 2465395 - DNA, 25 bp, Homo sapien
gaagtagccatctgccactaaaact

SEQ ID NO: 2465396 - DNA, 25 bp, Homo sapien
tctccactctatttcaaggaagtag

SEQ ID NO: 2465397 - DNA, 25 bp, Homo sapien
caaacagacaaacaatactcaggga

SEQ ID NO: 2465398 - DNA, 25 bp, Homo sapien
ggcaaacagacaaacaatactcagg

SEQ ID NO: 2465399 - DNA, 25 bp, Homo sapien
cagacaaacaatactcagggatcat

SEQ ID NO: 2465400 - DNA, 25 bp, Homo sapien
aacagacaaacaatactcagggatc

SEQ ID NO: 2465401 - DNA, 25 bp, Homo sapien
tcttgaactaagtgatacacttgag

SEQ ID NO: 2465402 - DNA, 25 bp, Homo sapien
aactaagtgatacacttgagggatg

SEQ ID NO: 2465403 - DNA, 25 bp, Homo sapien
ttccaggactcttgaactaagtgat

SEQ ID NO: 2465404 - DNA, 25 bp, Homo sapien
tgaaaagattccaggactcttgaac

SEQ ID NO: 2465405 - DNA, 25 bp, Homo sapien
aatgttcagagaagttgtatggggt

SEQ ID NO: 2465406 - DNA, 25 bp, Homo sapien
tcagagaagttgtatggggtgccca

SEQ ID NO: 2465407 - DNA, 25 bp, Homo sapien
ttcagagaagttgtatggggtgccc

SEQ ID NO: 2465408 - DNA, 25 bp, Homo sapien
tgttcagagaagttgtatggggtgc

SEQ ID NO: 2465409 - DNA, 25 bp, Homo sapien
tgaaggccgacatcttgcagagggt

SEQ ID NO: 2465410 - DNA, 25 bp, Homo sapien
cacaggcaatgacccagatgagcac

SEQ ID NO: 2465411 - DNA, 25 bp, Homo sapien
taggtgcccttgtgaaacacgcgcc

SEQ ID NO: 2465412 - DNA, 25 bp, Homo sapien
gcagagggtctctccaaagatccag

SEQ ID NO: 2465413 - DNA, 25 bp, Homo sapien
cagctgaagtatcaaaatgccagtc

SEQ ID NO: 2465414 - DNA, 25 bp, Homo sapien
tctggcatctttcagctcaagctgc

SEQ ID NO: 2465415 - DNA, 25 bp, Homo sapien
tgccagcctatctggaccccagaaa

SEQ ID NO: 2465416 - DNA, 25 bp, Homo sapien
cagtcttcacgatgcaaatggatgc

SEQ ID NO: 2465417 - DNA, 25 bp, Homo sapien
catcctcgttcaaacccttgaatca

SEQ ID NO: 2465418 - DNA, 25 bp, Homo sapien
cttgaatcaagcctgaagtcaaaga

SEQ ID NO: 2465419 - DNA, 25 bp, Homo sapien
attccatgagccgataagttcccca

SEQ ID NO: 2465420 - DNA, 25 bp, Homo sapien
cttcctttggagagccccattccat

SEQ ID NO: 2465421 - DNA, 25 bp, Homo sapien
gctctggatcagtccacaccccagc

SEQ ID NO: 2465422 - DNA, 25 bp, Homo sapien
tctggatcagtccacaccccagcca

SEQ ID NO: 2465423 - DNA, 25 bp, Homo sapien
cagctctggatcagtccacacccca

SEQ ID NO: 2465424 - DNA, 25 bp, Homo sapien
agctctggatcagtccacaccccag

SEQ ID NO: 2465425 - DNA, 25 bp, Homo sapien
gagctccattcaactcttcctgggc

SEQ ID NO: 2465426 - DNA, 25 bp, Homo sapien
ctgagctccattcaactcttcctgg

SEQ ID NO: 2465427 - DNA, 25 bp, Homo sapien
tgagtctgagctccattcaactctt

SEQ ID NO: 2465428 - DNA, 25 bp, Homo sapien
gcttctgttccagtgtgagtctgag

SEQ ID NO: 2465429 - DNA, 25 bp, Homo sapien
tggaaaatccagctggaatctgaga

SEQ ID NO: 2465430 - DNA, 25 bp, Homo sapien
ggaatctgagaaggaccatattttg

SEQ ID NO: 2465431 - DNA, 25 bp, Homo sapien
tctgagaaggaccatattttgcttt

SEQ ID NO: 2465432 - DNA, 25 bp, Homo sapien
tgatggaaaatccagctggaatctg

SEQ ID NO: 2465433 - DNA, 25 bp, Homo sapien
aatcaaatatagactcccctgtcag

SEQ ID NO: 2465434 - DNA, 25 bp, Homo sapien
ggtggtgttggataatgcttcccaa

SEQ ID NO: 2465435 - DNA, 25 bp, Homo sapien
ttttccttctgagtagtgctgcttc

SEQ ID NO: 2465436 - DNA, 25 bp, Homo sapien
gtaggtggtgttggataatgcttcc

SEQ ID NO: 2465437 - DNA, 25 bp, Homo sapien
gagccacagacatgggctggacccc

SEQ ID NO: 2465438 - DNA, 25 bp, Homo sapien
agagccacagacatgggctggaccc

SEQ ID NO: 2465439 - DNA, 25 bp, Homo sapien
agccacagacatgggctggacccct

SEQ ID NO: 2465440 - DNA, 25 bp, Homo sapien
gccacagacatgggctggacccctc

SEQ ID NO: 2465441 - DNA, 25 bp, Homo sapien
accaagatcccacaaaggtagccat

SEQ ID NO: 2465442 - DNA, 25 bp, Homo sapien
gaccaagatcccacaaaggtagcca

SEQ ID NO: 2465443 - DNA, 25 bp, Homo sapien
gtgaccaagatcccacaaaggtagc

SEQ ID NO: 2465444 - DNA, 25 bp, Homo sapien
tgaccaagatcccacaaaggtagcc

SEQ ID NO: 2465445 - DNA, 25 bp, Homo sapien
gccacatggactcaacatcagacca

SEQ ID NO: 2465446 - DNA, 25 bp, Homo sapien
cacatggactcaacatcagaccaca

SEQ ID NO: 2465447 - DNA, 25 bp, Homo sapien
gggccacatggactcaacatcagac

SEQ ID NO: 2465448 - DNA, 25 bp, Homo sapien
acatggactcaacatcagaccacag

SEQ ID NO: 2465449 - DNA, 25 bp, Homo sapien
cagtgtcagactcctcctcggtggg

SEQ ID NO: 2465450 - DNA, 25 bp, Homo sapien
tcctcctcggtgggatagcggcagt

SEQ ID NO: 2465451 - DNA, 25 bp, Homo sapien
ctcggtgggatagcggcagtgcctg

SEQ ID NO: 2465452 - DNA, 25 bp, Homo sapien
cacagtgtcagactcctcctcggtg

SEQ ID NO: 2465453 - DNA, 25 bp, Homo sapien
cagctagagtctcccactggctaat

SEQ ID NO: 2465454 - DNA, 25 bp, Homo sapien
cagtagtccttacagaagtgtggcc

SEQ ID NO: 2465455 - DNA, 25 bp, Homo sapien
gaagcacgaaaacaaacaactctag

SEQ ID NO: 2465456 - DNA, 25 bp, Homo sapien
gaatagtgttgccacagccagtaag

SEQ ID NO: 2465457 - DNA, 25 bp, Homo sapien
tcccacatcccatcgtctttcgctc

SEQ ID NO: 2465458 - DNA, 25 bp, Homo sapien
acttggctaaggacccagcaggaca

SEQ ID NO: 2465459 - DNA, 25 bp, Homo sapien
cttccaacttggctaaggacccagc

SEQ ID NO: 2465460 - DNA, 25 bp, Homo sapien
gcaggacagggagcctcttcctctt

SEQ ID NO: 2465461 - DNA, 25 bp, Homo sapien
atatggctcatctgcgtccagtgta

SEQ ID NO: 2465462 - DNA, 25 bp, Homo sapien
caggacactggacatgtcccacttg

SEQ ID NO: 2465463 - DNA, 25 bp, Homo sapien
tccagtgtatgtttggccaggacac

SEQ ID NO: 2465464 - DNA, 25 bp, Homo sapien
tggacatgtcccacttggctcctgc

SEQ ID NO: 2465465 - DNA, 25 bp, Homo sapien
cagaaacctttggtgtagttgaact

SEQ ID NO: 2465466 - DNA, 25 bp, Homo sapien
cctttggtgtagttgaactgatagt

SEQ ID NO: 2465467 - DNA, 25 bp, Homo sapien
aaacctttggtgtagttgaactgat

SEQ ID NO: 2465468 - DNA, 25 bp, Homo sapien
tcagaaacctttggtgtagttgaac

SEQ ID NO: 2465469 - DNA, 25 bp, Homo sapien
tgataagattgtcattcagaaatac

SEQ ID NO: 2465470 - DNA, 25 bp, Homo sapien
ataccatactgtgaatgaccacaac

SEQ ID NO: 2465471 - DNA, 25 bp, Homo sapien
cgagtcagtggctagaaaaggggct

SEQ ID NO: 2465472 - DNA, 25 bp, Homo sapien
aacttttgatgaccatgactccgtt

SEQ ID NO: 2465473 - DNA, 25 bp, Homo sapien
tcaccaggtttaccagagaccaagc

SEQ ID NO: 2465474 - DNA, 25 bp, Homo sapien
catgagaggcctagcactgtggctc

SEQ ID NO: 2465475 - DNA, 25 bp, Homo sapien
ggagtgttaacccaccattcaccag

SEQ ID NO: 2465476 - DNA, 25 bp, Homo sapien
tattggacacctgctcgccacatgt

SEQ ID NO: 2465477 - DNA, 25 bp, Homo sapien
actcataggatccagcgatcatccc

SEQ ID NO: 2465478 - DNA, 25 bp, Homo sapien
gaaactgagcctacttatgttgccc

SEQ ID NO: 2465479 - DNA, 25 bp, Homo sapien
tgaactcataggatccagcgatcat

SEQ ID NO: 2465480 - DNA, 25 bp, Homo sapien
tttttgtagaaactgagcctactta

SEQ ID NO: 2465481 - DNA, 25 bp, Homo sapien
accaccacattgcaggtgtgcagct

SEQ ID NO: 2465482 - DNA, 25 bp, Homo sapien
tcatgagggtcaccaccacattgca

SEQ ID NO: 2465483 - DNA, 25 bp, Homo sapien
aggtgtgcagctggacggctcccca

SEQ ID NO: 2465484 - DNA, 25 bp, Homo sapien
ccattcatgagggtcaccaccacat

SEQ ID NO: 2465485 - DNA, 25 bp, Homo sapien
gcttttgcccgggtgcggaggccac

SEQ ID NO: 2465486 - DNA, 25 bp, Homo sapien
gcccgggtgcggaggccaccgagga

SEQ ID NO: 2465487 - DNA, 25 bp, Homo sapien
ggcggcgtaggcgaaatccccgcgc

SEQ ID NO: 2465488 - DNA, 25 bp, Homo sapien
agagcgccccgtccggaggagccgg

SEQ ID NO: 2465489 - DNA, 25 bp, Homo sapien
ccgcgcggaggcgtccgggggcgcg

SEQ ID NO: 2465490 - DNA, 25 bp, Homo sapien
ctgccgcgcggaggcgtccgggggc

SEQ ID NO: 2465491 - DNA, 25 bp, Homo sapien
ggccccgcttgagcgggcccaggct

SEQ ID NO: 2465492 - DNA, 25 bp, Homo sapien
ccaccacggactcccctgggacgtg

SEQ ID NO: 2465493 - DNA, 25 bp, Homo sapien
gcccggtattcttcctcgctgaggg

SEQ ID NO: 2465494 - DNA, 25 bp, Homo sapien
agcgaggcggcctcttccgaggcct

SEQ ID NO: 2465495 - DNA, 25 bp, Homo sapien
agaaactccgggctcgccaggagct

SEQ ID NO: 2465496 - DNA, 25 bp, Homo sapien
gagaggttgcgcctgctgcagaaac

SEQ ID NO: 2465497 - DNA, 25 bp, Homo sapien
ggcgtgtggctctcgttcatttcca

SEQ ID NO: 2465498 - DNA, 25 bp, Homo sapien
catttccacgtagaagaccagagcg

SEQ ID NO: 2465499 - DNA, 25 bp, Homo sapien
tgacgatggattcccgcgtgcggca

SEQ ID NO: 2465500 - DNA, 25 bp, Homo sapien
tccccggcgtgatggcctgacgatg

SEQ ID NO: 2465501 - DNA, 25 bp, Homo sapien
ctctccagggatcccgcgggaacgg

SEQ ID NO: 2465502 - DNA, 25 bp, Homo sapien
gctcccacgcgtcggcagcagggag

SEQ ID NO: 2465503 - DNA, 25 bp, Homo sapien
cgctctctgggctcccacgcgtcgg

SEQ ID NO: 2465504 - DNA, 25 bp, Homo sapien
ccgcgggaacgggaagccgctctct

SEQ ID NO: 2465505 - DNA, 25 bp, Homo sapien
tgctgtccgaaggtgtcgggagggc

SEQ ID NO: 2465506 - DNA, 25 bp, Homo sapien
ggagggtgctgtccgaaggtgtcgg

SEQ ID NO: 2465507 - DNA, 25 bp, Homo sapien
tgtccgaaggtgtcgggagggccat

SEQ ID NO: 2465508 - DNA, 25 bp, Homo sapien
gggagggtgctgtccgaaggtgtcg

SEQ ID NO: 2465509 - DNA, 25 bp, Homo sapien
gtccaaacgagtctccgtcgccgtc

SEQ ID NO: 2465510 - DNA, 25 bp, Homo sapien
aaacgagtctccgtcgccgtcctcg

SEQ ID NO: 2465511 - DNA, 25 bp, Homo sapien
acgagtctccgtcgccgtcctcgtc

SEQ ID NO: 2465512 - DNA, 25 bp, Homo sapien
ccaaacgagtctccgtcgccgtcct

SEQ ID NO: 2465513 - DNA, 25 bp, Homo sapien
gatccttctcaaaggctcggaggag

SEQ ID NO: 2465514 - DNA, 25 bp, Homo sapien
ggtgctgcctcagctggcgtgacct

SEQ ID NO: 2465515 - DNA, 25 bp, Homo sapien
cgatgcctggaaagcgatccttctc

SEQ ID NO: 2465516 - DNA, 25 bp, Homo sapien
ggtgcctggcccttcgattctgaaa

SEQ ID NO: 2465517 - DNA, 25 bp, Homo sapien
gcgccggtgtgggcgaaggcgaccc

SEQ ID NO: 2465518 - DNA, 25 bp, Homo sapien
gccggtgtgggcgaaggcgacccac

SEQ ID NO: 2465519 - DNA, 25 bp, Homo sapien
cgccggtgtgggcgaaggcgaccca

SEQ ID NO: 2465520 - DNA, 25 bp, Homo sapien
gcccggtattcttcctcgctgaggg

SEQ ID NO: 2465521 - DNA, 25 bp, Homo sapien
agaaactccgggctcgccaggagct

SEQ ID NO: 2465522 - DNA, 25 bp, Homo sapien
agcgaggcggcctcttccgaggcct

SEQ ID NO: 2465523 - DNA, 25 bp, Homo sapien
gagaggttgcgcctgctgcagaaac

SEQ ID NO: 2465524 - DNA, 25 bp, Homo sapien
tgctgtccgaaggtgtcgggagggc

SEQ ID NO: 2465525 - DNA, 25 bp, Homo sapien
tgtccgaaggtgtcgggagggccat

SEQ ID NO: 2465526 - DNA, 25 bp, Homo sapien
ggagggtgctgtccgaaggtgtcgg

SEQ ID NO: 2465527 - DNA, 25 bp, Homo sapien
gggagggtgctgtccgaaggtgtcg

SEQ ID NO: 2465528 - DNA, 25 bp, Homo sapien
acgagtctccgtcgccgtcctcgtc

SEQ ID NO: 2465529 - DNA, 25 bp, Homo sapien
gtccaaacgagtctccgtcgccgtc

SEQ ID NO: 2465530 - DNA, 25 bp, Homo sapien
aaacgagtctccgtcgccgtcctcg

SEQ ID NO: 2465531 - DNA, 25 bp, Homo sapien
ccaaacgagtctccgtcgccgtcct

SEQ ID NO: 2465532 - DNA, 25 bp, Homo sapien
gatccttctcaaaggctcggaggag

SEQ ID NO: 2465533 - DNA, 25 bp, Homo sapien
cgatgcctggaaagcgatccttctc

SEQ ID NO: 2465534 - DNA, 25 bp, Homo sapien
ggtgctgcctcagctggcgtgacct

SEQ ID NO: 2465535 - DNA, 25 bp, Homo sapien
ggtgcctggcccttcgattctgaaa

SEQ ID NO: 2465536 - DNA, 25 bp, Homo sapien
gcttttgcccgggtgcggaggccac

SEQ ID NO: 2465537 - DNA, 25 bp, Homo sapien
ttccccacgcgccggtgtgggcgaa

SEQ ID NO: 2465538 - DNA, 25 bp, Homo sapien
agagcgccccgtccggaggagccgg

SEQ ID NO: 2465539 - DNA, 25 bp, Homo sapien
ggcggcgtaggcgaaatccccgcgc

SEQ ID NO: 2465540 - DNA, 25 bp, Homo sapien
gcccggtattcttcctcgctgaggg

SEQ ID NO: 2465541 - DNA, 25 bp, Homo sapien
agaaactccgggctcgccaggagct

SEQ ID NO: 2465542 - DNA, 25 bp, Homo sapien
agcgaggcggcctcttccgaggcct

SEQ ID NO: 2465543 - DNA, 25 bp, Homo sapien
gagaggttgcgcctgctgcagaaac

SEQ ID NO: 2465544 - DNA, 25 bp, Homo sapien
gcccggtattcttcctcgctgaggg

SEQ ID NO: 2465545 - DNA, 25 bp, Homo sapien
agaaactccgggctcgccaggagct

SEQ ID NO: 2465546 - DNA, 25 bp, Homo sapien
agcgaggcggcctcttccgaggcct

SEQ ID NO: 2465547 - DNA, 25 bp, Homo sapien
gagaggttgcgcctgctgcagaaac

SEQ ID NO: 2465548 - DNA, 25 bp, Homo sapien
catttccacgtagaagaccagagcg

SEQ ID NO: 2465549 - DNA, 25 bp, Homo sapien
ggcgtgtggctctcgttcatttcca

SEQ ID NO: 2465550 - DNA, 25 bp, Homo sapien
tccccggcgtgatggcctgacgatg

SEQ ID NO: 2465551 - DNA, 25 bp, Homo sapien
tgacgatggattcccgcgtgcggca

SEQ ID NO: 2465552 - DNA, 25 bp, Homo sapien
ctctccagggatcccgcgggaacgg

SEQ ID NO: 2465553 - DNA, 25 bp, Homo sapien
gctcccacgcgtcggcagcagggag

SEQ ID NO: 2465554 - DNA, 25 bp, Homo sapien
cgctctctgggctcccacgcgtcgg

SEQ ID NO: 2465555 - DNA, 25 bp, Homo sapien
ccgcgggaacgggaagccgctctct

SEQ ID NO: 2465556 - DNA, 25 bp, Homo sapien
tgctgtccgaaggtgtcgggagggc

SEQ ID NO: 2465557 - DNA, 25 bp, Homo sapien
tgtccgaaggtgtcgggagggccat

SEQ ID NO: 2465558 - DNA, 25 bp, Homo sapien
ggagggtgctgtccgaaggtgtcgg

SEQ ID NO: 2465559 - DNA, 25 bp, Homo sapien
gggagggtgctgtccgaaggtgtcg

SEQ ID NO: 2465560 - DNA, 25 bp, Homo sapien
gtccaaacgagtctccgtcgccgtc

SEQ ID NO: 2465561 - DNA, 25 bp, Homo sapien
aaacgagtctccgtcgccgtcctcg

SEQ ID NO: 2465562 - DNA, 25 bp, Homo sapien
acgagtctccgtcgccgtcctcgtc

SEQ ID NO: 2465563 - DNA, 25 bp, Homo sapien
ccaaacgagtctccgtcgccgtcct

SEQ ID NO: 2465564 - DNA, 25 bp, Homo sapien
cagggccgagattcccgccggtgct

SEQ ID NO: 2465565 - DNA, 25 bp, Homo sapien
cggcgatgcctggaaagcgatcctt

SEQ ID NO: 2465566 - DNA, 25 bp, Homo sapien
gggaggcccgtctctctggccagct

SEQ ID NO: 2465567 - DNA, 25 bp, Homo sapien
ccttctcaaaggctcggaggagcag

SEQ ID NO: 2465568 - DNA, 25 bp, Homo sapien
gggtgcctggcccttcgattctgaa

SEQ ID NO: 2465569 - DNA, 25 bp, Homo sapien
cgggtgcctggcccttcgattctga

SEQ ID NO: 2465570 - DNA, 25 bp, Homo sapien
ggtgcctggcccttcgattctgaaa

SEQ ID NO: 2465571 - DNA, 25 bp, Homo sapien
aggccgcctgcctgcgcgggcgccc

SEQ ID NO: 2465572 - DNA, 25 bp, Homo sapien
ccgcctgcctgcgcgggcgccctgc

SEQ ID NO: 2465573 - DNA, 25 bp, Homo sapien
ccgggggccgcgctgcacaggccgc

SEQ ID NO: 2465574 - DNA, 25 bp, Homo sapien
gcctgcctgcgcgggcgccctgcca

SEQ ID NO: 2465575 - DNA, 25 bp, Homo sapien
gccggtgtgggcgaaggcgacccac

SEQ ID NO: 2465576 - DNA, 25 bp, Homo sapien
gcgccggtgtgggcgaaggcgaccc

SEQ ID NO: 2465577 - DNA, 25 bp, Homo sapien
cgccggtgtgggcgaaggcgaccca

SEQ ID NO: 2465578 - DNA, 25 bp, Homo sapien
aaggctggccatgccgactgtttgc

SEQ ID NO: 2465579 - DNA, 25 bp, Homo sapien
cgaaaggctggccatgccgactgtt

SEQ ID NO: 2465580 - DNA, 25 bp, Homo sapien
catgccgactgtttgctcccggagc

SEQ ID NO: 2465581 - DNA, 25 bp, Homo sapien
gctggccatgccgactgtttgctcc

SEQ ID NO: 2465582 - DNA, 25 bp, Homo sapien
ggttttcacccgcgcggttcacaga

SEQ ID NO: 2465583 - DNA, 25 bp, Homo sapien
gcggttcacagaccgcacatcccca

SEQ ID NO: 2465584 - DNA, 25 bp, Homo sapien
cccgcgcggttcacagaccgcacat

SEQ ID NO: 2465585 - DNA, 25 bp, Homo sapien
ttcacagaccgcacatccccaggct

SEQ ID NO: 2465586 - DNA, 25 bp, Homo sapien
agaaactccgggctcgccaggagct

SEQ ID NO: 2465587 - DNA, 25 bp, Homo sapien
gagaggttgcgcctgctgcagaaac

SEQ ID NO: 2465588 - DNA, 25 bp, Homo sapien
agcgaggcggcctcttccgaggcct

SEQ ID NO: 2465589 - DNA, 25 bp, Homo sapien
gcccggtattcttcctcgctgaggg

SEQ ID NO: 2465590 - DNA, 25 bp, Homo sapien
gcccggtattcttcctcgctgaggg

SEQ ID NO: 2465591 - DNA, 25 bp, Homo sapien
agcgaggcggcctcttccgaggcct

SEQ ID NO: 2465592 - DNA, 25 bp, Homo sapien
agaaactccgggctcgccaggagct

SEQ ID NO: 2465593 - DNA, 25 bp, Homo sapien
gagaggttgcgcctgctgcagaaac

SEQ ID NO: 2465594 - DNA, 25 bp, Homo sapien
tttgatctctaggtggggtggctag

SEQ ID NO: 2465595 - DNA, 25 bp, Homo sapien
ttgatctctaggtggggtggctagc

SEQ ID NO: 2465596 - DNA, 25 bp, Homo sapien
aaggcgtggacggagccctttctca

SEQ ID NO: 2465597 - DNA, 25 bp, Homo sapien
gaaggcgtggacggagccctttctc

SEQ ID NO: 2465598 - DNA, 25 bp, Homo sapien
tcacagatagcctgggtccatcacc

SEQ ID NO: 2465599 - DNA, 25 bp, Homo sapien
gtccatcacctgaacggaagacaat

SEQ ID NO: 2465600 - DNA, 25 bp, Homo sapien
cacagatagcctgggtccatcacct

SEQ ID NO: 2465601 - DNA, 25 bp, Homo sapien
tccatcacctgaacggaagacaatg

SEQ ID NO: 2465602 - DNA, 25 bp, Homo sapien
agtttggacagagaccctacaggcc

SEQ ID NO: 2465603 - DNA, 25 bp, Homo sapien
aatactggcccggagatatgaggca

SEQ ID NO: 2465604 - DNA, 25 bp, Homo sapien
cacgagggtgtcgaagggccaaaat

SEQ ID NO: 2465605 - DNA, 25 bp, Homo sapien
tcccggtgatgtgtcaggaggccct

SEQ ID NO: 2465606 - DNA, 25 bp, Homo sapien
tccctccagacaccccggaagtgct

SEQ ID NO: 2465607 - DNA, 25 bp, Homo sapien
gtggtgctgagttcccacactccgc

SEQ ID NO: 2465608 - DNA, 25 bp, Homo sapien
tctggtagttgcttcttccctccag

SEQ ID NO: 2465609 - DNA, 25 bp, Homo sapien
tggtgctgagttcccacactccgct

SEQ ID NO: 2465610 - DNA, 25 bp, Homo sapien
aatgcagaccttgcaggcgcagaag

SEQ ID NO: 2465611 - DNA, 25 bp, Homo sapien
gcagaccttgcaggcgcagaaggca

SEQ ID NO: 2465612 - DNA, 25 bp, Homo sapien
taatgcagaccttgcaggcgcagaa

SEQ ID NO: 2465613 - DNA, 25 bp, Homo sapien
ctgaacctgctctaatgcagacctt

SEQ ID NO: 2465614 - DNA, 25 bp, Homo sapien
cccctagctggagatcctgcagatg

SEQ ID NO: 2465615 - DNA, 25 bp, Homo sapien
cttttcagctttgggcccactgttt

SEQ ID NO: 2465616 - DNA, 25 bp, Homo sapien
cctagctggagatcctgcagatgct

SEQ ID NO: 2465617 - DNA, 25 bp, Homo sapien
tttcttttcagctttgggcccactg

SEQ ID NO: 2465618 - DNA, 25 bp, Homo sapien
aattgcaaaagctttgggatttctc

SEQ ID NO: 2465619 - DNA, 25 bp, Homo sapien
gactgaattgcaaaagctttgggat

SEQ ID NO: 2465620 - DNA, 25 bp, Homo sapien
ctgaattgcaaaagctttgggattt

SEQ ID NO: 2465621 - DNA, 25 bp, Homo sapien
ttgggatttctcttccagacatctt

SEQ ID NO: 2465622 - DNA, 25 bp, Homo sapien
tgtgaaaggatcaagccattcccac

SEQ ID NO: 2465623 - DNA, 25 bp, Homo sapien
ctgtgaaaggatcaagccattccca

SEQ ID NO: 2465624 - DNA, 25 bp, Homo sapien
tcatcatgttaatgtcacacccaca

SEQ ID NO: 2465625 - DNA, 25 bp, Homo sapien
catgttaatgtcacacccacattca

SEQ ID NO: 2465626 - DNA, 25 bp, Homo sapien
gccagatcaatcatcatgttaatgt

SEQ ID NO: 2465627 - DNA, 25 bp, Homo sapien
gatcaatcatcatgttaatgtcaca

SEQ ID NO: 2465628 - DNA, 25 bp, Homo sapien
atatcaagagtttatgtaagctaag

SEQ ID NO: 2465629 - DNA, 25 bp, Homo sapien
tagggcactgtctagatggttctgt

SEQ ID NO: 2465630 - DNA, 25 bp, Homo sapien
tgtactgcgttagggcactgtctag

SEQ ID NO: 2465631 - DNA, 25 bp, Homo sapien
cagaggccacagactgtactgcgtt

SEQ ID NO: 2465632 - DNA, 25 bp, Homo sapien
cacagactgtactgcgttagggcac

SEQ ID NO: 2465633 - DNA, 25 bp, Homo sapien
cagcccactgttagtgaagctgggt

SEQ ID NO: 2465634 - DNA, 25 bp, Homo sapien
taactcccaaatgaaacactcaacc

SEQ ID NO: 2465635 - DNA, 25 bp, Homo sapien
ttatcaccaggttaagccatgcagt

SEQ ID NO: 2465636 - DNA, 25 bp, Homo sapien
tgaagctgggtgcagaatgcaaagc

SEQ ID NO: 2465637 - DNA, 25 bp, Homo sapien
tctgggcagctcacaataaagtgga

SEQ ID NO: 2465638 - DNA, 25 bp, Homo sapien
catttcagaaatccaattgcagtat

SEQ ID NO: 2465639 - DNA, 25 bp, Homo sapien
tctctgaacgtgtaaagcaccgaac

SEQ ID NO: 2465640 - DNA, 25 bp, Homo sapien
tacaggtggtcgctataaacatttc

SEQ ID NO: 2465641 - DNA, 25 bp, Homo sapien
ctagagtgcagatagacaccaccat

SEQ ID NO: 2465642 - DNA, 25 bp, Homo sapien
gccatgctttgactaccttaacaaa

SEQ ID NO: 2465643 - DNA, 25 bp, Homo sapien
actgaagtatgtttgaggctggacg

SEQ ID NO: 2465644 - DNA, 25 bp, Homo sapien
tagttttcttcatgtgccatgcttt

SEQ ID NO: 2465645 - DNA, 25 bp, Homo sapien
gcagagaattacatagcctaaaatg

SEQ ID NO: 2465646 - DNA, 25 bp, Homo sapien
tcaataatgcggacaaaacccaatt

SEQ ID NO: 2465647 - DNA, 25 bp, Homo sapien
tggctgtggaatatgtaaagcaccc

SEQ ID NO: 2465648 - DNA, 25 bp, Homo sapien
cataggcctatactaccacaactgg

SEQ ID NO: 2465649 - DNA, 25 bp, Homo sapien
tttaagactgctgaaagtggttgcc

SEQ ID NO: 2465650 - DNA, 25 bp, Homo sapien
agcaatcctgccttctaagggtggt

SEQ ID NO: 2465651 - DNA, 25 bp, Homo sapien
aatcctgccttctaagggtggttgc

SEQ ID NO: 2465652 - DNA, 25 bp, Homo sapien
tcctgccttctaagggtggttgccc

SEQ ID NO: 2465653 - DNA, 25 bp, Homo sapien
gccttctaagggtggttgccctata

SEQ ID NO: 2465654 - DNA, 25 bp, Homo sapien
tctgccctgtccccagtccttggtg

SEQ ID NO: 2465655 - DNA, 25 bp, Homo sapien
ctcttctgccctgtccccagtcctt

SEQ ID NO: 2465656 - DNA, 25 bp, Homo sapien
cttctgccctgtccccagtccttgg

SEQ ID NO: 2465657 - DNA, 25 bp, Homo sapien
ctgccctgtccccagtccttggtgg

SEQ ID NO: 2465658 - DNA, 25 bp, Homo sapien
gaaatgaattagagcagtttcactc

SEQ ID NO: 2465659 - DNA, 25 bp, Homo sapien
aatgaattagagcagtttcactcac

SEQ ID NO: 2465660 - DNA, 25 bp, Homo sapien
aaatgaattagagcagtttcactca

SEQ ID NO: 2465661 - DNA, 25 bp, Homo sapien
tgaaatgaattagagcagtttcact

SEQ ID NO: 2465662 - DNA, 25 bp, Homo sapien
gtgccctcgtgcagccctgctcctc

SEQ ID NO: 2465663 - DNA, 25 bp, Homo sapien
ttctggaggccagcttccttacatt

SEQ ID NO: 2465664 - DNA, 25 bp, Homo sapien
ttgctttctgaagctcaggtgccct

SEQ ID NO: 2465665 - DNA, 25 bp, Homo sapien
cagccagccttctggaggccagctt

SEQ ID NO: 2465666 - DNA, 25 bp, Homo sapien
ggtcagagtttggtttgctagattc

SEQ ID NO: 2465667 - DNA, 25 bp, Homo sapien
gtcagagtttggtttgctagattct

SEQ ID NO: 2465668 - DNA, 25 bp, Homo sapien
cggtcagagtttggtttgctagatt

SEQ ID NO: 2465669 - DNA, 25 bp, Homo sapien
acggtcagagtttggtttgctagat

SEQ ID NO: 2465670 - DNA, 25 bp, Homo sapien
tgtgtcttgtaactttttattacac

SEQ ID NO: 2465671 - DNA, 25 bp, Homo sapien
gactatttcttctcttgacctttgg

SEQ ID NO: 2465672 - DNA, 25 bp, Homo sapien
ttattacacaccagacattttatat

SEQ ID NO: 2465673 - DNA, 25 bp, Homo sapien
cttgacctttggtcacattttcttg

SEQ ID NO: 2465674 - DNA, 25 bp, Homo sapien
tcgaatggattcgaaatgtaatcat

SEQ ID NO: 2465675 - DNA, 25 bp, Homo sapien
tggatggactcatcatcgaatggat

SEQ ID NO: 2465676 - DNA, 25 bp, Homo sapien
tcgaatggaaacaccatcgaattga

SEQ ID NO: 2465677 - DNA, 25 bp, Homo sapien
tgaaacgaatggaattatcatgaaa

SEQ ID NO: 2465678 - DNA, 25 bp, Homo sapien
tccagaaaggtagaacagcttggca

SEQ ID NO: 2465679 - DNA, 25 bp, Homo sapien
cagaaaggtagaacagcttggcaac

SEQ ID NO: 2465680 - DNA, 25 bp, Homo sapien
ccagaaaggtagaacagcttggcaa

SEQ ID NO: 2465681 - DNA, 25 bp, Homo sapien
gatttcttggtcttgatattctcca

SEQ ID NO: 2465682 - DNA, 25 bp, Homo sapien
aactgtaataaaatggcccagattg

SEQ ID NO: 2465683 - DNA, 25 bp, Homo sapien
tttcttggtcttgatattctccatg

SEQ ID NO: 2465684 - DNA, 25 bp, Homo sapien
ggcccagattgtggatttcttggtc

SEQ ID NO: 2465685 - DNA, 25 bp, Homo sapien
tgccaggatataaggatgagacgtc

SEQ ID NO: 2465686 - DNA, 25 bp, Homo sapien
tataaggatgagacgtctgccatgt

SEQ ID NO: 2465687 - DNA, 25 bp, Homo sapien
aggatgagacgtctgccatgtgaga

SEQ ID NO: 2465688 - DNA, 25 bp, Homo sapien
ggatataaggatgagacgtctgcca

SEQ ID NO: 2465689 - DNA, 25 bp, Homo sapien
acataaaggactcaagcacccgggc

SEQ ID NO: 2465690 - DNA, 25 bp, Homo sapien
cagggaagagtgaagaacatattca

SEQ ID NO: 2465691 - DNA, 25 bp, Homo sapien
aaactgaggctgaacataggatggg

SEQ ID NO: 2465692 - DNA, 25 bp, Homo sapien
ccagacagggagatgacgtccacct

SEQ ID NO: 2465693 - DNA, 25 bp, Homo sapien
cttgtccactaagcatgtcgtttag

SEQ ID NO: 2465694 - DNA, 25 bp, Homo sapien
ttgtccactaagcatgtcgtttaga

SEQ ID NO: 2465695 - DNA, 25 bp, Homo sapien
tattgttgactgaaacgctcagtag

SEQ ID NO: 2465696 - DNA, 25 bp, Homo sapien
ggctggctgtgctgccatcaaggaa

SEQ ID NO: 2465697 - DNA, 25 bp, Homo sapien
ccatcaaggaatattgtcgaacacg

SEQ ID NO: 2465698 - DNA, 25 bp, Homo sapien
ttataagataatgctggctggctgt

SEQ ID NO: 2465699 - DNA, 25 bp, Homo sapien
ggaaatcgtacccagcccctcgaga

SEQ ID NO: 2465700 - DNA, 25 bp, Homo sapien
agtggaaatcgtacccagcccctcg

SEQ ID NO: 2465701 - DNA, 25 bp, Homo sapien
ccagtggaaatcgtacccagcccct

SEQ ID NO: 2465702 - DNA, 25 bp, Homo sapien
aaatcgtacccagcccctcgagagg

SEQ ID NO: 2465703 - DNA, 25 bp, Homo sapien
gcggtaatggagatgtacttgcaag

SEQ ID NO: 2465704 - DNA, 25 bp, Homo sapien
tgtattggtttttccgactgaagcg

SEQ ID NO: 2465705 - DNA, 25 bp, Homo sapien
tcatcagactctgaccactctaaag

SEQ ID NO: 2465706 - DNA, 25 bp, Homo sapien
tagaaatctttgacccattcatcag

SEQ ID NO: 2465707 - DNA, 25 bp, Homo sapien
tacgtgggttattagtactgtgttg

SEQ ID NO: 2465708 - DNA, 25 bp, Homo sapien
ttgaatttggttcaatcaggtcaaa

SEQ ID NO: 2465709 - DNA, 25 bp, Homo sapien
gaactatgatagcaaattgaatttg

SEQ ID NO: 2465710 - DNA, 25 bp, Homo sapien
atgaatatacacagtacgtgggtta

SEQ ID NO: 2465711 - DNA, 25 bp, Homo sapien
cttccatctccacgccgccttccat

SEQ ID NO: 2465712 - DNA, 25 bp, Homo sapien
ccgccttccatctccacgccgcctt

SEQ ID NO: 2465713 - DNA, 25 bp, Homo sapien
cgccttccatctccacgccgccttc

SEQ ID NO: 2465714 - DNA, 25 bp, Homo sapien
gccttccatctccacgccgccttcc

SEQ ID NO: 2465715 - DNA, 25 bp, Homo sapien
gaaagtctccgtacctgctcttaga

SEQ ID NO: 2465716 - DNA, 25 bp, Homo sapien
tcttagactgtgaagttgctgcttt

SEQ ID NO: 2465717 - DNA, 25 bp, Homo sapien
gatgctttctcacaggaaagtctcc

SEQ ID NO: 2465718 - DNA, 25 bp, Homo sapien
cctgctcttagactgtgaagttgct

SEQ ID NO: 2465719 - DNA, 25 bp, Homo sapien
gagcagccggcgaggctgtcctcac

SEQ ID NO: 2465720 - DNA, 25 bp, Homo sapien
gcacaggagcctcaccgtagatggg

SEQ ID NO: 2465721 - DNA, 25 bp, Homo sapien
tgtcctcacttcgtcttcctggctt

SEQ ID NO: 2465722 - DNA, 25 bp, Homo sapien
ggcgaggctgtcctcacttcgtctt

SEQ ID NO: 2465723 - DNA, 25 bp, Homo sapien
ccagaggtcaggagaccccttctgg

SEQ ID NO: 2465724 - DNA, 25 bp, Homo sapien
gaccccttctggatgctgctttaag

SEQ ID NO: 2465725 - DNA, 25 bp, Homo sapien
agcccagaggtcaggagaccccttc

SEQ ID NO: 2465726 - DNA, 25 bp, Homo sapien
tgtggtgggcgtgggggcaaacagc

SEQ ID NO: 2465727 - DNA, 25 bp, Homo sapien
tgtgtgcacccctccgccttcacta

SEQ ID NO: 2465728 - DNA, 25 bp, Homo sapien
gtgcacccctccgccttcactaaat

SEQ ID NO: 2465729 - DNA, 25 bp, Homo sapien
gtgtgcacccctccgccttcactaa

SEQ ID NO: 2465730 - DNA, 25 bp, Homo sapien
cacccctccgccttcactaaatgct

SEQ ID NO: 2465731 - DNA, 25 bp, Homo sapien
gctccaagaggcgaatggcatccga

SEQ ID NO: 2465732 - DNA, 25 bp, Homo sapien
ctggattctgacaaggccctctggt

SEQ ID NO: 2465733 - DNA, 25 bp, Homo sapien
tctggtggataccagtgaccgctgg

SEQ ID NO: 2465734 - DNA, 25 bp, Homo sapien
ccgctggggactgtgagctccaaga

SEQ ID NO: 2465735 - DNA, 25 bp, Homo sapien
gagggatgcctgaactcagaccttc

SEQ ID NO: 2465736 - DNA, 25 bp, Homo sapien
gcccatgtggcagtgatgagccggg

SEQ ID NO: 2465737 - DNA, 25 bp, Homo sapien
agagggatgcctgaactcagacctt

SEQ ID NO: 2465738 - DNA, 25 bp, Homo sapien
cagagctcgggctctggacatcagc

SEQ ID NO: 2465739 - DNA, 25 bp, Homo sapien
tgttcacatagaacccgagagccag

SEQ ID NO: 2465740 - DNA, 25 bp, Homo sapien
ttggcctgttcacatagaacccgag

SEQ ID NO: 2465741 - DNA, 25 bp, Homo sapien
gggcttggcctgttcacatagaacc

SEQ ID NO: 2465742 - DNA, 25 bp, Homo sapien
gaacagtgatttggcagatccatta

SEQ ID NO: 2465743 - DNA, 25 bp, Homo sapien
atccattaagatcccgtagctgtct

SEQ ID NO: 2465744 - DNA, 25 bp, Homo sapien
tttggggaacagtgatttggcagat

SEQ ID NO: 2465745 - DNA, 25 bp, Homo sapien
cagatccattaagatcccgtagctg

SEQ ID NO: 2465746 - DNA, 25 bp, Homo sapien
tgggccacctctctcgagggcatct

SEQ ID NO: 2465747 - DNA, 25 bp, Homo sapien
cagcatggagggactaaatgttggc

SEQ ID NO: 2465748 - DNA, 25 bp, Homo sapien
tttgtttccacgtgcatcagcatgg

SEQ ID NO: 2465749 - DNA, 25 bp, Homo sapien
tcctgggatatggaagctgggccac

SEQ ID NO: 2465750 - DNA, 25 bp, Homo sapien
aatgtctagtaactgatgattctgc

SEQ ID NO: 2465751 - DNA, 25 bp, Homo sapien
tctagtaactgatgattctgcacca

SEQ ID NO: 2465752 - DNA, 25 bp, Homo sapien
cttatgcaaatgtctagtaactgat

SEQ ID NO: 2465753 - DNA, 25 bp, Homo sapien
gtaactgatgattctgcaccagcct

SEQ ID NO: 2465754 - DNA, 25 bp, Homo sapien
ctgcaagatggctgcggtagacgct

SEQ ID NO: 2465755 - DNA, 25 bp, Homo sapien
tagaccagagcgtatacgggtggcc

SEQ ID NO: 2465756 - DNA, 25 bp, Homo sapien
gcagccagcgggcattcaccattct

SEQ ID NO: 2465757 - DNA, 25 bp, Homo sapien
tcaccattcttgcttgctaacggca

SEQ ID NO: 2465758 - DNA, 25 bp, Homo sapien
gtagaacttttgacttgtagagatt

SEQ ID NO: 2465759 - DNA, 25 bp, Homo sapien
agtgaatttgtgttgagccggaagt

SEQ ID NO: 2465760 - DNA, 25 bp, Homo sapien
aaatcttatctggtgctttgtagag

SEQ ID NO: 2465761 - DNA, 25 bp, Homo sapien
tatctggtgctttgtagagcctaca

SEQ ID NO: 2465762 - DNA, 25 bp, Homo sapien
ctgccttcagattagaaagggaaag

SEQ ID NO: 2465763 - DNA, 25 bp, Homo sapien
aagggtgctggtaacggcagctcct

SEQ ID NO: 2465764 - DNA, 25 bp, Homo sapien
agggtgctggtaacggcagctcctc

SEQ ID NO: 2465765 - DNA, 25 bp, Homo sapien
tgccttcagattagaaagggaaagg

SEQ ID NO: 2465766 - DNA, 25 bp, Homo sapien
agagacagagccggcaacgccggcc

SEQ ID NO: 2465767 - DNA, 25 bp, Homo sapien
cgccggcccctcctagatccactgg

SEQ ID NO: 2465768 - DNA, 25 bp, Homo sapien
aacgccggcccctcctagatccact

SEQ ID NO: 2465769 - DNA, 25 bp, Homo sapien
agcccagagacagagccggcaacgc

SEQ ID NO: 2465770 - DNA, 25 bp, Homo sapien
aggctgacgcctgtgtttggttccc

SEQ ID NO: 2465771 - DNA, 25 bp, Homo sapien
ttcacgggggtatctgagaactcag

SEQ ID NO: 2465772 - DNA, 25 bp, Homo sapien
agaagtccacctttgcacgatgagg

SEQ ID NO: 2465773 - DNA, 25 bp, Homo sapien
ttggttccccgacacagccagcagg

SEQ ID NO: 2465774 - DNA, 25 bp, Homo sapien
gatgactgtatcagcagcactctat

SEQ ID NO: 2465775 - DNA, 25 bp, Homo sapien
cactctataactgattttgtgacgt

SEQ ID NO: 2465776 - DNA, 25 bp, Homo sapien
caatcttctcggtttaaatacgtgg

SEQ ID NO: 2465777 - DNA, 25 bp, Homo sapien
atacgtggttagaatgaatgatgac

SEQ ID NO: 2465778 - DNA, 25 bp, Homo sapien
ctgagcaggaactaggggagcccat

SEQ ID NO: 2465779 - DNA, 25 bp, Homo sapien
caggctgagcaggaactaggggagc

SEQ ID NO: 2465780 - DNA, 25 bp, Homo sapien
cctggccggcctggtgggtgaggac

SEQ ID NO: 2465781 - DNA, 25 bp, Homo sapien
tggccggcctggtgggtgaggacac

SEQ ID NO: 2465782 - DNA, 25 bp, Homo sapien
tatggctcatctttccatgggtttt

SEQ ID NO: 2465783 - DNA, 25 bp, Homo sapien
gcttcagaatatggctcatctttcc

SEQ ID NO: 2465784 - DNA, 25 bp, Homo sapien
gaatatggctcatctttccatgggt

SEQ ID NO: 2465785 - DNA, 25 bp, Homo sapien
ccctttcaggaatcttggccccttg

SEQ ID NO: 2465786 - DNA, 25 bp, Homo sapien
cagctgtgagacggccagtctgcct

SEQ ID NO: 2465787 - DNA, 25 bp, Homo sapien
tgtgagacggccagtctgccttggc

SEQ ID NO: 2465788 - DNA, 25 bp, Homo sapien
gctgtgagacggccagtctgccttg

SEQ ID NO: 2465789 - DNA, 25 bp, Homo sapien
ctgtgagacggccagtctgccttgg

SEQ ID NO: 2465790 - DNA, 25 bp, Homo sapien
cagttgccagaactcgatctgtgtc

SEQ ID NO: 2465791 - DNA, 25 bp, Homo sapien
gttgccagaactcgatctgtgtccc

SEQ ID NO: 2465792 - DNA, 25 bp, Homo sapien
ttcagttgccagaactcgatctgtg

SEQ ID NO: 2465793 - DNA, 25 bp, Homo sapien
atttcagttgccagaactcgatctg

SEQ ID NO: 2465794 - DNA, 25 bp, Homo sapien
gcctcgcccggacgcccaatgtctt

SEQ ID NO: 2465795 - DNA, 25 bp, Homo sapien
cccgagcctcgcccggacgcccaat

SEQ ID NO: 2465796 - DNA, 25 bp, Homo sapien
ctttctgcggctcccctgcgggcac

SEQ ID NO: 2465797 - DNA, 25 bp, Homo sapien
ggcaccggtaccaccaccgctacca

SEQ ID NO: 2465798 - DNA, 25 bp, Homo sapien
gtcgcgggcaccgtcgccgcgggga

SEQ ID NO: 2465799 - DNA, 25 bp, Homo sapien
tcccctgcgggcaccggtaccacca

SEQ ID NO: 2465800 - DNA, 25 bp, Homo sapien
ccaggcaggactcgggttgccagca

SEQ ID NO: 2465801 - DNA, 25 bp, Homo sapien
ctccggacgttgaaccgtttggcag

SEQ ID NO: 2465802 - DNA, 25 bp, Homo sapien
gggcataacggtgcccttcatgggc

SEQ ID NO: 2465803 - DNA, 25 bp, Homo sapien
tgaaccgtttggcagtgcccaggca

SEQ ID NO: 2465804 - DNA, 25 bp, Homo sapien
gaggccggggatgaatcagcggaac

SEQ ID NO: 2465805 - DNA, 25 bp, Homo sapien
ggaggccggggatgaatcagcggaa

SEQ ID NO: 2465806 - DNA, 25 bp, Homo sapien
gggaggccggggatgaatcagcgga

SEQ ID NO: 2465807 - DNA, 25 bp, Homo sapien
tgtcccccgagaggggatctctgcc

SEQ ID NO: 2465808 - DNA, 25 bp, Homo sapien
tcttcggcccgctccccttcgccgc

SEQ ID NO: 2465809 - DNA, 25 bp, Homo sapien
caggttctgtcccccgagaggggat

SEQ ID NO: 2465810 - DNA, 25 bp, Homo sapien
cgctccccttcgccgccaggttctg

SEQ ID NO: 2465811 - DNA, 25 bp, Homo sapien
tgtctgtttggttctaccccatcag

SEQ ID NO: 2465812 - DNA, 25 bp, Homo sapien
gggctgtctgtttggttctacccca

SEQ ID NO: 2465813 - DNA, 25 bp, Homo sapien
tgtttggttctaccccatcagtgcc

SEQ ID NO: 2465814 - DNA, 25 bp, Homo sapien
caatggggctgtctgtttggttcta

SEQ ID NO: 2465815 - DNA, 25 bp, Homo sapien
gcggggggacccactcatctccctg

SEQ ID NO: 2465816 - DNA, 25 bp, Homo sapien
aatctgggcggggggacccactcat

SEQ ID NO: 2465817 - DNA, 25 bp, Homo sapien
tctgggcggggggacccactcatct

SEQ ID NO: 2465818 - DNA, 25 bp, Homo sapien
tgggcggggggacccactcatctcc

SEQ ID NO: 2465819 - DNA, 25 bp, Homo sapien
agcccactgattggagctctgggtc

SEQ ID NO: 2465820 - DNA, 25 bp, Homo sapien
gagcccactgattggagctctgggt

SEQ ID NO: 2465821 - DNA, 25 bp, Homo sapien
gtacagcacatctatttgtctgcct

SEQ ID NO: 2465822 - DNA, 25 bp, Homo sapien
caaatatgtgaagtacagcacatct

SEQ ID NO: 2465823 - DNA, 25 bp, Homo sapien
gaactagtggtgtattgagcttccc

SEQ ID NO: 2465824 - DNA, 25 bp, Homo sapien
tcaggcacgattgttgtagcagtag

SEQ ID NO: 2465825 - DNA, 25 bp, Homo sapien
tgaagccacccaggtaagtgggcac

SEQ ID NO: 2465826 - DNA, 25 bp, Homo sapien
taaatgcctttggttgaactagtgg

SEQ ID NO: 2465827 - DNA, 25 bp, Homo sapien
tggctatgctgacctcaccgccatg

SEQ ID NO: 2465828 - DNA, 25 bp, Homo sapien
ctcacctcagccctggctatgctga

SEQ ID NO: 2465829 - DNA, 25 bp, Homo sapien
tcagccctggctatgctgacctcac

SEQ ID NO: 2465830 - DNA, 25 bp, Homo sapien
cctggctatgctgacctcaccgcca

SEQ ID NO: 2465831 - DNA, 25 bp, Homo sapien
tgaactcccacttgcagggacagtc

SEQ ID NO: 2465832 - DNA, 25 bp, Homo sapien
ttttgctactgaaggagcgtgtgtc

SEQ ID NO: 2465833 - DNA, 25 bp, Homo sapien
ctctatagccggcactgggagcagc

SEQ ID NO: 2465834 - DNA, 25 bp, Homo sapien
acagcccgttcgaaggtgtgcagag

SEQ ID NO: 2465835 - DNA, 25 bp, Homo sapien
cccagcaagggactatagatactcg

SEQ ID NO: 2465836 - DNA, 25 bp, Homo sapien
ccaaagttctcaggccaaggtctcg

SEQ ID NO: 2465837 - DNA, 25 bp, Homo sapien
tcaagtattgtcaagggaagcttcc

SEQ ID NO: 2465838 - DNA, 25 bp, Homo sapien
cactgcgtgtggtcaaagttcctca

SEQ ID NO: 2465839 - DNA, 25 bp, Homo sapien
ttgggtgttacttcctgcatctgtg

SEQ ID NO: 2465840 - DNA, 25 bp, Homo sapien
tactgtagaacttgggtgttacttc

SEQ ID NO: 2465841 - DNA, 25 bp, Homo sapien
agaacttgggtgttacttcctgcat

SEQ ID NO: 2465842 - DNA, 25 bp, Homo sapien
ttctactgtagaacttgggtgttac

SEQ ID NO: 2465843 - DNA, 25 bp, Homo sapien
tgccctgggtctgagtgtacccacc

SEQ ID NO: 2465844 - DNA, 25 bp, Homo sapien
ggtctgagtgtacccaccatcattg

SEQ ID NO: 2465845 - DNA, 25 bp, Homo sapien
cctgggtctgagtgtacccaccatc

SEQ ID NO: 2465846 - DNA, 25 bp, Homo sapien
tgagtgtacccaccatcattgttga

SEQ ID NO: 2465847 - DNA, 25 bp, Homo sapien
caggtttgtactggcaagctgatga

SEQ ID NO: 2465848 - DNA, 25 bp, Homo sapien
ttgtactggcaagctgatgatttgc

SEQ ID NO: 2465849 - DNA, 25 bp, Homo sapien
tactggcaagctgatgatttgctgg

SEQ ID NO: 2465850 - DNA, 25 bp, Homo sapien
ccgcaggtttgtactggcaagctga

SEQ ID NO: 2465851 - DNA, 25 bp, Homo sapien
gtgcatggggccagttccattcctg

SEQ ID NO: 2465852 - DNA, 25 bp, Homo sapien
tggggccagttccattcctgtccat

SEQ ID NO: 2465853 - DNA, 25 bp, Homo sapien
cgtgtccaactgcacacagcccagg

SEQ ID NO: 2465854 - DNA, 25 bp, Homo sapien
gcctgggccgcagcgtgtccaactg

SEQ ID NO: 2465855 - DNA, 25 bp, Homo sapien
gcaatgtgtccggtcgtacaggcct

SEQ ID NO: 2465856 - DNA, 25 bp, Homo sapien
aagtgtgtccggtcgtataggcctg

SEQ ID NO: 2465857 - DNA, 25 bp, Homo sapien
tcagagtgtccggtcgtacgggccc

SEQ ID NO: 2465858 - DNA, 25 bp, Homo sapien
agtgtccggtcgtacaggcagggct

SEQ ID NO: 2465859 - DNA, 25 bp, Homo sapien
caggcttagtaagggctgggtctgt

SEQ ID NO: 2465860 - DNA, 25 bp, Homo sapien
ggcaggcttagtaagggctgggtct

SEQ ID NO: 2465861 - DNA, 25 bp, Homo sapien
ctcttggcaggcttagtaagggctg

SEQ ID NO: 2465862 - DNA, 25 bp, Homo sapien
cttggcaggcttagtaagggctggg

SEQ ID NO: 2465863 - DNA, 25 bp, Homo sapien
gactcgcaggtgagcctggtagtgg

SEQ ID NO: 2465864 - DNA, 25 bp, Homo sapien
ctggtagtgggtcggcgggttctca

SEQ ID NO: 2465865 - DNA, 25 bp, Homo sapien
ggcagggactcgcaggtgagcctgg

SEQ ID NO: 2465866 - DNA, 25 bp, Homo sapien
agtgggtcggcgggttctcatccat

SEQ ID NO: 2465867 - DNA, 25 bp, Homo sapien
gcatcagtgcaagggttcggtgtct

SEQ ID NO: 2465868 - DNA, 25 bp, Homo sapien
gcaagggttcggtgtctttcccagc

SEQ ID NO: 2465869 - DNA, 25 bp, Homo sapien
aagtagaaactgtctaatggcatca

SEQ ID NO: 2465870 - DNA, 25 bp, Homo sapien
gaaactgtctaatggcatcagtgca

SEQ ID NO: 2465871 - DNA, 25 bp, Homo sapien
ttgcagttgggtggcacactgttta

SEQ ID NO: 2465872 - DNA, 25 bp, Homo sapien
acactgtttagtgtctcctgctcac

SEQ ID NO: 2465873 - DNA, 25 bp, Homo sapien
tgggtgaagaacacctgtccgatgc

SEQ ID NO: 2465874 - DNA, 25 bp, Homo sapien
tctctgggtgaagaacacctgtccg

SEQ ID NO: 2465875 - DNA, 25 bp, Homo sapien
gaacacctgtccgatgctcgctggc

SEQ ID NO: 2465876 - DNA, 25 bp, Homo sapien
tccccgtcccgtctctgggtgaaga

SEQ ID NO: 2465877 - DNA, 25 bp, Homo sapien
ttcctcgcctgtggtcatctccagc

SEQ ID NO: 2465878 - DNA, 25 bp, Homo sapien
cacttcctcgcctgtggtcatctcc

SEQ ID NO: 2465879 - DNA, 25 bp, Homo sapien
ctcgcctgtggtcatctccagcctg

SEQ ID NO: 2465880 - DNA, 25 bp, Homo sapien
tcgcctgtggtcatctccagcctga

SEQ ID NO: 2465881 - DNA, 25 bp, Homo sapien
tctggcccaaaggctctaacggaga

SEQ ID NO: 2465882 - DNA, 25 bp, Homo sapien
ggctctaacggagaaggttgggcca

SEQ ID NO: 2465883 - DNA, 25 bp, Homo sapien
ctggcccaaaggctctaacggagaa

SEQ ID NO: 2465884 - DNA, 25 bp, Homo sapien
tggcctcggcctgttctcggtagtg

SEQ ID NO: 2465885 - DNA, 25 bp, Homo sapien
gcttgttcctaaggctctctgggca

SEQ ID NO: 2465886 - DNA, 25 bp, Homo sapien
ccctggtatgggggagcttgttcct

SEQ ID NO: 2465887 - DNA, 25 bp, Homo sapien
ggagcttgttcctaaggctctctgg

SEQ ID NO: 2465888 - DNA, 25 bp, Homo sapien
accagacgcttgactttggagttgc

SEQ ID NO: 2465889 - DNA, 25 bp, Homo sapien
ggctgacctctgtgtcacgtaacca

SEQ ID NO: 2465890 - DNA, 25 bp, Homo sapien
agttttggccgagatcttgtgggta

SEQ ID NO: 2465891 - DNA, 25 bp, Homo sapien
acacttctgatggttctgcctggta

SEQ ID NO: 2465892 - DNA, 25 bp, Homo sapien
actgccttcaggaagcgtttgccag

SEQ ID NO: 2465893 - DNA, 25 bp, Homo sapien
gccttcaggaagcgtttgccagtca

SEQ ID NO: 2465894 - DNA, 25 bp, Homo sapien
ccttcaggaagcgtttgccagtcat

SEQ ID NO: 2465895 - DNA, 25 bp, Homo sapien
tgccttcaggaagcgtttgccagtc

SEQ ID NO: 2465896 - DNA, 25 bp, Homo sapien
cacagtgtgtcaaatcggtgttgtt

SEQ ID NO: 2465897 - DNA, 25 bp, Homo sapien
gtgtgtcaaatcggtgttgttgtct

SEQ ID NO: 2465898 - DNA, 25 bp, Homo sapien
cagtgtgtcaaatcggtgttgttgt

SEQ ID NO: 2465899 - DNA, 25 bp, Homo sapien
ccacagtgtgtcaaatcggtgttgt

SEQ ID NO: 2465900 - DNA, 25 bp, Homo sapien
gctgatggcggtaagttcacctgta

SEQ ID NO: 2465901 - DNA, 25 bp, Homo sapien
tgtaccttcacgtttcttgtcagcc

SEQ ID NO: 2465902 - DNA, 25 bp, Homo sapien
tatttggcgcccgtgacacggaagc

SEQ ID NO: 2465903 - DNA, 25 bp, Homo sapien
ggcggtaagttcacctgtaccttca

SEQ ID NO: 2465904 - DNA, 25 bp, Homo sapien
tcccttttgtaacccctggcagctc

SEQ ID NO: 2465905 - DNA, 25 bp, Homo sapien
ccttttgtaacccctggcagctcac

SEQ ID NO: 2465906 - DNA, 25 bp, Homo sapien
cttttgtaacccctggcagctcact

SEQ ID NO: 2465907 - DNA, 25 bp, Homo sapien
cccttttgtaacccctggcagctca

SEQ ID NO: 2465908 - DNA, 25 bp, Homo sapien
caaagtccagctccggaggagagcc

SEQ ID NO: 2465909 - DNA, 25 bp, Homo sapien
agtccaaccctgtctttgcggctct

SEQ ID NO: 2465910 - DNA, 25 bp, Homo sapien
gcttgttatggccttcctgtgggca

SEQ ID NO: 2465911 - DNA, 25 bp, Homo sapien
cacacagagctggtgaggtaaagtg

SEQ ID NO: 2465912 - DNA, 25 bp, Homo sapien
gaatattaatgtacgggctggctcc

SEQ ID NO: 2465913 - DNA, 25 bp, Homo sapien
ggcgccgaactcaccagcgctgtgg

SEQ ID NO: 2465914 - DNA, 25 bp, Homo sapien
gcaaaaatacaacagagggcgccga

SEQ ID NO: 2465915 - DNA, 25 bp, Homo sapien
cagaccgccaagttccttaaagatg

SEQ ID NO: 2465916 - DNA, 25 bp, Homo sapien
tcaggaatgacccttcggtggcatg

SEQ ID NO: 2465917 - DNA, 25 bp, Homo sapien
tcttcagcccagagtcagtggagtc

SEQ ID NO: 2465918 - DNA, 25 bp, Homo sapien
catgtagtctacagttaacggagca

SEQ ID NO: 2465919 - DNA, 25 bp, Homo sapien
ccacttctggttgcttcgaggaaga

SEQ ID NO: 2465920 - DNA, 25 bp, Homo sapien
tgtgaaccctgcaaaaagcagctcg

SEQ ID NO: 2465921 - DNA, 25 bp, Homo sapien
gagatgaagcctccggcaataaaga

SEQ ID NO: 2465922 - DNA, 25 bp, Homo sapien
cattagttgccatgggtgctgagca

SEQ ID NO: 2465923 - DNA, 25 bp, Homo sapien
tatgacctcagggtggactgtagct

SEQ ID NO: 2465924 - DNA, 25 bp, Homo sapien
tcggaggacgactgggcacggcctc

SEQ ID NO: 2465925 - DNA, 25 bp, Homo sapien
ggacgactgggcacggcctcctcat

SEQ ID NO: 2465926 - DNA, 25 bp, Homo sapien
ctggctcggaggacgactgggcacg

SEQ ID NO: 2465927 - DNA, 25 bp, Homo sapien
aggacgactgggcacggcctcctca

SEQ ID NO: 2465928 - DNA, 25 bp, Homo sapien
gtatgcgtacttggcatccaggtgt

SEQ ID NO: 2465929 - DNA, 25 bp, Homo sapien
caggcatagcagtccacgtaggcat

SEQ ID NO: 2465930 - DNA, 25 bp, Homo sapien
tagcagtccacgtatgcgtacttgg

SEQ ID NO: 2465931 - DNA, 25 bp, Homo sapien
cagtgactcagggaccgtggctgct

SEQ ID NO: 2465932 - DNA, 25 bp, Homo sapien
tggcttctcaaacggccgaagttgc

SEQ ID NO: 2465933 - DNA, 25 bp, Homo sapien
aatgtaatgttgcagatccgcaggc

SEQ ID NO: 2465934 - DNA, 25 bp, Homo sapien
ctttggaattgggagcacgatgact

SEQ ID NO: 2465935 - DNA, 25 bp, Homo sapien
caatgcgtagatagaagaagcccca

SEQ ID NO: 2465936 - DNA, 25 bp, Homo sapien
agcttgtggcccgttgcaacactgg

SEQ ID NO: 2465937 - DNA, 25 bp, Homo sapien
aacactggcacgtctcttcgctctc

SEQ ID NO: 2465938 - DNA, 25 bp, Homo sapien
ggtccagttgagcacagccctcatc

SEQ ID NO: 2465939 - DNA, 25 bp, Homo sapien
tgctcggcggctgagcagcttgtgg

SEQ ID NO: 2465940 - DNA, 25 bp, Homo sapien
aagacctccagaatagttgtttctt

SEQ ID NO: 2465941 - DNA, 25 bp, Homo sapien
ggctgcttgtcctggaacccccacc

SEQ ID NO: 2465942 - DNA, 25 bp, Homo sapien
tggaacccccacctcacatttgaag

SEQ ID NO: 2465943 - DNA, 25 bp, Homo sapien
cctcacatttgaagacctccagaat

SEQ ID NO: 2465944 - DNA, 25 bp, Homo sapien
tgtgctgtcctaactgcctgttccc

SEQ ID NO: 2465945 - DNA, 25 bp, Homo sapien
gctggccatgtgctgtcctaactgc

SEQ ID NO: 2465946 - DNA, 25 bp, Homo sapien
aagtccatcattgaggccatagggc

SEQ ID NO: 2465947 - DNA, 25 bp, Homo sapien
ttcccttgtcgggactcactctggg

SEQ ID NO: 2465948 - DNA, 25 bp, Homo sapien
tcttagcacgcattctttcatggaa

SEQ ID NO: 2465949 - DNA, 25 bp, Homo sapien
gaaagaatcctcttagcacgcattc

SEQ ID NO: 2465950 - DNA, 25 bp, Homo sapien
aatcctcttagcacgcattctttca

SEQ ID NO: 2465951 - DNA, 25 bp, Homo sapien
aggaaagaatcctcttagcacgcat

SEQ ID NO: 2465952 - DNA, 25 bp, Homo sapien
gatggcacttctcccatggaggcca

SEQ ID NO: 2465953 - DNA, 25 bp, Homo sapien
gagatggccccttgcacagtgtgga

SEQ ID NO: 2465954 - DNA, 25 bp, Homo sapien
ctggagatggccccttgcacagtgt

SEQ ID NO: 2465955 - DNA, 25 bp, Homo sapien
gctgagtgagatggcacttctccca

SEQ ID NO: 2465956 - DNA, 25 bp, Homo sapien
cccaggtaatgcttgagaacatcac

SEQ ID NO: 2465957 - DNA, 25 bp, Homo sapien
tagcccaggtaatgcttgagaacat

SEQ ID NO: 2465958 - DNA, 25 bp, Homo sapien
ttagcccaggtaatgcttgagaaca

SEQ ID NO: 2465959 - DNA, 25 bp, Homo sapien
gcccaggtaatgcttgagaacatca

SEQ ID NO: 2465960 - DNA, 25 bp, Homo sapien
aagcatgtttgttcacgtacatcca

SEQ ID NO: 2465961 - DNA, 25 bp, Homo sapien
aactgccgggaccagctctttgctg

SEQ ID NO: 2465962 - DNA, 25 bp, Homo sapien
ggtggccttgaatgccacgaaaaag

SEQ ID NO: 2465963 - DNA, 25 bp, Homo sapien
gctgacactccctctttccggaact

SEQ ID NO: 2465964 - DNA, 25 bp, Homo sapien
ctgtctcatatggtggcatccacac

SEQ ID NO: 2465965 - DNA, 25 bp, Homo sapien
cagacctgggagtcatttgggctcc

SEQ ID NO: 2465966 - DNA, 25 bp, Homo sapien
cccatcatctctgaaatatcttcct

SEQ ID NO: 2465967 - DNA, 25 bp, Homo sapien
cattcagcccccagctcatgtttct

SEQ ID NO: 2465968 - DNA, 25 bp, Homo sapien
tttgtccccactcccctgatatcca

SEQ ID NO: 2465969 - DNA, 25 bp, Homo sapien
tgacttattcacctgcgtgtgcctt

SEQ ID NO: 2465970 - DNA, 25 bp, Homo sapien
attcacctgcgtgtgccttgatggg

SEQ ID NO: 2465971 - DNA, 25 bp, Homo sapien
acttattcacctgcgtgtgccttga

SEQ ID NO: 2465972 - DNA, 25 bp, Homo sapien
ttattcacctgcgtgtgccttgatg

SEQ ID NO: 2465973 - DNA, 25 bp, Homo sapien
gtcctcctcttccagatctgcccat

SEQ ID NO: 2465974 - DNA, 25 bp, Homo sapien
ttgaaccatctgtgcaaaggggcct

SEQ ID NO: 2465975 - DNA, 25 bp, Homo sapien
gaaccatctgtgcaaaggggcctgg

SEQ ID NO: 2465976 - DNA, 25 bp, Homo sapien
accatctgtgcaaaggggcctggtc

SEQ ID NO: 2465977 - DNA, 25 bp, Homo sapien
taaccaagagttactggccatcaag

SEQ ID NO: 2465978 - DNA, 25 bp, Homo sapien
aagctccaagggtcatacaatgtgc

SEQ ID NO: 2465979 - DNA, 25 bp, Homo sapien
ttctaagaggaatccagcatgtgcc

SEQ ID NO: 2465980 - DNA, 25 bp, Homo sapien
ggtacccttctagaatgcagcatag

SEQ ID NO: 2465981 - DNA, 25 bp, Homo sapien
tacgataaactgaacatgaccagtg

SEQ ID NO: 2465982 - DNA, 25 bp, Homo sapien
tttgcccatcaaatattctgccttt

SEQ ID NO: 2465983 - DNA, 25 bp, Homo sapien
gacatattgttgaccttggcaatca

SEQ ID NO: 2465984 - DNA, 25 bp, Homo sapien
ggaatgaggaaactgtctttgccca

SEQ ID NO: 2465985 - DNA, 25 bp, Homo sapien
ctcaatttccctctggttgaagttc

SEQ ID NO: 2465986 - DNA, 25 bp, Homo sapien
tctggttgaagttcaaagccttctt

SEQ ID NO: 2465987 - DNA, 25 bp, Homo sapien
gaggcaggctccacttctcaatttc

SEQ ID NO: 2465988 - DNA, 25 bp, Homo sapien
tcaaagccttctttgggatttctgc

SEQ ID NO: 2465989 - DNA, 25 bp, Homo sapien
cgcgatcctgggctaccggtctgtg

SEQ ID NO: 2465990 - DNA, 25 bp, Homo sapien
aagatgccgcagtcaaagtcccgga

SEQ ID NO: 2465991 - DNA, 25 bp, Homo sapien
tttaacttgtagacacagccgggca

SEQ ID NO: 2465992 - DNA, 25 bp, Homo sapien
tggactcctacgatccaaccataga

SEQ ID NO: 2465993 - DNA, 25 bp, Homo sapien
aaaccgtcaatgtgaaatcatttcc

SEQ ID NO: 2465994 - DNA, 25 bp, Homo sapien
gtttagacaagttcaagacaagcgt

SEQ ID NO: 2465995 - DNA, 25 bp, Homo sapien
gacaagcgtgtctttctataaaaag

SEQ ID NO: 2465996 - DNA, 25 bp, Homo sapien
gataatggattagtttatataaacc

SEQ ID NO: 2465997 - DNA, 25 bp, Homo sapien
ccaatcccatgtaggagtctaaact

SEQ ID NO: 2465998 - DNA, 25 bp, Homo sapien
ctggatcacaaaattcacatgattt

SEQ ID NO: 2465999 - DNA, 25 bp, Homo sapien
ttaccaattcaaacttgctctgcag

SEQ ID NO: 2466000 - DNA, 25 bp, Homo sapien
tctgtgactttctggatcacaaaat

SEQ ID NO: 2466001 - DNA, 25 bp, Homo sapien
ggcattgggcgggtagcagtgtttc

SEQ ID NO: 2466002 - DNA, 25 bp, Homo sapien
caggcattgggcgggtagcagtgtt

SEQ ID NO: 2466003 - DNA, 25 bp, Homo sapien
attgggcgggtagcagtgtttcctc

SEQ ID NO: 2466004 - DNA, 25 bp, Homo sapien
cattgggcgggtagcagtgtttcct

SEQ ID NO: 2466005 - DNA, 25 bp, Homo sapien
cagttggaatccttggaggaccaca

SEQ ID NO: 2466006 - DNA, 25 bp, Homo sapien
agttggaatccttggaggaccacac

SEQ ID NO: 2466007 - DNA, 25 bp, Homo sapien
gttggaatccttggaggaccacact

SEQ ID NO: 2466008 - DNA, 25 bp, Homo sapien
tcagttggaatccttggaggaccac

SEQ ID NO: 2466009 - DNA, 25 bp, Homo sapien
caacaaaacggagccactaatgacc

SEQ ID NO: 2466010 - DNA, 25 bp, Homo sapien
atgacccagatattggtgttatcag

SEQ ID NO: 2466011 - DNA, 25 bp, Homo sapien
ttcctggagccactaaaatttatta

SEQ ID NO: 2466012 - DNA, 25 bp, Homo sapien
tagcattcaacaataagtgatcaaa

SEQ ID NO: 2466013 - DNA, 25 bp, Homo sapien
aactgataaagctttatgatcccca

SEQ ID NO: 2466014 - DNA, 25 bp, Homo sapien
taaatataggctgagaactttccaa

SEQ ID NO: 2466015 - DNA, 25 bp, Homo sapien
gatggggcagaaggaacagttaaat

SEQ ID NO: 2466016 - DNA, 25 bp, Homo sapien
taaagctttatgatccccaagcagg

SEQ ID NO: 2466017 - DNA, 25 bp, Homo sapien
tagatgtttctattcaaaaactgag

SEQ ID NO: 2466018 - DNA, 25 bp, Homo sapien
gagccagtgcatgttactgacacat

SEQ ID NO: 2466019 - DNA, 25 bp, Homo sapien
gatgtttctattcaaaaactgagaa

SEQ ID NO: 2466020 - DNA, 25 bp, Homo sapien
ctgacacattactctcaaaggagaa

SEQ ID NO: 2466021 - DNA, 25 bp, Homo sapien
caagcggccctagaaaagtcactgc

SEQ ID NO: 2466022 - DNA, 25 bp, Homo sapien
gataccagtctactctgtcctgcag

SEQ ID NO: 2466023 - DNA, 25 bp, Homo sapien
tggacaggatttgagacaacccagg

SEQ ID NO: 2466024 - DNA, 25 bp, Homo sapien
cagggatgagtcagagataccagtc

SEQ ID NO: 2466025 - DNA, 25 bp, Homo sapien
cttggaatgtgggggtggctggcat

SEQ ID NO: 2466026 - DNA, 25 bp, Homo sapien
gaaacagttccactgtagtagcctg

SEQ ID NO: 2466027 - DNA, 25 bp, Homo sapien
aacagttccactgtagtagcctgct

SEQ ID NO: 2466028 - DNA, 25 bp, Homo sapien
agaaacagttccactgtagtagcct

SEQ ID NO: 2466029 - DNA, 25 bp, Homo sapien
aaacagttccactgtagtagcctgc

SEQ ID NO: 2466030 - DNA, 25 bp, Homo sapien
cagagaacccctattacatgtgagc

SEQ ID NO: 2466031 - DNA, 25 bp, Homo sapien
ggcatttgacacagccccgtggagg

SEQ ID NO: 2466032 - DNA, 25 bp, Homo sapien
caacgtgttgacgtgcaggctgcac

SEQ ID NO: 2466033 - DNA, 25 bp, Homo sapien
gaaacactgcgaggcgacacttgtg

SEQ ID NO: 2466034 - DNA, 25 bp, Homo sapien
ggtagagctgggtcatcactaaaca

SEQ ID NO: 2466035 - DNA, 25 bp, Homo sapien
agtgtgtcggaaggctgtatggcca

SEQ ID NO: 2466036 - DNA, 25 bp, Homo sapien
ggagtgtgtcggaaggctgtatggc

SEQ ID NO: 2466037 - DNA, 25 bp, Homo sapien
agggagtgtgtcggaaggctgtatg

SEQ ID NO: 2466038 - DNA, 25 bp, Homo sapien
gagtgtgtcggaaggctgtatggcc

SEQ ID NO: 2466039 - DNA, 25 bp, Homo sapien
ctcttctctcctgcatatcagcact

SEQ ID NO: 2466040 - DNA, 25 bp, Homo sapien
atatcagcactcacgtcctcctggc

SEQ ID NO: 2466041 - DNA, 25 bp, Homo sapien
tctcctgcatatcagcactcacgtc

SEQ ID NO: 2466042 - DNA, 25 bp, Homo sapien
tgcatatcagcactcacgtcctcct

SEQ ID NO: 2466043 - DNA, 25 bp, Homo sapien
gttggatgaaacgtccatgcgtgtg

SEQ ID NO: 2466044 - DNA, 25 bp, Homo sapien
tggatgaaacgtccatgcgtgtggc

SEQ ID NO: 2466045 - DNA, 25 bp, Homo sapien
gatgaaacgtccatgcgtgtggctg

SEQ ID NO: 2466046 - DNA, 25 bp, Homo sapien
atgaaacgtccatgcgtgtggctgt

SEQ ID NO: 2466047 - DNA, 25 bp, Homo sapien
tcccaaagcggaaccgcggtgctgg

SEQ ID NO: 2466048 - DNA, 25 bp, Homo sapien
agcggaaccgcggtgctgggcaaag

SEQ ID NO: 2466049 - DNA, 25 bp, Homo sapien
caaagcggaaccgcggtgctgggca

SEQ ID NO: 2466050 - DNA, 25 bp, Homo sapien
ctcccaaagcggaaccgcggtgctg

SEQ ID NO: 2466051 - DNA, 25 bp, Homo sapien
ggcagagcgcatgccagcgcttcac

SEQ ID NO: 2466052 - DNA, 25 bp, Homo sapien
tcagggctccgtggtgcggcagagc

SEQ ID NO: 2466053 - DNA, 25 bp, Homo sapien
tccgtggtgcggcagagcgcatgcc

SEQ ID NO: 2466054 - DNA, 25 bp, Homo sapien
tgcggcagagcgcatgccagcgctt

SEQ ID NO: 2466055 - DNA, 25 bp, Homo sapien
cagctctctgccgcgggtgtacatg

SEQ ID NO: 2466056 - DNA, 25 bp, Homo sapien
tgagcatctcgtcccagtgctccag

SEQ ID NO: 2466057 - DNA, 25 bp, Homo sapien
tctctgccgcgggtgtacatgtagg

SEQ ID NO: 2466058 - DNA, 25 bp, Homo sapien
ggcttgctgagcatctcgtcccagt

SEQ ID NO: 2466059 - DNA, 25 bp, Homo sapien
tgaaacccaggccttgggcaatatt

SEQ ID NO: 2466060 - DNA, 25 bp, Homo sapien
ttctagggtgccacagacagagctc

SEQ ID NO: 2466061 - DNA, 25 bp, Homo sapien
ggctgcttaacctgtttctagggtg

SEQ ID NO: 2466062 - DNA, 25 bp, Homo sapien
actggactaaagctgggcctgaaac

SEQ ID NO: 2466063 - DNA, 25 bp, Homo sapien
caggctgaggctagcggtatccagc

SEQ ID NO: 2466064 - DNA, 25 bp, Homo sapien
aggctgaggctagcggtatccagct

SEQ ID NO: 2466065 - DNA, 25 bp, Homo sapien
tcaggctgaggctagcggtatccag

SEQ ID NO: 2466066 - DNA, 25 bp, Homo sapien
gtcaggctgaggctagcggtatcca

SEQ ID NO: 2466067 - DNA, 25 bp, Homo sapien
acttgttgtggttcatcagagacac

SEQ ID NO: 2466068 - DNA, 25 bp, Homo sapien
tgcacttgacaaacttgttgtggtt

SEQ ID NO: 2466069 - DNA, 25 bp, Homo sapien
cttgcacttgacaaacttgttgtgg

SEQ ID NO: 2466070 - DNA, 25 bp, Homo sapien
catcagagacactttgacaaacaca

SEQ ID NO: 2466071 - DNA, 25 bp, Homo sapien
ggaggcccttggcacgcagcacaac

SEQ ID NO: 2466072 - DNA, 25 bp, Homo sapien
ctgaggcagaactggaggtcgccaa

SEQ ID NO: 2466073 - DNA, 25 bp, Homo sapien
tcaggtagtcgttgtagctgaggca

SEQ ID NO: 2466074 - DNA, 25 bp, Homo sapien
acaaccaccgtcaggcggctcaggt

SEQ ID NO: 2466075 - DNA, 25 bp, Homo sapien
agtcccccactagggtctcattctt

SEQ ID NO: 2466076 - DNA, 25 bp, Homo sapien
gtctctccagatgacacgccggcag

SEQ ID NO: 2466077 - DNA, 25 bp, Homo sapien
cgtggtagacggagaacttcagcac

SEQ ID NO: 2466078 - DNA, 25 bp, Homo sapien
tgcctgtccacgtggtagacggaga

SEQ ID NO: 2466079 - DNA, 25 bp, Homo sapien
gctgtgccttgatcaagcccaccag

SEQ ID NO: 2466080 - DNA, 25 bp, Homo sapien
gatgaagtgctcgtcaaactgcggg

SEQ ID NO: 2466081 - DNA, 25 bp, Homo sapien
ttggattggaggaagcgccgctcat

SEQ ID NO: 2466082 - DNA, 25 bp, Homo sapien
gctcatattccaccgagaaccacag

SEQ ID NO: 2466083 - DNA, 25 bp, Homo sapien
ttgatggcccccaccatacatgcat

SEQ ID NO: 2466084 - DNA, 25 bp, Homo sapien
gttgatggcccccaccatacatgca

SEQ ID NO: 2466085 - DNA, 25 bp, Homo sapien
ggcagcagctctgatgccgggcagg

SEQ ID NO: 2466086 - DNA, 25 bp, Homo sapien
caccacgaatggcacagctggtggc

SEQ ID NO: 2466087 - DNA, 25 bp, Homo sapien
gggcacccaatctcggccttgaagg

SEQ ID NO: 2466088 - DNA, 25 bp, Homo sapien
ttgggggcaccacgaatggcacagc

SEQ ID NO: 2466089 - DNA, 25 bp, Homo sapien
cagggagacaacatgtaggtggcaa

SEQ ID NO: 2466090 - DNA, 25 bp, Homo sapien
agagtcagggagacaacatgtaggt

SEQ ID NO: 2466091 - DNA, 25 bp, Homo sapien
atggtgtggtctcagagcgctcagc

SEQ ID NO: 2466092 - DNA, 25 bp, Homo sapien
tcagccaggacggttgagcaccagg

SEQ ID NO: 2466093 - DNA, 25 bp, Homo sapien
agctcctcataggtgagggtggcac

SEQ ID NO: 2466094 - DNA, 25 bp, Homo sapien
tcagttgggtcctagcatgcggctg

SEQ ID NO: 2466095 - DNA, 25 bp, Homo sapien
caggcagctcctcataggtgagggt

SEQ ID NO: 2466096 - DNA, 25 bp, Homo sapien
tgtcccgctgcccactggaggcagc

SEQ ID NO: 2466097 - DNA, 25 bp, Homo sapien
gccccccgatggtgcccccaatcac

SEQ ID NO: 2466098 - DNA, 25 bp, Homo sapien
agccccccgatggtgcccccaatca

SEQ ID NO: 2466099 - DNA, 25 bp, Homo sapien
ctgccctcaccagaacctccatatc

SEQ ID NO: 2466100 - DNA, 25 bp, Homo sapien
accagaacctccatatcccctgggc

SEQ ID NO: 2466101 - DNA, 25 bp, Homo sapien
cctcaccagaacctccatatcccct

SEQ ID NO: 2466102 - DNA, 25 bp, Homo sapien
tcaccagaacctccatatcccctgg

SEQ ID NO: 2466103 - DNA, 25 bp, Homo sapien
cgagcacaggggcggtccgtggtgc

SEQ ID NO: 2466104 - DNA, 25 bp, Homo sapien
tgggctgccaggccgtctcttaaag

SEQ ID NO: 2466105 - DNA, 25 bp, Homo sapien
aggccgtctcttaaagcgccgcggg

SEQ ID NO: 2466106 - DNA, 25 bp, Homo sapien
gcacaggggcggtccgtggtgctgc

SEQ ID NO: 2466107 - DNA, 25 bp, Homo sapien
aaccggtcgagagcgcaattctgga

SEQ ID NO: 2466108 - DNA, 25 bp, Homo sapien
taaagagcacttagagcggaggagc

SEQ ID NO: 2466109 - DNA, 25 bp, Homo sapien
gctggcctgccggtaacttaagaag

SEQ ID NO: 2466110 - DNA, 25 bp, Homo sapien
taacgttcgtatgctgggttcagtc

SEQ ID NO: 2466111 - DNA, 25 bp, Homo sapien
agggccagggtgcagaggccgcagc

SEQ ID NO: 2466112 - DNA, 25 bp, Homo sapien
ccactgggccgggtctgggagccct

SEQ ID NO: 2466113 - DNA, 25 bp, Homo sapien
gagggtggtgaactggggtgcccca

SEQ ID NO: 2466114 - DNA, 25 bp, Homo sapien
ggccgcagccactccccttctaggg

SEQ ID NO: 2466115 - DNA, 25 bp, Homo sapien
agggaatcccttctggcacttcctg

SEQ ID NO: 2466116 - DNA, 25 bp, Homo sapien
agctgcctccatgattgcgcccgag

SEQ ID NO: 2466117 - DNA, 25 bp, Homo sapien
gacccccatgctgtgcttttccaaa

SEQ ID NO: 2466118 - DNA, 25 bp, Homo sapien
gcccgagctgtactcaggctgttct

SEQ ID NO: 2466119 - DNA, 25 bp, Homo sapien
tcttcagtatctgccttcctcgggc

SEQ ID NO: 2466120 - DNA, 25 bp, Homo sapien
ctttcagcactgctgtattctcttc

SEQ ID NO: 2466121 - DNA, 25 bp, Homo sapien
gcttctttcagcactgctgtattct

SEQ ID NO: 2466122 - DNA, 25 bp, Homo sapien
gtatctgccttcctcgggctagctc

SEQ ID NO: 2466123 - DNA, 25 bp, Homo sapien
gcatccagcaaacacctgcattctg

SEQ ID NO: 2466124 - DNA, 25 bp, Homo sapien
catccagcaaacacctgcattctga

SEQ ID NO: 2466125 - DNA, 25 bp, Homo sapien
ccagcaaacacctgcattctgaaat

SEQ ID NO: 2466126 - DNA, 25 bp, Homo sapien
tccagcaaacacctgcattctgaaa

SEQ ID NO: 2466127 - DNA, 25 bp, Homo sapien
acgggaccgggaaggcgctgtggtg

SEQ ID NO: 2466128 - DNA, 25 bp, Homo sapien
gcctcatagtgtggaacctggcgat

SEQ ID NO: 2466129 - DNA, 25 bp, Homo sapien
gtggaacctggcgatcccagggcct

SEQ ID NO: 2466130 - DNA, 25 bp, Homo sapien
cagcaggaatctattgcgagtggcg

SEQ ID NO: 2466131 - DNA, 25 bp, Homo sapien
tcccagacgaaagggccctatagga

SEQ ID NO: 2466132 - DNA, 25 bp, Homo sapien
gagccagagaattgtgagaggtgga

SEQ ID NO: 2466133 - DNA, 25 bp, Homo sapien
tctcgtgggcgggatctggagccag

SEQ ID NO: 2466134 - DNA, 25 bp, Homo sapien
gagaccaggcctggtatcccagacg

SEQ ID NO: 2466135 - DNA, 25 bp, Homo sapien
tggcacctgtggcggccgcaggagc

SEQ ID NO: 2466136 - DNA, 25 bp, Homo sapien
gcggccgcaggagcagcgcttcccc

SEQ ID NO: 2466137 - DNA, 25 bp, Homo sapien
gccgcaggagcagcgcttcccccgc

SEQ ID NO: 2466138 - DNA, 25 bp, Homo sapien
ctggcacctgtggcggccgcaggag

SEQ ID NO: 2466139 - DNA, 25 bp, Homo sapien
tgcctgcgctcagacccccggcatc

SEQ ID NO: 2466140 - DNA, 25 bp, Homo sapien
tggccgcatcgcactccccgcgctc

SEQ ID NO: 2466141 - DNA, 25 bp, Homo sapien
ccgcatcgcactccccgcgctccgc

SEQ ID NO: 2466142 - DNA, 25 bp, Homo sapien
ggtggccgcatcgcactccccgcgc

SEQ ID NO: 2466143 - DNA, 25 bp, Homo sapien
gtggctggtcctccaggaagccttt

SEQ ID NO: 2466144 - DNA, 25 bp, Homo sapien
gctggtcctccaggaagccttttct

SEQ ID NO: 2466145 - DNA, 25 bp, Homo sapien
tggtcctccaggaagccttttctca

SEQ ID NO: 2466146 - DNA, 25 bp, Homo sapien
ggtcctccaggaagccttttctcat

SEQ ID NO: 2466147 - DNA, 25 bp, Homo sapien
cccagaagcttctgctgagatgagg

SEQ ID NO: 2466148 - DNA, 25 bp, Homo sapien
tcaccactcatcttgggctgggttc

SEQ ID NO: 2466149 - DNA, 25 bp, Homo sapien
gggttccccagaagcttctgctgag

SEQ ID NO: 2466150 - DNA, 25 bp, Homo sapien
agaagcttctgctgagatgaggatg

SEQ ID NO: 2466151 - DNA, 25 bp, Homo sapien
tcaattcttgaaggggtggaagcct

SEQ ID NO: 2466152 - DNA, 25 bp, Homo sapien
caattcttgaaggggtggaagcctc

SEQ ID NO: 2466153 - DNA, 25 bp, Homo sapien
ccaggcgtggtcctgggcggcgcgg

SEQ ID NO: 2466154 - DNA, 25 bp, Homo sapien
gatcccgcggtctggtttgcggcta

SEQ ID NO: 2466155 - DNA, 25 bp, Homo sapien
gtgacaggacccgacgcctcctggt

SEQ ID NO: 2466156 - DNA, 25 bp, Homo sapien
tttgcggctaggtgtgtgtccccgg

SEQ ID NO: 2466157 - DNA, 25 bp, Homo sapien
tgtctcatgtcaagcccagggactg

SEQ ID NO: 2466158 - DNA, 25 bp, Homo sapien
ttgctttagcacatcaccgagaggg

SEQ ID NO: 2466159 - DNA, 25 bp, Homo sapien
gaacacttgcatttgggccagaccg

SEQ ID NO: 2466160 - DNA, 25 bp, Homo sapien
aaaacttgataggagagtggctgcc

SEQ ID NO: 2466161 - DNA, 25 bp, Homo sapien
caagttcatgaagcccatagggagt

SEQ ID NO: 2466162 - DNA, 25 bp, Homo sapien
actgagagatgtccagggaaatttc

SEQ ID NO: 2466163 - DNA, 25 bp, Homo sapien
catgaagcccatagggagtaggatg

SEQ ID NO: 2466164 - DNA, 25 bp, Homo sapien
caggcaagttcatgaagcccatagg

SEQ ID NO: 2466165 - DNA, 25 bp, Homo sapien
ctttgctcctccatgtacccaggga

SEQ ID NO: 2466166 - DNA, 25 bp, Homo sapien
agctgtgatgttcaggtgggatgtc

SEQ ID NO: 2466167 - DNA, 25 bp, Homo sapien
gatgtccaggtaggattcccaggtg

SEQ ID NO: 2466168 - DNA, 25 bp, Homo sapien
caggtagggtgtccaagtgggaggt

SEQ ID NO: 2466169 - DNA, 25 bp, Homo sapien
ccaggtagggtgtccaagtgggagg

SEQ ID NO: 2466170 - DNA, 25 bp, Homo sapien
aaagcctgccaggacagcggctcct

SEQ ID NO: 2466171 - DNA, 25 bp, Homo sapien
gtttcctgtggacaggtcagagcac

SEQ ID NO: 2466172 - DNA, 25 bp, Homo sapien
gcaggctccgtgcaaaggggcaaat

SEQ ID NO: 2466173 - DNA, 25 bp, Homo sapien
tgtggacaggtcagagcacttcagg

SEQ ID NO: 2466174 - DNA, 25 bp, Homo sapien
cctgtattctggttgccaagtggca

SEQ ID NO: 2466175 - DNA, 25 bp, Homo sapien
tgtccctaggtctcaacaagcagag

SEQ ID NO: 2466176 - DNA, 25 bp, Homo sapien
taaccatgagactagaaggccccag

SEQ ID NO: 2466177 - DNA, 25 bp, Homo sapien
tgcggactgaattcaaacggatgtc

SEQ ID NO: 2466178 - DNA, 25 bp, Homo sapien
tgagtgaatcatgactagtatcagg

SEQ ID NO: 2466179 - DNA, 25 bp, Homo sapien
tcagcgtatggtcaacagagtattg

SEQ ID NO: 2466180 - DNA, 25 bp, Homo sapien
ctagtatcaggtccaactaggaaga

SEQ ID NO: 2466181 - DNA, 25 bp, Homo sapien
tgcatgcacaggcttctgcataggt

SEQ ID NO: 2466182 - DNA, 25 bp, Homo sapien
gctgctctctgaaacggaatgttca

SEQ ID NO: 2466183 - DNA, 25 bp, Homo sapien
tcaccttaggcctcagagcgctcca

SEQ ID NO: 2466184 - DNA, 25 bp, Homo sapien
ctctgttaggtgagtacatacgtca

SEQ ID NO: 2466185 - DNA, 25 bp, Homo sapien
aatgtttctgtctagtggttatggg

SEQ ID NO: 2466186 - DNA, 25 bp, Homo sapien
tagctgcgtgcatatatcccaaaga

SEQ ID NO: 2466187 - DNA, 25 bp, Homo sapien
tgtcctaatgttcacttccagatac

SEQ ID NO: 2466188 - DNA, 25 bp, Homo sapien
gctgtctactttttatacgtaatcc

SEQ ID NO: 2466189 - DNA, 25 bp, Homo sapien
tcaaaactgctgtacgaaagggaat

SEQ ID NO: 2466190 - DNA, 25 bp, Homo sapien
gcttctttctagcttgtaggggaag

SEQ ID NO: 2466191 - DNA, 25 bp, Homo sapien
ctttatcaccatgggcctcaaaccg

SEQ ID NO: 2466192 - DNA, 25 bp, Homo sapien
gaaacgtccacttccatatactaca

SEQ ID NO: 2466193 - DNA, 25 bp, Homo sapien
tgtaggggaagatattccctttatc

SEQ ID NO: 2466194 - DNA, 25 bp, Homo sapien
tttggaagccccgggatgctcctgg

SEQ ID NO: 2466195 - DNA, 25 bp, Homo sapien
ttggcatttggaagccccgggatgc

SEQ ID NO: 2466196 - DNA, 25 bp, Homo sapien
tggcatttggaagccccgggatgct

SEQ ID NO: 2466197 - DNA, 25 bp, Homo sapien
gcatttggaagccccgggatgctcc

SEQ ID NO: 2466198 - DNA, 25 bp, Homo sapien
tatgcattgaccagcagtcatagtg

SEQ ID NO: 2466199 - DNA, 25 bp, Homo sapien
gcttctgccaattgctatgcattga

SEQ ID NO: 2466200 - DNA, 25 bp, Homo sapien
gcagtcatagtggagctgacaccaa

SEQ ID NO: 2466201 - DNA, 25 bp, Homo sapien
tagctttaacctcacagaaggtgtg

SEQ ID NO: 2466202 - DNA, 25 bp, Homo sapien
tctggctggaagtaggaatgttgtt

SEQ ID NO: 2466203 - DNA, 25 bp, Homo sapien
tggctggaagtaggaatgttgttct

SEQ ID NO: 2466204 - DNA, 25 bp, Homo sapien
tatggggtggcggtgagatggactt

SEQ ID NO: 2466205 - DNA, 25 bp, Homo sapien
cttctggctggaagtaggaatgttg

SEQ ID NO: 2466206 - DNA, 25 bp, Homo sapien
cactcctgggagtcgttagaagctc

SEQ ID NO: 2466207 - DNA, 25 bp, Homo sapien
ctcattgattagcacaagtgtagac

SEQ ID NO: 2466208 - DNA, 25 bp, Homo sapien
aaaggagcttaagtgagcaggcaat

SEQ ID NO: 2466209 - DNA, 25 bp, Homo sapien
aacgaacacaaataggtcctgcagg

SEQ ID NO: 2466210 - DNA, 25 bp, Homo sapien
cacccagatgcattctctactgtgg

SEQ ID NO: 2466211 - DNA, 25 bp, Homo sapien
gagagaggttggtagaattcttttc

SEQ ID NO: 2466212 - DNA, 25 bp, Homo sapien
tggcatgcctccacactacagaagc

SEQ ID NO: 2466213 - DNA, 25 bp, Homo sapien
tgtcgactattttgctcacacccca

SEQ ID NO: 2466214 - DNA, 25 bp, Homo sapien
cagtggctgcgttcttgcctgcaca

SEQ ID NO: 2466215 - DNA, 25 bp, Homo sapien
aggacgggtgtccatagagctccca

SEQ ID NO: 2466216 - DNA, 25 bp, Homo sapien
gcctgcacagaggacgggtgtccat

SEQ ID NO: 2466217 - DNA, 25 bp, Homo sapien
gacagtggctgcgttcttgcctgca

SEQ ID NO: 2466218 - DNA, 25 bp, Homo sapien
cttgggggctcaagatgcggctccc

SEQ ID NO: 2466219 - DNA, 25 bp, Homo sapien
gctgcagttccgggcaggccttggg

SEQ ID NO: 2466220 - DNA, 25 bp, Homo sapien
gcaggcgggagcgtagcagccgctc

SEQ ID NO: 2466221 - DNA, 25 bp, Homo sapien
cgtgggcgggcgcaaggggcaggct

SEQ ID NO: 2466222 - DNA, 25 bp, Homo sapien
gtacatattcttacactcgggacag

SEQ ID NO: 2466223 - DNA, 25 bp, Homo sapien
gaacgccatgtgcatcatagcccag

SEQ ID NO: 2466224 - DNA, 25 bp, Homo sapien
tactctcggacccaaggcttatata

SEQ ID NO: 2466225 - DNA, 25 bp, Homo sapien
ggatatacatgctccagcaagacag

SEQ ID NO: 2466226 - DNA, 25 bp, Homo sapien
cactgggtaagcacctgtagacacc

SEQ ID NO: 2466227 - DNA, 25 bp, Homo sapien
taagaaacaggttgccctggagcct

SEQ ID NO: 2466228 - DNA, 25 bp, Homo sapien
tattcagagtccttgttgccagccc

SEQ ID NO: 2466229 - DNA, 25 bp, Homo sapien
gccagcccagctcgattgaatccaa

SEQ ID NO: 2466230 - DNA, 25 bp, Homo sapien
tggctttccatcatactcagggcaa

SEQ ID NO: 2466231 - DNA, 25 bp, Homo sapien
tgcttttcatttgcttgggccacag

SEQ ID NO: 2466232 - DNA, 25 bp, Homo sapien
cttttcagaaaagggcaagtcctgc

SEQ ID NO: 2466233 - DNA, 25 bp, Homo sapien
cctgattttgggacactggagcatc

SEQ ID NO: 2466234 - DNA, 25 bp, Homo sapien
gatagcacaacaggttggccagtca

SEQ ID NO: 2466235 - DNA, 25 bp, Homo sapien
ggagcccacacaagagactacagtc

SEQ ID NO: 2466236 - DNA, 25 bp, Homo sapien
tgatattgctgcagaatggaacact

SEQ ID NO: 2466237 - DNA, 25 bp, Homo sapien
gaaaaaccccagacagtagaatgga

SEQ ID NO: 2466238 - DNA, 25 bp, Homo sapien
tggattaatacacaacgatgctcaa

SEQ ID NO: 2466239 - DNA, 25 bp, Homo sapien
gctcaatgacagtgatgcgttctca

SEQ ID NO: 2466240 - DNA, 25 bp, Homo sapien
tacatacctgggctctatggcatag

SEQ ID NO: 2466241 - DNA, 25 bp, Homo sapien
aggctaccaatctgtgcagcatgtg

SEQ ID NO: 2466242 - DNA, 25 bp, Homo sapien
attagcccacacctacccagggtca

SEQ ID NO: 2466243 - DNA, 25 bp, Homo sapien
tatattaatacttagcttaagacac

SEQ ID NO: 2466244 - DNA, 25 bp, Homo sapien
ctgcctgaggatgtgttacattaac

SEQ ID NO: 2466245 - DNA, 25 bp, Homo sapien
gacacacgttgtataactgtacaaa

SEQ ID NO: 2466246 - DNA, 25 bp, Homo sapien
ccaagatagcttcagagtagactaa

SEQ ID NO: 2466247 - DNA, 25 bp, Homo sapien
tacaccaaaggtttctgaagacaat

SEQ ID NO: 2466248 - DNA, 25 bp, Homo sapien
gatagcttcagagtagactaacttt

SEQ ID NO: 2466249 - DNA, 25 bp, Homo sapien
ctacaccaaaggtttctgaagacaa

SEQ ID NO: 2466250 - DNA, 25 bp, Homo sapien
cgtggaaagatcgtgcaggagaaaa

SEQ ID NO: 2466251 - DNA, 25 bp, Homo sapien
gcagctggtcctgctcactgaagcc

SEQ ID NO: 2466252 - DNA, 25 bp, Homo sapien
tctgggattacctctaggaaggaaa

SEQ ID NO: 2466253 - DNA, 25 bp, Homo sapien
tccaggcccctgacacgtggaaaga

SEQ ID NO: 2466254 - DNA, 25 bp, Homo sapien
gatgatgtcttaggaagaacaggag

SEQ ID NO: 2466255 - DNA, 25 bp, Homo sapien
agtgatgatgtcttaggaagaacag

SEQ ID NO: 2466256 - DNA, 25 bp, Homo sapien
ttcagtgatgatgtcttaggaagaa

SEQ ID NO: 2466257 - DNA, 25 bp, Homo sapien
tataagcttaaatttcagtgatgat

SEQ ID NO: 2466258 - DNA, 25 bp, Homo sapien
tgaatggtgggttaacactccctcc

SEQ ID NO: 2466259 - DNA, 25 bp, Homo sapien
tcttgctatgtgcagccagtgccac

SEQ ID NO: 2466260 - DNA, 25 bp, Homo sapien
gatcctgggcttggtctctggtaaa

SEQ ID NO: 2466261 - DNA, 25 bp, Homo sapien
gaacatgtggcgagcaggtgtccaa

SEQ ID NO: 2466262 - DNA, 25 bp, Homo sapien
gctcggaggccctttgacctctaga

SEQ ID NO: 2466263 - DNA, 25 bp, Homo sapien
gacctctagagtctatgggacctga

SEQ ID NO: 2466264 - DNA, 25 bp, Homo sapien
tccatgactttgaggccgtgagaag

SEQ ID NO: 2466265 - DNA, 25 bp, Homo sapien
gctctggtttgttggtggctgcctc

SEQ ID NO: 2466266 - DNA, 25 bp, Homo sapien
gccttctcaaacttgtgggaccaga

SEQ ID NO: 2466267 - DNA, 25 bp, Homo sapien
cctaagataataattgctggtctct

SEQ ID NO: 2466268 - DNA, 25 bp, Homo sapien
tgctgcaaggcctaagataataatt

SEQ ID NO: 2466269 - DNA, 25 bp, Homo sapien
ttttcttatgctttagcaggaaaaa

SEQ ID NO: 2466270 - DNA, 25 bp, Homo sapien
gcagtcatggcacatcccatggaaa

SEQ ID NO: 2466271 - DNA, 25 bp, Homo sapien
tagttgataactcaattccatggct

SEQ ID NO: 2466272 - DNA, 25 bp, Homo sapien
gcctcaggaatcagcttagttgata

SEQ ID NO: 2466273 - DNA, 25 bp, Homo sapien
taattatggctgctgcatcagtcct

SEQ ID NO: 2466274 - DNA, 25 bp, Homo sapien
ccatcttacttggatgaaggctctc

SEQ ID NO: 2466275 - DNA, 25 bp, Homo sapien
ggtatgaagggcaaacatctgatcc

SEQ ID NO: 2466276 - DNA, 25 bp, Homo sapien
gaaaggctcttcttggtccgtggga

SEQ ID NO: 2466277 - DNA, 25 bp, Homo sapien
cacagcagccacaagtattgggatc

SEQ ID NO: 2466278 - DNA, 25 bp, Homo sapien
ggcatttttagaactcacccagcca

SEQ ID NO: 2466279 - DNA, 25 bp, Homo sapien
ctgaggcagtcaggacaatttcagg

SEQ ID NO: 2466280 - DNA, 25 bp, Homo sapien
cacctagtcttggaggtcttgggca

SEQ ID NO: 2466281 - DNA, 25 bp, Homo sapien
ttcaggcctttagtgaatggaggca

SEQ ID NO: 2466282 - DNA, 25 bp, Homo sapien
agcacatggactttgcagttggaca

SEQ ID NO: 2466283 - DNA, 25 bp, Homo sapien
tttgtgtgcatagaattactcacag

SEQ ID NO: 2466284 - DNA, 25 bp, Homo sapien
cttctggcagagcatttaggtgact

SEQ ID NO: 2466285 - DNA, 25 bp, Homo sapien
tatgccatactgttcaagcacatgg

SEQ ID NO: 2466286 - DNA, 25 bp, Homo sapien
tattccagggtaattgtgccctgac

SEQ ID NO: 2466287 - DNA, 25 bp, Homo sapien
aaaatggccaactgtcctctgcagg

SEQ ID NO: 2466288 - DNA, 25 bp, Homo sapien
cctgactgtgctgcatgtcagtctg

SEQ ID NO: 2466289 - DNA, 25 bp, Homo sapien
cctgattttgtctgctagtttagac

SEQ ID NO: 2466290 - DNA, 25 bp, Homo sapien
ctcagggcggcaacttcctcctcca

SEQ ID NO: 2466291 - DNA, 25 bp, Homo sapien
ctctcagggcggcaacttcctcctc

SEQ ID NO: 2466292 - DNA, 25 bp, Homo sapien
tcaggctctcagggcggcaacttcc

SEQ ID NO: 2466293 - DNA, 25 bp, Homo sapien
aggctctcagggcggcaacttcctc

SEQ ID NO: 2466294 - DNA, 25 bp, Homo sapien
gacaggaagccacccggggccatag

SEQ ID NO: 2466295 - DNA, 25 bp, Homo sapien
gaagccacccggggccatagggatc

SEQ ID NO: 2466296 - DNA, 25 bp, Homo sapien
ggacaggaagccacccggggccata

SEQ ID NO: 2466297 - DNA, 25 bp, Homo sapien
gctcagggccataggcagccggctg

SEQ ID NO: 2466298 - DNA, 25 bp, Homo sapien
tttcaaacacaagtagcatgaggta

SEQ ID NO: 2466299 - DNA, 25 bp, Homo sapien
ttcaaacacaagtagcatgaggtag

SEQ ID NO: 2466300 - DNA, 25 bp, Homo sapien
ctcagggccataggcagccggctgc

SEQ ID NO: 2466301 - DNA, 25 bp, Homo sapien
agatcttcccggatagtattggggt

SEQ ID NO: 2466302 - DNA, 25 bp, Homo sapien
ttcagatcttcccggatagtattgg

SEQ ID NO: 2466303 - DNA, 25 bp, Homo sapien
tcagatcttcccggatagtattggg

SEQ ID NO: 2466304 - DNA, 25 bp, Homo sapien
cagatcttcccggatagtattgggg

SEQ ID NO: 2466305 - DNA, 25 bp, Homo sapien
cactcccctgcttattagcactgcc

SEQ ID NO: 2466306 - DNA, 25 bp, Homo sapien
ctcccctgcttattagcactgcctt

SEQ ID NO: 2466307 - DNA, 25 bp, Homo sapien
actcccctgcttattagcactgcct

SEQ ID NO: 2466308 - DNA, 25 bp, Homo sapien
tcccctgcttattagcactgccttg

SEQ ID NO: 2466309 - DNA, 25 bp, Homo sapien
gtagacacaaatccccatgggcttg

SEQ ID NO: 2466310 - DNA, 25 bp, Homo sapien
caatagcgtagtgagatgagcaagg

SEQ ID NO: 2466311 - DNA, 25 bp, Homo sapien
gcacagtcaccaatagcgtagtgag

SEQ ID NO: 2466312 - DNA, 25 bp, Homo sapien
ggtgcaagtagacacaaatccccat

SEQ ID NO: 2466313 - DNA, 25 bp, Homo sapien
gagcagtgctcagatgagcaggcag

SEQ ID NO: 2466314 - DNA, 25 bp, Homo sapien
gggagcagtgctcagatgagcaggc

SEQ ID NO: 2466315 - DNA, 25 bp, Homo sapien
ggagcagtgctcagatgagcaggca

SEQ ID NO: 2466316 - DNA, 25 bp, Homo sapien
cccaggatgatctgttccactttgc

SEQ ID NO: 2466317 - DNA, 25 bp, Homo sapien
cagggctgctgcattggccagtccc

SEQ ID NO: 2466318 - DNA, 25 bp, Homo sapien
gggctgctgcattggccagtcccca

SEQ ID NO: 2466319 - DNA, 25 bp, Homo sapien
ttgcagggctgctgcattggccagt

SEQ ID NO: 2466320 - DNA, 25 bp, Homo sapien
catagagctgatggggctgactgcc

SEQ ID NO: 2466321 - DNA, 25 bp, Homo sapien
gatgttgtaaatcacctcctggctc

SEQ ID NO: 2466322 - DNA, 25 bp, Homo sapien
ctttctggtgggatgtttgagttga

SEQ ID NO: 2466323 - DNA, 25 bp, Homo sapien
agtgaatgttgaagggcatagagct

SEQ ID NO: 2466324 - DNA, 25 bp, Homo sapien
gctcaggccggttattgcagagcag

SEQ ID NO: 2466325 - DNA, 25 bp, Homo sapien
ctgctcaggccggttattgcagagc

SEQ ID NO: 2466326 - DNA, 25 bp, Homo sapien
aggccggttattgcagagcagttcc

SEQ ID NO: 2466327 - DNA, 25 bp, Homo sapien
caggccggttattgcagagcagttc

SEQ ID NO: 2466328 - DNA, 25 bp, Homo sapien
catgaatgggtggttctgggcccca

SEQ ID NO: 2466329 - DNA, 25 bp, Homo sapien
tggtggtgaccctcatgaatgggtg

SEQ ID NO: 2466330 - DNA, 25 bp, Homo sapien
aggcttctgtgaggcctccatctgc

SEQ ID NO: 2466331 - DNA, 25 bp, Homo sapien
tgagaggctgccctgaagtcaaaca

SEQ ID NO: 2466332 - DNA, 25 bp, Homo sapien
tggttccagtaaaagccccatgtgg

SEQ ID NO: 2466333 - DNA, 25 bp, Homo sapien
agtaatgctgcctgctggtccttgg

SEQ ID NO: 2466334 - DNA, 25 bp, Homo sapien
gatgcagtaatgctgcctgctggtc

SEQ ID NO: 2466335 - DNA, 25 bp, Homo sapien
ccatgtggatgcagtaatgctgcct

SEQ ID NO: 2466336 - DNA, 25 bp, Homo sapien
gtgacacacagttgatggggcccat

SEQ ID NO: 2466337 - DNA, 25 bp, Homo sapien
gacacacagttgatggggcccattt

SEQ ID NO: 2466338 - DNA, 25 bp, Homo sapien
ggtgacacacagttgatggggccca

SEQ ID NO: 2466339 - DNA, 25 bp, Homo sapien
tgacacacagttgatggggcccatt

SEQ ID NO: 2466340 - DNA, 25 bp, Homo sapien
tttcctctgttcaatcctggcgcca

SEQ ID NO: 2466341 - DNA, 25 bp, Homo sapien
ttcctctgttcaatcctggcgccaa

SEQ ID NO: 2466342 - DNA, 25 bp, Homo sapien
tcgtcttggacatggaacatgtgga

SEQ ID NO: 2466343 - DNA, 25 bp, Homo sapien
tcttggacatggaacatgtggatac

SEQ ID NO: 2466344 - DNA, 25 bp, Homo sapien
tggacatggaacatgtggatacagg

SEQ ID NO: 2466345 - DNA, 25 bp, Homo sapien
catggaacatgtggatacaggcttt

SEQ ID NO: 2466346 - DNA, 25 bp, Homo sapien
acaagcagagcgcagctccaatccc

SEQ ID NO: 2466347 - DNA, 25 bp, Homo sapien
gcctgacaagcagagcgcagctcca

SEQ ID NO: 2466348 - DNA, 25 bp, Homo sapien
ctgacaagcagagcgcagctccaat

SEQ ID NO: 2466349 - DNA, 25 bp, Homo sapien
aagcagagcgcagctccaatcccac

SEQ ID NO: 2466350 - DNA, 25 bp, Homo sapien
aagtggtccagcatgttgctgtcca

SEQ ID NO: 2466351 - DNA, 25 bp, Homo sapien
agaaagccccaacaactgatggcat

SEQ ID NO: 2466352 - DNA, 25 bp, Homo sapien
ggagaaagccccaacaactgatggc

SEQ ID NO: 2466353 - DNA, 25 bp, Homo sapien
gagaaagccccaacaactgatggca

SEQ ID NO: 2466354 - DNA, 25 bp, Homo sapien
ttctctggtggcgatgcccgggtac

SEQ ID NO: 2466355 - DNA, 25 bp, Homo sapien
tccggaatgccgatggcctgggcca

SEQ ID NO: 2466356 - DNA, 25 bp, Homo sapien
cctgggccagccgttctctggtggc

SEQ ID NO: 2466357 - DNA, 25 bp, Homo sapien
tggctcggggtccaaacgagtctcc

SEQ ID NO: 2466358 - DNA, 25 bp, Homo sapien
gcctggattacctactttatactga

SEQ ID NO: 2466359 - DNA, 25 bp, Homo sapien
aggatgcttacactaagatccagcc

SEQ ID NO: 2466360 - DNA, 25 bp, Homo sapien
tctttttaagtagctcaaatgacac

SEQ ID NO: 2466361 - DNA, 25 bp, Homo sapien
tacactaagatccagcccttttcca

SEQ ID NO: 2466362 - DNA, 25 bp, Homo sapien
tcagggccctacattctgggttaaa

SEQ ID NO: 2466363 - DNA, 25 bp, Homo sapien
cattagctaatggtttcctttgtta

SEQ ID NO: 2466364 - DNA, 25 bp, Homo sapien
ctggccttggtcagggccctacatt

SEQ ID NO: 2466365 - DNA, 25 bp, Homo sapien
ccttgctgccaggacccttggacat

SEQ ID NO: 2466366 - DNA, 25 bp, Homo sapien
aatactaagtttcctctctgccgtg

SEQ ID NO: 2466367 - DNA, 25 bp, Homo sapien
aaggaatactaagtttcctctctgc

SEQ ID NO: 2466368 - DNA, 25 bp, Homo sapien
atactaagtttcctctctgccgtga

SEQ ID NO: 2466369 - DNA, 25 bp, Homo sapien
ggaatactaagtttcctctctgccg

SEQ ID NO: 2466370 - DNA, 25 bp, Homo sapien
agaatttatcatataactcttttta

SEQ ID NO: 2466371 - DNA, 25 bp, Homo sapien
agcaggacgagccatagataaaacc

SEQ ID NO: 2466372 - DNA, 25 bp, Homo sapien
gacgagccatagataaaacctctca

SEQ ID NO: 2466373 - DNA, 25 bp, Homo sapien
gagccatagataaaacctctcagac

SEQ ID NO: 2466374 - DNA, 25 bp, Homo sapien
aggacgagccatagataaaacctct

SEQ ID NO: 2466375 - DNA, 25 bp, Homo sapien
taagcatgagaattagaaggtcaag

SEQ ID NO: 2466376 - DNA, 25 bp, Homo sapien
tcttgttcagagacttgcatgcctg

SEQ ID NO: 2466377 - DNA, 25 bp, Homo sapien
caagaatgaatttcaaagcttgtgc

SEQ ID NO: 2466378 - DNA, 25 bp, Homo sapien
gactcctggtaatcctaagcatgag

SEQ ID NO: 2466379 - DNA, 25 bp, Homo sapien
tatagggatggccagagattctgct

SEQ ID NO: 2466380 - DNA, 25 bp, Homo sapien
tggtaactcattggaagccctcagc

SEQ ID NO: 2466381 - DNA, 25 bp, Homo sapien
ttgtgggaggctctaaatcggaccc

SEQ ID NO: 2466382 - DNA, 25 bp, Homo sapien
tctgaagatgtgtgtttaagaggca

SEQ ID NO: 2466383 - DNA, 25 bp, Homo sapien
cgatgagaagacaggacggacaacc

SEQ ID NO: 2466384 - DNA, 25 bp, Homo sapien
accagacgccatgcccgtctggttg

SEQ ID NO: 2466385 - DNA, 25 bp, Homo sapien
aagggctctgagacgatgagaagac

SEQ ID NO: 2466386 - DNA, 25 bp, Homo sapien
gcgctctcgagggtgaagcacaggt

SEQ ID NO: 2466387 - DNA, 25 bp, Homo sapien
ctgggaggagcgggcaaaggcgtgg

SEQ ID NO: 2466388 - DNA, 25 bp, Homo sapien
gccagtggtcccaggtccgaggcag

SEQ ID NO: 2466389 - DNA, 25 bp, Homo sapien
attttggcccttcgacaccctcgtg

SEQ ID NO: 2466390 - DNA, 25 bp, Homo sapien
tatctccgggccagtatttcatcgg

SEQ ID NO: 2466391 - DNA, 25 bp, Homo sapien
tcatgcctcatatctccgggccagt

SEQ ID NO: 2466392 - DNA, 25 bp, Homo sapien
tatttcatcgggtcacctccacatc

SEQ ID NO: 2466393 - DNA, 25 bp, Homo sapien
gacggagcgcttattggtgcgtttt

SEQ ID NO: 2466394 - DNA, 25 bp, Homo sapien
catttggctagacggagcgcttatt

SEQ ID NO: 2466395 - DNA, 25 bp, Homo sapien
acaaacatttggctagacggagcgc

SEQ ID NO: 2466396 - DNA, 25 bp, Homo sapien
ctagacggagcgcttattggtgcgt

SEQ ID NO: 2466397 - DNA, 25 bp, Homo sapien
gaattgggcaatgatcgctgtggct

SEQ ID NO: 2466398 - DNA, 25 bp, Homo sapien
ttgggcaatgatcgctgtggctact

SEQ ID NO: 2466399 - DNA, 25 bp, Homo sapien
gggcaatgatcgctgtggctacttc

SEQ ID NO: 2466400 - DNA, 25 bp, Homo sapien
gcaatgatcgctgtggctacttcct

SEQ ID NO: 2466401 - DNA, 25 bp, Homo sapien
gatattgtatccctagcgccctgga

SEQ ID NO: 2466402 - DNA, 25 bp, Homo sapien
ggctttaaaggccagaccattgtca

SEQ ID NO: 2466403 - DNA, 25 bp, Homo sapien
cagacaagcaagtatcgaaatccct

SEQ ID NO: 2466404 - DNA, 25 bp, Homo sapien
gagaaaaggtcgtccctacagcatt

SEQ ID NO: 2466405 - DNA, 25 bp, Homo sapien
caggttttcaatccccacagtttgg

SEQ ID NO: 2466406 - DNA, 25 bp, Homo sapien
ccaggaagtgctcatatgggccttt

SEQ ID NO: 2466407 - DNA, 25 bp, Homo sapien
cagtgctaggcccttccttgggact

SEQ ID NO: 2466408 - DNA, 25 bp, Homo sapien
aagtgctcatatgggccttttaagc

SEQ ID NO: 2466409 - DNA, 25 bp, Homo sapien
tcagcttcaaagagcgagatagttg

SEQ ID NO: 2466410 - DNA, 25 bp, Homo sapien
cactggcaggttggctcccaagcag

SEQ ID NO: 2466411 - DNA, 25 bp, Homo sapien
ttcaaagagcgagatagttgaatct

SEQ ID NO: 2466412 - DNA, 25 bp, Homo sapien
gggttatagcttctcttgtccagga

SEQ ID NO: 2466413 - DNA, 25 bp, Homo sapien
ggcccaataaccactagagctactg

SEQ ID NO: 2466414 - DNA, 25 bp, Homo sapien
cttcaggcacgcagacttgattggc

SEQ ID NO: 2466415 - DNA, 25 bp, Homo sapien
actggcccaataaccactagagcta

SEQ ID NO: 2466416 - DNA, 25 bp, Homo sapien
tcaggcacgcagacttgattggcta

SEQ ID NO: 2466417 - DNA, 25 bp, Homo sapien
ttcatatagccacacctcacaactt

SEQ ID NO: 2466418 - DNA, 25 bp, Homo sapien
tagccacacctcacaacttctaaga

SEQ ID NO: 2466419 - DNA, 25 bp, Homo sapien
tgttcatatagccacacctcacaac

SEQ ID NO: 2466420 - DNA, 25 bp, Homo sapien
atatagccacacctcacaacttcta

SEQ ID NO: 2466421 - DNA, 25 bp, Homo sapien
gtccgagtgcctctctgagcgatcc

SEQ ID NO: 2466422 - DNA, 25 bp, Homo sapien
gagtgcctctctgagcgatccgagg

SEQ ID NO: 2466423 - DNA, 25 bp, Homo sapien
agtgcctctctgagcgatccgaggg

SEQ ID NO: 2466424 - DNA, 25 bp, Homo sapien
acaagctatcataaccccaaaggca

SEQ ID NO: 2466425 - DNA, 25 bp, Homo sapien
aagctatcataaccccaaaggcata

SEQ ID NO: 2466426 - DNA, 25 bp, Homo sapien
agcccacaagctatcataaccccaa

SEQ ID NO: 2466427 - DNA, 25 bp, Homo sapien
ctatcataaccccaaaggcatacag

SEQ ID NO: 2466428 - DNA, 25 bp, Homo sapien
atcacaatatcttgcagaaggtggt

SEQ ID NO: 2466429 - DNA, 25 bp, Homo sapien
ggactgggattgtgccagcgattat

SEQ ID NO: 2466430 - DNA, 25 bp, Homo sapien
tagggactgggattgtgccagcgat

SEQ ID NO: 2466431 - DNA, 25 bp, Homo sapien
gggactgggattgtgccagcgatta

SEQ ID NO: 2466432 - DNA, 25 bp, Homo sapien
gactgggattgtgccagcgattata

SEQ ID NO: 2466433 - DNA, 25 bp, Homo sapien
ggagagatcctcctctagagcggga

SEQ ID NO: 2466434 - DNA, 25 bp, Homo sapien
tagggaccgctactctagagatttc

SEQ ID NO: 2466435 - DNA, 25 bp, Homo sapien
cagtgggcgagcgagcattacagcc

SEQ ID NO: 2466436 - DNA, 25 bp, Homo sapien
ttagatgcccataggagcgcgaact

SEQ ID NO: 2466437 - DNA, 25 bp, Homo sapien
ctggtaaggaacttacatctagaac

SEQ ID NO: 2466438 - DNA, 25 bp, Homo sapien
ctgctggtaagaattaaaatggtgt

SEQ ID NO: 2466439 - DNA, 25 bp, Homo sapien
ggaactgcaaataaatacttcatac

SEQ ID NO: 2466440 - DNA, 25 bp, Homo sapien
aatcttcatgaagtccaattagaca

SEQ ID NO: 2466441 - DNA, 25 bp, Homo sapien
atggcatttgtgactgtgttggtca

SEQ ID NO: 2466442 - DNA, 25 bp, Homo sapien
tgatggcatttgtgactgtgttggt

SEQ ID NO: 2466443 - DNA, 25 bp, Homo sapien
gatggcatttgtgactgtgttggtc

SEQ ID NO: 2466444 - DNA, 25 bp, Homo sapien
gtgatggcatttgtgactgtgttgg

SEQ ID NO: 2466445 - DNA, 25 bp, Homo sapien
gacaacagtgtattgcatgaggcat

SEQ ID NO: 2466446 - DNA, 25 bp, Homo sapien
tcaaccttagtagccacatttggaa

SEQ ID NO: 2466447 - DNA, 25 bp, Homo sapien
taatcggaaggtcttgagtagctcc

SEQ ID NO: 2466448 - DNA, 25 bp, Homo sapien
ggttctcaatcagcgcttacaatta

SEQ ID NO: 2466449 - DNA, 25 bp, Homo sapien
ttgttcggtgctttacacgttcaga

SEQ ID NO: 2466450 - DNA, 25 bp, Homo sapien
gttcggtgctttacacgttcagaga

SEQ ID NO: 2466451 - DNA, 25 bp, Homo sapien
cccgagtaacgaactatagaaatga

SEQ ID NO: 2466452 - DNA, 25 bp, Homo sapien
ttcagagaaacttcccgagtaacga

SEQ ID NO: 2466453 - DNA, 25 bp, Homo sapien
ttctatgcgatgattccattccatt

SEQ ID NO: 2466454 - DNA, 25 bp, Homo sapien
gattctatgcgatgattccattcca

SEQ ID NO: 2466455 - DNA, 25 bp, Homo sapien
attctatgcgatgattccattccat

SEQ ID NO: 2466456 - DNA, 25 bp, Homo sapien
ctatgacgattccattcaattccgt

SEQ ID NO: 2466457 - DNA, 25 bp, Homo sapien
cgagaccattcgatgattgcattca

SEQ ID NO: 2466458 - DNA, 25 bp, Homo sapien
tgatgaagataccatgcgattccat

SEQ ID NO: 2466459 - DNA, 25 bp, Homo sapien
tgaagatgattccattcgagaccat

SEQ ID NO: 2466460 - DNA, 25 bp, Homo sapien
cgatgatgagtccatccatttcaat

SEQ ID NO: 2466461 - DNA, 25 bp, Homo sapien
gaatccattcgatgatgagtccatc

SEQ ID NO: 2466462 - DNA, 25 bp, Homo sapien
gatgattacatttcgaatccattcg

SEQ ID NO: 2466463 - DNA, 25 bp, Homo sapien
tcaatcaatttcattcgatgattac

SEQ ID NO: 2466464 - DNA, 25 bp, Homo sapien
tgcattcgtttccatccaatgatga

SEQ ID NO: 2466465 - DNA, 25 bp, Homo sapien
ccattcgattccgttgaatgattgt

SEQ ID NO: 2466466 - DNA, 25 bp, Homo sapien
tcgattccgttgaatgattgttcca

SEQ ID NO: 2466467 - DNA, 25 bp, Homo sapien
tgatgattgcattcgtttccatcca

SEQ ID NO: 2466468 - DNA, 25 bp, Homo sapien
gtgaacctccttgtgatcttttcca

SEQ ID NO: 2466469 - DNA, 25 bp, Homo sapien
aggttttggcttcaaatgggtatat

SEQ ID NO: 2466470 - DNA, 25 bp, Homo sapien
gtatattaaaagagatccttacctg

SEQ ID NO: 2466471 - DNA, 25 bp, Homo sapien
ccctttctgaggttgagtgattccc

SEQ ID NO: 2466472 - DNA, 25 bp, Homo sapien
aaaataccgtatgtctaaacagagg

SEQ ID NO: 2466473 - DNA, 25 bp, Homo sapien
gaacaggttaatcagcttgacttaa

SEQ ID NO: 2466474 - DNA, 25 bp, Homo sapien
taagcctccatacctatcatgaaag

SEQ ID NO: 2466475 - DNA, 25 bp, Homo sapien
tcctggttcctaacatagaaaatgg

SEQ ID NO: 2466476 - DNA, 25 bp, Homo sapien
cttcgagatagattgcacagcatgg

SEQ ID NO: 2466477 - DNA, 25 bp, Homo sapien
gtattttattgcatggacgcaccat

SEQ ID NO: 2466478 - DNA, 25 bp, Homo sapien
cagaacggtttttgtatgcttcaac

SEQ ID NO: 2466479 - DNA, 25 bp, Homo sapien
taacaatgctgtaatagataaccta

SEQ ID NO: 2466480 - DNA, 25 bp, Homo sapien
caaactcttgtggttataacaatgc

SEQ ID NO: 2466481 - DNA, 25 bp, Homo sapien
gagcaagtggtagttagaatccctt

SEQ ID NO: 2466482 - DNA, 25 bp, Homo sapien
aagtaagatactgtcactcctccag

SEQ ID NO: 2466483 - DNA, 25 bp, Homo sapien
tcaaagtaagatactgtcactcctc

SEQ ID NO: 2466484 - DNA, 25 bp, Homo sapien
gccactcaaagtaagatactgtcac

SEQ ID NO: 2466485 - DNA, 25 bp, Homo sapien
ttctggagttgttggcccattggca

SEQ ID NO: 2466486 - DNA, 25 bp, Homo sapien
ggcccattggcaccttcagcaatga

SEQ ID NO: 2466487 - DNA, 25 bp, Homo sapien
tgttggcccattggcaccttcagca

SEQ ID NO: 2466488 - DNA, 25 bp, Homo sapien
gagttgttggcccattggcaccttc

SEQ ID NO: 2466489 - DNA, 25 bp, Homo sapien
tgcaagagagtcaggaacatagaga

SEQ ID NO: 2466490 - DNA, 25 bp, Homo sapien
tcaggaacatagagaaatgcgaaca

SEQ ID NO: 2466491 - DNA, 25 bp, Homo sapien
ggcaagagatgtgcatatatgaaca

SEQ ID NO: 2466492 - DNA, 25 bp, Homo sapien
gaaatgcgaacaccaccgtcaaatc

SEQ ID NO: 2466493 - DNA, 25 bp, Homo sapien
tacaggagtgtcaggcagatgcgtt

SEQ ID NO: 2466494 - DNA, 25 bp, Homo sapien
gcgtttgttttggtaatggttgcac

SEQ ID NO: 2466495 - DNA, 25 bp, Homo sapien
tatgtgcagtatgtgccaataaagc

SEQ ID NO: 2466496 - DNA, 25 bp, Homo sapien
tgtgccggtagctaaaagccattaa

SEQ ID NO: 2466497 - DNA, 25 bp, Homo sapien
tccaagatgcttccttcatagggct

SEQ ID NO: 2466498 - DNA, 25 bp, Homo sapien
gcttccttcatagggctttgccttg

SEQ ID NO: 2466499 - DNA, 25 bp, Homo sapien
ggcagctgggatcagtatgtcacag

SEQ ID NO: 2466500 - DNA, 25 bp, Homo sapien
actctgggtgcgttggatttggtca

SEQ ID NO: 2466501 - DNA, 25 bp, Homo sapien
ccattgattgaaaatcacaattaat

SEQ ID NO: 2466502 - DNA, 25 bp, Homo sapien
attgattgaaaatcacaattaatag

SEQ ID NO: 2466503 - DNA, 25 bp, Homo sapien
ctgccattgattgaaaatcacaatt

SEQ ID NO: 2466504 - DNA, 25 bp, Homo sapien
gccattgattgaaaatcacaattaa

SEQ ID NO: 2466505 - DNA, 25 bp, Homo sapien
ttatatttagtgtctatgctataaa

SEQ ID NO: 2466506 - DNA, 25 bp, Homo sapien
gttcctttgggtcaataccatctgg

SEQ ID NO: 2466507 - DNA, 25 bp, Homo sapien
cagcaatacatttagcaccaaaacg

SEQ ID NO: 2466508 - DNA, 25 bp, Homo sapien
catcagactcaccaacagcaataca

SEQ ID NO: 2466509 - DNA, 25 bp, Homo sapien
tctggattccatatactcccatcag

SEQ ID NO: 2466510 - DNA, 25 bp, Homo sapien
taggcgtttatgaacagaagccaag

SEQ ID NO: 2466511 - DNA, 25 bp, Homo sapien
ccaagtcagggatggcaccaagata

SEQ ID NO: 2466512 - DNA, 25 bp, Homo sapien
tggtggatccctgtgccattacccc

SEQ ID NO: 2466513 - DNA, 25 bp, Homo sapien
gcttcggcagggatgtgtatggcca

SEQ ID NO: 2466514 - DNA, 25 bp, Homo sapien
ttaaacagctgctgttgctcttcat

SEQ ID NO: 2466515 - DNA, 25 bp, Homo sapien
tttaaacagctgctgttgctcttca

SEQ ID NO: 2466516 - DNA, 25 bp, Homo sapien
tttctcggtatttaaacagctgctg

SEQ ID NO: 2466517 - DNA, 25 bp, Homo sapien
gtatttaaacagctgctgttgctct

SEQ ID NO: 2466518 - DNA, 25 bp, Homo sapien
ttttggcatccaaacactgtctccc

SEQ ID NO: 2466519 - DNA, 25 bp, Homo sapien
tgtctcccagactgtttgcttgaag

SEQ ID NO: 2466520 - DNA, 25 bp, Homo sapien
ttgatttctccaagggagtcacaat

SEQ ID NO: 2466521 - DNA, 25 bp, Homo sapien
tcctgttattcccataaaaatccaa

SEQ ID NO: 2466522 - DNA, 25 bp, Homo sapien
tcaaggaaccagagcaataaacaag

SEQ ID NO: 2466523 - DNA, 25 bp, Homo sapien
ccagagcaataaacaaggcagtcaa

SEQ ID NO: 2466524 - DNA, 25 bp, Homo sapien
gtcaaaatccttccaaccacagggc

SEQ ID NO: 2466525 - DNA, 25 bp, Homo sapien
taaacaaggcagtcaaaatccttcc

SEQ ID NO: 2466526 - DNA, 25 bp, Homo sapien
tagcgcttcaccgtggaggcatgga

SEQ ID NO: 2466527 - DNA, 25 bp, Homo sapien
cgcttcaccgtggaggcatggagct

SEQ ID NO: 2466528 - DNA, 25 bp, Homo sapien
gccatagcgcttcaccgtggaggca

SEQ ID NO: 2466529 - DNA, 25 bp, Homo sapien
caggccatagcgcttcaccgtggag

SEQ ID NO: 2466530 - DNA, 25 bp, Homo sapien
tgtagttaacatcgcctgtactgcc

SEQ ID NO: 2466531 - DNA, 25 bp, Homo sapien
gtagttgtcacgtacaccagcccaa

SEQ ID NO: 2466532 - DNA, 25 bp, Homo sapien
tgcctgccaccttgaacataatgta

SEQ ID NO: 2466533 - DNA, 25 bp, Homo sapien
ccccgccttgcaaatgaagtggctg

SEQ ID NO: 2466534 - DNA, 25 bp, Homo sapien
ggccacacggacactgtgatcatcg

SEQ ID NO: 2466535 - DNA, 25 bp, Homo sapien
tctgacatcttcacgggccacacgg

SEQ ID NO: 2466536 - DNA, 25 bp, Homo sapien
gtgatcatcgttggcagccttctca

SEQ ID NO: 2466537 - DNA, 25 bp, Homo sapien
gacactgtgatcatcgttggcagcc

SEQ ID NO: 2466538 - DNA, 25 bp, Homo sapien
cataaccctgggagaatgaaaactg

SEQ ID NO: 2466539 - DNA, 25 bp, Homo sapien
caactgcagggatctagaaactgtc

SEQ ID NO: 2466540 - DNA, 25 bp, Homo sapien
tgaggacctgagattcactcccgtg

SEQ ID NO: 2466541 - DNA, 25 bp, Homo sapien
tggaattagagagcagaacgttgtc

SEQ ID NO: 2466542 - DNA, 25 bp, Homo sapien
ctccatgaatgtcagcatgtcacac

SEQ ID NO: 2466543 - DNA, 25 bp, Homo sapien
tccatgaatgtcagcatgtcacacc

SEQ ID NO: 2466544 - DNA, 25 bp, Homo sapien
ctccaagcatctccatgaatgtcag

SEQ ID NO: 2466545 - DNA, 25 bp, Homo sapien
tccaagcatctccatgaatgtcagc

SEQ ID NO: 2466546 - DNA, 25 bp, Homo sapien
ccagggctgcggtgaactgggcaat

SEQ ID NO: 2466547 - DNA, 25 bp, Homo sapien
ggagatcccggtggatgccagggct

SEQ ID NO: 2466548 - DNA, 25 bp, Homo sapien
gatgtgagtctctagatcttccgaa

SEQ ID NO: 2466549 - DNA, 25 bp, Homo sapien
ttcagtatggggcttggagatcccg

SEQ ID NO: 2466550 - DNA, 25 bp, Homo sapien
ttcaggttacactctgatttctcct

SEQ ID NO: 2466551 - DNA, 25 bp, Homo sapien
caggttacactctgatttctcctcc

SEQ ID NO: 2466552 - DNA, 25 bp, Homo sapien
tcaggttacactctgatttctcctc

SEQ ID NO: 2466553 - DNA, 25 bp, Homo sapien
aaccaaatgagctttttcttgcaaa

SEQ ID NO: 2466554 - DNA, 25 bp, Homo sapien
agagtggcaagagctgtttctccaa

SEQ ID NO: 2466555 - DNA, 25 bp, Homo sapien
agtggcaagagctgtttctccaagg

SEQ ID NO: 2466556 - DNA, 25 bp, Homo sapien
tccaagagtggcaagagctgtttct

SEQ ID NO: 2466557 - DNA, 25 bp, Homo sapien
caagagtggcaagagctgtttctcc

SEQ ID NO: 2466558 - DNA, 25 bp, Homo sapien
gaaatctccgcccattcaaagttgt

SEQ ID NO: 2466559 - DNA, 25 bp, Homo sapien
cacaaatggaagcatgccagggcct

SEQ ID NO: 2466560 - DNA, 25 bp, Homo sapien
tgtgttcagggttgtcacacaactc

SEQ ID NO: 2466561 - DNA, 25 bp, Homo sapien
tgaattcccataactctccctgaaa

SEQ ID NO: 2466562 - DNA, 25 bp, Homo sapien
tcaggaaaggccattgcgaggccag

SEQ ID NO: 2466563 - DNA, 25 bp, Homo sapien
cactcttgaaataccaggcctgcag

SEQ ID NO: 2466564 - DNA, 25 bp, Homo sapien
aagacgatgccttccatacccggag

SEQ ID NO: 2466565 - DNA, 25 bp, Homo sapien
gactttcgtgagcagtttaaccaaa

SEQ ID NO: 2466566 - DNA, 25 bp, Homo sapien
agagaaggtctcgagctcgggctcc

SEQ ID NO: 2466567 - DNA, 25 bp, Homo sapien
gctccggagccgacttctccctctt

SEQ ID NO: 2466568 - DNA, 25 bp, Homo sapien
ccgtaataatcagggtcctcgaggg

SEQ ID NO: 2466569 - DNA, 25 bp, Homo sapien
tccgggcgcgcgtagtagggctccc

SEQ ID NO: 2466570 - DNA, 25 bp, Homo sapien
cttactcccataccctgtacatttg

SEQ ID NO: 2466571 - DNA, 25 bp, Homo sapien
ctcccataccctgtacatttggcat

SEQ ID NO: 2466572 - DNA, 25 bp, Homo sapien
tcttactcccataccctgtacattt

SEQ ID NO: 2466573 - DNA, 25 bp, Homo sapien
tactcccataccctgtacatttggc

SEQ ID NO: 2466574 - DNA, 25 bp, Homo sapien
caggcagcgcccgaacccacagaga

SEQ ID NO: 2466575 - DNA, 25 bp, Homo sapien
cagccaccatagacaggtggggcca

SEQ ID NO: 2466576 - DNA, 25 bp, Homo sapien
tgggtgcagccaggcagcgcccgaa

SEQ ID NO: 2466577 - DNA, 25 bp, Homo sapien
agcgcccgaacccacagagacagtg

SEQ ID NO: 2466578 - DNA, 25 bp, Homo sapien
tgaggaaatcagggcaagtgagata

SEQ ID NO: 2466579 - DNA, 25 bp, Homo sapien
caggtccgcagagataaagctctga

SEQ ID NO: 2466580 - DNA, 25 bp, Homo sapien
gctccaggtccgcagagataaagct

SEQ ID NO: 2466581 - DNA, 25 bp, Homo sapien
aagtagagaggagggcaagtgggtg

SEQ ID NO: 2466582 - DNA, 25 bp, Homo sapien
acctctttggcatggagcatgcaat

SEQ ID NO: 2466583 - DNA, 25 bp, Homo sapien
ttggcatggagcatgcaatttggga

SEQ ID NO: 2466584 - DNA, 25 bp, Homo sapien
ggcaggaagtcagtgtcatttggtg

SEQ ID NO: 2466585 - DNA, 25 bp, Homo sapien
gaagtcagtgtcatttggtggcttg

SEQ ID NO: 2466586 - DNA, 25 bp, Homo sapien
tggatggaggcatagacattcagct

SEQ ID NO: 2466587 - DNA, 25 bp, Homo sapien
tgagtagggagtgagaatgacagat

SEQ ID NO: 2466588 - DNA, 25 bp, Homo sapien
tctgaaattgagtgagattggatgg

SEQ ID NO: 2466589 - DNA, 25 bp, Homo sapien
ccacgcccagctctgatcctcatct

SEQ ID NO: 2466590 - DNA, 25 bp, Homo sapien
ccacactgggtttgccataatatcc

SEQ ID NO: 2466591 - DNA, 25 bp, Homo sapien
ttctagggaactgtccaacctgagg

SEQ ID NO: 2466592 - DNA, 25 bp, Homo sapien
caacctgaggatgatcttgcagatg

SEQ ID NO: 2466593 - DNA, 25 bp, Homo sapien
ctataactgtgagtgtaacagccca

SEQ ID NO: 2466594 - DNA, 25 bp, Homo sapien
ggaggaggacattagcaagcttcat

SEQ ID NO: 2466595 - DNA, 25 bp, Homo sapien
ttagcaagcaagaatggtgaatgcc

SEQ ID NO: 2466596 - DNA, 25 bp, Homo sapien
agcgtctaccgcagccatcttgcag

SEQ ID NO: 2466597 - DNA, 25 bp, Homo sapien
cagggccacccgtatacgctctggt

SEQ ID NO: 2466598 - DNA, 25 bp, Homo sapien
gtgaatgcccgctggctgcccggct

SEQ ID NO: 2466599 - DNA, 25 bp, Homo sapien
aaaagcggcaccaagcggggcccag

SEQ ID NO: 2466600 - DNA, 25 bp, Homo sapien
ctggtgggttttggcttctcggtca

SEQ ID NO: 2466601 - DNA, 25 bp, Homo sapien
cggtcatgctggtggctctaagcga

SEQ ID NO: 2466602 - DNA, 25 bp, Homo sapien
aagtcccctcttgccatcctggtgg

SEQ ID NO: 2466603 - DNA, 25 bp, Homo sapien
tgagtgcccacacgtgtaaagccat

SEQ ID NO: 2466604 - DNA, 25 bp, Homo sapien
ctttatacgtgccagggtctgctga

SEQ ID NO: 2466605 - DNA, 25 bp, Homo sapien
gacatagttatagggtaccactgca

SEQ ID NO: 2466606 - DNA, 25 bp, Homo sapien
tttaggaactgtccgccctgagtgc

SEQ ID NO: 2466607 - DNA, 25 bp, Homo sapien
ccagtcaactgcaggtcccaggtaa

SEQ ID NO: 2466608 - DNA, 25 bp, Homo sapien
tccagttctctgagtttgggaagaa

SEQ ID NO: 2466609 - DNA, 25 bp, Homo sapien
aggcccactcatcggtgatgctgga

SEQ ID NO: 2466610 - DNA, 25 bp, Homo sapien
tctgcactcagaatcctggattcca

SEQ ID NO: 2466611 - DNA, 25 bp, Homo sapien
gccggcgttgccggctctgtctctg

SEQ ID NO: 2466612 - DNA, 25 bp, Homo sapien
ctgtctctgggctgacgacctggtt

SEQ ID NO: 2466613 - DNA, 25 bp, Homo sapien
tctgggctgacgacctggtttctgt

SEQ ID NO: 2466614 - DNA, 25 bp, Homo sapien
tgacgacctggtttctgtattggtg

SEQ ID NO: 2466615 - DNA, 25 bp, Homo sapien
gtggcttgcggtaacaaagagaccc

SEQ ID NO: 2466616 - DNA, 25 bp, Homo sapien
taaagagaacaagaacgctgatggc

SEQ ID NO: 2466617 - DNA, 25 bp, Homo sapien
tttcttagagagcttgcagaggacc

SEQ ID NO: 2466618 - DNA, 25 bp, Homo sapien
tagaagcatagttattgcaggccac

SEQ ID NO: 2466619 - DNA, 25 bp, Homo sapien
tccctgaaagggtcgcaagtggtcc

SEQ ID NO: 2466620 - DNA, 25 bp, Homo sapien
caaataatgaaggactctgcctcga

SEQ ID NO: 2466621 - DNA, 25 bp, Homo sapien
gaagctttggaaagtcccagcacag

SEQ ID NO: 2466622 - DNA, 25 bp, Homo sapien
tgcaagcgccttccagttctcatgt

SEQ ID NO: 2466623 - DNA, 25 bp, Homo sapien
cccctgatgggttgagctgcagaaa

SEQ ID NO: 2466624 - DNA, 25 bp, Homo sapien
tctctgctgcggaactgggctttga

SEQ ID NO: 2466625 - DNA, 25 bp, Homo sapien
cacactgtccttgtcggtggcagag

SEQ ID NO: 2466626 - DNA, 25 bp, Homo sapien
tgccttcagggaggcgcagacaact

SEQ ID NO: 2466627 - DNA, 25 bp, Homo sapien
gagtctctcgcaggcctgctgcatt

SEQ ID NO: 2466628 - DNA, 25 bp, Homo sapien
aagcaactcaaaactacctaggtgg

SEQ ID NO: 2466629 - DNA, 25 bp, Homo sapien
tcaacaaggaagaacccaggtgcaa

SEQ ID NO: 2466630 - DNA, 25 bp, Homo sapien
ccctgaatagggactggaaaatgtt

SEQ ID NO: 2466631 - DNA, 25 bp, Homo sapien
agaggaagagcacgcgctccacagg

SEQ ID NO: 2466632 - DNA, 25 bp, Homo sapien
gaggaactttgaccacacgcagtgg

SEQ ID NO: 2466633 - DNA, 25 bp, Homo sapien
ctattctgtcagcaagagccgggcc

SEQ ID NO: 2466634 - DNA, 25 bp, Homo sapien
tgttgccaaggatgctcaagcgttc

SEQ ID NO: 2466635 - DNA, 25 bp, Homo sapien
gagaaatggagcctgtagccggcca

SEQ ID NO: 2466636 - DNA, 25 bp, Homo sapien
gcctgtagaaatcccgcagaatctt

SEQ ID NO: 2466637 - DNA, 25 bp, Homo sapien
tccggtcctcgggacgccgtgcatt

SEQ ID NO: 2466638 - DNA, 25 bp, Homo sapien
ccagcctagcgttgaagggcctgta

SEQ ID NO: 2466639 - DNA, 25 bp, Homo sapien
cctcgggacgccgtgcattggatgc

SEQ ID NO: 2466640 - DNA, 25 bp, Homo sapien
ggctgacctcaaggattcccttcca

SEQ ID NO: 2466641 - DNA, 25 bp, Homo sapien
taatgatgatacagcgtctaaggct

SEQ ID NO: 2466642 - DNA, 25 bp, Homo sapien
cagcccgtccttggaggaacgtgcg

SEQ ID NO: 2466643 - DNA, 25 bp, Homo sapien
gctgctctccatgggtgtcagcccg

SEQ ID NO: 2466644 - DNA, 25 bp, Homo sapien
tccaggcgaagaatgagaaactgtt

SEQ ID NO: 2466645 - DNA, 25 bp, Homo sapien
catggtgtacttgacgttggatgca

SEQ ID NO: 2466646 - DNA, 25 bp, Homo sapien
caaaaacgctgagccagtccagaag

SEQ ID NO: 2466647 - DNA, 25 bp, Homo sapien
tccagaaggtacacagcatagagcc

SEQ ID NO: 2466648 - DNA, 25 bp, Homo sapien
catagtggcaagaatgaacgcagga

SEQ ID NO: 2466649 - DNA, 25 bp, Homo sapien
aaacctgacccacaccaatggctgg

SEQ ID NO: 2466650 - DNA, 25 bp, Homo sapien
gagacaactgcctagagtcacagag

SEQ ID NO: 2466651 - DNA, 25 bp, Homo sapien
gaagccccgttctcaggtggttctc

SEQ ID NO: 2466652 - DNA, 25 bp, Homo sapien
taatcttcctaaaggcaccctcatc

SEQ ID NO: 2466653 - DNA, 25 bp, Homo sapien
gtgtcttgctaaatggtaatcttcc

SEQ ID NO: 2466654 - DNA, 25 bp, Homo sapien
caggagccagaccaagagcccatca

SEQ ID NO: 2466655 - DNA, 25 bp, Homo sapien
aatccaccgctcaagagaatgctct

SEQ ID NO: 2466656 - DNA, 25 bp, Homo sapien
tctctctgttcctatgctgaaacgc

SEQ ID NO: 2466657 - DNA, 25 bp, Homo sapien
aataatggggaacagcatttgcaca

SEQ ID NO: 2466658 - DNA, 25 bp, Homo sapien
tttgcacattaaaacgcttctctct

SEQ ID NO: 2466659 - DNA, 25 bp, Homo sapien
gctgaaacgcaaacccacaatgccg

SEQ ID NO: 2466660 - DNA, 25 bp, Homo sapien
ctttctcatggaagtcgtccgcgga

SEQ ID NO: 2466661 - DNA, 25 bp, Homo sapien
cgtccgcggatttattcgaacttgc

SEQ ID NO: 2466662 - DNA, 25 bp, Homo sapien
gacgcaggcgcgcagtgaataatca

SEQ ID NO: 2466663 - DNA, 25 bp, Homo sapien
caagcatgcaattttcaaacagctg

SEQ ID NO: 2466664 - DNA, 25 bp, Homo sapien
tcaataggcagcttcaataaagaca

SEQ ID NO: 2466665 - DNA, 25 bp, Homo sapien
ttcaataaagacaccgcactacagt

SEQ ID NO: 2466666 - DNA, 25 bp, Homo sapien
caaggacccttgtaattcttaatct

SEQ ID NO: 2466667 - DNA, 25 bp, Homo sapien
cgcactacagtagtcctcacaagga

SEQ ID NO: 2466668 - DNA, 25 bp, Homo sapien
ccatccgtgctgttgtcgtagaaga

SEQ ID NO: 2466669 - DNA, 25 bp, Homo sapien
ggatgaagtcctgcgtcagaaacgg

SEQ ID NO: 2466670 - DNA, 25 bp, Homo sapien
tcgtagaagaacgtccaggcattat

SEQ ID NO: 2466671 - DNA, 25 bp, Homo sapien
tatcccacatcgtggaggcactggc

SEQ ID NO: 2466672 - DNA, 25 bp, Homo sapien
ccttgatggatctggtgtgcggcca

SEQ ID NO: 2466673 - DNA, 25 bp, Homo sapien
agagctggcctgcagtccttgatgg

SEQ ID NO: 2466674 - DNA, 25 bp, Homo sapien
ttccacgggatagcggtctcgcagc

SEQ ID NO: 2466675 - DNA, 25 bp, Homo sapien
gcagcccatctcttaggcggacgat

SEQ ID NO: 2466676 - DNA, 25 bp, Homo sapien
ctatgatgtagaagtgcggcaggca

SEQ ID NO: 2466677 - DNA, 25 bp, Homo sapien
tccttgatggcggagaacttgacct

SEQ ID NO: 2466678 - DNA, 25 bp, Homo sapien
tcggtggtgttctgccccgagaact

SEQ ID NO: 2466679 - DNA, 25 bp, Homo sapien
catagaggtctgtggtcccgcactt

SEQ ID NO: 2466680 - DNA, 25 bp, Homo sapien
tgcgccgtcgggtaacagctgtatg

SEQ ID NO: 2466681 - DNA, 25 bp, Homo sapien
ggttttcgctgtccatcaagctggg

SEQ ID NO: 2466682 - DNA, 25 bp, Homo sapien
tgagatcagaagctcttggtgggcc

SEQ ID NO: 2466683 - DNA, 25 bp, Homo sapien
tctgggagctgtctggtcgtgaact

SEQ ID NO: 2466684 - DNA, 25 bp, Homo sapien
cactagagaaagagggtgcacattc

SEQ ID NO: 2466685 - DNA, 25 bp, Homo sapien
aaggtcacaagttcgggagcagctc

SEQ ID NO: 2466686 - DNA, 25 bp, Homo sapien
gagtcatgttctacaagagccgctg

SEQ ID NO: 2466687 - DNA, 25 bp, Homo sapien
tggatgtccgcaagtcgtgctagaa

SEQ ID NO: 2466688 - DNA, 25 bp, Homo sapien
ggcggatgactcaagcccagggtca

SEQ ID NO: 2466689 - DNA, 25 bp, Homo sapien
ccagcagccgataggccaatgtaat

SEQ ID NO: 2466690 - DNA, 25 bp, Homo sapien
cccagaggttggctaccaccagcag

SEQ ID NO: 2466691 - DNA, 25 bp, Homo sapien
caatgtaatgatggaaactcagagg

SEQ ID NO: 2466692 - DNA, 25 bp, Homo sapien
ttcctgtaatctgatccttacggtt

SEQ ID NO: 2466693 - DNA, 25 bp, Homo sapien
catccttcctgatgactgggacaca

SEQ ID NO: 2466694 - DNA, 25 bp, Homo sapien
cctgaatcaagacacaatggctgaa

SEQ ID NO: 2466695 - DNA, 25 bp, Homo sapien
tgatccttacggtttccttgccaga

SEQ ID NO: 2466696 - DNA, 25 bp, Homo sapien
agaagagggcagatgacctcagacg

SEQ ID NO: 2466697 - DNA, 25 bp, Homo sapien
tagcttagtatttggcggtgctctc

SEQ ID NO: 2466698 - DNA, 25 bp, Homo sapien
tattaaagccctactctatgtcagg

SEQ ID NO: 2466699 - DNA, 25 bp, Homo sapien
gctcaagtgtagagccctgggatgc

SEQ ID NO: 2466700 - DNA, 25 bp, Homo sapien
gaaagggcaactctgagtctgggcc

SEQ ID NO: 2466701 - DNA, 25 bp, Homo sapien
tccctctccactggcaaaggggaaa

SEQ ID NO: 2466702 - DNA, 25 bp, Homo sapien
atgctcattcaagaagccctcttcc

SEQ ID NO: 2466703 - DNA, 25 bp, Homo sapien
gctcattcaagaagccctcttccaa

SEQ ID NO: 2466704 - DNA, 25 bp, Homo sapien
tgttcttcacccagagacgggacgg

SEQ ID NO: 2466705 - DNA, 25 bp, Homo sapien
caacggagatgtcacctttgtggaa

SEQ ID NO: 2466706 - DNA, 25 bp, Homo sapien
cagcgagcatcggacaggtgttctt

SEQ ID NO: 2466707 - DNA, 25 bp, Homo sapien
gatatttgcgaccttgtctgctgcc

SEQ ID NO: 2466708 - DNA, 25 bp, Homo sapien
gaactttgaaagatacacatgcatg

SEQ ID NO: 2466709 - DNA, 25 bp, Homo sapien
ctattgtcgataggtgagcaaatga

SEQ ID NO: 2466710 - DNA, 25 bp, Homo sapien
gacttccagtgagcacgtcttctca

SEQ ID NO: 2466711 - DNA, 25 bp, Homo sapien
gcatttttctatcgacttatttcca

SEQ ID NO: 2466712 - DNA, 25 bp, Homo sapien
tgatgagagaggatcacgccaccat

SEQ ID NO: 2466713 - DNA, 25 bp, Homo sapien
aagttcagcgtgtcctaaaagcagc

SEQ ID NO: 2466714 - DNA, 25 bp, Homo sapien
gggactcggcctttctggaacatat

SEQ ID NO: 2466715 - DNA, 25 bp, Homo sapien
gatactgttctcgttagtcggagca

SEQ ID NO: 2466716 - DNA, 25 bp, Homo sapien
cactaccgagaacaggccgaggcca

SEQ ID NO: 2466717 - DNA, 25 bp, Homo sapien
taaagctaaacagcccccaggaatc

SEQ ID NO: 2466718 - DNA, 25 bp, Homo sapien
catcccacccacagtaagggattaa

SEQ ID NO: 2466719 - DNA, 25 bp, Homo sapien
taaccaatcatccaggttgtccttc

SEQ ID NO: 2466720 - DNA, 25 bp, Homo sapien
gctggccaggcgtctcgttgcaaac

SEQ ID NO: 2466721 - DNA, 25 bp, Homo sapien
gagcagatagcaagaatgactggca

SEQ ID NO: 2466722 - DNA, 25 bp, Homo sapien
gccaggcgtctcgttgcaaacacag

SEQ ID NO: 2466723 - DNA, 25 bp, Homo sapien
atgactggcaaacgcttcctgaagg

SEQ ID NO: 2466724 - DNA, 25 bp, Homo sapien
ctcggctcgccgcaccaaggccggc

SEQ ID NO: 2466725 - DNA, 25 bp, Homo sapien
tcgctcggctcgccgcaccaaggcc

SEQ ID NO: 2466726 - DNA, 25 bp, Homo sapien
ggctcgccgcaccaaggccggccag

SEQ ID NO: 2466727 - DNA, 25 bp, Homo sapien
tcgccgcaccaaggccggccagaga

SEQ ID NO: 2466728 - DNA, 25 bp, Homo sapien
tagccccgcatccagggcgcgtcaa

SEQ ID NO: 2466729 - DNA, 25 bp, Homo sapien
agccccgagcctctagccccgcatc

SEQ ID NO: 2466730 - DNA, 25 bp, Homo sapien
atccagggcgcgtcaacctgactcc

SEQ ID NO: 2466731 - DNA, 25 bp, Homo sapien
cctctagccccgcatccagggcgcg

SEQ ID NO: 2466732 - DNA, 25 bp, Homo sapien
tccacgtgaaatttgggttcttgtg

SEQ ID NO: 2466733 - DNA, 25 bp, Homo sapien
gcagtaatgcatccattaagtgcac

SEQ ID NO: 2466734 - DNA, 25 bp, Homo sapien
tgtgaaaatttcctacaccccatcc

SEQ ID NO: 2466735 - DNA, 25 bp, Homo sapien
taagtgcactttaagcccattttgg

SEQ ID NO: 2466736 - DNA, 25 bp, Homo sapien
cagtttaagacctctgctgtacagc

SEQ ID NO: 2466737 - DNA, 25 bp, Homo sapien
cacagtcaggtccatggagtataca

SEQ ID NO: 2466738 - DNA, 25 bp, Homo sapien
actagtgaagtattgagacctgtcc

SEQ ID NO: 2466739 - DNA, 25 bp, Homo sapien
taaatctgaatcctctatagcaggg

SEQ ID NO: 2466740 - DNA, 25 bp, Homo sapien
cattgttgcaataactcaagccctg

SEQ ID NO: 2466741 - DNA, 25 bp, Homo sapien
tacttaagactttgtgagccataat

SEQ ID NO: 2466742 - DNA, 25 bp, Homo sapien
gatgtggcagtgtcccactaaaatt

SEQ ID NO: 2466743 - DNA, 25 bp, Homo sapien
aaagtagccacgaacaatatgcaga

SEQ ID NO: 2466744 - DNA, 25 bp, Homo sapien
caagtatgtatgaaactttgcatgc

SEQ ID NO: 2466745 - DNA, 25 bp, Homo sapien
agacagcttcaatgaaaacgagatg

SEQ ID NO: 2466746 - DNA, 25 bp, Homo sapien
gccaacaactgttcatctgtagcta

SEQ ID NO: 2466747 - DNA, 25 bp, Homo sapien
gaagaaattagaccagatgagaagt

SEQ ID NO: 2466748 - DNA, 25 bp, Homo sapien
gatgctagagtagaaagccttcaag

SEQ ID NO: 2466749 - DNA, 25 bp, Homo sapien
gatgatgctcgcaacaaagctgaca

SEQ ID NO: 2466750 - DNA, 25 bp, Homo sapien
gcttcaacagcaactggatgatgct

SEQ ID NO: 2466751 - DNA, 25 bp, Homo sapien
tgaacacgtgcaaagtgagctaaag

SEQ ID NO: 2466752 - DNA, 25 bp, Homo sapien
caagacaggtcaatggttagtggct

SEQ ID NO: 2466753 - DNA, 25 bp, Homo sapien
taaatgctcgagtatgagggtgcaa

SEQ ID NO: 2466754 - DNA, 25 bp, Homo sapien
taattacttggaggtcagcttagct

SEQ ID NO: 2466755 - DNA, 25 bp, Homo sapien
ggatgtatctactgccagccccatg

SEQ ID NO: 2466756 - DNA, 25 bp, Homo sapien
aattgagattgatgtatactttctg

SEQ ID NO: 2466757 - DNA, 25 bp, Homo sapien
tgtatactttctgttattactattt

SEQ ID NO: 2466758 - DNA, 25 bp, Homo sapien
aaaattgagattgatgtatactttc

SEQ ID NO: 2466759 - DNA, 25 bp, Homo sapien
aaaaattgagattgatgtatacttt

SEQ ID NO: 2466760 - DNA, 25 bp, Homo sapien
cggccacctcttgaagctcgctgag

SEQ ID NO: 2466761 - DNA, 25 bp, Homo sapien
gtgtagctttgtcccctgtacacca

SEQ ID NO: 2466762 - DNA, 25 bp, Homo sapien
ctccaaaatgaaagacgtgtgtagc

SEQ ID NO: 2466763 - DNA, 25 bp, Homo sapien
agcaaaggaaaggacggagagccca

SEQ ID NO: 2466764 - DNA, 25 bp, Homo sapien
ggactggacccagacccactccttc

SEQ ID NO: 2466765 - DNA, 25 bp, Homo sapien
cacgaagcgcagtctcggcttccgt

SEQ ID NO: 2466766 - DNA, 25 bp, Homo sapien
acatcttctccgagactcgctctga

SEQ ID NO: 2466767 - DNA, 25 bp, Homo sapien
gggcctcgcacgaagcgcagtctcg

SEQ ID NO: 2466768 - DNA, 25 bp, Homo sapien
caaacggaagccaccacatcttctc

SEQ ID NO: 2466769 - DNA, 25 bp, Homo sapien
ctataggctggacgtgggtcggacc

SEQ ID NO: 2466770 - DNA, 25 bp, Homo sapien
caacgctgacgactcgggcccagat

SEQ ID NO: 2466771 - DNA, 25 bp, Homo sapien
gggtgtggacgctgccgaggcccgg

SEQ ID NO: 2466772 - DNA, 25 bp, Homo sapien
cggatcccacaaccgccccaacgct

SEQ ID NO: 2466773 - DNA, 25 bp, Homo sapien
cagccgtcacagtacttttcaatca

SEQ ID NO: 2466774 - DNA, 25 bp, Homo sapien
gtacttttcaatcatgccagcagcc

SEQ ID NO: 2466775 - DNA, 25 bp, Homo sapien
cttttcaatcatgccagcagccctc

SEQ ID NO: 2466776 - DNA, 25 bp, Homo sapien
tcagccgtcacagtacttttcaatc

SEQ ID NO: 2466777 - DNA, 25 bp, Homo sapien
ggcagactgtgtccctttgctgaag

SEQ ID NO: 2466778 - DNA, 25 bp, Homo sapien
cttaggaggctcacctgaattggat

SEQ ID NO: 2466779 - DNA, 25 bp, Homo sapien
tcagatattctgttggccgctccat

SEQ ID NO: 2466780 - DNA, 25 bp, Homo sapien
ttcatcaaagatccctaacagtcag

SEQ ID NO: 2466781 - DNA, 25 bp, Homo sapien
ccacaaaggttcaatctgctctgac

SEQ ID NO: 2466782 - DNA, 25 bp, Homo sapien
aaatgaaaccacaaaggttcaatct

SEQ ID NO: 2466783 - DNA, 25 bp, Homo sapien
atgaaaccacaaaggttcaatctgc

SEQ ID NO: 2466784 - DNA, 25 bp, Homo sapien
aaccacaaaggttcaatctgctctg

SEQ ID NO: 2466785 - DNA, 25 bp, Homo sapien
tatttaccggctttgggatatgtgc

SEQ ID NO: 2466786 - DNA, 25 bp, Homo sapien
caaacatcagtacagggtcttccca

SEQ ID NO: 2466787 - DNA, 25 bp, Homo sapien
tggccgcgcactgaaggaatgtgac

SEQ ID NO: 2466788 - DNA, 25 bp, Homo sapien
taggaactctacaggctcagatcat

SEQ ID NO: 2466789 - DNA, 25 bp, Homo sapien
tttttggaagaattcttcgagtcac

SEQ ID NO: 2466790 - DNA, 25 bp, Homo sapien
cttttcacacgctttttggaagaat

SEQ ID NO: 2466791 - DNA, 25 bp, Homo sapien
tagagtagggctcccttttcacacg

SEQ ID NO: 2466792 - DNA, 25 bp, Homo sapien
cttggtagtagagtagggctccctt

SEQ ID NO: 2466793 - DNA, 25 bp, Homo sapien
cattgaatgtgctccctgaagtcac

SEQ ID NO: 2466794 - DNA, 25 bp, Homo sapien
ttaacgcatttacaatagatagggc

SEQ ID NO: 2466795 - DNA, 25 bp, Homo sapien
agagaagatgctggttaacgcattt

SEQ ID NO: 2466796 - DNA, 25 bp, Homo sapien
gctggttaacgcatttacaatagat

SEQ ID NO: 2466797 - DNA, 25 bp, Homo sapien
catttacaatagatagggctgttga

SEQ ID NO: 2466798 - DNA, 25 bp, Homo sapien
actggttggtgtgcacagcatatct

SEQ ID NO: 2466799 - DNA, 25 bp, Homo sapien
cttcttgtgggtacatcttcttctt

SEQ ID NO: 2466800 - DNA, 25 bp, Homo sapien
ttcttgtgggtacatcttcttcttt

SEQ ID NO: 2466801 - DNA, 25 bp, Homo sapien
cttgtgggtacatcttcttctttac

SEQ ID NO: 2466802 - DNA, 25 bp, Homo sapien
tcttgtgggtacatcttcttcttta

SEQ ID NO: 2466803 - DNA, 25 bp, Homo sapien
aaaatatggcttagtctcttcatag

SEQ ID NO: 2466804 - DNA, 25 bp, Homo sapien
tcttgaagcaacttaattaatgaac

SEQ ID NO: 2466805 - DNA, 25 bp, Homo sapien
tacatatgggacactgaatactccc

SEQ ID NO: 2466806 - DNA, 25 bp, Homo sapien
tccccgcaattgcaattcttgaagc

SEQ ID NO: 2466807 - DNA, 25 bp, Homo sapien
ccaatctttcaaggttgctgaagat

SEQ ID NO: 2466808 - DNA, 25 bp, Homo sapien
ctttcaaggttgctgaagattgtat

SEQ ID NO: 2466809 - DNA, 25 bp, Homo sapien
tgctgaagattgtatgatggaagtc

SEQ ID NO: 2466810 - DNA, 25 bp, Homo sapien
caaggttgctgaagattgtatgatg

SEQ ID NO: 2466811 - DNA, 25 bp, Homo sapien
tgtccttgtgaactagagactcctc

SEQ ID NO: 2466812 - DNA, 25 bp, Homo sapien
ctgtccttgtgaactagagactcct

SEQ ID NO: 2466813 - DNA, 25 bp, Homo sapien
tagattcacgcctcagaggggccac

SEQ ID NO: 2466814 - DNA, 25 bp, Homo sapien
acgcctcagaggggccacctgcacc

SEQ ID NO: 2466815 - DNA, 25 bp, Homo sapien
gcctcagaggggccacctgcaccac

SEQ ID NO: 2466816 - DNA, 25 bp, Homo sapien
tcacgcctcagaggggccacctgca

SEQ ID NO: 2466817 - DNA, 25 bp, Homo sapien
gaccacagaggccactttatgatga

SEQ ID NO: 2466818 - DNA, 25 bp, Homo sapien
taataaactgcacaaaacctcggtc

SEQ ID NO: 2466819 - DNA, 25 bp, Homo sapien
gaaaccgaggcctttgcttagtagc

SEQ ID NO: 2466820 - DNA, 25 bp, Homo sapien
tatacaagagagttgccactaaggg

SEQ ID NO: 2466821 - DNA, 25 bp, Homo sapien
gttaaatctaacttagctgccaaca

SEQ ID NO: 2466822 - DNA, 25 bp, Homo sapien
tatgttaaatctaacttagctgcca

SEQ ID NO: 2466823 - DNA, 25 bp, Homo sapien
ggtctcgagaaaatctagcacatag

SEQ ID NO: 2466824 - DNA, 25 bp, Homo sapien
ctatctcatttacttggtctcgaga

SEQ ID NO: 2466825 - DNA, 25 bp, Homo sapien
cgtcctcgttcgtgatgtcgtggat

SEQ ID NO: 2466826 - DNA, 25 bp, Homo sapien
gacggcgtcctcgtcggtggtgtcg

SEQ ID NO: 2466827 - DNA, 25 bp, Homo sapien
tgatgtcgtggatggtgtccccatg

SEQ ID NO: 2466828 - DNA, 25 bp, Homo sapien
tcggtggtgtcgtggacggcgtcct

SEQ ID NO: 2466829 - DNA, 25 bp, Homo sapien
agcgtccttgttcgcgaagccctgg

SEQ ID NO: 2466830 - DNA, 25 bp, Homo sapien
gacggcgacaccatcagcgatgcca

SEQ ID NO: 2466831 - DNA, 25 bp, Homo sapien
atcagcaatgagctggactgcatcc

SEQ ID NO: 2466832 - DNA, 25 bp, Homo sapien
catggacgtcgtccccttcagcgat

SEQ ID NO: 2466833 - DNA, 25 bp, Homo sapien
ccgtggacggcgtcatcgagagtga

SEQ ID NO: 2466834 - DNA, 25 bp, Homo sapien
gccgtggacggcgtcatcgagagtg

SEQ ID NO: 2466835 - DNA, 25 bp, Homo sapien
gaatccatcttcgttagcgatgcag

SEQ ID NO: 2466836 - DNA, 25 bp, Homo sapien
tggaaggctaccccgtcggcgaagc

SEQ ID NO: 2466837 - DNA, 25 bp, Homo sapien
cggcgaagctgtggacggtgtccca

SEQ ID NO: 2466838 - DNA, 25 bp, Homo sapien
taccccgtcggcgaagctgtggacg

SEQ ID NO: 2466839 - DNA, 25 bp, Homo sapien
aggctaccccgtcggcgaagctgtg

SEQ ID NO: 2466840 - DNA, 25 bp, Homo sapien
gacgacaaccccgtcagcgatgccg

SEQ ID NO: 2466841 - DNA, 25 bp, Homo sapien
catcgccaaggccgtggacggcgac

SEQ ID NO: 2466842 - DNA, 25 bp, Homo sapien
cctggacggcaccccgttggcgatg

SEQ ID NO: 2466843 - DNA, 25 bp, Homo sapien
tctggacggcgacctcagggatgcc

SEQ ID NO: 2466844 - DNA, 25 bp, Homo sapien
tagcaataccgtggatggcgtcctc

SEQ ID NO: 2466845 - DNA, 25 bp, Homo sapien
ctggacggcgtcccagtcagtgaat

SEQ ID NO: 2466846 - DNA, 25 bp, Homo sapien
tggacggcgtgcctgtcagcgaatc

SEQ ID NO: 2466847 - DNA, 25 bp, Homo sapien
gcctgtcagcgaatccgtggacggc

SEQ ID NO: 2466848 - DNA, 25 bp, Homo sapien
gcgtgcctgtcagcgaatccgtgga

SEQ ID NO: 2466849 - DNA, 25 bp, Homo sapien
catggacggcgtgcctgtcagcgaa

SEQ ID NO: 2466850 - DNA, 25 bp, Homo sapien
tagcgatgccgtggatggtgacctc

SEQ ID NO: 2466851 - DNA, 25 bp, Homo sapien
cgttagtgacgctgtggacggcctc

SEQ ID NO: 2466852 - DNA, 25 bp, Homo sapien
tttgttagcgatgccctgaacggtg

SEQ ID NO: 2466853 - DNA, 25 bp, Homo sapien
gctagcgaagtcgtggacggcatcc

SEQ ID NO: 2466854 - DNA, 25 bp, Homo sapien
ggcggcgtcctagttagtgatgccc

SEQ ID NO: 2466855 - DNA, 25 bp, Homo sapien
cctgggcggcgtcctagttagtgat

SEQ ID NO: 2466856 - DNA, 25 bp, Homo sapien
gcgtcctagttagtgatgccctggg

SEQ ID NO: 2466857 - DNA, 25 bp, Homo sapien
ggcgtcctagttagtgatgccctgg

SEQ ID NO: 2466858 - DNA, 25 bp, Homo sapien
caacttatgacttccgatgatggtg

SEQ ID NO: 2466859 - DNA, 25 bp, Homo sapien
gggtaactccataacagttggaagc

SEQ ID NO: 2466860 - DNA, 25 bp, Homo sapien
cagggcactgctggttaacatttga

SEQ ID NO: 2466861 - DNA, 25 bp, Homo sapien
gacctctttagggataccatggacg

SEQ ID NO: 2466862 - DNA, 25 bp, Homo sapien
gcccgcccgctccacctaattatct

SEQ ID NO: 2466863 - DNA, 25 bp, Homo sapien
ccggggcgaggcacgcagggaggaa

SEQ ID NO: 2466864 - DNA, 25 bp, Homo sapien
gctccacctaattatcttgaaattc

SEQ ID NO: 2466865 - DNA, 25 bp, Homo sapien
gcccgctccacctaattatcttgaa

SEQ ID NO: 2466866 - DNA, 25 bp, Homo sapien
ggcagcgcgccctgcgccctagccg

SEQ ID NO: 2466867 - DNA, 25 bp, Homo sapien
tccaccgcgcagggcttggacatct

SEQ ID NO: 2466868 - DNA, 25 bp, Homo sapien
aggcccatggcagcgcgccctgcgc

SEQ ID NO: 2466869 - DNA, 25 bp, Homo sapien
gcttggacatcttcccgcctgcagc

SEQ ID NO: 2466870 - DNA, 25 bp, Homo sapien
tagatctttgactgcccggtaaata

SEQ ID NO: 2466871 - DNA, 25 bp, Homo sapien
tgaagggggaaacgcattccagagc

SEQ ID NO: 2466872 - DNA, 25 bp, Homo sapien
cattccagagcatttgttcgggctc

SEQ ID NO: 2466873 - DNA, 25 bp, Homo sapien
cgggctcatgtaggaatagatcttt

SEQ ID NO: 2466874 - DNA, 25 bp, Homo sapien
tgcattggtggaatcacaagatgag

SEQ ID NO: 2466875 - DNA, 25 bp, Homo sapien
ccggcttggcgatggctgcattggt

SEQ ID NO: 2466876 - DNA, 25 bp, Homo sapien
gtgctgtttgcccttgatgggcttt

SEQ ID NO: 2466877 - DNA, 25 bp, Homo sapien
tgggctttttcagggccggcttggc

SEQ ID NO: 2466878 - DNA, 25 bp, Homo sapien
tgcctttgccatcgatgaggtcaat

SEQ ID NO: 2466879 - DNA, 25 bp, Homo sapien
gaggtccccgtggtattccaccaca

SEQ ID NO: 2466880 - DNA, 25 bp, Homo sapien
gcgtcggtgatctcgatgaggtccc

SEQ ID NO: 2466881 - DNA, 25 bp, Homo sapien
tgcttggtggcaatcacacccctgc

SEQ ID NO: 2466882 - DNA, 25 bp, Homo sapien
tagtacatgtagcagcccgtggaag

SEQ ID NO: 2466883 - DNA, 25 bp, Homo sapien
cagtaggttttgctcagatactgaa

SEQ ID NO: 2466884 - DNA, 25 bp, Homo sapien
agcagcccgtggaagggtcctgtgc

SEQ ID NO: 2466885 - DNA, 25 bp, Homo sapien
gccgtcgatgtcgtgcagtttggtt

SEQ ID NO: 2466886 - DNA, 25 bp, Homo sapien
gtgcctgtcgagacgttaggagaac

SEQ ID NO: 2466887 - DNA, 25 bp, Homo sapien
agtgcctgtcgagacgttaggagaa

SEQ ID NO: 2466888 - DNA, 25 bp, Homo sapien
tgcctgtcgagacgttaggagaaca

SEQ ID NO: 2466889 - DNA, 25 bp, Homo sapien
tcccatcggatcctcttccaatttg

SEQ ID NO: 2466890 - DNA, 25 bp, Homo sapien
tcttccaatttgctgaccactgacc

SEQ ID NO: 2466891 - DNA, 25 bp, Homo sapien
atttacactcccatcggatcctctt

SEQ ID NO: 2466892 - DNA, 25 bp, Homo sapien
caatttgctgaccactgaccaggct

SEQ ID NO: 2466893 - DNA, 25 bp, Homo sapien
caaatggaatcgttcaggatgtagc

SEQ ID NO: 2466894 - DNA, 25 bp, Homo sapien
gcctaagggtaggattgctgagtca

SEQ ID NO: 2466895 - DNA, 25 bp, Homo sapien
gcttattggtttgtcattggaggaa

SEQ ID NO: 2466896 - DNA, 25 bp, Homo sapien
ttcacttgtgcaaatgcctaagggt

SEQ ID NO: 2466897 - DNA, 25 bp, Homo sapien
tcggcagccgcgatcttggtcagga

SEQ ID NO: 2466898 - DNA, 25 bp, Homo sapien
ctcggcagccgcgatcttggtcagg

SEQ ID NO: 2466899 - DNA, 25 bp, Homo sapien
gggctcgggacccactgcagcctgt

SEQ ID NO: 2466900 - DNA, 25 bp, Homo sapien
ggcagccgcgatcttggtcaggacc

SEQ ID NO: 2466901 - DNA, 25 bp, Homo sapien
cgggctggcctgagtgcgtttatca

SEQ ID NO: 2466902 - DNA, 25 bp, Homo sapien
ggcaccgcagtgtggctgacgctcc

SEQ ID NO: 2466903 - DNA, 25 bp, Homo sapien
tatcacctgcttctacccgaaggct

SEQ ID NO: 2466904 - DNA, 25 bp, Homo sapien
tagccaatttcctgcgcctcgtggc

SEQ ID NO: 2466905 - DNA, 25 bp, Homo sapien
gctttcctggaaatccagacccaca

SEQ ID NO: 2466906 - DNA, 25 bp, Homo sapien
tttcctggaaatccagacccacagc

SEQ ID NO: 2466907 - DNA, 25 bp, Homo sapien
tccgctttcctggaaatccagaccc

SEQ ID NO: 2466908 - DNA, 25 bp, Homo sapien
ccgctttcctggaaatccagaccca

SEQ ID NO: 2466909 - DNA, 25 bp, Homo sapien
aatacaacagctccgattccacttt

SEQ ID NO: 2466910 - DNA, 25 bp, Homo sapien
aacagctccgattccacttttcagc

SEQ ID NO: 2466911 - DNA, 25 bp, Homo sapien
tacaacagctccgattccacttttc

SEQ ID NO: 2466912 - DNA, 25 bp, Homo sapien
caacagctccgattccacttttcag

SEQ ID NO: 2466913 - DNA, 25 bp, Homo sapien
cacagtatggatggtaacactgacc

SEQ ID NO: 2466914 - DNA, 25 bp, Homo sapien
acagtatggatggtaacactgacca

SEQ ID NO: 2466915 - DNA, 25 bp, Homo sapien
agtatggatggtaacactgaccaca

SEQ ID NO: 2466916 - DNA, 25 bp, Homo sapien
cagtatggatggtaacactgaccac

SEQ ID NO: 2466917 - DNA, 25 bp, Homo sapien
tgtctgcaatggagggtctaggcag

SEQ ID NO: 2466918 - DNA, 25 bp, Homo sapien
gacacctccaacctttgctaagaac

SEQ ID NO: 2466919 - DNA, 25 bp, Homo sapien
cagttgccttcccacaggcctcaca

SEQ ID NO: 2466920 - DNA, 25 bp, Homo sapien
gagggtctaggcagtaggtgtgata

SEQ ID NO: 2466921 - DNA, 25 bp, Homo sapien
caaaaccaatgtctgctacattttc

SEQ ID NO: 2466922 - DNA, 25 bp, Homo sapien
aaaaccaatgtctgctacattttcc

SEQ ID NO: 2466923 - DNA, 25 bp, Homo sapien
tcaaaaccaatgtctgctacatttt

SEQ ID NO: 2466924 - DNA, 25 bp, Homo sapien
atcaaaaccaatgtctgctacattt

SEQ ID NO: 2466925 - DNA, 25 bp, Homo sapien
gtgacaatttgtgctacaagtgaag

SEQ ID NO: 2466926 - DNA, 25 bp, Homo sapien
ttgtgacaatttgtgctacaagtga

SEQ ID NO: 2466927 - DNA, 25 bp, Homo sapien
gacaatttgtgctacaagtgaagat

SEQ ID NO: 2466928 - DNA, 25 bp, Homo sapien
tgacaatttgtgctacaagtgaaga

SEQ ID NO: 2466929 - DNA, 25 bp, Homo sapien
acacacatcatcctgggtataagtc

SEQ ID NO: 2466930 - DNA, 25 bp, Homo sapien
ttcaatcaaacacacatcatcctgg

SEQ ID NO: 2466931 - DNA, 25 bp, Homo sapien
caaacacacatcatcctgggtataa

SEQ ID NO: 2466932 - DNA, 25 bp, Homo sapien
tgattcaatcaaacacacatcatcc

SEQ ID NO: 2466933 - DNA, 25 bp, Homo sapien
ttcttggaactgtaactgtgaggct

SEQ ID NO: 2466934 - DNA, 25 bp, Homo sapien
atattgtaggctttttggtagaggc

SEQ ID NO: 2466935 - DNA, 25 bp, Homo sapien
gtagaggcaattcataggttgatat

SEQ ID NO: 2466936 - DNA, 25 bp, Homo sapien
taaccttgagaagttgatgatgcct

SEQ ID NO: 2466937 - DNA, 25 bp, Homo sapien
ccttgagaagttgatgatgcctttg

SEQ ID NO: 2466938 - DNA, 25 bp, Homo sapien
cagtttcagtgtgcaggctgacagt

SEQ ID NO: 2466939 - DNA, 25 bp, Homo sapien
cttaaccttgagaagttgatgatgc

SEQ ID NO: 2466940 - DNA, 25 bp, Homo sapien
taattcataaattttggcaacatac

SEQ ID NO: 2466941 - DNA, 25 bp, Homo sapien
gaatttaattcataaattttggcaa

SEQ ID NO: 2466942 - DNA, 25 bp, Homo sapien
tttaattcataaattttggcaacat

SEQ ID NO: 2466943 - DNA, 25 bp, Homo sapien
ttgaatttaattcataaattttggc

SEQ ID NO: 2466944 - DNA, 25 bp, Homo sapien
catctagctcttgaacacctggcag

SEQ ID NO: 2466945 - DNA, 25 bp, Homo sapien
ttcatctagctcttgaacacctggc

SEQ ID NO: 2466946 - DNA, 25 bp, Homo sapien
tctagctcttgaacacctggcagca

SEQ ID NO: 2466947 - DNA, 25 bp, Homo sapien
ctagctcttgaacacctggcagcat

SEQ ID NO: 2466948 - DNA, 25 bp, Homo sapien
caggattttctcaagccgctcaatt

SEQ ID NO: 2466949 - DNA, 25 bp, Homo sapien
caaacttgaacgctgcaggattttc

SEQ ID NO: 2466950 - DNA, 25 bp, Homo sapien
ctcaagccgctcaatttggtcatcc

SEQ ID NO: 2466951 - DNA, 25 bp, Homo sapien
ttttctcaagccgctcaatttggtc

SEQ ID NO: 2466952 - DNA, 25 bp, Homo sapien
tttgcttcaggaagtttgaaaaata

SEQ ID NO: 2466953 - DNA, 25 bp, Homo sapien
ttaaattttgcttcaggaagtttga

SEQ ID NO: 2466954 - DNA, 25 bp, Homo sapien
tgcttcaggaagtttgaaaaatact

SEQ ID NO: 2466955 - DNA, 25 bp, Homo sapien
taaattttgcttcaggaagtttgaa

SEQ ID NO: 2466956 - DNA, 25 bp, Homo sapien
aaatgattcaatccattgaccatcc

SEQ ID NO: 2466957 - DNA, 25 bp, Homo sapien
tcaaatgattcaatccattgaccat

SEQ ID NO: 2466958 - DNA, 25 bp, Homo sapien
gattcaatccattgaccatcctttt

SEQ ID NO: 2466959 - DNA, 25 bp, Homo sapien
aatccattgaccatccttttactgt

SEQ ID NO: 2466960 - DNA, 25 bp, Homo sapien
ttagttgacaaaatctttcctgctt

SEQ ID NO: 2466961 - DNA, 25 bp, Homo sapien
tgtttagttgacaaaatctttcctg

SEQ ID NO: 2466962 - DNA, 25 bp, Homo sapien
aaatctttcctgcttttctatgcat

SEQ ID NO: 2466963 - DNA, 25 bp, Homo sapien
aaaatctttcctgcttttctatgca

SEQ ID NO: 2466964 - DNA, 25 bp, Homo sapien
cagtctacaaccacatgattgcatt

SEQ ID NO: 2466965 - DNA, 25 bp, Homo sapien
cattcagtctacaaccacatgattg

SEQ ID NO: 2466966 - DNA, 25 bp, Homo sapien
ttttagagccttttgaaggtcttca

SEQ ID NO: 2466967 - DNA, 25 bp, Homo sapien
tccaagtaattagaaagcttaagta

SEQ ID NO: 2466968 - DNA, 25 bp, Homo sapien
ctccaagtaattagaaagcttaagt

SEQ ID NO: 2466969 - DNA, 25 bp, Homo sapien
gtttctctgtgtatgccagtaacat

SEQ ID NO: 2466970 - DNA, 25 bp, Homo sapien
tgtgtttattattgagcgctctcat

SEQ ID NO: 2466971 - DNA, 25 bp, Homo sapien
gtaccacaagagtcctgtattattc

SEQ ID NO: 2466972 - DNA, 25 bp, Homo sapien
gagtcctgtattatttagtaccaca

SEQ ID NO: 2466973 - DNA, 25 bp, Homo sapien
cagttgactgtctcagtgtgactca

SEQ ID NO: 2466974 - DNA, 25 bp, Homo sapien
aatctgtgactgtgtgaggttggcc

SEQ ID NO: 2466975 - DNA, 25 bp, Homo sapien
gcaatctgtgactgtgtgaggttgg

SEQ ID NO: 2466976 - DNA, 25 bp, Homo sapien
atctgtgactgtgtgaggttggcca

SEQ ID NO: 2466977 - DNA, 25 bp, Homo sapien
caatctgtgactgtgtgaggttggc

SEQ ID NO: 2466978 - DNA, 25 bp, Homo sapien
gcagatagtatatcctctgcatatt

SEQ ID NO: 2466979 - DNA, 25 bp, Homo sapien
tgacacctttgcagatagtatatcc

SEQ ID NO: 2466980 - DNA, 25 bp, Homo sapien
aggaagtggcccaccttcctgattg

SEQ ID NO: 2466981 - DNA, 25 bp, Homo sapien
gtggcccaccttcctgattgtattg

SEQ ID NO: 2466982 - DNA, 25 bp, Homo sapien
gtcaactctgatgcattcagtgtca

SEQ ID NO: 2466983 - DNA, 25 bp, Homo sapien
tcaggtcaactctgatgcattcagt

SEQ ID NO: 2466984 - DNA, 25 bp, Homo sapien
ggtcaactctgatgcattcagtgtc

SEQ ID NO: 2466985 - DNA, 25 bp, Homo sapien
caggtcaactctgatgcattcagtg

SEQ ID NO: 2466986 - DNA, 25 bp, Homo sapien
caacagggtcccgataactcgggca

SEQ ID NO: 2466987 - DNA, 25 bp, Homo sapien
aacagggtcccgataactcgggcag

SEQ ID NO: 2466988 - DNA, 25 bp, Homo sapien
cagggtcccgataactcgggcagca

SEQ ID NO: 2466989 - DNA, 25 bp, Homo sapien
gggtcccgataactcgggcagcacc

SEQ ID NO: 2466990 - DNA, 25 bp, Homo sapien
cagagtgggtgctggggtctgcact

SEQ ID NO: 2466991 - DNA, 25 bp, Homo sapien
agagtgggtgctggggtctgcactg

SEQ ID NO: 2466992 - DNA, 25 bp, Homo sapien
gtgggtgctggggtctgcactggag

SEQ ID NO: 2466993 - DNA, 25 bp, Homo sapien
ggcagagtgggtgctggggtctgca

SEQ ID NO: 2466994 - DNA, 25 bp, Homo sapien
gatctcctgcccttggtcctaagtg

SEQ ID NO: 2466995 - DNA, 25 bp, Homo sapien
cagcagttggacctcacaatgtgga

SEQ ID NO: 2466996 - DNA, 25 bp, Homo sapien
ggcctgtcaaatgcgaactcttcaa

SEQ ID NO: 2466997 - DNA, 25 bp, Homo sapien
tacatgtaaaagcacacctgtctgc

SEQ ID NO: 2466998 - DNA, 25 bp, Homo sapien
cgtgttggaggcacagcataatggt

SEQ ID NO: 2466999 - DNA, 25 bp, Homo sapien
ggacgtgttggaggcacagcataat

SEQ ID NO: 2467000 - DNA, 25 bp, Homo sapien
tgtggacgtgttggaggcacagcat

SEQ ID NO: 2467001 - DNA, 25 bp, Homo sapien
tgtgtgtggacgtgttggaggcaca

SEQ ID NO: 2467002 - DNA, 25 bp, Homo sapien
acttcgagtttaagtgggtgtcgca

SEQ ID NO: 2467003 - DNA, 25 bp, Homo sapien
ttcgagtttaagtgggtgtcgcatc

SEQ ID NO: 2467004 - DNA, 25 bp, Homo sapien
tctttgcaacttcgagtttaagtgg

SEQ ID NO: 2467005 - DNA, 25 bp, Homo sapien
tgcaacttcgagtttaagtgggtgt

SEQ ID NO: 2467006 - DNA, 25 bp, Homo sapien
tgtccctgagctgccattctcagcc

SEQ ID NO: 2467007 - DNA, 25 bp, Homo sapien
ttgtccctgagctgccattctcagc

SEQ ID NO: 2467008 - DNA, 25 bp, Homo sapien
cagcaacagcagcggggacaaaggc

SEQ ID NO: 2467009 - DNA, 25 bp, Homo sapien
cgtacaacatttgagcagaccttgg

SEQ ID NO: 2467010 - DNA, 25 bp, Homo sapien
gaccttggagtcagcagcaacagca

SEQ ID NO: 2467011 - DNA, 25 bp, Homo sapien
tacaacatttgagcagaccttggag

SEQ ID NO: 2467012 - DNA, 25 bp, Homo sapien
agcacaatcacagccagcgccagcc

SEQ ID NO: 2467013 - DNA, 25 bp, Homo sapien
aggaacacagccagcacaatcacag

SEQ ID NO: 2467014 - DNA, 25 bp, Homo sapien
ggcctggtgtcgagagaggaacaca

SEQ ID NO: 2467015 - DNA, 25 bp, Homo sapien
ctgggggccacatggggcctggtgt

SEQ ID NO: 2467016 - DNA, 25 bp, Homo sapien
aggggctccgttgacccggctcagc

SEQ ID NO: 2467017 - DNA, 25 bp, Homo sapien
acactgcctgctccagatgtctaca

SEQ ID NO: 2467018 - DNA, 25 bp, Homo sapien
atgtggggtggaatccttcccacat

SEQ ID NO: 2467019 - DNA, 25 bp, Homo sapien
tccagatgtctacacctggagtccg

SEQ ID NO: 2467020 - DNA, 25 bp, Homo sapien
ttgtctatgggccctttggaatcac

SEQ ID NO: 2467021 - DNA, 25 bp, Homo sapien
tccacaggcataaaaccctgtttgt

SEQ ID NO: 2467022 - DNA, 25 bp, Homo sapien
ggcataaaaccctgtttgtctatgg

SEQ ID NO: 2467023 - DNA, 25 bp, Homo sapien
cttgactccacaggcataaaaccct

SEQ ID NO: 2467024 - DNA, 25 bp, Homo sapien
cccagtgcccctggtgatatccagg

SEQ ID NO: 2467025 - DNA, 25 bp, Homo sapien
ggccccagtgcccctggtgatatcc

SEQ ID NO: 2467026 - DNA, 25 bp, Homo sapien
ggtgctgggctgtgatcaccgcctc

SEQ ID NO: 2467027 - DNA, 25 bp, Homo sapien
gtgctgggctgtgatcaccgcctcc

SEQ ID NO: 2467028 - DNA, 25 bp, Homo sapien
tggcttgcaccacagcgatgaaggt

SEQ ID NO: 2467029 - DNA, 25 bp, Homo sapien
cgatgaaggtggacgcgatctgggt

SEQ ID NO: 2467030 - DNA, 25 bp, Homo sapien
gaaggtggacgcgatctgggtgtga

SEQ ID NO: 2467031 - DNA, 25 bp, Homo sapien
agccaccagccgtgcggacgatggc

SEQ ID NO: 2467032 - DNA, 25 bp, Homo sapien
gtcatagccgaaccagaggttgtag

SEQ ID NO: 2467033 - DNA, 25 bp, Homo sapien
gggcatgggagtgtgatcagcatgg

SEQ ID NO: 2467034 - DNA, 25 bp, Homo sapien
gcatgggagtgtgatcagcatggct

SEQ ID NO: 2467035 - DNA, 25 bp, Homo sapien
ctggggcatgggagtgtgatcagca

SEQ ID NO: 2467036 - DNA, 25 bp, Homo sapien
catgggagtgtgatcagcatggctt

SEQ ID NO: 2467037 - DNA, 25 bp, Homo sapien
ctgtgcggagtgggcagggccaggg

SEQ ID NO: 2467038 - DNA, 25 bp, Homo sapien
ggccagggagaaaaggggtgacgca

SEQ ID NO: 2467039 - DNA, 25 bp, Homo sapien
gcagggccagggagaaaaggggtga

SEQ ID NO: 2467040 - DNA, 25 bp, Homo sapien
cagggagaaaaggggtgacgcatac

SEQ ID NO: 2467041 - DNA, 25 bp, Homo sapien
accatgatcgttgggaacatggacg

SEQ ID NO: 2467042 - DNA, 25 bp, Homo sapien
atgatcgttgggaacatggacgaga

SEQ ID NO: 2467043 - DNA, 25 bp, Homo sapien
tgggaacatggacgagagcggctgc

SEQ ID NO: 2467044 - DNA, 25 bp, Homo sapien
cgttgggaacatggacgagagcggc

SEQ ID NO: 2467045 - DNA, 25 bp, Homo sapien
gggtaccccaaactcattggtgatg

SEQ ID NO: 2467046 - DNA, 25 bp, Homo sapien
ctggctggatgaaattggcaggtga

SEQ ID NO: 2467047 - DNA, 25 bp, Homo sapien
gctggatgaaattggcaggtgaggg

SEQ ID NO: 2467048 - DNA, 25 bp, Homo sapien
tgaaattggcaggtgaggggggtac

SEQ ID NO: 2467049 - DNA, 25 bp, Homo sapien
cattcattattgaacaggatcccgc

SEQ ID NO: 2467050 - DNA, 25 bp, Homo sapien
agtcgtccattcattattgaacagg

SEQ ID NO: 2467051 - DNA, 25 bp, Homo sapien
tccattcattattgaacaggatccc

SEQ ID NO: 2467052 - DNA, 25 bp, Homo sapien
ctgaagtcgtccattcattattgaa

SEQ ID NO: 2467053 - DNA, 25 bp, Homo sapien
acctctggcagtttcccacccaggc

SEQ ID NO: 2467054 - DNA, 25 bp, Homo sapien
ggcagtttcccacccaggcggccca

SEQ ID NO: 2467055 - DNA, 25 bp, Homo sapien
ggccacccacctctggcagtttccc

SEQ ID NO: 2467056 - DNA, 25 bp, Homo sapien
ctctggcagtttcccacccaggcgg

SEQ ID NO: 2467057 - DNA, 25 bp, Homo sapien
tggtgttgtcagagatctgggccca

SEQ ID NO: 2467058 - DNA, 25 bp, Homo sapien
cactgccgtcctctgtgatgacaga

SEQ ID NO: 2467059 - DNA, 25 bp, Homo sapien
tgtcatccggcgtgtagaacttggg

SEQ ID NO: 2467060 - DNA, 25 bp, Homo sapien
gagcagtgcccctgtcatccggcgt

SEQ ID NO: 2467061 - DNA, 25 bp, Homo sapien
ctctgttgcgtttcagcaactctga

SEQ ID NO: 2467062 - DNA, 25 bp, Homo sapien
tgtctctgttgcgtttcagcaactc

SEQ ID NO: 2467063 - DNA, 25 bp, Homo sapien
ccctgtctctgttgcgtttcagcaa

SEQ ID NO: 2467064 - DNA, 25 bp, Homo sapien
ctccctgtctctgttgcgtttcagc

SEQ ID NO: 2467065 - DNA, 25 bp, Homo sapien
caggaatgccaaggacccaagtagg

SEQ ID NO: 2467066 - DNA, 25 bp, Homo sapien
ggatatgacagggtcttatagggac

SEQ ID NO: 2467067 - DNA, 25 bp, Homo sapien
tgaggatcctcagcgggaagggata

SEQ ID NO: 2467068 - DNA, 25 bp, Homo sapien
gagtgagtgggtcaggtggtgcagg

SEQ ID NO: 2467069 - DNA, 25 bp, Homo sapien
agttcgtggcaggaatggattcata

SEQ ID NO: 2467070 - DNA, 25 bp, Homo sapien
aaagttcgtggcaggaatggattca

SEQ ID NO: 2467071 - DNA, 25 bp, Homo sapien
tcataaagcgtatgtgaggctgtag

SEQ ID NO: 2467072 - DNA, 25 bp, Homo sapien
cataaagcgtatgtgaggctgtagc

SEQ ID NO: 2467073 - DNA, 25 bp, Homo sapien
aaagcctctacgatgcggtggtacg

SEQ ID NO: 2467074 - DNA, 25 bp, Homo sapien
tctacgatgcggtggtacgtcaggc

SEQ ID NO: 2467075 - DNA, 25 bp, Homo sapien
cggtggtacgtcaggcccttctgct

SEQ ID NO: 2467076 - DNA, 25 bp, Homo sapien
ggtccccaagcagggtcctcttggc

SEQ ID NO: 2467077 - DNA, 25 bp, Homo sapien
caacccttgagcattgcccgcttca

SEQ ID NO: 2467078 - DNA, 25 bp, Homo sapien
tcctccaacccttgagcattgcccg

SEQ ID NO: 2467079 - DNA, 25 bp, Homo sapien
aacccttgagcattgcccgcttcag

SEQ ID NO: 2467080 - DNA, 25 bp, Homo sapien
tccaacccttgagcattgcccgctt

SEQ ID NO: 2467081 - DNA, 25 bp, Homo sapien
ggatgagggccagcacgggcccgct

SEQ ID NO: 2467082 - DNA, 25 bp, Homo sapien
gatgttcagcgggtgctcgatcagc

SEQ ID NO: 2467083 - DNA, 25 bp, Homo sapien
agttgttcaggtcctcagctgtcac

SEQ ID NO: 2467084 - DNA, 25 bp, Homo sapien
ttcagcgggtgctcgatcagctcag

SEQ ID NO: 2467085 - DNA, 25 bp, Homo sapien
acagcagctcgaatgggcactggga

SEQ ID NO: 2467086 - DNA, 25 bp, Homo sapien
gacgggacagcagctcgaatgggca

SEQ ID NO: 2467087 - DNA, 25 bp, Homo sapien
ctgcgacgggacagcagctcgaatg

SEQ ID NO: 2467088 - DNA, 25 bp, Homo sapien
cgggacagcagctcgaatgggcact

SEQ ID NO: 2467089 - DNA, 25 bp, Homo sapien
gggcaggcatggctgcaccatggtg

SEQ ID NO: 2467090 - DNA, 25 bp, Homo sapien
gccacccgcggcagggtcagtctct

SEQ ID NO: 2467091 - DNA, 25 bp, Homo sapien
accctcaatggccagcgtctcatag

SEQ ID NO: 2467092 - DNA, 25 bp, Homo sapien
aatggccagcgtctcataggtgtca

SEQ ID NO: 2467093 - DNA, 25 bp, Homo sapien
aggtgtcagccacccgcggcagggt

SEQ ID NO: 2467094 - DNA, 25 bp, Homo sapien
catagcctcggatctccccaggcac

SEQ ID NO: 2467095 - DNA, 25 bp, Homo sapien
agctcatagcctcggatctccccag

SEQ ID NO: 2467096 - DNA, 25 bp, Homo sapien
ctcatagcctcggatctccccaggc

SEQ ID NO: 2467097 - DNA, 25 bp, Homo sapien
ccagctcatagcctcggatctcccc

SEQ ID NO: 2467098 - DNA, 25 bp, Homo sapien
tccagttctgacttttgaggaggtc

SEQ ID NO: 2467099 - DNA, 25 bp, Homo sapien
tggcacaagtttccaagagctggtg

SEQ ID NO: 2467100 - DNA, 25 bp, Homo sapien
gcccatatggacactacagacactg

SEQ ID NO: 2467101 - DNA, 25 bp, Homo sapien
tcattggaaacagacccctgggcct

SEQ ID NO: 2467102 - DNA, 25 bp, Homo sapien
ctgctccaagctgttgaacatgctg

SEQ ID NO: 2467103 - DNA, 25 bp, Homo sapien
ttctgggactgctccaagctgttga

SEQ ID NO: 2467104 - DNA, 25 bp, Homo sapien
ctgggactgctccaagctgttgaac

SEQ ID NO: 2467105 - DNA, 25 bp, Homo sapien
gactgctccaagctgttgaacatgc

SEQ ID NO: 2467106 - DNA, 25 bp, Homo sapien
gcgggcattgatgacctcagctttt

SEQ ID NO: 2467107 - DNA, 25 bp, Homo sapien
acctcgcgggcattgatgacctcag

SEQ ID NO: 2467108 - DNA, 25 bp, Homo sapien
tcgcgggcattgatgacctcagctt

SEQ ID NO: 2467109 - DNA, 25 bp, Homo sapien
gggccacctcgcgggcattgatgac

SEQ ID NO: 2467110 - DNA, 25 bp, Homo sapien
ctcctcttccgaggcattcatgaga

SEQ ID NO: 2467111 - DNA, 25 bp, Homo sapien
tcctcttccgaggcattcatgagag

SEQ ID NO: 2467112 - DNA, 25 bp, Homo sapien
cctcttccgaggcattcatgagagg

SEQ ID NO: 2467113 - DNA, 25 bp, Homo sapien
aatggctgcatccaccgcagagcca

SEQ ID NO: 2467114 - DNA, 25 bp, Homo sapien
cccacacacaacagggctgcaatgg

SEQ ID NO: 2467115 - DNA, 25 bp, Homo sapien
tcatgctgtgggcattcatgagccc

SEQ ID NO: 2467116 - DNA, 25 bp, Homo sapien
gcagagccaccatcccgcagtgtgt

SEQ ID NO: 2467117 - DNA, 25 bp, Homo sapien
tgtacacatggttgtcaggttcctt

SEQ ID NO: 2467118 - DNA, 25 bp, Homo sapien
ctggtgtacacatggttgtcaggtt

SEQ ID NO: 2467119 - DNA, 25 bp, Homo sapien
acatggttgtcaggttccttggagg

SEQ ID NO: 2467120 - DNA, 25 bp, Homo sapien
tacacatggttgtcaggttccttgg

SEQ ID NO: 2467121 - DNA, 25 bp, Homo sapien
ggcccagcaccactaacttcttctt

SEQ ID NO: 2467122 - DNA, 25 bp, Homo sapien
cagccagagacagagattgacaatg

SEQ ID NO: 2467123 - DNA, 25 bp, Homo sapien
attgacaatgaccagcaccaggacc

SEQ ID NO: 2467124 - DNA, 25 bp, Homo sapien
agcaggcccagcaccactaacttct

SEQ ID NO: 2467125 - DNA, 25 bp, Homo sapien
gggtgttggccacgaaagacaggag

SEQ ID NO: 2467126 - DNA, 25 bp, Homo sapien
ttggccacgaaagacaggaggattt

SEQ ID NO: 2467127 - DNA, 25 bp, Homo sapien
ccacgaaagacaggaggatttggtg

SEQ ID NO: 2467128 - DNA, 25 bp, Homo sapien
tgcctggggtgttggccacgaaaga

SEQ ID NO: 2467129 - DNA, 25 bp, Homo sapien
cacagtgacttctgtgcgcccagaa

SEQ ID NO: 2467130 - DNA, 25 bp, Homo sapien
agtgacttctgtgcgcccagaaacc

SEQ ID NO: 2467131 - DNA, 25 bp, Homo sapien
cctcctctgccagcttgtaccaggc

SEQ ID NO: 2467132 - DNA, 25 bp, Homo sapien
aacctcctctgccagcttgtaccag

SEQ ID NO: 2467133 - DNA, 25 bp, Homo sapien
actccatgtggcagtagtagctgcc

SEQ ID NO: 2467134 - DNA, 25 bp, Homo sapien
tactccatgtggcagtagtagctgc

SEQ ID NO: 2467135 - DNA, 25 bp, Homo sapien
tccatgtggcagtagtagctgccgc

SEQ ID NO: 2467136 - DNA, 25 bp, Homo sapien
catgtggcagtagtagctgccgctg

SEQ ID NO: 2467137 - DNA, 25 bp, Homo sapien
taagcttgccgttggcatctgaggg

SEQ ID NO: 2467138 - DNA, 25 bp, Homo sapien
caggataagcttgccgttggcatct

SEQ ID NO: 2467139 - DNA, 25 bp, Homo sapien
ttgccgttggcatctgagggcttgt

SEQ ID NO: 2467140 - DNA, 25 bp, Homo sapien
gataagcttgccgttggcatctgag

SEQ ID NO: 2467141 - DNA, 25 bp, Homo sapien
cttcacacttagtttttccgccaca

SEQ ID NO: 2467142 - DNA, 25 bp, Homo sapien
tcacacttagtttttccgccacagg

SEQ ID NO: 2467143 - DNA, 25 bp, Homo sapien
ttcacacttagtttttccgccacag

SEQ ID NO: 2467144 - DNA, 25 bp, Homo sapien
cacacttagtttttccgccacaggg

SEQ ID NO: 2467145 - DNA, 25 bp, Homo sapien
acaagtgccccggtgttaccatgac

SEQ ID NO: 2467146 - DNA, 25 bp, Homo sapien
ttgatgccaataacaagtgccccgg

SEQ ID NO: 2467147 - DNA, 25 bp, Homo sapien
tgccaataacaagtgccccggtgtt

SEQ ID NO: 2467148 - DNA, 25 bp, Homo sapien
aagtgccccggtgttaccatgacaa

SEQ ID NO: 2467149 - DNA, 25 bp, Homo sapien
gctctcctcttagggctcttgcact

SEQ ID NO: 2467150 - DNA, 25 bp, Homo sapien
ttggcacagacaacaggcagaagcc

SEQ ID NO: 2467151 - DNA, 25 bp, Homo sapien
tggcacagacaacaggcagaagcca

SEQ ID NO: 2467152 - DNA, 25 bp, Homo sapien
cttggcacagacaacaggcagaagc

SEQ ID NO: 2467153 - DNA, 25 bp, Homo sapien
ggcacagacaacaggcagaagccac

SEQ ID NO: 2467154 - DNA, 25 bp, Homo sapien
gggtttgatgatacactgcaagtca

SEQ ID NO: 2467155 - DNA, 25 bp, Homo sapien
gaaggtcaccaagtcatggaactcc

SEQ ID NO: 2467156 - DNA, 25 bp, Homo sapien
caggttggaggtcctctccgccagt

SEQ ID NO: 2467157 - DNA, 25 bp, Homo sapien
gacgttgttgctggactcagccttc

SEQ ID NO: 2467158 - DNA, 25 bp, Homo sapien
tgttgcatgagggtggtgtaggaca

SEQ ID NO: 2467159 - DNA, 25 bp, Homo sapien
taggtgttgcatgagggtggtgtag

SEQ ID NO: 2467160 - DNA, 25 bp, Homo sapien
ggtgttgcatgagggtggtgtagga

SEQ ID NO: 2467161 - DNA, 25 bp, Homo sapien
aggtgttgcatgagggtggtgtagg

SEQ ID NO: 2467162 - DNA, 25 bp, Homo sapien
gaactctgacagacaaaagtcagga

SEQ ID NO: 2467163 - DNA, 25 bp, Homo sapien
agactggccatagtttcctgctaga

SEQ ID NO: 2467164 - DNA, 25 bp, Homo sapien
gacactgaagctgtctccatgccag

SEQ ID NO: 2467165 - DNA, 25 bp, Homo sapien
taaaagactggccatagtttcctgc

SEQ ID NO: 2467166 - DNA, 25 bp, Homo sapien
cccgcacccattcagtcacatggca

SEQ ID NO: 2467167 - DNA, 25 bp, Homo sapien
gcgctccccaacaatctgccactcg

SEQ ID NO: 2467168 - DNA, 25 bp, Homo sapien
ggcattcatactggccctcgtcctc

SEQ ID NO: 2467169 - DNA, 25 bp, Homo sapien
tggcccggcgctccccaacaatctg

SEQ ID NO: 2467170 - DNA, 25 bp, Homo sapien
gacgagcctggctgcacggtgccat

SEQ ID NO: 2467171 - DNA, 25 bp, Homo sapien
ccatcccggtctagccacatgatat

SEQ ID NO: 2467172 - DNA, 25 bp, Homo sapien
cctcaaggatgacgctggcattgct

SEQ ID NO: 2467173 - DNA, 25 bp, Homo sapien
aagctgctgcgctcccagtaggacg

SEQ ID NO: 2467174 - DNA, 25 bp, Homo sapien
tgtccagtcagccctggggctcctt

SEQ ID NO: 2467175 - DNA, 25 bp, Homo sapien
agccctggggctcctttgctctctt

SEQ ID NO: 2467176 - DNA, 25 bp, Homo sapien
tggggctcctttgctctctttctag

SEQ ID NO: 2467177 - DNA, 25 bp, Homo sapien
tccagtcagccctggggctcctttg

SEQ ID NO: 2467178 - DNA, 25 bp, Homo sapien
gaatcgcaaacacggatttctaccc

SEQ ID NO: 2467179 - DNA, 25 bp, Homo sapien
gcaacagaatcgcaaacacggattt

SEQ ID NO: 2467180 - DNA, 25 bp, Homo sapien
aacgcaacagaatcgcaaacacgga

SEQ ID NO: 2467181 - DNA, 25 bp, Homo sapien
gaaaaacgcaacagaatcgcaaaca

SEQ ID NO: 2467182 - DNA, 25 bp, Homo sapien
gaaattacttactgacatccacccc

SEQ ID NO: 2467183 - DNA, 25 bp, Homo sapien
tagtgggaccagaaattacttactg

SEQ ID NO: 2467184 - DNA, 25 bp, Homo sapien
gagattgagaatggtactctaatca

SEQ ID NO: 2467185 - DNA, 25 bp, Homo sapien
tttgctttttgtagaagagattgag

SEQ ID NO: 2467186 - DNA, 25 bp, Homo sapien
gtgtttgtcagatacccagtgtcct

SEQ ID NO: 2467187 - DNA, 25 bp, Homo sapien
tccagacctgctgtcgaggctttgt

SEQ ID NO: 2467188 - DNA, 25 bp, Homo sapien
ctgctgtcgaggctttgtgtttgtc

SEQ ID NO: 2467189 - DNA, 25 bp, Homo sapien
tgtttgtcagatacccagtgtcctc

SEQ ID NO: 2467190 - DNA, 25 bp, Homo sapien
tcagagcatcgtaggtttttattct

SEQ ID NO: 2467191 - DNA, 25 bp, Homo sapien
aaatcagagcatcgtaggtttttat

SEQ ID NO: 2467192 - DNA, 25 bp, Homo sapien
gtttaaaatcagagcatcgtaggtt

SEQ ID NO: 2467193 - DNA, 25 bp, Homo sapien
taaaatcagagcatcgtaggttttt

SEQ ID NO: 2467194 - DNA, 25 bp, Homo sapien
cgatgagcgagctgttgaaggccca

SEQ ID NO: 2467195 - DNA, 25 bp, Homo sapien
ggcttcccggtgagcaaattcgctg

SEQ ID NO: 2467196 - DNA, 25 bp, Homo sapien
cagtcacccggcagttgtatttccc

SEQ ID NO: 2467197 - DNA, 25 bp, Homo sapien
ccaggagacagcaaagtaacggtcg

SEQ ID NO: 2467198 - DNA, 25 bp, Homo sapien
cctgccgatataggccagtgacctg

SEQ ID NO: 2467199 - DNA, 25 bp, Homo sapien
ctacttcctctagcagccaaacttc

SEQ ID NO: 2467200 - DNA, 25 bp, Homo sapien
cctccctgccgatataggccagtga

SEQ ID NO: 2467201 - DNA, 25 bp, Homo sapien
ctttccagtgacctaactacttcct

SEQ ID NO: 2467202 - DNA, 25 bp, Homo sapien
tctcccaggccctttcccattttga

SEQ ID NO: 2467203 - DNA, 25 bp, Homo sapien
ctgctgttctcccaggccctttccc

SEQ ID NO: 2467204 - DNA, 25 bp, Homo sapien
ctgttctcccaggccctttcccatt

SEQ ID NO: 2467205 - DNA, 25 bp, Homo sapien
tgctgctgttctcccaggccctttc

SEQ ID NO: 2467206 - DNA, 25 bp, Homo sapien
cacaaagccacactcactcaccaga

SEQ ID NO: 2467207 - DNA, 25 bp, Homo sapien
tcactcaccagaaccaccacagtcc

SEQ ID NO: 2467208 - DNA, 25 bp, Homo sapien
ttcccacaaagccacactcactcac

SEQ ID NO: 2467209 - DNA, 25 bp, Homo sapien
ctcatttcccacaaagccacactca

SEQ ID NO: 2467210 - DNA, 25 bp, Homo sapien
cctccaggcatattcgctgccggag

SEQ ID NO: 2467211 - DNA, 25 bp, Homo sapien
tccaggcatattcgctgccggagtg

SEQ ID NO: 2467212 - DNA, 25 bp, Homo sapien
tgcctccaggcatattcgctgccgg

SEQ ID NO: 2467213 - DNA, 25 bp, Homo sapien
ctgcctccaggcatattcgctgccg

SEQ ID NO: 2467214 - DNA, 25 bp, Homo sapien
ctggctgtgctgaacggtctccgag

SEQ ID NO: 2467215 - DNA, 25 bp, Homo sapien
tgtgctgaacggtctccgaggccac

SEQ ID NO: 2467216 - DNA, 25 bp, Homo sapien
gctgtgctgaacggtctccgaggcc

SEQ ID NO: 2467217 - DNA, 25 bp, Homo sapien
tggctgtgctgaacggtctccgagg

SEQ ID NO: 2467218 - DNA, 25 bp, Homo sapien
ggcatggcagtggtctgcagggagt

SEQ ID NO: 2467219 - DNA, 25 bp, Homo sapien
gtggtctgcagggagtctgggatca

SEQ ID NO: 2467220 - DNA, 25 bp, Homo sapien
cagtggtctgcagggagtctgggat

SEQ ID NO: 2467221 - DNA, 25 bp, Homo sapien
agtggtctgcagggagtctgggatc

SEQ ID NO: 2467222 - DNA, 25 bp, Homo sapien
tggcaacgtgaagacagcttctcct

SEQ ID NO: 2467223 - DNA, 25 bp, Homo sapien
caggccagacgctggcaacgtgaag

SEQ ID NO: 2467224 - DNA, 25 bp, Homo sapien
caacgtgaagacagcttctccttac

SEQ ID NO: 2467225 - DNA, 25 bp, Homo sapien
tcaggccagacgctggcaacgtgaa

SEQ ID NO: 2467226 - DNA, 25 bp, Homo sapien
tgaacggtgacctgccgctgtgctg

SEQ ID NO: 2467227 - DNA, 25 bp, Homo sapien
tcccgggcctgaagatctgtgatgt

SEQ ID NO: 2467228 - DNA, 25 bp, Homo sapien
tacaagggtccttcctgaacggtga

SEQ ID NO: 2467229 - DNA, 25 bp, Homo sapien
accagatagtgatgtgggagccctc

SEQ ID NO: 2467230 - DNA, 25 bp, Homo sapien
ctacgagggagagaaacacaggcaa

SEQ ID NO: 2467231 - DNA, 25 bp, Homo sapien
cgagggagagaaacacaggcaacat

SEQ ID NO: 2467232 - DNA, 25 bp, Homo sapien
acgagggagagaaacacaggcaaca

SEQ ID NO: 2467233 - DNA, 25 bp, Homo sapien
tacgagggagagaaacacaggcaac

SEQ ID NO: 2467234 - DNA, 25 bp, Homo sapien
ccttctggctcagatactgttctcc

SEQ ID NO: 2467235 - DNA, 25 bp, Homo sapien
tgttctccaaggtcacttctgcctg

SEQ ID NO: 2467236 - DNA, 25 bp, Homo sapien
tggctcagatactgttctccaaggt

SEQ ID NO: 2467237 - DNA, 25 bp, Homo sapien
tctccaaggtcacttctgcctgcct

SEQ ID NO: 2467238 - DNA, 25 bp, Homo sapien
ggcactcggccagcggatcatgcat

SEQ ID NO: 2467239 - DNA, 25 bp, Homo sapien
atcctgtgtattccacaaagacttg

SEQ ID NO: 2467240 - DNA, 25 bp, Homo sapien
tcaacgtgacgtcttctggggctcc

SEQ ID NO: 2467241 - DNA, 25 bp, Homo sapien
tgctggtgtcaacgtgacgtcttct

SEQ ID NO: 2467242 - DNA, 25 bp, Homo sapien
ctggtgtcaacgtgacgtcttctgg

SEQ ID NO: 2467243 - DNA, 25 bp, Homo sapien
ggctgctggtgtcaacgtgacgtct

SEQ ID NO: 2467244 - DNA, 25 bp, Homo sapien
gaacaggaagcggagcagcgccagg

SEQ ID NO: 2467245 - DNA, 25 bp, Homo sapien
tggaagccgctgatgaagtcaaagc

SEQ ID NO: 2467246 - DNA, 25 bp, Homo sapien
tttgctcccatagctggcgaacagg

SEQ ID NO: 2467247 - DNA, 25 bp, Homo sapien
ctaggagtggaagccgctgatgaag

SEQ ID NO: 2467248 - DNA, 25 bp, Homo sapien
cagggtgagcgccacgaggcgcagg

SEQ ID NO: 2467249 - DNA, 25 bp, Homo sapien
tgagcgccacgaggcgcaggaaatt

SEQ ID NO: 2467250 - DNA, 25 bp, Homo sapien
aagttcagacccgagtcgcccactg

SEQ ID NO: 2467251 - DNA, 25 bp, Homo sapien
atggccaggggaagttcagacccga

SEQ ID NO: 2467252 - DNA, 25 bp, Homo sapien
aaggcgaggagcgtgtggcaccagc

SEQ ID NO: 2467253 - DNA, 25 bp, Homo sapien
agcgtgtggcaccagcgtactcgcc

SEQ ID NO: 2467254 - DNA, 25 bp, Homo sapien
taggtggccctggaagtcaaagatc

SEQ ID NO: 2467255 - DNA, 25 bp, Homo sapien
gcgctgccaccagttgcaggcagca

SEQ ID NO: 2467256 - DNA, 25 bp, Homo sapien
cttgtcttgtttgaccagggttgtc

SEQ ID NO: 2467257 - DNA, 25 bp, Homo sapien
tcttgtttgaccagggttgtcaaac

SEQ ID NO: 2467258 - DNA, 25 bp, Homo sapien
tgtttgaccagggttgtcaaacaag

SEQ ID NO: 2467259 - DNA, 25 bp, Homo sapien
cagggttgtcaaacaaggtttgttg

SEQ ID NO: 2467260 - DNA, 25 bp, Homo sapien
agacatttcagaaggtcgggaaatt

SEQ ID NO: 2467261 - DNA, 25 bp, Homo sapien
catcataaatttttgacttggaaac

SEQ ID NO: 2467262 - DNA, 25 bp, Homo sapien
tcataaatttttgacttggaaacca

SEQ ID NO: 2467263 - DNA, 25 bp, Homo sapien
cataaatttttgacttggaaaccat

SEQ ID NO: 2467264 - DNA, 25 bp, Homo sapien
tggatttccaggaaagcggagacct

SEQ ID NO: 2467265 - DNA, 25 bp, Homo sapien
gggtctggatttccaggaaagcgga

SEQ ID NO: 2467266 - DNA, 25 bp, Homo sapien
ctggatttccaggaaagcggagacc

SEQ ID NO: 2467267 - DNA, 25 bp, Homo sapien
gtctggatttccaggaaagcggaga

SEQ ID NO: 2467268 - DNA, 25 bp, Homo sapien
aggtgtaggaataggactgcactga

SEQ ID NO: 2467269 - DNA, 25 bp, Homo sapien
gtaggaataggactgcactgaggct

SEQ ID NO: 2467270 - DNA, 25 bp, Homo sapien
gtcgcagatcgaccatcacagtgta

SEQ ID NO: 2467271 - DNA, 25 bp, Homo sapien
tcaactggtggtcgcagatcgacca

SEQ ID NO: 2467272 - DNA, 25 bp, Homo sapien
gtcttcccatatttccaataacaac

SEQ ID NO: 2467273 - DNA, 25 bp, Homo sapien
caaccagagaaccagttacccgcct

SEQ ID NO: 2467274 - DNA, 25 bp, Homo sapien
cttttccgtggacacgtcttcccat

SEQ ID NO: 2467275 - DNA, 25 bp, Homo sapien
tgtgccaggcccgtgcaacttttcc

SEQ ID NO: 2467276 - DNA, 25 bp, Homo sapien
tgtgcaagcgtggacttgagcaaag

SEQ ID NO: 2467277 - DNA, 25 bp, Homo sapien
caagcgtggacttgagcaaagcgaa

SEQ ID NO: 2467278 - DNA, 25 bp, Homo sapien
cctgtgtgtgcaagcgtggacttga

SEQ ID NO: 2467279 - DNA, 25 bp, Homo sapien
gtggacttgagcaaagcgaagcctt

SEQ ID NO: 2467280 - DNA, 25 bp, Homo sapien
atgattcatggagtaaatcaatgca

SEQ ID NO: 2467281 - DNA, 25 bp, Homo sapien
aatgattcatggagtaaatcaatgc

SEQ ID NO: 2467282 - DNA, 25 bp, Homo sapien
tccccaaaatgattcatggagtaaa

SEQ ID NO: 2467283 - DNA, 25 bp, Homo sapien
ccaaaatgattcatggagtaaatca

SEQ ID NO: 2467284 - DNA, 25 bp, Homo sapien
gctcctcagtgcagagctgagccct

SEQ ID NO: 2467285 - DNA, 25 bp, Homo sapien
gccacgatgggtcagctcctcagtg

SEQ ID NO: 2467286 - DNA, 25 bp, Homo sapien
ctgccacgatgggtcagctcctcag

SEQ ID NO: 2467287 - DNA, 25 bp, Homo sapien
gagctgagccctggtgttaagtggc

SEQ ID NO: 2467288 - DNA, 25 bp, Homo sapien
ctctttgaagttcccgacacatggt

SEQ ID NO: 2467289 - DNA, 25 bp, Homo sapien
gaacagtcctgccacgctctttgaa

SEQ ID NO: 2467290 - DNA, 25 bp, Homo sapien
caggaagcatctggacgaacagtcc

SEQ ID NO: 2467291 - DNA, 25 bp, Homo sapien
gacacatggtaaccaagacctgagg

SEQ ID NO: 2467292 - DNA, 25 bp, Homo sapien
tattaaaaatgtaactgctatctta

SEQ ID NO: 2467293 - DNA, 25 bp, Homo sapien
aaaatgtaactgctatcttaatgtt

SEQ ID NO: 2467294 - DNA, 25 bp, Homo sapien
taaaaatgtaactgctatcttaatg

SEQ ID NO: 2467295 - DNA, 25 bp, Homo sapien
aaatgtaactgctatcttaatgttc

SEQ ID NO: 2467296 - DNA, 25 bp, Homo sapien
tattgatacgtagatctctgcttag

SEQ ID NO: 2467297 - DNA, 25 bp, Homo sapien
gattgagccatggagcctggccaga

SEQ ID NO: 2467298 - DNA, 25 bp, Homo sapien
ccttctaatccttgtattgggaaga

SEQ ID NO: 2467299 - DNA, 25 bp, Homo sapien
ccagacatgggctattgattctcgc

SEQ ID NO: 2467300 - DNA, 25 bp, Homo sapien
cagcaaaatcccaccaagcactgat

SEQ ID NO: 2467301 - DNA, 25 bp, Homo sapien
tcagcaaaatcccaccaagcactga

SEQ ID NO: 2467302 - DNA, 25 bp, Homo sapien
ctggcagcagtcttgtcgttggaga

SEQ ID NO: 2467303 - DNA, 25 bp, Homo sapien
actctggcagcagtcttgtcgttgg

SEQ ID NO: 2467304 - DNA, 25 bp, Homo sapien
ctctggcagcagtcttgtcgttgga

SEQ ID NO: 2467305 - DNA, 25 bp, Homo sapien
tctggcagcagtcttgtcgttggag

SEQ ID NO: 2467306 - DNA, 25 bp, Homo sapien
accagaagtggctgtctcatggatg

SEQ ID NO: 2467307 - DNA, 25 bp, Homo sapien
acaccagggctgtttctctgccaat

SEQ ID NO: 2467308 - DNA, 25 bp, Homo sapien
aacaccagggctgtttctctgccaa

SEQ ID NO: 2467309 - DNA, 25 bp, Homo sapien
agaagtggctgtctcatggatgctg

SEQ ID NO: 2467310 - DNA, 25 bp, Homo sapien
atgatgtagggctctccccgtggat

SEQ ID NO: 2467311 - DNA, 25 bp, Homo sapien
agggctctccccgtggatacctgtt

SEQ ID NO: 2467312 - DNA, 25 bp, Homo sapien
tagggctctccccgtggatacctgt

SEQ ID NO: 2467313 - DNA, 25 bp, Homo sapien
atgtagggctctccccgtggatacc

SEQ ID NO: 2467314 - DNA, 25 bp, Homo sapien
aggaggttggagggctggcctgcag

SEQ ID NO: 2467315 - DNA, 25 bp, Homo sapien
gagggctggcctgcagggtcactgc

SEQ ID NO: 2467316 - DNA, 25 bp, Homo sapien
ggctggcctgcagggtcactgcacc

SEQ ID NO: 2467317 - DNA, 25 bp, Homo sapien
gaggaggttggagggctggcctgca

SEQ ID NO: 2467318 - DNA, 25 bp, Homo sapien
gactgacttttacggacctcgagtc

SEQ ID NO: 2467319 - DNA, 25 bp, Homo sapien
tgactgacttttacggacctcgagt

SEQ ID NO: 2467320 - DNA, 25 bp, Homo sapien
ctgacttttacggacctcgagtctg

SEQ ID NO: 2467321 - DNA, 25 bp, Homo sapien
tgacttttacggacctcgagtctgg

SEQ ID NO: 2467322 - DNA, 25 bp, Homo sapien
ttccagctgatgtaccacttgtttc

SEQ ID NO: 2467323 - DNA, 25 bp, Homo sapien
cagctgatgtaccacttgtttcttc

SEQ ID NO: 2467324 - DNA, 25 bp, Homo sapien
ttcttccagctgatgtaccacttgt

SEQ ID NO: 2467325 - DNA, 25 bp, Homo sapien
tcttccagctgatgtaccacttgtt

SEQ ID NO: 2467326 - DNA, 25 bp, Homo sapien
gagacgagactcggggcctctacat

SEQ ID NO: 2467327 - DNA, 25 bp, Homo sapien
ctctagctccctttcggctttctgt

SEQ ID NO: 2467328 - DNA, 25 bp, Homo sapien
ctccctttcggctttctgtttctcg

SEQ ID NO: 2467329 - DNA, 25 bp, Homo sapien
ctagctccctttcggctttctgttt

SEQ ID NO: 2467330 - DNA, 25 bp, Homo sapien
ctgtttctcgttgtttgctttcttt

SEQ ID NO: 2467331 - DNA, 25 bp, Homo sapien
cctttctgtatgttcaatctctgga

SEQ ID NO: 2467332 - DNA, 25 bp, Homo sapien
ccctttctgtatgttcaatctctgg

SEQ ID NO: 2467333 - DNA, 25 bp, Homo sapien
cgtttcgtgtggtacaggtccgtat

SEQ ID NO: 2467334 - DNA, 25 bp, Homo sapien
tcaaagtatctgagagaacgtttcg

SEQ ID NO: 2467335 - DNA, 25 bp, Homo sapien
agttgagatggggcccaaaggactc

SEQ ID NO: 2467336 - DNA, 25 bp, Homo sapien
gagagagttgagatggggcccaaag

SEQ ID NO: 2467337 - DNA, 25 bp, Homo sapien
tgagatggggcccaaaggactcccc

SEQ ID NO: 2467338 - DNA, 25 bp, Homo sapien
atgagagagttgagatggggcccaa

SEQ ID NO: 2467339 - DNA, 25 bp, Homo sapien
cttctgtgtggcggtgacagcagag

SEQ ID NO: 2467340 - DNA, 25 bp, Homo sapien
tctgtgtggcggtgacagcagagag

SEQ ID NO: 2467341 - DNA, 25 bp, Homo sapien
tgaatgttgcagacggacggccaga

SEQ ID NO: 2467342 - DNA, 25 bp, Homo sapien
atgttgcagacggacggccagatcc

SEQ ID NO: 2467343 - DNA, 25 bp, Homo sapien
tggactgctctaacttccactccgt

SEQ ID NO: 2467344 - DNA, 25 bp, Homo sapien
gtacgtgctttactgcggctggaga

SEQ ID NO: 2467345 - DNA, 25 bp, Homo sapien
cactccgtacgtgctttactgcggc

SEQ ID NO: 2467346 - DNA, 25 bp, Homo sapien
cagctgcgctttcagcagtgcctgc

SEQ ID NO: 2467347 - DNA, 25 bp, Homo sapien
aaagaagacactgtttgaaactgca

SEQ ID NO: 2467348 - DNA, 25 bp, Homo sapien
actgcacaaatgagttggggtttcc

SEQ ID NO: 2467349 - DNA, 25 bp, Homo sapien
atgagttggggtttccaacagggca

SEQ ID NO: 2467350 - DNA, 25 bp, Homo sapien
aagacactgtttgaaactgcacaaa

SEQ ID NO: 2467351 - DNA, 25 bp, Homo sapien
gactgacaatgagcgttccgcccag

SEQ ID NO: 2467352 - DNA, 25 bp, Homo sapien
tttagccaaatgttgtctgccatcc

SEQ ID NO: 2467353 - DNA, 25 bp, Homo sapien
tcctatcagcagaaggcgatgtctt

SEQ ID NO: 2467354 - DNA, 25 bp, Homo sapien
cagtgatttaactaccacggcttta

SEQ ID NO: 2467355 - DNA, 25 bp, Homo sapien
tttgcctccagatcctcaagtggtt

SEQ ID NO: 2467356 - DNA, 25 bp, Homo sapien
tctgcagatgatagtgttgaaccaa

SEQ ID NO: 2467357 - DNA, 25 bp, Homo sapien
tgaaactcctgcacctgtatatggg

SEQ ID NO: 2467358 - DNA, 25 bp, Homo sapien
cactcccggccgatatattgcttta

SEQ ID NO: 2467359 - DNA, 25 bp, Homo sapien
cccggcccatatttgatgaatatat

SEQ ID NO: 2467360 - DNA, 25 bp, Homo sapien
ttttcctctcgagagggtgtcttgc

SEQ ID NO: 2467361 - DNA, 25 bp, Homo sapien
aaagctaagtacatggaaaaatcca

SEQ ID NO: 2467362 - DNA, 25 bp, Homo sapien
tagaaagcagagcataattgttctt

SEQ ID NO: 2467363 - DNA, 25 bp, Homo sapien
gatagctatagttagtgtgagcgcc

SEQ ID NO: 2467364 - DNA, 25 bp, Homo sapien
tcgacccgcgccctggatagctata

SEQ ID NO: 2467365 - DNA, 25 bp, Homo sapien
cgcgccctggatagctatagttagt

SEQ ID NO: 2467366 - DNA, 25 bp, Homo sapien
gctatagttagtgtgagcgccacca

SEQ ID NO: 2467367 - DNA, 25 bp, Homo sapien
cagcaaaatcccaccaagcactgat

SEQ ID NO: 2467368 - DNA, 25 bp, Homo sapien
tcagcaaaatcccaccaagcactga

SEQ ID NO: 2467369 - DNA, 25 bp, Homo sapien
actctggcagcagtcttgtcgttgg

SEQ ID NO: 2467370 - DNA, 25 bp, Homo sapien
ctggcagcagtcttgtcgttggaga

SEQ ID NO: 2467371 - DNA, 25 bp, Homo sapien
tctggcagcagtcttgtcgttggag

SEQ ID NO: 2467372 - DNA, 25 bp, Homo sapien
ctctggcagcagtcttgtcgttgga

SEQ ID NO: 2467373 - DNA, 25 bp, Homo sapien
accagaagtggctgtctcatggatg

SEQ ID NO: 2467374 - DNA, 25 bp, Homo sapien
agaagtggctgtctcatggatgctg

SEQ ID NO: 2467375 - DNA, 25 bp, Homo sapien
aacaccagggctgtttctctgccaa

SEQ ID NO: 2467376 - DNA, 25 bp, Homo sapien
acaccagggctgtttctctgccaat

SEQ ID NO: 2467377 - DNA, 25 bp, Homo sapien
ccacagcaccctgcggccctttcag

SEQ ID NO: 2467378 - DNA, 25 bp, Homo sapien
accacagcaccctgcggccctttca

SEQ ID NO: 2467379 - DNA, 25 bp, Homo sapien
agcaccctgcggccctttcagtgac

SEQ ID NO: 2467380 - DNA, 25 bp, Homo sapien
acagcaccctgcggccctttcagtg

SEQ ID NO: 2467381 - DNA, 25 bp, Homo sapien
agggctctccccgtggatacctgtt

SEQ ID NO: 2467382 - DNA, 25 bp, Homo sapien
atgatgtagggctctccccgtggat

SEQ ID NO: 2467383 - DNA, 25 bp, Homo sapien
tagggctctccccgtggatacctgt

SEQ ID NO: 2467384 - DNA, 25 bp, Homo sapien
atgtagggctctccccgtggatacc

SEQ ID NO: 2467385 - DNA, 25 bp, Homo sapien
aggaggttggagggctgccctgcag

SEQ ID NO: 2467386 - DNA, 25 bp, Homo sapien
agggctgccctgcagggtcactgca

SEQ ID NO: 2467387 - DNA, 25 bp, Homo sapien
gaggaggaggttggagggctgccct

SEQ ID NO: 2467388 - DNA, 25 bp, Homo sapien
tggaggaggaggttggagggctgcc

SEQ ID NO: 2467389 - DNA, 25 bp, Homo sapien
tgtggactgtctcagctggcagagg

SEQ ID NO: 2467390 - DNA, 25 bp, Homo sapien
gtgtggactgtctcagctggcagag

SEQ ID NO: 2467391 - DNA, 25 bp, Homo sapien
ctggcagaggggcaccccgtcccac

SEQ ID NO: 2467392 - DNA, 25 bp, Homo sapien
tcagctggcagaggggcaccccgtc

SEQ ID NO: 2467393 - DNA, 25 bp, Homo sapien
gactgacttttacggacctcgagtc

SEQ ID NO: 2467394 - DNA, 25 bp, Homo sapien
ctgacttttacggacctcgagtctg

SEQ ID NO: 2467395 - DNA, 25 bp, Homo sapien
tgacttttacggacctcgagtctgg

SEQ ID NO: 2467396 - DNA, 25 bp, Homo sapien
tgactgacttttacggacctcgagt

SEQ ID NO: 2467397 - DNA, 25 bp, Homo sapien
ggttcttcacagaagatttagggcg

SEQ ID NO: 2467398 - DNA, 25 bp, Homo sapien
acatttactgagcacgtacgggcca

SEQ ID NO: 2467399 - DNA, 25 bp, Homo sapien
cacagaagatttagggcggaaaagg

SEQ ID NO: 2467400 - DNA, 25 bp, Homo sapien
tactgagcacgtacgggccaagtac

SEQ ID NO: 2467401 - DNA, 25 bp, Homo sapien
ttcttccagctgatgttccacttgt

SEQ ID NO: 2467402 - DNA, 25 bp, Homo sapien
cttccagctgatgttccacttgttt

SEQ ID NO: 2467403 - DNA, 25 bp, Homo sapien
tcttccagctgatgttccacttgtt

SEQ ID NO: 2467404 - DNA, 25 bp, Homo sapien
ttccagctgatgttccacttgtttc

SEQ ID NO: 2467405 - DNA, 25 bp, Homo sapien
atggtactgcaagagacatgtcccc

SEQ ID NO: 2467406 - DNA, 25 bp, Homo sapien
gagatggtactgcaagagacatgtc

SEQ ID NO: 2467407 - DNA, 25 bp, Homo sapien
tggtactgcaagagacatgtcccca

SEQ ID NO: 2467408 - DNA, 25 bp, Homo sapien
gatggtactgcaagagacatgtccc

SEQ ID NO: 2467409 - DNA, 25 bp, Homo sapien
ctctagctccctttcggctttctgt

SEQ ID NO: 2467410 - DNA, 25 bp, Homo sapien
ctagctccctttcggctttctgttt

SEQ ID NO: 2467411 - DNA, 25 bp, Homo sapien
ctccctttcggctttctgtttctcg

SEQ ID NO: 2467412 - DNA, 25 bp, Homo sapien
ctgtttctcgttgtttgctttcttt

SEQ ID NO: 2467413 - DNA, 25 bp, Homo sapien
tcaaagtatctgagagaacgtttcg

SEQ ID NO: 2467414 - DNA, 25 bp, Homo sapien
cctttctgtatgttcaatctctgga

SEQ ID NO: 2467415 - DNA, 25 bp, Homo sapien
ccctttctgtatgttcaatctctgg

SEQ ID NO: 2467416 - DNA, 25 bp, Homo sapien
cgtttcgtgtggtacaggtccgtat

SEQ ID NO: 2467417 - DNA, 25 bp, Homo sapien
tgttgcagacggacggccagatcct

SEQ ID NO: 2467418 - DNA, 25 bp, Homo sapien
caatgaatgttgcagacggacggcc

SEQ ID NO: 2467419 - DNA, 25 bp, Homo sapien
aatgaatgttgcagacggacggcca

SEQ ID NO: 2467420 - DNA, 25 bp, Homo sapien
gaatgttgcagacggacggccagat

SEQ ID NO: 2467421 - DNA, 25 bp, Homo sapien
tcttctgtgtggcggtgacagcaga

SEQ ID NO: 2467422 - DNA, 25 bp, Homo sapien
gagcccgctctaactctcctttacg

SEQ ID NO: 2467423 - DNA, 25 bp, Homo sapien
tctgtgtggcggtgacagcagagag

SEQ ID NO: 2467424 - DNA, 25 bp, Homo sapien
ttcttctgtgtggcggtgacagcag

SEQ ID NO: 2467425 - DNA, 25 bp, Homo sapien
ttccactccatacgtgctttactgc

SEQ ID NO: 2467426 - DNA, 25 bp, Homo sapien
atacgtgctttactgcggctggaga

SEQ ID NO: 2467427 - DNA, 25 bp, Homo sapien
cagctgcgctttcagcagtgcctgc

SEQ ID NO: 2467428 - DNA, 25 bp, Homo sapien
tccatacgtgctttactgcggctgg

SEQ ID NO: 2467429 - DNA, 25 bp, Homo sapien
ccctctctagctggacttctttaag

SEQ ID NO: 2467430 - DNA, 25 bp, Homo sapien
ggacttctttaagtgactccttcaa

SEQ ID NO: 2467431 - DNA, 25 bp, Homo sapien
tttagatgttcagcatattcatccc

SEQ ID NO: 2467432 - DNA, 25 bp, Homo sapien
tagatgttcagcatattcatccctc

SEQ ID NO: 2467433 - DNA, 25 bp, Homo sapien
ctctacccgatatttatcatgcttc

SEQ ID NO: 2467434 - DNA, 25 bp, Homo sapien
tctctacccgatatttatcatgctt

SEQ ID NO: 2467435 - DNA, 25 bp, Homo sapien
agcgctcctgccactctctctagtt

SEQ ID NO: 2467436 - DNA, 25 bp, Homo sapien
cctggagcgctcctgccactctctc

SEQ ID NO: 2467437 - DNA, 25 bp, Homo sapien
tggagcgctcctgccactctctcta

SEQ ID NO: 2467438 - DNA, 25 bp, Homo sapien
ctctagttccttcctcaggtgctgc

SEQ ID NO: 2467439 - DNA, 25 bp, Homo sapien
ttgaagctgttctgtggctcggcca

SEQ ID NO: 2467440 - DNA, 25 bp, Homo sapien
tgctccaactgtagtacgctcttgt

SEQ ID NO: 2467441 - DNA, 25 bp, Homo sapien
aactgtagtacgctcttgttctcat

SEQ ID NO: 2467442 - DNA, 25 bp, Homo sapien
ccaactgtagtacgctcttgttctc

SEQ ID NO: 2467443 - DNA, 25 bp, Homo sapien
ctccaactgtagtacgctcttgttc

SEQ ID NO: 2467444 - DNA, 25 bp, Homo sapien
gtgacccaggtaatggtctggctgc

SEQ ID NO: 2467445 - DNA, 25 bp, Homo sapien
tgacccaggtaatggtctggctgct

SEQ ID NO: 2467446 - DNA, 25 bp, Homo sapien
caggtgacccaggtaatggtctggc

SEQ ID NO: 2467447 - DNA, 25 bp, Homo sapien
tgcaggtgacccaggtaatggtctg

SEQ ID NO: 2467448 - DNA, 25 bp, Homo sapien
ctgctgctgataggtggccacgtac

SEQ ID NO: 2467449 - DNA, 25 bp, Homo sapien
aggtcagctgctgataggtggccac

SEQ ID NO: 2467450 - DNA, 25 bp, Homo sapien
tgcctgtacagcgcctccttctcac

SEQ ID NO: 2467451 - DNA, 25 bp, Homo sapien
actgggccgttagctgctgtttctg

SEQ ID NO: 2467452 - DNA, 25 bp, Homo sapien
tcaactgggccgttagctgctgttt

SEQ ID NO: 2467453 - DNA, 25 bp, Homo sapien
gctcaactgggccgttagctgctgt

SEQ ID NO: 2467454 - DNA, 25 bp, Homo sapien
caactgggccgttagctgctgtttc

SEQ ID NO: 2467455 - DNA, 25 bp, Homo sapien
tagtgcaggcacccggttagtataa

SEQ ID NO: 2467456 - DNA, 25 bp, Homo sapien
caggcatattcccactactggtcga

SEQ ID NO: 2467457 - DNA, 25 bp, Homo sapien
tattcccactactggtcgatgtggg

SEQ ID NO: 2467458 - DNA, 25 bp, Homo sapien
gcatattcccactactggtcgatgt

SEQ ID NO: 2467459 - DNA, 25 bp, Homo sapien
tcctctgggacactcggcatgggcc

SEQ ID NO: 2467460 - DNA, 25 bp, Homo sapien
ctctgggacactcggcatgggccga

SEQ ID NO: 2467461 - DNA, 25 bp, Homo sapien
aggtcctctgggacactcggcatgg

SEQ ID NO: 2467462 - DNA, 25 bp, Homo sapien
ccaggtcctctgggacactcggcat

SEQ ID NO: 2467463 - DNA, 25 bp, Homo sapien
ccaggccctggggctgggaccgctg

SEQ ID NO: 2467464 - DNA, 25 bp, Homo sapien
cctgctcttgtaactgtgcctgctt

SEQ ID NO: 2467465 - DNA, 25 bp, Homo sapien
gctctttcacctgctcttgtaactg

SEQ ID NO: 2467466 - DNA, 25 bp, Homo sapien
ggctgggaccgctgcctctggctcc

SEQ ID NO: 2467467 - DNA, 25 bp, Homo sapien
catccctctctgtagtactggaaga

SEQ ID NO: 2467468 - DNA, 25 bp, Homo sapien
cctctctgtagtactggaagaatcc

SEQ ID NO: 2467469 - DNA, 25 bp, Homo sapien
tgatggcatccctctctgtagtact

SEQ ID NO: 2467470 - DNA, 25 bp, Homo sapien
tggcatccctctctgtagtactgga

SEQ ID NO: 2467471 - DNA, 25 bp, Homo sapien
ctgccccctggctttgttatagggt

SEQ ID NO: 2467472 - DNA, 25 bp, Homo sapien
ctggctttgttatagggtgataaac

SEQ ID NO: 2467473 - DNA, 25 bp, Homo sapien
gccccctggctttgttatagggtga

SEQ ID NO: 2467474 - DNA, 25 bp, Homo sapien
cccctggctttgttatagggtgata

SEQ ID NO: 2467475 - DNA, 25 bp, Homo sapien
ctgtccagggccagcctgatggtgt

SEQ ID NO: 2467476 - DNA, 25 bp, Homo sapien
tcatctcctccctgtccagggccag

SEQ ID NO: 2467477 - DNA, 25 bp, Homo sapien
catctcctccctgtccagggccagc

SEQ ID NO: 2467478 - DNA, 25 bp, Homo sapien
tccctgtccagggccagcctgatgg

SEQ ID NO: 2467479 - DNA, 25 bp, Homo sapien
tgctgccagcgctcaccgtcacagc

SEQ ID NO: 2467480 - DNA, 25 bp, Homo sapien
ctgtcacgctgctgccagcgctcac

SEQ ID NO: 2467481 - DNA, 25 bp, Homo sapien
gggtgctcagctgtcacgctgctgc

SEQ ID NO: 2467482 - DNA, 25 bp, Homo sapien
ccccgcagagatgttgcacactcta

SEQ ID NO: 2467483 - DNA, 25 bp, Homo sapien
tctcctgcagctccagcagcttcac

SEQ ID NO: 2467484 - DNA, 25 bp, Homo sapien
catctcctgcagctccagcagcttc

SEQ ID NO: 2467485 - DNA, 25 bp, Homo sapien
cagctgcaacaccatctcctgcagc

SEQ ID NO: 2467486 - DNA, 25 bp, Homo sapien
accatctcctgcagctccagcagct

SEQ ID NO: 2467487 - DNA, 25 bp, Homo sapien
aatttgctgtgtcccttgtagtcgc

SEQ ID NO: 2467488 - DNA, 25 bp, Homo sapien
caagaatttgctgtgtcccttgtag

SEQ ID NO: 2467489 - DNA, 25 bp, Homo sapien
agaatttgctgtgtcccttgtagtc

SEQ ID NO: 2467490 - DNA, 25 bp, Homo sapien
ttgctgtgtcccttgtagtcgccac

SEQ ID NO: 2467491 - DNA, 25 bp, Homo sapien
ggactgggctcatgagcagggttct

SEQ ID NO: 2467492 - DNA, 25 bp, Homo sapien
atgcttgtgggcagccccaagctcc

SEQ ID NO: 2467493 - DNA, 25 bp, Homo sapien
tcctggactgggctcatgagcaggg

SEQ ID NO: 2467494 - DNA, 25 bp, Homo sapien
ggctcctggactgggctcatgagca

SEQ ID NO: 2467495 - DNA, 25 bp, Homo sapien
ccctggcctctacttgcacaggctc

SEQ ID NO: 2467496 - DNA, 25 bp, Homo sapien
cctccctggcctctacttgcacagg

SEQ ID NO: 2467497 - DNA, 25 bp, Homo sapien
cctctacttgcacaggctccacgct

SEQ ID NO: 2467498 - DNA, 25 bp, Homo sapien
tacttgcacaggctccacgctgtca

SEQ ID NO: 2467499 - DNA, 25 bp, Homo sapien
agcactaattcttggcaacagaaca

SEQ ID NO: 2467500 - DNA, 25 bp, Homo sapien
tacaatagtacagcactaattcttg

SEQ ID NO: 2467501 - DNA, 25 bp, Homo sapien
agtacagcactaattcttggcaaca

SEQ ID NO: 2467502 - DNA, 25 bp, Homo sapien
ctaaaggaactacaatagtacagca

SEQ ID NO: 2467503 - DNA, 25 bp, Homo sapien
catatctccctacatcctaataatg

SEQ ID NO: 2467504 - DNA, 25 bp, Homo sapien
aaagtatcatgaggatgccaactgc

SEQ ID NO: 2467505 - DNA, 25 bp, Homo sapien
actgttgagtctttcccaagcatca

SEQ ID NO: 2467506 - DNA, 25 bp, Homo sapien
ctgctaaaaatggagatggtctagt

SEQ ID NO: 2467507 - DNA, 25 bp, Homo sapien
ttgaagtcacaaggacccgatattt

SEQ ID NO: 2467508 - DNA, 25 bp, Homo sapien
ccgttgaagtcacaaggacccgata

SEQ ID NO: 2467509 - DNA, 25 bp, Homo sapien
aatttggaagagtccgttgaagtca

SEQ ID NO: 2467510 - DNA, 25 bp, Homo sapien
tattccatcggcaaaatcgtactgc

SEQ ID NO: 2467511 - DNA, 25 bp, Homo sapien
tatagtcatgcgatttccattcttt

SEQ ID NO: 2467512 - DNA, 25 bp, Homo sapien
cttaagttatagtcatgcgatttcc

SEQ ID NO: 2467513 - DNA, 25 bp, Homo sapien
agttatagtcatgcgatttccattc

SEQ ID NO: 2467514 - DNA, 25 bp, Homo sapien
taagttatagtcatgcgatttccat

SEQ ID NO: 2467515 - DNA, 25 bp, Homo sapien
catggctgtctgcaactcccgacac

SEQ ID NO: 2467516 - DNA, 25 bp, Homo sapien
ggccatggctgtctgcaactcccga

SEQ ID NO: 2467517 - DNA, 25 bp, Homo sapien
ggctgtctgcaactcccgacacaag

SEQ ID NO: 2467518 - DNA, 25 bp, Homo sapien
gggccatggctgtctgcaactcccg

SEQ ID NO: 2467519 - DNA, 25 bp, Homo sapien
cagggtccgtcagcgccaggcccat

SEQ ID NO: 2467520 - DNA, 25 bp, Homo sapien
gacaccgctccagggtccgtcagcg

SEQ ID NO: 2467521 - DNA, 25 bp, Homo sapien
ctccctcagacaccgctccagggtc

SEQ ID NO: 2467522 - DNA, 25 bp, Homo sapien
tccagggtccgtcagcgccaggccc

SEQ ID NO: 2467523 - DNA, 25 bp, Homo sapien
tgaggatgcactcgggccagccagt

SEQ ID NO: 2467524 - DNA, 25 bp, Homo sapien
actcgggccagccagtggctttgcc

SEQ ID NO: 2467525 - DNA, 25 bp, Homo sapien
gtgaggatgcactcgggccagccag

SEQ ID NO: 2467526 - DNA, 25 bp, Homo sapien
tgcactcgggccagccagtggcttt

SEQ ID NO: 2467527 - DNA, 25 bp, Homo sapien
ccgtgtccacgtgcgaccgcagtcg

SEQ ID NO: 2467528 - DNA, 25 bp, Homo sapien
tgcaacccgtgtccacgtgcgaccg

SEQ ID NO: 2467529 - DNA, 25 bp, Homo sapien
acccgtgtccacgtgcgaccgcagt

SEQ ID NO: 2467530 - DNA, 25 bp, Homo sapien
gtgtccacgtgcgaccgcagtcgca

SEQ ID NO: 2467531 - DNA, 25 bp, Homo sapien
taaagagctgccatggattctacca

SEQ ID NO: 2467532 - DNA, 25 bp, Homo sapien
attctggaagcactgtaaaattgct

SEQ ID NO: 2467533 - DNA, 25 bp, Homo sapien
aactttggttccaatccagcttgaa

SEQ ID NO: 2467534 - DNA, 25 bp, Homo sapien
agtgaactttggttccaatccagct

SEQ ID NO: 2467535 - DNA, 25 bp, Homo sapien
ctgggagaagactgatatcttcatc

SEQ ID NO: 2467536 - DNA, 25 bp, Homo sapien
ggagaagactgatatcttcatcttt

SEQ ID NO: 2467537 - DNA, 25 bp, Homo sapien
tgggagaagactgatatcttcatct

SEQ ID NO: 2467538 - DNA, 25 bp, Homo sapien
gggagaagactgatatcttcatctt

SEQ ID NO: 2467539 - DNA, 25 bp, Homo sapien
gccatcagcctctgtttctgaacca

SEQ ID NO: 2467540 - DNA, 25 bp, Homo sapien
catttcaggattgtcaccacccata

SEQ ID NO: 2467541 - DNA, 25 bp, Homo sapien
gaaccagcctcttcatgctcctgtt

SEQ ID NO: 2467542 - DNA, 25 bp, Homo sapien
cctctaaatcttctaggtcctcctg

SEQ ID NO: 2467543 - DNA, 25 bp, Homo sapien
gcagccaaggcttttttctaacaac

SEQ ID NO: 2467544 - DNA, 25 bp, Homo sapien
cagccaaggcttttttctaacaact

SEQ ID NO: 2467545 - DNA, 25 bp, Homo sapien
taacaactctttttctaaagatgta

SEQ ID NO: 2467546 - DNA, 25 bp, Homo sapien
tctaacaactctttttctaaagatg

SEQ ID NO: 2467547 - DNA, 25 bp, Homo sapien
cataggatgggtagggaggtgggga

SEQ ID NO: 2467548 - DNA, 25 bp, Homo sapien
taggatgggtagggaggtggggatg

SEQ ID NO: 2467549 - DNA, 25 bp, Homo sapien
ataggatgggtagggaggtggggat

SEQ ID NO: 2467550 - DNA, 25 bp, Homo sapien
tgttccttggcctcggccaatttgc

SEQ ID NO: 2467551 - DNA, 25 bp, Homo sapien
tgctctgtctggtttctttggacat

SEQ ID NO: 2467552 - DNA, 25 bp, Homo sapien
ctgttccttggcctcggccaatttg

SEQ ID NO: 2467553 - DNA, 25 bp, Homo sapien
atttgctctgtctggtttctttgga

SEQ ID NO: 2467554 - DNA, 25 bp, Homo sapien
cactagggttggtctggggatgatg

SEQ ID NO: 2467555 - DNA, 25 bp, Homo sapien
tctttttggtgtcgcttgctgctgt

SEQ ID NO: 2467556 - DNA, 25 bp, Homo sapien
ttgctgctgtaccaacactagggtt

SEQ ID NO: 2467557 - DNA, 25 bp, Homo sapien
ttctttttggtgtcgcttgctgctg

SEQ ID NO: 2467558 - DNA, 25 bp, Homo sapien
gatgttggtggcttgccttctgttc

SEQ ID NO: 2467559 - DNA, 25 bp, Homo sapien
tccctccttagggcttcctgatgtt

SEQ ID NO: 2467560 - DNA, 25 bp, Homo sapien
ctccttagggcttcctgatgttggt

SEQ ID NO: 2467561 - DNA, 25 bp, Homo sapien
tctagctccctccttagggcttcct

SEQ ID NO: 2467562 - DNA, 25 bp, Homo sapien
tgctggctgtagtagagtgccatct

SEQ ID NO: 2467563 - DNA, 25 bp, Homo sapien
tggctgtagtagagtgccatctgaa

SEQ ID NO: 2467564 - DNA, 25 bp, Homo sapien
catgctggctgtagtagagtgccat

SEQ ID NO: 2467565 - DNA, 25 bp, Homo sapien
tgacagcatgctggctgtagtagag

SEQ ID NO: 2467566 - DNA, 25 bp, Homo sapien
ctgcaaacttccatgaatcatgcag

SEQ ID NO: 2467567 - DNA, 25 bp, Homo sapien
gtgttcctgtacagttccagactca

SEQ ID NO: 2467568 - DNA, 25 bp, Homo sapien
tctcctttgttaactcctcaatgta

SEQ ID NO: 2467569 - DNA, 25 bp, Homo sapien
cctctcctttgttaactcctcaatg

SEQ ID NO: 2467570 - DNA, 25 bp, Homo sapien
acagttccagactcagggcgtccct

SEQ ID NO: 2467571 - DNA, 25 bp, Homo sapien
tagctcctttacgttgagctggatc

SEQ ID NO: 2467572 - DNA, 25 bp, Homo sapien
ttttagctcctttacgttgagctgg

SEQ ID NO: 2467573 - DNA, 25 bp, Homo sapien
aggagcttggccctctccagtttcc

SEQ ID NO: 2467574 - DNA, 25 bp, Homo sapien
cagattctacaagttgaagtttttc

SEQ ID NO: 2467575 - DNA, 25 bp, Homo sapien
cagcctcttggctcttcagctccac

SEQ ID NO: 2467576 - DNA, 25 bp, Homo sapien
tcagcctcttggctcttcagctcca

SEQ ID NO: 2467577 - DNA, 25 bp, Homo sapien
ctgcagactcagcctcttggctctt

SEQ ID NO: 2467578 - DNA, 25 bp, Homo sapien
cagactcagcctcttggctcttcag

SEQ ID NO: 2467579 - DNA, 25 bp, Homo sapien
gacccaggtaatggtctcgctgctg

SEQ ID NO: 2467580 - DNA, 25 bp, Homo sapien
caggtgacccaggtaatggtctcgc

SEQ ID NO: 2467581 - DNA, 25 bp, Homo sapien
tgacccaggtaatggtctcgctgct

SEQ ID NO: 2467582 - DNA, 25 bp, Homo sapien
ggtgacccaggtaatggtctcgctg

SEQ ID NO: 2467583 - DNA, 25 bp, Homo sapien
tgagcaaatatccaccccaaaaggg

SEQ ID NO: 2467584 - DNA, 25 bp, Homo sapien
tcaaaagtcactgagcaaatatcca

SEQ ID NO: 2467585 - DNA, 25 bp, Homo sapien
ggggccagtccgcggagccatccat

SEQ ID NO: 2467586 - DNA, 25 bp, Homo sapien
acggccacgcactctttctcctggg

SEQ ID NO: 2467587 - DNA, 25 bp, Homo sapien
aagattcagcgttgccacggccacg

SEQ ID NO: 2467588 - DNA, 25 bp, Homo sapien
ctgaagtcggggaagattcagcgtt

SEQ ID NO: 2467589 - DNA, 25 bp, Homo sapien
tcagcacgtctgcgctgcttgccag

SEQ ID NO: 2467590 - DNA, 25 bp, Homo sapien
gcacgtctgcgctgcttgccagggt

SEQ ID NO: 2467591 - DNA, 25 bp, Homo sapien
gtgctcagcacgtctgcgctgcttg

SEQ ID NO: 2467592 - DNA, 25 bp, Homo sapien
acgtctgcgctgcttgccagggtca

SEQ ID NO: 2467593 - DNA, 25 bp, Homo sapien
ctgcttctcagcggtgggcaacagc

SEQ ID NO: 2467594 - DNA, 25 bp, Homo sapien
ggcctgcttctcagcggtgggcaac

SEQ ID NO: 2467595 - DNA, 25 bp, Homo sapien
gcttctcagcggtgggcaacagcat

SEQ ID NO: 2467596 - DNA, 25 bp, Homo sapien
cttctcagcggtgggcaacagcatg

SEQ ID NO: 2467597 - DNA, 25 bp, Homo sapien
atttgagtgaaacgccatcccctcc

SEQ ID NO: 2467598 - DNA, 25 bp, Homo sapien
caatttgagtgaaacgccatcccct

SEQ ID NO: 2467599 - DNA, 25 bp, Homo sapien
gccaatttgagtgaaacgccatccc

SEQ ID NO: 2467600 - DNA, 25 bp, Homo sapien
tgtgccaatttgagtgaaacgccat

SEQ ID NO: 2467601 - DNA, 25 bp, Homo sapien
aagatcaatcaccaatcgatgacct

SEQ ID NO: 2467602 - DNA, 25 bp, Homo sapien
tcaatcaccaatcgatgacctggac

SEQ ID NO: 2467603 - DNA, 25 bp, Homo sapien
gatcaatcaccaatcgatgacctgg

SEQ ID NO: 2467604 - DNA, 25 bp, Homo sapien
atcaatcaccaatcgatgacctgga

SEQ ID NO: 2467605 - DNA, 25 bp, Homo sapien
ggctgcgtgtaaggctgactccaac

SEQ ID NO: 2467606 - DNA, 25 bp, Homo sapien
gtgtaaggctgactccaaccctcca

SEQ ID NO: 2467607 - DNA, 25 bp, Homo sapien
agtaatggctgcgtgtaaggctgac

SEQ ID NO: 2467608 - DNA, 25 bp, Homo sapien
tctctgcagtaatggctgcgtgtaa

SEQ ID NO: 2467609 - DNA, 25 bp, Homo sapien
gcacaattgtggcagctctacacgg

SEQ ID NO: 2467610 - DNA, 25 bp, Homo sapien
ccaaagggagaacatatgttcacta

SEQ ID NO: 2467611 - DNA, 25 bp, Homo sapien
tgtatgtggtccctgcaacacagga

SEQ ID NO: 2467612 - DNA, 25 bp, Homo sapien
tctcattaccaggtgtgaaggcaca

SEQ ID NO: 2467613 - DNA, 25 bp, Homo sapien
tattaataaggcctttatccaatgg

SEQ ID NO: 2467614 - DNA, 25 bp, Homo sapien
tctatgaaatgttgaggcatttgct

SEQ ID NO: 2467615 - DNA, 25 bp, Homo sapien
taataaggcctttatccaatggagt

SEQ ID NO: 2467616 - DNA, 25 bp, Homo sapien
gcctttatccaatggagtcctcctt

SEQ ID NO: 2467617 - DNA, 25 bp, Homo sapien
agaagctgttgtatgagctgaacca

SEQ ID NO: 2467618 - DNA, 25 bp, Homo sapien
ccagaggcaaacactgtttgccaga

SEQ ID NO: 2467619 - DNA, 25 bp, Homo sapien
tgtatgagctgaaccagaggcaaac

SEQ ID NO: 2467620 - DNA, 25 bp, Homo sapien
tgttgtatgagctgaaccagaggca

SEQ ID NO: 2467621 - DNA, 25 bp, Homo sapien
aaagggtctgctctttatcctaaca

SEQ ID NO: 2467622 - DNA, 25 bp, Homo sapien
gagatccttgcgctagatttcacta

SEQ ID NO: 2467623 - DNA, 25 bp, Homo sapien
ccaaggttagcgtctgttcacaggc

SEQ ID NO: 2467624 - DNA, 25 bp, Homo sapien
taaagtgaggcaatgatagaaccag

SEQ ID NO: 2467625 - DNA, 25 bp, Homo sapien
acgcagcgaagacgaagacacagga

SEQ ID NO: 2467626 - DNA, 25 bp, Homo sapien
gtcacacgcagcgaagacgaagaca

SEQ ID NO: 2467627 - DNA, 25 bp, Homo sapien
aaccaaaaagtcacacgcagcgaag

SEQ ID NO: 2467628 - DNA, 25 bp, Homo sapien
aaagtcacacgcagcgaagacgaag

SEQ ID NO: 2467629 - DNA, 25 bp, Homo sapien
acagtgtctacccatgcaggagagg

SEQ ID NO: 2467630 - DNA, 25 bp, Homo sapien
tgagaaaacagtgtctacccatgca

SEQ ID NO: 2467631 - DNA, 25 bp, Homo sapien
aaataacgatctactctgaaataca

SEQ ID NO: 2467632 - DNA, 25 bp, Homo sapien
gagggacacatgatccatgctgatg

SEQ ID NO: 2467633 - DNA, 25 bp, Homo sapien
cttcactacatgataccctgcctgg

SEQ ID NO: 2467634 - DNA, 25 bp, Homo sapien
atcaccttcactacatgataccctg

SEQ ID NO: 2467635 - DNA, 25 bp, Homo sapien
cactacatgataccctgcctggata

SEQ ID NO: 2467636 - DNA, 25 bp, Homo sapien
atgataccctgcctggataacacca

SEQ ID NO: 2467637 - DNA, 25 bp, Homo sapien
agaagttaggtttgagggcatcctc

SEQ ID NO: 2467638 - DNA, 25 bp, Homo sapien
gcaacaatgctgttgacgtggagca

SEQ ID NO: 2467639 - DNA, 25 bp, Homo sapien
tggagcagacttcccatttgggatg

SEQ ID NO: 2467640 - DNA, 25 bp, Homo sapien
gggtctgaggaaggaaccaccttca

SEQ ID NO: 2467641 - DNA, 25 bp, Homo sapien
ctcttcgcccgtggaggagctccaa

SEQ ID NO: 2467642 - DNA, 25 bp, Homo sapien
ttcgcccgtggaggagctccaacag

SEQ ID NO: 2467643 - DNA, 25 bp, Homo sapien
gcccgtggaggagctccaacagcaa

SEQ ID NO: 2467644 - DNA, 25 bp, Homo sapien
cgtggaggagctccaacagcaaatc

SEQ ID NO: 2467645 - DNA, 25 bp, Homo sapien
ctgggtaaacacacagacatgctgg

SEQ ID NO: 2467646 - DNA, 25 bp, Homo sapien
gagagcgccgtctggatggagatga

SEQ ID NO: 2467647 - DNA, 25 bp, Homo sapien
atcagtttctgctcggcatgggcca

SEQ ID NO: 2467648 - DNA, 25 bp, Homo sapien
ggccagggagagcgccgtctggatg

SEQ ID NO: 2467649 - DNA, 25 bp, Homo sapien
tcagtttctgctcggcatgggccat

SEQ ID NO: 2467650 - DNA, 25 bp, Homo sapien
tgagcctgagccacaggtaccctct

SEQ ID NO: 2467651 - DNA, 25 bp, Homo sapien
ctgagcctgagccacaggtaccctc

SEQ ID NO: 2467652 - DNA, 25 bp, Homo sapien
cctgagccacaggtaccctctgcac

SEQ ID NO: 2467653 - DNA, 25 bp, Homo sapien
agcctgagccacaggtaccctctgc

SEQ ID NO: 2467654 - DNA, 25 bp, Homo sapien
agcctgtaaggtcacctgttgagca

SEQ ID NO: 2467655 - DNA, 25 bp, Homo sapien
ctgcaaagagtagggagcctgtaag

SEQ ID NO: 2467656 - DNA, 25 bp, Homo sapien
cctgtaaggtcacctgttgagcaag

SEQ ID NO: 2467657 - DNA, 25 bp, Homo sapien
caaagagtagggagcctgtaaggtc

SEQ ID NO: 2467658 - DNA, 25 bp, Homo sapien
tgtggtcctgcgcctacacctgggc

SEQ ID NO: 2467659 - DNA, 25 bp, Homo sapien
ccgcctgggtcagtagacgcttcac

SEQ ID NO: 2467660 - DNA, 25 bp, Homo sapien
ctgggtcagtagacgcttcactgcc

SEQ ID NO: 2467661 - DNA, 25 bp, Homo sapien
gcctgggtcagtagacgcttcactg

SEQ ID NO: 2467662 - DNA, 25 bp, Homo sapien
cagagctgcttccaggggaggggtt

SEQ ID NO: 2467663 - DNA, 25 bp, Homo sapien
tgcttccaggggaggggttctaatc

SEQ ID NO: 2467664 - DNA, 25 bp, Homo sapien
agctgcttccaggggaggggttcta

SEQ ID NO: 2467665 - DNA, 25 bp, Homo sapien
tcagagctgcttccaggggaggggt

SEQ ID NO: 2467666 - DNA, 25 bp, Homo sapien
ttcaccctcactagggcggcagctg

SEQ ID NO: 2467667 - DNA, 25 bp, Homo sapien
gctgggctcacccattaagcaagaa

SEQ ID NO: 2467668 - DNA, 25 bp, Homo sapien
tttcagaaatgtaactcgcctgccg

SEQ ID NO: 2467669 - DNA, 25 bp, Homo sapien
aatgtaactcgcctgccggttcacc

SEQ ID NO: 2467670 - DNA, 25 bp, Homo sapien
gcctcgactccaaatggttgaaaac

SEQ ID NO: 2467671 - DNA, 25 bp, Homo sapien
ggttgaaaacagatatacaggtggg

SEQ ID NO: 2467672 - DNA, 25 bp, Homo sapien
tacaggtggggtttgacatgtcttt

SEQ ID NO: 2467673 - DNA, 25 bp, Homo sapien
caggctcgcctcgactccaaatggt

SEQ ID NO: 2467674 - DNA, 25 bp, Homo sapien
aaacgatgggctccctgttatgtgt

SEQ ID NO: 2467675 - DNA, 25 bp, Homo sapien
acgatgggctccctgttatgtgtgt

SEQ ID NO: 2467676 - DNA, 25 bp, Homo sapien
atgggctccctgttatgtgtgtgta

SEQ ID NO: 2467677 - DNA, 25 bp, Homo sapien
taaaacgatgggctccctgttatgt

SEQ ID NO: 2467678 - DNA, 25 bp, Homo sapien
taagcgggattgctggaagcgggag

SEQ ID NO: 2467679 - DNA, 25 bp, Homo sapien
gccaagcagtctcccgtgggagtgc

SEQ ID NO: 2467680 - DNA, 25 bp, Homo sapien
cagccagggcgctccaagtaggaag

SEQ ID NO: 2467681 - DNA, 25 bp, Homo sapien
cctcgttgcgattggccgtacgcgg

SEQ ID NO: 2467682 - DNA, 25 bp, Homo sapien
gatagctatagttagtgtgagcgcc

SEQ ID NO: 2467683 - DNA, 25 bp, Homo sapien
tcgacccgcgccctggatagctata

SEQ ID NO: 2467684 - DNA, 25 bp, Homo sapien
cgcgccctggatagctatagttagt

SEQ ID NO: 2467685 - DNA, 25 bp, Homo sapien
gctatagttagtgtgagcgccacca

SEQ ID NO: 2467686 - DNA, 25 bp, Homo sapien
cacctgaacccggtaagtcaaggct

SEQ ID NO: 2467687 - DNA, 25 bp, Homo sapien
ctgcagtcccagctagtggcaaggc

SEQ ID NO: 2467688 - DNA, 25 bp, Homo sapien
gctgaggtggagaaccacctgaacc

SEQ ID NO: 2467689 - DNA, 25 bp, Homo sapien
caggtgtggttccatgtgcctgcag

SEQ ID NO: 2467690 - DNA, 25 bp, Homo sapien
ctggagcgctatggtgcgatctcag

SEQ ID NO: 2467691 - DNA, 25 bp, Homo sapien
gctggagcgctatggtgcgatctca

SEQ ID NO: 2467692 - DNA, 25 bp, Homo sapien
cacagcaactagtgaataatagcct

SEQ ID NO: 2467693 - DNA, 25 bp, Homo sapien
tacacaaactagaggcaccgtggtg

SEQ ID NO: 2467694 - DNA, 25 bp, Homo sapien
tctaactgcacccagaaatactgat

SEQ ID NO: 2467695 - DNA, 25 bp, Homo sapien
gtcttgggcatcaactctaataatt

SEQ ID NO: 2467696 - DNA, 25 bp, Homo sapien
tgagcaaatatccaccccaaaaggg

SEQ ID NO: 2467697 - DNA, 25 bp, Homo sapien
tcaaaagtcactgagcaaatatcca

SEQ ID NO: 2467698 - DNA, 25 bp, Homo sapien
tcagcacgtctgcgctgcttgccag

SEQ ID NO: 2467699 - DNA, 25 bp, Homo sapien
gcacgtctgcgctgcttgccagggt

SEQ ID NO: 2467700 - DNA, 25 bp, Homo sapien
gtgctcagcacgtctgcgctgcttg

SEQ ID NO: 2467701 - DNA, 25 bp, Homo sapien
acgtctgcgctgcttgccagggtca

SEQ ID NO: 2467702 - DNA, 25 bp, Homo sapien
ctgcttctcagcggtgggcaacagc

SEQ ID NO: 2467703 - DNA, 25 bp, Homo sapien
gcttctcagcggtgggcaacagcat

SEQ ID NO: 2467704 - DNA, 25 bp, Homo sapien
ggcctgcttctcagcggtgggcaac

SEQ ID NO: 2467705 - DNA, 25 bp, Homo sapien
cttctcagcggtgggcaacagcatg

SEQ ID NO: 2467706 - DNA, 25 bp, Homo sapien
atttgagtgaaacgccatcccctcc

SEQ ID NO: 2467707 - DNA, 25 bp, Homo sapien
gccaatttgagtgaaacgccatccc

SEQ ID NO: 2467708 - DNA, 25 bp, Homo sapien
caatttgagtgaaacgccatcccct

SEQ ID NO: 2467709 - DNA, 25 bp, Homo sapien
tgtgccaatttgagtgaaacgccat

SEQ ID NO: 2467710 - DNA, 25 bp, Homo sapien
aagatcaatcaccaatcgatgacct

SEQ ID NO: 2467711 - DNA, 25 bp, Homo sapien
tcaatcaccaatcgatgacctggac

SEQ ID NO: 2467712 - DNA, 25 bp, Homo sapien
gatcaatcaccaatcgatgacctgg

SEQ ID NO: 2467713 - DNA, 25 bp, Homo sapien
atcaatcaccaatcgatgacctgga

SEQ ID NO: 2467714 - DNA, 25 bp, Homo sapien
tatgaaatgttgaggcatttgcctc

SEQ ID NO: 2467715 - DNA, 25 bp, Homo sapien
aggcatttgcctcctgttcataaat

SEQ ID NO: 2467716 - DNA, 25 bp, Homo sapien
ttgcctcctgttcataaatttcttt

SEQ ID NO: 2467717 - DNA, 25 bp, Homo sapien
tctatgaaatgttgaggcatttgcc

SEQ ID NO: 2467718 - DNA, 25 bp, Homo sapien
agaagctgttgtatgagctgaacca

SEQ ID NO: 2467719 - DNA, 25 bp, Homo sapien
tgttgtatgagctgaaccagaggca

SEQ ID NO: 2467720 - DNA, 25 bp, Homo sapien
tgtatgagctgaaccagaggcaaac

SEQ ID NO: 2467721 - DNA, 25 bp, Homo sapien
ccagaggcaaacactgtttgccaga

SEQ ID NO: 2467722 - DNA, 25 bp, Homo sapien
catggccccatgaacaggccagctg

SEQ ID NO: 2467723 - DNA, 25 bp, Homo sapien
agggctccctggtctgtactcggct

SEQ ID NO: 2467724 - DNA, 25 bp, Homo sapien
gtactcggctgcctgacccaagctg

SEQ ID NO: 2467725 - DNA, 25 bp, Homo sapien
cctggtctgtactcggctgcctgac

SEQ ID NO: 2467726 - DNA, 25 bp, Homo sapien
tcagaatgttcttagtcgtattaat

SEQ ID NO: 2467727 - DNA, 25 bp, Homo sapien
gagccacaggtgcaattcagaatgt

SEQ ID NO: 2467728 - DNA, 25 bp, Homo sapien
gttcttagtcgtattaataaacatg

SEQ ID NO: 2467729 - DNA, 25 bp, Homo sapien
gtcgtattaataaacatggccaggt

SEQ ID NO: 2467730 - DNA, 25 bp, Homo sapien
gtcacacgcagcgaagacgaagaca

SEQ ID NO: 2467731 - DNA, 25 bp, Homo sapien
acgcagcgaagacgaagacacagga

SEQ ID NO: 2467732 - DNA, 25 bp, Homo sapien
aaccaaaaagtcacacgcagcgaag

SEQ ID NO: 2467733 - DNA, 25 bp, Homo sapien
aaagtcacacgcagcgaagacgaag

SEQ ID NO: 2467734 - DNA, 25 bp, Homo sapien
ctatgtttgtgtctattctttctat

SEQ ID NO: 2467735 - DNA, 25 bp, Homo sapien
aaataacgatctactctgaaatacg

SEQ ID NO: 2467736 - DNA, 25 bp, Homo sapien
gagggacacatgatccatgcttatg

SEQ ID NO: 2467737 - DNA, 25 bp, Homo sapien
tgagaaaacagtgtctacccatgcg

SEQ ID NO: 2467738 - DNA, 25 bp, Homo sapien
atcaccttcactacatgataccctg

SEQ ID NO: 2467739 - DNA, 25 bp, Homo sapien
cttcactacatgataccctgcctgg

SEQ ID NO: 2467740 - DNA, 25 bp, Homo sapien
atgataccctgcctggataacacca

SEQ ID NO: 2467741 - DNA, 25 bp, Homo sapien
cactacatgataccctgcctggata

SEQ ID NO: 2467742 - DNA, 25 bp, Homo sapien
agaagttaggtttgagggcatcctc

SEQ ID NO: 2467743 - DNA, 25 bp, Homo sapien
gcaacaatgctgttgacgtggagca

SEQ ID NO: 2467744 - DNA, 25 bp, Homo sapien
tggagcagacttcccatttgggatg

SEQ ID NO: 2467745 - DNA, 25 bp, Homo sapien
gggtctgaggaaggaaccaccttca

SEQ ID NO: 2467746 - DNA, 25 bp, Homo sapien
ctacacagcccaggttgccggctcc

SEQ ID NO: 2467747 - DNA, 25 bp, Homo sapien
gctggtggagacttctgatactgag

SEQ ID NO: 2467748 - DNA, 25 bp, Homo sapien
tctgcaacagccgtgctggtggaga

SEQ ID NO: 2467749 - DNA, 25 bp, Homo sapien
tctgtgcccactcttcaagaaagtc

SEQ ID NO: 2467750 - DNA, 25 bp, Homo sapien
tgcctattgcatccactttccaact

SEQ ID NO: 2467751 - DNA, 25 bp, Homo sapien
ctcgctgcctatctgagcagatgcg

SEQ ID NO: 2467752 - DNA, 25 bp, Homo sapien
tatctgagcagatgcgatattgggc

SEQ ID NO: 2467753 - DNA, 25 bp, Homo sapien
cgatattgggcaccttgtgaaacat

SEQ ID NO: 2467754 - DNA, 25 bp, Homo sapien
ctgggtaaacacacagacatgctgg

SEQ ID NO: 2467755 - DNA, 25 bp, Homo sapien
gagagcgccgtctggatggagatga

SEQ ID NO: 2467756 - DNA, 25 bp, Homo sapien
tcagtttctgctcggcatgggccat

SEQ ID NO: 2467757 - DNA, 25 bp, Homo sapien
ggccagggagagcgccgtctggatg

SEQ ID NO: 2467758 - DNA, 25 bp, Homo sapien
atcagtttctgctcggcatgggcca

SEQ ID NO: 2467759 - DNA, 25 bp, Homo sapien
gcctataaggtcacctgttgagcaa

SEQ ID NO: 2467760 - DNA, 25 bp, Homo sapien
ctgcaaagagtagggagcctataag

SEQ ID NO: 2467761 - DNA, 25 bp, Homo sapien
cctataaggtcacctgttgagcaag

SEQ ID NO: 2467762 - DNA, 25 bp, Homo sapien
caaagagtagggagcctataaggtc

SEQ ID NO: 2467763 - DNA, 25 bp, Homo sapien
tgtggtcctgcgcctacacctgggc

SEQ ID NO: 2467764 - DNA, 25 bp, Homo sapien
ctgggtcagtagacgcttcactgcc

SEQ ID NO: 2467765 - DNA, 25 bp, Homo sapien
gcctgggtcagtagacgcttcactg

SEQ ID NO: 2467766 - DNA, 25 bp, Homo sapien
ccgcctgggtcagtagacgcttcac

SEQ ID NO: 2467767 - DNA, 25 bp, Homo sapien
ctgtaggtttcacaggctgggtgtg

SEQ ID NO: 2467768 - DNA, 25 bp, Homo sapien
ggctgggtgtgtgggggccaccgtg

SEQ ID NO: 2467769 - DNA, 25 bp, Homo sapien
gtaggtttcacaggctgggtgtgtg

SEQ ID NO: 2467770 - DNA, 25 bp, Homo sapien
caggctgggtgtgtgggggccaccg

SEQ ID NO: 2467771 - DNA, 25 bp, Homo sapien
aagggggcggagcacacacaactct

SEQ ID NO: 2467772 - DNA, 25 bp, Homo sapien
ttcacccgtgcttcctcctgggaga

SEQ ID NO: 2467773 - DNA, 25 bp, Homo sapien
taatttggccaaagccttcttgagg

SEQ ID NO: 2467774 - DNA, 25 bp, Homo sapien
gagggagccgctcattaatttggcc

SEQ ID NO: 2467775 - DNA, 25 bp, Homo sapien
cacccattaagcaagaagccaatag

SEQ ID NO: 2467776 - DNA, 25 bp, Homo sapien
gacagtgacactcagaccccaggct

SEQ ID NO: 2467777 - DNA, 25 bp, Homo sapien
gaagccaatagctggacagtgacac

SEQ ID NO: 2467778 - DNA, 25 bp, Homo sapien
gctgggcgagcctggctgaaagccc

SEQ ID NO: 2467779 - DNA, 25 bp, Homo sapien
ttcaccctcactagggcggcagctg

SEQ ID NO: 2467780 - DNA, 25 bp, Homo sapien
aatgtaactcgcctgccggttcacc

SEQ ID NO: 2467781 - DNA, 25 bp, Homo sapien
tttcagaaatgtaactcgcctgccg

SEQ ID NO: 2467782 - DNA, 25 bp, Homo sapien
tgccggttcaccctcactagggcgg

SEQ ID NO: 2467783 - DNA, 25 bp, Homo sapien
cagcaaaatcccaccaagcactgat

SEQ ID NO: 2467784 - DNA, 25 bp, Homo sapien
tcagcaaaatcccaccaagcactga

SEQ ID NO: 2467785 - DNA, 25 bp, Homo sapien
ggctgctgccaatttactttgtcga

SEQ ID NO: 2467786 - DNA, 25 bp, Homo sapien
ctgccaatttactttgtcgagtttc

SEQ ID NO: 2467787 - DNA, 25 bp, Homo sapien
ttactttgtcgagtttcttctgcca

SEQ ID NO: 2467788 - DNA, 25 bp, Homo sapien
tttactttgtcgagtttcttctgcc

SEQ ID NO: 2467789 - DNA, 25 bp, Homo sapien
tatggctgggttgggggtccgtgac

SEQ ID NO: 2467790 - DNA, 25 bp, Homo sapien
ctatggctgggttgggggtccgtga

SEQ ID NO: 2467791 - DNA, 25 bp, Homo sapien
ctggcagcagtcttgtcgttggaga

SEQ ID NO: 2467792 - DNA, 25 bp, Homo sapien
tctggcagcagtcttgtcgttggag

SEQ ID NO: 2467793 - DNA, 25 bp, Homo sapien
ctctggcagcagtcttgtcgttgga

SEQ ID NO: 2467794 - DNA, 25 bp, Homo sapien
actctggcagcagtcttgtcgttgg

SEQ ID NO: 2467795 - DNA, 25 bp, Homo sapien
accagaagtggctgtctcatggatg

SEQ ID NO: 2467796 - DNA, 25 bp, Homo sapien
aacaccagggctgtttctctgccaa

SEQ ID NO: 2467797 - DNA, 25 bp, Homo sapien
agaagtggctgtctcatggatgctg

SEQ ID NO: 2467798 - DNA, 25 bp, Homo sapien
acaccagggctgtttctctgccaat

SEQ ID NO: 2467799 - DNA, 25 bp, Homo sapien
atgatgtagggctctccccgtggat

SEQ ID NO: 2467800 - DNA, 25 bp, Homo sapien
tagggctctccccgtggatacctgt

SEQ ID NO: 2467801 - DNA, 25 bp, Homo sapien
atgtagggctctccccgtggatacc

SEQ ID NO: 2467802 - DNA, 25 bp, Homo sapien
agggctctccccgtggatacctgtt

SEQ ID NO: 2467803 - DNA, 25 bp, Homo sapien
gagggctggcctgcagggtcactgc

SEQ ID NO: 2467804 - DNA, 25 bp, Homo sapien
aggaggttggagggctggcctgcag

SEQ ID NO: 2467805 - DNA, 25 bp, Homo sapien
ggctggcctgcagggtcactgcacc

SEQ ID NO: 2467806 - DNA, 25 bp, Homo sapien
gaggaggttggagggctggcctgca

SEQ ID NO: 2467807 - DNA, 25 bp, Homo sapien
gactgacttttacggacctcgagtc

SEQ ID NO: 2467808 - DNA, 25 bp, Homo sapien
tgactgacttttacggacctcgagt

SEQ ID NO: 2467809 - DNA, 25 bp, Homo sapien
ctgacttttacggacctcgagtctg

SEQ ID NO: 2467810 - DNA, 25 bp, Homo sapien
tgacttttacggacctcgagtctgg

SEQ ID NO: 2467811 - DNA, 25 bp, Homo sapien
ggttcttcacagaagatttagggcg

SEQ ID NO: 2467812 - DNA, 25 bp, Homo sapien
acatttactgagcacgtacgggcca

SEQ ID NO: 2467813 - DNA, 25 bp, Homo sapien
tactgagcacgtacgggccaagtac

SEQ ID NO: 2467814 - DNA, 25 bp, Homo sapien
cacagaagatttagggcggaaaagg

SEQ ID NO: 2467815 - DNA, 25 bp, Homo sapien
tgttccacttgtttattctgttgtt

SEQ ID NO: 2467816 - DNA, 25 bp, Homo sapien
ccagctgatgttccacttgtttatt

SEQ ID NO: 2467817 - DNA, 25 bp, Homo sapien
ctgatgttccacttgtttattctgt

SEQ ID NO: 2467818 - DNA, 25 bp, Homo sapien
cagctgatgttccacttgtttattc

SEQ ID NO: 2467819 - DNA, 25 bp, Homo sapien
tggtactgcaagagacatgtcccca

SEQ ID NO: 2467820 - DNA, 25 bp, Homo sapien
gagatggtactgcaagagacatgtc

SEQ ID NO: 2467821 - DNA, 25 bp, Homo sapien
gatggtactgcaagagacatgtccc

SEQ ID NO: 2467822 - DNA, 25 bp, Homo sapien
atggtactgcaagagacatgtcccc

SEQ ID NO: 2467823 - DNA, 25 bp, Homo sapien
ctctagctccctttcggctttctgt

SEQ ID NO: 2467824 - DNA, 25 bp, Homo sapien
ctccctttcggctttctgtttctcg

SEQ ID NO: 2467825 - DNA, 25 bp, Homo sapien
ctagctccctttcggctttctgttt

SEQ ID NO: 2467826 - DNA, 25 bp, Homo sapien
ctgtttctcgttgtttgctttcttt

SEQ ID NO: 2467827 - DNA, 25 bp, Homo sapien
tcaaagtatctgagagaacgtttcg

SEQ ID NO: 2467828 - DNA, 25 bp, Homo sapien
cctttctgtatgttcaatctctgga

SEQ ID NO: 2467829 - DNA, 25 bp, Homo sapien
ccctttctgtatgttcaatctctgg

SEQ ID NO: 2467830 - DNA, 25 bp, Homo sapien
cgtttcgtgtggtacaggtccgtat

SEQ ID NO: 2467831 - DNA, 25 bp, Homo sapien
agttgagatggggcccaaaggactc

SEQ ID NO: 2467832 - DNA, 25 bp, Homo sapien
atgagagagttgagatggggcccaa

SEQ ID NO: 2467833 - DNA, 25 bp, Homo sapien
tgagatggggcccaaaggactcccc

SEQ ID NO: 2467834 - DNA, 25 bp, Homo sapien
gagagagttgagatggggcccaaag

SEQ ID NO: 2467835 - DNA, 25 bp, Homo sapien
tgttgcagacggacggccagatcct

SEQ ID NO: 2467836 - DNA, 25 bp, Homo sapien
caatgaatgttgcagacggacggcc

SEQ ID NO: 2467837 - DNA, 25 bp, Homo sapien
aatgaatgttgcagacggacggcca

SEQ ID NO: 2467838 - DNA, 25 bp, Homo sapien
gaatgttgcagacggacggccagat

SEQ ID NO: 2467839 - DNA, 25 bp, Homo sapien
tctgtgtggcggtgacagcagagag

SEQ ID NO: 2467840 - DNA, 25 bp, Homo sapien
gagcccgctctaactctcctttacg

SEQ ID NO: 2467841 - DNA, 25 bp, Homo sapien
ttcttctgtgtggcggtgacagcag

SEQ ID NO: 2467842 - DNA, 25 bp, Homo sapien
tcttctgtgtggcggtgacagcaga

SEQ ID NO: 2467843 - DNA, 25 bp, Homo sapien
tgactcagtcccaagctgccgctaa

SEQ ID NO: 2467844 - DNA, 25 bp, Homo sapien
gctaacaaccatacaaaaaagcagt

SEQ ID NO: 2467845 - DNA, 25 bp, Homo sapien
caagctgccgctaacaaccatacaa

SEQ ID NO: 2467846 - DNA, 25 bp, Homo sapien
tgccgctaacaaccatacaaaaaag

SEQ ID NO: 2467847 - DNA, 25 bp, Homo sapien
atacgtgctttactgcggctggaga

SEQ ID NO: 2467848 - DNA, 25 bp, Homo sapien
ttccactccatacgtgctttactgc

SEQ ID NO: 2467849 - DNA, 25 bp, Homo sapien
cagctgcgctttcagcagtgcctgc

SEQ ID NO: 2467850 - DNA, 25 bp, Homo sapien
tccatacgtgctttactgcggctgg

SEQ ID NO: 2467851 - DNA, 25 bp, Homo sapien
tttagatgttcagcatattcatccc

SEQ ID NO: 2467852 - DNA, 25 bp, Homo sapien
ccctctctagctggacttctttaag

SEQ ID NO: 2467853 - DNA, 25 bp, Homo sapien
ggacttctttaagtgactccttcaa

SEQ ID NO: 2467854 - DNA, 25 bp, Homo sapien
tagatgttcagcatattcatccctc

SEQ ID NO: 2467855 - DNA, 25 bp, Homo sapien
tgacctatctaatgtgggggggctg

SEQ ID NO: 2467856 - DNA, 25 bp, Homo sapien
agtgacctatctaatgtgggggggc

SEQ ID NO: 2467857 - DNA, 25 bp, Homo sapien
tccagtgacctatctaatgtggggg

SEQ ID NO: 2467858 - DNA, 25 bp, Homo sapien
acctatctaatgtgggggggctgaa

SEQ ID NO: 2467859 - DNA, 25 bp, Homo sapien
ctctacccgatatttatcatgcttc

SEQ ID NO: 2467860 - DNA, 25 bp, Homo sapien
tctctacccgatatttatcatgctt

SEQ ID NO: 2467861 - DNA, 25 bp, Homo sapien
ctgggcctggagctctcctgccact

SEQ ID NO: 2467862 - DNA, 25 bp, Homo sapien
tgggggctccgggggcagaggttca

SEQ ID NO: 2467863 - DNA, 25 bp, Homo sapien
gagctctcctgccactctctctagt

SEQ ID NO: 2467864 - DNA, 25 bp, Homo sapien
ctctagttccttcctcaggtgctgc

SEQ ID NO: 2467865 - DNA, 25 bp, Homo sapien
ttgaagctgttctgtggctcggcca

SEQ ID NO: 2467866 - DNA, 25 bp, Homo sapien
tgctccaactgtagtacgctcttgt

SEQ ID NO: 2467867 - DNA, 25 bp, Homo sapien
ccaactgtagtacgctcttgttctc

SEQ ID NO: 2467868 - DNA, 25 bp, Homo sapien
aactgtagtacgctcttgttctcat

SEQ ID NO: 2467869 - DNA, 25 bp, Homo sapien
ctccaactgtagtacgctcttgttc

SEQ ID NO: 2467870 - DNA, 25 bp, Homo sapien
ccagaccttcttggatggggtggag

SEQ ID NO: 2467871 - DNA, 25 bp, Homo sapien
ctcccagaccttcttggatggggtg

SEQ ID NO: 2467872 - DNA, 25 bp, Homo sapien
agaccttcttggatggggtggaggt

SEQ ID NO: 2467873 - DNA, 25 bp, Homo sapien
cccagaccttcttggatggggtgga

SEQ ID NO: 2467874 - DNA, 25 bp, Homo sapien
gtgacccaggtaatggtctggctgc

SEQ ID NO: 2467875 - DNA, 25 bp, Homo sapien
tgacccaggtaatggtctggctgct

SEQ ID NO: 2467876 - DNA, 25 bp, Homo sapien
tgcaggtgacccaggtaatggtctg

SEQ ID NO: 2467877 - DNA, 25 bp, Homo sapien
caggtgacccaggtaatggtctggc

SEQ ID NO: 2467878 - DNA, 25 bp, Homo sapien
ctgctgctgataggtggccacgtac

SEQ ID NO: 2467879 - DNA, 25 bp, Homo sapien
gggtctcctgcaacttttggcaggc

SEQ ID NO: 2467880 - DNA, 25 bp, Homo sapien
agccccatcctcggcagctccctcc

SEQ ID NO: 2467881 - DNA, 25 bp, Homo sapien
ctgctgctgcaactggttcattagc

SEQ ID NO: 2467882 - DNA, 25 bp, Homo sapien
ttttggcaggccatctcggccaccg

SEQ ID NO: 2467883 - DNA, 25 bp, Homo sapien
gctggctggcagcttccagacgctc

SEQ ID NO: 2467884 - DNA, 25 bp, Homo sapien
gctcaactgggccgttagctgctgg

SEQ ID NO: 2467885 - DNA, 25 bp, Homo sapien
caactgggccgttagctgctggttc

SEQ ID NO: 2467886 - DNA, 25 bp, Homo sapien
aggctcaactgggccgttagctgct

SEQ ID NO: 2467887 - DNA, 25 bp, Homo sapien
gcacattcccactactggtcggtgc

SEQ ID NO: 2467888 - DNA, 25 bp, Homo sapien
tagtgcaggcacccggttagtataa

SEQ ID NO: 2467889 - DNA, 25 bp, Homo sapien
cattcccactactggtcggtgcggg

SEQ ID NO: 2467890 - DNA, 25 bp, Homo sapien
ttagtgcaggcacccggttagtata

SEQ ID NO: 2467891 - DNA, 25 bp, Homo sapien
ggatgctaggaatgggccgaggtgc

SEQ ID NO: 2467892 - DNA, 25 bp, Homo sapien
tttcacctgctcttgtaactgtgcc

SEQ ID NO: 2467893 - DNA, 25 bp, Homo sapien
cctgctcttgtaactgtgcctgctt

SEQ ID NO: 2467894 - DNA, 25 bp, Homo sapien
gcctgcttctcctgggcactagctc

SEQ ID NO: 2467895 - DNA, 25 bp, Homo sapien
gctctttcacctgctcttgtaactg

SEQ ID NO: 2467896 - DNA, 25 bp, Homo sapien
ctgccctcaggtggcattttcaagt

SEQ ID NO: 2467897 - DNA, 25 bp, Homo sapien
aggtctgccttctcctccaggtggt

SEQ ID NO: 2467898 - DNA, 25 bp, Homo sapien
tctcctccaggtggtccataaagcc

SEQ ID NO: 2467899 - DNA, 25 bp, Homo sapien
ggtctgccttctcctccaggtggtc

SEQ ID NO: 2467900 - DNA, 25 bp, Homo sapien
cctccaggtggtccataaagccgct

SEQ ID NO: 2467901 - DNA, 25 bp, Homo sapien
catctctctctgtagtactggaaga

SEQ ID NO: 2467902 - DNA, 25 bp, Homo sapien
ggcatctctctctgtagtactggaa

SEQ ID NO: 2467903 - DNA, 25 bp, Homo sapien
atggcatctctctctgtagtactgg

SEQ ID NO: 2467904 - DNA, 25 bp, Homo sapien
tctctctgtagtactggaagaatcc

SEQ ID NO: 2467905 - DNA, 25 bp, Homo sapien
ctggctttgttatagggtgataaac

SEQ ID NO: 2467906 - DNA, 25 bp, Homo sapien
gccccctggctttgttatagggtga

SEQ ID NO: 2467907 - DNA, 25 bp, Homo sapien
ctgccccctggctttgttatagggt

SEQ ID NO: 2467908 - DNA, 25 bp, Homo sapien
cccctggctttgttatagggtgata

SEQ ID NO: 2467909 - DNA, 25 bp, Homo sapien
ctgtccagggccagcctgatggtgt

SEQ ID NO: 2467910 - DNA, 25 bp, Homo sapien
catctcctccctgtccagggccagc

SEQ ID NO: 2467911 - DNA, 25 bp, Homo sapien
tccctgtccagggccagcctgatgg

SEQ ID NO: 2467912 - DNA, 25 bp, Homo sapien
tcatctcctccctgtccagggccag

SEQ ID NO: 2467913 - DNA, 25 bp, Homo sapien
gggtgctcagctgtcacgctgctgc

SEQ ID NO: 2467914 - DNA, 25 bp, Homo sapien
tgctgccagcgctcaccgtcacagc

SEQ ID NO: 2467915 - DNA, 25 bp, Homo sapien
ctgtcacgctgctgccagcgctcac

SEQ ID NO: 2467916 - DNA, 25 bp, Homo sapien
ccccgcagagatgttgcacactcta

SEQ ID NO: 2467917 - DNA, 25 bp, Homo sapien
tctcctgcagctccagcagcttcac

SEQ ID NO: 2467918 - DNA, 25 bp, Homo sapien
cagctgcaacaccatctcctgcagc

SEQ ID NO: 2467919 - DNA, 25 bp, Homo sapien
catctcctgcagctccagcagcttc

SEQ ID NO: 2467920 - DNA, 25 bp, Homo sapien
accatctcctgcagctccagcagct

SEQ ID NO: 2467921 - DNA, 25 bp, Homo sapien
aatttgctgtgtcccttgtagtcgc

SEQ ID NO: 2467922 - DNA, 25 bp, Homo sapien
agaatttgctgtgtcccttgtagtc

SEQ ID NO: 2467923 - DNA, 25 bp, Homo sapien
caagaatttgctgtgtcccttgtag

SEQ ID NO: 2467924 - DNA, 25 bp, Homo sapien
ttgctgtgtcccttgtagtcgccac

SEQ ID NO: 2467925 - DNA, 25 bp, Homo sapien
ggactgggctcatgagcagggttct

SEQ ID NO: 2467926 - DNA, 25 bp, Homo sapien
atgcttgtgggcagccccaagctcc

SEQ ID NO: 2467927 - DNA, 25 bp, Homo sapien
tcctggactgggctcatgagcaggg

SEQ ID NO: 2467928 - DNA, 25 bp, Homo sapien
ggctcctggactgggctcatgagca

SEQ ID NO: 2467929 - DNA, 25 bp, Homo sapien
tctccttgcacaggctccacgctgt

SEQ ID NO: 2467930 - DNA, 25 bp, Homo sapien
tccttgcacaggctccacgctgtca

SEQ ID NO: 2467931 - DNA, 25 bp, Homo sapien
tggcctctccttgcacaggctccac

SEQ ID NO: 2467932 - DNA, 25 bp, Homo sapien
cctctccttgcacaggctccacgct

SEQ ID NO: 2467933 - DNA, 25 bp, Homo sapien
taagtgaaacccagaggtacagaaa

SEQ ID NO: 2467934 - DNA, 25 bp, Homo sapien
aaatatgcccgtaagtgaaacccag

SEQ ID NO: 2467935 - DNA, 25 bp, Homo sapien
tatgcccgtaagtgaaacccagagg

SEQ ID NO: 2467936 - DNA, 25 bp, Homo sapien
tgcacaaaatatgcccgtaagtgaa

SEQ ID NO: 2467937 - DNA, 25 bp, Homo sapien
taaaagtatcatgaggatgccaaat

SEQ ID NO: 2467938 - DNA, 25 bp, Homo sapien
tgttaatgtcgtatttataaaagta

SEQ ID NO: 2467939 - DNA, 25 bp, Homo sapien
ttataaaagtatcatgaggatgcca

SEQ ID NO: 2467940 - DNA, 25 bp, Homo sapien
ctgttaatgtcgtatttataaaagt

SEQ ID NO: 2467941 - DNA, 25 bp, Homo sapien
aagtcacaaggacccgatgtttgca

SEQ ID NO: 2467942 - DNA, 25 bp, Homo sapien
gttgaagtcacaaggacccgatgtt

SEQ ID NO: 2467943 - DNA, 25 bp, Homo sapien
ccgttgaagtcacaaggacccgatg

SEQ ID NO: 2467944 - DNA, 25 bp, Homo sapien
tgaagtcacaaggacccgatgtttg

SEQ ID NO: 2467945 - DNA, 25 bp, Homo sapien
tttacattccgcttacaagaattca

SEQ ID NO: 2467946 - DNA, 25 bp, Homo sapien
ttttacattccgcttacaagaattc

SEQ ID NO: 2467947 - DNA, 25 bp, Homo sapien
gctccaacgccccagagcagcgccg

SEQ ID NO: 2467948 - DNA, 25 bp, Homo sapien
agctgccgggcccaagcccacagcc

SEQ ID NO: 2467949 - DNA, 25 bp, Homo sapien
gcgtggccccccgagccgcccagac

SEQ ID NO: 2467950 - DNA, 25 bp, Homo sapien
ccacagccccgggagccgtccgagg

SEQ ID NO: 2467951 - DNA, 25 bp, Homo sapien
gaaatccaaccgcagctgccagcct

SEQ ID NO: 2467952 - DNA, 25 bp, Homo sapien
ggagaaatccaaccgcagctgccag

SEQ ID NO: 2467953 - DNA, 25 bp, Homo sapien
cggagaaatccaaccgcagctgcca

SEQ ID NO: 2467954 - DNA, 25 bp, Homo sapien
gagaaatccaaccgcagctgccagc

SEQ ID NO: 2467955 - DNA, 25 bp, Homo sapien
acgaatggcattggcggcagcacca

SEQ ID NO: 2467956 - DNA, 25 bp, Homo sapien
tgaagtttgcatgaggtagacacga

SEQ ID NO: 2467957 - DNA, 25 bp, Homo sapien
tgaggtagacacgaatggcattggc

SEQ ID NO: 2467958 - DNA, 25 bp, Homo sapien
cagaggcgggtcaggttgtcgctgt

SEQ ID NO: 2467959 - DNA, 25 bp, Homo sapien
ggttaatcaattcccctgtgccagc

SEQ ID NO: 2467960 - DNA, 25 bp, Homo sapien
cccgattaggtgagacacaaaacat

SEQ ID NO: 2467961 - DNA, 25 bp, Homo sapien
ctttggtcagtttccgtagatatcg

SEQ ID NO: 2467962 - DNA, 25 bp, Homo sapien
ctttcccaaaagctcgaacagttct

SEQ ID NO: 2467963 - DNA, 25 bp, Homo sapien
ttcccaaaagctcgaacagttctta

SEQ ID NO: 2467964 - DNA, 25 bp, Homo sapien
tctttcccaaaagctcgaacagttc

SEQ ID NO: 2467965 - DNA, 25 bp, Homo sapien
gaagcttttctcatttaagataacc

SEQ ID NO: 2467966 - DNA, 25 bp, Homo sapien
ggaagcttttctcatttaagataac

SEQ ID NO: 2467967 - DNA, 25 bp, Homo sapien
agcttttctcatttaagataaccct

SEQ ID NO: 2467968 - DNA, 25 bp, Homo sapien
ctggaagcttttctcatttaagata

SEQ ID NO: 2467969 - DNA, 25 bp, Homo sapien
gggcaagcgggatcggcaaaatgca

SEQ ID NO: 2467970 - DNA, 25 bp, Homo sapien
aagcgggatcggcaaaatgcacgtt

SEQ ID NO: 2467971 - DNA, 25 bp, Homo sapien
caagcgggatcggcaaaatgcacgt

SEQ ID NO: 2467972 - DNA, 25 bp, Homo sapien
ggcaagcgggatcggcaaaatgcac

SEQ ID NO: 2467973 - DNA, 25 bp, Homo sapien
gacggatgtcatggccatcaagact

SEQ ID NO: 2467974 - DNA, 25 bp, Homo sapien
gctgacggatgtcatggccatcaag

SEQ ID NO: 2467975 - DNA, 25 bp, Homo sapien
gtttagctgacggatgtcatggcca

SEQ ID NO: 2467976 - DNA, 25 bp, Homo sapien
tagctgacggatgtcatggccatca

SEQ ID NO: 2467977 - DNA, 25 bp, Homo sapien
aattccggatcaagaccactgcatt

SEQ ID NO: 2467978 - DNA, 25 bp, Homo sapien
tccggatcaagaccactgcattggc

SEQ ID NO: 2467979 - DNA, 25 bp, Homo sapien
gggaaattccggatcaagaccactg

SEQ ID NO: 2467980 - DNA, 25 bp, Homo sapien
cggatcaagaccactgcattggcca

SEQ ID NO: 2467981 - DNA, 25 bp, Homo sapien
ctgagaggagaacacccttttctcc

SEQ ID NO: 2467982 - DNA, 25 bp, Homo sapien
gcagagcacgggcaattgcaatccg

SEQ ID NO: 2467983 - DNA, 25 bp, Homo sapien
gagcacgggcaattgcaatccgctg

SEQ ID NO: 2467984 - DNA, 25 bp, Homo sapien
cacgggcaattgcaatccgctgttt

SEQ ID NO: 2467985 - DNA, 25 bp, Homo sapien
ggcaattgcaatccgctgtttctgc

SEQ ID NO: 2467986 - DNA, 25 bp, Homo sapien
ggttgcttcactaggagaagaactt

SEQ ID NO: 2467987 - DNA, 25 bp, Homo sapien
tgcttcactaggagaagaactttgg

SEQ ID NO: 2467988 - DNA, 25 bp, Homo sapien
ctggttgcttcactaggagaagaac

SEQ ID NO: 2467989 - DNA, 25 bp, Homo sapien
cttcactaggagaagaactttggga

SEQ ID NO: 2467990 - DNA, 25 bp, Homo sapien
gagcttcttgaacaaggtactcatt

SEQ ID NO: 2467991 - DNA, 25 bp, Homo sapien
ttcattagttttctgtatatcccat

SEQ ID NO: 2467992 - DNA, 25 bp, Homo sapien
gcaaccatattagcattcttaatgg

SEQ ID NO: 2467993 - DNA, 25 bp, Homo sapien
caagaacagcaaccatattagcatt

SEQ ID NO: 2467994 - DNA, 25 bp, Homo sapien
ctgtatatcccatttggttttgaaa

SEQ ID NO: 2467995 - DNA, 25 bp, Homo sapien
taaaactctgaataaaaagatcttg

SEQ ID NO: 2467996 - DNA, 25 bp, Homo sapien
aagaaaatgaggtgccatgctatat

SEQ ID NO: 2467997 - DNA, 25 bp, Homo sapien
ttccagctgatgttaaatagttagg

SEQ ID NO: 2467998 - DNA, 25 bp, Homo sapien
taggtttgcttcatgagattatcgg

SEQ ID NO: 2467999 - DNA, 25 bp, Homo sapien
tctgtcgattttgttgaagggaaac

SEQ ID NO: 2468000 - DNA, 25 bp, Homo sapien
gacagagcatcaggttcgtttctat

SEQ ID NO: 2468001 - DNA, 25 bp, Homo sapien
ggcactatcgcttctgacatttggg

SEQ ID NO: 2468002 - DNA, 25 bp, Homo sapien
ctggcctgaagggaaataacatcga

SEQ ID NO: 2468003 - DNA, 25 bp, Homo sapien
tatcaataatctgatttatcacagg

SEQ ID NO: 2468004 - DNA, 25 bp, Homo sapien
ttatcaataatctgatttatcacag

SEQ ID NO: 2468005 - DNA, 25 bp, Homo sapien
ccgcaccggcctcccgggggctgca

SEQ ID NO: 2468006 - DNA, 25 bp, Homo sapien
cgcaccggcctcccgggggctgcat

SEQ ID NO: 2468007 - DNA, 25 bp, Homo sapien
cggccggacttcagcaataaggcgg

SEQ ID NO: 2468008 - DNA, 25 bp, Homo sapien
ccctcccgcagaatccagaaggtgt

SEQ ID NO: 2468009 - DNA, 25 bp, Homo sapien
tgctcattatccacggcacgaaaga

SEQ ID NO: 2468010 - DNA, 25 bp, Homo sapien
attatccacggcacgaaagacgagg

SEQ ID NO: 2468011 - DNA, 25 bp, Homo sapien
cgcagaatccagaaggtgtccaaga

SEQ ID NO: 2468012 - DNA, 25 bp, Homo sapien
ttggacctgagcgtcgccttcccga

SEQ ID NO: 2468013 - DNA, 25 bp, Homo sapien
ccttggacctgagcgtcgccttccc

SEQ ID NO: 2468014 - DNA, 25 bp, Homo sapien
accttggacctgagcgtcgccttcc

SEQ ID NO: 2468015 - DNA, 25 bp, Homo sapien
tcaccttggacctgagcgtcgcctt

SEQ ID NO: 2468016 - DNA, 25 bp, Homo sapien
ccagtgcaccaggaacggctttcta

SEQ ID NO: 2468017 - DNA, 25 bp, Homo sapien
ggccagtgcaccaggaacggctttc

SEQ ID NO: 2468018 - DNA, 25 bp, Homo sapien
cagtgcaccaggaacggctttctaa

SEQ ID NO: 2468019 - DNA, 25 bp, Homo sapien
agtgcaccaggaacggctttctaac

SEQ ID NO: 2468020 - DNA, 25 bp, Homo sapien
cgatgttgacctgggttgggctggc

SEQ ID NO: 2468021 - DNA, 25 bp, Homo sapien
ctcgatgttgacctgggttgggctg

SEQ ID NO: 2468022 - DNA, 25 bp, Homo sapien
cctcgatgttgacctgggttgggct

SEQ ID NO: 2468023 - DNA, 25 bp, Homo sapien
atgttgacctgggttgggctggcac

SEQ ID NO: 2468024 - DNA, 25 bp, Homo sapien
ctggtgggaggaggtgctgcccccg

SEQ ID NO: 2468025 - DNA, 25 bp, Homo sapien
tgggaggaggtgctgcccccgcagc

SEQ ID NO: 2468026 - DNA, 25 bp, Homo sapien
ggaggaggtgctgcccccgcagccg

SEQ ID NO: 2468027 - DNA, 25 bp, Homo sapien
gaggtgctgcccccgcagccgccac

SEQ ID NO: 2468028 - DNA, 25 bp, Homo sapien
tgaggtggccgaggacttgtccact

SEQ ID NO: 2468029 - DNA, 25 bp, Homo sapien
gccgaggacttgtccactcccaagg

SEQ ID NO: 2468030 - DNA, 25 bp, Homo sapien
aggtggccgaggacttgtccactcc

SEQ ID NO: 2468031 - DNA, 25 bp, Homo sapien
tggccgaggacttgtccactcccaa

SEQ ID NO: 2468032 - DNA, 25 bp, Homo sapien
agagttctggggttgcggcatcgac

SEQ ID NO: 2468033 - DNA, 25 bp, Homo sapien
ttgcggcatcgacagggtggcaggt

SEQ ID NO: 2468034 - DNA, 25 bp, Homo sapien
gaggagagttctggggttgcggcat

SEQ ID NO: 2468035 - DNA, 25 bp, Homo sapien
gggttgcggcatcgacagggtggca

SEQ ID NO: 2468036 - DNA, 25 bp, Homo sapien
gagggggaggccagatcgcgctcag

SEQ ID NO: 2468037 - DNA, 25 bp, Homo sapien
agatcgcgctcagggcctccactga

SEQ ID NO: 2468038 - DNA, 25 bp, Homo sapien
ggccagatcgcgctcagggcctcca

SEQ ID NO: 2468039 - DNA, 25 bp, Homo sapien
gggaggccagatcgcgctcagggcc

SEQ ID NO: 2468040 - DNA, 25 bp, Homo sapien
tgggcacaccggagaggggaccagg

SEQ ID NO: 2468041 - DNA, 25 bp, Homo sapien
ggcacaccggagaggggaccaggcc

SEQ ID NO: 2468042 - DNA, 25 bp, Homo sapien
ctgggcacaccggagaggggaccag

SEQ ID NO: 2468043 - DNA, 25 bp, Homo sapien
cacaccggagaggggaccaggccgg

SEQ ID NO: 2468044 - DNA, 25 bp, Homo sapien
ctgcgcaccaggtgagggcgacccc

SEQ ID NO: 2468045 - DNA, 25 bp, Homo sapien
gtgagggcgaccccgggggcagctc

SEQ ID NO: 2468046 - DNA, 25 bp, Homo sapien
caggtgagggcgaccccgggggcag

SEQ ID NO: 2468047 - DNA, 25 bp, Homo sapien
agggcgaccccgggggcagctcagc

SEQ ID NO: 2468048 - DNA, 25 bp, Homo sapien
cagctgaattgcgtctgaccagcgg

SEQ ID NO: 2468049 - DNA, 25 bp, Homo sapien
tgcgtctgaccagcggtgcatgaac

SEQ ID NO: 2468050 - DNA, 25 bp, Homo sapien
gaattgcgtctgaccagcggtgcat

SEQ ID NO: 2468051 - DNA, 25 bp, Homo sapien
ctacatcagctgaattgcgtctgac

SEQ ID NO: 2468052 - DNA, 25 bp, Homo sapien
gggcgggcgccaggacatggagcct

SEQ ID NO: 2468053 - DNA, 25 bp, Homo sapien
ctggaagcccccgccgggtccatgg

SEQ ID NO: 2468054 - DNA, 25 bp, Homo sapien
gccggcgtaatggctgagcccagcc

SEQ ID NO: 2468055 - DNA, 25 bp, Homo sapien
tgggcgggcgggcgccaggacatgg

SEQ ID NO: 2468056 - DNA, 25 bp, Homo sapien
ctgaattcggtcacccctggcggcg

SEQ ID NO: 2468057 - DNA, 25 bp, Homo sapien
cagagctgaattcggtcacccctgg

SEQ ID NO: 2468058 - DNA, 25 bp, Homo sapien
tagcagagctgaattcggtcacccc

SEQ ID NO: 2468059 - DNA, 25 bp, Homo sapien
gcccggacagcgtcctcaggacagc

SEQ ID NO: 2468060 - DNA, 25 bp, Homo sapien
taaccgagtactgttctgccacaca

SEQ ID NO: 2468061 - DNA, 25 bp, Homo sapien
caaatgccagcgcttagaaactgtg

SEQ ID NO: 2468062 - DNA, 25 bp, Homo sapien
tacaggctgccaagctttgatatgc

SEQ ID NO: 2468063 - DNA, 25 bp, Homo sapien
ccacgtttttctcgggctacatgaa

SEQ ID NO: 2468064 - DNA, 25 bp, Homo sapien
aaaagtagtcagcttgtacaaagga

SEQ ID NO: 2468065 - DNA, 25 bp, Homo sapien
caggagcctaggactttttctttgg

SEQ ID NO: 2468066 - DNA, 25 bp, Homo sapien
gaaacaagccttgactcaggagcct

SEQ ID NO: 2468067 - DNA, 25 bp, Homo sapien
aatgtcatattaagcacctcagtgg

SEQ ID NO: 2468068 - DNA, 25 bp, Homo sapien
tgcgagtcctcccgtgagtacacgc

SEQ ID NO: 2468069 - DNA, 25 bp, Homo sapien
cgagtcctcccgtgagtacacgcgg

SEQ ID NO: 2468070 - DNA, 25 bp, Homo sapien
gcgagtcctcccgtgagtacacgcg

SEQ ID NO: 2468071 - DNA, 25 bp, Homo sapien
ctgcacgtagccccagccaccccgc

SEQ ID NO: 2468072 - DNA, 25 bp, Homo sapien
cacgtagccccagccaccccgcgca

SEQ ID NO: 2468073 - DNA, 25 bp, Homo sapien
gcacgtagccccagccaccccgcgc

SEQ ID NO: 2468074 - DNA, 25 bp, Homo sapien
tgcacgtagccccagccaccccgcg

SEQ ID NO: 2468075 - DNA, 25 bp, Homo sapien
tgggcacggcggtctcggccgagcc

SEQ ID NO: 2468076 - DNA, 25 bp, Homo sapien
ggcacggcggtctcggccgagccga

SEQ ID NO: 2468077 - DNA, 25 bp, Homo sapien
gcacggcggtctcggccgagccgag

SEQ ID NO: 2468078 - DNA, 25 bp, Homo sapien
gggcacggcggtctcggccgagccg

SEQ ID NO: 2468079 - DNA, 25 bp, Homo sapien
ccgcgggccgagccgagacagctcc

SEQ ID NO: 2468080 - DNA, 25 bp, Homo sapien
gcgggccgagccgagacagctcctc

SEQ ID NO: 2468081 - DNA, 25 bp, Homo sapien
ccccgcgggccgagccgagacagct

SEQ ID NO: 2468082 - DNA, 25 bp, Homo sapien
gggccgagccgagacagctcctcac

SEQ ID NO: 2468083 - DNA, 25 bp, Homo sapien
ctgatgaagctaaagacaaattttc

SEQ ID NO: 2468084 - DNA, 25 bp, Homo sapien
aaagacaaattttcttcaggcacag

SEQ ID NO: 2468085 - DNA, 25 bp, Homo sapien
agacaaattttcttcaggcacaggc

SEQ ID NO: 2468086 - DNA, 25 bp, Homo sapien
gaagctaaagacaaattttcttcag

SEQ ID NO: 2468087 - DNA, 25 bp, Homo sapien
tggtgggccttgtgttataaaacca

SEQ ID NO: 2468088 - DNA, 25 bp, Homo sapien
tggagaagcgttcctgggcttttct

SEQ ID NO: 2468089 - DNA, 25 bp, Homo sapien
gagtgatttctcgtgctaagtgagt

SEQ ID NO: 2468090 - DNA, 25 bp, Homo sapien
tgatttctcgtgctaagtgagtcct

SEQ ID NO: 2468091 - DNA, 25 bp, Homo sapien
gggaggactcgcagacgttactgcc

SEQ ID NO: 2468092 - DNA, 25 bp, Homo sapien
ttgtagccggtgcgcggggtggctg

SEQ ID NO: 2468093 - DNA, 25 bp, Homo sapien
tgtagccggtgcgcggggtggctgg

SEQ ID NO: 2468094 - DNA, 25 bp, Homo sapien
taggcaagccgatgacctgttccca

SEQ ID NO: 2468095 - DNA, 25 bp, Homo sapien
cttaggcaagccgatgacctgttcc

SEQ ID NO: 2468096 - DNA, 25 bp, Homo sapien
ccatccttaggcaagccgatgacct

SEQ ID NO: 2468097 - DNA, 25 bp, Homo sapien
aagccgatgacctgttcccaggagg

SEQ ID NO: 2468098 - DNA, 25 bp, Homo sapien
gggatgttcggcatgggccgaagcg

SEQ ID NO: 2468099 - DNA, 25 bp, Homo sapien
ggcatgggccgaagcgcctcctgct

SEQ ID NO: 2468100 - DNA, 25 bp, Homo sapien
gttcggcatgggccgaagcgcctcc

SEQ ID NO: 2468101 - DNA, 25 bp, Homo sapien
gggccgaagcgcctcctgctcactg

SEQ ID NO: 2468102 - DNA, 25 bp, Homo sapien
catggcctcccggctctccaggtcc

SEQ ID NO: 2468103 - DNA, 25 bp, Homo sapien
atggcctcccggctctccaggtccc

SEQ ID NO: 2468104 - DNA, 25 bp, Homo sapien
gctttttctgggacgaggccactgg

SEQ ID NO: 2468105 - DNA, 25 bp, Homo sapien
cctttgttcctcctgggcattggct

SEQ ID NO: 2468106 - DNA, 25 bp, Homo sapien
cacaccctttgttcctcctgggcat

SEQ ID NO: 2468107 - DNA, 25 bp, Homo sapien
caccctttgttcctcctgggcattg

SEQ ID NO: 2468108 - DNA, 25 bp, Homo sapien
tgcagggcccggtgggtctccccaa

SEQ ID NO: 2468109 - DNA, 25 bp, Homo sapien
ctgcagggcccggtgggtctcccca

SEQ ID NO: 2468110 - DNA, 25 bp, Homo sapien
cggtgggtctccccaaacacagact

SEQ ID NO: 2468111 - DNA, 25 bp, Homo sapien
tgggtctccccaaacacagactcac

SEQ ID NO: 2468112 - DNA, 25 bp, Homo sapien
gatgaattgaagctctagtttctct

SEQ ID NO: 2468113 - DNA, 25 bp, Homo sapien
gaagctctagtttctctacccgctc

SEQ ID NO: 2468114 - DNA, 25 bp, Homo sapien
cctgagaggtggatgaattgaagct

SEQ ID NO: 2468115 - DNA, 25 bp, Homo sapien
gtctgtcctgagaggtggatgaatt

SEQ ID NO: 2468116 - DNA, 25 bp, Homo sapien
ccccagcggtgccctagcctctcac

SEQ ID NO: 2468117 - DNA, 25 bp, Homo sapien
gggcccctcagacggcctggcagct

SEQ ID NO: 2468118 - DNA, 25 bp, Homo sapien
ctggcagctccccccagcggtgccc

SEQ ID NO: 2468119 - DNA, 25 bp, Homo sapien
atgctggggcccctcagacggcctg

SEQ ID NO: 2468120 - DNA, 25 bp, Homo sapien
agcctgacgatgtcctcctctccca

SEQ ID NO: 2468121 - DNA, 25 bp, Homo sapien
accctgctcgtcagcacacccaagc

SEQ ID NO: 2468122 - DNA, 25 bp, Homo sapien
caccctgctcgtcagcacacccaag

SEQ ID NO: 2468123 - DNA, 25 bp, Homo sapien
ccctgctcgtcagcacacccaagct

SEQ ID NO: 2468124 - DNA, 25 bp, Homo sapien
ggtgcagcctccacgctatcagtga

SEQ ID NO: 2468125 - DNA, 25 bp, Homo sapien
attacaggaagcagctgctggatct

SEQ ID NO: 2468126 - DNA, 25 bp, Homo sapien
ctggtgcagcctccacgctatcagt

SEQ ID NO: 2468127 - DNA, 25 bp, Homo sapien
gcagcctccacgctatcagtgaggc

SEQ ID NO: 2468128 - DNA, 25 bp, Homo sapien
tccactgcagattaggggtgatagt

SEQ ID NO: 2468129 - DNA, 25 bp, Homo sapien
caaatccactgcagattaggggtga

SEQ ID NO: 2468130 - DNA, 25 bp, Homo sapien
gccaaatccactgcagattaggggt

SEQ ID NO: 2468131 - DNA, 25 bp, Homo sapien
cactgcagattaggggtgatagtca

SEQ ID NO: 2468132 - DNA, 25 bp, Homo sapien
gagataggcatacgttgtgaggaac

SEQ ID NO: 2468133 - DNA, 25 bp, Homo sapien
ctggcttcaatgcagtccggggcat

SEQ ID NO: 2468134 - DNA, 25 bp, Homo sapien
gcttcaatgcagtccggggcatgac

SEQ ID NO: 2468135 - DNA, 25 bp, Homo sapien
taggcatacgttgtgaggaactgga

SEQ ID NO: 2468136 - DNA, 25 bp, Homo sapien
ggaccagcgcccatatataaaaatg

SEQ ID NO: 2468137 - DNA, 25 bp, Homo sapien
atgtgctgttgaccaagttagaggg

SEQ ID NO: 2468138 - DNA, 25 bp, Homo sapien
ggcaagcagcaaagtattgggcaag

SEQ ID NO: 2468139 - DNA, 25 bp, Homo sapien
tattgggcaagatcactggactggg

SEQ ID NO: 2468140 - DNA, 25 bp, Homo sapien
cgtgagcgagcacacgagtgtaaag

SEQ ID NO: 2468141 - DNA, 25 bp, Homo sapien
agcacacgagtgtaaagaatggcac

SEQ ID NO: 2468142 - DNA, 25 bp, Homo sapien
gatttccagtgtgccgtctccactg

SEQ ID NO: 2468143 - DNA, 25 bp, Homo sapien
gagcgagcacacgagtgtaaagaat

SEQ ID NO: 2468144 - DNA, 25 bp, Homo sapien
accacaggagcagaggcgagtctgt

SEQ ID NO: 2468145 - DNA, 25 bp, Homo sapien
cacaggagcagaggcgagtctgtga

SEQ ID NO: 2468146 - DNA, 25 bp, Homo sapien
ggaccacaggagcagaggcgagtct

SEQ ID NO: 2468147 - DNA, 25 bp, Homo sapien
ctggaccacaggagcagaggcgagt

SEQ ID NO: 2468148 - DNA, 25 bp, Homo sapien
gggctgaatgcggctgaagaggccg

SEQ ID NO: 2468149 - DNA, 25 bp, Homo sapien
gctgaatgcggctgaagaggccgct

SEQ ID NO: 2468150 - DNA, 25 bp, Homo sapien
gaatgcggctgaagaggccgctgga

SEQ ID NO: 2468151 - DNA, 25 bp, Homo sapien
tgaatgcggctgaagaggccgctgg

SEQ ID NO: 2468152 - DNA, 25 bp, Homo sapien
cggggggagcttgacaaggagcact

SEQ ID NO: 2468153 - DNA, 25 bp, Homo sapien
gagtgacggggggagcttgacaagg

SEQ ID NO: 2468154 - DNA, 25 bp, Homo sapien
tgggatgttctcgctgctgggggcg

SEQ ID NO: 2468155 - DNA, 25 bp, Homo sapien
gggagcttgacaaggagcactggct

SEQ ID NO: 2468156 - DNA, 25 bp, Homo sapien
tcttggagtcctggtatggtgcatc

SEQ ID NO: 2468157 - DNA, 25 bp, Homo sapien
tgatggcagagtatgggaactgcag

SEQ ID NO: 2468158 - DNA, 25 bp, Homo sapien
gctcccagatgctagaataggtgat

SEQ ID NO: 2468159 - DNA, 25 bp, Homo sapien
gaaatggctctggtatggtgctccc

SEQ ID NO: 2468160 - DNA, 25 bp, Homo sapien
gggctgtgcgtcagtcacaggcaca

SEQ ID NO: 2468161 - DNA, 25 bp, Homo sapien
gctgtgcgtcagtcacaggcacact

SEQ ID NO: 2468162 - DNA, 25 bp, Homo sapien
ctggaggagtctgcggccattgaga

SEQ ID NO: 2468163 - DNA, 25 bp, Homo sapien
tggggctgtgcgtcagtcacaggca

SEQ ID NO: 2468164 - DNA, 25 bp, Homo sapien
ctcctcagttcgtgtggggtactgg

SEQ ID NO: 2468165 - DNA, 25 bp, Homo sapien
gactcctcagttcgtgtggggtact

SEQ ID NO: 2468166 - DNA, 25 bp, Homo sapien
agctgaggactcctcagttcgtgtg

SEQ ID NO: 2468167 - DNA, 25 bp, Homo sapien
ctgaggactcctcagttcgtgtggg

SEQ ID NO: 2468168 - DNA, 25 bp, Homo sapien
cagctccccaagaaggagactgtca

SEQ ID NO: 2468169 - DNA, 25 bp, Homo sapien
agctccccaagaaggagactgtcac

SEQ ID NO: 2468170 - DNA, 25 bp, Homo sapien
tgtgccaccctcggtcaccaccact

SEQ ID NO: 2468171 - DNA, 25 bp, Homo sapien
gtgccaccctcggtcaccaccactg

SEQ ID NO: 2468172 - DNA, 25 bp, Homo sapien
ctgtgccaccctcggtcaccaccac

SEQ ID NO: 2468173 - DNA, 25 bp, Homo sapien
cttgcagttcaccacgtccaggagg

SEQ ID NO: 2468174 - DNA, 25 bp, Homo sapien
ttcaccacgtccaggagggtgaaca

SEQ ID NO: 2468175 - DNA, 25 bp, Homo sapien
tcaccacgtccaggagggtgaacat

SEQ ID NO: 2468176 - DNA, 25 bp, Homo sapien
gcagttcaccacgtccaggagggtg

SEQ ID NO: 2468177 - DNA, 25 bp, Homo sapien
gtggatttgtatggccagctggaca

SEQ ID NO: 2468178 - DNA, 25 bp, Homo sapien
ggaatgtcaagtcctgtgtagggcc

SEQ ID NO: 2468179 - DNA, 25 bp, Homo sapien
ccggaatgtcaagtcctgtgtaggg

SEQ ID NO: 2468180 - DNA, 25 bp, Homo sapien
tcctcggtgtagtgctgtgggtcag

SEQ ID NO: 2468181 - DNA, 25 bp, Homo sapien
ctgagtgtgcagtggctccagctgc

SEQ ID NO: 2468182 - DNA, 25 bp, Homo sapien
tgttctgagtgtgcagtggctccag

SEQ ID NO: 2468183 - DNA, 25 bp, Homo sapien
aaccacctcacagtggaaggttggg

SEQ ID NO: 2468184 - DNA, 25 bp, Homo sapien
ctgaaccacctcacagtggaaggtt

SEQ ID NO: 2468185 - DNA, 25 bp, Homo sapien
aacagaaggtgtcctccactgccac

SEQ ID NO: 2468186 - DNA, 25 bp, Homo sapien
agaaggtgtcctccactgccactga

SEQ ID NO: 2468187 - DNA, 25 bp, Homo sapien
gcactgttgagactcttgatgaaga

SEQ ID NO: 2468188 - DNA, 25 bp, Homo sapien
tggtcagcagagaggacacacccac

SEQ ID NO: 2468189 - DNA, 25 bp, Homo sapien
tgttgagactcttgatgaagagctg

SEQ ID NO: 2468190 - DNA, 25 bp, Homo sapien
ctggcactgttgagactcttgatga

SEQ ID NO: 2468191 - DNA, 25 bp, Homo sapien
aagtcaacctcccatggcggggctg

SEQ ID NO: 2468192 - DNA, 25 bp, Homo sapien
ccaagtcaacctcccatggcggggc

SEQ ID NO: 2468193 - DNA, 25 bp, Homo sapien
ggcggggctgctccatgacctcata

SEQ ID NO: 2468194 - DNA, 25 bp, Homo sapien
ctgctccatgacctcatagaggtac

SEQ ID NO: 2468195 - DNA, 25 bp, Homo sapien
catgcatcaggtctccattggtgaa

SEQ ID NO: 2468196 - DNA, 25 bp, Homo sapien
agctggccatgcatcaggtctccat

SEQ ID NO: 2468197 - DNA, 25 bp, Homo sapien
tgcatcaggtctccattggtgaagg

SEQ ID NO: 2468198 - DNA, 25 bp, Homo sapien
tggccatgcatcaggtctccattgg

SEQ ID NO: 2468199 - DNA, 25 bp, Homo sapien
ggccacgtggaagacgcagctgatg

SEQ ID NO: 2468200 - DNA, 25 bp, Homo sapien
taccccaggccacgtggaagacgca

SEQ ID NO: 2468201 - DNA, 25 bp, Homo sapien
ccacgtggaagacgcagctgatggt

SEQ ID NO: 2468202 - DNA, 25 bp, Homo sapien
caggccacgtggaagacgcagctga

SEQ ID NO: 2468203 - DNA, 25 bp, Homo sapien
attgctgaaggccatgttgtctgta

SEQ ID NO: 2468204 - DNA, 25 bp, Homo sapien
agcaaagcccgaatcagcattgctg

SEQ ID NO: 2468205 - DNA, 25 bp, Homo sapien
gctgggcctcagcaaagcccgaatc

SEQ ID NO: 2468206 - DNA, 25 bp, Homo sapien
tgttgtctgtagtcagcagccgcca

SEQ ID NO: 2468207 - DNA, 25 bp, Homo sapien
ggctgcatgggctcatccgtggcca

SEQ ID NO: 2468208 - DNA, 25 bp, Homo sapien
tgggctcatccgtggccatgatact

SEQ ID NO: 2468209 - DNA, 25 bp, Homo sapien
gcatgggctcatccgtggccatgat

SEQ ID NO: 2468210 - DNA, 25 bp, Homo sapien
catccgtggccatgatactgccaga

SEQ ID NO: 2468211 - DNA, 25 bp, Homo sapien
ggactcgcctcttcctgaggcccct

SEQ ID NO: 2468212 - DNA, 25 bp, Homo sapien
aggactcgcctcttcctgaggcccc

SEQ ID NO: 2468213 - DNA, 25 bp, Homo sapien
gactcgcctcttcctgaggcccctc

SEQ ID NO: 2468214 - DNA, 25 bp, Homo sapien
ctgcagcgggatccagccgtggtca

SEQ ID NO: 2468215 - DNA, 25 bp, Homo sapien
ggtagtgggcctcatccctactgca

SEQ ID NO: 2468216 - DNA, 25 bp, Homo sapien
gtagtgggcctcatccctactgcag

SEQ ID NO: 2468217 - DNA, 25 bp, Homo sapien
ggcctccttgaggaaccatgaggcc

SEQ ID NO: 2468218 - DNA, 25 bp, Homo sapien
cctccttgaggaaccatgaggccgg

SEQ ID NO: 2468219 - DNA, 25 bp, Homo sapien
agatgcagaccagaagggtctccga

SEQ ID NO: 2468220 - DNA, 25 bp, Homo sapien
gatgcagaccagaagggtctccgaa

SEQ ID NO: 2468221 - DNA, 25 bp, Homo sapien
tgcagaccagaagggtctccgaaat

SEQ ID NO: 2468222 - DNA, 25 bp, Homo sapien
cagatgcagaccagaagggtctccg

SEQ ID NO: 2468223 - DNA, 25 bp, Homo sapien
tgagaaaacgatgtctgctggcggc

SEQ ID NO: 2468224 - DNA, 25 bp, Homo sapien
cactgagaaaacgatgtctgctggc

SEQ ID NO: 2468225 - DNA, 25 bp, Homo sapien
cttcactgagaaaacgatgtctgct

SEQ ID NO: 2468226 - DNA, 25 bp, Homo sapien
gagaaaacgatgtctgctggcggca

SEQ ID NO: 2468227 - DNA, 25 bp, Homo sapien
gcgagaaggcatgcctcagggcggg

SEQ ID NO: 2468228 - DNA, 25 bp, Homo sapien
cagcgagaaggcatgcctcagggcg

SEQ ID NO: 2468229 - DNA, 25 bp, Homo sapien
agcgagaaggcatgcctcagggcgg

SEQ ID NO: 2468230 - DNA, 25 bp, Homo sapien
ctccagctccacgtgacgtcctcaa

SEQ ID NO: 2468231 - DNA, 25 bp, Homo sapien
gcagctgcgactgtgccccctctac

SEQ ID NO: 2468232 - DNA, 25 bp, Homo sapien
agctgcgactgtgccccctctactg

SEQ ID NO: 2468233 - DNA, 25 bp, Homo sapien
cagctgcgactgtgccccctctact

SEQ ID NO: 2468234 - DNA, 25 bp, Homo sapien
gggtgcagctgcgactgtgccccct

SEQ ID NO: 2468235 - DNA, 25 bp, Homo sapien
tgcaggccaaggcccgggagagtgg

SEQ ID NO: 2468236 - DNA, 25 bp, Homo sapien
aaggcccgggagagtggggaagcag

SEQ ID NO: 2468237 - DNA, 25 bp, Homo sapien
gcccgggagagtggggaagcaggac

SEQ ID NO: 2468238 - DNA, 25 bp, Homo sapien
ctgcaggccaaggcccgggagagtg

SEQ ID NO: 2468239 - DNA, 25 bp, Homo sapien
ctctctccagcagaaggtgctgagg

SEQ ID NO: 2468240 - DNA, 25 bp, Homo sapien
ggtcctggcttgaggcccatcctcc

SEQ ID NO: 2468241 - DNA, 25 bp, Homo sapien
tgcagggccccatgccggggtggct

SEQ ID NO: 2468242 - DNA, 25 bp, Homo sapien
ctgagggtcctggcttgaggcccat

SEQ ID NO: 2468243 - DNA, 25 bp, Homo sapien
caggacaaaaccgtcagtgtcttgc

SEQ ID NO: 2468244 - DNA, 25 bp, Homo sapien
gtgtcttgctcccatcgtgcaggta

SEQ ID NO: 2468245 - DNA, 25 bp, Homo sapien
aaccgtcagtgtcttgctcccatcg

SEQ ID NO: 2468246 - DNA, 25 bp, Homo sapien
caggcctgagtttgtatgaggtcgg

SEQ ID NO: 2468247 - DNA, 25 bp, Homo sapien
tgggcacggtggccccctcccacat

SEQ ID NO: 2468248 - DNA, 25 bp, Homo sapien
tagggatgggcacggtggccccctc

SEQ ID NO: 2468249 - DNA, 25 bp, Homo sapien
ctgtagggatgggcacggtggcccc

SEQ ID NO: 2468250 - DNA, 25 bp, Homo sapien
gatgggcacggtggccccctcccac

SEQ ID NO: 2468251 - DNA, 25 bp, Homo sapien
ctgggctgcttaatggtgtacacca

SEQ ID NO: 2468252 - DNA, 25 bp, Homo sapien
tgggctgcttaatggtgtacaccag

SEQ ID NO: 2468253 - DNA, 25 bp, Homo sapien
gctgggctgcttaatggtgtacacc

SEQ ID NO: 2468254 - DNA, 25 bp, Homo sapien
ggctgcttaatggtgtacaccaggt

SEQ ID NO: 2468255 - DNA, 25 bp, Homo sapien
cagctgggtctgcttgaagctgcgc

SEQ ID NO: 2468256 - DNA, 25 bp, Homo sapien
gcacgagcccaccatccagctgggt

SEQ ID NO: 2468257 - DNA, 25 bp, Homo sapien
catccagctgggtctgcttgaagct

SEQ ID NO: 2468258 - DNA, 25 bp, Homo sapien
ctgtgtgagaacagcacgagcccac

SEQ ID NO: 2468259 - DNA, 25 bp, Homo sapien
ggccatcagcctttgtgatccaggc

SEQ ID NO: 2468260 - DNA, 25 bp, Homo sapien
catcagcctttgtgatccaggccga

SEQ ID NO: 2468261 - DNA, 25 bp, Homo sapien
cagcctttgtgatccaggccgaggc

SEQ ID NO: 2468262 - DNA, 25 bp, Homo sapien
cagaggcaaaaggggccatcagcct

SEQ ID NO: 2468263 - DNA, 25 bp, Homo sapien
tggctgctgagtggctggacggact

SEQ ID NO: 2468264 - DNA, 25 bp, Homo sapien
tctgaggctctggctgctgagtggc

SEQ ID NO: 2468265 - DNA, 25 bp, Homo sapien
ctctggctgctgagtggctggacgg

SEQ ID NO: 2468266 - DNA, 25 bp, Homo sapien
gctctgaggctctggctgctgagtg

SEQ ID NO: 2468267 - DNA, 25 bp, Homo sapien
tctgcctgagtgaagttcaccaggt

SEQ ID NO: 2468268 - DNA, 25 bp, Homo sapien
cgcaccacatggtagagcaggagct

SEQ ID NO: 2468269 - DNA, 25 bp, Homo sapien
gtcctcccctgtgctgtcatgctgg

SEQ ID NO: 2468270 - DNA, 25 bp, Homo sapien
aagagccggcctagctggaggcccc

SEQ ID NO: 2468271 - DNA, 25 bp, Homo sapien
gacagtggtcctgttgatgtcaccg

SEQ ID NO: 2468272 - DNA, 25 bp, Homo sapien
gcatggtgacagtggtcctgttgat

SEQ ID NO: 2468273 - DNA, 25 bp, Homo sapien
tgcatgtgcagcatctcgtcatgct

SEQ ID NO: 2468274 - DNA, 25 bp, Homo sapien
agcatctcgtcatgctgctgtgcct

SEQ ID NO: 2468275 - DNA, 25 bp, Homo sapien
gctcactaatgtccggctgtcattt

SEQ ID NO: 2468276 - DNA, 25 bp, Homo sapien
actaatgtccggctgtcatttctcc

SEQ ID NO: 2468277 - DNA, 25 bp, Homo sapien
atactctttggactttgaaggttct

SEQ ID NO: 2468278 - DNA, 25 bp, Homo sapien
ttgctcactaatgtccggctgtcat

SEQ ID NO: 2468279 - DNA, 25 bp, Homo sapien
ctcgtgcctggcgtgctcagaggac

SEQ ID NO: 2468280 - DNA, 25 bp, Homo sapien
tcgtgcctggcgtgctcagaggacc

SEQ ID NO: 2468281 - DNA, 25 bp, Homo sapien
gtgcctggcgtgctcagaggaccac

SEQ ID NO: 2468282 - DNA, 25 bp, Homo sapien
tgcctggcgtgctcagaggaccacc

SEQ ID NO: 2468283 - DNA, 25 bp, Homo sapien
aagcacatgcgtgggcagagtcaca

SEQ ID NO: 2468284 - DNA, 25 bp, Homo sapien
ctgaagcacatgcgtgggcagagtc

SEQ ID NO: 2468285 - DNA, 25 bp, Homo sapien
gggcagagtcacaacacagatgctc

SEQ ID NO: 2468286 - DNA, 25 bp, Homo sapien
cacatgcgtgggcagagtcacaaca

SEQ ID NO: 2468287 - DNA, 25 bp, Homo sapien
gccggcacgtgccacatggatctgg

SEQ ID NO: 2468288 - DNA, 25 bp, Homo sapien
gatctggggcgtgcagccactcggc

SEQ ID NO: 2468289 - DNA, 25 bp, Homo sapien
cggccggcacgtgccacatggatct

SEQ ID NO: 2468290 - DNA, 25 bp, Homo sapien
ctggggcgtgcagccactcggcaca

SEQ ID NO: 2468291 - DNA, 25 bp, Homo sapien
gctggccagcagtagtgcttcagca

SEQ ID NO: 2468292 - DNA, 25 bp, Homo sapien
agcagtagtgcttcagcaggggcca

SEQ ID NO: 2468293 - DNA, 25 bp, Homo sapien
ttcagtcgcacgctagcagctatca

SEQ ID NO: 2468294 - DNA, 25 bp, Homo sapien
cagtcgcacgctagcagctatcatg

SEQ ID NO: 2468295 - DNA, 25 bp, Homo sapien
catccaacagccaccagacctgata

SEQ ID NO: 2468296 - DNA, 25 bp, Homo sapien
gaacactgattgaaccaaaatggtg

SEQ ID NO: 2468297 - DNA, 25 bp, Homo sapien
gaaagcccagggtcctctgagggac

SEQ ID NO: 2468298 - DNA, 25 bp, Homo sapien
ggatggctggctggagtgaatgcca

SEQ ID NO: 2468299 - DNA, 25 bp, Homo sapien
gtgtgggcatggcaaggttcctgga

SEQ ID NO: 2468300 - DNA, 25 bp, Homo sapien
tgggcatggcaaggttcctggaaaa

SEQ ID NO: 2468301 - DNA, 25 bp, Homo sapien
ggaggggagggcgtaggtgtgggca

SEQ ID NO: 2468302 - DNA, 25 bp, Homo sapien
gaggggagggcgtaggtgtgggcat

SEQ ID NO: 2468303 - DNA, 25 bp, Homo sapien
aacgggttagagaaaagccagagct

SEQ ID NO: 2468304 - DNA, 25 bp, Homo sapien
ctccccggatgggatggacttgcct

SEQ ID NO: 2468305 - DNA, 25 bp, Homo sapien
gaggcaagtgcagagtatgggtgcg

SEQ ID NO: 2468306 - DNA, 25 bp, Homo sapien
gcagagtatgggtgcgctgcagcag

SEQ ID NO: 2468307 - DNA, 25 bp, Homo sapien
gggcgatgtcaggagacagcttcct

SEQ ID NO: 2468308 - DNA, 25 bp, Homo sapien
ggggcgatgtcaggagacagcttcc

SEQ ID NO: 2468309 - DNA, 25 bp, Homo sapien
ggcgatgtcaggagacagcttcctc

SEQ ID NO: 2468310 - DNA, 25 bp, Homo sapien
gaggggcgatgtcaggagacagctt

SEQ ID NO: 2468311 - DNA, 25 bp, Homo sapien
ggcgcctacggagtacactctggcc

SEQ ID NO: 2468312 - DNA, 25 bp, Homo sapien
atggcgcctacggagtacactctgg

SEQ ID NO: 2468313 - DNA, 25 bp, Homo sapien
ccatggcgcctacggagtacactct

SEQ ID NO: 2468314 - DNA, 25 bp, Homo sapien
ctgccatggcgcctacggagtacac

SEQ ID NO: 2468315 - DNA, 25 bp, Homo sapien
cagctgggctgttggggaccttcca

SEQ ID NO: 2468316 - DNA, 25 bp, Homo sapien
ggctgttggggaccttccaggcctg

SEQ ID NO: 2468317 - DNA, 25 bp, Homo sapien
tgttggggaccttccaggcctgtta

SEQ ID NO: 2468318 - DNA, 25 bp, Homo sapien
agctgggctgttggggaccttccag

SEQ ID NO: 2468319 - DNA, 25 bp, Homo sapien
tagccatactgctcggcctggtatg

SEQ ID NO: 2468320 - DNA, 25 bp, Homo sapien
agccatactgctcggcctggtatgt

SEQ ID NO: 2468321 - DNA, 25 bp, Homo sapien
ccttcccccgtgtacatactgtagc

SEQ ID NO: 2468322 - DNA, 25 bp, Homo sapien
cgggacagtggagttaactgtagac

SEQ ID NO: 2468323 - DNA, 25 bp, Homo sapien
ggttgcagctggcatatgaggaaga

SEQ ID NO: 2468324 - DNA, 25 bp, Homo sapien
cagctgaggcgggacagtggagtta

SEQ ID NO: 2468325 - DNA, 25 bp, Homo sapien
cagagctgcccatcccgctccacga

SEQ ID NO: 2468326 - DNA, 25 bp, Homo sapien
gcccatcccgctccacgagaccaat

SEQ ID NO: 2468327 - DNA, 25 bp, Homo sapien
cccgctccacgagaccaatagtaag

SEQ ID NO: 2468328 - DNA, 25 bp, Homo sapien
catcccgctccacgagaccaatagt

SEQ ID NO: 2468329 - DNA, 25 bp, Homo sapien
tgggcacggcggtctcggccgagcc

SEQ ID NO: 2468330 - DNA, 25 bp, Homo sapien
ggcacggcggtctcggccgagccga

SEQ ID NO: 2468331 - DNA, 25 bp, Homo sapien
gcacggcggtctcggccgagccgag

SEQ ID NO: 2468332 - DNA, 25 bp, Homo sapien
gggcacggcggtctcggccgagccg

SEQ ID NO: 2468333 - DNA, 25 bp, Homo sapien
ccgcgggccgagccgagacagctcc

SEQ ID NO: 2468334 - DNA, 25 bp, Homo sapien
gcgggccgagccgagacagctcctc

SEQ ID NO: 2468335 - DNA, 25 bp, Homo sapien
ccccgcgggccgagccgagacagct

SEQ ID NO: 2468336 - DNA, 25 bp, Homo sapien
gggccgagccgagacagctcctcac

SEQ ID NO: 2468337 - DNA, 25 bp, Homo sapien
aactccgccaactaagttgcgctct

SEQ ID NO: 2468338 - DNA, 25 bp, Homo sapien
tcctcaaatcacaaaacttccccca

SEQ ID NO: 2468339 - DNA, 25 bp, Homo sapien
ccaactccgccaactaagttgcgct

SEQ ID NO: 2468340 - DNA, 25 bp, Homo sapien
ccccaactccgccaactaagttgcg

SEQ ID NO: 2468341 - DNA, 25 bp, Homo sapien
atagacactttcctcatgacacttt

SEQ ID NO: 2468342 - DNA, 25 bp, Homo sapien
tagacactttcctcatgacactttg

SEQ ID NO: 2468343 - DNA, 25 bp, Homo sapien
aacgtggctaattaacagtggtacg

SEQ ID NO: 2468344 - DNA, 25 bp, Homo sapien
aactgttagaccaaataacgtggct

SEQ ID NO: 2468345 - DNA, 25 bp, Homo sapien
actgttagaccaaataacgtggcta

SEQ ID NO: 2468346 - DNA, 25 bp, Homo sapien
cagtggtacgatttctagcccgagg

SEQ ID NO: 2468347 - DNA, 25 bp, Homo sapien
attatcatattttgcagtctttaaa

SEQ ID NO: 2468348 - DNA, 25 bp, Homo sapien
tgttttgattctttactccctacag

SEQ ID NO: 2468349 - DNA, 25 bp, Homo sapien
taatgccactttagacaaaaatcag

SEQ ID NO: 2468350 - DNA, 25 bp, Homo sapien
tattttgcagtctttaaataggtgt

SEQ ID NO: 2468351 - DNA, 25 bp, Homo sapien
cgagaatttgcagagtctcaatacc

SEQ ID NO: 2468352 - DNA, 25 bp, Homo sapien
ccgagaatttgcagagtctcaatac

SEQ ID NO: 2468353 - DNA, 25 bp, Homo sapien
gccgagaatttgcagagtctcaata

SEQ ID NO: 2468354 - DNA, 25 bp, Homo sapien
aaaaccgattacctcatgccaagca

SEQ ID NO: 2468355 - DNA, 25 bp, Homo sapien
ttggctcatcagagtccacagacca

SEQ ID NO: 2468356 - DNA, 25 bp, Homo sapien
cgaactgttctccttagtatcttct

SEQ ID NO: 2468357 - DNA, 25 bp, Homo sapien
gagtccacagaccatatcggtgaag

SEQ ID NO: 2468358 - DNA, 25 bp, Homo sapien
cagaccatatcggtgaagaagatga

SEQ ID NO: 2468359 - DNA, 25 bp, Homo sapien
ttatgttatccaccttccaacaggg

SEQ ID NO: 2468360 - DNA, 25 bp, Homo sapien
ggaccatcccacgaacgagcttctt

SEQ ID NO: 2468361 - DNA, 25 bp, Homo sapien
tcccgagagccaaaacctataaaga

SEQ ID NO: 2468362 - DNA, 25 bp, Homo sapien
tgctggcctagatttagaagatcct

SEQ ID NO: 2468363 - DNA, 25 bp, Homo sapien
gaatatacaggctgtactaacatta

SEQ ID NO: 2468364 - DNA, 25 bp, Homo sapien
atgaatatacaggctgtactaacat

SEQ ID NO: 2468365 - DNA, 25 bp, Homo sapien
atatacaggctgtactaacattaaa

SEQ ID NO: 2468366 - DNA, 25 bp, Homo sapien
gtgtgcatacagtgggtctttgtgt

SEQ ID NO: 2468367 - DNA, 25 bp, Homo sapien
gtgctccacctttaaacaactgtaa

SEQ ID NO: 2468368 - DNA, 25 bp, Homo sapien
gctgtttccagtgctccacctttaa

SEQ ID NO: 2468369 - DNA, 25 bp, Homo sapien
tccagtgctccacctttaaacaact

SEQ ID NO: 2468370 - DNA, 25 bp, Homo sapien
tgtttccagtgctccacctttaaac

SEQ ID NO: 2468371 - DNA, 25 bp, Homo sapien
tggctgcggccaatttcccctgttg

SEQ ID NO: 2468372 - DNA, 25 bp, Homo sapien
gctgcggccaatttcccctgttgtg

SEQ ID NO: 2468373 - DNA, 25 bp, Homo sapien
cttggctgcggccaatttcccctgt

SEQ ID NO: 2468374 - DNA, 25 bp, Homo sapien
tgcggccaatttcccctgttgtgtt

SEQ ID NO: 2468375 - DNA, 25 bp, Homo sapien
tcttgctcctaggtcccatagtctc

SEQ ID NO: 2468376 - DNA, 25 bp, Homo sapien
cagctggaaatttgtgctgcaacca

SEQ ID NO: 2468377 - DNA, 25 bp, Homo sapien
aatttgtgctgcaaccagaggaacc

SEQ ID NO: 2468378 - DNA, 25 bp, Homo sapien
ccagaaatggggtgagaaaacttag

SEQ ID NO: 2468379 - DNA, 25 bp, Homo sapien
tggtaaccaccagaaatgaatgtgt

SEQ ID NO: 2468380 - DNA, 25 bp, Homo sapien
gcaacaataacgaatctcatttaaa

SEQ ID NO: 2468381 - DNA, 25 bp, Homo sapien
ccatcaactggcaaaagcttctttt

SEQ ID NO: 2468382 - DNA, 25 bp, Homo sapien
catttcctcggtgtcctgggtgttt

SEQ ID NO: 2468383 - DNA, 25 bp, Homo sapien
caaacagcaacgaccatttcctcgg

SEQ ID NO: 2468384 - DNA, 25 bp, Homo sapien
gtagaggatgcacggccctccccgt

SEQ ID NO: 2468385 - DNA, 25 bp, Homo sapien
ggatgcacggccctccccgtagata

SEQ ID NO: 2468386 - DNA, 25 bp, Homo sapien
cagggtagtagaggatgcacggccc

SEQ ID NO: 2468387 - DNA, 25 bp, Homo sapien
ctccagatcctgcagggtagtagag

SEQ ID NO: 2468388 - DNA, 25 bp, Homo sapien
ctgattattgcggagcttgaatcca

SEQ ID NO: 2468389 - DNA, 25 bp, Homo sapien
ttgcggagcttgaatccagggctac

SEQ ID NO: 2468390 - DNA, 25 bp, Homo sapien
gaattgatgttttcagtgagttgac

SEQ ID NO: 2468391 - DNA, 25 bp, Homo sapien
attgatgttttcagtgagttgactg

SEQ ID NO: 2468392 - DNA, 25 bp, Homo sapien
tcctcccaagcttctgtaccagatg

SEQ ID NO: 2468393 - DNA, 25 bp, Homo sapien
ccctgctgggggctgtggggccagg

SEQ ID NO: 2468394 - DNA, 25 bp, Homo sapien
tggccctgctgggggctgtggggcc

SEQ ID NO: 2468395 - DNA, 25 bp, Homo sapien
gatggccctgctgggggctgtgggg

SEQ ID NO: 2468396 - DNA, 25 bp, Homo sapien
gccctgctgggggctgtggggccag

SEQ ID NO: 2468397 - DNA, 25 bp, Homo sapien
caggagactcaacatctgattgttt

SEQ ID NO: 2468398 - DNA, 25 bp, Homo sapien
cgctgctcgtacagggcttcccacc

SEQ ID NO: 2468399 - DNA, 25 bp, Homo sapien
ctcggcccgctgctcgtacagggct

SEQ ID NO: 2468400 - DNA, 25 bp, Homo sapien
gcccgctgctcgtacagggcttccc

SEQ ID NO: 2468401 - DNA, 25 bp, Homo sapien
tcggcccgctgctcgtacagggctt

SEQ ID NO: 2468402 - DNA, 25 bp, Homo sapien
aactgcagtgtgctcttgttctcgt

SEQ ID NO: 2468403 - DNA, 25 bp, Homo sapien
gcagtgtgctcttgttctcgttgtt

SEQ ID NO: 2468404 - DNA, 25 bp, Homo sapien
ccgacttctccagctcctttacttg

SEQ ID NO: 2468405 - DNA, 25 bp, Homo sapien
ctgcagtgtgctcttgttctcgttg

SEQ ID NO: 2468406 - DNA, 25 bp, Homo sapien
ggtgcccgcctcccacatcttcttg

SEQ ID NO: 2468407 - DNA, 25 bp, Homo sapien
cacatcttcttggatgggtcggagg

SEQ ID NO: 2468408 - DNA, 25 bp, Homo sapien
catcttcttggatgggtcggaggtt

SEQ ID NO: 2468409 - DNA, 25 bp, Homo sapien
ctcccacatcttcttggatgggtcg

SEQ ID NO: 2468410 - DNA, 25 bp, Homo sapien
tccccaggctgcagctgcctgtggc

SEQ ID NO: 2468411 - DNA, 25 bp, Homo sapien
gctgcagctgcctgtggcctggcac

SEQ ID NO: 2468412 - DNA, 25 bp, Homo sapien
tgtccccaggctgcagctgcctgtg

SEQ ID NO: 2468413 - DNA, 25 bp, Homo sapien
cccaggctgcagctgcctgtggcct

SEQ ID NO: 2468414 - DNA, 25 bp, Homo sapien
tgctgctgcagactcggagcctctt

SEQ ID NO: 2468415 - DNA, 25 bp, Homo sapien
gctgctgcagactcggagcctcttg

SEQ ID NO: 2468416 - DNA, 25 bp, Homo sapien
tctggctgctgctgcagactcggag

SEQ ID NO: 2468417 - DNA, 25 bp, Homo sapien
ggctgctgctgcagactcggagcct

SEQ ID NO: 2468418 - DNA, 25 bp, Homo sapien
ttgtccgcacatccaagctccttgt

SEQ ID NO: 2468419 - DNA, 25 bp, Homo sapien
tctcccggtgcagcctccatgctat

SEQ ID NO: 2468420 - DNA, 25 bp, Homo sapien
ctccatgctatcagtgaggctcagc

SEQ ID NO: 2468421 - DNA, 25 bp, Homo sapien
tgctatcagtgaggctcagctcact

SEQ ID NO: 2468422 - DNA, 25 bp, Homo sapien
tgcagcctccatgctatcagtgagg

SEQ ID NO: 2468423 - DNA, 25 bp, Homo sapien
ctcctgtaccaacagcttctccact

SEQ ID NO: 2468424 - DNA, 25 bp, Homo sapien
aagaatggcatgcagcctctcctgc

SEQ ID NO: 2468425 - DNA, 25 bp, Homo sapien
gctccctgttctcggcagcccgaaa

SEQ ID NO: 2468426 - DNA, 25 bp, Homo sapien
tgtaccaacagcttctccactcaag

SEQ ID NO: 2468427 - DNA, 25 bp, Homo sapien
tgtcagatggttgaagactagctat

SEQ ID NO: 2468428 - DNA, 25 bp, Homo sapien
attcctatgtcagatggttgaagac

SEQ ID NO: 2468429 - DNA, 25 bp, Homo sapien
ctatgtcagatggttgaagactagc

SEQ ID NO: 2468430 - DNA, 25 bp, Homo sapien
gatggttgaagactagctattagcc

SEQ ID NO: 2468431 - DNA, 25 bp, Homo sapien
ttgtcataggatttccattctcttt

SEQ ID NO: 2468432 - DNA, 25 bp, Homo sapien
gtcataggatttccattctctttag

SEQ ID NO: 2468433 - DNA, 25 bp, Homo sapien
tattgtcataggatttccattctct

SEQ ID NO: 2468434 - DNA, 25 bp, Homo sapien
cataggatttccattctctttagct

SEQ ID NO: 2468435 - DNA, 25 bp, Homo sapien
aggcttctcaaccagttggctgtca

SEQ ID NO: 2468436 - DNA, 25 bp, Homo sapien
tgggcactggtatctgtcttccctg

SEQ ID NO: 2468437 - DNA, 25 bp, Homo sapien
ttctcaaccagttggctgtcagggc

SEQ ID NO: 2468438 - DNA, 25 bp, Homo sapien
agagtgtactccgtaggcgccatgg

SEQ ID NO: 2468439 - DNA, 25 bp, Homo sapien
gggagggtggggcacagggtggaga

SEQ ID NO: 2468440 - DNA, 25 bp, Homo sapien
tggggagggtggggcacagggtgga

SEQ ID NO: 2468441 - DNA, 25 bp, Homo sapien
ggtcacatcgcggatagccactggc

SEQ ID NO: 2468442 - DNA, 25 bp, Homo sapien
aggtaggcatacatggtgaggaact

SEQ ID NO: 2468443 - DNA, 25 bp, Homo sapien
gcatgactgaggtaggcatacatgg

SEQ ID NO: 2468444 - DNA, 25 bp, Homo sapien
tgactgaggtaggcatacatggtga

SEQ ID NO: 2468445 - DNA, 25 bp, Homo sapien
caggagtccagagcatgcgcgcgct

SEQ ID NO: 2468446 - DNA, 25 bp, Homo sapien
ctcctcgccttgacccagcactgct

SEQ ID NO: 2468447 - DNA, 25 bp, Homo sapien
gcgcttccggctgccccctcctcgc

SEQ ID NO: 2468448 - DNA, 25 bp, Homo sapien
agtccagagcatgcgcgcgcttccg

SEQ ID NO: 2468449 - DNA, 25 bp, Homo sapien
gaaggtgagcccgtcgggagccgct

SEQ ID NO: 2468450 - DNA, 25 bp, Homo sapien
caaccacccgcgggacctctcggcg

SEQ ID NO: 2468451 - DNA, 25 bp, Homo sapien
ggagccgctgtcacggccgcaacca

SEQ ID NO: 2468452 - DNA, 25 bp, Homo sapien
gtcacggccgcaaccacccgcggga

SEQ ID NO: 2468453 - DNA, 25 bp, Homo sapien
cggtccaggggagcaggctagctga

SEQ ID NO: 2468454 - DNA, 25 bp, Homo sapien
agcaggctagctgactgagggcgat

SEQ ID NO: 2468455 - DNA, 25 bp, Homo sapien
aggctagctgactgagggcgatcat

SEQ ID NO: 2468456 - DNA, 25 bp, Homo sapien
tccaggggagcaggctagctgactg

SEQ ID NO: 2468457 - DNA, 25 bp, Homo sapien
catccagggtacaatgcgcctttcc

SEQ ID NO: 2468458 - DNA, 25 bp, Homo sapien
gcatccagggtacaatgcgcctttc

SEQ ID NO: 2468459 - DNA, 25 bp, Homo sapien
gaaggctgcttatgggacacattac

SEQ ID NO: 2468460 - DNA, 25 bp, Homo sapien
gctgcttatgggacacattactttc

SEQ ID NO: 2468461 - DNA, 25 bp, Homo sapien
tcttctgaaggctgcttatgggaca

SEQ ID NO: 2468462 - DNA, 25 bp, Homo sapien
tgggacacattactttcataatttg

SEQ ID NO: 2468463 - DNA, 25 bp, Homo sapien
ttccactgagaccaatgtgtgcctc

SEQ ID NO: 2468464 - DNA, 25 bp, Homo sapien
cataaaactgtctcaatcaagggca

SEQ ID NO: 2468465 - DNA, 25 bp, Homo sapien
tatctttccaaatgtagggcacagc

SEQ ID NO: 2468466 - DNA, 25 bp, Homo sapien
taccacaaaggttactataagcaga

SEQ ID NO: 2468467 - DNA, 25 bp, Homo sapien
aagccgatgacctgttcccaggagg

SEQ ID NO: 2468468 - DNA, 25 bp, Homo sapien
ccatccttaggcaagccgatgacct

SEQ ID NO: 2468469 - DNA, 25 bp, Homo sapien
taggcaagccgatgacctgttccca

SEQ ID NO: 2468470 - DNA, 25 bp, Homo sapien
cttaggcaagccgatgacctgttcc

SEQ ID NO: 2468471 - DNA, 25 bp, Homo sapien
ctgctcactgtccagatgtcctcct

SEQ ID NO: 2468472 - DNA, 25 bp, Homo sapien
gctcactgtccagatgtcctcctcc

SEQ ID NO: 2468473 - DNA, 25 bp, Homo sapien
actgtccagatgtcctcctccatct

SEQ ID NO: 2468474 - DNA, 25 bp, Homo sapien
gggccgaagcgcctcctgctcactg

SEQ ID NO: 2468475 - DNA, 25 bp, Homo sapien
atggcctcccggctctccaggtccc

SEQ ID NO: 2468476 - DNA, 25 bp, Homo sapien
catggcctcccggctctccaggtcc

SEQ ID NO: 2468477 - DNA, 25 bp, Homo sapien
tggcagcacaccctttgttcctcct

SEQ ID NO: 2468478 - DNA, 25 bp, Homo sapien
cctttgttcctcctgggcattggct

SEQ ID NO: 2468479 - DNA, 25 bp, Homo sapien
cacaccctttgttcctcctgggcat

SEQ ID NO: 2468480 - DNA, 25 bp, Homo sapien
caccctttgttcctcctgggcattg

SEQ ID NO: 2468481 - DNA, 25 bp, Homo sapien
tctggctttttctgggacgaggcca

SEQ ID NO: 2468482 - DNA, 25 bp, Homo sapien
tggggccgctacctctggctttttc

SEQ ID NO: 2468483 - DNA, 25 bp, Homo sapien
ctctggctttttctgggacgaggcc

SEQ ID NO: 2468484 - DNA, 25 bp, Homo sapien
tctggggctggggccgctacctctg

SEQ ID NO: 2468485 - DNA, 25 bp, Homo sapien
ctgcagggcccggtgggtctcccca

SEQ ID NO: 2468486 - DNA, 25 bp, Homo sapien
tgcagggcccggtgggtctccccaa

SEQ ID NO: 2468487 - DNA, 25 bp, Homo sapien
tgggtctccccaaacacagactcac

SEQ ID NO: 2468488 - DNA, 25 bp, Homo sapien
cggtgggtctccccaaacacagact

SEQ ID NO: 2468489 - DNA, 25 bp, Homo sapien
gaagctctagtttctctacccgctc

SEQ ID NO: 2468490 - DNA, 25 bp, Homo sapien
gatgaattgaagctctagtttctct

SEQ ID NO: 2468491 - DNA, 25 bp, Homo sapien
gtctgtcctgagaggtggatgaatt

SEQ ID NO: 2468492 - DNA, 25 bp, Homo sapien
cctgagaggtggatgaattgaagct

SEQ ID NO: 2468493 - DNA, 25 bp, Homo sapien
gggcccctcggacggcctggcagct

SEQ ID NO: 2468494 - DNA, 25 bp, Homo sapien
ccccagcggtgccctagcctctcac

SEQ ID NO: 2468495 - DNA, 25 bp, Homo sapien
ccctcggacggcctggcagctcccc

SEQ ID NO: 2468496 - DNA, 25 bp, Homo sapien
tgctggggcccctcggacggcctgg

SEQ ID NO: 2468497 - DNA, 25 bp, Homo sapien
agcctgacgatgtcctcctctccca

SEQ ID NO: 2468498 - DNA, 25 bp, Homo sapien
catgcccctccttgtggtctcccac

SEQ ID NO: 2468499 - DNA, 25 bp, Homo sapien
tttgccatgcccctccttgtggtct

SEQ ID NO: 2468500 - DNA, 25 bp, Homo sapien
cttgtggtctcccacaagctgcaac

SEQ ID NO: 2468501 - DNA, 25 bp, Homo sapien
ctccttgtggtctcccacaagctgc

SEQ ID NO: 2468502 - DNA, 25 bp, Homo sapien
accctgctcgtcagcacacccaagc

SEQ ID NO: 2468503 - DNA, 25 bp, Homo sapien
caccctgctcgtcagcacacccaag

SEQ ID NO: 2468504 - DNA, 25 bp, Homo sapien
ccctgctcgtcagcacacccaagct

SEQ ID NO: 2468505 - DNA, 25 bp, Homo sapien
ggaatctgagcacagtgtgagcctc

SEQ ID NO: 2468506 - DNA, 25 bp, Homo sapien
tgcccaccccgcctgagggctctac

SEQ ID NO: 2468507 - DNA, 25 bp, Homo sapien
gcccaccccgcctgagggctctact

SEQ ID NO: 2468508 - DNA, 25 bp, Homo sapien
gagcacagtgtgagcctcccctgct

SEQ ID NO: 2468509 - DNA, 25 bp, Homo sapien
cagggtcccttcagtggaccctggg

SEQ ID NO: 2468510 - DNA, 25 bp, Homo sapien
cggttatcccacaacacacttcata

SEQ ID NO: 2468511 - DNA, 25 bp, Homo sapien
caggcactacctatgaagctctagc

SEQ ID NO: 2468512 - DNA, 25 bp, Homo sapien
gcagtggcatctagctacctgccct

SEQ ID NO: 2468513 - DNA, 25 bp, Homo sapien
gccaaatccactgcagattaggggt

SEQ ID NO: 2468514 - DNA, 25 bp, Homo sapien
cactgcagattaggggtgatagtca

SEQ ID NO: 2468515 - DNA, 25 bp, Homo sapien
caaatccactgcagattaggggtga

SEQ ID NO: 2468516 - DNA, 25 bp, Homo sapien
tccactgcagattaggggtgatagt

SEQ ID NO: 2468517 - DNA, 25 bp, Homo sapien
aaaagggcagtctggcttcaatgca

SEQ ID NO: 2468518 - DNA, 25 bp, Homo sapien
aaagggcagtctggcttcaatgcag

SEQ ID NO: 2468519 - DNA, 25 bp, Homo sapien
ggaccagcgcccatatataaaaatg

SEQ ID NO: 2468520 - DNA, 25 bp, Homo sapien
ggcaagcagcaaagtattgggcaag

SEQ ID NO: 2468521 - DNA, 25 bp, Homo sapien
atgtgctgttgaccaagttagaggg

SEQ ID NO: 2468522 - DNA, 25 bp, Homo sapien
tattgggcaagatcactggactggg

SEQ ID NO: 2468523 - DNA, 25 bp, Homo sapien
cgtgagcgagcacacgagtgtaaag

SEQ ID NO: 2468524 - DNA, 25 bp, Homo sapien
agcacacgagtgtaaagaatggcac

SEQ ID NO: 2468525 - DNA, 25 bp, Homo sapien
gagcgagcacacgagtgtaaagaat

SEQ ID NO: 2468526 - DNA, 25 bp, Homo sapien
gatttccagtgtgccgtctccactg

SEQ ID NO: 2468527 - DNA, 25 bp, Homo sapien
ccgggggcgcctacttcaggtctga

SEQ ID NO: 2468528 - DNA, 25 bp, Homo sapien
cagtcccgggggcgcctacttcagg

SEQ ID NO: 2468529 - DNA, 25 bp, Homo sapien
agagtctgaactccgagatgctctg

SEQ ID NO: 2468530 - DNA, 25 bp, Homo sapien
tctgaactccgagatgctctgggtg

SEQ ID NO: 2468531 - DNA, 25 bp, Homo sapien
cgccttctgtccagcacttgcatga

SEQ ID NO: 2468532 - DNA, 25 bp, Homo sapien
ttctgtccagcacttgcatgacact

SEQ ID NO: 2468533 - DNA, 25 bp, Homo sapien
tgtccagcacttgcatgacacttcc

SEQ ID NO: 2468534 - DNA, 25 bp, Homo sapien
ccccagggatcactgagtcctggag

SEQ ID NO: 2468535 - DNA, 25 bp, Homo sapien
gggctgaatgcggctgaagaggccg

SEQ ID NO: 2468536 - DNA, 25 bp, Homo sapien
gctgaatgcggctgaagaggccgct

SEQ ID NO: 2468537 - DNA, 25 bp, Homo sapien
gaatgcggctgaagaggccgctgga

SEQ ID NO: 2468538 - DNA, 25 bp, Homo sapien
tgaatgcggctgaagaggccgctgg

SEQ ID NO: 2468539 - DNA, 25 bp, Homo sapien
tctcagaccccggagttcatcatct

SEQ ID NO: 2468540 - DNA, 25 bp, Homo sapien
tattcagagcacatggcgagtaaga

SEQ ID NO: 2468541 - DNA, 25 bp, Homo sapien
gataagtcttaagtcccctcccaga

SEQ ID NO: 2468542 - DNA, 25 bp, Homo sapien
ccagtcgaagcggtatagaagcccg

SEQ ID NO: 2468543 - DNA, 25 bp, Homo sapien
cgtgtgaaaagccatactccaaggg

SEQ ID NO: 2468544 - DNA, 25 bp, Homo sapien
ttcctagtgaccatccagagagcca

SEQ ID NO: 2468545 - DNA, 25 bp, Homo sapien
gacattccgggtcagcaatggactg

SEQ ID NO: 2468546 - DNA, 25 bp, Homo sapien
agtggtgggtcacacaggcgttcca

SEQ ID NO: 2468547 - DNA, 25 bp, Homo sapien
cggtgactgagttctcctgctggga

SEQ ID NO: 2468548 - DNA, 25 bp, Homo sapien
gcttggctgtccgtggagctagctg

SEQ ID NO: 2468549 - DNA, 25 bp, Homo sapien
aggcttggctgtccgtggagctagc

SEQ ID NO: 2468550 - DNA, 25 bp, Homo sapien
ctgagccatgcgtgcctgagccagg

SEQ ID NO: 2468551 - DNA, 25 bp, Homo sapien
cttggctgtccgtggagctagctga

SEQ ID NO: 2468552 - DNA, 25 bp, Homo sapien
ctgatgaagctaaagacaaattttc

SEQ ID NO: 2468553 - DNA, 25 bp, Homo sapien
agacaaattttcttcaggcacaggc

SEQ ID NO: 2468554 - DNA, 25 bp, Homo sapien
aaagacaaattttcttcaggcacag

SEQ ID NO: 2468555 - DNA, 25 bp, Homo sapien
gaagctaaagacaaattttcttcag

SEQ ID NO: 2468556 - DNA, 25 bp, Homo sapien
tggtgggccttgtgttataaaacca

SEQ ID NO: 2468557 - DNA, 25 bp, Homo sapien
tggagaagcgttcctgggcttttct

SEQ ID NO: 2468558 - DNA, 25 bp, Homo sapien
gagtgatttctcgtgctaagtgagt

SEQ ID NO: 2468559 - DNA, 25 bp, Homo sapien
tgatttctcgtgctaagtgagtcct

SEQ ID NO: 2468560 - DNA, 25 bp, Homo sapien
tgtagccggtgcgcggggtggctgg

SEQ ID NO: 2468561 - DNA, 25 bp, Homo sapien
gggaggactcgcagacgttactgcc

SEQ ID NO: 2468562 - DNA, 25 bp, Homo sapien
ttgtagccggtgcgcggggtggctg

SEQ ID NO: 2468563 - DNA, 25 bp, Homo sapien
gcagctctgccgtgcaatcccagct

SEQ ID NO: 2468564 - DNA, 25 bp, Homo sapien
tctgccgtgcaatcccagctcgcag

SEQ ID NO: 2468565 - DNA, 25 bp, Homo sapien
cgtgcaatcccagctcgcagccctt

SEQ ID NO: 2468566 - DNA, 25 bp, Homo sapien
tggagcgggatgggcagctctgccg

SEQ ID NO: 2468567 - DNA, 25 bp, Homo sapien
gctacagctcaggtaaccacgagca

SEQ ID NO: 2468568 - DNA, 25 bp, Homo sapien
aatgctacagctcaggtaaccacga

SEQ ID NO: 2468569 - DNA, 25 bp, Homo sapien
atgctacagctcaggtaaccacgag

SEQ ID NO: 2468570 - DNA, 25 bp, Homo sapien
tacagctcaggtaaccacgagcaca

SEQ ID NO: 2468571 - DNA, 25 bp, Homo sapien
caatccgatgatttctgaggtcctt

SEQ ID NO: 2468572 - DNA, 25 bp, Homo sapien
tcctcggccgccgttggtacacgga

SEQ ID NO: 2468573 - DNA, 25 bp, Homo sapien
gtttctcaaagcaatccgatgattt

SEQ ID NO: 2468574 - DNA, 25 bp, Homo sapien
cgttggtacacggaccacattttgt

SEQ ID NO: 2468575 - DNA, 25 bp, Homo sapien
gcttgccctgacaaaatgactccca

SEQ ID NO: 2468576 - DNA, 25 bp, Homo sapien
ggacgtgctgagagtcaagagggca

SEQ ID NO: 2468577 - DNA, 25 bp, Homo sapien
taggacaccaacatagatgggaggg

SEQ ID NO: 2468578 - DNA, 25 bp, Homo sapien
gcagacaatgtgcaccccagtgctc

SEQ ID NO: 2468579 - DNA, 25 bp, Homo sapien
tgaaactcacaccttgatcttgacc

SEQ ID NO: 2468580 - DNA, 25 bp, Homo sapien
cttctctatgagacctacagctgga

SEQ ID NO: 2468581 - DNA, 25 bp, Homo sapien
tatgagacctacagctggatggccc

SEQ ID NO: 2468582 - DNA, 25 bp, Homo sapien
gaccattgagctctgacctttctcc

SEQ ID NO: 2468583 - DNA, 25 bp, Homo sapien
cacggagcttcagggtgctcaaacc

SEQ ID NO: 2468584 - DNA, 25 bp, Homo sapien
gcttcagggtgctcaaaccaacaag

SEQ ID NO: 2468585 - DNA, 25 bp, Homo sapien
tcagggtgctcaaaccaacaagctc

SEQ ID NO: 2468586 - DNA, 25 bp, Homo sapien
ggtgctcaaaccaacaagctcccag

SEQ ID NO: 2468587 - DNA, 25 bp, Homo sapien
cgggagaagcgccctctgcactgcc

SEQ ID NO: 2468588 - DNA, 25 bp, Homo sapien
cccccgggagaagcgccctctgcac

SEQ ID NO: 2468589 - DNA, 25 bp, Homo sapien
ggagaagcgccctctgcactgccgg

SEQ ID NO: 2468590 - DNA, 25 bp, Homo sapien
cccgggagaagcgccctctgcactg

SEQ ID NO: 2468591 - DNA, 25 bp, Homo sapien
atgtgggaacccttgagcttcccag

SEQ ID NO: 2468592 - DNA, 25 bp, Homo sapien
cagacaggttaacactaatgtggga

SEQ ID NO: 2468593 - DNA, 25 bp, Homo sapien
tgaggcagacaggttaacactaatg

SEQ ID NO: 2468594 - DNA, 25 bp, Homo sapien
taacactaatgtgggaacccttgag

SEQ ID NO: 2468595 - DNA, 25 bp, Homo sapien
agggagccaaaagttcttgggctgg

SEQ ID NO: 2468596 - DNA, 25 bp, Homo sapien
gagccaaaagttcttgggctgggaa

SEQ ID NO: 2468597 - DNA, 25 bp, Homo sapien
tcagggagccaaaagttcttgggct

SEQ ID NO: 2468598 - DNA, 25 bp, Homo sapien
ggagccaaaagttcttgggctggga

SEQ ID NO: 2468599 - DNA, 25 bp, Homo sapien
gaagcattatgtttggcagatgaac

SEQ ID NO: 2468600 - DNA, 25 bp, Homo sapien
ctgggaatcttgaagaatgaagcat

SEQ ID NO: 2468601 - DNA, 25 bp, Homo sapien
cagatgaacaacttctgatgcaccc

SEQ ID NO: 2468602 - DNA, 25 bp, Homo sapien
ctatgtactttctcgtccctgggaa

SEQ ID NO: 2468603 - DNA, 25 bp, Homo sapien
tcagagctttccatgctgatatccc

SEQ ID NO: 2468604 - DNA, 25 bp, Homo sapien
tctatcagagctttccatgctgata

SEQ ID NO: 2468605 - DNA, 25 bp, Homo sapien
tatcagagctttccatgctgatatc

SEQ ID NO: 2468606 - DNA, 25 bp, Homo sapien
gtctatcagagctttccatgctgat

SEQ ID NO: 2468607 - DNA, 25 bp, Homo sapien
ctgaaatttcaaagacagcgccgct

SEQ ID NO: 2468608 - DNA, 25 bp, Homo sapien
cttcagagggcaggccacggatcag

SEQ ID NO: 2468609 - DNA, 25 bp, Homo sapien
gaggatcaaacactgccacaacctg

SEQ ID NO: 2468610 - DNA, 25 bp, Homo sapien
tgtgtttcggtagtgactgtcctct

SEQ ID NO: 2468611 - DNA, 25 bp, Homo sapien
tttggtacaaacatcagcgtcctgc

SEQ ID NO: 2468612 - DNA, 25 bp, Homo sapien
gctgtcaaatggatcagcaagaaca

SEQ ID NO: 2468613 - DNA, 25 bp, Homo sapien
aaaccaaaccttatctgtgtgagtg

SEQ ID NO: 2468614 - DNA, 25 bp, Homo sapien
gctataaatgccgtaattgggacaa

SEQ ID NO: 2468615 - DNA, 25 bp, Homo sapien
gtaaagaggtaccatgtctgccact

SEQ ID NO: 2468616 - DNA, 25 bp, Homo sapien
cttaaagagattgaagaaccaggcc

SEQ ID NO: 2468617 - DNA, 25 bp, Homo sapien
ctagactggatcttgcactgcggac

SEQ ID NO: 2468618 - DNA, 25 bp, Homo sapien
tacttgtttgttatcctagactgga

SEQ ID NO: 2468619 - DNA, 25 bp, Homo sapien
ggtgtgcccactacgaaatgtcagt

SEQ ID NO: 2468620 - DNA, 25 bp, Homo sapien
gatgcccccatagtaggaagcaggg

SEQ ID NO: 2468621 - DNA, 25 bp, Homo sapien
ataggtggaagggacacactggggc

SEQ ID NO: 2468622 - DNA, 25 bp, Homo sapien
atgcccccatagtaggaagcagggg

SEQ ID NO: 2468623 - DNA, 25 bp, Homo sapien
cgatgcccccatagtaggaagcagg

SEQ ID NO: 2468624 - DNA, 25 bp, Homo sapien
gagagcccatgttcatacaccaaag

SEQ ID NO: 2468625 - DNA, 25 bp, Homo sapien
gatgcaccaggttcagagtgagcct

SEQ ID NO: 2468626 - DNA, 25 bp, Homo sapien
caaacctgaaagtaccccaatgaga

SEQ ID NO: 2468627 - DNA, 25 bp, Homo sapien
gttctgtgaggacagcccatgccca

SEQ ID NO: 2468628 - DNA, 25 bp, Homo sapien
aagttgaaagcgaaatggaaattca

SEQ ID NO: 2468629 - DNA, 25 bp, Homo sapien
gaagttgaaagcgaaatggaaattc

SEQ ID NO: 2468630 - DNA, 25 bp, Homo sapien
tggaagttgaaagcgaaatggaaat

SEQ ID NO: 2468631 - DNA, 25 bp, Homo sapien
gatggaagttgaaagcgaaatggaa

SEQ ID NO: 2468632 - DNA, 25 bp, Homo sapien
gatcaggtaccttgggtcgttccaa

SEQ ID NO: 2468633 - DNA, 25 bp, Homo sapien
gacatcgacatgactaacaacctgg

SEQ ID NO: 2468634 - DNA, 25 bp, Homo sapien
tatttcccagtaaacgaggtgacca

SEQ ID NO: 2468635 - DNA, 25 bp, Homo sapien
taatgctggtgtgttgacatcgaca

SEQ ID NO: 2468636 - DNA, 25 bp, Homo sapien
taccctgaagtcattatgtttccag

SEQ ID NO: 2468637 - DNA, 25 bp, Homo sapien
taagccactctagagaactcataga

SEQ ID NO: 2468638 - DNA, 25 bp, Homo sapien
tatcctcatgtaacatattaggcca

SEQ ID NO: 2468639 - DNA, 25 bp, Homo sapien
tattaggacttataaacatgacaga

SEQ ID NO: 2468640 - DNA, 25 bp, Homo sapien
tcaattttggcactcagcgagactg

SEQ ID NO: 2468641 - DNA, 25 bp, Homo sapien
cactcagcgagactggaccagaagt

SEQ ID NO: 2468642 - DNA, 25 bp, Homo sapien
cattacagtatccctttctttcaat

SEQ ID NO: 2468643 - DNA, 25 bp, Homo sapien
cgagactggaccagaagtgaaaaac

SEQ ID NO: 2468644 - DNA, 25 bp, Homo sapien
ctttcatttggactttcaagcattt

SEQ ID NO: 2468645 - DNA, 25 bp, Homo sapien
tttcatttggactttcaagcatttt

SEQ ID NO: 2468646 - DNA, 25 bp, Homo sapien
tagcagcctttggaacaatcagacg

SEQ ID NO: 2468647 - DNA, 25 bp, Homo sapien
tagtccactctgataatgcagcaat

SEQ ID NO: 2468648 - DNA, 25 bp, Homo sapien
gtgctcccagaagcgatgtggtttc

SEQ ID NO: 2468649 - DNA, 25 bp, Homo sapien
gcacattggcgaccatgtgtcgaat

SEQ ID NO: 2468650 - DNA, 25 bp, Homo sapien
cactaatggcagttcgagcatcaat

SEQ ID NO: 2468651 - DNA, 25 bp, Homo sapien
ggcagggtcagtgtcaaccagctca

SEQ ID NO: 2468652 - DNA, 25 bp, Homo sapien
ccattatatggaattgtaccgatca

SEQ ID NO: 2468653 - DNA, 25 bp, Homo sapien
gagcatcaattttttagcaccagga

SEQ ID NO: 2468654 - DNA, 25 bp, Homo sapien
tcttcctctgataccacatctgcat

SEQ ID NO: 2468655 - DNA, 25 bp, Homo sapien
aaaccggaattcttgtatacaggca

SEQ ID NO: 2468656 - DNA, 25 bp, Homo sapien
ggcaaacacaggacagcacacttct

SEQ ID NO: 2468657 - DNA, 25 bp, Homo sapien
gaatgtgtctagagaattcttcctc

SEQ ID NO: 2468658 - DNA, 25 bp, Homo sapien
gattcctttctctcacgtcagcgca

SEQ ID NO: 2468659 - DNA, 25 bp, Homo sapien
gagtgggccattctcctatgcacac

SEQ ID NO: 2468660 - DNA, 25 bp, Homo sapien
tatggtaggaaatcatgaagcaccc

SEQ ID NO: 2468661 - DNA, 25 bp, Homo sapien
tgtgtagttatcaaggcatcctgca

SEQ ID NO: 2468662 - DNA, 25 bp, Homo sapien
gaagaaaaccaaagtactctgctgg

SEQ ID NO: 2468663 - DNA, 25 bp, Homo sapien
tcagctcacaaaaccaacagatgga

SEQ ID NO: 2468664 - DNA, 25 bp, Homo sapien
gaactatgcacgatgcttccaggat

SEQ ID NO: 2468665 - DNA, 25 bp, Homo sapien
catggagtcgaacaatgccttggca

SEQ ID NO: 2468666 - DNA, 25 bp, Homo sapien
atcccaatgtccttgttcgtttctg

SEQ ID NO: 2468667 - DNA, 25 bp, Homo sapien
gatgccatccaagtgccaatggcca

SEQ ID NO: 2468668 - DNA, 25 bp, Homo sapien
cttcttggaggacgacagctggtgt

SEQ ID NO: 2468669 - DNA, 25 bp, Homo sapien
ggaactgaaccagctgtactgctgg

SEQ ID NO: 2468670 - DNA, 25 bp, Homo sapien
ctccctgtcggatgtgtttctcgcc

SEQ ID NO: 2468671 - DNA, 25 bp, Homo sapien
gtctttcacctctgctttgcctggt

SEQ ID NO: 2468672 - DNA, 25 bp, Homo sapien
tgtgtttctcgcctctgctgctgtc

SEQ ID NO: 2468673 - DNA, 25 bp, Homo sapien
tcggatgtgtttctcgcctctgctg

SEQ ID NO: 2468674 - DNA, 25 bp, Homo sapien
tggagtagacatacaggaccttccg

SEQ ID NO: 2468675 - DNA, 25 bp, Homo sapien
cctatggagtagacatacaggacct

SEQ ID NO: 2468676 - DNA, 25 bp, Homo sapien
ctagggtcctatggagtagacatac

SEQ ID NO: 2468677 - DNA, 25 bp, Homo sapien
tagacatacaggaccttccgaactg

SEQ ID NO: 2468678 - DNA, 25 bp, Homo sapien
tgagcccagccagaatctctacttt

SEQ ID NO: 2468679 - DNA, 25 bp, Homo sapien
gagcccagccagaatctctactttt

SEQ ID NO: 2468680 - DNA, 25 bp, Homo sapien
attcttatgatcaagtatgttggag

SEQ ID NO: 2468681 - DNA, 25 bp, Homo sapien
tatgatcaagtatgttggaggaata

SEQ ID NO: 2468682 - DNA, 25 bp, Homo sapien
tggtcaacatgctctaaggcagatt

SEQ ID NO: 2468683 - DNA, 25 bp, Homo sapien
tgtcttgccttgacgacctgtccag

SEQ ID NO: 2468684 - DNA, 25 bp, Homo sapien
tgaggacatccacaacctcattgag

SEQ ID NO: 2468685 - DNA, 25 bp, Homo sapien
ccagcttcctgaatccgtgagaaca

SEQ ID NO: 2468686 - DNA, 25 bp, Homo sapien
tctggtggccggcttcttgacatca

SEQ ID NO: 2468687 - DNA, 25 bp, Homo sapien
gctggctgatgaatgggctccttgc

SEQ ID NO: 2468688 - DNA, 25 bp, Homo sapien
gctttttgccgggaagactgtctct

SEQ ID NO: 2468689 - DNA, 25 bp, Homo sapien
cagatagaattttcagggacgggtc

SEQ ID NO: 2468690 - DNA, 25 bp, Homo sapien
cttttgggaactggatcaacaggag

SEQ ID NO: 2468691 - DNA, 25 bp, Homo sapien
tgatggtccaggcatcagtcttttg

SEQ ID NO: 2468692 - DNA, 25 bp, Homo sapien
ttttgggaactggatcaacaggaga

SEQ ID NO: 2468693 - DNA, 25 bp, Homo sapien
gacacaataggactggtgattgatt

SEQ ID NO: 2468694 - DNA, 25 bp, Homo sapien
aatccattctcagggtagacacaat

SEQ ID NO: 2468695 - DNA, 25 bp, Homo sapien
aaatgccaaggacggctccaagggt

SEQ ID NO: 2468696 - DNA, 25 bp, Homo sapien
ggagatagagattcgtttttgaaag

SEQ ID NO: 2468697 - DNA, 25 bp, Homo sapien
atgaaggagcttctattggtgtctt

SEQ ID NO: 2468698 - DNA, 25 bp, Homo sapien
aggagcttctattggtgtcttcttg

SEQ ID NO: 2468699 - DNA, 25 bp, Homo sapien
ggagcttctattggtgtcttcttgg

SEQ ID NO: 2468700 - DNA, 25 bp, Homo sapien
gaaggagcttctattggtgtcttct

SEQ ID NO: 2468701 - DNA, 25 bp, Homo sapien
ctcagcaatccgcacaaatgaggct

SEQ ID NO: 2468702 - DNA, 25 bp, Homo sapien
tctctcagcaatccgcacaaatgag

SEQ ID NO: 2468703 - DNA, 25 bp, Homo sapien
cagcaatccgcacaaatgaggctgc

SEQ ID NO: 2468704 - DNA, 25 bp, Homo sapien
gagctctctcagcaatccgcacaaa

SEQ ID NO: 2468705 - DNA, 25 bp, Homo sapien
taaagaaggagtggaaaatggcaaa

SEQ ID NO: 2468706 - DNA, 25 bp, Homo sapien
gaggctaaagaaggagtggaaaatg

SEQ ID NO: 2468707 - DNA, 25 bp, Homo sapien
gctaaagaaggagtggaaaatggca

SEQ ID NO: 2468708 - DNA, 25 bp, Homo sapien
ggctaaagaaggagtggaaaatggc

SEQ ID NO: 2468709 - DNA, 25 bp, Homo sapien
ggggctgtctgcctggccgtgggtc

SEQ ID NO: 2468710 - DNA, 25 bp, Homo sapien
agtgttcaattcatatggatgaagg

SEQ ID NO: 2468711 - DNA, 25 bp, Homo sapien
ccgtgggtcagggtcccctgagtct

SEQ ID NO: 2468712 - DNA, 25 bp, Homo sapien
gaagggttatctgggcccatgaggg

SEQ ID NO: 2468713 - DNA, 25 bp, Homo sapien
ggagagatccttgcgatgagcacag

SEQ ID NO: 2468714 - DNA, 25 bp, Homo sapien
actaagccagagtccagaatattgt

SEQ ID NO: 2468715 - DNA, 25 bp, Homo sapien
gagacggttggtctaactaagccag

SEQ ID NO: 2468716 - DNA, 25 bp, Homo sapien
tttccacagacgatcaagagacggt

SEQ ID NO: 2468717 - DNA, 25 bp, Homo sapien
aagtcgagccgtttctgctgtgcca

SEQ ID NO: 2468718 - DNA, 25 bp, Homo sapien
cacacttcccattggtatgttatga

SEQ ID NO: 2468719 - DNA, 25 bp, Homo sapien
gaaaggttcactaaactgaacatgg

SEQ ID NO: 2468720 - DNA, 25 bp, Homo sapien
catgttgccaagtgtgaaaggttca

SEQ ID NO: 2468721 - DNA, 25 bp, Homo sapien
atacaggagtccctatatggagcct

SEQ ID NO: 2468722 - DNA, 25 bp, Homo sapien
cacacagcgatctatatacaggagt

SEQ ID NO: 2468723 - DNA, 25 bp, Homo sapien
gtgttacgctctctcgtctacagga

SEQ ID NO: 2468724 - DNA, 25 bp, Homo sapien
tatggagcctgttcatgatattggc

SEQ ID NO: 2468725 - DNA, 25 bp, Homo sapien
ttaatcattgtagccccatctccag

SEQ ID NO: 2468726 - DNA, 25 bp, Homo sapien
cgtggtatccacaaatcgttgttga

SEQ ID NO: 2468727 - DNA, 25 bp, Homo sapien
caggtgtcaagtaggagccagtatc

SEQ ID NO: 2468728 - DNA, 25 bp, Homo sapien
gaggaagattcgctgtgttccagac

SEQ ID NO: 2468729 - DNA, 25 bp, Homo sapien
gggtgctttgcaagccatgaacata

SEQ ID NO: 2468730 - DNA, 25 bp, Homo sapien
ataatgtatcgggacagattttcct

SEQ ID NO: 2468731 - DNA, 25 bp, Homo sapien
tagcgcttaaacaactctctcgtgg

SEQ ID NO: 2468732 - DNA, 25 bp, Homo sapien
ccttcaggatacatgcaatcagtaa

SEQ ID NO: 2468733 - DNA, 25 bp, Homo sapien
tccataagagcaacagcctcatctg

SEQ ID NO: 2468734 - DNA, 25 bp, Homo sapien
cataagagcaacagcctcatctgtc

SEQ ID NO: 2468735 - DNA, 25 bp, Homo sapien
tgttccataagagcaacagcctcat

SEQ ID NO: 2468736 - DNA, 25 bp, Homo sapien
gaatgttccataagagcaacagcct

SEQ ID NO: 2468737 - DNA, 25 bp, Homo sapien
gcagctgtaagttattttcacaagt

SEQ ID NO: 2468738 - DNA, 25 bp, Homo sapien
tgccctctgaaatttggcagctgta

SEQ ID NO: 2468739 - DNA, 25 bp, Homo sapien
cagcttgaggacttcccgatggatg

SEQ ID NO: 2468740 - DNA, 25 bp, Homo sapien
gatgcgcacgcttgccctctgaaat

SEQ ID NO: 2468741 - DNA, 25 bp, Homo sapien
gcagtgtctggagagaagacaacca

SEQ ID NO: 2468742 - DNA, 25 bp, Homo sapien
atatccaccctgacgatggcataga

SEQ ID NO: 2468743 - DNA, 25 bp, Homo sapien
ctgccggggtctggcagacatggca

SEQ ID NO: 2468744 - DNA, 25 bp, Homo sapien
agtgtctggagagaagacaaccatc

SEQ ID NO: 2468745 - DNA, 25 bp, Homo sapien
gaaacgtcacgtctggtgcctgcaa

SEQ ID NO: 2468746 - DNA, 25 bp, Homo sapien
gttgtcaggaattcagcccgtagac

SEQ ID NO: 2468747 - DNA, 25 bp, Homo sapien
tataaacacacggtattggccagga

SEQ ID NO: 2468748 - DNA, 25 bp, Homo sapien
taggtgcatgcaacagaaacgtcac

SEQ ID NO: 2468749 - DNA, 25 bp, Homo sapien
caggctgcagcccaatagaagaata

SEQ ID NO: 2468750 - DNA, 25 bp, Homo sapien
tagaagaatattgcctgccgtcatg

SEQ ID NO: 2468751 - DNA, 25 bp, Homo sapien
cagaatgccaaacgctgtgtctcca

SEQ ID NO: 2468752 - DNA, 25 bp, Homo sapien
ctatgagtacaccagaggcaccaga

SEQ ID NO: 2468753 - DNA, 25 bp, Homo sapien
ggtcgcacattcttcctccgggtta

SEQ ID NO: 2468754 - DNA, 25 bp, Homo sapien
gcacattcttcctccgggttatcag

SEQ ID NO: 2468755 - DNA, 25 bp, Homo sapien
ctgtggtcgcacattcttcctccgg

SEQ ID NO: 2468756 - DNA, 25 bp, Homo sapien
tgtggtcgcacattcttcctccggg

SEQ ID NO: 2468757 - DNA, 25 bp, Homo sapien
catcggaattccttggccttcgtca

SEQ ID NO: 2468758 - DNA, 25 bp, Homo sapien
cacacaatttgcgatttccgtggcg

SEQ ID NO: 2468759 - DNA, 25 bp, Homo sapien
cacctgcttgtaagagctggtccca

SEQ ID NO: 2468760 - DNA, 25 bp, Homo sapien
ttccgtggcgtcagatggctgttct

SEQ ID NO: 2468761 - DNA, 25 bp, Homo sapien
tcacttggacaaaggtggaaacgga

SEQ ID NO: 2468762 - DNA, 25 bp, Homo sapien
cactacacttctctcgggatgcttt

SEQ ID NO: 2468763 - DNA, 25 bp, Homo sapien
ccttctgggagggatgcgtattccc

SEQ ID NO: 2468764 - DNA, 25 bp, Homo sapien
gtattcccgcgaatccactacactt

SEQ ID NO: 2468765 - DNA, 25 bp, Homo sapien
aaggctggtcactgtttcctttggg

SEQ ID NO: 2468766 - DNA, 25 bp, Homo sapien
aagatgtgagacctatgtgcgcgcg

SEQ ID NO: 2468767 - DNA, 25 bp, Homo sapien
ttccaaggacccttgcttgaaggct

SEQ ID NO: 2468768 - DNA, 25 bp, Homo sapien
cctttgggcctccaggagtgttagg

SEQ ID NO: 2468769 - DNA, 25 bp, Homo sapien
gcttccgagccacgtcgggtcactg

SEQ ID NO: 2468770 - DNA, 25 bp, Homo sapien
gggtcactgcctcattagccacgta

SEQ ID NO: 2468771 - DNA, 25 bp, Homo sapien
ctaacgcagtgtatatctgggggtt

SEQ ID NO: 2468772 - DNA, 25 bp, Homo sapien
tttcttgacaacaagccgcagtggc

SEQ ID NO: 2468773 - DNA, 25 bp, Homo sapien
ctgcagaggtgctccggtagaggcc

SEQ ID NO: 2468774 - DNA, 25 bp, Homo sapien
tggaggatcggccctctgcagaggt

SEQ ID NO: 2468775 - DNA, 25 bp, Homo sapien
cgccacatgtcgtctctgggctgga

SEQ ID NO: 2468776 - DNA, 25 bp, Homo sapien
gtgctccggtagaggccgccagacg

SEQ ID NO: 2468777 - DNA, 25 bp, Homo sapien
tggcaggcgcggaaggccggtgcgg

SEQ ID NO: 2468778 - DNA, 25 bp, Homo sapien
gccccatgctgccagcgcgaacttc

SEQ ID NO: 2468779 - DNA, 25 bp, Homo sapien
gcactcccggcggagcggctcttgc

SEQ ID NO: 2468780 - DNA, 25 bp, Homo sapien
ggtgcggcgtcaccgccccatgctg

SEQ ID NO: 2468781 - DNA, 25 bp, Homo sapien
cccgggaggcgagccgtcggtgagg

SEQ ID NO: 2468782 - DNA, 25 bp, Homo sapien
ccgtcggtgaggatgcatcctcctt

SEQ ID NO: 2468783 - DNA, 25 bp, Homo sapien
gaggcgagccgtcggtgaggatgca

SEQ ID NO: 2468784 - DNA, 25 bp, Homo sapien
cgagccgtcggtgaggatgcatcct

SEQ ID NO: 2468785 - DNA, 25 bp, Homo sapien
ctgggtcgccctggcacccgcggtc

SEQ ID NO: 2468786 - DNA, 25 bp, Homo sapien
cgcagcggcacgccgagggtctcca

SEQ ID NO: 2468787 - DNA, 25 bp, Homo sapien
gctcgctcccggctttcgcagactt

SEQ ID NO: 2468788 - DNA, 25 bp, Homo sapien
gccacccgcgcggtccgcagcggca

SEQ ID NO: 2468789 - DNA, 25 bp, Homo sapien
gcgcataacgcaaataggtgctcac

SEQ ID NO: 2468790 - DNA, 25 bp, Homo sapien
caaactccggaattgggagacacaa

SEQ ID NO: 2468791 - DNA, 25 bp, Homo sapien
tgctcacaggcatccgaacagtatg

SEQ ID NO: 2468792 - DNA, 25 bp, Homo sapien
cctcggaagcgaaggccttctgcga

SEQ ID NO: 2468793 - DNA, 25 bp, Homo sapien
aaatatctgccacgccacgcgttca

SEQ ID NO: 2468794 - DNA, 25 bp, Homo sapien
cacgccacgcgttcaaagccagcaa

SEQ ID NO: 2468795 - DNA, 25 bp, Homo sapien
tatctgccacgccacgcgttcaaag

SEQ ID NO: 2468796 - DNA, 25 bp, Homo sapien
ctgaaatatctgccacgccacgcgt

SEQ ID NO: 2468797 - DNA, 25 bp, Homo sapien
gaatagtagttgaagcaggtgaata

SEQ ID NO: 2468798 - DNA, 25 bp, Homo sapien
ggtgaatatggaggaataactcttc

SEQ ID NO: 2468799 - DNA, 25 bp, Homo sapien
gagaaggaggtttttgatcatgata

SEQ ID NO: 2468800 - DNA, 25 bp, Homo sapien
tcccaataagaatagtagttgaagc

SEQ ID NO: 2468801 - DNA, 25 bp, Homo sapien
tgtcccgggcctcatgaacccgcag

SEQ ID NO: 2468802 - DNA, 25 bp, Homo sapien
ctgagtgctttcagaattgttatca

SEQ ID NO: 2468803 - DNA, 25 bp, Homo sapien
attgttatcataactgtcccgggcc

SEQ ID NO: 2468804 - DNA, 25 bp, Homo sapien
ttgttatcataactgtcccgggcct

SEQ ID NO: 2468805 - DNA, 25 bp, Homo sapien
tgccagacagtcttggcggagagct

SEQ ID NO: 2468806 - DNA, 25 bp, Homo sapien
tgactgccagacagtcttggcggag

SEQ ID NO: 2468807 - DNA, 25 bp, Homo sapien
actgccagacagtcttggcggagag

SEQ ID NO: 2468808 - DNA, 25 bp, Homo sapien
ctgactgccagacagtcttggcgga

SEQ ID NO: 2468809 - DNA, 25 bp, Homo sapien
ttttgcctttatctgtagacctttc

SEQ ID NO: 2468810 - DNA, 25 bp, Homo sapien
ttgcacataattacacttttcttgg

SEQ ID NO: 2468811 - DNA, 25 bp, Homo sapien
tgtagacctttctttgtacgatggg

SEQ ID NO: 2468812 - DNA, 25 bp, Homo sapien
acataattacacttttcttggagga

SEQ ID NO: 2468813 - DNA, 25 bp, Homo sapien
agccatccaagagcccatccaagat

SEQ ID NO: 2468814 - DNA, 25 bp, Homo sapien
ccaagatcctggtaaatatcgtgat

SEQ ID NO: 2468815 - DNA, 25 bp, Homo sapien
atatcgtgatgttgtcattggtctc

SEQ ID NO: 2468816 - DNA, 25 bp, Homo sapien
cagcccgggccgaagtctgttgtcg

SEQ ID NO: 2468817 - DNA, 25 bp, Homo sapien
ctgggctgaggcctcgccgtggggc

SEQ ID NO: 2468818 - DNA, 25 bp, Homo sapien
gcagctcagggccacgccgtcgcca

SEQ ID NO: 2468819 - DNA, 25 bp, Homo sapien
agggccacgccgtcgccacagagag

SEQ ID NO: 2468820 - DNA, 25 bp, Homo sapien
gttttgcaaacacccgagcttccat

SEQ ID NO: 2468821 - DNA, 25 bp, Homo sapien
tccgtgtcggacaccgggccgaagc

SEQ ID NO: 2468822 - DNA, 25 bp, Homo sapien
acaccgggccgaagctggtgacgta

SEQ ID NO: 2468823 - DNA, 25 bp, Homo sapien
cgtagatgtcggtcctcacctgagt

SEQ ID NO: 2468824 - DNA, 25 bp, Homo sapien
aagctggtgacgtagatgtcggtcc

SEQ ID NO: 2468825 - DNA, 25 bp, Homo sapien
tgcatgggccccttaaaccgaagcc

SEQ ID NO: 2468826 - DNA, 25 bp, Homo sapien
catggtgtagagcagggtgccgtcg

SEQ ID NO: 2468827 - DNA, 25 bp, Homo sapien
tcccgttgtggaagaacgtgtctgg

SEQ ID NO: 2468828 - DNA, 25 bp, Homo sapien
tgtgagcgatggacttcttcccgtt

SEQ ID NO: 2468829 - DNA, 25 bp, Homo sapien
tggcaggactgttcgtccagatgct

SEQ ID NO: 2468830 - DNA, 25 bp, Homo sapien
gcaggactgttcgtccagatgcttc

SEQ ID NO: 2468831 - DNA, 25 bp, Homo sapien
agcgtggcaggactgttcgtccaga

SEQ ID NO: 2468832 - DNA, 25 bp, Homo sapien
aagagcgtggcaggactgttcgtcc

SEQ ID NO: 2468833 - DNA, 25 bp, Homo sapien
tcaggtgaccgacagcagcagctgt

SEQ ID NO: 2468834 - DNA, 25 bp, Homo sapien
ggtgaccgacagcagcagctgtaga

SEQ ID NO: 2468835 - DNA, 25 bp, Homo sapien
cgacagcagcagctgtagatcttgt

SEQ ID NO: 2468836 - DNA, 25 bp, Homo sapien
tgaccgacagcagcagctgtagatc

SEQ ID NO: 2468837 - DNA, 25 bp, Homo sapien
ttcctctaaagtctggatgagtttc

SEQ ID NO: 2468838 - DNA, 25 bp, Homo sapien
cacaaaatatgtcccgaacagaaac

SEQ ID NO: 2468839 - DNA, 25 bp, Homo sapien
agttacgatttaggcaatacataac

SEQ ID NO: 2468840 - DNA, 25 bp, Homo sapien
caagttacgatttaggcaatacata

SEQ ID NO: 2468841 - DNA, 25 bp, Homo sapien
atatgtcccgaacagaaacccagag

SEQ ID NO: 2468842 - DNA, 25 bp, Homo sapien
tgtaggagattaaccccataacttg

SEQ ID NO: 2468843 - DNA, 25 bp, Homo sapien
caaaagaatggcacacagcagttgt

SEQ ID NO: 2468844 - DNA, 25 bp, Homo sapien
acagcagttgttgcccaagcctggg

SEQ ID NO: 2468845 - DNA, 25 bp, Homo sapien
tggcacacagcagttgttgcccaag

SEQ ID NO: 2468846 - DNA, 25 bp, Homo sapien
accatgcttgtctgcagccccaagc

SEQ ID NO: 2468847 - DNA, 25 bp, Homo sapien
ccatgcttgtctgcagccccaagct

SEQ ID NO: 2468848 - DNA, 25 bp, Homo sapien
catgcttgtctgcagccccaagctc

SEQ ID NO: 2468849 - DNA, 25 bp, Homo sapien
caccatgcttgtctgcagccccaag

SEQ ID NO: 2468850 - DNA, 25 bp, Homo sapien
tagttgctgtaagccgcaataccat

SEQ ID NO: 2468851 - DNA, 25 bp, Homo sapien
tctttggcacggccccctggttctg

SEQ ID NO: 2468852 - DNA, 25 bp, Homo sapien
atctttggcacggccccctggttct

SEQ ID NO: 2468853 - DNA, 25 bp, Homo sapien
attgaatgaagcgaagttcttgttt

SEQ ID NO: 2468854 - DNA, 25 bp, Homo sapien
tctctcttgccagtattgaatgaag

SEQ ID NO: 2468855 - DNA, 25 bp, Homo sapien
catctctcttgccagtattgaatga

SEQ ID NO: 2468856 - DNA, 25 bp, Homo sapien
ctcttgccagtattgaatgaagcga

SEQ ID NO: 2468857 - DNA, 25 bp, Homo sapien
caggcgctggcagccaccctctgct

SEQ ID NO: 2468858 - DNA, 25 bp, Homo sapien
gtgagccaggcgctggcagccaccc

SEQ ID NO: 2468859 - DNA, 25 bp, Homo sapien
aggtgagccaggcgctggcagccac

SEQ ID NO: 2468860 - DNA, 25 bp, Homo sapien
gagccaggcgctggcagccaccctc

SEQ ID NO: 2468861 - DNA, 25 bp, Homo sapien
tcttgtaactgtgcctgcttctcct

SEQ ID NO: 2468862 - DNA, 25 bp, Homo sapien
ctgctcttgtaactgtgcctgcttc

SEQ ID NO: 2468863 - DNA, 25 bp, Homo sapien
gcactagctccagcggacttgaaaa

SEQ ID NO: 2468864 - DNA, 25 bp, Homo sapien
gcctgcttctcctgggcactagctc

SEQ ID NO: 2468865 - DNA, 25 bp, Homo sapien
ggatgctaggaatgggccgaggtgc

SEQ ID NO: 2468866 - DNA, 25 bp, Homo sapien
acttagtgcaggcacccggttagta

SEQ ID NO: 2468867 - DNA, 25 bp, Homo sapien
gcacattcccactactggtcggtgc

SEQ ID NO: 2468868 - DNA, 25 bp, Homo sapien
ttagtgcaggcacccggttagtata

SEQ ID NO: 2468869 - DNA, 25 bp, Homo sapien
cattcccactactggtcggtgcggg

SEQ ID NO: 2468870 - DNA, 25 bp, Homo sapien
ctcaactgggccgttagctgctgtt

SEQ ID NO: 2468871 - DNA, 25 bp, Homo sapien
gctggctggcagcttccagacgctc

SEQ ID NO: 2468872 - DNA, 25 bp, Homo sapien
actgggccgttagctgctgtttctg

SEQ ID NO: 2468873 - DNA, 25 bp, Homo sapien
caactgggccgttagctgctgtttc

SEQ ID NO: 2468874 - DNA, 25 bp, Homo sapien
ggccccatcctcggcagctccctcc

SEQ ID NO: 2468875 - DNA, 25 bp, Homo sapien
ctgggcctcctgcaacttttggcag

SEQ ID NO: 2468876 - DNA, 25 bp, Homo sapien
gcctcctgcaacttttggcaggcca

SEQ ID NO: 2468877 - DNA, 25 bp, Homo sapien
caacttttggcaggccatctcggcc

SEQ ID NO: 2468878 - DNA, 25 bp, Homo sapien
ttcattagctgggtctgctgcagcc

SEQ ID NO: 2468879 - DNA, 25 bp, Homo sapien
attagctgggtctgctgcagccact

SEQ ID NO: 2468880 - DNA, 25 bp, Homo sapien
ttcctgctgctgcaactggttcatt

SEQ ID NO: 2468881 - DNA, 25 bp, Homo sapien
ctgctgctgcaactggttcattagc

SEQ ID NO: 2468882 - DNA, 25 bp, Homo sapien
gtgacccaggtaatggtctggctgc

SEQ ID NO: 2468883 - DNA, 25 bp, Homo sapien
caggtgacccaggtaatggtctggc

SEQ ID NO: 2468884 - DNA, 25 bp, Homo sapien
tgacccaggtaatggtctggctgct

SEQ ID NO: 2468885 - DNA, 25 bp, Homo sapien
tgcaggtgacccaggtaatggtctg

SEQ ID NO: 2468886 - DNA, 25 bp, Homo sapien
cccagaccttcttggatggggtgga

SEQ ID NO: 2468887 - DNA, 25 bp, Homo sapien
ccagaccttcttggatggggtggag

SEQ ID NO: 2468888 - DNA, 25 bp, Homo sapien
agaccttcttggatggggtggaggt

SEQ ID NO: 2468889 - DNA, 25 bp, Homo sapien
ctcccagaccttcttggatggggtg

SEQ ID NO: 2468890 - DNA, 25 bp, Homo sapien
ccaactgtagtacgctcttgttctc

SEQ ID NO: 2468891 - DNA, 25 bp, Homo sapien
tgctccaactgtagtacgctcttgt

SEQ ID NO: 2468892 - DNA, 25 bp, Homo sapien
aactgtagtacgctcttgttctcat

SEQ ID NO: 2468893 - DNA, 25 bp, Homo sapien
ctccaactgtagtacgctcttgttc

SEQ ID NO: 2468894 - DNA, 25 bp, Homo sapien
ttgaagctgttctgtggctcggcca

SEQ ID NO: 2468895 - DNA, 25 bp, Homo sapien
agcgctcctgccactctctctagtt

SEQ ID NO: 2468896 - DNA, 25 bp, Homo sapien
ctggagcgctcctgccactctctct

SEQ ID NO: 2468897 - DNA, 25 bp, Homo sapien
agctccgcctcagagggcactgctg

SEQ ID NO: 2468898 - DNA, 25 bp, Homo sapien
ctgcagctccgcctcagagggcact

SEQ ID NO: 2468899 - DNA, 25 bp, Homo sapien
tctctacccgatatttatcatgctt

SEQ ID NO: 2468900 - DNA, 25 bp, Homo sapien
ctctacccgatatttatcatgcttc

SEQ ID NO: 2468901 - DNA, 25 bp, Homo sapien
ccctctctagctggacttctttaag

SEQ ID NO: 2468902 - DNA, 25 bp, Homo sapien
ggacttctttaagtgactccttcaa

SEQ ID NO: 2468903 - DNA, 25 bp, Homo sapien
tttagatgttcagcatattcatccc

SEQ ID NO: 2468904 - DNA, 25 bp, Homo sapien
tagatgttcagcatattcatccctc

SEQ ID NO: 2468905 - DNA, 25 bp, Homo sapien
cttccactccgtacgtgctttactg

SEQ ID NO: 2468906 - DNA, 25 bp, Homo sapien
gtacgtgctttactgcggctggaga

SEQ ID NO: 2468907 - DNA, 25 bp, Homo sapien
tgctctaacttccactccgtacgtg

SEQ ID NO: 2468908 - DNA, 25 bp, Homo sapien
cagctgcgctttcagcagtgcctgc

SEQ ID NO: 2468909 - DNA, 25 bp, Homo sapien
tgctctgtctggtttctttggacat

SEQ ID NO: 2468910 - DNA, 25 bp, Homo sapien
tgttccttggcctcggccaatttgc

SEQ ID NO: 2468911 - DNA, 25 bp, Homo sapien
ctgttccttggcctcggccaatttg

SEQ ID NO: 2468912 - DNA, 25 bp, Homo sapien
atttgctctgtctggtttctttgga

SEQ ID NO: 2468913 - DNA, 25 bp, Homo sapien
cccttcaagtttgtgcccattagca

SEQ ID NO: 2468914 - DNA, 25 bp, Homo sapien
tgctttgcccttcaagtttgtgccc

SEQ ID NO: 2468915 - DNA, 25 bp, Homo sapien
ttgcccttcaagtttgtgcccatta

SEQ ID NO: 2468916 - DNA, 25 bp, Homo sapien
cttcaagtttgtgcccattagcaaa

SEQ ID NO: 2468917 - DNA, 25 bp, Homo sapien
aaatctttggtaagagtccactggg

SEQ ID NO: 2468918 - DNA, 25 bp, Homo sapien
agtccactggggtcccctgattcca

SEQ ID NO: 2468919 - DNA, 25 bp, Homo sapien
tcaaatctttggtaagagtccactg

SEQ ID NO: 2468920 - DNA, 25 bp, Homo sapien
ctgattccacgctgccaatcctggg

SEQ ID NO: 2468921 - DNA, 25 bp, Homo sapien
caaacactgtttgccagaagactca

SEQ ID NO: 2468922 - DNA, 25 bp, Homo sapien
aaacactgtttgccagaagactcac

SEQ ID NO: 2468923 - DNA, 25 bp, Homo sapien
aggcaaacactgtttgccagaagac

SEQ ID NO: 2468924 - DNA, 25 bp, Homo sapien
gcaaacactgtttgccagaagactc

SEQ ID NO: 2468925 - DNA, 25 bp, Homo sapien
cctccttctatgaaatgttgaggca

SEQ ID NO: 2468926 - DNA, 25 bp, Homo sapien
tattaataaggcctttatccaatgg

SEQ ID NO: 2468927 - DNA, 25 bp, Homo sapien
gcctttatccaatggagtcctcctt

SEQ ID NO: 2468928 - DNA, 25 bp, Homo sapien
taataaggcctttatccaatggagt

SEQ ID NO: 2468929 - DNA, 25 bp, Homo sapien
ccaaagggagaacatatgttcactg

SEQ ID NO: 2468930 - DNA, 25 bp, Homo sapien
gcacaattgtggcagctctacacgg

SEQ ID NO: 2468931 - DNA, 25 bp, Homo sapien
gaagtacttgttcacagcacaattg

SEQ ID NO: 2468932 - DNA, 25 bp, Homo sapien
tctcattaccaggtgtgaaggcaca

SEQ ID NO: 2468933 - DNA, 25 bp, Homo sapien
gtgtaaggctgactccaaccctcca

SEQ ID NO: 2468934 - DNA, 25 bp, Homo sapien
agtaatggctgcgtgtaaggctgac

SEQ ID NO: 2468935 - DNA, 25 bp, Homo sapien
tctctgcagtaatggctgcgtgtaa

SEQ ID NO: 2468936 - DNA, 25 bp, Homo sapien
ggctgcgtgtaaggctgactccaac

SEQ ID NO: 2468937 - DNA, 25 bp, Homo sapien
aagatcaatcaccaatcgatgacct

SEQ ID NO: 2468938 - DNA, 25 bp, Homo sapien
gatcaatcaccaatcgatgacctgg

SEQ ID NO: 2468939 - DNA, 25 bp, Homo sapien
tcaatcaccaatcgatgacctggac

SEQ ID NO: 2468940 - DNA, 25 bp, Homo sapien
atcaatcaccaatcgatgacctgga

SEQ ID NO: 2468941 - DNA, 25 bp, Homo sapien
atttgagtgaaacgccatcccctcc

SEQ ID NO: 2468942 - DNA, 25 bp, Homo sapien
gccaatttgagtgaaacgccatccc

SEQ ID NO: 2468943 - DNA, 25 bp, Homo sapien
caatttgagtgaaacgccatcccct

SEQ ID NO: 2468944 - DNA, 25 bp, Homo sapien
tgtgccaatttgagtgaaacgccat

SEQ ID NO: 2468945 - DNA, 25 bp, Homo sapien
ggcctgcttctcagcggtgggcaac

SEQ ID NO: 2468946 - DNA, 25 bp, Homo sapien
gcttctcagcggtgggcaacagcat

SEQ ID NO: 2468947 - DNA, 25 bp, Homo sapien
cttctcagcggtgggcaacagcatg

SEQ ID NO: 2468948 - DNA, 25 bp, Homo sapien
ctgcttctcagcggtgggcaacagc

SEQ ID NO: 2468949 - DNA, 25 bp, Homo sapien
gcacgtctgcgctgcttgccagggt

SEQ ID NO: 2468950 - DNA, 25 bp, Homo sapien
tcagcacgtctgcgctgcttgccag

SEQ ID NO: 2468951 - DNA, 25 bp, Homo sapien
gtgctcagcacgtctgcgctgcttg

SEQ ID NO: 2468952 - DNA, 25 bp, Homo sapien
acgtctgcgctgcttgccagggtca

SEQ ID NO: 2468953 - DNA, 25 bp, Homo sapien
gggctggtactaaacacagtgacag

SEQ ID NO: 2468954 - DNA, 25 bp, Homo sapien
ctggtactaaacacagtgacagctc

SEQ ID NO: 2468955 - DNA, 25 bp, Homo sapien
acagtgacagctcaggtgacatgcc

SEQ ID NO: 2468956 - DNA, 25 bp, Homo sapien
tactaaacacagtgacagctcaggt

SEQ ID NO: 2468957 - DNA, 25 bp, Homo sapien
aagtcggcgcgcactgatctgagtc

SEQ ID NO: 2468958 - DNA, 25 bp, Homo sapien
taactagactcgagtgccacctaaa

SEQ ID NO: 2468959 - DNA, 25 bp, Homo sapien
tgccatgcacaagcacgctggtctt

SEQ ID NO: 2468960 - DNA, 25 bp, Homo sapien
gaagggccaacaaagcaagccacta

SEQ ID NO: 2468961 - DNA, 25 bp, Homo sapien
cctcggagtggggtgcatccttcct

SEQ ID NO: 2468962 - DNA, 25 bp, Homo sapien
ggagtggggtgcatccttcctgcaa

SEQ ID NO: 2468963 - DNA, 25 bp, Homo sapien
tcggagtggggtgcatccttcctgc

SEQ ID NO: 2468964 - DNA, 25 bp, Homo sapien
ccctcggagtggggtgcatccttcc

SEQ ID NO: 2468965 - DNA, 25 bp, Homo sapien
caacaacaggatggcagacaacatt

SEQ ID NO: 2468966 - DNA, 25 bp, Homo sapien
acaacaggatggcagacaacatttg

SEQ ID NO: 2468967 - DNA, 25 bp, Homo sapien
aacaacaggatggcagacaacattt

SEQ ID NO: 2468968 - DNA, 25 bp, Homo sapien
caacaggatggcagacaacatttgg

SEQ ID NO: 2468969 - DNA, 25 bp, Homo sapien
tgacactgagattttagcacaagac

SEQ ID NO: 2468970 - DNA, 25 bp, Homo sapien
gttcccaggctagaaaactgagcat

SEQ ID NO: 2468971 - DNA, 25 bp, Homo sapien
tatttggatacagaggcgcttcccc

SEQ ID NO: 2468972 - DNA, 25 bp, Homo sapien
gacatcgccttctgctgataggaaa

SEQ ID NO: 2468973 - DNA, 25 bp, Homo sapien
ggatggccagggccaagtgctggtc

SEQ ID NO: 2468974 - DNA, 25 bp, Homo sapien
ctcagcatgcctctctgcacagcca

SEQ ID NO: 2468975 - DNA, 25 bp, Homo sapien
acagccagctccagcaggatggcca

SEQ ID NO: 2468976 - DNA, 25 bp, Homo sapien
tgcacagccagctccagcaggatgg

SEQ ID NO: 2468977 - DNA, 25 bp, Homo sapien
gccctttagtgcctggtattccgtg

SEQ ID NO: 2468978 - DNA, 25 bp, Homo sapien
cctttagtgcctggtattccgtgaa

SEQ ID NO: 2468979 - DNA, 25 bp, Homo sapien
tttagtgcctggtattccgtgaaca

SEQ ID NO: 2468980 - DNA, 25 bp, Homo sapien
tggccctttagtgcctggtattccg

SEQ ID NO: 2468981 - DNA, 25 bp, Homo sapien
aaaacagtggatgcaggaacgaagc

SEQ ID NO: 2468982 - DNA, 25 bp, Homo sapien
acagtggatgcaggaacgaagcgac

SEQ ID NO: 2468983 - DNA, 25 bp, Homo sapien
aaatgaaaacagtggatgcaggaac

SEQ ID NO: 2468984 - DNA, 25 bp, Homo sapien
tgaaaacagtggatgcaggaacgaa

SEQ ID NO: 2468985 - DNA, 25 bp, Homo sapien
gcttactccatacccagctctccag

SEQ ID NO: 2468986 - DNA, 25 bp, Homo sapien
tggttgcttactccatacccagctc

SEQ ID NO: 2468987 - DNA, 25 bp, Homo sapien
gttgcttactccatacccagctctc

SEQ ID NO: 2468988 - DNA, 25 bp, Homo sapien
ctggttgcttactccatacccagct

SEQ ID NO: 2468989 - DNA, 25 bp, Homo sapien
agaatgccataccatctgtcagtct

SEQ ID NO: 2468990 - DNA, 25 bp, Homo sapien
cagaatgccataccatctgtcagtc

SEQ ID NO: 2468991 - DNA, 25 bp, Homo sapien
gatggtggacgtctatagttccagc

SEQ ID NO: 2468992 - DNA, 25 bp, Homo sapien
taatcccaagcactctaagaggccg

SEQ ID NO: 2468993 - DNA, 25 bp, Homo sapien
aaattcaccaggtatgatggtggac

SEQ ID NO: 2468994 - DNA, 25 bp, Homo sapien
taaagcaatatatcggccgggagtg

SEQ ID NO: 2468995 - DNA, 25 bp, Homo sapien
gaaaacagttcagcacatgacccaa

SEQ ID NO: 2468996 - DNA, 25 bp, Homo sapien
aaacgtgacagattgccagtgggaa

SEQ ID NO: 2468997 - DNA, 25 bp, Homo sapien
agcaacagaaacgtgacagattgcc

SEQ ID NO: 2468998 - DNA, 25 bp, Homo sapien
tgcaaactaaaacagccacttcgga

SEQ ID NO: 2468999 - DNA, 25 bp, Homo sapien
tcaaccatttggagtcgaggcgagc

SEQ ID NO: 2469000 - DNA, 25 bp, Homo sapien
ttttcaaccatttggagtcgaggcg

SEQ ID NO: 2469001 - DNA, 25 bp, Homo sapien
accatttggagtcgaggcgagcccg

SEQ ID NO: 2469002 - DNA, 25 bp, Homo sapien
ctgttttcaaccatttggagtcgag

SEQ ID NO: 2469003 - DNA, 25 bp, Homo sapien
cttttctccagcttcctcccaggtc

SEQ ID NO: 2469004 - DNA, 25 bp, Homo sapien
tccagcttcctcccaggtctcaggc

SEQ ID NO: 2469005 - DNA, 25 bp, Homo sapien
ttttctccagcttcctcccaggtct

SEQ ID NO: 2469006 - DNA, 25 bp, Homo sapien
ttctccagcttcctcccaggtctca

SEQ ID NO: 2469007 - DNA, 25 bp, Homo sapien
gcgtgcggacgcagcctcccaagag

SEQ ID NO: 2469008 - DNA, 25 bp, Homo sapien
ccccgccggcgtgcggacgcagcct

SEQ ID NO: 2469009 - DNA, 25 bp, Homo sapien
gacgcagcctcccaagagccgctgg

SEQ ID NO: 2469010 - DNA, 25 bp, Homo sapien
gccggcgtgcggacgcagcctccca

SEQ ID NO: 2469011 - DNA, 25 bp, Homo sapien
tgggtaagcctggtcaaagcggctc

SEQ ID NO: 2469012 - DNA, 25 bp, Homo sapien
tatcttcaaaggaggtgggttccat

SEQ ID NO: 2469013 - DNA, 25 bp, Homo sapien
gagtgcgggacagcatgaaagcaca

SEQ ID NO: 2469014 - DNA, 25 bp, Homo sapien
gatggaaattttgagagagcaggca

SEQ ID NO: 2469015 - DNA, 25 bp, Homo sapien
gacccaggtaatggtctcgctgctg

SEQ ID NO: 2469016 - DNA, 25 bp, Homo sapien
caggtgacccaggtaatggtctcgc

SEQ ID NO: 2469017 - DNA, 25 bp, Homo sapien
ggtgacccaggtaatggtctcgctg

SEQ ID NO: 2469018 - DNA, 25 bp, Homo sapien
tgacccaggtaatggtctcgctgct

SEQ ID NO: 2469019 - DNA, 25 bp, Homo sapien
tgctcgtgcatcttctccttttgcc

SEQ ID NO: 2469020 - DNA, 25 bp, Homo sapien
cgtatcttctcctcctggtcgtgca

SEQ ID NO: 2469021 - DNA, 25 bp, Homo sapien
tcttctcctcctggtcgtgcatctt

SEQ ID NO: 2469022 - DNA, 25 bp, Homo sapien
gcttccgtatcttctcctgctcgtg

SEQ ID NO: 2469023 - DNA, 25 bp, Homo sapien
cagattctacaagttgaagtttttc

SEQ ID NO: 2469024 - DNA, 25 bp, Homo sapien
ttttagctcctttacgttgagctgg

SEQ ID NO: 2469025 - DNA, 25 bp, Homo sapien
tagctcctttacgttgagctggatc

SEQ ID NO: 2469026 - DNA, 25 bp, Homo sapien
aggagcttggccctctccagtttcc

SEQ ID NO: 2469027 - DNA, 25 bp, Homo sapien
gcacaccacccatgctaagggcccc

SEQ ID NO: 2469028 - DNA, 25 bp, Homo sapien
accacccatgctaagggcccccaga

SEQ ID NO: 2469029 - DNA, 25 bp, Homo sapien
caccacccatgctaagggcccccag

SEQ ID NO: 2469030 - DNA, 25 bp, Homo sapien
ccagcacaccacccatgctaagggc

SEQ ID NO: 2469031 - DNA, 25 bp, Homo sapien
gtgttcctgtacagttccagactca

SEQ ID NO: 2469032 - DNA, 25 bp, Homo sapien
cctctcctttgttaactcctcaatg

SEQ ID NO: 2469033 - DNA, 25 bp, Homo sapien
acagttccagactcagggcgtccct

SEQ ID NO: 2469034 - DNA, 25 bp, Homo sapien
tctcctttgttaactcctcaatgta

SEQ ID NO: 2469035 - DNA, 25 bp, Homo sapien
ctgcaaacttccatgaatcatgcag

SEQ ID NO: 2469036 - DNA, 25 bp, Homo sapien
cggccacgcaacacagctctaaaca

SEQ ID NO: 2469037 - DNA, 25 bp, Homo sapien
acacagctctaaacactggactctc

SEQ ID NO: 2469038 - DNA, 25 bp, Homo sapien
ggactctcatatctaccaacactca

SEQ ID NO: 2469039 - DNA, 25 bp, Homo sapien
cactggactctcatatctaccaaca

SEQ ID NO: 2469040 - DNA, 25 bp, Homo sapien
tcaaccatttggagtcgaggcgagc

SEQ ID NO: 2469041 - DNA, 25 bp, Homo sapien
ttttcaaccatttggagtcgaggcg

SEQ ID NO: 2469042 - DNA, 25 bp, Homo sapien
accatttggagtcgaggcgagcctg

SEQ ID NO: 2469043 - DNA, 25 bp, Homo sapien
ctgttttcaaccatttggagtcgag

SEQ ID NO: 2469044 - DNA, 25 bp, Homo sapien
cttttctccagcttcctcccaggtc

SEQ ID NO: 2469045 - DNA, 25 bp, Homo sapien
tccagcttcctcccaggtctcaggc

SEQ ID NO: 2469046 - DNA, 25 bp, Homo sapien
ttttctccagcttcctcccaggtct

SEQ ID NO: 2469047 - DNA, 25 bp, Homo sapien
ttctccagcttcctcccaggtctca

SEQ ID NO: 2469048 - DNA, 25 bp, Homo sapien
ctgacgcgcagggcccggccgcctc

SEQ ID NO: 2469049 - DNA, 25 bp, Homo sapien
cgcgcagggcccggccgcctcgcct

SEQ ID NO: 2469050 - DNA, 25 bp, Homo sapien
cgcagggcccggccgcctcgcctcg

SEQ ID NO: 2469051 - DNA, 25 bp, Homo sapien
gacgcgcagggcccggccgcctcgc

SEQ ID NO: 2469052 - DNA, 25 bp, Homo sapien
acctcaggtggtccatccactttgg

SEQ ID NO: 2469053 - DNA, 25 bp, Homo sapien
cacgcctggcctatttatttactta

SEQ ID NO: 2469054 - DNA, 25 bp, Homo sapien
accacgcctggcctatttatttact

SEQ ID NO: 2469055 - DNA, 25 bp, Homo sapien
tcaggtggtccatccactttggcct

SEQ ID NO: 2469056 - DNA, 25 bp, Homo sapien
tgcagctgtgtagcctgcgctggcc

SEQ ID NO: 2469057 - DNA, 25 bp, Homo sapien
gactgttcccgtgcgcagagagact

SEQ ID NO: 2469058 - DNA, 25 bp, Homo sapien
agagactggcctgtttgacctgcag

SEQ ID NO: 2469059 - DNA, 25 bp, Homo sapien
tcctgttgtgggtcctttgttctca

SEQ ID NO: 2469060 - DNA, 25 bp, Homo sapien
gctgtccacacaggttgtctcctgt

SEQ ID NO: 2469061 - DNA, 25 bp, Homo sapien
tgtgtcttcgtcttcgctgcgtgtg

SEQ ID NO: 2469062 - DNA, 25 bp, Homo sapien
gctgcgtgtgactttttggttcctg

SEQ ID NO: 2469063 - DNA, 25 bp, Homo sapien
tatgggacattggttctacagcaga

SEQ ID NO: 2469064 - DNA, 25 bp, Homo sapien
agctcctccacgggcgaagaggtga

SEQ ID NO: 2469065 - DNA, 25 bp, Homo sapien
ggagctcctccacgggcgaagaggt

SEQ ID NO: 2469066 - DNA, 25 bp, Homo sapien
gagctcctccacgggcgaagaggtg

SEQ ID NO: 2469067 - DNA, 25 bp, Homo sapien
actgtcttgtctttcagcaacccca

SEQ ID NO: 2469068 - DNA, 25 bp, Homo sapien
gcactgtcttgtctttcagcaaccc

SEQ ID NO: 2469069 - DNA, 25 bp, Homo sapien
cctgcactgtcttgtctttcagcaa

SEQ ID NO: 2469070 - DNA, 25 bp, Homo sapien
tgcactgtcttgtctttcagcaacc

SEQ ID NO: 2469071 - DNA, 25 bp, Homo sapien
tgggtaagcctggtcaaagcggctc

SEQ ID NO: 2469072 - DNA, 25 bp, Homo sapien
gatggaaattttgagagagcaggca

SEQ ID NO: 2469073 - DNA, 25 bp, Homo sapien
tatcttcaaaggaggtgggttccat

SEQ ID NO: 2469074 - DNA, 25 bp, Homo sapien
gagtgcgggacagcatgaaagcaca

SEQ ID NO: 2469075 - DNA, 25 bp, Homo sapien
ggtgacccaggtaatggtctcgctg

SEQ ID NO: 2469076 - DNA, 25 bp, Homo sapien
gacccaggtaatggtctcgctgctg

SEQ ID NO: 2469077 - DNA, 25 bp, Homo sapien
tgacccaggtaatggtctcgctgct

SEQ ID NO: 2469078 - DNA, 25 bp, Homo sapien
caggtgacccaggtaatggtctcgc

SEQ ID NO: 2469079 - DNA, 25 bp, Homo sapien
cagattctacaagttgaagtttttc

SEQ ID NO: 2469080 - DNA, 25 bp, Homo sapien
tagctcctttacgttgagctggatc

SEQ ID NO: 2469081 - DNA, 25 bp, Homo sapien
ttttagctcctttacgttgagctgg

SEQ ID NO: 2469082 - DNA, 25 bp, Homo sapien
aggagcttggccctctccagtttcc

SEQ ID NO: 2469083 - DNA, 25 bp, Homo sapien
gtgttcctgtacagttccagactca

SEQ ID NO: 2469084 - DNA, 25 bp, Homo sapien
tctcctttgttaactcctcaatgta

SEQ ID NO: 2469085 - DNA, 25 bp, Homo sapien
acagttccagactcagggcgtccct

SEQ ID NO: 2469086 - DNA, 25 bp, Homo sapien
cctctcctttgttaactcctcaatg

SEQ ID NO: 2469087 - DNA, 25 bp, Homo sapien
ctgcaaacttccatgaatcatgcag

SEQ ID NO: 2469088 - DNA, 25 bp, Homo sapien
tggctgtagtaaagtgccatctgaa

SEQ ID NO: 2469089 - DNA, 25 bp, Homo sapien
tagtaaagtgccatctgaagctcag

SEQ ID NO: 2469090 - DNA, 25 bp, Homo sapien
gcatgctggctgtagtaaagtgcca

SEQ ID NO: 2469091 - DNA, 25 bp, Homo sapien
tgctggctgtagtaaagtgccatct

SEQ ID NO: 2469092 - DNA, 25 bp, Homo sapien
tccctccttagggcttcctgatgtt

SEQ ID NO: 2469093 - DNA, 25 bp, Homo sapien
gatgttggtggcttgccttctgttc

SEQ ID NO: 2469094 - DNA, 25 bp, Homo sapien
tctagctccctccttagggcttcct

SEQ ID NO: 2469095 - DNA, 25 bp, Homo sapien
ctccttagggcttcctgatgttggt

SEQ ID NO: 2469096 - DNA, 25 bp, Homo sapien
tatagaaagaggaaaacagagctct

SEQ ID NO: 2469097 - DNA, 25 bp, Homo sapien
atagaaagaggaaaacagagctctt

SEQ ID NO: 2469098 - DNA, 25 bp, Homo sapien
tagaaagaggaaaacagagctcttg

SEQ ID NO: 2469099 - DNA, 25 bp, Homo sapien
ctatagaaagaggaaaacagagctc

SEQ ID NO: 2469100 - DNA, 25 bp, Homo sapien
tctttttggtgtcgcttgctgctgt

SEQ ID NO: 2469101 - DNA, 25 bp, Homo sapien
ttgctgctgtaccaacactagggtt

SEQ ID NO: 2469102 - DNA, 25 bp, Homo sapien
cactagggttggtctggggatgatg

SEQ ID NO: 2469103 - DNA, 25 bp, Homo sapien
ttctttttggtgtcgcttgctgctg

SEQ ID NO: 2469104 - DNA, 25 bp, Homo sapien
cacactgtcaaggtctgtggtaagg

SEQ ID NO: 2469105 - DNA, 25 bp, Homo sapien
tcacactgtcaaggtctgtggtaag

SEQ ID NO: 2469106 - DNA, 25 bp, Homo sapien
gcgtaaccagggctgcactagaatg

SEQ ID NO: 2469107 - DNA, 25 bp, Homo sapien
taggggtgtggccttcatgcttgaa

SEQ ID NO: 2469108 - DNA, 25 bp, Homo sapien
gtaaccagggctgcactagaatgca

SEQ ID NO: 2469109 - DNA, 25 bp, Homo sapien
gtgtggccttcatgcttgaagccca

SEQ ID NO: 2469110 - DNA, 25 bp, Homo sapien
atacaatcttccatacgcagaagac

SEQ ID NO: 2469111 - DNA, 25 bp, Homo sapien
caatcttccatacgcagaagacaga

SEQ ID NO: 2469112 - DNA, 25 bp, Homo sapien
aagtgtgacaaaacattaactagtg

SEQ ID NO: 2469113 - DNA, 25 bp, Homo sapien
cttccatacgcagaagacagaaaac

SEQ ID NO: 2469114 - DNA, 25 bp, Homo sapien
gcagccaaggcttttttctaacaac

SEQ ID NO: 2469115 - DNA, 25 bp, Homo sapien
cagccaaggcttttttctaacaact

SEQ ID NO: 2469116 - DNA, 25 bp, Homo sapien
tctaacaactctttttctaaagatg

SEQ ID NO: 2469117 - DNA, 25 bp, Homo sapien
taacaactctttttctaaagatgta

SEQ ID NO: 2469118 - DNA, 25 bp, Homo sapien
gccatcagcctctgtttctgaacca

SEQ ID NO: 2469119 - DNA, 25 bp, Homo sapien
catttcaggattgtcaccacccata

SEQ ID NO: 2469120 - DNA, 25 bp, Homo sapien
gaaccagcctcttcatgctcctgtt

SEQ ID NO: 2469121 - DNA, 25 bp, Homo sapien
cctctaaatcttctaggtcctcctg

SEQ ID NO: 2469122 - DNA, 25 bp, Homo sapien
tgggagaagactgatatcttcatct

SEQ ID NO: 2469123 - DNA, 25 bp, Homo sapien
ggagaagactgatatcttcatcttt

SEQ ID NO: 2469124 - DNA, 25 bp, Homo sapien
tctgggagaagactgatatcttcat

SEQ ID NO: 2469125 - DNA, 25 bp, Homo sapien
ctctgggagaagactgatatcttca

SEQ ID NO: 2469126 - DNA, 25 bp, Homo sapien
agagctgccatggattctaccattc

SEQ ID NO: 2469127 - DNA, 25 bp, Homo sapien
ctttggttccaatccatcttgaaac

SEQ ID NO: 2469128 - DNA, 25 bp, Homo sapien
gtaaagagctgccatggattctacc

SEQ ID NO: 2469129 - DNA, 25 bp, Homo sapien
attctggaagcacggtaaaattgct

SEQ ID NO: 2469130 - DNA, 25 bp, Homo sapien
tgcaacccgtgtccacgtgcgaccg

SEQ ID NO: 2469131 - DNA, 25 bp, Homo sapien
acccgtgtccacgtgcgaccgcagt

SEQ ID NO: 2469132 - DNA, 25 bp, Homo sapien
ccgtgtccacgtgcgaccgcagtcg

SEQ ID NO: 2469133 - DNA, 25 bp, Homo sapien
gtgtccacgtgcgaccgcagtcgca

SEQ ID NO: 2469134 - DNA, 25 bp, Homo sapien
tgaggatgcactcgggccagccagt

SEQ ID NO: 2469135 - DNA, 25 bp, Homo sapien
gtgaggatgcactcgggccagccag

SEQ ID NO: 2469136 - DNA, 25 bp, Homo sapien
actcgggccagccagtggctttgcc

SEQ ID NO: 2469137 - DNA, 25 bp, Homo sapien
tgcactcgggccagccagtggcttt

SEQ ID NO: 2469138 - DNA, 25 bp, Homo sapien
ctccctcagacaccgctccggggtc

SEQ ID NO: 2469139 - DNA, 25 bp, Homo sapien
cggggtccgtcagcgccaggcccat

SEQ ID NO: 2469140 - DNA, 25 bp, Homo sapien
gacaccgctccggggtccgtcagcg

SEQ ID NO: 2469141 - DNA, 25 bp, Homo sapien
ccgctccggggtccgtcagcgccag

SEQ ID NO: 2469142 - DNA, 25 bp, Homo sapien
ggtttcggtcgttgtcctgcatcag

SEQ ID NO: 2469143 - DNA, 25 bp, Homo sapien
gtctctgcttgccgcgacttccgcc

SEQ ID NO: 2469144 - DNA, 25 bp, Homo sapien
gtttcggtcgttgtcctgcatcagc

SEQ ID NO: 2469145 - DNA, 25 bp, Homo sapien
tgggtctctgcttgccgcgacttcc

SEQ ID NO: 2469146 - DNA, 25 bp, Homo sapien
tgtttgctcgcgacatgactgctcg

SEQ ID NO: 2469147 - DNA, 25 bp, Homo sapien
ccagttcgagttcccactgggtctg

SEQ ID NO: 2469148 - DNA, 25 bp, Homo sapien
gttactgtcctgtcaagagattcca

SEQ ID NO: 2469149 - DNA, 25 bp, Homo sapien
tacttggcccgtacgtgctcagtaa

SEQ ID NO: 2469150 - DNA, 25 bp, Homo sapien
ctaacggatactggaatacttaact

SEQ ID NO: 2469151 - DNA, 25 bp, Homo sapien
cggatactggaatacttaactctaa

SEQ ID NO: 2469152 - DNA, 25 bp, Homo sapien
tactggaatacttaactctaagctc

SEQ ID NO: 2469153 - DNA, 25 bp, Homo sapien
tggaatacttaactctaagctcccc

SEQ ID NO: 2469154 - DNA, 25 bp, Homo sapien
cacatttccctttgctagttatact

SEQ ID NO: 2469155 - DNA, 25 bp, Homo sapien
tgctagttatactcagcatgtggtt

SEQ ID NO: 2469156 - DNA, 25 bp, Homo sapien
caaagtcaaaggaactgatcctgtg

SEQ ID NO: 2469157 - DNA, 25 bp, Homo sapien
aaaggaactgatcctgtgataaatc

SEQ ID NO: 2469158 - DNA, 25 bp, Homo sapien
catacaacatattccagagtcagta

SEQ ID NO: 2469159 - DNA, 25 bp, Homo sapien
gcatacaacatattccagagtcagt

SEQ ID NO: 2469160 - DNA, 25 bp, Homo sapien
ttgtgctgtcagtatcaagggatgg

SEQ ID NO: 2469161 - DNA, 25 bp, Homo sapien
ctactgatggtgtacgcgtgccctg

SEQ ID NO: 2469162 - DNA, 25 bp, Homo sapien
cagggatggccattgtgctgtcagt

SEQ ID NO: 2469163 - DNA, 25 bp, Homo sapien
actgatggtgtacgcgtgccctggc

SEQ ID NO: 2469164 - DNA, 25 bp, Homo sapien
tcggcctgccattgatctgaacctc

SEQ ID NO: 2469165 - DNA, 25 bp, Homo sapien
taaagtatatggaagtaaatcagcc

SEQ ID NO: 2469166 - DNA, 25 bp, Homo sapien
atggactcacccaaaaatgcctttc

SEQ ID NO: 2469167 - DNA, 25 bp, Homo sapien
gcaaacattgcctgcatggactcac

SEQ ID NO: 2469168 - DNA, 25 bp, Homo sapien
tatcaataatctgatttatcacagg

SEQ ID NO: 2469169 - DNA, 25 bp, Homo sapien
ttatcaataatctgatttatcacag

SEQ ID NO: 2469170 - DNA, 25 bp, Homo sapien
aaagctgcccgcatgatggtatttt

SEQ ID NO: 2469171 - DNA, 25 bp, Homo sapien
aactacatgatgttaaattccctgc

SEQ ID NO: 2469172 - DNA, 25 bp, Homo sapien
tgtaacctttgagaacttagaagag

SEQ ID NO: 2469173 - DNA, 25 bp, Homo sapien
gatcttttcttacaggatgcttagt

SEQ ID NO: 2469174 - DNA, 25 bp, Homo sapien
ctcacagttactttctggcagtttc

SEQ ID NO: 2469175 - DNA, 25 bp, Homo sapien
gctggatgtctttgtgcccggcgcc

SEQ ID NO: 2469176 - DNA, 25 bp, Homo sapien
ccaggtactggctgtagagctggat

SEQ ID NO: 2469177 - DNA, 25 bp, Homo sapien
ggatgtctttgtgcccggcgccctc

SEQ ID NO: 2469178 - DNA, 25 bp, Homo sapien
tgtagagctggatgtctttgtgccc

SEQ ID NO: 2469179 - DNA, 25 bp, Homo sapien
gtctttcgtgccgtggataatgagc

SEQ ID NO: 2469180 - DNA, 25 bp, Homo sapien
ctcgtctttcgtgccgtggataatg

SEQ ID NO: 2469181 - DNA, 25 bp, Homo sapien
cgtgatcttggacaccttctggatt

SEQ ID NO: 2469182 - DNA, 25 bp, Homo sapien
tctttcgtgccgtggataatgagca

SEQ ID NO: 2469183 - DNA, 25 bp, Homo sapien
ggaaggcgtcgaagcagtaggtctt

SEQ ID NO: 2469184 - DNA, 25 bp, Homo sapien
tggggaaggcgtcgaagcagtaggt

SEQ ID NO: 2469185 - DNA, 25 bp, Homo sapien
ttggggaaggcgtcgaagcagtagg

SEQ ID NO: 2469186 - DNA, 25 bp, Homo sapien
gggaaggcgtcgaagcagtaggtct

SEQ ID NO: 2469187 - DNA, 25 bp, Homo sapien
ctcaggtccaaggtgagcggcgagt

SEQ ID NO: 2469188 - DNA, 25 bp, Homo sapien
tctgccggtacaggatgatgctgtc

SEQ ID NO: 2469189 - DNA, 25 bp, Homo sapien
cgcggcggactcgtagcgcgaggcc

SEQ ID NO: 2469190 - DNA, 25 bp, Homo sapien
gactcgtagcgcgaggccaggtcca

SEQ ID NO: 2469191 - DNA, 25 bp, Homo sapien
ggcaccgtgccgatgctctgccggt

SEQ ID NO: 2469192 - DNA, 25 bp, Homo sapien
cgtagaggttcgtctcggagggcct

SEQ ID NO: 2469193 - DNA, 25 bp, Homo sapien
gtcggcgtagaggttcgtctcggag

SEQ ID NO: 2469194 - DNA, 25 bp, Homo sapien
gtagaggttcgtctcggagggcctg

SEQ ID NO: 2469195 - DNA, 25 bp, Homo sapien
ggcgtagaggttcgtctcggagggc

SEQ ID NO: 2469196 - DNA, 25 bp, Homo sapien
cataataggccatgcacaaggcctt

SEQ ID NO: 2469197 - DNA, 25 bp, Homo sapien
tgttacataaaacagcagagctctt

SEQ ID NO: 2469198 - DNA, 25 bp, Homo sapien
tataagctagcctttgatggcctag

SEQ ID NO: 2469199 - DNA, 25 bp, Homo sapien
gaccatgaagccatgggcattgttt

SEQ ID NO: 2469200 - DNA, 25 bp, Homo sapien
ttccagtcggagaaagctctggcag

SEQ ID NO: 2469201 - DNA, 25 bp, Homo sapien
gaaagccttccagtcggagaaagct

SEQ ID NO: 2469202 - DNA, 25 bp, Homo sapien
gctctggcagcctgccgcgataaag

SEQ ID NO: 2469203 - DNA, 25 bp, Homo sapien
ctaacagaaagccttccagtcggag

SEQ ID NO: 2469204 - DNA, 25 bp, Homo sapien
agacacaatgtctgatgaccgctat

SEQ ID NO: 2469205 - DNA, 25 bp, Homo sapien
aatgtctgatgaccgctataccgtg

SEQ ID NO: 2469206 - DNA, 25 bp, Homo sapien
tcagcacaaggccagacacaatgtc

SEQ ID NO: 2469207 - DNA, 25 bp, Homo sapien
cacaatgtctgatgaccgctatacc

SEQ ID NO: 2469208 - DNA, 25 bp, Homo sapien
ccagctggggtttcgccttctgtgc

SEQ ID NO: 2469209 - DNA, 25 bp, Homo sapien
tgcacccaatgagcctcaggaggcc

SEQ ID NO: 2469210 - DNA, 25 bp, Homo sapien
cccaatgagcctcaggaggccatct

SEQ ID NO: 2469211 - DNA, 25 bp, Homo sapien
ttccttgcacccaatgagcctcagg

SEQ ID NO: 2469212 - DNA, 25 bp, Homo sapien
gggtcaacggtctcggcctggcacc

SEQ ID NO: 2469213 - DNA, 25 bp, Homo sapien
gagggtcaggcactcccgggtcaac

SEQ ID NO: 2469214 - DNA, 25 bp, Homo sapien
aggcactcccgggtcaacggtctcg

SEQ ID NO: 2469215 - DNA, 25 bp, Homo sapien
agggagtctcaaggggggctgacgc

SEQ ID NO: 2469216 - DNA, 25 bp, Homo sapien
ctgacataccattgaagccattggg

SEQ ID NO: 2469217 - DNA, 25 bp, Homo sapien
ggacactgttgttgcgccaggcgct

SEQ ID NO: 2469218 - DNA, 25 bp, Homo sapien
gcgtccggcactcgacagcggtgct

SEQ ID NO: 2469219 - DNA, 25 bp, Homo sapien
tcacgacggtggacaggtagacgtc

SEQ ID NO: 2469220 - DNA, 25 bp, Homo sapien
ctggaagggcccccactcgcccagg

SEQ ID NO: 2469221 - DNA, 25 bp, Homo sapien
gcccccactcgcccaggaaggcgat

SEQ ID NO: 2469222 - DNA, 25 bp, Homo sapien
cccactcgcccaggaaggcgatcac

SEQ ID NO: 2469223 - DNA, 25 bp, Homo sapien
tggaagggcccccactcgcccagga

SEQ ID NO: 2469224 - DNA, 25 bp, Homo sapien
gcctggagctgtcttcccacactct

SEQ ID NO: 2469225 - DNA, 25 bp, Homo sapien
cttccttaggtggttggtctcatct

SEQ ID NO: 2469226 - DNA, 25 bp, Homo sapien
cagcctggagctgtcttcccacact

SEQ ID NO: 2469227 - DNA, 25 bp, Homo sapien
taggtggttggtctcatcttgtagc

SEQ ID NO: 2469228 - DNA, 25 bp, Homo sapien
agatggccctgctgggggctctggg

SEQ ID NO: 2469229 - DNA, 25 bp, Homo sapien
tggccctgctgggggctctggggcc

SEQ ID NO: 2469230 - DNA, 25 bp, Homo sapien
tgggggctctggggccaggggttca

SEQ ID NO: 2469231 - DNA, 25 bp, Homo sapien
ccctgctgggggctctggggccagg

SEQ ID NO: 2469232 - DNA, 25 bp, Homo sapien
tcctcccaagcttctgtaccagatg

SEQ ID NO: 2469233 - DNA, 25 bp, Homo sapien
gaattgatgttttcagtgagttgac

SEQ ID NO: 2469234 - DNA, 25 bp, Homo sapien
tattgcggagcttgaatccagggcc

SEQ ID NO: 2469235 - DNA, 25 bp, Homo sapien
attgatgttttcagtgagttgactg

SEQ ID NO: 2469236 - DNA, 25 bp, Homo sapien
gcggagcttgaatccagggccactg

SEQ ID NO: 2469237 - DNA, 25 bp, Homo sapien
gtagaggatgcacggccctccccgt

SEQ ID NO: 2469238 - DNA, 25 bp, Homo sapien
ggatgcacggccctccccgtagata

SEQ ID NO: 2469239 - DNA, 25 bp, Homo sapien
ctccagatcctgcagggtagtagag

SEQ ID NO: 2469240 - DNA, 25 bp, Homo sapien
cagggtagtagaggatgcacggccc

SEQ ID NO: 2469241 - DNA, 25 bp, Homo sapien
caatccgatgatttctgaggtcctt

SEQ ID NO: 2469242 - DNA, 25 bp, Homo sapien
tcctcggccgccgttggtacacgga

SEQ ID NO: 2469243 - DNA, 25 bp, Homo sapien
gtttctcaaagcaatccgatgattt

SEQ ID NO: 2469244 - DNA, 25 bp, Homo sapien
cgttggtacacggaccacattttgt

SEQ ID NO: 2469245 - DNA, 25 bp, Homo sapien
tctgccgtgcaatcccagctcgcag

SEQ ID NO: 2469246 - DNA, 25 bp, Homo sapien
tggagcgggatgggcagctctgccg

SEQ ID NO: 2469247 - DNA, 25 bp, Homo sapien
gcagctctgccgtgcaatcccagct

SEQ ID NO: 2469248 - DNA, 25 bp, Homo sapien
cgtgcaatcccagctcgcagccctt

SEQ ID NO: 2469249 - DNA, 25 bp, Homo sapien
tcgcgcccgcagcacttgttcgcgg

SEQ ID NO: 2469250 - DNA, 25 bp, Homo sapien
gggaaccgctccctcgcgcccgcag

SEQ ID NO: 2469251 - DNA, 25 bp, Homo sapien
gggaggagtgagtccgccccagcgg

SEQ ID NO: 2469252 - DNA, 25 bp, Homo sapien
gcagcacttgttcgcggcgcggact

SEQ ID NO: 2469253 - DNA, 25 bp, Homo sapien
gcgggccgagccgagacagctcctc

SEQ ID NO: 2469254 - DNA, 25 bp, Homo sapien
ccccgcgggccgagccgagacagct

SEQ ID NO: 2469255 - DNA, 25 bp, Homo sapien
gggccgagccgagacagctcctcac

SEQ ID NO: 2469256 - DNA, 25 bp, Homo sapien
ccgcgggccgagccgagacagctcc

SEQ ID NO: 2469257 - DNA, 25 bp, Homo sapien
tgggcacggcggtctcggccgagcc

SEQ ID NO: 2469258 - DNA, 25 bp, Homo sapien
ggcacggcggtctcggccgagccga

SEQ ID NO: 2469259 - DNA, 25 bp, Homo sapien
gggcacggcggtctcggccgagccg

SEQ ID NO: 2469260 - DNA, 25 bp, Homo sapien
gcacggcggtctcggccgagccgag

SEQ ID NO: 2469261 - DNA, 25 bp, Homo sapien
cgtgggaccgtgactatcaccccta

SEQ ID NO: 2469262 - DNA, 25 bp, Homo sapien
tgacagatagaggacgtgggaccgt

SEQ ID NO: 2469263 - DNA, 25 bp, Homo sapien
gaggacgtgggaccgtgactatcac

SEQ ID NO: 2469264 - DNA, 25 bp, Homo sapien
gaccgtgactatcacccctaatctg

SEQ ID NO: 2469265 - DNA, 25 bp, Homo sapien
cacgagagcaccaggggggtagggc

SEQ ID NO: 2469266 - DNA, 25 bp, Homo sapien
gagagcaccaggggggtagggccca

SEQ ID NO: 2469267 - DNA, 25 bp, Homo sapien
tggggcacgagagcaccaggggggt

SEQ ID NO: 2469268 - DNA, 25 bp, Homo sapien
cccaaagggatcaggggaagcctct

SEQ ID NO: 2469269 - DNA, 25 bp, Homo sapien
gcatggtgacagtggtcctgttgat

SEQ ID NO: 2469270 - DNA, 25 bp, Homo sapien
agcatctcgtcatgctgctgtgcct

SEQ ID NO: 2469271 - DNA, 25 bp, Homo sapien
gacagtggtcctgttgatgtcaccg

SEQ ID NO: 2469272 - DNA, 25 bp, Homo sapien
tgcatgtgcagcatctcgtcatgct

SEQ ID NO: 2469273 - DNA, 25 bp, Homo sapien
agcggctccgagatgatgaactccg

SEQ ID NO: 2469274 - DNA, 25 bp, Homo sapien
gctccgagatgatgaactccggggt

SEQ ID NO: 2469275 - DNA, 25 bp, Homo sapien
cggctccgagatgatgaactccggg

SEQ ID NO: 2469276 - DNA, 25 bp, Homo sapien
attggccagcggctccgagatgatg

SEQ ID NO: 2469277 - DNA, 25 bp, Homo sapien
ctgaggggttgcctccatgcagccg

SEQ ID NO: 2469278 - DNA, 25 bp, Homo sapien
tctcaatggccgcagactcctccag

SEQ ID NO: 2469279 - DNA, 25 bp, Homo sapien
agcctctgacccccaataagcatga

SEQ ID NO: 2469280 - DNA, 25 bp, Homo sapien
tccatgcagccgctctcaatggccg

SEQ ID NO: 2469281 - DNA, 25 bp, Homo sapien
ttcctagtgaccatccagagagcca

SEQ ID NO: 2469282 - DNA, 25 bp, Homo sapien
gacattccgggtcagcaatggactg

SEQ ID NO: 2469283 - DNA, 25 bp, Homo sapien
agtggtgggtcacacaggcgttcca

SEQ ID NO: 2469284 - DNA, 25 bp, Homo sapien
cggtgactgagttctcctgctggga

SEQ ID NO: 2469285 - DNA, 25 bp, Homo sapien
gaggcatgccttctcgctggatgtg

SEQ ID NO: 2469286 - DNA, 25 bp, Homo sapien
gacagggagtcacatttcagaaaga

SEQ ID NO: 2469287 - DNA, 25 bp, Homo sapien
aggatgggcctcaagccaggaccct

SEQ ID NO: 2469288 - DNA, 25 bp, Homo sapien
tcagaaagacctatgctttagatgc

SEQ ID NO: 2469289 - DNA, 25 bp, Homo sapien
ccagtcgaagcggtatagaagccca

SEQ ID NO: 2469290 - DNA, 25 bp, Homo sapien
catgtgaaaagccatactccaaggg

SEQ ID NO: 2469291 - DNA, 25 bp, Homo sapien
gataagtcttaagtcccctcccaga

SEQ ID NO: 2469292 - DNA, 25 bp, Homo sapien
gcaggcacagcagcatgacgagatg

SEQ ID NO: 2469293 - DNA, 25 bp, Homo sapien
ctggccgccagaactggccgtctcc

SEQ ID NO: 2469294 - DNA, 25 bp, Homo sapien
ctggcggctgaccacacattgcatt

SEQ ID NO: 2469295 - DNA, 25 bp, Homo sapien
tcctggcggctgaccacacattgca

SEQ ID NO: 2469296 - DNA, 25 bp, Homo sapien
actcctggcggctgaccacacattg

SEQ ID NO: 2469297 - DNA, 25 bp, Homo sapien
tcactcctggcggctgaccacacat

SEQ ID NO: 2469298 - DNA, 25 bp, Homo sapien
aggtgcgcaaactctcctcaaaatg

SEQ ID NO: 2469299 - DNA, 25 bp, Homo sapien
ggtgcgcaaactctcctcaaaatgg

SEQ ID NO: 2469300 - DNA, 25 bp, Homo sapien
ccttgggccaaaggtgcgcaaactc

SEQ ID NO: 2469301 - DNA, 25 bp, Homo sapien
gccttgggccaaaggtgcgcaaact

SEQ ID NO: 2469302 - DNA, 25 bp, Homo sapien
ttctgccacttgcagaagctcttca

SEQ ID NO: 2469303 - DNA, 25 bp, Homo sapien
agcaggatggcagtgtcatgctgca

SEQ ID NO: 2469304 - DNA, 25 bp, Homo sapien
gggtgggcgtctcccttcatgttga

SEQ ID NO: 2469305 - DNA, 25 bp, Homo sapien
ttcagggtgttgtctgcatggtgca

SEQ ID NO: 2469306 - DNA, 25 bp, Homo sapien
tggggtcgtgaaacaggccagccac

SEQ ID NO: 2469307 - DNA, 25 bp, Homo sapien
caggagcacaatggtcatgtggatg

SEQ ID NO: 2469308 - DNA, 25 bp, Homo sapien
catgtggatggggttcccaatgctg

SEQ ID NO: 2469309 - DNA, 25 bp, Homo sapien
agaaggaccaggagcacaatggtca

SEQ ID NO: 2469310 - DNA, 25 bp, Homo sapien
ggacactggagggagaatggctggc

SEQ ID NO: 2469311 - DNA, 25 bp, Homo sapien
tctggacactggagggagaatggct

SEQ ID NO: 2469312 - DNA, 25 bp, Homo sapien
acactggagggagaatggctggcag

SEQ ID NO: 2469313 - DNA, 25 bp, Homo sapien
ctggtctggacactggagggagaat

SEQ ID NO: 2469314 - DNA, 25 bp, Homo sapien
cttggagcactggaatcaccccgct

SEQ ID NO: 2469315 - DNA, 25 bp, Homo sapien
gagcactggaatcaccccgctgtgc

SEQ ID NO: 2469316 - DNA, 25 bp, Homo sapien
tggagcactggaatcaccccgctgt

SEQ ID NO: 2469317 - DNA, 25 bp, Homo sapien
gaatcaccccgctgtgccagcctct

SEQ ID NO: 2469318 - DNA, 25 bp, Homo sapien
tattgcagcgggtagaaggcgggcg

SEQ ID NO: 2469319 - DNA, 25 bp, Homo sapien
agctcgcgcctgcggtattgcagcg

SEQ ID NO: 2469320 - DNA, 25 bp, Homo sapien
caggacaggaaggaccccccagcgt

SEQ ID NO: 2469321 - DNA, 25 bp, Homo sapien
tggtgcacgatatccggtgccgccc

SEQ ID NO: 2469322 - DNA, 25 bp, Homo sapien
catccagggtacaatgcgcctttcc

SEQ ID NO: 2469323 - DNA, 25 bp, Homo sapien
gcatccagggtacaatgcgcctttc

SEQ ID NO: 2469324 - DNA, 25 bp, Homo sapien
cggtccaggggagcaggctagctga

SEQ ID NO: 2469325 - DNA, 25 bp, Homo sapien
agcaggctagctgactgagggcgat

SEQ ID NO: 2469326 - DNA, 25 bp, Homo sapien
aggctagctgactgagggcgatcat

SEQ ID NO: 2469327 - DNA, 25 bp, Homo sapien
tccaggggagcaggctagctgactg

SEQ ID NO: 2469328 - DNA, 25 bp, Homo sapien
gaaggtgagcccgtcgggagccgct

SEQ ID NO: 2469329 - DNA, 25 bp, Homo sapien
caaccacccgcgggacctctcggcg

SEQ ID NO: 2469330 - DNA, 25 bp, Homo sapien
ggagccgctgtcacggccgcaacca

SEQ ID NO: 2469331 - DNA, 25 bp, Homo sapien
gtcacggccgcaaccacccgcggga

SEQ ID NO: 2469332 - DNA, 25 bp, Homo sapien
ccctcaacccgcgcgccccctgcgc

SEQ ID NO: 2469333 - DNA, 25 bp, Homo sapien
ctcaacccgcgcgccccctgcgcac

SEQ ID NO: 2469334 - DNA, 25 bp, Homo sapien
cctcaacccgcgcgccccctgcgca

SEQ ID NO: 2469335 - DNA, 25 bp, Homo sapien
ccgtttcggcggctgcaggagtcca

SEQ ID NO: 2469336 - DNA, 25 bp, Homo sapien
ttcggcggctgcaggagtccagagc

SEQ ID NO: 2469337 - DNA, 25 bp, Homo sapien
cggcggctgcaggagtccagagcat

SEQ ID NO: 2469338 - DNA, 25 bp, Homo sapien
gtttcggcggctgcaggagtccaga

SEQ ID NO: 2469339 - DNA, 25 bp, Homo sapien
cccctcctcgccttgacccagcact

SEQ ID NO: 2469340 - DNA, 25 bp, Homo sapien
ctcctcgccttgacccagcactgct

SEQ ID NO: 2469341 - DNA, 25 bp, Homo sapien
gcgcttccggctgccccctcctcgc

SEQ ID NO: 2469342 - DNA, 25 bp, Homo sapien
gcgcgcttccggctgccccctcctc

SEQ ID NO: 2469343 - DNA, 25 bp, Homo sapien
aacagagacagaatgaggaagagct

SEQ ID NO: 2469344 - DNA, 25 bp, Homo sapien
actggccaaagcagggaacagagac

SEQ ID NO: 2469345 - DNA, 25 bp, Homo sapien
ggatagccactggccaaagcaggga

SEQ ID NO: 2469346 - DNA, 25 bp, Homo sapien
aggaagagctctgtggggagggtgg

SEQ ID NO: 2469347 - DNA, 25 bp, Homo sapien
acacggtttcgacccaggtcctcag

SEQ ID NO: 2469348 - DNA, 25 bp, Homo sapien
cacacggtttcgacccaggtcctca

SEQ ID NO: 2469349 - DNA, 25 bp, Homo sapien
acatcagcgcgatgcccgagtcgct

SEQ ID NO: 2469350 - DNA, 25 bp, Homo sapien
catcagcgcgatgcccgagtcgctg

SEQ ID NO: 2469351 - DNA, 25 bp, Homo sapien
accctggggtgattggcaagggcag

SEQ ID NO: 2469352 - DNA, 25 bp, Homo sapien
tggggtgattggcaagggcagggac

SEQ ID NO: 2469353 - DNA, 25 bp, Homo sapien
tcaccctggggtgattggcaagggc

SEQ ID NO: 2469354 - DNA, 25 bp, Homo sapien
agggactgggctgcttgctgaaggg

SEQ ID NO: 2469355 - DNA, 25 bp, Homo sapien
gggggccccatctggtatgcctcag

SEQ ID NO: 2469356 - DNA, 25 bp, Homo sapien
tctggcacaggtcttgtcatcggag

SEQ ID NO: 2469357 - DNA, 25 bp, Homo sapien
ttgggggccatgacctggtgtgttt

SEQ ID NO: 2469358 - DNA, 25 bp, Homo sapien
ggttggggggccccatctggtatgc

SEQ ID NO: 2469359 - DNA, 25 bp, Homo sapien
tggctgcggccaatttcccctgttg

SEQ ID NO: 2469360 - DNA, 25 bp, Homo sapien
gctgcggccaatttcccctgttgtg

SEQ ID NO: 2469361 - DNA, 25 bp, Homo sapien
cttggctgcggccaatttcccctgt

SEQ ID NO: 2469362 - DNA, 25 bp, Homo sapien
tgcggccaatttcccctgttgtgtt

SEQ ID NO: 2469363 - DNA, 25 bp, Homo sapien
agaaggatcttcacaatgtaagact

SEQ ID NO: 2469364 - DNA, 25 bp, Homo sapien
gatcttcacaatgtaagactcaggc

SEQ ID NO: 2469365 - DNA, 25 bp, Homo sapien
aggatcttcacaatgtaagactcag

SEQ ID NO: 2469366 - DNA, 25 bp, Homo sapien
ttagagaaggatcttcacaatgtaa

SEQ ID NO: 2469367 - DNA, 25 bp, Homo sapien
tcctcggccgccgttggtacacgga

SEQ ID NO: 2469368 - DNA, 25 bp, Homo sapien
caatccgatgatttctgaggtcctt

SEQ ID NO: 2469369 - DNA, 25 bp, Homo sapien
gtttctcaaagcaatccgatgattt

SEQ ID NO: 2469370 - DNA, 25 bp, Homo sapien
cgttggtacacggaccacattttgt

SEQ ID NO: 2469371 - DNA, 25 bp, Homo sapien
gcagctctgccgtgcaatcccagct

SEQ ID NO: 2469372 - DNA, 25 bp, Homo sapien
tctgccgtgcaatcccagctcgcag

SEQ ID NO: 2469373 - DNA, 25 bp, Homo sapien
cgtgcaatcccagctcgcagccctt

SEQ ID NO: 2469374 - DNA, 25 bp, Homo sapien
tggagcgggatgggcagctctgccg

SEQ ID NO: 2469375 - DNA, 25 bp, Homo sapien
tgtagccggtgcgcggggtggctgg

SEQ ID NO: 2469376 - DNA, 25 bp, Homo sapien
gggaggactcgcagacgttactgcc

SEQ ID NO: 2469377 - DNA, 25 bp, Homo sapien
ttgtagccggtgcgcggggtggctg

SEQ ID NO: 2469378 - DNA, 25 bp, Homo sapien
tgatttctcgtgctaagtgagtcct

SEQ ID NO: 2469379 - DNA, 25 bp, Homo sapien
tggtgggccttgtgttataaaacca

SEQ ID NO: 2469380 - DNA, 25 bp, Homo sapien
gagtgatttctcgtgctaagtgagt

SEQ ID NO: 2469381 - DNA, 25 bp, Homo sapien
tggagaagcgttcctgggcttttct

SEQ ID NO: 2469382 - DNA, 25 bp, Homo sapien
ctgatgaagctaaagacaaattttc

SEQ ID NO: 2469383 - DNA, 25 bp, Homo sapien
aaagacaaattttcttcaggcacag

SEQ ID NO: 2469384 - DNA, 25 bp, Homo sapien
agacaaattttcttcaggcacaggc

SEQ ID NO: 2469385 - DNA, 25 bp, Homo sapien
gaagctaaagacaaattttcttcag

SEQ ID NO: 2469386 - DNA, 25 bp, Homo sapien
caaaaatctcaacgcttttgctctt

SEQ ID NO: 2469387 - DNA, 25 bp, Homo sapien
aaaaatctcaacgcttttgctcttg

SEQ ID NO: 2469388 - DNA, 25 bp, Homo sapien
aaaatctcaacgcttttgctcttgc

SEQ ID NO: 2469389 - DNA, 25 bp, Homo sapien
tcaaaaatctcaacgcttttgctct

SEQ ID NO: 2469390 - DNA, 25 bp, Homo sapien
tcagatagcgtttagcaactgtaac

SEQ ID NO: 2469391 - DNA, 25 bp, Homo sapien
gactaggaatgaccttcagatagcg

SEQ ID NO: 2469392 - DNA, 25 bp, Homo sapien
ccaatctgacaataatgtgttcatc

SEQ ID NO: 2469393 - DNA, 25 bp, Homo sapien
cctgacacgtataaatgactaggaa

SEQ ID NO: 2469394 - DNA, 25 bp, Homo sapien
tatgctgcctggtgatacctggtgg

SEQ ID NO: 2469395 - DNA, 25 bp, Homo sapien
tgatacctggtggatttcacgagga

SEQ ID NO: 2469396 - DNA, 25 bp, Homo sapien
ctggtgatacctggtggatttcacg

SEQ ID NO: 2469397 - DNA, 25 bp, Homo sapien
ggtgatacctggtggatttcacgag

SEQ ID NO: 2469398 - DNA, 25 bp, Homo sapien
ggcgcctctggagtatagtccggcc

SEQ ID NO: 2469399 - DNA, 25 bp, Homo sapien
atagtccggccctgagagccaacag

SEQ ID NO: 2469400 - DNA, 25 bp, Homo sapien
ctggagtatagtccggccctgagag

SEQ ID NO: 2469401 - DNA, 25 bp, Homo sapien
cgcctctggagtatagtccggccct

SEQ ID NO: 2469402 - DNA, 25 bp, Homo sapien
aacgggttagagaaaagccagagct

SEQ ID NO: 2469403 - DNA, 25 bp, Homo sapien
ctccccggatgggatggacttgcct

SEQ ID NO: 2469404 - DNA, 25 bp, Homo sapien
gaggcaagtgcagagtatgggtgcg

SEQ ID NO: 2469405 - DNA, 25 bp, Homo sapien
gcagagtatgggtgcgctgcagcag

SEQ ID NO: 2469406 - DNA, 25 bp, Homo sapien
gttctgactaaggcctgggaaccca

SEQ ID NO: 2469407 - DNA, 25 bp, Homo sapien
ttctgactaaggcctgggaacccat

SEQ ID NO: 2469408 - DNA, 25 bp, Homo sapien
cggtcggtctgtgcatcctggcacc

SEQ ID NO: 2469409 - DNA, 25 bp, Homo sapien
cattagggcgtagggggcgggagct

SEQ ID NO: 2469410 - DNA, 25 bp, Homo sapien
cactgaggtctgtcggtcggtctgt

SEQ ID NO: 2469411 - DNA, 25 bp, Homo sapien
cccagcctgccgctgggtagtgaga

SEQ ID NO: 2469412 - DNA, 25 bp, Homo sapien
tgggcggagagcacgagcggcagca

SEQ ID NO: 2469413 - DNA, 25 bp, Homo sapien
ctgggccctgcttactccagcagac

SEQ ID NO: 2469414 - DNA, 25 bp, Homo sapien
tgccgcctgggccctgcttactcca

SEQ ID NO: 2469415 - DNA, 25 bp, Homo sapien
ctgccgcctgggccctgcttactcc

SEQ ID NO: 2469416 - DNA, 25 bp, Homo sapien
gccctgcttactccagcagacctcc

SEQ ID NO: 2469417 - DNA, 25 bp, Homo sapien
gggctcacaatcctcggtgccacac

SEQ ID NO: 2469418 - DNA, 25 bp, Homo sapien
cactgtcttcctcgggtagccccgt

SEQ ID NO: 2469419 - DNA, 25 bp, Homo sapien
tggtcactgtcttcctcgggtagcc

SEQ ID NO: 2469420 - DNA, 25 bp, Homo sapien
gtcactgtcttcctcgggtagcccc

SEQ ID NO: 2469421 - DNA, 25 bp, Homo sapien
acactggtcactgtcttcctcgggt

SEQ ID NO: 2469422 - DNA, 25 bp, Homo sapien
ccagtgtgtgaccactggatgccac

SEQ ID NO: 2469423 - DNA, 25 bp, Homo sapien
acttggtgctggaaccccactctca

SEQ ID NO: 2469424 - DNA, 25 bp, Homo sapien
ggcagtgagcccctcacacgggaca

SEQ ID NO: 2469425 - DNA, 25 bp, Homo sapien
cagtgagcccctcacacgggacatg

SEQ ID NO: 2469426 - DNA, 25 bp, Homo sapien
tgggacagcccttggggcggcaggg

SEQ ID NO: 2469427 - DNA, 25 bp, Homo sapien
catgggacagcccttggggcggcag

SEQ ID NO: 2469428 - DNA, 25 bp, Homo sapien
tgcctcctcgcagaggtctggctct

SEQ ID NO: 2469429 - DNA, 25 bp, Homo sapien
catgtgtccacatgctgcatgtccc

SEQ ID NO: 2469430 - DNA, 25 bp, Homo sapien
atgtgtccacatgctgcatgtccca

SEQ ID NO: 2469431 - DNA, 25 bp, Homo sapien
ccatgtgtccacatgctgcatgtcc

SEQ ID NO: 2469432 - DNA, 25 bp, Homo sapien
tccagttgcctgagtgccaggtggc

SEQ ID NO: 2469433 - DNA, 25 bp, Homo sapien
ccagttgcctgagtgccaggtggca

SEQ ID NO: 2469434 - DNA, 25 bp, Homo sapien
cagttgcctgagtgccaggtggcac

SEQ ID NO: 2469435 - DNA, 25 bp, Homo sapien
agttgcctgagtgccaggtggcaca

SEQ ID NO: 2469436 - DNA, 25 bp, Homo sapien
gggcacagacccgtgaaagccaggc

SEQ ID NO: 2469437 - DNA, 25 bp, Homo sapien
cacagacccgtgaaagccaggcaga

SEQ ID NO: 2469438 - DNA, 25 bp, Homo sapien
tgcggggcacagacccgtgaaagcc

SEQ ID NO: 2469439 - DNA, 25 bp, Homo sapien
ctgcggggcacagacccgtgaaagc

SEQ ID NO: 2469440 - DNA, 25 bp, Homo sapien
gagcccaagatctggggcccctatg

SEQ ID NO: 2469441 - DNA, 25 bp, Homo sapien
agcccaagatctggggcccctatgg

SEQ ID NO: 2469442 - DNA, 25 bp, Homo sapien
gacatttcggtgctgagtcccttcc

SEQ ID NO: 2469443 - DNA, 25 bp, Homo sapien
ggacatttcggtgctgagtcccttc

SEQ ID NO: 2469444 - DNA, 25 bp, Homo sapien
gaggacatttcggtgctgagtccct

SEQ ID NO: 2469445 - DNA, 25 bp, Homo sapien
catttcggtgctgagtcccttcctc

SEQ ID NO: 2469446 - DNA, 25 bp, Homo sapien
aaggtgttcacaggcgggtggcttc

SEQ ID NO: 2469447 - DNA, 25 bp, Homo sapien
tggtggttgcaaggggtttcagtag

SEQ ID NO: 2469448 - DNA, 25 bp, Homo sapien
cttcagggcgctctgctcatccagc

SEQ ID NO: 2469449 - DNA, 25 bp, Homo sapien
gcgggtggcttcagggcgctctgct

SEQ ID NO: 2469450 - DNA, 25 bp, Homo sapien
ggagctggagcacagctgccactca

SEQ ID NO: 2469451 - DNA, 25 bp, Homo sapien
cgcaggagctggagcacagctgcca

SEQ ID NO: 2469452 - DNA, 25 bp, Homo sapien
gctgcggatgcagagcacagcctgg

SEQ ID NO: 2469453 - DNA, 25 bp, Homo sapien
tggagcacagctgccactcacctgc

SEQ ID NO: 2469454 - DNA, 25 bp, Homo sapien
aagaggaggaccataggtgtccagg

SEQ ID NO: 2469455 - DNA, 25 bp, Homo sapien
gaggaccataggtgtccaggctggc

SEQ ID NO: 2469456 - DNA, 25 bp, Homo sapien
gaggcctatttccacatccagggac

SEQ ID NO: 2469457 - DNA, 25 bp, Homo sapien
ctgaggcctatttccacatccaggg

SEQ ID NO: 2469458 - DNA, 25 bp, Homo sapien
gagcagtacacactctgcctctgca

SEQ ID NO: 2469459 - DNA, 25 bp, Homo sapien
tctggcagtcatcgggccggcccag

SEQ ID NO: 2469460 - DNA, 25 bp, Homo sapien
cacgggccctgcctgccgctccgag

SEQ ID NO: 2469461 - DNA, 25 bp, Homo sapien
tgcacttcctctggcagtcatcggg

SEQ ID NO: 2469462 - DNA, 25 bp, Homo sapien
cccctctcctatgtagcttcccctc

SEQ ID NO: 2469463 - DNA, 25 bp, Homo sapien
agtaagttgtccctcccctgagctg

SEQ ID NO: 2469464 - DNA, 25 bp, Homo sapien
tggtcccgagagtaagttgtccctc

SEQ ID NO: 2469465 - DNA, 25 bp, Homo sapien
ccgagagtaagttgtccctcccctg

SEQ ID NO: 2469466 - DNA, 25 bp, Homo sapien
ctgccccgtggtcccgagagtaagt

SEQ ID NO: 2469467 - DNA, 25 bp, Homo sapien
tgtactcgtagtgcaccccagggtt

SEQ ID NO: 2469468 - DNA, 25 bp, Homo sapien
atggtgtactcgtagtgcaccccag

SEQ ID NO: 2469469 - DNA, 25 bp, Homo sapien
ggtgtactcgtagtgcaccccaggg

SEQ ID NO: 2469470 - DNA, 25 bp, Homo sapien
gtgtactcgtagtgcaccccagggt

SEQ ID NO: 2469471 - DNA, 25 bp, Homo sapien
agacaggctccttggtgggacccgg

SEQ ID NO: 2469472 - DNA, 25 bp, Homo sapien
cggggacgtgaggttctcccagttg

SEQ ID NO: 2469473 - DNA, 25 bp, Homo sapien
ggacgtgaggttctcccagttgccc

SEQ ID NO: 2469474 - DNA, 25 bp, Homo sapien
ctggatccagacaggctccttggtg

SEQ ID NO: 2469475 - DNA, 25 bp, Homo sapien
ctgcgtgcgtatgtgacggtggtcc

SEQ ID NO: 2469476 - DNA, 25 bp, Homo sapien
ctggatgcggacctcacgtgtgctg

SEQ ID NO: 2469477 - DNA, 25 bp, Homo sapien
cctggatgcggacctcacgtgtgct

SEQ ID NO: 2469478 - DNA, 25 bp, Homo sapien
ggcaggtggagccgttgccgtggca

SEQ ID NO: 2469479 - DNA, 25 bp, Homo sapien
gtggcaggtggagccgttgccgtgg

SEQ ID NO: 2469480 - DNA, 25 bp, Homo sapien
tgtggcaggtggagccgttgccgtg

SEQ ID NO: 2469481 - DNA, 25 bp, Homo sapien
caggtggagccgttgccgtggcaca

SEQ ID NO: 2469482 - DNA, 25 bp, Homo sapien
gggagagcctcttcctaaccaggca

SEQ ID NO: 2469483 - DNA, 25 bp, Homo sapien
gcagtgctgggagagcctcttccta

SEQ ID NO: 2469484 - DNA, 25 bp, Homo sapien
gagagcctcttcctaaccaggcaca

SEQ ID NO: 2469485 - DNA, 25 bp, Homo sapien
agtgctgggagagcctcttcctaac

SEQ ID NO: 2469486 - DNA, 25 bp, Homo sapien
ctggctcggacctggtagcaggggg

SEQ ID NO: 2469487 - DNA, 25 bp, Homo sapien
ggcaaagtactcattcgcgggccgg

SEQ ID NO: 2469488 - DNA, 25 bp, Homo sapien
ttgatgcagaggtcccggctggctc

SEQ ID NO: 2469489 - DNA, 25 bp, Homo sapien
aaagtactcattcgcgggccggcag

SEQ ID NO: 2469490 - DNA, 25 bp, Homo sapien
cctccgtgacacacatccatggcag

SEQ ID NO: 2469491 - DNA, 25 bp, Homo sapien
gcgggagtatggaggccaccaggaa

SEQ ID NO: 2469492 - DNA, 25 bp, Homo sapien
gggcccaagtagaagagtcatcagc

SEQ ID NO: 2469493 - DNA, 25 bp, Homo sapien
agtagaagagtcatcagcaacagct

SEQ ID NO: 2469494 - DNA, 25 bp, Homo sapien
tcaaagtggctgcactggacgtggc

SEQ ID NO: 2469495 - DNA, 25 bp, Homo sapien
gagcatagcgtcaaagtggctgcac

SEQ ID NO: 2469496 - DNA, 25 bp, Homo sapien
tagcgtcaaagtggctgcactggac

SEQ ID NO: 2469497 - DNA, 25 bp, Homo sapien
gtagagcatagcgtcaaagtggctg

SEQ ID NO: 2469498 - DNA, 25 bp, Homo sapien
tcctccacatttaggccagggtcgc

SEQ ID NO: 2469499 - DNA, 25 bp, Homo sapien
cacatttaggccagggtcgctggcc

SEQ ID NO: 2469500 - DNA, 25 bp, Homo sapien
agcctgggtctaaaggaagcgccca

SEQ ID NO: 2469501 - DNA, 25 bp, Homo sapien
ccccagcctgggtctaaaggaagcg

SEQ ID NO: 2469502 - DNA, 25 bp, Homo sapien
ataggctgcatgcactgctgcttgg

SEQ ID NO: 2469503 - DNA, 25 bp, Homo sapien
tgcttggctctctgtatgcccacgc

SEQ ID NO: 2469504 - DNA, 25 bp, Homo sapien
tctctgtatgcccacgccacagctc

SEQ ID NO: 2469505 - DNA, 25 bp, Homo sapien
ttggctctctgtatgcccacgccac

SEQ ID NO: 2469506 - DNA, 25 bp, Homo sapien
tggagtgacaggtggtccccacaga

SEQ ID NO: 2469507 - DNA, 25 bp, Homo sapien
gtgacaggtggtccccacagagcac

SEQ ID NO: 2469508 - DNA, 25 bp, Homo sapien
agcttggagtgacaggtggtcccca

SEQ ID NO: 2469509 - DNA, 25 bp, Homo sapien
acatcatagaggaccccaggcagca

SEQ ID NO: 2469510 - DNA, 25 bp, Homo sapien
catagaggaccccaggcagcactga

SEQ ID NO: 2469511 - DNA, 25 bp, Homo sapien
gctcacatcatagaggaccccaggc

SEQ ID NO: 2469512 - DNA, 25 bp, Homo sapien
tagaggaccccaggcagcactgatg

SEQ ID NO: 2469513 - DNA, 25 bp, Homo sapien
ggctgaggggtccaatgcgcctcat

SEQ ID NO: 2469514 - DNA, 25 bp, Homo sapien
aggggctgaggggtccaatgcgcct

SEQ ID NO: 2469515 - DNA, 25 bp, Homo sapien
gggctgaggggtccaatgcgcctca

SEQ ID NO: 2469516 - DNA, 25 bp, Homo sapien
ggggctgaggggtccaatgcgcctc

SEQ ID NO: 2469517 - DNA, 25 bp, Homo sapien
tcatcttcttcaccgatatggtctg

SEQ ID NO: 2469518 - DNA, 25 bp, Homo sapien
tcttcttcaccgatatggtctgtgg

SEQ ID NO: 2469519 - DNA, 25 bp, Homo sapien
ctattcatcttcttcaccgatatgg

SEQ ID NO: 2469520 - DNA, 25 bp, Homo sapien
tattcatcttcttcaccgatatggt

SEQ ID NO: 2469521 - DNA, 25 bp, Homo sapien
aactgcagtgtgctcttgttctcgt

SEQ ID NO: 2469522 - DNA, 25 bp, Homo sapien
caactgcagtgtgctcttgttctcg

SEQ ID NO: 2469523 - DNA, 25 bp, Homo sapien
gcagtgtgctcttgttctcgttgtt

SEQ ID NO: 2469524 - DNA, 25 bp, Homo sapien
ctgcagtgtgctcttgttctcgttg

SEQ ID NO: 2469525 - DNA, 25 bp, Homo sapien
tgttcatgtagcctctcctcctgta

SEQ ID NO: 2469526 - DNA, 25 bp, Homo sapien
tctcctcctgttcatgtagcctctc

SEQ ID NO: 2469527 - DNA, 25 bp, Homo sapien
cctcctgttcatgtagcctctcctc

SEQ ID NO: 2469528 - DNA, 25 bp, Homo sapien
ttcatgtagcctctcctcctgtaca

SEQ ID NO: 2469529 - DNA, 25 bp, Homo sapien
caggagactcaacatctgattgttt

SEQ ID NO: 2469530 - DNA, 25 bp, Homo sapien
tcctcccaagcttctgtaccagatg

SEQ ID NO: 2469531 - DNA, 25 bp, Homo sapien
gcggagcttgaatccagggccactg

SEQ ID NO: 2469532 - DNA, 25 bp, Homo sapien
tattgcggagcttgaatccagggcc

SEQ ID NO: 2469533 - DNA, 25 bp, Homo sapien
gaattgatgttttcagtgagttgac

SEQ ID NO: 2469534 - DNA, 25 bp, Homo sapien
attgatgttttcagtgagttgactg

SEQ ID NO: 2469535 - DNA, 25 bp, Homo sapien
gtagaggatgcacggccctccccgt

SEQ ID NO: 2469536 - DNA, 25 bp, Homo sapien
cagggtagtagaggatgcacggccc

SEQ ID NO: 2469537 - DNA, 25 bp, Homo sapien
ggatgcacggccctccccgtagata

SEQ ID NO: 2469538 - DNA, 25 bp, Homo sapien
ctccagatcctgcagggtagtagag

SEQ ID NO: 2469539 - DNA, 25 bp, Homo sapien
ggctcttcctctgccaatatgcttt

SEQ ID NO: 2469540 - DNA, 25 bp, Homo sapien
tgttagctcctgctggaatgccagg

SEQ ID NO: 2469541 - DNA, 25 bp, Homo sapien
agggctactgccattgactttcttt

SEQ ID NO: 2469542 - DNA, 25 bp, Homo sapien
ctgtgtcagggctactgccattgac

SEQ ID NO: 2469543 - DNA, 25 bp, Homo sapien
tgcggccaatttcccctgctgtgtt

SEQ ID NO: 2469544 - DNA, 25 bp, Homo sapien
ttggctgcggccaatttcccctgct

SEQ ID NO: 2469545 - DNA, 25 bp, Homo sapien
cttggctgcggccaatttcccctgc

SEQ ID NO: 2469546 - DNA, 25 bp, Homo sapien
gctgcggccaatttcccctgctgtg

SEQ ID NO: 2469547 - DNA, 25 bp, Homo sapien
ccgcggaaaaaaagacaataggctg

SEQ ID NO: 2469548 - DNA, 25 bp, Homo sapien
gctcctcacctttcgccgcggaaaa

SEQ ID NO: 2469549 - DNA, 25 bp, Homo sapien
cgagacagctcctcacctttcgccg

SEQ ID NO: 2469550 - DNA, 25 bp, Homo sapien
ccgcggggccgagcccgagacagct

SEQ ID NO: 2469551 - DNA, 25 bp, Homo sapien
tcagatagcgtttagcaactgtaac

SEQ ID NO: 2469552 - DNA, 25 bp, Homo sapien
gactaggaatgaccttcagatagcg

SEQ ID NO: 2469553 - DNA, 25 bp, Homo sapien
tctgacaataatgtgttcatcaggt

SEQ ID NO: 2469554 - DNA, 25 bp, Homo sapien
taccctgacacgtataaatgactag

SEQ ID NO: 2469555 - DNA, 25 bp, Homo sapien
tatgctgcctggtgatacctggtgg

SEQ ID NO: 2469556 - DNA, 25 bp, Homo sapien
tgatacctggtggatttcacgagga

SEQ ID NO: 2469557 - DNA, 25 bp, Homo sapien
ctggtgatacctggtggatttcacg

SEQ ID NO: 2469558 - DNA, 25 bp, Homo sapien
ggtgatacctggtggatttcacgag

SEQ ID NO: 2469559 - DNA, 25 bp, Homo sapien
ggcgcctctggagtatagtccggcc

SEQ ID NO: 2469560 - DNA, 25 bp, Homo sapien
atagtccggccctgagagccaacag

SEQ ID NO: 2469561 - DNA, 25 bp, Homo sapien
ctggagtatagtccggccctgagag

SEQ ID NO: 2469562 - DNA, 25 bp, Homo sapien
cgcctctggagtatagtccggccct

SEQ ID NO: 2469563 - DNA, 25 bp, Homo sapien
gaggcaagtgcagagtatgggtgcg

SEQ ID NO: 2469564 - DNA, 25 bp, Homo sapien
aacgggttagagaaaagccagagct

SEQ ID NO: 2469565 - DNA, 25 bp, Homo sapien
ctccccggatgggatggacttgcct

SEQ ID NO: 2469566 - DNA, 25 bp, Homo sapien
gcagagtatgggtgcgctgcagcag

SEQ ID NO: 2469567 - DNA, 25 bp, Homo sapien
gttctgactaaggcctgggaaccca

SEQ ID NO: 2469568 - DNA, 25 bp, Homo sapien
ttctgactaaggcctgggaacccat

SEQ ID NO: 2469569 - DNA, 25 bp, Homo sapien
tcataataaatgttacacaaactgt

SEQ ID NO: 2469570 - DNA, 25 bp, Homo sapien
ggtcggtctgtgcatcctggcactg

SEQ ID NO: 2469571 - DNA, 25 bp, Homo sapien
cattagggcgtaggggtcgggagct

SEQ ID NO: 2469572 - DNA, 25 bp, Homo sapien
tgttacacaaactgttagaataaaa

SEQ ID NO: 2469573 - DNA, 25 bp, Homo sapien
tgggcggagagcacgagcggcagca

SEQ ID NO: 2469574 - DNA, 25 bp, Homo sapien
agagtgggccctacaggctgtcagc

SEQ ID NO: 2469575 - DNA, 25 bp, Homo sapien
ctcacatgcctgttaaagagcctgc

SEQ ID NO: 2469576 - DNA, 25 bp, Homo sapien
tgtcagcggaaaccagggactaagc

SEQ ID NO: 2469577 - DNA, 25 bp, Homo sapien
tatcagagctattttgggaagtggc

SEQ ID NO: 2469578 - DNA, 25 bp, Homo sapien
ctgggccctgcttactccagcagac

SEQ ID NO: 2469579 - DNA, 25 bp, Homo sapien
tgccgcctgggccctgcttactcca

SEQ ID NO: 2469580 - DNA, 25 bp, Homo sapien
ctgccgcctgggccctgcttactcc

SEQ ID NO: 2469581 - DNA, 25 bp, Homo sapien
gccctgcttactccagcagacctcc

SEQ ID NO: 2469582 - DNA, 25 bp, Homo sapien
gggacatccctggtctcactatggg

SEQ ID NO: 2469583 - DNA, 25 bp, Homo sapien
cactgggattagcaggaccctggaa

SEQ ID NO: 2469584 - DNA, 25 bp, Homo sapien
gggatatccagaaccacctctagct

SEQ ID NO: 2469585 - DNA, 25 bp, Homo sapien
tggtggcagaaaactcctcacttgg

SEQ ID NO: 2469586 - DNA, 25 bp, Homo sapien
gggctcacaatcctcggtgccacac

SEQ ID NO: 2469587 - DNA, 25 bp, Homo sapien
cactgtcttcctcgggtagccccgt

SEQ ID NO: 2469588 - DNA, 25 bp, Homo sapien
tggtcactgtcttcctcgggtagcc

SEQ ID NO: 2469589 - DNA, 25 bp, Homo sapien
gtcactgtcttcctcgggtagcccc

SEQ ID NO: 2469590 - DNA, 25 bp, Homo sapien
acactggtcactgtcttcctcgggt

SEQ ID NO: 2469591 - DNA, 25 bp, Homo sapien
ccagtgtgtgaccactggatgccac

SEQ ID NO: 2469592 - DNA, 25 bp, Homo sapien
acttggtgctggaaccccactctca

SEQ ID NO: 2469593 - DNA, 25 bp, Homo sapien
ggcagtgagcccctcacacgggaca

SEQ ID NO: 2469594 - DNA, 25 bp, Homo sapien
catgggacagcccttggggcggcag

SEQ ID NO: 2469595 - DNA, 25 bp, Homo sapien
cagtgagcccctcacacgggacatg

SEQ ID NO: 2469596 - DNA, 25 bp, Homo sapien
tgggacagcccttggggcggcaggg

SEQ ID NO: 2469597 - DNA, 25 bp, Homo sapien
tgcctcctcgcagaggtctggctct

SEQ ID NO: 2469598 - DNA, 25 bp, Homo sapien
catgtgtccacatgctgcatgtccc

SEQ ID NO: 2469599 - DNA, 25 bp, Homo sapien
atgtgtccacatgctgcatgtccca

SEQ ID NO: 2469600 - DNA, 25 bp, Homo sapien
ccatgtgtccacatgctgcatgtcc

SEQ ID NO: 2469601 - DNA, 25 bp, Homo sapien
ccgctctcggaacacaggccgtggg

SEQ ID NO: 2469602 - DNA, 25 bp, Homo sapien
tccggtgcgatcaggcacatagaca

SEQ ID NO: 2469603 - DNA, 25 bp, Homo sapien
tgccgctctcggaacacaggccgtg

SEQ ID NO: 2469604 - DNA, 25 bp, Homo sapien
agagattcggaatccggtgcgatca

SEQ ID NO: 2469605 - DNA, 25 bp, Homo sapien
tccagttgcctgagtgccaggtggc

SEQ ID NO: 2469606 - DNA, 25 bp, Homo sapien
ccagttgcctgagtgccaggtggca

SEQ ID NO: 2469607 - DNA, 25 bp, Homo sapien
cagttgcctgagtgccaggtggcac

SEQ ID NO: 2469608 - DNA, 25 bp, Homo sapien
agttgcctgagtgccaggtggcaca

SEQ ID NO: 2469609 - DNA, 25 bp, Homo sapien
gggcacagacccgtgaaagccaggc

SEQ ID NO: 2469610 - DNA, 25 bp, Homo sapien
cacagacccgtgaaagccaggcaga

SEQ ID NO: 2469611 - DNA, 25 bp, Homo sapien
tgcggggcacagacccgtgaaagcc

SEQ ID NO: 2469612 - DNA, 25 bp, Homo sapien
ctgcggggcacagacccgtgaaagc

SEQ ID NO: 2469613 - DNA, 25 bp, Homo sapien
gcctgcgtcccactctgctcatttt

SEQ ID NO: 2469614 - DNA, 25 bp, Homo sapien
cgccccaaggaaggcgagacagatg

SEQ ID NO: 2469615 - DNA, 25 bp, Homo sapien
tgcgtcccactctgctcattttcag

SEQ ID NO: 2469616 - DNA, 25 bp, Homo sapien
aatcgctgcctatccccgcgcaaaa

SEQ ID NO: 2469617 - DNA, 25 bp, Homo sapien
gacatttcggtgctgagtcccttcc

SEQ ID NO: 2469618 - DNA, 25 bp, Homo sapien
ggacatttcggtgctgagtcccttc

SEQ ID NO: 2469619 - DNA, 25 bp, Homo sapien
catttcggtgctgagtcccttcctc

SEQ ID NO: 2469620 - DNA, 25 bp, Homo sapien
gaggacatttcggtgctgagtccct

SEQ ID NO: 2469621 - DNA, 25 bp, Homo sapien
tggtggttgcaaggggtttcagtag

SEQ ID NO: 2469622 - DNA, 25 bp, Homo sapien
aaggtgttcacaggcgggtggcttc

SEQ ID NO: 2469623 - DNA, 25 bp, Homo sapien
cttcagggcgctctgctcatccagc

SEQ ID NO: 2469624 - DNA, 25 bp, Homo sapien
gcgggtggcttcagggcgctctgct

SEQ ID NO: 2469625 - DNA, 25 bp, Homo sapien
ggagctggagcacagctgccactca

SEQ ID NO: 2469626 - DNA, 25 bp, Homo sapien
cgcaggagctggagcacagctgcca

SEQ ID NO: 2469627 - DNA, 25 bp, Homo sapien
tggagcacagctgccactcacctgc

SEQ ID NO: 2469628 - DNA, 25 bp, Homo sapien
gctgcggatgcagagcacagcctgg

SEQ ID NO: 2469629 - DNA, 25 bp, Homo sapien
aggcctatttccacatccagggacc

SEQ ID NO: 2469630 - DNA, 25 bp, Homo sapien
tgaggcctatttccacatccaggga

SEQ ID NO: 2469631 - DNA, 25 bp, Homo sapien
gaggcctatttccacatccagggac

SEQ ID NO: 2469632 - DNA, 25 bp, Homo sapien
ctgaggcctatttccacatccaggg

SEQ ID NO: 2469633 - DNA, 25 bp, Homo sapien
tctggcagtcatcgggccggcccag

SEQ ID NO: 2469634 - DNA, 25 bp, Homo sapien
gagcagtacacactctgcctctgca

SEQ ID NO: 2469635 - DNA, 25 bp, Homo sapien
cacgggccctgcctgccgctccgag

SEQ ID NO: 2469636 - DNA, 25 bp, Homo sapien
tgcacttcctctggcagtcatcggg

SEQ ID NO: 2469637 - DNA, 25 bp, Homo sapien
cccctctcctatgtagcttcccctc

SEQ ID NO: 2469638 - DNA, 25 bp, Homo sapien
aggcctatttccacatccagggacc

SEQ ID NO: 2469639 - DNA, 25 bp, Homo sapien
tgaggcctatttccacatccaggga

SEQ ID NO: 2469640 - DNA, 25 bp, Homo sapien
gaggcctatttccacatccagggac

SEQ ID NO: 2469641 - DNA, 25 bp, Homo sapien
ctgaggcctatttccacatccaggg

SEQ ID NO: 2469642 - DNA, 25 bp, Homo sapien
ccgagagtaagttgtccctcccctg

SEQ ID NO: 2469643 - DNA, 25 bp, Homo sapien
tggtcccgagagtaagttgtccctc

SEQ ID NO: 2469644 - DNA, 25 bp, Homo sapien
agtaagttgtccctcccctgagctg

SEQ ID NO: 2469645 - DNA, 25 bp, Homo sapien
ctgccccgtggtcccgagagtaagt

SEQ ID NO: 2469646 - DNA, 25 bp, Homo sapien
atggtgtactcgtagtgcaccccag

SEQ ID NO: 2469647 - DNA, 25 bp, Homo sapien
tgtactcgtagtgcaccccagggtt

SEQ ID NO: 2469648 - DNA, 25 bp, Homo sapien
ggtgtactcgtagtgcaccccaggg

SEQ ID NO: 2469649 - DNA, 25 bp, Homo sapien
gtgtactcgtagtgcaccccagggt

SEQ ID NO: 2469650 - DNA, 25 bp, Homo sapien
cggggacgtgaggttctcccagttg

SEQ ID NO: 2469651 - DNA, 25 bp, Homo sapien
ggacgtgaggttctcccagttgccc

SEQ ID NO: 2469652 - DNA, 25 bp, Homo sapien
ctggatccagacaggctccttggtg

SEQ ID NO: 2469653 - DNA, 25 bp, Homo sapien
agacaggctccttggtgggacccgg

SEQ ID NO: 2469654 - DNA, 25 bp, Homo sapien
ctgcgtgcgtatgtgacggtggtcc

SEQ ID NO: 2469655 - DNA, 25 bp, Homo sapien
ggtccagccaccattgaggaagtac

SEQ ID NO: 2469656 - DNA, 25 bp, Homo sapien
tggtccagccaccattgaggaagta

SEQ ID NO: 2469657 - DNA, 25 bp, Homo sapien
gatggtccagccaccattgaggaag

SEQ ID NO: 2469658 - DNA, 25 bp, Homo sapien
tggatggtccagccaccattgagga

SEQ ID NO: 2469659 - DNA, 25 bp, Homo sapien
ctggatgcggacctcacgtgtgctg

SEQ ID NO: 2469660 - DNA, 25 bp, Homo sapien
cctggatgcggacctcacgtgtgct

SEQ ID NO: 2469661 - DNA, 25 bp, Homo sapien
gtggcaggtggagccgttgccgtgg

SEQ ID NO: 2469662 - DNA, 25 bp, Homo sapien
ggcaggtggagccgttgccgtggca

SEQ ID NO: 2469663 - DNA, 25 bp, Homo sapien
tgtggcaggtggagccgttgccgtg

SEQ ID NO: 2469664 - DNA, 25 bp, Homo sapien
caggtggagccgttgccgtggcaca

SEQ ID NO: 2469665 - DNA, 25 bp, Homo sapien
gggagagcctcttcctaaccaggca

SEQ ID NO: 2469666 - DNA, 25 bp, Homo sapien
gcagtgctgggagagcctcttccta

SEQ ID NO: 2469667 - DNA, 25 bp, Homo sapien
agtgctgggagagcctcttcctaac

SEQ ID NO: 2469668 - DNA, 25 bp, Homo sapien
gagagcctcttcctaaccaggcaca

SEQ ID NO: 2469669 - DNA, 25 bp, Homo sapien
ttgatgcagaggtcccggctggctc

SEQ ID NO: 2469670 - DNA, 25 bp, Homo sapien
ggcaaagtactcattcgcgggccgg

SEQ ID NO: 2469671 - DNA, 25 bp, Homo sapien
ctggctcggacctggtagcaggggg

SEQ ID NO: 2469672 - DNA, 25 bp, Homo sapien
aaagtactcattcgcgggccggcag

SEQ ID NO: 2469673 - DNA, 25 bp, Homo sapien
cctccgtgacacacatccatggcag

SEQ ID NO: 2469674 - DNA, 25 bp, Homo sapien
gcgggagtatggaggccaccaggaa

SEQ ID NO: 2469675 - DNA, 25 bp, Homo sapien
gggcccaagtagaagagtcatcagc

SEQ ID NO: 2469676 - DNA, 25 bp, Homo sapien
agtagaagagtcatcagcaacagct

SEQ ID NO: 2469677 - DNA, 25 bp, Homo sapien
tcaaagtggctgcactggacgtggc

SEQ ID NO: 2469678 - DNA, 25 bp, Homo sapien
gagcatagcgtcaaagtggctgcac

SEQ ID NO: 2469679 - DNA, 25 bp, Homo sapien
gtagagcatagcgtcaaagtggctg

SEQ ID NO: 2469680 - DNA, 25 bp, Homo sapien
tagcgtcaaagtggctgcactggac

SEQ ID NO: 2469681 - DNA, 25 bp, Homo sapien
cacatttaggccagggtcgctggcc

SEQ ID NO: 2469682 - DNA, 25 bp, Homo sapien
tcctccacatttaggccagggtcgc

SEQ ID NO: 2469683 - DNA, 25 bp, Homo sapien
agcctgggtctaaaggaagcgccca

SEQ ID NO: 2469684 - DNA, 25 bp, Homo sapien
ccccagcctgggtctaaaggaagcg

SEQ ID NO: 2469685 - DNA, 25 bp, Homo sapien
ttggctctctgtatgcccacgccac

SEQ ID NO: 2469686 - DNA, 25 bp, Homo sapien
tgcttggctctctgtatgcccacgc

SEQ ID NO: 2469687 - DNA, 25 bp, Homo sapien
tctctgtatgcccacgccacagctc

SEQ ID NO: 2469688 - DNA, 25 bp, Homo sapien
ataggctgcatgcactgctgcttgg

SEQ ID NO: 2469689 - DNA, 25 bp, Homo sapien
tggagtgacaggtggtccccacaga

SEQ ID NO: 2469690 - DNA, 25 bp, Homo sapien
gtgacaggtggtccccacagagcac

SEQ ID NO: 2469691 - DNA, 25 bp, Homo sapien
agcttggagtgacaggtggtcccca

SEQ ID NO: 2469692 - DNA, 25 bp, Homo sapien
catagaggaccccaggcagcactga

SEQ ID NO: 2469693 - DNA, 25 bp, Homo sapien
acatcatagaggaccccaggcagca

SEQ ID NO: 2469694 - DNA, 25 bp, Homo sapien
gctcacatcatagaggaccccaggc

SEQ ID NO: 2469695 - DNA, 25 bp, Homo sapien
tagaggaccccaggcagcactgatg

SEQ ID NO: 2469696 - DNA, 25 bp, Homo sapien
taggcggccactacaacggcttagc

SEQ ID NO: 2469697 - DNA, 25 bp, Homo sapien
tgctggaccttaggcggccactaca

SEQ ID NO: 2469698 - DNA, 25 bp, Homo sapien
gcttagcagcaggagtgccctggca

SEQ ID NO: 2469699 - DNA, 25 bp, Homo sapien
cactacaacggcttagcagcaggag

SEQ ID NO: 2469700 - DNA, 25 bp, Homo sapien
aggggctgaggggtccaatgcgcct

SEQ ID NO: 2469701 - DNA, 25 bp, Homo sapien
gggctgaggggtccaatgcgcctca

SEQ ID NO: 2469702 - DNA, 25 bp, Homo sapien
ggggctgaggggtccaatgcgcctc

SEQ ID NO: 2469703 - DNA, 25 bp, Homo sapien
ggctgaggggtccaatgcgcctcat

SEQ ID NO: 2469704 - DNA, 25 bp, Homo sapien
caagaatgagcgctgtactacggta

SEQ ID NO: 2469705 - DNA, 25 bp, Homo sapien
tacatgtcccagtacacaaaagggc

SEQ ID NO: 2469706 - DNA, 25 bp, Homo sapien
tcttgctggtttgggataggctgcc

SEQ ID NO: 2469707 - DNA, 25 bp, Homo sapien
gatcgaatcctaatcacagtgagct

SEQ ID NO: 2469708 - DNA, 25 bp, Homo sapien
aaagctaaagagaatggaaatccta

SEQ ID NO: 2469709 - DNA, 25 bp, Homo sapien
taaagagaatggaaatcctatgaca

SEQ ID NO: 2469710 - DNA, 25 bp, Homo sapien
gagaatggaaatcctatgacaataa

SEQ ID NO: 2469711 - DNA, 25 bp, Homo sapien
ttgcagtacctcattcagccaagta

SEQ ID NO: 2469712 - DNA, 25 bp, Homo sapien
ttaagagccagaggttggtggagtt

SEQ ID NO: 2469713 - DNA, 25 bp, Homo sapien
ttggaggaggtctgacggccttctt

SEQ ID NO: 2469714 - DNA, 25 bp, Homo sapien
caccttgaccaaggctgagtcctta

SEQ ID NO: 2469715 - DNA, 25 bp, Homo sapien
ggtctgacggccttcttactctcac

SEQ ID NO: 2469716 - DNA, 25 bp, Homo sapien
ccatggcgcctacggagtacactct

SEQ ID NO: 2469717 - DNA, 25 bp, Homo sapien
atggcgcctacggagtacactctgg

SEQ ID NO: 2469718 - DNA, 25 bp, Homo sapien
ggcgcctacggagtacactctggcc

SEQ ID NO: 2469719 - DNA, 25 bp, Homo sapien
ctgccatggcgcctacggagtacac

SEQ ID NO: 2469720 - DNA, 25 bp, Homo sapien
gctggccagcagtagtgcttcagca

SEQ ID NO: 2469721 - DNA, 25 bp, Homo sapien
cagtcgcacgctagcagctatcatg

SEQ ID NO: 2469722 - DNA, 25 bp, Homo sapien
ttcagtcgcacgctagcagctatca

SEQ ID NO: 2469723 - DNA, 25 bp, Homo sapien
agcagtagtgcttcagcaggggcca

SEQ ID NO: 2469724 - DNA, 25 bp, Homo sapien
gccggcacgtgccacatggatctgg

SEQ ID NO: 2469725 - DNA, 25 bp, Homo sapien
gccacacggcacactgaagcacatg

SEQ ID NO: 2469726 - DNA, 25 bp, Homo sapien
gggcagagtcacaacacagatgctc

SEQ ID NO: 2469727 - DNA, 25 bp, Homo sapien
cacatgcgtgggcagagtcacaaca

SEQ ID NO: 2469728 - DNA, 25 bp, Homo sapien
ctcccgccagaggtgagagtaaaat

SEQ ID NO: 2469729 - DNA, 25 bp, Homo sapien
cctcccgccagaggtgagagtaaaa

SEQ ID NO: 2469730 - DNA, 25 bp, Homo sapien
ccctcccgccagaggtgagagtaaa

SEQ ID NO: 2469731 - DNA, 25 bp, Homo sapien
gcatggtgacagtggtcctgttgat

SEQ ID NO: 2469732 - DNA, 25 bp, Homo sapien
tgcagcatctcgtcgtgctgctgtg

SEQ ID NO: 2469733 - DNA, 25 bp, Homo sapien
gacagtggtcctgttgatgtcaccg

SEQ ID NO: 2469734 - DNA, 25 bp, Homo sapien
tgcatgtgcagcatctcgtcgtgct

SEQ ID NO: 2469735 - DNA, 25 bp, Homo sapien
ttttcacacgggcttctataccgct

SEQ ID NO: 2469736 - DNA, 25 bp, Homo sapien
tataccgcttcgactggaagatcca

SEQ ID NO: 2469737 - DNA, 25 bp, Homo sapien
ctgggcccttctgggactgtgcgct

SEQ ID NO: 2469738 - DNA, 25 bp, Homo sapien
tggacttggagccccttggagtatg

SEQ ID NO: 2469739 - DNA, 25 bp, Homo sapien
tctgcctgagtgaagttcaccaggt

SEQ ID NO: 2469740 - DNA, 25 bp, Homo sapien
cgcaccacatggtagagcaggagct

SEQ ID NO: 2469741 - DNA, 25 bp, Homo sapien
gtcctcccctgtgctgtcatgctgg

SEQ ID NO: 2469742 - DNA, 25 bp, Homo sapien
aagagccggcctagctggaggcccc

SEQ ID NO: 2469743 - DNA, 25 bp, Homo sapien
gctctgaggctctggctgctgagtg

SEQ ID NO: 2469744 - DNA, 25 bp, Homo sapien
tctgaggctctggctgctgagtggc

SEQ ID NO: 2469745 - DNA, 25 bp, Homo sapien
ctctggctgctgagtggctggacgg

SEQ ID NO: 2469746 - DNA, 25 bp, Homo sapien
tggctgctgagtggctggacggact

SEQ ID NO: 2469747 - DNA, 25 bp, Homo sapien
ggccatcagcctttgtgatccaggc

SEQ ID NO: 2469748 - DNA, 25 bp, Homo sapien
catcagcctttgtgatccaggccga

SEQ ID NO: 2469749 - DNA, 25 bp, Homo sapien
cagcctttgtgatccaggccgaggc

SEQ ID NO: 2469750 - DNA, 25 bp, Homo sapien
cagaggcaaaaggggccatcagcct

SEQ ID NO: 2469751 - DNA, 25 bp, Homo sapien
ctgtgtgagaacagcacgagcccac

SEQ ID NO: 2469752 - DNA, 25 bp, Homo sapien
ccagctgggtctgcatgaagctgcg

SEQ ID NO: 2469753 - DNA, 25 bp, Homo sapien
gctgggtctgcatgaagctgcgcac

SEQ ID NO: 2469754 - DNA, 25 bp, Homo sapien
gcacgagcccaccatccagctgggt

SEQ ID NO: 2469755 - DNA, 25 bp, Homo sapien
ctgggctgcttaatggtgtacacca

SEQ ID NO: 2469756 - DNA, 25 bp, Homo sapien
tgggctgcttaatggtgtacaccag

SEQ ID NO: 2469757 - DNA, 25 bp, Homo sapien
gctgggctgcttaatggtgtacacc

SEQ ID NO: 2469758 - DNA, 25 bp, Homo sapien
ggctgcttaatggtgtacaccaggt

SEQ ID NO: 2469759 - DNA, 25 bp, Homo sapien
ctgtagggatgggcacggtggcccc

SEQ ID NO: 2469760 - DNA, 25 bp, Homo sapien
tgggcacggtggccccctcccacat

SEQ ID NO: 2469761 - DNA, 25 bp, Homo sapien
tagggatgggcacggtggccccctc

SEQ ID NO: 2469762 - DNA, 25 bp, Homo sapien
gatgggcacggtggccccctcccac

SEQ ID NO: 2469763 - DNA, 25 bp, Homo sapien
caggacaaaaccgtcagtgtcttgc

SEQ ID NO: 2469764 - DNA, 25 bp, Homo sapien
gtgtcttgctcccatcgtgcaggta

SEQ ID NO: 2469765 - DNA, 25 bp, Homo sapien
aaccgtcagtgtcttgctcccatcg

SEQ ID NO: 2469766 - DNA, 25 bp, Homo sapien
caggcctgagtttgtatgaggtcgg

SEQ ID NO: 2469767 - DNA, 25 bp, Homo sapien
ctctctccagcagaaggtgctgagg

SEQ ID NO: 2469768 - DNA, 25 bp, Homo sapien
tgcagggccccatgccggggtggct

SEQ ID NO: 2469769 - DNA, 25 bp, Homo sapien
ggtcctggcttgaggcccatcctcc

SEQ ID NO: 2469770 - DNA, 25 bp, Homo sapien
ctgagggtcctggcttgaggcccat

SEQ ID NO: 2469771 - DNA, 25 bp, Homo sapien
tgacgtcctcaaggggagcacccag

SEQ ID NO: 2469772 - DNA, 25 bp, Homo sapien
ctccagctccacgtgacgtcctcaa

SEQ ID NO: 2469773 - DNA, 25 bp, Homo sapien
gtgacgtcctcaaggggagcaccca

SEQ ID NO: 2469774 - DNA, 25 bp, Homo sapien
ggctcatctgccaagatgccacgca

SEQ ID NO: 2469775 - DNA, 25 bp, Homo sapien
ctgccaagatgccacgcagcaccat

SEQ ID NO: 2469776 - DNA, 25 bp, Homo sapien
tcatctgccaagatgccacgcagca

SEQ ID NO: 2469777 - DNA, 25 bp, Homo sapien
gccaagatgccacgcagcaccatca

SEQ ID NO: 2469778 - DNA, 25 bp, Homo sapien
cctctccctggaagatgtagatctc

SEQ ID NO: 2469779 - DNA, 25 bp, Homo sapien
ctctccctggaagatgtagatctcc

SEQ ID NO: 2469780 - DNA, 25 bp, Homo sapien
cctggaagatgtagatctccttgtg

SEQ ID NO: 2469781 - DNA, 25 bp, Homo sapien
tccctggaagatgtagatctccttg

SEQ ID NO: 2469782 - DNA, 25 bp, Homo sapien
gtagtgggcctcatccctactgcag

SEQ ID NO: 2469783 - DNA, 25 bp, Homo sapien
ggcctccttgaggaaccatgaggcc

SEQ ID NO: 2469784 - DNA, 25 bp, Homo sapien
cctccttgaggaaccatgaggccgg

SEQ ID NO: 2469785 - DNA, 25 bp, Homo sapien
ggtagtgggcctcatccctactgca

SEQ ID NO: 2469786 - DNA, 25 bp, Homo sapien
ctgcagcgggatccagccgtggtca

SEQ ID NO: 2469787 - DNA, 25 bp, Homo sapien
ggactcgcctcttcctgaggcccct

SEQ ID NO: 2469788 - DNA, 25 bp, Homo sapien
aggactcgcctcttcctgaggcccc

SEQ ID NO: 2469789 - DNA, 25 bp, Homo sapien
gactcgcctcttcctgaggcccctc

SEQ ID NO: 2469790 - DNA, 25 bp, Homo sapien
ggctgcatgggctcatccgtggcca

SEQ ID NO: 2469791 - DNA, 25 bp, Homo sapien
tgggctcatccgtggccatgatact

SEQ ID NO: 2469792 - DNA, 25 bp, Homo sapien
gcatgggctcatccgtggccatgat

SEQ ID NO: 2469793 - DNA, 25 bp, Homo sapien
catccgtggccatgatactgccaga

SEQ ID NO: 2469794 - DNA, 25 bp, Homo sapien
tgttgtctgtagtcagcagccgcca

SEQ ID NO: 2469795 - DNA, 25 bp, Homo sapien
attgctgaaggccatgttgtctgta

SEQ ID NO: 2469796 - DNA, 25 bp, Homo sapien
agcaaagcccgaatcagcattgctg

SEQ ID NO: 2469797 - DNA, 25 bp, Homo sapien
gctgggcctcagcaaagcccgaatc

SEQ ID NO: 2469798 - DNA, 25 bp, Homo sapien
taccccaggccacgtggaagacgca

SEQ ID NO: 2469799 - DNA, 25 bp, Homo sapien
ccacgtggaagacgcagctgatggt

SEQ ID NO: 2469800 - DNA, 25 bp, Homo sapien
ggccacgtggaagacgcagctgatg

SEQ ID NO: 2469801 - DNA, 25 bp, Homo sapien
caggccacgtggaagacgcagctga

SEQ ID NO: 2469802 - DNA, 25 bp, Homo sapien
cgtggtcattcacaggctggatggc

SEQ ID NO: 2469803 - DNA, 25 bp, Homo sapien
aggggcgtggtcattcacaggctgg

SEQ ID NO: 2469804 - DNA, 25 bp, Homo sapien
gggcgtggtcattcacaggctggat

SEQ ID NO: 2469805 - DNA, 25 bp, Homo sapien
gtggtcattcacaggctggatggcc

SEQ ID NO: 2469806 - DNA, 25 bp, Homo sapien
agctggccatgcatcaggtctccat

SEQ ID NO: 2469807 - DNA, 25 bp, Homo sapien
catgcatcaggtctccattggtgaa

SEQ ID NO: 2469808 - DNA, 25 bp, Homo sapien
tgcatcaggtctccattggtgaagg

SEQ ID NO: 2469809 - DNA, 25 bp, Homo sapien
tggccatgcatcaggtctccattgg

SEQ ID NO: 2469810 - DNA, 25 bp, Homo sapien
ccaagtcaacctcccatggcggggc

SEQ ID NO: 2469811 - DNA, 25 bp, Homo sapien
ggcggggctgctccatgacctcata

SEQ ID NO: 2469812 - DNA, 25 bp, Homo sapien
aagtcaacctcccatggcggggctg

SEQ ID NO: 2469813 - DNA, 25 bp, Homo sapien
ctgctccatgacctcatagaggtac

SEQ ID NO: 2469814 - DNA, 25 bp, Homo sapien
tgttgagactcttgatgaagagctg

SEQ ID NO: 2469815 - DNA, 25 bp, Homo sapien
gcactgttgagactcttgatgaaga

SEQ ID NO: 2469816 - DNA, 25 bp, Homo sapien
tggtcagcagagaggacacacccac

SEQ ID NO: 2469817 - DNA, 25 bp, Homo sapien
ctggcactgttgagactcttgatga

SEQ ID NO: 2469818 - DNA, 25 bp, Homo sapien
aacagaaggtgtcctccactgccac

SEQ ID NO: 2469819 - DNA, 25 bp, Homo sapien
agaaggtgtcctccactgccactga

SEQ ID NO: 2469820 - DNA, 25 bp, Homo sapien
ctgagtgtgcagtggctccagctgc

SEQ ID NO: 2469821 - DNA, 25 bp, Homo sapien
aaccacctcacagtggaaggttggg

SEQ ID NO: 2469822 - DNA, 25 bp, Homo sapien
tgttctgagtgtgcagtggctccag

SEQ ID NO: 2469823 - DNA, 25 bp, Homo sapien
ctgaaccacctcacagtggaaggtt

SEQ ID NO: 2469824 - DNA, 25 bp, Homo sapien
ggaatgtcaagtcctgtgtagggcc

SEQ ID NO: 2469825 - DNA, 25 bp, Homo sapien
gtggatttgtatggccagctggaca

SEQ ID NO: 2469826 - DNA, 25 bp, Homo sapien
tcctcggtgtagtgctgtgggtcag

SEQ ID NO: 2469827 - DNA, 25 bp, Homo sapien
ccggaatgtcaagtcctgtgtaggg

SEQ ID NO: 2469828 - DNA, 25 bp, Homo sapien
gcagttcaccacgtccaggagggtg

SEQ ID NO: 2469829 - DNA, 25 bp, Homo sapien
cttgcagttcaccacgtccaggagg

SEQ ID NO: 2469830 - DNA, 25 bp, Homo sapien
ttcaccacgtccaggagggtgaaca

SEQ ID NO: 2469831 - DNA, 25 bp, Homo sapien
tcaccacgtccaggagggtgaacat

SEQ ID NO: 2469832 - DNA, 25 bp, Homo sapien
gtgccaccctcggtcaccaccactg

SEQ ID NO: 2469833 - DNA, 25 bp, Homo sapien
ctgtgccaccctcggtcaccaccac

SEQ ID NO: 2469834 - DNA, 25 bp, Homo sapien
tgtgccaccctcggtcaccaccact

SEQ ID NO: 2469835 - DNA, 25 bp, Homo sapien
agccaccatgttgtgcgtcagcaag

SEQ ID NO: 2469836 - DNA, 25 bp, Homo sapien
agctccccaagaaggagactgtcac

SEQ ID NO: 2469837 - DNA, 25 bp, Homo sapien
cagctccccaagaaggagactgtca

SEQ ID NO: 2469838 - DNA, 25 bp, Homo sapien
ctgaggactcctcagttcgtgtggg

SEQ ID NO: 2469839 - DNA, 25 bp, Homo sapien
ctcctcagttcgtgtggggtactgg

SEQ ID NO: 2469840 - DNA, 25 bp, Homo sapien
gactcctcagttcgtgtggggtact

SEQ ID NO: 2469841 - DNA, 25 bp, Homo sapien
agctgaggactcctcagttcgtgtg

SEQ ID NO: 2469842 - DNA, 25 bp, Homo sapien
gctgtgcgtcagtcacaggcacact

SEQ ID NO: 2469843 - DNA, 25 bp, Homo sapien
ctggaggagtctgcggccattgaga

SEQ ID NO: 2469844 - DNA, 25 bp, Homo sapien
gggctgtgcgtcagtcacaggcaca

SEQ ID NO: 2469845 - DNA, 25 bp, Homo sapien
tggggctgtgcgtcagtcacaggca

SEQ ID NO: 2469846 - DNA, 25 bp, Homo sapien
ctggtatggggtaagactcaagtag

SEQ ID NO: 2469847 - DNA, 25 bp, Homo sapien
gggtaagactcaagtaggagccaca

SEQ ID NO: 2469848 - DNA, 25 bp, Homo sapien
actcaagtaggagccacaagactcc

SEQ ID NO: 2469849 - DNA, 25 bp, Homo sapien
caggagggggtctcgccgaggagga

SEQ ID NO: 2469850 - DNA, 25 bp, Homo sapien
ccaggagaaggagggcttcgggttg

SEQ ID NO: 2469851 - DNA, 25 bp, Homo sapien
gggcttcgggttgggacatggagaa

SEQ ID NO: 2469852 - DNA, 25 bp, Homo sapien
caggtgtccagagtagagctgcagc

SEQ ID NO: 2469853 - DNA, 25 bp, Homo sapien
aaggagggcttcgggttgggacatg

SEQ ID NO: 2469854 - DNA, 25 bp, Homo sapien
gctgcaggtctatgtcagtcagagc

SEQ ID NO: 2469855 - DNA, 25 bp, Homo sapien
cagctgcaggtctatgtcagtcaga

SEQ ID NO: 2469856 - DNA, 25 bp, Homo sapien
ctgcagctgcaggtctatgtcagtc

SEQ ID NO: 2469857 - DNA, 25 bp, Homo sapien
ctgcaggtctatgtcagtcagagcc

SEQ ID NO: 2469858 - DNA, 25 bp, Homo sapien
aactccgccaactaagttgcgctct

SEQ ID NO: 2469859 - DNA, 25 bp, Homo sapien
ccaactccgccaactaagttgcgct

SEQ ID NO: 2469860 - DNA, 25 bp, Homo sapien
ccccaactccgccaactaagttgcg

SEQ ID NO: 2469861 - DNA, 25 bp, Homo sapien
tcctcaaatcacaaaacttccccca

SEQ ID NO: 2469862 - DNA, 25 bp, Homo sapien
tgggcacggcggtctcggccgagcc

SEQ ID NO: 2469863 - DNA, 25 bp, Homo sapien
ggcacggcggtctcggccgagccga

SEQ ID NO: 2469864 - DNA, 25 bp, Homo sapien
gcacggcggtctcggccgagccgag

SEQ ID NO: 2469865 - DNA, 25 bp, Homo sapien
gggcacggcggtctcggccgagccg

SEQ ID NO: 2469866 - DNA, 25 bp, Homo sapien
gagttcaatctgatgtatcctagaa

SEQ ID NO: 2469867 - DNA, 25 bp, Homo sapien
taataccatctaatatcttcatgtt

SEQ ID NO: 2469868 - DNA, 25 bp, Homo sapien
tctgctaccatctaatatctgcttt

SEQ ID NO: 2469869 - DNA, 25 bp, Homo sapien
tctaattatctttgtcaaaaggagt

SEQ ID NO: 2469870 - DNA, 25 bp, Homo sapien
cagtaagttagcgttaaatggaagt

SEQ ID NO: 2469871 - DNA, 25 bp, Homo sapien
catctgcaggatgccttgataacta

SEQ ID NO: 2469872 - DNA, 25 bp, Homo sapien
tatttacctaggagcatgtcagaga

SEQ ID NO: 2469873 - DNA, 25 bp, Homo sapien
gtttttaaatctctcgccctgagta

SEQ ID NO: 2469874 - DNA, 25 bp, Homo sapien
cactataactgaattcgccatgaac

SEQ ID NO: 2469875 - DNA, 25 bp, Homo sapien
caggaagagacacgctttaggcagc

SEQ ID NO: 2469876 - DNA, 25 bp, Homo sapien
tggatagaaagggttgaccagtgtc

SEQ ID NO: 2469877 - DNA, 25 bp, Homo sapien
gaaccaagacgtcttcctgaacagg

SEQ ID NO: 2469878 - DNA, 25 bp, Homo sapien
cataacaaaaaagcttggtcatgat

SEQ ID NO: 2469879 - DNA, 25 bp, Homo sapien
caggggaaactttagcagcaaatac

SEQ ID NO: 2469880 - DNA, 25 bp, Homo sapien
tggaatactgcttatcaggggaaac

SEQ ID NO: 2469881 - DNA, 25 bp, Homo sapien
gatgtcaaaagataacttatctcaa

SEQ ID NO: 2469882 - DNA, 25 bp, Homo sapien
aaaggcagtgtgagacaccagatct

SEQ ID NO: 2469883 - DNA, 25 bp, Homo sapien
caccagatctctggaggagaatgct

SEQ ID NO: 2469884 - DNA, 25 bp, Homo sapien
tccctcgggtctgttcctggatttc

SEQ ID NO: 2469885 - DNA, 25 bp, Homo sapien
ttcaaaaatgatcaagcagggccag

SEQ ID NO: 2469886 - DNA, 25 bp, Homo sapien
cttctaccaagcagccacgtcagta

SEQ ID NO: 2469887 - DNA, 25 bp, Homo sapien
ttcggaaggtcctgtatgtctactc

SEQ ID NO: 2469888 - DNA, 25 bp, Homo sapien
tgtctactccataggaccctagtgg

SEQ ID NO: 2469889 - DNA, 25 bp, Homo sapien
cataggaccctagtggtaaacttct

SEQ ID NO: 2469890 - DNA, 25 bp, Homo sapien
taaaaggcttcagtatccatcattg

SEQ ID NO: 2469891 - DNA, 25 bp, Homo sapien
tcagtatccatcattgaaggtcaag

SEQ ID NO: 2469892 - DNA, 25 bp, Homo sapien
tcattgaaggtcaaggcattgacag

SEQ ID NO: 2469893 - DNA, 25 bp, Homo sapien
tctataaaaggcttcagtatccatc

SEQ ID NO: 2469894 - DNA, 25 bp, Homo sapien
cacttgctgcctgggcatgcaggaa

SEQ ID NO: 2469895 - DNA, 25 bp, Homo sapien
acttgctgcctgggcatgcaggaag

SEQ ID NO: 2469896 - DNA, 25 bp, Homo sapien
ggccagctcaaagagtgtagactgt

SEQ ID NO: 2469897 - DNA, 25 bp, Homo sapien
ccagctcaaagagtgtagactgtac

SEQ ID NO: 2469898 - DNA, 25 bp, Homo sapien
caaggccagctcaaagagtgtagac

SEQ ID NO: 2469899 - DNA, 25 bp, Homo sapien
tcaaggccagctcaaagagtgtaga

SEQ ID NO: 2469900 - DNA, 25 bp, Homo sapien
ggtgtacagggagctgttcattaga

SEQ ID NO: 2469901 - DNA, 25 bp, Homo sapien
gtacagggagctgttcattagacct

SEQ ID NO: 2469902 - DNA, 25 bp, Homo sapien
gtggtgtacagggagctgttcatta

SEQ ID NO: 2469903 - DNA, 25 bp, Homo sapien
tggtggtgtacagggagctgttcat

SEQ ID NO: 2469904 - DNA, 25 bp, Homo sapien
gagtgagggttttagcagtatgacc

SEQ ID NO: 2469905 - DNA, 25 bp, Homo sapien
tatgaccttgtaaggaggtaagcca

SEQ ID NO: 2469906 - DNA, 25 bp, Homo sapien
cagattagtcatgccagagtgaggg

SEQ ID NO: 2469907 - DNA, 25 bp, Homo sapien
ctggagaacaaaggcaaactatgtg

SEQ ID NO: 2469908 - DNA, 25 bp, Homo sapien
agaacgtgcatatattgagaaaaac

SEQ ID NO: 2469909 - DNA, 25 bp, Homo sapien
ctgagatatacagaacgtgcatata

SEQ ID NO: 2469910 - DNA, 25 bp, Homo sapien
aacgtgcatatattgagaaaaacag

SEQ ID NO: 2469911 - DNA, 25 bp, Homo sapien
actgagatatacagaacgtgcatat

SEQ ID NO: 2469912 - DNA, 25 bp, Homo sapien
caatcatctagcaacgttgagggtc

SEQ ID NO: 2469913 - DNA, 25 bp, Homo sapien
tagataccacaccaaacatgtagag

SEQ ID NO: 2469914 - DNA, 25 bp, Homo sapien
tagaggtgcctaatctcacgaatgc

SEQ ID NO: 2469915 - DNA, 25 bp, Homo sapien
taatgtttgggatgtgtcagcaccc

SEQ ID NO: 2469916 - DNA, 25 bp, Homo sapien
tgttctcacggattcaggaagctgg

SEQ ID NO: 2469917 - DNA, 25 bp, Homo sapien
cctggacaggtcgtcaaggcaagac

SEQ ID NO: 2469918 - DNA, 25 bp, Homo sapien
gagaactccagatattcaactcagg

SEQ ID NO: 2469919 - DNA, 25 bp, Homo sapien
gacctgccaagggaggaagtctctg

SEQ ID NO: 2469920 - DNA, 25 bp, Homo sapien
ggcttcatgcccactgttggcacca

SEQ ID NO: 2469921 - DNA, 25 bp, Homo sapien
tggcttcatgcccactgttggcacc

SEQ ID NO: 2469922 - DNA, 25 bp, Homo sapien
cttgagctgctcataaacagaaggg

SEQ ID NO: 2469923 - DNA, 25 bp, Homo sapien
ttgagctgctcataaacagaagggc

SEQ ID NO: 2469924 - DNA, 25 bp, Homo sapien
aagcctgttccttttgtggcaactg

SEQ ID NO: 2469925 - DNA, 25 bp, Homo sapien
caactgtgaggaaaactggttggaa

SEQ ID NO: 2469926 - DNA, 25 bp, Homo sapien
ataattccaaggctcccttgcctgc

SEQ ID NO: 2469927 - DNA, 25 bp, Homo sapien
tacaaaggctcttgtcaataattcc

SEQ ID NO: 2469928 - DNA, 25 bp, Homo sapien
tgtccttcagagaggaacctcagct

SEQ ID NO: 2469929 - DNA, 25 bp, Homo sapien
gaaacttaagatgtcacgctgcctt

SEQ ID NO: 2469930 - DNA, 25 bp, Homo sapien
catactgcagcatgacctgaagtgc

SEQ ID NO: 2469931 - DNA, 25 bp, Homo sapien
tgagacaggtgtgagcattagaaac

SEQ ID NO: 2469932 - DNA, 25 bp, Homo sapien
cggagagaactgatcttgtggtcaa

SEQ ID NO: 2469933 - DNA, 25 bp, Homo sapien
ttgctgtggagtcaagaaacctgag

SEQ ID NO: 2469934 - DNA, 25 bp, Homo sapien
tctcagcttcagtcttcaggtggga

SEQ ID NO: 2469935 - DNA, 25 bp, Homo sapien
gaactcaatggcaggcagtagcaca

SEQ ID NO: 2469936 - DNA, 25 bp, Homo sapien
tcatgtatttaagaatccaggatga

SEQ ID NO: 2469937 - DNA, 25 bp, Homo sapien
tatttaagaatccaggatgagctcc

SEQ ID NO: 2469938 - DNA, 25 bp, Homo sapien
catgtatttaagaatccaggatgag

SEQ ID NO: 2469939 - DNA, 25 bp, Homo sapien
tgtatttaagaatccaggatgagct

SEQ ID NO: 2469940 - DNA, 25 bp, Homo sapien
actgacctgaccgataatggaattc

SEQ ID NO: 2469941 - DNA, 25 bp, Homo sapien
gaccgataatggaattcccagactt

SEQ ID NO: 2469942 - DNA, 25 bp, Homo sapien
tccgggctgccactccgcaagagct

SEQ ID NO: 2469943 - DNA, 25 bp, Homo sapien
tccgcaagagctgccttcatgaaag

SEQ ID NO: 2469944 - DNA, 25 bp, Homo sapien
tccagagtgaggttgccgactccac

SEQ ID NO: 2469945 - DNA, 25 bp, Homo sapien
ctataaacgtggagtttcacaagag

SEQ ID NO: 2469946 - DNA, 25 bp, Homo sapien
gcactcaagcttggttctataaacg

SEQ ID NO: 2469947 - DNA, 25 bp, Homo sapien
caagactggagtatgcagatagccc

SEQ ID NO: 2469948 - DNA, 25 bp, Homo sapien
cgcagaggtctgaactgcgttcttt

SEQ ID NO: 2469949 - DNA, 25 bp, Homo sapien
tagtgatttattgtgggaacgattc

SEQ ID NO: 2469950 - DNA, 25 bp, Homo sapien
gaacgattccgaagaccgcagaggt

SEQ ID NO: 2469951 - DNA, 25 bp, Homo sapien
tattgtgggaacgattccgaagacc

SEQ ID NO: 2469952 - DNA, 25 bp, Homo sapien
aatgcagtagcccaatctcagttca

SEQ ID NO: 2469953 - DNA, 25 bp, Homo sapien
gcagagactacagtcatgtgccatc

SEQ ID NO: 2469954 - DNA, 25 bp, Homo sapien
agcagagactacagtcatgtgccat

SEQ ID NO: 2469955 - DNA, 25 bp, Homo sapien
tggaatgcagtagcccaatctcagt

SEQ ID NO: 2469956 - DNA, 25 bp, Homo sapien
cgtgtgtccgcagctttgctgtttt

SEQ ID NO: 2469957 - DNA, 25 bp, Homo sapien
tcgtgtgtccgcagctttgctgttt

SEQ ID NO: 2469958 - DNA, 25 bp, Homo sapien
cacttctaaaaaagcgttgaggcta

SEQ ID NO: 2469959 - DNA, 25 bp, Homo sapien
tctaaaaaagcgttgaggctacttg

SEQ ID NO: 2469960 - DNA, 25 bp, Homo sapien
aagcgttgaggctacttgaagtaaa

SEQ ID NO: 2469961 - DNA, 25 bp, Homo sapien
aaaaagcgttgaggctacttgaagt

SEQ ID NO: 2469962 - DNA, 25 bp, Homo sapien
cattgtgatatatggatgtgatgcc

SEQ ID NO: 2469963 - DNA, 25 bp, Homo sapien
ttctttgctgtcatacataactctt

SEQ ID NO: 2469964 - DNA, 25 bp, Homo sapien
ccttctttgctgtcatacataactc

SEQ ID NO: 2469965 - DNA, 25 bp, Homo sapien
tctcttctagcctgtggacattgtg

SEQ ID NO: 2469966 - DNA, 25 bp, Homo sapien
ggataccacggaaaattcagaagca

SEQ ID NO: 2469967 - DNA, 25 bp, Homo sapien
ttgtggataccacggaaaattcaga

SEQ ID NO: 2469968 - DNA, 25 bp, Homo sapien
cttcaacaacgatttgtggatacca

SEQ ID NO: 2469969 - DNA, 25 bp, Homo sapien
caacgatttgtggataccacggaaa

SEQ ID NO: 2469970 - DNA, 25 bp, Homo sapien
catgtcttttctgcgttcatctcct

SEQ ID NO: 2469971 - DNA, 25 bp, Homo sapien
ttcatgtcttttctgcgttcatctc

SEQ ID NO: 2469972 - DNA, 25 bp, Homo sapien
atgtcttttctgcgttcatctcctc

SEQ ID NO: 2469973 - DNA, 25 bp, Homo sapien
tcatgtcttttctgcgttcatctcc

SEQ ID NO: 2469974 - DNA, 25 bp, Homo sapien
aagggtagagtctacagttgctgca

SEQ ID NO: 2469975 - DNA, 25 bp, Homo sapien
tgacttccttctacttgagaggtgg

SEQ ID NO: 2469976 - DNA, 25 bp, Homo sapien
gaggtggcttgagattcatgctgct

SEQ ID NO: 2469977 - DNA, 25 bp, Homo sapien
ctgctgaagggtagagtctacagtt

SEQ ID NO: 2469978 - DNA, 25 bp, Homo sapien
ctaagtgtcttttgcctgcagctgt

SEQ ID NO: 2469979 - DNA, 25 bp, Homo sapien
aagtgtcttttgcctgcagctgttc

SEQ ID NO: 2469980 - DNA, 25 bp, Homo sapien
taagtgtcttttgcctgcagctgtt

SEQ ID NO: 2469981 - DNA, 25 bp, Homo sapien
ttctgtaggagcttgttctctgcag

SEQ ID NO: 2469982 - DNA, 25 bp, Homo sapien
cagctgcaattacacccaccttcag

SEQ ID NO: 2469983 - DNA, 25 bp, Homo sapien
aacagctgcaattacacccaccttc

SEQ ID NO: 2469984 - DNA, 25 bp, Homo sapien
cccaccttcagctcttctgtaggag

SEQ ID NO: 2469985 - DNA, 25 bp, Homo sapien
tcatctgctcctagggccaaaggag

SEQ ID NO: 2469986 - DNA, 25 bp, Homo sapien
ctcatctgctcctagggccaaagga

SEQ ID NO: 2469987 - DNA, 25 bp, Homo sapien
tagggccaaaggagcacactggcac

SEQ ID NO: 2469988 - DNA, 25 bp, Homo sapien
gctcctagggccaaaggagcacact

SEQ ID NO: 2469989 - DNA, 25 bp, Homo sapien
ctctagaccgttattgcatcccact

SEQ ID NO: 2469990 - DNA, 25 bp, Homo sapien
ggatactggccttcttctctagacc

SEQ ID NO: 2469991 - DNA, 25 bp, Homo sapien
tcccactccctcgatcaaacatgac

SEQ ID NO: 2469992 - DNA, 25 bp, Homo sapien
ggccttcttctctagaccgttattg

SEQ ID NO: 2469993 - DNA, 25 bp, Homo sapien
gctggctctgcctgatgcaggaaag

SEQ ID NO: 2469994 - DNA, 25 bp, Homo sapien
cgaggatactgcagctgagagacgc

SEQ ID NO: 2469995 - DNA, 25 bp, Homo sapien
ttggagcctgctgaccccgtgtggc

SEQ ID NO: 2469996 - DNA, 25 bp, Homo sapien
gggcctgagtcgtcccagagctctg

SEQ ID NO: 2469997 - DNA, 25 bp, Homo sapien
agccgagatgaactcacccctggac

SEQ ID NO: 2469998 - DNA, 25 bp, Homo sapien
aggagtgtctcagccgagatgaact

SEQ ID NO: 2469999 - DNA, 25 bp, Homo sapien
gagatgaactcacccctggaccttt

SEQ ID NO: 2470000 - DNA, 25 bp, Homo sapien
tgtctcagccgagatgaactcaccc

SEQ ID NO: 2470001 - DNA, 25 bp, Homo sapien
gtgcgcatccatcgggaagtcctca

SEQ ID NO: 2470002 - DNA, 25 bp, Homo sapien
tcgggaagtcctcaagctgcatggg

SEQ ID NO: 2470003 - DNA, 25 bp, Homo sapien
aatttcagagggcaagcgtgcgcat

SEQ ID NO: 2470004 - DNA, 25 bp, Homo sapien
ggcaagcgtgcgcatccatcgggaa

SEQ ID NO: 2470005 - DNA, 25 bp, Homo sapien
catgtgaggcatcctagctgggtca

SEQ ID NO: 2470006 - DNA, 25 bp, Homo sapien
gagcagccccatgcatattttgaaa

SEQ ID NO: 2470007 - DNA, 25 bp, Homo sapien
gatgctacccgtgactctcaggcaa

SEQ ID NO: 2470008 - DNA, 25 bp, Homo sapien
tattggaaacatgacctccctgtga

SEQ ID NO: 2470009 - DNA, 25 bp, Homo sapien
tgtgtttgatccagacaagaactgc

SEQ ID NO: 2470010 - DNA, 25 bp, Homo sapien
cattctgtgatggttgtagatccac

SEQ ID NO: 2470011 - DNA, 25 bp, Homo sapien
gactgtgacgtgtgtactggtccca

SEQ ID NO: 2470012 - DNA, 25 bp, Homo sapien
tcagtgcctggccattgtgattgtc

SEQ ID NO: 2470013 - DNA, 25 bp, Homo sapien
gcgtccttctgatgtttaattcaca

SEQ ID NO: 2470014 - DNA, 25 bp, Homo sapien
caccttgggccaacttggtgatgac

SEQ ID NO: 2470015 - DNA, 25 bp, Homo sapien
ttaattcacactcatcactacgcaa

SEQ ID NO: 2470016 - DNA, 25 bp, Homo sapien
gatgactgggttaaccaggtggtaa

SEQ ID NO: 2470017 - DNA, 25 bp, Homo sapien
ctactttgcagagacaccgataaat

SEQ ID NO: 2470018 - DNA, 25 bp, Homo sapien
gagacaccgataaatgtttgtttct

SEQ ID NO: 2470019 - DNA, 25 bp, Homo sapien
tttgcagagacaccgataaatgttt

SEQ ID NO: 2470020 - DNA, 25 bp, Homo sapien
gcagagacaccgataaatgtttgtt

SEQ ID NO: 2470021 - DNA, 25 bp, Homo sapien
taacccggaggaagaatgtgcgacc

SEQ ID NO: 2470022 - DNA, 25 bp, Homo sapien
gagcaatgggcactgataacccgga

SEQ ID NO: 2470023 - DNA, 25 bp, Homo sapien
tctgtatgatgtcgggcaaaggagc

SEQ ID NO: 2470024 - DNA, 25 bp, Homo sapien
gaaaatacattccaaatcatcgaag

SEQ ID NO: 2470025 - DNA, 25 bp, Homo sapien
tggtcctggcatccatattcagaag

SEQ ID NO: 2470026 - DNA, 25 bp, Homo sapien
ttggtcctggcatccatattcagaa

SEQ ID NO: 2470027 - DNA, 25 bp, Homo sapien
ggtggggtcaggacgtggtgggcga

SEQ ID NO: 2470028 - DNA, 25 bp, Homo sapien
caggtggggtcaggacgtggtgggc

SEQ ID NO: 2470029 - DNA, 25 bp, Homo sapien
gaggtttgcgttgctagcctggcct

SEQ ID NO: 2470030 - DNA, 25 bp, Homo sapien
tggattcgcgggaatacgcatccct

SEQ ID NO: 2470031 - DNA, 25 bp, Homo sapien
aagaaggaaaagcatcccgagagaa

SEQ ID NO: 2470032 - DNA, 25 bp, Homo sapien
cccgagagaagtgtagtggattcgc

SEQ ID NO: 2470033 - DNA, 25 bp, Homo sapien
cataggtctcacatcttgcactctg

SEQ ID NO: 2470034 - DNA, 25 bp, Homo sapien
gcgcacataggtctcacatcttgca

SEQ ID NO: 2470035 - DNA, 25 bp, Homo sapien
aggtctcacatcttgcactctgacg

SEQ ID NO: 2470036 - DNA, 25 bp, Homo sapien
cgcgcgcacataggtctcacatctt

SEQ ID NO: 2470037 - DNA, 25 bp, Homo sapien
tggaagctcgggtgtttgcaaaacc

SEQ ID NO: 2470038 - DNA, 25 bp, Homo sapien
gcactgggcacattctcaacatcgt

SEQ ID NO: 2470039 - DNA, 25 bp, Homo sapien
catcattgctccaggtttacagagg

SEQ ID NO: 2470040 - DNA, 25 bp, Homo sapien
gctttgattggaaagtcagctcccc

SEQ ID NO: 2470041 - DNA, 25 bp, Homo sapien
gtcctcagtcactgaagacagagac

SEQ ID NO: 2470042 - DNA, 25 bp, Homo sapien
tcccagctgaagttctgtgttcccc

SEQ ID NO: 2470043 - DNA, 25 bp, Homo sapien
tgtgttccccacagagcgtcttttg

SEQ ID NO: 2470044 - DNA, 25 bp, Homo sapien
gtataacacatgcatgatacacgtg

SEQ ID NO: 2470045 - DNA, 25 bp, Homo sapien
agcaagctctcaggtcggcctaaag

SEQ ID NO: 2470046 - DNA, 25 bp, Homo sapien
gcaagctctcaggtcggcctaaagg

SEQ ID NO: 2470047 - DNA, 25 bp, Homo sapien
gctgcactgagcattggcataacgg

SEQ ID NO: 2470048 - DNA, 25 bp, Homo sapien
gaaggtgagtcccatcaggcaaatt

SEQ ID NO: 2470049 - DNA, 25 bp, Homo sapien
ttggttcctggctgaaggtgagtcc

SEQ ID NO: 2470050 - DNA, 25 bp, Homo sapien
gcataacggaggtacagggctgcaa

SEQ ID NO: 2470051 - DNA, 25 bp, Homo sapien
tcaatgttatcagggctctcttcgg

SEQ ID NO: 2470052 - DNA, 25 bp, Homo sapien
tgctggcctttgtgagaaagacgcc

SEQ ID NO: 2470053 - DNA, 25 bp, Homo sapien
gaagtatacgttccctccaaggctg

SEQ ID NO: 2470054 - DNA, 25 bp, Homo sapien
ctatgatactgcaccagacccgagg

SEQ ID NO: 2470055 - DNA, 25 bp, Homo sapien
ctcagtcacttcaccaagctgtctt

SEQ ID NO: 2470056 - DNA, 25 bp, Homo sapien
tcacttcaccaagctgtctttcttc

SEQ ID NO: 2470057 - DNA, 25 bp, Homo sapien
agatgggatgtagagctccctctca

SEQ ID NO: 2470058 - DNA, 25 bp, Homo sapien
atgggatgtagagctccctctcact

SEQ ID NO: 2470059 - DNA, 25 bp, Homo sapien
tctctccaactcttgaacaatgttt

SEQ ID NO: 2470060 - DNA, 25 bp, Homo sapien
aatgtttatatccaacagctcaaag

SEQ ID NO: 2470061 - DNA, 25 bp, Homo sapien
tatccaacagctcaaaggacagcag

SEQ ID NO: 2470062 - DNA, 25 bp, Homo sapien
tgaacaatgtttatatccaacagct

SEQ ID NO: 2470063 - DNA, 25 bp, Homo sapien
gctttaaatcctgccccttcattct

SEQ ID NO: 2470064 - DNA, 25 bp, Homo sapien
actgtcatgtggcagaggagacatg

SEQ ID NO: 2470065 - DNA, 25 bp, Homo sapien
agtgctttaaatcctgccccttcat

SEQ ID NO: 2470066 - DNA, 25 bp, Homo sapien
ggcttctctattaaaggactgtcat

SEQ ID NO: 2470067 - DNA, 25 bp, Homo sapien
gcatccaaggtaagggatcggatta

SEQ ID NO: 2470068 - DNA, 25 bp, Homo sapien
gatcggattactgtctcacacacaa

SEQ ID NO: 2470069 - DNA, 25 bp, Homo sapien
taagggatcggattactgtctcaca

SEQ ID NO: 2470070 - DNA, 25 bp, Homo sapien
tgtctcacacacaaactgggtccca

SEQ ID NO: 2470071 - DNA, 25 bp, Homo sapien
atgtaatccttggcatgtagccacc

SEQ ID NO: 2470072 - DNA, 25 bp, Homo sapien
gcatgtaatccttggcatgtagcca

SEQ ID NO: 2470073 - DNA, 25 bp, Homo sapien
catgtaatccttggcatgtagccac

SEQ ID NO: 2470074 - DNA, 25 bp, Homo sapien
tgtaatccttggcatgtagccacca

SEQ ID NO: 2470075 - DNA, 25 bp, Homo sapien
cttcctcagcgatatggataatctc

SEQ ID NO: 2470076 - DNA, 25 bp, Homo sapien
ttcctcagcgatatggataatctcc

SEQ ID NO: 2470077 - DNA, 25 bp, Homo sapien
tcatttccaagtggtccttcaggca

SEQ ID NO: 2470078 - DNA, 25 bp, Homo sapien
ttcttcctcagcgatatggataatc

SEQ ID NO: 2470079 - DNA, 25 bp, Homo sapien
ctgaggaagcagaggactgactttg

SEQ ID NO: 2470080 - DNA, 25 bp, Homo sapien
tgaggaagcagaggactgactttga

SEQ ID NO: 2470081 - DNA, 25 bp, Homo sapien
gaagcagaggactgactttgaactt

SEQ ID NO: 2470082 - DNA, 25 bp, Homo sapien
aggaagcagaggactgactttgaac

SEQ ID NO: 2470083 - DNA, 25 bp, Homo sapien
gcgcagagctgtacatagaatcccc

SEQ ID NO: 2470084 - DNA, 25 bp, Homo sapien
aagcactcaggcaggatgatgatgt

SEQ ID NO: 2470085 - DNA, 25 bp, Homo sapien
cctggctgtgagagcgcagagctgt

SEQ ID NO: 2470086 - DNA, 25 bp, Homo sapien
actcaggcaggatgatgatgtaatc

SEQ ID NO: 2470087 - DNA, 25 bp, Homo sapien
agctccactacctctgggattaggg

SEQ ID NO: 2470088 - DNA, 25 bp, Homo sapien
gacggtggaagctccactacctctg

SEQ ID NO: 2470089 - DNA, 25 bp, Homo sapien
cgtgaggatgtcacttatgctgtgc

SEQ ID NO: 2470090 - DNA, 25 bp, Homo sapien
tctgtgaggtcgtgaggatgtcact

SEQ ID NO: 2470091 - DNA, 25 bp, Homo sapien
caggttttgagatcaggtcgattcc

SEQ ID NO: 2470092 - DNA, 25 bp, Homo sapien
tagtctctttccatactgaggaaaa

SEQ ID NO: 2470093 - DNA, 25 bp, Homo sapien
gagatcaggtcgattcctctcttta

SEQ ID NO: 2470094 - DNA, 25 bp, Homo sapien
aacttttattcatctaaattcagac

SEQ ID NO: 2470095 - DNA, 25 bp, Homo sapien
tggtttacattatagtcaaggctcc

SEQ ID NO: 2470096 - DNA, 25 bp, Homo sapien
tagggttccatcataagggctacat

SEQ ID NO: 2470097 - DNA, 25 bp, Homo sapien
ggcttcagtctggtcatgtccccac

SEQ ID NO: 2470098 - DNA, 25 bp, Homo sapien
tcacatgtctggatttagggttcca

SEQ ID NO: 2470099 - DNA, 25 bp, Homo sapien
aagaaacttctggtatggtaactgg

SEQ ID NO: 2470100 - DNA, 25 bp, Homo sapien
tctgatctgatcagggactgaagaa

SEQ ID NO: 2470101 - DNA, 25 bp, Homo sapien
tggtaactggtaaatccactcctgg

SEQ ID NO: 2470102 - DNA, 25 bp, Homo sapien
catgatgatgtacacaaggagagct

SEQ ID NO: 2470103 - DNA, 25 bp, Homo sapien
gcctgtgaagggcaagtttcaaaaa

SEQ ID NO: 2470104 - DNA, 25 bp, Homo sapien
ctggcctgtgaagggcaagtttcaa

SEQ ID NO: 2470105 - DNA, 25 bp, Homo sapien
cctggcctgtgaagggcaagtttca

SEQ ID NO: 2470106 - DNA, 25 bp, Homo sapien
acgcctggcctgtgaagggcaagtt

SEQ ID NO: 2470107 - DNA, 25 bp, Homo sapien
gccattagaaacctgctgaactgct

SEQ ID NO: 2470108 - DNA, 25 bp, Homo sapien
cctaacacactgatatattttgtag

SEQ ID NO: 2470109 - DNA, 25 bp, Homo sapien
gaaatgcaatgcaagatgattgttt

SEQ ID NO: 2470110 - DNA, 25 bp, Homo sapien
gaacctagattgtttggctccaaag

SEQ ID NO: 2470111 - DNA, 25 bp, Homo sapien
cttgagtggtcatagctcttctgtc

SEQ ID NO: 2470112 - DNA, 25 bp, Homo sapien
ttgagtggtcatagctcttctgtct

SEQ ID NO: 2470113 - DNA, 25 bp, Homo sapien
tgagtggtcatagctcttctgtctg

SEQ ID NO: 2470114 - DNA, 25 bp, Homo sapien
tctgaagatgggtacatactgtgag

SEQ ID NO: 2470115 - DNA, 25 bp, Homo sapien
tgaaaaaagagactgcacaaggttg

SEQ ID NO: 2470116 - DNA, 25 bp, Homo sapien
aaaaaagagactgcacaaggttgtt

SEQ ID NO: 2470117 - DNA, 25 bp, Homo sapien
aagatgggtacatactgtgagaggc

SEQ ID NO: 2470118 - DNA, 25 bp, Homo sapien
gcagaggcagcaacagacaaagccc

SEQ ID NO: 2470119 - DNA, 25 bp, Homo sapien
gcaaacagggccttgtatgcagagg

SEQ ID NO: 2470120 - DNA, 25 bp, Homo sapien
aacagggccttgtatgcagaggcag

SEQ ID NO: 2470121 - DNA, 25 bp, Homo sapien
agggccttgtatgcagaggcagcaa

SEQ ID NO: 2470122 - DNA, 25 bp, Homo sapien
tcttagaccggattcacactccatg

SEQ ID NO: 2470123 - DNA, 25 bp, Homo sapien
catctgtctgatagcactggcatag

SEQ ID NO: 2470124 - DNA, 25 bp, Homo sapien
gatgaacatttactccgtcctttag

SEQ ID NO: 2470125 - DNA, 25 bp, Homo sapien
gcaaataatcgaccagccttggcct

SEQ ID NO: 2470126 - DNA, 25 bp, Homo sapien
caaggctatggcactcctgtgtact

SEQ ID NO: 2470127 - DNA, 25 bp, Homo sapien
tgcaagcatactagtctttccagat

SEQ ID NO: 2470128 - DNA, 25 bp, Homo sapien
tgtgtacttgataccaacggttcgg

SEQ ID NO: 2470129 - DNA, 25 bp, Homo sapien
tagattagttatctgtgtacttgaa

SEQ ID NO: 2470130 - DNA, 25 bp, Homo sapien
caatagcgttggctgtaccagtcgt

SEQ ID NO: 2470131 - DNA, 25 bp, Homo sapien
taccagtcgttgttgtttaactgaa

SEQ ID NO: 2470132 - DNA, 25 bp, Homo sapien
gaagaagttctgtcacaacctgcag

SEQ ID NO: 2470133 - DNA, 25 bp, Homo sapien
gtttcttcagcagccgtaggttcag

SEQ ID NO: 2470134 - DNA, 25 bp, Homo sapien
caggcagttatttaatacaaggtca

SEQ ID NO: 2470135 - DNA, 25 bp, Homo sapien
aggcagttatttaatacaaggtcac

SEQ ID NO: 2470136 - DNA, 25 bp, Homo sapien
gcaggcagttatttaatacaaggtc

SEQ ID NO: 2470137 - DNA, 25 bp, Homo sapien
tagggctagatacctgtgaacggac

SEQ ID NO: 2470138 - DNA, 25 bp, Homo sapien
tcttggtaactcaacgatgggctct

SEQ ID NO: 2470139 - DNA, 25 bp, Homo sapien
ggatactcttgaatgcaccatggag

SEQ ID NO: 2470140 - DNA, 25 bp, Homo sapien
cattgctcaataggtgctggtaggt

SEQ ID NO: 2470141 - DNA, 25 bp, Homo sapien
ctccgatggtcaagacaggtcccac

SEQ ID NO: 2470142 - DNA, 25 bp, Homo sapien
gccctcctggccctcgattataaaa

SEQ ID NO: 2470143 - DNA, 25 bp, Homo sapien
ccattctttaggtggttatgtacaa

SEQ ID NO: 2470144 - DNA, 25 bp, Homo sapien
caagtacatacataaccaggagagc

SEQ ID NO: 2470145 - DNA, 25 bp, Homo sapien
ggaatcgaaaatgcgggagcgaaca

SEQ ID NO: 2470146 - DNA, 25 bp, Homo sapien
agagtggaatcgaaaatgcgggagc

SEQ ID NO: 2470147 - DNA, 25 bp, Homo sapien
cgacagaaacggaagagagtggaat

SEQ ID NO: 2470148 - DNA, 25 bp, Homo sapien
ccgcggacgactgcagcgacagaaa

SEQ ID NO: 2470149 - DNA, 25 bp, Homo sapien
gctcctcagccgcacgagggcgaga

SEQ ID NO: 2470150 - DNA, 25 bp, Homo sapien
gagaagggcctctaagggcagagtg

SEQ ID NO: 2470151 - DNA, 25 bp, Homo sapien
aagggcctctaagggcagagtgggc

SEQ ID NO: 2470152 - DNA, 25 bp, Homo sapien
tcagccgcacgagggcgagacttct

SEQ ID NO: 2470153 - DNA, 25 bp, Homo sapien
gagtagttgacagccttgctgccaa

SEQ ID NO: 2470154 - DNA, 25 bp, Homo sapien
ctgccaatggctggtttggaggaca

SEQ ID NO: 2470155 - DNA, 25 bp, Homo sapien
caaaaagacttgctgctaccggtgc

SEQ ID NO: 2470156 - DNA, 25 bp, Homo sapien
ccagctgggaaaacgtcttacccat

SEQ ID NO: 2470157 - DNA, 25 bp, Homo sapien
ctggcaggtgggacaagtcacgaag

SEQ ID NO: 2470158 - DNA, 25 bp, Homo sapien
tgaagaatctctgaaagtcaccagc

SEQ ID NO: 2470159 - DNA, 25 bp, Homo sapien
cagcaaatcagagatgcccagcatc

SEQ ID NO: 2470160 - DNA, 25 bp, Homo sapien
aagagctgggagcagatctaacccc

SEQ ID NO: 2470161 - DNA, 25 bp, Homo sapien
tggactctgctaccaaagttggcag

SEQ ID NO: 2470162 - DNA, 25 bp, Homo sapien
ctagagagagagaaggtgagaggga

SEQ ID NO: 2470163 - DNA, 25 bp, Homo sapien
agagagaaggtgagagggagggcca

SEQ ID NO: 2470164 - DNA, 25 bp, Homo sapien
agagaaggtgagagggagggccaag

SEQ ID NO: 2470165 - DNA, 25 bp, Homo sapien
gagagagaaggtgagagggagggcc

SEQ ID NO: 2470166 - DNA, 25 bp, Homo sapien
tccccatagggaatgagagccacca

SEQ ID NO: 2470167 - DNA, 25 bp, Homo sapien
cctctggtccccatagggaatgaga

SEQ ID NO: 2470168 - DNA, 25 bp, Homo sapien
tgcttgggcttcagcctctggtccc

SEQ ID NO: 2470169 - DNA, 25 bp, Homo sapien
atgagagccaccaactgcttctcca

SEQ ID NO: 2470170 - DNA, 25 bp, Homo sapien
cggtccaggagcttctaaatcagga

SEQ ID NO: 2470171 - DNA, 25 bp, Homo sapien
ggctttctatggaagaactaatagg

SEQ ID NO: 2470172 - DNA, 25 bp, Homo sapien
agaaattaagggagatcaaaacagg

SEQ ID NO: 2470173 - DNA, 25 bp, Homo sapien
aaaaatccttggacgtaaggagctg

SEQ ID NO: 2470174 - DNA, 25 bp, Homo sapien
aggattactggtgtctgccaccacg

SEQ ID NO: 2470175 - DNA, 25 bp, Homo sapien
agtagctaggattactggtgtctgc

SEQ ID NO: 2470176 - DNA, 25 bp, Homo sapien
gctaggattactggtgtctgccacc

SEQ ID NO: 2470177 - DNA, 25 bp, Homo sapien
tagctaggattactggtgtctgcca

SEQ ID NO: 2470178 - DNA, 25 bp, Homo sapien
tgcaggctgcacaatgacggaccgg

SEQ ID NO: 2470179 - DNA, 25 bp, Homo sapien
aggcagatgagcacggccaggaaca

SEQ ID NO: 2470180 - DNA, 25 bp, Homo sapien
gaaaaagacgatgaaggaggaggtc

SEQ ID NO: 2470181 - DNA, 25 bp, Homo sapien
cgttatgttgaggtagatatcagcc

SEQ ID NO: 2470182 - DNA, 25 bp, Homo sapien
cccaccacgagggacaggtgcagaa

SEQ ID NO: 2470183 - DNA, 25 bp, Homo sapien
ggtagtagttgccattggagatgtt

SEQ ID NO: 2470184 - DNA, 25 bp, Homo sapien
gtgcagaacctcgagggtcagctgt

SEQ ID NO: 2470185 - DNA, 25 bp, Homo sapien
ttgttggaaacctgccccaccacga

SEQ ID NO: 2470186 - DNA, 25 bp, Homo sapien
cagggctggccagggagaggggagt

SEQ ID NO: 2470187 - DNA, 25 bp, Homo sapien
gggctggccagggagaggggagtca

SEQ ID NO: 2470188 - DNA, 25 bp, Homo sapien
ggctggccagggagaggggagtcac

SEQ ID NO: 2470189 - DNA, 25 bp, Homo sapien
ggcagggctggccagggagagggga

SEQ ID NO: 2470190 - DNA, 25 bp, Homo sapien
gttttcatcccgtatcttggtagct

SEQ ID NO: 2470191 - DNA, 25 bp, Homo sapien
tgttttcatcccgtatcttggtagc

SEQ ID NO: 2470192 - DNA, 25 bp, Homo sapien
gtgttttcatcccgtatcttggtag

SEQ ID NO: 2470193 - DNA, 25 bp, Homo sapien
ttttcatcccgtatcttggtagcta

SEQ ID NO: 2470194 - DNA, 25 bp, Homo sapien
aagcacatggtggactttgatttcc

SEQ ID NO: 2470195 - DNA, 25 bp, Homo sapien
gatttccagccaggtacagattttg

SEQ ID NO: 2470196 - DNA, 25 bp, Homo sapien
ttgatttccagccaggtacagattt

SEQ ID NO: 2470197 - DNA, 25 bp, Homo sapien
ctttgatttccagccaggtacagat

SEQ ID NO: 2470198 - DNA, 25 bp, Homo sapien
gagaggaagcaggccttgttgccat

SEQ ID NO: 2470199 - DNA, 25 bp, Homo sapien
ggagaggaagcaggccttgttgcca

SEQ ID NO: 2470200 - DNA, 25 bp, Homo sapien
ctggagaggaagcaggccttgttgc

SEQ ID NO: 2470201 - DNA, 25 bp, Homo sapien
gaggaagcaggccttgttgccatgg

SEQ ID NO: 2470202 - DNA, 25 bp, Homo sapien
ggcacagatgcgtttcctcggcagt

SEQ ID NO: 2470203 - DNA, 25 bp, Homo sapien
ccagctgctctgaatggctcaggta

SEQ ID NO: 2470204 - DNA, 25 bp, Homo sapien
gaatggctcaggtatgaacaggtca

SEQ ID NO: 2470205 - DNA, 25 bp, Homo sapien
tattcatagctctgaaagaccagct

SEQ ID NO: 2470206 - DNA, 25 bp, Homo sapien
ctatttctactaggagccagtggga

SEQ ID NO: 2470207 - DNA, 25 bp, Homo sapien
tcaggatgtggacttagaggctctc

SEQ ID NO: 2470208 - DNA, 25 bp, Homo sapien
ccaggtgctcagtacagaaaggcca

SEQ ID NO: 2470209 - DNA, 25 bp, Homo sapien
gaaaagcatctatgatcccctgaaa

SEQ ID NO: 2470210 - DNA, 25 bp, Homo sapien
tgttcatcgttctgtctgaatgata

SEQ ID NO: 2470211 - DNA, 25 bp, Homo sapien
ctgtgttcatcgttctgtctgaatg

SEQ ID NO: 2470212 - DNA, 25 bp, Homo sapien
catcgttctgtctgaatgataaaga

SEQ ID NO: 2470213 - DNA, 25 bp, Homo sapien
tcatcgttctgtctgaatgataaag

SEQ ID NO: 2470214 - DNA, 25 bp, Homo sapien
tccatgcatcctacttcaaaattag

SEQ ID NO: 2470215 - DNA, 25 bp, Homo sapien
tgacctcagcttggagacagcagtc

SEQ ID NO: 2470216 - DNA, 25 bp, Homo sapien
tcacatttggcagtctatacacagc

SEQ ID NO: 2470217 - DNA, 25 bp, Homo sapien
agctagttaccaagttctgtcacca

SEQ ID NO: 2470218 - DNA, 25 bp, Homo sapien
agccatcacccattcccccaagccc

SEQ ID NO: 2470219 - DNA, 25 bp, Homo sapien
cccaagcccatgcttactgagatat

SEQ ID NO: 2470220 - DNA, 25 bp, Homo sapien
ctgccctcattcagcagtgataagt

SEQ ID NO: 2470221 - DNA, 25 bp, Homo sapien
aagcccatgcttactgagatatagc

SEQ ID NO: 2470222 - DNA, 25 bp, Homo sapien
cagcatccagcaatatctccactcc

SEQ ID NO: 2470223 - DNA, 25 bp, Homo sapien
atccagcaatatctccactccaaaa

SEQ ID NO: 2470224 - DNA, 25 bp, Homo sapien
ccaaaagccacccactctagaagag

SEQ ID NO: 2470225 - DNA, 25 bp, Homo sapien
accccatggccatccccaaaatgca

SEQ ID NO: 2470226 - DNA, 25 bp, Homo sapien
gcttggcagtcgagtgggtggcgac

SEQ ID NO: 2470227 - DNA, 25 bp, Homo sapien
cttaggatctcagcttggcagtcga

SEQ ID NO: 2470228 - DNA, 25 bp, Homo sapien
atctcagcttggcagtcgagtgggt

SEQ ID NO: 2470229 - DNA, 25 bp, Homo sapien
aggatctcagcttggcagtcgagtg

SEQ ID NO: 2470230 - DNA, 25 bp, Homo sapien
cctctatccgaggacaatatattaa

SEQ ID NO: 2470231 - DNA, 25 bp, Homo sapien
gatacgtcctctatccgaggacaat

SEQ ID NO: 2470232 - DNA, 25 bp, Homo sapien
taatatctgatacgtcctctatccg

SEQ ID NO: 2470233 - DNA, 25 bp, Homo sapien
tcagtttaatatctgatacgtcctc

SEQ ID NO: 2470234 - DNA, 25 bp, Homo sapien
ccgagagtgtaagggcgtcaatagc

SEQ ID NO: 2470235 - DNA, 25 bp, Homo sapien
tcagcccgagagtgtaagggcgtca

SEQ ID NO: 2470236 - DNA, 25 bp, Homo sapien
cagcccgagagtgtaagggcgtcaa

SEQ ID NO: 2470237 - DNA, 25 bp, Homo sapien
gcccgagagtgtaagggcgtcaata

SEQ ID NO: 2470238 - DNA, 25 bp, Homo sapien
atattgtcctcggatagaggacgta

SEQ ID NO: 2470239 - DNA, 25 bp, Homo sapien
ggtcgatgcgtggagtggacggagc

SEQ ID NO: 2470240 - DNA, 25 bp, Homo sapien
accaggtcgatgcgtggagtggacg

SEQ ID NO: 2470241 - DNA, 25 bp, Homo sapien
caggtcgatgcgtggagtggacgga

SEQ ID NO: 2470242 - DNA, 25 bp, Homo sapien
agcagttaagtcaagccggcgcgtc

SEQ ID NO: 2470243 - DNA, 25 bp, Homo sapien
aaagcgtgccgcataagcctaccgt

SEQ ID NO: 2470244 - DNA, 25 bp, Homo sapien
tagccacggtggaaacgaaagcgtg

SEQ ID NO: 2470245 - DNA, 25 bp, Homo sapien
gcgtcacaggcactcggcgtgcaag

SEQ ID NO: 2470246 - DNA, 25 bp, Homo sapien
atattgtcctcggatagaggacgta

SEQ ID NO: 2470247 - DNA, 25 bp, Homo sapien
ggtcgatgcgtggagtggacggagc

SEQ ID NO: 2470248 - DNA, 25 bp, Homo sapien
accaggtcgatgcgtggagtggacg

SEQ ID NO: 2470249 - DNA, 25 bp, Homo sapien
caggtcgatgcgtggagtggacgga

SEQ ID NO: 2470250 - DNA, 25 bp, Homo sapien
aaagcgtgccgcataagcctaccgt

SEQ ID NO: 2470251 - DNA, 25 bp, Homo sapien
tagccacggtggaaacgaaagcgtg

SEQ ID NO: 2470252 - DNA, 25 bp, Homo sapien
gcgtcacaggcactcggcgtgcaag

SEQ ID NO: 2470253 - DNA, 25 bp, Homo sapien
agcagttaagtcaagccggcgcgtc

SEQ ID NO: 2470254 - DNA, 25 bp, Homo sapien
caccagtggcgaaattgtggacatc

SEQ ID NO: 2470255 - DNA, 25 bp, Homo sapien
ttaaatgtgccgcaaccaccagtgg

SEQ ID NO: 2470256 - DNA, 25 bp, Homo sapien
gctcaagcccgttgtactcagcaca

SEQ ID NO: 2470257 - DNA, 25 bp, Homo sapien
caacagattccagggtgggcagaaa

SEQ ID NO: 2470258 - DNA, 25 bp, Homo sapien
acaatcggaggaaaaactccagcca

SEQ ID NO: 2470259 - DNA, 25 bp, Homo sapien
aatcggaggaaaaactccagccaca

SEQ ID NO: 2470260 - DNA, 25 bp, Homo sapien
caacaatcggaggaaaaactccagc

SEQ ID NO: 2470261 - DNA, 25 bp, Homo sapien
gaggaagaacaacaatcggaggaaa

SEQ ID NO: 2470262 - DNA, 25 bp, Homo sapien
tgccacttgcccgggggcttcttgc

SEQ ID NO: 2470263 - DNA, 25 bp, Homo sapien
cacttgcccgggggcttcttgccag

SEQ ID NO: 2470264 - DNA, 25 bp, Homo sapien
ttctctggcagatgggtgattgggt

SEQ ID NO: 2470265 - DNA, 25 bp, Homo sapien
atgccacttgcccgggggcttcttg

SEQ ID NO: 2470266 - DNA, 25 bp, Homo sapien
tgtgccacccagaaatcgttcttgg

SEQ ID NO: 2470267 - DNA, 25 bp, Homo sapien
agagaccactgccacctatacttct

SEQ ID NO: 2470268 - DNA, 25 bp, Homo sapien
gcagacagcgtaggcccaatttcag

SEQ ID NO: 2470269 - DNA, 25 bp, Homo sapien
gaaatcgttcttgggtgtcacagtg

SEQ ID NO: 2470270 - DNA, 25 bp, Homo sapien
ggctgccatactacaccgtgctggg

SEQ ID NO: 2470271 - DNA, 25 bp, Homo sapien
gatacctgtggctagcggctgccat

SEQ ID NO: 2470272 - DNA, 25 bp, Homo sapien
ttggcgtgaagcgagggaaacactc

SEQ ID NO: 2470273 - DNA, 25 bp, Homo sapien
cactcggccgcaggacaaaactaaa

SEQ ID NO: 2470274 - DNA, 25 bp, Homo sapien
ccaggtaatgcgcagtagagccctc

SEQ ID NO: 2470275 - DNA, 25 bp, Homo sapien
tgtgcctcggagagaaactttatcc

SEQ ID NO: 2470276 - DNA, 25 bp, Homo sapien
cagccctccgctgaagttgcgttag

SEQ ID NO: 2470277 - DNA, 25 bp, Homo sapien
taagttttccaggtaatgcgcagta

SEQ ID NO: 2470278 - DNA, 25 bp, Homo sapien
ggcttgcggcccacaagataagata

SEQ ID NO: 2470279 - DNA, 25 bp, Homo sapien
tgactgcgggccggcctggctaatg

SEQ ID NO: 2470280 - DNA, 25 bp, Homo sapien
gatacctgtggctagcggctgccat

SEQ ID NO: 2470281 - DNA, 25 bp, Homo sapien
ttggcgtgaagcgagggaaacactc

SEQ ID NO: 2470282 - DNA, 25 bp, Homo sapien
cactcggccgcaggacaaaactaaa

SEQ ID NO: 2470283 - DNA, 25 bp, Homo sapien
ggctgccatactacaccgtgctggg

SEQ ID NO: 2470284 - DNA, 25 bp, Homo sapien
tgatcacagggctgcccccggtact

SEQ ID NO: 2470285 - DNA, 25 bp, Homo sapien
ttgatcacagggctgcccccggtac

SEQ ID NO: 2470286 - DNA, 25 bp, Homo sapien
gttgatcacagggctgcccccggta

SEQ ID NO: 2470287 - DNA, 25 bp, Homo sapien
tgttgatcacagggctgcccccggt

SEQ ID NO: 2470288 - DNA, 25 bp, Homo sapien
tcttctgtcttctgctctttagtac

SEQ ID NO: 2470289 - DNA, 25 bp, Homo sapien
tttgtggtttttgtatcttctgtct

SEQ ID NO: 2470290 - DNA, 25 bp, Homo sapien
atttttgtggtttttgtatcttctg

SEQ ID NO: 2470291 - DNA, 25 bp, Homo sapien
gtatcttctgtcttctgctctttag

SEQ ID NO: 2470292 - DNA, 25 bp, Homo sapien
agatagtctcgctcggacgctcagg

SEQ ID NO: 2470293 - DNA, 25 bp, Homo sapien
ctgcgctgggcactttaattctgtc

SEQ ID NO: 2470294 - DNA, 25 bp, Homo sapien
tgtatttttaaggaggtctcgccaa

SEQ ID NO: 2470295 - DNA, 25 bp, Homo sapien
ttaaggaggtctcgccaagttggcc

SEQ ID NO: 2470296 - DNA, 25 bp, Homo sapien
cctcttagggccgtggagtgaaata

SEQ ID NO: 2470297 - DNA, 25 bp, Homo sapien
tgtgcctcggagagaaactttatcc

SEQ ID NO: 2470298 - DNA, 25 bp, Homo sapien
ggcttgcggcccacaagataagata

SEQ ID NO: 2470299 - DNA, 25 bp, Homo sapien
tttccaggtaatgcgcagtagagcc

SEQ ID NO: 2470300 - DNA, 25 bp, Homo sapien
tgactgcgggccggcctggctaatg

SEQ ID NO: 2470301 - DNA, 25 bp, Homo sapien
tgcgctgggcctttacttcgccgcc

SEQ ID NO: 2470302 - DNA, 25 bp, Homo sapien
ctgcgctgggcctttacttcgccgc

SEQ ID NO: 2470303 - DNA, 25 bp, Homo sapien
ctgggcctttacttcgccgcccgcg

SEQ ID NO: 2470304 - DNA, 25 bp, Homo sapien
cgctgggcctttacttcgccgcccg

SEQ ID NO: 2470305 - DNA, 25 bp, Homo sapien
ccttgttcgtatcgagccagcgaaa

SEQ ID NO: 2470306 - DNA, 25 bp, Homo sapien
ggcgacttccttgttcgtatcgagc

SEQ ID NO: 2470307 - DNA, 25 bp, Homo sapien
cagcgaaaagacagaaccggaagag

SEQ ID NO: 2470308 - DNA, 25 bp, Homo sapien
tcgtatcgagccagcgaaaagacag

SEQ ID NO: 2470309 - DNA, 25 bp, Homo sapien
ggtcgatgcgtggagtggacggagc

SEQ ID NO: 2470310 - DNA, 25 bp, Homo sapien
atattgtcctcggatagaggacgta

SEQ ID NO: 2470311 - DNA, 25 bp, Homo sapien
accaggtcgatgcgtggagtggacg

SEQ ID NO: 2470312 - DNA, 25 bp, Homo sapien
caggtcgatgcgtggagtggacgga

SEQ ID NO: 2470313 - DNA, 25 bp, Homo sapien
aaagcgtgccgcataagcctaccgt

SEQ ID NO: 2470314 - DNA, 25 bp, Homo sapien
tagccacggtggaaacgaaagcgtg

SEQ ID NO: 2470315 - DNA, 25 bp, Homo sapien
gcgtcacaggcactcggcgtgcaag

SEQ ID NO: 2470316 - DNA, 25 bp, Homo sapien
agcagttaagtcaagccggcgcgtc

SEQ ID NO: 2470317 - DNA, 25 bp, Homo sapien
cagcgaaaagacagaaccggaagag

SEQ ID NO: 2470318 - DNA, 25 bp, Homo sapien
ggcgacttccttgttcgtatcgagc

SEQ ID NO: 2470319 - DNA, 25 bp, Homo sapien
tcgtatcgagccagcgaaaagacag

SEQ ID NO: 2470320 - DNA, 25 bp, Homo sapien
tcggcggagagcggtccacgttttc

SEQ ID NO: 2470321 - DNA, 25 bp, Homo sapien
atattgtcctcggatagaggacgta

SEQ ID NO: 2470322 - DNA, 25 bp, Homo sapien
ggtcgatgcgtggagtggacggagc

SEQ ID NO: 2470323 - DNA, 25 bp, Homo sapien
caggtcgatgcgtggagtggacgga

SEQ ID NO: 2470324 - DNA, 25 bp, Homo sapien
accaggtcgatgcgtggagtggacg

SEQ ID NO: 2470325 - DNA, 25 bp, Homo sapien
gcgtcacaggcactcggcgtgcaag

SEQ ID NO: 2470326 - DNA, 25 bp, Homo sapien
agcagttaagtcaagccggcgcgtc

SEQ ID NO: 2470327 - DNA, 25 bp, Homo sapien
ttcccaaagcgcagtagccacggtg

SEQ ID NO: 2470328 - DNA, 25 bp, Homo sapien
agcgtgccgcataagcctaccgtct

SEQ ID NO: 2470329 - DNA, 25 bp, Homo sapien
cctctatccgaggacaatatattaa

SEQ ID NO: 2470330 - DNA, 25 bp, Homo sapien
gatacgtcctctatccgaggacaat

SEQ ID NO: 2470331 - DNA, 25 bp, Homo sapien
tcagtttaatatctgatacgtcctc

SEQ ID NO: 2470332 - DNA, 25 bp, Homo sapien
taatatctgatacgtcctctatccg

SEQ ID NO: 2470333 - DNA, 25 bp, Homo sapien
cctcttagggccgtggagtgaaata

SEQ ID NO: 2470334 - DNA, 25 bp, Homo sapien
tgtgcctcggagagaaactttatcc

SEQ ID NO: 2470335 - DNA, 25 bp, Homo sapien
ggcttgcggcccacaagataagata

SEQ ID NO: 2470336 - DNA, 25 bp, Homo sapien
tttccaggtaatgcgcagtagagcc

SEQ ID NO: 2470337 - DNA, 25 bp, Homo sapien
gatacctgtggctagcggctgccat

SEQ ID NO: 2470338 - DNA, 25 bp, Homo sapien
ttggcgtgaagcgagggaaacactc

SEQ ID NO: 2470339 - DNA, 25 bp, Homo sapien
ggctgccatactacaccgtgctggg

SEQ ID NO: 2470340 - DNA, 25 bp, Homo sapien
cactcggccgcaggacaaaactaaa

SEQ ID NO: 2470341 - DNA, 25 bp, Homo sapien
cctctatccgaggacaatatattaa

SEQ ID NO: 2470342 - DNA, 25 bp, Homo sapien
taatatctgatacgtcctctatccg

SEQ ID NO: 2470343 - DNA, 25 bp, Homo sapien
gatacgtcctctatccgaggacaat

SEQ ID NO: 2470344 - DNA, 25 bp, Homo sapien
tcagtttaatatctgatacgtcctc

SEQ ID NO: 2470345 - DNA, 25 bp, Homo sapien
tcttttcgctggctcgatacgaaca

SEQ ID NO: 2470346 - DNA, 25 bp, Homo sapien
tcgatacgaacaaggaagtcgcccc

SEQ ID NO: 2470347 - DNA, 25 bp, Homo sapien
tctcttccggttctgtcttttcgct

SEQ ID NO: 2470348 - DNA, 25 bp, Homo sapien
tggctcgatacgaacaaggaagtcg

SEQ ID NO: 2470349 - DNA, 25 bp, Homo sapien
ccaggtaatgcgcagtagagccctc

SEQ ID NO: 2470350 - DNA, 25 bp, Homo sapien
tgtgcctcggagagaaactttatcc

SEQ ID NO: 2470351 - DNA, 25 bp, Homo sapien
cagccctccgctgaagttgcgttag

SEQ ID NO: 2470352 - DNA, 25 bp, Homo sapien
taagttttccaggtaatgcgcagta

SEQ ID NO: 2470353 - DNA, 25 bp, Homo sapien
tgactgcgggccggcctggctaatg

SEQ ID NO: 2470354 - DNA, 25 bp, Homo sapien
gatacctgtggctagcggctgccat

SEQ ID NO: 2470355 - DNA, 25 bp, Homo sapien
ttggcgtgaagcgagggaaacactc

SEQ ID NO: 2470356 - DNA, 25 bp, Homo sapien
cactcggccgcaggacaaaactaaa

SEQ ID NO: 2470357 - DNA, 25 bp, Homo sapien
ggctgccatactacaccgtgctggg

SEQ ID NO: 2470358 - DNA, 25 bp, Homo sapien
cagagcgagagtttgtctggaaaaa

SEQ ID NO: 2470359 - DNA, 25 bp, Homo sapien
gaggcggcagctgggcagatcaccg

SEQ ID NO: 2470360 - DNA, 25 bp, Homo sapien
ctcaagcctgtaatcgcaagcaaca

SEQ ID NO: 2470361 - DNA, 25 bp, Homo sapien
cgacagagcgagagtttgtctggaa

SEQ ID NO: 2470362 - DNA, 25 bp, Homo sapien
cgctagtcttctgcggctctatgcg

SEQ ID NO: 2470363 - DNA, 25 bp, Homo sapien
agccccgtgatcaacaactgctgca

SEQ ID NO: 2470364 - DNA, 25 bp, Homo sapien
aactgctgcaagaggggccgtttgt

SEQ ID NO: 2470365 - DNA, 25 bp, Homo sapien
gggccgtttgttcgactcgctagtc

SEQ ID NO: 2470366 - DNA, 25 bp, Homo sapien
tctaaaggctgtcttcaggccgggc

SEQ ID NO: 2470367 - DNA, 25 bp, Homo sapien
gttgcatcccaacataaagaccgga

SEQ ID NO: 2470368 - DNA, 25 bp, Homo sapien
cagttgccttgcgagcacgatgaca

SEQ ID NO: 2470369 - DNA, 25 bp, Homo sapien
tatcctttacgggatcagccaccgg

SEQ ID NO: 2470370 - DNA, 25 bp, Homo sapien
gcttggcagtcgagtgggtggcgac

SEQ ID NO: 2470371 - DNA, 25 bp, Homo sapien
atctcagcttggcagtcgagtgggt

SEQ ID NO: 2470372 - DNA, 25 bp, Homo sapien
cttaggatctcagcttggcagtcga

SEQ ID NO: 2470373 - DNA, 25 bp, Homo sapien
aggatctcagcttggcagtcgagtg

SEQ ID NO: 2470374 - DNA, 25 bp, Homo sapien
agcggagtcctgacgacctgcgtca

SEQ ID NO: 2470375 - DNA, 25 bp, Homo sapien
gggagaatccttgctgggccctcgc

SEQ ID NO: 2470376 - DNA, 25 bp, Homo sapien
gcccttgactaagggaggcttcctg

SEQ ID NO: 2470377 - DNA, 25 bp, Homo sapien
ttcggcttccctgactgggcatggg

SEQ ID NO: 2470378 - DNA, 25 bp, Homo sapien
ggcttgcggcccacaagataagata

SEQ ID NO: 2470379 - DNA, 25 bp, Homo sapien
atattgtcctcggatagaggacgta

SEQ ID NO: 2470380 - DNA, 25 bp, Homo sapien
ggtcgatgcgtggagtggacggagc

SEQ ID NO: 2470381 - DNA, 25 bp, Homo sapien
accaggtcgatgcgtggagtggacg

SEQ ID NO: 2470382 - DNA, 25 bp, Homo sapien
caggtcgatgcgtggagtggacgga

SEQ ID NO: 2470383 - DNA, 25 bp, Homo sapien
gaaaccaaaagagcgagggagaggc

SEQ ID NO: 2470384 - DNA, 25 bp, Homo sapien
ggcacacgtgtacctatgttccaaa

SEQ ID NO: 2470385 - DNA, 25 bp, Homo sapien
gcttcaaacctagacgactggtgga

SEQ ID NO: 2470386 - DNA, 25 bp, Homo sapien
tgaacagcgagaacacatgggacac

SEQ ID NO: 2470387 - DNA, 25 bp, Homo sapien
aaacggcccctcttgcagcagttgt

SEQ ID NO: 2470388 - DNA, 25 bp, Homo sapien
aacggcccctcttgcagcagttgtt

SEQ ID NO: 2470389 - DNA, 25 bp, Homo sapien
gagtcgaacaaacggcccctcttgc

SEQ ID NO: 2470390 - DNA, 25 bp, Homo sapien
aacaaacggcccctcttgcagcagt

SEQ ID NO: 2470391 - DNA, 25 bp, Homo sapien
tcgctcggacgctcaggttggactg

SEQ ID NO: 2470392 - DNA, 25 bp, Homo sapien
ctcgctcggacgctcaggttggact

SEQ ID NO: 2470393 - DNA, 25 bp, Homo sapien
agtccaatggcgcgatctaggctct

SEQ ID NO: 2470394 - DNA, 25 bp, Homo sapien
acgttgctcaggctggtctccaact

SEQ ID NO: 2470395 - DNA, 25 bp, Homo sapien
cgttgctcaggctggtctccaactc

SEQ ID NO: 2470396 - DNA, 25 bp, Homo sapien
ccaatggcgcgatctaggctctctg

SEQ ID NO: 2470397 - DNA, 25 bp, Homo sapien
tgtgcctcggagagaaactttatcc

SEQ ID NO: 2470398 - DNA, 25 bp, Homo sapien
ggcttgcggcccacaagataagata

SEQ ID NO: 2470399 - DNA, 25 bp, Homo sapien
cctcttagggccgtggagtgaaata

SEQ ID NO: 2470400 - DNA, 25 bp, Homo sapien
tttccaggtaatgcgcagtagagcc

SEQ ID NO: 2470401 - DNA, 25 bp, Homo sapien
aggagtgagccgacatgcctggcag

SEQ ID NO: 2470402 - DNA, 25 bp, Homo sapien
ggagtgagccgacatgcctggcagc

SEQ ID NO: 2470403 - DNA, 25 bp, Homo sapien
gtctgtgtgagggcttgcaccccac

SEQ ID NO: 2470404 - DNA, 25 bp, Homo sapien
gtagaacgatcccacagttctgcat

SEQ ID NO: 2470405 - DNA, 25 bp, Homo sapien
tgtagaacgatcccacagttctgca

SEQ ID NO: 2470406 - DNA, 25 bp, Homo sapien
cgtgggtgtaatatggtgatatgag

SEQ ID NO: 2470407 - DNA, 25 bp, Homo sapien
caaagatgctggattcgacaaattt

SEQ ID NO: 2470408 - DNA, 25 bp, Homo sapien
tatgagggtggtaatggcgaaggca

SEQ ID NO: 2470409 - DNA, 25 bp, Homo sapien
tggtaatggcgaaggcaaagatgct

SEQ ID NO: 2470410 - DNA, 25 bp, Homo sapien
gcggggactcagatcgccgtagcca

SEQ ID NO: 2470411 - DNA, 25 bp, Homo sapien
cggatggtccagaccgggagcccca

SEQ ID NO: 2470412 - DNA, 25 bp, Homo sapien
ccgctgcgagcagagctggaccgca

SEQ ID NO: 2470413 - DNA, 25 bp, Homo sapien
tcaaaagagctcggaccactctcct

SEQ ID NO: 2470414 - DNA, 25 bp, Homo sapien
atctccttcggtccaaagccatctg

SEQ ID NO: 2470415 - DNA, 25 bp, Homo sapien
ccttgttcgtatcgagccagcgaaa

SEQ ID NO: 2470416 - DNA, 25 bp, Homo sapien
cagcgaaaagacagaaccggaagag

SEQ ID NO: 2470417 - DNA, 25 bp, Homo sapien
ggcgacttccttgttcgtatcgagc

SEQ ID NO: 2470418 - DNA, 25 bp, Homo sapien
tcgtatcgagccagcgaaaagacag

SEQ ID NO: 2470419 - DNA, 25 bp, Homo sapien
atattgtcctcggatagaggacgta

SEQ ID NO: 2470420 - DNA, 25 bp, Homo sapien
ggtcgatgcgtggagtggacggagc

SEQ ID NO: 2470421 - DNA, 25 bp, Homo sapien
accaggtcgatgcgtggagtggacg

SEQ ID NO: 2470422 - DNA, 25 bp, Homo sapien
caggtcgatgcgtggagtggacgga

SEQ ID NO: 2470423 - DNA, 25 bp, Homo sapien
gaggaggtcgtggccttcccaaagc

SEQ ID NO: 2470424 - DNA, 25 bp, Homo sapien
gcgtcacaggcactcggcgtgcaag

SEQ ID NO: 2470425 - DNA, 25 bp, Homo sapien
tagccacggtggaaacgaaagcgtg

SEQ ID NO: 2470426 - DNA, 25 bp, Homo sapien
agcagttaagtcaagccggcgcgtc

SEQ ID NO: 2470427 - DNA, 25 bp, Homo sapien
tcgctcggacgctcaggttggactg

SEQ ID NO: 2470428 - DNA, 25 bp, Homo sapien
ctcgctcggacgctcaggttggact

SEQ ID NO: 2470429 - DNA, 25 bp, Homo sapien
cttctgctctttagtaccgcataga

SEQ ID NO: 2470430 - DNA, 25 bp, Homo sapien
ctgctctttagtaccgcatagagcc

SEQ ID NO: 2470431 - DNA, 25 bp, Homo sapien
cgttgctcaggctggtctccaactc

SEQ ID NO: 2470432 - DNA, 25 bp, Homo sapien
agtccaatggcgcgatctaggctct

SEQ ID NO: 2470433 - DNA, 25 bp, Homo sapien
ccaatggcgcgatctaggctctctg

SEQ ID NO: 2470434 - DNA, 25 bp, Homo sapien
acgttgctcaggctggtctccaact

SEQ ID NO: 2470435 - DNA, 25 bp, Homo sapien
ggactactgagtctttcggtgcccc

SEQ ID NO: 2470436 - DNA, 25 bp, Homo sapien
taatcaggatattcacgtggactac

SEQ ID NO: 2470437 - DNA, 25 bp, Homo sapien
gggtggaccctacattatctcagct

SEQ ID NO: 2470438 - DNA, 25 bp, Homo sapien
tagttttgtcctgcggccgagtgtt

SEQ ID NO: 2470439 - DNA, 25 bp, Homo sapien
tgggaggtctgacattagccaggcc

SEQ ID NO: 2470440 - DNA, 25 bp, Homo sapien
tgactacaataaatagcagcgcctc

SEQ ID NO: 2470441 - DNA, 25 bp, Homo sapien
tagtaggagtaccacagtcttcgat

SEQ ID NO: 2470442 - DNA, 25 bp, Homo sapien
cgcgtgacctatcgatcattggaga

SEQ ID NO: 2470443 - DNA, 25 bp, Homo sapien
gaaaaacgcattcaacagtctcagg

SEQ ID NO: 2470444 - DNA, 25 bp, Homo sapien
tctcaggtaaccagggcgaatccat

SEQ ID NO: 2470445 - DNA, 25 bp, Homo sapien
tcctgatttatgcaacaaaaggtct

SEQ ID NO: 2470446 - DNA, 25 bp, Homo sapien
gacgcttaccgtttatctagatcaa

SEQ ID NO: 2470447 - DNA, 25 bp, Homo sapien
ttgcagccaagcaacgccagaaagc

SEQ ID NO: 2470448 - DNA, 25 bp, Homo sapien
cactccccaatacggagagaagaac

SEQ ID NO: 2470449 - DNA, 25 bp, Homo sapien
ccaagcaacgccagaaagccggctt

SEQ ID NO: 2470450 - DNA, 25 bp, Homo sapien
ctcagaccgcgttctctccctctca

SEQ ID NO: 2470451 - DNA, 25 bp, Homo sapien
agacagaacaagagacccggagacc

SEQ ID NO: 2470452 - DNA, 25 bp, Homo sapien
cagacagaacaagagacccggagac

SEQ ID NO: 2470453 - DNA, 25 bp, Homo sapien
gacagaacaagagacccggagaccc

SEQ ID NO: 2470454 - DNA, 25 bp, Homo sapien
tctgcctcggtctctgcgtctatgg

SEQ ID NO: 2470455 - DNA, 25 bp, Homo sapien
gaccggaaggcgacctgtagttcca

SEQ ID NO: 2470456 - DNA, 25 bp, Homo sapien
gtagttccagaagccgccgcaagag

SEQ ID NO: 2470457 - DNA, 25 bp, Homo sapien
gtcagtctctctcttgcgttctgtg

SEQ ID NO: 2470458 - DNA, 25 bp, Homo sapien
cagagtctgcggagccgctgtctgt

SEQ ID NO: 2470459 - DNA, 25 bp, Homo sapien
agagtctgcggagccgctgtctgtc

SEQ ID NO: 2470460 - DNA, 25 bp, Homo sapien
gagttggaatatgaaacatgtttgc

SEQ ID NO: 2470461 - DNA, 25 bp, Homo sapien
tgtcctcacactttgctaaaactcg

SEQ ID NO: 2470462 - DNA, 25 bp, Homo sapien
aaactcgtttttgaacagagcactc

SEQ ID NO: 2470463 - DNA, 25 bp, Homo sapien
gaaaaattgtgtctactgagttgga

SEQ ID NO: 2470464 - DNA, 25 bp, Homo sapien
caaggccagcgctgcacgactccag

SEQ ID NO: 2470465 - DNA, 25 bp, Homo sapien
gccagcgctgcacgactccaggggg

SEQ ID NO: 2470466 - DNA, 25 bp, Homo sapien
tgccagtaattctgctatcattgcg

SEQ ID NO: 2470467 - DNA, 25 bp, Homo sapien
tctgctatcattgcgcctccatggg

SEQ ID NO: 2470468 - DNA, 25 bp, Homo sapien
ccagcaggttaacagtgccagtaat

SEQ ID NO: 2470469 - DNA, 25 bp, Homo sapien
ttcccactccagcaggttaacagtg

SEQ ID NO: 2470470 - DNA, 25 bp, Homo sapien
cggaagtacaggagccagattgcca

SEQ ID NO: 2470471 - DNA, 25 bp, Homo sapien
caaagtgacctcagggatgcggaag

SEQ ID NO: 2470472 - DNA, 25 bp, Homo sapien
caactataaaaagggatcagtaaat

SEQ ID NO: 2470473 - DNA, 25 bp, Homo sapien
gggatcagtaaatgtctcttactca

SEQ ID NO: 2470474 - DNA, 25 bp, Homo sapien
tggaagaacctggacttcggaatca

SEQ ID NO: 2470475 - DNA, 25 bp, Homo sapien
tgcagttgcaggtggaagaacctgg

SEQ ID NO: 2470476 - DNA, 25 bp, Homo sapien
gtggaagaacctggacttcggaatc

SEQ ID NO: 2470477 - DNA, 25 bp, Homo sapien
ggaagaacctggacttcggaatcac

SEQ ID NO: 2470478 - DNA, 25 bp, Homo sapien
tgcatctgcaggttagctgaaggtc

SEQ ID NO: 2470479 - DNA, 25 bp, Homo sapien
gggggacaatcttctcacagcagaa

SEQ ID NO: 2470480 - DNA, 25 bp, Homo sapien
tgtggaagtgcacctcaagcctttg

SEQ ID NO: 2470481 - DNA, 25 bp, Homo sapien
tctggctgttccatgtgtctcttgg

SEQ ID NO: 2470482 - DNA, 25 bp, Homo sapien
tacgggatgaactaatgagtgacag

SEQ ID NO: 2470483 - DNA, 25 bp, Homo sapien
taggttgatgccagcagatacggga

SEQ ID NO: 2470484 - DNA, 25 bp, Homo sapien
taagaaattctaacagccaggaagg

SEQ ID NO: 2470485 - DNA, 25 bp, Homo sapien
cttcaagttggggtgatactggagc

SEQ ID NO: 2470486 - DNA, 25 bp, Homo sapien
ctttcttgggcccttcagtccctgg

SEQ ID NO: 2470487 - DNA, 25 bp, Homo sapien
gggactcctttgtcacagcactgat

SEQ ID NO: 2470488 - DNA, 25 bp, Homo sapien
tcagtccctgggactcctttgtcac

SEQ ID NO: 2470489 - DNA, 25 bp, Homo sapien
tgtcacagcactgatcaccttcagc

SEQ ID NO: 2470490 - DNA, 25 bp, Homo sapien
gtttatttcccctatcactgtgaac

SEQ ID NO: 2470491 - DNA, 25 bp, Homo sapien
aacccggagaccagccatggctggc

SEQ ID NO: 2470492 - DNA, 25 bp, Homo sapien
cccttgtttacagcgtggctgatgc

SEQ ID NO: 2470493 - DNA, 25 bp, Homo sapien
gacgtcctctgtaatgcgcttggcg

SEQ ID NO: 2470494 - DNA, 25 bp, Homo sapien
tgagcctccacttcgacatccgtga

SEQ ID NO: 2470495 - DNA, 25 bp, Homo sapien
tcgacatccgtgaaacagccatgaa

SEQ ID NO: 2470496 - DNA, 25 bp, Homo sapien
agctgggagactccgggaacctcca

SEQ ID NO: 2470497 - DNA, 25 bp, Homo sapien
agccatgaataagcaggtctcaaag

SEQ ID NO: 2470498 - DNA, 25 bp, Homo sapien
gtgggctgtgccagacgatccccag

SEQ ID NO: 2470499 - DNA, 25 bp, Homo sapien
ccgaggcccaggctgaaatccggtt

SEQ ID NO: 2470500 - DNA, 25 bp, Homo sapien
tttccaaggccttgtcaagtgggct

SEQ ID NO: 2470501 - DNA, 25 bp, Homo sapien
ttggctgctcttcggctcggacaca

SEQ ID NO: 2470502 - DNA, 25 bp, Homo sapien
tgacagtagcatccctagaacctag

SEQ ID NO: 2470503 - DNA, 25 bp, Homo sapien
tcaggcctgactcacagtgtgtgct

SEQ ID NO: 2470504 - DNA, 25 bp, Homo sapien
cagagatgcgctcaggaacccagtt

SEQ ID NO: 2470505 - DNA, 25 bp, Homo sapien
ggctgcacccctcaggagtctaggt

SEQ ID NO: 2470506 - DNA, 25 bp, Homo sapien
gcactgagcagaaagaagaacacaa

SEQ ID NO: 2470507 - DNA, 25 bp, Homo sapien
tgcaaatgtccttaactgagaggca

SEQ ID NO: 2470508 - DNA, 25 bp, Homo sapien
ggctgactgctaattggctttagga

SEQ ID NO: 2470509 - DNA, 25 bp, Homo sapien
tgccagcttacctgttggcacacct

SEQ ID NO: 2470510 - DNA, 25 bp, Homo sapien
gggctctagacaaggctgaccatca

SEQ ID NO: 2470511 - DNA, 25 bp, Homo sapien
catcaggatccactggttggtccag

SEQ ID NO: 2470512 - DNA, 25 bp, Homo sapien
taattagaagaatgccaggaggact

SEQ ID NO: 2470513 - DNA, 25 bp, Homo sapien
gagatctcggaacagactggttctc

SEQ ID NO: 2470514 - DNA, 25 bp, Homo sapien
cactccttaaggcaaactacttggg

SEQ ID NO: 2470515 - DNA, 25 bp, Homo sapien
tcaagactgagatgtcaggccaggt

SEQ ID NO: 2470516 - DNA, 25 bp, Homo sapien
tagttgtattcatccagtgccctcc

SEQ ID NO: 2470517 - DNA, 25 bp, Homo sapien
actttgggagccgatggatcactca

SEQ ID NO: 2470518 - DNA, 25 bp, Homo sapien
ctaagggcacgaatggcaaggggtt

SEQ ID NO: 2470519 - DNA, 25 bp, Homo sapien
taagggcacgaatggcaaggggtta

SEQ ID NO: 2470520 - DNA, 25 bp, Homo sapien
caccgccgcgtctggctcagtttga

SEQ ID NO: 2470521 - DNA, 25 bp, Homo sapien
cggcagcgctcgagaggcgggagcg

SEQ ID NO: 2470522 - DNA, 25 bp, Homo sapien
gcgggagcgaccgtagcccgcggag

SEQ ID NO: 2470523 - DNA, 25 bp, Homo sapien
tccgggccggcgtgggtgcgccgct

SEQ ID NO: 2470524 - DNA, 25 bp, Homo sapien
ctcacaaatgggtgataatccctat

SEQ ID NO: 2470525 - DNA, 25 bp, Homo sapien
tagtgtctctcagctaaaatgatcc

SEQ ID NO: 2470526 - DNA, 25 bp, Homo sapien
gagccagaaatctcgttattcacaa

SEQ ID NO: 2470527 - DNA, 25 bp, Homo sapien
tgccagttcctcacagcttacttaa

SEQ ID NO: 2470528 - DNA, 25 bp, Homo sapien
aacgctttccggaatgacttgtcca

SEQ ID NO: 2470529 - DNA, 25 bp, Homo sapien
aagtactgatcctagtcaccaagta

SEQ ID NO: 2470530 - DNA, 25 bp, Homo sapien
tccaaacaaaaccactctcatgggc

SEQ ID NO: 2470531 - DNA, 25 bp, Homo sapien
aactccctccttactagtgaacgct

SEQ ID NO: 2470532 - DNA, 25 bp, Homo sapien
aaaatgggagcaagctgacatccca

SEQ ID NO: 2470533 - DNA, 25 bp, Homo sapien
tgggagcaagctgacatcccaacag

SEQ ID NO: 2470534 - DNA, 25 bp, Homo sapien
gcaagctgacatcccaacaggaggg

SEQ ID NO: 2470535 - DNA, 25 bp, Homo sapien
tttacttcgcactaaatttaacagc

SEQ ID NO: 2470536 - DNA, 25 bp, Homo sapien
gcttttgacgggccctcttcaggtc

SEQ ID NO: 2470537 - DNA, 25 bp, Homo sapien
tgcttttgacgggccctcttcaggt

SEQ ID NO: 2470538 - DNA, 25 bp, Homo sapien
atgcttttgacgggccctcttcagg

SEQ ID NO: 2470539 - DNA, 25 bp, Homo sapien
gcaagataaggaacatgagagagct

SEQ ID NO: 2470540 - DNA, 25 bp, Homo sapien
tgccctcactgaacataaaacatgg

SEQ ID NO: 2470541 - DNA, 25 bp, Homo sapien
tcttggtcactggtacacacctctg

SEQ ID NO: 2470542 - DNA, 25 bp, Homo sapien
tcaagggacagagaccccgactgtc

SEQ ID NO: 2470543 - DNA, 25 bp, Homo sapien
gggcagaggcggaagtaggaagaca

SEQ ID NO: 2470544 - DNA, 25 bp, Homo sapien
tggtatttctgaatcttgatcaagc

SEQ ID NO: 2470545 - DNA, 25 bp, Homo sapien
tgaatcttgatcaagcagcagtggg

SEQ ID NO: 2470546 - DNA, 25 bp, Homo sapien
aaaggattagggcagaggcggaagt

SEQ ID NO: 2470547 - DNA, 25 bp, Homo sapien
ctttatttgcaggacgagatgacca

SEQ ID NO: 2470548 - DNA, 25 bp, Homo sapien
ccacagaatggccactttatttgca

SEQ ID NO: 2470549 - DNA, 25 bp, Homo sapien
tttatttgcaggacgagatgaccag

SEQ ID NO: 2470550 - DNA, 25 bp, Homo sapien
cagaatggccactttatttgcagga

SEQ ID NO: 2470551 - DNA, 25 bp, Homo sapien
tgcaggacacctgaatgtgtgcaat

SEQ ID NO: 2470552 - DNA, 25 bp, Homo sapien
gcaatcctcaattcactggctttat

SEQ ID NO: 2470553 - DNA, 25 bp, Homo sapien
tgtgtgcaatactccgcaatcctca

SEQ ID NO: 2470554 - DNA, 25 bp, Homo sapien
ctttcctgaggtgcagtccacgagt

SEQ ID NO: 2470555 - DNA, 25 bp, Homo sapien
agcagatgacagagaatgcttggga

SEQ ID NO: 2470556 - DNA, 25 bp, Homo sapien
accagatacatcagaacttcctggg

SEQ ID NO: 2470557 - DNA, 25 bp, Homo sapien
cagtgtggtccatcaaccagataca

SEQ ID NO: 2470558 - DNA, 25 bp, Homo sapien
gatttctaggcatgctggagtcagt

SEQ ID NO: 2470559 - DNA, 25 bp, Homo sapien
gaactgcttgagcccgagaggtgga

SEQ ID NO: 2470560 - DNA, 25 bp, Homo sapien
acgagaactgcttgagcccgagagg

SEQ ID NO: 2470561 - DNA, 25 bp, Homo sapien
ggttgtagtgagccaagattgcgcc

SEQ ID NO: 2470562 - DNA, 25 bp, Homo sapien
aggcacgagaactgcttgagcccga

SEQ ID NO: 2470563 - DNA, 25 bp, Homo sapien
gaggctcctgtccacaagtttggta

SEQ ID NO: 2470564 - DNA, 25 bp, Homo sapien
aggtccacgtctctgatatgaggct

SEQ ID NO: 2470565 - DNA, 25 bp, Homo sapien
gcactgtgcccgacacagaaatgaa

SEQ ID NO: 2470566 - DNA, 25 bp, Homo sapien
tgcctcatcaccagtgagcacccag

SEQ ID NO: 2470567 - DNA, 25 bp, Homo sapien
gatccctgaatggtcatttcctcct

SEQ ID NO: 2470568 - DNA, 25 bp, Homo sapien
tcagattcgaaaagctggaagccat

SEQ ID NO: 2470569 - DNA, 25 bp, Homo sapien
taagtgcgcaccctatgaaggttca

SEQ ID NO: 2470570 - DNA, 25 bp, Homo sapien
taatcaagctggagtaagatccctg

SEQ ID NO: 2470571 - DNA, 25 bp, Homo sapien
tgatagacgaagtcgtcatttttat

SEQ ID NO: 2470572 - DNA, 25 bp, Homo sapien
atagacgaagtcgtcatttttattt

SEQ ID NO: 2470573 - DNA, 25 bp, Homo sapien
ctgatagacgaagtcgtcattttta

SEQ ID NO: 2470574 - DNA, 25 bp, Homo sapien
gatagacgaagtcgtcatttttatt

SEQ ID NO: 2470575 - DNA, 25 bp, Homo sapien
gtctggatggcgaagatgttctccc

SEQ ID NO: 2470576 - DNA, 25 bp, Homo sapien
agggtcagcgccttgtacacatgcc

SEQ ID NO: 2470577 - DNA, 25 bp, Homo sapien
cttgatgaggtagtccagcagggtc

SEQ ID NO: 2470578 - DNA, 25 bp, Homo sapien
tgggccacacgttcggagcctgtct

SEQ ID NO: 2470579 - DNA, 25 bp, Homo sapien
catgcgctctttggttttgagagcc

SEQ ID NO: 2470580 - DNA, 25 bp, Homo sapien
cgttcctcgtccttgaggagagcca

SEQ ID NO: 2470581 - DNA, 25 bp, Homo sapien
ggcaacctgggccatgcgctctttg

SEQ ID NO: 2470582 - DNA, 25 bp, Homo sapien
ggagcctcgcccaaaggtgatctgg

SEQ ID NO: 2470583 - DNA, 25 bp, Homo sapien
gggtggatcaaaccaggctcctgca

SEQ ID NO: 2470584 - DNA, 25 bp, Homo sapien
ggcttcttgagaataatgaccatga

SEQ ID NO: 2470585 - DNA, 25 bp, Homo sapien
tacaggccctggactcggtatgagg

SEQ ID NO: 2470586 - DNA, 25 bp, Homo sapien
gaagtcaaggcaggttgggaccaac

SEQ ID NO: 2470587 - DNA, 25 bp, Homo sapien
aacttctagcaagtgacatgtgatc

SEQ ID NO: 2470588 - DNA, 25 bp, Homo sapien
ctgctaaacctttgacagaacttct

SEQ ID NO: 2470589 - DNA, 25 bp, Homo sapien
acagaacttctagcaagtgacatgt

SEQ ID NO: 2470590 - DNA, 25 bp, Homo sapien
gctcccctgctaaacctttgacaga

SEQ ID NO: 2470591 - DNA, 25 bp, Homo sapien
aatgtcagtttagaagaagccaaaa

SEQ ID NO: 2470592 - DNA, 25 bp, Homo sapien
tttagaagaagccaaaatcctgtat

SEQ ID NO: 2470593 - DNA, 25 bp, Homo sapien
ctaatgtcagtttagaagaagccaa

SEQ ID NO: 2470594 - DNA, 25 bp, Homo sapien
gtcagtttagaagaagccaaaatcc

SEQ ID NO: 2470595 - DNA, 25 bp, Homo sapien
cccgggtgggccctgcagcatggcc

SEQ ID NO: 2470596 - DNA, 25 bp, Homo sapien
ctgccccgggtgggccctgcagcat

SEQ ID NO: 2470597 - DNA, 25 bp, Homo sapien
gccccgggtgggccctgcagcatgg

SEQ ID NO: 2470598 - DNA, 25 bp, Homo sapien
ccgggtgggccctgcagcatggcca

SEQ ID NO: 2470599 - DNA, 25 bp, Homo sapien
agtggctggctgtcccctctgccag

SEQ ID NO: 2470600 - DNA, 25 bp, Homo sapien
ggctggctgtcccctctgccagcac

SEQ ID NO: 2470601 - DNA, 25 bp, Homo sapien
gtggctggctgtcccctctgccagc

SEQ ID NO: 2470602 - DNA, 25 bp, Homo sapien
cagtggctggctgtcccctctgcca

SEQ ID NO: 2470603 - DNA, 25 bp, Homo sapien
gaagcaggacatggccccagtgagg

SEQ ID NO: 2470604 - DNA, 25 bp, Homo sapien
tgagcctccacttcgacatccgtga

SEQ ID NO: 2470605 - DNA, 25 bp, Homo sapien
tcgacatccgtgaaacagccatgaa

SEQ ID NO: 2470606 - DNA, 25 bp, Homo sapien
agctgggagactccgggaacctcca

SEQ ID NO: 2470607 - DNA, 25 bp, Homo sapien
agccatgaataagcaggtctcaaag

SEQ ID NO: 2470608 - DNA, 25 bp, Homo sapien
gtgggctgtgccagacgatccccag

SEQ ID NO: 2470609 - DNA, 25 bp, Homo sapien
ttggctgctcttcggctcggacaca

SEQ ID NO: 2470610 - DNA, 25 bp, Homo sapien
ccgaggcccaggctgaaatccggtt

SEQ ID NO: 2470611 - DNA, 25 bp, Homo sapien
tttccaaggccttgtcaagtgggct

SEQ ID NO: 2470612 - DNA, 25 bp, Homo sapien
tgacagtagcatccctagaacctag

SEQ ID NO: 2470613 - DNA, 25 bp, Homo sapien
ggctgcacccctcaggagtctaggt

SEQ ID NO: 2470614 - DNA, 25 bp, Homo sapien
tcaggcctgactcacagtgtgtgct

SEQ ID NO: 2470615 - DNA, 25 bp, Homo sapien
cagagatgcgctcaggaacccagtt

SEQ ID NO: 2470616 - DNA, 25 bp, Homo sapien
tgtgagggaggctgacgcggacaca

SEQ ID NO: 2470617 - DNA, 25 bp, Homo sapien
atgcaactgtagttttcttagcccc

SEQ ID NO: 2470618 - DNA, 25 bp, Homo sapien
ggacacagtaggtaagaggccaaga

SEQ ID NO: 2470619 - DNA, 25 bp, Homo sapien
tcatgcaactgtagttttcttagcc

SEQ ID NO: 2470620 - DNA, 25 bp, Homo sapien
catcaggatccactggttggtccag

SEQ ID NO: 2470621 - DNA, 25 bp, Homo sapien
taattagaagaatgccaggaggact

SEQ ID NO: 2470622 - DNA, 25 bp, Homo sapien
gagatctcggaacagactggttctc

SEQ ID NO: 2470623 - DNA, 25 bp, Homo sapien
gggctctagacaaggctgaccatca

SEQ ID NO: 2470624 - DNA, 25 bp, Homo sapien
ggtagggatgagcaattatagtcca

SEQ ID NO: 2470625 - DNA, 25 bp, Homo sapien
tgtaaactcaattcatacgtggaaa

SEQ ID NO: 2470626 - DNA, 25 bp, Homo sapien
ttttcttggacacgctgattgatca

SEQ ID NO: 2470627 - DNA, 25 bp, Homo sapien
cagtgtcagacagtatatagacagg

SEQ ID NO: 2470628 - DNA, 25 bp, Homo sapien
gagctagtggatcatttggaagtga

SEQ ID NO: 2470629 - DNA, 25 bp, Homo sapien
tcagctctagaatttaagtttggtt

SEQ ID NO: 2470630 - DNA, 25 bp, Homo sapien
tgaattccttgcactgaatttcact

SEQ ID NO: 2470631 - DNA, 25 bp, Homo sapien
tgagggtacactctgactttttgga

SEQ ID NO: 2470632 - DNA, 25 bp, Homo sapien
gcggctaagaaacccggcagccctg

SEQ ID NO: 2470633 - DNA, 25 bp, Homo sapien
ccgcaagagggcagaggcggccata

SEQ ID NO: 2470634 - DNA, 25 bp, Homo sapien
tgagatgcggctaagaaacccggca

SEQ ID NO: 2470635 - DNA, 25 bp, Homo sapien
ggctgccttgagatgcggctaagaa

SEQ ID NO: 2470636 - DNA, 25 bp, Homo sapien
cccggacgctgaggggtgtggagtg

SEQ ID NO: 2470637 - DNA, 25 bp, Homo sapien
ctgtgtggcccggacgctgaggggt

SEQ ID NO: 2470638 - DNA, 25 bp, Homo sapien
ggacgctgaggggtgtggagtggcc

SEQ ID NO: 2470639 - DNA, 25 bp, Homo sapien
tggcccggacgctgaggggtgtgga

SEQ ID NO: 2470640 - DNA, 25 bp, Homo sapien
gtctgcggcaatcccgtcatttctg

SEQ ID NO: 2470641 - DNA, 25 bp, Homo sapien
tctgcctcggtctctgcgtctatgg

SEQ ID NO: 2470642 - DNA, 25 bp, Homo sapien
cagagtctgcggagccgctgtctgt

SEQ ID NO: 2470643 - DNA, 25 bp, Homo sapien
gtcagtctctctcttgcgttctgtg

SEQ ID NO: 2470644 - DNA, 25 bp, Homo sapien
gtgagaacacgagagtggcctcagc

SEQ ID NO: 2470645 - DNA, 25 bp, Homo sapien
gaacacgagagtggcctcagcccag

SEQ ID NO: 2470646 - DNA, 25 bp, Homo sapien
tattaggtagttatagttgagagag

SEQ ID NO: 2470647 - DNA, 25 bp, Homo sapien
tatagttgagagagggtgtggtgag

SEQ ID NO: 2470648 - DNA, 25 bp, Homo sapien
gagttggaatatgaaacatgtttgc

SEQ ID NO: 2470649 - DNA, 25 bp, Homo sapien
tgtcctcacactttgctaaaactcg

SEQ ID NO: 2470650 - DNA, 25 bp, Homo sapien
aaactcgtttttgaacagagcactc

SEQ ID NO: 2470651 - DNA, 25 bp, Homo sapien
gaaaaattgtgtctactgagttgga

SEQ ID NO: 2470652 - DNA, 25 bp, Homo sapien
gccagcgctgcacgactccaggggg

SEQ ID NO: 2470653 - DNA, 25 bp, Homo sapien
caaggccagcgctgcacgactccag

SEQ ID NO: 2470654 - DNA, 25 bp, Homo sapien
tgccagtaattctgctatcattgcg

SEQ ID NO: 2470655 - DNA, 25 bp, Homo sapien
ccagcaggttaacagtgccagtaat

SEQ ID NO: 2470656 - DNA, 25 bp, Homo sapien
tctgctatcattgcgcctccatggg

SEQ ID NO: 2470657 - DNA, 25 bp, Homo sapien
ttcccactccagcaggttaacagtg

SEQ ID NO: 2470658 - DNA, 25 bp, Homo sapien
gggatcagtaaatgtctcttactca

SEQ ID NO: 2470659 - DNA, 25 bp, Homo sapien
cggaagtacaggagccagattgcca

SEQ ID NO: 2470660 - DNA, 25 bp, Homo sapien
caactataaaaagggatcagtaaat

SEQ ID NO: 2470661 - DNA, 25 bp, Homo sapien
caaagtgacctcagggatgcggaag

SEQ ID NO: 2470662 - DNA, 25 bp, Homo sapien
tgcagttgcaggtggaagaacctgg

SEQ ID NO: 2470663 - DNA, 25 bp, Homo sapien
ggaagaacctggacttcggaatcac

SEQ ID NO: 2470664 - DNA, 25 bp, Homo sapien
tggaagaacctggacttcggaatca

SEQ ID NO: 2470665 - DNA, 25 bp, Homo sapien
gtggaagaacctggacttcggaatc

SEQ ID NO: 2470666 - DNA, 25 bp, Homo sapien
tctggctgttccatgtgtctcttgg

SEQ ID NO: 2470667 - DNA, 25 bp, Homo sapien
tgcatctgcaggttagctgaaggtc

SEQ ID NO: 2470668 - DNA, 25 bp, Homo sapien
gggggacaatcttctcacagcagaa

SEQ ID NO: 2470669 - DNA, 25 bp, Homo sapien
tgtggaagtgcacctcaagcctttg

SEQ ID NO: 2470670 - DNA, 25 bp, Homo sapien
taaagataaatcaactggaggcaga

SEQ ID NO: 2470671 - DNA, 25 bp, Homo sapien
ctaaagataaatcaactggaggcag

SEQ ID NO: 2470672 - DNA, 25 bp, Homo sapien
aaagataaatcaactggaggcagat

SEQ ID NO: 2470673 - DNA, 25 bp, Homo sapien
aagataaatcaactggaggcagatc

SEQ ID NO: 2470674 - DNA, 25 bp, Homo sapien
tcttcgtgaccataggctcccattt

SEQ ID NO: 2470675 - DNA, 25 bp, Homo sapien
attttgccccactcaactagctctt

SEQ ID NO: 2470676 - DNA, 25 bp, Homo sapien
tctgtatcccaaggatgctgccttc

SEQ ID NO: 2470677 - DNA, 25 bp, Homo sapien
tttccaggaaatagatagcattttc

SEQ ID NO: 2470678 - DNA, 25 bp, Homo sapien
aacccggagaccagccatggctggc

SEQ ID NO: 2470679 - DNA, 25 bp, Homo sapien
gtttatttcccctatcactgtgaac

SEQ ID NO: 2470680 - DNA, 25 bp, Homo sapien
gacgtcctctgtaatgcgcttggcg

SEQ ID NO: 2470681 - DNA, 25 bp, Homo sapien
cccttgtttacagcgtggctgatgc

SEQ ID NO: 2470682 - DNA, 25 bp, Homo sapien
ggcagacagtcagtcacttgagata

SEQ ID NO: 2470683 - DNA, 25 bp, Homo sapien
ttcctgaatagagccagcggctgtg

SEQ ID NO: 2470684 - DNA, 25 bp, Homo sapien
tgaatagagccagcggctgtggctt

SEQ ID NO: 2470685 - DNA, 25 bp, Homo sapien
cagtcacttgagataagcagtttga

SEQ ID NO: 2470686 - DNA, 25 bp, Homo sapien
taattttagtcttggcgcgaggcgg

SEQ ID NO: 2470687 - DNA, 25 bp, Homo sapien
gagactagctcgtaaactccgggcc

SEQ ID NO: 2470688 - DNA, 25 bp, Homo sapien
cctgcttggcaatgtcgcgagaaag

SEQ ID NO: 2470689 - DNA, 25 bp, Homo sapien
gcaactgccgtcagccattgatgat

SEQ ID NO: 2470690 - DNA, 25 bp, Homo sapien
tttctgccccgcgactcctctgagt

SEQ ID NO: 2470691 - DNA, 25 bp, Homo sapien
tgtggccacgtcgaatccgctgctt

SEQ ID NO: 2470692 - DNA, 25 bp, Homo sapien
tggtctggtgcttccatccccaaag

SEQ ID NO: 2470693 - DNA, 25 bp, Homo sapien
ctaggcatgatctctggggacttcc

SEQ ID NO: 2470694 - DNA, 25 bp, Homo sapien
gcaaatggccaaggtctcataacta

SEQ ID NO: 2470695 - DNA, 25 bp, Homo sapien
gctgattacgtctctctatggcaca

SEQ ID NO: 2470696 - DNA, 25 bp, Homo sapien
ttggcagaccggctccagaattgac

SEQ ID NO: 2470697 - DNA, 25 bp, Homo sapien
gtcagtaagggttaagcaaatggcc

SEQ ID NO: 2470698 - DNA, 25 bp, Homo sapien
tggcatacgctatggcctcggcatg

SEQ ID NO: 2470699 - DNA, 25 bp, Homo sapien
catttgcaatatagcgtgtggctgc

SEQ ID NO: 2470700 - DNA, 25 bp, Homo sapien
cagtacatttacgagcaccaggcct

SEQ ID NO: 2470701 - DNA, 25 bp, Homo sapien
tgccagcaagtcagctcaacatttg

SEQ ID NO: 2470702 - DNA, 25 bp, Homo sapien
ctttactaaggagctggagggtgtc

SEQ ID NO: 2470703 - DNA, 25 bp, Homo sapien
cctccccgagggatagaagtggata

SEQ ID NO: 2470704 - DNA, 25 bp, Homo sapien
cgtagagtcaaaagtcaggtgtgcc

SEQ ID NO: 2470705 - DNA, 25 bp, Homo sapien
tacctgtgttcaccgagagctggcc

SEQ ID NO: 2470706 - DNA, 25 bp, Homo sapien
gggccgccgggcgccttccgctcat

SEQ ID NO: 2470707 - DNA, 25 bp, Homo sapien
cgcgcccccggacggccctgacttg

SEQ ID NO: 2470708 - DNA, 25 bp, Homo sapien
gatgctgatggtcgccttctccccg

SEQ ID NO: 2470709 - DNA, 25 bp, Homo sapien
ctggatgctgatggtcgccttctcc

SEQ ID NO: 2470710 - DNA, 25 bp, Homo sapien
ggatgctgatggtcgccttctcccc

SEQ ID NO: 2470711 - DNA, 25 bp, Homo sapien
tggatgctgatggtcgccttctccc

SEQ ID NO: 2470712 - DNA, 25 bp, Homo sapien
ccggcaccggccacagccgggcgcg

SEQ ID NO: 2470713 - DNA, 25 bp, Homo sapien
agatctgcttgatgggacggatggg

SEQ ID NO: 2470714 - DNA, 25 bp, Homo sapien
gaagcgggggaagtagtcggagatc

SEQ ID NO: 2470715 - DNA, 25 bp, Homo sapien
cggagatctgcttgatgggacggat

SEQ ID NO: 2470716 - DNA, 25 bp, Homo sapien
gccgtaggctccgaagagctggtcc

SEQ ID NO: 2470717 - DNA, 25 bp, Homo sapien
ggcccgggctggagccgtaggctcc

SEQ ID NO: 2470718 - DNA, 25 bp, Homo sapien
gctccgaagagctggtccacatcct

SEQ ID NO: 2470719 - DNA, 25 bp, Homo sapien
agagctggtccacatcctcgtcgtc

SEQ ID NO: 2470720 - DNA, 25 bp, Homo sapien
agtcgtccgactcgtagccgtcggc

SEQ ID NO: 2470721 - DNA, 25 bp, Homo sapien
tgcagtcgtccgactcgtagccgtc

SEQ ID NO: 2470722 - DNA, 25 bp, Homo sapien
gcagtcgtccgactcgtagccgtcg

SEQ ID NO: 2470723 - DNA, 25 bp, Homo sapien
tcgtccgactcgtagccgtcggcgt

SEQ ID NO: 2470724 - DNA, 25 bp, Homo sapien
ctgcgcaggggaggggcagcaccag

SEQ ID NO: 2470725 - DNA, 25 bp, Homo sapien
gcgcaggggaggggcagcaccagcc

SEQ ID NO: 2470726 - DNA, 25 bp, Homo sapien
tgcgcaggggaggggcagcaccagc

SEQ ID NO: 2470727 - DNA, 25 bp, Homo sapien
tgcttgggaaactccaggcccgcag

SEQ ID NO: 2470728 - DNA, 25 bp, Homo sapien
gcttgggaaactccaggcccgcagc

SEQ ID NO: 2470729 - DNA, 25 bp, Homo sapien
agcagagatgccagaaatgggaaca

SEQ ID NO: 2470730 - DNA, 25 bp, Homo sapien
acaactttcccatccgttcttctgg

SEQ ID NO: 2470731 - DNA, 25 bp, Homo sapien
gggcagccaaagcagttacttgggt

SEQ ID NO: 2470732 - DNA, 25 bp, Homo sapien
cacccaggggatcaccaagtccagg

SEQ ID NO: 2470733 - DNA, 25 bp, Homo sapien
tcagttcaacctccttggtgtggca

SEQ ID NO: 2470734 - DNA, 25 bp, Homo sapien
ggaccatagaaaatcatcaagcttg

SEQ ID NO: 2470735 - DNA, 25 bp, Homo sapien
caagaccttgtgtgatatgaccgct

SEQ ID NO: 2470736 - DNA, 25 bp, Homo sapien
caaaacaattgtggcaaggaccata

SEQ ID NO: 2470737 - DNA, 25 bp, Homo sapien
tggccacgatgactcttccgtatgt

SEQ ID NO: 2470738 - DNA, 25 bp, Homo sapien
ctgagtcattgctatggccacgatg

SEQ ID NO: 2470739 - DNA, 25 bp, Homo sapien
tgtcacggtcatgttccagaggcaa

SEQ ID NO: 2470740 - DNA, 25 bp, Homo sapien
gaagcaacccctgcaccagagggtc

SEQ ID NO: 2470741 - DNA, 25 bp, Homo sapien
tggtcatacagcaggctgaagtcca

SEQ ID NO: 2470742 - DNA, 25 bp, Homo sapien
cgttgttctcctggtcatacagcag

SEQ ID NO: 2470743 - DNA, 25 bp, Homo sapien
ctcctggtcatacagcaggctgaag

SEQ ID NO: 2470744 - DNA, 25 bp, Homo sapien
gttgttctcctggtcatacagcagg

SEQ ID NO: 2470745 - DNA, 25 bp, Homo sapien
aggcttgcgtggatggcactcacac

SEQ ID NO: 2470746 - DNA, 25 bp, Homo sapien
agggccctgaggcttgcgtggatgg

SEQ ID NO: 2470747 - DNA, 25 bp, Homo sapien
cctgaggcttgcgtggatggcactc

SEQ ID NO: 2470748 - DNA, 25 bp, Homo sapien
tgaggcttgcgtggatggcactcac

SEQ ID NO: 2470749 - DNA, 25 bp, Homo sapien
gaaatcggggacatggaactgacag

SEQ ID NO: 2470750 - DNA, 25 bp, Homo sapien
aaatcggggacatggaactgacagg

SEQ ID NO: 2470751 - DNA, 25 bp, Homo sapien
tggaaatcggggacatggaactgac

SEQ ID NO: 2470752 - DNA, 25 bp, Homo sapien
actggaaatcggggacatggaactg

SEQ ID NO: 2470753 - DNA, 25 bp, Homo sapien
cttgacgtaggggtctgccagccca

SEQ ID NO: 2470754 - DNA, 25 bp, Homo sapien
ccagcccattgtggtccattggctt

SEQ ID NO: 2470755 - DNA, 25 bp, Homo sapien
gtctgccagcccattgtggtccatt

SEQ ID NO: 2470756 - DNA, 25 bp, Homo sapien
cattgtggtccattggcttcaggcc

SEQ ID NO: 2470757 - DNA, 25 bp, Homo sapien
cgcttgggtcatccggcgtaggaat

SEQ ID NO: 2470758 - DNA, 25 bp, Homo sapien
tgagcacatgtgtggtcggacgctt

SEQ ID NO: 2470759 - DNA, 25 bp, Homo sapien
tgcggagagtcagggaacagcccat

SEQ ID NO: 2470760 - DNA, 25 bp, Homo sapien
tcctgtccgagatgcacctgttgtg

SEQ ID NO: 2470761 - DNA, 25 bp, Homo sapien
tctgtgatcccgtagtaagtgaggg

SEQ ID NO: 2470762 - DNA, 25 bp, Homo sapien
gtcttgcggatcatgtcttcatctg

SEQ ID NO: 2470763 - DNA, 25 bp, Homo sapien
cgtagtaagtgagggtctcgttcca

SEQ ID NO: 2470764 - DNA, 25 bp, Homo sapien
gtcttcatctgtgatcccgtagtaa

SEQ ID NO: 2470765 - DNA, 25 bp, Homo sapien
gtgtgcgcaggtagggccagccctg

SEQ ID NO: 2470766 - DNA, 25 bp, Homo sapien
gggagacgcacaagatgcctgggcc

SEQ ID NO: 2470767 - DNA, 25 bp, Homo sapien
tgcctcagacgcactgggcatggtg

SEQ ID NO: 2470768 - DNA, 25 bp, Homo sapien
tggaggtgtgcgcaggtagggccag

SEQ ID NO: 2470769 - DNA, 25 bp, Homo sapien
tccccgatgaactcattgtgccgga

SEQ ID NO: 2470770 - DNA, 25 bp, Homo sapien
tgaactcattgtgccggaatttgtc

SEQ ID NO: 2470771 - DNA, 25 bp, Homo sapien
tcttggtgtggttgggtttcagctt

SEQ ID NO: 2470772 - DNA, 25 bp, Homo sapien
acgtgtctccccgatgaactcattg

SEQ ID NO: 2470773 - DNA, 25 bp, Homo sapien
gggacagatggtcccctgtgcgttc

SEQ ID NO: 2470774 - DNA, 25 bp, Homo sapien
actggaggcttgtactagtgaaggc

SEQ ID NO: 2470775 - DNA, 25 bp, Homo sapien
tgtgcgttcaacctcatacaagcaa

SEQ ID NO: 2470776 - DNA, 25 bp, Homo sapien
catctttaatacctcagggctgggc

SEQ ID NO: 2470777 - DNA, 25 bp, Homo sapien
caggtgggcgcaccgcacgatgcct

SEQ ID NO: 2470778 - DNA, 25 bp, Homo sapien
cacgatgcctaccagcaggccttgc

SEQ ID NO: 2470779 - DNA, 25 bp, Homo sapien
cgagtagccgttggcgtccatggcg

SEQ ID NO: 2470780 - DNA, 25 bp, Homo sapien
gcggccaggtgggcgcaccgcacga

SEQ ID NO: 2470781 - DNA, 25 bp, Homo sapien
ctggcccacggctggcaggtgggac

SEQ ID NO: 2470782 - DNA, 25 bp, Homo sapien
tgcaggggtccagcagcacccacag

SEQ ID NO: 2470783 - DNA, 25 bp, Homo sapien
gcccacggctggcaggtgggaccca

SEQ ID NO: 2470784 - DNA, 25 bp, Homo sapien
gtgggacccagctgcaggggtccag

SEQ ID NO: 2470785 - DNA, 25 bp, Homo sapien
agctcggcctgtctttgaaaggcca

SEQ ID NO: 2470786 - DNA, 25 bp, Homo sapien
tggcccacagctcggcctgtctttg

SEQ ID NO: 2470787 - DNA, 25 bp, Homo sapien
ccacagctcggcctgtctttgaaag

SEQ ID NO: 2470788 - DNA, 25 bp, Homo sapien
agtggcccacagctcggcctgtctt

SEQ ID NO: 2470789 - DNA, 25 bp, Homo sapien
cctgttcctgcatagataattgcat

SEQ ID NO: 2470790 - DNA, 25 bp, Homo sapien
gcatagataattgcatgacaattgc

SEQ ID NO: 2470791 - DNA, 25 bp, Homo sapien
ctggcaccagggagcttaacaaaca

SEQ ID NO: 2470792 - DNA, 25 bp, Homo sapien
catctgtccagcgaatacctgcatc

SEQ ID NO: 2470793 - DNA, 25 bp, Homo sapien
tgttttcgagaagcaagtggtccct

SEQ ID NO: 2470794 - DNA, 25 bp, Homo sapien
caacgctattttgtggcaaaggcga

SEQ ID NO: 2470795 - DNA, 25 bp, Homo sapien
gccagcaggtattcaaagagctttc

SEQ ID NO: 2470796 - DNA, 25 bp, Homo sapien
tggaattacatccaacggacaggca

SEQ ID NO: 2470797 - DNA, 25 bp, Homo sapien
caccgctgtcttatgtttggatttc

SEQ ID NO: 2470798 - DNA, 25 bp, Homo sapien
cttcaccgctgtcttatgtttggat

SEQ ID NO: 2470799 - DNA, 25 bp, Homo sapien
tcttcaccgctgtcttatgtttgga

SEQ ID NO: 2470800 - DNA, 25 bp, Homo sapien
tttcttcaccgctgtcttatgtttg

SEQ ID NO: 2470801 - DNA, 25 bp, Homo sapien
tgcctccatgaggaaccgaggactc

SEQ ID NO: 2470802 - DNA, 25 bp, Homo sapien
ccatcccgccatgaccttttgaaaa

SEQ ID NO: 2470803 - DNA, 25 bp, Homo sapien
ccgccttgggcggaagacttcctgg

SEQ ID NO: 2470804 - DNA, 25 bp, Homo sapien
tgtctgtggcttggtgcggcccctc

SEQ ID NO: 2470805 - DNA, 25 bp, Homo sapien
cgtaatcccaaacggtgacctccag

SEQ ID NO: 2470806 - DNA, 25 bp, Homo sapien
ggtccccatgcttgatctcgtaaca

SEQ ID NO: 2470807 - DNA, 25 bp, Homo sapien
gaaatcgttggattttccaatgtcg

SEQ ID NO: 2470808 - DNA, 25 bp, Homo sapien
ggccaggtccccatgcttgatctcg

SEQ ID NO: 2470809 - DNA, 25 bp, Homo sapien
aggcagtcaaaccagtgcttcaggc

SEQ ID NO: 2470810 - DNA, 25 bp, Homo sapien
gagctcgctggtgagcgtgtgccag

SEQ ID NO: 2470811 - DNA, 25 bp, Homo sapien
cgtgtgccagcgctcgatgcgcttg

SEQ ID NO: 2470812 - DNA, 25 bp, Homo sapien
cgctcgatgcgcttgtccttgttct

SEQ ID NO: 2470813 - DNA, 25 bp, Homo sapien
gaatcattgagtgaagcatgtgcca

SEQ ID NO: 2470814 - DNA, 25 bp, Homo sapien
aactctggcagactttcggccggca

SEQ ID NO: 2470815 - DNA, 25 bp, Homo sapien
gcctctagaagggtctttgctccca

SEQ ID NO: 2470816 - DNA, 25 bp, Homo sapien
ttacccatcatcaggagcctccggg

SEQ ID NO: 2470817 - DNA, 25 bp, Homo sapien
gagcttaactagacaccaggccttt

SEQ ID NO: 2470818 - DNA, 25 bp, Homo sapien
ttggcaaactactcagactctggga

SEQ ID NO: 2470819 - DNA, 25 bp, Homo sapien
catgggccccaagattcagatactc

SEQ ID NO: 2470820 - DNA, 25 bp, Homo sapien
caattcccctgaagcgtggtgtcca

SEQ ID NO: 2470821 - DNA, 25 bp, Homo sapien
ggacccgagtaaagatgcccattcg

SEQ ID NO: 2470822 - DNA, 25 bp, Homo sapien
ggttactgacacctggaatgacttt

SEQ ID NO: 2470823 - DNA, 25 bp, Homo sapien
gcccattcggggtcaaaggcagagc

SEQ ID NO: 2470824 - DNA, 25 bp, Homo sapien
aggcagcgcctggttactgacacct

SEQ ID NO: 2470825 - DNA, 25 bp, Homo sapien
tgcacgagagtctgcgtcgacgaca

SEQ ID NO: 2470826 - DNA, 25 bp, Homo sapien
ccagagtccatgcatcgggaggttc

SEQ ID NO: 2470827 - DNA, 25 bp, Homo sapien
tttgcgaaggaacaacgggctcggc

SEQ ID NO: 2470828 - DNA, 25 bp, Homo sapien
gacagtgtctgcagccgtcacatgg

SEQ ID NO: 2470829 - DNA, 25 bp, Homo sapien
tgcaatccccactttccaggctcaa

SEQ ID NO: 2470830 - DNA, 25 bp, Homo sapien
ctgcaatccccactttccaggctca

SEQ ID NO: 2470831 - DNA, 25 bp, Homo sapien
tcactgcaatccccactttccaggc

SEQ ID NO: 2470832 - DNA, 25 bp, Homo sapien
agcgatcctcctcctcctacctcag

SEQ ID NO: 2470833 - DNA, 25 bp, Homo sapien
cctcagacgggctggcgttagtcaa

SEQ ID NO: 2470834 - DNA, 25 bp, Homo sapien
tccctggtgaagagtaacaagacta

SEQ ID NO: 2470835 - DNA, 25 bp, Homo sapien
gacaacagcatggtcgacaggtcct

SEQ ID NO: 2470836 - DNA, 25 bp, Homo sapien
gcaaaatgtcttgggctgcctcagt

SEQ ID NO: 2470837 - DNA, 25 bp, Homo sapien
gatcacgtttgtacctactgcgcct

SEQ ID NO: 2470838 - DNA, 25 bp, Homo sapien
cctaatctgtacttatggtgccagg

SEQ ID NO: 2470839 - DNA, 25 bp, Homo sapien
agaatgtcccctttggccttatcag

SEQ ID NO: 2470840 - DNA, 25 bp, Homo sapien
gatcaatacgaatccactctggcag

SEQ ID NO: 2470841 - DNA, 25 bp, Homo sapien
acaaggcttagacattcgtccagta

SEQ ID NO: 2470842 - DNA, 25 bp, Homo sapien
caaggcttagacattcgtccagtat

SEQ ID NO: 2470843 - DNA, 25 bp, Homo sapien
aaggcttagacattcgtccagtatg

SEQ ID NO: 2470844 - DNA, 25 bp, Homo sapien
cacaaggcttagacattcgtccagt

SEQ ID NO: 2470845 - DNA, 25 bp, Homo sapien
taaacactggggtctacagtagtat

SEQ ID NO: 2470846 - DNA, 25 bp, Homo sapien
ggggtctacagtagtatttgaagga

SEQ ID NO: 2470847 - DNA, 25 bp, Homo sapien
cactggggtctacagtagtatttga

SEQ ID NO: 2470848 - DNA, 25 bp, Homo sapien
tgaataaacactggggtctacagta

SEQ ID NO: 2470849 - DNA, 25 bp, Homo sapien
ttctttttctgccctcttgggcttc

SEQ ID NO: 2470850 - DNA, 25 bp, Homo sapien
gccctcttgggcttctgaaatgaaa

SEQ ID NO: 2470851 - DNA, 25 bp, Homo sapien
tttttctgccctcttgggcttctga

SEQ ID NO: 2470852 - DNA, 25 bp, Homo sapien
tgccctcttgggcttctgaaatgaa

SEQ ID NO: 2470853 - DNA, 25 bp, Homo sapien
ctcattttccgttccccagcattgg

SEQ ID NO: 2470854 - DNA, 25 bp, Homo sapien
cagagttgaactccctcattttccg

SEQ ID NO: 2470855 - DNA, 25 bp, Homo sapien
attttccgttccccagcattggcgg

SEQ ID NO: 2470856 - DNA, 25 bp, Homo sapien
ctccctcattttccgttccccagca

SEQ ID NO: 2470857 - DNA, 25 bp, Homo sapien
gatgagtttcgtctcctccactgga

SEQ ID NO: 2470858 - DNA, 25 bp, Homo sapien
acagaggcagatgagtttcgtctcc

SEQ ID NO: 2470859 - DNA, 25 bp, Homo sapien
aggagcatggcccctgtccacagat

SEQ ID NO: 2470860 - DNA, 25 bp, Homo sapien
agatgcacctggcatgaggcgtgcc

SEQ ID NO: 2470861 - DNA, 25 bp, Homo sapien
tcacaccaagatatgcacctggcca

SEQ ID NO: 2470862 - DNA, 25 bp, Homo sapien
cacaccaagatatgcacctggccac

SEQ ID NO: 2470863 - DNA, 25 bp, Homo sapien
tactgtagaattctggccttcagac

SEQ ID NO: 2470864 - DNA, 25 bp, Homo sapien
ccaccttgactcagtaggacttact

SEQ ID NO: 2470865 - DNA, 25 bp, Homo sapien
cccgcagagcctcggaagctaccga

SEQ ID NO: 2470866 - DNA, 25 bp, Homo sapien
gcagagcctcggaagctaccgaccc

SEQ ID NO: 2470867 - DNA, 25 bp, Homo sapien
ttacgtagatcagcgatacgatgat

SEQ ID NO: 2470868 - DNA, 25 bp, Homo sapien
acgtagatcagcgatacgatgattc

SEQ ID NO: 2470869 - DNA, 25 bp, Homo sapien
gtagatcagcgatacgatgattcca

SEQ ID NO: 2470870 - DNA, 25 bp, Homo sapien
gtttacgtagatcagcgatacgatg

SEQ ID NO: 2470871 - DNA, 25 bp, Homo sapien
agttgatttatcaagttgtaaatct

SEQ ID NO: 2470872 - DNA, 25 bp, Homo sapien
gatttatcaagttgtaaatcttcac

SEQ ID NO: 2470873 - DNA, 25 bp, Homo sapien
ttgatttatcaagttgtaaatcttc

SEQ ID NO: 2470874 - DNA, 25 bp, Homo sapien
ctgacaaagttgatttatcaagttg

SEQ ID NO: 2470875 - DNA, 25 bp, Homo sapien
gactggaaaaaagggtatgggatca

SEQ ID NO: 2470876 - DNA, 25 bp, Homo sapien
aaaagggtatgggatcatcaccgga

SEQ ID NO: 2470877 - DNA, 25 bp, Homo sapien
gaaaaaagggtatgggatcatcacc

SEQ ID NO: 2470878 - DNA, 25 bp, Homo sapien
aaagggtatgggatcatcaccggac

SEQ ID NO: 2470879 - DNA, 25 bp, Homo sapien
tctaaagtaacatcctctcaaggcc

SEQ ID NO: 2470880 - DNA, 25 bp, Homo sapien
cttctaaagtaacatcctctcaagg

SEQ ID NO: 2470881 - DNA, 25 bp, Homo sapien
ctttccttctaaagtaacatcctct

SEQ ID NO: 2470882 - DNA, 25 bp, Homo sapien
tccttctaaagtaacatcctctcaa

SEQ ID NO: 2470883 - DNA, 25 bp, Homo sapien
ggacagtacttgttctcaagggaat

SEQ ID NO: 2470884 - DNA, 25 bp, Homo sapien
tgaaaggtgatgtctggggctcagg

SEQ ID NO: 2470885 - DNA, 25 bp, Homo sapien
aaaggtgatgtctggggctcaggtg

SEQ ID NO: 2470886 - DNA, 25 bp, Homo sapien
gaaaggtgatgtctggggctcaggt

SEQ ID NO: 2470887 - DNA, 25 bp, Homo sapien
aatgaaaggtgatgtctggggctca

SEQ ID NO: 2470888 - DNA, 25 bp, Homo sapien
taagtatgtgtgctactgaggcaag

SEQ ID NO: 2470889 - DNA, 25 bp, Homo sapien
tcacagaggccgtgccaatctctct

SEQ ID NO: 2470890 - DNA, 25 bp, Homo sapien
acttaagtatgtgtgctactgaggc

SEQ ID NO: 2470891 - DNA, 25 bp, Homo sapien
gtatgtgtgctactgaggcaagcat

SEQ ID NO: 2470892 - DNA, 25 bp, Homo sapien
tttctcttcctggattcagaagtct

SEQ ID NO: 2470893 - DNA, 25 bp, Homo sapien
gtcagtttctcttcctggattcaga

SEQ ID NO: 2470894 - DNA, 25 bp, Homo sapien
tcagaagtctttcatggtaggtcca

SEQ ID NO: 2470895 - DNA, 25 bp, Homo sapien
cagaagtctttcatggtaggtccag

SEQ ID NO: 2470896 - DNA, 25 bp, Homo sapien
aataaggtggccagatgcgctggct

SEQ ID NO: 2470897 - DNA, 25 bp, Homo sapien
tagaaaataaggtggccagatgcgc

SEQ ID NO: 2470898 - DNA, 25 bp, Homo sapien
gccattacattgagccagtaataga

SEQ ID NO: 2470899 - DNA, 25 bp, Homo sapien
tgagatggagccattacattgagcc

SEQ ID NO: 2470900 - DNA, 25 bp, Homo sapien
gatttcttttatctagcatccttta

SEQ ID NO: 2470901 - DNA, 25 bp, Homo sapien
ctctcaaactgttggaactataggt

SEQ ID NO: 2470902 - DNA, 25 bp, Homo sapien
ctcatggccttaaaacatactccca

SEQ ID NO: 2470903 - DNA, 25 bp, Homo sapien
atggccttaaaacatactcccatct

SEQ ID NO: 2470904 - DNA, 25 bp, Homo sapien
cttcctggtgccttctctacagcag

SEQ ID NO: 2470905 - DNA, 25 bp, Homo sapien
gagccatctgctcttcctggtgcct

SEQ ID NO: 2470906 - DNA, 25 bp, Homo sapien
attgagccatctgctcttcctggtg

SEQ ID NO: 2470907 - DNA, 25 bp, Homo sapien
tgccttctctacagcagcctgagcc

SEQ ID NO: 2470908 - DNA, 25 bp, Homo sapien
tttgaaaggaaccatcccacgccat

SEQ ID NO: 2470909 - DNA, 25 bp, Homo sapien
gtgcatttgaaaggaaccatcccac

SEQ ID NO: 2470910 - DNA, 25 bp, Homo sapien
catttgaaaggaaccatcccacgcc

SEQ ID NO: 2470911 - DNA, 25 bp, Homo sapien
ttgaaaggaaccatcccacgccatt

SEQ ID NO: 2470912 - DNA, 25 bp, Homo sapien
tcctggattcacaagtctttcatgg

SEQ ID NO: 2470913 - DNA, 25 bp, Homo sapien
ctggattcacaagtctttcatggta

SEQ ID NO: 2470914 - DNA, 25 bp, Homo sapien
tcttcctggattcacaagtctttca

SEQ ID NO: 2470915 - DNA, 25 bp, Homo sapien
tctctcttcctggattcacaagtct

SEQ ID NO: 2470916 - DNA, 25 bp, Homo sapien
tagggtatgggcctaaataggccat

SEQ ID NO: 2470917 - DNA, 25 bp, Homo sapien
gtagggtatgggcctaaataggcca

SEQ ID NO: 2470918 - DNA, 25 bp, Homo sapien
agggtatgggcctaaataggccatt

SEQ ID NO: 2470919 - DNA, 25 bp, Homo sapien
gggtatgggcctaaataggccattg

SEQ ID NO: 2470920 - DNA, 25 bp, Homo sapien
tccacgtatacgaaaattccaaatg

SEQ ID NO: 2470921 - DNA, 25 bp, Homo sapien
ccacgtatacgaaaattccaaatgt

SEQ ID NO: 2470922 - DNA, 25 bp, Homo sapien
acccctctggaatccacgtatacga

SEQ ID NO: 2470923 - DNA, 25 bp, Homo sapien
cctctggaatccacgtatacgaaaa

SEQ ID NO: 2470924 - DNA, 25 bp, Homo sapien
agaatccacgtatacgaaaattcca

SEQ ID NO: 2470925 - DNA, 25 bp, Homo sapien
cagtcagctgcaatagcactactac

SEQ ID NO: 2470926 - DNA, 25 bp, Homo sapien
gctgcaatagcactactacactcca

SEQ ID NO: 2470927 - DNA, 25 bp, Homo sapien
acccctctagaatccacgtatacga

SEQ ID NO: 2470928 - DNA, 25 bp, Homo sapien
ggctccttgcggctacatggctcag

SEQ ID NO: 2470929 - DNA, 25 bp, Homo sapien
tgctgtgtggctccttgcggctaca

SEQ ID NO: 2470930 - DNA, 25 bp, Homo sapien
tgctcaagtgcatccaaagcgaccc

SEQ ID NO: 2470931 - DNA, 25 bp, Homo sapien
cttgcggctacatggctcaggggtt

SEQ ID NO: 2470932 - DNA, 25 bp, Homo sapien
tgcacggttcacaacagggtgcgtt

SEQ ID NO: 2470933 - DNA, 25 bp, Homo sapien
tctaacgctgctgctcatctgagaa

SEQ ID NO: 2470934 - DNA, 25 bp, Homo sapien
gctgctcatctgagaaggtggagct

SEQ ID NO: 2470935 - DNA, 25 bp, Homo sapien
cggttcacaacagggtgcgttctcc

SEQ ID NO: 2470936 - DNA, 25 bp, Homo sapien
tcataaggacagcgcaacctcgatc

SEQ ID NO: 2470937 - DNA, 25 bp, Homo sapien
taaggacagcgcaacctcgatccct

SEQ ID NO: 2470938 - DNA, 25 bp, Homo sapien
tctcataaggacagcgcaacctcga

SEQ ID NO: 2470939 - DNA, 25 bp, Homo sapien
ataaggacagcgcaacctcgatccc

SEQ ID NO: 2470940 - DNA, 25 bp, Homo sapien
ttttcctgcaactggatggtcccac

SEQ ID NO: 2470941 - DNA, 25 bp, Homo sapien
gaatcagtgggcgtgttaagcttgt

SEQ ID NO: 2470942 - DNA, 25 bp, Homo sapien
tgtagaatcagtgggcgtgttaagc

SEQ ID NO: 2470943 - DNA, 25 bp, Homo sapien
tagaatcagtgggcgtgttaagctt

SEQ ID NO: 2470944 - DNA, 25 bp, Homo sapien
gtagggtatgggcctaaataggcca

SEQ ID NO: 2470945 - DNA, 25 bp, Homo sapien
tagggtatgggcctaaataggccat

SEQ ID NO: 2470946 - DNA, 25 bp, Homo sapien
agggtatgggcctaaataggccatt

SEQ ID NO: 2470947 - DNA, 25 bp, Homo sapien
gggtatgggcctaaataggccattg

SEQ ID NO: 2470948 - DNA, 25 bp, Homo sapien
aactgggccaaaaaaggctgttgtg

SEQ ID NO: 2470949 - DNA, 25 bp, Homo sapien
actgggccaaaaaaggctgttgtga

SEQ ID NO: 2470950 - DNA, 25 bp, Homo sapien
atgggtaggcactgagtccaaagag

SEQ ID NO: 2470951 - DNA, 25 bp, Homo sapien
caaagaggttgttgagaggcaggaa

SEQ ID NO: 2470952 - DNA, 25 bp, Homo sapien
aagaggttgttgagaggcaggaatc

SEQ ID NO: 2470953 - DNA, 25 bp, Homo sapien
aggttgttgagaggcaggaatcggg

SEQ ID NO: 2470954 - DNA, 25 bp, Homo sapien
cctgcagatgtcatcggagggccag

SEQ ID NO: 2470955 - DNA, 25 bp, Homo sapien
gcctgcagatgtcatcggagggcca

SEQ ID NO: 2470956 - DNA, 25 bp, Homo sapien
cagggaggccgacttgctgctcttc

SEQ ID NO: 2470957 - DNA, 25 bp, Homo sapien
cacttccaggccgacttgaggacga

SEQ ID NO: 2470958 - DNA, 25 bp, Homo sapien
ctggagaggccgtcgagaggacgga

SEQ ID NO: 2470959 - DNA, 25 bp, Homo sapien
gtcgagaggacggagctgggcccag

SEQ ID NO: 2470960 - DNA, 25 bp, Homo sapien
gcctggagatcaagttctgcgcctg

SEQ ID NO: 2470961 - DNA, 25 bp, Homo sapien
aggccgcctggagatcaagttctgc

SEQ ID NO: 2470962 - DNA, 25 bp, Homo sapien
ccgcctggagatcaagttctgcgcc

SEQ ID NO: 2470963 - DNA, 25 bp, Homo sapien
cctggagatcaagttctgcgcctga

SEQ ID NO: 2470964 - DNA, 25 bp, Homo sapien
gaacacgttgatcgtgggcgatatt

SEQ ID NO: 2470965 - DNA, 25 bp, Homo sapien
cacgttgatcgtgggcgatattttt

SEQ ID NO: 2470966 - DNA, 25 bp, Homo sapien
cagaacacgttgatcgtgggcgata

SEQ ID NO: 2470967 - DNA, 25 bp, Homo sapien
gaacagaacacgttgatcgtgggcg

SEQ ID NO: 2470968 - DNA, 25 bp, Homo sapien
ttttagactcttgttttagaaagca

SEQ ID NO: 2470969 - DNA, 25 bp, Homo sapien
gcagggactgtgctggtcttacctg

SEQ ID NO: 2470970 - DNA, 25 bp, Homo sapien
tgctggtcttacctgagcagacctg

SEQ ID NO: 2470971 - DNA, 25 bp, Homo sapien
cagcttttgcccaaatcttagtgac

SEQ ID NO: 2470972 - DNA, 25 bp, Homo sapien
ctcacgattctgtggctggaccatt

SEQ ID NO: 2470973 - DNA, 25 bp, Homo sapien
cttcagggtcgtctgtgtctgttaa

SEQ ID NO: 2470974 - DNA, 25 bp, Homo sapien
ttcagggtcgtctgtgtctgttaaa

SEQ ID NO: 2470975 - DNA, 25 bp, Homo sapien
gaggctgattccgtattttggcgat

SEQ ID NO: 2470976 - DNA, 25 bp, Homo sapien
tccatcatccgctgatgaactcaga

SEQ ID NO: 2470977 - DNA, 25 bp, Homo sapien
gattccgtattttggcgattgtgag

SEQ ID NO: 2470978 - DNA, 25 bp, Homo sapien
tgaactcagaggctgattccgtatt

SEQ ID NO: 2470979 - DNA, 25 bp, Homo sapien
actccagggctgtgtacggaagttc

SEQ ID NO: 2470980 - DNA, 25 bp, Homo sapien
catggctctaagacgactccagggc

SEQ ID NO: 2470981 - DNA, 25 bp, Homo sapien
atcatggctctaagacgactccagg

SEQ ID NO: 2470982 - DNA, 25 bp, Homo sapien
tccagggctgtgtacggaagttcag

SEQ ID NO: 2470983 - DNA, 25 bp, Homo sapien
ccccaggattgtggagtgagaacgt

SEQ ID NO: 2470984 - DNA, 25 bp, Homo sapien
tgtgtgcacctagccctgtagctgt

SEQ ID NO: 2470985 - DNA, 25 bp, Homo sapien
actgaggtaactaacgacggcggca

SEQ ID NO: 2470986 - DNA, 25 bp, Homo sapien
cgctacggttactaattgtgtgcac

SEQ ID NO: 2470987 - DNA, 25 bp, Homo sapien
tatagacagatatgccagcaggaac

SEQ ID NO: 2470988 - DNA, 25 bp, Homo sapien
aatggaccctgaggaccatatataa

SEQ ID NO: 2470989 - DNA, 25 bp, Homo sapien
ccctaaggtggtcggttatagacag

SEQ ID NO: 2470990 - DNA, 25 bp, Homo sapien
acagatcagaatggaccctaaggtg

SEQ ID NO: 2470991 - DNA, 25 bp, Homo sapien
aagagaggagggtggcggtaaggct

SEQ ID NO: 2470992 - DNA, 25 bp, Homo sapien
tgattcagccagagtgagaccaaat

SEQ ID NO: 2470993 - DNA, 25 bp, Homo sapien
ctgtgcggtgcaggtgacagcaccc

SEQ ID NO: 2470994 - DNA, 25 bp, Homo sapien
ttcctactctgtgggcaggtaacac

SEQ ID NO: 2470995 - DNA, 25 bp, Homo sapien
tgcgtctcagcccacagtgagcgaa

SEQ ID NO: 2470996 - DNA, 25 bp, Homo sapien
tgttcagagtaagagggtatcttcc

SEQ ID NO: 2470997 - DNA, 25 bp, Homo sapien
ggcctggagcatgattctggagcca

SEQ ID NO: 2470998 - DNA, 25 bp, Homo sapien
tcttcctgtggacgactcagcttgc

SEQ ID NO: 2470999 - DNA, 25 bp, Homo sapien
gccacagtgtgaatgctagggagca

SEQ ID NO: 2471000 - DNA, 25 bp, Homo sapien
tagggtgttgggcacatagggatgt

SEQ ID NO: 2471001 - DNA, 25 bp, Homo sapien
acctccagtgccagacaacccacag

SEQ ID NO: 2471002 - DNA, 25 bp, Homo sapien
cttggtaattctgcccaggttgggc

SEQ ID NO: 2471003 - DNA, 25 bp, Homo sapien
ctgcttggtaattctgcccaggttg

SEQ ID NO: 2471004 - DNA, 25 bp, Homo sapien
tcaccgatatcagtggctggctggg

SEQ ID NO: 2471005 - DNA, 25 bp, Homo sapien
acagttgacagttggaggtgtgtgt

SEQ ID NO: 2471006 - DNA, 25 bp, Homo sapien
ggcgggggtacttcctgatgttcta

SEQ ID NO: 2471007 - DNA, 25 bp, Homo sapien
cctggaggctctcgtaagtgctggc

SEQ ID NO: 2471008 - DNA, 25 bp, Homo sapien
aacttcagacaccagggtagatgga

SEQ ID NO: 2471009 - DNA, 25 bp, Homo sapien
gtgccaagtccagcagagggcatgg

SEQ ID NO: 2471010 - DNA, 25 bp, Homo sapien
gagctgggtgtcacgcacacagtgc

SEQ ID NO: 2471011 - DNA, 25 bp, Homo sapien
ggtagatggatttgccaggctgcac

SEQ ID NO: 2471012 - DNA, 25 bp, Homo sapien
ggttgaggaggatgccccattaaca

SEQ ID NO: 2471013 - DNA, 25 bp, Homo sapien
atttactctcaatgaccccaaatgg

SEQ ID NO: 2471014 - DNA, 25 bp, Homo sapien
taacaagtcgatttactctcaatga

SEQ ID NO: 2471015 - DNA, 25 bp, Homo sapien
ggatgccccattaacaagtcgattt

SEQ ID NO: 2471016 - DNA, 25 bp, Homo sapien
tttggagcaacccacaggcgtggag

SEQ ID NO: 2471017 - DNA, 25 bp, Homo sapien
ctacctggcatctgcgcgtgacgct

SEQ ID NO: 2471018 - DNA, 25 bp, Homo sapien
gcgtgacgctgcagctttggagcaa

SEQ ID NO: 2471019 - DNA, 25 bp, Homo sapien
ccgttgcaatacagcttgtgcccga

SEQ ID NO: 2471020 - DNA, 25 bp, Homo sapien
aatgagctccatgtagttccacagg

SEQ ID NO: 2471021 - DNA, 25 bp, Homo sapien
ctctcgagtgagtgacaggaagctg

SEQ ID NO: 2471022 - DNA, 25 bp, Homo sapien
gagtcttaagtcacctcagaggagg

SEQ ID NO: 2471023 - DNA, 25 bp, Homo sapien
tgttgtcactctgtgccatgcggca

SEQ ID NO: 2471024 - DNA, 25 bp, Homo sapien
ctgcggcgtttcttgtctgctggtt

SEQ ID NO: 2471025 - DNA, 25 bp, Homo sapien
cagcacacagcactctgcggcgttt

SEQ ID NO: 2471026 - DNA, 25 bp, Homo sapien
cggcgtttcttgtctgctggttgct

SEQ ID NO: 2471027 - DNA, 25 bp, Homo sapien
cacacagcactctgcggcgtttctt

SEQ ID NO: 2471028 - DNA, 25 bp, Homo sapien
tctgacacggatgcccgcagggccg

SEQ ID NO: 2471029 - DNA, 25 bp, Homo sapien
ggcacacagcactctgacacggatg

SEQ ID NO: 2471030 - DNA, 25 bp, Homo sapien
agcactctgacatggatgcccgcag

SEQ ID NO: 2471031 - DNA, 25 bp, Homo sapien
agcactctgacatggatgcccgcac

SEQ ID NO: 2471032 - DNA, 25 bp, Homo sapien
catcgcctggcacacagaacgctaa

SEQ ID NO: 2471033 - DNA, 25 bp, Homo sapien
atcgcctggcacacagaacgctaac

SEQ ID NO: 2471034 - DNA, 25 bp, Homo sapien
agcatcgcctggcacacagaacgct

SEQ ID NO: 2471035 - DNA, 25 bp, Homo sapien
gcatcgcctggcacacagaacgcta

SEQ ID NO: 2471036 - DNA, 25 bp, Homo sapien
agggatcctgcgtcctctcccagag

SEQ ID NO: 2471037 - DNA, 25 bp, Homo sapien
ggttgtcacacccatgtggaggcca

SEQ ID NO: 2471038 - DNA, 25 bp, Homo sapien
aacagtagattgaagggtgcaggcc

SEQ ID NO: 2471039 - DNA, 25 bp, Homo sapien
gacagtagattgaactgccagggtg

SEQ ID NO: 2471040 - DNA, 25 bp, Homo sapien
gggagtcactaagacgaaattgtac

SEQ ID NO: 2471041 - DNA, 25 bp, Homo sapien
tgacctgttccaccggggaagagct

SEQ ID NO: 2471042 - DNA, 25 bp, Homo sapien
tattaatgaagcgtgtgttgatggg

SEQ ID NO: 2471043 - DNA, 25 bp, Homo sapien
ccccgggtattaatgaagcgtgtgt

SEQ ID NO: 2471044 - DNA, 25 bp, Homo sapien
gggcaccatgctgctcatgctccag

SEQ ID NO: 2471045 - DNA, 25 bp, Homo sapien
accatgctgctcatgctccagactg

SEQ ID NO: 2471046 - DNA, 25 bp, Homo sapien
ggcaccatgctgctcatgctccaga

SEQ ID NO: 2471047 - DNA, 25 bp, Homo sapien
atgctgctcatgctccagactgctg

SEQ ID NO: 2471048 - DNA, 25 bp, Homo sapien
gcgatacagtgagatgtggccacac

SEQ ID NO: 2471049 - DNA, 25 bp, Homo sapien
gatgtggccacacagccatgtccag

SEQ ID NO: 2471050 - DNA, 25 bp, Homo sapien
gtgagatgtggccacacagccatgt

SEQ ID NO: 2471051 - DNA, 25 bp, Homo sapien
tgtggccacacagccatgtccagac

SEQ ID NO: 2471052 - DNA, 25 bp, Homo sapien
gtcttggttccttataatcctgtca

SEQ ID NO: 2471053 - DNA, 25 bp, Homo sapien
ggtttgccggcagcggtcttggttc

SEQ ID NO: 2471054 - DNA, 25 bp, Homo sapien
aagaaccagctattgctcaagtggt

SEQ ID NO: 2471055 - DNA, 25 bp, Homo sapien
cacatttatggagcagggggtttgc

SEQ ID NO: 2471056 - DNA, 25 bp, Homo sapien
ttgggccagggtagcctgtggcaaa

SEQ ID NO: 2471057 - DNA, 25 bp, Homo sapien
tgtggcaaagacagtctcacagtgt

SEQ ID NO: 2471058 - DNA, 25 bp, Homo sapien
ccttgggccagggtagcctgtggca

SEQ ID NO: 2471059 - DNA, 25 bp, Homo sapien
agcctgtggcaaagacagtctcaca

SEQ ID NO: 2471060 - DNA, 25 bp, Homo sapien
tggcagctgggtatcctcatgtgtg

SEQ ID NO: 2471061 - DNA, 25 bp, Homo sapien
gctggcagctgggtatcctcatgtg

SEQ ID NO: 2471062 - DNA, 25 bp, Homo sapien
cagctgggtatcctcatgtgtgcag

SEQ ID NO: 2471063 - DNA, 25 bp, Homo sapien
gcagctgggtatcctcatgtgtgca

SEQ ID NO: 2471064 - DNA, 25 bp, Homo sapien
ggaggggtcagatgctcactctgca

SEQ ID NO: 2471065 - DNA, 25 bp, Homo sapien
ctcgatcaccccaacatgcagagag

SEQ ID NO: 2471066 - DNA, 25 bp, Homo sapien
ggtcagatgctcactctgcagatcc

SEQ ID NO: 2471067 - DNA, 25 bp, Homo sapien
tgcagagagaaaccctttgcccttc

SEQ ID NO: 2471068 - DNA, 25 bp, Homo sapien
tcagcaacctgtgtgcagccaaaga

SEQ ID NO: 2471069 - DNA, 25 bp, Homo sapien
ccaggcctcagggttccacggagca

SEQ ID NO: 2471070 - DNA, 25 bp, Homo sapien
gcctcagggttccacggagcaggtt

SEQ ID NO: 2471071 - DNA, 25 bp, Homo sapien
gttgggcaagtgtgttaggaccatc

SEQ ID NO: 2471072 - DNA, 25 bp, Homo sapien
tcagctgagccccgggcattaggaa

SEQ ID NO: 2471073 - DNA, 25 bp, Homo sapien
ctgagccccgggcattaggaattgg

SEQ ID NO: 2471074 - DNA, 25 bp, Homo sapien
acacgggtggggcattggaagccag

SEQ ID NO: 2471075 - DNA, 25 bp, Homo sapien
ctctgggggtactgactcaggaaga

SEQ ID NO: 2471076 - DNA, 25 bp, Homo sapien
tgagaagaaagcctccggcaggacc

SEQ ID NO: 2471077 - DNA, 25 bp, Homo sapien
gatcggggacgccttggccactctg

SEQ ID NO: 2471078 - DNA, 25 bp, Homo sapien
cgtaaggccctgatgtgagaagaaa

SEQ ID NO: 2471079 - DNA, 25 bp, Homo sapien
cagcttcggctgaatcctagctcag

SEQ ID NO: 2471080 - DNA, 25 bp, Homo sapien
cttctcattggaggaagggcccggt

SEQ ID NO: 2471081 - DNA, 25 bp, Homo sapien
ggttcaggacagacagggacatcat

SEQ ID NO: 2471082 - DNA, 25 bp, Homo sapien
ctcattggaggaagggcccggttca

SEQ ID NO: 2471083 - DNA, 25 bp, Homo sapien
ggaagggcccggttcaggacagaca

SEQ ID NO: 2471084 - DNA, 25 bp, Homo sapien
gataccactgcctgtgtgtaactgc

SEQ ID NO: 2471085 - DNA, 25 bp, Homo sapien
cactgcctgtgtgtaactgctgtag

SEQ ID NO: 2471086 - DNA, 25 bp, Homo sapien
taccactgcctgtgtgtaactgctg

SEQ ID NO: 2471087 - DNA, 25 bp, Homo sapien
gcctgtgtgtaactgctgtagacca

SEQ ID NO: 2471088 - DNA, 25 bp, Homo sapien
gaccagaggtctctgtgcaatcggc

SEQ ID NO: 2471089 - DNA, 25 bp, Homo sapien
actggggtcagcgaccagaggtctc

SEQ ID NO: 2471090 - DNA, 25 bp, Homo sapien
ctcagggcctcagcgatgcccagtt

SEQ ID NO: 2471091 - DNA, 25 bp, Homo sapien
gtgaagggcccatgatgggctattc

SEQ ID NO: 2471092 - DNA, 25 bp, Homo sapien
gcctgaagtggtgcaggtgcctggt

SEQ ID NO: 2471093 - DNA, 25 bp, Homo sapien
tgcctggtcacactggaggtgtaga

SEQ ID NO: 2471094 - DNA, 25 bp, Homo sapien
caggtgcctggtcacactggaggtg

SEQ ID NO: 2471095 - DNA, 25 bp, Homo sapien
ctgaagtggtgcaggtgcctggtca

SEQ ID NO: 2471096 - DNA, 25 bp, Homo sapien
ggcctggatagaacagcaaggcgag

SEQ ID NO: 2471097 - DNA, 25 bp, Homo sapien
gcaaggcgagggcacatttccctgg

SEQ ID NO: 2471098 - DNA, 25 bp, Homo sapien
cctggatagaacagcaaggcgaggg

SEQ ID NO: 2471099 - DNA, 25 bp, Homo sapien
ggcgagggcacatttccctggccat

SEQ ID NO: 2471100 - DNA, 25 bp, Homo sapien
cccaggagtccggaactgccaggag

SEQ ID NO: 2471101 - DNA, 25 bp, Homo sapien
caggagagtggtggcaggtccccca

SEQ ID NO: 2471102 - DNA, 25 bp, Homo sapien
aggagtccggaactgccaggagagt

SEQ ID NO: 2471103 - DNA, 25 bp, Homo sapien
ggttcccaggagtccggaactgcca

SEQ ID NO: 2471104 - DNA, 25 bp, Homo sapien
catcgttctgaattctgacgacacc

SEQ ID NO: 2471105 - DNA, 25 bp, Homo sapien
ccatcgttctgaattctgacgacac

SEQ ID NO: 2471106 - DNA, 25 bp, Homo sapien
tcgttctgaattctgacgacaccgt

SEQ ID NO: 2471107 - DNA, 25 bp, Homo sapien
atcgttctgaattctgacgacaccg

SEQ ID NO: 2471108 - DNA, 25 bp, Homo sapien
cgttcttccacaccctgtcctggtg

SEQ ID NO: 2471109 - DNA, 25 bp, Homo sapien
gcacctcgttcttccacaccctgtc

SEQ ID NO: 2471110 - DNA, 25 bp, Homo sapien
ctcgttcttccacaccctgtcctgg

SEQ ID NO: 2471111 - DNA, 25 bp, Homo sapien
agcttccccgccacgggcacctcgt

SEQ ID NO: 2471112 - DNA, 25 bp, Homo sapien
ccgagcaagggtcgtcggcatccag

SEQ ID NO: 2471113 - DNA, 25 bp, Homo sapien
gatgctgaccgcgtctgttttcctt

SEQ ID NO: 2471114 - DNA, 25 bp, Homo sapien
tggagatgctgaccgcgtctgtttt

SEQ ID NO: 2471115 - DNA, 25 bp, Homo sapien
caaacccgagcaagggtcgtcggca

SEQ ID NO: 2471116 - DNA, 25 bp, Homo sapien
accccgaggactccgagatgcaggc

SEQ ID NO: 2471117 - DNA, 25 bp, Homo sapien
gaccccgaggactccgagatgcagg

SEQ ID NO: 2471118 - DNA, 25 bp, Homo sapien
ggaccccgaggactccgagatgcag

SEQ ID NO: 2471119 - DNA, 25 bp, Homo sapien
gttctgactgggggccgtatcccag

SEQ ID NO: 2471120 - DNA, 25 bp, Homo sapien
tctgactgggggccgtatcccaggc

SEQ ID NO: 2471121 - DNA, 25 bp, Homo sapien
tgactgggggccgtatcccaggccc

SEQ ID NO: 2471122 - DNA, 25 bp, Homo sapien
gactgggggccgtatcccaggccca

SEQ ID NO: 2471123 - DNA, 25 bp, Homo sapien
tcctcttcaccttttcttcctcctc

SEQ ID NO: 2471124 - DNA, 25 bp, Homo sapien
ctgggccttcctcttcaccttttct

SEQ ID NO: 2471125 - DNA, 25 bp, Homo sapien
tcttcaccttttcttcctcctcttc

SEQ ID NO: 2471126 - DNA, 25 bp, Homo sapien
tcaccttttcttcctcctcttcctc

SEQ ID NO: 2471127 - DNA, 25 bp, Homo sapien
acgaagacgtccaggtgtggcccgt

SEQ ID NO: 2471128 - DNA, 25 bp, Homo sapien
tccctagagcgcctcacgaagacgt

SEQ ID NO: 2471129 - DNA, 25 bp, Homo sapien
ggtaactcccctggcctgatatcca

SEQ ID NO: 2471130 - DNA, 25 bp, Homo sapien
gctgtgaccattcccaggtaactcc

SEQ ID NO: 2471131 - DNA, 25 bp, Homo sapien
gagtgtggtgagcacttccctgtcc

SEQ ID NO: 2471132 - DNA, 25 bp, Homo sapien
gagagtgtggtgagcacttccctgt

SEQ ID NO: 2471133 - DNA, 25 bp, Homo sapien
cccagatgaaagtcgagagtgtggt

SEQ ID NO: 2471134 - DNA, 25 bp, Homo sapien
ccccacatgacccagatgaaagtcg

SEQ ID NO: 2471135 - DNA, 25 bp, Homo sapien
ggcgttgatgccgataacaagaatc

SEQ ID NO: 2471136 - DNA, 25 bp, Homo sapien
gttgatgccgataacaagaatcgcc

SEQ ID NO: 2471137 - DNA, 25 bp, Homo sapien
cgttgatgccgataacaagaatcgc

SEQ ID NO: 2471138 - DNA, 25 bp, Homo sapien
aggcgttgatgccgataacaagaat

SEQ ID NO: 2471139 - DNA, 25 bp, Homo sapien
ccccacagatctctctcgggctcac

SEQ ID NO: 2471140 - DNA, 25 bp, Homo sapien
aagccccagtgtgcgcagctcgagc

SEQ ID NO: 2471141 - DNA, 25 bp, Homo sapien
caggcgaccctcatggggaaggtca

SEQ ID NO: 2471142 - DNA, 25 bp, Homo sapien
agactgaagccccagtgtgcgcagc

SEQ ID NO: 2471143 - DNA, 25 bp, Homo sapien
actgaagccccagtgtgcgcagctc

SEQ ID NO: 2471144 - DNA, 25 bp, Homo sapien
gtgcacaaacacattgcaggcaggc

SEQ ID NO: 2471145 - DNA, 25 bp, Homo sapien
tgcacaaacacattgcaggcaggca

SEQ ID NO: 2471146 - DNA, 25 bp, Homo sapien
gcacaaacacattgcaggcaggcat

SEQ ID NO: 2471147 - DNA, 25 bp, Homo sapien
ccctggaatttggcatcccctaggc

SEQ ID NO: 2471148 - DNA, 25 bp, Homo sapien
cctggaatttggcatcccctaggcc

SEQ ID NO: 2471149 - DNA, 25 bp, Homo sapien
cctcaggacttgagactccagttgg

SEQ ID NO: 2471150 - DNA, 25 bp, Homo sapien
ccaagtgtgctttgagagtagggtg

SEQ ID NO: 2471151 - DNA, 25 bp, Homo sapien
ctgcctcaggacttgagactccagt

SEQ ID NO: 2471152 - DNA, 25 bp, Homo sapien
caagtgtgctttgagagtagggtgg

SEQ ID NO: 2471153 - DNA, 25 bp, Homo sapien
caaggcgaaggcacatttccctggg

SEQ ID NO: 2471154 - DNA, 25 bp, Homo sapien
ctggatagaacagcaaggcgaaggc

SEQ ID NO: 2471155 - DNA, 25 bp, Homo sapien
gcaaggcgaaggcacatttccctgg

SEQ ID NO: 2471156 - DNA, 25 bp, Homo sapien
ggcctggatagaacagcaaggcgaa

SEQ ID NO: 2471157 - DNA, 25 bp, Homo sapien
caggagagtggtggcaggtccccca

SEQ ID NO: 2471158 - DNA, 25 bp, Homo sapien
aggagtccggaactgccaggagagt

SEQ ID NO: 2471159 - DNA, 25 bp, Homo sapien
cccaggagtccggaactgccaggag

SEQ ID NO: 2471160 - DNA, 25 bp, Homo sapien
ggttcccaggagtccggaactgcca

SEQ ID NO: 2471161 - DNA, 25 bp, Homo sapien
ctcgttcttccacaccctgtcctgg

SEQ ID NO: 2471162 - DNA, 25 bp, Homo sapien
gcacctcgttcttccacaccctgtc

SEQ ID NO: 2471163 - DNA, 25 bp, Homo sapien
cgttcttccacaccctgtcctggtg

SEQ ID NO: 2471164 - DNA, 25 bp, Homo sapien
agcttccccgccacgggcacctcgt

SEQ ID NO: 2471165 - DNA, 25 bp, Homo sapien
cgtgtcctcggtgtcaggccacggg

SEQ ID NO: 2471166 - DNA, 25 bp, Homo sapien
tacaggcgtgtcctcggtgtcaggc

SEQ ID NO: 2471167 - DNA, 25 bp, Homo sapien
ggcgtgtcctcggtgtcaggccacg

SEQ ID NO: 2471168 - DNA, 25 bp, Homo sapien
caggcgtgtcctcggtgtcaggcca

SEQ ID NO: 2471169 - DNA, 25 bp, Homo sapien
cctggatagaacagcaaggcgaggg

SEQ ID NO: 2471170 - DNA, 25 bp, Homo sapien
gcaaggcgagggcacatttccctgg

SEQ ID NO: 2471171 - DNA, 25 bp, Homo sapien
ggcgagggcacatttccctggccat

SEQ ID NO: 2471172 - DNA, 25 bp, Homo sapien
ggcctggatagaacagcaaggcgag

SEQ ID NO: 2471173 - DNA, 25 bp, Homo sapien
caggagagtggtggcaggtccccca

SEQ ID NO: 2471174 - DNA, 25 bp, Homo sapien
aggagtccggaactgccaggagagt

SEQ ID NO: 2471175 - DNA, 25 bp, Homo sapien
cccaggagtccggaactgccaggag

SEQ ID NO: 2471176 - DNA, 25 bp, Homo sapien
ggttcccaggagtccggaactgcca

SEQ ID NO: 2471177 - DNA, 25 bp, Homo sapien
gcctccacttggaaagttctcagtt

SEQ ID NO: 2471178 - DNA, 25 bp, Homo sapien
caggcttctagaagcatctgggcca

SEQ ID NO: 2471179 - DNA, 25 bp, Homo sapien
ctctgcggcctccacttggaaagtt

SEQ ID NO: 2471180 - DNA, 25 bp, Homo sapien
tccaggcttctagaagcatctgggc

SEQ ID NO: 2471181 - DNA, 25 bp, Homo sapien
gagatcggctttcgctgcacccagc

SEQ ID NO: 2471182 - DNA, 25 bp, Homo sapien
gtgagatcggctttcgctgcaccca

SEQ ID NO: 2471183 - DNA, 25 bp, Homo sapien
tgagatcggctttcgctgcacccag

SEQ ID NO: 2471184 - DNA, 25 bp, Homo sapien
tagagggcccttggttccgccatta

SEQ ID NO: 2471185 - DNA, 25 bp, Homo sapien
agggcccttggttccgccattatga

SEQ ID NO: 2471186 - DNA, 25 bp, Homo sapien
gatttcagacagagctgctgggtcc

SEQ ID NO: 2471187 - DNA, 25 bp, Homo sapien
cgtagagggcccttggttccgccat

SEQ ID NO: 2471188 - DNA, 25 bp, Homo sapien
agcttccccgccacgggcacctcgt

SEQ ID NO: 2471189 - DNA, 25 bp, Homo sapien
ctcgttcttccacaccctgtcctgg

SEQ ID NO: 2471190 - DNA, 25 bp, Homo sapien
gcacctcgttcttccacaccctgtc

SEQ ID NO: 2471191 - DNA, 25 bp, Homo sapien
cgttcttccacaccctgtcctggtg

SEQ ID NO: 2471192 - DNA, 25 bp, Homo sapien
acccgagcaagggtcgtcggcatcc

SEQ ID NO: 2471193 - DNA, 25 bp, Homo sapien
ccgagcaagggtcgtcggcatccag

SEQ ID NO: 2471194 - DNA, 25 bp, Homo sapien
caaacccgagcaagggtcgtcggca

SEQ ID NO: 2471195 - DNA, 25 bp, Homo sapien
aaacccgagcaagggtcgtcggcat

SEQ ID NO: 2471196 - DNA, 25 bp, Homo sapien
agaccccgaggactccagagacgca

SEQ ID NO: 2471197 - DNA, 25 bp, Homo sapien
accccgaggactccagagacgcagg

SEQ ID NO: 2471198 - DNA, 25 bp, Homo sapien
ccccgaggactccagagacgcaggc

SEQ ID NO: 2471199 - DNA, 25 bp, Homo sapien
gagaccccgaggactccagagacgc

SEQ ID NO: 2471200 - DNA, 25 bp, Homo sapien
gttctgactgggggccgtatcccag

SEQ ID NO: 2471201 - DNA, 25 bp, Homo sapien
gactgggggccgtatcccaggccca

SEQ ID NO: 2471202 - DNA, 25 bp, Homo sapien
tgactgggggccgtatcccaggccc

SEQ ID NO: 2471203 - DNA, 25 bp, Homo sapien
tctgactgggggccgtatcccaggc

SEQ ID NO: 2471204 - DNA, 25 bp, Homo sapien
tcctcttcaccttttcttcctcctc

SEQ ID NO: 2471205 - DNA, 25 bp, Homo sapien
ctgggccttcctcttcaccttttct

SEQ ID NO: 2471206 - DNA, 25 bp, Homo sapien
tcttcaccttttcttcctcctcttc

SEQ ID NO: 2471207 - DNA, 25 bp, Homo sapien
tcaccttttcttcctcctcttcctc

SEQ ID NO: 2471208 - DNA, 25 bp, Homo sapien
ggtaactcccctggcctgatatcca

SEQ ID NO: 2471209 - DNA, 25 bp, Homo sapien
tccctagagcgcctcacgaagacgt

SEQ ID NO: 2471210 - DNA, 25 bp, Homo sapien
gctgtgaccattcccaggtaactcc

SEQ ID NO: 2471211 - DNA, 25 bp, Homo sapien
acgaagacgtccaggtgtggcccgt

SEQ ID NO: 2471212 - DNA, 25 bp, Homo sapien
gagtgtggtgagcacttccctgtcc

SEQ ID NO: 2471213 - DNA, 25 bp, Homo sapien
gagagtgtggtgagcacttccctgt

SEQ ID NO: 2471214 - DNA, 25 bp, Homo sapien
cccagatgaaagtcgagagtgtggt

SEQ ID NO: 2471215 - DNA, 25 bp, Homo sapien
ccccacatgacccagatgaaagtcg

SEQ ID NO: 2471216 - DNA, 25 bp, Homo sapien
ggcgttgatgccgataacaagaatc

SEQ ID NO: 2471217 - DNA, 25 bp, Homo sapien
cgttgatgccgataacaagaatcgc

SEQ ID NO: 2471218 - DNA, 25 bp, Homo sapien
gttgatgccgataacaagaatcgcc

SEQ ID NO: 2471219 - DNA, 25 bp, Homo sapien
aggcgttgatgccgataacaagaat

SEQ ID NO: 2471220 - DNA, 25 bp, Homo sapien
ccccacagatctctctcgggctcac

SEQ ID NO: 2471221 - DNA, 25 bp, Homo sapien
ccatgggctgggagttggtttcctt

SEQ ID NO: 2471222 - DNA, 25 bp, Homo sapien
ctgggacgtcgggttctccatgggc

SEQ ID NO: 2471223 - DNA, 25 bp, Homo sapien
ggacgtcgggttctccatgggctgg

SEQ ID NO: 2471224 - DNA, 25 bp, Homo sapien
catgggctgggagttggtttccttt

SEQ ID NO: 2471225 - DNA, 25 bp, Homo sapien
agggtcacatccgtctcccagaagc

SEQ ID NO: 2471226 - DNA, 25 bp, Homo sapien
tccatcctggcattacactggcctg

SEQ ID NO: 2471227 - DNA, 25 bp, Homo sapien
ttcctcctccgtgcattaacaatgg

SEQ ID NO: 2471228 - DNA, 25 bp, Homo sapien
ccaggtctaacagtcaggttcctcc

SEQ ID NO: 2471229 - DNA, 25 bp, Homo sapien
gaacatgcggtaacacctcattctt

SEQ ID NO: 2471230 - DNA, 25 bp, Homo sapien
catgcggtaacacctcattctttag

SEQ ID NO: 2471231 - DNA, 25 bp, Homo sapien
tgagaacatgcggtaacacctcatt

SEQ ID NO: 2471232 - DNA, 25 bp, Homo sapien
gagaacatgcggtaacacctcattc

SEQ ID NO: 2471233 - DNA, 25 bp, Homo sapien
cttggacttgccagttgtagctgct

SEQ ID NO: 2471234 - DNA, 25 bp, Homo sapien
ttgtagctgctggaatgaggtcttt

SEQ ID NO: 2471235 - DNA, 25 bp, Homo sapien
ctttgtccagtacatccagaacgtc

SEQ ID NO: 2471236 - DNA, 25 bp, Homo sapien
gaggtctttgtccagtacatccaga

SEQ ID NO: 2471237 - DNA, 25 bp, Homo sapien
ttcagactctagattctgctgagat

SEQ ID NO: 2471238 - DNA, 25 bp, Homo sapien
tttcagactctagattctgctgaga

SEQ ID NO: 2471239 - DNA, 25 bp, Homo sapien
gatttcagactctagattctgctga

SEQ ID NO: 2471240 - DNA, 25 bp, Homo sapien
ggatttcagactctagattctgctg

SEQ ID NO: 2471241 - DNA, 25 bp, Homo sapien
ctagcatggtctcccaaagctgcag

SEQ ID NO: 2471242 - DNA, 25 bp, Homo sapien
gcccgctggcgtgagctggcatcta

SEQ ID NO: 2471243 - DNA, 25 bp, Homo sapien
tcttctcccatagcacaaaactggg

SEQ ID NO: 2471244 - DNA, 25 bp, Homo sapien
cgtgagctggcatctacactagcat

SEQ ID NO: 2471245 - DNA, 25 bp, Homo sapien
atgtcatcactgtgcagggagcatg

SEQ ID NO: 2471246 - DNA, 25 bp, Homo sapien
catcactgtgcagggagcatgctaa

SEQ ID NO: 2471247 - DNA, 25 bp, Homo sapien
tgcatgtcatcactgtgcagggagc

SEQ ID NO: 2471248 - DNA, 25 bp, Homo sapien
tcactgtgcagggagcatgctaatc

SEQ ID NO: 2471249 - DNA, 25 bp, Homo sapien
tttccacctgccaagggtgaagggc

SEQ ID NO: 2471250 - DNA, 25 bp, Homo sapien
cggccccagcaggttgaatggtttc

SEQ ID NO: 2471251 - DNA, 25 bp, Homo sapien
ggccccagcaggttgaatggtttcc

SEQ ID NO: 2471252 - DNA, 25 bp, Homo sapien
aatggtttccacctgccaagggtga

SEQ ID NO: 2471253 - DNA, 25 bp, Homo sapien
taatgatgtcctctcgctcttgtgc

SEQ ID NO: 2471254 - DNA, 25 bp, Homo sapien
atgatgtcctctcgctcttgtgccc

SEQ ID NO: 2471255 - DNA, 25 bp, Homo sapien
cctctcgctcttgtgcccaccaact

SEQ ID NO: 2471256 - DNA, 25 bp, Homo sapien
tcctctcgctcttgtgcccaccaac

SEQ ID NO: 2471257 - DNA, 25 bp, Homo sapien
ccccaaatgatcgacgttgttgttg

SEQ ID NO: 2471258 - DNA, 25 bp, Homo sapien
caaatgatcgacgttgttgttgtag

SEQ ID NO: 2471259 - DNA, 25 bp, Homo sapien
aatccccaaatgatcgacgttgttg

SEQ ID NO: 2471260 - DNA, 25 bp, Homo sapien
tgtacaatccccaaatgatcgacgt

SEQ ID NO: 2471261 - DNA, 25 bp, Homo sapien
cttcgcctcccgcgcagtcagagga

SEQ ID NO: 2471262 - DNA, 25 bp, Homo sapien
gcagtcagaggaggcagctccgtct

SEQ ID NO: 2471263 - DNA, 25 bp, Homo sapien
agtcagaggaggcagctccgtctca

SEQ ID NO: 2471264 - DNA, 25 bp, Homo sapien
tcgcctcccgcgcagtcagaggagg

SEQ ID NO: 2471265 - DNA, 25 bp, Homo sapien
gacttcgctaaaacctagactgaga

SEQ ID NO: 2471266 - DNA, 25 bp, Homo sapien
cacttacatctaaccaatgagccaa

SEQ ID NO: 2471267 - DNA, 25 bp, Homo sapien
ctgagaatttatgcatcaatggtac

SEQ ID NO: 2471268 - DNA, 25 bp, Homo sapien
cgtaagacttgaactaatatcacag

SEQ ID NO: 2471269 - DNA, 25 bp, Homo sapien
ttcatcacaatctgattagtcgcct

SEQ ID NO: 2471270 - DNA, 25 bp, Homo sapien
caatctgattagtcgcctgcctcac

SEQ ID NO: 2471271 - DNA, 25 bp, Homo sapien
gaagctgtaataatatcaatatcag

SEQ ID NO: 2471272 - DNA, 25 bp, Homo sapien
ccttctggtgcatatgaagctgtaa

SEQ ID NO: 2471273 - DNA, 25 bp, Homo sapien
actcatacaacttcccattctctta

SEQ ID NO: 2471274 - DNA, 25 bp, Homo sapien
aactcatacaacttcccattctctt

SEQ ID NO: 2471275 - DNA, 25 bp, Homo sapien
tgactgcacatatcacaaaaaaatg

SEQ ID NO: 2471276 - DNA, 25 bp, Homo sapien
gactgcacatatcacaaaaaaatgg

SEQ ID NO: 2471277 - DNA, 25 bp, Homo sapien
actgcacatatcacaaaaaaatggc

SEQ ID NO: 2471278 - DNA, 25 bp, Homo sapien
aaaacagcagtcactaaagcaatcc

SEQ ID NO: 2471279 - DNA, 25 bp, Homo sapien
taaaactattctacgctcatatact

SEQ ID NO: 2471280 - DNA, 25 bp, Homo sapien
gcaataagccaactaaattcctaaa

SEQ ID NO: 2471281 - DNA, 25 bp, Homo sapien
gcaatccatatcaccttaaggctat

SEQ ID NO: 2471282 - DNA, 25 bp, Homo sapien
atgattgatgagttataaacaccac

SEQ ID NO: 2471283 - DNA, 25 bp, Homo sapien
tatgattgatgagttataaacacca

SEQ ID NO: 2471284 - DNA, 25 bp, Homo sapien
actggctatgattgatgagttataa

SEQ ID NO: 2471285 - DNA, 25 bp, Homo sapien
atctgtaactggctatgattgatga

SEQ ID NO: 2471286 - DNA, 25 bp, Homo sapien
tgatatcctaccaggaaagatgaac

SEQ ID NO: 2471287 - DNA, 25 bp, Homo sapien
tctatctaggtagcacagtgagact

SEQ ID NO: 2471288 - DNA, 25 bp, Homo sapien
aaagctcccctagatactagcaaac

SEQ ID NO: 2471289 - DNA, 25 bp, Homo sapien
gctgaggctataggccccagggaca

SEQ ID NO: 2471290 - DNA, 25 bp, Homo sapien
tgtacccggtccaggacttcactgg

SEQ ID NO: 2471291 - DNA, 25 bp, Homo sapien
aactcaggaaaacacgtgtactggt

SEQ ID NO: 2471292 - DNA, 25 bp, Homo sapien
ttcactggaccgtcacgactgaagc

SEQ ID NO: 2471293 - DNA, 25 bp, Homo sapien
gatgaagaggtgcacagaacaaggc

SEQ ID NO: 2471294 - DNA, 25 bp, Homo sapien
tgcagagtactagggaaagacaagg

SEQ ID NO: 2471295 - DNA, 25 bp, Homo sapien
ggaaagacaaggtgactttttcatc

SEQ ID NO: 2471296 - DNA, 25 bp, Homo sapien
gaaagacaaggtgactttttcatct

SEQ ID NO: 2471297 - DNA, 25 bp, Homo sapien
ttgcagagtactagggaaagacaag

SEQ ID NO: 2471298 - DNA, 25 bp, Homo sapien
tgtctgttaaatgctaccccagtga

SEQ ID NO: 2471299 - DNA, 25 bp, Homo sapien
tgtgagtagacatcaagtataccac

SEQ ID NO: 2471300 - DNA, 25 bp, Homo sapien
ctttgggcttggtcatgctacttgc

SEQ ID NO: 2471301 - DNA, 25 bp, Homo sapien
gaaacttttcgcaaatgtctgttaa

SEQ ID NO: 2471302 - DNA, 25 bp, Homo sapien
tttttaagctagtctctctcaatgg

SEQ ID NO: 2471303 - DNA, 25 bp, Homo sapien
tcagttcaaggaaatgttcctgtct

SEQ ID NO: 2471304 - DNA, 25 bp, Homo sapien
caatggtgtacctttgcaaactgaa

SEQ ID NO: 2471305 - DNA, 25 bp, Homo sapien
aaggctcctgctctatcagttcaag

SEQ ID NO: 2471306 - DNA, 25 bp, Homo sapien
taagtctaggactattctgattcct

SEQ ID NO: 2471307 - DNA, 25 bp, Homo sapien
ttttctatgaccttgcaaatctgaa

SEQ ID NO: 2471308 - DNA, 25 bp, Homo sapien
gctaagcatgcaatcttaggttgaa

SEQ ID NO: 2471309 - DNA, 25 bp, Homo sapien
gagtctaagtttccactgttcctaa

SEQ ID NO: 2471310 - DNA, 25 bp, Homo sapien
atctccaaggccatcaaaccataac

SEQ ID NO: 2471311 - DNA, 25 bp, Homo sapien
ccacttccaaaaagtggcatactaa

SEQ ID NO: 2471312 - DNA, 25 bp, Homo sapien
gatattgacagtgaccacttccaaa

SEQ ID NO: 2471313 - DNA, 25 bp, Homo sapien
accataacaagatattgacagtgac

SEQ ID NO: 2471314 - DNA, 25 bp, Homo sapien
gttacagcagcatagcgcacctctc

SEQ ID NO: 2471315 - DNA, 25 bp, Homo sapien
ttgtcattcagctctccaacaaaat

SEQ ID NO: 2471316 - DNA, 25 bp, Homo sapien
cagcatagcgcacctctccagaagg

SEQ ID NO: 2471317 - DNA, 25 bp, Homo sapien
tgtcattcagctctccaacaaaatc

SEQ ID NO: 2471318 - DNA, 25 bp, Homo sapien
ggaaccactggtgtctccataagaa

SEQ ID NO: 2471319 - DNA, 25 bp, Homo sapien
gagctgggcctattactcatggcaa

SEQ ID NO: 2471320 - DNA, 25 bp, Homo sapien
tctgtgacccctcctcttgaaaaag

SEQ ID NO: 2471321 - DNA, 25 bp, Homo sapien
tgagtgctgcaagaagtcctatgag

SEQ ID NO: 2471322 - DNA, 25 bp, Homo sapien
ccaggcaacaagctaggcattaact

SEQ ID NO: 2471323 - DNA, 25 bp, Homo sapien
gttatttcataaagcagtcgccatt

SEQ ID NO: 2471324 - DNA, 25 bp, Homo sapien
cagagcacagaacagtaaagagtat

SEQ ID NO: 2471325 - DNA, 25 bp, Homo sapien
ccagcaaatatccaggaacagtgtc

SEQ ID NO: 2471326 - DNA, 25 bp, Homo sapien
tttaggaacaaccaatgagatatca

SEQ ID NO: 2471327 - DNA, 25 bp, Homo sapien
catgtttgataaagctactctgtct

SEQ ID NO: 2471328 - DNA, 25 bp, Homo sapien
ccaatgagatatcaaaagttgcttt

SEQ ID NO: 2471329 - DNA, 25 bp, Homo sapien
gctactctgtctttaggaacaacca

SEQ ID NO: 2471330 - DNA, 25 bp, Homo sapien
gttcctataatataccagcactgtg

SEQ ID NO: 2471331 - DNA, 25 bp, Homo sapien
tatcccatctaatcagcaaactaaa

SEQ ID NO: 2471332 - DNA, 25 bp, Homo sapien
ggtaggtggtttcatattatcccat

SEQ ID NO: 2471333 - DNA, 25 bp, Homo sapien
gcaaactaaatctgctaaagcctat

SEQ ID NO: 2471334 - DNA, 25 bp, Homo sapien
taacaggtgtgcgggcaaacttcac

SEQ ID NO: 2471335 - DNA, 25 bp, Homo sapien
tacaaagtcatattcacccacaaca

SEQ ID NO: 2471336 - DNA, 25 bp, Homo sapien
taaattttcatcatcagggtatggt

SEQ ID NO: 2471337 - DNA, 25 bp, Homo sapien
gcgggcaaacttcacttccactaaa

SEQ ID NO: 2471338 - DNA, 25 bp, Homo sapien
taaaccaagtagcacaactttcaga

SEQ ID NO: 2471339 - DNA, 25 bp, Homo sapien
caacccattccctagagaaattcca

SEQ ID NO: 2471340 - DNA, 25 bp, Homo sapien
cctggagttatggactgctggaaca

SEQ ID NO: 2471341 - DNA, 25 bp, Homo sapien
gaaacaccaaggttggcatttccta

SEQ ID NO: 2471342 - DNA, 25 bp, Homo sapien
gataaggaacattgaagtagtcctt

SEQ ID NO: 2471343 - DNA, 25 bp, Homo sapien
caaagtctgcaatagcaatgagatc

SEQ ID NO: 2471344 - DNA, 25 bp, Homo sapien
gagatcaattttaggtagaggataa

SEQ ID NO: 2471345 - DNA, 25 bp, Homo sapien
taaaaaggcaaggttttagcagcaa

SEQ ID NO: 2471346 - DNA, 25 bp, Homo sapien
atactcttgcatcaaaagtcacaaa

SEQ ID NO: 2471347 - DNA, 25 bp, Homo sapien
tactcttgcatcaaaagtcacaaaa

SEQ ID NO: 2471348 - DNA, 25 bp, Homo sapien
ctataagtaacaaggtcccagttct

SEQ ID NO: 2471349 - DNA, 25 bp, Homo sapien
taagtaacaaggtcccagttctcca

SEQ ID NO: 2471350 - DNA, 25 bp, Homo sapien
taacaaggtcccagttctccatggc

SEQ ID NO: 2471351 - DNA, 25 bp, Homo sapien
acaaggtcccagttctccatggcac

SEQ ID NO: 2471352 - DNA, 25 bp, Homo sapien
tagaatagctgcctgaaattttggg

SEQ ID NO: 2471353 - DNA, 25 bp, Homo sapien
tctaagggattagcgattactgtgc

SEQ ID NO: 2471354 - DNA, 25 bp, Homo sapien
tgagccggccgttcaacacttagct

SEQ ID NO: 2471355 - DNA, 25 bp, Homo sapien
tagctgtgaaactactggcaggaaa

SEQ ID NO: 2471356 - DNA, 25 bp, Homo sapien
tcagacagtaagtcagatggacaag

SEQ ID NO: 2471357 - DNA, 25 bp, Homo sapien
ttaaacaataaaagtgggcatgcat

SEQ ID NO: 2471358 - DNA, 25 bp, Homo sapien
ggcatgcataagttgggaagattca

SEQ ID NO: 2471359 - DNA, 25 bp, Homo sapien
ttcacgaagattaaagactacccca

SEQ ID NO: 2471360 - DNA, 25 bp, Homo sapien
ttttttggatcaataagcaatgcag

SEQ ID NO: 2471361 - DNA, 25 bp, Homo sapien
tggatcaataagcaatgcagtctcc

SEQ ID NO: 2471362 - DNA, 25 bp, Homo sapien
gaagaacaggaattttttggatcaa

SEQ ID NO: 2471363 - DNA, 25 bp, Homo sapien
ttttggatcaataagcaatgcagtc

SEQ ID NO: 2471364 - DNA, 25 bp, Homo sapien
catatgcccttgttcaatgcagaga

SEQ ID NO: 2471365 - DNA, 25 bp, Homo sapien
tgaataaagactgtccatatgccct

SEQ ID NO: 2471366 - DNA, 25 bp, Homo sapien
ataaggatttcaacagaacagctgg

SEQ ID NO: 2471367 - DNA, 25 bp, Homo sapien
gtgctcccaagctctaacacagttg

SEQ ID NO: 2471368 - DNA, 25 bp, Homo sapien
agcccagaggtcaagactgtaatga

SEQ ID NO: 2471369 - DNA, 25 bp, Homo sapien
gcccagaggtcaagactgtaatgaa

SEQ ID NO: 2471370 - DNA, 25 bp, Homo sapien
cccagaggtcaagactgtaatgaac

SEQ ID NO: 2471371 - DNA, 25 bp, Homo sapien
gatgaagctgcactgacccatgatt

SEQ ID NO: 2471372 - DNA, 25 bp, Homo sapien
ggaagatgaagctgcactgacccat

SEQ ID NO: 2471373 - DNA, 25 bp, Homo sapien
aagctgcactgacccatgattgtgc

SEQ ID NO: 2471374 - DNA, 25 bp, Homo sapien
aggattacataagcccaggaagatg

SEQ ID NO: 2471375 - DNA, 25 bp, Homo sapien
gattgtcattctactaatctaaaac

SEQ ID NO: 2471376 - DNA, 25 bp, Homo sapien
actcacatgtcccttccactatatt

SEQ ID NO: 2471377 - DNA, 25 bp, Homo sapien
tctactaatctaaaacactcacatg

SEQ ID NO: 2471378 - DNA, 25 bp, Homo sapien
aagagagaagactaaaagagatgtc

SEQ ID NO: 2471379 - DNA, 25 bp, Homo sapien
tatctaaggcgtcaagctcctgggc

SEQ ID NO: 2471380 - DNA, 25 bp, Homo sapien
ctcctgggcacgggtgtaatcagca

SEQ ID NO: 2471381 - DNA, 25 bp, Homo sapien
agcagtggtctacacacagatattc

SEQ ID NO: 2471382 - DNA, 25 bp, Homo sapien
ctctgggaagcagtggtctacacac

SEQ ID NO: 2471383 - DNA, 25 bp, Homo sapien
tgaattacaattatatgggagccta

SEQ ID NO: 2471384 - DNA, 25 bp, Homo sapien
tcccttagagcttgggttccagtcc

SEQ ID NO: 2471385 - DNA, 25 bp, Homo sapien
cataatgtataacgatggtcctcaa

SEQ ID NO: 2471386 - DNA, 25 bp, Homo sapien
actgaagtagggataggctaagtca

SEQ ID NO: 2471387 - DNA, 25 bp, Homo sapien
gtgattcagggttatgacaggaagc

SEQ ID NO: 2471388 - DNA, 25 bp, Homo sapien
tgtgattcagggttatgacaggaag

SEQ ID NO: 2471389 - DNA, 25 bp, Homo sapien
cccaatgtagtcatgcagcattcgg

SEQ ID NO: 2471390 - DNA, 25 bp, Homo sapien
cagatgcacctttgctatatgatat

SEQ ID NO: 2471391 - DNA, 25 bp, Homo sapien
gcagcattcggatgacagatgcacc

SEQ ID NO: 2471392 - DNA, 25 bp, Homo sapien
aacctcagatggatggcccacactg

SEQ ID NO: 2471393 - DNA, 25 bp, Homo sapien
cttaatccaaataaagtgagacttt

SEQ ID NO: 2471394 - DNA, 25 bp, Homo sapien
tcatgcaaaactcttatgatttcac

SEQ ID NO: 2471395 - DNA, 25 bp, Homo sapien
catctaagagaccacagtagtcaac

SEQ ID NO: 2471396 - DNA, 25 bp, Homo sapien
aaaactcttatgatttcaccatgaa

SEQ ID NO: 2471397 - DNA, 25 bp, Homo sapien
tggaacttggttaaatacatgttca

SEQ ID NO: 2471398 - DNA, 25 bp, Homo sapien
tgcggcagcattcttttgttggaac

SEQ ID NO: 2471399 - DNA, 25 bp, Homo sapien
ttgttggaacttggttaaatacatg

SEQ ID NO: 2471400 - DNA, 25 bp, Homo sapien
ctgcggcagcattcttttgttggaa

SEQ ID NO: 2471401 - DNA, 25 bp, Homo sapien
aataaaatgtcccagcctggataga

SEQ ID NO: 2471402 - DNA, 25 bp, Homo sapien
cctggatagagtgacaatactttct

SEQ ID NO: 2471403 - DNA, 25 bp, Homo sapien
gaccttgagttaagtattcagaaca

SEQ ID NO: 2471404 - DNA, 25 bp, Homo sapien
tctccatttctatctcaagctatta

SEQ ID NO: 2471405 - DNA, 25 bp, Homo sapien
ggtgccacgattgctcactgtaacc

SEQ ID NO: 2471406 - DNA, 25 bp, Homo sapien
agtggtgccacgattgctcactgta

SEQ ID NO: 2471407 - DNA, 25 bp, Homo sapien
agtgcagtggtgccacgattgctca

SEQ ID NO: 2471408 - DNA, 25 bp, Homo sapien
gctcaagtgacccttcccacttcag

SEQ ID NO: 2471409 - DNA, 25 bp, Homo sapien
ctggagtctcaagtcccaagcaggg

SEQ ID NO: 2471410 - DNA, 25 bp, Homo sapien
ctgaaccgctctcgccgggctccca

SEQ ID NO: 2471411 - DNA, 25 bp, Homo sapien
ggagaacacctgaaccgctctcgcc

SEQ ID NO: 2471412 - DNA, 25 bp, Homo sapien
acacctgaaccgctctcgccgggct

SEQ ID NO: 2471413 - DNA, 25 bp, Homo sapien
taatgatgtcctctcgctcttgtgc

SEQ ID NO: 2471414 - DNA, 25 bp, Homo sapien
atgatgtcctctcgctcttgtgccc

SEQ ID NO: 2471415 - DNA, 25 bp, Homo sapien
cctctcgctcttgtgcccaccaact

SEQ ID NO: 2471416 - DNA, 25 bp, Homo sapien
tcctctcgctcttgtgcccaccaac

SEQ ID NO: 2471417 - DNA, 25 bp, Homo sapien
caaatgatcgacgttgttgttgtag

SEQ ID NO: 2471418 - DNA, 25 bp, Homo sapien
ccccaaatgatcgacgttgttgttg

SEQ ID NO: 2471419 - DNA, 25 bp, Homo sapien
tgtacaatccccaaatgatcgacgt

SEQ ID NO: 2471420 - DNA, 25 bp, Homo sapien
aatccccaaatgatcgacgttgttg

SEQ ID NO: 2471421 - DNA, 25 bp, Homo sapien
tcacgggacagtgagggctgtagct

SEQ ID NO: 2471422 - DNA, 25 bp, Homo sapien
ctgcccgtcctggactcgaggtggt

SEQ ID NO: 2471423 - DNA, 25 bp, Homo sapien
ctgagaaaggttagccctgagatgg

SEQ ID NO: 2471424 - DNA, 25 bp, Homo sapien
tggactcgaggtggtgctttctgct

SEQ ID NO: 2471425 - DNA, 25 bp, Homo sapien
cagggtgggcgaccgggccctgaca

SEQ ID NO: 2471426 - DNA, 25 bp, Homo sapien
gcagtcagaggaggcagctccgtct

SEQ ID NO: 2471427 - DNA, 25 bp, Homo sapien
tcgcctcccgcgcagtcagaggagg

SEQ ID NO: 2471428 - DNA, 25 bp, Homo sapien
agtcagaggaggcagctccgtctca

SEQ ID NO: 2471429 - DNA, 25 bp, Homo sapien
cttcgcctcccgcgcagtcagagga

SEQ ID NO: 2471430 - DNA, 25 bp, Homo sapien
agcccctccacgcatcaggctctta

SEQ ID NO: 2471431 - DNA, 25 bp, Homo sapien
cagtccctacgtccctggaccagcc

SEQ ID NO: 2471432 - DNA, 25 bp, Homo sapien
tgaccacccgcccagtccctacgtc

SEQ ID NO: 2471433 - DNA, 25 bp, Homo sapien
gcccctccacgcatcaggctcttac

SEQ ID NO: 2471434 - DNA, 25 bp, Homo sapien
ccatgggctgggagttggtttcctt

SEQ ID NO: 2471435 - DNA, 25 bp, Homo sapien
ctgggacgtcgggttctccatgggc

SEQ ID NO: 2471436 - DNA, 25 bp, Homo sapien
ggacgtcgggttctccatgggctgg

SEQ ID NO: 2471437 - DNA, 25 bp, Homo sapien
catgggctgggagttggtttccttt

SEQ ID NO: 2471438 - DNA, 25 bp, Homo sapien
tctgcaaggaaccacggaagagctg

SEQ ID NO: 2471439 - DNA, 25 bp, Homo sapien
tggggtctgcaaggaaccacggaag

SEQ ID NO: 2471440 - DNA, 25 bp, Homo sapien
gggtctgcaaggaaccacggaagag

SEQ ID NO: 2471441 - DNA, 25 bp, Homo sapien
tgcaaggaaccacggaagagctgcc

SEQ ID NO: 2471442 - DNA, 25 bp, Homo sapien
gaagggccatagaggtgttttctgg

SEQ ID NO: 2471443 - DNA, 25 bp, Homo sapien
ggaagggccatagaggtgttttctg

SEQ ID NO: 2471444 - DNA, 25 bp, Homo sapien
cacagggaagggccatagaggtgtt

SEQ ID NO: 2471445 - DNA, 25 bp, Homo sapien
cagggaagggccatagaggtgtttt

SEQ ID NO: 2471446 - DNA, 25 bp, Homo sapien
gactgagtgcgcaagagctcacttt

SEQ ID NO: 2471447 - DNA, 25 bp, Homo sapien
aatagattcctagacatggaccctc

SEQ ID NO: 2471448 - DNA, 25 bp, Homo sapien
tactctcatcgctcagtagctcagg

SEQ ID NO: 2471449 - DNA, 25 bp, Homo sapien
tggcttagcgcatatctctcttgaa

SEQ ID NO: 2471450 - DNA, 25 bp, Homo sapien
tactttgagacgagcagccagtgct

SEQ ID NO: 2471451 - DNA, 25 bp, Homo sapien
caagcccagtgtcatgtaagtgcca

SEQ ID NO: 2471452 - DNA, 25 bp, Homo sapien
gagccttgggaacatgcgtgtgacc

SEQ ID NO: 2471453 - DNA, 25 bp, Homo sapien
gagtgggtccagaaatacgtcagtg

SEQ ID NO: 2471454 - DNA, 25 bp, Homo sapien
gaatccctgctctgctagtcatcag

SEQ ID NO: 2471455 - DNA, 25 bp, Homo sapien
catggtctggagttggtttacaatc

SEQ ID NO: 2471456 - DNA, 25 bp, Homo sapien
tagtcatcagctttacggccttcgg

SEQ ID NO: 2471457 - DNA, 25 bp, Homo sapien
ggaaatcagcacatggtgatcactc

SEQ ID NO: 2471458 - DNA, 25 bp, Homo sapien
catgattccccgcactgtggactgg

SEQ ID NO: 2471459 - DNA, 25 bp, Homo sapien
ccagaacgctgggacacaaatcaaa

SEQ ID NO: 2471460 - DNA, 25 bp, Homo sapien
gcctcgcagaggctgaaatgagcca

SEQ ID NO: 2471461 - DNA, 25 bp, Homo sapien
catgctgaagggtccacggtgttga

SEQ ID NO: 2471462 - DNA, 25 bp, Homo sapien
ggaaagcaatgctccgcactggaga

SEQ ID NO: 2471463 - DNA, 25 bp, Homo sapien
ccaaagctgggccaaacaggatgtc

SEQ ID NO: 2471464 - DNA, 25 bp, Homo sapien
gaccacgcagaccacatatgagaaa

SEQ ID NO: 2471465 - DNA, 25 bp, Homo sapien
taacaaggactcaggacgggaaaca

SEQ ID NO: 2471466 - DNA, 25 bp, Homo sapien
ttgtgaagcatcttccttcaaattg

SEQ ID NO: 2471467 - DNA, 25 bp, Homo sapien
tccttgtgaagcatcttccttcaaa

SEQ ID NO: 2471468 - DNA, 25 bp, Homo sapien
gtgaagcatcttccttcaaattgtt

SEQ ID NO: 2471469 - DNA, 25 bp, Homo sapien
attccttgtgaagcatcttccttca

SEQ ID NO: 2471470 - DNA, 25 bp, Homo sapien
tctctttatagggactctgaggcct

SEQ ID NO: 2471471 - DNA, 25 bp, Homo sapien
ctttatagggactctgaggcctagg

SEQ ID NO: 2471472 - DNA, 25 bp, Homo sapien
ctctgaggcctaggacaaatgtggg

SEQ ID NO: 2471473 - DNA, 25 bp, Homo sapien
tagggactctgaggcctaggacaaa

SEQ ID NO: 2471474 - DNA, 25 bp, Homo sapien
gacaggacagtcacgcagagcttca

SEQ ID NO: 2471475 - DNA, 25 bp, Homo sapien
agacaggacagtcacgcagagcttc

SEQ ID NO: 2471476 - DNA, 25 bp, Homo sapien
acaggacagtcacgcagagcttcat

SEQ ID NO: 2471477 - DNA, 25 bp, Homo sapien
gagacaggacagtcacgcagagctt

SEQ ID NO: 2471478 - DNA, 25 bp, Homo sapien
tagaaaaaaggactctgcctacacc

SEQ ID NO: 2471479 - DNA, 25 bp, Homo sapien
tacaccttgactcgaaatagcagct

SEQ ID NO: 2471480 - DNA, 25 bp, Homo sapien
tacatttagcagcagactacatggc

SEQ ID NO: 2471481 - DNA, 25 bp, Homo sapien
cattcccacctaacatgagcaggag

SEQ ID NO: 2471482 - DNA, 25 bp, Homo sapien
taccacaaagttgcgaggaagcttc

SEQ ID NO: 2471483 - DNA, 25 bp, Homo sapien
atctaccacaaagttgcgaggaagc

SEQ ID NO: 2471484 - DNA, 25 bp, Homo sapien
ggtctcatagtaatctaccacaaag

SEQ ID NO: 2471485 - DNA, 25 bp, Homo sapien
cacaaagttgcgaggaagcttcctc

SEQ ID NO: 2471486 - DNA, 25 bp, Homo sapien
gagcagacagattagaatcccatgg

SEQ ID NO: 2471487 - DNA, 25 bp, Homo sapien
agacagattagaatcccatgggacc

SEQ ID NO: 2471488 - DNA, 25 bp, Homo sapien
gcagacagattagaatcccatggga

SEQ ID NO: 2471489 - DNA, 25 bp, Homo sapien
cagacagattagaatcccatgggac

SEQ ID NO: 2471490 - DNA, 25 bp, Homo sapien
tggggtcagcgcagacttgcttgcc

SEQ ID NO: 2471491 - DNA, 25 bp, Homo sapien
ggggtcagcgcagacttgcttgcct

SEQ ID NO: 2471492 - DNA, 25 bp, Homo sapien
cagttccaggtcatacacgtactcc

SEQ ID NO: 2471493 - DNA, 25 bp, Homo sapien
tcagttccaggtcatacacgtactc

SEQ ID NO: 2471494 - DNA, 25 bp, Homo sapien
ggacacttatcctttggctaaacta

SEQ ID NO: 2471495 - DNA, 25 bp, Homo sapien
ggaactgcggagaggagtcctgagt

SEQ ID NO: 2471496 - DNA, 25 bp, Homo sapien
ttatccatgtatttgcaacagcaga

SEQ ID NO: 2471497 - DNA, 25 bp, Homo sapien
tgaccttccctgaagacttcctgtc

SEQ ID NO: 2471498 - DNA, 25 bp, Homo sapien
gaatctgaagtaagtttccactggg

SEQ ID NO: 2471499 - DNA, 25 bp, Homo sapien
ttgtagctgctggaatgaggtcttt

SEQ ID NO: 2471500 - DNA, 25 bp, Homo sapien
ctttgtccagtacatccagaacgtc

SEQ ID NO: 2471501 - DNA, 25 bp, Homo sapien
cttggacttgccagttgtagctgct

SEQ ID NO: 2471502 - DNA, 25 bp, Homo sapien
gaggtctttgtccagtacatccaga

SEQ ID NO: 2471503 - DNA, 25 bp, Homo sapien
ccacagtccccgtcttctcttcact

SEQ ID NO: 2471504 - DNA, 25 bp, Homo sapien
agtccccgtcttctcttcactgatg

SEQ ID NO: 2471505 - DNA, 25 bp, Homo sapien
ccttccacagtccccgtcttctctt

SEQ ID NO: 2471506 - DNA, 25 bp, Homo sapien
acagtccccgtcttctcttcactga

SEQ ID NO: 2471507 - DNA, 25 bp, Homo sapien
ctgaagtggtgcaggtgcctggtca

SEQ ID NO: 2471508 - DNA, 25 bp, Homo sapien
gcctgaagtggtgcaggtgcctggt

SEQ ID NO: 2471509 - DNA, 25 bp, Homo sapien
tgcctggtcacactggaggtgtaga

SEQ ID NO: 2471510 - DNA, 25 bp, Homo sapien
caggtgcctggtcacactggaggtg

SEQ ID NO: 2471511 - DNA, 25 bp, Homo sapien
ttcagactctagattctgctgagat

SEQ ID NO: 2471512 - DNA, 25 bp, Homo sapien
gatttcagactctagattctgctga

SEQ ID NO: 2471513 - DNA, 25 bp, Homo sapien
tttcagactctagattctgctgaga

SEQ ID NO: 2471514 - DNA, 25 bp, Homo sapien
ggatttcagactctagattctgctg

SEQ ID NO: 2471515 - DNA, 25 bp, Homo sapien
gtcccccatcctcagctgggtgggc

SEQ ID NO: 2471516 - DNA, 25 bp, Homo sapien
gcaggtcccccatcctcagctgggt

SEQ ID NO: 2471517 - DNA, 25 bp, Homo sapien
ggttcccaggagtccggaactgcca

SEQ ID NO: 2471518 - DNA, 25 bp, Homo sapien
aggtcccccatcctcagctgggtgg

SEQ ID NO: 2471519 - DNA, 25 bp, Homo sapien
catcgttctgaattctgacgacacc

SEQ ID NO: 2471520 - DNA, 25 bp, Homo sapien
ccatcgttctgaattctgacgacac

SEQ ID NO: 2471521 - DNA, 25 bp, Homo sapien
tcgttctgaattctgacgacaccgt

SEQ ID NO: 2471522 - DNA, 25 bp, Homo sapien
atcgttctgaattctgacgacaccg

SEQ ID NO: 2471523 - DNA, 25 bp, Homo sapien
cgaggatggggaccatatcttcgga

SEQ ID NO: 2471524 - DNA, 25 bp, Homo sapien
acgaggatggggaccatatcttcgg

SEQ ID NO: 2471525 - DNA, 25 bp, Homo sapien
ggccccagcaggttgaatggtttcc

SEQ ID NO: 2471526 - DNA, 25 bp, Homo sapien
cggccccagcaggttgaatggtttc

SEQ ID NO: 2471527 - DNA, 25 bp, Homo sapien
aatggtttccacctgccaagggtga

SEQ ID NO: 2471528 - DNA, 25 bp, Homo sapien
tttccacctgccaagggtgaagggc

SEQ ID NO: 2471529 - DNA, 25 bp, Homo sapien
taatgatgtcctctcgctcttgtgc

SEQ ID NO: 2471530 - DNA, 25 bp, Homo sapien
atgatgtcctctcgctcttgtgccc

SEQ ID NO: 2471531 - DNA, 25 bp, Homo sapien
tcctctcgctcttgtgcccaccaac

SEQ ID NO: 2471532 - DNA, 25 bp, Homo sapien
cctctcgctcttgtgcccaccaact

SEQ ID NO: 2471533 - DNA, 25 bp, Homo sapien
caaatgatcgacgttgttgttgtag

SEQ ID NO: 2471534 - DNA, 25 bp, Homo sapien
ccccaaatgatcgacgttgttgttg

SEQ ID NO: 2471535 - DNA, 25 bp, Homo sapien
tgtacaatccccaaatgatcgacgt

SEQ ID NO: 2471536 - DNA, 25 bp, Homo sapien
aatccccaaatgatcgacgttgttg

SEQ ID NO: 2471537 - DNA, 25 bp, Homo sapien
ctggtgagacatgtcctgcgtcaga

SEQ ID NO: 2471538 - DNA, 25 bp, Homo sapien
catgtcctgcgtcagaaaggccttt

SEQ ID NO: 2471539 - DNA, 25 bp, Homo sapien
gagacatgtcctgcgtcagaaaggc

SEQ ID NO: 2471540 - DNA, 25 bp, Homo sapien
ggtgagacatgtcctgcgtcagaaa

SEQ ID NO: 2471541 - DNA, 25 bp, Homo sapien
gctacagcccccattgtcaccatgc

SEQ ID NO: 2471542 - DNA, 25 bp, Homo sapien
cctagggctacagcccccattgtca

SEQ ID NO: 2471543 - DNA, 25 bp, Homo sapien
cagcccccattgtcaccatgccttt

SEQ ID NO: 2471544 - DNA, 25 bp, Homo sapien
gttctcctagggctacagcccccat

SEQ ID NO: 2471545 - DNA, 25 bp, Homo sapien
tttagccgcgagccctgctgcctcc

SEQ ID NO: 2471546 - DNA, 25 bp, Homo sapien
caatctgattagtcgcctgcctcac

SEQ ID NO: 2471547 - DNA, 25 bp, Homo sapien
ttcatcacaatctgattagtcgcct

SEQ ID NO: 2471548 - DNA, 25 bp, Homo sapien
ccttctggtgcatatgaagctgtaa

SEQ ID NO: 2471549 - DNA, 25 bp, Homo sapien
gaagctgtaataatatcaatatcag

SEQ ID NO: 2471550 - DNA, 25 bp, Homo sapien
aactcatacaacttcccattctctt

SEQ ID NO: 2471551 - DNA, 25 bp, Homo sapien
actcatacaacttcccattctctta

SEQ ID NO: 2471552 - DNA, 25 bp, Homo sapien
tgactgcacatatcacaaaaaaatg

SEQ ID NO: 2471553 - DNA, 25 bp, Homo sapien
gactgcacatatcacaaaaaaatgg

SEQ ID NO: 2471554 - DNA, 25 bp, Homo sapien
actgcacatatcacaaaaaaatggc

SEQ ID NO: 2471555 - DNA, 25 bp, Homo sapien
aaaacagcagtcactaaagcaatcc

SEQ ID NO: 2471556 - DNA, 25 bp, Homo sapien
gcaatccatatcaccttaaggctat

SEQ ID NO: 2471557 - DNA, 25 bp, Homo sapien
taaaactattctacgctcatatact

SEQ ID NO: 2471558 - DNA, 25 bp, Homo sapien
gcaataagccaactaaattcctaaa

SEQ ID NO: 2471559 - DNA, 25 bp, Homo sapien
tatgattgatgagttataaacacca

SEQ ID NO: 2471560 - DNA, 25 bp, Homo sapien
atgattgatgagttataaacaccac

SEQ ID NO: 2471561 - DNA, 25 bp, Homo sapien
atctgtaactggctatgattgatga

SEQ ID NO: 2471562 - DNA, 25 bp, Homo sapien
actggctatgattgatgagttataa

SEQ ID NO: 2471563 - DNA, 25 bp, Homo sapien
tgtacccggtccaggacttcactgg

SEQ ID NO: 2471564 - DNA, 25 bp, Homo sapien
gatgaagaggtgcacagaacaaggc

SEQ ID NO: 2471565 - DNA, 25 bp, Homo sapien
aactcaggaaaacacgtgtactggt

SEQ ID NO: 2471566 - DNA, 25 bp, Homo sapien
ttcactggaccgtcacgactgaagc

SEQ ID NO: 2471567 - DNA, 25 bp, Homo sapien
gaaagacaaggtgactttttcatct

SEQ ID NO: 2471568 - DNA, 25 bp, Homo sapien
ggaaagacaaggtgactttttcatc

SEQ ID NO: 2471569 - DNA, 25 bp, Homo sapien
tgcagagtactagggaaagacaagg

SEQ ID NO: 2471570 - DNA, 25 bp, Homo sapien
ttgcagagtactagggaaagacaag

SEQ ID NO: 2471571 - DNA, 25 bp, Homo sapien
tgtctgttaaatgctaccccagtga

SEQ ID NO: 2471572 - DNA, 25 bp, Homo sapien
tgtgagtagacatcaagtataccac

SEQ ID NO: 2471573 - DNA, 25 bp, Homo sapien
gaaacttttcgcaaatgtctgttaa

SEQ ID NO: 2471574 - DNA, 25 bp, Homo sapien
ctttgggcttggtcatgctacttgc

SEQ ID NO: 2471575 - DNA, 25 bp, Homo sapien
caatggtgtacctttgcaaactgaa

SEQ ID NO: 2471576 - DNA, 25 bp, Homo sapien
tttttaagctagtctctctcaatgg

SEQ ID NO: 2471577 - DNA, 25 bp, Homo sapien
tcagttcaaggaaatgttcctgtct

SEQ ID NO: 2471578 - DNA, 25 bp, Homo sapien
aaggctcctgctctatcagttcaag

SEQ ID NO: 2471579 - DNA, 25 bp, Homo sapien
taagtctaggactattctgattcct

SEQ ID NO: 2471580 - DNA, 25 bp, Homo sapien
ttttctatgaccttgcaaatctgaa

SEQ ID NO: 2471581 - DNA, 25 bp, Homo sapien
gctaagcatgcaatcttaggttgaa

SEQ ID NO: 2471582 - DNA, 25 bp, Homo sapien
gagtctaagtttccactgttcctaa

SEQ ID NO: 2471583 - DNA, 25 bp, Homo sapien
ccacttccaaaaagtggcatactaa

SEQ ID NO: 2471584 - DNA, 25 bp, Homo sapien
atctccaaggccatcaaaccataac

SEQ ID NO: 2471585 - DNA, 25 bp, Homo sapien
gatattgacagtgaccacttccaaa

SEQ ID NO: 2471586 - DNA, 25 bp, Homo sapien
accataacaagatattgacagtgac

SEQ ID NO: 2471587 - DNA, 25 bp, Homo sapien
cagcatagcgcacctctccagaagg

SEQ ID NO: 2471588 - DNA, 25 bp, Homo sapien
gttacagcagcatagcgcacctctc

SEQ ID NO: 2471589 - DNA, 25 bp, Homo sapien
ttgtcattcagctctccaacaaaat

SEQ ID NO: 2471590 - DNA, 25 bp, Homo sapien
tgtcattcagctctccaacaaaatc

SEQ ID NO: 2471591 - DNA, 25 bp, Homo sapien
tgagtgctgcaagaagtcctatgag

SEQ ID NO: 2471592 - DNA, 25 bp, Homo sapien
gagctgggcctattactcatggcaa

SEQ ID NO: 2471593 - DNA, 25 bp, Homo sapien
ggaaccactggtgtctccataagaa

SEQ ID NO: 2471594 - DNA, 25 bp, Homo sapien
tctgtgacccctcctcttgaaaaag

SEQ ID NO: 2471595 - DNA, 25 bp, Homo sapien
ccagcaaatatccaggaacagtgtc

SEQ ID NO: 2471596 - DNA, 25 bp, Homo sapien
ccaggcaacaagctaggcattaact

SEQ ID NO: 2471597 - DNA, 25 bp, Homo sapien
gttatttcataaagcagtcgccatt

SEQ ID NO: 2471598 - DNA, 25 bp, Homo sapien
cagagcacagaacagtaaagagtat

SEQ ID NO: 2471599 - DNA, 25 bp, Homo sapien
tttaggaacaaccaatgagatatca

SEQ ID NO: 2471600 - DNA, 25 bp, Homo sapien
catgtttgataaagctactctgtct

SEQ ID NO: 2471601 - DNA, 25 bp, Homo sapien
ccaatgagatatcaaaagttgcttt

SEQ ID NO: 2471602 - DNA, 25 bp, Homo sapien
gctactctgtctttaggaacaacca

SEQ ID NO: 2471603 - DNA, 25 bp, Homo sapien
gttcctataatataccagcactgtg

SEQ ID NO: 2471604 - DNA, 25 bp, Homo sapien
ggtaggtggtttcatattatcccat

SEQ ID NO: 2471605 - DNA, 25 bp, Homo sapien
tatcccatctaatcagcaaactaaa

SEQ ID NO: 2471606 - DNA, 25 bp, Homo sapien
gcaaactaaatctgctaaagcctat

SEQ ID NO: 2471607 - DNA, 25 bp, Homo sapien
taacaggtgtgcgggcaaacttcac

SEQ ID NO: 2471608 - DNA, 25 bp, Homo sapien
gcgggcaaacttcacttccactaaa

SEQ ID NO: 2471609 - DNA, 25 bp, Homo sapien
tacaaagtcatattcacccacaaca

SEQ ID NO: 2471610 - DNA, 25 bp, Homo sapien
taaattttcatcatcagggtatggt

SEQ ID NO: 2471611 - DNA, 25 bp, Homo sapien
taaaccaagtagcacaactttcaga

SEQ ID NO: 2471612 - DNA, 25 bp, Homo sapien
cctggagttatggactgctggaaca

SEQ ID NO: 2471613 - DNA, 25 bp, Homo sapien
caacccattccctagagaaattcca

SEQ ID NO: 2471614 - DNA, 25 bp, Homo sapien
gaaacaccaaggttggcatttccta

SEQ ID NO: 2471615 - DNA, 25 bp, Homo sapien
caaagtctgcaatagcaatgagatc

SEQ ID NO: 2471616 - DNA, 25 bp, Homo sapien
gagatcaattttaggtagaggataa

SEQ ID NO: 2471617 - DNA, 25 bp, Homo sapien
taaaaaggcaaggttttagcagcaa

SEQ ID NO: 2471618 - DNA, 25 bp, Homo sapien
gataaggaacattgaagtagtcctt

SEQ ID NO: 2471619 - DNA, 25 bp, Homo sapien
ctataagtaacaaggtcccagttct

SEQ ID NO: 2471620 - DNA, 25 bp, Homo sapien
taagtaacaaggtcccagttctcca

SEQ ID NO: 2471621 - DNA, 25 bp, Homo sapien
taacaaggtcccagttctccatggc

SEQ ID NO: 2471622 - DNA, 25 bp, Homo sapien
acaaggtcccagttctccatggcac

SEQ ID NO: 2471623 - DNA, 25 bp, Homo sapien
ttacaccatatcgtaaagcagaagc

SEQ ID NO: 2471624 - DNA, 25 bp, Homo sapien
gctactcaactgtgattaggaggga

SEQ ID NO: 2471625 - DNA, 25 bp, Homo sapien
cctcagacagtagcaccaaagggag

SEQ ID NO: 2471626 - DNA, 25 bp, Homo sapien
tatctaaaaatgctactaccgccag

SEQ ID NO: 2471627 - DNA, 25 bp, Homo sapien
tggatcaataagcaatgcagtctcc

SEQ ID NO: 2471628 - DNA, 25 bp, Homo sapien
gaagaacaggaattttttggatcaa

SEQ ID NO: 2471629 - DNA, 25 bp, Homo sapien
ttttttggatcaataagcaatgcag

SEQ ID NO: 2471630 - DNA, 25 bp, Homo sapien
ttttggatcaataagcaatgcagtc

SEQ ID NO: 2471631 - DNA, 25 bp, Homo sapien
gagattctgataagccctttcaaag

SEQ ID NO: 2471632 - DNA, 25 bp, Homo sapien
gcagagattctgataagccctttca

SEQ ID NO: 2471633 - DNA, 25 bp, Homo sapien
tgataagccctttcaaagtggacct

SEQ ID NO: 2471634 - DNA, 25 bp, Homo sapien
ttctgataagccctttcaaagtgga

SEQ ID NO: 2471635 - DNA, 25 bp, Homo sapien
agcccagaggtcaagactgtaatga

SEQ ID NO: 2471636 - DNA, 25 bp, Homo sapien
gcccagaggtcaagactgtaatgaa

SEQ ID NO: 2471637 - DNA, 25 bp, Homo sapien
cccagaggtcaagactgtaatgaac

SEQ ID NO: 2471638 - DNA, 25 bp, Homo sapien
gatgaagctgcactgacccatgatt

SEQ ID NO: 2471639 - DNA, 25 bp, Homo sapien
ggaagatgaagctgcactgacccat

SEQ ID NO: 2471640 - DNA, 25 bp, Homo sapien
aagctgcactgacccatgattgtgc

SEQ ID NO: 2471641 - DNA, 25 bp, Homo sapien
aggattacataagcccaggaagatg

SEQ ID NO: 2471642 - DNA, 25 bp, Homo sapien
ccatgcctgggccaaaggatatttt

SEQ ID NO: 2471643 - DNA, 25 bp, Homo sapien
accatgcctgggccaaaggatattt

SEQ ID NO: 2471644 - DNA, 25 bp, Homo sapien
catgcctgggccaaaggatattttc

SEQ ID NO: 2471645 - DNA, 25 bp, Homo sapien
atgcctgggccaaaggatattttca

SEQ ID NO: 2471646 - DNA, 25 bp, Homo sapien
gattgtcattctactaatctaaaac

SEQ ID NO: 2471647 - DNA, 25 bp, Homo sapien
actcacatgtcccttccactatatt

SEQ ID NO: 2471648 - DNA, 25 bp, Homo sapien
tctactaatctaaaacactcacatg

SEQ ID NO: 2471649 - DNA, 25 bp, Homo sapien
aagagagaagactaaaagagatgtc

SEQ ID NO: 2471650 - DNA, 25 bp, Homo sapien
cttcatttaaccaaagatgagtcca

SEQ ID NO: 2471651 - DNA, 25 bp, Homo sapien
acacagatattcaatccaggatgca

SEQ ID NO: 2471652 - DNA, 25 bp, Homo sapien
acacacagatattcaatccaggatg

SEQ ID NO: 2471653 - DNA, 25 bp, Homo sapien
cacagatattcaatccaggatgcaa

SEQ ID NO: 2471654 - DNA, 25 bp, Homo sapien
agatattcaatccaggatgcaaaac

SEQ ID NO: 2471655 - DNA, 25 bp, Homo sapien
tatctaaggcgtcaagctcctgggc

SEQ ID NO: 2471656 - DNA, 25 bp, Homo sapien
tggctgttatctaaggcgtcaagct

SEQ ID NO: 2471657 - DNA, 25 bp, Homo sapien
gttatctaaggcgtcaagctcctgg

SEQ ID NO: 2471658 - DNA, 25 bp, Homo sapien
ctcctgggcacgggtgtaatcagca

SEQ ID NO: 2471659 - DNA, 25 bp, Homo sapien
tgaattacaattatatgggagccta

SEQ ID NO: 2471660 - DNA, 25 bp, Homo sapien
tcccttagagcttgggttccagtcc

SEQ ID NO: 2471661 - DNA, 25 bp, Homo sapien
cataatgtataacgatggtcctcaa

SEQ ID NO: 2471662 - DNA, 25 bp, Homo sapien
actgaagtagggataggctaagtca

SEQ ID NO: 2471663 - DNA, 25 bp, Homo sapien
gtgattcagggttatgacaggaagc

SEQ ID NO: 2471664 - DNA, 25 bp, Homo sapien
tgtgattcagggttatgacaggaag

SEQ ID NO: 2471665 - DNA, 25 bp, Homo sapien
cccaatgtagtcatgcagcattcgg

SEQ ID NO: 2471666 - DNA, 25 bp, Homo sapien
cagatgcacctttgctatatgatat

SEQ ID NO: 2471667 - DNA, 25 bp, Homo sapien
gcagcattcggatgacagatgcacc

SEQ ID NO: 2471668 - DNA, 25 bp, Homo sapien
aacctcagatggatggcccacactg

SEQ ID NO: 2471669 - DNA, 25 bp, Homo sapien
caaatactcaagtatcagatacact

SEQ ID NO: 2471670 - DNA, 25 bp, Homo sapien
aataatgcgtactctatgccttcta

SEQ ID NO: 2471671 - DNA, 25 bp, Homo sapien
atatatccttctgatgcctactgcc

SEQ ID NO: 2471672 - DNA, 25 bp, Homo sapien
ttatttaataatgcgtactctatgc

SEQ ID NO: 2471673 - DNA, 25 bp, Homo sapien
tggaacttggttaaatacatgttca

SEQ ID NO: 2471674 - DNA, 25 bp, Homo sapien
tgcggcagcattcttttgttggaac

SEQ ID NO: 2471675 - DNA, 25 bp, Homo sapien
ttgttggaacttggttaaatacatg

SEQ ID NO: 2471676 - DNA, 25 bp, Homo sapien
ctgcggcagcattcttttgttggaa

SEQ ID NO: 2471677 - DNA, 25 bp, Homo sapien
aataaaatgtcccagcctggataga

SEQ ID NO: 2471678 - DNA, 25 bp, Homo sapien
cctggatagagtgacaatactttct

SEQ ID NO: 2471679 - DNA, 25 bp, Homo sapien
tctccatttctatctcaagctatta

SEQ ID NO: 2471680 - DNA, 25 bp, Homo sapien
gaccttgagttaagtattcagaaca

SEQ ID NO: 2471681 - DNA, 25 bp, Homo sapien
ggtgccacgattgctcactgtaacc

SEQ ID NO: 2471682 - DNA, 25 bp, Homo sapien
agtgcagtggtgccacgattgctca

SEQ ID NO: 2471683 - DNA, 25 bp, Homo sapien
agtggtgccacgattgctcactgta

SEQ ID NO: 2471684 - DNA, 25 bp, Homo sapien
gctcaagtgacccttcccacttcag

SEQ ID NO: 2471685 - DNA, 25 bp, Homo sapien
tgctgtagaccactgaggcagacca

SEQ ID NO: 2471686 - DNA, 25 bp, Homo sapien
gctgtagaccactgaggcagaccag

SEQ ID NO: 2471687 - DNA, 25 bp, Homo sapien
tgtagaccactgaggcagaccagag

SEQ ID NO: 2471688 - DNA, 25 bp, Homo sapien
actgctgtagaccactgaggcagac

SEQ ID NO: 2471689 - DNA, 25 bp, Homo sapien
tcctctcgctcttgtgcccaccaac

SEQ ID NO: 2471690 - DNA, 25 bp, Homo sapien
taatgatgtcctctcgctcttgtgc

SEQ ID NO: 2471691 - DNA, 25 bp, Homo sapien
atgatgtcctctcgctcttgtgccc

SEQ ID NO: 2471692 - DNA, 25 bp, Homo sapien
cctctcgctcttgtgcccaccaact

SEQ ID NO: 2471693 - DNA, 25 bp, Homo sapien
caaatgatcgacgttgttgttgtag

SEQ ID NO: 2471694 - DNA, 25 bp, Homo sapien
ccccaaatgatcgacgttgttgttg

SEQ ID NO: 2471695 - DNA, 25 bp, Homo sapien
tgtacaatccccaaatgatcgacgt

SEQ ID NO: 2471696 - DNA, 25 bp, Homo sapien
aatccccaaatgatcgacgttgttg

SEQ ID NO: 2471697 - DNA, 25 bp, Homo sapien
tgccctgagacctgcccggtgtact

SEQ ID NO: 2471698 - DNA, 25 bp, Homo sapien
ccccgccagggtcaagggagcctgc

SEQ ID NO: 2471699 - DNA, 25 bp, Homo sapien
cacatccccccgccagggtcaaggg

SEQ ID NO: 2471700 - DNA, 25 bp, Homo sapien
agtgaccacatccccccgccagggt

SEQ ID NO: 2471701 - DNA, 25 bp, Homo sapien
gcagtcagaggaggcagctccgtct

SEQ ID NO: 2471702 - DNA, 25 bp, Homo sapien
tcgcctcccgcgcagtcagaggagg

SEQ ID NO: 2471703 - DNA, 25 bp, Homo sapien
agtcagaggaggcagctccgtctca

SEQ ID NO: 2471704 - DNA, 25 bp, Homo sapien
cttcgcctcccgcgcagtcagagga

SEQ ID NO: 2471705 - DNA, 25 bp, Homo sapien
cctcccagtgacagcgtgttgccct

SEQ ID NO: 2471706 - DNA, 25 bp, Homo sapien
agtgacagcgtgttgccctcacccg

SEQ ID NO: 2471707 - DNA, 25 bp, Homo sapien
caaagtgaacagcaacctggggtca

SEQ ID NO: 2471708 - DNA, 25 bp, Homo sapien
tggggtcaggtccagcagggactgc

SEQ ID NO: 2471709 - DNA, 25 bp, Homo sapien
tgctctttcggctgatctcccgccg

SEQ ID NO: 2471710 - DNA, 25 bp, Homo sapien
gctctttcggctgatctcccgccga

SEQ ID NO: 2471711 - DNA, 25 bp, Homo sapien
tctttcggctgatctcccgccgaat

SEQ ID NO: 2471712 - DNA, 25 bp, Homo sapien
ctttcggctgatctcccgccgaatt

SEQ ID NO: 2471713 - DNA, 25 bp, Homo sapien
ttcccttgtacgctcgatctatgag

SEQ ID NO: 2471714 - DNA, 25 bp, Homo sapien
catgggcattcccttgtacgctcga

SEQ ID NO: 2471715 - DNA, 25 bp, Homo sapien
gactgaccacatcgggccccggatg

SEQ ID NO: 2471716 - DNA, 25 bp, Homo sapien
ggcattcccttgtacgctcgatcta

SEQ ID NO: 2471717 - DNA, 25 bp, Homo sapien
cccggtcgatgcgctggatgtgctc

SEQ ID NO: 2471718 - DNA, 25 bp, Homo sapien
ccggtcgatgcgctggatgtgctca

SEQ ID NO: 2471719 - DNA, 25 bp, Homo sapien
tcccggtcgatgcgctggatgtgct

SEQ ID NO: 2471720 - DNA, 25 bp, Homo sapien
gtcccggtcgatgcgctggatgtgc

SEQ ID NO: 2471721 - DNA, 25 bp, Homo sapien
tatgccaggaggatgtggagtagtt

SEQ ID NO: 2471722 - DNA, 25 bp, Homo sapien
gggttatactcctcatatgccagga

SEQ ID NO: 2471723 - DNA, 25 bp, Homo sapien
gaggatgtggagtagttcccgctgc

SEQ ID NO: 2471724 - DNA, 25 bp, Homo sapien
cgggttatactcctcatatgccagg

SEQ ID NO: 2471725 - DNA, 25 bp, Homo sapien
caggaaaatagaggaggaacaaggc

SEQ ID NO: 2471726 - DNA, 25 bp, Homo sapien
cctcctcaggaaaatagaggaggaa

SEQ ID NO: 2471727 - DNA, 25 bp, Homo sapien
catcctcctcaggaaaatagaggag

SEQ ID NO: 2471728 - DNA, 25 bp, Homo sapien
tcctcaggaaaatagaggaggaaca

SEQ ID NO: 2471729 - DNA, 25 bp, Homo sapien
ttggtcggcccattcgtgggcaccg

SEQ ID NO: 2471730 - DNA, 25 bp, Homo sapien
cattcgtgggcaccgatggcagcag

SEQ ID NO: 2471731 - DNA, 25 bp, Homo sapien
tcggcccattcgtgggcaccgatgg

SEQ ID NO: 2471732 - DNA, 25 bp, Homo sapien
gggcaccgatggcagcaggagcccg

SEQ ID NO: 2471733 - DNA, 25 bp, Homo sapien
ccatggtcttggattgtgacgtggc

SEQ ID NO: 2471734 - DNA, 25 bp, Homo sapien
tgccccatggtcttggattgtgacg

SEQ ID NO: 2471735 - DNA, 25 bp, Homo sapien
ccccatggtcttggattgtgacgtg

SEQ ID NO: 2471736 - DNA, 25 bp, Homo sapien
ctgatgccccatggtcttggattgt

SEQ ID NO: 2471737 - DNA, 25 bp, Homo sapien
gcctaacggggaacactgcccacat

SEQ ID NO: 2471738 - DNA, 25 bp, Homo sapien
agcctaacggggaacactgcccaca

SEQ ID NO: 2471739 - DNA, 25 bp, Homo sapien
gcgattcttgttatcggcatcaacg

SEQ ID NO: 2471740 - DNA, 25 bp, Homo sapien
ggcgattcttgttatcggcatcaac

SEQ ID NO: 2471741 - DNA, 25 bp, Homo sapien
gattcttgttatcggcatcaacgcc

SEQ ID NO: 2471742 - DNA, 25 bp, Homo sapien
cgattcttgttatcggcatcaacgc

SEQ ID NO: 2471743 - DNA, 25 bp, Homo sapien
tagaggccctaagatgcttgagcac

SEQ ID NO: 2471744 - DNA, 25 bp, Homo sapien
cccacttctggctgaactcttggct

SEQ ID NO: 2471745 - DNA, 25 bp, Homo sapien
ggctccaggcttcttgtcctggcaa

SEQ ID NO: 2471746 - DNA, 25 bp, Homo sapien
ggccctctccctgaatgctctgtgg

SEQ ID NO: 2471747 - DNA, 25 bp, Homo sapien
ctctgtgggtcagggacacggattc

SEQ ID NO: 2471748 - DNA, 25 bp, Homo sapien
aaaacagacgcggtcagcatctcca

SEQ ID NO: 2471749 - DNA, 25 bp, Homo sapien
gaaaggaaaacagacgcggtcagca

SEQ ID NO: 2471750 - DNA, 25 bp, Homo sapien
agcatctccagtgagcccacgcagg

SEQ ID NO: 2471751 - DNA, 25 bp, Homo sapien
ctgtcgtggcatggcgggtggctcc

SEQ ID NO: 2471752 - DNA, 25 bp, Homo sapien
ggcacaggcctggatgccgacgacc

SEQ ID NO: 2471753 - DNA, 25 bp, Homo sapien
ggtgtggaagaacgaggtgcccgtg

SEQ ID NO: 2471754 - DNA, 25 bp, Homo sapien
tgtggaagaacgaggtgcccgtggc

SEQ ID NO: 2471755 - DNA, 25 bp, Homo sapien
tggaagaacgaggtgcccgtggcgg

SEQ ID NO: 2471756 - DNA, 25 bp, Homo sapien
gtggaagaacgaggtgcccgtggcg

SEQ ID NO: 2471757 - DNA, 25 bp, Homo sapien
acagggtaggtgtcttcccggacag

SEQ ID NO: 2471758 - DNA, 25 bp, Homo sapien
gtaggtgtcttcccggacagcccca

SEQ ID NO: 2471759 - DNA, 25 bp, Homo sapien
cctgagtgcccacagggtaggtgtc

SEQ ID NO: 2471760 - DNA, 25 bp, Homo sapien
tgagtgcccacagggtaggtgtctt

SEQ ID NO: 2471761 - DNA, 25 bp, Homo sapien
tgggatatggcacggacccagcagc

SEQ ID NO: 2471762 - DNA, 25 bp, Homo sapien
cctgggatatggcacggacccagca

SEQ ID NO: 2471763 - DNA, 25 bp, Homo sapien
tcctgggatatggcacggacccagc

SEQ ID NO: 2471764 - DNA, 25 bp, Homo sapien
ggatatggcacggacccagcagctc

SEQ ID NO: 2471765 - DNA, 25 bp, Homo sapien
ggtgtggaagaacgaggtgcccgtg

SEQ ID NO: 2471766 - DNA, 25 bp, Homo sapien
tggaagaacgaggtgcccgtggcgg

SEQ ID NO: 2471767 - DNA, 25 bp, Homo sapien
tgtggaagaacgaggtgcccgtggc

SEQ ID NO: 2471768 - DNA, 25 bp, Homo sapien
ggcacaggcctggatgccgacgacc

SEQ ID NO: 2471769 - DNA, 25 bp, Homo sapien
tgggatatggcacggacccagcagc

SEQ ID NO: 2471770 - DNA, 25 bp, Homo sapien
cctgggatatggcacggacccagca

SEQ ID NO: 2471771 - DNA, 25 bp, Homo sapien
tcctgggatatggcacggacccagc

SEQ ID NO: 2471772 - DNA, 25 bp, Homo sapien
ggatatggcacggacccagcagctc

SEQ ID NO: 2471773 - DNA, 25 bp, Homo sapien
agtgctgggtgcagcgaaagccgat

SEQ ID NO: 2471774 - DNA, 25 bp, Homo sapien
ctgggtgcagcgaaagccgatctca

SEQ ID NO: 2471775 - DNA, 25 bp, Homo sapien
tgctgggtgcagcgaaagccgatct

SEQ ID NO: 2471776 - DNA, 25 bp, Homo sapien
tgggtgcagcgaaagccgatctcac

SEQ ID NO: 2471777 - DNA, 25 bp, Homo sapien
gggaaattatccagccatgagccct

SEQ ID NO: 2471778 - DNA, 25 bp, Homo sapien
cgaagcttgcttgggttgttaagcc

SEQ ID NO: 2471779 - DNA, 25 bp, Homo sapien
tgcttgggttgttaagcctagggaa

SEQ ID NO: 2471780 - DNA, 25 bp, Homo sapien
cagaattcagaacgatggtcgtggg

SEQ ID NO: 2471781 - DNA, 25 bp, Homo sapien
agggtcacatccgtctcccagaagc

SEQ ID NO: 2471782 - DNA, 25 bp, Homo sapien
tccatcctggcattacactggcctg

SEQ ID NO: 2471783 - DNA, 25 bp, Homo sapien
ccaggtctaacagtcaggttcctcc

SEQ ID NO: 2471784 - DNA, 25 bp, Homo sapien
ttcctcctccgtgcattaacaatgg

SEQ ID NO: 2471785 - DNA, 25 bp, Homo sapien
tccagcttggaaactaagcatatgc

SEQ ID NO: 2471786 - DNA, 25 bp, Homo sapien
tggaaactaagcatatgctccactt

SEQ ID NO: 2471787 - DNA, 25 bp, Homo sapien
gcttggaaactaagcatatgctcca

SEQ ID NO: 2471788 - DNA, 25 bp, Homo sapien
aactaagcatatgctccacttcctc

SEQ ID NO: 2471789 - DNA, 25 bp, Homo sapien
ttagctgctatcccctacagcagtt

SEQ ID NO: 2471790 - DNA, 25 bp, Homo sapien
tagctgctatcccctacagcagttg

SEQ ID NO: 2471791 - DNA, 25 bp, Homo sapien
tcctgagtcagcacaaactggaact

SEQ ID NO: 2471792 - DNA, 25 bp, Homo sapien
ccgtgggtcgtgctgccaggccaaa

SEQ ID NO: 2471793 - DNA, 25 bp, Homo sapien
cgtccacctcccgtgggtcgtgctg

SEQ ID NO: 2471794 - DNA, 25 bp, Homo sapien
ggctcagcctccgtcggctctcgca

SEQ ID NO: 2471795 - DNA, 25 bp, Homo sapien
aacctctgtggccacgattactggg

SEQ ID NO: 2471796 - DNA, 25 bp, Homo sapien
acagttccgacgggaaacctctgtg

SEQ ID NO: 2471797 - DNA, 25 bp, Homo sapien
gtggccacgattactgggtctccca

SEQ ID NO: 2471798 - DNA, 25 bp, Homo sapien
cgctgcttttagaggagccggtgac

SEQ ID NO: 2471799 - DNA, 25 bp, Homo sapien
ctgcccaggtaaggacagccagagg

SEQ ID NO: 2471800 - DNA, 25 bp, Homo sapien
cccaggtaaggacagccagagggac

SEQ ID NO: 2471801 - DNA, 25 bp, Homo sapien
cggtccggcaggactgcccaggtaa

SEQ ID NO: 2471802 - DNA, 25 bp, Homo sapien
ccaggtaaggacagccagagggact

SEQ ID NO: 2471803 - DNA, 25 bp, Homo sapien
tggaatcctggtccatcctcctcgg

SEQ ID NO: 2471804 - DNA, 25 bp, Homo sapien
aatcctggtccatcctcctcggagg

SEQ ID NO: 2471805 - DNA, 25 bp, Homo sapien
atcctggtccatcctcctcggaggg

SEQ ID NO: 2471806 - DNA, 25 bp, Homo sapien
gaatcctggtccatcctcctcggag

SEQ ID NO: 2471807 - DNA, 25 bp, Homo sapien
agtgcctgcagcctcgcctgctaga

SEQ ID NO: 2471808 - DNA, 25 bp, Homo sapien
ctgcagcctcgcctgctagaagcct

SEQ ID NO: 2471809 - DNA, 25 bp, Homo sapien
gggccggggacggtcagtgcctgca

SEQ ID NO: 2471810 - DNA, 25 bp, Homo sapien
tgtggggccggggacggtcagtgcc

SEQ ID NO: 2471811 - DNA, 25 bp, Homo sapien
agcagcaccctccggctggacagcc

SEQ ID NO: 2471812 - DNA, 25 bp, Homo sapien
ccctccggctggacagccatggcag

SEQ ID NO: 2471813 - DNA, 25 bp, Homo sapien
tgagcagcaccctccggctggacag

SEQ ID NO: 2471814 - DNA, 25 bp, Homo sapien
agcaccctccggctggacagccatg

SEQ ID NO: 2471815 - DNA, 25 bp, Homo sapien
gagagagctggtcaacgacagaagc

SEQ ID NO: 2471816 - DNA, 25 bp, Homo sapien
acagaagcgtggtgaccccagtcca

SEQ ID NO: 2471817 - DNA, 25 bp, Homo sapien
agtggaggtggcctcggctgagaga

SEQ ID NO: 2471818 - DNA, 25 bp, Homo sapien
ctggtcaacgacagaagcgtggtga

SEQ ID NO: 2471819 - DNA, 25 bp, Homo sapien
ttgacacttagttcacctatgtgga

SEQ ID NO: 2471820 - DNA, 25 bp, Homo sapien
cacttagttcacctatgtggacccc

SEQ ID NO: 2471821 - DNA, 25 bp, Homo sapien
ccttgacacttagttcacctatgtg

SEQ ID NO: 2471822 - DNA, 25 bp, Homo sapien
gacacttagttcacctatgtggacc

SEQ ID NO: 2471823 - DNA, 25 bp, Homo sapien
gccccaaatggctttcaagccaagc

SEQ ID NO: 2471824 - DNA, 25 bp, Homo sapien
gggcagtgagttccagtcagggcca

SEQ ID NO: 2471825 - DNA, 25 bp, Homo sapien
agtcagggccatcggcccggcccct

SEQ ID NO: 2471826 - DNA, 25 bp, Homo sapien
cagcagggcagtgagttccagtcag

SEQ ID NO: 2471827 - DNA, 25 bp, Homo sapien
tccagtcagggccatcggcccggcc

SEQ ID NO: 2471828 - DNA, 25 bp, Homo sapien
cacggcgccgggaccaccctcattt

SEQ ID NO: 2471829 - DNA, 25 bp, Homo sapien
gcgacggcagcggcacccaaaagga

SEQ ID NO: 2471830 - DNA, 25 bp, Homo sapien
tccacggcccacggcgccgggacca

SEQ ID NO: 2471831 - DNA, 25 bp, Homo sapien
ccacttccctgggtcgcgacggcag

SEQ ID NO: 2471832 - DNA, 25 bp, Homo sapien
caccgtcaaaggatctcacactcag

SEQ ID NO: 2471833 - DNA, 25 bp, Homo sapien
tgtgaccaacgccacttcaaatgtg

SEQ ID NO: 2471834 - DNA, 25 bp, Homo sapien
ggagggtgtccacgtcaaggcacct

SEQ ID NO: 2471835 - DNA, 25 bp, Homo sapien
ttcaaatgtgagttggcggcacgtg

SEQ ID NO: 2471836 - DNA, 25 bp, Homo sapien
agacggctaggagcacctcggtgtc

SEQ ID NO: 2471837 - DNA, 25 bp, Homo sapien
gctaggagcacctcggtgtcactgc

SEQ ID NO: 2471838 - DNA, 25 bp, Homo sapien
tcgctggtgcagacggctaggagca

SEQ ID NO: 2471839 - DNA, 25 bp, Homo sapien
ctcggtgtcactgcagggacggcac

SEQ ID NO: 2471840 - DNA, 25 bp, Homo sapien
tctgctcacgcgcaggtggatggct

SEQ ID NO: 2471841 - DNA, 25 bp, Homo sapien
cgctcaggctcgtgggtaacttgct

SEQ ID NO: 2471842 - DNA, 25 bp, Homo sapien
ttttctgccgatagagtctgctcac

SEQ ID NO: 2471843 - DNA, 25 bp, Homo sapien
gcctccccgaagtgcatgtggccag

SEQ ID NO: 2471844 - DNA, 25 bp, Homo sapien
agcatttccaatcggccagggcatc

SEQ ID NO: 2471845 - DNA, 25 bp, Homo sapien
tggcgagaacgtccacagcttcggt

SEQ ID NO: 2471846 - DNA, 25 bp, Homo sapien
ggccagatgccgtgactcctaacgt

SEQ ID NO: 2471847 - DNA, 25 bp, Homo sapien
tagagaacagtatcagacggcacac

SEQ ID NO: 2471848 - DNA, 25 bp, Homo sapien
agatgaagagtcctcccctggcaga

SEQ ID NO: 2471849 - DNA, 25 bp, Homo sapien
ctcccctggcagaggagaagatgaa

SEQ ID NO: 2471850 - DNA, 25 bp, Homo sapien
cagaggagaagatgaagggtcctcc

SEQ ID NO: 2471851 - DNA, 25 bp, Homo sapien
ccagaggccaaggagaagatgaaga

SEQ ID NO: 2471852 - DNA, 25 bp, Homo sapien
cacgggaggaactgcctgattcatc

SEQ ID NO: 2471853 - DNA, 25 bp, Homo sapien
tggggtctggttaactgacactccc

SEQ ID NO: 2471854 - DNA, 25 bp, Homo sapien
tttggcaaggccggcatggtgccca

SEQ ID NO: 2471855 - DNA, 25 bp, Homo sapien
cctttgctcttagcggctgcacggg

SEQ ID NO: 2471856 - DNA, 25 bp, Homo sapien
ggcgcctgctggcaaaggtgtgctg

SEQ ID NO: 2471857 - DNA, 25 bp, Homo sapien
aggtcctcgcccagaaacacctgct

SEQ ID NO: 2471858 - DNA, 25 bp, Homo sapien
tcctcgcccagaaacacctgcttct

SEQ ID NO: 2471859 - DNA, 25 bp, Homo sapien
gtgctgtggcgcctgctggcaaagg

SEQ ID NO: 2471860 - DNA, 25 bp, Homo sapien
accaggcgttcagcgaggacaatgc

SEQ ID NO: 2471861 - DNA, 25 bp, Homo sapien
agccctgtgacgagctggaaaccga

SEQ ID NO: 2471862 - DNA, 25 bp, Homo sapien
gggatgagttacaccctgagcccca

SEQ ID NO: 2471863 - DNA, 25 bp, Homo sapien
tggtgatgacctagtgaatccaggc

SEQ ID NO: 2471864 - DNA, 25 bp, Homo sapien
ctcccagcagaggaagctcaactca

SEQ ID NO: 2471865 - DNA, 25 bp, Homo sapien
tggagggagtcgaggtcgagggagg

SEQ ID NO: 2471866 - DNA, 25 bp, Homo sapien
atcaattagcgaggtggaagccctc

SEQ ID NO: 2471867 - DNA, 25 bp, Homo sapien
ggaagccctcagtgtcagctgcagt

SEQ ID NO: 2471868 - DNA, 25 bp, Homo sapien
gcaggacccagtgtgcaccggctga

SEQ ID NO: 2471869 - DNA, 25 bp, Homo sapien
aaccaagtgtgaatagcagagccgg

SEQ ID NO: 2471870 - DNA, 25 bp, Homo sapien
gacaccagcagggctgatcaggccc

SEQ ID NO: 2471871 - DNA, 25 bp, Homo sapien
ggctgaaccggtgcccactgcaggc

SEQ ID NO: 2471872 - DNA, 25 bp, Homo sapien
tgtgactcgcgctgttttgaaccca

SEQ ID NO: 2471873 - DNA, 25 bp, Homo sapien
cacagaaaacgtggtaggcaagcct

SEQ ID NO: 2471874 - DNA, 25 bp, Homo sapien
ttcccgagtgaagccgagaagctgc

SEQ ID NO: 2471875 - DNA, 25 bp, Homo sapien
gaacgtgcccgctatctcatcagga

SEQ ID NO: 2471876 - DNA, 25 bp, Homo sapien
aatgaaacatctgtaaaaggtacaa

SEQ ID NO: 2471877 - DNA, 25 bp, Homo sapien
catctggggttagcagcatcatgtt

SEQ ID NO: 2471878 - DNA, 25 bp, Homo sapien
tcatctggggttagcagcatcatgt

SEQ ID NO: 2471879 - DNA, 25 bp, Homo sapien
ctggttcctgcaaacacgctttcat

SEQ ID NO: 2471880 - DNA, 25 bp, Homo sapien
ggttcctgcaaacacgctttcatct

SEQ ID NO: 2471881 - DNA, 25 bp, Homo sapien
gtacagatacaactgagcagccgcc

SEQ ID NO: 2471882 - DNA, 25 bp, Homo sapien
tagcgaaggcgctgattgaagtctc

SEQ ID NO: 2471883 - DNA, 25 bp, Homo sapien
ccatgagatgtgagttgtgtaacac

SEQ ID NO: 2471884 - DNA, 25 bp, Homo sapien
cagcagcgttctataaatgccaggt

SEQ ID NO: 2471885 - DNA, 25 bp, Homo sapien
ctggtccacagtctcccagcaccaa

SEQ ID NO: 2471886 - DNA, 25 bp, Homo sapien
ggtccacagtctcccagcaccaacc

SEQ ID NO: 2471887 - DNA, 25 bp, Homo sapien
agcaccaaccagggctggggggcct

SEQ ID NO: 2471888 - DNA, 25 bp, Homo sapien
ctcctccccattccccttgggccat

SEQ ID NO: 2471889 - DNA, 25 bp, Homo sapien
gcccagaggttgcagacgccatcag

SEQ ID NO: 2471890 - DNA, 25 bp, Homo sapien
agcccagaggttgcagacgccatca

SEQ ID NO: 2471891 - DNA, 25 bp, Homo sapien
ccagaggttgcagacgccgtcagga

SEQ ID NO: 2471892 - DNA, 25 bp, Homo sapien
cagcccagaggttgcagacgccatc

SEQ ID NO: 2471893 - DNA, 25 bp, Homo sapien
caccgtcaggactggggagaccaca

SEQ ID NO: 2471894 - DNA, 25 bp, Homo sapien
cagacaccgtcaggactggggagac

SEQ ID NO: 2471895 - DNA, 25 bp, Homo sapien
gacaccgtcaggactggggagacca

SEQ ID NO: 2471896 - DNA, 25 bp, Homo sapien
gatgcagacaccgtcaggactgggg

SEQ ID NO: 2471897 - DNA, 25 bp, Homo sapien
gatgccgggctgtgtgcccgaagga

SEQ ID NO: 2471898 - DNA, 25 bp, Homo sapien
cccttggagagcagagatgccgggc

SEQ ID NO: 2471899 - DNA, 25 bp, Homo sapien
tcaggcactacgagcccttggagag

SEQ ID NO: 2471900 - DNA, 25 bp, Homo sapien
tgtgtgcccgaaggagagcggagag

SEQ ID NO: 2471901 - DNA, 25 bp, Homo sapien
tacaccaaacaaaggccttggacat

SEQ ID NO: 2471902 - DNA, 25 bp, Homo sapien
gtacaccaaacaaaggccttggaca

SEQ ID NO: 2471903 - DNA, 25 bp, Homo sapien
tggcccccaaagagcttgccgtctg

SEQ ID NO: 2471904 - DNA, 25 bp, Homo sapien
ttggcccccaaagagcttgccgtct

SEQ ID NO: 2471905 - DNA, 25 bp, Homo sapien
cagcaggcactgtcgctggagtgtc

SEQ ID NO: 2471906 - DNA, 25 bp, Homo sapien
ctctgtccagcgtgctcgggcagca

SEQ ID NO: 2471907 - DNA, 25 bp, Homo sapien
agcaggcactgtcgctggagtgtca

SEQ ID NO: 2471908 - DNA, 25 bp, Homo sapien
atccctctgtccagcgtgctcgggc

SEQ ID NO: 2471909 - DNA, 25 bp, Homo sapien
tcctggtatcgagggacctgctcgg

SEQ ID NO: 2471910 - DNA, 25 bp, Homo sapien
tcggggttgccgtggagctcggagc

SEQ ID NO: 2471911 - DNA, 25 bp, Homo sapien
tcgggtcctcctggtatcgagggac

SEQ ID NO: 2471912 - DNA, 25 bp, Homo sapien
cactctcgggtcctcctggtatcga

SEQ ID NO: 2471913 - DNA, 25 bp, Homo sapien
cctgcagccctgtgggggaatctgt

SEQ ID NO: 2471914 - DNA, 25 bp, Homo sapien
caagggcttcggctccgagcttcgg

SEQ ID NO: 2471915 - DNA, 25 bp, Homo sapien
ccgagcttcggtgagattgaggcca

SEQ ID NO: 2471916 - DNA, 25 bp, Homo sapien
catccttcccgtgggtggagtcaca

SEQ ID NO: 2471917 - DNA, 25 bp, Homo sapien
gcctgtcccgccgagcacagcgttt

SEQ ID NO: 2471918 - DNA, 25 bp, Homo sapien
ccgagcacagcgtttccctcacgct

SEQ ID NO: 2471919 - DNA, 25 bp, Homo sapien
gcgtttccctcacgctggccgtgag

SEQ ID NO: 2471920 - DNA, 25 bp, Homo sapien
acgctggccgtgagcacacaagggt

SEQ ID NO: 2471921 - DNA, 25 bp, Homo sapien
gcggctgaacgaccccattgtgtgg

SEQ ID NO: 2471922 - DNA, 25 bp, Homo sapien
tctctgtgcgtacaaacacgtctgt

SEQ ID NO: 2471923 - DNA, 25 bp, Homo sapien
tttatcttcccgagccgaaactctg

SEQ ID NO: 2471924 - DNA, 25 bp, Homo sapien
gcaagtctccagcagggaaacaacg

SEQ ID NO: 2471925 - DNA, 25 bp, Homo sapien
tgggcatgggtgggcacaaccgtgg

SEQ ID NO: 2471926 - DNA, 25 bp, Homo sapien
aggacagcaaagtgcggcactgacc

SEQ ID NO: 2471927 - DNA, 25 bp, Homo sapien
aagtgcggcactgaccctcaggagg

SEQ ID NO: 2471928 - DNA, 25 bp, Homo sapien
tgagggatgcgtgggcatgggtggg

SEQ ID NO: 2471929 - DNA, 25 bp, Homo sapien
gtatggggggaagctgggcaaacag

SEQ ID NO: 2471930 - DNA, 25 bp, Homo sapien
ggggaagctgggcaaacagggtcat

SEQ ID NO: 2471931 - DNA, 25 bp, Homo sapien
ctgtgtatggggggaagctgggcaa

SEQ ID NO: 2471932 - DNA, 25 bp, Homo sapien
tatggggggaagctgggcaaacagg

SEQ ID NO: 2471933 - DNA, 25 bp, Homo sapien
ggtcagtgcggagcccaccacattc

SEQ ID NO: 2471934 - DNA, 25 bp, Homo sapien
gatatgaatccctggtgagaggcag

SEQ ID NO: 2471935 - DNA, 25 bp, Homo sapien
ctcatagagattttccgtgggacct

SEQ ID NO: 2471936 - DNA, 25 bp, Homo sapien
gttgctctggccctttcgtgtggat

SEQ ID NO: 2471937 - DNA, 25 bp, Homo sapien
gatcggcctctctggaatatctcca

SEQ ID NO: 2471938 - DNA, 25 bp, Homo sapien
aatatctccagtgtcagcagggatg

SEQ ID NO: 2471939 - DNA, 25 bp, Homo sapien
gctcagagggttcacggagcattcc

SEQ ID NO: 2471940 - DNA, 25 bp, Homo sapien
cggagcattccctttcaatgacgat

SEQ ID NO: 2471941 - DNA, 25 bp, Homo sapien
aagagaggagggtggcggtaaggct

SEQ ID NO: 2471942 - DNA, 25 bp, Homo sapien
tgattcagccagagtgagaccaaat

SEQ ID NO: 2471943 - DNA, 25 bp, Homo sapien
ctgtgcggtgcaggtgacagcaccc

SEQ ID NO: 2471944 - DNA, 25 bp, Homo sapien
ttcctactctgtgggcaggtaacac

SEQ ID NO: 2471945 - DNA, 25 bp, Homo sapien
gtcacagaacgatcccgctgcaaat

SEQ ID NO: 2471946 - DNA, 25 bp, Homo sapien
tggctctggaactagtcccatgttg

SEQ ID NO: 2471947 - DNA, 25 bp, Homo sapien
ctctgggctgatacacgaaacggca

SEQ ID NO: 2471948 - DNA, 25 bp, Homo sapien
tcccatgttgtttcccagggaagga

SEQ ID NO: 2471949 - DNA, 25 bp, Homo sapien
gagcaaggtctctgggactgactag

SEQ ID NO: 2471950 - DNA, 25 bp, Homo sapien
gactgactaggtgaagaccggtttc

SEQ ID NO: 2471951 - DNA, 25 bp, Homo sapien
acccgtcttaggctgtgtcagggca

SEQ ID NO: 2471952 - DNA, 25 bp, Homo sapien
acgggcacgacagggacttgagacc

SEQ ID NO: 2471953 - DNA, 25 bp, Homo sapien
cttcgcttccgggaccacagagccc

SEQ ID NO: 2471954 - DNA, 25 bp, Homo sapien
ctcaaggaaggtgacatccgcttcg

SEQ ID NO: 2471955 - DNA, 25 bp, Homo sapien
aagcggctccagaatccctcaagga

SEQ ID NO: 2471956 - DNA, 25 bp, Homo sapien
gggcaaagatgtccactgaagcggc

SEQ ID NO: 2471957 - DNA, 25 bp, Homo sapien
tgggggtgctgtttctcgtatactt

SEQ ID NO: 2471958 - DNA, 25 bp, Homo sapien
tgtgggggtgctgtttctcgtatac

SEQ ID NO: 2471959 - DNA, 25 bp, Homo sapien
tcctgttttaacacatgtgggtgtc

SEQ ID NO: 2471960 - DNA, 25 bp, Homo sapien
gctgtttctcgtatactttatttcc

SEQ ID NO: 2471961 - DNA, 25 bp, Homo sapien
gaccaaccacggagcacagtgacat

SEQ ID NO: 2471962 - DNA, 25 bp, Homo sapien
cgaacattcgtgaccaaccacggag

SEQ ID NO: 2471963 - DNA, 25 bp, Homo sapien
agccacagtgacataaccctccgaa

SEQ ID NO: 2471964 - DNA, 25 bp, Homo sapien
tgacataaccctccgaacattcgtg

SEQ ID NO: 2471965 - DNA, 25 bp, Homo sapien
tgcccactctaagaacgtgacccca

SEQ ID NO: 2471966 - DNA, 25 bp, Homo sapien
cccctgcccactctaagaacgtgac

SEQ ID NO: 2471967 - DNA, 25 bp, Homo sapien
ctctaagaacgtgaccccagaaagg

SEQ ID NO: 2471968 - DNA, 25 bp, Homo sapien
ccactctaagaacgtgaccccagaa

SEQ ID NO: 2471969 - DNA, 25 bp, Homo sapien
cacagccacggcaggccattagtgg

SEQ ID NO: 2471970 - DNA, 25 bp, Homo sapien
ggcttccgtccaaggtcctggccag

SEQ ID NO: 2471971 - DNA, 25 bp, Homo sapien
tgaagtttgttcagggtggcctgac

SEQ ID NO: 2471972 - DNA, 25 bp, Homo sapien
gtggttggcagtggcttccgtccaa

SEQ ID NO: 2471973 - DNA, 25 bp, Homo sapien
ccttctgaaggtacccgtgggtgag

SEQ ID NO: 2471974 - DNA, 25 bp, Homo sapien
gtgtgaggaccttctgaaggtaccc

SEQ ID NO: 2471975 - DNA, 25 bp, Homo sapien
tgggtgaggggatcatttggatgga

SEQ ID NO: 2471976 - DNA, 25 bp, Homo sapien
cgtgggtgaggggatcatttggatg

SEQ ID NO: 2471977 - DNA, 25 bp, Homo sapien
cacagacccacacggtggtacctgg

SEQ ID NO: 2471978 - DNA, 25 bp, Homo sapien
ccacagacccacacggtggtacctg

SEQ ID NO: 2471979 - DNA, 25 bp, Homo sapien
ccacgtgggtcccttggtttgtgag

SEQ ID NO: 2471980 - DNA, 25 bp, Homo sapien
gtgactacagcccttccaaagaggg

SEQ ID NO: 2471981 - DNA, 25 bp, Homo sapien
ccttggtttgcaggccatagactga

SEQ ID NO: 2471982 - DNA, 25 bp, Homo sapien
gggccatatcacgtgcacagtgacc

SEQ ID NO: 2471983 - DNA, 25 bp, Homo sapien
agggttctttacagcagatggcatc

SEQ ID NO: 2471984 - DNA, 25 bp, Homo sapien
caaccggaggcgcccttcagggcag

SEQ ID NO: 2471985 - DNA, 25 bp, Homo sapien
gtttcttgtggaagtgtcttaagcc

SEQ ID NO: 2471986 - DNA, 25 bp, Homo sapien
tacagcagatggcatcgccgtcggc

SEQ ID NO: 2471987 - DNA, 25 bp, Homo sapien
ctggtcctggttgtgtctggctttg

SEQ ID NO: 2471988 - DNA, 25 bp, Homo sapien
tctggctttgggtccttcaatttct

SEQ ID NO: 2471989 - DNA, 25 bp, Homo sapien
tgtgtctggctttgggtccttcaat

SEQ ID NO: 2471990 - DNA, 25 bp, Homo sapien
tttctgctgtctgctttcctgtcat

SEQ ID NO: 2471991 - DNA, 25 bp, Homo sapien
accatgctgctcatgctccagactg

SEQ ID NO: 2471992 - DNA, 25 bp, Homo sapien
gggcaccatgctgctcatgctccag

SEQ ID NO: 2471993 - DNA, 25 bp, Homo sapien
ggcaccatgctgctcatgctccaga

SEQ ID NO: 2471994 - DNA, 25 bp, Homo sapien
atgctgctcatgctccagactgctg

SEQ ID NO: 2471995 - DNA, 25 bp, Homo sapien
aaaggacacagtgcatggcgggcca

SEQ ID NO: 2471996 - DNA, 25 bp, Homo sapien
ggcaaagttaacaccaggagttgcc

SEQ ID NO: 2471997 - DNA, 25 bp, Homo sapien
taacaccaggagttgccctgtccct

SEQ ID NO: 2471998 - DNA, 25 bp, Homo sapien
ctcggctgccctgacacactgtggc

SEQ ID NO: 2471999 - DNA, 25 bp, Homo sapien
gggaaggaaggactgtgagtgtaca

SEQ ID NO: 2472000 - DNA, 25 bp, Homo sapien
gaaggaaggactgtgagtgtacaat

SEQ ID NO: 2472001 - DNA, 25 bp, Homo sapien
gaaggactgtgagtgtacaatgcca

SEQ ID NO: 2472002 - DNA, 25 bp, Homo sapien
ggaaggactgtgagtgtacaatgcc

SEQ ID NO: 2472003 - DNA, 25 bp, Homo sapien
ccatttccaatccatggtgctggga

SEQ ID NO: 2472004 - DNA, 25 bp, Homo sapien
agcaagtcccatttccaatccatgg

SEQ ID NO: 2472005 - DNA, 25 bp, Homo sapien
ctgtccccttccacacttcagtggt

SEQ ID NO: 2472006 - DNA, 25 bp, Homo sapien
ttcagtggtcacagcaagtcccatt

SEQ ID NO: 2472007 - DNA, 25 bp, Homo sapien
aaacactgagataaggcccacggtg

SEQ ID NO: 2472008 - DNA, 25 bp, Homo sapien
cctctgttcttagttgcctcggatg

SEQ ID NO: 2472009 - DNA, 25 bp, Homo sapien
ctgaggctgccaagggtgcccacat

SEQ ID NO: 2472010 - DNA, 25 bp, Homo sapien
gggctctgagagtcgcctcctctgt

SEQ ID NO: 2472011 - DNA, 25 bp, Homo sapien
ctgtccgcagacaggaaataatgag

SEQ ID NO: 2472012 - DNA, 25 bp, Homo sapien
gaaataatgagaccggctcaggaca

SEQ ID NO: 2472013 - DNA, 25 bp, Homo sapien
gttcgagtttctacaccctctgaga

SEQ ID NO: 2472014 - DNA, 25 bp, Homo sapien
tgttttgtgaaagttcgagtttcta

SEQ ID NO: 2472015 - DNA, 25 bp, Homo sapien
agtgtgtagtctccttgaggtctgg

SEQ ID NO: 2472016 - DNA, 25 bp, Homo sapien
gtgtgtagtctccttgaggtctggg

SEQ ID NO: 2472017 - DNA, 25 bp, Homo sapien
tgtgtagtctccttgaggtctgggc

SEQ ID NO: 2472018 - DNA, 25 bp, Homo sapien
cggttggggtatgtctgggaggcct

SEQ ID NO: 2472019 - DNA, 25 bp, Homo sapien
tgcggttggggtatgtctgggaggc

SEQ ID NO: 2472020 - DNA, 25 bp, Homo sapien
ctccagctgcggttggggtatgtct

SEQ ID NO: 2472021 - DNA, 25 bp, Homo sapien
ttggggtatgtctgggaggcctgtg

SEQ ID NO: 2472022 - DNA, 25 bp, Homo sapien
ggctgccgtcgatttgatgagcaca

SEQ ID NO: 2472023 - DNA, 25 bp, Homo sapien
ctgccgtcgatttgatgagcacagc

SEQ ID NO: 2472024 - DNA, 25 bp, Homo sapien
gcaggctgccgtcgatttgatgagc

SEQ ID NO: 2472025 - DNA, 25 bp, Homo sapien
caggctgccgtcgatttgatgagca

SEQ ID NO: 2472026 - DNA, 25 bp, Homo sapien
tttcaggatgtggatccctccagga

SEQ ID NO: 2472027 - DNA, 25 bp, Homo sapien
gggctccgggtgtcagcgtggcgct

SEQ ID NO: 2472028 - DNA, 25 bp, Homo sapien
aagctgccactgtcggccctgggct

SEQ ID NO: 2472029 - DNA, 25 bp, Homo sapien
tcagcgtggcgctctgggcttttcc

SEQ ID NO: 2472030 - DNA, 25 bp, Homo sapien
ctgagggtggggagcactgccctga

SEQ ID NO: 2472031 - DNA, 25 bp, Homo sapien
tgagggtggggagcactgccctgac

SEQ ID NO: 2472032 - DNA, 25 bp, Homo sapien
ttcctggagggcattcgggcatcac

SEQ ID NO: 2472033 - DNA, 25 bp, Homo sapien
cacctgggggtgtatgtccaccacc

SEQ ID NO: 2472034 - DNA, 25 bp, Homo sapien
tacagcggggatgggcctgtattcc

SEQ ID NO: 2472035 - DNA, 25 bp, Homo sapien
ggatgggcctgtattccacacctgg

SEQ ID NO: 2472036 - DNA, 25 bp, Homo sapien
tggcagctgggtatcctcatgtgtg

SEQ ID NO: 2472037 - DNA, 25 bp, Homo sapien
gctggcagctgggtatcctcatgtg

SEQ ID NO: 2472038 - DNA, 25 bp, Homo sapien
cagctgggtatcctcatgtgtgcag

SEQ ID NO: 2472039 - DNA, 25 bp, Homo sapien
gcagctgggtatcctcatgtgtgca

SEQ ID NO: 2472040 - DNA, 25 bp, Homo sapien
ggaggggtcagatgctcactctgca

SEQ ID NO: 2472041 - DNA, 25 bp, Homo sapien
ggtcagatgctcactctgcagatcc

SEQ ID NO: 2472042 - DNA, 25 bp, Homo sapien
tgcagagagaaaccctttgcccttc

SEQ ID NO: 2472043 - DNA, 25 bp, Homo sapien
ctcgatcaccccaacatgcagagag

SEQ ID NO: 2472044 - DNA, 25 bp, Homo sapien
gcctcagggttccacggagcaggtt

SEQ ID NO: 2472045 - DNA, 25 bp, Homo sapien
tcagcaacctgtgtgcagccaaaga

SEQ ID NO: 2472046 - DNA, 25 bp, Homo sapien
gttgggcaagtgtgttaggaccatc

SEQ ID NO: 2472047 - DNA, 25 bp, Homo sapien
ccaggcctcagggttccacggagca

SEQ ID NO: 2472048 - DNA, 25 bp, Homo sapien
cgctgcagctttgcgactccggcca

SEQ ID NO: 2472049 - DNA, 25 bp, Homo sapien
cacagatcccggggactgactgggg

SEQ ID NO: 2472050 - DNA, 25 bp, Homo sapien
gatcccggggactgactggggttgc

SEQ ID NO: 2472051 - DNA, 25 bp, Homo sapien
gggactgactggggttgcaggcctt

SEQ ID NO: 2472052 - DNA, 25 bp, Homo sapien
tcagctgagccccgggcattaggaa

SEQ ID NO: 2472053 - DNA, 25 bp, Homo sapien
ctgagccccgggcattaggaattgg

SEQ ID NO: 2472054 - DNA, 25 bp, Homo sapien
acacgggtggggcattggaagccag

SEQ ID NO: 2472055 - DNA, 25 bp, Homo sapien
ctctgggggtactgactcaggaaga

SEQ ID NO: 2472056 - DNA, 25 bp, Homo sapien
cctggtcacactgaccactgggcat

SEQ ID NO: 2472057 - DNA, 25 bp, Homo sapien
gcccccactgtccagtggatggtgt

SEQ ID NO: 2472058 - DNA, 25 bp, Homo sapien
cccactgtccagtggatggtgtggg

SEQ ID NO: 2472059 - DNA, 25 bp, Homo sapien
ccccactgtccagtggatggtgtgg

SEQ ID NO: 2472060 - DNA, 25 bp, Homo sapien
cccccactgtccagtggatggtgtg

SEQ ID NO: 2472061 - DNA, 25 bp, Homo sapien
gcctgcagctgtccaagccacagag

SEQ ID NO: 2472062 - DNA, 25 bp, Homo sapien
aatgcgactccagtggagcggctcc

SEQ ID NO: 2472063 - DNA, 25 bp, Homo sapien
atgcgactccagtggagcggctccg

SEQ ID NO: 2472064 - DNA, 25 bp, Homo sapien
ctaaagacaccaggtggagaagcca

SEQ ID NO: 2472065 - DNA, 25 bp, Homo sapien
accaggtggagaagccacgtgcaga

SEQ ID NO: 2472066 - DNA, 25 bp, Homo sapien
agacaccaggtggagaagccacgtg

SEQ ID NO: 2472067 - DNA, 25 bp, Homo sapien
caccaggtggagaagccacgtgcag

SEQ ID NO: 2472068 - DNA, 25 bp, Homo sapien
tgggtagggcctatgttgtagttct

SEQ ID NO: 2472069 - DNA, 25 bp, Homo sapien
tgtcttatgcctcttggaagccaga

SEQ ID NO: 2472070 - DNA, 25 bp, Homo sapien
gtctgagtctcacgaggactgggca

SEQ ID NO: 2472071 - DNA, 25 bp, Homo sapien
ccagaggtgaccatggatgaagccc

SEQ ID NO: 2472072 - DNA, 25 bp, Homo sapien
cgtatttgcgcccttgtagtccaca

SEQ ID NO: 2472073 - DNA, 25 bp, Homo sapien
gtatttgcgcccttgtagtccacac

SEQ ID NO: 2472074 - DNA, 25 bp, Homo sapien
ctgcctcccgtatttgcgcccttgt

SEQ ID NO: 2472075 - DNA, 25 bp, Homo sapien
cctcccgtatttgcgcccttgtagt

SEQ ID NO: 2472076 - DNA, 25 bp, Homo sapien
gggcccaccgcatattctaaagtga

SEQ ID NO: 2472077 - DNA, 25 bp, Homo sapien
cagagacagactagcctggagttgg

SEQ ID NO: 2472078 - DNA, 25 bp, Homo sapien
tacttgtagcctagtttagggccca

SEQ ID NO: 2472079 - DNA, 25 bp, Homo sapien
tctaaagtgatgcacccaatggtgt

SEQ ID NO: 2472080 - DNA, 25 bp, Homo sapien
attcagcatccgtctttccggtggg

SEQ ID NO: 2472081 - DNA, 25 bp, Homo sapien
tcccattgattcagcatccgtcttt

SEQ ID NO: 2472082 - DNA, 25 bp, Homo sapien
attgattcagcatccgtctttccgg

SEQ ID NO: 2472083 - DNA, 25 bp, Homo sapien
gattcagcatccgtctttccggtgg

SEQ ID NO: 2472084 - DNA, 25 bp, Homo sapien
aagctcgggcgactctatgaaaatg

SEQ ID NO: 2472085 - DNA, 25 bp, Homo sapien
cacgtgcaaggcgacgttaagctcg

SEQ ID NO: 2472086 - DNA, 25 bp, Homo sapien
cctgtggagcttagaaaacacgtgc

SEQ ID NO: 2472087 - DNA, 25 bp, Homo sapien
gcggccctgtttaacctcgagctcg

SEQ ID NO: 2472088 - DNA, 25 bp, Homo sapien
gatttcaacgagaagttcatcctca

SEQ ID NO: 2472089 - DNA, 25 bp, Homo sapien
cgctggatgcacctgatccccgggg

SEQ ID NO: 2472090 - DNA, 25 bp, Homo sapien
cacgacttcgagatggtggatttca

SEQ ID NO: 2472091 - DNA, 25 bp, Homo sapien
gagaagttcatcctcagccactggc

SEQ ID NO: 2472092 - DNA, 25 bp, Homo sapien
aatgaacaggataagtaaaagaatc

SEQ ID NO: 2472093 - DNA, 25 bp, Homo sapien
tccttgaataggtaggaaaagaatg

SEQ ID NO: 2472094 - DNA, 25 bp, Homo sapien
atttggagagaatatactcacagtt

SEQ ID NO: 2472095 - DNA, 25 bp, Homo sapien
tggagagaatatactcacagtttct

SEQ ID NO: 2472096 - DNA, 25 bp, Homo sapien
cacagtcatcatataaactctccag

SEQ ID NO: 2472097 - DNA, 25 bp, Homo sapien
cagtcatcatataaactctccagaa

SEQ ID NO: 2472098 - DNA, 25 bp, Homo sapien
tcatcatataaactctccagaagtg

SEQ ID NO: 2472099 - DNA, 25 bp, Homo sapien
cacacagtcatcatataaactctcc

SEQ ID NO: 2472100 - DNA, 25 bp, Homo sapien
gtgttacgttgtctggctggtgtct

SEQ ID NO: 2472101 - DNA, 25 bp, Homo sapien
gttacgttgtctggctggtgtctcc

SEQ ID NO: 2472102 - DNA, 25 bp, Homo sapien
atggtgttacgttgtctggctggtg

SEQ ID NO: 2472103 - DNA, 25 bp, Homo sapien
ctggatggtgttacgttgtctggct

SEQ ID NO: 2472104 - DNA, 25 bp, Homo sapien
aaagctcagttctgttagtaaattg

SEQ ID NO: 2472105 - DNA, 25 bp, Homo sapien
ctgttagtaaattgcaaccaagatt

SEQ ID NO: 2472106 - DNA, 25 bp, Homo sapien
ccaaagctcagttctgttagtaaat

SEQ ID NO: 2472107 - DNA, 25 bp, Homo sapien
cagttctgttagtaaattgcaacca

SEQ ID NO: 2472108 - DNA, 25 bp, Homo sapien
aaaccatactcctatcacatactct

SEQ ID NO: 2472109 - DNA, 25 bp, Homo sapien
cctgtgactggcatcatgtctgaaa

SEQ ID NO: 2472110 - DNA, 25 bp, Homo sapien
catctgtctacttgtcagtctcctg

SEQ ID NO: 2472111 - DNA, 25 bp, Homo sapien
gcagagaccacatcttatcgtcatt

SEQ ID NO: 2472112 - DNA, 25 bp, Homo sapien
cagtcatcctgagaatgttcttaat

SEQ ID NO: 2472113 - DNA, 25 bp, Homo sapien
tcttaattgttgtaagtgggacttg

SEQ ID NO: 2472114 - DNA, 25 bp, Homo sapien
agtttttccaattcaacagtcatcc

SEQ ID NO: 2472115 - DNA, 25 bp, Homo sapien
tgggacttgtgttgttcccatgtat

SEQ ID NO: 2472116 - DNA, 25 bp, Homo sapien
tctcactgaccagttggctcgcctt

SEQ ID NO: 2472117 - DNA, 25 bp, Homo sapien
cactgaccagttggctcgccttgta

SEQ ID NO: 2472118 - DNA, 25 bp, Homo sapien
cttctcactgaccagttggctcgcc

SEQ ID NO: 2472119 - DNA, 25 bp, Homo sapien
tcactgaccagttggctcgccttgt

SEQ ID NO: 2472120 - DNA, 25 bp, Homo sapien
ccccggatcttgcacgcggtgttga

SEQ ID NO: 2472121 - DNA, 25 bp, Homo sapien
ccggatcttgcacgcggtgttgagc

SEQ ID NO: 2472122 - DNA, 25 bp, Homo sapien
cctgactgcaggtagccggggttct

SEQ ID NO: 2472123 - DNA, 25 bp, Homo sapien
gagcccccctgactgcaggtagccg

SEQ ID NO: 2472124 - DNA, 25 bp, Homo sapien
gttgactcacctactggatgtcggt

SEQ ID NO: 2472125 - DNA, 25 bp, Homo sapien
ctcacctactggatgtcggtctcca

SEQ ID NO: 2472126 - DNA, 25 bp, Homo sapien
gactcacctactggatgtcggtctc

SEQ ID NO: 2472127 - DNA, 25 bp, Homo sapien
ggagttgactcacctactggatgtc

SEQ ID NO: 2472128 - DNA, 25 bp, Homo sapien
tcaggctttccgaggtcaaagcact

SEQ ID NO: 2472129 - DNA, 25 bp, Homo sapien
ctttccgaggtcaaagcactcccgg

SEQ ID NO: 2472130 - DNA, 25 bp, Homo sapien
cggaaagaggacgaagctgcgatct

SEQ ID NO: 2472131 - DNA, 25 bp, Homo sapien
aagcttcccggatcctgcacttgaa

SEQ ID NO: 2472132 - DNA, 25 bp, Homo sapien
aggcacgagcacgtccacatagctg

SEQ ID NO: 2472133 - DNA, 25 bp, Homo sapien
gcacgagcacgtccacatagctgag

SEQ ID NO: 2472134 - DNA, 25 bp, Homo sapien
cagaggcacgagcacgtccacatag

SEQ ID NO: 2472135 - DNA, 25 bp, Homo sapien
ggcagaggcacgagcacgtccacat

SEQ ID NO: 2472136 - DNA, 25 bp, Homo sapien
tgctgagggttgtgtaggtggctgg

SEQ ID NO: 2472137 - DNA, 25 bp, Homo sapien
cagagtgacacaggcttctgtgggc

SEQ ID NO: 2472138 - DNA, 25 bp, Homo sapien
cccgtgcaaggtgtgctgagggttg

SEQ ID NO: 2472139 - DNA, 25 bp, Homo sapien
gtcccgtgcaaggtgtgctgagggt

SEQ ID NO: 2472140 - DNA, 25 bp, Homo sapien
cactaggggcttgaagatttgctca

SEQ ID NO: 2472141 - DNA, 25 bp, Homo sapien
gtggggtggccactaggggcttgaa

SEQ ID NO: 2472142 - DNA, 25 bp, Homo sapien
ggccactaggggcttgaagatttgc

SEQ ID NO: 2472143 - DNA, 25 bp, Homo sapien
gggtggccactaggggcttgaagat

SEQ ID NO: 2472144 - DNA, 25 bp, Homo sapien
tccagattatgggacaatttacaaa

SEQ ID NO: 2472145 - DNA, 25 bp, Homo sapien
cagattatgggacaatttacaaaac

SEQ ID NO: 2472146 - DNA, 25 bp, Homo sapien
ccacctgcaatcacgaggcaggaag

SEQ ID NO: 2472147 - DNA, 25 bp, Homo sapien
acctgcaatcacgaggcaggaagga

SEQ ID NO: 2472148 - DNA, 25 bp, Homo sapien
tctgaggctgcctccggctcagtag

SEQ ID NO: 2472149 - DNA, 25 bp, Homo sapien
gctcagtagtcagctcaatgctcat

SEQ ID NO: 2472150 - DNA, 25 bp, Homo sapien
gctcaatgctcatgtgcttcttctg

SEQ ID NO: 2472151 - DNA, 25 bp, Homo sapien
ccttcatgaacactctttctggatt

SEQ ID NO: 2472152 - DNA, 25 bp, Homo sapien
tagatttcctgctgagaaataaggc

SEQ ID NO: 2472153 - DNA, 25 bp, Homo sapien
aaaagcagtttaatgaatggtaaca

SEQ ID NO: 2472154 - DNA, 25 bp, Homo sapien
taatttagcgcagtgataacatcac

SEQ ID NO: 2472155 - DNA, 25 bp, Homo sapien
tcttatcataagtgtctagctgctc

SEQ ID NO: 2472156 - DNA, 25 bp, Homo sapien
aaaacaggagcttatctccatcttg

SEQ ID NO: 2472157 - DNA, 25 bp, Homo sapien
aacaggagcttatctccatcttgca

SEQ ID NO: 2472158 - DNA, 25 bp, Homo sapien
tcaaaacaggagcttatctccatct

SEQ ID NO: 2472159 - DNA, 25 bp, Homo sapien
aaacaggagcttatctccatcttgc

SEQ ID NO: 2472160 - DNA, 25 bp, Homo sapien
taaatttgttacctagaaggctgga

SEQ ID NO: 2472161 - DNA, 25 bp, Homo sapien
gctttgaagggccttttctggatgc

SEQ ID NO: 2472162 - DNA, 25 bp, Homo sapien
gcaggtttttgcctacactttgaac

SEQ ID NO: 2472163 - DNA, 25 bp, Homo sapien
actttgaacctttgccaggctgttt

SEQ ID NO: 2472164 - DNA, 25 bp, Homo sapien
gcccatgaggactctgttcactctc

SEQ ID NO: 2472165 - DNA, 25 bp, Homo sapien
gagactgttggcttctgctcttggg

SEQ ID NO: 2472166 - DNA, 25 bp, Homo sapien
gcttttgcagttgtggaaggcagaa

SEQ ID NO: 2472167 - DNA, 25 bp, Homo sapien
tcccgctacgttctcgggcccctgc

SEQ ID NO: 2472168 - DNA, 25 bp, Homo sapien
aagaggagactgttggcttctgctc

SEQ ID NO: 2472169 - DNA, 25 bp, Homo sapien
attttttaactctagcctttgcatt

SEQ ID NO: 2472170 - DNA, 25 bp, Homo sapien
attaaaatggtgtaggctaagtctt

SEQ ID NO: 2472171 - DNA, 25 bp, Homo sapien
aatggtgtaggctaagtctttcaat

SEQ ID NO: 2472172 - DNA, 25 bp, Homo sapien
taaaatggtgtaggctaagtctttc

SEQ ID NO: 2472173 - DNA, 25 bp, Homo sapien
gagatggtgccttctggcatagtag

SEQ ID NO: 2472174 - DNA, 25 bp, Homo sapien
agttgaatgcagtcctagtgggaat

SEQ ID NO: 2472175 - DNA, 25 bp, Homo sapien
aggtctcggagcagtccgtcttcaa

SEQ ID NO: 2472176 - DNA, 25 bp, Homo sapien
cacttgcacataggtctcggagcag

SEQ ID NO: 2472177 - DNA, 25 bp, Homo sapien
tagttgatgggttagcggaatttca

SEQ ID NO: 2472178 - DNA, 25 bp, Homo sapien
atgacggactgtagttgatgggtta

SEQ ID NO: 2472179 - DNA, 25 bp, Homo sapien
tggcatatgctaaatgatgggaaag

SEQ ID NO: 2472180 - DNA, 25 bp, Homo sapien
ttcctggcatatgctaaatgatggg

SEQ ID NO: 2472181 - DNA, 25 bp, Homo sapien
taaatgatgggaaagtctgggtctc

SEQ ID NO: 2472182 - DNA, 25 bp, Homo sapien
agtcccaggttctcctgtgtgggca

SEQ ID NO: 2472183 - DNA, 25 bp, Homo sapien
cagatatcaccaagattagtttgtt

SEQ ID NO: 2472184 - DNA, 25 bp, Homo sapien
ttagtttgttgttatagccatatcc

SEQ ID NO: 2472185 - DNA, 25 bp, Homo sapien
tcgttagtattacagtcacagatat

SEQ ID NO: 2472186 - DNA, 25 bp, Homo sapien
tacagtcacagatatcaccaagatt

SEQ ID NO: 2472187 - DNA, 25 bp, Homo sapien
gactctaataaatctaccagacaat

SEQ ID NO: 2472188 - DNA, 25 bp, Homo sapien
ataaatctaccagacaatacttctc

SEQ ID NO: 2472189 - DNA, 25 bp, Homo sapien
tctaataaatctaccagacaatact

SEQ ID NO: 2472190 - DNA, 25 bp, Homo sapien
ttgtgactctaataaatctaccaga

SEQ ID NO: 2472191 - DNA, 25 bp, Homo sapien
ctagagtggccagatgtagacttta

SEQ ID NO: 2472192 - DNA, 25 bp, Homo sapien
tagagtggccagatgtagactttag

SEQ ID NO: 2472193 - DNA, 25 bp, Homo sapien
ggctggctgccacaatagtggaaat

SEQ ID NO: 2472194 - DNA, 25 bp, Homo sapien
gggctggctgccacaatagtggaaa

SEQ ID NO: 2472195 - DNA, 25 bp, Homo sapien
aataaggttggattggtaggatagc

SEQ ID NO: 2472196 - DNA, 25 bp, Homo sapien
ttggattggtaggatagcatcaagg

SEQ ID NO: 2472197 - DNA, 25 bp, Homo sapien
gttaaaggtagttatctcttgcaga

SEQ ID NO: 2472198 - DNA, 25 bp, Homo sapien
ttaaaggtagttatctcttgcagac

SEQ ID NO: 2472199 - DNA, 25 bp, Homo sapien
tgtcacaaggccagttgattagttg

SEQ ID NO: 2472200 - DNA, 25 bp, Homo sapien
taaaggtagttatctcttgcagaca

SEQ ID NO: 2472201 - DNA, 25 bp, Homo sapien
catcctcattggaagactccttgtc

SEQ ID NO: 2472202 - DNA, 25 bp, Homo sapien
aagactccttgtcatgcagcttcat

SEQ ID NO: 2472203 - DNA, 25 bp, Homo sapien
ctggtgtccctgttgaagatctcat

SEQ ID NO: 2472204 - DNA, 25 bp, Homo sapien
gaagatctcatcctcattggaagac

SEQ ID NO: 2472205 - DNA, 25 bp, Homo sapien
cagccgactctccagttggggtctt

SEQ ID NO: 2472206 - DNA, 25 bp, Homo sapien
ctcagcagccgactctccagttggg

SEQ ID NO: 2472207 - DNA, 25 bp, Homo sapien
cagcagccgactctccagttggggt

SEQ ID NO: 2472208 - DNA, 25 bp, Homo sapien
ccctcagcagccgactctccagttg

SEQ ID NO: 2472209 - DNA, 25 bp, Homo sapien
tatggtcaaatggtcttcttgcttg

SEQ ID NO: 2472210 - DNA, 25 bp, Homo sapien
aggtcatgtaaacagtgacacggga

SEQ ID NO: 2472211 - DNA, 25 bp, Homo sapien
ggtcaaatggtcttcttgcttgttt

SEQ ID NO: 2472212 - DNA, 25 bp, Homo sapien
tgacacgggacccatcgcagggcac

SEQ ID NO: 2472213 - DNA, 25 bp, Homo sapien
ctgataactctgtgtatataaaaac

SEQ ID NO: 2472214 - DNA, 25 bp, Homo sapien
tgtctgataactctgtgtatataaa

SEQ ID NO: 2472215 - DNA, 25 bp, Homo sapien
gataactctgtgtatataaaaacta

SEQ ID NO: 2472216 - DNA, 25 bp, Homo sapien
agccacaaagaggtgtccgtaagtt

SEQ ID NO: 2472217 - DNA, 25 bp, Homo sapien
gaaaaactcgccttaaaagcagctc

SEQ ID NO: 2472218 - DNA, 25 bp, Homo sapien
aatacttggtcgtctacacaggcgc

SEQ ID NO: 2472219 - DNA, 25 bp, Homo sapien
tgagctccagtaatcgcgaaaaact

SEQ ID NO: 2472220 - DNA, 25 bp, Homo sapien
cgccgtccggaacgccaaatacttg

SEQ ID NO: 2472221 - DNA, 25 bp, Homo sapien
aaaagtgccaaagtctcagccttgt

SEQ ID NO: 2472222 - DNA, 25 bp, Homo sapien
agaattcaaaagtgccaaagtctca

SEQ ID NO: 2472223 - DNA, 25 bp, Homo sapien
ctgaacagacaggatttgagaattc

SEQ ID NO: 2472224 - DNA, 25 bp, Homo sapien
tcaaaagtgccaaagtctcagcctt

SEQ ID NO: 2472225 - DNA, 25 bp, Homo sapien
tcaggagcaaatcgtctgagagccg

SEQ ID NO: 2472226 - DNA, 25 bp, Homo sapien
tgagagccgttcaaggaagtcaaat

SEQ ID NO: 2472227 - DNA, 25 bp, Homo sapien
caaatcgtctgagagccgttcaagg

SEQ ID NO: 2472228 - DNA, 25 bp, Homo sapien
cgtctgagagccgttcaaggaagtc

SEQ ID NO: 2472229 - DNA, 25 bp, Homo sapien
cccacagtttatcagacatgcacag

SEQ ID NO: 2472230 - DNA, 25 bp, Homo sapien
tttttgtttcctcttgcggagctgc

SEQ ID NO: 2472231 - DNA, 25 bp, Homo sapien
ttgtttcctcttgcggagctgccgc

SEQ ID NO: 2472232 - DNA, 25 bp, Homo sapien
tcgactggactatctgttcccacag

SEQ ID NO: 2472233 - DNA, 25 bp, Homo sapien
ggctggactcagatgacacaacgcc

SEQ ID NO: 2472234 - DNA, 25 bp, Homo sapien
tcagatgacacaacgccaggaaaaa

SEQ ID NO: 2472235 - DNA, 25 bp, Homo sapien
tggactcagatgacacaacgccagg

SEQ ID NO: 2472236 - DNA, 25 bp, Homo sapien
actcagatgacacaacgccaggaaa

SEQ ID NO: 2472237 - DNA, 25 bp, Homo sapien
ccgccgggaacttgtcgtatttctg

SEQ ID NO: 2472238 - DNA, 25 bp, Homo sapien
ccaggagtgctgttcccggtcttgt

SEQ ID NO: 2472239 - DNA, 25 bp, Homo sapien
ttcccacgccgatggttccagcaaa

SEQ ID NO: 2472240 - DNA, 25 bp, Homo sapien
tatttctggcgagggaagagacagc

SEQ ID NO: 2472241 - DNA, 25 bp, Homo sapien
ggtgctcggcggcaccggagcagga

SEQ ID NO: 2472242 - DNA, 25 bp, Homo sapien
cacccgcccccttgtctgagtgacg

SEQ ID NO: 2472243 - DNA, 25 bp, Homo sapien
ttgtctgagtgacgccgcacctgag

SEQ ID NO: 2472244 - DNA, 25 bp, Homo sapien
tgctcggcggcaccggagcaggact

SEQ ID NO: 2472245 - DNA, 25 bp, Homo sapien
agcagccggcgacgcgactgcagcg

SEQ ID NO: 2472246 - DNA, 25 bp, Homo sapien
cccgagcagccggcgacgcgactgc

SEQ ID NO: 2472247 - DNA, 25 bp, Homo sapien
gagcggacgccacggcctttccctc

SEQ ID NO: 2472248 - DNA, 25 bp, Homo sapien
cgagcagccggcgacgcgactgcag

SEQ ID NO: 2472249 - DNA, 25 bp, Homo sapien
tcaggcgcacttcgacaggcccgtt

SEQ ID NO: 2472250 - DNA, 25 bp, Homo sapien
caggcccgttcctacggcctccgag

SEQ ID NO: 2472251 - DNA, 25 bp, Homo sapien
ctgtcaggcgcacttcgacaggccc

SEQ ID NO: 2472252 - DNA, 25 bp, Homo sapien
tcgacaggcccgttcctacggcctc

SEQ ID NO: 2472253 - DNA, 25 bp, Homo sapien
cacgggagctcttcatccccttcac

SEQ ID NO: 2472254 - DNA, 25 bp, Homo sapien
acgatctcacctgggcggtagccca

SEQ ID NO: 2472255 - DNA, 25 bp, Homo sapien
aataatcctcgccacgggagctctt

SEQ ID NO: 2472256 - DNA, 25 bp, Homo sapien
catccccttcacgatctcacctggg

SEQ ID NO: 2472257 - DNA, 25 bp, Homo sapien
atataaacgtggacaatttatcagg

SEQ ID NO: 2472258 - DNA, 25 bp, Homo sapien
aatataaacgtggacaatttatcag

SEQ ID NO: 2472259 - DNA, 25 bp, Homo sapien
gacaatttatcaggggtaaatggtg

SEQ ID NO: 2472260 - DNA, 25 bp, Homo sapien
atttatcaggggtaaatggtgaagg

SEQ ID NO: 2472261 - DNA, 25 bp, Homo sapien
acacacaaatcctctacggaaaatt

SEQ ID NO: 2472262 - DNA, 25 bp, Homo sapien
cacacaaatcctctacggaaaatta

SEQ ID NO: 2472263 - DNA, 25 bp, Homo sapien
acaaatcctctacggaaaattatct

SEQ ID NO: 2472264 - DNA, 25 bp, Homo sapien
cacaaatcctctacggaaaattatc

SEQ ID NO: 2472265 - DNA, 25 bp, Homo sapien
tgtttttactattaagaggacacag

SEQ ID NO: 2472266 - DNA, 25 bp, Homo sapien
acagaagagactccactgtaaccaa

SEQ ID NO: 2472267 - DNA, 25 bp, Homo sapien
ctcaaactgtttttactattaagag

SEQ ID NO: 2472268 - DNA, 25 bp, Homo sapien
gagactccactgtaaccaaagaagg

SEQ ID NO: 2472269 - DNA, 25 bp, Homo sapien
gcagagagccgggatcactcactgc

SEQ ID NO: 2472270 - DNA, 25 bp, Homo sapien
cagagagccgggatcactcactgca

SEQ ID NO: 2472271 - DNA, 25 bp, Homo sapien
gttatcctaaaaccagtcttcatgg

SEQ ID NO: 2472272 - DNA, 25 bp, Homo sapien
aaaaaaatctgaacgatggctgctg

SEQ ID NO: 2472273 - DNA, 25 bp, Homo sapien
ctaaaaccagtcttcatggctccca

SEQ ID NO: 2472274 - DNA, 25 bp, Homo sapien
aacgatggctgctgttgaatcttct

SEQ ID NO: 2472275 - DNA, 25 bp, Homo sapien
ttttatcattaatcgcttccagaga

SEQ ID NO: 2472276 - DNA, 25 bp, Homo sapien
tatcattaatcgcttccagagatct

SEQ ID NO: 2472277 - DNA, 25 bp, Homo sapien
atcattaatcgcttccagagatctt

SEQ ID NO: 2472278 - DNA, 25 bp, Homo sapien
aattttatcattaatcgcttccaga

SEQ ID NO: 2472279 - DNA, 25 bp, Homo sapien
ttaaaacatttcagtagagagctac

SEQ ID NO: 2472280 - DNA, 25 bp, Homo sapien
cagtgtttatcctacatttatataa

SEQ ID NO: 2472281 - DNA, 25 bp, Homo sapien
cagaaataaatcactggctgggtgc

SEQ ID NO: 2472282 - DNA, 25 bp, Homo sapien
taagattagggaaagcagaattaca

SEQ ID NO: 2472283 - DNA, 25 bp, Homo sapien
tctgaaggtttagagatttgaaata

SEQ ID NO: 2472284 - DNA, 25 bp, Homo sapien
cattcgaaggctggtcatgcaggga

SEQ ID NO: 2472285 - DNA, 25 bp, Homo sapien
tcacatatgtaagccaagcacagag

SEQ ID NO: 2472286 - DNA, 25 bp, Homo sapien
ttataatcaccactgcgacacacat

SEQ ID NO: 2472287 - DNA, 25 bp, Homo sapien
gcaggtttctaacatacttcagctg

SEQ ID NO: 2472288 - DNA, 25 bp, Homo sapien
tggaggatgctagcaggtttctaac

SEQ ID NO: 2472289 - DNA, 25 bp, Homo sapien
tactgtggaggatgctagcaggttt

SEQ ID NO: 2472290 - DNA, 25 bp, Homo sapien
ggatgctagcaggtttctaacatac

SEQ ID NO: 2472291 - DNA, 25 bp, Homo sapien
cataggagccattggaaaccttgtc

SEQ ID NO: 2472292 - DNA, 25 bp, Homo sapien
ccacccttgctggagcttgccaaaa

SEQ ID NO: 2472293 - DNA, 25 bp, Homo sapien
tacaggacccaagttcagaaggcca

SEQ ID NO: 2472294 - DNA, 25 bp, Homo sapien
tttggaaagcccttgaaacgtgtca

SEQ ID NO: 2472295 - DNA, 25 bp, Homo sapien
tacatactgtatgaagcttgtcctc

SEQ ID NO: 2472296 - DNA, 25 bp, Homo sapien
gcttgtcctctgactaggtttctaa

SEQ ID NO: 2472297 - DNA, 25 bp, Homo sapien
tgtttctctactaagaactctttct

SEQ ID NO: 2472298 - DNA, 25 bp, Homo sapien
gaaactatacttgaacagttccaac

SEQ ID NO: 2472299 - DNA, 25 bp, Homo sapien
cgatgccatcatcacgctcccgccc

SEQ ID NO: 2472300 - DNA, 25 bp, Homo sapien
gcgatgccatcatcacgctcccgcc

SEQ ID NO: 2472301 - DNA, 25 bp, Homo sapien
gatgccatcatcacgctcccgcccc

SEQ ID NO: 2472302 - DNA, 25 bp, Homo sapien
tccggaggctgatgccttatccatt

SEQ ID NO: 2472303 - DNA, 25 bp, Homo sapien
ccggaggctgatgccttatccatta

SEQ ID NO: 2472304 - DNA, 25 bp, Homo sapien
ccccagtttcactgaagcggtcttt

SEQ ID NO: 2472305 - DNA, 25 bp, Homo sapien
tatcccccagtttcactgaagcggt

SEQ ID NO: 2472306 - DNA, 25 bp, Homo sapien
ttgaagtttctgatatcccccagtt

SEQ ID NO: 2472307 - DNA, 25 bp, Homo sapien
ccagtttcactgaagcggtctttgt

SEQ ID NO: 2472308 - DNA, 25 bp, Homo sapien
aatagctttctaacttatacagaac

SEQ ID NO: 2472309 - DNA, 25 bp, Homo sapien
gcagacttaggcatttgcagattcc

SEQ ID NO: 2472310 - DNA, 25 bp, Homo sapien
gaaaattattgctcgctcctctctc

SEQ ID NO: 2472311 - DNA, 25 bp, Homo sapien
aaacatgatgcaagttgataaccac

SEQ ID NO: 2472312 - DNA, 25 bp, Homo sapien
gaggcctcggccaggggtgacccca

SEQ ID NO: 2472313 - DNA, 25 bp, Homo sapien
aggcctcggccaggggtgaccccag

SEQ ID NO: 2472314 - DNA, 25 bp, Homo sapien
cctcggccaggggtgaccccagcat

SEQ ID NO: 2472315 - DNA, 25 bp, Homo sapien
gcctcggccaggggtgaccccagca

SEQ ID NO: 2472316 - DNA, 25 bp, Homo sapien
cggaggtctcccttgtgaagtcctt

SEQ ID NO: 2472317 - DNA, 25 bp, Homo sapien
gaggtctcccttgtgaagtcctttc

SEQ ID NO: 2472318 - DNA, 25 bp, Homo sapien
agccacggaggtctcccttgtgaag

SEQ ID NO: 2472319 - DNA, 25 bp, Homo sapien
gtctcccttgtgaagtcctttctta

SEQ ID NO: 2472320 - DNA, 25 bp, Homo sapien
caatgttattggaaggcagatttct

SEQ ID NO: 2472321 - DNA, 25 bp, Homo sapien
atgttattggaaggcagatttctgc

SEQ ID NO: 2472322 - DNA, 25 bp, Homo sapien
gttattggaaggcagatttctgcag

SEQ ID NO: 2472323 - DNA, 25 bp, Homo sapien
ggcaatgttattggaaggcagattt

SEQ ID NO: 2472324 - DNA, 25 bp, Homo sapien
tcggcacacgcgaggatgacctttg

SEQ ID NO: 2472325 - DNA, 25 bp, Homo sapien
accccatcggcacacgcgaggatga

SEQ ID NO: 2472326 - DNA, 25 bp, Homo sapien
tgagcacatgtacaccccatcggca

SEQ ID NO: 2472327 - DNA, 25 bp, Homo sapien
cgcgaggatgacctttggcacagaa

SEQ ID NO: 2472328 - DNA, 25 bp, Homo sapien
gaatagcagcgtgcgtgcttttgtg

SEQ ID NO: 2472329 - DNA, 25 bp, Homo sapien
cttgggagccgcaggacgtggcctg

SEQ ID NO: 2472330 - DNA, 25 bp, Homo sapien
tcacggcacgaatagcagcgtgcgt

SEQ ID NO: 2472331 - DNA, 25 bp, Homo sapien
tgcggtggcttcacggtcacggcac

SEQ ID NO: 2472332 - DNA, 25 bp, Homo sapien
cggctccgccatggttctgtcggag

SEQ ID NO: 2472333 - DNA, 25 bp, Homo sapien
tccgccatggttctgtcggaggtgc

SEQ ID NO: 2472334 - DNA, 25 bp, Homo sapien
gctccgccatggttctgtcggaggt

SEQ ID NO: 2472335 - DNA, 25 bp, Homo sapien
ctccgccatggttctgtcggaggtg

SEQ ID NO: 2472336 - DNA, 25 bp, Homo sapien
tttggaagtcaggatagtggacccc

SEQ ID NO: 2472337 - DNA, 25 bp, Homo sapien
tgtgctgtagggaattaagggaaaa

SEQ ID NO: 2472338 - DNA, 25 bp, Homo sapien
tctggcatttgcaagagcctcaaac

SEQ ID NO: 2472339 - DNA, 25 bp, Homo sapien
tgtttagagggcgttttgtctccat

SEQ ID NO: 2472340 - DNA, 25 bp, Homo sapien
ttcctcgcaggggtgctatccaagg

SEQ ID NO: 2472341 - DNA, 25 bp, Homo sapien
agaagaccgacagtggttggttgtg

SEQ ID NO: 2472342 - DNA, 25 bp, Homo sapien
ggtgctatccaagggtacattattc

SEQ ID NO: 2472343 - DNA, 25 bp, Homo sapien
aagaccgacagtggttggttgtgtt

SEQ ID NO: 2472344 - DNA, 25 bp, Homo sapien
ggtgttctgacccatgatgcctgtg

SEQ ID NO: 2472345 - DNA, 25 bp, Homo sapien
tatcgggctctttggtgtctaggga

SEQ ID NO: 2472346 - DNA, 25 bp, Homo sapien
cctaaggcgccttcataccgatgtg

SEQ ID NO: 2472347 - DNA, 25 bp, Homo sapien
cactgtagtggccagagaaaatgcc

SEQ ID NO: 2472348 - DNA, 25 bp, Homo sapien
tgcttcctgggtgacaccctgtccg

SEQ ID NO: 2472349 - DNA, 25 bp, Homo sapien
ggtggccctaagtccaacgactgct

SEQ ID NO: 2472350 - DNA, 25 bp, Homo sapien
cctttgtagtgggttgagctgcccc

SEQ ID NO: 2472351 - DNA, 25 bp, Homo sapien
acggccagaggagaatttggttgct

SEQ ID NO: 2472352 - DNA, 25 bp, Homo sapien
tgagactctgcggggttctcgagca

SEQ ID NO: 2472353 - DNA, 25 bp, Homo sapien
ggcctgagactctgcggggttctcg

SEQ ID NO: 2472354 - DNA, 25 bp, Homo sapien
gagactctgcggggttctcgagcat

SEQ ID NO: 2472355 - DNA, 25 bp, Homo sapien
cctgagactctgcggggttctcgag

SEQ ID NO: 2472356 - DNA, 25 bp, Homo sapien
tcattagtgccgtatccagtctggg

SEQ ID NO: 2472357 - DNA, 25 bp, Homo sapien
atgcttggccgaccgtgtttcccta

SEQ ID NO: 2472358 - DNA, 25 bp, Homo sapien
ccagtctgggcacggaggtgctgca

SEQ ID NO: 2472359 - DNA, 25 bp, Homo sapien
aggtgctgcatgcttggccgaccgt

SEQ ID NO: 2472360 - DNA, 25 bp, Homo sapien
tgcaacacgtttgcatctggccact

SEQ ID NO: 2472361 - DNA, 25 bp, Homo sapien
ggtggctcttatgcaacacgtttgc

SEQ ID NO: 2472362 - DNA, 25 bp, Homo sapien
gcctctgggtggctcttatgcaaca

SEQ ID NO: 2472363 - DNA, 25 bp, Homo sapien
ttatgcaacacgtttgcatctggcc

SEQ ID NO: 2472364 - DNA, 25 bp, Homo sapien
tggctgagaaattcctgactgggtc

SEQ ID NO: 2472365 - DNA, 25 bp, Homo sapien
tgggccgacagctcctttaggagaa

SEQ ID NO: 2472366 - DNA, 25 bp, Homo sapien
aggaacttcgtggatggtctgcaga

SEQ ID NO: 2472367 - DNA, 25 bp, Homo sapien
gacttggtaaaagtgcccatctctc

SEQ ID NO: 2472368 - DNA, 25 bp, Homo sapien
aatgatgtgtaatattatcatctgg

SEQ ID NO: 2472369 - DNA, 25 bp, Homo sapien
cagattcttgctttgcatccaagag

SEQ ID NO: 2472370 - DNA, 25 bp, Homo sapien
gcctcctcagattcttgctttgcat

SEQ ID NO: 2472371 - DNA, 25 bp, Homo sapien
tatcatctggtgaaagtgactttct

SEQ ID NO: 2472372 - DNA, 25 bp, Homo sapien
cctcctttgcggtgttgacagccat

SEQ ID NO: 2472373 - DNA, 25 bp, Homo sapien
ctcctggaacttggcgctgtttcgt

SEQ ID NO: 2472374 - DNA, 25 bp, Homo sapien
ggaacttggcgctgtttcgtagcct

SEQ ID NO: 2472375 - DNA, 25 bp, Homo sapien
tttcgtagccttgccagtggccaga

SEQ ID NO: 2472376 - DNA, 25 bp, Homo sapien
tgggcctgtccattgatttcttcat

SEQ ID NO: 2472377 - DNA, 25 bp, Homo sapien
gctcctggggcacgcgctgagtcat

SEQ ID NO: 2472378 - DNA, 25 bp, Homo sapien
agctcctggggcacgcgctgagtca

SEQ ID NO: 2472379 - DNA, 25 bp, Homo sapien
ttagaagtagatgtggcagttgagg

SEQ ID NO: 2472380 - DNA, 25 bp, Homo sapien
tagaagtagatgtggcagttgaggg

SEQ ID NO: 2472381 - DNA, 25 bp, Homo sapien
gtagatgtggcagttgaggggactc

SEQ ID NO: 2472382 - DNA, 25 bp, Homo sapien
gatgtggcagttgaggggactcagg

SEQ ID NO: 2472383 - DNA, 25 bp, Homo sapien
tcacgtgccgggtgtcagacccaga

SEQ ID NO: 2472384 - DNA, 25 bp, Homo sapien
ctggggatgctcacgtgccgggtgt

SEQ ID NO: 2472385 - DNA, 25 bp, Homo sapien
gggatgctcacgtgccgggtgtcag

SEQ ID NO: 2472386 - DNA, 25 bp, Homo sapien
atgctcacgtgccgggtgtcagacc

SEQ ID NO: 2472387 - DNA, 25 bp, Homo sapien
agcctgtcgctttgtccaccacgga

SEQ ID NO: 2472388 - DNA, 25 bp, Homo sapien
tgtccccgtactctctggacgagtc

SEQ ID NO: 2472389 - DNA, 25 bp, Homo sapien
catgtccccgtactctctggacgag

SEQ ID NO: 2472390 - DNA, 25 bp, Homo sapien
ccaccacggagtgatgatggtgcct

SEQ ID NO: 2472391 - DNA, 25 bp, Homo sapien
gacagcagagtaggtgtcggcaaac

SEQ ID NO: 2472392 - DNA, 25 bp, Homo sapien
cagagtaggtgtcggcaaacttcgg

SEQ ID NO: 2472393 - DNA, 25 bp, Homo sapien
tgtcggcaaacttcggcaccagagt

SEQ ID NO: 2472394 - DNA, 25 bp, Homo sapien
taggtgtcggcaaacttcggcacca

SEQ ID NO: 2472395 - DNA, 25 bp, Homo sapien
tcctttgcacgctgcccaactgtct

SEQ ID NO: 2472396 - DNA, 25 bp, Homo sapien
tgtgcctggactgcctcccagtttc

SEQ ID NO: 2472397 - DNA, 25 bp, Homo sapien
gccttcctttgcacgctgcccaact

SEQ ID NO: 2472398 - DNA, 25 bp, Homo sapien
cagtttcctatgtccccctccagtg

SEQ ID NO: 2472399 - DNA, 25 bp, Homo sapien
gcctccaccggctctccagggaaga

SEQ ID NO: 2472400 - DNA, 25 bp, Homo sapien
cagaaagatcttccgaactcggaga

SEQ ID NO: 2472401 - DNA, 25 bp, Homo sapien
gatcttccgaactcggagaggaagt

SEQ ID NO: 2472402 - DNA, 25 bp, Homo sapien
tttgaacttgagaatcggatatgca

SEQ ID NO: 2472403 - DNA, 25 bp, Homo sapien
tccaggagggctggcgtgaggtgtc

SEQ ID NO: 2472404 - DNA, 25 bp, Homo sapien
gctgtcatattgacctcatccccag

SEQ ID NO: 2472405 - DNA, 25 bp, Homo sapien
agggtgtgcgggagcgaccagacct

SEQ ID NO: 2472406 - DNA, 25 bp, Homo sapien
cctctgctttcgagccacgtctgct

SEQ ID NO: 2472407 - DNA, 25 bp, Homo sapien
gagagagcaccgtgccctccatggg

SEQ ID NO: 2472408 - DNA, 25 bp, Homo sapien
atctggatgagagagcaccgtgccc

SEQ ID NO: 2472409 - DNA, 25 bp, Homo sapien
gatgagagagcaccgtgccctccat

SEQ ID NO: 2472410 - DNA, 25 bp, Homo sapien
ggagcccatctggatgagagagcac

SEQ ID NO: 2472411 - DNA, 25 bp, Homo sapien
tcatcaccaccttcagtctctggac

SEQ ID NO: 2472412 - DNA, 25 bp, Homo sapien
gccatcggtgttggcctcatcatca

SEQ ID NO: 2472413 - DNA, 25 bp, Homo sapien
cttgatgttggtcccaaggccatcg

SEQ ID NO: 2472414 - DNA, 25 bp, Homo sapien
gacagcaacaggctccactgagcag

SEQ ID NO: 2472415 - DNA, 25 bp, Homo sapien
acccgggaaagcactcggacagcct

SEQ ID NO: 2472416 - DNA, 25 bp, Homo sapien
ggtttttcaacagtgcctctgcccc

SEQ ID NO: 2472417 - DNA, 25 bp, Homo sapien
gtttttcaacagtgcctctgccccg

SEQ ID NO: 2472418 - DNA, 25 bp, Homo sapien
actcggacagcctcggggaagatga

SEQ ID NO: 2472419 - DNA, 25 bp, Homo sapien
cactggaccagggaggtcgggccgt

SEQ ID NO: 2472420 - DNA, 25 bp, Homo sapien
tcactggaccagggaggtcgggccg

SEQ ID NO: 2472421 - DNA, 25 bp, Homo sapien
actggaccagggaggtcgggccgtg

SEQ ID NO: 2472422 - DNA, 25 bp, Homo sapien
ctggaccagggaggtcgggccgtgg

SEQ ID NO: 2472423 - DNA, 25 bp, Homo sapien
cagggagtagcctgggtctgtgctc

SEQ ID NO: 2472424 - DNA, 25 bp, Homo sapien
aaggagggaggttctgccctcgact

SEQ ID NO: 2472425 - DNA, 25 bp, Homo sapien
ggcatgcatggcctgaggtcactgt

SEQ ID NO: 2472426 - DNA, 25 bp, Homo sapien
gtcactgtggcatgttattggtccc

SEQ ID NO: 2472427 - DNA, 25 bp, Homo sapien
taagagaccctgttatgatgtcatg

SEQ ID NO: 2472428 - DNA, 25 bp, Homo sapien
ccccattaagagaccctgttatgat

SEQ ID NO: 2472429 - DNA, 25 bp, Homo sapien
ggatgtccccattaagagaccctgt

SEQ ID NO: 2472430 - DNA, 25 bp, Homo sapien
ccctgttatgatgtcatggagatgg

SEQ ID NO: 2472431 - DNA, 25 bp, Homo sapien
ctgcacacctgcagagggcagctgg

SEQ ID NO: 2472432 - DNA, 25 bp, Homo sapien
tctggtcctgcacacctgcagaggg

SEQ ID NO: 2472433 - DNA, 25 bp, Homo sapien
ccctctggtcctgcacacctgcaga

SEQ ID NO: 2472434 - DNA, 25 bp, Homo sapien
tggtcctgcacacctgcagagggca

SEQ ID NO: 2472435 - DNA, 25 bp, Homo sapien
gacgagtgaggatttgtatagattt

SEQ ID NO: 2472436 - DNA, 25 bp, Homo sapien
ggatatacaaagtgtttgcaggatt

SEQ ID NO: 2472437 - DNA, 25 bp, Homo sapien
tgcaaggatatacaaagtgtttgca

SEQ ID NO: 2472438 - DNA, 25 bp, Homo sapien
caaaggtgaatggacgagtgaggat

SEQ ID NO: 2472439 - DNA, 25 bp, Homo sapien
ctctgtgatgcctcatcttaaatcc

SEQ ID NO: 2472440 - DNA, 25 bp, Homo sapien
caggcgagttacctggcttaggtcg

SEQ ID NO: 2472441 - DNA, 25 bp, Homo sapien
aggatctccacaggcgagttacctg

SEQ ID NO: 2472442 - DNA, 25 bp, Homo sapien
tcacagcccatcctgtttcccggtc

SEQ ID NO: 2472443 - DNA, 25 bp, Homo sapien
cctggcttaggtcgggtgggaggtg

SEQ ID NO: 2472444 - DNA, 25 bp, Homo sapien
tatctgtggccagcggcacagtcac

SEQ ID NO: 2472445 - DNA, 25 bp, Homo sapien
aggcacaagaggacccacgcaggag

SEQ ID NO: 2472446 - DNA, 25 bp, Homo sapien
cagaggcacaagaggacccacgcag

SEQ ID NO: 2472447 - DNA, 25 bp, Homo sapien
accaacaccagcatccggtccaggg

SEQ ID NO: 2472448 - DNA, 25 bp, Homo sapien
taaggtcgcagtcccctccatttgt

SEQ ID NO: 2472449 - DNA, 25 bp, Homo sapien
tctcggagaacatgtcggccgttca

SEQ ID NO: 2472450 - DNA, 25 bp, Homo sapien
cggccgttcaacatcctaatcttat

SEQ ID NO: 2472451 - DNA, 25 bp, Homo sapien
tccatttgtggcatacagccagtct

SEQ ID NO: 2472452 - DNA, 25 bp, Homo sapien
tgaatatttgggatcctggtggatc

SEQ ID NO: 2472453 - DNA, 25 bp, Homo sapien
ggagcaacctaatctgaggacagac

SEQ ID NO: 2472454 - DNA, 25 bp, Homo sapien
tcctgtaaatgttgggtctcctggg

SEQ ID NO: 2472455 - DNA, 25 bp, Homo sapien
gctgggcactgtaagagttcctgta

SEQ ID NO: 2472456 - DNA, 25 bp, Homo sapien
caattaaagccgtgcatggttggag

SEQ ID NO: 2472457 - DNA, 25 bp, Homo sapien
gcatggccatgtcggctgcttgctt

SEQ ID NO: 2472458 - DNA, 25 bp, Homo sapien
gaataaatcagtcacctccacttag

SEQ ID NO: 2472459 - DNA, 25 bp, Homo sapien
ggcaattgcaggtcaagcaggctca

SEQ ID NO: 2472460 - DNA, 25 bp, Homo sapien
ggtgttctgacccatgatgcctgtg

SEQ ID NO: 2472461 - DNA, 25 bp, Homo sapien
cggaaggaaggaatgcataagtcac

SEQ ID NO: 2472462 - DNA, 25 bp, Homo sapien
cctaaggcgccttcataccgatgtg

SEQ ID NO: 2472463 - DNA, 25 bp, Homo sapien
gatgcctgtgcaattcggaaggaag

SEQ ID NO: 2472464 - DNA, 25 bp, Homo sapien
ctgtagtggccagagaaaatgccat

SEQ ID NO: 2472465 - DNA, 25 bp, Homo sapien
aacttggagcgtggctgatggcgca

SEQ ID NO: 2472466 - DNA, 25 bp, Homo sapien
tagggatgaactagacactgtagtg

SEQ ID NO: 2472467 - DNA, 25 bp, Homo sapien
ttatcgggctctttggtgtctaggg

SEQ ID NO: 2472468 - DNA, 25 bp, Homo sapien
gggcctgcgaagaggtaattacagc

SEQ ID NO: 2472469 - DNA, 25 bp, Homo sapien
ccgaggctcattcaagagccagaaa

SEQ ID NO: 2472470 - DNA, 25 bp, Homo sapien
tgcgaagaggtaattacagcaagga

SEQ ID NO: 2472471 - DNA, 25 bp, Homo sapien
ctcctgggtaccattccagagtggg

SEQ ID NO: 2472472 - DNA, 25 bp, Homo sapien
caggacgccgctgcccgctcggcgg

SEQ ID NO: 2472473 - DNA, 25 bp, Homo sapien
ctcgcgtggtcggaggagaagcagc

SEQ ID NO: 2472474 - DNA, 25 bp, Homo sapien
ccttgccgccggctcgccggtgcct

SEQ ID NO: 2472475 - DNA, 25 bp, Homo sapien
ggccccagcagctcgcgtggtcgga

SEQ ID NO: 2472476 - DNA, 25 bp, Homo sapien
gatgggctcgaatcccactcttcga

SEQ ID NO: 2472477 - DNA, 25 bp, Homo sapien
caggcacatgcagaactcgcatggg

SEQ ID NO: 2472478 - DNA, 25 bp, Homo sapien
ggccctatgctttgcagggacccct

SEQ ID NO: 2472479 - DNA, 25 bp, Homo sapien
gaggtttctgcgaggaggctccaaa

SEQ ID NO: 2472480 - DNA, 25 bp, Homo sapien
tggtggaacttggaacaagatttgg

SEQ ID NO: 2472481 - DNA, 25 bp, Homo sapien
actggtggaacttggaacaagattt

SEQ ID NO: 2472482 - DNA, 25 bp, Homo sapien
ggaacttggaacaagatttggtgct

SEQ ID NO: 2472483 - DNA, 25 bp, Homo sapien
cagaacgtccccaaggaatgattta

SEQ ID NO: 2472484 - DNA, 25 bp, Homo sapien
cacccgggcgtctgagcaggcccac

SEQ ID NO: 2472485 - DNA, 25 bp, Homo sapien
aaaatatcaagcctggaggtgcaca

SEQ ID NO: 2472486 - DNA, 25 bp, Homo sapien
actgggcactgatatggagtcgcac

SEQ ID NO: 2472487 - DNA, 25 bp, Homo sapien
tatggagtcgcacactcttaaataa

SEQ ID NO: 2472488 - DNA, 25 bp, Homo sapien
tgacatcgcagatgcgcttgctgct

SEQ ID NO: 2472489 - DNA, 25 bp, Homo sapien
ccgctgagacaggtgatgagacagc

SEQ ID NO: 2472490 - DNA, 25 bp, Homo sapien
gcgtggcccgctgagacaggtgatg

SEQ ID NO: 2472491 - DNA, 25 bp, Homo sapien
gctgagacaggtgatgagacagcat

SEQ ID NO: 2472492 - DNA, 25 bp, Homo sapien
tggcgtggcccgctgagacaggtga

SEQ ID NO: 2472493 - DNA, 25 bp, Homo sapien
ttctgcatcttgagaacgtaagccc

SEQ ID NO: 2472494 - DNA, 25 bp, Homo sapien
tacgcttgtacttctgcatcttgag

SEQ ID NO: 2472495 - DNA, 25 bp, Homo sapien
tgcatcttgagaacgtaagccctcc

SEQ ID NO: 2472496 - DNA, 25 bp, Homo sapien
ttgagaacgtaagccctcccctgct

SEQ ID NO: 2472497 - DNA, 25 bp, Homo sapien
ggttctggatgtacagccgcaggcc

SEQ ID NO: 2472498 - DNA, 25 bp, Homo sapien
tcagctgtgcctcgtcaaacagcca

SEQ ID NO: 2472499 - DNA, 25 bp, Homo sapien
cacgtccttgagtgtgtggcgcagc

SEQ ID NO: 2472500 - DNA, 25 bp, Homo sapien
tgcacgttgtccaccgtcagctgtg

SEQ ID NO: 2472501 - DNA, 25 bp, Homo sapien
gagaggcaggcgggggcaaagctgg

SEQ ID NO: 2472502 - DNA, 25 bp, Homo sapien
ctccggatgatgatctcatgggaga

SEQ ID NO: 2472503 - DNA, 25 bp, Homo sapien
ggatgatgatctcatgggagaggca

SEQ ID NO: 2472504 - DNA, 25 bp, Homo sapien
ggagaggcaggcgggggcaaagctg

SEQ ID NO: 2472505 - DNA, 25 bp, Homo sapien
acaagtggctctggcacccctataa

SEQ ID NO: 2472506 - DNA, 25 bp, Homo sapien
gtcttaattcttgccatacagctgt

SEQ ID NO: 2472507 - DNA, 25 bp, Homo sapien
cctgagtcttaattcttgccataca

SEQ ID NO: 2472508 - DNA, 25 bp, Homo sapien
tacagctgttggtacaagtggctct

SEQ ID NO: 2472509 - DNA, 25 bp, Homo sapien
gaggaactgggccacgttcatctct

SEQ ID NO: 2472510 - DNA, 25 bp, Homo sapien
tctcttgccccgtgaactggtctcg

SEQ ID NO: 2472511 - DNA, 25 bp, Homo sapien
tctgcatgtcgaagcccatgtgcat

SEQ ID NO: 2472512 - DNA, 25 bp, Homo sapien
tgtggctgtcatggaggctcctgtc

SEQ ID NO: 2472513 - DNA, 25 bp, Homo sapien
gctccagtccctgcggctgggccac

SEQ ID NO: 2472514 - DNA, 25 bp, Homo sapien
ctgtcccgaagagacgggagggcct

SEQ ID NO: 2472515 - DNA, 25 bp, Homo sapien
tgtcccgaagagacgggagggcctg

SEQ ID NO: 2472516 - DNA, 25 bp, Homo sapien
ctggggccctgtcccgaagagacgg

SEQ ID NO: 2472517 - DNA, 25 bp, Homo sapien
gtcccgaagagacgggagggcctgc

SEQ ID NO: 2472518 - DNA, 25 bp, Homo sapien
tctggctaccccctcgttgtcagga

SEQ ID NO: 2472519 - DNA, 25 bp, Homo sapien
tggctaccccctcgttgtcaggaag

SEQ ID NO: 2472520 - DNA, 25 bp, Homo sapien
gctaccccctcgttgtcaggaagga

SEQ ID NO: 2472521 - DNA, 25 bp, Homo sapien
ctggctaccccctcgttgtcaggaa

SEQ ID NO: 2472522 - DNA, 25 bp, Homo sapien
caacgtgtgcacctgtttaccggaa

SEQ ID NO: 2472523 - DNA, 25 bp, Homo sapien
ttttcacgaaatgatctctgggaat

SEQ ID NO: 2472524 - DNA, 25 bp, Homo sapien
tcacgaaatgatctctgggaatatc

SEQ ID NO: 2472525 - DNA, 25 bp, Homo sapien
tgcacctgtttaccggaattttcac

SEQ ID NO: 2472526 - DNA, 25 bp, Homo sapien
gacaccagtgtgtagtgtgtagcca

SEQ ID NO: 2472527 - DNA, 25 bp, Homo sapien
acgacaaggctatgcacgtgcaccc

SEQ ID NO: 2472528 - DNA, 25 bp, Homo sapien
agagcttcatgtttttgccccagga

SEQ ID NO: 2472529 - DNA, 25 bp, Homo sapien
gcgcgccccgaaatacagtgtcaag

SEQ ID NO: 2472530 - DNA, 25 bp, Homo sapien
ggccgaggctgggcttatttgcggg

SEQ ID NO: 2472531 - DNA, 25 bp, Homo sapien
gcggcccgcgccaatgagcggcggg

SEQ ID NO: 2472532 - DNA, 25 bp, Homo sapien
cagggtctgggtgcgctggctgcgg

SEQ ID NO: 2472533 - DNA, 25 bp, Homo sapien
gcccgggtgcccgcgcgttagatgt

SEQ ID NO: 2472534 - DNA, 25 bp, Homo sapien
ctgcccccggcgcagtgcagcaggc

SEQ ID NO: 2472535 - DNA, 25 bp, Homo sapien
tcgctgcccccggcgcagtgcagca

SEQ ID NO: 2472536 - DNA, 25 bp, Homo sapien
cctcgctgcccccggcgcagtgcag

SEQ ID NO: 2472537 - DNA, 25 bp, Homo sapien
tgcccccggcgcagtgcagcaggct

SEQ ID NO: 2472538 - DNA, 25 bp, Homo sapien
tccgcgggggaggaggcggctgctg

SEQ ID NO: 2472539 - DNA, 25 bp, Homo sapien
gtccgcgggggaggaggcggctgct

SEQ ID NO: 2472540 - DNA, 25 bp, Homo sapien
ccgcgggggaggaggcggctgctga

SEQ ID NO: 2472541 - DNA, 25 bp, Homo sapien
cgcgggggaggaggcggctgctgac

SEQ ID NO: 2472542 - DNA, 25 bp, Homo sapien
cctccacggccgtgaagtccagcgg

SEQ ID NO: 2472543 - DNA, 25 bp, Homo sapien
ccacggccgtgaagtccagcgggaa

SEQ ID NO: 2472544 - DNA, 25 bp, Homo sapien
agtccagcgggaagctctccacggg

SEQ ID NO: 2472545 - DNA, 25 bp, Homo sapien
aagtccagcgggaagctctccacgg

SEQ ID NO: 2472546 - DNA, 25 bp, Homo sapien
ggctgccgtcgttgcaggtcaccga

SEQ ID NO: 2472547 - DNA, 25 bp, Homo sapien
gcgccaggctcttgacttgcgccat

SEQ ID NO: 2472548 - DNA, 25 bp, Homo sapien
ccgtcgttgcaggtcaccgaggtgt

SEQ ID NO: 2472549 - DNA, 25 bp, Homo sapien
tgccgtcgttgcaggtcaccgaggt

SEQ ID NO: 2472550 - DNA, 25 bp, Homo sapien
gcccctggactccttcaggtagtag

SEQ ID NO: 2472551 - DNA, 25 bp, Homo sapien
ccaggaagaggagccaccgccggct

SEQ ID NO: 2472552 - DNA, 25 bp, Homo sapien
ggctgcccctggactccttcaggta

SEQ ID NO: 2472553 - DNA, 25 bp, Homo sapien
ggaagaggagccaccgccggctgcc

SEQ ID NO: 2472554 - DNA, 25 bp, Homo sapien
cgtatctggagtcgcagttctcgcg

SEQ ID NO: 2472555 - DNA, 25 bp, Homo sapien
tgcgcggccagtcccgggagctcat

SEQ ID NO: 2472556 - DNA, 25 bp, Homo sapien
ctggagtcgcagttctcgcggttga

SEQ ID NO: 2472557 - DNA, 25 bp, Homo sapien
ggtgtcgtatctggagtcgcagttc

SEQ ID NO: 2472558 - DNA, 25 bp, Homo sapien
cgccttccccagggcccgccgctga

SEQ ID NO: 2472559 - DNA, 25 bp, Homo sapien
acgccttccccagggcccgccgctg

SEQ ID NO: 2472560 - DNA, 25 bp, Homo sapien
tcgagacgccttccccagggcccgc

SEQ ID NO: 2472561 - DNA, 25 bp, Homo sapien
gccttccccagggcccgccgctgac

SEQ ID NO: 2472562 - DNA, 25 bp, Homo sapien
tggggacacagaggcggtgggtctt

SEQ ID NO: 2472563 - DNA, 25 bp, Homo sapien
ctggggacacagaggcggtgggtct

SEQ ID NO: 2472564 - DNA, 25 bp, Homo sapien
ttgcgttccaccagtaggggttctc

SEQ ID NO: 2472565 - DNA, 25 bp, Homo sapien
ccatgtttgcgttccaccagtaggg

SEQ ID NO: 2472566 - DNA, 25 bp, Homo sapien
accatgtttgcgttccaccagtagg

SEQ ID NO: 2472567 - DNA, 25 bp, Homo sapien
tgcgttccaccagtaggggttctcc

SEQ ID NO: 2472568 - DNA, 25 bp, Homo sapien
tccaaacatcactggagcagtaggg

SEQ ID NO: 2472569 - DNA, 25 bp, Homo sapien
tcttctcagacttggatgaagcccc

SEQ ID NO: 2472570 - DNA, 25 bp, Homo sapien
gacttggatgaagccccgctccaaa

SEQ ID NO: 2472571 - DNA, 25 bp, Homo sapien
tctcagacttggatgaagccccgct

SEQ ID NO: 2472572 - DNA, 25 bp, Homo sapien
gatgagggcgcccatgaaggcgtac

SEQ ID NO: 2472573 - DNA, 25 bp, Homo sapien
agggcgcccatgaaggcgtactcgt

SEQ ID NO: 2472574 - DNA, 25 bp, Homo sapien
cctggatgatgagggcgcccatgaa

SEQ ID NO: 2472575 - DNA, 25 bp, Homo sapien
tgagggcgcccatgaaggcgtactc

SEQ ID NO: 2472576 - DNA, 25 bp, Homo sapien
tgtcgacgcagtctgtgtggcgata

SEQ ID NO: 2472577 - DNA, 25 bp, Homo sapien
gtctgtgtggcgatactgcttgttg

SEQ ID NO: 2472578 - DNA, 25 bp, Homo sapien
tcagccaggcctcgcacctggatgg

SEQ ID NO: 2472579 - DNA, 25 bp, Homo sapien
tgatgccacggcggatggcctccgt

SEQ ID NO: 2472580 - DNA, 25 bp, Homo sapien
cgcagggtcgggtagaccttgtagc

SEQ ID NO: 2472581 - DNA, 25 bp, Homo sapien
gcagcgctccgggaccaccccgttc

SEQ ID NO: 2472582 - DNA, 25 bp, Homo sapien
cagggtcgggtagaccttgtagcca

SEQ ID NO: 2472583 - DNA, 25 bp, Homo sapien
agcgcagggtcgggtagaccttgta

SEQ ID NO: 2472584 - DNA, 25 bp, Homo sapien
gggcgcaggagccaggcgaggcagg

SEQ ID NO: 2472585 - DNA, 25 bp, Homo sapien
ctggacggcgggcgcaggagccagg

SEQ ID NO: 2472586 - DNA, 25 bp, Homo sapien
gacggcgggcgcaggagccaggcga

SEQ ID NO: 2472587 - DNA, 25 bp, Homo sapien
caggagccaggcgaggcaggctccg

SEQ ID NO: 2472588 - DNA, 25 bp, Homo sapien
catctccaacaagcagcgaagtctc

SEQ ID NO: 2472589 - DNA, 25 bp, Homo sapien
ctaggctgagcactcgagctggaaa

SEQ ID NO: 2472590 - DNA, 25 bp, Homo sapien
agctctgggtacacgtggcgcagga

SEQ ID NO: 2472591 - DNA, 25 bp, Homo sapien
gaggagaaagtccagacacgggatc

SEQ ID NO: 2472592 - DNA, 25 bp, Homo sapien
acccttcccctcccaggattcacag

SEQ ID NO: 2472593 - DNA, 25 bp, Homo sapien
ctgctggcggggcggccacccttcc

SEQ ID NO: 2472594 - DNA, 25 bp, Homo sapien
tgctggcggggcggccacccttccc

SEQ ID NO: 2472595 - DNA, 25 bp, Homo sapien
gccacccttcccctcccaggattca

SEQ ID NO: 2472596 - DNA, 25 bp, Homo sapien
caaattcgcgcggaggtgcaaatga

SEQ ID NO: 2472597 - DNA, 25 bp, Homo sapien
ccgttccaaattcgcgcggaggtgc

SEQ ID NO: 2472598 - DNA, 25 bp, Homo sapien
tcataaatccgttccaaattcgcgc

SEQ ID NO: 2472599 - DNA, 25 bp, Homo sapien
aattcgcgcggaggtgcaaatgaga

SEQ ID NO: 2472600 - DNA, 25 bp, Homo sapien
ttgggctgtttccacgtggcacctc

SEQ ID NO: 2472601 - DNA, 25 bp, Homo sapien
gcccatctctatgacagtgcccagg

SEQ ID NO: 2472602 - DNA, 25 bp, Homo sapien
tactctttctacaagccaccgtatg

SEQ ID NO: 2472603 - DNA, 25 bp, Homo sapien
aagccaccgtatgctactctgcagg

SEQ ID NO: 2472604 - DNA, 25 bp, Homo sapien
tgaggagatcttcgtgcagagccag

SEQ ID NO: 2472605 - DNA, 25 bp, Homo sapien
tctcagtacagtagcctttcgcggt

SEQ ID NO: 2472606 - DNA, 25 bp, Homo sapien
tcaaggccgcacttaaagccggtcg

SEQ ID NO: 2472607 - DNA, 25 bp, Homo sapien
cagctgtgacgggaagtgagctcct

SEQ ID NO: 2472608 - DNA, 25 bp, Homo sapien
gagggtgcccgggaggtgcctgcgg

SEQ ID NO: 2472609 - DNA, 25 bp, Homo sapien
cctgcgggggccagtcccacagaag

SEQ ID NO: 2472610 - DNA, 25 bp, Homo sapien
cctggggcgggaggatgccggggag

SEQ ID NO: 2472611 - DNA, 25 bp, Homo sapien
cctgcggggctcagtcccacagaag

SEQ ID NO: 2472612 - DNA, 25 bp, Homo sapien
agactctggaaccagtgggtcagca

SEQ ID NO: 2472613 - DNA, 25 bp, Homo sapien
catggtacttgtgcaggacaggctc

SEQ ID NO: 2472614 - DNA, 25 bp, Homo sapien
tcttggttggaattgccctgactcc

SEQ ID NO: 2472615 - DNA, 25 bp, Homo sapien
ggtcttaaggtcagtcccacagaag

SEQ ID NO: 2472616 - DNA, 25 bp, Homo sapien
tctggaacttatcccgggaactcat

SEQ ID NO: 2472617 - DNA, 25 bp, Homo sapien
cagaaccatgcttggtatatatggg

SEQ ID NO: 2472618 - DNA, 25 bp, Homo sapien
ttccagagaccccataggctcactg

SEQ ID NO: 2472619 - DNA, 25 bp, Homo sapien
agagtcctggccactccccataaaa

SEQ ID NO: 2472620 - DNA, 25 bp, Homo sapien
catagttactgagtatggagacagc

SEQ ID NO: 2472621 - DNA, 25 bp, Homo sapien
accctgtagcccagtcaagtggaca

SEQ ID NO: 2472622 - DNA, 25 bp, Homo sapien
ggttccttcaaccaacacatagtta

SEQ ID NO: 2472623 - DNA, 25 bp, Homo sapien
tcaaatgttagtctcatgcaacccc

SEQ ID NO: 2472624 - DNA, 25 bp, Homo sapien
cccacatcttggagggcatctgcct

SEQ ID NO: 2472625 - DNA, 25 bp, Homo sapien
tggaatagtggaggccttcaactga

SEQ ID NO: 2472626 - DNA, 25 bp, Homo sapien
gaccaccttcctctagagctcggga

SEQ ID NO: 2472627 - DNA, 25 bp, Homo sapien
tccttcccgtgtgagaagggccaga

SEQ ID NO: 2472628 - DNA, 25 bp, Homo sapien
gtgatgatcaagctggacagatgag

SEQ ID NO: 2472629 - DNA, 25 bp, Homo sapien
aggatgacacgggatgaaggtccat

SEQ ID NO: 2472630 - DNA, 25 bp, Homo sapien
ctgccactgtcaatcggactaatga

SEQ ID NO: 2472631 - DNA, 25 bp, Homo sapien
tgtcaatcggactaatgatgcccct

SEQ ID NO: 2472632 - DNA, 25 bp, Homo sapien
tgaggcggttccgaggtgcctccac

SEQ ID NO: 2472633 - DNA, 25 bp, Homo sapien
gttccgaggtgcctccacccaagtg

SEQ ID NO: 2472634 - DNA, 25 bp, Homo sapien
cgtagagcgcccatgaggcggttcc

SEQ ID NO: 2472635 - DNA, 25 bp, Homo sapien
cccatgaggcggttccgaggtgcct

SEQ ID NO: 2472636 - DNA, 25 bp, Homo sapien
cgccgtcctctgggcgcgctcgggt

SEQ ID NO: 2472637 - DNA, 25 bp, Homo sapien
tgctcgggggtcggcttggctcccc

SEQ ID NO: 2472638 - DNA, 25 bp, Homo sapien
ctgctcgggggtcggcttggctccc

SEQ ID NO: 2472639 - DNA, 25 bp, Homo sapien
gccgtcctctgggcgcgctcgggtc

SEQ ID NO: 2472640 - DNA, 25 bp, Homo sapien
caggcttggtgctggggcgaaggac

SEQ ID NO: 2472641 - DNA, 25 bp, Homo sapien
ggacccacagagtaggggcctctcc

SEQ ID NO: 2472642 - DNA, 25 bp, Homo sapien
ccgtgtgtcgctgatccccagttcc

SEQ ID NO: 2472643 - DNA, 25 bp, Homo sapien
tggggcgaaggacccacagagtagg

SEQ ID NO: 2472644 - DNA, 25 bp, Homo sapien
cccaggaggagtcactcttgccacc

SEQ ID NO: 2472645 - DNA, 25 bp, Homo sapien
gctggcagctctgagggtcgcagag

SEQ ID NO: 2472646 - DNA, 25 bp, Homo sapien
gcagctctgagggtcgcagagcccc

SEQ ID NO: 2472647 - DNA, 25 bp, Homo sapien
agctctgagggtcgcagagcccctc

SEQ ID NO: 2472648 - DNA, 25 bp, Homo sapien
cctggtgggtgtgtacgctcctccg

SEQ ID NO: 2472649 - DNA, 25 bp, Homo sapien
tacgctcctccgagggcagctgagt

SEQ ID NO: 2472650 - DNA, 25 bp, Homo sapien
ctggtgggtgtgtacgctcctccga

SEQ ID NO: 2472651 - DNA, 25 bp, Homo sapien
gtgtgtacgctcctccgagggcagc

SEQ ID NO: 2472652 - DNA, 25 bp, Homo sapien
agcagcaggggtcgctgtggctggc

SEQ ID NO: 2472653 - DNA, 25 bp, Homo sapien
agcaggggtcgctgtggctggcagg

SEQ ID NO: 2472654 - DNA, 25 bp, Homo sapien
agcaacagcagcaggggtcgctgtg

SEQ ID NO: 2472655 - DNA, 25 bp, Homo sapien
acagcagcaggggtcgctgtggctg

SEQ ID NO: 2472656 - DNA, 25 bp, Homo sapien
ggtcaccgtagagcttccacttctc

SEQ ID NO: 2472657 - DNA, 25 bp, Homo sapien
acactggtcaccgtagagcttccac

SEQ ID NO: 2472658 - DNA, 25 bp, Homo sapien
ctggtcaccgtagagcttccacttc

SEQ ID NO: 2472659 - DNA, 25 bp, Homo sapien
agcaggctcaggttgtggtgacact

SEQ ID NO: 2472660 - DNA, 25 bp, Homo sapien
agagaactcaggaagtgctgaggcc

SEQ ID NO: 2472661 - DNA, 25 bp, Homo sapien
aaggctgcataagcacccaggaacc

SEQ ID NO: 2472662 - DNA, 25 bp, Homo sapien
aggccaggcacaggctgaaaggctc

SEQ ID NO: 2472663 - DNA, 25 bp, Homo sapien
tgaggaatgacagggccccttggcg

SEQ ID NO: 2472664 - DNA, 25 bp, Homo sapien
agatgttggccgtggtattggcggg

SEQ ID NO: 2472665 - DNA, 25 bp, Homo sapien
gggcaggagatgttggccgtggtat

SEQ ID NO: 2472666 - DNA, 25 bp, Homo sapien
ctttgtggtgccaaggcaggtacca

SEQ ID NO: 2472667 - DNA, 25 bp, Homo sapien
tgtccggccagcaggaatacttgtc

SEQ ID NO: 2472668 - DNA, 25 bp, Homo sapien
ggacctcaatctcctcgccatccat

SEQ ID NO: 2472669 - DNA, 25 bp, Homo sapien
tggacctcaatctcctcgccatcca

SEQ ID NO: 2472670 - DNA, 25 bp, Homo sapien
acctcaatctcctcgccatccatct

SEQ ID NO: 2472671 - DNA, 25 bp, Homo sapien
cctcaatctcctcgccatccatctg

SEQ ID NO: 2472672 - DNA, 25 bp, Homo sapien
ccgcgcctgcctgccgcccactgac

SEQ ID NO: 2472673 - DNA, 25 bp, Homo sapien
agctgctgtacatcttggccacctc

SEQ ID NO: 2472674 - DNA, 25 bp, Homo sapien
ctggaagctgctgtacatcttggcc

SEQ ID NO: 2472675 - DNA, 25 bp, Homo sapien
gaagctgctgtacatcttggccacc

SEQ ID NO: 2472676 - DNA, 25 bp, Homo sapien
ggaagctgctgtacatcttggccac

SEQ ID NO: 2472677 - DNA, 25 bp, Homo sapien
atggccaaggcgaggagcagggccc

SEQ ID NO: 2472678 - DNA, 25 bp, Homo sapien
agggacaggctgtagcccactgtgt

SEQ ID NO: 2472679 - DNA, 25 bp, Homo sapien
ggacaggctgtagcccactgtgtac

SEQ ID NO: 2472680 - DNA, 25 bp, Homo sapien
caggatggccaaggcgaggagcagg

SEQ ID NO: 2472681 - DNA, 25 bp, Homo sapien
atcaatgaccagcacggagctggct

SEQ ID NO: 2472682 - DNA, 25 bp, Homo sapien
agcccatcaatgaccagcacggagc

SEQ ID NO: 2472683 - DNA, 25 bp, Homo sapien
aacagattcgcgtggatggcattgc

SEQ ID NO: 2472684 - DNA, 25 bp, Homo sapien
atggcattgcgggtgcagtgcagct

SEQ ID NO: 2472685 - DNA, 25 bp, Homo sapien
cactgaggtcgtcgccaattttctg

SEQ ID NO: 2472686 - DNA, 25 bp, Homo sapien
tgacactgaggtcgtcgccaatttt

SEQ ID NO: 2472687 - DNA, 25 bp, Homo sapien
gaggtcgtcgccaattttctggctg

SEQ ID NO: 2472688 - DNA, 25 bp, Homo sapien
gctgacactgaggtcgtcgccaatt

SEQ ID NO: 2472689 - DNA, 25 bp, Homo sapien
tgcctggggccgccgaggggggctc

SEQ ID NO: 2472690 - DNA, 25 bp, Homo sapien
ctgcctggggccgccgaggggggct

SEQ ID NO: 2472691 - DNA, 25 bp, Homo sapien
gcctggggccgccgaggggggctca

SEQ ID NO: 2472692 - DNA, 25 bp, Homo sapien
ccagccgatgcccaggtagaggctg

SEQ ID NO: 2472693 - DNA, 25 bp, Homo sapien
gaagaagctcctctcggggagggtg

SEQ ID NO: 2472694 - DNA, 25 bp, Homo sapien
ccagcagtagttggccacgatgcca

SEQ ID NO: 2472695 - DNA, 25 bp, Homo sapien
ccgatgcccaggtagaggctgaaga

SEQ ID NO: 2472696 - DNA, 25 bp, Homo sapien
gacgttctcgaacagacacttgacc

SEQ ID NO: 2472697 - DNA, 25 bp, Homo sapien
tggacgttctcgaacagacacttga

SEQ ID NO: 2472698 - DNA, 25 bp, Homo sapien
acagacacttgaccactgcccaggg

SEQ ID NO: 2472699 - DNA, 25 bp, Homo sapien
tctcgaacagacacttgaccactgc

SEQ ID NO: 2472700 - DNA, 25 bp, Homo sapien
ggaaccgcaggatccaccagaagcc

SEQ ID NO: 2472701 - DNA, 25 bp, Homo sapien
gacggggaaccgcaggatccaccag

SEQ ID NO: 2472702 - DNA, 25 bp, Homo sapien
ggggaaccgcaggatccaccagaag

SEQ ID NO: 2472703 - DNA, 25 bp, Homo sapien
ccaggaagacggggaaccgcaggat

SEQ ID NO: 2472704 - DNA, 25 bp, Homo sapien
agcaagataggccctgggccacata

SEQ ID NO: 2472705 - DNA, 25 bp, Homo sapien
gcaagataggccctgggccacatag

SEQ ID NO: 2472706 - DNA, 25 bp, Homo sapien
cggaacttgtagtctgtgtggtgca

SEQ ID NO: 2472707 - DNA, 25 bp, Homo sapien
gtgcccgcagcttggccacgagcag

SEQ ID NO: 2472708 - DNA, 25 bp, Homo sapien
tgtgtggtgcatctgccgtgcccgc

SEQ ID NO: 2472709 - DNA, 25 bp, Homo sapien
tgaacgatgcggacgaagatgaaga

SEQ ID NO: 2472710 - DNA, 25 bp, Homo sapien
gtctccaggtctcgagacgccagct

SEQ ID NO: 2472711 - DNA, 25 bp, Homo sapien
ctccaggtctcgagacgccagctgc

SEQ ID NO: 2472712 - DNA, 25 bp, Homo sapien
catccacgtggagcttggagtcccc

SEQ ID NO: 2472713 - DNA, 25 bp, Homo sapien
tccacgtggagcttggagtccccac

SEQ ID NO: 2472714 - DNA, 25 bp, Homo sapien
atccacgtggagcttggagtcccca

SEQ ID NO: 2472715 - DNA, 25 bp, Homo sapien
gaaggcgaagaccacttcgtggacg

SEQ ID NO: 2472716 - DNA, 25 bp, Homo sapien
gcgaagaccacttcgtggacgccca

SEQ ID NO: 2472717 - DNA, 25 bp, Homo sapien
gaagaccacttcgtggacgcccagc

SEQ ID NO: 2472718 - DNA, 25 bp, Homo sapien
accacttcgtggacgcccagcagag

SEQ ID NO: 2472719 - DNA, 25 bp, Homo sapien
tgccctgggcgtgctcgtccgtcac

SEQ ID NO: 2472720 - DNA, 25 bp, Homo sapien
agggtgccctgggcgtgctcgtccg

SEQ ID NO: 2472721 - DNA, 25 bp, Homo sapien
ggtgccctgggcgtgctcgtccgtc

SEQ ID NO: 2472722 - DNA, 25 bp, Homo sapien
gtgccctgggcgtgctcgtccgtca

SEQ ID NO: 2472723 - DNA, 25 bp, Homo sapien
gttgaggaagcagtagaggacagcc

SEQ ID NO: 2472724 - DNA, 25 bp, Homo sapien
ggaagcagtagaggacagccaccag

SEQ ID NO: 2472725 - DNA, 25 bp, Homo sapien
gcagtagaggacagccaccagcagg

SEQ ID NO: 2472726 - DNA, 25 bp, Homo sapien
ctccttgttgaggaagcagtagagg

SEQ ID NO: 2472727 - DNA, 25 bp, Homo sapien
ccaacgccgccgcagctccgactgc

SEQ ID NO: 2472728 - DNA, 25 bp, Homo sapien
aacgccgccgcagctccgactgcac

SEQ ID NO: 2472729 - DNA, 25 bp, Homo sapien
caacgccgccgcagctccgactgca

SEQ ID NO: 2472730 - DNA, 25 bp, Homo sapien
agcactttgcccaggcgccagcggt

SEQ ID NO: 2472731 - DNA, 25 bp, Homo sapien
ctgtggttgctggtgttccgctcct

SEQ ID NO: 2472732 - DNA, 25 bp, Homo sapien
gggctctcagccaatctagggaggc

SEQ ID NO: 2472733 - DNA, 25 bp, Homo sapien
ggtctccgcagatgaatcctggctg

SEQ ID NO: 2472734 - DNA, 25 bp, Homo sapien
tcagctgggcgtccagttctgggtt

SEQ ID NO: 2472735 - DNA, 25 bp, Homo sapien
ttccatgcacatgggacgtgccgac

SEQ ID NO: 2472736 - DNA, 25 bp, Homo sapien
agaggaggcccaatctcgcagacag

SEQ ID NO: 2472737 - DNA, 25 bp, Homo sapien
gttctgggttgtccagcgacgccct

SEQ ID NO: 2472738 - DNA, 25 bp, Homo sapien
gagtccttcgaggagcgtttcgagt

SEQ ID NO: 2472739 - DNA, 25 bp, Homo sapien
gcctgtgagtccttcgaggagcgtt

SEQ ID NO: 2472740 - DNA, 25 bp, Homo sapien
tcgaggagcgtttcgagtgcccacc

SEQ ID NO: 2472741 - DNA, 25 bp, Homo sapien
ggagcgtttcgagtgcccaccaggc

SEQ ID NO: 2472742 - DNA, 25 bp, Homo sapien
gtgccacgatcttggctccctgcag

SEQ ID NO: 2472743 - DNA, 25 bp, Homo sapien
aagcagtcctcccaccccagcctct

SEQ ID NO: 2472744 - DNA, 25 bp, Homo sapien
cctgcagccttgacctcctgggctc

SEQ ID NO: 2472745 - DNA, 25 bp, Homo sapien
aggcaccgtcctggccccggctcca

SEQ ID NO: 2472746 - DNA, 25 bp, Homo sapien
tcctggccccggctccagttatgtc

SEQ ID NO: 2472747 - DNA, 25 bp, Homo sapien
tggccccggctccagttatgtccat

SEQ ID NO: 2472748 - DNA, 25 bp, Homo sapien
gtcctggccccggctccagttatgt

SEQ ID NO: 2472749 - DNA, 25 bp, Homo sapien
gggccgtggccgggacatcggcatg

SEQ ID NO: 2472750 - DNA, 25 bp, Homo sapien
gccgggacatcggcatgctcggtct

SEQ ID NO: 2472751 - DNA, 25 bp, Homo sapien
ccgtggccgggacatcggcatgctc

SEQ ID NO: 2472752 - DNA, 25 bp, Homo sapien
tggccgggacatcggcatgctcggt

SEQ ID NO: 2472753 - DNA, 25 bp, Homo sapien
tgttagcaattgtcaggcgcagccc

SEQ ID NO: 2472754 - DNA, 25 bp, Homo sapien
gagtgtcatcgagggtcctcccatg

SEQ ID NO: 2472755 - DNA, 25 bp, Homo sapien
gacaccctagtgctaagtgacttgg

SEQ ID NO: 2472756 - DNA, 25 bp, Homo sapien
cacctaaagaccatgtagcctgagg

SEQ ID NO: 2472757 - DNA, 25 bp, Homo sapien
cgctgaactggaagttctcagggta

SEQ ID NO: 2472758 - DNA, 25 bp, Homo sapien
gcagcattcgggctgagccccaaat

SEQ ID NO: 2472759 - DNA, 25 bp, Homo sapien
ttggtggcaggctccttcagcgctg

SEQ ID NO: 2472760 - DNA, 25 bp, Homo sapien
agccccaaatgctgtggccccggag

SEQ ID NO: 2472761 - DNA, 25 bp, Homo sapien
gggagggcgcggctcggactgagcg

SEQ ID NO: 2472762 - DNA, 25 bp, Homo sapien
agagccccgctttcccggtctcctg

SEQ ID NO: 2472763 - DNA, 25 bp, Homo sapien
cctgaggatgcctccgattctcgga

SEQ ID NO: 2472764 - DNA, 25 bp, Homo sapien
gcgcggctcggactgagcgcctttc

SEQ ID NO: 2472765 - DNA, 25 bp, Homo sapien
gagacttccggatcctgtcagggtg

SEQ ID NO: 2472766 - DNA, 25 bp, Homo sapien
gatgaactgtaatacgcaaagccag

SEQ ID NO: 2472767 - DNA, 25 bp, Homo sapien
aagcctgcggcctcgcttgaaggag

SEQ ID NO: 2472768 - DNA, 25 bp, Homo sapien
gagccggactggacatggtcactca

SEQ ID NO: 2472769 - DNA, 25 bp, Homo sapien
ccccaaggaatatacaggtgtggct

SEQ ID NO: 2472770 - DNA, 25 bp, Homo sapien
tcaggaatggagacacggcttcccc

SEQ ID NO: 2472771 - DNA, 25 bp, Homo sapien
tcaggccgggttctctgtccacttg

SEQ ID NO: 2472772 - DNA, 25 bp, Homo sapien
tctttagagagggactggcctgccg

SEQ ID NO: 2472773 - DNA, 25 bp, Homo sapien
ccacgcatgagcagcgtcttcctgg

SEQ ID NO: 2472774 - DNA, 25 bp, Homo sapien
ctgcggccgctccacgcatgagcag

SEQ ID NO: 2472775 - DNA, 25 bp, Homo sapien
tcaggttggtgtaggaagccagtcc

SEQ ID NO: 2472776 - DNA, 25 bp, Homo sapien
caggttggtgtaggaagccagtcca

SEQ ID NO: 2472777 - DNA, 25 bp, Homo sapien
gaggcaccttgagaggaccctatgg

SEQ ID NO: 2472778 - DNA, 25 bp, Homo sapien
ttgagaggaccctatgggcagccat

SEQ ID NO: 2472779 - DNA, 25 bp, Homo sapien
acccccaagggcacactcctcgaag

SEQ ID NO: 2472780 - DNA, 25 bp, Homo sapien
gaggtgaacacagcccatcttctca

SEQ ID NO: 2472781 - DNA, 25 bp, Homo sapien
gcctgggcatgaggtgaacacagcc

SEQ ID NO: 2472782 - DNA, 25 bp, Homo sapien
caagggcacactcctcgaagggcct

SEQ ID NO: 2472783 - DNA, 25 bp, Homo sapien
tagccccaagcgaggtggtctcgtg

SEQ ID NO: 2472784 - DNA, 25 bp, Homo sapien
tggtctcgtgttgcgttgctgcttc

SEQ ID NO: 2472785 - DNA, 25 bp, Homo sapien
agaactgctactagccccaagcgag

SEQ ID NO: 2472786 - DNA, 25 bp, Homo sapien
tctcgtgttgcgttgctgcttctgc

SEQ ID NO: 2472787 - DNA, 25 bp, Homo sapien
gtctcgttgctgcttctgcctgtgc

SEQ ID NO: 2472788 - DNA, 25 bp, Homo sapien
tcctcggtctcctgtctcgttgctg

SEQ ID NO: 2472789 - DNA, 25 bp, Homo sapien
tcggtctcctgtctcgttgctgctt

SEQ ID NO: 2472790 - DNA, 25 bp, Homo sapien
gtctcctgtctcgttgctgcttctg

SEQ ID NO: 2472791 - DNA, 25 bp, Homo sapien
gatcaccctgggattgactggccaa

SEQ ID NO: 2472792 - DNA, 25 bp, Homo sapien
tgtctgtgatcatgtagcctaaggt

SEQ ID NO: 2472793 - DNA, 25 bp, Homo sapien
gactggccaagcatttggtggaaga

SEQ ID NO: 2472794 - DNA, 25 bp, Homo sapien
gttatctatacacgttattgaagcg

SEQ ID NO: 2472795 - DNA, 25 bp, Homo sapien
cggcctacccactaattaatttcag

SEQ ID NO: 2472796 - DNA, 25 bp, Homo sapien
gcattttcctcattcctttgacgtt

SEQ ID NO: 2472797 - DNA, 25 bp, Homo sapien
tcttgcaatgcagtaattattaact

SEQ ID NO: 2472798 - DNA, 25 bp, Homo sapien
aaagagcagtcccttcagctttttt

SEQ ID NO: 2472799 - DNA, 25 bp, Homo sapien
gtgcggccaatgatggatttgtttc

SEQ ID NO: 2472800 - DNA, 25 bp, Homo sapien
tgcggccaatgatggatttgtttct

SEQ ID NO: 2472801 - DNA, 25 bp, Homo sapien
tcacgtcacagattgacgcacagcg

SEQ ID NO: 2472802 - DNA, 25 bp, Homo sapien
attcagcttgtcacgtcacagattg

SEQ ID NO: 2472803 - DNA, 25 bp, Homo sapien
gtcacagattgacgcacagcggagg

SEQ ID NO: 2472804 - DNA, 25 bp, Homo sapien
gcttgtcacgtcacagattgacgca

SEQ ID NO: 2472805 - DNA, 25 bp, Homo sapien
aatttggaacgctgaagaaggcggc

SEQ ID NO: 2472806 - DNA, 25 bp, Homo sapien
cactttgagcggaaggcagatgccc

SEQ ID NO: 2472807 - DNA, 25 bp, Homo sapien
tctggtcgcagcttaggaacagcag

SEQ ID NO: 2472808 - DNA, 25 bp, Homo sapien
tgtgcactatgatcgctctggtcgc

SEQ ID NO: 2472809 - DNA, 25 bp, Homo sapien
tcttttcgacagtggcttcggcggt

SEQ ID NO: 2472810 - DNA, 25 bp, Homo sapien
aaacaacttcccgacaagtggcagc

SEQ ID NO: 2472811 - DNA, 25 bp, Homo sapien
tggagtctcagacgccgatattcag

SEQ ID NO: 2472812 - DNA, 25 bp, Homo sapien
tattcaggtaagagacgagggcttc

SEQ ID NO: 2472813 - DNA, 25 bp, Homo sapien
gtttcggccggatcctctcaggccg

SEQ ID NO: 2472814 - DNA, 25 bp, Homo sapien
ccggatcctctcaggccgggaagag

SEQ ID NO: 2472815 - DNA, 25 bp, Homo sapien
cggccggatcctctcaggccgggaa

SEQ ID NO: 2472816 - DNA, 25 bp, Homo sapien
agaggaagggtccggagtagccgtg

SEQ ID NO: 2472817 - DNA, 25 bp, Homo sapien
aggtataaaaacgaccacagtcgcg

SEQ ID NO: 2472818 - DNA, 25 bp, Homo sapien
cccttccgttggcagcgccggcgtc

SEQ ID NO: 2472819 - DNA, 25 bp, Homo sapien
agtcgcggcccgactccctcaacag

SEQ ID NO: 2472820 - DNA, 25 bp, Homo sapien
tataaaaacgaccacagtcgcggcc

SEQ ID NO: 2472821 - DNA, 25 bp, Homo sapien
cacagtcctgggcgggagcggaaac

SEQ ID NO: 2472822 - DNA, 25 bp, Homo sapien
tgggcgggagcggaaacaaggactc

SEQ ID NO: 2472823 - DNA, 25 bp, Homo sapien
cgcgcccgccggaccccaccgcgag

SEQ ID NO: 2472824 - DNA, 25 bp, Homo sapien
aggcacccgccgcgcccgtagcgcc

SEQ ID NO: 2472825 - DNA, 25 bp, Homo sapien
tggtggcgtgcaccagctgcctgag

SEQ ID NO: 2472826 - DNA, 25 bp, Homo sapien
aagctgagccacaggaatcacttgg

SEQ ID NO: 2472827 - DNA, 25 bp, Homo sapien
ctgagatcacgccagctcccagctc

SEQ ID NO: 2472828 - DNA, 25 bp, Homo sapien
cagctcccagctctattcgggaagc

SEQ ID NO: 2472829 - DNA, 25 bp, Homo sapien
cgttgaggatatcttcaaagatctc

SEQ ID NO: 2472830 - DNA, 25 bp, Homo sapien
ctcacgttgaggatatcttcaaaga

SEQ ID NO: 2472831 - DNA, 25 bp, Homo sapien
gttgaggatatcttcaaagatctca

SEQ ID NO: 2472832 - DNA, 25 bp, Homo sapien
cacgttgaggatatcttcaaagatc

SEQ ID NO: 2472833 - DNA, 25 bp, Homo sapien
tggccacgccgttccagcacttaat

SEQ ID NO: 2472834 - DNA, 25 bp, Homo sapien
agttctcatcgttggccacccagag

SEQ ID NO: 2472835 - DNA, 25 bp, Homo sapien
tgcagatgccacagttctcatcgtt

SEQ ID NO: 2472836 - DNA, 25 bp, Homo sapien
cgttaaatgccatcctgcagatgcc

SEQ ID NO: 2472837 - DNA, 25 bp, Homo sapien
aggttgcggcaagccgagatcgcgc

SEQ ID NO: 2472838 - DNA, 25 bp, Homo sapien
gaggttgcggcaagccgagatcgcg

SEQ ID NO: 2472839 - DNA, 25 bp, Homo sapien
gagggatgcttgtatcagccatgat

SEQ ID NO: 2472840 - DNA, 25 bp, Homo sapien
agagagggatgcttgtatcagccat

SEQ ID NO: 2472841 - DNA, 25 bp, Homo sapien
gatgcttgtatcagccatgatcaag

SEQ ID NO: 2472842 - DNA, 25 bp, Homo sapien
gggatgcttgtatcagccatgatca

SEQ ID NO: 2472843 - DNA, 25 bp, Homo sapien
tcaaggcaccaaggagacgtgcatc

SEQ ID NO: 2472844 - DNA, 25 bp, Homo sapien
gacatcagggatccggtgtgctgcc

SEQ ID NO: 2472845 - DNA, 25 bp, Homo sapien
gaagactcttccctagacatcaggg

SEQ ID NO: 2472846 - DNA, 25 bp, Homo sapien
aaggtcacatgaatggtcaaggcac

SEQ ID NO: 2472847 - DNA, 25 bp, Homo sapien
cccctgtgcttgaggctggggaaaa

SEQ ID NO: 2472848 - DNA, 25 bp, Homo sapien
tcccctgtgcttgaggctggggaaa

SEQ ID NO: 2472849 - DNA, 25 bp, Homo sapien
accctgtgtcccctgtgcttgaggc

SEQ ID NO: 2472850 - DNA, 25 bp, Homo sapien
tgtgtcccctgtgcttgaggctggg

SEQ ID NO: 2472851 - DNA, 25 bp, Homo sapien
aggatgcaatgcatgtggaagcagt

SEQ ID NO: 2472852 - DNA, 25 bp, Homo sapien
agccacttgaggatgcaatgcatgt

SEQ ID NO: 2472853 - DNA, 25 bp, Homo sapien
cacttgaggatgcaatgcatgtgga

SEQ ID NO: 2472854 - DNA, 25 bp, Homo sapien
accagcgggcagtcgtcgccgggca

SEQ ID NO: 2472855 - DNA, 25 bp, Homo sapien
tttgagtagtttaatgagttttcac

SEQ ID NO: 2472856 - DNA, 25 bp, Homo sapien
acatagtgatggcaaaacaaacgca

SEQ ID NO: 2472857 - DNA, 25 bp, Homo sapien
cacttattggataaaagtgtcaaca

SEQ ID NO: 2472858 - DNA, 25 bp, Homo sapien
gtgtcaacatagtgatggcaaaaca

SEQ ID NO: 2472859 - DNA, 25 bp, Homo sapien
atgccccaggctctaccgtctgatc

SEQ ID NO: 2472860 - DNA, 25 bp, Homo sapien
tctatatgccgagaacacaggcacc

SEQ ID NO: 2472861 - DNA, 25 bp, Homo sapien
ggcgtttcacggagatgtttattca

SEQ ID NO: 2472862 - DNA, 25 bp, Homo sapien
cagtcatgactcagggtttgacgag

SEQ ID NO: 2472863 - DNA, 25 bp, Homo sapien
gccacaagcagtggccgccagcttt

SEQ ID NO: 2472864 - DNA, 25 bp, Homo sapien
agcagtggccgccagctttgcacag

SEQ ID NO: 2472865 - DNA, 25 bp, Homo sapien
cgccgccggcaatccagcaggcaag

SEQ ID NO: 2472866 - DNA, 25 bp, Homo sapien
tggaggcgccacaagcagtggccgc

SEQ ID NO: 2472867 - DNA, 25 bp, Homo sapien
cccagtgagaacaatggacgcccac

SEQ ID NO: 2472868 - DNA, 25 bp, Homo sapien
ccgctgcagacagtcccagtgagaa

SEQ ID NO: 2472869 - DNA, 25 bp, Homo sapien
cccgctgcagacagtcccagtgaga

SEQ ID NO: 2472870 - DNA, 25 bp, Homo sapien
agtcccagtgagaacaatggacgcc

SEQ ID NO: 2472871 - DNA, 25 bp, Homo sapien
gctccctaggttactggagacacag

SEQ ID NO: 2472872 - DNA, 25 bp, Homo sapien
gccaagggctccctaggttactgga

SEQ ID NO: 2472873 - DNA, 25 bp, Homo sapien
ccctaggttactggagacacagcct

SEQ ID NO: 2472874 - DNA, 25 bp, Homo sapien
gtcaagagacactgggcacgggtca

SEQ ID NO: 2472875 - DNA, 25 bp, Homo sapien
tctgcagcctttggccacaggatga

SEQ ID NO: 2472876 - DNA, 25 bp, Homo sapien
gaggcctggtctactcctcaggttg

SEQ ID NO: 2472877 - DNA, 25 bp, Homo sapien
caggtgacatcagccttcaagctca

SEQ ID NO: 2472878 - DNA, 25 bp, Homo sapien
gggtatcttcccaggacaggcactg

SEQ ID NO: 2472879 - DNA, 25 bp, Homo sapien
tccacgactcctggccttcgattgg

SEQ ID NO: 2472880 - DNA, 25 bp, Homo sapien
ggcactggagctccacgactcctgg

SEQ ID NO: 2472881 - DNA, 25 bp, Homo sapien
ggccttcgattggaggcccctctct

SEQ ID NO: 2472882 - DNA, 25 bp, Homo sapien
aaggcactggagctccacgactcct

SEQ ID NO: 2472883 - DNA, 25 bp, Homo sapien
gctggaggcgcgcaaggatctggcg

SEQ ID NO: 2472884 - DNA, 25 bp, Homo sapien
tcaggcccggcttgcgtgggccgca

SEQ ID NO: 2472885 - DNA, 25 bp, Homo sapien
atcccaaaggaaccagccgcgcggg

SEQ ID NO: 2472886 - DNA, 25 bp, Homo sapien
atctggcgcttggtgggagcccaac

SEQ ID NO: 2472887 - DNA, 25 bp, Homo sapien
ggacgccggctgactggtgggcggc

SEQ ID NO: 2472888 - DNA, 25 bp, Homo sapien
gacgccggctgactggtgggcggcg

SEQ ID NO: 2472889 - DNA, 25 bp, Homo sapien
ggggacgccggctgactggtgggcg

SEQ ID NO: 2472890 - DNA, 25 bp, Homo sapien
acgccggctgactggtgggcggcgg

SEQ ID NO: 2472891 - DNA, 25 bp, Homo sapien
cttgtaccacgcgaggccaggcggc

SEQ ID NO: 2472892 - DNA, 25 bp, Homo sapien
gcggccgccagtgtcgcggaccggg

SEQ ID NO: 2472893 - DNA, 25 bp, Homo sapien
tgtgccccgccgctggcttgtacca

SEQ ID NO: 2472894 - DNA, 25 bp, Homo sapien
cgccgctggcttgtaccacgcgagg

SEQ ID NO: 2472895 - DNA, 25 bp, Homo sapien
gagcgccgcgcgtacggggacctgc

SEQ ID NO: 2472896 - DNA, 25 bp, Homo sapien
gtagggctgggagcgccgcgcgtac

SEQ ID NO: 2472897 - DNA, 25 bp, Homo sapien
ccgcgcgtacggggacctgcggagg

SEQ ID NO: 2472898 - DNA, 25 bp, Homo sapien
tgtagggctgggagcgccgcgcgta

SEQ ID NO: 2472899 - DNA, 25 bp, Homo sapien
tcagtccccggcacgccggactcac

SEQ ID NO: 2472900 - DNA, 25 bp, Homo sapien
tggggggcaggcaagcaaaggctga

SEQ ID NO: 2472901 - DNA, 25 bp, Homo sapien
ccatcagtccccggcacgccggact

SEQ ID NO: 2472902 - DNA, 25 bp, Homo sapien
atcagtccccggcacgccggactca

SEQ ID NO: 2472903 - DNA, 25 bp, Homo sapien
gggcgacgtcctggacgcacacagc

SEQ ID NO: 2472904 - DNA, 25 bp, Homo sapien
ttgcactggtaggtcccgcggccgt

SEQ ID NO: 2472905 - DNA, 25 bp, Homo sapien
cagggacaggaagacgttcgccttg

SEQ ID NO: 2472906 - DNA, 25 bp, Homo sapien
aggcggcgaggcagtcggctgcgcg

SEQ ID NO: 2472907 - DNA, 25 bp, Homo sapien
ttatttattcgtttgccattaactg

SEQ ID NO: 2472908 - DNA, 25 bp, Homo sapien
cccagcggtgccaggagaggtccgg

SEQ ID NO: 2472909 - DNA, 25 bp, Homo sapien
ttattcgtttgccattaactgcggg

SEQ ID NO: 2472910 - DNA, 25 bp, Homo sapien
cctggggtcaccgagtgggacggtg

SEQ ID NO: 2472911 - DNA, 25 bp, Homo sapien
gaggtgcacgcgaggctctccacag

SEQ ID NO: 2472912 - DNA, 25 bp, Homo sapien
gggaccagccagttccccatagaca

SEQ ID NO: 2472913 - DNA, 25 bp, Homo sapien
catagacagattggtgctggacagg

SEQ ID NO: 2472914 - DNA, 25 bp, Homo sapien
ctctgctgttgtgaggtcgacctca

SEQ ID NO: 2472915 - DNA, 25 bp, Homo sapien
tgttctgtttgtacatggctgacgg

SEQ ID NO: 2472916 - DNA, 25 bp, Homo sapien
ctggctccaggaaaacacgcttgcc

SEQ ID NO: 2472917 - DNA, 25 bp, Homo sapien
ttagggagcagtgactgcggtcacc

SEQ ID NO: 2472918 - DNA, 25 bp, Homo sapien
cacccctttagttctctgggtgtag

SEQ ID NO: 2472919 - DNA, 25 bp, Homo sapien
tagagtacataatcagtgccacaca

SEQ ID NO: 2472920 - DNA, 25 bp, Homo sapien
tgagagactaatgcctgtcctgcct

SEQ ID NO: 2472921 - DNA, 25 bp, Homo sapien
tttttcccccagaagccactgaata

SEQ ID NO: 2472922 - DNA, 25 bp, Homo sapien
cctgttggctgtctggccttggagc

SEQ ID NO: 2472923 - DNA, 25 bp, Homo sapien
tcctggtccgtaggaggtgagacat

SEQ ID NO: 2472924 - DNA, 25 bp, Homo sapien
gaccagaaggccgtcctctttgata

SEQ ID NO: 2472925 - DNA, 25 bp, Homo sapien
cgcctgctgcgtcagagctcaagga

SEQ ID NO: 2472926 - DNA, 25 bp, Homo sapien
gacctttgacctgtgggtgtcactt

SEQ ID NO: 2472927 - DNA, 25 bp, Homo sapien
atggcaccagcctgacggatgagga

SEQ ID NO: 2472928 - DNA, 25 bp, Homo sapien
caggtgaagcgggagccgggtgaga

SEQ ID NO: 2472929 - DNA, 25 bp, Homo sapien
gcgggagccgggtgagaatggcacc

SEQ ID NO: 2472930 - DNA, 25 bp, Homo sapien
aatggcaccagcctgacggatgagg

SEQ ID NO: 2472931 - DNA, 25 bp, Homo sapien
ggcccacaccgagtcccaggcgagg

SEQ ID NO: 2472932 - DNA, 25 bp, Homo sapien
atggtcacatcctggccactgccca

SEQ ID NO: 2472933 - DNA, 25 bp, Homo sapien
tgcccacaccaagtcccaggcgagg

SEQ ID NO: 2472934 - DNA, 25 bp, Homo sapien
ggccacaccgagtcacaggcgaggc

SEQ ID NO: 2472935 - DNA, 25 bp, Homo sapien
cccgcggtgactagctctcgggcaa

SEQ ID NO: 2472936 - DNA, 25 bp, Homo sapien
ggcagcagaggtcggaacaccttcc

SEQ ID NO: 2472937 - DNA, 25 bp, Homo sapien
tcgggcaagcgatgcaagtgcagaa

SEQ ID NO: 2472938 - DNA, 25 bp, Homo sapien
agcggcagcagaggtcggaacacct

SEQ ID NO: 2472939 - DNA, 25 bp, Homo sapien
ggccacacgccccgggctcttgctc

SEQ ID NO: 2472940 - DNA, 25 bp, Homo sapien
gccccgggctcttgctccgagggga

SEQ ID NO: 2472941 - DNA, 25 bp, Homo sapien
cggccacacgccccgggctcttgct

SEQ ID NO: 2472942 - DNA, 25 bp, Homo sapien
ctgtgcggtgcaggtgacagcaccc

SEQ ID NO: 2472943 - DNA, 25 bp, Homo sapien
ggtgcaggtgacagcaccccacttc

SEQ ID NO: 2472944 - DNA, 25 bp, Homo sapien
ttcctactctgtgggcaggtaacac

SEQ ID NO: 2472945 - DNA, 25 bp, Homo sapien
gggcaggtaacacctgcgtgctctg

SEQ ID NO: 2472946 - DNA, 25 bp, Homo sapien
aagagaggagggtggcggtaaggct

SEQ ID NO: 2472947 - DNA, 25 bp, Homo sapien
tgattcagccagagtgagaccaaat

SEQ ID NO: 2472948 - DNA, 25 bp, Homo sapien
aggagggtggcggtaaggctggaag

SEQ ID NO: 2472949 - DNA, 25 bp, Homo sapien
agagaggagggtggcggtaaggctg

SEQ ID NO: 2472950 - DNA, 25 bp, Homo sapien
gacagggacttgagacccgtcttag

SEQ ID NO: 2472951 - DNA, 25 bp, Homo sapien
acgggcacgacagggacttgagacc

SEQ ID NO: 2472952 - DNA, 25 bp, Homo sapien
acccgtcttaggctgtgtcagggca

SEQ ID NO: 2472953 - DNA, 25 bp, Homo sapien
gacttgagacccgtcttaggctgtg

SEQ ID NO: 2472954 - DNA, 25 bp, Homo sapien
agcaaggtctctgggactgactagg

SEQ ID NO: 2472955 - DNA, 25 bp, Homo sapien
gactgactaggtgaagaccggtttc

SEQ ID NO: 2472956 - DNA, 25 bp, Homo sapien
cttgggcgtgaggagcaaggtctct

SEQ ID NO: 2472957 - DNA, 25 bp, Homo sapien
cgtgaggagcaaggtctctgggact

SEQ ID NO: 2472958 - DNA, 25 bp, Homo sapien
gaccaaccacggagcacagtgacat

SEQ ID NO: 2472959 - DNA, 25 bp, Homo sapien
agccacagtgacataaccctccgaa

SEQ ID NO: 2472960 - DNA, 25 bp, Homo sapien
tgacataaccctccgaacattcgtg

SEQ ID NO: 2472961 - DNA, 25 bp, Homo sapien
cgaacattcgtgaccaaccacggag

SEQ ID NO: 2472962 - DNA, 25 bp, Homo sapien
tgcccactctaagaacgtgacccca

SEQ ID NO: 2472963 - DNA, 25 bp, Homo sapien
cccctgcccactctaagaacgtgac

SEQ ID NO: 2472964 - DNA, 25 bp, Homo sapien
ctctaagaacgtgaccccagaaagg

SEQ ID NO: 2472965 - DNA, 25 bp, Homo sapien
ccactctaagaacgtgaccccagaa

SEQ ID NO: 2472966 - DNA, 25 bp, Homo sapien
cacagccacggcaggccattagtgg

SEQ ID NO: 2472967 - DNA, 25 bp, Homo sapien
tgaggacagctgttgctggctcttg

SEQ ID NO: 2472968 - DNA, 25 bp, Homo sapien
gtggttggcagtggcttccgtccaa

SEQ ID NO: 2472969 - DNA, 25 bp, Homo sapien
gaagtttgttcagggtggcctgacc

SEQ ID NO: 2472970 - DNA, 25 bp, Homo sapien
ccttctgaaggtacccgtgggtgag

SEQ ID NO: 2472971 - DNA, 25 bp, Homo sapien
gtgtgaggaccttctgaaggtaccc

SEQ ID NO: 2472972 - DNA, 25 bp, Homo sapien
cgtgggtgaggggatcatttggatg

SEQ ID NO: 2472973 - DNA, 25 bp, Homo sapien
tgggtgaggggatcatttggatgga

SEQ ID NO: 2472974 - DNA, 25 bp, Homo sapien
cacagacccacacggtggtacctgg

SEQ ID NO: 2472975 - DNA, 25 bp, Homo sapien
ccacagacccacacggtggtacctg

SEQ ID NO: 2472976 - DNA, 25 bp, Homo sapien
ccacgtgggtcccttggtttgtgag

SEQ ID NO: 2472977 - DNA, 25 bp, Homo sapien
gtgactacagcccttccaaagaggg

SEQ ID NO: 2472978 - DNA, 25 bp, Homo sapien
ccttggtttgcaggccatagactga

SEQ ID NO: 2472979 - DNA, 25 bp, Homo sapien
gggccatatcacgtgcacagtgacc

SEQ ID NO: 2472980 - DNA, 25 bp, Homo sapien
ccataaagggttctttacagcagat

SEQ ID NO: 2472981 - DNA, 25 bp, Homo sapien
caaccggaggcgcccttcagggcag

SEQ ID NO: 2472982 - DNA, 25 bp, Homo sapien
gtttcttgtggaagtgtcttaagcc

SEQ ID NO: 2472983 - DNA, 25 bp, Homo sapien
agcagatggcatcgctgtcggcccc

SEQ ID NO: 2472984 - DNA, 25 bp, Homo sapien
gggcaccatgctgctcatgctccag

SEQ ID NO: 2472985 - DNA, 25 bp, Homo sapien
accatgctgctcatgctccagactg

SEQ ID NO: 2472986 - DNA, 25 bp, Homo sapien
ggcaccatgctgctcatgctccaga

SEQ ID NO: 2472987 - DNA, 25 bp, Homo sapien
atgctgctcatgctccagactgctg

SEQ ID NO: 2472988 - DNA, 25 bp, Homo sapien
gatgtggccacacagccatgtccag

SEQ ID NO: 2472989 - DNA, 25 bp, Homo sapien
gcgatacagtgagatgtggccacac

SEQ ID NO: 2472990 - DNA, 25 bp, Homo sapien
tgtggccacacagccatgtccagac

SEQ ID NO: 2472991 - DNA, 25 bp, Homo sapien
gtgagatgtggccacacagccatgt

SEQ ID NO: 2472992 - DNA, 25 bp, Homo sapien
gtcttggttccttataatcctgtca

SEQ ID NO: 2472993 - DNA, 25 bp, Homo sapien
ggtttgccggcagcggtcttggttc

SEQ ID NO: 2472994 - DNA, 25 bp, Homo sapien
aagaaccagctattgctcaagtggt

SEQ ID NO: 2472995 - DNA, 25 bp, Homo sapien
cacatttatggagcagggggtttgc

SEQ ID NO: 2472996 - DNA, 25 bp, Homo sapien
cttgggccagggtagcctgtggcaa

SEQ ID NO: 2472997 - DNA, 25 bp, Homo sapien
tgtggcaaagacagtctcacagtgt

SEQ ID NO: 2472998 - DNA, 25 bp, Homo sapien
cctgtggcaaagacagtctcacagt

SEQ ID NO: 2472999 - DNA, 25 bp, Homo sapien
agcctgtggcaaagacagtctcaca

SEQ ID NO: 2473000 - DNA, 25 bp, Homo sapien
ctcgatcaccccaacatgcagagag

SEQ ID NO: 2473001 - DNA, 25 bp, Homo sapien
ggaggggtcagatgctcactctgca

SEQ ID NO: 2473002 - DNA, 25 bp, Homo sapien
ggtcagatgctcactctgcagatcc

SEQ ID NO: 2473003 - DNA, 25 bp, Homo sapien
tgcagagagaaaccctttgcccttc

SEQ ID NO: 2473004 - DNA, 25 bp, Homo sapien
tcagcaacctgtgtgcagccaaaga

SEQ ID NO: 2473005 - DNA, 25 bp, Homo sapien
ccaggcctcagggttccacggagca

SEQ ID NO: 2473006 - DNA, 25 bp, Homo sapien
gcctcagggttccacggagcaggtt

SEQ ID NO: 2473007 - DNA, 25 bp, Homo sapien
gttgggcaagtgtgttaggaccatc

SEQ ID NO: 2473008 - DNA, 25 bp, Homo sapien
cgctgcagctttgcgactccggcca

SEQ ID NO: 2473009 - DNA, 25 bp, Homo sapien
gatcccggggactgactggggttgc

SEQ ID NO: 2473010 - DNA, 25 bp, Homo sapien
gggactgactggggttgcaggcctt

SEQ ID NO: 2473011 - DNA, 25 bp, Homo sapien
cacagatcccggggactgactgggg

SEQ ID NO: 2473012 - DNA, 25 bp, Homo sapien
gacgtgggcttctgttccgcagcct

SEQ ID NO: 2473013 - DNA, 25 bp, Homo sapien
ggtgtcgaggaccacctggcgccca

SEQ ID NO: 2473014 - DNA, 25 bp, Homo sapien
gtgggcttctgttccgcagcctgca

SEQ ID NO: 2473015 - DNA, 25 bp, Homo sapien
ccgggctggtgtcgaggaccacctg

SEQ ID NO: 2473016 - DNA, 25 bp, Homo sapien
tcagctgagccccgggcattaggaa

SEQ ID NO: 2473017 - DNA, 25 bp, Homo sapien
ctgagccccgggcattaggaattgg

SEQ ID NO: 2473018 - DNA, 25 bp, Homo sapien
acacgggtggggcattggaagccag

SEQ ID NO: 2473019 - DNA, 25 bp, Homo sapien
ctctgggggtactgactcaggaaga

SEQ ID NO: 2473020 - DNA, 25 bp, Homo sapien
cctggtcacactgaccactgggcat

SEQ ID NO: 2473021 - DNA, 25 bp, Homo sapien
catggtccgcttggtacgggcatct

SEQ ID NO: 2473022 - DNA, 25 bp, Homo sapien
gattccttgcgggatctgcagacta

SEQ ID NO: 2473023 - DNA, 25 bp, Homo sapien
cataagagatggtggagtagagtct

SEQ ID NO: 2473024 - DNA, 25 bp, Homo sapien
agcagaccaggagcatgactactga

SEQ ID NO: 2473025 - DNA, 25 bp, Homo sapien
catgcatccactggaaagggagccc

SEQ ID NO: 2473026 - DNA, 25 bp, Homo sapien
gaggagagacagcttacaccattat

SEQ ID NO: 2473027 - DNA, 25 bp, Homo sapien
cgtgggtcatgcatccactggaaag

SEQ ID NO: 2473028 - DNA, 25 bp, Homo sapien
gggtcatgcatccactggaaaggga

SEQ ID NO: 2473029 - DNA, 25 bp, Homo sapien
cgacagagcgagagtttgtctgaaa

SEQ ID NO: 2473030 - DNA, 25 bp, Homo sapien
ctcaagcctgtaatcgcaagcaaca

SEQ ID NO: 2473031 - DNA, 25 bp, Homo sapien
caagcctgtaatcgcaagcaacact

SEQ ID NO: 2473032 - DNA, 25 bp, Homo sapien
aaaaagccagggtgagcggtggctc

SEQ ID NO: 2473033 - DNA, 25 bp, Homo sapien
tatcctttacgggatcagccaccgg

SEQ ID NO: 2473034 - DNA, 25 bp, Homo sapien
gttgcatcccaacataaagaccgga

SEQ ID NO: 2473035 - DNA, 25 bp, Homo sapien
tctaaaggctgtcttcaggccgggc

SEQ ID NO: 2473036 - DNA, 25 bp, Homo sapien
cagttgccttgcgagcacgatgaca

SEQ ID NO: 2473037 - DNA, 25 bp, Homo sapien
cctcttagggccgtggagtgaaata

SEQ ID NO: 2473038 - DNA, 25 bp, Homo sapien
tgtgcctcggagagaaactttatcc

SEQ ID NO: 2473039 - DNA, 25 bp, Homo sapien
ggcttgcggcccacaagataagata

SEQ ID NO: 2473040 - DNA, 25 bp, Homo sapien
tttccaggtaatgcgcagtagagcc

SEQ ID NO: 2473041 - DNA, 25 bp, Homo sapien
tgactgcgggccggcctggctaatg

SEQ ID NO: 2473042 - DNA, 25 bp, Homo sapien
cgacagagcgagagtttgtctgaaa

SEQ ID NO: 2473043 - DNA, 25 bp, Homo sapien
caagcctgtaatcgcaagcaacact

SEQ ID NO: 2473044 - DNA, 25 bp, Homo sapien
ctcaagcctgtaatcgcaagcaaca

SEQ ID NO: 2473045 - DNA, 25 bp, Homo sapien
aaaaagccagggtgagcggtggctc

SEQ ID NO: 2473046 - DNA, 25 bp, Homo sapien
tctatgcggtactaaagagcagaag

SEQ ID NO: 2473047 - DNA, 25 bp, Homo sapien
tggtgctgcccgtcaataatcccag

SEQ ID NO: 2473048 - DNA, 25 bp, Homo sapien
ccgggcgtggtgctgcccgtcaata

SEQ ID NO: 2473049 - DNA, 25 bp, Homo sapien
caacctgagcgtccgagcgagactc

SEQ ID NO: 2473050 - DNA, 25 bp, Homo sapien
tgccattagctggtggatctcctcg

SEQ ID NO: 2473051 - DNA, 25 bp, Homo sapien
ctccggcccgaatatccagcgagtg

SEQ ID NO: 2473052 - DNA, 25 bp, Homo sapien
gcttctcctcgtcgaatcggcgcag

SEQ ID NO: 2473053 - DNA, 25 bp, Homo sapien
tgctcggcgacatccctcgggaggc

SEQ ID NO: 2473054 - DNA, 25 bp, Homo sapien
cacagggttggcaagccattcgcgg

SEQ ID NO: 2473055 - DNA, 25 bp, Homo sapien
cagggttggcaagccattcgcggat

SEQ ID NO: 2473056 - DNA, 25 bp, Homo sapien
agcacagggttggcaagccattcgc

SEQ ID NO: 2473057 - DNA, 25 bp, Homo sapien
agggttggcaagccattcgcggatg

SEQ ID NO: 2473058 - DNA, 25 bp, Homo sapien
tcggacatgctttgttgagaccagt

SEQ ID NO: 2473059 - DNA, 25 bp, Homo sapien
tgttgagaccagtgtagtctacaca

SEQ ID NO: 2473060 - DNA, 25 bp, Homo sapien
cagtgtagtctacacacatccacca

SEQ ID NO: 2473061 - DNA, 25 bp, Homo sapien
gtagggaaccttcggacatgctttg

SEQ ID NO: 2473062 - DNA, 25 bp, Homo sapien
catagcagtacatgccgaagggcgt

SEQ ID NO: 2473063 - DNA, 25 bp, Homo sapien
gaacacatggttcatgcaccgctgg

SEQ ID NO: 2473064 - DNA, 25 bp, Homo sapien
tgatgaaagaagtcgcgagctggtc

SEQ ID NO: 2473065 - DNA, 25 bp, Homo sapien
gagcttgacgcctttcgccttgaga

SEQ ID NO: 2473066 - DNA, 25 bp, Homo sapien
gagacgatgaacccaagagcaggcc

SEQ ID NO: 2473067 - DNA, 25 bp, Homo sapien
tcggagacgatgaacccaagagcag

SEQ ID NO: 2473068 - DNA, 25 bp, Homo sapien
cgatgaacccaagagcaggccccgg

SEQ ID NO: 2473069 - DNA, 25 bp, Homo sapien
gacgatgaacccaagagcaggcccc

SEQ ID NO: 2473070 - DNA, 25 bp, Homo sapien
gtgatggctgcgatcttctccgggt

SEQ ID NO: 2473071 - DNA, 25 bp, Homo sapien
tggctgcgatcttctccgggttggc

SEQ ID NO: 2473072 - DNA, 25 bp, Homo sapien
gctggtgatggctgcgatcttctcc

SEQ ID NO: 2473073 - DNA, 25 bp, Homo sapien
gatggctgcgatcttctccgggttg

SEQ ID NO: 2473074 - DNA, 25 bp, Homo sapien
tgtacgcccttaaagtcctgatggg

SEQ ID NO: 2473075 - DNA, 25 bp, Homo sapien
tctgtacgcccttaaagtcctgatg

SEQ ID NO: 2473076 - DNA, 25 bp, Homo sapien
cctctgtacgcccttaaagtcctga

SEQ ID NO: 2473077 - DNA, 25 bp, Homo sapien
ctgtacgcccttaaagtcctgatgg

SEQ ID NO: 2473078 - DNA, 25 bp, Homo sapien
tacgcatcagggatacggatacctc

SEQ ID NO: 2473079 - DNA, 25 bp, Homo sapien
caccttctgtgataagtaactcgca

SEQ ID NO: 2473080 - DNA, 25 bp, Homo sapien
gagaagagggattcgtacgcatcag

SEQ ID NO: 2473081 - DNA, 25 bp, Homo sapien
cgtcggagttcagagtaagcagcca

SEQ ID NO: 2473082 - DNA, 25 bp, Homo sapien
tttgtcatcaagaagggtcgcctca

SEQ ID NO: 2473083 - DNA, 25 bp, Homo sapien
atagccagacctcccctcggtgtta

SEQ ID NO: 2473084 - DNA, 25 bp, Homo sapien
gaatatctttcgtgctttgtgagtc

SEQ ID NO: 2473085 - DNA, 25 bp, Homo sapien
cctctgcgtgaaatttcctcggaga

SEQ ID NO: 2473086 - DNA, 25 bp, Homo sapien
caccaggtcgatgcgtggagtggac

SEQ ID NO: 2473087 - DNA, 25 bp, Homo sapien
ggtcgatgcgtggagtggacggagc

SEQ ID NO: 2473088 - DNA, 25 bp, Homo sapien
ctgcaacaccaggtcgatgcgtgga

SEQ ID NO: 2473089 - DNA, 25 bp, Homo sapien
gcaacaccaggtcgatgcgtggagt

SEQ ID NO: 2473090 - DNA, 25 bp, Homo sapien
aaagcgtgccgcataagcctaccgt

SEQ ID NO: 2473091 - DNA, 25 bp, Homo sapien
agcagttaagtcaagccggcgcgtc

SEQ ID NO: 2473092 - DNA, 25 bp, Homo sapien
tagccacggtggaaacgaaagcgtg

SEQ ID NO: 2473093 - DNA, 25 bp, Homo sapien
gcgtcacaggcactcggcgtgcaag

SEQ ID NO: 2473094 - DNA, 25 bp, Homo sapien
tacctagagcggagcctaaagatgc

SEQ ID NO: 2473095 - DNA, 25 bp, Homo sapien
tgggtcagcgaaaggaacattccgg

SEQ ID NO: 2473096 - DNA, 25 bp, Homo sapien
tgtcatcgtgctcgcaaggcaactg

SEQ ID NO: 2473097 - DNA, 25 bp, Homo sapien
taaagatgcatccagcatgacgggt

SEQ ID NO: 2473098 - DNA, 25 bp, Homo sapien
cagtggcataggatagagttcctgg

SEQ ID NO: 2473099 - DNA, 25 bp, Homo sapien
ggcagcagtgctactggcagtctga

SEQ ID NO: 2473100 - DNA, 25 bp, Homo sapien
ctgcagtggcataggatagagttcc

SEQ ID NO: 2473101 - DNA, 25 bp, Homo sapien
tctgaaggattcgaaggattcagtg

SEQ ID NO: 2473102 - DNA, 25 bp, Homo sapien
ggggattcagactctattttgttgc

SEQ ID NO: 2473103 - DNA, 25 bp, Homo sapien
atagttcaatactccccacactgtg

SEQ ID NO: 2473104 - DNA, 25 bp, Homo sapien
ttgtatagttcaatactccccacac

SEQ ID NO: 2473105 - DNA, 25 bp, Homo sapien
gctggggattcagactctattttgt

SEQ ID NO: 2473106 - DNA, 25 bp, Homo sapien
ggctggcctggcaagttgcagctct

SEQ ID NO: 2473107 - DNA, 25 bp, Homo sapien
tcaaaggtctgaggcagtcctgatc

SEQ ID NO: 2473108 - DNA, 25 bp, Homo sapien
tctgaggcagtcctgatccgctgct

SEQ ID NO: 2473109 - DNA, 25 bp, Homo sapien
tgagcctcgccgctggctcagtggc

SEQ ID NO: 2473110 - DNA, 25 bp, Homo sapien
tcaggagcaaatcgtctgagagccg

SEQ ID NO: 2473111 - DNA, 25 bp, Homo sapien
tgagagccgttcaaggaagtcaaat

SEQ ID NO: 2473112 - DNA, 25 bp, Homo sapien
cgtctgagagccgttcaaggaagtc

SEQ ID NO: 2473113 - DNA, 25 bp, Homo sapien
caaatcgtctgagagccgttcaagg

SEQ ID NO: 2473114 - DNA, 25 bp, Homo sapien
cccacagtttatcagacatgcacag

SEQ ID NO: 2473115 - DNA, 25 bp, Homo sapien
tttttgtttcctcttgcggagctgc

SEQ ID NO: 2473116 - DNA, 25 bp, Homo sapien
ttgtttcctcttgcggagctgccgc

SEQ ID NO: 2473117 - DNA, 25 bp, Homo sapien
tcgactggactatctgttcccacag

SEQ ID NO: 2473118 - DNA, 25 bp, Homo sapien
ggctggactcagatgacacaacgcc

SEQ ID NO: 2473119 - DNA, 25 bp, Homo sapien
tcagatgacacaacgccaggaaaaa

SEQ ID NO: 2473120 - DNA, 25 bp, Homo sapien
tggactcagatgacacaacgccagg

SEQ ID NO: 2473121 - DNA, 25 bp, Homo sapien
actcagatgacacaacgccaggaaa

SEQ ID NO: 2473122 - DNA, 25 bp, Homo sapien
ttccctcctctaggcgaggcctagt

SEQ ID NO: 2473123 - DNA, 25 bp, Homo sapien
agcagccggcgacgcgactgcagcg

SEQ ID NO: 2473124 - DNA, 25 bp, Homo sapien
gagcggacgccacggcctttccctc

SEQ ID NO: 2473125 - DNA, 25 bp, Homo sapien
tagtagcggacagggctggtcagct

SEQ ID NO: 2473126 - DNA, 25 bp, Homo sapien
tcaggcgcacttcgacaggcccgtt

SEQ ID NO: 2473127 - DNA, 25 bp, Homo sapien
caggcccgttcctacggcctccgag

SEQ ID NO: 2473128 - DNA, 25 bp, Homo sapien
ctgtcaggcgcacttcgacaggccc

SEQ ID NO: 2473129 - DNA, 25 bp, Homo sapien
tcgacaggcccgttcctacggcctc

SEQ ID NO: 2473130 - DNA, 25 bp, Homo sapien
atataaacgtggacaatttatcagg

SEQ ID NO: 2473131 - DNA, 25 bp, Homo sapien
aatataaacgtggacaatttatcag

SEQ ID NO: 2473132 - DNA, 25 bp, Homo sapien
gacaatttatcaggggtaaatggtg

SEQ ID NO: 2473133 - DNA, 25 bp, Homo sapien
atttatcaggggtaaatggtgaagg

SEQ ID NO: 2473134 - DNA, 25 bp, Homo sapien
acacacaaatcctctacggaaaatt

SEQ ID NO: 2473135 - DNA, 25 bp, Homo sapien
cacacaaatcctctacggaaaatta

SEQ ID NO: 2473136 - DNA, 25 bp, Homo sapien
acaaatcctctacggaaaattatct

SEQ ID NO: 2473137 - DNA, 25 bp, Homo sapien
cacaaatcctctacggaaaattatc

SEQ ID NO: 2473138 - DNA, 25 bp, Homo sapien
tgtttttactattaagaggacacag

SEQ ID NO: 2473139 - DNA, 25 bp, Homo sapien
acagaagagactccactgtaaccaa

SEQ ID NO: 2473140 - DNA, 25 bp, Homo sapien
ctcaaactgtttttactattaagag

SEQ ID NO: 2473141 - DNA, 25 bp, Homo sapien
gagactccactgtaaccaaagaagg

SEQ ID NO: 2473142 - DNA, 25 bp, Homo sapien
aacgatggctgctgttgaatcttct

SEQ ID NO: 2473143 - DNA, 25 bp, Homo sapien
aaaaaaatctgaacgatggctgctg

SEQ ID NO: 2473144 - DNA, 25 bp, Homo sapien
ctaaaaccagtcttcatggctccca

SEQ ID NO: 2473145 - DNA, 25 bp, Homo sapien
gttatcctaaaaccagtcttcatgg

SEQ ID NO: 2473146 - DNA, 25 bp, Homo sapien
ttttatcattaatcgcttccagaga

SEQ ID NO: 2473147 - DNA, 25 bp, Homo sapien
tatcattaatcgcttccagagatct

SEQ ID NO: 2473148 - DNA, 25 bp, Homo sapien
atcattaatcgcttccagagatctt

SEQ ID NO: 2473149 - DNA, 25 bp, Homo sapien
aattttatcattaatcgcttccaga

SEQ ID NO: 2473150 - DNA, 25 bp, Homo sapien
cagtgtttatcctacatttatataa

SEQ ID NO: 2473151 - DNA, 25 bp, Homo sapien
taagattagggaaagcagaattaca

SEQ ID NO: 2473152 - DNA, 25 bp, Homo sapien
cagaaataaatcactggctgggtgc

SEQ ID NO: 2473153 - DNA, 25 bp, Homo sapien
ttaaaacatttcagtagagagctac

SEQ ID NO: 2473154 - DNA, 25 bp, Homo sapien
ggtataaatagcctctctctcttcg

SEQ ID NO: 2473155 - DNA, 25 bp, Homo sapien
tctcttcgtgattcttggtggtttt

SEQ ID NO: 2473156 - DNA, 25 bp, Homo sapien
ttgaaacttgcccttcacaggccag

SEQ ID NO: 2473157 - DNA, 25 bp, Homo sapien
aacttgcccttcacaggccaggcgt

SEQ ID NO: 2473158 - DNA, 25 bp, Homo sapien
cagccaacgctattgaggagtgacc

SEQ ID NO: 2473159 - DNA, 25 bp, Homo sapien
aaagagcttgtccatgaacccaggt

SEQ ID NO: 2473160 - DNA, 25 bp, Homo sapien
tagagcccatcgttgagttaccaag

SEQ ID NO: 2473161 - DNA, 25 bp, Homo sapien
gaagagtgtgctgataaacctacca

SEQ ID NO: 2473162 - DNA, 25 bp, Homo sapien
agccatgctgctacactcacctgaa

SEQ ID NO: 2473163 - DNA, 25 bp, Homo sapien
caggctgctccatgtgacacgtggt

SEQ ID NO: 2473164 - DNA, 25 bp, Homo sapien
gcctgggccaagtgagtggaggtca

SEQ ID NO: 2473165 - DNA, 25 bp, Homo sapien
tcagagtgatagtgcagccatgctg

SEQ ID NO: 2473166 - DNA, 25 bp, Homo sapien
tgctgagaagatgtggttgctcatc

SEQ ID NO: 2473167 - DNA, 25 bp, Homo sapien
atgctgagaagatgtggttgctcat

SEQ ID NO: 2473168 - DNA, 25 bp, Homo sapien
tcttctagagtgggtggcttttgga

SEQ ID NO: 2473169 - DNA, 25 bp, Homo sapien
accactgctgtatgtaattggtaga

SEQ ID NO: 2473170 - DNA, 25 bp, Homo sapien
caccactgctgtatgtaattggtag

SEQ ID NO: 2473171 - DNA, 25 bp, Homo sapien
tcaccactgctgtatgtaattggta

SEQ ID NO: 2473172 - DNA, 25 bp, Homo sapien
atattgtcctcggatagaggacgta

SEQ ID NO: 2473173 - DNA, 25 bp, Homo sapien
ggtcgatgcgtggagtggacggagc

SEQ ID NO: 2473174 - DNA, 25 bp, Homo sapien
accaggtcgatgcgtggagtggacg

SEQ ID NO: 2473175 - DNA, 25 bp, Homo sapien
caggtcgatgcgtggagtggacgga

SEQ ID NO: 2473176 - DNA, 25 bp, Homo sapien
cctctatccgaggacaatatattaa

SEQ ID NO: 2473177 - DNA, 25 bp, Homo sapien
gatacgtcctctatccgaggacaat

SEQ ID NO: 2473178 - DNA, 25 bp, Homo sapien
taatatctgatacgtcctctatccg

SEQ ID NO: 2473179 - DNA, 25 bp, Homo sapien
tcagtttaatatctgatacgtcctc

SEQ ID NO: 2473180 - DNA, 25 bp, Homo sapien
cctctatccgaggacaatatattaa

SEQ ID NO: 2473181 - DNA, 25 bp, Homo sapien
gatacgtcctctatccgaggacaat

SEQ ID NO: 2473182 - DNA, 25 bp, Homo sapien
taatatctgatacgtcctctatccg

SEQ ID NO: 2473183 - DNA, 25 bp, Homo sapien
tcagtttaatatctgatacgtcctc

SEQ ID NO: 2473184 - DNA, 25 bp, Homo sapien
tattttacttaaccccatgcatcca

SEQ ID NO: 2473185 - DNA, 25 bp, Homo sapien
cctagcttgaatttgaaacaacagc

SEQ ID NO: 2473186 - DNA, 25 bp, Homo sapien
agcacatcttaatttggacactaaa

SEQ ID NO: 2473187 - DNA, 25 bp, Homo sapien
gtggcgtgatcacaaggcttaccgt

SEQ ID NO: 2473188 - DNA, 25 bp, Homo sapien
ccagtgtttctgatggggctagatt

SEQ ID NO: 2473189 - DNA, 25 bp, Homo sapien
tggggctagattggcatgggttcat

SEQ ID NO: 2473190 - DNA, 25 bp, Homo sapien
gatggggctagattggcatgggttc

SEQ ID NO: 2473191 - DNA, 25 bp, Homo sapien
tttctgatggggctagattggcatg

SEQ ID NO: 2473192 - DNA, 25 bp, Homo sapien
tagatccccgctgaagtaggctggt

SEQ ID NO: 2473193 - DNA, 25 bp, Homo sapien
tgtgctgagtacaacgggcttgagc

SEQ ID NO: 2473194 - DNA, 25 bp, Homo sapien
gatacagagattgccctccagctta

SEQ ID NO: 2473195 - DNA, 25 bp, Homo sapien
ccactggtggttgcggcacatttaa

SEQ ID NO: 2473196 - DNA, 25 bp, Homo sapien
ggactactgagtctttcggtgcccc

SEQ ID NO: 2473197 - DNA, 25 bp, Homo sapien
taatcaggatattcacgtggactac

SEQ ID NO: 2473198 - DNA, 25 bp, Homo sapien
gggtggaccctacattatctcagct

SEQ ID NO: 2473199 - DNA, 25 bp, Homo sapien
tagttttgtcctgcggccgagtgtt

SEQ ID NO: 2473200 - DNA, 25 bp, Homo sapien
cgttgctcaggctggtctccaactc

SEQ ID NO: 2473201 - DNA, 25 bp, Homo sapien
acgttgctcaggctggtctccaact

SEQ ID NO: 2473202 - DNA, 25 bp, Homo sapien
ccaatggcgcgatctaggctctctg

SEQ ID NO: 2473203 - DNA, 25 bp, Homo sapien
agtccaatggcgcgatctaggctct

SEQ ID NO: 2473204 - DNA, 25 bp, Homo sapien
ctctacctcccgggttccagcgatt

SEQ ID NO: 2473205 - DNA, 25 bp, Homo sapien
ttagggggtttcgccatgtcggcca

SEQ ID NO: 2473206 - DNA, 25 bp, Homo sapien
ggcaaccctttatctcccgctctga

SEQ ID NO: 2473207 - DNA, 25 bp, Homo sapien
gcaaccctttatctcccgctctgaa

SEQ ID NO: 2473208 - DNA, 25 bp, Homo sapien
ggactactgagtctttcggtgcccc

SEQ ID NO: 2473209 - DNA, 25 bp, Homo sapien
taatcaggatattcacgtggactac

SEQ ID NO: 2473210 - DNA, 25 bp, Homo sapien
gggtggaccctacattatctcagct

SEQ ID NO: 2473211 - DNA, 25 bp, Homo sapien
tagttttgtcctgcggccgagtgtt

SEQ ID NO: 2473212 - DNA, 25 bp, Homo sapien
cgttgctcaggctggtctccaactc

SEQ ID NO: 2473213 - DNA, 25 bp, Homo sapien
ccaatggcgcgatctaggctctctg

SEQ ID NO: 2473214 - DNA, 25 bp, Homo sapien
acgttgctcaggctggtctccaact

SEQ ID NO: 2473215 - DNA, 25 bp, Homo sapien
agtccaatggcgcgatctaggctct

SEQ ID NO: 2473216 - DNA, 25 bp, Homo sapien
tatcttatcttgtgggccgcaagcc

SEQ ID NO: 2473217 - DNA, 25 bp, Homo sapien
gccttattattagccacggccaggg

SEQ ID NO: 2473218 - DNA, 25 bp, Homo sapien
tatagttcaacgcaatatatcttat

SEQ ID NO: 2473219 - DNA, 25 bp, Homo sapien
gccctaaatcattcagcaatcaaca

SEQ ID NO: 2473220 - DNA, 25 bp, Homo sapien
cgcgtgacctatcgatcattggaga

SEQ ID NO: 2473221 - DNA, 25 bp, Homo sapien
tgactacaataaatagcagcgcctc

SEQ ID NO: 2473222 - DNA, 25 bp, Homo sapien
tgggaggtctgacattagccaggcc

SEQ ID NO: 2473223 - DNA, 25 bp, Homo sapien
tagtaggagtaccacagtcttcgat

SEQ ID NO: 2473224 - DNA, 25 bp, Homo sapien
ggactactgagtctttcggtgcccc

SEQ ID NO: 2473225 - DNA, 25 bp, Homo sapien
taatcaggatattcacgtggactac

SEQ ID NO: 2473226 - DNA, 25 bp, Homo sapien
tagttttgtcctgcggccgagtgtt

SEQ ID NO: 2473227 - DNA, 25 bp, Homo sapien
gggtggaccctacattatctcagct

SEQ ID NO: 2473228 - DNA, 25 bp, Homo sapien
tccggtgatctgcccagctgccgcc

SEQ ID NO: 2473229 - DNA, 25 bp, Homo sapien
ccggtgatctgcccagctgccgcct

SEQ ID NO: 2473230 - DNA, 25 bp, Homo sapien
ctcccaaagtgttgcttgcgattac

SEQ ID NO: 2473231 - DNA, 25 bp, Homo sapien
gtgttgcttgcgattacaggcttga

SEQ ID NO: 2473232 - DNA, 25 bp, Homo sapien
ttcggcttccctgactgggcatggg

SEQ ID NO: 2473233 - DNA, 25 bp, Homo sapien
ccaggaaaacgtggaccgctctccg

SEQ ID NO: 2473234 - DNA, 25 bp, Homo sapien
gcctccctctgccgggtgtctggtg

SEQ ID NO: 2473235 - DNA, 25 bp, Homo sapien
cggcgaagtaaaggcccagcgcagc

SEQ ID NO: 2473236 - DNA, 25 bp, Homo sapien
cctctatccgaggacaatatattaa

SEQ ID NO: 2473237 - DNA, 25 bp, Homo sapien
gatacgtcctctatccgaggacaat

SEQ ID NO: 2473238 - DNA, 25 bp, Homo sapien
tcagtttaatatctgatacgtcctc

SEQ ID NO: 2473239 - DNA, 25 bp, Homo sapien
taatatctgatacgtcctctatccg

SEQ ID NO: 2473240 - DNA, 25 bp, Homo sapien
gggagaatccttgctgggccctcgc

SEQ ID NO: 2473241 - DNA, 25 bp, Homo sapien
ccaggaaaacgtggaccgctctccg

SEQ ID NO: 2473242 - DNA, 25 bp, Homo sapien
cggcgaagtaaaggcccagcgcagc

SEQ ID NO: 2473243 - DNA, 25 bp, Homo sapien
ttcggcttccctgactgggcatggg

SEQ ID NO: 2473244 - DNA, 25 bp, Homo sapien
cctctatccgaggacaatatattaa

SEQ ID NO: 2473245 - DNA, 25 bp, Homo sapien
gatacgtcctctatccgaggacaat

SEQ ID NO: 2473246 - DNA, 25 bp, Homo sapien
taatatctgatacgtcctctatccg

SEQ ID NO: 2473247 - DNA, 25 bp, Homo sapien
tcagtttaatatctgatacgtcctc

SEQ ID NO: 2473248 - DNA, 25 bp, Homo sapien
gtcacaggcactcggcgtgcaagcc

SEQ ID NO: 2473249 - DNA, 25 bp, Homo sapien
aaagcgtgccgcataagcctaccgt

SEQ ID NO: 2473250 - DNA, 25 bp, Homo sapien
agggaagcagttaagtcaagccggc

SEQ ID NO: 2473251 - DNA, 25 bp, Homo sapien
aagccggcgcgtcacaggcactcgg

SEQ ID NO: 2473252 - DNA, 25 bp, Homo sapien
atattgtcctcggatagaggacgta

SEQ ID NO: 2473253 - DNA, 25 bp, Homo sapien
ggtcgatgcgtggagtggacggagc

SEQ ID NO: 2473254 - DNA, 25 bp, Homo sapien
caggtcgatgcgtggagtggacgga

SEQ ID NO: 2473255 - DNA, 25 bp, Homo sapien
accaggtcgatgcgtggagtggacg

SEQ ID NO: 2473256 - DNA, 25 bp, Homo sapien
gggctttcatttcgaatttgcatgc

SEQ ID NO: 2473257 - DNA, 25 bp, Homo sapien
gctttcatttcgaatttgcatgccc

SEQ ID NO: 2473258 - DNA, 25 bp, Homo sapien
ccgggctttcatttcgaatttgcat

SEQ ID NO: 2473259 - DNA, 25 bp, Homo sapien
cgggctttcatttcgaatttgcatg

SEQ ID NO: 2473260 - DNA, 25 bp, Homo sapien
cagcgaaaagacagaaccggaagag

SEQ ID NO: 2473261 - DNA, 25 bp, Homo sapien
ggcgacttccttgttcgtatcgagc

SEQ ID NO: 2473262 - DNA, 25 bp, Homo sapien
tcgtatcgagccagcgaaaagacag

SEQ ID NO: 2473263 - DNA, 25 bp, Homo sapien
tcggcggagagcggtccacgttttc

SEQ ID NO: 2473264 - DNA, 25 bp, Homo sapien
tccagggcaggagcgcgggctgcgc

SEQ ID NO: 2473265 - DNA, 25 bp, Homo sapien
agggcaggagcgcgggctgcgctgg

SEQ ID NO: 2473266 - DNA, 25 bp, Homo sapien
ctggagaaagacgaggctccagggc

SEQ ID NO: 2473267 - DNA, 25 bp, Homo sapien
aggagcgcgggctgcgctgggcctt

SEQ ID NO: 2473268 - DNA, 25 bp, Homo sapien
tatttcactccacggccctaagagg

SEQ ID NO: 2473269 - DNA, 25 bp, Homo sapien
ctaacgcaacttcagcggagggctg

SEQ ID NO: 2473270 - DNA, 25 bp, Homo sapien
ggctgagggctctactgcgcattac

SEQ ID NO: 2473271 - DNA, 25 bp, Homo sapien
gaaggcgctcagtaaacgtttgtgg

SEQ ID NO: 2473272 - DNA, 25 bp, Homo sapien
tgactacaataaatagcagcgcctc

SEQ ID NO: 2473273 - DNA, 25 bp, Homo sapien
tgggaggtctgacattagccaggcc

SEQ ID NO: 2473274 - DNA, 25 bp, Homo sapien
cgcgtgacctatcgatcattggaga

SEQ ID NO: 2473275 - DNA, 25 bp, Homo sapien
tagtaggagtaccacagtcttcgat

SEQ ID NO: 2473276 - DNA, 25 bp, Homo sapien
taatcaggatattcacgtggactac

SEQ ID NO: 2473277 - DNA, 25 bp, Homo sapien
gggtggaccctacattatctcagct

SEQ ID NO: 2473278 - DNA, 25 bp, Homo sapien
ggactactgagtctttcggtgcccc

SEQ ID NO: 2473279 - DNA, 25 bp, Homo sapien
tagttttgtcctgcggccgagtgtt

SEQ ID NO: 2473280 - DNA, 25 bp, Homo sapien
agtccaatggcgcgatctaggctct

SEQ ID NO: 2473281 - DNA, 25 bp, Homo sapien
cgttgctcaggctggtctccaactc

SEQ ID NO: 2473282 - DNA, 25 bp, Homo sapien
ccaatggcgcgatctaggctctctg

SEQ ID NO: 2473283 - DNA, 25 bp, Homo sapien
acgttgctcaggctggtctccaact

SEQ ID NO: 2473284 - DNA, 25 bp, Homo sapien
ttagggggtttcgccatgtcggcca

SEQ ID NO: 2473285 - DNA, 25 bp, Homo sapien
ctctacctcccgggttccagcgatt

SEQ ID NO: 2473286 - DNA, 25 bp, Homo sapien
agacacagagagacggagagacaga

SEQ ID NO: 2473287 - DNA, 25 bp, Homo sapien
agagacagacacagagagacggaga

SEQ ID NO: 2473288 - DNA, 25 bp, Homo sapien
agacagacacagagagacggagaga

SEQ ID NO: 2473289 - DNA, 25 bp, Homo sapien
acagacacagagagacggagagaca

SEQ ID NO: 2473290 - DNA, 25 bp, Homo sapien
gaggaggtcgtggccttcccaaagc

SEQ ID NO: 2473291 - DNA, 25 bp, Homo sapien
ttcccaaagcgcagtagccacggtg

SEQ ID NO: 2473292 - DNA, 25 bp, Homo sapien
cagtagccacggtggaaacgaaagc

SEQ ID NO: 2473293 - DNA, 25 bp, Homo sapien
ccaaagcgcagtagccacggtggaa

SEQ ID NO: 2473294 - DNA, 25 bp, Homo sapien
atattgtcctcggatagaggacgta

SEQ ID NO: 2473295 - DNA, 25 bp, Homo sapien
ggtcgatgcgtggagtggacggagc

SEQ ID NO: 2473296 - DNA, 25 bp, Homo sapien
accaggtcgatgcgtggagtggacg

SEQ ID NO: 2473297 - DNA, 25 bp, Homo sapien
caggtcgatgcgtggagtggacgga

SEQ ID NO: 2473298 - DNA, 25 bp, Homo sapien
cgggctttcatttcgaatttgcatg

SEQ ID NO: 2473299 - DNA, 25 bp, Homo sapien
gggctttcatttcgaatttgcatgc

SEQ ID NO: 2473300 - DNA, 25 bp, Homo sapien
gctttcatttcgaatttgcatgccc

SEQ ID NO: 2473301 - DNA, 25 bp, Homo sapien
ccgggctttcatttcgaatttgcat

SEQ ID NO: 2473302 - DNA, 25 bp, Homo sapien
ccttgttcgtatcgagccagcgaaa

SEQ ID NO: 2473303 - DNA, 25 bp, Homo sapien
cagcgaaaagacagaaccggaagag

SEQ ID NO: 2473304 - DNA, 25 bp, Homo sapien
ggcgacttccttgttcgtatcgagc

SEQ ID NO: 2473305 - DNA, 25 bp, Homo sapien
tcgtatcgagccagcgaaaagacag

SEQ ID NO: 2473306 - DNA, 25 bp, Homo sapien
ctgtcggcggagagcggtccacgtt

SEQ ID NO: 2473307 - DNA, 25 bp, Homo sapien
tgtcggcggagagcggtccacgttt

SEQ ID NO: 2473308 - DNA, 25 bp, Homo sapien
tcggcggagagcggtccacgttttc

SEQ ID NO: 2473309 - DNA, 25 bp, Homo sapien
agggcaggagcgcgggctgcgctgg

SEQ ID NO: 2473310 - DNA, 25 bp, Homo sapien
ccccagggcaggagcgcgggctgcg

SEQ ID NO: 2473311 - DNA, 25 bp, Homo sapien
ctggagaaagacgaggccccagggc

SEQ ID NO: 2473312 - DNA, 25 bp, Homo sapien
aggagcgcgggctgcgctgggcctt

SEQ ID NO: 2473313 - DNA, 25 bp, Homo sapien
tatttcactccacggccctaagagg

SEQ ID NO: 2473314 - DNA, 25 bp, Homo sapien
ctaacgcaacttcagcggagggctg

SEQ ID NO: 2473315 - DNA, 25 bp, Homo sapien
ggctgagggctctactgcgcattac

SEQ ID NO: 2473316 - DNA, 25 bp, Homo sapien
gaaggcgctcagtaaacgtttgtgg

SEQ ID NO: 2473317 - DNA, 25 bp, Homo sapien
ggactactgagtctttcggtgcccc

SEQ ID NO: 2473318 - DNA, 25 bp, Homo sapien
taatcaggatattcacgtggactac

SEQ ID NO: 2473319 - DNA, 25 bp, Homo sapien
gggtggaccctacattatctcagct

SEQ ID NO: 2473320 - DNA, 25 bp, Homo sapien
tagttttgtcctgcggccgagtgtt

SEQ ID NO: 2473321 - DNA, 25 bp, Homo sapien
gagccaccgctcaccctggcttttt

SEQ ID NO: 2473322 - DNA, 25 bp, Homo sapien
cttgagccaccgctcaccctggctt

SEQ ID NO: 2473323 - DNA, 25 bp, Homo sapien
ggcttgagccaccgctcaccctggc

SEQ ID NO: 2473324 - DNA, 25 bp, Homo sapien
gtgttgcttgcgattacaggcttga

SEQ ID NO: 2473325 - DNA, 25 bp, Homo sapien
tacctagagcggagcctaaagatgc

SEQ ID NO: 2473326 - DNA, 25 bp, Homo sapien
tgggtcagcgaaaggaacattccgg

SEQ ID NO: 2473327 - DNA, 25 bp, Homo sapien
tgtcatcgtgctcgcaaggcaactg

SEQ ID NO: 2473328 - DNA, 25 bp, Homo sapien
taaagatgcatccagcatgacgggt

SEQ ID NO: 2473329 - DNA, 25 bp, Homo sapien
ggtcgatgcgtggagtggacggagc

SEQ ID NO: 2473330 - DNA, 25 bp, Homo sapien
atattgtcctcggatagaggacgta

SEQ ID NO: 2473331 - DNA, 25 bp, Homo sapien
ggtgcaccgttcctggaagtactgc

SEQ ID NO: 2473332 - DNA, 25 bp, Homo sapien
ccaggtcgatgcgtggagtggacgg

SEQ ID NO: 2473333 - DNA, 25 bp, Homo sapien
ccttgttcgtatcgagccagcgaaa

SEQ ID NO: 2473334 - DNA, 25 bp, Homo sapien
cagcgaaaagacagaaccggaagag

SEQ ID NO: 2473335 - DNA, 25 bp, Homo sapien
ggcgacttccttgttcgtatcgagc

SEQ ID NO: 2473336 - DNA, 25 bp, Homo sapien
tcgtatcgagccagcgaaaagacag

SEQ ID NO: 2473337 - DNA, 25 bp, Homo sapien
tgtcggcggagagcggtccacgttt

SEQ ID NO: 2473338 - DNA, 25 bp, Homo sapien
gacctgtcggcggagagcggtccac

SEQ ID NO: 2473339 - DNA, 25 bp, Homo sapien
tcggcggagagcggtccacgttttc

SEQ ID NO: 2473340 - DNA, 25 bp, Homo sapien
cctgtcggcggagagcggtccacgt

SEQ ID NO: 2473341 - DNA, 25 bp, Homo sapien
taatatctgatacgtcctctatccg

SEQ ID NO: 2473342 - DNA, 25 bp, Homo sapien
cctctatccgaggacaatatattaa

SEQ ID NO: 2473343 - DNA, 25 bp, Homo sapien
gatacgtcctctatccgaggacaat

SEQ ID NO: 2473344 - DNA, 25 bp, Homo sapien
tcagtttaatatctgatacgtcctc

SEQ ID NO: 2473345 - DNA, 25 bp, Homo sapien
cttgaggttcctgatgtgcgggcgg

SEQ ID NO: 2473346 - DNA, 25 bp, Homo sapien
tatgcggcacgctttcgtttccacc

SEQ ID NO: 2473347 - DNA, 25 bp, Homo sapien
tggctactgcgctttgggaaggcca

SEQ ID NO: 2473348 - DNA, 25 bp, Homo sapien
tagacggtaggcttatgcggcacgc

SEQ ID NO: 2473349 - DNA, 25 bp, Homo sapien
ttgatcacggaacgcacaggagcag

SEQ ID NO: 2473350 - DNA, 25 bp, Homo sapien
agtataagccattgatcacggaacg

SEQ ID NO: 2473351 - DNA, 25 bp, Homo sapien
aactgaggtgcaggtagtataagcc

SEQ ID NO: 2473352 - DNA, 25 bp, Homo sapien
aggagcagagctcgagtccaagcat

SEQ ID NO: 2473353 - DNA, 25 bp, Homo sapien
caaaatcccacgtgtatttcacact

SEQ ID NO: 2473354 - DNA, 25 bp, Homo sapien
aaaatcccacgtgtatttcacactt

SEQ ID NO: 2473355 - DNA, 25 bp, Homo sapien
ctcccactgccgtcaaaatcccacg

SEQ ID NO: 2473356 - DNA, 25 bp, Homo sapien
gctccattagaactgaccacatttc

SEQ ID NO: 2473357 - DNA, 25 bp, Homo sapien
tagttttgtcctgcggccgagtgtt

SEQ ID NO: 2473358 - DNA, 25 bp, Homo sapien
ggactactgagtctttcggtgcccc

SEQ ID NO: 2473359 - DNA, 25 bp, Homo sapien
taatcaggatattcacgtggactac

SEQ ID NO: 2473360 - DNA, 25 bp, Homo sapien
gggtggaccctacattatctcagct

SEQ ID NO: 2473361 - DNA, 25 bp, Homo sapien
gtggctacggcgatctgagtccccg

SEQ ID NO: 2473362 - DNA, 25 bp, Homo sapien
aatttgcatgtctcgccctttcccg

SEQ ID NO: 2473363 - DNA, 25 bp, Homo sapien
gctgaagcgccatttctaatttgca

SEQ ID NO: 2473364 - DNA, 25 bp, Homo sapien
tgtttttgccccgtggctgaagcgc

SEQ ID NO: 2473365 - DNA, 25 bp, Homo sapien
tgattaagatcacaagagggcccat

SEQ ID NO: 2473366 - DNA, 25 bp, Homo sapien
gcacaatgattaagatcacaagagg

SEQ ID NO: 2473367 - DNA, 25 bp, Homo sapien
tctgtgatacatattgaagaaggtg

SEQ ID NO: 2473368 - DNA, 25 bp, Homo sapien
ttgaagaaggtggaaacctgaatgc

SEQ ID NO: 2473369 - DNA, 25 bp, Homo sapien
taagactgagtcacactctattgct

SEQ ID NO: 2473370 - DNA, 25 bp, Homo sapien
tttgtaactttagtagacagcattt

SEQ ID NO: 2473371 - DNA, 25 bp, Homo sapien
ccatgaccggctgattttttcttgt

SEQ ID NO: 2473372 - DNA, 25 bp, Homo sapien
gactgagtcacactctattgctcag

SEQ ID NO: 2473373 - DNA, 25 bp, Homo sapien
tctcattccccaggaacctaagtca

SEQ ID NO: 2473374 - DNA, 25 bp, Homo sapien
aatagctggggtacagataggccgc

SEQ ID NO: 2473375 - DNA, 25 bp, Homo sapien
ttaaggaggtctcgccaagttggcc

SEQ ID NO: 2473376 - DNA, 25 bp, Homo sapien
aggccgcagcccgaacagggtttca

SEQ ID NO: 2473377 - DNA, 25 bp, Homo sapien
gagaaaagactttactgctgaattg

SEQ ID NO: 2473378 - DNA, 25 bp, Homo sapien
gggcccattgagactcaaagctaag

SEQ ID NO: 2473379 - DNA, 25 bp, Homo sapien
tccatggggcccattgagactcaaa

SEQ ID NO: 2473380 - DNA, 25 bp, Homo sapien
agctaaggtgggaaggtcttctatc

SEQ ID NO: 2473381 - DNA, 25 bp, Homo sapien
gctcacactctgtctctcctggaga

SEQ ID NO: 2473382 - DNA, 25 bp, Homo sapien
tggctcacactctgtctctcctgga

SEQ ID NO: 2473383 - DNA, 25 bp, Homo sapien
cacactctgtctctcctggagagag

SEQ ID NO: 2473384 - DNA, 25 bp, Homo sapien
tcacactctgtctctcctggagaga

SEQ ID NO: 2473385 - DNA, 25 bp, Homo sapien
cctcttagggccgtggagtgaaata

SEQ ID NO: 2473386 - DNA, 25 bp, Homo sapien
ggcttgcggcccacaagataagata

SEQ ID NO: 2473387 - DNA, 25 bp, Homo sapien
tgtgcctcggagagaaactttatcc

SEQ ID NO: 2473388 - DNA, 25 bp, Homo sapien
tttccaggtaatgcgcagtagagcc

SEQ ID NO: 2473389 - DNA, 25 bp, Homo sapien
ccaggaaaacgtggaccgctctccg

SEQ ID NO: 2473390 - DNA, 25 bp, Homo sapien
gggagaatccttgctgggccctcgc

SEQ ID NO: 2473391 - DNA, 25 bp, Homo sapien
cggcgaagtaaaggcccagcgcagc

SEQ ID NO: 2473392 - DNA, 25 bp, Homo sapien
ttcggcttccctgactgggcatggg

SEQ ID NO: 2473393 - DNA, 25 bp, Homo sapien
gatacgtcctctatccgaggacaat

SEQ ID NO: 2473394 - DNA, 25 bp, Homo sapien
cctctatccgaggacaatatattaa

SEQ ID NO: 2473395 - DNA, 25 bp, Homo sapien
taatatctgatacgtcctctatccg

SEQ ID NO: 2473396 - DNA, 25 bp, Homo sapien
tcagtttaatatctgatacgtcctc

SEQ ID NO: 2473397 - DNA, 25 bp, Homo sapien
agatacctgtggctagcggctgcca

SEQ ID NO: 2473398 - DNA, 25 bp, Homo sapien
ttggcgtgaagcgagggaaacactc

SEQ ID NO: 2473399 - DNA, 25 bp, Homo sapien
tgccatactacaccgtgctgggctg

SEQ ID NO: 2473400 - DNA, 25 bp, Homo sapien
cactcggccgcaggacaaaactaaa

SEQ ID NO: 2473401 - DNA, 25 bp, Homo sapien
tgactgcgggccggcctggctaatg

SEQ ID NO: 2473402 - DNA, 25 bp, Homo sapien
agacagaacaagagacccggagacc

SEQ ID NO: 2473403 - DNA, 25 bp, Homo sapien
cagacagaacaagagacccggagac

SEQ ID NO: 2473404 - DNA, 25 bp, Homo sapien
gacagaacaagagacccggagaccc

SEQ ID NO: 2473405 - DNA, 25 bp, Homo sapien
ttgcagccaagcaacgccagaaagc

SEQ ID NO: 2473406 - DNA, 25 bp, Homo sapien
cactccccaatacggagagaagaac

SEQ ID NO: 2473407 - DNA, 25 bp, Homo sapien
ccaagcaacgccagaaagccggctt

SEQ ID NO: 2473408 - DNA, 25 bp, Homo sapien
ctcagaccgcgttctctccctctca

SEQ ID NO: 2473409 - DNA, 25 bp, Homo sapien
aggagcttccaagggcccacacagc

SEQ ID NO: 2473410 - DNA, 25 bp, Homo sapien
gaccctggactgtggagatcatcct

SEQ ID NO: 2473411 - DNA, 25 bp, Homo sapien
catcctttcctaaggagcttccaag

SEQ ID NO: 2473412 - DNA, 25 bp, Homo sapien
ggactgtggagatcatcctttccta

SEQ ID NO: 2473413 - DNA, 25 bp, Homo sapien
aactgggattcgaacgtgtgctact

SEQ ID NO: 2473414 - DNA, 25 bp, Homo sapien
tgtgctactgtaacatgagccccta

SEQ ID NO: 2473415 - DNA, 25 bp, Homo sapien
ccagccactggtgggagatcttgcc

SEQ ID NO: 2473416 - DNA, 25 bp, Homo sapien
gagcccctaaccacaggagtctctg

SEQ ID NO: 2473417 - DNA, 25 bp, Homo sapien
ggcccgtgtctgctcaatgactgaa

SEQ ID NO: 2473418 - DNA, 25 bp, Homo sapien
taaacagttctgcatcatcgcccaa

SEQ ID NO: 2473419 - DNA, 25 bp, Homo sapien
gtaacacacgcacatatcctctggg

SEQ ID NO: 2473420 - DNA, 25 bp, Homo sapien
gagtaggctgtaaagtgctatcccc

SEQ ID NO: 2473421 - DNA, 25 bp, Homo sapien
gaacagcagcatcgctatacgtgga

SEQ ID NO: 2473422 - DNA, 25 bp, Homo sapien
tgaggaggtgttccccatcgggacc

SEQ ID NO: 2473423 - DNA, 25 bp, Homo sapien
cccagtgtggttaatgacgtgacca

SEQ ID NO: 2473424 - DNA, 25 bp, Homo sapien
cagagccccttgcttgacggaagag

SEQ ID NO: 2473425 - DNA, 25 bp, Homo sapien
tcacggatgtcgaagtggaggctca

SEQ ID NO: 2473426 - DNA, 25 bp, Homo sapien
taatgatggtgccttcctagttggg

SEQ ID NO: 2473427 - DNA, 25 bp, Homo sapien
tgtgagctggctggtaaattcacct

SEQ ID NO: 2473428 - DNA, 25 bp, Homo sapien
ggagtcgacctttgagacctgctta

SEQ ID NO: 2473429 - DNA, 25 bp, Homo sapien
tggtgaggtttggtgtgtccgagcc

SEQ ID NO: 2473430 - DNA, 25 bp, Homo sapien
tggggatcgtctggcacagcccact

SEQ ID NO: 2473431 - DNA, 25 bp, Homo sapien
acaggcctggggatcgtctggcaca

SEQ ID NO: 2473432 - DNA, 25 bp, Homo sapien
gtgtccgagccgaagagcagccaat

SEQ ID NO: 2473433 - DNA, 25 bp, Homo sapien
gggtacggatgcgacttggatgcag

SEQ ID NO: 2473434 - DNA, 25 bp, Homo sapien
cggatgcgacttggatgcagtcctt

SEQ ID NO: 2473435 - DNA, 25 bp, Homo sapien
ctgggtacggatgcgacttggatgc

SEQ ID NO: 2473436 - DNA, 25 bp, Homo sapien
tacggatgcgacttggatgcagtcc

SEQ ID NO: 2473437 - DNA, 25 bp, Homo sapien
atacctttactccacaaatatgtgc

SEQ ID NO: 2473438 - DNA, 25 bp, Homo sapien
cccatctgggatgccttgtctttta

SEQ ID NO: 2473439 - DNA, 25 bp, Homo sapien
cgtctcagactctccaagtgctagg

SEQ ID NO: 2473440 - DNA, 25 bp, Homo sapien
tgtgcttaggcattgcttgctgtgg

SEQ ID NO: 2473441 - DNA, 25 bp, Homo sapien
tgccaacaggtaagctggcagggcc

SEQ ID NO: 2473442 - DNA, 25 bp, Homo sapien
gcctctcagttaaggacatttgcaa

SEQ ID NO: 2473443 - DNA, 25 bp, Homo sapien
gataatggagatgcaattgtgttct

SEQ ID NO: 2473444 - DNA, 25 bp, Homo sapien
ttacctactgtgtccgcgtcagcct

SEQ ID NO: 2473445 - DNA, 25 bp, Homo sapien
aaaataatcgagtgtaaggcaggcc

SEQ ID NO: 2473446 - DNA, 25 bp, Homo sapien
cacaaaacatgattgggagggcact

SEQ ID NO: 2473447 - DNA, 25 bp, Homo sapien
gaataggcacagatctccacagctg

SEQ ID NO: 2473448 - DNA, 25 bp, Homo sapien
taacataaaaacagcctgggacagg

SEQ ID NO: 2473449 - DNA, 25 bp, Homo sapien
tgcagttaaatttgcgcaagaacat

SEQ ID NO: 2473450 - DNA, 25 bp, Homo sapien
cctgcagttaaatttgcgcaagaac

SEQ ID NO: 2473451 - DNA, 25 bp, Homo sapien
ctgcagttaaatttgcgcaagaaca

SEQ ID NO: 2473452 - DNA, 25 bp, Homo sapien
tctcttgtagaaaggtgctatgcac

SEQ ID NO: 2473453 - DNA, 25 bp, Homo sapien
gaaaatctcagcctatcagctgggc

SEQ ID NO: 2473454 - DNA, 25 bp, Homo sapien
caggtgaggagctacggctttctca

SEQ ID NO: 2473455 - DNA, 25 bp, Homo sapien
tagtggatagatgttggtccctggc

SEQ ID NO: 2473456 - DNA, 25 bp, Homo sapien
accaggctcagcttatgataactgt

SEQ ID NO: 2473457 - DNA, 25 bp, Homo sapien
gacaaggtctcgctactggacccaa

SEQ ID NO: 2473458 - DNA, 25 bp, Homo sapien
tctcgctactggacccaagcgattc

SEQ ID NO: 2473459 - DNA, 25 bp, Homo sapien
tatgataactgtttcaagtcagaat

SEQ ID NO: 2473460 - DNA, 25 bp, Homo sapien
tcgtctgcccccttgcacactccat

SEQ ID NO: 2473461 - DNA, 25 bp, Homo sapien
ctcgtctgcccccttgcacactcca

SEQ ID NO: 2473462 - DNA, 25 bp, Homo sapien
tctgatgaccgagattgccgacctg

SEQ ID NO: 2473463 - DNA, 25 bp, Homo sapien
gcttgattacggagactgaaccttc

SEQ ID NO: 2473464 - DNA, 25 bp, Homo sapien
tagggtgcgcacttaccaaggacag

SEQ ID NO: 2473465 - DNA, 25 bp, Homo sapien
caacgtggtggccttctcggagatc

SEQ ID NO: 2473466 - DNA, 25 bp, Homo sapien
taacagtttatacaggattttggct

SEQ ID NO: 2473467 - DNA, 25 bp, Homo sapien
atatttaactctaggatattttcct

SEQ ID NO: 2473468 - DNA, 25 bp, Homo sapien
actgacattagaaaacgtaaggaag

SEQ ID NO: 2473469 - DNA, 25 bp, Homo sapien
gacttgggtatttgtgtaataacta

SEQ ID NO: 2473470 - DNA, 25 bp, Homo sapien
agtctcagcccctttagatgccagg

SEQ ID NO: 2473471 - DNA, 25 bp, Homo sapien
tcttcataaaggatgccctggtcct

SEQ ID NO: 2473472 - DNA, 25 bp, Homo sapien
ttcataaaggatgccctggtcctga

SEQ ID NO: 2473473 - DNA, 25 bp, Homo sapien
tccatcttcataaaggatgccctgg

SEQ ID NO: 2473474 - DNA, 25 bp, Homo sapien
ggaaaacagtgaaggcaaccatctc

SEQ ID NO: 2473475 - DNA, 25 bp, Homo sapien
ggcaggaggcaagataactgtgtcc

SEQ ID NO: 2473476 - DNA, 25 bp, Homo sapien
tcacaaactgctggagttgagacca

SEQ ID NO: 2473477 - DNA, 25 bp, Homo sapien
aactgtgtccttatgggttttgcag

SEQ ID NO: 2473478 - DNA, 25 bp, Homo sapien
aaggcccgtgtctgctcaatgactg

SEQ ID NO: 2473479 - DNA, 25 bp, Homo sapien
gaagatacgcggctcttttcttgat

SEQ ID NO: 2473480 - DNA, 25 bp, Homo sapien
ggaggctgggctagcattcctgctt

SEQ ID NO: 2473481 - DNA, 25 bp, Homo sapien
tagcattcctgctttatagaagagg

SEQ ID NO: 2473482 - DNA, 25 bp, Homo sapien
taatgatggtgccttcctagttggg

SEQ ID NO: 2473483 - DNA, 25 bp, Homo sapien
tcacggatgtcgaagtggaggctca

SEQ ID NO: 2473484 - DNA, 25 bp, Homo sapien
tgtgagctggctggtaaattcacct

SEQ ID NO: 2473485 - DNA, 25 bp, Homo sapien
ggagtcgacctttgagacctgctta

SEQ ID NO: 2473486 - DNA, 25 bp, Homo sapien
ggtctgcgagttggagggctctggg

SEQ ID NO: 2473487 - DNA, 25 bp, Homo sapien
tccttgcctggaggtctgcgagttg

SEQ ID NO: 2473488 - DNA, 25 bp, Homo sapien
ccggggagagcctaggctcatctct

SEQ ID NO: 2473489 - DNA, 25 bp, Homo sapien
tctctggtgaacagggtaccctcta

SEQ ID NO: 2473490 - DNA, 25 bp, Homo sapien
gaaggaggatggacatctagatgtc

SEQ ID NO: 2473491 - DNA, 25 bp, Homo sapien
catctagatgtctgagggaagggcc

SEQ ID NO: 2473492 - DNA, 25 bp, Homo sapien
gaagggccatttgggcagaggaaag

SEQ ID NO: 2473493 - DNA, 25 bp, Homo sapien
gtcgggaagactgctccgagaggca

SEQ ID NO: 2473494 - DNA, 25 bp, Homo sapien
tgatggtcagccttgtctagagccc

SEQ ID NO: 2473495 - DNA, 25 bp, Homo sapien
accgagctgtgagttatgtgtgcca

SEQ ID NO: 2473496 - DNA, 25 bp, Homo sapien
cagggtagtgatgcaggtagctcca

SEQ ID NO: 2473497 - DNA, 25 bp, Homo sapien
caattttcccgcgtgtcagacagtc

SEQ ID NO: 2473498 - DNA, 25 bp, Homo sapien
taaacagttctgcatcatcgcccaa

SEQ ID NO: 2473499 - DNA, 25 bp, Homo sapien
gtaacacacgcacatatcctctggg

SEQ ID NO: 2473500 - DNA, 25 bp, Homo sapien
ccgagtagccttgatgcacaactga

SEQ ID NO: 2473501 - DNA, 25 bp, Homo sapien
gagtaggctgtaaagtgctatcccc

SEQ ID NO: 2473502 - DNA, 25 bp, Homo sapien
gaacagcagcatcgctatacgtgga

SEQ ID NO: 2473503 - DNA, 25 bp, Homo sapien
tgaggaggtgttccccatcgggacc

SEQ ID NO: 2473504 - DNA, 25 bp, Homo sapien
cccagtgtggttaatgacgtgacca

SEQ ID NO: 2473505 - DNA, 25 bp, Homo sapien
cagagccccttgcttgacggaagag

SEQ ID NO: 2473506 - DNA, 25 bp, Homo sapien
gcctccctcacagcctgatggcccc

SEQ ID NO: 2473507 - DNA, 25 bp, Homo sapien
tgtccgcgtcagcctccctcacagc

SEQ ID NO: 2473508 - DNA, 25 bp, Homo sapien
aaactacagttgcatgaacgggtgg

SEQ ID NO: 2473509 - DNA, 25 bp, Homo sapien
tgcggcagccccaacccggtttcag

SEQ ID NO: 2473510 - DNA, 25 bp, Homo sapien
ctgaactcaggtgttcaggagcagc

SEQ ID NO: 2473511 - DNA, 25 bp, Homo sapien
taacatgctgacaccccgtttctgc

SEQ ID NO: 2473512 - DNA, 25 bp, Homo sapien
gatcacctgagatcacgcgttggag

SEQ ID NO: 2473513 - DNA, 25 bp, Homo sapien
cctggagtggcgtgtgcgcctttaa

SEQ ID NO: 2473514 - DNA, 25 bp, Homo sapien
cgctgaaacaggaggcgaaaacctt

SEQ ID NO: 2473515 - DNA, 25 bp, Homo sapien
cccggagtttacgagctagtctctg

SEQ ID NO: 2473516 - DNA, 25 bp, Homo sapien
tctctgtcattgagccatcaagaag

SEQ ID NO: 2473517 - DNA, 25 bp, Homo sapien
gcctcgcgccaagactaaaattaaa

SEQ ID NO: 2473518 - DNA, 25 bp, Homo sapien
ttgcagccaagcaacgccagaaagc

SEQ ID NO: 2473519 - DNA, 25 bp, Homo sapien
ccaagcaacgccagaaagccggctt

SEQ ID NO: 2473520 - DNA, 25 bp, Homo sapien
ctcagaccgcgttctctccctctca

SEQ ID NO: 2473521 - DNA, 25 bp, Homo sapien
cactccccaatacggagagaagaac

SEQ ID NO: 2473522 - DNA, 25 bp, Homo sapien
taatagtgcaggttccagttgggaa

SEQ ID NO: 2473523 - DNA, 25 bp, Homo sapien
agtggtcttcgaactgttccccaga

SEQ ID NO: 2473524 - DNA, 25 bp, Homo sapien
catagagagacgtaatcagcacatc

SEQ ID NO: 2473525 - DNA, 25 bp, Homo sapien
ttattgttaggacaaagctaacctg

SEQ ID NO: 2473526 - DNA, 25 bp, Homo sapien
aaacaaacaacgctttgagaagctg

SEQ ID NO: 2473527 - DNA, 25 bp, Homo sapien
gggcatctttactcgggtccatcat

SEQ ID NO: 2473528 - DNA, 25 bp, Homo sapien
aatgggcatctttactcgggtccat

SEQ ID NO: 2473529 - DNA, 25 bp, Homo sapien
ttgagaagctgcagaagcggctctg

SEQ ID NO: 2473530 - DNA, 25 bp, Homo sapien
gcgttgtgtccacggctgcttgtgt

SEQ ID NO: 2473531 - DNA, 25 bp, Homo sapien
tgtggcaggtcctatggctgagcca

SEQ ID NO: 2473532 - DNA, 25 bp, Homo sapien
tatggctgagccatgtctgaggtcc

SEQ ID NO: 2473533 - DNA, 25 bp, Homo sapien
taaacggtttgaggatacatttcca

SEQ ID NO: 2473534 - DNA, 25 bp, Homo sapien
aggcaccgtcctgactgcccagcac

SEQ ID NO: 2473535 - DNA, 25 bp, Homo sapien
taggcaccgtcctgactgcccagca

SEQ ID NO: 2473536 - DNA, 25 bp, Homo sapien
ttaggcaccgtcctgactgcccagc

SEQ ID NO: 2473537 - DNA, 25 bp, Homo sapien
gaccagctccgccttgtgcattggc

SEQ ID NO: 2473538 - DNA, 25 bp, Homo sapien
gggtccccaccagtagtgtttgcag

SEQ ID NO: 2473539 - DNA, 25 bp, Homo sapien
cgttgacattgtacttgcccaaggt

SEQ ID NO: 2473540 - DNA, 25 bp, Homo sapien
tgctgccttggcatcttcgttgaca

SEQ ID NO: 2473541 - DNA, 25 bp, Homo sapien
agatgcagaacagggtgagggccac

SEQ ID NO: 2473542 - DNA, 25 bp, Homo sapien
cagatgcagaacagggtgagggcca

SEQ ID NO: 2473543 - DNA, 25 bp, Homo sapien
tgcttgctatgtagactagactgac

SEQ ID NO: 2473544 - DNA, 25 bp, Homo sapien
tatcttgcgaatgtgagcttcctct

SEQ ID NO: 2473545 - DNA, 25 bp, Homo sapien
gcttctgttgtatcgtagctgaaag

SEQ ID NO: 2473546 - DNA, 25 bp, Homo sapien
gactgtcatcagctatagattaacc

SEQ ID NO: 2473547 - DNA, 25 bp, Homo sapien
atatatacattctgactcattatga

SEQ ID NO: 2473548 - DNA, 25 bp, Homo sapien
tatatatacattctgactcattatg

SEQ ID NO: 2473549 - DNA, 25 bp, Homo sapien
gtgctgaaccatggcgccaccagag

SEQ ID NO: 2473550 - DNA, 25 bp, Homo sapien
agtgccaaggagtgagtctttagag

SEQ ID NO: 2473551 - DNA, 25 bp, Homo sapien
gcaagagcgtctgtgctgaaccatg

SEQ ID NO: 2473552 - DNA, 25 bp, Homo sapien
gtccacggccctgagtgccaaggag

SEQ ID NO: 2473553 - DNA, 25 bp, Homo sapien
aggagaaagagtgtgcgttcaaggg

SEQ ID NO: 2473554 - DNA, 25 bp, Homo sapien
tcgggagtcatagaagtcttctatg

SEQ ID NO: 2473555 - DNA, 25 bp, Homo sapien
atctcgggagtcatagaagtcttct

SEQ ID NO: 2473556 - DNA, 25 bp, Homo sapien
gaggagaaagagtgtgcgttcaagg

SEQ ID NO: 2473557 - DNA, 25 bp, Homo sapien
ggggaagatgtgtgcatagtgggcc

SEQ ID NO: 2473558 - DNA, 25 bp, Homo sapien
agatgtgtgcatagtgggcctggag

SEQ ID NO: 2473559 - DNA, 25 bp, Homo sapien
gaagatgtgtgcatagtgggcctgg

SEQ ID NO: 2473560 - DNA, 25 bp, Homo sapien
gtgtgcatagtgggcctggagggcg

SEQ ID NO: 2473561 - DNA, 25 bp, Homo sapien
tgctcaccgcccgtgaaagctgcca

SEQ ID NO: 2473562 - DNA, 25 bp, Homo sapien
aataaggtcgggattgctgtgctca

SEQ ID NO: 2473563 - DNA, 25 bp, Homo sapien
gctgtgctcaccgcccgtgaaagct

SEQ ID NO: 2473564 - DNA, 25 bp, Homo sapien
tgtggaaaataaggtcgggattgct

SEQ ID NO: 2473565 - DNA, 25 bp, Homo sapien
gagcgttccatctaagaattccaaa

SEQ ID NO: 2473566 - DNA, 25 bp, Homo sapien
agcgttccatctaagaattccaaaa

SEQ ID NO: 2473567 - DNA, 25 bp, Homo sapien
cagagcgttccatctaagaattcca

SEQ ID NO: 2473568 - DNA, 25 bp, Homo sapien
agagcgttccatctaagaattccaa

SEQ ID NO: 2473569 - DNA, 25 bp, Homo sapien
tcccacgacatgtaggtattacagg

SEQ ID NO: 2473570 - DNA, 25 bp, Homo sapien
aagcaaagctatccctcttcacatg

SEQ ID NO: 2473571 - DNA, 25 bp, Homo sapien
ccacattgggtcatggttatctcag

SEQ ID NO: 2473572 - DNA, 25 bp, Homo sapien
caacaagaagtgctgagccaaaggg

SEQ ID NO: 2473573 - DNA, 25 bp, Homo sapien
aagtgctctattctaacttggcttg

SEQ ID NO: 2473574 - DNA, 25 bp, Homo sapien
agtgctctattctaacttggcttgg

SEQ ID NO: 2473575 - DNA, 25 bp, Homo sapien
aaaagtgctctattctaacttggct

SEQ ID NO: 2473576 - DNA, 25 bp, Homo sapien
gtgctctattctaacttggcttgga

SEQ ID NO: 2473577 - DNA, 25 bp, Homo sapien
ttagccagctggactcagtttaggt

SEQ ID NO: 2473578 - DNA, 25 bp, Homo sapien
gccagctggactcagtttaggtgat

SEQ ID NO: 2473579 - DNA, 25 bp, Homo sapien
cagctggactcagtttaggtgatcc

SEQ ID NO: 2473580 - DNA, 25 bp, Homo sapien
tagccagctggactcagtttaggtg

SEQ ID NO: 2473581 - DNA, 25 bp, Homo sapien
ttcttcacggccgactcagtggcca

SEQ ID NO: 2473582 - DNA, 25 bp, Homo sapien
cgtgggggtactcttccgaggatat

SEQ ID NO: 2473583 - DNA, 25 bp, Homo sapien
ctcgtgggggtactcttccgaggat

SEQ ID NO: 2473584 - DNA, 25 bp, Homo sapien
cacggccgactcagtggccagcgga

SEQ ID NO: 2473585 - DNA, 25 bp, Homo sapien
tggcctttaaagccttcgctttggc

SEQ ID NO: 2473586 - DNA, 25 bp, Homo sapien
ctttaaagccttcgctttggcttcg

SEQ ID NO: 2473587 - DNA, 25 bp, Homo sapien
cttggcctttaaagccttcgctttg

SEQ ID NO: 2473588 - DNA, 25 bp, Homo sapien
gagcttccttcgcttttggtgccat

SEQ ID NO: 2473589 - DNA, 25 bp, Homo sapien
taggaggagcaggagcttccttcgc

SEQ ID NO: 2473590 - DNA, 25 bp, Homo sapien
caggagcttccttcgcttttggtgc

SEQ ID NO: 2473591 - DNA, 25 bp, Homo sapien
ggaggagcaggagcttccttcgctt

SEQ ID NO: 2473592 - DNA, 25 bp, Homo sapien
cttaaggacaatgaaactctggtct

SEQ ID NO: 2473593 - DNA, 25 bp, Homo sapien
ggtcttcactgtggacacgccacac

SEQ ID NO: 2473594 - DNA, 25 bp, Homo sapien
gtctccccaggtcagtcttaaggac

SEQ ID NO: 2473595 - DNA, 25 bp, Homo sapien
ctgtggacacgccacactaccaggg

SEQ ID NO: 2473596 - DNA, 25 bp, Homo sapien
tgccaacccagttgaccgcagacat

SEQ ID NO: 2473597 - DNA, 25 bp, Homo sapien
cgtgagcaaataagtgatgcttaag

SEQ ID NO: 2473598 - DNA, 25 bp, Homo sapien
ccgcagacatgcaggtctgctcagg

SEQ ID NO: 2473599 - DNA, 25 bp, Homo sapien
cagccacagaatcgtgagcaaataa

SEQ ID NO: 2473600 - DNA, 25 bp, Homo sapien
tcagtttctctgtgcggcaccaggt

SEQ ID NO: 2473601 - DNA, 25 bp, Homo sapien
caattccgggtgacttcaggcgctg

SEQ ID NO: 2473602 - DNA, 25 bp, Homo sapien
tgggcctcaggaaatcaatgtcatg

SEQ ID NO: 2473603 - DNA, 25 bp, Homo sapien
ggttattatctaggatccttgaagc

SEQ ID NO: 2473604 - DNA, 25 bp, Homo sapien
catcagtacgtaggagttgtgcatt

SEQ ID NO: 2473605 - DNA, 25 bp, Homo sapien
cagtacgtaggagttgtgcattggt

SEQ ID NO: 2473606 - DNA, 25 bp, Homo sapien
accaccatcagtacgtaggagttgt

SEQ ID NO: 2473607 - DNA, 25 bp, Homo sapien
caccatcagtacgtaggagttgtgc

SEQ ID NO: 2473608 - DNA, 25 bp, Homo sapien
cattaatcaggaccttccctccggg

SEQ ID NO: 2473609 - DNA, 25 bp, Homo sapien
ggtctctggaaacaagccccacaaa

SEQ ID NO: 2473610 - DNA, 25 bp, Homo sapien
ccttaaggagaaattcatcggccat

SEQ ID NO: 2473611 - DNA, 25 bp, Homo sapien
tatcagagaacctctgtcttgggtg

SEQ ID NO: 2473612 - DNA, 25 bp, Homo sapien
gagcatttccggttcccctgctgtg

SEQ ID NO: 2473613 - DNA, 25 bp, Homo sapien
gaggcccagctgagtttggatcata

SEQ ID NO: 2473614 - DNA, 25 bp, Homo sapien
gaatatccttaagataaggccccag

SEQ ID NO: 2473615 - DNA, 25 bp, Homo sapien
taggctcaggtggaacagcctcaac

SEQ ID NO: 2473616 - DNA, 25 bp, Homo sapien
taaataacatcgacattattttttc

SEQ ID NO: 2473617 - DNA, 25 bp, Homo sapien
aataacatcgacattattttttcca

SEQ ID NO: 2473618 - DNA, 25 bp, Homo sapien
ataacatcgacattattttttccag

SEQ ID NO: 2473619 - DNA, 25 bp, Homo sapien
taacatcgacattattttttccaga

SEQ ID NO: 2473620 - DNA, 25 bp, Homo sapien
agcatccaacgacgcatatttcctt

SEQ ID NO: 2473621 - DNA, 25 bp, Homo sapien
tcatacagcatccaacgacgcatat

SEQ ID NO: 2473622 - DNA, 25 bp, Homo sapien
gcttgattgtcatacagcatccaac

SEQ ID NO: 2473623 - DNA, 25 bp, Homo sapien
tgttataagtagcttgattgtcata

SEQ ID NO: 2473624 - DNA, 25 bp, Homo sapien
ccaggccccaactcttgatgttgtt

SEQ ID NO: 2473625 - DNA, 25 bp, Homo sapien
gaactagggcccggggagatgccca

SEQ ID NO: 2473626 - DNA, 25 bp, Homo sapien
aactagggcccggggagatgcccag

SEQ ID NO: 2473627 - DNA, 25 bp, Homo sapien
actagggcccggggagatgcccagg

SEQ ID NO: 2473628 - DNA, 25 bp, Homo sapien
cctggcggccggcacacgtgggttc

SEQ ID NO: 2473629 - DNA, 25 bp, Homo sapien
ttctctgtggccagcaggcggcgct

SEQ ID NO: 2473630 - DNA, 25 bp, Homo sapien
tggcggccggcgcacgtgggttctc

SEQ ID NO: 2473631 - DNA, 25 bp, Homo sapien
gccggcgcacgtgggttctctgtgg

SEQ ID NO: 2473632 - DNA, 25 bp, Homo sapien
caggcttcagatcctgccctctgtg

SEQ ID NO: 2473633 - DNA, 25 bp, Homo sapien
tgccctctgtgaacagtcaaaaaga

SEQ ID NO: 2473634 - DNA, 25 bp, Homo sapien
gccctctgtgaacagtcaaaaagaa

SEQ ID NO: 2473635 - DNA, 25 bp, Homo sapien
ctctgcaggcttcagatcctgccct

SEQ ID NO: 2473636 - DNA, 25 bp, Homo sapien
gagatagttccctccagcaggaaaa

SEQ ID NO: 2473637 - DNA, 25 bp, Homo sapien
aagtctgcccctgttgctcagagat

SEQ ID NO: 2473638 - DNA, 25 bp, Homo sapien
cctgttgctcagagatagttccctc

SEQ ID NO: 2473639 - DNA, 25 bp, Homo sapien
aacctctttgaggtgagttacggct

SEQ ID NO: 2473640 - DNA, 25 bp, Homo sapien
gctctgagcaattaaagggcagcca

SEQ ID NO: 2473641 - DNA, 25 bp, Homo sapien
tacgcgccaggttgctgaacagctc

SEQ ID NO: 2473642 - DNA, 25 bp, Homo sapien
caaccaacagccacttatgtaccag

SEQ ID NO: 2473643 - DNA, 25 bp, Homo sapien
ttatgtaccagctacgcgccaggtt

SEQ ID NO: 2473644 - DNA, 25 bp, Homo sapien
ttgtggagacctagggttggggctg

SEQ ID NO: 2473645 - DNA, 25 bp, Homo sapien
cagagatcccggtagacccgggagg

SEQ ID NO: 2473646 - DNA, 25 bp, Homo sapien
aagaggcaagaagaagcgggggtgg

SEQ ID NO: 2473647 - DNA, 25 bp, Homo sapien
cctctcttctagaagaggcaagaag

SEQ ID NO: 2473648 - DNA, 25 bp, Homo sapien
ttctagaagaggcaagaagaagcgg

SEQ ID NO: 2473649 - DNA, 25 bp, Homo sapien
cgccaccctcctctcttctagaaga

SEQ ID NO: 2473650 - DNA, 25 bp, Homo sapien
tctgtggtcccggaagcgaaggtgg

SEQ ID NO: 2473651 - DNA, 25 bp, Homo sapien
gtgggagactccgtggcgtgcaggc

SEQ ID NO: 2473652 - DNA, 25 bp, Homo sapien
cagatctgtccccacaagaggcctc

SEQ ID NO: 2473653 - DNA, 25 bp, Homo sapien
agactccgtggcgtgcaggctccag

SEQ ID NO: 2473654 - DNA, 25 bp, Homo sapien
gtctggggagggcaatgtccactgc

SEQ ID NO: 2473655 - DNA, 25 bp, Homo sapien
gctgacaactcacaggggtgtctgg

SEQ ID NO: 2473656 - DNA, 25 bp, Homo sapien
gcaggcagagctgacaactcacagg

SEQ ID NO: 2473657 - DNA, 25 bp, Homo sapien
gagctgacaactcacaggggtgtct

SEQ ID NO: 2473658 - DNA, 25 bp, Homo sapien
tgtgctgtaggtttacgggatccca

SEQ ID NO: 2473659 - DNA, 25 bp, Homo sapien
tctcaccgagcttcttgacctgggc

SEQ ID NO: 2473660 - DNA, 25 bp, Homo sapien
tgagaggaacgggacattcatgctg

SEQ ID NO: 2473661 - DNA, 25 bp, Homo sapien
tcccagcgccagacagagtgagagg

SEQ ID NO: 2473662 - DNA, 25 bp, Homo sapien
ggctgttctcctgagggccacgggt

SEQ ID NO: 2473663 - DNA, 25 bp, Homo sapien
ggccgcgggtcctcactggctgttc

SEQ ID NO: 2473664 - DNA, 25 bp, Homo sapien
gggccgcgggtcctcactggctgtt

SEQ ID NO: 2473665 - DNA, 25 bp, Homo sapien
ctggctgttctcctgagggccacgg

SEQ ID NO: 2473666 - DNA, 25 bp, Homo sapien
agggccgcgggtcctggctggctgt

SEQ ID NO: 2473667 - DNA, 25 bp, Homo sapien
ccgcgggtcctggctggctgttctc

SEQ ID NO: 2473668 - DNA, 25 bp, Homo sapien
gccgcgggtcctggctggctgttct

SEQ ID NO: 2473669 - DNA, 25 bp, Homo sapien
ctgagggccgcgggtcctggctggc

SEQ ID NO: 2473670 - DNA, 25 bp, Homo sapien
gtggctccaccccggagttgagcat

SEQ ID NO: 2473671 - DNA, 25 bp, Homo sapien
ccctaaaggtcacgtgtggctccac

SEQ ID NO: 2473672 - DNA, 25 bp, Homo sapien
cctaaaggtcacgtgtggctccacc

SEQ ID NO: 2473673 - DNA, 25 bp, Homo sapien
cgtgtggctccaccccggagttgag

SEQ ID NO: 2473674 - DNA, 25 bp, Homo sapien
gggcattcgagggggacactctggc

SEQ ID NO: 2473675 - DNA, 25 bp, Homo sapien
agagctgccgcagaagattttcggg

SEQ ID NO: 2473676 - DNA, 25 bp, Homo sapien
aacaaggaatgtggatcttgtctgg

SEQ ID NO: 2473677 - DNA, 25 bp, Homo sapien
ttttcgggtactccaagctttcaga

SEQ ID NO: 2473678 - DNA, 25 bp, Homo sapien
tggctctgtgacaagccgccggagt

SEQ ID NO: 2473679 - DNA, 25 bp, Homo sapien
aacagaggaggcgactctcagagcc

SEQ ID NO: 2473680 - DNA, 25 bp, Homo sapien
catctgggatgtgggcacccttggc

SEQ ID NO: 2473681 - DNA, 25 bp, Homo sapien
tgatggccgcctgttcacatccgag

SEQ ID NO: 2473682 - DNA, 25 bp, Homo sapien
cacatccgaggcaactaagaacaga

SEQ ID NO: 2473683 - DNA, 25 bp, Homo sapien
ctgtgctcatcaaatcgacggcagc

SEQ ID NO: 2473684 - DNA, 25 bp, Homo sapien
gggcttgtgagttcctgacgctgcc

SEQ ID NO: 2473685 - DNA, 25 bp, Homo sapien
acggcagcctgcacggaccacaggg

SEQ ID NO: 2473686 - DNA, 25 bp, Homo sapien
ctggaggtgagcgtctctctgcctg

SEQ ID NO: 2473687 - DNA, 25 bp, Homo sapien
cagaagccggagttcctggctctgt

SEQ ID NO: 2473688 - DNA, 25 bp, Homo sapien
tgatggtcctaacacacttgcccaa

SEQ ID NO: 2473689 - DNA, 25 bp, Homo sapien
gagcctgcgtcccttgagggctgcc

SEQ ID NO: 2473690 - DNA, 25 bp, Homo sapien
aacctgctccgtggaaccctgaggc

SEQ ID NO: 2473691 - DNA, 25 bp, Homo sapien
tcgggaaatctcagtgggaacagag

SEQ ID NO: 2473692 - DNA, 25 bp, Homo sapien
tgcccgaggaggtgaatgtgctgct

SEQ ID NO: 2473693 - DNA, 25 bp, Homo sapien
gccctgctggtaaagtgcccgagga

SEQ ID NO: 2473694 - DNA, 25 bp, Homo sapien
gctgctgggccggagttctggtcgg

SEQ ID NO: 2473695 - DNA, 25 bp, Homo sapien
ggtcgcgaactcacggagtgacagc

SEQ ID NO: 2473696 - DNA, 25 bp, Homo sapien
aactcacggagtgacagcggacgct

SEQ ID NO: 2473697 - DNA, 25 bp, Homo sapien
aggcaggagacccacgcgtgcaacg

SEQ ID NO: 2473698 - DNA, 25 bp, Homo sapien
ccacgcgtgcaacgcaggccgatgg

SEQ ID NO: 2473699 - DNA, 25 bp, Homo sapien
tacttcactgaaaagagactttttc

SEQ ID NO: 2473700 - DNA, 25 bp, Homo sapien
ggcacccgggatacttcactgaaaa

SEQ ID NO: 2473701 - DNA, 25 bp, Homo sapien
tttggcacccgggatacttcactga

SEQ ID NO: 2473702 - DNA, 25 bp, Homo sapien
cgggtgctttggcacccgggatact

SEQ ID NO: 2473703 - DNA, 25 bp, Homo sapien
tctggtgagtataaagtggccttgc

SEQ ID NO: 2473704 - DNA, 25 bp, Homo sapien
gagtttccctgactgtaagtagaac

SEQ ID NO: 2473705 - DNA, 25 bp, Homo sapien
taagtagaacttgccatcctcacgc

SEQ ID NO: 2473706 - DNA, 25 bp, Homo sapien
ccggctctttctgtttgggaatctg

SEQ ID NO: 2473707 - DNA, 25 bp, Homo sapien
cttctctgtgtgccgggctgtttct

SEQ ID NO: 2473708 - DNA, 25 bp, Homo sapien
gctctgtggtcggctccactggccg

SEQ ID NO: 2473709 - DNA, 25 bp, Homo sapien
aaatgctttacgtctgtcctccaag

SEQ ID NO: 2473710 - DNA, 25 bp, Homo sapien
catgacactccagcgacagtgcctg

SEQ ID NO: 2473711 - DNA, 25 bp, Homo sapien
agacagcacctcatgtcgacgcagg

SEQ ID NO: 2473712 - DNA, 25 bp, Homo sapien
gctgatgaccatcaaatctggcacc

SEQ ID NO: 2473713 - DNA, 25 bp, Homo sapien
gcccgagcacgctggacagagggat

SEQ ID NO: 2473714 - DNA, 25 bp, Homo sapien
ctgcccgagcacgctggacagaggg

SEQ ID NO: 2473715 - DNA, 25 bp, Homo sapien
tgcccgagcacgctggacagaggga

SEQ ID NO: 2473716 - DNA, 25 bp, Homo sapien
gaccaggcaccgtcccctgagcaca

SEQ ID NO: 2473717 - DNA, 25 bp, Homo sapien
cttgccggcctctgcagcacccgag

SEQ ID NO: 2473718 - DNA, 25 bp, Homo sapien
agcacccgagccaccaaagctgccg

SEQ ID NO: 2473719 - DNA, 25 bp, Homo sapien
gaagctcggagccgaagcccttgcc

SEQ ID NO: 2473720 - DNA, 25 bp, Homo sapien
acttctagcaagctcatcacgcagc

SEQ ID NO: 2473721 - DNA, 25 bp, Homo sapien
ctgaccctgcaagctctctccacca

SEQ ID NO: 2473722 - DNA, 25 bp, Homo sapien
tgttttcacccatggacttctagca

SEQ ID NO: 2473723 - DNA, 25 bp, Homo sapien
ccgggagccacacaagggctgtttt

SEQ ID NO: 2473724 - DNA, 25 bp, Homo sapien
tccggcgagaaagggcaacggtcaa

SEQ ID NO: 2473725 - DNA, 25 bp, Homo sapien
gcaaactccggcgagaaagggcaac

SEQ ID NO: 2473726 - DNA, 25 bp, Homo sapien
cgagaaagggcaacggtcaaagatt

SEQ ID NO: 2473727 - DNA, 25 bp, Homo sapien
gacacgagcaaactccggcgagaaa

SEQ ID NO: 2473728 - DNA, 25 bp, Homo sapien
tcccagcatcctcaaaatgaggggt

SEQ ID NO: 2473729 - DNA, 25 bp, Homo sapien
acagctggctcgagtggtgcccacg

SEQ ID NO: 2473730 - DNA, 25 bp, Homo sapien
tgccgtgctctcctgagtgggcgcc

SEQ ID NO: 2473731 - DNA, 25 bp, Homo sapien
gcaggtcacagctggctcgagtggt

SEQ ID NO: 2473732 - DNA, 25 bp, Homo sapien
gaggacgtggccagggctccaaaag

SEQ ID NO: 2473733 - DNA, 25 bp, Homo sapien
ctggggaggacgtggccagggctcc

SEQ ID NO: 2473734 - DNA, 25 bp, Homo sapien
gacgtggccagggctccaaaaggcc

SEQ ID NO: 2473735 - DNA, 25 bp, Homo sapien
tggggaggacgtggccagggctcca

SEQ ID NO: 2473736 - DNA, 25 bp, Homo sapien
tagaactggaaaccgaacacaggtg

SEQ ID NO: 2473737 - DNA, 25 bp, Homo sapien
actgggtggtccatccccctcccag

SEQ ID NO: 2473738 - DNA, 25 bp, Homo sapien
aggtagaactggaaaccgaacacag

SEQ ID NO: 2473739 - DNA, 25 bp, Homo sapien
tccagcttggaaactaagcatatgc

SEQ ID NO: 2473740 - DNA, 25 bp, Homo sapien
tggaaactaagcatatgctccactt

SEQ ID NO: 2473741 - DNA, 25 bp, Homo sapien
gcttggaaactaagcatatgctcca

SEQ ID NO: 2473742 - DNA, 25 bp, Homo sapien
aactaagcatatgctccacttcctc

SEQ ID NO: 2473743 - DNA, 25 bp, Homo sapien
ccaggtctaacagtcaggttcctcc

SEQ ID NO: 2473744 - DNA, 25 bp, Homo sapien
tccatcctggcattacactggcctg

SEQ ID NO: 2473745 - DNA, 25 bp, Homo sapien
agggtcacatccgtctcccagaagc

SEQ ID NO: 2473746 - DNA, 25 bp, Homo sapien
ttcctcctccgtgcattaacaatgg

SEQ ID NO: 2473747 - DNA, 25 bp, Homo sapien
cgaagcttgcttgggttgttaagcc

SEQ ID NO: 2473748 - DNA, 25 bp, Homo sapien
tgcttgggttgttaagcctagggaa

SEQ ID NO: 2473749 - DNA, 25 bp, Homo sapien
gggaaattatccagccatgagccct

SEQ ID NO: 2473750 - DNA, 25 bp, Homo sapien
cagaattcagaacgatggtcgtggg

SEQ ID NO: 2473751 - DNA, 25 bp, Homo sapien
agtgctgggtgcagcgaaagccgat

SEQ ID NO: 2473752 - DNA, 25 bp, Homo sapien
ctgggtgcagcgaaagccgatctca

SEQ ID NO: 2473753 - DNA, 25 bp, Homo sapien
tgctgggtgcagcgaaagccgatct

SEQ ID NO: 2473754 - DNA, 25 bp, Homo sapien
tgggtgcagcgaaagccgatctcac

SEQ ID NO: 2473755 - DNA, 25 bp, Homo sapien
ggcacaggcctggatgccgacgacc

SEQ ID NO: 2473756 - DNA, 25 bp, Homo sapien
ggtgtggaagaacgaggtgcccgtg

SEQ ID NO: 2473757 - DNA, 25 bp, Homo sapien
tgtggaagaacgaggtgcccgtggc

SEQ ID NO: 2473758 - DNA, 25 bp, Homo sapien
tggaagaacgaggtgcccgtggcgg

SEQ ID NO: 2473759 - DNA, 25 bp, Homo sapien
agcatctccagtgagcccacgcagg

SEQ ID NO: 2473760 - DNA, 25 bp, Homo sapien
gaaaggaaaacagacgcggtcagca

SEQ ID NO: 2473761 - DNA, 25 bp, Homo sapien
ctgtcgtggcatggcgggtggctcc

SEQ ID NO: 2473762 - DNA, 25 bp, Homo sapien
aaaacagacgcggtcagcatctcca

SEQ ID NO: 2473763 - DNA, 25 bp, Homo sapien
tagaggccctaagatgcttgagcac

SEQ ID NO: 2473764 - DNA, 25 bp, Homo sapien
gcgattcttgttatcggcatcaacg

SEQ ID NO: 2473765 - DNA, 25 bp, Homo sapien
ggcgattcttgttatcggcatcaac

SEQ ID NO: 2473766 - DNA, 25 bp, Homo sapien
gattcttgttatcggcatcaacgcc

SEQ ID NO: 2473767 - DNA, 25 bp, Homo sapien
cgattcttgttatcggcatcaacgc

SEQ ID NO: 2473768 - DNA, 25 bp, Homo sapien
cagtctgcccatgaggctgggcctg

SEQ ID NO: 2473769 - DNA, 25 bp, Homo sapien
ttccctgagccctctcaagtcgggt

SEQ ID NO: 2473770 - DNA, 25 bp, Homo sapien
ccaggacgctgggtcagacaaggtc

SEQ ID NO: 2473771 - DNA, 25 bp, Homo sapien
gcactgcagggcaaggaaggtccct

SEQ ID NO: 2473772 - DNA, 25 bp, Homo sapien
gcctaacggggaacactgcccacat

SEQ ID NO: 2473773 - DNA, 25 bp, Homo sapien
agcctaacggggaacactgcccaca

SEQ ID NO: 2473774 - DNA, 25 bp, Homo sapien
tgatgccccatggtcttgggttgtg

SEQ ID NO: 2473775 - DNA, 25 bp, Homo sapien
gacggtcccgccatttgggctgtga

SEQ ID NO: 2473776 - DNA, 25 bp, Homo sapien
ggtcccgccatttgggctgtgaaat

SEQ ID NO: 2473777 - DNA, 25 bp, Homo sapien
acgtggctaccacatgctcctgttg

SEQ ID NO: 2473778 - DNA, 25 bp, Homo sapien
tcaggccacgacagggtggccggaa

SEQ ID NO: 2473779 - DNA, 25 bp, Homo sapien
caggccacgacagggtggccggaac

SEQ ID NO: 2473780 - DNA, 25 bp, Homo sapien
ccacgacagggtggccggaactggg

SEQ ID NO: 2473781 - DNA, 25 bp, Homo sapien
ggccacgacagggtggccggaactg

SEQ ID NO: 2473782 - DNA, 25 bp, Homo sapien
cattcgtgggcaccgatggcagcag

SEQ ID NO: 2473783 - DNA, 25 bp, Homo sapien
tcggcccattcgtgggcaccgatgg

SEQ ID NO: 2473784 - DNA, 25 bp, Homo sapien
gggcaccgatggcagcaggagcccg

SEQ ID NO: 2473785 - DNA, 25 bp, Homo sapien
ttggtcggcccattcgtgggcaccg

SEQ ID NO: 2473786 - DNA, 25 bp, Homo sapien
catcctcctcaggaagatagaggag

SEQ ID NO: 2473787 - DNA, 25 bp, Homo sapien
tagaggaggaacaaggcggcgatgt

SEQ ID NO: 2473788 - DNA, 25 bp, Homo sapien
gaatgcatcctcctcaggaagatag

SEQ ID NO: 2473789 - DNA, 25 bp, Homo sapien
tgcatcctcctcaggaagatagagg

SEQ ID NO: 2473790 - DNA, 25 bp, Homo sapien
cgggttatactcctcatatgccagg

SEQ ID NO: 2473791 - DNA, 25 bp, Homo sapien
tatgccaggaggatgtggagtagtt

SEQ ID NO: 2473792 - DNA, 25 bp, Homo sapien
gggttatactcctcatatgccagga

SEQ ID NO: 2473793 - DNA, 25 bp, Homo sapien
gaggatgtggagtagttcccgctgc

SEQ ID NO: 2473794 - DNA, 25 bp, Homo sapien
cccggtcgatgcgctggatgtgctc

SEQ ID NO: 2473795 - DNA, 25 bp, Homo sapien
ccggtcgatgcgctggatgtgctca

SEQ ID NO: 2473796 - DNA, 25 bp, Homo sapien
tcccggtcgatgcgctggatgtgct

SEQ ID NO: 2473797 - DNA, 25 bp, Homo sapien
gtcccggtcgatgcgctggatgtgc

SEQ ID NO: 2473798 - DNA, 25 bp, Homo sapien
tcaacttcatttcctcaatgttcag

SEQ ID NO: 2473799 - DNA, 25 bp, Homo sapien
catgggcattcccttgtacgctcga

SEQ ID NO: 2473800 - DNA, 25 bp, Homo sapien
gactgaccacatcgggccccggatg

SEQ ID NO: 2473801 - DNA, 25 bp, Homo sapien
ttcccttgtacgctcgatctatgag

SEQ ID NO: 2473802 - DNA, 25 bp, Homo sapien
tgctctttcggctgatctcccgccg

SEQ ID NO: 2473803 - DNA, 25 bp, Homo sapien
gctctttcggctgatctcccgccga

SEQ ID NO: 2473804 - DNA, 25 bp, Homo sapien
tctttcggctgatctcccgccgaat

SEQ ID NO: 2473805 - DNA, 25 bp, Homo sapien
ctttcggctgatctcccgccgaatt

SEQ ID NO: 2473806 - DNA, 25 bp, Homo sapien
catgttggagttagcggagctgcca

SEQ ID NO: 2473807 - DNA, 25 bp, Homo sapien
ccagagccgcccgcggatgctgggt

SEQ ID NO: 2473808 - DNA, 25 bp, Homo sapien
ttcccagagccgcccgcggatgctg

SEQ ID NO: 2473809 - DNA, 25 bp, Homo sapien
agccgcccgcggatgctgggtcttg

SEQ ID NO: 2473810 - DNA, 25 bp, Homo sapien
agtgacagcgtgttgccctcacccg

SEQ ID NO: 2473811 - DNA, 25 bp, Homo sapien
caaagtgaacagcaacctggggtca

SEQ ID NO: 2473812 - DNA, 25 bp, Homo sapien
agcccctccacgcatcaggctctta

SEQ ID NO: 2473813 - DNA, 25 bp, Homo sapien
cccagtccctacgtccctggaccag

SEQ ID NO: 2473814 - DNA, 25 bp, Homo sapien
gcagtcagaggaggcagctccgtct

SEQ ID NO: 2473815 - DNA, 25 bp, Homo sapien
tcgcctcccgcgcagtcagaggagg

SEQ ID NO: 2473816 - DNA, 25 bp, Homo sapien
agtcagaggaggcagctccgtctca

SEQ ID NO: 2473817 - DNA, 25 bp, Homo sapien
cttcgcctcccgcgcagtcagagga

SEQ ID NO: 2473818 - DNA, 25 bp, Homo sapien
ctgcccgtcctggactcgaggtggt

SEQ ID NO: 2473819 - DNA, 25 bp, Homo sapien
ctgagaaaggttagccctgagatgg

SEQ ID NO: 2473820 - DNA, 25 bp, Homo sapien
cagggtgggcgaccgggccctgaca

SEQ ID NO: 2473821 - DNA, 25 bp, Homo sapien
tggactcgaggtggtgctttctgct

SEQ ID NO: 2473822 - DNA, 25 bp, Homo sapien
caaatgatcgacgttgttgttgtag

SEQ ID NO: 2473823 - DNA, 25 bp, Homo sapien
ccccaaatgatcgacgttgttgttg

SEQ ID NO: 2473824 - DNA, 25 bp, Homo sapien
tgtacaatccccaaatgatcgacgt

SEQ ID NO: 2473825 - DNA, 25 bp, Homo sapien
aatccccaaatgatcgacgttgttg

SEQ ID NO: 2473826 - DNA, 25 bp, Homo sapien
taatgatgtcctctcgctcttgtgc

SEQ ID NO: 2473827 - DNA, 25 bp, Homo sapien
cctctcgctcttgtgcccaccaact

SEQ ID NO: 2473828 - DNA, 25 bp, Homo sapien
atgatgtcctctcgctcttgtgccc

SEQ ID NO: 2473829 - DNA, 25 bp, Homo sapien
tcctctcgctcttgtgcccaccaac

SEQ ID NO: 2473830 - DNA, 25 bp, Homo sapien
ggccccagcaggttgaatggtttcc

SEQ ID NO: 2473831 - DNA, 25 bp, Homo sapien
gccccagcaggttgaatggtttcca

SEQ ID NO: 2473832 - DNA, 25 bp, Homo sapien
ccccagcaggttgaatggtttccac

SEQ ID NO: 2473833 - DNA, 25 bp, Homo sapien
cggccccagcaggttgaatggtttc

SEQ ID NO: 2473834 - DNA, 25 bp, Homo sapien
ctcagggcctcagcgatgcccagtt

SEQ ID NO: 2473835 - DNA, 25 bp, Homo sapien
actggggtcagcgaccagaggtctc

SEQ ID NO: 2473836 - DNA, 25 bp, Homo sapien
tcagcgaccagaggtctctgtgcaa

SEQ ID NO: 2473837 - DNA, 25 bp, Homo sapien
gaccagaggtctctgtgcaatcggc

SEQ ID NO: 2473838 - DNA, 25 bp, Homo sapien
tctgatgaatcagctggcctgggtc

SEQ ID NO: 2473839 - DNA, 25 bp, Homo sapien
agagctgctcacagataccactgcc

SEQ ID NO: 2473840 - DNA, 25 bp, Homo sapien
gggtcatgcctctcagggagaaaac

SEQ ID NO: 2473841 - DNA, 25 bp, Homo sapien
gaaaacctttgagtccacagagctg

SEQ ID NO: 2473842 - DNA, 25 bp, Homo sapien
gagtagtctccgttcctgaatgtgc

SEQ ID NO: 2473843 - DNA, 25 bp, Homo sapien
cccctgtctgttgacagagtagtct

SEQ ID NO: 2473844 - DNA, 25 bp, Homo sapien
tgacagagtagtctccgttcctgaa

SEQ ID NO: 2473845 - DNA, 25 bp, Homo sapien
caggtcatccccctgtctgttgaca

SEQ ID NO: 2473846 - DNA, 25 bp, Homo sapien
ggtgtggaagaacgaggtgcccgtg

SEQ ID NO: 2473847 - DNA, 25 bp, Homo sapien
aggcggggcatggagttccactgca

SEQ ID NO: 2473848 - DNA, 25 bp, Homo sapien
ggcacaggcctggatgccgacgacc

SEQ ID NO: 2473849 - DNA, 25 bp, Homo sapien
tggaagaacgaggtgcccgtggcgg

SEQ ID NO: 2473850 - DNA, 25 bp, Homo sapien
tcaatcaatatccggatgaggcagc

SEQ ID NO: 2473851 - DNA, 25 bp, Homo sapien
gacggtcctgccatttgggctgtga

SEQ ID NO: 2473852 - DNA, 25 bp, Homo sapien
ttggagcccctggacggtcctgcca

SEQ ID NO: 2473853 - DNA, 25 bp, Homo sapien
cggtcctgccatttgggctgtgaaa

SEQ ID NO: 2473854 - DNA, 25 bp, Homo sapien
ggagcccctggacggtcctgccatt

SEQ ID NO: 2473855 - DNA, 25 bp, Homo sapien
caggccacgacagggtggccggaac

SEQ ID NO: 2473856 - DNA, 25 bp, Homo sapien
tcaggccacgacagggtggccggaa

SEQ ID NO: 2473857 - DNA, 25 bp, Homo sapien
ggccacgacagggtggccggaactg

SEQ ID NO: 2473858 - DNA, 25 bp, Homo sapien
ccacgacagggtggccggaactggg

SEQ ID NO: 2473859 - DNA, 25 bp, Homo sapien
catcctcctcaggaagatagaggag

SEQ ID NO: 2473860 - DNA, 25 bp, Homo sapien
gaatgcatcctcctcaggaagatag

SEQ ID NO: 2473861 - DNA, 25 bp, Homo sapien
tagaggaggaacaaggcggcgatgt

SEQ ID NO: 2473862 - DNA, 25 bp, Homo sapien
tgcatcctcctcaggaagatagagg

SEQ ID NO: 2473863 - DNA, 25 bp, Homo sapien
tatgccaggaggatgtggagtagtt

SEQ ID NO: 2473864 - DNA, 25 bp, Homo sapien
gggttatactcctcatatgccagga

SEQ ID NO: 2473865 - DNA, 25 bp, Homo sapien
cgggttatactcctcatatgccagg

SEQ ID NO: 2473866 - DNA, 25 bp, Homo sapien
gaggatgtggagtagttcccgctgc

SEQ ID NO: 2473867 - DNA, 25 bp, Homo sapien
cgatccctgaagaatatatgcttcc

SEQ ID NO: 2473868 - DNA, 25 bp, Homo sapien
ggttccgtatcgatccctgaagaat

SEQ ID NO: 2473869 - DNA, 25 bp, Homo sapien
tatgcttccttaatgtcccgcttac

SEQ ID NO: 2473870 - DNA, 25 bp, Homo sapien
tatatgcttccttaatgtcccgctt

SEQ ID NO: 2473871 - DNA, 25 bp, Homo sapien
tcccggtcgatgcgctggatgtgct

SEQ ID NO: 2473872 - DNA, 25 bp, Homo sapien
cccggtcgatgcgctggatgtgctc

SEQ ID NO: 2473873 - DNA, 25 bp, Homo sapien
ccggtcgatgcgctggatgtgctca

SEQ ID NO: 2473874 - DNA, 25 bp, Homo sapien
gtcccggtcgatgcgctggatgtgc

SEQ ID NO: 2473875 - DNA, 25 bp, Homo sapien
ttcccttgtacgctcgatctatgag

SEQ ID NO: 2473876 - DNA, 25 bp, Homo sapien
tcaacttcatttcctcagtgttcag

SEQ ID NO: 2473877 - DNA, 25 bp, Homo sapien
catttcctcagtgttcaggaggact

SEQ ID NO: 2473878 - DNA, 25 bp, Homo sapien
catgggcattcccttgtacgctcga

SEQ ID NO: 2473879 - DNA, 25 bp, Homo sapien
gctctttcggctgatctcccgccga

SEQ ID NO: 2473880 - DNA, 25 bp, Homo sapien
ctttcggctgatctcccgccgaatt

SEQ ID NO: 2473881 - DNA, 25 bp, Homo sapien
tctttcggctgatctcccgccgaat

SEQ ID NO: 2473882 - DNA, 25 bp, Homo sapien
tgctctttcggctgatctcccgccg

SEQ ID NO: 2473883 - DNA, 25 bp, Homo sapien
gcagtcagaggaggcagctccgtct

SEQ ID NO: 2473884 - DNA, 25 bp, Homo sapien
tcgcctcccgcgcagtcagaggagg

SEQ ID NO: 2473885 - DNA, 25 bp, Homo sapien
agtcagaggaggcagctccgtctca

SEQ ID NO: 2473886 - DNA, 25 bp, Homo sapien
cttcgcctcccgcgcagtcagagga

SEQ ID NO: 2473887 - DNA, 25 bp, Homo sapien
tgtacaatccccaaatgatcgacgt

SEQ ID NO: 2473888 - DNA, 25 bp, Homo sapien
caaatgatcgacgttgttgttgtag

SEQ ID NO: 2473889 - DNA, 25 bp, Homo sapien
ccccaaatgatcgacgttgttgttg

SEQ ID NO: 2473890 - DNA, 25 bp, Homo sapien
aatccccaaatgatcgacgttgttg

SEQ ID NO: 2473891 - DNA, 25 bp, Homo sapien
taatgatgtcctctcgctcttgtgc

SEQ ID NO: 2473892 - DNA, 25 bp, Homo sapien
atgatgtcctctcgctcttgtgccc

SEQ ID NO: 2473893 - DNA, 25 bp, Homo sapien
cctctcgctcttgtgcccaccaact

SEQ ID NO: 2473894 - DNA, 25 bp, Homo sapien
tcctctcgctcttgtgcccaccaac

SEQ ID NO: 2473895 - DNA, 25 bp, Homo sapien
ctggagtctcaagtcccaagcaggg

SEQ ID NO: 2473896 - DNA, 25 bp, Homo sapien
ctgaaccgctctcgccgggctccca

SEQ ID NO: 2473897 - DNA, 25 bp, Homo sapien
ggagaacacctgaaccgctctcgcc

SEQ ID NO: 2473898 - DNA, 25 bp, Homo sapien
acacctgaaccgctctcgccgggct

SEQ ID NO: 2473899 - DNA, 25 bp, Homo sapien
ctgggtgcagcgaaagccgatctca

SEQ ID NO: 2473900 - DNA, 25 bp, Homo sapien
tgctgggtgcagcgaaagccgatct

SEQ ID NO: 2473901 - DNA, 25 bp, Homo sapien
tgggtgcagcgaaagccgatctcac

SEQ ID NO: 2473902 - DNA, 25 bp, Homo sapien
agtgctgggtgcagcgaaagccgat

SEQ ID NO: 2473903 - DNA, 25 bp, Homo sapien
ggtgtggaagaacgaggtgcccgtg

SEQ ID NO: 2473904 - DNA, 25 bp, Homo sapien
tgtggaagaacgaggtgcccgtggc

SEQ ID NO: 2473905 - DNA, 25 bp, Homo sapien
ggcacaggcctggatgccgacgacc

SEQ ID NO: 2473906 - DNA, 25 bp, Homo sapien
tggaagaacgaggtgcccgtggcgg

SEQ ID NO: 2473907 - DNA, 25 bp, Homo sapien
cccacttctggctgaactcttggct

SEQ ID NO: 2473908 - DNA, 25 bp, Homo sapien
ggctccaggcttcttgtcctggcaa

SEQ ID NO: 2473909 - DNA, 25 bp, Homo sapien
ggccctctccctgaatgctctgtgg

SEQ ID NO: 2473910 - DNA, 25 bp, Homo sapien
ctctgtgggtcagggacacggattc

SEQ ID NO: 2473911 - DNA, 25 bp, Homo sapien
tagaggccctaagatgcttgagcac

SEQ ID NO: 2473912 - DNA, 25 bp, Homo sapien
cgattcttgttatcggcatcaacgc

SEQ ID NO: 2473913 - DNA, 25 bp, Homo sapien
gcgattcttgttatcggcatcaacg

SEQ ID NO: 2473914 - DNA, 25 bp, Homo sapien
ggcgattcttgttatcggcatcaac

SEQ ID NO: 2473915 - DNA, 25 bp, Homo sapien
gattcttgttatcggcatcaacgcc

SEQ ID NO: 2473916 - DNA, 25 bp, Homo sapien
ttccctgagccctctcaagtcgggt

SEQ ID NO: 2473917 - DNA, 25 bp, Homo sapien
cagtctgcccatgaggctgggcctg

SEQ ID NO: 2473918 - DNA, 25 bp, Homo sapien
ccaggacgctgggtcagacaaggtc

SEQ ID NO: 2473919 - DNA, 25 bp, Homo sapien
gcactgcagggcaaggaaggtccct

SEQ ID NO: 2473920 - DNA, 25 bp, Homo sapien
gcctaacggggaacactgcccacat

SEQ ID NO: 2473921 - DNA, 25 bp, Homo sapien
agcctaacggggaacactgcccaca

SEQ ID NO: 2473922 - DNA, 25 bp, Homo sapien
tgatgccccatggtcttgggttgtg

SEQ ID NO: 2473923 - DNA, 25 bp, Homo sapien
gttgtgacgtggctaccacatgctc

SEQ ID NO: 2473924 - DNA, 25 bp, Homo sapien
acgtggctaccacatgctcctgttg

SEQ ID NO: 2473925 - DNA, 25 bp, Homo sapien
gtcttgggttgtgacgtggctacca

SEQ ID NO: 2473926 - DNA, 25 bp, Homo sapien
tgtagaagtataggctgagcttcct

SEQ ID NO: 2473927 - DNA, 25 bp, Homo sapien
ccagcacattcaggaacggagacta

SEQ ID NO: 2473928 - DNA, 25 bp, Homo sapien
ggttctctgcatgtagaagtatagg

SEQ ID NO: 2473929 - DNA, 25 bp, Homo sapien
tgggtgccgtccaggttctctgcat

SEQ ID NO: 2473930 - DNA, 25 bp, Homo sapien
tcatttcaacaatggccatcgtctg

SEQ ID NO: 2473931 - DNA, 25 bp, Homo sapien
tagaacccgaaactgaacacaggtg

SEQ ID NO: 2473932 - DNA, 25 bp, Homo sapien
gtctgcatacgagctgaagtacagg

SEQ ID NO: 2473933 - DNA, 25 bp, Homo sapien
aaagttcaggttccagcttcctttg

SEQ ID NO: 2473934 - DNA, 25 bp, Homo sapien
cataacctctttggtggaccttgat

SEQ ID NO: 2473935 - DNA, 25 bp, Homo sapien
taactcgtgtagaatcataacctct

SEQ ID NO: 2473936 - DNA, 25 bp, Homo sapien
ctagagaataactcgtgtagaatca

SEQ ID NO: 2473937 - DNA, 25 bp, Homo sapien
tctttggtggaccttgatttttcca

SEQ ID NO: 2473938 - DNA, 25 bp, Homo sapien
ctacatgagctgcaaagcaagcaaa

SEQ ID NO: 2473939 - DNA, 25 bp, Homo sapien
ttttcttatcgaagagcccatcctc

SEQ ID NO: 2473940 - DNA, 25 bp, Homo sapien
gagctgcaaagcaagcaaactgaat

SEQ ID NO: 2473941 - DNA, 25 bp, Homo sapien
tcttatcgaagagcccatcctcata

SEQ ID NO: 2473942 - DNA, 25 bp, Homo sapien
gctgtcgacaggtgtctgacgtgta

SEQ ID NO: 2473943 - DNA, 25 bp, Homo sapien
gtctgacgtgtaaacttggaatcaa

SEQ ID NO: 2473944 - DNA, 25 bp, Homo sapien
caggtgtctgacgtgtaaacttgga

SEQ ID NO: 2473945 - DNA, 25 bp, Homo sapien
catctgggctgtcgacaggtgtctg

SEQ ID NO: 2473946 - DNA, 25 bp, Homo sapien
catcatcatcctcctccttctccac

SEQ ID NO: 2473947 - DNA, 25 bp, Homo sapien
atttaatgagtaaacacttttatag

SEQ ID NO: 2473948 - DNA, 25 bp, Homo sapien
tatttaatgagtaaacacttttata

SEQ ID NO: 2473949 - DNA, 25 bp, Homo sapien
taatttgtaatataaccctgagatg

SEQ ID NO: 2473950 - DNA, 25 bp, Homo sapien
gagatgtatattaggattatcccca

SEQ ID NO: 2473951 - DNA, 25 bp, Homo sapien
taggaagtgacaaggctagttgcac

SEQ ID NO: 2473952 - DNA, 25 bp, Homo sapien
tcttttgaggcattactgctggaac

SEQ ID NO: 2473953 - DNA, 25 bp, Homo sapien
cactgttgggataacataggcctct

SEQ ID NO: 2473954 - DNA, 25 bp, Homo sapien
tgttgggataacataggcctcttcc

SEQ ID NO: 2473955 - DNA, 25 bp, Homo sapien
cttctgcactgttgggataacatag

SEQ ID NO: 2473956 - DNA, 25 bp, Homo sapien
tgggataacataggcctcttccatg

SEQ ID NO: 2473957 - DNA, 25 bp, Homo sapien
caagatcatgtcaatattgacattc

SEQ ID NO: 2473958 - DNA, 25 bp, Homo sapien
gtgggcataaggatacaagatcatg

SEQ ID NO: 2473959 - DNA, 25 bp, Homo sapien
gtgtgggcataaggatacaagatca

SEQ ID NO: 2473960 - DNA, 25 bp, Homo sapien
gggcataaggatacaagatcatgtc

SEQ ID NO: 2473961 - DNA, 25 bp, Homo sapien
gcaaatggggatagagacacgtgtc

SEQ ID NO: 2473962 - DNA, 25 bp, Homo sapien
ggatagagacacgtgtccgatggat

SEQ ID NO: 2473963 - DNA, 25 bp, Homo sapien
ggccttctcaggacaaatattccat

SEQ ID NO: 2473964 - DNA, 25 bp, Homo sapien
ccgatggatgtattggccttctcag

SEQ ID NO: 2473965 - DNA, 25 bp, Homo sapien
tccggcgagaaagggcaacggtcaa

SEQ ID NO: 2473966 - DNA, 25 bp, Homo sapien
gcaaactccggcgagaaagggcaac

SEQ ID NO: 2473967 - DNA, 25 bp, Homo sapien
cgagaaagggcaacggtcaaagatt

SEQ ID NO: 2473968 - DNA, 25 bp, Homo sapien
gacacgagcaaactccggcgagaaa

SEQ ID NO: 2473969 - DNA, 25 bp, Homo sapien
gcacgcgtagttaggtgatggcgac

SEQ ID NO: 2473970 - DNA, 25 bp, Homo sapien
agactttattgcacgcgtagttagg

SEQ ID NO: 2473971 - DNA, 25 bp, Homo sapien
tattgcacgcgtagttaggtgatgg

SEQ ID NO: 2473972 - DNA, 25 bp, Homo sapien
aagactttattgcacgcgtagttag

SEQ ID NO: 2473973 - DNA, 25 bp, Homo sapien
acagctggctcgagtggtgcccacg

SEQ ID NO: 2473974 - DNA, 25 bp, Homo sapien
tcccagcatcctcaaaatgaggggt

SEQ ID NO: 2473975 - DNA, 25 bp, Homo sapien
gcaggtcacagctggctcgagtggt

SEQ ID NO: 2473976 - DNA, 25 bp, Homo sapien
tgccgtgctctcctgagtgggcgcc

SEQ ID NO: 2473977 - DNA, 25 bp, Homo sapien
ctggggaggacgtggccagggctcc

SEQ ID NO: 2473978 - DNA, 25 bp, Homo sapien
gacgtggccagggctccaaaaggcc

SEQ ID NO: 2473979 - DNA, 25 bp, Homo sapien
tggggaggacgtggccagggctcca

SEQ ID NO: 2473980 - DNA, 25 bp, Homo sapien
gaggacgtggccagggctccaaaag

SEQ ID NO: 2473981 - DNA, 25 bp, Homo sapien
accctcctcttgaggaagcagccac

SEQ ID NO: 2473982 - DNA, 25 bp, Homo sapien
gcagatccaccctcctcttgaggaa

SEQ ID NO: 2473983 - DNA, 25 bp, Homo sapien
aggagagcagatccaccctcctctt

SEQ ID NO: 2473984 - DNA, 25 bp, Homo sapien
gggcaggagagcagatccaccctcc

SEQ ID NO: 2473985 - DNA, 25 bp, Homo sapien
cctggaatttggcatcccctaggcc

SEQ ID NO: 2473986 - DNA, 25 bp, Homo sapien
ccctggaatttggcatcccctaggc

SEQ ID NO: 2473987 - DNA, 25 bp, Homo sapien
cgcacgtgcacaaacacgttgcaag

SEQ ID NO: 2473988 - DNA, 25 bp, Homo sapien
catacacgtgtgcacgcacgtgcac

SEQ ID NO: 2473989 - DNA, 25 bp, Homo sapien
ccacatacacgtgtgcacgcacgtg

SEQ ID NO: 2473990 - DNA, 25 bp, Homo sapien
gcacgcacgtgcacaaacacgttgc

SEQ ID NO: 2473991 - DNA, 25 bp, Homo sapien
gcccgttctacactgcccgtgtaga

SEQ ID NO: 2473992 - DNA, 25 bp, Homo sapien
tagacgattggctctttcgtctcca

SEQ ID NO: 2473993 - DNA, 25 bp, Homo sapien
tccccattcgacagatgagacgtct

SEQ ID NO: 2473994 - DNA, 25 bp, Homo sapien
cccaaatgtccccattcgacagatg

SEQ ID NO: 2473995 - DNA, 25 bp, Homo sapien
cttgccaaatttttcaggattggga

SEQ ID NO: 2473996 - DNA, 25 bp, Homo sapien
gtctgggcttcagatgttcagaagt

SEQ ID NO: 2473997 - DNA, 25 bp, Homo sapien
gggtcatttactcaagcttcttgtc

SEQ ID NO: 2473998 - DNA, 25 bp, Homo sapien
tcatctttcctggtaggatatcact

SEQ ID NO: 2473999 - DNA, 25 bp, Homo sapien
ggtactgcttgaactgtaactatgc

SEQ ID NO: 2474000 - DNA, 25 bp, Homo sapien
cttttatgccctacggtgagaagga

SEQ ID NO: 2474001 - DNA, 25 bp, Homo sapien
tatgggacctgtcagtataggtact

SEQ ID NO: 2474002 - DNA, 25 bp, Homo sapien
tgtaggccttctttgaactgtgaac

SEQ ID NO: 2474003 - DNA, 25 bp, Homo sapien
gcacagtaatcgctaatcccttaga

SEQ ID NO: 2474004 - DNA, 25 bp, Homo sapien
tttaaacatagggagactgcattgc

SEQ ID NO: 2474005 - DNA, 25 bp, Homo sapien
ctaagtgttgaacggccggctcagt

SEQ ID NO: 2474006 - DNA, 25 bp, Homo sapien
tcatcccgccagtgggttgctctgg

SEQ ID NO: 2474007 - DNA, 25 bp, Homo sapien
cctcaggacttgagactccagttgg

SEQ ID NO: 2474008 - DNA, 25 bp, Homo sapien
ccaagtgtgctttgagagtagggtg

SEQ ID NO: 2474009 - DNA, 25 bp, Homo sapien
ctgcctcaggacttgagactccagt

SEQ ID NO: 2474010 - DNA, 25 bp, Homo sapien
caagtgtgctttgagagtagggtgg

SEQ ID NO: 2474011 - DNA, 25 bp, Homo sapien
gacagccactcggttgtcaccagac

SEQ ID NO: 2474012 - DNA, 25 bp, Homo sapien
gaggtcacacgcatgttcccaaggc

SEQ ID NO: 2474013 - DNA, 25 bp, Homo sapien
gcatgttcccaaggctcaggctcct

SEQ ID NO: 2474014 - DNA, 25 bp, Homo sapien
aggtcgctgggcctcgaagcttctg

SEQ ID NO: 2474015 - DNA, 25 bp, Homo sapien
ccaggtcactgacgtatttctggac

SEQ ID NO: 2474016 - DNA, 25 bp, Homo sapien
ggtcagcacagacctgccggcctct

SEQ ID NO: 2474017 - DNA, 25 bp, Homo sapien
cctgccggcctctcttggttaggaa

SEQ ID NO: 2474018 - DNA, 25 bp, Homo sapien
tcaggcactcagctccaggtcactg

SEQ ID NO: 2474019 - DNA, 25 bp, Homo sapien
cgtctcaaagtagtcagctatgaaa

SEQ ID NO: 2474020 - DNA, 25 bp, Homo sapien
tggctgctcgtctcaaagtagtcag

SEQ ID NO: 2474021 - DNA, 25 bp, Homo sapien
agcactggctgctcgtctcaaagta

SEQ ID NO: 2474022 - DNA, 25 bp, Homo sapien
gctcgtctcaaagtagtcagctatg

SEQ ID NO: 2474023 - DNA, 25 bp, Homo sapien
ggaggacggcaagggcagcagtgga

SEQ ID NO: 2474024 - DNA, 25 bp, Homo sapien
ccatggtgcagaggaggacggcaag

SEQ ID NO: 2474025 - DNA, 25 bp, Homo sapien
cagagaggacctggttgcagagagc

SEQ ID NO: 2474026 - DNA, 25 bp, Homo sapien
tgcagagaggacctggttgcagaga

SEQ ID NO: 2474027 - DNA, 25 bp, Homo sapien
aatgtgggctcgagtgtcagcagag

SEQ ID NO: 2474028 - DNA, 25 bp, Homo sapien
gtgggctcgagtgtcagcagagcca

SEQ ID NO: 2474029 - DNA, 25 bp, Homo sapien
tgtgggctcgagtgtcagcagagcc

SEQ ID NO: 2474030 - DNA, 25 bp, Homo sapien
ggaatgtgggctcgagtgtcagcag

SEQ ID NO: 2474031 - DNA, 25 bp, Homo sapien
gtcctctgcggcgtctttgccttgc

SEQ ID NO: 2474032 - DNA, 25 bp, Homo sapien
tctccagtgcggagcattgctttcc

SEQ ID NO: 2474033 - DNA, 25 bp, Homo sapien
gtgcggagcattgctttccttccag

SEQ ID NO: 2474034 - DNA, 25 bp, Homo sapien
tttgccttgcgctgctcagcttgcc

SEQ ID NO: 2474035 - DNA, 25 bp, Homo sapien
cattgagcgccatcagtggaccact

SEQ ID NO: 2474036 - DNA, 25 bp, Homo sapien
gattagacacccctgctcaagatta

SEQ ID NO: 2474037 - DNA, 25 bp, Homo sapien
tatagggcacaaaagtcagtggcac

SEQ ID NO: 2474038 - DNA, 25 bp, Homo sapien
gcactgagctcagcagaagaaggca

SEQ ID NO: 2474039 - DNA, 25 bp, Homo sapien
gccttctgctctctagcactctcag

SEQ ID NO: 2474040 - DNA, 25 bp, Homo sapien
tgtctctcctcgtgctagtagctgc

SEQ ID NO: 2474041 - DNA, 25 bp, Homo sapien
cgtgctagtagctgccttctgctct

SEQ ID NO: 2474042 - DNA, 25 bp, Homo sapien
gaagctctgcgtgactgtcctgtct

SEQ ID NO: 2474043 - DNA, 25 bp, Homo sapien
tgtatgacctggaactgaactgagc

SEQ ID NO: 2474044 - DNA, 25 bp, Homo sapien
tagtttagccaaaggataagtgtcc

SEQ ID NO: 2474045 - DNA, 25 bp, Homo sapien
cctgggtccaggagtacgtgtatga

SEQ ID NO: 2474046 - DNA, 25 bp, Homo sapien
caaaagaggcaagcaagtctgcgct

SEQ ID NO: 2474047 - DNA, 25 bp, Homo sapien
cataacctctttggtggaccttgat

SEQ ID NO: 2474048 - DNA, 25 bp, Homo sapien
taactcgtgtagaatcataacctct

SEQ ID NO: 2474049 - DNA, 25 bp, Homo sapien
tctttggtggaccttgatttttcca

SEQ ID NO: 2474050 - DNA, 25 bp, Homo sapien
ctagagaataactcgtgtagaatca

SEQ ID NO: 2474051 - DNA, 25 bp, Homo sapien
ttttcttatcgaagagcccatcctc

SEQ ID NO: 2474052 - DNA, 25 bp, Homo sapien
tcttatcgaagagcccatcctcata

SEQ ID NO: 2474053 - DNA, 25 bp, Homo sapien
gagctgcaaagcaagcaaactgaat

SEQ ID NO: 2474054 - DNA, 25 bp, Homo sapien
ctacatgagctgcaaagcaagcaaa

SEQ ID NO: 2474055 - DNA, 25 bp, Homo sapien
aaactgacttacatcctcttcagat

SEQ ID NO: 2474056 - DNA, 25 bp, Homo sapien
gtctgacgtgtaaacttggaatcaa

SEQ ID NO: 2474057 - DNA, 25 bp, Homo sapien
tcgacaggtgtctgacgtgtaaact

SEQ ID NO: 2474058 - DNA, 25 bp, Homo sapien
catctgggctgtcgacaggtgtctg

SEQ ID NO: 2474059 - DNA, 25 bp, Homo sapien
atttaatgagtaaacacttttatag

SEQ ID NO: 2474060 - DNA, 25 bp, Homo sapien
tatttaatgagtaaacacttttata

SEQ ID NO: 2474061 - DNA, 25 bp, Homo sapien
taggaagtgacaaggctagttgcac

SEQ ID NO: 2474062 - DNA, 25 bp, Homo sapien
tcttttgaggcattactgctggaac

SEQ ID NO: 2474063 - DNA, 25 bp, Homo sapien
gagatgtatattaggattatcccca

SEQ ID NO: 2474064 - DNA, 25 bp, Homo sapien
taatttgtaatataaccctgagatg

SEQ ID NO: 2474065 - DNA, 25 bp, Homo sapien
agggtcacatccgtctcccagaagc

SEQ ID NO: 2474066 - DNA, 25 bp, Homo sapien
ccaggtctaacagtcaggttcctcc

SEQ ID NO: 2474067 - DNA, 25 bp, Homo sapien
tccatcctggcattacactggcctg

SEQ ID NO: 2474068 - DNA, 25 bp, Homo sapien
ttcctcctccgtgcattaacaatgg

SEQ ID NO: 2474069 - DNA, 25 bp, Homo sapien
tgctgggtgcagcgaaagccgatct

SEQ ID NO: 2474070 - DNA, 25 bp, Homo sapien
ctgggtgcagcgaaagccgatctca

SEQ ID NO: 2474071 - DNA, 25 bp, Homo sapien
agtgctgggtgcagcgaaagccgat

SEQ ID NO: 2474072 - DNA, 25 bp, Homo sapien
tgggtgcagcgaaagccgatctcac

SEQ ID NO: 2474073 - DNA, 25 bp, Homo sapien
tgggatatggcacggacccagcagc

SEQ ID NO: 2474074 - DNA, 25 bp, Homo sapien
cctgggatatggcacggacccagca

SEQ ID NO: 2474075 - DNA, 25 bp, Homo sapien
tcctgggatatggcacggacccagc

SEQ ID NO: 2474076 - DNA, 25 bp, Homo sapien
ggatatggcacggacccagcagctc

SEQ ID NO: 2474077 - DNA, 25 bp, Homo sapien
ggtgtggaagaacgaggtgcccgtg

SEQ ID NO: 2474078 - DNA, 25 bp, Homo sapien
tgtggaagaacgaggtgcccgtggc

SEQ ID NO: 2474079 - DNA, 25 bp, Homo sapien
ggcacaggcctggatgccgacgacc

SEQ ID NO: 2474080 - DNA, 25 bp, Homo sapien
tggaagaacgaggtgcccgtggcgg

SEQ ID NO: 2474081 - DNA, 25 bp, Homo sapien
acagggctggacctgtgttggatcc

SEQ ID NO: 2474082 - DNA, 25 bp, Homo sapien
tcatggagctcttagggtctgcggc

SEQ ID NO: 2474083 - DNA, 25 bp, Homo sapien
atggtccccatcctcgtcgtcgtga

SEQ ID NO: 2474084 - DNA, 25 bp, Homo sapien
tcaggctccgaagatatggtcccca

SEQ ID NO: 2474085 - DNA, 25 bp, Homo sapien
ctgggctccgctctcacgggacaca

SEQ ID NO: 2474086 - DNA, 25 bp, Homo sapien
cacatgtgcagacacgtagtggaag

SEQ ID NO: 2474087 - DNA, 25 bp, Homo sapien
cacgtagtggaagcatccactcgct

SEQ ID NO: 2474088 - DNA, 25 bp, Homo sapien
ggtgtgcaaggacaatgcaagtgca

SEQ ID NO: 2474089 - DNA, 25 bp, Homo sapien
gacacgagcaaactccggcgagaaa

SEQ ID NO: 2474090 - DNA, 25 bp, Homo sapien
tccggcgagaaagggcaacggtcaa

SEQ ID NO: 2474091 - DNA, 25 bp, Homo sapien
cgagaaagggcaacggtcaaagatt

SEQ ID NO: 2474092 - DNA, 25 bp, Homo sapien
gcaaactccggcgagaaagggcaac

SEQ ID NO: 2474093 - DNA, 25 bp, Homo sapien
acagctggctcgagtggtgcccacg

SEQ ID NO: 2474094 - DNA, 25 bp, Homo sapien
tcccagcatcctcaaaatgaggggt

SEQ ID NO: 2474095 - DNA, 25 bp, Homo sapien
tgccgtgctctcctgagtgggcgcc

SEQ ID NO: 2474096 - DNA, 25 bp, Homo sapien
gcaggtcacagctggctcgagtggt

SEQ ID NO: 2474097 - DNA, 25 bp, Homo sapien
cggggaggacgtggccagggctcca

SEQ ID NO: 2474098 - DNA, 25 bp, Homo sapien
gacgtggccagggctccaaaaggcc

SEQ ID NO: 2474099 - DNA, 25 bp, Homo sapien
aggacgtggccagggctccaaaagg

SEQ ID NO: 2474100 - DNA, 25 bp, Homo sapien
ggaggacgtggccagggctccaaaa

SEQ ID NO: 2474101 - DNA, 25 bp, Homo sapien
cctggaatttggcatcccctaggcc

SEQ ID NO: 2474102 - DNA, 25 bp, Homo sapien
ccctggaatttggcatcccctaggc

SEQ ID NO: 2474103 - DNA, 25 bp, Homo sapien
catacacgtgtgcacgcacgtgcac

SEQ ID NO: 2474104 - DNA, 25 bp, Homo sapien
cgcacgtgcacaaacacgttgcagg

SEQ ID NO: 2474105 - DNA, 25 bp, Homo sapien
ccacatacacgtgtgcacgcacgtg

SEQ ID NO: 2474106 - DNA, 25 bp, Homo sapien
gcacgcacgtgcacaaacacgttgc

SEQ ID NO: 2474107 - DNA, 25 bp, Homo sapien
gcccgttctacactgcccgtgtaga

SEQ ID NO: 2474108 - DNA, 25 bp, Homo sapien
tagacgattggctctttcgtctcca

SEQ ID NO: 2474109 - DNA, 25 bp, Homo sapien
tccccattcgacagatgagacgtct

SEQ ID NO: 2474110 - DNA, 25 bp, Homo sapien
cccaaatgtccccattcgacagatg

SEQ ID NO: 2474111 - DNA, 25 bp, Homo sapien
ggtactgcttgaactgtaactatgc

SEQ ID NO: 2474112 - DNA, 25 bp, Homo sapien
cttttatgccctacggtgagaagga

SEQ ID NO: 2474113 - DNA, 25 bp, Homo sapien
tatgggacctgtcagtataggtact

SEQ ID NO: 2474114 - DNA, 25 bp, Homo sapien
tgtaggccttctttgaactgtgaac

SEQ ID NO: 2474115 - DNA, 25 bp, Homo sapien
cctcaggacttgagactccagttgg

SEQ ID NO: 2474116 - DNA, 25 bp, Homo sapien
ccaagtgtgctttgagagtagggtg

SEQ ID NO: 2474117 - DNA, 25 bp, Homo sapien
ctgcctcaggacttgagactccagt

SEQ ID NO: 2474118 - DNA, 25 bp, Homo sapien
caagtgtgctttgagagtagggtgg

SEQ ID NO: 2474119 - DNA, 25 bp, Homo sapien
agtgcagctcgagagagattcagag

SEQ ID NO: 2474120 - DNA, 25 bp, Homo sapien
gattcagagatggaacacaccagac

SEQ ID NO: 2474121 - DNA, 25 bp, Homo sapien
ccccagccccacgaccatcgttctg

SEQ ID NO: 2474122 - DNA, 25 bp, Homo sapien
cagccccacgaccatcgttctgaat

SEQ ID NO: 2474123 - DNA, 25 bp, Homo sapien
agtgcagctcgagagagattcagag

SEQ ID NO: 2474124 - DNA, 25 bp, Homo sapien
gattcagagatggaacacaccagac

SEQ ID NO: 2474125 - DNA, 25 bp, Homo sapien
ccccagccccacgaccatcgttctg

SEQ ID NO: 2474126 - DNA, 25 bp, Homo sapien
cagccccacgaccatcgttctgaat

SEQ ID NO: 2474127 - DNA, 25 bp, Homo sapien
gcctgaagtggtgcaggtgcctggt

SEQ ID NO: 2474128 - DNA, 25 bp, Homo sapien
tgcctggtcacactggaggtgtaga

SEQ ID NO: 2474129 - DNA, 25 bp, Homo sapien
caggtgcctggtcacactggaggtg

SEQ ID NO: 2474130 - DNA, 25 bp, Homo sapien
ctgaagtggtgcaggtgcctggtca

SEQ ID NO: 2474131 - DNA, 25 bp, Homo sapien
ccacagtccccgtcttctcttcact

SEQ ID NO: 2474132 - DNA, 25 bp, Homo sapien
agtccccgtcttctcttcactgatg

SEQ ID NO: 2474133 - DNA, 25 bp, Homo sapien
ccttccacagtccccgtcttctctt

SEQ ID NO: 2474134 - DNA, 25 bp, Homo sapien
gtcttctcttcactgatgcacacag

SEQ ID NO: 2474135 - DNA, 25 bp, Homo sapien
taccgaagctgtggacgttctcgcc

SEQ ID NO: 2474136 - DNA, 25 bp, Homo sapien
tgccctggccgattggaaatgctgt

SEQ ID NO: 2474137 - DNA, 25 bp, Homo sapien
aaaagcagggtcttcgagccggtgc

SEQ ID NO: 2474138 - DNA, 25 bp, Homo sapien
tgagcagactctatcggcagaaaag

SEQ ID NO: 2474139 - DNA, 25 bp, Homo sapien
ccgtgtcttaaaacgccttggtgtg

SEQ ID NO: 2474140 - DNA, 25 bp, Homo sapien
taaaacgccttggtgtgccgtctga

SEQ ID NO: 2474141 - DNA, 25 bp, Homo sapien
tggtgtgccgtctgatactgttctc

SEQ ID NO: 2474142 - DNA, 25 bp, Homo sapien
tactgttctctaaagacgttaggag

SEQ ID NO: 2474143 - DNA, 25 bp, Homo sapien
tcatgacggaagttttggagccaaa

SEQ ID NO: 2474144 - DNA, 25 bp, Homo sapien
gaataaagacgaggatccgaccagc

SEQ ID NO: 2474145 - DNA, 25 bp, Homo sapien
cagagttgttattctcatgacggaa

SEQ ID NO: 2474146 - DNA, 25 bp, Homo sapien
gagtctgtctttcgccaggtccggt

SEQ ID NO: 2474147 - DNA, 25 bp, Homo sapien
ggtgtgcaccagctcagatctgagc

SEQ ID NO: 2474148 - DNA, 25 bp, Homo sapien
gtggtcagcacacctttgccagcag

SEQ ID NO: 2474149 - DNA, 25 bp, Homo sapien
cggcagggaatctgctcctggaacc

SEQ ID NO: 2474150 - DNA, 25 bp, Homo sapien
gggcggcagggaatctgctcctgga

SEQ ID NO: 2474151 - DNA, 25 bp, Homo sapien
gggcagatccacatgtcccccgagg

SEQ ID NO: 2474152 - DNA, 25 bp, Homo sapien
gagcccacggccgtgaacatgcaca

SEQ ID NO: 2474153 - DNA, 25 bp, Homo sapien
aggagcccacggccgtgaacatgca

SEQ ID NO: 2474154 - DNA, 25 bp, Homo sapien
gcagatccacatgtcccccgaggaa

SEQ ID NO: 2474155 - DNA, 25 bp, Homo sapien
tagggggtgcagaactcacttctaa

SEQ ID NO: 2474156 - DNA, 25 bp, Homo sapien
ctagggggtgcagaactcacttcta

SEQ ID NO: 2474157 - DNA, 25 bp, Homo sapien
gtcggattgcaacgcagcctgcatt

SEQ ID NO: 2474158 - DNA, 25 bp, Homo sapien
ggtgtaactcatccccggagagcaa

SEQ ID NO: 2474159 - DNA, 25 bp, Homo sapien
attgtcctcgctgaacgcctggtcc

SEQ ID NO: 2474160 - DNA, 25 bp, Homo sapien
gagcaaccagaaaggccgtcggatt

SEQ ID NO: 2474161 - DNA, 25 bp, Homo sapien
cagggcggcccccatcgtcccccag

SEQ ID NO: 2474162 - DNA, 25 bp, Homo sapien
gaagctgagagcaaccagagcccac

SEQ ID NO: 2474163 - DNA, 25 bp, Homo sapien
gctgatggccatgagagagaagctg

SEQ ID NO: 2474164 - DNA, 25 bp, Homo sapien
agagagaagctgagagcaaccagag

SEQ ID NO: 2474165 - DNA, 25 bp, Homo sapien
ggctgatggccatgagagagaagct

SEQ ID NO: 2474166 - DNA, 25 bp, Homo sapien
gactcggtttccagctcgtcacagg

SEQ ID NO: 2474167 - DNA, 25 bp, Homo sapien
tggtccgtgttcacatgtgtctctg

SEQ ID NO: 2474168 - DNA, 25 bp, Homo sapien
gcactggacaccgtgtggctgagcc

SEQ ID NO: 2474169 - DNA, 25 bp, Homo sapien
tatcctgtgagttgagcttcctctg

SEQ ID NO: 2474170 - DNA, 25 bp, Homo sapien
ggtcgtggcagtgcggctatggcag

SEQ ID NO: 2474171 - DNA, 25 bp, Homo sapien
gaggtcgtggcagtgcggctatggc

SEQ ID NO: 2474172 - DNA, 25 bp, Homo sapien
gcagtgcggctatggcaggggttct

SEQ ID NO: 2474173 - DNA, 25 bp, Homo sapien
tgcggctatggcaggggttctgagg

SEQ ID NO: 2474174 - DNA, 25 bp, Homo sapien
cacgggggacgccagggaacgtgag

SEQ ID NO: 2474175 - DNA, 25 bp, Homo sapien
ggaacgtgaggaatccggagtcaac

SEQ ID NO: 2474176 - DNA, 25 bp, Homo sapien
tgaggaatccggagtcaacactggg

SEQ ID NO: 2474177 - DNA, 25 bp, Homo sapien
aacgtgaggaatccggagtcaacac

SEQ ID NO: 2474178 - DNA, 25 bp, Homo sapien
ctagccatcagtttgatcagaggca

SEQ ID NO: 2474179 - DNA, 25 bp, Homo sapien
gccatcagtttgatcagaggcaaga

SEQ ID NO: 2474180 - DNA, 25 bp, Homo sapien
ccatcagtttgatcagaggcaagat

SEQ ID NO: 2474181 - DNA, 25 bp, Homo sapien
gatcagaggcaagatgaaaaatatg

SEQ ID NO: 2474182 - DNA, 25 bp, Homo sapien
tcttgatggtagataactggtctct

SEQ ID NO: 2474183 - DNA, 25 bp, Homo sapien
acattcttgatggtagataactggt

SEQ ID NO: 2474184 - DNA, 25 bp, Homo sapien
tgatggtagataactggtctctggc

SEQ ID NO: 2474185 - DNA, 25 bp, Homo sapien
gatggtagataactggtctctggcc

SEQ ID NO: 2474186 - DNA, 25 bp, Homo sapien
tccggatgtggatagaaggagacac

SEQ ID NO: 2474187 - DNA, 25 bp, Homo sapien
ccacctcagtgtcgctccggatgtg

SEQ ID NO: 2474188 - DNA, 25 bp, Homo sapien
ggctactcttgagtggtccccaggc

SEQ ID NO: 2474189 - DNA, 25 bp, Homo sapien
aggtgcttccttcgtcctgaccaca

SEQ ID NO: 2474190 - DNA, 25 bp, Homo sapien
ctctgagcacggctcttcctgtact

SEQ ID NO: 2474191 - DNA, 25 bp, Homo sapien
gagggcatttgtgggagaactggaa

SEQ ID NO: 2474192 - DNA, 25 bp, Homo sapien
tgagcagagggcatttgtgggagaa

SEQ ID NO: 2474193 - DNA, 25 bp, Homo sapien
tgttgctggcacctgccgtgccttg

SEQ ID NO: 2474194 - DNA, 25 bp, Homo sapien
ttccagacccgggcgtgggcgagag

SEQ ID NO: 2474195 - DNA, 25 bp, Homo sapien
cttccagacccgggcgtgggcgaga

SEQ ID NO: 2474196 - DNA, 25 bp, Homo sapien
cagacccgggcgtgggcgagagggg

SEQ ID NO: 2474197 - DNA, 25 bp, Homo sapien
ccagacccgggcgtgggcgagaggg

SEQ ID NO: 2474198 - DNA, 25 bp, Homo sapien
ggtgatggccctgcacgaggtccgt

SEQ ID NO: 2474199 - DNA, 25 bp, Homo sapien
gccctgcacgaggtccgtgtgccgt

SEQ ID NO: 2474200 - DNA, 25 bp, Homo sapien
atggccctgcacgaggtccgtgtgc

SEQ ID NO: 2474201 - DNA, 25 bp, Homo sapien
tgcacgaggtccgtgtgccgtctgc

SEQ ID NO: 2474202 - DNA, 25 bp, Homo sapien
aggttgagtcccgcagcctagagac

SEQ ID NO: 2474203 - DNA, 25 bp, Homo sapien
ttgagtcccgcagcctagagactgg

SEQ ID NO: 2474204 - DNA, 25 bp, Homo sapien
ctgaaggttgagtcccgcagcctag

SEQ ID NO: 2474205 - DNA, 25 bp, Homo sapien
tgaaggttgagtcccgcagcctaga

SEQ ID NO: 2474206 - DNA, 25 bp, Homo sapien
actgatgacagtggacgggtggccg

SEQ ID NO: 2474207 - DNA, 25 bp, Homo sapien
tggaacccaggtgactctgggagat

SEQ ID NO: 2474208 - DNA, 25 bp, Homo sapien
tggccgccggttcccaacgcatggt

SEQ ID NO: 2474209 - DNA, 25 bp, Homo sapien
caacgcatggttgggcctggaaccc

SEQ ID NO: 2474210 - DNA, 25 bp, Homo sapien
tgtgtcggagactctccgagtggcc

SEQ ID NO: 2474211 - DNA, 25 bp, Homo sapien
gagactctccgagtggccagcacgg

SEQ ID NO: 2474212 - DNA, 25 bp, Homo sapien
cagtgtgtgtcggagactctccgag

SEQ ID NO: 2474213 - DNA, 25 bp, Homo sapien
gcagggagctcataggcttggccct

SEQ ID NO: 2474214 - DNA, 25 bp, Homo sapien
tgggccacgctgggggcaccgccgg

SEQ ID NO: 2474215 - DNA, 25 bp, Homo sapien
catcttgggccacgctgggggcacc

SEQ ID NO: 2474216 - DNA, 25 bp, Homo sapien
ggccacgctgggggcaccgccggac

SEQ ID NO: 2474217 - DNA, 25 bp, Homo sapien
cttgggccacgctgggggcaccgcc

SEQ ID NO: 2474218 - DNA, 25 bp, Homo sapien
ggctctgctccgctcccaaatggcg

SEQ ID NO: 2474219 - DNA, 25 bp, Homo sapien
gagcaccggccgggctctgctccgc

SEQ ID NO: 2474220 - DNA, 25 bp, Homo sapien
tgctccgctcccaaatggcggcttg

SEQ ID NO: 2474221 - DNA, 25 bp, Homo sapien
tgtggctcgcaacatcttgctgcct

SEQ ID NO: 2474222 - DNA, 25 bp, Homo sapien
gcaagctcggagcacaacgtgagga

SEQ ID NO: 2474223 - DNA, 25 bp, Homo sapien
cagagcacagagctcatgactcggg

SEQ ID NO: 2474224 - DNA, 25 bp, Homo sapien
gaccacttgatcagggttcggagac

SEQ ID NO: 2474225 - DNA, 25 bp, Homo sapien
ccaggacccagtgccgtgagggctt

SEQ ID NO: 2474226 - DNA, 25 bp, Homo sapien
cttgccggcctctgcagcacccgag

SEQ ID NO: 2474227 - DNA, 25 bp, Homo sapien
gaccaggcaccgtcccctgagcaca

SEQ ID NO: 2474228 - DNA, 25 bp, Homo sapien
agcacccgagccaccaaagctgccg

SEQ ID NO: 2474229 - DNA, 25 bp, Homo sapien
gaagctcggagccgaagcccttgcc

SEQ ID NO: 2474230 - DNA, 25 bp, Homo sapien
cttcaaggagggtcgcggggtcctg

SEQ ID NO: 2474231 - DNA, 25 bp, Homo sapien
ctgccccttcaaggagggtcgcggg

SEQ ID NO: 2474232 - DNA, 25 bp, Homo sapien
agatgtgtgtgtggagctggccacg

SEQ ID NO: 2474233 - DNA, 25 bp, Homo sapien
ccaagtgctgtgaccgcaggagcag

SEQ ID NO: 2474234 - DNA, 25 bp, Homo sapien
cacctccaagtgctgtgaccgcagg

SEQ ID NO: 2474235 - DNA, 25 bp, Homo sapien
ggcgtctgcacgcaggccagcacct

SEQ ID NO: 2474236 - DNA, 25 bp, Homo sapien
ctccaagtgctgtgaccgcaggagc

SEQ ID NO: 2474237 - DNA, 25 bp, Homo sapien
caggcttcagatcctgccctctgtg

SEQ ID NO: 2474238 - DNA, 25 bp, Homo sapien
tgccctctgtgaacagtcaaaaaga

SEQ ID NO: 2474239 - DNA, 25 bp, Homo sapien
gccctctgtgaacagtcaaaaagaa

SEQ ID NO: 2474240 - DNA, 25 bp, Homo sapien
ctctgcaggcttcagatcctgccct

SEQ ID NO: 2474241 - DNA, 25 bp, Homo sapien
gagatagttccctccagcaggaaaa

SEQ ID NO: 2474242 - DNA, 25 bp, Homo sapien
aagtctgcccctgttgctcagagat

SEQ ID NO: 2474243 - DNA, 25 bp, Homo sapien
cctgttgctcagagatagttccctc

SEQ ID NO: 2474244 - DNA, 25 bp, Homo sapien
aacctctttgaggtgagttacggct

SEQ ID NO: 2474245 - DNA, 25 bp, Homo sapien
gctctgagcaattaaagggcagcca

SEQ ID NO: 2474246 - DNA, 25 bp, Homo sapien
tacgcgccaggttgctgaacagctc

SEQ ID NO: 2474247 - DNA, 25 bp, Homo sapien
caaccaacagccacttatgtaccag

SEQ ID NO: 2474248 - DNA, 25 bp, Homo sapien
ttatgtaccagctacgcgccaggtt

SEQ ID NO: 2474249 - DNA, 25 bp, Homo sapien
ggcatcccgaagtctttgtggagac

SEQ ID NO: 2474250 - DNA, 25 bp, Homo sapien
ggggcatcccgaagtctttgtggag

SEQ ID NO: 2474251 - DNA, 25 bp, Homo sapien
gggcatcccgaagtctttgtggaga

SEQ ID NO: 2474252 - DNA, 25 bp, Homo sapien
cagagatcccggtagacccgggagg

SEQ ID NO: 2474253 - DNA, 25 bp, Homo sapien
aagaggcaagaagaagcgggggtgg

SEQ ID NO: 2474254 - DNA, 25 bp, Homo sapien
cgccaccctcctctcttctagaaga

SEQ ID NO: 2474255 - DNA, 25 bp, Homo sapien
cctctcttctagaagaggcaagaag

SEQ ID NO: 2474256 - DNA, 25 bp, Homo sapien
ttctagaagaggcaagaagaagcgg

SEQ ID NO: 2474257 - DNA, 25 bp, Homo sapien
tctgtggtcccggaagcgaaggtgg

SEQ ID NO: 2474258 - DNA, 25 bp, Homo sapien
gtgggagactccgtggcgtgcaggc

SEQ ID NO: 2474259 - DNA, 25 bp, Homo sapien
cagatctgtccccacaagaggcctc

SEQ ID NO: 2474260 - DNA, 25 bp, Homo sapien
agactccgtggcgtgcaggctccag

SEQ ID NO: 2474261 - DNA, 25 bp, Homo sapien
gtctggggagggcaatgtccactgc

SEQ ID NO: 2474262 - DNA, 25 bp, Homo sapien
gagctgacaactcacaggggtgtct

SEQ ID NO: 2474263 - DNA, 25 bp, Homo sapien
gcaggcagagctgacaactcacagg

SEQ ID NO: 2474264 - DNA, 25 bp, Homo sapien
gctgacaactcacaggggtgtctgg

SEQ ID NO: 2474265 - DNA, 25 bp, Homo sapien
aacagaggaggcgactctcagagcc

SEQ ID NO: 2474266 - DNA, 25 bp, Homo sapien
catctgggatgtgggcacccttggc

SEQ ID NO: 2474267 - DNA, 25 bp, Homo sapien
tgatggccgcctgttcacatccgag

SEQ ID NO: 2474268 - DNA, 25 bp, Homo sapien
cacatccgaggcaactaagaacaga

SEQ ID NO: 2474269 - DNA, 25 bp, Homo sapien
aggtgtggaatacaggcccatcccc

SEQ ID NO: 2474270 - DNA, 25 bp, Homo sapien
ggaaaagcccagagcgccacgctga

SEQ ID NO: 2474271 - DNA, 25 bp, Homo sapien
tggtggacatacacccccaggtgtg

SEQ ID NO: 2474272 - DNA, 25 bp, Homo sapien
ccagggccgacagtggcagcttctg

SEQ ID NO: 2474273 - DNA, 25 bp, Homo sapien
cagaagccggagttcctggctctgt

SEQ ID NO: 2474274 - DNA, 25 bp, Homo sapien
tgatggtcctaacacacttgcccaa

SEQ ID NO: 2474275 - DNA, 25 bp, Homo sapien
gagcctgcgtcccttgagggctgcc

SEQ ID NO: 2474276 - DNA, 25 bp, Homo sapien
aacctgctccgtggaaccctgaggc

SEQ ID NO: 2474277 - DNA, 25 bp, Homo sapien
tgaacacaaggaattcttcctagag

SEQ ID NO: 2474278 - DNA, 25 bp, Homo sapien
aacacaaggaattcttcctagagca

SEQ ID NO: 2474279 - DNA, 25 bp, Homo sapien
actgaacacaaggaattcttcctag

SEQ ID NO: 2474280 - DNA, 25 bp, Homo sapien
cactgaacacaaggaattcttccta

SEQ ID NO: 2474281 - DNA, 25 bp, Homo sapien
gccgaaatgtgttttggcttaggaa

SEQ ID NO: 2474282 - DNA, 25 bp, Homo sapien
tacactctgatgttgctatcgtgcg

SEQ ID NO: 2474283 - DNA, 25 bp, Homo sapien
aatgtgttttggcttaggaatctgc

SEQ ID NO: 2474284 - DNA, 25 bp, Homo sapien
tatcgtgcgcggacaaaaaagccga

SEQ ID NO: 2474285 - DNA, 25 bp, Homo sapien
aacagatgacttgatggaccttcca

SEQ ID NO: 2474286 - DNA, 25 bp, Homo sapien
tgttatcattggtccacccagaggg

SEQ ID NO: 2474287 - DNA, 25 bp, Homo sapien
tccctgggaaaagcctagtgtactg

SEQ ID NO: 2474288 - DNA, 25 bp, Homo sapien
taaaaatgttaccagcatgggcggc

SEQ ID NO: 2474289 - DNA, 25 bp, Homo sapien
tccctgacctagaaagagctcggtg

SEQ ID NO: 2474290 - DNA, 25 bp, Homo sapien
ggttgcagcttgacccaaccggaca

SEQ ID NO: 2474291 - DNA, 25 bp, Homo sapien
tgctttccgcgtggctgaggagacc

SEQ ID NO: 2474292 - DNA, 25 bp, Homo sapien
gagctcggtggacgctcaattccag

SEQ ID NO: 2474293 - DNA, 25 bp, Homo sapien
caaagatgactaagatcaggccctg

SEQ ID NO: 2474294 - DNA, 25 bp, Homo sapien
aagatgactaagatcaggccctgtc

SEQ ID NO: 2474295 - DNA, 25 bp, Homo sapien
agcaccgtgcatactaccagaaggg

SEQ ID NO: 2474296 - DNA, 25 bp, Homo sapien
actgctgcaaagcaccgtgcatact

SEQ ID NO: 2474297 - DNA, 25 bp, Homo sapien
ccccaacgagcacttaatctttctg

SEQ ID NO: 2474298 - DNA, 25 bp, Homo sapien
cccaacgagcacttaatctttctga

SEQ ID NO: 2474299 - DNA, 25 bp, Homo sapien
gagcagatgcgaggggagagagatg

SEQ ID NO: 2474300 - DNA, 25 bp, Homo sapien
ccaacgagcacttaatctttctgag

SEQ ID NO: 2474301 - DNA, 25 bp, Homo sapien
aaagccaagaggccgggcgccgcct

SEQ ID NO: 2474302 - DNA, 25 bp, Homo sapien
agaaagccaagaggccgggcgccgc

SEQ ID NO: 2474303 - DNA, 25 bp, Homo sapien
aagccaagaggccgggcgccgcctt

SEQ ID NO: 2474304 - DNA, 25 bp, Homo sapien
ctagaaagccaagaggccgggcgcc

SEQ ID NO: 2474305 - DNA, 25 bp, Homo sapien
ctggtgagggccgtggcccttccct

SEQ ID NO: 2474306 - DNA, 25 bp, Homo sapien
ctaagaagaaaacgagtccgcagag

SEQ ID NO: 2474307 - DNA, 25 bp, Homo sapien
aagtttgcacgtggccccaacacac

SEQ ID NO: 2474308 - DNA, 25 bp, Homo sapien
ttccctgaagtttgcacgtggcccc

SEQ ID NO: 2474309 - DNA, 25 bp, Homo sapien
cggccccgagctcgaggttaaacag

SEQ ID NO: 2474310 - DNA, 25 bp, Homo sapien
ctgcggagaagtcgtcctcgcggtc

SEQ ID NO: 2474311 - DNA, 25 bp, Homo sapien
gtcgctgtctctctccggcgagctg

SEQ ID NO: 2474312 - DNA, 25 bp, Homo sapien
gtcccgctcgggcacccgcaggaac

SEQ ID NO: 2474313 - DNA, 25 bp, Homo sapien
tcgcggtcggagctgtgccggctgc

SEQ ID NO: 2474314 - DNA, 25 bp, Homo sapien
tgcggcgccgccacgggggcaggtg

SEQ ID NO: 2474315 - DNA, 25 bp, Homo sapien
ctgcggcgccgccacgggggcaggt

SEQ ID NO: 2474316 - DNA, 25 bp, Homo sapien
gtctcctccgcggcgaggggcgagc

SEQ ID NO: 2474317 - DNA, 25 bp, Homo sapien
ctcggcctcccgctgctccaggtcg

SEQ ID NO: 2474318 - DNA, 25 bp, Homo sapien
gcgagcccgggcggcccttggcctc

SEQ ID NO: 2474319 - DNA, 25 bp, Homo sapien
ctcgcgcccgggggtctcctccgcg

SEQ ID NO: 2474320 - DNA, 25 bp, Homo sapien
gaacttctcgttgaaatccaccatc

SEQ ID NO: 2474321 - DNA, 25 bp, Homo sapien
atctcgaagtcgtggtcgccgccgt

SEQ ID NO: 2474322 - DNA, 25 bp, Homo sapien
tgaaatccaccatctcgaagtcgtg

SEQ ID NO: 2474323 - DNA, 25 bp, Homo sapien
tgaggatgaacttctcgttgaaatc

SEQ ID NO: 2474324 - DNA, 25 bp, Homo sapien
ccggtggacggcgtcggcccagctc

SEQ ID NO: 2474325 - DNA, 25 bp, Homo sapien
ccgccagcgccgctcgaacgcgcgg

SEQ ID NO: 2474326 - DNA, 25 bp, Homo sapien
gctcgaacgcgcgggggtcccacat

SEQ ID NO: 2474327 - DNA, 25 bp, Homo sapien
tcccgcaccgactccagcctcggga

SEQ ID NO: 2474328 - DNA, 25 bp, Homo sapien
ccaggttgagtctgcggcgctccag

SEQ ID NO: 2474329 - DNA, 25 bp, Homo sapien
taaactctgcatatgagcaggaatc

SEQ ID NO: 2474330 - DNA, 25 bp, Homo sapien
ctagttctgacctatggcatgggca

SEQ ID NO: 2474331 - DNA, 25 bp, Homo sapien
taaggtacaaagaggccaagagact

SEQ ID NO: 2474332 - DNA, 25 bp, Homo sapien
tgcaatttactaacagaactgagct

SEQ ID NO: 2474333 - DNA, 25 bp, Homo sapien
catgagatgacttatgctcttttaa

SEQ ID NO: 2474334 - DNA, 25 bp, Homo sapien
taagtgtaagttctactcttaagta

SEQ ID NO: 2474335 - DNA, 25 bp, Homo sapien
gcagaggaagagaaccgtgttgaaa

SEQ ID NO: 2474336 - DNA, 25 bp, Homo sapien
gaactgccggcattaatatatctgt

SEQ ID NO: 2474337 - DNA, 25 bp, Homo sapien
ggtattgggcttcatatcatgaatg

SEQ ID NO: 2474338 - DNA, 25 bp, Homo sapien
aagccaaaattgaagtagtcacatg

SEQ ID NO: 2474339 - DNA, 25 bp, Homo sapien
aattttggtattgggcttcatatca

SEQ ID NO: 2474340 - DNA, 25 bp, Homo sapien
caaaattgaagtagtcacatgtcct

SEQ ID NO: 2474341 - DNA, 25 bp, Homo sapien
cttacccagcctcacttagcataat

SEQ ID NO: 2474342 - DNA, 25 bp, Homo sapien
tgttgttgcacctccatatctgcag

SEQ ID NO: 2474343 - DNA, 25 bp, Homo sapien
taacaatggatggagaatatttggg

SEQ ID NO: 2474344 - DNA, 25 bp, Homo sapien
tttgagattatgctaccatccatgt

SEQ ID NO: 2474345 - DNA, 25 bp, Homo sapien
aagtaagtagaccagctcatttgtc

SEQ ID NO: 2474346 - DNA, 25 bp, Homo sapien
acaaagtaagtagaccagctcattt

SEQ ID NO: 2474347 - DNA, 25 bp, Homo sapien
atacaaagtaagtagaccagctcat

SEQ ID NO: 2474348 - DNA, 25 bp, Homo sapien
tttatatacaaagtaagtagaccag

SEQ ID NO: 2474349 - DNA, 25 bp, Homo sapien
gacgagtccaacttcagcgatgcac

SEQ ID NO: 2474350 - DNA, 25 bp, Homo sapien
aagaatcatgaactcgaggcggcgc

SEQ ID NO: 2474351 - DNA, 25 bp, Homo sapien
gaagcagttctacaaggcgagccaa

SEQ ID NO: 2474352 - DNA, 25 bp, Homo sapien
tgcctgatccgccatgggaaggagc

SEQ ID NO: 2474353 - DNA, 25 bp, Homo sapien
gatgctcgtttacactagcggctga

SEQ ID NO: 2474354 - DNA, 25 bp, Homo sapien
gaactgatacgagggcatgctggac

SEQ ID NO: 2474355 - DNA, 25 bp, Homo sapien
gaaacactaacgttcctccagggca

SEQ ID NO: 2474356 - DNA, 25 bp, Homo sapien
tttgacctcggaaagcctgagcagt

SEQ ID NO: 2474357 - DNA, 25 bp, Homo sapien
ctattggacccaaaggaatactagt

SEQ ID NO: 2474358 - DNA, 25 bp, Homo sapien
gaagatcagagacctctattggacc

SEQ ID NO: 2474359 - DNA, 25 bp, Homo sapien
taggttacggttctgggtacattca

SEQ ID NO: 2474360 - DNA, 25 bp, Homo sapien
cacagtcttaatgtggccctaataa

SEQ ID NO: 2474361 - DNA, 25 bp, Homo sapien
tgcaggtggctcataatgctaagtt

SEQ ID NO: 2474362 - DNA, 25 bp, Homo sapien
tatccttcctgcctcgtgattgcag

SEQ ID NO: 2474363 - DNA, 25 bp, Homo sapien
cacagaatccaatcaaagattaggc

SEQ ID NO: 2474364 - DNA, 25 bp, Homo sapien
tgtttccacatgatgagattcaagg

SEQ ID NO: 2474365 - DNA, 25 bp, Homo sapien
tgctccctacttggtgatttgcccc

SEQ ID NO: 2474366 - DNA, 25 bp, Homo sapien
tttcattaaagaacaactccctctc

SEQ ID NO: 2474367 - DNA, 25 bp, Homo sapien
cacaccctgtgtattgtgctcccta

SEQ ID NO: 2474368 - DNA, 25 bp, Homo sapien
tcgagatttggccaatgcaatctgt

SEQ ID NO: 2474369 - DNA, 25 bp, Homo sapien
taagaaaaggactagggtgggcaca

SEQ ID NO: 2474370 - DNA, 25 bp, Homo sapien
attaataatgcttggctacttatat

SEQ ID NO: 2474371 - DNA, 25 bp, Homo sapien
gcattgagctgactactgagccgga

SEQ ID NO: 2474372 - DNA, 25 bp, Homo sapien
tgaaggctgctaaacgagtcgtaca

SEQ ID NO: 2474373 - DNA, 25 bp, Homo sapien
gactgctccgagacctatgtgcaag

SEQ ID NO: 2474374 - DNA, 25 bp, Homo sapien
aaagaggccgccgttctctgcagtg

SEQ ID NO: 2474375 - DNA, 25 bp, Homo sapien
gtgaattgaaacaaagttaatccca

SEQ ID NO: 2474376 - DNA, 25 bp, Homo sapien
tgtgaattgaaacaaagttaatccc

SEQ ID NO: 2474377 - DNA, 25 bp, Homo sapien
ctgtgaattgaaacaaagttaatcc

SEQ ID NO: 2474378 - DNA, 25 bp, Homo sapien
aactatgtcaacaattggatgtact

SEQ ID NO: 2474379 - DNA, 25 bp, Homo sapien
ctatgtcaacaattggatgtactca

SEQ ID NO: 2474380 - DNA, 25 bp, Homo sapien
aaactatgtcaacaattggatgtac

SEQ ID NO: 2474381 - DNA, 25 bp, Homo sapien
actatgtcaacaattggatgtactc

SEQ ID NO: 2474382 - DNA, 25 bp, Homo sapien
tattagagtcacaaagtatcatcct

SEQ ID NO: 2474383 - DNA, 25 bp, Homo sapien
gtctggtagatttattagagtcaca

SEQ ID NO: 2474384 - DNA, 25 bp, Homo sapien
taggctgattttcctgccactttag

SEQ ID NO: 2474385 - DNA, 25 bp, Homo sapien
gtattaagtgccagctgcatgcaag

SEQ ID NO: 2474386 - DNA, 25 bp, Homo sapien
ggactacaagcaggcagctaattaa

SEQ ID NO: 2474387 - DNA, 25 bp, Homo sapien
tttcctgccactttagaggaaggac

SEQ ID NO: 2474388 - DNA, 25 bp, Homo sapien
ctccggctgagcaacagagggtgat

SEQ ID NO: 2474389 - DNA, 25 bp, Homo sapien
gcactccggctgagcaacagagggt

SEQ ID NO: 2474390 - DNA, 25 bp, Homo sapien
acagagggtgatcttgtctctaagt

SEQ ID NO: 2474391 - DNA, 25 bp, Homo sapien
cggctgagcaacagagggtgatctt

SEQ ID NO: 2474392 - DNA, 25 bp, Homo sapien
ccacattcagcctacctttgcccat

SEQ ID NO: 2474393 - DNA, 25 bp, Homo sapien
atggggctttgtgatgttgccagga

SEQ ID NO: 2474394 - DNA, 25 bp, Homo sapien
accacattcagcctacctttgccca

SEQ ID NO: 2474395 - DNA, 25 bp, Homo sapien
tctgaagatgcttcagtacatcctg

SEQ ID NO: 2474396 - DNA, 25 bp, Homo sapien
gggtcagcctcttcatatttgctat

SEQ ID NO: 2474397 - DNA, 25 bp, Homo sapien
tcagtgtgggtcagcctcttcatat

SEQ ID NO: 2474398 - DNA, 25 bp, Homo sapien
tgcttcagtacatcctgaagattta

SEQ ID NO: 2474399 - DNA, 25 bp, Homo sapien
tgcctgcgagcagtcggctactaca

SEQ ID NO: 2474400 - DNA, 25 bp, Homo sapien
tgtattctggctcttactgtgtcac

SEQ ID NO: 2474401 - DNA, 25 bp, Homo sapien
caactttgggcttagctctgtccac

SEQ ID NO: 2474402 - DNA, 25 bp, Homo sapien
cacagaggccaagcgtttaaaaagc

SEQ ID NO: 2474403 - DNA, 25 bp, Homo sapien
cctgtgtagacgaccaagtatttgg

SEQ ID NO: 2474404 - DNA, 25 bp, Homo sapien
tagacgaccaagtatttggcgttcc

SEQ ID NO: 2474405 - DNA, 25 bp, Homo sapien
agtatttggcgttccggacggcgct

SEQ ID NO: 2474406 - DNA, 25 bp, Homo sapien
attcccgcgcctgtgtagacgacca

SEQ ID NO: 2474407 - DNA, 25 bp, Homo sapien
gaggcaggtgaactgttaactccat

SEQ ID NO: 2474408 - DNA, 25 bp, Homo sapien
tgaggcaggtgaactgttaactcca

SEQ ID NO: 2474409 - DNA, 25 bp, Homo sapien
ggctggcctggcaagttgcagctct

SEQ ID NO: 2474410 - DNA, 25 bp, Homo sapien
tgagcctcgccgctggctcagtggc

SEQ ID NO: 2474411 - DNA, 25 bp, Homo sapien
tcaaaggtctgaggcagtcctgatc

SEQ ID NO: 2474412 - DNA, 25 bp, Homo sapien
tctgaggcagtcctgatccgctgct

SEQ ID NO: 2474413 - DNA, 25 bp, Homo sapien
ggggattcagactctattttgttgc

SEQ ID NO: 2474414 - DNA, 25 bp, Homo sapien
atagttcaatactccccacactgtg

SEQ ID NO: 2474415 - DNA, 25 bp, Homo sapien
gctggggattcagactctattttgt

SEQ ID NO: 2474416 - DNA, 25 bp, Homo sapien
ttgtatagttcaatactccccacac

SEQ ID NO: 2474417 - DNA, 25 bp, Homo sapien
caaagtcttaaacacagagttgccc

SEQ ID NO: 2474418 - DNA, 25 bp, Homo sapien
cattggaatgttgcttggcaataaa

SEQ ID NO: 2474419 - DNA, 25 bp, Homo sapien
gacacaaaggacaacagagagtatg

SEQ ID NO: 2474420 - DNA, 25 bp, Homo sapien
aaaatgtgcagagtaggcaagtcca

SEQ ID NO: 2474421 - DNA, 25 bp, Homo sapien
tagcctcctgcggtattcagggagc

SEQ ID NO: 2474422 - DNA, 25 bp, Homo sapien
gccttgacctgtgcaactgataacg

SEQ ID NO: 2474423 - DNA, 25 bp, Homo sapien
cagtgttgccaagagggtaccagga

SEQ ID NO: 2474424 - DNA, 25 bp, Homo sapien
ttcagggagccattaggcaccttct

SEQ ID NO: 2474425 - DNA, 25 bp, Homo sapien
tctgataaactgtgggaacagatag

SEQ ID NO: 2474426 - DNA, 25 bp, Homo sapien
ctcctgacgtgaggtccctggcgga

SEQ ID NO: 2474427 - DNA, 25 bp, Homo sapien
tgttcttcaccaacaagctccagct

SEQ ID NO: 2474428 - DNA, 25 bp, Homo sapien
gtccagtcgatctgcgacaccatca

SEQ ID NO: 2474429 - DNA, 25 bp, Homo sapien
aacaaaaatatggaagcttgagaga

SEQ ID NO: 2474430 - DNA, 25 bp, Homo sapien
aatatggaagcttgagagaaaagca

SEQ ID NO: 2474431 - DNA, 25 bp, Homo sapien
aaagcaaccttaggcacacattttc

SEQ ID NO: 2474432 - DNA, 25 bp, Homo sapien
gagaaaagcaaccttaggcacacat

SEQ ID NO: 2474433 - DNA, 25 bp, Homo sapien
catctattttatctaggcattggaa

SEQ ID NO: 2474434 - DNA, 25 bp, Homo sapien
tatctaggcattggaaagggtaatg

SEQ ID NO: 2474435 - DNA, 25 bp, Homo sapien
acatctattttatctaggcattgga

SEQ ID NO: 2474436 - DNA, 25 bp, Homo sapien
ttttatctaggcattggaaagggta

SEQ ID NO: 2474437 - DNA, 25 bp, Homo sapien
gagtccagccatgaagctggtgcct

SEQ ID NO: 2474438 - DNA, 25 bp, Homo sapien
tgtccttgtgggcccaggacgccag

SEQ ID NO: 2474439 - DNA, 25 bp, Homo sapien
catgaagctggtgcctgagtgtccc

SEQ ID NO: 2474440 - DNA, 25 bp, Homo sapien
ggcgttgtgtcatctgagtccagcc

SEQ ID NO: 2474441 - DNA, 25 bp, Homo sapien
tggacagcttccgacctggcgctgg

SEQ ID NO: 2474442 - DNA, 25 bp, Homo sapien
gtggacagcttccgacctggcgctg

SEQ ID NO: 2474443 - DNA, 25 bp, Homo sapien
tcccaggactacttcacattgttaa

SEQ ID NO: 2474444 - DNA, 25 bp, Homo sapien
aacttcccaggactacttcacattg

SEQ ID NO: 2474445 - DNA, 25 bp, Homo sapien
ggaccttgctcaaagtacaacttcc

SEQ ID NO: 2474446 - DNA, 25 bp, Homo sapien
ctgcttgcggaccttgctcaaagta

SEQ ID NO: 2474447 - DNA, 25 bp, Homo sapien
ttcaacttcaaaacaagcagtctcc

SEQ ID NO: 2474448 - DNA, 25 bp, Homo sapien
tcaacttcaaaacaagcagtctccc

SEQ ID NO: 2474449 - DNA, 25 bp, Homo sapien
attctggacacaatagggctgagtg

SEQ ID NO: 2474450 - DNA, 25 bp, Homo sapien
cagaaatacgacaagttcccggcgg

SEQ ID NO: 2474451 - DNA, 25 bp, Homo sapien
ccggatggaggcgtcaactacaaga

SEQ ID NO: 2474452 - DNA, 25 bp, Homo sapien
ctttgctggaaccatcggcgtggga

SEQ ID NO: 2474453 - DNA, 25 bp, Homo sapien
aagagcgggactctgcaggtaaccc

SEQ ID NO: 2474454 - DNA, 25 bp, Homo sapien
tgctcccttcccgcgttccgcctgg

SEQ ID NO: 2474455 - DNA, 25 bp, Homo sapien
ctgctcccttcccgcgttccgcctg

SEQ ID NO: 2474456 - DNA, 25 bp, Homo sapien
gaggccgtaggaacgggcctgtcga

SEQ ID NO: 2474457 - DNA, 25 bp, Homo sapien
ccgtaggaacgggcctgtcgaagtg

SEQ ID NO: 2474458 - DNA, 25 bp, Homo sapien
gtaggaacgggcctgtcgaagtgcg

SEQ ID NO: 2474459 - DNA, 25 bp, Homo sapien
taggaacgggcctgtcgaagtgcgc

SEQ ID NO: 2474460 - DNA, 25 bp, Homo sapien
gttcgcatcgcaggcggatttcagg

SEQ ID NO: 2474461 - DNA, 25 bp, Homo sapien
tcgcaggcggatttcaggtcggaaa

SEQ ID NO: 2474462 - DNA, 25 bp, Homo sapien
cagttcgcatcgcaggcggatttca

SEQ ID NO: 2474463 - DNA, 25 bp, Homo sapien
catcgcaggcggatttcaggtcgga

SEQ ID NO: 2474464 - DNA, 25 bp, Homo sapien
cacttatgcccgcgtgaaaaacctt

SEQ ID NO: 2474465 - DNA, 25 bp, Homo sapien
gccagggtcacacaccttaaactca

SEQ ID NO: 2474466 - DNA, 25 bp, Homo sapien
cgccggccaccgctgccagggtcac

SEQ ID NO: 2474467 - DNA, 25 bp, Homo sapien
tgcacacacccacttatgcccgcgt

SEQ ID NO: 2474468 - DNA, 25 bp, Homo sapien
tgcctgtctgatccgacggcttggg

SEQ ID NO: 2474469 - DNA, 25 bp, Homo sapien
tgtctgatccgacggcttgggctca

SEQ ID NO: 2474470 - DNA, 25 bp, Homo sapien
ttccggtgtgcctgtctgatccgac

SEQ ID NO: 2474471 - DNA, 25 bp, Homo sapien
ggtgtgcctgtctgatccgacggct

SEQ ID NO: 2474472 - DNA, 25 bp, Homo sapien
ccaacagccataagccaattccatg

SEQ ID NO: 2474473 - DNA, 25 bp, Homo sapien
caacagccataagccaattccatgt

SEQ ID NO: 2474474 - DNA, 25 bp, Homo sapien
cttctttccccccagatactgtgag

SEQ ID NO: 2474475 - DNA, 25 bp, Homo sapien
gagtgtccaggacatatggactttt

SEQ ID NO: 2474476 - DNA, 25 bp, Homo sapien
ccccccagatactgtgagtgggaag

SEQ ID NO: 2474477 - DNA, 25 bp, Homo sapien
gacttttgagatctgcccagtgtca

SEQ ID NO: 2474478 - DNA, 25 bp, Homo sapien
gagtccgcttccgtgggcccacttg

SEQ ID NO: 2474479 - DNA, 25 bp, Homo sapien
ttgccacatgcaaccagcttgctct

SEQ ID NO: 2474480 - DNA, 25 bp, Homo sapien
aggacgttgcccctttgccacatgc

SEQ ID NO: 2474481 - DNA, 25 bp, Homo sapien
agtccgcttccgtgggcccacttgt

SEQ ID NO: 2474482 - DNA, 25 bp, Homo sapien
tgtgggacttgcctctctgagacct

SEQ ID NO: 2474483 - DNA, 25 bp, Homo sapien
agactttccttctgcggcagcgaag

SEQ ID NO: 2474484 - DNA, 25 bp, Homo sapien
ttgccaaacgagatataagcccttg

SEQ ID NO: 2474485 - DNA, 25 bp, Homo sapien
gcttgcagggaaactgtgaactcct

SEQ ID NO: 2474486 - DNA, 25 bp, Homo sapien
tctgacaaggtttccaatggctcct

SEQ ID NO: 2474487 - DNA, 25 bp, Homo sapien
ttttggcaagctccagcaagggtgg

SEQ ID NO: 2474488 - DNA, 25 bp, Homo sapien
tgaaaagcctggaacgcacgaactg

SEQ ID NO: 2474489 - DNA, 25 bp, Homo sapien
tttaagagggttcgatgcatacacc

SEQ ID NO: 2474490 - DNA, 25 bp, Homo sapien
ttcagattatttcaacaagcaaagt

SEQ ID NO: 2474491 - DNA, 25 bp, Homo sapien
actataattgccaaatggtattagg

SEQ ID NO: 2474492 - DNA, 25 bp, Homo sapien
cagcagtttttactataattgccaa

SEQ ID NO: 2474493 - DNA, 25 bp, Homo sapien
aacaagcaaagtaagtgtcagcagt

SEQ ID NO: 2474494 - DNA, 25 bp, Homo sapien
catcagtttggacaggttacctttc

SEQ ID NO: 2474495 - DNA, 25 bp, Homo sapien
aaaactgcagccaggactacctctg

SEQ ID NO: 2474496 - DNA, 25 bp, Homo sapien
ggccccaaattagaaagcaacacat

SEQ ID NO: 2474497 - DNA, 25 bp, Homo sapien
cattcggccttgaagtttgggagga

SEQ ID NO: 2474498 - DNA, 25 bp, Homo sapien
ggaaattccacatagaaattagaaa

SEQ ID NO: 2474499 - DNA, 25 bp, Homo sapien
ataggaaattccacatagaaattag

SEQ ID NO: 2474500 - DNA, 25 bp, Homo sapien
aggaaattccacatagaaattagaa

SEQ ID NO: 2474501 - DNA, 25 bp, Homo sapien
taggaaattccacatagaaattaga

SEQ ID NO: 2474502 - DNA, 25 bp, Homo sapien
cctgaacttggaaagtgtagccttc

SEQ ID NO: 2474503 - DNA, 25 bp, Homo sapien
gcagcctacctgaagtctgtattta

SEQ ID NO: 2474504 - DNA, 25 bp, Homo sapien
gaaaagactgtattaggcccagagc

SEQ ID NO: 2474505 - DNA, 25 bp, Homo sapien
ctaggtcttgatctgcatattacac

SEQ ID NO: 2474506 - DNA, 25 bp, Homo sapien
taagtattccaagcagcagcctacc

SEQ ID NO: 2474507 - DNA, 25 bp, Homo sapien
ctacagagaaatacttctcaattaa

SEQ ID NO: 2474508 - DNA, 25 bp, Homo sapien
attaagcttaacgaagccttataca

SEQ ID NO: 2474509 - DNA, 25 bp, Homo sapien
tctcaattaagcttaacgaagcctt

SEQ ID NO: 2474510 - DNA, 25 bp, Homo sapien
aagcttaacgaagccttatacacag

SEQ ID NO: 2474511 - DNA, 25 bp, Homo sapien
tgtatcaaaatcatgcgggcaactt

SEQ ID NO: 2474512 - DNA, 25 bp, Homo sapien
ttttagcactacttcaactggagcc

SEQ ID NO: 2474513 - DNA, 25 bp, Homo sapien
tacaatcagtagtagctcccaacct

SEQ ID NO: 2474514 - DNA, 25 bp, Homo sapien
caactggagccaaagatcttacaat

SEQ ID NO: 2474515 - DNA, 25 bp, Homo sapien
tggtatagttggtcacggcccacac

SEQ ID NO: 2474516 - DNA, 25 bp, Homo sapien
caacggttctattatgccacagtga

SEQ ID NO: 2474517 - DNA, 25 bp, Homo sapien
caactgttccaccactggtatagtt

SEQ ID NO: 2474518 - DNA, 25 bp, Homo sapien
ttaagaggttcatcaacggttctat

SEQ ID NO: 2474519 - DNA, 25 bp, Homo sapien
gagagaacactgacaaggaatggga

SEQ ID NO: 2474520 - DNA, 25 bp, Homo sapien
gtatctggtcctggcggccggctgt

SEQ ID NO: 2474521 - DNA, 25 bp, Homo sapien
cactgacaaggaatgggactaatcc

SEQ ID NO: 2474522 - DNA, 25 bp, Homo sapien
tgtccacgtagcttccttctgaatg

SEQ ID NO: 2474523 - DNA, 25 bp, Homo sapien
gcactttagaaattctataccctaa

SEQ ID NO: 2474524 - DNA, 25 bp, Homo sapien
aaaaaatatgttgatgctggttatt

SEQ ID NO: 2474525 - DNA, 25 bp, Homo sapien
aaaaaaaaatatgttgatgctggtt

SEQ ID NO: 2474526 - DNA, 25 bp, Homo sapien
ttccccagcactttagaaattctat

SEQ ID NO: 2474527 - DNA, 25 bp, Homo sapien
ggcaatatttcaatattactatcaa

SEQ ID NO: 2474528 - DNA, 25 bp, Homo sapien
aataggcaatatttcaatattacta

SEQ ID NO: 2474529 - DNA, 25 bp, Homo sapien
gcaatatttcaatattactatcaac

SEQ ID NO: 2474530 - DNA, 25 bp, Homo sapien
taggcaatatttcaatattactatc

SEQ ID NO: 2474531 - DNA, 25 bp, Homo sapien
ctgttttcaccaccatgccaattcg

SEQ ID NO: 2474532 - DNA, 25 bp, Homo sapien
tttcaccaccatgccaattcgttca

SEQ ID NO: 2474533 - DNA, 25 bp, Homo sapien
caccatgccaattcgttcatttgga

SEQ ID NO: 2474534 - DNA, 25 bp, Homo sapien
accaccatgccaattcgttcatttg

SEQ ID NO: 2474535 - DNA, 25 bp, Homo sapien
aagtctcggaacactgagccatcac

SEQ ID NO: 2474536 - DNA, 25 bp, Homo sapien
aaccaagtctcggaacactgagcca

SEQ ID NO: 2474537 - DNA, 25 bp, Homo sapien
tgcaccgtacttaataaccaagtct

SEQ ID NO: 2474538 - DNA, 25 bp, Homo sapien
agtgggtcaactgcaccgtacttaa

SEQ ID NO: 2474539 - DNA, 25 bp, Homo sapien
tgcctcagcctcaggcgcccgccac

SEQ ID NO: 2474540 - DNA, 25 bp, Homo sapien
ctgcctcagcctcaggcgcccgcca

SEQ ID NO: 2474541 - DNA, 25 bp, Homo sapien
tcctgcctcagcctcaggcgcccgc

SEQ ID NO: 2474542 - DNA, 25 bp, Homo sapien
gcctcagcctcaggcgcccgccacc

SEQ ID NO: 2474543 - DNA, 25 bp, Homo sapien
tgctgcctttgtaaagacgacactt

SEQ ID NO: 2474544 - DNA, 25 bp, Homo sapien
ttcagtgactgaatgcaccagcaaa

SEQ ID NO: 2474545 - DNA, 25 bp, Homo sapien
aagacgacactttcattcctaataa

SEQ ID NO: 2474546 - DNA, 25 bp, Homo sapien
aaacttacttagatggccctctgct

SEQ ID NO: 2474547 - DNA, 25 bp, Homo sapien
tgcaatgtttcctagagcccagaca

SEQ ID NO: 2474548 - DNA, 25 bp, Homo sapien
ctgcaatgtttcctagagcccagac

SEQ ID NO: 2474549 - DNA, 25 bp, Homo sapien
tcctagagcccagacagcttgttca

SEQ ID NO: 2474550 - DNA, 25 bp, Homo sapien
atgtttcctagagcccagacagctt

SEQ ID NO: 2474551 - DNA, 25 bp, Homo sapien
gaaatgaatgctgggatggcacctc

SEQ ID NO: 2474552 - DNA, 25 bp, Homo sapien
gccaacagagaaatgaatgctggga

SEQ ID NO: 2474553 - DNA, 25 bp, Homo sapien
ccatctaccacagccttggtttgtt

SEQ ID NO: 2474554 - DNA, 25 bp, Homo sapien
gggatggcacctccatctaccacag

SEQ ID NO: 2474555 - DNA, 25 bp, Homo sapien
aaactgaatgggactacaatcagtt

SEQ ID NO: 2474556 - DNA, 25 bp, Homo sapien
gagtgcccaagcagattcaaactga

SEQ ID NO: 2474557 - DNA, 25 bp, Homo sapien
aactgaatgggactacaatcagttc

SEQ ID NO: 2474558 - DNA, 25 bp, Homo sapien
actgaatgggactacaatcagttct

SEQ ID NO: 2474559 - DNA, 25 bp, Homo sapien
tttccacattgctgctatttatgcc

SEQ ID NO: 2474560 - DNA, 25 bp, Homo sapien
ggagctgattttccacattgctgct

SEQ ID NO: 2474561 - DNA, 25 bp, Homo sapien
cattgctgctatttatgcctttgac

SEQ ID NO: 2474562 - DNA, 25 bp, Homo sapien
cagcttgagtagcttggagctgatt

SEQ ID NO: 2474563 - DNA, 25 bp, Homo sapien
cacattgacctctattctgcgacgc

SEQ ID NO: 2474564 - DNA, 25 bp, Homo sapien
ctggttgttgcggttttcctgcagc

SEQ ID NO: 2474565 - DNA, 25 bp, Homo sapien
gttgttgcggttttcctgcagcgga

SEQ ID NO: 2474566 - DNA, 25 bp, Homo sapien
tgttgcggttttcctgcagcggaga

SEQ ID NO: 2474567 - DNA, 25 bp, Homo sapien
ttgaatctgtgaagacgggcagctg

SEQ ID NO: 2474568 - DNA, 25 bp, Homo sapien
cttgaatctgtgaagacgggcagct

SEQ ID NO: 2474569 - DNA, 25 bp, Homo sapien
tcttgaatctgtgaagacgggcagc

SEQ ID NO: 2474570 - DNA, 25 bp, Homo sapien
taaaaatgcagtgccgcatctcgca

SEQ ID NO: 2474571 - DNA, 25 bp, Homo sapien
tggccaaaataggtgcagactcgaa

SEQ ID NO: 2474572 - DNA, 25 bp, Homo sapien
catcagctgtgcgtcattcagaaga

SEQ ID NO: 2474573 - DNA, 25 bp, Homo sapien
tacgctcgcctacgacttggtggca

SEQ ID NO: 2474574 - DNA, 25 bp, Homo sapien
gttcaaagggtccacctcgactcag

SEQ ID NO: 2474575 - DNA, 25 bp, Homo sapien
gcctgggcttccacgggaggcgatg

SEQ ID NO: 2474576 - DNA, 25 bp, Homo sapien
cggctgtagggcgactgcgttcaaa

SEQ ID NO: 2474577 - DNA, 25 bp, Homo sapien
tcgactcagctcaaagaccgtgtgg

SEQ ID NO: 2474578 - DNA, 25 bp, Homo sapien
gacgtgtgagcaggtccaactgtgc

SEQ ID NO: 2474579 - DNA, 25 bp, Homo sapien
cgtgtgagcaggtccaactgtgctg

SEQ ID NO: 2474580 - DNA, 25 bp, Homo sapien
caagggacgtgtgagcaggtccaac

SEQ ID NO: 2474581 - DNA, 25 bp, Homo sapien
ttatcccaagggacgtgtgagcagg

SEQ ID NO: 2474582 - DNA, 25 bp, Homo sapien
tagggtgtaatatggccctcgtgga

SEQ ID NO: 2474583 - DNA, 25 bp, Homo sapien
tcgtggaggcccttgctgagtttag

SEQ ID NO: 2474584 - DNA, 25 bp, Homo sapien
gacatctgggaatcttagggtgtaa

SEQ ID NO: 2474585 - DNA, 25 bp, Homo sapien
gacataagtcaaaggtggttccaaa

SEQ ID NO: 2474586 - DNA, 25 bp, Homo sapien
cagatcttaggggtgaccagcagag

SEQ ID NO: 2474587 - DNA, 25 bp, Homo sapien
agcagagggcgctgctccaaggtga

SEQ ID NO: 2474588 - DNA, 25 bp, Homo sapien
gagacgcgcgtggccacagatctta

SEQ ID NO: 2474589 - DNA, 25 bp, Homo sapien
ggtgaggattggaagggagacgcgc

SEQ ID NO: 2474590 - DNA, 25 bp, Homo sapien
taccgtatggaaggcagcccgtgtc

SEQ ID NO: 2474591 - DNA, 25 bp, Homo sapien
gcaagtaaccatggcaactccagga

SEQ ID NO: 2474592 - DNA, 25 bp, Homo sapien
caggtgttctgtgccaaaggtcatc

SEQ ID NO: 2474593 - DNA, 25 bp, Homo sapien
aaaggtcatcctcgcgtgtgccgat

SEQ ID NO: 2474594 - DNA, 25 bp, Homo sapien
cgtagaaatcagacgatggcgggca

SEQ ID NO: 2474595 - DNA, 25 bp, Homo sapien
aaatggtcctcgcagtctcttggca

SEQ ID NO: 2474596 - DNA, 25 bp, Homo sapien
tttaaagacacaagtggagcctgcg

SEQ ID NO: 2474597 - DNA, 25 bp, Homo sapien
cagataccatggagacaaaacgccc

SEQ ID NO: 2474598 - DNA, 25 bp, Homo sapien
tgcgtgcagcctggagaagtccgct

SEQ ID NO: 2474599 - DNA, 25 bp, Homo sapien
cctcgcctgcgtgcagcctggagaa

SEQ ID NO: 2474600 - DNA, 25 bp, Homo sapien
cagcccctcgcctgcgtgcagcctg

SEQ ID NO: 2474601 - DNA, 25 bp, Homo sapien
tgcagcctggagaagtccgctggct

SEQ ID NO: 2474602 - DNA, 25 bp, Homo sapien
tccttgtggtactcttgacaccccg

SEQ ID NO: 2474603 - DNA, 25 bp, Homo sapien
tctgcctggcttcggggtgttccta

SEQ ID NO: 2474604 - DNA, 25 bp, Homo sapien
tgtggtactcttgacaccccgctgg

SEQ ID NO: 2474605 - DNA, 25 bp, Homo sapien
tggtactcttgacaccccgctggca

SEQ ID NO: 2474606 - DNA, 25 bp, Homo sapien
tgcccacgggcaaagggtgattctt

SEQ ID NO: 2474607 - DNA, 25 bp, Homo sapien
catttcaatgtgcatgtaactgtgt

SEQ ID NO: 2474608 - DNA, 25 bp, Homo sapien
tgtgcccacgggcaaagggtgattc

SEQ ID NO: 2474609 - DNA, 25 bp, Homo sapien
tgcatgtaactgtgtgtgcccacgg

SEQ ID NO: 2474610 - DNA, 25 bp, Homo sapien
gagcgtgacttatgcattccttcct

SEQ ID NO: 2474611 - DNA, 25 bp, Homo sapien
ccgaattgcacaggcatcatgggtc

SEQ ID NO: 2474612 - DNA, 25 bp, Homo sapien
tccttccttccgaattgcacaggca

SEQ ID NO: 2474613 - DNA, 25 bp, Homo sapien
agggataggagcgtgacttatgcat

SEQ ID NO: 2474614 - DNA, 25 bp, Homo sapien
gcggagcctagggacttccctggac

SEQ ID NO: 2474615 - DNA, 25 bp, Homo sapien
tcccaaccgaggtcactgggtgcgg

SEQ ID NO: 2474616 - DNA, 25 bp, Homo sapien
ggatcaaagcaatcacccaggttcc

SEQ ID NO: 2474617 - DNA, 25 bp, Homo sapien
tgggcacgggtctctctaggcccca

SEQ ID NO: 2474618 - DNA, 25 bp, Homo sapien
cagccccggccgcgctcagcagccc

SEQ ID NO: 2474619 - DNA, 25 bp, Homo sapien
ccccggccgcgctcagcagcccgcc

SEQ ID NO: 2474620 - DNA, 25 bp, Homo sapien
gccgcgctcagcagcccgcctccca

SEQ ID NO: 2474621 - DNA, 25 bp, Homo sapien
cggccgcgctcagcagcccgcctcc

SEQ ID NO: 2474622 - DNA, 25 bp, Homo sapien
cgggcgacgaggccaggctactcac

SEQ ID NO: 2474623 - DNA, 25 bp, Homo sapien
tcagcccgatgggaatgaccgccgc

SEQ ID NO: 2474624 - DNA, 25 bp, Homo sapien
cgccgcagagcgaggcgggcgacga

SEQ ID NO: 2474625 - DNA, 25 bp, Homo sapien
ccgatgggaatgaccgccgcagagc

SEQ ID NO: 2474626 - DNA, 25 bp, Homo sapien
gctccccgcggcaggtgactggggg

SEQ ID NO: 2474627 - DNA, 25 bp, Homo sapien
agcgctccccgcggcaggtgactgg

SEQ ID NO: 2474628 - DNA, 25 bp, Homo sapien
tcagcgctccccgcggcaggtgact

SEQ ID NO: 2474629 - DNA, 25 bp, Homo sapien
gcgctccccgcggcaggtgactggg

SEQ ID NO: 2474630 - DNA, 25 bp, Homo sapien
gctgcatcccggccgccgagcgggc

SEQ ID NO: 2474631 - DNA, 25 bp, Homo sapien
ctgcatcccggccgccgagcgggca

SEQ ID NO: 2474632 - DNA, 25 bp, Homo sapien
gcatcccggccgccgagcgggcagc

SEQ ID NO: 2474633 - DNA, 25 bp, Homo sapien
tgcatcccggccgccgagcgggcag

SEQ ID NO: 2474634 - DNA, 25 bp, Homo sapien
tgcttttctgtgtgaggtgaaaagc

SEQ ID NO: 2474635 - DNA, 25 bp, Homo sapien
tgaaaagcacatcatggaatctggg

SEQ ID NO: 2474636 - DNA, 25 bp, Homo sapien
tctgtgtgaggtgaaaagcacatca

SEQ ID NO: 2474637 - DNA, 25 bp, Homo sapien
gcacatcatggaatctggggtttgg

SEQ ID NO: 2474638 - DNA, 25 bp, Homo sapien
cagccccagagagtttgcccttcgt

SEQ ID NO: 2474639 - DNA, 25 bp, Homo sapien
agccccagagagtttgcccttcgtg

SEQ ID NO: 2474640 - DNA, 25 bp, Homo sapien
gccccagagagtttgcccttcgtgc

SEQ ID NO: 2474641 - DNA, 25 bp, Homo sapien
cggaagagagtaagtgtcagggcca

SEQ ID NO: 2474642 - DNA, 25 bp, Homo sapien
gccggaagagagtaagtgtcagggc

SEQ ID NO: 2474643 - DNA, 25 bp, Homo sapien
gaagagagtaagtgtcagggccagc

SEQ ID NO: 2474644 - DNA, 25 bp, Homo sapien
ctggccggaagagagtaagtgtcag

SEQ ID NO: 2474645 - DNA, 25 bp, Homo sapien
gtgccaggtgagcctggcccctgct

SEQ ID NO: 2474646 - DNA, 25 bp, Homo sapien
gccaggtgagcctggcccctgctcc

SEQ ID NO: 2474647 - DNA, 25 bp, Homo sapien
tcagtgccaggtgagcctggcccct

SEQ ID NO: 2474648 - DNA, 25 bp, Homo sapien
cagtgccaggtgagcctggcccctg

SEQ ID NO: 2474649 - DNA, 25 bp, Homo sapien
tccacaccacaaggatttactgttt

SEQ ID NO: 2474650 - DNA, 25 bp, Homo sapien
cgtccacaccacaaggatttactgt

SEQ ID NO: 2474651 - DNA, 25 bp, Homo sapien
cccacgtccacaccacaaggattta

SEQ ID NO: 2474652 - DNA, 25 bp, Homo sapien
gctgtgtttggggagcggcgatagc

SEQ ID NO: 2474653 - DNA, 25 bp, Homo sapien
tgtcagtttcatcggggcataaccc

SEQ ID NO: 2474654 - DNA, 25 bp, Homo sapien
ctcagtgatgactgtcgggtcaatg

SEQ ID NO: 2474655 - DNA, 25 bp, Homo sapien
tgtacaagtgtccatgaacttctca

SEQ ID NO: 2474656 - DNA, 25 bp, Homo sapien
cagaaaccaagtgcgggagtcgtgc

SEQ ID NO: 2474657 - DNA, 25 bp, Homo sapien
acccggaccagcacgaagagggcac

SEQ ID NO: 2474658 - DNA, 25 bp, Homo sapien
ccactctgctgagtgctattctgtg

SEQ ID NO: 2474659 - DNA, 25 bp, Homo sapien
tcaggtcagtccactctgctgagtg

SEQ ID NO: 2474660 - DNA, 25 bp, Homo sapien
ccggaccagcacgaagagggcacag

SEQ ID NO: 2474661 - DNA, 25 bp, Homo sapien
ggttggaaacgtccattgtgccgct

SEQ ID NO: 2474662 - DNA, 25 bp, Homo sapien
tccgggatgtgtggacgcagccgct

SEQ ID NO: 2474663 - DNA, 25 bp, Homo sapien
gacgcagccgctggttggaaacgtc

SEQ ID NO: 2474664 - DNA, 25 bp, Homo sapien
tccattgtgccgctggctggtggag

SEQ ID NO: 2474665 - DNA, 25 bp, Homo sapien
taagggcgtttctgcggcacagctt

SEQ ID NO: 2474666 - DNA, 25 bp, Homo sapien
cgataggccacacatttgcaggaca

SEQ ID NO: 2474667 - DNA, 25 bp, Homo sapien
tccatttgcaggagacacggggcga

SEQ ID NO: 2474668 - DNA, 25 bp, Homo sapien
gaggcgacaccacagagaggcaaac

SEQ ID NO: 2474669 - DNA, 25 bp, Homo sapien
tgcctgctggggaagcctcattgcc

SEQ ID NO: 2474670 - DNA, 25 bp, Homo sapien
ctggaatcctcccagacggcaagtg

SEQ ID NO: 2474671 - DNA, 25 bp, Homo sapien
tcccagacggcaagtgtggtcacca

SEQ ID NO: 2474672 - DNA, 25 bp, Homo sapien
cctgctggggaagcctcattgccat

SEQ ID NO: 2474673 - DNA, 25 bp, Homo sapien
gcgggctcaagtccaggtctgtgcc

SEQ ID NO: 2474674 - DNA, 25 bp, Homo sapien
tgacatgtatgctgggcgggctcaa

SEQ ID NO: 2474675 - DNA, 25 bp, Homo sapien
tcactggtcacgaggtgtctgacat

SEQ ID NO: 2474676 - DNA, 25 bp, Homo sapien
ctcaagtccaggtctgtgcccatct

SEQ ID NO: 2474677 - DNA, 25 bp, Homo sapien
tcaggagatcactactggagacacc

SEQ ID NO: 2474678 - DNA, 25 bp, Homo sapien
atccagacccaaaagggccctgcga

SEQ ID NO: 2474679 - DNA, 25 bp, Homo sapien
gccctgcgaatgttggagaatgaat

SEQ ID NO: 2474680 - DNA, 25 bp, Homo sapien
aatagttgtgtgcttcaatatcacc

SEQ ID NO: 2474681 - DNA, 25 bp, Homo sapien
gaagaggccaggacacacgaagggt

SEQ ID NO: 2474682 - DNA, 25 bp, Homo sapien
gaagggtctctcatgggaagcagcc

SEQ ID NO: 2474683 - DNA, 25 bp, Homo sapien
cacgaagggtctctcatgggaagca

SEQ ID NO: 2474684 - DNA, 25 bp, Homo sapien
aagaggccaggacacacgaagggtc

SEQ ID NO: 2474685 - DNA, 25 bp, Homo sapien
atgtgatgaaggtaagaggtgggcc

SEQ ID NO: 2474686 - DNA, 25 bp, Homo sapien
tgtgatgaaggtaagaggtgggccc

SEQ ID NO: 2474687 - DNA, 25 bp, Homo sapien
gaaggaaataagatgcccctgtagg

SEQ ID NO: 2474688 - DNA, 25 bp, Homo sapien
atcagaatgagggactgaagtggct

SEQ ID NO: 2474689 - DNA, 25 bp, Homo sapien
aggagagaccccagcaacgtccttc

SEQ ID NO: 2474690 - DNA, 25 bp, Homo sapien
gtggcagaattaggcaggatcagaa

SEQ ID NO: 2474691 - DNA, 25 bp, Homo sapien
ctcgcctgcagtgatggggagtctc

SEQ ID NO: 2474692 - DNA, 25 bp, Homo sapien
ccacactctcctttgaagcaaggac

SEQ ID NO: 2474693 - DNA, 25 bp, Homo sapien
gagtctcggtcgaagggctccttgc

SEQ ID NO: 2474694 - DNA, 25 bp, Homo sapien
gtctcggtcgaagggctccttgcca

SEQ ID NO: 2474695 - DNA, 25 bp, Homo sapien
acatgccagagctctggtagcccaa

SEQ ID NO: 2474696 - DNA, 25 bp, Homo sapien
gacggcatccacatgccagagctct

SEQ ID NO: 2474697 - DNA, 25 bp, Homo sapien
ttttggcggccccttctctgaagcc

SEQ ID NO: 2474698 - DNA, 25 bp, Homo sapien
gcatccacatgccagagctctggta

SEQ ID NO: 2474699 - DNA, 25 bp, Homo sapien
cactgttgatgaccccgaggattta

SEQ ID NO: 2474700 - DNA, 25 bp, Homo sapien
tgggctggtcttgtactttcactgt

SEQ ID NO: 2474701 - DNA, 25 bp, Homo sapien
tttcactgttgatgaccccgaggat

SEQ ID NO: 2474702 - DNA, 25 bp, Homo sapien
gaagcagctcaggtccaaaagagct

SEQ ID NO: 2474703 - DNA, 25 bp, Homo sapien
ttctggaccgtccttggcaaggagg

SEQ ID NO: 2474704 - DNA, 25 bp, Homo sapien
tggggctccttctggaccgtccttg

SEQ ID NO: 2474705 - DNA, 25 bp, Homo sapien
tccttctggaccgtccttggcaagg

SEQ ID NO: 2474706 - DNA, 25 bp, Homo sapien
gctccttctggaccgtccttggcaa

SEQ ID NO: 2474707 - DNA, 25 bp, Homo sapien
gggccacatggacacccatgctgcc

SEQ ID NO: 2474708 - DNA, 25 bp, Homo sapien
gttctcttgcctttgaggcggatgg

SEQ ID NO: 2474709 - DNA, 25 bp, Homo sapien
ttgaggcggatggagccctccttcc

SEQ ID NO: 2474710 - DNA, 25 bp, Homo sapien
tggaaacagagtccatccctgggga

SEQ ID NO: 2474711 - DNA, 25 bp, Homo sapien
atggagacacgagcgatccacaggc

SEQ ID NO: 2474712 - DNA, 25 bp, Homo sapien
tgcagccgccggcttagaagatgga

SEQ ID NO: 2474713 - DNA, 25 bp, Homo sapien
aggccgccgagtccggagggcaggg

SEQ ID NO: 2474714 - DNA, 25 bp, Homo sapien
tgcctgcgctcgagcctccttggcg

SEQ ID NO: 2474715 - DNA, 25 bp, Homo sapien
ctggccttggaccagacccctagaa

SEQ ID NO: 2474716 - DNA, 25 bp, Homo sapien
tccctctgacagcaacaaggccctg

SEQ ID NO: 2474717 - DNA, 25 bp, Homo sapien
tccagaaggttatggtgggaacagc

SEQ ID NO: 2474718 - DNA, 25 bp, Homo sapien
agagcagatgttaggcagatgtgca

SEQ ID NO: 2474719 - DNA, 25 bp, Homo sapien
tttgttggagagtgtattctcctgc

SEQ ID NO: 2474720 - DNA, 25 bp, Homo sapien
ttgtttgttggagagtgtattctcc

SEQ ID NO: 2474721 - DNA, 25 bp, Homo sapien
ttggagagtgtattctcctgcagct

SEQ ID NO: 2474722 - DNA, 25 bp, Homo sapien
ggagagtgtattctcctgcagcttt

SEQ ID NO: 2474723 - DNA, 25 bp, Homo sapien
cagccagggcatttgattgcatgag

SEQ ID NO: 2474724 - DNA, 25 bp, Homo sapien
tggttgcaactgctgtcgatattcc

SEQ ID NO: 2474725 - DNA, 25 bp, Homo sapien
tttgcatctgtgcaagtctggtaat

SEQ ID NO: 2474726 - DNA, 25 bp, Homo sapien
tttatgactctgaatttgcatctgt

SEQ ID NO: 2474727 - DNA, 25 bp, Homo sapien
ctgaattccaggcacaaataaatga

SEQ ID NO: 2474728 - DNA, 25 bp, Homo sapien
gaagttactgctggaatgagcccac

SEQ ID NO: 2474729 - DNA, 25 bp, Homo sapien
tgggggccaaggcttcagaagttac

SEQ ID NO: 2474730 - DNA, 25 bp, Homo sapien
ccgggggtcggcacccattgccatg

SEQ ID NO: 2474731 - DNA, 25 bp, Homo sapien
gggtcggcacccattgccatgtgtc

SEQ ID NO: 2474732 - DNA, 25 bp, Homo sapien
aactcagagtgttgtcacagccacg

SEQ ID NO: 2474733 - DNA, 25 bp, Homo sapien
ggcttccttcatctcaaaactcaga

SEQ ID NO: 2474734 - DNA, 25 bp, Homo sapien
cagccacgctgccactctagaattc

SEQ ID NO: 2474735 - DNA, 25 bp, Homo sapien
gcttccttcatctcaaaactcagag

SEQ ID NO: 2474736 - DNA, 25 bp, Homo sapien
ctggggacaggagacacaccatggc

SEQ ID NO: 2474737 - DNA, 25 bp, Homo sapien
aggagacacaccatggccaggacca

SEQ ID NO: 2474738 - DNA, 25 bp, Homo sapien
gagacacaccatggccaggaccaat

SEQ ID NO: 2474739 - DNA, 25 bp, Homo sapien
gggacaggagacacaccatggccag

SEQ ID NO: 2474740 - DNA, 25 bp, Homo sapien
cccaagccaaggctgtcgtctgttt

SEQ ID NO: 2474741 - DNA, 25 bp, Homo sapien
ggctgtcgtctgtttcagactgggc

SEQ ID NO: 2474742 - DNA, 25 bp, Homo sapien
agggacagccactcccaaggtggcc

SEQ ID NO: 2474743 - DNA, 25 bp, Homo sapien
ttcagactgggcactgcggcatggg

SEQ ID NO: 2474744 - DNA, 25 bp, Homo sapien
tcaaggggatacagaggaagcacgc

SEQ ID NO: 2474745 - DNA, 25 bp, Homo sapien
ggaagcacgcaattgaggaaaatga

SEQ ID NO: 2474746 - DNA, 25 bp, Homo sapien
gagatagctgtttttaggttcaagg

SEQ ID NO: 2474747 - DNA, 25 bp, Homo sapien
ggaatccatcagtcaaactcgctct

SEQ ID NO: 2474748 - DNA, 25 bp, Homo sapien
gcaggtagaaggatggaaccccaca

SEQ ID NO: 2474749 - DNA, 25 bp, Homo sapien
ggacttcccatggagccgcggcagg

SEQ ID NO: 2474750 - DNA, 25 bp, Homo sapien
acttcccatggagccgcggcaggta

SEQ ID NO: 2474751 - DNA, 25 bp, Homo sapien
ctgggacttcccatggagccgcggc

SEQ ID NO: 2474752 - DNA, 25 bp, Homo sapien
cgtagagcaacagagacgcagggac

SEQ ID NO: 2474753 - DNA, 25 bp, Homo sapien
cagctccacgtagagcaacagagac

SEQ ID NO: 2474754 - DNA, 25 bp, Homo sapien
acgcagggaccgtgcaagtaaccat

SEQ ID NO: 2474755 - DNA, 25 bp, Homo sapien
tccacagaggagcataaacagaccc

SEQ ID NO: 2474756 - DNA, 25 bp, Homo sapien
agagctgaggagtgcttgggccaca

SEQ ID NO: 2474757 - DNA, 25 bp, Homo sapien
ctgagcacctccgacagaaccatgg

SEQ ID NO: 2474758 - DNA, 25 bp, Homo sapien
gctgctattcgtgccgtgaccgtga

SEQ ID NO: 2474759 - DNA, 25 bp, Homo sapien
caagagtttgttgcaggttggtgcc

SEQ ID NO: 2474760 - DNA, 25 bp, Homo sapien
ccttgaacagtccattcaggaacct

SEQ ID NO: 2474761 - DNA, 25 bp, Homo sapien
gtggaggtgactgatttattctgac

SEQ ID NO: 2474762 - DNA, 25 bp, Homo sapien
tcagccgtctaagtggaggtgactg

SEQ ID NO: 2474763 - DNA, 25 bp, Homo sapien
ctcagagtatgtcaaacccttgaac

SEQ ID NO: 2474764 - DNA, 25 bp, Homo sapien
ctgactcttcacgacactgctctcc

SEQ ID NO: 2474765 - DNA, 25 bp, Homo sapien
tcctccaaccatgcacggctttaat

SEQ ID NO: 2474766 - DNA, 25 bp, Homo sapien
gctccgagctgagcctgcttgacct

SEQ ID NO: 2474767 - DNA, 25 bp, Homo sapien
taattgtccatcaagcagggcaggg

SEQ ID NO: 2474768 - DNA, 25 bp, Homo sapien
agcgggaccctgataaagtgagcca

SEQ ID NO: 2474769 - DNA, 25 bp, Homo sapien
aggaatgaatgcctcagcccgactg

SEQ ID NO: 2474770 - DNA, 25 bp, Homo sapien
cattcacggtgtctgcaactggacc

SEQ ID NO: 2474771 - DNA, 25 bp, Homo sapien
cacaggatcctctcttagggtgggt

SEQ ID NO: 2474772 - DNA, 25 bp, Homo sapien
ttctgctaagattccaaaatacttg

SEQ ID NO: 2474773 - DNA, 25 bp, Homo sapien
cttttctgctaagattccaaaatac

SEQ ID NO: 2474774 - DNA, 25 bp, Homo sapien
tttctgctaagattccaaaatactt

SEQ ID NO: 2474775 - DNA, 25 bp, Homo sapien
tctgctaagattccaaaatacttga

SEQ ID NO: 2474776 - DNA, 25 bp, Homo sapien
gatagcacccctgcgaggaacacaa

SEQ ID NO: 2474777 - DNA, 25 bp, Homo sapien
gaacacaaccaaccactgtcggtct

SEQ ID NO: 2474778 - DNA, 25 bp, Homo sapien
ccttggatagcacccctgcgaggaa

SEQ ID NO: 2474779 - DNA, 25 bp, Homo sapien
tgcgaggaacacaaccaaccactgt

SEQ ID NO: 2474780 - DNA, 25 bp, Homo sapien
agacaggaccttacttctttctgcc

SEQ ID NO: 2474781 - DNA, 25 bp, Homo sapien
gttatcccctggatggcctgacccg

SEQ ID NO: 2474782 - DNA, 25 bp, Homo sapien
tgacccgggtaacaactgagtccac

SEQ ID NO: 2474783 - DNA, 25 bp, Homo sapien
tggcctccttgtggtactcttgaca

SEQ ID NO: 2474784 - DNA, 25 bp, Homo sapien
cttctcagcagggtaaactgaggtt

SEQ ID NO: 2474785 - DNA, 25 bp, Homo sapien
tagatcgcctgatccacgcagcagt

SEQ ID NO: 2474786 - DNA, 25 bp, Homo sapien
cctgcttctcagcagggtaaactga

SEQ ID NO: 2474787 - DNA, 25 bp, Homo sapien
cagcggctttacatagatcgcctga

SEQ ID NO: 2474788 - DNA, 25 bp, Homo sapien
ccctccccagcggtatgctgcaggc

SEQ ID NO: 2474789 - DNA, 25 bp, Homo sapien
gctgggaagggtgcacgccctcccc

SEQ ID NO: 2474790 - DNA, 25 bp, Homo sapien
ggtgcacgccctccccagcggtatg

SEQ ID NO: 2474791 - DNA, 25 bp, Homo sapien
gcggtatgctgcaggcaaccctgcc

SEQ ID NO: 2474792 - DNA, 25 bp, Homo sapien
gagctcatgaaaggtaactgacata

SEQ ID NO: 2474793 - DNA, 25 bp, Homo sapien
ggccctgatgggctttaagagctca

SEQ ID NO: 2474794 - DNA, 25 bp, Homo sapien
gacataccgccttgctcagaagtca

SEQ ID NO: 2474795 - DNA, 25 bp, Homo sapien
cacaggttgtgcggccggccctgat

SEQ ID NO: 2474796 - DNA, 25 bp, Homo sapien
cgtggatgagaaggactgcagtcca

SEQ ID NO: 2474797 - DNA, 25 bp, Homo sapien
gtcatagacaaggagacgtggatga

SEQ ID NO: 2474798 - DNA, 25 bp, Homo sapien
catagacaaggagacgtggatgaga

SEQ ID NO: 2474799 - DNA, 25 bp, Homo sapien
gagacgtggatgagaaggactgcag

SEQ ID NO: 2474800 - DNA, 25 bp, Homo sapien
gagcgtgacttatgcattccttcct

SEQ ID NO: 2474801 - DNA, 25 bp, Homo sapien
tccttccttccgaattgcacaggca

SEQ ID NO: 2474802 - DNA, 25 bp, Homo sapien
ccgaattgcacaggcatcatgggtc

SEQ ID NO: 2474803 - DNA, 25 bp, Homo sapien
agggataggagcgtgacttatgcat

SEQ ID NO: 2474804 - DNA, 25 bp, Homo sapien
gctcttgaatgagcctcgggagccc

SEQ ID NO: 2474805 - DNA, 25 bp, Homo sapien
tggctcttgaatgagcctcgggagc

SEQ ID NO: 2474806 - DNA, 25 bp, Homo sapien
ggctcttgaatgagcctcgggagcc

SEQ ID NO: 2474807 - DNA, 25 bp, Homo sapien
cttgaatgagcctcgggagccctcc

SEQ ID NO: 2474808 - DNA, 25 bp, Homo sapien
gtttgcccttcgtgctcagctgtcg

SEQ ID NO: 2474809 - DNA, 25 bp, Homo sapien
cccagagagtttgcccttcgtgctc

SEQ ID NO: 2474810 - DNA, 25 bp, Homo sapien
cgtgctcagctgtcgtagacaggga

SEQ ID NO: 2474811 - DNA, 25 bp, Homo sapien
ccttcgtgctcagctgtcgtagaca

SEQ ID NO: 2474812 - DNA, 25 bp, Homo sapien
aatcacaaagcgtgccttcaaaagc

SEQ ID NO: 2474813 - DNA, 25 bp, Homo sapien
gcaggaacgagaatagctccagaat

SEQ ID NO: 2474814 - DNA, 25 bp, Homo sapien
caaagagggcagctaaccaatcaca

SEQ ID NO: 2474815 - DNA, 25 bp, Homo sapien
gtttccaggtgccataaaaaagagc

SEQ ID NO: 2474816 - DNA, 25 bp, Homo sapien
tctcctctggccgtcgtccaggttg

SEQ ID NO: 2474817 - DNA, 25 bp, Homo sapien
ttctcctctggccgtcgtccaggtt

SEQ ID NO: 2474818 - DNA, 25 bp, Homo sapien
attctcctctggccgtcgtccaggt

SEQ ID NO: 2474819 - DNA, 25 bp, Homo sapien
aattctcctctggccgtcgtccagg

SEQ ID NO: 2474820 - DNA, 25 bp, Homo sapien
tgtcagtttcatcggggcataaccc

SEQ ID NO: 2474821 - DNA, 25 bp, Homo sapien
ctcagtgatgactgtcgggtcaatg

SEQ ID NO: 2474822 - DNA, 25 bp, Homo sapien
tgtacaagtgtccatgaacttctca

SEQ ID NO: 2474823 - DNA, 25 bp, Homo sapien
cagaaaccaagtgcgggagtcgtgc

SEQ ID NO: 2474824 - DNA, 25 bp, Homo sapien
tatttgaaagcacgaacagccttgg

SEQ ID NO: 2474825 - DNA, 25 bp, Homo sapien
tcgttgtagacgggttttccatcac

SEQ ID NO: 2474826 - DNA, 25 bp, Homo sapien
catcacctgggtctgcattaggagg

SEQ ID NO: 2474827 - DNA, 25 bp, Homo sapien
taggaggatccgtatacagatgagg

SEQ ID NO: 2474828 - DNA, 25 bp, Homo sapien
ggatgattctgctccacgtttccag

SEQ ID NO: 2474829 - DNA, 25 bp, Homo sapien
caggaggacaaagtcctcttcagga

SEQ ID NO: 2474830 - DNA, 25 bp, Homo sapien
tggatgattctgctccacgtttcca

SEQ ID NO: 2474831 - DNA, 25 bp, Homo sapien
cgggcttatctgccttgcccggcat

SEQ ID NO: 2474832 - DNA, 25 bp, Homo sapien
tgcaaagggtgcacgtgcatagcct

SEQ ID NO: 2474833 - DNA, 25 bp, Homo sapien
gcatagccttgtcgtgtggtcatca

SEQ ID NO: 2474834 - DNA, 25 bp, Homo sapien
gatggctacacactacacactggtg

SEQ ID NO: 2474835 - DNA, 25 bp, Homo sapien
aaattccggtaaacaggtgcacacg

SEQ ID NO: 2474836 - DNA, 25 bp, Homo sapien
tcacctaatggtcaatcggtcaatc

SEQ ID NO: 2474837 - DNA, 25 bp, Homo sapien
atcggtcaatcgctgccatgctgtc

SEQ ID NO: 2474838 - DNA, 25 bp, Homo sapien
aatggtcaatcggtcaatcgctgcc

SEQ ID NO: 2474839 - DNA, 25 bp, Homo sapien
ggtcaatcggtcaatcgctgccatg

SEQ ID NO: 2474840 - DNA, 25 bp, Homo sapien
ctggcctgtagctccgcagtgacgg

SEQ ID NO: 2474841 - DNA, 25 bp, Homo sapien
gcagtgacggtgaccccaggctgtc

SEQ ID NO: 2474842 - DNA, 25 bp, Homo sapien
tccgcagtgacggtgaccccaggct

SEQ ID NO: 2474843 - DNA, 25 bp, Homo sapien
tgtagctccgcagtgacggtgaccc

SEQ ID NO: 2474844 - DNA, 25 bp, Homo sapien
ctgcaggaccagggacaaaacgagc

SEQ ID NO: 2474845 - DNA, 25 bp, Homo sapien
tgcaggaccagggacaaaacgagcc

SEQ ID NO: 2474846 - DNA, 25 bp, Homo sapien
tcccaggacggttggcgcctttcat

SEQ ID NO: 2474847 - DNA, 25 bp, Homo sapien
ttcccaggacggttggcgcctttca

SEQ ID NO: 2474848 - DNA, 25 bp, Homo sapien
gttctcaggcccctcacggctccgg

SEQ ID NO: 2474849 - DNA, 25 bp, Homo sapien
catgttctcaggcccctcacggctc

SEQ ID NO: 2474850 - DNA, 25 bp, Homo sapien
ctcaggcccctcacggctccgggaa

SEQ ID NO: 2474851 - DNA, 25 bp, Homo sapien
ccagcttggcattgttgggcaggtt

SEQ ID NO: 2474852 - DNA, 25 bp, Homo sapien
caaaaaagatgggtcaatgtcctca

SEQ ID NO: 2474853 - DNA, 25 bp, Homo sapien
cagaagcgtacgtgtaattccaggg

SEQ ID NO: 2474854 - DNA, 25 bp, Homo sapien
gaaaagcttcgcgtgtgggatagac

SEQ ID NO: 2474855 - DNA, 25 bp, Homo sapien
cagaagccctctcttgggaacaata

SEQ ID NO: 2474856 - DNA, 25 bp, Homo sapien
tgccgccggcacgtgtcctccagaa

SEQ ID NO: 2474857 - DNA, 25 bp, Homo sapien
tattcacaggggttgaagtcctgcc

SEQ ID NO: 2474858 - DNA, 25 bp, Homo sapien
ttgaagtcctgccgccggcacgtgt

SEQ ID NO: 2474859 - DNA, 25 bp, Homo sapien
atattcacaggggttgaagtcctgc

SEQ ID NO: 2474860 - DNA, 25 bp, Homo sapien
cagtgagtgactcggcaaaaatcgc

SEQ ID NO: 2474861 - DNA, 25 bp, Homo sapien
tgattcgcggtcacaaggtgcccaa

SEQ ID NO: 2474862 - DNA, 25 bp, Homo sapien
caaggtgcccaagtaaaagtgcagt

SEQ ID NO: 2474863 - DNA, 25 bp, Homo sapien
catttaattgattcgcggtcacaag

SEQ ID NO: 2474864 - DNA, 25 bp, Homo sapien
ccttcaccgtgtggcgccggccgtt

SEQ ID NO: 2474865 - DNA, 25 bp, Homo sapien
ggccagcaccgacaccgcggagcct

SEQ ID NO: 2474866 - DNA, 25 bp, Homo sapien
tgctcggcgtcaccttcaccgtgtg

SEQ ID NO: 2474867 - DNA, 25 bp, Homo sapien
acggtgctcggcgtcaccttcaccg

SEQ ID NO: 2474868 - DNA, 25 bp, Homo sapien
agcactcgcacgtgttccgccccgc

SEQ ID NO: 2474869 - DNA, 25 bp, Homo sapien
cactcatggacagcactcgcacgtg

SEQ ID NO: 2474870 - DNA, 25 bp, Homo sapien
ctgggccactcatggacagcactcg

SEQ ID NO: 2474871 - DNA, 25 bp, Homo sapien
atggacagcactcgcacgtgttccg

SEQ ID NO: 2474872 - DNA, 25 bp, Homo sapien
tgacaaacacggacatctatgtaca

SEQ ID NO: 2474873 - DNA, 25 bp, Homo sapien
tgctgacaaacacggacatctatgt

SEQ ID NO: 2474874 - DNA, 25 bp, Homo sapien
ctgacaaacacggacatctatgtac

SEQ ID NO: 2474875 - DNA, 25 bp, Homo sapien
gaaagccccaggctagccatagccc

SEQ ID NO: 2474876 - DNA, 25 bp, Homo sapien
tatttgggccctcaactgattggat

SEQ ID NO: 2474877 - DNA, 25 bp, Homo sapien
cctgaagccccagaagtgtaggatg

SEQ ID NO: 2474878 - DNA, 25 bp, Homo sapien
gattggatgattcctgcccgctgtg

SEQ ID NO: 2474879 - DNA, 25 bp, Homo sapien
caatttgatgcacggttaggttaca

SEQ ID NO: 2474880 - DNA, 25 bp, Homo sapien
gtagcaccctccaggcaggtgagtg

SEQ ID NO: 2474881 - DNA, 25 bp, Homo sapien
ctgtagcaccctccaggcaggtgag

SEQ ID NO: 2474882 - DNA, 25 bp, Homo sapien
ctccaggcaggtgagtggaccctga

SEQ ID NO: 2474883 - DNA, 25 bp, Homo sapien
caccctccaggcaggtgagtggacc

SEQ ID NO: 2474884 - DNA, 25 bp, Homo sapien
aggagcaggagcgtggggaccagca

SEQ ID NO: 2474885 - DNA, 25 bp, Homo sapien
ccctggcctgctgccgctgttgcgg

SEQ ID NO: 2474886 - DNA, 25 bp, Homo sapien
gcctgctgccgctgttgcggcagga

SEQ ID NO: 2474887 - DNA, 25 bp, Homo sapien
gctgccgctgttgcggcaggagcag

SEQ ID NO: 2474888 - DNA, 25 bp, Homo sapien
cgcggcctgcagctcgtgagggcgg

SEQ ID NO: 2474889 - DNA, 25 bp, Homo sapien
tgcagctcgtgagggcggtggagcc

SEQ ID NO: 2474890 - DNA, 25 bp, Homo sapien
cggcctgcagctcgtgagggcggtg

SEQ ID NO: 2474891 - DNA, 25 bp, Homo sapien
cctgcagctcgtgagggcggtggag

SEQ ID NO: 2474892 - DNA, 25 bp, Homo sapien
cactgtctgcgtgatgtcccaagag

SEQ ID NO: 2474893 - DNA, 25 bp, Homo sapien
actgtctgcgtgatgtcccaagagg

SEQ ID NO: 2474894 - DNA, 25 bp, Homo sapien
ctgtctgcgtgatgtcccaagaggc

SEQ ID NO: 2474895 - DNA, 25 bp, Homo sapien
ttctcccgtcctggaattttcatcg

SEQ ID NO: 2474896 - DNA, 25 bp, Homo sapien
tcctggaattttcatcggtgatcat

SEQ ID NO: 2474897 - DNA, 25 bp, Homo sapien
cccgtcctggaattttcatcggtga

SEQ ID NO: 2474898 - DNA, 25 bp, Homo sapien
cgtcctggaattttcatcggtgatc

SEQ ID NO: 2474899 - DNA, 25 bp, Homo sapien
ttgctctgcgtcagcacctgagaat

SEQ ID NO: 2474900 - DNA, 25 bp, Homo sapien
tcacttgaaacccgcgtcgcctgct

SEQ ID NO: 2474901 - DNA, 25 bp, Homo sapien
ttgtgtccccggaccagaagcacct

SEQ ID NO: 2474902 - DNA, 25 bp, Homo sapien
agccccgcgcccctcgtcttgctct

SEQ ID NO: 2474903 - DNA, 25 bp, Homo sapien
ggcgggccttgtctaatcagttgaa

SEQ ID NO: 2474904 - DNA, 25 bp, Homo sapien
ccttcacgctggacttgggatgcct

SEQ ID NO: 2474905 - DNA, 25 bp, Homo sapien
actgatagcaccctcccagggaggt

SEQ ID NO: 2474906 - DNA, 25 bp, Homo sapien
tcagttgaaggcctccactattcca

SEQ ID NO: 2474907 - DNA, 25 bp, Homo sapien
cctgcgctgatcagagccacagaaa

SEQ ID NO: 2474908 - DNA, 25 bp, Homo sapien
cagtgggaagtgatgtggcccctcc

SEQ ID NO: 2474909 - DNA, 25 bp, Homo sapien
cagaccacagagatttccagtggga

SEQ ID NO: 2474910 - DNA, 25 bp, Homo sapien
gctgggaagcacttgcagaccacag

SEQ ID NO: 2474911 - DNA, 25 bp, Homo sapien
gtcaggcaggacgtgtcaatccttg

SEQ ID NO: 2474912 - DNA, 25 bp, Homo sapien
gcaggacgtgtcaatccttgcccgc

SEQ ID NO: 2474913 - DNA, 25 bp, Homo sapien
caggcaggacgtgtcaatccttgcc

SEQ ID NO: 2474914 - DNA, 25 bp, Homo sapien
ggcaggacgtgtcaatccttgcccg

SEQ ID NO: 2474915 - DNA, 25 bp, Homo sapien
agagcggtccctgcaggggagtcca

SEQ ID NO: 2474916 - DNA, 25 bp, Homo sapien
cggtccctgcaggggagtccagctt

SEQ ID NO: 2474917 - DNA, 25 bp, Homo sapien
tccctgcaggggagtccagcttcac

SEQ ID NO: 2474918 - DNA, 25 bp, Homo sapien
gagcggtccctgcaggggagtccag

SEQ ID NO: 2474919 - DNA, 25 bp, Homo sapien
tggtcttcttgatggcggctggtga

SEQ ID NO: 2474920 - DNA, 25 bp, Homo sapien
ctggtcagccatggactgcagctcc

SEQ ID NO: 2474921 - DNA, 25 bp, Homo sapien
ccaggatggtcttcttgatggcggc

SEQ ID NO: 2474922 - DNA, 25 bp, Homo sapien
ttgatggcggctggtgacacctgct

SEQ ID NO: 2474923 - DNA, 25 bp, Homo sapien
tgtgtcctgcgcaacactgggctgg

SEQ ID NO: 2474924 - DNA, 25 bp, Homo sapien
tctatggatgttccctcctcgcagg

SEQ ID NO: 2474925 - DNA, 25 bp, Homo sapien
ggtgtggcccctggctcaaatgaca

SEQ ID NO: 2474926 - DNA, 25 bp, Homo sapien
caaatgacactcctagctatgacaa

SEQ ID NO: 2474927 - DNA, 25 bp, Homo sapien
tgtgcggatgcaggaggcctccaca

SEQ ID NO: 2474928 - DNA, 25 bp, Homo sapien
aggaggcctccacagcgttgatgag

SEQ ID NO: 2474929 - DNA, 25 bp, Homo sapien
gtgtgcggatgcaggaggcctccac

SEQ ID NO: 2474930 - DNA, 25 bp, Homo sapien
tccacagcgttgatgagcagggagc

SEQ ID NO: 2474931 - DNA, 25 bp, Homo sapien
agagctgacgttgtccttgagctgg

SEQ ID NO: 2474932 - DNA, 25 bp, Homo sapien
caccaggagagctgacgttgtcctt

SEQ ID NO: 2474933 - DNA, 25 bp, Homo sapien
aaggcatggatggtggccccaccag

SEQ ID NO: 2474934 - DNA, 25 bp, Homo sapien
gcaaggcatggatggtggccccacc

SEQ ID NO: 2474935 - DNA, 25 bp, Homo sapien
tgggccccgaggcggactgccaggc

SEQ ID NO: 2474936 - DNA, 25 bp, Homo sapien
actgccaggcgccttggaagtccca

SEQ ID NO: 2474937 - DNA, 25 bp, Homo sapien
ggactgccaggcgccttggaagtcc

SEQ ID NO: 2474938 - DNA, 25 bp, Homo sapien
cctgggccccgaggcggactgccag

SEQ ID NO: 2474939 - DNA, 25 bp, Homo sapien
gctgccactgagccccgtgacggca

SEQ ID NO: 2474940 - DNA, 25 bp, Homo sapien
tgccactgagccccgtgacggcatc

SEQ ID NO: 2474941 - DNA, 25 bp, Homo sapien
cgctgccactgagccccgtgacggc

SEQ ID NO: 2474942 - DNA, 25 bp, Homo sapien
ctgccactgagccccgtgacggcat

SEQ ID NO: 2474943 - DNA, 25 bp, Homo sapien
ctccgtgcagaagcccacgctgctc

SEQ ID NO: 2474944 - DNA, 25 bp, Homo sapien
tgctccatgagcctcccgtcctcca

SEQ ID NO: 2474945 - DNA, 25 bp, Homo sapien
ccgtcctccacctgggcgtgcgtgc

SEQ ID NO: 2474946 - DNA, 25 bp, Homo sapien
gcagctgctccatgagcctcccgtc

SEQ ID NO: 2474947 - DNA, 25 bp, Homo sapien
gttggtcatgcagcggatgaccctg

SEQ ID NO: 2474948 - DNA, 25 bp, Homo sapien
ctcccgcaccacgactggagtgttg

SEQ ID NO: 2474949 - DNA, 25 bp, Homo sapien
cgcaccacgactggagtgttggtca

SEQ ID NO: 2474950 - DNA, 25 bp, Homo sapien
cacgactggagtgttggtcatgcag

SEQ ID NO: 2474951 - DNA, 25 bp, Homo sapien
tggagctgatggtgacgccggccgc

SEQ ID NO: 2474952 - DNA, 25 bp, Homo sapien
tcaatggagctgatggtgacgccgg

SEQ ID NO: 2474953 - DNA, 25 bp, Homo sapien
aatggagctgatggtgacgccggcc

SEQ ID NO: 2474954 - DNA, 25 bp, Homo sapien
ctcaatggagctgatggtgacgccg

SEQ ID NO: 2474955 - DNA, 25 bp, Homo sapien
aatgtcggcgcctatttcatccagg

SEQ ID NO: 2474956 - DNA, 25 bp, Homo sapien
catcactgtgctgcaccgtctcctt

SEQ ID NO: 2474957 - DNA, 25 bp, Homo sapien
tcaatgtcggcgcctatttcatcca

SEQ ID NO: 2474958 - DNA, 25 bp, Homo sapien
ccttgttgtggggtgtcaacttcac

SEQ ID NO: 2474959 - DNA, 25 bp, Homo sapien
gtctggggagctagccattatcttg

SEQ ID NO: 2474960 - DNA, 25 bp, Homo sapien
gggagctagccattatcttgtgggc

SEQ ID NO: 2474961 - DNA, 25 bp, Homo sapien
tggggagctagccattatcttgtgg

SEQ ID NO: 2474962 - DNA, 25 bp, Homo sapien
tgtctggggagctagccattatctt

SEQ ID NO: 2474963 - DNA, 25 bp, Homo sapien
agccagctggccagcgccgatgaag

SEQ ID NO: 2474964 - DNA, 25 bp, Homo sapien
tggaggttccgcagaagaaatgact

SEQ ID NO: 2474965 - DNA, 25 bp, Homo sapien
gaccggcaggatcgagagcaagtta

SEQ ID NO: 2474966 - DNA, 25 bp, Homo sapien
gctgtccggcccgttaactgcttcg

SEQ ID NO: 2474967 - DNA, 25 bp, Homo sapien
gtcagagcggcggtgcctggcctgc

SEQ ID NO: 2474968 - DNA, 25 bp, Homo sapien
aggtgttcctctaactgggcacgca

SEQ ID NO: 2474969 - DNA, 25 bp, Homo sapien
ggagcatcctccaatacccaaacct

SEQ ID NO: 2474970 - DNA, 25 bp, Homo sapien
aaagaggcatgacagtgcggccaca

SEQ ID NO: 2474971 - DNA, 25 bp, Homo sapien
gcagcggtgctccactaagcaaacg

SEQ ID NO: 2474972 - DNA, 25 bp, Homo sapien
tcatctgattcgggcctgcatctgg

SEQ ID NO: 2474973 - DNA, 25 bp, Homo sapien
tctggggctctggatagtcagggtc

SEQ ID NO: 2474974 - DNA, 25 bp, Homo sapien
ctggggctctggatagtcagggtcc

SEQ ID NO: 2474975 - DNA, 25 bp, Homo sapien
tttcctgctcaaggacgtcaatggg

SEQ ID NO: 2474976 - DNA, 25 bp, Homo sapien
tgttggctaacgtgagcgagacccc

SEQ ID NO: 2474977 - DNA, 25 bp, Homo sapien
tccagaggcagggtacgtataaatg

SEQ ID NO: 2474978 - DNA, 25 bp, Homo sapien
gaccgccgtctaaaaggagcaacag

SEQ ID NO: 2474979 - DNA, 25 bp, Homo sapien
ccggcttggactcaggggtggccag

SEQ ID NO: 2474980 - DNA, 25 bp, Homo sapien
caggctgggcttctgtgcaggagaa

SEQ ID NO: 2474981 - DNA, 25 bp, Homo sapien
ggggtggccagtgggtcagctcctg

SEQ ID NO: 2474982 - DNA, 25 bp, Homo sapien
tggccagtgggtcagctcctggctg

SEQ ID NO: 2474983 - DNA, 25 bp, Homo sapien
aagcagtacccagattctgtgtcca

SEQ ID NO: 2474984 - DNA, 25 bp, Homo sapien
gccccggcgtcaggagtttcggcaa

SEQ ID NO: 2474985 - DNA, 25 bp, Homo sapien
caactggacccttgagcagaggcaa

SEQ ID NO: 2474986 - DNA, 25 bp, Homo sapien
gcagaggcaagcagtacccagattc

SEQ ID NO: 2474987 - DNA, 25 bp, Homo sapien
atgcccgccgggcactgctgaagct

SEQ ID NO: 2474988 - DNA, 25 bp, Homo sapien
agtgcacagatgcccgccgggcact

SEQ ID NO: 2474989 - DNA, 25 bp, Homo sapien
gctgaagctgcttcgtcacagccaa

SEQ ID NO: 2474990 - DNA, 25 bp, Homo sapien
gctgcttcgtcacagccaatggtga

SEQ ID NO: 2474991 - DNA, 25 bp, Homo sapien
agctactctcctgggttcgtctcct

SEQ ID NO: 2474992 - DNA, 25 bp, Homo sapien
aaacactgtggctaccagcccagag

SEQ ID NO: 2474993 - DNA, 25 bp, Homo sapien
gggttcgtctcctctggaagtcatt

SEQ ID NO: 2474994 - DNA, 25 bp, Homo sapien
agactccggaggaagcctgcttcca

SEQ ID NO: 2474995 - DNA, 25 bp, Homo sapien
tccccagctgcaaaatgggtcacaa

SEQ ID NO: 2474996 - DNA, 25 bp, Homo sapien
actgtggtctccagacactaatgga

SEQ ID NO: 2474997 - DNA, 25 bp, Homo sapien
tcccttatgatgttccagtgaccag

SEQ ID NO: 2474998 - DNA, 25 bp, Homo sapien
ggtactgggtgcctcgcaaatgctt

SEQ ID NO: 2474999 - DNA, 25 bp, Homo sapien
gagttggggattggcctaggtgagg

SEQ ID NO: 2475000 - DNA, 25 bp, Homo sapien
gagtgagttggggattggcctaggt

SEQ ID NO: 2475001 - DNA, 25 bp, Homo sapien
agagagagtgagttggggattggcc

SEQ ID NO: 2475002 - DNA, 25 bp, Homo sapien
agagagtgagttggggattggccta

SEQ ID NO: 2475003 - DNA, 25 bp, Homo sapien
tgccactgtgggctacaggctgggc

SEQ ID NO: 2475004 - DNA, 25 bp, Homo sapien
ctacttgacactttggttcacctga

SEQ ID NO: 2475005 - DNA, 25 bp, Homo sapien
gacactttggttcacctgagtttcc

SEQ ID NO: 2475006 - DNA, 25 bp, Homo sapien
ccactgtgggctacaggctgggcac

SEQ ID NO: 2475007 - DNA, 25 bp, Homo sapien
agcaggttgacgtaggtgaagatgg

SEQ ID NO: 2475008 - DNA, 25 bp, Homo sapien
ggttgacgtaggtgaagatggccac

SEQ ID NO: 2475009 - DNA, 25 bp, Homo sapien
tgccccgagcacagttggggggccg

SEQ ID NO: 2475010 - DNA, 25 bp, Homo sapien
ccgagcacagttggggggccgtttg

SEQ ID NO: 2475011 - DNA, 25 bp, Homo sapien
accaccagccggtcaaaggggcagc

SEQ ID NO: 2475012 - DNA, 25 bp, Homo sapien
acaccaccaccagccggtcaaaggg

SEQ ID NO: 2475013 - DNA, 25 bp, Homo sapien
tgtacaccaccaccagccggtcaaa

SEQ ID NO: 2475014 - DNA, 25 bp, Homo sapien
gcacagccaggaaggtgtacaccac

SEQ ID NO: 2475015 - DNA, 25 bp, Homo sapien
actgggtggccacgtagcgcccgta

SEQ ID NO: 2475016 - DNA, 25 bp, Homo sapien
ccaggaagcacaggctgtagacggc

SEQ ID NO: 2475017 - DNA, 25 bp, Homo sapien
cgtagcggctgtcatggaccagcgc

SEQ ID NO: 2475018 - DNA, 25 bp, Homo sapien
accagcgccccgaagatgatgcagg

SEQ ID NO: 2475019 - DNA, 25 bp, Homo sapien
cacctccacagcgtaggccaggaag

SEQ ID NO: 2475020 - DNA, 25 bp, Homo sapien
ctccacagcgtaggccaggaagagg

SEQ ID NO: 2475021 - DNA, 25 bp, Homo sapien
ggaagaggagcccggcgaagacact

SEQ ID NO: 2475022 - DNA, 25 bp, Homo sapien
ggccacctccacagcgtaggccagg

SEQ ID NO: 2475023 - DNA, 25 bp, Homo sapien
aagtccctggcagcacagccggcgg

SEQ ID NO: 2475024 - DNA, 25 bp, Homo sapien
agtccctggcagcacagccggcggg

SEQ ID NO: 2475025 - DNA, 25 bp, Homo sapien
ccaggcggaagtccctggcagcaca

SEQ ID NO: 2475026 - DNA, 25 bp, Homo sapien
ctgccaggcggaagtccctggcagc

SEQ ID NO: 2475027 - DNA, 25 bp, Homo sapien
cgaaggcggcggtgaagttgcccca

SEQ ID NO: 2475028 - DNA, 25 bp, Homo sapien
gcagccgtcgcgcatagcagggtgg

SEQ ID NO: 2475029 - DNA, 25 bp, Homo sapien
gccagcatggcgaaggcggcggtga

SEQ ID NO: 2475030 - DNA, 25 bp, Homo sapien
cgtcgcgcatagcagggtggccagc

SEQ ID NO: 2475031 - DNA, 25 bp, Homo sapien
ctgtgcccacaggggatgtcacggc

SEQ ID NO: 2475032 - DNA, 25 bp, Homo sapien
aaggtgccctggacgcccgcaaagc

SEQ ID NO: 2475033 - DNA, 25 bp, Homo sapien
gcgcccaggtgcaggtacgcacccc

SEQ ID NO: 2475034 - DNA, 25 bp, Homo sapien
gaaggtagtgcagccaaaggccagc

SEQ ID NO: 2475035 - DNA, 25 bp, Homo sapien
gacgcagccaggagcgcccaagagt

SEQ ID NO: 2475036 - DNA, 25 bp, Homo sapien
cccccagtgggaatcggtggagcct

SEQ ID NO: 2475037 - DNA, 25 bp, Homo sapien
agtgggaatcggtggagcctgacgc

SEQ ID NO: 2475038 - DNA, 25 bp, Homo sapien
atgggacaggacacggggtgccagc

SEQ ID NO: 2475039 - DNA, 25 bp, Homo sapien
ggaactggggatcagcgacacacgg

SEQ ID NO: 2475040 - DNA, 25 bp, Homo sapien
gaactggggatcagcgacacacggg

SEQ ID NO: 2475041 - DNA, 25 bp, Homo sapien
aactggggatcagcgacacacgggt

SEQ ID NO: 2475042 - DNA, 25 bp, Homo sapien
ctggggatcagcgacacacgggtcc

SEQ ID NO: 2475043 - DNA, 25 bp, Homo sapien
cagctccgtgctggtcattgatggg

SEQ ID NO: 2475044 - DNA, 25 bp, Homo sapien
cagaaaattggcgacgacctcagtg

SEQ ID NO: 2475045 - DNA, 25 bp, Homo sapien
gcaatgccatccacgcgaatctgtt

SEQ ID NO: 2475046 - DNA, 25 bp, Homo sapien
tcaggacccgctacagccagaaaat

SEQ ID NO: 2475047 - DNA, 25 bp, Homo sapien
agctgcttagtccagcagcctccag

SEQ ID NO: 2475048 - DNA, 25 bp, Homo sapien
gtgagggtcggagggccctggtgcc

SEQ ID NO: 2475049 - DNA, 25 bp, Homo sapien
gaaggtttctggtggcaggcccagg

SEQ ID NO: 2475050 - DNA, 25 bp, Homo sapien
gtggcaggcccaggtgctggggcca

SEQ ID NO: 2475051 - DNA, 25 bp, Homo sapien
gcaggcccaggtgctggggccatac

SEQ ID NO: 2475052 - DNA, 25 bp, Homo sapien
ggtttctggtggcaggcccaggtgc

SEQ ID NO: 2475053 - DNA, 25 bp, Homo sapien
gtaggtaggcaaggcccggattcca

SEQ ID NO: 2475054 - DNA, 25 bp, Homo sapien
cccaggtgagcccaaatcaggtcca

SEQ ID NO: 2475055 - DNA, 25 bp, Homo sapien
caccccccggctgtaggtaggcaag

SEQ ID NO: 2475056 - DNA, 25 bp, Homo sapien
ccaggtgagcccaaatcaggtccat

SEQ ID NO: 2475057 - DNA, 25 bp, Homo sapien
gggataaactactgctttgcctgta

SEQ ID NO: 2475058 - DNA, 25 bp, Homo sapien
ccacactctgtacagagggataaac

SEQ ID NO: 2475059 - DNA, 25 bp, Homo sapien
tcggcacctcctgtgtgctacacag

SEQ ID NO: 2475060 - DNA, 25 bp, Homo sapien
aggcctttggatcaccacagcccac

SEQ ID NO: 2475061 - DNA, 25 bp, Homo sapien
ccaggtaaggccgtgtgtttacagg

SEQ ID NO: 2475062 - DNA, 25 bp, Homo sapien
aacgctcctcgaaggactcacaggc

SEQ ID NO: 2475063 - DNA, 25 bp, Homo sapien
tgggcactcgaaacgctcctcgaag

SEQ ID NO: 2475064 - DNA, 25 bp, Homo sapien
agcctggtgggcactcgaaacgctc

SEQ ID NO: 2475065 - DNA, 25 bp, Homo sapien
cccagagggtgggttcagggtggtg

SEQ ID NO: 2475066 - DNA, 25 bp, Homo sapien
gtgggttcagggtggtgcctactac

SEQ ID NO: 2475067 - DNA, 25 bp, Homo sapien
cagtgccccagagggtgggttcagg

SEQ ID NO: 2475068 - DNA, 25 bp, Homo sapien
gagggtgggttcagggtggtgccta

SEQ ID NO: 2475069 - DNA, 25 bp, Homo sapien
tgtcctgtatcctgaccacttcaag

SEQ ID NO: 2475070 - DNA, 25 bp, Homo sapien
ggcccggcagtatcctaggcccaaa

SEQ ID NO: 2475071 - DNA, 25 bp, Homo sapien
gggtaggtgtgagaagctccccagc

SEQ ID NO: 2475072 - DNA, 25 bp, Homo sapien
ggtgccatcttgaagctgattcagg

SEQ ID NO: 2475073 - DNA, 25 bp, Homo sapien
gtggccaggggcaggagggtgaggg

SEQ ID NO: 2475074 - DNA, 25 bp, Homo sapien
gcagtggccaggggcaggagggtga

SEQ ID NO: 2475075 - DNA, 25 bp, Homo sapien
gtcagggcccctgggggccaggcag

SEQ ID NO: 2475076 - DNA, 25 bp, Homo sapien
cagggcccctgggggccaggcagct

SEQ ID NO: 2475077 - DNA, 25 bp, Homo sapien
gggcagcctgagacccccaaggatg

SEQ ID NO: 2475078 - DNA, 25 bp, Homo sapien
ctgggatctgcagcccgctggagca

SEQ ID NO: 2475079 - DNA, 25 bp, Homo sapien
aggcaggcctcagccgtcagtcacg

SEQ ID NO: 2475080 - DNA, 25 bp, Homo sapien
tgagacccccaaggatgaaggaagg

SEQ ID NO: 2475081 - DNA, 25 bp, Homo sapien
gggcaccgggcgctctaggacttct

SEQ ID NO: 2475082 - DNA, 25 bp, Homo sapien
cgctctaggacttcttggcatcctg

SEQ ID NO: 2475083 - DNA, 25 bp, Homo sapien
ttcttggcatcctgcgtgctccggc

SEQ ID NO: 2475084 - DNA, 25 bp, Homo sapien
tggcatcctgcgtgctccggcgctt

SEQ ID NO: 2475085 - DNA, 25 bp, Homo sapien
cctggcctcgcaggtctcgctccac

SEQ ID NO: 2475086 - DNA, 25 bp, Homo sapien
ttagggaccttctccacatactcct

SEQ ID NO: 2475087 - DNA, 25 bp, Homo sapien
acctggcctcgcaggtctcgctcca

SEQ ID NO: 2475088 - DNA, 25 bp, Homo sapien
ggttagggaccttctccacatactc

SEQ ID NO: 2475089 - DNA, 25 bp, Homo sapien
cctgaaggctgtggacacagtgatg

SEQ ID NO: 2475090 - DNA, 25 bp, Homo sapien
ccgcctgggccctgaaggctgtgga

SEQ ID NO: 2475091 - DNA, 25 bp, Homo sapien
acacagtgatggggctatctgtgcc

SEQ ID NO: 2475092 - DNA, 25 bp, Homo sapien
cctgggccctgaaggctgtggacac

SEQ ID NO: 2475093 - DNA, 25 bp, Homo sapien
gaggttcctcggagcgtgggtcctg

SEQ ID NO: 2475094 - DNA, 25 bp, Homo sapien
caggaggttcctcggagcgtgggtc

SEQ ID NO: 2475095 - DNA, 25 bp, Homo sapien
cgtaaatgaagcggacgttctcctc

SEQ ID NO: 2475096 - DNA, 25 bp, Homo sapien
taaatgaagcggacgttctcctcgt

SEQ ID NO: 2475097 - DNA, 25 bp, Homo sapien
cttcgtaaatgaagcggacgttctc

SEQ ID NO: 2475098 - DNA, 25 bp, Homo sapien
aaatgaagcggacgttctcctcgtg

SEQ ID NO: 2475099 - DNA, 25 bp, Homo sapien
tcttgccgttgtacacgactctgga

SEQ ID NO: 2475100 - DNA, 25 bp, Homo sapien
gggctgctggtcctcttgccgttgt

SEQ ID NO: 2475101 - DNA, 25 bp, Homo sapien
gctggtcctcttgccgttgtacacg

SEQ ID NO: 2475102 - DNA, 25 bp, Homo sapien
cgttgtacacgactctggagacggg

SEQ ID NO: 2475103 - DNA, 25 bp, Homo sapien
gggggcgtctgatcctagcgctcca

SEQ ID NO: 2475104 - DNA, 25 bp, Homo sapien
tgatcctagcgctccaccgccagat

SEQ ID NO: 2475105 - DNA, 25 bp, Homo sapien
ctggtcatcgcgggggcgtctgatc

SEQ ID NO: 2475106 - DNA, 25 bp, Homo sapien
ctccaccgccagatcccctcagcct

SEQ ID NO: 2475107 - DNA, 25 bp, Homo sapien
agaagccagcgcaggcatgggacgc

SEQ ID NO: 2475108 - DNA, 25 bp, Homo sapien
cagatgtgaacaaagtgcatggtcc

SEQ ID NO: 2475109 - DNA, 25 bp, Homo sapien
caaccctacgaggtagcagagagct

SEQ ID NO: 2475110 - DNA, 25 bp, Homo sapien
cagagagctggccagacgagccaga

SEQ ID NO: 2475111 - DNA, 25 bp, Homo sapien
gctcagcggccttgatcctccacgt

SEQ ID NO: 2475112 - DNA, 25 bp, Homo sapien
aggctcagacgtggaggcctcagcc

SEQ ID NO: 2475113 - DNA, 25 bp, Homo sapien
ctcaggctcagacgtggaggcctca

SEQ ID NO: 2475114 - DNA, 25 bp, Homo sapien
ttgaagcgatcaagcccgctcagcg

SEQ ID NO: 2475115 - DNA, 25 bp, Homo sapien
gaatccacggctctggaaaaatgga

SEQ ID NO: 2475116 - DNA, 25 bp, Homo sapien
cagtaccctggagatggaaccaaac

SEQ ID NO: 2475117 - DNA, 25 bp, Homo sapien
ccagaggcccaaggctgcagatact

SEQ ID NO: 2475118 - DNA, 25 bp, Homo sapien
gagcatgagccacatcagtaccctg

SEQ ID NO: 2475119 - DNA, 25 bp, Homo sapien
tgggaagctcccgttacagagaaag

SEQ ID NO: 2475120 - DNA, 25 bp, Homo sapien
tcatgtcaatggtccagccctcaaa

SEQ ID NO: 2475121 - DNA, 25 bp, Homo sapien
tcaggtaacaggtagactggccagc

SEQ ID NO: 2475122 - DNA, 25 bp, Homo sapien
tgctgggttcggttgtcactcctgc

SEQ ID NO: 2475123 - DNA, 25 bp, Homo sapien
accaagaggtcaccatggagccaca

SEQ ID NO: 2475124 - DNA, 25 bp, Homo sapien
ataaggcctccaacaacctcagcgg

SEQ ID NO: 2475125 - DNA, 25 bp, Homo sapien
gaaggagccatccacggagagggct

SEQ ID NO: 2475126 - DNA, 25 bp, Homo sapien
ccgaggcatggacataactggagcc

SEQ ID NO: 2475127 - DNA, 25 bp, Homo sapien
gagtcagcccactcttaggaaggtg

SEQ ID NO: 2475128 - DNA, 25 bp, Homo sapien
taaactggaatgtagagtcagccca

SEQ ID NO: 2475129 - DNA, 25 bp, Homo sapien
gcaaacacttgtcgggctaagggca

SEQ ID NO: 2475130 - DNA, 25 bp, Homo sapien
gctggaccagaaagataccctgaga

SEQ ID NO: 2475131 - DNA, 25 bp, Homo sapien
tcgtccactacgagcatatgagtgt

SEQ ID NO: 2475132 - DNA, 25 bp, Homo sapien
ctccgctagttgcagagggcggtcc

SEQ ID NO: 2475133 - DNA, 25 bp, Homo sapien
tatgagtgtctcgagaggccttgga

SEQ ID NO: 2475134 - DNA, 25 bp, Homo sapien
tcagagtgcctcagcggtaaagtcg

SEQ ID NO: 2475135 - DNA, 25 bp, Homo sapien
cccctcacctgggagtcacgtttat

SEQ ID NO: 2475136 - DNA, 25 bp, Homo sapien
cctcacctgggagtcacgtttattg

SEQ ID NO: 2475137 - DNA, 25 bp, Homo sapien
acgcgcggcttctccagggaggcgg

SEQ ID NO: 2475138 - DNA, 25 bp, Homo sapien
cacgtgctggcccatgggcgacgcg

SEQ ID NO: 2475139 - DNA, 25 bp, Homo sapien
aggtcggagggcaggtcgccatcgt

SEQ ID NO: 2475140 - DNA, 25 bp, Homo sapien
catcgtcgttggttgcatccctgtc

SEQ ID NO: 2475141 - DNA, 25 bp, Homo sapien
catcgtggtccctttgaagagctcc

SEQ ID NO: 2475142 - DNA, 25 bp, Homo sapien
agctccttgtagtccgggtcgatga

SEQ ID NO: 2475143 - DNA, 25 bp, Homo sapien
ggctatgtcagggtacccatcgctg

SEQ ID NO: 2475144 - DNA, 25 bp, Homo sapien
tggctatgtcagggtacccatcgct

SEQ ID NO: 2475145 - DNA, 25 bp, Homo sapien
ctggctatgtcagggtacccatcgc

SEQ ID NO: 2475146 - DNA, 25 bp, Homo sapien
tggccagctcttccaggctttgctc

SEQ ID NO: 2475147 - DNA, 25 bp, Homo sapien
aggccctggccagctcttccaggct

SEQ ID NO: 2475148 - DNA, 25 bp, Homo sapien
cacaggccctggccagctcttccag

SEQ ID NO: 2475149 - DNA, 25 bp, Homo sapien
gccagctcttccaggctttgctcac

SEQ ID NO: 2475150 - DNA, 25 bp, Homo sapien
ggtggatggtggccagggagacttt

SEQ ID NO: 2475151 - DNA, 25 bp, Homo sapien
cagggagactttccgagtccggatg

SEQ ID NO: 2475152 - DNA, 25 bp, Homo sapien
tttccgagtccggatgaagcgcccc

SEQ ID NO: 2475153 - DNA, 25 bp, Homo sapien
gactttccgagtccggatgaagcgc

SEQ ID NO: 2475154 - DNA, 25 bp, Homo sapien
ttagggaaacgcacgctgcgatcag

SEQ ID NO: 2475155 - DNA, 25 bp, Homo sapien
gcatagcgggcagttctgctaggca

SEQ ID NO: 2475156 - DNA, 25 bp, Homo sapien
gctgccgtgggctgtagcgggcata

SEQ ID NO: 2475157 - DNA, 25 bp, Homo sapien
tccaagaacaggacatcattaggga

SEQ ID NO: 2475158 - DNA, 25 bp, Homo sapien
tcagggacagcgatcgattgtgcta

SEQ ID NO: 2475159 - DNA, 25 bp, Homo sapien
ccagtggaggtccaaagtagggctt

SEQ ID NO: 2475160 - DNA, 25 bp, Homo sapien
tagggcttggactacaggacatgag

SEQ ID NO: 2475161 - DNA, 25 bp, Homo sapien
ttaaaactcgtgttccaacaggctc

SEQ ID NO: 2475162 - DNA, 25 bp, Homo sapien
tgaaacgttccatcagaagccggcc

SEQ ID NO: 2475163 - DNA, 25 bp, Homo sapien
agccggccgtcagcagtcgtgcctg

SEQ ID NO: 2475164 - DNA, 25 bp, Homo sapien
ccatgatagacactccctggagctc

SEQ ID NO: 2475165 - DNA, 25 bp, Homo sapien
cctggagctcctcacccttgaaacg

SEQ ID NO: 2475166 - DNA, 25 bp, Homo sapien
ggtacatagacccagcaatcactgt

SEQ ID NO: 2475167 - DNA, 25 bp, Homo sapien
atcactgttttaggctccaggccgg

SEQ ID NO: 2475168 - DNA, 25 bp, Homo sapien
tagacccagcaatcactgttttagg

SEQ ID NO: 2475169 - DNA, 25 bp, Homo sapien
gggtgtggtacatagacccagcaat

SEQ ID NO: 2475170 - DNA, 25 bp, Homo sapien
ttgacacaggtcctcgcggcatgct

SEQ ID NO: 2475171 - DNA, 25 bp, Homo sapien
gccggatactccacagcctggagca

SEQ ID NO: 2475172 - DNA, 25 bp, Homo sapien
ctggtgctggcgacgtgttgacaca

SEQ ID NO: 2475173 - DNA, 25 bp, Homo sapien
gctggccggatactccacagcctgg

SEQ ID NO: 2475174 - DNA, 25 bp, Homo sapien
acccttgggctccttcctcctgcct

SEQ ID NO: 2475175 - DNA, 25 bp, Homo sapien
cttgggctccttcctcctgcctcac

SEQ ID NO: 2475176 - DNA, 25 bp, Homo sapien
ctgccacctgcacccttgggctcct

SEQ ID NO: 2475177 - DNA, 25 bp, Homo sapien
cacccttgggctccttcctcctgcc

SEQ ID NO: 2475178 - DNA, 25 bp, Homo sapien
gccgttgccctcagggggacccaca

SEQ ID NO: 2475179 - DNA, 25 bp, Homo sapien
tctgagaccaccatgagccctgctg

SEQ ID NO: 2475180 - DNA, 25 bp, Homo sapien
ctcagggcctctgccgttgccctca

SEQ ID NO: 2475181 - DNA, 25 bp, Homo sapien
ctctgagaccaccatgagccctgct

SEQ ID NO: 2475182 - DNA, 25 bp, Homo sapien
tgagtccacctgatttctcgtcact

SEQ ID NO: 2475183 - DNA, 25 bp, Homo sapien
tgatttctcgtcactccacggcggg

SEQ ID NO: 2475184 - DNA, 25 bp, Homo sapien
agggaatgaccaggagtctgagcat

SEQ ID NO: 2475185 - DNA, 25 bp, Homo sapien
tgggagggaatgaccaggagtctga

SEQ ID NO: 2475186 - DNA, 25 bp, Homo sapien
ccactaaggcctggcagatggcctt

SEQ ID NO: 2475187 - DNA, 25 bp, Homo sapien
tccgggcttggtgagatcataaacc

SEQ ID NO: 2475188 - DNA, 25 bp, Homo sapien
cagcccagctctccgggcttggtga

SEQ ID NO: 2475189 - DNA, 25 bp, Homo sapien
atggccttggcgtccgcattccagc

SEQ ID NO: 2475190 - DNA, 25 bp, Homo sapien
ttggccaatgtgttcaattcgattg

SEQ ID NO: 2475191 - DNA, 25 bp, Homo sapien
ggccaatgtgttcaattcgattgtg

SEQ ID NO: 2475192 - DNA, 25 bp, Homo sapien
tggccaatgtgttcaattcgattgt

SEQ ID NO: 2475193 - DNA, 25 bp, Homo sapien
atttggccaatgtgttcaattcgat

SEQ ID NO: 2475194 - DNA, 25 bp, Homo sapien
cacaggccgtgctgtagagaggcca

SEQ ID NO: 2475195 - DNA, 25 bp, Homo sapien
cgggagtcaagggtcgtggttctgc

SEQ ID NO: 2475196 - DNA, 25 bp, Homo sapien
ccacaggccgtgctgtagagaggcc

SEQ ID NO: 2475197 - DNA, 25 bp, Homo sapien
tcgtggttctgccttgaacaggcca

SEQ ID NO: 2475198 - DNA, 25 bp, Homo sapien
tggccaaggtggaacaaataccctg

SEQ ID NO: 2475199 - DNA, 25 bp, Homo sapien
cagtcatggcgacactgcaggcggt

SEQ ID NO: 2475200 - DNA, 25 bp, Homo sapien
ccctgacaggatccggaagtctcca

SEQ ID NO: 2475201 - DNA, 25 bp, Homo sapien
tactgagtgaccatgtccagtccgg

SEQ ID NO: 2475202 - DNA, 25 bp, Homo sapien
tccggcgacgccctccttcaagcga

SEQ ID NO: 2475203 - DNA, 25 bp, Homo sapien
gggtgaggtgtcacttcagagaggt

SEQ ID NO: 2475204 - DNA, 25 bp, Homo sapien
acgccctccttcaagcgaggccgca

SEQ ID NO: 2475205 - DNA, 25 bp, Homo sapien
cctccttcaagcgaggccgcaggct

SEQ ID NO: 2475206 - DNA, 25 bp, Homo sapien
tctgatcatcgtcttcctccatgtc

SEQ ID NO: 2475207 - DNA, 25 bp, Homo sapien
ctgatcatcgtcttcctccatgtct

SEQ ID NO: 2475208 - DNA, 25 bp, Homo sapien
tgatcatcgtcttcctccatgtctg

SEQ ID NO: 2475209 - DNA, 25 bp, Homo sapien
tgcgttccccgttgtaatcaatgac

SEQ ID NO: 2475210 - DNA, 25 bp, Homo sapien
ccagcgtgcgttccccgttgtaatc

SEQ ID NO: 2475211 - DNA, 25 bp, Homo sapien
ttaaaaccatccagcgtgcgttccc

SEQ ID NO: 2475212 - DNA, 25 bp, Homo sapien
catccagcgtgcgttccccgttgta

SEQ ID NO: 2475213 - DNA, 25 bp, Homo sapien
cctgtcggcactggcaggaaagaac

SEQ ID NO: 2475214 - DNA, 25 bp, Homo sapien
ggcactggcaggaaagaacttgagt

SEQ ID NO: 2475215 - DNA, 25 bp, Homo sapien
gcactggcaggaaagaacttgagtg

SEQ ID NO: 2475216 - DNA, 25 bp, Homo sapien
cgtcctgtcggcactggcaggaaag

SEQ ID NO: 2475217 - DNA, 25 bp, Homo sapien
tggtccttgtacgtctctcccagtt

SEQ ID NO: 2475218 - DNA, 25 bp, Homo sapien
catcttggcgatgacgatgttctca

SEQ ID NO: 2475219 - DNA, 25 bp, Homo sapien
gacgatgttctcatggtccttgtac

SEQ ID NO: 2475220 - DNA, 25 bp, Homo sapien
cctcgttggcagtcgagtccatctt

SEQ ID NO: 2475221 - DNA, 25 bp, Homo sapien
actggcagacgcttccccaggagtc

SEQ ID NO: 2475222 - DNA, 25 bp, Homo sapien
gaaagcagttctagggtgtgtcctg

SEQ ID NO: 2475223 - DNA, 25 bp, Homo sapien
ctgaaaagaaagcagttctagggtg

SEQ ID NO: 2475224 - DNA, 25 bp, Homo sapien
acaaagccactggcagacgcttccc

SEQ ID NO: 2475225 - DNA, 25 bp, Homo sapien
ttgcgcgtgccctggtggcacggac

SEQ ID NO: 2475226 - DNA, 25 bp, Homo sapien
cttgcgcgtgccctggtggcacgga

SEQ ID NO: 2475227 - DNA, 25 bp, Homo sapien
ggggagctgaaagggcaacacttac

SEQ ID NO: 2475228 - DNA, 25 bp, Homo sapien
tggggagctgaaagggcaacactta

SEQ ID NO: 2475229 - DNA, 25 bp, Homo sapien
ctggggagctgaaagggcaacactt

SEQ ID NO: 2475230 - DNA, 25 bp, Homo sapien
caccttgacaggctgcttgtcccag

SEQ ID NO: 2475231 - DNA, 25 bp, Homo sapien
cttcaaagttcttcccaacaagcac

SEQ ID NO: 2475232 - DNA, 25 bp, Homo sapien
ccggcagctcctggctcatcaggtg

SEQ ID NO: 2475233 - DNA, 25 bp, Homo sapien
tttctcatcaaaagccacgtcttca

SEQ ID NO: 2475234 - DNA, 25 bp, Homo sapien
cctgcccgggactgaggtgcgtggc

SEQ ID NO: 2475235 - DNA, 25 bp, Homo sapien
ccgggactgaggtgcgtggctgccc

SEQ ID NO: 2475236 - DNA, 25 bp, Homo sapien
tgcccgggactgaggtgcgtggctg

SEQ ID NO: 2475237 - DNA, 25 bp, Homo sapien
cccgggactgaggtgcgtggctgcc

SEQ ID NO: 2475238 - DNA, 25 bp, Homo sapien
tcgccggccaggaggtttccctgag

SEQ ID NO: 2475239 - DNA, 25 bp, Homo sapien
cagtgccaagaatccagaaagagaa

SEQ ID NO: 2475240 - DNA, 25 bp, Homo sapien
gtggcagccgcagacaccaacagtg

SEQ ID NO: 2475241 - DNA, 25 bp, Homo sapien
ctgggcccaatgagcccacgcaggc

SEQ ID NO: 2475242 - DNA, 25 bp, Homo sapien
tgccgtcagctcctccgattcgggc

SEQ ID NO: 2475243 - DNA, 25 bp, Homo sapien
ctgccgtcagctcctccgattcggg

SEQ ID NO: 2475244 - DNA, 25 bp, Homo sapien
gctcctccgattcgggcttgtactt

SEQ ID NO: 2475245 - DNA, 25 bp, Homo sapien
tcagctcctccgattcgggcttgta

SEQ ID NO: 2475246 - DNA, 25 bp, Homo sapien
tcgaggatgcgctggttgtcggtgt

SEQ ID NO: 2475247 - DNA, 25 bp, Homo sapien
gctggttgtcggtgtggtcgctgtc

SEQ ID NO: 2475248 - DNA, 25 bp, Homo sapien
tgtcggtgtggtcgctgtcgatgaa

SEQ ID NO: 2475249 - DNA, 25 bp, Homo sapien
gatgcgctggttgtcggtgtggtcg

SEQ ID NO: 2475250 - DNA, 25 bp, Homo sapien
gaagctctcggctgctgttttgaag

SEQ ID NO: 2475251 - DNA, 25 bp, Homo sapien
gtttgccgtcatagtcagacacact

SEQ ID NO: 2475252 - DNA, 25 bp, Homo sapien
cccttgaagctctcggctgctgttt

SEQ ID NO: 2475253 - DNA, 25 bp, Homo sapien
tgttttgaagttgctcagtttgccg

SEQ ID NO: 2475254 - DNA, 25 bp, Homo sapien
aggatgtgagtcttgatttcacctc

SEQ ID NO: 2475255 - DNA, 25 bp, Homo sapien
cttgggcaagaacagcaggatgtga

SEQ ID NO: 2475256 - DNA, 25 bp, Homo sapien
aagaacagcaggatgtgagtcttga

SEQ ID NO: 2475257 - DNA, 25 bp, Homo sapien
gatgtgagtcttgatttcacctcca

SEQ ID NO: 2475258 - DNA, 25 bp, Homo sapien
ccttcaaagttgttccggccttcat

SEQ ID NO: 2475259 - DNA, 25 bp, Homo sapien
ttcaaagttgttccggccttcatca

SEQ ID NO: 2475260 - DNA, 25 bp, Homo sapien
cagctggttgtgtttgataaagtcc

SEQ ID NO: 2475261 - DNA, 25 bp, Homo sapien
tgctcggtgaactcgatgacaaggg

SEQ ID NO: 2475262 - DNA, 25 bp, Homo sapien
gaaagagggccctgactgagcattg

SEQ ID NO: 2475263 - DNA, 25 bp, Homo sapien
gacagaaagagggccctgactgagc

SEQ ID NO: 2475264 - DNA, 25 bp, Homo sapien
aagagggccctgactgagcattgct

SEQ ID NO: 2475265 - DNA, 25 bp, Homo sapien
cagaaagagggccctgactgagcat

SEQ ID NO: 2475266 - DNA, 25 bp, Homo sapien
cagaggttttcctgggttgcagtgc

SEQ ID NO: 2475267 - DNA, 25 bp, Homo sapien
ccatggtgccagtgaccagcagccc

SEQ ID NO: 2475268 - DNA, 25 bp, Homo sapien
agcagcccccgcagaggttttcctg

SEQ ID NO: 2475269 - DNA, 25 bp, Homo sapien
acccatggtgccagtgaccagcagc

SEQ ID NO: 2475270 - DNA, 25 bp, Homo sapien
ggccgggcttctgcccggagctgcc

SEQ ID NO: 2475271 - DNA, 25 bp, Homo sapien
cacgtgcaccggacagggggccggg

SEQ ID NO: 2475272 - DNA, 25 bp, Homo sapien
caccggacagggggccgggcttctg

SEQ ID NO: 2475273 - DNA, 25 bp, Homo sapien
cagggggccgggcttctgcccggag

SEQ ID NO: 2475274 - DNA, 25 bp, Homo sapien
acagctgaatgcgaagaccaggcca

SEQ ID NO: 2475275 - DNA, 25 bp, Homo sapien
aatgcgaagaccaggccacaggcat

SEQ ID NO: 2475276 - DNA, 25 bp, Homo sapien
agaaagcccacagctgaatgcgaag

SEQ ID NO: 2475277 - DNA, 25 bp, Homo sapien
aagcccacagctgaatgcgaagacc

SEQ ID NO: 2475278 - DNA, 25 bp, Homo sapien
cacgtcactgttggaagtgatccca

SEQ ID NO: 2475279 - DNA, 25 bp, Homo sapien
catctttgtcgagctggtatttgga

SEQ ID NO: 2475280 - DNA, 25 bp, Homo sapien
caaatggtatgtcatcgatggcctc

SEQ ID NO: 2475281 - DNA, 25 bp, Homo sapien
taaagaggacaaccccatctttgtc

SEQ ID NO: 2475282 - DNA, 25 bp, Homo sapien
ttgaagaagccgatgacagccacct

SEQ ID NO: 2475283 - DNA, 25 bp, Homo sapien
gaagaagccgatgacagccacctcg

SEQ ID NO: 2475284 - DNA, 25 bp, Homo sapien
cttgaagaagccgatgacagccacc

SEQ ID NO: 2475285 - DNA, 25 bp, Homo sapien
tgaagaagccgatgacagccacctc

SEQ ID NO: 2475286 - DNA, 25 bp, Homo sapien
gccagttcacgatgtcatcagcctc

SEQ ID NO: 2475287 - DNA, 25 bp, Homo sapien
caaggactctgcagctgcgccgtca

SEQ ID NO: 2475288 - DNA, 25 bp, Homo sapien
gactctgcagctgcgccgtcaggca

SEQ ID NO: 2475289 - DNA, 25 bp, Homo sapien
ggcccgtgcgcttcttcagccagtt

SEQ ID NO: 2475290 - DNA, 25 bp, Homo sapien
gctggagaatgcagtggcgccatcc

SEQ ID NO: 2475291 - DNA, 25 bp, Homo sapien
tggagaatgcagtggcgccatcctg

SEQ ID NO: 2475292 - DNA, 25 bp, Homo sapien
cggcctcccaaatagctggtattac

SEQ ID NO: 2475293 - DNA, 25 bp, Homo sapien
ggcctcccaaatagctggtattaca

SEQ ID NO: 2475294 - DNA, 25 bp, Homo sapien
ggatggcaccagacaagacaggttc

SEQ ID NO: 2475295 - DNA, 25 bp, Homo sapien
caagacaggttctccattcgaaggt

SEQ ID NO: 2475296 - DNA, 25 bp, Homo sapien
caggatggcaccagacaagacaggt

SEQ ID NO: 2475297 - DNA, 25 bp, Homo sapien
gccagccgcccccaggatggcacca

SEQ ID NO: 2475298 - DNA, 25 bp, Homo sapien
aagtggacagagaacccggcctgag

SEQ ID NO: 2475299 - DNA, 25 bp, Homo sapien
cggcctgaggaacgggatccctcca

SEQ ID NO: 2475300 - DNA, 25 bp, Homo sapien
tgaggaacgggatccctccaagcct

SEQ ID NO: 2475301 - DNA, 25 bp, Homo sapien
ctgcccttccaagtcggcaggccag

SEQ ID NO: 2475302 - DNA, 25 bp, Homo sapien
caccttggccaacctgatctcggaa

SEQ ID NO: 2475303 - DNA, 25 bp, Homo sapien
gatctcggaaccttctgccttcagc

SEQ ID NO: 2475304 - DNA, 25 bp, Homo sapien
tcccagcggctttggcatactcagg

SEQ ID NO: 2475305 - DNA, 25 bp, Homo sapien
acttgatggtgggatagccgcgcac

SEQ ID NO: 2475306 - DNA, 25 bp, Homo sapien
cttgcagtggccacaccaaggggca

SEQ ID NO: 2475307 - DNA, 25 bp, Homo sapien
ttgcagtggccacaccaaggggcat

SEQ ID NO: 2475308 - DNA, 25 bp, Homo sapien
gaaagcagccttgatccctaaagca

SEQ ID NO: 2475309 - DNA, 25 bp, Homo sapien
cactagctgtgagtatgagatgcac

SEQ ID NO: 2475310 - DNA, 25 bp, Homo sapien
tgttcttgggcaatatcaggacaga

SEQ ID NO: 2475311 - DNA, 25 bp, Homo sapien
ttccccacaggcaactaaggcaagg

SEQ ID NO: 2475312 - DNA, 25 bp, Homo sapien
gccagcgcctccgcgaagttgcttt

SEQ ID NO: 2475313 - DNA, 25 bp, Homo sapien
agttgcttttccgcagcaccaggac

SEQ ID NO: 2475314 - DNA, 25 bp, Homo sapien
tcggcgcgcaccagggcggccacgg

SEQ ID NO: 2475315 - DNA, 25 bp, Homo sapien
gcgcctccgcgaagttgcttttccg

SEQ ID NO: 2475316 - DNA, 25 bp, Homo sapien
ctcgcctttataaatcctgggtccg

SEQ ID NO: 2475317 - DNA, 25 bp, Homo sapien
ccggcctcgcctttataaatcctgg

SEQ ID NO: 2475318 - DNA, 25 bp, Homo sapien
tcggacacggatcaggcggggcgct

SEQ ID NO: 2475319 - DNA, 25 bp, Homo sapien
tataaatcctgggtccggggcgcgc

SEQ ID NO: 2475320 - DNA, 25 bp, Homo sapien
gttgcattctgactggaccgcgtac

SEQ ID NO: 2475321 - DNA, 25 bp, Homo sapien
tgcccctttcggtagcacggactct

SEQ ID NO: 2475322 - DNA, 25 bp, Homo sapien
taattggtggctttcgcctgcacct

SEQ ID NO: 2475323 - DNA, 25 bp, Homo sapien
ttccttcgtcgaacgtggcagtggg

SEQ ID NO: 2475324 - DNA, 25 bp, Homo sapien
agtgctccgaggtccctcctgtgtt

SEQ ID NO: 2475325 - DNA, 25 bp, Homo sapien
ctgggcagtgctccgaggtccctcc

SEQ ID NO: 2475326 - DNA, 25 bp, Homo sapien
gcagtgctccgaggtccctcctgtg

SEQ ID NO: 2475327 - DNA, 25 bp, Homo sapien
tgctgtgcccggagtggaggtgaga

SEQ ID NO: 2475328 - DNA, 25 bp, Homo sapien
acttgggacccgagagacacgtcat

SEQ ID NO: 2475329 - DNA, 25 bp, Homo sapien
caggccatacaaacaggtcccaggt

SEQ ID NO: 2475330 - DNA, 25 bp, Homo sapien
gggccacgaggatcaggttagactt

SEQ ID NO: 2475331 - DNA, 25 bp, Homo sapien
tctggagcgccaggccatacaaaca

SEQ ID NO: 2475332 - DNA, 25 bp, Homo sapien
gacaggcgcctctgcctgagcctgg

SEQ ID NO: 2475333 - DNA, 25 bp, Homo sapien
tggcagacacaacacgaagaccggg

SEQ ID NO: 2475334 - DNA, 25 bp, Homo sapien
agacggctctcagcaatgtgtgcac

SEQ ID NO: 2475335 - DNA, 25 bp, Homo sapien
tatttcccggtcagaaaagaagcag

SEQ ID NO: 2475336 - DNA, 25 bp, Homo sapien
gcccagggacggcacggacggaggc

SEQ ID NO: 2475337 - DNA, 25 bp, Homo sapien
ccagggacggcacggacggaggcaa

SEQ ID NO: 2475338 - DNA, 25 bp, Homo sapien
gacggcacggacggaggcaataaat

SEQ ID NO: 2475339 - DNA, 25 bp, Homo sapien
agggacggcacggacggaggcaata

SEQ ID NO: 2475340 - DNA, 25 bp, Homo sapien
tgagtgaggctgtccatcgagggct

SEQ ID NO: 2475341 - DNA, 25 bp, Homo sapien
ccatcgagggctcttgggggggtgt

SEQ ID NO: 2475342 - DNA, 25 bp, Homo sapien
gggtgagtgaggctgtccatcgagg

SEQ ID NO: 2475343 - DNA, 25 bp, Homo sapien
agtgaggctgtccatcgagggctct

SEQ ID NO: 2475344 - DNA, 25 bp, Homo sapien
tcctggatggtactgaggtgacttg

SEQ ID NO: 2475345 - DNA, 25 bp, Homo sapien
gcctcctggatggtactgaggtgac

SEQ ID NO: 2475346 - DNA, 25 bp, Homo sapien
cagcctcctggatggtactgaggtg

SEQ ID NO: 2475347 - DNA, 25 bp, Homo sapien
cctcctggatggtactgaggtgact

SEQ ID NO: 2475348 - DNA, 25 bp, Homo sapien
cagacacagggagttagaggctagt

SEQ ID NO: 2475349 - DNA, 25 bp, Homo sapien
aggcatcatggttagacgggaccga

SEQ ID NO: 2475350 - DNA, 25 bp, Homo sapien
acggtacactccacatgttaaggca

SEQ ID NO: 2475351 - DNA, 25 bp, Homo sapien
agaggctagtgaggccccacggtac

SEQ ID NO: 2475352 - DNA, 25 bp, Homo sapien
ggcacggagggcctgtcagcacttt

SEQ ID NO: 2475353 - DNA, 25 bp, Homo sapien
gtccgtccgtcagtctgccctgccc

SEQ ID NO: 2475354 - DNA, 25 bp, Homo sapien
ccaggccagggaggcggaccagggt

SEQ ID NO: 2475355 - DNA, 25 bp, Homo sapien
cctgtcagcactttggtatggggag

SEQ ID NO: 2475356 - DNA, 25 bp, Homo sapien
cagtccttcttgatggtgagattcc

SEQ ID NO: 2475357 - DNA, 25 bp, Homo sapien
ttcttgatggtgagattccactccc

SEQ ID NO: 2475358 - DNA, 25 bp, Homo sapien
tcgtcgtctgtgaagcgggacttga

SEQ ID NO: 2475359 - DNA, 25 bp, Homo sapien
gacttgatgctgtagctgccccggg

SEQ ID NO: 2475360 - DNA, 25 bp, Homo sapien
cctaccatgtagtcagtcttgtcaa

SEQ ID NO: 2475361 - DNA, 25 bp, Homo sapien
gtgcctcctccacgggggtcaggaa

SEQ ID NO: 2475362 - DNA, 25 bp, Homo sapien
ctgcctaccatgtagtcagtcttgt

SEQ ID NO: 2475363 - DNA, 25 bp, Homo sapien
gggtcaggaactcgtactcctcggc

SEQ ID NO: 2475364 - DNA, 25 bp, Homo sapien
cctctgccctgcccggggccccact

SEQ ID NO: 2475365 - DNA, 25 bp, Homo sapien
ccaagcggccccctctgccctgccc

SEQ ID NO: 2475366 - DNA, 25 bp, Homo sapien
aagcggccccctctgccctgcccgg

SEQ ID NO: 2475367 - DNA, 25 bp, Homo sapien
tctgccctgcccggggccccactca

SEQ ID NO: 2475368 - DNA, 25 bp, Homo sapien
tacttcatgccggacactatctctc

SEQ ID NO: 2475369 - DNA, 25 bp, Homo sapien
tcttgacgcctttcctgtacgtatg

SEQ ID NO: 2475370 - DNA, 25 bp, Homo sapien
cctgtacgtatgctggatgtacttc

SEQ ID NO: 2475371 - DNA, 25 bp, Homo sapien
tgccggacactatctctcggttaac

SEQ ID NO: 2475372 - DNA, 25 bp, Homo sapien
gaggatcagggaaggtcggtccgga

SEQ ID NO: 2475373 - DNA, 25 bp, Homo sapien
aagcgaggatcagggaaggtcggtc

SEQ ID NO: 2475374 - DNA, 25 bp, Homo sapien
cccgaagcgaggatcagggaaggtc

SEQ ID NO: 2475375 - DNA, 25 bp, Homo sapien
ctgcaggacccgaagcgaggatcag

SEQ ID NO: 2475376 - DNA, 25 bp, Homo sapien
cagcacaaacgactgcttcttgaag

SEQ ID NO: 2475377 - DNA, 25 bp, Homo sapien
tccttcagcacaaacgactgcttct

SEQ ID NO: 2475378 - DNA, 25 bp, Homo sapien
agagatttttatccggtactccaca

SEQ ID NO: 2475379 - DNA, 25 bp, Homo sapien
cacaaacgactgcttcttgaagctc

SEQ ID NO: 2475380 - DNA, 25 bp, Homo sapien
tgcgcgaagccccagccctgcgcgg

SEQ ID NO: 2475381 - DNA, 25 bp, Homo sapien
ctgcgcgaagccccagccctgcgcg

SEQ ID NO: 2475382 - DNA, 25 bp, Homo sapien
gccccagccctgcgcggccccctgg

SEQ ID NO: 2475383 - DNA, 25 bp, Homo sapien
gaagccccagccctgcgcggccccc

SEQ ID NO: 2475384 - DNA, 25 bp, Homo sapien
gcacttcccgagatccccaccaggg

SEQ ID NO: 2475385 - DNA, 25 bp, Homo sapien
tgcacttcccgagatccccaccagg

SEQ ID NO: 2475386 - DNA, 25 bp, Homo sapien
ctgcacttcccgagatccccaccag

SEQ ID NO: 2475387 - DNA, 25 bp, Homo sapien
caggtccagctccagggggcccggg

SEQ ID NO: 2475388 - DNA, 25 bp, Homo sapien
ccgtcaggtccagctccagggggcc

SEQ ID NO: 2475389 - DNA, 25 bp, Homo sapien
gtcaggtccagctccagggggcccg

SEQ ID NO: 2475390 - DNA, 25 bp, Homo sapien
cagctccagggggcccggggccgag

SEQ ID NO: 2475391 - DNA, 25 bp, Homo sapien
ctgcacaccagggtcaggccagtca

SEQ ID NO: 2475392 - DNA, 25 bp, Homo sapien
gcacaccagggtcaggccagtcacc

SEQ ID NO: 2475393 - DNA, 25 bp, Homo sapien
tgcacaccagggtcaggccagtcac

SEQ ID NO: 2475394 - DNA, 25 bp, Homo sapien
ctggggagcggcaagacagctggag

SEQ ID NO: 2475395 - DNA, 25 bp, Homo sapien
caagacagctggagtgaacgggcgg

SEQ ID NO: 2475396 - DNA, 25 bp, Homo sapien
agacagctggagtgaacgggcggcc

SEQ ID NO: 2475397 - DNA, 25 bp, Homo sapien
agctggagtgaacgggcggccaccc

SEQ ID NO: 2475398 - DNA, 25 bp, Homo sapien
ccagcagggcctccttgtactttcg

SEQ ID NO: 2475399 - DNA, 25 bp, Homo sapien
agcagggcctccttgtactttcgca

SEQ ID NO: 2475400 - DNA, 25 bp, Homo sapien
gcctccttgtactttcgcaggctct

SEQ ID NO: 2475401 - DNA, 25 bp, Homo sapien
cagggcctccttgtactttcgcagg

SEQ ID NO: 2475402 - DNA, 25 bp, Homo sapien
ctgggccagctgctcggctgtgggc

SEQ ID NO: 2475403 - DNA, 25 bp, Homo sapien
tcgttctccgctgcaatctgggcca

SEQ ID NO: 2475404 - DNA, 25 bp, Homo sapien
gttctccgctgcaatctgggccagc

SEQ ID NO: 2475405 - DNA, 25 bp, Homo sapien
gccagctgctcggctgtgggctcct

SEQ ID NO: 2475406 - DNA, 25 bp, Homo sapien
ctcaagcttagcctgggtcgggaca

SEQ ID NO: 2475407 - DNA, 25 bp, Homo sapien
gctcaagcttagcctgggtcgggac

SEQ ID NO: 2475408 - DNA, 25 bp, Homo sapien
tcaagcttagcctgggtcgggacac

SEQ ID NO: 2475409 - DNA, 25 bp, Homo sapien
ctgcagccggagctccaaaagggct

SEQ ID NO: 2475410 - DNA, 25 bp, Homo sapien
tctaagacaaaatgggaactgcagc

SEQ ID NO: 2475411 - DNA, 25 bp, Homo sapien
aacggaggcgcacttctgagcagga

SEQ ID NO: 2475412 - DNA, 25 bp, Homo sapien
ttggacctggatccccaacggaggc

SEQ ID NO: 2475413 - DNA, 25 bp, Homo sapien
tccttcccggcagcgtgggaggtgg

SEQ ID NO: 2475414 - DNA, 25 bp, Homo sapien
ccggcaggggatctgtcaggctcag

SEQ ID NO: 2475415 - DNA, 25 bp, Homo sapien
gtcaggctcagatccttcccggcag

SEQ ID NO: 2475416 - DNA, 25 bp, Homo sapien
ggatctgtcaggctcagatccttcc

SEQ ID NO: 2475417 - DNA, 25 bp, Homo sapien
aatctggacagaggccgtgctgtgc

SEQ ID NO: 2475418 - DNA, 25 bp, Homo sapien
cctgtgttctggatttgctgggctg

SEQ ID NO: 2475419 - DNA, 25 bp, Homo sapien
aagtctcttcttgcaattgtgtccc

SEQ ID NO: 2475420 - DNA, 25 bp, Homo sapien
tctgcgcttggtgccacccaggcgt

SEQ ID NO: 2475421 - DNA, 25 bp, Homo sapien
gtagtgaggtatggttggttctggg

SEQ ID NO: 2475422 - DNA, 25 bp, Homo sapien
tgtagtgaggtatggttggttctgg

SEQ ID NO: 2475423 - DNA, 25 bp, Homo sapien
tagtgaggtatggttggttctggga

SEQ ID NO: 2475424 - DNA, 25 bp, Homo sapien
ctgtagtgaggtatggttggttctg

SEQ ID NO: 2475425 - DNA, 25 bp, Homo sapien
tgccaatttttatgagtcagtgcct

SEQ ID NO: 2475426 - DNA, 25 bp, Homo sapien
taggctacatgatcacagacaagct

SEQ ID NO: 2475427 - DNA, 25 bp, Homo sapien
aattcgcttcaataacgtgtataga

SEQ ID NO: 2475428 - DNA, 25 bp, Homo sapien
aagcatcatcatgaactcttagatg

SEQ ID NO: 2475429 - DNA, 25 bp, Homo sapien
ttagtctggaagtatctccccaagg

SEQ ID NO: 2475430 - DNA, 25 bp, Homo sapien
caccacctgaactaacaggaccagg

SEQ ID NO: 2475431 - DNA, 25 bp, Homo sapien
tccccaaggtatttatggatgacaa

SEQ ID NO: 2475432 - DNA, 25 bp, Homo sapien
tggacagactgacattgcatatctc

SEQ ID NO: 2475433 - DNA, 25 bp, Homo sapien
tgtgggagcgtgtgcacgctcacat

SEQ ID NO: 2475434 - DNA, 25 bp, Homo sapien
agcactgtgggagcgtgtgcacgct

SEQ ID NO: 2475435 - DNA, 25 bp, Homo sapien
tgcacgctcacatccgagaccctct

SEQ ID NO: 2475436 - DNA, 25 bp, Homo sapien
cactgtgggagcgtgtgcacgctca

SEQ ID NO: 2475437 - DNA, 25 bp, Homo sapien
agttcagtttgtcagccatagctcg

SEQ ID NO: 2475438 - DNA, 25 bp, Homo sapien
aagcatcactcagtcaccatgtggg

SEQ ID NO: 2475439 - DNA, 25 bp, Homo sapien
gcaccctgctggaacaataaattaa

SEQ ID NO: 2475440 - DNA, 25 bp, Homo sapien
taaattaaatagtcctctggccttg

SEQ ID NO: 2475441 - DNA, 25 bp, Homo sapien
gggttcctagactgtggccctggct

SEQ ID NO: 2475442 - DNA, 25 bp, Homo sapien
atctgggttcctagactgtggccct

SEQ ID NO: 2475443 - DNA, 25 bp, Homo sapien
caagctgcttagatggcagctgctg

SEQ ID NO: 2475444 - DNA, 25 bp, Homo sapien
tgggcaagctgcttagatggcagct

SEQ ID NO: 2475445 - DNA, 25 bp, Homo sapien
gctcccgggcaaaggtgtcctccca

SEQ ID NO: 2475446 - DNA, 25 bp, Homo sapien
gcacaggcacaagggtcaacaggtg

SEQ ID NO: 2475447 - DNA, 25 bp, Homo sapien
aaccagggagcaagaggagacgcct

SEQ ID NO: 2475448 - DNA, 25 bp, Homo sapien
aacaaatccatcattggccgcacag

SEQ ID NO: 2475449 - DNA, 25 bp, Homo sapien
tccgcacgcggatttgctggtctgt

SEQ ID NO: 2475450 - DNA, 25 bp, Homo sapien
aataactcggtacaaaacaggtctg

SEQ ID NO: 2475451 - DNA, 25 bp, Homo sapien
ctgggcatccagctcctctgccgaa

SEQ ID NO: 2475452 - DNA, 25 bp, Homo sapien
gggcatccagctcctctgccgaaag

SEQ ID NO: 2475453 - DNA, 25 bp, Homo sapien
taggcgtccagctgggcatccagct

SEQ ID NO: 2475454 - DNA, 25 bp, Homo sapien
gcatccagctcctctgccgaaagct

SEQ ID NO: 2475455 - DNA, 25 bp, Homo sapien
tctagtcatgccacctctgtttacg

SEQ ID NO: 2475456 - DNA, 25 bp, Homo sapien
cagcgccacggtttctagtcatgcc

SEQ ID NO: 2475457 - DNA, 25 bp, Homo sapien
ttctagtcatgccacctctgtttac

SEQ ID NO: 2475458 - DNA, 25 bp, Homo sapien
cctccagcgccacggtttctagtca

SEQ ID NO: 2475459 - DNA, 25 bp, Homo sapien
tgtgcgtcaatctgtgacgtgacaa

SEQ ID NO: 2475460 - DNA, 25 bp, Homo sapien
cgtcaatctgtgacgtgacaagctg

SEQ ID NO: 2475461 - DNA, 25 bp, Homo sapien
ggcctccgctgtgcgtcaatctgtg

SEQ ID NO: 2475462 - DNA, 25 bp, Homo sapien
cgctgtgcgtcaatctgtgacgtga

SEQ ID NO: 2475463 - DNA, 25 bp, Homo sapien
aaagtgcacgtctgctgttcctaag

SEQ ID NO: 2475464 - DNA, 25 bp, Homo sapien
gaccagagcgatcatagtgcacagc

SEQ ID NO: 2475465 - DNA, 25 bp, Homo sapien
tgttcctaagctgcgaccagagcga

SEQ ID NO: 2475466 - DNA, 25 bp, Homo sapien
gagggacgccgttgtactgcttcat

SEQ ID NO: 2475467 - DNA, 25 bp, Homo sapien
tgcagagagcagttgtcagaaaagc

SEQ ID NO: 2475468 - DNA, 25 bp, Homo sapien
gagcagttgtcagaaaagcaacaaa

SEQ ID NO: 2475469 - DNA, 25 bp, Homo sapien
caacaaaactgcgttccttctggtg

SEQ ID NO: 2475470 - DNA, 25 bp, Homo sapien
aaagcaacaaaactgcgttccttct

SEQ ID NO: 2475471 - DNA, 25 bp, Homo sapien
tcctactcaagcctgcggcaaagtc

SEQ ID NO: 2475472 - DNA, 25 bp, Homo sapien
acacagcgggaactggagttcacca

SEQ ID NO: 2475473 - DNA, 25 bp, Homo sapien
ggcacacagcgggaactggagttca

SEQ ID NO: 2475474 - DNA, 25 bp, Homo sapien
gaagtcaagcgctgtcatggaaact

SEQ ID NO: 2475475 - DNA, 25 bp, Homo sapien
ctgaatatcggcgtctgagactcca

SEQ ID NO: 2475476 - DNA, 25 bp, Homo sapien
caccgccgaagccactgtcgaaaag

SEQ ID NO: 2475477 - DNA, 25 bp, Homo sapien
tccaaaatccagattggacaccagc

SEQ ID NO: 2475478 - DNA, 25 bp, Homo sapien
cgaagccactgtcgaaaagatcgtg

SEQ ID NO: 2475479 - DNA, 25 bp, Homo sapien
ctgccacttgtcgggaagttgtttt

SEQ ID NO: 2475480 - DNA, 25 bp, Homo sapien
tttcctgaccctcacggctactccg

SEQ ID NO: 2475481 - DNA, 25 bp, Homo sapien
tcttcccggcctgagaggatccggc

SEQ ID NO: 2475482 - DNA, 25 bp, Homo sapien
caacaagagcagatctgtgagtctc

SEQ ID NO: 2475483 - DNA, 25 bp, Homo sapien
tgagtctcagtccagggctttcctg

SEQ ID NO: 2475484 - DNA, 25 bp, Homo sapien
ttaggttggcgaaggtgcgagggcg

SEQ ID NO: 2475485 - DNA, 25 bp, Homo sapien
gacgccggcgctgccaacggaaggg

SEQ ID NO: 2475486 - DNA, 25 bp, Homo sapien
gaagggcgggtagggcggtgcgtga

SEQ ID NO: 2475487 - DNA, 25 bp, Homo sapien
acgctccgcccgatcggccagggct

SEQ ID NO: 2475488 - DNA, 25 bp, Homo sapien
tgggccagatgtgggtggtgaatcc

SEQ ID NO: 2475489 - DNA, 25 bp, Homo sapien
gctgcatccgtgggccagatgtggg

SEQ ID NO: 2475490 - DNA, 25 bp, Homo sapien
caagtgactgcagtggtgggtccac

SEQ ID NO: 2475491 - DNA, 25 bp, Homo sapien
catccgtgggccagatgtgggtggt

SEQ ID NO: 2475492 - DNA, 25 bp, Homo sapien
ccaagagaagacatgaccaggacct

SEQ ID NO: 2475493 - DNA, 25 bp, Homo sapien
cccagaaacaagtgccagggctcca

SEQ ID NO: 2475494 - DNA, 25 bp, Homo sapien
tgaagaacctggaggccgacgtgcg

SEQ ID NO: 2475495 - DNA, 25 bp, Homo sapien
agcttgaaggctgatgtcacctgcc

SEQ ID NO: 2475496 - DNA, 25 bp, Homo sapien
gccgcctggcctcgcgtggtacaag

SEQ ID NO: 2475497 - DNA, 25 bp, Homo sapien
cctcgcgtggtacaagccagcggcg

SEQ ID NO: 2475498 - DNA, 25 bp, Homo sapien
gcctggcctcgcgtggtacaagcca

SEQ ID NO: 2475499 - DNA, 25 bp, Homo sapien
tggcctcgcgtggtacaagccagcg

SEQ ID NO: 2475500 - DNA, 25 bp, Homo sapien
gcctccgcaggtccccgtacgcgcg

SEQ ID NO: 2475501 - DNA, 25 bp, Homo sapien
gcaggtccccgtacgcgcggcgctc

SEQ ID NO: 2475502 - DNA, 25 bp, Homo sapien
cggcctccgcaggtccccgtacgcg

SEQ ID NO: 2475503 - DNA, 25 bp, Homo sapien
gctgtccggcctccgcaggtccccg

SEQ ID NO: 2475504 - DNA, 25 bp, Homo sapien
ggctgcggagcctcgtgagtccggc

SEQ ID NO: 2475505 - DNA, 25 bp, Homo sapien
aggctgcggagcctcgtgagtccgg

SEQ ID NO: 2475506 - DNA, 25 bp, Homo sapien
cggagcctcgtgagtccggcgtgcc

SEQ ID NO: 2475507 - DNA, 25 bp, Homo sapien
agcctcgtgagtccggcgtgccggg

SEQ ID NO: 2475508 - DNA, 25 bp, Homo sapien
aggtcgacctcacaacagcagagga

SEQ ID NO: 2475509 - DNA, 25 bp, Homo sapien
tgaggtcgacctcacaacagcagag

SEQ ID NO: 2475510 - DNA, 25 bp, Homo sapien
tgtggagagcctcgcgtgcacctcg

SEQ ID NO: 2475511 - DNA, 25 bp, Homo sapien
gctgtggagagcctcgcgtgcacct

SEQ ID NO: 2475512 - DNA, 25 bp, Homo sapien
ccaaagagatttccgtcagccatgt

SEQ ID NO: 2475513 - DNA, 25 bp, Homo sapien
caaaccaggcaccttgtaggcaggc

SEQ ID NO: 2475514 - DNA, 25 bp, Homo sapien
tccataaggagagtggcgaagctgc

SEQ ID NO: 2475515 - DNA, 25 bp, Homo sapien
gcagagtcctatgtccaaacgcaga

SEQ ID NO: 2475516 - DNA, 25 bp, Homo sapien
ccttcttctggtttcgcgcctcata

SEQ ID NO: 2475517 - DNA, 25 bp, Homo sapien
ttctggtttcgcgcctcatactcca

SEQ ID NO: 2475518 - DNA, 25 bp, Homo sapien
ttcttctggtttcgcgcctcatact

SEQ ID NO: 2475519 - DNA, 25 bp, Homo sapien
ctggtttcgcgcctcatactccaac

SEQ ID NO: 2475520 - DNA, 25 bp, Homo sapien
tgttggtgatgatccgctggacgat

SEQ ID NO: 2475521 - DNA, 25 bp, Homo sapien
tgatccgctggacgatgaggtctgt

SEQ ID NO: 2475522 - DNA, 25 bp, Homo sapien
aatctgacggaagatgccccttctc

SEQ ID NO: 2475523 - DNA, 25 bp, Homo sapien
ctgccactgtcaatctgacggaaga

SEQ ID NO: 2475524 - DNA, 25 bp, Homo sapien
ataatttctgtcttgccgtgacaca

SEQ ID NO: 2475525 - DNA, 25 bp, Homo sapien
ctgtcttgccgtgacacaccaggtc

SEQ ID NO: 2475526 - DNA, 25 bp, Homo sapien
aatttctgtcttgccgtgacacacc

SEQ ID NO: 2475527 - DNA, 25 bp, Homo sapien
ttctgtcttgccgtgacacaccagg

SEQ ID NO: 2475528 - DNA, 25 bp, Homo sapien
aggagctctgctgtgaccgcgtacg

SEQ ID NO: 2475529 - DNA, 25 bp, Homo sapien
ttaggagctctgctgtgaccgcgta

SEQ ID NO: 2475530 - DNA, 25 bp, Homo sapien
tgctgtgaccgcgtacggggctcca

SEQ ID NO: 2475531 - DNA, 25 bp, Homo sapien
gcgtacggggctccaatcaccactt

SEQ ID NO: 2475532 - DNA, 25 bp, Homo sapien
agcacgctcagagtccgttcatgca

SEQ ID NO: 2475533 - DNA, 25 bp, Homo sapien
ggccagcacgctcagagtccgttca

SEQ ID NO: 2475534 - DNA, 25 bp, Homo sapien
gcacgctcagagtccgttcatgcag

SEQ ID NO: 2475535 - DNA, 25 bp, Homo sapien
ccagcacgctcagagtccgttcatg

SEQ ID NO: 2475536 - DNA, 25 bp, Homo sapien
gtcaaagtgtaagcccgcgatgatg

SEQ ID NO: 2475537 - DNA, 25 bp, Homo sapien
tgtaagcccgcgatgatgtagggcc

SEQ ID NO: 2475538 - DNA, 25 bp, Homo sapien
ctggtcaaagtgtaagcccgcgatg

SEQ ID NO: 2475539 - DNA, 25 bp, Homo sapien
gcccgcgatgatgtagggcctctct

SEQ ID NO: 2475540 - DNA, 25 bp, Homo sapien
aggcaccagccacatagatgactgt

SEQ ID NO: 2475541 - DNA, 25 bp, Homo sapien
tggatgatcttctgagatgtctgca

SEQ ID NO: 2475542 - DNA, 25 bp, Homo sapien
tccaggggttccgcccaccagggca

SEQ ID NO: 2475543 - DNA, 25 bp, Homo sapien
aactggatgatcttctgagatgtct

SEQ ID NO: 2475544 - DNA, 25 bp, Homo sapien
ccttctgaggaaagtatgtccccgg

SEQ ID NO: 2475545 - DNA, 25 bp, Homo sapien
tatgtccccggcgggtatcgggtga

SEQ ID NO: 2475546 - DNA, 25 bp, Homo sapien
atgtccccggcgggtatcgggtgag

SEQ ID NO: 2475547 - DNA, 25 bp, Homo sapien
tctgaggaaagtatgtccccggcgg

SEQ ID NO: 2475548 - DNA, 25 bp, Homo sapien
cttgccaaaactgtctgcatactcc

SEQ ID NO: 2475549 - DNA, 25 bp, Homo sapien
gccaaaactgtctgcatactcccgg

SEQ ID NO: 2475550 - DNA, 25 bp, Homo sapien
tgccaaaactgtctgcatactcccg

SEQ ID NO: 2475551 - DNA, 25 bp, Homo sapien
caaaactgtctgcatactcccggta

SEQ ID NO: 2475552 - DNA, 25 bp, Homo sapien
tggagacctcgacccaggggcctcg

SEQ ID NO: 2475553 - DNA, 25 bp, Homo sapien
tgccctcccggcgtggccaccccag

SEQ ID NO: 2475554 - DNA, 25 bp, Homo sapien
ctcggggattccgccgccgactcac

SEQ ID NO: 2475555 - DNA, 25 bp, Homo sapien
cgtggccaccccagaaccggctggg

SEQ ID NO: 2475556 - DNA, 25 bp, Homo sapien
gacaccccttgcgtgcgcttgcatt

SEQ ID NO: 2475557 - DNA, 25 bp, Homo sapien
ctttggttaccagcagcatgcggcc

SEQ ID NO: 2475558 - DNA, 25 bp, Homo sapien
tggtggacaccccttgcgtgcgctt

SEQ ID NO: 2475559 - DNA, 25 bp, Homo sapien
cagcatgcggcccacgaggtctgtg

SEQ ID NO: 2475560 - DNA, 25 bp, Homo sapien
tcataggtgtcccggccatctacag

SEQ ID NO: 2475561 - DNA, 25 bp, Homo sapien
acttcctcataggtgtcccggccat

SEQ ID NO: 2475562 - DNA, 25 bp, Homo sapien
ataggtgtcccggccatctacagtc

SEQ ID NO: 2475563 - DNA, 25 bp, Homo sapien
tcctcataggtgtcccggccatcta

SEQ ID NO: 2475564 - DNA, 25 bp, Homo sapien
ggggccccttgtgcttggcgatctc

SEQ ID NO: 2475565 - DNA, 25 bp, Homo sapien
tagggagccgctggcaccacctcgt

SEQ ID NO: 2475566 - DNA, 25 bp, Homo sapien
ccagggtctctagtgtagtgacgta

SEQ ID NO: 2475567 - DNA, 25 bp, Homo sapien
accacctcgtccacccatttgatgg

SEQ ID NO: 2475568 - DNA, 25 bp, Homo sapien
cctccagtaggaggccccttcccag

SEQ ID NO: 2475569 - DNA, 25 bp, Homo sapien
cagctgtagccacacaagagggccg

SEQ ID NO: 2475570 - DNA, 25 bp, Homo sapien
agcacccagctgtagccacacaaga

SEQ ID NO: 2475571 - DNA, 25 bp, Homo sapien
cacccagctgtagccacacaagagg

SEQ ID NO: 2475572 - DNA, 25 bp, Homo sapien
tggccaactgggtggctctcttccc

SEQ ID NO: 2475573 - DNA, 25 bp, Homo sapien
tagcccactagtgctggccaactgg

SEQ ID NO: 2475574 - DNA, 25 bp, Homo sapien
cagagattccttctgacgagcaggt

SEQ ID NO: 2475575 - DNA, 25 bp, Homo sapien
cctgcgagggtctcaggcaaaggca

SEQ ID NO: 2475576 - DNA, 25 bp, Homo sapien
agctggttggagtggccgtaatgca

SEQ ID NO: 2475577 - DNA, 25 bp, Homo sapien
cggtgtgcacgcctacgatgaggta

SEQ ID NO: 2475578 - DNA, 25 bp, Homo sapien
atgaggtagtcacccatggcccgtg

SEQ ID NO: 2475579 - DNA, 25 bp, Homo sapien
tggagtggccgtaatgcaccatgtc

SEQ ID NO: 2475580 - DNA, 25 bp, Homo sapien
tacagggacgctcgcccggaggcca

SEQ ID NO: 2475581 - DNA, 25 bp, Homo sapien
atctcagcgcggtggctgcaccgga

SEQ ID NO: 2475582 - DNA, 25 bp, Homo sapien
gaggccgtggctccagatctcagcg

SEQ ID NO: 2475583 - DNA, 25 bp, Homo sapien
caagctggttgctggtggttacgga

SEQ ID NO: 2475584 - DNA, 25 bp, Homo sapien
cagccccgcgcccgttccggatcat

SEQ ID NO: 2475585 - DNA, 25 bp, Homo sapien
gcaccacaccctcacggcgcgcctg

SEQ ID NO: 2475586 - DNA, 25 bp, Homo sapien
accacaccctcacggcgcgcctgcc

SEQ ID NO: 2475587 - DNA, 25 bp, Homo sapien
cgcaccacaccctcacggcgcgcct

SEQ ID NO: 2475588 - DNA, 25 bp, Homo sapien
cgcggacagcctggcagctcccggc

SEQ ID NO: 2475589 - DNA, 25 bp, Homo sapien
gcggcgcggacagcctggcagctcc

SEQ ID NO: 2475590 - DNA, 25 bp, Homo sapien
ggcgcggacagcctggcagctcccg

SEQ ID NO: 2475591 - DNA, 25 bp, Homo sapien
cggacagcctggcagctcccggcga

SEQ ID NO: 2475592 - DNA, 25 bp, Homo sapien
tagaaatacggtgaggccctgagac

SEQ ID NO: 2475593 - DNA, 25 bp, Homo sapien
taaaaaggtctgcatagagccgagg

SEQ ID NO: 2475594 - DNA, 25 bp, Homo sapien
tatcagggtacaaccgcagcagtgc

SEQ ID NO: 2475595 - DNA, 25 bp, Homo sapien
tccgttctcacagaaaggtgcggct

SEQ ID NO: 2475596 - DNA, 25 bp, Homo sapien
tcctttttgtgcgttttgtgcagcc

SEQ ID NO: 2475597 - DNA, 25 bp, Homo sapien
tttgtgcgttttgtgcagcccctgc

SEQ ID NO: 2475598 - DNA, 25 bp, Homo sapien
gctaagcggtgcaccccggtcccca

SEQ ID NO: 2475599 - DNA, 25 bp, Homo sapien
cttctgcacagcgacttccgactgt

SEQ ID NO: 2475600 - DNA, 25 bp, Homo sapien
cgcaggggagtcgccagtgagaaaa

SEQ ID NO: 2475601 - DNA, 25 bp, Homo sapien
gagtcgccagtgagaaaatgggatc

SEQ ID NO: 2475602 - DNA, 25 bp, Homo sapien
ggggagtcgccagtgagaaaatggg

SEQ ID NO: 2475603 - DNA, 25 bp, Homo sapien
gcaggggagtcgccagtgagaaaat

SEQ ID NO: 2475604 - DNA, 25 bp, Homo sapien
tccctcccgtgtcaactgcggcggg

SEQ ID NO: 2475605 - DNA, 25 bp, Homo sapien
ggctctggttggcggcagcttcatt

SEQ ID NO: 2475606 - DNA, 25 bp, Homo sapien
cccagctcgggaaagctgtctgcgg

SEQ ID NO: 2475607 - DNA, 25 bp, Homo sapien
ggaaagctgtctgcggtccctgcct

SEQ ID NO: 2475608 - DNA, 25 bp, Homo sapien
aggcgtggcctacagacgaccccgt

SEQ ID NO: 2475609 - DNA, 25 bp, Homo sapien
gactagggaggcgtggcctacagac

SEQ ID NO: 2475610 - DNA, 25 bp, Homo sapien
gacgaccccgtgaagaaagcatgtg

SEQ ID NO: 2475611 - DNA, 25 bp, Homo sapien
cttccacttgtaccgctggggcagg

SEQ ID NO: 2475612 - DNA, 25 bp, Homo sapien
caggcatctcggagagctccacggg

SEQ ID NO: 2475613 - DNA, 25 bp, Homo sapien
ttcccaccaggcatctcggagagct

SEQ ID NO: 2475614 - DNA, 25 bp, Homo sapien
tgctcgtcccctccagatgcttccc

SEQ ID NO: 2475615 - DNA, 25 bp, Homo sapien
agatgcttcccaccaggcatctcgg

SEQ ID NO: 2475616 - DNA, 25 bp, Homo sapien
cagggcagcccagtcatccttcggg

SEQ ID NO: 2475617 - DNA, 25 bp, Homo sapien
ggagccgcatgacgtcatcacactt

SEQ ID NO: 2475618 - DNA, 25 bp, Homo sapien
atcacacttcccatgtagcttcagg

SEQ ID NO: 2475619 - DNA, 25 bp, Homo sapien
tataggcggggatctccaagcccag

SEQ ID NO: 2475620 - DNA, 25 bp, Homo sapien
ggaaagccgagtgagagtaacagca

SEQ ID NO: 2475621 - DNA, 25 bp, Homo sapien
aggacagggaaagccgagtgagagt

SEQ ID NO: 2475622 - DNA, 25 bp, Homo sapien
cagggaaagccgagtgagagtaaca

SEQ ID NO: 2475623 - DNA, 25 bp, Homo sapien
agagtaacagcagcccaacccttcc

SEQ ID NO: 2475624 - DNA, 25 bp, Homo sapien
ttcacgatgtaaagcttcggccgcc

SEQ ID NO: 2475625 - DNA, 25 bp, Homo sapien
ggttcacgatgtaaagcttcggccg

SEQ ID NO: 2475626 - DNA, 25 bp, Homo sapien
tcacgatgtaaagcttcggccgccg

SEQ ID NO: 2475627 - DNA, 25 bp, Homo sapien
caggttcacgatgtaaagcttcggc

SEQ ID NO: 2475628 - DNA, 25 bp, Homo sapien
tcggttcactcattgtgtcatcggc

SEQ ID NO: 2475629 - DNA, 25 bp, Homo sapien
gctcggttcactcattgtgtcatcg

SEQ ID NO: 2475630 - DNA, 25 bp, Homo sapien
ttcactcattgtgtcatcggcacgt

SEQ ID NO: 2475631 - DNA, 25 bp, Homo sapien
ggttcactcattgtgtcatcggcac

SEQ ID NO: 2475632 - DNA, 25 bp, Homo sapien
cttcaggctggaccctagacacagg

SEQ ID NO: 2475633 - DNA, 25 bp, Homo sapien
caaagtgcacaatggtgtcccgcag

SEQ ID NO: 2475634 - DNA, 25 bp, Homo sapien
aagtgcacaatggtgtcccgcagct

SEQ ID NO: 2475635 - DNA, 25 bp, Homo sapien
gcacaatggtgtcccgcagctgggt

SEQ ID NO: 2475636 - DNA, 25 bp, Homo sapien
tccccaaagtgcacaatggtgtccc

SEQ ID NO: 2475637 - DNA, 25 bp, Homo sapien
gtggcaggtccggcctgtctggtgt

SEQ ID NO: 2475638 - DNA, 25 bp, Homo sapien
ttgtggcaggtccggcctgtctggt

SEQ ID NO: 2475639 - DNA, 25 bp, Homo sapien
tgtggcaggtccggcctgtctggtg

SEQ ID NO: 2475640 - DNA, 25 bp, Homo sapien
gtcacatcgaacacccgcacgtact

SEQ ID NO: 2475641 - DNA, 25 bp, Homo sapien
gagggcagtgcgctccgtcacatcg

SEQ ID NO: 2475642 - DNA, 25 bp, Homo sapien
ccctgttgggaacgcaggaggtaca

SEQ ID NO: 2475643 - DNA, 25 bp, Homo sapien
cgcacgtactccctgttgggaacgc

SEQ ID NO: 2475644 - DNA, 25 bp, Homo sapien
gcacagtgagtgggacccgcctgcc

SEQ ID NO: 2475645 - DNA, 25 bp, Homo sapien
ctagaggcaagagggcacagtgagt

SEQ ID NO: 2475646 - DNA, 25 bp, Homo sapien
agcccgtcacagttctgagacacca

SEQ ID NO: 2475647 - DNA, 25 bp, Homo sapien
gagctcggagatggccgtgcgcggc

SEQ ID NO: 2475648 - DNA, 25 bp, Homo sapien
gtggagcccgtcacagttctgagac

SEQ ID NO: 2475649 - DNA, 25 bp, Homo sapien
ctcaggtggagcccgtcacagttct

SEQ ID NO: 2475650 - DNA, 25 bp, Homo sapien
aggttgcaccgtcccggcaaggttg

SEQ ID NO: 2475651 - DNA, 25 bp, Homo sapien
tgagggtgttcagcagaaggtcccc

SEQ ID NO: 2475652 - DNA, 25 bp, Homo sapien
taagcctcccctgtgactaggatgg

SEQ ID NO: 2475653 - DNA, 25 bp, Homo sapien
gggacctaggcagatcaaccactac

SEQ ID NO: 2475654 - DNA, 25 bp, Homo sapien
gcaagtgtaccagccacccagggct

SEQ ID NO: 2475655 - DNA, 25 bp, Homo sapien
gggtgcagttagttgcccactgggc

SEQ ID NO: 2475656 - DNA, 25 bp, Homo sapien
ggcaagtgtaccagccacccagggc

SEQ ID NO: 2475657 - DNA, 25 bp, Homo sapien
gtgcagttagttgcccactgggcac

SEQ ID NO: 2475658 - DNA, 25 bp, Homo sapien
tctgctcatgcagacgggtgatgct

SEQ ID NO: 2475659 - DNA, 25 bp, Homo sapien
cttctgctcatgcagacgggtgatg

SEQ ID NO: 2475660 - DNA, 25 bp, Homo sapien
tgctcatgcagacgggtgatgctca

SEQ ID NO: 2475661 - DNA, 25 bp, Homo sapien
ctgctcatgcagacgggtgatgctc

SEQ ID NO: 2475662 - DNA, 25 bp, Homo sapien
tctgaagcagtgtccacactccatt

SEQ ID NO: 2475663 - DNA, 25 bp, Homo sapien
cacactccattagggccccggtagt

SEQ ID NO: 2475664 - DNA, 25 bp, Homo sapien
cctttctgaagcagtgtccacactc

SEQ ID NO: 2475665 - DNA, 25 bp, Homo sapien
ccccggtagtctgggatagacgctg

SEQ ID NO: 2475666 - DNA, 25 bp, Homo sapien
ctggcaccgagcacaaagctgggct

SEQ ID NO: 2475667 - DNA, 25 bp, Homo sapien
gaaacggaaagccactgtcactcct

SEQ ID NO: 2475668 - DNA, 25 bp, Homo sapien
tgagcccatatggagtgtaccccaa

SEQ ID NO: 2475669 - DNA, 25 bp, Homo sapien
cactgtaggtactggcagaattccc

SEQ ID NO: 2475670 - DNA, 25 bp, Homo sapien
gtgggtttcccaactccaagagcgc

SEQ ID NO: 2475671 - DNA, 25 bp, Homo sapien
ccagggctccgggtatttgagtcag

SEQ ID NO: 2475672 - DNA, 25 bp, Homo sapien
catcaaattagatggacgaggtgcc

SEQ ID NO: 2475673 - DNA, 25 bp, Homo sapien
gagtttgctctagcgacccagcaca

SEQ ID NO: 2475674 - DNA, 25 bp, Homo sapien
tagagctgctttaaaggcgagtttt

SEQ ID NO: 2475675 - DNA, 25 bp, Homo sapien
aaccttagagctgctttaaaggcga

SEQ ID NO: 2475676 - DNA, 25 bp, Homo sapien
tgctttaaaggcgagtttttcgcga

SEQ ID NO: 2475677 - DNA, 25 bp, Homo sapien
ttaagagaaaaaaccttagagctgc

SEQ ID NO: 2475678 - DNA, 25 bp, Homo sapien
cctgtgtagacgaccaagtatttgg

SEQ ID NO: 2475679 - DNA, 25 bp, Homo sapien
tagacgaccaagtatttggcgttcc

SEQ ID NO: 2475680 - DNA, 25 bp, Homo sapien
attcccgcgcctgtgtagacgacca

SEQ ID NO: 2475681 - DNA, 25 bp, Homo sapien
agtatttggcgttccggacggcgct

SEQ ID NO: 2475682 - DNA, 25 bp, Homo sapien
gccaagacgccagggtggtcaccgc

SEQ ID NO: 2475683 - DNA, 25 bp, Homo sapien
ctgccaagacgccagggtggtcacc

SEQ ID NO: 2475684 - DNA, 25 bp, Homo sapien
caagacgccagggtggtcaccgccc

SEQ ID NO: 2475685 - DNA, 25 bp, Homo sapien
agacgccagggtggtcaccgccccg

SEQ ID NO: 2475686 - DNA, 25 bp, Homo sapien
cctcctgccgccgcttcaggccctc

SEQ ID NO: 2475687 - DNA, 25 bp, Homo sapien
gccgcttcaggccctcgcgccgccg

SEQ ID NO: 2475688 - DNA, 25 bp, Homo sapien
gcttcaggccctcgcgccgccggct

SEQ ID NO: 2475689 - DNA, 25 bp, Homo sapien
tgccgccgcttcaggccctcgcgcc

SEQ ID NO: 2475690 - DNA, 25 bp, Homo sapien
ccgccttcctcaggatgcgcgacac

SEQ ID NO: 2475691 - DNA, 25 bp, Homo sapien
caggtccgcgctctcggccagcagc

SEQ ID NO: 2475692 - DNA, 25 bp, Homo sapien
ggccctcctcggcgctgcgctccgc

SEQ ID NO: 2475693 - DNA, 25 bp, Homo sapien
gcgctctcggccagcagccggccct

SEQ ID NO: 2475694 - DNA, 25 bp, Homo sapien
tgcgggcaggcggacggtgagcggc

SEQ ID NO: 2475695 - DNA, 25 bp, Homo sapien
gcaggcggacggtgagcggcggcgc

SEQ ID NO: 2475696 - DNA, 25 bp, Homo sapien
ctgcgggcaggcggacggtgagcgg

SEQ ID NO: 2475697 - DNA, 25 bp, Homo sapien
cgggcaggcggacggtgagcggcgg

SEQ ID NO: 2475698 - DNA, 25 bp, Homo sapien
tttgcgctcggagcggctcagaccc

SEQ ID NO: 2475699 - DNA, 25 bp, Homo sapien
ctggcggaggcgctccctctgctgc

SEQ ID NO: 2475700 - DNA, 25 bp, Homo sapien
tccggacccgctccgccgctttgcg

SEQ ID NO: 2475701 - DNA, 25 bp, Homo sapien
gccgctttgcgctcggagcggctca

SEQ ID NO: 2475702 - DNA, 25 bp, Homo sapien
ttccgcctcacacggcaggccgcgc

SEQ ID NO: 2475703 - DNA, 25 bp, Homo sapien
ttccgcttccgcctcacacggcagg

SEQ ID NO: 2475704 - DNA, 25 bp, Homo sapien
cgcttccgcctcacacggcaggccg

SEQ ID NO: 2475705 - DNA, 25 bp, Homo sapien
cgcctcacacggcaggccgcgctca

SEQ ID NO: 2475706 - DNA, 25 bp, Homo sapien
cagcaggtatggtacacacccagga

SEQ ID NO: 2475707 - DNA, 25 bp, Homo sapien
tgcggctccgactttccagatgtgg

SEQ ID NO: 2475708 - DNA, 25 bp, Homo sapien
caagatcccagagcggaaacggtgc

SEQ ID NO: 2475709 - DNA, 25 bp, Homo sapien
tgaaacatgcaccaagagctgagcc

SEQ ID NO: 2475710 - DNA, 25 bp, Homo sapien
ctgtccctgctgggtattcctctga

SEQ ID NO: 2475711 - DNA, 25 bp, Homo sapien
tcactctcctggtgagagctgacct

SEQ ID NO: 2475712 - DNA, 25 bp, Homo sapien
tattcctctgaaatctgagcgtcca

SEQ ID NO: 2475713 - DNA, 25 bp, Homo sapien
ctctcctggtgagagctgacctgtc

SEQ ID NO: 2475714 - DNA, 25 bp, Homo sapien
gaggtatggcctcgaaactccagaa

SEQ ID NO: 2475715 - DNA, 25 bp, Homo sapien
tatatcatggtttacttggcggaca

SEQ ID NO: 2475716 - DNA, 25 bp, Homo sapien
tggccaaagccctcgattcgctgtg

SEQ ID NO: 2475717 - DNA, 25 bp, Homo sapien
tgatatgattccaactaacgcctgg

SEQ ID NO: 2475718 - DNA, 25 bp, Homo sapien
gctttacagaagtctgggccccaca

SEQ ID NO: 2475719 - DNA, 25 bp, Homo sapien
gcagcatggaaacacctcagggatc

SEQ ID NO: 2475720 - DNA, 25 bp, Homo sapien
ctataggaacaaagctgaggccaga

SEQ ID NO: 2475721 - DNA, 25 bp, Homo sapien
tctggtcggctcacggcttggcttt

SEQ ID NO: 2475722 - DNA, 25 bp, Homo sapien
gtggtccacccatcagggccttcaa

SEQ ID NO: 2475723 - DNA, 25 bp, Homo sapien
tcagtgcaacgggtcaggcctgagt

SEQ ID NO: 2475724 - DNA, 25 bp, Homo sapien
aaattcgccatgtgcctagtggccc

SEQ ID NO: 2475725 - DNA, 25 bp, Homo sapien
aacactgggaccctcactgctcggg

SEQ ID NO: 2475726 - DNA, 25 bp, Homo sapien
cgggcatccgtcttggactttacta

SEQ ID NO: 2475727 - DNA, 25 bp, Homo sapien
ctttactattgtgatgacgctggtg

SEQ ID NO: 2475728 - DNA, 25 bp, Homo sapien
ctacgatcgggcatccgtcttggac

SEQ ID NO: 2475729 - DNA, 25 bp, Homo sapien
ggactttactattgtgatgacgctg

SEQ ID NO: 2475730 - DNA, 25 bp, Homo sapien
agcttcatgctggcgttctctgagg

SEQ ID NO: 2475731 - DNA, 25 bp, Homo sapien
tcatgctggcgttctctgaggccag

SEQ ID NO: 2475732 - DNA, 25 bp, Homo sapien
gggctggcgccacggggctgcgggc

SEQ ID NO: 2475733 - DNA, 25 bp, Homo sapien
ctgcgggccaccgtccgggcgaagg

SEQ ID NO: 2475734 - DNA, 25 bp, Homo sapien
gcaggtgctggttcagctcccgcac

SEQ ID NO: 2475735 - DNA, 25 bp, Homo sapien
cctccttggacaggccccgcaggtg

SEQ ID NO: 2475736 - DNA, 25 bp, Homo sapien
cccgcaggtgctggttcagctcccg

SEQ ID NO: 2475737 - DNA, 25 bp, Homo sapien
acaggccccgcaggtgctggttcag

SEQ ID NO: 2475738 - DNA, 25 bp, Homo sapien
tcctcatccgtcaggctggtgccat

SEQ ID NO: 2475739 - DNA, 25 bp, Homo sapien
gtgccattctcacccggctcccgct

SEQ ID NO: 2475740 - DNA, 25 bp, Homo sapien
tcatccgtcaggctggtgccattct

SEQ ID NO: 2475741 - DNA, 25 bp, Homo sapien
tggtgccattctcacccggctcccg

SEQ ID NO: 2475742 - DNA, 25 bp, Homo sapien
cttcaaggccttgtttcctttattg

SEQ ID NO: 2475743 - DNA, 25 bp, Homo sapien
aacccgggggcacagcgagcaggcg

SEQ ID NO: 2475744 - DNA, 25 bp, Homo sapien
acccgggggcacagcgagcaggcgc

SEQ ID NO: 2475745 - DNA, 25 bp, Homo sapien
cccgggggcacagcgagcaggcgct

SEQ ID NO: 2475746 - DNA, 25 bp, Homo sapien
tcaggaaggtctgacgggagaaggg

SEQ ID NO: 2475747 - DNA, 25 bp, Homo sapien
ggtcaggaaggtctgacgggagaag

SEQ ID NO: 2475748 - DNA, 25 bp, Homo sapien
cctgcccctagagaaccaggtggga

SEQ ID NO: 2475749 - DNA, 25 bp, Homo sapien
gaggtcaggaaggtctgacgggaga

SEQ ID NO: 2475750 - DNA, 25 bp, Homo sapien
ccctgagccggcctcggacaaagcc

SEQ ID NO: 2475751 - DNA, 25 bp, Homo sapien
ggcctcggacaaagccccctgctcc

SEQ ID NO: 2475752 - DNA, 25 bp, Homo sapien
ctgagccggcctcggacaaagcccc

SEQ ID NO: 2475753 - DNA, 25 bp, Homo sapien
tcccctgagccggcctcggacaaag

SEQ ID NO: 2475754 - DNA, 25 bp, Homo sapien
tccgggctctggcacgcgactgacg

SEQ ID NO: 2475755 - DNA, 25 bp, Homo sapien
gctctggcacgcgactgacggaacc

SEQ ID NO: 2475756 - DNA, 25 bp, Homo sapien
ccctccgggctctggcacgcgactg

SEQ ID NO: 2475757 - DNA, 25 bp, Homo sapien
tggcacgcgactgacggaacccgag

SEQ ID NO: 2475758 - DNA, 25 bp, Homo sapien
agtcatgcttacttgctggccagcc

SEQ ID NO: 2475759 - DNA, 25 bp, Homo sapien
gaacagtcaaaaagaaggtgtcaga

SEQ ID NO: 2475760 - DNA, 25 bp, Homo sapien
tgtgaacagtcaaaaagaaggtgtc

SEQ ID NO: 2475761 - DNA, 25 bp, Homo sapien
ctgtgaacagtcaaaaagaaggtgt

SEQ ID NO: 2475762 - DNA, 25 bp, Homo sapien
cagtcaaaaagaaggtgtcagaagg

SEQ ID NO: 2475763 - DNA, 25 bp, Homo sapien
gagatagttccctccagcaggaaaa

SEQ ID NO: 2475764 - DNA, 25 bp, Homo sapien
aagtctgcccctgttgctcagagat

SEQ ID NO: 2475765 - DNA, 25 bp, Homo sapien
cctgttgctcagagatagttccctc

SEQ ID NO: 2475766 - DNA, 25 bp, Homo sapien
aacctctttgaggtgagttacggct

SEQ ID NO: 2475767 - DNA, 25 bp, Homo sapien
gctctgagcaattaaagggcagcca

SEQ ID NO: 2475768 - DNA, 25 bp, Homo sapien
tacgcgccaggttgctgaacagctc

SEQ ID NO: 2475769 - DNA, 25 bp, Homo sapien
caaccaacagccacttatgtaccag

SEQ ID NO: 2475770 - DNA, 25 bp, Homo sapien
ttatgtaccagctacgcgccaggtt

SEQ ID NO: 2475771 - DNA, 25 bp, Homo sapien
ggcatcccgaagtctttgtggagac

SEQ ID NO: 2475772 - DNA, 25 bp, Homo sapien
ggggcatcccgaagtctttgtggag

SEQ ID NO: 2475773 - DNA, 25 bp, Homo sapien
gggcatcccgaagtctttgtggaga

SEQ ID NO: 2475774 - DNA, 25 bp, Homo sapien
cagagatcccggtagacccgggagg

SEQ ID NO: 2475775 - DNA, 25 bp, Homo sapien
ggcaggattcgagcctggcctcaag

SEQ ID NO: 2475776 - DNA, 25 bp, Homo sapien
aggcaggcaggattcgagcctggcc

SEQ ID NO: 2475777 - DNA, 25 bp, Homo sapien
aggcaggattcgagcctggcctcaa

SEQ ID NO: 2475778 - DNA, 25 bp, Homo sapien
gcaggattcgagcctggcctcaagc

SEQ ID NO: 2475779 - DNA, 25 bp, Homo sapien
gaatctgtgaagcagtatggcacca

SEQ ID NO: 2475780 - DNA, 25 bp, Homo sapien
atctgtgaagcagtatggcaccaac

SEQ ID NO: 2475781 - DNA, 25 bp, Homo sapien
tggcaccaactccccttttgtccat

SEQ ID NO: 2475782 - DNA, 25 bp, Homo sapien
aaagaatctgtgaagcagtatggca

SEQ ID NO: 2475783 - DNA, 25 bp, Homo sapien
tcttcaagacgcagcagaaaaagct

SEQ ID NO: 2475784 - DNA, 25 bp, Homo sapien
cagactgtcaggtggctatttgccc

SEQ ID NO: 2475785 - DNA, 25 bp, Homo sapien
ggcacaagccatggtctctattcga

SEQ ID NO: 2475786 - DNA, 25 bp, Homo sapien
ggaactctgcgtacagcaatggtca

SEQ ID NO: 2475787 - DNA, 25 bp, Homo sapien
tggccgctccctaaaaataagctgg

SEQ ID NO: 2475788 - DNA, 25 bp, Homo sapien
gaagtggtcactatcaagcctccaa

SEQ ID NO: 2475789 - DNA, 25 bp, Homo sapien
gtttgggtaaatcagtggccgctcc

SEQ ID NO: 2475790 - DNA, 25 bp, Homo sapien
taaaattgggacacatcgagcaatc

SEQ ID NO: 2475791 - DNA, 25 bp, Homo sapien
gaaaaacgcattcaacagtctcagg

SEQ ID NO: 2475792 - DNA, 25 bp, Homo sapien
tctcaggtaaccagggcgaatccat

SEQ ID NO: 2475793 - DNA, 25 bp, Homo sapien
tcctgatttatgcaacaaaaggtct

SEQ ID NO: 2475794 - DNA, 25 bp, Homo sapien
gacgcttaccgtttatctagatcaa

SEQ ID NO: 2475795 - DNA, 25 bp, Homo sapien
actttgtatttttagtacagatggg

SEQ ID NO: 2475796 - DNA, 25 bp, Homo sapien
ccaatggcgcgatctaggctctctg

SEQ ID NO: 2475797 - DNA, 25 bp, Homo sapien
ctttgtatttttagtacagatgggg

SEQ ID NO: 2475798 - DNA, 25 bp, Homo sapien
agtccaatggcgcgatctaggctct

SEQ ID NO: 2475799 - DNA, 25 bp, Homo sapien
tcttccgaggacagacaagatttct

SEQ ID NO: 2475800 - DNA, 25 bp, Homo sapien
agagactgggtcagcgaaaggaaca

SEQ ID NO: 2475801 - DNA, 25 bp, Homo sapien
gtgcccggcctgaagacagccttta

SEQ ID NO: 2475802 - DNA, 25 bp, Homo sapien
gtcagcgaaaggaacattccggtct

SEQ ID NO: 2475803 - DNA, 25 bp, Homo sapien
tacctagagcggagcctaaagatgc

SEQ ID NO: 2475804 - DNA, 25 bp, Homo sapien
tgtcatcgtgctcgcaaggcaactg

SEQ ID NO: 2475805 - DNA, 25 bp, Homo sapien
aagagccggcagaggtttgtcatcg

SEQ ID NO: 2475806 - DNA, 25 bp, Homo sapien
gttgggatgcaacgtatagatacag

SEQ ID NO: 2475807 - DNA, 25 bp, Homo sapien
tgcacctcagtttttcccgggcaaa

SEQ ID NO: 2475808 - DNA, 25 bp, Homo sapien
cctgccttaaagtgccagctactca

SEQ ID NO: 2475809 - DNA, 25 bp, Homo sapien
agcttgctgccggtgcgttggcacc

SEQ ID NO: 2475810 - DNA, 25 bp, Homo sapien
cctgtgcgttccgtgatcaatggct

SEQ ID NO: 2475811 - DNA, 25 bp, Homo sapien
aaagcgtgccgcataagcctaccgt

SEQ ID NO: 2475812 - DNA, 25 bp, Homo sapien
agcagttaagtcaagccggcgcgtc

SEQ ID NO: 2475813 - DNA, 25 bp, Homo sapien
tagccacggtggaaacgaaagcgtg

SEQ ID NO: 2475814 - DNA, 25 bp, Homo sapien
gcgtcacaggcactcggcgtgcaag

SEQ ID NO: 2475815 - DNA, 25 bp, Homo sapien
caccaggtcgatgcgtggagtggac

SEQ ID NO: 2475816 - DNA, 25 bp, Homo sapien
ggtcgatgcgtggagtggacggagc

SEQ ID NO: 2475817 - DNA, 25 bp, Homo sapien
ctgcaacaccaggtcgatgcgtgga

SEQ ID NO: 2475818 - DNA, 25 bp, Homo sapien
gcaacaccaggtcgatgcgtggagt

SEQ ID NO: 2475819 - DNA, 25 bp, Homo sapien
cgggctttcatttcgaatttgcatg

SEQ ID NO: 2475820 - DNA, 25 bp, Homo sapien
gggctttcatttcgaatttgcatgc

SEQ ID NO: 2475821 - DNA, 25 bp, Homo sapien
ccgggctttcatttcgaatttgcat

SEQ ID NO: 2475822 - DNA, 25 bp, Homo sapien
gctttcatttcgaatttgcatgccc

SEQ ID NO: 2475823 - DNA, 25 bp, Homo sapien
cagcgaaaagacagaaccggaagag

SEQ ID NO: 2475824 - DNA, 25 bp, Homo sapien
ggcgacttccttgttcgtatcgagc

SEQ ID NO: 2475825 - DNA, 25 bp, Homo sapien
tcgtatcgagccagcgaaaagacag

SEQ ID NO: 2475826 - DNA, 25 bp, Homo sapien
tcggcggagagcggtccacgttttc

SEQ ID NO: 2475827 - DNA, 25 bp, Homo sapien
agggcaggagcgcgggctgcgctgg

SEQ ID NO: 2475828 - DNA, 25 bp, Homo sapien
ccccagggcaggagcgcgggctgcg

SEQ ID NO: 2475829 - DNA, 25 bp, Homo sapien
ctggagaaagacgaggccccagggc

SEQ ID NO: 2475830 - DNA, 25 bp, Homo sapien
aggagcgcgggctgcgctgggcctt

SEQ ID NO: 2475831 - DNA, 25 bp, Homo sapien
tatttcactccacggccctaagagg

SEQ ID NO: 2475832 - DNA, 25 bp, Homo sapien
gccttattattagccacggccaggg

SEQ ID NO: 2475833 - DNA, 25 bp, Homo sapien
ggctgagggctctactgcgcattac

SEQ ID NO: 2475834 - DNA, 25 bp, Homo sapien
aatatatcttatcttgtgggccgca

SEQ ID NO: 2475835 - DNA, 25 bp, Homo sapien
ggactactgagtctttcggtgcccc

SEQ ID NO: 2475836 - DNA, 25 bp, Homo sapien
tagttttgtcctgcggccgagtgtt

SEQ ID NO: 2475837 - DNA, 25 bp, Homo sapien
taatcaggatattcacgtggactac

SEQ ID NO: 2475838 - DNA, 25 bp, Homo sapien
gggtggaccctacattatctcagct

SEQ ID NO: 2475839 - DNA, 25 bp, Homo sapien
gagccaccgctcaccctggcttttt

SEQ ID NO: 2475840 - DNA, 25 bp, Homo sapien
cttgagccaccgctcaccctggctt

SEQ ID NO: 2475841 - DNA, 25 bp, Homo sapien
ggcttgagccaccgctcaccctggc

SEQ ID NO: 2475842 - DNA, 25 bp, Homo sapien
gtgttgcttgcgattacaggcttga

SEQ ID NO: 2475843 - DNA, 25 bp, Homo sapien
tcgctcggacgctcaggttggactg

SEQ ID NO: 2475844 - DNA, 25 bp, Homo sapien
cttctgctctttagtaccgcataga

SEQ ID NO: 2475845 - DNA, 25 bp, Homo sapien
ctcgctcggacgctcaggttggact

SEQ ID NO: 2475846 - DNA, 25 bp, Homo sapien
ctgctctttagtaccgcatagagcc

SEQ ID NO: 2475847 - DNA, 25 bp, Homo sapien
tagcctcctgcggtattcagggagc

SEQ ID NO: 2475848 - DNA, 25 bp, Homo sapien
cagtgttgccaagagggtaccagga

SEQ ID NO: 2475849 - DNA, 25 bp, Homo sapien
gccttgacctgtgcaactgataacg

SEQ ID NO: 2475850 - DNA, 25 bp, Homo sapien
ttcagggagccattaggcaccttct

SEQ ID NO: 2475851 - DNA, 25 bp, Homo sapien
tctgataaactgtgggaacagatag

SEQ ID NO: 2475852 - DNA, 25 bp, Homo sapien
tgttcttcaccaacaagctccagct

SEQ ID NO: 2475853 - DNA, 25 bp, Homo sapien
ctcctgacgtgaggtccctggcgga

SEQ ID NO: 2475854 - DNA, 25 bp, Homo sapien
gtccagtcgatctgcgacaccatca

SEQ ID NO: 2475855 - DNA, 25 bp, Homo sapien
aatatggaagcttgagagaaaagca

SEQ ID NO: 2475856 - DNA, 25 bp, Homo sapien
aacaaaaatatggaagcttgagaga

SEQ ID NO: 2475857 - DNA, 25 bp, Homo sapien
aaagcaaccttaggcacacattttc

SEQ ID NO: 2475858 - DNA, 25 bp, Homo sapien
gagaaaagcaaccttaggcacacat

SEQ ID NO: 2475859 - DNA, 25 bp, Homo sapien
catctattttatctaggcattggaa

SEQ ID NO: 2475860 - DNA, 25 bp, Homo sapien
tatctaggcattggaaagggtaatg

SEQ ID NO: 2475861 - DNA, 25 bp, Homo sapien
acatctattttatctaggcattgga

SEQ ID NO: 2475862 - DNA, 25 bp, Homo sapien
ttttatctaggcattggaaagggta

SEQ ID NO: 2475863 - DNA, 25 bp, Homo sapien
gagtccagccatgaagctggtgcct

SEQ ID NO: 2475864 - DNA, 25 bp, Homo sapien
tgtccttgtgggcccaggacgccag

SEQ ID NO: 2475865 - DNA, 25 bp, Homo sapien
ggcgttgtgtcatctgagtccagcc

SEQ ID NO: 2475866 - DNA, 25 bp, Homo sapien
catgaagctggtgcctgagtgtccc

SEQ ID NO: 2475867 - DNA, 25 bp, Homo sapien
gtggacagcttccgacctggcgctg

SEQ ID NO: 2475868 - DNA, 25 bp, Homo sapien
tggacagcttccgacctggcgctgg

SEQ ID NO: 2475869 - DNA, 25 bp, Homo sapien
aacttcccaggactacttcacattg

SEQ ID NO: 2475870 - DNA, 25 bp, Homo sapien
ggaccttgctcaaagtacaacttcc

SEQ ID NO: 2475871 - DNA, 25 bp, Homo sapien
tcccaggactacttcacattgttaa

SEQ ID NO: 2475872 - DNA, 25 bp, Homo sapien
ctgcttgcggaccttgctcaaagta

SEQ ID NO: 2475873 - DNA, 25 bp, Homo sapien
ttcaacttcaaaacaagcagtctcc

SEQ ID NO: 2475874 - DNA, 25 bp, Homo sapien
tcaacttcaaaacaagcagtctccc

SEQ ID NO: 2475875 - DNA, 25 bp, Homo sapien
attctggacacaatagggctgagtg

SEQ ID NO: 2475876 - DNA, 25 bp, Homo sapien
cagaaatacgacaagttcccggcgg

SEQ ID NO: 2475877 - DNA, 25 bp, Homo sapien
ccggatggaggcgtcaactacaaga

SEQ ID NO: 2475878 - DNA, 25 bp, Homo sapien
aagagcgggactctgcaggtaaccc

SEQ ID NO: 2475879 - DNA, 25 bp, Homo sapien
ctttgctggaaccatcggcgtggga

SEQ ID NO: 2475880 - DNA, 25 bp, Homo sapien
tgctcccttcccgcgttccgcctgg

SEQ ID NO: 2475881 - DNA, 25 bp, Homo sapien
ctgctcccttcccgcgttccgcctg

SEQ ID NO: 2475882 - DNA, 25 bp, Homo sapien
gaggccgtaggaacgggcctgtcga

SEQ ID NO: 2475883 - DNA, 25 bp, Homo sapien
ccgtaggaacgggcctgtcgaagtg

SEQ ID NO: 2475884 - DNA, 25 bp, Homo sapien
gtaggaacgggcctgtcgaagtgcg

SEQ ID NO: 2475885 - DNA, 25 bp, Homo sapien
taggaacgggcctgtcgaagtgcgc

SEQ ID NO: 2475886 - DNA, 25 bp, Homo sapien
cacttatgcccgcgtgaaaaacctt

SEQ ID NO: 2475887 - DNA, 25 bp, Homo sapien
cgccggccaccgctgccagggtcac

SEQ ID NO: 2475888 - DNA, 25 bp, Homo sapien
acacccacttatgcccgcgtgaaaa

SEQ ID NO: 2475889 - DNA, 25 bp, Homo sapien
tgcacacacccacttatgcccgcgt

SEQ ID NO: 2475890 - DNA, 25 bp, Homo sapien
tgcctgtctgatccgacggcttggg

SEQ ID NO: 2475891 - DNA, 25 bp, Homo sapien
tgtctgatccgacggcttgggctca

SEQ ID NO: 2475892 - DNA, 25 bp, Homo sapien
ttccggtgtgcctgtctgatccgac

SEQ ID NO: 2475893 - DNA, 25 bp, Homo sapien
ggtgtgcctgtctgatccgacggct

SEQ ID NO: 2475894 - DNA, 25 bp, Homo sapien
gtctcagacagatctgccacaatcg

SEQ ID NO: 2475895 - DNA, 25 bp, Homo sapien
atctgccacaatcgttgctgacttt

SEQ ID NO: 2475896 - DNA, 25 bp, Homo sapien
gtattgttgtctcagacagatctgc

SEQ ID NO: 2475897 - DNA, 25 bp, Homo sapien
atctggtgtctgtattgttgtctca

SEQ ID NO: 2475898 - DNA, 25 bp, Homo sapien
cacaacgttctggaaaagacaggga

SEQ ID NO: 2475899 - DNA, 25 bp, Homo sapien
gtgaacagcagtcggctgccatctg

SEQ ID NO: 2475900 - DNA, 25 bp, Homo sapien
gaaaagacagggagtaaatcagtgg

SEQ ID NO: 2475901 - DNA, 25 bp, Homo sapien
gtggctctcccaatacagtgaacag

SEQ ID NO: 2475902 - DNA, 25 bp, Homo sapien
gacagcgccctgatagagtaggcca

SEQ ID NO: 2475903 - DNA, 25 bp, Homo sapien
acctctcacaagtccacatctgggc

SEQ ID NO: 2475904 - DNA, 25 bp, Homo sapien
agtaggccacctctcacaagtccac

SEQ ID NO: 2475905 - DNA, 25 bp, Homo sapien
gccacctctcacaagtccacatctg

SEQ ID NO: 2475906 - DNA, 25 bp, Homo sapien
aggtctctgttgagacatcccatac

SEQ ID NO: 2475907 - DNA, 25 bp, Homo sapien
aaagacagctgaaggagtggtagcc

SEQ ID NO: 2475908 - DNA, 25 bp, Homo sapien
gattttgctgccgtctggggaccag

SEQ ID NO: 2475909 - DNA, 25 bp, Homo sapien
ccagagcaggttggtcaccccacct

SEQ ID NO: 2475910 - DNA, 25 bp, Homo sapien
ccggatagcagcatccacgggtgaa

SEQ ID NO: 2475911 - DNA, 25 bp, Homo sapien
atccacgggtgaagctgagagcagc

SEQ ID NO: 2475912 - DNA, 25 bp, Homo sapien
cagggtgagacagcacttgggcaca

SEQ ID NO: 2475913 - DNA, 25 bp, Homo sapien
ccaggccaagctggtaacaggtgta

SEQ ID NO: 2475914 - DNA, 25 bp, Homo sapien
tccagggtccagataagaatgcagc

SEQ ID NO: 2475915 - DNA, 25 bp, Homo sapien
ggcaggccacagccaagacagaggc

SEQ ID NO: 2475916 - DNA, 25 bp, Homo sapien
cttccaggccagagacgccacattt

SEQ ID NO: 2475917 - DNA, 25 bp, Homo sapien
gacagaggcactaaggggcttccag

SEQ ID NO: 2475918 - DNA, 25 bp, Homo sapien
tgagtcaaggcaggaacactaaggc

SEQ ID NO: 2475919 - DNA, 25 bp, Homo sapien
tgatattgacaagtcagagcccacc

SEQ ID NO: 2475920 - DNA, 25 bp, Homo sapien
accagagtgcagttaaggagggaaa

SEQ ID NO: 2475921 - DNA, 25 bp, Homo sapien
ttaggtctagaagaagcacgcatcc

SEQ ID NO: 2475922 - DNA, 25 bp, Homo sapien
ggcattatacacacggactgagtca

SEQ ID NO: 2475923 - DNA, 25 bp, Homo sapien
tgcaaagacacgcaagcagcagctg

SEQ ID NO: 2475924 - DNA, 25 bp, Homo sapien
tctagcagggccactgcaaacttgt

SEQ ID NO: 2475925 - DNA, 25 bp, Homo sapien
gggtgccatgcaaagacacgcaagc

SEQ ID NO: 2475926 - DNA, 25 bp, Homo sapien
agaatatggtgagcaatcagaaaag

SEQ ID NO: 2475927 - DNA, 25 bp, Homo sapien
agaaaaggagtaggagtctttgcct

SEQ ID NO: 2475928 - DNA, 25 bp, Homo sapien
cagaaaaggagtaggagtctttgcc

SEQ ID NO: 2475929 - DNA, 25 bp, Homo sapien
aaattcagcgatcagatcttcgctc

SEQ ID NO: 2475930 - DNA, 25 bp, Homo sapien
gtgacttgggcaaattcagcgatca

SEQ ID NO: 2475931 - DNA, 25 bp, Homo sapien
gacttgggcaaattcagcgatcaga

SEQ ID NO: 2475932 - DNA, 25 bp, Homo sapien
tgggcaaattcagcgatcagatctt

SEQ ID NO: 2475933 - DNA, 25 bp, Homo sapien
agctggaccactcctaccctctgaa

SEQ ID NO: 2475934 - DNA, 25 bp, Homo sapien
tgaagtcatcacacccaaccctgac

SEQ ID NO: 2475935 - DNA, 25 bp, Homo sapien
ggcaaaaggagtccatctcctcaat

SEQ ID NO: 2475936 - DNA, 25 bp, Homo sapien
cctgacctgcaaggataggaatgag

SEQ ID NO: 2475937 - DNA, 25 bp, Homo sapien
agaggcccatcgacagagtgccagg

SEQ ID NO: 2475938 - DNA, 25 bp, Homo sapien
gaacagggacccatggagggaagag

SEQ ID NO: 2475939 - DNA, 25 bp, Homo sapien
ggatgccgtcttcacccactcaaac

SEQ ID NO: 2475940 - DNA, 25 bp, Homo sapien
catggagggaagaggcccatcgaca

SEQ ID NO: 2475941 - DNA, 25 bp, Homo sapien
tgagttcaagaatatggagaggaga

SEQ ID NO: 2475942 - DNA, 25 bp, Homo sapien
agtgctctcaacaccacactctgga

SEQ ID NO: 2475943 - DNA, 25 bp, Homo sapien
gctctgattaaaccattcacaggcc

SEQ ID NO: 2475944 - DNA, 25 bp, Homo sapien
gaggaagcagctctgattaaaccat

SEQ ID NO: 2475945 - DNA, 25 bp, Homo sapien
cctcttcttctgagtttgcaatttc

SEQ ID NO: 2475946 - DNA, 25 bp, Homo sapien
gcaatttcatttagcaccccaaaaa

SEQ ID NO: 2475947 - DNA, 25 bp, Homo sapien
tgcaatttcatttagcaccccaaaa

SEQ ID NO: 2475948 - DNA, 25 bp, Homo sapien
ctcttcttctgagtttgcaatttca

SEQ ID NO: 2475949 - DNA, 25 bp, Homo sapien
ggatgaaggcagttcttgtgccatg

SEQ ID NO: 2475950 - DNA, 25 bp, Homo sapien
cctttgtcagttgtaggacaggaag

SEQ ID NO: 2475951 - DNA, 25 bp, Homo sapien
tcttccacacttgctcccggtgatg

SEQ ID NO: 2475952 - DNA, 25 bp, Homo sapien
cttgctcccggtgatggatgaaggc

SEQ ID NO: 2475953 - DNA, 25 bp, Homo sapien
caaagctaacacttgtgagaatggg

SEQ ID NO: 2475954 - DNA, 25 bp, Homo sapien
acaagtcttagctcccgtatctgtg

SEQ ID NO: 2475955 - DNA, 25 bp, Homo sapien
gttgtatccttctgatcctccccag

SEQ ID NO: 2475956 - DNA, 25 bp, Homo sapien
ccaccgctgggctaagtataagaga

SEQ ID NO: 2475957 - DNA, 25 bp, Homo sapien
gggctctcatagctactgcccgtca

SEQ ID NO: 2475958 - DNA, 25 bp, Homo sapien
ggggcgggctctcatagctactgcc

SEQ ID NO: 2475959 - DNA, 25 bp, Homo sapien
ggcgggctctcatagctactgcccg

SEQ ID NO: 2475960 - DNA, 25 bp, Homo sapien
tcggggggcgggctctcatagctac

SEQ ID NO: 2475961 - DNA, 25 bp, Homo sapien
cagctcgttattgtgctcatatagg

SEQ ID NO: 2475962 - DNA, 25 bp, Homo sapien
tgtgctcatatagggtgacttgacc

SEQ ID NO: 2475963 - DNA, 25 bp, Homo sapien
tatagggtgacttgaccccgaggcg

SEQ ID NO: 2475964 - DNA, 25 bp, Homo sapien
cgttattgtgctcatatagggtgac

SEQ ID NO: 2475965 - DNA, 25 bp, Homo sapien
gattcgtatgcggacgggtaccgca

SEQ ID NO: 2475966 - DNA, 25 bp, Homo sapien
ggacaaacggcgaggcggaactcaa

SEQ ID NO: 2475967 - DNA, 25 bp, Homo sapien
tcaacggaagtgaagaaaagactaa

SEQ ID NO: 2475968 - DNA, 25 bp, Homo sapien
cgcaactcggttcccgggctagatt

SEQ ID NO: 2475969 - DNA, 25 bp, Homo sapien
tgaagaacataaggtatacactggg

SEQ ID NO: 2475970 - DNA, 25 bp, Homo sapien
gcttgaagaacataaggtatacact

SEQ ID NO: 2475971 - DNA, 25 bp, Homo sapien
aaagcttgaagaacataaggtatac

SEQ ID NO: 2475972 - DNA, 25 bp, Homo sapien
agaaagcttgaagaacataaggtat

SEQ ID NO: 2475973 - DNA, 25 bp, Homo sapien
ccggggccggtaaccaggcgcacat

SEQ ID NO: 2475974 - DNA, 25 bp, Homo sapien
ttacaggaaaggcacgaagcggctt

SEQ ID NO: 2475975 - DNA, 25 bp, Homo sapien
caatacccctgatgaagaggccacc

SEQ ID NO: 2475976 - DNA, 25 bp, Homo sapien
tctagagagccaagagagactgtca

SEQ ID NO: 2475977 - DNA, 25 bp, Homo sapien
tggatgcaccaccagatcagcttgg

SEQ ID NO: 2475978 - DNA, 25 bp, Homo sapien
taatcattagcatagcctgaggtgg

SEQ ID NO: 2475979 - DNA, 25 bp, Homo sapien
cccagagttgttgagtcccgcagag

SEQ ID NO: 2475980 - DNA, 25 bp, Homo sapien
cctgggcctggtgaaatgcctgcat

SEQ ID NO: 2475981 - DNA, 25 bp, Homo sapien
tagctcctggcaattagggcagtcg

SEQ ID NO: 2475982 - DNA, 25 bp, Homo sapien
gggactggagccatagtgaacttcc

SEQ ID NO: 2475983 - DNA, 25 bp, Homo sapien
ggactggagccatagtgaacttcct

SEQ ID NO: 2475984 - DNA, 25 bp, Homo sapien
gactggagccatagtgaacttcctc

SEQ ID NO: 2475985 - DNA, 25 bp, Homo sapien
ggggactggagccatagtgaacttc

SEQ ID NO: 2475986 - DNA, 25 bp, Homo sapien
tgtgtacgatgccaatccgagaggt

SEQ ID NO: 2475987 - DNA, 25 bp, Homo sapien
tacgatgccaatccgagaggtgggc

SEQ ID NO: 2475988 - DNA, 25 bp, Homo sapien
cgatgccaatccgagaggtgggcct

SEQ ID NO: 2475989 - DNA, 25 bp, Homo sapien
agtatgtgtacgatgccaatccgag

SEQ ID NO: 2475990 - DNA, 25 bp, Homo sapien
ccacaggggcctcagccaagcccag

SEQ ID NO: 2475991 - DNA, 25 bp, Homo sapien
acaggggcctcagccaagcccaggg

SEQ ID NO: 2475992 - DNA, 25 bp, Homo sapien
actgcggccacaggggcctcagcca

SEQ ID NO: 2475993 - DNA, 25 bp, Homo sapien
tgcggccacaggggcctcagccaag

SEQ ID NO: 2475994 - DNA, 25 bp, Homo sapien
agttggcttcctgtttggcccagca

SEQ ID NO: 2475995 - DNA, 25 bp, Homo sapien
ttggcttcctgtttggcccagcacc

SEQ ID NO: 2475996 - DNA, 25 bp, Homo sapien
cccacaggttgagtgagttggcttc

SEQ ID NO: 2475997 - DNA, 25 bp, Homo sapien
ctctcccacaggttgagtgagttgg

SEQ ID NO: 2475998 - DNA, 25 bp, Homo sapien
cccaaggagccaggcagatggagag

SEQ ID NO: 2475999 - DNA, 25 bp, Homo sapien
caaggagccaggcagatggagagag

SEQ ID NO: 2476000 - DNA, 25 bp, Homo sapien
aacgggtcccaaggagccaggcaga

SEQ ID NO: 2476001 - DNA, 25 bp, Homo sapien
ggaacgggtcccaaggagccaggca

SEQ ID NO: 2476002 - DNA, 25 bp, Homo sapien
gagagaaaagggagagggagggaga

SEQ ID NO: 2476003 - DNA, 25 bp, Homo sapien
ggtagagagagaaaagggagaggga

SEQ ID NO: 2476004 - DNA, 25 bp, Homo sapien
tagagagagaaaagggagagggagg

SEQ ID NO: 2476005 - DNA, 25 bp, Homo sapien
agagagagaaaagggagagggaggg

SEQ ID NO: 2476006 - DNA, 25 bp, Homo sapien
ggctgtcccgagtctctcctctctg

SEQ ID NO: 2476007 - DNA, 25 bp, Homo sapien
gctccggtcctacagtcctactctg

SEQ ID NO: 2476008 - DNA, 25 bp, Homo sapien
gggagggatccgctctctcccaggc

SEQ ID NO: 2476009 - DNA, 25 bp, Homo sapien
actcctgttccactcaggctccggt

SEQ ID NO: 2476010 - DNA, 25 bp, Homo sapien
ggagagtgcaggcaacgggtggcct

SEQ ID NO: 2476011 - DNA, 25 bp, Homo sapien
ttctcggagtgcccaattccttgct

SEQ ID NO: 2476012 - DNA, 25 bp, Homo sapien
tctcggagtgcccaattccttgctc

SEQ ID NO: 2476013 - DNA, 25 bp, Homo sapien
ctcggagtgcccaattccttgctcc

SEQ ID NO: 2476014 - DNA, 25 bp, Homo sapien
tttctcggagtgcccaattccttgc

SEQ ID NO: 2476015 - DNA, 25 bp, Homo sapien
cagcaggtaggcaccaatttcaggg

SEQ ID NO: 2476016 - DNA, 25 bp, Homo sapien
caatttcagggtagggcccaggagt

SEQ ID NO: 2476017 - DNA, 25 bp, Homo sapien
gggttgcacagcagtttcgccagca

SEQ ID NO: 2476018 - DNA, 25 bp, Homo sapien
gatggaggtccacggagggttgcac

SEQ ID NO: 2476019 - DNA, 25 bp, Homo sapien
ttaggtacttttgatccaatactcc

SEQ ID NO: 2476020 - DNA, 25 bp, Homo sapien
aggtacttttgatccaatactccac

SEQ ID NO: 2476021 - DNA, 25 bp, Homo sapien
taggtacttttgatccaatactcca

SEQ ID NO: 2476022 - DNA, 25 bp, Homo sapien
ctttaggtacttttgatccaatact

SEQ ID NO: 2476023 - DNA, 25 bp, Homo sapien
agagacccagatggccccagcgaac

SEQ ID NO: 2476024 - DNA, 25 bp, Homo sapien
cccagatggccccagcgaactccct

SEQ ID NO: 2476025 - DNA, 25 bp, Homo sapien
atggccccagcgaactccctggtcc

SEQ ID NO: 2476026 - DNA, 25 bp, Homo sapien
agatggccccagcgaactccctggt

SEQ ID NO: 2476027 - DNA, 25 bp, Homo sapien
tcccgacggtgccaacatcccgttg

SEQ ID NO: 2476028 - DNA, 25 bp, Homo sapien
tcttccgccgtagctttctcgaggc

SEQ ID NO: 2476029 - DNA, 25 bp, Homo sapien
tccggatcttgcagtgcccgaggtc

SEQ ID NO: 2476030 - DNA, 25 bp, Homo sapien
tctcgaggctgcatccaagcttctt

SEQ ID NO: 2476031 - DNA, 25 bp, Homo sapien
gcggcccgagcagcgaaggccccgc

SEQ ID NO: 2476032 - DNA, 25 bp, Homo sapien
ccactactcggccgcccgcctgagg

SEQ ID NO: 2476033 - DNA, 25 bp, Homo sapien
tcggccgcccgcctgaggctcctcc

SEQ ID NO: 2476034 - DNA, 25 bp, Homo sapien
cccgagcagcgaaggccccgcccgg

SEQ ID NO: 2476035 - DNA, 25 bp, Homo sapien
agcgattggatttcactgtgctggt

SEQ ID NO: 2476036 - DNA, 25 bp, Homo sapien
tagtagcgattggatttcactgtgc

SEQ ID NO: 2476037 - DNA, 25 bp, Homo sapien
ggactgactctagcttgtctcccag

SEQ ID NO: 2476038 - DNA, 25 bp, Homo sapien
gactgactctagcttgtctcccagg

SEQ ID NO: 2476039 - DNA, 25 bp, Homo sapien
tgttcaaaatactactgacgcaggc

SEQ ID NO: 2476040 - DNA, 25 bp, Homo sapien
tatggctgagccttgttgtgacaca

SEQ ID NO: 2476041 - DNA, 25 bp, Homo sapien
accttcttggcgctggagagtcaaa

SEQ ID NO: 2476042 - DNA, 25 bp, Homo sapien
gaaaaatccttgaagcccaggctga

SEQ ID NO: 2476043 - DNA, 25 bp, Homo sapien
gaaaagctgctggtttaccctcaac

SEQ ID NO: 2476044 - DNA, 25 bp, Homo sapien
tcaactcaggaactatggcaaggaa

SEQ ID NO: 2476045 - DNA, 25 bp, Homo sapien
tgcaaccagaattgtcctcaaggcc

SEQ ID NO: 2476046 - DNA, 25 bp, Homo sapien
taacggcagggaacctagtgcattt

SEQ ID NO: 2476047 - DNA, 25 bp, Homo sapien
tttagatgaccaaaacttgcagggc

SEQ ID NO: 2476048 - DNA, 25 bp, Homo sapien
gacagtctagctgcctcaagtgagg

SEQ ID NO: 2476049 - DNA, 25 bp, Homo sapien
ggatttccaactggcactctgtggg

SEQ ID NO: 2476050 - DNA, 25 bp, Homo sapien
tcaagagttttggagatcaggtacc

SEQ ID NO: 2476051 - DNA, 25 bp, Homo sapien
gtctctggctttattactcccctaa

SEQ ID NO: 2476052 - DNA, 25 bp, Homo sapien
acttgccttagatccaaggcaggga

SEQ ID NO: 2476053 - DNA, 25 bp, Homo sapien
tccaaatttggctcacttgccttag

SEQ ID NO: 2476054 - DNA, 25 bp, Homo sapien
gcagccttaagcttaaattcctact

SEQ ID NO: 2476055 - DNA, 25 bp, Homo sapien
caaatgggattagactagggctgca

SEQ ID NO: 2476056 - DNA, 25 bp, Homo sapien
tgacctgaggagacatctacacaca

SEQ ID NO: 2476057 - DNA, 25 bp, Homo sapien
cagggatatgggctctgtctaccca

SEQ ID NO: 2476058 - DNA, 25 bp, Homo sapien
tcaactgccctaagtcctagctaag

SEQ ID NO: 2476059 - DNA, 25 bp, Homo sapien
ctgagaagagtcaacagagtccagc

SEQ ID NO: 2476060 - DNA, 25 bp, Homo sapien
tgagaagagtcaacagagtccagca

SEQ ID NO: 2476061 - DNA, 25 bp, Homo sapien
gagaagagtcaacagagtccagcat

SEQ ID NO: 2476062 - DNA, 25 bp, Homo sapien
cctgagaagagtcaacagagtccag

SEQ ID NO: 2476063 - DNA, 25 bp, Homo sapien
tagcagaggcgggtgccgaagcacg

SEQ ID NO: 2476064 - DNA, 25 bp, Homo sapien
gtttgttgtctaatcatcagtcgag

SEQ ID NO: 2476065 - DNA, 25 bp, Homo sapien
tctgggtgactaggaagagccgaga

SEQ ID NO: 2476066 - DNA, 25 bp, Homo sapien
agtcgagcggccacataattaccaa

SEQ ID NO: 2476067 - DNA, 25 bp, Homo sapien
ccatggcaatccagctttcccccca

SEQ ID NO: 2476068 - DNA, 25 bp, Homo sapien
caggatgccaaccgttgggtcccta

SEQ ID NO: 2476069 - DNA, 25 bp, Homo sapien
caaggttgctgggaagtagagtcca

SEQ ID NO: 2476070 - DNA, 25 bp, Homo sapien
tttggttgatgagctttgactgcgg

SEQ ID NO: 2476071 - DNA, 25 bp, Homo sapien
catatagctaatgaattaggcaggg

SEQ ID NO: 2476072 - DNA, 25 bp, Homo sapien
tttgttggttgcactaactgcaagg

SEQ ID NO: 2476073 - DNA, 25 bp, Homo sapien
cgcttccggggtcgaagggtgcgcg

SEQ ID NO: 2476074 - DNA, 25 bp, Homo sapien
cggggttgaaagcaggccgctccgc

SEQ ID NO: 2476075 - DNA, 25 bp, Homo sapien
ggaaggcttggacgacgcaatcgcc

SEQ ID NO: 2476076 - DNA, 25 bp, Homo sapien
ttggacgacgcaatcgcctcgccgg

SEQ ID NO: 2476077 - DNA, 25 bp, Homo sapien
taaactaccaggtctttaccacatc

SEQ ID NO: 2476078 - DNA, 25 bp, Homo sapien
ttcttacagacctaacgcttcttcc

SEQ ID NO: 2476079 - DNA, 25 bp, Homo sapien
tgtaaagggcttcctattacatctg

SEQ ID NO: 2476080 - DNA, 25 bp, Homo sapien
tctgcaagagggtaaggaattaaac

SEQ ID NO: 2476081 - DNA, 25 bp, Homo sapien
taggcagatagagaaataagttgga

SEQ ID NO: 2476082 - DNA, 25 bp, Homo sapien
tcagctagcatccagtgttcttaag

SEQ ID NO: 2476083 - DNA, 25 bp, Homo sapien
aacttcacatcctgttaaccagcca

SEQ ID NO: 2476084 - DNA, 25 bp, Homo sapien
cctactgttagggactcagctagca

SEQ ID NO: 2476085 - DNA, 25 bp, Homo sapien
taagcttgagtgttagccagctggc

SEQ ID NO: 2476086 - DNA, 25 bp, Homo sapien
ggtagagaccatccatttgtgccaa

SEQ ID NO: 2476087 - DNA, 25 bp, Homo sapien
cgagggtcccttgatggatctggcc

SEQ ID NO: 2476088 - DNA, 25 bp, Homo sapien
aggcattgaatccagctctccagag

SEQ ID NO: 2476089 - DNA, 25 bp, Homo sapien
ctgactgccatttcattctatctga

SEQ ID NO: 2476090 - DNA, 25 bp, Homo sapien
tccagtctaggttaggagaataggg

SEQ ID NO: 2476091 - DNA, 25 bp, Homo sapien
cattctatctgaccttccagtctag

SEQ ID NO: 2476092 - DNA, 25 bp, Homo sapien
gaccttccagtctaggttaggagaa

SEQ ID NO: 2476093 - DNA, 25 bp, Homo sapien
catatttagagggtgggacataggc

SEQ ID NO: 2476094 - DNA, 25 bp, Homo sapien
ccttgttgggtgattgatgagtatc

SEQ ID NO: 2476095 - DNA, 25 bp, Homo sapien
gtcacaagttgacactaggtcttcc

SEQ ID NO: 2476096 - DNA, 25 bp, Homo sapien
tgtcagatacatgaagtatgtgccc

SEQ ID NO: 2476097 - DNA, 25 bp, Homo sapien
gtcacgatccctgatcacctcagca

SEQ ID NO: 2476098 - DNA, 25 bp, Homo sapien
tctgcttggcatgaaacccatccct

SEQ ID NO: 2476099 - DNA, 25 bp, Homo sapien
ggtaccggggcttcagctaccacca

SEQ ID NO: 2476100 - DNA, 25 bp, Homo sapien
taaatgttgtgtctgctgctaaggg

SEQ ID NO: 2476101 - DNA, 25 bp, Homo sapien
tgacttctcagatggccttaccttg

SEQ ID NO: 2476102 - DNA, 25 bp, Homo sapien
taatggttaagctatcagcaggcct

SEQ ID NO: 2476103 - DNA, 25 bp, Homo sapien
gaaggtcctctgtaattggcaacaa

SEQ ID NO: 2476104 - DNA, 25 bp, Homo sapien
gctaacaaggtgttcatcccaggat

SEQ ID NO: 2476105 - DNA, 25 bp, Homo sapien
gatagccttccattcaacgagagta

SEQ ID NO: 2476106 - DNA, 25 bp, Homo sapien
gagagtacacgttgccacagtgctg

SEQ ID NO: 2476107 - DNA, 25 bp, Homo sapien
ctatcaggagtaggaagtgacatgc

SEQ ID NO: 2476108 - DNA, 25 bp, Homo sapien
tgaaagtgtaatgctcttcccaggg

SEQ ID NO: 2476109 - DNA, 25 bp, Homo sapien
atagtttgtagtcgaaggactttgc

SEQ ID NO: 2476110 - DNA, 25 bp, Homo sapien
tgtagtcgaaggactttgcagtttt

SEQ ID NO: 2476111 - DNA, 25 bp, Homo sapien
agtcgaaggactttgcagttttttg

SEQ ID NO: 2476112 - DNA, 25 bp, Homo sapien
agtttgtagtcgaaggactttgcag

SEQ ID NO: 2476113 - DNA, 25 bp, Homo sapien
gaagggatacagatggtgaattacc

SEQ ID NO: 2476114 - DNA, 25 bp, Homo sapien
tgaaagccctaaattggattccagg

SEQ ID NO: 2476115 - DNA, 25 bp, Homo sapien
tctaggagcttgtagagtgagctac

SEQ ID NO: 2476116 - DNA, 25 bp, Homo sapien
gcaaagtcttgctgcctacctacct

SEQ ID NO: 2476117 - DNA, 25 bp, Homo sapien
gtaaaggccttgagttgtctcagca

SEQ ID NO: 2476118 - DNA, 25 bp, Homo sapien
ccctacacattgatagaactccagg

SEQ ID NO: 2476119 - DNA, 25 bp, Homo sapien
gcattaaacccttgagactactctc

SEQ ID NO: 2476120 - DNA, 25 bp, Homo sapien
cctaaactggtattctgtcagcagt

SEQ ID NO: 2476121 - DNA, 25 bp, Homo sapien
ccttggttagcccaccatggaggtg

SEQ ID NO: 2476122 - DNA, 25 bp, Homo sapien
ttggttagcccaccatggaggtgga

SEQ ID NO: 2476123 - DNA, 25 bp, Homo sapien
cttggttagcccaccatggaggtgg

SEQ ID NO: 2476124 - DNA, 25 bp, Homo sapien
tcatggtactggtaaatttaagaaa

SEQ ID NO: 2476125 - DNA, 25 bp, Homo sapien
atcatggtactggtaaatttaagaa

SEQ ID NO: 2476126 - DNA, 25 bp, Homo sapien
ctcagataaagtccggagcccaagg

SEQ ID NO: 2476127 - DNA, 25 bp, Homo sapien
tagactttccgaggacttacctgtc

SEQ ID NO: 2476128 - DNA, 25 bp, Homo sapien
tgactccatgcttggttggccctta

SEQ ID NO: 2476129 - DNA, 25 bp, Homo sapien
taggcaagcacttccactagggagg

SEQ ID NO: 2476130 - DNA, 25 bp, Homo sapien
ttccacagctgccagtgtccctaga

SEQ ID NO: 2476131 - DNA, 25 bp, Homo sapien
aatgagttacattgccacctgagaa

SEQ ID NO: 2476132 - DNA, 25 bp, Homo sapien
gcctgcatggagtgttatatttcaa

SEQ ID NO: 2476133 - DNA, 25 bp, Homo sapien
tcttcagcctgagccatcacatgct

SEQ ID NO: 2476134 - DNA, 25 bp, Homo sapien
tctttctgttgattatgtggcgcat

SEQ ID NO: 2476135 - DNA, 25 bp, Homo sapien
ggatcagtctccctcgagcctgact

SEQ ID NO: 2476136 - DNA, 25 bp, Homo sapien
tgacttacggctgggacagccccat

SEQ ID NO: 2476137 - DNA, 25 bp, Homo sapien
tctatgtacaaggaatacgagtggc

SEQ ID NO: 2476138 - DNA, 25 bp, Homo sapien
tcatggagggagggaagctgggggc

SEQ ID NO: 2476139 - DNA, 25 bp, Homo sapien
tgttggagttgtccaattcagtgct

SEQ ID NO: 2476140 - DNA, 25 bp, Homo sapien
gagttgtccaattcagtgctgtcac

SEQ ID NO: 2476141 - DNA, 25 bp, Homo sapien
attcagtgctgtcacagtctgagtc

SEQ ID NO: 2476142 - DNA, 25 bp, Homo sapien
tgtccaattcagtgctgtcacagtc

SEQ ID NO: 2476143 - DNA, 25 bp, Homo sapien
agccctgggagcacatgtcatcaga

SEQ ID NO: 2476144 - DNA, 25 bp, Homo sapien
tagtgactggcgcatgttcaggctc

SEQ ID NO: 2476145 - DNA, 25 bp, Homo sapien
gctgccaacttcaggtgtgccactg

SEQ ID NO: 2476146 - DNA, 25 bp, Homo sapien
catctggccgctcatcagtgttggt

SEQ ID NO: 2476147 - DNA, 25 bp, Homo sapien
ctcctcttccgatgagatgccacgt

SEQ ID NO: 2476148 - DNA, 25 bp, Homo sapien
cctcctcttccgatgagatgccacg

SEQ ID NO: 2476149 - DNA, 25 bp, Homo sapien
cctcttccgatgagatgccacgttt

SEQ ID NO: 2476150 - DNA, 25 bp, Homo sapien
tcctcctcttccgatgagatgccac

SEQ ID NO: 2476151 - DNA, 25 bp, Homo sapien
gtctgattagaagtggaaagaggtc

SEQ ID NO: 2476152 - DNA, 25 bp, Homo sapien
gggtctgattagaagtggaaagagg

SEQ ID NO: 2476153 - DNA, 25 bp, Homo sapien
tggggggggtctgattagaagtgga

SEQ ID NO: 2476154 - DNA, 25 bp, Homo sapien
tgattagaagtggaaagaggtcact

SEQ ID NO: 2476155 - DNA, 25 bp, Homo sapien
gtgacggcagccctgtacagcagtg

SEQ ID NO: 2476156 - DNA, 25 bp, Homo sapien
ggtggcacagctgtacgaagcccag

SEQ ID NO: 2476157 - DNA, 25 bp, Homo sapien
tttagggagcaaagactccgtcttg

SEQ ID NO: 2476158 - DNA, 25 bp, Homo sapien
gccttgcggtgacgggtcttgccac

SEQ ID NO: 2476159 - DNA, 25 bp, Homo sapien
tccattgtgtttccatgcaggaggc

SEQ ID NO: 2476160 - DNA, 25 bp, Homo sapien
acctccgctctaaagcttgctctcg

SEQ ID NO: 2476161 - DNA, 25 bp, Homo sapien
gcacctccgctctaaagcttgctct

SEQ ID NO: 2476162 - DNA, 25 bp, Homo sapien
cctccgctctaaagcttgctctcgc

SEQ ID NO: 2476163 - DNA, 25 bp, Homo sapien
cacctccgctctaaagcttgctctc

SEQ ID NO: 2476164 - DNA, 25 bp, Homo sapien
gcattaagttccatatacaggttgt

SEQ ID NO: 2476165 - DNA, 25 bp, Homo sapien
gtgctccctgatgtccagggcgtgt

SEQ ID NO: 2476166 - DNA, 25 bp, Homo sapien
ggcattaagttccatatacaggttg

SEQ ID NO: 2476167 - DNA, 25 bp, Homo sapien
cctttcatagtgctccctgatgtcc

SEQ ID NO: 2476168 - DNA, 25 bp, Homo sapien
caccagttcctcttctaggcggtgc

SEQ ID NO: 2476169 - DNA, 25 bp, Homo sapien
gttcctcttctaggcggtgcagaca

SEQ ID NO: 2476170 - DNA, 25 bp, Homo sapien
cagttcctcttctaggcggtgcaga

SEQ ID NO: 2476171 - DNA, 25 bp, Homo sapien
tctgacttaatcttttcaaagtgca

SEQ ID NO: 2476172 - DNA, 25 bp, Homo sapien
tctgtcggaatgatgggcgatttcg

SEQ ID NO: 2476173 - DNA, 25 bp, Homo sapien
gcagcaggatctgtcggaatgatgg

SEQ ID NO: 2476174 - DNA, 25 bp, Homo sapien
tgtggagagtacatcagctgaggca

SEQ ID NO: 2476175 - DNA, 25 bp, Homo sapien
tgggcgatttcgtggtttgctattc

SEQ ID NO: 2476176 - DNA, 25 bp, Homo sapien
aaccatctgggcaactggagggcac

SEQ ID NO: 2476177 - DNA, 25 bp, Homo sapien
agttcccatagcaccacgccaaagg

SEQ ID NO: 2476178 - DNA, 25 bp, Homo sapien
gaagcaggatcttgaaaccatctgg

SEQ ID NO: 2476179 - DNA, 25 bp, Homo sapien
gctgaggaatctacgtctttgtagg

SEQ ID NO: 2476180 - DNA, 25 bp, Homo sapien
agacacaggttcattgcggatcacc

SEQ ID NO: 2476181 - DNA, 25 bp, Homo sapien
agatcttcaccacatcgtcgtaggt

SEQ ID NO: 2476182 - DNA, 25 bp, Homo sapien
gctccttggaagtgccaaaatctga

SEQ ID NO: 2476183 - DNA, 25 bp, Homo sapien
ccacatcgtcgtaggtgattagcat

SEQ ID NO: 2476184 - DNA, 25 bp, Homo sapien
aactccatgaggatgcagtagcagg

SEQ ID NO: 2476185 - DNA, 25 bp, Homo sapien
gcaggtagttcatgccaccagcgat

SEQ ID NO: 2476186 - DNA, 25 bp, Homo sapien
atgcccatggaccagtcaaccagta

SEQ ID NO: 2476187 - DNA, 25 bp, Homo sapien
cagtacctcatacagctggccctgg

SEQ ID NO: 2476188 - DNA, 25 bp, Homo sapien
gatgtcggtttctttgaggtctcgc

SEQ ID NO: 2476189 - DNA, 25 bp, Homo sapien
ttgaggtctcgcaccttcttcacag

SEQ ID NO: 2476190 - DNA, 25 bp, Homo sapien
ggtgcttcagctttcgcaagtgctt

SEQ ID NO: 2476191 - DNA, 25 bp, Homo sapien
tcgcaagtgcttgatgtcggtttct

SEQ ID NO: 2476192 - DNA, 25 bp, Homo sapien
tgaccaacagatctcgggctcaggg

SEQ ID NO: 2476193 - DNA, 25 bp, Homo sapien
tagcggagctgaccaacagatctcg

SEQ ID NO: 2476194 - DNA, 25 bp, Homo sapien
tgcgtgactttagcggagctgacca

SEQ ID NO: 2476195 - DNA, 25 bp, Homo sapien
gactttagcggagctgaccaacaga

SEQ ID NO: 2476196 - DNA, 25 bp, Homo sapien
gcacctcgtcagctcgaactctgga

SEQ ID NO: 2476197 - DNA, 25 bp, Homo sapien
tgccaatcatggtccagacagggcg

SEQ ID NO: 2476198 - DNA, 25 bp, Homo sapien
tctggatgcccgactctcaggtgac

SEQ ID NO: 2476199 - DNA, 25 bp, Homo sapien
tgctcagtggagtaggctttgccaa

SEQ ID NO: 2476200 - DNA, 25 bp, Homo sapien
gttggcaaaaggctcagggggcggc

SEQ ID NO: 2476201 - DNA, 25 bp, Homo sapien
tgttggcaaaaggctcagggggcgg

SEQ ID NO: 2476202 - DNA, 25 bp, Homo sapien
ttggcaaaaggctcagggggcggct

SEQ ID NO: 2476203 - DNA, 25 bp, Homo sapien
gctgggccctcccccaccctgccca

SEQ ID NO: 2476204 - DNA, 25 bp, Homo sapien
caaggggtaccacatctcgaagtac

SEQ ID NO: 2476205 - DNA, 25 bp, Homo sapien
aaggggtaccacatctcgaagtaca

SEQ ID NO: 2476206 - DNA, 25 bp, Homo sapien
ggggtaccacatctcgaagtacaca

SEQ ID NO: 2476207 - DNA, 25 bp, Homo sapien
gggtaccacatctcgaagtacacac

SEQ ID NO: 2476208 - DNA, 25 bp, Homo sapien
tcaggtccttctcgggagtgcagtc

SEQ ID NO: 2476209 - DNA, 25 bp, Homo sapien
ttctcgggagtgcagtcagaagtgt

SEQ ID NO: 2476210 - DNA, 25 bp, Homo sapien
tgggtaggcgtcaggtccttctcgg

SEQ ID NO: 2476211 - DNA, 25 bp, Homo sapien
taggcgtcaggtccttctcgggagt

SEQ ID NO: 2476212 - DNA, 25 bp, Homo sapien
gagggtgttcgggtctcatggaggc

SEQ ID NO: 2476213 - DNA, 25 bp, Homo sapien
ggatgcctcacttagggtagacaca

SEQ ID NO: 2476214 - DNA, 25 bp, Homo sapien
gaaggagagggtgttcgggtctcat

SEQ ID NO: 2476215 - DNA, 25 bp, Homo sapien
tcacttagggtagacacaaagcccc

SEQ ID NO: 2476216 - DNA, 25 bp, Homo sapien
ctggtatgatggtgaacactgggcc

SEQ ID NO: 2476217 - DNA, 25 bp, Homo sapien
gcccctggtatgatggtgaacactg

SEQ ID NO: 2476218 - DNA, 25 bp, Homo sapien
ctggcccctggtatgatggtgaaca

SEQ ID NO: 2476219 - DNA, 25 bp, Homo sapien
cctctggcccctggtatgatggtga

SEQ ID NO: 2476220 - DNA, 25 bp, Homo sapien
ggacacccaatgataatggctaact

SEQ ID NO: 2476221 - DNA, 25 bp, Homo sapien
taaggaaggcttacggctgggcgta

SEQ ID NO: 2476222 - DNA, 25 bp, Homo sapien
ctaacttaaggaaggcttacggctg

SEQ ID NO: 2476223 - DNA, 25 bp, Homo sapien
cccaatgataatggctaacttaagg

SEQ ID NO: 2476224 - DNA, 25 bp, Homo sapien
tgccgggatggctgcgaggatctta

SEQ ID NO: 2476225 - DNA, 25 bp, Homo sapien
gatggctgcgaggatcttaggtgcg

SEQ ID NO: 2476226 - DNA, 25 bp, Homo sapien
aggtggctggttgccgggatggctg

SEQ ID NO: 2476227 - DNA, 25 bp, Homo sapien
tgcgaggatcttaggtgcggacccc

SEQ ID NO: 2476228 - DNA, 25 bp, Homo sapien
aatttttcagccgtcatctggttgt

SEQ ID NO: 2476229 - DNA, 25 bp, Homo sapien
tgtttgacgactaggtggtttaggc

SEQ ID NO: 2476230 - DNA, 25 bp, Homo sapien
ttaggcatagaaagggtgacatgct

SEQ ID NO: 2476231 - DNA, 25 bp, Homo sapien
cagaggcccttctggtatccagggc

SEQ ID NO: 2476232 - DNA, 25 bp, Homo sapien
aaggaatgtaatctctctgtggtgc

SEQ ID NO: 2476233 - DNA, 25 bp, Homo sapien
gccaccacttagtttaaggaatgta

SEQ ID NO: 2476234 - DNA, 25 bp, Homo sapien
aaatgagttcccctgagaacttggg

SEQ ID NO: 2476235 - DNA, 25 bp, Homo sapien
aaatcaagccctgagacccctagct

SEQ ID NO: 2476236 - DNA, 25 bp, Homo sapien
cgcagcacaaaaggcggcgctgctg

SEQ ID NO: 2476237 - DNA, 25 bp, Homo sapien
tcacaggcgatgctcgtgcggtgtc

SEQ ID NO: 2476238 - DNA, 25 bp, Homo sapien
tgtccggatgcacgggtgtcagctt

SEQ ID NO: 2476239 - DNA, 25 bp, Homo sapien
gatgcacgggtgtcagcttcagctt

SEQ ID NO: 2476240 - DNA, 25 bp, Homo sapien
caaaagaagcaacacctgaagggag

SEQ ID NO: 2476241 - DNA, 25 bp, Homo sapien
caagttctgtgtcacggaggcccaa

SEQ ID NO: 2476242 - DNA, 25 bp, Homo sapien
tttctcgcgatccaaaaggctccgt

SEQ ID NO: 2476243 - DNA, 25 bp, Homo sapien
gctctaggactaaacaatgcgcgtc

SEQ ID NO: 2476244 - DNA, 25 bp, Homo sapien
gggcaaacattgacacttttgggtg

SEQ ID NO: 2476245 - DNA, 25 bp, Homo sapien
cagaagccagacaattttatttggg

SEQ ID NO: 2476246 - DNA, 25 bp, Homo sapien
ggtgtggaccttgcatgcagacata

SEQ ID NO: 2476247 - DNA, 25 bp, Homo sapien
acattgacacttttgggtgtggacc

SEQ ID NO: 2476248 - DNA, 25 bp, Homo sapien
caggctccagaactgggaattcagc

SEQ ID NO: 2476249 - DNA, 25 bp, Homo sapien
ggatccctgggtatttctgccaaac

SEQ ID NO: 2476250 - DNA, 25 bp, Homo sapien
ccagcccggggactcagccattcat

SEQ ID NO: 2476251 - DNA, 25 bp, Homo sapien
cttcttcccaaagcgttgaggggca

SEQ ID NO: 2476252 - DNA, 25 bp, Homo sapien
ttggctccggccaggtctctccatt

SEQ ID NO: 2476253 - DNA, 25 bp, Homo sapien
tggctccggccaggtctctccattg

SEQ ID NO: 2476254 - DNA, 25 bp, Homo sapien
cctggagcaggtagtgcaacagtga

SEQ ID NO: 2476255 - DNA, 25 bp, Homo sapien
agcaggtagtgcaacagtgacccag

SEQ ID NO: 2476256 - DNA, 25 bp, Homo sapien
tatcagaacctagagcacaagtctc

SEQ ID NO: 2476257 - DNA, 25 bp, Homo sapien
gatgggcaaataccctggacacgta

SEQ ID NO: 2476258 - DNA, 25 bp, Homo sapien
caagtctcaaccgaagtagaggcaa

SEQ ID NO: 2476259 - DNA, 25 bp, Homo sapien
tgtgaggacctaatgacaaccttgg

SEQ ID NO: 2476260 - DNA, 25 bp, Homo sapien
cacagcccccgtctattaacagcag

SEQ ID NO: 2476261 - DNA, 25 bp, Homo sapien
acagcccccgtctattaacagcagc

SEQ ID NO: 2476262 - DNA, 25 bp, Homo sapien
agcccccgtctattaacagcagcag

SEQ ID NO: 2476263 - DNA, 25 bp, Homo sapien
agcacagcccccgtctattaacagc

SEQ ID NO: 2476264 - DNA, 25 bp, Homo sapien
gaggctactcagatttgcctgtgga

SEQ ID NO: 2476265 - DNA, 25 bp, Homo sapien
caagaagcatcattagttgcagacg

SEQ ID NO: 2476266 - DNA, 25 bp, Homo sapien
taatccctcaacaggttggagagct

SEQ ID NO: 2476267 - DNA, 25 bp, Homo sapien
ttgcagacgctttgtcagagccagg

SEQ ID NO: 2476268 - DNA, 25 bp, Homo sapien
tatagagtagcctagaatcctgtct

SEQ ID NO: 2476269 - DNA, 25 bp, Homo sapien
ttcaaagccatatggtgcaggttcc

SEQ ID NO: 2476270 - DNA, 25 bp, Homo sapien
ctctagcttgtgctgaggaagagcc

SEQ ID NO: 2476271 - DNA, 25 bp, Homo sapien
ggctggactatcattctgaccccga

SEQ ID NO: 2476272 - DNA, 25 bp, Homo sapien
taagctttgtctcatggttggtccc

SEQ ID NO: 2476273 - DNA, 25 bp, Homo sapien
taaggcaaggcatctaggaaccaac

SEQ ID NO: 2476274 - DNA, 25 bp, Homo sapien
taatgcggactaagccagggtaaac

SEQ ID NO: 2476275 - DNA, 25 bp, Homo sapien
gaagcaccccactctttaaggcaag

SEQ ID NO: 2476276 - DNA, 25 bp, Homo sapien
tctaaacatcaattacaagtggctc

SEQ ID NO: 2476277 - DNA, 25 bp, Homo sapien
tccaggatggaggtaactggtctcc

SEQ ID NO: 2476278 - DNA, 25 bp, Homo sapien
tcttaaaagggagtatcaaggccac

SEQ ID NO: 2476279 - DNA, 25 bp, Homo sapien
gactactcctgttatcactaggtga

SEQ ID NO: 2476280 - DNA, 25 bp, Homo sapien
gccctgggccttctgtcatactttg

SEQ ID NO: 2476281 - DNA, 25 bp, Homo sapien
gctatactttccgtctttgtctgtg

SEQ ID NO: 2476282 - DNA, 25 bp, Homo sapien
ccaggatgccaagggcccttgtctc

SEQ ID NO: 2476283 - DNA, 25 bp, Homo sapien
ttctctaggctgtatctcccatgta

SEQ ID NO: 2476284 - DNA, 25 bp, Homo sapien
aagtccctggatgtggtaacctgcg

SEQ ID NO: 2476285 - DNA, 25 bp, Homo sapien
caagctttagggcaaggctgctact

SEQ ID NO: 2476286 - DNA, 25 bp, Homo sapien
gacccagaccgagttgagttccttg

SEQ ID NO: 2476287 - DNA, 25 bp, Homo sapien
gttcaggctgtacatagggcacggt

SEQ ID NO: 2476288 - DNA, 25 bp, Homo sapien
aatagtcaccaatttcccaggccag

SEQ ID NO: 2476289 - DNA, 25 bp, Homo sapien
tcctatggtcctggtagaaactgca

SEQ ID NO: 2476290 - DNA, 25 bp, Homo sapien
gacctatctatccacaggcctctgg

SEQ ID NO: 2476291 - DNA, 25 bp, Homo sapien
ggctatgacgcttcaagatcctgga

SEQ ID NO: 2476292 - DNA, 25 bp, Homo sapien
tagcctccctctatctggcaggaag

SEQ ID NO: 2476293 - DNA, 25 bp, Homo sapien
gacaatatgctttggccggtaaact

SEQ ID NO: 2476294 - DNA, 25 bp, Homo sapien
ctgggtcagcgggtaatatgtcatc

SEQ ID NO: 2476295 - DNA, 25 bp, Homo sapien
tagaacaaaggaactcgagagtccc

SEQ ID NO: 2476296 - DNA, 25 bp, Homo sapien
tggagaacccgttggctctgagctt

SEQ ID NO: 2476297 - DNA, 25 bp, Homo sapien
tcatgattacatgcgattgtatcgg

SEQ ID NO: 2476298 - DNA, 25 bp, Homo sapien
ggcatgctcagttctgtcctttggc

SEQ ID NO: 2476299 - DNA, 25 bp, Homo sapien
agctgcagagcgaacactgaggcca

SEQ ID NO: 2476300 - DNA, 25 bp, Homo sapien
taacagtagctgtttcaactgggcc

SEQ ID NO: 2476301 - DNA, 25 bp, Homo sapien
gactgggcagtctttatgagctaac

SEQ ID NO: 2476302 - DNA, 25 bp, Homo sapien
tcaactgggccacctcattgcgtag

SEQ ID NO: 2476303 - DNA, 25 bp, Homo sapien
ggccacctcattgcgtagtaatgtg

SEQ ID NO: 2476304 - DNA, 25 bp, Homo sapien
gctgccgtcgctcatctggatcttc

SEQ ID NO: 2476305 - DNA, 25 bp, Homo sapien
tggatcttcatctactgtgcgccgc

SEQ ID NO: 2476306 - DNA, 25 bp, Homo sapien
aagtgagttcttcggccttcttctc

SEQ ID NO: 2476307 - DNA, 25 bp, Homo sapien
tgcagcccggttgcgctccagaaag

SEQ ID NO: 2476308 - DNA, 25 bp, Homo sapien
ggatgagaatctggctctgctctgg

SEQ ID NO: 2476309 - DNA, 25 bp, Homo sapien
gtgctggcagtacccaccaccattc

SEQ ID NO: 2476310 - DNA, 25 bp, Homo sapien
caaccaccattgattgaggagactt

SEQ ID NO: 2476311 - DNA, 25 bp, Homo sapien
acttggtgagttagggtggctttca

SEQ ID NO: 2476312 - DNA, 25 bp, Homo sapien
caggaatgttgggcaccatggacac

SEQ ID NO: 2476313 - DNA, 25 bp, Homo sapien
cttctgatggtatagggtggccaga

SEQ ID NO: 2476314 - DNA, 25 bp, Homo sapien
ctgttaactggtgggccagggatac

SEQ ID NO: 2476315 - DNA, 25 bp, Homo sapien
ggagccactactgttaactggtggg

SEQ ID NO: 2476316 - DNA, 25 bp, Homo sapien
aacagacggcatctgtactggaggc

SEQ ID NO: 2476317 - DNA, 25 bp, Homo sapien
gacggcatctgtactggaggccctg

SEQ ID NO: 2476318 - DNA, 25 bp, Homo sapien
cgatataacagacggcatctgtact

SEQ ID NO: 2476319 - DNA, 25 bp, Homo sapien
catctgtactggaggccctggcaac

SEQ ID NO: 2476320 - DNA, 25 bp, Homo sapien
gatgcatgacaagagggagggagcc

SEQ ID NO: 2476321 - DNA, 25 bp, Homo sapien
ctgtccattagcaagatgcatgaca

SEQ ID NO: 2476322 - DNA, 25 bp, Homo sapien
caagatgcatgacaagagggaggga

SEQ ID NO: 2476323 - DNA, 25 bp, Homo sapien
tgtccattagcaagatgcatgacaa

SEQ ID NO: 2476324 - DNA, 25 bp, Homo sapien
cccatttgcctgttggatggtggag

SEQ ID NO: 2476325 - DNA, 25 bp, Homo sapien
ccatttgcctgttggatggtggagc

SEQ ID NO: 2476326 - DNA, 25 bp, Homo sapien
tggatgaagtggatcatagcccaag

SEQ ID NO: 2476327 - DNA, 25 bp, Homo sapien
gcagggagccaggacgtacaatggt

SEQ ID NO: 2476328 - DNA, 25 bp, Homo sapien
ggatcatagcccaagtggagaggca

SEQ ID NO: 2476329 - DNA, 25 bp, Homo sapien
ccaggacgtacaatggtgggtgtgg

SEQ ID NO: 2476330 - DNA, 25 bp, Homo sapien
acagggactagaggcagggctatca

SEQ ID NO: 2476331 - DNA, 25 bp, Homo sapien
gtggggaacagggactagaggcagg

SEQ ID NO: 2476332 - DNA, 25 bp, Homo sapien
aggcagggctatcaggtggggatga

SEQ ID NO: 2476333 - DNA, 25 bp, Homo sapien
ttctccttcagtggtggggaacagg

SEQ ID NO: 2476334 - DNA, 25 bp, Homo sapien
gacatgtcaaggggcccagcagcag

SEQ ID NO: 2476335 - DNA, 25 bp, Homo sapien
cagagacatgtcaaggggcccagca

SEQ ID NO: 2476336 - DNA, 25 bp, Homo sapien
gagacatgtcaaggggcccagcagc

SEQ ID NO: 2476337 - DNA, 25 bp, Homo sapien
aggcagagacatgtcaaggggccca

SEQ ID NO: 2476338 - DNA, 25 bp, Homo sapien
gaagtctgatcagctcagaaaagag

SEQ ID NO: 2476339 - DNA, 25 bp, Homo sapien
caagaggactaattttcggtgacga

SEQ ID NO: 2476340 - DNA, 25 bp, Homo sapien
tggaactcctaaagacctgaatggc

SEQ ID NO: 2476341 - DNA, 25 bp, Homo sapien
tcggtgacgacagacttgtgctgat

SEQ ID NO: 2476342 - DNA, 25 bp, Homo sapien
aataaaaatagcctaggtctgaata

SEQ ID NO: 2476343 - DNA, 25 bp, Homo sapien
ataaaaatagcctaggtctgaatac

SEQ ID NO: 2476344 - DNA, 25 bp, Homo sapien
ttcttgaattcatgttcaaaggagc

SEQ ID NO: 2476345 - DNA, 25 bp, Homo sapien
agctagttcattgaagagtcccacc

SEQ ID NO: 2476346 - DNA, 25 bp, Homo sapien
agctagctagttcattgaagagtcc

SEQ ID NO: 2476347 - DNA, 25 bp, Homo sapien
caggaatctagttggagtaggcgtt

SEQ ID NO: 2476348 - DNA, 25 bp, Homo sapien
cttctgaaggattccaggcaaatct

SEQ ID NO: 2476349 - DNA, 25 bp, Homo sapien
gaaggattccaggcaaatctagggg

SEQ ID NO: 2476350 - DNA, 25 bp, Homo sapien
tctgaaggattccaggcaaatctag

SEQ ID NO: 2476351 - DNA, 25 bp, Homo sapien
tgaaggattccaggcaaatctaggg

SEQ ID NO: 2476352 - DNA, 25 bp, Homo sapien
actctgttacctagtttggatgcag

SEQ ID NO: 2476353 - DNA, 25 bp, Homo sapien
tacctagtttggatgcagtggtaca

SEQ ID NO: 2476354 - DNA, 25 bp, Homo sapien
ttggatgcagtggtacaattttggc

SEQ ID NO: 2476355 - DNA, 25 bp, Homo sapien
tgttacctagtttggatgcagtggt

SEQ ID NO: 2476356 - DNA, 25 bp, Homo sapien
gtgtttatgaactgccaggtggtcc

SEQ ID NO: 2476357 - DNA, 25 bp, Homo sapien
caatgtcatctcatgcttgtgttta

SEQ ID NO: 2476358 - DNA, 25 bp, Homo sapien
ccaggtggtcctcgtttgtaaatct

SEQ ID NO: 2476359 - DNA, 25 bp, Homo sapien
cgggctgggccaaatttcaatgtca

SEQ ID NO: 2476360 - DNA, 25 bp, Homo sapien
gcagcccgcctgggctccatcagcc

SEQ ID NO: 2476361 - DNA, 25 bp, Homo sapien
cgggcagcccgcctgggctccatca

SEQ ID NO: 2476362 - DNA, 25 bp, Homo sapien
gggcagcccgcctgggctccatcag

SEQ ID NO: 2476363 - DNA, 25 bp, Homo sapien
agcccgcctgggctccatcagccat

SEQ ID NO: 2476364 - DNA, 25 bp, Homo sapien
tcaggtgatccgcctgccttgacct

SEQ ID NO: 2476365 - DNA, 25 bp, Homo sapien
aattttgtatttttgatagagaagg

SEQ ID NO: 2476366 - DNA, 25 bp, Homo sapien
tttgatagagaaggggtttctacat

SEQ ID NO: 2476367 - DNA, 25 bp, Homo sapien
ctcaggtgatccgcctgccttgacc

SEQ ID NO: 2476368 - DNA, 25 bp, Homo sapien
taggtgtcaaacagtgtcaagaact

SEQ ID NO: 2476369 - DNA, 25 bp, Homo sapien
tacaggcagaatatgagcatatgag

SEQ ID NO: 2476370 - DNA, 25 bp, Homo sapien
aattttaaccacatccttttgagca

SEQ ID NO: 2476371 - DNA, 25 bp, Homo sapien
gtgtcaagaactggattcctccttt

SEQ ID NO: 2476372 - DNA, 25 bp, Homo sapien
cagaatttgtaataccaagagtgaa

SEQ ID NO: 2476373 - DNA, 25 bp, Homo sapien
ggtatatgagaatcctctgcacttt

SEQ ID NO: 2476374 - DNA, 25 bp, Homo sapien
ggacaggaggtatatgagaatcctc

SEQ ID NO: 2476375 - DNA, 25 bp, Homo sapien
tagcattgtggttcagtatgttgac

SEQ ID NO: 2476376 - DNA, 25 bp, Homo sapien
tatgggaatagccaacaaggtacag

SEQ ID NO: 2476377 - DNA, 25 bp, Homo sapien
caagccgattactgtctatggagaa

SEQ ID NO: 2476378 - DNA, 25 bp, Homo sapien
gaactggtgtctccttgacagagct

SEQ ID NO: 2476379 - DNA, 25 bp, Homo sapien
gaatacaatctcctcatctgggcag

SEQ ID NO: 2476380 - DNA, 25 bp, Homo sapien
cactattgcaattatctaggtaaag

SEQ ID NO: 2476381 - DNA, 25 bp, Homo sapien
cttatgggcataaaactaaggcgag

SEQ ID NO: 2476382 - DNA, 25 bp, Homo sapien
tacatggcactagtcaaagcaagat

SEQ ID NO: 2476383 - DNA, 25 bp, Homo sapien
tattcaacaggcgagatcctctatg

SEQ ID NO: 2476384 - DNA, 25 bp, Homo sapien
taagcaagttagcaatcactgagca

SEQ ID NO: 2476385 - DNA, 25 bp, Homo sapien
caatcatatataaggctgcccatgg

SEQ ID NO: 2476386 - DNA, 25 bp, Homo sapien
tatcacagtcgtcattaaaccaatt

SEQ ID NO: 2476387 - DNA, 25 bp, Homo sapien
taggcatgagcttctagtaaaagaa

SEQ ID NO: 2476388 - DNA, 25 bp, Homo sapien
tcagggaccattctacctaagccag

SEQ ID NO: 2476389 - DNA, 25 bp, Homo sapien
ttcctcttgcttttgctcaacccta

SEQ ID NO: 2476390 - DNA, 25 bp, Homo sapien
tcttgcttttgctcaaccctaatac

SEQ ID NO: 2476391 - DNA, 25 bp, Homo sapien
tcctcttgcttttgctcaaccctaa

SEQ ID NO: 2476392 - DNA, 25 bp, Homo sapien
cctcttgcttttgctcaaccctaat

SEQ ID NO: 2476393 - DNA, 25 bp, Homo sapien
tccccagatacagcccattcagtgt

SEQ ID NO: 2476394 - DNA, 25 bp, Homo sapien
cttgattccccagatacagcccatt

SEQ ID NO: 2476395 - DNA, 25 bp, Homo sapien
tgattccccagatacagcccattca

SEQ ID NO: 2476396 - DNA, 25 bp, Homo sapien
cagatacagcccattcagtgttcat

SEQ ID NO: 2476397 - DNA, 25 bp, Homo sapien
ggaaacactggcgaataatccccac

SEQ ID NO: 2476398 - DNA, 25 bp, Homo sapien
gaaaccccacagaatgtataggcag

SEQ ID NO: 2476399 - DNA, 25 bp, Homo sapien
ggtatacgggaactctactctgcac

SEQ ID NO: 2476400 - DNA, 25 bp, Homo sapien
gctgggccacctaaatctccctgga

SEQ ID NO: 2476401 - DNA, 25 bp, Homo sapien
gatttattctgctgactttccccgc

SEQ ID NO: 2476402 - DNA, 25 bp, Homo sapien
taaaagcttggaatgatggctggca

SEQ ID NO: 2476403 - DNA, 25 bp, Homo sapien
caatgactcaaaggacacagcaagg

SEQ ID NO: 2476404 - DNA, 25 bp, Homo sapien
gaatgtcgaacagagcactcagctt

SEQ ID NO: 2476405 - DNA, 25 bp, Homo sapien
aaaagtggcattgtgtttaagtcac

SEQ ID NO: 2476406 - DNA, 25 bp, Homo sapien
ataaaagtggcattgtgtttaagtc

SEQ ID NO: 2476407 - DNA, 25 bp, Homo sapien
taaaagtggcattgtgtttaagtca

SEQ ID NO: 2476408 - DNA, 25 bp, Homo sapien
ttcattacggtagagtgcctacact

SEQ ID NO: 2476409 - DNA, 25 bp, Homo sapien
gattcacaacgagacattcacaata

SEQ ID NO: 2476410 - DNA, 25 bp, Homo sapien
cacactgcaaatcctctgatctgat

SEQ ID NO: 2476411 - DNA, 25 bp, Homo sapien
gacagcaaggcagatttcattacgg

SEQ ID NO: 2476412 - DNA, 25 bp, Homo sapien
cccggggcattgcacacaaacggtc

SEQ ID NO: 2476413 - DNA, 25 bp, Homo sapien
cacagcccggggcattgcacacaaa

SEQ ID NO: 2476414 - DNA, 25 bp, Homo sapien
gcacacaaacggtctgtcgtctccc

SEQ ID NO: 2476415 - DNA, 25 bp, Homo sapien
agcccggggcattgcacacaaacgg

SEQ ID NO: 2476416 - DNA, 25 bp, Homo sapien
aataaattcactgaacgctcgatgc

SEQ ID NO: 2476417 - DNA, 25 bp, Homo sapien
taaattcactgaacgctcgatgcgg

SEQ ID NO: 2476418 - DNA, 25 bp, Homo sapien
ttcactgaacgctcgatgcggaagc

SEQ ID NO: 2476419 - DNA, 25 bp, Homo sapien
tgaacgctcgatgcggaagccatat

SEQ ID NO: 2476420 - DNA, 25 bp, Homo sapien
aataaaacaaatgtcgactctttgg

SEQ ID NO: 2476421 - DNA, 25 bp, Homo sapien
gagaagtatcgatgcccttccccct

SEQ ID NO: 2476422 - DNA, 25 bp, Homo sapien
ataaaacaaatgtcgactctttggg

SEQ ID NO: 2476423 - DNA, 25 bp, Homo sapien
tctgattctatttacggctaggttt

SEQ ID NO: 2476424 - DNA, 25 bp, Homo sapien
tgctctgttgcagccaacagatgtg

SEQ ID NO: 2476425 - DNA, 25 bp, Homo sapien
gggctgctctgttgcagccaacaga

SEQ ID NO: 2476426 - DNA, 25 bp, Homo sapien
ggtgaacatgttccggctgtttgtg

SEQ ID NO: 2476427 - DNA, 25 bp, Homo sapien
ttgtgctgctttcggccagtgttct

SEQ ID NO: 2476428 - DNA, 25 bp, Homo sapien
aaagaaatggcactaaaaggcatca

SEQ ID NO: 2476429 - DNA, 25 bp, Homo sapien
agaaatggcactaaaaggcatcacc

SEQ ID NO: 2476430 - DNA, 25 bp, Homo sapien
gaaagaaatggcactaaaaggcatc

SEQ ID NO: 2476431 - DNA, 25 bp, Homo sapien
aagaaatggcactaaaaggcatcac

SEQ ID NO: 2476432 - DNA, 25 bp, Homo sapien
atctctcctactctcttaggactca

SEQ ID NO: 2476433 - DNA, 25 bp, Homo sapien
tctctcctactctcttaggactcac

SEQ ID NO: 2476434 - DNA, 25 bp, Homo sapien
tcagtaattccacaactaatcggtg

SEQ ID NO: 2476435 - DNA, 25 bp, Homo sapien
caactaatcggtgtttaaaattgtg

SEQ ID NO: 2476436 - DNA, 25 bp, Homo sapien
ccagtatttctcgttgtctaatcag

SEQ ID NO: 2476437 - DNA, 25 bp, Homo sapien
tcgttgtctaatcagtaattccaca

SEQ ID NO: 2476438 - DNA, 25 bp, Homo sapien
tagacctggcaaacttagaccatcc

SEQ ID NO: 2476439 - DNA, 25 bp, Homo sapien
caaacataaattcaactgtcaggtc

SEQ ID NO: 2476440 - DNA, 25 bp, Homo sapien
gtaaagtctttagtccctagagatg

SEQ ID NO: 2476441 - DNA, 25 bp, Homo sapien
tatctcatttgtagcacccttcacc

SEQ ID NO: 2476442 - DNA, 25 bp, Homo sapien
aacttccatgtgtaagtacaaattg

SEQ ID NO: 2476443 - DNA, 25 bp, Homo sapien
caaattgtgtttgatttccccagcc

SEQ ID NO: 2476444 - DNA, 25 bp, Homo sapien
tccatgtgtaagtacaaattgtgtt

SEQ ID NO: 2476445 - DNA, 25 bp, Homo sapien
tacaaattgtgtttgatttccccag

SEQ ID NO: 2476446 - DNA, 25 bp, Homo sapien
agttctccccacacttcaagcctct

SEQ ID NO: 2476447 - DNA, 25 bp, Homo sapien
cccacacttcaagcctctggccccg

SEQ ID NO: 2476448 - DNA, 25 bp, Homo sapien
ccaagttctccccacacttcaagcc

SEQ ID NO: 2476449 - DNA, 25 bp, Homo sapien
ttcaagcctctggccccgccttccc

SEQ ID NO: 2476450 - DNA, 25 bp, Homo sapien
ccgcgctcggtcctacaatctgtct

SEQ ID NO: 2476451 - DNA, 25 bp, Homo sapien
ctttcctcccgtccggccaggcgcg

SEQ ID NO: 2476452 - DNA, 25 bp, Homo sapien
cggctggtagctccgttgcctcccg

SEQ ID NO: 2476453 - DNA, 25 bp, Homo sapien
cccgtccggccaggcgcgctcaact

SEQ ID NO: 2476454 - DNA, 25 bp, Homo sapien
caaccgcatacggataaggtcttgg

SEQ ID NO: 2476455 - DNA, 25 bp, Homo sapien
gacaaccgcatacggataaggtctt

SEQ ID NO: 2476456 - DNA, 25 bp, Homo sapien
tggacaaccgcatacggataaggtc

SEQ ID NO: 2476457 - DNA, 25 bp, Homo sapien
aaccgcatacggataaggtcttgga

SEQ ID NO: 2476458 - DNA, 25 bp, Homo sapien
gttgacggtgtattctcggtcacca

SEQ ID NO: 2476459 - DNA, 25 bp, Homo sapien
ctgtgaaggttgacggtgtattctc

SEQ ID NO: 2476460 - DNA, 25 bp, Homo sapien
aaggttgacggtgtattctcggtca

SEQ ID NO: 2476461 - DNA, 25 bp, Homo sapien
tgaaggttgacggtgtattctcggt

SEQ ID NO: 2476462 - DNA, 25 bp, Homo sapien
tcattctttagacatggtttattta

SEQ ID NO: 2476463 - DNA, 25 bp, Homo sapien
tttcattctttagacatggtttatt

SEQ ID NO: 2476464 - DNA, 25 bp, Homo sapien
cattctttagacatggtttatttag

SEQ ID NO: 2476465 - DNA, 25 bp, Homo sapien
attctttagacatggtttatttagt

SEQ ID NO: 2476466 - DNA, 25 bp, Homo sapien
ctcctctgtaggtcaagttatagcc

SEQ ID NO: 2476467 - DNA, 25 bp, Homo sapien
ggtcaagttatagcccgactggttc

SEQ ID NO: 2476468 - DNA, 25 bp, Homo sapien
tatagcccgactggttcgttttgcc

SEQ ID NO: 2476469 - DNA, 25 bp, Homo sapien
cgactggttcgttttgcccactgcc

SEQ ID NO: 2476470 - DNA, 25 bp, Homo sapien
tctctctaggttgcagctggaaaag

SEQ ID NO: 2476471 - DNA, 25 bp, Homo sapien
cagtctctggaacgcctagctcttt

SEQ ID NO: 2476472 - DNA, 25 bp, Homo sapien
tcccagctctacgattgtgctctgg

SEQ ID NO: 2476473 - DNA, 25 bp, Homo sapien
cagggagtcttttgccaaagcaaac

SEQ ID NO: 2476474 - DNA, 25 bp, Homo sapien
caaaaaccagatcaatcaccttcac

SEQ ID NO: 2476475 - DNA, 25 bp, Homo sapien
ttcagaaattgtccagattttgtct

SEQ ID NO: 2476476 - DNA, 25 bp, Homo sapien
taagagcagggatagtaataataag

SEQ ID NO: 2476477 - DNA, 25 bp, Homo sapien
tctgtaagataagagcagggatagt

SEQ ID NO: 2476478 - DNA, 25 bp, Homo sapien
gctcagccaaatccatgttgagttt

SEQ ID NO: 2476479 - DNA, 25 bp, Homo sapien
tccatgttgagtttagcaccatcac

SEQ ID NO: 2476480 - DNA, 25 bp, Homo sapien
gagctcagccaaatccatgttgagt

SEQ ID NO: 2476481 - DNA, 25 bp, Homo sapien
aatccatgttgagtttagcaccatc

SEQ ID NO: 2476482 - DNA, 25 bp, Homo sapien
tactctcacgaaggcactcagccaa

SEQ ID NO: 2476483 - DNA, 25 bp, Homo sapien
ccttcgggccttgtactctcacgaa

SEQ ID NO: 2476484 - DNA, 25 bp, Homo sapien
ccttgtactctcacgaaggcactca

SEQ ID NO: 2476485 - DNA, 25 bp, Homo sapien
cgggccttgtactctcacgaaggca

SEQ ID NO: 2476486 - DNA, 25 bp, Homo sapien
tgtggaaaagaaatatacacaggag

SEQ ID NO: 2476487 - DNA, 25 bp, Homo sapien
ctgtggaaaagaaatatacacagga

SEQ ID NO: 2476488 - DNA, 25 bp, Homo sapien
aagaaatatacacaggagactcaag

SEQ ID NO: 2476489 - DNA, 25 bp, Homo sapien
gaaaagaaatatacacaggagactc

SEQ ID NO: 2476490 - DNA, 25 bp, Homo sapien
ggctgcctggggaggtataggaaaa

SEQ ID NO: 2476491 - DNA, 25 bp, Homo sapien
accctgagccaaccacgttccccag

SEQ ID NO: 2476492 - DNA, 25 bp, Homo sapien
gctgcctggggaggtataggaaaag

SEQ ID NO: 2476493 - DNA, 25 bp, Homo sapien
gtcttttctctgtcaaaccctgagc

SEQ ID NO: 2476494 - DNA, 25 bp, Homo sapien
ccagacgcgggagaactatgggagg

SEQ ID NO: 2476495 - DNA, 25 bp, Homo sapien
cagacgcgggagaactatgggaggt

SEQ ID NO: 2476496 - DNA, 25 bp, Homo sapien
gcgtaggagaagagctgttgcttca

SEQ ID NO: 2476497 - DNA, 25 bp, Homo sapien
atggcctccgagagggcaaagccca

SEQ ID NO: 2476498 - DNA, 25 bp, Homo sapien
ccatcagacaaaagagccccatggc

SEQ ID NO: 2476499 - DNA, 25 bp, Homo sapien
gagctgttgcttcagagaagggttc

SEQ ID NO: 2476500 - DNA, 25 bp, Homo sapien
gataaatatctaagatgggctcagg

SEQ ID NO: 2476501 - DNA, 25 bp, Homo sapien
ggctctacaggaactgaatgaaggg

SEQ ID NO: 2476502 - DNA, 25 bp, Homo sapien
gggagcaggcaatctaaaatcctgt

SEQ ID NO: 2476503 - DNA, 25 bp, Homo sapien
gcttttagggtaacaccatcatgcc

SEQ ID NO: 2476504 - DNA, 25 bp, Homo sapien
ccagcctgggtgacagagtcagact

SEQ ID NO: 2476505 - DNA, 25 bp, Homo sapien
tccagcctgggtgacagagtcagac

SEQ ID NO: 2476506 - DNA, 25 bp, Homo sapien
tgagattacacagttgcactccagc

SEQ ID NO: 2476507 - DNA, 25 bp, Homo sapien
agtgagctgagattacacagttgca

SEQ ID NO: 2476508 - DNA, 25 bp, Homo sapien
gctgctgtgtcgatgtcccttgaaa

SEQ ID NO: 2476509 - DNA, 25 bp, Homo sapien
ggcagccccagctccaatgaacttg

SEQ ID NO: 2476510 - DNA, 25 bp, Homo sapien
aaatggcgctggtttggaagctgcg

SEQ ID NO: 2476511 - DNA, 25 bp, Homo sapien
gatgaggctcccaaacacagttcca

SEQ ID NO: 2476512 - DNA, 25 bp, Homo sapien
catgagactgccaagctgctgaggc

SEQ ID NO: 2476513 - DNA, 25 bp, Homo sapien
gggacatgagactgccaagctgctg

SEQ ID NO: 2476514 - DNA, 25 bp, Homo sapien
tagagacaagtgaggtaaggggaca

SEQ ID NO: 2476515 - DNA, 25 bp, Homo sapien
aggtaaggggacatgagactgccaa

SEQ ID NO: 2476516 - DNA, 25 bp, Homo sapien
gccagtggcaaaagctggagcacta

SEQ ID NO: 2476517 - DNA, 25 bp, Homo sapien
tgctgccccaaggagatcatcttcc

SEQ ID NO: 2476518 - DNA, 25 bp, Homo sapien
caactgaagtcagtagactaggcca

SEQ ID NO: 2476519 - DNA, 25 bp, Homo sapien
gccaagtaataccagttagcagcag

SEQ ID NO: 2476520 - DNA, 25 bp, Homo sapien
catctgtcagtatctccggtcgttt

SEQ ID NO: 2476521 - DNA, 25 bp, Homo sapien
atctccggtcgtttcagcaccactg

SEQ ID NO: 2476522 - DNA, 25 bp, Homo sapien
gcaccactgcagatagcggacggct

SEQ ID NO: 2476523 - DNA, 25 bp, Homo sapien
atagcggacggctcagcagctgtga

SEQ ID NO: 2476524 - DNA, 25 bp, Homo sapien
tatgccacgttgttacatcatcaga

SEQ ID NO: 2476525 - DNA, 25 bp, Homo sapien
ctggagaggagtttcagaactatgc

SEQ ID NO: 2476526 - DNA, 25 bp, Homo sapien
ttccatcttcacatgtacgttagag

SEQ ID NO: 2476527 - DNA, 25 bp, Homo sapien
tgtacgttagagttttggatcattc

SEQ ID NO: 2476528 - DNA, 25 bp, Homo sapien
caacttaccatagggttatgtgcca

SEQ ID NO: 2476529 - DNA, 25 bp, Homo sapien
ggttcctgctgagtattgcaacaga

SEQ ID NO: 2476530 - DNA, 25 bp, Homo sapien
tgggccataagggagcatccaacct

SEQ ID NO: 2476531 - DNA, 25 bp, Homo sapien
catagtctggccttcaatgtgctca

SEQ ID NO: 2476532 - DNA, 25 bp, Homo sapien
cacctcccaggttcaagcaattctc

SEQ ID NO: 2476533 - DNA, 25 bp, Homo sapien
gcagtgtcgtgatctcggctcggct

SEQ ID NO: 2476534 - DNA, 25 bp, Homo sapien
gtgtcgtgatctcggctcggctcac

SEQ ID NO: 2476535 - DNA, 25 bp, Homo sapien
tacaacctccacctcccaggttcaa

SEQ ID NO: 2476536 - DNA, 25 bp, Homo sapien
agacaaacttggagcaggcgaacat

SEQ ID NO: 2476537 - DNA, 25 bp, Homo sapien
gggagtggagacaaacttggagcag

SEQ ID NO: 2476538 - DNA, 25 bp, Homo sapien
aggagggagtggagacaaacttgga

SEQ ID NO: 2476539 - DNA, 25 bp, Homo sapien
gtggagacaaacttggagcaggcga

SEQ ID NO: 2476540 - DNA, 25 bp, Homo sapien
caaaaggtattagtggctgggcgca

SEQ ID NO: 2476541 - DNA, 25 bp, Homo sapien
taaagaagatctgacaccctatagg

SEQ ID NO: 2476542 - DNA, 25 bp, Homo sapien
ccctagaaagcttaactggcccaga

SEQ ID NO: 2476543 - DNA, 25 bp, Homo sapien
ctccaagtgaagtgagaagcccatc

SEQ ID NO: 2476544 - DNA, 25 bp, Homo sapien
aaagcatccgcgcaaggtgaggtgt

SEQ ID NO: 2476545 - DNA, 25 bp, Homo sapien
caaggtaagcgcctcaaagcatccg

SEQ ID NO: 2476546 - DNA, 25 bp, Homo sapien
tttacaacttcaccagcgtgccggg

SEQ ID NO: 2476547 - DNA, 25 bp, Homo sapien
taaagaaggcacaagtcaggatgag

SEQ ID NO: 2476548 - DNA, 25 bp, Homo sapien
gagcagcgggaagagcgaaaggaag

SEQ ID NO: 2476549 - DNA, 25 bp, Homo sapien
agaagacagagaggggcggagcagc

SEQ ID NO: 2476550 - DNA, 25 bp, Homo sapien
aaaggaaggctcagcgcatgcgtga

SEQ ID NO: 2476551 - DNA, 25 bp, Homo sapien
cgaaaggaaggctcagcgcatgcgt

SEQ ID NO: 2476552 - DNA, 25 bp, Homo sapien
aacgagtcgctcagccacggataga

SEQ ID NO: 2476553 - DNA, 25 bp, Homo sapien
cgctcagccacggatagagtgattg

SEQ ID NO: 2476554 - DNA, 25 bp, Homo sapien
cacggatagagtgattgcaacatac

SEQ ID NO: 2476555 - DNA, 25 bp, Homo sapien
gggccaacgagtcgctcagccacgg

SEQ ID NO: 2476556 - DNA, 25 bp, Homo sapien
gccagggctgtggcggtatccggcc

SEQ ID NO: 2476557 - DNA, 25 bp, Homo sapien
tgccagggctgtggcggtatccggc

SEQ ID NO: 2476558 - DNA, 25 bp, Homo sapien
ccagggctgtggcggtatccggccg

SEQ ID NO: 2476559 - DNA, 25 bp, Homo sapien
caaaccggctccatgggcgaatagt

SEQ ID NO: 2476560 - DNA, 25 bp, Homo sapien
ttgaacgcagcacgagaaagacggg

SEQ ID NO: 2476561 - DNA, 25 bp, Homo sapien
taaggttgcgaggtcactccaggct

SEQ ID NO: 2476562 - DNA, 25 bp, Homo sapien
tacgcgagttgggataagcagcgcc

SEQ ID NO: 2476563 - DNA, 25 bp, Homo sapien
agcagctttacggtcccggaggaga

SEQ ID NO: 2476564 - DNA, 25 bp, Homo sapien
agaggcgagccgcagacaggcacac

SEQ ID NO: 2476565 - DNA, 25 bp, Homo sapien
ggcagcagctttacggtcccggagg

SEQ ID NO: 2476566 - DNA, 25 bp, Homo sapien
gtcccggaggagaggcgagccgcag

SEQ ID NO: 2476567 - DNA, 25 bp, Homo sapien
aaaccgccgctgaaagcccacggag

SEQ ID NO: 2476568 - DNA, 25 bp, Homo sapien
tgaaagcccacggagcaatttcccg

SEQ ID NO: 2476569 - DNA, 25 bp, Homo sapien
cggccggcgataaaaaccgccgctg

SEQ ID NO: 2476570 - DNA, 25 bp, Homo sapien
cggcgataaaaaccgccgctgaaag

SEQ ID NO: 2476571 - DNA, 25 bp, Homo sapien
ttgcccggatgaggccccgagttta

SEQ ID NO: 2476572 - DNA, 25 bp, Homo sapien
ggatgaggccccgagtttaattatc

SEQ ID NO: 2476573 - DNA, 25 bp, Homo sapien
aggaatgtaattttgcccggatgag

SEQ ID NO: 2476574 - DNA, 25 bp, Homo sapien
taattttgcccggatgaggccccga

SEQ ID NO: 2476575 - DNA, 25 bp, Homo sapien
caatgcggccaatccatcttgcagg

SEQ ID NO: 2476576 - DNA, 25 bp, Homo sapien
gaggaatttcaatgcggccaatcca

SEQ ID NO: 2476577 - DNA, 25 bp, Homo sapien
aatccatcttgcaggcgggcggcag

SEQ ID NO: 2476578 - DNA, 25 bp, Homo sapien
ctcgcggaggaatttcaatgcggcc

SEQ ID NO: 2476579 - DNA, 25 bp, Homo sapien
ctccatctgcatttttatggccctg

SEQ ID NO: 2476580 - DNA, 25 bp, Homo sapien
gatcctccatctgcatttttatggc

SEQ ID NO: 2476581 - DNA, 25 bp, Homo sapien
cgatcctccatctgcatttttatgg

SEQ ID NO: 2476582 - DNA, 25 bp, Homo sapien
catctgcatttttatggccctgagc

SEQ ID NO: 2476583 - DNA, 25 bp, Homo sapien
tcactaggcccttgtgtatttgatt

SEQ ID NO: 2476584 - DNA, 25 bp, Homo sapien
actaggcccttgtgtatttgattaa

SEQ ID NO: 2476585 - DNA, 25 bp, Homo sapien
cactaggcccttgtgtatttgatta

SEQ ID NO: 2476586 - DNA, 25 bp, Homo sapien
ctcactaggcccttgtgtatttgat

SEQ ID NO: 2476587 - DNA, 25 bp, Homo sapien
ctgtctcttccctcttgtccgcatc

SEQ ID NO: 2476588 - DNA, 25 bp, Homo sapien
gcatcaatctccaggacccgatttc

SEQ ID NO: 2476589 - DNA, 25 bp, Homo sapien
ccctcttgtccgcatcaatctccag

SEQ ID NO: 2476590 - DNA, 25 bp, Homo sapien
atcaatctccaggacccgatttctg

SEQ ID NO: 2476591 - DNA, 25 bp, Homo sapien
tttttatgattgaagtctgtattac

SEQ ID NO: 2476592 - DNA, 25 bp, Homo sapien
aaagagagcaaggagtcattagcat

SEQ ID NO: 2476593 - DNA, 25 bp, Homo sapien
tgtttttatgattgaagtctgtatt

SEQ ID NO: 2476594 - DNA, 25 bp, Homo sapien
acaagtgcgggcatgatggagccca

SEQ ID NO: 2476595 - DNA, 25 bp, Homo sapien
attctttcctgtctcaacgtccatg

SEQ ID NO: 2476596 - DNA, 25 bp, Homo sapien
gcatctgtctcaggatcttcggacc

SEQ ID NO: 2476597 - DNA, 25 bp, Homo sapien
ttcggaccctcaaggccctgtagct

SEQ ID NO: 2476598 - DNA, 25 bp, Homo sapien
cgtccatgtaagcatctgtctcagg

SEQ ID NO: 2476599 - DNA, 25 bp, Homo sapien
actgagggcagtcaagtaaggctcc

SEQ ID NO: 2476600 - DNA, 25 bp, Homo sapien
cattagagtctcaagcccattcaga

SEQ ID NO: 2476601 - DNA, 25 bp, Homo sapien
caccaaatactgacgcgagttccta

SEQ ID NO: 2476602 - DNA, 25 bp, Homo sapien
caagttgggacagatggtgaagacc

SEQ ID NO: 2476603 - DNA, 25 bp, Homo sapien
ttggatactgggataggcaaaccat

SEQ ID NO: 2476604 - DNA, 25 bp, Homo sapien
cagattcgggacagtgaagcagaac

SEQ ID NO: 2476605 - DNA, 25 bp, Homo sapien
aaacctataccgcagtcctcttaag

SEQ ID NO: 2476606 - DNA, 25 bp, Homo sapien
gaaggacccatgtgaagttttcgag

SEQ ID NO: 2476607 - DNA, 25 bp, Homo sapien
aaatatatttgttcaaactacaaag

SEQ ID NO: 2476608 - DNA, 25 bp, Homo sapien
tatatttgttcaaactacaaaggga

SEQ ID NO: 2476609 - DNA, 25 bp, Homo sapien
ataaatatatttgttcaaactacaa

SEQ ID NO: 2476610 - DNA, 25 bp, Homo sapien
atatatttgttcaaactacaaaggg

SEQ ID NO: 2476611 - DNA, 25 bp, Homo sapien
gagtggacgattctattcccacagg

SEQ ID NO: 2476612 - DNA, 25 bp, Homo sapien
gtgtatcagaagcaaccagggctag

SEQ ID NO: 2476613 - DNA, 25 bp, Homo sapien
tctttccatgtgaggagatgcgagg

SEQ ID NO: 2476614 - DNA, 25 bp, Homo sapien
gaggaaccaatgaaactgagaacca

SEQ ID NO: 2476615 - DNA, 25 bp, Homo sapien
ggaaagcgctccttacagataggac

SEQ ID NO: 2476616 - DNA, 25 bp, Homo sapien
taggacactccttccatgtgggggt

SEQ ID NO: 2476617 - DNA, 25 bp, Homo sapien
tcactcaaaggtgaaggggtcctgg

SEQ ID NO: 2476618 - DNA, 25 bp, Homo sapien
ccccagtgctggtttctgacagggt

SEQ ID NO: 2476619 - DNA, 25 bp, Homo sapien
tgacttgcagacttcggagagcagg

SEQ ID NO: 2476620 - DNA, 25 bp, Homo sapien
ccagccgagaaggatgacagcatca

SEQ ID NO: 2476621 - DNA, 25 bp, Homo sapien
caaaaccgggactagatgatcaaat

SEQ ID NO: 2476622 - DNA, 25 bp, Homo sapien
gaaagcatttcagttgtagccagat

SEQ ID NO: 2476623 - DNA, 25 bp, Homo sapien
aatttgggctctgcagaagatggtg

SEQ ID NO: 2476624 - DNA, 25 bp, Homo sapien
gcagggcaatttgggctctgcagaa

SEQ ID NO: 2476625 - DNA, 25 bp, Homo sapien
gggcaatttgggctctgcagaagat

SEQ ID NO: 2476626 - DNA, 25 bp, Homo sapien
gaagcagggcaatttgggctctgca

SEQ ID NO: 2476627 - DNA, 25 bp, Homo sapien
cctctgagtgcattgataagatagg

SEQ ID NO: 2476628 - DNA, 25 bp, Homo sapien
ccagttaaaggcaggacctctgagt

SEQ ID NO: 2476629 - DNA, 25 bp, Homo sapien
catacctgtatctccttttcttggc

SEQ ID NO: 2476630 - DNA, 25 bp, Homo sapien
cctgaaggcatctgggatttggagc

SEQ ID NO: 2476631 - DNA, 25 bp, Homo sapien
cctctgtgtcgctacttctatttca

SEQ ID NO: 2476632 - DNA, 25 bp, Homo sapien
tgaaatagaagtagcgacacagagg

SEQ ID NO: 2476633 - DNA, 25 bp, Homo sapien
ctttccctctgacctcctcccacct

SEQ ID NO: 2476634 - DNA, 25 bp, Homo sapien
cctccctcctggccttgctggttga

SEQ ID NO: 2476635 - DNA, 25 bp, Homo sapien
ccacctccctcctggccttgctggt

SEQ ID NO: 2476636 - DNA, 25 bp, Homo sapien
tccctcctggccttgctggttgaac

SEQ ID NO: 2476637 - DNA, 25 bp, Homo sapien
caggaagcagtaagttggcctcctc

SEQ ID NO: 2476638 - DNA, 25 bp, Homo sapien
cagcacattgggacaggtatgggaa

SEQ ID NO: 2476639 - DNA, 25 bp, Homo sapien
aagattccttctctaattagccggg

SEQ ID NO: 2476640 - DNA, 25 bp, Homo sapien
gagagccctggatagctaagattcc

SEQ ID NO: 2476641 - DNA, 25 bp, Homo sapien
actccaggctgggacacttgggttt

SEQ ID NO: 2476642 - DNA, 25 bp, Homo sapien
ctgcacaggctcctccactgctcac

SEQ ID NO: 2476643 - DNA, 25 bp, Homo sapien
ttctgcacaggctcctccactgctc

SEQ ID NO: 2476644 - DNA, 25 bp, Homo sapien
cttctgcacaggctcctccactgct

SEQ ID NO: 2476645 - DNA, 25 bp, Homo sapien
tgcttctgcacaggctcctccactg

SEQ ID NO: 2476646 - DNA, 25 bp, Homo sapien
ggtctccacgctcacaaaggccata

SEQ ID NO: 2476647 - DNA, 25 bp, Homo sapien
gagccggctggctgatgacaacaag

SEQ ID NO: 2476648 - DNA, 25 bp, Homo sapien
tgacaacaaggggagaagcctctcg

SEQ ID NO: 2476649 - DNA, 25 bp, Homo sapien
ccatagggtgggagcctcatgtctt

SEQ ID NO: 2476650 - DNA, 25 bp, Homo sapien
ggaccagctgtctcctctggatgag

SEQ ID NO: 2476651 - DNA, 25 bp, Homo sapien
cagcaaggttacatggagccttcct

SEQ ID NO: 2476652 - DNA, 25 bp, Homo sapien
tcattagactaaacaggggccaggg

SEQ ID NO: 2476653 - DNA, 25 bp, Homo sapien
ccttcctcaacagcgggaggtagag

SEQ ID NO: 2476654 - DNA, 25 bp, Homo sapien
cagccccacagcggcctcctcatcc

SEQ ID NO: 2476655 - DNA, 25 bp, Homo sapien
tccaggcgggcctctagctttctca

SEQ ID NO: 2476656 - DNA, 25 bp, Homo sapien
ccaggcgggcctctagctttctcat

SEQ ID NO: 2476657 - DNA, 25 bp, Homo sapien
tctccaggcgggcctctagctttct

SEQ ID NO: 2476658 - DNA, 25 bp, Homo sapien
ctgtggcatccacggggcctgggtt

SEQ ID NO: 2476659 - DNA, 25 bp, Homo sapien
cggggcctgggttatgggtgctcac

SEQ ID NO: 2476660 - DNA, 25 bp, Homo sapien
catccacggggcctgggttatgggt

SEQ ID NO: 2476661 - DNA, 25 bp, Homo sapien
tccacggggcctgggttatgggtgc

SEQ ID NO: 2476662 - DNA, 25 bp, Homo sapien
tgtcagctcccgcttactttctgac

SEQ ID NO: 2476663 - DNA, 25 bp, Homo sapien
gggctgaccgcagctctgtcagctc

SEQ ID NO: 2476664 - DNA, 25 bp, Homo sapien
ctggagcacacgcagggctgaccgc

SEQ ID NO: 2476665 - DNA, 25 bp, Homo sapien
gctcccgcttactttctgacaactg

SEQ ID NO: 2476666 - DNA, 25 bp, Homo sapien
gggccagctcagtcttgaacacttg

SEQ ID NO: 2476667 - DNA, 25 bp, Homo sapien
tgcactcagcttcaggatcttgtcc

SEQ ID NO: 2476668 - DNA, 25 bp, Homo sapien
tgccttctccaatcgaagtatctct

SEQ ID NO: 2476669 - DNA, 25 bp, Homo sapien
caatcgaagtatctctgcactcagc

SEQ ID NO: 2476670 - DNA, 25 bp, Homo sapien
agcctgccgttaacttcagccactt

SEQ ID NO: 2476671 - DNA, 25 bp, Homo sapien
ttcaagtgcaaaccgagctcagcca

SEQ ID NO: 2476672 - DNA, 25 bp, Homo sapien
caactcctccccaagaagggtggct

SEQ ID NO: 2476673 - DNA, 25 bp, Homo sapien
tgtagttcggctatggtgcggtccc

SEQ ID NO: 2476674 - DNA, 25 bp, Homo sapien
tggagatcagagttcctagtgaatc

SEQ ID NO: 2476675 - DNA, 25 bp, Homo sapien
ttctctttagacacgcaggcttctc

SEQ ID NO: 2476676 - DNA, 25 bp, Homo sapien
ctagtgaatcattcatcagccaggg

SEQ ID NO: 2476677 - DNA, 25 bp, Homo sapien
ccactccactgcattaggactcggg

SEQ ID NO: 2476678 - DNA, 25 bp, Homo sapien
tgggcctggcctagggtgtccttca

SEQ ID NO: 2476679 - DNA, 25 bp, Homo sapien
tggcctagggtgtccttcatctggg

SEQ ID NO: 2476680 - DNA, 25 bp, Homo sapien
ccaccttgtctttcagtcgctgagc

SEQ ID NO: 2476681 - DNA, 25 bp, Homo sapien
ttgtctttcagtcgctgagcctgag

SEQ ID NO: 2476682 - DNA, 25 bp, Homo sapien
tttaagtgatggttctcctgttgtg

SEQ ID NO: 2476683 - DNA, 25 bp, Homo sapien
caaatttaagtgatggttctcctgt

SEQ ID NO: 2476684 - DNA, 25 bp, Homo sapien
aatttaagtgatggttctcctgttg

SEQ ID NO: 2476685 - DNA, 25 bp, Homo sapien
ttaagtgatggttctcctgttgtgc

SEQ ID NO: 2476686 - DNA, 25 bp, Homo sapien
gagattccacacaagattaaaaact

SEQ ID NO: 2476687 - DNA, 25 bp, Homo sapien
gaagttcaggggtgcgatcacagca

SEQ ID NO: 2476688 - DNA, 25 bp, Homo sapien
tcttatgttccctagtagagtgcac

SEQ ID NO: 2476689 - DNA, 25 bp, Homo sapien
ccactctgactaatcctgatttagg

SEQ ID NO: 2476690 - DNA, 25 bp, Homo sapien
tatattccacttttccactctgact

SEQ ID NO: 2476691 - DNA, 25 bp, Homo sapien
tctcttgtgacactcttatattcca

SEQ ID NO: 2476692 - DNA, 25 bp, Homo sapien
tgcccaaggagcttctcttgttccc

SEQ ID NO: 2476693 - DNA, 25 bp, Homo sapien
gtacttctttcagttgcccaaggag

SEQ ID NO: 2476694 - DNA, 25 bp, Homo sapien
ttgctccttgtctgcttgtacttct

SEQ ID NO: 2476695 - DNA, 25 bp, Homo sapien
tctcttgttcccgagtcagggcctt

SEQ ID NO: 2476696 - DNA, 25 bp, Homo sapien
tccagggcagagattccataacatt

SEQ ID NO: 2476697 - DNA, 25 bp, Homo sapien
ctaatcttatctttcctgtggccac

SEQ ID NO: 2476698 - DNA, 25 bp, Homo sapien
catttggaaagatggtagagagctc

SEQ ID NO: 2476699 - DNA, 25 bp, Homo sapien
ggagagtttggctcaatacaagaga

SEQ ID NO: 2476700 - DNA, 25 bp, Homo sapien
tccaggatgcgtgccacatggtctc

SEQ ID NO: 2476701 - DNA, 25 bp, Homo sapien
ctccaggatgcgtgccacatggtct

SEQ ID NO: 2476702 - DNA, 25 bp, Homo sapien
gctccaggatgcgtgccacatggtc

SEQ ID NO: 2476703 - DNA, 25 bp, Homo sapien
gaaccattgtaaaagcccactaaca

SEQ ID NO: 2476704 - DNA, 25 bp, Homo sapien
cttcactgggttcagattttggatg

SEQ ID NO: 2476705 - DNA, 25 bp, Homo sapien
tcttgtcacatcaagtttaatccca

SEQ ID NO: 2476706 - DNA, 25 bp, Homo sapien
ttaaacctatttccttgatgccaga

SEQ ID NO: 2476707 - DNA, 25 bp, Homo sapien
cagctgcatcaggtcattccgttct

SEQ ID NO: 2476708 - DNA, 25 bp, Homo sapien
gcagttgccagagccctctcgagct

SEQ ID NO: 2476709 - DNA, 25 bp, Homo sapien
gctgcatcaggtcattccgttcttg

SEQ ID NO: 2476710 - DNA, 25 bp, Homo sapien
tgcatcaggtcattccgttcttgct

SEQ ID NO: 2476711 - DNA, 25 bp, Homo sapien
tggctagccataggtgcaaccatag

SEQ ID NO: 2476712 - DNA, 25 bp, Homo sapien
cagacacaagggatgggtcccctaa

SEQ ID NO: 2476713 - DNA, 25 bp, Homo sapien
catgtggcacaagtcaatgaacaca

SEQ ID NO: 2476714 - DNA, 25 bp, Homo sapien
aattttaccctatctgctctggagt

SEQ ID NO: 2476715 - DNA, 25 bp, Homo sapien
actacacccagctagctatgtgatt

SEQ ID NO: 2476716 - DNA, 25 bp, Homo sapien
ctacacccagctagctatgtgattt

SEQ ID NO: 2476717 - DNA, 25 bp, Homo sapien
cagttcatccatgggccttggctct

SEQ ID NO: 2476718 - DNA, 25 bp, Homo sapien
tcatccatgggccttggctctcgga

SEQ ID NO: 2476719 - DNA, 25 bp, Homo sapien
gggtcaccagttcatccatgggcct

SEQ ID NO: 2476720 - DNA, 25 bp, Homo sapien
tcaccagttcatccatgggccttgg

SEQ ID NO: 2476721 - DNA, 25 bp, Homo sapien
ctggccctggcggttcacatatcgg

SEQ ID NO: 2476722 - DNA, 25 bp, Homo sapien
acacctggccctggcggttcacata

SEQ ID NO: 2476723 - DNA, 25 bp, Homo sapien
cctggcggttcacatatcggaactg

SEQ ID NO: 2476724 - DNA, 25 bp, Homo sapien
ttcacatatcggaactggtagagct

SEQ ID NO: 2476725 - DNA, 25 bp, Homo sapien
tgtccctgattctgcgataatcccg

SEQ ID NO: 2476726 - DNA, 25 bp, Homo sapien
taatcccgtgattctctatccgctg

SEQ ID NO: 2476727 - DNA, 25 bp, Homo sapien
agcgctgttggatatattctcatta

SEQ ID NO: 2476728 - DNA, 25 bp, Homo sapien
gtgattctctatccgctgagcgctg

SEQ ID NO: 2476729 - DNA, 25 bp, Homo sapien
caaacctccactcccttggctcctc

SEQ ID NO: 2476730 - DNA, 25 bp, Homo sapien
ttggctcctctctcccaattttcca

SEQ ID NO: 2476731 - DNA, 25 bp, Homo sapien
cttggctcctctctcccaattttcc

SEQ ID NO: 2476732 - DNA, 25 bp, Homo sapien
cttctttcaaacctccactcccttg

SEQ ID NO: 2476733 - DNA, 25 bp, Homo sapien
gtactttcaggcacggaagaccaca

SEQ ID NO: 2476734 - DNA, 25 bp, Homo sapien
gcacggaagaccacacaaatgtgtg

SEQ ID NO: 2476735 - DNA, 25 bp, Homo sapien
aatgtgtggtaatcccgaacacagg

SEQ ID NO: 2476736 - DNA, 25 bp, Homo sapien
catcagttgtactttcaggcacgga

SEQ ID NO: 2476737 - DNA, 25 bp, Homo sapien
ccaaggttggagaaaggtatggtca

SEQ ID NO: 2476738 - DNA, 25 bp, Homo sapien
ctaccttctatggatggaagaaagg

SEQ ID NO: 2476739 - DNA, 25 bp, Homo sapien
aaggtatggtcatggaactaccttc

SEQ ID NO: 2476740 - DNA, 25 bp, Homo sapien
tggaactaccttctatggatggaag

SEQ ID NO: 2476741 - DNA, 25 bp, Homo sapien
tgtgtcagtaaagaacaaggctaag

SEQ ID NO: 2476742 - DNA, 25 bp, Homo sapien
tgctttggttatacaggcggcctct

SEQ ID NO: 2476743 - DNA, 25 bp, Homo sapien
caggatggagctacagtggcaacaa

SEQ ID NO: 2476744 - DNA, 25 bp, Homo sapien
ggttgagaatccaagagcccaatca

SEQ ID NO: 2476745 - DNA, 25 bp, Homo sapien
tccgggctacattgagaaagttgac

SEQ ID NO: 2476746 - DNA, 25 bp, Homo sapien
tgaagatgccaatccagtcactggc

SEQ ID NO: 2476747 - DNA, 25 bp, Homo sapien
tgcccggcttagtggtgattcttcc

SEQ ID NO: 2476748 - DNA, 25 bp, Homo sapien
gaaagttgactccaccacgggatgg

SEQ ID NO: 2476749 - DNA, 25 bp, Homo sapien
agaaagggttgatagcctaaagtct

SEQ ID NO: 2476750 - DNA, 25 bp, Homo sapien
ctatgaaagaaagggttgatagcct

SEQ ID NO: 2476751 - DNA, 25 bp, Homo sapien
tgaaagaaagggttgatagcctaaa

SEQ ID NO: 2476752 - DNA, 25 bp, Homo sapien
atgaaagaaagggttgatagcctaa

SEQ ID NO: 2476753 - DNA, 25 bp, Homo sapien
tctctaggacgtaggtctggccttc

SEQ ID NO: 2476754 - DNA, 25 bp, Homo sapien
taaggcatacctggtttctagtccc

SEQ ID NO: 2476755 - DNA, 25 bp, Homo sapien
gaggtatcactcttagtctctagga

SEQ ID NO: 2476756 - DNA, 25 bp, Homo sapien
cactacacctggagataaggcatac

SEQ ID NO: 2476757 - DNA, 25 bp, Homo sapien
tgacccagctgtatccaggaatgag

SEQ ID NO: 2476758 - DNA, 25 bp, Homo sapien
ttatgacatcagaaagcagcaacta

SEQ ID NO: 2476759 - DNA, 25 bp, Homo sapien
aatgagttatgacatcagaaagcag

SEQ ID NO: 2476760 - DNA, 25 bp, Homo sapien
cccagctgtatccaggaatgagtta

SEQ ID NO: 2476761 - DNA, 25 bp, Homo sapien
tctgctggcatccaagagacaaagg

SEQ ID NO: 2476762 - DNA, 25 bp, Homo sapien
gaaatgtatatttaacgttgaggaa

SEQ ID NO: 2476763 - DNA, 25 bp, Homo sapien
tggagtgaggcgcttagcaggaacg

SEQ ID NO: 2476764 - DNA, 25 bp, Homo sapien
ttctggaggcggcaacttcaagggt

SEQ ID NO: 2476765 - DNA, 25 bp, Homo sapien
caacagacggatcagctgttcccct

SEQ ID NO: 2476766 - DNA, 25 bp, Homo sapien
gatctaggactatacatcccagaag

SEQ ID NO: 2476767 - DNA, 25 bp, Homo sapien
aaaaacagcactccgacttctggag

SEQ ID NO: 2476768 - DNA, 25 bp, Homo sapien
tgccgctgcgtgctcggatctagga

SEQ ID NO: 2476769 - DNA, 25 bp, Homo sapien
ggtacatctgagtctccagaaagcc

SEQ ID NO: 2476770 - DNA, 25 bp, Homo sapien
agaaagcctttccttgtatcgtgga

SEQ ID NO: 2476771 - DNA, 25 bp, Homo sapien
tgaggtacatctgagtctccagaaa

SEQ ID NO: 2476772 - DNA, 25 bp, Homo sapien
ccttgtatcgtggatcccaaccttc

SEQ ID NO: 2476773 - DNA, 25 bp, Homo sapien
ccttcctcttccacctcacaggcca

SEQ ID NO: 2476774 - DNA, 25 bp, Homo sapien
tttcccttcctcttccacctcacag

SEQ ID NO: 2476775 - DNA, 25 bp, Homo sapien
tcccttcctcttccacctcacaggc

SEQ ID NO: 2476776 - DNA, 25 bp, Homo sapien
cttcctcttccacctcacaggccat

SEQ ID NO: 2476777 - DNA, 25 bp, Homo sapien
gtaattggcatgtgccggcgtcccg

SEQ ID NO: 2476778 - DNA, 25 bp, Homo sapien
ggtctggtatgttaacagcgggtcc

SEQ ID NO: 2476779 - DNA, 25 bp, Homo sapien
cgagctgctagctgtgtaattggca

SEQ ID NO: 2476780 - DNA, 25 bp, Homo sapien
gagccgtgattagccgagctgctag

SEQ ID NO: 2476781 - DNA, 25 bp, Homo sapien
cggtaattgctaaattacccgccat

SEQ ID NO: 2476782 - DNA, 25 bp, Homo sapien
tcgcgaacatttgggccgtggccag

SEQ ID NO: 2476783 - DNA, 25 bp, Homo sapien
ccataaagaatgtctcggaattggt

SEQ ID NO: 2476784 - DNA, 25 bp, Homo sapien
cgtggccagccgcattaaaggttat

SEQ ID NO: 2476785 - DNA, 25 bp, Homo sapien
attaatgacgactttccgcgggacg

SEQ ID NO: 2476786 - DNA, 25 bp, Homo sapien
gcaggctccatttccgtgatctgga

SEQ ID NO: 2476787 - DNA, 25 bp, Homo sapien
ttccgtgatctggaccagaggtcca

SEQ ID NO: 2476788 - DNA, 25 bp, Homo sapien
gctccatttccgtgatctggaccag

SEQ ID NO: 2476789 - DNA, 25 bp, Homo sapien
catttccgtgatctggaccagaggt

SEQ ID NO: 2476790 - DNA, 25 bp, Homo sapien
ggatcaatcgatgctttggctgcca

SEQ ID NO: 2476791 - DNA, 25 bp, Homo sapien
ggtctagctctggatcaatcgatgc

SEQ ID NO: 2476792 - DNA, 25 bp, Homo sapien
caccttgtggcagatacggagaact

SEQ ID NO: 2476793 - DNA, 25 bp, Homo sapien
caggattggggtccctgcgctgaaa

SEQ ID NO: 2476794 - DNA, 25 bp, Homo sapien
gaggaggagatgatggcagaggtgt

SEQ ID NO: 2476795 - DNA, 25 bp, Homo sapien
ggaggagatgatggcagaggtgtac

SEQ ID NO: 2476796 - DNA, 25 bp, Homo sapien
aggagatgatggcagaggtgtacat

SEQ ID NO: 2476797 - DNA, 25 bp, Homo sapien
agagggaggaggagatgatggcaga

SEQ ID NO: 2476798 - DNA, 25 bp, Homo sapien
gagttccaaccatgagccttgttat

SEQ ID NO: 2476799 - DNA, 25 bp, Homo sapien
tactgggggaaagcggaacttctga

SEQ ID NO: 2476800 - DNA, 25 bp, Homo sapien
tctccacttgggctccaggattcat

SEQ ID NO: 2476801 - DNA, 25 bp, Homo sapien
cacttgggctccaggattcataggt

SEQ ID NO: 2476802 - DNA, 25 bp, Homo sapien
tgcactcacacttgtctggataggt

SEQ ID NO: 2476803 - DNA, 25 bp, Homo sapien
catgtgcgaatggtatctcagttgc

SEQ ID NO: 2476804 - DNA, 25 bp, Homo sapien
tatacatccaggtggctttgtgcca

SEQ ID NO: 2476805 - DNA, 25 bp, Homo sapien
ggctcttgtctatccatctgtgtga

SEQ ID NO: 2476806 - DNA, 25 bp, Homo sapien
tgtgcgtgctcgtgtctgcaggagg

SEQ ID NO: 2476807 - DNA, 25 bp, Homo sapien
gtgtgtgcgtgctcgtgtctgcagg

SEQ ID NO: 2476808 - DNA, 25 bp, Homo sapien
agggcagcgtgtgtgttttgcgcgc

SEQ ID NO: 2476809 - DNA, 25 bp, Homo sapien
gcagcgtgtgtgttttgcgcgcgtg

SEQ ID NO: 2476810 - DNA, 25 bp, Homo sapien
actggctccatctgccgtcgctgag

SEQ ID NO: 2476811 - DNA, 25 bp, Homo sapien
aggtcgtgacaaggaggcaaacagc

SEQ ID NO: 2476812 - DNA, 25 bp, Homo sapien
tctgccgtcgctgaggtcgtgacaa

SEQ ID NO: 2476813 - DNA, 25 bp, Homo sapien
gaggcaaacagcaaaacggcaaaca

SEQ ID NO: 2476814 - DNA, 25 bp, Homo sapien
attgtaagccccgcgcagactgtcc

SEQ ID NO: 2476815 - DNA, 25 bp, Homo sapien
acaagaacattgtaagccccgcgca

SEQ ID NO: 2476816 - DNA, 25 bp, Homo sapien
cattgtaagccccgcgcagactgtc

SEQ ID NO: 2476817 - DNA, 25 bp, Homo sapien
agaacattgtaagccccgcgcagac

SEQ ID NO: 2476818 - DNA, 25 bp, Homo sapien
ttttcagtgtccttgagatgacgct

SEQ ID NO: 2476819 - DNA, 25 bp, Homo sapien
ttcagtgtccttgagatgacgctcc

SEQ ID NO: 2476820 - DNA, 25 bp, Homo sapien
tcagtgtccttgagatgacgctccc

SEQ ID NO: 2476821 - DNA, 25 bp, Homo sapien
ctttttcagtgtccttgagatgacg

SEQ ID NO: 2476822 - DNA, 25 bp, Homo sapien
tgtggactggcacactggactgagc

SEQ ID NO: 2476823 - DNA, 25 bp, Homo sapien
caagaagtgctgctgagtgtgtaca

SEQ ID NO: 2476824 - DNA, 25 bp, Homo sapien
taagggacacgtcaacccgcattag

SEQ ID NO: 2476825 - DNA, 25 bp, Homo sapien
gaccgggattggactgaactgcaga

SEQ ID NO: 2476826 - DNA, 25 bp, Homo sapien
gttctttcttctctgcaaatcccat

SEQ ID NO: 2476827 - DNA, 25 bp, Homo sapien
cttgcccaagatcctctggttcttt

SEQ ID NO: 2476828 - DNA, 25 bp, Homo sapien
tctggttctttcttctctgcaaatc

SEQ ID NO: 2476829 - DNA, 25 bp, Homo sapien
tggttctttcttctctgcaaatccc

SEQ ID NO: 2476830 - DNA, 25 bp, Homo sapien
ctggtgattatctgggggccctggc

SEQ ID NO: 2476831 - DNA, 25 bp, Homo sapien
ggtgattatctgggggccctggcat

SEQ ID NO: 2476832 - DNA, 25 bp, Homo sapien
tggtgattatctgggggccctggca

SEQ ID NO: 2476833 - DNA, 25 bp, Homo sapien
tggaatccttaggtgactgctgagg

SEQ ID NO: 2476834 - DNA, 25 bp, Homo sapien
tagattgtcagggaaattgcaacca

SEQ ID NO: 2476835 - DNA, 25 bp, Homo sapien
gacagatgtttcctaacggtgtgtg

SEQ ID NO: 2476836 - DNA, 25 bp, Homo sapien
ttgcaaccattttcctgccattggg

SEQ ID NO: 2476837 - DNA, 25 bp, Homo sapien
tttgcagtccttaatttcaccagtt

SEQ ID NO: 2476838 - DNA, 25 bp, Homo sapien
gcctttgtctttgcagtccttaatt

SEQ ID NO: 2476839 - DNA, 25 bp, Homo sapien
gggaaaaagtatccttcatctccat

SEQ ID NO: 2476840 - DNA, 25 bp, Homo sapien
tcaccagtttctgggaaaaagtatc

SEQ ID NO: 2476841 - DNA, 25 bp, Homo sapien
ccagcacgggaaccagtggaactta

SEQ ID NO: 2476842 - DNA, 25 bp, Homo sapien
gagccatgaggccaaacttccggat

SEQ ID NO: 2476843 - DNA, 25 bp, Homo sapien
gattggcaagattgttagcacccca

SEQ ID NO: 2476844 - DNA, 25 bp, Homo sapien
gaagttgttcagcaggagccatgag

SEQ ID NO: 2476845 - DNA, 25 bp, Homo sapien
attgtgttgctcaggtcgctgtccc

SEQ ID NO: 2476846 - DNA, 25 bp, Homo sapien
ctttccttggccattgtgttgctca

SEQ ID NO: 2476847 - DNA, 25 bp, Homo sapien
gctttccttggccattgtgttgctc

SEQ ID NO: 2476848 - DNA, 25 bp, Homo sapien
tgttgctcaggtcgctgtccccaag

SEQ ID NO: 2476849 - DNA, 25 bp, Homo sapien
tcagagtaaagcagctgccaaagct

SEQ ID NO: 2476850 - DNA, 25 bp, Homo sapien
gaataggctccaagatgtttgctga

SEQ ID NO: 2476851 - DNA, 25 bp, Homo sapien
gagaataggctccaagatgtttgct

SEQ ID NO: 2476852 - DNA, 25 bp, Homo sapien
taggctccaagatgtttgctgagta

SEQ ID NO: 2476853 - DNA, 25 bp, Homo sapien
ctgcttgtttgtcctgtgcatagtt

SEQ ID NO: 2476854 - DNA, 25 bp, Homo sapien
gacatagcctctggtttacaggatc

SEQ ID NO: 2476855 - DNA, 25 bp, Homo sapien
gtttgtcctgtgcatagttcttctt

SEQ ID NO: 2476856 - DNA, 25 bp, Homo sapien
tcatgtccttagctcctgacatagc

SEQ ID NO: 2476857 - DNA, 25 bp, Homo sapien
caggctgcagagtgagcagacgcat

SEQ ID NO: 2476858 - DNA, 25 bp, Homo sapien
tttcagtttcatctgcaggctgcag

SEQ ID NO: 2476859 - DNA, 25 bp, Homo sapien
tgcaggctgcagagtgagcagacgc

SEQ ID NO: 2476860 - DNA, 25 bp, Homo sapien
catttcagtttcatctgcaggctgc

SEQ ID NO: 2476861 - DNA, 25 bp, Homo sapien
ttgagggggtaacaatggacttgcc

SEQ ID NO: 2476862 - DNA, 25 bp, Homo sapien
taacaatggacttgccgctccattc

SEQ ID NO: 2476863 - DNA, 25 bp, Homo sapien
ctaataaccgtggatggtagcaatg

SEQ ID NO: 2476864 - DNA, 25 bp, Homo sapien
accgtggatggtagcaatgtatttt

SEQ ID NO: 2476865 - DNA, 25 bp, Homo sapien
acagagactgtcctcttttcccttg

SEQ ID NO: 2476866 - DNA, 25 bp, Homo sapien
taaccacagagactgtcctcttttc

SEQ ID NO: 2476867 - DNA, 25 bp, Homo sapien
taaaaccacaaatttggacagtgcc

SEQ ID NO: 2476868 - DNA, 25 bp, Homo sapien
ttaaaaccacaaatttggacagtgc

SEQ ID NO: 2476869 - DNA, 25 bp, Homo sapien
gacgtagtaaatatgctcaagttgt

SEQ ID NO: 2476870 - DNA, 25 bp, Homo sapien
gagatatttccttgctgctcaacca

SEQ ID NO: 2476871 - DNA, 25 bp, Homo sapien
tgctcaaccagcgagcttgctgggt

SEQ ID NO: 2476872 - DNA, 25 bp, Homo sapien
tgctgggtttagaggattaatcttt

SEQ ID NO: 2476873 - DNA, 25 bp, Homo sapien
acagttgatccagccaactgagctg

SEQ ID NO: 2476874 - DNA, 25 bp, Homo sapien
gccagctcttggtcatcgcattcag

SEQ ID NO: 2476875 - DNA, 25 bp, Homo sapien
gaagctgagggttcagcttctaaaa

SEQ ID NO: 2476876 - DNA, 25 bp, Homo sapien
ttggtcatcgcattcagctccacag

SEQ ID NO: 2476877 - DNA, 25 bp, Homo sapien
ctgaaaaaccattagactctgaaag

SEQ ID NO: 2476878 - DNA, 25 bp, Homo sapien
atattttctctgacagtttgcacag

SEQ ID NO: 2476879 - DNA, 25 bp, Homo sapien
gagggtggtgttcgatggatgctgc

SEQ ID NO: 2476880 - DNA, 25 bp, Homo sapien
tgcacagatagttaagatactgtgt

SEQ ID NO: 2476881 - DNA, 25 bp, Homo sapien
cgccccaagtgttgattatacccct

SEQ ID NO: 2476882 - DNA, 25 bp, Homo sapien
gattataccccttgggatgcatcat

SEQ ID NO: 2476883 - DNA, 25 bp, Homo sapien
agtgttgattataccccttgggatg

SEQ ID NO: 2476884 - DNA, 25 bp, Homo sapien
tgagccccgccccaagtgttgatta

SEQ ID NO: 2476885 - DNA, 25 bp, Homo sapien
acagcaggtgagtgtttctggtgca

SEQ ID NO: 2476886 - DNA, 25 bp, Homo sapien
cagcaggtgagtgtttctggtgcat

SEQ ID NO: 2476887 - DNA, 25 bp, Homo sapien
tggccgatggtgtcattaacaatgc

SEQ ID NO: 2476888 - DNA, 25 bp, Homo sapien
tgaataatagcctgactggctgatt

SEQ ID NO: 2476889 - DNA, 25 bp, Homo sapien
tcaaaatgagagacatgattaatat

SEQ ID NO: 2476890 - DNA, 25 bp, Homo sapien
catgattaatatgtcggaaatccag

SEQ ID NO: 2476891 - DNA, 25 bp, Homo sapien
ttttcccctgttgacgtgtgagtgc

SEQ ID NO: 2476892 - DNA, 25 bp, Homo sapien
taatttattgtagggttgaacagcc

SEQ ID NO: 2476893 - DNA, 25 bp, Homo sapien
tgtagggttgaacagccaggtctta

SEQ ID NO: 2476894 - DNA, 25 bp, Homo sapien
tgtgagtgcctttgatggtaattta

SEQ ID NO: 2476895 - DNA, 25 bp, Homo sapien
gatgcctccaaaccatcccaaaatg

SEQ ID NO: 2476896 - DNA, 25 bp, Homo sapien
tgcctccaaaccatcccaaaatgta

SEQ ID NO: 2476897 - DNA, 25 bp, Homo sapien
ttttgatgcctccaaaccatcccaa

SEQ ID NO: 2476898 - DNA, 25 bp, Homo sapien
ttgatgcctccaaaccatcccaaaa

SEQ ID NO: 2476899 - DNA, 25 bp, Homo sapien
tacagaagggtatggggcaatctct

SEQ ID NO: 2476900 - DNA, 25 bp, Homo sapien
ctacagaagggtatggggcaatctc

SEQ ID NO: 2476901 - DNA, 25 bp, Homo sapien
acagaagggtatggggcaatctctt

SEQ ID NO: 2476902 - DNA, 25 bp, Homo sapien
agaagggtatggggcaatctctttt

SEQ ID NO: 2476903 - DNA, 25 bp, Homo sapien
attcattacagaaggatgagtcagt

SEQ ID NO: 2476904 - DNA, 25 bp, Homo sapien
cattacagaaggatgagtcagtgtt

SEQ ID NO: 2476905 - DNA, 25 bp, Homo sapien
ttcattacagaaggatgagtcagtg

SEQ ID NO: 2476906 - DNA, 25 bp, Homo sapien
tcattacagaaggatgagtcagtgt

SEQ ID NO: 2476907 - DNA, 25 bp, Homo sapien
gccatctcgaagaattctttaactt

SEQ ID NO: 2476908 - DNA, 25 bp, Homo sapien
tataaatgttgtgaatttgtgcttt

SEQ ID NO: 2476909 - DNA, 25 bp, Homo sapien
taggccatctcgaagaattctttaa

SEQ ID NO: 2476910 - DNA, 25 bp, Homo sapien
ttaggccatctcgaagaattcttta

SEQ ID NO: 2476911 - DNA, 25 bp, Homo sapien
ggtctgagaacttcaaactcatggc

SEQ ID NO: 2476912 - DNA, 25 bp, Homo sapien
caaaatagtagggaaatatcaggtc

SEQ ID NO: 2476913 - DNA, 25 bp, Homo sapien
ggctggcccgaagttatgaatctaa

SEQ ID NO: 2476914 - DNA, 25 bp, Homo sapien
ccagaaggtatttgctgatagaagc

SEQ ID NO: 2476915 - DNA, 25 bp, Homo sapien
ttacaatgatctgctttaagacaac

SEQ ID NO: 2476916 - DNA, 25 bp, Homo sapien
gacaacaacttgagcaactctgcat

SEQ ID NO: 2476917 - DNA, 25 bp, Homo sapien
ctgcatctaaaagcctggattcctt

SEQ ID NO: 2476918 - DNA, 25 bp, Homo sapien
gctattaggtttccgctttacaatg

SEQ ID NO: 2476919 - DNA, 25 bp, Homo sapien
ccctttccacttctgttgttgccag

SEQ ID NO: 2476920 - DNA, 25 bp, Homo sapien
taatccagagaaagcggtcatccat

SEQ ID NO: 2476921 - DNA, 25 bp, Homo sapien
ttgttgccagaaagttgatgatgat

SEQ ID NO: 2476922 - DNA, 25 bp, Homo sapien
aaattagattagaaataatccagag

SEQ ID NO: 2476923 - DNA, 25 bp, Homo sapien
cgcgaaagccaggtccgagggcttc

SEQ ID NO: 2476924 - DNA, 25 bp, Homo sapien
ccttctctccagtctgcgcgaaagc

SEQ ID NO: 2476925 - DNA, 25 bp, Homo sapien
caggtccgagggcttcgaagatctg

SEQ ID NO: 2476926 - DNA, 25 bp, Homo sapien
tccagtctgcgcgaaagccaggtcc

SEQ ID NO: 2476927 - DNA, 25 bp, Homo sapien
ctttcgattatttgaataattcagg

SEQ ID NO: 2476928 - DNA, 25 bp, Homo sapien
gattgtttgtggagactcatcatcg

SEQ ID NO: 2476929 - DNA, 25 bp, Homo sapien
tctgattgtttgtggagactcatca

SEQ ID NO: 2476930 - DNA, 25 bp, Homo sapien
gcaaattctgattgtttgtggagac

SEQ ID NO: 2476931 - DNA, 25 bp, Homo sapien
cgggcgcttcctagtgcgggcactc

SEQ ID NO: 2476932 - DNA, 25 bp, Homo sapien
acctgctctggcgccaggtagtgtc

SEQ ID NO: 2476933 - DNA, 25 bp, Homo sapien
caggtagtgtcgcgggcgcttccta

SEQ ID NO: 2476934 - DNA, 25 bp, Homo sapien
ggcgcttcctagtgcgggcactcat

SEQ ID NO: 2476935 - DNA, 25 bp, Homo sapien
aggtctgtacgaggaagccaaattc

SEQ ID NO: 2476936 - DNA, 25 bp, Homo sapien
cttttgttaggtctgtacgaggaag

SEQ ID NO: 2476937 - DNA, 25 bp, Homo sapien
ggcattcggtttgttggctttctga

SEQ ID NO: 2476938 - DNA, 25 bp, Homo sapien
tcggtttgttggctttctgaccaaa

SEQ ID NO: 2476939 - DNA, 25 bp, Homo sapien
catacagaggatttaggcagagagc

SEQ ID NO: 2476940 - DNA, 25 bp, Homo sapien
ggccgtgtgctgaaacggtgcaggc

SEQ ID NO: 2476941 - DNA, 25 bp, Homo sapien
tatctttaggaactcatttgggctg

SEQ ID NO: 2476942 - DNA, 25 bp, Homo sapien
ggctgtgtccacaaggccgtgtgct

SEQ ID NO: 2476943 - DNA, 25 bp, Homo sapien
gaaaggctttctagggcgagatcgc

SEQ ID NO: 2476944 - DNA, 25 bp, Homo sapien
ttcccgacgaggctgaggagccgtt

SEQ ID NO: 2476945 - DNA, 25 bp, Homo sapien
cgctccgcggttgtagaagtccctt

SEQ ID NO: 2476946 - DNA, 25 bp, Homo sapien
attgttcagagcaagcggacttccc

SEQ ID NO: 2476947 - DNA, 25 bp, Homo sapien
gtttcctagcagagccggctcccag

SEQ ID NO: 2476948 - DNA, 25 bp, Homo sapien
agcagtttcctagcagagccggctc

SEQ ID NO: 2476949 - DNA, 25 bp, Homo sapien
ggataagcagtttcctagcagagcc

SEQ ID NO: 2476950 - DNA, 25 bp, Homo sapien
gcaagaccctatcttccactgggct

SEQ ID NO: 2476951 - DNA, 25 bp, Homo sapien
agtaggtctggctgagcgaggcgct

SEQ ID NO: 2476952 - DNA, 25 bp, Homo sapien
tgagcgaggcgctgctctgtggcca

SEQ ID NO: 2476953 - DNA, 25 bp, Homo sapien
gaggtggcccgaaggggtttctgca

SEQ ID NO: 2476954 - DNA, 25 bp, Homo sapien
catttgctctccacttgaggggtgc

SEQ ID NO: 2476955 - DNA, 25 bp, Homo sapien
gcgcggcggagagcggcatcggcgg

SEQ ID NO: 2476956 - DNA, 25 bp, Homo sapien
aatgcgccggggaagaaatctgctc

SEQ ID NO: 2476957 - DNA, 25 bp, Homo sapien
atgaagcaatcacaggcgcccgaaa

SEQ ID NO: 2476958 - DNA, 25 bp, Homo sapien
gctccgacacgttctctgtagctgc

SEQ ID NO: 2476959 - DNA, 25 bp, Homo sapien
ggctctgctctgtccggtagctcgc

SEQ ID NO: 2476960 - DNA, 25 bp, Homo sapien
gttctttccgcagatccctccatga

SEQ ID NO: 2476961 - DNA, 25 bp, Homo sapien
ggttgatccacaggcggctgggtga

SEQ ID NO: 2476962 - DNA, 25 bp, Homo sapien
ccacagccggaacccaactgagaga

SEQ ID NO: 2476963 - DNA, 25 bp, Homo sapien
gagaacaagggcagcagttctttcc

SEQ ID NO: 2476964 - DNA, 25 bp, Homo sapien
tagacaagggcgctaataacgccca

SEQ ID NO: 2476965 - DNA, 25 bp, Homo sapien
taacgcccataaaaggcggcctctc

SEQ ID NO: 2476966 - DNA, 25 bp, Homo sapien
gcgcgcctgccgctggccgctttct

SEQ ID NO: 2476967 - DNA, 25 bp, Homo sapien
ccagagatgctctggcaactccgct

SEQ ID NO: 2476968 - DNA, 25 bp, Homo sapien
ctctcccaccagaatcagcgtagat

SEQ ID NO: 2476969 - DNA, 25 bp, Homo sapien
aattaactcctttcgctgggctcag

SEQ ID NO: 2476970 - DNA, 25 bp, Homo sapien
ggagccaaaacgcagtcactcacag

SEQ ID NO: 2476971 - DNA, 25 bp, Homo sapien
ccagaatcagcgtagattttataat

SEQ ID NO: 2476972 - DNA, 25 bp, Homo sapien
ttttgctagtggttgtcgacagctc

SEQ ID NO: 2476973 - DNA, 25 bp, Homo sapien
accggggatgcgaattttgctagtg

SEQ ID NO: 2476974 - DNA, 25 bp, Homo sapien
ggacaccggggatgcgaattttgct

SEQ ID NO: 2476975 - DNA, 25 bp, Homo sapien
gacaccggggatgcgaattttgcta

SEQ ID NO: 2476976 - DNA, 25 bp, Homo sapien
agaaagaggggtttgtgcgtgcttc

SEQ ID NO: 2476977 - DNA, 25 bp, Homo sapien
aaagaggggtttgtgcgtgcttctt

SEQ ID NO: 2476978 - DNA, 25 bp, Homo sapien
agaggggtttgtgcgtgcttctttg

SEQ ID NO: 2476979 - DNA, 25 bp, Homo sapien
gtttgtgcgtgcttctttgcccgcc

SEQ ID NO: 2476980 - DNA, 25 bp, Homo sapien
tgcgagcttcgaactgctccgggca

SEQ ID NO: 2476981 - DNA, 25 bp, Homo sapien
tacggtttgggatatgaaatcgccc

SEQ ID NO: 2476982 - DNA, 25 bp, Homo sapien
gagcggtggaattcaaagaatctgc

SEQ ID NO: 2476983 - DNA, 25 bp, Homo sapien
catttctgtcggagtgagcagctac

SEQ ID NO: 2476984 - DNA, 25 bp, Homo sapien
agttgagatcggattgtggttttgc

SEQ ID NO: 2476985 - DNA, 25 bp, Homo sapien
gttgagatcggattgtggttttgca

SEQ ID NO: 2476986 - DNA, 25 bp, Homo sapien
ttgagatcggattgtggttttgcag

SEQ ID NO: 2476987 - DNA, 25 bp, Homo sapien
ctagttgagatcggattgtggtttt

SEQ ID NO: 2476988 - DNA, 25 bp, Homo sapien
tatgctcagcctttggtccgagcgg

SEQ ID NO: 2476989 - DNA, 25 bp, Homo sapien
gacggcgctgccgattttccaagga

SEQ ID NO: 2476990 - DNA, 25 bp, Homo sapien
agcagaagcggtttttcggccccag

SEQ ID NO: 2476991 - DNA, 25 bp, Homo sapien
ccctgtggcgaaggttgtgagacct

SEQ ID NO: 2476992 - DNA, 25 bp, Homo sapien
tctaggaatcagcacgaagcaaagg

SEQ ID NO: 2476993 - DNA, 25 bp, Homo sapien
tgctgccagttagaaaagcggtgcc

SEQ ID NO: 2476994 - DNA, 25 bp, Homo sapien
tccatgggttccgtgtagacgccgc

SEQ ID NO: 2476995 - DNA, 25 bp, Homo sapien
caaagtcccgtttgcagcagggtcc

SEQ ID NO: 2476996 - DNA, 25 bp, Homo sapien
gagcgggcgcggctgagatagaggt

SEQ ID NO: 2476997 - DNA, 25 bp, Homo sapien
accgctgctcggctgagcgggcgcg

SEQ ID NO: 2476998 - DNA, 25 bp, Homo sapien
ctgctcggctgagcgggcgcggctg

SEQ ID NO: 2476999 - DNA, 25 bp, Homo sapien
cgggcgcggctgagatagaggtgct

SEQ ID NO: 2477000 - DNA, 25 bp, Homo sapien
aggtttttccagcgttctctgggcg

SEQ ID NO: 2477001 - DNA, 25 bp, Homo sapien
tttttccagcgttctctgggcgttc

SEQ ID NO: 2477002 - DNA, 25 bp, Homo sapien
gcacccgctcaggtttttccagcgt

SEQ ID NO: 2477003 - DNA, 25 bp, Homo sapien
gctaggacccggattattctctctg

SEQ ID NO: 2477004 - DNA, 25 bp, Homo sapien
gattattctctctgtactcccgttc

SEQ ID NO: 2477005 - DNA, 25 bp, Homo sapien
ctctgtactcccgttccctagattt

SEQ ID NO: 2477006 - DNA, 25 bp, Homo sapien
gtggcgagctaggacccggattatt

SEQ ID NO: 2477007 - DNA, 25 bp, Homo sapien
caggtcggtactggcttaggcccca

SEQ ID NO: 2477008 - DNA, 25 bp, Homo sapien
ttgttccgggaactgccgccttgct

SEQ ID NO: 2477009 - DNA, 25 bp, Homo sapien
taaacctctgtctgtgagtgcccgt

SEQ ID NO: 2477010 - DNA, 25 bp, Homo sapien
tggttcgctttcaccttcgtctggc

SEQ ID NO: 2477011 - DNA, 25 bp, Homo sapien
cttgggtgtaattgctggtttaggt

SEQ ID NO: 2477012 - DNA, 25 bp, Homo sapien
gctggtttaggttgcagcacttctc

SEQ ID NO: 2477013 - DNA, 25 bp, Homo sapien
ggttgcagcacttctctcgccaatg

SEQ ID NO: 2477014 - DNA, 25 bp, Homo sapien
gcagcacttctctcgccaatgtgca

SEQ ID NO: 2477015 - DNA, 25 bp, Homo sapien
gaaggcgccggtcctccatttcagc

SEQ ID NO: 2477016 - DNA, 25 bp, Homo sapien
ttttctctgccaggacgcggccgtg

SEQ ID NO: 2477017 - DNA, 25 bp, Homo sapien
ttataaggaaggcgccggtcctcca

SEQ ID NO: 2477018 - DNA, 25 bp, Homo sapien
acatcagactctttggggccttaaa

SEQ ID NO: 2477019 - DNA, 25 bp, Homo sapien
caactaatgaagactccgggaaact

SEQ ID NO: 2477020 - DNA, 25 bp, Homo sapien
gggaaatcaactaatgaagactccg

SEQ ID NO: 2477021 - DNA, 25 bp, Homo sapien
ggaaagcggcggacagggaaatcaa

SEQ ID NO: 2477022 - DNA, 25 bp, Homo sapien
gggaaagcggcggacagggaaatca

SEQ ID NO: 2477023 - DNA, 25 bp, Homo sapien
ccgtctgtaactctgggctccctct

SEQ ID NO: 2477024 - DNA, 25 bp, Homo sapien
gtctgtaactctgggctccctctct

SEQ ID NO: 2477025 - DNA, 25 bp, Homo sapien
tcgccgccgtctgtaactctgggct

SEQ ID NO: 2477026 - DNA, 25 bp, Homo sapien
ctctcgccgccgtctgtaactctgg

SEQ ID NO: 2477027 - DNA, 25 bp, Homo sapien
ctactgcaggcttctaaatccgttc

SEQ ID NO: 2477028 - DNA, 25 bp, Homo sapien
tgcaggcttctaaatccgttccatt

SEQ ID NO: 2477029 - DNA, 25 bp, Homo sapien
actgcaggcttctaaatccgttcca

SEQ ID NO: 2477030 - DNA, 25 bp, Homo sapien
tactgcaggcttctaaatccgttcc

SEQ ID NO: 2477031 - DNA, 25 bp, Homo sapien
cagtcggtggaactggaagcaaagc

SEQ ID NO: 2477032 - DNA, 25 bp, Homo sapien
agcgatccccgagcgctgagctggc

SEQ ID NO: 2477033 - DNA, 25 bp, Homo sapien
aaagatgctgcagtcggtggaactg

SEQ ID NO: 2477034 - DNA, 25 bp, Homo sapien
caaagcgcataagggcccagtgcgg

SEQ ID NO: 2477035 - DNA, 25 bp, Homo sapien
ctttctgattgagagcacctccggg

SEQ ID NO: 2477036 - DNA, 25 bp, Homo sapien
ggtgttggtctgtggaactcccagg

SEQ ID NO: 2477037 - DNA, 25 bp, Homo sapien
tctaagtcccgggtgggagccgcca

SEQ ID NO: 2477038 - DNA, 25 bp, Homo sapien
cacctccgggatattagggacctga

SEQ ID NO: 2477039 - DNA, 25 bp, Homo sapien
tccactcgtgaacactcaggcgtac

SEQ ID NO: 2477040 - DNA, 25 bp, Homo sapien
gcctccactcgtgaacactcaggcg

SEQ ID NO: 2477041 - DNA, 25 bp, Homo sapien
tgggcctccactcgtgaacactcag

SEQ ID NO: 2477042 - DNA, 25 bp, Homo sapien
ctccactcgtgaacactcaggcgta

SEQ ID NO: 2477043 - DNA, 25 bp, Homo sapien
gcgggcaggcaccggctgcacaaac

SEQ ID NO: 2477044 - DNA, 25 bp, Homo sapien
ctgcccagctccaagagtgtacaca

SEQ ID NO: 2477045 - DNA, 25 bp, Homo sapien
gcaggcaccggctgcacaaacaccc

SEQ ID NO: 2477046 - DNA, 25 bp, Homo sapien
gggcaggcaccggctgcacaaacac

SEQ ID NO: 2477047 - DNA, 25 bp, Homo sapien
gaggacattccatagctactctgaa

SEQ ID NO: 2477048 - DNA, 25 bp, Homo sapien
aagagtatggccgtagtctcctcac

SEQ ID NO: 2477049 - DNA, 25 bp, Homo sapien
tctcctttctcacgtgcagctcgag

SEQ ID NO: 2477050 - DNA, 25 bp, Homo sapien
tgtccaaacgcccagcaacggcttt

SEQ ID NO: 2477051 - DNA, 25 bp, Homo sapien
taatgatggcgataattccgaagcg

SEQ ID NO: 2477052 - DNA, 25 bp, Homo sapien
gaactgggacgctaaattcctggga

SEQ ID NO: 2477053 - DNA, 25 bp, Homo sapien
tcaggtcgtatgcacagcttgagcc

SEQ ID NO: 2477054 - DNA, 25 bp, Homo sapien
tctagtttagcagcaccgggttttc

SEQ ID NO: 2477055 - DNA, 25 bp, Homo sapien
gactgctgcccggactgtcccaagt

SEQ ID NO: 2477056 - DNA, 25 bp, Homo sapien
tggctccctggattgactgctgccc

SEQ ID NO: 2477057 - DNA, 25 bp, Homo sapien
gtggccataaagtctcgcccgtttc

SEQ ID NO: 2477058 - DNA, 25 bp, Homo sapien
tgcagataatacaaacagagtggcc

SEQ ID NO: 2477059 - DNA, 25 bp, Homo sapien
ggaaagtctgaaccctaggctctgt

SEQ ID NO: 2477060 - DNA, 25 bp, Homo sapien
ccagcccgtgcgctctgtaaaggac

SEQ ID NO: 2477061 - DNA, 25 bp, Homo sapien
cgtgtgatacgtgactcctccaaac

SEQ ID NO: 2477062 - DNA, 25 bp, Homo sapien
tgtaaaggacgcttctctgggtcgg

SEQ ID NO: 2477063 - DNA, 25 bp, Homo sapien
gcggaaagcgaggaccgccagggcc

SEQ ID NO: 2477064 - DNA, 25 bp, Homo sapien
aagcagcagaaccggctccaaggcc

SEQ ID NO: 2477065 - DNA, 25 bp, Homo sapien
gagatggtgacccaggagccgccca

SEQ ID NO: 2477066 - DNA, 25 bp, Homo sapien
ttagcgggggcaaggtcaagcggaa

SEQ ID NO: 2477067 - DNA, 25 bp, Homo sapien
ctgttactccactctgcgcgctccg

SEQ ID NO: 2477068 - DNA, 25 bp, Homo sapien
tcacggccgtctgaatcatcaaggc

SEQ ID NO: 2477069 - DNA, 25 bp, Homo sapien
gccgacaacttgaccccgctgacgt

SEQ ID NO: 2477070 - DNA, 25 bp, Homo sapien
ccgctgacgtcacggccgtctgaat

SEQ ID NO: 2477071 - DNA, 25 bp, Homo sapien
tgtgtttgtcgtagcacccagagcc

SEQ ID NO: 2477072 - DNA, 25 bp, Homo sapien
tctaagaatctgcttgaagtctcgt

SEQ ID NO: 2477073 - DNA, 25 bp, Homo sapien
gtctttacctcccagtcgctctaag

SEQ ID NO: 2477074 - DNA, 25 bp, Homo sapien
tggaaagttcggctagtgttcgtgt

SEQ ID NO: 2477075 - DNA, 25 bp, Homo sapien
aacagtaatgtcaggacggtcttgg

SEQ ID NO: 2477076 - DNA, 25 bp, Homo sapien
tgcaatcttgaggagcagacggatc

SEQ ID NO: 2477077 - DNA, 25 bp, Homo sapien
aatataatgtggtgctgcagtaaaa

SEQ ID NO: 2477078 - DNA, 25 bp, Homo sapien
cgcgcgagaggtggattttatgatc

SEQ ID NO: 2477079 - DNA, 25 bp, Homo sapien
tctggtctaggtgttgctcagtctg

SEQ ID NO: 2477080 - DNA, 25 bp, Homo sapien
tggcttctttatcttttcgggcact

SEQ ID NO: 2477081 - DNA, 25 bp, Homo sapien
ggataaattgatggtttttggcttc

SEQ ID NO: 2477082 - DNA, 25 bp, Homo sapien
ctttgggtctcctcgaagtcgacac

SEQ ID NO: 2477083 - DNA, 25 bp, Homo sapien
caaggcgagccttggtctctgagat

SEQ ID NO: 2477084 - DNA, 25 bp, Homo sapien
tctgagatctctcgtcggctgctgg

SEQ ID NO: 2477085 - DNA, 25 bp, Homo sapien
ttcccgagaacaggtgaagaagacg

SEQ ID NO: 2477086 - DNA, 25 bp, Homo sapien
cctgacttcggctcggagatgcagc

SEQ ID NO: 2477087 - DNA, 25 bp, Homo sapien
agcaccggcaaggtggattgtgtat

SEQ ID NO: 2477088 - DNA, 25 bp, Homo sapien
actttggccgcagacagagcagagc

SEQ ID NO: 2477089 - DNA, 25 bp, Homo sapien
agtgtggcccggacggctgcgtggc

SEQ ID NO: 2477090 - DNA, 25 bp, Homo sapien
tggattgtgtatggactttggccgc

SEQ ID NO: 2477091 - DNA, 25 bp, Homo sapien
gtctgggctccaaagtcactgcaaa

SEQ ID NO: 2477092 - DNA, 25 bp, Homo sapien
gacgtctgaactgaggccgaccaat

SEQ ID NO: 2477093 - DNA, 25 bp, Homo sapien
gagtttccggctccaggttcgcgtg

SEQ ID NO: 2477094 - DNA, 25 bp, Homo sapien
tctgcctcaggagatgcggtttgcc

SEQ ID NO: 2477095 - DNA, 25 bp, Homo sapien
gagccggaaatagccccgcttgctg

SEQ ID NO: 2477096 - DNA, 25 bp, Homo sapien
caaaagatcaggtaacaaggcgctc

SEQ ID NO: 2477097 - DNA, 25 bp, Homo sapien
ggtgtgtagggatcccagataccca

SEQ ID NO: 2477098 - DNA, 25 bp, Homo sapien
gctgggcctcgggacctgactcctg

SEQ ID NO: 2477099 - DNA, 25 bp, Homo sapien
ggcaggacgcgggtttcctcgcggc

SEQ ID NO: 2477100 - DNA, 25 bp, Homo sapien
acgcgggtttcctcgcggcaggcca

SEQ ID NO: 2477101 - DNA, 25 bp, Homo sapien
gtttcctcgcggcaggccaagagaa

SEQ ID NO: 2477102 - DNA, 25 bp, Homo sapien
cgcggcaggccaagagaactcagtt

SEQ ID NO: 2477103 - DNA, 25 bp, Homo sapien
tgagggaaatctgcaggtccgcttc

SEQ ID NO: 2477104 - DNA, 25 bp, Homo sapien
caggtccgcttcaaagccctggtct

SEQ ID NO: 2477105 - DNA, 25 bp, Homo sapien
aaatctgcaggtccgcttcaaagcc

SEQ ID NO: 2477106 - DNA, 25 bp, Homo sapien
tgcaggtccgcttcaaagccctggt

SEQ ID NO: 2477107 - DNA, 25 bp, Homo sapien
tagatctctcctacacttcttcaag

SEQ ID NO: 2477108 - DNA, 25 bp, Homo sapien
ggacgccccacttaagttgtgtaga

SEQ ID NO: 2477109 - DNA, 25 bp, Homo sapien
gaggtcgctcttttgccttgcccgc

SEQ ID NO: 2477110 - DNA, 25 bp, Homo sapien
taaaaacaagctacttgcccacgac

SEQ ID NO: 2477111 - DNA, 25 bp, Homo sapien
cttctcagatgagctaggagccgtc

SEQ ID NO: 2477112 - DNA, 25 bp, Homo sapien
ccatctgcttatgggtggacatggg

SEQ ID NO: 2477113 - DNA, 25 bp, Homo sapien
ggacccccaggaaatcgcaggtcgc

SEQ ID NO: 2477114 - DNA, 25 bp, Homo sapien
gaccggtgccttgggtccagagttc

SEQ ID NO: 2477115 - DNA, 25 bp, Homo sapien
cggcattggtgctttggtgcttcca

SEQ ID NO: 2477116 - DNA, 25 bp, Homo sapien
ggtgaagatgaaagttgggtgctgg

SEQ ID NO: 2477117 - DNA, 25 bp, Homo sapien
caggctggattcttgcctggcggca

SEQ ID NO: 2477118 - DNA, 25 bp, Homo sapien
atgagtacatgagattggagggaag

SEQ ID NO: 2477119 - DNA, 25 bp, Homo sapien
aaaacagcagcgcggagctggctag

SEQ ID NO: 2477120 - DNA, 25 bp, Homo sapien
tcaatggggccgaacaaaacagcag

SEQ ID NO: 2477121 - DNA, 25 bp, Homo sapien
aaccctaaagattgttccacttgag

SEQ ID NO: 2477122 - DNA, 25 bp, Homo sapien
agaaggcagcggataggtacatttc

SEQ ID NO: 2477123 - DNA, 25 bp, Homo sapien
ggcaagcctgggacctcttgttagc

SEQ ID NO: 2477124 - DNA, 25 bp, Homo sapien
ctcaatgttagaggcggcggtgccc

SEQ ID NO: 2477125 - DNA, 25 bp, Homo sapien
ttttcccagccggactgcattggac

SEQ ID NO: 2477126 - DNA, 25 bp, Homo sapien
tgcattggaccaaatggacgcgagg

SEQ ID NO: 2477127 - DNA, 25 bp, Homo sapien
gaaacctccagcgtattttatcact

SEQ ID NO: 2477128 - DNA, 25 bp, Homo sapien
tccagaagggtagataggagcctgc

SEQ ID NO: 2477129 - DNA, 25 bp, Homo sapien
atttctattctgttgggcccgcctt

SEQ ID NO: 2477130 - DNA, 25 bp, Homo sapien
aaaatcctacctaaccatcccatgg

SEQ ID NO: 2477131 - DNA, 25 bp, Homo sapien
taaaatttccggtgagctgcccgca

SEQ ID NO: 2477132 - DNA, 25 bp, Homo sapien
ccattgtgaaaagctgggccagcgc

SEQ ID NO: 2477133 - DNA, 25 bp, Homo sapien
catcagccaaggaaggtgcggacct

SEQ ID NO: 2477134 - DNA, 25 bp, Homo sapien
gataagatgccctaatgactgcctg

SEQ ID NO: 2477135 - DNA, 25 bp, Homo sapien
tttgtctgtcctggattggagccgt

SEQ ID NO: 2477136 - DNA, 25 bp, Homo sapien
tcaacagaagcagaagcgatttttt

SEQ ID NO: 2477137 - DNA, 25 bp, Homo sapien
ctgacatctggcttgcgattggctg

SEQ ID NO: 2477138 - DNA, 25 bp, Homo sapien
atctggcttgcgattggctgggagg

SEQ ID NO: 2477139 - DNA, 25 bp, Homo sapien
gaagcagaaagagtgaccaggactg

SEQ ID NO: 2477140 - DNA, 25 bp, Homo sapien
tttgcctgaccgagcgacagatcaa

SEQ ID NO: 2477141 - DNA, 25 bp, Homo sapien
aattagggagtcaaacgtggacctg

SEQ ID NO: 2477142 - DNA, 25 bp, Homo sapien
catcgagatcgccaacgcgctttgc

SEQ ID NO: 2477143 - DNA, 25 bp, Homo sapien
gtcagtgttcctatccaatttcaaa

SEQ ID NO: 2477144 - DNA, 25 bp, Homo sapien
gacgtttgtttagccagtaggagaa

SEQ ID NO: 2477145 - DNA, 25 bp, Homo sapien
tatatttatgtttagcaccgtcagt

SEQ ID NO: 2477146 - DNA, 25 bp, Homo sapien
tttacaaactgtgaccgtttctgtg

SEQ ID NO: 2477147 - DNA, 25 bp, Homo sapien
taatcttaactgtccagccacgcag

SEQ ID NO: 2477148 - DNA, 25 bp, Homo sapien
tagggagagctgacaaacccacaat

SEQ ID NO: 2477149 - DNA, 25 bp, Homo sapien
tgaatagcctgaaggcaagcccgtg

SEQ ID NO: 2477150 - DNA, 25 bp, Homo sapien
ccaagttttatggtgtagggagagc

SEQ ID NO: 2477151 - DNA, 25 bp, Homo sapien
tagggcgcccttcaggtttctagga

SEQ ID NO: 2477152 - DNA, 25 bp, Homo sapien
aatgccagcggacccataggtgcaa

SEQ ID NO: 2477153 - DNA, 25 bp, Homo sapien
tggccagccatgaatagccagggct

SEQ ID NO: 2477154 - DNA, 25 bp, Homo sapien
gctaagccaggaaagtgacaacatg

SEQ ID NO: 2477155 - DNA, 25 bp, Homo sapien
tcgggaacccgacatggaggattcc

SEQ ID NO: 2477156 - DNA, 25 bp, Homo sapien
ggagctcgggaacccgacatggagg

SEQ ID NO: 2477157 - DNA, 25 bp, Homo sapien
atgaggagctcgggaacccgacatg

SEQ ID NO: 2477158 - DNA, 25 bp, Homo sapien
gctcgggaacccgacatggaggatt

SEQ ID NO: 2477159 - DNA, 25 bp, Homo sapien
ctgtggtccctctcgcgctgactgg

SEQ ID NO: 2477160 - DNA, 25 bp, Homo sapien
cgctgactggcgtaaagttgtggcc

SEQ ID NO: 2477161 - DNA, 25 bp, Homo sapien
aagtcagatccaccgcctactgcgg

SEQ ID NO: 2477162 - DNA, 25 bp, Homo sapien
cctctgggctgtggagcgaaagtca

SEQ ID NO: 2477163 - DNA, 25 bp, Homo sapien
agctgtagcgacgaggcaagcgctc

SEQ ID NO: 2477164 - DNA, 25 bp, Homo sapien
gattccgcgagactgatttatgacg

SEQ ID NO: 2477165 - DNA, 25 bp, Homo sapien
tgacgttttacagccctataaaagc

SEQ ID NO: 2477166 - DNA, 25 bp, Homo sapien
gacacaaagagtgcgggcgattccg

SEQ ID NO: 2477167 - DNA, 25 bp, Homo sapien
taattgttatcaagtacaacaaggg

SEQ ID NO: 2477168 - DNA, 25 bp, Homo sapien
ccccgcaactctgagttatgggcga

SEQ ID NO: 2477169 - DNA, 25 bp, Homo sapien
agtaaaatatagctgagccctggca

SEQ ID NO: 2477170 - DNA, 25 bp, Homo sapien
gttatgggcgatcagttaattggaa

SEQ ID NO: 2477171 - DNA, 25 bp, Homo sapien
tattgcaaggtgtgatggtctggct

SEQ ID NO: 2477172 - DNA, 25 bp, Homo sapien
taaggagaacaaagctatgaagttc

SEQ ID NO: 2477173 - DNA, 25 bp, Homo sapien
ccttaggccttttgcattgaaaatg

SEQ ID NO: 2477174 - DNA, 25 bp, Homo sapien
aaattttaaagccaattctcatcct

SEQ ID NO: 2477175 - DNA, 25 bp, Homo sapien
cctgccgggataagggcctctgcag

SEQ ID NO: 2477176 - DNA, 25 bp, Homo sapien
gctctttgaacgcagggccaatcca

SEQ ID NO: 2477177 - DNA, 25 bp, Homo sapien
tctctggtgtcagttccgtagctct

SEQ ID NO: 2477178 - DNA, 25 bp, Homo sapien
aagctgatctggagctttgctcatc

SEQ ID NO: 2477179 - DNA, 25 bp, Homo sapien
tggttccaatccttggactcccttc

SEQ ID NO: 2477180 - DNA, 25 bp, Homo sapien
ctgtcgtggccctggttccaatcct

SEQ ID NO: 2477181 - DNA, 25 bp, Homo sapien
agtctctgcctagcatttctgctgc

SEQ ID NO: 2477182 - DNA, 25 bp, Homo sapien
cttggccatttcagagtctctgcct

SEQ ID NO: 2477183 - DNA, 25 bp, Homo sapien
aaagcagaggaagaaccaaaaggtg

SEQ ID NO: 2477184 - DNA, 25 bp, Homo sapien
agaaccaaaaggtggtgggtggcag

SEQ ID NO: 2477185 - DNA, 25 bp, Homo sapien
agcagaggaagaaccaaaaggtggt

SEQ ID NO: 2477186 - DNA, 25 bp, Homo sapien
ctgtaaaagcagaggaagaaccaaa

SEQ ID NO: 2477187 - DNA, 25 bp, Homo sapien
gctacagctgtaggttgaactgatt

SEQ ID NO: 2477188 - DNA, 25 bp, Homo sapien
ctacagctgtaggttgaactgattt

SEQ ID NO: 2477189 - DNA, 25 bp, Homo sapien
tacagctgtaggttgaactgatttt

SEQ ID NO: 2477190 - DNA, 25 bp, Homo sapien
cagctgtaggttgaactgatttttc

SEQ ID NO: 2477191 - DNA, 25 bp, Homo sapien
caccaaatgggcgtgggacctacta

SEQ ID NO: 2477192 - DNA, 25 bp, Homo sapien
cacagacaggatgggtggctgcctt

SEQ ID NO: 2477193 - DNA, 25 bp, Homo sapien
tgtatggacagcagaaagacaccaa

SEQ ID NO: 2477194 - DNA, 25 bp, Homo sapien
gaagcagaaagagtcctgtacccct

SEQ ID NO: 2477195 - DNA, 25 bp, Homo sapien
cccctcggattgacaggcaattcct

SEQ ID NO: 2477196 - DNA, 25 bp, Homo sapien
agcccaagctgctgccagccgccat

SEQ ID NO: 2477197 - DNA, 25 bp, Homo sapien
caccggtccggtcaaagcccaagct

SEQ ID NO: 2477198 - DNA, 25 bp, Homo sapien
caaagcccaagctgctgccagccgc

SEQ ID NO: 2477199 - DNA, 25 bp, Homo sapien
accggtccggtcaaagcccaagctg

SEQ ID NO: 2477200 - DNA, 25 bp, Homo sapien
catcctagagatcctggaggccagg

SEQ ID NO: 2477201 - DNA, 25 bp, Homo sapien
tccttcacacattcaacgaagttat

SEQ ID NO: 2477202 - DNA, 25 bp, Homo sapien
cacattcaacgaagttatctgtaac

SEQ ID NO: 2477203 - DNA, 25 bp, Homo sapien
ttggccacggagactgagttcagga

SEQ ID NO: 2477204 - DNA, 25 bp, Homo sapien
gactacaggagggacacgacagtcc

SEQ ID NO: 2477205 - DNA, 25 bp, Homo sapien
tagggttcaacagaaacgctctagg

SEQ ID NO: 2477206 - DNA, 25 bp, Homo sapien
tgcttcctcggtggagagtgtctca

SEQ ID NO: 2477207 - DNA, 25 bp, Homo sapien
tatcctacagcgcactaaaagccaa

SEQ ID NO: 2477208 - DNA, 25 bp, Homo sapien
ctccagatgggaaccggtcagtaga

SEQ ID NO: 2477209 - DNA, 25 bp, Homo sapien
tctatatagctgttcagagatataa

SEQ ID NO: 2477210 - DNA, 25 bp, Homo sapien
cataaagccggatggctgtaagaga

SEQ ID NO: 2477211 - DNA, 25 bp, Homo sapien
tataaatctgtcaggatatcacatg

SEQ ID NO: 2477212 - DNA, 25 bp, Homo sapien
tgtccgattaggtatcgcagcgtcc

SEQ ID NO: 2477213 - DNA, 25 bp, Homo sapien
gcttccaccggtcttattttattgc

SEQ ID NO: 2477214 - DNA, 25 bp, Homo sapien
tctcaaatgcgaaggaacccagggc

SEQ ID NO: 2477215 - DNA, 25 bp, Homo sapien
gcttgagtcgtttggcccttcggcc

SEQ ID NO: 2477216 - DNA, 25 bp, Homo sapien
gtcaccggctactgaaaaagaatcc

SEQ ID NO: 2477217 - DNA, 25 bp, Homo sapien
ctcacgctcatctgttatgatgatt

SEQ ID NO: 2477218 - DNA, 25 bp, Homo sapien
gactcactggatagtgtatttctct

SEQ ID NO: 2477219 - DNA, 25 bp, Homo sapien
ttttcagaccaaatgggtcaccggc

SEQ ID NO: 2477220 - DNA, 25 bp, Homo sapien
gcagacccgggtgcgggagaccagc

SEQ ID NO: 2477221 - DNA, 25 bp, Homo sapien
gagttggggcggctcgtcccgtggc

SEQ ID NO: 2477222 - DNA, 25 bp, Homo sapien
agcgccggcgaagacaggcgggcga

SEQ ID NO: 2477223 - DNA, 25 bp, Homo sapien
cgtggccgctgggtcgtctggtttc

SEQ ID NO: 2477224 - DNA, 25 bp, Homo sapien
gttccaatgactcagaccctattgg

SEQ ID NO: 2477225 - DNA, 25 bp, Homo sapien
caatgactcagaccctattggagcc

SEQ ID NO: 2477226 - DNA, 25 bp, Homo sapien
ggttccaatgactcagaccctattg

SEQ ID NO: 2477227 - DNA, 25 bp, Homo sapien
tccaatgactcagaccctattggag

SEQ ID NO: 2477228 - DNA, 25 bp, Homo sapien
gaactacaggcagggagattgaggg

SEQ ID NO: 2477229 - DNA, 25 bp, Homo sapien
cccccagcactgaaataattctctt

SEQ ID NO: 2477230 - DNA, 25 bp, Homo sapien
ccagcactgaaataattctcttcat

SEQ ID NO: 2477231 - DNA, 25 bp, Homo sapien
actacaggcagggagattgagggca

SEQ ID NO: 2477232 - DNA, 25 bp, Homo sapien
attaggatacaagtttccaggatct

SEQ ID NO: 2477233 - DNA, 25 bp, Homo sapien
gataaatcacccctaggaacagaat

SEQ ID NO: 2477234 - DNA, 25 bp, Homo sapien
taggatacaagtttccaggatcttt

SEQ ID NO: 2477235 - DNA, 25 bp, Homo sapien
tggttgctacaataataggccaagc

SEQ ID NO: 2477236 - DNA, 25 bp, Homo sapien
agtccctgacaaccagaagtacctc

SEQ ID NO: 2477237 - DNA, 25 bp, Homo sapien
aaacccagtccctgacaaccagaag

SEQ ID NO: 2477238 - DNA, 25 bp, Homo sapien
ccagtccctgacaaccagaagtacc

SEQ ID NO: 2477239 - DNA, 25 bp, Homo sapien
acccagtccctgacaaccagaagta

SEQ ID NO: 2477240 - DNA, 25 bp, Homo sapien
caaagctgagttgagcactgatatt

SEQ ID NO: 2477241 - DNA, 25 bp, Homo sapien
gccttggaatactaaatactctcag

SEQ ID NO: 2477242 - DNA, 25 bp, Homo sapien
gggccttggaatactaaatactctc

SEQ ID NO: 2477243 - DNA, 25 bp, Homo sapien
tattctgaggagaggcggtacgcac

SEQ ID NO: 2477244 - DNA, 25 bp, Homo sapien
tattactgtcagattatgacactgt

SEQ ID NO: 2477245 - DNA, 25 bp, Homo sapien
cactgtaataccaagatcaatgaca

SEQ ID NO: 2477246 - DNA, 25 bp, Homo sapien
tccagttatgggcaattgctgacaa

SEQ ID NO: 2477247 - DNA, 25 bp, Homo sapien
caaattgatgaaacttgggcagcga

SEQ ID NO: 2477248 - DNA, 25 bp, Homo sapien
tgagatagggcactacctttggacc

SEQ ID NO: 2477249 - DNA, 25 bp, Homo sapien
cccagcaggactgaacctttccact

SEQ ID NO: 2477250 - DNA, 25 bp, Homo sapien
aagtgattatcgtttttggcttgtt

SEQ ID NO: 2477251 - DNA, 25 bp, Homo sapien
caccgcacagagggctataagacag

SEQ ID NO: 2477252 - DNA, 25 bp, Homo sapien
tggctaatgggttgtgggtacccac

SEQ ID NO: 2477253 - DNA, 25 bp, Homo sapien
catcatcctcgcatcccctttcaca

SEQ ID NO: 2477254 - DNA, 25 bp, Homo sapien
acatcatcctcgcatcccctttcac

SEQ ID NO: 2477255 - DNA, 25 bp, Homo sapien
ccacatcatcctcgcatcccctttc

SEQ ID NO: 2477256 - DNA, 25 bp, Homo sapien
ttccacatcatcctcgcatcccctt

SEQ ID NO: 2477257 - DNA, 25 bp, Homo sapien
tcagccttgcccatctccacgagca

SEQ ID NO: 2477258 - DNA, 25 bp, Homo sapien
ctcagccttgcccatctccacgagc

SEQ ID NO: 2477259 - DNA, 25 bp, Homo sapien
cagccttgcccatctccacgagcat

SEQ ID NO: 2477260 - DNA, 25 bp, Homo sapien
ccctcagccttgcccatctccacga

SEQ ID NO: 2477261 - DNA, 25 bp, Homo sapien
gcgagatggagaggctggcgcggac

SEQ ID NO: 2477262 - DNA, 25 bp, Homo sapien
gacggctccgttttatttgcagcat

SEQ ID NO: 2477263 - DNA, 25 bp, Homo sapien
gctggcgcggacggctccgttttat

SEQ ID NO: 2477264 - DNA, 25 bp, Homo sapien
gcgcggacggctccgttttatttgc

SEQ ID NO: 2477265 - DNA, 25 bp, Homo sapien
gtgtccaacacccatacaggggttg

SEQ ID NO: 2477266 - DNA, 25 bp, Homo sapien
gtcttccccaacactgtgtccaaca

SEQ ID NO: 2477267 - DNA, 25 bp, Homo sapien
aacacccatacaggggttgtactca

SEQ ID NO: 2477268 - DNA, 25 bp, Homo sapien
caggggttgtactcacaggatggca

SEQ ID NO: 2477269 - DNA, 25 bp, Homo sapien
ttgccttgcttccgagatgctccca

SEQ ID NO: 2477270 - DNA, 25 bp, Homo sapien
ccttgcttccgagatgctcccacca

SEQ ID NO: 2477271 - DNA, 25 bp, Homo sapien
ccttgccttgcttccgagatgctcc

SEQ ID NO: 2477272 - DNA, 25 bp, Homo sapien
tgccttgcttccgagatgctcccac

SEQ ID NO: 2477273 - DNA, 25 bp, Homo sapien
gtatcccctggtactccacacccat

SEQ ID NO: 2477274 - DNA, 25 bp, Homo sapien
tctcatatcctctgatgtcctcaca

SEQ ID NO: 2477275 - DNA, 25 bp, Homo sapien
atatcctctgatgtcctcacactcc

SEQ ID NO: 2477276 - DNA, 25 bp, Homo sapien
tcatatcctctgatgtcctcacact

SEQ ID NO: 2477277 - DNA, 25 bp, Homo sapien
ccatctcatatcctctgatgtcctc

SEQ ID NO: 2477278 - DNA, 25 bp, Homo sapien
tgtagccgaggtgtcttcttttacc

SEQ ID NO: 2477279 - DNA, 25 bp, Homo sapien
tcctcttgctgtagccgaggtgtct

SEQ ID NO: 2477280 - DNA, 25 bp, Homo sapien
cttgctgtagccgaggtgtcttctt

SEQ ID NO: 2477281 - DNA, 25 bp, Homo sapien
gctgtagccgaggtgtcttctttta

SEQ ID NO: 2477282 - DNA, 25 bp, Homo sapien
catcaacttttgattatctgccttg

SEQ ID NO: 2477283 - DNA, 25 bp, Homo sapien
tgaagggatgcgaaaggggctgtca

SEQ ID NO: 2477284 - DNA, 25 bp, Homo sapien
gatcatgtaagagacctgatttagc

SEQ ID NO: 2477285 - DNA, 25 bp, Homo sapien
cagtcatcaacttttgattatctgc

SEQ ID NO: 2477286 - DNA, 25 bp, Homo sapien
tcagttgcctggtcaaacctgtctc

SEQ ID NO: 2477287 - DNA, 25 bp, Homo sapien
cagttgcctggtcaaacctgtctca

SEQ ID NO: 2477288 - DNA, 25 bp, Homo sapien
agttgcctggtcaaacctgtctcag

SEQ ID NO: 2477289 - DNA, 25 bp, Homo sapien
gcccagaaaacaatgtgaccaccca

SEQ ID NO: 2477290 - DNA, 25 bp, Homo sapien
atcttcttcacatgggtggatgtga

SEQ ID NO: 2477291 - DNA, 25 bp, Homo sapien
aaacaatgtgaccacccatccccta

SEQ ID NO: 2477292 - DNA, 25 bp, Homo sapien
tcttcttcacatgggtggatgtgag

SEQ ID NO: 2477293 - DNA, 25 bp, Homo sapien
acttcatggaaattgagactgggac

SEQ ID NO: 2477294 - DNA, 25 bp, Homo sapien
ctactactgtgtagcctaaagcggg

SEQ ID NO: 2477295 - DNA, 25 bp, Homo sapien
gggtaagaagcccacttgtcagggc

SEQ ID NO: 2477296 - DNA, 25 bp, Homo sapien
tgccaggaaatccagctactactgt

SEQ ID NO: 2477297 - DNA, 25 bp, Homo sapien
tacccaggcctagagagctactgaa

SEQ ID NO: 2477298 - DNA, 25 bp, Homo sapien
tcgggtgcccctagacgaatgagga

SEQ ID NO: 2477299 - DNA, 25 bp, Homo sapien
ctccggtacccaggcctagagagct

SEQ ID NO: 2477300 - DNA, 25 bp, Homo sapien
gcctagagagctactgaaagttaca

SEQ ID NO: 2477301 - DNA, 25 bp, Homo sapien
caatcgatcgaattctagtcgcaat

SEQ ID NO: 2477302 - DNA, 25 bp, Homo sapien
attctagtcgcaattctctgtctgt

SEQ ID NO: 2477303 - DNA, 25 bp, Homo sapien
gaattctagtcgcaattctctgtct

SEQ ID NO: 2477304 - DNA, 25 bp, Homo sapien
atcgatcgaattctagtcgcaattc

SEQ ID NO: 2477305 - DNA, 25 bp, Homo sapien
ttcagaggtcacagctgaacttggg

SEQ ID NO: 2477306 - DNA, 25 bp, Homo sapien
atccaatttgagtcagagacccatt

SEQ ID NO: 2477307 - DNA, 25 bp, Homo sapien
ttgagatggagccaagcgagtgccc

SEQ ID NO: 2477308 - DNA, 25 bp, Homo sapien
ttgagtcagagacccatttccttga

SEQ ID NO: 2477309 - DNA, 25 bp, Homo sapien
gatggctgcctgtgaaccgtgggag

SEQ ID NO: 2477310 - DNA, 25 bp, Homo sapien
gctggctgcctgcatacgggcttct

SEQ ID NO: 2477311 - DNA, 25 bp, Homo sapien
tctcttctcgaagcagctgagcgag

SEQ ID NO: 2477312 - DNA, 25 bp, Homo sapien
actccgccgtctctagggcccagac

SEQ ID NO: 2477313 - DNA, 25 bp, Homo sapien
catttagaagtcagtcgcttcggct

SEQ ID NO: 2477314 - DNA, 25 bp, Homo sapien
gaggaagggcagatgctccctcctt

SEQ ID NO: 2477315 - DNA, 25 bp, Homo sapien
aaattcttggaactgtgaggcttca

SEQ ID NO: 2477316 - DNA, 25 bp, Homo sapien
caaattctcttctggccaggaggaa

SEQ ID NO: 2477317 - DNA, 25 bp, Homo sapien
cacacctttcgtggataacctggag

SEQ ID NO: 2477318 - DNA, 25 bp, Homo sapien
taacctggagtcttgacatactgat

SEQ ID NO: 2477319 - DNA, 25 bp, Homo sapien
gcttgtcaacttggttctgggattc

SEQ ID NO: 2477320 - DNA, 25 bp, Homo sapien
tactgatgggtcgtgcctggtggcg

SEQ ID NO: 2477321 - DNA, 25 bp, Homo sapien
gatgatccttctttcgttcatctgg

SEQ ID NO: 2477322 - DNA, 25 bp, Homo sapien
tttcatcctaaacaacggactaagc

SEQ ID NO: 2477323 - DNA, 25 bp, Homo sapien
ccttctttcgttcatctggttgtta

SEQ ID NO: 2477324 - DNA, 25 bp, Homo sapien
catcctaaacaacggactaagcttt

SEQ ID NO: 2477325 - DNA, 25 bp, Homo sapien
tttctcagagtcacccctcccagga

SEQ ID NO: 2477326 - DNA, 25 bp, Homo sapien
gggacttgcagaagcccctttctca

SEQ ID NO: 2477327 - DNA, 25 bp, Homo sapien
tggtgctgcgcatggagacgctgag

SEQ ID NO: 2477328 - DNA, 25 bp, Homo sapien
ccaacttccagtggtgctgcgcatg

SEQ ID NO: 2477329 - DNA, 25 bp, Homo sapien
gctgtggttatgaagccggctgcca

SEQ ID NO: 2477330 - DNA, 25 bp, Homo sapien
cagaggaggcttggattgagcaccc

SEQ ID NO: 2477331 - DNA, 25 bp, Homo sapien
gcttaaatcaggagcgaggattccc

SEQ ID NO: 2477332 - DNA, 25 bp, Homo sapien
catatggattaagtgtccccgcaaa

SEQ ID NO: 2477333 - DNA, 25 bp, Homo sapien
caaaaggaggccacggatgacctcc

SEQ ID NO: 2477334 - DNA, 25 bp, Homo sapien
tgtctcacttcaatccacgcttctg

SEQ ID NO: 2477335 - DNA, 25 bp, Homo sapien
tgttgtccagctcaccaactctggg

SEQ ID NO: 2477336 - DNA, 25 bp, Homo sapien
ttcaatccacgcttctgtgtgttga

SEQ ID NO: 2477337 - DNA, 25 bp, Homo sapien
ctacagactggagaacgatgacact

SEQ ID NO: 2477338 - DNA, 25 bp, Homo sapien
tcaggattttacacccagagatgcc

SEQ ID NO: 2477339 - DNA, 25 bp, Homo sapien
gggctggcaccgtttacatctacta

SEQ ID NO: 2477340 - DNA, 25 bp, Homo sapien
aatcgtgggccaaatagctttctcc

SEQ ID NO: 2477341 - DNA, 25 bp, Homo sapien
agctgtcgggctaggaggctgcaca

SEQ ID NO: 2477342 - DNA, 25 bp, Homo sapien
ccatagaggtaaatcagctgctgcg

SEQ ID NO: 2477343 - DNA, 25 bp, Homo sapien
gatttatagtaggagccaggccagc

SEQ ID NO: 2477344 - DNA, 25 bp, Homo sapien
gatgcagagcttggttatttgccca

SEQ ID NO: 2477345 - DNA, 25 bp, Homo sapien
agagacccaggaatgcaagagcaag

SEQ ID NO: 2477346 - DNA, 25 bp, Homo sapien
gaatccaagcagtataactgacagg

SEQ ID NO: 2477347 - DNA, 25 bp, Homo sapien
caaaggagggcttcacagtgggccc

SEQ ID NO: 2477348 - DNA, 25 bp, Homo sapien
cctgaatctaggtgctaagtgccct

SEQ ID NO: 2477349 - DNA, 25 bp, Homo sapien
gaaagagaagaagatcctgtccccc

SEQ ID NO: 2477350 - DNA, 25 bp, Homo sapien
ctgggaaagagaagaagatcctgtc

SEQ ID NO: 2477351 - DNA, 25 bp, Homo sapien
gagaagaagatcctgtcccccccca

SEQ ID NO: 2477352 - DNA, 25 bp, Homo sapien
ggaaagagaagaagatcctgtcccc

SEQ ID NO: 2477353 - DNA, 25 bp, Homo sapien
tcccaggagataggaagtagaccat

SEQ ID NO: 2477354 - DNA, 25 bp, Homo sapien
caagaagactatgtaatgagcaccc

SEQ ID NO: 2477355 - DNA, 25 bp, Homo sapien
tatggtagggtccaggagtgtccca

SEQ ID NO: 2477356 - DNA, 25 bp, Homo sapien
tcagttgcgagcttgaggatcccca

SEQ ID NO: 2477357 - DNA, 25 bp, Homo sapien
tattaatttgtcaatcaaaaagttc

SEQ ID NO: 2477358 - DNA, 25 bp, Homo sapien
atttgtcaatcaaaaagttccaagt

SEQ ID NO: 2477359 - DNA, 25 bp, Homo sapien
ttaatttgtcaatcaaaaagttcca

SEQ ID NO: 2477360 - DNA, 25 bp, Homo sapien
gaggtttattaatttgtcaatcaaa

SEQ ID NO: 2477361 - DNA, 25 bp, Homo sapien
gctgcagcctcccataagaagttca

SEQ ID NO: 2477362 - DNA, 25 bp, Homo sapien
ggatgaaaagccaggtcttctgact

SEQ ID NO: 2477363 - DNA, 25 bp, Homo sapien
catgtcccatgctttgtcttggtcc

SEQ ID NO: 2477364 - DNA, 25 bp, Homo sapien
cagcctcccataagaagttcactct

SEQ ID NO: 2477365 - DNA, 25 bp, Homo sapien
gagtagtgtcaaaactgccatggca

SEQ ID NO: 2477366 - DNA, 25 bp, Homo sapien
aagaatacgtttcccagcgaccagg

SEQ ID NO: 2477367 - DNA, 25 bp, Homo sapien
ccagggtgcacagaaggaccttttg

SEQ ID NO: 2477368 - DNA, 25 bp, Homo sapien
gaagttactgtctagggcactctca

SEQ ID NO: 2477369 - DNA, 25 bp, Homo sapien
gccccagctcattcaatctttcctt

SEQ ID NO: 2477370 - DNA, 25 bp, Homo sapien
cagccccagctcattcaatctttcc

SEQ ID NO: 2477371 - DNA, 25 bp, Homo sapien
cccagctcattcaatctttccttgg

SEQ ID NO: 2477372 - DNA, 25 bp, Homo sapien
gcagccccagctcattcaatctttc

SEQ ID NO: 2477373 - DNA, 25 bp, Homo sapien
cctgtgggttacggggagagggatg

SEQ ID NO: 2477374 - DNA, 25 bp, Homo sapien
ctgccagagcccgtcgtgcccgctg

SEQ ID NO: 2477375 - DNA, 25 bp, Homo sapien
ggcctgccagagcccgtcgtgcccg

SEQ ID NO: 2477376 - DNA, 25 bp, Homo sapien
agagcccgtcgtgcccgctgctctg

SEQ ID NO: 2477377 - DNA, 25 bp, Homo sapien
ccaagaagctgttctcgctgcttgg

SEQ ID NO: 2477378 - DNA, 25 bp, Homo sapien
aaaagccccagaatcgggcaccact

SEQ ID NO: 2477379 - DNA, 25 bp, Homo sapien
aaaagcagagggcatagattgtgga

SEQ ID NO: 2477380 - DNA, 25 bp, Homo sapien
gattgtggacaaaacagtgatggaa

SEQ ID NO: 2477381 - DNA, 25 bp, Homo sapien
gaaaaagccccagaatcgggcacca

SEQ ID NO: 2477382 - DNA, 25 bp, Homo sapien
gtcccggaccatgcttacttcccca

SEQ ID NO: 2477383 - DNA, 25 bp, Homo sapien
agtcccagcactggtcgtttaggat

SEQ ID NO: 2477384 - DNA, 25 bp, Homo sapien
acaggccccacaatgcccaaccagt

SEQ ID NO: 2477385 - DNA, 25 bp, Homo sapien
gcactggtcgtttaggatgctcttg

SEQ ID NO: 2477386 - DNA, 25 bp, Homo sapien
tctttataccttacatgaggatcca

SEQ ID NO: 2477387 - DNA, 25 bp, Homo sapien
gaccaactgacttctttatacctta

SEQ ID NO: 2477388 - DNA, 25 bp, Homo sapien
cttacatgaggatccagcctgcacc

SEQ ID NO: 2477389 - DNA, 25 bp, Homo sapien
tgacttctttataccttacatgagg

SEQ ID NO: 2477390 - DNA, 25 bp, Homo sapien
gctcacagggaaaacgaaactacca

SEQ ID NO: 2477391 - DNA, 25 bp, Homo sapien
gagccagtatatgtgttgagacaga

SEQ ID NO: 2477392 - DNA, 25 bp, Homo sapien
cttggttaattacgggcagagacgc

SEQ ID NO: 2477393 - DNA, 25 bp, Homo sapien
gcgggaggacctacacatgtctaca

SEQ ID NO: 2477394 - DNA, 25 bp, Homo sapien
agtctgggccatgccaaaaggtcca

SEQ ID NO: 2477395 - DNA, 25 bp, Homo sapien
tgcccaggaagagtacttccttggg

SEQ ID NO: 2477396 - DNA, 25 bp, Homo sapien
gccaaaaggtccagggttcatgccc

SEQ ID NO: 2477397 - DNA, 25 bp, Homo sapien
gccctggcagtagcgagtcacgtag

SEQ ID NO: 2477398 - DNA, 25 bp, Homo sapien
gctcagcattgagccgaagctcctc

SEQ ID NO: 2477399 - DNA, 25 bp, Homo sapien
acctgcaggctcatggatggacccc

SEQ ID NO: 2477400 - DNA, 25 bp, Homo sapien
gctctcagccaagcttccagggcag

SEQ ID NO: 2477401 - DNA, 25 bp, Homo sapien
ggctccgaaaactgcagctggctca

SEQ ID NO: 2477402 - DNA, 25 bp, Homo sapien
cagcagtcatccagtcaactaggac

SEQ ID NO: 2477403 - DNA, 25 bp, Homo sapien
taggactgttgattccccaacctgt

SEQ ID NO: 2477404 - DNA, 25 bp, Homo sapien
caaacagacgtaaggatggaatgag

SEQ ID NO: 2477405 - DNA, 25 bp, Homo sapien
ttcaaacccagtgttccaacctgac

SEQ ID NO: 2477406 - DNA, 25 bp, Homo sapien
caagaccagcctggctgacataatg

SEQ ID NO: 2477407 - DNA, 25 bp, Homo sapien
agcctggctgacataatgagacccc

SEQ ID NO: 2477408 - DNA, 25 bp, Homo sapien
cctggctgacataatgagaccccat

SEQ ID NO: 2477409 - DNA, 25 bp, Homo sapien
gaccagcctggctgacataatgaga

SEQ ID NO: 2477410 - DNA, 25 bp, Homo sapien
caaaaagagtaaaatgtaggccagg

SEQ ID NO: 2477411 - DNA, 25 bp, Homo sapien
atgacaggcactgcagcagtctctt

SEQ ID NO: 2477412 - DNA, 25 bp, Homo sapien
aaatgtaggccaggctttctgtaag

SEQ ID NO: 2477413 - DNA, 25 bp, Homo sapien
cactgcagcagtctcttgatgagga

SEQ ID NO: 2477414 - DNA, 25 bp, Homo sapien
atatgcactcccctgtcctttggag

SEQ ID NO: 2477415 - DNA, 25 bp, Homo sapien
tccgggagtccagggacaataataa

SEQ ID NO: 2477416 - DNA, 25 bp, Homo sapien
gaaggaatcgaaatcacatatgcac

SEQ ID NO: 2477417 - DNA, 25 bp, Homo sapien
ctctgacatcaaatccgggaagtga

SEQ ID NO: 2477418 - DNA, 25 bp, Homo sapien
cactttgggaggccgaggcgggcgg

SEQ ID NO: 2477419 - DNA, 25 bp, Homo sapien
ataataataataatgcataggccgg

SEQ ID NO: 2477420 - DNA, 25 bp, Homo sapien
cggtggctcacacccgtaatccgag

SEQ ID NO: 2477421 - DNA, 25 bp, Homo sapien
ataataataatgcataggccgggcg

SEQ ID NO: 2477422 - DNA, 25 bp, Homo sapien
tccggccgactggaaagccttgatc

SEQ ID NO: 2477423 - DNA, 25 bp, Homo sapien
cctcccaggcggtttcataggctgg

SEQ ID NO: 2477424 - DNA, 25 bp, Homo sapien
ctggctccggccgactggaaagcct

SEQ ID NO: 2477425 - DNA, 25 bp, Homo sapien
agccttgatcctgcagacctcccag

SEQ ID NO: 2477426 - DNA, 25 bp, Homo sapien
agccgtcaacttgcccccacagtcc

SEQ ID NO: 2477427 - DNA, 25 bp, Homo sapien
ccgacgaccctgggagccgtcaact

SEQ ID NO: 2477428 - DNA, 25 bp, Homo sapien
acgaccctgggagccgtcaacttgc

SEQ ID NO: 2477429 - DNA, 25 bp, Homo sapien
gagccgtcaacttgcccccacagtc

SEQ ID NO: 2477430 - DNA, 25 bp, Homo sapien
gaagaggcaaatgacatttcatgtc

SEQ ID NO: 2477431 - DNA, 25 bp, Homo sapien
cagggtcccctcagcattgaagaca

SEQ ID NO: 2477432 - DNA, 25 bp, Homo sapien
gcattgaagacagaagaggcaaatg

SEQ ID NO: 2477433 - DNA, 25 bp, Homo sapien
aatgacatttcatgtcccacttgga

SEQ ID NO: 2477434 - DNA, 25 bp, Homo sapien
gaatcgactgttagggtcacacctg

SEQ ID NO: 2477435 - DNA, 25 bp, Homo sapien
gagaaccagaatgtgaccgcaagga

SEQ ID NO: 2477436 - DNA, 25 bp, Homo sapien
taaggatacaaatggtgacccctgc

SEQ ID NO: 2477437 - DNA, 25 bp, Homo sapien
tggctgcgcccctaaactgagatgg

SEQ ID NO: 2477438 - DNA, 25 bp, Homo sapien
ttctcaaacatgcaagtccagggct

SEQ ID NO: 2477439 - DNA, 25 bp, Homo sapien
cccagtggatggtagtcaagctttc

SEQ ID NO: 2477440 - DNA, 25 bp, Homo sapien
taattgttagaagcaccacaggtcc

SEQ ID NO: 2477441 - DNA, 25 bp, Homo sapien
taaggtagagacaattgctccccgg

SEQ ID NO: 2477442 - DNA, 25 bp, Homo sapien
tgaaatcaatactggcctctggctc

SEQ ID NO: 2477443 - DNA, 25 bp, Homo sapien
caatcaaagggctgctaagctgtcc

SEQ ID NO: 2477444 - DNA, 25 bp, Homo sapien
caaaagttgttttggcggcactcag

SEQ ID NO: 2477445 - DNA, 25 bp, Homo sapien
gcctcatggctggtgcgctctagaa

SEQ ID NO: 2477446 - DNA, 25 bp, Homo sapien
catggaagggaaactcgggtccact

SEQ ID NO: 2477447 - DNA, 25 bp, Homo sapien
tgccagggcctgtcactttccaagg

SEQ ID NO: 2477448 - DNA, 25 bp, Homo sapien
aggatgaacaacagagggtggccca

SEQ ID NO: 2477449 - DNA, 25 bp, Homo sapien
catgtcagaacaaaggccagctagt

SEQ ID NO: 2477450 - DNA, 25 bp, Homo sapien
gttttccgcatcctcaggatatgca

SEQ ID NO: 2477451 - DNA, 25 bp, Homo sapien
ttgtggacatttcacattagcttct

SEQ ID NO: 2477452 - DNA, 25 bp, Homo sapien
tgttttccgcatcctcaggatatgc

SEQ ID NO: 2477453 - DNA, 25 bp, Homo sapien
ttccgcatcctcaggatatgcatgc

SEQ ID NO: 2477454 - DNA, 25 bp, Homo sapien
tcaaagccccgagcgatatcattgc

SEQ ID NO: 2477455 - DNA, 25 bp, Homo sapien
agtcctctctcaaagccccgagcga

SEQ ID NO: 2477456 - DNA, 25 bp, Homo sapien
tgccccaatgatcttttctggttcc

SEQ ID NO: 2477457 - DNA, 25 bp, Homo sapien
tctgttgccccaatgatcttttctg

SEQ ID NO: 2477458 - DNA, 25 bp, Homo sapien
taccaaaattcacaattggaaggac

SEQ ID NO: 2477459 - DNA, 25 bp, Homo sapien
ccacgcgtggatcaatgagagatac

SEQ ID NO: 2477460 - DNA, 25 bp, Homo sapien
tttcctctgagacatacaaagcatt

SEQ ID NO: 2477461 - DNA, 25 bp, Homo sapien
ctctgagacatacaaagcatttggg

SEQ ID NO: 2477462 - DNA, 25 bp, Homo sapien
ccttcaccacaaaaggcttcataac

SEQ ID NO: 2477463 - DNA, 25 bp, Homo sapien
aatgtaaagtgtatgatacatcctt

SEQ ID NO: 2477464 - DNA, 25 bp, Homo sapien
tccttcaccacaaaaggcttcataa

SEQ ID NO: 2477465 - DNA, 25 bp, Homo sapien
aaagtgtatgatacatccttcacca

SEQ ID NO: 2477466 - DNA, 25 bp, Homo sapien
gatttgatgtcatcggcactgtttg

SEQ ID NO: 2477467 - DNA, 25 bp, Homo sapien
tttttagatttgatgtcatcggcac

SEQ ID NO: 2477468 - DNA, 25 bp, Homo sapien
gatgtcatcggcactgtttgagaaa

SEQ ID NO: 2477469 - DNA, 25 bp, Homo sapien
actgtttgagaaattggatttcctc

SEQ ID NO: 2477470 - DNA, 25 bp, Homo sapien
cgatcctactaatgctcaaaatggg

SEQ ID NO: 2477471 - DNA, 25 bp, Homo sapien
atcctactaatgctcaaaatgggag

SEQ ID NO: 2477472 - DNA, 25 bp, Homo sapien
ggtacgatcctactaatgctcaaaa

SEQ ID NO: 2477473 - DNA, 25 bp, Homo sapien
tcacaggtacgatcctactaatgct

SEQ ID NO: 2477474 - DNA, 25 bp, Homo sapien
acttgtcccttaaccacgcgcctgt

SEQ ID NO: 2477475 - DNA, 25 bp, Homo sapien
ttaaccacgcgcctgtctagcacct

SEQ ID NO: 2477476 - DNA, 25 bp, Homo sapien
tgaagaagaactgtcagctgtccgc

SEQ ID NO: 2477477 - DNA, 25 bp, Homo sapien
gaaaagcctttccacttcagtagat

SEQ ID NO: 2477478 - DNA, 25 bp, Homo sapien
ctgaaagactaaggccaccaggtcc

SEQ ID NO: 2477479 - DNA, 25 bp, Homo sapien
gtcgcacaccgttccacctgaaaga

SEQ ID NO: 2477480 - DNA, 25 bp, Homo sapien
ccacctgaaagactaaggccaccag

SEQ ID NO: 2477481 - DNA, 25 bp, Homo sapien
caccgttccacctgaaagactaagg

SEQ ID NO: 2477482 - DNA, 25 bp, Homo sapien
tggaatttccgggagctgagcagtt

SEQ ID NO: 2477483 - DNA, 25 bp, Homo sapien
tttccgggagctgagcagtttaggt

SEQ ID NO: 2477484 - DNA, 25 bp, Homo sapien
gaatttccgggagctgagcagttta

SEQ ID NO: 2477485 - DNA, 25 bp, Homo sapien
tccgggagctgagcagtttaggtca

SEQ ID NO: 2477486 - DNA, 25 bp, Homo sapien
caggaaaaacaaggatttacatgtg

SEQ ID NO: 2477487 - DNA, 25 bp, Homo sapien
gaaaaacaaggatttacatgtgttc

SEQ ID NO: 2477488 - DNA, 25 bp, Homo sapien
acaaggatttacatgtgttcttcat

SEQ ID NO: 2477489 - DNA, 25 bp, Homo sapien
aaacaaggatttacatgtgttcttc

SEQ ID NO: 2477490 - DNA, 25 bp, Homo sapien
ggtcttggcgggctggcagctcccc

SEQ ID NO: 2477491 - DNA, 25 bp, Homo sapien
ctgggtcttggcgggctggcagctc

SEQ ID NO: 2477492 - DNA, 25 bp, Homo sapien
agctgtcccagtccgttgccatagc

SEQ ID NO: 2477493 - DNA, 25 bp, Homo sapien
acccagctgcctgggcgccactgcg

SEQ ID NO: 2477494 - DNA, 25 bp, Homo sapien
tgtccagttcaggttctactctcat

SEQ ID NO: 2477495 - DNA, 25 bp, Homo sapien
gctttgtccagttcaggttctactc

SEQ ID NO: 2477496 - DNA, 25 bp, Homo sapien
tctgtctgctttgtccagttcaggt

SEQ ID NO: 2477497 - DNA, 25 bp, Homo sapien
atagggtccctggtatctgtctgct

SEQ ID NO: 2477498 - DNA, 25 bp, Homo sapien
tctgtaggatcaatagtgatattcc

SEQ ID NO: 2477499 - DNA, 25 bp, Homo sapien
catgcccacccaaggttctgtattt

SEQ ID NO: 2477500 - DNA, 25 bp, Homo sapien
gttactaacttcaactaagacattg

SEQ ID NO: 2477501 - DNA, 25 bp, Homo sapien
taagacattgaatgtattcgtatcg

SEQ ID NO: 2477502 - DNA, 25 bp, Homo sapien
tctgtaagtcttatccatgcttgtc

SEQ ID NO: 2477503 - DNA, 25 bp, Homo sapien
tccatgcttgtctctacttacataa

SEQ ID NO: 2477504 - DNA, 25 bp, Homo sapien
aagtcttatccatgcttgtctctac

SEQ ID NO: 2477505 - DNA, 25 bp, Homo sapien
ctttattatctgtaagtcttatcca

SEQ ID NO: 2477506 - DNA, 25 bp, Homo sapien
gactaaagagggcaaatggctcacc

SEQ ID NO: 2477507 - DNA, 25 bp, Homo sapien
tagttgacctctttagtacagggca

SEQ ID NO: 2477508 - DNA, 25 bp, Homo sapien
tcctaggcaagaacaggactaccct

SEQ ID NO: 2477509 - DNA, 25 bp, Homo sapien
tttagggatgagaaacgaggcacag

SEQ ID NO: 2477510 - DNA, 25 bp, Homo sapien
gagggagagttctgatgcaagtact

SEQ ID NO: 2477511 - DNA, 25 bp, Homo sapien
ggaatgctgaccataatcagaagct

SEQ ID NO: 2477512 - DNA, 25 bp, Homo sapien
agagagatatgccaaggaatgctga

SEQ ID NO: 2477513 - DNA, 25 bp, Homo sapien
gaggcaaagaacagtctctctccta

SEQ ID NO: 2477514 - DNA, 25 bp, Homo sapien
cagtgggtgttcttccagcacaagt

SEQ ID NO: 2477515 - DNA, 25 bp, Homo sapien
taaattgaggctactgcaggataca

SEQ ID NO: 2477516 - DNA, 25 bp, Homo sapien
gacagactaaacataggcagcagtt

SEQ ID NO: 2477517 - DNA, 25 bp, Homo sapien
tggactctggacaagcgaactcttc

SEQ ID NO: 2477518 - DNA, 25 bp, Homo sapien
ggaacacgaaactgtgccctgcata

SEQ ID NO: 2477519 - DNA, 25 bp, Homo sapien
ccttttgctagtgccagagaacatg

SEQ ID NO: 2477520 - DNA, 25 bp, Homo sapien
tccaggacagatacccttaaccagt

SEQ ID NO: 2477521 - DNA, 25 bp, Homo sapien
gaaaccttgctgtaggtcaagactg

SEQ ID NO: 2477522 - DNA, 25 bp, Homo sapien
gaataagcagagtgggcattaccaa

SEQ ID NO: 2477523 - DNA, 25 bp, Homo sapien
taaaaggcaaggaataatccaggtg

SEQ ID NO: 2477524 - DNA, 25 bp, Homo sapien
ttccaaagtcagatatcctcaaagg

SEQ ID NO: 2477525 - DNA, 25 bp, Homo sapien
gagatagactgcatgtaaaacacac

SEQ ID NO: 2477526 - DNA, 25 bp, Homo sapien
taggctgtccgtctactggttccag

SEQ ID NO: 2477527 - DNA, 25 bp, Homo sapien
ctcttttggagagccgattggacga

SEQ ID NO: 2477528 - DNA, 25 bp, Homo sapien
tgtatgggactgaggcctaaaggct

SEQ ID NO: 2477529 - DNA, 25 bp, Homo sapien
ggagcaaacttacgctttcaaggag

SEQ ID NO: 2477530 - DNA, 25 bp, Homo sapien
agtgatcactcacgctaacgtctgc

SEQ ID NO: 2477531 - DNA, 25 bp, Homo sapien
ccgggattgagagtgatcactcacg

SEQ ID NO: 2477532 - DNA, 25 bp, Homo sapien
atggtgaggccgcaccacaagccac

SEQ ID NO: 2477533 - DNA, 25 bp, Homo sapien
taacgtctgccctgttcctgtatgg

SEQ ID NO: 2477534 - DNA, 25 bp, Homo sapien
gcatcttaccgattcaggaaaggga

SEQ ID NO: 2477535 - DNA, 25 bp, Homo sapien
ttcaagtgggaaagcgcgcctaact

SEQ ID NO: 2477536 - DNA, 25 bp, Homo sapien
taaccagtctgattggccaaccgac

SEQ ID NO: 2477537 - DNA, 25 bp, Homo sapien
gcaagctgacgaacgtatctgccag

SEQ ID NO: 2477538 - DNA, 25 bp, Homo sapien
aatgggctggtgcaaggaacgaaac

SEQ ID NO: 2477539 - DNA, 25 bp, Homo sapien
ggcattggtagactccgccctggaa

SEQ ID NO: 2477540 - DNA, 25 bp, Homo sapien
tcagaggtgagttaggcgcgctttc

SEQ ID NO: 2477541 - DNA, 25 bp, Homo sapien
gaaggaatgacgttacacagcaatg

SEQ ID NO: 2477542 - DNA, 25 bp, Homo sapien
gagtctaccaatgccgaaagcgagg

SEQ ID NO: 2477543 - DNA, 25 bp, Homo sapien
ggtaggctggcagatacgttcgtca

SEQ ID NO: 2477544 - DNA, 25 bp, Homo sapien
cattactcgggaaccaatggactcc

SEQ ID NO: 2477545 - DNA, 25 bp, Homo sapien
tcctgaatcggtaagatgctgctgg

SEQ ID NO: 2477546 - DNA, 25 bp, Homo sapien
tcagcgtcacgatcagactgttaca

SEQ ID NO: 2477547 - DNA, 25 bp, Homo sapien
tattcagcgtcacgatcagactgtt

SEQ ID NO: 2477548 - DNA, 25 bp, Homo sapien
aaagacatttattcagcgtcacgat

SEQ ID NO: 2477549 - DNA, 25 bp, Homo sapien
ttcagcgtcacgatcagactgttac

SEQ ID NO: 2477550 - DNA, 25 bp, Homo sapien
tttattcagcgtcacgatcagactg

SEQ ID NO: 2477551 - DNA, 25 bp, Homo sapien
gtcacgatcagactgttacatttag

SEQ ID NO: 2477552 - DNA, 25 bp, Homo sapien
aaatgtaacagtctgatcgtgacgc

SEQ ID NO: 2477553 - DNA, 25 bp, Homo sapien
ctaaatgtaacagtctgatcgtgac

SEQ ID NO: 2477554 - DNA, 25 bp, Homo sapien
cagtctgatcgtgacgctgaataaa

SEQ ID NO: 2477555 - DNA, 25 bp, Homo sapien
taacagtctgatcgtgacgctgaat

SEQ ID NO: 2477556 - DNA, 25 bp, Homo sapien
tgtaacagtctgatcgtgacgctga

SEQ ID NO: 2477557 - DNA, 25 bp, Homo sapien
atcgtgacgctgaataaatgtcttt

SEQ ID NO: 2477558 - DNA, 25 bp, Homo sapien
gatggcttaagagtagactaacttt

SEQ ID NO: 2477559 - DNA, 25 bp, Homo sapien
ttaagagtagactaactttacacag

SEQ ID NO: 2477560 - DNA, 25 bp, Homo sapien
ggcttaagagtagactaactttaca

SEQ ID NO: 2477561 - DNA, 25 bp, Homo sapien
tataaattccaaatagaacctggca

SEQ ID NO: 2477562 - DNA, 25 bp, Homo sapien
caagatggcttaagagtagactaac

SEQ ID NO: 2477563 - DNA, 25 bp, Homo sapien
taccaagatggcttaagagtagact

SEQ ID NO: 2477564 - DNA, 25 bp, Homo sapien
gttagtctactcttaagccatcttg

SEQ ID NO: 2477565 - DNA, 25 bp, Homo sapien
tgtaaagttagtctactcttaagcc

SEQ ID NO: 2477566 - DNA, 25 bp, Homo sapien
ctgtgtaaagttagtctactcttaa

SEQ ID NO: 2477567 - DNA, 25 bp, Homo sapien
taagccatcttggtaaatttcccca

SEQ ID NO: 2477568 - DNA, 25 bp, Homo sapien
caggttctatttggaatttatatac

SEQ ID NO: 2477569 - DNA, 25 bp, Homo sapien
tagtctactcttaagccatcttggt

SEQ ID NO: 2477570 - DNA, 25 bp, Homo sapien
gtagggaaagtccaaatctctgcca

SEQ ID NO: 2477571 - DNA, 25 bp, Homo sapien
tgggtagggaaagtccaaatctctg

SEQ ID NO: 2477572 - DNA, 25 bp, Homo sapien
tgccagtcccaaatccatacagttg

SEQ ID NO: 2477573 - DNA, 25 bp, Homo sapien
gtcccaaatccatacagttgtcatt

SEQ ID NO: 2477574 - DNA, 25 bp, Homo sapien
gaagcattcaacattattatcaggg

SEQ ID NO: 2477575 - DNA, 25 bp, Homo sapien
aatctctgccagtcccaaatccata

SEQ ID NO: 2477576 - DNA, 25 bp, Homo sapien
aatgacaactgtatggatttgggac

SEQ ID NO: 2477577 - DNA, 25 bp, Homo sapien
tatggatttgggactggcagagatt

SEQ ID NO: 2477578 - DNA, 25 bp, Homo sapien
tggcagagatttggactttccctac

SEQ ID NO: 2477579 - DNA, 25 bp, Homo sapien
cagagatttggactttccctaccca

SEQ ID NO: 2477580 - DNA, 25 bp, Homo sapien
cccctgataataatgttgaatgctt

SEQ ID NO: 2477581 - DNA, 25 bp, Homo sapien
caactgtatggatttgggactggca

SEQ ID NO: 2477582 - DNA, 25 bp, Homo sapien
gtttgcaatagcaggtggaacccta

SEQ ID NO: 2477583 - DNA, 25 bp, Homo sapien
cagtgatcatcgcaaggaaggaggc

SEQ ID NO: 2477584 - DNA, 25 bp, Homo sapien
caagtatagcgcgaatggctccgag

SEQ ID NO: 2477585 - DNA, 25 bp, Homo sapien
tccaggagagatgttcagctactag

SEQ ID NO: 2477586 - DNA, 25 bp, Homo sapien
gaatgacaagctgtaccttaaacca

SEQ ID NO: 2477587 - DNA, 25 bp, Homo sapien
gaatgccctgcgttcccaaagtaaa

SEQ ID NO: 2477588 - DNA, 25 bp, Homo sapien
aattagtgctcagcaaaagaatgcc

SEQ ID NO: 2477589 - DNA, 25 bp, Homo sapien
ccaagttcgtggcagaaaggtaagt

SEQ ID NO: 2477590 - DNA, 25 bp, Homo sapien
gggatctgacgtctcttaggtaaac

SEQ ID NO: 2477591 - DNA, 25 bp, Homo sapien
gataaaatcctgtcccaagttcctg

SEQ ID NO: 2477592 - DNA, 25 bp, Homo sapien
taaatttctgaacagctagcccaag

SEQ ID NO: 2477593 - DNA, 25 bp, Homo sapien
caccttgtttaggtcagcacgctga

SEQ ID NO: 2477594 - DNA, 25 bp, Homo sapien
tctggtctagagaactcagctcctt

SEQ ID NO: 2477595 - DNA, 25 bp, Homo sapien
tagacaaggtggaggctaaagacct

SEQ ID NO: 2477596 - DNA, 25 bp, Homo sapien
ctaaagacctgaggagccgagtcag

SEQ ID NO: 2477597 - DNA, 25 bp, Homo sapien
ttctgtagcgcactttatagaccaa

SEQ ID NO: 2477598 - DNA, 25 bp, Homo sapien
gaagatggtcccatcggcagcctgt

SEQ ID NO: 2477599 - DNA, 25 bp, Homo sapien
cagcgcgtactcttcaggagagtag

SEQ ID NO: 2477600 - DNA, 25 bp, Homo sapien
ggcagcctgttgcagcgcgtactct

SEQ ID NO: 2477601 - DNA, 25 bp, Homo sapien
aggagagtagctgttgcctgattca

SEQ ID NO: 2477602 - DNA, 25 bp, Homo sapien
aaggaatcttcatggccaaggcccg

SEQ ID NO: 2477603 - DNA, 25 bp, Homo sapien
tgtcagcgggtaccttgccaatagc

SEQ ID NO: 2477604 - DNA, 25 bp, Homo sapien
gaagccgctcccgttcattggtcag

SEQ ID NO: 2477605 - DNA, 25 bp, Homo sapien
gatgtcccggactagcgctagctgg

SEQ ID NO: 2477606 - DNA, 25 bp, Homo sapien
gctcggtgatggacatgatctcctg

SEQ ID NO: 2477607 - DNA, 25 bp, Homo sapien
tctgaagtggacagctgtatcaccc

SEQ ID NO: 2477608 - DNA, 25 bp, Homo sapien
gacagctgtatcaccctgttcctgc

SEQ ID NO: 2477609 - DNA, 25 bp, Homo sapien
tgcagctcggtgatggacatgatct

SEQ ID NO: 2477610 - DNA, 25 bp, Homo sapien
cggaaagcccagatggctctagaaa

SEQ ID NO: 2477611 - DNA, 25 bp, Homo sapien
ccagagtctggtccaggttcccgga

SEQ ID NO: 2477612 - DNA, 25 bp, Homo sapien
tgggccagagtctggtccaggttcc

SEQ ID NO: 2477613 - DNA, 25 bp, Homo sapien
tccaggttcccggaaagcccagatg

SEQ ID NO: 2477614 - DNA, 25 bp, Homo sapien
cctttggtagcacaggaggtcttta

SEQ ID NO: 2477615 - DNA, 25 bp, Homo sapien
tagagctacacctgctagggtcagc

SEQ ID NO: 2477616 - DNA, 25 bp, Homo sapien
gtgatctccacctcgccaactatgg

SEQ ID NO: 2477617 - DNA, 25 bp, Homo sapien
cagcaagtttgcactacctccttgg

SEQ ID NO: 2477618 - DNA, 25 bp, Homo sapien
tttccattttctagggcaacatcag

SEQ ID NO: 2477619 - DNA, 25 bp, Homo sapien
ggcaaaatgcccactcttttcccta

SEQ ID NO: 2477620 - DNA, 25 bp, Homo sapien
tgtcctcagttttacgttctcagcc

SEQ ID NO: 2477621 - DNA, 25 bp, Homo sapien
tggtggttgatagcagctctgccct

SEQ ID NO: 2477622 - DNA, 25 bp, Homo sapien
gattccaagtagatttggcaaggtc

SEQ ID NO: 2477623 - DNA, 25 bp, Homo sapien
tctctacggtcagacattgtgtcta

SEQ ID NO: 2477624 - DNA, 25 bp, Homo sapien
ccctgccgtcagcaagagattccaa

SEQ ID NO: 2477625 - DNA, 25 bp, Homo sapien
aaggtcttcctgatctctacggtca

SEQ ID NO: 2477626 - DNA, 25 bp, Homo sapien
tgccatatcagtatagggaagcagg

SEQ ID NO: 2477627 - DNA, 25 bp, Homo sapien
cgtgccatatcagtatagggaagca

SEQ ID NO: 2477628 - DNA, 25 bp, Homo sapien
accgtgccatatcagtatagggaag

SEQ ID NO: 2477629 - DNA, 25 bp, Homo sapien
ccgtgccatatcagtatagggaagc

SEQ ID NO: 2477630 - DNA, 25 bp, Homo sapien
ctttgagaatctgcgaggaccgcgc

SEQ ID NO: 2477631 - DNA, 25 bp, Homo sapien
gaggatcccggctacctttgagaat

SEQ ID NO: 2477632 - DNA, 25 bp, Homo sapien
cactgctggacgaggatcccggcta

SEQ ID NO: 2477633 - DNA, 25 bp, Homo sapien
cccgggccattgctgagcgctgagt

SEQ ID NO: 2477634 - DNA, 25 bp, Homo sapien
atccctggccatttaccaacttctt

SEQ ID NO: 2477635 - DNA, 25 bp, Homo sapien
aacttcttttcacaggcatccttct

SEQ ID NO: 2477636 - DNA, 25 bp, Homo sapien
caacttcttttcacaggcatccttc

SEQ ID NO: 2477637 - DNA, 25 bp, Homo sapien
cagatccctggccatttaccaactt

SEQ ID NO: 2477638 - DNA, 25 bp, Homo sapien
aatcttctctgcatcattccaattt

SEQ ID NO: 2477639 - DNA, 25 bp, Homo sapien
gtcatccttgcgcagggaccatgct

SEQ ID NO: 2477640 - DNA, 25 bp, Homo sapien
aaaagaaaggattcgtgaatttgca

SEQ ID NO: 2477641 - DNA, 25 bp, Homo sapien
tagtgtatgtgctgctgaagccagc

SEQ ID NO: 2477642 - DNA, 25 bp, Homo sapien
tgccctcttggaaggcctgacagtg

SEQ ID NO: 2477643 - DNA, 25 bp, Homo sapien
tgattggcagctcctatgaaaatga

SEQ ID NO: 2477644 - DNA, 25 bp, Homo sapien
cctgacagtggtatacaaaagcagt

SEQ ID NO: 2477645 - DNA, 25 bp, Homo sapien
gaaaatgaggtgagaatccccaccc

SEQ ID NO: 2477646 - DNA, 25 bp, Homo sapien
ggcagttatctgatgtggttcaacc

SEQ ID NO: 2477647 - DNA, 25 bp, Homo sapien
gagaaagtcaactcttactgagctc

SEQ ID NO: 2477648 - DNA, 25 bp, Homo sapien
tctatgagttgtaggcattggtgcc

SEQ ID NO: 2477649 - DNA, 25 bp, Homo sapien
ttttgagacataggccgaacgtggt

SEQ ID NO: 2477650 - DNA, 25 bp, Homo sapien
cccacgttaagggagttgaggatca

SEQ ID NO: 2477651 - DNA, 25 bp, Homo sapien
tgtcgttacccatcaggctttgcgg

SEQ ID NO: 2477652 - DNA, 25 bp, Homo sapien
gctttgcgggatccattaaaccact

SEQ ID NO: 2477653 - DNA, 25 bp, Homo sapien
tttctgactagggaatcaggtcctc

SEQ ID NO: 2477654 - DNA, 25 bp, Homo sapien
tcaaaactgcagtggcgagtgtcca

SEQ ID NO: 2477655 - DNA, 25 bp, Homo sapien
ggaacttatgacttgggcctctagg

SEQ ID NO: 2477656 - DNA, 25 bp, Homo sapien
catttactctctgccgtgggtctgc

SEQ ID NO: 2477657 - DNA, 25 bp, Homo sapien
tactacctgtgggatcgttgcctgg

SEQ ID NO: 2477658 - DNA, 25 bp, Homo sapien
cctgaattctggtgactagggtcac

SEQ ID NO: 2477659 - DNA, 25 bp, Homo sapien
tgttgtgaaaatgcccacatgtgtt

SEQ ID NO: 2477660 - DNA, 25 bp, Homo sapien
cagtctagggctgaaacattgatca

SEQ ID NO: 2477661 - DNA, 25 bp, Homo sapien
cattgatcaagtgatggagagactt

SEQ ID NO: 2477662 - DNA, 25 bp, Homo sapien
ctaatggagcctatggaaactccgg

SEQ ID NO: 2477663 - DNA, 25 bp, Homo sapien
aatggagcctatggaaactccgggg

SEQ ID NO: 2477664 - DNA, 25 bp, Homo sapien
taatggagcctatggaaactccggg

SEQ ID NO: 2477665 - DNA, 25 bp, Homo sapien
tggagcctatggaaactccggggcc

SEQ ID NO: 2477666 - DNA, 25 bp, Homo sapien
tgcaggtgcagactacaggtaccag

SEQ ID NO: 2477667 - DNA, 25 bp, Homo sapien
cacatggttggagtggatgcttgcc

SEQ ID NO: 2477668 - DNA, 25 bp, Homo sapien
ttgatgcaaccattgagccaggtga

SEQ ID NO: 2477669 - DNA, 25 bp, Homo sapien
gcctcggatgcggtcaaagctgcag

SEQ ID NO: 2477670 - DNA, 25 bp, Homo sapien
agcgtgcagtagaggagatcagcca

SEQ ID NO: 2477671 - DNA, 25 bp, Homo sapien
tagcgtcccagtgcgatgaggcaga

SEQ ID NO: 2477672 - DNA, 25 bp, Homo sapien
tagggtgagcacattgcccacggtg

SEQ ID NO: 2477673 - DNA, 25 bp, Homo sapien
gctatgagcaggttgaatcgggtac

SEQ ID NO: 2477674 - DNA, 25 bp, Homo sapien
gctaactgcaacataacgatagccc

SEQ ID NO: 2477675 - DNA, 25 bp, Homo sapien
agctaactgcaacataacgatagcc

SEQ ID NO: 2477676 - DNA, 25 bp, Homo sapien
atggtagcaggagaagttggcgtca

SEQ ID NO: 2477677 - DNA, 25 bp, Homo sapien
ggtagcaggagaagttggcgtcaga

SEQ ID NO: 2477678 - DNA, 25 bp, Homo sapien
gtagcaggagaagttggcgtcagag

SEQ ID NO: 2477679 - DNA, 25 bp, Homo sapien
tggtagcaggagaagttggcgtcag

SEQ ID NO: 2477680 - DNA, 25 bp, Homo sapien
ctgagtttctcagccttcaattctt

SEQ ID NO: 2477681 - DNA, 25 bp, Homo sapien
tgagtttctcagccttcaattcttt

SEQ ID NO: 2477682 - DNA, 25 bp, Homo sapien
tcaactcacccaaagagcagtcctt

SEQ ID NO: 2477683 - DNA, 25 bp, Homo sapien
tttctggtggacagttaggcttcaa

SEQ ID NO: 2477684 - DNA, 25 bp, Homo sapien
gttcaactcacccaaagagcagtcc

SEQ ID NO: 2477685 - DNA, 25 bp, Homo sapien
aaagagcagtcctttctggtggaca

SEQ ID NO: 2477686 - DNA, 25 bp, Homo sapien
cgccgccttgtggagttgtggcaaa

SEQ ID NO: 2477687 - DNA, 25 bp, Homo sapien
tgagtctagacccatctgcgtggaa

SEQ ID NO: 2477688 - DNA, 25 bp, Homo sapien
tcgaaacacattacaggagcggctt

SEQ ID NO: 2477689 - DNA, 25 bp, Homo sapien
tagcctcgggcttagactccttttc

SEQ ID NO: 2477690 - DNA, 25 bp, Homo sapien
tacagactcggcgaatcctgcgaag

SEQ ID NO: 2477691 - DNA, 25 bp, Homo sapien
cagactttattgtcagggagaggaa

SEQ ID NO: 2477692 - DNA, 25 bp, Homo sapien
tgacgatacggaaaccacggagtcg

SEQ ID NO: 2477693 - DNA, 25 bp, Homo sapien
cccgcccgagttgtgcagtggaggt

SEQ ID NO: 2477694 - DNA, 25 bp, Homo sapien
gaggcgggggtgggcttggactgga

SEQ ID NO: 2477695 - DNA, 25 bp, Homo sapien
gcgggggtgggcttggactggacac

SEQ ID NO: 2477696 - DNA, 25 bp, Homo sapien
gggcttggactggacaccccttgcc

SEQ ID NO: 2477697 - DNA, 25 bp, Homo sapien
gtgggcttggactggacaccccttg

SEQ ID NO: 2477698 - DNA, 25 bp, Homo sapien
gctggtgaaaagaatggaacccgga

SEQ ID NO: 2477699 - DNA, 25 bp, Homo sapien
cccttgggcgatgggtgctggtgaa

SEQ ID NO: 2477700 - DNA, 25 bp, Homo sapien
ggtgctggtgaaaagaatggaaccc

SEQ ID NO: 2477701 - DNA, 25 bp, Homo sapien
ccttgggcgatgggtgctggtgaaa

SEQ ID NO: 2477702 - DNA, 25 bp, Homo sapien
agggaaaggtctatggtggcatctc

SEQ ID NO: 2477703 - DNA, 25 bp, Homo sapien
agtgaggttgcaggcggtaaaacca

SEQ ID NO: 2477704 - DNA, 25 bp, Homo sapien
ttgcaggcggtaaaaccaaagtgct

SEQ ID NO: 2477705 - DNA, 25 bp, Homo sapien
caaagtgcttatgagggacccagga

SEQ ID NO: 2477706 - DNA, 25 bp, Homo sapien
ctgcaatgggcccggctagacctgg

SEQ ID NO: 2477707 - DNA, 25 bp, Homo sapien
cttgtgaaccccgttttgtgctagg

SEQ ID NO: 2477708 - DNA, 25 bp, Homo sapien
cggaccccgaccatggcttgtgaac

SEQ ID NO: 2477709 - DNA, 25 bp, Homo sapien
aagggctggatggacatggcttttg

SEQ ID NO: 2477710 - DNA, 25 bp, Homo sapien
cccagagtccgcttattgccaagaa

SEQ ID NO: 2477711 - DNA, 25 bp, Homo sapien
gatcatttagggagtgccgggagga

SEQ ID NO: 2477712 - DNA, 25 bp, Homo sapien
gagagatcatttagggagtgccggg

SEQ ID NO: 2477713 - DNA, 25 bp, Homo sapien
catttagggagtgccgggaggaggg

SEQ ID NO: 2477714 - DNA, 25 bp, Homo sapien
agagatcatttagggagtgccggga

SEQ ID NO: 2477715 - DNA, 25 bp, Homo sapien
gggccgggtgaagcagagggtgagt

SEQ ID NO: 2477716 - DNA, 25 bp, Homo sapien
tccgtgcgcagttcggatgggtccg

SEQ ID NO: 2477717 - DNA, 25 bp, Homo sapien
gatcggcggtccctggagaagaggt

SEQ ID NO: 2477718 - DNA, 25 bp, Homo sapien
ggagaagaggatgggtccgtgcgca

SEQ ID NO: 2477719 - DNA, 25 bp, Homo sapien
ttcttgtgacggctcagtagtgggt

SEQ ID NO: 2477720 - DNA, 25 bp, Homo sapien
cggctcagtagtgggttgggcttcc

SEQ ID NO: 2477721 - DNA, 25 bp, Homo sapien
ccggcgcccctagacttcttgtgac

SEQ ID NO: 2477722 - DNA, 25 bp, Homo sapien
gcttcccggccacgccgtctcggtg

SEQ ID NO: 2477723 - DNA, 25 bp, Homo sapien
tggacctccgagttgaccttgacat

SEQ ID NO: 2477724 - DNA, 25 bp, Homo sapien
acttcgggcctccagaattgtcttg

SEQ ID NO: 2477725 - DNA, 25 bp, Homo sapien
cccagccgagggtaagctttgatgg

SEQ ID NO: 2477726 - DNA, 25 bp, Homo sapien
gctttgatgggcccgagcccacttc

SEQ ID NO: 2477727 - DNA, 25 bp, Homo sapien
gttatgtgcctcaagctgggacagg

SEQ ID NO: 2477728 - DNA, 25 bp, Homo sapien
gcacagtagagcagccgcttggctt

SEQ ID NO: 2477729 - DNA, 25 bp, Homo sapien
acagagcacagtagagcagccgctt

SEQ ID NO: 2477730 - DNA, 25 bp, Homo sapien
ttacaccctgaccagtctccggaat

SEQ ID NO: 2477731 - DNA, 25 bp, Homo sapien
gatggggagccaggctgtttctctg

SEQ ID NO: 2477732 - DNA, 25 bp, Homo sapien
ggccccagtccattctccatggaaa

SEQ ID NO: 2477733 - DNA, 25 bp, Homo sapien
ctggccccagtccattctccatgga

SEQ ID NO: 2477734 - DNA, 25 bp, Homo sapien
ggggctggccccagtccattctcca

SEQ ID NO: 2477735 - DNA, 25 bp, Homo sapien
gcatgctctcatgccctggtccaga

SEQ ID NO: 2477736 - DNA, 25 bp, Homo sapien
gccgcaggctgggtgtgaaactcca

SEQ ID NO: 2477737 - DNA, 25 bp, Homo sapien
ggagtccccaccctgttacaacatg

SEQ ID NO: 2477738 - DNA, 25 bp, Homo sapien
gggatcaccctagatggctcttgga

SEQ ID NO: 2477739 - DNA, 25 bp, Homo sapien
tgggcttcctgccaggacagcccct

SEQ ID NO: 2477740 - DNA, 25 bp, Homo sapien
ccttcctggagtcttgcccagcccc

SEQ ID NO: 2477741 - DNA, 25 bp, Homo sapien
tggcctgccagccagtctgggcttc

SEQ ID NO: 2477742 - DNA, 25 bp, Homo sapien
gcccccaggaagtacacgaaagagc

SEQ ID NO: 2477743 - DNA, 25 bp, Homo sapien
gcagctgatccagtttccgggtcat

SEQ ID NO: 2477744 - DNA, 25 bp, Homo sapien
ggcttgattaaagatgcacaggccc

SEQ ID NO: 2477745 - DNA, 25 bp, Homo sapien
tgtaggctgctctataattcatggc

SEQ ID NO: 2477746 - DNA, 25 bp, Homo sapien
tgtacaggggaaactctagcgctcc

SEQ ID NO: 2477747 - DNA, 25 bp, Homo sapien
ggaagagagagatggaagcagagga

SEQ ID NO: 2477748 - DNA, 25 bp, Homo sapien
aagagagagatggaagcagaggaca

SEQ ID NO: 2477749 - DNA, 25 bp, Homo sapien
gagagagatggaagcagaggacagt

SEQ ID NO: 2477750 - DNA, 25 bp, Homo sapien
ctgaggaagagagagatggaagcag

SEQ ID NO: 2477751 - DNA, 25 bp, Homo sapien
ggtgctacaccatccccatttgttg

SEQ ID NO: 2477752 - DNA, 25 bp, Homo sapien
tggcagcctcaatgcctttgactcg

SEQ ID NO: 2477753 - DNA, 25 bp, Homo sapien
cctttgactcgtcgggcgtggcgat

SEQ ID NO: 2477754 - DNA, 25 bp, Homo sapien
gattacctttgtagtgcgcctcagc

SEQ ID NO: 2477755 - DNA, 25 bp, Homo sapien
gaaaatggaatctgagatcaccttt

SEQ ID NO: 2477756 - DNA, 25 bp, Homo sapien
aaatggaatctgagatcacctttca

SEQ ID NO: 2477757 - DNA, 25 bp, Homo sapien
aagaaaatggaatctgagatcacct

SEQ ID NO: 2477758 - DNA, 25 bp, Homo sapien
aatggaatctgagatcacctttcat

SEQ ID NO: 2477759 - DNA, 25 bp, Homo sapien
ctgagaattgaagcggatttgacag

SEQ ID NO: 2477760 - DNA, 25 bp, Homo sapien
ggtcccccaaaagtgtgggagagca

SEQ ID NO: 2477761 - DNA, 25 bp, Homo sapien
gatattacaggaaatgacgggccgc

SEQ ID NO: 2477762 - DNA, 25 bp, Homo sapien
ccgcttggtcttgagcaagggtccc

SEQ ID NO: 2477763 - DNA, 25 bp, Homo sapien
cctgtgaaatagatggtggcctcat

SEQ ID NO: 2477764 - DNA, 25 bp, Homo sapien
tcgtatccctgtgaaatagatggtg

SEQ ID NO: 2477765 - DNA, 25 bp, Homo sapien
aatgggctttcgtatccctgtgaaa

SEQ ID NO: 2477766 - DNA, 25 bp, Homo sapien
ggaaatgggctttcgtatccctgtg

SEQ ID NO: 2477767 - DNA, 25 bp, Homo sapien
ctccaacagtagacatgaaggggaa

SEQ ID NO: 2477768 - DNA, 25 bp, Homo sapien
catgaaggggaaccgctccctgacg

SEQ ID NO: 2477769 - DNA, 25 bp, Homo sapien
gccctccaacagtagacatgaaggg

SEQ ID NO: 2477770 - DNA, 25 bp, Homo sapien
ctgccctccaacagtagacatgaag

SEQ ID NO: 2477771 - DNA, 25 bp, Homo sapien
gacgcggcgctcgttgcccgggcgg

SEQ ID NO: 2477772 - DNA, 25 bp, Homo sapien
gctccatggcccggggtggcggacc

SEQ ID NO: 2477773 - DNA, 25 bp, Homo sapien
agggacgcggcgctcgttgcccggg

SEQ ID NO: 2477774 - DNA, 25 bp, Homo sapien
ggcgctcgttgcccgggcggctcgg

SEQ ID NO: 2477775 - DNA, 25 bp, Homo sapien
cctctggcggttcagtgggggcagc

SEQ ID NO: 2477776 - DNA, 25 bp, Homo sapien
acgcttcgtgcacctgctgccctct

SEQ ID NO: 2477777 - DNA, 25 bp, Homo sapien
tgccctctggcggttcagtgggggc

SEQ ID NO: 2477778 - DNA, 25 bp, Homo sapien
tccctgaaagcccacgcttcgtgca

SEQ ID NO: 2477779 - DNA, 25 bp, Homo sapien
tgctgaagaggccaagggtaggggc

SEQ ID NO: 2477780 - DNA, 25 bp, Homo sapien
tgaagaggccaagggtaggggctgg

SEQ ID NO: 2477781 - DNA, 25 bp, Homo sapien
ctggctcgagtgggaagggcaggat

SEQ ID NO: 2477782 - DNA, 25 bp, Homo sapien
gttgctgaagaggccaagggtaggg

SEQ ID NO: 2477783 - DNA, 25 bp, Homo sapien
atcgggggctgccgtagcagaggca

SEQ ID NO: 2477784 - DNA, 25 bp, Homo sapien
tcgggggctgccgtagcagaggcag

SEQ ID NO: 2477785 - DNA, 25 bp, Homo sapien
gatcgggggctgccgtagcagaggc

SEQ ID NO: 2477786 - DNA, 25 bp, Homo sapien
cccacccaagcctgccagtcccact

SEQ ID NO: 2477787 - DNA, 25 bp, Homo sapien
acccaagcctgccagtcccactccc

SEQ ID NO: 2477788 - DNA, 25 bp, Homo sapien
cagaagtgtcaccctcagtgcacat

SEQ ID NO: 2477789 - DNA, 25 bp, Homo sapien
tcagaagtgtcaccctcagtgcaca

SEQ ID NO: 2477790 - DNA, 25 bp, Homo sapien
gggcctgggcctgacagcgtcccct

SEQ ID NO: 2477791 - DNA, 25 bp, Homo sapien
gcccggggttccgcgtcgctctgtc

SEQ ID NO: 2477792 - DNA, 25 bp, Homo sapien
cgcccggggttccgcgtcgctctgt

SEQ ID NO: 2477793 - DNA, 25 bp, Homo sapien
gcgcccggggttccgcgtcgctctg

SEQ ID NO: 2477794 - DNA, 25 bp, Homo sapien
caggcgcccggggttccgcgtcgct

SEQ ID NO: 2477795 - DNA, 25 bp, Homo sapien
tcctcctgggtggactcagagacta

SEQ ID NO: 2477796 - DNA, 25 bp, Homo sapien
ctaaacaagagccatcatcaggcat

SEQ ID NO: 2477797 - DNA, 25 bp, Homo sapien
ggtggactcagagactaaacaagag

SEQ ID NO: 2477798 - DNA, 25 bp, Homo sapien
agactaaacaagagccatcatcagg

SEQ ID NO: 2477799 - DNA, 25 bp, Homo sapien
taaataagtcctgggtgtctggtgc

SEQ ID NO: 2477800 - DNA, 25 bp, Homo sapien
taaatcagggtgaactgggcctcca

SEQ ID NO: 2477801 - DNA, 25 bp, Homo sapien
aacaagggtccttcacagtgcatgg

SEQ ID NO: 2477802 - DNA, 25 bp, Homo sapien
tggccgtcagcaccttcaagaagta

SEQ ID NO: 2477803 - DNA, 25 bp, Homo sapien
gagctttttccatggcggtgccata

SEQ ID NO: 2477804 - DNA, 25 bp, Homo sapien
ccatatgggagggagcgtttgaaga

SEQ ID NO: 2477805 - DNA, 25 bp, Homo sapien
cttgagctgagctttttccatggcg

SEQ ID NO: 2477806 - DNA, 25 bp, Homo sapien
ctgagctttttccatggcggtgcca

SEQ ID NO: 2477807 - DNA, 25 bp, Homo sapien
gatgtagatgagtagacctaggagc

SEQ ID NO: 2477808 - DNA, 25 bp, Homo sapien
gatccacagtgggacgccatagctg

SEQ ID NO: 2477809 - DNA, 25 bp, Homo sapien
tagatgagtagacctaggagcagga

SEQ ID NO: 2477810 - DNA, 25 bp, Homo sapien
ggccaaacaggatggctaggatgat

SEQ ID NO: 2477811 - DNA, 25 bp, Homo sapien
aggcaggattcggtagggcatcttc

SEQ ID NO: 2477812 - DNA, 25 bp, Homo sapien
caggattcggtagggcatcttcagg

SEQ ID NO: 2477813 - DNA, 25 bp, Homo sapien
cagctgccgaggcaggattcggtag

SEQ ID NO: 2477814 - DNA, 25 bp, Homo sapien
gacgctctttttggggcagctgccg

SEQ ID NO: 2477815 - DNA, 25 bp, Homo sapien
actgcagactttggctctcttgttg

SEQ ID NO: 2477816 - DNA, 25 bp, Homo sapien
tcttggcccagactcggaaatgcaa

SEQ ID NO: 2477817 - DNA, 25 bp, Homo sapien
ctctcttgttggtgcaggggcccga

SEQ ID NO: 2477818 - DNA, 25 bp, Homo sapien
cccgagctcacagcgcagcctgaaa

SEQ ID NO: 2477819 - DNA, 25 bp, Homo sapien
gcccttgtgatggccctgagaaccc

SEQ ID NO: 2477820 - DNA, 25 bp, Homo sapien
cttgtgatggccctgagaaccccag

SEQ ID NO: 2477821 - DNA, 25 bp, Homo sapien
ccagagtactcaacactttggtcca

SEQ ID NO: 2477822 - DNA, 25 bp, Homo sapien
tggtccacacctcattccctgcctg

SEQ ID NO: 2477823 - DNA, 25 bp, Homo sapien
tgcggcttggagcttcccgtttttg

SEQ ID NO: 2477824 - DNA, 25 bp, Homo sapien
caggatctgaggtcccgaggaagca

SEQ ID NO: 2477825 - DNA, 25 bp, Homo sapien
ttggagcttcccgtttttgctggtg

SEQ ID NO: 2477826 - DNA, 25 bp, Homo sapien
agagctgcggcttggagcttcccgt

SEQ ID NO: 2477827 - DNA, 25 bp, Homo sapien
taactttgggccttgtgaccctcaa

SEQ ID NO: 2477828 - DNA, 25 bp, Homo sapien
tataaaacaggcattcgggcccaga

SEQ ID NO: 2477829 - DNA, 25 bp, Homo sapien
tcctatgcgcaaggcactgagctca

SEQ ID NO: 2477830 - DNA, 25 bp, Homo sapien
tctaagtcagcttgcacctgggttc

SEQ ID NO: 2477831 - DNA, 25 bp, Homo sapien
gtcccgtaactctggtcacatatag

SEQ ID NO: 2477832 - DNA, 25 bp, Homo sapien
ccagcacaccctggctaatggagct

SEQ ID NO: 2477833 - DNA, 25 bp, Homo sapien
ctctggtcacatataggagctgctg

SEQ ID NO: 2477834 - DNA, 25 bp, Homo sapien
tgattggtggtgcagttgagtcccg

SEQ ID NO: 2477835 - DNA, 25 bp, Homo sapien
ggatgccagtcgcttactgggaata

SEQ ID NO: 2477836 - DNA, 25 bp, Homo sapien
ggtctcggggatgccagtcgcttac

SEQ ID NO: 2477837 - DNA, 25 bp, Homo sapien
tactgggaatagcactgcctcaggc

SEQ ID NO: 2477838 - DNA, 25 bp, Homo sapien
gccagtcgcttactgggaatagcac

SEQ ID NO: 2477839 - DNA, 25 bp, Homo sapien
cgctttgcgagttgttgagattctt

SEQ ID NO: 2477840 - DNA, 25 bp, Homo sapien
ccacgtcgctttgcgagttgttgag

SEQ ID NO: 2477841 - DNA, 25 bp, Homo sapien
agagccgaaaggaaaccacgtcgct

SEQ ID NO: 2477842 - DNA, 25 bp, Homo sapien
gaaaggaaaccacgtcgctttgcga

SEQ ID NO: 2477843 - DNA, 25 bp, Homo sapien
tcagccccagcctagacacactcac

SEQ ID NO: 2477844 - DNA, 25 bp, Homo sapien
ccagcctagacacactcactcccta

SEQ ID NO: 2477845 - DNA, 25 bp, Homo sapien
tgagggactgtaaaccgaaggccac

SEQ ID NO: 2477846 - DNA, 25 bp, Homo sapien
ttttcttagtgtcccggagatgagg

SEQ ID NO: 2477847 - DNA, 25 bp, Homo sapien
ggttttcttagtgtcccggagatga

SEQ ID NO: 2477848 - DNA, 25 bp, Homo sapien
cggagatgagggactgtaaaccgaa

SEQ ID NO: 2477849 - DNA, 25 bp, Homo sapien
ggttcacggcaaagtagtcacagct

SEQ ID NO: 2477850 - DNA, 25 bp, Homo sapien
ccagcaggcggctctggttcacggc

SEQ ID NO: 2477851 - DNA, 25 bp, Homo sapien
ggcggctctggttcacggcaaagta

SEQ ID NO: 2477852 - DNA, 25 bp, Homo sapien
gcaaagtagtcacagctcaggctgg

SEQ ID NO: 2477853 - DNA, 25 bp, Homo sapien
aatcccactcgagagtctcatctca

SEQ ID NO: 2477854 - DNA, 25 bp, Homo sapien
cctctagaggggtatcctcccaaat

SEQ ID NO: 2477855 - DNA, 25 bp, Homo sapien
caggttttggtgtcccctctagagg

SEQ ID NO: 2477856 - DNA, 25 bp, Homo sapien
cctcccaaatcccactcgagagtct

SEQ ID NO: 2477857 - DNA, 25 bp, Homo sapien
ccctgggtgtctgacgagtcctgag

SEQ ID NO: 2477858 - DNA, 25 bp, Homo sapien
tgaggttcagggcattcttgtcacc

SEQ ID NO: 2477859 - DNA, 25 bp, Homo sapien
tgtcacccaggtacacatggttctg

SEQ ID NO: 2477860 - DNA, 25 bp, Homo sapien
gtgacccgaagctcagcctcatagg

SEQ ID NO: 2477861 - DNA, 25 bp, Homo sapien
agatgttgtcttctccacagtccag

SEQ ID NO: 2477862 - DNA, 25 bp, Homo sapien
acttccagctgcaggtcaggcacac

SEQ ID NO: 2477863 - DNA, 25 bp, Homo sapien
caggtcaggcacacagatgttgtct

SEQ ID NO: 2477864 - DNA, 25 bp, Homo sapien
tctccacagtccagcaagatctgag

SEQ ID NO: 2477865 - DNA, 25 bp, Homo sapien
cctctatccggctcttgctctgata

SEQ ID NO: 2477866 - DNA, 25 bp, Homo sapien
tccaaggagaagttgagagcgatgt

SEQ ID NO: 2477867 - DNA, 25 bp, Homo sapien
tctgataatgtagggctggcctgag

SEQ ID NO: 2477868 - DNA, 25 bp, Homo sapien
atgtgaatcggcgagagtttgtctc

SEQ ID NO: 2477869 - DNA, 25 bp, Homo sapien
aggaggtgccctcagttctgtgtgg

SEQ ID NO: 2477870 - DNA, 25 bp, Homo sapien
gggactctggagacttagtggccct

SEQ ID NO: 2477871 - DNA, 25 bp, Homo sapien
ccaattccgaccatcctcattgttt

SEQ ID NO: 2477872 - DNA, 25 bp, Homo sapien
tttgtctgcttagggcccaattccg

SEQ ID NO: 2477873 - DNA, 25 bp, Homo sapien
tgcaatcctctcgagccccattctg

SEQ ID NO: 2477874 - DNA, 25 bp, Homo sapien
catctctctgcaatcctctcgagcc

SEQ ID NO: 2477875 - DNA, 25 bp, Homo sapien
tctctgcaatcctctcgagccccat

SEQ ID NO: 2477876 - DNA, 25 bp, Homo sapien
aggccaggaacagtgcccgccgtac

SEQ ID NO: 2477877 - DNA, 25 bp, Homo sapien
gagtcagcaacgtgttttccagaag

SEQ ID NO: 2477878 - DNA, 25 bp, Homo sapien
gcattgaggcagaagctaaggttga

SEQ ID NO: 2477879 - DNA, 25 bp, Homo sapien
cattgaggcagaagctaaggttgat

SEQ ID NO: 2477880 - DNA, 25 bp, Homo sapien
caatggagtcagcaacgtgttttcc

SEQ ID NO: 2477881 - DNA, 25 bp, Homo sapien
tgagggaggcactagcggacacgat

SEQ ID NO: 2477882 - DNA, 25 bp, Homo sapien
aggccacagggttcccctctaagct

SEQ ID NO: 2477883 - DNA, 25 bp, Homo sapien
cagggttcccctctaagctgcagct

SEQ ID NO: 2477884 - DNA, 25 bp, Homo sapien
cctctgggttgaacatggcggggaa

SEQ ID NO: 2477885 - DNA, 25 bp, Homo sapien
ctgccaagagtgaatgtggggtcaa

SEQ ID NO: 2477886 - DNA, 25 bp, Homo sapien
gactcctctgtaacctggacacagg

SEQ ID NO: 2477887 - DNA, 25 bp, Homo sapien
ggtcaatagaattaggactcctctg

SEQ ID NO: 2477888 - DNA, 25 bp, Homo sapien
ccaacctcagctctgttgagaaatt

SEQ ID NO: 2477889 - DNA, 25 bp, Homo sapien
acaccaaaggaccccacaatcagat

SEQ ID NO: 2477890 - DNA, 25 bp, Homo sapien
gccttgtccacaccaaaggacccca

SEQ ID NO: 2477891 - DNA, 25 bp, Homo sapien
acagccttgtccacaccaaaggacc

SEQ ID NO: 2477892 - DNA, 25 bp, Homo sapien
tgtccacaccaaaggaccccacaat

SEQ ID NO: 2477893 - DNA, 25 bp, Homo sapien
ctggtttcaacgctcagggaggttg

SEQ ID NO: 2477894 - DNA, 25 bp, Homo sapien
cgccctctgttggaattagccagaa

SEQ ID NO: 2477895 - DNA, 25 bp, Homo sapien
aggttgaagtgagaagacagcgccc

SEQ ID NO: 2477896 - DNA, 25 bp, Homo sapien
ttagccagaactgcacccaggaact

SEQ ID NO: 2477897 - DNA, 25 bp, Homo sapien
gcagaacctgggaaggcttagagcc

SEQ ID NO: 2477898 - DNA, 25 bp, Homo sapien
agaacctgggaaggcttagagccca

SEQ ID NO: 2477899 - DNA, 25 bp, Homo sapien
cattgccatccaggtctcggcctcc

SEQ ID NO: 2477900 - DNA, 25 bp, Homo sapien
gccatccaggtctcggcctcctcga

SEQ ID NO: 2477901 - DNA, 25 bp, Homo sapien
ggtcaaggagctgccaaatcggcca

SEQ ID NO: 2477902 - DNA, 25 bp, Homo sapien
caaactcatcatggccagtgagggt

SEQ ID NO: 2477903 - DNA, 25 bp, Homo sapien
tctatgccggctgggtgctgcaggt

SEQ ID NO: 2477904 - DNA, 25 bp, Homo sapien
aggtagacgtagaccctgcccacct

SEQ ID NO: 2477905 - DNA, 25 bp, Homo sapien
ccattgacgtctgtggcggccactg

SEQ ID NO: 2477906 - DNA, 25 bp, Homo sapien
ctgcatagccaaagtaggaggccat

SEQ ID NO: 2477907 - DNA, 25 bp, Homo sapien
cattgacgtctgtggcggccactgc

SEQ ID NO: 2477908 - DNA, 25 bp, Homo sapien
attgacgtctgtggcggccactgca

SEQ ID NO: 2477909 - DNA, 25 bp, Homo sapien
ggttcaatccacaggatcaagaggg

SEQ ID NO: 2477910 - DNA, 25 bp, Homo sapien
aaaggggcagcgctgggtcagaact

SEQ ID NO: 2477911 - DNA, 25 bp, Homo sapien
tcagaactagaaggttcaatccaca

SEQ ID NO: 2477912 - DNA, 25 bp, Homo sapien
ctagaaggttcaatccacaggatca

SEQ ID NO: 2477913 - DNA, 25 bp, Homo sapien
tcgaatgtctgagccattaaggatg

SEQ ID NO: 2477914 - DNA, 25 bp, Homo sapien
tagagggatcgaatgtctgagccat

SEQ ID NO: 2477915 - DNA, 25 bp, Homo sapien
ggatcgaatgtctgagccattaagg

SEQ ID NO: 2477916 - DNA, 25 bp, Homo sapien
agaagttgtagagggatcgaatgtc

SEQ ID NO: 2477917 - DNA, 25 bp, Homo sapien
ctctatgccaggtagttccacccta

SEQ ID NO: 2477918 - DNA, 25 bp, Homo sapien
gctttgccctcatattcccacctct

SEQ ID NO: 2477919 - DNA, 25 bp, Homo sapien
ggcaggcattccttagagacgcaga

SEQ ID NO: 2477920 - DNA, 25 bp, Homo sapien
tatcccatggttaaagaacagatgt

SEQ ID NO: 2477921 - DNA, 25 bp, Homo sapien
tatccactttgctgaagtttaccaa

SEQ ID NO: 2477922 - DNA, 25 bp, Homo sapien
cctaaactgctatgccactgtatcc

SEQ ID NO: 2477923 - DNA, 25 bp, Homo sapien
gcaacttacttggtctcttagaacc

SEQ ID NO: 2477924 - DNA, 25 bp, Homo sapien
gcctgatgcactgagtagagaatga

SEQ ID NO: 2477925 - DNA, 25 bp, Homo sapien
agtgaggttccctttgggcacacca

SEQ ID NO: 2477926 - DNA, 25 bp, Homo sapien
cctttgggcacaccagcaacaaagt

SEQ ID NO: 2477927 - DNA, 25 bp, Homo sapien
gaggttccctttgggcacaccagca

SEQ ID NO: 2477928 - DNA, 25 bp, Homo sapien
tccctttgggcacaccagcaacaaa

SEQ ID NO: 2477929 - DNA, 25 bp, Homo sapien
gtgtcatcaccactgaattcaccaa

SEQ ID NO: 2477930 - DNA, 25 bp, Homo sapien
cactgaattcaccaacagccacaga

SEQ ID NO: 2477931 - DNA, 25 bp, Homo sapien
tcaccactgaattcaccaacagcca

SEQ ID NO: 2477932 - DNA, 25 bp, Homo sapien
tcatcaccactgaattcaccaacag

SEQ ID NO: 2477933 - DNA, 25 bp, Homo sapien
gggtaataagattctgcaatctgct

SEQ ID NO: 2477934 - DNA, 25 bp, Homo sapien
caatctgctcctgagtggcagacag

SEQ ID NO: 2477935 - DNA, 25 bp, Homo sapien
ctaggtagctgtcatcatagatgga

SEQ ID NO: 2477936 - DNA, 25 bp, Homo sapien
gaaccaggttgatcaggtactcggg

SEQ ID NO: 2477937 - DNA, 25 bp, Homo sapien
cagaaatagcttcctggtccaccta

SEQ ID NO: 2477938 - DNA, 25 bp, Homo sapien
tggtccacctaaaaccacacggcca

SEQ ID NO: 2477939 - DNA, 25 bp, Homo sapien
gccagaaatagcttcctggtccacc

SEQ ID NO: 2477940 - DNA, 25 bp, Homo sapien
ttgccagaaatagcttcctggtcca

SEQ ID NO: 2477941 - DNA, 25 bp, Homo sapien
gtgaactcggcactgaagcctcctt

SEQ ID NO: 2477942 - DNA, 25 bp, Homo sapien
cttggtgaactcggcactgaagcct

SEQ ID NO: 2477943 - DNA, 25 bp, Homo sapien
aagcctccttggcagtaaccctgtc

SEQ ID NO: 2477944 - DNA, 25 bp, Homo sapien
tggtgaactcggcactgaagcctcc

SEQ ID NO: 2477945 - DNA, 25 bp, Homo sapien
gaagttatctgtggagaggtagcag

SEQ ID NO: 2477946 - DNA, 25 bp, Homo sapien
tagcaggtgcccacggggtcgctca

SEQ ID NO: 2477947 - DNA, 25 bp, Homo sapien
ggcagggtgcatactccagaattcg

SEQ ID NO: 2477948 - DNA, 25 bp, Homo sapien
gccagctgtacagtggagcgcatgc

SEQ ID NO: 2477949 - DNA, 25 bp, Homo sapien
caaccactgcccatcccctggccac

SEQ ID NO: 2477950 - DNA, 25 bp, Homo sapien
caccacaccactgagcttgctggcc

SEQ ID NO: 2477951 - DNA, 25 bp, Homo sapien
tggccaccacaccactgagcttgct

SEQ ID NO: 2477952 - DNA, 25 bp, Homo sapien
cacaccactgagcttgctggcccct

SEQ ID NO: 2477953 - DNA, 25 bp, Homo sapien
ctgttgccccgaaccactgcaagga

SEQ ID NO: 2477954 - DNA, 25 bp, Homo sapien
ggagccatgggctcgaactgttgcc

SEQ ID NO: 2477955 - DNA, 25 bp, Homo sapien
gggctcgaactgttgccccgaacca

SEQ ID NO: 2477956 - DNA, 25 bp, Homo sapien
gatggaggagccatgggctcgaact

SEQ ID NO: 2477957 - DNA, 25 bp, Homo sapien
cagtgacggagaatcactcaagtga

SEQ ID NO: 2477958 - DNA, 25 bp, Homo sapien
ggcagtggggcaagtagcactcatt

SEQ ID NO: 2477959 - DNA, 25 bp, Homo sapien
ggcaagtagcactcattgcagcctt

SEQ ID NO: 2477960 - DNA, 25 bp, Homo sapien
gcagtgacggagaatcactcaagtg

SEQ ID NO: 2477961 - DNA, 25 bp, Homo sapien
tgtaagcagttggagcaccagagct

SEQ ID NO: 2477962 - DNA, 25 bp, Homo sapien
ttgtctgtgttacggccctggcctc

SEQ ID NO: 2477963 - DNA, 25 bp, Homo sapien
gctggtgctgagaggtcacgtggcc

SEQ ID NO: 2477964 - DNA, 25 bp, Homo sapien
tgaatcatgcccgtcctccttgggc

SEQ ID NO: 2477965 - DNA, 25 bp, Homo sapien
gctgtcaaattcaatgggggtgcac

SEQ ID NO: 2477966 - DNA, 25 bp, Homo sapien
gctggtattagccttgggtgctccc

SEQ ID NO: 2477967 - DNA, 25 bp, Homo sapien
ctggctggtattagccttgggtgct

SEQ ID NO: 2477968 - DNA, 25 bp, Homo sapien
ctcctggctggctggtattagcctt

SEQ ID NO: 2477969 - DNA, 25 bp, Homo sapien
tggagtcaggcggtccccatgtgcc

SEQ ID NO: 2477970 - DNA, 25 bp, Homo sapien
tttatatctcagaagatgccacaga

SEQ ID NO: 2477971 - DNA, 25 bp, Homo sapien
ttttcattggtgtctggaggcagga

SEQ ID NO: 2477972 - DNA, 25 bp, Homo sapien
catgtgccgctgtcactaacacaac

SEQ ID NO: 2477973 - DNA, 25 bp, Homo sapien
aaagagaggaggaaccacagtcaat

SEQ ID NO: 2477974 - DNA, 25 bp, Homo sapien
taaagagaggaggaaccacagtcaa

SEQ ID NO: 2477975 - DNA, 25 bp, Homo sapien
agagaggaggaaccacagtcaattt

SEQ ID NO: 2477976 - DNA, 25 bp, Homo sapien
aagagaggaggaaccacagtcaatt

SEQ ID NO: 2477977 - DNA, 25 bp, Homo sapien
gggaagaggggccagagcctgtacc

SEQ ID NO: 2477978 - DNA, 25 bp, Homo sapien
agaaggggaagaggggccagagcct

SEQ ID NO: 2477979 - DNA, 25 bp, Homo sapien
gaagaggggccagagcctgtacccc

SEQ ID NO: 2477980 - DNA, 25 bp, Homo sapien
aggggccagagcctgtacccctggc

SEQ ID NO: 2477981 - DNA, 25 bp, Homo sapien
cttggctgagttcgcccccagcccc

SEQ ID NO: 2477982 - DNA, 25 bp, Homo sapien
cgcactcgcccccagttctcggatc

SEQ ID NO: 2477983 - DNA, 25 bp, Homo sapien
ccgcccttggctgagttcgccccca

SEQ ID NO: 2477984 - DNA, 25 bp, Homo sapien
tcgcccccagttctcggatcccctc

SEQ ID NO: 2477985 - DNA, 25 bp, Homo sapien
gtaaaactccactgagaatccgaag

SEQ ID NO: 2477986 - DNA, 25 bp, Homo sapien
ccgagagtactgctggggcctccgc

SEQ ID NO: 2477987 - DNA, 25 bp, Homo sapien
cccgggggccccgagagtactgctg

SEQ ID NO: 2477988 - DNA, 25 bp, Homo sapien
ggccccgagagtactgctggggcct

SEQ ID NO: 2477989 - DNA, 25 bp, Homo sapien
gcagctgcacggcgtggagagggga

SEQ ID NO: 2477990 - DNA, 25 bp, Homo sapien
cgcagctgcacggcgtggagagggg

SEQ ID NO: 2477991 - DNA, 25 bp, Homo sapien
cagcagcgggggtcggcgccggggg

SEQ ID NO: 2477992 - DNA, 25 bp, Homo sapien
gcagcagcgggggtcggcgccgggg

SEQ ID NO: 2477993 - DNA, 25 bp, Homo sapien
gagtttgccaaactcccggctgagc

SEQ ID NO: 2477994 - DNA, 25 bp, Homo sapien
ggagccgcttcctaaacctcccaga

SEQ ID NO: 2477995 - DNA, 25 bp, Homo sapien
actcaacgcggggaggagtttgcca

SEQ ID NO: 2477996 - DNA, 25 bp, Homo sapien
tcccagaggcgaatgactcaacgcg

SEQ ID NO: 2477997 - DNA, 25 bp, Homo sapien
acgggctcctcaagttccgctgctt

SEQ ID NO: 2477998 - DNA, 25 bp, Homo sapien
tccgctgcttcctcctccaagcttg

SEQ ID NO: 2477999 - DNA, 25 bp, Homo sapien
gttccgctgcttcctcctccaagct

SEQ ID NO: 2478000 - DNA, 25 bp, Homo sapien
aagttccgctgcttcctcctccaag

SEQ ID NO: 2478001 - DNA, 25 bp, Homo sapien
catgcctgcctttgcctgatcctct

SEQ ID NO: 2478002 - DNA, 25 bp, Homo sapien
gtcccctcctaattagagctacttc

SEQ ID NO: 2478003 - DNA, 25 bp, Homo sapien
cctctgctctgggttcgtccttaac

SEQ ID NO: 2478004 - DNA, 25 bp, Homo sapien
gagctacttcagcacagacctccag

SEQ ID NO: 2478005 - DNA, 25 bp, Homo sapien
gggtgcctgaatcttctcagctcaa

SEQ ID NO: 2478006 - DNA, 25 bp, Homo sapien
tgaatcttctcagctcaaaggcctg

SEQ ID NO: 2478007 - DNA, 25 bp, Homo sapien
cctggcagtcagaggagagaaccat

SEQ ID NO: 2478008 - DNA, 25 bp, Homo sapien
gaaaggggtgcctgaatcttctcag

SEQ ID NO: 2478009 - DNA, 25 bp, Homo sapien
ctgggttcctgtaggaggagttcac

SEQ ID NO: 2478010 - DNA, 25 bp, Homo sapien
gtaggaggagttcacagccagccgt

SEQ ID NO: 2478011 - DNA, 25 bp, Homo sapien
ttcctgtaggaggagttcacagcca

SEQ ID NO: 2478012 - DNA, 25 bp, Homo sapien
cctgtaggaggagttcacagccagc

SEQ ID NO: 2478013 - DNA, 25 bp, Homo sapien
ggaatgcctttatatggggtggtca

SEQ ID NO: 2478014 - DNA, 25 bp, Homo sapien
aaaggaatgcctttatatggggtgg

SEQ ID NO: 2478015 - DNA, 25 bp, Homo sapien
aggaatgcctttatatggggtggtc

SEQ ID NO: 2478016 - DNA, 25 bp, Homo sapien
gaatgcctttatatggggtggtcat

SEQ ID NO: 2478017 - DNA, 25 bp, Homo sapien
agctcagttcccagccaaaagccca

SEQ ID NO: 2478018 - DNA, 25 bp, Homo sapien
cctgtttccgctttgagctcagttc

SEQ ID NO: 2478019 - DNA, 25 bp, Homo sapien
caactgcctgtttccgctttgagct

SEQ ID NO: 2478020 - DNA, 25 bp, Homo sapien
agttcccagccaaaagcccagctag

SEQ ID NO: 2478021 - DNA, 25 bp, Homo sapien
ttctttctaatacaccttctgcttt

SEQ ID NO: 2478022 - DNA, 25 bp, Homo sapien
tctttctaatacaccttctgcttta

SEQ ID NO: 2478023 - DNA, 25 bp, Homo sapien
ctgggcaaaggaagtgaatcaatgt

SEQ ID NO: 2478024 - DNA, 25 bp, Homo sapien
tatggaggttacagcactaggaaaa

SEQ ID NO: 2478025 - DNA, 25 bp, Homo sapien
taacatggttaagtaagaagcagtc

SEQ ID NO: 2478026 - DNA, 25 bp, Homo sapien
tcctcaaaattgatcagggtgcaca

SEQ ID NO: 2478027 - DNA, 25 bp, Homo sapien
gaaaacaatttacatcagatccaga

SEQ ID NO: 2478028 - DNA, 25 bp, Homo sapien
gtcgctcctggatcgtctctatttt

SEQ ID NO: 2478029 - DNA, 25 bp, Homo sapien
gcagtcgctcctggatcgtctctat

SEQ ID NO: 2478030 - DNA, 25 bp, Homo sapien
ctcctggatcgtctctatttttggg

SEQ ID NO: 2478031 - DNA, 25 bp, Homo sapien
gcaaactgtccctccgctaacatct

SEQ ID NO: 2478032 - DNA, 25 bp, Homo sapien
tagctgttctttgggttactgttta

SEQ ID NO: 2478033 - DNA, 25 bp, Homo sapien
tctgttgaccaaatagctgttcttt

SEQ ID NO: 2478034 - DNA, 25 bp, Homo sapien
aacaactaaacttgtcttctatagg

SEQ ID NO: 2478035 - DNA, 25 bp, Homo sapien
tcaaagtctcttacactattttagt

SEQ ID NO: 2478036 - DNA, 25 bp, Homo sapien
tcattatggttcattaatgtggaat

SEQ ID NO: 2478037 - DNA, 25 bp, Homo sapien
cctgtctatttcagttagatccttt

SEQ ID NO: 2478038 - DNA, 25 bp, Homo sapien
tggttcattaatgtggaattggaca

SEQ ID NO: 2478039 - DNA, 25 bp, Homo sapien
ttaatgtggaattggacatgatctc

SEQ ID NO: 2478040 - DNA, 25 bp, Homo sapien
ggaaaatgagaacccactggtagaa

SEQ ID NO: 2478041 - DNA, 25 bp, Homo sapien
gaaaaaagtgtgcttgtcagtttgg

SEQ ID NO: 2478042 - DNA, 25 bp, Homo sapien
gaaagtcacagggagtttaccattc

SEQ ID NO: 2478043 - DNA, 25 bp, Homo sapien
gcaacagtcttctagggtctggcat

SEQ ID NO: 2478044 - DNA, 25 bp, Homo sapien
cagcctgtgtgacaggagccagact

SEQ ID NO: 2478045 - DNA, 25 bp, Homo sapien
agcctgtgtgacaggagccagactc

SEQ ID NO: 2478046 - DNA, 25 bp, Homo sapien
gccacctaaaaattagctcaaacag

SEQ ID NO: 2478047 - DNA, 25 bp, Homo sapien
gccttttgacatataatttggtgac

SEQ ID NO: 2478048 - DNA, 25 bp, Homo sapien
taaagtgaatcctctagccacctaa

SEQ ID NO: 2478049 - DNA, 25 bp, Homo sapien
agactgaaatcaagagaatctgaat

SEQ ID NO: 2478050 - DNA, 25 bp, Homo sapien
gaagccaggttattcttatgttctg

SEQ ID NO: 2478051 - DNA, 25 bp, Homo sapien
aacatacggcagagatttgggaact

SEQ ID NO: 2478052 - DNA, 25 bp, Homo sapien
ttttccatggcagaacatacggcag

SEQ ID NO: 2478053 - DNA, 25 bp, Homo sapien
ttctgtaactatgttgctcgcaggg

SEQ ID NO: 2478054 - DNA, 25 bp, Homo sapien
agtagtgagttgtgccccagacaaa

SEQ ID NO: 2478055 - DNA, 25 bp, Homo sapien
tagtgagttgtgccccagacaaatg

SEQ ID NO: 2478056 - DNA, 25 bp, Homo sapien
gtagtgagttgtgccccagacaaat

SEQ ID NO: 2478057 - DNA, 25 bp, Homo sapien
gagtagtgagttgtgccccagacaa

SEQ ID NO: 2478058 - DNA, 25 bp, Homo sapien
tgccaagtgctctcagccagagtct

SEQ ID NO: 2478059 - DNA, 25 bp, Homo sapien
tgtctaaggctcctggtttggttga

SEQ ID NO: 2478060 - DNA, 25 bp, Homo sapien
tcccagtcttcatcgcaaggagggc

SEQ ID NO: 2478061 - DNA, 25 bp, Homo sapien
gccagagtctcttgtctaaggctcc

SEQ ID NO: 2478062 - DNA, 25 bp, Homo sapien
gcgagcattgaagggacaagtagcc

SEQ ID NO: 2478063 - DNA, 25 bp, Homo sapien
tgactaatttcagctcgaggaacct

SEQ ID NO: 2478064 - DNA, 25 bp, Homo sapien
tcaatacaacttctgtcatcacagc

SEQ ID NO: 2478065 - DNA, 25 bp, Homo sapien
caatttgcttgcaacatcaggatga

SEQ ID NO: 2478066 - DNA, 25 bp, Homo sapien
gaaccaaaattaagggatctgtcag

SEQ ID NO: 2478067 - DNA, 25 bp, Homo sapien
ctgtggaaccaaaattaagggatct

SEQ ID NO: 2478068 - DNA, 25 bp, Homo sapien
tgtggaaccaaaattaagggatctg

SEQ ID NO: 2478069 - DNA, 25 bp, Homo sapien
tggaaccaaaattaagggatctgtc

SEQ ID NO: 2478070 - DNA, 25 bp, Homo sapien
ggtgttagagggcaaattatgaccc

SEQ ID NO: 2478071 - DNA, 25 bp, Homo sapien
ggttctttgtcactagttaatggga

SEQ ID NO: 2478072 - DNA, 25 bp, Homo sapien
cattgttaggctcatgaatacatca

SEQ ID NO: 2478073 - DNA, 25 bp, Homo sapien
taagagaggtagattcccaaaacaa

SEQ ID NO: 2478074 - DNA, 25 bp, Homo sapien
ctttctgcacttgataagatgataa

SEQ ID NO: 2478075 - DNA, 25 bp, Homo sapien
gataaggaaacctgcaagccctgat

SEQ ID NO: 2478076 - DNA, 25 bp, Homo sapien
tctgcacttgataagatgataagga

SEQ ID NO: 2478077 - DNA, 25 bp, Homo sapien
aagccctgatttgatggtttttgtc

SEQ ID NO: 2478078 - DNA, 25 bp, Homo sapien
aggggcattgcaatagcttctcagg

SEQ ID NO: 2478079 - DNA, 25 bp, Homo sapien
gggcattgcaatagcttctcagggt

SEQ ID NO: 2478080 - DNA, 25 bp, Homo sapien
gcattgcaatagcttctcagggtcc

SEQ ID NO: 2478081 - DNA, 25 bp, Homo sapien
cattgcaatagcttctcagggtcca

SEQ ID NO: 2478082 - DNA, 25 bp, Homo sapien
ccagtggggaattgaaacagacagt

SEQ ID NO: 2478083 - DNA, 25 bp, Homo sapien
tttgataagaagcttataaaccagg

SEQ ID NO: 2478084 - DNA, 25 bp, Homo sapien
acagtttcactggaagagtggtaaa

SEQ ID NO: 2478085 - DNA, 25 bp, Homo sapien
agcttataaaccaggagactgctag

SEQ ID NO: 2478086 - DNA, 25 bp, Homo sapien
ctgggatgagcgctgagattgtcca

SEQ ID NO: 2478087 - DNA, 25 bp, Homo sapien
tctccaggtgttacatcacttaggg

SEQ ID NO: 2478088 - DNA, 25 bp, Homo sapien
tcacttagggactgtgttaaagtgc

SEQ ID NO: 2478089 - DNA, 25 bp, Homo sapien
atgagcgctgagattgtccatttcc

SEQ ID NO: 2478090 - DNA, 25 bp, Homo sapien
tggaaatgaagaagctgaatccaag

SEQ ID NO: 2478091 - DNA, 25 bp, Homo sapien
ggaaatgaagaagctgaatccaagt

SEQ ID NO: 2478092 - DNA, 25 bp, Homo sapien
gttggaaatgaagaagctgaatcca

SEQ ID NO: 2478093 - DNA, 25 bp, Homo sapien
gaaatgaagaagctgaatccaagtg

SEQ ID NO: 2478094 - DNA, 25 bp, Homo sapien
tcaatgttaggactcaagaactgtc

SEQ ID NO: 2478095 - DNA, 25 bp, Homo sapien
ggaagggccacactaacattgtccc

SEQ ID NO: 2478096 - DNA, 25 bp, Homo sapien
taagtccaggagctatgaggttcgt

SEQ ID NO: 2478097 - DNA, 25 bp, Homo sapien
tctatgcactaagggaaaacctctc

SEQ ID NO: 2478098 - DNA, 25 bp, Homo sapien
cagtcaccttcctcccacgcaagcc

SEQ ID NO: 2478099 - DNA, 25 bp, Homo sapien
cctcccacgcaagccccagcaacgg

SEQ ID NO: 2478100 - DNA, 25 bp, Homo sapien
gacacacaccttcctcacagtcacc

SEQ ID NO: 2478101 - DNA, 25 bp, Homo sapien
ggacacacaccttcctcacagtcac

SEQ ID NO: 2478102 - DNA, 25 bp, Homo sapien
gatgaccctttcccacgaggatctc

SEQ ID NO: 2478103 - DNA, 25 bp, Homo sapien
gagggtagaactcgcatttctttcc

SEQ ID NO: 2478104 - DNA, 25 bp, Homo sapien
gcccctagggtcagctccctgatga

SEQ ID NO: 2478105 - DNA, 25 bp, Homo sapien
cagaacaacagtggccttgagaggg

SEQ ID NO: 2478106 - DNA, 25 bp, Homo sapien
catgctagttaagatttctctgaag

SEQ ID NO: 2478107 - DNA, 25 bp, Homo sapien
gtctgctggctatttaatctacaac

SEQ ID NO: 2478108 - DNA, 25 bp, Homo sapien
taaaatcgtgttaagatgccaacag

SEQ ID NO: 2478109 - DNA, 25 bp, Homo sapien
tgttacctaaaacatgctagttaag

SEQ ID NO: 2478110 - DNA, 25 bp, Homo sapien
taggatgtatatcatccatagcctc

SEQ ID NO: 2478111 - DNA, 25 bp, Homo sapien
gatgtatatcatccatagcctcttt

SEQ ID NO: 2478112 - DNA, 25 bp, Homo sapien
tgtatatcatccatagcctcttttt

SEQ ID NO: 2478113 - DNA, 25 bp, Homo sapien
gtttttaggatgtatatcatccata

SEQ ID NO: 2478114 - DNA, 25 bp, Homo sapien
accagcatttttggggcaaaagtct

SEQ ID NO: 2478115 - DNA, 25 bp, Homo sapien
aaaaatggagtatgatgcatattac

SEQ ID NO: 2478116 - DNA, 25 bp, Homo sapien
gaaaaaaatggagtatgatgcatat

SEQ ID NO: 2478117 - DNA, 25 bp, Homo sapien
ctttcacaaaccagcatttttgggg

SEQ ID NO: 2478118 - DNA, 25 bp, Homo sapien
ataacctttggaagattaaatggct

SEQ ID NO: 2478119 - DNA, 25 bp, Homo sapien
caggaatctgtcagcattagaaagt

SEQ ID NO: 2478120 - DNA, 25 bp, Homo sapien
ggtcaggaatctgtcagcattagaa

SEQ ID NO: 2478121 - DNA, 25 bp, Homo sapien
tatattccagacatcagggtcagga

SEQ ID NO: 2478122 - DNA, 25 bp, Homo sapien
atcatctagagcagttctgttgaca

SEQ ID NO: 2478123 - DNA, 25 bp, Homo sapien
gggaccacatgactagcattatttt

SEQ ID NO: 2478124 - DNA, 25 bp, Homo sapien
cacatgactagcattattttttcag

SEQ ID NO: 2478125 - DNA, 25 bp, Homo sapien
tttattgggaccacatgactagcat

SEQ ID NO: 2478126 - DNA, 25 bp, Homo sapien
tattgggaccacatgactagcatta

SEQ ID NO: 2478127 - DNA, 25 bp, Homo sapien
tctgcatgacaggtggtactgtaat

SEQ ID NO: 2478128 - DNA, 25 bp, Homo sapien
tgcatgacaggtggtactgtaatct

SEQ ID NO: 2478129 - DNA, 25 bp, Homo sapien
catgacaggtggtactgtaatctgc

SEQ ID NO: 2478130 - DNA, 25 bp, Homo sapien
gcatgacaggtggtactgtaatctg

SEQ ID NO: 2478131 - DNA, 25 bp, Homo sapien
aggagtgtctgtcaagaatctgaag

SEQ ID NO: 2478132 - DNA, 25 bp, Homo sapien
tcttgaaggagtgtctgtcaagaat

SEQ ID NO: 2478133 - DNA, 25 bp, Homo sapien
tgaaggagtgtctgtcaagaatctg

SEQ ID NO: 2478134 - DNA, 25 bp, Homo sapien
gaaggagtgtctgtcaagaatctga

SEQ ID NO: 2478135 - DNA, 25 bp, Homo sapien
tctggtgatgtgaatcaactttcca

SEQ ID NO: 2478136 - DNA, 25 bp, Homo sapien
agcacagtaccttttagtctggtga

SEQ ID NO: 2478137 - DNA, 25 bp, Homo sapien
ccttttagtctggtgatgtgaatca

SEQ ID NO: 2478138 - DNA, 25 bp, Homo sapien
gtaccttttagtctggtgatgtgaa

SEQ ID NO: 2478139 - DNA, 25 bp, Homo sapien
tgatatctccacaacccagagcaga

SEQ ID NO: 2478140 - DNA, 25 bp, Homo sapien
gagcagagggtcagttagtctccgt

SEQ ID NO: 2478141 - DNA, 25 bp, Homo sapien
cagcttgactgcgtttcctactggg

SEQ ID NO: 2478142 - DNA, 25 bp, Homo sapien
tagtctccgtcaattctaggttaca

SEQ ID NO: 2478143 - DNA, 25 bp, Homo sapien
tcaatactttcttaacttggcaccc

SEQ ID NO: 2478144 - DNA, 25 bp, Homo sapien
ttttatttcttgagacccaggctta

SEQ ID NO: 2478145 - DNA, 25 bp, Homo sapien
aatactttcttaacttggcacccat

SEQ ID NO: 2478146 - DNA, 25 bp, Homo sapien
gagacccaggcttagtcaatacttt

SEQ ID NO: 2478147 - DNA, 25 bp, Homo sapien
gacagagaagtaacaggacccatca

SEQ ID NO: 2478148 - DNA, 25 bp, Homo sapien
agtagaactagaactgggacccaag

SEQ ID NO: 2478149 - DNA, 25 bp, Homo sapien
ggacccatcagcatttcaggcaatt

SEQ ID NO: 2478150 - DNA, 25 bp, Homo sapien
tagcaattctgcaaggtagccaggg

SEQ ID NO: 2478151 - DNA, 25 bp, Homo sapien
gatttggactcacagagaggaccga

SEQ ID NO: 2478152 - DNA, 25 bp, Homo sapien
caaagcctgccctgcattgggaagt

SEQ ID NO: 2478153 - DNA, 25 bp, Homo sapien
tgggagaccccaaccctgatgtggt

SEQ ID NO: 2478154 - DNA, 25 bp, Homo sapien
gaggaaagcctactgtgctagagca

SEQ ID NO: 2478155 - DNA, 25 bp, Homo sapien
atcccctgccgaagatgaacacaac

SEQ ID NO: 2478156 - DNA, 25 bp, Homo sapien
ggctccagtggatgcgacattctct

SEQ ID NO: 2478157 - DNA, 25 bp, Homo sapien
catctttgttgggtcgtctctgggc

SEQ ID NO: 2478158 - DNA, 25 bp, Homo sapien
agatgtccattgacgagctgtcccc

SEQ ID NO: 2478159 - DNA, 25 bp, Homo sapien
cattgagtccaaagtgtttgatgtc

SEQ ID NO: 2478160 - DNA, 25 bp, Homo sapien
caagggagcgtggtcgtggaagaaa

SEQ ID NO: 2478161 - DNA, 25 bp, Homo sapien
tctgctccaagggagcgtggtcgtg

SEQ ID NO: 2478162 - DNA, 25 bp, Homo sapien
aggtcttcattgagtccaaagtgtt

SEQ ID NO: 2478163 - DNA, 25 bp, Homo sapien
ccaccccagatcttagctggcaggt

SEQ ID NO: 2478164 - DNA, 25 bp, Homo sapien
ccccagatcttagctggcaggtctg

SEQ ID NO: 2478165 - DNA, 25 bp, Homo sapien
gcaatacattttgggggttccctca

SEQ ID NO: 2478166 - DNA, 25 bp, Homo sapien
cagatcttagctggcaggtctgggt

SEQ ID NO: 2478167 - DNA, 25 bp, Homo sapien
taaaatctgggtgaggcgttctccc

SEQ ID NO: 2478168 - DNA, 25 bp, Homo sapien
aggcctggccgtgagatctgagaca

SEQ ID NO: 2478169 - DNA, 25 bp, Homo sapien
taagaaacaaatccggtgtccatgc

SEQ ID NO: 2478170 - DNA, 25 bp, Homo sapien
tatgtatctgggcaagctgaggccc

SEQ ID NO: 2478171 - DNA, 25 bp, Homo sapien
tcaggaagttatctcatcaatgcat

SEQ ID NO: 2478172 - DNA, 25 bp, Homo sapien
cctactgctctcacccattccagga

SEQ ID NO: 2478173 - DNA, 25 bp, Homo sapien
gggctgcggattatgaaatcaaagc

SEQ ID NO: 2478174 - DNA, 25 bp, Homo sapien
tgaaatcaaagctcaggaagttatc

SEQ ID NO: 2478175 - DNA, 25 bp, Homo sapien
ctgtcagaggagatacaagtccttt

SEQ ID NO: 2478176 - DNA, 25 bp, Homo sapien
ttcctagactccaaatattagcccc

SEQ ID NO: 2478177 - DNA, 25 bp, Homo sapien
cagaggagatacaagtccttttacc

SEQ ID NO: 2478178 - DNA, 25 bp, Homo sapien
ctttttagggactgaagctggttct

SEQ ID NO: 2478179 - DNA, 25 bp, Homo sapien
tatgggttgagggttcttttgtgct

SEQ ID NO: 2478180 - DNA, 25 bp, Homo sapien
tctcgtgagttttagggatgcattc

SEQ ID NO: 2478181 - DNA, 25 bp, Homo sapien
aatccagtggtggtatatgggttga

SEQ ID NO: 2478182 - DNA, 25 bp, Homo sapien
tgtgctgggttccttactgcctctc

SEQ ID NO: 2478183 - DNA, 25 bp, Homo sapien
ggtgatgttcaaccatcatctggag

SEQ ID NO: 2478184 - DNA, 25 bp, Homo sapien
cccaggtgatgttcaaccatcatct

SEQ ID NO: 2478185 - DNA, 25 bp, Homo sapien
ctgtgctctcagcggccccctcagg

SEQ ID NO: 2478186 - DNA, 25 bp, Homo sapien
ccaggtgatgttcaaccatcatctg

SEQ ID NO: 2478187 - DNA, 25 bp, Homo sapien
catcttcttccgttgccgtggagac

SEQ ID NO: 2478188 - DNA, 25 bp, Homo sapien
gtcatcttcttccgttgccgtggag

SEQ ID NO: 2478189 - DNA, 25 bp, Homo sapien
tcatcttcttccgttgccgtggaga

SEQ ID NO: 2478190 - DNA, 25 bp, Homo sapien
ttggggatccggtcttcatctatct

SEQ ID NO: 2478191 - DNA, 25 bp, Homo sapien
gtgggttggggatccggtcttcatc

SEQ ID NO: 2478192 - DNA, 25 bp, Homo sapien
gttggggatccggtcttcatctatc

SEQ ID NO: 2478193 - DNA, 25 bp, Homo sapien
gggttggggatccggtcttcatcta

SEQ ID NO: 2478194 - DNA, 25 bp, Homo sapien
tggtcactggtcagcacgagggtgg

SEQ ID NO: 2478195 - DNA, 25 bp, Homo sapien
ctggtcactggtcagcacgagggtg

SEQ ID NO: 2478196 - DNA, 25 bp, Homo sapien
actggtcactggtcagcacgagggt

SEQ ID NO: 2478197 - DNA, 25 bp, Homo sapien
gcctcggggtcaaggtgcggctcca

SEQ ID NO: 2478198 - DNA, 25 bp, Homo sapien
ctccagcagcgggaccgtgaactgg

SEQ ID NO: 2478199 - DNA, 25 bp, Homo sapien
tgaactggatctttcgggggctgtt

SEQ ID NO: 2478200 - DNA, 25 bp, Homo sapien
cagcgggaccgtgaactggatcttt

SEQ ID NO: 2478201 - DNA, 25 bp, Homo sapien
tggggcgggcgcgctccctctccgc

SEQ ID NO: 2478202 - DNA, 25 bp, Homo sapien
ctgcggcgggagggaaggcggcggg

SEQ ID NO: 2478203 - DNA, 25 bp, Homo sapien
gggcgggcgcgctccctctccgctc

SEQ ID NO: 2478204 - DNA, 25 bp, Homo sapien
gctggggcgggcgcgctccctctcc

SEQ ID NO: 2478205 - DNA, 25 bp, Homo sapien
gctcccggcacagcgctcccagctc

SEQ ID NO: 2478206 - DNA, 25 bp, Homo sapien
ccagctcgcggctccggggactctg

SEQ ID NO: 2478207 - DNA, 25 bp, Homo sapien
cggcacagcgctcccagctcgcggc

SEQ ID NO: 2478208 - DNA, 25 bp, Homo sapien
agcgctcccagctcgcggctccggg

SEQ ID NO: 2478209 - DNA, 25 bp, Homo sapien
gaaggtcacggttaattgtagctgc

SEQ ID NO: 2478210 - DNA, 25 bp, Homo sapien
tagaaggtcacggttaattgtagct

SEQ ID NO: 2478211 - DNA, 25 bp, Homo sapien
tgcatagaaggtcacggttaattgt

SEQ ID NO: 2478212 - DNA, 25 bp, Homo sapien
ctggtgcatagaaggtcacggttaa

SEQ ID NO: 2478213 - DNA, 25 bp, Homo sapien
gctggtctcaagaggccttaaagag

SEQ ID NO: 2478214 - DNA, 25 bp, Homo sapien
gatgtgttcagaatccctggttggg

SEQ ID NO: 2478215 - DNA, 25 bp, Homo sapien
gagactgtaacgtgtgtgatgaaca

SEQ ID NO: 2478216 - DNA, 25 bp, Homo sapien
ttttgggagacactaatcaacctac

SEQ ID NO: 2478217 - DNA, 25 bp, Homo sapien
gatgccttttgaatgagactctggg

SEQ ID NO: 2478218 - DNA, 25 bp, Homo sapien
tagatgccttttgaatgagactctg

SEQ ID NO: 2478219 - DNA, 25 bp, Homo sapien
ctagatgccttttgaatgagactct

SEQ ID NO: 2478220 - DNA, 25 bp, Homo sapien
agatgccttttgaatgagactctgg

SEQ ID NO: 2478221 - DNA, 25 bp, Homo sapien
cacagcctagcctggaattcaggca

SEQ ID NO: 2478222 - DNA, 25 bp, Homo sapien
atacatgaatttgaggagccgaaag

SEQ ID NO: 2478223 - DNA, 25 bp, Homo sapien
ggatgtggcgtctcccacagcctag

SEQ ID NO: 2478224 - DNA, 25 bp, Homo sapien
gagccgaaagatggcttttggatgt

SEQ ID NO: 2478225 - DNA, 25 bp, Homo sapien
ttagggcctcgtgacatcattggcg

SEQ ID NO: 2478226 - DNA, 25 bp, Homo sapien
gattttatgggccagtttggcaagt

SEQ ID NO: 2478227 - DNA, 25 bp, Homo sapien
cgctagggattaggtttttcagata

SEQ ID NO: 2478228 - DNA, 25 bp, Homo sapien
gtccagattcttcccgattttatgg

SEQ ID NO: 2478229 - DNA, 25 bp, Homo sapien
ggggcttgccccttccctggctcat

SEQ ID NO: 2478230 - DNA, 25 bp, Homo sapien
gggcttgccccttccctggctcata

SEQ ID NO: 2478231 - DNA, 25 bp, Homo sapien
gggggcttgccccttccctggctca

SEQ ID NO: 2478232 - DNA, 25 bp, Homo sapien
ggcttgccccttccctggctcatac

SEQ ID NO: 2478233 - DNA, 25 bp, Homo sapien
tagtctcttctaattggagcttaac

SEQ ID NO: 2478234 - DNA, 25 bp, Homo sapien
ctttggagatgaagcgctcctagag

SEQ ID NO: 2478235 - DNA, 25 bp, Homo sapien
gcttcattggaaacatggtccttct

SEQ ID NO: 2478236 - DNA, 25 bp, Homo sapien
agcgctcctagagaggcttcattgg

SEQ ID NO: 2478237 - DNA, 25 bp, Homo sapien
caatgactagccagcagaaagggct

SEQ ID NO: 2478238 - DNA, 25 bp, Homo sapien
taacatacaagtaggactgaggtcc

SEQ ID NO: 2478239 - DNA, 25 bp, Homo sapien
caaatctatgagcacctgaaaggca

SEQ ID NO: 2478240 - DNA, 25 bp, Homo sapien
tgaggtcccgtatcagaatccaaat

SEQ ID NO: 2478241 - DNA, 25 bp, Homo sapien
tctaaaggatgccagcatgagactt

SEQ ID NO: 2478242 - DNA, 25 bp, Homo sapien
ctaaaggatgccagcatgagactta

SEQ ID NO: 2478243 - DNA, 25 bp, Homo sapien
taaaggatgccagcatgagacttac

SEQ ID NO: 2478244 - DNA, 25 bp, Homo sapien
gcaggctgagtctccgagtgaattt

SEQ ID NO: 2478245 - DNA, 25 bp, Homo sapien
caggctgagtctccgagtgaatttc

SEQ ID NO: 2478246 - DNA, 25 bp, Homo sapien
ggctgagtctccgagtgaatttcac

SEQ ID NO: 2478247 - DNA, 25 bp, Homo sapien
tgcaggctgagtctccgagtgaatt

SEQ ID NO: 2478248 - DNA, 25 bp, Homo sapien
gagaaaggtagtgactctgcctgga

SEQ ID NO: 2478249 - DNA, 25 bp, Homo sapien
ttagaactacgtgtctggcacagag

SEQ ID NO: 2478250 - DNA, 25 bp, Homo sapien
catattgtacagagggaggcacgga

SEQ ID NO: 2478251 - DNA, 25 bp, Homo sapien
gaattcccgggatcatatgccctag

SEQ ID NO: 2478252 - DNA, 25 bp, Homo sapien
gctgacagctcaataacccttaggg

SEQ ID NO: 2478253 - DNA, 25 bp, Homo sapien
ggtcatcccaggtgtgaacttttgg

SEQ ID NO: 2478254 - DNA, 25 bp, Homo sapien
cacagcatattacaaggattaagga

SEQ ID NO: 2478255 - DNA, 25 bp, Homo sapien
aaggaaggccctttctagtgctgag

SEQ ID NO: 2478256 - DNA, 25 bp, Homo sapien
agaggtggcggctaggctggctggc

SEQ ID NO: 2478257 - DNA, 25 bp, Homo sapien
aggatggcgagagaggtggcggcta

SEQ ID NO: 2478258 - DNA, 25 bp, Homo sapien
tcaaggatggcgagagaggtggcgg

SEQ ID NO: 2478259 - DNA, 25 bp, Homo sapien
ggcgagagaggtggcggctaggctg

SEQ ID NO: 2478260 - DNA, 25 bp, Homo sapien
tgctctgctctacccactggctttt

SEQ ID NO: 2478261 - DNA, 25 bp, Homo sapien
tttctctggctttctcgtaatcccc

SEQ ID NO: 2478262 - DNA, 25 bp, Homo sapien
tggtagatgccctcctcatcttctg

SEQ ID NO: 2478263 - DNA, 25 bp, Homo sapien
tcacccactgtgctcctggtagatg

SEQ ID NO: 2478264 - DNA, 25 bp, Homo sapien
tcatagaccctttggattgctgcca

SEQ ID NO: 2478265 - DNA, 25 bp, Homo sapien
cagtatctggggttagctcttgctc

SEQ ID NO: 2478266 - DNA, 25 bp, Homo sapien
ttgtcataatcactgtgtgtccaaa

SEQ ID NO: 2478267 - DNA, 25 bp, Homo sapien
ttgtgaatgtgaaatggttgaagtt

SEQ ID NO: 2478268 - DNA, 25 bp, Homo sapien
tggatgctttcgttttaatagctct

SEQ ID NO: 2478269 - DNA, 25 bp, Homo sapien
taaggctttaagtccaatgatccca

SEQ ID NO: 2478270 - DNA, 25 bp, Homo sapien
tttaaggctttaagtccaatgatcc

SEQ ID NO: 2478271 - DNA, 25 bp, Homo sapien
tttcgttttaatagctctgggctac

SEQ ID NO: 2478272 - DNA, 25 bp, Homo sapien
cttcagtaatttttgtgcaaattca

SEQ ID NO: 2478273 - DNA, 25 bp, Homo sapien
tcttcagtaatttttgtgcaaattc

SEQ ID NO: 2478274 - DNA, 25 bp, Homo sapien
tgagactctggagaggcttacacag

SEQ ID NO: 2478275 - DNA, 25 bp, Homo sapien
gagcctgaaggacctaccctcttcc

SEQ ID NO: 2478276 - DNA, 25 bp, Homo sapien
gttggagggattgagattagattca

SEQ ID NO: 2478277 - DNA, 25 bp, Homo sapien
ggcttacacagaagttggagggatt

SEQ ID NO: 2478278 - DNA, 25 bp, Homo sapien
ttccacctggcacgcctccgtgcat

SEQ ID NO: 2478279 - DNA, 25 bp, Homo sapien
cacctggcacgcctccgtgcattcc

SEQ ID NO: 2478280 - DNA, 25 bp, Homo sapien
tggcacgcctccgtgcattcctttt

SEQ ID NO: 2478281 - DNA, 25 bp, Homo sapien
ttttccacctggcacgcctccgtgc

SEQ ID NO: 2478282 - DNA, 25 bp, Homo sapien
gttagtaagatacttttctccacta

SEQ ID NO: 2478283 - DNA, 25 bp, Homo sapien
ctgttagtaagatacttttctccac

SEQ ID NO: 2478284 - DNA, 25 bp, Homo sapien
agtaagatacttttctccactatgg

SEQ ID NO: 2478285 - DNA, 25 bp, Homo sapien
aagatacttttctccactatggatt

SEQ ID NO: 2478286 - DNA, 25 bp, Homo sapien
gcaggctgcaacatctactattgtg

SEQ ID NO: 2478287 - DNA, 25 bp, Homo sapien
gggtgcaatgcacaatcccatttgt

SEQ ID NO: 2478288 - DNA, 25 bp, Homo sapien
cagaaagtcctaaagtgcagaagtt

SEQ ID NO: 2478289 - DNA, 25 bp, Homo sapien
gacagaaaccatgtattgtgcaggc

SEQ ID NO: 2478290 - DNA, 25 bp, Homo sapien
cagagacttttctaggttgttgatc

SEQ ID NO: 2478291 - DNA, 25 bp, Homo sapien
caggcttatctctgtgcgtggaggt

SEQ ID NO: 2478292 - DNA, 25 bp, Homo sapien
tgttgatctggcatagagacagaga

SEQ ID NO: 2478293 - DNA, 25 bp, Homo sapien
gagacttttctaggttgttgatctg

SEQ ID NO: 2478294 - DNA, 25 bp, Homo sapien
ttctgctggacctgagatctcttca

SEQ ID NO: 2478295 - DNA, 25 bp, Homo sapien
ccctgaactgctgccgccgaagtct

SEQ ID NO: 2478296 - DNA, 25 bp, Homo sapien
ctggttctgctggacctgagatctc

SEQ ID NO: 2478297 - DNA, 25 bp, Homo sapien
tgccgccgaagtctcctgggctgtt

SEQ ID NO: 2478298 - DNA, 25 bp, Homo sapien
actcacatccctaactgttaaacct

SEQ ID NO: 2478299 - DNA, 25 bp, Homo sapien
gccaccactcacatccctaactgtt

SEQ ID NO: 2478300 - DNA, 25 bp, Homo sapien
accactcacatccctaactgttaaa

SEQ ID NO: 2478301 - DNA, 25 bp, Homo sapien
tcacatccctaactgttaaaccttc

SEQ ID NO: 2478302 - DNA, 25 bp, Homo sapien
ggatcagcacccgtcgagtcagagg

SEQ ID NO: 2478303 - DNA, 25 bp, Homo sapien
ggcaggatcagcacccgtcgagtca

SEQ ID NO: 2478304 - DNA, 25 bp, Homo sapien
acccgtcgagtcagaggaggcatct

SEQ ID NO: 2478305 - DNA, 25 bp, Homo sapien
atcagcacccgtcgagtcagaggag

SEQ ID NO: 2478306 - DNA, 25 bp, Homo sapien
cagcatagaccagggcccctgctac

SEQ ID NO: 2478307 - DNA, 25 bp, Homo sapien
gcatagaccagggcccctgctacag

SEQ ID NO: 2478308 - DNA, 25 bp, Homo sapien
agcatagaccagggcccctgctaca

SEQ ID NO: 2478309 - DNA, 25 bp, Homo sapien
ccaagaagaggagagtggtaaattt

SEQ ID NO: 2478310 - DNA, 25 bp, Homo sapien
caagaagaggagagtggtaaatttc

SEQ ID NO: 2478311 - DNA, 25 bp, Homo sapien
gccaagaagaggagagtggtaaatt

SEQ ID NO: 2478312 - DNA, 25 bp, Homo sapien
aagaagaggagagtggtaaatttca

SEQ ID NO: 2478313 - DNA, 25 bp, Homo sapien
gagtgagtataaccacagaatctgc

SEQ ID NO: 2478314 - DNA, 25 bp, Homo sapien
gaggagtgagtataaccacagaatc

SEQ ID NO: 2478315 - DNA, 25 bp, Homo sapien
gagtataaccacagaatctgcagaa

SEQ ID NO: 2478316 - DNA, 25 bp, Homo sapien
ggatgaggagtgagtataaccacag

SEQ ID NO: 2478317 - DNA, 25 bp, Homo sapien
aaagagtggcagttcctttgggcca

SEQ ID NO: 2478318 - DNA, 25 bp, Homo sapien
taaatgcactcatgagagcaatggg

SEQ ID NO: 2478319 - DNA, 25 bp, Homo sapien
cacagtcaatgagggagaaatcctg

SEQ ID NO: 2478320 - DNA, 25 bp, Homo sapien
gcttggatgagagtgtcttcttgca

SEQ ID NO: 2478321 - DNA, 25 bp, Homo sapien
ttctccacggggtagcgaatgatag

SEQ ID NO: 2478322 - DNA, 25 bp, Homo sapien
ggtagcgaatgatagttctgtgatt

SEQ ID NO: 2478323 - DNA, 25 bp, Homo sapien
tgattgattgggattgggctggctt

SEQ ID NO: 2478324 - DNA, 25 bp, Homo sapien
tctgtgattgattgggattgggctg

SEQ ID NO: 2478325 - DNA, 25 bp, Homo sapien
ctgaagacgtaaagcctgctgctcc

SEQ ID NO: 2478326 - DNA, 25 bp, Homo sapien
gatgctttcagtttaatagctgttt

SEQ ID NO: 2478327 - DNA, 25 bp, Homo sapien
ttttaggctgaagacgtaaagcctg

SEQ ID NO: 2478328 - DNA, 25 bp, Homo sapien
tgctcctgggtatcatttctcagct

SEQ ID NO: 2478329 - DNA, 25 bp, Homo sapien
acgtctttaacgtcatggacggctc

SEQ ID NO: 2478330 - DNA, 25 bp, Homo sapien
tcaaggacgtctttaacgtcatgga

SEQ ID NO: 2478331 - DNA, 25 bp, Homo sapien
ggacgtctttaacgtcatggacggc

SEQ ID NO: 2478332 - DNA, 25 bp, Homo sapien
aaggacgtctttaacgtcatggacg

SEQ ID NO: 2478333 - DNA, 25 bp, Homo sapien
cagctttttttgctccgtctaggcc

SEQ ID NO: 2478334 - DNA, 25 bp, Homo sapien
cccacagctttttttgctccgtcta

SEQ ID NO: 2478335 - DNA, 25 bp, Homo sapien
gctttctagatcttcgactgcatct

SEQ ID NO: 2478336 - DNA, 25 bp, Homo sapien
ctagatcttcgactgcatcttttcc

SEQ ID NO: 2478337 - DNA, 25 bp, Homo sapien
ccagaaggctggatctctgcttcct

SEQ ID NO: 2478338 - DNA, 25 bp, Homo sapien
tggctttggtgcctgtctggctaac

SEQ ID NO: 2478339 - DNA, 25 bp, Homo sapien
ttccttggctttggtgcctgtctgg

SEQ ID NO: 2478340 - DNA, 25 bp, Homo sapien
cttggctttggtgcctgtctggcta

SEQ ID NO: 2478341 - DNA, 25 bp, Homo sapien
tgagctgctgatgcttcatggcaag

SEQ ID NO: 2478342 - DNA, 25 bp, Homo sapien
tccttttgagctgctgatgcttcat

SEQ ID NO: 2478343 - DNA, 25 bp, Homo sapien
gcattttccttttgagctgctgatg

SEQ ID NO: 2478344 - DNA, 25 bp, Homo sapien
cattttccttttgagctgctgatgc

SEQ ID NO: 2478345 - DNA, 25 bp, Homo sapien
ggggcagaggcggcctctggatcat

SEQ ID NO: 2478346 - DNA, 25 bp, Homo sapien
ttccccgatcctggggcagaggcgg

SEQ ID NO: 2478347 - DNA, 25 bp, Homo sapien
ctggggcagaggcggcctctggatc

SEQ ID NO: 2478348 - DNA, 25 bp, Homo sapien
ggttccccgatcctggggcagaggc

SEQ ID NO: 2478349 - DNA, 25 bp, Homo sapien
gcacagaccagggctcctgccagag

SEQ ID NO: 2478350 - DNA, 25 bp, Homo sapien
aggcacagaccagggctcctgccag

SEQ ID NO: 2478351 - DNA, 25 bp, Homo sapien
ggcacagaccagggctcctgccaga

SEQ ID NO: 2478352 - DNA, 25 bp, Homo sapien
tcaggaagaggagagtcatgaacct

SEQ ID NO: 2478353 - DNA, 25 bp, Homo sapien
tgtcaggaagaggagagtcatgaac

SEQ ID NO: 2478354 - DNA, 25 bp, Homo sapien
ctgtcaggaagaggagagtcatgaa

SEQ ID NO: 2478355 - DNA, 25 bp, Homo sapien
gtcaggaagaggagagtcatgaacc

SEQ ID NO: 2478356 - DNA, 25 bp, Homo sapien
tgctggagtgggtatgccaccaaat

SEQ ID NO: 2478357 - DNA, 25 bp, Homo sapien
gtgggtatgccaccaaatccttgga

SEQ ID NO: 2478358 - DNA, 25 bp, Homo sapien
gagtgggtatgccaccaaatccttg

SEQ ID NO: 2478359 - DNA, 25 bp, Homo sapien
tggagtgggtatgccaccaaatcct

SEQ ID NO: 2478360 - DNA, 25 bp, Homo sapien
ctggagttggcactgtcctgactgg

SEQ ID NO: 2478361 - DNA, 25 bp, Homo sapien
ctgttaagtcaacaaaggctggctg

SEQ ID NO: 2478362 - DNA, 25 bp, Homo sapien
cttcccatctcgcttgtccctgggc

SEQ ID NO: 2478363 - DNA, 25 bp, Homo sapien
ccatctcgcttgtccctgggctccc

SEQ ID NO: 2478364 - DNA, 25 bp, Homo sapien
ttgcctgcccctttgatattctcca

SEQ ID NO: 2478365 - DNA, 25 bp, Homo sapien
gcctgcccctttgatattctccagt

SEQ ID NO: 2478366 - DNA, 25 bp, Homo sapien
tgcctgcccctttgatattctccag

SEQ ID NO: 2478367 - DNA, 25 bp, Homo sapien
ctgcccctttgatattctccagtgt

SEQ ID NO: 2478368 - DNA, 25 bp, Homo sapien
ttaactggtgttgcaactctgaaac

SEQ ID NO: 2478369 - DNA, 25 bp, Homo sapien
gaacctttaactggtgttgcaactc

SEQ ID NO: 2478370 - DNA, 25 bp, Homo sapien
ctggtgttgcaactctgaaactctt

SEQ ID NO: 2478371 - DNA, 25 bp, Homo sapien
agcagctgaacctttaactggtgtt

SEQ ID NO: 2478372 - DNA, 25 bp, Homo sapien
gtgaaaggcaatgcccctaagccca

SEQ ID NO: 2478373 - DNA, 25 bp, Homo sapien
atccttcctgtgaaaggcaatgccc

SEQ ID NO: 2478374 - DNA, 25 bp, Homo sapien
tcctgtgaaaggcaatgcccctaag

SEQ ID NO: 2478375 - DNA, 25 bp, Homo sapien
ctcatccttcctgtgaaaggcaatg

SEQ ID NO: 2478376 - DNA, 25 bp, Homo sapien
tatccattgactttggacttagtct

SEQ ID NO: 2478377 - DNA, 25 bp, Homo sapien
tgactttggacttagtctcctcaaa

SEQ ID NO: 2478378 - DNA, 25 bp, Homo sapien
cattgactttggacttagtctcctc

SEQ ID NO: 2478379 - DNA, 25 bp, Homo sapien
tggacttagtctcctcaaactgctc

SEQ ID NO: 2478380 - DNA, 25 bp, Homo sapien
cacgagtcctgtgaatacagaaaca

SEQ ID NO: 2478381 - DNA, 25 bp, Homo sapien
tggctccatgatttgctgcagaatc

SEQ ID NO: 2478382 - DNA, 25 bp, Homo sapien
ctggcacccagggttcttctgcatc

SEQ ID NO: 2478383 - DNA, 25 bp, Homo sapien
cccactcacgagtcctgtgaataca

SEQ ID NO: 2478384 - DNA, 25 bp, Homo sapien
gaagaggaggatctaattccacaca

SEQ ID NO: 2478385 - DNA, 25 bp, Homo sapien
tacaacagaagtccaatttagattc

SEQ ID NO: 2478386 - DNA, 25 bp, Homo sapien
gatgttaattacagcatttgaagag

SEQ ID NO: 2478387 - DNA, 25 bp, Homo sapien
caaattgagtggtgagaatacaaca

SEQ ID NO: 2478388 - DNA, 25 bp, Homo sapien
ctgaagcgtattactgtttcctgct

SEQ ID NO: 2478389 - DNA, 25 bp, Homo sapien
catgtcgcagcccagattgatgtgt

SEQ ID NO: 2478390 - DNA, 25 bp, Homo sapien
tctgaagcgtattactgtttcctgc

SEQ ID NO: 2478391 - DNA, 25 bp, Homo sapien
ctattctgaagcgtattactgtttc

SEQ ID NO: 2478392 - DNA, 25 bp, Homo sapien
ctgtacttggtttccagactgccca

SEQ ID NO: 2478393 - DNA, 25 bp, Homo sapien
ctgtgtaaacgtcaggccttactca

SEQ ID NO: 2478394 - DNA, 25 bp, Homo sapien
ccttactcagtccatctgtacttgg

SEQ ID NO: 2478395 - DNA, 25 bp, Homo sapien
tgtgtaaacgtcaggccttactcag

SEQ ID NO: 2478396 - DNA, 25 bp, Homo sapien
gccacagtgttggcagagtctgagc

SEQ ID NO: 2478397 - DNA, 25 bp, Homo sapien
caaatccataacctttggtgaagac

SEQ ID NO: 2478398 - DNA, 25 bp, Homo sapien
tccataacctttggtgaagacatcc

SEQ ID NO: 2478399 - DNA, 25 bp, Homo sapien
acagtgttggcagagtctgagcttg

SEQ ID NO: 2478400 - DNA, 25 bp, Homo sapien
gcggtggcggcaggctccgcagcgg

SEQ ID NO: 2478401 - DNA, 25 bp, Homo sapien
agaggcggtggcggcaggctccgca

SEQ ID NO: 2478402 - DNA, 25 bp, Homo sapien
ctcagaggcggtggcggcaggctcc

SEQ ID NO: 2478403 - DNA, 25 bp, Homo sapien
cttctgctcagaggcggtggcggca

SEQ ID NO: 2478404 - DNA, 25 bp, Homo sapien
aggcatctctgcaggtcgccaacag

SEQ ID NO: 2478405 - DNA, 25 bp, Homo sapien
ggtcagttgcctcactccaacatct

SEQ ID NO: 2478406 - DNA, 25 bp, Homo sapien
agatcatcacggtttgcccccgaag

SEQ ID NO: 2478407 - DNA, 25 bp, Homo sapien
tctgcaggtcgccaacagtcagtgc

SEQ ID NO: 2478408 - DNA, 25 bp, Homo sapien
tcatagaggccaacacagcagtgca

SEQ ID NO: 2478409 - DNA, 25 bp, Homo sapien
tatgttatctcctgctcatagaggc

SEQ ID NO: 2478410 - DNA, 25 bp, Homo sapien
tggatcacccagagtatatacaggg

SEQ ID NO: 2478411 - DNA, 25 bp, Homo sapien
tatacagggtaactgactctagtcc

SEQ ID NO: 2478412 - DNA, 25 bp, Homo sapien
agcagcagctgagtatgtatttcgt

SEQ ID NO: 2478413 - DNA, 25 bp, Homo sapien
cagcagctgagtatgtatttcgtgg

SEQ ID NO: 2478414 - DNA, 25 bp, Homo sapien
cagcaggcccaccatggctcctaag

SEQ ID NO: 2478415 - DNA, 25 bp, Homo sapien
gcaggcccaccatggctcctaaggg

SEQ ID NO: 2478416 - DNA, 25 bp, Homo sapien
tgggccacaagtgaccactcagaac

SEQ ID NO: 2478417 - DNA, 25 bp, Homo sapien
gaccactcagaaccatgtggagtgt

SEQ ID NO: 2478418 - DNA, 25 bp, Homo sapien
ctgtgggccacaagtgaccactcag

SEQ ID NO: 2478419 - DNA, 25 bp, Homo sapien
tcagaaccatgtggagtgttctttc

SEQ ID NO: 2478420 - DNA, 25 bp, Homo sapien
caggaccgaagttgtgagagttgcc

SEQ ID NO: 2478421 - DNA, 25 bp, Homo sapien
aagacggaccataggaacttccagg

SEQ ID NO: 2478422 - DNA, 25 bp, Homo sapien
cacagtctgtgtgaacagcaggacc

SEQ ID NO: 2478423 - DNA, 25 bp, Homo sapien
gataatgttgccttggacaccacag

SEQ ID NO: 2478424 - DNA, 25 bp, Homo sapien
gacagtcacattagaaaggcagcat

SEQ ID NO: 2478425 - DNA, 25 bp, Homo sapien
agcaggacagtcacattagaaaggc

SEQ ID NO: 2478426 - DNA, 25 bp, Homo sapien
ccacgataggctgagtgacttggcc

SEQ ID NO: 2478427 - DNA, 25 bp, Homo sapien
atcctggccttccacgataggctga

SEQ ID NO: 2478428 - DNA, 25 bp, Homo sapien
cctttgccacgactccctctgagct

SEQ ID NO: 2478429 - DNA, 25 bp, Homo sapien
tgccatcttattgccagttcctgga

SEQ ID NO: 2478430 - DNA, 25 bp, Homo sapien
tggcttccctttgccacgactccct

SEQ ID NO: 2478431 - DNA, 25 bp, Homo sapien
gagctgtgatggcagcctctctggc

SEQ ID NO: 2478432 - DNA, 25 bp, Homo sapien
ggttatgataaggacatgtgccatc

SEQ ID NO: 2478433 - DNA, 25 bp, Homo sapien
tcctgatgtgttgtagcaactgaaa

SEQ ID NO: 2478434 - DNA, 25 bp, Homo sapien
ggtgaggcctgcttatggttatgat

SEQ ID NO: 2478435 - DNA, 25 bp, Homo sapien
tctcacggttggctatcctgatgtg

SEQ ID NO: 2478436 - DNA, 25 bp, Homo sapien
caaatcctgtttcatctcccatcat

SEQ ID NO: 2478437 - DNA, 25 bp, Homo sapien
ctttggtactaacagcaaatcctgt

SEQ ID NO: 2478438 - DNA, 25 bp, Homo sapien
gcaaatcctgtttcatctcccatca

SEQ ID NO: 2478439 - DNA, 25 bp, Homo sapien
acagcaaatcctgtttcatctccca

SEQ ID NO: 2478440 - DNA, 25 bp, Homo sapien
tcaaataatgctgctggattggtag

SEQ ID NO: 2478441 - DNA, 25 bp, Homo sapien
tgctgctggattggtagtgaaaacc

SEQ ID NO: 2478442 - DNA, 25 bp, Homo sapien
caacagaccttgattggcttgccgc

SEQ ID NO: 2478443 - DNA, 25 bp, Homo sapien
cccttagcagtttcttattgtagtt

SEQ ID NO: 2478444 - DNA, 25 bp, Homo sapien
gagggtgtgggagagtcccttgcag

SEQ ID NO: 2478445 - DNA, 25 bp, Homo sapien
tggccaaggaagacggagccagggg

SEQ ID NO: 2478446 - DNA, 25 bp, Homo sapien
gtgggagagtcccttgcagaagacc

SEQ ID NO: 2478447 - DNA, 25 bp, Homo sapien
atggccaaggaagacggagccaggg

SEQ ID NO: 2478448 - DNA, 25 bp, Homo sapien
ctctggctgaagtgacagcagtcgg

SEQ ID NO: 2478449 - DNA, 25 bp, Homo sapien
tctggctgaagtgacagcagtcggt

SEQ ID NO: 2478450 - DNA, 25 bp, Homo sapien
ccacaatggctaggagaagagactc

SEQ ID NO: 2478451 - DNA, 25 bp, Homo sapien
tgaaaccacatactgcctaagagag

SEQ ID NO: 2478452 - DNA, 25 bp, Homo sapien
aatcctagtgtgagatgtaccatgc

SEQ ID NO: 2478453 - DNA, 25 bp, Homo sapien
tttagagccagaaagtgaggtgtcc

SEQ ID NO: 2478454 - DNA, 25 bp, Homo sapien
gattccaaatcgctcagtctggtct

SEQ ID NO: 2478455 - DNA, 25 bp, Homo sapien
taggatgtggattccaaatcgctca

SEQ ID NO: 2478456 - DNA, 25 bp, Homo sapien
gagatgtgcctaaggtctttgtgca

SEQ ID NO: 2478457 - DNA, 25 bp, Homo sapien
tctttgtgcatgcagcttgtggcag

SEQ ID NO: 2478458 - DNA, 25 bp, Homo sapien
gcagtgcagtttcctgcaagaggtg

SEQ ID NO: 2478459 - DNA, 25 bp, Homo sapien
gaagccaattctgtcagaccacatg

SEQ ID NO: 2478460 - DNA, 25 bp, Homo sapien
ggatgttgagggcagtgcagtttcc

SEQ ID NO: 2478461 - DNA, 25 bp, Homo sapien
tgaagccaattctgtcagaccacat

SEQ ID NO: 2478462 - DNA, 25 bp, Homo sapien
tggctagctacaccctccaaaagtg

SEQ ID NO: 2478463 - DNA, 25 bp, Homo sapien
cagagaaatatctgtcacactactt

SEQ ID NO: 2478464 - DNA, 25 bp, Homo sapien
tgaatgaaagttcctgaggtctccc

SEQ ID NO: 2478465 - DNA, 25 bp, Homo sapien
tctcagtgacttcacaccattaaca

SEQ ID NO: 2478466 - DNA, 25 bp, Homo sapien
gaactatctttcctcatgccgtcac

SEQ ID NO: 2478467 - DNA, 25 bp, Homo sapien
gataaactcatcagggtgaggcccc

SEQ ID NO: 2478468 - DNA, 25 bp, Homo sapien
accggatgtggtccctcaaccttgg

SEQ ID NO: 2478469 - DNA, 25 bp, Homo sapien
cgtgatagtatcaagaggtgaggtc

SEQ ID NO: 2478470 - DNA, 25 bp, Homo sapien
aggctggcaaatccaaggtcaaaag

SEQ ID NO: 2478471 - DNA, 25 bp, Homo sapien
gctggcaaatccaaggtcaaaagcc

SEQ ID NO: 2478472 - DNA, 25 bp, Homo sapien
tggcaaatccaaggtcaaaagcctg

SEQ ID NO: 2478473 - DNA, 25 bp, Homo sapien
caaatccaaggtcaaaagcctgcat

SEQ ID NO: 2478474 - DNA, 25 bp, Homo sapien
taagcttaggtgtagatttttgcgt

SEQ ID NO: 2478475 - DNA, 25 bp, Homo sapien
tcttggcaagaacctacttgtggag

SEQ ID NO: 2478476 - DNA, 25 bp, Homo sapien
tcttttcggtgttctctgagctctc

SEQ ID NO: 2478477 - DNA, 25 bp, Homo sapien
ttttctgaggagaagttgcatgtaa

SEQ ID NO: 2478478 - DNA, 25 bp, Homo sapien
agtctttgccagcaaaagtctggtg

SEQ ID NO: 2478479 - DNA, 25 bp, Homo sapien
ttgccagcaaaagtctggtggtggt

SEQ ID NO: 2478480 - DNA, 25 bp, Homo sapien
tcctccaagtcaaaagtgtcctgtg

SEQ ID NO: 2478481 - DNA, 25 bp, Homo sapien
tattggtggctggtagactacacag

SEQ ID NO: 2478482 - DNA, 25 bp, Homo sapien
gacgcagttctggtctgtctacact

SEQ ID NO: 2478483 - DNA, 25 bp, Homo sapien
tggctgctggcttaaagaccgacgc

SEQ ID NO: 2478484 - DNA, 25 bp, Homo sapien
atagggagaagtgggcaacttctta

SEQ ID NO: 2478485 - DNA, 25 bp, Homo sapien
ctcttcacagcagaagacacatgga

SEQ ID NO: 2478486 - DNA, 25 bp, Homo sapien
ccttggggttcgaatccagagtttg

SEQ ID NO: 2478487 - DNA, 25 bp, Homo sapien
ccagagtttgggatggtgctagcac

SEQ ID NO: 2478488 - DNA, 25 bp, Homo sapien
gctctcgggacagaatcctgatgga

SEQ ID NO: 2478489 - DNA, 25 bp, Homo sapien
tggttgcaattccagaacatgtggg

SEQ ID NO: 2478490 - DNA, 25 bp, Homo sapien
ggatcttcctgtgagaattgcccca

SEQ ID NO: 2478491 - DNA, 25 bp, Homo sapien
tcttagacacataggagtagagaca

SEQ ID NO: 2478492 - DNA, 25 bp, Homo sapien
gcgggtatccgagaagtgtctttgt

SEQ ID NO: 2478493 - DNA, 25 bp, Homo sapien
ctggaaatcaatgcccttggcctga

SEQ ID NO: 2478494 - DNA, 25 bp, Homo sapien
atttcaatcctccgcacctgggact

SEQ ID NO: 2478495 - DNA, 25 bp, Homo sapien
ccaaagcccagactgaagaggacat

SEQ ID NO: 2478496 - DNA, 25 bp, Homo sapien
tgaactagtcttgttggtcccccca

SEQ ID NO: 2478497 - DNA, 25 bp, Homo sapien
aagatcaagtagctggcaaggcctg

SEQ ID NO: 2478498 - DNA, 25 bp, Homo sapien
tggaagccaaactacagccaagatc

SEQ ID NO: 2478499 - DNA, 25 bp, Homo sapien
gctggaagccaaactacagccaaga

SEQ ID NO: 2478500 - DNA, 25 bp, Homo sapien
aaggcctggctgtctcgaggaaact

SEQ ID NO: 2478501 - DNA, 25 bp, Homo sapien
gagtttgccattggcggccagtagt

SEQ ID NO: 2478502 - DNA, 25 bp, Homo sapien
tggagaagagtttgccattggcggc

SEQ ID NO: 2478503 - DNA, 25 bp, Homo sapien
agaagagtttgccattggcggccag

SEQ ID NO: 2478504 - DNA, 25 bp, Homo sapien
aagagtttgccattggcggccagta

SEQ ID NO: 2478505 - DNA, 25 bp, Homo sapien
ccagggtcaagtcatcttcaaagct

SEQ ID NO: 2478506 - DNA, 25 bp, Homo sapien
cagggtcaagtcatcttcaaagctg

SEQ ID NO: 2478507 - DNA, 25 bp, Homo sapien
cttcctcagaaaatccttcttcaga

SEQ ID NO: 2478508 - DNA, 25 bp, Homo sapien
tgtagataaactgtcctgcttcctc

SEQ ID NO: 2478509 - DNA, 25 bp, Homo sapien
ctcagaaaatccttcttcagagtat

SEQ ID NO: 2478510 - DNA, 25 bp, Homo sapien
cattgtagataaactgtcctgcttc

SEQ ID NO: 2478511 - DNA, 25 bp, Homo sapien
caaaaacagtcttataggttgaagt

SEQ ID NO: 2478512 - DNA, 25 bp, Homo sapien
cagtgagagtcagtagtatttaatt

SEQ ID NO: 2478513 - DNA, 25 bp, Homo sapien
cagtcttataggttgaagtcactta

SEQ ID NO: 2478514 - DNA, 25 bp, Homo sapien
ttataggttgaagtcacttactaca

SEQ ID NO: 2478515 - DNA, 25 bp, Homo sapien
aatgattcttcggtctttaggtgaa

SEQ ID NO: 2478516 - DNA, 25 bp, Homo sapien
tattgaagcaaaacgggagaattac

SEQ ID NO: 2478517 - DNA, 25 bp, Homo sapien
tgctgaatatcatgtcactcaggaa

SEQ ID NO: 2478518 - DNA, 25 bp, Homo sapien
tacattcatagaagcaggcgtttgc

SEQ ID NO: 2478519 - DNA, 25 bp, Homo sapien
caagttgcacttgattcacaattgt

SEQ ID NO: 2478520 - DNA, 25 bp, Homo sapien
ggtctggaactcaccccaactattc

SEQ ID NO: 2478521 - DNA, 25 bp, Homo sapien
cgtgcctaatttagtcttagcccca

SEQ ID NO: 2478522 - DNA, 25 bp, Homo sapien
tctattcctagacctcgtgcctaat

SEQ ID NO: 2478523 - DNA, 25 bp, Homo sapien
ccgtctctgagtttccaggagttgt

SEQ ID NO: 2478524 - DNA, 25 bp, Homo sapien
ttgtgtctgttagcaaattcaacca

SEQ ID NO: 2478525 - DNA, 25 bp, Homo sapien
ttcccgtctctgagtttccaggagt

SEQ ID NO: 2478526 - DNA, 25 bp, Homo sapien
tccaggagttgtgtctgttagcaaa

SEQ ID NO: 2478527 - DNA, 25 bp, Homo sapien
ctgcagccagtcttcaattttattg

SEQ ID NO: 2478528 - DNA, 25 bp, Homo sapien
cagtcttcaattttattgattggat

SEQ ID NO: 2478529 - DNA, 25 bp, Homo sapien
tgcagccagtcttcaattttattga

SEQ ID NO: 2478530 - DNA, 25 bp, Homo sapien
tcttcaattttattgattggattcc

SEQ ID NO: 2478531 - DNA, 25 bp, Homo sapien
tgaacgaaatcagacctcctccctg

SEQ ID NO: 2478532 - DNA, 25 bp, Homo sapien
tattcttacataagctgcgtcatga

SEQ ID NO: 2478533 - DNA, 25 bp, Homo sapien
aagaacctggaaagtgcccaagatg

SEQ ID NO: 2478534 - DNA, 25 bp, Homo sapien
aagtcagacactagatcactgtgag

SEQ ID NO: 2478535 - DNA, 25 bp, Homo sapien
gatctgggacatcctgcagggcggc

SEQ ID NO: 2478536 - DNA, 25 bp, Homo sapien
tcttggaaaacgtcatccaggctgg

SEQ ID NO: 2478537 - DNA, 25 bp, Homo sapien
tggaaggctcaggatctgggacatc

SEQ ID NO: 2478538 - DNA, 25 bp, Homo sapien
cttcttggaaaacgtcatccaggct

SEQ ID NO: 2478539 - DNA, 25 bp, Homo sapien
gcccgccgtttctcccaggatgtgg

SEQ ID NO: 2478540 - DNA, 25 bp, Homo sapien
tctgacggagccaggcccgccgttt

SEQ ID NO: 2478541 - DNA, 25 bp, Homo sapien
ctgggtctgccagttacggctctga

SEQ ID NO: 2478542 - DNA, 25 bp, Homo sapien
tcagggcctcccgtaacagtaatgc

SEQ ID NO: 2478543 - DNA, 25 bp, Homo sapien
cccagtcccaggtttgcctttagtg

SEQ ID NO: 2478544 - DNA, 25 bp, Homo sapien
cccaagcagtgcctgtgagttgaga

SEQ ID NO: 2478545 - DNA, 25 bp, Homo sapien
caggtttgcctttagtgctctaggg

SEQ ID NO: 2478546 - DNA, 25 bp, Homo sapien
tgctctaggggacatgtatgagaca

SEQ ID NO: 2478547 - DNA, 25 bp, Homo sapien
taggtactgccctgcaccatctaga

SEQ ID NO: 2478548 - DNA, 25 bp, Homo sapien
tttctcccacaaataagcgtagctg

SEQ ID NO: 2478549 - DNA, 25 bp, Homo sapien
cagcattggctgagacgagacctcc

SEQ ID NO: 2478550 - DNA, 25 bp, Homo sapien
cataatgctgaatcgcagggttcca

SEQ ID NO: 2478551 - DNA, 25 bp, Homo sapien
gctgacctcaatatatcttgctgca

SEQ ID NO: 2478552 - DNA, 25 bp, Homo sapien
caatggttggagctatggacactag

SEQ ID NO: 2478553 - DNA, 25 bp, Homo sapien
tcagccaggtactctcaatggttgg

SEQ ID NO: 2478554 - DNA, 25 bp, Homo sapien
caagtgtgtacatcctccctcgtag

SEQ ID NO: 2478555 - DNA, 25 bp, Homo sapien
tagcatcaccctaaatcagtacagc

SEQ ID NO: 2478556 - DNA, 25 bp, Homo sapien
cccagcatcgttctcctaggcataa

SEQ ID NO: 2478557 - DNA, 25 bp, Homo sapien
ttattcaagtcatcaaagagaccca

SEQ ID NO: 2478558 - DNA, 25 bp, Homo sapien
caatgagttcagcaagacacagaga

SEQ ID NO: 2478559 - DNA, 25 bp, Homo sapien
ctgtctgctggtagaaagctgagtt

SEQ ID NO: 2478560 - DNA, 25 bp, Homo sapien
gattatgcctttctccctgaactca

SEQ ID NO: 2478561 - DNA, 25 bp, Homo sapien
ctgagtttgaggcaaagcagttgtc

SEQ ID NO: 2478562 - DNA, 25 bp, Homo sapien
cgaagctgggccgaggccttcacag

SEQ ID NO: 2478563 - DNA, 25 bp, Homo sapien
caggcagaaaagtgtccaccaaggt

SEQ ID NO: 2478564 - DNA, 25 bp, Homo sapien
caaggattttctgaactttctccag

SEQ ID NO: 2478565 - DNA, 25 bp, Homo sapien
ttctccaggcagaaaagtgtccacc

SEQ ID NO: 2478566 - DNA, 25 bp, Homo sapien
attttctgaactttctccaggcaga

SEQ ID NO: 2478567 - DNA, 25 bp, Homo sapien
tgtgtttgggatcaacaacccagga

SEQ ID NO: 2478568 - DNA, 25 bp, Homo sapien
cagaggaagttaaactggagccatc

SEQ ID NO: 2478569 - DNA, 25 bp, Homo sapien
tatactcatgggattctcttggaag

SEQ ID NO: 2478570 - DNA, 25 bp, Homo sapien
taatggaccggcacctgtgagaaca

SEQ ID NO: 2478571 - DNA, 25 bp, Homo sapien
tagctcagctatcccctaaaatctg

SEQ ID NO: 2478572 - DNA, 25 bp, Homo sapien
tcctgccagaaaggataagtttaac

SEQ ID NO: 2478573 - DNA, 25 bp, Homo sapien
gtttaacatgcagggtacatcaata

SEQ ID NO: 2478574 - DNA, 25 bp, Homo sapien
atcaatagggccaatttaaaaaatg

SEQ ID NO: 2478575 - DNA, 25 bp, Homo sapien
tactgcacttacctttgtgagcggc

SEQ ID NO: 2478576 - DNA, 25 bp, Homo sapien
caatctgccctagaggaaataggca

SEQ ID NO: 2478577 - DNA, 25 bp, Homo sapien
ggctgtaggagggtctatcctcgaa

SEQ ID NO: 2478578 - DNA, 25 bp, Homo sapien
gaaaattcctttagccccatagatg

SEQ ID NO: 2478579 - DNA, 25 bp, Homo sapien
gttggcatagagctaaaaggagcct

SEQ ID NO: 2478580 - DNA, 25 bp, Homo sapien
ccagtattccatacattggacatga

SEQ ID NO: 2478581 - DNA, 25 bp, Homo sapien
cttttctaaaagttggcatagagct

SEQ ID NO: 2478582 - DNA, 25 bp, Homo sapien
gccttgtagtagctctttgctgtca

SEQ ID NO: 2478583 - DNA, 25 bp, Homo sapien
ggtttccacaaacaatagacggtca

SEQ ID NO: 2478584 - DNA, 25 bp, Homo sapien
tagaccttcccttagctgctggcaa

SEQ ID NO: 2478585 - DNA, 25 bp, Homo sapien
caacctgagagggagcattgaccca

SEQ ID NO: 2478586 - DNA, 25 bp, Homo sapien
tctggaagaaaggacctagaccttc

SEQ ID NO: 2478587 - DNA, 25 bp, Homo sapien
ctctcaactgcccattgtaagatgt

SEQ ID NO: 2478588 - DNA, 25 bp, Homo sapien
ctgcccattgtaagatgtcaggagg

SEQ ID NO: 2478589 - DNA, 25 bp, Homo sapien
gaggacccgggtgacagctgggccc

SEQ ID NO: 2478590 - DNA, 25 bp, Homo sapien
tcaactgcccattgtaagatgtcag

SEQ ID NO: 2478591 - DNA, 25 bp, Homo sapien
atgagagtgaagatttgataattct

SEQ ID NO: 2478592 - DNA, 25 bp, Homo sapien
tcagttatccaaggttgcctttccc

SEQ ID NO: 2478593 - DNA, 25 bp, Homo sapien
gggcagactggccacccagaaacag

SEQ ID NO: 2478594 - DNA, 25 bp, Homo sapien
tgtatactgatctctgcttatctgc

SEQ ID NO: 2478595 - DNA, 25 bp, Homo sapien
tagatcccaaatatacccagagcct

SEQ ID NO: 2478596 - DNA, 25 bp, Homo sapien
cctcattctctgggtagatcccaaa

SEQ ID NO: 2478597 - DNA, 25 bp, Homo sapien
atcccaaatatacccagagcctcca

SEQ ID NO: 2478598 - DNA, 25 bp, Homo sapien
tgggtagatcccaaatatacccaga

SEQ ID NO: 2478599 - DNA, 25 bp, Homo sapien
tctatcaaagtctcctggatcctcc

SEQ ID NO: 2478600 - DNA, 25 bp, Homo sapien
tctctatcaaagtctcctggatcct

SEQ ID NO: 2478601 - DNA, 25 bp, Homo sapien
ttttccttctctatcaaagtctcct

SEQ ID NO: 2478602 - DNA, 25 bp, Homo sapien
ccttctctatcaaagtctcctggat

SEQ ID NO: 2478603 - DNA, 25 bp, Homo sapien
gattgaggcaatgggtagcctgtcc

SEQ ID NO: 2478604 - DNA, 25 bp, Homo sapien
aggcaatgggtagcctgtcctttgg

SEQ ID NO: 2478605 - DNA, 25 bp, Homo sapien
taaagattgaggcaatgggtagcct

SEQ ID NO: 2478606 - DNA, 25 bp, Homo sapien
ctaaacggtaaagattgaggcaatg

SEQ ID NO: 2478607 - DNA, 25 bp, Homo sapien
tctcgggcatacaagagttctctgt

SEQ ID NO: 2478608 - DNA, 25 bp, Homo sapien
aaacgagtggtatgaggtatccttc

SEQ ID NO: 2478609 - DNA, 25 bp, Homo sapien
cttactaacaatataatctcgggca

SEQ ID NO: 2478610 - DNA, 25 bp, Homo sapien
tgttccttgacccagctataattgt

SEQ ID NO: 2478611 - DNA, 25 bp, Homo sapien
tgctgctatctttgtaggtcatcag

SEQ ID NO: 2478612 - DNA, 25 bp, Homo sapien
taggtcatcagggaccagggagttt

SEQ ID NO: 2478613 - DNA, 25 bp, Homo sapien
ctagctgctgctatctttgtaggtc

SEQ ID NO: 2478614 - DNA, 25 bp, Homo sapien
cattttgctcccatgttcatgctaa

SEQ ID NO: 2478615 - DNA, 25 bp, Homo sapien
tgagttgagaatgataccactttgc

SEQ ID NO: 2478616 - DNA, 25 bp, Homo sapien
ctaatgtggcctggatttagatttt

SEQ ID NO: 2478617 - DNA, 25 bp, Homo sapien
taatgtggcctggatttagattttc

SEQ ID NO: 2478618 - DNA, 25 bp, Homo sapien
cattgttcttggtagtttctaatcc

SEQ ID NO: 2478619 - DNA, 25 bp, Homo sapien
tcccaaactgactgaactacattgt

SEQ ID NO: 2478620 - DNA, 25 bp, Homo sapien
gtcgtctaaactgcaatcagtactg

SEQ ID NO: 2478621 - DNA, 25 bp, Homo sapien
tggaagtcgtctaaactgcaatcag

SEQ ID NO: 2478622 - DNA, 25 bp, Homo sapien
gtctaaactgcaatcagtactgtca

SEQ ID NO: 2478623 - DNA, 25 bp, Homo sapien
ggcttggaagtcgtctaaactgcaa

SEQ ID NO: 2478624 - DNA, 25 bp, Homo sapien
tacaattggagggatcagacataac

SEQ ID NO: 2478625 - DNA, 25 bp, Homo sapien
acaattggagggatcagacataaca

SEQ ID NO: 2478626 - DNA, 25 bp, Homo sapien
caattggagggatcagacataacat

SEQ ID NO: 2478627 - DNA, 25 bp, Homo sapien
ctacaattggagggatcagacataa

SEQ ID NO: 2478628 - DNA, 25 bp, Homo sapien
ttgggctccattggtgtttaaagta

SEQ ID NO: 2478629 - DNA, 25 bp, Homo sapien
tgggctccattggtgtttaaagtag

SEQ ID NO: 2478630 - DNA, 25 bp, Homo sapien
gggctccattggtgtttaaagtaga

SEQ ID NO: 2478631 - DNA, 25 bp, Homo sapien
gctccattggtgtttaaagtagagg

SEQ ID NO: 2478632 - DNA, 25 bp, Homo sapien
tatgtactgctttacggaaatcata

SEQ ID NO: 2478633 - DNA, 25 bp, Homo sapien
atgtactgctttacggaaatcatac

SEQ ID NO: 2478634 - DNA, 25 bp, Homo sapien
tattcagttgcctcacaaagcttgc

SEQ ID NO: 2478635 - DNA, 25 bp, Homo sapien
atattcagttgcctcacaaagcttg

SEQ ID NO: 2478636 - DNA, 25 bp, Homo sapien
ttcagttgcctcacaaagcttgcca

SEQ ID NO: 2478637 - DNA, 25 bp, Homo sapien
tcagttgcctcacaaagcttgccat

SEQ ID NO: 2478638 - DNA, 25 bp, Homo sapien
tattgtgcttgaaatatttgggaag

SEQ ID NO: 2478639 - DNA, 25 bp, Homo sapien
tttcttttgcaaatcgttgctcatc

SEQ ID NO: 2478640 - DNA, 25 bp, Homo sapien
ttgcaaatcgttgctcatccaagac

SEQ ID NO: 2478641 - DNA, 25 bp, Homo sapien
catccaagaccagaaaactttggcc

SEQ ID NO: 2478642 - DNA, 25 bp, Homo sapien
gaaagttggcagttcaaactctgct

SEQ ID NO: 2478643 - DNA, 25 bp, Homo sapien
aagttggcagttcaaactctgcttc

SEQ ID NO: 2478644 - DNA, 25 bp, Homo sapien
cttgctgaggaaagttggcagttca

SEQ ID NO: 2478645 - DNA, 25 bp, Homo sapien
aggaaagttggcagttcaaactctg

SEQ ID NO: 2478646 - DNA, 25 bp, Homo sapien
cttgttaacaggtgcacagggattc

SEQ ID NO: 2478647 - DNA, 25 bp, Homo sapien
tttttctcagataggtcttggctat

SEQ ID NO: 2478648 - DNA, 25 bp, Homo sapien
acttcagggaccaaaagttgaccag

SEQ ID NO: 2478649 - DNA, 25 bp, Homo sapien
cagggaccaaaagttgaccaggctt

SEQ ID NO: 2478650 - DNA, 25 bp, Homo sapien
tttctcagataggtcttggctatga

SEQ ID NO: 2478651 - DNA, 25 bp, Homo sapien
aaacagattagagcactttttctgt

SEQ ID NO: 2478652 - DNA, 25 bp, Homo sapien
tcaagatctcatgtattgacatcct

SEQ ID NO: 2478653 - DNA, 25 bp, Homo sapien
tcatgtattgacatccttgtgaatg

SEQ ID NO: 2478654 - DNA, 25 bp, Homo sapien
ctcagtcatgatcaagatctcatgt

SEQ ID NO: 2478655 - DNA, 25 bp, Homo sapien
tgtctaagagagttcctttgggtta

SEQ ID NO: 2478656 - DNA, 25 bp, Homo sapien
ccgtttgtctaagagagttcctttg

SEQ ID NO: 2478657 - DNA, 25 bp, Homo sapien
tctaagagagttcctttgggttatc

SEQ ID NO: 2478658 - DNA, 25 bp, Homo sapien
ttaggccgtttgtctaagagagttc

SEQ ID NO: 2478659 - DNA, 25 bp, Homo sapien
cctcaaggtatagataacaggattc

SEQ ID NO: 2478660 - DNA, 25 bp, Homo sapien
caaagcaggtgtgaccattgtgtac

SEQ ID NO: 2478661 - DNA, 25 bp, Homo sapien
ctttgtctgtttctggagtgtgtgc

SEQ ID NO: 2478662 - DNA, 25 bp, Homo sapien
gataagtgaacaaggcagtgccata

SEQ ID NO: 2478663 - DNA, 25 bp, Homo sapien
tttgggaggtatcaatacaagccag

SEQ ID NO: 2478664 - DNA, 25 bp, Homo sapien
aagggattctcaagatggtcacagg

SEQ ID NO: 2478665 - DNA, 25 bp, Homo sapien
gactcacaataaatagcacggagag

SEQ ID NO: 2478666 - DNA, 25 bp, Homo sapien
tgtgggagcacagaatgaggaaaca

SEQ ID NO: 2478667 - DNA, 25 bp, Homo sapien
cacactggtggtatagcacatctcc

SEQ ID NO: 2478668 - DNA, 25 bp, Homo sapien
tccagtgaaccaagatgctgcagcc

SEQ ID NO: 2478669 - DNA, 25 bp, Homo sapien
gatcgtaagccatagctgctagcaa

SEQ ID NO: 2478670 - DNA, 25 bp, Homo sapien
tttcaaacaaacacgagggcccatg

SEQ ID NO: 2478671 - DNA, 25 bp, Homo sapien
ctatggtgggctcagagctaaacat

SEQ ID NO: 2478672 - DNA, 25 bp, Homo sapien
gcggggcagtcctcgaagacagtcc

SEQ ID NO: 2478673 - DNA, 25 bp, Homo sapien
ggacactgcccgcaaggcaggcggg

SEQ ID NO: 2478674 - DNA, 25 bp, Homo sapien
ggaatgaagtcgtgaatgtccctca

SEQ ID NO: 2478675 - DNA, 25 bp, Homo sapien
gtcctcgaagacagtcccccatggg

SEQ ID NO: 2478676 - DNA, 25 bp, Homo sapien
ctaaatctcatagttttctacattc

SEQ ID NO: 2478677 - DNA, 25 bp, Homo sapien
acattctcttcatccaagccggtgc

SEQ ID NO: 2478678 - DNA, 25 bp, Homo sapien
atctcatagttttctacattctctt

SEQ ID NO: 2478679 - DNA, 25 bp, Homo sapien
ctcatagttttctacattctcttca

SEQ ID NO: 2478680 - DNA, 25 bp, Homo sapien
aacacaaattcttttgtaatacatc

SEQ ID NO: 2478681 - DNA, 25 bp, Homo sapien
aaacacaaattcttttgtaatacat

SEQ ID NO: 2478682 - DNA, 25 bp, Homo sapien
gtgtcaccacagctaaggtaaaaga

SEQ ID NO: 2478683 - DNA, 25 bp, Homo sapien
tacagctaccgtatgtcatggagac

SEQ ID NO: 2478684 - DNA, 25 bp, Homo sapien
caattgaggtatagagcaaagctac

SEQ ID NO: 2478685 - DNA, 25 bp, Homo sapien
caaagctacacctttggatacagtc

SEQ ID NO: 2478686 - DNA, 25 bp, Homo sapien
gaatctaggaatacacactgttgtg

SEQ ID NO: 2478687 - DNA, 25 bp, Homo sapien
tgggtcatctgtcaatcctaggaga

SEQ ID NO: 2478688 - DNA, 25 bp, Homo sapien
tccccatcaggctcaaggtgtagtt

SEQ ID NO: 2478689 - DNA, 25 bp, Homo sapien
tccagttacccaagagctaagtaca

SEQ ID NO: 2478690 - DNA, 25 bp, Homo sapien
ttctcttttgtgatccttatcaaat

SEQ ID NO: 2478691 - DNA, 25 bp, Homo sapien
aacaaaatttatacatatatataca

SEQ ID NO: 2478692 - DNA, 25 bp, Homo sapien
gaaaaacaaaatttatacatatata

SEQ ID NO: 2478693 - DNA, 25 bp, Homo sapien
caaaatttatacatatatatacata

SEQ ID NO: 2478694 - DNA, 25 bp, Homo sapien
tcatggtaatggcttaagtatttct

SEQ ID NO: 2478695 - DNA, 25 bp, Homo sapien
gattttcaataaagtggacgtagga

SEQ ID NO: 2478696 - DNA, 25 bp, Homo sapien
ggtaatggcttaagtatttctgatt

SEQ ID NO: 2478697 - DNA, 25 bp, Homo sapien
caataaagtggacgtaggagttgga

SEQ ID NO: 2478698 - DNA, 25 bp, Homo sapien
aactccagctccgtacttggatatt

SEQ ID NO: 2478699 - DNA, 25 bp, Homo sapien
aaactccagctccgtacttggatat

SEQ ID NO: 2478700 - DNA, 25 bp, Homo sapien
actccagctccgtacttggatattt

SEQ ID NO: 2478701 - DNA, 25 bp, Homo sapien
tttgttctttgtactttctcttgta

SEQ ID NO: 2478702 - DNA, 25 bp, Homo sapien
agtttgttctttgtactttctcttg

SEQ ID NO: 2478703 - DNA, 25 bp, Homo sapien
tgttctttgtactttctcttgtagg

SEQ ID NO: 2478704 - DNA, 25 bp, Homo sapien
tcaagtttgttctttgtactttctc

SEQ ID NO: 2478705 - DNA, 25 bp, Homo sapien
gctatgtggccatctgcaagcctct

SEQ ID NO: 2478706 - DNA, 25 bp, Homo sapien
tgtggccatctgcaagcctctgcat

SEQ ID NO: 2478707 - DNA, 25 bp, Homo sapien
gtcctatgaccgctatgtggccatc

SEQ ID NO: 2478708 - DNA, 25 bp, Homo sapien
tatgtggccatctgcaagcctctgc

SEQ ID NO: 2478709 - DNA, 25 bp, Homo sapien
ttgtctatggcctcctgatcagcag

SEQ ID NO: 2478710 - DNA, 25 bp, Homo sapien
ctcttcctaataagtgccctttgtg

SEQ ID NO: 2478711 - DNA, 25 bp, Homo sapien
gaaactgcttcttcggttaatctcc

SEQ ID NO: 2478712 - DNA, 25 bp, Homo sapien
tctggaatagtgcacttttgtctgc

SEQ ID NO: 2478713 - DNA, 25 bp, Homo sapien
cttgtcaggactttggtccgacttg

SEQ ID NO: 2478714 - DNA, 25 bp, Homo sapien
tcaggactttggtccgacttgggat

SEQ ID NO: 2478715 - DNA, 25 bp, Homo sapien
gactttggtccgacttgggattcaa

SEQ ID NO: 2478716 - DNA, 25 bp, Homo sapien
ggactttggtccgacttgggattca

SEQ ID NO: 2478717 - DNA, 25 bp, Homo sapien
tagcaacagaagttttcctttattg

SEQ ID NO: 2478718 - DNA, 25 bp, Homo sapien
ttaggcaattatttgttttagcaac

SEQ ID NO: 2478719 - DNA, 25 bp, Homo sapien
tcctttattgttcttctcatctttt

SEQ ID NO: 2478720 - DNA, 25 bp, Homo sapien
taggcaattatttgttttagcaaca

SEQ ID NO: 2478721 - DNA, 25 bp, Homo sapien
tgtttccctatatttctggccacca

SEQ ID NO: 2478722 - DNA, 25 bp, Homo sapien
tagaaataacctttacaactctctg

SEQ ID NO: 2478723 - DNA, 25 bp, Homo sapien
caactctctgtttccctatatttct

SEQ ID NO: 2478724 - DNA, 25 bp, Homo sapien
cctttacaactctctgtttccctat

SEQ ID NO: 2478725 - DNA, 25 bp, Homo sapien
tctgtgcctccaatgtaattgatca

SEQ ID NO: 2478726 - DNA, 25 bp, Homo sapien
tacccttcttgtctttagctcctgg

SEQ ID NO: 2478727 - DNA, 25 bp, Homo sapien
tcattacacaatcatcatgagcacc

SEQ ID NO: 2478728 - DNA, 25 bp, Homo sapien
tctgctgcagttggatttctgtgcc

SEQ ID NO: 2478729 - DNA, 25 bp, Homo sapien
ctatattcttcagggcttgtttcac

SEQ ID NO: 2478730 - DNA, 25 bp, Homo sapien
catttcaaagtagtaaagatatact

SEQ ID NO: 2478731 - DNA, 25 bp, Homo sapien
cttttttactatattcttcagggct

SEQ ID NO: 2478732 - DNA, 25 bp, Homo sapien
atttcaaagtagtaaagatatactt

SEQ ID NO: 2478733 - DNA, 25 bp, Homo sapien
ttgctactcccttgtttaaagctac

SEQ ID NO: 2478734 - DNA, 25 bp, Homo sapien
gaagtgctgagtattgctactccct

SEQ ID NO: 2478735 - DNA, 25 bp, Homo sapien
atttaatacaggtgcaactgaagtg

SEQ ID NO: 2478736 - DNA, 25 bp, Homo sapien
tacagctgccgtaagagatggaaac

SEQ ID NO: 2478737 - DNA, 25 bp, Homo sapien
gcttaacatttctatgacctgtgtg

SEQ ID NO: 2478738 - DNA, 25 bp, Homo sapien
gaccaatgtaatcaggagtgtgaca

SEQ ID NO: 2478739 - DNA, 25 bp, Homo sapien
tgtgacagtggctaaaataaagctt

SEQ ID NO: 2478740 - DNA, 25 bp, Homo sapien
taggagtacattaccaggaccaatg

SEQ ID NO: 2478741 - DNA, 25 bp, Homo sapien
aaagatcattaacaaaccagcccac

SEQ ID NO: 2478742 - DNA, 25 bp, Homo sapien
aggaaagatcattaacaaaccagcc

SEQ ID NO: 2478743 - DNA, 25 bp, Homo sapien
gaaagatcattaacaaaccagccca

SEQ ID NO: 2478744 - DNA, 25 bp, Homo sapien
ggaaagatcattaacaaaccagccc

SEQ ID NO: 2478745 - DNA, 25 bp, Homo sapien
ctgttgctcataatgaatgcataat

SEQ ID NO: 2478746 - DNA, 25 bp, Homo sapien
gccatctggttgcagactctgttgc

SEQ ID NO: 2478747 - DNA, 25 bp, Homo sapien
cataatgaatgcataatgcaggggt

SEQ ID NO: 2478748 - DNA, 25 bp, Homo sapien
cagccatctggttgcagactctgtt

SEQ ID NO: 2478749 - DNA, 25 bp, Homo sapien
gaaatagttttatccatagtcactt

SEQ ID NO: 2478750 - DNA, 25 bp, Homo sapien
aatagttttatccatagtcactttg

SEQ ID NO: 2478751 - DNA, 25 bp, Homo sapien
aaatagttttatccatagtcacttt

SEQ ID NO: 2478752 - DNA, 25 bp, Homo sapien
atcacctgtcagtcctagaagaatg

SEQ ID NO: 2478753 - DNA, 25 bp, Homo sapien
tgagcaggataatgattagatttcc

SEQ ID NO: 2478754 - DNA, 25 bp, Homo sapien
agtttgccagtgtaaatcacctgtc

SEQ ID NO: 2478755 - DNA, 25 bp, Homo sapien
ggcttcactgagcataggtttaaaa

SEQ ID NO: 2478756 - DNA, 25 bp, Homo sapien
ttcccagattccttgtcaccatcgt

SEQ ID NO: 2478757 - DNA, 25 bp, Homo sapien
cccagattccttgtcaccatcgtga

SEQ ID NO: 2478758 - DNA, 25 bp, Homo sapien
attcccagattccttgtcaccatcg

SEQ ID NO: 2478759 - DNA, 25 bp, Homo sapien
tcccagattccttgtcaccatcgtg

SEQ ID NO: 2478760 - DNA, 25 bp, Homo sapien
tccttttctgagagcaccgttattt

SEQ ID NO: 2478761 - DNA, 25 bp, Homo sapien
ttttctgagagcaccgttatttagc

SEQ ID NO: 2478762 - DNA, 25 bp, Homo sapien
aaattgacaccatcatcattacttc

SEQ ID NO: 2478763 - DNA, 25 bp, Homo sapien
ttctgagagcaccgttatttagcat

SEQ ID NO: 2478764 - DNA, 25 bp, Homo sapien
gatgttctagacttgcttctcccac

SEQ ID NO: 2478765 - DNA, 25 bp, Homo sapien
cagtgattacttggttgcagtccaa

SEQ ID NO: 2478766 - DNA, 25 bp, Homo sapien
tatagtagcctccatgagaatctgg

SEQ ID NO: 2478767 - DNA, 25 bp, Homo sapien
tagtctgagcctggagatgttctag

SEQ ID NO: 2478768 - DNA, 25 bp, Homo sapien
ggattatacggtaccatcacatcat

SEQ ID NO: 2478769 - DNA, 25 bp, Homo sapien
tatctgtccacatacagccaaaatg

SEQ ID NO: 2478770 - DNA, 25 bp, Homo sapien
tgggattgggctaaggactgtggtc

SEQ ID NO: 2478771 - DNA, 25 bp, Homo sapien
atttcccaattacaggattatacgg

SEQ ID NO: 2478772 - DNA, 25 bp, Homo sapien
gaaaattggtactcctgtgccacag

SEQ ID NO: 2478773 - DNA, 25 bp, Homo sapien
ccagaaatccagttcgttggaaagg

SEQ ID NO: 2478774 - DNA, 25 bp, Homo sapien
gaaaggaaaattggtactcctgtgc

SEQ ID NO: 2478775 - DNA, 25 bp, Homo sapien
cagaaatccagttcgttggaaagga

SEQ ID NO: 2478776 - DNA, 25 bp, Homo sapien
cactgaagagtaacatggctccact

SEQ ID NO: 2478777 - DNA, 25 bp, Homo sapien
gctccactggacacaaaagagggat

SEQ ID NO: 2478778 - DNA, 25 bp, Homo sapien
tctttaatagtgaacccctgggcca

SEQ ID NO: 2478779 - DNA, 25 bp, Homo sapien
cttctagaaagggaacggaagcaga

SEQ ID NO: 2478780 - DNA, 25 bp, Homo sapien
caaccaagtctctatactggctggg

SEQ ID NO: 2478781 - DNA, 25 bp, Homo sapien
tataaggaatagtgcctaaggcagg

SEQ ID NO: 2478782 - DNA, 25 bp, Homo sapien
aatacttttagtccctgcagcagaa

SEQ ID NO: 2478783 - DNA, 25 bp, Homo sapien
gaaaatgtcaaagctgccgccatgt

SEQ ID NO: 2478784 - DNA, 25 bp, Homo sapien
gaagcaataaactcgtacacctcct

SEQ ID NO: 2478785 - DNA, 25 bp, Homo sapien
cactccaacggctgggattactgga

SEQ ID NO: 2478786 - DNA, 25 bp, Homo sapien
tatcttggcgcagatcttgagggca

SEQ ID NO: 2478787 - DNA, 25 bp, Homo sapien
tctcctgtgagcgaaattcctctgc

SEQ ID NO: 2478788 - DNA, 25 bp, Homo sapien
gctcttactgataaaggcccaggag

SEQ ID NO: 2478789 - DNA, 25 bp, Homo sapien
gggattccccaggtcacgttctcca

SEQ ID NO: 2478790 - DNA, 25 bp, Homo sapien
catgtaattccggtgtaggtggagc

SEQ ID NO: 2478791 - DNA, 25 bp, Homo sapien
ggaattatctgaaccccggctagag

SEQ ID NO: 2478792 - DNA, 25 bp, Homo sapien
tttcctcttcagccggaactgatgg

SEQ ID NO: 2478793 - DNA, 25 bp, Homo sapien
gggtccacgcctgcgaacgcgagca

SEQ ID NO: 2478794 - DNA, 25 bp, Homo sapien
gcatagttggcttcttgaaactctt

SEQ ID NO: 2478795 - DNA, 25 bp, Homo sapien
ttggcacgggcaatgtcagaggagc

SEQ ID NO: 2478796 - DNA, 25 bp, Homo sapien
taacaaagccttcaatgatgtgggt

SEQ ID NO: 2478797 - DNA, 25 bp, Homo sapien
tagcgcaagtcatggagcagaacct

SEQ ID NO: 2478798 - DNA, 25 bp, Homo sapien
ttagagccacgaaactgctctgcgg

SEQ ID NO: 2478799 - DNA, 25 bp, Homo sapien
tctcagtcagccctgtcggaaggcc

SEQ ID NO: 2478800 - DNA, 25 bp, Homo sapien
ctccaagactgctcttctcgtccat

SEQ ID NO: 2478801 - DNA, 25 bp, Homo sapien
tccaagactgctcttctcgtccatg

SEQ ID NO: 2478802 - DNA, 25 bp, Homo sapien
tttgggctttctgctactggagatg

SEQ ID NO: 2478803 - DNA, 25 bp, Homo sapien
gatgccttggcaggaagcattgaac

SEQ ID NO: 2478804 - DNA, 25 bp, Homo sapien
tgaacccaatgtggagacatcatct

SEQ ID NO: 2478805 - DNA, 25 bp, Homo sapien
gctttctgctactggagatgccttg

SEQ ID NO: 2478806 - DNA, 25 bp, Homo sapien
gccaatgtgggagggcactcctgca

SEQ ID NO: 2478807 - DNA, 25 bp, Homo sapien
tacctggctgtcgagtgcctacaac

SEQ ID NO: 2478808 - DNA, 25 bp, Homo sapien
aacgaccagggtttgggcttgctgc

SEQ ID NO: 2478809 - DNA, 25 bp, Homo sapien
aaatgggcctgaccagactgcactg

SEQ ID NO: 2478810 - DNA, 25 bp, Homo sapien
ctgctgcgccaactggaggtgtgta

SEQ ID NO: 2478811 - DNA, 25 bp, Homo sapien
ctgcgccaactggaggtgtgtagct

SEQ ID NO: 2478812 - DNA, 25 bp, Homo sapien
tgctgcgccaactggaggtgtgtag

SEQ ID NO: 2478813 - DNA, 25 bp, Homo sapien
gaggtgtgtagctgtgtgaaggagc

SEQ ID NO: 2478814 - DNA, 25 bp, Homo sapien
gctaataagtgtctggctgggcgca

SEQ ID NO: 2478815 - DNA, 25 bp, Homo sapien
gtgtggctgtccgtgtcaggttcat

SEQ ID NO: 2478816 - DNA, 25 bp, Homo sapien
caggttcatgcccacattctgctgg

SEQ ID NO: 2478817 - DNA, 25 bp, Homo sapien
gctgccctggctcacagtcactgtt

SEQ ID NO: 2478818 - DNA, 25 bp, Homo sapien
tgcaggcaagggctgcaccactcct

SEQ ID NO: 2478819 - DNA, 25 bp, Homo sapien
ggcaagggctgcaccactcctgtac

SEQ ID NO: 2478820 - DNA, 25 bp, Homo sapien
ctgcaccactcctgtacccttcctg

SEQ ID NO: 2478821 - DNA, 25 bp, Homo sapien
gggctgcaccactcctgtacccttc

SEQ ID NO: 2478822 - DNA, 25 bp, Homo sapien
gcaactgacccaaaccaccatgtgc

SEQ ID NO: 2478823 - DNA, 25 bp, Homo sapien
ggcaactgacccaaaccaccatgtg

SEQ ID NO: 2478824 - DNA, 25 bp, Homo sapien
ctgaggaaggcaactgacccaaacc

SEQ ID NO: 2478825 - DNA, 25 bp, Homo sapien
ggaaggcaactgacccaaaccacca

SEQ ID NO: 2478826 - DNA, 25 bp, Homo sapien
tgggaggctagaggcacattccgac

SEQ ID NO: 2478827 - DNA, 25 bp, Homo sapien
tctgcatctgcatgaactccaggag

SEQ ID NO: 2478828 - DNA, 25 bp, Homo sapien
gccccattaggcatcaggatgagtt

SEQ ID NO: 2478829 - DNA, 25 bp, Homo sapien
tccaccagcttgactaaggttgagg

SEQ ID NO: 2478830 - DNA, 25 bp, Homo sapien
ggagagctcacactctgggatcggc

SEQ ID NO: 2478831 - DNA, 25 bp, Homo sapien
atctgggcctgagactggttgaggg

SEQ ID NO: 2478832 - DNA, 25 bp, Homo sapien
tgttccccagtagcacagattgggt

SEQ ID NO: 2478833 - DNA, 25 bp, Homo sapien
agattgggtcaaggtggtagcactg

SEQ ID NO: 2478834 - DNA, 25 bp, Homo sapien
tcccctccctctcgggccagctggc

SEQ ID NO: 2478835 - DNA, 25 bp, Homo sapien
tgtcccctccctctcgggccagctg

SEQ ID NO: 2478836 - DNA, 25 bp, Homo sapien
ccctccctctcgggccagctggctg

SEQ ID NO: 2478837 - DNA, 25 bp, Homo sapien
ctgtagtgcctgtcccctccctctc

SEQ ID NO: 2478838 - DNA, 25 bp, Homo sapien
gctgccgctgcagtgcttgcagagc

SEQ ID NO: 2478839 - DNA, 25 bp, Homo sapien
tgagctagaactcccattggtggaa

SEQ ID NO: 2478840 - DNA, 25 bp, Homo sapien
gcagccaggctatgcagctgggcat

SEQ ID NO: 2478841 - DNA, 25 bp, Homo sapien
ctgctggagcatgaactggtggaaa

SEQ ID NO: 2478842 - DNA, 25 bp, Homo sapien
tggtgctctgtctgactcaagacct

SEQ ID NO: 2478843 - DNA, 25 bp, Homo sapien
gtctgactcaagaccttctcgcctg

SEQ ID NO: 2478844 - DNA, 25 bp, Homo sapien
atgtgccggggtccccagtcgccag

SEQ ID NO: 2478845 - DNA, 25 bp, Homo sapien
ggcgtccacctcatgtgccggggtc

SEQ ID NO: 2478846 - DNA, 25 bp, Homo sapien
tctgctgcgagtaaggaatccctgt

SEQ ID NO: 2478847 - DNA, 25 bp, Homo sapien
taatgatctccgcagcacagaatcc

SEQ ID NO: 2478848 - DNA, 25 bp, Homo sapien
ctctgtcatgccagttagctaaaca

SEQ ID NO: 2478849 - DNA, 25 bp, Homo sapien
cttcctctcccgaaaatgcacattt

SEQ ID NO: 2478850 - DNA, 25 bp, Homo sapien
tggccagtatgctctgttagcatct

SEQ ID NO: 2478851 - DNA, 25 bp, Homo sapien
tcctctcctaaagatctcatgctca

SEQ ID NO: 2478852 - DNA, 25 bp, Homo sapien
gatcattgttccaccacttagctta

SEQ ID NO: 2478853 - DNA, 25 bp, Homo sapien
atgccattgatcattttagctgtga

SEQ ID NO: 2478854 - DNA, 25 bp, Homo sapien
ggcttgatgatcattgttccaccac

SEQ ID NO: 2478855 - DNA, 25 bp, Homo sapien
caaaactggacttttgagagagaat

SEQ ID NO: 2478856 - DNA, 25 bp, Homo sapien
cacgtatattcctaatgataacacc

SEQ ID NO: 2478857 - DNA, 25 bp, Homo sapien
tgttggagagtacagtagactgact

SEQ ID NO: 2478858 - DNA, 25 bp, Homo sapien
tgataacaccaacagatactaggca

SEQ ID NO: 2478859 - DNA, 25 bp, Homo sapien
cattcgatgagcttatacagataat

SEQ ID NO: 2478860 - DNA, 25 bp, Homo sapien
tgagcttatacagataatgaaacat

SEQ ID NO: 2478861 - DNA, 25 bp, Homo sapien
tcattcgatgagcttatacagataa

SEQ ID NO: 2478862 - DNA, 25 bp, Homo sapien
tcgatgagcttatacagataatgaa

SEQ ID NO: 2478863 - DNA, 25 bp, Homo sapien
ttgtctgaagcagaaaatatctttc

SEQ ID NO: 2478864 - DNA, 25 bp, Homo sapien
atacagctttgaaggcttgtttaac

SEQ ID NO: 2478865 - DNA, 25 bp, Homo sapien
taaatacagctttgaaggcttgttt

SEQ ID NO: 2478866 - DNA, 25 bp, Homo sapien
ttacttgtctgaagcagaaaatatc

SEQ ID NO: 2478867 - DNA, 25 bp, Homo sapien
aactgaagtattgagcacagttact

SEQ ID NO: 2478868 - DNA, 25 bp, Homo sapien
ggctttatgtagataaacatacaac

SEQ ID NO: 2478869 - DNA, 25 bp, Homo sapien
gcaactctttcattcgctgatggct

SEQ ID NO: 2478870 - DNA, 25 bp, Homo sapien
tacaactaccataagtgatggagac

SEQ ID NO: 2478871 - DNA, 25 bp, Homo sapien
agttgtaggataagagaaatgtcac

SEQ ID NO: 2478872 - DNA, 25 bp, Homo sapien
caatgtgacaataagtgtcatcaca

SEQ ID NO: 2478873 - DNA, 25 bp, Homo sapien
tgatgtaagagtaagaaaggattac

SEQ ID NO: 2478874 - DNA, 25 bp, Homo sapien
cagttccagtaaatgtgtgtctgag

SEQ ID NO: 2478875 - DNA, 25 bp, Homo sapien
gcgatcataggacagagcagctaga

SEQ ID NO: 2478876 - DNA, 25 bp, Homo sapien
tgagaattatccgtcagtcccagaa

SEQ ID NO: 2478877 - DNA, 25 bp, Homo sapien
tgagatatgcaaccattacaggaaa

SEQ ID NO: 2478878 - DNA, 25 bp, Homo sapien
catgatggacatataacgcaaaggt

SEQ ID NO: 2478879 - DNA, 25 bp, Homo sapien
atacatttaagaggtagtactccat

SEQ ID NO: 2478880 - DNA, 25 bp, Homo sapien
aaacatatacatttaagaggtagta

SEQ ID NO: 2478881 - DNA, 25 bp, Homo sapien
catatacatttaagaggtagtactc

SEQ ID NO: 2478882 - DNA, 25 bp, Homo sapien
tatacatttaagaggtagtactcca

SEQ ID NO: 2478883 - DNA, 25 bp, Homo sapien
ctttcttttcctctagaatacatga

SEQ ID NO: 2478884 - DNA, 25 bp, Homo sapien
cttttcctctagaatacatgaacaa

SEQ ID NO: 2478885 - DNA, 25 bp, Homo sapien
cataagcagtatataatgatattcc

SEQ ID NO: 2478886 - DNA, 25 bp, Homo sapien
ttcttttcctctagaatacatgaac

SEQ ID NO: 2478887 - DNA, 25 bp, Homo sapien
cagaggcgctcctcgcatcccagat

SEQ ID NO: 2478888 - DNA, 25 bp, Homo sapien
aggcgctcctcgcatcccagatggg

SEQ ID NO: 2478889 - DNA, 25 bp, Homo sapien
cgctcctcgcatcccagatggggcg

SEQ ID NO: 2478890 - DNA, 25 bp, Homo sapien
gctcctcgcatcccagatggggcgg

SEQ ID NO: 2478891 - DNA, 25 bp, Homo sapien
tggtttccatcacttatggcagctg

SEQ ID NO: 2478892 - DNA, 25 bp, Homo sapien
actgtggtttccatcacttatggca

SEQ ID NO: 2478893 - DNA, 25 bp, Homo sapien
tgcatcttcatctatatcaagccat

SEQ ID NO: 2478894 - DNA, 25 bp, Homo sapien
tccatcacttatggcagctgcatct

SEQ ID NO: 2478895 - DNA, 25 bp, Homo sapien
aggattagacagacttttacccagg

SEQ ID NO: 2478896 - DNA, 25 bp, Homo sapien
tatctgtctgtacattaattgaaga

SEQ ID NO: 2478897 - DNA, 25 bp, Homo sapien
tacccaggttcacttgaacagccat

SEQ ID NO: 2478898 - DNA, 25 bp, Homo sapien
tgacacagaagaatcgaggctagcc

SEQ ID NO: 2478899 - DNA, 25 bp, Homo sapien
gaaaactgcatcacacgtaatttaa

SEQ ID NO: 2478900 - DNA, 25 bp, Homo sapien
caatgacaagcataggagaaaactg

SEQ ID NO: 2478901 - DNA, 25 bp, Homo sapien
gcatcacacgtaatttaacaagaac

SEQ ID NO: 2478902 - DNA, 25 bp, Homo sapien
gccagggagtcagttgcaggctcaa

SEQ ID NO: 2478903 - DNA, 25 bp, Homo sapien
ggacagcttgatcaccaactgctgg

SEQ ID NO: 2478904 - DNA, 25 bp, Homo sapien
gcactgctgtcaaggttcccataca

SEQ ID NO: 2478905 - DNA, 25 bp, Homo sapien
caaggttcccatacagccacagagg

SEQ ID NO: 2478906 - DNA, 25 bp, Homo sapien
cccacaggcttgaggcagccttgac

SEQ ID NO: 2478907 - DNA, 25 bp, Homo sapien
tggccaagttcattctcttctagtt

SEQ ID NO: 2478908 - DNA, 25 bp, Homo sapien
ctctggccaagttcattctcttcta

SEQ ID NO: 2478909 - DNA, 25 bp, Homo sapien
ttcattctcctctggccaagttcat

SEQ ID NO: 2478910 - DNA, 25 bp, Homo sapien
ctcctctggccaagttcattctctt

SEQ ID NO: 2478911 - DNA, 25 bp, Homo sapien
tgctaaaataggtaactgcctcccc

SEQ ID NO: 2478912 - DNA, 25 bp, Homo sapien
tgcctggcaggaaccaagcacttgg

SEQ ID NO: 2478913 - DNA, 25 bp, Homo sapien
cctgcaggatctcacagtggagtaa

SEQ ID NO: 2478914 - DNA, 25 bp, Homo sapien
aatgtttagcccttagcatggtgcc

SEQ ID NO: 2478915 - DNA, 25 bp, Homo sapien
gatggtttcaaacagctgttctgga

SEQ ID NO: 2478916 - DNA, 25 bp, Homo sapien
cagtgatgtggacaatgactcccat

SEQ ID NO: 2478917 - DNA, 25 bp, Homo sapien
tgcactcccagagggactcgcacat

SEQ ID NO: 2478918 - DNA, 25 bp, Homo sapien
tctggatccatgttgcactcccaga

SEQ ID NO: 2478919 - DNA, 25 bp, Homo sapien
gcacaggtgccactgaccataaagt

SEQ ID NO: 2478920 - DNA, 25 bp, Homo sapien
ctgcacaggtgccactgaccataaa

SEQ ID NO: 2478921 - DNA, 25 bp, Homo sapien
tgcacaggtgccactgaccataaag

SEQ ID NO: 2478922 - DNA, 25 bp, Homo sapien
tggctcagtatagtaggggccaaac

SEQ ID NO: 2478923 - DNA, 25 bp, Homo sapien
tcaggtccaacccagcaatgactgg

SEQ ID NO: 2478924 - DNA, 25 bp, Homo sapien
caatgactggctcagtatagtaggg

SEQ ID NO: 2478925 - DNA, 25 bp, Homo sapien
caacccagcaatgactggctcagta

SEQ ID NO: 2478926 - DNA, 25 bp, Homo sapien
tttctcagacaagaggccttggcca

SEQ ID NO: 2478927 - DNA, 25 bp, Homo sapien
tctcagacaagaggccttggccacc

SEQ ID NO: 2478928 - DNA, 25 bp, Homo sapien
catgctcatagggtataagatttga

SEQ ID NO: 2478929 - DNA, 25 bp, Homo sapien
tagggtataagatttgactgccgac

SEQ ID NO: 2478930 - DNA, 25 bp, Homo sapien
tgtctgcagctatagccaaacagct

SEQ ID NO: 2478931 - DNA, 25 bp, Homo sapien
tctcgatgtcagtgacgagccgggc

SEQ ID NO: 2478932 - DNA, 25 bp, Homo sapien
acttgaggcactggacaactgtctc

SEQ ID NO: 2478933 - DNA, 25 bp, Homo sapien
acgagccgggccagatggatataca

SEQ ID NO: 2478934 - DNA, 25 bp, Homo sapien
gcccctcggttatgggacataataa

SEQ ID NO: 2478935 - DNA, 25 bp, Homo sapien
cctcggttatgggacataataaaca

SEQ ID NO: 2478936 - DNA, 25 bp, Homo sapien
ctcggttatgggacataataaacat

SEQ ID NO: 2478937 - DNA, 25 bp, Homo sapien
gggtagataggaatttccacagtgc

SEQ ID NO: 2478938 - DNA, 25 bp, Homo sapien
aacagaatatgccacagggtagata

SEQ ID NO: 2478939 - DNA, 25 bp, Homo sapien
aatccaacagaatatgccacagggt

SEQ ID NO: 2478940 - DNA, 25 bp, Homo sapien
cacagggtagataggaatttccaca

SEQ ID NO: 2478941 - DNA, 25 bp, Homo sapien
tgcaaaagcctaacacatagacatg

SEQ ID NO: 2478942 - DNA, 25 bp, Homo sapien
ccaaatattgctggtggacgtgtaa

SEQ ID NO: 2478943 - DNA, 25 bp, Homo sapien
tgtacatggatctaaacacgtggtg

SEQ ID NO: 2478944 - DNA, 25 bp, Homo sapien
tactaagtgaatgtactgcctcttc

SEQ ID NO: 2478945 - DNA, 25 bp, Homo sapien
aaatcttgatgcgacaccagcagcc

SEQ ID NO: 2478946 - DNA, 25 bp, Homo sapien
ggaagccgatcctgccaaatcttga

SEQ ID NO: 2478947 - DNA, 25 bp, Homo sapien
tagagaaggagcagcctgagtcagt

SEQ ID NO: 2478948 - DNA, 25 bp, Homo sapien
gaaaccactagactgatggcagcaa

SEQ ID NO: 2478949 - DNA, 25 bp, Homo sapien
ggggctgccccagttgttcctcagg

SEQ ID NO: 2478950 - DNA, 25 bp, Homo sapien
cgggatgcccgtcagcagccaggat

SEQ ID NO: 2478951 - DNA, 25 bp, Homo sapien
gaggaatcttcaccgcatggtactg

SEQ ID NO: 2478952 - DNA, 25 bp, Homo sapien
ggtgcttcgcccgtttgaagaatcc

SEQ ID NO: 2478953 - DNA, 25 bp, Homo sapien
ctgcggcagaaaggaaataggctga

SEQ ID NO: 2478954 - DNA, 25 bp, Homo sapien
tggagcagatgcctagcgcggcaca

SEQ ID NO: 2478955 - DNA, 25 bp, Homo sapien
gccagaccatgaggagcctgaagag

SEQ ID NO: 2478956 - DNA, 25 bp, Homo sapien
tcaggaccggactcaagatttgtac

SEQ ID NO: 2478957 - DNA, 25 bp, Homo sapien
aataccctcttgtccatcaatacag

SEQ ID NO: 2478958 - DNA, 25 bp, Homo sapien
atcaatacagtagtctagccccacc

SEQ ID NO: 2478959 - DNA, 25 bp, Homo sapien
tgtccatcaatacagtagtctagcc

SEQ ID NO: 2478960 - DNA, 25 bp, Homo sapien
cttacagcaataccctcttgtccat

SEQ ID NO: 2478961 - DNA, 25 bp, Homo sapien
cagccagacaggcccggtgatagtt

SEQ ID NO: 2478962 - DNA, 25 bp, Homo sapien
gctctggctgctccgatggaagaag

SEQ ID NO: 2478963 - DNA, 25 bp, Homo sapien
caggcccggtgatagttggtgggaa

SEQ ID NO: 2478964 - DNA, 25 bp, Homo sapien
ttggtgggaaaagatgagctctggc

SEQ ID NO: 2478965 - DNA, 25 bp, Homo sapien
aaccaggaagtccacccccatcagc

SEQ ID NO: 2478966 - DNA, 25 bp, Homo sapien
ccaaccaggaagtccacccccatca

SEQ ID NO: 2478967 - DNA, 25 bp, Homo sapien
ccatcagccccacctccaagcctca

SEQ ID NO: 2478968 - DNA, 25 bp, Homo sapien
ccccatcagccccacctccaagcct

SEQ ID NO: 2478969 - DNA, 25 bp, Homo sapien
agcaccagcagtgctagcaccagca

SEQ ID NO: 2478970 - DNA, 25 bp, Homo sapien
acagccatggggtccaagtatacca

SEQ ID NO: 2478971 - DNA, 25 bp, Homo sapien
gggtccaagtataccatcactggga

SEQ ID NO: 2478972 - DNA, 25 bp, Homo sapien
gcaccagcagtgctagcaccagcag

SEQ ID NO: 2478973 - DNA, 25 bp, Homo sapien
tgttggcccggacaatcacttccag

SEQ ID NO: 2478974 - DNA, 25 bp, Homo sapien
gttctttatggaggacttcactgtg

SEQ ID NO: 2478975 - DNA, 25 bp, Homo sapien
ggcatctcggagcatcaagttcttt

SEQ ID NO: 2478976 - DNA, 25 bp, Homo sapien
actgtgatgttggcccggacaatca

SEQ ID NO: 2478977 - DNA, 25 bp, Homo sapien
cagcacagccgcgcggtcaaagctg

SEQ ID NO: 2478978 - DNA, 25 bp, Homo sapien
cacagccgcgcggtcaaagctgtag

SEQ ID NO: 2478979 - DNA, 25 bp, Homo sapien
agccgcgcggtcaaagctgtagagt

SEQ ID NO: 2478980 - DNA, 25 bp, Homo sapien
acacagttggccgtgccccgggcgc

SEQ ID NO: 2478981 - DNA, 25 bp, Homo sapien
tccaggaagtcttctcaaactaatc

SEQ ID NO: 2478982 - DNA, 25 bp, Homo sapien
ttgacctcaaactcccctcctccag

SEQ ID NO: 2478983 - DNA, 25 bp, Homo sapien
cctccaggaagtcttctcaaactaa

SEQ ID NO: 2478984 - DNA, 25 bp, Homo sapien
gacctcaaactcccctcctccagga

SEQ ID NO: 2478985 - DNA, 25 bp, Homo sapien
actggccaccaggacatgctgggct

SEQ ID NO: 2478986 - DNA, 25 bp, Homo sapien
cttcttctcagcagaggacactggc

SEQ ID NO: 2478987 - DNA, 25 bp, Homo sapien
gctcctgctgctcaggtggctccag

SEQ ID NO: 2478988 - DNA, 25 bp, Homo sapien
ggctcctgccgctcaccaggctcct

SEQ ID NO: 2478989 - DNA, 25 bp, Homo sapien
ttgggcctgggagagcaaagccctt

SEQ ID NO: 2478990 - DNA, 25 bp, Homo sapien
tgggagagcaaagccctttctgccc

SEQ ID NO: 2478991 - DNA, 25 bp, Homo sapien
agagcaaagccctttctgcccaggc

SEQ ID NO: 2478992 - DNA, 25 bp, Homo sapien
aggatgttgggcctgggagagcaaa

SEQ ID NO: 2478993 - DNA, 25 bp, Homo sapien
ctgcattgggtacagcaaccacttc

SEQ ID NO: 2478994 - DNA, 25 bp, Homo sapien
acttcccattggcaatctcatgagg

SEQ ID NO: 2478995 - DNA, 25 bp, Homo sapien
gcaatctcatgaggccacatgatgt

SEQ ID NO: 2478996 - DNA, 25 bp, Homo sapien
ccattggcaatctcatgaggccaca

SEQ ID NO: 2478997 - DNA, 25 bp, Homo sapien
cagagttctagggagagacattaac

SEQ ID NO: 2478998 - DNA, 25 bp, Homo sapien
cagctttcaagtggatcctaaatcc

SEQ ID NO: 2478999 - DNA, 25 bp, Homo sapien
tttcaacaaatactcaggatcctag

SEQ ID NO: 2479000 - DNA, 25 bp, Homo sapien
ttccctggactctcatggcctacca

SEQ ID NO: 2479001 - DNA, 25 bp, Homo sapien
gcatggctctctcgcccctcaccac

SEQ ID NO: 2479002 - DNA, 25 bp, Homo sapien
gctctctcgcccctcaccacaccag

SEQ ID NO: 2479003 - DNA, 25 bp, Homo sapien
actgcatggctctctcgcccctcac

SEQ ID NO: 2479004 - DNA, 25 bp, Homo sapien
ctcatacttgaccttgctgcccaca

SEQ ID NO: 2479005 - DNA, 25 bp, Homo sapien
tcaatgaagacacgggctcgtgcag

SEQ ID NO: 2479006 - DNA, 25 bp, Homo sapien
acacgggctcgtgcagagactggat

SEQ ID NO: 2479007 - DNA, 25 bp, Homo sapien
gaagacacgggctcgtgcagagact

SEQ ID NO: 2479008 - DNA, 25 bp, Homo sapien
agctcaatgaagacacgggctcgtg

SEQ ID NO: 2479009 - DNA, 25 bp, Homo sapien
agctctacctccagttccgtggtct

SEQ ID NO: 2479010 - DNA, 25 bp, Homo sapien
ctcaatgctgatcccggaggtgcta

SEQ ID NO: 2479011 - DNA, 25 bp, Homo sapien
ctccagttccgtggtctcaatgctg

SEQ ID NO: 2479012 - DNA, 25 bp, Homo sapien
ctgatcccggaggtgctaaggatga

SEQ ID NO: 2479013 - DNA, 25 bp, Homo sapien
cccagctcacactcaacatgggagg

SEQ ID NO: 2479014 - DNA, 25 bp, Homo sapien
cagctcacactcaacatgggaggca

SEQ ID NO: 2479015 - DNA, 25 bp, Homo sapien
tgggaggcattctcattggacaggc

SEQ ID NO: 2479016 - DNA, 25 bp, Homo sapien
ggcattctcattggacaggcagagt

SEQ ID NO: 2479017 - DNA, 25 bp, Homo sapien
tggaatgggagagaaggcaaggtca

SEQ ID NO: 2479018 - DNA, 25 bp, Homo sapien
ggaatgggagagaaggcaaggtcag

SEQ ID NO: 2479019 - DNA, 25 bp, Homo sapien
gaatgggagagaaggcaaggtcagt

SEQ ID NO: 2479020 - DNA, 25 bp, Homo sapien
ctggaatgggagagaaggcaaggtc

SEQ ID NO: 2479021 - DNA, 25 bp, Homo sapien
ttactggagcccctcaagaccccac

SEQ ID NO: 2479022 - DNA, 25 bp, Homo sapien
gttactggagcccctcaagacccca

SEQ ID NO: 2479023 - DNA, 25 bp, Homo sapien
ctgggttactggagcccctcaagac

SEQ ID NO: 2479024 - DNA, 25 bp, Homo sapien
tgggttactggagcccctcaagacc

SEQ ID NO: 2479025 - DNA, 25 bp, Homo sapien
gctgggcttcatgggcatcatcccc

SEQ ID NO: 2479026 - DNA, 25 bp, Homo sapien
tgcccactcagtgcaaacagggctg

SEQ ID NO: 2479027 - DNA, 25 bp, Homo sapien
gacccctgagtagtgcagtgagtca

SEQ ID NO: 2479028 - DNA, 25 bp, Homo sapien
agctccaggccaatgactggctgcc

SEQ ID NO: 2479029 - DNA, 25 bp, Homo sapien
ctgctaagttctgaacacctccccc

SEQ ID NO: 2479030 - DNA, 25 bp, Homo sapien
ccactcctgctaagttctgaacacc

SEQ ID NO: 2479031 - DNA, 25 bp, Homo sapien
agaccccactcctgctaagttctga

SEQ ID NO: 2479032 - DNA, 25 bp, Homo sapien
cagaccccactcctgctaagttctg

SEQ ID NO: 2479033 - DNA, 25 bp, Homo sapien
cctcacagaggtttgaagactaacc

SEQ ID NO: 2479034 - DNA, 25 bp, Homo sapien
aagtccatcggcaggtcctcttcca

SEQ ID NO: 2479035 - DNA, 25 bp, Homo sapien
tattagtgtactgtgaaggattgct

SEQ ID NO: 2479036 - DNA, 25 bp, Homo sapien
ggcctctgtacacacgactgggagt

SEQ ID NO: 2479037 - DNA, 25 bp, Homo sapien
gcgcggaccagctgcagattgctct

SEQ ID NO: 2479038 - DNA, 25 bp, Homo sapien
gcagaggttggaattccgtgtcgct

SEQ ID NO: 2479039 - DNA, 25 bp, Homo sapien
ttgctctggcagatcttgtcttcac

SEQ ID NO: 2479040 - DNA, 25 bp, Homo sapien
ccgtgtcgctgacccgggtacagaa

SEQ ID NO: 2479041 - DNA, 25 bp, Homo sapien
gagagacatgagataaggggcattc

SEQ ID NO: 2479042 - DNA, 25 bp, Homo sapien
gggagagacatgagataaggggcat

SEQ ID NO: 2479043 - DNA, 25 bp, Homo sapien
ctggggagagacatgagataagggg

SEQ ID NO: 2479044 - DNA, 25 bp, Homo sapien
tggggagagacatgagataaggggc

SEQ ID NO: 2479045 - DNA, 25 bp, Homo sapien
taggacaaggtcactacaatggccc

SEQ ID NO: 2479046 - DNA, 25 bp, Homo sapien
ctggccaggagcctgtcgccggagc

SEQ ID NO: 2479047 - DNA, 25 bp, Homo sapien
agactgtaggacaaggtcactacaa

SEQ ID NO: 2479048 - DNA, 25 bp, Homo sapien
ggtcactacaatggcccgaagcttg

SEQ ID NO: 2479049 - DNA, 25 bp, Homo sapien
ccagatgtgatgataaaagctgcca

SEQ ID NO: 2479050 - DNA, 25 bp, Homo sapien
cctttagggctttgaggaccagatg

SEQ ID NO: 2479051 - DNA, 25 bp, Homo sapien
tcccacgtgtctaggtcttagaagg

SEQ ID NO: 2479052 - DNA, 25 bp, Homo sapien
cacgagtgtgctcgggaaaaagcag

SEQ ID NO: 2479053 - DNA, 25 bp, Homo sapien
ctggagctggaacatggcgtctcca

SEQ ID NO: 2479054 - DNA, 25 bp, Homo sapien
tggcgtctccacagactcggtcatg

SEQ ID NO: 2479055 - DNA, 25 bp, Homo sapien
tggaacatggcgtctccacagactc

SEQ ID NO: 2479056 - DNA, 25 bp, Homo sapien
tctccacagactcggtcatgctggt

SEQ ID NO: 2479057 - DNA, 25 bp, Homo sapien
ttacggctcaggaacgtcacacggg

SEQ ID NO: 2479058 - DNA, 25 bp, Homo sapien
cggagcctccggtctgtgtccgcat

SEQ ID NO: 2479059 - DNA, 25 bp, Homo sapien
ggttcttccaggttacggctcagga

SEQ ID NO: 2479060 - DNA, 25 bp, Homo sapien
tggtgcttgggttcttccaggttac

SEQ ID NO: 2479061 - DNA, 25 bp, Homo sapien
gctcttctaccacctcgaagtgacc

SEQ ID NO: 2479062 - DNA, 25 bp, Homo sapien
attccaagggtgctcttctaccacc

SEQ ID NO: 2479063 - DNA, 25 bp, Homo sapien
caccccattccaagggtgctcttct

SEQ ID NO: 2479064 - DNA, 25 bp, Homo sapien
ccattccaagggtgctcttctacca

SEQ ID NO: 2479065 - DNA, 25 bp, Homo sapien
aatgtagctgaaacagacccttagg

SEQ ID NO: 2479066 - DNA, 25 bp, Homo sapien
tagctgaaacagacccttaggtcca

SEQ ID NO: 2479067 - DNA, 25 bp, Homo sapien
gggactgcaatgtagctgaaacaga

SEQ ID NO: 2479068 - DNA, 25 bp, Homo sapien
tgcaatgtagctgaaacagaccctt

SEQ ID NO: 2479069 - DNA, 25 bp, Homo sapien
tgcttcgtggagcaatagagacctc

SEQ ID NO: 2479070 - DNA, 25 bp, Homo sapien
caggtcgatgcttcgtggagcaata

SEQ ID NO: 2479071 - DNA, 25 bp, Homo sapien
gctccaggtcgatgcttcgtggagc

SEQ ID NO: 2479072 - DNA, 25 bp, Homo sapien
agacctcatgggagacatggaggat

SEQ ID NO: 2479073 - DNA, 25 bp, Homo sapien
tagccgaagctcttgatgcccacag

SEQ ID NO: 2479074 - DNA, 25 bp, Homo sapien
cagcaggtcagggtattggttccca

SEQ ID NO: 2479075 - DNA, 25 bp, Homo sapien
gagtagccgaagctcttgatgccca

SEQ ID NO: 2479076 - DNA, 25 bp, Homo sapien
agggagtagccgaagctcttgatgc

SEQ ID NO: 2479077 - DNA, 25 bp, Homo sapien
aggtttggcgacaacccccaggctg

SEQ ID NO: 2479078 - DNA, 25 bp, Homo sapien
gctcccatggtagatgaagactttc

SEQ ID NO: 2479079 - DNA, 25 bp, Homo sapien
aggctgctcccatggtagatgaaga

SEQ ID NO: 2479080 - DNA, 25 bp, Homo sapien
tcccatggtagatgaagactttccc

SEQ ID NO: 2479081 - DNA, 25 bp, Homo sapien
tgggggccttgcagacaagatccag

SEQ ID NO: 2479082 - DNA, 25 bp, Homo sapien
gggccttgcagacaagatccaggcc

SEQ ID NO: 2479083 - DNA, 25 bp, Homo sapien
tgcagacaagatccaggcctcaact

SEQ ID NO: 2479084 - DNA, 25 bp, Homo sapien
ttctattttattgagaggctacaaa

SEQ ID NO: 2479085 - DNA, 25 bp, Homo sapien
ggctgatcccgaacatggagtcagg

SEQ ID NO: 2479086 - DNA, 25 bp, Homo sapien
cccagctcttcttggcgctcaaaga

SEQ ID NO: 2479087 - DNA, 25 bp, Homo sapien
agccatcttggttgaggtcccccag

SEQ ID NO: 2479088 - DNA, 25 bp, Homo sapien
ggcacccactatcaggtctggccag

SEQ ID NO: 2479089 - DNA, 25 bp, Homo sapien
agacagcataacctcgggcaccagg

SEQ ID NO: 2479090 - DNA, 25 bp, Homo sapien
agccggaggtcaggcgctccccaga

SEQ ID NO: 2479091 - DNA, 25 bp, Homo sapien
ataacctcgggcaccaggcgactgg

SEQ ID NO: 2479092 - DNA, 25 bp, Homo sapien
ccagtgagtagccaaagccggaggt

SEQ ID NO: 2479093 - DNA, 25 bp, Homo sapien
acagcacccttgtggttggcgcggg

SEQ ID NO: 2479094 - DNA, 25 bp, Homo sapien
cagcacccttgtggttggcgcgggg

SEQ ID NO: 2479095 - DNA, 25 bp, Homo sapien
agcacccttgtggttggcgcggggg

SEQ ID NO: 2479096 - DNA, 25 bp, Homo sapien
tttcttcaatatgtgcccaccatcc

SEQ ID NO: 2479097 - DNA, 25 bp, Homo sapien
tagccctttcttcaatatgtgccca

SEQ ID NO: 2479098 - DNA, 25 bp, Homo sapien
ttcttcaatatgtgcccaccatcca

SEQ ID NO: 2479099 - DNA, 25 bp, Homo sapien
caacattagccctttcttcaatatg

SEQ ID NO: 2479100 - DNA, 25 bp, Homo sapien
aagttttatacaccagctggtcggg

SEQ ID NO: 2479101 - DNA, 25 bp, Homo sapien
gctatcaatgttggtcacaaaaagc

SEQ ID NO: 2479102 - DNA, 25 bp, Homo sapien
ccaagtctccggctggtcctgggag

SEQ ID NO: 2479103 - DNA, 25 bp, Homo sapien
ctaagtagctattgagggccaagtc

SEQ ID NO: 2479104 - DNA, 25 bp, Homo sapien
aggggacatccagagtaggggccac

SEQ ID NO: 2479105 - DNA, 25 bp, Homo sapien
ggagcagagggttagagcagttctg

SEQ ID NO: 2479106 - DNA, 25 bp, Homo sapien
gcagagggttagagcagttctgggc

SEQ ID NO: 2479107 - DNA, 25 bp, Homo sapien
gggacatccagagtaggggccacag

SEQ ID NO: 2479108 - DNA, 25 bp, Homo sapien
tagggaccgtcgtccaggtgtgcca

SEQ ID NO: 2479109 - DNA, 25 bp, Homo sapien
ctgttggcagggaccgggatgaggc

SEQ ID NO: 2479110 - DNA, 25 bp, Homo sapien
ccgcctcgtagggaccgtcgtccag

SEQ ID NO: 2479111 - DNA, 25 bp, Homo sapien
tgccaggtccgctgagccctgtgca

SEQ ID NO: 2479112 - DNA, 25 bp, Homo sapien
ctggggtcccccagatgtggcatca

SEQ ID NO: 2479113 - DNA, 25 bp, Homo sapien
tgttgaggaacacttggccgtgcga

SEQ ID NO: 2479114 - DNA, 25 bp, Homo sapien
cagcgtgcggagacgggaatggcag

SEQ ID NO: 2479115 - DNA, 25 bp, Homo sapien
cattcatgtgtgcactagctcaatg

SEQ ID NO: 2479116 - DNA, 25 bp, Homo sapien
gtgttggagcatgcaggccccagct

SEQ ID NO: 2479117 - DNA, 25 bp, Homo sapien
aactcatcccggatggccaggtcct

SEQ ID NO: 2479118 - DNA, 25 bp, Homo sapien
aggatctggtccactcgctgccttg

SEQ ID NO: 2479119 - DNA, 25 bp, Homo sapien
caaagcagcgaccaatcatatcccg

SEQ ID NO: 2479120 - DNA, 25 bp, Homo sapien
cccaaagaggaggtagtggctatca

SEQ ID NO: 2479121 - DNA, 25 bp, Homo sapien
ctgcccatatgcagagatttggcag

SEQ ID NO: 2479122 - DNA, 25 bp, Homo sapien
gctgcccatatgcagagatttggca

SEQ ID NO: 2479123 - DNA, 25 bp, Homo sapien
agggatggggatcatttcactctgt

SEQ ID NO: 2479124 - DNA, 25 bp, Homo sapien
gggacctgcttgaggcatgctgccc

SEQ ID NO: 2479125 - DNA, 25 bp, Homo sapien
caggcccctggctccgaacactgac

SEQ ID NO: 2479126 - DNA, 25 bp, Homo sapien
tccgaacactgactcccaaccactg

SEQ ID NO: 2479127 - DNA, 25 bp, Homo sapien
acactgactcccaaccactggttct

SEQ ID NO: 2479128 - DNA, 25 bp, Homo sapien
ctggctccgaacactgactcccaac

SEQ ID NO: 2479129 - DNA, 25 bp, Homo sapien
tcccccactctgttcatgcagggcc

SEQ ID NO: 2479130 - DNA, 25 bp, Homo sapien
ccactctgttcatgcagggccacac

SEQ ID NO: 2479131 - DNA, 25 bp, Homo sapien
acgcttcccccactctgttcatgca

SEQ ID NO: 2479132 - DNA, 25 bp, Homo sapien
ccccactctgttcatgcagggccac

SEQ ID NO: 2479133 - DNA, 25 bp, Homo sapien
gctcaacgggcaagcgaagaggcct

SEQ ID NO: 2479134 - DNA, 25 bp, Homo sapien
cctggtcgatgtccactctgtagca

SEQ ID NO: 2479135 - DNA, 25 bp, Homo sapien
ctccctggtcgatgtccactctgta

SEQ ID NO: 2479136 - DNA, 25 bp, Homo sapien
agtgcgattcgcctgctgcccagga

SEQ ID NO: 2479137 - DNA, 25 bp, Homo sapien
cagtcttctggacagccacagtgta

SEQ ID NO: 2479138 - DNA, 25 bp, Homo sapien
cttctggacagccacagtgtagcca

SEQ ID NO: 2479139 - DNA, 25 bp, Homo sapien
accccagtcttctggacagccacag

SEQ ID NO: 2479140 - DNA, 25 bp, Homo sapien
agtcttctggacagccacagtgtag

SEQ ID NO: 2479141 - DNA, 25 bp, Homo sapien
tgcaactgccggtgcagggccacag

SEQ ID NO: 2479142 - DNA, 25 bp, Homo sapien
ctggctcgccctccttgcgcaaggc

SEQ ID NO: 2479143 - DNA, 25 bp, Homo sapien
gggctgcaactgccggtgcagggcc

SEQ ID NO: 2479144 - DNA, 25 bp, Homo sapien
tggctcgccctccttgcgcaaggca

SEQ ID NO: 2479145 - DNA, 25 bp, Homo sapien
cacgtccagattgaaggcgacagcc

SEQ ID NO: 2479146 - DNA, 25 bp, Homo sapien
gcagttcgacgagcagggagccaaa

SEQ ID NO: 2479147 - DNA, 25 bp, Homo sapien
gcgacagcccgtgagaagagcagtt

SEQ ID NO: 2479148 - DNA, 25 bp, Homo sapien
acgtccagattgaaggcgacagccc

SEQ ID NO: 2479149 - DNA, 25 bp, Homo sapien
caggcgcgtctctggtctccaaagt

SEQ ID NO: 2479150 - DNA, 25 bp, Homo sapien
tcgttggtctttcagacgtctccca

SEQ ID NO: 2479151 - DNA, 25 bp, Homo sapien
gcaccggctaggacaactacagcag

SEQ ID NO: 2479152 - DNA, 25 bp, Homo sapien
aatgcaagggaaatctcgcacgccc

SEQ ID NO: 2479153 - DNA, 25 bp, Homo sapien
tagtcaaagcttgaaccatgggagt

SEQ ID NO: 2479154 - DNA, 25 bp, Homo sapien
attctggttgtagtcaaagcttgaa

SEQ ID NO: 2479155 - DNA, 25 bp, Homo sapien
gttgtagtcaaagcttgaaccatgg

SEQ ID NO: 2479156 - DNA, 25 bp, Homo sapien
tcaaagcttgaaccatgggagtggc

SEQ ID NO: 2479157 - DNA, 25 bp, Homo sapien
caacatttggaacttagccacacca

SEQ ID NO: 2479158 - DNA, 25 bp, Homo sapien
cccctttctttgagcactggcttca

SEQ ID NO: 2479159 - DNA, 25 bp, Homo sapien
tggcttcaggccaacatttggaact

SEQ ID NO: 2479160 - DNA, 25 bp, Homo sapien
ccatttggactgtctcaagggcccc

SEQ ID NO: 2479161 - DNA, 25 bp, Homo sapien
cagggctcaaccatgtgttttggga

SEQ ID NO: 2479162 - DNA, 25 bp, Homo sapien
tcaagcagctcaagcgatatccgcc

SEQ ID NO: 2479163 - DNA, 25 bp, Homo sapien
cctctaggtcaggaatcggcaaact

SEQ ID NO: 2479164 - DNA, 25 bp, Homo sapien
ggcaaactcagtactcaagccagat

SEQ ID NO: 2479165 - DNA, 25 bp, Homo sapien
cctgcataagcctgctaggaggtgg

SEQ ID NO: 2479166 - DNA, 25 bp, Homo sapien
taggcatctccgtcaaaactcttgt

SEQ ID NO: 2479167 - DNA, 25 bp, Homo sapien
gactctaggcgggatgtagctcatt

SEQ ID NO: 2479168 - DNA, 25 bp, Homo sapien
aagtaccagaaaggccagtcctgca

SEQ ID NO: 2479169 - DNA, 25 bp, Homo sapien
tgttcagtccctgcaaaacagctag

SEQ ID NO: 2479170 - DNA, 25 bp, Homo sapien
gtgccaactactccaaaccgacatg

SEQ ID NO: 2479171 - DNA, 25 bp, Homo sapien
gggaactgcctcacatctacagctg

SEQ ID NO: 2479172 - DNA, 25 bp, Homo sapien
gaaggctgaccccatttaagtgcca

SEQ ID NO: 2479173 - DNA, 25 bp, Homo sapien
ctctaagacaaactcagaccatctc

SEQ ID NO: 2479174 - DNA, 25 bp, Homo sapien
gaggacagggaacatcagtaaggaa

SEQ ID NO: 2479175 - DNA, 25 bp, Homo sapien
tcaagcatcactctaagacaaactc

SEQ ID NO: 2479176 - DNA, 25 bp, Homo sapien
gacagggaacatcagtaaggaaagg

SEQ ID NO: 2479177 - DNA, 25 bp, Homo sapien
tactattccactcccccagatgagg

SEQ ID NO: 2479178 - DNA, 25 bp, Homo sapien
tccactcccccagatgaggaggctg

SEQ ID NO: 2479179 - DNA, 25 bp, Homo sapien
ctattccactcccccagatgaggag

SEQ ID NO: 2479180 - DNA, 25 bp, Homo sapien
attccactcccccagatgaggaggc

SEQ ID NO: 2479181 - DNA, 25 bp, Homo sapien
tgatactcttcacgaggcagcaggc

SEQ ID NO: 2479182 - DNA, 25 bp, Homo sapien
ctgatactcttcacgaggcagcagg

SEQ ID NO: 2479183 - DNA, 25 bp, Homo sapien
ttctgatactcttcacgaggcagca

SEQ ID NO: 2479184 - DNA, 25 bp, Homo sapien
tctgatactcttcacgaggcagcag

SEQ ID NO: 2479185 - DNA, 25 bp, Homo sapien
tcgacaaaagcaattccaagggctg

SEQ ID NO: 2479186 - DNA, 25 bp, Homo sapien
tgctgcagctaccaccagcacattt

SEQ ID NO: 2479187 - DNA, 25 bp, Homo sapien
ctcgacaaaagcaattccaagggct

SEQ ID NO: 2479188 - DNA, 25 bp, Homo sapien
gcagctaccaccagcacatttttcc

SEQ ID NO: 2479189 - DNA, 25 bp, Homo sapien
aaaggacaaaagcaccatcagaaac

SEQ ID NO: 2479190 - DNA, 25 bp, Homo sapien
aggtggcaggcacaaaggacaaaag

SEQ ID NO: 2479191 - DNA, 25 bp, Homo sapien
gtggcaggcacaaaggacaaaagca

SEQ ID NO: 2479192 - DNA, 25 bp, Homo sapien
gaaggtggcaggcacaaaggacaaa

SEQ ID NO: 2479193 - DNA, 25 bp, Homo sapien
aatcccacagcccacagtaacatta

SEQ ID NO: 2479194 - DNA, 25 bp, Homo sapien
cttctcgttgaaattaatcccacag

SEQ ID NO: 2479195 - DNA, 25 bp, Homo sapien
cgttgaaattaatcccacagcccac

SEQ ID NO: 2479196 - DNA, 25 bp, Homo sapien
aattaatcccacagcccacagtaac

SEQ ID NO: 2479197 - DNA, 25 bp, Homo sapien
ctgtgtagttagcagccccacagca

SEQ ID NO: 2479198 - DNA, 25 bp, Homo sapien
cggttcttcgacatggaagggattt

SEQ ID NO: 2479199 - DNA, 25 bp, Homo sapien
gagtcggggactcggttcttcgaca

SEQ ID NO: 2479200 - DNA, 25 bp, Homo sapien
gggactcggttcttcgacatggaag

SEQ ID NO: 2479201 - DNA, 25 bp, Homo sapien
aaatatggagaagaaggttgttaag

SEQ ID NO: 2479202 - DNA, 25 bp, Homo sapien
tggagaagaaggttgttaagtgaac

SEQ ID NO: 2479203 - DNA, 25 bp, Homo sapien
aagaaatatggagaagaaggttgtt

SEQ ID NO: 2479204 - DNA, 25 bp, Homo sapien
tatggagaagaaggttgttaagtga

SEQ ID NO: 2479205 - DNA, 25 bp, Homo sapien
ctgttgcccagacaagtgcccagcg

SEQ ID NO: 2479206 - DNA, 25 bp, Homo sapien
ccttggagatgagaattctctattc

SEQ ID NO: 2479207 - DNA, 25 bp, Homo sapien
gacaagtgcccagcggtggctcaat

SEQ ID NO: 2479208 - DNA, 25 bp, Homo sapien
gagatgagaattctctattcccacc

SEQ ID NO: 2479209 - DNA, 25 bp, Homo sapien
tctgctgccggaagttgttattaaa

SEQ ID NO: 2479210 - DNA, 25 bp, Homo sapien
tcctgtccaggatcgaagcagtgtg

SEQ ID NO: 2479211 - DNA, 25 bp, Homo sapien
caggatcgaagcagtgtggttgttt

SEQ ID NO: 2479212 - DNA, 25 bp, Homo sapien
tctccatctgctgccggaagttgtt

SEQ ID NO: 2479213 - DNA, 25 bp, Homo sapien
ctgagagtacggaggagcactgttg

SEQ ID NO: 2479214 - DNA, 25 bp, Homo sapien
tgcagtcagaattcaagcaccaggg

SEQ ID NO: 2479215 - DNA, 25 bp, Homo sapien
cggaggagcactgttgcagtcagaa

SEQ ID NO: 2479216 - DNA, 25 bp, Homo sapien
gtcagaattcaagcaccagggtccc

SEQ ID NO: 2479217 - DNA, 25 bp, Homo sapien
gccagcaatggctgcggccacctcc

SEQ ID NO: 2479218 - DNA, 25 bp, Homo sapien
ctccaccaacatgataagagacaga

SEQ ID NO: 2479219 - DNA, 25 bp, Homo sapien
cacctccaccaacatgataagagac

SEQ ID NO: 2479220 - DNA, 25 bp, Homo sapien
atagccagcaatggctgcggccacc

SEQ ID NO: 2479221 - DNA, 25 bp, Homo sapien
aagtcaagtttggagtctatgcatt

SEQ ID NO: 2479222 - DNA, 25 bp, Homo sapien
gaagtcaagtttggagtctatgcat

SEQ ID NO: 2479223 - DNA, 25 bp, Homo sapien
gaggaagacacccactgcgatgatg

SEQ ID NO: 2479224 - DNA, 25 bp, Homo sapien
aagacacccactgcgatgatgacca

SEQ ID NO: 2479225 - DNA, 25 bp, Homo sapien
cacccactgcgatgatgaccactgg

SEQ ID NO: 2479226 - DNA, 25 bp, Homo sapien
ggaagacacccactgcgatgatgac

SEQ ID NO: 2479227 - DNA, 25 bp, Homo sapien
tggattatggtctgactcaggacaa

SEQ ID NO: 2479228 - DNA, 25 bp, Homo sapien
acacccacggcaatcagtcccactg

SEQ ID NO: 2479229 - DNA, 25 bp, Homo sapien
ctggattatggtctgactcaggaca

SEQ ID NO: 2479230 - DNA, 25 bp, Homo sapien
tgccccgacacccacggcaatcagt

SEQ ID NO: 2479231 - DNA, 25 bp, Homo sapien
cctctggccagttaggccaggagaa

SEQ ID NO: 2479232 - DNA, 25 bp, Homo sapien
gctgtgactaaggttcctctggcca

SEQ ID NO: 2479233 - DNA, 25 bp, Homo sapien
ccacgcgcgcatcagctgtgactaa

SEQ ID NO: 2479234 - DNA, 25 bp, Homo sapien
ataatgctttctacaggcctccagg

SEQ ID NO: 2479235 - DNA, 25 bp, Homo sapien
tggagccaggtctccccgcaccctg

SEQ ID NO: 2479236 - DNA, 25 bp, Homo sapien
ggtctccccgcaccctgccggcgcg

SEQ ID NO: 2479237 - DNA, 25 bp, Homo sapien
actgtggagccaggtctccccgcac

SEQ ID NO: 2479238 - DNA, 25 bp, Homo sapien
ctgtggagccaggtctccccgcacc

SEQ ID NO: 2479239 - DNA, 25 bp, Homo sapien
ggaggacgtagagcaagaacttcac

SEQ ID NO: 2479240 - DNA, 25 bp, Homo sapien
caggaggacgtagagcaagaacttc

SEQ ID NO: 2479241 - DNA, 25 bp, Homo sapien
gcaggaggacgtagagcaagaactt

SEQ ID NO: 2479242 - DNA, 25 bp, Homo sapien
aggaggacgtagagcaagaacttca

SEQ ID NO: 2479243 - DNA, 25 bp, Homo sapien
gccctcgagggcttcccttcacggc

SEQ ID NO: 2479244 - DNA, 25 bp, Homo sapien
gccggccctcgagggcttcccttca

SEQ ID NO: 2479245 - DNA, 25 bp, Homo sapien
cggccctcgagggcttcccttcacg

SEQ ID NO: 2479246 - DNA, 25 bp, Homo sapien
caggacagatccaagggcgccggca

SEQ ID NO: 2479247 - DNA, 25 bp, Homo sapien
cccaggacagatccaagggcgccgg

SEQ ID NO: 2479248 - DNA, 25 bp, Homo sapien
gcaggggcttgagcctgacgccgac

SEQ ID NO: 2479249 - DNA, 25 bp, Homo sapien
gggcttgagcctgacgccgaccctc

SEQ ID NO: 2479250 - DNA, 25 bp, Homo sapien
cccagggaacttcgaagcaaagttg

SEQ ID NO: 2479251 - DNA, 25 bp, Homo sapien
aagggactgcgggtggtctctccca

SEQ ID NO: 2479252 - DNA, 25 bp, Homo sapien
tggagagcgccggacgagtctccgc

SEQ ID NO: 2479253 - DNA, 25 bp, Homo sapien
cttcgaagcaaagttgctccagggc

SEQ ID NO: 2479254 - DNA, 25 bp, Homo sapien
catgtgacgcggtaacagctgcggc

SEQ ID NO: 2479255 - DNA, 25 bp, Homo sapien
cggcctccctcatgtgacgcggtaa

SEQ ID NO: 2479256 - DNA, 25 bp, Homo sapien
tcccaaggctggctgcgcgttcctc

SEQ ID NO: 2479257 - DNA, 25 bp, Homo sapien
cgcggtaacagctgcggcctgagtc

SEQ ID NO: 2479258 - DNA, 25 bp, Homo sapien
ctccgtgccaactcggggtaggaga

SEQ ID NO: 2479259 - DNA, 25 bp, Homo sapien
gagcgcagcctgggtcactctggtt

SEQ ID NO: 2479260 - DNA, 25 bp, Homo sapien
tgagagttaccctctgagcgccggg

SEQ ID NO: 2479261 - DNA, 25 bp, Homo sapien
tctggttcagagaagcggacgaggt

SEQ ID NO: 2479262 - DNA, 25 bp, Homo sapien
ccatcctaccgtaggggatgagcca

SEQ ID NO: 2479263 - DNA, 25 bp, Homo sapien
tctgtgaggtttccccatcctaccg

SEQ ID NO: 2479264 - DNA, 25 bp, Homo sapien
tgaggccgggtgacaatgtggtctg

SEQ ID NO: 2479265 - DNA, 25 bp, Homo sapien
tccccatccgactgtgcagacagct

SEQ ID NO: 2479266 - DNA, 25 bp, Homo sapien
ttttccagggatcctagtctgagaa

SEQ ID NO: 2479267 - DNA, 25 bp, Homo sapien
tggcccccctctattagcacagctt

SEQ ID NO: 2479268 - DNA, 25 bp, Homo sapien
cagggatcctagtctgagaaaaggg

SEQ ID NO: 2479269 - DNA, 25 bp, Homo sapien
ggatttctggcccccctctattagc

SEQ ID NO: 2479270 - DNA, 25 bp, Homo sapien
caagcccattccggatcttgctctt

SEQ ID NO: 2479271 - DNA, 25 bp, Homo sapien
cttgctcttcctgaccatggctggc

SEQ ID NO: 2479272 - DNA, 25 bp, Homo sapien
gctcttcctgaccatggctggcagg

SEQ ID NO: 2479273 - DNA, 25 bp, Homo sapien
aagcccattccggatcttgctcttc

SEQ ID NO: 2479274 - DNA, 25 bp, Homo sapien
catgtaggcatcagccagacccagt

SEQ ID NO: 2479275 - DNA, 25 bp, Homo sapien
gcagccttctgagagcatgtaggca

SEQ ID NO: 2479276 - DNA, 25 bp, Homo sapien
gtaggcatcagccagacccagtgcc

SEQ ID NO: 2479277 - DNA, 25 bp, Homo sapien
tgagagcatgtaggcatcagccaga

SEQ ID NO: 2479278 - DNA, 25 bp, Homo sapien
ccaggggagtactgtgcacgggctc

SEQ ID NO: 2479279 - DNA, 25 bp, Homo sapien
cagagagtaggttatatgccccagc

SEQ ID NO: 2479280 - DNA, 25 bp, Homo sapien
ctctccagagagtaggttatatgcc

SEQ ID NO: 2479281 - DNA, 25 bp, Homo sapien
agaaaagctcatagaccatcccgca

SEQ ID NO: 2479282 - DNA, 25 bp, Homo sapien
ccatttcttgggcccctagttcctg

SEQ ID NO: 2479283 - DNA, 25 bp, Homo sapien
catttcttgggcccctagttcctga

SEQ ID NO: 2479284 - DNA, 25 bp, Homo sapien
gagtcacagagcctcacaactaaag

SEQ ID NO: 2479285 - DNA, 25 bp, Homo sapien
ggtccatccaaatgcccagctggtg

SEQ ID NO: 2479286 - DNA, 25 bp, Homo sapien
tgtttatgcactcccttggccagga

SEQ ID NO: 2479287 - DNA, 25 bp, Homo sapien
gccagtgccatcattaacaacgagg

SEQ ID NO: 2479288 - DNA, 25 bp, Homo sapien
aagaagaagggcctgtggcagactc

SEQ ID NO: 2479289 - DNA, 25 bp, Homo sapien
ctgccaaagaagaagggcctgtggc

SEQ ID NO: 2479290 - DNA, 25 bp, Homo sapien
caaagaagaagggcctgtggcagac

SEQ ID NO: 2479291 - DNA, 25 bp, Homo sapien
gaagaagggcctgtggcagactcac

SEQ ID NO: 2479292 - DNA, 25 bp, Homo sapien
tgttccccatggatgtggtcttgca

SEQ ID NO: 2479293 - DNA, 25 bp, Homo sapien
tgttgggttgttccccatggatgtg

SEQ ID NO: 2479294 - DNA, 25 bp, Homo sapien
ccatggatgtggtcttgcagcccag

SEQ ID NO: 2479295 - DNA, 25 bp, Homo sapien
caaatttgttgggttgttccccatg

SEQ ID NO: 2479296 - DNA, 25 bp, Homo sapien
cagcagctggaatagtggtgcctcc

SEQ ID NO: 2479297 - DNA, 25 bp, Homo sapien
agcagcagctggaatagtggtgcct

SEQ ID NO: 2479298 - DNA, 25 bp, Homo sapien
gacattgcacttagacccgttcttt

SEQ ID NO: 2479299 - DNA, 25 bp, Homo sapien
ccttggagaagctgacattgcactt

SEQ ID NO: 2479300 - DNA, 25 bp, Homo sapien
gtaggtgagaactcagggaagaggt

SEQ ID NO: 2479301 - DNA, 25 bp, Homo sapien
agcttgcacccagtggagttgtaga

SEQ ID NO: 2479302 - DNA, 25 bp, Homo sapien
cagcttgcacccagtggagttgtag

SEQ ID NO: 2479303 - DNA, 25 bp, Homo sapien
gagggagcagtaggtgagaactcag

SEQ ID NO: 2479304 - DNA, 25 bp, Homo sapien
tcttcctgaggatatagcagaccat

SEQ ID NO: 2479305 - DNA, 25 bp, Homo sapien
cctgcagtgccaaagaatgagtcca

SEQ ID NO: 2479306 - DNA, 25 bp, Homo sapien
gcagcacttctgatcatggtccagg

SEQ ID NO: 2479307 - DNA, 25 bp, Homo sapien
agaaaaatagctactccccactgag

SEQ ID NO: 2479308 - DNA, 25 bp, Homo sapien
taagcacttgtataaagcctccagg

SEQ ID NO: 2479309 - DNA, 25 bp, Homo sapien
gggcggacacatgaagtttagtttc

SEQ ID NO: 2479310 - DNA, 25 bp, Homo sapien
ccaaatggcttgaattgaagccagt

SEQ ID NO: 2479311 - DNA, 25 bp, Homo sapien
tcaaccttttctgagccaaatggct

SEQ ID NO: 2479312 - DNA, 25 bp, Homo sapien
aattctgagcacttaccacgggcac

SEQ ID NO: 2479313 - DNA, 25 bp, Homo sapien
tgtgggacagataaccagggcacca

SEQ ID NO: 2479314 - DNA, 25 bp, Homo sapien
cataaaatacctctcgctgtgggac

SEQ ID NO: 2479315 - DNA, 25 bp, Homo sapien
gaatctaacagtacctggcagcagg

SEQ ID NO: 2479316 - DNA, 25 bp, Homo sapien
ttatgtgacagagggcaaagacggc

SEQ ID NO: 2479317 - DNA, 25 bp, Homo sapien
ttcttcaactgagatcaaggcttcc

SEQ ID NO: 2479318 - DNA, 25 bp, Homo sapien
tcctggagggaaccactgcaaaaag

SEQ ID NO: 2479319 - DNA, 25 bp, Homo sapien
caaagacggccatagggtgctctga

SEQ ID NO: 2479320 - DNA, 25 bp, Homo sapien
agtcaaactgctgccgcagttcatg

SEQ ID NO: 2479321 - DNA, 25 bp, Homo sapien
actgctgccgcagttcatggatgta

SEQ ID NO: 2479322 - DNA, 25 bp, Homo sapien
caaactgctgccgcagttcatggat

SEQ ID NO: 2479323 - DNA, 25 bp, Homo sapien
ctgctgccgcagttcatggatgtac

SEQ ID NO: 2479324 - DNA, 25 bp, Homo sapien
tacatgctccctcattgcgaggcag

SEQ ID NO: 2479325 - DNA, 25 bp, Homo sapien
ctgtgcatttaggcatatatgtgac

SEQ ID NO: 2479326 - DNA, 25 bp, Homo sapien
caggacgtaggcacatgactgtgca

SEQ ID NO: 2479327 - DNA, 25 bp, Homo sapien
tccctcattgcgaggcaggacgtag

SEQ ID NO: 2479328 - DNA, 25 bp, Homo sapien
aatcccaaagcgctctgctcttttc

SEQ ID NO: 2479329 - DNA, 25 bp, Homo sapien
gcaatcccaaagcgctctgctcttt

SEQ ID NO: 2479330 - DNA, 25 bp, Homo sapien
aggcaatcccaaagcgctctgctct

SEQ ID NO: 2479331 - DNA, 25 bp, Homo sapien
tcaggcaatcccaaagcgctctgct

SEQ ID NO: 2479332 - DNA, 25 bp, Homo sapien
tgaagacaatagttgcctgggttcc

SEQ ID NO: 2479333 - DNA, 25 bp, Homo sapien
gatcaagctagcctggaaacaatgg

SEQ ID NO: 2479334 - DNA, 25 bp, Homo sapien
catgaactgtcacaaggcccgagaa

SEQ ID NO: 2479335 - DNA, 25 bp, Homo sapien
gaaacaatgggctcttaacaggctg

SEQ ID NO: 2479336 - DNA, 25 bp, Homo sapien
tctatgaagcgttccaggtatattt

SEQ ID NO: 2479337 - DNA, 25 bp, Homo sapien
ccttcaaggtctatgaagcgttcca

SEQ ID NO: 2479338 - DNA, 25 bp, Homo sapien
caaggtctatgaagcgttccaggta

SEQ ID NO: 2479339 - DNA, 25 bp, Homo sapien
ttcccttcaaggtctatgaagcgtt

SEQ ID NO: 2479340 - DNA, 25 bp, Homo sapien
gaacttgtgacaatcccaaatcgct

SEQ ID NO: 2479341 - DNA, 25 bp, Homo sapien
ccagctgaacttgtgacaatcccaa

SEQ ID NO: 2479342 - DNA, 25 bp, Homo sapien
tctgtatcctctgtggttccagttc

SEQ ID NO: 2479343 - DNA, 25 bp, Homo sapien
tgtgacaatcccaaatcgctccttc

SEQ ID NO: 2479344 - DNA, 25 bp, Homo sapien
aacaaactagcctccattcaccaag

SEQ ID NO: 2479345 - DNA, 25 bp, Homo sapien
ggtcacaaggtgctaaccaaccctg

SEQ ID NO: 2479346 - DNA, 25 bp, Homo sapien
tgggaatgaaatgataacttattgg

SEQ ID NO: 2479347 - DNA, 25 bp, Homo sapien
caaccctgtgccaagaactaaggat

SEQ ID NO: 2479348 - DNA, 25 bp, Homo sapien
tcccaaggaaattatagtcctacag

SEQ ID NO: 2479349 - DNA, 25 bp, Homo sapien
gtcctacagtctataggcaggctgt

SEQ ID NO: 2479350 - DNA, 25 bp, Homo sapien
cttttaaagaatgtctgtgtggtgc

SEQ ID NO: 2479351 - DNA, 25 bp, Homo sapien
tgggtgtcccaaaactacaaggtca

SEQ ID NO: 2479352 - DNA, 25 bp, Homo sapien
tactgtcttggtctttaactctttc

SEQ ID NO: 2479353 - DNA, 25 bp, Homo sapien
tgtcttggtctttaactctttcagc

SEQ ID NO: 2479354 - DNA, 25 bp, Homo sapien
aggcaggagtactgtcttggtcttt

SEQ ID NO: 2479355 - DNA, 25 bp, Homo sapien
caggagtactgtcttggtctttaac

SEQ ID NO: 2479356 - DNA, 25 bp, Homo sapien
agttctttacacatgcaatatctca

SEQ ID NO: 2479357 - DNA, 25 bp, Homo sapien
cttataataatcctatggagtaggc

SEQ ID NO: 2479358 - DNA, 25 bp, Homo sapien
tggagtaggcacagcaattaaattc

SEQ ID NO: 2479359 - DNA, 25 bp, Homo sapien
taatacgaggattggaatccaggac

SEQ ID NO: 2479360 - DNA, 25 bp, Homo sapien
gcagggaaagtgcacaactgggccc

SEQ ID NO: 2479361 - DNA, 25 bp, Homo sapien
tgggcccagtaaatcaacacagttc

SEQ ID NO: 2479362 - DNA, 25 bp, Homo sapien
tcttcaggagatacaggcagagcat

SEQ ID NO: 2479363 - DNA, 25 bp, Homo sapien
tagcgtgacggtgttgcatggaaac

SEQ ID NO: 2479364 - DNA, 25 bp, Homo sapien
taaagaatactgctccttgcttgtg

SEQ ID NO: 2479365 - DNA, 25 bp, Homo sapien
aagaatactgctccttgcttgtgtg

SEQ ID NO: 2479366 - DNA, 25 bp, Homo sapien
acagtaaagaatactgctccttgct

SEQ ID NO: 2479367 - DNA, 25 bp, Homo sapien
aatactgctccttgcttgtgtgcca

SEQ ID NO: 2479368 - DNA, 25 bp, Homo sapien
aatcttattaccagtgccactccgg

SEQ ID NO: 2479369 - DNA, 25 bp, Homo sapien
taccagtgccactccggatcatata

SEQ ID NO: 2479370 - DNA, 25 bp, Homo sapien
cactccggatcatataaaaagaaac

SEQ ID NO: 2479371 - DNA, 25 bp, Homo sapien
tcttcaatcttattaccagtgccac

SEQ ID NO: 2479372 - DNA, 25 bp, Homo sapien
tcctggtcaagtgtaacaagctcac

SEQ ID NO: 2479373 - DNA, 25 bp, Homo sapien
gaaattccaatctaaagagtccagt

SEQ ID NO: 2479374 - DNA, 25 bp, Homo sapien
gtccagtcagaaaaatccttagaag

SEQ ID NO: 2479375 - DNA, 25 bp, Homo sapien
ccaaaagaattaaccaagccaggca

SEQ ID NO: 2479376 - DNA, 25 bp, Homo sapien
ttgtaggacaaagcaaggcaggcag

SEQ ID NO: 2479377 - DNA, 25 bp, Homo sapien
aggataagtgatgcagagcctggca

SEQ ID NO: 2479378 - DNA, 25 bp, Homo sapien
ccagaggaggtcgtttcggtcttgc

SEQ ID NO: 2479379 - DNA, 25 bp, Homo sapien
aatgtcaagaagtcagtagagggaa

SEQ ID NO: 2479380 - DNA, 25 bp, Homo sapien
caactaggttgcagcacacaaaggc

SEQ ID NO: 2479381 - DNA, 25 bp, Homo sapien
gaggactctaggtagcacacctgtc

SEQ ID NO: 2479382 - DNA, 25 bp, Homo sapien
tacagaactgacacaaaggaaaagg

SEQ ID NO: 2479383 - DNA, 25 bp, Homo sapien
gaacgtgccaaaacaagatcagggc

SEQ ID NO: 2479384 - DNA, 25 bp, Homo sapien
catctctagagtacttatgtataaa

SEQ ID NO: 2479385 - DNA, 25 bp, Homo sapien
gctcatccgcctacatactttaaat

SEQ ID NO: 2479386 - DNA, 25 bp, Homo sapien
tctgggagtgtggatagatattgct

SEQ ID NO: 2479387 - DNA, 25 bp, Homo sapien
tgatctgggacacggcactctataa

SEQ ID NO: 2479388 - DNA, 25 bp, Homo sapien
tccgcagggacaaatgaagaaccag

SEQ ID NO: 2479389 - DNA, 25 bp, Homo sapien
gacaagttctgttcctccgcaggga

SEQ ID NO: 2479390 - DNA, 25 bp, Homo sapien
tagaatacattgtctagcgccctag

SEQ ID NO: 2479391 - DNA, 25 bp, Homo sapien
gaagttgagcaaagaaacacctgtc

SEQ ID NO: 2479392 - DNA, 25 bp, Homo sapien
ttagatgtctactatctgcgttttt

SEQ ID NO: 2479393 - DNA, 25 bp, Homo sapien
tgtctactatctgcgtttttcttgg

SEQ ID NO: 2479394 - DNA, 25 bp, Homo sapien
gatgtctactatctgcgtttttctt

SEQ ID NO: 2479395 - DNA, 25 bp, Homo sapien
tctactatctgcgtttttcttggtc

SEQ ID NO: 2479396 - DNA, 25 bp, Homo sapien
tattttaggactgtggttgactgag

SEQ ID NO: 2479397 - DNA, 25 bp, Homo sapien
gatgattcacatacccgagcagaac

SEQ ID NO: 2479398 - DNA, 25 bp, Homo sapien
tgcattagggccaatattaagtaaa

SEQ ID NO: 2479399 - DNA, 25 bp, Homo sapien
gaagtagtagggatatgctggacaa

SEQ ID NO: 2479400 - DNA, 25 bp, Homo sapien
cctttccgagggtgccaatgtttga

SEQ ID NO: 2479401 - DNA, 25 bp, Homo sapien
ccaagatgagtttccagccgcaatg

SEQ ID NO: 2479402 - DNA, 25 bp, Homo sapien
gattaactgagctggctttattccc

SEQ ID NO: 2479403 - DNA, 25 bp, Homo sapien
caatccactcaaattagcacagcag

SEQ ID NO: 2479404 - DNA, 25 bp, Homo sapien
tagttttagctacgagaaaggctga

SEQ ID NO: 2479405 - DNA, 25 bp, Homo sapien
gggaaccaatcaccccacatagcat

SEQ ID NO: 2479406 - DNA, 25 bp, Homo sapien
caacaaagattaagagaccacctgc

SEQ ID NO: 2479407 - DNA, 25 bp, Homo sapien
gaaatatagaccatactcaggctgg

SEQ ID NO: 2479408 - DNA, 25 bp, Homo sapien
aaaacattacttccatcgagcctac

SEQ ID NO: 2479409 - DNA, 25 bp, Homo sapien
tcatttccagcctatgtagttccca

SEQ ID NO: 2479410 - DNA, 25 bp, Homo sapien
tcccataagctgctctaatgtcaca

SEQ ID NO: 2479411 - DNA, 25 bp, Homo sapien
cagctacattctcaggagggtcatt

SEQ ID NO: 2479412 - DNA, 25 bp, Homo sapien
ccaaatctttgagctctttccttca

SEQ ID NO: 2479413 - DNA, 25 bp, Homo sapien
gagattgaagagacattcaaaccaa

SEQ ID NO: 2479414 - DNA, 25 bp, Homo sapien
aaatctttgagctctttccttcagc

SEQ ID NO: 2479415 - DNA, 25 bp, Homo sapien
tttccttcagcttatccaagttaac

SEQ ID NO: 2479416 - DNA, 25 bp, Homo sapien
cataggtttgttatcagatgacaga

SEQ ID NO: 2479417 - DNA, 25 bp, Homo sapien
caagtcctgcagcagatataagctg

SEQ ID NO: 2479418 - DNA, 25 bp, Homo sapien
atataagctgctcctccatatctgc

SEQ ID NO: 2479419 - DNA, 25 bp, Homo sapien
tgtatttctgaaccgcatttggtta

SEQ ID NO: 2479420 - DNA, 25 bp, Homo sapien
gaatacagtcgtccctccatttcct

SEQ ID NO: 2479421 - DNA, 25 bp, Homo sapien
tcttaaagagtttctacagctagca

SEQ ID NO: 2479422 - DNA, 25 bp, Homo sapien
aactttctcagaagtatctctgtac

SEQ ID NO: 2479423 - DNA, 25 bp, Homo sapien
agtataattttacctaaagcaggag

SEQ ID NO: 2479424 - DNA, 25 bp, Homo sapien
tctctcttaattgcccaggaaggcc

SEQ ID NO: 2479425 - DNA, 25 bp, Homo sapien
ttgttggaactgaagaaatcccaaa

SEQ ID NO: 2479426 - DNA, 25 bp, Homo sapien
tttgttggaactgaagaaatcccaa

SEQ ID NO: 2479427 - DNA, 25 bp, Homo sapien
ttttgttggaactgaagaaatccca

SEQ ID NO: 2479428 - DNA, 25 bp, Homo sapien
tgttggaactgaagaaatcccaaac

SEQ ID NO: 2479429 - DNA, 25 bp, Homo sapien
caggtacattgaatcgttcagccct

SEQ ID NO: 2479430 - DNA, 25 bp, Homo sapien
acattgaatcgttcagccctcttct

SEQ ID NO: 2479431 - DNA, 25 bp, Homo sapien
acaggtacattgaatcgttcagccc

SEQ ID NO: 2479432 - DNA, 25 bp, Homo sapien
ggtacattgaatcgttcagccctct

SEQ ID NO: 2479433 - DNA, 25 bp, Homo sapien
ggtatttcagatgtaattttcacca

SEQ ID NO: 2479434 - DNA, 25 bp, Homo sapien
gtggtatttcagatgtaattttcac

SEQ ID NO: 2479435 - DNA, 25 bp, Homo sapien
agatgtaattttcaccactttcttc

SEQ ID NO: 2479436 - DNA, 25 bp, Homo sapien
ttcagatgtaattttcaccactttc

SEQ ID NO: 2479437 - DNA, 25 bp, Homo sapien
cactagagctttggttcctttaact

SEQ ID NO: 2479438 - DNA, 25 bp, Homo sapien
gagctttggttcctttaactgtcat

SEQ ID NO: 2479439 - DNA, 25 bp, Homo sapien
aaacatgaagtccactagagctttg

SEQ ID NO: 2479440 - DNA, 25 bp, Homo sapien
gaagtccactagagctttggttcct

SEQ ID NO: 2479441 - DNA, 25 bp, Homo sapien
tccccattaccattctgaagcacag

SEQ ID NO: 2479442 - DNA, 25 bp, Homo sapien
catcaaccccagtgtaatgacttcc

SEQ ID NO: 2479443 - DNA, 25 bp, Homo sapien
gaaagtagtactctccatcaacccc

SEQ ID NO: 2479444 - DNA, 25 bp, Homo sapien
atccaatgccatcaagaaagtagta

SEQ ID NO: 2479445 - DNA, 25 bp, Homo sapien
aaaggccaatgggaacatgtaagag

SEQ ID NO: 2479446 - DNA, 25 bp, Homo sapien
gccaatgggaacatgtaagaggtaa

SEQ ID NO: 2479447 - DNA, 25 bp, Homo sapien
tacttcactgggaccaagtactttg

SEQ ID NO: 2479448 - DNA, 25 bp, Homo sapien
caagtactttgaagtagtcccttct

SEQ ID NO: 2479449 - DNA, 25 bp, Homo sapien
tctttgacagggagctcaatgggct

SEQ ID NO: 2479450 - DNA, 25 bp, Homo sapien
ctttgacagggagctcaatgggctt

SEQ ID NO: 2479451 - DNA, 25 bp, Homo sapien
ctctttgacagggagctcaatgggc

SEQ ID NO: 2479452 - DNA, 25 bp, Homo sapien
cctctttgacagggagctcaatggg

SEQ ID NO: 2479453 - DNA, 25 bp, Homo sapien
ttcatctcccagtacatcttcttca

SEQ ID NO: 2479454 - DNA, 25 bp, Homo sapien
gtttcatctcccagtacatcttctt

SEQ ID NO: 2479455 - DNA, 25 bp, Homo sapien
catctcccagtacatcttcttcatt

SEQ ID NO: 2479456 - DNA, 25 bp, Homo sapien
tgtttcatctcccagtacatcttct

SEQ ID NO: 2479457 - DNA, 25 bp, Homo sapien
caaatgtgaactccagttggactga

SEQ ID NO: 2479458 - DNA, 25 bp, Homo sapien
tgctacatctggagaagataaaacc

SEQ ID NO: 2479459 - DNA, 25 bp, Homo sapien
aaaccatcttgatcacttaccaagg

SEQ ID NO: 2479460 - DNA, 25 bp, Homo sapien
ggcagaaactgatgcacataaaatc

SEQ ID NO: 2479461 - DNA, 25 bp, Homo sapien
cactccgcctccacaaagtactcac

SEQ ID NO: 2479462 - DNA, 25 bp, Homo sapien
tcactccgcctccacaaagtactca

SEQ ID NO: 2479463 - DNA, 25 bp, Homo sapien
atcactccgcctccacaaagtactc

SEQ ID NO: 2479464 - DNA, 25 bp, Homo sapien
ggtctccaaaccacgagcaagacat

SEQ ID NO: 2479465 - DNA, 25 bp, Homo sapien
tggtctccaaaccacgagcaagaca

SEQ ID NO: 2479466 - DNA, 25 bp, Homo sapien
tattcaatatacaagaggaactgcc

SEQ ID NO: 2479467 - DNA, 25 bp, Homo sapien
gaagttccatcccaaattactgccc

SEQ ID NO: 2479468 - DNA, 25 bp, Homo sapien
gatgatccattttcctctaacgata

SEQ ID NO: 2479469 - DNA, 25 bp, Homo sapien
tgaataaaatggtagttcccacaag

SEQ ID NO: 2479470 - DNA, 25 bp, Homo sapien
tatactcttttgtgaacttgtgcat

SEQ ID NO: 2479471 - DNA, 25 bp, Homo sapien
atatactcttttgtgaacttgtgca

SEQ ID NO: 2479472 - DNA, 25 bp, Homo sapien
catatactcttttgtgaacttgtgc

SEQ ID NO: 2479473 - DNA, 25 bp, Homo sapien
gattccttctttgggcgtcttgtca

SEQ ID NO: 2479474 - DNA, 25 bp, Homo sapien
ttcacttcccgatttcaatcagcgg

SEQ ID NO: 2479475 - DNA, 25 bp, Homo sapien
caatcagcggcaaagtctatcagca

SEQ ID NO: 2479476 - DNA, 25 bp, Homo sapien
cacggcaaatgctactactctagtc

SEQ ID NO: 2479477 - DNA, 25 bp, Homo sapien
gctacaaggtagttttatgaagccc

SEQ ID NO: 2479478 - DNA, 25 bp, Homo sapien
ggcatgagttcttaaccagaggtcc

SEQ ID NO: 2479479 - DNA, 25 bp, Homo sapien
atatgtgtacatgcctttttctggg

SEQ ID NO: 2479480 - DNA, 25 bp, Homo sapien
cacgcccagctaaaggcatgagttc

SEQ ID NO: 2479481 - DNA, 25 bp, Homo sapien
gatatctgtgacctccaaaaggtta

SEQ ID NO: 2479482 - DNA, 25 bp, Homo sapien
aagatatctgtgacctccaaaaggt

SEQ ID NO: 2479483 - DNA, 25 bp, Homo sapien
ctttcatcagagtttcaaagatatc

SEQ ID NO: 2479484 - DNA, 25 bp, Homo sapien
caaagatatctgtgacctccaaaag

SEQ ID NO: 2479485 - DNA, 25 bp, Homo sapien
taaggcgagaccgatcttctgagag

SEQ ID NO: 2479486 - DNA, 25 bp, Homo sapien
cgcgtgacagaactcgaaaactttt

SEQ ID NO: 2479487 - DNA, 25 bp, Homo sapien
tcaaccccaggcttctaaggcgaga

SEQ ID NO: 2479488 - DNA, 25 bp, Homo sapien
aaatctgaggtgtctgtacttctac

SEQ ID NO: 2479489 - DNA, 25 bp, Homo sapien
tggagctccaccgtctcggtcgcca

SEQ ID NO: 2479490 - DNA, 25 bp, Homo sapien
tatggagctccaccgtctcggtcgc

SEQ ID NO: 2479491 - DNA, 25 bp, Homo sapien
ttatggagctccaccgtctcggtcg

SEQ ID NO: 2479492 - DNA, 25 bp, Homo sapien
atggagctccaccgtctcggtcgcc

SEQ ID NO: 2479493 - DNA, 25 bp, Homo sapien
cctcactccactaggcccccacccg

SEQ ID NO: 2479494 - DNA, 25 bp, Homo sapien
ctcactccactaggcccccacccgc

SEQ ID NO: 2479495 - DNA, 25 bp, Homo sapien
ctgagagacaactgggagatagctc

SEQ ID NO: 2479496 - DNA, 25 bp, Homo sapien
gtggcacacagcgaagtaaacccca

SEQ ID NO: 2479497 - DNA, 25 bp, Homo sapien
caacacccgagtgatgaatagccga

SEQ ID NO: 2479498 - DNA, 25 bp, Homo sapien
cattcctgttgtctggaccctgacc

SEQ ID NO: 2479499 - DNA, 25 bp, Homo sapien
tcatacagactgaaatagcttgagc

SEQ ID NO: 2479500 - DNA, 25 bp, Homo sapien
ccagttaagggtgctatctcctgaa

SEQ ID NO: 2479501 - DNA, 25 bp, Homo sapien
aaaaacactgtagggagtggaagca

SEQ ID NO: 2479502 - DNA, 25 bp, Homo sapien
gcttgagccgtcatttgccatgtca

SEQ ID NO: 2479503 - DNA, 25 bp, Homo sapien
tggtccagtaggaggtgcccttcac

SEQ ID NO: 2479504 - DNA, 25 bp, Homo sapien
tcaaatgagaaaaagggctccggct

SEQ ID NO: 2479505 - DNA, 25 bp, Homo sapien
ggctccggctatatgggcaacaaag

SEQ ID NO: 2479506 - DNA, 25 bp, Homo sapien
ctataccaagtatgatgctgcgcac

SEQ ID NO: 2479507 - DNA, 25 bp, Homo sapien
atttacccacaaagtgaaagtcgag

SEQ ID NO: 2479508 - DNA, 25 bp, Homo sapien
cctgaaatgggtcaagaaagaagat

SEQ ID NO: 2479509 - DNA, 25 bp, Homo sapien
tgcgataatctcctatcattagggc

SEQ ID NO: 2479510 - DNA, 25 bp, Homo sapien
aaagggtgggaaaaagtgtcatctg

SEQ ID NO: 2479511 - DNA, 25 bp, Homo sapien
ccagtctctgaactctatgcgataa

SEQ ID NO: 2479512 - DNA, 25 bp, Homo sapien
taaagggatacactgtccagcccag

SEQ ID NO: 2479513 - DNA, 25 bp, Homo sapien
tgtcaaaagacaagattcaggccgg

SEQ ID NO: 2479514 - DNA, 25 bp, Homo sapien
tgtgctacagcccttttgactccct

SEQ ID NO: 2479515 - DNA, 25 bp, Homo sapien
gataaatcaaactccatcctgtgct

SEQ ID NO: 2479516 - DNA, 25 bp, Homo sapien
ttgaaagatccgactcaagaaatcc

SEQ ID NO: 2479517 - DNA, 25 bp, Homo sapien
agatccgactcaagaaatcctgaag

SEQ ID NO: 2479518 - DNA, 25 bp, Homo sapien
ctgggggtacttgaaagatccgact

SEQ ID NO: 2479519 - DNA, 25 bp, Homo sapien
ctgtgctgttgggcttagaggctgc

SEQ ID NO: 2479520 - DNA, 25 bp, Homo sapien
ccaaatgagatgtgataggggactc

SEQ ID NO: 2479521 - DNA, 25 bp, Homo sapien
tgcctggaatccgagaaccaaatga

SEQ ID NO: 2479522 - DNA, 25 bp, Homo sapien
tctgccgccctctggtgcctggaat

SEQ ID NO: 2479523 - DNA, 25 bp, Homo sapien
gagatacctacacgctggcatccag

SEQ ID NO: 2479524 - DNA, 25 bp, Homo sapien
tcagcaggatgcagcctattacact

SEQ ID NO: 2479525 - DNA, 25 bp, Homo sapien
ccaacatgcttgactctgcccaaaa

SEQ ID NO: 2479526 - DNA, 25 bp, Homo sapien
tgtgatgtcatacacctttccatcc

SEQ ID NO: 2479527 - DNA, 25 bp, Homo sapien
tggcactcttaggttcccggtccat

SEQ ID NO: 2479528 - DNA, 25 bp, Homo sapien
tagggcactgctagtagtcttacca

SEQ ID NO: 2479529 - DNA, 25 bp, Homo sapien
tcaacgttctatcctaaagctaatg

SEQ ID NO: 2479530 - DNA, 25 bp, Homo sapien
taccattattcacaaatagggctga

SEQ ID NO: 2479531 - DNA, 25 bp, Homo sapien
tttgtcaagcctacctagggcactg

SEQ ID NO: 2479532 - DNA, 25 bp, Homo sapien
attgcctccttgaggtcatcttgca

SEQ ID NO: 2479533 - DNA, 25 bp, Homo sapien
ctcatttactgaccggctcagctca

SEQ ID NO: 2479534 - DNA, 25 bp, Homo sapien
cagaaactcatttactgaccggctc

SEQ ID NO: 2479535 - DNA, 25 bp, Homo sapien
ggcatcggctacacatcatagtatt

SEQ ID NO: 2479536 - DNA, 25 bp, Homo sapien
tgtcccaagctgctcgcaaaacctt

SEQ ID NO: 2479537 - DNA, 25 bp, Homo sapien
tcatactcctttcgcttttcagcat

SEQ ID NO: 2479538 - DNA, 25 bp, Homo sapien
tcagcattgctgacaatgtcccaag

SEQ ID NO: 2479539 - DNA, 25 bp, Homo sapien
cgcaaaaccttgaaggcctcctcag

SEQ ID NO: 2479540 - DNA, 25 bp, Homo sapien
gaaagggtttagctcatcctcagga

SEQ ID NO: 2479541 - DNA, 25 bp, Homo sapien
ccagccatggtcaagagtcgagcca

SEQ ID NO: 2479542 - DNA, 25 bp, Homo sapien
gagaatccagccaagagaagagcca

SEQ ID NO: 2479543 - DNA, 25 bp, Homo sapien
tgaactattcttaccagccgctgcc

SEQ ID NO: 2479544 - DNA, 25 bp, Homo sapien
tccttcgttggaaagcggtgccgct

SEQ ID NO: 2479545 - DNA, 25 bp, Homo sapien
ggtttctttccgctggacacacgtg

SEQ ID NO: 2479546 - DNA, 25 bp, Homo sapien
gaagacgtctcactctgatcagggt

SEQ ID NO: 2479547 - DNA, 25 bp, Homo sapien
tgaaggtatttcagggtccacggag

SEQ ID NO: 2479548 - DNA, 25 bp, Homo sapien
tctttctccggggtgcttctgggcc

SEQ ID NO: 2479549 - DNA, 25 bp, Homo sapien
tgtggtgggctccatacaaccctct

SEQ ID NO: 2479550 - DNA, 25 bp, Homo sapien
gtgggctccatacaaccctctttct

SEQ ID NO: 2479551 - DNA, 25 bp, Homo sapien
cactgtggtgggctccatacaaccc

SEQ ID NO: 2479552 - DNA, 25 bp, Homo sapien
tgagggtcttaggtcacagccatca

SEQ ID NO: 2479553 - DNA, 25 bp, Homo sapien
gtcacagccatcatggtgtgttctg

SEQ ID NO: 2479554 - DNA, 25 bp, Homo sapien
cacagccatcatggtgtgttctgat

SEQ ID NO: 2479555 - DNA, 25 bp, Homo sapien
ggcttcctgagggtcttaggtcaca

SEQ ID NO: 2479556 - DNA, 25 bp, Homo sapien
ggctgtgtagaagggacgaaggtgg

SEQ ID NO: 2479557 - DNA, 25 bp, Homo sapien
tgtgtagaagggacgaaggtggccg

SEQ ID NO: 2479558 - DNA, 25 bp, Homo sapien
cggctgtgtagaagggacgaaggtg

SEQ ID NO: 2479559 - DNA, 25 bp, Homo sapien
ctgtgtagaagggacgaaggtggcc

SEQ ID NO: 2479560 - DNA, 25 bp, Homo sapien
cctcgagccgcccggcctggggcca

SEQ ID NO: 2479561 - DNA, 25 bp, Homo sapien
gcggccgccggcgacctgggcctac

SEQ ID NO: 2479562 - DNA, 25 bp, Homo sapien
cgccggcgacctgggcctacttcca

SEQ ID NO: 2479563 - DNA, 25 bp, Homo sapien
acgctctgcttccgccttccgtccc

SEQ ID NO: 2479564 - DNA, 25 bp, Homo sapien
tgcaccaatgcctgcagactaaggg

SEQ ID NO: 2479565 - DNA, 25 bp, Homo sapien
gcccctttgtatcctgcggtgcgga

SEQ ID NO: 2479566 - DNA, 25 bp, Homo sapien
gagaggcaagccaatccagctaggg

SEQ ID NO: 2479567 - DNA, 25 bp, Homo sapien
ggcgagctgccccttatacctggat

SEQ ID NO: 2479568 - DNA, 25 bp, Homo sapien
ctggtcctggactagagcagtaggc

SEQ ID NO: 2479569 - DNA, 25 bp, Homo sapien
ggtcctggactagagcagtaggcaa

SEQ ID NO: 2479570 - DNA, 25 bp, Homo sapien
tgctatatagttgggggtctctggt

SEQ ID NO: 2479571 - DNA, 25 bp, Homo sapien
cctggactagagcagtaggcaacct

SEQ ID NO: 2479572 - DNA, 25 bp, Homo sapien
tctgaccaataatagaggtgccctg

SEQ ID NO: 2479573 - DNA, 25 bp, Homo sapien
tgacaactttgatttccccggccca

SEQ ID NO: 2479574 - DNA, 25 bp, Homo sapien
gtgcctcaacccagaccagctttgt

SEQ ID NO: 2479575 - DNA, 25 bp, Homo sapien
ggcagggtttgagcccacaggacct

SEQ ID NO: 2479576 - DNA, 25 bp, Homo sapien
aaggaagacatatccctcccctggg

SEQ ID NO: 2479577 - DNA, 25 bp, Homo sapien
gagttatacagccagacagctagag

SEQ ID NO: 2479578 - DNA, 25 bp, Homo sapien
taaatactgaaccagggagtccagc

SEQ ID NO: 2479579 - DNA, 25 bp, Homo sapien
tccaaggagagagcattgacccacc

SEQ ID NO: 2479580 - DNA, 25 bp, Homo sapien
cattttatgtaggaagaacaggacc

SEQ ID NO: 2479581 - DNA, 25 bp, Homo sapien
gagatctacggtcttgcgcctgcta

SEQ ID NO: 2479582 - DNA, 25 bp, Homo sapien
tccaaggcccttgctcagtttactg

SEQ ID NO: 2479583 - DNA, 25 bp, Homo sapien
tagtgcaacaatcctgcagtactgg

SEQ ID NO: 2479584 - DNA, 25 bp, Homo sapien
aggggttaatgtccaagattgtgtc

SEQ ID NO: 2479585 - DNA, 25 bp, Homo sapien
tcaggggttaatgtccaagattgtg

SEQ ID NO: 2479586 - DNA, 25 bp, Homo sapien
cctcaggggttaatgtccaagattg

SEQ ID NO: 2479587 - DNA, 25 bp, Homo sapien
agcctcaggggttaatgtccaagat

SEQ ID NO: 2479588 - DNA, 25 bp, Homo sapien
tcagtattcaaacgtggtttctgtg

SEQ ID NO: 2479589 - DNA, 25 bp, Homo sapien
agtattcaaacgtggtttctgtggc

SEQ ID NO: 2479590 - DNA, 25 bp, Homo sapien
cagtattcaaacgtggtttctgtgg

SEQ ID NO: 2479591 - DNA, 25 bp, Homo sapien
gtagtgtctatagtccggggacgac

SEQ ID NO: 2479592 - DNA, 25 bp, Homo sapien
ggtagtgtctatagtccggggacga

SEQ ID NO: 2479593 - DNA, 25 bp, Homo sapien
atggggtagtgtctatagtccgggg

SEQ ID NO: 2479594 - DNA, 25 bp, Homo sapien
ctgatggggtagtgtctatagtccg

SEQ ID NO: 2479595 - DNA, 25 bp, Homo sapien
cttgaagaagtagactcggccatct

SEQ ID NO: 2479596 - DNA, 25 bp, Homo sapien
tgggatagcctttctctactcgaag

SEQ ID NO: 2479597 - DNA, 25 bp, Homo sapien
gttgaggcgccagtagactttgccc

SEQ ID NO: 2479598 - DNA, 25 bp, Homo sapien
tgccaactcatagcagccgagggct

SEQ ID NO: 2479599 - DNA, 25 bp, Homo sapien
cgtcccactgccagtacccggagcc

SEQ ID NO: 2479600 - DNA, 25 bp, Homo sapien
tataaggtagcccactcctcctaag

SEQ ID NO: 2479601 - DNA, 25 bp, Homo sapien
ttcaagcgcaagctttgcttctcag

SEQ ID NO: 2479602 - DNA, 25 bp, Homo sapien
acatctcccttcaagcgcaagcttt

SEQ ID NO: 2479603 - DNA, 25 bp, Homo sapien
ctttgcttctcagtataaggtagcc

SEQ ID NO: 2479604 - DNA, 25 bp, Homo sapien
aagaggaacaccttttggttgagag

SEQ ID NO: 2479605 - DNA, 25 bp, Homo sapien
gaacaccttttggttgagaggccaa

SEQ ID NO: 2479606 - DNA, 25 bp, Homo sapien
gaggaacaccttttggttgagaggc

SEQ ID NO: 2479607 - DNA, 25 bp, Homo sapien
caccttttggttgagaggccaatag

SEQ ID NO: 2479608 - DNA, 25 bp, Homo sapien
aagccaggagacatcttgaaattaa

SEQ ID NO: 2479609 - DNA, 25 bp, Homo sapien
taggttctaccctattcagcttctt

SEQ ID NO: 2479610 - DNA, 25 bp, Homo sapien
ccaggttaggttctaccctattcag

SEQ ID NO: 2479611 - DNA, 25 bp, Homo sapien
ttaatgtagcgccacaccttgtctc

SEQ ID NO: 2479612 - DNA, 25 bp, Homo sapien
ggtgatagcttttggtctcctccgg

SEQ ID NO: 2479613 - DNA, 25 bp, Homo sapien
tagcttttggtctcctccggtccac

SEQ ID NO: 2479614 - DNA, 25 bp, Homo sapien
taagattaggccctcctcaagtaag

SEQ ID NO: 2479615 - DNA, 25 bp, Homo sapien
gtaagacactgtaactagcctcctt

SEQ ID NO: 2479616 - DNA, 25 bp, Homo sapien
ttcgaggcgagtagacagcagcatc

SEQ ID NO: 2479617 - DNA, 25 bp, Homo sapien
ttgaaagcataggtcttcccacggg

SEQ ID NO: 2479618 - DNA, 25 bp, Homo sapien
aatctgatacagtccacacatagtc

SEQ ID NO: 2479619 - DNA, 25 bp, Homo sapien
gggcccggtcctgaatctgatacag

SEQ ID NO: 2479620 - DNA, 25 bp, Homo sapien
cagagcgtttcagctttggtccact

SEQ ID NO: 2479621 - DNA, 25 bp, Homo sapien
tagtggcccttagagcgtggcagcc

SEQ ID NO: 2479622 - DNA, 25 bp, Homo sapien
tatctcaggctgactaacaatttgc

SEQ ID NO: 2479623 - DNA, 25 bp, Homo sapien
tggtaagtgcctgcctaagccacct

SEQ ID NO: 2479624 - DNA, 25 bp, Homo sapien
tgctgaagtcccatgtcactcccat

SEQ ID NO: 2479625 - DNA, 25 bp, Homo sapien
cagcaggctgcccccaccgcctgcc

SEQ ID NO: 2479626 - DNA, 25 bp, Homo sapien
agcaggctgcccccaccgcctgcca

SEQ ID NO: 2479627 - DNA, 25 bp, Homo sapien
gcaggctgcccccaccgcctgccaa

SEQ ID NO: 2479628 - DNA, 25 bp, Homo sapien
ccagcatcatggcatccagttcact

SEQ ID NO: 2479629 - DNA, 25 bp, Homo sapien
gttcactactgcaagggtctggcat

SEQ ID NO: 2479630 - DNA, 25 bp, Homo sapien
gcatcatggcatccagttcactact

SEQ ID NO: 2479631 - DNA, 25 bp, Homo sapien
ggcatccagttcactactgcaaggg

SEQ ID NO: 2479632 - DNA, 25 bp, Homo sapien
cctcatcccttatcactggactctt

SEQ ID NO: 2479633 - DNA, 25 bp, Homo sapien
tcccttatcactggactcttcttgc

SEQ ID NO: 2479634 - DNA, 25 bp, Homo sapien
cttcctcatcccttatcactggact

SEQ ID NO: 2479635 - DNA, 25 bp, Homo sapien
tcatcccttatcactggactcttct

SEQ ID NO: 2479636 - DNA, 25 bp, Homo sapien
tgatatcagcgggagacacgttcta

SEQ ID NO: 2479637 - DNA, 25 bp, Homo sapien
tagggagagaactcacagcacctgt

SEQ ID NO: 2479638 - DNA, 25 bp, Homo sapien
taaaatgtgcattcttgccgggtgt

SEQ ID NO: 2479639 - DNA, 25 bp, Homo sapien
aatcctagagcgttttcatttgtgg

SEQ ID NO: 2479640 - DNA, 25 bp, Homo sapien
gggaatatcgggagtgcccaagccc

SEQ ID NO: 2479641 - DNA, 25 bp, Homo sapien
cacttcatgggctgcaatgatgcgc

SEQ ID NO: 2479642 - DNA, 25 bp, Homo sapien
tgcgcaggttcaccccacggtaggt

SEQ ID NO: 2479643 - DNA, 25 bp, Homo sapien
cggtaggtcccctcagtccagaact

SEQ ID NO: 2479644 - DNA, 25 bp, Homo sapien
ctgacccagtcctctctggcccata

SEQ ID NO: 2479645 - DNA, 25 bp, Homo sapien
taaactctaattaatgcataccttt

SEQ ID NO: 2479646 - DNA, 25 bp, Homo sapien
ggtcagagcccgctaggctagagca

SEQ ID NO: 2479647 - DNA, 25 bp, Homo sapien
catacctctaaggtatgccttgaac

SEQ ID NO: 2479648 - DNA, 25 bp, Homo sapien
aacagtacgagctttggcggccatg

SEQ ID NO: 2479649 - DNA, 25 bp, Homo sapien
agaggcggatgtcagccgcaccagc

SEQ ID NO: 2479650 - DNA, 25 bp, Homo sapien
cagcctgcacctcttggaaggtcaa

SEQ ID NO: 2479651 - DNA, 25 bp, Homo sapien
agggagccacattgctccagtcctg

SEQ ID NO: 2479652 - DNA, 25 bp, Homo sapien
gttcaagatgcggaaagtcaggtgc

SEQ ID NO: 2479653 - DNA, 25 bp, Homo sapien
gcaggttcaagatgcggaaagtcag

SEQ ID NO: 2479654 - DNA, 25 bp, Homo sapien
caagatgcggaaagtcaggtgcttc

SEQ ID NO: 2479655 - DNA, 25 bp, Homo sapien
gagggcaggttcaagatgcggaaag

SEQ ID NO: 2479656 - DNA, 25 bp, Homo sapien
gatcctctaggccacaacgaggctg

SEQ ID NO: 2479657 - DNA, 25 bp, Homo sapien
caacaggtatttaagggtcttctgg

SEQ ID NO: 2479658 - DNA, 25 bp, Homo sapien
ccagcaacaggtatttaagggtctt

SEQ ID NO: 2479659 - DNA, 25 bp, Homo sapien
ggtcttctggttgaagggatcctct

SEQ ID NO: 2479660 - DNA, 25 bp, Homo sapien
gcgggcccttgtggcatcatccagc

SEQ ID NO: 2479661 - DNA, 25 bp, Homo sapien
cgggcccttgtggcatcatccagct

SEQ ID NO: 2479662 - DNA, 25 bp, Homo sapien
ccagcccctctactgcaatttctaa

SEQ ID NO: 2479663 - DNA, 25 bp, Homo sapien
cagcccctctactgcaatttctaac

SEQ ID NO: 2479664 - DNA, 25 bp, Homo sapien
atgcccagcccctctactgcaattt

SEQ ID NO: 2479665 - DNA, 25 bp, Homo sapien
gcccagcccctctactgcaatttct

SEQ ID NO: 2479666 - DNA, 25 bp, Homo sapien
ctcagagcctcggtgatatcttctg

SEQ ID NO: 2479667 - DNA, 25 bp, Homo sapien
gcttctgtaggtacccatattgtga

SEQ ID NO: 2479668 - DNA, 25 bp, Homo sapien
ggtacccatattgtgacaggtagtc

SEQ ID NO: 2479669 - DNA, 25 bp, Homo sapien
cctcggtgatatcttctggcttgaa

SEQ ID NO: 2479670 - DNA, 25 bp, Homo sapien
cccaggacccggcctgagactgtca

SEQ ID NO: 2479671 - DNA, 25 bp, Homo sapien
cctgagactgtcatggggagtagga

SEQ ID NO: 2479672 - DNA, 25 bp, Homo sapien
aggacccggcctgagactgtcatgg

SEQ ID NO: 2479673 - DNA, 25 bp, Homo sapien
gccccaggacccggcctgagactgt

SEQ ID NO: 2479674 - DNA, 25 bp, Homo sapien
gtgcctctgacctgagatttctggg

SEQ ID NO: 2479675 - DNA, 25 bp, Homo sapien
tgtccgtgcctctgacctgagattt

SEQ ID NO: 2479676 - DNA, 25 bp, Homo sapien
agagctccagaggctgtccgtgcct

SEQ ID NO: 2479677 - DNA, 25 bp, Homo sapien
ggtcccaccagacgagagctccaga

SEQ ID NO: 2479678 - DNA, 25 bp, Homo sapien
cagtgctaggcagaggggctcttac

SEQ ID NO: 2479679 - DNA, 25 bp, Homo sapien
ggagcagtgctaggcagaggggctc

SEQ ID NO: 2479680 - DNA, 25 bp, Homo sapien
agcagtgctaggcagaggggctctt

SEQ ID NO: 2479681 - DNA, 25 bp, Homo sapien
cttgggggagcagtgctaggcagag

SEQ ID NO: 2479682 - DNA, 25 bp, Homo sapien
tctttttactctccagcctctagtc

SEQ ID NO: 2479683 - DNA, 25 bp, Homo sapien
ttttactctccagcctctagtcctc

SEQ ID NO: 2479684 - DNA, 25 bp, Homo sapien
agttctttttactctccagcctcta

SEQ ID NO: 2479685 - DNA, 25 bp, Homo sapien
tttttactctccagcctctagtcct

SEQ ID NO: 2479686 - DNA, 25 bp, Homo sapien
tcttgacgttgggaactgtcatggg

SEQ ID NO: 2479687 - DNA, 25 bp, Homo sapien
tctgtcttgacgttgggaactgtca

SEQ ID NO: 2479688 - DNA, 25 bp, Homo sapien
cagatctgtcttgacgttgggaact

SEQ ID NO: 2479689 - DNA, 25 bp, Homo sapien
tgacgttgggaactgtcatgggcat

SEQ ID NO: 2479690 - DNA, 25 bp, Homo sapien
tcaaataatgtaatagtcacaggtc

SEQ ID NO: 2479691 - DNA, 25 bp, Homo sapien
ctttggttgttgaggtgtactaaat

SEQ ID NO: 2479692 - DNA, 25 bp, Homo sapien
tgttgaggtgtactaaatttaaaga

SEQ ID NO: 2479693 - DNA, 25 bp, Homo sapien
tggttgttgaggtgtactaaattta

SEQ ID NO: 2479694 - DNA, 25 bp, Homo sapien
cattatgtcagccatactgaattcc

SEQ ID NO: 2479695 - DNA, 25 bp, Homo sapien
gaatctgttccacggcctgaggagc

SEQ ID NO: 2479696 - DNA, 25 bp, Homo sapien
ctgtatgaatctgttccacggcctg

SEQ ID NO: 2479697 - DNA, 25 bp, Homo sapien
tatgtcagccatactgaattccttt

SEQ ID NO: 2479698 - DNA, 25 bp, Homo sapien
aaaggcagaaattttgcgtgctagt

SEQ ID NO: 2479699 - DNA, 25 bp, Homo sapien
gataaaaaagcgtctccacggccga

SEQ ID NO: 2479700 - DNA, 25 bp, Homo sapien
gagggaagattccatcacaggcact

SEQ ID NO: 2479701 - DNA, 25 bp, Homo sapien
ctagtttgtggtcctgacaaagaaa

SEQ ID NO: 2479702 - DNA, 25 bp, Homo sapien
agtgaagatggcagatttccaaaca

SEQ ID NO: 2479703 - DNA, 25 bp, Homo sapien
cagtgaagatggcagatttccaaac

SEQ ID NO: 2479704 - DNA, 25 bp, Homo sapien
acatttggcaatccagcaacactaa

SEQ ID NO: 2479705 - DNA, 25 bp, Homo sapien
tggcaatccagcaacactaattttc

SEQ ID NO: 2479706 - DNA, 25 bp, Homo sapien
attaaatacctcaggctgggctcgg

SEQ ID NO: 2479707 - DNA, 25 bp, Homo sapien
caaatcagcagcaaaggtacctggg

SEQ ID NO: 2479708 - DNA, 25 bp, Homo sapien
gagagccccacggtttgttctgcag

SEQ ID NO: 2479709 - DNA, 25 bp, Homo sapien
ataaacaccgcgaacaggaaccaag

SEQ ID NO: 2479710 - DNA, 25 bp, Homo sapien
caagacttgggcatactccctctac

SEQ ID NO: 2479711 - DNA, 25 bp, Homo sapien
tcttccagggacaccttatcaagag

SEQ ID NO: 2479712 - DNA, 25 bp, Homo sapien
tcgcttcaggttacgtttggctgtc

SEQ ID NO: 2479713 - DNA, 25 bp, Homo sapien
tcctccttgctagcttttctagctg

SEQ ID NO: 2479714 - DNA, 25 bp, Homo sapien
gcctggatccgctgctgcagctctt

SEQ ID NO: 2479715 - DNA, 25 bp, Homo sapien
ctgcttgcgccaggtcccgtcaggt

SEQ ID NO: 2479716 - DNA, 25 bp, Homo sapien
cctggggcacatatccttctttcac

SEQ ID NO: 2479717 - DNA, 25 bp, Homo sapien
tcgctgtgttgacgcgatatacttg

SEQ ID NO: 2479718 - DNA, 25 bp, Homo sapien
cttctttcaccctccgctgcttgcg

SEQ ID NO: 2479719 - DNA, 25 bp, Homo sapien
catggtaatcacatttattcacacg

SEQ ID NO: 2479720 - DNA, 25 bp, Homo sapien
ggcacatggtaatcacatttattca

SEQ ID NO: 2479721 - DNA, 25 bp, Homo sapien
cggtagggcacatggtaatcacatt

SEQ ID NO: 2479722 - DNA, 25 bp, Homo sapien
atacggtagggcacatggtaatcac

SEQ ID NO: 2479723 - DNA, 25 bp, Homo sapien
gccctcagagatacaaatagcccat

SEQ ID NO: 2479724 - DNA, 25 bp, Homo sapien
gaagcttcttgaatggccatcctgt

SEQ ID NO: 2479725 - DNA, 25 bp, Homo sapien
gatggtatccaagggtgaagtcaaa

SEQ ID NO: 2479726 - DNA, 25 bp, Homo sapien
gccatcctgtgtggaagccctcaga

SEQ ID NO: 2479727 - DNA, 25 bp, Homo sapien
atcgcactgctgttccacatcagcc

SEQ ID NO: 2479728 - DNA, 25 bp, Homo sapien
cgcactgctgttccacatcagccat

SEQ ID NO: 2479729 - DNA, 25 bp, Homo sapien
catcgcactgctgttccacatcagc

SEQ ID NO: 2479730 - DNA, 25 bp, Homo sapien
tcgcactgctgttccacatcagcca

SEQ ID NO: 2479731 - DNA, 25 bp, Homo sapien
tagtctgtcacagccataaagagca

SEQ ID NO: 2479732 - DNA, 25 bp, Homo sapien
aaataaaaagtagtctgtcacagcc

SEQ ID NO: 2479733 - DNA, 25 bp, Homo sapien
aaaaagtagtctgtcacagccataa

SEQ ID NO: 2479734 - DNA, 25 bp, Homo sapien
agtagtctgtcacagccataaagag

SEQ ID NO: 2479735 - DNA, 25 bp, Homo sapien
tcacggtcaatactaacaggctggg

SEQ ID NO: 2479736 - DNA, 25 bp, Homo sapien
gggaacaataccttgagctcaggag

SEQ ID NO: 2479737 - DNA, 25 bp, Homo sapien
tatgcgtgggctggcaatagtgact

SEQ ID NO: 2479738 - DNA, 25 bp, Homo sapien
caactctctactccttatgcgtggg

SEQ ID NO: 2479739 - DNA, 25 bp, Homo sapien
tctcgtcagtaacatagggagtcgc

SEQ ID NO: 2479740 - DNA, 25 bp, Homo sapien
cgtcagtaacatagggagtcgccat

SEQ ID NO: 2479741 - DNA, 25 bp, Homo sapien
cgccggtctcgtcagtaacataggg

SEQ ID NO: 2479742 - DNA, 25 bp, Homo sapien
ggtctcgtcagtaacatagggagtc

SEQ ID NO: 2479743 - DNA, 25 bp, Homo sapien
gcaccatttcatgggcggaggtgga

SEQ ID NO: 2479744 - DNA, 25 bp, Homo sapien
aaacgcaaaccacttccggcgtgag

SEQ ID NO: 2479745 - DNA, 25 bp, Homo sapien
caagccaccatcttagtcttaaagg

SEQ ID NO: 2479746 - DNA, 25 bp, Homo sapien
ccaccggaagtggagtcccgatcgt

SEQ ID NO: 2479747 - DNA, 25 bp, Homo sapien
tgagcgcttgctgcctgtaaaacag

SEQ ID NO: 2479748 - DNA, 25 bp, Homo sapien
cattactgagcgcttgctgcctgta

SEQ ID NO: 2479749 - DNA, 25 bp, Homo sapien
gcgcttgctgcctgtaaaacagtcc

SEQ ID NO: 2479750 - DNA, 25 bp, Homo sapien
tactgagcgcttgctgcctgtaaaa

SEQ ID NO: 2479751 - DNA, 25 bp, Homo sapien
gagaagttccgaggcacagtccctc

SEQ ID NO: 2479752 - DNA, 25 bp, Homo sapien
ggagccaagagaagttccgaggcac

SEQ ID NO: 2479753 - DNA, 25 bp, Homo sapien
ccaagagaagttccgaggcacagtc

SEQ ID NO: 2479754 - DNA, 25 bp, Homo sapien
ccaggaactcctcgtacgtccagga

SEQ ID NO: 2479755 - DNA, 25 bp, Homo sapien
aggaagaatatccaggctctggcct

SEQ ID NO: 2479756 - DNA, 25 bp, Homo sapien
gacaaactccaggaacgcactgggg

SEQ ID NO: 2479757 - DNA, 25 bp, Homo sapien
tgcacccagatctcagagcggcttg

SEQ ID NO: 2479758 - DNA, 25 bp, Homo sapien
ggaaaagggcgcaaggcccacctgc

SEQ ID NO: 2479759 - DNA, 25 bp, Homo sapien
tctccgtagccgcagggctgccggc

SEQ ID NO: 2479760 - DNA, 25 bp, Homo sapien
tccgtagccgcagggctgccggcag

SEQ ID NO: 2479761 - DNA, 25 bp, Homo sapien
ctgtctccgtagccgcagggctgcc

SEQ ID NO: 2479762 - DNA, 25 bp, Homo sapien
tgtctccgtagccgcagggctgccg

SEQ ID NO: 2479763 - DNA, 25 bp, Homo sapien
attcggcggcgaagtgatgagggcc

SEQ ID NO: 2479764 - DNA, 25 bp, Homo sapien
gaagaggcagcggaccaggttgggc

SEQ ID NO: 2479765 - DNA, 25 bp, Homo sapien
gatgagggccctagttgcttctcgc

SEQ ID NO: 2479766 - DNA, 25 bp, Homo sapien
ccagacctcctaaccctgagtgcct

SEQ ID NO: 2479767 - DNA, 25 bp, Homo sapien
cttagtttaatgtccagcagtaccc

SEQ ID NO: 2479768 - DNA, 25 bp, Homo sapien
tggcttagtttaatgtccagcagta

SEQ ID NO: 2479769 - DNA, 25 bp, Homo sapien
atccccactttggcttagtttaatg

SEQ ID NO: 2479770 - DNA, 25 bp, Homo sapien
gcttagtttaatgtccagcagtacc

SEQ ID NO: 2479771 - DNA, 25 bp, Homo sapien
cccgctcattcggagggatggtgaa

SEQ ID NO: 2479772 - DNA, 25 bp, Homo sapien
cgcgagccctctcaagcaaggtaga

SEQ ID NO: 2479773 - DNA, 25 bp, Homo sapien
tccacagtgccgcacgggtggagaa

SEQ ID NO: 2479774 - DNA, 25 bp, Homo sapien
agtcctcttcggaacctccacagtg

SEQ ID NO: 2479775 - DNA, 25 bp, Homo sapien
tcacttttcaccttgataggagaaa

SEQ ID NO: 2479776 - DNA, 25 bp, Homo sapien
cacttttcaccttgataggagaaat

SEQ ID NO: 2479777 - DNA, 25 bp, Homo sapien
ctcccgaggctctgtacattgctgc

SEQ ID NO: 2479778 - DNA, 25 bp, Homo sapien
gactctactcccgaggctctgtaca

SEQ ID NO: 2479779 - DNA, 25 bp, Homo sapien
ggcttcttgagctaagggggacacc

SEQ ID NO: 2479780 - DNA, 25 bp, Homo sapien
cctcacagtatttattatcctgcac

SEQ ID NO: 2479781 - DNA, 25 bp, Homo sapien
ttaatagtagtctcccagggaagac

SEQ ID NO: 2479782 - DNA, 25 bp, Homo sapien
ttatttcagttaatagtagtctccc

SEQ ID NO: 2479783 - DNA, 25 bp, Homo sapien
gggaaatataggtgtttctgtcaac

SEQ ID NO: 2479784 - DNA, 25 bp, Homo sapien
aaatataggtgtttctgtcaactcc

SEQ ID NO: 2479785 - DNA, 25 bp, Homo sapien
ggggtagacgcagccagtgactgct

SEQ ID NO: 2479786 - DNA, 25 bp, Homo sapien
tgttctcaccaatgggacaagagca

SEQ ID NO: 2479787 - DNA, 25 bp, Homo sapien
caagagcagaagatgcggggtagac

SEQ ID NO: 2479788 - DNA, 25 bp, Homo sapien
tctcaccaatgggacaagagcagaa

SEQ ID NO: 2479789 - DNA, 25 bp, Homo sapien
ctggggtacggagaagtcttgcttc

SEQ ID NO: 2479790 - DNA, 25 bp, Homo sapien
gaagtcttgcttcataagtctgcgc

SEQ ID NO: 2479791 - DNA, 25 bp, Homo sapien
agaagtcttgcttcataagtctgcg

SEQ ID NO: 2479792 - DNA, 25 bp, Homo sapien
actggggtacggagaagtcttgctt

SEQ ID NO: 2479793 - DNA, 25 bp, Homo sapien
agatgcaaggaccacagccatcaac

SEQ ID NO: 2479794 - DNA, 25 bp, Homo sapien
gatcagcggaacctgcccaaggcct

SEQ ID NO: 2479795 - DNA, 25 bp, Homo sapien
aacaccagcaagatgcccacgatca

SEQ ID NO: 2479796 - DNA, 25 bp, Homo sapien
tgcccacgatcagcggaacctgccc

SEQ ID NO: 2479797 - DNA, 25 bp, Homo sapien
ccactgccaggctgttggtatcagc

SEQ ID NO: 2479798 - DNA, 25 bp, Homo sapien
gagccacccttcagtatctggtgca

SEQ ID NO: 2479799 - DNA, 25 bp, Homo sapien
tggcgatgagatctccatgcaggct

SEQ ID NO: 2479800 - DNA, 25 bp, Homo sapien
cagagacacattgaggcagtatgtc

SEQ ID NO: 2479801 - DNA, 25 bp, Homo sapien
acagcctgcaggatctcggcacttt

SEQ ID NO: 2479802 - DNA, 25 bp, Homo sapien
caggatctcggcactttcaataccc

SEQ ID NO: 2479803 - DNA, 25 bp, Homo sapien
gacacagtcagctcaaatgcatccc

SEQ ID NO: 2479804 - DNA, 25 bp, Homo sapien
gcaggacacagtcagctcaaatgca

SEQ ID NO: 2479805 - DNA, 25 bp, Homo sapien
aaggtggctgtaccatccagcaggg

SEQ ID NO: 2479806 - DNA, 25 bp, Homo sapien
gtctcttcaccagccttaaggtggc

SEQ ID NO: 2479807 - DNA, 25 bp, Homo sapien
cagggtgacggaaaaggaaccatat

SEQ ID NO: 2479808 - DNA, 25 bp, Homo sapien
tatcgatacagaacacaatccaggg

SEQ ID NO: 2479809 - DNA, 25 bp, Homo sapien
gacctgggaaaccttattctataga

SEQ ID NO: 2479810 - DNA, 25 bp, Homo sapien
gagaggatcaaggaggcaagatcaa

SEQ ID NO: 2479811 - DNA, 25 bp, Homo sapien
ttatcacaccccacactatgtcagg

SEQ ID NO: 2479812 - DNA, 25 bp, Homo sapien
gcttggaatcagataagacctggga

SEQ ID NO: 2479813 - DNA, 25 bp, Homo sapien
ggctcagggataggtagctctctag

SEQ ID NO: 2479814 - DNA, 25 bp, Homo sapien
tagacatgattgagctggcatctgg

SEQ ID NO: 2479815 - DNA, 25 bp, Homo sapien
ctgtaatactttccgtagacatgat

SEQ ID NO: 2479816 - DNA, 25 bp, Homo sapien
tcaggctcagggataggtagctctc

SEQ ID NO: 2479817 - DNA, 25 bp, Homo sapien
ctccacccactctgtagttgttacc

SEQ ID NO: 2479818 - DNA, 25 bp, Homo sapien
cacccactctgtagttgttacctgt

SEQ ID NO: 2479819 - DNA, 25 bp, Homo sapien
ctgtggtctccacccactctgtagt

SEQ ID NO: 2479820 - DNA, 25 bp, Homo sapien
ccactctgtagttgttacctgtgca

SEQ ID NO: 2479821 - DNA, 25 bp, Homo sapien
attgatacctctgcaggtgtcatac

SEQ ID NO: 2479822 - DNA, 25 bp, Homo sapien
ctgtggttccagaaagcaccacaat

SEQ ID NO: 2479823 - DNA, 25 bp, Homo sapien
ggttccagaaagcaccacaattgat

SEQ ID NO: 2479824 - DNA, 25 bp, Homo sapien
gaaagcaccacaattgatacctctg

SEQ ID NO: 2479825 - DNA, 25 bp, Homo sapien
cagtgtggtacccatgacctctgaa

SEQ ID NO: 2479826 - DNA, 25 bp, Homo sapien
tctctgccagtgtggtacccatgac

SEQ ID NO: 2479827 - DNA, 25 bp, Homo sapien
gccagtgtggtacccatgacctctg

SEQ ID NO: 2479828 - DNA, 25 bp, Homo sapien
tgtggtacccatgacctctgaaact

SEQ ID NO: 2479829 - DNA, 25 bp, Homo sapien
gcttatgacttcagtggttggcacc

SEQ ID NO: 2479830 - DNA, 25 bp, Homo sapien
cacaggtgcagtgcttatgacttca

SEQ ID NO: 2479831 - DNA, 25 bp, Homo sapien
acaggtgcagtgcttatgacttcag

SEQ ID NO: 2479832 - DNA, 25 bp, Homo sapien
ctgcacaggtgcagtgcttatgact

SEQ ID NO: 2479833 - DNA, 25 bp, Homo sapien
gcctgaccaggtgtagtacccacaa

SEQ ID NO: 2479834 - DNA, 25 bp, Homo sapien
ggtgtagtacccacaacttctgtag

SEQ ID NO: 2479835 - DNA, 25 bp, Homo sapien
cagttggcgcctgaccaggtgtagt

SEQ ID NO: 2479836 - DNA, 25 bp, Homo sapien
tacccacaacttctgtagtaggcac

SEQ ID NO: 2479837 - DNA, 25 bp, Homo sapien
ctgtgcccatctgtggtgcctggaa

SEQ ID NO: 2479838 - DNA, 25 bp, Homo sapien
tctgcagttggcctgtgcccatctg

SEQ ID NO: 2479839 - DNA, 25 bp, Homo sapien
cagttggcctgtgcccatctgtggt

SEQ ID NO: 2479840 - DNA, 25 bp, Homo sapien
tggcctgtgcccatctgtggtgcct

SEQ ID NO: 2479841 - DNA, 25 bp, Homo sapien
taagtatgagtgaccacaagtgccc

SEQ ID NO: 2479842 - DNA, 25 bp, Homo sapien
tcagcttcagccagatagccactgg

SEQ ID NO: 2479843 - DNA, 25 bp, Homo sapien
tgggacacgctcacggagaaaggca

SEQ ID NO: 2479844 - DNA, 25 bp, Homo sapien
tcccaggtgtaggagaggtcagctt

SEQ ID NO: 2479845 - DNA, 25 bp, Homo sapien
tagctccgggatccccggcgatggt

SEQ ID NO: 2479846 - DNA, 25 bp, Homo sapien
ggatccccggcgatggtagacagtc

SEQ ID NO: 2479847 - DNA, 25 bp, Homo sapien
cccggcgatggtagacagtcacttc

SEQ ID NO: 2479848 - DNA, 25 bp, Homo sapien
agaggcacatagctccgggatcccc

SEQ ID NO: 2479849 - DNA, 25 bp, Homo sapien
acactgggccccctagaacttgcca

SEQ ID NO: 2479850 - DNA, 25 bp, Homo sapien
actgggccccctagaacttgccagt

SEQ ID NO: 2479851 - DNA, 25 bp, Homo sapien
cactgggccccctagaacttgccag

SEQ ID NO: 2479852 - DNA, 25 bp, Homo sapien
catggggtaggactacaattgagga

SEQ ID NO: 2479853 - DNA, 25 bp, Homo sapien
gcggccaaaagaaaggtgatcaggt

SEQ ID NO: 2479854 - DNA, 25 bp, Homo sapien
caagtgtggatgataggctgagaag

SEQ ID NO: 2479855 - DNA, 25 bp, Homo sapien
gggtcctaatgaggcattccatggg

SEQ ID NO: 2479856 - DNA, 25 bp, Homo sapien
tttcctggggatacactggctgtcc

SEQ ID NO: 2479857 - DNA, 25 bp, Homo sapien
tcttccagacataaacaaagcttct

SEQ ID NO: 2479858 - DNA, 25 bp, Homo sapien
gatgcaggcatcgtcagtttcctgg

SEQ ID NO: 2479859 - DNA, 25 bp, Homo sapien
gaagatgcaggcatcgtcagtttcc

SEQ ID NO: 2479860 - DNA, 25 bp, Homo sapien
tacagagtcactctcaaaccctggc

SEQ ID NO: 2479861 - DNA, 25 bp, Homo sapien
ctgaaagataaatacagagtcactc

SEQ ID NO: 2479862 - DNA, 25 bp, Homo sapien
aaagataaatacagagtcactctca

SEQ ID NO: 2479863 - DNA, 25 bp, Homo sapien
atacagagtcactctcaaaccctgg

SEQ ID NO: 2479864 - DNA, 25 bp, Homo sapien
cattgatgatggtattgttgaccca

SEQ ID NO: 2479865 - DNA, 25 bp, Homo sapien
tgttgacccagataacctgcccatc

SEQ ID NO: 2479866 - DNA, 25 bp, Homo sapien
ccagggaagttcaaggcaatagaga

SEQ ID NO: 2479867 - DNA, 25 bp, Homo sapien
cattactgaccttgagggacacttg

SEQ ID NO: 2479868 - DNA, 25 bp, Homo sapien
ttggttctgagttgccttgagacac

SEQ ID NO: 2479869 - DNA, 25 bp, Homo sapien
tggttctgagttgccttgagacacc

SEQ ID NO: 2479870 - DNA, 25 bp, Homo sapien
ttctgagttgccttgagacaccaag

SEQ ID NO: 2479871 - DNA, 25 bp, Homo sapien
gttctgagttgccttgagacaccaa

SEQ ID NO: 2479872 - DNA, 25 bp, Homo sapien
cagtctttttgttaagagccttagg

SEQ ID NO: 2479873 - DNA, 25 bp, Homo sapien
taaagtatgtaaaagcaaatcccag

SEQ ID NO: 2479874 - DNA, 25 bp, Homo sapien
tctgtgacactaaacatctagggag

SEQ ID NO: 2479875 - DNA, 25 bp, Homo sapien
cgaggaaagtcacatcaaggagaac

SEQ ID NO: 2479876 - DNA, 25 bp, Homo sapien
gccagcaaagcacctatcacagcca

SEQ ID NO: 2479877 - DNA, 25 bp, Homo sapien
aatgaagaaggcatctttttagcac

SEQ ID NO: 2479878 - DNA, 25 bp, Homo sapien
gaagaaggcatctttttagcaccag

SEQ ID NO: 2479879 - DNA, 25 bp, Homo sapien
tgaagaaggcatctttttagcacca

SEQ ID NO: 2479880 - DNA, 25 bp, Homo sapien
gcactggggggactgggataggccc

SEQ ID NO: 2479881 - DNA, 25 bp, Homo sapien
aggcactggggggactgggataggc

SEQ ID NO: 2479882 - DNA, 25 bp, Homo sapien
ccaaaggcactggggggactgggat

SEQ ID NO: 2479883 - DNA, 25 bp, Homo sapien
caaccaaaggcactggggggactgg

SEQ ID NO: 2479884 - DNA, 25 bp, Homo sapien
gctatgaggcagaggcaacgactcc

SEQ ID NO: 2479885 - DNA, 25 bp, Homo sapien
gacacaacagtttatcatgggagag

SEQ ID NO: 2479886 - DNA, 25 bp, Homo sapien
gattcctttgcaacgagattcccgg

SEQ ID NO: 2479887 - DNA, 25 bp, Homo sapien
tcatcttgatgcactcccgggcaag

SEQ ID NO: 2479888 - DNA, 25 bp, Homo sapien
ctggggcgggatcatttgcggggag

SEQ ID NO: 2479889 - DNA, 25 bp, Homo sapien
tgggtggatttgttgccatgtgcac

SEQ ID NO: 2479890 - DNA, 25 bp, Homo sapien
tgagggcatgggtaaaaatatttct

SEQ ID NO: 2479891 - DNA, 25 bp, Homo sapien
ctaccccataggagttagaagttag

SEQ ID NO: 2479892 - DNA, 25 bp, Homo sapien
cacccttgtccttgagtgctcttgc

SEQ ID NO: 2479893 - DNA, 25 bp, Homo sapien
tatttacatttacatacgattctga

SEQ ID NO: 2479894 - DNA, 25 bp, Homo sapien
tgaaaaagcgtctccaagctaccac

SEQ ID NO: 2479895 - DNA, 25 bp, Homo sapien
ccaaatacgcctgtccactgaagcc

SEQ ID NO: 2479896 - DNA, 25 bp, Homo sapien
aagctaccacttcttgtagttgcca

SEQ ID NO: 2479897 - DNA, 25 bp, Homo sapien
ggaagcgctgatgtcagggttactt

SEQ ID NO: 2479898 - DNA, 25 bp, Homo sapien
gcgctgatgtcagggttacttaaat

SEQ ID NO: 2479899 - DNA, 25 bp, Homo sapien
tgatgtcagggttacttaaattccc

SEQ ID NO: 2479900 - DNA, 25 bp, Homo sapien
gaagcgctgatgtcagggttactta

SEQ ID NO: 2479901 - DNA, 25 bp, Homo sapien
aagagactcgcctttctccagagga

SEQ ID NO: 2479902 - DNA, 25 bp, Homo sapien
tgtcgcgtcccttgctcgtacttgt

SEQ ID NO: 2479903 - DNA, 25 bp, Homo sapien
tctccctcgctattggcttgtggcc

SEQ ID NO: 2479904 - DNA, 25 bp, Homo sapien
tcgtacttgttggtgacagcgccca

SEQ ID NO: 2479905 - DNA, 25 bp, Homo sapien
gtgagtcgggaaggcggctgggctg

SEQ ID NO: 2479906 - DNA, 25 bp, Homo sapien
ccgaagttggtgagtcgggaaggcg

SEQ ID NO: 2479907 - DNA, 25 bp, Homo sapien
ctgggaccccgaagttggtgagtcg

SEQ ID NO: 2479908 - DNA, 25 bp, Homo sapien
cccggcaggcctaatgggggtcgct

SEQ ID NO: 2479909 - DNA, 25 bp, Homo sapien
gaccctaaaacctgatctagtaaca

SEQ ID NO: 2479910 - DNA, 25 bp, Homo sapien
tccctagtgtagtgccgagctagcc

SEQ ID NO: 2479911 - DNA, 25 bp, Homo sapien
tccctcaggttcagcttccggggtg

SEQ ID NO: 2479912 - DNA, 25 bp, Homo sapien
tgaaaacccaggtaaggtctgaagc

SEQ ID NO: 2479913 - DNA, 25 bp, Homo sapien
gacttgagcaagatgtcccgggcca

SEQ ID NO: 2479914 - DNA, 25 bp, Homo sapien
agtactgggaggcttgttgccgttt

SEQ ID NO: 2479915 - DNA, 25 bp, Homo sapien
tactgggaggcttgttgccgtttcc

SEQ ID NO: 2479916 - DNA, 25 bp, Homo sapien
cttgagcaagatgtcccgggccagg

SEQ ID NO: 2479917 - DNA, 25 bp, Homo sapien
gaaagatttctcatccgtgatgtcg

SEQ ID NO: 2479918 - DNA, 25 bp, Homo sapien
aaatcggattccatgctctcgagcc

SEQ ID NO: 2479919 - DNA, 25 bp, Homo sapien
tattgtcttgaaccgctcttggcca

SEQ ID NO: 2479920 - DNA, 25 bp, Homo sapien
catggctccacggtagtaggcagta

SEQ ID NO: 2479921 - DNA, 25 bp, Homo sapien
aagaggtggtcgtaggctttggcca

SEQ ID NO: 2479922 - DNA, 25 bp, Homo sapien
tgcaaagcgaatgatcagacaagtc

SEQ ID NO: 2479923 - DNA, 25 bp, Homo sapien
tcccctctatatccacagtgcggat

SEQ ID NO: 2479924 - DNA, 25 bp, Homo sapien
ccacagtgcggatcttgaaatcaat

SEQ ID NO: 2479925 - DNA, 25 bp, Homo sapien
gactgagtctcgctgttgctctgtc

SEQ ID NO: 2479926 - DNA, 25 bp, Homo sapien
ctgagtctcgctgttgctctgtcgc

SEQ ID NO: 2479927 - DNA, 25 bp, Homo sapien
cacctcacaagttcaagcagttcac

SEQ ID NO: 2479928 - DNA, 25 bp, Homo sapien
gcgcatcagctcagtgcaccctcta

SEQ ID NO: 2479929 - DNA, 25 bp, Homo sapien
gcaggaggtgccttgtaagctaact

SEQ ID NO: 2479930 - DNA, 25 bp, Homo sapien
acattgcggtatccatgatttggcc

SEQ ID NO: 2479931 - DNA, 25 bp, Homo sapien
aaagaattttcactggttgcctgca

SEQ ID NO: 2479932 - DNA, 25 bp, Homo sapien
caactgtggctctgtaactcttcaa

SEQ ID NO: 2479933 - DNA, 25 bp, Homo sapien
ggagtgtctcaggatagcacaggcc

SEQ ID NO: 2479934 - DNA, 25 bp, Homo sapien
taattgagcaattgaggagtgtctc

SEQ ID NO: 2479935 - DNA, 25 bp, Homo sapien
aatctgaggttaatgcgaggttcga

SEQ ID NO: 2479936 - DNA, 25 bp, Homo sapien
cagtggcagctactcaagtcctatc

SEQ ID NO: 2479937 - DNA, 25 bp, Homo sapien
tatcttgggcctgggaaaccacttc

SEQ ID NO: 2479938 - DNA, 25 bp, Homo sapien
gaatgcgactgctgatttaccgatg

SEQ ID NO: 2479939 - DNA, 25 bp, Homo sapien
agcacccagtgcatcctttttacaa

SEQ ID NO: 2479940 - DNA, 25 bp, Homo sapien
caggatttggccttagcttctgggc

SEQ ID NO: 2479941 - DNA, 25 bp, Homo sapien
tgccaacttttcactgtcggttccc

SEQ ID NO: 2479942 - DNA, 25 bp, Homo sapien
atttccaaacacttaagagccaaag

SEQ ID NO: 2479943 - DNA, 25 bp, Homo sapien
ccaaagccaacttgccaacttttca

SEQ ID NO: 2479944 - DNA, 25 bp, Homo sapien
caaacacttaagagccaaagccaac

SEQ ID NO: 2479945 - DNA, 25 bp, Homo sapien
cgttccctgattcctggtaaaagct

SEQ ID NO: 2479946 - DNA, 25 bp, Homo sapien
ttatatctcttggtaatacccccca

SEQ ID NO: 2479947 - DNA, 25 bp, Homo sapien
aaatgatctttcaaaattaaaggtg

SEQ ID NO: 2479948 - DNA, 25 bp, Homo sapien
gatctttcaaaattaaaggtgaaca

SEQ ID NO: 2479949 - DNA, 25 bp, Homo sapien
aaggtgaacaccttcacttaaactg

SEQ ID NO: 2479950 - DNA, 25 bp, Homo sapien
tagttggagagccgaaaggaaagga

SEQ ID NO: 2479951 - DNA, 25 bp, Homo sapien
aactaagcgattgactttgctttcc

SEQ ID NO: 2479952 - DNA, 25 bp, Homo sapien
tcattcctggaatacgagaactaag

SEQ ID NO: 2479953 - DNA, 25 bp, Homo sapien
gaatacgagaactaagcgattgact

SEQ ID NO: 2479954 - DNA, 25 bp, Homo sapien
tcctggaatacgagaactaagcgat

SEQ ID NO: 2479955 - DNA, 25 bp, Homo sapien
tggtgcacaagggtcccattctttg

SEQ ID NO: 2479956 - DNA, 25 bp, Homo sapien
caccaggggtataatggactccgga

SEQ ID NO: 2479957 - DNA, 25 bp, Homo sapien
gagctccggacatacagccctggtg

SEQ ID NO: 2479958 - DNA, 25 bp, Homo sapien
tgtcagcccaacttttggattcctt

SEQ ID NO: 2479959 - DNA, 25 bp, Homo sapien
tgcagccggacataacggcgctggc

SEQ ID NO: 2479960 - DNA, 25 bp, Homo sapien
cccttctcgagaactcgcagagctg

SEQ ID NO: 2479961 - DNA, 25 bp, Homo sapien
tgctgaagacactggacccggtaag

SEQ ID NO: 2479962 - DNA, 25 bp, Homo sapien
gggctggtaaaattgcagtgctgaa

SEQ ID NO: 2479963 - DNA, 25 bp, Homo sapien
gcactgctctggtctagtacaaaca

SEQ ID NO: 2479964 - DNA, 25 bp, Homo sapien
ggtctagtacaaacaggctgctggc

SEQ ID NO: 2479965 - DNA, 25 bp, Homo sapien
agagagagtaatggtcccatggccc

SEQ ID NO: 2479966 - DNA, 25 bp, Homo sapien
gcagagagagtaatggtcccatggc

SEQ ID NO: 2479967 - DNA, 25 bp, Homo sapien
actgcgccgggcattgttgttaatc

SEQ ID NO: 2479968 - DNA, 25 bp, Homo sapien
cactgcgccgggcattgttgttaat

SEQ ID NO: 2479969 - DNA, 25 bp, Homo sapien
ccactgcgccgggcattgttgttaa

SEQ ID NO: 2479970 - DNA, 25 bp, Homo sapien
caacggcgggattacaaaggcttct

SEQ ID NO: 2479971 - DNA, 25 bp, Homo sapien
tactgggactgcctatggagcatcc

SEQ ID NO: 2479972 - DNA, 25 bp, Homo sapien
tctggagtggagaacaggagccatc

SEQ ID NO: 2479973 - DNA, 25 bp, Homo sapien
ggactggactcagaccctactggga

SEQ ID NO: 2479974 - DNA, 25 bp, Homo sapien
tacccaagtacacatatagcacatt

SEQ ID NO: 2479975 - DNA, 25 bp, Homo sapien
acccctcttggcctttgaacctgtg

SEQ ID NO: 2479976 - DNA, 25 bp, Homo sapien
gccaggaagtgtgagctgttacagc

SEQ ID NO: 2479977 - DNA, 25 bp, Homo sapien
ggaccttccctctttggacactatg

SEQ ID NO: 2479978 - DNA, 25 bp, Homo sapien
gagctcaggcagtacgtctgcctcg

SEQ ID NO: 2479979 - DNA, 25 bp, Homo sapien
aatctttcggcgctcggctactctc

SEQ ID NO: 2479980 - DNA, 25 bp, Homo sapien
gggacgctcggtgttcggccacgcc

SEQ ID NO: 2479981 - DNA, 25 bp, Homo sapien
ttaccttcggcagacgatggtgcct

SEQ ID NO: 2479982 - DNA, 25 bp, Homo sapien
gacgatggtgcctttcggatttgaa

SEQ ID NO: 2479983 - DNA, 25 bp, Homo sapien
ggatttaggtcagcaagacgcagac

SEQ ID NO: 2479984 - DNA, 25 bp, Homo sapien
catgtattagggacttttgggcaca

SEQ ID NO: 2479985 - DNA, 25 bp, Homo sapien
ggtagtcctcaagctaagaggccgt

SEQ ID NO: 2479986 - DNA, 25 bp, Homo sapien
ggaccctgtgagtgtggacaatgcc

SEQ ID NO: 2479987 - DNA, 25 bp, Homo sapien
ctaataggtggacttcagggatgaa

SEQ ID NO: 2479988 - DNA, 25 bp, Homo sapien
ccatatttaggcctgtgtgcacaca

SEQ ID NO: 2479989 - DNA, 25 bp, Homo sapien
gcagataatgtagaaggctaccagt

SEQ ID NO: 2479990 - DNA, 25 bp, Homo sapien
tagctgggcaattgggtaaagtact

SEQ ID NO: 2479991 - DNA, 25 bp, Homo sapien
ctacagagcatttcacttgtgtttc

SEQ ID NO: 2479992 - DNA, 25 bp, Homo sapien
tgtgtttctccatgtgatcctcata

SEQ ID NO: 2479993 - DNA, 25 bp, Homo sapien
tctccatgtgatcctcataacaatt

SEQ ID NO: 2479994 - DNA, 25 bp, Homo sapien
cataacaattccaaggtagatgtga

SEQ ID NO: 2479995 - DNA, 25 bp, Homo sapien
cagttttgatgctgatacctgcccc

SEQ ID NO: 2479996 - DNA, 25 bp, Homo sapien
taggaagctcctcttagtactaaga

SEQ ID NO: 2479997 - DNA, 25 bp, Homo sapien
gactgagagtcctattcccctagta

SEQ ID NO: 2479998 - DNA, 25 bp, Homo sapien
ggcagcttgcactattcttgaatga

SEQ ID NO: 2479999 - DNA, 25 bp, Homo sapien
gagcctcttggcttcgcactacaat

SEQ ID NO: 2480000 - DNA, 25 bp, Homo sapien
gccgccttcggtctaagcacttggg

SEQ ID NO: 2480001 - DNA, 25 bp, Homo sapien
aaggactgtcagagaaatgagccca

SEQ ID NO: 2480002 - DNA, 25 bp, Homo sapien
tcgcactacaattcccaccaagcat

SEQ ID NO: 2480003 - DNA, 25 bp, Homo sapien
gcaccaggatgctcattactattga

SEQ ID NO: 2480004 - DNA, 25 bp, Homo sapien
tagtagtactaccttcgtcattatg

SEQ ID NO: 2480005 - DNA, 25 bp, Homo sapien
aaaaacttggtagggtgctgtggca

SEQ ID NO: 2480006 - DNA, 25 bp, Homo sapien
ggttcttacggacacagaaatggga

SEQ ID NO: 2480007 - DNA, 25 bp, Homo sapien
attcttaaagctttcgatctaatgg

SEQ ID NO: 2480008 - DNA, 25 bp, Homo sapien
aagctttcgatctaatggagtttgc

SEQ ID NO: 2480009 - DNA, 25 bp, Homo sapien
gctttcgatctaatggagtttgcct

SEQ ID NO: 2480010 - DNA, 25 bp, Homo sapien
cttaaagctttcgatctaatggagt

SEQ ID NO: 2480011 - DNA, 25 bp, Homo sapien
agccgccattgtcatcctggcccgt

SEQ ID NO: 2480012 - DNA, 25 bp, Homo sapien
aagccgccattgtcatcctggcccg

SEQ ID NO: 2480013 - DNA, 25 bp, Homo sapien
tcattgaggacaagagtggacggca

SEQ ID NO: 2480014 - DNA, 25 bp, Homo sapien
gccgctaggagagaggacaatatta

SEQ ID NO: 2480015 - DNA, 25 bp, Homo sapien
gatccctgagggtgaatcaatcaag

SEQ ID NO: 2480016 - DNA, 25 bp, Homo sapien
gaaggaaattctgtatgccgctagg

SEQ ID NO: 2480017 - DNA, 25 bp, Homo sapien
tttacacaaagggaagtcgggcatg

SEQ ID NO: 2480018 - DNA, 25 bp, Homo sapien
gcactcagggagcatttaatggcag

SEQ ID NO: 2480019 - DNA, 25 bp, Homo sapien
tcagcacttaactatgagccaggca

SEQ ID NO: 2480020 - DNA, 25 bp, Homo sapien
taatgcccagagaacgtaactcctg

SEQ ID NO: 2480021 - DNA, 25 bp, Homo sapien
cagctattggcgacagaagtgcccc

SEQ ID NO: 2480022 - DNA, 25 bp, Homo sapien
ttacttcagctcttaccctggtggg

SEQ ID NO: 2480023 - DNA, 25 bp, Homo sapien
taaggagaccgttggagagcactcc

SEQ ID NO: 2480024 - DNA, 25 bp, Homo sapien
ctcgaaaaggaagcgcccagctatt

SEQ ID NO: 2480025 - DNA, 25 bp, Homo sapien
ggtttgtgccccactacagaacagg

SEQ ID NO: 2480026 - DNA, 25 bp, Homo sapien
gaggcttcccaaccacggaagacta

SEQ ID NO: 2480027 - DNA, 25 bp, Homo sapien
tcaaaattcatcgtcttcaagcccc

SEQ ID NO: 2480028 - DNA, 25 bp, Homo sapien
ccccagactctgtgaagtgcagttc

SEQ ID NO: 2480029 - DNA, 25 bp, Homo sapien
tcttgaattcaagaagccaggaaga

SEQ ID NO: 2480030 - DNA, 25 bp, Homo sapien
tctaagtagaaacagtcctcactgc

SEQ ID NO: 2480031 - DNA, 25 bp, Homo sapien
gaatggtacactagttttcagggcc

SEQ ID NO: 2480032 - DNA, 25 bp, Homo sapien
gggctaggacacaatgtctactgca

SEQ ID NO: 2480033 - DNA, 25 bp, Homo sapien
gcgaatgcgcaggtacgttgagact

SEQ ID NO: 2480034 - DNA, 25 bp, Homo sapien
gaaaggcaactctggtttgaggtgt

SEQ ID NO: 2480035 - DNA, 25 bp, Homo sapien
tatctgctgcttgtgatcggttgct

SEQ ID NO: 2480036 - DNA, 25 bp, Homo sapien
taacagaacagagaacgatagaacc

SEQ ID NO: 2480037 - DNA, 25 bp, Homo sapien
gagggaggcgggagacttaggtgga

SEQ ID NO: 2480038 - DNA, 25 bp, Homo sapien
gacttaggtggaggccgcgcccgga

SEQ ID NO: 2480039 - DNA, 25 bp, Homo sapien
ctagaggaccggcaggcggcagcag

SEQ ID NO: 2480040 - DNA, 25 bp, Homo sapien
aggcggcagcagcaactacggcggc

SEQ ID NO: 2480041 - DNA, 25 bp, Homo sapien
tccagaacaaggagtgtagccgccc

SEQ ID NO: 2480042 - DNA, 25 bp, Homo sapien
ttcaccggctgacctaccaaatggc

SEQ ID NO: 2480043 - DNA, 25 bp, Homo sapien
caaggaggaggtccctatctgccgt

SEQ ID NO: 2480044 - DNA, 25 bp, Homo sapien
tatcgccacccagacatgagcgagg

SEQ ID NO: 2480045 - DNA, 25 bp, Homo sapien
acagcacaggttccagcactggttt

SEQ ID NO: 2480046 - DNA, 25 bp, Homo sapien
gcacaggttccagcactggttttag

SEQ ID NO: 2480047 - DNA, 25 bp, Homo sapien
gtgtcctcttatgggaatttgggaa

SEQ ID NO: 2480048 - DNA, 25 bp, Homo sapien
tgggaacatccctcgtcttgtcctc

SEQ ID NO: 2480049 - DNA, 25 bp, Homo sapien
ctttatcagttggtgagcaggtcac

SEQ ID NO: 2480050 - DNA, 25 bp, Homo sapien
tgagcagggacaggttttaagcagc

SEQ ID NO: 2480051 - DNA, 25 bp, Homo sapien
ttaagcagctttggtaaacacaggc

SEQ ID NO: 2480052 - DNA, 25 bp, Homo sapien
gtcaagatactgctagccctaggga

SEQ ID NO: 2480053 - DNA, 25 bp, Homo sapien
ggccctggcggtgctgacttcattc

SEQ ID NO: 2480054 - DNA, 25 bp, Homo sapien
tgctgacttcattcgggaggcggtt

SEQ ID NO: 2480055 - DNA, 25 bp, Homo sapien
ctggcggtgctgacttcattcggga

SEQ ID NO: 2480056 - DNA, 25 bp, Homo sapien
aatggagcgatctccaggagagggc

SEQ ID NO: 2480057 - DNA, 25 bp, Homo sapien
tatgagtcatcgagagctacctgcc

SEQ ID NO: 2480058 - DNA, 25 bp, Homo sapien
cgcgacgagaaagaacggagccttc

SEQ ID NO: 2480059 - DNA, 25 bp, Homo sapien
agcagcgaggcagctactggacgac

SEQ ID NO: 2480060 - DNA, 25 bp, Homo sapien
gactcagcgtgggtttcgtgctctt

SEQ ID NO: 2480061 - DNA, 25 bp, Homo sapien
ggacctgtagcctaggcagcaagtg

SEQ ID NO: 2480062 - DNA, 25 bp, Homo sapien
ttcccttaaaaggagtcacacagag

SEQ ID NO: 2480063 - DNA, 25 bp, Homo sapien
ccccaatacaaagcgcaggtgtcct

SEQ ID NO: 2480064 - DNA, 25 bp, Homo sapien
aattgacactagacagacacagcca

SEQ ID NO: 2480065 - DNA, 25 bp, Homo sapien
caaactccaatttgactggacctcc

SEQ ID NO: 2480066 - DNA, 25 bp, Homo sapien
cgcggccagcctggaaccaggactt

SEQ ID NO: 2480067 - DNA, 25 bp, Homo sapien
taaatcccaggattccctcaaactc

SEQ ID NO: 2480068 - DNA, 25 bp, Homo sapien
gccagcctggaaccaggacttttta

SEQ ID NO: 2480069 - DNA, 25 bp, Homo sapien
cgtgagaaccgcgccccagcctaag

SEQ ID NO: 2480070 - DNA, 25 bp, Homo sapien
tgagaaccgcgccccagcctaaggg

SEQ ID NO: 2480071 - DNA, 25 bp, Homo sapien
accgcgccccagcctaagggtagat

SEQ ID NO: 2480072 - DNA, 25 bp, Homo sapien
ccgcgccccagcctaagggtagatt

SEQ ID NO: 2480073 - DNA, 25 bp, Homo sapien
ttttttgcccaagtgcctaggctgc

SEQ ID NO: 2480074 - DNA, 25 bp, Homo sapien
tagtggcatatcagtcttggagctc

SEQ ID NO: 2480075 - DNA, 25 bp, Homo sapien
tatgttccctttactgcacggcctt

SEQ ID NO: 2480076 - DNA, 25 bp, Homo sapien
catattcgggcctttgcctgaccaa

SEQ ID NO: 2480077 - DNA, 25 bp, Homo sapien
caaaagagagtgcagcggttctccc

SEQ ID NO: 2480078 - DNA, 25 bp, Homo sapien
gagttctttcagcagtaggtccagg

SEQ ID NO: 2480079 - DNA, 25 bp, Homo sapien
gggccgttaagtgcttccagctatc

SEQ ID NO: 2480080 - DNA, 25 bp, Homo sapien
tcagttccgggacataaagcgcgct

SEQ ID NO: 2480081 - DNA, 25 bp, Homo sapien
tttctgcatggagctgactagggag

SEQ ID NO: 2480082 - DNA, 25 bp, Homo sapien
tgaggttttacttatgcggccctgg

SEQ ID NO: 2480083 - DNA, 25 bp, Homo sapien
tacctccttacctctagaatgggcc

SEQ ID NO: 2480084 - DNA, 25 bp, Homo sapien
ttctggccctggagcatgggtagct

SEQ ID NO: 2480085 - DNA, 25 bp, Homo sapien
gaacacagaatgcacccacaagatg

SEQ ID NO: 2480086 - DNA, 25 bp, Homo sapien
agaaacatggggacatgaggaacaa

SEQ ID NO: 2480087 - DNA, 25 bp, Homo sapien
gaacagaagaaaggtgctaagacgc

SEQ ID NO: 2480088 - DNA, 25 bp, Homo sapien
gaatgcacccacaagatggaactga

SEQ ID NO: 2480089 - DNA, 25 bp, Homo sapien
gccgcaggagggattattagtacga

SEQ ID NO: 2480090 - DNA, 25 bp, Homo sapien
gagatggaatctgcgccctgttcta

SEQ ID NO: 2480091 - DNA, 25 bp, Homo sapien
tgaactcgaataagctcagcgtagg

SEQ ID NO: 2480092 - DNA, 25 bp, Homo sapien
gaagcagagttgagctgcgagccaa

SEQ ID NO: 2480093 - DNA, 25 bp, Homo sapien
gctgttcctggaaccgtgatgtcca

SEQ ID NO: 2480094 - DNA, 25 bp, Homo sapien
ggtgagggggagagatgtctggctg

SEQ ID NO: 2480095 - DNA, 25 bp, Homo sapien
gggggagagatgtctggctggctcc

SEQ ID NO: 2480096 - DNA, 25 bp, Homo sapien
ttcctggaaccgtgatgtccacagg

SEQ ID NO: 2480097 - DNA, 25 bp, Homo sapien
cacaggggtgaccgtgcctgggctc

SEQ ID NO: 2480098 - DNA, 25 bp, Homo sapien
aggggtgaccgtgcctgggctcggg

SEQ ID NO: 2480099 - DNA, 25 bp, Homo sapien
ggtggcacaggggtgaccgtgcctg

SEQ ID NO: 2480100 - DNA, 25 bp, Homo sapien
gaggtggcacaggggtgaccgtgcc

SEQ ID NO: 2480101 - DNA, 25 bp, Homo sapien
tgtggaaactctaatacctgacctc

SEQ ID NO: 2480102 - DNA, 25 bp, Homo sapien
tgccacaggattgctccatgaccca

SEQ ID NO: 2480103 - DNA, 25 bp, Homo sapien
ccaacatcatcccaaaggtggcagc

SEQ ID NO: 2480104 - DNA, 25 bp, Homo sapien
taaatcagttagagtacgccggaga

SEQ ID NO: 2480105 - DNA, 25 bp, Homo sapien
cctccaggtggacccctctccctca

SEQ ID NO: 2480106 - DNA, 25 bp, Homo sapien
ctccaggtggacccctctccctcac

SEQ ID NO: 2480107 - DNA, 25 bp, Homo sapien
ttctcccctcttggccccttctcac

SEQ ID NO: 2480108 - DNA, 25 bp, Homo sapien
cttctcccctcttggccccttctca

SEQ ID NO: 2480109 - DNA, 25 bp, Homo sapien
ttgccctgaacagctgccacaatgg

SEQ ID NO: 2480110 - DNA, 25 bp, Homo sapien
cactgggcaggaggttgccctgaac

SEQ ID NO: 2480111 - DNA, 25 bp, Homo sapien
gaacagctgccacaatggcagggct

SEQ ID NO: 2480112 - DNA, 25 bp, Homo sapien
agctgccacaatggcagggctttgg

SEQ ID NO: 2480113 - DNA, 25 bp, Homo sapien
ggtggtcgccggcaggttaggatgt

SEQ ID NO: 2480114 - DNA, 25 bp, Homo sapien
atgtagagggttcgccatggacaca

SEQ ID NO: 2480115 - DNA, 25 bp, Homo sapien
gggaggttaatactgatggagtcag

SEQ ID NO: 2480116 - DNA, 25 bp, Homo sapien
agccccggcccgagaggcaaggaag

SEQ ID NO: 2480117 - DNA, 25 bp, Homo sapien
aggaggcggcatgccaaaaggcaaa

SEQ ID NO: 2480118 - DNA, 25 bp, Homo sapien
catgccaaaaggcaaacccaaagga

SEQ ID NO: 2480119 - DNA, 25 bp, Homo sapien
accaaatgggatgatggatggagca

SEQ ID NO: 2480120 - DNA, 25 bp, Homo sapien
ctagactaccaaatgggatgatgga

SEQ ID NO: 2480121 - DNA, 25 bp, Homo sapien
tggcatcattgagggaggagtttgt

SEQ ID NO: 2480122 - DNA, 25 bp, Homo sapien
actgcccctggcatcattgagggag

SEQ ID NO: 2480123 - DNA, 25 bp, Homo sapien
ggcactgcccctggcatcattgagg

SEQ ID NO: 2480124 - DNA, 25 bp, Homo sapien
cgccacgcctgggtgcccgctgcct

SEQ ID NO: 2480125 - DNA, 25 bp, Homo sapien
caacaaaagttctggaacataacac

SEQ ID NO: 2480126 - DNA, 25 bp, Homo sapien
ttcacctggattcctctagccaaca

SEQ ID NO: 2480127 - DNA, 25 bp, Homo sapien
tttgaggagaactgggacattcacc

SEQ ID NO: 2480128 - DNA, 25 bp, Homo sapien
aattgaggctaacctcatctccaca

SEQ ID NO: 2480129 - DNA, 25 bp, Homo sapien
cctggtgggactgccccaggctggg

SEQ ID NO: 2480130 - DNA, 25 bp, Homo sapien
ctggggggctccagctggttgctgc

SEQ ID NO: 2480131 - DNA, 25 bp, Homo sapien
tggccctgcagttgaccctgcctgc

SEQ ID NO: 2480132 - DNA, 25 bp, Homo sapien
ccctgcagttgaccctgcctgccca

SEQ ID NO: 2480133 - DNA, 25 bp, Homo sapien
caggagcagggactacagaggctgg

SEQ ID NO: 2480134 - DNA, 25 bp, Homo sapien
acagccaagccatggactgcgggtg

SEQ ID NO: 2480135 - DNA, 25 bp, Homo sapien
ctgttcagaagggcccaaacttcct

SEQ ID NO: 2480136 - DNA, 25 bp, Homo sapien
catctgttggaagtgctgctgccga

SEQ ID NO: 2480137 - DNA, 25 bp, Homo sapien
aggcttgtctgtcggccaggagctg

SEQ ID NO: 2480138 - DNA, 25 bp, Homo sapien
cagctgctccatgtggaaggcttgt

SEQ ID NO: 2480139 - DNA, 25 bp, Homo sapien
tcagctgctccatgtggaaggcttg

SEQ ID NO: 2480140 - DNA, 25 bp, Homo sapien
gctgctccatgtggaaggcttgtct

SEQ ID NO: 2480141 - DNA, 25 bp, Homo sapien
agctcctcaaagtgccgaagtttga

SEQ ID NO: 2480142 - DNA, 25 bp, Homo sapien
gctcccggtccatgatagtctccag

SEQ ID NO: 2480143 - DNA, 25 bp, Homo sapien
tgccgaagtttgatctccaactttt

SEQ ID NO: 2480144 - DNA, 25 bp, Homo sapien
tcccggtccatgatagtctccagct

SEQ ID NO: 2480145 - DNA, 25 bp, Homo sapien
gttgccctcgccaatgtcccgctcc

SEQ ID NO: 2480146 - DNA, 25 bp, Homo sapien
agcagcggtggagaggttgccctcg

SEQ ID NO: 2480147 - DNA, 25 bp, Homo sapien
gcagcagcggtggagaggttgccct

SEQ ID NO: 2480148 - DNA, 25 bp, Homo sapien
cagcggtggagaggttgccctcgcc

SEQ ID NO: 2480149 - DNA, 25 bp, Homo sapien
tctatagcaccccctccttctcggg

SEQ ID NO: 2480150 - DNA, 25 bp, Homo sapien
cctcatccttcttgggagcctcgct

SEQ ID NO: 2480151 - DNA, 25 bp, Homo sapien
ccttctcactgtcgccttctttccc

SEQ ID NO: 2480152 - DNA, 25 bp, Homo sapien
ttcctcctctatagcaccccctcct

SEQ ID NO: 2480153 - DNA, 25 bp, Homo sapien
ccacccgagcctcgtcattcccgct

SEQ ID NO: 2480154 - DNA, 25 bp, Homo sapien
acccgagcctcgtcattcccgctct

SEQ ID NO: 2480155 - DNA, 25 bp, Homo sapien
ttccacccgagcctcgtcattcccg

SEQ ID NO: 2480156 - DNA, 25 bp, Homo sapien
cgagcctcgtcattcccgctctcct

SEQ ID NO: 2480157 - DNA, 25 bp, Homo sapien
ggcagggtccgccttgcctgttact

SEQ ID NO: 2480158 - DNA, 25 bp, Homo sapien
tccacttttcgaacatgggcctcca

SEQ ID NO: 2480159 - DNA, 25 bp, Homo sapien
aatccgctcaggctcatcagaggtg

SEQ ID NO: 2480160 - DNA, 25 bp, Homo sapien
gaggtggttcctgcaatgccactgc

SEQ ID NO: 2480161 - DNA, 25 bp, Homo sapien
gagtcctccaggtatgggtcttcaa

SEQ ID NO: 2480162 - DNA, 25 bp, Homo sapien
caagatgcactcgtcctgtgtgcgg

SEQ ID NO: 2480163 - DNA, 25 bp, Homo sapien
gaaggcaacagtgctcataacaggg

SEQ ID NO: 2480164 - DNA, 25 bp, Homo sapien
cataacagggttgcccgactgactg

SEQ ID NO: 2480165 - DNA, 25 bp, Homo sapien
tgtccactcacgagtggcactggct

SEQ ID NO: 2480166 - DNA, 25 bp, Homo sapien
ccactcacgagtggcactggctgca

SEQ ID NO: 2480167 - DNA, 25 bp, Homo sapien
tgttctgtccactcacgagtggcac

SEQ ID NO: 2480168 - DNA, 25 bp, Homo sapien
tctgtccactcacgagtggcactgg

SEQ ID NO: 2480169 - DNA, 25 bp, Homo sapien
ttgcctttgtcaggaaagttgagca

SEQ ID NO: 2480170 - DNA, 25 bp, Homo sapien
tgcctttgtcaggaaagttgagcat

SEQ ID NO: 2480171 - DNA, 25 bp, Homo sapien
ttgtcaggaaagttgagcatttgtt

SEQ ID NO: 2480172 - DNA, 25 bp, Homo sapien
tttgtcaggaaagttgagcatttgt

SEQ ID NO: 2480173 - DNA, 25 bp, Homo sapien
tctggcttgcccttagccgtctctg

SEQ ID NO: 2480174 - DNA, 25 bp, Homo sapien
tgccctttcgcccagccttggtatc

SEQ ID NO: 2480175 - DNA, 25 bp, Homo sapien
caggtcatccagctctttgcccttt

SEQ ID NO: 2480176 - DNA, 25 bp, Homo sapien
ggcttgcccttagccgtctctggca

SEQ ID NO: 2480177 - DNA, 25 bp, Homo sapien
gggacagagcttggcgtcatggagg

SEQ ID NO: 2480178 - DNA, 25 bp, Homo sapien
cattggggttggtcgactctcagca

SEQ ID NO: 2480179 - DNA, 25 bp, Homo sapien
ccagccctgatggtgtgtcagccaa

SEQ ID NO: 2480180 - DNA, 25 bp, Homo sapien
cctggtagttaataagaccccactg

SEQ ID NO: 2480181 - DNA, 25 bp, Homo sapien
taataagaccccactgttctaggaa

SEQ ID NO: 2480182 - DNA, 25 bp, Homo sapien
gctggcatctctactgttgccaaaa

SEQ ID NO: 2480183 - DNA, 25 bp, Homo sapien
aacacatccataggcaggcatcctc

SEQ ID NO: 2480184 - DNA, 25 bp, Homo sapien
catccataggcaggcatcctcatgt

SEQ ID NO: 2480185 - DNA, 25 bp, Homo sapien
tctactgttgccaaaacacatccat

SEQ ID NO: 2480186 - DNA, 25 bp, Homo sapien
gcaggcggtagaggtaagatactct

SEQ ID NO: 2480187 - DNA, 25 bp, Homo sapien
gggttcagtcggtaagtgtcaatca

SEQ ID NO: 2480188 - DNA, 25 bp, Homo sapien
ggcacagacatcacccgctaggttt

SEQ ID NO: 2480189 - DNA, 25 bp, Homo sapien
cataaagtttcgataggccaggtag

SEQ ID NO: 2480190 - DNA, 25 bp, Homo sapien
catgtgtctacatgctaggccaggg

SEQ ID NO: 2480191 - DNA, 25 bp, Homo sapien
gaacatgcttaatatcacccttggg

SEQ ID NO: 2480192 - DNA, 25 bp, Homo sapien
ctaggaatatctgcagtatagacga

SEQ ID NO: 2480193 - DNA, 25 bp, Homo sapien
tgtgcctttgtaagcctagcatagt

SEQ ID NO: 2480194 - DNA, 25 bp, Homo sapien
gaagaactcggggagagccctccgc

SEQ ID NO: 2480195 - DNA, 25 bp, Homo sapien
ttggacttgttcttgccgttgaaga

SEQ ID NO: 2480196 - DNA, 25 bp, Homo sapien
agagccctccgctcaatggcatgaa

SEQ ID NO: 2480197 - DNA, 25 bp, Homo sapien
atctctggagtcttggacttgttct

SEQ ID NO: 2480198 - DNA, 25 bp, Homo sapien
ctattgtagtcaaaccaggcagcgt

SEQ ID NO: 2480199 - DNA, 25 bp, Homo sapien
aggtctggattcttggtctgctctc

SEQ ID NO: 2480200 - DNA, 25 bp, Homo sapien
ttgttccccgtactgttctcatcct

SEQ ID NO: 2480201 - DNA, 25 bp, Homo sapien
accaggcagcgtagctgggaatgat

SEQ ID NO: 2480202 - DNA, 25 bp, Homo sapien
cttcctccctagcaaccctctgctt

SEQ ID NO: 2480203 - DNA, 25 bp, Homo sapien
tgctggacactcagcattcctgctt

SEQ ID NO: 2480204 - DNA, 25 bp, Homo sapien
gctggacactcagcattcctgcttc

SEQ ID NO: 2480205 - DNA, 25 bp, Homo sapien
atcagaatcacatagagaggtaggg

SEQ ID NO: 2480206 - DNA, 25 bp, Homo sapien
cagaatcacatagagaggtagggcc

SEQ ID NO: 2480207 - DNA, 25 bp, Homo sapien
gaatcacatagagaggtagggcctc

SEQ ID NO: 2480208 - DNA, 25 bp, Homo sapien
cacaaatcagaatcacatagagagg

SEQ ID NO: 2480209 - DNA, 25 bp, Homo sapien
gtcgtctccatgctttcatcttcct

SEQ ID NO: 2480210 - DNA, 25 bp, Homo sapien
ttgcccgtcgtctccatgctttcat

SEQ ID NO: 2480211 - DNA, 25 bp, Homo sapien
cttgcccgtcgtctccatgctttca

SEQ ID NO: 2480212 - DNA, 25 bp, Homo sapien
cccgtcgtctccatgctttcatctt

SEQ ID NO: 2480213 - DNA, 25 bp, Homo sapien
ccaggtcggtcatggtgccgccttt

SEQ ID NO: 2480214 - DNA, 25 bp, Homo sapien
ctggggccgactctgagtctttctt

SEQ ID NO: 2480215 - DNA, 25 bp, Homo sapien
gtcggtcatggtgccgcctttgact

SEQ ID NO: 2480216 - DNA, 25 bp, Homo sapien
tgccgcctttgactggggccgactc

SEQ ID NO: 2480217 - DNA, 25 bp, Homo sapien
gcacagtccacaactcagatatgaa

SEQ ID NO: 2480218 - DNA, 25 bp, Homo sapien
atcctgtagactgggaggtggacct

SEQ ID NO: 2480219 - DNA, 25 bp, Homo sapien
tttggagacaactactatcaggcac

SEQ ID NO: 2480220 - DNA, 25 bp, Homo sapien
gacctgagaaatcagctcacttggg

SEQ ID NO: 2480221 - DNA, 25 bp, Homo sapien
tggccacgctttgacttagtgtaag

SEQ ID NO: 2480222 - DNA, 25 bp, Homo sapien
cacgctttgacttagtgtaaggtgt

SEQ ID NO: 2480223 - DNA, 25 bp, Homo sapien
cctcttctacattggggactggtga

SEQ ID NO: 2480224 - DNA, 25 bp, Homo sapien
tgtggccacgctttgacttagtgta

SEQ ID NO: 2480225 - DNA, 25 bp, Homo sapien
gaaccagaactaacaactgagcagc

SEQ ID NO: 2480226 - DNA, 25 bp, Homo sapien
caggacacctgcagtattatggcac

SEQ ID NO: 2480227 - DNA, 25 bp, Homo sapien
gacagagaattccaagggtagagct

SEQ ID NO: 2480228 - DNA, 25 bp, Homo sapien
gagaacccagtcatccttggacaag

SEQ ID NO: 2480229 - DNA, 25 bp, Homo sapien
cttcttgtcccgtcgatctgaatct

SEQ ID NO: 2480230 - DNA, 25 bp, Homo sapien
gtcgatctgaatctgggctgttcac

SEQ ID NO: 2480231 - DNA, 25 bp, Homo sapien
ccgtcgatctgaatctgggctgttc

SEQ ID NO: 2480232 - DNA, 25 bp, Homo sapien
tgtcccgtcgatctgaatctgggct

SEQ ID NO: 2480233 - DNA, 25 bp, Homo sapien
gaaatcttctttcggcgggagacag

SEQ ID NO: 2480234 - DNA, 25 bp, Homo sapien
ggctgaaatcttctttcggcgggag

SEQ ID NO: 2480235 - DNA, 25 bp, Homo sapien
ctgaaatcttctttcggcgggagac

SEQ ID NO: 2480236 - DNA, 25 bp, Homo sapien
ttcatagtcttcctcattcatccat

SEQ ID NO: 2480237 - DNA, 25 bp, Homo sapien
gcctcaatttcactcgctgggatcc

SEQ ID NO: 2480238 - DNA, 25 bp, Homo sapien
cttcctaggtttctcaggagttgga

SEQ ID NO: 2480239 - DNA, 25 bp, Homo sapien
ttcctaggtttctcaggagttggag

SEQ ID NO: 2480240 - DNA, 25 bp, Homo sapien
caatttcactcgctgggatccacgt

SEQ ID NO: 2480241 - DNA, 25 bp, Homo sapien
ctgccatgggaaattgagcacacag

SEQ ID NO: 2480242 - DNA, 25 bp, Homo sapien
tagaatcaatgggatagaattgtgg

SEQ ID NO: 2480243 - DNA, 25 bp, Homo sapien
caatgggatagaattgtggaaaagt

SEQ ID NO: 2480244 - DNA, 25 bp, Homo sapien
tagaattgtggaaaagtaaagtgca

SEQ ID NO: 2480245 - DNA, 25 bp, Homo sapien
tcttgctctgctagatgtcctaggg

SEQ ID NO: 2480246 - DNA, 25 bp, Homo sapien
caaggcttgtccactaagtccaaac

SEQ ID NO: 2480247 - DNA, 25 bp, Homo sapien
caagacagaggttcacttactaggt

SEQ ID NO: 2480248 - DNA, 25 bp, Homo sapien
tcttatacttaaacctgccccagga

SEQ ID NO: 2480249 - DNA, 25 bp, Homo sapien
ttcatgactggtcgtacccattcct

SEQ ID NO: 2480250 - DNA, 25 bp, Homo sapien
gtcaggatagtagccccagtgcaga

SEQ ID NO: 2480251 - DNA, 25 bp, Homo sapien
gcagaagaacctgcttatccctctt

SEQ ID NO: 2480252 - DNA, 25 bp, Homo sapien
ctgtcaggatagtagccccagtgca

SEQ ID NO: 2480253 - DNA, 25 bp, Homo sapien
tactgtacaaaagccctaactaatg

SEQ ID NO: 2480254 - DNA, 25 bp, Homo sapien
ccaggtactgaatggtgatcttagt

SEQ ID NO: 2480255 - DNA, 25 bp, Homo sapien
caaaccatccactcaagtggacagg

SEQ ID NO: 2480256 - DNA, 25 bp, Homo sapien
tgatcttagtcctctgcctcctagt

SEQ ID NO: 2480257 - DNA, 25 bp, Homo sapien
tagattccccgggacaggatacaca

SEQ ID NO: 2480258 - DNA, 25 bp, Homo sapien
gacaggatacacaacatgggaggca

SEQ ID NO: 2480259 - DNA, 25 bp, Homo sapien
tccccgggacaggatacacaacatg

SEQ ID NO: 2480260 - DNA, 25 bp, Homo sapien
tcttctagattccccgggacaggat

SEQ ID NO: 2480261 - DNA, 25 bp, Homo sapien
gatcacgcaatctctagctcagtag

SEQ ID NO: 2480262 - DNA, 25 bp, Homo sapien
caggccaacatagtctctagaacag

SEQ ID NO: 2480263 - DNA, 25 bp, Homo sapien
tactataaagttccaaagagcagga

SEQ ID NO: 2480264 - DNA, 25 bp, Homo sapien
taagcacacaccagctaagtggcag

SEQ ID NO: 2480265 - DNA, 25 bp, Homo sapien
ccctagtagtttgggctcaatttct

SEQ ID NO: 2480266 - DNA, 25 bp, Homo sapien
aaaatgttaggtcgagacaggcaat

SEQ ID NO: 2480267 - DNA, 25 bp, Homo sapien
tgttaggtcgagacaggcaattatt

SEQ ID NO: 2480268 - DNA, 25 bp, Homo sapien
cagaaaaatgttaggtcgagacagg

SEQ ID NO: 2480269 - DNA, 25 bp, Homo sapien
ttttagattctcactgagggaaggg

SEQ ID NO: 2480270 - DNA, 25 bp, Homo sapien
aagggagataaatagggtatatgcc

SEQ ID NO: 2480271 - DNA, 25 bp, Homo sapien
gaaatagaatgagattataggaaag

SEQ ID NO: 2480272 - DNA, 25 bp, Homo sapien
gataaatagggtatatgcctattac

SEQ ID NO: 2480273 - DNA, 25 bp, Homo sapien
aaacatttccacattgcggtccatg

SEQ ID NO: 2480274 - DNA, 25 bp, Homo sapien
caaggacttctcaatggtcataaac

SEQ ID NO: 2480275 - DNA, 25 bp, Homo sapien
tggattctggaaatcgtaacgccgc

SEQ ID NO: 2480276 - DNA, 25 bp, Homo sapien
ccatgcgtgatggattctggaaatc

SEQ ID NO: 2480277 - DNA, 25 bp, Homo sapien
ctgcagatgaggtgagggcacgtga

SEQ ID NO: 2480278 - DNA, 25 bp, Homo sapien
ctgcctcctatgtgcaagccattct

SEQ ID NO: 2480279 - DNA, 25 bp, Homo sapien
ctctgcctcctatgtgcaagccatt

SEQ ID NO: 2480280 - DNA, 25 bp, Homo sapien
tgaggtgagggcacgtgactttttt

SEQ ID NO: 2480281 - DNA, 25 bp, Homo sapien
gggatctgaggttcactgatctcaa

SEQ ID NO: 2480282 - DNA, 25 bp, Homo sapien
tcacacactcactcttggagactgt

SEQ ID NO: 2480283 - DNA, 25 bp, Homo sapien
acagctattgccaaacatcacctgg

SEQ ID NO: 2480284 - DNA, 25 bp, Homo sapien
tagtaagtcaggtctactgacccag

SEQ ID NO: 2480285 - DNA, 25 bp, Homo sapien
aggcagctgcaagaatgtggcacaa

SEQ ID NO: 2480286 - DNA, 25 bp, Homo sapien
caagaatgtggcacaaggagcctcc

SEQ ID NO: 2480287 - DNA, 25 bp, Homo sapien
cacaaggagcctcccgctttgaaat

SEQ ID NO: 2480288 - DNA, 25 bp, Homo sapien
tgaatttgtaggcagctgcaagaat

SEQ ID NO: 2480289 - DNA, 25 bp, Homo sapien
gtggactgatcccaggtactctgaa

SEQ ID NO: 2480290 - DNA, 25 bp, Homo sapien
gactcatgaatgttgcccaagatca

SEQ ID NO: 2480291 - DNA, 25 bp, Homo sapien
caagccaataatgccctgatcaggg

SEQ ID NO: 2480292 - DNA, 25 bp, Homo sapien
taaactggagactaggccaagccaa

SEQ ID NO: 2480293 - DNA, 25 bp, Homo sapien
tggtgggtggttcagcttgtatata

SEQ ID NO: 2480294 - DNA, 25 bp, Homo sapien
ctgtacaaccaggctagacagggac

SEQ ID NO: 2480295 - DNA, 25 bp, Homo sapien
gcagtttagtgagcggtgcattgct

SEQ ID NO: 2480296 - DNA, 25 bp, Homo sapien
ggtgcattgctgacatgtttgccaa

SEQ ID NO: 2480297 - DNA, 25 bp, Homo sapien
tggaagcatgtggagcaaagaaaat

SEQ ID NO: 2480298 - DNA, 25 bp, Homo sapien
aatagatctcagataaattgtccac

SEQ ID NO: 2480299 - DNA, 25 bp, Homo sapien
gataaattgtccactatctcccata

SEQ ID NO: 2480300 - DNA, 25 bp, Homo sapien
tctggaagcatgtggagcaaagaaa

SEQ ID NO: 2480301 - DNA, 25 bp, Homo sapien
agccgcacgttgtcgaactgggtca

SEQ ID NO: 2480302 - DNA, 25 bp, Homo sapien
gcacgttgtcgaactgggtcacggt

SEQ ID NO: 2480303 - DNA, 25 bp, Homo sapien
cttcttgtagttcttgccgagccac

SEQ ID NO: 2480304 - DNA, 25 bp, Homo sapien
ttgtcgaactgggtcacggtgtccg

SEQ ID NO: 2480305 - DNA, 25 bp, Homo sapien
tcgtagtacttcacgttggggccgc

SEQ ID NO: 2480306 - DNA, 25 bp, Homo sapien
ctcgtagtacttcacgttggggccg

SEQ ID NO: 2480307 - DNA, 25 bp, Homo sapien
tctccggctcgggccccgccgccgc

SEQ ID NO: 2480308 - DNA, 25 bp, Homo sapien
gccccgccgccgcccgccccactca

SEQ ID NO: 2480309 - DNA, 25 bp, Homo sapien
ttttctttgggtggcgtagatagga

SEQ ID NO: 2480310 - DNA, 25 bp, Homo sapien
cctcctaagtaggtgtgagctccta

SEQ ID NO: 2480311 - DNA, 25 bp, Homo sapien
gggtcacccagtccatccgactctt

SEQ ID NO: 2480312 - DNA, 25 bp, Homo sapien
agaccccgactcttcgctaggcagg

SEQ ID NO: 2480313 - DNA, 25 bp, Homo sapien
tgtaggtctgattacaccgaagacc

SEQ ID NO: 2480314 - DNA, 25 bp, Homo sapien
aggtctgattacaccgaagacccag

SEQ ID NO: 2480315 - DNA, 25 bp, Homo sapien
taggtctgattacaccgaagaccca

SEQ ID NO: 2480316 - DNA, 25 bp, Homo sapien
cttgtaggtctgattacaccgaaga

SEQ ID NO: 2480317 - DNA, 25 bp, Homo sapien
ctggatttccttgaggtgtacaggg

SEQ ID NO: 2480318 - DNA, 25 bp, Homo sapien
tcatgctgggatctcaacttaaagt

SEQ ID NO: 2480319 - DNA, 25 bp, Homo sapien
tctcaacttaaagtgcatattggtg

SEQ ID NO: 2480320 - DNA, 25 bp, Homo sapien
acttaaagtgcatattggtggacct

SEQ ID NO: 2480321 - DNA, 25 bp, Homo sapien
taaagtgcatattggtggaccttac

SEQ ID NO: 2480322 - DNA, 25 bp, Homo sapien
taagacaattccaggtgcagtagcc

SEQ ID NO: 2480323 - DNA, 25 bp, Homo sapien
gcactgctaatgtcactaggataca

SEQ ID NO: 2480324 - DNA, 25 bp, Homo sapien
taggtgccattttgctacataagcc

SEQ ID NO: 2480325 - DNA, 25 bp, Homo sapien
gaatcaggagctttatcgtccttgg

SEQ ID NO: 2480326 - DNA, 25 bp, Homo sapien
tagtggcgtcccaccatgtctggct

SEQ ID NO: 2480327 - DNA, 25 bp, Homo sapien
ttttcttatgacagggaaaggtagc

SEQ ID NO: 2480328 - DNA, 25 bp, Homo sapien
cagcaaatacttatgaagactggtt

SEQ ID NO: 2480329 - DNA, 25 bp, Homo sapien
taggtttacatcaggtgcatgataa

SEQ ID NO: 2480330 - DNA, 25 bp, Homo sapien
ccgcgcccggctatgaagactattt

SEQ ID NO: 2480331 - DNA, 25 bp, Homo sapien
caggaccactcagggaagacatgga

SEQ ID NO: 2480332 - DNA, 25 bp, Homo sapien
tgaagtgcacactactcccagacat

SEQ ID NO: 2480333 - DNA, 25 bp, Homo sapien
tcactagagagctttggctgctaca

SEQ ID NO: 2480334 - DNA, 25 bp, Homo sapien
cactagtgcaaagggtagggaagcc

SEQ ID NO: 2480335 - DNA, 25 bp, Homo sapien
ttagtgcagtcaacaccatggaaca

SEQ ID NO: 2480336 - DNA, 25 bp, Homo sapien
ccagcaacctgcagagacactagtg

SEQ ID NO: 2480337 - DNA, 25 bp, Homo sapien
catggaacagcacatacaacacaac

SEQ ID NO: 2480338 - DNA, 25 bp, Homo sapien
ccagagtaagtatagcagcgttttc

SEQ ID NO: 2480339 - DNA, 25 bp, Homo sapien
tatcgtaagttcagccgaggactcc

SEQ ID NO: 2480340 - DNA, 25 bp, Homo sapien
cagaggtccagtctttccctaaggg

SEQ ID NO: 2480341 - DNA, 25 bp, Homo sapien
gtcactctagggatcaaggtatacc

SEQ ID NO: 2480342 - DNA, 25 bp, Homo sapien
caaatatcatgacaaggcctggctc

SEQ ID NO: 2480343 - DNA, 25 bp, Homo sapien
catgcgcaaatatcatgacaaggcc

SEQ ID NO: 2480344 - DNA, 25 bp, Homo sapien
ttatatctcttccacgccatgcgca

SEQ ID NO: 2480345 - DNA, 25 bp, Homo sapien
tcttccacgccatgcgcaaatatca

SEQ ID NO: 2480346 - DNA, 25 bp, Homo sapien
caccagggagcgcttgattacagcc

SEQ ID NO: 2480347 - DNA, 25 bp, Homo sapien
tacgctcgtgggcattttcaatcag

SEQ ID NO: 2480348 - DNA, 25 bp, Homo sapien
gatgcgcttggccacgtagttctca

SEQ ID NO: 2480349 - DNA, 25 bp, Homo sapien
tgacaatagaagcaggacagccact

SEQ ID NO: 2480350 - DNA, 25 bp, Homo sapien
gttgacactgcggattgcacgcatg

SEQ ID NO: 2480351 - DNA, 25 bp, Homo sapien
gcctttagcagctggatgtctcgct

SEQ ID NO: 2480352 - DNA, 25 bp, Homo sapien
tattcaattgtctcctccaggttct

SEQ ID NO: 2480353 - DNA, 25 bp, Homo sapien
tctaggatctcgttgtattcaattg

SEQ ID NO: 2480354 - DNA, 25 bp, Homo sapien
ttctccagctctgcgatgcgtgtct

SEQ ID NO: 2480355 - DNA, 25 bp, Homo sapien
gctgtaccactgagcgcaggtgctt

SEQ ID NO: 2480356 - DNA, 25 bp, Homo sapien
taatgcagttatggttgggcagctc

SEQ ID NO: 2480357 - DNA, 25 bp, Homo sapien
ctctgcgatgcgtgtctgctgctgc

SEQ ID NO: 2480358 - DNA, 25 bp, Homo sapien
tattctgtggcagataactgctaag

SEQ ID NO: 2480359 - DNA, 25 bp, Homo sapien
gctaagtagattttgtcctacccaa

SEQ ID NO: 2480360 - DNA, 25 bp, Homo sapien
cctattctgtggcagataactgcta

SEQ ID NO: 2480361 - DNA, 25 bp, Homo sapien
tcctacccaaaatttctaacattca

SEQ ID NO: 2480362 - DNA, 25 bp, Homo sapien
catttagtcgaatatttcataaccc

SEQ ID NO: 2480363 - DNA, 25 bp, Homo sapien
tatgagaaggctggcaattatagca

SEQ ID NO: 2480364 - DNA, 25 bp, Homo sapien
tgacaaacggaaagtagtattggac

SEQ ID NO: 2480365 - DNA, 25 bp, Homo sapien
agctaacatgcccttcagctatcaa

SEQ ID NO: 2480366 - DNA, 25 bp, Homo sapien
taagatcttagagcaggaagccaag

SEQ ID NO: 2480367 - DNA, 25 bp, Homo sapien
ttatagttggaaaagcagcaagaaa

SEQ ID NO: 2480368 - DNA, 25 bp, Homo sapien
tactccttgccaacatgccaaagag

SEQ ID NO: 2480369 - DNA, 25 bp, Homo sapien
tagagtcaatcaagctttaatgtta

SEQ ID NO: 2480370 - DNA, 25 bp, Homo sapien
cacaggccgcttcgggttgtgctca

SEQ ID NO: 2480371 - DNA, 25 bp, Homo sapien
gcactacagccgaacacagcgttgt

SEQ ID NO: 2480372 - DNA, 25 bp, Homo sapien
gagacatgaggttgtcaagccggac

SEQ ID NO: 2480373 - DNA, 25 bp, Homo sapien
gttgtgctcacagtcgctgaggtga

SEQ ID NO: 2480374 - DNA, 25 bp, Homo sapien
gatccgaggtactgggcgcagatgg

SEQ ID NO: 2480375 - DNA, 25 bp, Homo sapien
cagaaagcatgttcacaatgaggtg

SEQ ID NO: 2480376 - DNA, 25 bp, Homo sapien
tgggcgaccgtcacaacactacggt

SEQ ID NO: 2480377 - DNA, 25 bp, Homo sapien
ctggacatgtctgttgctgagagaa

SEQ ID NO: 2480378 - DNA, 25 bp, Homo sapien
cccaggatgatacaactgactctgg

SEQ ID NO: 2480379 - DNA, 25 bp, Homo sapien
ccaggatgatacaactgactctggt

SEQ ID NO: 2480380 - DNA, 25 bp, Homo sapien
ccccaggatgatacaactgactctg

SEQ ID NO: 2480381 - DNA, 25 bp, Homo sapien
caggatgatacaactgactctggtc

SEQ ID NO: 2480382 - DNA, 25 bp, Homo sapien
tattgaaggtggcagctttcacatc

SEQ ID NO: 2480383 - DNA, 25 bp, Homo sapien
cagagtgcatggctgtatcaaaagc

SEQ ID NO: 2480384 - DNA, 25 bp, Homo sapien
gtgcatggctgtatcaaaagctggt

SEQ ID NO: 2480385 - DNA, 25 bp, Homo sapien
atgacctattgaaggtggcagcttt

SEQ ID NO: 2480386 - DNA, 25 bp, Homo sapien
gaagttcaatcacggacaggaagat

SEQ ID NO: 2480387 - DNA, 25 bp, Homo sapien
cagaagttcaatcacggacaggaag

SEQ ID NO: 2480388 - DNA, 25 bp, Homo sapien
agtccagaagttcaatcacggacag

SEQ ID NO: 2480389 - DNA, 25 bp, Homo sapien
tcaatcacggacaggaagatggaac

SEQ ID NO: 2480390 - DNA, 25 bp, Homo sapien
tcctccaagactccactgcaaatag

SEQ ID NO: 2480391 - DNA, 25 bp, Homo sapien
tggaaacgggttacatcatacccca

SEQ ID NO: 2480392 - DNA, 25 bp, Homo sapien
agatcttcgtcaacatccccctgga

SEQ ID NO: 2480393 - DNA, 25 bp, Homo sapien
tgcaaatagggcagataagatcttc

SEQ ID NO: 2480394 - DNA, 25 bp, Homo sapien
aatgtgatgtcacaatcaggagtac

SEQ ID NO: 2480395 - DNA, 25 bp, Homo sapien
gtgccactgaagagattctcccagt

SEQ ID NO: 2480396 - DNA, 25 bp, Homo sapien
cagtaacccatcttgttggctattc

SEQ ID NO: 2480397 - DNA, 25 bp, Homo sapien
tgagtattccttcccagtgacaagc

SEQ ID NO: 2480398 - DNA, 25 bp, Homo sapien
cccgactcctcgccagtgctgctcc

SEQ ID NO: 2480399 - DNA, 25 bp, Homo sapien
gcagcggccacagtactgccctggt

SEQ ID NO: 2480400 - DNA, 25 bp, Homo sapien
ccagtcggagctgaggccgcagcgg

SEQ ID NO: 2480401 - DNA, 25 bp, Homo sapien
ctggaagcggcctggagtctccgca

SEQ ID NO: 2480402 - DNA, 25 bp, Homo sapien
tggagtctccgcaacctgacccagt

SEQ ID NO: 2480403 - DNA, 25 bp, Homo sapien
gcctcagacggatcctttgccccgc

SEQ ID NO: 2480404 - DNA, 25 bp, Homo sapien
ccgcccaccgctgctacgcaacccg

SEQ ID NO: 2480405 - DNA, 25 bp, Homo sapien
tcagacggatcctttgccccgccca

SEQ ID NO: 2480406 - DNA, 25 bp, Homo sapien
cgtcgccgcctcagacggatccttt

SEQ ID NO: 2480407 - DNA, 25 bp, Homo sapien
catgggagtctaactgaagtctctc

SEQ ID NO: 2480408 - DNA, 25 bp, Homo sapien
gtttcttctgtgtgagacatgggag

SEQ ID NO: 2480409 - DNA, 25 bp, Homo sapien
gaaagaaatggcagttaccatctgt

SEQ ID NO: 2480410 - DNA, 25 bp, Homo sapien
gaaatggcagttaccatctgtttct

SEQ ID NO: 2480411 - DNA, 25 bp, Homo sapien
cagcgagctaagatggcaccactgc

SEQ ID NO: 2480412 - DNA, 25 bp, Homo sapien
gaggttgcagcgagctaagatggca

SEQ ID NO: 2480413 - DNA, 25 bp, Homo sapien
ttgcagcgagctaagatggcaccac

SEQ ID NO: 2480414 - DNA, 25 bp, Homo sapien
ggttgcagcgagctaagatggcacc

SEQ ID NO: 2480415 - DNA, 25 bp, Homo sapien
agtgtggtgggaggacccgaagccg

SEQ ID NO: 2480416 - DNA, 25 bp, Homo sapien
gttgtacttgcaccaaaacagcata

SEQ ID NO: 2480417 - DNA, 25 bp, Homo sapien
cccaaagccatgactacgacagttg

SEQ ID NO: 2480418 - DNA, 25 bp, Homo sapien
gactacgacagttgtacttgcacca

SEQ ID NO: 2480419 - DNA, 25 bp, Homo sapien
gtaggggcctggagggtgcagggtc

SEQ ID NO: 2480420 - DNA, 25 bp, Homo sapien
gcctggagggtgcagggtcattaat

SEQ ID NO: 2480421 - DNA, 25 bp, Homo sapien
aggggcctggagggtgcagggtcat

SEQ ID NO: 2480422 - DNA, 25 bp, Homo sapien
gggcctggagggtgcagggtcatta

SEQ ID NO: 2480423 - DNA, 25 bp, Homo sapien
tcccaacactagcaccacaggtggt

SEQ ID NO: 2480424 - DNA, 25 bp, Homo sapien
aggacatggaacatgcccctccgtg

SEQ ID NO: 2480425 - DNA, 25 bp, Homo sapien
tacaaccgagtacatgggtcacagg

SEQ ID NO: 2480426 - DNA, 25 bp, Homo sapien
tattgctgcccaccagcgttaaacg

SEQ ID NO: 2480427 - DNA, 25 bp, Homo sapien
cctgaatatacatagctgtacatgg

SEQ ID NO: 2480428 - DNA, 25 bp, Homo sapien
cccgcaggggaactatattgctttg

SEQ ID NO: 2480429 - DNA, 25 bp, Homo sapien
accagacggagaacacccctgaata

SEQ ID NO: 2480430 - DNA, 25 bp, Homo sapien
tagatgcccacagcgggtaccagac

SEQ ID NO: 2480431 - DNA, 25 bp, Homo sapien
gggggtaggagacttcatcctccat

SEQ ID NO: 2480432 - DNA, 25 bp, Homo sapien
gcagcgagagtaggcaccctccctt

SEQ ID NO: 2480433 - DNA, 25 bp, Homo sapien
acccctgccaaacccactcaagcca

SEQ ID NO: 2480434 - DNA, 25 bp, Homo sapien
acacagcagcgagagtaggcaccct

SEQ ID NO: 2480435 - DNA, 25 bp, Homo sapien
caaggtggatcctctggttacccgc

SEQ ID NO: 2480436 - DNA, 25 bp, Homo sapien
ctcacacctaagtgggcaacagcag

SEQ ID NO: 2480437 - DNA, 25 bp, Homo sapien
ggcaaagtcaggcttccagattccc

SEQ ID NO: 2480438 - DNA, 25 bp, Homo sapien
caacagcagccttggagtcagtacc

SEQ ID NO: 2480439 - DNA, 25 bp, Homo sapien
agtagggtttctgggctagggtctg

SEQ ID NO: 2480440 - DNA, 25 bp, Homo sapien
taggggatgaacactgggtatggga

SEQ ID NO: 2480441 - DNA, 25 bp, Homo sapien
tgggtatgggaagtgggtgagaaat

SEQ ID NO: 2480442 - DNA, 25 bp, Homo sapien
gctagggtctgtaaggctattttcc

SEQ ID NO: 2480443 - DNA, 25 bp, Homo sapien
gatagtatatgaccctaccagagcc

SEQ ID NO: 2480444 - DNA, 25 bp, Homo sapien
tggacttacagtcaaaacggatagg

SEQ ID NO: 2480445 - DNA, 25 bp, Homo sapien
cagtggttttcagcagtcctatggc

SEQ ID NO: 2480446 - DNA, 25 bp, Homo sapien
ggtggcccgtcagtctcagtggaca

SEQ ID NO: 2480447 - DNA, 25 bp, Homo sapien
tattacttgaagcaagtgctttagg

SEQ ID NO: 2480448 - DNA, 25 bp, Homo sapien
cctgtctcctatgtcgccctcgctc

SEQ ID NO: 2480449 - DNA, 25 bp, Homo sapien
cagggtcctcgcttaaaataggcct

SEQ ID NO: 2480450 - DNA, 25 bp, Homo sapien
tctgattcacacgtctgtttccctg

SEQ ID NO: 2480451 - DNA, 25 bp, Homo sapien
cactgctgacagtgcgctgagggca

SEQ ID NO: 2480452 - DNA, 25 bp, Homo sapien
caagggtggcaagacattcagggta

SEQ ID NO: 2480453 - DNA, 25 bp, Homo sapien
cacccggcaagttctctctggagga

SEQ ID NO: 2480454 - DNA, 25 bp, Homo sapien
gccacatatggagggacagaggact

SEQ ID NO: 2480455 - DNA, 25 bp, Homo sapien
aacgaagcctgtccagttctcaggg

SEQ ID NO: 2480456 - DNA, 25 bp, Homo sapien
gggacaatactgatggcagccaaac

SEQ ID NO: 2480457 - DNA, 25 bp, Homo sapien
gggagaccctgtactgtgtaaacga

SEQ ID NO: 2480458 - DNA, 25 bp, Homo sapien
tgtactgtgtaaacgaagcctgtcc

SEQ ID NO: 2480459 - DNA, 25 bp, Homo sapien
ataaactatgggcttggcggcacag

SEQ ID NO: 2480460 - DNA, 25 bp, Homo sapien
cagtgggtactcttggacataacgg

SEQ ID NO: 2480461 - DNA, 25 bp, Homo sapien
gaaacacagtggacatactagggct

SEQ ID NO: 2480462 - DNA, 25 bp, Homo sapien
caggagtgggtccaactgtccagga

SEQ ID NO: 2480463 - DNA, 25 bp, Homo sapien
ctttaggggtgatagggtacagaag

SEQ ID NO: 2480464 - DNA, 25 bp, Homo sapien
tgaactttaggggtgatagggtaca

SEQ ID NO: 2480465 - DNA, 25 bp, Homo sapien
catttgaactttaggggtgataggg

SEQ ID NO: 2480466 - DNA, 25 bp, Homo sapien
ttaggggtgatagggtacagaagtg

SEQ ID NO: 2480467 - DNA, 25 bp, Homo sapien
gggatggagggaccggccgagcagg

SEQ ID NO: 2480468 - DNA, 25 bp, Homo sapien
cacagtaccagaaattaaggcttct

SEQ ID NO: 2480469 - DNA, 25 bp, Homo sapien
cccagagtgctcacacagtaccaga

SEQ ID NO: 2480470 - DNA, 25 bp, Homo sapien
gtaccagaaattaaggcttctcact

SEQ ID NO: 2480471 - DNA, 25 bp, Homo sapien
aattagatatcaagccaccggcggg

SEQ ID NO: 2480472 - DNA, 25 bp, Homo sapien
aatcattttgggacacttggcagaa

SEQ ID NO: 2480473 - DNA, 25 bp, Homo sapien
ggcatttagcaatcattttgggaca

SEQ ID NO: 2480474 - DNA, 25 bp, Homo sapien
taaatagaattagatatcaagccac

SEQ ID NO: 2480475 - DNA, 25 bp, Homo sapien
ctactcagagtagcagccatctaac

SEQ ID NO: 2480476 - DNA, 25 bp, Homo sapien
ccaatggcgccgggccgctcctggc

SEQ ID NO: 2480477 - DNA, 25 bp, Homo sapien
atggggcagggcgccgcagccaccc

SEQ ID NO: 2480478 - DNA, 25 bp, Homo sapien
ggctgtaggggcaggaggccccatg

SEQ ID NO: 2480479 - DNA, 25 bp, Homo sapien
cccatggggcagggcgccgcagcca

SEQ ID NO: 2480480 - DNA, 25 bp, Homo sapien
aggcagtctgccacatctttgttgg

SEQ ID NO: 2480481 - DNA, 25 bp, Homo sapien
aagctgaaaggactgacggcgtcct

SEQ ID NO: 2480482 - DNA, 25 bp, Homo sapien
gctgcaatgctgcagttcttgagca

SEQ ID NO: 2480483 - DNA, 25 bp, Homo sapien
gactgacggcgtccttgggtgggaa

SEQ ID NO: 2480484 - DNA, 25 bp, Homo sapien
cagaagctagaccattccgggcagc

SEQ ID NO: 2480485 - DNA, 25 bp, Homo sapien
agctagaccattccgggcagcaatg

SEQ ID NO: 2480486 - DNA, 25 bp, Homo sapien
agaagctagaccattccgggcagca

SEQ ID NO: 2480487 - DNA, 25 bp, Homo sapien
gaagctagaccattccgggcagcaa

SEQ ID NO: 2480488 - DNA, 25 bp, Homo sapien
tctgccaggatcatgagggcacatt

SEQ ID NO: 2480489 - DNA, 25 bp, Homo sapien
tgcagcgcactgttggtagcattga

SEQ ID NO: 2480490 - DNA, 25 bp, Homo sapien
gtttctgccaggatcatgagggcac

SEQ ID NO: 2480491 - DNA, 25 bp, Homo sapien
tagcattgataaggccaaggtcttg

SEQ ID NO: 2480492 - DNA, 25 bp, Homo sapien
ctacaagccaagtggagggccgtgt

SEQ ID NO: 2480493 - DNA, 25 bp, Homo sapien
gccttccctcgatacagcagaaatt

SEQ ID NO: 2480494 - DNA, 25 bp, Homo sapien
tccaacacagtaaggtctgccttcc

SEQ ID NO: 2480495 - DNA, 25 bp, Homo sapien
agggccgtgttcttgttctcatcca

SEQ ID NO: 2480496 - DNA, 25 bp, Homo sapien
ccagagacattgtccgcgaaggcag

SEQ ID NO: 2480497 - DNA, 25 bp, Homo sapien
tcagccgccgtcatgagcgcagtgc

SEQ ID NO: 2480498 - DNA, 25 bp, Homo sapien
cagtggcgttcacctcagcttgatg

SEQ ID NO: 2480499 - DNA, 25 bp, Homo sapien
agcagcatccggagcccagagacat

SEQ ID NO: 2480500 - DNA, 25 bp, Homo sapien
cgtcctttggcatctcggctgttca

SEQ ID NO: 2480501 - DNA, 25 bp, Homo sapien
gtcctttggcatctcggctgttcac

SEQ ID NO: 2480502 - DNA, 25 bp, Homo sapien
cttccaggtacgaaaacgggctgtg

SEQ ID NO: 2480503 - DNA, 25 bp, Homo sapien
gaaaacgggctgtgttcaagtaaca

SEQ ID NO: 2480504 - DNA, 25 bp, Homo sapien
caggtacgaaaacgggctgtgttca

SEQ ID NO: 2480505 - DNA, 25 bp, Homo sapien
tacgaaaacgggctgtgttcaagta

SEQ ID NO: 2480506 - DNA, 25 bp, Homo sapien
tccaacacatgctcctgtgcctgtg

SEQ ID NO: 2480507 - DNA, 25 bp, Homo sapien
acacatgctcctgtgcctgtggagg

SEQ ID NO: 2480508 - DNA, 25 bp, Homo sapien
tgtgcctgtggaggccccagtctag

SEQ ID NO: 2480509 - DNA, 25 bp, Homo sapien
caacacatgctcctgtgcctgtgga

SEQ ID NO: 2480510 - DNA, 25 bp, Homo sapien
catgggcgagtatccgctgtaatcc

SEQ ID NO: 2480511 - DNA, 25 bp, Homo sapien
cgcagtactgcagtgtggccacagg

SEQ ID NO: 2480512 - DNA, 25 bp, Homo sapien
ttaaagtctcggcacagcacaaatg

SEQ ID NO: 2480513 - DNA, 25 bp, Homo sapien
agcacaaatgcgtcgtggtccagca

SEQ ID NO: 2480514 - DNA, 25 bp, Homo sapien
ctgtggatcctttctctagcagcag

SEQ ID NO: 2480515 - DNA, 25 bp, Homo sapien
tgtccataggcatccatgacatctg

SEQ ID NO: 2480516 - DNA, 25 bp, Homo sapien
taggcatccatgacatctgtgatgt

SEQ ID NO: 2480517 - DNA, 25 bp, Homo sapien
tcgttccccactgtcgatcagcaag

SEQ ID NO: 2480518 - DNA, 25 bp, Homo sapien
caagtgcagggagtcagtgtggcca

SEQ ID NO: 2480519 - DNA, 25 bp, Homo sapien
tgtggtcccttacgtccagattcac

SEQ ID NO: 2480520 - DNA, 25 bp, Homo sapien
ttgcgcttgcgctccttgatgaggg

SEQ ID NO: 2480521 - DNA, 25 bp, Homo sapien
acactcagtagagccgcgctccgtg

SEQ ID NO: 2480522 - DNA, 25 bp, Homo sapien
aggcgccgtgggctgtaagcacctc

SEQ ID NO: 2480523 - DNA, 25 bp, Homo sapien
tccaggcagttaaaggacatttcta

SEQ ID NO: 2480524 - DNA, 25 bp, Homo sapien
gtgcaaagggctgactggaatggtg

SEQ ID NO: 2480525 - DNA, 25 bp, Homo sapien
aagtgcaaagggctgactggaatgg

SEQ ID NO: 2480526 - DNA, 25 bp, Homo sapien
agctaagtgcaaagggctgactgga

SEQ ID NO: 2480527 - DNA, 25 bp, Homo sapien
cataggcggctgcatagtgcacagc

SEQ ID NO: 2480528 - DNA, 25 bp, Homo sapien
cagttcgaggttctgtctgttgcca

SEQ ID NO: 2480529 - DNA, 25 bp, Homo sapien
gcatagtgcacagctgtgtagccct

SEQ ID NO: 2480530 - DNA, 25 bp, Homo sapien
gggtctgcaccgttatccagtaaga

SEQ ID NO: 2480531 - DNA, 25 bp, Homo sapien
gagatccctgacctacaaaataaat

SEQ ID NO: 2480532 - DNA, 25 bp, Homo sapien
tagctttcgaaagacagaaatttgg

SEQ ID NO: 2480533 - DNA, 25 bp, Homo sapien
tatacctagtttcccgtcattaaca

SEQ ID NO: 2480534 - DNA, 25 bp, Homo sapien
tagtacagggagttctcacataacc

SEQ ID NO: 2480535 - DNA, 25 bp, Homo sapien
cagtggctcgtcctcttcggcatca

SEQ ID NO: 2480536 - DNA, 25 bp, Homo sapien
cttcctgcgggactccttcagtggc

SEQ ID NO: 2480537 - DNA, 25 bp, Homo sapien
tcggcatcatggctggaaggtgtat

SEQ ID NO: 2480538 - DNA, 25 bp, Homo sapien
cctgcgggactccttcagtggctcg

SEQ ID NO: 2480539 - DNA, 25 bp, Homo sapien
ttacagtcggcctcgttgacacctg

SEQ ID NO: 2480540 - DNA, 25 bp, Homo sapien
tcctgtaagtgtcagaagcggcagc

SEQ ID NO: 2480541 - DNA, 25 bp, Homo sapien
tagctaccgttagcagctgcatagt

SEQ ID NO: 2480542 - DNA, 25 bp, Homo sapien
tgccccagcagtcaccaatgttact

SEQ ID NO: 2480543 - DNA, 25 bp, Homo sapien
ctgctcaacagcaaattaagacatt

SEQ ID NO: 2480544 - DNA, 25 bp, Homo sapien
ttgtcaggtgtattgatgtcaaacc

SEQ ID NO: 2480545 - DNA, 25 bp, Homo sapien
tgaagacaggtacggccaaggttgt

SEQ ID NO: 2480546 - DNA, 25 bp, Homo sapien
gcagcatgaagacaggtacggccaa

SEQ ID NO: 2480547 - DNA, 25 bp, Homo sapien
aggttgtcaggtgtattgatgtcaa

SEQ ID NO: 2480548 - DNA, 25 bp, Homo sapien
gggggaacatgtcatggatgccacg

SEQ ID NO: 2480549 - DNA, 25 bp, Homo sapien
ggggaacatgtcatggatgccacgc

SEQ ID NO: 2480550 - DNA, 25 bp, Homo sapien
agggggaacatgtcatggatgccac

SEQ ID NO: 2480551 - DNA, 25 bp, Homo sapien
cagggggaacatgtcatggatgcca

SEQ ID NO: 2480552 - DNA, 25 bp, Homo sapien
ggtatctgcgccattggtcatgagg

SEQ ID NO: 2480553 - DNA, 25 bp, Homo sapien
tggcgtgttcccaaatttgtcggca

SEQ ID NO: 2480554 - DNA, 25 bp, Homo sapien
tttgtcggcacaatcaatctcgctg

SEQ ID NO: 2480555 - DNA, 25 bp, Homo sapien
gatgagcagctcgtgtccatatcga

SEQ ID NO: 2480556 - DNA, 25 bp, Homo sapien
tgaggatctgggagcgtgtgaaacg

SEQ ID NO: 2480557 - DNA, 25 bp, Homo sapien
atctgggagcgtgtgaaacggccat

SEQ ID NO: 2480558 - DNA, 25 bp, Homo sapien
gtgtgaaacggccatggattgcagc

SEQ ID NO: 2480559 - DNA, 25 bp, Homo sapien
cggccatggattgcagccatgtgca

SEQ ID NO: 2480560 - DNA, 25 bp, Homo sapien
gatacagtcaggacccctagatcca

SEQ ID NO: 2480561 - DNA, 25 bp, Homo sapien
gaagcaagtggataattccccaaga

SEQ ID NO: 2480562 - DNA, 25 bp, Homo sapien
tggcaaggtctgattaccctaggaa

SEQ ID NO: 2480563 - DNA, 25 bp, Homo sapien
ggacatatctctaaggacaaaaggg

SEQ ID NO: 2480564 - DNA, 25 bp, Homo sapien
tagcaggcgatgtgcaaagctgtgt

SEQ ID NO: 2480565 - DNA, 25 bp, Homo sapien
ggtagttgacgtcagccccattatt

SEQ ID NO: 2480566 - DNA, 25 bp, Homo sapien
gtagctccaagcagagagcgccatt

SEQ ID NO: 2480567 - DNA, 25 bp, Homo sapien
cattcggctggttgacattggctcc

SEQ ID NO: 2480568 - DNA, 25 bp, Homo sapien
tcatatctccgtaacagactataat

SEQ ID NO: 2480569 - DNA, 25 bp, Homo sapien
ctcatatctccgtaacagactataa

SEQ ID NO: 2480570 - DNA, 25 bp, Homo sapien
ttcccaaccccagagctcaaagccc

SEQ ID NO: 2480571 - DNA, 25 bp, Homo sapien
ttgctgcccatagttcccaacccca

SEQ ID NO: 2480572 - DNA, 25 bp, Homo sapien
agttcccaaccccagagctcaaagc

SEQ ID NO: 2480573 - DNA, 25 bp, Homo sapien
ccaaccccagagctcaaagccctga

SEQ ID NO: 2480574 - DNA, 25 bp, Homo sapien
accacttcaatctggccactggcag

SEQ ID NO: 2480575 - DNA, 25 bp, Homo sapien
cagcccatagcccttgcggtccttg

SEQ ID NO: 2480576 - DNA, 25 bp, Homo sapien
tcccatccgaagcaggtacttcacc

SEQ ID NO: 2480577 - DNA, 25 bp, Homo sapien
ttgcagccgaggtctgctccccgtg

SEQ ID NO: 2480578 - DNA, 25 bp, Homo sapien
agaaaagctgcccaatgcagaggct

SEQ ID NO: 2480579 - DNA, 25 bp, Homo sapien
ggctgccgctcctttttgtcacaga

SEQ ID NO: 2480580 - DNA, 25 bp, Homo sapien
caatgcagaggctgccgctcctttt

SEQ ID NO: 2480581 - DNA, 25 bp, Homo sapien
aagctgcccaatgcagaggctgccg

SEQ ID NO: 2480582 - DNA, 25 bp, Homo sapien
tcctgaaaaggctgaggcagcctaa

SEQ ID NO: 2480583 - DNA, 25 bp, Homo sapien
acctggaggactcgagggaacagca

SEQ ID NO: 2480584 - DNA, 25 bp, Homo sapien
gcagcctaatgcctttttccatgag

SEQ ID NO: 2480585 - DNA, 25 bp, Homo sapien
ttttccatgagcaaaacaacctgga

SEQ ID NO: 2480586 - DNA, 25 bp, Homo sapien
cctcctgaagtccaagttaagaatt

SEQ ID NO: 2480587 - DNA, 25 bp, Homo sapien
gacatggactctcttcagaaaggcg

SEQ ID NO: 2480588 - DNA, 25 bp, Homo sapien
tccttcaggcttgagggcccagaag

SEQ ID NO: 2480589 - DNA, 25 bp, Homo sapien
tgtttatataaccatccgggctgct

SEQ ID NO: 2480590 - DNA, 25 bp, Homo sapien
gatgcccactatgcactgcatggtg

SEQ ID NO: 2480591 - DNA, 25 bp, Homo sapien
ccagagcctcagcacacttggtggc

SEQ ID NO: 2480592 - DNA, 25 bp, Homo sapien
ggtgtctgccacagcttgtcccggg

SEQ ID NO: 2480593 - DNA, 25 bp, Homo sapien
gggtgccagagcctcagcacacttg

SEQ ID NO: 2480594 - DNA, 25 bp, Homo sapien
cattcccactggcctcggcccctcc

SEQ ID NO: 2480595 - DNA, 25 bp, Homo sapien
ctggcctcggcccctccccctggtg

SEQ ID NO: 2480596 - DNA, 25 bp, Homo sapien
ccactggcctcggcccctccccctg

SEQ ID NO: 2480597 - DNA, 25 bp, Homo sapien
ctcattcccactggcctcggcccct

SEQ ID NO: 2480598 - DNA, 25 bp, Homo sapien
acagtgtgtccttagcattgacatt

SEQ ID NO: 2480599 - DNA, 25 bp, Homo sapien
gccacagtgtgtccttagcattgac

SEQ ID NO: 2480600 - DNA, 25 bp, Homo sapien
ccacagtgtgtccttagcattgaca

SEQ ID NO: 2480601 - DNA, 25 bp, Homo sapien
cacagtgtgtccttagcattgacat

SEQ ID NO: 2480602 - DNA, 25 bp, Homo sapien
gaagccagtaatcaggccaggaaat

SEQ ID NO: 2480603 - DNA, 25 bp, Homo sapien
aaggaagccagtaatcaggccagga

SEQ ID NO: 2480604 - DNA, 25 bp, Homo sapien
tatgaaggaagccagtaatcaggcc

SEQ ID NO: 2480605 - DNA, 25 bp, Homo sapien
gaggtatgaaggaagccagtaatca

SEQ ID NO: 2480606 - DNA, 25 bp, Homo sapien
catcgcctacgtaggcagcagcatg

SEQ ID NO: 2480607 - DNA, 25 bp, Homo sapien
ggcagcagcatgcaatggagttcgc

SEQ ID NO: 2480608 - DNA, 25 bp, Homo sapien
gggacatcgcctacgtaggcagcag

SEQ ID NO: 2480609 - DNA, 25 bp, Homo sapien
tgcaatggagttcgcctctcttggt

SEQ ID NO: 2480610 - DNA, 25 bp, Homo sapien
cagggagtatgggcgcggggtaagg

SEQ ID NO: 2480611 - DNA, 25 bp, Homo sapien
taagggggctatcaaggaccccagc

SEQ ID NO: 2480612 - DNA, 25 bp, Homo sapien
tgggcgcggggtaagggggctatca

SEQ ID NO: 2480613 - DNA, 25 bp, Homo sapien
attgatgttctccttctgcgagagt

SEQ ID NO: 2480614 - DNA, 25 bp, Homo sapien
cacatctcggctaaagatggcctgg

SEQ ID NO: 2480615 - DNA, 25 bp, Homo sapien
gagtagggaacgcacttcctccaca

SEQ ID NO: 2480616 - DNA, 25 bp, Homo sapien
tcctccacatctcggctaaagatgg

SEQ ID NO: 2480617 - DNA, 25 bp, Homo sapien
tccccaaggacaccggctcggttga

SEQ ID NO: 2480618 - DNA, 25 bp, Homo sapien
agagagaaccggcattctgagagcg

SEQ ID NO: 2480619 - DNA, 25 bp, Homo sapien
gattctggctggagcgagctcccgc

SEQ ID NO: 2480620 - DNA, 25 bp, Homo sapien
gtgcctccgccggttgccaggtccc

SEQ ID NO: 2480621 - DNA, 25 bp, Homo sapien
gctcgcgtgacggcagcgccgagcc

SEQ ID NO: 2480622 - DNA, 25 bp, Homo sapien
cgggctcgcgtgacggcagcgccga

SEQ ID NO: 2480623 - DNA, 25 bp, Homo sapien
gggctcgcgtgacggcagcgccgag

SEQ ID NO: 2480624 - DNA, 25 bp, Homo sapien
cccgggctcgcgtgacggcagcgcc

SEQ ID NO: 2480625 - DNA, 25 bp, Homo sapien
ctggtccgtgatgctgaggatcccc

SEQ ID NO: 2480626 - DNA, 25 bp, Homo sapien
gcccgggctccgtccgcatcgagct

SEQ ID NO: 2480627 - DNA, 25 bp, Homo sapien
tgaggatccccatggctcggcccgg

SEQ ID NO: 2480628 - DNA, 25 bp, Homo sapien
ggctccaccggggacacggagcggc

SEQ ID NO: 2480629 - DNA, 25 bp, Homo sapien
tgtgcctacctatcgggtcctgtga

SEQ ID NO: 2480630 - DNA, 25 bp, Homo sapien
cagacggcctaatgtgagactttac

SEQ ID NO: 2480631 - DNA, 25 bp, Homo sapien
aacagcgacgttcagaggatctaca

SEQ ID NO: 2480632 - DNA, 25 bp, Homo sapien
cagatatctgcggtagacacgccca

SEQ ID NO: 2480633 - DNA, 25 bp, Homo sapien
ttcgtctgggatgcactcttcttct

SEQ ID NO: 2480634 - DNA, 25 bp, Homo sapien
cttcgtctgggatgcactcttcttc

SEQ ID NO: 2480635 - DNA, 25 bp, Homo sapien
tcgtctgggatgcactcttcttctc

SEQ ID NO: 2480636 - DNA, 25 bp, Homo sapien
gagaaaaggcaacctgcctccagcc

SEQ ID NO: 2480637 - DNA, 25 bp, Homo sapien
tggaccttatcaagacaccttagtg

SEQ ID NO: 2480638 - DNA, 25 bp, Homo sapien
taagtaacttttaccctgcctgaga

SEQ ID NO: 2480639 - DNA, 25 bp, Homo sapien
gactgtaagtccatgctgcctggct

SEQ ID NO: 2480640 - DNA, 25 bp, Homo sapien
cattttatacagaacaacctgaagt

SEQ ID NO: 2480641 - DNA, 25 bp, Homo sapien
ttttatacagaacaacctgaagtct

SEQ ID NO: 2480642 - DNA, 25 bp, Homo sapien
attttatacagaacaacctgaagtc

SEQ ID NO: 2480643 - DNA, 25 bp, Homo sapien
tggtcattccggagttctatgcccc

SEQ ID NO: 2480644 - DNA, 25 bp, Homo sapien
gtcattccggagttctatgccccac

SEQ ID NO: 2480645 - DNA, 25 bp, Homo sapien
ggtcattccggagttctatgcccca

SEQ ID NO: 2480646 - DNA, 25 bp, Homo sapien
tcattccggagttctatgccccaca

SEQ ID NO: 2480647 - DNA, 25 bp, Homo sapien
agagggggaggtccagaacatcctc

SEQ ID NO: 2480648 - DNA, 25 bp, Homo sapien
ctgggcccacagatctgttgagagg

SEQ ID NO: 2480649 - DNA, 25 bp, Homo sapien
ctgttgagaggtctctagtagggac

SEQ ID NO: 2480650 - DNA, 25 bp, Homo sapien
cacattaagcactgataaaacccaa

SEQ ID NO: 2480651 - DNA, 25 bp, Homo sapien
ggtacagctgactatccaacatgat

SEQ ID NO: 2480652 - DNA, 25 bp, Homo sapien
aacattgggtgccagtcacaacaaa

SEQ ID NO: 2480653 - DNA, 25 bp, Homo sapien
aaaaaattgccaaagcatgtccagc

SEQ ID NO: 2480654 - DNA, 25 bp, Homo sapien
taaccaacaggtcttgctaggaggt

SEQ ID NO: 2480655 - DNA, 25 bp, Homo sapien
catgcattagtcctggtcatcctcc

SEQ ID NO: 2480656 - DNA, 25 bp, Homo sapien
gggccaaacctactcataccacatg

SEQ ID NO: 2480657 - DNA, 25 bp, Homo sapien
ggcagagtcctggtttgctggctta

SEQ ID NO: 2480658 - DNA, 25 bp, Homo sapien
gatgggcaactcataccaggcaggg

SEQ ID NO: 2480659 - DNA, 25 bp, Homo sapien
tatcagtgcctcagatataatttaa

SEQ ID NO: 2480660 - DNA, 25 bp, Homo sapien
tcagtgcctcagatataatttaatc

SEQ ID NO: 2480661 - DNA, 25 bp, Homo sapien
ttatcagtgcctcagatataattta

SEQ ID NO: 2480662 - DNA, 25 bp, Homo sapien
gtgcctcagatataatttaatctta

SEQ ID NO: 2480663 - DNA, 25 bp, Homo sapien
tctggtagtcactttcacccagtct

SEQ ID NO: 2480664 - DNA, 25 bp, Homo sapien
taggcttcctcactttctggtagtc

SEQ ID NO: 2480665 - DNA, 25 bp, Homo sapien
agtcactttcacccagtctccagtt

SEQ ID NO: 2480666 - DNA, 25 bp, Homo sapien
tttaggcttcctcactttctggtag

SEQ ID NO: 2480667 - DNA, 25 bp, Homo sapien
agtacacccaatgctcgtgacaccc

SEQ ID NO: 2480668 - DNA, 25 bp, Homo sapien
cagtacacccaatgctcgtgacacc

SEQ ID NO: 2480669 - DNA, 25 bp, Homo sapien
acccaatgctcgtgacaccccaaac

SEQ ID NO: 2480670 - DNA, 25 bp, Homo sapien
atgctcgtgacaccccaaacaggac

SEQ ID NO: 2480671 - DNA, 25 bp, Homo sapien
cttagcccagtcaaccttaaataga

SEQ ID NO: 2480672 - DNA, 25 bp, Homo sapien
gaggcagtggcatgtacaagtccta

SEQ ID NO: 2480673 - DNA, 25 bp, Homo sapien
caagtcctaggtgatagaaacctta

SEQ ID NO: 2480674 - DNA, 25 bp, Homo sapien
tttctccaaggacttagcccagtca

SEQ ID NO: 2480675 - DNA, 25 bp, Homo sapien
ttaccctgctctaagaggacattgg

SEQ ID NO: 2480676 - DNA, 25 bp, Homo sapien
agctgagcaaccaacttaaacatgg

SEQ ID NO: 2480677 - DNA, 25 bp, Homo sapien
tcagagcaaactctcgctgacaggt

SEQ ID NO: 2480678 - DNA, 25 bp, Homo sapien
taaacatggggtcattaggcaggtg

SEQ ID NO: 2480679 - DNA, 25 bp, Homo sapien
gcatgccattgtgcccacctagaaa

SEQ ID NO: 2480680 - DNA, 25 bp, Homo sapien
tcttccaaattgcagaacttgtgtc

SEQ ID NO: 2480681 - DNA, 25 bp, Homo sapien
ttcctagtcgttaagcatctctgct

SEQ ID NO: 2480682 - DNA, 25 bp, Homo sapien
tgaccaactgaccaactcggagaaa

SEQ ID NO: 2480683 - DNA, 25 bp, Homo sapien
tgtgttccagatgtagtctcgtaac

SEQ ID NO: 2480684 - DNA, 25 bp, Homo sapien
gagtgtgttccagatgtagtctcgt

SEQ ID NO: 2480685 - DNA, 25 bp, Homo sapien
tgcagctgtgttagccagacaagca

SEQ ID NO: 2480686 - DNA, 25 bp, Homo sapien
ttccagatgtagtctcgtaacttct

SEQ ID NO: 2480687 - DNA, 25 bp, Homo sapien
taagggtcggaaagggcactgccca

SEQ ID NO: 2480688 - DNA, 25 bp, Homo sapien
gctgcaaaggacaggtaagggtcgg

SEQ ID NO: 2480689 - DNA, 25 bp, Homo sapien
tttgccagtccatggagaggccctg

SEQ ID NO: 2480690 - DNA, 25 bp, Homo sapien
ccaaatggctggtatgggcacttac

SEQ ID NO: 2480691 - DNA, 25 bp, Homo sapien
aagacatcctaatcttggccaggca

SEQ ID NO: 2480692 - DNA, 25 bp, Homo sapien
tcatgccagcctatagccagtcagt

SEQ ID NO: 2480693 - DNA, 25 bp, Homo sapien
gatgatgcctgtatgctctgctcca

SEQ ID NO: 2480694 - DNA, 25 bp, Homo sapien
tgaaggaccatctaatgtgagcagc

SEQ ID NO: 2480695 - DNA, 25 bp, Homo sapien
gtacaggcgcgtgagctcagtgaac

SEQ ID NO: 2480696 - DNA, 25 bp, Homo sapien
ataccgctgccttctctgtagagat

SEQ ID NO: 2480697 - DNA, 25 bp, Homo sapien
aggtacaggcgcgtgagctcagtga

SEQ ID NO: 2480698 - DNA, 25 bp, Homo sapien
ccccaataccgctgccttctctgta

SEQ ID NO: 2480699 - DNA, 25 bp, Homo sapien
caaggtagctttgcgattagatcca

SEQ ID NO: 2480700 - DNA, 25 bp, Homo sapien
cacaaggtagctttgcgattagatc

SEQ ID NO: 2480701 - DNA, 25 bp, Homo sapien
ctgcaacacaaggtagctttgcgat

SEQ ID NO: 2480702 - DNA, 25 bp, Homo sapien
caacacaaggtagctttgcgattag

SEQ ID NO: 2480703 - DNA, 25 bp, Homo sapien
taggtctcttttccgtttcaacagc

SEQ ID NO: 2480704 - DNA, 25 bp, Homo sapien
tgtacatacctctgttacagcaaga

SEQ ID NO: 2480705 - DNA, 25 bp, Homo sapien
tacagcaagactatggaattttttt

SEQ ID NO: 2480706 - DNA, 25 bp, Homo sapien
cacctcagcatcatgactcactggg

SEQ ID NO: 2480707 - DNA, 25 bp, Homo sapien
ttctgattaactcagaggtaatttt

SEQ ID NO: 2480708 - DNA, 25 bp, Homo sapien
caagcctccaatgaaaatctgttaa

SEQ ID NO: 2480709 - DNA, 25 bp, Homo sapien
tccaacaactgacaaaaaacaagcc

SEQ ID NO: 2480710 - DNA, 25 bp, Homo sapien
acagtcctggtgatagaaaccatgc

SEQ ID NO: 2480711 - DNA, 25 bp, Homo sapien
ggaaagttgtccagcatggtgacca

SEQ ID NO: 2480712 - DNA, 25 bp, Homo sapien
taccctgtgcatatgctcgggcaaa

SEQ ID NO: 2480713 - DNA, 25 bp, Homo sapien
tgctcgggcaaagttactttcactg

SEQ ID NO: 2480714 - DNA, 25 bp, Homo sapien
tcccagtacttggttcggctgatac

SEQ ID NO: 2480715 - DNA, 25 bp, Homo sapien
taagtgtctgagattagagaaaggc

SEQ ID NO: 2480716 - DNA, 25 bp, Homo sapien
aaagagacagtgctcagaacaccag

SEQ ID NO: 2480717 - DNA, 25 bp, Homo sapien
catctctataaatgccggatcagca

SEQ ID NO: 2480718 - DNA, 25 bp, Homo sapien
gagaggtcaacccaatccatttata

SEQ ID NO: 2480719 - DNA, 25 bp, Homo sapien
tctgttgggatatgtccagttacca

SEQ ID NO: 2480720 - DNA, 25 bp, Homo sapien
cacccttagccttgggtagcagttt

SEQ ID NO: 2480721 - DNA, 25 bp, Homo sapien
ttcagggatactaaagcctcggaaa

SEQ ID NO: 2480722 - DNA, 25 bp, Homo sapien
atactaaagcctcggaaacggatgc

SEQ ID NO: 2480723 - DNA, 25 bp, Homo sapien
catcaggatcaagaactgatgtttc

SEQ ID NO: 2480724 - DNA, 25 bp, Homo sapien
ttcatagaccaatcccttcatgcct

SEQ ID NO: 2480725 - DNA, 25 bp, Homo sapien
ctgatgtttcatagaccaatccctt

SEQ ID NO: 2480726 - DNA, 25 bp, Homo sapien
caagaactgatgtttcatagaccaa

SEQ ID NO: 2480727 - DNA, 25 bp, Homo sapien
ccacagtgatttggcccaccaccgt

SEQ ID NO: 2480728 - DNA, 25 bp, Homo sapien
ttggcccaccaccgtcttgccatgt

SEQ ID NO: 2480729 - DNA, 25 bp, Homo sapien
gtccacagtgatttggcccaccacc

SEQ ID NO: 2480730 - DNA, 25 bp, Homo sapien
ggcccaccaccgtcttgccatgttg

SEQ ID NO: 2480731 - DNA, 25 bp, Homo sapien
ctccttaggtatcaggtcagccaat

SEQ ID NO: 2480732 - DNA, 25 bp, Homo sapien
taattctggcctgctccttaggtat

SEQ ID NO: 2480733 - DNA, 25 bp, Homo sapien
tggcctgctccttaggtatcaggtc

SEQ ID NO: 2480734 - DNA, 25 bp, Homo sapien
cctgctccttaggtatcaggtcagc

SEQ ID NO: 2480735 - DNA, 25 bp, Homo sapien
tcccatctcactataccactgagta

SEQ ID NO: 2480736 - DNA, 25 bp, Homo sapien
taaacatatctactgccactaaacc

SEQ ID NO: 2480737 - DNA, 25 bp, Homo sapien
aacagtttctcggtttgggcagaca

SEQ ID NO: 2480738 - DNA, 25 bp, Homo sapien
tttgggcagacaaaagttctggaga

SEQ ID NO: 2480739 - DNA, 25 bp, Homo sapien
aggtcaggctggccgcaatgattct

SEQ ID NO: 2480740 - DNA, 25 bp, Homo sapien
ggctggccgcaatgattcttattct

SEQ ID NO: 2480741 - DNA, 25 bp, Homo sapien
gccgcaatgattcttattcttagtc

SEQ ID NO: 2480742 - DNA, 25 bp, Homo sapien
tcaggctggccgcaatgattcttat

SEQ ID NO: 2480743 - DNA, 25 bp, Homo sapien
cgtggaggaagcactggcatgccgg

SEQ ID NO: 2480744 - DNA, 25 bp, Homo sapien
gtggaggaagcactggcatgccggg

SEQ ID NO: 2480745 - DNA, 25 bp, Homo sapien
gcagagggcagcctttcataacggt

SEQ ID NO: 2480746 - DNA, 25 bp, Homo sapien
tttcataacggtacttctgaccctc

SEQ ID NO: 2480747 - DNA, 25 bp, Homo sapien
tggtctttcgacagcacttcaacct

SEQ ID NO: 2480748 - DNA, 25 bp, Homo sapien
ctctaatctgggaaagaccacaggc

SEQ ID NO: 2480749 - DNA, 25 bp, Homo sapien
caccgttcggtgtcaggttcagtca

SEQ ID NO: 2480750 - DNA, 25 bp, Homo sapien
gatagccactttctagcaccgttcg

SEQ ID NO: 2480751 - DNA, 25 bp, Homo sapien
aaatgtgacctcctcgccagaagta

SEQ ID NO: 2480752 - DNA, 25 bp, Homo sapien
tatggagttaccaaggaccaagtcc

SEQ ID NO: 2480753 - DNA, 25 bp, Homo sapien
tcttgaccaagaagggaggcatctc

SEQ ID NO: 2480754 - DNA, 25 bp, Homo sapien
taccccgtggctgccaaagaaagct

SEQ ID NO: 2480755 - DNA, 25 bp, Homo sapien
caaatgactctagacaggaggtgct

SEQ ID NO: 2480756 - DNA, 25 bp, Homo sapien
gaggtgcttgaggactgtaacatca

SEQ ID NO: 2480757 - DNA, 25 bp, Homo sapien
gcatgccacctgtagagtcacctta

SEQ ID NO: 2480758 - DNA, 25 bp, Homo sapien
gagtcaccttactggaacagcagct

SEQ ID NO: 2480759 - DNA, 25 bp, Homo sapien
ggcttttggcttctggatgcatgcc

SEQ ID NO: 2480760 - DNA, 25 bp, Homo sapien
gcagtcatctcactcaataggtcag

SEQ ID NO: 2480761 - DNA, 25 bp, Homo sapien
agagctcatttgttgccacccctta

SEQ ID NO: 2480762 - DNA, 25 bp, Homo sapien
gacagccagtattctctatagggtg

SEQ ID NO: 2480763 - DNA, 25 bp, Homo sapien
tggaggtggcgttatcacaatcacg

SEQ ID NO: 2480764 - DNA, 25 bp, Homo sapien
caagaactcctctagtgagtcagct

SEQ ID NO: 2480765 - DNA, 25 bp, Homo sapien
gagcttccctatgggcttaaggagg

SEQ ID NO: 2480766 - DNA, 25 bp, Homo sapien
tcgtcaggccatctctaacaggaaa

SEQ ID NO: 2480767 - DNA, 25 bp, Homo sapien
attatgtagctctgtcatcccaaaa

SEQ ID NO: 2480768 - DNA, 25 bp, Homo sapien
gataggtgactaggatcgtcaggcc

SEQ ID NO: 2480769 - DNA, 25 bp, Homo sapien
gcatctcccaaatgctcagctagta

SEQ ID NO: 2480770 - DNA, 25 bp, Homo sapien
tgctcagctagtacttgccactggg

SEQ ID NO: 2480771 - DNA, 25 bp, Homo sapien
agcaggagaagcaacagccaagtaa

SEQ ID NO: 2480772 - DNA, 25 bp, Homo sapien
agcaacagccaagtaagacaagcat

SEQ ID NO: 2480773 - DNA, 25 bp, Homo sapien
cagctttaaattatccgcaggaaaa

SEQ ID NO: 2480774 - DNA, 25 bp, Homo sapien
ggtcacaccacaagactccagcttg

SEQ ID NO: 2480775 - DNA, 25 bp, Homo sapien
gactgtcccctgcttggattagagg

SEQ ID NO: 2480776 - DNA, 25 bp, Homo sapien
caaggtcacttgtgggactgtcccc

SEQ ID NO: 2480777 - DNA, 25 bp, Homo sapien
ctgcaacagtatttctatgtcccaa

SEQ ID NO: 2480778 - DNA, 25 bp, Homo sapien
gcaatcaataccaagtaaaggaccc

SEQ ID NO: 2480779 - DNA, 25 bp, Homo sapien
tgcaacagtatttctatgtcccaaa

SEQ ID NO: 2480780 - DNA, 25 bp, Homo sapien
gcagttcgggaactgacaaggccct

SEQ ID NO: 2480781 - DNA, 25 bp, Homo sapien
ggttgtacagaagtgctccacccca

SEQ ID NO: 2480782 - DNA, 25 bp, Homo sapien
tacaaagcagaggacgaaattagcc

SEQ ID NO: 2480783 - DNA, 25 bp, Homo sapien
taaaaagtgcaagagtcccaaggac

SEQ ID NO: 2480784 - DNA, 25 bp, Homo sapien
ccttgctatttcagggccacgcatc

SEQ ID NO: 2480785 - DNA, 25 bp, Homo sapien
cctttcatttcagacatgcggggtg

SEQ ID NO: 2480786 - DNA, 25 bp, Homo sapien
cagaggttcctgtctcggctccttg

SEQ ID NO: 2480787 - DNA, 25 bp, Homo sapien
catttcagacatgcggggtgacagc

SEQ ID NO: 2480788 - DNA, 25 bp, Homo sapien
ggcgggcggcgtgcacttcaccccc

SEQ ID NO: 2480789 - DNA, 25 bp, Homo sapien
cagaagggaagcgcggcacatggtc

SEQ ID NO: 2480790 - DNA, 25 bp, Homo sapien
agccagaagggaagcgcggcacatg

SEQ ID NO: 2480791 - DNA, 25 bp, Homo sapien
gccagaagggaagcgcggcacatgg

SEQ ID NO: 2480792 - DNA, 25 bp, Homo sapien
gggcggccgcagtaagtaaagccat

SEQ ID NO: 2480793 - DNA, 25 bp, Homo sapien
gagccgggcggccgcagtaagtaaa

SEQ ID NO: 2480794 - DNA, 25 bp, Homo sapien
gccgggcggccgcagtaagtaaagc

SEQ ID NO: 2480795 - DNA, 25 bp, Homo sapien
cgggcggccgcagtaagtaaagcca

SEQ ID NO: 2480796 - DNA, 25 bp, Homo sapien
ccgcgccgacgggttgacaaggttg

SEQ ID NO: 2480797 - DNA, 25 bp, Homo sapien
gccgctgcaccagaggccgcgccga

SEQ ID NO: 2480798 - DNA, 25 bp, Homo sapien
gcgccgacgggttgacaaggttgaa

SEQ ID NO: 2480799 - DNA, 25 bp, Homo sapien
agaggccgcgccgacgggttgacaa

SEQ ID NO: 2480800 - DNA, 25 bp, Homo sapien
ctcaaggaggccccgcccactggcc

SEQ ID NO: 2480801 - DNA, 25 bp, Homo sapien
gtcctcaaggaggccccgcccactg

SEQ ID NO: 2480802 - DNA, 25 bp, Homo sapien
cggcgcccagcccggggtcctcaag

SEQ ID NO: 2480803 - DNA, 25 bp, Homo sapien
caaggaggccccgcccactggccgg

SEQ ID NO: 2480804 - DNA, 25 bp, Homo sapien
gctttccgagccagccacagcttct

SEQ ID NO: 2480805 - DNA, 25 bp, Homo sapien
aaggctttccgagccagccacagct

SEQ ID NO: 2480806 - DNA, 25 bp, Homo sapien
tatgaaggctttccgagccagccac

SEQ ID NO: 2480807 - DNA, 25 bp, Homo sapien
tgaaggctttccgagccagccacag

SEQ ID NO: 2480808 - DNA, 25 bp, Homo sapien
ctatgttggccaggttggccactgc

SEQ ID NO: 2480809 - DNA, 25 bp, Homo sapien
ttggccaggttggccactgcgcctg

SEQ ID NO: 2480810 - DNA, 25 bp, Homo sapien
tgttggccaggttggccactgcgcc

SEQ ID NO: 2480811 - DNA, 25 bp, Homo sapien
tatgttggccaggttggccactgcg

SEQ ID NO: 2480812 - DNA, 25 bp, Homo sapien
gtgaactatcagctgcaactcagta

SEQ ID NO: 2480813 - DNA, 25 bp, Homo sapien
ggcaattgtgaactatcagctgcaa

SEQ ID NO: 2480814 - DNA, 25 bp, Homo sapien
tctggcaattgtgaactatcagctg

SEQ ID NO: 2480815 - DNA, 25 bp, Homo sapien
actatcagctgcaactcagtaaggg

SEQ ID NO: 2480816 - DNA, 25 bp, Homo sapien
tgtacctcatttaacactgtcttcg

SEQ ID NO: 2480817 - DNA, 25 bp, Homo sapien
ctgataaactaagttagaaggcatc

SEQ ID NO: 2480818 - DNA, 25 bp, Homo sapien
gccactgcatctggactaaaccttt

SEQ ID NO: 2480819 - DNA, 25 bp, Homo sapien
actttcctgttatatctgtacctca

SEQ ID NO: 2480820 - DNA, 25 bp, Homo sapien
gaaaggcatttttaggcacgaagca

SEQ ID NO: 2480821 - DNA, 25 bp, Homo sapien
gttcgagagatcttgccaccttggc

SEQ ID NO: 2480822 - DNA, 25 bp, Homo sapien
gactcgagtgatcatgatccttcca

SEQ ID NO: 2480823 - DNA, 25 bp, Homo sapien
cgaaatggacagcaccttgggtata

SEQ ID NO: 2480824 - DNA, 25 bp, Homo sapien
tgtggacagacttatagtccagatt

SEQ ID NO: 2480825 - DNA, 25 bp, Homo sapien
cccagtctggaatctctacacacag

SEQ ID NO: 2480826 - DNA, 25 bp, Homo sapien
tctacacacagaattgtggacagac

SEQ ID NO: 2480827 - DNA, 25 bp, Homo sapien
cctatgccccagtctggaatctcta

SEQ ID NO: 2480828 - DNA, 25 bp, Homo sapien
gcttaggctggcaagcaaggcctct

SEQ ID NO: 2480829 - DNA, 25 bp, Homo sapien
agcaaggcctctcattaaacaacct

SEQ ID NO: 2480830 - DNA, 25 bp, Homo sapien
tcgtctgtccctatccgataaagcc

SEQ ID NO: 2480831 - DNA, 25 bp, Homo sapien
tacactttattgttgccactggcat

SEQ ID NO: 2480832 - DNA, 25 bp, Homo sapien
tctctgttcttgctggtccctccat

SEQ ID NO: 2480833 - DNA, 25 bp, Homo sapien
ccttcctgtctctgttcttgctggt

SEQ ID NO: 2480834 - DNA, 25 bp, Homo sapien
ttttcagctgagttggtcacatcca

SEQ ID NO: 2480835 - DNA, 25 bp, Homo sapien
tcctgtctctgttcttgctggtccc

SEQ ID NO: 2480836 - DNA, 25 bp, Homo sapien
tctaaagacgtggtattgagtgggc

SEQ ID NO: 2480837 - DNA, 25 bp, Homo sapien
gaattaaaggttcaggcctctccta

SEQ ID NO: 2480838 - DNA, 25 bp, Homo sapien
cagccatgaacacaagggatttcta

SEQ ID NO: 2480839 - DNA, 25 bp, Homo sapien
catatccgttatttccttcaagacc

SEQ ID NO: 2480840 - DNA, 25 bp, Homo sapien
tatcctgtatcaatcccaaaactct

SEQ ID NO: 2480841 - DNA, 25 bp, Homo sapien
cacagtttgtacttttggtttcata

SEQ ID NO: 2480842 - DNA, 25 bp, Homo sapien
gtctatataactccttatcttcaag

SEQ ID NO: 2480843 - DNA, 25 bp, Homo sapien
tgtaagggcaattccaggcatgaaa

SEQ ID NO: 2480844 - DNA, 25 bp, Homo sapien
catcatgcgatatgtgcagggcatg

SEQ ID NO: 2480845 - DNA, 25 bp, Homo sapien
tgcgatatgtgcagggcatggtcac

SEQ ID NO: 2480846 - DNA, 25 bp, Homo sapien
gcgatatgtgcagggcatggtcaca

SEQ ID NO: 2480847 - DNA, 25 bp, Homo sapien
catgcgatatgtgcagggcatggtc

SEQ ID NO: 2480848 - DNA, 25 bp, Homo sapien
gatatctgccagtatcaagaaaatt

SEQ ID NO: 2480849 - DNA, 25 bp, Homo sapien
tctcacctgtatctcagggtcaagg

SEQ ID NO: 2480850 - DNA, 25 bp, Homo sapien
gacctaataccagaggtttctggga

SEQ ID NO: 2480851 - DNA, 25 bp, Homo sapien
aaatggaagacagctcttgacctaa

SEQ ID NO: 2480852 - DNA, 25 bp, Homo sapien
cagagctactagaacaggagataaa

SEQ ID NO: 2480853 - DNA, 25 bp, Homo sapien
ggttccacagagctactagaacagg

SEQ ID NO: 2480854 - DNA, 25 bp, Homo sapien
tccacagagctactagaacaggaga

SEQ ID NO: 2480855 - DNA, 25 bp, Homo sapien
caggttccacagagctactagaaca

SEQ ID NO: 2480856 - DNA, 25 bp, Homo sapien
ctttaacattgtcagcctctcggga

SEQ ID NO: 2480857 - DNA, 25 bp, Homo sapien
agttcatcctcgtattcctccacaa

SEQ ID NO: 2480858 - DNA, 25 bp, Homo sapien
agaattcaatgagttcatcctcgta

SEQ ID NO: 2480859 - DNA, 25 bp, Homo sapien
cagcctctcgggaaaagaattcaat

SEQ ID NO: 2480860 - DNA, 25 bp, Homo sapien
tccaacaaccccttaatgtccaaga

SEQ ID NO: 2480861 - DNA, 25 bp, Homo sapien
cagcctaactttctaattggttctc

SEQ ID NO: 2480862 - DNA, 25 bp, Homo sapien
ggatatcagcctaactttctaattg

SEQ ID NO: 2480863 - DNA, 25 bp, Homo sapien
caagaaccagctaccgattcccata

SEQ ID NO: 2480864 - DNA, 25 bp, Homo sapien
tacacgtacgtagttcttgcgatgg

SEQ ID NO: 2480865 - DNA, 25 bp, Homo sapien
caaacttgagggtgccgctaatatc

SEQ ID NO: 2480866 - DNA, 25 bp, Homo sapien
gatgccttgtaggtccagttcactg

SEQ ID NO: 2480867 - DNA, 25 bp, Homo sapien
taatatctgagtcgattcggatgcc

SEQ ID NO: 2480868 - DNA, 25 bp, Homo sapien
tagaaatgtcctcagccttgggtca

SEQ ID NO: 2480869 - DNA, 25 bp, Homo sapien
ctagaaatgtcctcagccttgggtc

SEQ ID NO: 2480870 - DNA, 25 bp, Homo sapien
agaaatgtcctcagccttgggtcac

SEQ ID NO: 2480871 - DNA, 25 bp, Homo sapien
tttccaaatctagctccaacaacct

SEQ ID NO: 2480872 - DNA, 25 bp, Homo sapien
ctccaacaacctattctaaaaagct

SEQ ID NO: 2480873 - DNA, 25 bp, Homo sapien
tctttccaaatctagctccaacaac

SEQ ID NO: 2480874 - DNA, 25 bp, Homo sapien
ttccaaatctagctccaacaaccta

SEQ ID NO: 2480875 - DNA, 25 bp, Homo sapien
cttggcagtagtttcaactatatga

SEQ ID NO: 2480876 - DNA, 25 bp, Homo sapien
ggcagtagtttcaactatatgattt

SEQ ID NO: 2480877 - DNA, 25 bp, Homo sapien
cgtgcccggcacctcattgtacaat

SEQ ID NO: 2480878 - DNA, 25 bp, Homo sapien
tgatgactgaggctcactacagctt

SEQ ID NO: 2480879 - DNA, 25 bp, Homo sapien
agacagttaacattagctccaagtt

SEQ ID NO: 2480880 - DNA, 25 bp, Homo sapien
aacctgatcaacttatacttctaat

SEQ ID NO: 2480881 - DNA, 25 bp, Homo sapien
acaagacagttaacattagctccaa

SEQ ID NO: 2480882 - DNA, 25 bp, Homo sapien
acagttaacattagctccaagttat

SEQ ID NO: 2480883 - DNA, 25 bp, Homo sapien
gagttttgttcttgtcaaccagact

SEQ ID NO: 2480884 - DNA, 25 bp, Homo sapien
acgccattcttttcgtctcagcctc

SEQ ID NO: 2480885 - DNA, 25 bp, Homo sapien
gttttgttcttgtcaaccagactgg

SEQ ID NO: 2480886 - DNA, 25 bp, Homo sapien
agttcacgccattcttttcgtctca

SEQ ID NO: 2480887 - DNA, 25 bp, Homo sapien
cttaacactgccttatatattgctt

SEQ ID NO: 2480888 - DNA, 25 bp, Homo sapien
tgatgcccaggctagcactgtaatc

SEQ ID NO: 2480889 - DNA, 25 bp, Homo sapien
tatatattgcttattagatacacct

SEQ ID NO: 2480890 - DNA, 25 bp, Homo sapien
caggctagcactgtaatcttaacac

SEQ ID NO: 2480891 - DNA, 25 bp, Homo sapien
aaagtattaaggtttgcagccagga

SEQ ID NO: 2480892 - DNA, 25 bp, Homo sapien
tgtttgctaacaaattctacagcag

SEQ ID NO: 2480893 - DNA, 25 bp, Homo sapien
tagctccgactcagattttgaacgg

SEQ ID NO: 2480894 - DNA, 25 bp, Homo sapien
cattaaaaaccagtcatgtggatgt

SEQ ID NO: 2480895 - DNA, 25 bp, Homo sapien
ccaaagccagagtgagctactttgt

SEQ ID NO: 2480896 - DNA, 25 bp, Homo sapien
catccaaagccagagtgagctactt

SEQ ID NO: 2480897 - DNA, 25 bp, Homo sapien
agccagagtgagctactttgtttgg

SEQ ID NO: 2480898 - DNA, 25 bp, Homo sapien
tcatccaaagccagagtgagctact

SEQ ID NO: 2480899 - DNA, 25 bp, Homo sapien
ttgatccggaaagatcccatctgaa

SEQ ID NO: 2480900 - DNA, 25 bp, Homo sapien
gctgccatctggattgatccggaaa

SEQ ID NO: 2480901 - DNA, 25 bp, Homo sapien
catctggattgatccggaaagatcc

SEQ ID NO: 2480902 - DNA, 25 bp, Homo sapien
gactggctgccatctggattgatcc

SEQ ID NO: 2480903 - DNA, 25 bp, Homo sapien
gagaatgggatcaacccaggatttc

SEQ ID NO: 2480904 - DNA, 25 bp, Homo sapien
gggatcaacccaggatttccattca

SEQ ID NO: 2480905 - DNA, 25 bp, Homo sapien
tcaacccaggatttccattcatcct

SEQ ID NO: 2480906 - DNA, 25 bp, Homo sapien
cccaggccttggatctcatgccctc

SEQ ID NO: 2480907 - DNA, 25 bp, Homo sapien
gagcccaggcggttcccagcagggc

SEQ ID NO: 2480908 - DNA, 25 bp, Homo sapien
gggccagccaaccccagcctttcat

SEQ ID NO: 2480909 - DNA, 25 bp, Homo sapien
acagtggagatcctggctcctccga

SEQ ID NO: 2480910 - DNA, 25 bp, Homo sapien
cctccgagcccaggcggttcccagc

SEQ ID NO: 2480911 - DNA, 25 bp, Homo sapien
ctttagcgtaatggggtcgctccac

SEQ ID NO: 2480912 - DNA, 25 bp, Homo sapien
gccccagtggctcccgaaactacac

SEQ ID NO: 2480913 - DNA, 25 bp, Homo sapien
gaagaccgctggactctcactttgg

SEQ ID NO: 2480914 - DNA, 25 bp, Homo sapien
cccaagcgctggaagaccgctggac

SEQ ID NO: 2480915 - DNA, 25 bp, Homo sapien
agcgctggaagaccgctggactctc

SEQ ID NO: 2480916 - DNA, 25 bp, Homo sapien
agcagggctgtccgggattctccag

SEQ ID NO: 2480917 - DNA, 25 bp, Homo sapien
gtgtcccggcgaccgcctgacccag

SEQ ID NO: 2480918 - DNA, 25 bp, Homo sapien
tgtccgggattctccagagcgcttc

SEQ ID NO: 2480919 - DNA, 25 bp, Homo sapien
gggattctccagagcgcttcgccgc

SEQ ID NO: 2480920 - DNA, 25 bp, Homo sapien
ggtgcgagccccaatcagacaccga

SEQ ID NO: 2480921 - DNA, 25 bp, Homo sapien
agcgtgctgcggtgcgagccccaat

SEQ ID NO: 2480922 - DNA, 25 bp, Homo sapien
gctgcggtgcgagccccaatcagac

SEQ ID NO: 2480923 - DNA, 25 bp, Homo sapien
ctaagcgggactccagcgtgctgcg

SEQ ID NO: 2480924 - DNA, 25 bp, Homo sapien
aaactctcgcgcgaacaggcagctt

SEQ ID NO: 2480925 - DNA, 25 bp, Homo sapien
ccagacttgcgtggcgaacagatcc

SEQ ID NO: 2480926 - DNA, 25 bp, Homo sapien
ttaggagaggctcccgaacagcaag

SEQ ID NO: 2480927 - DNA, 25 bp, Homo sapien
gtcaatcgccgaaggacccagactt

SEQ ID NO: 2480928 - DNA, 25 bp, Homo sapien
caggtgggctaggaccttcaaaacg

SEQ ID NO: 2480929 - DNA, 25 bp, Homo sapien
accttcaaaacggtgcgctgccggc

SEQ ID NO: 2480930 - DNA, 25 bp, Homo sapien
ttaagcgacgacagagtccgggcgt

SEQ ID NO: 2480931 - DNA, 25 bp, Homo sapien
tatgggagcggctagtcgtgcgcgt

SEQ ID NO: 2480932 - DNA, 25 bp, Homo sapien
caacactggtttgcttgggccacca

SEQ ID NO: 2480933 - DNA, 25 bp, Homo sapien
gcagccaagctttgtccaggatcca

SEQ ID NO: 2480934 - DNA, 25 bp, Homo sapien
ccctgaagcagttggtgacttgtgc

SEQ ID NO: 2480935 - DNA, 25 bp, Homo sapien
ggacttcaatccctagccagctagg

SEQ ID NO: 2480936 - DNA, 25 bp, Homo sapien
ctggctcctagaacctttgcaacaa

SEQ ID NO: 2480937 - DNA, 25 bp, Homo sapien
tggctcctagaacctttgcaacaat

SEQ ID NO: 2480938 - DNA, 25 bp, Homo sapien
ggctcctagaacctttgcaacaatt

SEQ ID NO: 2480939 - DNA, 25 bp, Homo sapien
ctgtgaccctagaccctgagcacgt

SEQ ID NO: 2480940 - DNA, 25 bp, Homo sapien
tagccaacttaggaagccatctccc

SEQ ID NO: 2480941 - DNA, 25 bp, Homo sapien
ggaagtggacaaggtatagccaact

SEQ ID NO: 2480942 - DNA, 25 bp, Homo sapien
cacgtccagtactggaagtggacaa

SEQ ID NO: 2480943 - DNA, 25 bp, Homo sapien
ctatagaacagtaaagggagagggc

SEQ ID NO: 2480944 - DNA, 25 bp, Homo sapien
tatagaacagtaaagggagagggcc

SEQ ID NO: 2480945 - DNA, 25 bp, Homo sapien
agaacagtaaagggagagggccgtg

SEQ ID NO: 2480946 - DNA, 25 bp, Homo sapien
atagaacagtaaagggagagggccg

SEQ ID NO: 2480947 - DNA, 25 bp, Homo sapien
agcactgaggagaagacagctgcat

SEQ ID NO: 2480948 - DNA, 25 bp, Homo sapien
cagcactgaggagaagacagctgca

SEQ ID NO: 2480949 - DNA, 25 bp, Homo sapien
tcagagcgccagcactgaggagaag

SEQ ID NO: 2480950 - DNA, 25 bp, Homo sapien
gagcgccagcactgaggagaagaca

SEQ ID NO: 2480951 - DNA, 25 bp, Homo sapien
tggaccttccctgaacattttagac

SEQ ID NO: 2480952 - DNA, 25 bp, Homo sapien
tgtaaactgttaagtgctattctcc

SEQ ID NO: 2480953 - DNA, 25 bp, Homo sapien
tagacttgggcaagaggaagttata

SEQ ID NO: 2480954 - DNA, 25 bp, Homo sapien
tgtgcaatcaaaatccacccaattg

SEQ ID NO: 2480955 - DNA, 25 bp, Homo sapien
tcttgggacttgtttggccctcagg

SEQ ID NO: 2480956 - DNA, 25 bp, Homo sapien
tgggacttgtttggccctcaggctc

SEQ ID NO: 2480957 - DNA, 25 bp, Homo sapien
ttgggacttgtttggccctcaggct

SEQ ID NO: 2480958 - DNA, 25 bp, Homo sapien
gggacttgtttggccctcaggctca

SEQ ID NO: 2480959 - DNA, 25 bp, Homo sapien
gctgtgcgggcatcctcaatactgt

SEQ ID NO: 2480960 - DNA, 25 bp, Homo sapien
gagcaccttgtggaaagactcaggc

SEQ ID NO: 2480961 - DNA, 25 bp, Homo sapien
gatactttcggtacagctgaagggc

SEQ ID NO: 2480962 - DNA, 25 bp, Homo sapien
tcaatactgtcatgggtttcccctt

SEQ ID NO: 2480963 - DNA, 25 bp, Homo sapien
tcctcagtgcacagaagggatattg

SEQ ID NO: 2480964 - DNA, 25 bp, Homo sapien
tgtcaccactaactgagggtctccc

SEQ ID NO: 2480965 - DNA, 25 bp, Homo sapien
ggaggtaggaacatgtctccccact

SEQ ID NO: 2480966 - DNA, 25 bp, Homo sapien
ggtggaatagtttgggacccagcaa

SEQ ID NO: 2480967 - DNA, 25 bp, Homo sapien
tagacagtgtcaaggacttggtcct

SEQ ID NO: 2480968 - DNA, 25 bp, Homo sapien
cgcagggaaatcattcgttttcggg

SEQ ID NO: 2480969 - DNA, 25 bp, Homo sapien
taccaagcaaggaatcgcagggaaa

SEQ ID NO: 2480970 - DNA, 25 bp, Homo sapien
cgttttcggggcatatggaacaggt

SEQ ID NO: 2480971 - DNA, 25 bp, Homo sapien
ctggcaaggataaaagagggggaga

SEQ ID NO: 2480972 - DNA, 25 bp, Homo sapien
tggcaaggataaaagagggggagac

SEQ ID NO: 2480973 - DNA, 25 bp, Homo sapien
cacaatgtataccctgaggggccca

SEQ ID NO: 2480974 - DNA, 25 bp, Homo sapien
ggcacaatgtataccctgaggggcc

SEQ ID NO: 2480975 - DNA, 25 bp, Homo sapien
aaggcacaatgtataccctgagggg

SEQ ID NO: 2480976 - DNA, 25 bp, Homo sapien
gcacaatgtataccctgaggggccc

SEQ ID NO: 2480977 - DNA, 25 bp, Homo sapien
aagactcttaaaagagccctgccaa

SEQ ID NO: 2480978 - DNA, 25 bp, Homo sapien
gaagactcttaaaagagccctgcca

SEQ ID NO: 2480979 - DNA, 25 bp, Homo sapien
gactcttaaaagagccctgccaaac

SEQ ID NO: 2480980 - DNA, 25 bp, Homo sapien
aagaagactcttaaaagagccctgc

SEQ ID NO: 2480981 - DNA, 25 bp, Homo sapien
cccgagtattgagtcaagtaatcca

SEQ ID NO: 2480982 - DNA, 25 bp, Homo sapien
ggtcaccaggctttatacccgagta

SEQ ID NO: 2480983 - DNA, 25 bp, Homo sapien
acttgagagttgttaggtgcttgga

SEQ ID NO: 2480984 - DNA, 25 bp, Homo sapien
gttgatgacccggaagtccttctgc

SEQ ID NO: 2480985 - DNA, 25 bp, Homo sapien
tggtttaatggtagacttggtacca

SEQ ID NO: 2480986 - DNA, 25 bp, Homo sapien
tagtcatcaatgaaggggataccct

SEQ ID NO: 2480987 - DNA, 25 bp, Homo sapien
tggccccgaacacaggtaatcctgg

SEQ ID NO: 2480988 - DNA, 25 bp, Homo sapien
gctcctgggtagagatgtagtcatc

SEQ ID NO: 2480989 - DNA, 25 bp, Homo sapien
cattaagggtgacaaactcagcatc

SEQ ID NO: 2480990 - DNA, 25 bp, Homo sapien
caggtccccaatctgtggcatctca

SEQ ID NO: 2480991 - DNA, 25 bp, Homo sapien
caagacacttgcctcaatagggttc

SEQ ID NO: 2480992 - DNA, 25 bp, Homo sapien
tagtatgtgttttccgctgcttccg

SEQ ID NO: 2480993 - DNA, 25 bp, Homo sapien
attcatgtcaaactgcacagcttca

SEQ ID NO: 2480994 - DNA, 25 bp, Homo sapien
taataaaggattgcaggtactttcc

SEQ ID NO: 2480995 - DNA, 25 bp, Homo sapien
caggttgtatctggaattgagattc

SEQ ID NO: 2480996 - DNA, 25 bp, Homo sapien
gagattccgtttgacataataaagg

SEQ ID NO: 2480997 - DNA, 25 bp, Homo sapien
acttcagacggaggccaggactcag

SEQ ID NO: 2480998 - DNA, 25 bp, Homo sapien
tctgcctggcattctatagagccct

SEQ ID NO: 2480999 - DNA, 25 bp, Homo sapien
acttatggctaatgtatatcaccct

SEQ ID NO: 2481000 - DNA, 25 bp, Homo sapien
tctatagagccctaaagataaggat

SEQ ID NO: 2481001 - DNA, 25 bp, Homo sapien
cttatcaataggttcaataagaaag

SEQ ID NO: 2481002 - DNA, 25 bp, Homo sapien
gttcaataagaaagtcattgaacag

SEQ ID NO: 2481003 - DNA, 25 bp, Homo sapien
tcaataagaaagtcattgaacagat

SEQ ID NO: 2481004 - DNA, 25 bp, Homo sapien
ttcaataagaaagtcattgaacaga

SEQ ID NO: 2481005 - DNA, 25 bp, Homo sapien
caaagaaagcctgtggcgatacaaa

SEQ ID NO: 2481006 - DNA, 25 bp, Homo sapien
aattgatggctggaccactctgtct

SEQ ID NO: 2481007 - DNA, 25 bp, Homo sapien
aatacaaagaaagcctgtggcgata

SEQ ID NO: 2481008 - DNA, 25 bp, Homo sapien
gcgatacaaattgatggctggacca

SEQ ID NO: 2481009 - DNA, 25 bp, Homo sapien
accaggctgccccctgtgcgtgagt

SEQ ID NO: 2481010 - DNA, 25 bp, Homo sapien
ggatgtgtaccacagtagccatcag

SEQ ID NO: 2481011 - DNA, 25 bp, Homo sapien
tcaggtcatacacatagacaccatg

SEQ ID NO: 2481012 - DNA, 25 bp, Homo sapien
gagtccaggatgtgtaccacagtag

SEQ ID NO: 2481013 - DNA, 25 bp, Homo sapien
tgaggggggtacccaggctgctaag

SEQ ID NO: 2481014 - DNA, 25 bp, Homo sapien
catctaggaccccaacactgaactg

SEQ ID NO: 2481015 - DNA, 25 bp, Homo sapien
aactgagtgactatggaaaatcccc

SEQ ID NO: 2481016 - DNA, 25 bp, Homo sapien
cactgaactgagtgactatggaaaa

SEQ ID NO: 2481017 - DNA, 25 bp, Homo sapien
tgactatggaaaatcccctaacagg

SEQ ID NO: 2481018 - DNA, 25 bp, Homo sapien
gtttttggtcatcttcatgcgaatg

SEQ ID NO: 2481019 - DNA, 25 bp, Homo sapien
aaggaagccagacgttcttcaactc

SEQ ID NO: 2481020 - DNA, 25 bp, Homo sapien
ccaattgcaaacatccagccctttg

SEQ ID NO: 2481021 - DNA, 25 bp, Homo sapien
tcatcttcatgcgaatggagaaagg

SEQ ID NO: 2481022 - DNA, 25 bp, Homo sapien
agcaaattccttgttcttggagatt

SEQ ID NO: 2481023 - DNA, 25 bp, Homo sapien
tgtttctttactgccatcttgaagg

SEQ ID NO: 2481024 - DNA, 25 bp, Homo sapien
cgtgtttctttactgccatcttgaa

SEQ ID NO: 2481025 - DNA, 25 bp, Homo sapien
ccaccgtgtttctttactgccatct

SEQ ID NO: 2481026 - DNA, 25 bp, Homo sapien
tatctggcagatggcggatgttgcg

SEQ ID NO: 2481027 - DNA, 25 bp, Homo sapien
tttgagctgttcacctcacaattga

SEQ ID NO: 2481028 - DNA, 25 bp, Homo sapien
tcacctcacaattgatgacaagaat

SEQ ID NO: 2481029 - DNA, 25 bp, Homo sapien
cagaaatcagcctcttttgagctgt

SEQ ID NO: 2481030 - DNA, 25 bp, Homo sapien
agcacctgagcaaagtcatagttct

SEQ ID NO: 2481031 - DNA, 25 bp, Homo sapien
ctggtccaggcagatgcttcgcttc

SEQ ID NO: 2481032 - DNA, 25 bp, Homo sapien
caggcctgtgtattctggtccaggc

SEQ ID NO: 2481033 - DNA, 25 bp, Homo sapien
tgcttcgcttcagcacctgagcaaa

SEQ ID NO: 2481034 - DNA, 25 bp, Homo sapien
gaaaattagatgctatactcctggt

SEQ ID NO: 2481035 - DNA, 25 bp, Homo sapien
ggggagccttcccaactgagctgaa

SEQ ID NO: 2481036 - DNA, 25 bp, Homo sapien
ccctgatattacaggacattttggg

SEQ ID NO: 2481037 - DNA, 25 bp, Homo sapien
aacaccctctccctgatattacagg

SEQ ID NO: 2481038 - DNA, 25 bp, Homo sapien
gcagagtggatgaggctcgcacggt

SEQ ID NO: 2481039 - DNA, 25 bp, Homo sapien
gtggatgaggctcgcacggtctcac

SEQ ID NO: 2481040 - DNA, 25 bp, Homo sapien
taggagagtgtgaaaagcagagtgg

SEQ ID NO: 2481041 - DNA, 25 bp, Homo sapien
catcagggtaggagagtgtgaaaag

SEQ ID NO: 2481042 - DNA, 25 bp, Homo sapien
cccaataacagagtcccccgatgag

SEQ ID NO: 2481043 - DNA, 25 bp, Homo sapien
gcccaataacagagtcccccgatga

SEQ ID NO: 2481044 - DNA, 25 bp, Homo sapien
ccaataacagagtcccccgatgagc

SEQ ID NO: 2481045 - DNA, 25 bp, Homo sapien
gagaatgaagcgattccacctctga

SEQ ID NO: 2481046 - DNA, 25 bp, Homo sapien
cctcaggaatagtacggaatgcccg

SEQ ID NO: 2481047 - DNA, 25 bp, Homo sapien
tccagcacctcgataagcctgtggt

SEQ ID NO: 2481048 - DNA, 25 bp, Homo sapien
tgagtcagccaggattagaccgagg

SEQ ID NO: 2481049 - DNA, 25 bp, Homo sapien
cgagagaggtccaacatgtgaaaca

SEQ ID NO: 2481050 - DNA, 25 bp, Homo sapien
acgagagaggtccaacatgtgaaac

SEQ ID NO: 2481051 - DNA, 25 bp, Homo sapien
ccacgagagaggtccaacatgtgaa

SEQ ID NO: 2481052 - DNA, 25 bp, Homo sapien
caccacgagagaggtccaacatgtg

SEQ ID NO: 2481053 - DNA, 25 bp, Homo sapien
cagcgtacaggctccaggaaataga

SEQ ID NO: 2481054 - DNA, 25 bp, Homo sapien
caaaggtggttttgaattagacagc

SEQ ID NO: 2481055 - DNA, 25 bp, Homo sapien
ccagacagaactccttctggcaaag

SEQ ID NO: 2481056 - DNA, 25 bp, Homo sapien
gacagaactccttctggcaaaggtg

SEQ ID NO: 2481057 - DNA, 25 bp, Homo sapien
gcagaagaactgatgtaggaaactg

SEQ ID NO: 2481058 - DNA, 25 bp, Homo sapien
aagcagaagaactgatgtaggaaac

SEQ ID NO: 2481059 - DNA, 25 bp, Homo sapien
aaaagcagaagaactgatgtaggaa

SEQ ID NO: 2481060 - DNA, 25 bp, Homo sapien
agaagaactgatgtaggaaactggc

SEQ ID NO: 2481061 - DNA, 25 bp, Homo sapien
cagccctagcttggaatatttgatg

SEQ ID NO: 2481062 - DNA, 25 bp, Homo sapien
agtgtttgaagtcaaagtcctccag

SEQ ID NO: 2481063 - DNA, 25 bp, Homo sapien
ggctctaatccagcaaacaaggtct

SEQ ID NO: 2481064 - DNA, 25 bp, Homo sapien
catgcagttacagtaggcgttggga

SEQ ID NO: 2481065 - DNA, 25 bp, Homo sapien
tcccacaggccctgatgtcccccag

SEQ ID NO: 2481066 - DNA, 25 bp, Homo sapien
ccacatcccacaggccctgatgtcc

SEQ ID NO: 2481067 - DNA, 25 bp, Homo sapien
ttccccacatcccacaggccctgat

SEQ ID NO: 2481068 - DNA, 25 bp, Homo sapien
ctttccccacatcccacaggccctg

SEQ ID NO: 2481069 - DNA, 25 bp, Homo sapien
tgtctgactccttgagtctgtaggg

SEQ ID NO: 2481070 - DNA, 25 bp, Homo sapien
gatgtggttcctcttctcgtcctac

SEQ ID NO: 2481071 - DNA, 25 bp, Homo sapien
gtgactcagtgacctggctgaagct

SEQ ID NO: 2481072 - DNA, 25 bp, Homo sapien
cttgcggtatttcttagaaaccatg

SEQ ID NO: 2481073 - DNA, 25 bp, Homo sapien
accttcttcatggtgcgcagaatct

SEQ ID NO: 2481074 - DNA, 25 bp, Homo sapien
cttcttcatggtgcgcagaatctct

SEQ ID NO: 2481075 - DNA, 25 bp, Homo sapien
tgattgcgcagcctggtgcggggat

SEQ ID NO: 2481076 - DNA, 25 bp, Homo sapien
ggattgggcgcatagccaatgaagc

SEQ ID NO: 2481077 - DNA, 25 bp, Homo sapien
gagttgtggtgtacactggtccact

SEQ ID NO: 2481078 - DNA, 25 bp, Homo sapien
taggacttaaagagttgtggtgtac

SEQ ID NO: 2481079 - DNA, 25 bp, Homo sapien
gtgtacactggtccactccccaatc

SEQ ID NO: 2481080 - DNA, 25 bp, Homo sapien
taaagagttgtggtgtacactggtc

SEQ ID NO: 2481081 - DNA, 25 bp, Homo sapien
agtgagtccacgagacacggcaaag

SEQ ID NO: 2481082 - DNA, 25 bp, Homo sapien
gggaatcagtccagaggtgcacaca

SEQ ID NO: 2481083 - DNA, 25 bp, Homo sapien
catgaaagatatcggctgggttggc

SEQ ID NO: 2481084 - DNA, 25 bp, Homo sapien
caaagcaaactcagtctcacgggag

SEQ ID NO: 2481085 - DNA, 25 bp, Homo sapien
cttaaaagtacggaggtctctcagg

SEQ ID NO: 2481086 - DNA, 25 bp, Homo sapien
gaagccacaggcagctagcaggttg

SEQ ID NO: 2481087 - DNA, 25 bp, Homo sapien
gccatgcacatcaaagtctgacaga

SEQ ID NO: 2481088 - DNA, 25 bp, Homo sapien
tacaccttgaggaaacggtcgcagg

SEQ ID NO: 2481089 - DNA, 25 bp, Homo sapien
tgactccaggcgtctctactgcata

SEQ ID NO: 2481090 - DNA, 25 bp, Homo sapien
gaagaagcgatttgtctgtctcatg

SEQ ID NO: 2481091 - DNA, 25 bp, Homo sapien
tgtctgtctcatgatggtgactcca

SEQ ID NO: 2481092 - DNA, 25 bp, Homo sapien
ttgccagacgtgtggccgcagaaga

SEQ ID NO: 2481093 - DNA, 25 bp, Homo sapien
atctctattatgtgattctgcagcc

SEQ ID NO: 2481094 - DNA, 25 bp, Homo sapien
tgtcagtcagtaggagactgtgcat

SEQ ID NO: 2481095 - DNA, 25 bp, Homo sapien
ctggacagtgttaagatcaatctct

SEQ ID NO: 2481096 - DNA, 25 bp, Homo sapien
accaacgagtagagtgctgctgtca

SEQ ID NO: 2481097 - DNA, 25 bp, Homo sapien
ggcccccacgggccatatacttgag

SEQ ID NO: 2481098 - DNA, 25 bp, Homo sapien
aaaggatgagtagcgctccaaggct

SEQ ID NO: 2481099 - DNA, 25 bp, Homo sapien
aatcaaatataatgaggcccccacg

SEQ ID NO: 2481100 - DNA, 25 bp, Homo sapien
actgccattgacttgaaaggatgag

SEQ ID NO: 2481101 - DNA, 25 bp, Homo sapien
gattagatttggatggctacagact

SEQ ID NO: 2481102 - DNA, 25 bp, Homo sapien
gataaatcaaaacactggatgggca

SEQ ID NO: 2481103 - DNA, 25 bp, Homo sapien
tacagactaagtgatgggtacaact

SEQ ID NO: 2481104 - DNA, 25 bp, Homo sapien
tttggcagctctatgcaggaggacc

SEQ ID NO: 2481105 - DNA, 25 bp, Homo sapien
ggtactggctatctgcaaagcagct

SEQ ID NO: 2481106 - DNA, 25 bp, Homo sapien
aacatctttcaaccctcacaaaggg

SEQ ID NO: 2481107 - DNA, 25 bp, Homo sapien
gcttccttgggttaagaccagataa

SEQ ID NO: 2481108 - DNA, 25 bp, Homo sapien
tgtctcatcactacaactcctcggt

SEQ ID NO: 2481109 - DNA, 25 bp, Homo sapien
catctcctcgtgcaagtcaaagtgg

SEQ ID NO: 2481110 - DNA, 25 bp, Homo sapien
cattctgtagcagacttgggttcag

SEQ ID NO: 2481111 - DNA, 25 bp, Homo sapien
gagtagacaccttccattatgtgca

SEQ ID NO: 2481112 - DNA, 25 bp, Homo sapien
cactgattcctggacgggaagagcc

SEQ ID NO: 2481113 - DNA, 25 bp, Homo sapien
gatgacgatggcagcttacacctgt

SEQ ID NO: 2481114 - DNA, 25 bp, Homo sapien
tcccttaccacagtccctttagatg

SEQ ID NO: 2481115 - DNA, 25 bp, Homo sapien
ctttagatgcctgacccaaccttca

SEQ ID NO: 2481116 - DNA, 25 bp, Homo sapien
cttcagcaagacagcaccgatgggc

SEQ ID NO: 2481117 - DNA, 25 bp, Homo sapien
ggtagaactgttgtccctatccctc

SEQ ID NO: 2481118 - DNA, 25 bp, Homo sapien
gtagctgagtcaagggtaggcccag

SEQ ID NO: 2481119 - DNA, 25 bp, Homo sapien
caggtactggtacttagggtcttct

SEQ ID NO: 2481120 - DNA, 25 bp, Homo sapien
catgagggatgagactgccagccaa

SEQ ID NO: 2481121 - DNA, 25 bp, Homo sapien
tcatcaggtgaagggagcgagaatt

SEQ ID NO: 2481122 - DNA, 25 bp, Homo sapien
gaatcctctccaatagctacccagg

SEQ ID NO: 2481123 - DNA, 25 bp, Homo sapien
taatggccagttacccacaattggg

SEQ ID NO: 2481124 - DNA, 25 bp, Homo sapien
caggattctctagaggaaaacaata

SEQ ID NO: 2481125 - DNA, 25 bp, Homo sapien
caagatttctccatggcggatattt

SEQ ID NO: 2481126 - DNA, 25 bp, Homo sapien
gcgctgtcagctccgcgggaaattc

SEQ ID NO: 2481127 - DNA, 25 bp, Homo sapien
ggagcgcaagcgctgtcagctccgc

SEQ ID NO: 2481128 - DNA, 25 bp, Homo sapien
tttggagcgcgtggaattagaacga

SEQ ID NO: 2481129 - DNA, 25 bp, Homo sapien
ggattttacccatggatgcaacaag

SEQ ID NO: 2481130 - DNA, 25 bp, Homo sapien
cttagctgtttcactcgatgttgca

SEQ ID NO: 2481131 - DNA, 25 bp, Homo sapien
cagaagaaaagggtcaacctcttgg

SEQ ID NO: 2481132 - DNA, 25 bp, Homo sapien
tgtggtcaccgatggcctcattctg

SEQ ID NO: 2481133 - DNA, 25 bp, Homo sapien
ttcttcattctttccacctcttcct

SEQ ID NO: 2481134 - DNA, 25 bp, Homo sapien
tccacctcttccttcattccaggat

SEQ ID NO: 2481135 - DNA, 25 bp, Homo sapien
tttccacctcttccttcattccagg

SEQ ID NO: 2481136 - DNA, 25 bp, Homo sapien
tctttccacctcttccttcattcca

SEQ ID NO: 2481137 - DNA, 25 bp, Homo sapien
caggagaacatcttggagcaatgtc

SEQ ID NO: 2481138 - DNA, 25 bp, Homo sapien
gaaagagctaagacccattgcttct

SEQ ID NO: 2481139 - DNA, 25 bp, Homo sapien
cctttatatctcaagctacatcagg

SEQ ID NO: 2481140 - DNA, 25 bp, Homo sapien
gacataacagacaagaaacagccac

SEQ ID NO: 2481141 - DNA, 25 bp, Homo sapien
cctttcttcagggtagagtttcaca

SEQ ID NO: 2481142 - DNA, 25 bp, Homo sapien
cactcacattagattggcaggatca

SEQ ID NO: 2481143 - DNA, 25 bp, Homo sapien
gaggaacaggtacagccagcttagg

SEQ ID NO: 2481144 - DNA, 25 bp, Homo sapien
tcctaagcattgagaaagtggagac

SEQ ID NO: 2481145 - DNA, 25 bp, Homo sapien
gaacagttaacacagcttggaaggg

SEQ ID NO: 2481146 - DNA, 25 bp, Homo sapien
caatggagtcacacaggcctgagtt

SEQ ID NO: 2481147 - DNA, 25 bp, Homo sapien
ccatactggaaagaagccactgccc

SEQ ID NO: 2481148 - DNA, 25 bp, Homo sapien
gccagtatgcaccagtttagcctaa

SEQ ID NO: 2481149 - DNA, 25 bp, Homo sapien
gtaaacctcatccacggtgttctgg

SEQ ID NO: 2481150 - DNA, 25 bp, Homo sapien
agggtccatcagtgtagaagtggct

SEQ ID NO: 2481151 - DNA, 25 bp, Homo sapien
gggcgggagacgtaaacctcatcca

SEQ ID NO: 2481152 - DNA, 25 bp, Homo sapien
agtgggtcaccattcggcatgattt

SEQ ID NO: 2481153 - DNA, 25 bp, Homo sapien
gataccatgcatagtgtgggctcta

SEQ ID NO: 2481154 - DNA, 25 bp, Homo sapien
tcaaatgtctcagatcacagggcaa

SEQ ID NO: 2481155 - DNA, 25 bp, Homo sapien
acaggtccttggtctggctctggca

SEQ ID NO: 2481156 - DNA, 25 bp, Homo sapien
taagctccagcggttgttgcagttc

SEQ ID NO: 2481157 - DNA, 25 bp, Homo sapien
ttcaggtatttcctccgttcctgga

SEQ ID NO: 2481158 - DNA, 25 bp, Homo sapien
tatttcctccgttcctggagattaa

SEQ ID NO: 2481159 - DNA, 25 bp, Homo sapien
gtatttcctccgttcctggagatta

SEQ ID NO: 2481160 - DNA, 25 bp, Homo sapien
caggtatttcctccgttcctggaga

SEQ ID NO: 2481161 - DNA, 25 bp, Homo sapien
tcagtgagcaactggtaatggcgga

SEQ ID NO: 2481162 - DNA, 25 bp, Homo sapien
tctcctggtagtagcacccaaaagc

SEQ ID NO: 2481163 - DNA, 25 bp, Homo sapien
taatggcggatgatttcagtcagcg

SEQ ID NO: 2481164 - DNA, 25 bp, Homo sapien
tacggttgcacagagtagatgagca

SEQ ID NO: 2481165 - DNA, 25 bp, Homo sapien
cagtagaaaggtgccagacatggtc

SEQ ID NO: 2481166 - DNA, 25 bp, Homo sapien
ccttctgacgattcactgaagcgca

SEQ ID NO: 2481167 - DNA, 25 bp, Homo sapien
cactgaagcgcagtagaaaggtgcc

SEQ ID NO: 2481168 - DNA, 25 bp, Homo sapien
ggagcaggtaatgcccccttctgac

SEQ ID NO: 2481169 - DNA, 25 bp, Homo sapien
gaagagcacccatcaagctctggaa

SEQ ID NO: 2481170 - DNA, 25 bp, Homo sapien
gatgagagaattaatgaagagcacc

SEQ ID NO: 2481171 - DNA, 25 bp, Homo sapien
gcttggagtcacataggcctggatt

SEQ ID NO: 2481172 - DNA, 25 bp, Homo sapien
ctacacaagttggtaggcagtgtgg

SEQ ID NO: 2481173 - DNA, 25 bp, Homo sapien
gagacgtggcctgcacctgtctttg

SEQ ID NO: 2481174 - DNA, 25 bp, Homo sapien
agcccggaaagcacaagcccatgag

SEQ ID NO: 2481175 - DNA, 25 bp, Homo sapien
acgtgagggtgcagagactccactc

SEQ ID NO: 2481176 - DNA, 25 bp, Homo sapien
cccatgagggaagggtgaccaaggc

SEQ ID NO: 2481177 - DNA, 25 bp, Homo sapien
gatccttcaggtggtcatgtaccaa

SEQ ID NO: 2481178 - DNA, 25 bp, Homo sapien
gtaacttgccaggagggctctctcg

SEQ ID NO: 2481179 - DNA, 25 bp, Homo sapien
gaatggtaacttgccaggagggctc

SEQ ID NO: 2481180 - DNA, 25 bp, Homo sapien
tccagaattttgtccagccatgtcc

SEQ ID NO: 2481181 - DNA, 25 bp, Homo sapien
gaggaatggaaaggtagcaaaagct

SEQ ID NO: 2481182 - DNA, 25 bp, Homo sapien
tgaggagttgcctctggtgtaggga

SEQ ID NO: 2481183 - DNA, 25 bp, Homo sapien
ggagttgcctctggtgtagggaagg

SEQ ID NO: 2481184 - DNA, 25 bp, Homo sapien
agggacgtgggaaggccagtatttg

SEQ ID NO: 2481185 - DNA, 25 bp, Homo sapien
ccaggacaataatggatcctcagtc

SEQ ID NO: 2481186 - DNA, 25 bp, Homo sapien
tgaagtcagcccaggacaataatgg

SEQ ID NO: 2481187 - DNA, 25 bp, Homo sapien
cttagtgaagtcagcccaggacaat

SEQ ID NO: 2481188 - DNA, 25 bp, Homo sapien
ggatcctcagtcctacagttctgcc

SEQ ID NO: 2481189 - DNA, 25 bp, Homo sapien
cgaacagcttgtttctcagcatgct

SEQ ID NO: 2481190 - DNA, 25 bp, Homo sapien
tcagctggtctgagttgaggcctcg

SEQ ID NO: 2481191 - DNA, 25 bp, Homo sapien
tgaggcctcggccaacataggagga

SEQ ID NO: 2481192 - DNA, 25 bp, Homo sapien
gaactgccaactgagagcagggccc

SEQ ID NO: 2481193 - DNA, 25 bp, Homo sapien
ctggttcatgttggaaataatcacc

SEQ ID NO: 2481194 - DNA, 25 bp, Homo sapien
ttgggctgagcaaattgaaccagag

SEQ ID NO: 2481195 - DNA, 25 bp, Homo sapien
gaaggtttgggctgagcaaattgaa

SEQ ID NO: 2481196 - DNA, 25 bp, Homo sapien
tgaagcccaggcaattgagagctgg

SEQ ID NO: 2481197 - DNA, 25 bp, Homo sapien
gatgtttctagctgcaggtatttgt

SEQ ID NO: 2481198 - DNA, 25 bp, Homo sapien
tctagctgcaggtatttgttagagg

SEQ ID NO: 2481199 - DNA, 25 bp, Homo sapien
atgtgatgtttctagctgcaggtat

SEQ ID NO: 2481200 - DNA, 25 bp, Homo sapien
caggtatttgttagaggaaaggagt

SEQ ID NO: 2481201 - DNA, 25 bp, Homo sapien
tgtttatccccttcttatgccttct

SEQ ID NO: 2481202 - DNA, 25 bp, Homo sapien
ggcttctgtttatccccttcttatg

SEQ ID NO: 2481203 - DNA, 25 bp, Homo sapien
ccaagaggcttctgtttatcccctt

SEQ ID NO: 2481204 - DNA, 25 bp, Homo sapien
tctccttgccctccattttcactca

SEQ ID NO: 2481205 - DNA, 25 bp, Homo sapien
ccctggtaggtatatttgaccgtga

SEQ ID NO: 2481206 - DNA, 25 bp, Homo sapien
cagaccctggtaggtatatttgacc

SEQ ID NO: 2481207 - DNA, 25 bp, Homo sapien
tcctgcttcagaccctggtaggtat

SEQ ID NO: 2481208 - DNA, 25 bp, Homo sapien
cgtgaagctgatgatgtgcagttcc

SEQ ID NO: 2481209 - DNA, 25 bp, Homo sapien
catcagaaggctctttggcaagctc

SEQ ID NO: 2481210 - DNA, 25 bp, Homo sapien
cagaaggctctttggcaagctcccc

SEQ ID NO: 2481211 - DNA, 25 bp, Homo sapien
aaggctctttggcaagctccccctg

SEQ ID NO: 2481212 - DNA, 25 bp, Homo sapien
ctgcctcgagtcctctgtccagatc

SEQ ID NO: 2481213 - DNA, 25 bp, Homo sapien
cacctgaacgttgctccaccagagt

SEQ ID NO: 2481214 - DNA, 25 bp, Homo sapien
accacctgaacgttgctccaccaga

SEQ ID NO: 2481215 - DNA, 25 bp, Homo sapien
ttcctgaaccacctgaacgttgctc

SEQ ID NO: 2481216 - DNA, 25 bp, Homo sapien
gaaccacctgaacgttgctccacca

SEQ ID NO: 2481217 - DNA, 25 bp, Homo sapien
tcaagacctctcaagccctgggaac

SEQ ID NO: 2481218 - DNA, 25 bp, Homo sapien
ccctgttcctttggactaaaagcag

SEQ ID NO: 2481219 - DNA, 25 bp, Homo sapien
agacctctcaagccctgggaacttc

SEQ ID NO: 2481220 - DNA, 25 bp, Homo sapien
aagacctctcaagccctgggaactt

SEQ ID NO: 2481221 - DNA, 25 bp, Homo sapien
agcataggtcacaaactattcttac

SEQ ID NO: 2481222 - DNA, 25 bp, Homo sapien
agtaataaaagcataggtcacaaac

SEQ ID NO: 2481223 - DNA, 25 bp, Homo sapien
taataaaagcataggtcacaaacta

SEQ ID NO: 2481224 - DNA, 25 bp, Homo sapien
taaaagcataggtcacaaactattc

SEQ ID NO: 2481225 - DNA, 25 bp, Homo sapien
ttgaagtcagaatgttgaacttccg

SEQ ID NO: 2481226 - DNA, 25 bp, Homo sapien
agtcagaatgttgaacttccggaag

SEQ ID NO: 2481227 - DNA, 25 bp, Homo sapien
gaagtcagaatgttgaacttccgga

SEQ ID NO: 2481228 - DNA, 25 bp, Homo sapien
aagtcccaaatcaaaccctgactct

SEQ ID NO: 2481229 - DNA, 25 bp, Homo sapien
aacagaagttccacttcatttcaga

SEQ ID NO: 2481230 - DNA, 25 bp, Homo sapien
cagggctgccgaatgtggttctgca

SEQ ID NO: 2481231 - DNA, 25 bp, Homo sapien
tcttccttgtttgtgccaccagggc

SEQ ID NO: 2481232 - DNA, 25 bp, Homo sapien
tacatggagacaaggaatggaatta

SEQ ID NO: 2481233 - DNA, 25 bp, Homo sapien
gtcagtgactcattgccttcctgga

SEQ ID NO: 2481234 - DNA, 25 bp, Homo sapien
ctgtcaatggagacttccacagtca

SEQ ID NO: 2481235 - DNA, 25 bp, Homo sapien
cacagtcagtgactcattgccttcc

SEQ ID NO: 2481236 - DNA, 25 bp, Homo sapien
tgtcaatggagacttccacagtcag

SEQ ID NO: 2481237 - DNA, 25 bp, Homo sapien
cttgttcggacggtgaacttgctgc

SEQ ID NO: 2481238 - DNA, 25 bp, Homo sapien
cagggctgggtttctaccacaaagg

SEQ ID NO: 2481239 - DNA, 25 bp, Homo sapien
aacttgctgccagtcttgaggatga

SEQ ID NO: 2481240 - DNA, 25 bp, Homo sapien
ggcatgcagggctgggtttctacca

SEQ ID NO: 2481241 - DNA, 25 bp, Homo sapien
gacctgggcgttgcgtaggtccacc

SEQ ID NO: 2481242 - DNA, 25 bp, Homo sapien
tggagcagacgctgtagcaactctg

SEQ ID NO: 2481243 - DNA, 25 bp, Homo sapien
tgcctcaggtgaaacaacagctttg

SEQ ID NO: 2481244 - DNA, 25 bp, Homo sapien
ggtcagagggtcatcctgatagcta

SEQ ID NO: 2481245 - DNA, 25 bp, Homo sapien
cactgtgtccggacatgcctaatta

SEQ ID NO: 2481246 - DNA, 25 bp, Homo sapien
gtgtccggacatgcctaattaaaaa

SEQ ID NO: 2481247 - DNA, 25 bp, Homo sapien
tgtgtccggacatgcctaattaaaa

SEQ ID NO: 2481248 - DNA, 25 bp, Homo sapien
ctgtgtccggacatgcctaattaaa

SEQ ID NO: 2481249 - DNA, 25 bp, Homo sapien
cagcagtagctcgattagggtagtt

SEQ ID NO: 2481250 - DNA, 25 bp, Homo sapien
tagggtagttaatcggcctagcagt

SEQ ID NO: 2481251 - DNA, 25 bp, Homo sapien
tcaatgggagctctgatgcaggctt

SEQ ID NO: 2481252 - DNA, 25 bp, Homo sapien
tagcagtgctttggaggcatccagc

SEQ ID NO: 2481253 - DNA, 25 bp, Homo sapien
tgctctttggtctgatgggggtcca

SEQ ID NO: 2481254 - DNA, 25 bp, Homo sapien
ctccttttgtccagttcattgagag

SEQ ID NO: 2481255 - DNA, 25 bp, Homo sapien
gctctttggtctgatgggggtccag

SEQ ID NO: 2481256 - DNA, 25 bp, Homo sapien
tccttttgtccagttcattgagagt

SEQ ID NO: 2481257 - DNA, 25 bp, Homo sapien
gtgtgtctgacagtgactactgctc

SEQ ID NO: 2481258 - DNA, 25 bp, Homo sapien
tcagcaggcacttatctttctccag

SEQ ID NO: 2481259 - DNA, 25 bp, Homo sapien
tgttcacttccagctccggcttctc

SEQ ID NO: 2481260 - DNA, 25 bp, Homo sapien
tactgctcatcggagctttctcctg

SEQ ID NO: 2481261 - DNA, 25 bp, Homo sapien
ggcctggatcttatatcggaagcag

SEQ ID NO: 2481262 - DNA, 25 bp, Homo sapien
ctggatcttatatcggaagcagaag

SEQ ID NO: 2481263 - DNA, 25 bp, Homo sapien
gcctggatcttatatcggaagcaga

SEQ ID NO: 2481264 - DNA, 25 bp, Homo sapien
ttggcctggatcttatatcggaagc

SEQ ID NO: 2481265 - DNA, 25 bp, Homo sapien
ggtgtttcgagaactggctctcctt

SEQ ID NO: 2481266 - DNA, 25 bp, Homo sapien
agcccttaaatccaggatccgggat

SEQ ID NO: 2481267 - DNA, 25 bp, Homo sapien
gattcaatctcatgttgctggctct

SEQ ID NO: 2481268 - DNA, 25 bp, Homo sapien
tctccacaggtgtttcgagaactgg

SEQ ID NO: 2481269 - DNA, 25 bp, Homo sapien
ttccagaaggaggttaaagatcatc

SEQ ID NO: 2481270 - DNA, 25 bp, Homo sapien
ccagaaggaggttaaagatcatctc

SEQ ID NO: 2481271 - DNA, 25 bp, Homo sapien
cttccagaaggaggttaaagatcat

SEQ ID NO: 2481272 - DNA, 25 bp, Homo sapien
gaaggaggttaaagatcatctcagc

SEQ ID NO: 2481273 - DNA, 25 bp, Homo sapien
aatgtcccggcagaatttccgcaaa

SEQ ID NO: 2481274 - DNA, 25 bp, Homo sapien
cccggcagaatttccgcaaattgtg

SEQ ID NO: 2481275 - DNA, 25 bp, Homo sapien
tgaatgtcccggcagaatttccgca

SEQ ID NO: 2481276 - DNA, 25 bp, Homo sapien
tgtcccggcagaatttccgcaaatt

SEQ ID NO: 2481277 - DNA, 25 bp, Homo sapien
tgggtcctggctgcaacggccacac

SEQ ID NO: 2481278 - DNA, 25 bp, Homo sapien
cactcatagttcagctgatccaaga

SEQ ID NO: 2481279 - DNA, 25 bp, Homo sapien
tagcatggtagccttggaatcatca

SEQ ID NO: 2481280 - DNA, 25 bp, Homo sapien
caagaagtggaagaatagcatggta

SEQ ID NO: 2481281 - DNA, 25 bp, Homo sapien
ttcaatccagacagccaagtactgt

SEQ ID NO: 2481282 - DNA, 25 bp, Homo sapien
tgtcgaatgtccacaggcaggaggc

SEQ ID NO: 2481283 - DNA, 25 bp, Homo sapien
cctgaaaggggctgtcaagattctg

SEQ ID NO: 2481284 - DNA, 25 bp, Homo sapien
ctgtgcgagtaaagctggtgcagct

SEQ ID NO: 2481285 - DNA, 25 bp, Homo sapien
gaatagtacaaggatcaccatccag

SEQ ID NO: 2481286 - DNA, 25 bp, Homo sapien
gatcaccatccagctttaacaaaca

SEQ ID NO: 2481287 - DNA, 25 bp, Homo sapien
cacactagagtagagtgaatagtac

SEQ ID NO: 2481288 - DNA, 25 bp, Homo sapien
ccataaccagcctaatggtaatttt

SEQ ID NO: 2481289 - DNA, 25 bp, Homo sapien
gtgtctgatattaaaggagcaagtc

SEQ ID NO: 2481290 - DNA, 25 bp, Homo sapien
gcccacaagacgagaggatggcttg

SEQ ID NO: 2481291 - DNA, 25 bp, Homo sapien
tgatattaaaggagcaagtcagcaa

SEQ ID NO: 2481292 - DNA, 25 bp, Homo sapien
tgatgaggtcccaattcttgaggat

SEQ ID NO: 2481293 - DNA, 25 bp, Homo sapien
cgcgacttcccgtccctagtatgag

SEQ ID NO: 2481294 - DNA, 25 bp, Homo sapien
ctgattagggttgcagtccccgcgc

SEQ ID NO: 2481295 - DNA, 25 bp, Homo sapien
tgagctcgggtactagaacctcgcg

SEQ ID NO: 2481296 - DNA, 25 bp, Homo sapien
tccaatggctctggtcgcgacttcc

SEQ ID NO: 2481297 - DNA, 25 bp, Homo sapien
tacaagcgtgcataactccgccagg

SEQ ID NO: 2481298 - DNA, 25 bp, Homo sapien
cctagattcgaaaccaaaccctgtg

SEQ ID NO: 2481299 - DNA, 25 bp, Homo sapien
ctctaacaagtggagcctagattcg

SEQ ID NO: 2481300 - DNA, 25 bp, Homo sapien
cagtgatcaccgaggctctaacaag

SEQ ID NO: 2481301 - DNA, 25 bp, Homo sapien
gtcatagctcttgattatggcccac

SEQ ID NO: 2481302 - DNA, 25 bp, Homo sapien
ctaagtcatagctcttgattatggc

SEQ ID NO: 2481303 - DNA, 25 bp, Homo sapien
agtcatagctcttgattatggccca

SEQ ID NO: 2481304 - DNA, 25 bp, Homo sapien
aagtcatagctcttgattatggccc

SEQ ID NO: 2481305 - DNA, 25 bp, Homo sapien
aagccagagtagttgtttcttccaa

SEQ ID NO: 2481306 - DNA, 25 bp, Homo sapien
tctccggctgagagatgtttgcgtc

SEQ ID NO: 2481307 - DNA, 25 bp, Homo sapien
taagtgcagcactgatcgctagacc

SEQ ID NO: 2481308 - DNA, 25 bp, Homo sapien
gctgaaccccagaccttaatgcagg

SEQ ID NO: 2481309 - DNA, 25 bp, Homo sapien
tggactacattgtgcacagcttgct

SEQ ID NO: 2481310 - DNA, 25 bp, Homo sapien
caccctggcggtagagctgtagctg

SEQ ID NO: 2481311 - DNA, 25 bp, Homo sapien
tgcccaggttgtagaaggttcccac

SEQ ID NO: 2481312 - DNA, 25 bp, Homo sapien
ggtcatcagaaggtcatatcccaga

SEQ ID NO: 2481313 - DNA, 25 bp, Homo sapien
gctgaaaccaggcagtgactttggg

SEQ ID NO: 2481314 - DNA, 25 bp, Homo sapien
tgcagaaattggcaggacaaggggt

SEQ ID NO: 2481315 - DNA, 25 bp, Homo sapien
ggcagtgactttgggtgcagaaatt

SEQ ID NO: 2481316 - DNA, 25 bp, Homo sapien
aaaccaggcagtgactttgggtgca

SEQ ID NO: 2481317 - DNA, 25 bp, Homo sapien
ttccaaggacaagggaaagtgcatc

SEQ ID NO: 2481318 - DNA, 25 bp, Homo sapien
gcaggaggtagcaaagtagcagctc

SEQ ID NO: 2481319 - DNA, 25 bp, Homo sapien
tgtctgctttccatatgaagtggca

SEQ ID NO: 2481320 - DNA, 25 bp, Homo sapien
actggtatcatgatgagtctgaggc

SEQ ID NO: 2481321 - DNA, 25 bp, Homo sapien
gatgggatcacaaatcactgctgcc

SEQ ID NO: 2481322 - DNA, 25 bp, Homo sapien
tgggatcacaaatcactgctgcctt

SEQ ID NO: 2481323 - DNA, 25 bp, Homo sapien
ctgcttccaagcttttgtactttct

SEQ ID NO: 2481324 - DNA, 25 bp, Homo sapien
agtgatgggatcacaaatcactgct

SEQ ID NO: 2481325 - DNA, 25 bp, Homo sapien
taggtttgatcgcttcctgatcctg

SEQ ID NO: 2481326 - DNA, 25 bp, Homo sapien
cttggtaggtttgatcgcttcctga

SEQ ID NO: 2481327 - DNA, 25 bp, Homo sapien
actgccttggtaggtttgatcgctt

SEQ ID NO: 2481328 - DNA, 25 bp, Homo sapien
tgccttggtaggtttgatcgcttcc

SEQ ID NO: 2481329 - DNA, 25 bp, Homo sapien
gactcatacctgcagttcttggtga

SEQ ID NO: 2481330 - DNA, 25 bp, Homo sapien
gattatattgtcactgtccatggac

SEQ ID NO: 2481331 - DNA, 25 bp, Homo sapien
tagctgtggaacatttgatagatta

SEQ ID NO: 2481332 - DNA, 25 bp, Homo sapien
gatcttgagagcttcttcaactttt

SEQ ID NO: 2481333 - DNA, 25 bp, Homo sapien
cagagctaagttggacaggtactca

SEQ ID NO: 2481334 - DNA, 25 bp, Homo sapien
agtggtatcctttcctcgcatctga

SEQ ID NO: 2481335 - DNA, 25 bp, Homo sapien
gaacatgggcctcagttgggcagcc

SEQ ID NO: 2481336 - DNA, 25 bp, Homo sapien
tttcctcgcatctgaaactgcagaa

SEQ ID NO: 2481337 - DNA, 25 bp, Homo sapien
tggctggctcagtcggtagaacatg

SEQ ID NO: 2481338 - DNA, 25 bp, Homo sapien
gcctcctaggactctatagtttctg

SEQ ID NO: 2481339 - DNA, 25 bp, Homo sapien
taaatacaacatagctctggctggc

SEQ ID NO: 2481340 - DNA, 25 bp, Homo sapien
gaagttctaaccagtgtaatgtgga

SEQ ID NO: 2481341 - DNA, 25 bp, Homo sapien
aagacatggggcggggcttgagacc

SEQ ID NO: 2481342 - DNA, 25 bp, Homo sapien
aaaacaacatggactaggcatggtg

SEQ ID NO: 2481343 - DNA, 25 bp, Homo sapien
aataaaaacaacatggactaggcat

SEQ ID NO: 2481344 - DNA, 25 bp, Homo sapien
catggggcggggcttgagaccagga

SEQ ID NO: 2481345 - DNA, 25 bp, Homo sapien
tccttcacagttttctgccagatct

SEQ ID NO: 2481346 - DNA, 25 bp, Homo sapien
ctatgtcaaatgagcctccttcaca

SEQ ID NO: 2481347 - DNA, 25 bp, Homo sapien
ttcacagttttctgccagatctgta

SEQ ID NO: 2481348 - DNA, 25 bp, Homo sapien
tcaaatgagcctccttcacagtttt

SEQ ID NO: 2481349 - DNA, 25 bp, Homo sapien
ttccgcacacaaccattagattatc

SEQ ID NO: 2481350 - DNA, 25 bp, Homo sapien
ccatttcaaagggagtagtaaatat

SEQ ID NO: 2481351 - DNA, 25 bp, Homo sapien
cacctgtgtcgctgttctttccgca

SEQ ID NO: 2481352 - DNA, 25 bp, Homo sapien
gaagactcccaggaatccctgttgt

SEQ ID NO: 2481353 - DNA, 25 bp, Homo sapien
cgtaggcgtcagaatgtgaaagacg

SEQ ID NO: 2481354 - DNA, 25 bp, Homo sapien
cccagagagaatgagtgggcacgta

SEQ ID NO: 2481355 - DNA, 25 bp, Homo sapien
ttcccagagagaatgagtgggcacg

SEQ ID NO: 2481356 - DNA, 25 bp, Homo sapien
tgagtgggcacgtaggcgtcagaat

SEQ ID NO: 2481357 - DNA, 25 bp, Homo sapien
ggcccggattcgcacatagttgaat

SEQ ID NO: 2481358 - DNA, 25 bp, Homo sapien
tagtagaggccttgttcaattgttg

SEQ ID NO: 2481359 - DNA, 25 bp, Homo sapien
cagctatcttcactgaaagactatc

SEQ ID NO: 2481360 - DNA, 25 bp, Homo sapien
caaagatgtccttagtagaggcctt

SEQ ID NO: 2481361 - DNA, 25 bp, Homo sapien
gtgtgagcaccacggcgccccgcat

SEQ ID NO: 2481362 - DNA, 25 bp, Homo sapien
tgccgcacttctccgtgtgagcacc

SEQ ID NO: 2481363 - DNA, 25 bp, Homo sapien
acttctccgtgtgagcaccacggcg

SEQ ID NO: 2481364 - DNA, 25 bp, Homo sapien
gcacttctccgtgtgagcaccacgg

SEQ ID NO: 2481365 - DNA, 25 bp, Homo sapien
gggtaacgggagtgctggacccgca

SEQ ID NO: 2481366 - DNA, 25 bp, Homo sapien
aacgggagtgctggacccgcataag

SEQ ID NO: 2481367 - DNA, 25 bp, Homo sapien
tggacccgcataagctcccctgggg

SEQ ID NO: 2481368 - DNA, 25 bp, Homo sapien
tcaggaagggtaacgggagtgctgg

SEQ ID NO: 2481369 - DNA, 25 bp, Homo sapien
gagcttttgactctcatggatgagg

SEQ ID NO: 2481370 - DNA, 25 bp, Homo sapien
tagtattgccaatcacttcctcctc

SEQ ID NO: 2481371 - DNA, 25 bp, Homo sapien
gatgatattagtattgccaatcact

SEQ ID NO: 2481372 - DNA, 25 bp, Homo sapien
ctcctccttgagcttttgactctca

SEQ ID NO: 2481373 - DNA, 25 bp, Homo sapien
gcaagacacagcagaggagcagcac

SEQ ID NO: 2481374 - DNA, 25 bp, Homo sapien
gggcagcaagacacagcagaggagc

SEQ ID NO: 2481375 - DNA, 25 bp, Homo sapien
gcagcaagacacagcagaggagcag

SEQ ID NO: 2481376 - DNA, 25 bp, Homo sapien
caggggcagcaagacacagcagagg

SEQ ID NO: 2481377 - DNA, 25 bp, Homo sapien
tgtcccacgccgacaaacatttttc

SEQ ID NO: 2481378 - DNA, 25 bp, Homo sapien
ctttgtcccacgccgacaaacattt

SEQ ID NO: 2481379 - DNA, 25 bp, Homo sapien
gagagaactacctctgacccattgg

SEQ ID NO: 2481380 - DNA, 25 bp, Homo sapien
taagctatggctcttcagcgagact

SEQ ID NO: 2481381 - DNA, 25 bp, Homo sapien
ccatgggtgaaccagatgtgcagca

SEQ ID NO: 2481382 - DNA, 25 bp, Homo sapien
ctcattctgggcgatggactccacc

SEQ ID NO: 2481383 - DNA, 25 bp, Homo sapien
cactgtgccggtctgttggtctctt

SEQ ID NO: 2481384 - DNA, 25 bp, Homo sapien
ttctatgccccatgccaacaagctg

SEQ ID NO: 2481385 - DNA, 25 bp, Homo sapien
gacatatcgccaagtcagactgaga

SEQ ID NO: 2481386 - DNA, 25 bp, Homo sapien
gaaagctgacgtttccaagaatggg

SEQ ID NO: 2481387 - DNA, 25 bp, Homo sapien
tgtcataaagctccccatctggtgc

SEQ ID NO: 2481388 - DNA, 25 bp, Homo sapien
gcctaaatccgtgaaagagcctggg

SEQ ID NO: 2481389 - DNA, 25 bp, Homo sapien
tggtacaaaactcccgcctgtcatg

SEQ ID NO: 2481390 - DNA, 25 bp, Homo sapien
tctcaaatgcaggaatgggcctcta

SEQ ID NO: 2481391 - DNA, 25 bp, Homo sapien
ctcatcatcctcaatctggtatcgt

SEQ ID NO: 2481392 - DNA, 25 bp, Homo sapien
aatctggtatcgtttcttcttttgg

SEQ ID NO: 2481393 - DNA, 25 bp, Homo sapien
gtttcttcttttggattcctggagc

SEQ ID NO: 2481394 - DNA, 25 bp, Homo sapien
tcttcttttggattcctggagctcc

SEQ ID NO: 2481395 - DNA, 25 bp, Homo sapien
cgtcgctgtccagcaattgtcgttt

SEQ ID NO: 2481396 - DNA, 25 bp, Homo sapien
tcgtcgctgtccagcaattgtcgtt

SEQ ID NO: 2481397 - DNA, 25 bp, Homo sapien
cttcagcggctctttaccaacagcg

SEQ ID NO: 2481398 - DNA, 25 bp, Homo sapien
ttcagcggctctttaccaacagcgt

SEQ ID NO: 2481399 - DNA, 25 bp, Homo sapien
cagcggctctttaccaacagcgtct

SEQ ID NO: 2481400 - DNA, 25 bp, Homo sapien
tcagcggctctttaccaacagcgtc

SEQ ID NO: 2481401 - DNA, 25 bp, Homo sapien
catcagagccttgctctccagggac

SEQ ID NO: 2481402 - DNA, 25 bp, Homo sapien
tcttgtgggctagcaagagggccct

SEQ ID NO: 2481403 - DNA, 25 bp, Homo sapien
gccaggcccgctttcttcttgtggg

SEQ ID NO: 2481404 - DNA, 25 bp, Homo sapien
tgctcggtgctctttacagtgctcc

SEQ ID NO: 2481405 - DNA, 25 bp, Homo sapien
cagcttggctggaattcgccagaag

SEQ ID NO: 2481406 - DNA, 25 bp, Homo sapien
ccctccggagctgggtaggactcag

SEQ ID NO: 2481407 - DNA, 25 bp, Homo sapien
tgctgccctccggagctgggtagga

SEQ ID NO: 2481408 - DNA, 25 bp, Homo sapien
tcagcttggctggaattcgccagaa

SEQ ID NO: 2481409 - DNA, 25 bp, Homo sapien
taaggaaccatcaatggctctggac

SEQ ID NO: 2481410 - DNA, 25 bp, Homo sapien
ggctctggacagaggacttgaccct

SEQ ID NO: 2481411 - DNA, 25 bp, Homo sapien
tctgtcctgcaagcagtaaggaacc

SEQ ID NO: 2481412 - DNA, 25 bp, Homo sapien
gattcaaaccactgtagatcgacaa

SEQ ID NO: 2481413 - DNA, 25 bp, Homo sapien
cgaacccctagcttgcgcaacagct

SEQ ID NO: 2481414 - DNA, 25 bp, Homo sapien
gccgaacccctagcttgcgcaacag

SEQ ID NO: 2481415 - DNA, 25 bp, Homo sapien
gcagggggccgaacccctagcttgc

SEQ ID NO: 2481416 - DNA, 25 bp, Homo sapien
ggggccgaacccctagcttgcgcaa

SEQ ID NO: 2481417 - DNA, 25 bp, Homo sapien
tgttcgttttccatggcttcctcat

SEQ ID NO: 2481418 - DNA, 25 bp, Homo sapien
ttttccatggcttcctcattttcct

SEQ ID NO: 2481419 - DNA, 25 bp, Homo sapien
cgttttccatggcttcctcattttc

SEQ ID NO: 2481420 - DNA, 25 bp, Homo sapien
ttcgttttccatggcttcctcattt

SEQ ID NO: 2481421 - DNA, 25 bp, Homo sapien
tgagtggcaccaatggaacggcctg

SEQ ID NO: 2481422 - DNA, 25 bp, Homo sapien
gtggcaccaatggaacggcctggga

SEQ ID NO: 2481423 - DNA, 25 bp, Homo sapien
tgtgagtggcaccaatggaacggcc

SEQ ID NO: 2481424 - DNA, 25 bp, Homo sapien
gagtggcaccaatggaacggcctgg

SEQ ID NO: 2481425 - DNA, 25 bp, Homo sapien
cagggctcttctcctaaaagtgtca

SEQ ID NO: 2481426 - DNA, 25 bp, Homo sapien
taggtctccaatagcctccagggct

SEQ ID NO: 2481427 - DNA, 25 bp, Homo sapien
taagacagggtcaatagtcatatgg

SEQ ID NO: 2481428 - DNA, 25 bp, Homo sapien
tggtgaagatataagggaagaactg

SEQ ID NO: 2481429 - DNA, 25 bp, Homo sapien
cagctgctcggatcaggcagttctg

SEQ ID NO: 2481430 - DNA, 25 bp, Homo sapien
agccataggagcgggatagaaaagc

SEQ ID NO: 2481431 - DNA, 25 bp, Homo sapien
atcatcagctgctcggatcaggcag

SEQ ID NO: 2481432 - DNA, 25 bp, Homo sapien
caggcagttctggagccataggagc

SEQ ID NO: 2481433 - DNA, 25 bp, Homo sapien
ctttcagggactccgctccatttgg

SEQ ID NO: 2481434 - DNA, 25 bp, Homo sapien
tgaaaggactaagctaccctggact

SEQ ID NO: 2481435 - DNA, 25 bp, Homo sapien
cttcctgatgcaggctttgaccaag

SEQ ID NO: 2481436 - DNA, 25 bp, Homo sapien
gcaggctttgaccaaggttttcatt

SEQ ID NO: 2481437 - DNA, 25 bp, Homo sapien
agcagagctagggtcagattgttac

SEQ ID NO: 2481438 - DNA, 25 bp, Homo sapien
tgctctctcggaaggacctggtcag

SEQ ID NO: 2481439 - DNA, 25 bp, Homo sapien
ccaggtggactgctcctaaggacca

SEQ ID NO: 2481440 - DNA, 25 bp, Homo sapien
caacacaaggaacttagtggagtct

SEQ ID NO: 2481441 - DNA, 25 bp, Homo sapien
tattcttcatgatatgacccaggac

SEQ ID NO: 2481442 - DNA, 25 bp, Homo sapien
tggaggatgccaactttttctgccg

SEQ ID NO: 2481443 - DNA, 25 bp, Homo sapien
tttatccactattcgggcccgtgag

SEQ ID NO: 2481444 - DNA, 25 bp, Homo sapien
agccccagagccaagagtttatcca

SEQ ID NO: 2481445 - DNA, 25 bp, Homo sapien
aagagggtacctcaattcatccaaa

SEQ ID NO: 2481446 - DNA, 25 bp, Homo sapien
ccaagggtaacagggaaagagatga

SEQ ID NO: 2481447 - DNA, 25 bp, Homo sapien
ctcaaaggtcccctgagtttccagc

SEQ ID NO: 2481448 - DNA, 25 bp, Homo sapien
gcaagcatgtgaatacccaagggta

SEQ ID NO: 2481449 - DNA, 25 bp, Homo sapien
gtccacagtacaatatgggttcctt

SEQ ID NO: 2481450 - DNA, 25 bp, Homo sapien
tgagtcccggaattcctcaaaaagc

SEQ ID NO: 2481451 - DNA, 25 bp, Homo sapien
gatcccccgtccacagtacaatatg

SEQ ID NO: 2481452 - DNA, 25 bp, Homo sapien
atctgagtcccggaattcctcaaaa

SEQ ID NO: 2481453 - DNA, 25 bp, Homo sapien
tgatctgcttgcgtgttcgaggaac

SEQ ID NO: 2481454 - DNA, 25 bp, Homo sapien
tcgaggaacagtattcaggtgggcc

SEQ ID NO: 2481455 - DNA, 25 bp, Homo sapien
tctgtaccagatggtggatgatctg

SEQ ID NO: 2481456 - DNA, 25 bp, Homo sapien
tttggaagtccttgacactgtcagc

SEQ ID NO: 2481457 - DNA, 25 bp, Homo sapien
ggctccatgtaggtgctctgcgact

SEQ ID NO: 2481458 - DNA, 25 bp, Homo sapien
cttccacgtccttattggcgaggta

SEQ ID NO: 2481459 - DNA, 25 bp, Homo sapien
cttattggcgaggtacagctcccga

SEQ ID NO: 2481460 - DNA, 25 bp, Homo sapien
tacagctcccgaagatgagcctctt

SEQ ID NO: 2481461 - DNA, 25 bp, Homo sapien
atataggttcttggcccaaaaagag

SEQ ID NO: 2481462 - DNA, 25 bp, Homo sapien
ttcttggcccaaaaagaggagacca

SEQ ID NO: 2481463 - DNA, 25 bp, Homo sapien
gagaaagggagcatataggttcttg

SEQ ID NO: 2481464 - DNA, 25 bp, Homo sapien
ggagaaagggagcatataggttctt

SEQ ID NO: 2481465 - DNA, 25 bp, Homo sapien
tggttgactgcagccagtgcaaaaa

SEQ ID NO: 2481466 - DNA, 25 bp, Homo sapien
gaacaacagctccacaaaggctttt

SEQ ID NO: 2481467 - DNA, 25 bp, Homo sapien
gtcatctctcgaaccacagctgtgt

SEQ ID NO: 2481468 - DNA, 25 bp, Homo sapien
cagggagccatagccctcagtcatc

SEQ ID NO: 2481469 - DNA, 25 bp, Homo sapien
ggtagctccttagtagcagcacata

SEQ ID NO: 2481470 - DNA, 25 bp, Homo sapien
cagccggtgcagcatcttcacaatg

SEQ ID NO: 2481471 - DNA, 25 bp, Homo sapien
acaatgcaatggttagtgtgggcac

SEQ ID NO: 2481472 - DNA, 25 bp, Homo sapien
cactaagcagacgattgaagaggca

SEQ ID NO: 2481473 - DNA, 25 bp, Homo sapien
tcaggtagtccagaaaattaaattc

SEQ ID NO: 2481474 - DNA, 25 bp, Homo sapien
caggtagtccagaaaattaaattct

SEQ ID NO: 2481475 - DNA, 25 bp, Homo sapien
tcttcttcctctgccccacgttcct

SEQ ID NO: 2481476 - DNA, 25 bp, Homo sapien
ctctgccccacgttcctctgggccc

SEQ ID NO: 2481477 - DNA, 25 bp, Homo sapien
ttcctctgccccacgttcctctggg

SEQ ID NO: 2481478 - DNA, 25 bp, Homo sapien
tcttcctctgccccacgttcctctg

SEQ ID NO: 2481479 - DNA, 25 bp, Homo sapien
ttatgttggtgctagaaaagagctg

SEQ ID NO: 2481480 - DNA, 25 bp, Homo sapien
acagatgtgaagggtggagactcac

SEQ ID NO: 2481481 - DNA, 25 bp, Homo sapien
gttatgttggtgctagaaaagagct

SEQ ID NO: 2481482 - DNA, 25 bp, Homo sapien
agacagatgtgaagggtggagactc

SEQ ID NO: 2481483 - DNA, 25 bp, Homo sapien
cttgagagccaaacacatctccttc

SEQ ID NO: 2481484 - DNA, 25 bp, Homo sapien
tcttgagagccaaacacatctcctt

SEQ ID NO: 2481485 - DNA, 25 bp, Homo sapien
aatgtcttgagagccaaacacatct

SEQ ID NO: 2481486 - DNA, 25 bp, Homo sapien
tgtcttgagagccaaacacatctcc

SEQ ID NO: 2481487 - DNA, 25 bp, Homo sapien
ggatccgtaccatagcttctgcccg

SEQ ID NO: 2481488 - DNA, 25 bp, Homo sapien
gggaaccacggagtccatgctgagc

SEQ ID NO: 2481489 - DNA, 25 bp, Homo sapien
tctgaggccgcatcaaagggaacca

SEQ ID NO: 2481490 - DNA, 25 bp, Homo sapien
ggagacagtcttggatccgtaccat

SEQ ID NO: 2481491 - DNA, 25 bp, Homo sapien
accagaaacaatggcctggtctagg

SEQ ID NO: 2481492 - DNA, 25 bp, Homo sapien
cttctgggctagatgggacattacc

SEQ ID NO: 2481493 - DNA, 25 bp, Homo sapien
gatgggacattaccagaaacaatgg

SEQ ID NO: 2481494 - DNA, 25 bp, Homo sapien
gaaacaatggcctggtctaggacct

SEQ ID NO: 2481495 - DNA, 25 bp, Homo sapien
gaatagttctcggtactccatcaca

SEQ ID NO: 2481496 - DNA, 25 bp, Homo sapien
caccaggtcacgaaggaaagagcgg

SEQ ID NO: 2481497 - DNA, 25 bp, Homo sapien
tggcatctctcatcaaactttcgaa

SEQ ID NO: 2481498 - DNA, 25 bp, Homo sapien
tcgaaaaagtgccaggaatagttct

SEQ ID NO: 2481499 - DNA, 25 bp, Homo sapien
agctcctgataggccttcagagcca

SEQ ID NO: 2481500 - DNA, 25 bp, Homo sapien
catctcattcactgttgccagcagc

SEQ ID NO: 2481501 - DNA, 25 bp, Homo sapien
atctcattcactgttgccagcagct

SEQ ID NO: 2481502 - DNA, 25 bp, Homo sapien
tctcattcactgttgccagcagctc

SEQ ID NO: 2481503 - DNA, 25 bp, Homo sapien
gaggcagcttccttgcggtcagtca

SEQ ID NO: 2481504 - DNA, 25 bp, Homo sapien
gaaggtacggacactgagggtctca

SEQ ID NO: 2481505 - DNA, 25 bp, Homo sapien
gccaaggcccacatataataggtct

SEQ ID NO: 2481506 - DNA, 25 bp, Homo sapien
gtcagcatcatctcatagtagttgg

SEQ ID NO: 2481507 - DNA, 25 bp, Homo sapien
cctgattatctccatatccttcaca

SEQ ID NO: 2481508 - DNA, 25 bp, Homo sapien
gcatcatcacctgtctattccattc

SEQ ID NO: 2481509 - DNA, 25 bp, Homo sapien
gctgcatcatcacctgtctattcca

SEQ ID NO: 2481510 - DNA, 25 bp, Homo sapien
tctccatatccttcacaggttctca

SEQ ID NO: 2481511 - DNA, 25 bp, Homo sapien
ttttcggctgctttcccaaatctga

SEQ ID NO: 2481512 - DNA, 25 bp, Homo sapien
catgagccggttgtaacagttctcc

SEQ ID NO: 2481513 - DNA, 25 bp, Homo sapien
cagaacggcgctgaatggacagctc

SEQ ID NO: 2481514 - DNA, 25 bp, Homo sapien
gcggcctggcgacgtttaggcacct

SEQ ID NO: 2481515 - DNA, 25 bp, Homo sapien
aggtccctctccccaatggatttca

SEQ ID NO: 2481516 - DNA, 25 bp, Homo sapien
ctggacaatataggagcccccaaat

SEQ ID NO: 2481517 - DNA, 25 bp, Homo sapien
gacaatataggagcccccaaatcga

SEQ ID NO: 2481518 - DNA, 25 bp, Homo sapien
gtgaaggcctttgtgaaagatgagg

SEQ ID NO: 2481519 - DNA, 25 bp, Homo sapien
tgcaaaatctgcactccgctcctga

SEQ ID NO: 2481520 - DNA, 25 bp, Homo sapien
ttttctgccatctctcgctggcgca

SEQ ID NO: 2481521 - DNA, 25 bp, Homo sapien
tgagctaagcgtccctgccctactc

SEQ ID NO: 2481522 - DNA, 25 bp, Homo sapien
ggagggctcgagtcttcttttctgc

SEQ ID NO: 2481523 - DNA, 25 bp, Homo sapien
ggagacaatctctagcacatgtagg

SEQ ID NO: 2481524 - DNA, 25 bp, Homo sapien
cagcagacgagctggccagaaagag

SEQ ID NO: 2481525 - DNA, 25 bp, Homo sapien
gtcacgaaacataagggagacaatc

SEQ ID NO: 2481526 - DNA, 25 bp, Homo sapien
cacatgtaggctccattgctcctca

SEQ ID NO: 2481527 - DNA, 25 bp, Homo sapien
ggacatggagaatatttctgaccag

SEQ ID NO: 2481528 - DNA, 25 bp, Homo sapien
gcagtaggatccgttcaatcagcaa

SEQ ID NO: 2481529 - DNA, 25 bp, Homo sapien
tcagctgggacatggagaatatttc

SEQ ID NO: 2481530 - DNA, 25 bp, Homo sapien
aagttgtcttcctcctgccgttcct

SEQ ID NO: 2481531 - DNA, 25 bp, Homo sapien
ctgcagcagctcatacaaggtttca

SEQ ID NO: 2481532 - DNA, 25 bp, Homo sapien
gctcatacaaggtttcactgaggac

SEQ ID NO: 2481533 - DNA, 25 bp, Homo sapien
gcagcagctcatacaaggtttcact

SEQ ID NO: 2481534 - DNA, 25 bp, Homo sapien
cagctcatacaaggtttcactgagg

SEQ ID NO: 2481535 - DNA, 25 bp, Homo sapien
tctttgtaggcctgcaaataagtta

SEQ ID NO: 2481536 - DNA, 25 bp, Homo sapien
tttgtaggcctgcaaataagttagc

SEQ ID NO: 2481537 - DNA, 25 bp, Homo sapien
ctctttgtaggcctgcaaataagtt

SEQ ID NO: 2481538 - DNA, 25 bp, Homo sapien
ctttgtaggcctgcaaataagttag

SEQ ID NO: 2481539 - DNA, 25 bp, Homo sapien
aatggtgccgaaagctgggctcctt

SEQ ID NO: 2481540 - DNA, 25 bp, Homo sapien
gctggttgtgtcaagttcaccatca

SEQ ID NO: 2481541 - DNA, 25 bp, Homo sapien
gcaaggctggttgtgtcaagttcac

SEQ ID NO: 2481542 - DNA, 25 bp, Homo sapien
ctgcaaaaaatggtgccgaaagctg

SEQ ID NO: 2481543 - DNA, 25 bp, Homo sapien
tagcggatcagatccttcacgctct

SEQ ID NO: 2481544 - DNA, 25 bp, Homo sapien
gcacatctcgtgtctcatcctcatg

SEQ ID NO: 2481545 - DNA, 25 bp, Homo sapien
catcctcatgcctcaaatagcggat

SEQ ID NO: 2481546 - DNA, 25 bp, Homo sapien
cagaaggtcgctctgtaggatctgg

SEQ ID NO: 2481547 - DNA, 25 bp, Homo sapien
ttggaagaagctccatccagaccca

SEQ ID NO: 2481548 - DNA, 25 bp, Homo sapien
tgcatgtggaaccttggaagaagct

SEQ ID NO: 2481549 - DNA, 25 bp, Homo sapien
tggaagaagctccatccagacccac

SEQ ID NO: 2481550 - DNA, 25 bp, Homo sapien
tggtaagtgtctccctccaagtacc

SEQ ID NO: 2481551 - DNA, 25 bp, Homo sapien
agtacccaagggcactacatgtggc

SEQ ID NO: 2481552 - DNA, 25 bp, Homo sapien
caatctggttccttatggtaagtgt

SEQ ID NO: 2481553 - DNA, 25 bp, Homo sapien
catgtggctagaagttcacagttca

SEQ ID NO: 2481554 - DNA, 25 bp, Homo sapien
acatcagtggaccaaccaacagaga

SEQ ID NO: 2481555 - DNA, 25 bp, Homo sapien
catcagtggaccaaccaacagagaa

SEQ ID NO: 2481556 - DNA, 25 bp, Homo sapien
tcagtggaccaaccaacagagaagg

SEQ ID NO: 2481557 - DNA, 25 bp, Homo sapien
atcagtggaccaaccaacagagaag

SEQ ID NO: 2481558 - DNA, 25 bp, Homo sapien
tactgagatatgaaagagggcagcc

SEQ ID NO: 2481559 - DNA, 25 bp, Homo sapien
tattgagctgtatcagtgcccctgg

SEQ ID NO: 2481560 - DNA, 25 bp, Homo sapien
caaagagaagttcgcttggcagagc

SEQ ID NO: 2481561 - DNA, 25 bp, Homo sapien
ccaggagtcaggtgcgtaagagatt

SEQ ID NO: 2481562 - DNA, 25 bp, Homo sapien
gaggagccaccggccctctggcgcg

SEQ ID NO: 2481563 - DNA, 25 bp, Homo sapien
gggccgcagcctttccgccaccagg

SEQ ID NO: 2481564 - DNA, 25 bp, Homo sapien
gagccaccggccctctggcgcgggg

SEQ ID NO: 2481565 - DNA, 25 bp, Homo sapien
gcggggccgcagcctttccgccacc

SEQ ID NO: 2481566 - DNA, 25 bp, Homo sapien
tagtcaagcggactattccaagtct

SEQ ID NO: 2481567 - DNA, 25 bp, Homo sapien
tgaggtcgatctaaaaatcacagcg

SEQ ID NO: 2481568 - DNA, 25 bp, Homo sapien
gaattatagtagaatcaaagtccga

SEQ ID NO: 2481569 - DNA, 25 bp, Homo sapien
caaagtccgattagaggtgaattta

SEQ ID NO: 2481570 - DNA, 25 bp, Homo sapien
cagccagcggatgtagacaggttta

SEQ ID NO: 2481571 - DNA, 25 bp, Homo sapien
taaggtgtcggttacccagtactca

SEQ ID NO: 2481572 - DNA, 25 bp, Homo sapien
ttggaagctctttggcccaggacct

SEQ ID NO: 2481573 - DNA, 25 bp, Homo sapien
ggaagtttgcaccaaccagctcatg

SEQ ID NO: 2481574 - DNA, 25 bp, Homo sapien
ggcctgggtgttcagttcaacaggt

SEQ ID NO: 2481575 - DNA, 25 bp, Homo sapien
gcctgggtgttcagttcaacaggtt

SEQ ID NO: 2481576 - DNA, 25 bp, Homo sapien
tctggttgtccattggagacatcgg

SEQ ID NO: 2481577 - DNA, 25 bp, Homo sapien
gacagtctctcagaaatactcttga

SEQ ID NO: 2481578 - DNA, 25 bp, Homo sapien
caatgattgggcctacccagtacac

SEQ ID NO: 2481579 - DNA, 25 bp, Homo sapien
gggtttggcacccttgaggacagac

SEQ ID NO: 2481580 - DNA, 25 bp, Homo sapien
ttcatgcctgcaccagtataataca

SEQ ID NO: 2481581 - DNA, 25 bp, Homo sapien
tcatgcctgcaccagtataatacat

SEQ ID NO: 2481582 - DNA, 25 bp, Homo sapien
ggccacggagcccagttggccattc

SEQ ID NO: 2481583 - DNA, 25 bp, Homo sapien
actgtggttgcctggcccacgctca

SEQ ID NO: 2481584 - DNA, 25 bp, Homo sapien
ctctcgtcgtatgtggcaaagatgc

SEQ ID NO: 2481585 - DNA, 25 bp, Homo sapien
gatgcagagcacgaactggagcgtc

SEQ ID NO: 2481586 - DNA, 25 bp, Homo sapien
gactgcaggattgacgtgggctcca

SEQ ID NO: 2481587 - DNA, 25 bp, Homo sapien
gggtaacgctatacagcacagcggc

SEQ ID NO: 2481588 - DNA, 25 bp, Homo sapien
tgggagcccacaaggaaagcaaaag

SEQ ID NO: 2481589 - DNA, 25 bp, Homo sapien
agactgcaccagtgtagccagggcc

SEQ ID NO: 2481590 - DNA, 25 bp, Homo sapien
agaagacatagaagagggtggcaaa

SEQ ID NO: 2481591 - DNA, 25 bp, Homo sapien
aactcagcgaatatggccctccaaa

SEQ ID NO: 2481592 - DNA, 25 bp, Homo sapien
gcaaagaactcagcgaatatggccc

SEQ ID NO: 2481593 - DNA, 25 bp, Homo sapien
agagggtggcaaagaactcagcgaa

SEQ ID NO: 2481594 - DNA, 25 bp, Homo sapien
ggacagtcccctttatagaggactc

SEQ ID NO: 2481595 - DNA, 25 bp, Homo sapien
gacagtcccctttatagaggactct

SEQ ID NO: 2481596 - DNA, 25 bp, Homo sapien
tggccttgtctgggtggacagtccc

SEQ ID NO: 2481597 - DNA, 25 bp, Homo sapien
ggccttgtctgggtggacagtcccc

SEQ ID NO: 2481598 - DNA, 25 bp, Homo sapien
agagagcagaaattcgaggtgaggc

SEQ ID NO: 2481599 - DNA, 25 bp, Homo sapien
ccagcatgggtcctacccagtacac

SEQ ID NO: 2481600 - DNA, 25 bp, Homo sapien
gcagaaattcgaggtgaggcctgca

SEQ ID NO: 2481601 - DNA, 25 bp, Homo sapien
cccagcatgggtcctacccagtaca

SEQ ID NO: 2481602 - DNA, 25 bp, Homo sapien
tcaggaagcatgcagggttcacact

SEQ ID NO: 2481603 - DNA, 25 bp, Homo sapien
aagcatgcagggttcacactgcctc

SEQ ID NO: 2481604 - DNA, 25 bp, Homo sapien
agcatgcagggttcacactgcctcc

SEQ ID NO: 2481605 - DNA, 25 bp, Homo sapien
ggagtcagagagcagcgtgggcaat

SEQ ID NO: 2481606 - DNA, 25 bp, Homo sapien
agtcagagagcagcgtgggcaatat

SEQ ID NO: 2481607 - DNA, 25 bp, Homo sapien
ctcaggagtcagagagcagcgtggg

SEQ ID NO: 2481608 - DNA, 25 bp, Homo sapien
cagagagcagcgtgggcaatatggc

SEQ ID NO: 2481609 - DNA, 25 bp, Homo sapien
cgttctttgcgcttgtgccgctggg

SEQ ID NO: 2481610 - DNA, 25 bp, Homo sapien
aacgattgggagttgcctccacaga

SEQ ID NO: 2481611 - DNA, 25 bp, Homo sapien
caagatggcgctgctttttgcacgt

SEQ ID NO: 2481612 - DNA, 25 bp, Homo sapien
aggcgtgcccggttcatccaaggcg

SEQ ID NO: 2481613 - DNA, 25 bp, Homo sapien
aatggctgccgtctattattcccag

SEQ ID NO: 2481614 - DNA, 25 bp, Homo sapien
agaagcaactccaaccctctcgggt

SEQ ID NO: 2481615 - DNA, 25 bp, Homo sapien
ccagaccccactccgagaagcaact

SEQ ID NO: 2481616 - DNA, 25 bp, Homo sapien
gattccaaacctgtgataccatttg

SEQ ID NO: 2481617 - DNA, 25 bp, Homo sapien
tggctgcctgcctcatatctgaata

SEQ ID NO: 2481618 - DNA, 25 bp, Homo sapien
tagttgctcgtgtatcatggctgcc

SEQ ID NO: 2481619 - DNA, 25 bp, Homo sapien
tatccgtagtaaagcgacctcgcga

SEQ ID NO: 2481620 - DNA, 25 bp, Homo sapien
ctgaatatatcaccagccctagggt

SEQ ID NO: 2481621 - DNA, 25 bp, Homo sapien
ccagcagttccggataggagtggca

SEQ ID NO: 2481622 - DNA, 25 bp, Homo sapien
gggtgttcacctatgcccagcgcaa

SEQ ID NO: 2481623 - DNA, 25 bp, Homo sapien
gacatgtcccgggatagctgcattg

SEQ ID NO: 2481624 - DNA, 25 bp, Homo sapien
ccttgaatgtggagcgcttccggga

SEQ ID NO: 2481625 - DNA, 25 bp, Homo sapien
atgatggtgatgaagctagataccc

SEQ ID NO: 2481626 - DNA, 25 bp, Homo sapien
ctatgatggtgatgaagctagatac

SEQ ID NO: 2481627 - DNA, 25 bp, Homo sapien
tatgatggtgatgaagctagatacc

SEQ ID NO: 2481628 - DNA, 25 bp, Homo sapien
cccatattctgtggatatgtacatg

SEQ ID NO: 2481629 - DNA, 25 bp, Homo sapien
taaagccatgtatatagccattccc

SEQ ID NO: 2481630 - DNA, 25 bp, Homo sapien
tagagtccctccaccagagtatctc

SEQ ID NO: 2481631 - DNA, 25 bp, Homo sapien
catgtgcatggtagctagagtccct

SEQ ID NO: 2481632 - DNA, 25 bp, Homo sapien
gactcccatagaaagcactagccta

SEQ ID NO: 2481633 - DNA, 25 bp, Homo sapien
gatagctgtactgcaggtgtcctct

SEQ ID NO: 2481634 - DNA, 25 bp, Homo sapien
cactgaagcagtgtagctctccata

SEQ ID NO: 2481635 - DNA, 25 bp, Homo sapien
cattaggctgtaccttgaagcccag

SEQ ID NO: 2481636 - DNA, 25 bp, Homo sapien
cagcatcatccaggggaatgttgcc

SEQ ID NO: 2481637 - DNA, 25 bp, Homo sapien
gagagtgtgtaggagtcctggtaat

SEQ ID NO: 2481638 - DNA, 25 bp, Homo sapien
tccagatggttgaactgcacagcat

SEQ ID NO: 2481639 - DNA, 25 bp, Homo sapien
tcttgaagcagtttgaccacctcca

SEQ ID NO: 2481640 - DNA, 25 bp, Homo sapien
ggcaaaaggattcactttgcaagcc

SEQ ID NO: 2481641 - DNA, 25 bp, Homo sapien
aggaatttaacaacttcgatgtgtc

SEQ ID NO: 2481642 - DNA, 25 bp, Homo sapien
ctcgatcaggaatttaacaacttcg

SEQ ID NO: 2481643 - DNA, 25 bp, Homo sapien
ctgtccttggcaaaaggattcactt

SEQ ID NO: 2481644 - DNA, 25 bp, Homo sapien
tagttgctgcccctataaccttgag

SEQ ID NO: 2481645 - DNA, 25 bp, Homo sapien
gaaccctttggtgcagacacttagc

SEQ ID NO: 2481646 - DNA, 25 bp, Homo sapien
tgagaaggcgcaggtcttgaaccct

SEQ ID NO: 2481647 - DNA, 25 bp, Homo sapien
tagctgcaaaccgaagggtgtctag

SEQ ID NO: 2481648 - DNA, 25 bp, Homo sapien
gagctgtgcgcgagtcatagtcttt

SEQ ID NO: 2481649 - DNA, 25 bp, Homo sapien
cgagtcatagtctttctgttccata

SEQ ID NO: 2481650 - DNA, 25 bp, Homo sapien
tccatatccatggctgacaaggcaa

SEQ ID NO: 2481651 - DNA, 25 bp, Homo sapien
cagcaacatgcagagctgtgcgcga

SEQ ID NO: 2481652 - DNA, 25 bp, Homo sapien
tagagttgcctagatcagactggaa

SEQ ID NO: 2481653 - DNA, 25 bp, Homo sapien
gcccatttgaggcagggtacctact

SEQ ID NO: 2481654 - DNA, 25 bp, Homo sapien
tagtgggaaagcagctagagttgcc

SEQ ID NO: 2481655 - DNA, 25 bp, Homo sapien
actgcctacctgtggtaagtgccca

SEQ ID NO: 2481656 - DNA, 25 bp, Homo sapien
caaataacaggttgaccacagtctt

SEQ ID NO: 2481657 - DNA, 25 bp, Homo sapien
ctgagacatcgccactataggcagc

SEQ ID NO: 2481658 - DNA, 25 bp, Homo sapien
cttcgaagagctgagacatcgccac

SEQ ID NO: 2481659 - DNA, 25 bp, Homo sapien
cactataggcagcaaataacaggtt

SEQ ID NO: 2481660 - DNA, 25 bp, Homo sapien
atattcttacaagccacctggagtt

SEQ ID NO: 2481661 - DNA, 25 bp, Homo sapien
ttgaaatattcttacaagccacctg

SEQ ID NO: 2481662 - DNA, 25 bp, Homo sapien
aaatattcttacaagccacctggag

SEQ ID NO: 2481663 - DNA, 25 bp, Homo sapien
cctttgaaatattcttacaagccac

SEQ ID NO: 2481664 - DNA, 25 bp, Homo sapien
ttcacgccgtgggtctaacttccga

SEQ ID NO: 2481665 - DNA, 25 bp, Homo sapien
aatttctgccccttcacgccgtggg

SEQ ID NO: 2481666 - DNA, 25 bp, Homo sapien
taacttccgagcacagtgcctcagg

SEQ ID NO: 2481667 - DNA, 25 bp, Homo sapien
ggaaattgaagagagacaccaactt

SEQ ID NO: 2481668 - DNA, 25 bp, Homo sapien
tccttacacttagtaggagctcaaa

SEQ ID NO: 2481669 - DNA, 25 bp, Homo sapien
tttactccttacacttagtaggagc

SEQ ID NO: 2481670 - DNA, 25 bp, Homo sapien
tatttactccttacacttagtagga

SEQ ID NO: 2481671 - DNA, 25 bp, Homo sapien
tactccttacacttagtaggagctc

SEQ ID NO: 2481672 - DNA, 25 bp, Homo sapien
cacatcattcccatgacattgggta

SEQ ID NO: 2481673 - DNA, 25 bp, Homo sapien
gacattgggtaccaccaggaggatg

SEQ ID NO: 2481674 - DNA, 25 bp, Homo sapien
ggctcctgatacagctgacttggct

SEQ ID NO: 2481675 - DNA, 25 bp, Homo sapien
gcagaagctggtccccctatggctg

SEQ ID NO: 2481676 - DNA, 25 bp, Homo sapien
gggtgtgccccaaatcagaaaataa

SEQ ID NO: 2481677 - DNA, 25 bp, Homo sapien
gagaagagccagcaatgtgaagcac

SEQ ID NO: 2481678 - DNA, 25 bp, Homo sapien
gcacaattcaggagctgcaacacct

SEQ ID NO: 2481679 - DNA, 25 bp, Homo sapien
tcatgacagatggatagcagagcca

SEQ ID NO: 2481680 - DNA, 25 bp, Homo sapien
gctgagggtgttgcgcactgcttca

SEQ ID NO: 2481681 - DNA, 25 bp, Homo sapien
gcagatcccaccgttggcgagggtg

SEQ ID NO: 2481682 - DNA, 25 bp, Homo sapien
atgccgcaggaatgcatgaggctga

SEQ ID NO: 2481683 - DNA, 25 bp, Homo sapien
gcctgattcacaagtgacctccaca

SEQ ID NO: 2481684 - DNA, 25 bp, Homo sapien
aagtagagatcaagggcagccatca

SEQ ID NO: 2481685 - DNA, 25 bp, Homo sapien
ctggaagtagagatcaagggcagcc

SEQ ID NO: 2481686 - DNA, 25 bp, Homo sapien
gaagtagagatcaagggcagccatc

SEQ ID NO: 2481687 - DNA, 25 bp, Homo sapien
agtagagatcaagggcagccatcat

SEQ ID NO: 2481688 - DNA, 25 bp, Homo sapien
gcataattccgatcccctgtttcct

SEQ ID NO: 2481689 - DNA, 25 bp, Homo sapien
tagccgatggcataattccgatccc

SEQ ID NO: 2481690 - DNA, 25 bp, Homo sapien
ccttgagataatagccgatggcata

SEQ ID NO: 2481691 - DNA, 25 bp, Homo sapien
cttttccttgagataatagccgatg

SEQ ID NO: 2481692 - DNA, 25 bp, Homo sapien
gttggaggagtgggtgttgggagaa

SEQ ID NO: 2481693 - DNA, 25 bp, Homo sapien
tgaagttggaggagtgggtgttggg

SEQ ID NO: 2481694 - DNA, 25 bp, Homo sapien
tggaggagtgggtgttgggagaagg

SEQ ID NO: 2481695 - DNA, 25 bp, Homo sapien
cttgaagttggaggagtgggtgttg

SEQ ID NO: 2481696 - DNA, 25 bp, Homo sapien
cccagccattttgttgagatactgc

SEQ ID NO: 2481697 - DNA, 25 bp, Homo sapien
aacccatgtattcattcccagccat

SEQ ID NO: 2481698 - DNA, 25 bp, Homo sapien
tgaaacccatgtattcattcccagc

SEQ ID NO: 2481699 - DNA, 25 bp, Homo sapien
ccagccattttgttgagatactgca

SEQ ID NO: 2481700 - DNA, 25 bp, Homo sapien
atcaaacttctctgctttgttacag

SEQ ID NO: 2481701 - DNA, 25 bp, Homo sapien
aaacttctctgctttgttacagtcc

SEQ ID NO: 2481702 - DNA, 25 bp, Homo sapien
aaaatcaaacttctctgctttgtta

SEQ ID NO: 2481703 - DNA, 25 bp, Homo sapien
acttctctgctttgttacagtccat

SEQ ID NO: 2481704 - DNA, 25 bp, Homo sapien
aaaaggtcctacttagatgggaatg

SEQ ID NO: 2481705 - DNA, 25 bp, Homo sapien
acagaacaaggggagagactcagcc

SEQ ID NO: 2481706 - DNA, 25 bp, Homo sapien
tcctacttagatgggaatgggatga

SEQ ID NO: 2481707 - DNA, 25 bp, Homo sapien
tgaggcaggtcccagatacaggttt

SEQ ID NO: 2481708 - DNA, 25 bp, Homo sapien
gacaacaatggcaccagcattgacc

SEQ ID NO: 2481709 - DNA, 25 bp, Homo sapien
atcagggagctgacaacaatggcac

SEQ ID NO: 2481710 - DNA, 25 bp, Homo sapien
ggagctgacaacaatggcaccagca

SEQ ID NO: 2481711 - DNA, 25 bp, Homo sapien
ccagcattgaccatggggttatggg

SEQ ID NO: 2481712 - DNA, 25 bp, Homo sapien
tcagtgcctagggtgcttatggaga

SEQ ID NO: 2481713 - DNA, 25 bp, Homo sapien
ttgcccacaaacttgtgcacgtagt

SEQ ID NO: 2481714 - DNA, 25 bp, Homo sapien
gagagcttgttgtagcgcaggccac

SEQ ID NO: 2481715 - DNA, 25 bp, Homo sapien
tgttgtagcgcaggccacttggctc

SEQ ID NO: 2481716 - DNA, 25 bp, Homo sapien
tcacacaggactgcaggcagaaggg

SEQ ID NO: 2481717 - DNA, 25 bp, Homo sapien
gaaggggatctttgtgtggcccaca

SEQ ID NO: 2481718 - DNA, 25 bp, Homo sapien
aggggatctttgtgtggcccacaga

SEQ ID NO: 2481719 - DNA, 25 bp, Homo sapien
actgcaggcagaaggggatctttgt

SEQ ID NO: 2481720 - DNA, 25 bp, Homo sapien
agggagacaccccacaggtctgggt

SEQ ID NO: 2481721 - DNA, 25 bp, Homo sapien
caggtctgggtttgacttggccagc

SEQ ID NO: 2481722 - DNA, 25 bp, Homo sapien
gacaccccacaggtctgggtttgac

SEQ ID NO: 2481723 - DNA, 25 bp, Homo sapien
ccacaggtctgggtttgacttggcc

SEQ ID NO: 2481724 - DNA, 25 bp, Homo sapien
aatgcccgagccttaagtcctagaa

SEQ ID NO: 2481725 - DNA, 25 bp, Homo sapien
ggagaattctgaggcaaccttcccc

SEQ ID NO: 2481726 - DNA, 25 bp, Homo sapien
cacctgctctaggaatcgtgtatag

SEQ ID NO: 2481727 - DNA, 25 bp, Homo sapien
tgtgtatccgcaatcctgtagagat

SEQ ID NO: 2481728 - DNA, 25 bp, Homo sapien
caggaatgacaaacttctttcggaa

SEQ ID NO: 2481729 - DNA, 25 bp, Homo sapien
tggcccgtgaactcctcaaaatcag

SEQ ID NO: 2481730 - DNA, 25 bp, Homo sapien
aagatgcgatccacatggcccgtga

SEQ ID NO: 2481731 - DNA, 25 bp, Homo sapien
tttcggaatgcctgggtcaggagca

SEQ ID NO: 2481732 - DNA, 25 bp, Homo sapien
ttggaccacgcggtgcatctcgctc

SEQ ID NO: 2481733 - DNA, 25 bp, Homo sapien
gaagagatctcggtccaagaggcca

SEQ ID NO: 2481734 - DNA, 25 bp, Homo sapien
tcggagccgaggatctgatgtctgc

SEQ ID NO: 2481735 - DNA, 25 bp, Homo sapien
caagaggccaccactactggactct

SEQ ID NO: 2481736 - DNA, 25 bp, Homo sapien
caatagtgtaaaagagcaaatcacc

SEQ ID NO: 2481737 - DNA, 25 bp, Homo sapien
tagggattcgttcctgtccttcagc

SEQ ID NO: 2481738 - DNA, 25 bp, Homo sapien
cctgtccttcagcaatagtgtaaaa

SEQ ID NO: 2481739 - DNA, 25 bp, Homo sapien
gtgaacttgtggatagggattcgtt

SEQ ID NO: 2481740 - DNA, 25 bp, Homo sapien
ggcctgagaactgctacctgctcct

SEQ ID NO: 2481741 - DNA, 25 bp, Homo sapien
gggcctgagaactgctacctgctcc

SEQ ID NO: 2481742 - DNA, 25 bp, Homo sapien
ctgcaacatgggcttataagtaggt

SEQ ID NO: 2481743 - DNA, 25 bp, Homo sapien
ataagtaggtgagtgtcctcattct

SEQ ID NO: 2481744 - DNA, 25 bp, Homo sapien
gacagtgtctatgctggccctctgg

SEQ ID NO: 2481745 - DNA, 25 bp, Homo sapien
tattggtgtcccttacgacagagac

SEQ ID NO: 2481746 - DNA, 25 bp, Homo sapien
agtcataaatatggcccggcacggt

SEQ ID NO: 2481747 - DNA, 25 bp, Homo sapien
caacacttatggacgtacctgcgca

SEQ ID NO: 2481748 - DNA, 25 bp, Homo sapien
cacgcagaaacacaacacacagacc

SEQ ID NO: 2481749 - DNA, 25 bp, Homo sapien
acagaccccagtacacctggaccgg

SEQ ID NO: 2481750 - DNA, 25 bp, Homo sapien
agaccccagtacacctggaccggag

SEQ ID NO: 2481751 - DNA, 25 bp, Homo sapien
cacagaccccagtacacctggaccg

SEQ ID NO: 2481752 - DNA, 25 bp, Homo sapien
ggaactagcgagaaccacagtggga

SEQ ID NO: 2481753 - DNA, 25 bp, Homo sapien
tgatccgggttaagtgcgcaccttg

SEQ ID NO: 2481754 - DNA, 25 bp, Homo sapien
aatacacacgaggactagggaaggt

SEQ ID NO: 2481755 - DNA, 25 bp, Homo sapien
gcactcctaggcagacggcagatta

SEQ ID NO: 2481756 - DNA, 25 bp, Homo sapien
ctgcgccgcggcctcactgaggtgg

SEQ ID NO: 2481757 - DNA, 25 bp, Homo sapien
ctggtggctgtgtggcgtctctctg

SEQ ID NO: 2481758 - DNA, 25 bp, Homo sapien
tggtgccggacgcccccgccaagga

SEQ ID NO: 2481759 - DNA, 25 bp, Homo sapien
ggtggctgtgtggcgtctctctgcc

SEQ ID NO: 2481760 - DNA, 25 bp, Homo sapien
cagcaagcctccggctctgcaggtg

SEQ ID NO: 2481761 - DNA, 25 bp, Homo sapien
ttctgtgagggagcgctggacctgg

SEQ ID NO: 2481762 - DNA, 25 bp, Homo sapien
aggtgcgcccgggacctctagctgt

SEQ ID NO: 2481763 - DNA, 25 bp, Homo sapien
cctggaagacggagaatgtgggccc

SEQ ID NO: 2481764 - DNA, 25 bp, Homo sapien
ctggtccctacatcggggctgagag

SEQ ID NO: 2481765 - DNA, 25 bp, Homo sapien
ggctggtccctacatcggggctgag

SEQ ID NO: 2481766 - DNA, 25 bp, Homo sapien
gctggtccctacatcggggctgaga

SEQ ID NO: 2481767 - DNA, 25 bp, Homo sapien
ccaggatgcctatgttctgttgagc

SEQ ID NO: 2481768 - DNA, 25 bp, Homo sapien
gaagaaattgcacaggttgctacaa

SEQ ID NO: 2481769 - DNA, 25 bp, Homo sapien
ctgaagaaattgcacaggttgctac

SEQ ID NO: 2481770 - DNA, 25 bp, Homo sapien
tgcctatgttctgttgagcgaaaag

SEQ ID NO: 2481771 - DNA, 25 bp, Homo sapien
tcttgaataggctaaaggttggtct

SEQ ID NO: 2481772 - DNA, 25 bp, Homo sapien
tcataatcgctgaagacgttgatgg

SEQ ID NO: 2481773 - DNA, 25 bp, Homo sapien
tggagaagctctaagtacactcgtc

SEQ ID NO: 2481774 - DNA, 25 bp, Homo sapien
tggtcataatcgctgaagacgttga

SEQ ID NO: 2481775 - DNA, 25 bp, Homo sapien
ctcccttttccactactgctttctg

SEQ ID NO: 2481776 - DNA, 25 bp, Homo sapien
gcttctcccttttccactactgctt

SEQ ID NO: 2481777 - DNA, 25 bp, Homo sapien
cgcgcttctcccttttccactactg

SEQ ID NO: 2481778 - DNA, 25 bp, Homo sapien
ttctcccttttccactactgctttc

SEQ ID NO: 2481779 - DNA, 25 bp, Homo sapien
tggtaaatatgggaatgccgtcaac

SEQ ID NO: 2481780 - DNA, 25 bp, Homo sapien
tgccgtcaacaaatgtataatgcct

SEQ ID NO: 2481781 - DNA, 25 bp, Homo sapien
cctgaggagcccatgacagtcatag

SEQ ID NO: 2481782 - DNA, 25 bp, Homo sapien
tttcttactctttattggctggtgg

SEQ ID NO: 2481783 - DNA, 25 bp, Homo sapien
cagtacacctaacagcagtagtgga

SEQ ID NO: 2481784 - DNA, 25 bp, Homo sapien
atggcaccacctagcccaagcaaca

SEQ ID NO: 2481785 - DNA, 25 bp, Homo sapien
caagcaacagtacacctaacagcag

SEQ ID NO: 2481786 - DNA, 25 bp, Homo sapien
tacacctaacagcagtagtggaagc

SEQ ID NO: 2481787 - DNA, 25 bp, Homo sapien
tgaaccaaagcaatttggctcaggt

SEQ ID NO: 2481788 - DNA, 25 bp, Homo sapien
gatcacgcatagctaaaaagtggca

SEQ ID NO: 2481789 - DNA, 25 bp, Homo sapien
ggctgagacaccaaaaggttcaatg

SEQ ID NO: 2481790 - DNA, 25 bp, Homo sapien
tagaagtcttagagtaaggcaaaga

SEQ ID NO: 2481791 - DNA, 25 bp, Homo sapien
tccttccaggcataggtgctactgc

SEQ ID NO: 2481792 - DNA, 25 bp, Homo sapien
tttctaccagccatgtatgaaagta

SEQ ID NO: 2481793 - DNA, 25 bp, Homo sapien
gccatgtatgaaagtacccatttcc

SEQ ID NO: 2481794 - DNA, 25 bp, Homo sapien
caggcataggtgctactgctctttt

SEQ ID NO: 2481795 - DNA, 25 bp, Homo sapien
aaagttttcgatgtattggaattat

SEQ ID NO: 2481796 - DNA, 25 bp, Homo sapien
cttttcccctaccttgaagagacat

SEQ ID NO: 2481797 - DNA, 25 bp, Homo sapien
gaagagacatggtggtcgcagcttc

SEQ ID NO: 2481798 - DNA, 25 bp, Homo sapien
cccctaccttgaagagacatggtgg

SEQ ID NO: 2481799 - DNA, 25 bp, Homo sapien
taatcctttataggctctgagcctg

SEQ ID NO: 2481800 - DNA, 25 bp, Homo sapien
tcggtgttattactcctcatctcag

SEQ ID NO: 2481801 - DNA, 25 bp, Homo sapien
gagatgatactcagaccctaaactg

SEQ ID NO: 2481802 - DNA, 25 bp, Homo sapien
gaacacactagagtcctttcctcag

SEQ ID NO: 2481803 - DNA, 25 bp, Homo sapien
ttaactaaagaatttgtagagttgc

SEQ ID NO: 2481804 - DNA, 25 bp, Homo sapien
gagtgaagtccccactccaacatat

SEQ ID NO: 2481805 - DNA, 25 bp, Homo sapien
ttgggtgggtaaacacctctttgca

SEQ ID NO: 2481806 - DNA, 25 bp, Homo sapien
taatacatatccagcgcgagtgaag

SEQ ID NO: 2481807 - DNA, 25 bp, Homo sapien
ccctacaacttggtagaggtccatt

SEQ ID NO: 2481808 - DNA, 25 bp, Homo sapien
tcagccagacatttaggcaggagca

SEQ ID NO: 2481809 - DNA, 25 bp, Homo sapien
cacatctcacaaggcaggacctgga

SEQ ID NO: 2481810 - DNA, 25 bp, Homo sapien
catccacacagagggtatggaacag

SEQ ID NO: 2481811 - DNA, 25 bp, Homo sapien
taagccagtcatacctatcccaacg

SEQ ID NO: 2481812 - DNA, 25 bp, Homo sapien
tccccagtgcaagtacccgtaatct

SEQ ID NO: 2481813 - DNA, 25 bp, Homo sapien
tcttcaaactgaggctaggacccca

SEQ ID NO: 2481814 - DNA, 25 bp, Homo sapien
taagattcaaagctaccgagaagag

SEQ ID NO: 2481815 - DNA, 25 bp, Homo sapien
gaaagattgcacagtctgaagaggc

SEQ ID NO: 2481816 - DNA, 25 bp, Homo sapien
tcttagggtgcacccaaactcagca

SEQ ID NO: 2481817 - DNA, 25 bp, Homo sapien
gaggagcatccaacatcatacaggg

SEQ ID NO: 2481818 - DNA, 25 bp, Homo sapien
tgctacctggcctccatcttagggt

SEQ ID NO: 2481819 - DNA, 25 bp, Homo sapien
tgaggccggccccattgctacctgg

SEQ ID NO: 2481820 - DNA, 25 bp, Homo sapien
acattcactagaactattgctattg

SEQ ID NO: 2481821 - DNA, 25 bp, Homo sapien
ttactggccgtcactgcgggtccgc

SEQ ID NO: 2481822 - DNA, 25 bp, Homo sapien
gctattgttaaataaccccagaatg

SEQ ID NO: 2481823 - DNA, 25 bp, Homo sapien
tttcttggtttcacacattcactag

SEQ ID NO: 2481824 - DNA, 25 bp, Homo sapien
tgcacctcttacttgaggagcaaga

SEQ ID NO: 2481825 - DNA, 25 bp, Homo sapien
tgccaagggcaaggtcaaaaatcag

SEQ ID NO: 2481826 - DNA, 25 bp, Homo sapien
cagcatcagcaggtgaaaatggcag

SEQ ID NO: 2481827 - DNA, 25 bp, Homo sapien
cagggttgtatctgacttgagtctg

SEQ ID NO: 2481828 - DNA, 25 bp, Homo sapien
tgtcaaataccaggagggcatcagc

SEQ ID NO: 2481829 - DNA, 25 bp, Homo sapien
gaagaagcggcgcatgatgtgccca

SEQ ID NO: 2481830 - DNA, 25 bp, Homo sapien
cccagcggctctcgaagaagcggcg

SEQ ID NO: 2481831 - DNA, 25 bp, Homo sapien
gaaagtctggcagttgtcaaatacc

SEQ ID NO: 2481832 - DNA, 25 bp, Homo sapien
ggcaaaactgtgagctgggtaggag

SEQ ID NO: 2481833 - DNA, 25 bp, Homo sapien
caaaactgtgagctgggtaggagtt

SEQ ID NO: 2481834 - DNA, 25 bp, Homo sapien
aaactgtgagctgggtaggagttgc

SEQ ID NO: 2481835 - DNA, 25 bp, Homo sapien
gcaaaactgtgagctgggtaggagt

SEQ ID NO: 2481836 - DNA, 25 bp, Homo sapien
gctcccgcatggtggaaaaatccat

SEQ ID NO: 2481837 - DNA, 25 bp, Homo sapien
gatttttgatgatgcgccggtaccc

SEQ ID NO: 2481838 - DNA, 25 bp, Homo sapien
cactcaccaaacgtgggttcacagg

SEQ ID NO: 2481839 - DNA, 25 bp, Homo sapien
ccaaacgtgggttcacaggctctag

SEQ ID NO: 2481840 - DNA, 25 bp, Homo sapien
cactgtggtggttccgcatagagag

SEQ ID NO: 2481841 - DNA, 25 bp, Homo sapien
cgcatagagagtcgccgccgcttgg

SEQ ID NO: 2481842 - DNA, 25 bp, Homo sapien
ttcttccgagtaccgaggccctgct

SEQ ID NO: 2481843 - DNA, 25 bp, Homo sapien
agagcccttcttccgagtaccgagg

SEQ ID NO: 2481844 - DNA, 25 bp, Homo sapien
tgggctttctcggcccctcaacagt

SEQ ID NO: 2481845 - DNA, 25 bp, Homo sapien
gaataaccacttttccgcttctggc

SEQ ID NO: 2481846 - DNA, 25 bp, Homo sapien
tctgagaagttcagcgaataaccac

SEQ ID NO: 2481847 - DNA, 25 bp, Homo sapien
ttctggccacgctttgggaaaccag

SEQ ID NO: 2481848 - DNA, 25 bp, Homo sapien
actgcttgccctactacaatctctg

SEQ ID NO: 2481849 - DNA, 25 bp, Homo sapien
caacagctggagatgcactgcttgc

SEQ ID NO: 2481850 - DNA, 25 bp, Homo sapien
tctctgcctaaatatgatttaaggc

SEQ ID NO: 2481851 - DNA, 25 bp, Homo sapien
gaaacaggtgagattagcaacagct

SEQ ID NO: 2481852 - DNA, 25 bp, Homo sapien
cagacagtacagaaccaatctcctt

SEQ ID NO: 2481853 - DNA, 25 bp, Homo sapien
ctgagccaaacagacagtacagaac

SEQ ID NO: 2481854 - DNA, 25 bp, Homo sapien
cagtacagaaccaatctccttctgg

SEQ ID NO: 2481855 - DNA, 25 bp, Homo sapien
ccaaacagacagtacagaaccaatc

SEQ ID NO: 2481856 - DNA, 25 bp, Homo sapien
cattgtcacccttccggcagactag

SEQ ID NO: 2481857 - DNA, 25 bp, Homo sapien
cacccttccggcagactagacatgt

SEQ ID NO: 2481858 - DNA, 25 bp, Homo sapien
agaaactcatcattgtcacccttcc

SEQ ID NO: 2481859 - DNA, 25 bp, Homo sapien
tggcagtaaatgtggcagccacggt

SEQ ID NO: 2481860 - DNA, 25 bp, Homo sapien
ctctacctgccagtgaccccacccc

SEQ ID NO: 2481861 - DNA, 25 bp, Homo sapien
gcctctacctgccagtgaccccacc

SEQ ID NO: 2481862 - DNA, 25 bp, Homo sapien
caaggttgtgaggaggcagaatgag

SEQ ID NO: 2481863 - DNA, 25 bp, Homo sapien
aggttgtgaggaggcagaatgagct

SEQ ID NO: 2481864 - DNA, 25 bp, Homo sapien
tgttgacagacttctcccaggcaat

SEQ ID NO: 2481865 - DNA, 25 bp, Homo sapien
tttgttgacagacttctcccaggca

SEQ ID NO: 2481866 - DNA, 25 bp, Homo sapien
cactttgttgacagacttctcccag

SEQ ID NO: 2481867 - DNA, 25 bp, Homo sapien
ttgacagacttctcccaggcaatgg

SEQ ID NO: 2481868 - DNA, 25 bp, Homo sapien
tctggcgccagacacgaatgcgagg

SEQ ID NO: 2481869 - DNA, 25 bp, Homo sapien
caccgctcgagggtctggcgccaga

SEQ ID NO: 2481870 - DNA, 25 bp, Homo sapien
ctgcgctccggcaccgctcgagggt

SEQ ID NO: 2481871 - DNA, 25 bp, Homo sapien
gaatgcgaggggtgatctcatatga

SEQ ID NO: 2481872 - DNA, 25 bp, Homo sapien
gtagttttacgctgaggtgccagtc

SEQ ID NO: 2481873 - DNA, 25 bp, Homo sapien
tcggagaggtgctcacagtaggcca

SEQ ID NO: 2481874 - DNA, 25 bp, Homo sapien
tcttcacgggtagagtctgggctag

SEQ ID NO: 2481875 - DNA, 25 bp, Homo sapien
ttctacattctgttccagggcagcc

SEQ ID NO: 2481876 - DNA, 25 bp, Homo sapien
gcaggtagttgcctgggctcaaaga

SEQ ID NO: 2481877 - DNA, 25 bp, Homo sapien
ggaccagctcataatcccttcttga

SEQ ID NO: 2481878 - DNA, 25 bp, Homo sapien
cagacatgataacccgctgctccag

SEQ ID NO: 2481879 - DNA, 25 bp, Homo sapien
tctacccattgaagcactgctaggt

SEQ ID NO: 2481880 - DNA, 25 bp, Homo sapien
gctcaatgcttatcctgggctcttc

SEQ ID NO: 2481881 - DNA, 25 bp, Homo sapien
tgttgtccctagcagcagctcaatg

SEQ ID NO: 2481882 - DNA, 25 bp, Homo sapien
gcccatcaggctgttgtccctagca

SEQ ID NO: 2481883 - DNA, 25 bp, Homo sapien
gcagcagctcaatgcttatcctggg

SEQ ID NO: 2481884 - DNA, 25 bp, Homo sapien
ctgagggccgcaggcagacttcctg

SEQ ID NO: 2481885 - DNA, 25 bp, Homo sapien
tgaagtgccttctcccggatacctc

SEQ ID NO: 2481886 - DNA, 25 bp, Homo sapien
tccaacatctcaggatctcgtatcc

SEQ ID NO: 2481887 - DNA, 25 bp, Homo sapien
aagaagtccctgtgcttgttaaggt

SEQ ID NO: 2481888 - DNA, 25 bp, Homo sapien
tgcccacaccggatgccctcactcc

SEQ ID NO: 2481889 - DNA, 25 bp, Homo sapien
accggatgccctcactccaaggtca

SEQ ID NO: 2481890 - DNA, 25 bp, Homo sapien
tggggcgccagctgtgaagcactgc

SEQ ID NO: 2481891 - DNA, 25 bp, Homo sapien
cagatgagatatatgtggggcgcca

SEQ ID NO: 2481892 - DNA, 25 bp, Homo sapien
ggttaggtaacgctgttccatctgt

SEQ ID NO: 2481893 - DNA, 25 bp, Homo sapien
aacgctgttccatctgtttgaagaa

SEQ ID NO: 2481894 - DNA, 25 bp, Homo sapien
ctgtcagctgggttaggtaacgctg

SEQ ID NO: 2481895 - DNA, 25 bp, Homo sapien
gctgggttaggtaacgctgttccat

SEQ ID NO: 2481896 - DNA, 25 bp, Homo sapien
agggtctcctgctcgcctcttaggg

SEQ ID NO: 2481897 - DNA, 25 bp, Homo sapien
gaggtctccctctccgtttgggctg

SEQ ID NO: 2481898 - DNA, 25 bp, Homo sapien
actgcactggagaacaagggttggc

SEQ ID NO: 2481899 - DNA, 25 bp, Homo sapien
ggccaacccagccaagggcgtggaa

SEQ ID NO: 2481900 - DNA, 25 bp, Homo sapien
gtgcatactactaattctggctact

SEQ ID NO: 2481901 - DNA, 25 bp, Homo sapien
aagatgaaatcaagtgcatactact

SEQ ID NO: 2481902 - DNA, 25 bp, Homo sapien
caatggtgcctgtggcaagatgaaa

SEQ ID NO: 2481903 - DNA, 25 bp, Homo sapien
tgtttataggttccctcaacttcag

SEQ ID NO: 2481904 - DNA, 25 bp, Homo sapien
tgggttggtcctcagaaactgcagg

SEQ ID NO: 2481905 - DNA, 25 bp, Homo sapien
gagggagtgggttggtcctcagaaa

SEQ ID NO: 2481906 - DNA, 25 bp, Homo sapien
gtgggggcagcattgcagggcatct

SEQ ID NO: 2481907 - DNA, 25 bp, Homo sapien
tcagaaactgcagggggcggtgtgg

SEQ ID NO: 2481908 - DNA, 25 bp, Homo sapien
ctgagatgttaaaccagagtgcttg

SEQ ID NO: 2481909 - DNA, 25 bp, Homo sapien
tgtgatggagctgggtctagttttc

SEQ ID NO: 2481910 - DNA, 25 bp, Homo sapien
tgaggatcagggctggattctgcct

SEQ ID NO: 2481911 - DNA, 25 bp, Homo sapien
taaaccagagtgcttgaggatcagg

SEQ ID NO: 2481912 - DNA, 25 bp, Homo sapien
gctcaacagggagctatggctctga

SEQ ID NO: 2481913 - DNA, 25 bp, Homo sapien
gggagctatggctctgagtctggct

SEQ ID NO: 2481914 - DNA, 25 bp, Homo sapien
gagctatggctctgagtctggctca

SEQ ID NO: 2481915 - DNA, 25 bp, Homo sapien
aacagggagctatggctctgagtct

SEQ ID NO: 2481916 - DNA, 25 bp, Homo sapien
gctgggcaggagcatgaagctgagc

SEQ ID NO: 2481917 - DNA, 25 bp, Homo sapien
gcaggagcatgaagctgagcctcag

SEQ ID NO: 2481918 - DNA, 25 bp, Homo sapien
aggagcatgaagctgagcctcaggc

SEQ ID NO: 2481919 - DNA, 25 bp, Homo sapien
gcatgaagctgagcctcaggctgaa

SEQ ID NO: 2481920 - DNA, 25 bp, Homo sapien
acaggggacttaagatgcctaggtt

SEQ ID NO: 2481921 - DNA, 25 bp, Homo sapien
gacttaagatgcctaggttgcatag

SEQ ID NO: 2481922 - DNA, 25 bp, Homo sapien
gggacttaagatgcctaggttgcat

SEQ ID NO: 2481923 - DNA, 25 bp, Homo sapien
cttaagatgcctaggttgcatagac

SEQ ID NO: 2481924 - DNA, 25 bp, Homo sapien
gttgagtgacgcatgggctgccact

SEQ ID NO: 2481925 - DNA, 25 bp, Homo sapien
tgccacttttaaggagtcagtttcc

SEQ ID NO: 2481926 - DNA, 25 bp, Homo sapien
gttggagccagctaactccatcttc

SEQ ID NO: 2481927 - DNA, 25 bp, Homo sapien
ggagaactggcagtggtgttggagc

SEQ ID NO: 2481928 - DNA, 25 bp, Homo sapien
agataccagccaaatacggcaatac

SEQ ID NO: 2481929 - DNA, 25 bp, Homo sapien
caaagataccagccaaatacggcaa

SEQ ID NO: 2481930 - DNA, 25 bp, Homo sapien
aaagataccagccaaatacggcaat

SEQ ID NO: 2481931 - DNA, 25 bp, Homo sapien
aagataccagccaaatacggcaata

SEQ ID NO: 2481932 - DNA, 25 bp, Homo sapien
gacccagggagaccgcccgaagcat

SEQ ID NO: 2481933 - DNA, 25 bp, Homo sapien
acgtctgtagcggtcctgacccagg

SEQ ID NO: 2481934 - DNA, 25 bp, Homo sapien
tgtagcggtcctgacccagggagac

SEQ ID NO: 2481935 - DNA, 25 bp, Homo sapien
ccagtagcgacgtctgtagcggtcc

SEQ ID NO: 2481936 - DNA, 25 bp, Homo sapien
cagctttttgcgaaagaaaagctga

SEQ ID NO: 2481937 - DNA, 25 bp, Homo sapien
gatgagtgaagcagctttttgcgaa

SEQ ID NO: 2481938 - DNA, 25 bp, Homo sapien
tgggatgagtgaagcagctttttgc

SEQ ID NO: 2481939 - DNA, 25 bp, Homo sapien
tgaagcagctttttgcgaaagaaaa

SEQ ID NO: 2481940 - DNA, 25 bp, Homo sapien
tctatctggcgctctagctctggga

SEQ ID NO: 2481941 - DNA, 25 bp, Homo sapien
atctggcgctctagctctgggatgc

SEQ ID NO: 2481942 - DNA, 25 bp, Homo sapien
gtttttctatctggcgctctagctc

SEQ ID NO: 2481943 - DNA, 25 bp, Homo sapien
ttctatctggcgctctagctctggg

SEQ ID NO: 2481944 - DNA, 25 bp, Homo sapien
tggcccttccatctctacttcagac

SEQ ID NO: 2481945 - DNA, 25 bp, Homo sapien
cccagttcgcttggccagaacagtt

SEQ ID NO: 2481946 - DNA, 25 bp, Homo sapien
atgatccgagaactgcgcctccgtc

SEQ ID NO: 2481947 - DNA, 25 bp, Homo sapien
acttcagaccgcccagttcgcttgg

SEQ ID NO: 2481948 - DNA, 25 bp, Homo sapien
aaagattaagggaaggccaagtgtg

SEQ ID NO: 2481949 - DNA, 25 bp, Homo sapien
cttgaaatagatggagaaagattaa

SEQ ID NO: 2481950 - DNA, 25 bp, Homo sapien
tggagaaagattaagggaaggccaa

SEQ ID NO: 2481951 - DNA, 25 bp, Homo sapien
atagatggagaaagattaagggaag

SEQ ID NO: 2481952 - DNA, 25 bp, Homo sapien
tgtagctggacatactctccagagt

SEQ ID NO: 2481953 - DNA, 25 bp, Homo sapien
gagccggccttcaacaatccacttg

SEQ ID NO: 2481954 - DNA, 25 bp, Homo sapien
gacatactctccagagtcttgtcaa

SEQ ID NO: 2481955 - DNA, 25 bp, Homo sapien
ttttcctgtagctggacatactctc

SEQ ID NO: 2481956 - DNA, 25 bp, Homo sapien
tcttgtcagtgggatctcagacacc

SEQ ID NO: 2481957 - DNA, 25 bp, Homo sapien
tctctgacacattgtctcttgtcag

SEQ ID NO: 2481958 - DNA, 25 bp, Homo sapien
tatgccataaggaagcagcgcagga

SEQ ID NO: 2481959 - DNA, 25 bp, Homo sapien
ggctggctctactccatatgccata

SEQ ID NO: 2481960 - DNA, 25 bp, Homo sapien
ggtgagtagggaaagatgcacaacc

SEQ ID NO: 2481961 - DNA, 25 bp, Homo sapien
gacagaatacgaaagaagaccacaa

SEQ ID NO: 2481962 - DNA, 25 bp, Homo sapien
gttacatctcctttacttgtcctgg

SEQ ID NO: 2481963 - DNA, 25 bp, Homo sapien
caaccaagttgggtgaatgtgcaag

SEQ ID NO: 2481964 - DNA, 25 bp, Homo sapien
tcagaccagggactcgtgagaagtc

SEQ ID NO: 2481965 - DNA, 25 bp, Homo sapien
caggctaggcacatctttggcagga

SEQ ID NO: 2481966 - DNA, 25 bp, Homo sapien
gcaccttgccaaagctatgcaggaa

SEQ ID NO: 2481967 - DNA, 25 bp, Homo sapien
tccacaatggtcaagcagtctgaga

SEQ ID NO: 2481968 - DNA, 25 bp, Homo sapien
aggaactgttactctctcctcacta

SEQ ID NO: 2481969 - DNA, 25 bp, Homo sapien
caggaactgttactctctcctcact

SEQ ID NO: 2481970 - DNA, 25 bp, Homo sapien
gctgcctctgccgttcctccaagcg

SEQ ID NO: 2481971 - DNA, 25 bp, Homo sapien
tcatttcctccaagatcatctgctg

SEQ ID NO: 2481972 - DNA, 25 bp, Homo sapien
atcctctgtcggcttcttcatttcc

SEQ ID NO: 2481973 - DNA, 25 bp, Homo sapien
tggtcagtcagacacatatcctctg

SEQ ID NO: 2481974 - DNA, 25 bp, Homo sapien
tgtgtggccagggtcttatctgctt

SEQ ID NO: 2481975 - DNA, 25 bp, Homo sapien
acaggctggcttggctttggtcacc

SEQ ID NO: 2481976 - DNA, 25 bp, Homo sapien
gccagggtcttatctgctttacagg

SEQ ID NO: 2481977 - DNA, 25 bp, Homo sapien
tatctgctttacaggctggcttggc

SEQ ID NO: 2481978 - DNA, 25 bp, Homo sapien
atctcactataaaacaagactgatg

SEQ ID NO: 2481979 - DNA, 25 bp, Homo sapien
actgccataaagatatcagtcacta

SEQ ID NO: 2481980 - DNA, 25 bp, Homo sapien
cagaaatctcactataaaacaagac

SEQ ID NO: 2481981 - DNA, 25 bp, Homo sapien
agactgccataaagatatcagtcac

SEQ ID NO: 2481982 - DNA, 25 bp, Homo sapien
cttggtctcttgtttccgcttattt

SEQ ID NO: 2481983 - DNA, 25 bp, Homo sapien
ttggtctcttgtttccgcttatttc

SEQ ID NO: 2481984 - DNA, 25 bp, Homo sapien
tggtctcttgtttccgcttatttct

SEQ ID NO: 2481985 - DNA, 25 bp, Homo sapien
aactctgaaagcatctctgcttggg

SEQ ID NO: 2481986 - DNA, 25 bp, Homo sapien
taagggaagtcatttctcctcaaac

SEQ ID NO: 2481987 - DNA, 25 bp, Homo sapien
ctgtaaaccataagggaagtcattt

SEQ ID NO: 2481988 - DNA, 25 bp, Homo sapien
aaactctgaaagcatctctgcttgg

SEQ ID NO: 2481989 - DNA, 25 bp, Homo sapien
taggattcaaaaacagacaagggtg

SEQ ID NO: 2481990 - DNA, 25 bp, Homo sapien
ctaggattcaaaaacagacaagggt

SEQ ID NO: 2481991 - DNA, 25 bp, Homo sapien
ctgcccttggatagtagtctgacac

SEQ ID NO: 2481992 - DNA, 25 bp, Homo sapien
ggatagtagtctgacactctccccg

SEQ ID NO: 2481993 - DNA, 25 bp, Homo sapien
tagtagtctgacactctccccgttg

SEQ ID NO: 2481994 - DNA, 25 bp, Homo sapien
gtagtctgacactctccccgttgaa

SEQ ID NO: 2481995 - DNA, 25 bp, Homo sapien
cagttctctagcatccagggcaaca

SEQ ID NO: 2481996 - DNA, 25 bp, Homo sapien
gaaggtgtcctgctgatagaaaaga

SEQ ID NO: 2481997 - DNA, 25 bp, Homo sapien
gaaacccacggactgattttagagc

SEQ ID NO: 2481998 - DNA, 25 bp, Homo sapien
gaaaaaatgtaggagaggcacctgc

SEQ ID NO: 2481999 - DNA, 25 bp, Homo sapien
tgtccatccactaaaacagtgccta

SEQ ID NO: 2482000 - DNA, 25 bp, Homo sapien
gacacggctagatgtctgagtgaaa

SEQ ID NO: 2482001 - DNA, 25 bp, Homo sapien
ttctaggtcatttggttgaaacatg

SEQ ID NO: 2482002 - DNA, 25 bp, Homo sapien
ttcttcacactacaccagggtaaac

SEQ ID NO: 2482003 - DNA, 25 bp, Homo sapien
gttggaatgcaataacacaactgaa

SEQ ID NO: 2482004 - DNA, 25 bp, Homo sapien
acacaactgaagtttactgtagcct

SEQ ID NO: 2482005 - DNA, 25 bp, Homo sapien
gaatgcaataacacaactgaagttt

SEQ ID NO: 2482006 - DNA, 25 bp, Homo sapien
gcaataacacaactgaagtttactg

SEQ ID NO: 2482007 - DNA, 25 bp, Homo sapien
gcaactcaagaaagaccatggctgg

SEQ ID NO: 2482008 - DNA, 25 bp, Homo sapien
aaaagtagtattcccaagcgctggg

SEQ ID NO: 2482009 - DNA, 25 bp, Homo sapien
cagataatgttagttacactcctgg

SEQ ID NO: 2482010 - DNA, 25 bp, Homo sapien
cgctgggactaggatgctggattcc

SEQ ID NO: 2482011 - DNA, 25 bp, Homo sapien
gtctgtcttgttcaatagctcagtg

SEQ ID NO: 2482012 - DNA, 25 bp, Homo sapien
tagggggcggttgtctgtcttgttc

SEQ ID NO: 2482013 - DNA, 25 bp, Homo sapien
atagctcagtgattttgaccttagg

SEQ ID NO: 2482014 - DNA, 25 bp, Homo sapien
gtgattttgaccttaggtggccgac

SEQ ID NO: 2482015 - DNA, 25 bp, Homo sapien
tctcagtgtttcgaggtcgaccccg

SEQ ID NO: 2482016 - DNA, 25 bp, Homo sapien
gtcgaccccgtttgccagtaattgc

SEQ ID NO: 2482017 - DNA, 25 bp, Homo sapien
tcctcgacgggatctcctctgctga

SEQ ID NO: 2482018 - DNA, 25 bp, Homo sapien
ttccttagtcttagccttctcagtg

SEQ ID NO: 2482019 - DNA, 25 bp, Homo sapien
tgtgtaccacgttgcggctcaggta

SEQ ID NO: 2482020 - DNA, 25 bp, Homo sapien
tgctctcggcggacactgtgtacca

SEQ ID NO: 2482021 - DNA, 25 bp, Homo sapien
gcggacactgtgtaccacgttgcgg

SEQ ID NO: 2482022 - DNA, 25 bp, Homo sapien
ggactgaagctgaagtgctctcggc

SEQ ID NO: 2482023 - DNA, 25 bp, Homo sapien
aggtctccccctgccatcggtggct

SEQ ID NO: 2482024 - DNA, 25 bp, Homo sapien
gcccttcttgatgcgcacctctctc

SEQ ID NO: 2482025 - DNA, 25 bp, Homo sapien
cacaggggccataataccaggtctc

SEQ ID NO: 2482026 - DNA, 25 bp, Homo sapien
tcccacaggggccataataccaggt

SEQ ID NO: 2482027 - DNA, 25 bp, Homo sapien
gaagcacatgggccctgccgccagg

SEQ ID NO: 2482028 - DNA, 25 bp, Homo sapien
agagaagcacatgggccctgccgcc

SEQ ID NO: 2482029 - DNA, 25 bp, Homo sapien
gccagagaagcacatgggccctgcc

SEQ ID NO: 2482030 - DNA, 25 bp, Homo sapien
ctgccagagaagcacatgggccctg

SEQ ID NO: 2482031 - DNA, 25 bp, Homo sapien
gctccttgggcaaaattgagtcact

SEQ ID NO: 2482032 - DNA, 25 bp, Homo sapien
tatcactgcagataactgtcctgta

SEQ ID NO: 2482033 - DNA, 25 bp, Homo sapien
tgagtcactacaagatgaaaaaaga

SEQ ID NO: 2482034 - DNA, 25 bp, Homo sapien
caataaatgtagcaaactagagcat

SEQ ID NO: 2482035 - DNA, 25 bp, Homo sapien
tcttctggggtagcaatacgtctcc

SEQ ID NO: 2482036 - DNA, 25 bp, Homo sapien
gggtagcaatacgtctcctcatgac

SEQ ID NO: 2482037 - DNA, 25 bp, Homo sapien
aagacgaacttcttctggggtagca

SEQ ID NO: 2482038 - DNA, 25 bp, Homo sapien
gcaatacgtctcctcatgacatcac

SEQ ID NO: 2482039 - DNA, 25 bp, Homo sapien
cactaccagaagcagtgagtccttc

SEQ ID NO: 2482040 - DNA, 25 bp, Homo sapien
ccacgtcagcagtggtttctagaaa

SEQ ID NO: 2482041 - DNA, 25 bp, Homo sapien
cagaagcagtgagtccttctccagt

SEQ ID NO: 2482042 - DNA, 25 bp, Homo sapien
tgatctcttccacgtcagcagtggt

SEQ ID NO: 2482043 - DNA, 25 bp, Homo sapien
gccgtcaacgggacttctaaggaga

SEQ ID NO: 2482044 - DNA, 25 bp, Homo sapien
acgggacttctaaggagactgctgg

SEQ ID NO: 2482045 - DNA, 25 bp, Homo sapien
gggatgtcactgaagccgtcaacgg

SEQ ID NO: 2482046 - DNA, 25 bp, Homo sapien
tgaagccgtcaacgggacttctaag

SEQ ID NO: 2482047 - DNA, 25 bp, Homo sapien
tggagaaaccactagggagactgct

SEQ ID NO: 2482048 - DNA, 25 bp, Homo sapien
caactgtagaagctgcgggacaaac

SEQ ID NO: 2482049 - DNA, 25 bp, Homo sapien
tcagcgtcactaccattattcaggt

SEQ ID NO: 2482050 - DNA, 25 bp, Homo sapien
tagctgaatagtggatgactgatca

SEQ ID NO: 2482051 - DNA, 25 bp, Homo sapien
gaaggcagtagcattattgagggaa

SEQ ID NO: 2482052 - DNA, 25 bp, Homo sapien
ttgcaggacagactcccctaggaca

SEQ ID NO: 2482053 - DNA, 25 bp, Homo sapien
caatcaagggcagaaatcacagggc

SEQ ID NO: 2482054 - DNA, 25 bp, Homo sapien
gctccgtgtcatcaataccatatag

SEQ ID NO: 2482055 - DNA, 25 bp, Homo sapien
ggtgtaacgattccacagaagggac

SEQ ID NO: 2482056 - DNA, 25 bp, Homo sapien
caggactgagacctcttggtgtaac

SEQ ID NO: 2482057 - DNA, 25 bp, Homo sapien
gaaggatcatctaaacagctcactg

SEQ ID NO: 2482058 - DNA, 25 bp, Homo sapien
cagaagggacagagccattgtagcc

SEQ ID NO: 2482059 - DNA, 25 bp, Homo sapien
tattggttcacttagctatactagg

SEQ ID NO: 2482060 - DNA, 25 bp, Homo sapien
agtcaaaatcagtgccttatattgg

SEQ ID NO: 2482061 - DNA, 25 bp, Homo sapien
tcacaggagagaccaaaagtcaaaa

SEQ ID NO: 2482062 - DNA, 25 bp, Homo sapien
taggcagtcaatctttgctagaagg

SEQ ID NO: 2482063 - DNA, 25 bp, Homo sapien
cctccatccattgggaaacgagaaa

SEQ ID NO: 2482064 - DNA, 25 bp, Homo sapien
tgggaaccgatcacatcaagatact

SEQ ID NO: 2482065 - DNA, 25 bp, Homo sapien
cagagtggtggttacccttgtacca

SEQ ID NO: 2482066 - DNA, 25 bp, Homo sapien
gggctgtcacgtgtactaatgctaa

SEQ ID NO: 2482067 - DNA, 25 bp, Homo sapien
tctctgccacaactgaagtcatctc

SEQ ID NO: 2482068 - DNA, 25 bp, Homo sapien
gccattctctgccacaactgaagtc

SEQ ID NO: 2482069 - DNA, 25 bp, Homo sapien
ctcatcaggatggataccactgcct

SEQ ID NO: 2482070 - DNA, 25 bp, Homo sapien
atcaggatggataccactgcctacc

SEQ ID NO: 2482071 - DNA, 25 bp, Homo sapien
aaggtttgaatgctagatcccaaca

SEQ ID NO: 2482072 - DNA, 25 bp, Homo sapien
tgctagatcccaacataggagaagt

SEQ ID NO: 2482073 - DNA, 25 bp, Homo sapien
agggtgcaaaggtttgaatgctaga

SEQ ID NO: 2482074 - DNA, 25 bp, Homo sapien
tgaatgctagatcccaacataggag

SEQ ID NO: 2482075 - DNA, 25 bp, Homo sapien
aaactagggggtccattgggcatca

SEQ ID NO: 2482076 - DNA, 25 bp, Homo sapien
aactagggggtccattgggcatcac

SEQ ID NO: 2482077 - DNA, 25 bp, Homo sapien
gaatcaaagttaagccccatgggac

SEQ ID NO: 2482078 - DNA, 25 bp, Homo sapien
gatgccgttgagtgggtattgtccc

SEQ ID NO: 2482079 - DNA, 25 bp, Homo sapien
tagttccagagacagtcgtaggcca

SEQ ID NO: 2482080 - DNA, 25 bp, Homo sapien
ccatgggactctgggtaccgttggc

SEQ ID NO: 2482081 - DNA, 25 bp, Homo sapien
tagtagtgtgagatacagtagataa

SEQ ID NO: 2482082 - DNA, 25 bp, Homo sapien
gggagcagagttcaaaatccctgaa

SEQ ID NO: 2482083 - DNA, 25 bp, Homo sapien
caaaatccctgaagtagtagtgtga

SEQ ID NO: 2482084 - DNA, 25 bp, Homo sapien
gagatacagtagataagccattaac

SEQ ID NO: 2482085 - DNA, 25 bp, Homo sapien
gagacccgttagtgtagaggccctc

SEQ ID NO: 2482086 - DNA, 25 bp, Homo sapien
gttcatgggagacccgttagtgtag

SEQ ID NO: 2482087 - DNA, 25 bp, Homo sapien
gaagttcatgggagacccgttagtg

SEQ ID NO: 2482088 - DNA, 25 bp, Homo sapien
tgctgggggaagttcatgggagacc

SEQ ID NO: 2482089 - DNA, 25 bp, Homo sapien
ctgaggaaggagagggtttcagtcc

SEQ ID NO: 2482090 - DNA, 25 bp, Homo sapien
gtttcagtcctgaggcagcaggtgc

SEQ ID NO: 2482091 - DNA, 25 bp, Homo sapien
agagggtttcagtcctgaggcagca

SEQ ID NO: 2482092 - DNA, 25 bp, Homo sapien
aaggagagggtttcagtcctgaggc

SEQ ID NO: 2482093 - DNA, 25 bp, Homo sapien
caatggctcattgaggtatggctaa

SEQ ID NO: 2482094 - DNA, 25 bp, Homo sapien
ggtgatcataatggcaaacctcgaa

SEQ ID NO: 2482095 - DNA, 25 bp, Homo sapien
taagaagcccttgatcagaatgaat

SEQ ID NO: 2482096 - DNA, 25 bp, Homo sapien
tactactaagaatgataagaagccc

SEQ ID NO: 2482097 - DNA, 25 bp, Homo sapien
ttatctcccatataggatatctcat

SEQ ID NO: 2482098 - DNA, 25 bp, Homo sapien
tcctgacactgcaaatgaggacgct

SEQ ID NO: 2482099 - DNA, 25 bp, Homo sapien
tggcttttgtatctaaaaacctcat

SEQ ID NO: 2482100 - DNA, 25 bp, Homo sapien
agttttcactgttcccagttcctga

SEQ ID NO: 2482101 - DNA, 25 bp, Homo sapien
aaatgaggacgctttggcttttgta

SEQ ID NO: 2482102 - DNA, 25 bp, Homo sapien
aagcggttcacatggccgcgctccg

SEQ ID NO: 2482103 - DNA, 25 bp, Homo sapien
agaacgggtggagacgcccgctggg

SEQ ID NO: 2482104 - DNA, 25 bp, Homo sapien
ctccgggcgccagaacgggtggaga

SEQ ID NO: 2482105 - DNA, 25 bp, Homo sapien
ccccggggtacaagcggttcacatg

SEQ ID NO: 2482106 - DNA, 25 bp, Homo sapien
cactttcctggcgacatctgcaggg

SEQ ID NO: 2482107 - DNA, 25 bp, Homo sapien
agtgcagcctggtcctgcctggatc

SEQ ID NO: 2482108 - DNA, 25 bp, Homo sapien
tgcagggccctggtcaccggaaagg

SEQ ID NO: 2482109 - DNA, 25 bp, Homo sapien
gcctggatcaccactttcctggcga

SEQ ID NO: 2482110 - DNA, 25 bp, Homo sapien
gaaagaaggttcggctctggaacca

SEQ ID NO: 2482111 - DNA, 25 bp, Homo sapien
ctgtgcgtgggggaaagaaggttcg

SEQ ID NO: 2482112 - DNA, 25 bp, Homo sapien
tctggaaccagacagcaaagacctg

SEQ ID NO: 2482113 - DNA, 25 bp, Homo sapien
aagaaggttcggctctggaaccaga

SEQ ID NO: 2482114 - DNA, 25 bp, Homo sapien
aggcgcaggtggccgagccgggcgg

SEQ ID NO: 2482115 - DNA, 25 bp, Homo sapien
cggcagaggcgcaggtggccgagcc

SEQ ID NO: 2482116 - DNA, 25 bp, Homo sapien
ctggagcagggccgggccgcaggcg

SEQ ID NO: 2482117 - DNA, 25 bp, Homo sapien
cggcggcagaggcgcaggtggccga

SEQ ID NO: 2482118 - DNA, 25 bp, Homo sapien
gctccaggctgggaccacccagctc

SEQ ID NO: 2482119 - DNA, 25 bp, Homo sapien
cctccacttcacgtaaaggttggtg

SEQ ID NO: 2482120 - DNA, 25 bp, Homo sapien
tcacgtaaaggttggtgttggatcc

SEQ ID NO: 2482121 - DNA, 25 bp, Homo sapien
ttggtgttggatcctcccaaactgt

SEQ ID NO: 2482122 - DNA, 25 bp, Homo sapien
aaaagccagtgtatgcttcctgcga

SEQ ID NO: 2482123 - DNA, 25 bp, Homo sapien
cacacagcctgaactgctgtagggt

SEQ ID NO: 2482124 - DNA, 25 bp, Homo sapien
tgtatgcttcctgcgaaccacacag

SEQ ID NO: 2482125 - DNA, 25 bp, Homo sapien
tgcgaaccacacagcctgaactgct

SEQ ID NO: 2482126 - DNA, 25 bp, Homo sapien
ttctacccctgcacctctcagtcgg

SEQ ID NO: 2482127 - DNA, 25 bp, Homo sapien
atatatcttctacccctgcacctct

SEQ ID NO: 2482128 - DNA, 25 bp, Homo sapien
aaaatatatcttctacccctgcacc

SEQ ID NO: 2482129 - DNA, 25 bp, Homo sapien
cttgcacgcttcttttaaattgaaa

SEQ ID NO: 2482130 - DNA, 25 bp, Homo sapien
aatcaaggctcttgtgcagcctaca

SEQ ID NO: 2482131 - DNA, 25 bp, Homo sapien
cttcaatcaaggctcttgtgcagcc

SEQ ID NO: 2482132 - DNA, 25 bp, Homo sapien
cttgtgcagcctacacagaaaaatg

SEQ ID NO: 2482133 - DNA, 25 bp, Homo sapien
ggctcttgtgcagcctacacagaaa

SEQ ID NO: 2482134 - DNA, 25 bp, Homo sapien
gccacagcttcttcaatgggtccca

SEQ ID NO: 2482135 - DNA, 25 bp, Homo sapien
gccagcttatcagcttttgccacag

SEQ ID NO: 2482136 - DNA, 25 bp, Homo sapien
caccatatagaaggcctgttctggg

SEQ ID NO: 2482137 - DNA, 25 bp, Homo sapien
caatgggtcccaccatatagaaggc

SEQ ID NO: 2482138 - DNA, 25 bp, Homo sapien
ccccatatgacctgtgaagacctca

SEQ ID NO: 2482139 - DNA, 25 bp, Homo sapien
ggggtaccagcttccccatatgacc

SEQ ID NO: 2482140 - DNA, 25 bp, Homo sapien
gaatcctttgatggtctccttcagg

SEQ ID NO: 2482141 - DNA, 25 bp, Homo sapien
caaaatctgctggaatcctttgatg

SEQ ID NO: 2482142 - DNA, 25 bp, Homo sapien
gacacggtcaacttgtcttcctcag

SEQ ID NO: 2482143 - DNA, 25 bp, Homo sapien
tgagacaagaaacgctgtattttcc

SEQ ID NO: 2482144 - DNA, 25 bp, Homo sapien
tattttccgtgcacgggacacggtc

SEQ ID NO: 2482145 - DNA, 25 bp, Homo sapien
tcagaaagttcatccatacccagga

SEQ ID NO: 2482146 - DNA, 25 bp, Homo sapien
tagctctcactagcaattgccagcc

SEQ ID NO: 2482147 - DNA, 25 bp, Homo sapien
tatgagggccctcagccaagaaaga

SEQ ID NO: 2482148 - DNA, 25 bp, Homo sapien
gcattccaaagcgttaagtacctgg

SEQ ID NO: 2482149 - DNA, 25 bp, Homo sapien
aaaaatattgcattccgccgggcgc

SEQ ID NO: 2482150 - DNA, 25 bp, Homo sapien
ccacgggcaacatcgtaatgctcac

SEQ ID NO: 2482151 - DNA, 25 bp, Homo sapien
ggtggagtctagaggatccacagct

SEQ ID NO: 2482152 - DNA, 25 bp, Homo sapien
gatccatgatacgagaggtggagtc

SEQ ID NO: 2482153 - DNA, 25 bp, Homo sapien
tccaaatgggcaaacgtagtagcag

SEQ ID NO: 2482154 - DNA, 25 bp, Homo sapien
caatggcacgcgacagtacagtggt

SEQ ID NO: 2482155 - DNA, 25 bp, Homo sapien
tgcatagtacccatgtcagtggcca

SEQ ID NO: 2482156 - DNA, 25 bp, Homo sapien
atagatcccttcttggtagtggtaa

SEQ ID NO: 2482157 - DNA, 25 bp, Homo sapien
tctttcctgcatagtacccatgtca

SEQ ID NO: 2482158 - DNA, 25 bp, Homo sapien
gtagtggtaattctttcctgcatag

SEQ ID NO: 2482159 - DNA, 25 bp, Homo sapien
cccagtcagagctacccgggcacga

SEQ ID NO: 2482160 - DNA, 25 bp, Homo sapien
ctgggtgaagcgaaagatgttatca

SEQ ID NO: 2482161 - DNA, 25 bp, Homo sapien
aatagcagtacatcttgaccttctt

SEQ ID NO: 2482162 - DNA, 25 bp, Homo sapien
ataaatagcagtacatcttgacctt

SEQ ID NO: 2482163 - DNA, 25 bp, Homo sapien
taaaacctgacaaaggagtagagaa

SEQ ID NO: 2482164 - DNA, 25 bp, Homo sapien
gaagccacatactgaaggttcccaa

SEQ ID NO: 2482165 - DNA, 25 bp, Homo sapien
ttcccaaatcggagaaacgaccaca

SEQ ID NO: 2482166 - DNA, 25 bp, Homo sapien
catacataatcgtaaaacctgacaa

SEQ ID NO: 2482167 - DNA, 25 bp, Homo sapien
gaaacatatgtaccacgtccaatcc

SEQ ID NO: 2482168 - DNA, 25 bp, Homo sapien
tcctggcgtaactaccacgtggaca

SEQ ID NO: 2482169 - DNA, 25 bp, Homo sapien
cagttggcaatagtttcctggcgta

SEQ ID NO: 2482170 - DNA, 25 bp, Homo sapien
taggccctgggacacgaaaatgaaa

SEQ ID NO: 2482171 - DNA, 25 bp, Homo sapien
ccatgatcagtacagtcttgccaac

SEQ ID NO: 2482172 - DNA, 25 bp, Homo sapien
atcattgccttcacgggtcctctca

SEQ ID NO: 2482173 - DNA, 25 bp, Homo sapien
ccaccatgggctttggcgacattgt

SEQ ID NO: 2482174 - DNA, 25 bp, Homo sapien
gcaaacacagagtaaccaccatggg

SEQ ID NO: 2482175 - DNA, 25 bp, Homo sapien
ttctcagaaattgcatctggcttca

SEQ ID NO: 2482176 - DNA, 25 bp, Homo sapien
ctgctttcctaaataagcaaacttc

SEQ ID NO: 2482177 - DNA, 25 bp, Homo sapien
ccttctcagaaattgcatctggctt

SEQ ID NO: 2482178 - DNA, 25 bp, Homo sapien
tctcagaaattgcatctggcttcag

SEQ ID NO: 2482179 - DNA, 25 bp, Homo sapien
gacaaccttgataccagtcaccaga

SEQ ID NO: 2482180 - DNA, 25 bp, Homo sapien
aattttgccacccttggcataggga

SEQ ID NO: 2482181 - DNA, 25 bp, Homo sapien
ggagctagcagatcgacaaccttga

SEQ ID NO: 2482182 - DNA, 25 bp, Homo sapien
accagaatttcctgctcaacactca

SEQ ID NO: 2482183 - DNA, 25 bp, Homo sapien
ccttctgtaccatccatagcaatag

SEQ ID NO: 2482184 - DNA, 25 bp, Homo sapien
ccaatgacattcatgattctgccca

SEQ ID NO: 2482185 - DNA, 25 bp, Homo sapien
tgacattcatgattctgcccaaagt

SEQ ID NO: 2482186 - DNA, 25 bp, Homo sapien
gcaatagtccttactgtgctctcac

SEQ ID NO: 2482187 - DNA, 25 bp, Homo sapien
tctcagtacctaaatgtggcttcag

SEQ ID NO: 2482188 - DNA, 25 bp, Homo sapien
tccttctcagtacctaaatgtggct

SEQ ID NO: 2482189 - DNA, 25 bp, Homo sapien
cagaagaacgaaagtcattttgata

SEQ ID NO: 2482190 - DNA, 25 bp, Homo sapien
cagtacctaaatgtggcttcagcaa

SEQ ID NO: 2482191 - DNA, 25 bp, Homo sapien
aatgaccgccacgatgcgcccggtg

SEQ ID NO: 2482192 - DNA, 25 bp, Homo sapien
catttagaattggtggtagtccctc

SEQ ID NO: 2482193 - DNA, 25 bp, Homo sapien
cgaaggagatgtttgcgccgcatag

SEQ ID NO: 2482194 - DNA, 25 bp, Homo sapien
tcatcaaactggacgtccaccactg

SEQ ID NO: 2482195 - DNA, 25 bp, Homo sapien
agcgatcgataaagcgcctgcacag

SEQ ID NO: 2482196 - DNA, 25 bp, Homo sapien
tacggaacgcgtgtccaagagggaa

SEQ ID NO: 2482197 - DNA, 25 bp, Homo sapien
gccagttaaaggtcatcggaagcca

SEQ ID NO: 2482198 - DNA, 25 bp, Homo sapien
gcacaagaccccatttttcgagagt

SEQ ID NO: 2482199 - DNA, 25 bp, Homo sapien
cccgcaccttttccgtcacacaaag

SEQ ID NO: 2482200 - DNA, 25 bp, Homo sapien
cgcaccttttccgtcacacaaagga

SEQ ID NO: 2482201 - DNA, 25 bp, Homo sapien
tgcccgcaccttttccgtcacacaa

SEQ ID NO: 2482202 - DNA, 25 bp, Homo sapien
ctgcccgcaccttttccgtcacaca

SEQ ID NO: 2482203 - DNA, 25 bp, Homo sapien
gggcggcaaaatggaacgttagctc

SEQ ID NO: 2482204 - DNA, 25 bp, Homo sapien
ttagagagcaagacgcggctccagg

SEQ ID NO: 2482205 - DNA, 25 bp, Homo sapien
gaagaaacctcctatgggtgtccca

SEQ ID NO: 2482206 - DNA, 25 bp, Homo sapien
caggcatccttttaacaccacggat

SEQ ID NO: 2482207 - DNA, 25 bp, Homo sapien
gagcagcggccacccgacccacaaa

SEQ ID NO: 2482208 - DNA, 25 bp, Homo sapien
cgtcggagcggcccgcagtaagagc

SEQ ID NO: 2482209 - DNA, 25 bp, Homo sapien
tgaaggggtgagtctccgcaaggcc

SEQ ID NO: 2482210 - DNA, 25 bp, Homo sapien
caggatggaccgccgtcggagcggc

SEQ ID NO: 2482211 - DNA, 25 bp, Homo sapien
ggctgcagcaaccgcagccgcctgc

SEQ ID NO: 2482212 - DNA, 25 bp, Homo sapien
tgaaggctgcagcaaccgcagccgc

SEQ ID NO: 2482213 - DNA, 25 bp, Homo sapien
ctgaaggctgcagcaaccgcagccg

SEQ ID NO: 2482214 - DNA, 25 bp, Homo sapien
aaggctgcagcaaccgcagccgcct

SEQ ID NO: 2482215 - DNA, 25 bp, Homo sapien
aggcctacgctgcagtaggcaggtc

SEQ ID NO: 2482216 - DNA, 25 bp, Homo sapien
ccgttgaggcgaggcctacgctgca

SEQ ID NO: 2482217 - DNA, 25 bp, Homo sapien
ctgccgttgaggcgaggcctacgct

SEQ ID NO: 2482218 - DNA, 25 bp, Homo sapien
ctacgctgcagtaggcaggtccatt

SEQ ID NO: 2482219 - DNA, 25 bp, Homo sapien
gcaaagtgcatctacaatatgctat

SEQ ID NO: 2482220 - DNA, 25 bp, Homo sapien
tgcaaagtgcatctacaatatgcta

SEQ ID NO: 2482221 - DNA, 25 bp, Homo sapien
aaatgtacagactctcaagcaacaa

SEQ ID NO: 2482222 - DNA, 25 bp, Homo sapien
gtacagactctcaagcaacaatgta

SEQ ID NO: 2482223 - DNA, 25 bp, Homo sapien
gactctcaagcaacaatgtacagct

SEQ ID NO: 2482224 - DNA, 25 bp, Homo sapien
agactctcaagcaacaatgtacagc

SEQ ID NO: 2482225 - DNA, 25 bp, Homo sapien
ggttaccagtaaggtgtcagccaat

SEQ ID NO: 2482226 - DNA, 25 bp, Homo sapien
gaatagcaggttaccagtaaggtgt

SEQ ID NO: 2482227 - DNA, 25 bp, Homo sapien
cagtaaggtgtcagccaatttgttc

SEQ ID NO: 2482228 - DNA, 25 bp, Homo sapien
gcaggttaccagtaaggtgtcagcc

SEQ ID NO: 2482229 - DNA, 25 bp, Homo sapien
tttcatcatcactgtcttgtgaatc

SEQ ID NO: 2482230 - DNA, 25 bp, Homo sapien
ccgagctgatcaaatattcgtttgc

SEQ ID NO: 2482231 - DNA, 25 bp, Homo sapien
aaaataaagttaccgagctgatcaa

SEQ ID NO: 2482232 - DNA, 25 bp, Homo sapien
aaatattcgtttgctaactgaacag

SEQ ID NO: 2482233 - DNA, 25 bp, Homo sapien
tgctaactgaacagtttacctaaaa

SEQ ID NO: 2482234 - DNA, 25 bp, Homo sapien
catctgttttatcggtctctgacca

SEQ ID NO: 2482235 - DNA, 25 bp, Homo sapien
tccatctgttttatcggtctctgac

SEQ ID NO: 2482236 - DNA, 25 bp, Homo sapien
cgcctcccaatgtccatctgtttta

SEQ ID NO: 2482237 - DNA, 25 bp, Homo sapien
gttttatcggtctctgaccaatcct

SEQ ID NO: 2482238 - DNA, 25 bp, Homo sapien
taggaatggtctacggtacaaccag

SEQ ID NO: 2482239 - DNA, 25 bp, Homo sapien
gcccggcctaaactgactgttataa

SEQ ID NO: 2482240 - DNA, 25 bp, Homo sapien
gtgaatctatataaaaccatttgta

SEQ ID NO: 2482241 - DNA, 25 bp, Homo sapien
ccattcgtcaaaaatgggcacattt

SEQ ID NO: 2482242 - DNA, 25 bp, Homo sapien
tctacttctggtaaatctacatcct

SEQ ID NO: 2482243 - DNA, 25 bp, Homo sapien
atcatctgctccatctacttctggt

SEQ ID NO: 2482244 - DNA, 25 bp, Homo sapien
tacttctggtaaatctacatcctca

SEQ ID NO: 2482245 - DNA, 25 bp, Homo sapien
catctgctccatctacttctggtaa

SEQ ID NO: 2482246 - DNA, 25 bp, Homo sapien
tgttcagcctaaaagtatcattcag

SEQ ID NO: 2482247 - DNA, 25 bp, Homo sapien
tgggattcatttgtagttgcacagc

SEQ ID NO: 2482248 - DNA, 25 bp, Homo sapien
aaaatctgccttatgtgacaaaaca

SEQ ID NO: 2482249 - DNA, 25 bp, Homo sapien
tctgaagcacgtcatgctatgtgaa

SEQ ID NO: 2482250 - DNA, 25 bp, Homo sapien
taaatgtaccaagcataacgctacg

SEQ ID NO: 2482251 - DNA, 25 bp, Homo sapien
caagagatatgtaagagataacaac

SEQ ID NO: 2482252 - DNA, 25 bp, Homo sapien
taacgctacgtgcttaagataaaca

SEQ ID NO: 2482253 - DNA, 25 bp, Homo sapien
acaaaaacagtgttataaggctggg

SEQ ID NO: 2482254 - DNA, 25 bp, Homo sapien
gctaattttgttcacgccttctggg

SEQ ID NO: 2482255 - DNA, 25 bp, Homo sapien
ttaatttagagacggcgttttgctc

SEQ ID NO: 2482256 - DNA, 25 bp, Homo sapien
tattaatttagagacggcgttttgc

SEQ ID NO: 2482257 - DNA, 25 bp, Homo sapien
ccagctaattttgttcacgccttct

SEQ ID NO: 2482258 - DNA, 25 bp, Homo sapien
acaggtaccgtgtgcttcgaatggg

SEQ ID NO: 2482259 - DNA, 25 bp, Homo sapien
tattaaattgactacatagacaggt

SEQ ID NO: 2482260 - DNA, 25 bp, Homo sapien
tgactacatagacaggtaccgtgtg

SEQ ID NO: 2482261 - DNA, 25 bp, Homo sapien
tacatagacaggtaccgtgtgcttc

SEQ ID NO: 2482262 - DNA, 25 bp, Homo sapien
gtctttccaattattgaagtcgaca

SEQ ID NO: 2482263 - DNA, 25 bp, Homo sapien
aattattgaagtcgacactaagcca

SEQ ID NO: 2482264 - DNA, 25 bp, Homo sapien
ttgaagtcgacactaagccaattaa

SEQ ID NO: 2482265 - DNA, 25 bp, Homo sapien
ctttccaattattgaagtcgacact

SEQ ID NO: 2482266 - DNA, 25 bp, Homo sapien
tatggcaatgcaacccagacttggg

SEQ ID NO: 2482267 - DNA, 25 bp, Homo sapien
ttcctgggacaacaccgtactgatg

SEQ ID NO: 2482268 - DNA, 25 bp, Homo sapien
gacttgggcgcaagtatttctccca

SEQ ID NO: 2482269 - DNA, 25 bp, Homo sapien
gggtcttgtttaccctcttcaggca

SEQ ID NO: 2482270 - DNA, 25 bp, Homo sapien
gtacaaaagattctacaccagttaa

SEQ ID NO: 2482271 - DNA, 25 bp, Homo sapien
gatcacacttcgtattaaaactgag

SEQ ID NO: 2482272 - DNA, 25 bp, Homo sapien
gaacatgaggctttatacttagctg

SEQ ID NO: 2482273 - DNA, 25 bp, Homo sapien
aaacacagccatattccttacatca

SEQ ID NO: 2482274 - DNA, 25 bp, Homo sapien
gattctccttttcgtaaacaacata

SEQ ID NO: 2482275 - DNA, 25 bp, Homo sapien
tgatctgtccgttcttttatgcttg

SEQ ID NO: 2482276 - DNA, 25 bp, Homo sapien
gttaaccttggccatgactggccag

SEQ ID NO: 2482277 - DNA, 25 bp, Homo sapien
acataaaattgatctgtccgttctt

SEQ ID NO: 2482278 - DNA, 25 bp, Homo sapien
tcttagataagggaagccttggccg

SEQ ID NO: 2482279 - DNA, 25 bp, Homo sapien
tctttcctgcacacgataaacagaa

SEQ ID NO: 2482280 - DNA, 25 bp, Homo sapien
tacatgatagaaaatagcttgtcat

SEQ ID NO: 2482281 - DNA, 25 bp, Homo sapien
aacatgcccttgactactaaaaact

SEQ ID NO: 2482282 - DNA, 25 bp, Homo sapien
ctgtttcctcacaactaaaatttgg

SEQ ID NO: 2482283 - DNA, 25 bp, Homo sapien
taaaaaagatgagacgagcctcaag

SEQ ID NO: 2482284 - DNA, 25 bp, Homo sapien
caaggatactactctaagcccaaac

SEQ ID NO: 2482285 - DNA, 25 bp, Homo sapien
gccgggatcgctccattgtactgca

SEQ ID NO: 2482286 - DNA, 25 bp, Homo sapien
atttggatcaatacagtgaaaaaga

SEQ ID NO: 2482287 - DNA, 25 bp, Homo sapien
ttaaaattatcacttcctccgagac

SEQ ID NO: 2482288 - DNA, 25 bp, Homo sapien
ttggatcaatacagtgaaaaagatc

SEQ ID NO: 2482289 - DNA, 25 bp, Homo sapien
aaaattatcacttcctccgagacaa

SEQ ID NO: 2482290 - DNA, 25 bp, Homo sapien
cagttgtgtgaatgactattttaca

SEQ ID NO: 2482291 - DNA, 25 bp, Homo sapien
tcattggataaaaagcttaacttac

SEQ ID NO: 2482292 - DNA, 25 bp, Homo sapien
aagacaagccagtcaaagttattca

SEQ ID NO: 2482293 - DNA, 25 bp, Homo sapien
aagaaagaattaagcctcttcaaag

SEQ ID NO: 2482294 - DNA, 25 bp, Homo sapien
aacatccttactgtcttcaacacaa

SEQ ID NO: 2482295 - DNA, 25 bp, Homo sapien
tcaacacaaaattcaatgaagacat

SEQ ID NO: 2482296 - DNA, 25 bp, Homo sapien
ttcgatcgtaccactttgcagaagc

SEQ ID NO: 2482297 - DNA, 25 bp, Homo sapien
agacatagtcccttcgatcgtacca

SEQ ID NO: 2482298 - DNA, 25 bp, Homo sapien
gaagatagctatctgcaaaccaagg

SEQ ID NO: 2482299 - DNA, 25 bp, Homo sapien
tacaaaaaattcaggcgggcacagt

SEQ ID NO: 2482300 - DNA, 25 bp, Homo sapien
tatgaaagccttagcaggccaggcg

SEQ ID NO: 2482301 - DNA, 25 bp, Homo sapien
gattttcagcctcgtggaaatgtga

SEQ ID NO: 2482302 - DNA, 25 bp, Homo sapien
tagtactacagctgattacagaaga

SEQ ID NO: 2482303 - DNA, 25 bp, Homo sapien
cctgagcaatgagtatgtgggagac

SEQ ID NO: 2482304 - DNA, 25 bp, Homo sapien
aaatatcttacggtttccctgagca

SEQ ID NO: 2482305 - DNA, 25 bp, Homo sapien
cacaggccacaggactagcaggttt

SEQ ID NO: 2482306 - DNA, 25 bp, Homo sapien
aggcatgtgccgtcaggcctagcaa

SEQ ID NO: 2482307 - DNA, 25 bp, Homo sapien
cctttcaaatgagggaatacatatg

SEQ ID NO: 2482308 - DNA, 25 bp, Homo sapien
tcaggataagtgtagggcaccctcc

SEQ ID NO: 2482309 - DNA, 25 bp, Homo sapien
gactgcaacggcgtcatcttgcctc

SEQ ID NO: 2482310 - DNA, 25 bp, Homo sapien
caatcctatttcagacagccccaat

SEQ ID NO: 2482311 - DNA, 25 bp, Homo sapien
ggacagcccctttatgattctcaaa

SEQ ID NO: 2482312 - DNA, 25 bp, Homo sapien
catgctaccacacacccaggttatt

SEQ ID NO: 2482313 - DNA, 25 bp, Homo sapien
tgatctcgtgaaccccaatcctatt

SEQ ID NO: 2482314 - DNA, 25 bp, Homo sapien
taacagcgagattggttctgaacag

SEQ ID NO: 2482315 - DNA, 25 bp, Homo sapien
aagagacaatcgctaaccacaagac

SEQ ID NO: 2482316 - DNA, 25 bp, Homo sapien
caataaaacactggcttgcactcaa

SEQ ID NO: 2482317 - DNA, 25 bp, Homo sapien
agtgcacaggaaatcaatactgaac

SEQ ID NO: 2482318 - DNA, 25 bp, Homo sapien
caagataggtccgaaattaagagct

SEQ ID NO: 2482319 - DNA, 25 bp, Homo sapien
gattcgttcctacacagctgaatga

SEQ ID NO: 2482320 - DNA, 25 bp, Homo sapien
gattcttaagactggatgacgaccc

SEQ ID NO: 2482321 - DNA, 25 bp, Homo sapien
gaaaatgcgaagtagcaccctctgg

SEQ ID NO: 2482322 - DNA, 25 bp, Homo sapien
gctgtgctctagaagcttgttccca

SEQ ID NO: 2482323 - DNA, 25 bp, Homo sapien
gatttctagccaatatactcagcct

SEQ ID NO: 2482324 - DNA, 25 bp, Homo sapien
gataaactcgcttcagcctcacgca

SEQ ID NO: 2482325 - DNA, 25 bp, Homo sapien
tatttttgcagcgacgcggtttctc

SEQ ID NO: 2482326 - DNA, 25 bp, Homo sapien
caaagacataaagtcactcccctct

SEQ ID NO: 2482327 - DNA, 25 bp, Homo sapien
agacataaagtcactcccctcttct

SEQ ID NO: 2482328 - DNA, 25 bp, Homo sapien
ttccaaagacataaagtcactcccc

SEQ ID NO: 2482329 - DNA, 25 bp, Homo sapien
tccaaagacataaagtcactcccct

SEQ ID NO: 2482330 - DNA, 25 bp, Homo sapien
gacgactgtaggttaattaaatgcc

SEQ ID NO: 2482331 - DNA, 25 bp, Homo sapien
caaatttaagatctttgggacgact

SEQ ID NO: 2482332 - DNA, 25 bp, Homo sapien
ggctttcctttatcatcgtaaaatg

SEQ ID NO: 2482333 - DNA, 25 bp, Homo sapien
gaagactgccatagaatctgtattc

SEQ ID NO: 2482334 - DNA, 25 bp, Homo sapien
tatctttccaaagtcgacacgtgcg

SEQ ID NO: 2482335 - DNA, 25 bp, Homo sapien
acgtgcggaactacctgctcaatgg

SEQ ID NO: 2482336 - DNA, 25 bp, Homo sapien
gaaacacagaaaatgtccgtatctt

SEQ ID NO: 2482337 - DNA, 25 bp, Homo sapien
tacctgctcaatggtaactcctcct

SEQ ID NO: 2482338 - DNA, 25 bp, Homo sapien
ttaggaggcggactggaagtaccca

SEQ ID NO: 2482339 - DNA, 25 bp, Homo sapien
aagcggctgagttttggcaacctcc

SEQ ID NO: 2482340 - DNA, 25 bp, Homo sapien
tttcaagagactggagttaggaggc

SEQ ID NO: 2482341 - DNA, 25 bp, Homo sapien
ggcaacctcccgtgttttcaagaga

SEQ ID NO: 2482342 - DNA, 25 bp, Homo sapien
tccgccaggcacctggcggcaccca

SEQ ID NO: 2482343 - DNA, 25 bp, Homo sapien
acccaccacaggtgcactcgactca

SEQ ID NO: 2482344 - DNA, 25 bp, Homo sapien
accacaggtgcactcgactcagggc

SEQ ID NO: 2482345 - DNA, 25 bp, Homo sapien
ctgcagctcacggcgaggtccgcgt

SEQ ID NO: 2482346 - DNA, 25 bp, Homo sapien
caccaccgatgcgagaaaggctagg

SEQ ID NO: 2482347 - DNA, 25 bp, Homo sapien
gcgagtaacccagacagccaaaggg

SEQ ID NO: 2482348 - DNA, 25 bp, Homo sapien
cacgaaggttcacgcttcagggcgc

SEQ ID NO: 2482349 - DNA, 25 bp, Homo sapien
tggcgagcagctaccgggagcttaa

SEQ ID NO: 2482350 - DNA, 25 bp, Homo sapien
gctccggcgcggctttctagagata

SEQ ID NO: 2482351 - DNA, 25 bp, Homo sapien
tggcgactccgctttttctctccgg

SEQ ID NO: 2482352 - DNA, 25 bp, Homo sapien
gctggtgacgcagcaaaatgcccgg

SEQ ID NO: 2482353 - DNA, 25 bp, Homo sapien
aatgaacgtgcgtgcgtgcaaacga

SEQ ID NO: 2482354 - DNA, 25 bp, Homo sapien
gctgcaacctctgcctcccggcttc

SEQ ID NO: 2482355 - DNA, 25 bp, Homo sapien
tctcggcttgctgcaacctctgcct

SEQ ID NO: 2482356 - DNA, 25 bp, Homo sapien
acaggtgcctgacaccaggctcggc

SEQ ID NO: 2482357 - DNA, 25 bp, Homo sapien
cccaggcgggtgtgcaatgacgcga

SEQ ID NO: 2482358 - DNA, 25 bp, Homo sapien
tttgtgctcccacagtacagcctac

SEQ ID NO: 2482359 - DNA, 25 bp, Homo sapien
tttatgatagaaacagtacaaattt

SEQ ID NO: 2482360 - DNA, 25 bp, Homo sapien
atttatgatagaaacagtacaaatt

SEQ ID NO: 2482361 - DNA, 25 bp, Homo sapien
tatttatgatagaaacagtacaaat

SEQ ID NO: 2482362 - DNA, 25 bp, Homo sapien
taaaactcttacaggcaaatcagga

SEQ ID NO: 2482363 - DNA, 25 bp, Homo sapien
tatacggcaactcagaagaggctct

SEQ ID NO: 2482364 - DNA, 25 bp, Homo sapien
gtcactcataattggtcagggcaga

SEQ ID NO: 2482365 - DNA, 25 bp, Homo sapien
ttaggccactaaaacctatacggca

SEQ ID NO: 2482366 - DNA, 25 bp, Homo sapien
tgttgttcttcagggctcggactgc

SEQ ID NO: 2482367 - DNA, 25 bp, Homo sapien
ggctcggactgcctttgctctcgac

SEQ ID NO: 2482368 - DNA, 25 bp, Homo sapien
aatcgcatttacaatatcattactg

SEQ ID NO: 2482369 - DNA, 25 bp, Homo sapien
cataatcgcatttacaatatcatta

SEQ ID NO: 2482370 - DNA, 25 bp, Homo sapien
taacttctacacctgtttcatcgac

SEQ ID NO: 2482371 - DNA, 25 bp, Homo sapien
gtgacatgaccaattcaatgtcctt

SEQ ID NO: 2482372 - DNA, 25 bp, Homo sapien
tgcttgtgacatgaccaattcaatg

SEQ ID NO: 2482373 - DNA, 25 bp, Homo sapien
ccaattcaatgtccttaacttctac

SEQ ID NO: 2482374 - DNA, 25 bp, Homo sapien
ctgctagttgtgcttgctgggataa

SEQ ID NO: 2482375 - DNA, 25 bp, Homo sapien
gtgcttgctgggataaatcttcgat

SEQ ID NO: 2482376 - DNA, 25 bp, Homo sapien
cagctgctagttgtgcttgctggga

SEQ ID NO: 2482377 - DNA, 25 bp, Homo sapien
tctcagcagctgctagttgtgcttg

SEQ ID NO: 2482378 - DNA, 25 bp, Homo sapien
ccctcacagtagaaagagtagttgt

SEQ ID NO: 2482379 - DNA, 25 bp, Homo sapien
tctctgtaaacccattcaggtaact

SEQ ID NO: 2482380 - DNA, 25 bp, Homo sapien
ccatgtgagtagattagcagtcttt

SEQ ID NO: 2482381 - DNA, 25 bp, Homo sapien
gagtagttgtttaggtttagagcag

SEQ ID NO: 2482382 - DNA, 25 bp, Homo sapien
ctggatgtaatggatagcccttcca

SEQ ID NO: 2482383 - DNA, 25 bp, Homo sapien
ggatagcccttccataacagagaac

SEQ ID NO: 2482384 - DNA, 25 bp, Homo sapien
actatctgacgcaaaatgtcagcag

SEQ ID NO: 2482385 - DNA, 25 bp, Homo sapien
taacagagaactatctgacgcaaaa

SEQ ID NO: 2482386 - DNA, 25 bp, Homo sapien
aactatgtaagtatctgaagcaggg

SEQ ID NO: 2482387 - DNA, 25 bp, Homo sapien
cccaaaaactatgtaagtatctgaa

SEQ ID NO: 2482388 - DNA, 25 bp, Homo sapien
tatgtaagtatctgaagcagggctc

SEQ ID NO: 2482389 - DNA, 25 bp, Homo sapien
agtaactcctgtaacctgccgaaga

SEQ ID NO: 2482390 - DNA, 25 bp, Homo sapien
tataaaggtgcttcataagatcctg

SEQ ID NO: 2482391 - DNA, 25 bp, Homo sapien
gctcaatgtaatgtccgtctcccag

SEQ ID NO: 2482392 - DNA, 25 bp, Homo sapien
ttagaagcagcctaaagaagcaagg

SEQ ID NO: 2482393 - DNA, 25 bp, Homo sapien
tcaacgggattctaccactactaag

SEQ ID NO: 2482394 - DNA, 25 bp, Homo sapien
cttttcactccgactctgttttgct

SEQ ID NO: 2482395 - DNA, 25 bp, Homo sapien
cactccgactctgttttgctttact

SEQ ID NO: 2482396 - DNA, 25 bp, Homo sapien
tcatcaatttcagctgctgccgcca

SEQ ID NO: 2482397 - DNA, 25 bp, Homo sapien
ttccgtgccttcttttcactccgac

SEQ ID NO: 2482398 - DNA, 25 bp, Homo sapien
tgttgtgtggttgcctgggtggaat

SEQ ID NO: 2482399 - DNA, 25 bp, Homo sapien
caagctctggtactgattcatcact

SEQ ID NO: 2482400 - DNA, 25 bp, Homo sapien
gcttgttgtgtggttgcctgggtgg

SEQ ID NO: 2482401 - DNA, 25 bp, Homo sapien
tgggtggaatcctgttcttcaagct

SEQ ID NO: 2482402 - DNA, 25 bp, Homo sapien
tgccctggactagaggtgaatgcct

SEQ ID NO: 2482403 - DNA, 25 bp, Homo sapien
tgaatgcctcatgctagacctaaga

SEQ ID NO: 2482404 - DNA, 25 bp, Homo sapien
taagagaaggtacttcaccacagcc

SEQ ID NO: 2482405 - DNA, 25 bp, Homo sapien
accaactggcttgtgtgaagtcagc

SEQ ID NO: 2482406 - DNA, 25 bp, Homo sapien
aagggagtccctgggcaactggtca

SEQ ID NO: 2482407 - DNA, 25 bp, Homo sapien
tagtccgggccacattacacaaaaa

SEQ ID NO: 2482408 - DNA, 25 bp, Homo sapien
gcagattcactggagaaagcggcgc

SEQ ID NO: 2482409 - DNA, 25 bp, Homo sapien
aaagcggcgcatcacagggttagta

SEQ ID NO: 2482410 - DNA, 25 bp, Homo sapien
gacagggattccagcagatttaggg

SEQ ID NO: 2482411 - DNA, 25 bp, Homo sapien
tcttcgtaacaggttgcttggcaga

SEQ ID NO: 2482412 - DNA, 25 bp, Homo sapien
gagggtgattccaacaccagcccag

SEQ ID NO: 2482413 - DNA, 25 bp, Homo sapien
ttgacgaggaccgactggaaaggca

SEQ ID NO: 2482414 - DNA, 25 bp, Homo sapien
tggggagggagcaagaggcagagag

SEQ ID NO: 2482415 - DNA, 25 bp, Homo sapien
ggggagggagcaagaggcagagaga

SEQ ID NO: 2482416 - DNA, 25 bp, Homo sapien
ctggggagggagcaagaggcagaga

SEQ ID NO: 2482417 - DNA, 25 bp, Homo sapien
gacagatgctgattcaggtttagga

SEQ ID NO: 2482418 - DNA, 25 bp, Homo sapien
ccattcttagctgagggatctgggc

SEQ ID NO: 2482419 - DNA, 25 bp, Homo sapien
ttagatgcttgaggaacagtggccc

SEQ ID NO: 2482420 - DNA, 25 bp, Homo sapien
tctgtggacctttccgagtgggagc

SEQ ID NO: 2482421 - DNA, 25 bp, Homo sapien
tgaagtagcagaactctttttggtc

SEQ ID NO: 2482422 - DNA, 25 bp, Homo sapien
tgctgggcccttttcgggggatgga

SEQ ID NO: 2482423 - DNA, 25 bp, Homo sapien
aagtcacagctggtggaatgaggag

SEQ ID NO: 2482424 - DNA, 25 bp, Homo sapien
agaagtcacagctggtggaatgagg

SEQ ID NO: 2482425 - DNA, 25 bp, Homo sapien
cttctttgggggttggaattgctgg

SEQ ID NO: 2482426 - DNA, 25 bp, Homo sapien
gcttctttgggggttggaattgctg

SEQ ID NO: 2482427 - DNA, 25 bp, Homo sapien
gaagagtcgctgttggggcaatggg

SEQ ID NO: 2482428 - DNA, 25 bp, Homo sapien
ttgggggctagagttgctggggtct

SEQ ID NO: 2482429 - DNA, 25 bp, Homo sapien
ttttaggggagggaacagtcatagc

SEQ ID NO: 2482430 - DNA, 25 bp, Homo sapien
ggaacagtcatagctgggggaatga

SEQ ID NO: 2482431 - DNA, 25 bp, Homo sapien
gaagtggcaacttgtttgggggctg

SEQ ID NO: 2482432 - DNA, 25 bp, Homo sapien
gaggaagaagtggcaacttgtttgg

SEQ ID NO: 2482433 - DNA, 25 bp, Homo sapien
aggaagaagtggcaacttgtttggg

SEQ ID NO: 2482434 - DNA, 25 bp, Homo sapien
agaagtggcaacttgtttgggggct

SEQ ID NO: 2482435 - DNA, 25 bp, Homo sapien
ggtggctgcgccttctctggtgact

SEQ ID NO: 2482436 - DNA, 25 bp, Homo sapien
tgcgccttctctggtgactggagtt

SEQ ID NO: 2482437 - DNA, 25 bp, Homo sapien
ccttctctggtgactggagttgctg

SEQ ID NO: 2482438 - DNA, 25 bp, Homo sapien
ggctgcgccttctctggtgactgga

SEQ ID NO: 2482439 - DNA, 25 bp, Homo sapien
ttgggggatggggtagctagacctc

SEQ ID NO: 2482440 - DNA, 25 bp, Homo sapien
gggtagctgctggacttcctttggg

SEQ ID NO: 2482441 - DNA, 25 bp, Homo sapien
agctgctggacttcctttgggggag

SEQ ID NO: 2482442 - DNA, 25 bp, Homo sapien
tagctgctggacttcctttggggga

SEQ ID NO: 2482443 - DNA, 25 bp, Homo sapien
ggtagctgctggacttcctttgggg

SEQ ID NO: 2482444 - DNA, 25 bp, Homo sapien
tttggcagttgtgggagccaccccg

SEQ ID NO: 2482445 - DNA, 25 bp, Homo sapien
ctttggcagttgtgggagccacccc

SEQ ID NO: 2482446 - DNA, 25 bp, Homo sapien
ccggcagggtcagcactttccaaag

SEQ ID NO: 2482447 - DNA, 25 bp, Homo sapien
cccggcagggtcagcactttccaaa

SEQ ID NO: 2482448 - DNA, 25 bp, Homo sapien
ggctgcctggactaacggtaataca

SEQ ID NO: 2482449 - DNA, 25 bp, Homo sapien
acagtagggtctttcttggtggtga

SEQ ID NO: 2482450 - DNA, 25 bp, Homo sapien
ctttgctagggtggcttcaggagaa

SEQ ID NO: 2482451 - DNA, 25 bp, Homo sapien
gagaagaggatgtactttggaaaga

SEQ ID NO: 2482452 - DNA, 25 bp, Homo sapien
gccacaggtgccataaccaaggcag

SEQ ID NO: 2482453 - DNA, 25 bp, Homo sapien
tatcctcagagtggttgctacttga

SEQ ID NO: 2482454 - DNA, 25 bp, Homo sapien
tgctacttgagtagaaggctctttg

SEQ ID NO: 2482455 - DNA, 25 bp, Homo sapien
tacttatgggacctgatgacattgg

SEQ ID NO: 2482456 - DNA, 25 bp, Homo sapien
ggtagtagtaggtgctgcagcaatt

SEQ ID NO: 2482457 - DNA, 25 bp, Homo sapien
tggttccaacagaagaaacgggcat

SEQ ID NO: 2482458 - DNA, 25 bp, Homo sapien
taggtgctgcagcaattgtacaggg

SEQ ID NO: 2482459 - DNA, 25 bp, Homo sapien
tacaggggttagtcaccacaagtgg

SEQ ID NO: 2482460 - DNA, 25 bp, Homo sapien
tagggtctgacaaagcactaggacc

SEQ ID NO: 2482461 - DNA, 25 bp, Homo sapien
gcccctgtggaagaatgatctacag

SEQ ID NO: 2482462 - DNA, 25 bp, Homo sapien
tgatctacagaaatggtcttcactg

SEQ ID NO: 2482463 - DNA, 25 bp, Homo sapien
tagctacatttaaggagccagaagg

SEQ ID NO: 2482464 - DNA, 25 bp, Homo sapien
tgggacccgcagtcttttgagaaga

SEQ ID NO: 2482465 - DNA, 25 bp, Homo sapien
caaaggtagggctgttccagaggat

SEQ ID NO: 2482466 - DNA, 25 bp, Homo sapien
gattagggactacctcagagggaac

SEQ ID NO: 2482467 - DNA, 25 bp, Homo sapien
tactgactatacatggagggctggg

SEQ ID NO: 2482468 - DNA, 25 bp, Homo sapien
ctctgtagcagggacggtttctgtg

SEQ ID NO: 2482469 - DNA, 25 bp, Homo sapien
cctgctctgtagcagggacggtttc

SEQ ID NO: 2482470 - DNA, 25 bp, Homo sapien
cggtttctgtggcttcgccgggcat

SEQ ID NO: 2482471 - DNA, 25 bp, Homo sapien
tggggctgcggcaactcctgctctg

SEQ ID NO: 2482472 - DNA, 25 bp, Homo sapien
ttgattgggatacattcacttgccc

SEQ ID NO: 2482473 - DNA, 25 bp, Homo sapien
aaaatcgtgagggtgtttggtgaca

SEQ ID NO: 2482474 - DNA, 25 bp, Homo sapien
tgcccaacccggagataagtattct

SEQ ID NO: 2482475 - DNA, 25 bp, Homo sapien
tgagggtgtttggtgacaaccttcc

SEQ ID NO: 2482476 - DNA, 25 bp, Homo sapien
gggcctcctggactacgtttgccga

SEQ ID NO: 2482477 - DNA, 25 bp, Homo sapien
ctggactacgtttgccgactttggg

SEQ ID NO: 2482478 - DNA, 25 bp, Homo sapien
tcctggactacgtttgccgactttg

SEQ ID NO: 2482479 - DNA, 25 bp, Homo sapien
gcctcctggactacgtttgccgact

SEQ ID NO: 2482480 - DNA, 25 bp, Homo sapien
taggaaccctgtggcccagtaaagc

SEQ ID NO: 2482481 - DNA, 25 bp, Homo sapien
gcagaccccattttgtccggaggcc

SEQ ID NO: 2482482 - DNA, 25 bp, Homo sapien
cagtagcggcacagaaagtacttac

SEQ ID NO: 2482483 - DNA, 25 bp, Homo sapien
ttagcccgaaagaaaggcggatggc

SEQ ID NO: 2482484 - DNA, 25 bp, Homo sapien
taagaatttagaacgggacgcgcag

SEQ ID NO: 2482485 - DNA, 25 bp, Homo sapien
gagactgcattcacaacattggagg

SEQ ID NO: 2482486 - DNA, 25 bp, Homo sapien
taggatccgattccgggtcaagagc

SEQ ID NO: 2482487 - DNA, 25 bp, Homo sapien
catttaaaagctgctggaccctctc

SEQ ID NO: 2482488 - DNA, 25 bp, Homo sapien
actcctggcctcagtcgggtgtggt

SEQ ID NO: 2482489 - DNA, 25 bp, Homo sapien
ccttccaggaaccttgacactctcc

SEQ ID NO: 2482490 - DNA, 25 bp, Homo sapien
cttccaggaaccttgacactctcct

SEQ ID NO: 2482491 - DNA, 25 bp, Homo sapien
tgtcgcccagtggctgtgatctcag

SEQ ID NO: 2482492 - DNA, 25 bp, Homo sapien
tgcacttggccaggaaatcttttca

SEQ ID NO: 2482493 - DNA, 25 bp, Homo sapien
tttactttgaggtttaagacacata

SEQ ID NO: 2482494 - DNA, 25 bp, Homo sapien
gctaggattactgtatgcaccacca

SEQ ID NO: 2482495 - DNA, 25 bp, Homo sapien
gctcttgaagtatttgatctgtggt

SEQ ID NO: 2482496 - DNA, 25 bp, Homo sapien
ggttgaaggcagaagatatccacaa

SEQ ID NO: 2482497 - DNA, 25 bp, Homo sapien
tatccacaatggtttgaggagctct

SEQ ID NO: 2482498 - DNA, 25 bp, Homo sapien
atccacaatggtttgaggagctctg

SEQ ID NO: 2482499 - DNA, 25 bp, Homo sapien
gatacaaaggacttaatacggccag

SEQ ID NO: 2482500 - DNA, 25 bp, Homo sapien
cataggctgagctagtatggaacag

SEQ ID NO: 2482501 - DNA, 25 bp, Homo sapien
aatggcagcttcaaccaggctttcc

SEQ ID NO: 2482502 - DNA, 25 bp, Homo sapien
caagctcagagttgttgttcatcca

SEQ ID NO: 2482503 - DNA, 25 bp, Homo sapien
tggaaatccttctcataccttatgg

SEQ ID NO: 2482504 - DNA, 25 bp, Homo sapien
tggacacaccatatactagattagc

SEQ ID NO: 2482505 - DNA, 25 bp, Homo sapien
tagctgtactacttgatggcttcca

SEQ ID NO: 2482506 - DNA, 25 bp, Homo sapien
tcaagaatgaacaacccttggcctt

SEQ ID NO: 2482507 - DNA, 25 bp, Homo sapien
caaggaggcatgatgttaattcatc

SEQ ID NO: 2482508 - DNA, 25 bp, Homo sapien
cctggccaagttagtacttcttaag

SEQ ID NO: 2482509 - DNA, 25 bp, Homo sapien
cattaaggatagtaagataaatctg

SEQ ID NO: 2482510 - DNA, 25 bp, Homo sapien
ccttatagacctgatacttagaatg

SEQ ID NO: 2482511 - DNA, 25 bp, Homo sapien
tctccttttcgggatttatccagat

SEQ ID NO: 2482512 - DNA, 25 bp, Homo sapien
ctccttttcgggatttatccagatt

SEQ ID NO: 2482513 - DNA, 25 bp, Homo sapien
ttctccttttcgggatttatccaga

SEQ ID NO: 2482514 - DNA, 25 bp, Homo sapien
gagctcgagtgatctcccagcctcg

SEQ ID NO: 2482515 - DNA, 25 bp, Homo sapien
tatgatactctctttcatacaagtc

SEQ ID NO: 2482516 - DNA, 25 bp, Homo sapien
atatgatactctctttcatacaagt

SEQ ID NO: 2482517 - DNA, 25 bp, Homo sapien
aaaattgagatatatgatactctct

SEQ ID NO: 2482518 - DNA, 25 bp, Homo sapien
ggcatccaattcacggcagatgaag

SEQ ID NO: 2482519 - DNA, 25 bp, Homo sapien
ttatgcggccagctaaatttgggat

SEQ ID NO: 2482520 - DNA, 25 bp, Homo sapien
gtattgttctattagggcatcgtca

SEQ ID NO: 2482521 - DNA, 25 bp, Homo sapien
tacataacagcaggtgaaaatcttg

SEQ ID NO: 2482522 - DNA, 25 bp, Homo sapien
taaacaccatgatctcttcttggag

SEQ ID NO: 2482523 - DNA, 25 bp, Homo sapien
cttatggtcggaacagtaaatggat

SEQ ID NO: 2482524 - DNA, 25 bp, Homo sapien
ggtccactttctgcaaatcaatagg

SEQ ID NO: 2482525 - DNA, 25 bp, Homo sapien
aaatcaataggcacagatatgcgac

SEQ ID NO: 2482526 - DNA, 25 bp, Homo sapien
gtaaatggatcaaactggtccactt

SEQ ID NO: 2482527 - DNA, 25 bp, Homo sapien
cttgaacctggaaggcagaggctgc

SEQ ID NO: 2482528 - DNA, 25 bp, Homo sapien
cttgggagggtgaggcagagaattg

SEQ ID NO: 2482529 - DNA, 25 bp, Homo sapien
ctgcagtgagccaagatcgcgccac

SEQ ID NO: 2482530 - DNA, 25 bp, Homo sapien
tacttgggagggtgaggcagagaat

SEQ ID NO: 2482531 - DNA, 25 bp, Homo sapien
ggaaaacagtactggagcataatct

SEQ ID NO: 2482532 - DNA, 25 bp, Homo sapien
tttgctgacattgatatccagccgt

SEQ ID NO: 2482533 - DNA, 25 bp, Homo sapien
ctcttcagtagatgattgattcctt

SEQ ID NO: 2482534 - DNA, 25 bp, Homo sapien
atccagccgtggaaaacagtactgg

SEQ ID NO: 2482535 - DNA, 25 bp, Homo sapien
tttcttcaagtgctcccaacgctga

SEQ ID NO: 2482536 - DNA, 25 bp, Homo sapien
ttcttcaagtgctcccaacgctgaa

SEQ ID NO: 2482537 - DNA, 25 bp, Homo sapien
atgggtcattaaggaacagactcat

SEQ ID NO: 2482538 - DNA, 25 bp, Homo sapien
gatgggtcattaaggaacagactca

SEQ ID NO: 2482539 - DNA, 25 bp, Homo sapien
acagaaatgatcacgggaaaggata

SEQ ID NO: 2482540 - DNA, 25 bp, Homo sapien
cagaaatgatcacgggaaaggatat

SEQ ID NO: 2482541 - DNA, 25 bp, Homo sapien
agggctaaaatcttatcccagcttt

SEQ ID NO: 2482542 - DNA, 25 bp, Homo sapien
aacaagggctaaaatcttatcccag

SEQ ID NO: 2482543 - DNA, 25 bp, Homo sapien
gaatatcttgattaaccaaggcata

SEQ ID NO: 2482544 - DNA, 25 bp, Homo sapien
gagaatatcttgattaaccaaggca

SEQ ID NO: 2482545 - DNA, 25 bp, Homo sapien
aggcacatgccggtaaatcagacac

SEQ ID NO: 2482546 - DNA, 25 bp, Homo sapien
caactaacttgtcgtgtgatgccaa

SEQ ID NO: 2482547 - DNA, 25 bp, Homo sapien
ctgtgagacaggtagagtgcatgct

SEQ ID NO: 2482548 - DNA, 25 bp, Homo sapien
gatagcaaggtaactctaaaggcac

SEQ ID NO: 2482549 - DNA, 25 bp, Homo sapien
aggctcaaatactcaactatcccag

SEQ ID NO: 2482550 - DNA, 25 bp, Homo sapien
aaggctcaaatactcaactatccca

SEQ ID NO: 2482551 - DNA, 25 bp, Homo sapien
ggctcaaatactcaactatcccaga

SEQ ID NO: 2482552 - DNA, 25 bp, Homo sapien
gctcaaatactcaactatcccagaa

SEQ ID NO: 2482553 - DNA, 25 bp, Homo sapien
tcatcacagacccaacaatgaacac

SEQ ID NO: 2482554 - DNA, 25 bp, Homo sapien
gattcatcacagacccaacaatgaa

SEQ ID NO: 2482555 - DNA, 25 bp, Homo sapien
attcatcacagacccaacaatgaac

SEQ ID NO: 2482556 - DNA, 25 bp, Homo sapien
tgattcatcacagacccaacaatga

SEQ ID NO: 2482557 - DNA, 25 bp, Homo sapien
acttgaccccattcagaaactgctg

SEQ ID NO: 2482558 - DNA, 25 bp, Homo sapien
cttgaccccattcagaaactgctga

SEQ ID NO: 2482559 - DNA, 25 bp, Homo sapien
gaccccattcagaaactgctgatac

SEQ ID NO: 2482560 - DNA, 25 bp, Homo sapien
ttgaccccattcagaaactgctgat

SEQ ID NO: 2482561 - DNA, 25 bp, Homo sapien
gctctgtcaatgatgcgtatggcca

SEQ ID NO: 2482562 - DNA, 25 bp, Homo sapien
ccttcaatgctctgtcaatgatgcg

SEQ ID NO: 2482563 - DNA, 25 bp, Homo sapien
caatgctctgtcaatgatgcgtatg

SEQ ID NO: 2482564 - DNA, 25 bp, Homo sapien
tgctctgtcaatgatgcgtatggcc

SEQ ID NO: 2482565 - DNA, 25 bp, Homo sapien
gataccacccaccctaacagcaaga

SEQ ID NO: 2482566 - DNA, 25 bp, Homo sapien
ataccacccaccctaacagcaagac

SEQ ID NO: 2482567 - DNA, 25 bp, Homo sapien
cccaccctaacagcaagacacacag

SEQ ID NO: 2482568 - DNA, 25 bp, Homo sapien
accctaacagcaagacacacagtgc

SEQ ID NO: 2482569 - DNA, 25 bp, Homo sapien
atcgtcatagtctgtcatgtcaatg

SEQ ID NO: 2482570 - DNA, 25 bp, Homo sapien
tcatagtctgtcatgtcaatgtcaa

SEQ ID NO: 2482571 - DNA, 25 bp, Homo sapien
catagtctgtcatgtcaatgtcaaa

SEQ ID NO: 2482572 - DNA, 25 bp, Homo sapien
cgtcatagtctgtcatgtcaatgtc

SEQ ID NO: 2482573 - DNA, 25 bp, Homo sapien
attggtagcgaatgtaaatatcatc

SEQ ID NO: 2482574 - DNA, 25 bp, Homo sapien
tcacggtgttgaaagtaattcttta

SEQ ID NO: 2482575 - DNA, 25 bp, Homo sapien
aggattggtagcgaatgtaaatatc

SEQ ID NO: 2482576 - DNA, 25 bp, Homo sapien
tgaatgaaaattcacggtgttgaaa

SEQ ID NO: 2482577 - DNA, 25 bp, Homo sapien
cattccgtatttgctagggaacggt

SEQ ID NO: 2482578 - DNA, 25 bp, Homo sapien
aatttgaaagcagttaccattccgt

SEQ ID NO: 2482579 - DNA, 25 bp, Homo sapien
cccctatgctcaacaccgtggtaga

SEQ ID NO: 2482580 - DNA, 25 bp, Homo sapien
cactcggcccgagaagatgttttta

SEQ ID NO: 2482581 - DNA, 25 bp, Homo sapien
gtttaagcagctcgggcagctcggt

SEQ ID NO: 2482582 - DNA, 25 bp, Homo sapien
agctcggtggggtcaaacgtctcca

SEQ ID NO: 2482583 - DNA, 25 bp, Homo sapien
ccagcgatagtactgagagtaggga

SEQ ID NO: 2482584 - DNA, 25 bp, Homo sapien
tccaccgtagttgagccagcgatag

SEQ ID NO: 2482585 - DNA, 25 bp, Homo sapien
cgcggaactcgccacggtaaggatt

SEQ ID NO: 2482586 - DNA, 25 bp, Homo sapien
accacaggaattggcgggaacagca

SEQ ID NO: 2482587 - DNA, 25 bp, Homo sapien
taaggattaccacaggaattggcgg

SEQ ID NO: 2482588 - DNA, 25 bp, Homo sapien
tcgccacggtaaggattaccacagg

SEQ ID NO: 2482589 - DNA, 25 bp, Homo sapien
cttttgaggtagagtcccgctcagt

SEQ ID NO: 2482590 - DNA, 25 bp, Homo sapien
tcttttgaggtagagtcccgctcag

SEQ ID NO: 2482591 - DNA, 25 bp, Homo sapien
ttcttttgaggtagagtcccgctca

SEQ ID NO: 2482592 - DNA, 25 bp, Homo sapien
ggcgccactgtactgcagactggcg

SEQ ID NO: 2482593 - DNA, 25 bp, Homo sapien
gagatggcgccactgtactgcagac

SEQ ID NO: 2482594 - DNA, 25 bp, Homo sapien
ctgtactgcagactggcgacagagt

SEQ ID NO: 2482595 - DNA, 25 bp, Homo sapien
gatggcgccactgtactgcagactg

SEQ ID NO: 2482596 - DNA, 25 bp, Homo sapien
cagtgagtcagctccttgtatgatc

SEQ ID NO: 2482597 - DNA, 25 bp, Homo sapien
ggtccttcagatcagctgacctcat

SEQ ID NO: 2482598 - DNA, 25 bp, Homo sapien
cagctccttgtatgatccttcagaa

SEQ ID NO: 2482599 - DNA, 25 bp, Homo sapien
tttcactggtgtgcaggacctgaaa

SEQ ID NO: 2482600 - DNA, 25 bp, Homo sapien
ggatggcggccgggaagaggtgctc

SEQ ID NO: 2482601 - DNA, 25 bp, Homo sapien
gggatggcggccgggaagaggtgct

SEQ ID NO: 2482602 - DNA, 25 bp, Homo sapien
cggggtcgcggctgggccgaggcgc

SEQ ID NO: 2482603 - DNA, 25 bp, Homo sapien
agacggggtcgcggctgggccgagg

SEQ ID NO: 2482604 - DNA, 25 bp, Homo sapien
aatctgacagaatttgtataatact

SEQ ID NO: 2482605 - DNA, 25 bp, Homo sapien
aaatctgacagaatttgtataatac

SEQ ID NO: 2482606 - DNA, 25 bp, Homo sapien
taaatctgacagaatttgtataata

SEQ ID NO: 2482607 - DNA, 25 bp, Homo sapien
tctgagatagcagaggtcctttttc

SEQ ID NO: 2482608 - DNA, 25 bp, Homo sapien
gagatagcagaggtcctttttcgtc

SEQ ID NO: 2482609 - DNA, 25 bp, Homo sapien
tagtcagatttatatctgagatagc

SEQ ID NO: 2482610 - DNA, 25 bp, Homo sapien
tagcagaggtcctttttcgtctgag

SEQ ID NO: 2482611 - DNA, 25 bp, Homo sapien
cattatctggctaaccagagacatt

SEQ ID NO: 2482612 - DNA, 25 bp, Homo sapien
acattatctggctaaccagagacat

SEQ ID NO: 2482613 - DNA, 25 bp, Homo sapien
ttatctggctaaccagagacattga

SEQ ID NO: 2482614 - DNA, 25 bp, Homo sapien
attatctggctaaccagagacattg

SEQ ID NO: 2482615 - DNA, 25 bp, Homo sapien
ctttgcgtatccagctgtcttgcca

SEQ ID NO: 2482616 - DNA, 25 bp, Homo sapien
tgggtggctgcagcgatattctctg

SEQ ID NO: 2482617 - DNA, 25 bp, Homo sapien
gacacatagccagcaccctcaagct

SEQ ID NO: 2482618 - DNA, 25 bp, Homo sapien
gcagcgatattctctgtcttggtga

SEQ ID NO: 2482619 - DNA, 25 bp, Homo sapien
ttgagcattgagcagaaaactgtta

SEQ ID NO: 2482620 - DNA, 25 bp, Homo sapien
ccttgagcattgagcagaaaactgt

SEQ ID NO: 2482621 - DNA, 25 bp, Homo sapien
cttgagcattgagcagaaaactgtt

SEQ ID NO: 2482622 - DNA, 25 bp, Homo sapien
accttgagcattgagcagaaaactg

SEQ ID NO: 2482623 - DNA, 25 bp, Homo sapien
gaagttatgcatattgagggaccca

SEQ ID NO: 2482624 - DNA, 25 bp, Homo sapien
ggtggttagattctcctggaggcaa

SEQ ID NO: 2482625 - DNA, 25 bp, Homo sapien
ggataaccgataccaccttttgtga

SEQ ID NO: 2482626 - DNA, 25 bp, Homo sapien
ggaggcaagattatcccacagtatt

SEQ ID NO: 2482627 - DNA, 25 bp, Homo sapien
tagacactgtccgctggccttggaa

SEQ ID NO: 2482628 - DNA, 25 bp, Homo sapien
ttagacactgtccgctggccttgga

SEQ ID NO: 2482629 - DNA, 25 bp, Homo sapien
agacactgtccgctggccttggaag

SEQ ID NO: 2482630 - DNA, 25 bp, Homo sapien
gacactgtccgctggccttggaagg

SEQ ID NO: 2482631 - DNA, 25 bp, Homo sapien
caatagcatgctccatgctgttgat

SEQ ID NO: 2482632 - DNA, 25 bp, Homo sapien
ccaggccagggttgtagcggatgcg

SEQ ID NO: 2482633 - DNA, 25 bp, Homo sapien
tgtagaggagtttggcatccaggcc

SEQ ID NO: 2482634 - DNA, 25 bp, Homo sapien
cgagggctccgggaaacaatagcat

SEQ ID NO: 2482635 - DNA, 25 bp, Homo sapien
cggaaataatcctctccgtagctgt

SEQ ID NO: 2482636 - DNA, 25 bp, Homo sapien
tagttccctggctcaatgatgcaga

SEQ ID NO: 2482637 - DNA, 25 bp, Homo sapien
tctccttgccgagaatggctgtccg

SEQ ID NO: 2482638 - DNA, 25 bp, Homo sapien
ttcgcatgcgtgactccaggttctc

SEQ ID NO: 2482639 - DNA, 25 bp, Homo sapien
gagaaggcctcaacgccaaacttgg

SEQ ID NO: 2482640 - DNA, 25 bp, Homo sapien
caaacttggagacgcagtagccacc

SEQ ID NO: 2482641 - DNA, 25 bp, Homo sapien
gtcacttcgatcagtcccaccaggt

SEQ ID NO: 2482642 - DNA, 25 bp, Homo sapien
ccattcgttgggaccactgggcagg

SEQ ID NO: 2482643 - DNA, 25 bp, Homo sapien
tgggggtgagatgaaccacacagaa

SEQ ID NO: 2482644 - DNA, 25 bp, Homo sapien
ctgggggtgagatgaaccacacaga

SEQ ID NO: 2482645 - DNA, 25 bp, Homo sapien
atgtagggaactggctgagacagcc

SEQ ID NO: 2482646 - DNA, 25 bp, Homo sapien
tacagcctctagaaggaacacagct

SEQ ID NO: 2482647 - DNA, 25 bp, Homo sapien
tcctggattaacctggtgagcccaa

SEQ ID NO: 2482648 - DNA, 25 bp, Homo sapien
tattaaggcaagtggctcaaggctg

SEQ ID NO: 2482649 - DNA, 25 bp, Homo sapien
cacagcctgtgatgaagacgtactt

SEQ ID NO: 2482650 - DNA, 25 bp, Homo sapien
tgggatccctcctcagtgaagcaag

SEQ ID NO: 2482651 - DNA, 25 bp, Homo sapien
catccagtagggtggtctgcagccg

SEQ ID NO: 2482652 - DNA, 25 bp, Homo sapien
tctgcagccgataggaggtatcccg

SEQ ID NO: 2482653 - DNA, 25 bp, Homo sapien
ctgcaggaaaccacctggaagaaga

SEQ ID NO: 2482654 - DNA, 25 bp, Homo sapien
tccttgaggttctgtaaatgcctct

SEQ ID NO: 2482655 - DNA, 25 bp, Homo sapien
caccttcactccaaagtgggagagc

SEQ ID NO: 2482656 - DNA, 25 bp, Homo sapien
atgcctctcagagccggccatactg

SEQ ID NO: 2482657 - DNA, 25 bp, Homo sapien
gtcctgaagtgaccaggttcaatca

SEQ ID NO: 2482658 - DNA, 25 bp, Homo sapien
agctgcagcaatgctctctgtcttg

SEQ ID NO: 2482659 - DNA, 25 bp, Homo sapien
agcaatgctctctgtcttggtgatg

SEQ ID NO: 2482660 - DNA, 25 bp, Homo sapien
tgcagcaatgctctctgtcttggtg

SEQ ID NO: 2482661 - DNA, 25 bp, Homo sapien
caatgctctctgtcttggtgatgtc

SEQ ID NO: 2482662 - DNA, 25 bp, Homo sapien
ctggtctctcaggagcatattttaa

SEQ ID NO: 2482663 - DNA, 25 bp, Homo sapien
tggtctctcaggagcatattttaaa

SEQ ID NO: 2482664 - DNA, 25 bp, Homo sapien
ggtctctcaggagcatattttaaaa

SEQ ID NO: 2482665 - DNA, 25 bp, Homo sapien
tgcacccaggagcactatttggtcc

SEQ ID NO: 2482666 - DNA, 25 bp, Homo sapien
ggccgcataatggttccagtcccaa

SEQ ID NO: 2482667 - DNA, 25 bp, Homo sapien
caccacgtgtacagggatcttcaga

SEQ ID NO: 2482668 - DNA, 25 bp, Homo sapien
gggattggtgccctactgaccggac

SEQ ID NO: 2482669 - DNA, 25 bp, Homo sapien
catagagccttggccgggcttggag

SEQ ID NO: 2482670 - DNA, 25 bp, Homo sapien
tcatagagccttggccgggcttgga

SEQ ID NO: 2482671 - DNA, 25 bp, Homo sapien
tagagccttggccgggcttggagag

SEQ ID NO: 2482672 - DNA, 25 bp, Homo sapien
gagccttggccgggcttggagagac

SEQ ID NO: 2482673 - DNA, 25 bp, Homo sapien
tggtcaccaacgacagatcctgtgt

SEQ ID NO: 2482674 - DNA, 25 bp, Homo sapien
cagttggtcaccaacgacagatcct

SEQ ID NO: 2482675 - DNA, 25 bp, Homo sapien
gggtggcaggcaatcagcgcatgct

SEQ ID NO: 2482676 - DNA, 25 bp, Homo sapien
ccaacgacagatcctgtgtgcactt

SEQ ID NO: 2482677 - DNA, 25 bp, Homo sapien
tccatttgttcagctgatttcttat

SEQ ID NO: 2482678 - DNA, 25 bp, Homo sapien
gactggaccggtcccaaatctccag

SEQ ID NO: 2482679 - DNA, 25 bp, Homo sapien
tgcaacaaacttctcgccataggcc

SEQ ID NO: 2482680 - DNA, 25 bp, Homo sapien
agcagtcttgaaatagccaggttca

SEQ ID NO: 2482681 - DNA, 25 bp, Homo sapien
aatagccaggttcaatcatagccac

SEQ ID NO: 2482682 - DNA, 25 bp, Homo sapien
gacagagaagcagaggggaaaaact

SEQ ID NO: 2482683 - DNA, 25 bp, Homo sapien
caagacagagaagcagaggggaaaa

SEQ ID NO: 2482684 - DNA, 25 bp, Homo sapien
cagagaagcagaggggaaaaacttc

SEQ ID NO: 2482685 - DNA, 25 bp, Homo sapien
ctgcaagacagagaagcagagggga

SEQ ID NO: 2482686 - DNA, 25 bp, Homo sapien
tatgtccctcacatccagtggatca

SEQ ID NO: 2482687 - DNA, 25 bp, Homo sapien
taccaattccaaagcaaggcagcac

SEQ ID NO: 2482688 - DNA, 25 bp, Homo sapien
catggtggcattccctctgtatgga

SEQ ID NO: 2482689 - DNA, 25 bp, Homo sapien
ggagtttccatattttacacacctg

SEQ ID NO: 2482690 - DNA, 25 bp, Homo sapien
tgacactggagacgttgaccacacg

SEQ ID NO: 2482691 - DNA, 25 bp, Homo sapien
tccagtatggtcacgaagtcctgct

SEQ ID NO: 2482692 - DNA, 25 bp, Homo sapien
gcaggctcagagtcacatcaatcac

SEQ ID NO: 2482693 - DNA, 25 bp, Homo sapien
cctgcttggtgagcaactcattggg

SEQ ID NO: 2482694 - DNA, 25 bp, Homo sapien
gatgagagagcatcactgtgttgtg

SEQ ID NO: 2482695 - DNA, 25 bp, Homo sapien
agatgagagagcatcactgtgttgt

SEQ ID NO: 2482696 - DNA, 25 bp, Homo sapien
aagatgagagagcatcactgtgttg

SEQ ID NO: 2482697 - DNA, 25 bp, Homo sapien
atgagagagcatcactgtgttgtgc

SEQ ID NO: 2482698 - DNA, 25 bp, Homo sapien
gacagagttagggtgcaaatcacat

SEQ ID NO: 2482699 - DNA, 25 bp, Homo sapien
ctggtgggccacaaaacccaggtct

SEQ ID NO: 2482700 - DNA, 25 bp, Homo sapien
ggtgcaaatcacatcccaataaagt

SEQ ID NO: 2482701 - DNA, 25 bp, Homo sapien
ccaataaagtgagggcagactgaca

SEQ ID NO: 2482702 - DNA, 25 bp, Homo sapien
tgtctctcacgcactccttcaccca

SEQ ID NO: 2482703 - DNA, 25 bp, Homo sapien
ctttgtctctcacgcactccttcac

SEQ ID NO: 2482704 - DNA, 25 bp, Homo sapien
ttgtctctcacgcactccttcaccc

SEQ ID NO: 2482705 - DNA, 25 bp, Homo sapien
gtctctcacgcactccttcacccac

SEQ ID NO: 2482706 - DNA, 25 bp, Homo sapien
cagcccgtgatgaacacatacttat

SEQ ID NO: 2482707 - DNA, 25 bp, Homo sapien
acatacttatctctcaggtggctca

SEQ ID NO: 2482708 - DNA, 25 bp, Homo sapien
gctcctttctccgtcagacatgcag

SEQ ID NO: 2482709 - DNA, 25 bp, Homo sapien
gcccgtgatgaacacatacttatct

SEQ ID NO: 2482710 - DNA, 25 bp, Homo sapien
ggctttgcagaggacagacacagac

SEQ ID NO: 2482711 - DNA, 25 bp, Homo sapien
tttgcagaggacagacacagacagg

SEQ ID NO: 2482712 - DNA, 25 bp, Homo sapien
gctttgcagaggacagacacagaca

SEQ ID NO: 2482713 - DNA, 25 bp, Homo sapien
ctttgcagaggacagacacagacag

SEQ ID NO: 2482714 - DNA, 25 bp, Homo sapien
tgtgggggaaaccagagtctggcct

SEQ ID NO: 2482715 - DNA, 25 bp, Homo sapien
ctgtgggggaaaccagagtctggcc

SEQ ID NO: 2482716 - DNA, 25 bp, Homo sapien
cagaactcacacaggcttacacaca

SEQ ID NO: 2482717 - DNA, 25 bp, Homo sapien
tcacacaggaacatacacagaactc

SEQ ID NO: 2482718 - DNA, 25 bp, Homo sapien
ggcaatgtgcccctagtctcctgat

SEQ ID NO: 2482719 - DNA, 25 bp, Homo sapien
gatactatcttcctactgggcaatg

SEQ ID NO: 2482720 - DNA, 25 bp, Homo sapien
tgtctctacaaagctccgataccaa

SEQ ID NO: 2482721 - DNA, 25 bp, Homo sapien
gataccaacactcctggtccatgac

SEQ ID NO: 2482722 - DNA, 25 bp, Homo sapien
aaggccttattgggtagctacccat

SEQ ID NO: 2482723 - DNA, 25 bp, Homo sapien
gaccttctgaacatagaaaggcctt

SEQ ID NO: 2482724 - DNA, 25 bp, Homo sapien
aaggattgcaggatcccacagggag

SEQ ID NO: 2482725 - DNA, 25 bp, Homo sapien
cccagtgtgactgatgcagaaaatg

SEQ ID NO: 2482726 - DNA, 25 bp, Homo sapien
ggaacaggttccctcctgctataat

SEQ ID NO: 2482727 - DNA, 25 bp, Homo sapien
tgaaaactagggcacggtcaggctg

SEQ ID NO: 2482728 - DNA, 25 bp, Homo sapien
catggcatccgccaggaaggtagac

SEQ ID NO: 2482729 - DNA, 25 bp, Homo sapien
agcatggcatccgccaggaaggtag

SEQ ID NO: 2482730 - DNA, 25 bp, Homo sapien
ctagtggagcatggcatccgccagg

SEQ ID NO: 2482731 - DNA, 25 bp, Homo sapien
agtggagcatggcatccgccaggaa

SEQ ID NO: 2482732 - DNA, 25 bp, Homo sapien
gggtggcaggcggtcagcacatgct

SEQ ID NO: 2482733 - DNA, 25 bp, Homo sapien
aggtagagaagcttggtgtcccagc

SEQ ID NO: 2482734 - DNA, 25 bp, Homo sapien
ccagccagctgtgtagcaagtgcag

SEQ ID NO: 2482735 - DNA, 25 bp, Homo sapien
ggcaggcggtcagcacatgctccat

SEQ ID NO: 2482736 - DNA, 25 bp, Homo sapien
ttttgaccaaaggctcctaggtgct

SEQ ID NO: 2482737 - DNA, 25 bp, Homo sapien
caccaatgatagatttgtattgcat

SEQ ID NO: 2482738 - DNA, 25 bp, Homo sapien
gtcaccaatgatagatttgtattgc

SEQ ID NO: 2482739 - DNA, 25 bp, Homo sapien
ttgaccaaaggctcctaggtgcttt

SEQ ID NO: 2482740 - DNA, 25 bp, Homo sapien
tccttgaggttctgtaaatgcctct

SEQ ID NO: 2482741 - DNA, 25 bp, Homo sapien
ctgaagtgaccaggttcaatcacag

SEQ ID NO: 2482742 - DNA, 25 bp, Homo sapien
atgcctctcagagccggccatactg

SEQ ID NO: 2482743 - DNA, 25 bp, Homo sapien
gtcctgaagtgaccaggttcaatca

SEQ ID NO: 2482744 - DNA, 25 bp, Homo sapien
ttcactccaaagtgggagagctccc

SEQ ID NO: 2482745 - DNA, 25 bp, Homo sapien
cactccaaagtgggagagctccctc

SEQ ID NO: 2482746 - DNA, 25 bp, Homo sapien
cttcactccaaagtgggagagctcc

SEQ ID NO: 2482747 - DNA, 25 bp, Homo sapien
tcactccaaagtgggagagctccct

SEQ ID NO: 2482748 - DNA, 25 bp, Homo sapien
gctggagaggttgaccatgcagccc

SEQ ID NO: 2482749 - DNA, 25 bp, Homo sapien
gaaacccggcctgcgatgctggaga

SEQ ID NO: 2482750 - DNA, 25 bp, Homo sapien
tacttggagatgcagtagcctgcac

SEQ ID NO: 2482751 - DNA, 25 bp, Homo sapien
caaaaagtgaaacccggcctgcgat

SEQ ID NO: 2482752 - DNA, 25 bp, Homo sapien
gcatcctgtttaggagagatacact

SEQ ID NO: 2482753 - DNA, 25 bp, Homo sapien
gaaaacagaatgagggtccaacaaa

SEQ ID NO: 2482754 - DNA, 25 bp, Homo sapien
taaagccaatgctgtgaagtgcatg

SEQ ID NO: 2482755 - DNA, 25 bp, Homo sapien
tcaaggtttgcacccatttcaaggt

SEQ ID NO: 2482756 - DNA, 25 bp, Homo sapien
agggattgaggtggtccctctgtcc

SEQ ID NO: 2482757 - DNA, 25 bp, Homo sapien
aacaaacaggcactaggagggattg

SEQ ID NO: 2482758 - DNA, 25 bp, Homo sapien
gaaacaaacaggcactaggagggat

SEQ ID NO: 2482759 - DNA, 25 bp, Homo sapien
caaacaggcactaggagggattgag

SEQ ID NO: 2482760 - DNA, 25 bp, Homo sapien
catgatgaacacgtacttgtctctc

SEQ ID NO: 2482761 - DNA, 25 bp, Homo sapien
gttgtctggccagtagcttcctgaa

SEQ ID NO: 2482762 - DNA, 25 bp, Homo sapien
gcgtgagtcacagctcatgatgaac

SEQ ID NO: 2482763 - DNA, 25 bp, Homo sapien
tcccgcaagcctgtgcattcagttg

SEQ ID NO: 2482764 - DNA, 25 bp, Homo sapien
tctttgtcatgtgctggctgcccta

SEQ ID NO: 2482765 - DNA, 25 bp, Homo sapien
tgtgcctcagtgtcgaccgctatgt

SEQ ID NO: 2482766 - DNA, 25 bp, Homo sapien
cttttgaaacgtacagcacctgggc

SEQ ID NO: 2482767 - DNA, 25 bp, Homo sapien
gatatgcgtcaactggcgcggctca

SEQ ID NO: 2482768 - DNA, 25 bp, Homo sapien
atcaccaagggtgatagccagcctg

SEQ ID NO: 2482769 - DNA, 25 bp, Homo sapien
cctaaggaccagaccaaggcgggca

SEQ ID NO: 2482770 - DNA, 25 bp, Homo sapien
atcatcaccaagggtgatagccagc

SEQ ID NO: 2482771 - DNA, 25 bp, Homo sapien
tcctaaggaccagaccaaggcgggc

SEQ ID NO: 2482772 - DNA, 25 bp, Homo sapien
gacgtatctgactgggaccaactga

SEQ ID NO: 2482773 - DNA, 25 bp, Homo sapien
caagtatgcaagatcgagggcccta

SEQ ID NO: 2482774 - DNA, 25 bp, Homo sapien
taactagccatggactacgggaact

SEQ ID NO: 2482775 - DNA, 25 bp, Homo sapien
acaggttacccgactaggacagaca

SEQ ID NO: 2482776 - DNA, 25 bp, Homo sapien
tgcttgggagctccccgtggctctg

SEQ ID NO: 2482777 - DNA, 25 bp, Homo sapien
tcttagatatcagcatcctggctgc

SEQ ID NO: 2482778 - DNA, 25 bp, Homo sapien
tccccgtggctctgccgggacccag

SEQ ID NO: 2482779 - DNA, 25 bp, Homo sapien
tggctgctgcttgggagctccccgt

SEQ ID NO: 2482780 - DNA, 25 bp, Homo sapien
ttagatggtcaaggatgtggccccg

SEQ ID NO: 2482781 - DNA, 25 bp, Homo sapien
tgacgtggtagcgataggcagcctc

SEQ ID NO: 2482782 - DNA, 25 bp, Homo sapien
actgtgcagcggtacatgagggccc

SEQ ID NO: 2482783 - DNA, 25 bp, Homo sapien
cgagcggcctcgaaagaacttgtgg

SEQ ID NO: 2482784 - DNA, 25 bp, Homo sapien
tgaaattacctccttatcagcacag

SEQ ID NO: 2482785 - DNA, 25 bp, Homo sapien
ctatgaaattacctccttatcagca

SEQ ID NO: 2482786 - DNA, 25 bp, Homo sapien
ttacctccttatcagcacagttaat

SEQ ID NO: 2482787 - DNA, 25 bp, Homo sapien
aattacctccttatcagcacagtta

SEQ ID NO: 2482788 - DNA, 25 bp, Homo sapien
ccgccgccgcttcacacaaaggccc

SEQ ID NO: 2482789 - DNA, 25 bp, Homo sapien
cgccgcttcacacaaaggccccggc

SEQ ID NO: 2482790 - DNA, 25 bp, Homo sapien
gcttcacacaaaggccccggcccgc

SEQ ID NO: 2482791 - DNA, 25 bp, Homo sapien
gccgccgcttcacacaaaggccccg

SEQ ID NO: 2482792 - DNA, 25 bp, Homo sapien
tattctacagtcaatgcccattggg

SEQ ID NO: 2482793 - DNA, 25 bp, Homo sapien
tgtaggacactacaggaactctagg

SEQ ID NO: 2482794 - DNA, 25 bp, Homo sapien
cctaatgcagtccaggagtccggaa

SEQ ID NO: 2482795 - DNA, 25 bp, Homo sapien
ttcactatgcagtttccacaccagg

SEQ ID NO: 2482796 - DNA, 25 bp, Homo sapien
tatatcctgtaaaaaagtcccactg

SEQ ID NO: 2482797 - DNA, 25 bp, Homo sapien
ccaaagatgtaggaaccaagttcat

SEQ ID NO: 2482798 - DNA, 25 bp, Homo sapien
tttacattactctacacacctgtgt

SEQ ID NO: 2482799 - DNA, 25 bp, Homo sapien
gaaccaagttcatgccatcctagca

SEQ ID NO: 2482800 - DNA, 25 bp, Homo sapien
caaggtgccctactatgaatgctcc

SEQ ID NO: 2482801 - DNA, 25 bp, Homo sapien
caatgatctgtgttgatccatctca

SEQ ID NO: 2482802 - DNA, 25 bp, Homo sapien
acctaacaggttgggaatgctccct

SEQ ID NO: 2482803 - DNA, 25 bp, Homo sapien
cagctcccagaaaccttatgtccta

SEQ ID NO: 2482804 - DNA, 25 bp, Homo sapien
tatgaaagctgcaattatgggtccc

SEQ ID NO: 2482805 - DNA, 25 bp, Homo sapien
tcagctgccgtccatgatccagagg

SEQ ID NO: 2482806 - DNA, 25 bp, Homo sapien
tatttcagggcaaatctatgagctt

SEQ ID NO: 2482807 - DNA, 25 bp, Homo sapien
gtgtacaaacacacgtgcctctaag

SEQ ID NO: 2482808 - DNA, 25 bp, Homo sapien
gctgggcattggcagtgtatttcag

SEQ ID NO: 2482809 - DNA, 25 bp, Homo sapien
tcttgattcacatccgtaggagagt

SEQ ID NO: 2482810 - DNA, 25 bp, Homo sapien
gggacgttctcttgattcacatccg

SEQ ID NO: 2482811 - DNA, 25 bp, Homo sapien
tctcgggggatacttgaggatgcca

SEQ ID NO: 2482812 - DNA, 25 bp, Homo sapien
gatgccaaagctggggacgttctct

SEQ ID NO: 2482813 - DNA, 25 bp, Homo sapien
tgtggatccaagctgattgggatga

SEQ ID NO: 2482814 - DNA, 25 bp, Homo sapien
ctgttcccagggaagactttcctgt

SEQ ID NO: 2482815 - DNA, 25 bp, Homo sapien
tggatccaagctgattgggatgaag

SEQ ID NO: 2482816 - DNA, 25 bp, Homo sapien
cctgtggatccaagctgattgggat

SEQ ID NO: 2482817 - DNA, 25 bp, Homo sapien
tggacgctcctcttgcccataagtc

SEQ ID NO: 2482818 - DNA, 25 bp, Homo sapien
ggacgctcctcttgcccataagtcc

SEQ ID NO: 2482819 - DNA, 25 bp, Homo sapien
tcctcttgcccataagtcccacaaa

SEQ ID NO: 2482820 - DNA, 25 bp, Homo sapien
ctcttgcccataagtcccacaaaga

SEQ ID NO: 2482821 - DNA, 25 bp, Homo sapien
ctcgggagatgttgattccttagga

SEQ ID NO: 2482822 - DNA, 25 bp, Homo sapien
tctcgggagatgttgattccttagg

SEQ ID NO: 2482823 - DNA, 25 bp, Homo sapien
tcgggagatgttgattccttaggat

SEQ ID NO: 2482824 - DNA, 25 bp, Homo sapien
ttctcgggagatgttgattccttag

SEQ ID NO: 2482825 - DNA, 25 bp, Homo sapien
ggctttgagcaatccctccagagat

SEQ ID NO: 2482826 - DNA, 25 bp, Homo sapien
tgagtggcttttgaagagtctctgg

SEQ ID NO: 2482827 - DNA, 25 bp, Homo sapien
gcagctggtagagatctggatccct

SEQ ID NO: 2482828 - DNA, 25 bp, Homo sapien
ctcagggctttgagcaatccctcca

SEQ ID NO: 2482829 - DNA, 25 bp, Homo sapien
tacagacagccccaaagctctgagc

SEQ ID NO: 2482830 - DNA, 25 bp, Homo sapien
ggatggctgtgaatagcagcatgat

SEQ ID NO: 2482831 - DNA, 25 bp, Homo sapien
ctgtgaatagcagcatgatcctcat

SEQ ID NO: 2482832 - DNA, 25 bp, Homo sapien
ccccaaagctctgagctaggctgaa

SEQ ID NO: 2482833 - DNA, 25 bp, Homo sapien
cccccaactccactgtccaagccct

SEQ ID NO: 2482834 - DNA, 25 bp, Homo sapien
cccaactccactgtccaagccctgg

SEQ ID NO: 2482835 - DNA, 25 bp, Homo sapien
agcccccaactccactgtccaagcc

SEQ ID NO: 2482836 - DNA, 25 bp, Homo sapien
ccaactccactgtccaagccctggt

SEQ ID NO: 2482837 - DNA, 25 bp, Homo sapien
tctggcaggatcaaggaactggcta

SEQ ID NO: 2482838 - DNA, 25 bp, Homo sapien
caggatcaaggaactggctaggacc

SEQ ID NO: 2482839 - DNA, 25 bp, Homo sapien
tgcctgctcccctcacacactggtg

SEQ ID NO: 2482840 - DNA, 25 bp, Homo sapien
aactggctaggaccgctgcctgctc

SEQ ID NO: 2482841 - DNA, 25 bp, Homo sapien
ccgagtggaggggatctaggaaggc

SEQ ID NO: 2482842 - DNA, 25 bp, Homo sapien
gggatctaggaaggctgcagtcact

SEQ ID NO: 2482843 - DNA, 25 bp, Homo sapien
ctgcaaagagagaaaccgagtggag

SEQ ID NO: 2482844 - DNA, 25 bp, Homo sapien
gaggggatctaggaaggctgcagtc

SEQ ID NO: 2482845 - DNA, 25 bp, Homo sapien
attgcttccctttttcctcagagtt

SEQ ID NO: 2482846 - DNA, 25 bp, Homo sapien
gatctcttaattgcttccctttttc

SEQ ID NO: 2482847 - DNA, 25 bp, Homo sapien
taattgcttccctttttcctcagag

SEQ ID NO: 2482848 - DNA, 25 bp, Homo sapien
ttgatctcttaattgcttccctttt

SEQ ID NO: 2482849 - DNA, 25 bp, Homo sapien
gcttatttctcacccaagggagaga

SEQ ID NO: 2482850 - DNA, 25 bp, Homo sapien
tctgcttatttctcacccaagggag

SEQ ID NO: 2482851 - DNA, 25 bp, Homo sapien
agaaccaggatcagagccgagagcc

SEQ ID NO: 2482852 - DNA, 25 bp, Homo sapien
tctctgacctttcaagcctcttgtt

SEQ ID NO: 2482853 - DNA, 25 bp, Homo sapien
cagatgatgtccctggcctagagga

SEQ ID NO: 2482854 - DNA, 25 bp, Homo sapien
gagtccagggtccttagcagctcct

SEQ ID NO: 2482855 - DNA, 25 bp, Homo sapien
tgttgcagctatagagtccccaagt

SEQ ID NO: 2482856 - DNA, 25 bp, Homo sapien
gaacacccaccctttatttgagcca

SEQ ID NO: 2482857 - DNA, 25 bp, Homo sapien
tgggaaagtgacgacaatttgggcc

SEQ ID NO: 2482858 - DNA, 25 bp, Homo sapien
gcttctgaaaatgaccagacacttc

SEQ ID NO: 2482859 - DNA, 25 bp, Homo sapien
aaatgcaggatagggagcggcagct

SEQ ID NO: 2482860 - DNA, 25 bp, Homo sapien
ctgaaaatgaccagacacttcactg

SEQ ID NO: 2482861 - DNA, 25 bp, Homo sapien
tggccagcatgatagccggccgtga

SEQ ID NO: 2482862 - DNA, 25 bp, Homo sapien
aagttaatcagttctccctggccag

SEQ ID NO: 2482863 - DNA, 25 bp, Homo sapien
gctcagacagcagattaatctgcag

SEQ ID NO: 2482864 - DNA, 25 bp, Homo sapien
tgtgccagaagcacgtggcttgtgc

SEQ ID NO: 2482865 - DNA, 25 bp, Homo sapien
ggaagctacttttggaggagagaac

SEQ ID NO: 2482866 - DNA, 25 bp, Homo sapien
ctgcgggttggaggaagctactttt

SEQ ID NO: 2482867 - DNA, 25 bp, Homo sapien
gaggaagctacttttggaggagaga

SEQ ID NO: 2482868 - DNA, 25 bp, Homo sapien
ggctgcgggttggaggaagctactt

SEQ ID NO: 2482869 - DNA, 25 bp, Homo sapien
caagccatgcgccacgatcagaggg

SEQ ID NO: 2482870 - DNA, 25 bp, Homo sapien
gttcaggaggaagcaactgccatct

SEQ ID NO: 2482871 - DNA, 25 bp, Homo sapien
cagagggggattagtgctggttcag

SEQ ID NO: 2482872 - DNA, 25 bp, Homo sapien
gggtagtttaatccccaagccatgc

SEQ ID NO: 2482873 - DNA, 25 bp, Homo sapien
ccttttttttgtagcgtagcttgct

SEQ ID NO: 2482874 - DNA, 25 bp, Homo sapien
ctccaagcaatgactcccctttttt

SEQ ID NO: 2482875 - DNA, 25 bp, Homo sapien
tttttgtagcgtagcttgctgttgt

SEQ ID NO: 2482876 - DNA, 25 bp, Homo sapien
tttttttgtagcgtagcttgctgtt

SEQ ID NO: 2482877 - DNA, 25 bp, Homo sapien
gcagggccctggacgaccttgacag

SEQ ID NO: 2482878 - DNA, 25 bp, Homo sapien
cctggacgaccttgacagccacact

SEQ ID NO: 2482879 - DNA, 25 bp, Homo sapien
ccctggacgaccttgacagccacac

SEQ ID NO: 2482880 - DNA, 25 bp, Homo sapien
gggccctggacgaccttgacagcca

SEQ ID NO: 2482881 - DNA, 25 bp, Homo sapien
gccgcccctcacccccagttcatgg

SEQ ID NO: 2482882 - DNA, 25 bp, Homo sapien
gcccctcacccccagttcatggcct

SEQ ID NO: 2482883 - DNA, 25 bp, Homo sapien
taagccgcccctcacccccagttca

SEQ ID NO: 2482884 - DNA, 25 bp, Homo sapien
cctcacccccagttcatggcctcac

SEQ ID NO: 2482885 - DNA, 25 bp, Homo sapien
taagctgcctctgcgtggcatccag

SEQ ID NO: 2482886 - DNA, 25 bp, Homo sapien
tttggtcagcagttcaatcacatgc

SEQ ID NO: 2482887 - DNA, 25 bp, Homo sapien
cagcacagcccggtacattttggtc

SEQ ID NO: 2482888 - DNA, 25 bp, Homo sapien
gtcacggtgactgtaagctgcctct

SEQ ID NO: 2482889 - DNA, 25 bp, Homo sapien
aaaaatagcaggaaagggattcatt

SEQ ID NO: 2482890 - DNA, 25 bp, Homo sapien
agagcgaaaggtctggtccccatca

SEQ ID NO: 2482891 - DNA, 25 bp, Homo sapien
agggacatcaaaggcccagagcgaa

SEQ ID NO: 2482892 - DNA, 25 bp, Homo sapien
aggagcacctgagggacatcaaagg

SEQ ID NO: 2482893 - DNA, 25 bp, Homo sapien
caccttctccagtccaaggcttgcc

SEQ ID NO: 2482894 - DNA, 25 bp, Homo sapien
cagtccaaggcttgccccacccagc

SEQ ID NO: 2482895 - DNA, 25 bp, Homo sapien
ccagtccaaggcttgccccacccag

SEQ ID NO: 2482896 - DNA, 25 bp, Homo sapien
ttctccagtccaaggcttgccccac

SEQ ID NO: 2482897 - DNA, 25 bp, Homo sapien
acaattttggcctgggacttcttgg

SEQ ID NO: 2482898 - DNA, 25 bp, Homo sapien
cagccacattgtctagcccaatgac

SEQ ID NO: 2482899 - DNA, 25 bp, Homo sapien
catccttgaggctggtgactgacac

SEQ ID NO: 2482900 - DNA, 25 bp, Homo sapien
tgtgagaatcacatggcccttggtc

SEQ ID NO: 2482901 - DNA, 25 bp, Homo sapien
ttcacggcctctgccatcagaacag

SEQ ID NO: 2482902 - DNA, 25 bp, Homo sapien
atgtagtcaccacagaatggaatgg

SEQ ID NO: 2482903 - DNA, 25 bp, Homo sapien
ttgccacgattgaccttcttcacgg

SEQ ID NO: 2482904 - DNA, 25 bp, Homo sapien
ttcccttgcagcccaatgtagtcac

SEQ ID NO: 2482905 - DNA, 25 bp, Homo sapien
cacagagcacagtccaggaccaaga

SEQ ID NO: 2482906 - DNA, 25 bp, Homo sapien
aacacatgggaggtgtgcagcgcga

SEQ ID NO: 2482907 - DNA, 25 bp, Homo sapien
caccacctggggagttgttagaaag

SEQ ID NO: 2482908 - DNA, 25 bp, Homo sapien
tttgagaactgctgcgtgatggaac

SEQ ID NO: 2482909 - DNA, 25 bp, Homo sapien
gagcttttccctcaggatctctacc

SEQ ID NO: 2482910 - DNA, 25 bp, Homo sapien
gggacagctgatcccggaacctctt

SEQ ID NO: 2482911 - DNA, 25 bp, Homo sapien
tctctacctgcttcggggacagctg

SEQ ID NO: 2482912 - DNA, 25 bp, Homo sapien
gaacagttcactggcacagagcttt

SEQ ID NO: 2482913 - DNA, 25 bp, Homo sapien
catgtcttgtctaagacgtttgtgg

SEQ ID NO: 2482914 - DNA, 25 bp, Homo sapien
gaggcacttgtagggggcggctggc

SEQ ID NO: 2482915 - DNA, 25 bp, Homo sapien
tctaagacgtttgtggatggcaaat

SEQ ID NO: 2482916 - DNA, 25 bp, Homo sapien
gcggctggccatgtcttgtctaaga

SEQ ID NO: 2482917 - DNA, 25 bp, Homo sapien
cttgtagatgaaatctgccaaggtg

SEQ ID NO: 2482918 - DNA, 25 bp, Homo sapien
aatatttgcgataattctttcgggc

SEQ ID NO: 2482919 - DNA, 25 bp, Homo sapien
gatgaaatctgccaaggtgagggca

SEQ ID NO: 2482920 - DNA, 25 bp, Homo sapien
agcctctgaccggaaatatttgcga

SEQ ID NO: 2482921 - DNA, 25 bp, Homo sapien
caaaagcctggatcaataacacgga

SEQ ID NO: 2482922 - DNA, 25 bp, Homo sapien
caataacacggatgcctttatcttc

SEQ ID NO: 2482923 - DNA, 25 bp, Homo sapien
ttatcttcccatagcatttcttttg

SEQ ID NO: 2482924 - DNA, 25 bp, Homo sapien
accctctcacaaaagcctggatcaa

SEQ ID NO: 2482925 - DNA, 25 bp, Homo sapien
ggcagcgccagcctcggtaaatctt

SEQ ID NO: 2482926 - DNA, 25 bp, Homo sapien
gagatgaggatctgactctttcgca

SEQ ID NO: 2482927 - DNA, 25 bp, Homo sapien
aatcttctgtatgagtgtggccagc

SEQ ID NO: 2482928 - DNA, 25 bp, Homo sapien
tgctggagtctcaggcgcctctgtt

SEQ ID NO: 2482929 - DNA, 25 bp, Homo sapien
cgaggacatgctcagctcccccagg

SEQ ID NO: 2482930 - DNA, 25 bp, Homo sapien
ctcccccgaggacatgctcagctcc

SEQ ID NO: 2482931 - DNA, 25 bp, Homo sapien
agctcccccgaggacatgctcagct

SEQ ID NO: 2482932 - DNA, 25 bp, Homo sapien
cccgaggacatgctcagctccccca

SEQ ID NO: 2482933 - DNA, 25 bp, Homo sapien
aggtgctccggctcagcaatcggta

SEQ ID NO: 2482934 - DNA, 25 bp, Homo sapien
ggtctcccccattccagtgaggcca

SEQ ID NO: 2482935 - DNA, 25 bp, Homo sapien
cggtctcccccattccagtgaggcc

SEQ ID NO: 2482936 - DNA, 25 bp, Homo sapien
ggtgctccggctcagcaatcggtac

SEQ ID NO: 2482937 - DNA, 25 bp, Homo sapien
ccaggtctgaagagaactgacctcg

SEQ ID NO: 2482938 - DNA, 25 bp, Homo sapien
gaactgacctcgctgctgatgctca

SEQ ID NO: 2482939 - DNA, 25 bp, Homo sapien
taccgagcctgggttgccaccaggt

SEQ ID NO: 2482940 - DNA, 25 bp, Homo sapien
ataaccctggcggtgggcatagcct

SEQ ID NO: 2482941 - DNA, 25 bp, Homo sapien
caacaggtctcggaagagtaggtca

SEQ ID NO: 2482942 - DNA, 25 bp, Homo sapien
ggaatacagattcttcatgaggatg

SEQ ID NO: 2482943 - DNA, 25 bp, Homo sapien
taggattgccctcaggaaacaagga

SEQ ID NO: 2482944 - DNA, 25 bp, Homo sapien
taaagctggtcacgttgtatgtcac

SEQ ID NO: 2482945 - DNA, 25 bp, Homo sapien
aaagtggagtcactgaccaccccag

SEQ ID NO: 2482946 - DNA, 25 bp, Homo sapien
tcatactgacgctgggcattctggg

SEQ ID NO: 2482947 - DNA, 25 bp, Homo sapien
tgggtgactttgctctcgtagtggc

SEQ ID NO: 2482948 - DNA, 25 bp, Homo sapien
caacatggccaggatacctcgctga

SEQ ID NO: 2482949 - DNA, 25 bp, Homo sapien
tagtccacctttgtccacggtatgc

SEQ ID NO: 2482950 - DNA, 25 bp, Homo sapien
atgctcaatgagcttacaaatgatg

SEQ ID NO: 2482951 - DNA, 25 bp, Homo sapien
aatgatgccattatcaaagtagtcc

SEQ ID NO: 2482952 - DNA, 25 bp, Homo sapien
agtagtccacctttgtccacggtat

SEQ ID NO: 2482953 - DNA, 25 bp, Homo sapien
acgtccaagacaagcctccagagac

SEQ ID NO: 2482954 - DNA, 25 bp, Homo sapien
cagagacctcaccagatctagcctt

SEQ ID NO: 2482955 - DNA, 25 bp, Homo sapien
gatctagcctttcacccacccaaca

SEQ ID NO: 2482956 - DNA, 25 bp, Homo sapien
tggtcaggggagacaacaaattaca

SEQ ID NO: 2482957 - DNA, 25 bp, Homo sapien
gcttctcattgcagtagttgatcac

SEQ ID NO: 2482958 - DNA, 25 bp, Homo sapien
ctcattgcagtagttgatcacaaat

SEQ ID NO: 2482959 - DNA, 25 bp, Homo sapien
tcacaaattgctcaaagctattatc

SEQ ID NO: 2482960 - DNA, 25 bp, Homo sapien
tctcattgcagtagttgatcacaaa

SEQ ID NO: 2482961 - DNA, 25 bp, Homo sapien
tatctcaaaaccgtagatatcaagg

SEQ ID NO: 2482962 - DNA, 25 bp, Homo sapien
tcaaaaccgtagatatcaaggactc

SEQ ID NO: 2482963 - DNA, 25 bp, Homo sapien
ctctaatatctcaaaaccgtagata

SEQ ID NO: 2482964 - DNA, 25 bp, Homo sapien
gatatcaaggactcccattaccttc

SEQ ID NO: 2482965 - DNA, 25 bp, Homo sapien
ctgaggacaggccccctctgcacac

SEQ ID NO: 2482966 - DNA, 25 bp, Homo sapien
cttgatgctctcattgattcgattc

SEQ ID NO: 2482967 - DNA, 25 bp, Homo sapien
tgatgctctcattgattcgattcac

SEQ ID NO: 2482968 - DNA, 25 bp, Homo sapien
ttgatgctctcattgattcgattca

SEQ ID NO: 2482969 - DNA, 25 bp, Homo sapien
caaagaggcggctgtagatgttctt

SEQ ID NO: 2482970 - DNA, 25 bp, Homo sapien
gctgtagatgttcttagccagggcg

SEQ ID NO: 2482971 - DNA, 25 bp, Homo sapien
tagatgttcttagccagggcgtccc

SEQ ID NO: 2482972 - DNA, 25 bp, Homo sapien
ccagggcgtcccgagcatactgagc

SEQ ID NO: 2482973 - DNA, 25 bp, Homo sapien
tgtttccatggtcctcgagcacaaa

SEQ ID NO: 2482974 - DNA, 25 bp, Homo sapien
tcctcgagcacaaagctctctctac

SEQ ID NO: 2482975 - DNA, 25 bp, Homo sapien
cattcagtgcagtgaccaccttttc

SEQ ID NO: 2482976 - DNA, 25 bp, Homo sapien
ctgcataacattcagtgcagtgacc

SEQ ID NO: 2482977 - DNA, 25 bp, Homo sapien
tctagcacttgtcgaatctcctcct

SEQ ID NO: 2482978 - DNA, 25 bp, Homo sapien
gatgccacttgctggtatcccactg

SEQ ID NO: 2482979 - DNA, 25 bp, Homo sapien
ccaccaacacgttccccagctttag

SEQ ID NO: 2482980 - DNA, 25 bp, Homo sapien
atggatgtcacctctagcacttgtc

SEQ ID NO: 2482981 - DNA, 25 bp, Homo sapien
ggatacttcatgattcagataggca

SEQ ID NO: 2482982 - DNA, 25 bp, Homo sapien
gccatccactctggatacttcatga

SEQ ID NO: 2482983 - DNA, 25 bp, Homo sapien
ccctgaagctggaggcgtcgtccat

SEQ ID NO: 2482984 - DNA, 25 bp, Homo sapien
gtcgtccatgccatccactctggat

SEQ ID NO: 2482985 - DNA, 25 bp, Homo sapien
agctgcttcactaatcgggatttct

SEQ ID NO: 2482986 - DNA, 25 bp, Homo sapien
ttcactaatcgggatttctcaagca

SEQ ID NO: 2482987 - DNA, 25 bp, Homo sapien
actaatcgggatttctcaagcagat

SEQ ID NO: 2482988 - DNA, 25 bp, Homo sapien
tgcttcactaatcgggatttctcaa

SEQ ID NO: 2482989 - DNA, 25 bp, Homo sapien
ggagaatgcccccatcgccggcatt

SEQ ID NO: 2482990 - DNA, 25 bp, Homo sapien
tctccagccctactggagaatgccc

SEQ ID NO: 2482991 - DNA, 25 bp, Homo sapien
ggcctgggagatgccgtagcttctc

SEQ ID NO: 2482992 - DNA, 25 bp, Homo sapien
cattcctagtggttgggaagtctcc

SEQ ID NO: 2482993 - DNA, 25 bp, Homo sapien
tgatgacaccaccgaggggggatcc

SEQ ID NO: 2482994 - DNA, 25 bp, Homo sapien
gatgacaccaccgaggggggatccc

SEQ ID NO: 2482995 - DNA, 25 bp, Homo sapien
gtgatgacaccaccgaggggggatc

SEQ ID NO: 2482996 - DNA, 25 bp, Homo sapien
atgacaccaccgaggggggatccct

SEQ ID NO: 2482997 - DNA, 25 bp, Homo sapien
aaatcgggaggaattgttgttgcga

SEQ ID NO: 2482998 - DNA, 25 bp, Homo sapien
aatcgggaggaattgttgttgcgaa

SEQ ID NO: 2482999 - DNA, 25 bp, Homo sapien
ttgttgttgcgaatggtcttggcat

SEQ ID NO: 2483000 - DNA, 25 bp, Homo sapien
gaggaattgttgttgcgaatggtct

SEQ ID NO: 2483001 - DNA, 25 bp, Homo sapien
ctgggttagactgtagcagctgctc

SEQ ID NO: 2483002 - DNA, 25 bp, Homo sapien
ggcagccacataagacatcaccagc

SEQ ID NO: 2483003 - DNA, 25 bp, Homo sapien
cactgggttagactgtagcagctgc

SEQ ID NO: 2483004 - DNA, 25 bp, Homo sapien
tgctccttcacagagttcacctgct

SEQ ID NO: 2483005 - DNA, 25 bp, Homo sapien
tccctcagtgactggtacgccacat

SEQ ID NO: 2483006 - DNA, 25 bp, Homo sapien
ctctcgcctgtgatgaggatacact

SEQ ID NO: 2483007 - DNA, 25 bp, Homo sapien
actggtctcggtccctgtccctcag

SEQ ID NO: 2483008 - DNA, 25 bp, Homo sapien
ggtacgccacatttgccaatgcgta

SEQ ID NO: 2483009 - DNA, 25 bp, Homo sapien
gaaagtatagtcttgatatttggca

SEQ ID NO: 2483010 - DNA, 25 bp, Homo sapien
ttgatagggattcactgagatcacc

SEQ ID NO: 2483011 - DNA, 25 bp, Homo sapien
cccatagatgggaagctgttgatag

SEQ ID NO: 2483012 - DNA, 25 bp, Homo sapien
gcaatgaactctggcccatagatgg

SEQ ID NO: 2483013 - DNA, 25 bp, Homo sapien
gccagaggcacccatatgacactca

SEQ ID NO: 2483014 - DNA, 25 bp, Homo sapien
aggtgaagggaatgagcttgagggt

SEQ ID NO: 2483015 - DNA, 25 bp, Homo sapien
ggtgaagggaatgagcttgagggtg

SEQ ID NO: 2483016 - DNA, 25 bp, Homo sapien
acagccagaggcacccatatgacac

SEQ ID NO: 2483017 - DNA, 25 bp, Homo sapien
gttttcatagcgaagctgaagattc

SEQ ID NO: 2483018 - DNA, 25 bp, Homo sapien
tccaggaggacaagatcctccaccc

SEQ ID NO: 2483019 - DNA, 25 bp, Homo sapien
ctccttgttttcatagcgaagctga

SEQ ID NO: 2483020 - DNA, 25 bp, Homo sapien
gcagtgactcctccaccaagggttc

SEQ ID NO: 2483021 - DNA, 25 bp, Homo sapien
gggacacacctagcttcttgcggga

SEQ ID NO: 2483022 - DNA, 25 bp, Homo sapien
ttgcttccccaacaaacaggcagtt

SEQ ID NO: 2483023 - DNA, 25 bp, Homo sapien
tggcatggactttgccccagaggga

SEQ ID NO: 2483024 - DNA, 25 bp, Homo sapien
gacctctggatgtgctacatgtctg

SEQ ID NO: 2483025 - DNA, 25 bp, Homo sapien
cttggagaatggtggatgaaatctc

SEQ ID NO: 2483026 - DNA, 25 bp, Homo sapien
ggaactagggtataacttcactgtc

SEQ ID NO: 2483027 - DNA, 25 bp, Homo sapien
ttgccagtgtccactcttctgattt

SEQ ID NO: 2483028 - DNA, 25 bp, Homo sapien
agctgtccatggtgcaaggaagctg

SEQ ID NO: 2483029 - DNA, 25 bp, Homo sapien
cagtgggacccaaagagctatcagc

SEQ ID NO: 2483030 - DNA, 25 bp, Homo sapien
tctgccactaaagctacgagttggt

SEQ ID NO: 2483031 - DNA, 25 bp, Homo sapien
atcagtcaagagacggctgggccct

SEQ ID NO: 2483032 - DNA, 25 bp, Homo sapien
tcaggtctccaactaccagataggg

SEQ ID NO: 2483033 - DNA, 25 bp, Homo sapien
gagaatcctgagaccacttgcacga

SEQ ID NO: 2483034 - DNA, 25 bp, Homo sapien
tatgcttaaatatgctaggtctcaa

SEQ ID NO: 2483035 - DNA, 25 bp, Homo sapien
gagaaagaggagaatctttcacaat

SEQ ID NO: 2483036 - DNA, 25 bp, Homo sapien
ttcacagtgctttctcattgaaata

SEQ ID NO: 2483037 - DNA, 25 bp, Homo sapien
catacatctcaggtcagaaacgcaa

SEQ ID NO: 2483038 - DNA, 25 bp, Homo sapien
tctgcaatggagctaggcctttcaa

SEQ ID NO: 2483039 - DNA, 25 bp, Homo sapien
aagatgacttctcctagctagcagg

SEQ ID NO: 2483040 - DNA, 25 bp, Homo sapien
gagctgaccctttggaagtctgcaa

SEQ ID NO: 2483041 - DNA, 25 bp, Homo sapien
gacagaaacttcatttggcgtgagg

SEQ ID NO: 2483042 - DNA, 25 bp, Homo sapien
taaagataactgaccactacctagg

SEQ ID NO: 2483043 - DNA, 25 bp, Homo sapien
tctctggaaacataaaagtgggctg

SEQ ID NO: 2483044 - DNA, 25 bp, Homo sapien
tagcaggacaccgagaatatgagtc

SEQ ID NO: 2483045 - DNA, 25 bp, Homo sapien
gattcgagaaacagtcttccaagca

SEQ ID NO: 2483046 - DNA, 25 bp, Homo sapien
aaaattctcggagctcctctaaagc

SEQ ID NO: 2483047 - DNA, 25 bp, Homo sapien
tttctacctctccttgtatccgata

SEQ ID NO: 2483048 - DNA, 25 bp, Homo sapien
gcagtctggactgttacaaaattct

SEQ ID NO: 2483049 - DNA, 25 bp, Homo sapien
cagaaaatcatggtataagactgtg

SEQ ID NO: 2483050 - DNA, 25 bp, Homo sapien
aataacagaaaatcatggtataaga

SEQ ID NO: 2483051 - DNA, 25 bp, Homo sapien
atacttacttattttctagtagatg

SEQ ID NO: 2483052 - DNA, 25 bp, Homo sapien
gaaaatcatggtataagactgtggt

SEQ ID NO: 2483053 - DNA, 25 bp, Homo sapien
ggtttcccaaactgaaagcatcacc

SEQ ID NO: 2483054 - DNA, 25 bp, Homo sapien
aaaataagactaagacctccagagc

SEQ ID NO: 2483055 - DNA, 25 bp, Homo sapien
tataatagacaacttcaggacctag

SEQ ID NO: 2483056 - DNA, 25 bp, Homo sapien
tgtggtccagtaacttggtttccca

SEQ ID NO: 2483057 - DNA, 25 bp, Homo sapien
tcattaacaaagaagctcccaggtc

SEQ ID NO: 2483058 - DNA, 25 bp, Homo sapien
ccttgtggtaacaggaacacatgac

SEQ ID NO: 2483059 - DNA, 25 bp, Homo sapien
aacacctctgtatcctcttgctgca

SEQ ID NO: 2483060 - DNA, 25 bp, Homo sapien
tgatagaatttgcaccaccttgtgg

SEQ ID NO: 2483061 - DNA, 25 bp, Homo sapien
tgatacttcgttcattctccaaggg

SEQ ID NO: 2483062 - DNA, 25 bp, Homo sapien
tccaggtcagcaggttgatacttcg

SEQ ID NO: 2483063 - DNA, 25 bp, Homo sapien
aagggcccatacttgtaacatactg

SEQ ID NO: 2483064 - DNA, 25 bp, Homo sapien
gcaagggcaatatgtggtatctgga

SEQ ID NO: 2483065 - DNA, 25 bp, Homo sapien
aactgaaacagcctataaacgtaca

SEQ ID NO: 2483066 - DNA, 25 bp, Homo sapien
ggttactatctatatgaccaaggat

SEQ ID NO: 2483067 - DNA, 25 bp, Homo sapien
taaatgaacatcttcgccttaacag

SEQ ID NO: 2483068 - DNA, 25 bp, Homo sapien
tgttgaacaaccctgaaatagacta

SEQ ID NO: 2483069 - DNA, 25 bp, Homo sapien
taaaaactagttgaatgaggtacag

SEQ ID NO: 2483070 - DNA, 25 bp, Homo sapien
ccaggatgacgtaaatgggactttt

SEQ ID NO: 2483071 - DNA, 25 bp, Homo sapien
cctcccaccaggatgacgtaaatgg

SEQ ID NO: 2483072 - DNA, 25 bp, Homo sapien
agatactgccagtaacacctccaga

SEQ ID NO: 2483073 - DNA, 25 bp, Homo sapien
tacagtctgcaacgaacactgggaa

SEQ ID NO: 2483074 - DNA, 25 bp, Homo sapien
tcagttttctaagattacccaggaa

SEQ ID NO: 2483075 - DNA, 25 bp, Homo sapien
ccaagtttcatcgtggaaagtacct

SEQ ID NO: 2483076 - DNA, 25 bp, Homo sapien
aaagaatttgtaatcaggctccaag

SEQ ID NO: 2483077 - DNA, 25 bp, Homo sapien
tcatcccagtagagtagtagaaaat

SEQ ID NO: 2483078 - DNA, 25 bp, Homo sapien
aaaatgatgattagcagagaggcca

SEQ ID NO: 2483079 - DNA, 25 bp, Homo sapien
ggccacaattcccacagtcatccca

SEQ ID NO: 2483080 - DNA, 25 bp, Homo sapien
tataaaaatgatgattagcagagag

SEQ ID NO: 2483081 - DNA, 25 bp, Homo sapien
tgatctactgggcccaggtgattct

SEQ ID NO: 2483082 - DNA, 25 bp, Homo sapien
ccaagctggggtgcgatggcgtcat

SEQ ID NO: 2483083 - DNA, 25 bp, Homo sapien
tagctggtaccatgacttttttgta

SEQ ID NO: 2483084 - DNA, 25 bp, Homo sapien
tgcagccttgatctactgggcccag

SEQ ID NO: 2483085 - DNA, 25 bp, Homo sapien
gccaactaaaactctctccatatca

SEQ ID NO: 2483086 - DNA, 25 bp, Homo sapien
ttcttatcacttgtgtgttccctgg

SEQ ID NO: 2483087 - DNA, 25 bp, Homo sapien
aatcttctcaacagccaactaaaac

SEQ ID NO: 2483088 - DNA, 25 bp, Homo sapien
agttgtatctggtttaatcttctca

SEQ ID NO: 2483089 - DNA, 25 bp, Homo sapien
aacggccaagccataaaggtcctgg

SEQ ID NO: 2483090 - DNA, 25 bp, Homo sapien
taatgatgggccaacctaatgtggg

SEQ ID NO: 2483091 - DNA, 25 bp, Homo sapien
tagttactataaaacgcaggcagga

SEQ ID NO: 2483092 - DNA, 25 bp, Homo sapien
ttaaatatccaagcaggcaacggcc

SEQ ID NO: 2483093 - DNA, 25 bp, Homo sapien
acaagaaagagtttgggatcaaatc

SEQ ID NO: 2483094 - DNA, 25 bp, Homo sapien
atagcataagtccaagaaggaaaac

SEQ ID NO: 2483095 - DNA, 25 bp, Homo sapien
aaaaaatagcataagtccaagaagg

SEQ ID NO: 2483096 - DNA, 25 bp, Homo sapien
ctgctcagcaagtctccacaaaaaa

SEQ ID NO: 2483097 - DNA, 25 bp, Homo sapien
gcaaacagcccacctaaaaagcatt

SEQ ID NO: 2483098 - DNA, 25 bp, Homo sapien
taaatttcacctaaagcctgggcac

SEQ ID NO: 2483099 - DNA, 25 bp, Homo sapien
ttatagaataaaagacaacgttggc

SEQ ID NO: 2483100 - DNA, 25 bp, Homo sapien
caacgttggcactattggtcagcta

SEQ ID NO: 2483101 - DNA, 25 bp, Homo sapien
cagatactcccacagctttcacatt

SEQ ID NO: 2483102 - DNA, 25 bp, Homo sapien
tactcccacagctttcacattcaag

SEQ ID NO: 2483103 - DNA, 25 bp, Homo sapien
cccacagctttcacattcaagagtt

SEQ ID NO: 2483104 - DNA, 25 bp, Homo sapien
tcccacagctttcacattcaagagt

SEQ ID NO: 2483105 - DNA, 25 bp, Homo sapien
cccacgttaacataggtgtcattca

SEQ ID NO: 2483106 - DNA, 25 bp, Homo sapien
tctataatctcaactttgaggcagg

SEQ ID NO: 2483107 - DNA, 25 bp, Homo sapien
ggatcacaatgacactgtacttggt

SEQ ID NO: 2483108 - DNA, 25 bp, Homo sapien
ggtttttgtgctgtatagacccacg

SEQ ID NO: 2483109 - DNA, 25 bp, Homo sapien
ctccacctgggtgactcgaaccaat

SEQ ID NO: 2483110 - DNA, 25 bp, Homo sapien
accaatctggaactatttactcgga

SEQ ID NO: 2483111 - DNA, 25 bp, Homo sapien
gaaccaatctggaactatttactcg

SEQ ID NO: 2483112 - DNA, 25 bp, Homo sapien
ggtgactcgaaccaatctggaacta

SEQ ID NO: 2483113 - DNA, 25 bp, Homo sapien
taacagaattgttggctggcacgct

SEQ ID NO: 2483114 - DNA, 25 bp, Homo sapien
tgtatccgtgtccatatatcatgcc

SEQ ID NO: 2483115 - DNA, 25 bp, Homo sapien
ccattttgggataagcacatttgtg

SEQ ID NO: 2483116 - DNA, 25 bp, Homo sapien
ctggcacgcttttcacaaacttggg

SEQ ID NO: 2483117 - DNA, 25 bp, Homo sapien
catgaccacatttacatcagtttca

SEQ ID NO: 2483118 - DNA, 25 bp, Homo sapien
gcatgaccacatttacatcagtttc

SEQ ID NO: 2483119 - DNA, 25 bp, Homo sapien
atgaccacatttacatcagtttcag

SEQ ID NO: 2483120 - DNA, 25 bp, Homo sapien
ccctggccaacatagtgaaacccca

SEQ ID NO: 2483121 - DNA, 25 bp, Homo sapien
tgggagggccaaggcggatggatca

SEQ ID NO: 2483122 - DNA, 25 bp, Homo sapien
tggccaacatagtgaaaccccattt

SEQ ID NO: 2483123 - DNA, 25 bp, Homo sapien
cgaggtcaggagttcgagaccaccc

SEQ ID NO: 2483124 - DNA, 25 bp, Homo sapien
tcttccaccacactacgccggcggc

SEQ ID NO: 2483125 - DNA, 25 bp, Homo sapien
gccaccgcccttctgcagagtaacg

SEQ ID NO: 2483126 - DNA, 25 bp, Homo sapien
ggcggccctcggtagagccaccgcc

SEQ ID NO: 2483127 - DNA, 25 bp, Homo sapien
accgcccttctgcagagtaacggcc

SEQ ID NO: 2483128 - DNA, 25 bp, Homo sapien
ccttggcagctgctgcccgggcggt

SEQ ID NO: 2483129 - DNA, 25 bp, Homo sapien
ctgcccccttggcagctgctgcccg

SEQ ID NO: 2483130 - DNA, 25 bp, Homo sapien
ttggcagctgctgcccgggcggtac

SEQ ID NO: 2483131 - DNA, 25 bp, Homo sapien
ccccttggcagctgctgcccgggcg

SEQ ID NO: 2483132 - DNA, 25 bp, Homo sapien
tgccggcgagaccgccactttcatt

SEQ ID NO: 2483133 - DNA, 25 bp, Homo sapien
ggcccgggaccaactgccggcgaga

SEQ ID NO: 2483134 - DNA, 25 bp, Homo sapien
ggatcaagagtagccgcactgtccc

SEQ ID NO: 2483135 - DNA, 25 bp, Homo sapien
accaagcagccggagaggatcaaga

SEQ ID NO: 2483136 - DNA, 25 bp, Homo sapien
ggttgcctcaagccacctcctcctc

SEQ ID NO: 2483137 - DNA, 25 bp, Homo sapien
tgcctcaagccacctcctcctcacg

SEQ ID NO: 2483138 - DNA, 25 bp, Homo sapien
gttgcctcaagccacctcctcctca

SEQ ID NO: 2483139 - DNA, 25 bp, Homo sapien
ctcaagccacctcctcctcacgtgc

SEQ ID NO: 2483140 - DNA, 25 bp, Homo sapien
tctggtctgtgatcccaacctaaat

SEQ ID NO: 2483141 - DNA, 25 bp, Homo sapien
ccaggtgttcagaaactgttagtag

SEQ ID NO: 2483142 - DNA, 25 bp, Homo sapien
ccattcaatgatttaacacagggcc

SEQ ID NO: 2483143 - DNA, 25 bp, Homo sapien
tacagatgatagagccaaatgaatt

SEQ ID NO: 2483144 - DNA, 25 bp, Homo sapien
cttctgtaacccttctggaatgcag

SEQ ID NO: 2483145 - DNA, 25 bp, Homo sapien
tccttctgtaacccttctggaatgc

SEQ ID NO: 2483146 - DNA, 25 bp, Homo sapien
ctttcaactgagagggtccttcagt

SEQ ID NO: 2483147 - DNA, 25 bp, Homo sapien
ccagtaacaccacaggatgaagtcc

SEQ ID NO: 2483148 - DNA, 25 bp, Homo sapien
tttatggttccagtaacaccacagg

SEQ ID NO: 2483149 - DNA, 25 bp, Homo sapien
ctgctcctaagtgcagatctgacca

SEQ ID NO: 2483150 - DNA, 25 bp, Homo sapien
gacaatcttgagaaacaagggcaca

SEQ ID NO: 2483151 - DNA, 25 bp, Homo sapien
aacacccggtagtttcactctcaca

SEQ ID NO: 2483152 - DNA, 25 bp, Homo sapien
gacccgggagcggagagctcaaaat

SEQ ID NO: 2483153 - DNA, 25 bp, Homo sapien
tgggcaggccccttctgcggaattt

SEQ ID NO: 2483154 - DNA, 25 bp, Homo sapien
ggctcactgctaacattcacacgtc

SEQ ID NO: 2483155 - DNA, 25 bp, Homo sapien
taagtgcacactatacgggagtcag

SEQ ID NO: 2483156 - DNA, 25 bp, Homo sapien
tgggtttctgagagcgaccccctca

SEQ ID NO: 2483157 - DNA, 25 bp, Homo sapien
gaccccctcagattattccattggg

SEQ ID NO: 2483158 - DNA, 25 bp, Homo sapien
gtacgtgggcgccaagagggccggc

SEQ ID NO: 2483159 - DNA, 25 bp, Homo sapien
tacgtgggcgccaagagggccggct

SEQ ID NO: 2483160 - DNA, 25 bp, Homo sapien
gtgggcgccaagagggccggctgtg

SEQ ID NO: 2483161 - DNA, 25 bp, Homo sapien
gtgggtacgtgggcgccaagagggc

SEQ ID NO: 2483162 - DNA, 25 bp, Homo sapien
taaaagctgaagataaggttgtaag

SEQ ID NO: 2483163 - DNA, 25 bp, Homo sapien
tcactttagtatgggtgacttcact

SEQ ID NO: 2483164 - DNA, 25 bp, Homo sapien
ctgaagataaggttgtaagacgctt

SEQ ID NO: 2483165 - DNA, 25 bp, Homo sapien
acattcactttagtatgggtgactt

SEQ ID NO: 2483166 - DNA, 25 bp, Homo sapien
ttcgggccagtctaggacggcactg

SEQ ID NO: 2483167 - DNA, 25 bp, Homo sapien
cctgggcactgggcaggatagcatc

SEQ ID NO: 2483168 - DNA, 25 bp, Homo sapien
tctgtactcagacctgggcactggg

SEQ ID NO: 2483169 - DNA, 25 bp, Homo sapien
tgtactcagacctgggcactgggca

SEQ ID NO: 2483170 - DNA, 25 bp, Homo sapien
tgggcactgggcaggatagcatcca

SEQ ID NO: 2483171 - DNA, 25 bp, Homo sapien
agtgcccgcagttttagccccaaga

SEQ ID NO: 2483172 - DNA, 25 bp, Homo sapien
aatccagggctcttcagtcaaccag

SEQ ID NO: 2483173 - DNA, 25 bp, Homo sapien
aagatctctgagactgcgggtaccc

SEQ ID NO: 2483174 - DNA, 25 bp, Homo sapien
gaggtcacatccctgctaaagctga

SEQ ID NO: 2483175 - DNA, 25 bp, Homo sapien
cagttctgcatgagggacaacacgc

SEQ ID NO: 2483176 - DNA, 25 bp, Homo sapien
tagcccgagagagcacctacttgtc

SEQ ID NO: 2483177 - DNA, 25 bp, Homo sapien
gacaacacgctcttattacggagag

SEQ ID NO: 2483178 - DNA, 25 bp, Homo sapien
cagaaagctcccatgtagtgtcaaa

SEQ ID NO: 2483179 - DNA, 25 bp, Homo sapien
cgcagcacctatctgagcagttaga

SEQ ID NO: 2483180 - DNA, 25 bp, Homo sapien
tccctgccctacataggggcggtgg

SEQ ID NO: 2483181 - DNA, 25 bp, Homo sapien
agtttgccctcccattcccatctat

SEQ ID NO: 2483182 - DNA, 25 bp, Homo sapien
gtggcaacatttgcccccagaattg

SEQ ID NO: 2483183 - DNA, 25 bp, Homo sapien
tctcatacactggagggccacatgg

SEQ ID NO: 2483184 - DNA, 25 bp, Homo sapien
ggacccagactctcaccctggctcc

SEQ ID NO: 2483185 - DNA, 25 bp, Homo sapien
gcaggcagggccctctcatacactg

SEQ ID NO: 2483186 - DNA, 25 bp, Homo sapien
gaggtgtggagccatacgtagatgt

SEQ ID NO: 2483187 - DNA, 25 bp, Homo sapien
tcatacacgtatcagaagcctccac

SEQ ID NO: 2483188 - DNA, 25 bp, Homo sapien
gaatctcagcccttgtacttttgca

SEQ ID NO: 2483189 - DNA, 25 bp, Homo sapien
tatccctggcctctagtgtaaatgt

SEQ ID NO: 2483190 - DNA, 25 bp, Homo sapien
tgtgttgtcacgtaggcaaaagcag

SEQ ID NO: 2483191 - DNA, 25 bp, Homo sapien
ttccatgccctaacctgtgctctta

SEQ ID NO: 2483192 - DNA, 25 bp, Homo sapien
tcctgcctatccgtcctaggccctg

SEQ ID NO: 2483193 - DNA, 25 bp, Homo sapien
ccctgggtcagaatgggcggagaag

SEQ ID NO: 2483194 - DNA, 25 bp, Homo sapien
ggcggagaagccttccatgccctaa

SEQ ID NO: 2483195 - DNA, 25 bp, Homo sapien
catgagcaagtgtccagagcaggtc

SEQ ID NO: 2483196 - DNA, 25 bp, Homo sapien
ggtagtagaagagctgtctctttgg

SEQ ID NO: 2483197 - DNA, 25 bp, Homo sapien
acttcccttccagtcagtgctggaa

SEQ ID NO: 2483198 - DNA, 25 bp, Homo sapien
gagtggattggctccacccactgtg

SEQ ID NO: 2483199 - DNA, 25 bp, Homo sapien
cttagtgaggtcctgttcagtggga

SEQ ID NO: 2483200 - DNA, 25 bp, Homo sapien
cagcagaggagggaatatgtcttca

SEQ ID NO: 2483201 - DNA, 25 bp, Homo sapien
ccagattgcccatagtgggagggct

SEQ ID NO: 2483202 - DNA, 25 bp, Homo sapien
ggtccatgtgggacattgagatccc

SEQ ID NO: 2483203 - DNA, 25 bp, Homo sapien
cacagcatgctcctgaggctggcac

SEQ ID NO: 2483204 - DNA, 25 bp, Homo sapien
ggctggacacagcatgctcctgagg

SEQ ID NO: 2483205 - DNA, 25 bp, Homo sapien
agggctggacacagcatgctcctga

SEQ ID NO: 2483206 - DNA, 25 bp, Homo sapien
gcatgctcctgaggctggcacggca

SEQ ID NO: 2483207 - DNA, 25 bp, Homo sapien
tcaaagggcaggctcatctggccca

SEQ ID NO: 2483208 - DNA, 25 bp, Homo sapien
gaggctggtcaaagggcaggctcat

SEQ ID NO: 2483209 - DNA, 25 bp, Homo sapien
ctggtcaaagggcaggctcatctgg

SEQ ID NO: 2483210 - DNA, 25 bp, Homo sapien
ggtcaaagggcaggctcatctggcc

SEQ ID NO: 2483211 - DNA, 25 bp, Homo sapien
gaaggcaggctaggcaaatgcagag

SEQ ID NO: 2483212 - DNA, 25 bp, Homo sapien
ggcaaatgcagagtggtgcaaagtc

SEQ ID NO: 2483213 - DNA, 25 bp, Homo sapien
tccttatcctgacttagtcatggcc

SEQ ID NO: 2483214 - DNA, 25 bp, Homo sapien
tcatggcctgggcaagctatttcta

SEQ ID NO: 2483215 - DNA, 25 bp, Homo sapien
ggctgacaacacgttgactgattct

SEQ ID NO: 2483216 - DNA, 25 bp, Homo sapien
gaaggctgacaacacgttgactgat

SEQ ID NO: 2483217 - DNA, 25 bp, Homo sapien
caacacgttgactgattcttctggg

SEQ ID NO: 2483218 - DNA, 25 bp, Homo sapien
cctggaaggctgacaacacgttgac

SEQ ID NO: 2483219 - DNA, 25 bp, Homo sapien
tcataagaaggcaccatggtaggca

SEQ ID NO: 2483220 - DNA, 25 bp, Homo sapien
gggccattccaaggtcataagaagg

SEQ ID NO: 2483221 - DNA, 25 bp, Homo sapien
gctgcatgctcatggaggaatcagg

SEQ ID NO: 2483222 - DNA, 25 bp, Homo sapien
gaatcaggggccattccaaggtcat

SEQ ID NO: 2483223 - DNA, 25 bp, Homo sapien
ccttcctgcagataagcactaagcc

SEQ ID NO: 2483224 - DNA, 25 bp, Homo sapien
ggaaggaggtacatgtgactgacca

SEQ ID NO: 2483225 - DNA, 25 bp, Homo sapien
tgcagataagcactaagcccctgac

SEQ ID NO: 2483226 - DNA, 25 bp, Homo sapien
tgaccaagggttgatgccacccctc

SEQ ID NO: 2483227 - DNA, 25 bp, Homo sapien
ggacataacccctgccatccttacc

SEQ ID NO: 2483228 - DNA, 25 bp, Homo sapien
tcatcttgatggtagctgggacata

SEQ ID NO: 2483229 - DNA, 25 bp, Homo sapien
ctttccacggtcatcttgatggtag

SEQ ID NO: 2483230 - DNA, 25 bp, Homo sapien
ttgatggtagctgggacataacccc

SEQ ID NO: 2483231 - DNA, 25 bp, Homo sapien
gcacagctatgaaatagggagtgac

SEQ ID NO: 2483232 - DNA, 25 bp, Homo sapien
agctatgaaatagggagtgacatca

SEQ ID NO: 2483233 - DNA, 25 bp, Homo sapien
tgacatcaggatgacacgcgggcag

SEQ ID NO: 2483234 - DNA, 25 bp, Homo sapien
agtgacatcaggatgacacgcgggc

SEQ ID NO: 2483235 - DNA, 25 bp, Homo sapien
gcttgtagtggctccggaaagcctc

SEQ ID NO: 2483236 - DNA, 25 bp, Homo sapien
ttcggtcccccagtgagcgaatgga

SEQ ID NO: 2483237 - DNA, 25 bp, Homo sapien
gctgagcaagatcccggattcggtc

SEQ ID NO: 2483238 - DNA, 25 bp, Homo sapien
ccccagtgagcgaatggacaggtct

SEQ ID NO: 2483239 - DNA, 25 bp, Homo sapien
gctcattgagaagaaggctagtaac

SEQ ID NO: 2483240 - DNA, 25 bp, Homo sapien
gaaaggttccgtcgggctcattgag

SEQ ID NO: 2483241 - DNA, 25 bp, Homo sapien
ccaatctctgagtcgctgaagcgga

SEQ ID NO: 2483242 - DNA, 25 bp, Homo sapien
tcctggccccggatgacatgggcaa

SEQ ID NO: 2483243 - DNA, 25 bp, Homo sapien
gtccaggacaccatcaaaccactgc

SEQ ID NO: 2483244 - DNA, 25 bp, Homo sapien
ggtcagaccagtagctccggagaca

SEQ ID NO: 2483245 - DNA, 25 bp, Homo sapien
tagctccggagacagcgtttggtga

SEQ ID NO: 2483246 - DNA, 25 bp, Homo sapien
gccaaaaggtgaagccacggcccag

SEQ ID NO: 2483247 - DNA, 25 bp, Homo sapien
tgagtgccccagggatgaagagctt

SEQ ID NO: 2483248 - DNA, 25 bp, Homo sapien
tccagtggaaggtccctgcatggag

SEQ ID NO: 2483249 - DNA, 25 bp, Homo sapien
gagaatccagtggaaggtccctgca

SEQ ID NO: 2483250 - DNA, 25 bp, Homo sapien
actgtggagaatccagtggaaggtc

SEQ ID NO: 2483251 - DNA, 25 bp, Homo sapien
tgcgaccaggacacagaacggtgct

SEQ ID NO: 2483252 - DNA, 25 bp, Homo sapien
acacagaacggtgctggaaggcctc

SEQ ID NO: 2483253 - DNA, 25 bp, Homo sapien
cacacatcttctcccagggcacccg

SEQ ID NO: 2483254 - DNA, 25 bp, Homo sapien
tgaactgcgaccaggacacagaacg

SEQ ID NO: 2483255 - DNA, 25 bp, Homo sapien
ttgccatggacgatgaccaccaggg

SEQ ID NO: 2483256 - DNA, 25 bp, Homo sapien
ggttgccatggacgatgaccaccag

SEQ ID NO: 2483257 - DNA, 25 bp, Homo sapien
tgtcttggttgccatggacgatgac

SEQ ID NO: 2483258 - DNA, 25 bp, Homo sapien
attgttgtcttggttgccatggacg

SEQ ID NO: 2483259 - DNA, 25 bp, Homo sapien
tgaagagggtgaggacaggggtttc

SEQ ID NO: 2483260 - DNA, 25 bp, Homo sapien
ctgaagagggtgaggacaggggttt

SEQ ID NO: 2483261 - DNA, 25 bp, Homo sapien
caatcagggcctcaccgtagagaag

SEQ ID NO: 2483262 - DNA, 25 bp, Homo sapien
tatcatttaatagagtgccctggtc

SEQ ID NO: 2483263 - DNA, 25 bp, Homo sapien
tattagtcatcgctatggaaccaga

SEQ ID NO: 2483264 - DNA, 25 bp, Homo sapien
ggccccagtgtgcatgaatcccaga

SEQ ID NO: 2483265 - DNA, 25 bp, Homo sapien
gagaagagcacagcgcacttctcct

SEQ ID NO: 2483266 - DNA, 25 bp, Homo sapien
ccgctcacaccgcttgatcttcttg

SEQ ID NO: 2483267 - DNA, 25 bp, Homo sapien
agcacagcgcacttctcctctgtga

SEQ ID NO: 2483268 - DNA, 25 bp, Homo sapien
agtgcccttccgctcacaccgcttg

SEQ ID NO: 2483269 - DNA, 25 bp, Homo sapien
tcccaggaatgctgttctccaaggg

SEQ ID NO: 2483270 - DNA, 25 bp, Homo sapien
caggttcttgaacagggcagagcag

SEQ ID NO: 2483271 - DNA, 25 bp, Homo sapien
tccaagggcacagtgttgttgatga

SEQ ID NO: 2483272 - DNA, 25 bp, Homo sapien
cacagtgttgttgatgatttctcca

SEQ ID NO: 2483273 - DNA, 25 bp, Homo sapien
ctggaacttggtctgagtcttcagt

SEQ ID NO: 2483274 - DNA, 25 bp, Homo sapien
tgtcggccctgaccagcggaggctt

SEQ ID NO: 2483275 - DNA, 25 bp, Homo sapien
caggaacctcaagcccaacaggaat

SEQ ID NO: 2483276 - DNA, 25 bp, Homo sapien
caggaatcgaactccagcctggaac

SEQ ID NO: 2483277 - DNA, 25 bp, Homo sapien
ccagtcagcgatgcccgggtcttgg

SEQ ID NO: 2483278 - DNA, 25 bp, Homo sapien
agccgcccctacctcctgctgtagc

SEQ ID NO: 2483279 - DNA, 25 bp, Homo sapien
cagccggccagtcagcgatgcccgg

SEQ ID NO: 2483280 - DNA, 25 bp, Homo sapien
cggccagtcagcgatgcccgggtct

SEQ ID NO: 2483281 - DNA, 25 bp, Homo sapien
ggcacaggattaaggctgcttgctc

SEQ ID NO: 2483282 - DNA, 25 bp, Homo sapien
cgtttccaaatctggatcctcttca

SEQ ID NO: 2483283 - DNA, 25 bp, Homo sapien
tcagcactagggctttggctgcctc

SEQ ID NO: 2483284 - DNA, 25 bp, Homo sapien
gctctcctcaaacggtgcgccattc

SEQ ID NO: 2483285 - DNA, 25 bp, Homo sapien
cctcttcagcactagggctttggct

SEQ ID NO: 2483286 - DNA, 25 bp, Homo sapien
ccattagcaggagtttctatcaagc

SEQ ID NO: 2483287 - DNA, 25 bp, Homo sapien
caggagtttctatcaagctgtgcag

SEQ ID NO: 2483288 - DNA, 25 bp, Homo sapien
ttggcccagtcccattagcaggagt

SEQ ID NO: 2483289 - DNA, 25 bp, Homo sapien
gtttctatcaagctgtgcagagaca

SEQ ID NO: 2483290 - DNA, 25 bp, Homo sapien
tctgcagggcttctcggagaaggtg

SEQ ID NO: 2483291 - DNA, 25 bp, Homo sapien
tcctgcttccagtggaaaggcattg

SEQ ID NO: 2483292 - DNA, 25 bp, Homo sapien
gcagcctccgcaagcctgtcttaaa

SEQ ID NO: 2483293 - DNA, 25 bp, Homo sapien
gagaaggtggatctcccctactcgg

SEQ ID NO: 2483294 - DNA, 25 bp, Homo sapien
cttgaagtatttgtctgaaagtggc

SEQ ID NO: 2483295 - DNA, 25 bp, Homo sapien
gttccataacagcttttttctctcc

SEQ ID NO: 2483296 - DNA, 25 bp, Homo sapien
tcagggggtccctctgatatatgct

SEQ ID NO: 2483297 - DNA, 25 bp, Homo sapien
aagtatttgtctgaaagtggccacc

SEQ ID NO: 2483298 - DNA, 25 bp, Homo sapien
tgctgatgtgttgcaagatggtgct

SEQ ID NO: 2483299 - DNA, 25 bp, Homo sapien
ctcaagggtgctgatgtgttgcaag

SEQ ID NO: 2483300 - DNA, 25 bp, Homo sapien
caagggtgctgatgtgttgcaagat

SEQ ID NO: 2483301 - DNA, 25 bp, Homo sapien
tgtgttgcaagatggtgctcccctc

SEQ ID NO: 2483302 - DNA, 25 bp, Homo sapien
cagcagaaggcgtcggagccgacca

SEQ ID NO: 2483303 - DNA, 25 bp, Homo sapien
ggcgtcggagccgaccaggaactcc

SEQ ID NO: 2483304 - DNA, 25 bp, Homo sapien
tggacagtgtctgaaagtagggcac

SEQ ID NO: 2483305 - DNA, 25 bp, Homo sapien
tagggcactagccaagttgcagcag

SEQ ID NO: 2483306 - DNA, 25 bp, Homo sapien
gtcacccagaagatgccgcaggtgt

SEQ ID NO: 2483307 - DNA, 25 bp, Homo sapien
aaagtcgacatagagccgctgcact

SEQ ID NO: 2483308 - DNA, 25 bp, Homo sapien
cacccagaagatgccgcaggtgttg

SEQ ID NO: 2483309 - DNA, 25 bp, Homo sapien
atagagccgctgcactttttctggg

SEQ ID NO: 2483310 - DNA, 25 bp, Homo sapien
cttggagaccagaccccacagagac

SEQ ID NO: 2483311 - DNA, 25 bp, Homo sapien
tggagaccagaccccacagagacat

SEQ ID NO: 2483312 - DNA, 25 bp, Homo sapien
ttggagaccagaccccacagagaca

SEQ ID NO: 2483313 - DNA, 25 bp, Homo sapien
ggaaagcaggctttgaatctgagtg

SEQ ID NO: 2483314 - DNA, 25 bp, Homo sapien
catcgcactgtgttgttaggatccc

SEQ ID NO: 2483315 - DNA, 25 bp, Homo sapien
gggcaaatctgatcatcctaagaag

SEQ ID NO: 2483316 - DNA, 25 bp, Homo sapien
tttagtaagctaggaggaaagagcc

SEQ ID NO: 2483317 - DNA, 25 bp, Homo sapien
gctcaggttcctccaataggccttt

SEQ ID NO: 2483318 - DNA, 25 bp, Homo sapien
agtgcccacttaccccagctctttt

SEQ ID NO: 2483319 - DNA, 25 bp, Homo sapien
tccagtgcccacttaccccagctct

SEQ ID NO: 2483320 - DNA, 25 bp, Homo sapien
ttctcctcaaggcagaatccttacc

SEQ ID NO: 2483321 - DNA, 25 bp, Homo sapien
ggccccataggtctgtagctctgtc

SEQ ID NO: 2483322 - DNA, 25 bp, Homo sapien
tagctctgtccagcgagttcaaggc

SEQ ID NO: 2483323 - DNA, 25 bp, Homo sapien
tcttcagtgtaagcagtggctgccc

SEQ ID NO: 2483324 - DNA, 25 bp, Homo sapien
tttctcagcgggcacttccaggccc

SEQ ID NO: 2483325 - DNA, 25 bp, Homo sapien
gtgactgtatcaccctcccctggac

SEQ ID NO: 2483326 - DNA, 25 bp, Homo sapien
gactgtgagggtgactgtatcaccc

SEQ ID NO: 2483327 - DNA, 25 bp, Homo sapien
tgtgagggtgactgtatcaccctcc

SEQ ID NO: 2483328 - DNA, 25 bp, Homo sapien
tatcaccctcccctggaccttgaca

SEQ ID NO: 2483329 - DNA, 25 bp, Homo sapien
aaaacatactttttagtgctggttg

SEQ ID NO: 2483330 - DNA, 25 bp, Homo sapien
cactcccggccctatatgtatctga

SEQ ID NO: 2483331 - DNA, 25 bp, Homo sapien
catactttttagtgctggttgtggg

SEQ ID NO: 2483332 - DNA, 25 bp, Homo sapien
gtatctgaattctaagtcatgataa

SEQ ID NO: 2483333 - DNA, 25 bp, Homo sapien
ttacttcacagaaggacaagttagc

SEQ ID NO: 2483334 - DNA, 25 bp, Homo sapien
acttcacagaaggacaagttagcca

SEQ ID NO: 2483335 - DNA, 25 bp, Homo sapien
tacttcacagaaggacaagttagcc

SEQ ID NO: 2483336 - DNA, 25 bp, Homo sapien
tttacttcacagaaggacaagttag

SEQ ID NO: 2483337 - DNA, 25 bp, Homo sapien
atgcacctccatatctagatcattt

SEQ ID NO: 2483338 - DNA, 25 bp, Homo sapien
ggactgcaggaatgcacctccatat

SEQ ID NO: 2483339 - DNA, 25 bp, Homo sapien
aggactgcaggaatgcacctccata

SEQ ID NO: 2483340 - DNA, 25 bp, Homo sapien
aggaatgcacctccatatctagatc

SEQ ID NO: 2483341 - DNA, 25 bp, Homo sapien
gaaaaacgaagcctgtgcctagtca

SEQ ID NO: 2483342 - DNA, 25 bp, Homo sapien
tggtaccccagacaagtagagagct

SEQ ID NO: 2483343 - DNA, 25 bp, Homo sapien
cagtaagagacctccaatagtcggg

SEQ ID NO: 2483344 - DNA, 25 bp, Homo sapien
tagtcgggtctcagacaggttccag

SEQ ID NO: 2483345 - DNA, 25 bp, Homo sapien
tgaaggatacctcctgcagccggat

SEQ ID NO: 2483346 - DNA, 25 bp, Homo sapien
ttaaagttcactgatgcacccctgg

SEQ ID NO: 2483347 - DNA, 25 bp, Homo sapien
taaatcttccctgcgtggatgagtg

SEQ ID NO: 2483348 - DNA, 25 bp, Homo sapien
gattctgccgaactgtccttcaagg

SEQ ID NO: 2483349 - DNA, 25 bp, Homo sapien
tccgtggcctcagcgtaaggttcac

SEQ ID NO: 2483350 - DNA, 25 bp, Homo sapien
tacaagggattcattctgggagaga

SEQ ID NO: 2483351 - DNA, 25 bp, Homo sapien
gatcccaggaggttacaagggattc

SEQ ID NO: 2483352 - DNA, 25 bp, Homo sapien
tccctgatagcgtccttgggctgct

SEQ ID NO: 2483353 - DNA, 25 bp, Homo sapien
ttagctccccaaggaggacgaagaa

SEQ ID NO: 2483354 - DNA, 25 bp, Homo sapien
cacagtggctgctggcctgtaatta

SEQ ID NO: 2483355 - DNA, 25 bp, Homo sapien
tgactgtgacctctgttggacccct

SEQ ID NO: 2483356 - DNA, 25 bp, Homo sapien
actgtgacctctgttggacccctgg

SEQ ID NO: 2483357 - DNA, 25 bp, Homo sapien
gctggaaggggtgctacctccccac

SEQ ID NO: 2483358 - DNA, 25 bp, Homo sapien
cacaacaggaaatggggtagtgatt

SEQ ID NO: 2483359 - DNA, 25 bp, Homo sapien
tctgagtctaatgaactggctgctg

SEQ ID NO: 2483360 - DNA, 25 bp, Homo sapien
agcagtccctctgagtctaatgaac

SEQ ID NO: 2483361 - DNA, 25 bp, Homo sapien
tacgaccgcatcgagacgatactgc

SEQ ID NO: 2483362 - DNA, 25 bp, Homo sapien
tgggtggatgccttctacgaccgca

SEQ ID NO: 2483363 - DNA, 25 bp, Homo sapien
ggcgcctctactgggtggatgcctt

SEQ ID NO: 2483364 - DNA, 25 bp, Homo sapien
actgctcaatggcacagaccggaag

SEQ ID NO: 2483365 - DNA, 25 bp, Homo sapien
gagtggcagtgtctaccgcttggaa

SEQ ID NO: 2483366 - DNA, 25 bp, Homo sapien
gagatccgaatgtatgatgcccagc

SEQ ID NO: 2483367 - DNA, 25 bp, Homo sapien
tgtgacccttctgcgcagtgagcgg

SEQ ID NO: 2483368 - DNA, 25 bp, Homo sapien
tatgaaggtcctgagctgaaccacg

SEQ ID NO: 2483369 - DNA, 25 bp, Homo sapien
caaatgccgggtgaacaatggcggc

SEQ ID NO: 2483370 - DNA, 25 bp, Homo sapien
gacgcagacggcgtcacttgcttgg

SEQ ID NO: 2483371 - DNA, 25 bp, Homo sapien
tgaggaccaggtgttggacgcagac

SEQ ID NO: 2483372 - DNA, 25 bp, Homo sapien
tgggagccgccagtgcgcctgtgct

SEQ ID NO: 2483373 - DNA, 25 bp, Homo sapien
catcctacgtgcctccaccccagtg

SEQ ID NO: 2483374 - DNA, 25 bp, Homo sapien
gaacccatcctacgtgcctccaccc

SEQ ID NO: 2483375 - DNA, 25 bp, Homo sapien
aaggatggagtgttttagttcttgg

SEQ ID NO: 2483376 - DNA, 25 bp, Homo sapien
ctccaggggcacctatgagatggcc

SEQ ID NO: 2483377 - DNA, 25 bp, Homo sapien
tgagatggccatgctcaacccccct

SEQ ID NO: 2483378 - DNA, 25 bp, Homo sapien
aaaggatggagtgttttagttcttg

SEQ ID NO: 2483379 - DNA, 25 bp, Homo sapien
gagtgagcacccctacttcggatag

SEQ ID NO: 2483380 - DNA, 25 bp, Homo sapien
aagtgaaagggataagagtgcagcc

SEQ ID NO: 2483381 - DNA, 25 bp, Homo sapien
cctcagctagcgtgggtgccctttt

SEQ ID NO: 2483382 - DNA, 25 bp, Homo sapien
gtgcccagactataacttccagagt

SEQ ID NO: 2483383 - DNA, 25 bp, Homo sapien
caaatgagcggagttttcggcctgg

SEQ ID NO: 2483384 - DNA, 25 bp, Homo sapien
ggagttaactgcgagcctgtcctca

SEQ ID NO: 2483385 - DNA, 25 bp, Homo sapien
ggctccaaacgctgggtaatcagtg

SEQ ID NO: 2483386 - DNA, 25 bp, Homo sapien
tagatccctcccgttagctttggcg

SEQ ID NO: 2483387 - DNA, 25 bp, Homo sapien
ctggaatctcagttgccctctctgg

SEQ ID NO: 2483388 - DNA, 25 bp, Homo sapien
atctcagttgccctctctggagttg

SEQ ID NO: 2483389 - DNA, 25 bp, Homo sapien
agttggggagacataggcttttgga

SEQ ID NO: 2483390 - DNA, 25 bp, Homo sapien
acaagctttgcagagtggttcatgg

SEQ ID NO: 2483391 - DNA, 25 bp, Homo sapien
tgtcagagacgcgtcctctttcttg

SEQ ID NO: 2483392 - DNA, 25 bp, Homo sapien
tagggcaagagccaggtatagtctc

SEQ ID NO: 2483393 - DNA, 25 bp, Homo sapien
ttgaacccctgtcatgatcacagtg

SEQ ID NO: 2483394 - DNA, 25 bp, Homo sapien
taacaagacttagaaggagggccca

SEQ ID NO: 2483395 - DNA, 25 bp, Homo sapien
tctgtctctgatcagagccgacacc

SEQ ID NO: 2483396 - DNA, 25 bp, Homo sapien
gacgtgattagcaggcgcagcaaat

SEQ ID NO: 2483397 - DNA, 25 bp, Homo sapien
gaaattgtattttgcccacggctgc

SEQ ID NO: 2483398 - DNA, 25 bp, Homo sapien
atcagagccgacaccagacgtgatt

SEQ ID NO: 2483399 - DNA, 25 bp, Homo sapien
ccagcccaagctgagcagcgccgcc

SEQ ID NO: 2483400 - DNA, 25 bp, Homo sapien
agtgcgctgcgcctcaggaggcaaa

SEQ ID NO: 2483401 - DNA, 25 bp, Homo sapien
gcggcagcgggaggcagtaggcttg

SEQ ID NO: 2483402 - DNA, 25 bp, Homo sapien
cagcgggaggcagtaggcttgggca

SEQ ID NO: 2483403 - DNA, 25 bp, Homo sapien
gccacgtcgcttggcactcagaggc

SEQ ID NO: 2483404 - DNA, 25 bp, Homo sapien
cttcttgttggctcacgtaggccac

SEQ ID NO: 2483405 - DNA, 25 bp, Homo sapien
ggccacgctcaacacgtagcctgtg

SEQ ID NO: 2483406 - DNA, 25 bp, Homo sapien
tgggctaacgtggagcccgccacgt

SEQ ID NO: 2483407 - DNA, 25 bp, Homo sapien
acagggtggccggagtgatgccttg

SEQ ID NO: 2483408 - DNA, 25 bp, Homo sapien
ccctctgcgtgggaacccggcctgt

SEQ ID NO: 2483409 - DNA, 25 bp, Homo sapien
ccaagggtcagaggcgcttccgctg

SEQ ID NO: 2483410 - DNA, 25 bp, Homo sapien
ccggcctgtgtaagcagtagcggga

SEQ ID NO: 2483411 - DNA, 25 bp, Homo sapien
tatagtcagtggaaactgcaaggaa

SEQ ID NO: 2483412 - DNA, 25 bp, Homo sapien
tcttatagtcagtggaaactgcaag

SEQ ID NO: 2483413 - DNA, 25 bp, Homo sapien
cttatagtcagtggaaactgcaagg

SEQ ID NO: 2483414 - DNA, 25 bp, Homo sapien
ttatagtcagtggaaactgcaagga

SEQ ID NO: 2483415 - DNA, 25 bp, Homo sapien
caaccctagagccatcgagaggtac

SEQ ID NO: 2483416 - DNA, 25 bp, Homo sapien
gggttgcgctgagtaccccaagcct

SEQ ID NO: 2483417 - DNA, 25 bp, Homo sapien
tttgcttctagtacgggagttgtgg

SEQ ID NO: 2483418 - DNA, 25 bp, Homo sapien
caagcctccctttgcttctagtacg

SEQ ID NO: 2483419 - DNA, 25 bp, Homo sapien
gtcattggggctcaggcggttccag

SEQ ID NO: 2483420 - DNA, 25 bp, Homo sapien
caggcggttccagggctccgggttg

SEQ ID NO: 2483421 - DNA, 25 bp, Homo sapien
ttgtattggtcattggggctcaggc

SEQ ID NO: 2483422 - DNA, 25 bp, Homo sapien
ttggtcattggggctcaggcggttc

SEQ ID NO: 2483423 - DNA, 25 bp, Homo sapien
aaccccagtgctctggtgaggactt

SEQ ID NO: 2483424 - DNA, 25 bp, Homo sapien
cccagtgctctggtgaggacttaga

SEQ ID NO: 2483425 - DNA, 25 bp, Homo sapien
ggccacaaccccagtgctctggtga

SEQ ID NO: 2483426 - DNA, 25 bp, Homo sapien
tgaggacttagaggtacccaaaagc

SEQ ID NO: 2483427 - DNA, 25 bp, Homo sapien
ggagaggcgcgggttccgcatttca

SEQ ID NO: 2483428 - DNA, 25 bp, Homo sapien
gctgagcggcgtcgtcatggcaacc

SEQ ID NO: 2483429 - DNA, 25 bp, Homo sapien
gttccgcatttcagggcgggccaag

SEQ ID NO: 2483430 - DNA, 25 bp, Homo sapien
tcgtcatggcaacccggccgggaga

SEQ ID NO: 2483431 - DNA, 25 bp, Homo sapien
cagggcacgggatccccactagggc

SEQ ID NO: 2483432 - DNA, 25 bp, Homo sapien
cagccctgagatgccggtcggtaca

SEQ ID NO: 2483433 - DNA, 25 bp, Homo sapien
atgcagcagggcacgggatccccac

SEQ ID NO: 2483434 - DNA, 25 bp, Homo sapien
tacagtcgaaggtgcatgcagcagg

SEQ ID NO: 2483435 - DNA, 25 bp, Homo sapien
ccatgcccaggcagattaagccgat

SEQ ID NO: 2483436 - DNA, 25 bp, Homo sapien
cgaagggcgagtcgcagcaagtaaa

SEQ ID NO: 2483437 - DNA, 25 bp, Homo sapien
aagtaaagcgcagcgctgcccatgc

SEQ ID NO: 2483438 - DNA, 25 bp, Homo sapien
cagattaagccgatcatcgggatga

SEQ ID NO: 2483439 - DNA, 25 bp, Homo sapien
tagaagcgggccccaagactggctc

SEQ ID NO: 2483440 - DNA, 25 bp, Homo sapien
ccccggatgtcttttgatctgccgg

SEQ ID NO: 2483441 - DNA, 25 bp, Homo sapien
gtcttttgatctgccggtagaagcg

SEQ ID NO: 2483442 - DNA, 25 bp, Homo sapien
ttgatctgccggtagaagcgggccc

SEQ ID NO: 2483443 - DNA, 25 bp, Homo sapien
tgttttcccagtctggtcctctgca

SEQ ID NO: 2483444 - DNA, 25 bp, Homo sapien
tttcccagtctggtcctctgcagtg

SEQ ID NO: 2483445 - DNA, 25 bp, Homo sapien
gttttcccagtctggtcctctgcag

SEQ ID NO: 2483446 - DNA, 25 bp, Homo sapien
tcccagtctggtcctctgcagtggc

SEQ ID NO: 2483447 - DNA, 25 bp, Homo sapien
ggcccagcccgtgcttctttggact

SEQ ID NO: 2483448 - DNA, 25 bp, Homo sapien
ttagcttggcccagcccgtgcttct

SEQ ID NO: 2483449 - DNA, 25 bp, Homo sapien
gcttctttggactcaccccacccca

SEQ ID NO: 2483450 - DNA, 25 bp, Homo sapien
ttggcccagcccgtgcttctttgga

SEQ ID NO: 2483451 - DNA, 25 bp, Homo sapien
tgtctgggagccaagtggtttctgc

SEQ ID NO: 2483452 - DNA, 25 bp, Homo sapien
cccaaagcctgtaggggaattgtct

SEQ ID NO: 2483453 - DNA, 25 bp, Homo sapien
tttctcctcaattccaggcccaaag

SEQ ID NO: 2483454 - DNA, 25 bp, Homo sapien
gtggtttctgctctccgactctctc

SEQ ID NO: 2483455 - DNA, 25 bp, Homo sapien
gcgagctatgcacccgtctctggga

SEQ ID NO: 2483456 - DNA, 25 bp, Homo sapien
gaaacaggaaagatcggacagatgc

SEQ ID NO: 2483457 - DNA, 25 bp, Homo sapien
tcactccggcggataatgagataaa

SEQ ID NO: 2483458 - DNA, 25 bp, Homo sapien
cctactctgacaagcgcggctgtaa

SEQ ID NO: 2483459 - DNA, 25 bp, Homo sapien
cgctcaccgagatgcaacgttacat

SEQ ID NO: 2483460 - DNA, 25 bp, Homo sapien
tttggttcccgtctctggctcgtgg

SEQ ID NO: 2483461 - DNA, 25 bp, Homo sapien
acgttacattattgcctccgctccg

SEQ ID NO: 2483462 - DNA, 25 bp, Homo sapien
ttctgagttccggtgaccccggcca

SEQ ID NO: 2483463 - DNA, 25 bp, Homo sapien
tgccattattaagggcgcctggtcc

SEQ ID NO: 2483464 - DNA, 25 bp, Homo sapien
cagattcgagattgccctaagccct

SEQ ID NO: 2483465 - DNA, 25 bp, Homo sapien
ctggtcccgaggcaccgagatgatc

SEQ ID NO: 2483466 - DNA, 25 bp, Homo sapien
cctattctctgggttgctgcctctg

SEQ ID NO: 2483467 - DNA, 25 bp, Homo sapien
tgtttatgcaaagcgctctccgccg

SEQ ID NO: 2483468 - DNA, 25 bp, Homo sapien
tgatgtgattggagcggacgcggct

SEQ ID NO: 2483469 - DNA, 25 bp, Homo sapien
tgagcgaacgagtgagacaaagccg

SEQ ID NO: 2483470 - DNA, 25 bp, Homo sapien
gggcaagggtcataagcccattccc

SEQ ID NO: 2483471 - DNA, 25 bp, Homo sapien
taatggatggagatgatgcggatgg

SEQ ID NO: 2483472 - DNA, 25 bp, Homo sapien
gatggagatgatgcggatggcgaag

SEQ ID NO: 2483473 - DNA, 25 bp, Homo sapien
agatgatgcggatggcgaagccgag

SEQ ID NO: 2483474 - DNA, 25 bp, Homo sapien
gagatgatgcggatggcgaagccga

SEQ ID NO: 2483475 - DNA, 25 bp, Homo sapien
ggcgggagactcaccccggcgcgcg

SEQ ID NO: 2483476 - DNA, 25 bp, Homo sapien
gggcgggagactcaccccggcgcgc

SEQ ID NO: 2483477 - DNA, 25 bp, Homo sapien
cgcgcacgtgcgtcacactgtcatt

SEQ ID NO: 2483478 - DNA, 25 bp, Homo sapien
actgtcattcggatacacgccgccg

SEQ ID NO: 2483479 - DNA, 25 bp, Homo sapien
acacgcctacgcactgtcactgaga

SEQ ID NO: 2483480 - DNA, 25 bp, Homo sapien
acgcctacgcactgtcactgagaca

SEQ ID NO: 2483481 - DNA, 25 bp, Homo sapien
gcaacacacactccccgctggctct

SEQ ID NO: 2483482 - DNA, 25 bp, Homo sapien
gagacgcgatggcaacacacactcc

SEQ ID NO: 2483483 - DNA, 25 bp, Homo sapien
aggcggagacgcgatggcaacacac

SEQ ID NO: 2483484 - DNA, 25 bp, Homo sapien
ctgcaggcggagacgcgatggcaac

SEQ ID NO: 2483485 - DNA, 25 bp, Homo sapien
ctcaggtccccaaactcctcgtctc

SEQ ID NO: 2483486 - DNA, 25 bp, Homo sapien
tccgctctcaggtccccaaactcct

SEQ ID NO: 2483487 - DNA, 25 bp, Homo sapien
tgggtccgctctcaggtccccaaac

SEQ ID NO: 2483488 - DNA, 25 bp, Homo sapien
caggtccccaaactcctcgtctcct

SEQ ID NO: 2483489 - DNA, 25 bp, Homo sapien
tgtctccgcgagagccggttagctg

SEQ ID NO: 2483490 - DNA, 25 bp, Homo sapien
gggccggcgtatttgcatatttgca

SEQ ID NO: 2483491 - DNA, 25 bp, Homo sapien
gagagccggttagctgtctgccctc

SEQ ID NO: 2483492 - DNA, 25 bp, Homo sapien
catttgcatacggtgctccgcaggg

SEQ ID NO: 2483493 - DNA, 25 bp, Homo sapien
tagatacgcgtttttttccagctct

SEQ ID NO: 2483494 - DNA, 25 bp, Homo sapien
tccctggctcctcctagtagatacg

SEQ ID NO: 2483495 - DNA, 25 bp, Homo sapien
gtttaataaattcgcaacattcgac

SEQ ID NO: 2483496 - DNA, 25 bp, Homo sapien
ttcgcaacattcgacagttcgccct

SEQ ID NO: 2483497 - DNA, 25 bp, Homo sapien
ccgtcgcgctcaggcgggccttcct

SEQ ID NO: 2483498 - DNA, 25 bp, Homo sapien
gggtgtgggtgtctcccgcttgcag

SEQ ID NO: 2483499 - DNA, 25 bp, Homo sapien
tgggcccgcccagaatggggtgtgg

SEQ ID NO: 2483500 - DNA, 25 bp, Homo sapien
ccaaactccactgggcccgcccaga

SEQ ID NO: 2483501 - DNA, 25 bp, Homo sapien
tctagaaagtcggtgggaaacagcc

SEQ ID NO: 2483502 - DNA, 25 bp, Homo sapien
tcctctagaaagtcggtgggaaaca

SEQ ID NO: 2483503 - DNA, 25 bp, Homo sapien
cctctagaaagtcggtgggaaacag

SEQ ID NO: 2483504 - DNA, 25 bp, Homo sapien
ctctagaaagtcggtgggaaacagc

SEQ ID NO: 2483505 - DNA, 25 bp, Homo sapien
gcccgcttcgtctcctttctgcacc

SEQ ID NO: 2483506 - DNA, 25 bp, Homo sapien
tagaccttgacgtagccgcccgctt

SEQ ID NO: 2483507 - DNA, 25 bp, Homo sapien
cggtgtagaccttgacgtagccgcc

SEQ ID NO: 2483508 - DNA, 25 bp, Homo sapien
cttgcggccggtgtagaccttgacg

SEQ ID NO: 2483509 - DNA, 25 bp, Homo sapien
gcccggacccgaatgatgaagtttg

SEQ ID NO: 2483510 - DNA, 25 bp, Homo sapien
tggtccttcttgagagtgatctgcc

SEQ ID NO: 2483511 - DNA, 25 bp, Homo sapien
cacgaaggatctcgtcacgcggtgc

SEQ ID NO: 2483512 - DNA, 25 bp, Homo sapien
tatctcgcggttccccacgaaggat

SEQ ID NO: 2483513 - DNA, 25 bp, Homo sapien
attggagtcatcaatgactgtgatc

SEQ ID NO: 2483514 - DNA, 25 bp, Homo sapien
ttggagtcatcaatgactgtgatct

SEQ ID NO: 2483515 - DNA, 25 bp, Homo sapien
tctccagggctttgaaccgatagag

SEQ ID NO: 2483516 - DNA, 25 bp, Homo sapien
cgatagagagccacaaagtaatgag

SEQ ID NO: 2483517 - DNA, 25 bp, Homo sapien
aatccagatcgtccttctccagggc

SEQ ID NO: 2483518 - DNA, 25 bp, Homo sapien
acaaagtaatgagactgctggaagc

SEQ ID NO: 2483519 - DNA, 25 bp, Homo sapien
catcaggtgtcttcttctcagcctt

SEQ ID NO: 2483520 - DNA, 25 bp, Homo sapien
gtcatcaggtgtcttcttctcagcc

SEQ ID NO: 2483521 - DNA, 25 bp, Homo sapien
tgtcatcaggtgtcttcttctcagc

SEQ ID NO: 2483522 - DNA, 25 bp, Homo sapien
cttgtcatcaggtgtcttcttctca

SEQ ID NO: 2483523 - DNA, 25 bp, Homo sapien
tcctctggtctggccgactctggct

SEQ ID NO: 2483524 - DNA, 25 bp, Homo sapien
cctctggtctggccgactctggctc

SEQ ID NO: 2483525 - DNA, 25 bp, Homo sapien
tgtcagctttccaaatgggaaaatg

SEQ ID NO: 2483526 - DNA, 25 bp, Homo sapien
tcagctttccaaatgggaaaatgac

SEQ ID NO: 2483527 - DNA, 25 bp, Homo sapien
tctgtcagctttccaaatgggaaaa

SEQ ID NO: 2483528 - DNA, 25 bp, Homo sapien
ttctgtcagctttccaaatgggaaa

SEQ ID NO: 2483529 - DNA, 25 bp, Homo sapien
acctcgtggggaggtacagtgctca

SEQ ID NO: 2483530 - DNA, 25 bp, Homo sapien
ggacctcgtggggaggtacagtgct

SEQ ID NO: 2483531 - DNA, 25 bp, Homo sapien
agggacctcgtggggaggtacagtg

SEQ ID NO: 2483532 - DNA, 25 bp, Homo sapien
cctcgtggggaggtacagtgctcac

SEQ ID NO: 2483533 - DNA, 25 bp, Homo sapien
ccagtgcgcagggtttcaaacacag

SEQ ID NO: 2483534 - DNA, 25 bp, Homo sapien
ttcaaacacaggatcattgcgattg

SEQ ID NO: 2483535 - DNA, 25 bp, Homo sapien
acacaggatcattgcgattggcagc

SEQ ID NO: 2483536 - DNA, 25 bp, Homo sapien
gtgcgcagggtttcaaacacaggat

SEQ ID NO: 2483537 - DNA, 25 bp, Homo sapien
tctttgacacaagcgtactgctggt

SEQ ID NO: 2483538 - DNA, 25 bp, Homo sapien
tagagtggggaactataggcccgat

SEQ ID NO: 2483539 - DNA, 25 bp, Homo sapien
caagcgtactgctggttgctgtaga

SEQ ID NO: 2483540 - DNA, 25 bp, Homo sapien
agagatctttgacacaagcgtactg

SEQ ID NO: 2483541 - DNA, 25 bp, Homo sapien
tgcagttcttacagcgaagcccaaa

SEQ ID NO: 2483542 - DNA, 25 bp, Homo sapien
ggttttgcagttcttacagcgaagc

SEQ ID NO: 2483543 - DNA, 25 bp, Homo sapien
cagcgaagcccaaacttgttgttga

SEQ ID NO: 2483544 - DNA, 25 bp, Homo sapien
ttcatggatgttggttttgcagttc

SEQ ID NO: 2483545 - DNA, 25 bp, Homo sapien
atcatccgggcacagacatcacaga

SEQ ID NO: 2483546 - DNA, 25 bp, Homo sapien
aacaatcatccgggcacagacatca

SEQ ID NO: 2483547 - DNA, 25 bp, Homo sapien
gaacaatcatccgggcacagacatc

SEQ ID NO: 2483548 - DNA, 25 bp, Homo sapien
caatcatccgggcacagacatcaca

SEQ ID NO: 2483549 - DNA, 25 bp, Homo sapien
cttcctcatagatgtagtagatggg

SEQ ID NO: 2483550 - DNA, 25 bp, Homo sapien
tcctcatagatgtagtagatgggcc

SEQ ID NO: 2483551 - DNA, 25 bp, Homo sapien
ctcatagatgtagtagatgggccca

SEQ ID NO: 2483552 - DNA, 25 bp, Homo sapien
tcatagatgtagtagatgggcccac

SEQ ID NO: 2483553 - DNA, 25 bp, Homo sapien
cagctcccactgcctccccattggc

SEQ ID NO: 2483554 - DNA, 25 bp, Homo sapien
tgcctccccattggcctggggctct

SEQ ID NO: 2483555 - DNA, 25 bp, Homo sapien
ccactgcctccccattggcctgggg

SEQ ID NO: 2483556 - DNA, 25 bp, Homo sapien
gctcccactgcctccccattggcct

SEQ ID NO: 2483557 - DNA, 25 bp, Homo sapien
cttcctgagtaactgctttagccgc

SEQ ID NO: 2483558 - DNA, 25 bp, Homo sapien
cctgtagaacccttcctgagtaact

SEQ ID NO: 2483559 - DNA, 25 bp, Homo sapien
tgagtaactgctttagccgctgtag

SEQ ID NO: 2483560 - DNA, 25 bp, Homo sapien
tcctgagtaactgctttagccgctg

SEQ ID NO: 2483561 - DNA, 25 bp, Homo sapien
tttgccgagtctctgctgggaagga

SEQ ID NO: 2483562 - DNA, 25 bp, Homo sapien
cactttgccgagtctctgctgggaa

SEQ ID NO: 2483563 - DNA, 25 bp, Homo sapien
cccactttgccgagtctctgctggg

SEQ ID NO: 2483564 - DNA, 25 bp, Homo sapien
gagggcttaggggactccagcacct

SEQ ID NO: 2483565 - DNA, 25 bp, Homo sapien
tttctgtcccttgcagtagggtggt

SEQ ID NO: 2483566 - DNA, 25 bp, Homo sapien
gaggttggaccccactatgaaatct

SEQ ID NO: 2483567 - DNA, 25 bp, Homo sapien
ccactatgaaatctaatccctttca

SEQ ID NO: 2483568 - DNA, 25 bp, Homo sapien
cttgcagtagggtggtcctcaaagg

SEQ ID NO: 2483569 - DNA, 25 bp, Homo sapien
gaagaagctgagtagattatagatc

SEQ ID NO: 2483570 - DNA, 25 bp, Homo sapien
gggtgagcagtcgtggaaatcaaga

SEQ ID NO: 2483571 - DNA, 25 bp, Homo sapien
gctgagtagattatagatcagggca

SEQ ID NO: 2483572 - DNA, 25 bp, Homo sapien
tcaagaggatgaagaggtaacttac

SEQ ID NO: 2483573 - DNA, 25 bp, Homo sapien
acaccagctacccagtcgctatttg

SEQ ID NO: 2483574 - DNA, 25 bp, Homo sapien
cctaagtcagtccacaggctgtaga

SEQ ID NO: 2483575 - DNA, 25 bp, Homo sapien
cagtcgctatttgtagacctcctag

SEQ ID NO: 2483576 - DNA, 25 bp, Homo sapien
ctgggagcctcgaggccttgatggt

SEQ ID NO: 2483577 - DNA, 25 bp, Homo sapien
ctcatagagctctcctatcagccat

SEQ ID NO: 2483578 - DNA, 25 bp, Homo sapien
atttgaactcatagagctctcctat

SEQ ID NO: 2483579 - DNA, 25 bp, Homo sapien
tatcagccatactagatggcttttt

SEQ ID NO: 2483580 - DNA, 25 bp, Homo sapien
gctctcctatcagccatactagatg

SEQ ID NO: 2483581 - DNA, 25 bp, Homo sapien
gaaaagctccatcttgcaggcaaga

SEQ ID NO: 2483582 - DNA, 25 bp, Homo sapien
aggttctttaatggccctgctctga

SEQ ID NO: 2483583 - DNA, 25 bp, Homo sapien
ggcaagatgacttctgctcttcgtc

SEQ ID NO: 2483584 - DNA, 25 bp, Homo sapien
gctcttcgtcttttttcagccacat

SEQ ID NO: 2483585 - DNA, 25 bp, Homo sapien
cctaaatgagtacacagtaccacag

SEQ ID NO: 2483586 - DNA, 25 bp, Homo sapien
aactcaactacaagggccctaaatg

SEQ ID NO: 2483587 - DNA, 25 bp, Homo sapien
tagaggtcacctactaagtccaagt

SEQ ID NO: 2483588 - DNA, 25 bp, Homo sapien
tagccaggcatgctagatcgcgcct

SEQ ID NO: 2483589 - DNA, 25 bp, Homo sapien
aaaatgatagaagaggatggaagcc

SEQ ID NO: 2483590 - DNA, 25 bp, Homo sapien
tgtgtctgttactgcggcacgaacc

SEQ ID NO: 2483591 - DNA, 25 bp, Homo sapien
ggactttcccaattctacctgacca

SEQ ID NO: 2483592 - DNA, 25 bp, Homo sapien
gagtccaatgccagtgtaggtatct

SEQ ID NO: 2483593 - DNA, 25 bp, Homo sapien
ccattcgaagtttgaagcgactcac

SEQ ID NO: 2483594 - DNA, 25 bp, Homo sapien
ttttggccattcgaagtttgaagcg

SEQ ID NO: 2483595 - DNA, 25 bp, Homo sapien
gccattcgaagtttgaagcgactca

SEQ ID NO: 2483596 - DNA, 25 bp, Homo sapien
tggccattcgaagtttgaagcgact

SEQ ID NO: 2483597 - DNA, 25 bp, Homo sapien
agccactggatcttggcgccagaca

SEQ ID NO: 2483598 - DNA, 25 bp, Homo sapien
ccagacatggcgagctgcgtgaaga

SEQ ID NO: 2483599 - DNA, 25 bp, Homo sapien
cgaggtccgagtggcggccattctc

SEQ ID NO: 2483600 - DNA, 25 bp, Homo sapien
gagtttgtccgcctcagtacgggtg

SEQ ID NO: 2483601 - DNA, 25 bp, Homo sapien
ggggattcagcatcccgtgactcac

SEQ ID NO: 2483602 - DNA, 25 bp, Homo sapien
taattaagcgctggaagggtgggca

SEQ ID NO: 2483603 - DNA, 25 bp, Homo sapien
tctgagatggcttggtagggaggac

SEQ ID NO: 2483604 - DNA, 25 bp, Homo sapien
tgctggactggtaattaagcgctgg

SEQ ID NO: 2483605 - DNA, 25 bp, Homo sapien
agatttgagtgcttgtctcttgccc

SEQ ID NO: 2483606 - DNA, 25 bp, Homo sapien
cagatttgagtgcttgtctcttgcc

SEQ ID NO: 2483607 - DNA, 25 bp, Homo sapien
gcagatttgagtgcttgtctcttgc

SEQ ID NO: 2483608 - DNA, 25 bp, Homo sapien
aggcagatttgagtgcttgtctctt

SEQ ID NO: 2483609 - DNA, 25 bp, Homo sapien
taaacaacattgactgccttgcatc

SEQ ID NO: 2483610 - DNA, 25 bp, Homo sapien
ctcatcccatgtaaacaacattgac

SEQ ID NO: 2483611 - DNA, 25 bp, Homo sapien
acaacattgactgccttgcatcaga

SEQ ID NO: 2483612 - DNA, 25 bp, Homo sapien
catgtaaacaacattgactgccttg

SEQ ID NO: 2483613 - DNA, 25 bp, Homo sapien
cgtgtaagttgactggccatggagc

SEQ ID NO: 2483614 - DNA, 25 bp, Homo sapien
tggcccaaaagggagtagcgcccat

SEQ ID NO: 2483615 - DNA, 25 bp, Homo sapien
gatggacagattgtactgtaatggc

SEQ ID NO: 2483616 - DNA, 25 bp, Homo sapien
gcaccgtgtaagttgactggccatg

SEQ ID NO: 2483617 - DNA, 25 bp, Homo sapien
ctagggagtaagagcaattggtttt

SEQ ID NO: 2483618 - DNA, 25 bp, Homo sapien
gaggctggtgacaggagagggtgct

SEQ ID NO: 2483619 - DNA, 25 bp, Homo sapien
gagggtgctggagactgggtaggag

SEQ ID NO: 2483620 - DNA, 25 bp, Homo sapien
tgggtaggagatgtgacagggctgc

SEQ ID NO: 2483621 - DNA, 25 bp, Homo sapien
ctgtgcagacactgctgaggctggt

SEQ ID NO: 2483622 - DNA, 25 bp, Homo sapien
ccgctggtccatgctgtagtattta

SEQ ID NO: 2483623 - DNA, 25 bp, Homo sapien
ccccgctggtccatgctgtagtatt

SEQ ID NO: 2483624 - DNA, 25 bp, Homo sapien
agctgcatgaccactacacctggtc

SEQ ID NO: 2483625 - DNA, 25 bp, Homo sapien
gggtccattagggacattcagctgc

SEQ ID NO: 2483626 - DNA, 25 bp, Homo sapien
cattaaacaaatagttggtgtcaga

SEQ ID NO: 2483627 - DNA, 25 bp, Homo sapien
caaatgtaggatagctagggagaga

SEQ ID NO: 2483628 - DNA, 25 bp, Homo sapien
tttggagagctaactcaaacggcca

SEQ ID NO: 2483629 - DNA, 25 bp, Homo sapien
catattctggtaagatgtttggact

SEQ ID NO: 2483630 - DNA, 25 bp, Homo sapien
gactgataggcttcttaccaccaga

SEQ ID NO: 2483631 - DNA, 25 bp, Homo sapien
taagtggcatcattaaacctgggca

SEQ ID NO: 2483632 - DNA, 25 bp, Homo sapien
cagaaaggtcgattgggcacagcaa

SEQ ID NO: 2483633 - DNA, 25 bp, Homo sapien
tcagtatagggtaaacgaggcacaa

SEQ ID NO: 2483634 - DNA, 25 bp, Homo sapien
aacagacgataaagagggattctcc

SEQ ID NO: 2483635 - DNA, 25 bp, Homo sapien
ggatcaaccagggtaactaagaaca

SEQ ID NO: 2483636 - DNA, 25 bp, Homo sapien
catttcttttgacgtgggaagccta

SEQ ID NO: 2483637 - DNA, 25 bp, Homo sapien
tcagtcagaagcctaggatcaacca

SEQ ID NO: 2483638 - DNA, 25 bp, Homo sapien
acctcagcctgtatgaaggcggaag

SEQ ID NO: 2483639 - DNA, 25 bp, Homo sapien
aaacctcagcctgtatgaaggcgga

SEQ ID NO: 2483640 - DNA, 25 bp, Homo sapien
aacctcagcctgtatgaaggcggaa

SEQ ID NO: 2483641 - DNA, 25 bp, Homo sapien
gagtactgctgtggcatctgtggtg

SEQ ID NO: 2483642 - DNA, 25 bp, Homo sapien
gtactgctgtggcatctgtggtgga

SEQ ID NO: 2483643 - DNA, 25 bp, Homo sapien
ctgagtactgctgtggcatctgtgg

SEQ ID NO: 2483644 - DNA, 25 bp, Homo sapien
tgagtactgctgtggcatctgtggt

SEQ ID NO: 2483645 - DNA, 25 bp, Homo sapien
cagagccagggggttgcagaaaccc

SEQ ID NO: 2483646 - DNA, 25 bp, Homo sapien
ggagactgaggcatctggtactgct

SEQ ID NO: 2483647 - DNA, 25 bp, Homo sapien
gactgaggcatctggtactgctcag

SEQ ID NO: 2483648 - DNA, 25 bp, Homo sapien
gaggcatctggtactgctcagagcc

SEQ ID NO: 2483649 - DNA, 25 bp, Homo sapien
gagtggtgaagcagtagagggatga

SEQ ID NO: 2483650 - DNA, 25 bp, Homo sapien
aagagaggagtggtgaagcagtaga

SEQ ID NO: 2483651 - DNA, 25 bp, Homo sapien
agtggtgaagcagtagagggatgaa

SEQ ID NO: 2483652 - DNA, 25 bp, Homo sapien
gaggagtggtgaagcagtagaggga

SEQ ID NO: 2483653 - DNA, 25 bp, Homo sapien
tcttaggccagtggaaacaaaacca

SEQ ID NO: 2483654 - DNA, 25 bp, Homo sapien
ctgttgctgaaggtctatgggagat

SEQ ID NO: 2483655 - DNA, 25 bp, Homo sapien
acaaaaccatgatgcaactgttgct

SEQ ID NO: 2483656 - DNA, 25 bp, Homo sapien
tgctttagggaactactgggatctt

SEQ ID NO: 2483657 - DNA, 25 bp, Homo sapien
ttttgcgagtcactacccactggaa

SEQ ID NO: 2483658 - DNA, 25 bp, Homo sapien
ctgagcaggtgggatcatgctatag

SEQ ID NO: 2483659 - DNA, 25 bp, Homo sapien
tggaaaggcggctggaccacatttt

SEQ ID NO: 2483660 - DNA, 25 bp, Homo sapien
tcatgctatagtacactggtacccc

SEQ ID NO: 2483661 - DNA, 25 bp, Homo sapien
atcatgccttggtaagccgcctgct

SEQ ID NO: 2483662 - DNA, 25 bp, Homo sapien
tgaccacgttgggggctataggcca

SEQ ID NO: 2483663 - DNA, 25 bp, Homo sapien
gaccacgttgggggctataggccac

SEQ ID NO: 2483664 - DNA, 25 bp, Homo sapien
gctgctgaccacgttgggggctata

SEQ ID NO: 2483665 - DNA, 25 bp, Homo sapien
gcagctgctgaccacgttgggggct

SEQ ID NO: 2483666 - DNA, 25 bp, Homo sapien
agaggtcgatattgctggttggagt

SEQ ID NO: 2483667 - DNA, 25 bp, Homo sapien
gggtgagagagaggtcgatattgct

SEQ ID NO: 2483668 - DNA, 25 bp, Homo sapien
cgggtgagagagaggtcgatattgc

SEQ ID NO: 2483669 - DNA, 25 bp, Homo sapien
gaggtcgatattgctggttggagtt

SEQ ID NO: 2483670 - DNA, 25 bp, Homo sapien
atgaagctagtctgctgagggtgct

SEQ ID NO: 2483671 - DNA, 25 bp, Homo sapien
cttggcgactaaggctcatttgtcc

SEQ ID NO: 2483672 - DNA, 25 bp, Homo sapien
gctgcttcagtagaaccttggcgac

SEQ ID NO: 2483673 - DNA, 25 bp, Homo sapien
gctgacccgtggaagccatgatgaa

SEQ ID NO: 2483674 - DNA, 25 bp, Homo sapien
ggattggggctgtatcaaacctcat

SEQ ID NO: 2483675 - DNA, 25 bp, Homo sapien
acaggattggggctgtatcaaacct

SEQ ID NO: 2483676 - DNA, 25 bp, Homo sapien
aggattggggctgtatcaaacctca

SEQ ID NO: 2483677 - DNA, 25 bp, Homo sapien
ttgagagagtataagacacaggatt

SEQ ID NO: 2483678 - DNA, 25 bp, Homo sapien
gatacaggccacacatgaacaagac

SEQ ID NO: 2483679 - DNA, 25 bp, Homo sapien
tgcttacaaggccatcacagactga

SEQ ID NO: 2483680 - DNA, 25 bp, Homo sapien
catggagtatagttcagcctgtgct

SEQ ID NO: 2483681 - DNA, 25 bp, Homo sapien
gacccagacatacctacagatacag

SEQ ID NO: 2483682 - DNA, 25 bp, Homo sapien
aacaggctgcggagagggctgcaga

SEQ ID NO: 2483683 - DNA, 25 bp, Homo sapien
ggagcttggagagaactgaacaggc

SEQ ID NO: 2483684 - DNA, 25 bp, Homo sapien
cttggagagaactgaacaggctgcg

SEQ ID NO: 2483685 - DNA, 25 bp, Homo sapien
tgttgtactgctggggcggagagac

SEQ ID NO: 2483686 - DNA, 25 bp, Homo sapien
acgagcttcaccgacacacaatttg

SEQ ID NO: 2483687 - DNA, 25 bp, Homo sapien
tcaccgacacacaatttgaaggcct

SEQ ID NO: 2483688 - DNA, 25 bp, Homo sapien
gacacacaatttgaaggcctgcttg

SEQ ID NO: 2483689 - DNA, 25 bp, Homo sapien
caatttgaaggcctgcttggacaga

SEQ ID NO: 2483690 - DNA, 25 bp, Homo sapien
gatcatgtgattattcaagggtggc

SEQ ID NO: 2483691 - DNA, 25 bp, Homo sapien
actgggatgaggtgacctggttgca

SEQ ID NO: 2483692 - DNA, 25 bp, Homo sapien
ggctgttgctgaggcgtgggtggga

SEQ ID NO: 2483693 - DNA, 25 bp, Homo sapien
catgtgattattcaagggtggctgt

SEQ ID NO: 2483694 - DNA, 25 bp, Homo sapien
aaaatcttcagcactactgatgtct

SEQ ID NO: 2483695 - DNA, 25 bp, Homo sapien
caaaatcttcagcactactgatgtc

SEQ ID NO: 2483696 - DNA, 25 bp, Homo sapien
aaatcttcagcactactgatgtctt

SEQ ID NO: 2483697 - DNA, 25 bp, Homo sapien
gcaaaatcttcagcactactgatgt

SEQ ID NO: 2483698 - DNA, 25 bp, Homo sapien
gaagctgctagctttggtgacaggg

SEQ ID NO: 2483699 - DNA, 25 bp, Homo sapien
agatccttcccgcactgccgccttt

SEQ ID NO: 2483700 - DNA, 25 bp, Homo sapien
gccgatgctgtcacctcgggtaagg

SEQ ID NO: 2483701 - DNA, 25 bp, Homo sapien
ctgtcacctcgggtaaggatagaga

SEQ ID NO: 2483702 - DNA, 25 bp, Homo sapien
aggtgcggctcagtccttcacggtt

SEQ ID NO: 2483703 - DNA, 25 bp, Homo sapien
ccagggatttgagttcgctgtctgt

SEQ ID NO: 2483704 - DNA, 25 bp, Homo sapien
tgagttcgctgtctgtgctgctctg

SEQ ID NO: 2483705 - DNA, 25 bp, Homo sapien
ggtgcggctcagtccttcacggttc

SEQ ID NO: 2483706 - DNA, 25 bp, Homo sapien
tctgccttctcttgtgagagctaga

SEQ ID NO: 2483707 - DNA, 25 bp, Homo sapien
aatctgccttctcttgtgagagcta

SEQ ID NO: 2483708 - DNA, 25 bp, Homo sapien
gctagaagaaaaggcttctttggag

SEQ ID NO: 2483709 - DNA, 25 bp, Homo sapien
gccttctcttgtgagagctagaaga

SEQ ID NO: 2483710 - DNA, 25 bp, Homo sapien
gatgtcatttagatatccgttctgg

SEQ ID NO: 2483711 - DNA, 25 bp, Homo sapien
tgatgtcatttagatatccgttctg

SEQ ID NO: 2483712 - DNA, 25 bp, Homo sapien
tgtcatttagatatccgttctggcc

SEQ ID NO: 2483713 - DNA, 25 bp, Homo sapien
tcatttagatatccgttctggccag

SEQ ID NO: 2483714 - DNA, 25 bp, Homo sapien
agggacaggatgacccatacccgca

SEQ ID NO: 2483715 - DNA, 25 bp, Homo sapien
gggccagggacaggatgacccatac

SEQ ID NO: 2483716 - DNA, 25 bp, Homo sapien
tacccgcatacccaatctgacttct

SEQ ID NO: 2483717 - DNA, 25 bp, Homo sapien
gacaggatgacccatacccgcatac

SEQ ID NO: 2483718 - DNA, 25 bp, Homo sapien
caacctgttccgtacacaacttagg

SEQ ID NO: 2483719 - DNA, 25 bp, Homo sapien
tgctgctattaaccaccaacctgtt

SEQ ID NO: 2483720 - DNA, 25 bp, Homo sapien
acttagggggttatcactggccaca

SEQ ID NO: 2483721 - DNA, 25 bp, Homo sapien
cacagtgcccaaccagtacttgctg

SEQ ID NO: 2483722 - DNA, 25 bp, Homo sapien
ggcaaatattctctctcggaccctt

SEQ ID NO: 2483723 - DNA, 25 bp, Homo sapien
ttctctctcggaccctttgatattc

SEQ ID NO: 2483724 - DNA, 25 bp, Homo sapien
cctctctctcttctattgacttgct

SEQ ID NO: 2483725 - DNA, 25 bp, Homo sapien
ggaccctttgatattcctcctctct

SEQ ID NO: 2483726 - DNA, 25 bp, Homo sapien
tacatctgaccatgcagtttgggag

SEQ ID NO: 2483727 - DNA, 25 bp, Homo sapien
taatgccatggcctgaagacccaaa

SEQ ID NO: 2483728 - DNA, 25 bp, Homo sapien
ggtttatagaactagcacctggcat

SEQ ID NO: 2483729 - DNA, 25 bp, Homo sapien
tagcctccagtcagtaaggatcgag

SEQ ID NO: 2483730 - DNA, 25 bp, Homo sapien
ctggttatcatctcggtccatactg

SEQ ID NO: 2483731 - DNA, 25 bp, Homo sapien
tggttatcatctcggtccatactgg

SEQ ID NO: 2483732 - DNA, 25 bp, Homo sapien
cctcttccaacccagcaggttatcc

SEQ ID NO: 2483733 - DNA, 25 bp, Homo sapien
agacatcctgatcctacaccttcct

SEQ ID NO: 2483734 - DNA, 25 bp, Homo sapien
caacccagcaggttatcccagggaa

SEQ ID NO: 2483735 - DNA, 25 bp, Homo sapien
cccagggaagtcttcccaaaccatg

SEQ ID NO: 2483736 - DNA, 25 bp, Homo sapien
catccggtgatatgaggtcatctga

SEQ ID NO: 2483737 - DNA, 25 bp, Homo sapien
tcaacattgtggtccatcccaaaat

SEQ ID NO: 2483738 - DNA, 25 bp, Homo sapien
catctgagggaacttcttgaactga

SEQ ID NO: 2483739 - DNA, 25 bp, Homo sapien
aaaataggcagctacccggtgtaat

SEQ ID NO: 2483740 - DNA, 25 bp, Homo sapien
gagtcaagactgtaccacggcgctc

SEQ ID NO: 2483741 - DNA, 25 bp, Homo sapien
taagactactcattgctgggtgcag

SEQ ID NO: 2483742 - DNA, 25 bp, Homo sapien
aaatctgggacaagtgcaagctgct

SEQ ID NO: 2483743 - DNA, 25 bp, Homo sapien
taggtcccacccacctggatgatgt

SEQ ID NO: 2483744 - DNA, 25 bp, Homo sapien
ttctaattttagcagcatcattctg

SEQ ID NO: 2483745 - DNA, 25 bp, Homo sapien
ttgttgtcattaataaattccagaa

SEQ ID NO: 2483746 - DNA, 25 bp, Homo sapien
aaattccagaatctcctgttctaat

SEQ ID NO: 2483747 - DNA, 25 bp, Homo sapien
ctcctgttctaattttagcagcatc

SEQ ID NO: 2483748 - DNA, 25 bp, Homo sapien
acaacccgagtatacattttgcagg

SEQ ID NO: 2483749 - DNA, 25 bp, Homo sapien
taatgctgctaagcctcacttgcct

SEQ ID NO: 2483750 - DNA, 25 bp, Homo sapien
tgctcattacagaagctgaaaaagg

SEQ ID NO: 2483751 - DNA, 25 bp, Homo sapien
aaaagcagccctcccatagacattg

SEQ ID NO: 2483752 - DNA, 25 bp, Homo sapien
tatcactcccaatgtgtgcttttta

SEQ ID NO: 2483753 - DNA, 25 bp, Homo sapien
ctttttaatcagtatactcccaaga

SEQ ID NO: 2483754 - DNA, 25 bp, Homo sapien
ttagctcttcttactatcactccca

SEQ ID NO: 2483755 - DNA, 25 bp, Homo sapien
ttaatcagtatactcccaagacttc

SEQ ID NO: 2483756 - DNA, 25 bp, Homo sapien
ttggaatcttgctatcccctaaccc

SEQ ID NO: 2483757 - DNA, 25 bp, Homo sapien
tcctcttatacccatcatgttatta

SEQ ID NO: 2483758 - DNA, 25 bp, Homo sapien
ttctgggaagccgtttggcctcttg

SEQ ID NO: 2483759 - DNA, 25 bp, Homo sapien
cgtttggcctcttggaatcttgcta

SEQ ID NO: 2483760 - DNA, 25 bp, Homo sapien
catgtaggtctattccagtggagtc

SEQ ID NO: 2483761 - DNA, 25 bp, Homo sapien
gagtccgtatattcctggctggagt

SEQ ID NO: 2483762 - DNA, 25 bp, Homo sapien
ccagtggagtccgtatattcctggc

SEQ ID NO: 2483763 - DNA, 25 bp, Homo sapien
caagaaattcatgtaggtctattcc

SEQ ID NO: 2483764 - DNA, 25 bp, Homo sapien
tccttttcagagacatcttttgtgg

SEQ ID NO: 2483765 - DNA, 25 bp, Homo sapien
cttttcagagacatcttttgtggac

SEQ ID NO: 2483766 - DNA, 25 bp, Homo sapien
ccttttcagagacatcttttgtgga

SEQ ID NO: 2483767 - DNA, 25 bp, Homo sapien
caggctacgcaccaactttagcttg

SEQ ID NO: 2483768 - DNA, 25 bp, Homo sapien
ctgggtttctaatggcccatcagca

SEQ ID NO: 2483769 - DNA, 25 bp, Homo sapien
actgccaggctacgcaccaacttta

SEQ ID NO: 2483770 - DNA, 25 bp, Homo sapien
ttctaatggcccatcagcaaatggg

SEQ ID NO: 2483771 - DNA, 25 bp, Homo sapien
gcatgaccatggttagatgtccgcc

SEQ ID NO: 2483772 - DNA, 25 bp, Homo sapien
ggcatgaccatggttagatgtccgc

SEQ ID NO: 2483773 - DNA, 25 bp, Homo sapien
catgaccatggttagatgtccgcct

SEQ ID NO: 2483774 - DNA, 25 bp, Homo sapien
tggcatgaccatggttagatgtccg

SEQ ID NO: 2483775 - DNA, 25 bp, Homo sapien
gacgcaaactggtatcttcacattc

SEQ ID NO: 2483776 - DNA, 25 bp, Homo sapien
ttgtttacagattcttccaccagtt

SEQ ID NO: 2483777 - DNA, 25 bp, Homo sapien
ctgacgcaaactggtatcttcacat

SEQ ID NO: 2483778 - DNA, 25 bp, Homo sapien
tttgtttacagattcttccaccagt

SEQ ID NO: 2483779 - DNA, 25 bp, Homo sapien
tcttgagtagtgttactgttagaca

SEQ ID NO: 2483780 - DNA, 25 bp, Homo sapien
tccagggtctcttgagtagtgttac

SEQ ID NO: 2483781 - DNA, 25 bp, Homo sapien
tatttccagggtctcttgagtagtg

SEQ ID NO: 2483782 - DNA, 25 bp, Homo sapien
cagggtctcttgagtagtgttactg

SEQ ID NO: 2483783 - DNA, 25 bp, Homo sapien
agaatacagtggcctctatggactc

SEQ ID NO: 2483784 - DNA, 25 bp, Homo sapien
gttcttcaatagaatacagtggcct

SEQ ID NO: 2483785 - DNA, 25 bp, Homo sapien
aatagaatacagtggcctctatgga

SEQ ID NO: 2483786 - DNA, 25 bp, Homo sapien
tcttcaatagaatacagtggcctct

SEQ ID NO: 2483787 - DNA, 25 bp, Homo sapien
caagaaaattgtcacaacagatatt

SEQ ID NO: 2483788 - DNA, 25 bp, Homo sapien
tctattcccagtgtagccctagaaa

SEQ ID NO: 2483789 - DNA, 25 bp, Homo sapien
attcccagtgtagccctagaaatgg

SEQ ID NO: 2483790 - DNA, 25 bp, Homo sapien
ccagtgtagccctagaaatggaatt

SEQ ID NO: 2483791 - DNA, 25 bp, Homo sapien
tttcccaagtcaatacaagagaggc

SEQ ID NO: 2483792 - DNA, 25 bp, Homo sapien
tgttcagggccatacactacaggca

SEQ ID NO: 2483793 - DNA, 25 bp, Homo sapien
caacctagctgtgtctgatccaaaa

SEQ ID NO: 2483794 - DNA, 25 bp, Homo sapien
caaatccaggtctacttggttccaa

SEQ ID NO: 2483795 - DNA, 25 bp, Homo sapien
aaccctgtgtcaggcaagtctatcg

SEQ ID NO: 2483796 - DNA, 25 bp, Homo sapien
gcatgtgttcacttcatgttctgtg

SEQ ID NO: 2483797 - DNA, 25 bp, Homo sapien
ccctgtgtcaggcaagtctatcggc

SEQ ID NO: 2483798 - DNA, 25 bp, Homo sapien
cctgtgtcaggcaagtctatcggca

SEQ ID NO: 2483799 - DNA, 25 bp, Homo sapien
aatcacccaagagctaagattcata

SEQ ID NO: 2483800 - DNA, 25 bp, Homo sapien
tcaggcctgctaacataacatgtat

SEQ ID NO: 2483801 - DNA, 25 bp, Homo sapien
gcccactgttgagatatgttgctca

SEQ ID NO: 2483802 - DNA, 25 bp, Homo sapien
aacaaagaaacctggatgacagcgc

SEQ ID NO: 2483803 - DNA, 25 bp, Homo sapien
tgcaacatccctctaattggtctct

SEQ ID NO: 2483804 - DNA, 25 bp, Homo sapien
tcagagcagatgtccctaaaatgat

SEQ ID NO: 2483805 - DNA, 25 bp, Homo sapien
tcttggcggaatgactgcaacatcc

SEQ ID NO: 2483806 - DNA, 25 bp, Homo sapien
gaccaccagtgtttgttctttgacc

SEQ ID NO: 2483807 - DNA, 25 bp, Homo sapien
tcagatcaggatggctttcccaaat

SEQ ID NO: 2483808 - DNA, 25 bp, Homo sapien
gcttataacctgtgaatctaacgtg

SEQ ID NO: 2483809 - DNA, 25 bp, Homo sapien
taccctaaggtgagttatccagtca

SEQ ID NO: 2483810 - DNA, 25 bp, Homo sapien
taaagcttagcaagaaaagatctgc

SEQ ID NO: 2483811 - DNA, 25 bp, Homo sapien
agcctatgagttccatcatccataa

SEQ ID NO: 2483812 - DNA, 25 bp, Homo sapien
cacaagatcttcccatgtcggcctc

SEQ ID NO: 2483813 - DNA, 25 bp, Homo sapien
tatgagttccatcatccataaggaa

SEQ ID NO: 2483814 - DNA, 25 bp, Homo sapien
gctcaccgttgcaaacccagcaatt

SEQ ID NO: 2483815 - DNA, 25 bp, Homo sapien
taaatgaccaggaactgtcttaaaa

SEQ ID NO: 2483816 - DNA, 25 bp, Homo sapien
aagtgggtactaattattgtcttcg

SEQ ID NO: 2483817 - DNA, 25 bp, Homo sapien
cctaggaagtgggtactaattattg

SEQ ID NO: 2483818 - DNA, 25 bp, Homo sapien
ctttaaatgaccaggaactgtctta

SEQ ID NO: 2483819 - DNA, 25 bp, Homo sapien
ggagaagctgttaacagtgagagct

SEQ ID NO: 2483820 - DNA, 25 bp, Homo sapien
gagaagagaattaagtaggtatagt

SEQ ID NO: 2483821 - DNA, 25 bp, Homo sapien
taggtatagtaacttttaggcacag

SEQ ID NO: 2483822 - DNA, 25 bp, Homo sapien
taacagtgagagctgttaagggagt

SEQ ID NO: 2483823 - DNA, 25 bp, Homo sapien
tcagctctattcaatggcacccagt

SEQ ID NO: 2483824 - DNA, 25 bp, Homo sapien
actggaggtagagggaatcccatct

SEQ ID NO: 2483825 - DNA, 25 bp, Homo sapien
gaacgcaccgcttcagatggatttt

SEQ ID NO: 2483826 - DNA, 25 bp, Homo sapien
aacaaaatcactacgtcactggagg

SEQ ID NO: 2483827 - DNA, 25 bp, Homo sapien
tttaacaaatgcctcctaggatgtt

SEQ ID NO: 2483828 - DNA, 25 bp, Homo sapien
tgcctcctaggatgttcataatcaa

SEQ ID NO: 2483829 - DNA, 25 bp, Homo sapien
catagcaaaggcttatcacatttaa

SEQ ID NO: 2483830 - DNA, 25 bp, Homo sapien
ctaggggatagttacgtaaagatat

SEQ ID NO: 2483831 - DNA, 25 bp, Homo sapien
gacaaaatctaacatagtaacaatt

SEQ ID NO: 2483832 - DNA, 25 bp, Homo sapien
cacaaaataagatggtagacaaaat

SEQ ID NO: 2483833 - DNA, 25 bp, Homo sapien
tacaaaaagatatagtcagaaccag

SEQ ID NO: 2483834 - DNA, 25 bp, Homo sapien
taaaatccaatactacaaaggttca

SEQ ID NO: 2483835 - DNA, 25 bp, Homo sapien
agggaagaatgggtgtctcttgtgg

SEQ ID NO: 2483836 - DNA, 25 bp, Homo sapien
ctcttgcataaagacatagagggaa

SEQ ID NO: 2483837 - DNA, 25 bp, Homo sapien
gaatgggtgtctcttgtggtaaaaa

SEQ ID NO: 2483838 - DNA, 25 bp, Homo sapien
tctcttgcataaagacatagaggga

SEQ ID NO: 2483839 - DNA, 25 bp, Homo sapien
gtgaccagatgccaaatgtaaattt

SEQ ID NO: 2483840 - DNA, 25 bp, Homo sapien
gctgtaaatcctgggcactatattt

SEQ ID NO: 2483841 - DNA, 25 bp, Homo sapien
ttctgctgtgccgatctgctgtaaa

SEQ ID NO: 2483842 - DNA, 25 bp, Homo sapien
cattacggactgtgttctctgatgc

SEQ ID NO: 2483843 - DNA, 25 bp, Homo sapien
tatcaactcaacctcaggaagggct

SEQ ID NO: 2483844 - DNA, 25 bp, Homo sapien
gatggagccccagtaaaaattcacg

SEQ ID NO: 2483845 - DNA, 25 bp, Homo sapien
gctacggtgggactaagaaggcaac

SEQ ID NO: 2483846 - DNA, 25 bp, Homo sapien
tattaccacacaccactgacaggag

SEQ ID NO: 2483847 - DNA, 25 bp, Homo sapien
tctgcctacagtaacataaaagggt

SEQ ID NO: 2483848 - DNA, 25 bp, Homo sapien
tctttgagcatagtctaagggaagg

SEQ ID NO: 2483849 - DNA, 25 bp, Homo sapien
tcagttctgatgtcctgcaaaacag

SEQ ID NO: 2483850 - DNA, 25 bp, Homo sapien
gacacccaacaaactagggcaggca

SEQ ID NO: 2483851 - DNA, 25 bp, Homo sapien
tactggtctgattccgaaacttgtc

SEQ ID NO: 2483852 - DNA, 25 bp, Homo sapien
gagaatacagcaacacatcctgcaa

SEQ ID NO: 2483853 - DNA, 25 bp, Homo sapien
taagattgcatcctccatactggtc

SEQ ID NO: 2483854 - DNA, 25 bp, Homo sapien
tacacaagtccccatactagcctgg

SEQ ID NO: 2483855 - DNA, 25 bp, Homo sapien
gctgaaactatacacatgcaccacc

SEQ ID NO: 2483856 - DNA, 25 bp, Homo sapien
tataagcacacaccaacacatctgg

SEQ ID NO: 2483857 - DNA, 25 bp, Homo sapien
ggactataagcacacaccaacacat

SEQ ID NO: 2483858 - DNA, 25 bp, Homo sapien
tggaggcagggtctctattgttcag

SEQ ID NO: 2483859 - DNA, 25 bp, Homo sapien
gaagagacattcgttcatgcagcaa

SEQ ID NO: 2483860 - DNA, 25 bp, Homo sapien
tactgagtaaccacttgcaaagcac

SEQ ID NO: 2483861 - DNA, 25 bp, Homo sapien
ctgaaacgttaggagggaagtgact

SEQ ID NO: 2483862 - DNA, 25 bp, Homo sapien
gaattaggactccacatggaagagg

SEQ ID NO: 2483863 - DNA, 25 bp, Homo sapien
tgagctctatttggctgccgttccc

SEQ ID NO: 2483864 - DNA, 25 bp, Homo sapien
tatattatcatgcacaagctgtcac

SEQ ID NO: 2483865 - DNA, 25 bp, Homo sapien
gcatatgataacacccagaattcag

SEQ ID NO: 2483866 - DNA, 25 bp, Homo sapien
tcttgtgctatggtagctgacctac

SEQ ID NO: 2483867 - DNA, 25 bp, Homo sapien
aaatgtaacagggaaggagagtcta

SEQ ID NO: 2483868 - DNA, 25 bp, Homo sapien
gaacgatagtgattccttgggagat

SEQ ID NO: 2483869 - DNA, 25 bp, Homo sapien
tatccaggcttaatccctaaacagt

SEQ ID NO: 2483870 - DNA, 25 bp, Homo sapien
ttttaagttactgggcatcaggcag

SEQ ID NO: 2483871 - DNA, 25 bp, Homo sapien
gagatggcgcatgtatacctttaat

SEQ ID NO: 2483872 - DNA, 25 bp, Homo sapien
tgtcaactacacttcaataaaggtc

SEQ ID NO: 2483873 - DNA, 25 bp, Homo sapien
aagaaaagaaatggcacagcgggca

SEQ ID NO: 2483874 - DNA, 25 bp, Homo sapien
cagtttactgtatgtcaactacact

SEQ ID NO: 2483875 - DNA, 25 bp, Homo sapien
atgagtccagtgctggaatggcatc

SEQ ID NO: 2483876 - DNA, 25 bp, Homo sapien
ggaatggcatcacatataagaaaca

SEQ ID NO: 2483877 - DNA, 25 bp, Homo sapien
tggaatggcatcacatataagaaac

SEQ ID NO: 2483878 - DNA, 25 bp, Homo sapien
attaagcctcctaatgatcccaagt

SEQ ID NO: 2483879 - DNA, 25 bp, Homo sapien
tccacgatgcctttctatattgact

SEQ ID NO: 2483880 - DNA, 25 bp, Homo sapien
tagttaactcaggagtggattactg

SEQ ID NO: 2483881 - DNA, 25 bp, Homo sapien
tatctctatagctagccagtcagta

SEQ ID NO: 2483882 - DNA, 25 bp, Homo sapien
gccatacaagtaccctcagcagcta

SEQ ID NO: 2483883 - DNA, 25 bp, Homo sapien
ggtcataaggcagaaactctctcaa

SEQ ID NO: 2483884 - DNA, 25 bp, Homo sapien
tgatatctttgcctgcctagccata

SEQ ID NO: 2483885 - DNA, 25 bp, Homo sapien
tattgtatctgcttgaaatgctccc

SEQ ID NO: 2483886 - DNA, 25 bp, Homo sapien
ggacttcaatatcaggcacctaggt

SEQ ID NO: 2483887 - DNA, 25 bp, Homo sapien
tatgtagcctcatcccattccgtgc

SEQ ID NO: 2483888 - DNA, 25 bp, Homo sapien
tgcacttgcatgactactttagacc

SEQ ID NO: 2483889 - DNA, 25 bp, Homo sapien
catatgccactaggtttaagaacga

SEQ ID NO: 2483890 - DNA, 25 bp, Homo sapien
cgaggcaggaggatcaccaggtcag

SEQ ID NO: 2483891 - DNA, 25 bp, Homo sapien
ctacaatcccagcactttgggaggc

SEQ ID NO: 2483892 - DNA, 25 bp, Homo sapien
ataaaacaaaaatgtggctgggcac

SEQ ID NO: 2483893 - DNA, 25 bp, Homo sapien
tgggcacagaggctcacgcctacaa

SEQ ID NO: 2483894 - DNA, 25 bp, Homo sapien
gagggcgcccacgtctccgcccgcc

SEQ ID NO: 2483895 - DNA, 25 bp, Homo sapien
ggagggcgcccacgtctccgcccgc

SEQ ID NO: 2483896 - DNA, 25 bp, Homo sapien
gctcggctgcggctcggccccgacg

SEQ ID NO: 2483897 - DNA, 25 bp, Homo sapien
cggcgcgcttctgggggcgggcttt

SEQ ID NO: 2483898 - DNA, 25 bp, Homo sapien
cggcggcgcgcttctgggggcgggc

SEQ ID NO: 2483899 - DNA, 25 bp, Homo sapien
gcggcgcgcttctgggggcgggctt

SEQ ID NO: 2483900 - DNA, 25 bp, Homo sapien
cgagggctgggaagcaggggggact

SEQ ID NO: 2483901 - DNA, 25 bp, Homo sapien
gctgggaagcaggggggactgggac

SEQ ID NO: 2483902 - DNA, 25 bp, Homo sapien
ggctgggaagcaggggggactggga

SEQ ID NO: 2483903 - DNA, 25 bp, Homo sapien
ctgggaagcaggggggactgggacg

SEQ ID NO: 2483904 - DNA, 25 bp, Homo sapien
gttgtcgtcacctcgtcctgcgttc

SEQ ID NO: 2483905 - DNA, 25 bp, Homo sapien
tcgtcctgcgttccggccgtccctg

SEQ ID NO: 2483906 - DNA, 25 bp, Homo sapien
tacgtccggcgttgtcgtcacctcg

SEQ ID NO: 2483907 - DNA, 25 bp, Homo sapien
ggcgttgtcgtcacctcgtcctgcg

SEQ ID NO: 2483908 - DNA, 25 bp, Homo sapien
aaggtcaggagttccggagcggcct

SEQ ID NO: 2483909 - DNA, 25 bp, Homo sapien
gtcaggagttccggagcggcctggc

SEQ ID NO: 2483910 - DNA, 25 bp, Homo sapien
agttccggagcggcctggccaacat

SEQ ID NO: 2483911 - DNA, 25 bp, Homo sapien
caggagttccggagcggcctggcca

SEQ ID NO: 2483912 - DNA, 25 bp, Homo sapien
gctttctatcttgctagtccctggg

SEQ ID NO: 2483913 - DNA, 25 bp, Homo sapien
tctcatggctaataaaaacctaggc

SEQ ID NO: 2483914 - DNA, 25 bp, Homo sapien
cagagcctgcctgcttatgctgtag

SEQ ID NO: 2483915 - DNA, 25 bp, Homo sapien
tatctcctacaagggccctaactgg

SEQ ID NO: 2483916 - DNA, 25 bp, Homo sapien
gcccaaggccgagtttgcgcaaaac

SEQ ID NO: 2483917 - DNA, 25 bp, Homo sapien
caattacagcttagtctccagggct

SEQ ID NO: 2483918 - DNA, 25 bp, Homo sapien
gactgtaaatctgagcttgagggct

SEQ ID NO: 2483919 - DNA, 25 bp, Homo sapien
tgaggtcgataatgtctgcagccca

SEQ ID NO: 2483920 - DNA, 25 bp, Homo sapien
tcaagtgtactctgtaggcttctgg

SEQ ID NO: 2483921 - DNA, 25 bp, Homo sapien
caggggtgtccacaaagtcaaagct

SEQ ID NO: 2483922 - DNA, 25 bp, Homo sapien
cagaggccgtgtgacatgtgattac

SEQ ID NO: 2483923 - DNA, 25 bp, Homo sapien
gtccagagcaacagttcttcaagtg

SEQ ID NO: 2483924 - DNA, 25 bp, Homo sapien
tctgcttcgactccgagcgggtgtc

SEQ ID NO: 2483925 - DNA, 25 bp, Homo sapien
gtgtcatgtgtgagaacggccagca

SEQ ID NO: 2483926 - DNA, 25 bp, Homo sapien
ggccgctgcaagttccatccaaagg

SEQ ID NO: 2483927 - DNA, 25 bp, Homo sapien
tccagaacttcgagacgtagagccg

SEQ ID NO: 2483928 - DNA, 25 bp, Homo sapien
tcctgggggtgcaataagcccggca

SEQ ID NO: 2483929 - DNA, 25 bp, Homo sapien
ttgcttccagctaccccgcctcatc

SEQ ID NO: 2483930 - DNA, 25 bp, Homo sapien
gggcgtaagcagtatagggtccctc

SEQ ID NO: 2483931 - DNA, 25 bp, Homo sapien
aataagcccggcaccccttctcttg

SEQ ID NO: 2483932 - DNA, 25 bp, Homo sapien
taaagggatatcctcaaaacagaac

SEQ ID NO: 2483933 - DNA, 25 bp, Homo sapien
tctttagagaagctccctcacccat

SEQ ID NO: 2483934 - DNA, 25 bp, Homo sapien
ctctcaccaccagagatgaccggaa

SEQ ID NO: 2483935 - DNA, 25 bp, Homo sapien
tcctgataataaaggaactgcatca

SEQ ID NO: 2483936 - DNA, 25 bp, Homo sapien
gattcttatctgagtgtgctatcac

SEQ ID NO: 2483937 - DNA, 25 bp, Homo sapien
gttgtggggtgtcatgcgattctta

SEQ ID NO: 2483938 - DNA, 25 bp, Homo sapien
tcatgcgattcttatctgagtgtgc

SEQ ID NO: 2483939 - DNA, 25 bp, Homo sapien
gggtgtcatgcgattcttatctgag

SEQ ID NO: 2483940 - DNA, 25 bp, Homo sapien
actccacctgcacagagtccctgtg

SEQ ID NO: 2483941 - DNA, 25 bp, Homo sapien
gagtccctgtggcattccccactcc

SEQ ID NO: 2483942 - DNA, 25 bp, Homo sapien
acagagtccctgtggcattccccac

SEQ ID NO: 2483943 - DNA, 25 bp, Homo sapien
tcactccacctgcacagagtccctg

SEQ ID NO: 2483944 - DNA, 25 bp, Homo sapien
ccagcatgaacaaagaggttctgtc

SEQ ID NO: 2483945 - DNA, 25 bp, Homo sapien
tttccccagcatgaacaaagaggtt

SEQ ID NO: 2483946 - DNA, 25 bp, Homo sapien
catgaacaaagaggttctgtcttcc

SEQ ID NO: 2483947 - DNA, 25 bp, Homo sapien
tccccagcatgaacaaagaggttct

SEQ ID NO: 2483948 - DNA, 25 bp, Homo sapien
gagcctattaattcttgtatctgag

SEQ ID NO: 2483949 - DNA, 25 bp, Homo sapien
aatgctccaggaggtaccgtagagt

SEQ ID NO: 2483950 - DNA, 25 bp, Homo sapien
tgagagaggcactgctctgattcgg

SEQ ID NO: 2483951 - DNA, 25 bp, Homo sapien
ccaggaggtaccgtagagtgtcatg

SEQ ID NO: 2483952 - DNA, 25 bp, Homo sapien
acatgaatgtcatcccactcagtac

SEQ ID NO: 2483953 - DNA, 25 bp, Homo sapien
ggtgaccacatgaatgtcatcccac

SEQ ID NO: 2483954 - DNA, 25 bp, Homo sapien
tcagggctccggtgaccacatgaat

SEQ ID NO: 2483955 - DNA, 25 bp, Homo sapien
gctccggtgaccacatgaatgtcat

SEQ ID NO: 2483956 - DNA, 25 bp, Homo sapien
gggaacacatacctcccatcggagg

SEQ ID NO: 2483957 - DNA, 25 bp, Homo sapien
gttctgggaacacatacctcccatc

SEQ ID NO: 2483958 - DNA, 25 bp, Homo sapien
acatacctcccatcggaggtgaccg

SEQ ID NO: 2483959 - DNA, 25 bp, Homo sapien
gaacacatacctcccatcggaggtg

SEQ ID NO: 2483960 - DNA, 25 bp, Homo sapien
cgataaatgccatccacatctagac

SEQ ID NO: 2483961 - DNA, 25 bp, Homo sapien
caccagaaagcgaagcttctggacc

SEQ ID NO: 2483962 - DNA, 25 bp, Homo sapien
ctctgtccaccagaaagcgaagctt

SEQ ID NO: 2483963 - DNA, 25 bp, Homo sapien
aagttcccgctcacccgataaatgc

SEQ ID NO: 2483964 - DNA, 25 bp, Homo sapien
tgcagagccgcaaaaagctgggcac

SEQ ID NO: 2483965 - DNA, 25 bp, Homo sapien
tcccgctggcagagtgattccaact

SEQ ID NO: 2483966 - DNA, 25 bp, Homo sapien
ccttcccgctggcagagtgattcca

SEQ ID NO: 2483967 - DNA, 25 bp, Homo sapien
aaaagctgggcaccgtgtctccttc

SEQ ID NO: 2483968 - DNA, 25 bp, Homo sapien
gctttagtttgttgcgcacgcggtt

SEQ ID NO: 2483969 - DNA, 25 bp, Homo sapien
ctgcaggctttgtaagggcggtctc

SEQ ID NO: 2483970 - DNA, 25 bp, Homo sapien
acgcggttctgctcggtgccttcgg

SEQ ID NO: 2483971 - DNA, 25 bp, Homo sapien
gtctcttcgcgatgagccgctttag

SEQ ID NO: 2483972 - DNA, 25 bp, Homo sapien
cgggtccagagcccgacagacgcag

SEQ ID NO: 2483973 - DNA, 25 bp, Homo sapien
ggtccagagcccgacagacgcagct

SEQ ID NO: 2483974 - DNA, 25 bp, Homo sapien
gctccgcgggtccagagcccgacag

SEQ ID NO: 2483975 - DNA, 25 bp, Homo sapien
tccgcgggtccagagcccgacagac

SEQ ID NO: 2483976 - DNA, 25 bp, Homo sapien
gggcgggccgtgtcgaaggtgagag

SEQ ID NO: 2483977 - DNA, 25 bp, Homo sapien
gagaaatctgtatccctagctggac

SEQ ID NO: 2483978 - DNA, 25 bp, Homo sapien
gggccgtgtcgaaggtgagagagga

SEQ ID NO: 2483979 - DNA, 25 bp, Homo sapien
cactgccggggtcccacatcccggc

SEQ ID NO: 2483980 - DNA, 25 bp, Homo sapien
gcctccctccgggcctccacccatc

SEQ ID NO: 2483981 - DNA, 25 bp, Homo sapien
gtcggagcctccctccgggcctcca

SEQ ID NO: 2483982 - DNA, 25 bp, Homo sapien
tccctccgggcctccacccatctaa

SEQ ID NO: 2483983 - DNA, 25 bp, Homo sapien
tcggagcctccctccgggcctccac

SEQ ID NO: 2483984 - DNA, 25 bp, Homo sapien
actgcagcaggaactcgtggccagg

SEQ ID NO: 2483985 - DNA, 25 bp, Homo sapien
aactcgtggccagggatcgtgcgga

SEQ ID NO: 2483986 - DNA, 25 bp, Homo sapien
agctctgtctcgtggtccgactgca

SEQ ID NO: 2483987 - DNA, 25 bp, Homo sapien
tctcgtggtccgactgcagcaggaa

SEQ ID NO: 2483988 - DNA, 25 bp, Homo sapien
gtccacgctactttcgggccggcta

SEQ ID NO: 2483989 - DNA, 25 bp, Homo sapien
ctggacaggtggcggccgtgcgcca

SEQ ID NO: 2483990 - DNA, 25 bp, Homo sapien
caggtccacgctactttcgggccgg

SEQ ID NO: 2483991 - DNA, 25 bp, Homo sapien
cgcgcaggtccacgctactttcggg

SEQ ID NO: 2483992 - DNA, 25 bp, Homo sapien
gaggccacggtgttgtttccttcac

SEQ ID NO: 2483993 - DNA, 25 bp, Homo sapien
ccctctccccggtgggctgtgagga

SEQ ID NO: 2483994 - DNA, 25 bp, Homo sapien
gctgccgcccccacattggcgtgag

SEQ ID NO: 2483995 - DNA, 25 bp, Homo sapien
cgtgaggcggtaggcagcgcccgca

SEQ ID NO: 2483996 - DNA, 25 bp, Homo sapien
tcggcggtggctctcggtagaacac

SEQ ID NO: 2483997 - DNA, 25 bp, Homo sapien
tggctctcggtagaacaccaggctg

SEQ ID NO: 2483998 - DNA, 25 bp, Homo sapien
gctgtcggcggtggctctcggtaga

SEQ ID NO: 2483999 - DNA, 25 bp, Homo sapien
ggtggctctcggtagaacaccaggc

SEQ ID NO: 2484000 - DNA, 25 bp, Homo sapien
ttgagcagacccgacttttccacct

SEQ ID NO: 2484001 - DNA, 25 bp, Homo sapien
ggtcatgttgagcagacccgacttt

SEQ ID NO: 2484002 - DNA, 25 bp, Homo sapien
atcttggtcatgttgagcagacccg

SEQ ID NO: 2484003 - DNA, 25 bp, Homo sapien
catgttgagcagacccgacttttcc

SEQ ID NO: 2484004 - DNA, 25 bp, Homo sapien
gagtgaagtcccttaaagttgctgg

SEQ ID NO: 2484005 - DNA, 25 bp, Homo sapien
gagggaatgggatctgtaagtcacc

SEQ ID NO: 2484006 - DNA, 25 bp, Homo sapien
ctgggtaggaggatattcagaaaga

SEQ ID NO: 2484007 - DNA, 25 bp, Homo sapien
tccatagtggccacggctttcccta

SEQ ID NO: 2484008 - DNA, 25 bp, Homo sapien
tggagggtcaagctgcgaggtgcgt

SEQ ID NO: 2484009 - DNA, 25 bp, Homo sapien
ggctggagggtcaagctgcgaggtg

SEQ ID NO: 2484010 - DNA, 25 bp, Homo sapien
aggtcgaggggcctgcaaggctgga

SEQ ID NO: 2484011 - DNA, 25 bp, Homo sapien
gagggtcaagctgcgaggtgcgttg

SEQ ID NO: 2484012 - DNA, 25 bp, Homo sapien
ggttgcaggacatcattgttcctct

SEQ ID NO: 2484013 - DNA, 25 bp, Homo sapien
tgaggttgcaggacatcattgttcc

SEQ ID NO: 2484014 - DNA, 25 bp, Homo sapien
gcaggacatcattgttcctcttcag

SEQ ID NO: 2484015 - DNA, 25 bp, Homo sapien
ttgcctgaggttgcaggacatcatt

SEQ ID NO: 2484016 - DNA, 25 bp, Homo sapien
tttatgtagaagcagcgtccagagt

SEQ ID NO: 2484017 - DNA, 25 bp, Homo sapien
caggttacagtacacagggggctct

SEQ ID NO: 2484018 - DNA, 25 bp, Homo sapien
gacagcggcgaaggtccaccaggtt

SEQ ID NO: 2484019 - DNA, 25 bp, Homo sapien
gggaccgaggacagcggcgaaggtc

SEQ ID NO: 2484020 - DNA, 25 bp, Homo sapien
ctcctcacttcctgttgccaacttc

SEQ ID NO: 2484021 - DNA, 25 bp, Homo sapien
tgaggtgacccagggtactggggga

SEQ ID NO: 2484022 - DNA, 25 bp, Homo sapien
agaagacagagaagggtctacagaa

SEQ ID NO: 2484023 - DNA, 25 bp, Homo sapien
ggctgaggtgacccagggtactggg

SEQ ID NO: 2484024 - DNA, 25 bp, Homo sapien
tggcactggcttctgacggcaagtc

SEQ ID NO: 2484025 - DNA, 25 bp, Homo sapien
tcctggaaaggcttcagaaggctgg

SEQ ID NO: 2484026 - DNA, 25 bp, Homo sapien
gggctcagattgtcagtgctgacgc

SEQ ID NO: 2484027 - DNA, 25 bp, Homo sapien
gctgacgctcctacacattttgcgg

SEQ ID NO: 2484028 - DNA, 25 bp, Homo sapien
gtcttgccaaccaccagtcggagtt

SEQ ID NO: 2484029 - DNA, 25 bp, Homo sapien
gagggagcttctaggcgtcttgcca

SEQ ID NO: 2484030 - DNA, 25 bp, Homo sapien
tatcatataggctgctgggacgaag

SEQ ID NO: 2484031 - DNA, 25 bp, Homo sapien
tggtctttcgaagcagtaggaacct

SEQ ID NO: 2484032 - DNA, 25 bp, Homo sapien
tggagacccagaagggaataggcct

SEQ ID NO: 2484033 - DNA, 25 bp, Homo sapien
cctggtgaggatcggtgacaggttt

SEQ ID NO: 2484034 - DNA, 25 bp, Homo sapien
gggaggtgaggacgggagcccttga

SEQ ID NO: 2484035 - DNA, 25 bp, Homo sapien
gagggtagagcaaacagcctggtga

SEQ ID NO: 2484036 - DNA, 25 bp, Homo sapien
tcaggagcaggagttggtcctgggt

SEQ ID NO: 2484037 - DNA, 25 bp, Homo sapien
attcaggagcaggagttggtcctgg

SEQ ID NO: 2484038 - DNA, 25 bp, Homo sapien
gagcaggagttggtcctgggtagtg

SEQ ID NO: 2484039 - DNA, 25 bp, Homo sapien
caggagcaggagttggtcctgggta

SEQ ID NO: 2484040 - DNA, 25 bp, Homo sapien
gacacaggaaggagataagaagaaa

SEQ ID NO: 2484041 - DNA, 25 bp, Homo sapien
gaagaaagaatcaggttcaagacag

SEQ ID NO: 2484042 - DNA, 25 bp, Homo sapien
ggacacaggaaggagataagaagaa

SEQ ID NO: 2484043 - DNA, 25 bp, Homo sapien
gagataagaagaaagaatcaggttc

SEQ ID NO: 2484044 - DNA, 25 bp, Homo sapien
ctctcagcttctccactgcacaatg

SEQ ID NO: 2484045 - DNA, 25 bp, Homo sapien
tctccactgcacaatgtgaggcttt

SEQ ID NO: 2484046 - DNA, 25 bp, Homo sapien
tcagcttctccactgcacaatgtga

SEQ ID NO: 2484047 - DNA, 25 bp, Homo sapien
cagcttctccactgcacaatgtgag

SEQ ID NO: 2484048 - DNA, 25 bp, Homo sapien
gtgctggcccagctactgtagtccc

SEQ ID NO: 2484049 - DNA, 25 bp, Homo sapien
tgctggcccagctactgtagtccca

SEQ ID NO: 2484050 - DNA, 25 bp, Homo sapien
tgtgctggcccagctactgtagtcc

SEQ ID NO: 2484051 - DNA, 25 bp, Homo sapien
gttgttgataggatggatatgtaca

SEQ ID NO: 2484052 - DNA, 25 bp, Homo sapien
tgataggatggatatgtacactaac

SEQ ID NO: 2484053 - DNA, 25 bp, Homo sapien
tgttgataggatggatatgtacact

SEQ ID NO: 2484054 - DNA, 25 bp, Homo sapien
gttgataggatggatatgtacacta

SEQ ID NO: 2484055 - DNA, 25 bp, Homo sapien
ttccactttgtcactaattccgcac

SEQ ID NO: 2484056 - DNA, 25 bp, Homo sapien
tccactttgtcactaattccgcaca

SEQ ID NO: 2484057 - DNA, 25 bp, Homo sapien
ccactttgtcactaattccgcacat

SEQ ID NO: 2484058 - DNA, 25 bp, Homo sapien
cagtcgttaagttcttggctgcagc

SEQ ID NO: 2484059 - DNA, 25 bp, Homo sapien
cattctcagccgattgtttgggtga

SEQ ID NO: 2484060 - DNA, 25 bp, Homo sapien
tctcccactgtgaccttcagataat

SEQ ID NO: 2484061 - DNA, 25 bp, Homo sapien
tttgggtgactcttaggaggttctc

SEQ ID NO: 2484062 - DNA, 25 bp, Homo sapien
cgggtatggtggtgcgatcctgtag

SEQ ID NO: 2484063 - DNA, 25 bp, Homo sapien
aattaaaggccacatgcagtgactc

SEQ ID NO: 2484064 - DNA, 25 bp, Homo sapien
cgtatgtgggattgagggtcacatc

SEQ ID NO: 2484065 - DNA, 25 bp, Homo sapien
tctatatacaagctgagacctttcc

SEQ ID NO: 2484066 - DNA, 25 bp, Homo sapien
ttccttttgtctactccaagccttc

SEQ ID NO: 2484067 - DNA, 25 bp, Homo sapien
caagccttccccctgcgtatgtggg

SEQ ID NO: 2484068 - DNA, 25 bp, Homo sapien
tgcttggtgcagattcaccattcgg

SEQ ID NO: 2484069 - DNA, 25 bp, Homo sapien
caggcgctcgatttcctgcttgagc

SEQ ID NO: 2484070 - DNA, 25 bp, Homo sapien
tgaccactctgtttccgtttcctgg

SEQ ID NO: 2484071 - DNA, 25 bp, Homo sapien
caccattcggtcaatcagagctcgg

SEQ ID NO: 2484072 - DNA, 25 bp, Homo sapien
agccagggagctctgactggaatct

SEQ ID NO: 2484073 - DNA, 25 bp, Homo sapien
gactggaatctggagagtgagggct

SEQ ID NO: 2484074 - DNA, 25 bp, Homo sapien
tgactggaatctggagagtgagggc

SEQ ID NO: 2484075 - DNA, 25 bp, Homo sapien
gccagagaagcagggtcaagagtgg

SEQ ID NO: 2484076 - DNA, 25 bp, Homo sapien
cagggtcaagagtggtgaagatttt

SEQ ID NO: 2484077 - DNA, 25 bp, Homo sapien
tcctcagtcagccaagccagagaag

SEQ ID NO: 2484078 - DNA, 25 bp, Homo sapien
gaagcagggtcaagagtggtgaaga

SEQ ID NO: 2484079 - DNA, 25 bp, Homo sapien
gaacatagatattagttgagaaggg

SEQ ID NO: 2484080 - DNA, 25 bp, Homo sapien
aacatagatattagttgagaaggga

SEQ ID NO: 2484081 - DNA, 25 bp, Homo sapien
ggaacatagatattagttgagaagg

SEQ ID NO: 2484082 - DNA, 25 bp, Homo sapien
tctgaagacaggacctcttgcaggt

SEQ ID NO: 2484083 - DNA, 25 bp, Homo sapien
atctgaagacaggacctcttgcagg

SEQ ID NO: 2484084 - DNA, 25 bp, Homo sapien
tatgccacaagttggcaagctggtc

SEQ ID NO: 2484085 - DNA, 25 bp, Homo sapien
catgtagcaaacagtctatgccaca

SEQ ID NO: 2484086 - DNA, 25 bp, Homo sapien
tctatgccacaagttggcaagctgg

SEQ ID NO: 2484087 - DNA, 25 bp, Homo sapien
ggctggaacaagctccatgtagcaa

SEQ ID NO: 2484088 - DNA, 25 bp, Homo sapien
cacgctagagactataggactttta

SEQ ID NO: 2484089 - DNA, 25 bp, Homo sapien
agagatgaagagtcacgctagagac

SEQ ID NO: 2484090 - DNA, 25 bp, Homo sapien
gagtcacgctagagactataggact

SEQ ID NO: 2484091 - DNA, 25 bp, Homo sapien
gaagagtcacgctagagactatagg

SEQ ID NO: 2484092 - DNA, 25 bp, Homo sapien
tgtatgaagatacacttccttcttg

SEQ ID NO: 2484093 - DNA, 25 bp, Homo sapien
tgctttcaggtgtggtgatgtatga

SEQ ID NO: 2484094 - DNA, 25 bp, Homo sapien
gctttcaggtgtggtgatgtatgaa

SEQ ID NO: 2484095 - DNA, 25 bp, Homo sapien
ctgctttcaggtgtggtgatgtatg

SEQ ID NO: 2484096 - DNA, 25 bp, Homo sapien
gcaacaaagagaaatgtcagccatt

SEQ ID NO: 2484097 - DNA, 25 bp, Homo sapien
gggcaacaaagagaaatgtcagcca

SEQ ID NO: 2484098 - DNA, 25 bp, Homo sapien
atgtcagccatttttggaaggggga

SEQ ID NO: 2484099 - DNA, 25 bp, Homo sapien
ctgtgggcaacaaagagaaatgtca

SEQ ID NO: 2484100 - DNA, 25 bp, Homo sapien
taaccttgtgatccatcgcttccca

SEQ ID NO: 2484101 - DNA, 25 bp, Homo sapien
agctaccgtgctgggcccttatttt

SEQ ID NO: 2484102 - DNA, 25 bp, Homo sapien
ccttgtgatccatcgcttcccaaag

SEQ ID NO: 2484103 - DNA, 25 bp, Homo sapien
aaccttgtgatccatcgcttcccaa

SEQ ID NO: 2484104 - DNA, 25 bp, Homo sapien
tacttggtccctgtagccatttcga

SEQ ID NO: 2484105 - DNA, 25 bp, Homo sapien
tttttagttgctgacatttgtagtc

SEQ ID NO: 2484106 - DNA, 25 bp, Homo sapien
tagccatttcgaagggcagaagagg

SEQ ID NO: 2484107 - DNA, 25 bp, Homo sapien
tgtggggtatgcatacttggtccct

SEQ ID NO: 2484108 - DNA, 25 bp, Homo sapien
atagtaaagtcctggccaactcagc

SEQ ID NO: 2484109 - DNA, 25 bp, Homo sapien
tcaaatctgccagggtaaaaactaa

SEQ ID NO: 2484110 - DNA, 25 bp, Homo sapien
tttctctaaatccaaagcaggcctc

SEQ ID NO: 2484111 - DNA, 25 bp, Homo sapien
caggcctcaaatctgccagggtaaa

SEQ ID NO: 2484112 - DNA, 25 bp, Homo sapien
tcctgaccacctgatgtaacactct

SEQ ID NO: 2484113 - DNA, 25 bp, Homo sapien
gaacttcagactctgctgtctactg

SEQ ID NO: 2484114 - DNA, 25 bp, Homo sapien
cacaccctgcaatccaaagtactag

SEQ ID NO: 2484115 - DNA, 25 bp, Homo sapien
gcttaagctaaaaaccttggtatca

SEQ ID NO: 2484116 - DNA, 25 bp, Homo sapien
tcatcagcagtagagcctcaggtca

SEQ ID NO: 2484117 - DNA, 25 bp, Homo sapien
gctggcctgatgcaatggttacaca

SEQ ID NO: 2484118 - DNA, 25 bp, Homo sapien
taaagaggcagggactaatcccgag

SEQ ID NO: 2484119 - DNA, 25 bp, Homo sapien
gatggtcacccagtcttagagcggg

SEQ ID NO: 2484120 - DNA, 25 bp, Homo sapien
gcggacaggcctaacgatgaggcct

SEQ ID NO: 2484121 - DNA, 25 bp, Homo sapien
gacaggcctaacgatgaggcctgaa

SEQ ID NO: 2484122 - DNA, 25 bp, Homo sapien
ccgcggacaggcctaacgatgaggc

SEQ ID NO: 2484123 - DNA, 25 bp, Homo sapien
ggcctaacgatgaggcctgaagttg

SEQ ID NO: 2484124 - DNA, 25 bp, Homo sapien
ggtccctaacttcactgtggaggag

SEQ ID NO: 2484125 - DNA, 25 bp, Homo sapien
gagacgccgtcgtccgaagcaatag

SEQ ID NO: 2484126 - DNA, 25 bp, Homo sapien
ggtttgtaagcaccaccccagaata

SEQ ID NO: 2484127 - DNA, 25 bp, Homo sapien
gaaagaatgaatttcccaagggcaa

SEQ ID NO: 2484128 - DNA, 25 bp, Homo sapien
ctgccacccgctcatctttaacatg

SEQ ID NO: 2484129 - DNA, 25 bp, Homo sapien
gctcagtgccttagacttaagtctc

SEQ ID NO: 2484130 - DNA, 25 bp, Homo sapien
tctttaacatgatacgctcagtgcc

SEQ ID NO: 2484131 - DNA, 25 bp, Homo sapien
attttggctctgtcgctgccacccg

SEQ ID NO: 2484132 - DNA, 25 bp, Homo sapien
caatcagaaagtggcacgccggcat

SEQ ID NO: 2484133 - DNA, 25 bp, Homo sapien
ggccgctcggtgatccgcggcggcg

SEQ ID NO: 2484134 - DNA, 25 bp, Homo sapien
cctggcccccatggcgcatgcgcgg

SEQ ID NO: 2484135 - DNA, 25 bp, Homo sapien
cgggaggccgctcggtgatccgcgg

SEQ ID NO: 2484136 - DNA, 25 bp, Homo sapien
ggcccccatggcgcatgcgcgggag

SEQ ID NO: 2484137 - DNA, 25 bp, Homo sapien
ggctcgggctccaccgaccctcctc

SEQ ID NO: 2484138 - DNA, 25 bp, Homo sapien
tcgggctccaccgaccctcctccca

SEQ ID NO: 2484139 - DNA, 25 bp, Homo sapien
ggaggctcgggctccaccgaccctc

SEQ ID NO: 2484140 - DNA, 25 bp, Homo sapien
cggaggctcgggctccaccgaccct

SEQ ID NO: 2484141 - DNA, 25 bp, Homo sapien
gccgcgactgcgcagggcggggccg

SEQ ID NO: 2484142 - DNA, 25 bp, Homo sapien
ctgggccgcgactgcgcagggcggg

SEQ ID NO: 2484143 - DNA, 25 bp, Homo sapien
ccgcgactgcgcagggcggggccgg

SEQ ID NO: 2484144 - DNA, 25 bp, Homo sapien
cctctgggccgcgactgcgcagggc

SEQ ID NO: 2484145 - DNA, 25 bp, Homo sapien
gctctcttggagataatcggaagcc

SEQ ID NO: 2484146 - DNA, 25 bp, Homo sapien
tccctttgccgtaggcttgagggaa

SEQ ID NO: 2484147 - DNA, 25 bp, Homo sapien
tggaataggaggttctgaatccctt

SEQ ID NO: 2484148 - DNA, 25 bp, Homo sapien
ttccccttctatcggaggacaggct

SEQ ID NO: 2484149 - DNA, 25 bp, Homo sapien
ccagcactttacagggccgaaggcc

SEQ ID NO: 2484150 - DNA, 25 bp, Homo sapien
cccctactgtatttcgattgctaga

SEQ ID NO: 2484151 - DNA, 25 bp, Homo sapien
tgctagcagcctactctctgcagcg

SEQ ID NO: 2484152 - DNA, 25 bp, Homo sapien
gctagaagggagaggccctcaaacc

SEQ ID NO: 2484153 - DNA, 25 bp, Homo sapien
gccaacaggctcagtttacaaacct

SEQ ID NO: 2484154 - DNA, 25 bp, Homo sapien
tccttcccagtgaaaggtacaaagc

SEQ ID NO: 2484155 - DNA, 25 bp, Homo sapien
tacaaacctgtgagctactgttggc

SEQ ID NO: 2484156 - DNA, 25 bp, Homo sapien
tctggctcaggttgctcaaagcaca

SEQ ID NO: 2484157 - DNA, 25 bp, Homo sapien
catttcaaggtgtagccaggttccc

SEQ ID NO: 2484158 - DNA, 25 bp, Homo sapien
tcatttcaaggtgtagccaggttcc

SEQ ID NO: 2484159 - DNA, 25 bp, Homo sapien
tcaaggtgtagccaggttcccccga

SEQ ID NO: 2484160 - DNA, 25 bp, Homo sapien
cactgcttttctatgggagacactc

SEQ ID NO: 2484161 - DNA, 25 bp, Homo sapien
tcagagacgttgtgatgatgcgact

SEQ ID NO: 2484162 - DNA, 25 bp, Homo sapien
ggccagcatgaccagctgtccaggg

SEQ ID NO: 2484163 - DNA, 25 bp, Homo sapien
gactgaggattatgcaacgtggtcc

SEQ ID NO: 2484164 - DNA, 25 bp, Homo sapien
atgaatatctatatcctagtgctgc

SEQ ID NO: 2484165 - DNA, 25 bp, Homo sapien
gattgcctgttatgacgaatgaata

SEQ ID NO: 2484166 - DNA, 25 bp, Homo sapien
tatagagtggcttagattgcctgtt

SEQ ID NO: 2484167 - DNA, 25 bp, Homo sapien
tctcttgtagtatagagtggcttag

SEQ ID NO: 2484168 - DNA, 25 bp, Homo sapien
gtacagtattacagtcagccacaga

SEQ ID NO: 2484169 - DNA, 25 bp, Homo sapien
gggagaccaccttctgatgataacc

SEQ ID NO: 2484170 - DNA, 25 bp, Homo sapien
taagctgttaacagagttcacaggg

SEQ ID NO: 2484171 - DNA, 25 bp, Homo sapien
acaccaggcaaagcagtattggaca

SEQ ID NO: 2484172 - DNA, 25 bp, Homo sapien
catccgttcatcaatgctggcaaag

SEQ ID NO: 2484173 - DNA, 25 bp, Homo sapien
ttcatcaatgctggcaaagttcccc

SEQ ID NO: 2484174 - DNA, 25 bp, Homo sapien
cgttcatcaatgctggcaaagttcc

SEQ ID NO: 2484175 - DNA, 25 bp, Homo sapien
tcttcatccgttcatcaatgctggc

SEQ ID NO: 2484176 - DNA, 25 bp, Homo sapien
aggttttcacgcatggttgtctgca

SEQ ID NO: 2484177 - DNA, 25 bp, Homo sapien
gtggccaggttttcacgcatggttg

SEQ ID NO: 2484178 - DNA, 25 bp, Homo sapien
caggttttcacgcatggttgtctgc

SEQ ID NO: 2484179 - DNA, 25 bp, Homo sapien
gccaggttttcacgcatggttgtct

SEQ ID NO: 2484180 - DNA, 25 bp, Homo sapien
tcaagagggtggtattgtccttcaa

SEQ ID NO: 2484181 - DNA, 25 bp, Homo sapien
ggtggtatccaagtgtgtcaggagc

SEQ ID NO: 2484182 - DNA, 25 bp, Homo sapien
gtcaggagctgaccaaactgcatgg

SEQ ID NO: 2484183 - DNA, 25 bp, Homo sapien
ccttcaaggaattagcaatcatctg

SEQ ID NO: 2484184 - DNA, 25 bp, Homo sapien
ccagcgctgtatagtttcatatagc

SEQ ID NO: 2484185 - DNA, 25 bp, Homo sapien
tggtgacaagtctctgcaccagctc

SEQ ID NO: 2484186 - DNA, 25 bp, Homo sapien
gggctccagcgctgtatagtttcat

SEQ ID NO: 2484187 - DNA, 25 bp, Homo sapien
agctgcttgatggtgacaagtctct

SEQ ID NO: 2484188 - DNA, 25 bp, Homo sapien
tgaagggacacaatggggcccagag

SEQ ID NO: 2484189 - DNA, 25 bp, Homo sapien
ctgaagggacacaatggggcccaga

SEQ ID NO: 2484190 - DNA, 25 bp, Homo sapien
gaagggacacaatggggcccagagg

SEQ ID NO: 2484191 - DNA, 25 bp, Homo sapien
tcatgctttgacactgccactcgga

SEQ ID NO: 2484192 - DNA, 25 bp, Homo sapien
catgctttgacactgccactcggag

SEQ ID NO: 2484193 - DNA, 25 bp, Homo sapien
tgctttgacactgccactcggagaa

SEQ ID NO: 2484194 - DNA, 25 bp, Homo sapien
ttctcatgctttgacactgccactc

SEQ ID NO: 2484195 - DNA, 25 bp, Homo sapien
gagatggggaaggtgtcttcctgac

SEQ ID NO: 2484196 - DNA, 25 bp, Homo sapien
aggagatggggaaggtgtcttcctg

SEQ ID NO: 2484197 - DNA, 25 bp, Homo sapien
ggagatggggaaggtgtcttcctga

SEQ ID NO: 2484198 - DNA, 25 bp, Homo sapien
aaggagatggggaaggtgtcttcct

SEQ ID NO: 2484199 - DNA, 25 bp, Homo sapien
ggctttatgcttggcaatctcgttc

SEQ ID NO: 2484200 - DNA, 25 bp, Homo sapien
aggctttatgcttggcaatctcgtt

SEQ ID NO: 2484201 - DNA, 25 bp, Homo sapien
tctgcatcttctacagaggctttat

SEQ ID NO: 2484202 - DNA, 25 bp, Homo sapien
tccacttgatccaaaactgcaaggt

SEQ ID NO: 2484203 - DNA, 25 bp, Homo sapien
caaaactgcaaggtctagggcgctc

SEQ ID NO: 2484204 - DNA, 25 bp, Homo sapien
agcctccacttgatccaaaactgca

SEQ ID NO: 2484205 - DNA, 25 bp, Homo sapien
aaactgcaaggtctagggcgctcac

SEQ ID NO: 2484206 - DNA, 25 bp, Homo sapien
atgagacaggctccctgtagacctg

SEQ ID NO: 2484207 - DNA, 25 bp, Homo sapien
catgagacaggctccctgtagacct

SEQ ID NO: 2484208 - DNA, 25 bp, Homo sapien
agacaggctccctgtagacctgcag

SEQ ID NO: 2484209 - DNA, 25 bp, Homo sapien
gagacaggctccctgtagacctgca

SEQ ID NO: 2484210 - DNA, 25 bp, Homo sapien
tttcctggttctagctgggaaccca

SEQ ID NO: 2484211 - DNA, 25 bp, Homo sapien
tctccatgattatcgtcttctccca

SEQ ID NO: 2484212 - DNA, 25 bp, Homo sapien
gaagtgagtggtccttatatctcca

SEQ ID NO: 2484213 - DNA, 25 bp, Homo sapien
gaacccactagctgatccctgtaac

SEQ ID NO: 2484214 - DNA, 25 bp, Homo sapien
gattatgtacaggagaacacctgac

SEQ ID NO: 2484215 - DNA, 25 bp, Homo sapien
ctgagcatcctgatcacaacgtaca

SEQ ID NO: 2484216 - DNA, 25 bp, Homo sapien
ccagctctgtcaggcgcttttcaag

SEQ ID NO: 2484217 - DNA, 25 bp, Homo sapien
tccagctctgtcaggcgcttttcaa

SEQ ID NO: 2484218 - DNA, 25 bp, Homo sapien
gatcacaacgtacagctgtctccag

SEQ ID NO: 2484219 - DNA, 25 bp, Homo sapien
ctcaggccgagaatgtagttcataa

SEQ ID NO: 2484220 - DNA, 25 bp, Homo sapien
cctttgctgttctttgttgcttcca

SEQ ID NO: 2484221 - DNA, 25 bp, Homo sapien
gtcctgctcaggccgagaatgtagt

SEQ ID NO: 2484222 - DNA, 25 bp, Homo sapien
cctgctcaggccgagaatgtagttc

SEQ ID NO: 2484223 - DNA, 25 bp, Homo sapien
tagccagggcgccatcggggtcggt

SEQ ID NO: 2484224 - DNA, 25 bp, Homo sapien
aggttgattgcagcatctggtccca

SEQ ID NO: 2484225 - DNA, 25 bp, Homo sapien
cagctgtttagccagcaacacaggg

SEQ ID NO: 2484226 - DNA, 25 bp, Homo sapien
ggtcggtaaggttgattgcagcatc

SEQ ID NO: 2484227 - DNA, 25 bp, Homo sapien
cctcatgcagtaggcgctggtactt

SEQ ID NO: 2484228 - DNA, 25 bp, Homo sapien
cttggacctcatgcagtaggcgctg

SEQ ID NO: 2484229 - DNA, 25 bp, Homo sapien
cagtaggcgctggtacttttgctgg

SEQ ID NO: 2484230 - DNA, 25 bp, Homo sapien
tcaacttcagttgtcagctcttgga

SEQ ID NO: 2484231 - DNA, 25 bp, Homo sapien
tattctccagattcatatcctgtcc

SEQ ID NO: 2484232 - DNA, 25 bp, Homo sapien
catctcatattctccagattcatat

SEQ ID NO: 2484233 - DNA, 25 bp, Homo sapien
ctcttggtttttccaatacgatctg

SEQ ID NO: 2484234 - DNA, 25 bp, Homo sapien
cttggtttttccaatacgatctgag

SEQ ID NO: 2484235 - DNA, 25 bp, Homo sapien
taggattgacaatgatgtgttccac

SEQ ID NO: 2484236 - DNA, 25 bp, Homo sapien
ttgtcataggcagcattaggattga

SEQ ID NO: 2484237 - DNA, 25 bp, Homo sapien
ccacacttgtgcttgtcagctcctc

SEQ ID NO: 2484238 - DNA, 25 bp, Homo sapien
taggcagcattaggattgacaatga

SEQ ID NO: 2484239 - DNA, 25 bp, Homo sapien
ctgcaagaacaggtagtttaggcca

SEQ ID NO: 2484240 - DNA, 25 bp, Homo sapien
tctagaacttactctaccccacaaa

SEQ ID NO: 2484241 - DNA, 25 bp, Homo sapien
ggaaagaagggtggctctattccaa

SEQ ID NO: 2484242 - DNA, 25 bp, Homo sapien
caaaccattaggtgactgggcccta

SEQ ID NO: 2484243 - DNA, 25 bp, Homo sapien
ggacatcttagaagcaacaaacata

SEQ ID NO: 2484244 - DNA, 25 bp, Homo sapien
tcttagaagcaacaaacataggcaa

SEQ ID NO: 2484245 - DNA, 25 bp, Homo sapien
catgggcaagagccacatgtaagct

SEQ ID NO: 2484246 - DNA, 25 bp, Homo sapien
tatctgcttgccaagagtatccatg

SEQ ID NO: 2484247 - DNA, 25 bp, Homo sapien
gtagcacctactccagcagtgtctt

SEQ ID NO: 2484248 - DNA, 25 bp, Homo sapien
agtcctccagtagcacctactccag

SEQ ID NO: 2484249 - DNA, 25 bp, Homo sapien
gggagcacactctagtcctccagta

SEQ ID NO: 2484250 - DNA, 25 bp, Homo sapien
tctccaaggctgtggcccgggagca

SEQ ID NO: 2484251 - DNA, 25 bp, Homo sapien
cgttaaaaagcagatgaaaggtcag

SEQ ID NO: 2484252 - DNA, 25 bp, Homo sapien
ccgttaaaaagcagatgaaaggtca

SEQ ID NO: 2484253 - DNA, 25 bp, Homo sapien
aaaagcagatgaaaggtcaggcttc

SEQ ID NO: 2484254 - DNA, 25 bp, Homo sapien
gcagatgaaaggtcaggcttcttac

SEQ ID NO: 2484255 - DNA, 25 bp, Homo sapien
cagtggcatggaataagaaactggg

SEQ ID NO: 2484256 - DNA, 25 bp, Homo sapien
aactaggagttagatgttaccagcc

SEQ ID NO: 2484257 - DNA, 25 bp, Homo sapien
gaagagcatgagacccttttccctc

SEQ ID NO: 2484258 - DNA, 25 bp, Homo sapien
gaaattcttagacttgtagctgata

SEQ ID NO: 2484259 - DNA, 25 bp, Homo sapien
gagcaattctgccatgatgtactta

SEQ ID NO: 2484260 - DNA, 25 bp, Homo sapien
ggacatcaagattcacaggtactag

SEQ ID NO: 2484261 - DNA, 25 bp, Homo sapien
gctccgaaggatctagagcaattct

SEQ ID NO: 2484262 - DNA, 25 bp, Homo sapien
tgatgtacttacacagagggtccag

SEQ ID NO: 2484263 - DNA, 25 bp, Homo sapien
gggtgccagcttacctagtacgtga

SEQ ID NO: 2484264 - DNA, 25 bp, Homo sapien
aatttcaaaccatgcggattgggca

SEQ ID NO: 2484265 - DNA, 25 bp, Homo sapien
ggcatgattcctgcataacctggag

SEQ ID NO: 2484266 - DNA, 25 bp, Homo sapien
gagctgtagagtaaaactgtccggg

SEQ ID NO: 2484267 - DNA, 25 bp, Homo sapien
gtgtccagtaatatctaccttttgg

SEQ ID NO: 2484268 - DNA, 25 bp, Homo sapien
ctgtaaggaagtactgtttctcatc

SEQ ID NO: 2484269 - DNA, 25 bp, Homo sapien
caatcaagcatactccaggatcttc

SEQ ID NO: 2484270 - DNA, 25 bp, Homo sapien
tgtttctcatctcaggagtgtccag

SEQ ID NO: 2484271 - DNA, 25 bp, Homo sapien
gctacagcccgtgcactttcctggt

SEQ ID NO: 2484272 - DNA, 25 bp, Homo sapien
gaaaaatctccaagcaagcctattg

SEQ ID NO: 2484273 - DNA, 25 bp, Homo sapien
tattgccccaattaacctgggagtg

SEQ ID NO: 2484274 - DNA, 25 bp, Homo sapien
attgaggaggaaagggctacagccc

SEQ ID NO: 2484275 - DNA, 25 bp, Homo sapien
tctggagaccccctgaaaggttcca

SEQ ID NO: 2484276 - DNA, 25 bp, Homo sapien
cctctgttccctgtgcatacattac

SEQ ID NO: 2484277 - DNA, 25 bp, Homo sapien
ctctgttccctgtgcatacattacc

SEQ ID NO: 2484278 - DNA, 25 bp, Homo sapien
tctgaactgtggtagtgcagtaaag

SEQ ID NO: 2484279 - DNA, 25 bp, Homo sapien
taaagttctcagcatacagctgtct

SEQ ID NO: 2484280 - DNA, 25 bp, Homo sapien
taggcctaagttgaacagtctgaac

SEQ ID NO: 2484281 - DNA, 25 bp, Homo sapien
gcatatgttcccatcttctatataa

SEQ ID NO: 2484282 - DNA, 25 bp, Homo sapien
tgttgttagctgtaattccgctgac

SEQ ID NO: 2484283 - DNA, 25 bp, Homo sapien
tgcaagccctgcaacctatatacca

SEQ ID NO: 2484284 - DNA, 25 bp, Homo sapien
ttctcggatctaaaaatgcaaccac

SEQ ID NO: 2484285 - DNA, 25 bp, Homo sapien
tactccatcctcagaattctcggat

SEQ ID NO: 2484286 - DNA, 25 bp, Homo sapien
tgctgtagctcccccgagaaaggga

SEQ ID NO: 2484287 - DNA, 25 bp, Homo sapien
gctgtagctcccccgagaaagggaa

SEQ ID NO: 2484288 - DNA, 25 bp, Homo sapien
ttgctgtagctcccccgagaaaggg

SEQ ID NO: 2484289 - DNA, 25 bp, Homo sapien
ctgtagctcccccgagaaagggaag

SEQ ID NO: 2484290 - DNA, 25 bp, Homo sapien
ccggaggagtctgtggcagcacaca

SEQ ID NO: 2484291 - DNA, 25 bp, Homo sapien
gggagaaaggtcagagtccggagga

SEQ ID NO: 2484292 - DNA, 25 bp, Homo sapien
gaaaggtcagagtccggaggagtct

SEQ ID NO: 2484293 - DNA, 25 bp, Homo sapien
tcagagtccggaggagtctgtggca

SEQ ID NO: 2484294 - DNA, 25 bp, Homo sapien
cctcaggtaggtcgctagtttcata

SEQ ID NO: 2484295 - DNA, 25 bp, Homo sapien
tcgaactccgcttgatcatcctcag

SEQ ID NO: 2484296 - DNA, 25 bp, Homo sapien
gatcatcctcaggtaggtcgctagt

SEQ ID NO: 2484297 - DNA, 25 bp, Homo sapien
ggtaggtcgctagtttcataaacat

SEQ ID NO: 2484298 - DNA, 25 bp, Homo sapien
ggcataggttccctcaaggatagag

SEQ ID NO: 2484299 - DNA, 25 bp, Homo sapien
aaggatagagctccccatctggcac

SEQ ID NO: 2484300 - DNA, 25 bp, Homo sapien
tagtactcaaggtcctgtgtcccaa

SEQ ID NO: 2484301 - DNA, 25 bp, Homo sapien
tacacgccaggattgtcatgggagt

SEQ ID NO: 2484302 - DNA, 25 bp, Homo sapien
ttgacacggatggtggaaaaactca

SEQ ID NO: 2484303 - DNA, 25 bp, Homo sapien
cggatggtggaaaaactcaggcaca

SEQ ID NO: 2484304 - DNA, 25 bp, Homo sapien
ggacatgggaggcgttgacacggat

SEQ ID NO: 2484305 - DNA, 25 bp, Homo sapien
gcgttgacacggatggtggaaaaac

SEQ ID NO: 2484306 - DNA, 25 bp, Homo sapien
ccggagtcgatttctgggccgagct

SEQ ID NO: 2484307 - DNA, 25 bp, Homo sapien
cggagtcgatttctgggccgagcta

SEQ ID NO: 2484308 - DNA, 25 bp, Homo sapien
ggagtcgatttctgggccgagctac

SEQ ID NO: 2484309 - DNA, 25 bp, Homo sapien
atcggagaacgagcggcgggagccc

SEQ ID NO: 2484310 - DNA, 25 bp, Homo sapien
tgctgaggccgatcggagaacgagc

SEQ ID NO: 2484311 - DNA, 25 bp, Homo sapien
agggggcctggtgcgccgtccggcg

SEQ ID NO: 2484312 - DNA, 25 bp, Homo sapien
cggcccagtcgggtcagaagagttc

SEQ ID NO: 2484313 - DNA, 25 bp, Homo sapien
ggaggggtcgcgggctggtttctgc

SEQ ID NO: 2484314 - DNA, 25 bp, Homo sapien
gaggggtcgcgggctggtttctgct

SEQ ID NO: 2484315 - DNA, 25 bp, Homo sapien
gagccggggccggtcctgtactcac

SEQ ID NO: 2484316 - DNA, 25 bp, Homo sapien
ggagccggggccggtcctgtactca

SEQ ID NO: 2484317 - DNA, 25 bp, Homo sapien
atgccgggaaggtcggcgtatttag

SEQ ID NO: 2484318 - DNA, 25 bp, Homo sapien
agcaggaagtctcgcgacagcagta

SEQ ID NO: 2484319 - DNA, 25 bp, Homo sapien
cagcagtagcacagcagaagggtaa

SEQ ID NO: 2484320 - DNA, 25 bp, Homo sapien
gcggcaaagggagcggcagatgagc

SEQ ID NO: 2484321 - DNA, 25 bp, Homo sapien
ctaaggcggcggcaaagggagcggc

SEQ ID NO: 2484322 - DNA, 25 bp, Homo sapien
atcaaggtgctctgccgattccggc

SEQ ID NO: 2484323 - DNA, 25 bp, Homo sapien
tccccagagactgagcacctgtcct

SEQ ID NO: 2484324 - DNA, 25 bp, Homo sapien
ggcggagaccaacaacgaatgtagc

SEQ ID NO: 2484325 - DNA, 25 bp, Homo sapien
acgccggctaccaccatggcggaga

SEQ ID NO: 2484326 - DNA, 25 bp, Homo sapien
gggaagccatatgtttttgaccgtg

SEQ ID NO: 2484327 - DNA, 25 bp, Homo sapien
tgtattccccccaaacacgactcaa

SEQ ID NO: 2484328 - DNA, 25 bp, Homo sapien
gaagccatatgtttttgaccgtgta

SEQ ID NO: 2484329 - DNA, 25 bp, Homo sapien
catatgtttttgaccgtgtattccc

SEQ ID NO: 2484330 - DNA, 25 bp, Homo sapien
gttcaaaggctcctcagcaaatgag

SEQ ID NO: 2484331 - DNA, 25 bp, Homo sapien
gaagaagtctcagcgtctcttagga

SEQ ID NO: 2484332 - DNA, 25 bp, Homo sapien
tctccagacccactagggtggaagg

SEQ ID NO: 2484333 - DNA, 25 bp, Homo sapien
gcaaatgagcccttgaacagtccta

SEQ ID NO: 2484334 - DNA, 25 bp, Homo sapien
tgggagcagctgctttaacactggc

SEQ ID NO: 2484335 - DNA, 25 bp, Homo sapien
taacactggcatgggttattccata

SEQ ID NO: 2484336 - DNA, 25 bp, Homo sapien
agagcaaagtgtttaacttccactt

SEQ ID NO: 2484337 - DNA, 25 bp, Homo sapien
ggatgggtgaggttgccagacttga

SEQ ID NO: 2484338 - DNA, 25 bp, Homo sapien
caagatactacagatgtgggtgcag

SEQ ID NO: 2484339 - DNA, 25 bp, Homo sapien
cacagaggtgggacctaagaggact

SEQ ID NO: 2484340 - DNA, 25 bp, Homo sapien
tcactatggcatgcttccctcctgg

SEQ ID NO: 2484341 - DNA, 25 bp, Homo sapien
taagaggactcatgattatgcagag

SEQ ID NO: 2484342 - DNA, 25 bp, Homo sapien
cacctctcctgggactggaaccctt

SEQ ID NO: 2484343 - DNA, 25 bp, Homo sapien
cacacctctcctgggactggaaccc

SEQ ID NO: 2484344 - DNA, 25 bp, Homo sapien
acacctctcctgggactggaaccct

SEQ ID NO: 2484345 - DNA, 25 bp, Homo sapien
tagcaagaggagtacccagttaggg

SEQ ID NO: 2484346 - DNA, 25 bp, Homo sapien
catgaggccatagggagaagctccc

SEQ ID NO: 2484347 - DNA, 25 bp, Homo sapien
tggcctgtggtgatgcaaagctgct

SEQ ID NO: 2484348 - DNA, 25 bp, Homo sapien
gctggactgatctgtctcacaagaa

SEQ ID NO: 2484349 - DNA, 25 bp, Homo sapien
gctgatgtgttatgggcagtatgga

SEQ ID NO: 2484350 - DNA, 25 bp, Homo sapien
gggcagtatggatgtcttcatttgt

SEQ ID NO: 2484351 - DNA, 25 bp, Homo sapien
tatggctgatgtgttatgggcagta

SEQ ID NO: 2484352 - DNA, 25 bp, Homo sapien
atgggcagtatggatgtcttcattt

SEQ ID NO: 2484353 - DNA, 25 bp, Homo sapien
gtgagtaggcctctcagcccaccag

SEQ ID NO: 2484354 - DNA, 25 bp, Homo sapien
ccatctttgtaaaggtgagtaggcc

SEQ ID NO: 2484355 - DNA, 25 bp, Homo sapien
agttctgggcttgctaacactccat

SEQ ID NO: 2484356 - DNA, 25 bp, Homo sapien
tcccagagttctgggcttgctaaca

SEQ ID NO: 2484357 - DNA, 25 bp, Homo sapien
gttctgagggctgcgatcgggccga

SEQ ID NO: 2484358 - DNA, 25 bp, Homo sapien
agggacccttgcccatccgggctgt

SEQ ID NO: 2484359 - DNA, 25 bp, Homo sapien
ccttggcctccattcgggggttctg

SEQ ID NO: 2484360 - DNA, 25 bp, Homo sapien
ggagagactggttccttgtccggcc

SEQ ID NO: 2484361 - DNA, 25 bp, Homo sapien
ttatttggcaatgtggagcaggcga

SEQ ID NO: 2484362 - DNA, 25 bp, Homo sapien
tattccggtccatgtgatctgaggg

SEQ ID NO: 2484363 - DNA, 25 bp, Homo sapien
gactgagttagctctcaaggaaggc

SEQ ID NO: 2484364 - DNA, 25 bp, Homo sapien
cagactcagggaaaacatcaggccc

SEQ ID NO: 2484365 - DNA, 25 bp, Homo sapien
ggtaagaagaccatggcctgccctt

SEQ ID NO: 2484366 - DNA, 25 bp, Homo sapien
caagctctgacctaggaaaaccggg

SEQ ID NO: 2484367 - DNA, 25 bp, Homo sapien
gctatgagaagtacggcaccattgt

SEQ ID NO: 2484368 - DNA, 25 bp, Homo sapien
cagaatgggcggatgctggtctcta

SEQ ID NO: 2484369 - DNA, 25 bp, Homo sapien
ctatcggcacgtccatgaccacagg

SEQ ID NO: 2484370 - DNA, 25 bp, Homo sapien
tgctgaccctgttccgcaaggcgtt

SEQ ID NO: 2484371 - DNA, 25 bp, Homo sapien
ggagaccgaatgtcatcacctggaa

SEQ ID NO: 2484372 - DNA, 25 bp, Homo sapien
gcaaggcgtttgaccagcgtctcac

SEQ ID NO: 2484373 - DNA, 25 bp, Homo sapien
agctgagagcgaagggtatcacaga

SEQ ID NO: 2484374 - DNA, 25 bp, Homo sapien
gtctgcctctactaggacccagcag

SEQ ID NO: 2484375 - DNA, 25 bp, Homo sapien
acctgacccgggtgcaagaggagct

SEQ ID NO: 2484376 - DNA, 25 bp, Homo sapien
acctgtctgactgggaagggagttc

SEQ ID NO: 2484377 - DNA, 25 bp, Homo sapien
gaggccgacctccaaggctctgttc

SEQ ID NO: 2484378 - DNA, 25 bp, Homo sapien
aggccgacctccaaggctctgttct

SEQ ID NO: 2484379 - DNA, 25 bp, Homo sapien
gcagaggccgacctccaaggctctg

SEQ ID NO: 2484380 - DNA, 25 bp, Homo sapien
agaggccgacctccaaggctctgtt

SEQ ID NO: 2484381 - DNA, 25 bp, Homo sapien
gtgttcatcagatacagttctccct

SEQ ID NO: 2484382 - DNA, 25 bp, Homo sapien
gggctgatgtgagctccccgtcacc

SEQ ID NO: 2484383 - DNA, 25 bp, Homo sapien
cccgtcacccgccatggagccggct

SEQ ID NO: 2484384 - DNA, 25 bp, Homo sapien
tgtgtctcagtctccgtcagtctgt

SEQ ID NO: 2484385 - DNA, 25 bp, Homo sapien
cgacgctgaagtgggggcctcctcc

SEQ ID NO: 2484386 - DNA, 25 bp, Homo sapien
aaccaaggatgagctccgacgctga

SEQ ID NO: 2484387 - DNA, 25 bp, Homo sapien
tcctcctgctttcatcctaggtatg

SEQ ID NO: 2484388 - DNA, 25 bp, Homo sapien
ttcatcctaggtatgtcctgagtga

SEQ ID NO: 2484389 - DNA, 25 bp, Homo sapien
tttcagggcaaactgactgctcagg

SEQ ID NO: 2484390 - DNA, 25 bp, Homo sapien
actttctgggtcaccgagcctgagg

SEQ ID NO: 2484391 - DNA, 25 bp, Homo sapien
cgctgcaacgatatgatgacgctgg

SEQ ID NO: 2484392 - DNA, 25 bp, Homo sapien
tgctttgtgcccaagcgctgcaacg

SEQ ID NO: 2484393 - DNA, 25 bp, Homo sapien
tgaggctaccatgttcagctgaggg

SEQ ID NO: 2484394 - DNA, 25 bp, Homo sapien
tcttcaagccatggacccaagagcg

SEQ ID NO: 2484395 - DNA, 25 bp, Homo sapien
cagagcgagccaaacattcacacag

SEQ ID NO: 2484396 - DNA, 25 bp, Homo sapien
ctctctgcgaggtcataagccatgt

SEQ ID NO: 2484397 - DNA, 25 bp, Homo sapien
tgcctactttgtgaacagcatttgt

SEQ ID NO: 2484398 - DNA, 25 bp, Homo sapien
ttctttaggaaccatagggacacat

SEQ ID NO: 2484399 - DNA, 25 bp, Homo sapien
aggaaccatagggacacatgagcgg

SEQ ID NO: 2484400 - DNA, 25 bp, Homo sapien
ctttgaacttagtttgaccacatat

SEQ ID NO: 2484401 - DNA, 25 bp, Homo sapien
tacaggcgtaagccatttcacctgg

SEQ ID NO: 2484402 - DNA, 25 bp, Homo sapien
ttacaggcgtaagccatttcacctg

SEQ ID NO: 2484403 - DNA, 25 bp, Homo sapien
caggtgagtgaccagggacttccaa

SEQ ID NO: 2484404 - DNA, 25 bp, Homo sapien
tgatgtcagctcctaagagtctggg

SEQ ID NO: 2484405 - DNA, 25 bp, Homo sapien
cggagctacctgaagagcgcggctt

SEQ ID NO: 2484406 - DNA, 25 bp, Homo sapien
gcgcaatcctgcgagaagccttaga

SEQ ID NO: 2484407 - DNA, 25 bp, Homo sapien
ggagcagtttttgccggctagcgca

SEQ ID NO: 2484408 - DNA, 25 bp, Homo sapien
tgaacgtgagattccgagaccggct

SEQ ID NO: 2484409 - DNA, 25 bp, Homo sapien
tcctcctctagatggtgacagcgcg

SEQ ID NO: 2484410 - DNA, 25 bp, Homo sapien
tgctcgtgccggtcaaggaattgaa

SEQ ID NO: 2484411 - DNA, 25 bp, Homo sapien
tccaggacatcgaggtagtcagccc

SEQ ID NO: 2484412 - DNA, 25 bp, Homo sapien
tcttccctagggtgtagtgcctggc

SEQ ID NO: 2484413 - DNA, 25 bp, Homo sapien
tactcacaggcaagggaaaggatgg

SEQ ID NO: 2484414 - DNA, 25 bp, Homo sapien
tatttgtaacttcccaactggtgcg

SEQ ID NO: 2484415 - DNA, 25 bp, Homo sapien
tcagggtggtggtcctagacttcag

SEQ ID NO: 2484416 - DNA, 25 bp, Homo sapien
tcccattctagttgctgagcctgtc

SEQ ID NO: 2484417 - DNA, 25 bp, Homo sapien
caatgactggacacctgcggtaggg

SEQ ID NO: 2484418 - DNA, 25 bp, Homo sapien
gatgtcgagatgctaggatccgcct

SEQ ID NO: 2484419 - DNA, 25 bp, Homo sapien
gggacggaatgaatagtagattgaa

SEQ ID NO: 2484420 - DNA, 25 bp, Homo sapien
gaatgaatagtagattgaagaccaa

SEQ ID NO: 2484421 - DNA, 25 bp, Homo sapien
attgaagaccaaatcagggagcccg

SEQ ID NO: 2484422 - DNA, 25 bp, Homo sapien
gattgaagaccaaatcagggagccc

SEQ ID NO: 2484423 - DNA, 25 bp, Homo sapien
tgatgaggaccatgacccttgaacc

SEQ ID NO: 2484424 - DNA, 25 bp, Homo sapien
gggtgcctaatctattcctgacatg

SEQ ID NO: 2484425 - DNA, 25 bp, Homo sapien
ttaggttcttagagtccctctgggc

SEQ ID NO: 2484426 - DNA, 25 bp, Homo sapien
tttgcaccgtgtgggtctgacctca

SEQ ID NO: 2484427 - DNA, 25 bp, Homo sapien
cactgcagccggtgtttgaagaaga

SEQ ID NO: 2484428 - DNA, 25 bp, Homo sapien
cggtaccgggcgtaagtctctgctc

SEQ ID NO: 2484429 - DNA, 25 bp, Homo sapien
atgcatgatccaccacgacgtcgga

SEQ ID NO: 2484430 - DNA, 25 bp, Homo sapien
gaagagcagccggtgtttggccatc

SEQ ID NO: 2484431 - DNA, 25 bp, Homo sapien
gtggaggggagtacacagtgaggga

SEQ ID NO: 2484432 - DNA, 25 bp, Homo sapien
gggggtggaggggagtacacagtga

SEQ ID NO: 2484433 - DNA, 25 bp, Homo sapien
ggaggggagtacacagtgagggatc

SEQ ID NO: 2484434 - DNA, 25 bp, Homo sapien
gggtggaggggagtacacagtgagg

SEQ ID NO: 2484435 - DNA, 25 bp, Homo sapien
cagcagctgccgataagtggtggca

SEQ ID NO: 2484436 - DNA, 25 bp, Homo sapien
agctcgtggtggaagccgcgccttt

SEQ ID NO: 2484437 - DNA, 25 bp, Homo sapien
cctgggaagccgacgagctcgtggt

SEQ ID NO: 2484438 - DNA, 25 bp, Homo sapien
gcaccttgtcagtccgcgccaggaa

SEQ ID NO: 2484439 - DNA, 25 bp, Homo sapien
gagagggaggttgcctccaggcggg

SEQ ID NO: 2484440 - DNA, 25 bp, Homo sapien
agagggaggttgcctccaggcgggc

SEQ ID NO: 2484441 - DNA, 25 bp, Homo sapien
ggagagggaggttgcctccaggcgg

SEQ ID NO: 2484442 - DNA, 25 bp, Homo sapien
ccgaaggggtcaaggtctgcgctcc

SEQ ID NO: 2484443 - DNA, 25 bp, Homo sapien
acccgaaggggtcaaggtctgcgct

SEQ ID NO: 2484444 - DNA, 25 bp, Homo sapien
aaggtctgcgctccggtgccttcgg

SEQ ID NO: 2484445 - DNA, 25 bp, Homo sapien
gggtcaaggtctgcgctccggtgcc

SEQ ID NO: 2484446 - DNA, 25 bp, Homo sapien
tggccttagcctgttcaaggccctt

SEQ ID NO: 2484447 - DNA, 25 bp, Homo sapien
caggccccacttcgtggttctctct

SEQ ID NO: 2484448 - DNA, 25 bp, Homo sapien
cccgctgtggccttagcctgttcaa

SEQ ID NO: 2484449 - DNA, 25 bp, Homo sapien
ctctttgtcctagggctggccgttc

SEQ ID NO: 2484450 - DNA, 25 bp, Homo sapien
ggccaggttccggcctgcgaaccag

SEQ ID NO: 2484451 - DNA, 25 bp, Homo sapien
gtggttacttgagacacggccaggt

SEQ ID NO: 2484452 - DNA, 25 bp, Homo sapien
agacgaagtcgtcgtccacccacag

SEQ ID NO: 2484453 - DNA, 25 bp, Homo sapien
cgcgtccgcgccgtgaagacgaagt

SEQ ID NO: 2484454 - DNA, 25 bp, Homo sapien
ctggcagaaaggtgtgtgtggttgg

SEQ ID NO: 2484455 - DNA, 25 bp, Homo sapien
gcagaaaggtgtgtgtggttgggga

SEQ ID NO: 2484456 - DNA, 25 bp, Homo sapien
agaaaggtgtgtgtggttggggagg

SEQ ID NO: 2484457 - DNA, 25 bp, Homo sapien
tggcagaaaggtgtgtgtggttggg

SEQ ID NO: 2484458 - DNA, 25 bp, Homo sapien
gccaggagctaggtaaaagaaatgc

SEQ ID NO: 2484459 - DNA, 25 bp, Homo sapien
gcagatccccacagaggttccaagt

SEQ ID NO: 2484460 - DNA, 25 bp, Homo sapien
cttctcagcttgtattcttctccag

SEQ ID NO: 2484461 - DNA, 25 bp, Homo sapien
tgagtgctttcgaaaggccaggagc

SEQ ID NO: 2484462 - DNA, 25 bp, Homo sapien
gcttaacaggcaccccatgattctg

SEQ ID NO: 2484463 - DNA, 25 bp, Homo sapien
tgaatgccattaggcactaagcacc

SEQ ID NO: 2484464 - DNA, 25 bp, Homo sapien
aggctgcagattgagggcacacccc

SEQ ID NO: 2484465 - DNA, 25 bp, Homo sapien
ggtggtcctcgaatcactaccctgg

SEQ ID NO: 2484466 - DNA, 25 bp, Homo sapien
tcttggtggcaatcgtgactagagc

SEQ ID NO: 2484467 - DNA, 25 bp, Homo sapien
tagccgatcataacggaggaaggtc

SEQ ID NO: 2484468 - DNA, 25 bp, Homo sapien
tcagcgatgaccacggtaaccgttg

SEQ ID NO: 2484469 - DNA, 25 bp, Homo sapien
atactggtgatgagagcccgtagcc

SEQ ID NO: 2484470 - DNA, 25 bp, Homo sapien
aggactgccctctcccaacttgctc

SEQ ID NO: 2484471 - DNA, 25 bp, Homo sapien
gggaacaggtagatatcccctccca

SEQ ID NO: 2484472 - DNA, 25 bp, Homo sapien
accaaggctggttctaatatgtccc

SEQ ID NO: 2484473 - DNA, 25 bp, Homo sapien
cacagggttgggtgcagacaaggag

SEQ ID NO: 2484474 - DNA, 25 bp, Homo sapien
tacagccgagggttgggcgggtgtc

SEQ ID NO: 2484475 - DNA, 25 bp, Homo sapien
tcttatgcggatagtgaaagcagcc

SEQ ID NO: 2484476 - DNA, 25 bp, Homo sapien
caggtgggtacagccgagggttggg

SEQ ID NO: 2484477 - DNA, 25 bp, Homo sapien
gttgggcgggtgtcttatgcggata

SEQ ID NO: 2484478 - DNA, 25 bp, Homo sapien
agaacagaaggttcttacctttatg

SEQ ID NO: 2484479 - DNA, 25 bp, Homo sapien
aaggacatggcatttgaccctgaag

SEQ ID NO: 2484480 - DNA, 25 bp, Homo sapien
tacattctaatgggtaggagaaaaa

SEQ ID NO: 2484481 - DNA, 25 bp, Homo sapien
taggccttggtggacaagaacagaa

SEQ ID NO: 2484482 - DNA, 25 bp, Homo sapien
gatagcaacctagtcagtctggtgc

SEQ ID NO: 2484483 - DNA, 25 bp, Homo sapien
taaatgacaagaagaagccagtctg

SEQ ID NO: 2484484 - DNA, 25 bp, Homo sapien
cttagtgcaacaaaccagctttggg

SEQ ID NO: 2484485 - DNA, 25 bp, Homo sapien
ctggtgccaggctaagtaaattaaa

SEQ ID NO: 2484486 - DNA, 25 bp, Homo sapien
ccacagttggcctaaaggggagaca

SEQ ID NO: 2484487 - DNA, 25 bp, Homo sapien
ccagttgaagcacccattgtgtggc

SEQ ID NO: 2484488 - DNA, 25 bp, Homo sapien
gccctgctggtccagttgaagcacc

SEQ ID NO: 2484489 - DNA, 25 bp, Homo sapien
gctggtccagttgaagcacccattg

SEQ ID NO: 2484490 - DNA, 25 bp, Homo sapien
tagttgcctgttgagttggtccagc

SEQ ID NO: 2484491 - DNA, 25 bp, Homo sapien
tctgctgtgttggtctggtagcttc

SEQ ID NO: 2484492 - DNA, 25 bp, Homo sapien
ggtctggtagcttcggctgctgtaa

SEQ ID NO: 2484493 - DNA, 25 bp, Homo sapien
gctgctgtaagtgaccagttgtagt

SEQ ID NO: 2484494 - DNA, 25 bp, Homo sapien
ctcctgaccagaagctgcctgaagg

SEQ ID NO: 2484495 - DNA, 25 bp, Homo sapien
cctgaccagaagctgcctgaaggct

SEQ ID NO: 2484496 - DNA, 25 bp, Homo sapien
ctggtatacctcctgaccagaagct

SEQ ID NO: 2484497 - DNA, 25 bp, Homo sapien
tgaccagaagctgcctgaaggctca

SEQ ID NO: 2484498 - DNA, 25 bp, Homo sapien
ggcaggggctatgagcagctggtca

SEQ ID NO: 2484499 - DNA, 25 bp, Homo sapien
ccacaccctgtagggggtactggag

SEQ ID NO: 2484500 - DNA, 25 bp, Homo sapien
tcctgaggggctgaacttccacacc

SEQ ID NO: 2484501 - DNA, 25 bp, Homo sapien
agttggcaggggctatgagcagctg

SEQ ID NO: 2484502 - DNA, 25 bp, Homo sapien
cctggaactcctgctctcttgtggc

SEQ ID NO: 2484503 - DNA, 25 bp, Homo sapien
ctcgacagaaaggcctggaactcct

SEQ ID NO: 2484504 - DNA, 25 bp, Homo sapien
ggaactcctgctctcttgtggcaga

SEQ ID NO: 2484505 - DNA, 25 bp, Homo sapien
ggcctggaactcctgctctcttgtg

SEQ ID NO: 2484506 - DNA, 25 bp, Homo sapien
cactggactcacaactgcagttgtt

SEQ ID NO: 2484507 - DNA, 25 bp, Homo sapien
aatagctcggacttgtttctggaag

SEQ ID NO: 2484508 - DNA, 25 bp, Homo sapien
gtcaatagctcggacttgtttctgg

SEQ ID NO: 2484509 - DNA, 25 bp, Homo sapien
gtgaggtcaatagctcggacttgtt

SEQ ID NO: 2484510 - DNA, 25 bp, Homo sapien
atcctgaccgggatgtgtgcgtagc

SEQ ID NO: 2484511 - DNA, 25 bp, Homo sapien
agcaagatctggcagctcgggcctg

SEQ ID NO: 2484512 - DNA, 25 bp, Homo sapien
actacttgctccttgatcctgaccg

SEQ ID NO: 2484513 - DNA, 25 bp, Homo sapien
gcgagcagaaggaccagagcgcaca

SEQ ID NO: 2484514 - DNA, 25 bp, Homo sapien
cactccacacatcgcgctagggttt

SEQ ID NO: 2484515 - DNA, 25 bp, Homo sapien
tgccggctcccaagagcgctctcca

SEQ ID NO: 2484516 - DNA, 25 bp, Homo sapien
gtttgcactgccagccgcggttttc

SEQ ID NO: 2484517 - DNA, 25 bp, Homo sapien
catcgcgctagggtttgcactgcca

SEQ ID NO: 2484518 - DNA, 25 bp, Homo sapien
tgcggagggcggctccacacctagc

SEQ ID NO: 2484519 - DNA, 25 bp, Homo sapien
ggtgggctgcggagggcggctccac

SEQ ID NO: 2484520 - DNA, 25 bp, Homo sapien
gtgggctgcggagggcggctccaca

SEQ ID NO: 2484521 - DNA, 25 bp, Homo sapien
ggctgcggagggcggctccacacct

SEQ ID NO: 2484522 - DNA, 25 bp, Homo sapien
atgcagaatcatgcccgtgctggcg

SEQ ID NO: 2484523 - DNA, 25 bp, Homo sapien
aatcatgcccgtgctggcgggcgcc

SEQ ID NO: 2484524 - DNA, 25 bp, Homo sapien
aaaaatgcagaatcatgcccgtgct

SEQ ID NO: 2484525 - DNA, 25 bp, Homo sapien
ggaaaaaatgcagaatcatgcccgt

SEQ ID NO: 2484526 - DNA, 25 bp, Homo sapien
tcgttgcggctgcttcggctccgcg

SEQ ID NO: 2484527 - DNA, 25 bp, Homo sapien
gttaagagtctgttgcaccccagcc

SEQ ID NO: 2484528 - DNA, 25 bp, Homo sapien
ctaaggcagcggcaaaatttcggtc

SEQ ID NO: 2484529 - DNA, 25 bp, Homo sapien
ggcgcgaggaccaagttaagagtct

SEQ ID NO: 2484530 - DNA, 25 bp, Homo sapien
ttggacattggaatagaagcgcaac

SEQ ID NO: 2484531 - DNA, 25 bp, Homo sapien
tacgagattataagaaagtatggga

SEQ ID NO: 2484532 - DNA, 25 bp, Homo sapien
tactaggagttaacatcgtaatatg

SEQ ID NO: 2484533 - DNA, 25 bp, Homo sapien
gaatagaagcgcaacagagtttcat

SEQ ID NO: 2484534 - DNA, 25 bp, Homo sapien
tgagatgcgttatgggatcgagatc

SEQ ID NO: 2484535 - DNA, 25 bp, Homo sapien
atggcggcggaaacgctgctgtcca

SEQ ID NO: 2484536 - DNA, 25 bp, Homo sapien
tccagtttgttaggactgctgcttc

SEQ ID NO: 2484537 - DNA, 25 bp, Homo sapien
tgttacccgcaagtctgaccggcgg

SEQ ID NO: 2484538 - DNA, 25 bp, Homo sapien
ctggactggcttgcctcctccccac

SEQ ID NO: 2484539 - DNA, 25 bp, Homo sapien
tcctggactggcttgcctcctcccc

SEQ ID NO: 2484540 - DNA, 25 bp, Homo sapien
tcttcctggactggcttgcctcctc

SEQ ID NO: 2484541 - DNA, 25 bp, Homo sapien
ttcctggactggcttgcctcctccc

SEQ ID NO: 2484542 - DNA, 25 bp, Homo sapien
gagccttcacctctgttgctgagga

SEQ ID NO: 2484543 - DNA, 25 bp, Homo sapien
cacctgcccttagtgatgtttggag

SEQ ID NO: 2484544 - DNA, 25 bp, Homo sapien
taatgataggatattccctgctgcc

SEQ ID NO: 2484545 - DNA, 25 bp, Homo sapien
gacctctcgggcaactctgtgggtg

SEQ ID NO: 2484546 - DNA, 25 bp, Homo sapien
ttttggcggcagcactcccatggtg

SEQ ID NO: 2484547 - DNA, 25 bp, Homo sapien
cggcagcactcccatggtgaaggtc

SEQ ID NO: 2484548 - DNA, 25 bp, Homo sapien
ccatggtgaaggtcggtctgcccca

SEQ ID NO: 2484549 - DNA, 25 bp, Homo sapien
cctttggcttttggcggcagcactc

SEQ ID NO: 2484550 - DNA, 25 bp, Homo sapien
atcctgcatggcagggcatccaagc

SEQ ID NO: 2484551 - DNA, 25 bp, Homo sapien
gcaatagggcatcctgcatggcagg

SEQ ID NO: 2484552 - DNA, 25 bp, Homo sapien
ggcagggcatccaagcaaggcagcc

SEQ ID NO: 2484553 - DNA, 25 bp, Homo sapien
atagggcatcctgcatggcagggca

SEQ ID NO: 2484554 - DNA, 25 bp, Homo sapien
cacttgctctttgaaggcaatttca

SEQ ID NO: 2484555 - DNA, 25 bp, Homo sapien
caaactttggccacgaggaaggagt

SEQ ID NO: 2484556 - DNA, 25 bp, Homo sapien
aatgaaaggaacttcccacttgctc

SEQ ID NO: 2484557 - DNA, 25 bp, Homo sapien
tctcacactcccaaacttctgaaga

SEQ ID NO: 2484558 - DNA, 25 bp, Homo sapien
ctgaaataagagagtccagggtctt

SEQ ID NO: 2484559 - DNA, 25 bp, Homo sapien
cccctcttgtcgctttgcccagacc

SEQ ID NO: 2484560 - DNA, 25 bp, Homo sapien
gggaacggccaggtcctctagtcca

SEQ ID NO: 2484561 - DNA, 25 bp, Homo sapien
tcttgtcgctttgcccagaccacac

SEQ ID NO: 2484562 - DNA, 25 bp, Homo sapien
aattctacccaaagatgctggtgct

SEQ ID NO: 2484563 - DNA, 25 bp, Homo sapien
cagtggcacacttgcagctgaacct

SEQ ID NO: 2484564 - DNA, 25 bp, Homo sapien
ttcagctgccctcgagaaatggtag

SEQ ID NO: 2484565 - DNA, 25 bp, Homo sapien
gagccgcagcctccatgtgaactgg

SEQ ID NO: 2484566 - DNA, 25 bp, Homo sapien
caaggtcccctagctgtgcagtgga

SEQ ID NO: 2484567 - DNA, 25 bp, Homo sapien
ctgacactgagtttgtggacaccag

SEQ ID NO: 2484568 - DNA, 25 bp, Homo sapien
tctggtacctagtgctcacggtgag

SEQ ID NO: 2484569 - DNA, 25 bp, Homo sapien
tgttgtacatgatggaaccacctcc

SEQ ID NO: 2484570 - DNA, 25 bp, Homo sapien
agacaaaatcacttcctctttaatt

SEQ ID NO: 2484571 - DNA, 25 bp, Homo sapien
tagacaaaatcacttcctctttaat

SEQ ID NO: 2484572 - DNA, 25 bp, Homo sapien
gacaaaatcacttcctctttaattg

SEQ ID NO: 2484573 - DNA, 25 bp, Homo sapien
tctttagcttccacccatgggtagg

SEQ ID NO: 2484574 - DNA, 25 bp, Homo sapien
acagtcacaggtacgcagtcacggt

SEQ ID NO: 2484575 - DNA, 25 bp, Homo sapien
gacccagagcaatccgagtgtggaa

SEQ ID NO: 2484576 - DNA, 25 bp, Homo sapien
ccaagatagtagtgggagggaccca

SEQ ID NO: 2484577 - DNA, 25 bp, Homo sapien
cagcgcaaccggggcgtcggcgcgg

SEQ ID NO: 2484578 - DNA, 25 bp, Homo sapien
gtcggcgcggcccacgctagcggcg

SEQ ID NO: 2484579 - DNA, 25 bp, Homo sapien
ggcgtggtggccgcgctgggcgtgg

SEQ ID NO: 2484580 - DNA, 25 bp, Homo sapien
cggcccacgctagcggcgctgctcc

SEQ ID NO: 2484581 - DNA, 25 bp, Homo sapien
agccgtgctggagaaggatgtcggc

SEQ ID NO: 2484582 - DNA, 25 bp, Homo sapien
cgtagaacagcgccgtgcggccctg

SEQ ID NO: 2484583 - DNA, 25 bp, Homo sapien
tcacgggccgccacgtccgcgccgt

SEQ ID NO: 2484584 - DNA, 25 bp, Homo sapien
cttccagcctggcgggcgtagaaca

SEQ ID NO: 2484585 - DNA, 25 bp, Homo sapien
gaacagtagctgctcgtacttggcg

SEQ ID NO: 2484586 - DNA, 25 bp, Homo sapien
gtacttggcgcgaatccacgactcg

SEQ ID NO: 2484587 - DNA, 25 bp, Homo sapien
tgtgggtcctctacgctggtgtcga

SEQ ID NO: 2484588 - DNA, 25 bp, Homo sapien
ccaaaagcaggagaacggtagccac

SEQ ID NO: 2484589 - DNA, 25 bp, Homo sapien
tggccagtcgtccaagtccagcgag

SEQ ID NO: 2484590 - DNA, 25 bp, Homo sapien
gttgcggtggatgccagaacactcg

SEQ ID NO: 2484591 - DNA, 25 bp, Homo sapien
aacactcgatgcagatgagggcgcc

SEQ ID NO: 2484592 - DNA, 25 bp, Homo sapien
gtgtcgttgccaatagccgtcagca

SEQ ID NO: 2484593 - DNA, 25 bp, Homo sapien
cgcctggatggccacggcctcgctt

SEQ ID NO: 2484594 - DNA, 25 bp, Homo sapien
cctcgctttggctgtctgtgcgcag

SEQ ID NO: 2484595 - DNA, 25 bp, Homo sapien
cttggcgttccggatcgcctggatg

SEQ ID NO: 2484596 - DNA, 25 bp, Homo sapien
gcagattgaattccccttggcgttc

SEQ ID NO: 2484597 - DNA, 25 bp, Homo sapien
tcaaaactggctgcctcaaagtgcc

SEQ ID NO: 2484598 - DNA, 25 bp, Homo sapien
taggatctgactctcgatggcctgg

SEQ ID NO: 2484599 - DNA, 25 bp, Homo sapien
cacagcattgcagactggctaggat

SEQ ID NO: 2484600 - DNA, 25 bp, Homo sapien
tcaaagtgccacgtctgacccgtgc

SEQ ID NO: 2484601 - DNA, 25 bp, Homo sapien
ctgctttataaatatttcttaaact

SEQ ID NO: 2484602 - DNA, 25 bp, Homo sapien
gattttagtttccacattttgcgct

SEQ ID NO: 2484603 - DNA, 25 bp, Homo sapien
aggattttagtttccacattttgcg

SEQ ID NO: 2484604 - DNA, 25 bp, Homo sapien
tttagtttccacattttgcgcttgg

SEQ ID NO: 2484605 - DNA, 25 bp, Homo sapien
gatgggttatcaagaccagcgagga

SEQ ID NO: 2484606 - DNA, 25 bp, Homo sapien
ggttatcaagaccagcgaggagctg

SEQ ID NO: 2484607 - DNA, 25 bp, Homo sapien
cagcagggatgggttatcaagacca

SEQ ID NO: 2484608 - DNA, 25 bp, Homo sapien
cagggatgggttatcaagaccagcg

SEQ ID NO: 2484609 - DNA, 25 bp, Homo sapien
gccgagccttcagtcttggatggtg

SEQ ID NO: 2484610 - DNA, 25 bp, Homo sapien
cagccgagccttcagtcttggatgg

SEQ ID NO: 2484611 - DNA, 25 bp, Homo sapien
agccgagccttcagtcttggatggt

SEQ ID NO: 2484612 - DNA, 25 bp, Homo sapien
ctctgcttcttcaccatgggagaag

SEQ ID NO: 2484613 - DNA, 25 bp, Homo sapien
catggctgactatgtactagacaat

SEQ ID NO: 2484614 - DNA, 25 bp, Homo sapien
tcaggcagttgacgttagagtccac

SEQ ID NO: 2484615 - DNA, 25 bp, Homo sapien
catcctatttgggtgtggaagacag

SEQ ID NO: 2484616 - DNA, 25 bp, Homo sapien
gcaagccaggattcaagctcaggca

SEQ ID NO: 2484617 - DNA, 25 bp, Homo sapien
ccgtgctgagggctcgggccaaatt

SEQ ID NO: 2484618 - DNA, 25 bp, Homo sapien
cgtgctgagggctcgggccaaattc

SEQ ID NO: 2484619 - DNA, 25 bp, Homo sapien
gtgctgagggctcgggccaaattcc

SEQ ID NO: 2484620 - DNA, 25 bp, Homo sapien
tgctgagggctcgggccaaattccg

SEQ ID NO: 2484621 - DNA, 25 bp, Homo sapien
gctagggcttggcatgggagtagtg

SEQ ID NO: 2484622 - DNA, 25 bp, Homo sapien
ctagggcttggcatgggagtagtgg

SEQ ID NO: 2484623 - DNA, 25 bp, Homo sapien
gggctagggcttggcatgggagtag

SEQ ID NO: 2484624 - DNA, 25 bp, Homo sapien
ggctagggcttggcatgggagtagt

SEQ ID NO: 2484625 - DNA, 25 bp, Homo sapien
gctcctatgtcataaaccttactca

SEQ ID NO: 2484626 - DNA, 25 bp, Homo sapien
ttatcacccagcttcctactcgccc

SEQ ID NO: 2484627 - DNA, 25 bp, Homo sapien
ttccttatgtggtccctctttatca

SEQ ID NO: 2484628 - DNA, 25 bp, Homo sapien
gaagatgaaacctcagtgagcctct

SEQ ID NO: 2484629 - DNA, 25 bp, Homo sapien
tgacgagcccgttaatgctggctga

SEQ ID NO: 2484630 - DNA, 25 bp, Homo sapien
ccgcttgcccgggactttgactgtt

SEQ ID NO: 2484631 - DNA, 25 bp, Homo sapien
tggacagtgctcatgtccttgacga

SEQ ID NO: 2484632 - DNA, 25 bp, Homo sapien
tttgactgttgttcgcagcaagtcc

SEQ ID NO: 2484633 - DNA, 25 bp, Homo sapien
gaattgccacttcgttttagtagga

SEQ ID NO: 2484634 - DNA, 25 bp, Homo sapien
tggtagagtagaaagccattactgg

SEQ ID NO: 2484635 - DNA, 25 bp, Homo sapien
ttactggacagggttacatatttct

SEQ ID NO: 2484636 - DNA, 25 bp, Homo sapien
caaggaattgccacttcgttttagt

SEQ ID NO: 2484637 - DNA, 25 bp, Homo sapien
tctcggagtcactaccccgacgatt

SEQ ID NO: 2484638 - DNA, 25 bp, Homo sapien
atccaagcttcgtttctcggagtca

SEQ ID NO: 2484639 - DNA, 25 bp, Homo sapien
tgttgtctctccccgactatccaag

SEQ ID NO: 2484640 - DNA, 25 bp, Homo sapien
tttgatggggatggctcgcccactc

SEQ ID NO: 2484641 - DNA, 25 bp, Homo sapien
tgcctcggctcggagctcccggtga

SEQ ID NO: 2484642 - DNA, 25 bp, Homo sapien
cggtgaccaacattcggtgaggacg

SEQ ID NO: 2484643 - DNA, 25 bp, Homo sapien
aaggctggtcctgcgcttggctgcc

SEQ ID NO: 2484644 - DNA, 25 bp, Homo sapien
tggggtgctcaatccagccactgca

SEQ ID NO: 2484645 - DNA, 25 bp, Homo sapien
ctggccagctaccggagtggatgca

SEQ ID NO: 2484646 - DNA, 25 bp, Homo sapien
gccagctaccggagtggatgcagct

SEQ ID NO: 2484647 - DNA, 25 bp, Homo sapien
gcttgcgcaaggtcaccaccttctg

SEQ ID NO: 2484648 - DNA, 25 bp, Homo sapien
aagctgttgctgcttgcgcaaggtc

SEQ ID NO: 2484649 - DNA, 25 bp, Homo sapien
aagacccgatccacattgagcccat

SEQ ID NO: 2484650 - DNA, 25 bp, Homo sapien
cacaagtctcatagtagctgcagcg

SEQ ID NO: 2484651 - DNA, 25 bp, Homo sapien
gcagcgtttcatgtccgcgcacaga

SEQ ID NO: 2484652 - DNA, 25 bp, Homo sapien
tgagcccataggttgcacaagtctc

SEQ ID NO: 2484653 - DNA, 25 bp, Homo sapien
tccctccccgcgaagggaactcagc

SEQ ID NO: 2484654 - DNA, 25 bp, Homo sapien
agctgcccatggagacggctcacag

SEQ ID NO: 2484655 - DNA, 25 bp, Homo sapien
cgcgaagggaactcagctgcccatg

SEQ ID NO: 2484656 - DNA, 25 bp, Homo sapien
gaagggaactcagctgcccatggag

SEQ ID NO: 2484657 - DNA, 25 bp, Homo sapien
cttcctctcggattagcaccagatg

SEQ ID NO: 2484658 - DNA, 25 bp, Homo sapien
ctctcggattagcaccagatgtgtc

SEQ ID NO: 2484659 - DNA, 25 bp, Homo sapien
tcctctcggattagcaccagatgtg

SEQ ID NO: 2484660 - DNA, 25 bp, Homo sapien
agcttcctctcggattagcaccaga

SEQ ID NO: 2484661 - DNA, 25 bp, Homo sapien
tccagcacctggtatgagccagtca

SEQ ID NO: 2484662 - DNA, 25 bp, Homo sapien
tatgagccagtcaggaatcggtgga

SEQ ID NO: 2484663 - DNA, 25 bp, Homo sapien
gatgagcgatgacttcccactcctg

SEQ ID NO: 2484664 - DNA, 25 bp, Homo sapien
aatcggtggatgagcgatgacttcc

SEQ ID NO: 2484665 - DNA, 25 bp, Homo sapien
aaagtccattcctggctattgatca

SEQ ID NO: 2484666 - DNA, 25 bp, Homo sapien
gagcggctcaaagtccattcctggc

SEQ ID NO: 2484667 - DNA, 25 bp, Homo sapien
cagttcaggaatggagcggctcaaa

SEQ ID NO: 2484668 - DNA, 25 bp, Homo sapien
cattcctggctattgatcacagcct

SEQ ID NO: 2484669 - DNA, 25 bp, Homo sapien
cggtcacgagtggatgctcggcccc

SEQ ID NO: 2484670 - DNA, 25 bp, Homo sapien
aaacttgagcatcttgcggtcacga

SEQ ID NO: 2484671 - DNA, 25 bp, Homo sapien
gtgaagatgccgctgataaacttga

SEQ ID NO: 2484672 - DNA, 25 bp, Homo sapien
gaagatgccgctgataaacttgagc

SEQ ID NO: 2484673 - DNA, 25 bp, Homo sapien
aggtcttactcttgcctttccgagg

SEQ ID NO: 2484674 - DNA, 25 bp, Homo sapien
gcggtcccggatgcaagtcactgtt

SEQ ID NO: 2484675 - DNA, 25 bp, Homo sapien
cggcggcagagaccgaagctccagt

SEQ ID NO: 2484676 - DNA, 25 bp, Homo sapien
ccagaggtcgaagctgtagagcccc

SEQ ID NO: 2484677 - DNA, 25 bp, Homo sapien
ccggctttggctccactcgtggtca

SEQ ID NO: 2484678 - DNA, 25 bp, Homo sapien
ttgagcctccggctgccggtgccag

SEQ ID NO: 2484679 - DNA, 25 bp, Homo sapien
ctcgtggtcacggtcttgcaaggct

SEQ ID NO: 2484680 - DNA, 25 bp, Homo sapien
tcgctttcgggccatgacaggcggc

SEQ ID NO: 2484681 - DNA, 25 bp, Homo sapien
caggcttggggtcggggctcagtcc

SEQ ID NO: 2484682 - DNA, 25 bp, Homo sapien
ccccaggcttggggtcggggctcag

SEQ ID NO: 2484683 - DNA, 25 bp, Homo sapien
tcggggctcagtcccccggagagcg

SEQ ID NO: 2484684 - DNA, 25 bp, Homo sapien
gtcggggctcagtcccccggagagc

SEQ ID NO: 2484685 - DNA, 25 bp, Homo sapien
ctgctcgtgctgatccacagcgcat

SEQ ID NO: 2484686 - DNA, 25 bp, Homo sapien
tgctcgtgctgatccacagcgcatc

SEQ ID NO: 2484687 - DNA, 25 bp, Homo sapien
gccggactggccggagccggggaca

SEQ ID NO: 2484688 - DNA, 25 bp, Homo sapien
ttcgtgccgcttcttgcccggctcc

SEQ ID NO: 2484689 - DNA, 25 bp, Homo sapien
agagacgttcgtgccgcttcttgcc

SEQ ID NO: 2484690 - DNA, 25 bp, Homo sapien
ccggtggaagagacgttcgtgccgc

SEQ ID NO: 2484691 - DNA, 25 bp, Homo sapien
ggaagagacgttcgtgccgcttctt

SEQ ID NO: 2484692 - DNA, 25 bp, Homo sapien
ctgccaggatccccagtctcggagc

SEQ ID NO: 2484693 - DNA, 25 bp, Homo sapien
cgcggccgcagacggagaaggcggc

SEQ ID NO: 2484694 - DNA, 25 bp, Homo sapien
gcggcggaggcaccgactcgagctt

SEQ ID NO: 2484695 - DNA, 25 bp, Homo sapien
cggccgcggccgcagacggagaagg

SEQ ID NO: 2484696 - DNA, 25 bp, Homo sapien
gcggaggcaccgactcgagcttaac

SEQ ID NO: 2484697 - DNA, 25 bp, Homo sapien
tcgttgtccggcgctgaagcgcgcc

SEQ ID NO: 2484698 - DNA, 25 bp, Homo sapien
cagggtcagcgagatgaggtaggtc

SEQ ID NO: 2484699 - DNA, 25 bp, Homo sapien
atgaggtaggtcgttgtccggcgct

SEQ ID NO: 2484700 - DNA, 25 bp, Homo sapien
cagcgagatgaggtaggtcgttgtc

SEQ ID NO: 2484701 - DNA, 25 bp, Homo sapien
gaggggactcccccggactgcctca

SEQ ID NO: 2484702 - DNA, 25 bp, Homo sapien
aggggactcccccggactgcctcag

SEQ ID NO: 2484703 - DNA, 25 bp, Homo sapien
gaatgacagcgagctggaacaacct

SEQ ID NO: 2484704 - DNA, 25 bp, Homo sapien
tccaccagttcctcagtggtagggc

SEQ ID NO: 2484705 - DNA, 25 bp, Homo sapien
gctgcatcagaggtgaatggaatga

SEQ ID NO: 2484706 - DNA, 25 bp, Homo sapien
caccagttcctcagtggtagggcct

SEQ ID NO: 2484707 - DNA, 25 bp, Homo sapien
ggcctggatgctgtcctggagttcg

SEQ ID NO: 2484708 - DNA, 25 bp, Homo sapien
ttggccacctcatgtcgtctgactt

SEQ ID NO: 2484709 - DNA, 25 bp, Homo sapien
agttcggggtcgtccaccctctctg

SEQ ID NO: 2484710 - DNA, 25 bp, Homo sapien
ccagcttcctgaggcggtttagagc

SEQ ID NO: 2484711 - DNA, 25 bp, Homo sapien
tgcagctacaacgaactgcctctgg

SEQ ID NO: 2484712 - DNA, 25 bp, Homo sapien
cagctacaacgaactgcctctgggc

SEQ ID NO: 2484713 - DNA, 25 bp, Homo sapien
gcagctacaacgaactgcctctggg

SEQ ID NO: 2484714 - DNA, 25 bp, Homo sapien
ctgcagctacaacgaactgcctctg

SEQ ID NO: 2484715 - DNA, 25 bp, Homo sapien
ttgccaggctaacaaccacctctgg

SEQ ID NO: 2484716 - DNA, 25 bp, Homo sapien
tgtcttgccaggctaacaaccacct

SEQ ID NO: 2484717 - DNA, 25 bp, Homo sapien
gttgcccagacctgtcttgccaggc

SEQ ID NO: 2484718 - DNA, 25 bp, Homo sapien
gacctgtcttgccaggctaacaacc

SEQ ID NO: 2484719 - DNA, 25 bp, Homo sapien
tacaggaatgcgctggcctgaggcc

SEQ ID NO: 2484720 - DNA, 25 bp, Homo sapien
aacaatggcgtcatcgtgaggtcac

SEQ ID NO: 2484721 - DNA, 25 bp, Homo sapien
tctgcggccgggctaaataagctca

SEQ ID NO: 2484722 - DNA, 25 bp, Homo sapien
caggacatgggtactagaggacaca

SEQ ID NO: 2484723 - DNA, 25 bp, Homo sapien
tccactgacttcctaggccctgtaa

SEQ ID NO: 2484724 - DNA, 25 bp, Homo sapien
tcaaagaagcaatttcagttccttt

SEQ ID NO: 2484725 - DNA, 25 bp, Homo sapien
tggtttttccaaatcgcacaatggc

SEQ ID NO: 2484726 - DNA, 25 bp, Homo sapien
gttcctttctaagctttgtcagtca

SEQ ID NO: 2484727 - DNA, 25 bp, Homo sapien
gaggaggaccctccatagcctcaga

SEQ ID NO: 2484728 - DNA, 25 bp, Homo sapien
taaaggcaaagattgccctctcagt

SEQ ID NO: 2484729 - DNA, 25 bp, Homo sapien
taccccttagtgtagagaaatggga

SEQ ID NO: 2484730 - DNA, 25 bp, Homo sapien
taatctctgtagaaagatggaggag

SEQ ID NO: 2484731 - DNA, 25 bp, Homo sapien
catccttatgtagataagagtgctg

SEQ ID NO: 2484732 - DNA, 25 bp, Homo sapien
cagagattcgcttgtgtgggttaaa

SEQ ID NO: 2484733 - DNA, 25 bp, Homo sapien
tcactccggattaccttcatcctta

SEQ ID NO: 2484734 - DNA, 25 bp, Homo sapien
taagagtgctgcagagctcgaaagg

SEQ ID NO: 2484735 - DNA, 25 bp, Homo sapien
ggagaggcaaaggtcagaaaaccat

SEQ ID NO: 2484736 - DNA, 25 bp, Homo sapien
gcaaaggtcagaaaaccatgaagaa

SEQ ID NO: 2484737 - DNA, 25 bp, Homo sapien
gaggcaaaggtcagaaaaccatgaa

SEQ ID NO: 2484738 - DNA, 25 bp, Homo sapien
gaagaaaacagacttctgcccaccc

SEQ ID NO: 2484739 - DNA, 25 bp, Homo sapien
gtttcattaaccacagtggccaggg

SEQ ID NO: 2484740 - DNA, 25 bp, Homo sapien
tacagcccatctaccaaccaagttt

SEQ ID NO: 2484741 - DNA, 25 bp, Homo sapien
cccagccaggatgggttctcttcta

SEQ ID NO: 2484742 - DNA, 25 bp, Homo sapien
ctctgtgggtggctatttgcagctg

SEQ ID NO: 2484743 - DNA, 25 bp, Homo sapien
atttctttccccagtctctatttct

SEQ ID NO: 2484744 - DNA, 25 bp, Homo sapien
tgctctatttctttccccagtctct

SEQ ID NO: 2484745 - DNA, 25 bp, Homo sapien
tccccagtctctatttctttccctg

SEQ ID NO: 2484746 - DNA, 25 bp, Homo sapien
tatttctttccctgtgcccacagcc

SEQ ID NO: 2484747 - DNA, 25 bp, Homo sapien
ctccacggggcagggatacatctcg

SEQ ID NO: 2484748 - DNA, 25 bp, Homo sapien
tccatctcaggtaccaccgactgca

SEQ ID NO: 2484749 - DNA, 25 bp, Homo sapien
atctcaggtaccaccgactgcactg

SEQ ID NO: 2484750 - DNA, 25 bp, Homo sapien
ccacggggcagggatacatctcgag

SEQ ID NO: 2484751 - DNA, 25 bp, Homo sapien
cagtcatcctctggaggcagcccaa

SEQ ID NO: 2484752 - DNA, 25 bp, Homo sapien
agttcccatccccatgggcagagcc

SEQ ID NO: 2484753 - DNA, 25 bp, Homo sapien
tgggcagagccagttgccatcctgg

SEQ ID NO: 2484754 - DNA, 25 bp, Homo sapien
atccccatgggcagagccagttgcc

SEQ ID NO: 2484755 - DNA, 25 bp, Homo sapien
gcagagccagttgccatcctgggtt

SEQ ID NO: 2484756 - DNA, 25 bp, Homo sapien
tttgcccaactggtcggcttcagag

SEQ ID NO: 2484757 - DNA, 25 bp, Homo sapien
ccaactggtcggcttcagagtttcc

SEQ ID NO: 2484758 - DNA, 25 bp, Homo sapien
gattttgcccaactggtcggcttca

SEQ ID NO: 2484759 - DNA, 25 bp, Homo sapien
tcaaagattttgcccaactggtcgg

SEQ ID NO: 2484760 - DNA, 25 bp, Homo sapien
gatatcttagttgaatggttactgc

SEQ ID NO: 2484761 - DNA, 25 bp, Homo sapien
ttagttgaatggttactgcttagtg

SEQ ID NO: 2484762 - DNA, 25 bp, Homo sapien
ctaaggtgagaagggatataaggta

SEQ ID NO: 2484763 - DNA, 25 bp, Homo sapien
tcaaagatatcttagttgaatggtt

SEQ ID NO: 2484764 - DNA, 25 bp, Homo sapien
gcagtagcttatgctactttgggag

SEQ ID NO: 2484765 - DNA, 25 bp, Homo sapien
tgcagtagcttatgctactttggga

SEQ ID NO: 2484766 - DNA, 25 bp, Homo sapien
ccagatgcagtagcttatgctactt

SEQ ID NO: 2484767 - DNA, 25 bp, Homo sapien
gatgcagtagcttatgctactttgg

SEQ ID NO: 2484768 - DNA, 25 bp, Homo sapien
ctctataaaaatattaacaaactag

SEQ ID NO: 2484769 - DNA, 25 bp, Homo sapien
actagccaagcatggaggtgcgtgc

SEQ ID NO: 2484770 - DNA, 25 bp, Homo sapien
aaatattaacaaactagccaagcat

SEQ ID NO: 2484771 - DNA, 25 bp, Homo sapien
tataaaaatattaacaaactagcca

SEQ ID NO: 2484772 - DNA, 25 bp, Homo sapien
gtgtcagctagttgggaagctgaga

SEQ ID NO: 2484773 - DNA, 25 bp, Homo sapien
gttgaagctgcagtgagctgtgatc

SEQ ID NO: 2484774 - DNA, 25 bp, Homo sapien
tgggaggatcacttgagcccaggag

SEQ ID NO: 2484775 - DNA, 25 bp, Homo sapien
ctgtagtgtcagctagttgggaagc

SEQ ID NO: 2484776 - DNA, 25 bp, Homo sapien
aattcaaggtagtccagggtatgtg

SEQ ID NO: 2484777 - DNA, 25 bp, Homo sapien
tgtggtttatgaacaagcgatttgg

SEQ ID NO: 2484778 - DNA, 25 bp, Homo sapien
caaggtatggatgtggtttatgaac

SEQ ID NO: 2484779 - DNA, 25 bp, Homo sapien
gatttggggaattcaaggtagtcca

SEQ ID NO: 2484780 - DNA, 25 bp, Homo sapien
catatgtggactgcagaagaacttc

SEQ ID NO: 2484781 - DNA, 25 bp, Homo sapien
aagaacttcgggagctcggtaccag

SEQ ID NO: 2484782 - DNA, 25 bp, Homo sapien
aacttcgggagctcggtaccagagt

SEQ ID NO: 2484783 - DNA, 25 bp, Homo sapien
tccacatgtccacaggtgttgcata

SEQ ID NO: 2484784 - DNA, 25 bp, Homo sapien
ttgctacgggcaatcactctcctac

SEQ ID NO: 2484785 - DNA, 25 bp, Homo sapien
gcacatgacttctcaattgctacgg

SEQ ID NO: 2484786 - DNA, 25 bp, Homo sapien
ggaccccatgggttaccatgaaaca

SEQ ID NO: 2484787 - DNA, 25 bp, Homo sapien
ccatgaaacacaacttgcttgactg

SEQ ID NO: 2484788 - DNA, 25 bp, Homo sapien
cacgggtgtaagtgccatctggtag

SEQ ID NO: 2484789 - DNA, 25 bp, Homo sapien
tagctgtagattctggccaggccaa

SEQ ID NO: 2484790 - DNA, 25 bp, Homo sapien
gaaatctaggcctcttagaaactgg

SEQ ID NO: 2484791 - DNA, 25 bp, Homo sapien
tctcggtgaacgatgcaattggcat

SEQ ID NO: 2484792 - DNA, 25 bp, Homo sapien
gtccagatatgtccttaggtcctgg

SEQ ID NO: 2484793 - DNA, 25 bp, Homo sapien
gggggtgccttgtccagatatgtcc

SEQ ID NO: 2484794 - DNA, 25 bp, Homo sapien
tgatcgtttcggctggcaagcctgg

SEQ ID NO: 2484795 - DNA, 25 bp, Homo sapien
ggtcctggtctacatgctcaaacac

SEQ ID NO: 2484796 - DNA, 25 bp, Homo sapien
gatctcccggtcagttcgggatgtg

SEQ ID NO: 2484797 - DNA, 25 bp, Homo sapien
tctcccggtcagttcgggatgtggc

SEQ ID NO: 2484798 - DNA, 25 bp, Homo sapien
cttgatctcccggtcagttcgggat

SEQ ID NO: 2484799 - DNA, 25 bp, Homo sapien
tcccggtcagttcgggatgtggcac

SEQ ID NO: 2484800 - DNA, 25 bp, Homo sapien
ctgaccagagtaaatgctcactttt

SEQ ID NO: 2484801 - DNA, 25 bp, Homo sapien
aactgtgctgatgggaaggcctcct

SEQ ID NO: 2484802 - DNA, 25 bp, Homo sapien
taaagccacctcacgaactgtgctg

SEQ ID NO: 2484803 - DNA, 25 bp, Homo sapien
tgtacactgtcccataggcaccgac

SEQ ID NO: 2484804 - DNA, 25 bp, Homo sapien
aaagcctccagtcgcctcagtaaag

SEQ ID NO: 2484805 - DNA, 25 bp, Homo sapien
atcacagactcctatcaccaaaagt

SEQ ID NO: 2484806 - DNA, 25 bp, Homo sapien
cacagactcctatcaccaaaagtcg

SEQ ID NO: 2484807 - DNA, 25 bp, Homo sapien
caatcacagactcctatcaccaaaa

SEQ ID NO: 2484808 - DNA, 25 bp, Homo sapien
aatcacagactcctatcaccaaaag

SEQ ID NO: 2484809 - DNA, 25 bp, Homo sapien
aaaaagcgcaaagaacaccaccagc

SEQ ID NO: 2484810 - DNA, 25 bp, Homo sapien
gatggtatgagcctgcagcaacaaa

SEQ ID NO: 2484811 - DNA, 25 bp, Homo sapien
gccccagagataacacaatgactca

SEQ ID NO: 2484812 - DNA, 25 bp, Homo sapien
gataacacaatgactcaataccaac

SEQ ID NO: 2484813 - DNA, 25 bp, Homo sapien
tatactttcccatgaccacaaaggc

SEQ ID NO: 2484814 - DNA, 25 bp, Homo sapien
tgcatcgaagatcctacacctcagt

SEQ ID NO: 2484815 - DNA, 25 bp, Homo sapien
taaccagctcgcgaaacgaacgcgt

SEQ ID NO: 2484816 - DNA, 25 bp, Homo sapien
tgaggccctgcaatagaaaacgctt

SEQ ID NO: 2484817 - DNA, 25 bp, Homo sapien
acggccccatacacccgagctcggt

SEQ ID NO: 2484818 - DNA, 25 bp, Homo sapien
ttcctacggccccatacacccgagc

SEQ ID NO: 2484819 - DNA, 25 bp, Homo sapien
atacacccgagctcggtccggagca

SEQ ID NO: 2484820 - DNA, 25 bp, Homo sapien
gagccggttcctacggccccataca

SEQ ID NO: 2484821 - DNA, 25 bp, Homo sapien
agacacaggccgcaagctagagagg

SEQ ID NO: 2484822 - DNA, 25 bp, Homo sapien
ctggacgcagagggcccgaccatag

SEQ ID NO: 2484823 - DNA, 25 bp, Homo sapien
acaggccgcaagctagagaggcccc

SEQ ID NO: 2484824 - DNA, 25 bp, Homo sapien
agagggcccgaccatagacacaggc

SEQ ID NO: 2484825 - DNA, 25 bp, Homo sapien
gatctgttgctatcacacgtgaccg

SEQ ID NO: 2484826 - DNA, 25 bp, Homo sapien
gtgaccgccacccatgcgctgaggg

SEQ ID NO: 2484827 - DNA, 25 bp, Homo sapien
cacgtgaccgcttgacattgctctg

SEQ ID NO: 2484828 - DNA, 25 bp, Homo sapien
cgaacgccggacgttctgggcacgt

SEQ ID NO: 2484829 - DNA, 25 bp, Homo sapien
agcaggcgcggcgcctaaggaggct

SEQ ID NO: 2484830 - DNA, 25 bp, Homo sapien
gcgagcaggcgcggcgcctaaggag

SEQ ID NO: 2484831 - DNA, 25 bp, Homo sapien
cgcgagcaggcgcggcgcctaagga

SEQ ID NO: 2484832 - DNA, 25 bp, Homo sapien
cgagcaggcgcggcgcctaaggagg

SEQ ID NO: 2484833 - DNA, 25 bp, Homo sapien
ccctgacggtcatcgagaaggtcca

SEQ ID NO: 2484834 - DNA, 25 bp, Homo sapien
cagccaagtggcaacgacaggatct

SEQ ID NO: 2484835 - DNA, 25 bp, Homo sapien
tggtgtcagacaagtgccacattct

SEQ ID NO: 2484836 - DNA, 25 bp, Homo sapien
agtggcaggccatctccctgacggt

SEQ ID NO: 2484837 - DNA, 25 bp, Homo sapien
tgcccactgggtagagacacctgga

SEQ ID NO: 2484838 - DNA, 25 bp, Homo sapien
aagactagtatacattgacctcccg

SEQ ID NO: 2484839 - DNA, 25 bp, Homo sapien
gatgacatttcagtacccgctggca

SEQ ID NO: 2484840 - DNA, 25 bp, Homo sapien
gatctgtgtgggtagcctcaagctg

SEQ ID NO: 2484841 - DNA, 25 bp, Homo sapien
caatgtgggtcagcctgaagcctgg

SEQ ID NO: 2484842 - DNA, 25 bp, Homo sapien
gatggcattatgtttggaggcagca

SEQ ID NO: 2484843 - DNA, 25 bp, Homo sapien
cacaggtttgatcccggtgtgccca

SEQ ID NO: 2484844 - DNA, 25 bp, Homo sapien
tttccatggcagtttagggtcacag

SEQ ID NO: 2484845 - DNA, 25 bp, Homo sapien
catacatgatcagaagggccaagca

SEQ ID NO: 2484846 - DNA, 25 bp, Homo sapien
tgcaaagacgaaggaccaaccaggt

SEQ ID NO: 2484847 - DNA, 25 bp, Homo sapien
taaaccaggctagggcagattcacc

SEQ ID NO: 2484848 - DNA, 25 bp, Homo sapien
ggtacagaccagatgcacagttact

SEQ ID NO: 2484849 - DNA, 25 bp, Homo sapien
ctgtccaaaaactgtaggttgatgc

SEQ ID NO: 2484850 - DNA, 25 bp, Homo sapien
cagtccgggtcttgggtctaactgg

SEQ ID NO: 2484851 - DNA, 25 bp, Homo sapien
atgctcctttcaggtaccaggacag

SEQ ID NO: 2484852 - DNA, 25 bp, Homo sapien
aggtaccaggacagtccgggtcttg

SEQ ID NO: 2484853 - DNA, 25 bp, Homo sapien
ggctcaggctgcacctcaaaatgtg

SEQ ID NO: 2484854 - DNA, 25 bp, Homo sapien
gctcaggctgcacctcaaaatgtgt

SEQ ID NO: 2484855 - DNA, 25 bp, Homo sapien
ctggctcaggctgcacctcaaaatg

SEQ ID NO: 2484856 - DNA, 25 bp, Homo sapien
tcaggctgcacctcaaaatgtgtta

SEQ ID NO: 2484857 - DNA, 25 bp, Homo sapien
tacagctgcgcttgccaaagccaaa

SEQ ID NO: 2484858 - DNA, 25 bp, Homo sapien
ccagcgagctggacgaaaagaattt

SEQ ID NO: 2484859 - DNA, 25 bp, Homo sapien
ttgcaattcaagctctgccaggcgt

SEQ ID NO: 2484860 - DNA, 25 bp, Homo sapien
ggcatagtgacacagagtgaccagc

SEQ ID NO: 2484861 - DNA, 25 bp, Homo sapien
gacacgagaatttccaggtaccaca

SEQ ID NO: 2484862 - DNA, 25 bp, Homo sapien
gggataatatagtcacccacatgaa

SEQ ID NO: 2484863 - DNA, 25 bp, Homo sapien
tatagtcacccacatgaatgtcttt

SEQ ID NO: 2484864 - DNA, 25 bp, Homo sapien
gaatgtctttgtctgggacacgaga

SEQ ID NO: 2484865 - DNA, 25 bp, Homo sapien
tgaccaccgccttcagcaggggcag

SEQ ID NO: 2484866 - DNA, 25 bp, Homo sapien
acttccttgaccaccgccttcagca

SEQ ID NO: 2484867 - DNA, 25 bp, Homo sapien
gagagctcatacagagcccaagaga

SEQ ID NO: 2484868 - DNA, 25 bp, Homo sapien
gtgccgggagagctcatacagagcc

SEQ ID NO: 2484869 - DNA, 25 bp, Homo sapien
gctggtctacgtggccataatggat

SEQ ID NO: 2484870 - DNA, 25 bp, Homo sapien
tggccataatggatcccctgcaaca

SEQ ID NO: 2484871 - DNA, 25 bp, Homo sapien
cagaaaaatggagccggagtctgcg

SEQ ID NO: 2484872 - DNA, 25 bp, Homo sapien
ggctacagggtgctaagccaagctg

SEQ ID NO: 2484873 - DNA, 25 bp, Homo sapien
gggctgtcctccgttcctcatggct

SEQ ID NO: 2484874 - DNA, 25 bp, Homo sapien
ggaagtgggtcaggtgcgccccaga

SEQ ID NO: 2484875 - DNA, 25 bp, Homo sapien
agactccaggtccttctcgggctgt

SEQ ID NO: 2484876 - DNA, 25 bp, Homo sapien
ggatggactgggcaggcaactcttc

SEQ ID NO: 2484877 - DNA, 25 bp, Homo sapien
ccatggtcaacagcgtggacacaaa

SEQ ID NO: 2484878 - DNA, 25 bp, Homo sapien
catctggtcccagtctcggcagagg

SEQ ID NO: 2484879 - DNA, 25 bp, Homo sapien
cccacagcgcggatgaaggtctccg

SEQ ID NO: 2484880 - DNA, 25 bp, Homo sapien
cgtgtcgggtggcacttgagcctcc

SEQ ID NO: 2484881 - DNA, 25 bp, Homo sapien
gaggctctggtagggcgcccccgac

SEQ ID NO: 2484882 - DNA, 25 bp, Homo sapien
tggtagggcgcccccgacgcctgcc

SEQ ID NO: 2484883 - DNA, 25 bp, Homo sapien
cagggttccgggaggctctggtagg

SEQ ID NO: 2484884 - DNA, 25 bp, Homo sapien
tcagggttccgggaggctctggtag

SEQ ID NO: 2484885 - DNA, 25 bp, Homo sapien
caggagactgcggagcctttgccat

SEQ ID NO: 2484886 - DNA, 25 bp, Homo sapien
ggagcctttgccattcttcgccttc

SEQ ID NO: 2484887 - DNA, 25 bp, Homo sapien
tggcgcctcagacgccgcacaaggt

SEQ ID NO: 2484888 - DNA, 25 bp, Homo sapien
gcagactacgttgttcagggttccg

SEQ ID NO: 2484889 - DNA, 25 bp, Homo sapien
cccagattgatagtttcgggacccg

SEQ ID NO: 2484890 - DNA, 25 bp, Homo sapien
catgcccccagattgatagtttcgg

SEQ ID NO: 2484891 - DNA, 25 bp, Homo sapien
aggagagggccgctgcagggcgtct

SEQ ID NO: 2484892 - DNA, 25 bp, Homo sapien
tgatagtttcgggacccgcagcagg

SEQ ID NO: 2484893 - DNA, 25 bp, Homo sapien
acacggtgcgcactgtcccaaagct

SEQ ID NO: 2484894 - DNA, 25 bp, Homo sapien
tccagggcgagaagctgcagcgctc

SEQ ID NO: 2484895 - DNA, 25 bp, Homo sapien
gcagtgagcagtccgcaagcccgct

SEQ ID NO: 2484896 - DNA, 25 bp, Homo sapien
tggctagccacaccggcccgaagtg

SEQ ID NO: 2484897 - DNA, 25 bp, Homo sapien
cacgccaagggcgttgactgggctt

SEQ ID NO: 2484898 - DNA, 25 bp, Homo sapien
acagcggacacttggatacctgggc

SEQ ID NO: 2484899 - DNA, 25 bp, Homo sapien
tctcgggtgcccaactagtgtatgc

SEQ ID NO: 2484900 - DNA, 25 bp, Homo sapien
cttgggaatagggagcttctgctct

SEQ ID NO: 2484901 - DNA, 25 bp, Homo sapien
ggaacactctggaggcgtacttgag

SEQ ID NO: 2484902 - DNA, 25 bp, Homo sapien
tgcagaaaagttcggccagaaagct

SEQ ID NO: 2484903 - DNA, 25 bp, Homo sapien
tgagtggtactctcggtagcctagg

SEQ ID NO: 2484904 - DNA, 25 bp, Homo sapien
caagctccggcgtgctgagtggtac

SEQ ID NO: 2484905 - DNA, 25 bp, Homo sapien
gcatcatatctcaacccctatttaa

SEQ ID NO: 2484906 - DNA, 25 bp, Homo sapien
gttcagggtgctcgcgaaagaaagc

SEQ ID NO: 2484907 - DNA, 25 bp, Homo sapien
gaaagaaagcgcttctcctgagcat

SEQ ID NO: 2484908 - DNA, 25 bp, Homo sapien
ttctcctgagcatcatatctcaacc

SEQ ID NO: 2484909 - DNA, 25 bp, Homo sapien
gctaaaatggctcctagaacctcca

SEQ ID NO: 2484910 - DNA, 25 bp, Homo sapien
cttagtgggttgtatcttctctgca

SEQ ID NO: 2484911 - DNA, 25 bp, Homo sapien
gaggcacagctgtaactgtccccac

SEQ ID NO: 2484912 - DNA, 25 bp, Homo sapien
tacctaacatatactgggcagatgg

SEQ ID NO: 2484913 - DNA, 25 bp, Homo sapien
gattccccaggtcaagtcttacgca

SEQ ID NO: 2484914 - DNA, 25 bp, Homo sapien
gaggatggtagaaggcatatgatac

SEQ ID NO: 2484915 - DNA, 25 bp, Homo sapien
tgatacatactccaccctttcctga

SEQ ID NO: 2484916 - DNA, 25 bp, Homo sapien
ggcagaataggcatgtgtacacata

SEQ ID NO: 2484917 - DNA, 25 bp, Homo sapien
agccttccaaagatcccctatggtc

SEQ ID NO: 2484918 - DNA, 25 bp, Homo sapien
ctcttttctctaatccctgggagac

SEQ ID NO: 2484919 - DNA, 25 bp, Homo sapien
tcttttctctaatccctgggagacg

SEQ ID NO: 2484920 - DNA, 25 bp, Homo sapien
cttttctctaatccctgggagacga

SEQ ID NO: 2484921 - DNA, 25 bp, Homo sapien
ttttctctaatccctgggagacgag

SEQ ID NO: 2484922 - DNA, 25 bp, Homo sapien
agtgaccaggcaggctggtttggga

SEQ ID NO: 2484923 - DNA, 25 bp, Homo sapien
caggcaggctggtttgggaggtcac

SEQ ID NO: 2484924 - DNA, 25 bp, Homo sapien
gaccaggcaggctggtttgggaggt

SEQ ID NO: 2484925 - DNA, 25 bp, Homo sapien
tcagtgaccaggcaggctggtttgg

SEQ ID NO: 2484926 - DNA, 25 bp, Homo sapien
attcttccctccattacgtagaact

SEQ ID NO: 2484927 - DNA, 25 bp, Homo sapien
cctggaggacgggatcttgtattct

SEQ ID NO: 2484928 - DNA, 25 bp, Homo sapien
ggaggacgggatcttgtattcttcg

SEQ ID NO: 2484929 - DNA, 25 bp, Homo sapien
tgcctggaggacgggatcttgtatt

SEQ ID NO: 2484930 - DNA, 25 bp, Homo sapien
catcggttatggtatacaccagccc

SEQ ID NO: 2484931 - DNA, 25 bp, Homo sapien
tccagcacatcggttatggtataca

SEQ ID NO: 2484932 - DNA, 25 bp, Homo sapien
cagcacatcggttatggtatacacc

SEQ ID NO: 2484933 - DNA, 25 bp, Homo sapien
gcacatcggttatggtatacaccag

SEQ ID NO: 2484934 - DNA, 25 bp, Homo sapien
cccatcatccctccgatcccaactc

SEQ ID NO: 2484935 - DNA, 25 bp, Homo sapien
ccatcatccctccgatcccaactca

SEQ ID NO: 2484936 - DNA, 25 bp, Homo sapien
catcatccctccgatcccaactcac

SEQ ID NO: 2484937 - DNA, 25 bp, Homo sapien
cagggtgggactgatgattcgccac

SEQ ID NO: 2484938 - DNA, 25 bp, Homo sapien
ggtgggactgatgattcgccacttg

SEQ ID NO: 2484939 - DNA, 25 bp, Homo sapien
ctgatgattcgccacttgtgctttg

SEQ ID NO: 2484940 - DNA, 25 bp, Homo sapien
gatgattcgccacttgtgctttgtc

SEQ ID NO: 2484941 - DNA, 25 bp, Homo sapien
cttgaaatgtgggtcggggaagagg

SEQ ID NO: 2484942 - DNA, 25 bp, Homo sapien
cggtcttgtacatagtctgagacct

SEQ ID NO: 2484943 - DNA, 25 bp, Homo sapien
tcttgtacatagtctgagaccttca

SEQ ID NO: 2484944 - DNA, 25 bp, Homo sapien
aatccggtcttgtacatagtctgag

SEQ ID NO: 2484945 - DNA, 25 bp, Homo sapien
tccggtcttgtacatagtctgagac

SEQ ID NO: 2484946 - DNA, 25 bp, Homo sapien
aatggctcatgtagggattgacgcc

SEQ ID NO: 2484947 - DNA, 25 bp, Homo sapien
gattgacgccagaaaggacaaccca

SEQ ID NO: 2484948 - DNA, 25 bp, Homo sapien
ttcaggatcactggccacaacggct

SEQ ID NO: 2484949 - DNA, 25 bp, Homo sapien
gagcctctccatgctgatgtcacca

SEQ ID NO: 2484950 - DNA, 25 bp, Homo sapien
gaaaggccaattatgaccccccaca

SEQ ID NO: 2484951 - DNA, 25 bp, Homo sapien
tgaggcagcagaagctactaggcct

SEQ ID NO: 2484952 - DNA, 25 bp, Homo sapien
ggcagcagaagctactaggcctctt

SEQ ID NO: 2484953 - DNA, 25 bp, Homo sapien
aggcagcagaagctactaggcctct

SEQ ID NO: 2484954 - DNA, 25 bp, Homo sapien
ggccaccatagccacagcctatgtc

SEQ ID NO: 2484955 - DNA, 25 bp, Homo sapien
gaactctgggtatagctcagaccag

SEQ ID NO: 2484956 - DNA, 25 bp, Homo sapien
ctctgattttgagtgagtggagcga

SEQ ID NO: 2484957 - DNA, 25 bp, Homo sapien
tggagcgaagaactctgggtatagc

SEQ ID NO: 2484958 - DNA, 25 bp, Homo sapien
ttctcccgagactggctgcctaatg

SEQ ID NO: 2484959 - DNA, 25 bp, Homo sapien
taatgcactgggatcctactttgtg

SEQ ID NO: 2484960 - DNA, 25 bp, Homo sapien
tctggcggttgatgtgaccctggcc

SEQ ID NO: 2484961 - DNA, 25 bp, Homo sapien
aactccacttctggcggttgatgtg

SEQ ID NO: 2484962 - DNA, 25 bp, Homo sapien
ccggccacgttccgagtctcggctg

SEQ ID NO: 2484963 - DNA, 25 bp, Homo sapien
tccggccacgttccgagtctcggct

SEQ ID NO: 2484964 - DNA, 25 bp, Homo sapien
tgctccggccacgttccgagtctcg

SEQ ID NO: 2484965 - DNA, 25 bp, Homo sapien
cgccatggggttggagtgagcacgt

SEQ ID NO: 2484966 - DNA, 25 bp, Homo sapien
gaggcgcaagttaatgacgcagcca

SEQ ID NO: 2484967 - DNA, 25 bp, Homo sapien
gcgcaggccagaggcgcaagttaat

SEQ ID NO: 2484968 - DNA, 25 bp, Homo sapien
ggtttctctaccaaatccacgtgga

SEQ ID NO: 2484969 - DNA, 25 bp, Homo sapien
aaatccacgtggaggcgcaggccag

SEQ ID NO: 2484970 - DNA, 25 bp, Homo sapien
aagacccaagagcaaattcagctgg

SEQ ID NO: 2484971 - DNA, 25 bp, Homo sapien
ttagcttgcttctgcctggtctggg

SEQ ID NO: 2484972 - DNA, 25 bp, Homo sapien
ggtctgggttaccatcctggttgca

SEQ ID NO: 2484973 - DNA, 25 bp, Homo sapien
tagagacctcgccttctacagtggc

SEQ ID NO: 2484974 - DNA, 25 bp, Homo sapien
ttggggctctctttacttactgctt

SEQ ID NO: 2484975 - DNA, 25 bp, Homo sapien
tccttcagtccattccgcaaactct

SEQ ID NO: 2484976 - DNA, 25 bp, Homo sapien
ttactgcttaggcacatagtcacct

SEQ ID NO: 2484977 - DNA, 25 bp, Homo sapien
tgcttaggcacatagtcaccttctc

SEQ ID NO: 2484978 - DNA, 25 bp, Homo sapien
taaattaagtagctgaatgtcaggc

SEQ ID NO: 2484979 - DNA, 25 bp, Homo sapien
gaacatgccgtgatttgcagactct

SEQ ID NO: 2484980 - DNA, 25 bp, Homo sapien
ttctgtggccttgcaataggtatag

SEQ ID NO: 2484981 - DNA, 25 bp, Homo sapien
tgctttgacacattacagatctggg

SEQ ID NO: 2484982 - DNA, 25 bp, Homo sapien
gccctcttgtgatgccaaacacaga

SEQ ID NO: 2484983 - DNA, 25 bp, Homo sapien
ggcagagctgcaaattgccctcttg

SEQ ID NO: 2484984 - DNA, 25 bp, Homo sapien
caaagtcctgttcagagaggtaatt

SEQ ID NO: 2484985 - DNA, 25 bp, Homo sapien
aacacagacacaaagtcctgttcag

SEQ ID NO: 2484986 - DNA, 25 bp, Homo sapien
acagtgccagcaagcgccagtttct

SEQ ID NO: 2484987 - DNA, 25 bp, Homo sapien
gttcttcaggtcagggagtcccatt

SEQ ID NO: 2484988 - DNA, 25 bp, Homo sapien
gagtcccattttggcctgtggcaga

SEQ ID NO: 2484989 - DNA, 25 bp, Homo sapien
ctagttagaaggaagacatgacatc

SEQ ID NO: 2484990 - DNA, 25 bp, Homo sapien
ctcactgtcattagaattcagggag

SEQ ID NO: 2484991 - DNA, 25 bp, Homo sapien
cactgtcattagaattcagggagag

SEQ ID NO: 2484992 - DNA, 25 bp, Homo sapien
tcactgtcattagaattcagggaga

SEQ ID NO: 2484993 - DNA, 25 bp, Homo sapien
caagtcctgtatagctagtttggca

SEQ ID NO: 2484994 - DNA, 25 bp, Homo sapien
tcctcctgaggttaaagaactgctg

SEQ ID NO: 2484995 - DNA, 25 bp, Homo sapien
tgctggattcctggctagaggctcc

SEQ ID NO: 2484996 - DNA, 25 bp, Homo sapien
gattcagtaagtccaaggcaagtcc

SEQ ID NO: 2484997 - DNA, 25 bp, Homo sapien
aaataaggaacttggctctgagacc

SEQ ID NO: 2484998 - DNA, 25 bp, Homo sapien
caactatggtaatactaaggacatg

SEQ ID NO: 2484999 - DNA, 25 bp, Homo sapien
cagcaagtctgtttgaaaatctgga

SEQ ID NO: 2485000 - DNA, 25 bp, Homo sapien
gagacctgcttttctattgattaca

SEQ ID NO: 2485001 - DNA, 25 bp, Homo sapien
gattcgcatgatagcagcagcatct

SEQ ID NO: 2485002 - DNA, 25 bp, Homo sapien
agcagtgattcgcatgatagcagca

SEQ ID NO: 2485003 - DNA, 25 bp, Homo sapien
agtgattcgcatgatagcagcagca

SEQ ID NO: 2485004 - DNA, 25 bp, Homo sapien
cagtgattcgcatgatagcagcagc

SEQ ID NO: 2485005 - DNA, 25 bp, Homo sapien
gtctttcttataggggagggacatc

SEQ ID NO: 2485006 - DNA, 25 bp, Homo sapien
tccatgcaggcttgaaaggtgctta

SEQ ID NO: 2485007 - DNA, 25 bp, Homo sapien
agggagtcagaagacatttcaagga

SEQ ID NO: 2485008 - DNA, 25 bp, Homo sapien
gagggacatcttaggtctggtctgt

SEQ ID NO: 2485009 - DNA, 25 bp, Homo sapien
gaagttagagcttccctactctctt

SEQ ID NO: 2485010 - DNA, 25 bp, Homo sapien
caggaagttagagcttccctactct

SEQ ID NO: 2485011 - DNA, 25 bp, Homo sapien
ggcaggaagttagagcttccctact

SEQ ID NO: 2485012 - DNA, 25 bp, Homo sapien
ctggcaggaagttagagcttcccta

SEQ ID NO: 2485013 - DNA, 25 bp, Homo sapien
cctgcttaatgatcaggattggtgt

SEQ ID NO: 2485014 - DNA, 25 bp, Homo sapien
ggtgagtgtgcaggtactgctgtgc

SEQ ID NO: 2485015 - DNA, 25 bp, Homo sapien
gatgggaggctcaaacccctgctta

SEQ ID NO: 2485016 - DNA, 25 bp, Homo sapien
ggattggtgtgtcgggatctcggcc

SEQ ID NO: 2485017 - DNA, 25 bp, Homo sapien
tggaacattcaaagagacgagactg

SEQ ID NO: 2485018 - DNA, 25 bp, Homo sapien
cgaattggccggtcttattggaaca

SEQ ID NO: 2485019 - DNA, 25 bp, Homo sapien
taggagcatcacgtcagtagggttc

SEQ ID NO: 2485020 - DNA, 25 bp, Homo sapien
aagtctgtgatctcagtgacaacga

SEQ ID NO: 2485021 - DNA, 25 bp, Homo sapien
catcaagctgcttagaaatgttttt

SEQ ID NO: 2485022 - DNA, 25 bp, Homo sapien
ggcatcaagctgcttagaaatgttt

SEQ ID NO: 2485023 - DNA, 25 bp, Homo sapien
gcatcaagctgcttagaaatgtttt

SEQ ID NO: 2485024 - DNA, 25 bp, Homo sapien
atcaagctgcttagaaatgttttta

SEQ ID NO: 2485025 - DNA, 25 bp, Homo sapien
agagggggaggctgtgttcccatac

SEQ ID NO: 2485026 - DNA, 25 bp, Homo sapien
tggcaggcagggggagcccagaaga

SEQ ID NO: 2485027 - DNA, 25 bp, Homo sapien
ctggcaggcagggggagcccagaag

SEQ ID NO: 2485028 - DNA, 25 bp, Homo sapien
ccagaagagggggaggctgtgttcc

SEQ ID NO: 2485029 - DNA, 25 bp, Homo sapien
gcatagggagttttccctcccagta

SEQ ID NO: 2485030 - DNA, 25 bp, Homo sapien
acagtgttctcgctgccatcacaga

SEQ ID NO: 2485031 - DNA, 25 bp, Homo sapien
ccagtaggtcccagaactcggctgg

SEQ ID NO: 2485032 - DNA, 25 bp, Homo sapien
tggccagctccttagccattgcccg

SEQ ID NO: 2485033 - DNA, 25 bp, Homo sapien
gggttgtttctgattatgaataaag

SEQ ID NO: 2485034 - DNA, 25 bp, Homo sapien
gagtaaatacccaggagtaggattg

SEQ ID NO: 2485035 - DNA, 25 bp, Homo sapien
gatcatacggtaagtgtatgtttaa

SEQ ID NO: 2485036 - DNA, 25 bp, Homo sapien
gtgcacaggtttttctgtgaagata

SEQ ID NO: 2485037 - DNA, 25 bp, Homo sapien
tacagtggtacaatctcggctcact

SEQ ID NO: 2485038 - DNA, 25 bp, Homo sapien
ctgcaacctccgccccctggttcaa

SEQ ID NO: 2485039 - DNA, 25 bp, Homo sapien
tccgccccctggttcaagagattct

SEQ ID NO: 2485040 - DNA, 25 bp, Homo sapien
atgagccaccgtgcccagctttttt

SEQ ID NO: 2485041 - DNA, 25 bp, Homo sapien
taatatcaaacgcttcatgaatttg

SEQ ID NO: 2485042 - DNA, 25 bp, Homo sapien
agttttagtatatgtgctgccaaag

SEQ ID NO: 2485043 - DNA, 25 bp, Homo sapien
tgcatgccatccttgcacagggacc

SEQ ID NO: 2485044 - DNA, 25 bp, Homo sapien
atgctaatcttctctgtatcattcc

SEQ ID NO: 2485045 - DNA, 25 bp, Homo sapien
ggtcctttgaccttgctgacaggag

SEQ ID NO: 2485046 - DNA, 25 bp, Homo sapien
actctaggtcctttgaccttgctga

SEQ ID NO: 2485047 - DNA, 25 bp, Homo sapien
cctttgaccttgctgacaggaggag

SEQ ID NO: 2485048 - DNA, 25 bp, Homo sapien
taggtcctttgaccttgctgacagg

SEQ ID NO: 2485049 - DNA, 25 bp, Homo sapien
gcagcagaaagacatcattggagtt

SEQ ID NO: 2485050 - DNA, 25 bp, Homo sapien
tggaagagtcttactggagggtcag

SEQ ID NO: 2485051 - DNA, 25 bp, Homo sapien
tggagggtcaggctcggcatttccc

SEQ ID NO: 2485052 - DNA, 25 bp, Homo sapien
tagtgctctgcctgagttcgcagca

SEQ ID NO: 2485053 - DNA, 25 bp, Homo sapien
agagagaagaaaagcagagtccaga

SEQ ID NO: 2485054 - DNA, 25 bp, Homo sapien
ctagagagaagaaaagcagagtcca

SEQ ID NO: 2485055 - DNA, 25 bp, Homo sapien
tagagagaagaaaagcagagtccag

SEQ ID NO: 2485056 - DNA, 25 bp, Homo sapien
gagagaagaaaagcagagtccagat

SEQ ID NO: 2485057 - DNA, 25 bp, Homo sapien
ctaaggagcaccatgtgagcagagt

SEQ ID NO: 2485058 - DNA, 25 bp, Homo sapien
accatgtgagcagagtgctagagga

SEQ ID NO: 2485059 - DNA, 25 bp, Homo sapien
ggagcaccatgtgagcagagtgcta

SEQ ID NO: 2485060 - DNA, 25 bp, Homo sapien
gcaccatgtgagcagagtgctagag

SEQ ID NO: 2485061 - DNA, 25 bp, Homo sapien
tcctgactcgaacctgcacagcagc

SEQ ID NO: 2485062 - DNA, 25 bp, Homo sapien
atcaaactgccgatccacctccact

SEQ ID NO: 2485063 - DNA, 25 bp, Homo sapien
ccatgaagtggcgtggctccgttcc

SEQ ID NO: 2485064 - DNA, 25 bp, Homo sapien
agcagccccatcaaactgccgatcc

SEQ ID NO: 2485065 - DNA, 25 bp, Homo sapien
ggacacatcaggatccaaagctgaa

SEQ ID NO: 2485066 - DNA, 25 bp, Homo sapien
tcaggatccaaagctgaagcctgtg

SEQ ID NO: 2485067 - DNA, 25 bp, Homo sapien
gagaggccatgaaggacccatgctc

SEQ ID NO: 2485068 - DNA, 25 bp, Homo sapien
caatggtgagaggccatgaaggacc

SEQ ID NO: 2485069 - DNA, 25 bp, Homo sapien
ccagatgtacaagatgtgatgtggc

SEQ ID NO: 2485070 - DNA, 25 bp, Homo sapien
tcgtatgtgtagaggaccagataac

SEQ ID NO: 2485071 - DNA, 25 bp, Homo sapien
ccccataaaagaagccataccattg

SEQ ID NO: 2485072 - DNA, 25 bp, Homo sapien
tggcttcccatttacctcgtatgtg

SEQ ID NO: 2485073 - DNA, 25 bp, Homo sapien
gaaggagacaccgttttccagagat

SEQ ID NO: 2485074 - DNA, 25 bp, Homo sapien
tagaaggagacaccgttttccagag

SEQ ID NO: 2485075 - DNA, 25 bp, Homo sapien
aaggagacaccgttttccagagatg

SEQ ID NO: 2485076 - DNA, 25 bp, Homo sapien
aggagacaccgttttccagagatgg

SEQ ID NO: 2485077 - DNA, 25 bp, Homo sapien
catcatggctcggtctttgcaaggc

SEQ ID NO: 2485078 - DNA, 25 bp, Homo sapien
gaaaggtgctgacgtttactccatg

SEQ ID NO: 2485079 - DNA, 25 bp, Homo sapien
tttgaatcgtgagatgaactgggcc

SEQ ID NO: 2485080 - DNA, 25 bp, Homo sapien
aggatgtgcctttcactaccctgaa

SEQ ID NO: 2485081 - DNA, 25 bp, Homo sapien
ttttccgttgccatcatcgaccatt

SEQ ID NO: 2485082 - DNA, 25 bp, Homo sapien
aacttttccgttgccatcatcgacc

SEQ ID NO: 2485083 - DNA, 25 bp, Homo sapien
tcaacttttccgttgccatcatcga

SEQ ID NO: 2485084 - DNA, 25 bp, Homo sapien
cgttgccatcatcgaccattctttc

SEQ ID NO: 2485085 - DNA, 25 bp, Homo sapien
cctctggcttggtgtgtagcagagt

SEQ ID NO: 2485086 - DNA, 25 bp, Homo sapien
tacctctggcttggtgtgtagcaga

SEQ ID NO: 2485087 - DNA, 25 bp, Homo sapien
ctggcttggtgtgtagcagagtcac

SEQ ID NO: 2485088 - DNA, 25 bp, Homo sapien
ctacctctggcttggtgtgtagcag

SEQ ID NO: 2485089 - DNA, 25 bp, Homo sapien
aaaagccgagtgagtaagaagcatc

SEQ ID NO: 2485090 - DNA, 25 bp, Homo sapien
ggaaaagccgagtgagtaagaagca

SEQ ID NO: 2485091 - DNA, 25 bp, Homo sapien
cgagtgagtaagaagcatctgtgcc

SEQ ID NO: 2485092 - DNA, 25 bp, Homo sapien
gccgagtgagtaagaagcatctgtg

SEQ ID NO: 2485093 - DNA, 25 bp, Homo sapien
ttaccaatgctgaacgttttcccca

SEQ ID NO: 2485094 - DNA, 25 bp, Homo sapien
taccaatgctgaacgttttccccag

SEQ ID NO: 2485095 - DNA, 25 bp, Homo sapien
accaatgctgaacgttttccccagg

SEQ ID NO: 2485096 - DNA, 25 bp, Homo sapien
caattttaccaatgctgaacgtttt

SEQ ID NO: 2485097 - DNA, 25 bp, Homo sapien
gctgcttgaacatggccgactcagc

SEQ ID NO: 2485098 - DNA, 25 bp, Homo sapien
tcgttgacggtctccacattggtgc

SEQ ID NO: 2485099 - DNA, 25 bp, Homo sapien
gactcagcaccatcgttgacggtct

SEQ ID NO: 2485100 - DNA, 25 bp, Homo sapien
ttgaacatggccgactcagcaccat

SEQ ID NO: 2485101 - DNA, 25 bp, Homo sapien
gtcagagtcaaattctaactcactt

SEQ ID NO: 2485102 - DNA, 25 bp, Homo sapien
gatataagcgtctcccctctgggag

SEQ ID NO: 2485103 - DNA, 25 bp, Homo sapien
gcttgtctggtaattcacctctatg

SEQ ID NO: 2485104 - DNA, 25 bp, Homo sapien
gaatacactgagttctttgcttgtc

SEQ ID NO: 2485105 - DNA, 25 bp, Homo sapien
tgactgagtggaacatttttggatc

SEQ ID NO: 2485106 - DNA, 25 bp, Homo sapien
ggatctgtttattggcttgcggtga

SEQ ID NO: 2485107 - DNA, 25 bp, Homo sapien
catggatctgcacaaatataagctc

SEQ ID NO: 2485108 - DNA, 25 bp, Homo sapien
gggccattaaccttgatatgtgata

SEQ ID NO: 2485109 - DNA, 25 bp, Homo sapien
ctcttagcagaattatttgaacagt

SEQ ID NO: 2485110 - DNA, 25 bp, Homo sapien
tgtttttcagcctttgtggctcctt

SEQ ID NO: 2485111 - DNA, 25 bp, Homo sapien
agcgctttagacatggctgcctgtt

SEQ ID NO: 2485112 - DNA, 25 bp, Homo sapien
cagcgctttagacatggctgcctgt

SEQ ID NO: 2485113 - DNA, 25 bp, Homo sapien
gcctgtttttcagcctttgtggctc

SEQ ID NO: 2485114 - DNA, 25 bp, Homo sapien
cacgtagattttggttccactttgg

SEQ ID NO: 2485115 - DNA, 25 bp, Homo sapien
cacacgtagattttggttccacttt

SEQ ID NO: 2485116 - DNA, 25 bp, Homo sapien
acacgtagattttggttccactttg

SEQ ID NO: 2485117 - DNA, 25 bp, Homo sapien
cagaggccttgttgctacctctgtg

SEQ ID NO: 2485118 - DNA, 25 bp, Homo sapien
atcatggttcagtaagtcctggacc

SEQ ID NO: 2485119 - DNA, 25 bp, Homo sapien
tgttgctacctctgtgactgccagc

SEQ ID NO: 2485120 - DNA, 25 bp, Homo sapien
tggttcagtaagtcctggaccagag

SEQ ID NO: 2485121 - DNA, 25 bp, Homo sapien
tgcttctgatctatgatctcatcag

SEQ ID NO: 2485122 - DNA, 25 bp, Homo sapien
agcgtcggccaagggtgtcctgaag

SEQ ID NO: 2485123 - DNA, 25 bp, Homo sapien
caacatgatagttgatttctgcttc

SEQ ID NO: 2485124 - DNA, 25 bp, Homo sapien
taggcttgataatggagcgtcggcc

SEQ ID NO: 2485125 - DNA, 25 bp, Homo sapien
tcctattttagcacggccccctcgc

SEQ ID NO: 2485126 - DNA, 25 bp, Homo sapien
ccctgtctcgaatatcctttgccag

SEQ ID NO: 2485127 - DNA, 25 bp, Homo sapien
tcgctccctgtctcgaatatccttt

SEQ ID NO: 2485128 - DNA, 25 bp, Homo sapien
cccctcgctccctgtctcgaatatc

SEQ ID NO: 2485129 - DNA, 25 bp, Homo sapien
caaggtccagcaagaagacatcacc

SEQ ID NO: 2485130 - DNA, 25 bp, Homo sapien
ttcccaaggtccagcaagaagacat

SEQ ID NO: 2485131 - DNA, 25 bp, Homo sapien
gcaagaagacatcacctcggttgaa

SEQ ID NO: 2485132 - DNA, 25 bp, Homo sapien
acatcacctcggttgaaactgtccc

SEQ ID NO: 2485133 - DNA, 25 bp, Homo sapien
tttcacatgtagcagccgcttcacg

SEQ ID NO: 2485134 - DNA, 25 bp, Homo sapien
tttccctttcacatgtagcagccgc

SEQ ID NO: 2485135 - DNA, 25 bp, Homo sapien
agccgcttcacgtcgtaggtattgg

SEQ ID NO: 2485136 - DNA, 25 bp, Homo sapien
gtcgtaggtattggtctccacgtgc

SEQ ID NO: 2485137 - DNA, 25 bp, Homo sapien
ccagaggcgacacccccctgcttgt

SEQ ID NO: 2485138 - DNA, 25 bp, Homo sapien
cagaggcgacacccccctgcttgta

SEQ ID NO: 2485139 - DNA, 25 bp, Homo sapien
cccagaggcgacacccccctgcttg

SEQ ID NO: 2485140 - DNA, 25 bp, Homo sapien
agaggcgacacccccctgcttgtag

SEQ ID NO: 2485141 - DNA, 25 bp, Homo sapien
tgactcatggtactggacctctcgg

SEQ ID NO: 2485142 - DNA, 25 bp, Homo sapien
cgcagctttgctcatcctgggagga

SEQ ID NO: 2485143 - DNA, 25 bp, Homo sapien
gatgccctgcttgaagtagccacgg

SEQ ID NO: 2485144 - DNA, 25 bp, Homo sapien
caggtagtcgtccagctgtgtggta

SEQ ID NO: 2485145 - DNA, 25 bp, Homo sapien
ataggagactggccactctccgggt

SEQ ID NO: 2485146 - DNA, 25 bp, Homo sapien
ggataggagactggccactctccgg

SEQ ID NO: 2485147 - DNA, 25 bp, Homo sapien
ctgggataggagactggccactctc

SEQ ID NO: 2485148 - DNA, 25 bp, Homo sapien
tgggataggagactggccactctcc

SEQ ID NO: 2485149 - DNA, 25 bp, Homo sapien
atctcccagtacagcccaagaactg

SEQ ID NO: 2485150 - DNA, 25 bp, Homo sapien
agtacagcccaagaactggccccag

SEQ ID NO: 2485151 - DNA, 25 bp, Homo sapien
agcacatctcccagtacagcccaag

SEQ ID NO: 2485152 - DNA, 25 bp, Homo sapien
ccagtacagcccaagaactggcccc

SEQ ID NO: 2485153 - DNA, 25 bp, Homo sapien
aggatgacgtagcagtccccctcat

SEQ ID NO: 2485154 - DNA, 25 bp, Homo sapien
gcgctcacaggcaccagcgccagct

SEQ ID NO: 2485155 - DNA, 25 bp, Homo sapien
ttgccgtgggcgctcacaggcacca

SEQ ID NO: 2485156 - DNA, 25 bp, Homo sapien
gatgacgtagcagtccccctcatag

SEQ ID NO: 2485157 - DNA, 25 bp, Homo sapien
ggaatcctcgtatctggcaggtgga

SEQ ID NO: 2485158 - DNA, 25 bp, Homo sapien
cagggtgccccgtggaagacatgtt

SEQ ID NO: 2485159 - DNA, 25 bp, Homo sapien
tccccatattttgtaggagccaggg

SEQ ID NO: 2485160 - DNA, 25 bp, Homo sapien
gggtggttcccagctatggattgct

SEQ ID NO: 2485161 - DNA, 25 bp, Homo sapien
tgtttttgtctggagccctgttctt

SEQ ID NO: 2485162 - DNA, 25 bp, Homo sapien
tttttgtctggagccctgttcttcg

SEQ ID NO: 2485163 - DNA, 25 bp, Homo sapien
caagcctgtttttgtctggagccct

SEQ ID NO: 2485164 - DNA, 25 bp, Homo sapien
gagccctgttcttcggggctgaaca

SEQ ID NO: 2485165 - DNA, 25 bp, Homo sapien
ggtactttgatgctgcctctcattc

SEQ ID NO: 2485166 - DNA, 25 bp, Homo sapien
ttctcctcaaaccataggctaaggg

SEQ ID NO: 2485167 - DNA, 25 bp, Homo sapien
tgccagtggtcacaagtaaggtgcc

SEQ ID NO: 2485168 - DNA, 25 bp, Homo sapien
aataggtactttgatgctgcctctc

SEQ ID NO: 2485169 - DNA, 25 bp, Homo sapien
ccctgaaggcactggtcagaggcat

SEQ ID NO: 2485170 - DNA, 25 bp, Homo sapien
gacaatgatcccagggtcgttgtcc

SEQ ID NO: 2485171 - DNA, 25 bp, Homo sapien
agacaatgatcccagggtcgttgtc

SEQ ID NO: 2485172 - DNA, 25 bp, Homo sapien
acaatgatcccagggtcgttgtcca

SEQ ID NO: 2485173 - DNA, 25 bp, Homo sapien
tccttcaggattgagcaagtcaggg

SEQ ID NO: 2485174 - DNA, 25 bp, Homo sapien
tctggcctgcggacagatggcttcc

SEQ ID NO: 2485175 - DNA, 25 bp, Homo sapien
tgtggaagcgtgaacctcagacact

SEQ ID NO: 2485176 - DNA, 25 bp, Homo sapien
tgtccaaggccacgtagaggcttta

SEQ ID NO: 2485177 - DNA, 25 bp, Homo sapien
cctaattcagtatcctttgagagga

SEQ ID NO: 2485178 - DNA, 25 bp, Homo sapien
tcagagatgcccttttggacggacc

SEQ ID NO: 2485179 - DNA, 25 bp, Homo sapien
ggaagggacttcctgtcacactgga

SEQ ID NO: 2485180 - DNA, 25 bp, Homo sapien
cccgaatgcgagaggataagctcca

SEQ ID NO: 2485181 - DNA, 25 bp, Homo sapien
taaccgcattttcctagtcctggcc

SEQ ID NO: 2485182 - DNA, 25 bp, Homo sapien
gatgtctaggttggcaagagcctcc

SEQ ID NO: 2485183 - DNA, 25 bp, Homo sapien
ccttagcttagtaatggccgcagag

SEQ ID NO: 2485184 - DNA, 25 bp, Homo sapien
aaatgtgccctatatgttcagctgc

SEQ ID NO: 2485185 - DNA, 25 bp, Homo sapien
cggcacgaaatggaacatgataagc

SEQ ID NO: 2485186 - DNA, 25 bp, Homo sapien
gggaaagcggcacgaaatggaacat

SEQ ID NO: 2485187 - DNA, 25 bp, Homo sapien
aatcccatagcccagtcacagtggg

SEQ ID NO: 2485188 - DNA, 25 bp, Homo sapien
gggtccgctccatgggcaggcccta

SEQ ID NO: 2485189 - DNA, 25 bp, Homo sapien
tgcttttagcacaaagcagcgtctg

SEQ ID NO: 2485190 - DNA, 25 bp, Homo sapien
tggctaggacactgggtgccagaca

SEQ ID NO: 2485191 - DNA, 25 bp, Homo sapien
tagaatagcatccatttcccagaga

SEQ ID NO: 2485192 - DNA, 25 bp, Homo sapien
tctcatatacttggcctggctagga

SEQ ID NO: 2485193 - DNA, 25 bp, Homo sapien
atgcagatgcagcagggacactccc

SEQ ID NO: 2485194 - DNA, 25 bp, Homo sapien
cttctctggggcaagtgggaatggc

SEQ ID NO: 2485195 - DNA, 25 bp, Homo sapien
ggtggcaccacaacgctagagaaaa

SEQ ID NO: 2485196 - DNA, 25 bp, Homo sapien
aacagacagagctcggtacaggaca

SEQ ID NO: 2485197 - DNA, 25 bp, Homo sapien
caaatgctttgtgatacctgcctcc

SEQ ID NO: 2485198 - DNA, 25 bp, Homo sapien
ccagggaggccacgattaaggcagt

SEQ ID NO: 2485199 - DNA, 25 bp, Homo sapien
gccgacattcattacaggcccagga

SEQ ID NO: 2485200 - DNA, 25 bp, Homo sapien
ggaaatgatcccgagcttagctgat

SEQ ID NO: 2485201 - DNA, 25 bp, Homo sapien
gggacacacgtccacgctttgagga

SEQ ID NO: 2485202 - DNA, 25 bp, Homo sapien
cacaggtttgagactatggctaggt

SEQ ID NO: 2485203 - DNA, 25 bp, Homo sapien
tctcaacaagttggcggcaggtagc

SEQ ID NO: 2485204 - DNA, 25 bp, Homo sapien
ggtatcattggtctggcattcgccc

SEQ ID NO: 2485205 - DNA, 25 bp, Homo sapien
tgtcacgctgatcgtaaaggcacag

SEQ ID NO: 2485206 - DNA, 25 bp, Homo sapien
acaagacctgatggccactggatgc

SEQ ID NO: 2485207 - DNA, 25 bp, Homo sapien
ggccgtcgcttggaagcagggcagg

SEQ ID NO: 2485208 - DNA, 25 bp, Homo sapien
tgggatggccgtcgcttggaagcag

SEQ ID NO: 2485209 - DNA, 25 bp, Homo sapien
gatggccgtcgcttggaagcagggc

SEQ ID NO: 2485210 - DNA, 25 bp, Homo sapien
ctactgggatggccgtcgcttggaa

SEQ ID NO: 2485211 - DNA, 25 bp, Homo sapien
ccaaggctggtgtagacgtcctctg

SEQ ID NO: 2485212 - DNA, 25 bp, Homo sapien
gctgcccaaggctggtgtagacgtc

SEQ ID NO: 2485213 - DNA, 25 bp, Homo sapien
gtgtagacgtcctctgctccgctca

SEQ ID NO: 2485214 - DNA, 25 bp, Homo sapien
gctggtgtagacgtcctctgctccg

SEQ ID NO: 2485215 - DNA, 25 bp, Homo sapien
gtctgccatgtcatcaaaccaggac

SEQ ID NO: 2485216 - DNA, 25 bp, Homo sapien
agattgggatcaggttcagcaactc

SEQ ID NO: 2485217 - DNA, 25 bp, Homo sapien
gttcagcaactcagtgtctgccatg

SEQ ID NO: 2485218 - DNA, 25 bp, Homo sapien
tcctcaaagattgggatcaggttca

SEQ ID NO: 2485219 - DNA, 25 bp, Homo sapien
cgtggagacgcatcaggagcactca

SEQ ID NO: 2485220 - DNA, 25 bp, Homo sapien
gtggagacgcatcaggagcactcac

SEQ ID NO: 2485221 - DNA, 25 bp, Homo sapien
caggatgagggtctttctcaggtcc

SEQ ID NO: 2485222 - DNA, 25 bp, Homo sapien
aggatgagggtctttctcaggtccc

SEQ ID NO: 2485223 - DNA, 25 bp, Homo sapien
ccaggatgagggtctttctcaggtc

SEQ ID NO: 2485224 - DNA, 25 bp, Homo sapien
ccagcaggtctgtcacagggtcggc

SEQ ID NO: 2485225 - DNA, 25 bp, Homo sapien
tggtggaacacgcaagactcacgga

SEQ ID NO: 2485226 - DNA, 25 bp, Homo sapien
aagactcacggaataggcgggcccg

SEQ ID NO: 2485227 - DNA, 25 bp, Homo sapien
gcaggtctgtcacagggtcggcata

SEQ ID NO: 2485228 - DNA, 25 bp, Homo sapien
acattcaaagagttcccccatgcgt

SEQ ID NO: 2485229 - DNA, 25 bp, Homo sapien
ccacataaggcctcttgagcacata

SEQ ID NO: 2485230 - DNA, 25 bp, Homo sapien
cacataaggcctcttgagcacatac

SEQ ID NO: 2485231 - DNA, 25 bp, Homo sapien
agagttcccccatgcgtctcaggaa

SEQ ID NO: 2485232 - DNA, 25 bp, Homo sapien
aggcatccctgtgatgaaggtttgc

SEQ ID NO: 2485233 - DNA, 25 bp, Homo sapien
ccacagacccggagaactggctgta

SEQ ID NO: 2485234 - DNA, 25 bp, Homo sapien
tgaaggtttgcagtactgggtacct

SEQ ID NO: 2485235 - DNA, 25 bp, Homo sapien
ggtaccttcaccagttacacagcag

SEQ ID NO: 2485236 - DNA, 25 bp, Homo sapien
cctggattacttgaatccagccaca

SEQ ID NO: 2485237 - DNA, 25 bp, Homo sapien
tggattacttgaatccagccacagc

SEQ ID NO: 2485238 - DNA, 25 bp, Homo sapien
caagaataggcctcacagatggaaa

SEQ ID NO: 2485239 - DNA, 25 bp, Homo sapien
acaagtaatcaagaataggcctcac

SEQ ID NO: 2485240 - DNA, 25 bp, Homo sapien
tgttagcctgccattccttcgacct

SEQ ID NO: 2485241 - DNA, 25 bp, Homo sapien
cgagctcaaagagagtcggcctgct

SEQ ID NO: 2485242 - DNA, 25 bp, Homo sapien
tctaggcagccacaacttaacttct

SEQ ID NO: 2485243 - DNA, 25 bp, Homo sapien
tccctcctagagtaggcctgaactg

SEQ ID NO: 2485244 - DNA, 25 bp, Homo sapien
ctggtgagtggtcccctcaatctct

SEQ ID NO: 2485245 - DNA, 25 bp, Homo sapien
gtggtcccctcaatctctataggca

SEQ ID NO: 2485246 - DNA, 25 bp, Homo sapien
aatctctataggcactatgaagtca

SEQ ID NO: 2485247 - DNA, 25 bp, Homo sapien
ccctcaatctctataggcactatga

SEQ ID NO: 2485248 - DNA, 25 bp, Homo sapien
tggtggcaaagaaacatgaggcccc

SEQ ID NO: 2485249 - DNA, 25 bp, Homo sapien
aaggcagaaaagttaatgctgtcag

SEQ ID NO: 2485250 - DNA, 25 bp, Homo sapien
tgtcagcatggtggcaaagaaacat

SEQ ID NO: 2485251 - DNA, 25 bp, Homo sapien
gcagaaaagttaatgctgtcagcat

SEQ ID NO: 2485252 - DNA, 25 bp, Homo sapien
ctgggctgagagttttggggcctga

SEQ ID NO: 2485253 - DNA, 25 bp, Homo sapien
tgggctgagagttttggggcctgag

SEQ ID NO: 2485254 - DNA, 25 bp, Homo sapien
ctgagagttttggggcctgagtttc

SEQ ID NO: 2485255 - DNA, 25 bp, Homo sapien
ggctgagagttttggggcctgagtt

SEQ ID NO: 2485256 - DNA, 25 bp, Homo sapien
tcgaggtcaatgaccacacagatcc

SEQ ID NO: 2485257 - DNA, 25 bp, Homo sapien
tcatcgaggtcaatgaccacacaga

SEQ ID NO: 2485258 - DNA, 25 bp, Homo sapien
gaggtcaatgaccacacagatcctt

SEQ ID NO: 2485259 - DNA, 25 bp, Homo sapien
gggtttcatcgaggtcaatgaccac

SEQ ID NO: 2485260 - DNA, 25 bp, Homo sapien
tcttcctctgtcacctctgggagca

SEQ ID NO: 2485261 - DNA, 25 bp, Homo sapien
cttgatcttcctctgtcacctctgg

SEQ ID NO: 2485262 - DNA, 25 bp, Homo sapien
ttcctctgtcacctctgggagcagg

SEQ ID NO: 2485263 - DNA, 25 bp, Homo sapien
cctctgtcacctctgggagcaggca

SEQ ID NO: 2485264 - DNA, 25 bp, Homo sapien
caggataggcaccacttaaaggcca

SEQ ID NO: 2485265 - DNA, 25 bp, Homo sapien
tggagacacaatcaccaacccagga

SEQ ID NO: 2485266 - DNA, 25 bp, Homo sapien
tgagatctgcctaccaagaaagccc

SEQ ID NO: 2485267 - DNA, 25 bp, Homo sapien
gaaagcccaattgtaccccttggca

SEQ ID NO: 2485268 - DNA, 25 bp, Homo sapien
gtactggagacactggagcagatcc

SEQ ID NO: 2485269 - DNA, 25 bp, Homo sapien
tggtcagtgccatctcactgccttt

SEQ ID NO: 2485270 - DNA, 25 bp, Homo sapien
aagagaaggaggtggtcagtgccat

SEQ ID NO: 2485271 - DNA, 25 bp, Homo sapien
ggtcagtgccatctcactgcctttc

SEQ ID NO: 2485272 - DNA, 25 bp, Homo sapien
aaggaggtggtcagtgccatctcac

SEQ ID NO: 2485273 - DNA, 25 bp, Homo sapien
caaatgccttgcatgagtatgggag

SEQ ID NO: 2485274 - DNA, 25 bp, Homo sapien
tgtttcagagaagtaccactggctt

SEQ ID NO: 2485275 - DNA, 25 bp, Homo sapien
ggaaggacaaccagacctcagtgtt

SEQ ID NO: 2485276 - DNA, 25 bp, Homo sapien
tggccccacctgtgaaatactagac

SEQ ID NO: 2485277 - DNA, 25 bp, Homo sapien
ttgcttcctccttatacgcagcgag

SEQ ID NO: 2485278 - DNA, 25 bp, Homo sapien
cttcttaggagaggacttggagacc

SEQ ID NO: 2485279 - DNA, 25 bp, Homo sapien
gggccttgaagatgttacgtccacg

SEQ ID NO: 2485280 - DNA, 25 bp, Homo sapien
catgctgggcgcgaaaacagcagaa

SEQ ID NO: 2485281 - DNA, 25 bp, Homo sapien
tttaacatccagttactgggctgcc

SEQ ID NO: 2485282 - DNA, 25 bp, Homo sapien
cccttgcagaagtgggtaatggaag

SEQ ID NO: 2485283 - DNA, 25 bp, Homo sapien
ccagttactgggctgccagtacccc

SEQ ID NO: 2485284 - DNA, 25 bp, Homo sapien
tggcccttgcagaagtgggtaatgg

SEQ ID NO: 2485285 - DNA, 25 bp, Homo sapien
tttgcctggttgagtgaatgactcc

SEQ ID NO: 2485286 - DNA, 25 bp, Homo sapien
aactttgcctggttgagtgaatgac

SEQ ID NO: 2485287 - DNA, 25 bp, Homo sapien
cctggttgagtgaatgactccaggg

SEQ ID NO: 2485288 - DNA, 25 bp, Homo sapien
tgcctggttgagtgaatgactccag

SEQ ID NO: 2485289 - DNA, 25 bp, Homo sapien
tctgaccagcagatacctctggggg

SEQ ID NO: 2485290 - DNA, 25 bp, Homo sapien
tctaggatgagctggtaaaggacca

SEQ ID NO: 2485291 - DNA, 25 bp, Homo sapien
taaaggaccagtctggggtctagcc

SEQ ID NO: 2485292 - DNA, 25 bp, Homo sapien
tgggcaggatgtcaaagttggaagg

SEQ ID NO: 2485293 - DNA, 25 bp, Homo sapien
cactaaatggcaacatcatgggcct

SEQ ID NO: 2485294 - DNA, 25 bp, Homo sapien
ccctgactgggtattctgtgaaaaa

SEQ ID NO: 2485295 - DNA, 25 bp, Homo sapien
taccaggtaaggacactatttgccc

SEQ ID NO: 2485296 - DNA, 25 bp, Homo sapien
aagctgggccggttggatcactgca

SEQ ID NO: 2485297 - DNA, 25 bp, Homo sapien
cacaggttgggagcatcaattcacg

SEQ ID NO: 2485298 - DNA, 25 bp, Homo sapien
cagccccagatgttaggcatttaca

SEQ ID NO: 2485299 - DNA, 25 bp, Homo sapien
ccatgataagggatttggaaggtcc

SEQ ID NO: 2485300 - DNA, 25 bp, Homo sapien
cacgttggctagaaatgtgacttct

SEQ ID NO: 2485301 - DNA, 25 bp, Homo sapien
tttgctcagcgaaactggtcagagg

SEQ ID NO: 2485302 - DNA, 25 bp, Homo sapien
tcagggtcgggcttgtttgctcagc

SEQ ID NO: 2485303 - DNA, 25 bp, Homo sapien
cgggctaaacaaacgcggctctgtg

SEQ ID NO: 2485304 - DNA, 25 bp, Homo sapien
gaattatgtaaccagggacaccgct

SEQ ID NO: 2485305 - DNA, 25 bp, Homo sapien
ccagggcgtcttccctccgcgcctg

SEQ ID NO: 2485306 - DNA, 25 bp, Homo sapien
cttgcttggtgagcaccagggcgtc

SEQ ID NO: 2485307 - DNA, 25 bp, Homo sapien
ccctccgcgcctgggtgatgatgga

SEQ ID NO: 2485308 - DNA, 25 bp, Homo sapien
ggtgagcaccagggcgtcttccctc

SEQ ID NO: 2485309 - DNA, 25 bp, Homo sapien
actccagataaacaacccgcggctg

SEQ ID NO: 2485310 - DNA, 25 bp, Homo sapien
caacatggagaatccggagcgaaaa

SEQ ID NO: 2485311 - DNA, 25 bp, Homo sapien
gagactccgacttccacagctgttc

SEQ ID NO: 2485312 - DNA, 25 bp, Homo sapien
tcctcagtttgggtccaacatggag

SEQ ID NO: 2485313 - DNA, 25 bp, Homo sapien
gatcacactattggtcagcatggga

SEQ ID NO: 2485314 - DNA, 25 bp, Homo sapien
tcacaggtatgatcacactattggt

SEQ ID NO: 2485315 - DNA, 25 bp, Homo sapien
gtatgatcacactattggtcagcat

SEQ ID NO: 2485316 - DNA, 25 bp, Homo sapien
acaggtatgatcacactattggtca

SEQ ID NO: 2485317 - DNA, 25 bp, Homo sapien
gcccatctgtcacgccctttcaggg

SEQ ID NO: 2485318 - DNA, 25 bp, Homo sapien
attcacaaaccctgtcctcctttga

SEQ ID NO: 2485319 - DNA, 25 bp, Homo sapien
catttgaaggcagcaagcaacaagc

SEQ ID NO: 2485320 - DNA, 25 bp, Homo sapien
aatcaccgtgcgaagcgtgactggg

SEQ ID NO: 2485321 - DNA, 25 bp, Homo sapien
gagtccatgccaccaagattgacgg

SEQ ID NO: 2485322 - DNA, 25 bp, Homo sapien
tcatccatcgcacccaggaggttgg

SEQ ID NO: 2485323 - DNA, 25 bp, Homo sapien
cttttagatgaagggaacgcagcag

SEQ ID NO: 2485324 - DNA, 25 bp, Homo sapien
gagtcaatccacactaggccgacag

SEQ ID NO: 2485325 - DNA, 25 bp, Homo sapien
cccattctgctgccaaagttatctt

SEQ ID NO: 2485326 - DNA, 25 bp, Homo sapien
ctcgactatactgcaacagcctctt

SEQ ID NO: 2485327 - DNA, 25 bp, Homo sapien
cagcctttgatctctctcccatcca

SEQ ID NO: 2485328 - DNA, 25 bp, Homo sapien
gcaacagcctcttagaatctcccag

SEQ ID NO: 2485329 - DNA, 25 bp, Homo sapien
ttgcttgaattttggtggggcagag

SEQ ID NO: 2485330 - DNA, 25 bp, Homo sapien
gagaattgcttgaattttggtgggg

SEQ ID NO: 2485331 - DNA, 25 bp, Homo sapien
aattgcttgaattttggtggggcag

SEQ ID NO: 2485332 - DNA, 25 bp, Homo sapien
gaattgcttgaattttggtggggca

SEQ ID NO: 2485333 - DNA, 25 bp, Homo sapien
gacagcataggcaaagccatcctct

SEQ ID NO: 2485334 - DNA, 25 bp, Homo sapien
tacctatcccaatagaggaggaagc

SEQ ID NO: 2485335 - DNA, 25 bp, Homo sapien
gggcgacagtttagtagttacagga

SEQ ID NO: 2485336 - DNA, 25 bp, Homo sapien
tgaagaaaagagagttacctatccc

SEQ ID NO: 2485337 - DNA, 25 bp, Homo sapien
gaagccctaaccagatgacttccat

SEQ ID NO: 2485338 - DNA, 25 bp, Homo sapien
gaatgggtgtggacaagcataacgt

SEQ ID NO: 2485339 - DNA, 25 bp, Homo sapien
agtctgaagccctaaccagatgact

SEQ ID NO: 2485340 - DNA, 25 bp, Homo sapien
caagcataacgtcactgttggtgaa

SEQ ID NO: 2485341 - DNA, 25 bp, Homo sapien
tcttattcatgtggtagccccggcg

SEQ ID NO: 2485342 - DNA, 25 bp, Homo sapien
tcagagctctggtactaggaggacc

SEQ ID NO: 2485343 - DNA, 25 bp, Homo sapien
gactgtcgtgaaagcccacttctga

SEQ ID NO: 2485344 - DNA, 25 bp, Homo sapien
tctgacgaacttgaacccctggtac

SEQ ID NO: 2485345 - DNA, 25 bp, Homo sapien
caagtgttgaccctggcgatgatgc

SEQ ID NO: 2485346 - DNA, 25 bp, Homo sapien
gaaggcttcacagacccctaggtgt

SEQ ID NO: 2485347 - DNA, 25 bp, Homo sapien
cgatgatgccaacagcccgactctg

SEQ ID NO: 2485348 - DNA, 25 bp, Homo sapien
gccgcatgagtgtgaaccagctgag

SEQ ID NO: 2485349 - DNA, 25 bp, Homo sapien
aggcaggcaggatgaacagcagcac

SEQ ID NO: 2485350 - DNA, 25 bp, Homo sapien
ctaggcaggcaggatgaacagcagc

SEQ ID NO: 2485351 - DNA, 25 bp, Homo sapien
taggcaggcaggatgaacagcagca

SEQ ID NO: 2485352 - DNA, 25 bp, Homo sapien
tcacagcggccggggaaccaccctg

SEQ ID NO: 2485353 - DNA, 25 bp, Homo sapien
cacagcggccggggaaccaccctgg

SEQ ID NO: 2485354 - DNA, 25 bp, Homo sapien
ggtttgagtgtagtctgtgttcccc

SEQ ID NO: 2485355 - DNA, 25 bp, Homo sapien
tggtttgagtgtagtctgtgttccc

SEQ ID NO: 2485356 - DNA, 25 bp, Homo sapien
gtttgagtgtagtctgtgttcccca

SEQ ID NO: 2485357 - DNA, 25 bp, Homo sapien
agtgacctcattacctgggggccca

SEQ ID NO: 2485358 - DNA, 25 bp, Homo sapien
ggtattacaggggttgacaacactg

SEQ ID NO: 2485359 - DNA, 25 bp, Homo sapien
caatctagagatagagcatgtcttc

SEQ ID NO: 2485360 - DNA, 25 bp, Homo sapien
tgttatagcttcaggtattacaggg

SEQ ID NO: 2485361 - DNA, 25 bp, Homo sapien
aaccatatcaatattatagaccatt

SEQ ID NO: 2485362 - DNA, 25 bp, Homo sapien
accatatcaatattatagaccatta

SEQ ID NO: 2485363 - DNA, 25 bp, Homo sapien
ccatatcaatattatagaccattag

SEQ ID NO: 2485364 - DNA, 25 bp, Homo sapien
tctccactgtgtcctgtcacgtgtg

SEQ ID NO: 2485365 - DNA, 25 bp, Homo sapien
gcctaacagtaagaagtatgaccca

SEQ ID NO: 2485366 - DNA, 25 bp, Homo sapien
ggtagcatcaccagaacacctgtgt

SEQ ID NO: 2485367 - DNA, 25 bp, Homo sapien
cacctgtgtcagctggtaaacaaca

SEQ ID NO: 2485368 - DNA, 25 bp, Homo sapien
atattttgagctgtcaatgacaaaa

SEQ ID NO: 2485369 - DNA, 25 bp, Homo sapien
caatatcagacaaacctccatgtgg

SEQ ID NO: 2485370 - DNA, 25 bp, Homo sapien
aaactagttttcaggcatgtctgga

SEQ ID NO: 2485371 - DNA, 25 bp, Homo sapien
catgtggttgcaaaggtggcctgtc

SEQ ID NO: 2485372 - DNA, 25 bp, Homo sapien
tgtcttccagcttagcttctttagc

SEQ ID NO: 2485373 - DNA, 25 bp, Homo sapien
gattacaagcgcccatcaccacact

SEQ ID NO: 2485374 - DNA, 25 bp, Homo sapien
tgtccaggtgggagtgcagaggtgc

SEQ ID NO: 2485375 - DNA, 25 bp, Homo sapien
tacaagcgcccatcaccacactcag

SEQ ID NO: 2485376 - DNA, 25 bp, Homo sapien
gttgtccaggtgggagtgcagaggt

SEQ ID NO: 2485377 - DNA, 25 bp, Homo sapien
gaaaccaggccattgggcaagaaaa

SEQ ID NO: 2485378 - DNA, 25 bp, Homo sapien
tgaaacccactctcctgatgtttct

SEQ ID NO: 2485379 - DNA, 25 bp, Homo sapien
actgcttagattctccaaaatcttg

SEQ ID NO: 2485380 - DNA, 25 bp, Homo sapien
cctgttttgcagcttaatcttgtct

SEQ ID NO: 2485381 - DNA, 25 bp, Homo sapien
tgaaagaggtacatccgtacaggcg

SEQ ID NO: 2485382 - DNA, 25 bp, Homo sapien
tggcacccctctagtaaatacacgg

SEQ ID NO: 2485383 - DNA, 25 bp, Homo sapien
gatgggacagctcaatcaactctaa

SEQ ID NO: 2485384 - DNA, 25 bp, Homo sapien
aaactgtcgggctgtattgtctggc

SEQ ID NO: 2485385 - DNA, 25 bp, Homo sapien
gtcttcacatgctgtgtccacttca

SEQ ID NO: 2485386 - DNA, 25 bp, Homo sapien
gcgcattagaacacatcccgatgta

SEQ ID NO: 2485387 - DNA, 25 bp, Homo sapien
caatgccttctttgttgctatgata

SEQ ID NO: 2485388 - DNA, 25 bp, Homo sapien
tggatgactggtgagatttattttc

SEQ ID NO: 2485389 - DNA, 25 bp, Homo sapien
tcatccatatatgaaggacacaaaa

SEQ ID NO: 2485390 - DNA, 25 bp, Homo sapien
tagcgcatcctaaaagacctctgaa

SEQ ID NO: 2485391 - DNA, 25 bp, Homo sapien
caatcgcctccggttgtcctggtaa

SEQ ID NO: 2485392 - DNA, 25 bp, Homo sapien
taacggctccaaaccgcagataacg

SEQ ID NO: 2485393 - DNA, 25 bp, Homo sapien
ctagagaagcgacagtgaggagcca

SEQ ID NO: 2485394 - DNA, 25 bp, Homo sapien
ttactagagggattcaaaggcagat

SEQ ID NO: 2485395 - DNA, 25 bp, Homo sapien
aactatgtagaaacaaaataggaat

SEQ ID NO: 2485396 - DNA, 25 bp, Homo sapien
cccatgggacaatatcaagcagacc

SEQ ID NO: 2485397 - DNA, 25 bp, Homo sapien
acagcctaggagtcccatgggacaa

SEQ ID NO: 2485398 - DNA, 25 bp, Homo sapien
cagccagagctcccagtcttgtgtt

SEQ ID NO: 2485399 - DNA, 25 bp, Homo sapien
gatcattgacatttagggaggtggc

SEQ ID NO: 2485400 - DNA, 25 bp, Homo sapien
acctggtcttcctgagtatattgct

SEQ ID NO: 2485401 - DNA, 25 bp, Homo sapien
gccagagctcccagtcttgtgttta

SEQ ID NO: 2485402 - DNA, 25 bp, Homo sapien
tgaccgagtgcacaaagggctaata

SEQ ID NO: 2485403 - DNA, 25 bp, Homo sapien
gaccgagtgcacaaagggctaatat

SEQ ID NO: 2485404 - DNA, 25 bp, Homo sapien
ttgaccgagtgcacaaagggctaat

SEQ ID NO: 2485405 - DNA, 25 bp, Homo sapien
ccaggccttctggccatcctaggta

SEQ ID NO: 2485406 - DNA, 25 bp, Homo sapien
catcctaggtatgccccctccattc

SEQ ID NO: 2485407 - DNA, 25 bp, Homo sapien
aggccttctggccatcctaggtatg

SEQ ID NO: 2485408 - DNA, 25 bp, Homo sapien
gccttctggccatcctaggtatgcc

SEQ ID NO: 2485409 - DNA, 25 bp, Homo sapien
gtcacagtctcggatggcagaattt

SEQ ID NO: 2485410 - DNA, 25 bp, Homo sapien
ctgtcacagtctcggatggcagaat

SEQ ID NO: 2485411 - DNA, 25 bp, Homo sapien
tctgtcacagtctcggatggcagaa

SEQ ID NO: 2485412 - DNA, 25 bp, Homo sapien
cacagtctcggatggcagaatttgg

SEQ ID NO: 2485413 - DNA, 25 bp, Homo sapien
ctgtgataagtcaatggctttctgc

SEQ ID NO: 2485414 - DNA, 25 bp, Homo sapien
aagtcaatggctttctgcagttcac

SEQ ID NO: 2485415 - DNA, 25 bp, Homo sapien
ataagtcaatggctttctgcagttc

SEQ ID NO: 2485416 - DNA, 25 bp, Homo sapien
tgataagtcaatggctttctgcagt

SEQ ID NO: 2485417 - DNA, 25 bp, Homo sapien
tctagataactttccttactggatg

SEQ ID NO: 2485418 - DNA, 25 bp, Homo sapien
ctttccttactggatggttcatctg

SEQ ID NO: 2485419 - DNA, 25 bp, Homo sapien
ctagcaggtggcactttactcccca

SEQ ID NO: 2485420 - DNA, 25 bp, Homo sapien
tctgactagcaggtggcactttact

SEQ ID NO: 2485421 - DNA, 25 bp, Homo sapien
tttccttggtgtgcagaacgctgag

SEQ ID NO: 2485422 - DNA, 25 bp, Homo sapien
ttggtgtgcagaacgctgagatcct

SEQ ID NO: 2485423 - DNA, 25 bp, Homo sapien
atttccttggtgtgcagaacgctga

SEQ ID NO: 2485424 - DNA, 25 bp, Homo sapien
ccttggtgtgcagaacgctgagatc

SEQ ID NO: 2485425 - DNA, 25 bp, Homo sapien
ttcacaaaggcccgaagcgtgttca

SEQ ID NO: 2485426 - DNA, 25 bp, Homo sapien
tttcacaaaggcccgaagcgtgttc

SEQ ID NO: 2485427 - DNA, 25 bp, Homo sapien
cttcaatttgtagggcattgggata

SEQ ID NO: 2485428 - DNA, 25 bp, Homo sapien
ttgtagggcattgggatagaatcca

SEQ ID NO: 2485429 - DNA, 25 bp, Homo sapien
agaatccagagatatgacacaaacc

SEQ ID NO: 2485430 - DNA, 25 bp, Homo sapien
tagaatccagagatatgacacaaac

SEQ ID NO: 2485431 - DNA, 25 bp, Homo sapien
gaacactccatctgttgggagccca

SEQ ID NO: 2485432 - DNA, 25 bp, Homo sapien
gtaatgtgacaaatggaacactcca

SEQ ID NO: 2485433 - DNA, 25 bp, Homo sapien
gaggtcacctgtacagctggtgcag

SEQ ID NO: 2485434 - DNA, 25 bp, Homo sapien
aggtaatagaattcccatcaggcac

SEQ ID NO: 2485435 - DNA, 25 bp, Homo sapien
cagcatggtgctgcatattgtagac

SEQ ID NO: 2485436 - DNA, 25 bp, Homo sapien
gaagttaatgtccagatccacatga

SEQ ID NO: 2485437 - DNA, 25 bp, Homo sapien
cacttaccaatcttgacagaaggga

SEQ ID NO: 2485438 - DNA, 25 bp, Homo sapien
accttgtcaggcttgatgatcaaca

SEQ ID NO: 2485439 - DNA, 25 bp, Homo sapien
gccagtccccgatggactcaaatct

SEQ ID NO: 2485440 - DNA, 25 bp, Homo sapien
cagtccccgatggactcaaatctgg

SEQ ID NO: 2485441 - DNA, 25 bp, Homo sapien
tggccagtccccgatggactcaaat

SEQ ID NO: 2485442 - DNA, 25 bp, Homo sapien
agtccccgatggactcaaatctggg

SEQ ID NO: 2485443 - DNA, 25 bp, Homo sapien
ttttggcatgtctctcaactcggaa

SEQ ID NO: 2485444 - DNA, 25 bp, Homo sapien
ctctcaactcggaagtttgcttggg

SEQ ID NO: 2485445 - DNA, 25 bp, Homo sapien
tgtgctcctcaaggcgggaaaccat

SEQ ID NO: 2485446 - DNA, 25 bp, Homo sapien
ccccagccagttctgtgctcctcaa

SEQ ID NO: 2485447 - DNA, 25 bp, Homo sapien
gatcaaagtctaaaattcagggcag

SEQ ID NO: 2485448 - DNA, 25 bp, Homo sapien
gattgtggccactccaatgatggat

SEQ ID NO: 2485449 - DNA, 25 bp, Homo sapien
gagcactccctccacagcttgatgg

SEQ ID NO: 2485450 - DNA, 25 bp, Homo sapien
tgtgatcaccaaatccacggaggaa

SEQ ID NO: 2485451 - DNA, 25 bp, Homo sapien
tgtaaaagacaatccaaactttgtg

SEQ ID NO: 2485452 - DNA, 25 bp, Homo sapien
ttctcatacaggaccctgccaaatc

SEQ ID NO: 2485453 - DNA, 25 bp, Homo sapien
ccaaactttgtgaggtttctcatac

SEQ ID NO: 2485454 - DNA, 25 bp, Homo sapien
ggccttcagctcatggttgtaaaag

SEQ ID NO: 2485455 - DNA, 25 bp, Homo sapien
cccctattgttgttgctttcactgg

SEQ ID NO: 2485456 - DNA, 25 bp, Homo sapien
tgtgtttagtgggtccctggccatc

SEQ ID NO: 2485457 - DNA, 25 bp, Homo sapien
gggccaaatgagtctgctattctac

SEQ ID NO: 2485458 - DNA, 25 bp, Homo sapien
cctgctgggctactccatgtccaaa

SEQ ID NO: 2485459 - DNA, 25 bp, Homo sapien
caggtagtctgctccagatcatgag

SEQ ID NO: 2485460 - DNA, 25 bp, Homo sapien
taccattatgtgatatgtcccaagg

SEQ ID NO: 2485461 - DNA, 25 bp, Homo sapien
catgctcagcattccagaagttctc

SEQ ID NO: 2485462 - DNA, 25 bp, Homo sapien
gatgcctgtgttaagatccctgctc

SEQ ID NO: 2485463 - DNA, 25 bp, Homo sapien
gacatgccaatgacacttcacattc

SEQ ID NO: 2485464 - DNA, 25 bp, Homo sapien
tcaaatatgccatcttcatgcttgt

SEQ ID NO: 2485465 - DNA, 25 bp, Homo sapien
gccagacatgccaatgacacttcac

SEQ ID NO: 2485466 - DNA, 25 bp, Homo sapien
tgtttattgaggagtgaatgagaga

SEQ ID NO: 2485467 - DNA, 25 bp, Homo sapien
tatgcttctgctgtgcttctgttct

SEQ ID NO: 2485468 - DNA, 25 bp, Homo sapien
tgcttctgctgtgcttctgttctcc

SEQ ID NO: 2485469 - DNA, 25 bp, Homo sapien
tcaacaattatgcttctgctgtgct

SEQ ID NO: 2485470 - DNA, 25 bp, Homo sapien
attatgcttctgctgtgcttctgtt

SEQ ID NO: 2485471 - DNA, 25 bp, Homo sapien
tgtaatcactggtcagttcactact

SEQ ID NO: 2485472 - DNA, 25 bp, Homo sapien
tcttcctgtaatcactggtcagttc

SEQ ID NO: 2485473 - DNA, 25 bp, Homo sapien
cactacttagatcatttatggcaaa

SEQ ID NO: 2485474 - DNA, 25 bp, Homo sapien
agttcactacttagatcatttatgg

SEQ ID NO: 2485475 - DNA, 25 bp, Homo sapien
cattataagaataaaaaggcccagc

SEQ ID NO: 2485476 - DNA, 25 bp, Homo sapien
ttataagaataaaaaggcccagcta

SEQ ID NO: 2485477 - DNA, 25 bp, Homo sapien
ttcattataagaataaaaaggccca

SEQ ID NO: 2485478 - DNA, 25 bp, Homo sapien
cattcattataagaataaaaaggcc

SEQ ID NO: 2485479 - DNA, 25 bp, Homo sapien
gcttttctttgggctccacatcttc

SEQ ID NO: 2485480 - DNA, 25 bp, Homo sapien
ctggtgaaacaggcttttctttggg

SEQ ID NO: 2485481 - DNA, 25 bp, Homo sapien
aacaggcttttctttgggctccaca

SEQ ID NO: 2485482 - DNA, 25 bp, Homo sapien
tttgggctccacatcttctatttct

SEQ ID NO: 2485483 - DNA, 25 bp, Homo sapien
agcaaaaaacttgctctatgaagca

SEQ ID NO: 2485484 - DNA, 25 bp, Homo sapien
tctgagccaagtcattgtaatgtac

SEQ ID NO: 2485485 - DNA, 25 bp, Homo sapien
tattgcaaacgacataactagccag

SEQ ID NO: 2485486 - DNA, 25 bp, Homo sapien
cctgatcccaaggtgataactgcct

SEQ ID NO: 2485487 - DNA, 25 bp, Homo sapien
tttaaaaagcatgatccctgatccc

SEQ ID NO: 2485488 - DNA, 25 bp, Homo sapien
ttcttgctgtatgatggtggtttga

SEQ ID NO: 2485489 - DNA, 25 bp, Homo sapien
gaatcagggatctcagcgttagttg

SEQ ID NO: 2485490 - DNA, 25 bp, Homo sapien
catctttaatgtaactcaggttgca

SEQ ID NO: 2485491 - DNA, 25 bp, Homo sapien
gaacaaaagtgattggaagaaggcc

SEQ ID NO: 2485492 - DNA, 25 bp, Homo sapien
gttctggtagctcaggcaattctgt

SEQ ID NO: 2485493 - DNA, 25 bp, Homo sapien
ggtacgtcatattctgcaccgagtt

SEQ ID NO: 2485494 - DNA, 25 bp, Homo sapien
tgcaccgagttctggtagctcaggc

SEQ ID NO: 2485495 - DNA, 25 bp, Homo sapien
gttccttttggtacgtcatattctg

SEQ ID NO: 2485496 - DNA, 25 bp, Homo sapien
caaacaacaattttaggttgaagca

SEQ ID NO: 2485497 - DNA, 25 bp, Homo sapien
tctccaaagctctcaaacgtaagac

SEQ ID NO: 2485498 - DNA, 25 bp, Homo sapien
caacaattttaggttgaagcacctg

SEQ ID NO: 2485499 - DNA, 25 bp, Homo sapien
ttatggaggataccgactaaaagga

SEQ ID NO: 2485500 - DNA, 25 bp, Homo sapien
ttatctttagtcaacgccgtgtcct

SEQ ID NO: 2485501 - DNA, 25 bp, Homo sapien
cattgttctgtgctggccgtccaga

SEQ ID NO: 2485502 - DNA, 25 bp, Homo sapien
tcagggagaagttatagagtaggat

SEQ ID NO: 2485503 - DNA, 25 bp, Homo sapien
gataagtttatctttagtcaacgcc

SEQ ID NO: 2485504 - DNA, 25 bp, Homo sapien
ccctgatggatgcttaatatgctgg

SEQ ID NO: 2485505 - DNA, 25 bp, Homo sapien
tcaaattggatcttggtatacagac

SEQ ID NO: 2485506 - DNA, 25 bp, Homo sapien
gatggatgcttaatatgctgggtct

SEQ ID NO: 2485507 - DNA, 25 bp, Homo sapien
ggtatacagactccctgatggatgc

SEQ ID NO: 2485508 - DNA, 25 bp, Homo sapien
cagagagttcattttaattccaggt

SEQ ID NO: 2485509 - DNA, 25 bp, Homo sapien
ccatttctgacattgtgaaggtcct

SEQ ID NO: 2485510 - DNA, 25 bp, Homo sapien
tatgtggttggaaattcctgaggtt

SEQ ID NO: 2485511 - DNA, 25 bp, Homo sapien
cctgaggttgggctttgtcatcctt

SEQ ID NO: 2485512 - DNA, 25 bp, Homo sapien
ctcgggagcctctttaaggctatct

SEQ ID NO: 2485513 - DNA, 25 bp, Homo sapien
cctctttaaggctatctgctgttgc

SEQ ID NO: 2485514 - DNA, 25 bp, Homo sapien
ctgctgttgcatcagtggttccctt

SEQ ID NO: 2485515 - DNA, 25 bp, Homo sapien
tccctttgggtgacatacagcactt

SEQ ID NO: 2485516 - DNA, 25 bp, Homo sapien
ctctcttgcttttccccacatttcc

SEQ ID NO: 2485517 - DNA, 25 bp, Homo sapien
tctcttgcttttccccacatttccc

SEQ ID NO: 2485518 - DNA, 25 bp, Homo sapien
tgatctctcttgcttttccccacat

SEQ ID NO: 2485519 - DNA, 25 bp, Homo sapien
atctctcttgcttttccccacattt

SEQ ID NO: 2485520 - DNA, 25 bp, Homo sapien
cattgatacaatcatcaaggctgca

SEQ ID NO: 2485521 - DNA, 25 bp, Homo sapien
tagttgtgcccaagtcggcggctct

SEQ ID NO: 2485522 - DNA, 25 bp, Homo sapien
tattttgtagctaactgcgtcagct

SEQ ID NO: 2485523 - DNA, 25 bp, Homo sapien
ggctgcaagcagcatactctctggg

SEQ ID NO: 2485524 - DNA, 25 bp, Homo sapien
aacttcatctgttctgatgtcacca

SEQ ID NO: 2485525 - DNA, 25 bp, Homo sapien
tcgattgcggtgtctccgtctccgc

SEQ ID NO: 2485526 - DNA, 25 bp, Homo sapien
tcatctgttctgatgtcaccatttt

SEQ ID NO: 2485527 - DNA, 25 bp, Homo sapien
tgagtcaacggtgctcgattgcggt

SEQ ID NO: 2485528 - DNA, 25 bp, Homo sapien
gagtatactagacccagtcttgtgc

SEQ ID NO: 2485529 - DNA, 25 bp, Homo sapien
tactagacccagtcttgtgctgctg

SEQ ID NO: 2485530 - DNA, 25 bp, Homo sapien
ttccagaatatgagtatactagacc

SEQ ID NO: 2485531 - DNA, 25 bp, Homo sapien
tatgagtatactagacccagtcttg

SEQ ID NO: 2485532 - DNA, 25 bp, Homo sapien
ttgttctgggcgtcttctaaggcca

SEQ ID NO: 2485533 - DNA, 25 bp, Homo sapien
tccctctgggaaggtactgagcgtt

SEQ ID NO: 2485534 - DNA, 25 bp, Homo sapien
tcagttcggagctccttttggcatc

SEQ ID NO: 2485535 - DNA, 25 bp, Homo sapien
cagtgagctgtttctccgtggtgaa

SEQ ID NO: 2485536 - DNA, 25 bp, Homo sapien
agtgtccagaattctttgctcatgg

SEQ ID NO: 2485537 - DNA, 25 bp, Homo sapien
ctgaagtgtccagaattctttgctc

SEQ ID NO: 2485538 - DNA, 25 bp, Homo sapien
tttgctcatggaatctgggtagagg

SEQ ID NO: 2485539 - DNA, 25 bp, Homo sapien
ggaatctgggtagaggaaattgtac

SEQ ID NO: 2485540 - DNA, 25 bp, Homo sapien
catttggcgtttttggctgctggag

SEQ ID NO: 2485541 - DNA, 25 bp, Homo sapien
tgttttaaagatacctaaggagctg

SEQ ID NO: 2485542 - DNA, 25 bp, Homo sapien
gattggctaatgttgcctctggaaa

SEQ ID NO: 2485543 - DNA, 25 bp, Homo sapien
gctgagtagctctggctgtcactgc

SEQ ID NO: 2485544 - DNA, 25 bp, Homo sapien
caattttctccgtaattggtcccat

SEQ ID NO: 2485545 - DNA, 25 bp, Homo sapien
tagcaattttctccgtaattggtcc

SEQ ID NO: 2485546 - DNA, 25 bp, Homo sapien
tggctttagcaattttctccgtaat

SEQ ID NO: 2485547 - DNA, 25 bp, Homo sapien
ctttagcaattttctccgtaattgg

SEQ ID NO: 2485548 - DNA, 25 bp, Homo sapien
tgaaatgactgggtcctttcaaaaa

SEQ ID NO: 2485549 - DNA, 25 bp, Homo sapien
tttctttgatataaagaggtgattg

SEQ ID NO: 2485550 - DNA, 25 bp, Homo sapien
tcagtagacattgaaatgactgggt

SEQ ID NO: 2485551 - DNA, 25 bp, Homo sapien
taaaaccaaggctggtagctgttgg

SEQ ID NO: 2485552 - DNA, 25 bp, Homo sapien
cagtagtgacagagagcacatgaac

SEQ ID NO: 2485553 - DNA, 25 bp, Homo sapien
tacttccagaacacataaggcctga

SEQ ID NO: 2485554 - DNA, 25 bp, Homo sapien
gcacatgaacaaggcccatgaggag

SEQ ID NO: 2485555 - DNA, 25 bp, Homo sapien
gatctttatggaggacagtagtgac

SEQ ID NO: 2485556 - DNA, 25 bp, Homo sapien
acccctggctttagagctatgttga

SEQ ID NO: 2485557 - DNA, 25 bp, Homo sapien
agagggattgtaggcccgtgggcac

SEQ ID NO: 2485558 - DNA, 25 bp, Homo sapien
cacctggcctctgggattgatcact

SEQ ID NO: 2485559 - DNA, 25 bp, Homo sapien
tgatcactgttttgggattactgga

SEQ ID NO: 2485560 - DNA, 25 bp, Homo sapien
atagctccaataggggcaatcattg

SEQ ID NO: 2485561 - DNA, 25 bp, Homo sapien
ccattcacaggatcagaatctccct

SEQ ID NO: 2485562 - DNA, 25 bp, Homo sapien
tggataatggattttccgtggaaaa

SEQ ID NO: 2485563 - DNA, 25 bp, Homo sapien
tccctctatattgaagaaccagaag

SEQ ID NO: 2485564 - DNA, 25 bp, Homo sapien
gatgttaagttttactcaccacgtg

SEQ ID NO: 2485565 - DNA, 25 bp, Homo sapien
cctgttatagtcagctgtcgtgaaa

SEQ ID NO: 2485566 - DNA, 25 bp, Homo sapien
caagatggcgtattctcacatggct

SEQ ID NO: 2485567 - DNA, 25 bp, Homo sapien
tcgtgaaaatctcagcagagactgc

SEQ ID NO: 2485568 - DNA, 25 bp, Homo sapien
gtatgtgtgacagctttatgaaagg

SEQ ID NO: 2485569 - DNA, 25 bp, Homo sapien
gtgacagctttatgaaaggacaaac

SEQ ID NO: 2485570 - DNA, 25 bp, Homo sapien
aggatatttatggtctttgaattag

SEQ ID NO: 2485571 - DNA, 25 bp, Homo sapien
gacaaacctcagagtgcccagtttc

SEQ ID NO: 2485572 - DNA, 25 bp, Homo sapien
tcaggataggtaaagttggcttcca

SEQ ID NO: 2485573 - DNA, 25 bp, Homo sapien
caggataggtaaagttggcttccag

SEQ ID NO: 2485574 - DNA, 25 bp, Homo sapien
gataggtaaagttggcttccaggat

SEQ ID NO: 2485575 - DNA, 25 bp, Homo sapien
ggataggtaaagttggcttccagga

SEQ ID NO: 2485576 - DNA, 25 bp, Homo sapien
tctccacaatgttactgagctcttt

SEQ ID NO: 2485577 - DNA, 25 bp, Homo sapien
tttctcaattacatcaggcactttc

SEQ ID NO: 2485578 - DNA, 25 bp, Homo sapien
tccacaatgttactgagctcttttc

SEQ ID NO: 2485579 - DNA, 25 bp, Homo sapien
gatccaagtgtctcgccttttctca

SEQ ID NO: 2485580 - DNA, 25 bp, Homo sapien
ccagattcttttcacccctatcagg

SEQ ID NO: 2485581 - DNA, 25 bp, Homo sapien
gaggtggacagtccagccagattct

SEQ ID NO: 2485582 - DNA, 25 bp, Homo sapien
agccagattcttttcacccctatca

SEQ ID NO: 2485583 - DNA, 25 bp, Homo sapien
cccacagtgagaggtggacagtcca

SEQ ID NO: 2485584 - DNA, 25 bp, Homo sapien
gtttcaaatcttgctgtaacaccaa

SEQ ID NO: 2485585 - DNA, 25 bp, Homo sapien
gtaacaccaaattcacccatgggaa

SEQ ID NO: 2485586 - DNA, 25 bp, Homo sapien
tcagacagtttcaaatcttgctgta

SEQ ID NO: 2485587 - DNA, 25 bp, Homo sapien
taacaccaaattcacccatgggaac

SEQ ID NO: 2485588 - DNA, 25 bp, Homo sapien
tcctgggctcataatcgacgacatt

SEQ ID NO: 2485589 - DNA, 25 bp, Homo sapien
taatcgacgacattggtcttgtcca

SEQ ID NO: 2485590 - DNA, 25 bp, Homo sapien
cagttcctgggctcataatcgacga

SEQ ID NO: 2485591 - DNA, 25 bp, Homo sapien
ctcataatcgacgacattggtcttg

SEQ ID NO: 2485592 - DNA, 25 bp, Homo sapien
aaaaatgtggctctgaccagtgcac

SEQ ID NO: 2485593 - DNA, 25 bp, Homo sapien
tatttgagccaacacgacagtatgg

SEQ ID NO: 2485594 - DNA, 25 bp, Homo sapien
tttgtttccaaacgcagtgaactgg

SEQ ID NO: 2485595 - DNA, 25 bp, Homo sapien
gagataaatagagatggccccaatc

SEQ ID NO: 2485596 - DNA, 25 bp, Homo sapien
tctcagcagcctggttggaatctca

SEQ ID NO: 2485597 - DNA, 25 bp, Homo sapien
aaagtccatacctgcaacatttggg

SEQ ID NO: 2485598 - DNA, 25 bp, Homo sapien
aaaatattgctttccaggcctcacc

SEQ ID NO: 2485599 - DNA, 25 bp, Homo sapien
tataatcaggcaaactcctcggctc

SEQ ID NO: 2485600 - DNA, 25 bp, Homo sapien
caaggagctcaacggtgccatggtg

SEQ ID NO: 2485601 - DNA, 25 bp, Homo sapien
cagcaaggagctcaacggtgccatg

SEQ ID NO: 2485602 - DNA, 25 bp, Homo sapien
ggagctcaacggtgccatggtgtgg

SEQ ID NO: 2485603 - DNA, 25 bp, Homo sapien
ttgagtgcattagggatagagctgg

SEQ ID NO: 2485604 - DNA, 25 bp, Homo sapien
aaccagtggaaaggcaagactctca

SEQ ID NO: 2485605 - DNA, 25 bp, Homo sapien
caagtagggctgataggagcagtca

SEQ ID NO: 2485606 - DNA, 25 bp, Homo sapien
aaaaccagtggaaaggcaagactct

SEQ ID NO: 2485607 - DNA, 25 bp, Homo sapien
ctgataggaaacaccaagtagggct

SEQ ID NO: 2485608 - DNA, 25 bp, Homo sapien
gacttgattcccaacacgttcagga

SEQ ID NO: 2485609 - DNA, 25 bp, Homo sapien
gagttatgcgagattccagtgggtc

SEQ ID NO: 2485610 - DNA, 25 bp, Homo sapien
cagtcagctacaaggtcagtgggtc

SEQ ID NO: 2485611 - DNA, 25 bp, Homo sapien
ccagtgggtctagcgtcatcaggtg

SEQ ID NO: 2485612 - DNA, 25 bp, Homo sapien
ttcctcctaaatcccacaagcaaag

SEQ ID NO: 2485613 - DNA, 25 bp, Homo sapien
aacatttaaccatgagtcggtatct

SEQ ID NO: 2485614 - DNA, 25 bp, Homo sapien
tctgaacagtagcactcatttctga

SEQ ID NO: 2485615 - DNA, 25 bp, Homo sapien
ggtaaatgtgaaacatttaaccatg

SEQ ID NO: 2485616 - DNA, 25 bp, Homo sapien
gagtcggtatcttcaaactatttcc

SEQ ID NO: 2485617 - DNA, 25 bp, Homo sapien
ggtagctcaattcttggtccattca

SEQ ID NO: 2485618 - DNA, 25 bp, Homo sapien
ttagggtagctcaattcttggtcca

SEQ ID NO: 2485619 - DNA, 25 bp, Homo sapien
tagggtagctcaattcttggtccat

SEQ ID NO: 2485620 - DNA, 25 bp, Homo sapien
ttttagggtagctcaattcttggtc

SEQ ID NO: 2485621 - DNA, 25 bp, Homo sapien
ctgaggcagaaggcagaagaatcat

SEQ ID NO: 2485622 - DNA, 25 bp, Homo sapien
gaagaatcatttgaactggggaggc

SEQ ID NO: 2485623 - DNA, 25 bp, Homo sapien
tgagccgagatcatgccaccgcact

SEQ ID NO: 2485624 - DNA, 25 bp, Homo sapien
gaggcagagtttgcagtgagccgag

SEQ ID NO: 2485625 - DNA, 25 bp, Homo sapien
taggaaaagtcgatttgatgacacc

SEQ ID NO: 2485626 - DNA, 25 bp, Homo sapien
ggcagtaagaccatcagtcgtggga

SEQ ID NO: 2485627 - DNA, 25 bp, Homo sapien
ttgacatgtggtcccaaaagaggcc

SEQ ID NO: 2485628 - DNA, 25 bp, Homo sapien
tgatgacaccactgaaatgctggta

SEQ ID NO: 2485629 - DNA, 25 bp, Homo sapien
cagaggtgccacatacgttccatat

SEQ ID NO: 2485630 - DNA, 25 bp, Homo sapien
gctagtctgaaagttgggattccaa

SEQ ID NO: 2485631 - DNA, 25 bp, Homo sapien
gagcaagcaggtagagtatcaggca

SEQ ID NO: 2485632 - DNA, 25 bp, Homo sapien
tagaaaaattcagtggagcttgcct

SEQ ID NO: 2485633 - DNA, 25 bp, Homo sapien
tcattgccatgcatggtcagcatgc

SEQ ID NO: 2485634 - DNA, 25 bp, Homo sapien
tacaatctgcagtgttcccaaggtg

SEQ ID NO: 2485635 - DNA, 25 bp, Homo sapien
tcagcatgcagaattgtgtgctgca

SEQ ID NO: 2485636 - DNA, 25 bp, Homo sapien
caaagacagtttgagtggagatgtg

SEQ ID NO: 2485637 - DNA, 25 bp, Homo sapien
cccagcaagcaattgagtacatcaa

SEQ ID NO: 2485638 - DNA, 25 bp, Homo sapien
tctgtgtgataactcatatgcactc

SEQ ID NO: 2485639 - DNA, 25 bp, Homo sapien
ggtaagggtcctctaatccactgat

SEQ ID NO: 2485640 - DNA, 25 bp, Homo sapien
tcagggaagcacatcccagcaagca

SEQ ID NO: 2485641 - DNA, 25 bp, Homo sapien
tgtcatcagtccaactcatatcaga

SEQ ID NO: 2485642 - DNA, 25 bp, Homo sapien
aaagatacaactctttacccatagc

SEQ ID NO: 2485643 - DNA, 25 bp, Homo sapien
ctgtattcccagtgcagttcctgac

SEQ ID NO: 2485644 - DNA, 25 bp, Homo sapien
tatcatattgtattgctgtattccc

SEQ ID NO: 2485645 - DNA, 25 bp, Homo sapien
tggattatgcacctacctgcacaag

SEQ ID NO: 2485646 - DNA, 25 bp, Homo sapien
cacatagcattctagcgttggaaag

SEQ ID NO: 2485647 - DNA, 25 bp, Homo sapien
taatgtcggtggaaagctaagatca

SEQ ID NO: 2485648 - DNA, 25 bp, Homo sapien
gaaaaatatgcaactgtctggctag

SEQ ID NO: 2485649 - DNA, 25 bp, Homo sapien
catattccttctacaggatgctctg

SEQ ID NO: 2485650 - DNA, 25 bp, Homo sapien
caggtgccctgcctgatacagagca

SEQ ID NO: 2485651 - DNA, 25 bp, Homo sapien
gagaagtgttgcctcttaccgagag

SEQ ID NO: 2485652 - DNA, 25 bp, Homo sapien
aataagtagctaataagggtgctgg

SEQ ID NO: 2485653 - DNA, 25 bp, Homo sapien
caacaggtttgaaccggacaggagt

SEQ ID NO: 2485654 - DNA, 25 bp, Homo sapien
aaaagttttattcgcaaggctgcca

SEQ ID NO: 2485655 - DNA, 25 bp, Homo sapien
tcagtgtttagcagtagccttcagc

SEQ ID NO: 2485656 - DNA, 25 bp, Homo sapien
taacaggtcccttctgtgcaggcac

SEQ ID NO: 2485657 - DNA, 25 bp, Homo sapien
tggcctttcccagacaacattgaga

SEQ ID NO: 2485658 - DNA, 25 bp, Homo sapien
tgagaaaacttgtggtgacagcagc

SEQ ID NO: 2485659 - DNA, 25 bp, Homo sapien
atcacctacaagcaggcccaatggc

SEQ ID NO: 2485660 - DNA, 25 bp, Homo sapien
ttgagaaaacaagggtgaatcacct

SEQ ID NO: 2485661 - DNA, 25 bp, Homo sapien
acaagtgaaccgctctttgtaaggc

SEQ ID NO: 2485662 - DNA, 25 bp, Homo sapien
ggctgagttaacaagtcctgccttg

SEQ ID NO: 2485663 - DNA, 25 bp, Homo sapien
gcacaattcaggagattaatctgga

SEQ ID NO: 2485664 - DNA, 25 bp, Homo sapien
acatacacatgatttcagggaaagc

SEQ ID NO: 2485665 - DNA, 25 bp, Homo sapien
gaaagaaagctcttgaccatcagtt

SEQ ID NO: 2485666 - DNA, 25 bp, Homo sapien
ggacgtttccaaccatttgcctgta

SEQ ID NO: 2485667 - DNA, 25 bp, Homo sapien
tcaaactgattagcatggaggtggt

SEQ ID NO: 2485668 - DNA, 25 bp, Homo sapien
aattgcatgtcttctctcaactgag

SEQ ID NO: 2485669 - DNA, 25 bp, Homo sapien
tccttcagatacatcagggcccttg

SEQ ID NO: 2485670 - DNA, 25 bp, Homo sapien
gaaaacatgtgtggagcattaagcc

SEQ ID NO: 2485671 - DNA, 25 bp, Homo sapien
gcattaagccaagtgacaggaggag

SEQ ID NO: 2485672 - DNA, 25 bp, Homo sapien
gggcccttgaatgaaatgcctggaa

SEQ ID NO: 2485673 - DNA, 25 bp, Homo sapien
aaggaggtcaatgtacttaccaaag

SEQ ID NO: 2485674 - DNA, 25 bp, Homo sapien
cccatgaactgatttcagagacttc

SEQ ID NO: 2485675 - DNA, 25 bp, Homo sapien
caaagttcatgggttttaacccatg

SEQ ID NO: 2485676 - DNA, 25 bp, Homo sapien
ttctatattccacaccgctacagag

SEQ ID NO: 2485677 - DNA, 25 bp, Homo sapien
cattactgtcagtgcttatagatga

SEQ ID NO: 2485678 - DNA, 25 bp, Homo sapien
actcctgtgctatctgaattttgtg

SEQ ID NO: 2485679 - DNA, 25 bp, Homo sapien
gttgtttctagtataggtacttgca

SEQ ID NO: 2485680 - DNA, 25 bp, Homo sapien
tctttcactcctgtgctatctgaat

SEQ ID NO: 2485681 - DNA, 25 bp, Homo sapien
tgggcaccttccgaaaatgaatagc

SEQ ID NO: 2485682 - DNA, 25 bp, Homo sapien
tgtataggccaaacacattcgtggt

SEQ ID NO: 2485683 - DNA, 25 bp, Homo sapien
gaatgtcagagcaaagcgtttagag

SEQ ID NO: 2485684 - DNA, 25 bp, Homo sapien
gcatgtcagcagaggagtctacgtt

SEQ ID NO: 2485685 - DNA, 25 bp, Homo sapien
ctgggaacagctgcgttaagcacag

SEQ ID NO: 2485686 - DNA, 25 bp, Homo sapien
gggaacagctgcgttaagcacaggt

SEQ ID NO: 2485687 - DNA, 25 bp, Homo sapien
tctgggaacagctgcgttaagcaca

SEQ ID NO: 2485688 - DNA, 25 bp, Homo sapien
gaacagctgcgttaagcacaggtac

SEQ ID NO: 2485689 - DNA, 25 bp, Homo sapien
tggttctacttccctgctgggctat

SEQ ID NO: 2485690 - DNA, 25 bp, Homo sapien
gttctacttccctgctgggctatgt

SEQ ID NO: 2485691 - DNA, 25 bp, Homo sapien
ggttctacttccctgctgggctatg

SEQ ID NO: 2485692 - DNA, 25 bp, Homo sapien
gctcctgtgggcaagtcttctttgc

SEQ ID NO: 2485693 - DNA, 25 bp, Homo sapien
tctttgctacttgtccctgcaactg

SEQ ID NO: 2485694 - DNA, 25 bp, Homo sapien
cctgtgggcaagtcttctttgctac

SEQ ID NO: 2485695 - DNA, 25 bp, Homo sapien
aactgccccaacaaagggctgctct

SEQ ID NO: 2485696 - DNA, 25 bp, Homo sapien
tcctctgccagatgtggctgcttca

SEQ ID NO: 2485697 - DNA, 25 bp, Homo sapien
gccagatgtggctgcttcagccctt

SEQ ID NO: 2485698 - DNA, 25 bp, Homo sapien
tgccaacccagggcttcttttagcc

SEQ ID NO: 2485699 - DNA, 25 bp, Homo sapien
tgcttcagccctttgccaacccagg

SEQ ID NO: 2485700 - DNA, 25 bp, Homo sapien
ctaagtctcatgacggttttggaca

SEQ ID NO: 2485701 - DNA, 25 bp, Homo sapien
taagtctcatgacggttttggacat

SEQ ID NO: 2485702 - DNA, 25 bp, Homo sapien
ttctaagtctcatgacggttttgga

SEQ ID NO: 2485703 - DNA, 25 bp, Homo sapien
tctaagtctcatgacggttttggac

SEQ ID NO: 2485704 - DNA, 25 bp, Homo sapien
gcatttctgaaatacaaagacaacc

SEQ ID NO: 2485705 - DNA, 25 bp, Homo sapien
tgtcctttcgtggtcaaaacagtag

SEQ ID NO: 2485706 - DNA, 25 bp, Homo sapien
tagaagcaacagaacatgaatcaag

SEQ ID NO: 2485707 - DNA, 25 bp, Homo sapien
gagccatagtacatcaaatattttg

SEQ ID NO: 2485708 - DNA, 25 bp, Homo sapien
taaaaggtgacgtggaatgaattcc

SEQ ID NO: 2485709 - DNA, 25 bp, Homo sapien
cgtggagcccatgcatcatgcaggc

SEQ ID NO: 2485710 - DNA, 25 bp, Homo sapien
catgaacttagaggagcgtggagcc

SEQ ID NO: 2485711 - DNA, 25 bp, Homo sapien
tcagaaacaactggttgagaaagac

SEQ ID NO: 2485712 - DNA, 25 bp, Homo sapien
gcagatgctgcaatcctagtttgtg

SEQ ID NO: 2485713 - DNA, 25 bp, Homo sapien
tttcaggaagcaagttgctcttttc

SEQ ID NO: 2485714 - DNA, 25 bp, Homo sapien
attttgagcctacaagcagatgctg

SEQ ID NO: 2485715 - DNA, 25 bp, Homo sapien
gctgcaatcctagtttgtgaccaaa

SEQ ID NO: 2485716 - DNA, 25 bp, Homo sapien
ctgggaatcagcaagtgctttcttg

SEQ ID NO: 2485717 - DNA, 25 bp, Homo sapien
gggaatcagcaagtgctttcttgtt

SEQ ID NO: 2485718 - DNA, 25 bp, Homo sapien
tgggaatcagcaagtgctttcttgt

SEQ ID NO: 2485719 - DNA, 25 bp, Homo sapien
gctgggaatcagcaagtgctttctt

SEQ ID NO: 2485720 - DNA, 25 bp, Homo sapien
tggactgagtctctgcaagtgcctc

SEQ ID NO: 2485721 - DNA, 25 bp, Homo sapien
tacgtctcggaaaagctgcccaggg

SEQ ID NO: 2485722 - DNA, 25 bp, Homo sapien
agcagaagctatgaattacggcaag

SEQ ID NO: 2485723 - DNA, 25 bp, Homo sapien
gaattacggcaagccagtccctacg

SEQ ID NO: 2485724 - DNA, 25 bp, Homo sapien
gcagccacgaaaataggcttatttc

SEQ ID NO: 2485725 - DNA, 25 bp, Homo sapien
catactgattgaaaggcagccacga

SEQ ID NO: 2485726 - DNA, 25 bp, Homo sapien
tcttaaatctgagtgtaatagaacc

SEQ ID NO: 2485727 - DNA, 25 bp, Homo sapien
caaaatggaaagtgtgttacatact

SEQ ID NO: 2485728 - DNA, 25 bp, Homo sapien
cactcagcttggtaaaacttcttag

SEQ ID NO: 2485729 - DNA, 25 bp, Homo sapien
tctgggattgttttactgctgaggt

SEQ ID NO: 2485730 - DNA, 25 bp, Homo sapien
ggttgcacaaaattatccctctggg

SEQ ID NO: 2485731 - DNA, 25 bp, Homo sapien
aaacctgttttgtgtgatggcggtg

SEQ ID NO: 2485732 - DNA, 25 bp, Homo sapien
gatcttaaaggaattgcattctctc

SEQ ID NO: 2485733 - DNA, 25 bp, Homo sapien
tctgaaggtaaaccaggtctgttgc

SEQ ID NO: 2485734 - DNA, 25 bp, Homo sapien
caggtctgttgctatgcagaagatc

SEQ ID NO: 2485735 - DNA, 25 bp, Homo sapien
tctcagatagtttgatgagtctctg

SEQ ID NO: 2485736 - DNA, 25 bp, Homo sapien
gtccagggtccctgtaacaggtgct

SEQ ID NO: 2485737 - DNA, 25 bp, Homo sapien
tccagggtccctgtaacaggtgctc

SEQ ID NO: 2485738 - DNA, 25 bp, Homo sapien
aggtcgatcccaagtcctcttgagg

SEQ ID NO: 2485739 - DNA, 25 bp, Homo sapien
gatcccaagtcctcttgaggtccag

SEQ ID NO: 2485740 - DNA, 25 bp, Homo sapien
attaccaccacagactggtaacaaa

SEQ ID NO: 2485741 - DNA, 25 bp, Homo sapien
gattcctgggcaaacatcagtttat

SEQ ID NO: 2485742 - DNA, 25 bp, Homo sapien
cagagaactaattgaagctattttc

SEQ ID NO: 2485743 - DNA, 25 bp, Homo sapien
ctaatctacataagtcaaggttcct

SEQ ID NO: 2485744 - DNA, 25 bp, Homo sapien
tcataataaaattctcgctggcaaa

SEQ ID NO: 2485745 - DNA, 25 bp, Homo sapien
tatgtaattgtgatagtcctaaagg

SEQ ID NO: 2485746 - DNA, 25 bp, Homo sapien
gttggcatctttggtgaacaccgtg

SEQ ID NO: 2485747 - DNA, 25 bp, Homo sapien
tctttggtgaacaccgtgatccctg

SEQ ID NO: 2485748 - DNA, 25 bp, Homo sapien
ctgttggcatctttggtgaacaccg

SEQ ID NO: 2485749 - DNA, 25 bp, Homo sapien
ggcatctttggtgaacaccgtgatc

SEQ ID NO: 2485750 - DNA, 25 bp, Homo sapien
ttcagtagaggctcattgctgaccc

SEQ ID NO: 2485751 - DNA, 25 bp, Homo sapien
tgctgaccccaagaacagttaaggg

SEQ ID NO: 2485752 - DNA, 25 bp, Homo sapien
accaactttcggtgctctttcttca

SEQ ID NO: 2485753 - DNA, 25 bp, Homo sapien
tgtaaccaactttcggtgctctttc

SEQ ID NO: 2485754 - DNA, 25 bp, Homo sapien
gctggccagctctatgactatgaca

SEQ ID NO: 2485755 - DNA, 25 bp, Homo sapien
tacaaaagctggttctggactaaga

SEQ ID NO: 2485756 - DNA, 25 bp, Homo sapien
tagtacttgagccaatgctggccag

SEQ ID NO: 2485757 - DNA, 25 bp, Homo sapien
cgtggtaccacaaggcaatcataaa

SEQ ID NO: 2485758 - DNA, 25 bp, Homo sapien
taaacagggaggttgcccattcaga

SEQ ID NO: 2485759 - DNA, 25 bp, Homo sapien
gacacgctggtgaggtgcatgtaac

SEQ ID NO: 2485760 - DNA, 25 bp, Homo sapien
caagaaagagtaccagaactggaac

SEQ ID NO: 2485761 - DNA, 25 bp, Homo sapien
ggtagccactccaatgtttgcagaa

SEQ ID NO: 2485762 - DNA, 25 bp, Homo sapien
cattttgcaaggacatttggttccc

SEQ ID NO: 2485763 - DNA, 25 bp, Homo sapien
aatatgtgggcaaaacctcttctct

SEQ ID NO: 2485764 - DNA, 25 bp, Homo sapien
gatcatttcagatcgcaagagtggg

SEQ ID NO: 2485765 - DNA, 25 bp, Homo sapien
tcttgaagaataccagtgtagcaca

SEQ ID NO: 2485766 - DNA, 25 bp, Homo sapien
aatcgactgcaatctgggttccagg

SEQ ID NO: 2485767 - DNA, 25 bp, Homo sapien
tacttagtcactggtggtccaagga

SEQ ID NO: 2485768 - DNA, 25 bp, Homo sapien
ggattctggcgtctaaattaaagca

SEQ ID NO: 2485769 - DNA, 25 bp, Homo sapien
gaaactcactaaaagcaggaagact

SEQ ID NO: 2485770 - DNA, 25 bp, Homo sapien
tttaaaaaggtattcttatatgagc

SEQ ID NO: 2485771 - DNA, 25 bp, Homo sapien
taaaagttcacttgaggtagtatgt

SEQ ID NO: 2485772 - DNA, 25 bp, Homo sapien
tttacgtaagatacttttttgcata

SEQ ID NO: 2485773 - DNA, 25 bp, Homo sapien
ttcttatatgagcatcattcccagt

SEQ ID NO: 2485774 - DNA, 25 bp, Homo sapien
gtgtccaagtcataagactgaaaat

SEQ ID NO: 2485775 - DNA, 25 bp, Homo sapien
tatgtgtccaagtcataagactgaa

SEQ ID NO: 2485776 - DNA, 25 bp, Homo sapien
tgtgtccaagtcataagactgaaaa

SEQ ID NO: 2485777 - DNA, 25 bp, Homo sapien
ctatgtgtccaagtcataagactga

SEQ ID NO: 2485778 - DNA, 25 bp, Homo sapien
tcctgaaaatctgtcctttctttcc

SEQ ID NO: 2485779 - DNA, 25 bp, Homo sapien
aatgtgattttcttcctgaaaatct

SEQ ID NO: 2485780 - DNA, 25 bp, Homo sapien
tgtcctttctttcccatcttcctct

SEQ ID NO: 2485781 - DNA, 25 bp, Homo sapien
tcttcctgaaaatctgtcctttctt

SEQ ID NO: 2485782 - DNA, 25 bp, Homo sapien
tgacaatctgatggctgtccaaagc

SEQ ID NO: 2485783 - DNA, 25 bp, Homo sapien
ggtctcctgagagcttttccaaagg

SEQ ID NO: 2485784 - DNA, 25 bp, Homo sapien
gaataggcatctaggtgaggtctcc

SEQ ID NO: 2485785 - DNA, 25 bp, Homo sapien
ggctgtccaaagcttgaataggcat

SEQ ID NO: 2485786 - DNA, 25 bp, Homo sapien
tagctgagagcccaattttggtgac

SEQ ID NO: 2485787 - DNA, 25 bp, Homo sapien
catgggtccctttgctagcatgtga

SEQ ID NO: 2485788 - DNA, 25 bp, Homo sapien
tacagccagatcacttctagaatgg

SEQ ID NO: 2485789 - DNA, 25 bp, Homo sapien
tagaatggagcaaaagacatttgcc

SEQ ID NO: 2485790 - DNA, 25 bp, Homo sapien
cacatggctgacaagctgagctcct

SEQ ID NO: 2485791 - DNA, 25 bp, Homo sapien
taactagtcggatgtcatggcagcc

SEQ ID NO: 2485792 - DNA, 25 bp, Homo sapien
aacccttgtcttggagtagatgcca

SEQ ID NO: 2485793 - DNA, 25 bp, Homo sapien
tcttggccaaaggtagtccagcttg

SEQ ID NO: 2485794 - DNA, 25 bp, Homo sapien
tactgaagctccgttcgcaggattc

SEQ ID NO: 2485795 - DNA, 25 bp, Homo sapien
tgttaagtagcttcctcacatgtga

SEQ ID NO: 2485796 - DNA, 25 bp, Homo sapien
aaagaattactcgaggcaaccgacg

SEQ ID NO: 2485797 - DNA, 25 bp, Homo sapien
gaaggccacgatatattactgaagc

SEQ ID NO: 2485798 - DNA, 25 bp, Homo sapien
gggctcatagtggtccattaaaact

SEQ ID NO: 2485799 - DNA, 25 bp, Homo sapien
tctttatgtaactgggctcatagtg

SEQ ID NO: 2485800 - DNA, 25 bp, Homo sapien
atgagaacatgggtagcactccttt

SEQ ID NO: 2485801 - DNA, 25 bp, Homo sapien
gagaacatgggtagcactccttttt

SEQ ID NO: 2485802 - DNA, 25 bp, Homo sapien
tagaagtctctctaagaaacagaac

SEQ ID NO: 2485803 - DNA, 25 bp, Homo sapien
gaaacagaactgtactcaagcaaga

SEQ ID NO: 2485804 - DNA, 25 bp, Homo sapien
aacagaaggagattacagttagcac

SEQ ID NO: 2485805 - DNA, 25 bp, Homo sapien
ttaatatgggggcagtaacagaagg

SEQ ID NO: 2485806 - DNA, 25 bp, Homo sapien
tttcccttcaaatacatagggcctg

SEQ ID NO: 2485807 - DNA, 25 bp, Homo sapien
tcactgctattgtcaatatggcagg

SEQ ID NO: 2485808 - DNA, 25 bp, Homo sapien
aaaacggacaaaggaacagatctgt

SEQ ID NO: 2485809 - DNA, 25 bp, Homo sapien
gtttcaaaaggatctgagccataca

SEQ ID NO: 2485810 - DNA, 25 bp, Homo sapien
cacgatgacgcatgtgtctgggaag

SEQ ID NO: 2485811 - DNA, 25 bp, Homo sapien
cagggttagagatgtcacgatgacg

SEQ ID NO: 2485812 - DNA, 25 bp, Homo sapien
gcaaatatgcagaacgtgacacagt

SEQ ID NO: 2485813 - DNA, 25 bp, Homo sapien
cagagctactctgggagcagcctca

SEQ ID NO: 2485814 - DNA, 25 bp, Homo sapien
cactactgtcatgttgtggtaagaa

SEQ ID NO: 2485815 - DNA, 25 bp, Homo sapien
aataactaggaatatctgctggcaa

SEQ ID NO: 2485816 - DNA, 25 bp, Homo sapien
gcctgtcagctaacgttccctgaga

SEQ ID NO: 2485817 - DNA, 25 bp, Homo sapien
ttccctgagatgacaaataactagg

SEQ ID NO: 2485818 - DNA, 25 bp, Homo sapien
caatgcactgtaggacggctgtttc

SEQ ID NO: 2485819 - DNA, 25 bp, Homo sapien
gctatgatcacgacacccacagtgg

SEQ ID NO: 2485820 - DNA, 25 bp, Homo sapien
gcctgctgcaaaaaagtgcctctcg

SEQ ID NO: 2485821 - DNA, 25 bp, Homo sapien
tacagttcggtccaacagtggccgc

SEQ ID NO: 2485822 - DNA, 25 bp, Homo sapien
gctgtgcagctgtataccccaatgt

SEQ ID NO: 2485823 - DNA, 25 bp, Homo sapien
cccagctcggatggtgagatccatg

SEQ ID NO: 2485824 - DNA, 25 bp, Homo sapien
tcacatccacgataaagaacacgtc

SEQ ID NO: 2485825 - DNA, 25 bp, Homo sapien
acatgcatgcgtctctcccgtgcag

SEQ ID NO: 2485826 - DNA, 25 bp, Homo sapien
gctttgacagagtaggatgaaccaa

SEQ ID NO: 2485827 - DNA, 25 bp, Homo sapien
tgaaccaaagtgattggagatgaca

SEQ ID NO: 2485828 - DNA, 25 bp, Homo sapien
tgattggagatgacacactgatatt

SEQ ID NO: 2485829 - DNA, 25 bp, Homo sapien
gcttggctttgacagagtaggatga

SEQ ID NO: 2485830 - DNA, 25 bp, Homo sapien
tggaaccttttattgccgactgtgt

SEQ ID NO: 2485831 - DNA, 25 bp, Homo sapien
gcccggaggtgtgcataattttcca

SEQ ID NO: 2485832 - DNA, 25 bp, Homo sapien
gactgtgtttctggctgaaccgtga

SEQ ID NO: 2485833 - DNA, 25 bp, Homo sapien
cgcagccgaaggatggtggtatact

SEQ ID NO: 2485834 - DNA, 25 bp, Homo sapien
tattttggagctatcggaaaaccca

SEQ ID NO: 2485835 - DNA, 25 bp, Homo sapien
ctttattcctgatcccttatgcttt

SEQ ID NO: 2485836 - DNA, 25 bp, Homo sapien
gagctatcggaaaacccacacttta

SEQ ID NO: 2485837 - DNA, 25 bp, Homo sapien
ttttggagctatcggaaaacccaca

SEQ ID NO: 2485838 - DNA, 25 bp, Homo sapien
tgttttccgccacccactgtgggag

SEQ ID NO: 2485839 - DNA, 25 bp, Homo sapien
catctgggctaacagcaaaaatgct

SEQ ID NO: 2485840 - DNA, 25 bp, Homo sapien
caaaaggcttgatgtatttaaatgc

SEQ ID NO: 2485841 - DNA, 25 bp, Homo sapien
tgggagccattttagctggcaatcg

SEQ ID NO: 2485842 - DNA, 25 bp, Homo sapien
acattcaatttgttctgtatgaaat

SEQ ID NO: 2485843 - DNA, 25 bp, Homo sapien
tcaatttgttctgtatgaaatgcag

SEQ ID NO: 2485844 - DNA, 25 bp, Homo sapien
tacattcaatttgttctgtatgaaa

SEQ ID NO: 2485845 - DNA, 25 bp, Homo sapien
ttacattcaatttgttctgtatgaa

SEQ ID NO: 2485846 - DNA, 25 bp, Homo sapien
ccttgtaaagacatgattgcgttgt

SEQ ID NO: 2485847 - DNA, 25 bp, Homo sapien
agacatgattgcgttgtcactcagg

SEQ ID NO: 2485848 - DNA, 25 bp, Homo sapien
tcttcatttgtgaaaatgcattgcc

SEQ ID NO: 2485849 - DNA, 25 bp, Homo sapien
cattgccttgtaaagacatgattgc

SEQ ID NO: 2485850 - DNA, 25 bp, Homo sapien
gattatttgactcattagggcccat

SEQ ID NO: 2485851 - DNA, 25 bp, Homo sapien
atttgactcattagggcccatgctg

SEQ ID NO: 2485852 - DNA, 25 bp, Homo sapien
gcatttgtatcacagataggttttg

SEQ ID NO: 2485853 - DNA, 25 bp, Homo sapien
ccagggcatttgtatcacagatagg

SEQ ID NO: 2485854 - DNA, 25 bp, Homo sapien
cattaacctaattctgtcacccaca

SEQ ID NO: 2485855 - DNA, 25 bp, Homo sapien
caaattagcaactattggaaacttc

SEQ ID NO: 2485856 - DNA, 25 bp, Homo sapien
tactacttagctcagcacgaaaggg

SEQ ID NO: 2485857 - DNA, 25 bp, Homo sapien
cataaacgcagtaagatgttcagac

SEQ ID NO: 2485858 - DNA, 25 bp, Homo sapien
tagaacggatccgatttccttggag

SEQ ID NO: 2485859 - DNA, 25 bp, Homo sapien
ttagtaatagaacggatccgatttc

SEQ ID NO: 2485860 - DNA, 25 bp, Homo sapien
aatgcatccaaaccagtgaaggctt

SEQ ID NO: 2485861 - DNA, 25 bp, Homo sapien
acggatccgatttccttggagtatc

SEQ ID NO: 2485862 - DNA, 25 bp, Homo sapien
tcaatagtccaggaaatttcattgt

SEQ ID NO: 2485863 - DNA, 25 bp, Homo sapien
agtcgcctcagtttgtcaagcccag

SEQ ID NO: 2485864 - DNA, 25 bp, Homo sapien
tcgcctcagtttgtcaagcccagag

SEQ ID NO: 2485865 - DNA, 25 bp, Homo sapien
gcaccattcatgtcttcaatagtcc

SEQ ID NO: 2485866 - DNA, 25 bp, Homo sapien
tttagagtgataagctcagaaagcc

SEQ ID NO: 2485867 - DNA, 25 bp, Homo sapien
gaagcattccctttagagtgataag

SEQ ID NO: 2485868 - DNA, 25 bp, Homo sapien
cacccaggtggcatatcatttgtaa

SEQ ID NO: 2485869 - DNA, 25 bp, Homo sapien
gaaagcctagtatcaccacccaggt

SEQ ID NO: 2485870 - DNA, 25 bp, Homo sapien
caattacgttcgagtactgacagca

SEQ ID NO: 2485871 - DNA, 25 bp, Homo sapien
ctggagatcctgagaaggttcactg

SEQ ID NO: 2485872 - DNA, 25 bp, Homo sapien
tacttctgaggctgtatgcatttcc

SEQ ID NO: 2485873 - DNA, 25 bp, Homo sapien
taatccctatacgaaacacatatgg

SEQ ID NO: 2485874 - DNA, 25 bp, Homo sapien
aatgtagctgactctgttgttccca

SEQ ID NO: 2485875 - DNA, 25 bp, Homo sapien
cccggaaggcacaatcagcaatgta

SEQ ID NO: 2485876 - DNA, 25 bp, Homo sapien
taggccaaggaagcttgaatcatct

SEQ ID NO: 2485877 - DNA, 25 bp, Homo sapien
tgtatttagtaagcttaggccaagg

SEQ ID NO: 2485878 - DNA, 25 bp, Homo sapien
ctctgttaggttgttatggtccagc

SEQ ID NO: 2485879 - DNA, 25 bp, Homo sapien
cagcatcagcaagccgtaaagccag

SEQ ID NO: 2485880 - DNA, 25 bp, Homo sapien
tgttaggttgttatggtccagctgc

SEQ ID NO: 2485881 - DNA, 25 bp, Homo sapien
agcatcagcaagccgtaaagccagc

SEQ ID NO: 2485882 - DNA, 25 bp, Homo sapien
aaggccttggaatgtcagtccatct

SEQ ID NO: 2485883 - DNA, 25 bp, Homo sapien
ggccttggaatgtcagtccatctac

SEQ ID NO: 2485884 - DNA, 25 bp, Homo sapien
ccttggaatgtcagtccatctacat

SEQ ID NO: 2485885 - DNA, 25 bp, Homo sapien
tccatccataagtttcgttactcca

SEQ ID NO: 2485886 - DNA, 25 bp, Homo sapien
caaggagtgtgttggccaaattgtc

SEQ ID NO: 2485887 - DNA, 25 bp, Homo sapien
aaatacccaggttccattgatgtga

SEQ ID NO: 2485888 - DNA, 25 bp, Homo sapien
tgttcagctttaacacaaggagtgt

SEQ ID NO: 2485889 - DNA, 25 bp, Homo sapien
aaacatcttgggtgggatagctgag

SEQ ID NO: 2485890 - DNA, 25 bp, Homo sapien
gttcagggagtatttcaacaatcct

SEQ ID NO: 2485891 - DNA, 25 bp, Homo sapien
tgagctgtagggctggaaatgcagt

SEQ ID NO: 2485892 - DNA, 25 bp, Homo sapien
gaaatattgttgctgctaaggtcca

SEQ ID NO: 2485893 - DNA, 25 bp, Homo sapien
tcaagggactgaaactctttcagat

SEQ ID NO: 2485894 - DNA, 25 bp, Homo sapien
gcctgtgtataaagtccttgatcta

SEQ ID NO: 2485895 - DNA, 25 bp, Homo sapien
tgcctgtgtataaagtccttgatct

SEQ ID NO: 2485896 - DNA, 25 bp, Homo sapien
cgtgaatgaccaagtgcaaatgcca

SEQ ID NO: 2485897 - DNA, 25 bp, Homo sapien
aacggaccagaatgcagacacagaa

SEQ ID NO: 2485898 - DNA, 25 bp, Homo sapien
tgtggccccgtgctgtcgacatttg

SEQ ID NO: 2485899 - DNA, 25 bp, Homo sapien
tatggtacacagaccaacggaccag

SEQ ID NO: 2485900 - DNA, 25 bp, Homo sapien
cagcaatgggcatgactgtcctaat

SEQ ID NO: 2485901 - DNA, 25 bp, Homo sapien
cacccagtattgatctctgtagcac

SEQ ID NO: 2485902 - DNA, 25 bp, Homo sapien
tgtgatggaaccacatctcgcggca

SEQ ID NO: 2485903 - DNA, 25 bp, Homo sapien
tctccaatacagaaggatgcatgat

SEQ ID NO: 2485904 - DNA, 25 bp, Homo sapien
taaatcaccagatgtaagcaattgg

SEQ ID NO: 2485905 - DNA, 25 bp, Homo sapien
tgcacccgtgacttagctgacctgg

SEQ ID NO: 2485906 - DNA, 25 bp, Homo sapien
ggtagtgatcactctattaattgaa

SEQ ID NO: 2485907 - DNA, 25 bp, Homo sapien
tcagtatcaaatgtcacttagctct

SEQ ID NO: 2485908 - DNA, 25 bp, Homo sapien
gtaatatttgccgagactggtccca

SEQ ID NO: 2485909 - DNA, 25 bp, Homo sapien
gccgagactggtcccagatttggaa

SEQ ID NO: 2485910 - DNA, 25 bp, Homo sapien
tatttgccgagactggtcccagatt

SEQ ID NO: 2485911 - DNA, 25 bp, Homo sapien
gagagaagtgtaatatttgccgaga

SEQ ID NO: 2485912 - DNA, 25 bp, Homo sapien
aagataatctgttgtgacttaagtc

SEQ ID NO: 2485913 - DNA, 25 bp, Homo sapien
ggtggctcatggaacttgccttgat

SEQ ID NO: 2485914 - DNA, 25 bp, Homo sapien
gccttgatgaaagataatctgttgt

SEQ ID NO: 2485915 - DNA, 25 bp, Homo sapien
gaaggtggctcatggaacttgcctt

SEQ ID NO: 2485916 - DNA, 25 bp, Homo sapien
ggagctacagaaatcacgcccttga

SEQ ID NO: 2485917 - DNA, 25 bp, Homo sapien
gattctggataatcgagttccgccc

SEQ ID NO: 2485918 - DNA, 25 bp, Homo sapien
cgtctgggcgttctgaggagctaca

SEQ ID NO: 2485919 - DNA, 25 bp, Homo sapien
aaaacttgcataagagctccctgcg

SEQ ID NO: 2485920 - DNA, 25 bp, Homo sapien
ggagaacaacagaagtacgtccacc

SEQ ID NO: 2485921 - DNA, 25 bp, Homo sapien
agaacaacagaagtacgtccaccat

SEQ ID NO: 2485922 - DNA, 25 bp, Homo sapien
gagaacaacagaagtacgtccacca

SEQ ID NO: 2485923 - DNA, 25 bp, Homo sapien
tgtgtgcaggttgccgcttatctcc

SEQ ID NO: 2485924 - DNA, 25 bp, Homo sapien
aaagcctgacttcagttactgggtg

SEQ ID NO: 2485925 - DNA, 25 bp, Homo sapien
tctgacgcagctagaaactaaaact

SEQ ID NO: 2485926 - DNA, 25 bp, Homo sapien
gactcataactcagcgagaactgca

SEQ ID NO: 2485927 - DNA, 25 bp, Homo sapien
ctctggcgtcgttactggcccccaa

SEQ ID NO: 2485928 - DNA, 25 bp, Homo sapien
aatctctggcgtcgttactggcccc

SEQ ID NO: 2485929 - DNA, 25 bp, Homo sapien
cccaatctctggcgtcgttactggc

SEQ ID NO: 2485930 - DNA, 25 bp, Homo sapien
tctggcgtcgttactggcccccaac

SEQ ID NO: 2485931 - DNA, 25 bp, Homo sapien
cagttaggacgcgccaagagcccac

SEQ ID NO: 2485932 - DNA, 25 bp, Homo sapien
gcagccagttaggacgcgccaagag

SEQ ID NO: 2485933 - DNA, 25 bp, Homo sapien
agccagttaggacgcgccaagagcc

SEQ ID NO: 2485934 - DNA, 25 bp, Homo sapien
ctgcagccagttaggacgcgccaag

SEQ ID NO: 2485935 - DNA, 25 bp, Homo sapien
cacgcccacggagcgccgatcgcgg

SEQ ID NO: 2485936 - DNA, 25 bp, Homo sapien
cgcccgcaaagcacgtgggagggaa

SEQ ID NO: 2485937 - DNA, 25 bp, Homo sapien
gccgcccgcaaagcacgtgggaggg

SEQ ID NO: 2485938 - DNA, 25 bp, Homo sapien
ctgcgccgcccgcaaagcacgtggg

SEQ ID NO: 2485939 - DNA, 25 bp, Homo sapien
tatacggcaaaaaggggactgcacg

SEQ ID NO: 2485940 - DNA, 25 bp, Homo sapien
aaggggactgcacgccgaaccccat

SEQ ID NO: 2485941 - DNA, 25 bp, Homo sapien
agaaggagctatacggcaaaaaggg

SEQ ID NO: 2485942 - DNA, 25 bp, Homo sapien
ccagaaggagctatacggcaaaaag

SEQ ID NO: 2485943 - DNA, 25 bp, Homo sapien
cgagcgacccaggacgggagtggct

SEQ ID NO: 2485944 - DNA, 25 bp, Homo sapien
tcgggaagacgcgctagccgcttac

SEQ ID NO: 2485945 - DNA, 25 bp, Homo sapien
agccgagcgacccaggacgggagtg

SEQ ID NO: 2485946 - DNA, 25 bp, Homo sapien
ggctcgggaagacgcgctagccgct

SEQ ID NO: 2485947 - DNA, 25 bp, Homo sapien
gccgctgtctgaccggccagcgcgc

SEQ ID NO: 2485948 - DNA, 25 bp, Homo sapien
cagcggcaggtagtggggcatgggc

SEQ ID NO: 2485949 - DNA, 25 bp, Homo sapien
gtagtggggcatgggcgctcggcgg

SEQ ID NO: 2485950 - DNA, 25 bp, Homo sapien
ctaccccagagggctgcccgagttc

SEQ ID NO: 2485951 - DNA, 25 bp, Homo sapien
gaaaccgaaaagaactgccaactgc

SEQ ID NO: 2485952 - DNA, 25 bp, Homo sapien
ccggcacaaacttccagccgagggt

SEQ ID NO: 2485953 - DNA, 25 bp, Homo sapien
gcgctgcccggtcaattccttcttt

SEQ ID NO: 2485954 - DNA, 25 bp, Homo sapien
agttgcagcttgagcagcgtcggct

SEQ ID NO: 2485955 - DNA, 25 bp, Homo sapien
tccaccccgcggcactgcgccaagt

SEQ ID NO: 2485956 - DNA, 25 bp, Homo sapien
actgcgccaagtccccgcgcggcgg

SEQ ID NO: 2485957 - DNA, 25 bp, Homo sapien
aagtccccgcgcggcggagtagcaa

SEQ ID NO: 2485958 - DNA, 25 bp, Homo sapien
gcggcactgcgccaagtccccgcgc

SEQ ID NO: 2485959 - DNA, 25 bp, Homo sapien
agcaacacctgacacactggccagt

SEQ ID NO: 2485960 - DNA, 25 bp, Homo sapien
ccactcgagtgtacatgaatcttga

SEQ ID NO: 2485961 - DNA, 25 bp, Homo sapien
tgaatcttgagagcacgtggatctg

SEQ ID NO: 2485962 - DNA, 25 bp, Homo sapien
tatggaaactgtttatgacagccac

SEQ ID NO: 2485963 - DNA, 25 bp, Homo sapien
cttgtttagttcttcacttctgtct

SEQ ID NO: 2485964 - DNA, 25 bp, Homo sapien
tgcttttctctattttcttgtttag

SEQ ID NO: 2485965 - DNA, 25 bp, Homo sapien
tttcttgtttagttcttcacttctg

SEQ ID NO: 2485966 - DNA, 25 bp, Homo sapien
ctgcttttctctattttcttgttta

SEQ ID NO: 2485967 - DNA, 25 bp, Homo sapien
cttttcccacttcaacatctggtaa

SEQ ID NO: 2485968 - DNA, 25 bp, Homo sapien
ccacttcaacatctggtaaagcagc

SEQ ID NO: 2485969 - DNA, 25 bp, Homo sapien
tcccacttcaacatctggtaaagca

SEQ ID NO: 2485970 - DNA, 25 bp, Homo sapien
tttcccacttcaacatctggtaaag

SEQ ID NO: 2485971 - DNA, 25 bp, Homo sapien
tcagcaaaggaacagatgagcgtcc

SEQ ID NO: 2485972 - DNA, 25 bp, Homo sapien
cagatgagcgtccagatgatagcca

SEQ ID NO: 2485973 - DNA, 25 bp, Homo sapien
tcatgccaaaagctccttctttcag

SEQ ID NO: 2485974 - DNA, 25 bp, Homo sapien
ccttctttcagcaaaggaacagatg

SEQ ID NO: 2485975 - DNA, 25 bp, Homo sapien
tcaagcatgacgcttgtgtcttttg

SEQ ID NO: 2485976 - DNA, 25 bp, Homo sapien
caagcatgacgcttgtgtcttttga

SEQ ID NO: 2485977 - DNA, 25 bp, Homo sapien
aagcatgacgcttgtgtcttttgat

SEQ ID NO: 2485978 - DNA, 25 bp, Homo sapien
tgtgctccgatttcaaacatgatgc

SEQ ID NO: 2485979 - DNA, 25 bp, Homo sapien
cctgtgctccgatttcaaacatgat

SEQ ID NO: 2485980 - DNA, 25 bp, Homo sapien
gaacaagaattctctccctgaggtt

SEQ ID NO: 2485981 - DNA, 25 bp, Homo sapien
tgttagcattactggtaccactcat

SEQ ID NO: 2485982 - DNA, 25 bp, Homo sapien
caggtgtaggcaagtgtattaaggc

SEQ ID NO: 2485983 - DNA, 25 bp, Homo sapien
agcaggtgtaggcaagtgtattaag

SEQ ID NO: 2485984 - DNA, 25 bp, Homo sapien
tgtaggcaagtgtattaaggctcgg

SEQ ID NO: 2485985 - DNA, 25 bp, Homo sapien
taaggctcggggagcaccagtagat

SEQ ID NO: 2485986 - DNA, 25 bp, Homo sapien
tcaagcgagttcttttgacgatgca

SEQ ID NO: 2485987 - DNA, 25 bp, Homo sapien
ctatttcaagcgagttcttttgacg

SEQ ID NO: 2485988 - DNA, 25 bp, Homo sapien
tttcaagcgagttcttttgacgatg

SEQ ID NO: 2485989 - DNA, 25 bp, Homo sapien
tatttcaagcgagttcttttgacga

SEQ ID NO: 2485990 - DNA, 25 bp, Homo sapien
taggtcgctatagcaagtcttttcg

SEQ ID NO: 2485991 - DNA, 25 bp, Homo sapien
caatatgggtaggtcgctatagcaa

SEQ ID NO: 2485992 - DNA, 25 bp, Homo sapien
atgggtaggtcgctatagcaagtct

SEQ ID NO: 2485993 - DNA, 25 bp, Homo sapien
ggcaatatgggtaggtcgctatagc

SEQ ID NO: 2485994 - DNA, 25 bp, Homo sapien
gctgcgtgcctgaacaattgctgaa

SEQ ID NO: 2485995 - DNA, 25 bp, Homo sapien
tgctgcgtgcctgaacaattgctga

SEQ ID NO: 2485996 - DNA, 25 bp, Homo sapien
gatgctgcgtgcctgaacaattgct

SEQ ID NO: 2485997 - DNA, 25 bp, Homo sapien
atgctgcgtgcctgaacaattgctg

SEQ ID NO: 2485998 - DNA, 25 bp, Homo sapien
atctttcaggagtatcaagttgcat

SEQ ID NO: 2485999 - DNA, 25 bp, Homo sapien
aaatctttcaggagtatcaagttgc

SEQ ID NO: 2486000 - DNA, 25 bp, Homo sapien
ggaaaaatctttcaggagtatcaag

SEQ ID NO: 2486001 - DNA, 25 bp, Homo sapien
aaaaatctttcaggagtatcaagtt

SEQ ID NO: 2486002 - DNA, 25 bp, Homo sapien
taatgcataagctgtcgggtttgtg

SEQ ID NO: 2486003 - DNA, 25 bp, Homo sapien
gtcgggtttgtgtccaaggcataca

SEQ ID NO: 2486004 - DNA, 25 bp, Homo sapien
gtttgtgtccaaggcatacagaaca

SEQ ID NO: 2486005 - DNA, 25 bp, Homo sapien
ataagctgtcgggtttgtgtccaag

SEQ ID NO: 2486006 - DNA, 25 bp, Homo sapien
cttattagatccctggtgcactggg

SEQ ID NO: 2486007 - DNA, 25 bp, Homo sapien
ttattagatccctggtgcactgggc

SEQ ID NO: 2486008 - DNA, 25 bp, Homo sapien
tccctaactctggcgacctctttga

SEQ ID NO: 2486009 - DNA, 25 bp, Homo sapien
cgacctctttgacccagccatcatc

SEQ ID NO: 2486010 - DNA, 25 bp, Homo sapien
ccctaactctggcgacctctttgac

SEQ ID NO: 2486011 - DNA, 25 bp, Homo sapien
cctaactctggcgacctctttgacc

SEQ ID NO: 2486012 - DNA, 25 bp, Homo sapien
aggagaagggttgtcatggtctcta

SEQ ID NO: 2486013 - DNA, 25 bp, Homo sapien
tgaggttcctcttttacttgtctga

SEQ ID NO: 2486014 - DNA, 25 bp, Homo sapien
ggttgtcatggtctctagaacccca

SEQ ID NO: 2486015 - DNA, 25 bp, Homo sapien
gaagaggtcatcattttgaggttcc

SEQ ID NO: 2486016 - DNA, 25 bp, Homo sapien
tcttggacacaaataagctttggca

SEQ ID NO: 2486017 - DNA, 25 bp, Homo sapien
ggcaaatatcgtgacaggtcccact

SEQ ID NO: 2486018 - DNA, 25 bp, Homo sapien
gactgtgcaggttgatacactggac

SEQ ID NO: 2486019 - DNA, 25 bp, Homo sapien
ggtcccactgaagctgaatgactgt

SEQ ID NO: 2486020 - DNA, 25 bp, Homo sapien
catcaaccaactgttgctgccgaac

SEQ ID NO: 2486021 - DNA, 25 bp, Homo sapien
caaccaactgttgctgccgaaccat

SEQ ID NO: 2486022 - DNA, 25 bp, Homo sapien
atcaaccaactgttgctgccgaacc

SEQ ID NO: 2486023 - DNA, 25 bp, Homo sapien
tcaaccaactgttgctgccgaacca

SEQ ID NO: 2486024 - DNA, 25 bp, Homo sapien
acatatttagtagcaatgtttctgc

SEQ ID NO: 2486025 - DNA, 25 bp, Homo sapien
aaattatccacaaaaggtggagtga

SEQ ID NO: 2486026 - DNA, 25 bp, Homo sapien
tttctgctctggtaacctccacacc

SEQ ID NO: 2486027 - DNA, 25 bp, Homo sapien
cacaaaaggtggagtgagaaacatc

SEQ ID NO: 2486028 - DNA, 25 bp, Homo sapien
gtgtggccacttactggatgatttt

SEQ ID NO: 2486029 - DNA, 25 bp, Homo sapien
aagagtcagtactctagattccgtc

SEQ ID NO: 2486030 - DNA, 25 bp, Homo sapien
tagattccgtctggatttttatctc

SEQ ID NO: 2486031 - DNA, 25 bp, Homo sapien
agtgtggccacttactggatgattt

SEQ ID NO: 2486032 - DNA, 25 bp, Homo sapien
tgctttaaggcgtttctgaggcaaa

SEQ ID NO: 2486033 - DNA, 25 bp, Homo sapien
gctgtaatataaggatgctttaagg

SEQ ID NO: 2486034 - DNA, 25 bp, Homo sapien
catccaatgattaaattcagctgta

SEQ ID NO: 2486035 - DNA, 25 bp, Homo sapien
ttaggagtcacctttttcagtatcc

SEQ ID NO: 2486036 - DNA, 25 bp, Homo sapien
cttgcccatcttctgacttctatca

SEQ ID NO: 2486037 - DNA, 25 bp, Homo sapien
tttcttgcccatcttctgacttcta

SEQ ID NO: 2486038 - DNA, 25 bp, Homo sapien
tcttgcccatcttctgacttctatc

SEQ ID NO: 2486039 - DNA, 25 bp, Homo sapien
ctttcttgcccatcttctgacttct

SEQ ID NO: 2486040 - DNA, 25 bp, Homo sapien
tgaactataccaggctttaaattat

SEQ ID NO: 2486041 - DNA, 25 bp, Homo sapien
ttgaactataccaggctttaaatta

SEQ ID NO: 2486042 - DNA, 25 bp, Homo sapien
atctttgaagttacttgatttaatc

SEQ ID NO: 2486043 - DNA, 25 bp, Homo sapien
attatctttgaagttacttgattta

SEQ ID NO: 2486044 - DNA, 25 bp, Homo sapien
ttccttcttaaagattccacacatg

SEQ ID NO: 2486045 - DNA, 25 bp, Homo sapien
tccttcttaaagattccacacatga

SEQ ID NO: 2486046 - DNA, 25 bp, Homo sapien
tcaggcggtcccactgtaggatctc

SEQ ID NO: 2486047 - DNA, 25 bp, Homo sapien
gagtctgttaaccaacaccttgtta

SEQ ID NO: 2486048 - DNA, 25 bp, Homo sapien
tctctctagaaccaacttcaagagg

SEQ ID NO: 2486049 - DNA, 25 bp, Homo sapien
agcctgatggtaacagagtctgtta

SEQ ID NO: 2486050 - DNA, 25 bp, Homo sapien
aaaatctggtgaatttttgccccag

SEQ ID NO: 2486051 - DNA, 25 bp, Homo sapien
tataaaatgttaaaatctggtgaat

SEQ ID NO: 2486052 - DNA, 25 bp, Homo sapien
tctggtgaatttttgccccagtttc

SEQ ID NO: 2486053 - DNA, 25 bp, Homo sapien
tggtgaatttttgccccagtttcca

SEQ ID NO: 2486054 - DNA, 25 bp, Homo sapien
tgagtgacagatctgctatcacaat

SEQ ID NO: 2486055 - DNA, 25 bp, Homo sapien
taaaaggaggttcatgattagagcc

SEQ ID NO: 2486056 - DNA, 25 bp, Homo sapien
gaagcaagtgaatctttaaaaggag

SEQ ID NO: 2486057 - DNA, 25 bp, Homo sapien
cagcggttttgacacactgcaatca

SEQ ID NO: 2486058 - DNA, 25 bp, Homo sapien
ctactgggaagcaagtgaatcttta

SEQ ID NO: 2486059 - DNA, 25 bp, Homo sapien
aacctcagtaattgcagcttctagc

SEQ ID NO: 2486060 - DNA, 25 bp, Homo sapien
ggtgtattcctgcagcgacctccca

SEQ ID NO: 2486061 - DNA, 25 bp, Homo sapien
gacctcccacgattgctaatggcat

SEQ ID NO: 2486062 - DNA, 25 bp, Homo sapien
tagccttatctggtttctaaagcag

SEQ ID NO: 2486063 - DNA, 25 bp, Homo sapien
cctgtgtttgattttgatgacccat

SEQ ID NO: 2486064 - DNA, 25 bp, Homo sapien
gacctgtgtttgattttgatgaccc

SEQ ID NO: 2486065 - DNA, 25 bp, Homo sapien
atgacctgtgtttgattttgatgac

SEQ ID NO: 2486066 - DNA, 25 bp, Homo sapien
cttttgatgacctgtgtttgatttt

SEQ ID NO: 2486067 - DNA, 25 bp, Homo sapien
gcatttggtatgaaggtagccttct

SEQ ID NO: 2486068 - DNA, 25 bp, Homo sapien
ttggtatgaaggtagccttctcttt

SEQ ID NO: 2486069 - DNA, 25 bp, Homo sapien
ggaggcataattggccttctcttgg

SEQ ID NO: 2486070 - DNA, 25 bp, Homo sapien
catttggtatgaaggtagccttctc

SEQ ID NO: 2486071 - DNA, 25 bp, Homo sapien
gcgttcagcctagcattgaggaata

SEQ ID NO: 2486072 - DNA, 25 bp, Homo sapien
tggatgacggccaacactggcaaca

SEQ ID NO: 2486073 - DNA, 25 bp, Homo sapien
tgaggaatacatggctatagctggc

SEQ ID NO: 2486074 - DNA, 25 bp, Homo sapien
gaagtacagacagctatgcaggacc

SEQ ID NO: 2486075 - DNA, 25 bp, Homo sapien
ttaaaatattcactggtaaagtctc

SEQ ID NO: 2486076 - DNA, 25 bp, Homo sapien
agtctctttcatgtgcgtctgtgtg

SEQ ID NO: 2486077 - DNA, 25 bp, Homo sapien
gctgttgttggggtaatttcagact

SEQ ID NO: 2486078 - DNA, 25 bp, Homo sapien
gagagtggacgatgttcctcaggcc

SEQ ID NO: 2486079 - DNA, 25 bp, Homo sapien
ggcaggcgtccctgtgtggtctgac

SEQ ID NO: 2486080 - DNA, 25 bp, Homo sapien
ttgccgctaagagtgaaggggaagt

SEQ ID NO: 2486081 - DNA, 25 bp, Homo sapien
cgctaagagtgaaggggaagtggtt

SEQ ID NO: 2486082 - DNA, 25 bp, Homo sapien
ccaaggcaggcgtccctgtgtggtc

SEQ ID NO: 2486083 - DNA, 25 bp, Homo sapien
taatttgtgaggcttggatcaagac

SEQ ID NO: 2486084 - DNA, 25 bp, Homo sapien
caagacagatgagatcagtgatttc

SEQ ID NO: 2486085 - DNA, 25 bp, Homo sapien
ggtgtggtgggtcatcatcataaag

SEQ ID NO: 2486086 - DNA, 25 bp, Homo sapien
ggagatactgagaaactgtggagtt

SEQ ID NO: 2486087 - DNA, 25 bp, Homo sapien
tttaatctccagattagatgcttga

SEQ ID NO: 2486088 - DNA, 25 bp, Homo sapien
ttttaatctccagattagatgcttg

SEQ ID NO: 2486089 - DNA, 25 bp, Homo sapien
tattttaatctccagattagatgct

SEQ ID NO: 2486090 - DNA, 25 bp, Homo sapien
attttaatctccagattagatgctt

SEQ ID NO: 2486091 - DNA, 25 bp, Homo sapien
atgctaattgtctctgtatcattac

SEQ ID NO: 2486092 - DNA, 25 bp, Homo sapien
cattacaattttagtatattactgc

SEQ ID NO: 2486093 - DNA, 25 bp, Homo sapien
tcattacaattttagtatattactg

SEQ ID NO: 2486094 - DNA, 25 bp, Homo sapien
ctaattgtctctgtatcattacaat

SEQ ID NO: 2486095 - DNA, 25 bp, Homo sapien
tttcagttcatttgatgagggaagt

SEQ ID NO: 2486096 - DNA, 25 bp, Homo sapien
ttcagttcatttgatgagggaagtt

SEQ ID NO: 2486097 - DNA, 25 bp, Homo sapien
tggtgaattctgtcagatatttgca

SEQ ID NO: 2486098 - DNA, 25 bp, Homo sapien
gttggtgaattctgtcagatatttg

SEQ ID NO: 2486099 - DNA, 25 bp, Homo sapien
tgctgacgttgtcagtcaggattcc

SEQ ID NO: 2486100 - DNA, 25 bp, Homo sapien
gattccttgaccacatttatctcgg

SEQ ID NO: 2486101 - DNA, 25 bp, Homo sapien
atctcggggggccaagtgattttct

SEQ ID NO: 2486102 - DNA, 25 bp, Homo sapien
tctgcttttgctgacgttgtcagtc

SEQ ID NO: 2486103 - DNA, 25 bp, Homo sapien
aaggctttctcagtaaggagcaaga

SEQ ID NO: 2486104 - DNA, 25 bp, Homo sapien
tggacatcatggtagcctatgagat

SEQ ID NO: 2486105 - DNA, 25 bp, Homo sapien
aggagcaagacatctttgcttaaga

SEQ ID NO: 2486106 - DNA, 25 bp, Homo sapien
tgtcaaatgtgttgggaacagccag

SEQ ID NO: 2486107 - DNA, 25 bp, Homo sapien
gtcgttgttgtaatgtgtttgaagc

SEQ ID NO: 2486108 - DNA, 25 bp, Homo sapien
ctgatgtgggtaagatttgcatttg

SEQ ID NO: 2486109 - DNA, 25 bp, Homo sapien
gatgtgggtaagatttgcatttgtg

SEQ ID NO: 2486110 - DNA, 25 bp, Homo sapien
gtttgaagcgttttgtaatctgtag

SEQ ID NO: 2486111 - DNA, 25 bp, Homo sapien
aatgccacgccagtaaccttctggg

SEQ ID NO: 2486112 - DNA, 25 bp, Homo sapien
gggagccaatgccacgccagtaacc

SEQ ID NO: 2486113 - DNA, 25 bp, Homo sapien
ggagccaatgccacgccagtaacct

SEQ ID NO: 2486114 - DNA, 25 bp, Homo sapien
agggggagccaatgccacgccagta

SEQ ID NO: 2486115 - DNA, 25 bp, Homo sapien
cacgacaagccaaagaggatgtcat

SEQ ID NO: 2486116 - DNA, 25 bp, Homo sapien
tttcttcacacgacaagccaaagag

SEQ ID NO: 2486117 - DNA, 25 bp, Homo sapien
cactttcttcacacgacaagccaaa

SEQ ID NO: 2486118 - DNA, 25 bp, Homo sapien
ttcacacgacaagccaaagaggatg

SEQ ID NO: 2486119 - DNA, 25 bp, Homo sapien
aatggcagtcagctgatgttaaagg

SEQ ID NO: 2486120 - DNA, 25 bp, Homo sapien
attaccaatgtagtttggatctttt

SEQ ID NO: 2486121 - DNA, 25 bp, Homo sapien
taccaatgtagtttggatcttttat

SEQ ID NO: 2486122 - DNA, 25 bp, Homo sapien
ccaatgtagtttggatcttttattc

SEQ ID NO: 2486123 - DNA, 25 bp, Homo sapien
caatgtagtttggatcttttattct

SEQ ID NO: 2486124 - DNA, 25 bp, Homo sapien
tgttgaaccagtccagtctccgtga

SEQ ID NO: 2486125 - DNA, 25 bp, Homo sapien
tgaacaggtaagtagcctcacactg

SEQ ID NO: 2486126 - DNA, 25 bp, Homo sapien
taagaaggtatcaggccattaagtg

SEQ ID NO: 2486127 - DNA, 25 bp, Homo sapien
gattatcacattgcagtcgtttcag

SEQ ID NO: 2486128 - DNA, 25 bp, Homo sapien
gaaaagggtatggtacgacaggaga

SEQ ID NO: 2486129 - DNA, 25 bp, Homo sapien
gaaggacagtacaggcaatcagtga

SEQ ID NO: 2486130 - DNA, 25 bp, Homo sapien
ggtatggtacgacaggagaaggaca

SEQ ID NO: 2486131 - DNA, 25 bp, Homo sapien
gatacacacgaactgtcttgatttg

SEQ ID NO: 2486132 - DNA, 25 bp, Homo sapien
tggaagcagcgagggaaaatttaag

SEQ ID NO: 2486133 - DNA, 25 bp, Homo sapien
gaaaaaatataccagcctcctctgg

SEQ ID NO: 2486134 - DNA, 25 bp, Homo sapien
ggagatgcaatggtagtgttcccat

SEQ ID NO: 2486135 - DNA, 25 bp, Homo sapien
aacttgatacttctctcgttgttga

SEQ ID NO: 2486136 - DNA, 25 bp, Homo sapien
tccaatttgattgatgccaacctga

SEQ ID NO: 2486137 - DNA, 25 bp, Homo sapien
caataatgtataattcatgtgcttc

SEQ ID NO: 2486138 - DNA, 25 bp, Homo sapien
ttgattgatgccaacctgaatcatg

SEQ ID NO: 2486139 - DNA, 25 bp, Homo sapien
taatgtataattcatgtgcttccaa

SEQ ID NO: 2486140 - DNA, 25 bp, Homo sapien
tctgctctggcaaataagtaattgg

SEQ ID NO: 2486141 - DNA, 25 bp, Homo sapien
agtaattggtttgatcttccttcgc

SEQ ID NO: 2486142 - DNA, 25 bp, Homo sapien
gatcttccttcgcttattcctctct

SEQ ID NO: 2486143 - DNA, 25 bp, Homo sapien
agccttcttttgttcctagaaatct

SEQ ID NO: 2486144 - DNA, 25 bp, Homo sapien
tccttaaagactgtcaataattacc

SEQ ID NO: 2486145 - DNA, 25 bp, Homo sapien
ttgactatgatactactactgtgca

SEQ ID NO: 2486146 - DNA, 25 bp, Homo sapien
ccaatacttgaaatatatgactata

SEQ ID NO: 2486147 - DNA, 25 bp, Homo sapien
tggcaggatattgtgaaaagacttc

SEQ ID NO: 2486148 - DNA, 25 bp, Homo sapien
cactgaatagactatgatatagtgt

SEQ ID NO: 2486149 - DNA, 25 bp, Homo sapien
cataggctattccacactgaataga

SEQ ID NO: 2486150 - DNA, 25 bp, Homo sapien
ggaattgaacaatgaaatatgatag

SEQ ID NO: 2486151 - DNA, 25 bp, Homo sapien
agacataggctattccacactgaat

SEQ ID NO: 2486152 - DNA, 25 bp, Homo sapien
gaggcgaatcggctgcggtttgctg

SEQ ID NO: 2486153 - DNA, 25 bp, Homo sapien
cggtttgctgggaacggagggctgc

SEQ ID NO: 2486154 - DNA, 25 bp, Homo sapien
tcacccgttgacagcgaggcgaatc

SEQ ID NO: 2486155 - DNA, 25 bp, Homo sapien
tgctgggaacggagggctgcagcgc

SEQ ID NO: 2486156 - DNA, 25 bp, Homo sapien
agcgcctcgcgtgctttcggccagg

SEQ ID NO: 2486157 - DNA, 25 bp, Homo sapien
ggcaaggagcgcctcgcgtgctttc

SEQ ID NO: 2486158 - DNA, 25 bp, Homo sapien
gtgctttcggccaggaggtgctcac

SEQ ID NO: 2486159 - DNA, 25 bp, Homo sapien
ggtcctgggcaaggagcgcctcgcg

SEQ ID NO: 2486160 - DNA, 25 bp, Homo sapien
ccctagggtggcgtggcttcattgc

SEQ ID NO: 2486161 - DNA, 25 bp, Homo sapien
ttttacaccgagactcagcgtggcg

SEQ ID NO: 2486162 - DNA, 25 bp, Homo sapien
gctcacgggactccgagggctgctt

SEQ ID NO: 2486163 - DNA, 25 bp, Homo sapien
tccagtgcggcgtgtctctagtgcg

SEQ ID NO: 2486164 - DNA, 25 bp, Homo sapien
cctgttttctcagcggatgctgcat

SEQ ID NO: 2486165 - DNA, 25 bp, Homo sapien
gcctgttttctcagcggatgctgca

SEQ ID NO: 2486166 - DNA, 25 bp, Homo sapien
gcctggttcctgctccatcacttga

SEQ ID NO: 2486167 - DNA, 25 bp, Homo sapien
cttgactctgttggatcttggcatc

SEQ ID NO: 2486168 - DNA, 25 bp, Homo sapien
ctatcttgcaccctggcctggttcc

SEQ ID NO: 2486169 - DNA, 25 bp, Homo sapien
atcacttgactctgttggatcttgg

SEQ ID NO: 2486170 - DNA, 25 bp, Homo sapien
tcatcaaaacttaggctttcccttg

SEQ ID NO: 2486171 - DNA, 25 bp, Homo sapien
atactgtgtagaccagatcagaatc

SEQ ID NO: 2486172 - DNA, 25 bp, Homo sapien
aaatggttaatctagatggctctcc

SEQ ID NO: 2486173 - DNA, 25 bp, Homo sapien
tggttcatagatttgaccctaaggg

SEQ ID NO: 2486174 - DNA, 25 bp, Homo sapien
tttgtagtcaccagaggtagggatg

SEQ ID NO: 2486175 - DNA, 25 bp, Homo sapien
taaatgtgcaaaacactggtgtggc

SEQ ID NO: 2486176 - DNA, 25 bp, Homo sapien
aatacaaacaattactggggtatgg

SEQ ID NO: 2486177 - DNA, 25 bp, Homo sapien
atacaaacaattactggggtatggt

SEQ ID NO: 2486178 - DNA, 25 bp, Homo sapien
acaaacaattactggggtatggtgg

SEQ ID NO: 2486179 - DNA, 25 bp, Homo sapien
cgttgagctgagcaaaagtagactc

SEQ ID NO: 2486180 - DNA, 25 bp, Homo sapien
gaaatcagcaatacaagagccaaag

SEQ ID NO: 2486181 - DNA, 25 bp, Homo sapien
tgttagcattccaaataggctgtcc

SEQ ID NO: 2486182 - DNA, 25 bp, Homo sapien
taatttggtacccaccaggtagtca

SEQ ID NO: 2486183 - DNA, 25 bp, Homo sapien
cagatttgtcaagaaatgtaacctc

SEQ ID NO: 2486184 - DNA, 25 bp, Homo sapien
cactgcttaagcatgtggctcatat

SEQ ID NO: 2486185 - DNA, 25 bp, Homo sapien
ggtgagattgcacctggataccagg

SEQ ID NO: 2486186 - DNA, 25 bp, Homo sapien
tcttgaattctctgaaaaggcacat

SEQ ID NO: 2486187 - DNA, 25 bp, Homo sapien
tctgaggttggagttagcaggaaaa

SEQ ID NO: 2486188 - DNA, 25 bp, Homo sapien
acataattacttcaatatgactctt

SEQ ID NO: 2486189 - DNA, 25 bp, Homo sapien
taattacttcaatatgactcttttt

SEQ ID NO: 2486190 - DNA, 25 bp, Homo sapien
tgagtcaggcataatacattttttc

SEQ ID NO: 2486191 - DNA, 25 bp, Homo sapien
ttgtctatttgttctgtagagaaaa

SEQ ID NO: 2486192 - DNA, 25 bp, Homo sapien
tctttgtctatttgttctgtagaga

SEQ ID NO: 2486193 - DNA, 25 bp, Homo sapien
attcacctctttgtctatttgttct

SEQ ID NO: 2486194 - DNA, 25 bp, Homo sapien
cctacaccgtagcttatttttcaag

SEQ ID NO: 2486195 - DNA, 25 bp, Homo sapien
tgggtgggccctaaaaacatctgta

SEQ ID NO: 2486196 - DNA, 25 bp, Homo sapien
ccatagcatagtcttgaggagaaca

SEQ ID NO: 2486197 - DNA, 25 bp, Homo sapien
aaccgacacccgtatgctaagactg

SEQ ID NO: 2486198 - DNA, 25 bp, Homo sapien
tggttagattcagccaaaccgacac

SEQ ID NO: 2486199 - DNA, 25 bp, Homo sapien
gaatgagcgggatgaggcagatacg

SEQ ID NO: 2486200 - DNA, 25 bp, Homo sapien
ttctcattactgagaatgaaaggca

SEQ ID NO: 2486201 - DNA, 25 bp, Homo sapien
aatgagcgggatgaggcagatacgc

SEQ ID NO: 2486202 - DNA, 25 bp, Homo sapien
gttctcattactgagaatgaaaggc

SEQ ID NO: 2486203 - DNA, 25 bp, Homo sapien
taatcttgctctgcacatgctacct

SEQ ID NO: 2486204 - DNA, 25 bp, Homo sapien
ggagctgttatggtcagataagcag

SEQ ID NO: 2486205 - DNA, 25 bp, Homo sapien
ggaagggactgcttatctctaggag

SEQ ID NO: 2486206 - DNA, 25 bp, Homo sapien
gcacatgctacctttgcagagccaa

SEQ ID NO: 2486207 - DNA, 25 bp, Homo sapien
tgaagaggtaggtggaaatagggcc

SEQ ID NO: 2486208 - DNA, 25 bp, Homo sapien
tcttctacttgtattggtattttgt

SEQ ID NO: 2486209 - DNA, 25 bp, Homo sapien
taggtggaaatagggccagagtcat

SEQ ID NO: 2486210 - DNA, 25 bp, Homo sapien
ttttgttgtgctcggaaaatttgaa

SEQ ID NO: 2486211 - DNA, 25 bp, Homo sapien
tgtcactggtacctcggtagaaatg

SEQ ID NO: 2486212 - DNA, 25 bp, Homo sapien
ggtacctcggtagaaatgtcctcca

SEQ ID NO: 2486213 - DNA, 25 bp, Homo sapien
actggtacctcggtagaaatgtcct

SEQ ID NO: 2486214 - DNA, 25 bp, Homo sapien
tcactggtacctcggtagaaatgtc

SEQ ID NO: 2486215 - DNA, 25 bp, Homo sapien
tcattagcattagcaagttccagtc

SEQ ID NO: 2486216 - DNA, 25 bp, Homo sapien
tggggagaaaattcctagctaaata

SEQ ID NO: 2486217 - DNA, 25 bp, Homo sapien
gaaaattcctagctaaatagaataa

SEQ ID NO: 2486218 - DNA, 25 bp, Homo sapien
gtctcatagcaacccagatctgatg

SEQ ID NO: 2486219 - DNA, 25 bp, Homo sapien
cttccctactatactcctcaaatcc

SEQ ID NO: 2486220 - DNA, 25 bp, Homo sapien
tccctactatactcctcaaatccat

SEQ ID NO: 2486221 - DNA, 25 bp, Homo sapien
ttccctactatactcctcaaatcca

SEQ ID NO: 2486222 - DNA, 25 bp, Homo sapien
gctgatccttcccatgacttactct

SEQ ID NO: 2486223 - DNA, 25 bp, Homo sapien
ctgacccatggattacttactactg

SEQ ID NO: 2486224 - DNA, 25 bp, Homo sapien
gaagaggcgtccttcttcccctcca

SEQ ID NO: 2486225 - DNA, 25 bp, Homo sapien
catggattacttactactgctacca

SEQ ID NO: 2486226 - DNA, 25 bp, Homo sapien
tgattcagttggtatgtcagtgtca

SEQ ID NO: 2486227 - DNA, 25 bp, Homo sapien
ggcacggtacaaggagggcaatcac

SEQ ID NO: 2486228 - DNA, 25 bp, Homo sapien
tgaccaaggagtgattcagttggta

SEQ ID NO: 2486229 - DNA, 25 bp, Homo sapien
gagggcaatcactgaccagaagatc

SEQ ID NO: 2486230 - DNA, 25 bp, Homo sapien
acagggaagtgtcgtcataggttat

SEQ ID NO: 2486231 - DNA, 25 bp, Homo sapien
acacagagccatacaaaataggaag

SEQ ID NO: 2486232 - DNA, 25 bp, Homo sapien
cctctccctcctgaaggttagataa

SEQ ID NO: 2486233 - DNA, 25 bp, Homo sapien
tattgagattggacttttgggacag

SEQ ID NO: 2486234 - DNA, 25 bp, Homo sapien
tgctctccccagtggttgaacttat

SEQ ID NO: 2486235 - DNA, 25 bp, Homo sapien
ccaccaatagtgtagaagtgtttca

SEQ ID NO: 2486236 - DNA, 25 bp, Homo sapien
gcctgtttctatgtctgagatggta

SEQ ID NO: 2486237 - DNA, 25 bp, Homo sapien
tatatatatgcttttgggcgcatgt

SEQ ID NO: 2486238 - DNA, 25 bp, Homo sapien
gacatgattcccagtagaaggtgga

SEQ ID NO: 2486239 - DNA, 25 bp, Homo sapien
gtcttagctagaacaggatctacat

SEQ ID NO: 2486240 - DNA, 25 bp, Homo sapien
taatgggctctggtctattgcctga

SEQ ID NO: 2486241 - DNA, 25 bp, Homo sapien
gatctacattaaggatatggacatg

SEQ ID NO: 2486242 - DNA, 25 bp, Homo sapien
tgtgtcctactactgaaatccaaat

SEQ ID NO: 2486243 - DNA, 25 bp, Homo sapien
tcctaaagctctaagtaaaggcatg

SEQ ID NO: 2486244 - DNA, 25 bp, Homo sapien
ggcatgagttccaatggtccctcca

SEQ ID NO: 2486245 - DNA, 25 bp, Homo sapien
ccctccagataaggccccatgaaaa

SEQ ID NO: 2486246 - DNA, 25 bp, Homo sapien
aactatgtgaacaccattccacagg

SEQ ID NO: 2486247 - DNA, 25 bp, Homo sapien
cacttagggcactggcgaaaattca

SEQ ID NO: 2486248 - DNA, 25 bp, Homo sapien
agcaagatctaactatgctagctgc

SEQ ID NO: 2486249 - DNA, 25 bp, Homo sapien
tctcaattactcaagacaaggcaaa

SEQ ID NO: 2486250 - DNA, 25 bp, Homo sapien
gaagctctagcaacaataccttgta

SEQ ID NO: 2486251 - DNA, 25 bp, Homo sapien
acaataccttgtacctttctcagag

SEQ ID NO: 2486252 - DNA, 25 bp, Homo sapien
aggaagctctagcaacaataccttg

SEQ ID NO: 2486253 - DNA, 25 bp, Homo sapien
aacaataccttgtacctttctcaga

SEQ ID NO: 2486254 - DNA, 25 bp, Homo sapien
gttggcattgctgccattgttggta

SEQ ID NO: 2486255 - DNA, 25 bp, Homo sapien
aacactgaatcccaatcttgccacc

SEQ ID NO: 2486256 - DNA, 25 bp, Homo sapien
gaatcccaatcttgccaccataggc

SEQ ID NO: 2486257 - DNA, 25 bp, Homo sapien
aatcttgccaccataggcatcattg

SEQ ID NO: 2486258 - DNA, 25 bp, Homo sapien
tgccaccataggcatcattgctcca

SEQ ID NO: 2486259 - DNA, 25 bp, Homo sapien
accattaacacagctgacacaaata

SEQ ID NO: 2486260 - DNA, 25 bp, Homo sapien
cacagctgacacaaatatcttaatt

SEQ ID NO: 2486261 - DNA, 25 bp, Homo sapien
tcttaatttgaaagctatatctatt

SEQ ID NO: 2486262 - DNA, 25 bp, Homo sapien
ttaacacagctgacacaaatatctt

SEQ ID NO: 2486263 - DNA, 25 bp, Homo sapien
gaaagaggagggaaatccgtaatga

SEQ ID NO: 2486264 - DNA, 25 bp, Homo sapien
aatgaattcttcaagagaatatcat

SEQ ID NO: 2486265 - DNA, 25 bp, Homo sapien
aagaggagggaaatccgtaatgaat

SEQ ID NO: 2486266 - DNA, 25 bp, Homo sapien
tgtgtttacagtgttggtgctattg

SEQ ID NO: 2486267 - DNA, 25 bp, Homo sapien
ccatgagggaagttgtggccttagc

SEQ ID NO: 2486268 - DNA, 25 bp, Homo sapien
gaagttgtggccttagcttttgtgt

SEQ ID NO: 2486269 - DNA, 25 bp, Homo sapien
gtgctattgtagtggccatggagct

SEQ ID NO: 2486270 - DNA, 25 bp, Homo sapien
tacgcatgaggcattgatgtgtgct

SEQ ID NO: 2486271 - DNA, 25 bp, Homo sapien
ctctgcagctatggagccaacacgt

SEQ ID NO: 2486272 - DNA, 25 bp, Homo sapien
tatagagtggccagagttccaaagc

SEQ ID NO: 2486273 - DNA, 25 bp, Homo sapien
ccaacacgtagagcacaggcattta

SEQ ID NO: 2486274 - DNA, 25 bp, Homo sapien
ctttctcgatgggatcatcatcagc

SEQ ID NO: 2486275 - DNA, 25 bp, Homo sapien
ggctctttctcgatgggatcatcat

SEQ ID NO: 2486276 - DNA, 25 bp, Homo sapien
ttctcgatgggatcatcatcagctt

SEQ ID NO: 2486277 - DNA, 25 bp, Homo sapien
gtggctctttctcgatgggatcatc

SEQ ID NO: 2486278 - DNA, 25 bp, Homo sapien
attgatagtctcttcctttgttctt

SEQ ID NO: 2486279 - DNA, 25 bp, Homo sapien
tcttcctttgttctttgtccctagc

SEQ ID NO: 2486280 - DNA, 25 bp, Homo sapien
tctcttcctttgttctttgtcccta

SEQ ID NO: 2486281 - DNA, 25 bp, Homo sapien
tcctttgttctttgtccctagccac

SEQ ID NO: 2486282 - DNA, 25 bp, Homo sapien
agacctctcaggtaagtcagtgtcc

SEQ ID NO: 2486283 - DNA, 25 bp, Homo sapien
ctccagacctctcaggtaagtcagt

SEQ ID NO: 2486284 - DNA, 25 bp, Homo sapien
gtcctcagtgaccatttcttcgtca

SEQ ID NO: 2486285 - DNA, 25 bp, Homo sapien
agtcagtgtcctcagtgaccatttc

SEQ ID NO: 2486286 - DNA, 25 bp, Homo sapien
aataccatcaagtgctcattattgg

SEQ ID NO: 2486287 - DNA, 25 bp, Homo sapien
tttcttcttgttcacctaataccat

SEQ ID NO: 2486288 - DNA, 25 bp, Homo sapien
cattattgggtcttccagtggagcc

SEQ ID NO: 2486289 - DNA, 25 bp, Homo sapien
ttcttgttcacctaataccatcaag

SEQ ID NO: 2486290 - DNA, 25 bp, Homo sapien
gaagatgccagtatgtcacaaatgc

SEQ ID NO: 2486291 - DNA, 25 bp, Homo sapien
tgtcacaaatgcctggtcaaaccca

SEQ ID NO: 2486292 - DNA, 25 bp, Homo sapien
aggcagataagaagatgccagtatg

SEQ ID NO: 2486293 - DNA, 25 bp, Homo sapien
agtatgtcacaaatgcctggtcaaa

SEQ ID NO: 2486294 - DNA, 25 bp, Homo sapien
tgtgacataagagattgtgccctca

SEQ ID NO: 2486295 - DNA, 25 bp, Homo sapien
gaacctactttgacacataagcact

SEQ ID NO: 2486296 - DNA, 25 bp, Homo sapien
taccctgattgagtctatgtactga

SEQ ID NO: 2486297 - DNA, 25 bp, Homo sapien
tgatcgaggttcacaagctaacttt

SEQ ID NO: 2486298 - DNA, 25 bp, Homo sapien
gttgatgaaagggatacacttcaga

SEQ ID NO: 2486299 - DNA, 25 bp, Homo sapien
cagaagcgttctgcttctcgtgttt

SEQ ID NO: 2486300 - DNA, 25 bp, Homo sapien
gagcagccgtgtccacagaagcgtt

SEQ ID NO: 2486301 - DNA, 25 bp, Homo sapien
atagttgatgaaagggatacacttc

SEQ ID NO: 2486302 - DNA, 25 bp, Homo sapien
tcagtgtatttacggttgtcattgc

SEQ ID NO: 2486303 - DNA, 25 bp, Homo sapien
tacggttgtcattgcatctgctaaa

SEQ ID NO: 2486304 - DNA, 25 bp, Homo sapien
ttgtagcctcagtgtatttacggtt

SEQ ID NO: 2486305 - DNA, 25 bp, Homo sapien
tcattgcatctgctaaaatatccat

SEQ ID NO: 2486306 - DNA, 25 bp, Homo sapien
gaagaggagggttataaagcacaaa

SEQ ID NO: 2486307 - DNA, 25 bp, Homo sapien
tccactatcatagaagatggtcaag

SEQ ID NO: 2486308 - DNA, 25 bp, Homo sapien
cacaaagactactataatgggagga

SEQ ID NO: 2486309 - DNA, 25 bp, Homo sapien
cttgagctgataatggttgtgaaac

SEQ ID NO: 2486310 - DNA, 25 bp, Homo sapien
ttccttcaggatgattcacttcctg

SEQ ID NO: 2486311 - DNA, 25 bp, Homo sapien
cttaggctcaacagtttcaggcaga

SEQ ID NO: 2486312 - DNA, 25 bp, Homo sapien
taggctcaacagtttcaggcagagg

SEQ ID NO: 2486313 - DNA, 25 bp, Homo sapien
aggctcaacagtttcaggcagaggc

SEQ ID NO: 2486314 - DNA, 25 bp, Homo sapien
gcaacatatatgtttctaaatccga

SEQ ID NO: 2486315 - DNA, 25 bp, Homo sapien
gcttgaaatgttgatctcgatacgc

SEQ ID NO: 2486316 - DNA, 25 bp, Homo sapien
aaactctcaccacagacacaagcaa

SEQ ID NO: 2486317 - DNA, 25 bp, Homo sapien
gatacgcgacgatggaaactctcac

SEQ ID NO: 2486318 - DNA, 25 bp, Homo sapien
tagactagtgacgtgtagcagttta

SEQ ID NO: 2486319 - DNA, 25 bp, Homo sapien
gatcgaacaagcagttcaatttgta

SEQ ID NO: 2486320 - DNA, 25 bp, Homo sapien
tagtgacgtgtagcagtttagaagt

SEQ ID NO: 2486321 - DNA, 25 bp, Homo sapien
gagtagatcgaacaagcagttcaat

SEQ ID NO: 2486322 - DNA, 25 bp, Homo sapien
ctcgatcagtcttctgtttccccat

SEQ ID NO: 2486323 - DNA, 25 bp, Homo sapien
cctcgatcagtcttctgtttcccca

SEQ ID NO: 2486324 - DNA, 25 bp, Homo sapien
gagacatgaaaaaccgttcaaatat

SEQ ID NO: 2486325 - DNA, 25 bp, Homo sapien
atgaaatgccctatcaaaaacccag

SEQ ID NO: 2486326 - DNA, 25 bp, Homo sapien
aagatctcaaattgacatcctaaaa

SEQ ID NO: 2486327 - DNA, 25 bp, Homo sapien
gagcaaacgaaccacaaaactagca

SEQ ID NO: 2486328 - DNA, 25 bp, Homo sapien
gtgcttttcactttacaccaagatt

SEQ ID NO: 2486329 - DNA, 25 bp, Homo sapien
tgcttttcactttacaccaagattg

SEQ ID NO: 2486330 - DNA, 25 bp, Homo sapien
aggggagttttccagcacacgttct

SEQ ID NO: 2486331 - DNA, 25 bp, Homo sapien
gggagttttccagcacacgttctct

SEQ ID NO: 2486332 - DNA, 25 bp, Homo sapien
ttcagcaaatatctagccaagaagt

SEQ ID NO: 2486333 - DNA, 25 bp, Homo sapien
caagttccctctctggtgcactgag

SEQ ID NO: 2486334 - DNA, 25 bp, Homo sapien
ctttgtagagatatctccttctgcc

SEQ ID NO: 2486335 - DNA, 25 bp, Homo sapien
caagaagtaggataccagttttctc

SEQ ID NO: 2486336 - DNA, 25 bp, Homo sapien
caactgtgtgagtggcaaaatccag

SEQ ID NO: 2486337 - DNA, 25 bp, Homo sapien
actgtgtgagtggcaaaatccagag

SEQ ID NO: 2486338 - DNA, 25 bp, Homo sapien
aactgtgtgagtggcaaaatccaga

SEQ ID NO: 2486339 - DNA, 25 bp, Homo sapien
ttctcaatcccataggaaaagatag

SEQ ID NO: 2486340 - DNA, 25 bp, Homo sapien
gcctttgcgcttttggtgagtttgg

SEQ ID NO: 2486341 - DNA, 25 bp, Homo sapien
gaactgtgttccatcctatgtaaaa

SEQ ID NO: 2486342 - DNA, 25 bp, Homo sapien
ggcaaaagttgctatttcaacagcc

SEQ ID NO: 2486343 - DNA, 25 bp, Homo sapien
ccagaattattgttaggttcgtatt

SEQ ID NO: 2486344 - DNA, 25 bp, Homo sapien
tattgttaggttcgtattcttctgt

SEQ ID NO: 2486345 - DNA, 25 bp, Homo sapien
cttctgtaactggtagtagacattg

SEQ ID NO: 2486346 - DNA, 25 bp, Homo sapien
tattcttctgtaactggtagtagac

SEQ ID NO: 2486347 - DNA, 25 bp, Homo sapien
cgatgggctgtaatactggtttgcc

SEQ ID NO: 2486348 - DNA, 25 bp, Homo sapien
tgcctccaccagatgttgctgtact

SEQ ID NO: 2486349 - DNA, 25 bp, Homo sapien
tataggccacaaccatggcagtaga

SEQ ID NO: 2486350 - DNA, 25 bp, Homo sapien
atacctgtcagccattccgatgggc

SEQ ID NO: 2486351 - DNA, 25 bp, Homo sapien
tggatactgttgctgtctgcaggca

SEQ ID NO: 2486352 - DNA, 25 bp, Homo sapien
tccaatagcatctaccctggtgaac

SEQ ID NO: 2486353 - DNA, 25 bp, Homo sapien
tcagcatgtacgatttccaatagca

SEQ ID NO: 2486354 - DNA, 25 bp, Homo sapien
ccctggtgaactaatacatggatac

SEQ ID NO: 2486355 - DNA, 25 bp, Homo sapien
atccacattggaggcttaagtggag

SEQ ID NO: 2486356 - DNA, 25 bp, Homo sapien
aaatccacattggaggcttaagtgg

SEQ ID NO: 2486357 - DNA, 25 bp, Homo sapien
cattggaggcttaagtggagatttt

SEQ ID NO: 2486358 - DNA, 25 bp, Homo sapien
cacattggaggcttaagtggagatt

SEQ ID NO: 2486359 - DNA, 25 bp, Homo sapien
ggaagcacaggcgcaactgttccat

SEQ ID NO: 2486360 - DNA, 25 bp, Homo sapien
tctcctgtcactcgtggggatctag

SEQ ID NO: 2486361 - DNA, 25 bp, Homo sapien
ctaggagtggagatcaatgctgcca

SEQ ID NO: 2486362 - DNA, 25 bp, Homo sapien
cctgtcactcgtggggatctaggag

SEQ ID NO: 2486363 - DNA, 25 bp, Homo sapien
ttctcctgtcactcgtggggatcta

SEQ ID NO: 2486364 - DNA, 25 bp, Homo sapien
tccaacattacatttaaccaagatc

SEQ ID NO: 2486365 - DNA, 25 bp, Homo sapien
tagattgtacccgtaggactatgtt

SEQ ID NO: 2486366 - DNA, 25 bp, Homo sapien
tatgttcgtggatatcctttccaac

SEQ ID NO: 2486367 - DNA, 25 bp, Homo sapien
ccgtaggactatgttcgtggatatc

SEQ ID NO: 2486368 - DNA, 25 bp, Homo sapien
ttgtgtagctctgagagtatcctgt

SEQ ID NO: 2486369 - DNA, 25 bp, Homo sapien
cctgaattgtgtagctctgagagta

SEQ ID NO: 2486370 - DNA, 25 bp, Homo sapien
gaattgtgtagctctgagagtatcc

SEQ ID NO: 2486371 - DNA, 25 bp, Homo sapien
gtgcctgaattgtgtagctctgaga

SEQ ID NO: 2486372 - DNA, 25 bp, Homo sapien
ttggtgataccagtgcctgcatcgc

SEQ ID NO: 2486373 - DNA, 25 bp, Homo sapien
agtaatagaagggttggtgatacca

SEQ ID NO: 2486374 - DNA, 25 bp, Homo sapien
gaatagagagagtagtaatagaagg

SEQ ID NO: 2486375 - DNA, 25 bp, Homo sapien
cacaaggaattttggtagggcttca

SEQ ID NO: 2486376 - DNA, 25 bp, Homo sapien
gaatactttcaatatacacaataaa

SEQ ID NO: 2486377 - DNA, 25 bp, Homo sapien
taagatctacagaactatacgtatg

SEQ ID NO: 2486378 - DNA, 25 bp, Homo sapien
cgtatgcaaggacccaaaaccgagt

SEQ ID NO: 2486379 - DNA, 25 bp, Homo sapien
tcacagataatagaaactaagatct

SEQ ID NO: 2486380 - DNA, 25 bp, Homo sapien
ttggtggtcatctttagtgactgcc

SEQ ID NO: 2486381 - DNA, 25 bp, Homo sapien
ggtggtcatctttagtgactgccat

SEQ ID NO: 2486382 - DNA, 25 bp, Homo sapien
tggtggtcatctttagtgactgcca

SEQ ID NO: 2486383 - DNA, 25 bp, Homo sapien
cttggtggtcatctttagtgactgc

SEQ ID NO: 2486384 - DNA, 25 bp, Homo sapien
caaatgtgttcagtttatctgggga

SEQ ID NO: 2486385 - DNA, 25 bp, Homo sapien
tcaatgcttgtcaaatgtgttcagt

SEQ ID NO: 2486386 - DNA, 25 bp, Homo sapien
gaatccataggtcttgctgtcccct

SEQ ID NO: 2486387 - DNA, 25 bp, Homo sapien
atccataggtcttgctgtcccctca

SEQ ID NO: 2486388 - DNA, 25 bp, Homo sapien
aatccataggtcttgctgtcccctc

SEQ ID NO: 2486389 - DNA, 25 bp, Homo sapien
agaataaacttcaggtagcacagct

SEQ ID NO: 2486390 - DNA, 25 bp, Homo sapien
ccagaagcttgtaaggtcttgcaca

SEQ ID NO: 2486391 - DNA, 25 bp, Homo sapien
taaggtcttgcacatgtttctctgc

SEQ ID NO: 2486392 - DNA, 25 bp, Homo sapien
gaataaacttcaggtagcacagctg

SEQ ID NO: 2486393 - DNA, 25 bp, Homo sapien
gatgaaatcatttatttcaccctct

SEQ ID NO: 2486394 - DNA, 25 bp, Homo sapien
aaatcatttatttcaccctcttcag

SEQ ID NO: 2486395 - DNA, 25 bp, Homo sapien
tcactggaatgtagaaaggatgaaa

SEQ ID NO: 2486396 - DNA, 25 bp, Homo sapien
catttatttcaccctcttcagcagt

SEQ ID NO: 2486397 - DNA, 25 bp, Homo sapien
tacagtgtaggagccattctccaat

SEQ ID NO: 2486398 - DNA, 25 bp, Homo sapien
gacttatttacagtgtaggagccat

SEQ ID NO: 2486399 - DNA, 25 bp, Homo sapien
ggagccattctccaatggctgatta

SEQ ID NO: 2486400 - DNA, 25 bp, Homo sapien
gctgatgactcagcaggtaatgtac

SEQ ID NO: 2486401 - DNA, 25 bp, Homo sapien
tttgaatgcaatcagcgaggaacta

SEQ ID NO: 2486402 - DNA, 25 bp, Homo sapien
ttggagtattagaacaaataatggc

SEQ ID NO: 2486403 - DNA, 25 bp, Homo sapien
ggcatcacctgtactgattggctga

SEQ ID NO: 2486404 - DNA, 25 bp, Homo sapien
taagactaatgacagcaagggtggg

SEQ ID NO: 2486405 - DNA, 25 bp, Homo sapien
ccaggctttcttcccggatgcctgt

SEQ ID NO: 2486406 - DNA, 25 bp, Homo sapien
gatgcctgtgttcgaatctcttctt

SEQ ID NO: 2486407 - DNA, 25 bp, Homo sapien
cttttctgactaaggactttatctg

SEQ ID NO: 2486408 - DNA, 25 bp, Homo sapien
tttctgactaaggactttatctggc

SEQ ID NO: 2486409 - DNA, 25 bp, Homo sapien
caaaacaatcctctggtcagcagcc

SEQ ID NO: 2486410 - DNA, 25 bp, Homo sapien
tgggcagtagatttcctaggagaac

SEQ ID NO: 2486411 - DNA, 25 bp, Homo sapien
tcagattggccactcagccgtttca

SEQ ID NO: 2486412 - DNA, 25 bp, Homo sapien
ccttggcacttaactgactggacac

SEQ ID NO: 2486413 - DNA, 25 bp, Homo sapien
ttatatgttagatgcataatcttca

SEQ ID NO: 2486414 - DNA, 25 bp, Homo sapien
tatgctgattattctcttggtggca

SEQ ID NO: 2486415 - DNA, 25 bp, Homo sapien
agccaagttgctgcctaaatcttcc

SEQ ID NO: 2486416 - DNA, 25 bp, Homo sapien
ccacgtggccactatgttctaggat

SEQ ID NO: 2486417 - DNA, 25 bp, Homo sapien
ccactgaattctgttaggtccacgt

SEQ ID NO: 2486418 - DNA, 25 bp, Homo sapien
tcttatgacattcagcacatcgcgt

SEQ ID NO: 2486419 - DNA, 25 bp, Homo sapien
agtcaatgttatgcttctgagaagg

SEQ ID NO: 2486420 - DNA, 25 bp, Homo sapien
tgtgatttatgccatcataatgtga

SEQ ID NO: 2486421 - DNA, 25 bp, Homo sapien
cagaacacttcaaatgtaaagcaac

SEQ ID NO: 2486422 - DNA, 25 bp, Homo sapien
taccagttctttccatggattgctg

SEQ ID NO: 2486423 - DNA, 25 bp, Homo sapien
gattgctgcctgatacttatcgaag

SEQ ID NO: 2486424 - DNA, 25 bp, Homo sapien
gtctatgcctcccatgaaccagtta

SEQ ID NO: 2486425 - DNA, 25 bp, Homo sapien
gaacaagagagctcgaataccagtt

SEQ ID NO: 2486426 - DNA, 25 bp, Homo sapien
tgatcgataccagcaccagatgagg

SEQ ID NO: 2486427 - DNA, 25 bp, Homo sapien
cacaggtgatcgataccagcaccag

SEQ ID NO: 2486428 - DNA, 25 bp, Homo sapien
taccagcaccagatgaggcaaaagt

SEQ ID NO: 2486429 - DNA, 25 bp, Homo sapien
ctgacaagacacaggtgatcgatac

SEQ ID NO: 2486430 - DNA, 25 bp, Homo sapien
tcaccagtatattatgcgcatctgt

SEQ ID NO: 2486431 - DNA, 25 bp, Homo sapien
ggaaacgtggattcatcaaagctga

SEQ ID NO: 2486432 - DNA, 25 bp, Homo sapien
aataaggaaacgtggattcatcaaa

SEQ ID NO: 2486433 - DNA, 25 bp, Homo sapien
caccagtatattatgcgcatctgtt

SEQ ID NO: 2486434 - DNA, 25 bp, Homo sapien
catttgaatttggagctagtcaagc

SEQ ID NO: 2486435 - DNA, 25 bp, Homo sapien
tagtcaagccaagatgtacaccctt

SEQ ID NO: 2486436 - DNA, 25 bp, Homo sapien
cataggcactcagaaaaataattcc

SEQ ID NO: 2486437 - DNA, 25 bp, Homo sapien
tgagacataggcactcagaaaaata

SEQ ID NO: 2486438 - DNA, 25 bp, Homo sapien
ctcattttgctaaagaaaccttttg

SEQ ID NO: 2486439 - DNA, 25 bp, Homo sapien
tctaaaaggtcagttatttcatgta

SEQ ID NO: 2486440 - DNA, 25 bp, Homo sapien
tgtctctaaaaggtcagttatttca

SEQ ID NO: 2486441 - DNA, 25 bp, Homo sapien
ctgtctctaaaaggtcagttatttc

SEQ ID NO: 2486442 - DNA, 25 bp, Homo sapien
tctctaaaaggtcagttatttcatg

SEQ ID NO: 2486443 - DNA, 25 bp, Homo sapien
acaaagtattattagtcccagtggt

SEQ ID NO: 2486444 - DNA, 25 bp, Homo sapien
aaagtattattagtcccagtggtag

SEQ ID NO: 2486445 - DNA, 25 bp, Homo sapien
tattattagtcccagtggtagtcat

SEQ ID NO: 2486446 - DNA, 25 bp, Homo sapien
agtattattagtcccagtggtagtc

SEQ ID NO: 2486447 - DNA, 25 bp, Homo sapien
cataattaatcaagtcacagctgac

SEQ ID NO: 2486448 - DNA, 25 bp, Homo sapien
agtcagcagagatagtcattaaaag

SEQ ID NO: 2486449 - DNA, 25 bp, Homo sapien
tcacagctgacattgatccaaaggc

SEQ ID NO: 2486450 - DNA, 25 bp, Homo sapien
gatccaaaggcacaagtcagcagag

SEQ ID NO: 2486451 - DNA, 25 bp, Homo sapien
aatctctatatgctacttctgccca

SEQ ID NO: 2486452 - DNA, 25 bp, Homo sapien
aacctggtggaaatctctatatgct

SEQ ID NO: 2486453 - DNA, 25 bp, Homo sapien
cctggtggaaatctctatatgctac

SEQ ID NO: 2486454 - DNA, 25 bp, Homo sapien
ggaacctggtggaaatctctatatg

SEQ ID NO: 2486455 - DNA, 25 bp, Homo sapien
taatatgtacgtccctttagttcat

SEQ ID NO: 2486456 - DNA, 25 bp, Homo sapien
tagttcatcaacacgcatcaccagg

SEQ ID NO: 2486457 - DNA, 25 bp, Homo sapien
gatccacttgctgccaatccaaaga

SEQ ID NO: 2486458 - DNA, 25 bp, Homo sapien
ggtaacgagttctctttctatctgc

SEQ ID NO: 2486459 - DNA, 25 bp, Homo sapien
ggcacatggcaggacagcattgtgt

SEQ ID NO: 2486460 - DNA, 25 bp, Homo sapien
catggcaggacagcattgtgtttgt

SEQ ID NO: 2486461 - DNA, 25 bp, Homo sapien
ccaggactggccgagagggaggaac

SEQ ID NO: 2486462 - DNA, 25 bp, Homo sapien
gagggaggaacctgaatgaatccag

SEQ ID NO: 2486463 - DNA, 25 bp, Homo sapien
ccattgttgtctagtagctcagtgg

SEQ ID NO: 2486464 - DNA, 25 bp, Homo sapien
ttgtctagtagctcagtggttttct

SEQ ID NO: 2486465 - DNA, 25 bp, Homo sapien
gttgtctagtagctcagtggttttc

SEQ ID NO: 2486466 - DNA, 25 bp, Homo sapien
ttgttgtctagtagctcagtggttt

SEQ ID NO: 2486467 - DNA, 25 bp, Homo sapien
tctggtgcacaaagcacccagcatc

SEQ ID NO: 2486468 - DNA, 25 bp, Homo sapien
catctggtgcacaaagcacccagca

SEQ ID NO: 2486469 - DNA, 25 bp, Homo sapien
caatgtgctcatcatgaatgagagg

SEQ ID NO: 2486470 - DNA, 25 bp, Homo sapien
agtcatctggtgcacaaagcaccca

SEQ ID NO: 2486471 - DNA, 25 bp, Homo sapien
tcatggttccccttcaagcccagtg

SEQ ID NO: 2486472 - DNA, 25 bp, Homo sapien
agcccagtgtcaagttcccctgcag

SEQ ID NO: 2486473 - DNA, 25 bp, Homo sapien
ctgagcacttcatggttccccttca

SEQ ID NO: 2486474 - DNA, 25 bp, Homo sapien
agtagcagcacacacgtcttgccca

SEQ ID NO: 2486475 - DNA, 25 bp, Homo sapien
tgtgcaagaatgtttctgagatgac

SEQ ID NO: 2486476 - DNA, 25 bp, Homo sapien
ccagatatgggggtaacatcaggtc

SEQ ID NO: 2486477 - DNA, 25 bp, Homo sapien
tagactgtaggttgtagagtgtgca

SEQ ID NO: 2486478 - DNA, 25 bp, Homo sapien
gtaacatcaggtctagactgtaggt

SEQ ID NO: 2486479 - DNA, 25 bp, Homo sapien
attgtcaagaccaatcacctcaaac

SEQ ID NO: 2486480 - DNA, 25 bp, Homo sapien
aattctggaagtcattgtcaagacc

SEQ ID NO: 2486481 - DNA, 25 bp, Homo sapien
ggaaattctggaagtcattgtcaag

SEQ ID NO: 2486482 - DNA, 25 bp, Homo sapien
gtcaagaccaatcacctcaaacttt

SEQ ID NO: 2486483 - DNA, 25 bp, Homo sapien
ggctgtgtaagattggaaagcctca

SEQ ID NO: 2486484 - DNA, 25 bp, Homo sapien
gctgtgggctgtgtaagattggaaa

SEQ ID NO: 2486485 - DNA, 25 bp, Homo sapien
tacagctgtgggctgtgtaagattg

SEQ ID NO: 2486486 - DNA, 25 bp, Homo sapien
cctacagctgtgggctgtgtaagat

SEQ ID NO: 2486487 - DNA, 25 bp, Homo sapien
tcagggagtgcccctagcttccagg

SEQ ID NO: 2486488 - DNA, 25 bp, Homo sapien
tgcagaggtggtatcctttctccca

SEQ ID NO: 2486489 - DNA, 25 bp, Homo sapien
ggagtgcccctagcttccaggacca

SEQ ID NO: 2486490 - DNA, 25 bp, Homo sapien
gaccacacaccaggtcttctggagc

SEQ ID NO: 2486491 - DNA, 25 bp, Homo sapien
taatccccgaaacaatgctgaccat

SEQ ID NO: 2486492 - DNA, 25 bp, Homo sapien
aaaataatccccgaaacaatgctga

SEQ ID NO: 2486493 - DNA, 25 bp, Homo sapien
agcccaactgcctaatatgaactga

SEQ ID NO: 2486494 - DNA, 25 bp, Homo sapien
aactgcctaatatgaactgattatg

SEQ ID NO: 2486495 - DNA, 25 bp, Homo sapien
gctaccaacaatctgtaacacccag

SEQ ID NO: 2486496 - DNA, 25 bp, Homo sapien
ctgccccttcaccataaacaaatat

SEQ ID NO: 2486497 - DNA, 25 bp, Homo sapien
ccaccacttagagttctgtgtctag

SEQ ID NO: 2486498 - DNA, 25 bp, Homo sapien
atcatactccaccaccacttagagt

SEQ ID NO: 2486499 - DNA, 25 bp, Homo sapien
ctgtttatgaggctaactccagcac

SEQ ID NO: 2486500 - DNA, 25 bp, Homo sapien
cccagtttgtcacccttgaggagtt

SEQ ID NO: 2486501 - DNA, 25 bp, Homo sapien
cttaactcaggcatagcatctgctg

SEQ ID NO: 2486502 - DNA, 25 bp, Homo sapien
aagatctgctgcgtacagccctgga

SEQ ID NO: 2486503 - DNA, 25 bp, Homo sapien
cctgttcggtcagcaggttcaactt

SEQ ID NO: 2486504 - DNA, 25 bp, Homo sapien
gcaggttcaacttgattacagagct

SEQ ID NO: 2486505 - DNA, 25 bp, Homo sapien
tccccctgttcggtcagcaggttca

SEQ ID NO: 2486506 - DNA, 25 bp, Homo sapien
agcaggttcaacttgattacagagc

SEQ ID NO: 2486507 - DNA, 25 bp, Homo sapien
cttactggtgacacatctgtttgtc

SEQ ID NO: 2486508 - DNA, 25 bp, Homo sapien
ttactggtgacacatctgtttgtct

SEQ ID NO: 2486509 - DNA, 25 bp, Homo sapien
tcttactggtgacacatctgtttgt

SEQ ID NO: 2486510 - DNA, 25 bp, Homo sapien
tactggtgacacatctgtttgtctt

SEQ ID NO: 2486511 - DNA, 25 bp, Homo sapien
aaggctatatactccagctctttcc

SEQ ID NO: 2486512 - DNA, 25 bp, Homo sapien
tgttctctaggcattccaaggctat

SEQ ID NO: 2486513 - DNA, 25 bp, Homo sapien
gaggaattgcaatcataatgttctc

SEQ ID NO: 2486514 - DNA, 25 bp, Homo sapien
tcttgatccactcggttcttacaag

SEQ ID NO: 2486515 - DNA, 25 bp, Homo sapien
tcactgatggaggtattgtttctcc

SEQ ID NO: 2486516 - DNA, 25 bp, Homo sapien
ccttatgatgtggttctaaagcata

SEQ ID NO: 2486517 - DNA, 25 bp, Homo sapien
cactgatggaggtattgtttctcct

SEQ ID NO: 2486518 - DNA, 25 bp, Homo sapien
tgtttctccttatgatgtggttcta

SEQ ID NO: 2486519 - DNA, 25 bp, Homo sapien
cagcacaggtactttgtggttggtg

SEQ ID NO: 2486520 - DNA, 25 bp, Homo sapien
cataatcacacgattctgtcattga

SEQ ID NO: 2486521 - DNA, 25 bp, Homo sapien
tctctgggctacattaataacttct

SEQ ID NO: 2486522 - DNA, 25 bp, Homo sapien
cttgtgtctcataatcacacgattc

SEQ ID NO: 2486523 - DNA, 25 bp, Homo sapien
tctgtcattgatattctctgggcta

SEQ ID NO: 2486524 - DNA, 25 bp, Homo sapien
ttgttttgagaggtactcataagcc

SEQ ID NO: 2486525 - DNA, 25 bp, Homo sapien
cttgaagctttgagaggatagtgac

SEQ ID NO: 2486526 - DNA, 25 bp, Homo sapien
aatttgttttgagaggtactcataa

SEQ ID NO: 2486527 - DNA, 25 bp, Homo sapien
accataatgggtttcccaaagatca

SEQ ID NO: 2486528 - DNA, 25 bp, Homo sapien
ttaatcttcagatctttggttgtgg

SEQ ID NO: 2486529 - DNA, 25 bp, Homo sapien
gtggtaatacatgatatattccagg

SEQ ID NO: 2486530 - DNA, 25 bp, Homo sapien
taatacatgatatattccagggaca

SEQ ID NO: 2486531 - DNA, 25 bp, Homo sapien
taatcttcagatctttggttgtggt

SEQ ID NO: 2486532 - DNA, 25 bp, Homo sapien
caaccaaaggacctgtggagtggag

SEQ ID NO: 2486533 - DNA, 25 bp, Homo sapien
tgcttggggcaatgtacaagttgct

SEQ ID NO: 2486534 - DNA, 25 bp, Homo sapien
cacagaggaatgccaacaaccaaag

SEQ ID NO: 2486535 - DNA, 25 bp, Homo sapien
cctggttggttgctgccaaaaggat

SEQ ID NO: 2486536 - DNA, 25 bp, Homo sapien
ctttccgtattctggattcagatca

SEQ ID NO: 2486537 - DNA, 25 bp, Homo sapien
tcctttccgtattctggattcagat

SEQ ID NO: 2486538 - DNA, 25 bp, Homo sapien
tccgtattctggattcagatcactc

SEQ ID NO: 2486539 - DNA, 25 bp, Homo sapien
tattctggattcagatcactccaca

SEQ ID NO: 2486540 - DNA, 25 bp, Homo sapien
ttaaagtcaagatcaccaaagtggc

SEQ ID NO: 2486541 - DNA, 25 bp, Homo sapien
tctctgtttacagtcctctttttaa

SEQ ID NO: 2486542 - DNA, 25 bp, Homo sapien
ccccatacaatttctctctgtttac

SEQ ID NO: 2486543 - DNA, 25 bp, Homo sapien
gatcaccaaagtggcagctcagcat

SEQ ID NO: 2486544 - DNA, 25 bp, Homo sapien
tttcccccacaacgagagtcatcgg

SEQ ID NO: 2486545 - DNA, 25 bp, Homo sapien
cccaggtttctacatctgaaaagct

SEQ ID NO: 2486546 - DNA, 25 bp, Homo sapien
agttttcccccacaacgagagtcat

SEQ ID NO: 2486547 - DNA, 25 bp, Homo sapien
agctcaagttttcccccacaacgag

SEQ ID NO: 2486548 - DNA, 25 bp, Homo sapien
agattgcaacaacagcgaagaggaa

SEQ ID NO: 2486549 - DNA, 25 bp, Homo sapien
gattgcaacaacagcgaagaggaat

SEQ ID NO: 2486550 - DNA, 25 bp, Homo sapien
ttgcaacaacagcgaagaggaattc

SEQ ID NO: 2486551 - DNA, 25 bp, Homo sapien
attgcaacaacagcgaagaggaatt

SEQ ID NO: 2486552 - DNA, 25 bp, Homo sapien
gctaagatcttgtgcaaaagatggt

SEQ ID NO: 2486553 - DNA, 25 bp, Homo sapien
gatcttgtgcaaaagatggtggaga

SEQ ID NO: 2486554 - DNA, 25 bp, Homo sapien
taagatcttgtgcaaaagatggtgg

SEQ ID NO: 2486555 - DNA, 25 bp, Homo sapien
gagctaagatcttgtgcaaaagatg

SEQ ID NO: 2486556 - DNA, 25 bp, Homo sapien
cgtcctagcaccttttcattatcaa

SEQ ID NO: 2486557 - DNA, 25 bp, Homo sapien
tcctagcaccttttcattatcaaac

SEQ ID NO: 2486558 - DNA, 25 bp, Homo sapien
tcaaacatttcttcattgtgcacat

SEQ ID NO: 2486559 - DNA, 25 bp, Homo sapien
ctagcaccttttcattatcaaacat

SEQ ID NO: 2486560 - DNA, 25 bp, Homo sapien
atgctggtcaaatgatattgcttct

SEQ ID NO: 2486561 - DNA, 25 bp, Homo sapien
ctcaattgcttgtgtctgtcagatc

SEQ ID NO: 2486562 - DNA, 25 bp, Homo sapien
caattgcttgtgtctgtcagatcca

SEQ ID NO: 2486563 - DNA, 25 bp, Homo sapien
actctcaattgcttgtgtctgtcag

SEQ ID NO: 2486564 - DNA, 25 bp, Homo sapien
gccatactctcaattgcttgtgtct

SEQ ID NO: 2486565 - DNA, 25 bp, Homo sapien
taattgatgcagaaaccccagggca

SEQ ID NO: 2486566 - DNA, 25 bp, Homo sapien
tatatgggcctctatcctggaaacc

SEQ ID NO: 2486567 - DNA, 25 bp, Homo sapien
taatagaccaaagctccccaggata

SEQ ID NO: 2486568 - DNA, 25 bp, Homo sapien
tgaaggctacccattaacttgactg

SEQ ID NO: 2486569 - DNA, 25 bp, Homo sapien
tacaccatgccagaggaaaagttct

SEQ ID NO: 2486570 - DNA, 25 bp, Homo sapien
tagcaaatgaacataggacccagga

SEQ ID NO: 2486571 - DNA, 25 bp, Homo sapien
cacttgggatacagcttgcagaaac

SEQ ID NO: 2486572 - DNA, 25 bp, Homo sapien
taaagccatgtgtagtcccactagc

SEQ ID NO: 2486573 - DNA, 25 bp, Homo sapien
tcttggtcccactactacactcttt

SEQ ID NO: 2486574 - DNA, 25 bp, Homo sapien
aattgcaataatgccctgacttgtc

SEQ ID NO: 2486575 - DNA, 25 bp, Homo sapien
tggtcccactactacactctttatt

SEQ ID NO: 2486576 - DNA, 25 bp, Homo sapien
tttattccacctggtgtgtataatt

SEQ ID NO: 2486577 - DNA, 25 bp, Homo sapien
gatcatttagctataagtattttgc

SEQ ID NO: 2486578 - DNA, 25 bp, Homo sapien
tatagtgtacactctttgggtaatg

SEQ ID NO: 2486579 - DNA, 25 bp, Homo sapien
tacacagtgggtatagtgtacactc

SEQ ID NO: 2486580 - DNA, 25 bp, Homo sapien
tggcaaagcaagtaacctggatgga

SEQ ID NO: 2486581 - DNA, 25 bp, Homo sapien
taatactgaaccatgagagcaaagc

SEQ ID NO: 2486582 - DNA, 25 bp, Homo sapien
aatagccaatggtaagcagaacctc

SEQ ID NO: 2486583 - DNA, 25 bp, Homo sapien
gaagccaacattgctacttaatagg

SEQ ID NO: 2486584 - DNA, 25 bp, Homo sapien
taccataaatcatgggaagccaaca

SEQ ID NO: 2486585 - DNA, 25 bp, Homo sapien
tgttttcccaagcttgctgtccact

SEQ ID NO: 2486586 - DNA, 25 bp, Homo sapien
taattcagagacattctgttttccc

SEQ ID NO: 2486587 - DNA, 25 bp, Homo sapien
tctgttttcccaagcttgctgtcca

SEQ ID NO: 2486588 - DNA, 25 bp, Homo sapien
tttcccaagcttgctgtccacttac

SEQ ID NO: 2486589 - DNA, 25 bp, Homo sapien
ctagttgttttgactttattcccag

SEQ ID NO: 2486590 - DNA, 25 bp, Homo sapien
agctccatcctttccgatccggaag

SEQ ID NO: 2486591 - DNA, 25 bp, Homo sapien
tgttttgactttattcccagaggaa

SEQ ID NO: 2486592 - DNA, 25 bp, Homo sapien
tttgactttattcccagaggaacag

SEQ ID NO: 2486593 - DNA, 25 bp, Homo sapien
tcttctccctctagacatggctgca

SEQ ID NO: 2486594 - DNA, 25 bp, Homo sapien
cttctccctctagacatggctgcat

SEQ ID NO: 2486595 - DNA, 25 bp, Homo sapien
accaccatttctgttccactattga

SEQ ID NO: 2486596 - DNA, 25 bp, Homo sapien
ggcaccaccatttctgttccactat

SEQ ID NO: 2486597 - DNA, 25 bp, Homo sapien
caccatttctgttccactattgaag

SEQ ID NO: 2486598 - DNA, 25 bp, Homo sapien
gcaccaccatttctgttccactatt

SEQ ID NO: 2486599 - DNA, 25 bp, Homo sapien
gtgccaccacctcacaagttcccgt

SEQ ID NO: 2486600 - DNA, 25 bp, Homo sapien
tctatcttgttcttattacagcatc

SEQ ID NO: 2486601 - DNA, 25 bp, Homo sapien
tgatggagcagctcgcgtggtgcct

SEQ ID NO: 2486602 - DNA, 25 bp, Homo sapien
ggagcacttgactgtttgtgaccgt

SEQ ID NO: 2486603 - DNA, 25 bp, Homo sapien
ttccaaggttatggcccttatgtct

SEQ ID NO: 2486604 - DNA, 25 bp, Homo sapien
ccaaggttatggcccttatgtctca

SEQ ID NO: 2486605 - DNA, 25 bp, Homo sapien
cttccaaggttatggcccttatgtc

SEQ ID NO: 2486606 - DNA, 25 bp, Homo sapien
caaggttatggcccttatgtctcat

SEQ ID NO: 2486607 - DNA, 25 bp, Homo sapien
cacatctctttgtctttgccaagtc

SEQ ID NO: 2486608 - DNA, 25 bp, Homo sapien
catctctttgtctttgccaagtcca

SEQ ID NO: 2486609 - DNA, 25 bp, Homo sapien
cttcacatctctttgtctttgccaa

SEQ ID NO: 2486610 - DNA, 25 bp, Homo sapien
atctctttgtctttgccaagtccat

SEQ ID NO: 2486611 - DNA, 25 bp, Homo sapien
aagaaatgccccactaatgctacca

SEQ ID NO: 2486612 - DNA, 25 bp, Homo sapien
tgtaaaaagaaatgccccactaatg

SEQ ID NO: 2486613 - DNA, 25 bp, Homo sapien
gaccacacacatgcgaatctataag

SEQ ID NO: 2486614 - DNA, 25 bp, Homo sapien
tttgaccacacacatgcgaatctat

SEQ ID NO: 2486615 - DNA, 25 bp, Homo sapien
cagacaatttaagggcatgattctt

SEQ ID NO: 2486616 - DNA, 25 bp, Homo sapien
tgagcatattaagcagtttaagagc

SEQ ID NO: 2486617 - DNA, 25 bp, Homo sapien
aaaagacctctggaccgcataaaag

SEQ ID NO: 2486618 - DNA, 25 bp, Homo sapien
taaaagtcaacgaacataaagtgat

SEQ ID NO: 2486619 - DNA, 25 bp, Homo sapien
tgagaaccaacggaaaggagcctgg

SEQ ID NO: 2486620 - DNA, 25 bp, Homo sapien
ggaccgcataaaagtcaacgaacat

SEQ ID NO: 2486621 - DNA, 25 bp, Homo sapien
catctactactgacaaacgcttgcc

SEQ ID NO: 2486622 - DNA, 25 bp, Homo sapien
tactgacaaacgcttgccaccagtc

SEQ ID NO: 2486623 - DNA, 25 bp, Homo sapien
cagtgagagttctagtgactccctg

SEQ ID NO: 2486624 - DNA, 25 bp, Homo sapien
gactccctgtgaacatctactactg

SEQ ID NO: 2486625 - DNA, 25 bp, Homo sapien
ggtgagaacgtttctctgaattgtt

SEQ ID NO: 2486626 - DNA, 25 bp, Homo sapien
tctctgaattgttgatctcatcttc

SEQ ID NO: 2486627 - DNA, 25 bp, Homo sapien
tctgaattgttgatctcatcttcca

SEQ ID NO: 2486628 - DNA, 25 bp, Homo sapien
ttcggcactggtgagaacgtttctc

SEQ ID NO: 2486629 - DNA, 25 bp, Homo sapien
tcaacgtgcaatctctaaagtcagg

SEQ ID NO: 2486630 - DNA, 25 bp, Homo sapien
aagtagttgaccaagtcttagggca

SEQ ID NO: 2486631 - DNA, 25 bp, Homo sapien
taagttaccttcctgctgagattgt

SEQ ID NO: 2486632 - DNA, 25 bp, Homo sapien
gcagaaagcatagggttcaacgtgc

SEQ ID NO: 2486633 - DNA, 25 bp, Homo sapien
ccctctattgggactttcagctgat

SEQ ID NO: 2486634 - DNA, 25 bp, Homo sapien
cacatctccctctattgggactttc

SEQ ID NO: 2486635 - DNA, 25 bp, Homo sapien
gactttcagctgatcgacttggatc

SEQ ID NO: 2486636 - DNA, 25 bp, Homo sapien
ctttcagctgatcgacttggatcat

SEQ ID NO: 2486637 - DNA, 25 bp, Homo sapien
tgttccagagttagtttatataacc

SEQ ID NO: 2486638 - DNA, 25 bp, Homo sapien
ggatttgttccagagttagtttata

SEQ ID NO: 2486639 - DNA, 25 bp, Homo sapien
ccagagttagtttatataaccatgc

SEQ ID NO: 2486640 - DNA, 25 bp, Homo sapien
ttcccatggatttgttccagagtta

SEQ ID NO: 2486641 - DNA, 25 bp, Homo sapien
ggagatcacactaaggggcttgagc

SEQ ID NO: 2486642 - DNA, 25 bp, Homo sapien
atggagatgaggagatcacactaag

SEQ ID NO: 2486643 - DNA, 25 bp, Homo sapien
tggagatgaggagatcacactaagg

SEQ ID NO: 2486644 - DNA, 25 bp, Homo sapien
gatgaggagatcacactaaggggct

SEQ ID NO: 2486645 - DNA, 25 bp, Homo sapien
gatcaatagcatcaggctgtctgct

SEQ ID NO: 2486646 - DNA, 25 bp, Homo sapien
gttggattccttacctgcatatcgg

SEQ ID NO: 2486647 - DNA, 25 bp, Homo sapien
caggaagtcagaaagatcaatagca

SEQ ID NO: 2486648 - DNA, 25 bp, Homo sapien
aaataaaaatctggccgcataagca

SEQ ID NO: 2486649 - DNA, 25 bp, Homo sapien
cttgaaacattgcatcatggacgat

SEQ ID NO: 2486650 - DNA, 25 bp, Homo sapien
tccctatgaagagttggtattaggt

SEQ ID NO: 2486651 - DNA, 25 bp, Homo sapien
catggacgattgtggcttcaggatc

SEQ ID NO: 2486652 - DNA, 25 bp, Homo sapien
aattttccctatgaagagttggtat

SEQ ID NO: 2486653 - DNA, 25 bp, Homo sapien
ccgctacacagcaactatctcttac

SEQ ID NO: 2486654 - DNA, 25 bp, Homo sapien
tgatggtttgcactggatacaactt

SEQ ID NO: 2486655 - DNA, 25 bp, Homo sapien
tatgatggtttgcactggatacaac

SEQ ID NO: 2486656 - DNA, 25 bp, Homo sapien
gatggtttgcactggatacaacttt

SEQ ID NO: 2486657 - DNA, 25 bp, Homo sapien
tggtttgcactggatacaactttcc

SEQ ID NO: 2486658 - DNA, 25 bp, Homo sapien
taaatgtcacgctttgcctaccaga

SEQ ID NO: 2486659 - DNA, 25 bp, Homo sapien
ttaggcctgattccagcactgggtc

SEQ ID NO: 2486660 - DNA, 25 bp, Homo sapien
gatcctgagaacacaagttaggcct

SEQ ID NO: 2486661 - DNA, 25 bp, Homo sapien
tgggtccgcagagtggcaagttctc

SEQ ID NO: 2486662 - DNA, 25 bp, Homo sapien
gaagttgtcttccattcaagcctgg

SEQ ID NO: 2486663 - DNA, 25 bp, Homo sapien
cacaatggtacacacgggattagca

SEQ ID NO: 2486664 - DNA, 25 bp, Homo sapien
gcagaagtaatttggtgccaacatc

SEQ ID NO: 2486665 - DNA, 25 bp, Homo sapien
tcctaagaggatccatggcagaagt

SEQ ID NO: 2486666 - DNA, 25 bp, Homo sapien
cagataaatactgttctccaaaact

SEQ ID NO: 2486667 - DNA, 25 bp, Homo sapien
ctgtcagataaatactgttctccaa

SEQ ID NO: 2486668 - DNA, 25 bp, Homo sapien
agactgtcagataaatactgttctc

SEQ ID NO: 2486669 - DNA, 25 bp, Homo sapien
gtcagataaatactgttctccaaaa

SEQ ID NO: 2486670 - DNA, 25 bp, Homo sapien
tagagtcttctttggactggagcct

SEQ ID NO: 2486671 - DNA, 25 bp, Homo sapien
ggtagctccacgaagtctaagtctg

SEQ ID NO: 2486672 - DNA, 25 bp, Homo sapien
ggatgtctttctcatactagtttgg

SEQ ID NO: 2486673 - DNA, 25 bp, Homo sapien
taaccagtagatagtagatggccag

SEQ ID NO: 2486674 - DNA, 25 bp, Homo sapien
gtgctaacctgctctgtaacaatat

SEQ ID NO: 2486675 - DNA, 25 bp, Homo sapien
gagtgctaacctgctctgtaacaat

SEQ ID NO: 2486676 - DNA, 25 bp, Homo sapien
gcagcagctcatatcctgaggattt

SEQ ID NO: 2486677 - DNA, 25 bp, Homo sapien
caggcagcagctcatatcctgagga

SEQ ID NO: 2486678 - DNA, 25 bp, Homo sapien
tgacggcaggcggttctggcttccc

SEQ ID NO: 2486679 - DNA, 25 bp, Homo sapien
gactggctgggtgacggcaggcggt

SEQ ID NO: 2486680 - DNA, 25 bp, Homo sapien
ggtgacggcaggcggttctggcttc

SEQ ID NO: 2486681 - DNA, 25 bp, Homo sapien
ctggctgggtgacggcaggcggttc

SEQ ID NO: 2486682 - DNA, 25 bp, Homo sapien
gcacatggcagtgacaatgtaatag

SEQ ID NO: 2486683 - DNA, 25 bp, Homo sapien
ggcacatggcagtgacaatgtaata

SEQ ID NO: 2486684 - DNA, 25 bp, Homo sapien
tggcacatggcagtgacaatgtaat

SEQ ID NO: 2486685 - DNA, 25 bp, Homo sapien
tgaattgcaacacaccatggcaggc

SEQ ID NO: 2486686 - DNA, 25 bp, Homo sapien
tccatgatgaattgcaacacaccat

SEQ ID NO: 2486687 - DNA, 25 bp, Homo sapien
atgatgaattgcaacacaccatggc

SEQ ID NO: 2486688 - DNA, 25 bp, Homo sapien
attgcaacacaccatggcaggccct

SEQ ID NO: 2486689 - DNA, 25 bp, Homo sapien
tctcaactgcagcagtcagttcccc

SEQ ID NO: 2486690 - DNA, 25 bp, Homo sapien
gaaaaccaaacctcttctcaactgc

SEQ ID NO: 2486691 - DNA, 25 bp, Homo sapien
aaaaccaaacctcttctcaactgca

SEQ ID NO: 2486692 - DNA, 25 bp, Homo sapien
ctgcagcagtcagttccccaaccca

SEQ ID NO: 2486693 - DNA, 25 bp, Homo sapien
actactgcatctactccttacagtc

SEQ ID NO: 2486694 - DNA, 25 bp, Homo sapien
ctgcatctactccttacagtctgaa

SEQ ID NO: 2486695 - DNA, 25 bp, Homo sapien
gatggcattttgtagttctttactt

SEQ ID NO: 2486696 - DNA, 25 bp, Homo sapien
agcttcactactgcatctactcctt

SEQ ID NO: 2486697 - DNA, 25 bp, Homo sapien
cttaaagcgcccctgcttggattcc

SEQ ID NO: 2486698 - DNA, 25 bp, Homo sapien
cagtcagagtcacgtaaagaagaca

SEQ ID NO: 2486699 - DNA, 25 bp, Homo sapien
ctgaatagatatccagtcagagtca

SEQ ID NO: 2486700 - DNA, 25 bp, Homo sapien
tttgcccttaaagcgcccctgcttg

SEQ ID NO: 2486701 - DNA, 25 bp, Homo sapien
tgacctttcatgatgtacacttcct

SEQ ID NO: 2486702 - DNA, 25 bp, Homo sapien
tctttccgactccagctcaacttga

SEQ ID NO: 2486703 - DNA, 25 bp, Homo sapien
tctatcagctggcagacagtgctca

SEQ ID NO: 2486704 - DNA, 25 bp, Homo sapien
tgtcactagaacaagaagatctgct

SEQ ID NO: 2486705 - DNA, 25 bp, Homo sapien
taaataaggaataatcacaactacc

SEQ ID NO: 2486706 - DNA, 25 bp, Homo sapien
taaggaataatcacaactacctctt

SEQ ID NO: 2486707 - DNA, 25 bp, Homo sapien
cctcatgtaaataaggaataatcac

SEQ ID NO: 2486708 - DNA, 25 bp, Homo sapien
tcatctggctcctcatgtaaataag

SEQ ID NO: 2486709 - DNA, 25 bp, Homo sapien
tgattcattgaagagagatttattg

SEQ ID NO: 2486710 - DNA, 25 bp, Homo sapien
tgactgattcattgaagagagattt

SEQ ID NO: 2486711 - DNA, 25 bp, Homo sapien
ctgattcattgaagagagatttatt

SEQ ID NO: 2486712 - DNA, 25 bp, Homo sapien
gactgattcattgaagagagattta

SEQ ID NO: 2486713 - DNA, 25 bp, Homo sapien
atctgtgctcgaaaactattgccca

SEQ ID NO: 2486714 - DNA, 25 bp, Homo sapien
aactattgcccatctgtgcagggtg

SEQ ID NO: 2486715 - DNA, 25 bp, Homo sapien
gcaagatccaatgtccttaagcaca

SEQ ID NO: 2486716 - DNA, 25 bp, Homo sapien
aaccaagaagcaagatccaatgtcc

SEQ ID NO: 2486717 - DNA, 25 bp, Homo sapien
tgatagctcattactgcattgctcc

SEQ ID NO: 2486718 - DNA, 25 bp, Homo sapien
ccattgtattgccaacaaagaaaca

SEQ ID NO: 2486719 - DNA, 25 bp, Homo sapien
aaagttccaggacactcgaatctaa

SEQ ID NO: 2486720 - DNA, 25 bp, Homo sapien
gaatctaagtctgagatcatacaca

SEQ ID NO: 2486721 - DNA, 25 bp, Homo sapien
cagagttcacctcaatatcttcggc

SEQ ID NO: 2486722 - DNA, 25 bp, Homo sapien
cactggacacttgggtctgctctga

SEQ ID NO: 2486723 - DNA, 25 bp, Homo sapien
tgatgtttacaaccaccagtgtggc

SEQ ID NO: 2486724 - DNA, 25 bp, Homo sapien
taggacaaggcaacccacacaatag

SEQ ID NO: 2486725 - DNA, 25 bp, Homo sapien
taaggctgagctaaggcaaccactg

SEQ ID NO: 2486726 - DNA, 25 bp, Homo sapien
tgagtgctcccttactgatggaaga

SEQ ID NO: 2486727 - DNA, 25 bp, Homo sapien
gcagctctttcctagggagtttaca

SEQ ID NO: 2486728 - DNA, 25 bp, Homo sapien
cctctgctagtagttagggctacac

SEQ ID NO: 2486729 - DNA, 25 bp, Homo sapien
tggaagaagtggcatagctctattc

SEQ ID NO: 2486730 - DNA, 25 bp, Homo sapien
gctcagagcagcatcaaagactttc

SEQ ID NO: 2486731 - DNA, 25 bp, Homo sapien
tcagagcagcatcaaagactttcag

SEQ ID NO: 2486732 - DNA, 25 bp, Homo sapien
ctcagagcagcatcaaagactttca

SEQ ID NO: 2486733 - DNA, 25 bp, Homo sapien
cagagcagcatcaaagactttcagg

SEQ ID NO: 2486734 - DNA, 25 bp, Homo sapien
tggtgacagaacgaggatcagcatc

SEQ ID NO: 2486735 - DNA, 25 bp, Homo sapien
cagggacctaaaaacactgagcatc

SEQ ID NO: 2486736 - DNA, 25 bp, Homo sapien
aaatccctctaaggctatgcaacag

SEQ ID NO: 2486737 - DNA, 25 bp, Homo sapien
tcaagtgtggccaatttcggagaag

SEQ ID NO: 2486738 - DNA, 25 bp, Homo sapien
gcttagattgtgaggtactctttca

SEQ ID NO: 2486739 - DNA, 25 bp, Homo sapien
tttcaaaagccaagcatccacacat

SEQ ID NO: 2486740 - DNA, 25 bp, Homo sapien
tgttgcttagattgtgaggtactct

SEQ ID NO: 2486741 - DNA, 25 bp, Homo sapien
ccagagatgttgcttagattgtgag

SEQ ID NO: 2486742 - DNA, 25 bp, Homo sapien
gcccaaacgtaactcttattcagaa

SEQ ID NO: 2486743 - DNA, 25 bp, Homo sapien
gtagagttcaagcaggttccaaggc

SEQ ID NO: 2486744 - DNA, 25 bp, Homo sapien
tccctagattgttagttcttccata

SEQ ID NO: 2486745 - DNA, 25 bp, Homo sapien
catcatgcaatacttggtaaccaaa

SEQ ID NO: 2486746 - DNA, 25 bp, Homo sapien
tgtcagtgatcttcggatcgggtgt

SEQ ID NO: 2486747 - DNA, 25 bp, Homo sapien
ttctttgatgtcagtgatcttcgga

SEQ ID NO: 2486748 - DNA, 25 bp, Homo sapien
tgatcttcggatcgggtgtttgtgt

SEQ ID NO: 2486749 - DNA, 25 bp, Homo sapien
tgatgtcagtgatcttcggatcggg

SEQ ID NO: 2486750 - DNA, 25 bp, Homo sapien
gggaccccacatatttccaacagat

SEQ ID NO: 2486751 - DNA, 25 bp, Homo sapien
tgaaattccacatattgactcacag

SEQ ID NO: 2486752 - DNA, 25 bp, Homo sapien
tgcatatgccctcattatattggca

SEQ ID NO: 2486753 - DNA, 25 bp, Homo sapien
gcttttgtaagctgaaattcctact

SEQ ID NO: 2486754 - DNA, 25 bp, Homo sapien
atagataagtaggtcacaaatgaag

SEQ ID NO: 2486755 - DNA, 25 bp, Homo sapien
taaattaattgccacatatccacta

SEQ ID NO: 2486756 - DNA, 25 bp, Homo sapien
tatagataagtaggtcacaaatgaa

SEQ ID NO: 2486757 - DNA, 25 bp, Homo sapien
aattaattgccacatatccactatt

SEQ ID NO: 2486758 - DNA, 25 bp, Homo sapien
tgctccatcatggtatgactgcatc

SEQ ID NO: 2486759 - DNA, 25 bp, Homo sapien
ctgctccatcatggtatgactgcat

SEQ ID NO: 2486760 - DNA, 25 bp, Homo sapien
gctccatcatggtatgactgcatct

SEQ ID NO: 2486761 - DNA, 25 bp, Homo sapien
ttagaaagacaataccaaagcggca

SEQ ID NO: 2486762 - DNA, 25 bp, Homo sapien
gaccgatgtctgcaagttataagtg

SEQ ID NO: 2486763 - DNA, 25 bp, Homo sapien
tttatttccccagagcatgatgtgt

SEQ ID NO: 2486764 - DNA, 25 bp, Homo sapien
gaagaacttctcctgtctgcaagaa

SEQ ID NO: 2486765 - DNA, 25 bp, Homo sapien
tgcccagttcatactagaaccagct

SEQ ID NO: 2486766 - DNA, 25 bp, Homo sapien
gtgcccagttcatactagaaccagc

SEQ ID NO: 2486767 - DNA, 25 bp, Homo sapien
ccagttcatactagaaccagcttcc

SEQ ID NO: 2486768 - DNA, 25 bp, Homo sapien
gcccagttcatactagaaccagctt

SEQ ID NO: 2486769 - DNA, 25 bp, Homo sapien
ttcaacctgcagaagctttacctgc

SEQ ID NO: 2486770 - DNA, 25 bp, Homo sapien
ttgcctcgaaggttccagttcctag

SEQ ID NO: 2486771 - DNA, 25 bp, Homo sapien
cagttcctagcaccgttggtcaggc

SEQ ID NO: 2486772 - DNA, 25 bp, Homo sapien
tctccaaagaggtgcatgcagcttc

SEQ ID NO: 2486773 - DNA, 25 bp, Homo sapien
tcaaacaaagaattttgcctgacat

SEQ ID NO: 2486774 - DNA, 25 bp, Homo sapien
cattcaaacaaagaattttgcctga

SEQ ID NO: 2486775 - DNA, 25 bp, Homo sapien
ttcaaacaaagaattttgcctgaca

SEQ ID NO: 2486776 - DNA, 25 bp, Homo sapien
gccattcaaacaaagaattttgcct

SEQ ID NO: 2486777 - DNA, 25 bp, Homo sapien
aatgaaaagcagtagcctccctctg

SEQ ID NO: 2486778 - DNA, 25 bp, Homo sapien
aaaagcagtagcctccctctgggac

SEQ ID NO: 2486779 - DNA, 25 bp, Homo sapien
atgaaaagcagtagcctccctctgg

SEQ ID NO: 2486780 - DNA, 25 bp, Homo sapien
tagctgagtccattgatctgcgatt

SEQ ID NO: 2486781 - DNA, 25 bp, Homo sapien
tctgcatagcgctcttccttagaag

SEQ ID NO: 2486782 - DNA, 25 bp, Homo sapien
acttgaggtttttgaagggcagcca

SEQ ID NO: 2486783 - DNA, 25 bp, Homo sapien
tcaggcaatcaaagagagtggaaca

SEQ ID NO: 2486784 - DNA, 25 bp, Homo sapien
gtgaaggaccctgctacactaccaa

SEQ ID NO: 2486785 - DNA, 25 bp, Homo sapien
cagtttaggagtgttaattgacaac

SEQ ID NO: 2486786 - DNA, 25 bp, Homo sapien
tggtttagcactttacacaaaaatc

SEQ ID NO: 2486787 - DNA, 25 bp, Homo sapien
caatctagttgagaagacaagaatc

SEQ ID NO: 2486788 - DNA, 25 bp, Homo sapien
cctggactgcaagaatcaaggcggt

SEQ ID NO: 2486789 - DNA, 25 bp, Homo sapien
gaacacaagcgagcaggtgtcgcct

SEQ ID NO: 2486790 - DNA, 25 bp, Homo sapien
aaacaaatccagatcaccggcggag

SEQ ID NO: 2486791 - DNA, 25 bp, Homo sapien
tgtgtttcctcctccgatggcaaag

SEQ ID NO: 2486792 - DNA, 25 bp, Homo sapien
tctatctaaagtcagagccagtcat

SEQ ID NO: 2486793 - DNA, 25 bp, Homo sapien
ccctgtatcacagggagatcaaact

SEQ ID NO: 2486794 - DNA, 25 bp, Homo sapien
ctgttattatatattggagctgaga

SEQ ID NO: 2486795 - DNA, 25 bp, Homo sapien
tcaaaccagatctatctaaagtcag

SEQ ID NO: 2486796 - DNA, 25 bp, Homo sapien
aaaacaagctcctggattagctgat

SEQ ID NO: 2486797 - DNA, 25 bp, Homo sapien
aaacaagctcctggattagctgatt

SEQ ID NO: 2486798 - DNA, 25 bp, Homo sapien
acattagactgcatgccttttgcag

SEQ ID NO: 2486799 - DNA, 25 bp, Homo sapien
gtacatctttgtttcacatagtaaa

SEQ ID NO: 2486800 - DNA, 25 bp, Homo sapien
tccaacattagactgcatgcctttt

SEQ ID NO: 2486801 - DNA, 25 bp, Homo sapien
gtatacagtgatgtacatctttgtt

SEQ ID NO: 2486802 - DNA, 25 bp, Homo sapien
taattgtacatagatagcacctgcc

SEQ ID NO: 2486803 - DNA, 25 bp, Homo sapien
tgtcatctgagtggatttactacac

SEQ ID NO: 2486804 - DNA, 25 bp, Homo sapien
caagttctaccaagctgtagtgaca

SEQ ID NO: 2486805 - DNA, 25 bp, Homo sapien
caccaaagagagaagttattagctc

SEQ ID NO: 2486806 - DNA, 25 bp, Homo sapien
tgaagaagttgctaacacaagtgct

SEQ ID NO: 2486807 - DNA, 25 bp, Homo sapien
cattggcagatacaggagaaggtta

SEQ ID NO: 2486808 - DNA, 25 bp, Homo sapien
ggctgttacacatttacataggaga

SEQ ID NO: 2486809 - DNA, 25 bp, Homo sapien
caatgaataacataccagggagaat

SEQ ID NO: 2486810 - DNA, 25 bp, Homo sapien
tctctagaggcccagataagcttga

SEQ ID NO: 2486811 - DNA, 25 bp, Homo sapien
tgagcagttgccaggtccagtgttc

SEQ ID NO: 2486812 - DNA, 25 bp, Homo sapien
cactggtggctaacaaggtaggagc

SEQ ID NO: 2486813 - DNA, 25 bp, Homo sapien
actagtaacacagaccgaggcagca

SEQ ID NO: 2486814 - DNA, 25 bp, Homo sapien
tctggctgacttacgagagtcctga

SEQ ID NO: 2486815 - DNA, 25 bp, Homo sapien
gcaggtctgggatgctccggtagga

SEQ ID NO: 2486816 - DNA, 25 bp, Homo sapien
ggatgctccggtaggaatgggcctg

SEQ ID NO: 2486817 - DNA, 25 bp, Homo sapien
gctgacttacgagagtcctgagatc

SEQ ID NO: 2486818 - DNA, 25 bp, Homo sapien
gccacctttggagtactggcctctc

SEQ ID NO: 2486819 - DNA, 25 bp, Homo sapien
catggtcgaggccaacaatgtttca

SEQ ID NO: 2486820 - DNA, 25 bp, Homo sapien
tcccacgatcatgggcatcttgtgg

SEQ ID NO: 2486821 - DNA, 25 bp, Homo sapien
ggtccccaatatgagacatcactgg

SEQ ID NO: 2486822 - DNA, 25 bp, Homo sapien
ggcagtggcatactgaactgtggcc

SEQ ID NO: 2486823 - DNA, 25 bp, Homo sapien
ctcaggcagtggcatactgaactgt

SEQ ID NO: 2486824 - DNA, 25 bp, Homo sapien
caggcagtggcatactgaactgtgg

SEQ ID NO: 2486825 - DNA, 25 bp, Homo sapien
gcagtggcatactgaactgtggccc

SEQ ID NO: 2486826 - DNA, 25 bp, Homo sapien
catgctggaccaccacactgggttg

SEQ ID NO: 2486827 - DNA, 25 bp, Homo sapien
tcacccatgctggaccaccacactg

SEQ ID NO: 2486828 - DNA, 25 bp, Homo sapien
gctggaccaccacactgggttgttt

SEQ ID NO: 2486829 - DNA, 25 bp, Homo sapien
accacactgggttgttttgagatga

SEQ ID NO: 2486830 - DNA, 25 bp, Homo sapien
gaagaagtttcactacggtagattc

SEQ ID NO: 2486831 - DNA, 25 bp, Homo sapien
tccaagatgtaaaattgctgaggca

SEQ ID NO: 2486832 - DNA, 25 bp, Homo sapien
tatactcctatcagcagagcattaa

SEQ ID NO: 2486833 - DNA, 25 bp, Homo sapien
taataacactgcatcaaggcttttc

SEQ ID NO: 2486834 - DNA, 25 bp, Homo sapien
cagaattgagtaaaccctacaggtc

SEQ ID NO: 2486835 - DNA, 25 bp, Homo sapien
gcctcttataaacagcttaaggctg

SEQ ID NO: 2486836 - DNA, 25 bp, Homo sapien
agttggaactaattcctcgccacca

SEQ ID NO: 2486837 - DNA, 25 bp, Homo sapien
cctacaggtcagtgagagcactcta

SEQ ID NO: 2486838 - DNA, 25 bp, Homo sapien
tcagagcatatattgagggcaacta

SEQ ID NO: 2486839 - DNA, 25 bp, Homo sapien
ccatgtgatctttgcatatgctaaa

SEQ ID NO: 2486840 - DNA, 25 bp, Homo sapien
caatgtacagccaattgatagactg

SEQ ID NO: 2486841 - DNA, 25 bp, Homo sapien
caagaatagcttgatgccatccttg

SEQ ID NO: 2486842 - DNA, 25 bp, Homo sapien
atatttcgctgggtgcaaaagtgtg

SEQ ID NO: 2486843 - DNA, 25 bp, Homo sapien
tgtgaggtctacattttatgtgggc

SEQ ID NO: 2486844 - DNA, 25 bp, Homo sapien
ttctttaagagcaagagtttccatc

SEQ ID NO: 2486845 - DNA, 25 bp, Homo sapien
attgcattcttccaacaccagatat

SEQ ID NO: 2486846 - DNA, 25 bp, Homo sapien
ttgactagctcctctgctggtcttg

SEQ ID NO: 2486847 - DNA, 25 bp, Homo sapien
gctcctctgctggtcttgttggctt

SEQ ID NO: 2486848 - DNA, 25 bp, Homo sapien
tagctcctctgctggtcttgttggc

SEQ ID NO: 2486849 - DNA, 25 bp, Homo sapien
tcctctgctggtcttgttggcttac

SEQ ID NO: 2486850 - DNA, 25 bp, Homo sapien
ctggtgggatgatccagtcactcat

SEQ ID NO: 2486851 - DNA, 25 bp, Homo sapien
tatccggccggcaattgtttacagt

SEQ ID NO: 2486852 - DNA, 25 bp, Homo sapien
gccatcactgtataagagcagcctg

SEQ ID NO: 2486853 - DNA, 25 bp, Homo sapien
ggatagaagcttgttgatgccaacc

SEQ ID NO: 2486854 - DNA, 25 bp, Homo sapien
catagtttaaagttcactgggcctc

SEQ ID NO: 2486855 - DNA, 25 bp, Homo sapien
tatatcctttatggttggtgttcac

SEQ ID NO: 2486856 - DNA, 25 bp, Homo sapien
tttgtgccgagtcccataggtccat

SEQ ID NO: 2486857 - DNA, 25 bp, Homo sapien
tccacatactttctcatcagacttc

SEQ ID NO: 2486858 - DNA, 25 bp, Homo sapien
ccttaaagtaggctcttctactact

SEQ ID NO: 2486859 - DNA, 25 bp, Homo sapien
tttctgtaaaagtctgacacaattc

SEQ ID NO: 2486860 - DNA, 25 bp, Homo sapien
catttctgtaaaagtctgacacaat

SEQ ID NO: 2486861 - DNA, 25 bp, Homo sapien
tgagacaacagaagtattgtctctt

SEQ ID NO: 2486862 - DNA, 25 bp, Homo sapien
caacagaagtattgtctcttacatt

SEQ ID NO: 2486863 - DNA, 25 bp, Homo sapien
taaattcgagaagccttccacattc

SEQ ID NO: 2486864 - DNA, 25 bp, Homo sapien
tagtcacatcactctctggccataa

SEQ ID NO: 2486865 - DNA, 25 bp, Homo sapien
ggaggctttaacagagaattcattt

SEQ ID NO: 2486866 - DNA, 25 bp, Homo sapien
tccttctaaattcgagaagccttcc

SEQ ID NO: 2486867 - DNA, 25 bp, Homo sapien
taagaaagacttcagaggctgctta

SEQ ID NO: 2486868 - DNA, 25 bp, Homo sapien
agctttctaaagtccatccattatt

SEQ ID NO: 2486869 - DNA, 25 bp, Homo sapien
ccatccattattatgaggcttaaga

SEQ ID NO: 2486870 - DNA, 25 bp, Homo sapien
gacttcagaggctgcttaaacattt

SEQ ID NO: 2486871 - DNA, 25 bp, Homo sapien
tctgagaaggcaataacaatcacca

SEQ ID NO: 2486872 - DNA, 25 bp, Homo sapien
tagcctaagtactcagcatactcag

SEQ ID NO: 2486873 - DNA, 25 bp, Homo sapien
gcatactcagctctctaggttacgt

SEQ ID NO: 2486874 - DNA, 25 bp, Homo sapien
gaggtccagcttgttcatatctagc

SEQ ID NO: 2486875 - DNA, 25 bp, Homo sapien
agttaacctgctgccttgagcatgg

SEQ ID NO: 2486876 - DNA, 25 bp, Homo sapien
tctacaaaacggctccataaatctg

SEQ ID NO: 2486877 - DNA, 25 bp, Homo sapien
caatgaaggagagcacagttttgcc

SEQ ID NO: 2486878 - DNA, 25 bp, Homo sapien
tattgaatggctattacgtcccagg

SEQ ID NO: 2486879 - DNA, 25 bp, Homo sapien
atccatgtagctccaatatatgttt

SEQ ID NO: 2486880 - DNA, 25 bp, Homo sapien
tccatgtagctccaatatatgtttt

SEQ ID NO: 2486881 - DNA, 25 bp, Homo sapien
atgtgacttttagagggtagccgtg

SEQ ID NO: 2486882 - DNA, 25 bp, Homo sapien
aatgtgacttttagagggtagccgt

SEQ ID NO: 2486883 - DNA, 25 bp, Homo sapien
tttagagggtagccgtggttagaga

SEQ ID NO: 2486884 - DNA, 25 bp, Homo sapien
gtagccgtggttagagaaactctta

SEQ ID NO: 2486885 - DNA, 25 bp, Homo sapien
aaaactctcaattcaaggttggcat

SEQ ID NO: 2486886 - DNA, 25 bp, Homo sapien
ctctcaattcaaggttggcatgata

SEQ ID NO: 2486887 - DNA, 25 bp, Homo sapien
aactctcaattcaaggttggcatga

SEQ ID NO: 2486888 - DNA, 25 bp, Homo sapien
tctcaattcaaggttggcatgataa

SEQ ID NO: 2486889 - DNA, 25 bp, Homo sapien
ggtgtacggcaccatacgaagatgg

SEQ ID NO: 2486890 - DNA, 25 bp, Homo sapien
tattctactccctgttcaccgatga

SEQ ID NO: 2486891 - DNA, 25 bp, Homo sapien
ttactatcctgtataaacaagaggg

SEQ ID NO: 2486892 - DNA, 25 bp, Homo sapien
caagagggtttctcgcacgttttct

SEQ ID NO: 2486893 - DNA, 25 bp, Homo sapien
gccctcggcggcgaggaaagctaaa

SEQ ID NO: 2486894 - DNA, 25 bp, Homo sapien
gcggtggcatccctctagcgagaga

SEQ ID NO: 2486895 - DNA, 25 bp, Homo sapien
gggcctcctcttgtcccgaggagca

SEQ ID NO: 2486896 - DNA, 25 bp, Homo sapien
caaataagggttttcaaggcgtcag

SEQ ID NO: 2486897 - DNA, 25 bp, Homo sapien
agcggtctgacatcgcgacgctgct

SEQ ID NO: 2486898 - DNA, 25 bp, Homo sapien
cctaccgctagtggaagaagatggc

SEQ ID NO: 2486899 - DNA, 25 bp, Homo sapien
tgctcaaaacctcgctccggaaagg

SEQ ID NO: 2486900 - DNA, 25 bp, Homo sapien
cggatctggacacccagcggtctga

SEQ ID NO: 2486901 - DNA, 25 bp, Homo sapien
ctttcgctagtgacaggtgcgggca

SEQ ID NO: 2486902 - DNA, 25 bp, Homo sapien
ttttggccgcttctgaaatgttggg

SEQ ID NO: 2486903 - DNA, 25 bp, Homo sapien
cggttgcccgaggatagtggagaag

SEQ ID NO: 2486904 - DNA, 25 bp, Homo sapien
caaaggttggactctagatgagggt

SEQ ID NO: 2486905 - DNA, 25 bp, Homo sapien
cacttcgccagactcgttctcccat

SEQ ID NO: 2486906 - DNA, 25 bp, Homo sapien
agccacttcgccagactcgttctcc

SEQ ID NO: 2486907 - DNA, 25 bp, Homo sapien
ttcgccagactcgttctcccattta

SEQ ID NO: 2486908 - DNA, 25 bp, Homo sapien
aagccacttcgccagactcgttctc

SEQ ID NO: 2486909 - DNA, 25 bp, Homo sapien
accttgataagttatataacctctc

SEQ ID NO: 2486910 - DNA, 25 bp, Homo sapien
ccttgataagttatataacctctct

SEQ ID NO: 2486911 - DNA, 25 bp, Homo sapien
tagtgttacatgaccttgataagtt

SEQ ID NO: 2486912 - DNA, 25 bp, Homo sapien
cgagtagtgttacatgaccttgata

SEQ ID NO: 2486913 - DNA, 25 bp, Homo sapien
tgttgactgtcactgaacactatca

SEQ ID NO: 2486914 - DNA, 25 bp, Homo sapien
agattttggataaccctccttgcac

SEQ ID NO: 2486915 - DNA, 25 bp, Homo sapien
tatacataacttctgtgttaaacaa

SEQ ID NO: 2486916 - DNA, 25 bp, Homo sapien
ttgctagcctcaatattattcttag

SEQ ID NO: 2486917 - DNA, 25 bp, Homo sapien
tggtacacttatttagaacacttac

SEQ ID NO: 2486918 - DNA, 25 bp, Homo sapien
ggatggtattagggaagcatgcaaa

SEQ ID NO: 2486919 - DNA, 25 bp, Homo sapien
catactgaatagtgtaggcagtttt

SEQ ID NO: 2486920 - DNA, 25 bp, Homo sapien
ttaaatggtacacttatttagaaca

SEQ ID NO: 2486921 - DNA, 25 bp, Homo sapien
gtgagttagtagagagtgaatgtga

SEQ ID NO: 2486922 - DNA, 25 bp, Homo sapien
agttagtagagagtgaatgtgaagg

SEQ ID NO: 2486923 - DNA, 25 bp, Homo sapien
tgagttagtagagagtgaatgtgaa

SEQ ID NO: 2486924 - DNA, 25 bp, Homo sapien
cctagggcagggttgtcccatcttt

SEQ ID NO: 2486925 - DNA, 25 bp, Homo sapien
attattgtcttggaccacatgtaaa

SEQ ID NO: 2486926 - DNA, 25 bp, Homo sapien
gaattattgtcttggaccacatgta

SEQ ID NO: 2486927 - DNA, 25 bp, Homo sapien
aagaattattgtcttggaccacatg

SEQ ID NO: 2486928 - DNA, 25 bp, Homo sapien
tgggccaaatcagaagaagaattat

SEQ ID NO: 2486929 - DNA, 25 bp, Homo sapien
caaatacttagtaaagagactttgc

SEQ ID NO: 2486930 - DNA, 25 bp, Homo sapien
gccagatttcatcatgtactcactt

SEQ ID NO: 2486931 - DNA, 25 bp, Homo sapien
aataatctacatgtgaccattacac

SEQ ID NO: 2486932 - DNA, 25 bp, Homo sapien
taagtcttccattttggacaaggag

SEQ ID NO: 2486933 - DNA, 25 bp, Homo sapien
tagcgtaagcagttgtaagtcaaat

SEQ ID NO: 2486934 - DNA, 25 bp, Homo sapien
tataaatacagtcaagtagccaagg

SEQ ID NO: 2486935 - DNA, 25 bp, Homo sapien
gcaggcttagcgttattttgacaca

SEQ ID NO: 2486936 - DNA, 25 bp, Homo sapien
aatataagtggacttaattctctct

SEQ ID NO: 2486937 - DNA, 25 bp, Homo sapien
aagttagcatagaccaatacaggtc

SEQ ID NO: 2486938 - DNA, 25 bp, Homo sapien
ggtccagaattagctgagtcagttt

SEQ ID NO: 2486939 - DNA, 25 bp, Homo sapien
tatggcttaacctagtaatgcctgt

SEQ ID NO: 2486940 - DNA, 25 bp, Homo sapien
ttctttaaagcacatcagtgtctcc

SEQ ID NO: 2486941 - DNA, 25 bp, Homo sapien
ggaaatatcacttgctaaatttatt

SEQ ID NO: 2486942 - DNA, 25 bp, Homo sapien
gatgaagcaaggatgatacagattc

SEQ ID NO: 2486943 - DNA, 25 bp, Homo sapien
aatcggagtagagataataggagga

SEQ ID NO: 2486944 - DNA, 25 bp, Homo sapien
cacagtagaaggaaatcggagtaga

SEQ ID NO: 2486945 - DNA, 25 bp, Homo sapien
catccttttgtagtggccatactaa

SEQ ID NO: 2486946 - DNA, 25 bp, Homo sapien
ccatccttttgtagtggccatacta

SEQ ID NO: 2486947 - DNA, 25 bp, Homo sapien
gcaagttttggtgcttagattcata

SEQ ID NO: 2486948 - DNA, 25 bp, Homo sapien
taaatgctgttgaactgaactaatc

SEQ ID NO: 2486949 - DNA, 25 bp, Homo sapien
tctgatattaggtacatgagggtta

SEQ ID NO: 2486950 - DNA, 25 bp, Homo sapien
tctgtatcttacaacagtaaaagtg

SEQ ID NO: 2486951 - DNA, 25 bp, Homo sapien
tgggaacttctttttgtatacatac

SEQ ID NO: 2486952 - DNA, 25 bp, Homo sapien
gctctagtctatatcctcaacttgt

SEQ ID NO: 2486953 - DNA, 25 bp, Homo sapien
tactgtgtataaacttagggctggt

SEQ ID NO: 2486954 - DNA, 25 bp, Homo sapien
gattgattctgaagtaatgagagag

SEQ ID NO: 2486955 - DNA, 25 bp, Homo sapien
taactaatgaaagtcctagaagcca

SEQ ID NO: 2486956 - DNA, 25 bp, Homo sapien
ccactggcatcccattagaaagtga

SEQ ID NO: 2486957 - DNA, 25 bp, Homo sapien
aaaagagacactttcctgctggtgg

SEQ ID NO: 2486958 - DNA, 25 bp, Homo sapien
gagaaactaaaggtgcttcagctgc

SEQ ID NO: 2486959 - DNA, 25 bp, Homo sapien
gatgactatatgctagactttttag

SEQ ID NO: 2486960 - DNA, 25 bp, Homo sapien
ttcaataaagctattcaaggcctta

SEQ ID NO: 2486961 - DNA, 25 bp, Homo sapien
taaactaacctcctgcatgacagag

SEQ ID NO: 2486962 - DNA, 25 bp, Homo sapien
cccctactttatggttagatgacta

SEQ ID NO: 2486963 - DNA, 25 bp, Homo sapien
tccattctagtgaggtcgtctctga

SEQ ID NO: 2486964 - DNA, 25 bp, Homo sapien
gccgtgtcctggagaacttgctcag

SEQ ID NO: 2486965 - DNA, 25 bp, Homo sapien
cagaatcccagaacaaggaggtgag

SEQ ID NO: 2486966 - DNA, 25 bp, Homo sapien
cagagtgacaatacaggaagggcag

SEQ ID NO: 2486967 - DNA, 25 bp, Homo sapien
gaggaagacaactctgaagctttat

SEQ ID NO: 2486968 - DNA, 25 bp, Homo sapien
tttgcaggtacagatgaggggtatc

SEQ ID NO: 2486969 - DNA, 25 bp, Homo sapien
tcagtggcctttagaggaagacaac

SEQ ID NO: 2486970 - DNA, 25 bp, Homo sapien
acagatgaggggtatctaactgagc

SEQ ID NO: 2486971 - DNA, 25 bp, Homo sapien
gcctgggctggtcgcaaacccctga

SEQ ID NO: 2486972 - DNA, 25 bp, Homo sapien
cagatgccaccacggctggcaaatt

SEQ ID NO: 2486973 - DNA, 25 bp, Homo sapien
attttttcatagtgacagggttttg

SEQ ID NO: 2486974 - DNA, 25 bp, Homo sapien
gactgtaggcagatgccaccacggc

SEQ ID NO: 2486975 - DNA, 25 bp, Homo sapien
gctgcgatgctgatgactcttaaat

SEQ ID NO: 2486976 - DNA, 25 bp, Homo sapien
gcctctggacttgctgcgatgctga

SEQ ID NO: 2486977 - DNA, 25 bp, Homo sapien
atcatccactcctattgcctctgga

SEQ ID NO: 2486978 - DNA, 25 bp, Homo sapien
gacttgctgcgatgctgatgactct

SEQ ID NO: 2486979 - DNA, 25 bp, Homo sapien
ggccatagcatactggtgtttttac

SEQ ID NO: 2486980 - DNA, 25 bp, Homo sapien
caatggaattataatgtgggctaca

SEQ ID NO: 2486981 - DNA, 25 bp, Homo sapien
tttgtcagactaacaggccatagca

SEQ ID NO: 2486982 - DNA, 25 bp, Homo sapien
cacttgtcccttagcaagcagtaag

SEQ ID NO: 2486983 - DNA, 25 bp, Homo sapien
tcttgcctcaataatgaacatggaa

SEQ ID NO: 2486984 - DNA, 25 bp, Homo sapien
ttttgttcttgcctcaataatgaac

SEQ ID NO: 2486985 - DNA, 25 bp, Homo sapien
gcctcaataatgaacatggaaaaga

SEQ ID NO: 2486986 - DNA, 25 bp, Homo sapien
tgttcttgcctcaataatgaacatg

SEQ ID NO: 2486987 - DNA, 25 bp, Homo sapien
cataaccacgtgcaatatataatta

SEQ ID NO: 2486988 - DNA, 25 bp, Homo sapien
ttttaacataaccacgtgcaatata

SEQ ID NO: 2486989 - DNA, 25 bp, Homo sapien
ttttctccctaaatggcacgggata

SEQ ID NO: 2486990 - DNA, 25 bp, Homo sapien
aatggcacgggatattctaaatctg

SEQ ID NO: 2486991 - DNA, 25 bp, Homo sapien
aatgtttgaactatacagttgctga

SEQ ID NO: 2486992 - DNA, 25 bp, Homo sapien
tagcatacctccagataatctctct

SEQ ID NO: 2486993 - DNA, 25 bp, Homo sapien
aatctctctattcaagagtttcaaa

SEQ ID NO: 2486994 - DNA, 25 bp, Homo sapien
tattgatgtcgaggtaaggaggcta

SEQ ID NO: 2486995 - DNA, 25 bp, Homo sapien
tattggctgtctggattttaaagac

SEQ ID NO: 2486996 - DNA, 25 bp, Homo sapien
gaccagtaaggtcatgtgaacacag

SEQ ID NO: 2486997 - DNA, 25 bp, Homo sapien
tagtgaccattaaacatctgaccag

SEQ ID NO: 2486998 - DNA, 25 bp, Homo sapien
tcatatgtggcggataagctcacca

SEQ ID NO: 2486999 - DNA, 25 bp, Homo sapien
gagttttaagcctcacatcgtcact

SEQ ID NO: 2487000 - DNA, 25 bp, Homo sapien
ccaattgtatgattaataaagtctt

SEQ ID NO: 2487001 - DNA, 25 bp, Homo sapien
taagcctcacatcgtcacttgctgt

SEQ ID NO: 2487002 - DNA, 25 bp, Homo sapien
acatcgtcacttgctgtcactgcca

SEQ ID NO: 2487003 - DNA, 25 bp, Homo sapien
tgccaaattttgttctagaccacgg

SEQ ID NO: 2487004 - DNA, 25 bp, Homo sapien
ccgtaagttgtctgggccaaaagca

SEQ ID NO: 2487005 - DNA, 25 bp, Homo sapien
aaggctgatagggttgccagataca

SEQ ID NO: 2487006 - DNA, 25 bp, Homo sapien
gcctccatgaaggatcaaagtctgg

SEQ ID NO: 2487007 - DNA, 25 bp, Homo sapien
caaaccacggccagggtacaacgtg

SEQ ID NO: 2487008 - DNA, 25 bp, Homo sapien
tgttttctgcggaatgtagcacggc

SEQ ID NO: 2487009 - DNA, 25 bp, Homo sapien
caacgtgtccgcttaggcggcgata

SEQ ID NO: 2487010 - DNA, 25 bp, Homo sapien
caaaagcttgcgtttaaagcgggct

SEQ ID NO: 2487011 - DNA, 25 bp, Homo sapien
ctgatttctggtagcacgctgacgc

SEQ ID NO: 2487012 - DNA, 25 bp, Homo sapien
agggctgatttctggtagcacgctg

SEQ ID NO: 2487013 - DNA, 25 bp, Homo sapien
ggctgatttctggtagcacgctgac

SEQ ID NO: 2487014 - DNA, 25 bp, Homo sapien
agcactctggtgacgtggaatcggg

SEQ ID NO: 2487015 - DNA, 25 bp, Homo sapien
gtcacgtggtgaggagtagcgcgcg

SEQ ID NO: 2487016 - DNA, 25 bp, Homo sapien
gatctctaaggttcgtccggacgca

SEQ ID NO: 2487017 - DNA, 25 bp, Homo sapien
tctgtcccggatgtaagatggcggc

SEQ ID NO: 2487018 - DNA, 25 bp, Homo sapien
tagcgcgcgagcctccttaagtgat

SEQ ID NO: 2487019 - DNA, 25 bp, Homo sapien
cgcgagacgggtcttgtgtccgcac

SEQ ID NO: 2487020 - DNA, 25 bp, Homo sapien
aggagcagcggagcgcgagacgggt

SEQ ID NO: 2487021 - DNA, 25 bp, Homo sapien
cggagcgcgagacgggtcttgtgtc

SEQ ID NO: 2487022 - DNA, 25 bp, Homo sapien
gcagcggagcgcgagacgggtcttg

SEQ ID NO: 2487023 - DNA, 25 bp, Homo sapien
gtcgccacccgggccatcgccgggc

SEQ ID NO: 2487024 - DNA, 25 bp, Homo sapien
cagtcgccacccgggccatcgccgg

SEQ ID NO: 2487025 - DNA, 25 bp, Homo sapien
gccatcgccgggcccggtttcactg

SEQ ID NO: 2487026 - DNA, 25 bp, Homo sapien
cgcagtcgccacccgggccatcgcc

SEQ ID NO: 2487027 - DNA, 25 bp, Homo sapien
cgcctcctgtagagctgaacgggaa

SEQ ID NO: 2487028 - DNA, 25 bp, Homo sapien
tccgttttcgcctcctgtagagctg

SEQ ID NO: 2487029 - DNA, 25 bp, Homo sapien
ttgttccgttttcgcctcctgtaga

SEQ ID NO: 2487030 - DNA, 25 bp, Homo sapien
tgtagagctgaacgggaattccccg

SEQ ID NO: 2487031 - DNA, 25 bp, Homo sapien
ggccggcggcgggttcgacagcgcg

SEQ ID NO: 2487032 - DNA, 25 bp, Homo sapien
ccgccggcgattatcggcgccgaga

SEQ ID NO: 2487033 - DNA, 25 bp, Homo sapien
gggacttcccggctatgccttggct

SEQ ID NO: 2487034 - DNA, 25 bp, Homo sapien
tggctgctgtttggcggagccggcg

SEQ ID NO: 2487035 - DNA, 25 bp, Homo sapien
ggactcggccgcagcccagccccca

SEQ ID NO: 2487036 - DNA, 25 bp, Homo sapien
gactcggccgcagcccagcccccac

SEQ ID NO: 2487037 - DNA, 25 bp, Homo sapien
cggactcggccgcagcccagccccc

SEQ ID NO: 2487038 - DNA, 25 bp, Homo sapien
tgtctgactgcgcttttgccgccca

SEQ ID NO: 2487039 - DNA, 25 bp, Homo sapien
gcgaagcgcgggagcgctgctcgct

SEQ ID NO: 2487040 - DNA, 25 bp, Homo sapien
ggcagtccagaaccagttggtgtct

SEQ ID NO: 2487041 - DNA, 25 bp, Homo sapien
agctcgggacgtggcggcagctcct

SEQ ID NO: 2487042 - DNA, 25 bp, Homo sapien
cttttctctcttcagagcggtggct

SEQ ID NO: 2487043 - DNA, 25 bp, Homo sapien
tcctgctttcgagcggctgaggcga

SEQ ID NO: 2487044 - DNA, 25 bp, Homo sapien
acagaacgccggctgtatcacccgg

SEQ ID NO: 2487045 - DNA, 25 bp, Homo sapien
acgcgctcccctcgggcagtggagg

SEQ ID NO: 2487046 - DNA, 25 bp, Homo sapien
cgcgtggtcccgtgcctccccgaca

SEQ ID NO: 2487047 - DNA, 25 bp, Homo sapien
gcgccgggagtagccgagccgctgg

SEQ ID NO: 2487048 - DNA, 25 bp, Homo sapien
ctgccctccgcgtggtcccgtgcct

SEQ ID NO: 2487049 - DNA, 25 bp, Homo sapien
cggcgaggaaggacggaggagcgcc

SEQ ID NO: 2487050 - DNA, 25 bp, Homo sapien
gctaattacatttctctacacacca

SEQ ID NO: 2487051 - DNA, 25 bp, Homo sapien
tttaatcccatagctatatttctgc

SEQ ID NO: 2487052 - DNA, 25 bp, Homo sapien
cccacaagatgaatttgatttatca

SEQ ID NO: 2487053 - DNA, 25 bp, Homo sapien
acaccaactgaaaattaccaactga

SEQ ID NO: 2487054 - DNA, 25 bp, Homo sapien
tagctaggtcattgccccaaaggaa

SEQ ID NO: 2487055 - DNA, 25 bp, Homo sapien
caggaaagatgtcacatgaagtgtt

SEQ ID NO: 2487056 - DNA, 25 bp, Homo sapien
tgttaggttatcactattgggcacc

SEQ ID NO: 2487057 - DNA, 25 bp, Homo sapien
tctaagattgtctaatgaagttcac

SEQ ID NO: 2487058 - DNA, 25 bp, Homo sapien
gtagcaagtgcccaactaccttgtg

SEQ ID NO: 2487059 - DNA, 25 bp, Homo sapien
taccttgtggaggaatctagacccc

SEQ ID NO: 2487060 - DNA, 25 bp, Homo sapien
cactgtgagtaggtagagaatgcat

SEQ ID NO: 2487061 - DNA, 25 bp, Homo sapien
gagcgattatgagccttgtggtgcc

SEQ ID NO: 2487062 - DNA, 25 bp, Homo sapien
tatgggagtacacaggaaagaagct

SEQ ID NO: 2487063 - DNA, 25 bp, Homo sapien
aaatcaccacaggagcacaagtagc

SEQ ID NO: 2487064 - DNA, 25 bp, Homo sapien
gcaggaaaacctgtagagtaaaatg

SEQ ID NO: 2487065 - DNA, 25 bp, Homo sapien
gaagcttgtcttagtgttggtattg

SEQ ID NO: 2487066 - DNA, 25 bp, Homo sapien
tggactcattagttagacgttgaac

SEQ ID NO: 2487067 - DNA, 25 bp, Homo sapien
gacgttgaacttagccgtgacctta

SEQ ID NO: 2487068 - DNA, 25 bp, Homo sapien
tcctgtatatacgtagtgaatcact

SEQ ID NO: 2487069 - DNA, 25 bp, Homo sapien
tgctgactatccatgaaccctgtgg

SEQ ID NO: 2487070 - DNA, 25 bp, Homo sapien
tatggtggtggtcttacaggtacat

SEQ ID NO: 2487071 - DNA, 25 bp, Homo sapien
gatcagcttgaacaccagagttgcg

SEQ ID NO: 2487072 - DNA, 25 bp, Homo sapien
gaacagatggagttttgaagtgcta

SEQ ID NO: 2487073 - DNA, 25 bp, Homo sapien
aaatgcatgcagttgagctaggctc

SEQ ID NO: 2487074 - DNA, 25 bp, Homo sapien
tctttcatttcctgagttgttttct

SEQ ID NO: 2487075 - DNA, 25 bp, Homo sapien
tttccttgatatgatcctcttcttt

SEQ ID NO: 2487076 - DNA, 25 bp, Homo sapien
ttctttttccttgatatgatcctct

SEQ ID NO: 2487077 - DNA, 25 bp, Homo sapien
tcaggttgcctctacttctcttcca

SEQ ID NO: 2487078 - DNA, 25 bp, Homo sapien
ctgataggaaatattatagcagtag

SEQ ID NO: 2487079 - DNA, 25 bp, Homo sapien
taggaaatattatagcagtagccca

SEQ ID NO: 2487080 - DNA, 25 bp, Homo sapien
ggaaatattatagcagtagcccaag

SEQ ID NO: 2487081 - DNA, 25 bp, Homo sapien
ataggaaatattatagcagtagccc

SEQ ID NO: 2487082 - DNA, 25 bp, Homo sapien
tcacaacacctacacggctgctggg

SEQ ID NO: 2487083 - DNA, 25 bp, Homo sapien
aacacctacacggctgctggggaag

SEQ ID NO: 2487084 - DNA, 25 bp, Homo sapien
acaacacctacacggctgctgggga

SEQ ID NO: 2487085 - DNA, 25 bp, Homo sapien
cacaacacctacacggctgctgggg

SEQ ID NO: 2487086 - DNA, 25 bp, Homo sapien
gctttgcatgtgatccctccaggta

SEQ ID NO: 2487087 - DNA, 25 bp, Homo sapien
catgtgatccctccaggtatgcaaa

SEQ ID NO: 2487088 - DNA, 25 bp, Homo sapien
ccaggtatgcaaaataatgcctcaa

SEQ ID NO: 2487089 - DNA, 25 bp, Homo sapien
gatccctccaggtatgcaaaataat

SEQ ID NO: 2487090 - DNA, 25 bp, Homo sapien
tgttataacaacttgaacagcccat

SEQ ID NO: 2487091 - DNA, 25 bp, Homo sapien
gcaaatctttagaagggttgttata

SEQ ID NO: 2487092 - DNA, 25 bp, Homo sapien
acttcatatcggatggaagcaaatc

SEQ ID NO: 2487093 - DNA, 25 bp, Homo sapien
gaagacttcatatcggatggaagca

SEQ ID NO: 2487094 - DNA, 25 bp, Homo sapien
ttcactccttctgttaaccagctct

SEQ ID NO: 2487095 - DNA, 25 bp, Homo sapien
tctgttaaccagctctctccttcat

SEQ ID NO: 2487096 - DNA, 25 bp, Homo sapien
tccttctgttaaccagctctctcct

SEQ ID NO: 2487097 - DNA, 25 bp, Homo sapien
ctttcactccttctgttaaccagct

SEQ ID NO: 2487098 - DNA, 25 bp, Homo sapien
agaaatgcacaaagcctggacggcc

SEQ ID NO: 2487099 - DNA, 25 bp, Homo sapien
actgagattattctgtcggccgcac

SEQ ID NO: 2487100 - DNA, 25 bp, Homo sapien
tcctccgcggtcagataaatcatgt

SEQ ID NO: 2487101 - DNA, 25 bp, Homo sapien
ggacggccaatcattcttctcgagg

SEQ ID NO: 2487102 - DNA, 25 bp, Homo sapien
tgttggcggcgctgctgagatgatg

SEQ ID NO: 2487103 - DNA, 25 bp, Homo sapien
gcgggactggcgctgcctcccgggt

SEQ ID NO: 2487104 - DNA, 25 bp, Homo sapien
tgtaggccccgagtgatttcctgcc

SEQ ID NO: 2487105 - DNA, 25 bp, Homo sapien
ccccaaggagtagcactgcgagggt

SEQ ID NO: 2487106 - DNA, 25 bp, Homo sapien
tatttacagctgaggttcggccggt

SEQ ID NO: 2487107 - DNA, 25 bp, Homo sapien
tacagctgaggttcggccggtgatt

SEQ ID NO: 2487108 - DNA, 25 bp, Homo sapien
ctatttacagctgaggttcggccgg

SEQ ID NO: 2487109 - DNA, 25 bp, Homo sapien
tttacagctgaggttcggccggtga

SEQ ID NO: 2487110 - DNA, 25 bp, Homo sapien
tcagctgctcggagacagtgaatcg

SEQ ID NO: 2487111 - DNA, 25 bp, Homo sapien
cggagacagtgaatcgagttcttga

SEQ ID NO: 2487112 - DNA, 25 bp, Homo sapien
gctgctcggagacagtgaatcgagt

SEQ ID NO: 2487113 - DNA, 25 bp, Homo sapien
gtgaatcgagttcttgaaaactgac

SEQ ID NO: 2487114 - DNA, 25 bp, Homo sapien
agcccgtgacttcaataaaatgaag

SEQ ID NO: 2487115 - DNA, 25 bp, Homo sapien
aagcccgtgacttcaataaaatgaa

SEQ ID NO: 2487116 - DNA, 25 bp, Homo sapien
caagcccgtgacttcaataaaatga

SEQ ID NO: 2487117 - DNA, 25 bp, Homo sapien
ccgagcaccacctacccctgtgagg

SEQ ID NO: 2487118 - DNA, 25 bp, Homo sapien
cagtcttgaaaaggcccggccgtgc

SEQ ID NO: 2487119 - DNA, 25 bp, Homo sapien
acccgagcaccacctacccctgtga

SEQ ID NO: 2487120 - DNA, 25 bp, Homo sapien
ttgggccccacctaggacccgagca

SEQ ID NO: 2487121 - DNA, 25 bp, Homo sapien
caattggtagattggccaaatgttc

SEQ ID NO: 2487122 - DNA, 25 bp, Homo sapien
ccttcaaattctacggtgcaattgg

SEQ ID NO: 2487123 - DNA, 25 bp, Homo sapien
aaatgataagaatgagctgggtgcg

SEQ ID NO: 2487124 - DNA, 25 bp, Homo sapien
gaagcaaatccaagacatacattgg

SEQ ID NO: 2487125 - DNA, 25 bp, Homo sapien
gctcgcgtagcgtcctttgaaaaat

SEQ ID NO: 2487126 - DNA, 25 bp, Homo sapien
gaagaggcaagtcagtctgctcgcg

SEQ ID NO: 2487127 - DNA, 25 bp, Homo sapien
gaaaagtagaggacacaggttctcc

SEQ ID NO: 2487128 - DNA, 25 bp, Homo sapien
gaaagagcagtcctctgcagaccgg

SEQ ID NO: 2487129 - DNA, 25 bp, Homo sapien
actctgaaaacagcggagctgctgg

SEQ ID NO: 2487130 - DNA, 25 bp, Homo sapien
tgctgggtcgcttaaggaaagctga

SEQ ID NO: 2487131 - DNA, 25 bp, Homo sapien
gagctgctgggtcgcttaaggaaag

SEQ ID NO: 2487132 - DNA, 25 bp, Homo sapien
agaatctcatcaaagcttaacatat

SEQ ID NO: 2487133 - DNA, 25 bp, Homo sapien
gataggtatgcataaccacagcaga

SEQ ID NO: 2487134 - DNA, 25 bp, Homo sapien
gaaaaccagtgaccacttgtggcct

SEQ ID NO: 2487135 - DNA, 25 bp, Homo sapien
agctgagtacttggcctggcccgat

SEQ ID NO: 2487136 - DNA, 25 bp, Homo sapien
ggctaaatctggatcctgggactct

SEQ ID NO: 2487137 - DNA, 25 bp, Homo sapien
caaaatgccacagagcatggacgga

SEQ ID NO: 2487138 - DNA, 25 bp, Homo sapien
agagcatggacggactgagtttgtt

SEQ ID NO: 2487139 - DNA, 25 bp, Homo sapien
gacactggctacaggaataaggctt

SEQ ID NO: 2487140 - DNA, 25 bp, Homo sapien
gctttggttatcatctagcaaaatg

SEQ ID NO: 2487141 - DNA, 25 bp, Homo sapien
cacaggaaggatcccaaagacggca

SEQ ID NO: 2487142 - DNA, 25 bp, Homo sapien
gatgaagacaactcctgacaaggcc

SEQ ID NO: 2487143 - DNA, 25 bp, Homo sapien
caaacacctggtggcgtgaattccc

SEQ ID NO: 2487144 - DNA, 25 bp, Homo sapien
gagttattcctgagacgtgccatag

SEQ ID NO: 2487145 - DNA, 25 bp, Homo sapien
tacaataccgacaactccagaaatg

SEQ ID NO: 2487146 - DNA, 25 bp, Homo sapien
ctccacaccctggaatgagttcttt

SEQ ID NO: 2487147 - DNA, 25 bp, Homo sapien
caggtgatttactgccctggaggag

SEQ ID NO: 2487148 - DNA, 25 bp, Homo sapien
gctccaggccttttcgaatacaata

SEQ ID NO: 2487149 - DNA, 25 bp, Homo sapien
aatggtggcaatacctcagtagctc

SEQ ID NO: 2487150 - DNA, 25 bp, Homo sapien
gactaggtaattttgtggccgtaca

SEQ ID NO: 2487151 - DNA, 25 bp, Homo sapien
caaatatgagaactggaattagctc

SEQ ID NO: 2487152 - DNA, 25 bp, Homo sapien
taattactcaaagttgtcaaaatgg

SEQ ID NO: 2487153 - DNA, 25 bp, Homo sapien
tcttgtggcgaacactcagatgtgg

SEQ ID NO: 2487154 - DNA, 25 bp, Homo sapien
gaagcagcaggtagatatggcatgc

SEQ ID NO: 2487155 - DNA, 25 bp, Homo sapien
gctgctgctcttgtggcgaacactc

SEQ ID NO: 2487156 - DNA, 25 bp, Homo sapien
cgaacactcagatgtggaaccatag

SEQ ID NO: 2487157 - DNA, 25 bp, Homo sapien
cctgggtgggacttggacacagaac

SEQ ID NO: 2487158 - DNA, 25 bp, Homo sapien
tcaggcttcctagaaggtgggcact

SEQ ID NO: 2487159 - DNA, 25 bp, Homo sapien
cacctcggaggcctatgaaaggaac

SEQ ID NO: 2487160 - DNA, 25 bp, Homo sapien
tttaacccgtagataagctggcagc

SEQ ID NO: 2487161 - DNA, 25 bp, Homo sapien
tcggtcattagatatccgccatcct

SEQ ID NO: 2487162 - DNA, 25 bp, Homo sapien
tgagcccagtcggtcattagatatc

SEQ ID NO: 2487163 - DNA, 25 bp, Homo sapien
aaatgtcgtctcctgagcccagtcg

SEQ ID NO: 2487164 - DNA, 25 bp, Homo sapien
tgacatatacagaaatgtcgtctcc

SEQ ID NO: 2487165 - DNA, 25 bp, Homo sapien
gcacgcatcaccaggtcctgagctg

SEQ ID NO: 2487166 - DNA, 25 bp, Homo sapien
caggtcctgagctgccagtgtgtac

SEQ ID NO: 2487167 - DNA, 25 bp, Homo sapien
cccgggcacgcatcaccaggtcctg

SEQ ID NO: 2487168 - DNA, 25 bp, Homo sapien
cgggcacgcatcaccaggtcctgag

SEQ ID NO: 2487169 - DNA, 25 bp, Homo sapien
tattaaattgtatatgagacataaa

SEQ ID NO: 2487170 - DNA, 25 bp, Homo sapien
atattaaattgtatatgagacataa

SEQ ID NO: 2487171 - DNA, 25 bp, Homo sapien
ttaaattgtatatgagacataaaca

SEQ ID NO: 2487172 - DNA, 25 bp, Homo sapien
attaaattgtatatgagacataaac

SEQ ID NO: 2487173 - DNA, 25 bp, Homo sapien
cttaaagcttgatccaagggtggct

SEQ ID NO: 2487174 - DNA, 25 bp, Homo sapien
ggcttctcaatacttattctgctta

SEQ ID NO: 2487175 - DNA, 25 bp, Homo sapien
tgcttaaccctttgtgttcagcaca

SEQ ID NO: 2487176 - DNA, 25 bp, Homo sapien
ggcccaatactctactaatctgtcc

SEQ ID NO: 2487177 - DNA, 25 bp, Homo sapien
gctgctaaccatatgaggtttaact

SEQ ID NO: 2487178 - DNA, 25 bp, Homo sapien
gacctgtatggattcgccgctgcta

SEQ ID NO: 2487179 - DNA, 25 bp, Homo sapien
gctgcagacctgtatggattcgccg

SEQ ID NO: 2487180 - DNA, 25 bp, Homo sapien
ggattcgccgctgctaaccatatga

SEQ ID NO: 2487181 - DNA, 25 bp, Homo sapien
ccaagagcagtgtgcgtggacaact

SEQ ID NO: 2487182 - DNA, 25 bp, Homo sapien
catgtacccatgtgcttcagaagcg

SEQ ID NO: 2487183 - DNA, 25 bp, Homo sapien
gacaactgagccgttagatgctgca

SEQ ID NO: 2487184 - DNA, 25 bp, Homo sapien
tccataggtgacagtacgaatgctc

SEQ ID NO: 2487185 - DNA, 25 bp, Homo sapien
agaagtttccacagacagttttggg

SEQ ID NO: 2487186 - DNA, 25 bp, Homo sapien
aatgaagctctagagcaaagcctgc

SEQ ID NO: 2487187 - DNA, 25 bp, Homo sapien
tgggcactgggaatgtgaatccatg

SEQ ID NO: 2487188 - DNA, 25 bp, Homo sapien
gacaaaatggtaagcgtcttcttct

SEQ ID NO: 2487189 - DNA, 25 bp, Homo sapien
aagaactgcaaagccgttgtggaaa

SEQ ID NO: 2487190 - DNA, 25 bp, Homo sapien
acagcgtcaaggagccggaagtgct

SEQ ID NO: 2487191 - DNA, 25 bp, Homo sapien
actgcaaagccgttgtggaaagagc

SEQ ID NO: 2487192 - DNA, 25 bp, Homo sapien
ctgatccacagcgtcaaggagccgg

SEQ ID NO: 2487193 - DNA, 25 bp, Homo sapien
gaacacatctttatgctaatcacct

SEQ ID NO: 2487194 - DNA, 25 bp, Homo sapien
tgtcaacagaggaagacaatgctgg

SEQ ID NO: 2487195 - DNA, 25 bp, Homo sapien
taagatacaccagggtcagaaagat

SEQ ID NO: 2487196 - DNA, 25 bp, Homo sapien
ggtcagaaagatcatacagctcatt

SEQ ID NO: 2487197 - DNA, 25 bp, Homo sapien
tcaggatcttgtggccagaggttcc

SEQ ID NO: 2487198 - DNA, 25 bp, Homo sapien
tctcatcaacaggatcagaaatggg

SEQ ID NO: 2487199 - DNA, 25 bp, Homo sapien
tcaaaagaaacaattctccaatgga

SEQ ID NO: 2487200 - DNA, 25 bp, Homo sapien
ccaatggatgactatcagtgctggg

SEQ ID NO: 2487201 - DNA, 25 bp, Homo sapien
tgctggggtgcatttgccatcactc

SEQ ID NO: 2487202 - DNA, 25 bp, Homo sapien
aagaaaggtaatcccttctgcagtt

SEQ ID NO: 2487203 - DNA, 25 bp, Homo sapien
caagaaaggtaatcccttctgcagt

SEQ ID NO: 2487204 - DNA, 25 bp, Homo sapien
agaaaggtaatcccttctgcagttt

SEQ ID NO: 2487205 - DNA, 25 bp, Homo sapien
acaagaaaggtaatcccttctgcag

SEQ ID NO: 2487206 - DNA, 25 bp, Homo sapien
catgtcatggaagaatgcttgagga

SEQ ID NO: 2487207 - DNA, 25 bp, Homo sapien
gaggaacaaccctacaattgtagaa

SEQ ID NO: 2487208 - DNA, 25 bp, Homo sapien
gtccatatcagcctctaagtcatga

SEQ ID NO: 2487209 - DNA, 25 bp, Homo sapien
attattaatttcaggcatgtcatgg

SEQ ID NO: 2487210 - DNA, 25 bp, Homo sapien
tccatcagtggccaagatcagcaca

SEQ ID NO: 2487211 - DNA, 25 bp, Homo sapien
gcacatcatctgatccatgatcata

SEQ ID NO: 2487212 - DNA, 25 bp, Homo sapien
catattttgaaagatcgtagattct

SEQ ID NO: 2487213 - DNA, 25 bp, Homo sapien
gaaactgagtgattgcttctgctac

SEQ ID NO: 2487214 - DNA, 25 bp, Homo sapien
ctttgtcttgacagacttaagtctt

SEQ ID NO: 2487215 - DNA, 25 bp, Homo sapien
ccaaagtatgtctttgtcttgacag

SEQ ID NO: 2487216 - DNA, 25 bp, Homo sapien
cttgacagacttaagtctttcctca

SEQ ID NO: 2487217 - DNA, 25 bp, Homo sapien
tgtcttgacagacttaagtctttcc

SEQ ID NO: 2487218 - DNA, 25 bp, Homo sapien
gagctctcaatagtgtttcctggca

SEQ ID NO: 2487219 - DNA, 25 bp, Homo sapien
ttcccaaggtaaaggctgccagtag

SEQ ID NO: 2487220 - DNA, 25 bp, Homo sapien
cagaaatagccaaggtggttcccaa

SEQ ID NO: 2487221 - DNA, 25 bp, Homo sapien
tatggcactgatctcagggcaacca

SEQ ID NO: 2487222 - DNA, 25 bp, Homo sapien
tactgattccttggatggacgagct

SEQ ID NO: 2487223 - DNA, 25 bp, Homo sapien
tggacgagctggacatcgtatgcct

SEQ ID NO: 2487224 - DNA, 25 bp, Homo sapien
cagctttaccttgcttggtttggct

SEQ ID NO: 2487225 - DNA, 25 bp, Homo sapien
ccttacacgaagaggaagctgcagg

SEQ ID NO: 2487226 - DNA, 25 bp, Homo sapien
ggccttgtttctccaagagcccaaa

SEQ ID NO: 2487227 - DNA, 25 bp, Homo sapien
cccaaaatggggctaaaggcaacag

SEQ ID NO: 2487228 - DNA, 25 bp, Homo sapien
gggctaaaggcaacagcacagtctt

SEQ ID NO: 2487229 - DNA, 25 bp, Homo sapien
caaactggccccaaatagagagggc

SEQ ID NO: 2487230 - DNA, 25 bp, Homo sapien
gaaataaagatccacgcctggcaaa

SEQ ID NO: 2487231 - DNA, 25 bp, Homo sapien
gttaatcgagctttctaggctccca

SEQ ID NO: 2487232 - DNA, 25 bp, Homo sapien
gagtcacagaaagaaggtgggccca

SEQ ID NO: 2487233 - DNA, 25 bp, Homo sapien
tgcttttgtcactaccacccaggga

SEQ ID NO: 2487234 - DNA, 25 bp, Homo sapien
aaatgtcaggcttggacctactgcc

SEQ ID NO: 2487235 - DNA, 25 bp, Homo sapien
gaaggtcatgtaacacagttctggc

SEQ ID NO: 2487236 - DNA, 25 bp, Homo sapien
cacaatggaggtgctgaaccaacgc

SEQ ID NO: 2487237 - DNA, 25 bp, Homo sapien
aagaaatgcagagacgctacagccc

SEQ ID NO: 2487238 - DNA, 25 bp, Homo sapien
actccaatagttgccattacccggg

SEQ ID NO: 2487239 - DNA, 25 bp, Homo sapien
taatgtagatgttggagtcatgcac

SEQ ID NO: 2487240 - DNA, 25 bp, Homo sapien
caagtcccctggtcactccaatagt

SEQ ID NO: 2487241 - DNA, 25 bp, Homo sapien
gtcatgcaccttcaggtcatggtcc

SEQ ID NO: 2487242 - DNA, 25 bp, Homo sapien
taagggggaacttcaagtcctcatc

SEQ ID NO: 2487243 - DNA, 25 bp, Homo sapien
tataagggggaacttcaagtcctca

SEQ ID NO: 2487244 - DNA, 25 bp, Homo sapien
ataagggggaacttcaagtcctcat

SEQ ID NO: 2487245 - DNA, 25 bp, Homo sapien
tggcagagtgttgcaggagcacgaa

SEQ ID NO: 2487246 - DNA, 25 bp, Homo sapien
cagagtgttgcaggagcacgaagtc

SEQ ID NO: 2487247 - DNA, 25 bp, Homo sapien
gagtgttgcaggagcacgaagtcca

SEQ ID NO: 2487248 - DNA, 25 bp, Homo sapien
agtgttgcaggagcacgaagtccat

SEQ ID NO: 2487249 - DNA, 25 bp, Homo sapien
tgttccccatcatcaccctggtcat

SEQ ID NO: 2487250 - DNA, 25 bp, Homo sapien
ttctctgttccccatcatcaccctg

SEQ ID NO: 2487251 - DNA, 25 bp, Homo sapien
catcatcaccctggtcatgtggcct

SEQ ID NO: 2487252 - DNA, 25 bp, Homo sapien
tcatcaccctggtcatgtggcctgc

SEQ ID NO: 2487253 - DNA, 25 bp, Homo sapien
tatggcatctcctatacctacaaga

SEQ ID NO: 2487254 - DNA, 25 bp, Homo sapien
gcaaagagtctccttgttcggctgc

SEQ ID NO: 2487255 - DNA, 25 bp, Homo sapien
taatactaccttccctatgcagagg

SEQ ID NO: 2487256 - DNA, 25 bp, Homo sapien
tgactatgctgttccggctgatgct

SEQ ID NO: 2487257 - DNA, 25 bp, Homo sapien
gctgggaggcctgctagcaaatctc

SEQ ID NO: 2487258 - DNA, 25 bp, Homo sapien
tatacatcccttcagtaaagctttg

SEQ ID NO: 2487259 - DNA, 25 bp, Homo sapien
gcagttataggacttctccaccata

SEQ ID NO: 2487260 - DNA, 25 bp, Homo sapien
tcacactgtcctcatagctgggagg

SEQ ID NO: 2487261 - DNA, 25 bp, Homo sapien
aagttctccactgaattcccgtcat

SEQ ID NO: 2487262 - DNA, 25 bp, Homo sapien
taaagttctccactgaattcccgtc

SEQ ID NO: 2487263 - DNA, 25 bp, Homo sapien
aaagttctccactgaattcccgtca

SEQ ID NO: 2487264 - DNA, 25 bp, Homo sapien
cttaaagttctccactgaattcccg

SEQ ID NO: 2487265 - DNA, 25 bp, Homo sapien
atgatctggcctttgcactctgaca

SEQ ID NO: 2487266 - DNA, 25 bp, Homo sapien
tgatctggcctttgcactctgacat

SEQ ID NO: 2487267 - DNA, 25 bp, Homo sapien
catgatctggcctttgcactctgac

SEQ ID NO: 2487268 - DNA, 25 bp, Homo sapien
gggcctggtcattccttctgtctgg

SEQ ID NO: 2487269 - DNA, 25 bp, Homo sapien
gcctggtcattccttctgtctgggc

SEQ ID NO: 2487270 - DNA, 25 bp, Homo sapien
cagggggcctggtcattccttctgt

SEQ ID NO: 2487271 - DNA, 25 bp, Homo sapien
tgggccattcttccctttgatcctg

SEQ ID NO: 2487272 - DNA, 25 bp, Homo sapien
gcagtagcttaaatctcaggaggcc

SEQ ID NO: 2487273 - DNA, 25 bp, Homo sapien
tccaaaggaatcaggccccaagtct

SEQ ID NO: 2487274 - DNA, 25 bp, Homo sapien
gcaattctggaatccacagaggctc

SEQ ID NO: 2487275 - DNA, 25 bp, Homo sapien
ttagaaaccaagtcctagcccggca

SEQ ID NO: 2487276 - DNA, 25 bp, Homo sapien
tcccggtttctaagattcactttgc

SEQ ID NO: 2487277 - DNA, 25 bp, Homo sapien
ctgcactgtgaaggagagtgaatct

SEQ ID NO: 2487278 - DNA, 25 bp, Homo sapien
tcctttaaggcaacacaagaagagt

SEQ ID NO: 2487279 - DNA, 25 bp, Homo sapien
tttggatggaaactgtctgctggaa

SEQ ID NO: 2487280 - DNA, 25 bp, Homo sapien
taaagtccctgtagagcatcttctt

SEQ ID NO: 2487281 - DNA, 25 bp, Homo sapien
tggaaactccaaatgtgtgaactca

SEQ ID NO: 2487282 - DNA, 25 bp, Homo sapien
gtcatattaaagtccctgtagagca

SEQ ID NO: 2487283 - DNA, 25 bp, Homo sapien
cagcctgtcatattaaagtccctgt

SEQ ID NO: 2487284 - DNA, 25 bp, Homo sapien
tctagcaatccgagagacgcaatgc

SEQ ID NO: 2487285 - DNA, 25 bp, Homo sapien
gtcttgagcaaacagccacttaggg

SEQ ID NO: 2487286 - DNA, 25 bp, Homo sapien
ccacttagggaattgctttgaaaca

SEQ ID NO: 2487287 - DNA, 25 bp, Homo sapien
cattcgaagactattctggagcaga

SEQ ID NO: 2487288 - DNA, 25 bp, Homo sapien
tgactaataactgatgaggccacgt

SEQ ID NO: 2487289 - DNA, 25 bp, Homo sapien
aatgaatcagtaggattacacgcac

SEQ ID NO: 2487290 - DNA, 25 bp, Homo sapien
gaggccacgttaaggaagatgatac

SEQ ID NO: 2487291 - DNA, 25 bp, Homo sapien
ggacccagaagttttaatgactcta

SEQ ID NO: 2487292 - DNA, 25 bp, Homo sapien
gattcacagggttagttcctagagg

SEQ ID NO: 2487293 - DNA, 25 bp, Homo sapien
gagcagatgggcactactttagctg

SEQ ID NO: 2487294 - DNA, 25 bp, Homo sapien
tgttgtctacaaagaaatccagttg

SEQ ID NO: 2487295 - DNA, 25 bp, Homo sapien
ttcctagaggtatctgccccaaggc

SEQ ID NO: 2487296 - DNA, 25 bp, Homo sapien
ctacatagagaacttattttcagga

SEQ ID NO: 2487297 - DNA, 25 bp, Homo sapien
gagctgccacgtgggcagattcttc

SEQ ID NO: 2487298 - DNA, 25 bp, Homo sapien
aaagggcctgtaagacttcatatct

SEQ ID NO: 2487299 - DNA, 25 bp, Homo sapien
catatctgagcatgaagtagtggca

SEQ ID NO: 2487300 - DNA, 25 bp, Homo sapien
cctcacaacgggaatcagaccaagt

SEQ ID NO: 2487301 - DNA, 25 bp, Homo sapien
tcgggggtaaattctgaagacatgg

SEQ ID NO: 2487302 - DNA, 25 bp, Homo sapien
catggggataatttctccatttctg

SEQ ID NO: 2487303 - DNA, 25 bp, Homo sapien
ctggcgctccgtctcgggggtaaat

SEQ ID NO: 2487304 - DNA, 25 bp, Homo sapien
tgaagtcgctggcgctccgtctcgg

SEQ ID NO: 2487305 - DNA, 25 bp, Homo sapien
tccttgctatgactgctggcttcca

SEQ ID NO: 2487306 - DNA, 25 bp, Homo sapien
gtccttgctatgactgctggcttcc

SEQ ID NO: 2487307 - DNA, 25 bp, Homo sapien
cagtccttgctatgactgctggctt

SEQ ID NO: 2487308 - DNA, 25 bp, Homo sapien
ccttgctatgactgctggcttccat

SEQ ID NO: 2487309 - DNA, 25 bp, Homo sapien
ggtgcttctcagtcctggattcctg

SEQ ID NO: 2487310 - DNA, 25 bp, Homo sapien
tgagctttgagagagccgacgtcct

SEQ ID NO: 2487311 - DNA, 25 bp, Homo sapien
tgatgcattttgtctcctccagcga

SEQ ID NO: 2487312 - DNA, 25 bp, Homo sapien
cgtcctaagatagaggaacactcct

SEQ ID NO: 2487313 - DNA, 25 bp, Homo sapien
cctctcctttgtaagatccaataat

SEQ ID NO: 2487314 - DNA, 25 bp, Homo sapien
ctcctctcctttgtaagatccaata

SEQ ID NO: 2487315 - DNA, 25 bp, Homo sapien
ctctcctttgtaagatccaataata

SEQ ID NO: 2487316 - DNA, 25 bp, Homo sapien
tcctctcctttgtaagatccaataa

SEQ ID NO: 2487317 - DNA, 25 bp, Homo sapien
gccaggaactgtgcttaacatttta

SEQ ID NO: 2487318 - DNA, 25 bp, Homo sapien
tataacctgctctacatcacaagtg

SEQ ID NO: 2487319 - DNA, 25 bp, Homo sapien
ggtcccacagcgctatgataagtca

SEQ ID NO: 2487320 - DNA, 25 bp, Homo sapien
ctgggcctctgttgtaaggtctcat

SEQ ID NO: 2487321 - DNA, 25 bp, Homo sapien
taaagcagctcaggaacgctatcag

SEQ ID NO: 2487322 - DNA, 25 bp, Homo sapien
tttccataaggcaggcaagcacttg

SEQ ID NO: 2487323 - DNA, 25 bp, Homo sapien
gacacagtggagtcctaaagcagct

SEQ ID NO: 2487324 - DNA, 25 bp, Homo sapien
gaatacagttctagggtccagagct

SEQ ID NO: 2487325 - DNA, 25 bp, Homo sapien
aaggaactcaaaggtcagtgccgta

SEQ ID NO: 2487326 - DNA, 25 bp, Homo sapien
gtgagagaggcaaccttaacatcca

SEQ ID NO: 2487327 - DNA, 25 bp, Homo sapien
gagagaggcaaccttaacatccaag

SEQ ID NO: 2487328 - DNA, 25 bp, Homo sapien
actcaaaggtcagtgccgtacagtt

SEQ ID NO: 2487329 - DNA, 25 bp, Homo sapien
ctgtcttctgccatctatgcctaac

SEQ ID NO: 2487330 - DNA, 25 bp, Homo sapien
gaactaatagagaaagctttaactg

SEQ ID NO: 2487331 - DNA, 25 bp, Homo sapien
ttgaactaatagagaaagctttaac

SEQ ID NO: 2487332 - DNA, 25 bp, Homo sapien
atagagaaagctttaactgtaaagg

SEQ ID NO: 2487333 - DNA, 25 bp, Homo sapien
ctttgaactaatagagaaagcttta

SEQ ID NO: 2487334 - DNA, 25 bp, Homo sapien
cccctaagtgtgcagatgtctgatg

SEQ ID NO: 2487335 - DNA, 25 bp, Homo sapien
cccataaagccacaaacagcatcag

SEQ ID NO: 2487336 - DNA, 25 bp, Homo sapien
tagttcctgaccattggcagcttcc

SEQ ID NO: 2487337 - DNA, 25 bp, Homo sapien
atcagatgatacacagcttagttcc

SEQ ID NO: 2487338 - DNA, 25 bp, Homo sapien
tatattatatgaactcctctctcgt

SEQ ID NO: 2487339 - DNA, 25 bp, Homo sapien
aaaggcaaatcacaatgagggccgt

SEQ ID NO: 2487340 - DNA, 25 bp, Homo sapien
tcctctctcgttctatctgtaggtc

SEQ ID NO: 2487341 - DNA, 25 bp, Homo sapien
gagggccgtgcagccaccagatata

SEQ ID NO: 2487342 - DNA, 25 bp, Homo sapien
ttccttgaatgcactttcaagcgct

SEQ ID NO: 2487343 - DNA, 25 bp, Homo sapien
actttcaagcgctccgatgaccagg

SEQ ID NO: 2487344 - DNA, 25 bp, Homo sapien
tcttctcggtaaagaagcgtgtggg

SEQ ID NO: 2487345 - DNA, 25 bp, Homo sapien
tgaccaggcactcatggggaatctt

SEQ ID NO: 2487346 - DNA, 25 bp, Homo sapien
agagtccggctgttggcgggcgtgt

SEQ ID NO: 2487347 - DNA, 25 bp, Homo sapien
gacggcggagttcttcaggatgtcc

SEQ ID NO: 2487348 - DNA, 25 bp, Homo sapien
ggcgggcgtgttctcaggctcctcc

SEQ ID NO: 2487349 - DNA, 25 bp, Homo sapien
ggcaggacggcggagttcttcagga

SEQ ID NO: 2487350 - DNA, 25 bp, Homo sapien
cagcgaccaatagtggcaggaaaca

SEQ ID NO: 2487351 - DNA, 25 bp, Homo sapien
ccgtcaaacagcgaccaatagtggc

SEQ ID NO: 2487352 - DNA, 25 bp, Homo sapien
gaccaatagtggcaggaaacaccct

SEQ ID NO: 2487353 - DNA, 25 bp, Homo sapien
tagtggcaggaaacaccctcggatt

SEQ ID NO: 2487354 - DNA, 25 bp, Homo sapien
ttctccagctgatgtcactctcggt

SEQ ID NO: 2487355 - DNA, 25 bp, Homo sapien
ccttacagctacatgcaacccgtgt

SEQ ID NO: 2487356 - DNA, 25 bp, Homo sapien
cttacagctacatgcaacccgtgtt

SEQ ID NO: 2487357 - DNA, 25 bp, Homo sapien
ctcccttagttctccagctgatgtc

SEQ ID NO: 2487358 - DNA, 25 bp, Homo sapien
tctggcaaagcagactgagaagcct

SEQ ID NO: 2487359 - DNA, 25 bp, Homo sapien
accatctggacagcggccttgaggg

SEQ ID NO: 2487360 - DNA, 25 bp, Homo sapien
gagcaccatctggacagcggccttg

SEQ ID NO: 2487361 - DNA, 25 bp, Homo sapien
ccttgagggctagggtgacattcca

SEQ ID NO: 2487362 - DNA, 25 bp, Homo sapien
aatgaccagcttaaattttagccct

SEQ ID NO: 2487363 - DNA, 25 bp, Homo sapien
tgaccagcttaaattttagccctac

SEQ ID NO: 2487364 - DNA, 25 bp, Homo sapien
cccagggccaaccaaagatgtcaaa

SEQ ID NO: 2487365 - DNA, 25 bp, Homo sapien
ccagggccaaccaaagatgtcaaaa

SEQ ID NO: 2487366 - DNA, 25 bp, Homo sapien
gtacccatcccctctttatggagtg

SEQ ID NO: 2487367 - DNA, 25 bp, Homo sapien
acatcaacgtgcacctgaactccgg

SEQ ID NO: 2487368 - DNA, 25 bp, Homo sapien
ggttctagacataacctcagacgtt

SEQ ID NO: 2487369 - DNA, 25 bp, Homo sapien
aaacagccagcgttagccatctggg

SEQ ID NO: 2487370 - DNA, 25 bp, Homo sapien
gaatggcaaaacctcagttcggaaa

SEQ ID NO: 2487371 - DNA, 25 bp, Homo sapien
cctgatgagggcgaaatattccaaa

SEQ ID NO: 2487372 - DNA, 25 bp, Homo sapien
caaagggctgctgttgtagaaccag

SEQ ID NO: 2487373 - DNA, 25 bp, Homo sapien
tgctgatggtcttggccgagatgct

SEQ ID NO: 2487374 - DNA, 25 bp, Homo sapien
tgactccccgtcctttgctgagagc

SEQ ID NO: 2487375 - DNA, 25 bp, Homo sapien
ctgaggatatgactgctttattccc

SEQ ID NO: 2487376 - DNA, 25 bp, Homo sapien
gtgtcaatgactccccgtcctttgc

SEQ ID NO: 2487377 - DNA, 25 bp, Homo sapien
gaggatatgactgctttattcccca

SEQ ID NO: 2487378 - DNA, 25 bp, Homo sapien
ctgagaaccaaggatcgagaagggt

SEQ ID NO: 2487379 - DNA, 25 bp, Homo sapien
gaaccaaggatcgagaagggtctta

SEQ ID NO: 2487380 - DNA, 25 bp, Homo sapien
tgagaaccaaggatcgagaagggtc

SEQ ID NO: 2487381 - DNA, 25 bp, Homo sapien
gagaaccaaggatcgagaagggtct

SEQ ID NO: 2487382 - DNA, 25 bp, Homo sapien
tggtcttcattgtgtgtgctcttcc

SEQ ID NO: 2487383 - DNA, 25 bp, Homo sapien
ttgaggtcacggcccctgccttctt

SEQ ID NO: 2487384 - DNA, 25 bp, Homo sapien
ccattgggaagggaggaccgtctct

SEQ ID NO: 2487385 - DNA, 25 bp, Homo sapien
ttcttcacagtgagcacctcacagc

SEQ ID NO: 2487386 - DNA, 25 bp, Homo sapien
ccatatttcactacggccatacccc

SEQ ID NO: 2487387 - DNA, 25 bp, Homo sapien
gcatgtcgtaaaaatccaagagaac

SEQ ID NO: 2487388 - DNA, 25 bp, Homo sapien
gagaaccatatttcactacggccat

SEQ ID NO: 2487389 - DNA, 25 bp, Homo sapien
acagagaaccatatttcactacggc

SEQ ID NO: 2487390 - DNA, 25 bp, Homo sapien
tgtgtacactgctctattgattgag

SEQ ID NO: 2487391 - DNA, 25 bp, Homo sapien
gctctataagtgtggtgtgtacact

SEQ ID NO: 2487392 - DNA, 25 bp, Homo sapien
gtggtgtgtacactgctctattgat

SEQ ID NO: 2487393 - DNA, 25 bp, Homo sapien
aaattagctctataagtgtggtgtg

SEQ ID NO: 2487394 - DNA, 25 bp, Homo sapien
gaaccgaacaatggctctcggtgga

SEQ ID NO: 2487395 - DNA, 25 bp, Homo sapien
aagagagtaggcgaatgaaccgaga

SEQ ID NO: 2487396 - DNA, 25 bp, Homo sapien
tcaggcagggtctcttacaatagtc

SEQ ID NO: 2487397 - DNA, 25 bp, Homo sapien
aatgaaccgagaagtcccatgaaac

SEQ ID NO: 2487398 - DNA, 25 bp, Homo sapien
gtgtcttcctgacgggccctctgaa

SEQ ID NO: 2487399 - DNA, 25 bp, Homo sapien
gacgggccctctgaatatcctcagc

SEQ ID NO: 2487400 - DNA, 25 bp, Homo sapien
tcctgacgggccctctgaatatcct

SEQ ID NO: 2487401 - DNA, 25 bp, Homo sapien
gggccctctgaatatcctcagcttc

SEQ ID NO: 2487402 - DNA, 25 bp, Homo sapien
cctcgcaccccctcatccttagcca

SEQ ID NO: 2487403 - DNA, 25 bp, Homo sapien
ctcgcaccccctcatccttagccat

SEQ ID NO: 2487404 - DNA, 25 bp, Homo sapien
tcctcgcaccccctcatccttagcc

SEQ ID NO: 2487405 - DNA, 25 bp, Homo sapien
ttctcctagacatcatctttccttc

SEQ ID NO: 2487406 - DNA, 25 bp, Homo sapien
cagaggtgactggtttagggatggc

SEQ ID NO: 2487407 - DNA, 25 bp, Homo sapien
gatggccacctgatctctgagctga

SEQ ID NO: 2487408 - DNA, 25 bp, Homo sapien
ttttatctgcccagactccctttct

SEQ ID NO: 2487409 - DNA, 25 bp, Homo sapien
catgcagtcgagtttcgcacttttg

SEQ ID NO: 2487410 - DNA, 25 bp, Homo sapien
aatcatgcagtcgagtttcgcactt

SEQ ID NO: 2487411 - DNA, 25 bp, Homo sapien
tcatgcagtcgagtttcgcactttt

SEQ ID NO: 2487412 - DNA, 25 bp, Homo sapien
aaatcatgcagtcgagtttcgcact

SEQ ID NO: 2487413 - DNA, 25 bp, Homo sapien
gtatccctttcgttgcaaggacaaa

SEQ ID NO: 2487414 - DNA, 25 bp, Homo sapien
tctccttgctccacgttccaaaatg

SEQ ID NO: 2487415 - DNA, 25 bp, Homo sapien
tggtaagctaggtcctgcagggtcc

SEQ ID NO: 2487416 - DNA, 25 bp, Homo sapien
ttgctccacgttccaaaatggtaag

SEQ ID NO: 2487417 - DNA, 25 bp, Homo sapien
aaggaggtacccactggcaaaggca

SEQ ID NO: 2487418 - DNA, 25 bp, Homo sapien
gtcatggagggccacaaagagcaca

SEQ ID NO: 2487419 - DNA, 25 bp, Homo sapien
tgaactcagacctgtaagacaagga

SEQ ID NO: 2487420 - DNA, 25 bp, Homo sapien
gacaaggaggaagatacgactgcat

SEQ ID NO: 2487421 - DNA, 25 bp, Homo sapien
gacgaagccagaattaggaacctcc

SEQ ID NO: 2487422 - DNA, 25 bp, Homo sapien
tccagagagattccagagctcgcat

SEQ ID NO: 2487423 - DNA, 25 bp, Homo sapien
tgagtgatgcaaggtgacgaagcca

SEQ ID NO: 2487424 - DNA, 25 bp, Homo sapien
tcaagacttatagctgggcactgtg

SEQ ID NO: 2487425 - DNA, 25 bp, Homo sapien
aatggctaagtttacaaaagtctga

SEQ ID NO: 2487426 - DNA, 25 bp, Homo sapien
caatataactgaaactagatggtaa

SEQ ID NO: 2487427 - DNA, 25 bp, Homo sapien
cacaaaaaggcgataggtgcccatg

SEQ ID NO: 2487428 - DNA, 25 bp, Homo sapien
aaaagcccaacaaaagctgggcgtg

SEQ ID NO: 2487429 - DNA, 25 bp, Homo sapien
taaaacagctggtgaaggggtggaa

SEQ ID NO: 2487430 - DNA, 25 bp, Homo sapien
ggtggaagcgtgtcagtggcaaaaa

SEQ ID NO: 2487431 - DNA, 25 bp, Homo sapien
tcccatttgaagtagctggtgcagt

SEQ ID NO: 2487432 - DNA, 25 bp, Homo sapien
acatgcctccatccacatcaagtct

SEQ ID NO: 2487433 - DNA, 25 bp, Homo sapien
ttcccaagaagagtgtgagcctccc

SEQ ID NO: 2487434 - DNA, 25 bp, Homo sapien
tactcctctgtcatgctgtgcatgg

SEQ ID NO: 2487435 - DNA, 25 bp, Homo sapien
aagttattgatcatggtgccacccc

SEQ ID NO: 2487436 - DNA, 25 bp, Homo sapien
taatcagtatgtccagctcaccaaa

SEQ ID NO: 2487437 - DNA, 25 bp, Homo sapien
ccagtttgaccccatgtgaagctca

SEQ ID NO: 2487438 - DNA, 25 bp, Homo sapien
taattcagtgatggtcaccagggtc

SEQ ID NO: 2487439 - DNA, 25 bp, Homo sapien
gaccagggccttaataatcatccag

SEQ ID NO: 2487440 - DNA, 25 bp, Homo sapien
tacctttaagcattagaccagggcc

SEQ ID NO: 2487441 - DNA, 25 bp, Homo sapien
gggccttcaggtacaaagctaatca

SEQ ID NO: 2487442 - DNA, 25 bp, Homo sapien
tcctggtgctggtccctttgaacct

SEQ ID NO: 2487443 - DNA, 25 bp, Homo sapien
tatattatgaatccagcatgggacc

SEQ ID NO: 2487444 - DNA, 25 bp, Homo sapien
taacagcagggaaggtcttgggcct

SEQ ID NO: 2487445 - DNA, 25 bp, Homo sapien
ggacagatctcaggcgtttggcagt

SEQ ID NO: 2487446 - DNA, 25 bp, Homo sapien
ggcatgcaaacactctgaaattcgt

SEQ ID NO: 2487447 - DNA, 25 bp, Homo sapien
taccacagggtatgcctccaagttg

SEQ ID NO: 2487448 - DNA, 25 bp, Homo sapien
caagttgctgtctcgtaaagggtcc

SEQ ID NO: 2487449 - DNA, 25 bp, Homo sapien
agttttcccgtttcgtacagctgag

SEQ ID NO: 2487450 - DNA, 25 bp, Homo sapien
catcaaggcgcccaggcattggaag

SEQ ID NO: 2487451 - DNA, 25 bp, Homo sapien
tagtactggcatttaccgaaagcgc

SEQ ID NO: 2487452 - DNA, 25 bp, Homo sapien
tgggtcgtcaacctaactcagtcgg

SEQ ID NO: 2487453 - DNA, 25 bp, Homo sapien
ggaaatgtacaaccacgcactcgga

SEQ ID NO: 2487454 - DNA, 25 bp, Homo sapien
gaaactgagaccttcggaaatgtac

SEQ ID NO: 2487455 - DNA, 25 bp, Homo sapien
tcgcgggctgaaagtgagagaaact

SEQ ID NO: 2487456 - DNA, 25 bp, Homo sapien
gattcacagacctgtctcaccttag

SEQ ID NO: 2487457 - DNA, 25 bp, Homo sapien
gaagagggctggaaccgtgcgggga

SEQ ID NO: 2487458 - DNA, 25 bp, Homo sapien
gggaagggccgcgaggagagcaggg

SEQ ID NO: 2487459 - DNA, 25 bp, Homo sapien
agtgtaagtaaagagctccccgccg

SEQ ID NO: 2487460 - DNA, 25 bp, Homo sapien
gacgccggcagctagtgagagccct

SEQ ID NO: 2487461 - DNA, 25 bp, Homo sapien
gatggggcgggcgatgtggtcggcg

SEQ ID NO: 2487462 - DNA, 25 bp, Homo sapien
aggatggggcgggcgatgtggtcgg

SEQ ID NO: 2487463 - DNA, 25 bp, Homo sapien
agccgccgagtctccttgaggatga

SEQ ID NO: 2487464 - DNA, 25 bp, Homo sapien
gcagccgccgagtctccttgaggat

SEQ ID NO: 2487465 - DNA, 25 bp, Homo sapien
gccagccatgatgccgcccatgaaa

SEQ ID NO: 2487466 - DNA, 25 bp, Homo sapien
cacggcagatttcactcgagtgagc

SEQ ID NO: 2487467 - DNA, 25 bp, Homo sapien
tctggccgcccgtaggggaaacgca

SEQ ID NO: 2487468 - DNA, 25 bp, Homo sapien
gcccatgaaattggccacggcagat

SEQ ID NO: 2487469 - DNA, 25 bp, Homo sapien
ccgggcaaggcgcagcgcggggcat

SEQ ID NO: 2487470 - DNA, 25 bp, Homo sapien
gggcgccgggcgcacggcgagtcgg

SEQ ID NO: 2487471 - DNA, 25 bp, Homo sapien
gggcaaggcgcagcgcggggcatgc

SEQ ID NO: 2487472 - DNA, 25 bp, Homo sapien
gcagcggtgcgagcaggaggcggcg

SEQ ID NO: 2487473 - DNA, 25 bp, Homo sapien
ttccgcaacggagctgcatggagcg

SEQ ID NO: 2487474 - DNA, 25 bp, Homo sapien
tgaactgagcccacccggcgagctc

SEQ ID NO: 2487475 - DNA, 25 bp, Homo sapien
tcggctccggcgtgcgctgaactga

SEQ ID NO: 2487476 - DNA, 25 bp, Homo sapien
tctcgtgcttagtgccgcggtggcc

SEQ ID NO: 2487477 - DNA, 25 bp, Homo sapien
gagggggagaccggctgagtcggta

SEQ ID NO: 2487478 - DNA, 25 bp, Homo sapien
gcggaggggatgggggcgctgtgag

SEQ ID NO: 2487479 - DNA, 25 bp, Homo sapien
ggcggaggggatgggggcgctgtga

SEQ ID NO: 2487480 - DNA, 25 bp, Homo sapien
tggcggaggggatgggggcgctgtg

SEQ ID NO: 2487481 - DNA, 25 bp, Homo sapien
cccaggtgttgaaggagaagccaat

SEQ ID NO: 2487482 - DNA, 25 bp, Homo sapien
ttcaacggagaatacaggccctcgt

SEQ ID NO: 2487483 - DNA, 25 bp, Homo sapien
gcagttatgcaccaaacagcttgct

SEQ ID NO: 2487484 - DNA, 25 bp, Homo sapien
aggccctcgttcttctcagtcagtg

SEQ ID NO: 2487485 - DNA, 25 bp, Homo sapien
agtcttggtatgtcattagctttgc

SEQ ID NO: 2487486 - DNA, 25 bp, Homo sapien
attagctttgctagcaaacgttgcc

SEQ ID NO: 2487487 - DNA, 25 bp, Homo sapien
cattagctttgctagcaaacgttgc

SEQ ID NO: 2487488 - DNA, 25 bp, Homo sapien
gagaaagtcttggtatgtcattagc

SEQ ID NO: 2487489 - DNA, 25 bp, Homo sapien
cccatcagcatcaaagcggaatggg

SEQ ID NO: 2487490 - DNA, 25 bp, Homo sapien
tatacagggctgacagttaatgctg

SEQ ID NO: 2487491 - DNA, 25 bp, Homo sapien
gggcttgcttgcctccgtggcttca

SEQ ID NO: 2487492 - DNA, 25 bp, Homo sapien
gttgtgattttggatcccatcagca

SEQ ID NO: 2487493 - DNA, 25 bp, Homo sapien
ccaattttccggcatgaggtccaaa

SEQ ID NO: 2487494 - DNA, 25 bp, Homo sapien
tcttcttggcccatcgtgtggctgc

SEQ ID NO: 2487495 - DNA, 25 bp, Homo sapien
gtgagctgcatgcacttgaaaggca

SEQ ID NO: 2487496 - DNA, 25 bp, Homo sapien
cactgtgcggaaacttgaggatgaa

SEQ ID NO: 2487497 - DNA, 25 bp, Homo sapien
tgttggacatacttttggcgggcac

SEQ ID NO: 2487498 - DNA, 25 bp, Homo sapien
tcacttgagtgcaaggtccatcgac

SEQ ID NO: 2487499 - DNA, 25 bp, Homo sapien
cacgatgggccaagaagattgaagc

SEQ ID NO: 2487500 - DNA, 25 bp, Homo sapien
agaacagggctttggtcgatggacc

SEQ ID NO: 2487501 - DNA, 25 bp, Homo sapien
cctcatgccggaaaattggtcgcga

SEQ ID NO: 2487502 - DNA, 25 bp, Homo sapien
tacaaaatgggcagccacacgatgg

SEQ ID NO: 2487503 - DNA, 25 bp, Homo sapien
cacagtgcccgccaaaagtatgtcc

SEQ ID NO: 2487504 - DNA, 25 bp, Homo sapien
aaagtatgtccaacaagcctggcag

SEQ ID NO: 2487505 - DNA, 25 bp, Homo sapien
tcctccggcatgagaaaggagtaac

SEQ ID NO: 2487506 - DNA, 25 bp, Homo sapien
ggagcccacttctgggacactggga

SEQ ID NO: 2487507 - DNA, 25 bp, Homo sapien
aggagtaacattcccgcctggtgag

SEQ ID NO: 2487508 - DNA, 25 bp, Homo sapien
cctttataagtaggcctccagcgcc

SEQ ID NO: 2487509 - DNA, 25 bp, Homo sapien
tccacatcctgttgtcattgctgta

SEQ ID NO: 2487510 - DNA, 25 bp, Homo sapien
ccatgtccacatcctgttgtcattg

SEQ ID NO: 2487511 - DNA, 25 bp, Homo sapien
tgtccacatcctgttgtcattgctg

SEQ ID NO: 2487512 - DNA, 25 bp, Homo sapien
catgtccacatcctgttgtcattgc

SEQ ID NO: 2487513 - DNA, 25 bp, Homo sapien
cttcttcgatatatcctgaactttc

SEQ ID NO: 2487514 - DNA, 25 bp, Homo sapien
ttgcttgacttcttcgatatatcct

SEQ ID NO: 2487515 - DNA, 25 bp, Homo sapien
cagacgggctccgataagatggatg

SEQ ID NO: 2487516 - DNA, 25 bp, Homo sapien
ccagacgggctccgataagatggat

SEQ ID NO: 2487517 - DNA, 25 bp, Homo sapien
taaagaatgtccagaaaattaggcc

SEQ ID NO: 2487518 - DNA, 25 bp, Homo sapien
ccagcagttgggttctgacttgtaa

SEQ ID NO: 2487519 - DNA, 25 bp, Homo sapien
cctggaatgaccaaggaaggagctc

SEQ ID NO: 2487520 - DNA, 25 bp, Homo sapien
tgagtgactcaagaatctcctggga

SEQ ID NO: 2487521 - DNA, 25 bp, Homo sapien
aaaaagtctccatagataccagctt

SEQ ID NO: 2487522 - DNA, 25 bp, Homo sapien
aaaagtctccatagataccagcttt

SEQ ID NO: 2487523 - DNA, 25 bp, Homo sapien
ttccatggggctgagagacgtagcc

SEQ ID NO: 2487524 - DNA, 25 bp, Homo sapien
ccaggatgtctctactggttacatt

SEQ ID NO: 2487525 - DNA, 25 bp, Homo sapien
gttacattcttccatggggctgaga

SEQ ID NO: 2487526 - DNA, 25 bp, Homo sapien
ggatgtctctactggttacattctt

SEQ ID NO: 2487527 - DNA, 25 bp, Homo sapien
cttgcttctgcagaactttaaaact

SEQ ID NO: 2487528 - DNA, 25 bp, Homo sapien
gagatcttgcttctgcagaacttta

SEQ ID NO: 2487529 - DNA, 25 bp, Homo sapien
gctcaatagcgcctgctcaagtcct

SEQ ID NO: 2487530 - DNA, 25 bp, Homo sapien
cagctcaatagcgcctgctcaagtc

SEQ ID NO: 2487531 - DNA, 25 bp, Homo sapien
tgtgcatattgtgtgagtccagctg

SEQ ID NO: 2487532 - DNA, 25 bp, Homo sapien
atattgtgtgagtccagctgggcca

SEQ ID NO: 2487533 - DNA, 25 bp, Homo sapien
ctgtgcgggagtgtgcatattgtgt

SEQ ID NO: 2487534 - DNA, 25 bp, Homo sapien
tgcatattgtgtgagtccagctggg

SEQ ID NO: 2487535 - DNA, 25 bp, Homo sapien
ggttttccacagtgccgtagtcctg

SEQ ID NO: 2487536 - DNA, 25 bp, Homo sapien
agaagcttcatgatgtggagtggct

SEQ ID NO: 2487537 - DNA, 25 bp, Homo sapien
cgtagtcctgtccactttaattggc

SEQ ID NO: 2487538 - DNA, 25 bp, Homo sapien
atttgagtgaaccagaagcttcatg

SEQ ID NO: 2487539 - DNA, 25 bp, Homo sapien
ctggaaaggtcattgctattacttg

SEQ ID NO: 2487540 - DNA, 25 bp, Homo sapien
ggaaaggtcattgctattacttgat

SEQ ID NO: 2487541 - DNA, 25 bp, Homo sapien
tgttaacatcaagatcctctggaaa

SEQ ID NO: 2487542 - DNA, 25 bp, Homo sapien
gttaacatcaagatcctctggaaag

SEQ ID NO: 2487543 - DNA, 25 bp, Homo sapien
aattccatctaactctccaggtaag

SEQ ID NO: 2487544 - DNA, 25 bp, Homo sapien
tccctgtacgggatgagaacctgcc

SEQ ID NO: 2487545 - DNA, 25 bp, Homo sapien
gggacccaaggactacagctggaat

SEQ ID NO: 2487546 - DNA, 25 bp, Homo sapien
tagaatcaaactcagtgctaccatg

SEQ ID NO: 2487547 - DNA, 25 bp, Homo sapien
tatattcaagtcagaaatcctgtag

SEQ ID NO: 2487548 - DNA, 25 bp, Homo sapien
ttttcaatatagtaccacaagccat

SEQ ID NO: 2487549 - DNA, 25 bp, Homo sapien
cataataagctagaggatatagaac

SEQ ID NO: 2487550 - DNA, 25 bp, Homo sapien
tcctgtagtatgaagacataccttc

SEQ ID NO: 2487551 - DNA, 25 bp, Homo sapien
ctgtaataagcttggcagggtcctg

SEQ ID NO: 2487552 - DNA, 25 bp, Homo sapien
gctgaggtccaattctaacggagaa

SEQ ID NO: 2487553 - DNA, 25 bp, Homo sapien
ttttggctcaaatcggctgaggtcc

SEQ ID NO: 2487554 - DNA, 25 bp, Homo sapien
tttccagaactagcatcccagacgg

SEQ ID NO: 2487555 - DNA, 25 bp, Homo sapien
taaaccgcagagaataagaccatgt

SEQ ID NO: 2487556 - DNA, 25 bp, Homo sapien
gcttccgggttctcacagtgctatc

SEQ ID NO: 2487557 - DNA, 25 bp, Homo sapien
tatcaatacaaggagcctaagggct

SEQ ID NO: 2487558 - DNA, 25 bp, Homo sapien
gaccatgtatttgcctagtgcagaa

SEQ ID NO: 2487559 - DNA, 25 bp, Homo sapien
taatactattaaaaccatgctggcc

SEQ ID NO: 2487560 - DNA, 25 bp, Homo sapien
aataatactattaaaaccatgctgg

SEQ ID NO: 2487561 - DNA, 25 bp, Homo sapien
tcaataatactattaaaaccatgct

SEQ ID NO: 2487562 - DNA, 25 bp, Homo sapien
actcaataatactattaaaaccatg

SEQ ID NO: 2487563 - DNA, 25 bp, Homo sapien
tgagcaggagctcattacaccccag

SEQ ID NO: 2487564 - DNA, 25 bp, Homo sapien
caaaaggaggccactgccagttgta

SEQ ID NO: 2487565 - DNA, 25 bp, Homo sapien
caggcacttgtactcctaggaggta

SEQ ID NO: 2487566 - DNA, 25 bp, Homo sapien
tagaactctaaactggccacaatga

SEQ ID NO: 2487567 - DNA, 25 bp, Homo sapien
gatttaggcgagtccttccacatac

SEQ ID NO: 2487568 - DNA, 25 bp, Homo sapien
ggacttggaagatttaggcgagtcc

SEQ ID NO: 2487569 - DNA, 25 bp, Homo sapien
gaagatttaggcgagtccttccaca

SEQ ID NO: 2487570 - DNA, 25 bp, Homo sapien
cttggaagatttaggcgagtccttc

SEQ ID NO: 2487571 - DNA, 25 bp, Homo sapien
tgtttgttgggcttcgattgttaga

SEQ ID NO: 2487572 - DNA, 25 bp, Homo sapien
gcttcgattgttagaataaaaagtc

SEQ ID NO: 2487573 - DNA, 25 bp, Homo sapien
cttctgctcatactgtcagtatctt

SEQ ID NO: 2487574 - DNA, 25 bp, Homo sapien
tgttgggcttcgattgttagaataa

SEQ ID NO: 2487575 - DNA, 25 bp, Homo sapien
ggaacccagtaatgcagtgatggtg

SEQ ID NO: 2487576 - DNA, 25 bp, Homo sapien
aaaaacatgtatatccagggattac

SEQ ID NO: 2487577 - DNA, 25 bp, Homo sapien
atggtgatggtagggttttccgatt

SEQ ID NO: 2487578 - DNA, 25 bp, Homo sapien
tacagcagctattcaaggaacccag

SEQ ID NO: 2487579 - DNA, 25 bp, Homo sapien
caaaagtcatcttcaccgtgcggat

SEQ ID NO: 2487580 - DNA, 25 bp, Homo sapien
tgaagccgtagcaggtacccaagat

SEQ ID NO: 2487581 - DNA, 25 bp, Homo sapien
catggagaagacgaagtactgcggc

SEQ ID NO: 2487582 - DNA, 25 bp, Homo sapien
tcttggcccgggaaatggacttcac

SEQ ID NO: 2487583 - DNA, 25 bp, Homo sapien
gccctattgccggaagactgctggt

SEQ ID NO: 2487584 - DNA, 25 bp, Homo sapien
cctatgtttgcgacgggaagaacgc

SEQ ID NO: 2487585 - DNA, 25 bp, Homo sapien
caaaaacttggacaactggacgagt

SEQ ID NO: 2487586 - DNA, 25 bp, Homo sapien
tcctcgtccgaagcgcagggtcttt

SEQ ID NO: 2487587 - DNA, 25 bp, Homo sapien
ggaaaagcctgattcccacagcggg

SEQ ID NO: 2487588 - DNA, 25 bp, Homo sapien
cgtctggttactactgagtcgtggg

SEQ ID NO: 2487589 - DNA, 25 bp, Homo sapien
catctttttgggtggacaaagagca

SEQ ID NO: 2487590 - DNA, 25 bp, Homo sapien
caaagagcagctgccggacagcggc

SEQ ID NO: 2487591 - DNA, 25 bp, Homo sapien
tccgttcatgcagagttaccaaggt

SEQ ID NO: 2487592 - DNA, 25 bp, Homo sapien
tcagaacgtttcagtattgtggccg

SEQ ID NO: 2487593 - DNA, 25 bp, Homo sapien
gcttcctgtggctagataatcctgg

SEQ ID NO: 2487594 - DNA, 25 bp, Homo sapien
tgaagatatgcctcgacggacagca
